United States Patent Application Publication US 2007/0020637 A1 - sequence listing, part 3

SEQ ID NO: 1187 - DNA, 3475 bp, Homo sapiens
aatattccagaacatctccaaagccacccactcctttcctccctccaattttcaagtgtctctacgtagctaaaatcccaggcttcccttccctatcccaaatattgcctcataccaggcatcctctactccagggtttctccaccttggcactattgaaatttgggaccagataatcctgtctgggggagctgttctgtgtactacatgtttggcaacatctttggctcctgccaactagatgtctgtaccacatgcacacacacagagttgtaatgacaatggcaaaaaatgtctgctgacattgccaaatgtcccctcgggaggaaaactgcctctagttgagaaccactgctctatccctttccaccaactcagggacccaccaccctctctcaggcaccttcaggatctggtactgttctggagtggcccgttgcagacactgaaccaccagccagctgcatttgttgtcctggatgtcagtgccaattttgccggtcacactggggtccccaaagaggtcaaggtaatcatcctgggcagggagggggagggcagcaaaagaggaaggatgcggttcctgggcagaggaggagtgaagctggtgcctgttctctgctactgcctcctgccttcttacctgaatctgaaagaactcccccatctccagcaggatcttcttggcattggcgtgctccttctcgccatcaattcctgcctgcagggaaaggggggttaataagccaaaccccaggggtgccggcatcttcctggctgcttcctcccatggggtcttgccctactgcagccccaaatctttcctctctcttcagacatcttggcttccctgacctagacagtcctgactgatggtccaacctcaatcccacttatttttggctaggccttcctgggagtcataaaagagatgaatccattctagaggtgcacagcctgtctcttccctcacaaatgtcagtccccaagtcattctgatccaccttcctaatatttttgccacctccaacttctttcaagatgaaaaggaaatgtagagaagcaaggtcagggtagacacttaatcccactgactgtctttaatccactcttctccctctcaacctggatgatctccacactcctatccatactcagatacaggatatattgttcccctattatgtgctaagcactttcatatcccttgccttgcttaatctttacagtcctgtgaagtaggaattttatccccagctgaggaaagagactgagcgagaccgacttgctcaaggtcacacagtttttcaccaggggtagcagtgttcacgttttctgctctatgccttgctgtccaaaagcccccatcagcagagcagagaggggtgaggaggctcactcaccatgtacatggctgcagctataggaaggtagaaggagtagaaagctgtcttgtacttgacaatagatttgtacctgagtaaggggagaagagaaactcctcaggagggcaatgcacatcctgagccctccctcgctgtccagacatggttcgcgctgtccctcacctcccctcacctcttttcagtgaatctgacaagatccacattgccctggggggctgtgaggaggtccagggtctgcccaatctcagtctgataggaactctaagcaagacaaagacggtccatgagccaggctttctccagatatgcgaaaccctggtatcccaagcccaacatcccataccagctgacaactgggcagaatcagaaaggcaacagaaggggagaaagccccaaaacttaaggcccatattcatacacacagtcctttatcaccctttcttccaattacacaggacagagaagccctttcttgccactaccacaaccccacttcccaacacccttcctcgctttctttcccttccaggcacgctgcaatcctgtaccctgaaaccagctagatgagcatgtcctatagaggccaaggctaccatgggcaccctctgggcatcgggccctgtctgcaatacacctgcaggaagagctcgatcaggttcaggtaatagggctgctcccggcaatagagcttcagcaggcggtagatacatgcttccaggaggttagcatcattgatggcatccaaacccacgcccggctgtcatgacagacagaaaaacaagcaatcaatctctagtctcggttcatactaagagccatcaccccaacacctcaaccaggccatatataaccacctccctgtggcctgtccccatacccactgctattttcctgcccacattaccttctgataccagcagatctgtccccggcgggtaagggatgaatccatgatgtcatctgccaccaggaagaaagcttgcagctagaaagagtggaataagacctgcagggctcctcattactgttccttctatcagcaacagagctgctactttatatctgtatatagttttgcttttttttggtaggggacagagtctcactattatccagtgcagtggtgcaatcacagctcactgtagcctctaactcccaggctcaagtgatcctcccacttcagcttcctgagttcctgagaccataggcacataccccatgcctggctattttttttttttaatttattttttgtagagacagggtcccgctatgttgctcaggctggttttgaacccctgggttcaaatgatcctcctgcctcagcctcccaaattactgggattacaggcatgaggcatcacagccggccagagctgctgcctttgacagtccctatgagctgggaaagtcaggatggggagacagaagacttctgtgctatggagacttggaaagtgacataacatgtttggctcagactccccgcctataaaatggaactaaaacactcttgttttaggttaagaaactagaacagatctttgacatctctaatgagccctagattattcctggtgtcagggagattaggaaacaccttcatataccgtactctattcttgccaaaaacctcaatgaatgcttaaagtaagatctattcatgaaactgacttcacattacttcctaaataaaagaaggctattcccacattgcccccagcactgtgtttgaacaccctggtgactaggaacacagccttacctaaagcagctccttagcagtgcaggtctaataaggtggaactgaaatctgactttgacctatgagtctcagacatctttaaacatctttaaacattaactaagggcttactcttctgagtgcccatctgaaggtacctgaacgtgtcgggtttcccactagaccatgatctccttggaagcagggacagtaacttccccctcttagcatttgcagagcctagcacagcattaggcctggagtgagagtttcctaaacacttgtctgacagagaaattaataaaacactctaacattccctgtg

SEQ ID NO: 1188 - DNA, 3137 bp, Homo sapiens
aattaggctttggggataaaacgaggtgcggagagcgggctggggcatttctccccgagatggcgggtctgacggcggcggccccgcggcccggagtcctcctgctcctgctgtccatcctccacccctctcggcctggaggggtccctggggccattcctggtggagttcctggaggagtcttttatccagcgctggggcctggaggcaaacctcttaagccagttcccggagggcttgcgggtgctggccttggggcagggctcggcgccttccccgcagttacctttccgggggctctggtgcctggtggagtggctgacgctgctgcagcctataaagctgctaaggctggcgctgggcttggtggtgtcccaggagttggtggcttaggagtgtctgcagccccttctgtgccaggtgcggtggttcctcagcctggagccggagtgaagcctgggaaagtgccgggtgtggggctgccaggtgtatacccaggtggcgtgctcccaggagctcggttccccggtgtgggggtgctccctggagttcccactggagcaggagttaagcccaaggctccaggtgtaggtggagcttttgctggaatcccaggagttggaccctttgggggaccgcaacctggagtcccactggggtatcccatcaaggcccccaagctgcctggtggctatggactgccctacaccacagggaaactgccctatggctatgggcccggaggagtggctggtgcagcgggcaaggctggttacccaacagggacaggggttggcccccaggcagcagcagcagcggcagctaaagcagcagcaaagttcggtgctggagcagccggagtcctccctggtgttggaggggctggtgttcctggcgtgcctggggcaattcctggaattggaggcatcgcaggcgttgggactccagctgcagctgcagctgcagcagcagccgctaaggcagccaagtatggagctgctgcaggcttagtgcctggtgggccaggctttggcccgggagtagttggtgtcccaggagctggcgttccaggtgttggtgtcccaggagctgggattccagttgtcccaggtgctgggatcccaggtgctgcggttccaggggttgtgtcaccagaagcagctgctaaggcagctgcaaaggcagccaaatacggggccaggcccggagtcggagttggaggcattcctacttacggggttggagctgggggctttcccggctttggtgtcggagtcggaggtatccctggagtcgcaggtgtccctggtgtcggaggttcccggagtcggaggtgtcccgggagttggcatttcccccgaagctcaggcagcagctgccgccaaggctgccaagtacgggttagttcctggtgtcggcgtggctcctggagttggcgtggctcctggtgtcggtgtggctcctggagttggcttggctcctggagttggcgtggctcctggagttggtgtggctcctggcgttggcgtggctcccggcattggccctggtggagttgcagctgcagcaaaatccgctgccaaggtggctgccaaagcccagctccgagctgcagctgggcttggtgctggcatccctggacttggagttggtgtcggcgtccctggacttggagttggtgctggtgttcctggacttggagttggtgctggtgttcctggcttcggggcagtacctagagccctggctgccgctaaagcagccaaatatggagcagcagtgcctggggtccttggagggctcggggctctcggtggagtaggcatcccaggcggtgtggtgggagccggacccgccgccgccgctgccgcagccaaagctgctgccaaagccgcccagtttggcctagtgggagccgctgggctcggaggactcggagtcggagggcttggagttccaggtgttgggggccttggaggtatacctccagctgcagccgctaaagcagctaaatacggtgctgctggccttggaggtgtcctagggggtgccgggcagttcccacttggaggagtggcagcaagacctggcttcggattgtctcccattttcccaggtggggcctgcctggggaaagcttgtggccggaagagaaaatgagcttcctaggacccctgactcacgacctcatcaacgttggtgctactgcttggtggagaatgtaaaccctttgtaaccccatcccatgcccctccgactccccaccccaggagggaacgggcaggccgggcggccttgcagatccacagggcaaggaaacaagaggggagcggccaagtgccccgaccaggaggccccctacttcagaggcaagggccatgtggtcctggccccccaccccatcccttcccacctaggagctccccctccacacagcctccatctccaggggaacttggtgctacacgctggtgctcttatcttcctggggggagggaggagggaagggtggcccctcggggaaccccctacctggggctcctctaaagatggtgcagacacttcctgggcagtcccagctccccctgcccaccaggacccaccgttggctgccatccagttggtacccaagcacctgaagcctcaaagctggattcgctctagcatccctcctctcctgggtccacttggccgtctcctccccaccgatcgctgttccccacatctggggcgcttttgggttggaaaaccaccccacactgggaatagccaccttgcccttgtagaatccatccgcccatccgtccattcatccatcggtccgtccatccatgtccccagttgaccgcccggcaccactagctggctgggtgcacccaccatcaacctggttgacctgtcatggccgcctgtgccctgcctccacccccatcctacactcccccagggcgtgcggggctgtgcagactggggtgccaggcatctcctccccacccggggtgtccccacatgcagtactgtataccccccatccctccctcggtccactgaacttcagagcagttcccattcctgccccgcccatctttttgtgtctcgctgtgatagatcaataaatattttattttttgtcctgg

SEQ ID NO: 1189 - DNA, 2164 bp, Homo sapiens
cagtttctattattgctatttccaaagtcgggcaaatttgcagtgatctctgagggagaaataggggtaaggtggggcaagagacagcacatgcaaaggccctggggtgggatgtggaactgaaagtgaagagtatggcgtaaggcaggaccagagatggggactggggcctgagagccaggagaagtcagcattgtgggatggacggatcctctgtgacttctcctggccaccttgctcaaggggaggggggaagagagtcagaatatttaacagctggcctgacgtggatgctgccatgctggggcctgtactttttgccaggtgttagctgtttagtgctgggttgtggcgggaactcaaaggcactggggcgggggtgttgtgaggtgctcaggcctgacattctgggatagccatagtgggcacacacagccagtgccagccctgccccagcaccctctcttgggctccctgtaccatctccaaccccttgggcagacaccctcctgtcctccaaactcccccttccaggaagcccacccagattggacggggggagctggagggggcctccctgaggcgaggcatgctccctgcccacaggcaactccaacctggtctacgccatcatccgcaagcgcagcatcttccaccagctggccaacctgcccacggacccgcccaccattcacaaggccctgcagcggcgccggcggacacctgagcccttgtctcgcaccggctcccaggagggcacctccatggagggctcccgccccgctgcccctgcagagccaggcaccctcaagaccagtctggtggctactccaggcattgacaagctgaccgagaagtcccaggtgtcagaggatggcaccttgcggtccctggaacctgagccccagcagagcttggaggatggcagcccggctaagggggagcccagccaggcatggagggagcagcggcgaccgtccacctcatcagccagtgggcagtggagcccaacgccagagtgggtcctctcctggaagtcgaagctgccgctgcagaccatcatgaggctgctgcaggtgctggttccgcaggtggagaagatctgcatcgacaagggcctgacggatgagtctgagatcctgcggttcctgcagcatggcaccctggtggggctgctgcccgtgccccaccccatcctcatccgcaagtaccaggccaactcgggcactgccatgtggttccgcacctacatgtggggcgtcatctatctgaggaatgtggacccccctgtctggtacgacaccgacgtgaagctgtttgagatacagcgggtgtgaggatgaagccgacgaggggctcagtctaggggaaggcagggccttggtccctgaggcttcccccatccaccattctgagctttaaattaccacgatcagggcctggaacaggcagagtggccctgagtgtcatgccctagagacccctgtggccaggacaatgtgaactggctcagatccccctcaacccctaggctggactcacaggagccccatctctggggctatgcccccaccagagaccactgcccccaacactcggactccctctttaagacctggctcagtgctggcccctcagtgcccacccactcctgtgctacccagccccagaggcagaagccaatgggtcactgtgccctaaggggtttgaccagggaaccacgggctgtcccttgaggtgcctggacagggtaagggggtgcttccagcctcctaacccaaagccagctgttccaggctccaggggaaaaaggtgtggccaggctgctcctcgaggaggctgggagctggccgactgcaaaagccagactggggcacctcccgtatccttggggcatggtgtggggtggtgagggtctcctgctatattctcctggatccgtggaaatagcctggctccctcttacccagtaatgaggggcagggaagggaactgggaggcagccgtttagtcctccctgccctgcccactgcctggatggggcgatgccacccctcatccttcacccagctctggcctctgggtcccaccacccagccccccgtgtcagaacaatctttgctctgtacaatcggcctctttacaataaaacctcctgctccac

SEQ ID NO: 1190 - DNA, 2151 bp, Homo sapiens
ataaaaaaatgaaattggttactaaaacaccaaaaacatggctctctcaaactgacctaacaatggattttgacttacagaatattttttaaaaatttttgagcaagcatttaacatagggagattttctttggtaaaagccccagctgtggcaggctgccctgggcctgtaatccctgcggcaactatcagctgagccaagggccctgctccctgtgtcttccagattgccccacgccccaacattcctgttgaccctcgacactggagccaaatgtcaattgagaactgcagacaactgtgtcagtgcagggacatcaaaacccctgcacctgcctgctctactcacgtgacgtgccagctcccataagcttttgggtttgcaggtcctgatcaatactgcacaccgatgaccagcatccagatgaccagaacagatccccacacacctaccactaaaaccaatcgcctgtggtcattcagaaggcacttggagacctggcactggctcagggtcaggattatgaccatgactgtcactgcccagaagacagttcaggggggcatttgtcctcccattggcctacgtcatccccacagagcacaaaggactgtcagctgactacagcccaaagccccaaggcagtcacaagactcctcaacacacagagcccaacacacagcactctgtgcttcggactttgggcttctcactgcctggggctggcctcagcgtggaggtgcggaaaaacctaagtctggagtcagagagtctgaatgtgagttccaaccctgccacttactgagctctgtgaactcagagaagtcattcaaccccattgagcctctgcttcctttcttgaacaccagggattataaccccatctacctctcagcaaccttgcaagtatcgcgatgacacatgtgaaaagtaccttgtaaggtgtaaagtgtgaaaaagcacctctgtttgagtgcccatgctgtgccagacacttcacatacatcacctcattgatgaagcctcacaaaagccttgcaaggcacattatcatccccgttttactgagtaggaaactgagtgagagggattacagaaattgtccaggtcaccccgctggtaagtggaggatccaagtgtcaacaccaggtccggcaccagcttactttcttttctctatgtgtgaaatccaatgttatccagtctcagaatccagtgttcgctgcggctcttgtcatcccttcctgtggccttgttccctccgattgttcaaattgcttctcctttccaggaccctcttccatatttcccagcccctgaactgcctcaatggcccccggtgcttaaggccgattacttctggccatgccaaagtaggatttgcagtgccaaggagggactgctcagcacagcccagactcccattccctctgccagtgcccattctcccctgcaccatctgtcccctgcatggtcagggaaggggaccctctggacttttcgcacagaagatctaaaccactcaccactggccgatccacggagatggtattttcaacttccctgtgaggaatacagacatgtggggtctcagtgtcaccagaagcaagcaggaggcccgtggacggtttgctctggtgcacggcttcctggcagccaagccagaaccagcctctagagaacccctggaacaccccaaccccaggaaccagccccatgtcagcaccatccccgacagccaagcccaggcacgcaggttcttgttagtattgctcagagccccccaaaggcatgacccagccacctacccatggacctggtgcatcttccaaggacagagatcagagtggcaggggctatgagctcatctgtggtggccagggacaggatgtggctttcctggccatgctaacctaaaatttcaagcatccccaacacctcctatccctcttccctactttatttttgctccatatcacctctccaaatctaacatgctacatatgtttttcctatccattattgtctcatgttagaatattaagctccatgaaggcagggatttctttctgtttacttcactactctatccttagtgcctaggacagtgcctggaacatagtaggtgctcaataaatatcacagaatgg

SEQ ID NO: 1191 - DNA, 2195 bp, Homo sapiens
acttggatctctcaaatggtgcagtgactcggataccttccctagtgccattacagtactggagactgccagctagatccatcacacccaagtgaagctgtggaaaagcccttaaactccagagccagaaccagcaacctcagctccggaatacacttgcaaggcactggaagatctaaaattcctctttaaacaaaaagataagtaatgccccaccaacatcctttcacctcaaagtaaggtgatcccaatactagaaattttactggcaattgctctgattgttatcactattttaaccctaacttgtacaccaccaggagttccattggcagctcgttttgtgaccagtttctcttaggtcaccatgggcctgctcctgctggttctcattctcacgccttcactagcagcctaccgccatcctgatttcccgttattggaaaaagctcagcaactgctccaaagtacaggatccccttactccaccaattgctggttatgtactagctcttccactgaaacaccagggacagcttatccagcctcgcccagagaatggacaagcatagaggcggaattacatatttcctatcgatgggaccctaatctgaaaggactgatgaggcctgcaaatagtcttctttcaacagtaaagcaagatttccctgatatccgccagaaacctcccattttcggacccatctttactaatatcaacctaatgggaatagcccctatttgtgttatggccaaaaggaaaaatggaacaaatgtaggcactcttccaagtacagtctgtaatgttactttcactgtagattctaaccaacagacttaccaaacatacacccacaaccaattccgccatcaaccaagattccccaaacctccaaatattacttttcctcagggaactttgctagataaatccagccggttttgccagggacgcccaagctcatgcagtactcgaaacttctggttccggcctgctgattataaccaatgtctgcaaatttccaacctcagctctacagcggaatgggttctattggaccaaactcgaaattctcttttttgggaaaataaaaccaagggagctaaccagagccaaacaccctgcgtccaagtcttagcaggcatgactatagccaccagctacctgggcatatcagcagtctcagaattttttggaacctccctcacccccttatttcatttccatatctctacatgccttaaaactcaaggagccttttatatttgtggccagtcgattcaccaatgcctccccagtaactggactggaacttgtaccataggctatgtaaccccagacatcttcatagcccctggcaatctctctcttccaataccaatctatgggaattccccgttgcccagggtgaggagggcaatccatttcattccccttctcgcgggactcggcattctagctggtacgggaaccggaattgctggaatcacaaaagcttccctcacctatagccagctctcaaaggaaatagccaacaacattgacaccatggctaaagccttaacgaccatgcaagaacaaatcgactctttagcagccgtagtccttcaaaatcgtcgaggactagacatgttaacggcagcacagggaggaatttgtttggccttagatgaaaaatgttgcttttgggtaaatcaatcaggaaaagtacaagacaacatcagacaactcctaaatcaagcctccagtttacgggaacgagccactcagggttggttaaattgggaaggaacttggaaatggttctcttgggttcttccccttacaggcccacttgttagtctcctacttttgctcctttttggtccatgtctcctaaatctaataacccaatttgtctcctctcgccttcaggccataaagctccagacgaatctcagtgcaggacgccatcctcgcaatattcaagagtcacccttctaaggaggacccctagactgctcgctagtggaacacgacagaggcgaaatcctgccccgtctcccgtggacctggctggatatggtttttgccaatccacagagccatcctgccctgacagctagcaagaggccaagacccacagaacaaccactgcagtttggccctgcctgttcatgaatcacccttgctcaaataaactctctaaaatgct

SEQ ID NO: 1192 - DNA, 2049 bp, Homo sapiens
ctcctcctcccttcctccttttccttcctctctcttcctccttcccctgtccccctcaccttccctccctcacctctccttctgtgcttgcccccttccctccctccctccctcctccctgtctcctgggaggctcctttaccccgcctccccctccttctgctctccctcctgctgtgggggttgacagaacactgcatgtctgtccttcctccggcaatttcatcttcttgagcacagggactgcatcgcagttacctctcagcccttctccagggcgtcctaacatgacacactcccagggacagtgccccggcacgcacagagattgtcacacgtgtttgtccacagtgttccagacgagagctcagccttggaagaccggggcttggcctcgtccccggaggacagggaccagggcctcttcctgctacgcaaggacagtgagcgccgtgccatcctgtacaaaatcctctgggaggagcagaaccaggtggcttccaacctgcaggagtgtgtggcccagagttccgaagagttgcatctctcagttggacacatcaagcaaatcattgggatcctgagggacttcatccgctccccagagcaccgggtgatggcgaccacaatatcaaagctcaaggtggacctggactttgacagctcgtccatcagtcagattcacctggtgctgttcggatttcaggatgccgtaaataaaattttgaggaaccacttaattaggccccactggatgttcgcgatggacaacatcatccgccgagcggtgcaggccgcggtcaccattctcatcccagagctccgagcccactttgagcctacctgtgagactgaaggggtagataaggacatggatgaagcggaagagggctatcccccagccaccggacctggccaggaggcccagccccaccagcagcacctgagcctccagctgggtgagctcagacaggagaccaacagacttttggaacacctagttgaaaaagagagagagtaccagaatcttctgcggcaaactctagaacagaaaactcaagaattgtatcaccttcagttaaaattaaaatcgaattgtattacagagaacccagcaggcccctacgggcagagaacagataaagagcttataggctggttgcggctgcaaggagctgatgcaaagacaattgaaaagattgttgaagagggttatacactttcggatattcttaatgagatcactaaggaagatctaagataccttcgactacggggtggtctcctctgcagactctggagtgcggtctcccagtacagaagggctcaggaggcctcagaaaccaaagacaaggcttgataccaatcagctaagctgtggcagagtgtcccaccacgctacatgttttgttaaagcttctgttagtgtatacacgaattccgctgtgtttacatatttaaaaatgccattgttcaattaatagtttaagaacttgttttaaatactgtcctgagtttcttttgaaacctgttatttataaacatagaactgtgtgtattgtgaaaacagtgagccttggttttgacctcccggaatattaggaaattcacttgtagtcccagctatgcaggaggctgaggtgggaggattgcttgagcccaggaggtgtggaggctgcagtgagccatgatcacaccactgcactccagcctgggcaacagagcccgaccctgtctcaaaaaaagtacacccttcagcacttgctggaatggtgaaacaaacaaggggtatttaacaaacatggaagctgggacactgcctcagaactggtatggtacttcaatttgagaaacacaaaactgatacgaatgtgccttgtagttaatgtttgatatgaacagaaaatagcttcatatttatactgaatgtgtaagtagagaaaactaagttatgtggcctttgaaatgattacaaaattggaatgattacaaaagtcttattttaaaatggaactgtcctcttgcctgataataaatattgtatcttgt

SEQ ID NO: 1193 - DNA, 1973 bp, Homo sapiens
agtcgcgcagcctcgagggatggaggaggtgcgtgagggacacgcgctcggtggcgggatggaagccgatgggcccgcgagcctccaggagctgcctccctcgccacggtcgccttcaccgccgccgtcgccgccaccactgccctcgccgccgtcgctgccatcgcccgcagccccggaggcccccgagctccccgagccggcgcagccgtccgaggctcacgcccggcagctgctgctggaggagtgggggccgctgagcgggggcctggagctgccccagcgcctcacctggaagctgctcctgttgcggcggccgctctaccgcaacctgctgcgctcgcccaaccccgaaggcatcaacatttatgagccagcaccccctactggtcccacccagcgacccctggaaactctgggcaatttccgtggctggtacattagaactgaaaagctccagcagaaccaaagctggacagtgaagcagcagtgtgtggaccttctggccgagggcctgtgggaggagctgctggatgacgaacaaccagccattacggtcatggactggttcgaggacagccggctggatgcgtgcgtctatgagctgcatgtctggctgctggcggccgaccgccgcacggtcattgctcagcaccacgtggccccccgaacttctgggagaggaccccctggccgctgggtccaggtgtcccacgtattccgccattatggtcccggtgtgcgctttatccacttcctgcacaaggccaagaaccgcatggagcctggtgggctgcggcggacacgggtgaccgactcctccgtgtctgtgcagctccgggagtgactggctggctcctctgtcctgaccccacagcacctccctgacctttaggagccccaactcttagtcacctcctaggcctcttatttctccctggcccttggcttctcacttgatggacagcttcacacacccttaagcggtggactccagcattttcccagcactgtctgagccccatgagggcggagccactccttgtaaattcagtgcccgacagatgctctggcacagatgctttgtagatctctgttgagagaatgcatagacacctgtgcccaaggatgctgagggctggtctctgcttctttgaacttcactgaaactgaatgctcactgctgtgttgccagcaccacccagcccagggctgtgaacggagtgggtggcagcaaatgtgtgttgaaaggggaatgaagccattcacttcactcagttcctgtcccatttaaccgccccgatccttgatcttccattaccttcacatcccggggtccttctgaactgaccttgacctctgatctcttcacacatctccccttagcatctccacttacctacttttttttttttttttgagatggcatctcactctgtcacccaggctggagtgtagtgacacgatctcgactcactgcaatttccacctctcaggttcaagtggttctcctgcctcagcctctcaagtagctgggattacaggtgcacagcacctcccccgactaatttttatatttttagtagagacgggatttcgccatgttggccaggctggtctcaaactcctgacctcaagtgatctgcccaccttggcttcccaaagtgctgggattgcagacgtgagtcactgcgcccagccattccatgtctcttaagtctcagaatctcccctagctccctccaggtgtctgcagtggttgtcccctcaaagctgtcccacaccctcctccgaggaccctttgtgtatctcctccagctaccgcagagcccacaaacccaggcatctatcaaagtccctcattcatgagggtggtgaggacacagactgcgaccagaacagaaatatgaaaatgtgaatgacagcgtcccccgtgtgtggaatgtggggattaaaagcatttatcaacctct

SEQ ID NO: 1194 - DNA, 1935 bp, Homo sapiens
atctccgccggcgtccccaaggctgagagtgggcgcgtccgtcaggaggagtcgtctttgtgagcccgccccggcggggaggagctgcccggctcaggccccgcccacccggaggatcttggggctggtctgagtccgctcctgagacgtgaccacccgccccgcatggggccccaatcccagctgcttgatccggctcagccccgaggtgtttgcagcagctctttatgaaagtccagccatctgttacctgcgttgcttcctggggagggatagtccacctggaggcattcggagacccagtgattgtgctccgtggagcctgggctgtgccccgcgttgactgcctcatagataccctacgaaccccaaatgccagctgcatgagaaaagggactcaccttctggttccctgcctggaagaggaagagctggcattgcacaggagacggctggacatgtctgaggcactgccctgcccgggcaaggagacccccaccccaggctgcaggctgggggccctgtattgggcctgtgtccacaatgatcccacccagctccaagccatactggatggtggggtctccccagaggaggccacccaggtggacagcaatgggaggacaggcctcatggtcgcatgcttccacggcttccagagtgttgtggccctgctcagccactgtcctttccttgatgtgaaccagcaggacaaaggaggggacacggccctcatgttggctgcccaagcaggccacgtgcctctagtgagtctcctgctcaactactatgtgggcctggacctggaacgccgggaccagcgggggctcacggcgttaatgaaggctgccatgcggaaccgctgtgctgacctgacagcagtggaccctgttcggggcaagacggccctggaatgggcagtgctgaccgacagcttcgacaccgtgtggaggattcggcagctgctgaggcggccccaagtggagcagcttagccggcactacaagcccgagtggccggccttgtccgggctcgtggcccaggcccaggcccaggcccaggttgccccttcactcctagaacggctgcaggctaccttgagcctcccctttgccccgtctcctcaggaggggggtgttctggaccaccttgtgactgccacaaccagcctggccagtcccttcgtcaccactgcctgccacactctgtgccctgaccatccaccttcgctgggcacccgaagcaagtccgtgccagagctgttaggtactgccccgccccctcccctggttccccagtccccgccagggagtccccagaggtccccgtgggtcttcgtcccctaccagagccctcagggcatattgagcaagtgccttcagtggctacaacccagggatagcaccagccccaggccccaagtccccaagatcctcctctccaaggcatcctcatcctcccaccagtgccagccgaagcccagtccttcaggacaccaaagtctggcccttcctctctggcgataccaggagctcaggatagagaagaggaaacaggaggaggaggccagaatggcacagaaataggggaagatgggataggacaggctgggaacaggtaatcaggcccctcccagggcttctttcccctctggagtgcctccggcctccccatccacctctgcctaagtaaatctgctctcaacctatatatatacaaggtcattcattctagcattgtttgcaagagtgaaagagtggaaacacccgaagtgtccatcagtaagggacaggctagattgattacggatgtaattgctgtccatccatacagagcatactctacagtgtattctaaaataagactaaggaagctgtttatattctgatatgaaactaccatcaagatgtataaagtaaaaataactaaggagtg

SEQ ID NO: 1195 - DNA, 3242 bp, Homo sapiens
aaatcattatcatgacatggtagagttgtttatatttcttttccttttaggtgaaacaccattcaaagtcgtagtcaaatctctttcacctaaagagttggtccggatacatgtccctaaacctttggacaggaatgatggaacatttttgatgagatataggatgtatgaaactgtcgatgaaggcctgaagatagaggtcctttatggtgatgaacatgtggctcagtctccctatattttgaaaggaccagtgtaccatgagtactgtgagtgtccggaagatcctcaggcctggcagaagactctttcttgtccaaccaaggaaccacagattgcaaaagattttgcttcctttcccagcatcaatctccagcaaatgctaaaagaagtccccaaaaggtttggggatgagagaggtgccattgttcattacacgattctcaataaccatgtttaccggagatctttagggaaatacacagacttcaagatgttctctgatgagattttgttatcattgacaagaaaggtccttctcccagatttagaattttatgttaatcttggagattggcccttggagcatcgaaaagtcaatggaacccctagccccatacctatcatttcatggtgtggctctctggattcaagagatgttgtccttccaacgtatgacatcacccactccatgcttgaagccatgcggggtgttacaaatgatctcctctctattcagggaaatacagggccttcctggatcaataaaacagagagagctttcttcagaggtagagacagccgagaggagaggctccagttggtacagctgtccaaagaaaatcctcagctactagatgcaggaattacaggatatttctttttccaagagaaagaaaaggagcttggaaaagccaagttgatgggtttctttgatttctttaagtacaagtatcaagtaaatgtggatgggaccgtggctgcttacagatatccatatctcatgctgggcgacagtctggttttaaagcaggactcgccatattatgaacatttctacatggcactagaaccttggaagcattatgttccaattaaaagaaatctgagtgatttattagagaaagttaaatgggctaagagtttcactctgtcgcccaggctggaatgcagtggcacgatctccactcactgcaacctctgcctcccgggttcaaggaatttcgtgcctcagcctcctgagtagctgggattacaggaaaatgatgaagaagccaagaagattgcaaaagaaggacagttgatggctagggacctactacagccacacaggctttactgctactattaccaagtactgcagaaatatgccgagcgccagtccagcaaacccgaagtacgtgatggaatggaacttgttcctcagccagaagatagcacagccatctgccagtgccacaggaaaaagccttcaagagaagaactttgagtcagcccagaatcacactcctgtgtatcccggctacatctttaaggaaagattgaatctaagctgtgaaggacagtatagaagactgcaccaagtggactagttctcccggtggctttatatatgtagatggatatagcagtactggttgagtatccctcatctgaaatgcttaggaccaggagtgtttcaggcttcagattttttaagatttgggaatatttgcatgtacataatgaggtatcttggggatgagatccaagtctaaacacaaaattcatttatattttatatataccttgttcacataccctgaaggtaattttatataatatttttaataatttgtgcatgaaacaaagtttgtatacattgaactgtcagaaagcaaaggtgtcactatcttagcgacccaagtggtggtgtcagcactcaaaaagttttggattttggggtatttcagattttagatttttgtatgaggaatgttcaacctgtatttgaacaagcattaccaaatatcattgaatattaatatcttttgcgtaaaaactgctattatcagcatcatagtttctctaaaaagaaaacttggggatcatagccgatagagagacttgctaaaatataaatcagcctctgcaaaactgtttacatatttattggtttacatattttattggtttatttctatcccctgttcactttttctcttccacttccaattatgaagagaaaatatttgttcagggttgtccccccgccccccgtcactgcataatttctcctcttacaagctgcttttggctttcattaataacagcttccttttagaaggtctgataaggatatttaaggaagaagagaatgactctgttattaaaggtggcatggagactgtggagggaatattttttaaagcactactcatatcctttaaactaaattttgccaaagcccgagacaacattaaggagaaattgtaccttaagttagtaattccaaatctatctgagttgtatacccatcaaagacaatacagttattaacatagatgaaggtatgctataggcatcattcattatctctatattgaataggtgaaagataactgtagtcaggtgaaaggcattcattatttttaagctgaaaaggggatccttgaaaacactgaaaacctctacaacaatcttcaggaagcctgctatcttgggattcactaataataggccaagaacaaaggcaagcatccattcctcactccaccacttttctatttcagtgggtgtcgttgctacgatgaagactttggaaatttcctttctcttttaggacagggtcaggatttaggactcatagcctgaaagctcattacatactccttgtaaccatcagtccaaggttcagttcactaaagtgcatgttctaaaacaagagctatcctcattccaaattttaaaatatgtactctggtcggttgcagtggctcacgcctgtaatcccagcactttggcaggccgagatgggcggatcttttgaggtcaggagtttgagaccagcctggccaacatggtgaaaccccgtctctactaaaaatacaaaaattagccaggcatggtggcatttgcctgtaatcccagctactcggggggctgaggcaggagaatcacttgaacctgggaggcagaggttgcagtgagctgagattacaccactgcactccagcctgggtgacagagtgagactccatctc

SEQ ID NO: 1196 - DNA, 3468 bp, Homo sapiens
ttttgtggtgtccacacgtttcctttgtgttctggttctgcatgggaagagccctgcagcttggggctttccatccatctctttctttttcccttatttttggttggtgactcttggcggctctctgtggggacactgatgctctccaagaaggtacttcttgaatcagtgacccttattgtctttttctgatgagggtctaaggttttccttcagtgaatcagtgctgtcttatctggaacattttagggaactggaatttgcatttatccccttggctttatattattgaaaaagaacttaggtcttttgctgccaaaacagttgttaccaaaccatatttgatcacgagagtagtggaacaatttattatgaagggggaaaactcagcacctttctttccctggttgtcctggcttttgtgggcttgcgtccagggcacccagctgggctctgggctctttctctccccagataaggtctcctcctgggtgcattcgggaagttatttggagggttcttccagatttttgaatgcccttacattttcgagccctcacggcaggcttaggagaggatttacctcttttattgctgagctagggaggggtccagcctccacagggaggtgacacggcgtggccccagcctgcccattcaggaactggacccacttcagggtcagaagaggacaactgaggtctcatctgcaaagtcccggggccttgctgaggcaggagagcctgttgcaggtctgacccttcacatgttgcttgtagggagtgggctacccacccctcaccaccccgagaacagcctgagcccggggcgcatctctgtctctgtgtggagagacactgccgcttctgttccctgggaagccagtgccattttcagcatttagggggttcctggtgagggctcaggagagatctgggcccagagccagccacactccttgtgttgagtaagactcatcccatctctgatctgtgacacgaggagaggagcccctcactcacccgccacagctcagggtggtgatgcggcaccattggagtgagcggccccgggggactggggaggctctggccggcgtagtccttgccgccagccttcacagcgggttctctgagggtctttatgcacaggggctctgtcacttagctctggccccccctctgcccctgaggcatgactttgggcaacgcagcatccaagcctcagtttccccatctctaagatgagttgacaacagagcctctctggtgggtgccgtgggccacagggtgcccagaacgcagtccccgtgcctctgtttctgtgctgcctccactcaccgtcagccttcattcggagtaggtgcgcatgctgtgcaaagcccttccacacacctgatctcagttgctctctgtgcaaaagtcagagaggctttccctgcatttcctgtttgaacagtgtcctggcctccatctttagctttgacagtgtttaccatgggggtgctgagggtgagttcttgtgtatgtgcacatctttctggtggagtggaggcctcttgaggacaggaaccttgtgggtctacctccttttcttcggagctcagctgactgcctggcaaacagcagatgcttttggtgtctggtgagtgaatggggggtggggagctggtcctgtgaccctggtgaggcgggacaaacttgtcttcctcacacccatcttacttcctcttatgaggaaacccagagagatgaggggtcttgcccaaggaaggggtgtccatagtcagctctgccttctgctcacccagaataaagacctggggaccccgcgagggtcatggccaagtggaatggactcctggcatttgagggcttcccgactgcagccctcaggcagccatggctgtcccaagtccagcgggcctttgctcgggtcatggctgggatgtctggcccttcctgacaggaggctgctgggctcctgtctacttggggacgcctcatgcaggagctggtgtgggggtgggcaggggggcggtggcttcttcctttctctttccctttcctctaccttttcccctctccccagaggaaatggtagcaggatttcttttaagaggatgctgctgtattttgccagcgggtggaaggtggcggtattagctcccgtgagctgcacgtggacccctgtgtgaagcgtagcagggcacagagcaggcgagacgtttgcatctcacagcgggagggccggcgacatcacatgaagtgacaggcaggcccttggaagccggtgcttagatccttaattagttcacacgtcgactgaattttcaagtgaatgaattttaattacatctcaggttaaaaaaaaaaaaaggcgccagtgatcgaggactcgtcactgggctctgttgctcctgaagtttcctagcccacaacacaccaacactgccaagggctcttctggattcaaggtgaaacacatgtgccataaatcttggagctctgaatgtttggaaagggcccgactgtgagaagaagtaacacaccgtcccgtgcagatggctggctctgaggaggagttcatgggagcttggggacactcttgcctctagttctaggaagctgggccacttctgaagtaatggcaatatcaataaagtaatggtctttatcatagaataacgtgataaaatatatagagaagtaaaaaagtataaataaaagtaaaatcatcataaaacatagtagctaggcacttctgaagctgtgtgtgcactgattcattcacccagtgactcacagccttatagcctaggtgctggcacccctactttcattcgaggaagtgaactcaggttcaggaatttacccagcatcccccagatggggtggcaggagccacatcttccctgaaaactttcttgcccagggtgtctgctgggatttaggaatggtctatgcctgcatttttatcctggtcaggctgaccctgaaccctgagagatactctttttttatattcccatctggaatatgcactgccggggtcagtggggtgtctggagggccctctcgaggccagcttggatgtgacacgtgtcgtgggtcccaacggggcccagtagagtgtgcagcgttagaaaaatgaacatgctcggctgggcgcggtggctcacgcctgtgatcctagcactttgggaggccaagatgggtggatcatgaggtcaggagatcaagaccatcctggctaacatgagaccatcctggtgaaaccccatctctactaaaaatacaaaaaattagctgggcgtggtggcaggtgcctatggtcccagctactcaggaggctgaggtaggagaatggtgtgaacctgggagggggagcttgcagtaagcggagattgcaccactgcactccagcctgggtgacagagtgcgactctgtctcaaaaaaaaaaaaaag

SEQ ID NO: 1197 - DNA, 3274 bp, Homo sapiens
agctgacctggggagtcgcgattcgtgccggccggtcctggttctccggtcccgccgctcccgcagcagccatgtcgttcttcccggagctttactttaacgtggacaatggctacttggagggactggtgcgcggcctgaaggccgtggtgctcagccaggccgactacctcaacctggtgcagtgcgagacgctagagggaatggatggtgccacaagggatgccagagggacttgtccctgagtgatgacagtccagtgacagtgctgatggtccatgcctgtcaggtgagcagtgagtgttcaggctgcctccgaggaggggaagaaggcatgccctggcttctcccacccctctgccaccacctgccagctcatctgggactgaaatctgtctggacagctgagtctgtatctgaaaagcctgtcctgggtcaagagctggggaatagagcggtaaaggaggtgcagagtggggaggagaggaggaaactagatctggggacagatagaatcccccaggcctgctccacatcccagcccctctatgccccaactctgggactctggacaggtttcatgttctgtctgatttctgttcctgaggctgagatgggcatggttgagaggtccagcacacaggttgctcctggcatggggatgagtacaccgtacagcccatgtgtttccagttagagtagatctgggttgcccgcttcatgttgggatgaggggactcccccctggccagtcccaggtgttggatagagagtcatggaggcctagggaggggaaaggtgcttggcagtggggaagttgctgagctagggagagaagccatgtggagcaaagtgggaggctggagcagaggaagtttcatgctgcttgagagctcatgaggatcctgagtaggaggtgacagctcactcggggaagcctcccagcagcttgtgccagggcctggaagagcagtgtgtacacagatgcccgggtgaggcccagcccctgatgctttggaggggagggatcaggaggccagaccggggtccagactcccagtcccagggaatagcggagtcactggcaggagtgccaccacccaaaggactgagtttttctctggagctcaccctgtacatctggcccggcctctaggcccaggctatagctgaaaaggaagaagtctcctggcctgagaagggctcttggctggctgcagtggctgtgtgaataagcagacaggtttggtctggcagctgccgcaccagtgcctgggtctgacccagagaactgtattccagtcttggctcccagctgccatccgctctgcagcttcccctagtggagatttcagcacttgctgggcctgggccagaaccccaagtatataaaatcagagcatgaacatgactttgataaattaagaaggcttcattttaataccacagtaagaggaaccagttaatattcttaccatttcacatccacaaaaaccacatcaggggcattaacaatctctcagttttgtacaaataaaccatgtttctcttaaaaagacttgcacacgtggttcacgcctgtaatcgcagcactttgggaggctgaggcaggtggaggctgaggtcaggagttcgagaccagcctggccaacatagtgaaaccccgtctctactaaaaataaaaaaaaattagccaggcatggtggcatgcacctttagtcccagctactcgggaggctgaggcaggagaatcgtttaaacccgggaggcagaggttgcagtgagccgagattgtgccactgcactccagcctgggcaacagagcaagattccatctcagaaaaaaaaaaaaaaaaggcttgcatacttgcccaagctcaaggatattaaaatctagcacatgaaacccatttctagaggtagaaatacaggcaatatattatttcagcaatgaccatcaattacagttaagaacagttaacaaccaaatgggtaatgaaataatgcaaccacccaagtttactgagcaaagcatcttttctcacccatgccttactctaggagtagctggggcttggttagatgtggtgaggatgtgggagaagagatctcagggcaagggttcattgcagacggcctggggtaaggatgtaggagagtgcacatttcccaggcaaaaaggcattggggtccacagagcagaacaggggctggtggcttctgcctgccctgcctgactttctcttctatgcccttttgggtggccatgggagaaaagtagtggtcaattgcagagtaatggtgaaggcagcaggtgtctcctgcaggcctcaggaggttgaagttcactccatgagtgcccaggagccacagaggtcatgagtgtggcctgctaccagccccccagagatgcaggtggaaggcatctattccagagacctgctgtattccaacatgctgtgttccatctctcctttagctcgcctgactccaggttggggctgtcttctcctgatggagtacagcaggaggggcatcacaggggtcccctaagcttgtagagggtttatgtgccccacttcccttcttctctaaacaacccaggctagcatggtctcctgagcctcaaagacatctggggaggccgtggccaggacagcgtgtggaggtggtcccaagtgcagctccgcctttgatcccctgggcagcctccccaggggacagagaggcatgtagtcttccaagccagcctccgccaccatgtgcctgggtatcttctcagccactgtccttggtactgtccccagggagcttctgtgtcctgtatcaggtgggataagtactgctaagaagaataacacaagggacagtgatgggctgctggagaagcctctgaagagggggcgtgtgaggaaagatctgaaggaagagggggagacagctccactttcaggccaggggacggggaagggccctgaggtggggacatggctggggatagtgagcatgggggaatggcaggacctaagtcagagaggttaagcggggatggtgggaccaccacatgagggctctggaagggactctttctgagtaaagtaggagtagcggagagtttaaggccaatgaatggcatggtctgccttgtgttttaaaaagatcactctggctggcacatgcctgtagtcccagccacttgggaggctgaggccagaggatcacttgagactaggagttcaagttcagcctgggaacctagcaagatgccatctct

SEQ ID NO: 1198 - DNA, 2640 bp, Homo sapiens
atcggcatggctcctccctccatggggcttaagactgggcctgcaggggtcatgcagtgttcctgggagctggtggtttgggggtttggggactacctggccctccatgagcctgttgtggctgtgcaccctgtggaagctggtcttcctccctggggcactcagtcctggatttctccatcccataaggatttggctgtggctgaagcacctgtcctctccccacatgcctctcaactccacctgcagagggcttctttgtgcgacatggaaggaaacagagccattctcagtgtggcctgggaaggggtggggcccacgactgtccagtggccagcgcatcagtgtctgcagatgctgtgtcatgcggccaccccagtagctgattttcttgccacatgctctaggtggtggtctggagggagagggtgctgatttgtctgtgtagcttccagggggccatggcagagtgccagggagggagtccaagccaggtgtggaggagctcagctcctgcctccttccccagaggccaactggtcttgccctcttcctccagggactctgtaagctcggttcggctggagggactgacttcagcatgaagcagtttgctgaaggctccactctcaaactggctaagcagtgtcgaaagtggctgtgcaatgaccagatcgacgcaggcactcggcgctgggcagtggagggcctggcttacctgacctttgatgccgacgtgaaggaagagtttgtggaggatgcggctgctctgaaagctctgttccagctcagcagggtagctctgtggttcctgccgtcagcctggggacactgtctaggattagaccttaccaggctttctcggcagggcttggccaatggggtcttttgaccccagggaagagggctggtggctgagtggctgctctgtgtagtgtgggcatgttggccagcaccagtggtgttagcaaggacgttcttcttggaggagctggggaggtcaagtttgtaagctcccaaagtctggggcctgggagtttcctgaattcatcctgtacccaagggtcccagctgagggtggaattgggggcctgggcctgggcagcatttatctgagtactgctctgccccgggatgcccatgtgaattcctctgtgtcctggcagttggaggagaggtcagtgctctttgcggtggcctcagcgctggtgaactgcaccaacagctatgactacgaggagcccgaccccaagatggtggagctggccaagtatgccaagcagcatgtgcccgagcagcaccccaaggacaagccaagcttcgtgcgggctcgggtgaagaagctgctggcagcgggtgtggtgtcggccatggtgtgcatggtgaagacggagagccctgtgctgaccagttcctgcagagagctgctctccagggtcttcttggctttagtggaagaggtagaggaccgaggcactgtggttgcccagggaggcggcagggcgctgatcccgctggccctggaaggcacggacgtggggcagacaaaggcagcccaggcccttgccaagctcaccatcacctccaacccggagatgaccttccctggcgagcggatctatgaggtggtccggcccctcgtctccctgttgcacctcaactgctcaggcctgcagaacttcgaggcgctcatggccctaacaaacctggctgggatcagcgagaggctccggcagaagatcctgaaggagaaggctgtgcccatgatagaaggctacatgtttgaggagcatgagatgatccgccgggcagccacggagtgcatgtgtaacttggccatgagcaaggaggtgcaggacctcttcgaagcccagggcaatgaccgactgaagctgctggtgctgtacagtggagaggatgatgagctgctacagcgggcagctgccgggggcttggccatgcttacctccatgcggcccacgctctgcagccgcattccccaagtgaccacacactggctggagatcctgcaggccctgcttctgagctccaaccaggagctgcagcaccggggtgctgtggtggtgctgaacatggtggaggcctcgagggagattgccagcaccctgatggagagtgagatgatggagatcttgtcagtgctagctaagggtgaccacagccctgtcacaagggctgctgcagcctgcctggacaaagcagtggaatatgggcttatccaacccaaccaagatggagagtgagggggttgtccctgggcccaaggctcatgcacacgctacctattgtggcacggagagtaaggacggaagcagctttggctggtggtggctggcatgcccaatactcttgcccatcctcgcttgctgccctaggatgtcctctgttctgagtcagcggccacgttcagtcacacagccctgcttggccagcactgcctgcagcctcactcagaggggccctttttctgtactactgtagtcagctgggaatggggaaggtgcatcccaacacagcctgtggatcctggggcatctggaagggcgcacacatcagcagcctcaccagctgtgagcctgctatcaggcctgcccctccaataaaagtgtgtagaactcc

SEQ ID NO: 1199 - DNA, 3409 bp, Homo sapiens
gactacccctggcaaccgcgaagctctgcggtcccgcggtcgggctacgggtttgagcaaagctcctctcttcccttcacttccctccggactggtttcttcttccttcccccttcccccaacttccctccaccccttccaatcatggcgaacgggactgcggacgttcggaagctcttcatcttcactactacccagaattacttcgggttgatgtctgaactctgggatcagccactgttgtgcaactgtcttgaaatcaacaacttcttggatgacggcaaccagatgctcctcagggtgcagcgatccgacgcaggaatctccttttccaacacgattgagtttggtgacacaaaagataaagtgctggtgtttttcaagctgcgacctgaagtaattactgatgagaatctacatgataacattcttgtttcatctatgttagagtcacctattagttctctttaccaagcagtacggcaagtattcgcaccaatgttgttaaaggatcaggaatggagcagaaactttgatcccaaacttcagaatcttttgagtgaactagaagctgggttgggtatagttctacgaagatcagacactaacttaacaaaattgaaatttaaggaagatgacacacgaggtatccttacaccaagcgatgagttccagttttggatagaacaagctcaccgtggaaataaacagattagtaaagaaagagccaattattttaaagaattatttgaaacaattgcaagagagttttataacttggacagtctatccttactagaagttgttgacttggtggagactactcaggatgttgtagatgatgtgtggagacaaacagaacatgatcattatcctgagtcacgaatgttgcatctcttagacatcataggtggttcatttggaaggtttgttcagaaaaagttgggaactttgaacctgtgggaagatccttattatcttgtgaaagaaagtctgaaagctggtatttcaatttgtgaacagtgggtgatagtctgtaatcatctaacaggtcaggtgtggcagcgctatgttcctcatccatggaaaaatgaaaaatattttccagaaacacttgacaaacttggcaaacgccttgaagaggtcttggctattagaacaattcatgagaagtttctctattttctacctgccagtgaagagaaaatcatatgcctcactcgagtatttgaaccttttactggcctgaatcctgtgcaatataatccatatactgagcccttgtggaaagctgcggtgtctcaatatgaaaagattattgcacctgcggaacaaaaaatagcaggaaaattgaaaaattatatttcagaaattcaagacagtccacagcagcttcttcaagcattcctgaaatataaagagttggtaaagcgtccaactataagcaaagaattgatgttagaaagagaaactttactggcaagacttgtggactcaattaaagattttcgattagactttgagaatcggtgccgaggaattcctggtgatgcatctggaccactttctggcaaaaatctttcagaagttgtcaacagtatagtttgggttcgccagttggaattgaaggtagatgatactatcaagattgcagaggctcttttatctgacttgccaggatttcgatgtttccatcaaagtgccaaagatctcttagaccagcttaaactatatgaacaggaacaatttgatgattggtccagggatattcaatcaggtttatctgattccagatctggtttgtgtattgaggctagtagtcgaattatggaattggattctaatgatggattactaaaagtgcattattcagatcgtttggtgattcttctgagagaagttcgtcagctctctgcacttggctttgttattcctgccaaaatacagcaagttgcaaacattgcacagaaattctgcaagcaagcaattattcttaaacaagtggcacatttttataattctattgatcaacaaatgattcaaagtcagaggccaatgatgttacaatctgccttagcatttgaacagataattaagaattcaaaagcaggaagtggagggaaatcacagataacttgggataatcctaaagaattagaaggctatatccaaaaactccaaaatgctgctgaacggcttgccactgaaaatagaaaactgagaaaatggcacactacattttgtgaaaaggtggttgttcttatgaatattgatctgcttcggcagcaacagcgctggaaagatggattacaagaattgagaactggcttagcaactgtagaagcacagggattccaagcaagtgacatgcatgcatggaaacaacactggaatcatcaactgtacaaagctctggagcatcagtaccagatgggcttagaagcacttaatgagaatttgccagaaataaatatagacttaacttacaaacagggacgattacaattcaggcccccttttgaagaaatccgggctaaatattatagagaaatgaagagattcatcggcattccaaatcagtttaagggagtgggtgaggcaggagatgaatctattttttctattatgattgatagaaatgcaagtggatttttgacgattttcagcaaagcagaagatctgtttagaagattgtcagctgttttacaccaacataaggaatggattgtaattgggcaagttgatatggaagctctggtggaaaagcatctttttactgtacatgattgggagaaaaattttaaagcattaaaaataaaggggaaagaagtagaacgacttccaagtgctgtcaaggtagattgtttaaatattaattgcaaccctgtgaagactgtgattgatgatctcatccagaagttatttgatctgcttgttctttctttgaagaagtccatacaggctcatttacatgaaattgatacatttgttactgaggctatggaagtcttaacaattatgccccagtctgtggaagaaattggtgatgcaaatctacaatatagtaagttacaagaacggaagccagagattttgcccttatttcaagaagctgaagacaaaaacagacttttacgaactgtggctggtggaggtttagaaacaattagtaatttgaaagccaagtgggataaatttgagttaatgatggaaagtcaccaacttatgattaaagaccagattgaagtgatgaaaggaaatgtgaaatcacgtcttcagatctattatcaagaactggaaaaatttaaagctcgttgggaccaactaaagcctggtgatgatgttattgaaactggccaacataatactcttgataaaagtgcaaagttaataaaagagaaaaaaattg

SEQ ID NO: 1200 - DNA, 3090 bp, Homo sapiens
agctgccggctccggcttccacttggtcggttgcgcgggagactatggcgtcctcctcggtcccaccagccacggtatcggcggcgacagcaggccccggcccaggtttcggcttcgcctccaagaccaagaagaagcatttcgtgcagcagaaggtgaaggtgttccgggcggccgacccgctggtggatcaatgagctcagccaggtgcctcccccggtgatgctgctgccagatgactttaaggccagctccaagatcaaggtcaacaatcaccttttccacagggaaaatctgcccagtcatttcaagttcaaggagtattgtccccaggtcttcaggaacctccgtgatcgatttggcattgatgaccaagattacttggtgacccttacccgaaacccccccagcgaaagtgaaggcagtgatggtcgcttccttatctcctacgatcggactctggtcatcaaagaagtatccagtgaggacattgctgacatgcatagcaacctctccaactatcaccagtacattgtgaagtgccatggcaacacgcttctgccccagttcctggggatgtaccgagtcagtgtggacaacgaagacagctacatgcttgtgatgcgcaatatgtttagccaccgtcttcctgtgcacaggaagtatgacctcaagggttccctagtgtcccgggaagccagcgataaggaaaaggttaaagaattgcccacccttaaggatatggactttctcaacaagaaccagaaagtatatattggtgaagaggagaagaaaatatttctggagaagctgaagagagatgtggagtttctagtgcagctgaagatcatggactacagccttctgctaggcatccacgacatcattcggggctctgaaccagaggaggaagcgcccgtgcgggaggatgagtcagaggtggatggggactgcagcctgactggacctcctgctctggtgggctcctatggcacctccccagagggtatcggaggctacatccattcccatcggcccctgggcccaggagagtttgagtccttcattgatgtctatgccatccggagtgctgaaggagccccccagaaggaggtctacttcatgggcctcattgatatccttacacagtatgatgccaagaagaaagcagctcatgcagccaaaactgtcaagcatggggctggggcagagatctctactgtccatccggagcagtatgctaagcgattcctggattttattaccaacatctttgcctaagagactgcctggttctctctgatgttcaaggtggtggggttctgagacacttgggggaattgtggggatattctagccaccagttctcttcttcctttgctaaattcaggctgcaggctccttccatccagataactccatcctgtcgagtaggctctttctgaccctcagaaatacattgtcctttttcctctttgcccatttttcttccctctcttcctccccatgagaagtctgcttgtagtattagaatgttattgttgactctctcccaagtgccttgatctttgtaatatctcctgttgtttctatgatataggagctaggggaagggggttgtttgccttcttcaggacctgactggacagatggacctggctcaagcaactactctggatgcactttgctgtgtgggatgaactaaaagtgtctgaattttgctgataactttataaaactcactatggcatgcttccctcctggtgggccctaggatggatgacactcaagatactacagatgtgggtgcaggcatgcacacacacgatggaatatggccattcctacacaggtggggtagagagtgggtcagcagcctggcacctcacagaggtgggacctaagaggactcatgattatgcagagaattggattgggtctctgtcatagattgagtaatctcttcccttacctcaattccatctccacccatctctacatctgggcacagcaacccagagatggccaaaagcattcaagcctgggggaagatgtttgactattgctgctcttcaccagaacctcacacctctcctgggactggaacccttcagtgggtgtgtggccagttttggaggctggaatgatgggccagggtgtaggattcattctccatgtaaagtttcctttcatcctgcctagccatccccaaggtttatttccagaagaaaggaatatctctacttggatcaattctggtcatttcaagaggatggaggcctcaagtgtgggaacttcccctactccctggatgtgtgtacctagcacacttccttctcccacccctttttccagttggatttgtttttctgttctcttctgtcctgtcttatactgcaactgtgtctcctaggggacagatggccttctttgtcatcttcactctccacccccagagaggagtcagagccataactcaatcactcagcccctccaaagatagttgatgtgtgataatctcataatgttgagaaccctgatgagatacattgtcttcctctccctacaatgcctctggggccaaggcacccattcttcttgctatcctccatcccccttgaggcttccactttttttttttttagacataaagctgggcatcagcaactggcctgtggtgatgcaaagctgctttgctctgtatctggctggactgatctgtctcacaagaagccatgaggccatagggagaagctccctctccccttcatcttctgctccaaaggtggtagcaagaggagtacccagttaggggttggagcccccatataacatcttcctgtcagaagactgatggatctttttcattccaaccatctccctttcccccgatgaatgcaataaaactctgtgacaccagcaaccattgctctttagaaatgggttttctgatcatatggctgatgtgttatgggcagtatggatgtcttcatttgttgcttctgtttttcatcttttttgttttattaataaaaatttatgtatttgctcctgttactataataatacagggaataaattattcaatcc

SEQ ID NO: 1201 - DNA, 2976 bp, Homo sapiens
aagttgagattcggcatctgtgcaccacacacatcacacctgctggtgacgaggccattacctttttgaagacttcggcacggagtctgttactttggtagaagactctcatgactacctgcacgccaccatcttccccggcctggcgcaattgccctcaggatatgtacagcatgacccacagggatttcacttcatggaatgcaaaaccaacctgcatgagctttgtttgaaaacaaaacaaaacaaaacaaaaacaaaacaaaacaaaacagagaaatcctatctataaaattactcttaatggaaattctgcctgtataaaattaaagtggcagccatctgtggaatcccactgctgaatgaccgttgcacatagcagcttgtttcagaaccctgtcagatgactttgtgctgggcaccaagtggcattgttacagatgccggggtacacacacggagacagctccaggcaaggtgcattgttaggcaagcttcctgtgaggcaaagctagccacagatggaagcctgcacccaaccctactgcccagaggaaccccaggaccctcagccatcccttcctggaattgctcaacatagaggatgcagctgggcggcaggtagcttggggcaagttcttagccctgcttgtccagtccactgcctggaaacagacttggtgctattacggagtgcaaccagccctttggattgcgtgggagctgggtgaggcctgtgactgctggctgtccccacttccctgacaacctgcatgactcagcagagggagccataatcctcctagaaaaggaaatttgaacatagagacacagacgcagggaggatggccatgtggagacagaggcagagactgtagtgccgcatctacaaaccaaggaacatcaaggattgcaggaagccgccaggagcagggagggaggctggacacgggattgaccactgagcctctagaaagtaaccaaccctgtggaaacctcggttttgacttctggcctctagaactgcaagaaatctccacaagccacctgcagcttaccactcagaggatggggaatcgtgaactgcttcttgctggtgcggatgggaaggaggctctgcttctgcctcaggtcctccttccgctgggctttcctctgctggaccatgtgttcaagcttcttcagccgttcttgtgagcgagaaatgaactgaggcttacgaacttccagtgcttcctatgcaaagcaaagaaaatacgtcatttttaagagcagtgacacagaaaggcaacgcatctgtctgatgcagccaagaagccgatggcaagcacaaaactcagagaccaaaagccacggtgcaaaagtacgtcacgcttttcttgcacatctttgtgtaaagaaggtaacaggcatgttgacaacacaggtcctgggggtcaggcctggccagcgccgaggcccctgctgcagcaggattgaccggcaactggcatcaaagctgggagcgcagaggcaacgtctgcccattcatctttctaccctgctgagtcatttgttcccaaaagacgatccaaaagccctacattctatattccaaagagacatgggagtggagggcatggaggtgctgagtcacttgcttctgttgcacttggaagccccaagaagcacagacacagatcatccactcagcgtgaaaaacgtgctctttcaggaggcaccacaactgcggctgaaggaaacagctcctcctcctgggtagaaagagctgggaggaaacctttgcctatacagaaagttctgtgagctccacaaaccatgtcagaagtccctatgtctccactcccacctccatgcactaagccacccacacaagtctcctgaacaagactaactgccattctgctccatcccagatgccgggctaggtgcttgatgtgtattcatcacctcgtggagtcccacaactgttcaggaaggcaggaatatttctttccatttgacagatgcaaaaactgaggctcatggtagtttggtagatcacatggtaacaccctatccacgggaaccccattcttttcctgcactgccttttatggtcttaacttcctattccttgagtgtctctgctcaagttgtccccagcctgaagtaccacccatagccattggctcaagttccatctaccccaggaatccctgttgaaatgccctgttgagccagagcatggtgcttcaccgatgggcttgagcaacagtgagtcatatgtttacctccgtgctaggctgtgagctccaggaagtcatgggccatgtctcattgacaatgcatcactcacacagtaggagtcctgcatgtatatgctcagcaaaggctcactgggcatgctgccatgactgaaactttcctctgcccccttcctcttccttgggagctcagagtgcccaggcggaagaagtgtgggctcagtctgtatcacatatgtgtccctggcagctacactgggggagaagtcttcttggccagctccccacatggtgccagccaccaggaacagagaaccacaaggtacaagtcactggatgtgctgaagcttcaagagagttccatgcctaaagagataacccctaggaacagcctggtggctcaggtttagctgctgccttggctgtccaccccaccaagaatggccttagagactttgggggcaccatgaatgcctcacccaggtcccaccgaggccccctgggtacaggagccagccaatggagccatctccacaactgcaactgcagggagatttgcaaccttattaagtgccttccaagaaggtgtggctagctgtgcaatacagttagcagaggattcctctgaggttgtttgccttcctaatttttatttctctgtatttttttaaactttataaaatgtgtgcatactacattttataaaacaattgggaaaagatgccaaact

SEQ ID NO: 1202 - DNA, 2409 bp, Homo sapiens
cagaaaaaacacagatagagggcgatactgattaattttgggttgtccctggtgatcaggtatgaacttgggtccccatcaccctcccaagtggccctgggcatatgtggtcagcacccagttagaaagacttgtttcctagtacgtcttctctcatggtctctcatggatgcactatacttcatagtacccaaaacacttccaagttcatagtgggcctctgtttctataatttgactatgtcgagcatacacttactgcattatacaaattggaaaaactgagaccaggagaggaggaaccagaatctcttgttgcctaagagattttctactgctcttgatggctgagagcatcctctactgcaatgatgaggtaagcctctcctagaccagggggcccaggcaacagaactcccaatagtggatttcagctaacatgtccctgttagcatcattctcactggcctctcctttacctcttaccctctctcctccagaagggtgagaatagagggggtttctttctctctcatgcttccctccaggccaggagggctgggggcagaagggcagaggcactgcagctgtggaacaggagcagacaagggcataatattcagaggaacctacagtccatcctcatacttcctggtcattgtccccatcttctgtgcctccagctgcccccatgccacaccctatcatatccacatgtgtggacacacatacccatggcctgtccctcccctgtctccagaaggctagccaggtccacactcctgctgatccccctgtttggagtacactacatcatgttcgccttctttccggacaattttaagcctgaagtgaagatggtctttgagctcgtcgtggggtctttccagggttttgtggtggctatcctctactgcttcctcaatggtgaggtgcaggcggagctgaggcggaagtggcggcgctggcacctgcagggcgtcctgggctggaaccccaaataccggcacccgtcgggaggcagcaacggcgccacgtgcagcacgcaggtttccatgctgacccgcgtcagcccaggtgcccgccgctcctccagcttccaagccgaagtctccctggtctgaccaccaggatcccaggggcccaaggcggcccctcccgccccttcccactcaccccggcagacgccggggacagaggcctgcccgggcgcggccagccccggccctgggctcggaggctgcccccggccccctggtctctggtccggacactcctagagaacgcagccctagagcctgcctggagcgtttctagcaagtgagagagatgggagctcctctcctggaggattgcaggtggaactcagtcattagactcctcctccaaaggccccctacgccaatcaagggcaaaaagtctacatactttcatcctgactctgccccctgctggctcttctgcccaattggaggaaagcaaccggtggatcctcaaacaacactggtgtgacctgagggcagaaaggttctgcccgggaaggtcaccagcaccaacaccacggtagtgcctgaaatttcaccattgctgtcaagttcctttgggttaagcattaccactcaggcatttgactgaagatgcagctcactaccccattctctctttacgcttagctatcagcttttcaaagtgggttattctggagtttttgtttggagagcacacctatcttagtggttccccaccgaagtggactggcccctgggtcagtctggtgggaggacggtgcaacccaaggactgagggactctgaagcctctgggaaatgagaaggcagccaccagcgaatgctaggtctcggactaagcctacctgctctccaagtctcagtggcttcatctgtcaagtgggatctgtcacaccagccatacttatctctctgtgctgtggaagcaacaggaatcaagagctgccctccttgtccacccacctatgtgccaactgttgtaactaggctcagagatgtgcgcccatgggctctgacagaaagcagatacctcaccctgctacacatacaggatttgaactcagatctgtctgataggaatgtgaaagcacggactcttactgctaacttttgtgtatcgtaaccagccagatcctcttggttatttgtttaccacttgtattattaatgccattatccctgaatcccccttgccaccccaccctccctggagtgtggctgaggaggcctccatctcatgtatcatctggataggagcctgctggtcacagcctcctctgtctgcccttcaccccagtggccactcagcttcctacccacacctctgccagaagatcccctcaggactgcaacaggcttgtgcaacaataaatgttggcttgg

SEQ ID NO: 1203 - DNA, 2027 bp, Homo sapiens
tttttttaaataacagctttattgagatgtagttgacataccacaaaattaatgcatttcaattgtacagttgagtgatttttttaagtaaatatatggagttagccgtcacccagtctcatttagaacatttccaggccagacatggtggcacatgtctgtaatcccagaacttcggaaggccaaggtgggaggatcgcttggacccaggagttcaagaccaatctgggtaacatggggagaccctgtctctataaaaacaaaaaaaattggccgagtgtggtggcacgtgcctgtagtcccaggaggctgaggtgggtgaggtgggaggatcgcctgagcccgggagttggaggctgcagggagccgtgcttgtggcagagcactacagcatggctgacagagtgataccttgtctctaaaaaaaatgggaatgaaaagagaacatttctgttacctcccaaattcctgggagcctgttgatagtctgcatccccatgccccaggcctggcagccactggtctggtttgtgtctccagtatgtgcctcttctggcatatctcaaaagtgaggtacgcagtgtgtggtcttgtgagtctggctcctttcgctgagcataatgtctttgaggttcacccatttcgttcttttgaaggctgcgtagcattccacggtgtggctatccattcatgtgcttatggacgtttggattgtgtccagtttttggccactttgaataaggcttctgtgaacatggattcactggtcttagagaggatgtatgtcctcagtctcttatgcagatgccttggtgtggattgctgggtcatgtggtagttacgatcgactttttaagaagctgctgaactgttggttgaagtggctgtccttttgacatccccatcggtaacatctgagggtccaggttctcggatcctcaccagcacctggcattggctttttttttttagcataaccatattaatgggagtgtggtgatgtctccacatagttttaatttgtatttgcccaatgactgatgatggtgaacatcatttcgtgtgcttgtcttgcttggtgaaatgtctattcaagccttttgcccatttaaaaaaataacagttttattgagatataattcacataccttacgattcactcagtgatttttgtatattcataaggttgtgtaaccatcaccacatcagtttaagaaccctttcattacccattggcagtcatgcaccatttgtccgcagtcccccagccctgggcacccactcttctcctttctgtctttagcttgcccattctgggcatcttgtgtgaatggaatcagacaagtgtgtggtctttcgtggctggcctctcatgtggcttcatgttttcgggctcatccatgtcgtagcctgaatcaatacctcatttctctttcttgctgaataagattccattgtgtggatagaccatgttatttatctgtttctcagctgatggacatttgggtggctcctacttttgggctgttgtgagtaatgctgctataaatattcatccacaagtcgccttttttctccctcatagatgagggcataggagatgattctgaaagccactgtgtggtgtaccggtagaccggggtcacattgaattggagtggtgggagcgggcgttcttgccatgttcctgatgctgtgtggggaggcgaggaagcactcagggcagccccttctgtctgccagcatttcctgctgcatctccatcatctctgactggtgatgccccaggcagcctcgctgcacgctgtggttgtggagttcagggtaggccacccaggggatgttggagaaaaaagcagaggaggcgggtggggaaccttgttttcttgcaggaaccttgggtgcctgtagagcggctcaggccttgatgatttgagcttgtgttttctttctgtgtcagcacactgtggggttgaatagaagatgcttgccttttaaaaaatgcgataatttgacatacgaaatgg

SEQ ID NO: 1204 - DNA, 905 bp, Homo sapiens
attttgcccgactggccgcgcacccagctggcccgcccctgcccgacacgaccgctgcccgccccttgccttcctgacccaggggctccgctggctgcggtcgcctgggagctgccgccagggccaggaggggagcggcacctggaagatgcgcccattggctggtggcctgctcaaggtggtgttcgtggtcttcgcctccttgtgtgcctggtattcggggtacctgctcgcagagctcattccagatgcacccctgtccagtgctgcctatagcatccgcagcatcggggagaggcctgtcctcaaagctccagtccccaaaaggcaaaaatgtgaccactggactccctgcccatctgacacctatgcctacaggttactcagcggaggtggcagaagcaagtacgccaaaatctgctttgaggataacctacttatgggagaacagctgggaaatgttgccagaggaataaacattgccattgtcaactatgtaactgggaatgtgacagcaacacgatgttttgatatgtatgaaggcgataactctggaccgatgacaaagtttattcagagtgctgctccaaaatccctgctcttcatggtgacctatgacgacggaagcacaagactgaataacgatgccaagaatgccatagaagcacttggaagtaaagaaatcaggaacatgaaattcaggtctagctgggtatttattgcagcaaaaggcttggaactcccttccgaaattcagagagaaaagatcaaccactctgatgctaagaacaacagatattctggctggcctgcagagatccagatagaaggctgcatacccaaagaacgaagctgacactgcagggtcctgagtaaatgtgttctgtataaacaaatgcagctgg

SEQ ID NO: 1205 - DNA, 1898 bp, Homo sapiens
ctatttggacagagctaacttgtagttggtgtggggagtgcaaactttgcaaagaatttggttcttttctggtggtcttagcctgaggatgtcaagtgtgagcctagagggtgacgtttcctctcctggctccttaccacctgccgtgaagatgatctactctggcctttctctgtggaaaatggctgcaaaataatgaaacaggctgtcacggaattttctcctcctctttctccaggggtgttgaaatagtcacttcctacagcgatgcggaaacatcttgggctttggggtcacacttcccctgagttcagagccttcatagatgtgtggcagccttcttagctgagtgaccttgggcaagttactcttagtctcttcgtgcttgactttcctcgtctataagacggggtgatgatcccgaccttgccagtggtagaaagcaaagcagccgcgggcctcatgcaatgtgcatggtgcctggcagctggtcggtgctcagcacacagagctgtgatgggtctcatgcaatgtgcatggtgcctggcagctggtcggtgctcagcacacagagctgtggctgcccctggtgccgttccagggaagctgtatttttaggatttgccagcttacgagcctctcaagcatcgtccctttgaagtcagccccattgtggatcctcagttgtatcacgtacctccctcatcagaattggctcataataattttttgtgtttcataaagtcagatcctcagaggaccgtaattgtcaaggttgggtactcataaaaaggctgcaggctctgacagccttatcagaagccacagtctcagagacactggggacacatgcccgccactgatggaatagcccgctgaggttgatactttgaaggcagcaaccttggtttggatgtgtagtcttggggatttctttaaaaacataaagttctttacatcacagccatacgttaggttttagttttcatttgctttgccagagctgtccttgtaaaaataacttcttcccatgtgtgcacagaactatgttgtgcttctggactccacactccccagatcccagtatgactacatcttgcctcaagtttctttcaccgcagtgggctaccataaacacatcaccttgatttttaatcccacgaggaagctgcctgaacaggacatcgcacaaggatcctacattgccctgccattgacgctgctggttctgctggccggttacaaccatgacaagctcattcctttgctgctgcagttgacaagccggctacagggagtccgcgcgctcggccaggcagcctctgacaatagcggcccagaagatgcaaagagacaagccaagaaacagaagacaaggcggacttgaggaggaaggggacagttgcagtctcacttgggacaggccacagccaggggtccggccactacccgcccgtgggataaaagccaaaagcacgcgtcagctaacttcagcctgtgctgctgggcccgcaccccatgtcccttgtcactgtggcatcctgcacccatcctcacccctccgtagagcccctcgtgcaatgcaatgaatggaccctcctgtcactctgctgaacagaatttattttctgagtcaaatataatttattattatttttgtcaaagaagtatttaagctgtgctgtggtgtgagaatgtcattcttgatcttcagccttcgtttgcaagaagagttccagttgacgtggtgtttggttccatggcggggtaccctagggattcatctgttttcttcacttccctttgcatctgagatcctgctggaaaccacagcaacctgtatccactattaggaggtaaaaatcaataaaatggcccattcatttgtgttgtagctc

SEQ ID NO: 1206 - DNA, 2477 bp, Homo sapiens
cctaaaatacgattttgatattgctgttgtacttaaacattttcaaaagtgacacaaatggaaactggaatggcatactagttcttcctgctttttttcccctgactatttttgttatagactgaaataatcctccatttcactttttggaatgtggatataaatatttttaaattcatttggtgacaaggcaaaaataagtaattcatatatgtaaaactattatgataggagtgaagtttttgttataataagcagatagctaaaagcttctctattttttctacaaatattcttaggttaattttattaagggagaaacagaattgttgcagtatattactaaagtgaaaatatagccatgcacagattgaaatgtatggtaaaagccttctttctaactttctgtcaggtgtcatctgaagacagaagtgccctgtgggctttggttacgttctatgggggagattgccagctaaccctcaataagaaatgcacgcatttgattgttccagagccaaagggggagaaatacgaatgtgctttaaagcgagcaagtattaaaattgtgactcctgactgggttctggattgcgtatcagagaaaaccaaaaaggacgaagcattttatcatcctcgtctgattatttatgaagaggaagaagaggaagaggaagaggaggaggaagtagaaaatgaggaacaagattctcagaatgagggtagtacagatgagaagtcaagccctgccagctctcaagaagggtctccttcaggtgaccagcagttttcacctaaatccaacactgaaaaatctaaaggggaattaatgtttgatgattcttcagattcatcaccggaaaaacaggagagaaatttaaactggaccccggccgaagtcccacagttagctgcagcaaaacgcaggctgcctcagggaaaggagcctgggttgattaatttgtgtgccaatgtcccacccgtcccaggtaacattttgccccctgaggtccggggtaatttaatggctgctggacaaaacctccaaagttctgaaagatcagaaatgatagctacctggagtccagctgtacggacactgaggaatattactaataatgctgacattcagcagatgaaccggccatcaaatgtagcacatatcttacagactctttcagcacctacgaaaaatttagaacagcaggtgaatcacagccagcagggacatacaaatgccaatgcagtgctgtttagccaagtgaaagtgactccagagacacacatgctacagcagcagcagcaggcccagcagcagcagcagcagcacccggttttacaccttcagccccagcagataatgcagctccagcagcagcagcagcagcagatctctcagcaaccttacccccagcagccgccgcatccattttcacagcaacagcagcagcagcagcaagcccatccgcatcagttttcacagcaacagctacagtttccacagcaacagttgcatcctccacagcagctgcatcgccctcagcagcagctccagccctttcagcagcagcatgccctgcagcagcagttccatcagctgcagcagcaccagctccagcagcagcagctcgcccagctccagcagcagcacagcctgctccagcagcagcagcaacagcagattcagcagcagcagctccagcgcatgcaccagcagcagcagcagcagcagatgcaaagtcagacagcgccacacttgagtcagacgtcacaggcgctgcagcatcaggttccacctcagcagcccccgcagcagcagcagcaacagcagccaccaccatcgcctcagcagcatcagctttttggacatgatccagcagtggagattccagaagaaggcttcttattgggatgtgtgtttgcaattgcggattatccagagcagatgtctgataagcaactgctggccacctggaaaagggtgagattgtgcctggaggaaggatgactgtgtctgaagatgcttctttcttatgtagatgtaactgtgttcacttagctgcattcactgagctgcacctgcacgtgttctgaatgtgtgacgggcattttgattaacattctgtgtgacctgaggcacagcacttttctgggcatcagttttctcagctgttagatgaagatggtggactttttatttttttcagcttggaaattccagggggcactaattatatgtgtataattggggcaatggaaataagttcagggttttggtgtcctgggagagggactattaatttgtatgcatctcagtcatttctctttctccaaaggtaactgttagaaaatcctggaatctctagaacctcaaattcttccagcccaattgtgaaactggagttaatttaattatgtattatcatgcatggtggcctttaaagaaaagaaatactttttcttgcattccccaaaac

SEQ ID NO: 1207 - DNA, 3052 bp, Homo sapiens
atcgctgcctcgcgcgcggggggtcagacacagagcaggaggcaggggtccctcgtccctcgccctgccgcggaggccggcccctcaccccggttgcaggtcaggcggtttggggatgggcttgttgaagccgcgtctgcccactagccagaaagtgtcctcggcgcccttgccctggggagacatgggagagggaaggacttaggcggactggggtgaggggtgggggatctcgagtctgcgtggaactgggagaccaggtcagaagggtgagctgaggtttgcagccgcggcccgggatgggcggtgcctcaggacagggcggggcctccgggaggggttggggccctgcctcaccttcagctccgtgcggcctcgcagctccacctggtagcccgagtccagagcacggagaatccccacagtgctcaagttcacgtggatgcggtaagctgtggcggtgggggacgccgtgagctcgggactcacctcccgtgtccccctcccacctccccgtcttgtccccgtcacactcacgcagcccggtggactccatgcgcgaggcggtgttgaccgtgtccccaaacaggcagtaccgcggcatggtgaggcccaccacgcctgccacgcatggacctgtggagatgctgggggtcggcggggctagcagggccggccctgggctgcacctaggtagggcctcgggggatcttcgcacccattatctccaccagccccccaaataagccttgttaagtgcatcctcttcaaggtaagccccactccccgctccatgagttgcctcctctacaggaaatctggggccaggccctaaagagggagatgggctggagcctgggaagacccgggagttacccgagtgcaggcctatgcggatgcgcacgggaacctcaggcatatggcgcatgcggaaagtgcccacggcactgaggatgtccagtgacatgttggcgatctctgccgcgtgtcgctgcccattccgctggggcagccccgaggccaccatataggcgtcccctattgtctccacctgggggaagaaggagttgtgtgaattttcttttgagcattccccccgagtacacgaagcgattgcctcttgtcaccgggcccacctggggttagtgcagaaccaggttgctagtggaaggactgagctggggactggaggaataaataagggacaggaggtctgggaaagaagattgattgggcaggtaggctaggggctgcgcaggaagggctgggctggaggctggtgaagctgaattgaaggtcaggagggcttgtcccctacacactgcaccttgtagacatcgttggaaccaatgatggcatcaaagagtgtgtagagatcgttgagcaggtccacaacctcaatgggctcactcatggcagagatggtggtgaagcccacaatgtcactaaagtacagtgtcacttgctcaaagtactcgggctccactggtgtccccgtcttcaaggcctcagccacagacctagggatggcaggcagtgaggtcacctgggggccactctacctggctgggctccagctgccctcccagcccaccccttcccactggcacccacggaggcagcatctgtgtaagcagccggtctgtcttctgcttttccagctccagctcctccgtgcgctcccggatcagatcctccaggttactagagtactgctccagcatccgaagcatcgagtcaatgatgttcgtcttccggcccttgttgatgttcttgaactagcagtagaaggaagctggtaaagctgctgaagacctgggttgccatgccctctttatgcccccctcatgggccctctcatggggctgttcactctgaaccccaaccccgctgccaccattcatctactattcatcaagcaccccggggtgctgggcactgtgttttcagacacgattaggaggcacgtgggaaatgagggttcccagaggtcagttgatctcagctagtaattgacagggcactggagccagcccaatcgttgggctcccaggccaagggtctttctgtcacagcaggccaagcacatacttggttctcaatcagtgttatttgaattgaattgaatattcctcccacccagacagaactctatctcccactccaaaagcctccacagcccccattccaattctgcccccaaactccgagtcttcaggctactccttaggaggtagcctggaaggccagaggtcctgccagcctgcctgtctgcagctgtctcaggttgctgacaagcatctgggatcccagaggccagcccagtccttgcccactcccagcccctgaccaggtcgaaggtgtggtccatggagggccgaagttccggctgctctgcccagcactgcttcatcaggaggatacactcgacaggtgcctggtccatggacaccaagggccgacacagtggaggggggctccgcaccctctgcaccacttctggaggcatgaggggacagtgagggggagtgcccccagaacacaaaggctgcctctgaccctggcctgactgttgaagaccaagatgtgggagggggtgcctggcaggggtttctttacatcagaggttcagtgtgtgtgtgtggagggagagtatagtgtggaagggggttgctaggaggaacaagaggacctcgaactctgggggtcagtaagaggtgacataggcaaagaaactaacatattgtatgtaagacaagtgagggataggtgatcaagtagtttgctcagagtcctgtgcagaagggatgcacccactccccctcccctgctcctcccggggacccctgagaacagagaggagtctgttctgtcagttgtggaaacagtttggttccagcatcaagaaagaggaagctgttgtggtctgggacctaatgaaccacgctccccaccctggccatgcacggctttctgcacccagacctgcagatgccggctttaagggggcctccgtataattgagtttcatcactgggctttgctttagagg

SEQ ID NO: 1208 - DNA, 3628 bp, Homo sapiens
acatgagcaggcagccccgactggaaggagcccggggccctcattccttctcctccactgggaactgagtggacgacccaccggagcccgtgtacgcgaacatagagaggcagccccgggccacttcaccgggcgccgctgcagccccccttcccagcccggtgtgggagacgcacacggacgcgggcaccgggcgcccctactactacaacccagacacgggagttaccacctgggagtcgccctttgaggctgccgagggtgccgccagcccagccacctcccctgcctcggtggacagccacgtgagccttgagaccgagtggggccagtactgggatgaggagagccgcagggtgttcttctacaacccgctgacgggcgagacggcctgggaggacgaggccgagaacgagcccgaggaggagttggagatgcagccgggcctgagccctggcagcccaggggacccgcggccccccactcccgagacggactaccccgagtcgctgaccagttaccccgaggaggactattctcccgtgggctctttcggtgagcccggccctacctctcccttgaccacaccccccggctggtcttgtcatgtcagccaggacaagcagatgctctacaccaaccacttcactcaggagcagtgggtgaggctggaggacccccacgggaagccatacttctacaatccagaggactcctctgttcgatgggagctgccccaggtccctgtccctgcccctcgaagcatccataaatccagccaggatggtgacaccccagcccaggccagccctccagaggagaaggtcccagcagagctggatgaggttgggagctgggaggaagtctctcctgccacagctgctgtgaggaccaagaccttggacaaggcaggggtgctccatcgcaccaagacggcagacaagggaaagcggctccggaagaagcactggagtgcctcctggactgtgctggagggtggcgtcctgacattcttcaaggactcaaagacctcggctgcaggcggcctgaggcagccttccaagttttccacccctgagtacacagtggagctgaggggggccactctctcctgggcccccaaagacaaatccagtaggaagaatgtgctggagctacggagccgagatggctctgagtacctgatccagcacgactcggaggccatcatcagcacctggcataaggccattgctcagggcatccaggagctgtccgcagagctgcccccagaggagagcgagagcagcagagtggacttcgggtcgagcgagcgcttgggaagctggcaggagaaagaggaggacgcgcgaccgaatgcagccgcgcccgccctgggccccgtgggcctggagagcgacttgagcaaggtccggcacaagctccgcaagttcctccagaggcggcccacactgcagtcgctgcgggagaagggctacatcaaagaccaggtgttcggctgcgcgctggccgcgctgtgtgagcgcgagaggagccgggtgccacgcttcgtgcagcagtgcatccgcgccgtcgaggcccgcgggctggacatcgacgggctgtaccgcatcagtggaaacctggccaccatccagaagctacgctataaggtggaccacgatgagcgccttgacctggatgacgggcgctgggaggacgtccacgttatcaccggagccctgaagctcttctttcgggagctgcccgagcccctcttccccttctcgcacttccgccagttcattgcggccatcaagttgcaggaccaggcccggcgcagccgctgtgtgcgtgacttggtgcgttcgctgcccgctcccaaccacgacactctgcggatgctcttccagcacctctgccgggtgatcgagcacggcgagcagaaccgcatgtcggtgcagagcgtggccattgtgttcgggcccacgctgctgcggcccgaggtggaagagaccagcatgcccatgaccatggtgttccagaaccaggtggtggagctcatcctgcagcagtgcgcggacatcttcccgccgcactgactgctggcctgtgactggggcggtggccgcggtcctgccacacaagctgggcggcggaggccacgcagccgggccttcttctctctgggaccctccgccagcgcatagccgcaggccggtgtgacttctgcaccctcggttctgagggtacggtgacccctagtgggcagtttgcaaaatgtgattccttcttcccaactccccatccccccttcccttcccgtcacgtcctgtttgggggttaattcggttttttctctgttgcatcgcgcctactgtgcgtgtgcgatagcgtgtgtgggggtgagagtttgttttctggaatggtaggtgctgggaggaggagtttgatggagggcttcctggctgcttctggccctcacctcgtggaggccttcacagagaccctgtgggccctggccctgtgctggcactgtgccagtcatgaggcagctctgatcacttccccactgtggaaacaggactgacccagccttcagtgtgggctgctgaagctatcctcctcaggcctcagggatgacctcctgcctgagcctctcacaggctggctgtgggccagtttcatctgctttcctgttgggggtcccgggcctctgctgtccttgacccactggtgttctgtgcaaggcttcttcccattcaccaagtgcacaccttgcatctgccgctcggcatgcaccagttccacacaccatcccattttacagacaaggacgctgaggcctgcagcagcagtgtgacttgcttaaggtccagtgagtgacctcattccccagaaaaggctcctcccacaccagagtacagcctgggtagggggaaaatcagttctttcagctaccacccatccaacctttgggcctatgtgaaaagaaaggaactaagctgggtgtgttctgtctggacctggggaggcccctgaaggcaaagagggaaactgtcccagctgttctgtcctaggggagggggacatagccctagcaggagctcccagcccctcttggcactctgacacacaagtacacccatctggggcccgctttgccacgaagagctgggcaggcctgcagggtgtggggagggaggacacaacctcaagaaaggaagcgtgaaccccagggaacagcgggtcccttccctcctcagacacaagccacctcagcttgtggctcttggcccccagccccaccaacccacctgttcatttattcaacagacaatgacagctgatatttattggacatttgcaccatgccaagcattcggcttggattatcccatttgtttctcacagccggtatttattgtctgctcctctgtgccaggtgctgtgctctgggcaggggcactgcatgggctgcctgccctggtggagcttgtggtctgatgggtgaggctgacccaagcccaccccattgccaacagggccagggcaagagtacacacaggggcctcataccatatgtctaaatatttaaaagttatcaatcaagctaacaactgttaaataaaatatgttctattctcct

SEQ ID NO: 1209 - DNA, 1746 bp, Homo sapiens
accgactgtgtggaagcaccaggcatcagagatagagtcttccctggcattgcaggagagaatctgaagggatgatggatgcatcaaaagagctgcaagttctccacattgacttcttgaatcaggacaacgccgtttctcaccacacatgggagttccaaacgagcagtcctgtgttccggcgaggacaggtgtttcacctgcggctggtgctgaaccagcccctacaatcctaccaccaactgaaactggaattcagcacagggccgaatcctagcatcgccaaacacaccctggtggtgctcgacccgaggacgccctcagaccactacaactggcaggcaacccttcaaaatgagtctggcaaagaggtgagcacccactgggctggcgggtgggctggctggcttctggcggaatgctcctaatgtgagcagcccctatccccttcctcacctgtcagctggtaacatggtttaaagccatccacagcacagcatgatagaggggccatggctccaaatgtctgtttccccactcagcctcctccaagcacacagtatcgctgtggccaaacctcctacatgtcacccttcccctttccatttcaaagggaacaatgttcactggaggacatgagcggagagaagtacataaaaataacccatggttccaccaactaagttacccatccttccttccaggctttttctgtgtcatggtcaaatacaaaatgggggtccaactcatgcttcactcacttgacaagacctaatggatgttttccacagtggcttctgcccgagtgtgtggcttacggtggctggttttccaccctttttgggagcactgggtgttcacagttgtctccaatcttccagtgttgtaaagaaccatgtctcggccagatctttggactggtttatggatatttccttgggctaaattcctagaagtttaatgctaagctaatgccatgatttaaaaatggcaactacattgggtttttgtggaagcagaatctgctggtggaaatgagatgaatgggccagctgctgctggaatcctcgctagtgccccggcctcttccttcctctccctcccatccagatcccagactctcaaccccaattttgcatctgagtgtttttcagggtatcatgaaaatctctcctgaggtgggcatgggttgtgggcaggagctgcatttctttactcaaaaagtgttatttttaattttttttaattgacatataacacacataaaggacacaaatcttaatggtttgcacaatgaatttttacatatgaatacagctgtgggaccaccagccaaatcaaggtggaggccatttcctgcaccctggaaggctggttctcctgagctccattgtaatgaacagtgagggcacaacctcctccctcttgccacaagaggggtatggggagttagccttgtggattctggagttgtagcacagtgagtttgatcccagctccacctcttgggctacctctgtgaacctcagtttccccaccagcaaaataatgacaattaaacatttatatttattagctcatttaattttcacaatgctcccacaaagaagggggcctgttatcattccaaacttttaaacaagaaaactgaggcacaggagaggttaagtaatcagccaaggtcatacagccagtaagaggtagagctggccagcctgggcaacacagggctaccccatctctact

SEQ ID NO: 1210 - DNA, 1698 bp, Homo sapiens
gatgaggtcacaaaccagagggaggaggccaggcctgcaggggctgcttcggagggctggccacgcgagcagctgcaacctgggcatgtacgtctgtgtggcaggggggcttctggactgggggctcggcaccgacccaggaaggggagctgtgagcagggacatctggccctagtctcagagcaacatccctcgaaatgccatctgggcctggaaggtgcaagggaggcaggatgagtctgctcatgctaccgcgggccgcccagcaaggaagcaggctgcccgccaggctggcacgcgcctcttgcagtggagggtttgctcttcaggaacggacagagaacctccagactccctcggctgcacgctgggggcgagcccaggcagccacaggagtcctccaagccagatgagcccgccctgcggcactgccagcacttgggacgccagactcccttcaggcggcgggccccaagggcactgcgacagctcagcacccaccacagatcagcaacaggacaacccgagcgcggagacacagacgggaagcgtgtggggtcctgggataggcccaactcaatgatttcccctccctggggctaaggtctcagccgtgagggggctctggggaggggaggtcagagtagcctggagagctctccctaaggagggccgtgggatccatgggatctgcaggggaatcgccggggctggccctaaggctctccagccagcgccagggaggcaggggctccaaaccagcaggctgctcagggtggtcctcggacagcagccatgccctcccagggagcttgccagacacacagacctttcccagcctccagaccagaacctgcattttttaggagctttctgggggaccctcatctgtgacctgcctccagggatactttctcgctctacagacaccactgatgtgaagacgcaggagacaggacaaccccccgtgaagggtcctgtccacccaccactgaggcctggcccgactttctacaagaccctgctgggggggaagtgcccctcggagtaaaggaaatacagccccactcctgggaagacagcactcatttccatcagagaccacgccccccactcacacgccaggagaaagccacacctgcagaagcctgctccccacccaatgccaggggcggaaatgtggacggagggcgacttctctgccagcctggcgggggcctgcagcaagctcgccgatgccctctgcgcctgctgggcccgcagcccctcctctggggaggctctgggactggagcaactgggactctcctggctgctgaccccggagccaggctctctgcttgtcctgcactacctcgccacgtctgcacaggggcctgacaagcgctactgtctccgggctacagaggacactggagctcagagctggacaaccggcccaggcccaggccgcacacggcgcagcaggccgtctgccgcactctgggggaggtcaccctggggctgctgacctgctctgtccctcgccccagcaccgtggcaatctaacaggaaggggcagggccagctccctctggaactcgggcagcgtcaaagataaggtgtcttcaaaaagctcatggaaaacgtgcgttgtgacgaaacttgcatggctttcaagtttttttgccccaaaataaactgatactaacttgtcat

SEQ ID NO: 1211 - DNA, 2784 bp, Homo sapiens
aatcaataaaacaacaatttttaaaactataactgtttacatagcatttatattaggcgttatagatgatttaatgtatgcaggaggatgtgtgtgggttgtatgcaaatgctacacccgacaccattgtgtaagagacttgagctggataccaagggacaactatatgacctgtagaaaacttaaagaaaagcacaggccgggcgtggtggctcactcttgtagtcccagcagtttgggaggccgaggtgggtggatcacctgaggtcaggagttcgagcccagcctggccaacatggcgaaaccccatctttactaaaaatacaaaaattgaccaggcatggtggtgggtgcctgtaatcccagctactcgggaggctaaggcaggaaaatggcttggacccaggagtggaggttgcagtgagccaagaccacgctattgcactccagcctgggtgacaaaagcaaaactccgtctcaaaaaaaaaagaaaagcacaaagaggccaggcacagtggctcatgcctgtaatctgaacactttgggaagccaaggtgggcagattacttaaggtcaggagttcaagaccaacctggtcaacatggtgaaaccctgtctctcctaaaaatacaaaaattaacaaggcatggtggtgggcacctgtagtcccagctactcaggaggctgaggtgggagaatcgcttcagcctgggaggcagaggctgcagtgagctgagattgtcccactgtactccagcctgggtgacacagccaagacctcgtgtctcacaaaaaaaaaaagaaaaacatgaagaagaaaacaacgcttgccaggcgcggtggctcacccctgaaattccagcaccttgggaggccgaggcaggtggatcacctgaggtcaggagtttgagactagcctggccaacatggtgaaaccccgtctctactaaaaatacaaaaattagctgggtatggtggtgcgcacctgtaatccgagctacttgaggggctgaggtaggaggatcacttgaacccaggaggcaaagactgcaatgagtcttttagaaagcagaagctgagtctgatagaacttagcccgtgaccttaatgggtactcggcagatgcagctgcctggctgattcgagaacaggacaggcatggaccctgctttcggagcagtgctgtggaatagaactttgtgcagtgatggaaatgttctgcatcttcactctcccttatggtgggcactagccacgtgtgaaacgtatctaatgggactgagaaactgaatttttaatttaagtagccacaggtagctagtgattaccatagcaaatgctgcagttccccgggtttttagtcttgattatacctcccagaagttgtctgctccaaaggtcaacagttcagcaggaagcagagcccatgcctttgagaggctggaggtattgcatactcccaaaaatcccagcgtctcactcaaataatgagcccaacagtgcagaagagctctgggctgttgtttctaaaacgcaagcatacagccttcctcctctcccatttttatttagacctgtactaacaaaaagaattctggcattacaaattgttttgtattttgatgccttcagaataaatatataatgtgcttcataattggaagcaattttgatggttttaaaatcaacattttttgtgttgctaccttgtgctgagacttgtgctagatagtgaggataccaagaaaaataagcacagggattttgtggtgttcatctttatctcctcagcatctaagataatacacaatgcatagtgggctctcagtagtgtttggtgaactaataagcgaaagatgtaatcgccgctgtgaaagcactcactcactatgtggtgggggccaacagacaggtacagatgtgttcctggtgtggagaaagtgccaaggtggctcagcgaagaaaaaagaattcttgtggtgctatcaaggcttcatttgagggaaaagtaggatttctgtaggtggaaaaagagaagacattgatttgaaactccctggttgttttataaacttcatattagctatgtccacagagcctccaaaaggatataattcaaaaaggattttaaccaaaatgaaatatgttgtgactaatagatacagtttatttgaatgaatgatagtttttcccatttgatattttaactgtgctacacaagaatgagagtagacatagctcgatttgtagtctcattgttctgtcttttctgcccatttcagtgacccaggactctttgtttattgctgtgatttttcttccacagctatagaactggtccaggtgagtacgatgggaaattacctattggtaatttccactgattaaagggaaaaggttctcctaaaaatcaaggtctctggctgtgttcttatacggtctgtgttcttacggtctaaaagtaaaagatttactgataacgagcataccttgttttattgcagttcactttatcacactgtacagatgtcatatctgttcatatattgaaagtctgtggcaaccctgcatcaagcaagcctaccagtgccgtttctccaccaccatatgctcacttagtgtctgtgtgtcatgctttggtgattctcagaatatttcagacttttttactattatgtatgttatagtgtgtgacgttactgttgtacttggtttggggttccacaaatcacatctgtgtaagacggtcaacttaataaatgcatgtgttgtgactgccccacc

SEQ ID NO: 1212 - DNA, 2610 bp, Homo sapiens
cattccatgccacctcctttcttcttcatttgagttaaatttatctagttattattggtaaagaagaagaaaaatatacctcttgtattctttctctctctctctcaaagaatcttctttctttggttatttacattatcctttatatcttccccactttatcaactctcccccaaatatctaaccacagaaatgccatagcagctgttttctgggacaaaatgatcctctgcctttctgtttgggcaccacccttgcataccagagatagacaggctgttctgatctccctttgcctaagaatccagttaaccaccttcacaggcttcattccacaggccacacatcagtccatggcttcagtaatatggaaagatgtagttgttaaatttcagtgcagaagcagaaaccagtatattttgcccataatggcagtaaatctaaccctctaccaccacacacacaaaatcactctcagctgtatcaacaaacagagctttaatttaaaatccaaactctgagatcacagtttctcaactttaggaagtcttctcctaaaccgagcaatatcaggctagaaggagcaaggtgggtggggattctctctggatatggaaatatattctcccacagatatgggattgcccttcagatccattctaaacagcaccaatgatccatgtaaaaagatagacatgatagacataatttagggagtagaaattcaaatcttccagagagtcacaggcaagctgaaaatagtagcaagaacagaaacaaatgatagtttaggttaactttggtattaatgtacatcagctgctgtggctatgtagtcattggccagtctcaaggagaggttcagaatctctgaaactgtggcatggaagtggtggtgatccactcaagtcccatgtcaagaaggaggtactcattcctacatctgtgggagtgtggcagtggatggctcccagttgattctcctccaagaactggcctcggccatcggtgctgccttgcccaaggtcatgtcccatccccaaggtcttcccacacgaaatggctgtcttgcgtgcatcaaggcagcacaactctgggggccaccacagccccagggcttcctgtaggatggctggggcccctgctgtgcatgcatcatagtccaacctctcttggcccaatcctaaaagcagttcttcataaagcttttacatgcaatctcagagcctcagagtctgtcccctggggatcctgatttaccacatattctttcaaaacagttaaagtgtctgttcatattctgcacccactcattgatggggttgtttgtttttttcttgtaaatttgtttgagttctttttagattctggatattagccctttgtcagatgagtagattgcaaaatttttctcccattctgtaggttgcctgctcactctgatggtaatttattttgccgtgcagaagctctttagtttaattagatcccatttgtcaattttggcttctgttgccattgcttttggtgttttagacatgaagtccttgcccatgcctatgtcctgaatggtattgcgtaggttttcttctagggtttttgtggttttaggtctaacatttaagtccttaatccatcttgaattaatttttgtataaggtgtaaggaagggatccagtttcagctttctacatatggctagccagttttcccacccccatttgttaaatagggaatcctttccccatttcttgtttttgtcaggtttgtcagagatcagatagttgtagatgtgtggtattatttctgaaggctctgttctgttccattggtctgaatctctgttttggtacctgtaccatgctgttttggttactgtagccttgtagtatagtttgaagtcaggtagcatgataccatctcacaccagttagaatggtgatcgttaaaaagtcaggaaacaacaggttctggagaagatgtggagaaataggaacacttttgcactgttggtgggactgtaaactagttcaaccattgtggaggacagtgtggggattcctcagagatctagaactagaaataccatttgacccagccatcccattactgggtatatacccaaaggattgtaaatcatagtactataaagacacatgcacacgtatgtttattgcagcactattcacaatagcaaagacttggaaccaacccaaatgtccaacaataatagactggattaagaaaacgtggcacatatacaccatggaatactatggagccataaaaaatgatgagttcatgtcccttgtagggacatggatgaagctggaaaccatcattctcagcaaactattgcaaggacaaaaaaacaaacactgcatgttctcacgcataggtgggaattgaacaatgagaacacttggacgcaggaagtggaacatcacataccggggcctgttgtggggtgaggggggctgggagggatagcattaggaaatatacctaatgtaaatgacgagttaatgggtgcagcacaccaacatggcacatgtatacatatgtaacaaacctgcacgttgtgcacatgtaccctagaacttaaagtat

SEQ ID NO: 1213 - DNA, 1817 bp, Homo sapiens
gttttccagcccggccttcgcccgcccgctagcacgcagtcccttggtctcttcggtctcctgccgcccccgggaagcgcgctgcgctgccgaggcgagctaagcgcccgctcgccatggggagccccgcacatcggcccgcgctgctgctgctgctgccgcctctgctgctgctgctgctgcgcgtcccgcccagccgcagcttcccagataccccgtggtgctcccccatcaaggtgaagtatggggatgtgtactgcagggcccctcaaggaggatactacaaaacagccctgggaaccaggtgcgacattcgctgccagaagggctacgagctgcatggctcttccctactgatctgccagtcaaacaaacgatggtctgacaaggtcatctgcaaacaaaagcgatgtcctacccttgccatgccagcaaatggagggtttaagtgtgtagatggtgcctactttaactcccggtgtgagtattattgttcaccaggatacacgttgaaaggggagcggaccgtcacatgtatggacaacaaggcctggagcggccggccagcctcctgtgtggatatggaacctcctagaatcaagtgcccaagtgtgaaggaacgcattgcagaacccaacaaactgacagtccgggtgtcctgggagacacccgaaggaagagacacagcagatggaattcttactgatgtcattctaaaaggcctccccccaggctccaactttccagaaggagaccacaagatccagtacacagtccatgacagagctgagaataagggcacttgcaaatttcgagttaaagtaagagtcaaacgctgtggcaaactcaatgccccagagaatggttacatgaagtgctccagcgacggtgataattatggagccacctgtgagttctcctgcatcggcggctatgagctccagggtagccctgcccgagtatgtcaatccaacctggcttggtctggcacggagcccacctgtgcagccatgaacgtcaatgtgggtgtcagaacggcagctgcacttctggatcagttttatgagaaaaggagactcctcattgtgtccacacccacagcccgaaacctcctttaccggctccagctaggaatgctgcagcaagcacagtgtggccttgatcttcgacacatcaccgtggtggagctggtgggtgtgttcccgactctcattggcaggataggagcaaagattatgcctccagccctagcgctgcagctcaggctgttgctgcgaatcccactctactccttcagtatggtgctagtggataagcatggcatggacaaagagcgctatgtctccctggtgatgcctgtggccctgttcaacctgattgacacttttcccttgagaaaagaagagatggtcctacaagccgaaatgagccagacctgtaacacctgacatgatggttcctctcttggcaattcctcttcattgtctacatagtgacatgcacacgggaaagccttaaaaatatccttgatgtacagattttatttgtaattttaaaagtctattttattatgagctttctttgcacttaaaaattagcatgctgctttttgtacttggaagtgtttcaaaaaattatatgaccatatttactctttctaactttctttactccatcatggctggttgattttgtagagaaattagaacccataaccatacacaggctatcaacatgttattcaatgtgacacctaactcttttctattttgttttttaagtaagacttttattaataaaacaaaatgttttggagc

SEQ ID NO: 1214 - DNA, 2197 bp, Homo sapiens
tgcgggctgcggggagatgtggggagggccccctccactttggagggcagtgaaggagagggatcctctaaattgtcgaggcttcatctttccagattgtatgcccttctcagcaacaccgcctccggccctccgatgggaaagtggaggccgggacaagggcacacaactggttccgttaagcccctctctcgctcagacgccatggagctggatctgtctccacctcatcttagcagctctccggaagacctttgcccagcccctgggacccctcctgggactccccggccccctgatacccctctgcctgaggaggtaaagaggtcccagcctctcctcatcccaaccaccggcaggaaacttcgagaggaggagaggcgtgccacctccctcccctctatccccaaccccttccctgagctctgcagtcctccctcacagagccccattctcgggggcccctccagtgcaagggggctgctcccccgcgatgccagccgcccccatgtagtaaaggtgtacagtgaggatggggcctgcaggtctgtggaggtggcaacaggtgccacagctcgccacgtgtgtgaaatgctggtgcagcgagctcacgccttgagcgacgagacctgggggctggtggagtgccacccccacctagcactggagcggggtttggaggaccacgagtccgtggtggaagtgcaggctgcctggcccgtgggcggagatagccgcttcgtcttccggaaaaacttcgccaagtacgaactgttcaagagctccccacactccctgttcccagaaaaaatggtctccagctgtctcgatgcacacactggtatatcccatgaagatctcatccagaacttcctgaatgctggcagctttcctgagatccagggctttctgcagctgcggggttcaggacggaagctttggaaacgctttttctgcttcttgcgccgatctggcctctattactccaccaagggcacctctaaggatccgaggcacctgcagtacgtggcagatgtgaacgagtccaacgtgtacgtggtgacgcagggccgcaagctctacgggatgcccactgacttcggtttctgtgtcaagcccaacaagcttcgaaatggccacaaggggcttcggatcttctgcagtgaagatgagcagagccgcacctgctggctggctgccttccgcctcttcaagtacggggtgcagctgtacaagaattaccagcaggcacagtctcgccatctgcatccatcttgtttgggctccccacccttgagaagtgcctcagataataccctggtggccatggacttctctggccatgctgggcgtgtcattgagaacccccgggaggctctgagtgtggccctggaggaggcccaggcctggaggaagaagacaaaccaccgcctcagcctgcccatgccagcctccggcacgagcctcagtgcagccatccaccgcacccaactctggttccacgggcgcatttcccgtgaggagagccagcggcttattggacagcagggcttggtagacggcctgttcctggtccgggagagtcagcggaacccccagggctttgtcctctctttgtgccacctgcagaaagtgaagcattatctcatcctgccgagcgaggaggagggccgcctgtacttcagcatggatgatggccagacccgcttcactgacctgctgcagctcgtggagttccaccagctgaaccgcggcatcctgccgtgcttgctgcgccattgctgcacgcgggtggccctctgaccaggccgtggactggctcatgcctcagcccgccttcaggctgcccgccgcccctccacccatccagtggactctggggcgcggccacaggggacgggatgaggagcgggagggttccgccactccagttttctcctctgcttctttgcctccctcagatagaaaacagcccccactccagtccactcctgacccctctcctcaagggaaggccttgggtggccccctctccttctcctagctctggaggtgctgctctagggcagggaattatgggagaagtgggggcagcccaggcggtttcacgccccacactttgtacagaccgagaggccagttgatctgctctgttttatactagtgacaataaagattattttttgatacacctatg

SEQ ID NO: 1215 - DNA, 2070 bp, Homo sapiens
agcctgtggaactatgagccaattcaacctcttttcttcataaattaacaagtcttgggtatttctttatagcagtgtgagaacagaataatacagaaaattggtaaagaggagtgaggcattgctagaaagatacctgaaaatgtggaaacagcagtggaactgggaaatagacagaggttggaagagtgtggagggctccgaagataggaagatgaggggaagtttggaatttcttagagatttgttaaattgttttgaccaaaatactgatagtgatatggacaatgaagtccaggctgaggaggtctcagatggagatgagggacttattgggacctggagtgaaggtcacctttgttaggacattgtggttggagacattgtgcccctgccctaggaatctgtggaactttgaacttgagagcgaagatttagggtatctggcagaagaaatttctaagcagcaaagcgttcaagacgtggcctggctgcttctggtagtctgtgctcatatttgtgagcaaagacatgacaagaaactggaacttatatttaaaaaggaagcagagtgtaaaagtttggagaatttgcagcctggccatgttgtagaaaagaaaaaaaaccattttctggagaggaattcaagctagctgcagaaaattgcaagtaacaaggagcaaaatgttgatagccaagatagtgggaaaaacaccttgaaggcatttcagataccttgggggcagcctctcccatcacaggcccaaaggcctaggagggaaggatggtttcctgggccaggctcagggtcctgctgccctgcacaacctcaggaaactgctctccaaatcccagctgctccagctccagcttcagctcaaagggccccaggtatagctcaggctgctgctccataggatgcaagttataagccttagtggctcccgtgtggtgttaaattaagcctgtaggtgcacagagtgcaagaattgaggcttgggagcctccaactagatttcagagtatgtgtgggaaagcctggatgtccaggcagaagccagctgcagggacagagccctcatggagaacctctactagggtagtgtggaggggaaatttggggttggagttcccacacagcttcccctctggtgtactgcctagtggagctgtgagaagacagccactgtcctccagattccaggatgatagatctgccaatgacagcttgcactgtacaactggaaaagccacaggcagtcaatgccagcccgtgaaagcagtgacagtggcttaccctgcaaagtcccaggggctgagctgcccaaggccttgggagcccaccccttgcaccagtgtgccctggatgtgagatatggagtcaaaggagagtattttggagctttaagatttaatgactacctgctgggtttcagacttgcatgggtccagtagcccctttcttttggccaatttctcacttttggaatgggagtgtttacccaattcctgtacccccactgtatgttggaagtaactaactgtttttttattttgtaagctcacaggtgggagagacttgccttgtctcaggttgagactctggactttggacttttgaattaatgctggaatgagttaagactttgagggactgttgggaagatataactgtattttgcagtatgagaaggacatgagatttgggagacaccagaggtggaataatatgatttggatctgcatccccaccaaaatctcatgttcaattgtaatcctaaattttggaggttgagcctggtggaagaggattggataatgggggtggtttctcatggtttaacaccatccccctgggtgctgttctcatgacagtgagtgagttattgtgagatctgattgtttaaaagtgtgtgccacctcctcccactttcctcctgctccagccatgtaagacaggcttgcctccccttcaccttttgtcatgattgtaagtgttctgaggcctccccagccatgcttcctgtacagcctgcagaactgtgagccaattaaacctcttttctctat

SEQ ID NO: 1216 - DNA, 2154 bp, Homo sapiens
ctttgcgagggcggagttgcgttctctttagcacacagccgaagagcatcgcgagggcggagctgcgttctcctctgcacagacttcggggctattgcgaaggcggagcagagttcttctcaggtgtctgacttccagcaactgctggcctgtgccagggtgcaagctgagcactggagtggagttttcctgtggagaggagccatgcctagagtgggatgggccattgttcatcttctggcccctgttgtctgcatgtaacttaataccacaaccaggcataggggaaagattggaggaaagatgagtgagagcatcaacttctctgacaacctaggccagctcctgtctccccccaggtgtgtggtgatgccaggcatgcccttccctagcatcaggtctccagagctgcagaagacgacggccgacttggatcacactcttgtgagtgtccccagtgttgcagaggtgagaggagagtagacagtgagtgggagtggcgtcgcccctagggctctactggaccagcgtctcctgtctcctggagaggcttcgatgcccctccacaccctcttgatcttccctgtgatgtcatctggagccctgctgcttgcggtggcctataaagcctcctggtctggctccaaggcctggcagagtctttcccagggaaagctacaagcagcaaacagtccgcatgggtcatccccttcactcccagctcagagcccaggccaggggcccccaagaaaggctctggtggagaacctctgcatgaaggctgtcaaccagtccataggcaagcctggctgcctccagctgggtggacagacgggctggagaaggggagaagaggaaagggggttgcctgccctgtctcctacctgaggctgaggaaggagaaggggatgcactgttggggaggcagctgtaactcaaagccttagcctctgttcccacgaaggcagggccatcaggcaccaaagggattctgccagcatagtgctcctggaccagtgatacacccggcaccctgtcctggacaagctgttggcctggatctgagccctcgtggaggtcaaagccacctttggttctgccattgctgctgtgtggaagttcactcctgccttttcctttccctagagcctccaccaccccgagatcacatttctcactgccttttgtctgcccagtttcactagaagtaggcctcatcctgacaggcagctgcaccactgcctggcgctgtgcccttcctttgctctgcccgctggagacggtgtttgtcatgggcctggtctgcagggatcctgctacaaaggtgaaacccaggagagtgtggagtccagagtgttgccaggacccaggcacaggcattagtgcccgttggagaaaacgggaatcccgaagaaatggtgggtcctggccatccgtgagatcttcccagggcagctcccctctgtggaacccaatctgtcttccatcctgtgtggccgagggccaggcttctcactaggcctctgcaggaggctgccatttgtcctgcccaccttcttagaagcgagacggagcagacccatctgctactgccctttctataataactaaagttagctgccctggactattcaccccctagtctcaatttaaaaagatccccatggccacagggcccctgcctgggggcttgtcacctcccccaccttcttcctgagtcactcctgcagccttgctccctaacctgccccacagccttgcctggatgtctatctccctggcttggtgccagttcctccaagtcgatggcacctccctccctctcaaccacttgagcaaactccaagacatcttctaccccaacaccagcaattgtgccaagggccattaggctctcagcatgactatttttagagaccccgtgtctgtcactgaaaccttttttgtgggagactattcctcccatctgcaacagctgcccctgctaactgcccttctctcctccctctcatcccagagaaacaggtcagctgggagcttctgcccccactgcctagggaccaacaggggcaggaggcagtcactgaccccgagacgtttgcatcctgcacagctagaggtcctttattaaaagcacactgttggtttctgctc

SEQ ID NO: 1217 - DNA, 2531 bp, Homo sapiens
ttatagagagcagagggaagagccggctgtgcccatccttttctggggccatcgagtggctcctgggcagcccccaaggttaggaagggcaggagcagccagggttctctgatgccccagactcaagcacgagggaaggtctcaggggttccatgtgagcctcatggatgtctctgcttagcagagccctggctttgggcattgtccagatagggggtgagaaccagatcttctcatctccaggacctcagacgtatagttttctcagatttctgtgctttctggggctgggctactagtggaagaaagcagtctattctgtcttctcccaaatctcccagatgcccagtctgttgaaggaggagcagaaccagggggcctttcccgctgaggcccgacctgtgtctccttcaaatgacacgcgggactcagggccttcccatgaccatggggcccagggggcgtcacctggcccagggcccagtgctagaaacagatgaccccaggaggaggaggcagggcaggagggaagctggcagggctgggatggtcagccaggctgaggggcggactcgcaccaggatggagctaggaaatgatccaggtgtgtttggcggctgcaggtgggtccgcatggctgtgcagggagggaagggctgcgtggcaggagagcagccgggggaggcccagactctgctgaagagatgcctgttgtgccggcctccacatccgctgcccgctccttccggagctcctgccccgccatgctcagcctgactctgaccaacacgttggagagaagaatgatccctttgtgctattaagcttgcttatttggtttctaagtgcttcatgcgaacctagagggaaaaattattttccacctttgtttgtcttaagaaaataacacacttttttttttcctatttgaacaggcagacggctaatccacatggtcttcgtccttgacgtcgttttacaagaaaacaatggggctggttttgcttccccgtgcatgatttactcttagagatgattcagaggtcacttcatttttattaaacagtgaacttgtctggctttggcactctctgccattctgtgcaggctgcagtggctcccctgcccagcctgctctccctaaccccttgtccgcaaggggtgatggccggctggttgtgggcactggcggtcaagtgtggaggagaggggtggaggctgccccattgagatcttcctgctgagtcctttccaggggccaattttggatgagcatggagctgtcacctctcagctgctggatgacttgagatgaaaaaggagagacatggaaagggagacagccaggtggcacctgcagcggctgccctctggggccacttggtagtgtccccagcctacctctccacaaggggattttgctgatgggttcttagagccttagcagccctggatggtggccagaaataaagggaccagcccttcatgggtggtgacgtggtagtcacttgtaaggggaacagaaacatttttgttcttatggggtgagaatatagacagtgcccttggtgcgagggaagcaattgaaaaggaacttgccctgagcactcctggtgcaggtctccacctgcacattgggtggggctcctgggagggagactcagccttcctcctcatcctccctgaccctgctcctagcaccctggagagtgcacatgccccttggtcctggcagggcgccaagtctggcaccatgttggcctcttcaggcctgctagtcactggaaattgaggtccatgggggaaatcaaggatgctcagtttaaggtacactgtttccatgttatgtttctacacattgctacctcagtgctcctggaaacttagcttttgatgtctccaagtagtccaccttcatttaactctttgaaactgtatcatctttgccaagtaagagtggtggcctatttcagctgctttgacaaaatgactggctcctgacttaacgttctataaatgaatgtgctgaagcaaagtgcccatggtggcggcgaagaagagaaagatgtgttttgttttggactctctgtggtcccttccaatgctgtgggtttccaaccaggggaagggtcccttttgcattgccaagtgccataaccatgagcactactctaccatggttctgcctcctggccaagcaggctggtttgcaagaatgaaatgaatgattctacagctaggacttaaccttgaaatggaaagtcttgcaatcccatttgcaggatccgtctgtgcacatgcctctgtagagagcagcattcccagggaccttggaaacagttggcactgtaaggtgcttgctccccaagacacatcctaaaaggtgttgtaatggtgaaaacgtcttccttctttattgccccttcttatttatgtgaacaactgtttgtctttttttgtatcttttttaaactgtaaagttcaattgtgaaaatgaatatcatgcaaataaattatgcgatttttttttc

SEQ ID NO: 1218 - DNA, 2879 bp, Homo sapiens
agtctggggcaaggctggggaccttccaactgaagaaggaagacttgtggtggggggagtttggggccccacagagtggggcagagaaggagacagcctggaaggagtgatggggagaccccagggagcccaggaggcatgagggaggtgggggaagcgagggaggctcacggggcaccagcgcaagcaccgcacacaccttctgttgtcactgtggctcacgaagtgaactctcctcccccgctgggggagaaggaagctgcctgggctgccacctgctctcctgccttacctccccccacagccctcatggatccttctctaccaggagggcactgttttgtaggcttcagtccttttgtgggcaagggaaggtgcccggcagggttggggcttgtcagggaagaatcgagggccctagagagaggggcacagcactaagtcttagcttgaggggttgtgctccaaggctggagctctcacacttggctcaagatgaagctctgccgcgtccccaaggtcagggtagggtgatttattgtgcttttattgcctggatagcttgcccagagccagcaggaggtactgggctgggagctgggggctgggtggggcagcgggcacatacaaagcaccctctgtgcctgtccccgagttggcaggagcatagcaccctgctcactgtgccggaggtttccagcctggccctacccctctgggccttctgaggggaggggccactggcagaccaagaaggaactgcagcaactccccattccccacccccagcccctcctcagcatcttgtctgtggcctgtgaactttgtgtcgcatatgttctaagatcctgccagctcctgcagcctctcctcagtggcccctcaacctctgccatcccccagaacccctggccttggcccctttctctaaccccttgctcctttccatcttttggaaacttgtctccagctgcccacactgttcccttcccagccctatctgagcaggtctttggaggctgggggggttgctttctaggtcaccgcagagggagctgggaacctggggatgtgggtcaagattgtgggggccgcatctgagcatgccgcatcccccggcacagactgcactggctgcagactattatgtcctcagcctcggaattgttctgtcccttggagcccggggcaggagtatgtggattggcatctatgactgggcagtgccagggagtggggactatgcatcgcatgggaggtaggatcagggtaagcagtgagccctcagcaggctgggcacccccaagaaatggaaagtggcaaatccccaggccctggttcctacgccctgtgccttctgcctgggcttgaagctgggagacactgtctcccgtactgggtacttggaaaatcaagctctccagccagggaatgttaagctgctgctgtgcccgcctggtcttgcccagcctagtgccctatggtgtgggggagctgcctgggggctagcatcttaggacagcttaagagccaaacatgatcaaatctacccctggctgcctctgccctggtctgacacccatcaggctgacctgtcaactttggcccttgaacttgggcccctgagggggtattctctgccccaggcctacgggaaggaggctgggggctaggccacaggctatctccagatccatgggctgtgtctagctgacccttgctttcctcggtctcctctgtgccagctgtgcagcgcattgctgagtctcacctgcagtctatcagcaatttgaatgagaaccaggcctcagaggaggaggatgagctgggggagcttcgggagctgggttatccaagagaggaagatgaggaggaagaggaggatgatgaagaagaggaagaagaagaggacagccaggctgaagtcctgaaggtcatcaggcagtctgctgggcaaaagacaacctgtggccagggtctggaagggccctgggagcgcccaccccctctggatgagtccgagagagatggaggctctgaggaccaagtggaagacccagcactaagtgagcctggggaggaacctcagcgcccttccccctctgagcctggcacataggcacccagcctgcatctcccaggaggaagtggaggggacatcgctgttccccagaaacccactctatcctcaccctgttttgtgctcttcccctcgcctgctagggctgcggcttctgacttctagaagactaaggctggtctgtgtttgcttgtttgcccacctttggctgatacccagagaacctgggcacttgctgcctgatgcccacccctgccagtcattcctccattcacccagcgggaggtgggatgtgagacagcccacattggaaaatccagaaaaccgggaacagggatttgcccttcacaattctactccccagatcctctcccctggacacaggagacccacagggcaggaccctaagatctggggaaaggaggtcctgagaaccttgaggtacccttagatccttttctacccactttcctatggaggattccaagtcaccacttctctcaccggcttctaccagggtccaggactaaggcgtttttctccatagcctcaacattttgggaatcttcccttaatcacccttgctcctcctgggtgcctggaagatggactggcagagacctctttgttgcgttttgtgctttgatgccaggaatgccgcctagtttatgtccccggtggggcacacagcggggggcgccaggttttccttgtcccccagctgctctgcccctttccccttcttccctgactccaggcctgaacccctcccgtgctgtaataaatctttgtaaataac

SEQ ID NO: 1219 - DNA, 2395 bp, Homo sapiens
agcctcaggcgccgcggtgccgggctccgtgcagttggcgctgagcgtcctgcacgccctgctctacgccgcgctgttcgcctttgcctacctgcagctgtggcggctgctcctgtaccgcgagcggcggctgagttaccagagcctctgcctcttcctctgtctcctgtgggcagcgctcaggaccaccctcttctccgccgccttctcgctcagcggctccctgcccttgctccggccgcccgctcacctgcacttcttcccccactggctgctctactgcttcccctcctgtctccagttctccacgctctgtctcctcaacctctacctggcggaggttatatgtaaagtcagatgtgccactgaacttgacagacacaaaattctactgcatttgggctttataatggcaagcctgctctttttagtggtgaacttgacttgcgcaatgctagttcatggagatgtcccagaaaatcagttgaagtggactgtgtttgttcgagcattaattaatgatagcctgtttattctttgtgccatctctttagtgtgttacatatgcaaaattacaaaaatgtcatcagctaatgtctacctcgaatcaaagggtatgtctctgtgccagactgtcgtcgtgggctctgtagtcattcttctgtactcttccagagcttgttataatttggtggtggtcaccatatctcaggatacattagaaagtccatttaattatggctgggataatctttcagataaggctcatgtagaagacataagtggagaagagtatatagtatttggaatggtcctctttctgtgggaacatgtgccagcatggtcggtggtactgtttttccgggcacagagattaaaccagaatttggcacctgctggcatgataaatagtcacagttatagttccagagcttactttttcgacaatccaagacgatatgatagtgatgatgacctgccaagactgggaagttcaagagaaggaagtttaccaaattcgcaaagtttgggctggtatggcaccatgactgggtgtggcagcagcagttacacagtcactccccacctgaatggacctatgacagatactgctcctttgctctttacttgtagtaatttagatttgaacaatcatcatagcttatatgtgacaccacaaaactgacagcatcaccaagtcatgattcttgagttgtttttcataaatgtgtatattcaatgtgtttaaattccatctacataaacattccattatctgttgcaactgaaaacaaaatctggaagtgtggctgtgtttggtaaataacacagctattatttttgacctcttcatagtaaaatgaagtaaaatggaaagtttggagtaggagaaaagagagattagatcttaaggcacttgatggcctccaaaaatcctgactttggaacatcaaatgcatatgtgcacttttatctttgttctgagtcactgcagtccccaaagtcatatgccaatgttcacactgaaatactgtattgtacaccaaactggaaggcaattttcctatgaaaatcaaagccggtatattcattggtatgctctatacagatatcttaataaaaattttatagtgtgaacagtgcacagagttaaggcataaaaatgtatcattctttataaaaatctactgaaaatgtgtaatcattgaagacagttcttttaagcatgattttaaaatagcaactgaaattcaatcattttaaacaaatgatggtagtaatccattagttatggccagcagtgttctttggagagccacaataatttcaagaggaaaatataccagtgaaaattgtgtggctattttgagtagaattggtcagttgattattttgtgtaattgagatatatgtagtagtttaagcatgattcttgaagaaagcaatagtgacttttgcatagggagattttggtagaaacttcttgggactaaacaagtttagagatgcatttaagaattattcacaaaatgtgtaattctaaattaaaacataaatatattttcaaaagcatttgatttctctgaagcatgatatagctggtcttacctagtgaatcaggattgtcctcaggtaaatgaaatcatgatacattattgcagtgaactcaagtgcaatactttgtaagacatataattcctatgattttcacatctttatatcttatatatgggaaaagccaaattaaattgaattcagattaattccagcattagactaagtgagcaaacttaagtaaatgtacaaactaggtaagtataaaaccacaggttaacaatattggagtacttttagaattacattaaaactgtcttaaatgtcctatcccaaatct

SEQ ID NO: 1220 - DNA, 3059 bp, Homo sapiens
tttttctcgactgaggatgctgctgcccggtggccagcaagggccctgtcggtctcaaacgtgaattttggaccgacacaatctcatgtagtgattgttctgctttctgtgttgcgccacaacaaatttccttgggctacattttccctcagatttgagtaaaagatttgaggtcacgctaaggagcctgcatactgaggtacagaaacggttttttgtttacaacaacaacaaaaaacctcgcgacgggaccgccgagtttgcggcagccaaaaaagctagcgatgagctcagcaaaagtgccgggactctcggatagatttctaacatgtttgaaatgtggaccccaacgctggaacccaacgctgttcttttgtggtctctggaaccaccacgctggaataggctggaacccaaccaacgctgttcttttgtggtctctgcctctggggagtccacaagctgtaaatctaacatgcagccagccgtgcggcttctggccgccccacgtctgagtaaagccttcactgtgactagcagggagaggagactgactggagccagagaatggaggcggcgggctggcgggggtggggagaggcactttcaggcgcacttcacagacgcacaaaaacaaggaagcctgaagggaaggcggttgaaaataaggcaacagaagccgcgaacggaagcgcgcccccctcaggattggtttaacattccgaagctcagcctcgcccgccccgaagacctgctgcggatcgcggccgcgcgcgcgcgcactcacgctgctctcgggcgctgggcggggagagccgcgcgcaccggttaattctgccaatcatgcgtctgggcctcccatcgtgtgggccaagccccgccccaaccacccgctggcggaggcgcgcgcgcagtcccaccgctctgagtcgctgagtgaagcggcgcctcgcgcgtcaggcaatctggccaattgcgcatcttttccgcctaccgcacggccccgcccctgccacaggatcgatttacggccgcagagaaaaaccaagatttcactttcaagatggaaagtccgtcagactcagctgtggttttacctagcactcctcaggcctctgcgaatccatcatctccctatacaaatagttcccgaaaacaagtatgaaaatctttgttcttccagtggatccattatgtgtttctaagtattgtggcagtggtggtttaaattctacggaaggttgttaattaacataatgtgtagcataaataagtagacattttattaaataattttgtttttcttctaaggtgacatatatgacacccaccagcccccttccatattttcctcttgaatgaattcatttcagttagtttcagattaggttattacaatactccagatggagaaagtttgcatctgtgcaatattattatgaaggtctttagtggcagagtctaggtcttttccttactctgtaattctgaagcacctggagtactatcaggcatgtgcttgttactgaacaaatgttccttgattactgggataaacttctcaacacttttggaaaggtgttgatcttgctgaagtaaaaaggaaataaaacaaatggagcttccagaaattaaagtcattttgtgatgccttctttagatgtggagacagaaagccatctagtggtgtctagcatagaaatggaaggcctttatttctggtgatttattgacattaagaatgtttttcttgattcacatttttaatgttttgtgctctttatagcctatgagtgcaacacttagagaaagattaaggaaaacaagattttcatttaattcctcttacaatgtggtgaaacgtcttaaagtagagagtgaagaaaatgatcagaccttttcagagaaaccagcatcttccacagaggaaaactgtttggaatttcaagaaagttttaaacatatagacagtgaatttgaagaaaatacaaatttgaaaaatactttgaagaatctcaatgtctgtgaatctcagtcacttgattctggatcatgcagtgctctccaaaatgagtttgtgagtgagaagcttcctaaacaaagattaaacgctgaaaaagccaaattggtgaagcaggttcaggagaaagaagaccttcttcggaggctaaaactagtcaaaatgtatagatcaaagaatgatctgtctcagttacagttgttaataaagaagtggagaagctgtagccagctcttgctttatgagttgcagtcagctgtgtctgaagagaacaagaaactaagccttactcaattgatagaccactatgggttagatgatagattactacactataacagaagtgaagaagaatttatagatgtttaattcctgatttttgctccagaatatctttgagaatgacaacttaattaaaagatacttaggcactttttttttttttgagactgagtttcgctcttgtcatcctggctggagtgtgatggtgcgatcttgactcactgcaacctctgcctctcgggttccagcaattctcctgcctcagcctcccgagtagctgagattacaggcgcccgccaccatgcccggctaatttttgcatttttagtagagactgggtttcaccacgttggccaggctggtctcgaactcctgacctcaggtgatccaccgcctaggcctcccaaaaccattagggctcagaggaaggtatcccgatgaatatcaattaagggcactttaatatataaattataaactaagttctaaaaggaaaattagtattttggatagatttgtcaaaacgacatttaagtcatgtttaaaaagtcatttgggcagttctggaaactagttttaatacatttgttttttatgacaaaaagttttattttaaatgttaaaaattgtccaatctggtgaatgtctaaccctaaagtttaaaaatttctgcctcctaagtttatgtaccttgtttccatccatttaccacatatttccatctgataatctagcaggtaattaaacttatatgtcc

SEQ ID NO: 1221 - DNA, 2750 bp, Homo sapiens
aaatgagggagatttaggctgcacttaaaatgagtctaggcagggacagccaagtcaccttccagggaagagtctcccccgggagtgagacccggtgccttctgttgtgtggtcggctgtgcagcatcgtgatgagaaggcacaggggctgcggaactgtctaaagaggggactcccagcttcaaggactgttttatgtgacagccctgccagggaggcctggggacatcatcacagcccccaccctcagacaacacccatgagtcagcagagcctgttggcctgactcctgagtgccgtgcagcccctggtagaagtcactgacacggctgagtaacggttcctcggccctcggctggctctgccatttcacggcaagggacggttgatgatgaagcgccggccgtgtaaatgaagatcgggtgaggagcaggacgatgcccaagggtgggtgccctaaagcaccacagcaggaagagcttcccctcagcagcgacatggtggagaagcagactgggaaaaaggataaagataaagtttctctaaccaagaccccaaaactggagcgtggcgatggcgggaaggaggtgagggagcgagccagcaagcggaagctgcccttcaccgcgggcgccaatggggagcagaaggactcggacacaggaccgccggggtcctgcttgtcctggggcagccacgagggagccctcgtcaggagcgccatgggccgaagctgcctgccctctgcacgtggatgtttctttggaacaaggggaaaaattatgattttcttattttgctttgacctgtgaatgacaccctggtctctggtgcctggggtgtgctctctgcagtgctgccaggcacatgctggttccttcagcgttaggtgcttggcaccttcagtcttttcctgacgtcatgtttgttcctggtgcctcagataggagacggctgttctgacggctcctgcttccccattcctggagggaagacagacttagccactggtatctgtgggacttcttggaactctgaatgccagaccttgcccagtgctagaggcgacaagtgtgtgaagttgaagaggcttctcccacctgctcagctgcagtggacccgagcgggcagagagagcagagtgcagcaggggccaggctgtgctcgcaggcggggcaggtgcctggagagcatggcgcccctgggagcctctggccaggaagggcatgtgcactgcagtgtgccgtggaccagtggcctcagctcagtgtgttgacgagggtcccaaggcactcacgtgtgtggggatgttagcaacacacggcgggaagccctgatgcagtttctcaccaagcgtgtagcagaccccacgcaccccacacaggtcaggcaccccacacagggcacagaccccacacaccccacacagggcaggcaccccacacagggcacagaccccacgcaccccacacagggcaggcaccccacacagggcacagaccgcacgcaccccacacagggcaggcaccccacacagggcacagaccccacgcaccccacacagggcaggcacctcacacagggcacagaccccacgcatcccacacagggcaggcaccccacacagggcacagaccccacacaccccacacagggcaggcacctcacacagggcacagaccccatgcaccacacacagggcaggcaccccacacagggcacagaccccacgcaccccacacagggtacagaccccacacaccccacacagggcaggcaccccacacagggcacagaccccacgcagcccacacagggcaggtaccccacacagggcacagaccccacgcaccccacacagggcaggcaccccacacaaggcacagaccccacgcatcccacacagggcaggcaccccacacagggcaggcatcccacacagggcacagaccccacgcaccccacacagggcaggcacctcacacagggcacagaccccatgcatcccacacagggcaggcaccccacacagggcacagaccccacgcaccccacacggggcaggcagctcacacagggcacagaccccacgcaccccacacagggcacagaccccacgcaccccacacagggcacagaccccacacaccccacacagggcaggcacctcacacagggcacagaccccatgcatcccacacagggcaggcaccccacacagggcacagaccccacacaccccacacagggcaggcaccccacacagggcacagaccccacgcaccccacacagggcagggatcccacgcagggcacagatcccacgcagggcagggccagcccaaggccaggcccctcccctgtagatctcctcccaggcaggaccagagccacagtcacttccacactatctccttccctagaaacctctgcagactcttcctcctctcctcgatacacaggggcccctgccacagcctgactctctgccacctcgtgagtctctggaaagcagggtcggcctctgaatacagaggacttgggtcctgccggaggatgcttggccagtgggtgctggcacgtgagcagcccccggggagtcagagtggggctgcagcgaaggccgtggtggtcgaggtgagggtggtggccaggtcttgttgccgcagtgaggattctggggttaccctaagagccaccacattcaggcactcaagaaaaagcacgtcaaaataaaatattttcacctg

SEQ ID NO: 1222 - DNA, 2103 bp, Homo sapiens
tcgctgcgggaagggtcctgggccccgggcggcggtcgccaggtctcagggccgggggtacccgagtctcgtttcctctcagtccatccacccttcatggggccagagccctctctccagaatctaagcagcaatgccgtttgctgaagacaagacctataagtatatctgccgcaatttcagcaatttttgcaatgtggatgttgtagagattctgccttacctgccctgcctcacagcaagagaccaggatcgactgcgggccacctgcacactctcagggaaccgggacaccctctggcatctcttcaatactcttcagctccctacatgggctggggaggagacacctggtgggcagagctcaggcagaggtttggatttcagctccctcacttccggggctgtgtggctttggcagatgtcagacttctggtcttgcttctccacgtggacagtgagtatctggctcattcttcactgggttcttctgagattgaacctacaggtgtttgccaagtgcctggcccagagcaagtggccactgcttctcccatctctctcctgcccaacctggtagagctgagggcatgagaggcagagtgcacagtggtcaagggtgcagctctgcagcacaggcagcctaggcctgcgtcccaacctgcctctcaccagctctgtgaccttgggcaagggatttatctgtctgtcccttagttttctcacctgtaaaaggaggataagtatatatatatatttcccagtgttgtgaagattaaagttgtttatcgatgtaggtcttaggatgagtcctggcatttaccaagggttggatatatgttattatcactattaagtgttgagggtccaggcatgctgggcaacagggaccccatctctacaaaaaagtttaaaaaattagccgggcgtggtggtgcacctgtcgtcttagctgcttgggaggctgaggtgggaggatcacttgagcccagaagcttgaggctgcagtgagctgggatcgtgccactgcactccaacctgggtgagagagcgagaccctgtctcaagaaaaagaaaaatgcagagaaacaggagtcttggctactcctttagaggcagactcagaccctcctgcctcacagctttatctttgtatttgccccttactttatcttgtgccttgagaaattgctggggagagaggtatgtccactgggcagctgtacaggatggaggatctagggcgtttccactcccagcagccaggttccctcaccccaagctcacccactgttggggagattatctacaataacaccagaaacacattggggtggattgggggtatccttatgggttcttttcagggaaccattgctggacaaggcacaggagccacctccatttctgagctctgcaagggacaagaactagagccatcaggggctgggctcactgtggccccaccccaagccgtcagcctccagggatctacaccctgccttggctgctacagctttttcactccactgccctaggggagttcagcaacctaatgatctctatctctgaacatctcttcatcccatgctccaagtccagcaacctgcaccctggaaccaggagtggaccctacccgagctgtctgtattaatccccatcccccaccaccaatcttaaaaagccctctgtccccctaccctaaaccccagttaggtacccatgctgggcaggtcagttaacaatttatgcacaggtactagttttattgtattaccgttccagggtagctttgaaaaaagtatctcaaaaaggcaacatgggccgagcgcagtggctcgcgcctgtaatcccagcactttgggaggccaaggtgggcagatcgcctgaggtctggagttcaagaccagcctggccaacagggtgaaaccccgtctctacaaaaataagaaaattagccaggtgtagtggcagacgtctgtagtcccggctattcaggaggctgaggcacgagaattccatgaacccaggatgcggaggttgcagtgagccgagattgtgccactgcgctccagcctgggcgacagagtggtattctgtttc

SEQ ID NO: 1223 - DNA, 3696 bp, Homo sapiens
cccagtccccggcgtccccggcgcccccgcccgccgcccgccccccgcgcggcacggggcctgctccatggacgaccagagccccgctgaaaagaagggactgcgctgtcagaaccccgcctgcatggacaaggggcgggcggccaaggtatgtcaccacgccgactgccagcagctgcaccgccgggggcccctcaacctctgcgaggcctgtgacagcaagttccacagcaccatgcattatgatgggcatgtccgcttcgaccttcccccacaaggctctgtgctggcccggaacgtgtccacccggtcatgcccgccgcgcaccagccccgcagtggacttggaggaggaggaggaggagagctctgtggatggcaaaggggaccggaagagcacaggcctgaaactctccaagaagaaagcaaggaggagacacacggatgacccaagcaaggaatgcttcactctgaaatttgacctgaatgtggacattgagacagagatcgtcccagccatgaagaagaagtcactgggggaggtgctgctgcctgtatttgaaaggaagggcattgcgctgggcaaagtggacatctacctggaccagtccaacacacccctgtccctcaccttcgaggcctacaggttcgggggacactaccttcgtgtcaaagccccagccaagcctggagatgagggcaaggtggagcagggcatgaaggactccaagtccctgagtttgccgattctgcggccagctgggaccgggccccccgccctggagcgtgtggacgcccagagccgccgggagagcctggacatcttggcccctggccgccgccgcaagaacatgtcggagttcctgggggaggcgagcatccccgggcaggagccccccacgccctccagctgctctctgcccagcggcagcagtggcagcaccaacactggcgacagctggaagaaccgggcggccagtcgcttcagcggctttttcagctccggccccagcaccggcgcctttggccgggaggtagacaagatggagcagctggagggcaagctgcacacctacagcctcttcgggctgcccaggctgccccgggggctgcgcttcgaccatgactcctgggaggaggagtacgatgaagacgaggatgaggacaatgcctgcctgaggctggaggacagctggcgggagctcattgatgggcatgagaagctgacccggcggcagtgccaccagcaggaggcggtgtgggagctgctgcacacggaggcctcctacatcaggaaactgcgggtgatcatcaacctgttcctgtgctgcctcctgaacctgcaagagtcagggctgctgtgtgaggtggaggcggagcgcctgttcagcaacatcccggagatcgcgcagctgcaccgcaggctgtgggctagcgtgatggcgccggtgctggagaaggcgcggcgcacgcgagcgctgctacagcccggggacttcctcaaaggcttcaagatgttcggctcgctcttcaagccctacatccgctactgcatggaggaggagggctgcatggagtacatgcgcggcctgctgcgcgacaacgacctcttccgggcctacatcacgtgggcgtagaagcacccacagtgccagaggctgaagctgagcgacatgctggccaaaccccaccagcggctcaccaagtacccgctgctgctcaagtcggtgctgaggaagaccgaggagccgcgcgccaaggaggccgtcgtcgccatgatcggctccgtggagcgcttcatccaccacgtgaacgcgtgcatgcggcagcggcaggagcggcagcggctggcggccgtggtgagccgcatcgacgcctacgaggtggtggaaagcagcagcgacgaagtggacaagctcctgaaggaatttctgcacctggacttgacagcgcccatccctggcgcctccccggaggagacgcggcagctgctgctggaggggagcctgaggatgaaggaggggaaggacagcaagatggatgtgtactgcttcctcttcacggatctgctgttggtgaccaaagcagtgaagaaggcagagaggaccagggtcatcaggccacccctgctcgtggacaagattgtgtgccgggagctacgggaccctgggtccttcctccttatctacctgaatgagtttcacagtgctgtaggggcctacacgttccaggccagtggccaggccttgtgccgtggctgggtggacaccatttacaatgcccagaaccagctgcaacagctgcgtgcacaggagcccccaggcagtcagcagcccctgcagagcctggaagaggaggaggatgagcaggaggaggaagaggaggaggaggaggaggaggaggaaggcgaggacagtggcacttcagctgccagctcccctaccatcatgcggaaaagcagcggcagccccgactctcagcactgtgcctcagatggctccacggagaccctggccatggttgtggtagagcctggggacacgctgtcctcccccgagttcgacagcggtcctttcagctcccagtctgatgagacctctctcagcaccactgcctcatctgccacgcccaccagtgagctgctgcccctgggtccggtggacggccgctcctgctccatggactctgcctacggcaccctctccccaacctccttacaagactttgtggccccaggcccaatggcagagctagtgcctcgggccccagagtccccacgagttccttcccctccaccctcgccccgtctccgccgccgcacccctgtccagctgttgagctgcccgccccacctgctcaagtctaagtccgaggccagcctcctccagctgctggcaggggctggcacccatgggacaccctctgcccccagccgcagcctgtcagagctctgcctggctgttccagccccaggtattaggactcagggctcccctcaggaagctgggcccagctgggattgccgaggggcccctagccctggcagcggtcctgggctagtcggctgcctggccggggaacctgcaggctcccacaggaagaggtgtggagacctgccctcgggggcctctcccagggtccagcctgagcccccaccaggggtctctgcccagcacaggaagctgaccctggcccagctctaccgaatcaggaccaccctgctgcttaactccacgctcactgcctcggaggtctgagcagagggaggcccccaagagtgccattgaccaagagacagcagacagcctgcctcctggggcgtgccggcacctgcttcagctactgcctcctgtatgcatgagccggatgctgggcaggatccctgcctacgcccgggcccgatttgcgctttgccggactggatggagtggaggaggcccaggccacagtaccaccccacctgcccaggcagcccctcgtcacctactccccgaatttaccagctcagctcgagtcttcagggctgggctcctaggctgcccatcctacttctaccctcactggcctccagtgggattcactcctgccctgcccccaccttcccagtcccacaggccacccctggcttgggctgggttctgtgaagttacgtatttattgagcttttggttcttttataaagacttgtctagactcc

SEQ ID NO: 1224 - DNA, 2589 bp, Homo sapiens
acgtgggagagaagggagggttgggggaagtgtggaaaacctgaacctgagctgctgtcgcctgaggaagatttggtgggaggagaagcagaggggaagagacgggttgagagtgaggtgaggagggcatctaggtcactgctcccggggggcacaaagttcgcgatgtggctgaagcctgaggaagtgcttctgaaaaatgcgctgaagctgtggctgatggaaaggtccaacgactacttcgtgctgcagcggcgtcggggctacggggaggaaggcggaggggggctcacagggcttctggttgggactcttgattcagtcttggactctactgctaaagtagctccatttcgcatcctacaccagacaccagattctcaagtttacttgtcaattgcatgtggagccaacagagaagaaataaccaagcattgggattggttggaacaaaatattatgaagaccttatctgtatttgattcaaatgaagatattactaattttgtacaaggaaaaataagaggattaattgctgaagagggaaaacattgttttgcaaaagaagatgatcctgagaaatttcgagaagcccttttgaaatttgaaaaatgttttggtttaccagagaaggagaagttagtgacctattattcatgcagttattggaaaggacgggttccttgtcagggttggctttatcttagcaccaactttctgagcttctattcttttttgttgggatcagaaataaaactcattatctcctgggatgaagtctcaaaacttgaaaagacttcaaatgtcatactgacagagagtattcacgtgtgttcccaaggagagaatcactacttttcaatgtttttgcacattaaccaaacataccttcttatggaacagctggcaaactatgccattagaagactttttgataaggaaacatttgataatgacccagtcctttataatcctctacagatcaccaaaagaggtctggaaaatagagcccacagtgagcaatttaatgccttttttaggctgcccaaaggagagagtttgaaagaagtacatgaatgtttcttatgggtaccattcagccacttcaatactcatgggaaaatgtgcatctcagaaaattatatctgctttgctagccaagatggcaatcagtgtagtgtaatcattccactacgagaggtcttagctatagataagacaaatgattccagcaaatctgtcatcattagcatcaaaggaaaaacagcttttcgcttccatgaagttaaagactttgaacaactggtagcaaaactcaggctcagatgcggagcagcttcaactcaatatcatgatattagcacagagcttgctattagttctgagtctacagagccatctgataattttgaggtgcaatctttgacaagtcagagggaatgcagtaaaactgtgaacactgaagccttaatgacagtatttcaccctcagaatttggagactcttaattctaaaatgttgaaagaaaaaatgaaggaacagtcatggaaaatactgtttgcagaatgtggacgtggtgttagtatgtttcgaaccaaaaagactcgagatcttgttgtaagagggattccagaaacattaagaggagaactctggatgcttttttcaggtgttgttaatgacatggctactaatcctgactattatactgaagtggttgagcagtccttagggacctgcaacttggctactgaagaaattgaacgtgatttacgtcgctctctgcctgagcacccagcctttcagagtgatactggcatatctgctctgagaagggtactcacagcttatgcatacaggaatcccaaaattggatactgccaggcaatgaatattttgacttcagtgctgcttctatatgcaaaagaggaagaagctttttggcttctggttgctgtatgtgaacgaatgttgcctgattattttaatcgtcgaattattggttcagatgattttatgccactagtaagaatccaaggacaatgtgttattggggagaagtagaaaaaggaaaatctggggtagcacctggcatgctctttctccaattttctactacttactcctattccccaaattctcccatcaaggaggaaatgaactctgagacagaagatgagttttcctcaaagcttgaccaggatataagtggatgccttattgggcaaagcagagggtaaccaattagaaggccctggcttctcttgattgatagctgagaactcatcagagggatcagtgctttctctgtgtattgctggagtctgaaagtgtgactctcatgtcactgattcatttctgaagtgttaaattcagaataaatttttgataatcaaaatgaacttagagaactttgttgtttggcattgtcaagagtgaagaattctaattatttgtgtatttatcttgtgttatgctagatattaaactccctgaacatgagactatttcattaattggtatagctcttataatacctagtacaggtctctgcatataataaagactcaataaataactcttcaaatg

SEQ ID NO: 1225 - DNA, 2906 bp, Homo sapiens
gtggctgaggtgagaaactggcgctgctgctgcctcggcagcacctgttggtgccggagcctcgtgctggtctgcgtgttggccgccctgtgcttcgcttccctggccctggtccgccgctaccttcaccacctcctgctgtgggtggagagccttgactcgctgctgggggtcctgctcttcgtcgtgggcttcatcgtggtctctttcccctgcggctggggctacatcgtgctcaacgtggccgctggctacctgtacggcttcgtgctgggcatgggtctgatgatggtgggcgtcctcatcggcaccttcatcgcccatgtggtctgcaagcggctcctcaccgcctgggtggccgccaggatccagagcagcgagaagctgagcgcggttattcgcgtagtggagggaggaagcggcctgaaagtggtggcgctggccagactgacacccataccttttgggcttcagaatgcagtgttttcgattactgatctctcattacccaactatctgatggcatcttcggttggactgcttcctacccagcttctgaattcttacttgggtaccaccctgcggacaatggaagatgtcattgcagaacagagtgttagtggatattttgttttttgtttacagattattataagtataggcctcatgttttatgtagttcatcgagctcaagtggaattgaatgcagctattgtagcttgtgaaatggaactgaaatcttctctggttaaaggcaatcaaccaaataccagtggctcttcattctacaacaagaggaccctaacattttctggaggtggaatcaatgttgtatgattctaatgagatacgtgattgtcaagagcctagtgtgctatctaaggtctagcagtcacttcactagtgggcagagacaagttctaattgtattacagcacaaacaaaactgactagtttttaaattgcacaattttttttttttaaagcaagaatcattttctgggtatgtaagtgtaaatgtagatgcaaatttggctgcacctctttatcatgcctgtattggcctataggtctgcactttagtgttttttaattgttttatttctgtgtatttacgaacagagaaataacccaaatattatttctgcttagtgtctttatttataaagcccatgagtagtttgtatgcatctttcctacttgtaaagatgagtaaaagtatgcagttttaaatttataatattattggatgttctttgctttggtagtctttccagaaaggataaacagtggtttttgttttgttttgttttattgtttaagtgggaccacttagcttcccgtttccttactagttaaagaacagacattaattttcagttgaatgtatttttgcaggcatcatattgttacagggccatttacacctattcacaaagcttaaatcctaccttgtgggactgaagtgctcttaatataactgtttattttcactgtgtaatatgcaaagcaaaagggaaattatttggtggatggtagctcaaaattggaactcttgttctaattcagttacattggctttaccctccttagatttttcatcaaagggctgtcccattgcaatcttactaaaacattttgttaaaataaactcttttcctttttatattaataattaggcttttaaataaagatgttattcctttaaaatggtgggcttaccatcattgaagatgtcactcaggtggccttgtttgatcaaaacgccttttttaaaaaccaagctttaaaaacatgtttataatttcatgaagtacatatatattgttcccatagtcttcagctttaaaactataaatatgcccaaattttgttatttgccctactttaagtaggtttattgtgtttgttttttcagtacttgtttttctctgataagactcaggaattctgaaatgtgaaattgtctcaattctttctcttgtagcatgaatcaaatgtatttattaatagcacttatgactatagaatataatttggcatatgattcatattacatatgtattcgttttatttttaaaatagtttataaacttaatgattttttttttacaaatgaggttatagatattaatgcaaattttctggtaggtatctctttttttgctatgatgattccaacttatcagagacctcccatttgccttttcattacggtgaaagctttgccctcatctactaaagtacaaaggaattctttggaagcagattattctagtcttatgctagagatgaatttgatcattttaatgtgtgatctttttgctctatcaggtataattgttttcctttcctttataatgggtaagttttctcacctttgagtaacagtaaagttcatttatatgtccatacctagaagaccagtgcaaatactttgagagcacctgggtctacaggacataattggcatctaaatcctcatttcttgctattagtaggaaaacagatatagtattgtaatacccttattctttttgaatcctgattactcatttcggttttttttctctcttttgaatctagttgctggttttcgtttaatgattttagtttaacaatcccaaccaacaatacatttgatttatttttttctgtctaacctgacaacctttttcttgtgcttcttgtttgttggttagtttttgtgaaaggaatcattgtttaagatcactgttttcatacttgttttacacttcacgtattttgaagtacatttatttactaagcatttgtgacttgaataatttcaccaaatgaatacattttggtagtttgtaatgagttcttctaattgttacactttgcttggtacttaacaataaatatgtaaaggtaaaagaaat

SEQ ID NO: 1226 - DNA, 2849 bp, Homo sapiens
taacacaagaagatattgaaggcattctacagaaatttactggaaatataatgcaagtgccccccctctattctgcattaaagaaagatggacaaagactttcgactttgatgaagagaggtgaagtcgtagaagcaaaacctgccaggccagtgactgtatacagtatctcccttcaaaaattccagccaccatttttcacattagatgttgaatgtggaggaggtttttatatcagaagcttggtcagtgacattggaaaagaactatcttcctgtgccaatgtgctagagctgacccgaaccaaacagggaccatttacgctagaagaacatgcccttcctgaagacaaatggacaattgatgacattgcacagtctcttgagcattgctcatctcttttcccagcagagttggcacttaaaaaatcaaaacctgagtctaatgaacaggttttgagctgtgaatatataactctaaatgagccaaagagagaagatgatgtaattaagacgtgttgagattggcctgggaatatcatcattttctagttgacatttgaatcctgtgtgcagatgcagaatgacaagctgcattcaaaagacaaacaatatgtcttttttttttttgcatgaagaaaaatgtctatcatttacagtttcaatagcacataatttattttctatgcattataaatggccttgcagttggctcagttgtttgttgtgttgtgaaatgttttaggattttttgtattgtgaaaatatgaatatgattggattcagaaaaattaactttctgaatttgatctgtcttcagtcttgtgaaaaagttgaacaaatttcctaatcaaagaaaaaagtatgagctccatgtttctttagtttcacaaaaatgaccataatttagtgttatttttactttatttagacttcctggtggcttcattttattgaaattctttaaattgtttaaagtggccattattgatctctttcttctgttttggagagtttattattaaaaacatttctttgataaaatggccatcatctagtaatacctgtgtttgtttagatcttggaaatgaataagctttgataatatttgtaaatgaaccaaattattactgctaccactaacaggttgtaaatagaagactaatacttaattaaagtcaccttcctaccattagagcagaagacagctcctatagttttgtattttggcagctatgagatattttcatggtaatgtcaacatggtcaagcactttgtaccaagttattaagtaacataatttttaaaatttaaagaatgtgtcttcaactaaaaactttattctttagcatttatttatatttctctgtagggtgttccctgtgacattgtctctttagtttgctctttcaagagatacttacagatgttgagatggctgccctgcatttccagctaatctcttctgctctaaatatttaaaaacagttcttctcaaacattttcattcagatagctttctgaaagttccctatccctctttaccataattttttaaatgtagccacattgtaatagtaaacttcatgtataatgagtgcttcatatttttgttatgggaaagcaatatattatgcagccagtctgtagaaacattcagatccctcttcctttactcaaatacagtttcaaaaggaagactcatgagaaatttcataaaatacaagtttttagatgtttatgctttgcctttctttttaaaggtgttttcctgctttgtagtctctaactctgaaatttaaaatatgtaaactaaagtggttttatttgtgcttaacccaatttaaactcaatgtaaaatgttatatatgcatcagtacagcattttcgacatattggcaacatattttaaatgaaaacactaaaacaattcttagtatgagacaaaactgtaaggaaaaagagtgttaataccatgatgcattaacataaaatatcaaacacacaaagtcataaaatgaaaatttacagttttacctgttcatatctagtgccccacagtgtgtgtcaaccaaaggtggcagtggctacatctgcctgttggactggtacaggttacaatatgtcctcttccattgcaaattaaagtccaaatagagaaatacttaggttttagaacacatcagaggtatttctgctgtatttttcaccttaaaaattgacacagagtttactaatagaggagtagagattgttgaccatttttaaaaaacgatagccactctttttcttttatgtttaaaactgaagttttgccaaatgggaaaattactgttacctctaccatcttaatgtagtaactttagaatttaaatttttatattactattttcctttttgttgttcacatagtcttaaggcacctatacttttaaattgactttttcatttgatattatctatatgtatgtagttgtgataatgattattttaattatattactttatactcttaatttatttagagtatttctctattgctgaatacttaagtagttttaaattttattatgataaattcctgggagggggattatttagtgaaataatatgaagaactttatgacttatgtttgccttattgcattcccaaagagttgtaacattttacagtgttaccatttgagtaggggttttatatgttgttgctaatttagtaaacataggagagaaatcaaagtttttctgatttgcttttatgtgatttatctgtatactttgttcatttatataaataaatgtcttaatggtttctatacataaaaaaaaaaaaaaaaaaaaaaaaaaag

SEQ ID NO: 1227 - DNA, 4159 bp, Homo sapiens
atagggtgcagaagagcccaagatgagagtgtgtagctatgagtgcctgccgtgggaagaggccatgaggacggagctgcagctggagtccagaagttcaggcagtgaaagggaggagagacagcgtctggagaccatcctcagtctctgtgctgaatacacaaagcctgacagtcgcttatctactgggaccaccgtggaagatgtgcagaaaatcaacaaggagcttgagaagctgcagctctctgatgaggagtctgtgtttgaggaagccctcatgagccctgacacaagatacaggtgccaccggaaagactccctccctgatgcagacttggcaagctgtgggagtttcagtcagagcagtgccagcttctttacccccaggagcaccaggaatgatgaactactcagtgacctcacccggactcctccaccaccatcctccacctttccgaaagcttccagcgagtcctcttatctaagtatcctaccaaagaccccagagggtataagtgaagaacagagatctcaggagttggctgcaatggaagaaacccggatagtcattctgaacaacctcgaggaacttaagcaaaaaatcaaagacataaatgatcagatggatgagtctttcagagagttggatatggaatgtgctcttttggatggagaacagaaatctgaaacaactgaacttatgaaggagaaggagattttggatcatctaaaccggaaaatagctgaactggaaaagaacattgttggtgaaaagaccaaggagaaggtaaagcttgatgctgaaagggaaaaactagagaggcttcaggagctttactccgagcagaagacccagctggacaattgccctgagtccatgagggaacagttacaacaacaactgaagagggatgctgacctgttggatgttgaaagcaaacactttgaagacctggagttccagcagcttgaacatgagagccgtctagatgaagaaaaggagaacttgactcaacagctcctgcgtgaagttgctgaatatcaacggaacatcgtttctagaaaggaaaaaatttctgcattgaaaaagcaagccaatcacattgttcagcaggctcagagagagcaagatcattttgtgtaagaaaagaataatttaataatgatgttgcaaagagaaaaggagaatctttgtaatttggaaaagaaatactccagcctctctggggggaaagggtttcccgttaaccccaatactttaaaagaggcccatctgcccctaggacagagtaacagctgtggaagtgtgctccctccctcactggcagccatggccaaagactcagaatctcggaggatgctcagaggttataatcaccaacagatgagtgaaggacacaggcagaaatctgaattttataaccgcacagcatctgaatcaaatgtctacttgaatagtttccattatccagatcacagctacaaggaccaggcctttgatactctgagcctcgatagctctgatagcatggagaccagcatctctgcttgctcaccagacaacatctctagtgccagcacttcaaatattgctagaatagaagaaatggagagacttttgaagcaggctcatgcagaaaagacgcggctgctcgaatccagggaacgggaaatggaagccaaaaaacgagccctggaagaagaaaaacgacgccgggaaatcctggaaaaacgattacaggaagaaactagccagaggcagaagttaatagaaaaggaagtaaaaataagggagagacaaagggcacaggctcgtcctttgacacgctacctgcctgtccggaaggaagactttgatttgcggagccatgtagagactgctggccacaatattgacacctgttaccatgtatcaatcacagagaagacctgccgaggattcctcatcaaaatgggtgggaaaattaaaacgtggaaaaaacgttggtttgtttttgatcggaacaagcgaacattctcttattatgcagacaagcatgaaactaaattgaaaggagtaatatactttcaagccattgaagaagtctattaagatcacctcaagaatgctaataagagtcctaatccgttactcacctttagcgtcaagactcatgacagaatctattatatggtagccccatcgccagaagccatgcggatctggatggatgttatagttacgggggcagaaggttacactcacttcttgttgtagtgaactgaggcaacagtccacttcagggcagacggcaataatctcttacaagaatgaagccatattcaaccccagatgagaaaacccaacagatccatcccttgagctgtaaacactcagaactcctttcatatcaagacaagttatttgtaaaaaataaagaaggggttttaatacaaaccttcataataaatagcaaaataattgaagcttccatgagaaagaaaacactattttgataaattggatcacttataggaacatttcttataaactgtttttaatcagttgtcggatttggtgaaataaactaaacaggttacagaatatctgtatgtacttggaaatacagaataactttatcacccacatcattggcattgacattattggtaatcaactggcttttttttaaaaaggtagcattttgttgacagttattttgtaaacataagcaaataagggcttggagggaaatacattttaggaggagttttgccttaattttttaagtactgcaccaaaaccaaagagctgacctgacttctgtggaacagtagtaactgcaagtgatgaactgcatttcgtattgttctgtatatttcaaaatggtattttgatgccatcaaatgcccaggaaattgactttgcagtgtcaccactggtgtaagctactatatatatatatatatatgtagtaaaccactttttgtaaaagaagaaagagcaaaaagctgtgcgttttagaaaaaaaagccatgttacacaacagacattctgtcatgttgaacaattttaaataaagagaatatctggtgttaggagcttgttttgctgaagatttctccattcctggtgctgagaataaaggcaaccagtagccaatgtcctttagattgtctgatttctttttgttgtggagcacacctgctaactgctccctcgacataactatgaaatcatagctctgttttcaccaaagaacagaccaattaacatacttatttgcagaagtggtgtagttctacaaaacggcaaatgaagttcaacttaatattctctataatgtattattttattttattttttacaattagccttttttttagttaatttttgtcaaatgaaacgacttcaggcaagtctcttttataatggtttttcaagtgccatttattctagtttatcatgttttgcatgtttgaaagtatgaatgtgctctttcctaaaacatggcaaatgaatagatgtagagaataacaatattacttacaagatgaaatgattagattagaagtgtccctttattaaactttgtcagcctgactgggtacaattcttttgttaatttgcagtgtggtttgtatacacatatacgtgttatcaataataagattttgcaactggatgacacaagattttacttgaacagtgaaggacaaaaatcatgattgtggaagatatttttaaaatctgattttgcagcgatcacttttaaaccctgtagtgatgtaagactaaaatataattgctaagattttgttggttaatgtaaagatatgacttttctgcactgtactctcttcataggattgtaaaggtgttctaatccaattgcatgatgtagtaagcctcttaaatatgtgtgttaaatatattgagtttggattaaaatgttgacatgatttcacatttgaaaataaactcatctctcattttgaagttacctatctgtagtatgacggaggatgaattaatcgcaaatgacagttgtagaaactatgtaaagtttgttgtgtgctaacattatgatttgtagtgtataaactgaagtattccaatagaagtatctctggttacatcctattgcttacaaaatgaaatgaaccctgaaaaactctg

SEQ ID NO: 1228 - DNA, 2843 bp, Homo sapiens
ctgatgaatgcctctaatgatattacaatggaaaatgtggtccatgagttggaactttataacacaggatattatttaggcatgttcatgaattcttttgcagtctttcaggaatgtggactctgggtattgacagatgcaaacctcacgaaggattatattgatggtgtttatgacaatgcagaatatgctgagaggtttatggaggaaaatgaaggacatattgtagatattcatgacttttctttgggtagcagtccacatgtccgaaagcattttccagagacttggatttggctagacaccaacatgggttccaggatttaccaagaatttgaagtaactgtacctgattctatcacttcttgggtggctactggttttgtgatctctgaggacctgggtcttggactaacaactactccagtggagctccaagccttccaaccatttttcatttttttgaatcttccctactctgttatcagaggtgaagaatttgctttggaaataactatattcaattatttgaaagatgccactgaggttaaggtaatcattgagaaaagtgacaaatttgatattctaatgacttcaagtgaaataaatgccacaggccaccagcagacccttctggttcccagtgaggatggggcaactgttctttttcccatcaggccaacacatctgggagaaattcctatcacagtcacagctctttcacccactgcttctgatgctatcacccagatgattttagtaaaggctgaaggaatagaaaaatcatattcacaatccatcttattagacttgactgacaataggctacagagtaccctgaaaactttgagtttctcatttcctcctaatacagtgactggcagtgaaagagttcagatcactgcaattggagatgttcttggtccttccatcaatggcttagcctcattgattcggatgccttatggctgtggtgaacagaacatgataaattttgctccaaatatttacattttggattatctgactaaaaagaaacaactgacagataatttgaaagaaaaagctctttcatttatgaggcaaggttaccagagagaacttctctatcagagggaagatggctctttcagtgcttttgggaattatgacccttctgggagcacttggttgtcagcttttgttttaagatgtttccttgaagccgatccttacatagatattgatcagaatgtgttacacagaacatacacttggcttaaaggacatcagaaatccaacggtgaattttgggatccaggaagagtgattcatagtgagcttcaaggtggcaataaaagtccagtaacacttacagcctatattgtaacttctctcctgggatatagaaagtatcagcctaacattgatgtgcaagagtctatccattttttggagtctgaattcagtagaggaatttcagacaattatactctagcccttataacttatgcattgtcatcagtggggagtcctaaagcgaaggaagctttgaatatgctgacttggagagcagaacaagaaggtggcatgcaattctgggtgtcatcagagtccaaactttctgactcctggcagccacgctccctggatattgaagttgcagcctatgcactgctctcacacttcttacaatttcagacttctgagggaatcccaattatgaggtggctaagcaggcaaagaaatagcttgggtggttttgcatctactcaggataccactgtggctttaaaggctctgtctgaatttgcagccctaatgaatacagaaaggacaaatatccaagtgaccgtgacggggcctagctcaccaagtcctgtaaagtttctgattgacacacacaaccgcttactccttcagacagcagagcttgctgtggtacagccaacggcagttaatatttccgcaaatggttttggatttgctatttgtcagctcaatgttgtatataatgtgaaggcttctgggtcttctagaagacgaagatctatccaaaatcaagaagcctttgatttagatgttgctgtaaaagaaaataaagatgatctcaatcatgtggatttgaatgtgtgtacaagcttttcgggcccgggtaggagtggcatggctcttatggaagttaacctattaagtggctttatggtgccttcagaagcaatttctctgagcgagacagtgaagaaagtggaatatgatcatggaaaactcaacctctatttagattctgtaaatgaaacccagttttgtgttaatattcctgctgtgagaaactttaaagtttcaaatacccaagatgcttcagtgtccatagtggattactatgagccaaggagacaggcggtgagaagttacaactctgaagtgaagctgtcctcctgtgacctttgcagtgatgtccagggctgccgtccttgtgagaatggagcttcaggctcccatcatcactcttcagtcatttttattttctgtttcaagcttctgtactttatggaactttggctgtgatttatttttaaaggactctgtgtaacactaacatttccagtagtcacatgtgattgttttgttttcgtagaagaatactgcttctattttgaaaaaagagttttttttctttctatggggttgcagggatggtgtacaacaggtcctagcatgtatagctgcatagatttcttcacctgatctttgtgtggaagatcagaatgaatgcagttgtgtgtctatattttcccctctcaaaatcttttagaatttttttggaggtgtttgttttctccagaataaaggtattactttag

SEQ ID NO: 1229 - DNA, 2349 bp, Homo sapiens
gctggttctacaaggaggacaagaagacctggaagcccttcatcggctacgactcgctccgcatcgagctcgccttccggaccctgctgcagaccacgggtgcccggccccagggcggggaccgggacggcgaccatgtgtgctcccccacgggcccagcctccagttccggagaagatgacgatgaggaccgcgcctgcggcttctgccagagtacgacggggcacgagccggagatggtggagcttgtgaacatcgagcctgtgtgcgtgcggggcggcctctacgaggtggatgtgacccaaggagagtgctacccggtgtactggaaccaggctgataaaataccagtaatgcgtggacagtggtttattgacggcacttggcagcctctagaagaggaagaaagtaatttaattgagcaagaacatctcaattgttttaggggccagcagatgcaggaaaatttcgatattgaagtgtcaaaatccatagatggaaaagatgctgttcatagtttcaagttgagtcgaaaccatgtggactggcacagtgtggatgaagtatatctttatagtgatgcaacaacatctaaaattgcaagaacagttacccaaaaactgggattttctaaagcatcaagtagtggtaccagacttcatagaggttatgtagaagaagccacattagaagacaagccatcacagactacccatattgtatttgttgtgcatggcattgggcagaaaatggaccaaggaagaattatcaaaaatacagctatgatgagagaagctgcaagaaaaatagaagaaaggcatttttccaaccatgcaacacatgttgaatttctgcctgttgagtggcggtcaaaacttactcttgatggagacactgttgattccattactcctgacaaagtacgaggtttaagggatatgctgaacagcagtgcaatggacataatgtattatactagtccactttatagagatgaactagttaaaggccttcagcaagagctgaatcgattgtattcccttttctgttctcggaatccagactttgaagaaaaagggggtaaagtctcaatagtatcacattccttgggatgtgtaattacttatgacataatgactggctggaatccagttcggctgtatgaacagttgctgcaaaaggaagaagagttgcctgatgaacgatggatgagctatgaagaacgacatcttcttgatgaactctatataacaaaacgacggctgaaggaaatagaagaacggcttcacggattgaaagcatcatctatgacacaaacacctgccttaaaatttaaggttgagaatttcttctgtatgggatccccattagcagttttcttggcgctgcgtggcatccgcccaggaaatactggaagtcaagaccatattttgcctagagagatttgtaaccggttactaaatatttttcatcctacagatccagtggcttatagattagaaccattaatactgaaacactacagcaacatttcacctgtccagatccactggtacaatacttcaaatcctttaccttatgaacatatgaagccaagttttctcaacccagctaaagaacctacctcagtttcagagaatgaaggcatttcaaccataccaagccctgtgacctcaccagttttgtcccgccgacactatggagaatctataacaaatataggcaaagcaagcatattaggggctgctagcattggaaagggacttggaggaatgttgttctcaagatttggacgttcatctacaacacagtcatctgaaacatcaaaagactcaatggaagatgagaagaagccagttgcctcaccttctgctaccaccgtagggacacagacccttccacatagcagttctggcttcctcgattctgcatatttcagacttcaagaatcgttctttaatctcccacaacttctttttccggaaaatgtaatgcagaataaagataatgccctcgtggagttggatcacaggattgattttgaactcagagaaggccttgtggagagccgctattggtcagctgtcacgtcgcatactgcctattggtcatccttggatgttgccctttttcttttaaccttcatgtataaacatgagcacgatgatgatgcaaaacccaatttagatccaatctgaactcttgaaggacatgaatggcctaaaactgattttttttttttccgttaaaatgtgtgtgtcaagatacggagatttcagggttaaagtatatttcagttttctttagggcaacatatatttgaatttaaaagcactttatttaaaaaag

SEQ ID NO: 1230 - DNA, 2906 bp, Homo sapiens
acacatctcaaactggcaaagctcagtcttagcagattcagtgtggaagcagctatcaaaaaggccataaggattttgtccccaaatttcacatgagctaccttgcttcaaactactgagatgaagggggcaagattatttgtccttctttctagtttatggagtgggggcattgggcttaacaacagtaagcattcttggactatacctgaggatgggaactctcagaagactatgccttctgcttcagttcctccaaataaaatacaaagtttgcaaatactgccaaccactcgggtcatgtcggcggagatagctacaactccagagaaagcagaaggagtggtcaagttacagaatcttaccctcccaaccaacgctagcatcaagttcaatcctggagcagaatcagtggtcctttccaattctacactgaaatttcttcagagctttgccagaaagtcaaatgaacaagcaacttctctaaacacagttggaggcactggaggcattggaggcgttggaggcactggaggcgtgggaaatcgagccccacgggaaacatacctcagccggggtgacagcagttccagccaaagaactgactaccaaaaatcaaatttcgaaacaactagaggaaagaattggtgtgcttatgtacataccaagttatctcccacagtgatattggacaaccaggtcacttatgtcccaggtgggaaaggaccttgtggctggaccggtggatcctgtcctcagagatctcagaagatatccaatcctgtctataggatgcaacataaaattgtcacctcattggattggaggtgctgtcctggatacagtgggccgaaatgtcaactaagagcccaggaacagcaaagtttgatacacaccaaccaggctgaaagtcatacagctgttggcagaggagtagctgagcagcagcagcagcaaggctgtggtgacccagaagtgatgcaaaaaatgactgatcaggtgaactaccaggcaatgaaactgactcttctgcagaagaagattgacaatatttctttgactgtgaatgatgtaaggaacacttactcctccctagaaggaaaagtcagcgaagataaaagcagagaatttcaatctcttctaaaagaggagtattcaagctgtagtcggcatccgtgccaaaatgggggcacgtgcataaatggaagaactagctttacctgtgcctgcagacatccttttactggtgacaactgcactatcaagcttgtggaagaaaatgctttagctccagatttttccaaaggatcttacagatatgcacccatggtggcattttttgcatctcatacgtatggaatgactatacctggtcctatcctgtttaataacttggatgtcaattatggagcttcatataccccaagaactggaaaatttagaattccgtatcttggagtatatgttttcaagtacaccatcgagtcatttagtgctcatatttctggatttttagtggttgatggaatagacaagcttgcatttgagtctgaaaatattaacagtgaaatacactgtgatagggttttaactggggatgccttattagaattaaattatgggcaggaagtctggttacgacttgcaaaaggaacaattccagccaagtttccccctgttactacatttagtggctatttattatatcgtacataagttagtatgaaaaacagactatcacctttattgagaaacagccagtgttttcatttatctttgcttgcacatctgctctgttttggtttttctacaggaaatgaaaatcaacttgtttttttaatatgagtaaacttgtatgtctattttataaaattatttgaatattgtttaatgtctgaatatgaaagagttcttgatcctaaagaaatttagtggcacagaaaacaaagtgaatttgttagcataattattcctattcttatttcttcattttaagtcattgcaatggaaagtaatattataaaatggtaattacaacatattatcagtcacagttttctttccaattaaacacttaacttttgttattccctgtatataaatatataacacacattttctagattcacaaatttaaataaattactcaaaaaatgaaaattgattttgtaaacttttatttttactctttacgttgagttgatcaattttccatactaagattttcattcagaatcaaaattaagaaagttggactgaaaatatgaaaaatgcttaactattgttctcttcctataattctctaattataacatagtaatttacatgtagttggacatgtacactcaagtctaagaatatatgagtggatcatttaccgccccccgccccacaacatctataaggggcaaaaagtctttttctaataagtattcttctatggtagtacctacagatctgcccttcttcttctaaagggtaagtcataatctgtgtaatactacaatttatgggatgctcactatgccctgtttctcttctaaacaatttacatgtaatgtctcattcctcacaataacccttgtaaagtgggcatgattaccatgatttttatagttgaagaacctaagacacagagaccaaggcccatgagctcatagggctgaggcaggatttggaatcaggccatgtcttctccagagcccacatccatcctttctctatattgcctcccacagatgtgctaaaatttatttaactaatcctttatcctctatttgtgttgtctcccattttttattattacaatattactgtggtgaacatgcttaaaaatacattccttggatatctgacaacgtgtttctgaaaaacagattttcataagtaataataaaaataataat

SEQ ID NO: 1231 - DNA, 2371 bp, Homo sapiens
aaaaaaaaaaaaaaaaaagaaagaaaactacaggcggggacggcttctcgtctttcaggagattgtcatggttgagagactggactgtacctacccactatgaatgagcagaacaccatagctaatattaactttctgcaggcaattgaaaacactgcctcagtatctgaacacaagtaacagagtatgcaagaggaggagacctgcacaactggatacacccagaaatgtccttggctcaacaagccttccagcatgaccctgtgtcttccccctccacgcagagcaccagcaacagtagtgcagacccagaaacctccctggctcaacaaggcccccagcatgaccccatggccttcccctccacccagagcacctgtagcagtggtggagtcccagaaacgtccctggctcaacaagccttccagtatcagcctgtggccttcttctccacccagagcaccagcagcagtggtggagacccagaaacatcccaggctcaacaagccgcccagcatgaccctgtggcctacccctatacccagagcaacagcagcagtggtgcagacccagaaacctctggctcaccacctccccagcaacaccctgtggccttctccaccaagagcaccagtagcagtggcagagacccagaaatgttcctgacacagcaacaaccatcccaggaagccagtgtcattcaggctgggcagcccaaggctttgacttcagccttgccaataaggaggctgtgactgccgcagggctgccaggggatgcacttccattgtattaaaatgtttttgactgtgtccaccgccgaaaaggaggaataagatgaccccaacatagttgcacggctgaagacaaagatcaagttggtggggtcaatattgttaccatagtcactacacttagagtagttttatagtcagtgtagacaggtggcaccatgcagcagggatcagcctccaccacacctgaccaggagctccagaactgtaaaatcctggacaccattggccgtggcacgttcagtgaggtccaggatcacatgctgattgggacccaaatggccatcaaaatcatccccaaggctggctcccttggcatcactctccagagagtgataagtattttaaagttactctgtcacttcaatattgtacggttgtatcaagtgattgacacccccaacaccagttatttatttagtaacggagtatgcaagaggaggacacccacgcaaccaatacaccaccatggcctcatgagggaggagaaggcctagaccatgttcaggcagattctgtcggccatgcagtagtgccatagcaaattgcgcagagacctgaacccagaaaacatcatccttgatgaggacggtaacgttaagatcgcagacttcggctttggtaccacattccatgatgggcagaagctgacagccctttgtagcacttaacccctacatggccccggaacgtttcctaggccagggctaccaatgcgccaccatggatattcagagcctcagagtaattttataccacatggtggctggggttctgcccttctgctcatgcagcattagggtcctctcagcaaaaatttaaagtggaagctatttttccccagtctacttttcctgaggtcttaaaagcctcattaaaaaactattaacggtagaccccagggagcagaccacactagaagaagttatgagggacccgtgggtgaacagtggtcaggagttgcctctgacaacatgaagaacaaatcctggaccacctgaatcccaaaacaacccagcttttggtggccatgggattccaggctgagaacctatctgtggcaatcaaagaaaaattattcagttatcccatggccacctaccttgttttggaacaaacaaaacagaagaagcggtccactatcagatcacagacccttcctcctggggatcccacttgtcctctctacattgaagtttccaccttccctctttcactgaagcgggctcatagcattcagcagaagactgtgggtgccaagtctgggcagggcctttgcccttgggagtcctgttttagacccagctccacctcacttgacaaggagatacaaaactatcagttcatagataccatctgatagggaactggctcagcataggccaactgggacccaggttgccatcttgaagactttccatcacccaaatatcattcagctcttccaggtggtgagggagtaaaccagaggaggagagttgcaccaccagatataccactatggccacatcgaggaggaagaggaggcccggaccatgttcaggcagattctgtcagccctgcagtactgccacttt

SEQ ID NO: 1232 - DNA, 1891 bp, Homo sapiens
gcttttttgcatctgaaactgtcagccccagaatgttgacagtcgctctcctagcccttctctgtgcctcagcctctggcaatgccattcaggccaggtcttcctcctatagtggagagtatggaagtggtggtggaaagcgattctctcattctggcaaccagttggacggccccatcaccgccctccgggtccgagtcaacacatactacatcgtaggtcttcaggtgcgctatggcaaggtgtggagcgactatgtgggtggtcgcaacggagacctggaggagatctttctgcaccctggggaatcagtgatccaggtttctgggaagtacaagtggtacctgaagaagctggtatttgtgacagacaagggccgctatctgtcttttgggaaagacagtggcacaagtttcaatgccgtccccttgcaccccaacaccgtgctccgcttcatcagtggccggtctggttctctcatcgatgccattggcctgcactgggatgtttaccccactagctgcagcagatgctgagcctcctctccttggcaggggcactgtgatgaggagtaagaactcccttatcactaacccccatccaaatggctcaataaaaaaatatggttaaggctagtctgtgtgggggcatctgtggctgggatatctgcctcctgacttagccggggacgtgcaaatctcacttctggctggctttggacatctgtctggaagatgggaagatgagggagaggtatgtaagaatcctgggctttgtgctataatttatcaagaggagatgagattctggcttgcatcaacgctcttcaaggacagctccttggaacattgatccaaactggagtcatgggtctgagggcaaggcctagttgtggcttacaccaaaaccccagatgtcccactctccagctctcctcacccctggtcctccccttgagaaagtgctgaactcacttgctgtgtgtgggtggccaggaccattagcctttgttctttcccagaacccacctgactcctgaaacttagctgaagtctgtgcccgaggaccctgccctgttaccaggcccagttcctcctcacctctacccatgagccccggtgtcctgctaagccctctcagatctgggattcctccttcctcaggaagccaccaccttctcagcagtggaaaccctgcccacactatgctcttaggctttagccatcagaaggttacagtggactgcgggaggctgacactaggctgaactcattaaggaatgaatgggaggtgagaagacacaggcagcaagaatcgagtgtttcaagaagtttggctctggtttgccagaaataggcaagtcagttttcgggggtgtgaggaaaaagggttttgtgtctttttaaaatcctagacaggagagtcacaagcatgttcacatgataaagaggaagaaagagaaagaggctggagattctgaaaagagatcactggtgaggtctcaaaagagatggaagaggatggttatgtagttggggaaagaaattttaagaagggaagaaaattaaaatgagtgaaggtatacgttagttttgtaaaagttatcaatatctggctgggcacagtgctcacacctgtaatcccagcactttgggaggccaaggcaggcagatcatttgaggtcaggagttggagacaagcctccaacatggtaaaaccctgtctctactaaaaatacaaaaattagccaggtgtggtggcagtcacctgtaatcccagctacttgggaggctgaggcatgagaatcacttgaatgctggaggcagaggttacaatgagttgagacagcacaactgcaccccagcctggatgacagagtgagactccatct

SEQ ID NO: 1233 - DNA, 1786 bp, Homo sapiens
agtcctgctcccacccgctccctggagagcaggcggccagacacccaggtcagtgctcagggaccagctcttggcccctgccccttgcaggcgctcgcatgtggctcctctcggaccccgtagtccctgtcatatcccttctctccagctgtctccatgcctgcctcgtacccctcctatttgctctcccttccactctgtcttgcctttctcgttggggtgaaaaagtcttactctcttaagtatctttcatcgcctgagtttcacctcattgaccctgtttgtctcctctcagtgtttctctggctctcagaccctatctctattgcgtttgtgattgttttgctgttttacccactgcaccgtatggggggtgggggtgtcggggaggtgtgtctttcagtctttgcatgtctgtttctgcatatccaatcccactatccattccccttcctgtgccttcttttcccccaaagcccgttatcatcacccaaccacctgtatatttcaatcctttctcttgtttatctattcctatgaaggcaaggatttggggctattttgtctcctgctgtgtttgctaggcctagcaccgtgattggcacataaagggtaccgaatacttactggggaataaatgattggatgtttgcatgcccgggtctccggccccctctgggatgctggcctctgtcccgcatcctcaaggtctgcccacacctgtctgagcctgtctgtctctgatgctcctgtctcacctgccactgcccctcattgtctcctcctgtccacagcccctgcccctccctgcccctgccatggggtcctgaattctcaccccttctctcctcccttcccacagaggccagaccaggagctgaccgggagctggggccacgggcctaggagcaccctggtcagggctaaggccatggccccgcccccaccgccactggctgccagcaccccgctcctccatggcgagtttggctcctacccagcccgaggcccacgctttgccctcacccttacatcgcaggccctgcacatacagcggctgcgccccaaacctgaagccaggccccggggtggcctggtcccgttggccgaggtctcaggctgctgcaccctgcgaagccgcagcccctcagactcagcggcctacttctgcatctacacctaccctcggggccggcgcggggcccggcgcagagccactcgcaccttccgggcagatggggccgccacctacgaagagaaccgtgccgaggcccagcgctgggccactgccctcacctgtctgctccgaggactgccactgcccggggatgggggtgaggtgctgggcagctgctctatcctggagccaccttggtgtctctgcagaatttcctccataggcagctgtgtctttatttttctgtgtgtctgggtgatgtatctctctggatccgttaggagtgatacacagggatgggctacagaaggaacaaaaagacaagaggaccggatgtggtggctcatgtctgtaatcctagcaatttgggaggctgaggcgggtggatcacctgagatcaggagttcgagaccagcctggctaacatggtgaaaccccatgtctactaaaaatacaaaaaattagccgggtgtggtgctgcgcacctgtaatcccagctacaggagggtgaggcaggagaatcgcttgaacccaggaggcagaggttgcagtgagctgagatcgtgccattgcactccagcttgggcaacaagagcaaaactctgtctc

SEQ ID NO: 1234 - DNA, 1749 bp, Homo sapiens
ttgggttggaaacaaagaaccaataacattaaaacattattatttatatattctagctgttattagaatcagactttttttgcgagagagagagagagagagagagaagggaaatcaaagaaatcgaagcaatatcctgtttagaggcaagccgcccggtggggagaatttcctcaatgggagacggttgcactattctgtgccccacggagtttgcggctccccgcggcagacccctccctcattctcctccctgacctttccatcttcctctctgcttgcgagaaaatgtcagtagttccagagaagtcggggtgcctatgcctggcctccctccacacctgggccctgaccagccgcctcctgggctcctcctcctccgtcagtagagctgctgttttgttattgctggtttttcctcactttcctcctggcaaagaacgacttccaaatgcagggatggaatataagcagaacgtcatgggctcagcagtgactccaccacccgaggccgaggccgtgcttctggaagatagaaggagacatcatcgtgtgtttcccctccccttgcccctgttaagaaacgtatcaatacccattggatgatcaaggctaccgtatttcttctatttttttttatagtgcctgccaggcactttgttttatgtttccaatagcacttcctgaaataaaccaaagcaacactgctcaaggcccctggggcgatggagaaggccacccacctcactgacagtcccaagaatgaccggctgcgaggtcctagtcaaaagtcaacattatgacctggggactccagcatccttcaagcaagccatttccgaagaaggtgaaaagaagccaggatgattggcacctcctcctcctcctcctcttcttcctcttcccttgcccagccccctcctgtgcgtgtgtttcagacaacacaggagccagcacaggagtggaaaatcctgcagcgcaactcagctcagcccacagaagccttgggaatggcctcagtttgtgcaataagaagattttttttttctttttaaatcttcattatattttctttgattgtctgtgagaaagtacccaggtccgcctggaattactctacagtagaaataactgaacacaaacaaactgatggaaaaaaagagttaactattttatttatttcaatatttaaaaggaaaaaagtgctgacatggcacagtatttttgtttaaagtacctcctacttcaaaagttaagcgcaattttgtgaagacatgaaatcataagagtacttaatgtaaaataaaagactgcatattaactctaaagaaaaatgccccacattttaaataagaaaataaagatcaactctgctctctcaggctttttaaaaagccattcatgtatgtgctttaggtatttttatttctgcgagttggatgtggtaagtgaggagtgctcagtttttttttcctccttcaaaagtctattgaaagtgttggtgatgttaaatgattgtgtgttaagatttgactgaaataacttagccacaaatcagcagtttcccccaccctcattgccccctcaccccaggcaagccccttttatctgaatgtcagaagcagcctgcctcctagttatcatgtctgatgaggtctagctcaggaaggaattccatctattgatggaatatatcccctcaagttcaatagattcgaacacagagagctttgtttaaaataatgcagc

SEQ ID NO: 1235 - DNA, 1073 bp, Homo sapiens
aataacaattatgtagcagtctcatatctgaataattgcaggcagaagacatctattttagaatttcttgatctattacccttgtcgagtgaagcaaatgacactgcaaatgaatatgaaattgagaagttagaaaatacatctagaatctcagagttacttggtatatttgaatctgaaaagacttattcgaggaatgtactagcaatggctctgaagaaacagactgacagagcagctgctggcagtcctgtgcagcctgctccaaaccaagcctcagcagaggccttatggtaaaggggggaagttcaatcatctctcctgatacaaatctcttaaacattaaaggaagccattcaaagagcaaaaattcacactttttcttttctaacaccgtgaaaatcactgcattttccaagaaaaatgagaacattttcaattgtgatttaatagattctgtagatcaaattaaaaatatgccatgcttggatttaagggaatttggaaaggatgttaaaccttggcatgttgaaacaacagaagctgcccgcaataatgaaaacacaggttttgatgctctgagccatgaatgtacagctaagcctttgtttcccagagtggaggtgcagtcagaacaactcacggtggaagagcatattaaaagaaacaggtgctacagtgacactgagtaaaatatctatggccactgacagtccacacttaggcactgagagatattgatgttctgaaataagattttatgaatttggatacccttttgaggaacttgatgtaaacatggtgttcagaaatctcgtgtctatctcaatgggatatttcttgtattacgccttgtcatttttttcacaatttatttacatctacttttgtttgaactggaatgaagagatgaaacactatggatatgttttccattcaaatggcactttagcatattgttctgttttcctgtaaaacatcatgggtgtgatttttatactgctgctgcttgtcacaattattataacttctctgtaatttcctctgaaataaaattgaatcacctgaggtgc

SEQ ID NO: 1236 - DNA, 1647 bp, Homo sapiens
agcaaggcacacgtggtcttcaatgcgatgggcgcttccaggggacccggcgtcccttgggtccaggaagtcttatactgtctcctctcacggccccgacagaaacggtttctgaggagtagaagtgtcctaagtggattggaaattacaaatgccggaaagaacctagggatggaaagcagccctcaactttgaccaaccgccgtgggttaggtttacagtggggaaaaaaaatagaaattgtgcctgacttcaatgaccgccactatttgaagcaaactgcccatccaagccttatcatcccctttaacaccctaatgtttctgtccatgtggacttcgacgtggtcctctagaatggttttgtacttccccgcggtctcctctgcggtagctcctctgatgatggacaaagaaggagaggcgaaaggccatgatcagggaagcctacagtcttcttcctcactgcccattgctgtagtttatgcagctacatgatgcttgttaaggaagctccctagacaccagtgtcccattgagatttggccacgtattctgcagaccccaccccaccccccatgccgactatgttgccacatttctctaccgtactcatttctttgccccaatgtctatccgttctgacaagattaaagacatcaatctcatgttcccgtggcctgctctcaggtgtgcaggcacaaacaggctctatcttctgtatttcttttttcctttttttttgaaacggagtctcgctcagtcgcccaggctggagggcagtggtgcgatctcagctcactgcaggctccgcctcccgggttcacgccgttctcctgcctcagcctcccgaatagctgggactacaggtgcccgccactacgcccggctaattttttgtgtgtttttagtagaggcggggtttcaccatgttggtcttgaactcctgacctcaggtgatccgcccgccttggcctcccaaagtgctgggattacaggcgtgagccactgcgtccggcccctgtatttctttgaattgcaaacttaagcaaaaggattctagccacatgtccatctgacacactcacatgcagatcctggcgtctctccccagacatttgcttgctttcctcctagagtttcctcctagtagcaggtcccctagctcccaggatgttcagcctcctaaagagtggtggggcggcggtacccacttttcttctctgtcagctgtcagtaggctagggatggagggtctcatacagaacagttctctgggggccttgaaccaacacagttcttccccttttctcacttgtagttctcgagaataactgtagaatgtgttggaatgcaatatactatagacaaggaggaactgaccagaacagcccaggctctgttccagtctcttctagaaataggatgtccttcaactagtactagcccagcacatcccattgccttgtagtaaaaactgagagcagactgctttctggggtcccttagttgcggtgcaagcagtgcacgagcagatgagacgccatcctccctaagaagttttcctcggccttgggagatatggtcattatgacatgcttctgttgtcccttgctgcctgtctgtaagtaataaacccacttcgtgt

SEQ ID NO: 1237 - DNA, 1738 bp, Homo sapiens
cctgcgcctcccatgctgggccccacccagctcgggcccagcacccacctgcccagtccaccagcaacatcgctgggagtcgtgctgctttggctctcccagaacaagccatgccctggggaaagaactcctctccccactggggacaccatctggggtgccttccctccgccccggcctgccggatctggaggccccactcccgcccagcctgggagccccctcggccatcaccactgctctgccaagacatggccctgcagaatgccctctacaccggggacctggcaaggttgcaggagctgttcccccctcacagcacagccgacctgctgctggagagccgggccgcagagcctcgctggagcagccaccagaggggactctggtctctgacatacgaagaggagctgaccaccccactgcatgtggcagccagccgtggccacacggaagtcctgcggctgctgctgaggcggcgagcaaggccagacagtgcccctgggggccgcaccgccctgcacgaggcctgtgctgcaggccacactgcctgtgttcatgtgctgctggtggcaggagccgaccccaacatcgctgaccaggatgggaaacgccccctgcatctctgccgggggcctggcacccttgagtgtgcggagctgctcctcaggtttggagcgagagtggatggtcggtccgaggaagaagaggagacccctttgcatgtggccgcccggcttggccatgtggagctggcagatctgcttctaagacggggggcatgtcctgatgcccgcaatgccgaaggctggaccccactgctggctgcctgtgacgtccgctgccagtccatcaccgatgccgaggccaccaccgcccgctgcctgcagctgtgcagcttgctgctttcagctggagcagacgctgatgctgccgaccaggacaagcagcgacccctgcacctggcctgccgccgtggccatgcagctgtcgtggagctgctcctgtcctgtggtgtcagcgccaacaccatggactatgggggacacacgcccctgcactgtgctctgcagggcccagctgcagccctggcccagagccccgagcacgtggttcgggctctgctcaaccatggcgccgtccgtgtctggccaggggccctccccaaggtgctggagcgctggagcacgtgccctcggaccatcgaggtcctgatgaacacctacagtgttgtgcagcttcccgaggaggccgtcggcctggtgactcctgaaactctgcagaaacatcagcgtttctactcctccctcttcgccttggtgaggcggcccaggtcgctgcagcatttgagccgctgtgcgccccgctcccacctggagggcagcctgccccaagcgctgccccgcctccccctgccaccgcgcctgctccgctacctgcagctggattttgagggcgtgctctactagatgtccacggccttttgagagggcctgaaagcagatgccccagcctgcagagggcgcgcctctgcactaactcaggccaggtagccctggcagcaggaggcccagctccgcaggcaggtgtggatgctgcaattcccaatgcagagaagcggaccgacagcggcagccgggtgatgtctgatgaagacacactcctactggggctctcctgaggcccccttctagcctgtgcaaaccctgtatgtgcattaaaaatctccaggtctgtg

SEQ ID NO: 1238 - DNA, 2349 bp, Homo sapiens
tcgctccgcccccccgcggccgcgctcaggcacaaatcctgaagagcccgtgggcgtggactgctcatctgtaaagaaagtggagacatgaccttgagatttggctgacccagcaatgctggggccttcgcaagtctgatgttccaggactccagtgcctgttggtgtggacggaggacacggggccccgaccatggtcacactcatcactgagaagctgcagagccagagcctggacgacctcacctgcaaggcggaggctggcccgttgcagtattctgcggaaaccctgaacaagagcggtcgtctgttccctttggagctcaacgaccagagtccctggaaggtcttcagtggaggaccgcccgtcagaagccaggcagccacgggccctgatttctccttcctgccgggcctgtctgctgccgctcacaccatgggtcttcagtggcagccacagtccccgcgcccaggcgtaggcctgggtgcagccagcactgtggaccccagtgaaagcacaggctcgtccacggccccaccgaccaagcggcattgccggtccttgtcagaacccgaggagcttgtgcgctgccggtccccctggcgccccggcagctccaaggtctggactccagtctccaagaggcggtgcgacagcggcgggagtgccacgcggcagggaagccccggcgccgtcctgccgaggagtgctgtgtggtcgaccggtcccacctcgcccgccacgccccggccgtcctccgccagcggcggcttcgtggacagcagcgagggcagtgcgggctcaggcccgctctggtgttccgcggagtcctgcttgccctccacgagacgccgcccgtccctctcacaggagcgactcgcgggtgcgggcactcccctgccctgggccagcagcagccccacgtccacgcctgcgctgggcgggcgccgtgggctgctccggtgccgctcacagccgtgcgtgctcagtgggaagaggagccggcgcaaacggaggcgtgaggaggacgccaggtggacacgcccatccttggacttcctgaaaatgacccagactttaaaaaattcaaaaagcctttgctccctcaattacgaagatgacgatgaggatgacaccccagtgaagacggttctgtcctccccatgtgactcccggggcctccctggcatcaccatgcctggctgcagccagaggggcctcaggaccagccctgtccaccccaacctgtgggcctctagggagtcggtgaccagtgatggctcccgcaggagcagcggggacccccgtgatggggacagtgtcggggaggagggcgtcttcccccgggcccgctgggagctggacctggagcagatcgagaacaactgaggctggtgggggctggtcggggccatggctgccgcctgcacctgccctggggcacagagtaggtttcctgtgagctggtcggggccacggctgccgccggcacctgccctggggcacagagtaggtttcctgtgagctggtcggggccacagctgccgccggcacctgccctggggcacagagtaggtttcctgtgagctggtcggggccacggctgccgccggcacctgccctggggcacagagtaggtttcctgtgagctggtcggggccacggctgccgccggcacctgccctggggcacagagtaggtttcctgtgagctggtcggggccacggctgccgccggcacctgccctggggcacagagtaggtttcctgtgagctggtcggggccacggctgccgccggcacctgccctggggcacagagtaggtttcctgtgagctggtcggggccacggctgccgcctgcactgccctggggcacagactaggtttcctgtgagctggtcggggccatggctgctgcctgcacctgccccagggcacagagtaggtttcctgtgagctggtcggggccatggctgccgcctgcacctgccccggggcacagagtaggtttcctgtgagctggtcggggccatggctgccaccggcacctgccctggggcacagagtaggtttcctgtgagctggtcggggccacggctgccgcctgcactgccctggggcacagagtaggtttcctgtgagctggtcggggccatggctgccgccggcacctgccctggggcacagagtaggtttcgtgttgcttggaacattaaggcgtaattttgattcagtttttcctaaagaagcattttgcatttttatggcttttgcagttcgggagaaagcttctctattttggatgcatttcagaagggcgttctattaaacatgaatctgcaaacag

SEQ ID NO: 1239 - DNA, 1958 bp, Homo sapiens
ctggcctcctccccgacccccgaggagcgccgggccctgcgacgctccaccactcgagacagaaacaagaaggcagctgcctgcttcctgctcagcactggggactatgcctgcgccgatggtagtgtccggaaaggcacattcgtcctccgtgaccttccccttcagcattcacctgaggctgcatgccctccaactgctgggactctgttcctgccacattgaggaagggggctgggcacgacatggcatcatactcaggagccttcttcaccagctccttgggacaatggaatatcccagggtggtgacagcagatggagctacttgggggagagctcaagttggtcaggcaacagctggggtgatggcctgtgagccacaggccacatcaggaactttccccactgcctccatgcaaggctgcagagctatggtccctttctccactgcactggagctttgaagacctaagaggctagtggttcctggagctagtggttacctgaacaggtatggcgatgagctacaacatcacctgagtcaccagagttgggttggcagaggggtgaagggttcaccccattccctgacccatccatgctcttcctggccttttagccctgggttcctcatgccttccagctctgctcctggtctactccttagcccacaccctgtgggtcagcagctggcttccttctaacgtctcattctttgtttctccctttcttttgctgaactccctgtcccccaaccccagaaggcaatgttgagccgaaagcgtgcgtcccagtgtctcacacctgtgctctttaaacacagagacctgccaagacgccctctcgtccaactatgcccaggctgaagtcctcaccctctcttaaagcggcaccaacgtgagagagacaggcagacagacagaaagccagaggcttagggaaactctggaacccagacaagaatcttttcgctgggaaagactcagatatccttgtttgcacaggactggtggaaaatctcccatgcgaccctcggggcccagagccatctgggtctgatgttctgttccattgtacatcgaagagatatatatgcacatatagtatctatattcatacatattatactcttgtgtgtagtgcacgtgctattggtggtttgtcttctttgttaggctgtgtctccctaagcccttgccccacccagagtttcccgtccccttcactgatttctgttgtttctgctgactgtgtgggtggaatgtcccaagaaaagtgcatctgggaattgccagtccagctgggtagtcccaggctcctgtcttggggatgtttcccctgtcagcaagtaacctggtgaagtctattgaaggccagactgccccctagggtcactgcttcactagccgcaccccaccccagattggggttctacctcccaccccacatcctcgttgtggggggacttccaggggctcctctgcagcctcctccactacttcctccaccccatctatgtccttgacttaggggggcattttgtcttttttagatttgattttgttctctctcctttgtctgtttgttgtcaaagatgctgctgggcagacaggcagggaaaggatctgtctgcccatctggcccagggggtccgagaagggaagccttgggcaagaggagaccagttgcaatactgtacttcctggtcagtggccagaggatgcgtgcaatagcagaggccaggtgaccccttcagccttggcctctgcccctcccttggccctccctccctgctcctccctggtgttggtcagtccttttctaaagctgtcccctcgtgtgtgtctggggcatgcccaggctgggccctgtgccctgtctgcatgcctccaactgtcatgctgtgctcgagccccaataaagacatctggagcatcctgctgctcctgctgtgtg

SEQ ID NO: 1240 - DNA, 2427 bp, Homo sapiens
ctgttgagggagcaagctctctccttcttttaaggtgcaggacacgggcgccagccccagactgagcctgtccctggcagagagcaaaagagggcgccgcctagaacacagtccccacttagaacgccaggcgtctctggcaggccctccctggatatcctcttgtctgttttgttcgtggttccctcccatacacacccaaaacaccctgccaggtcccagagagaagggaagaaacctagccagggagagcagaagccggcagctgcctgcggttggcaggggcaggaaggctgaggtgctgcgggctggtttatttgaggcaggactggggcactgcacctccgctgaggatctggagaagcagcggcccagatgtccccttcctctacttcccttccatggtcttaattctctttgccgtcaggagcaaagagcagggccagtggaaccaaggcacctcaacctcacagttcctggggttagaagaggctgggaagagagaggagggtggagggtcagcggagagagctgagggagtcaggtgtctctggtagggctggaggaagtggggaaccaaggaggaagtgtggtttgtgagaaaatgattagcaagaaccagagtctgcttgggtctgggtcccccaggacacccagtgggcagaagcttgggcatttggctggccgggctgtggacaaggactatcagcctcatgttccctctaggaccagaacagtgtcctggtccccagccctctcctgatcccgctgcccgcaccgggcgaatgtctgttcataggtgtgctgccatccactcctccgttgcctgcggtggctgcaggcctgatgcagcaagcagggacctgagagcccaggggacacagcctcaggttcagtagccaccccagaggtccccagctggctctccagaaagaaagtgcaagaggctgtagatggggctacggagcaccacactgattggccgggagaatttctgacagccacagccgaggcctctgattctcccttccccgctggcgttcacggtcacggcctcacggccggccagagggtggaccagcgtaatttacgaggcgggaggagaattcacccttaaaggggctaccagccattgaggtcccactcagccccagtttcccaggcccgtgagaatgaaggaggggggcgctccagccccccacccaactcccttctctcttcctcgcccgccccccaacattgccctttgtcttcagaagggctgcctccgcctcctggcctgcaaacctccacagcctagcacatggaccagagcagagggaggggcacagccctagaacccattggaggtctgagaatggcttctctgagtgggaaggactttcatccagactccttcagaccccagccccagcccagtagacgctgggctggcttggaagagaggagcagtgagagaaccatcaacctttctgtacttcatttttatccttctccccaagagtcccccagcctcccatctgctgtccggccctttccaggagcaagaggggtgagaagcagggcactgatgggagttaactgcagcctggacagtgtgaaactggcctgctggcttggagtgtttcccatatggggagagtctcccctaacaaactctccaaaggcaatccaccgagctttttactctcccaccagcacacagcttctgtacaggcagaggcaaaggcaaacacatacacacagctgagcccagcacagcactgggcccaccccactctccctagtgcactcgcaagcaggcagcctcataatccccacatggcccagcagaatggagataaaatcacatgcctccatcccccgctgggtatctgacacctgacaattccccatccacacatacttgcttcacccatgtacaagttcccccaaattaccaccattccagctgtctgcagtctcctgtggtcttcccctgggcatgaagcactccccaccttgactggtcacccactgtaccccctttatgcagcccttcctgtgacctctgggctctagggtgctggatttgagctctaccactccagactaacctgattcccaatctaataatgaagagggaccagaacactctaaaaggagtgaggggacaaagatatgcaatattctctttccatttgctttaaacttgacttctgtgaggttctctgtcaatctgtgtcttgttctctgtgtctgtcgctggtacctagtgtagtccctgtggatagttgcccttcccctagctgcctccccagctctctgcagtgtaattctcctattcaaacgtctgtctttagcacgttttccctttatatagtccttgtacagagttgcttcatcatattaatattgataataataataattaaaacatgaattatg

SEQ ID NO: 1241 - DNA, 2250 bp, Homo sapiens
aagagatgctcaggtcagggagggaatgagacccctggggaagggactcctcccagctgaggagttgattagaagcaatcttggagttggcaggagccttagagactgcctgagccagtccgggaagctggctgaggagcttgggagcaagagactaaaaccagccaagtttgggacagaagggaaggaaagggttgagcagcgaacagagagacaaagaacaggcagttccaaagagccaagaatgcaaatcatttgcagacgccgctggcgagagcctccaccaaggctgctgtgggggtgcctgatgccacgagcacagccacttctacacgtcacggcttatgagaatacaggccactgggagagactcgcatctgtggtttcttcaaaaacacagcagcccacagtgatctctcattcttccatttctatcacattcagtcattaccctccagccacactggactcctttcttgtcctggaacctatcaaactctttcctgtctcaagcctccgcagtcctctctgcttgaactgtggctcctgcagagaaagcatcagaatctccggggaactgattggaaatgcacattctccagccccgcccagaactcctgaattagaaaccctggggtgggacaagcaagccgtgctttctggggcacaggtgattctggtgtgtgctgaagtttaagaaccactggccgagaacattcttaggtctgctcttcttttgcccggcccctccctcgcggaggaattccttcgtattcctctctgaagagtggctgctgccaaaaaacgtttgtgagatggcctgggttttctttgttgatttatcatttagtttggaagaaatcagaagtctctttaagaagccaatttgaaacattcaccccatgggaacagttctggatgaagtcagaagatctggaggcagcgcagtaacacacgtaggttttctggccatatggacatttcagagaaaacaacgcacagaggcctggagcaggtgaactggcttaagtagagagaaactaagtcatttggggatatttagcacctaatgtcaaggcagaaatgtctaagatgtaattaacagttatattctaatctcaatagtagctaagtacagacttaaacataagcctgtatataacaaaataaccccaggagaaccaaagaaaatctagaagttgctgctaaaaacagttatgttagtgatacctaggaaagttttttttcttttaacatgtcattgtggtttacaaatgaaaattgaggccgggcgtggtggctcacgcctgtaatcccagcacttttggaggccaaggtgggcgaatcacaaggtcaggagttcaagaccagtctggccaacatggtgaaaccccatctttactaaaaatacaaaaaattagctgggcgtggtggtgggcgcctgtaatctcagctactagggaggctgaggaaggagaatcgcttgaacctgggaggcggaggttgcagtgagccaagatcatgccaccgcactccagcctgggcaacagtgtgagactccatctcaaaacaaacaaacaaacaaatgaaacaaatgaaaattgaaacttcacccatttatggctattgcctaaagaatttataaatgcctgggtcattgcaagcatattgctgacatgtctctcggtctgcgttaccctggtggacatcacgacactcacctgacaggcagcagcttccttccagtaaaagcaaagaatctgaaaggaatggaaaaggctccacacagtgccattttatagaaggaaatgcaacaaggtcacagaccagaaggacagcagcccaggccggctgggcatggaggaagtcccaagatgctgctgggcatgaacagacctcctcatacagtgtgcctctgaagaaataatgcaattgtgtggggccagaggagccacaaatagaacaaagggaggaaaggaaaaatcaatatgcagtaaagaggaggaagggagcccggcgcgatgtctgaatctcgctggcaagaaaaggaaacaggtggtctaagcaggcaacccttcaccccacattgtaatgctggggcatggacgtgttccatagatcactcactgagaagtcttcacaagaacactccaaggcagacactactatccatcttccacacactgggggattgagagtcagaaggattatacagcttgttcaaattataaataaaagccctgagatttg

SEQ ID NO: 1242 - DNA, 2758 bp, Homo sapiens
atggcaagaggacgatgcgtagagagggcagcgtggacactgggtctcttctgggcaggccacgttcttgcacccaaggctagtggagaatttgccttccatttaagcagatcccaaggtttgatgccagaattgatggctctcttccggccgatccttctcccagcgccaggtgcatggtggtggccctgtcaccatgctctgtgtccttctggctgtggctttccagagcagccccattccaggtgcagcagcttagaattgcagtcagcctccagacagtgctggttacagtggcttggtgacattagacctttattgttgcaaggaagagaagtcacttgagtcagcagcccagggcgtttctctgctgccatcctcctgccattcgctgtgccttccatcctaaggtcacctcttgggctgaggaggtagttggaggcttagtcacctctgccttccaggcaagagaagggaaggatgaggccagggcacccgccggctgtcctgttcccgtattgaacgttcccaggaattccagccgcaacttccttcttcacatcatggaccagaactgagtctgaggccacctgggtgttaggggagggctgtctcctcgaagaatgctctgctgcccaggcaggatgtggggctttgtcccaagggagaaggagggaatgggggggcggctgcaatcctgcctgctgggggctttgggtcctgctggtggcctctggggaggggttgagacaagcaggtggctgaggctagagcactgagcatggttgggactttctaggaggtcagggcagagctggctccgggccttgccaccaccgacctcactcttggttctcccctcagtcaatgccgtgtgccccgaggctgagctcttcgtggatcccaagatgcagccgcccaccgagagccaggtgacctacctgcgacagatcgtgacggcaggcctgggggaccacttggcccgcagggtccagagcgaggagatgctggaggacaagtggaggaacgcctacaagacccctctcctcgacgaccctgtcttcatccaccccagctccgtccttttcaaagagctccccgagtttgtggtctaccaggaaatcgtggagaccactaagatgtacatgaaaagtgccgaggcctgcggacagccccttgtcccccgatggtgacgctaatgggggtgtggctgggaccctggggcagaggcatggcagcccctcccacggagggtgccgctgtaaccccagcttcctcccccggcccccaggcgtctctagcgtggaggtccagtggatcccggccctgctgccctcttactgccagtttgacaagcccctggaggaaccagcccctacatactgccccgagcgggggcgggtgctgtgtcaccgggccagcgtgttctatcgcgtgggctggccgctccccgccatcgaggtggattttccagaggggattgaccgctacaagcactttgcccggttcctgctggaagggcaggtcttccgcaagctggcctcataccggagctgtctgctgtccagccccggcaccatgctgaagacgtgggccaggctgcagccccgtacggagagccttctgcgagccctggttgcagagaaggctgactgccatgaagccttgctggctgcttggaagaaaaaccccaaatacctgctggctgagtactgtgagtggcttccacaggccatgcaccccgatatcgagaaagcctggccccccaccactgtccactgaccagaaacctggctgcagggccgaggactggtttggggactggagggctggcagcagcctgtcaccgtgcgaccgtgaccacctggcatgggcttcgtggcctgctctcaggaagtgggtcaagccctgggaaccctcatccatgagagctcgatcccgtatgaagggtgctgccgcccgtgccatctggcccgggggtgactttttgaactgtttattatatggtggatgatgatttcatctcacgtgctggacgctgttctgttcagtgtgctctttggactacattagtccctgtggagcagcagggctggagatctctgcagtcccttccccgcccgccctgccagaaggccgaggaggcacgtggagggcctccttcctgcaattcttccctctccagagtcagggagggctgcccagccctggcctcacagccgtcccagatgttaggtgagccactgagctctgtgttgaccttgaggggcctggctgggggcccccaggctccatgccttcttgggagggtggccgccaacgcctttcctgtgttatggcaacagggagtgggcatctcatctgcctgtggtcagctctcagacggcagggagcggagctgacgttggctgtgcttggtcaccgctgccatgccgcagaggatgcgcctagctgggctggggccacacgactattatgttggccttgaacggggactgcagagccctcagtttgtctcccttgttcctctgtggctgaggtgggagggggagggtggggtaggtcccccagcaagaaagagggacaggagcaccccaggcaggaccaaggagtcgggaggcccctgccttctgtcctccatggtgagggcacagatgtctccccagagcccagcgctggcagaatggattctgctcctggctttgcttctgcggcttcggtggagacagttatggaataaaatgttccttgcacccag

SEQ ID NO: 1243 - DNA, 2559 bp, Homo sapiens
aatcggcggcggcagagtccccggagccgcgagctgggagcgctgtgccgggagccgggagccgagcgcgcgggcccaccggccgccgccccagccatggagcaagacaacagcccccgaaagatccagttcacggtcccgctgctggagccgcaccttgaccccgaggcggcggagcagattcggaggcgccgccccacccctgccaccctcgtgctgaccagtgaccagtcatccccagagatagatgaagaccggatccccaacccacatctcaagaaactgcagaatgcatccctaaaactcacgagagaggcagtaaggaacccagcacaaaagaaccctcaacccatataccaccactggattccaagggagccaactcggtctgagagaagaggagggactgggggacagaagagcgtgggaggatttccctgctccacccacactttggctccattctatgtcttcactcgctccattttactgctcaaaaggggagagagaatgtcgcatccactggagcccagagacgacccaacaaagatgccatgatagacaccagctctcctacaccctccaccacaacaggctcacctgggccagccccagggctaatccagattcccattctggttgtgttcatcttcggcaggggatgggggggcctcttcttcacagggggacagctcgtcaatggacatctggttggtgatgcctgtagaggagcataaaggaggctgagcttaggccaagaagtattcttccccagaacccaaggagtatgtggagacatgtaagggattctcatccatcaacctgccttcaagctgaactacattcaacccatccccacttgggaagagcctctccagccttgctaaaactcagaaccctcaacaccaccctaccaccccctcacacaggaagagatttcccagccagggccaccaaattagccaaatctacaggggcaccatttacagggaccacagtgtgcacagggacccttgggttgtggaatatctgactgtctctatcatctctacggcccccattcttagaacattccaggccactcagccagtctttcctgtgatctaactggtctgatcagctccactcccaaatcaaggagtccggcaaagggtttccccaggggcttaagaaaaatggacctcctagtgctccatgatccacccacacaagttctcacccctgccctctgccatggtacccaccacttgctgcccgttccttccatttctgcttattctcctgaatgcgcttgacccaggtggaacgaaagctgaccacatcagggttggggtctcccacttccacatccagagagggctggcgccactgaaagctagaagcagaacccccaaaagccgcaagaggtaagccccagcccactccagaaccaccttagccctgggagtgcaggacatggaagaccaggagaaggttcagggaacttcatcttcttcttttcctctactagatattccccaagtccctgtccctctccccctcatttcacccctccctctccacatcttccctcctggtagaaggaaaattaaaacaagattagccagaaggcagaaagacagctaatggaagaaacaaaaatatggtgaaggggagcataggtacaggtcacacccttctgatcccatccttctgtccctgacggcagagggactcccaagcttgaagcagtctgcctccccaccaccccaccatggctgtgagtcggtcctctctgtgagtccaaatccctccctaccactgccttcctgaaccaagatatctggctaccccagccaccctcacctgggctggtttttagacttggagtcctcatccgccaggggctgaacactcttctctgccacgtcagtcagcacagagaatgtgggctccacaatgaagtcgatgaaccctgcagtggaggagcaatgccgtagagatgtcttactattatctggagggctaggcagagcatgcagctggcatggccaggacccctggctgcttatgaaagaggatggagaggtaacctggggctgaaaacttcccaatgcagggcaggctttgggatgatgtcttggtgccccagagagctccttcctgccattgcagccccctggcctcctaacccaggaccccatgctctagcacagtaggctttcctctacaggaagaatggtttggggggattgaggacttggagcaatcctgacccaggcagcatcttttccccctcccagtcctccccttcctgcaggagaggacactcacctatctgagactgtgccactagagtggaagtgcggtcacagagtggagaaaagggcaggcccaactctgcctccttgtcaccctagaggagggaacagggtaggaaagctggagaggatacctcagacctaccagatctggggtacaggtggcaagtggtgggggtggggggttgttgtgtgaaatttctgcactgttgacctggaaattagtaatatgcaaatgaaatatatgcaaatgaaatgc

SEQ ID NO: 1244 - DNA, 2590 bp, Homo sapiens
cactgagttactccccgttctctctcatgtcttcaccgccagccctcagggactctcctgtttgtccccgctactctccaaccacgcccacattccagctggagtcacttgcaggcacccaggaattacctacaaactcagcagttgcactgagttactccccagtctctctcatgtcttcacccccagccccctgggactctcctgtctgtcccagctcctctcccaccacgcccagatttcagagggagtcagcctcccacactccggaatcacctacagactcacagacttcacggaggtcctccctggtctctctcaggtctttgccctcagcccacagggactcttgtgtctctttcagctactctcgaaacttctctagattccagctggactcagttccaggcacccacgacacaccaccaaactcacgaatttcactgacttactccccagtctctctcatgttctcacccccagccctcagggactcttctgtctctctcagctactctccagccatctccacatcacacctggggtcagcttcccacacccaggaatcacctacaaactcacggaccttactgcaaccctcccccatttctttcacctcttcaccccctgctttcagggactctcctgtgtctcccagcttctctccagccttccccagatttctgccacagtcagccccaggcacccagggttaccctggacactcacaggcctcacgagactatttcccaatgacttgtatctatagagggatggctcccatacttccctcagtgacctcaaacccatctccacttacactcagacactcccagggcctgacagctactccccgttattgtccttcagctcgaagccctggcccatctactagccaacatgatgcagctacctggccatgtctccacatttctggggagggccccacacccagccgcagaagagcccctcctgcattccgtcctcacacacaggcctgtccatccacttgctactgtcaccctcttgccagcagaagaggcccctgtaatggccgatatcaccgcccagtctatcctcaccccacagctgtgcagcgggaccctcctgctggcccacgtggctgccacagcccatgctggcacgacgctccagcatgtcggcgtccctgcgggccacgctaccgctgacatggctagcatcaccctccttcctggcagtgacactgctgatttgaaccccagtttcacagctgtcatttgtaaataggaccattttcccttttctctctcccttccattcacagggcttctcattccctctgtttctgcctccgtttcagagatttactcacctttttctctctcactatgtctgccgtggtctccataagagtgtgccacataaaattgccccattaaaagtcatgaattgagtggattttagtatacctgtggttgtgcacattcaattttaattcgcaatccattttagaaggttttatcacccccgaccagagaaacaccctgtggacattagtcactcctcattcttctcaaaccctctgcctgaccctcagccctaggtaacaactgcatagagcgatcaaccccatatgcatagatttccatattgtggacatttcctataaacggaattgcacaatacgtgagcttttgtgactgacataacacttttagcacaatattttcaagattcatccacattgcagccttacccacagggggaaaccgcattttctggtttcagtaacaccgggtgttttctccttccttccgtctttccttccttccttccttccttccttccttccttccttcctcccttcctcccttccttcctcccttcctcccatttctctcttattccttctgccctctctctttcatatgccttaggtgcatcctacgtcctgcgtctttttggggaatcctcgacaggtgctggaaaattgtgttattgtaattatttaccggtatctctctttcatggttctccatcagttgtaagcatctattggtttatcccaggtcactaagtatattttaattagctacacctgtttttctttatacacttgtttctggagtatagggtcgcatactcataaacccagtgtaactcagaaacgcatctaatattccaatagacccatcataacgttgaaaaatcataaatcaaaccaacttaagtcacgatttggcgctggatatgggctccatcaattccattgtattcaataatgctgtacaccattaacaatggcagactgattgggcgtggatgtggataacattataaaaatcagttattagagggatactttaacctgacggaagagctgatctaatggtattagtacagtgatgattatgtgagatgttttgagacagagtagtacatttgtgtatgagattctgtggcttttttcacttagtaggaacctttgtgtgtggaaaactgagaaaattgctttgtgctgtagagtctggcattcgttgtagattaaagcttatttttctggatgtaaatcttattcaataaaatactactctttataataaaaaac

SEQ ID NO: 1245 - DNA, 2232 bp, Homo sapiens
ctcatccgatacttatttgttcaaggccctaggacaatattcctgtaatgggctgcttttgccctgatttcctcctcagagtaaccgtctcgcggttgggcacgatcccagatcacatctacagtggaggtggttttgctggggaggatccgcatgcttgtttgtgtttatgcctggggaaccccctcttggcaagatgttcgggagaggctccaaaggcagcacagaggacggcttggaacttagggggattcactttatggtaaagaagccctttctaaaggagagctccacccaggaaacaccacccacccacgcatccttgcctcctaaaaccaggttatgtttatcacataccttctatgtgctttacataaagaatcccctggaattctccaaactgggcattgtggtctgtgatgcatatctcaaaagaggtgagagggttgggcacggtggctcacgcctgtaatcccagcactttgggaggccaaggcaggtggatcacttgaggtcagaagctcaagaccagcctggctcacatggtgaaacgccgtctcaactaaaaatacaaaaattagccgggcatgatggcgggcgcctgtaatcccagctactcgggaggctgaggcaggagaatcgcttgaacccaggaggtggaggttgctgtgagccaagattgcaccactgcactccagcctgggtgacagagtgagactctgtctcaaaaaacaaaaaaaaagaaaaaaaaaggtagaggagagtcctttttctaactttcttgaactctttggactaccttgggatccttctattaactgccttgttggcattattctcagtttatgaaaaaacaggcccacagagtggaagtaatttgcctacaggtacatctaaaaattgatgaagccagataggaactgctccctcatcatctgaaacccttcccagagctgtctctcccaccccagaagtagaaagaagccaggcaaagatgcatcttgatctcccttgtggtttcagcaaggaagcagatgagttggagatgaagcccccagcccctgggaaattggacccacttcttgctccaaaggctattggggtgacacaaggtgtgtttctttcccgtagatcatattcaccatattttgcctttaaatggaaattgtgcatcctgaagtaccttgttaagagtccattttcaacctgaaattccttttttttgtaaaccacttcagcaaatacagtgtggcatttacattagcaacctcccagcctaggagaggatgctccagcatccgactctaaaagacaaatttgtctgggcacggtggcttgacgcctgttatcccaacaccttgagaggccgaggcaggcagattgcttgagcccaggagttcgggaccagcccaggtaacatggtgaacccccatctctaccaataatacaaaaattagccaggcatggtggtgtgccagtggtcccagctacttgagtggctgaggtgaaggatctcctgagcctgggaggcagaggttgcggtgagccgagatcgaaccactgcactccagcttatgcaacagagcaagaccgtgtctcaaaaacaaataaaaataaaagattttaaaaagacaaattatcccacaaatggtacattgtggtggtggtggtggtggtggtggtagacctccctcttgctcttgaaattggatcagaacaaactgacaatgctacctacttcatggggtcattggtgaattcactgataatgcatgcaaatccccttctgcctggcacactacctaataaataaatggtggttgttattgttggaattggaggatatattcctagttgcaagggtttcacatgtattaccaagttaatcctcaccgcagatatgattctgttttacagaggaagcagtggatgctcagagaggttaggtaacgtgggtcagggacacacagccaggaaggggcagaggctgggagtgcctgactccaaattcatgcaatttctaccccaccatcttctccccaaggaaaatagtccctaatgcatgtgtgcaatgcttagagggcagtagatgctcaacagatgctgagagagtgagggagtaaatgagatatgccatgaaaaggagcccctgtggacttatgcgtgcgtttgtttaacttgtgggcaagtacttatagacaggtgcaaacaataaatctccttttgcaactg

SEQ ID NO: 1246 - DNA, 2419 bp, Homo sapiens
agtcgggttggggcggagcggaggggaggccgtgccaggcagggccggttcgtgcggaaccgccatggccgagccggcttcggtaagaagggccggtggaggatgcaggctctgtcgaaactcgggtccctgtcgcagctggattggggtccgcgtccagggagtggggcggccggggcctgggcctgggggttggcagtggcccacggactgagctccgggctgggctggagaaggtgcagtcttgctgcgtgtgctgttctggaattgacctggggaaaagctggtctggccgggcttggccgcgcgcgtctgtggccccggccactcggaaggctgaggcgggagcagcgcttgagcccgggagctctgcgctgtatatgcgctaggtccgtcgcgcggtgcctctgagttctgcatctgtgtggtgacctctcgggagcggggaccaccaggttccccagggagggggaaccggcccagctcggaaaccgagcagggcaaaaccccagtgctgatcgttagtgggatcgcgcctgtgaatagccactgccctccaacctgggcaacagccagaccccgtctgtttaatacataaataaaagttggtttgggagaaagaatccgggtgggaaagatctgtttctcggcctgttgtaggctcagatcaacaacgctgtccctgccttcagtgtcggggctctgaacctcggggtctctctggggcccgtgctctcctgctgaaggtagtttcagagaagcacatcagtgttaagcagatgagaaaaaggagaaggaaagctggaactgagagaaattggagaccgctccctctaggaaaggacagaaaacttaaaatgaattgggtggttagcgtaaatcgaatttaccgtaaatgctgtagtattgtaatgtagtattgaaaatttgagcaccggttttagagtttgaaaggcgtatcctgaggcttaatccaagaaaccctgttacattcagttaagtataacttgcttaagtgtgcaagtttttcttgtgcccccaatgaaattttataatcttaggaatgtaatgctccttatttgcatttgattcttcccttttgcctcccactccttttccccagcctcctttggcaggtacagattcttttctgatttctccaagctttgtttctacagccaggctttctttttttctctcctctttaagtgattgggaatctcctggaatattcctctctgttctgggaaagtttgtggtagctcttctttgtacattgaatttatagaaaatgtggtaacagtttactggctaatgtattatttgggataggcaaggaaaaatcgttttcttgattttcctttccactgtagcagtttaatgctaattgtaaatgtggtcataaatgggaattttataggtggaaaacacatgggtggccgggcgtggtggctcacgccagtaatcccagcactttgggaggctgaggcgggcggatcacctgaggtcgggagttcgagaccagcctgaccaacatggagaaagcccgtctctaccaaaaatacaaaattagcctggcatggtggtgcatgcctgtaatctcagctactggggaggctgaggcaagagaatcgcttgaacccaggaggcagaggttgaagtgagccgagatcgtgccattgcactccagcctgggcaacaagagcgaaactccgtctcaaaaacaaaaccaacaacaacaacaacaacaaaaaaatatgggtgaggtacaataaaactgtagaggaatttggttgaaatcacattgtaaaaataacaaggccatccggacgtggtggcttacgcctgtaatcccagcactttgggtggccaagacgggcggatcatgaggtcaggagatcgagaccatcctggctaacacggtgaaactccctctctactaaaattacaaaaaattagccgggcgtggtggcgggggcctgtagtcccagctacttgggaggctgaggcaggagaacggcgtgaacccggaaggtggagcttgcagtgagccaagatcacgccactgcactccagcctgggcgacagaggggactccatctcaaaaataaataaataaatagcaaggccaggccaggcgtggtagctcaggcctgtaatcccagcactttgggaggccgagccgggcggatcacgaggtcaggagatcaagaccatcctggctaacacggtgaaaccccgtctctactaaaaagacaaaaaattagccgggtgtggtggtgggcgcctgtagtcccagctactcgggaggctgagtcaggagaatggcgtgaacccgggaggcggagcttgcagtgagccgagatggcatcactgctctccagtctgggcgaaagagcgagactccgtctcaaaaagg

SEQ ID NO: 1247 - DNA, 2071 bp, Homo sapiens
cattatttttttcttctgcttttcattaacctaactcatctcatcagtacaaccattttcttattctctaactacccccaattcctttagcctctccccacctgtccaaactcagctcagccgtgggccaatgcagcttacagacggttgcagagctaggaagaaaacccagctctcccaaccctgatcgtggaggtctctggccccccaacactgccttctgggggctgcatttttttttttttttttgagaagaggtcttttgggatgcatggtgctccacatacagcttcacaaaatatttcattataagagaaaccccttgatttttatttctttttcttttgttttctggattacctgccttcagtaagcagatgcagacccacttgtaaggagtctggttagtgatgagaaaaggatgaaatctagatacaaaagtcaccttgaaggtgatgatggatctttaatccacttgactaagtgtctggaagagctacttgctcttccacccctcatctcaaatgagaggagcagaagtttaacttcctcaaatagcccagctctggctaaaacccaaagaagaaaggtcaaaggaagggaaagcatgtcaggggctggtttgtgacttggcaggaccaggaaacagcagccactgacagcccagagaaggtgactaagggctggcagaagattagaatgttaatttggctgctgtccggactaggaggccatgttcaatggcagtcagaatttgtgttctgcgcattgctgggtctataaatatgataagcaagtggtgacagaattatagtataaggtgatgtactacatgcagatcataaaggctttggttttaagacttaagtagaaaatccctctcctagcttattacccaacaatattcagataatgagcttttggagaatatctttttcctatcactagaaagatttacctgggaactgtctaaagtctacacacatatttccaaagcctttaaataccaactgcagcatggagagagaggggtggcagaagctgaaatgcctcaaaagccatttaagtgttacgttgcaggattttcagtccttctcgttatgtaaaagtagataaatatagacgttattctcaacactaccctatagtatcacagtggtccaaatgccagagcttacagataatgtcatcacagtgcctagaaactcgaactgtaatatatcgtagcattttcttggtgtttcttaaagtttctttccacaatacaaggtcctctctgcctcttgtttcttggagagttcaccccactgatgagtcttccttccctgttggactcagtcatttggggaacagtcttagaagcacatatcaaccaaggaagaaacttcctggatatctattgcccacttgcccaggtctaataaacactaaaggggggaaattgaaaggagctgccaactggtcaacgtggaagggcggttccaccctagattggtgtctttctttttcttccttttttttaaaaaaaatctatttcttaaataataataaatgcacatgatgtgttaaatatgtacatatatatttcaaaagaaaaaatggggcacaagattgtcttacaagtcgtgctggctaatttttagtttgtattcataagtggtttttaaaagccttttttaaagtgtaatttgcatgttctactttgattgtatgtaaacatattttagaacaaaaaatgtatttgtattttattgaatatagaggcaagaaaattgtacattgtttgaaatgttctttttgtaacagtttttattcataaagcatttttgtacatttaaaatgaacatggacttgctgttatttgaggcgtagatacatctagcatgcttactgtcatgctcctccatggtcttagatgttgggttttaaacatttttttctaaaagaaagctcagtcttttccgctaccagatcaggttagcacagtatagagcacttaactaaaaaaaaaaaagttaatcctattcatatgttattcattgtgtgaaattaaagacattcaattcagtct

SEQ ID NO: 1248 - DNA, 2070 bp, Homo sapiens
acaagagctcggccaggcggccccgcggggtggtcgtggccatgacagcggctccagacggctccccttccacgcccttcccgccggagatgaggggaagatgtctgtgtcaagattcaaggccaaactgaagttgctggcgtctatcttccacgagaaccaggaggctcagctgcggctcacgctccactgcaacatgagaatgggacaacagaagaagtgacttcagaggaagaggaagaagaggagatggctgaacagcagccgaattctcttaagtggagggatcgcataggtgtcctggagctccaccatgtctctcacaggaatgcaccaagagaagagaatctccagcaggaggcccagaggtggaagaggcagggatgcgaagaagcagaggaggctggaaggaaccgggcgagaagtggggacagcgggagtgtaagtgagagccagtgaggccgctcacgcagggcacccggccagatccaaccaagatggtgtcctggatatggtggaagaagatgttctctgggatgcagagatttccctgaacaagtccatcacagagagcaggagagtctggcctcttcagatgtgagccatcattaagttcaaattcactccaccatccatgcaaactgtgagagctgctccatggtgcccaaatcagcacattcagctagaatctctgtaagtgctctcacatggatggggtcagccttattcagtgttgaattctgtgctctgtggtgtaatgttcttaggattcatgcactacatttacccatgtttctggtactttgaattgtgtcactggagaagctgtctgattctctgaacatgacgcaagccttgctgtcaccaccaccgtgaaggtcagatacagcacccaaggcccttgcgcctctgccaccgctgtgagaagtacatatcctggccagcctgctgactcaggaggttgagaatcaggtgcagcagaccagagcactgcttcagtgtcagggtagagctgctccatgacccagagattcatacgaaaacaggtaaatgtattacctgcttcaaactgatggatggacagacagaaagagcagcaaaccaacaagcctccagctctcaggcctctcacctctggccttgcattttcttaagtgtgggtcagcgttataaggaaatcagacaaaaatacaggagatggagttttgctctgtcacccaggctggagggcaatgacaccaccatagctcactggagcctggagctcctgggctcacatgatcctcccacctcagcctcccaggtagctgggactacagccacacaccactgtggtgggctcacaggtggtgtcaggactgaagtgaactcactgtaggacgcccagctggtttccaagaattggtcgatgtgggagaaacgccccgctttggtgtcagaagtgttgtctctcagtaaattatggagactactgcaaaattcaataaatgctcgcaccggaaaggacagtggaaaatcccaaacttttaaagcttgcccaggaataggaaagctttcttccaggcggttagtctcatggcttacccactaggtcccattctccattggggatatagccactgatatctgcctcctgcatctgcagatccaaggaccagcctccgtaagaccaggacccaaacttgtttgcagtgctgcacatcaaagggaaaccagcgtacatcgatgtagcaggaactcttgaatatgcctgtgtgggtgatggaaacagaagactgaaacggaagctgactgagatgtgctgaaaatacacagcagttccttcagccggttccgccctccgcactgcagctaacacagtccagagcaaacggaatctgtctttttatttattcgcaaaatctgtaaaacagaatctcagctaagcttcactgtcttttaaaatccaaacgtaacactgacatgctctctcaaagactgttttgtgggctttttgtgcaaaaagttagctctataatctgcatttaccatgagcatcttcagactctaaataataaaagtaaagaatgc

SEQ ID NO: 1249 - DNA, 1924 bp, Homo sapiens
gaattactgggttatatctattaaataaagctttatgatctttgctcttttttttttcctgattataaaaatacatgctaggaccaggcacggtagttcacgcctgtaatcccggcactatgggaggctgaggcgggtggatcccttgagccctggagttcgagaccagcctgggcaacatggtgaaatcgctacaaaaaaattttaaaaattagctgagtgtggtggcatgcacctgtggtcccagctgcttggaaggctgaggctgcagcgagccaagatcccaccactgcactccagctggggcaacagagtgagatgctgtctcaaaaacaaaagcgaattctctaactcagtgattttgaacacttctggctcatgatccacagtgagaaacccattttccgtcattgaacttgagtgtgcatacgtgcatacacacacttagtgcaccaacacttaaacctttactgcatttttaaattccacctctttaaatctatttcattttttttaagccaatctcacttcacgatgagtcaggatctgcagtgtgaaagccgtggtttgaatccctctaagctgtagctcatcacacccccttctgagcaggacctgcccccagctccaggaagggggcttgcccagtgttcagcaaagacagaggccagggtgggacgcatatcaggaaacgctttggtgcagaagcacctctgtctgagctacctgcatttaaggaggtgctggccacgaagagacatggggcagcccttggtaaaatgggggagtgaggcagccaggacagtgcaccttcctgcgggcccagagctccttttctctccagggactgggtattgaggtcgctgctgcttttgggaacccaggaactcagggctctttccttttcccccttgtcctcctccctgccctgtcccctctcagagagggagagattccaggacagataacaatggccactaacacgtgtgtaccagactctgtcctgagagctttatgtgaattcattccatttagttctcacaatattattgtcgttcctgttttgcagatgaagaaaccaaggcatagagaggttcagtcatctgtccaaggtttgcatgacacgtgaccccagcatgcttaagggcatttctgaaggtgctctagaggcagccgtgcaaagaccgggctactgcaagcatgatggtcgcatacgagagcctgtgcagccgggctgtgttgctgcaggcgtgtagtggggtggaagctgtctattgtctgtttcagtgctgcctgctgtgttacaaatgacacctccccccaaaacacacacacacacggtggtttcctatcacagccgttgggcaatgtgcaaggattccagggatcaggaatgcaggtggccacagcagggctggctttctttcccctgttccttcacttctgggacctcagcagggaagggacttagcagctggaatcatgcacctgtaattggggctgcaataacttggcaattaggactgtcagctggcatgcacacaggcgccctcctgtgtggcgtggcttcctcagcatgcttggatttcttctatggtggccctgagatctgagcatgtcccacatacgaggcagaagctgtatggccttgggccgtgcgtggtggctcacgcctgtaatcccagcactttgggaggctgagatgggcggatcacttgaggtcaggagttcaagagcagcctggccaaaatggatatttactaaaaatacaaaaattagcagggtgtggtggcgcacgcctgtagtcccagctactgaggaggctgagacaggagaattgcttgaacccaggaggtggaggttgcagtgagccaagatcacaccactgcgctccagcctgggctagagtgagactctctctctc

SEQ ID NO: 1250 - DNA, 3109 bp, Homo sapiens
attgggtccctgctagcccagctgcctgtggacgttgtgattgggaagatgctgatcctgggctccatgttcagcctggtggagcctgtgctcaccatcgcagccgcacttagcgtccagtcgcccttcacccgcagcgcccagagcagcccagagtgcgcggcagcacggcggccgctggagagcgaccagggtgaccccttcacgctcttcaacgtcttcaacgcctgggtgcaggtgaaatctgaacggagcagaaactctcgcaagtggtgccgccgccggggcatagaggagcatcgactgtacgaaatggccaaccttcggcgccagttcaaggagctgttggaggaccacgggctgctggctggggcccaggccgcgcaggtaggggacagctacagtcggttgcagcagcgccgggagcgccgggccctgcaccagctgagacgccagcacgaggagggcgcggggcgcaggcgcaaggtgctgcggctgcaggaggagcaggacggcggctccagtgacgaggacagggctggcccagcccccccaggggccagtgatggcgtggacatccaggatgtgaagttcaagcttcggcatgacctggcgcagctgcaggccgctgccagctcagcccaggacctgagccgcgagcagctggctctgctgaagctggtgctgggccggggcctgtacccacagctggccgtccccgacgccttcaacagcagccgaaaggactcagaccaggtggggcctgttctgccccatcctatgttttgtcctccaacacacgaaccctgagtgcctgtcctgtgccgggaatgcagtggtgactgaaacaaccctggttctgtccccatggggctcacaacccagtgggaggacagacccatccccagacaacccagagtgggcagggcttggggagtcaagagcactacaggagcccacagggggcatctgccccagatttggaggagtcagggagggcttcctggaggaggggacctgggccagagggtggaggagaggcatcctgggcagaggagagagcagataggagggcttgtgctttctctctgtcctccgcagattttccacacgcaggccaagcagggcgccgtgctgcaccccacctgcgtcttcgctggcagccccgaggtgctgcacgcacaggagctggaggccagcaactgcgacggaagccgaggtacagtgagcccaggcggaaggaacccccatccgggatgtgaggggcagggataccgtgaactcccaggcccctctggctggggctcccacaccggcccaggctggtattgacgggggcccacaggaggggaagttccagggccaggcctccctgggtagccttgggtgactcacccctgctgggcctcaccttccgcatggtggtgatagtcaacctaagccagtgtggctgtgcccagagagtgagcaccggtcagggggcctgtcctatggactctgtgagctcccaggtgggtcctgcagagggaggcccccctggcacccgtgtgcatggaagggtgtctcgctgcaggcatggctgcgtgctgggagtcacattcagatttggctgaccttcttgtctgagccaggccaccaaagccatgccgtaagcatactctttctatcgatgtgtactttgaccgggtgggacaggcgggcttctgatgggcctgggtgggccagggtgggcctgagcggtcctcctcaacctttcagacgacaaggacaagatgagcagcaaacaccagctcctcagcttcgtgtccctgctggagaccaacaagccgtacctggtgaactgcgtccgcatccctgccctccagtccctcctgctttttagccggtctttggacaccaatggtgactgctcccgcctggtggccgatggctggctggagctgcagctagcagacagtggaagtgccatccgactcctggcggcttccctgcggctccgtgcccgctgggaaagtgccctggaccggcagctggcgcaccaggcccagcagcagctggaggaggaggaggaggatacgccagtcagccccaaggaggtggccaccctgagcaaggaactcctgcaattcacggcatccaagattccttacagcctccggcggctcacagggctagaagtccagaacatgtatgtgggaccccagaccatcccagccaccccccatcttcctggcctctttggcagctccaccctgtccccccaccccacaaaggggggctacgcagtcactgacttcctcacctacaactgcctcacggtaagcatgaaccctccttccctgaaggtgggatttcaggaagaccccaccaccccgtttcaccttagtccagggacatagttcccaagtggggcccgtggccctgagggcttctgggaagggtcccgggggggcacttgggtggtgggtggcacttggcgggggcccagccctgacagctggcctgccacagaatgacacagacctgtacagcgactgtctccgaaccttctggacctgcccccactgtggcctgcatgcgcccctcacgcccctggagcgcatcgcccatgagaacacctgcccccaggccccacaggatgggcccccaggtaagcacaggactgtggggacccggccacctctgcccagccgtctgcccatcccatgatggtctcctgtgcgtgtgagcacttgctagagcttcgaggactgacgacctccacccgctggccctggctggtgccacacacaggccttgtcctgaagatcaggagcccaaggcagggagagcctggagcgccacctctttctgtctgcctgtcccctgtggtgcctctgtgttgctgtctttgtctccagattccaggtgcaggttcttagcacctccgcagccgctctctcttgagtccatcctcagtctctcctaccccttgaagtagggggaccctgaatttgcccatccacctgggtcactttgagagttgtgcaggggggctgggagcactggtgttcacgtgggaccacaggctgcaccataagacccactcacaataaaaaaataaaaggcc

SEQ ID NO: 1251 - DNA, 2033 bp, Homo sapiens
gggccaacgagcaggcgctggcgtccggcctgagtgagtgcacgtcagggacggtggaggctgcagcctggaggggtgtcccaagaccccagccgggacctcgggctacttacagggtggggaagtggggcgccaggcgggccaggccgggccggggtcaggccaggagggtgcggggaacgggggcgggaccctcaggccgcgggctggaaggaggagttctgagacccccagtaattcccttgcagaccctgcggagcgcggcgcccctcccccattcccttctctcggtcccccgactccgcgaaggaggaagttgcagcgcaggggaagaggcggttcagccccggtggtttccggggtcaccgccccgaagcccccgagtgggggctccggcctgggcatcgggagaagctcccctgcccctcggtagccagctggcctggaggtcgctctccctgggcttggggtggggaatgggctcatgccctggggctcagcccttctcatctggagtctgcgctggaggcggtctgagatttcacaaggcgccgaaaccacccagtgacggccctgcccagcccagctgcacaggcactttgctcttggggtgggatggcacagcccccagtcaccctcctgtgcatttgctcagaggttctggtgagggcagcggactccatttggaaatggaccctctcgggaccagggccagggagtgtctggcccagcacgggtgaggctgggctcaggcgaggtctgagggcagaggcaccactgcagcagctccaggaaggacctgcaccgggggaggagtgcctgggaagggcctgggggctgagggtgaggaggaggggcccgctgccaccactcccctggggctctgagcgccctccctgttgtctggagggtgcgtggcagctggagtgggagcagagacctcagggtgggagggctggaggacggggccctgcagcctgtcctgtgcccaggaaagtgaccgcctgcttcgagtcagcggccaagaagtcggtgggtcagttcagacagctctccccagagctgccccgtgagactcaccctgcctgccccgcactccctacaggaagtagacggactgagggcacccagctgggagccaggagacctgggctctagtctggcctcctgctgaaaccctccaggggctcctggccgaagagttagagccagactggacgccctgcactgcccgccctggcctcccggctctccggccccctcctccagctgccgtgcttcctttctgttcctagatctcctgagcgtgccccagggcctcggcacaagctgctgcttctgcagagcctcatggctgtctcatttatttctcaattcaaatgccacctgcctggggaggtccttccagaccgtgcagccccaggaggcagctggcccggagacagcagggccttgacaaagagtcccccctgtacacagcaggtgctctgtaaatgtggctgggtgccagaatacgtcctcagacctccctggtggcaccagcggcagctttgcaccctctttcggatggcaggctcgggaccaggacggtccccaaagatgcatggacaattggctgagtagactcaaggacactgccctcccctcctccgacgcagacagacaaacccagagagttaatgtgtagctgggctcaaaccaaggataggaaatcttccaacaagaccatgtggagacaaaaacagaatggctggcagggcaaggtggctacacctgtaatcctggcactttgggaggccaaggcgggcggatcacgaggtcaggagatcgagaccatcctggctaacacagtgaaaccccgtctctactaaaaatacaaaaaattagccgggtatggtggcaggcgcgcatagtcccagctactcgggaggctgaggcaggagaatcgcttcaacctgggaggtggaggttgtagtgagctgggatcacgccacggaactccagcctgggtgacagggcaagactctgtctcc

SEQ ID NO: 1252 - DNA, 1832 bp, Homo sapiens
cactgagaactgaagcactcagaggcagcgcccactgctcctgtgccaaccggtgtctgttcacccacagcggtgttggcgctcctgtcggatccctagtcccgggacaccagcccccaggcccttgcctccttggagacgtcactccagcacttccactgcgtcctgtgttatatcaccccttctttccaactgcccattttatcattcccatcaaattacaaacatcctgttatttttctgaaaaagtttttcttgaccctatttcgctcaccagctgtgactctctttgtcctaccttttcaatgaaactcctgtcaagtgctgcctgtgctgccgaggagttcaccgcagacctccacactgactccaatgaccagtgcttggcttttgtctcatgcgtcagaagcctctgacacaggcgacccctcccttctccacacacggcttccagggaaacagactcttgtctccctacctcagtgactgcgccttctcctcttctctgctgctgtggcccagggctgtgtcctggctcccttccctctctcatctccctcacttccctggtaaccttataggtctcctgcctttaaataacatcgataagcaaacaactccaaagtgatgcctccatcacagacttccctccagactccagactcgcccgcctctaataaaccaccttgaactcaatgtgcgtacaaccgggttccatctcagcccggccctcccagcccaacctgcatgcctcagcctgtggcgccctgccagatgtccagccactgtgcctgagccatagctgacaactgtcttactctgcccctgactgccaggaagtcctgctggctccagctcaagatctgtctagattctgactgcgctcaccacctgcacctgcgtagccacagccgtttccctcccagacccgctgcctgggtctctgctcctgcctgtgctcctacagtgatccctttacaatgtgggccagataatgccttccttcactcacagccctccagagcattctgtttcacccatggtcagagccagactcctaagaatggccttcaaagcctctgtgccttctccaaggcctgcgattctgcagcgagtgagaagtgcttccccggggcctttgcctgtcctgctctgtgaggcgccctgtccacacttattcacctgccagcctcttcactttctccgagtgttgactttggtgtcatggttaccgttctatttcaaagagcctcctgtgtacctcccaccatcagtctccctgatcctgcttgctttatcctttttctgtatcatttattaccttataacatataagaaaatgtacacacttatgtgtactgtctccaactgctagactgcagacgcattcaggtgagtgtcttcgcctgttttcttcactgatggattccaagtgcctccgtaatgtctggtgctgagtaagcacttactcagttggatacattaaccagttggataaattaacatcctcggagagataagacaccaaaaccaagaaatacaaagaagggccaggcgcagtggctcacacctgtaatcccagcactttggggggccgaggcagacgaatcacctgagttcaagatcagcctggccaacatagtgaaaccctgtctctactaaaaatacaaaaaattagccgggtgaggttgggggcgcctgtaatctgtaatcccagctacttgggaggctgaggcatgagaatcacttgaacctgggaggcagaggttacagtgagctgagatcgtgccactgtactccagcctgggcgacaagatagaaactccatctcc

SEQ ID NO: 1253 - DNA, 2385 bp, Homo sapiens
tttttgaaggtcacaaacaacaaaaacatggaaactcagaatggaagggggcccatgagagcaatcttgaggcataacaacagctgcagaaggtgactgcagggaagcggactgtgctcctattctttatgttctgtttttagctgtgtttttcagagcaagtaggtaccatggtgataggtaccatagaaatagatggagcgcaccacccagcacggggctgccaagctgttcccctggaaatgcaccgagagctgccagggagagcccagggactctgcttcctggggcctgtcagctgcacggccagggaagaagtcccctgtagaatggtccccagaggcttctcactgtcttgctgtcattgtccaaggtccctgatggtgcatcctcctcctggagcacctgtggccttcctctctgagtcctcaggaaactcacttaagggggtttgcctttgcctagtgaagcaattatcttggccaacagtgacctcaaaagtagcactgccagcattcctgtctccatagttaggagtgcgtggtcctcatcctgcctggatgtggcactgtcactggttttatgcaatgtcataaagaatttgtggggcaggagctgagttctgaacatttggtaatcaggaatactcataaaatgaaatttcagaggatctaacccagaaagccgagcaaggtagggcataaccacgtctgatatggtggttttcagtttgtgaagccacaggcagtacagaatagggcccagcctcaactatttttggatgcagcttgaatggactgaaagaccctttgaaacaagtgctggaaccatcccgtagcacttacataaccatctctgcaaggctgttgatagatgaatgtaaatgaacctaggcagagcttagctcatttttatttagatttagaccaatttcatgtcttctgaaacgtaacccatatatacacacactaaatctaactcttttattttaggcctagcatgagaggatcaagttgaaagggcatctgttattatatctgtcccatcatatctgcttctgtgatggctttattatgtacatttctttctatacatttgtgctctcaggtggcattcttcttcagagcagggcaagtgtaattctggaccaatgtgtgattctgagaccagaccaaccaactgaaggtaattttattctcaattaaagaaacacagacggggcgcagtggcgcacgtgagcctgtggtcccagcactttgggaggctgaggcgggtggatcgcttggggtcgggagttcgggaccagcctggccaacatggtgaggccccgtttctgctaaagatacaaaaattagccaggtgcagtggcgcgcacctgtggtcccggctgcttgggagggtgaggcgggagaatcactgcaacctccacccccaaggctcaggcgatattcctgcctcggcctcccaagtggctgggaccgcaggtgtgtaccaccatgcctggctattttttttgtatttttggtagagacggggtctcaccgttttgctcaggctggtctcgaactcctgagctcgggcggtccacccgccttggcctctcaaggtgctgggattataggcatgagccactgtgcctggctaggaatttattttaacaaccaaaaacttaaaactcaataacatcattaactcataaattattgtttagttacagattacgaaaatgatagaaccagaaggtgctaacaaaatgtctgtcctgcatgtgtggcatttgacatgaagaaactgaggcccttgctgggcgcagtggctcatgcctgtgaccccagcactttgggaggccgaggcaggaggatcgcttgagctcaggagttcagggccggccttggacaagatggtgagaccttgtctctgccagaagaatacagaagttagccaggcatggtgcagtgtacctgtggtggcagctactggggaggctgaggtgggaggatcgcttgatcccaggaggtcagggctgcagtgggccgtgattgtgccactgcaccccagcctgggcgacagagtgagaccctgtctcaaaaaaagaaaagtaaaggctacgcgcggtggctcatgcctgtggtttcagcactttgggaggccgaggcgggtggatcacctgaggtggggagtttgagatcagcctgaccaacatggagaaaccccgtctctactaaaaatacaaaattagccaggcgtggtggcgcatgcctgtggtcccagctgcttgggaggctgaggcaggagaatcacttgaacccgtgcggcggaggttgctgtgggccgaggtggtgccattgcaccccagcctgggcaacaagagcgaaactccatctc

SEQ ID NO: 1254 - DNA, 2956 bp, Homo sapiens
acagggcccctgctgcccacccgctcacgcactggctcactcgtcctctgcgaacagggactgcctcccatcaagacctcagcactcgaacagccatttagcacccgttttcaccaagaagcagccgttttcgagtcccccgcccgggcctcagaagcctgagctttgggtgagctgattccactatcggggtcacgctcggtggaggacacggtcctgcagcctcgcatgcgtcccaagcccccttccagagctggagttctccaaatagcacaggagctccacaggaaagccgagcagaccccgccccggccccgcccgcggtcactcactgtagcgcgtggctccgtaggccacaccgaggaacggggcggagtagcggccgagctgcgaaagaggttggtcagaggcggcgcgagacggggctcgcgggacgggggtcgcgggaggagggggggcggggtcgctgggcagaggtcgcaggaggggtgggggtccggtcgccgggcgagggtcacggggcgaggatcatgggggcgggggccgggggtcgcagcccgcggggtcggagctgcggggcgggacacgggggggcccagagcactgggcggcggctgcaaagcctggatcaccttgatgagcggagagacctgcactggtggcaccatcttgtccccgacctccgcaccggaagcacaacctgcagacggagcaggatgccgcacaagccagcaaagccttggaggcaaaggcggagctgggcgcacgcatgcgccgtcagcggcgagagagcggggggccgcgccccctggcgaccgaagggtgactgcgcgcccccgcgcggcggtgacgtcacgtgaggcgcacgcgcacaaaggctggggagtgcgcggaggatcatcggctgcgcctgcgcagttgctgcgtgaggcgggatctgcgccgagtgggcggggggtttcctttccccgcagggctgggggtccgctgtttccccgcgctgctgccgaggccccgccgtccgcgtcctggccgtgtgtccacaccccagactgcgggccggggcgcactctgtcttcttgcgcggagcgtcggaggcctgaggtcagggcggctcgggcgggtccagccccgcggaccgcgcccacccgagggtggcctgggcagggacctgggggtcctgggagcggagtgtgagccgagtgcaggtggctccccgggcaggtccttctcctacaaggcagtagtgtctgtcgccggccgggccgcgttggattccgcggcccgcgggagcatggcctccaggcccctcttcctgcggctgctctgcccgggagcacggggcgcccttcatcccggagctggagcttcctcaccccaggatgccccatcacttctgtcccgaagaggggctgggatcttcttgggaagaccagcccccaacagaggctgctccctgggtcccccgactccaggcctcaggactccacggctccaagggcctgccccggcccaggcctggggaccactgagccccacactggtctttgctggcctctgtccacctcccggtagctgtgtgtctcccacagctgcccagagatggggcctgcggtgcctatgcagcctccccgctgtgcccgaagtgctgacccgccagccccatggacaccaggcttggagtctaggcaggagcctggcaccccctccacgttctgggtcttcctggcggcagccatgctgcccgtgctgggccaccctcgggccccctttggccccatgcagtagtgacgcaaggcctcctgtgtcccctcctggccctgcactgctacaggcagaagcaactggagaactatggctcgggtctcgctaaggtgcagcatcacaaactccaggactcttgaagcaagcatggggaggacccgtgatcctggcggcctgggctacctgtccgggcctaagtcgcctctgccccctctcctggcttgctctggggtccagggcctgggcctctctggctgagaaactaggaagtcactgggctctgtttcctgagctgggtataccaaggccagtcctatagggcaggggtccccaacccccaggtgcagaccagtaccagcttgtggcccgttaggaaccgggcagcacaggacgaggtgagggagcatgattgcccgagctccacccactttcagatcagcctgggcatcagattcccataggagcgtgaaccctactgtgagctgcgcacttggatctggattgcgctctgggggccagaagcaaactccagccctccccgtgtctactgctcgctgaggaagccgcaggtgcacactggatccacaaggcacagaaccatcttggccctcggcaagcccccgcttccgccagggcagacggcctcaggaagaccaagaagaaggaagggggtgccctccgggcccagagagcctcatccaatgtcttctccaactttgagcagactcagatccaggagttcaaggaggcattcacactcatggatcagaaccgagatggcttcattgacaaggaggacctgaaggacacctatgcctccctgggcaagaccaacgtcaaggacgacgagctggacgccatgctcaaagaggcctcggggcccatcaacttcaccatgtttctgaacctgtttggggagaagctgagcggtaccgacgccgaggagaccattcttaacgccttcaagatgctggacccggacgggaaagggaaaatcaacaaggagtacatcaagcgtctgctgatgtcccaggctgacaagatgacggcggaagaggtggaccagatgttccagttcgcctccatcgatgtggcgggcaacctggactacaaggcgctcagctacgtgatcacccacggggaggagaaggaggagtgagacccagccgggtcaataaacctggacgcttgg

SEQ ID NO: 1255 - DNA, 2287 bp, Homo sapiens
ctctctggggagctccggcagcgcaagagggcaaagcacagctggaagctcagagctgcagtcccaggtcctgggccagggcccccatccagcatcaatgaaagcagaagccacagttattcccagccgttgtgctagggggctcccatcatggcaagtcctcagcccagtccagccctggcagacaagtgcaccccagaacacgacccagcccaagctcctggctccacaccagcacgataagtcccagaagaagagcagccttcttaaggagctgggggccttccacatcaccatcgctctgctgcacctggtctttgggggctacctggcctctatagtcaagaaccttcacctggtggtgctgaagtcttggtatccattctggggggctgcctcttttctcatttcagggatcttggcgataacaatgaagaccttttctaaaacttacctgaagatgttgtgcctgatgacaaacctcatcagcctcttttgcgtgctgtctggcctcttcgtcatctccaaggatctctttctggagagcccatttgagtccccgatctggagaatgtaccccaactccacggtccacatccagaggctggagctggccttgctctgcttcactgtcctagagctcttcctgccagtgcccacagctgtcacagcctggagaggggactgcccatctgcaaagaatgatgatgcatgccttgttccgaatacaccattgcatctcaaaggcctgccggtggagcccccgccatcctaccagagtgtgattcaaggcgacgcacaacacaagcaacatcagaggctcagagaagttaagcaagttgccccggacacatggatagtcactgacggagctgcgatctgggcccagactgcaaactgaagagccactgcctgacaatgcccaaacttggttggagcatagcccctgctctcccaaagttgcactttcactgggaagatgagatttgcacatacaaaaggctagagcgatggtctatacagcaaagtcagccctcacagctcaaccctgtcctctcagataagccatttcttacatagttgatggctcgatatctgtggtagcccagattgttttgttttgtttcgctttgttttgttttcttttgttttgttgagatggagtctcgctctgttgcccagcccagagtacagtggcactatctcagctcactgcaacctccgcctccctgattcaagtgattctcctgtctcagcctcccaagtagctgggactataggcacacgccaccacgcccagctaatttttatatttttagtagagacaggattgcaccatattggtcagcctggtctcaaactcctgacctcaggtgatccgcctgcctcagcctcccaaagtgctgggattacaggcgtgagccactgtgcccagcccaggttttgaagttgtccgagatagcagtctgctctctactgccttataaaatccctgtgtgaagggatgctctcagtatcatttgcccttgcacagaatatccctggggtttgaggttctttgaattctccctctttgtcatctctttcgctgccacttctggctgtggtcactagcttggccatagcacctctcttctccacttctgatctgctgcttctaaccttctatagattgcagctggctttaaaatagattgtaaagtgtaaggcattcggttctgagacagcggcagagagagccatgcaaatgtttaggacaacccagtctttcttttttttttttttttttttttgagacggagtctcactctgtcacccaggctggagtgcagtggtgcaatctcggctcactgcaacctctgcctcccgagttcaagcaattctcctgcctcagcctcccgagtagctgggattacaggcgaccaccaccacgcctggctactttttgtatttttagtagagacagggtttcaccacgttagccatgatggtctcaaacttctgacctcataatccgcccaccttggcctcccaaagtgctaggattacaggcatgagccaccacccctggctgaaacccaatctttcaaaacatgaaagggggtgatggagaaaaccttagcttggttgtctaaagacatgggtgcaaactctaggctagctctgccaatcacttactgtgcgggtttgactcagtcccttcccctcattaggtcccagtttctccatttgtaaaacaagcaattgtgctacattgatggtttacatcaataaagtttgaaacggc

SEQ ID NO: 1256 - DNA, 1618 bp, Homo sapiens
agctctgggagaagagccccagccccagaattcccaggagtctccactcggtgatcagcactgaacacagaggactcaccatggagtttgggctgagttggattttccttgttgttattataaaaggtgtccagtgtcaggtgcagttggtggagtcggggggagacctggtcacgcctggagggtccctaagactctcctgtgcagcctctggattcaccttcggtgacttctacatgacgtggctacggcaggtcccagggaaggacttggagtggcttgcatacattagctctaacggtggctactcagagtatgcagactctgtgaggggccgattcaccatctccagagacaacgtcaagaactcactccatcttcaaatgaacagcctgagagcccaggacacggcaatttattactgtgcgcgatttacggtgtctatggacacagtggcgtactcctatggtctggacgtctggggcccagggaccgcggtcaccgtctcctccgcatccccgaccagccccaaggtcttcccgctgagcctctgcagcacccagccagatgggaacgtggtcatcgcctgcctggtccagggcttcttcccccaggagccactcagtgtgacctggagcgaaagcggacagggcgtgaccgccagaaacttcccacccagccaggatgcctccggggacctgtacaccacgagcagccagctgaccctgccggccacacagtgcctagccggcaagtccgtgacatgccacgtgaagcactacacgaatcccagccaggatgtgactgtgccctgcccagttccctcaactccacctaccccatctccctcaactccacctaccccatctccctcatgctgccacccccgactgtcactgcaccgaccggccctcgaggacctgctcttaggttcagaagcgaacctcacgtgcacactgaccggcctgagagatgcctcaggtgtcaccttcacctggacgccctcaagtgggaagagcgctgttcaaggaccacctgagcgtgacctctgtggctgctacagcgtgtccagtgtcctgccgggctgtgccgagccatggaaccatgggaagaccttcacttgcactgctgcctaccccgagtccaagaccccgctaaccgccaccctctcaaaatccggaaacacattccggcccgaggtccacctgctgccgccgccgtcggaggagctggccctgaacgagctggtgacgctgacgtgcctggcacgcggcttcagccccaaggacgtgctggttcgctggctgcaggggtcacaggagctgccccgcgagaagtacctgacttgggcatcctggcaggagcccagccagggcaccaccaccttcgctgtgaccagcatactgcgcgtggcagccgaggactggaagaagggggacaccttctcctgcatggtgggccacgaggccctgccgctggccttcacacagaagaccatcgaccgcttggcgggtaaacccacccatgtcaatgtgtctgttgtcatggcggaggtggacggcacctgctactgagccgcccgcctgtccccacccctgaataaactccatgctccccc

SEQ ID NO: 1257 - DNA, 2772 bp, Homo sapiens
tttggctccagccaccccaatggcatttcctcttaagctgttgggaaagacaggaagcctaaggcatgggtacaggctgagaggtgatactgacccctctgcgggtgggcttggggctgcttggtagaggaaacaaggacttcagcagtcacaggaggccagggctgtgccttcctcactccagggcaacagggcagagctggctctgggaagcagggcacacaggggcatggctggcctagccaggagggttgttggagccttcctcctcttccatttcaaacagaaaagcggggctgagacaggagaggcagccctccatctgggcaggtccccagtgctcccagcaagggcaggaattctgaggacatgcctgagcctcagagctgtaacctcaccccaggactttggatctgcccagagaacaagatcagcccccctgggacccataaaccaggcctctagacgtgttcagcctggcaaggccaacccggagaggagggcaaatgatagcgactcccagggaaaggcatgaagtggggctgggaaactggtatacttgcactgaaatgaagatcaccaggatgatttgtgagttgtctgtaaactttgtccccatatctattcattgagaattcattgatttctttgggctaaagaccatagatggagactggaatacttactcgagaatctccaaggttctgttcacagccaaggcttcccctagcacctgggcgcctgaagcaccaattgaggccacctggagactggggcggagagggtgccgtcagtgtgagccggctgggcccacctccccccgcatactccgttccctttcaccaccccttgactcaggatggaaagtggagaaacagcactgagaatggttggccagcgctgtgtctaggcactccatctcctacctacactgtctgttgcctaagacagagatctggatgctaaggagatgagaaatagaggctgtccctggaagggctcggggagaatgctccctgtacctcctcattactactctctaggtgtttgagcccccaactgctaatatcatatttcctatattaggaaaatcaaacacaccttccttgacttgtaaacaaaaataacgtccaggccaggtgtggtggctcacacctgtaatcccagcactttgggaggctgaggtgggcagatcacctgaagtcaggagtttgagaccagcctggccaatatggtgaaaccccgtctctactaaaaatacaaaaattaggctgggtgtggtggtgcacgcctgttatcccaactactgtatgggaggctgaggcttgagaatcacttggacccgggaggtggaggttgcagttagctgagattatgtcactgcactccagcctgggtggcagagcaagactcttgtctcgaggaaaaaaaaaaaaaaaaagacctctaacgtgaaaggatggcgaagggaccggtttcctgactgctgcgcacatttaggacttactagagagcagtgagggctgtgttgaccttcagtgcacgggccaccgcacacgctccgtcatccccgatggcgttctcctgtaaactagacacagagtatgacccctttgggtgcacggggcacagggagcattctagcaaggccctgccgcacttggacctgccaggtttaaccgactacacacaccatagacactcccagggtttcctggggataactgcccttcctccacaggccctgcagcccgcctcatactaagcacacagaggcgtccggggcctgcatgagtctgaaccgccagaggcaagcaggaaatgggacatatagagtgactgtcagcaggggcttgggacccaaaaggggatgcttttcacagccaaccagaaaatgaacttaaagccctcaatccctgagccattcttgtttgtcttgttttctcttgagacggggtctcactctgccacccaggctggagtgcagtggtgagatcacggctcgctgcagcctcaacctcccgggctcgggcgatcctcccgcctcagcctcccgaggagactaaagtacttaactagagacggggactacaggcacatgcccccatgcccggctaatgtttttattcttttatggagatggggtctcactatgttgctcaggctggtcctgagctcctgggctcaagcggtcctcccgccttggcatcccaaattgctggcattacaggcaggagccaccacgcccaacctccttggccattcttgctaattagggctttgtgtcattttttccccttctaagttggagggaactagcagaccctggtgcagtgagtgactgagtttagctcaagcgcacactggtatgttcaaggccaagagctgtttgcattcattattttaacagacatttgagtgtggccgggcgcagtggctcacacctttaatcccagcactttgggaggctgaggtgggtggatcgcttgaggtcaggagttcgagaccagcctggccaacatggtgaaaccccgtctccactaaaaatacgaaaattaggctgggtgggtgtatttttagtagagacagggttctctgtctctactaaattagctgggagtggtggagggcacctgtagtcccagctactggggaggctgatgcgggagaatcgcttgagcccgggaggtggaggttgcagtgagccgagatcccgccactgcactccagcctgggcgacagagttagactccgtctcaaaaaattaaaatg

SEQ ID NO: 1258 - DNA, 2980 bp, Homo sapiens
gtttttagtggagacggggtttcaccgtgttcgccgggctgctctcggactcctgacctcagctgatccgcccgcctctgcctcccaaggtgttgggattgcaagcgtgagccaccgtgcctgggctttttttttttttttgacacagagtcttgctctgttgcctgggctggagtgcagtgccgcgatcttggctccctgcagccttgacctcctgggctcgagcagtcctcccgccccagcctctgagtggctgggactacaggtgcatgctgccacaccaggtgtgttcatatgggtgtgtgccgcatgtgtgtgggcaggtgtgtacagacaggtgtgtgcgggcggttgtatgcatgtgtgtggcagatgtattcagctaaggtgtgtgcaggtaggtatgtgtgggcaggtgtgtgtgtgtgtgtgtgcgtgcacacaaggcaaagggagccccggaagggtagttgcttgggaggatgtggggcaatcagtgggatctggggcaggagtgacaaccgaacccagcagggggatcccaggccaaaggtgtggctgcataaaggccaagtggccactggaggcagaggatgcatggggagaagagccacgggagagggcaggctgggaggcaggtacccctaaagcagcagtcggtcagtggtgagagccagcagggggcgaggcagggggctggccagtctacctgttacctgagctctgcctttctctgtaacgggagcttcccagcaggcagcatgtccctgtgggaccctcaacccaaacaggcctttccctccgtgctctggtgttcgtgggctggagtccctggcaggaggactgggcagagagaccccagagtccaagaaaggagaggtgactttgtgagcaaactgggtgctgccgtgggtggggagcccctggccctttttggacctcactcctggcctgggatggggcacagagttccagggctgggagctggttttctgctctttgctggttttgcccttgagccgtgggattcttatcacgtggtgtttgagggctggaccattgacatgaggcggaatgagccagagaggactcgaagcctcagtgctcctggccctctgtgagggctgcagccgtgtgccctggagtatctgcagccttgggcctctgggtgggcaggggagttgcttgtgctcaaagccccctcctgggaatcctgggactcccctcccccagaacctggagttgccccctctggagcagggcaggctggagaccagccctgtcagcttccccaccttggggttgtgtgtcctcagctggagtggggacactgtccagcctgccagtgtgagcgtctgagcctcaaaatagactccgtttttccagagccgtggattcccctgggctgggaggccataaacgggcggcagcccagggtcttggtcaccaggtcaggcccagcagcttcctccagggccaccccctctgcccaccaggggagctggagtttggttccatctccagggtactgatgtggctcatgctctagggaaccaggaagctggacctgggtaggtgccggggagctgggatcacctttaggaagctcatccccgttttacagaaaggaaatcaaggctcagcagaagccgtgtgcccagccctgcaccagggagagcagggtcagtttcctgaggggctgcgggccctctgctgcagtgagaggcagctggacatcagagatgccgacagccccaccagcccacgtggggaggggctctggccacggtgctcccggtgctggggctgaggcctccacgtctgagcctgagacgtggaggatcaaggccgctgagcgggcttgatcgcttcaagttgtgtgtgtgtctggctcgtctggccagctctctgctacctcgtagggttgcctggagcccactggctgcctgtggctggaccccagcctgtgggggacaccctggtaggcagagggaccatgcactttgttcacatctgaagggaggaggcaggtgtgccctgcgcctccccctccttctgtgctggagagggtggccctgcgtcccatgcctgcgctggcttctgtttcagaggctgaggggatctggcggtggagcgctaggatcagacgcccccgcgatgaccagctcccccgtctccagagtcgtgtacaacggcaagaggaccagcagcccccgctccccacccagcagcagcgagatcttcaccccagcccacgaggagaacgtccgcttcatttacgaagcctggcagggtgtggagcgagacctgcgaggccaggtgccgggtggcgagcggggcctggtggaggagtatgtggagaaggtccctaaccccagcctgaagaccttcaagcccatcgacctgagtgacctgaagcgccggagcacgcaggatgccaagaagtcctagagcgcccggtgcccctccccggcctccggaagatcagggatcaggaggggagaagaaggagcctctgctgcctcccaggctgctgggactgggctggttttgtccttgaagtggtcaggatacaggacaagggcagccccaccccatccagcctgggctccccgcagacccttgctgctcccgtggcctggacacgctggggagcttctcacacctacccctaccgtccagcctggcctcttccctgaatcagcttcaagatggcaccagctctttgggcctaggatactgccgggccccccaagggggtccccagcaaccaggcctggcctcctggtgtctgcggtcacagtggcccctgggcaggggcacccaggctgaccctgaggtgctgctgctgggtctgtcttggctctggggtgtgctgggagggtcaccaggtcccttttccttcctgtgccctctgaaagctaagtgtctgtgtggctgtggagctcgagggtctgtgaataaaggcggcggcactggg

SEQ ID NO: 1259 - DNA, 1591 bp, Homo sapiens
aggtctcagagaggagccttagccctggactccaaggcctttccacttggtgatcagcactgagcacagaggactcaccatggaattggggctgagctgggttttccttgttgccattttagaaggtgtccactgtgaggcgcaagtggtggagtctgggggaggtttggtccagcctggggggtccctgcgactctcctgtgcagcctctggattccccttcagtagtttttggatgacctgggtccgccaggctccagggaaggggctggagtgggtggccagcataaacaaagatggacgtgactcatactatgtggagtctgtcaagggccgcttcaccatatcaagagacaacgccgagacttctctgtatctgcaaatgggcagcctgagagccgaggacacggctgtatattactgtgcgagaaaatttatgttcgattcttggagttcctattacgtcgaaggacattacttcgatctctggggccgtggcacccaagtcactgtctcctcagcatccccgaccagccccaaggtcttcccgctgagcctcgacagcaccccccaagatgggaacgtggtcgtcgcatgcctggtccagggcttcttcccccaggagccactcagtgtgacctggagcgaaagcggacagaacgtgaccgccagaaacttcccacctagccaggatgcctccggggacctgtacaccacgagcagccagctgaccctgccggccacacagtgcccagacggcaagtccgtgacatgccacgtgaagcactacacgaatcccagccaggatgtgactgtgccctgcccagttcccccacctcccccatgctgccacccccgactgtcgctgcaccgaccggccctcgaggacctgctcttaggttcagaagcgaacctcacgtgcacactgaccggcctgagagatgcctctggtgccaccttcacctggacgccctcaagtgggaagagcgctgttcaaggaccacctgagcgtgacctctgtggctgctacagcgtgtccagtgtcctgcctggctgtgcccagccatggaaccatggggagaccttcacctgcactgctgcccaccccgagttgaagaccccactaaccgccaacatcacaaaatccggaaacacattccggcccgaggtccacctgctgccgccgccgtcggaggagctggccctgaacgagctggtgacgctgacgtgcctggcacgcggcttcagccccaaggatgtgctggttcgctggctgcaggggtcacaggagctgccccgcgagaagtacctgacttgggcatcccggcaggagcccagccagggcaccaccaccttcgctgtgaccagcatactgcgcgtggcagccgaggactggaagaagggggacaccttctcctgcatggtgggccacgaggccctgccgctggccttcacacagaagaccatcgaccgcttggcgggtaaacccacccatgtcaatgtgtctgttgtcatggcggaggtggacggcacctgctactgagccgcccgcctgtccccacccctgaataaactccatgctcccccaagc

SEQ ID NO: 1260 - DNA, 2198 bp, Homo sapiens
agcttcagctgtgggtagagaagacaggactcaggacaatctccagcatggccagcttccctctcctcctcaccctcctcactcactgtgcagggtcctgggcccagtctgtgctgactcagccaccctcagcgtctgggacccccgggcagacggtcaccatctcttgttctggagccagttccaacatcggaaggaatagtgtaaactggttccagcaactcccaggaacggcccccaaactcctcaatcataataataatcagcgccccgcaggggtccctgaccgcttctctggttccaagtctggcacctcagcctccctggccatcagcgggctccactctgaggatgaggctgattattactgtgcagcatgggataacagcctgaatggttgggtgttcggcggagggaccaagctgaccgtcctaggtgagtctcttctcccctctccttccccgctcttgggacaatttctgctgtttttgtttgtttctctatgttgtctcaagttgtggtcagactttctccctacatcccaggcctgaggaaggacctctgtcctccctgttcagacccgtgcttgcctcagctggtcatcacagcctcttcacgtctgaccgcaggggcaggggactagatacaatgacctacggagccccgactgtctgtctgtctctctgtctctctctctctgattgtctctctgtctgactggcagacgcaggctgggtctctaagccttgttctgtcctggcctcctcagtctgggctcttgtcggaacagatttgaccttgggttacctgggttccatgtcctggggaattgggaacaaggggtctgagggaggcacctcctgggagatttcagaaggacccagtgccctcggggctgatgctcgggaatcacagagctgggacccagaggcaggatccagacccagaatgaggtaggaggtggaggggctgccctgggcgtccgggggctgccagggactgagccctgagccagcctgagactcaggaaaccccgtcaggaggtagaagggggagggagtctctggataccagaaagccaggggcagggtcacaaaaggagtggatgtgacggaagggcgggctcctgggtctcttcggaacatatcccctgtgcccagggggatcagaggggcaaattccactgcgtgaaagccccactgctgtgaccaggtagccgggacgtggggtggatgccagaaaagactccacggaataagagagagcccaggacagcaggcaggctctccgatccccccccgcccttgccccaaacacggtctccagaacacacatatggctggaacagcctgagggaccaaaaggccccagtatcccacagagctgaggagccaggccagaaaggtaaccccagagttcgctgtgcaggggagacacagagctctctttatctgtcaggatggcaggaggggacagggtcagggcgctgagggtcagatgtcggtgttgggggccaaggccccgagagatctcaggacaggtggtcaggtgtctcaggtaagacagctccccgtgcagatcagggcatagtggaaaacaccctgacccctctgcctggcatagaccttcagacacagagcccctgaacaagggcaccccaacacctcatcatatactgaggtcaggggctccccaggtggacaccaggactctgaccccctgcccctcatccaccccgcaggtcagcccaaggctgccccctcggtcactctgttcccgccctcctctgaggagcttcaagccaacaaggccacactggtgtgtctcataagtgacttctacccgggagccgtgacagtggcctggaaggcagatagcagccccgtcaaggcgggagtggagaccaccacaccctccaaacaaagcaacaacaagtacgcggccagcagctacctgagcctgacgcctgagcagtggaagtcccacaaaagctacagctgccaggtcacgcatgaagggagcaccgtggagaagacagtggcccctacagaatgttcataggttctcaaccctcaccccccaccacgggagactagagctgcaggatcccaggggaggggtctctcctcccaccccaaggcatcaagcccttctccctgcactcaataaaccctcaataaatattctcattgtcaatc

SEQ ID NO: 1261 - DNA, 2374 bp, Homo sapiens
acgagtgcaggagtcagtgatggtgccggagggcctgtgcatctctgtgccctgctctttctcctacccccgacaagactggacagggtctaccccagcttatggctactggttcaaagcagtgactgagacaaccaagggtgctcctgtggccacaaaccaccagagtcgagaggtggaaatgagcacccggggccgattccagctcactggggatcccgccaaggggaactgctccttggtgatcagagacgcgcagatgcaggatgagtcacagtacttctttcgggtggagagaggaagctatgtgagatataatttcatgaacgatgggttctttctaaaagtaacagtgctcagcttcacgcccagaccccaggaccacaacaccgacctcacctgccatgtggacttctccagaaagggtgtgagcgtacagaggaccgtccgactccgtgtggcctatgcccccagagaccttgttatcagcatttcacgtgacaacacgccagatcctccagagaacctgagagtgatggtttcccaagcaaacaggacagtcctggaaaaccttgggaacggcacgtctctcccagtactggagggccaaagcctgtgcctggtctgtgtcacacacagcagccccccagccaggctgagctggacccagaggggacaggttctgagcccctcccagccctcagaccccggggtcctggagctgcctcgggttcaagtggagcacgaaggagagttcacctgccacgctcggcacccactgggctcccagcacgtctctctcagcctctccgtgcactataagaagggactcatctcaacggcattctccaacggagcgtttctgggaatcggcatcacggctcttcttttcctctgcctggccctgatcatcatgaagattctaccgaagagacggactcagacagaaaccccgaggcccaggttctcccggcacagcacgatcctggattacatcaatgtggtcccgacggctggccccctggttcagaagcggaatcagaaagccacaccaagcagtcctcggacccctcttccaccaggtgctccctccccagaatcaaagaagaaccagaaaaagcagtatcagttgcccagtttcccagaacccaaatcatccactcaagccccagaatcccaggagagccaagaggagctccattatgccacgctcaacttcccaggcgtcagacccaggcctgaggcccggatgcccaagggcacccaggcggattatgcagaagtcaagttccaatgagggtctcttaggctttaggactgggacttcggctagggaggaaggtagagtaagaggttgaagataacagagtgcaaagtttccttctctccctctctctctctctttctctctctctctctctttctctctcttttaaaaaaacatctggccagggcacagtggctcacgcctgtaatcccagcactttgggaggttgaggtgggcagatcgcctgaggtcgggagttcgagaccagcctggccaacttggtgaaaccccgtctctactaaaaatacaaaaattagctgggcatggtggcaggcgcctgtaatcctacctacttgggaagctgaggcaggagaatcacttggacctgggagacggaggttgcagtgagccaagatcacaccattgcatgccagcctgggcaacaaagcgagactccatctcaaaaaaaaaatcctccaaatgggttgggcgtctgtaatcccagcactttgggaggctaaggtgggtggattgcttgagcccaggagttcgagaccagcctgggcaacatggtgaaaccccatctctacaaaaaatacaaaacatagctgggcttggtggtgtgtgcctgtagtcccagctgtcagacatttaaaccagagcaactccatctggaataggagctgaataaaatgaggctgagacctactgggctgcattctcagacagtggaggcattctaagtcacaggatgagacaggaggtccgtacaagatacaggtcataaagactttgctgataaaacagattgcagtaaagaagccaaccaaatcccaccaaaaccaagttggccacgagagtgacctctggtcgtcctcactgctacactcctgacagcaccatgacagtttacaaatgccatggcaacatcaggaagttacccgatatgtcccaaaagggggaggaatgaataatccaccccttgtttagcaaataagcaagaaataaccataaaagtgggcaaccagcagctctaggcgctgctcttgtctatggagtagccattcttttgttcctttactttcttaataaacttgctttcacctt

SEQ ID NO: 1262 - DNA, 1931 bp, Homo sapiens
ttaggacttatcttagaagggcatcaggaaggctgatgaatcctccacaaatctggggtacatttttcatggcacaagagttagagttgtcactgaattctataaaggggttctaagatccagagagtagccatcgaattttgatggaaaaattcttgaaagccaatttaaagggctctataggtgtgtatctttgtgcgcatcttcacacactgttttaggaagcagggtaacatcttggtcattggtgaggacctgagctctctctcctcctccctgggccaggacgctgcagaggagtcctgcgcactcatctgtcaggtcttccagatcatctacggggaccagagtattgagtgtgtggaccgggctggctaccactacacatccacacctgaacggccatggctctgcagccgcagtgagagctgccacacagatgggacgtatgcctatgatgccgacttcagctgctgcagctcctttaatggctcccaggacacctttgaagcatgttacagcggcacgtccacaccttctttccatggctcccactgcagcggcagcgaccacagcagtctgggcttggagcagttacaggattacatggtcacgttgcggagtaagctggggcccctcgagatccagcagtttgcgatgctgctgcgggagtaccggctggggctgcccatccaggactattgcacaggcctgctgaagctctacggagaccggcgcaagttcctcctccttgggatgcggcccttcatcccggaccaggacatcggctacttcgagggcttcctggagggcgtgggcatccgcgagggcggcatcctcactgacagcttcggccgcatcaagcgcagcatgagctccacgtcggcctccgcagtgcgcagctacgatggcgcggcgcagcggcccgaggcacaggccttccaccggctgctggctgacatcacgcacgacatcgaggcgctggcccccgatgacgacgacgacgacgaggatgagccccggggctccaggggcgggagcgacgccgcagaagacaactacctgtagccaccgcccctgcggacggcgtggctcagcagcccacctctgagtctcagctttgcttcggggaccctatccccagggcccccccatcacacctggcggggccggggggtcttcactccagggtctcgctccctgcccttggggcccggggccatgcagtacctggagtgtcctgcagggggaaagcgaagccgggccctgaagtccggggcagtcacccggggctcctgggccgctctgccgggctggggctgagcagcgatcctgctttgtcccagaagtccagagggatcagccccagaacacaccctcctccccgggacgccgcagctttctggaggctgaggaaggcatgaagagtgggctccacctgctggccgactgagaaaagaatttccagaactcggtcctattttacagattgagaaactatggttcaagaagagaggacggggcttgagggaatctcctgattctccttatatgacctcaaactgaccatactaaacagtgtagaaggtctttttaaggctctaaatgtcagggtctcccatcccctgatgcctgacttgtacagtcagtgtggagtagacggtttcctccacccagggttgactcagggggatgatctgggtcccattctggtcttaagaccccaaacaagggttttttcagctccaggatctggagcctctatctggttagtgtcgtaacctctgtgtgcctcccgttaccccatctgtccagtgagctcagcccccatccacctaacagggtggccacagggattactgagggttaagaccttagaactgggtctagcacccgataagagctcaataaatgttgttcctctccacatc

SEQ ID NO: 1263 - DNA, 2431 bp, Homo sapiens
ggtttttgttttgggttgaagttgaggctgaggagagagccgagctagcgacgagcagtcgttgcggccgccggcgccgcgggaggtggtggaggcctagccggagccgagaggtctcttgttcccgtcccacggtcccggcgtcacccctccggcgcccagtccccgtcccggaactcccgggcctgtcctgggcccccggtctgtgcactccgctcgccgcagcgcccggcccgggccgcacccgccggccccatgaggagggacgtgaacggagtgaccaagagcaggtttgagatgttctcaaatagtgatgaagctgtaatcaataaaaaacttcccaaagaactcctgttacggatattttcttttctagatgttgttaccctgtgccgctgtgctcaggtctccagggcctggaatgttctggctctggatggcagtaactggcagcgaattgacctatttgatttccagagggatattgagggccgagtagtggagaatatttcaaaacgatgtgggggctttttacgaaagttaagtcttcgtggatgtcttggagtgggagacaatgcattaagaacctttgcacaaaactgcaggaacattgaagtactgaatctaaatgggtgtacaaagacaacagacgctacatgtactagccttagcaagttctgttccaaactcaggcaccttgacttggcttcctgtacatcaataacaaacatgtctctaaaagctctgagtgagggatgtccactgttggagcagttgaacatttcctggtgtgaccaagtaaccaaggatggcattcaagcactagtgaggggctgtgggggtctcaaggccttattcttaaaaggctgcacgcagctagaagatgaagctctcaagtacataggtgcacactgccctgaactggtgactttgaacttgcagacttgcttgcaaatcacagatgaaggtctcattactatatgcagagggtgccataagttacaatccctttgtgcctctggctgctccaacatcacagatgccatcctgaatgctctaggtcagaactgcccacggcttagaatattggaagtggcaagatgttctcaattaacagatgtgggctttaccactctagccaggaattgccatgaacttgaaaggatggacctggaagagtgtgttcagataacagatagcacattaatccaactttctatacactgtcctcgacttcaagtattgagtctgtctcactgtgagctgatcacagatgatggaattcgtcacctggggaatggggcctgcgcccatgaccagctggaggtgattgagctggacaactgcccactaatcacagatgcatccctggagcacttgaagagctgtcatagccttgagcggatagaactctatgactgccagcaaatcacacgggctggaatcaagagactcaggacccatttacccaatattaaagtctacgcctacttctcacctgtcactccacccccatcagtagggggcagcagacagcgcttctgcagatgctgcatcatcctatgacaatggaggtggtcaaccttggcgaactgagtatttaatgacacttctagagctaccgtggagtctctccagtggaagcaaccccagtgttctgagcaagggttacaaagtgagggagggcagtgtccagatccccagagccacacatacatacacatacacacccttacccccatccactctagctttgtgaccatgggactgaagtttgtgatggcttttttatcaagtagattggtaaaatttaaccattcctgttgaggtgcccataagaaaatcataggccaagatagggaggggcattccagcaaaccccgtgttaatgctactgtggtttttaaatttttgtctaggggtttctttggggattttagaacagcatctgctgtcctccggggtcaagaaaagcatggaaagacaatatatgatgtacccagggaccagaaagaaaatttctttgcatcttagaaatggtagacattcattgtgactaaagagcttctatgcttccttgtttccatgccaacatgctgagcatgctcacaaagaaggctcgtccattcctcctgtgttttagtatttggcccagaggtttcctaaatggttgccttgaaatcactgtggtccaaatgtaattcttacacactcaaattatcactgtctgtagcacacttgtgcacctgtcttacattctctgttgctcccccccacactcttgctcagtctgtcacctgttcagtctgcttactcactcaattgttacccttttgctgttgtcgtgtttacagtttgcattttgaatgattagttgggattaccaaacattttttaaaaagatattatcaataaatatttttttaattct

SEQ ID NO: 1264 - DNA, 2352 bp, Homo sapiens
gctgggcaacaccagcgagactgcttcagaaaaaaaaaaaaaaaaaaaaaaagtggaggggaggctcataggccgcctcccaggctgggcagggatgagttaaccgacatccagtaggatgggggacacgggggcctctctcttctgccccacccctcatgcctgggccccagggactccctccagccttcctgccaagttcctagacagccccagagcctggctgggctgtgatgggggcgaccgaggcagctggaggggcagctgtaagcagagcccgtaaccagacctggacggccctggggcccggctgccgggaccaggttactcgatcccccgagggatgctggccccggagccagaatcctggggcggcccggacgatagggagctccttgtatggaactggagacagacatcccgccctcgtcccttgtgctgtggcagatggagaaacggaggcttcaagcctgcctgggatcactgtcatcttggaacagagaggcccagagagggcgtgtagctggcctaaggtcacacagtaaggtcatttaacctaaagtgaatgcctgtgtgccaggccctgagctagtgtctttattttatggacaacagcaaaaaaaaagatgcgggcagggcacggtggctcatgcctgtactcccagcagtttgggaggccgaggtggcaggatcacttgaggccaagagttcaagaccagcctgggcaacatagcgaaaccccgtctctacaaaaagtacaaaaatgagctgggcatggtgatgcacacctatgatcccagcttactggggaggctgagacaggaggattgcttaaacctgggaggttgagactgcagtgagctatgacggcaccactgtactcagcctgggcaacagagcaagaccctgtccttagaaacaaacaagaaatgaggctgagtgtcgtgtctgagtgaaggggagagccccaggagtcctttctgtgctgtgccagcctccccatccaccttgaccttctgtctcttcctctagtggtctcagtctccacgctttttcctctgcagttccttccccttggagcaccttccccaccttgtcacgaggtctccccttcgaccttcaggcctcagctcaaatgtcccctcctctaatcattcctcatgtttttatggtcgtgcttattattgtcagaagctatcgagttccgatattggttaacgtgtgtagtgtacccccgtctccccacgggactgggagccccataagggtagggctttgtagctgtctcggtcacagctgtgtccccatgcctgaacacatgtgtctggtatacagctggtgccaaataattattaatccaatgagtaagtaagtgacttccaatttggggtacagggcgccagagctggatgcagttgcttccaagttggcggttgagcgaagatgagggcagggtagttgtggctgggggaacccagggaaactgaggcccagccagggcagtcagagaaggcttcctggagtcggggacacgcatgcatggccttgactggtaagcaggagtcagctgtagggcttggaggacagagcgtgaggttactatgtctggctggttgggagggcagctggaccttgaggaggctaaaaaggttccccagcagaggggacagcctgagccaaggtctgcagggaggggctggaaatgcctgatagtaggtgagggcaagaagaagcttcaagttattcccagggtgggaggtgtccttgaacactgaggtataaaaaaaattggttctaggccgggcgcggtggctcaggcctgtaatcccagcactttgggaggccgaggcaggcggatcacgaggtcaggagatcgagaccatggtgaaaccccgtctctactaaaaatgcaaaaaattagctgggcgcgatggcgggcgcctgtggtcccagctactcgggaggctgaggcaggagattggcgtgaacccagaaggcggagcttgcagtgagccaagatcgtgccactgcactccagcctgggcgacagagtgagactccatctcaaaacaaacaaacaaacaaaattggttcttcttctgtggggcgctggggagccatggtaggcctttgagcaggggagtggcagggtcagagctgagcttgggatatgcagtaaagggatggcttggtggtggtgccggggtcagagaggagagtgggcattgcccttgaaggacagctcaatacccaggctaggaattacccctgggacagagccagggaccaagccagcttctggaagtaagaaggattcaaggtagattgaaagtaaaacttccctgctcaggc

SEQ ID NO: 1265 - DNA, 2320 bp, Homo sapiens
agagccgccgccattttgcgggaagaggaggcgctgtacctgcagtgctgcttttcttgcctagactctaggaactatccgagctccactccccacaacatactcaaaggaacggagagaaccgggacccccctgcggggacccggaactgatctgacaggatggcatctgatgactttgacatagtgattgaggccatgctggaagctccctataaaaaagaagaggatgagcaacaaaggaaagaagttaaaaaggattatcctagcaataccaccagcagcaccagcaacagtggcaatgagaccagtggaagcagcaccatcggggagacaagcaagaagaagaggagtcggagccataataaaagcagggatagaaagcgcagtcgtagtcgagatcgggatcggtatagacggagaaatagtcggagccgaagtccaggtcggcagtgtcgtcaccgtagccgtagctgggatcgtcgacatggtagtgagtcgcgaagtcgggaccatcgtcgtgaggatcgtgtgcattacaggagtcctccacttgccactggttatagatatggacacagtaagagtcctcatttcagagagaagagcccagtcagggagccagttgataatctgagtcctgaggagcgtgatgcccgcacagttttctgtatgcagttagctgcccgaattcggcctcgagatctggaggactttttctctgctgtaggcaaggttcgcgatgtatgtatcatttcagatcggaactcacgtcgttctaagggcattgcctacgtggaattctgtgaaatccagtctgtgccactggccattgggctgactgggcagcggttgctgggagtgcctatcattgtacaggcttcacaggcagagaaaaaccgactggcagccatggccaacgacctgcaaaagggcaatggtggaccaatgcgcctctatgtgggttccctgcacttcaatatcactgaagacatgctccggggcatctttgagccctttggtaaaattgataatattgtcctgatgaaggactcagatacaggccgctctaaaggttatggtttcatcacgcttcatcctcctcctttaggaactgtctaaatgacccataaaccctggtgcctgaagcttggactagccttctaccccttgagatgagtgcattgcttgagatcttggctttgctcctacactctgtcagtggccctggtatgggggtgttcaggagttcacccagcttccctggtgctgcaacttggctctttgggtaatagtaaccaggctgcagctaaaaggttgggggtgtgagggaggttaggtatgggcttttaaagacatgctttatagaattgatgtttctcataacagggatgggaataggaaattatacttccctctggtgctaccccatttgaagcaatttctgcaccgagaaggatcagttattaacgtagcactatggggagaatagtgaggccacctaattatgggcaagcttcaccttttcctgacattccaacaaaatggttgccaattcctataactggttcttccagctccatgtgactccaggctgagaactggctgccagccacaaagtctgatagaagcttgtattttctgggcttaaaccaggcagcatacactcccacagtgacccacagggcagagggcagtaggttgtattctgtcattggaattgctcacctcaaaaatatccagtaaaggcaagccatgtataacacctgcctaggaactgtcagtaccacatgccaggccctaaggcaggtaatgctgctagctagctaaacaagctagctgtggtgttgacaattctgtggtggcaagtaacttttgtaaccttttctcgctctctgtgtgactgagatatggaaaggcttctgtggggcatttttgcccttgcattgttgccttttgggtcaacaaccttgacacttaaacaaacagcagactgggaatcctctttgtaccagtgtgttgctgggtgctgctgataaaagggactagagagtaaaggccctctggtcagcaggtcacttagtcaacagctcttgtgtgtatgtgggggtgtgggttctgccttgctgtcagcactagggtgtgttccctcttaagcctggaattaggagttccagattcctagtacttaactaaaatttggccaggcgcggtggctcacacctgtaatcccagcagtttgggaggccaaggtgggtgaatcgcctgaggtcaggagttcgagaccagcctgaccaacgtggtgaaaccccatctctact

SEQ ID NO: 1266 - DNA, 2025 bp, Homo sapiens
ctcattttctcttgccaccgccatggaagaagagtctttcacttcccgccatgagtctgaggcctccccagccatgtgaaactctttggcttctcgattggttctgaactcccaggaaggtgaaaaagcagcgtcattacttagcaccggaagccccggcactcaacagggatactgtgcagtcctgcatgtgagcagctcaagagttcttttcaagtgagacctgctgctaggagagaagtaagctgacagcacccagcaaccacactgttgagaacccctgtggcatcatgttcctgctgaggccggccactttcttgccaaactacttgcagccagtgactgagcatgggaaagcgagaccctagagcccagctattcctgcccagtgcaggactcctccagacttccagactgcactgcagactgaggcacttcctagctgagcctccttcttttcttctctcctttcagctgctcctgctccattgcccatttctctcacctttatcctgcacttctgcttccatcttggcatcttcttccctcaagacccaacctgacaccatcagtattattacactcttcatttcccagtggaggaggtggggatccaggcaagaaagacaaagcgtaaatatgctccctttaaaattttgtactgctctatcgcttctgggcctttgggctaagatcaagtgtaaaagtttgtactactcttaggtttgaggttcacatgaaaagaacatctcatcaacatttcaaaagaaaatttgaatgaattgtatgttgtactagtgtgtaaaagagagaccgtgtcatttattcataaaactgagtccagtgggacctgcccattcaatgcaaaaatgcaaaggtatgtaggatcttagaaaatgaaagacaatgctaaagacaggaaccatttccagcatctgttgttgaggtccgaatctggaaagactcagaatgtatttatcagaaaaacaatttccccagtaagacaatagctgcaaagctggtcatcacatgcaaatcttgaccttcacttttgcacaattttggaacatgtaactggtaagcactacctacaattttttgctttgcagacatggaaaatacaacatactgacaaaatggacttttaaaatttgggttttaccttaacaaaataaacttgagtctgattcttcatcttcaaacatattagaaagggataaaagaatttctctgtgatattttaacccttaggaatatctgaacatgagtgtgtttgtacacataatttaaaaattaaatatgtttcttttcatggcataattttctaaaggaaggagggacaggacttaccctcgctagagtctttcgaacattctggcttctttgctttgctctttttgtagggtggagagaggccttttggctctaacccctctggaatcacgaagatttaatattctcatttaaatatttaccagtagggttcaaaattatgtgaaatttaaaaatgtttacttcttagtaaacctacacacacgctgaatcttaattgcagtttcatctgtcatcatggctgagcgaaattctggcaagggcttgtggttctccaacctacatagacttaaacttaaggcttaagctaaaacatttttgtagataacattagtgattcacacaaatgtaaaatcttacacatgtgcttttataaatttagaaattctccataagggaaccctgttaatattttttcctccaagagtgttcgatttcaatcttcatagattaattgacaattgtcattgtgcaatttcatcttactcagtcctgaacgcagggctagaggaatggagaaaggaatggggctagaaattaccctgcttctatttaacaaactgtttttagtaatccagattctaaacaacttctgtatgtcccagttaaattactgtgcttcctattttcctcaatgtccctctaagtctatccttgggggcaaataaattaaagtctgaggacagtgtcagg

SEQ ID NO: 1267 - DNA, 3030 bp, Homo sapiens
ttttgccttccagcttggctctggctcccttcctccagcaagggtgggttgagctctcacatggcaccactttgacctcttctgcttccctcttctacactgaaagacttatgggccaggagcagtggctcgcacctgcgatcccagcactttgggaggccgaggagggcggatcgcttggccccaggagttcgagaccgtcctgggcaacgtggcgaaaccccatctagaaagaaaagaagagaaggggaggggggaggggaggaggagttacatatatacacatacacacacacacacacgtacgtacatacatacatacacgctagctggacgtggtggtgcgtgcctgtggtcttagctttccaggagactgaggtgggaggaccacttgagcctgagatcgcgccagcctgggtgacagtcagaccatgtctcaaaaaaaaaaaaaaagatttgtgattaggattcttagtcctcacctgtattattttcctattgctactgtaacaaattaccacaaatttactggcttaaaacgacgcaagtctgtaggtcagaagtctgacacgggtcttaactggtgacccgagtcagatttgggacacaaagaacagaaaccaagctgtgcaggtttctgacaggcagtccggttggggagccctacagcaacccgccggtcctctctctcaggcagttgctgccatggctcattattccaaccggttctcctcagcccagtctatctcagtggctccattcatagggtgatgtgcccggcgggacactaaccctaaccaagcagagagacggtcatgcccgtcacgacctcggccctcgccccggccgaggcttctcctgcaggtcgcgagaatcaggtgcgtcagcggcgtccgggaacgccggaagagccagtggagcggctctgtagtccaaagtaccccgtcgaccccagcacggccgctccaccgcctcctactagacccagtcctagggactgcgcagtcgcagagctccgtccgagtaccggaagcctaggccgccagcacttccgggaagtgacttcgtctccgaagccgattggttgttgctttgctcccgctcgcgtcggtggcgtttttcctgcagcgcgtgcgtgctgcgctactgagcagcgccatggaggactctgaagcactgggcttcgaacacatgggcctcgatccccggctccttcaggctgtcaccgatctgggctggtcgcgacctacgctgatccaggagaaggccatcccactggccctagaagggaaggacctcctggctcgggcccgcacgggctccgggaagacggccgcttatgctattccgatgctgcagctgttgctccataggaaggcgacaggtccggtggtagaacaggcagtgagaggccttgttcttgttcctaccaaggagctggcacggcaagcacagtccatgattcagcagctggctacctactgtgctcgggatgtccgagtggccaatgtctcagctgctgaagactcagtctctcagagagctgtgctgatggagaagccagatgtggtagtagggaccccatctcgcatattaagccacttgcagcaagacagcctgaaacttcgtgactccctggagcttttggtggtggacgaagctgaccttcttttttcctttggctttgaagaagagctcaagagtctcctctgtcacttgccccggatttaccaggcttttctcatgtcagctacttttaacgaggacgtacaagcactcaaggagctgatattacataacccggttacccttaagttacaggagtcccagctgcctgggccagaccagttacagcagtttcaggtggtctgtgagactgaggaagacaaattcctcctgctgtatgccctgctcaagctgtcattgattcggggcaagtctctgctctttgtcaacactctagaacggagttaccggctacgcctgttcttggaacagttcagcatccccacctgtgtgctcaatggagagcttccactgcgctccaggtgccacatcatctcacagttcaaccaaggcttctacgactgtgtcatagcaactgatgctgaagtcctgggggccccagtcaagggcaagcgtcggggccgagggcccaaaggggacaaggcctctgatccggaagcaggtgtggcccggggcatagacttccaccatgtgtctgctgtgctcaactttgatcttcccccaacccctgaggcctacatccatcgagctggcaggtagtagtgtgacggcccaggcatctgcatggacagcatgcgctaacaacccaggcatagtcttaacctttgtgcttcccacggagcagttccacttaggcaagattgaggagcttctcagtggagagaacaggggccccattctgctcccctaccagttccggatggaggagatcgagggcttccgctatcgctgcagggatgccatgcgctcagtgactaagcaggccattcgggaggcaagattgaaggagatcaaggaagagcttctgcattctgagaagcttaagacatactttgaagacaaccctagggacctccagctgctgcggcatgacctacctttgcaccccgcagtggtgaagccccacctgggccatgttcctgactacctggttcctcctgctctccgtggcctggtgcgccctcacaagaagcggaagaagctgtcttcctcttgtaggaaggccaagagagcaaagtcccagaacccactgcgcagcttcaagcacaaaggaaagaaattcagacccacagccaagccctcctgaggttgttgggcctctctggagctgagcacattgtggagcacaggcttacacccttcgtggacaggcgaggctctggtgcttactgcacagcctgaacagacagttctggggccggcagtgctgggccctttagctccttggcacttccaagctggcatcttgccccttgacaacagaataaaaattttagctgcccc

SEQ ID NO: 1268 - DNA, 2889 bp, Homo sapiens
aaagcagccgtgccgtgtcccagggcgggaattgtgcggggacgggctccacggaggaatcttctcttccttcccttgatgttgccagaggactcaggaggctctccagatgctgcagcgagtgacaagcacatccaatggctcctaggggcagatggcgaggtctgggtctggatcatgggagaaggccctggtgacaagccctacgaagagatctctgaggagctgattgcagagagggcgcggctgcaggcacagagggaagctgaggagctctggagacagaaggaggcagagatcaccaagaagttccgggatgctctggccaatgagaaagcccggatcttggcggagaagtggaaagtggagatggaagaccgcaaggctgccaaagtcctggaggaacgcatccacgaggaattcaagaggaaagaggaagaggagaggaagcgaggagaagagcagattcgcctccaggaagagcagagggcgaaggagctctactggaccctgaagcaggctcagctgcattgccaagccagtgagaaagaggagcgagagtgggaagaacaattgcgccggtccaaggcggctgatgaggagaggagccgccgagcccagcgcgcccgggacgagtaccgacatcactcgctccgtgctatccagaagggcacggtcgctggcctcagctccatgttccgggagcttggccagagccatgagcaggaggcaagactctaccaccacctccccgacccgggtctgccgcagccccttgccctgccggtcagcaggacctgggagcgcccgctgcgcccagtctccagagatgtcatcgtccgctggtttaaggaggagcagctgcctcgccgagctggcttcgagaggaacaccaagttcatcgcgccctggttccatggaggaaattatcactgtttcaggaggagagttacttcaggaaccctgcggacagagggacagcccaccagactaccatctgttgtttgaataatttttttccttatcaattggattcattttggtatcctgtttttgaactcagcttaagaacttctcatctcaaatcctatggccttctggaagatccaccactatccaaaggaaaaagtagattaatatgcctcaagggatatgacatctatggcatagggctactggtctcatcccagcgatcgggacagaaattgctaatagctcatgcaactctttcatgaagagcttagctatgaccttagaagacaaagcctgtttgtcatggctgccgtaaaccgagctcttacagtgcgtggaccatgttttaataatccaaaataattccagtgccgaaccctgaatttaacatatggtagacattcagtaaatgtttgttgaatgaatgcatgtcttctaaaagttttccaacacaaattagcagtggtttcttgtaaattatttcctactcgccactctataaaatcatggcaataatagaagattatgaaggatttctatggaggacataaatgctgcatctttcataatctccattatcaccctcattgatattatcattggaattatctaaggtgagccccagtttccagggcagctgattgacaccgtcctgccttccttatttaacctcttcttttgccactcgcctctatctttgaatcatattttggccttggttttgcaatggttttatgtcatcctacagatgtcttcaagacctggggtgagttatcaatgcaagaatggttcttagaaatctgatgaggcctctgctctctgggatgtggccctctctatgcaggttactccaatgattagctctgtcctcattgtccttttaattcccttgtcaacttaatctcagtatgttgcttatattaacaagaagactcacgcaataactcctcgataactctcagtgatggtatctgttggtgcatacttgtgttccacagttatggccatatacacagaggtagtatatgatgaagagaagattacagtctttacagtcaagaagacttgggttcatatcctaaccctggaacttactagcattataatgcttgcagcattgtgtttggtgagaggaaaagaatgaatggattctaggaatgttagggaacgatttactttacccgatggctgtatcaaacatctatgccccacttcttctcttgcctcacctattccttagattcttggtcacttctctaccacaagccaccagcactataaccagttttgcgtgggttctgctcttcctccctatgttgatcagtgtcatgtgagcataagccaatggtagcttgccacatgccccatctcccattgctgcagaggcataagacagaagagatgggaagtgaatgcccgatgtggtgaatctgggatgaatgggagtcataggctggtagatcgctttttcctccttcttcctcctggaggaactattctgagagtcatctgtttgtatggtcttgtagaagacagtcctgtaagatcgagcaaccagtcatgatgaaaccaagtggtggccggatcagtatgacaccctgctgcccccgtttttaattcttctctgccttgccctgctctctcctgttgctctgggattgcacttctgaatgaagtagcagctcataagcttttgccacaggctctgtcttttggggaatccaggataagaacccattatacagaagtgttcaataatatcaattttgcaactcactcagctccatggcttcccccggtctacctgtctcactacatgcataaagtgaaatgatggaaggaatctgctttctgaactctaatgtgccttcattgattatcattaaaattatcattaaaattgccttatttctatgg

SEQ ID NO: 1269 - DNA, 2467 bp, Homo sapiens
tgttttcttagaatttctccccatcactcctccatctcttccctcctccagtctgaacttctaactcaaggtaatgttggcatagccaatattaaggaaaatgtaatggtaaatatataaaatgatctaaggatttcattcttttacctttctgtccccaccctgcttgcccccattgtatggtgctgatactctgcctttctttcttctccttaacttaagctgtcactggccatcacttcaggaagcttaccttgtaggggctgtttatatttccgtttaatcttctcattgcttattgtctatccaggagatataaatgcagagatccctcaactctgattaaatctaaagtacccttaaaagtacttaaagtacttaagaagtggtacttaagataggttttagccaaataaaaggttgaatttacttaaatgtttcagggtttttttttgtttttgtctttcattaatgagggtatatgctatttggaaatttgaagaaaaaaactacaggtgatgctgactgtcagcaagccagctgcttttccagcactgggagatttgtgctcttcctatcacatgctttcatttgggttctcttgtgaacccacagcatatttttgcaaaggtctgacttatattctaacattttgaatttctctgtatggttaaagaacttagcaaaagctatgtttttcagtttggttgctacattagccacagggtacagaaagggtcagggtaagtaaaataatccaaaactctgtatagtcaagcagctttccagtaatgtttcagagcagttacggggacttagacttcctctattcctgccttaccccttactctgtggtagagattctaatgaatagataaaagaacattgcagcaaaaaccaaaataatgcagaccagctagtcagtgcacataatagtgttgactgtttgaggacagttcttttcctttttgctcctaagctcctgtcatatcttcatctttatcaccaggactccctgggagttgcttgctgaccctcctgttcagagcactgcatagcaaaggtagtgggtaaccatgcaagcttctttgctgctgtcctgtcttcctctcagtagtctgtctactgtaatagttcctccctttttacaggtgaatgacctggatgggtataaccgaacagccctccactatgcagcagagaaagatgaggcttgtgtggaggtcctattggagtatggtgcaaaccccaatgctttggatggcaacagagataccccacttcactgggcagcctttaagaacaatgctgagtgtgtgcgggctctcctagagagcggggcctctgtcaatgccctggattacaacaatgatacaccgctcagctgggctgccatgaagggaaatcttgagagtgtcagcatccttctggattatggcgcagaggtcagagtcatcaacctaataggccagacacccatctcccgcctggtggctctgctagtcaggggacttggaacagagaaagaggactcttgctttgagctcctccacagagctgttggacactttgaattgaggaaaaatggcaccatgccacgagaggtggccagagacccgcagctatgtgaaaaactgactgttctgtgctcagctccaggaactctaaaaacactcgctcgctatgccgtgcgccgtagcctgggactccagtatctccccgatgcagtgaagggccttccactgccagcttctttgaaggaatacctgttacttttagaatagccggagaagatgtttgcaccatcgtgcaggcagctctgggtgaggttgtccctgcagtactccttgtcacagaaaacagaaaaacagttgttcctgttgtgtggtttatagatttcgaagcaacatgtcacaacaataacctccatagcacctccccttcccaaaccaaacaacccaacaaaaaaaatccctcacttttgttttctgtttattgcttacctggctttttatattgcattttgcaaaagaagaggtctccctcaatcctcccctttagggaaggagtcaacagtgtaactaaatttctctaggaagatggaaagtacttaaataatgtgtgtgtggttttcctttggggacgtggttaacggtccagaagaatcccttctagaaagcattttaggccagccatggtggctcacgtctgtaatcccaggactttgggaggctgaggcaggtggatcacctgaggtcaggagttcgagcccagcctgaccaatatgatgaaaccccgtctctactaaaaatacaaaaattagctgggcatggtggcatgcgcctgtaatcccagctactcaggaggctgagacagaagaatcgcttgaacctgtgaggcagaggttgcagtgagccaagatcgcgccattgcactccagcctggacaacaagagcaaaactgtctc

SEQ ID NO: 1270 - DNA, 3107 bp, Homo sapiens
gaaccagacggaagcgcgctgggactgacacgtggacttgggcggtgctgcccgggtgggtcagcctgggctgggaggcagccccgggacacagctgtgcccacgccgtctgagcaccccaagcccgatgcagccacccccagacgaggcccgcagggacatggccggggacacccagtggtccaggtggaaccaccctgtgtatgcatgaccctgacaagcaggcgccaggacagtcaggaggccaggcccgagtgccaggcatggacggggacgctgctgctgggcacgtgccttctgtactgcgcccgctccagcatgcccatctgcaccgtctccatgagccaggacttcggctggaacaagaaggaggccggcatcgtgctcagcagcttcttctggggctactgcctgacacaggttgtgggcggccacctcggggatcggattgggggtgagaaggtcatcctgctgtcagcctctgcctggggctccatcacggccgtcaccccactgctcgcccacctgagcagtgcccacctggccttcatgaccttctcacgcatcctcatgggcttgctccagggggtttacttccctgccctgaccagcctgctgtcgcagaaggtgcgggagagtgagcgagccttcacctacagcatcgtgggcgccggctcccagtttgggacgctgctgaccggggcggtgggctccctgctcctggaatggtacggctggcagagcatcttctatttctccggcggcctcaccttgctttgggtgtggtacgtgtacaggtacctgctgagtgaaaaaggtaacgcaggccgggcgggctagtcccgggcgcccacagctgcccagtgcctcctcccctggtggcagccgctgagcagcctggagcaggagcccggagacgatggctttgacctcccaaagaatccgccagtgaggaaaagcgctcgggtgctgagctgtcagcggctccgccacccaattcgatctggaaggttccatctagggctaaggcagacacccaggaagacctgctgggcacaggtcagggcagggtgcaggagcagccgagtctttgggtggccagggggctctggaggaggccgtgtggagggtcgttcagaacgcagttctcaaaggtgatgctgcctgttaggtgtctggtaggggaggccaagggaggctggcgcccatgtgcaacctgaggcatggacgaggcctgctgacccctctggaaccacccccaaatccccaatcctttggcaacgggtggcgcctcccgccctgatagccatcagtttgaaaccgttgctccctcagatctcatcctggccttgggtgtcctggcccaaagccggccggtgtccaggcacagcagagtcccctggagacggctcttccggaagcctgctgtctgggcagccgtcgtctcccagctctctgcagcctgctccttcttcatcctcctctcctggctgcccaccttcttcgaggagaccttccccgacgccaagggctggatcttcaacgtggttccttggttggtggcgattccggccagtctattcagcgggtttctctctgatcatctcatcaatcagggttacagagccatcacggtgcggaagctcatgcagggcatgggccttggcctctccagcgtctttgctctgtgcctgggccacacctccagcttctgtgagtctgtggtctttgcatcagcctccatcggcctccagaccttcaaccacagtggcatttctgttaacatccaggacttggccccgtcctgcgccggctttctgtttggtgtggccaacacagccggggccttggcaggtgtcgtgggtgtgtgtctaggcggctacttgatggagaccacgggctcctggacttgcctgttcaaccttgtggccatcatcagcaacctggggctgtgcaccttcctggtgtttggacaggctcagagggtggacctgagctctacccatgaggacctctagctcccaaccccacagcctctccaaggacccaggcgccagcagccccgggacacaggggactcagtgtgtgggacttggtcactccatgtcagacacacgagcagagaggaacacaaaccactgtggagcctgaagctccttaagaagagtccacaacagctggtgggagggtggggtgggcctgggtccagaccaggctcgctgctctctgggcctcagtttccccacctgccagcgggctcggccctgtcctcctcacaggctggtgtggccgtcagggtgggtggggttattgttagtaggcgcagcctcattcccaccacgatctgttccgcgtggttcccgccaaacctccctcggtcgccgtgttctccgcaagcctcctgcagcgcccgcctgccaatgtgaggctggcaccaggctgcagcctccccaatcccagcccactttgctgtgtctctggcgggctgtcctccttggtgggagctgtcctgcacactgtaggatgcttaaaggtatccctggcctccacccatccctagccagcagctcccagtcagacaacagccagaaatgtctccagactctgcccagcctccccaggtagccaccctcgagacatgacctcagagtctctgtgtctcctagaagcctgacagagacccccagggcagtgggtgggtggcgggctagagacccttgcctgtgtccgggaccctggcgccgctctcccctcctgtggatccctccgcactaacagtgttctcagtgggcagacgcctgggcaccccttgggccctgcccagcatggccatggcgcaggctctcgaacccgcatggctttcccaggcctggtgattctgctctccagggacggttggcaccttcctcgggggcgggccccacgcaccccagaacacacagacccacctttctggcgttctttctacctcccttttcgttgcctgaggagctggtggtttcatgagttaatgatacatcttgcaaggtgtacacatagagaaaaaaacctaaaaatgtggaaaagcacgccaaagccttatttaaataataactattaaactattc

SEQ ID NO: 1271 - DNA, 2535 bp, Homo sapiens
agtaattcaaaactttgagatataaatataattctttaaaaactgcagcgtggttcactggccctgtgatgggctgaatgcgcccccaagttcatgtggcagccttgacccccaggacctcagcgtgtggcgtcttggagacaggggctttacagaggcgatgaaggtaaaacaagctcttatggtgaccctgacccagcaggaccggtatccttatcagaaagggatatctggacacagagacagacgtgcacgtgtggagacacctgaagatgaagatggcatctaccaggcgggggagtggcctcaggagaaacgggctctgcccacgcctcgacctcggacttccagcctccagagccgtgtgaaaagaaacttccatcatttaagctgccctgtctgtgggactttgcctcggcagcctgagcagacagtacaggctccaaaaacgctctctgcatgtgtgattctggccaggaccaccctgcccgaagccacggctatgtcgaagctaattgtgcgatttctgccggccacgtggttttgatccaaaagcatttgaaagctgctctgaagatgcagaaaagctgagtcccggcatcgctgctccttccaagcgactgttcacacacagggtgtgagtgcgtccccccatccagggtccagcctggcctaaggctcactgggcaccatccagatctgtgactgggtccccccatccagggtccagcccacccgaggttcactgggcaccatccagaggccccagatgccgacacctggggacgggctgtatcaggcagatgtttcctcccgggctccacctggggacgggccccggatgctgacacctggggatgggctgtattaggcagatgttcctcccgggctctagttttccaggccgacaggaggaagtcctgttggggccaggggaggcattggggatgagattgagaggatggtggggtcgcaaaggtttacattgcctgtgccactttctccaaggtctggggccgccaccctgtggtgcctctggaagctgccatgtggggctggcccacggtgactggccacggcggggctgtgtgtggtatgcacctgtgagctgctgaaacgcagcctggcggccaggaaccagctgccccatcctctctgcaggaggtcaggtttgagcacgtattccctcaaacgctcatagacgtcagtatctcaggacaaagtgcttgtctgagacccaggtttgggccccaaggtggtaccatcgagggaggcatgttctggcaggtgacagcccctcctctgtgcctgaacctgcagtttctgcccccgcataaaatgccgccatctcaggccctccctgacccccaacctgcacaagggctcacagctggcaggcacctgtgtggggtcgtggtaggacctgtgtctctgaggtccagcccaaggctgtgccacataggcccaaatccaagcactcccctcctgggcacgtggctgtgtgtgcatgtgtggctgggtgggcaggggggttgactctggccaccgaaatggagaggagcggtgcactccctgggtctggcccacgcaggctccttcccaagtgctgctgccgggaaatggaggtccctaggtgagacgggagccgggcactgtgggggtggcccctgaggggctgcaggttggcactgcccagctgacgcattccgcagtcctgcaccaggggatgaacgaggaatcggcttctgctctgctgaacatcccactggttcatgtccacttgtttgggtgatcctaactgatctgctacctgagtttgaatctcagcgctattattagtcaggggtcctggaggtgggtgaccccacctcacctaaaccacagagatgctcatcctcatgcatgcacacgtccatctcagcttcagctcgcaagcaggaccctcaccgtggggccacgacggaccctgcaaagctggtctgactgtgccgagcctgtcgggggttgggggaaggaaggcgggagctcggcatctggagggcagtggagaccctcagcgagtgccaggaggatctgctgtcttcccagtgttgtcttcacagtggagagatgagttcacacagccttatctgtgtttccagtggcctctgtgtgcaagacgggccacgggttttgtgcggtatttgcctgtgggtcacagccaggtgaatgggccctcctggggctgcagccccaggtcctgatgttacttgtgccagcctggccacagtgcccggcctccagaagctgctgtcagaggagcagacgggagggcagggtggacggttaacagggtcaaggccccagagccccacaccctccccagcagccagcacaccctctgttctgtgacctcgcccctgcattgcggcaactgacagatgctccccggcctccttccccgctgccgcgcaacctctgacagccacgtgtactctcctgctttagaacaaggacctttcccttttgtgcatgaatacgctctcagcagatgcg

SEQ ID NO: 1272 - DNA, 2831 bp, Homo sapiens
ctccctgttccaggaataacatgagtgccgggacaatgcatctttattatgagaggaatgagaattgtgtagcttgacatttgacaggagcttgctttcccccaggctgtttgaggaagggcagaggaaagtgtggtgccctaagaaggaaggacagaggaggccgaacactggcgggtggaatcccactgattagtagtgcaggtcagagacctgggatggggggcattgccgtcatggaagccacagcggggagcgggtaaagcagacagggatggtccctgatggtgacaactcgcaagaggttaaggggaaagaaaaactgaaaagcttattcaatttggcaattatggcagtgtttatcttcagaagagcagttttagggtggggtttccaaagatgggattggacatatattttgaatcattaagcttgaggtctttcaaaggcctggccaagggttgctgggtggagaccacattcagaggtaaaggcagaaattgggggcccttaagtagacagcgagggaggaagaaatgaaggggcctggtgatggttagggtgaaatgttaagactgagaaaacaaggacatgtgagaagacgagggaagagcattggagagaacaaagacactggaggagatgctacttggaggtccccagagagcagggagacaaatgaacccagaacacaaatggcaaagaagaaaaatgagagaatttgtaaaagacagcattcgaacatgccgaacaagagcagggtactggtgttcaaacacctgtatctcccccgtgtaacccgtcaactaatatctttccatatttgctccagatttgtctttagaaataaaacccacgttctgaagtcctgtttgtatgtggccccagtcctgttgcctccgcctcctgtcctgaagtcgatttctgcccttctcatctatggttagttttgttttgtatgttggcatgttttcttaactttacagaaatggtatcatactgtacatatttgataattttttaaaatattgcattctggaggcatgtataaatgtagctccagttcatttattttatttattttttgagatggagttttgctcttgtcacccaggctagagtgcaatggcgtgatgttggctcactgcaacctctgcctcctgggttcaagcaattctcctgtctcaatttcctgagtagctgggattacagttgcccgccaccatgcctggctagttttgtattttagtagagacggggtttcaccacgttagccaggctggtctcaaactcctgactgcaggtgatccacgcaccttggcctccaaaagtgctgggattacaggcgtgagccaccgtgcccagcccagttattttaactattgtatagtgttccattgtatgagttctactgtttatatgctattgatcgacctgtaggggttttgcagtgtttctgtattacagctgtgctgcagtgagcatcccatcacattgtgtggatttgaggaagtattggaattcccccaattgactggacattcccaattaccctccaagtatgtgtctgtttatccttccatccgcaatctgagagttccccaactctataatacttggtgtcatcagacttttcatcttgtctgattggatgggtgtcatttcctttaggttttataattatcttttcatatgtgtattggctgtacaaggttccttctctgttcattattattaatttttttagacagagtctcgcgctgtcgcccaggctggagtgcagcagcgtgatcttggctcactgcaagctccgcctcccgggttcatgccattctcctgcctcagcctcctgagtagctgggattacaggtgcctgccatcacgcccggctagtttttttgtattttgagtagagatggggtttcaccgtgttagccaggagggtctcgatctcctgacctcgtgatccacccgcctcggcctcccaaagtgctgggattacaggtgtgagtcactgcgcccagcccaagtttccttctctgttacttgttcatatcctctgcccatttttcacttggattttttgtcttacggatatttaagcctcttaaaatatatattctggagagatgctaatctttgattaattatatgcattgcaaatgtctggtacattgtggcttgcctctcttccctgcctttaggagtgttttgctggacccaagtaatttttaaatgttaatgttattaaatctatcagttttttgcttgtatggcttatgccattgaatcttgttttaagagatccttccctaccctcaaggttttctaaatttttattttcataacaagatttttagttcatctgaaatgtatttttatgattgtatttagtagggacctaattttgtttttctttgtaaccaggtgtcccagcactgtttactgaacagtctctcctttctcgctggtctgtagaactctcctgacatataccaagtttccataagtgggtggatgggttcctgagctctctactgttaatagaacttgctctctcgcaggccaatgcctcaccaggtgattgaagcagagaaacttaggtggtgaaaggagaagatggggcctgtcctgagagtttctgttcctgagatgctagaggcagagggtccctaaactttcctgagtcggcagacatcccctctggagaagaggttggccccagagtcgaacatcctctgatctacctgatcctgctgcccttccattccacttccccacatctgttctttctggtcgtgtttactcccctattaaaaaaacaaaaccag

SEQ ID NO: 1273 - DNA, 1772 bp, Homo sapiens
aactctgggagaggagccccagccttggggttcccaagtgctttcattcagtgatcaggactgaacacagaggactcaccatggagtttgggctgagctggattttccttgttgttactttaaaaggtgtccactgtgaagtgcagctggtggagtctgggggaggcttggtgaagccgggggggtccctcagactctcctgtgtagcctctggattcactttcagtaatacttggatgacttgggtccgccaggctccagggaagggcctggagtgggttggacgtattagcactgacagtgaaggtgcgacagtagactacgcggcacccgtaaaaggcagattcaccatctcaagagatgattcaaagaagactttgtatttgcaaatgaacagcctgcaagtcgaggacacagccgtttattactgttccacaggcccgtcccgtgtaccgggaacgcaaagatactttgacttctggggccggggaacccgggtcaccgtctcctcagcttccaccaagggcccatcggtcttccccctggcgccctgctccaggagcacctctgggggcacagcggccctgggctgcctggtcaaggactacttccccgaaccggtgacggtgtcgtggaactcaggcgccctaaccagcggcgtgcacaccttcccggctgtcctacagtcctcaggactctactccctcagcagcgtggtgaccgtgccctccagcagcttgggcacccagacctacacctgcaacgtgaatcacaagcccagcaacaccaaggtggacaagagagttgagctcaaaaccccacttggtgacacaactcacacatgcccacggtgcccagagcccaaatcttgtgacacacctcccccgtgcccacggtgcccagagcccaaatcttgtgacacacctcccccatgcccacggtgcccagagcccaaatcttgtgacacacctcccccatgcccacggtgcccagcacctgaactcctgggaggaccgtcagtcttcctcttccccccaaaacccaaggatacccttatgatttcccggacccctgaggtcacgtgcgtggtggtggacgtgagccacgaagaccccgaggtccagttcaagtggtacgtggacggcgtggaggtgcataatgccaagacaaagccgcgggaggagcagttcaacagcacgttccgtgtggtcagcgtcctcaccgtcctgcaccaggactggctgaacggcaaggagtacaagtgcaaggtctccaacaaagccctcccagcccccatcgagaaaaccatctccaaaaccaaaggacagccccgagaaccacaggtgtacaccctgcccccatcccgggaggagatgaccaagaaccaggtcagcctgacctgcctggtcaaaggcttctaccccagcgacatcgccgtggagtgggagagcagcgggcagccggagaacaactacaacaccacgcctcccatgctggactccgacggctccttcttcctctacagcaagctcaccgtggacaagagcaggtggcagcaggggaacatcttctcatgctccgtgatgcatgaggctctgcacaaccgcttcacgcagaagagcctctccctgtctccgggtaaatgagtgcgacggccggcaagcccccgctccccgggctctcggggtcgcgcgaggatgcttggcacgtaccccgtgtacatacttcccgggcacccagcatggaaataaagcacccagcgctgccctggg

SEQ ID NO: 1274 - DNA, 2171 bp, Homo sapiens
agagaattccagactgagccagagtagcgaagtcccagtaaaggggcagagagtctgctacctgttgagtctgtttggcctataaataaaccccaaggggttagagctagcaaatgcctgctagttggtgaagctgagataccctcctcccagggtggtgggtaatgaggtcgtgggaggaagagaagcagcagcagctgtgagggggagtccctcttccttcatcagtccctggtctgactccagtgatcagaggaggcaggacacagaatttccaacgctcaggatccagctcatccaaatccagcccaactcagcaaagtgaccagagggttctaggaggataaactacagaagcagccttattgaggtacaattcatgtgcttgtgggtttggatggcacaatctgtgtctgggctaaggaaagcagacttggcaccaacattaaccctgacagatccaggcatctattccaggaactggaagccaagcgcaacaggtgcttggaggtcatcatgatcagcccagaccccaggccctcccctggcttggcccggtgggctgagagctatgaggccaagtgtgagcgcaggcaagagatccgtgaaagccgccgctgccgtcccaatgtgaccacttgccgccaggtggggaagacgctgaggatccaacagagagagcagctccagagagctcgactgcagcagttcttcaggaggaggaacctggagctagaggagaagggcaaagcgcagcatccccaggccagggagcaagggccctccaggcggccaggacaggtgactgtcctcaaggaacccttgtcttgtgccagaaggatttcttctcccagagagcaggtgacaggcaccagctctgaagtctttccagcccagcatcctcctccctcaggcatctgcagggatctgtctgaccacctctcctcacaggctgggggccttcctccacaggacactcccatcaagaagccacccaaacaccaccgtggtactcagacaaaggcagaaggaccaacaattaagaacgatgccagtcagcaaaccaattacggagttgcagttctggataaggaaatcatccagctttctgattacctcaaagaggccctacaaagggagctggtcctaaaacagaaaatggtgattctccaagacctactgtccactctgattcaggcctctgacagctcttggaagggacagcttaatgaagacaaactgaaggggaaactgagatccttagaaaaccagctatacacctgtacccagaaatactccccttggggcatgaaaaaagtactactggagatggaagaccagaaaaacagctatgagcagaaggccaaggagtcactgcagaaagtgctggaggagaaaatgaatgcagagcagcaactacagagcacacagcgatccctggccctggcagagcagaagtgtgaagagtggaggagccagtatgaggctctgaaggaggactggaggacccttgggacccagcacagggagctggagagccaactccacgtgcttcagtccaaactgcagggagcagatagcagggacttacagatgaaccaggccctgcgatttttggaaaatgagcaccaggaactgcaggccaagattgaatgcctgcaaggggacagagacctgtgcagcttggatacccaggacctacaagatcaactaaaaaggtcagaggcagagaaactcaccctggtgaccagagtacagcagttgcagggtttgcttcaaaatcaatccttacagcttcaagaacaggagaaactcttaacaaagaaagatcaggctttgcccgtgtggagtccaaagtccttccctaacgaagtggagcctgagggtacagggaaggagaaagactgggatctcagagaccagctgcaaaagaagactttgcagctccaggccaaggaaaaggagtgcagagaactgcattcagaattaggcaacctcagtgacgagtatctctcctgcctgcgtaagctgcagcactgtcgagaagagctgaaccagagccagcagctgcctcccagaaggcaatgtgggcgatggctcccagtgctgatggtggtgattgctgcagcactggcagtgttcctggccaataaagacaacctgatgatctg

SEQ ID NO: 1275 - DNA, 4389 bp, Homo sapiens
agctaggagggttgctccgggcttggtgctcactgcgacttcccgcgcagggcccggtcggactaggacccgcggcctgagagacgctggaggatgcggacgcggaggccgcctggggtagcggcggcgggagtcctggcgctctgcaggtcagaagttgagcagcaggggcctaggagggctcgaagccttcacagcgatggcagagaagcgacccctgagaaccctggggcctgtgatgtatggcaagctgccccgcttagagacagactccgggctcgagcacagcctgccccactctgttggtaaccaggatccctgcacctacaaggggtcctacttctcctgccccatggcgggtactcctaaggccgagtctgagcagttggcgtcctggaccccatacccacccttgtactctaccggtatggcaggacccccacttcaggcagacaacctgctgaccaactgcctgttctaccgctcgccagcagaaggccctgagaagatgcaggactccagccctgttgagctcctgcccttcagtccccaggctcactcctacccaggcccaccactggcagcacccaaacctgtctaccgcaaccctctgtgctatgggctctcaacttgtctgggggaaggagcagtgaagaggccactggatgttgactggactctggcgactgggcccctgttgccctcagctgacccaccctgctctctggccccagctcctagcaagggccagactctggatggcaccttcttgcggggggtgccagctgaggggtccagtaaagactcctcagggagcttctccccatgccagcccttcctggagaaatatcagaccatccacagcacgggcttcctggcctccaggtacacaggtccttaccctaggaactccaagcaagcaatgtctgaggggccctcaagtccttggacccagctggcccagcccctggggccaccctgtcaggacaccgggcccacccactacccaccaccccaccacccaccaccccaccctccacaggccctgccttgccctccagcctgtcgccacccagagaagcagggcagctacagcccagcactcccactgcagcctctggggggccacaaggggaccgggtaccaggctggtgggctgggcagcccctacctgaggcagcaggcagcccaggcaccttacattcccccactggggctggacgcttacccctacccctctgcccctctcccagcaccctctccaggcctcaagctggagccgcctctcactccacggtgcccattggactttgccccccagacactgagttttccttatgcccgggatgacctctctctctatggagcatcccctgggcttggagggacaccaccttcccagaacaatgtgagggctgtgccacagcccggtgccttccagagggcatgccagcctttgccagcgagccagccctgctcagagcctgtgaggcctgcacaggaagccgaagagaagacctggctgcccagctgcaggaaagagaagctccagccccggctcagtgagcactctgggccgcccatcgtcatccgagacagtccagttccctgtacccccccagcactgcccccctgtgcccgggagtgccagtctcttccacagaaggaggacgcaaggccacccagctctccaccaatgcctgtcattgacaatgtcttcagcctggccccctaccgtgactatctggatgtgccggcacccgaggccacaactgagcctgactctgccacagctgagcctgactcagccccagccaccagtgaaggtcaggacaaaggctgcagggggaccctgcctgcccaggagggcccctcagggagtaaacccctaaggggctcacttaaggaggaggtagccctggatttgagtgtgaggaagcccacagcagaggcctcccctgtcaaggcttcccgttctgtggagcatgccaagcctactgcagccatggatgtgccagatgtgggcaacatggtgtcagatctgccaggcctgaaaaagatagacacagaagcaccaggcttgcctggggtgccagtgaccacagatgccatgccaaggaccaacttccacagctctgtggccttcatgttccgaaagttcaagatcctccgtccggcacctttgcctgcagccgtggtcccgtccacgcccacctcagctcctgctcccacacagcctgcacccacccccacatctgggcccattggactgcggattctcgctcaacagcccttgtctgtgacctgcttcagcctggcactgcccagccctccagccgtagctgtggcctcccctgcccctgctccagctccatcccctgctccggctcgagctcaggctccagcttcagcccgggatccagctccagctccagctccagttgcaggccctgctccagcatctacttcagccccaggggactccctggagcagcattttacaggactacatgcgtccctgtgtgatgctatttctggctccgtcgcccactctcctccagagaagcttcgcgagtggctagagacggctgggccctggggccaggctgcgtggcaggactgccagggtgtgcaggggctgctggccaagctgctgtctcagctgcagcgcttcgatcgcacccaccggtgccccttcccccatgtggtgcgagctggcgccatcttcgtgcccattcacctggtgaaggagcggctcttccctcggctgccacccgcttctgtggaccatgtgctgcaggagcatcgtgtggagctgcggcccaccacgctgtcggaggagcgggcactgcgggagctcgccctgccaggctgcacctcacgcatgctgaagttactggcgctgcgccagctgccggacatttaccccgaccttctcggcctgcagtggcgcgactgtgtacgccgccagctgggtgactttgacactgaggctggagctgtgtcctcctcagagcccactgtggccagagatgagccagagagcctagccctggctcagaagtcaccggcccccaaggtcaggaagccaggcaggaagccaccaacccctggcccggagaaagcagaggcagctgctggggaagagtcctgtggtgcctcccctacccctgctaccagtgccagcccacctggccccacactgaaggcccgcttccgcagtctgctggagaccgcctggctcaatggcctggctctgcccacctggggccacaagtcctcaagaccagaccagccctcaccctgcccacagctgctggacagccagagccatcacctgtagcactggttgccagtgctgtgtgtatagcagtcactctccacccttcccttctgcctgcccagctgccccggggccacgagtggatgctggggctgtggctgctcccctggaggggttccatctctgaccctgtggcccattcagggtgggctgaagagcccctgagcttttaacgtgagggtctttattggataggactactccctatttcttgcctagagaacacacatgggctttggagcccgacagacctgggcttgaatcccggctcgtgttcttgctgcaggacctgggcaagaaacttcacctctgctgagccctcattccccatgtgtaaaatgggacaacgcaacctacctcacagggttgttgtggggatgctgcctgatacataccctgtcaccatttggtctctgcttcctctctgggacagggcctagaattggaggcagagaaccttcctatagaaagtcttcgtgtgtcctaggacttggctatcgtagagtggtaccttaggcagtggatgtgactcacactttcaggagtcaccccccagcatttggggttgggttggccctactccagcctggagctccctgagggagcctgcactccctgctcccaatccccgctactggtgcagggatgcagcctggagctggcgtccttgttctgggcctgctgctgccgccaccccaggaggccccaggcctgtcctgaattgacatcagtgcttccctgaactgcctcccccacccctggcattatcccaggaaacttatgttttctagaagctaagcagctgctgggactcagggactggtgcaggtaggctgagtggcagctcagtcctagaaggtctctgaagatctggactgagggccctgctactccccaagccagagcccatcagccaggcctgctgtgagccacctgcctgtggagtgctgagctcaaccaaaggctggcaagctctgggcctcatttaagggattctgatgagccgatgggccctggaggcagcccattaaagcatctggctcgtt

SEQ ID NO: 1276 - DNA, 3164 bp, Homo sapiens
cagaggtcaccaccacgcagcagagacaggtgtcctgtgggcggtgcagaggtcaccaccacgcagcagagacaggcgtcctgtgggcagtgcagaggtcaccaccacgcagcagagacaggcgtcctcacaggcagtgcagaggtcaccaccacgcagcagagacaggcgtccccacgggcagtgcagaggtcaccaccacacagcagagacaggcgtcctgtgggcggtgcagaggtcaccaccacgcagcagagacaggcgtcctgtgggcgatgcagaggtcaccccacgcagcagagacaggcgtccccacgggcagtgcaaaggtcaccaccacacagcagagacaggcgtcctgtgggcagtgcagaggtcaccaccacgcagcagagacaggcgtcctgtgggcagtgcagaggtcaccaccacgcagcagagacaggcgtcctgtgggcgatgcagaggtcaccccacgcagcagagacaggcgtcctgtgggcgatgcagaggtcaccaccacacagcagagacgggcgtccccacaggcagtgcagaggtcaccaccacgcagcagagacaggcgtccccacgggcagtgcaaaggtcaccaccacacagcagagataggcgtcctgtgggcgatgcagaggtcaccaccacgcagcagagacaggcgtcctgtgggcgatgcagaggtcaccccacgcagcagagacaggcgtcctgtgggcgatgcagaggtcaccaccacgcagcagagacgggcgtccccacaggcagtgcagaggtcaccaccacacagcagagacaggcgtccccacgggcagtgcagaggtcaccaccacgcagcagagacaggcgtccccacgggcagtgcagaggtcaccaccacacagcagagacaggcgtcctgtgggcagtgcagaggtcaccaccacgcagcagagacaggcgtcctgtgggcagtgcagaggtcaccaccacgcagcagagacgggcgtccccacaggcagtgcagaggtcaccaccacacagcagagacaggagtcctgtgggcagtgcagaggtcaccaccacgcagcagagacaggcgtcctgtgggcagtgcagaggtcaccacactgagccagactgtcctcggccttccctgggttgagcaccggatgaaaaccatgtgctttgagccctggaaagacaatcagcccagccagagccagagcctgaaacaggcagcccccagggcgcagctgcaggaagccgcatcctctcgtgggctccagcaaggcgggggacgctgtgttccctcagtggcttcttggtgccccttgatgtccaggagtgtgaggtgaggtgagggctctgagctgggaagctgacaagtcagggagaatgccaggccagacgcatcggcctgcgggggctggagcagagcctggcactcactgtacttgctccgtctcactccggctgctgcgctggcccagggctgtccaccccaggcgtgtggcagaacaagcctggctcccagagctcccctcaggccctggagcggcaggcagtgggcatcctcagcccaacccatgtccgtgccatgcacaggatagctgagcttgccgctgccacagggtgtcagcgggttggggcaacagacagggccccagtgctggtggccaggctggctgtatgtgtgggttggctgccacctgactgcactgaaacaagaaccacccccaccccaccccccactgctctccacccggttcggggccggccctggctgggcttcgtggatcctcaggttgtgcgggtcatggcttcctggggctgggccagagccatcatggagtcagcacggttccttgcagacacaggcggggcaggcggcgcctctccaccttccttgcctcaagctgcggggacagcaccaaaaagccacgtggacccagatggcctcgccggacttcctgactcagggctgtctccagcctacatcccaccggggctgcacgcacagacggcttctcctggagccctggagcatttcccccgtgtttcggccaggttttctgctttaaatgagtttatttcagtcgtgtcaaagtgaaggtctctttcactcaggacgtgatcaatggcgtggccatcaagtcacagcgttgaaggcaacagatggcctttaatgacgctattttaaaaaataatttcccctttctttccccatcctggttttgtgaggacagagcatcggcatctcagggcgggggtgggtctgcctactctgtggccagcacgcagcagatccctgtaggtggagccccacagctctgtgtcccggcacctctgtgccacctgcacaggggcagagggtgggttttccgtgacgccccctggagccaaaccaccgttgatcacttcctcctgatgaactgggctgtgttggggtgcagaggtctcggttgcgtatgttctgggaattgagccagggtccttgttgctgggaattctcagacctggacaatatcagtagaggagaccacttgatttttagtttgacccctggagaattgaaaagctggaaatctgttttctgtaccttccccctcccaaccctcccccgactccctacctggcttctgtctggagaggacgtctgcatggctgtcctggggtggctgcaggtgtgcagatgctcaccgccactgtctccccattcctgctggagcccactttggtgtgagtgtttgcctggcagaggcatcgcaggcccacgggaggataaagagaagccagagaactcataattccaaaagctggcaaagttaaaacgtgatgtctggccgggtgcagtggctcacgcctgtaatcccagcactttgggaggctgagatgggcagatcacctgaggtcaggagttcgagaccagcctggccaacatggtgaaatcccgtctgtactaaaacacacacacacacacacacacacacacacacacacacacacacacacataaaaattagcaggtatgctggcgggcgcctgtaattccagttattcaggaggctgaggcaggagaattgcttgaacctgggaggcggaggttgcagtgagccaagatcgtgccattgcactccagcctgggcaacagagtgagactccagctc

SEQ ID NO: 1277 - DNA, 3666 bp, Homo sapiens
actgcacagccagatgctggctgggcaagcactcgcgttcttgggcctgacctggggcactttccagagcctggccatcccccggattacagaatggcctctcctgttctcagttacacagaatataagttgctgatttcccaggtttcggatcgttctgtctcccccttctcggaatgtgagctcctggagagggctttgcctgcaggagccacaggaaccggaacatttttaacagcttctgccggccacgccccgtgtccatgtccaggtcagtcctggaggccctgacgtcctccactgccatgcagtgtgtcccctctgacggctgcgcgatgctcctgcgtgtacgcgcctccatcaccctgcatgagcgcctgcggggcctggaggcctgtgccatgagcctggacacccaggagacgcagtgtcagagcgtgtgggtggccagggcctcccaccggcagcagagggggcggcagctccaagtgcactttggctgctttgcggtgagcgtggcccagcacctctatgtcaccctgaggaccatccctcatttctgcggggtccagctggaccagaggcacctcgtggaagcggggaagctcagctactgggtggaccggaggcgcaaggcgattctggtgcaagtgcccagggcctccgggagccccgactactacctgcgactctgcctcaagcggttcacctgcgaggacgccggcgcccctgtgcgagtgaccgccaacagcgtcccccaggccgtcttcctgccctacagccaggagctgccgtgcctgtgcctggagggctggtctgcgacccctgacgcggtgcggatccagatctgcccctttgaaaacgacactgaggcactggaggtgctgtgggacacggtctactaccacccggagagccagacactgagctgggagcccgcctgccctgtgagtggccatgtgagcctgtgctggcgcccggggccgggggccggctgccgtaagctgcagcaatccagccagctggtgcatcgcagagtgcagtacccgctggtggacacccagccccagctctgcctgaagttctctaccagttgggggtcctgggtgcggtgccctttcgaacagcgtcgcttcccaaccccgcccacttccaggtgcacctgtgtcacaggaggaagtcacagctccctgcctgccaacgcacactccaggccagcccgctcccttcagcctcaggtgacctggcagccgcccctgcttttgccttcctagaccttcccagggaggaggcctgtgccccaggcatctgcatccagggctggaggaccgatgtacacttctccgtcccccagcagctctgcaacctccgctccagtgggtgcccatctctcaggggccgcaggatgccgaggactagacctaggcctcccacggcaggctgggcgtggcgtgcactgaacaggagactgggtgggggaaacggggagaccatccggccctgagtcaggtcaggcttctgcgccaaacccaggtctgtgcccagcactgccctccagccttgcatttccctccaccacacaccgctgggcctcccgcacgcccaccctggtctcactgtcactggccttgcctcctcctccctgggggtccaccttccctgatcagagctctggttccaaccgccagtgacttgggatgtccctttgcccaccagccactgaggcccaggctcccaggacccagggtacatcaggacaggactctgcccagtggacagaactaagcacatgtggcctgggtgtggtcaggagcgtggctctgccttggagtccaggaagggtcagagctggcactcctacctgcacccctccctgtgagcaaaagagcttgcctagcttcgggtggggtgaaccgcaacagccacagaggtgggaggggtgggagggggtggataggacagcctggcacccagggcctctggagaccctttccagggagcaccagtgggccaggcaggggtctctggaatgtctcctcagctcagctgagccacagccatttcagggcagcctgctgcccacaggacatgcccagggccgtggcagtacccgcagaccttcagctcccccttctcccagcaagactttttggccaagcctaggtccccctccctagcaaaggtcacctccagcagatcacagactaaaggggcaatggccacctgctggtcaggtgtccctggggctggcacctgccactgtggagtgcccatgctatgctgggcaagtccacggccccagggacaggcctggaggcagcaggaggaccgggcctggctcaggtggggggatctgggggtcatacacactcctcttggggccagggtgggctcctccttcacttgtctgctgagcctccctgcagatggaaggctgctgtccacagccactggcaccccaggactgggcagccccctccccttccctcacatgtctcagcctcgcacagtgggggcagggctgggaggtggtgtcccagccagtaccacccctacgtctctctccagctgcacccacccacatgggacggcagcctgaggccaggaatctcctcacgaacaagtaggtgccagggacacattgctggggggcaggaggccaaggcacagcctcggacagctgagccaggcccccctccgagagtgtggggtgttctcacctgactgtggggcctaggcacctgctggctgtcctggggctacagctccatggggccctcaggggctctgggtcacataaaagaccttcagccctgtcctgagtcccctgggaacagcaggagctgggtgggctaccccttccccggatggcccaggtgctggaccccagcctccctctcagacaattcatggtcatggccactgtccctggccctgaagacaaggccctggcagctgcctggagcttccccagtgctctggggtgcagggtgcaaccccacccttcctgtagctgatcaggcccgaggtggtcaaggatcaccccagtttctgcccagggcaccccacactggctggagtccacctctcctgtctgtgcatccttgggtgctgagcttcactggggcacccgccccactcggacccctccagagggtctcagcttccccagatcccagccccactcacccagcaacggtcagtcacttcctgtggtctcagaggccacctgcctgggggccacctgctgggatgtgcggttctcagacattccaagtggcacatccaggtcccagccaggggtgcccagcagtggcctgtgcagtgggccatggggtcggcccttgaagacttctcgtgtgggtcacgtaggctctccggcttccccgctgagccaccctctggagcctggacatcgtctcacctgagtgctgtgcaggaccacatgcccagcctgtcccagcggtggtcgcaccccatctgcagatgcactcccaccgcagtctgggcccaggctgccctcttccagctggccgtgggccgctgggccttcttttccctcctgcaacagaggctgctatgtcccacagactggagagggggctgcagagcgagtaagtccccgccactcagtaaacattggtccaggggtagctgttaaaatgg

SEQ ID NO: 1278 - DNA, 1902 bp, Homo sapiens
agattctccccagacgccgaggatggccgtcatggcgccccgaaccctcgtcctgctactctcgggggccctggccctgacccagacctgggcgggctcccactccatgaggtatttctacacctccgtgtcccggcccggccgcggggagccccgcttcatcgccgtgggctacgtggacgacacgcagttcgtgcggttcgacagcgacgccgcgagccagaggatggagccgcgggcgccgtggatagagcaggaggggccggagtattgggaccggaacacacggaatgtgaaggcccactcacagactgaccgcagatacctggagaacgggaaggagacgctgcagcgcacggacgcccccaagacgcatatgactcaccacgctgtctctgaccatgaggccaccctgaggtgctgggccctgagcttctaccctgcggagatcacactgacctggcagcgggatggggaggaccagacccaggacacggagctcgtggagaccaggcctgcaggggatgggaccttccagaagtgggcgtctgtggtggtgccttctggacaggagcagagatacacctgccatgtgcagcatgagggtctgcccaagcccctcaccctgagatgggagccgtcttcccagcccaccatccccatcgtgggcatcattgctggcctggttctctttggagctgtgatcgctggagctgtggtcgctgctgtgatgtggaggaggaagagctcaggtggggaagggatgaagggtgggtctgagatttcttgtctcactgagggttccaagacccaggtagaagtgtgccctgcctcgttactgggaagcaccatccacaattatgagcctacccagcctgggccctgtgtgccagcacttactcttttgtaaagcacctgttaaaatgaaggacagatttatcaccttgattacggcggtgatgggacctgatcccagcagtcacaagtcacaggggaaggtccctgaggaccttcaggagggcggttggtccaggacccacacctgctttcttcatgtttcctgatcccgccctgggtctgcagtcacacatttctggaaacttctctgaggtccaagacttggaggttcctctaggaccttaaggccctggctcctttctggtatctcacaggacattttcttcccacagatagaaaaggagggagctactctcaggctgcaagtaagtatgaaggaggctgatgcctgaggtccttgggatattgtgtttgggagcccgtgggggagctcacccaccccacaattcctcctctagccacatgttctgtgggatctgaccaggttctgtttttgtcctaccccaggcagtgacagtgcccagggctctgatatgtctctcacagcttgtaaaggtgagagcctggagggcctgatgtgtgttgggtgttgggcggaacagtggacgcagctgtgctatggggtttctttgcattggatgtattgagcatgcgatgggctgtttaaagtgtgactcctcactgtgacagatacgaatttgttcatgaatatttttttctatagtgtgagacagctgccttgtgtgggactgagaggcaagatttgttcctgcccttccctttgtgacttgaagaaccctgactttgtttctgcaaaggcacctgcatgtgtctgtgttcttgtaggcataatgtgaggaggtggggagaccaccccacccccatgtccaccatgaccctcttcccacgctgacctgtgctccctccccaatcatctttcctgttccagagaggtggggctgaggtgtctccatctctgcctcaacttcatggtgcactgagctgtaactttttccttccctattaaaattagaacctgagtat

SEQ ID NO: 1279 - DNA, 2611 bp, Homo sapiens
agttctaccggcatcgggcgctgagggtgagaagggaccacaagcagcagcaggtctcagtgcttgtcatattcctgctcaccggtgggctccgggcacgcccggcagggtcctgggggcgcaggcaaggggacgtaggcagagtgctccggccagcatggagggactggtcttccttaacgccctggccactcggttgctgttcctgctgcactcgctggtcggggtctggcgagtgaccgaggtgaagaaggagccgcggtactggctgcttgcgctgctcaacctcttgctcttcctggagactgcgctcaccctcaagttcaagcgcggcagaggctacaaatggttttcaccagccatatttttatatctgattagcatcgttccatcattatggcttcttgaattgcaccatgagacccagtattgcagtatccaggctgaaggaacatcacagaataccagcagaaaagaagacttcaatcaaacattgacatccaatgaacaaaccagtagagctgatgatctcattgagacggccaaagtttttgtgaataacttatctacagtatgtgagaaagtttggacattgggactccatcagacattcctgttaatgctaataattggaagatggcttctacccattggaggcgggatcactcgagatcaactctctcaacttcttcttatgtttgtggggacagcggctgacatactggaattcacaagtgagaccctagaagaacaaaatgtgaggaatagtcctgcactagtctatgccatccttgttatatggacttggagcatgctgcagtttccacttgacctggcagtacagaacgttgtgtgccctgtgtctgtgacagagaggggattccccagcctgttcttttgccagtacagtgccgatctgtggaacatcggaatcagcgtcttcatacaagatggccccttccttgtcgtgcgtctcatactgatgacctatttcaaagtgatcaatcagatgctggtgttctttgccgcgaagaacttcctcgtggtggtgttgcaactctaccgcttggtggtgctggcattggcagtccgtgcttcgttgagaagtcagtcagaaggcctgaaaggagaacatggttgccgggcacagacctctgagagtgggccctctcagcgggactggcagaacgagtctaaggagggcctggctattcctttgcggggctccccagtcacctccgacgactcccaccacaccccttagttattgattgacagtggtctgcggctagaacctgactccctggttcttcttacagggaggatcctttttctcctccaaccttggcgtataataattttcaaaagaacaacataaaaaggtgatcttaaaccaaagctgaggaattttcttttttcaactgaatagaaggaactttgattagtgactattgctacaacttctgtgtgatggtatcagatgttatagttgttcaacgactaagtgatttgtttgtcttgaactgtttgaaaagctatggaagaggttacagtgacatgccctcgaaagatttggtgcagaccaactgtcgcggctgttacctggaaatagagaagctttgaactttgcctccattgtcagactatttcgtctgatcttttctgcaatgttcctctgacatcaaaaaatgtacattcagtgaatgcagaacaaatgaagggaaaagtgcctttaaaattacctcactgtgggctggaagaagcgaaaatctctgcccagcttccgtatcatagagagccctattcatcgctgcccaggccttcccaggaaaatcattttttctgggctgatgttgtattctgccatggcgcatatgttcttacagaaattttattgcttttgtcttgggtgctacaaaattcacagcaagccattttggttacatatctactggttgcaaggcaggaaatattggtgaaatgctagcaaagtcacaatttctactctgaacatgatttgcagtgttcatcagtatttttctgaaccctgctttaccattttctatattgccaagttgaatcatgtgggctgatgcagggaagctctgaagcagtgaataaaggtgtttcgggccctgagagaaagaattgcaaatgccaggcatctgtccactttagccctcctccaatgctaagaaagagggatggtgacgtatactacagagacgcaaatgaaacaccaaacagtcttgaattacaagaaaaaaaggggatttttttttttttctaatttcagacttggctttttacttagaggacattctgatttgctctcagaaacatctgatttggggttaaactaggcggctggaggatgtttacagctttgaggcttcaaataagtttccatatgcagggagtaactttaaacaatgtttgaataattaactgctaagtcttatattttatgtgtatctatttcatcctctgtctctttcttactagaataccatataagaatattttctctgcagtatttatatttatactattttgctatgagtggcctttgtattttattatatgcattaaatagtgtgtgcacaacttt

SEQ ID NO: 1280 - DNA, 2969 bp, Homo sapiens
attgatggcctccagatgccgacacgagagggatttctgatcttgtttacaacggatttggaggtggctaactatcctgaattcccacaagtgagtacaaaccccgacccccatggggtgttgtcctggactgttttctgtggatgggtgttcccaatttcctttcttttttttcgtttcttttctttttttttaaatctttgagacagggtcttgctcagttgcccaggctggaatgcagtggcacaatctcagctcactgcagcctcaacctcctgggctcaagtgatcctcccacattagcctccagcatatctgggactgcaggcacccaccaccatgcccagctaatttttttttttttttttttgagacagggtctcactctgtctcccacactggagtgcagtggcacgatctcagctcactgcaacctctgtctcctgggttcaagtgattctcccgcctcagcctcccaagtagctgggaatacaggtgtgcaccaccacacccggttaatttttgtatttttactagagacgaggttttgccatgttggccagactggtctcaaactcctgatctcaggtgatcagcccaccttggcctcccaaagtgctgggattacaggcatgagctgccgtgcccagccttgcttcccttatcatctctccagggctccctgtgtgaggggcctgggacccctcagccaccacaagcttcagagggggagtgctgccacctaggggcaaagaaggaaactgccacagcttggcccaggccacccggacacgttatgacaaaaacatttattgagcactttctgcgtgccgggcaccatgccaagcccctggcgcacttcatcatactggatccccaggacaaccctatgaggtagtagtatcgtaagccccattgtacagatgaggaacacggggctcagagaagtgaagtgacttgcccaaggtcacacagcaagtgcatggcaactcttggatttgaagccagatctgtctcatagctgcagtctagccgtgacacctgagtgcctcctaaaagctacatcacagagctgtctgaggatgctgtggggaaccgtctgtgaaaaggtgcaacacgtaaactccgaagagtttatggcaggcctcctgaagaacagcagactagaggctacccagaggcagcctggagacagagtggggaggaatgccctgtctcctctcccaggggccccgaccaccagcctagaccagcgggactctgggctgctcaggcttcagccatctctctcctgccaccatggctctgcccagaaaccgtggatggccctgcccccaaccctagaatgttgcagggctttccggcaggagaggggcacaggagggcgaccatgggctgaggtttctgaatgacattcagcaggatttctgccaatggctcgatggctcgcttccactggtaaggatcaccggtctgcccccaggggccctggacccaaacaggagcatcaggcctgcccaggaaacagacacctcaggtccgtcactcggaggcctggatgtagacgggcacagcgagcatggcacatgggccctcggccccggcctgcagctccgccagagccaggttggagcccagcccctcagcgtgtccaggtaccaccagctcagtttccgcgcccaccgcaccacccacaacgatggacagcaccgcgtccggctctgcgaagggcggcttgccggggacagcctcgggcaccagcccagcccctgtgtccttcagctcctccagccccagcgggtcaggcaagggggtcagcaccttgcgcccaccactgccgcaactgcggggggctgccctcctctgggggggccgccgggtttgcaggtccttgtccttttgggggccgagacgacagcggtgatctttgaggtatttgtggcgggaaaagcccttggcgcagccagcacagcggaacttgtagttgcccgtgtgggcgcgctgatgctcggcgaggtgggcacggcggctgaaggacttgctgcacagggcgcatttgtggagcttcatgcctggagggcaagggaaagtcagtgagaagcatccagaccttcaccccgcaacagtgccctgcgctgggaataaaatccaggctctttccccaccagcacctgtgtgatctggccccagctctctccaccctcgtcgtctgccttcttccagccactctctgcgccagccacactcgctctcctcagagatgccacgctggctcctccctctgcgcctttgtacttgccattctcctctgcctggaacagctgctcactctctgcaccttggctcgctttgccaggtcatctcaggctcagggaggggccgtgacgcctgaggccacccacaggaacatggcagcactaagactccaacccagccctgtgtgtccaagtcattgacctactctcccagttttcacactttctttagtgactgactcctttctgtaaaccttctcaaacaagggagactttaccccccagaggactcagcaatgcctagagacatttttggttgtcacaactgtggggggatgccactgacaccagtagatagaagccagggatactgctaaaaatcctacagggcacaggacagcccccaggacaaaattatctacaggattacaggccagacgccggtggctcacacctgtaatcccagcaccttgggaggccaaggcgggcagatcacttgaggtcaggagttcgacaccagcctagccaacatggtgaaaaccccatgtctactaaaaatacaaaaattagctgggtgtggtggcaggcacctgtaatcccaactacttgggaagctgaggcaggagaatcgcttgaacctgggaggcagaggttgcaatgagccaagatcacaccactgcactccacctgggtgacagagggaggctccgtctc

SEQ ID NO: 1281 - DNA, 2112 bp, Homo sapiens
taagaaagaggtttaatgaacttacagttccacatggctggggagggcttacaatcatggcagaaggtgaaagcatgtctcacatggtggcagacaagagaagagagcttgtgcagggaaactctcctttataaagccatcagatctcatgagacttattcgctattacgagaacagcacgggaaagacctgcccccatgattcagttacctcccaccaggtccctctcacaacacctgggaattcaaggtgagatttgggtagggacacagccaaaccatatcactgccccagaactcaacttttcctggaactgttcttcctatgagggggagttctccatagtgcccacttcccaattatcatcagggcatgatgtatctaattggcatggcctaggtcaggcactgtgcactagctgcaacggagtcttggaaaggatacatttgcattttcagcttctacattggcaggtaggggtttccccagacataagaaaagggttaaatgctgggcagtcaaaaaagaatgatacatgtcctttcttactggaacatgatggctgtgaagaagataggcggtagatgaagctggagagttttgactttatcctgtaggcagtgtggaaagatgagccactgatgatttttggggaagagagtgataggtgaatagatgaaatacggagacatgggaggtgagaagttgagagaagctaagtggcattgaggactaaaatacagtgagaatggaaaagaaggccagatgggaagaacctagaggtcacaggaccaagcatatagtgcctggctgtggggaagcagagacaagtttcaggcctgggcaactggggaataatatagtatatttgtttaaagcatagtctctgaaatcagactgactggtttgaaacccacctctaccacttattagctttgtgacaaattactcactctctctgtttggggttccccatctgtaaaatggggataactactttcttcattggactctgtgaggattgaaaaagttgatgtatgtgaaacatttattaaagtgcctggacccatggtagctgctcactaaaaggggtgtgtgtgaatgaatggtaggatgatgaacaaatttgggacatattgcatggtggtgggtttggtacatttgggattttaggtggaacatccttgtggagctgtgcactagaagtgtttatctacagcttgtgagaggccagggctggagacagaggtggggaaaccacaagagtaggttagatcagggaggaagactgtagttggagacatgagtgccaaggacggaaccttgggaccatttctgtagcagaaagaggaagtcgatttggcaaaggaagctgaattgaacacgctatgaggtaggagaactgagagagtgctgagtcatagatgtctaagaaacacaaagttttaagaagcacagaagtagttactggcattagatgctatggaaaaattagacaatggtaagtgagacgttgcccttggatttaacaattaggtgctcgctggtgatcaaggagaaggcagtttcgctgtagtggtgggaacagtttcttagtgcttaataacaatgatgtaatcgtgtatgtatgttaaaaaggaaatgaaaaataaaacatgctatgaaatttttgtccaaggaaattgtctagcttaatacagaggtgtatagaagggaatgtctgtagaaaagaatatcccagtggtggttttaaaacctagctgctgcttgaaagaattgtgcaaataaaatttacagtattttaggctaagtgtgctggctcaagcctataatcccagcactttgggaggctgaggcgggcagatcgcttgagctcatgagttcaagactagcctgggcaacatggtgaaaccctgtgtctacaaaaaaatacaaaaattagctgggcatggtggtgtgcacctgttgtcccagccacttgggaggcttaggtgggaggatggcttgagtctgaaagggtggtttgagcctgggaggtggagcttgcagtgagcagagagtggcatcatgccactgcattgtagcctgggagatagagccagaccttgtctc

SEQ ID NO: 1282 - DNA, 2191 bp, Homo sapiens
atggctcattgcagccttgaactcctgggctcaagttactgagcttgcctccgcttcctgagtagattgactacaggcacataccaccacactgggcaaattttttttcttcttttttttttttgtagagacgggatcttactatgttgcgtaggctggtattgcgttctttaacagcatgctgaagttgcctgtaaatcttttcatgtttcttgaaaaattcattcctaccaactatagtcttgtgctgctgttgtaaatggagtcatctctttgatatatgccaactggctgctgtgtgcttgtgccacaccccctcatgtatttctcatgctgttaggagtacttctcaggtgctgttgggttttccaggtgcatcacctgcacatggtactcatttcacctccatcctctctctggtgcaccagccttggctggtccctggcccagaagcagggtcagggagtagagggtggtgagccctcgggagccagacctgtgcctcgaccaggggtacaatgtgggataagaaacttaacctttctgtgcctctggttgtgcatctgtcagtgaggacacagcatctgtctgccttttgggatttgggggaggacacaggagctaataggtggtaagtttcagtaatactaatagttaacttttcctgttaagacaataccagctgtgtgttttctttccatttttccccatatttttggagagttgattctgcaacttgctttctccttgtattttcaggggcgtctgccttggatataaaatcatagatgggtgtgttgctaagaaaaagctctttgcaaccagtattaacaccacactccatgtgacatgtcttcctgtcatttttcattgtcctttgaccaggtgggctggatgacactttgcacacaattattgattatgcctgtgagcagaacattccctttgtgtttgctctcaaccgcaaagctctggggcgcagtttgaataaggcagttcctgtcagtgtggtggggatcttcagctatgatggggcccaggatcagttccacaagatggttgagctgacagtggcggcccgacaggcgtacaagaccatgctggagaatgtgcagcaggagctggtgggagagcccaggcctcaggcacctcccagcctacccatgggcgtggtcgcagctactctagaggtggtggggaccagggctatgggagtggcaggtattatgacagtcgacctggagggtatggatatggatatggacgttccagagactataatggcagaaaccagggtggttatgaccgctactcaggaggaaattacagagacaattatgacaactgaaatgagacatgcacataatatagatacacaaggaataatttctgatccaggatcgtccttccaaatggctgtatttataaaggtttttggagctgcactgaagcatcttattttatagtatatcaaccttttgtttttaaattgacctgccaaggtagctgaagaccttttagacagttccatctttttttttaaattttttctgcctatttaaagacaaattatgggacgtttgtagaacctgagtatttttctttttaccagttttttagtttgagctcttaggtttattggagctagcaataattggttctggcaagtttggccagactgacttcaaaaaattaatgtgtatccagggacattttaaaaacctgtacacagtgtttattgtggttaagaagcaatttcccaatgtacctataagagatgtgcatcaagccagcctgaccaacatggtgaaaccccatctgtactaaacataaaaaaattagcctggcatggtggtgtacgcctgtaatcccagtgacttgggaggctgaggcaggagaatcgcttgaacccgggaggcggaggttgcagtgagctaagatcgcgccactgtactccagcctgggcaacagcgagactccatctcaaaaaaaaaggaaatgtgtatcaagaacatgattatccaggggtattttctaattcagatcatcaaactgattatatagaagagttggctttaaaatgtttgcaaatgtcttttttttttttaatactggaagaaaaaatattctgttgtgtctcatacagtgcttaggatgtctttcacagagcttattaaaaagatgaaacctg

SEQ ID NO: 1283 - DNA, 2353 bp, Homo sapiens
gatttacgtcctcatgtcgtatgggagacacggaggagaggcgggtaaagttggtcttgctctgccattccatgagagaatgtgctgggtagaagaaagttgccagcggtttaagcatttttaaaatgcaagaaacgctcagtagaacgagcttgaaccagccaactccagacttggaagcaagcacaccacccgactgcgacatacggacagtcgaccctcgctccggcatcaccatgcagagcaagcgcccatccaatgctaggcggagccaccgtcttttgcagaacaattgtgcaggttccaaagcctcggaaaaccggagaggcgcatcttgccggctacggttgaaacccgttcactgggtgattctgaagctagaagggcagccgaatggccttccccccgtcctgcccctcgtccactgtaagctcaggggggagcgggacccagggaggtgaagtgcacagactcggcagaggcggcgggcagaaccgcgggggtgagagggcgcggtggctgtggggcgggagccgctgctgaaaggaggcctgggttgttgggagggtgactgtccgtggaatctttggcggagggtggtttggaagaatggcgaggggagagcagaggagaaggtggtgaccctgatcgtcggccaggggagagtaggctgtgctgtccctcctctccccttatgtggcgggggacatacagtggtcaggaagggggttctccctggaggaggctagtccaccacacttcggctccgctgacccctgcgatttctccacatgcggggccctcgtccgcggtggtgtttgcgctatccggcggctgggttcgcgcactcactctcctgacatgccttggctcaccgccgatgtggatatcgccgccagggacccttcccgccctcctacgaatcttgagtgcgcttccttggtgttctcaccgaagcttacgaacagacagatgtgagctctctgtcttttacacgctgaatttggctatagcaaaaaagccttgaccaagagcttgggtctccttcggacctgcacacgactccccaactcccgcctgcaacggcggctcttggatcccgggcaggcagcgtccacccagcgtggaaccgtggcagccgcagcccccgcaggttggagggcagacactagcaggagaaaggccacaaggcctgcgtggtgggaaagcatgggagacgtcgctttcctaccgggcgagaaggtctccctacagtctttggagacaagatggagggaggcaccccttccaggaacaaggcggctgctcctgaggcctggctccgcacggaggctcctgggtcccgcgcgccctctccctacccgctgtagccagagctgcttcacatatctcaaccggcctcctcctcctccccagccgtccttgggacagcaaggcccccagcccgtgggaaagacctagcctcctctccagcacttggagagggagttggatgcacgtctcttaaccccaggaggacagagaccctgaggcaggaggggaccccttcccttgctgcttctcttggcacagccggtccagggggctggctcagggcccaggactcctcgctcctcctggagggcctgggtcgcgtggcccaggagctggccacatgggcatctcccgcactgctcctcagggaacgggaggcattatcctgcagggcccactcttacccatgaaagacactcgggaaatgctcctgcggaagctggagctctgcgcgtttgaccacttagtctgtccgcccatccttccttcggagggtcttggggagagaagaaatgctccttcggagggtcttggggagagaagaaatgctcgaggacgatgcgctttgcagcgtctctaccaacatcagaagaaagcagggcgcgtcttcctggaagaaggcggccggaggcctgcggtcgcagggaggctcgcggggcaggaacgccctatctccgccgtgctatccagcggcttgcagcatcccacctggcggactcctcttcctctctcttctactgtggctcttctatcctggtgtcccttgaatgcctatcttccttttgtgcctccaaacctctcacgcccgccccaagttactcatttccttagttgttctgaactttaaataaggtaatgcatgtaagattgcataaatgctcaataattgtcatctgttattattttcatcagtaacatcatctgaatcatcagtattgtctatttttaacagctgcatttttcattgtccgaatatagtcacatacatttgaacattttataattattgaataataaattcgttctgctattttacaat

SEQ ID NO: 1284 - DNA, 2612 bp, Homo sapiens
atcctggagtctaaccagggtcaaggccctccttccgtcctgtcgccaagccacaggagcagtatcaggccttaggaaaaagccgccttccccaagacaaggacagcaagaactcagggtgaccatggtcaggccagcacttatccatctgccaggcatatgagaaggggaggggcttcggctctgatgttctgatgacaagggggtcttggggcttgccttagggacacgtggcacctgtggaggttcttggaggcatgtgggtataccatgggctggaaaaagatccaggagtcatctgcacagatatggtggctgaaggaggagcagtggccccaggaggtggtggagcaagaagggcctaggatagaacccagaaggacaatggtatttaagggaccagcaaaagagacaagtaggaggaaagtcaaaagtgtggtgtcacagaaatccagggaaaaggtttcaagaaacagtcaacagtgtgaaattctgctatgcaagtcgattatggtcagagctaggaaagatccattagatacaacaagatggtggtcagggatcgtgccaagaacagcttccatggtatgttggagtagccagctcccagtgggactgaggagcaagcagggtagggtgcagaggggaaggctggagagggtggcagccggagggggatgttgctttcttggctcccacccccacgcccccaccggctgccattctgcctggttcccatgtctggcccctctgctgcctttgcccagctctggtcttcaggatgggctggattctggactttctggttacatagacttgaacaagtcacctaagttctgaatttatttccccctctgcacaaggatcagatctttcagatctgtttgaggctgctgtgaggatcaaaggcgggtgaacgtcaatgtgttctgactatttatgtaagagtaaaaggaggctgattctctcctcctccctcttctgcaggctcaaaaatgaccaggctaactactcgctcaacacagatgacccgctcatcttcaagtccaccctggacactgattaccagatgaccaaacgggacatgggctttactgaagaggagtttaaaaggctggtgagtgggtgtgagccatactggccttgactcgggtttgggagtatggtatctacaggtccagtccggggcctggaatctttggagagagggagtgagtctgcctcaacagtccaagacaagcccaacctagacactttccacagagaagacatctttgtgttgacgtcctgacctaggaccaggtttttgatcctttgcttgggttgagtgcctttaaagaatccagtgaaagctgtcaaccctctccccagaaaggtgtgtgcagcagctatgaagtcttgcacactctcttcaggttgttcttaaatcccaggctgaataagtccattcctgcacgtgtctgcgaggtgtctctggccccctacatgccaccctgtctctcaaaggtttctccaacttccttctcacagccctttttcatgtaatgacaaattaagaacacgacctcatggtctctactctggcacttgctgccgtgtgacagtggacaaatccttccccctctaagcgtatctgcccatgttgagtgaagaggatggactatcactacattgctaagagctgccttctttgttctctggttccatgttgtctgccattctggcctttccagaacatcaatgcggccaaatctagtttcctcccagaagatgaaaagagggagcttctcgacctgctctataaagcctatgggatgccaccttcagcctctgcaggtaggttcctgtctgggcttctgggcagttgccctgtcctggccccagtgtggctttctgtgggacttctagcaagatgcccttccattcttgggcagcgccatgaatgtgtgatgactccctggtttctgggccctggctgggagcagcgtctcattagatcggtttgttttctataaaagttcttgagaggctgttctaaggggagactttctgaagcccagtcccaaaggtctgggcagttggggacacctccatggctgcccaaagccaagggcagggagaggggcccaggcctgttctgctcctttcttcctatgtggtcttggcaaggcatcttcttgccatcataggaaggagttcctttctggttctggtgttctatgatttttacaacatcctgggtactacaagttgcctgatctttttgcttctctgaaccaacgagcagggcagaacctctgaagacgccactcctccaagccttcaccctgtggagtcaccccaactctgtggggctgagcaacatttttacatttattccttccaagaagaccatgatctcaatagtcagttactgatgctcctgaaccctatgtgtccatttctgcacacacgtatacctcggcatggccgcgtcacttctctgattatgtgccctggccagggaccagcgcccttgcacatgggcatggttgaatctgaaaccctccttctgtggcaacttgtactgaaaatctggtgctcaataaagaagcccatggctggtggcatgc

SEQ ID NO: 1285 - DNA, 1986 bp, Homo sapiens
gtcggccgcgaggtgctctccttccaccgcggcctactcgccgcagcccccggcctggggccccgcgccgtctgccgcggcggctcacggtgcagccctcgcgcccgccagtttcagcctcagtgtcaggtgtgcgctgaatggaaaagggagattttgagacatcatgtcaacagaaatggagatgtgcactggggaaactgccggccgggccgctggcccgtggacgcctgggaggtggccaaggccttcatgccccgaggactagcagacaaacaaggacctgaggaatgtgatgcagttgctcttttaagtctcatcaactcctgcgatcacttcgtggttgatcgaaagaaagtcacagaggtaattaaatgtcgtaatgagatcatgcactcttcagagatgaaagtatcttctacgtggcttcgagattttcagatgaagatccaaaattttctgaatgaattcaagaacatcccagagattgtggcagtatactccagaatagaacagctgttgacgtctgactgggctgttcacatccccgaggaagatcagcgagatgggtgtgaatgtgaaatgggaacttacctgagtgagagccaagtcaatgaaatagaaatgcagttactaaaggagaaacttcaagagatatatcttcaagcagaagaacaagaggtgttgcctgaagagctctcaaatcgactggaagtggtgaaggaatttctgagaaacaatgaggatcttagaaatggccttacagaagatatgcagaagctagacagcctctgtctacatcaaaaactggattcacaggaacctgggagacaaacacctgacaggaaggcctgaggttgcccgtcaacaaaaatcaggcatgttctgtgaaagtcagcatggcttccatctcagacatccttttctgtgcaaaaggaaaaagttaccagagtattgtacccaaacaaaaaggaatttttgttgttttgtcctggactttcctctaactctttggaactattttaatatttataaacttggggttgtataatctattgcaataaaaaatattagatactctatgccaaaacttgctaccaggccaggtgtgatggctcacacctgtaatccccagcactttgggaggccaaggcgggcggatcacctgaggtcaggagttcgagaccagcctggccaacatggcgaaaccccatctctacttaaaaaaaaatacaaatattagccgggcgtggtggcatgtgcctgtaatcccagctactcgggaggctgaggcaggagaatcgcttgaacctgggaggcagaggttgcagtgagctgagaccatgccactgtactccagcctgggcaatagagcgagattctgtctcccaaaaaaacaaaaaacaacaacaaaacttgctaccacccagggattttctgctatttaaaaggtgaatttcttttctggtactaaactgtagctgcttaacttagtaaaggctgtgtttggccaggcctgtgccagaggctcacctggagtgctccacccactggcaggcaagtcctattcctattcacccaggatccccaaggctgggctgggatataaatgttgggataggaaagaaatatttcctttttagaggaaagcaagaagaaacattgcctgaaaggtgattttctagtcatttccaattagtacagaaatgttactgcctctgggtgcagtggttcacgcctgtaatcccagcactgtgggcggatcacttgagcccaggagtttgagaccaacctgggcaagatggcgagaccccatctctacaaaaaaatttaaaaattacctgggcatggtggcacacacctttattctcagctactcaggtggctgaggtgggaggatcccttgagcccaggtggtcaaggctgtggtgagctatgatcatgccactgcactccagcctgggtagcagaacaagaccctgtctc

SEQ ID NO: 1286 - DNA, 2964 bp, Homo sapiens
agacagaggcatcggcccaggcccgagcagacggaaaccgctttcgctgccactgagcccagggagggggctcctcgtcatctgtccacacggagaggagtccgcgccccatcttgtccggcgtgcagaagctccgcctgtgcagacgggtggtcctgccgtctgaaacctgttacctgggagggggtccaagctggaaacggtggagggttcccaaggatcccagcagattgatggacggcagggctgcaggcggacggggcgggggcttcctaaggagagaggtgggcagcctgcagcccccatcccactgcccccaccccaccgtgtggctgctgcctggcctcagtttccccatctgtgaaacaggtgaaatgggctcactgtccgggcctcggagcattcttatgggggtcagggcctggcaagggctgtgcaggctgggctcagaactaggccgcccaggctgcgtggccacaggggtctcggcccccacttctccgtttgagacctgcccagccttcctgtttgctgcagctacggccgtcagattcgccaccaggagctgcggttgtcctcccagacagggagactgaggccctgagaccgaggctggccggggtcagacatgcaggccggggtgaggcaggacacggcttgcagccccagctccctctgtggggccaggaagcttctagaacagtccagttcacgctgacatggcagcagctgctgtccgggaccccacaggcagcaacgtggacagacgggtcacgatcactatatttttgtttttctgagacggggtctcagtgtgttacccaggctgatctcgaattcctgggctcaagcaatccttctgccttggcctcctgagtagctgggactacaggtgtgagccactgcacccggcttccagatcatgatttaaccaaccctccctcccagaagccgcagcccgtgctgggagcctggtggtttttgtcggagggcctggggctgggctggggcctcctgggatcttggtgtgttttctgcccagggtatcctcccaaggtgcccatcaggagtcccaggaccagctggaggtcacgtggggctgtcctcttggcgtccccagaagggccctgctgtccaggctggccggggacctcacctcgggaacttcccgggacccttgcatccctgtggtgtagtgtgcgagtcaggggtgaggctgggccctcgctgagcacctgggaaggcactccaccacccaaagagagaaccatgtaacctcagtgggcttggcagctgtctccccgctgtgtgacctggggcaggtccccgagccgctgtctctgtgagatgcagacataaccggtgtctgctccacaggtcgggtgtgagccttaggttggtatttgtgaagcgctgagaaggacacccttcactgcagggtgaacagaagtcacccttccaacaacagaagcgatgatgtgtgggacgaggtggatccggggcctgtcctgccctcgggggcagcgtggctggccctctctgcatatggtgccgtcccctgccctgggagcctctctcctccgttccctgtggtcctctgggggcatcaggcctctgcgacccacctggtcaccaagcgttgtgatgggaagagccccctccgagctgagctgtgctgaaccgccctgggctggtgacctcacctcccaggcctgcttcctgccacctctgactgtggcaggagcactggtgaggggcggcctgtcagggtacaggaggtgaagctggggccgtctgatgtcgtactacggtcccagcagcatcaccgtggccggagcagggccgggagccctggcctctgcccacctgtggtcctgtgccacctcattccttcacagccccccatcctggcctcggtttctctgtttgggcaagatgacctctgaggccctccagcccctcccttcgtggactctgagctgctttggacatcatgtttttatcttccagaaacttcagtgctctcaagaaggaaaatatttatgaaaacaataaactggtgagtggcccccgccccggcctcacagctggcttagccagcctgctgagccccacccacgtccgagggaccgagggactccccccaggccctgcacctgccttgggagtcctgcctgggaatcgggggctccctgaccagcccggcaacgcgtcctgggctgggtgaccctagcgttctagaaatagcctcttatcttggcacccagggcatactggtcccctcttttcctgagctggggagcaaggtgccaggaggtggctggggaccctacttcactgcaagggggctcagcccagtctgcctcaggcagaacaagggtctgggggtggctgtggggggctgtggatgggtcccagtgggcctgctgccactcccaccacatgggacctgccttccggccctgccaggattccagtcctgccctgctcaccccagcttccaggcccttccctgtgtgcagcctcagtttgcctgctgcagaataagcaccacgctccctcgtgggcagaggcaccggcagactcaccacgcgccctgcaggcatgtcctgtgctgtgccaggcaggccccggccacgtccctgcccccggagctggccttcagcggggacagtggtcagcactgaagacagtcatacctgcccggccggcactgccctgctcagcacggggataatttgaacttaagctttaacttaattaaaatgaactaaaattacaagttcatggtgaaacctcgtctctactaaaaataccaaaaattagtggggcgtggtggtgcgcacctgtaatcccagctattcaggaggctgaggcaggagaattgcttgaatccggaaggtggaggttgcagtgagctgacgctgcgctccagcctggacaacagagtgagactctgtctcc

SEQ ID NO: 1287 - DNA, 2258 bp, Homo sapiens
taaaaaaaatgctgtgagagctgatctatgcatctggtttgtgagccagtattctgtgatggctgcagtttttagagatcctagtagctctacacatctgtcttctgctttcctagaacctgggcaccccatggatgactcactgctggttttgtgtgtgtgtgtgtgtgatttaaaattacattcagtcaactctatagccctatgggctttttgaataaccaaatgctcaacagttttgtaatctttcaggttgctgtgatcagtccccaaggagtctacactttcaaagagactgggaaaggcctgtgagacaatgggattcttttttctagaggtgtaactctgcctgtgtttgcatgccacctccagaaccactaaaatataatttctcagtgggtgactgagtaagactggcagcaattgcaaaagcagattcatgccatgtgtcactcttcacagtcaggaacttatttacctcttggaactttccaaaggaacgatgatggtgggggtaatgtcacattagtatggagcccttaaattcagcagtgttcaacctgagggaagacagagtaggtcaattctcttggcagcagctgagggaaggagagagcagggagcagggctcagataaggtttgtttggcagggtccaagcacttcatggaatggagacctttggctgtcagagatctgaggaagatttgtcagggcctgctacactctgagggcttgcagtttggatggttgggaacacttcttccttgcactgatggtgctcctatttctatgacacgtgtactagttcagacacagtttattgtgttcaccaattctatgcacagcaatcagactgagattgaaatccagtataatattaaaggtgatctgggccaggcgcagtggctcatacttgtaatcccagcactttgggacgctgagttagggggatcacttgaggccaggagtttgggaccagcctgggccagaaaatgagaccccatctgtaaaaaaaaattttttttaggttagccaggcatggtggtgcatgcttgtagtcctagctacttgggacactaaagtgggaggattgcatgagcccaggagttcgaggctgtagtgagctaagattgtgcctctgcactccagcctgggtgacagagcaagactctgtctctaaaacacacacacaaacaacatctgacaaggcatttcagcctggagtcagtcaaaaaatcttagaggtctgtaaaggagatgactatgctgttagggctgtggtagaaacctttaataacaagtgaaaagagcttgtatttgccaaaatgaacacaggatatgattctttttttgcttttgctttggagttgtatcagctctgtgcggtcacatgggtatctacaaatcaaagcacccatcaaccagatgcatctctgagagttaacagcagaaggtggcataataaaagaagttctcggtagtgaaaaaggttggaaaccaccagctaaaccaatcctcttgtaccaataggagattcaagttgagaggtgggaaagggcctatctcagagtaggtgcttgaatacttcttactagaatgaaagaaggaacttaagatcacacagccatgttactgcaggacggggaatggaacctaggtcttcttatttttggttcagtgttaactcccattctctaagcagactgggcctgttattcaaactgccttcccataggtgcttccctgcttctctcctcacccagagaaggacttacaaacagcttatcttcagaggttttgtgcctgatagttatggaatgtgctggtttgagcagggaggatgtaaggggagggaatgctaaaagcctgtctacttagagtcaggtttcctgggtaagtccctggaaccccatccccttcccctttcttgagaccccaggacttgctccagtaactgccaccctgtgcctttgcttcagggccatgctggataaggagctggctgcctctgtgaacatcctactcaaggcatcttcactgtgagttttgctgttgccattggagggggagtggggggagtgtggggagtgctagggtcaggtcctggctggtgtaaagaacactgaattaaaggaattgtcagaataactcaaaggcatttagataatcaacagtccatttcagtgtttttattcagagatcgatcgatcagtgggatgttgtccaacaaaagcaaaaatagactgtatagagaag

SEQ ID NO: 1288 - DNA, 2379 bp, Homo sapiens
ttttaatggtgatgggaaaatgggagaaattgtatggatgtacagtagcagattattcacatttgtgttacaggaaatcacagtctgaatagaaaatggtcagaatggctaaaatggtcacctattgttttcttagaataagggtggtgaacacagaacgggaaaattcttcaaggtctttcttgaattcgaaacatgaagtcataaccaagtatctgggacctatttgtagtgatctgcaggaatttatgaaagtgccaaagaattaacagtttattcggcttctaagtgttattaatgtgaactttttgatagttggaacattttgatcccatactctctttggtgcctttcacctaatactgttctaaaataggctaattttaataaatattcagcaaaggaacattcttagtgtttaacttcaaattaaatgttgtaaacttattttaacatctaaagtccattatgtttgagtgttctgttaaattcaacaagctaataacctttttttttaaggtacagcagggaagaactggaaactcagagaaagaaactgcccttctttgttcaagactgggcttccaccgagcaggagattacctggggcaattgatgttatcggtcagactataactatcagccgagtagaaggcaggcgacgggcaaatgagaacagcaacatacaggtcctttctgaaagatctgctactgaagtagacaacaattttagcaaaccacctccgtttttccctccaggagctcctcccactcaccttccacctcctccatttcttccacctcctccgactgtcagcactgctccacctctgattccaccaccgggttttcctcctccaccaggcgctccacctccatctcttataccaacaatagaaagtggacattcctctggttatgatagtcgttctgcacgtgcatttccatatggcaatgagcctcactgtgttgcccagtccggagtatagtggtgcaatctcggctcactgcaagctccgcctcccaggttcatgccattctcctgcctcagcctcccgagtagctgcgattacaggcacctgccaccgcaccctgctaatttttgtatttttagtagagacagggtttcaccatcttggccaggctggtcttgaactcctgatctcatgatccacccacctcggcctcccaaagtgttgggattacaggcatgagccactgcacctggcatgatagacattcttttggtaaagtctgttggttgtaagttttgcttatttttttgttgatgtttacaaaggctgtttgaatcttgaaataaaatattgttgagtacacttttctaggttgaaatttttttctcaacacttttttttttttctttttttgagatggtctcactctgtcgcccaggctagagtgcagtgacatgatctctgttcactgtaacctccgcctcccgggttcaagtgattctcctgccttagcctcccaaatagccgggattaccggcatgcaccaccatgcccggcaaatttttatatttttaatagagacggggtttcaccatgttgaccaggctggtctcaaactcctagcctcaagttatctgcccgccttggcttcccaaagctttgggattacaggcgtaagccatcgcgcctggcctcctctcaacactttgaagatgtcccagtgtattctggtttccattttttatattgggaagtttgtggtcaacctaattctgattcctgttcaccttgtataatgaagggtctttatatgttaggtttttaagatttgtttctggatcttcccgatactgtgggtattcattcaccatgtgatatttctcttttctatttataaaatgaatttctattataatctaatgacacatttttggtgggcattttgtttttttaaagtaccataacgtttgtttttaatcgtgttttttctttagttgcctttccccatcttcctggttctgctccttcgtggcctagtcttgtggacaccagcaagcagtgggactattatgccagaagagagaaagaccgagatagagagagagacagagacagagagcgagaccgtgatcgagacagagaaagagaacgcaccagagagagagagagggagcgtgatcacagtcctacaccaagtgttttcaacagcgatgaagaacgatacagatacagggaatatgcagaaagaggttatgagcgtcacagagcaagtcgagaaaaagaagaacgacatagagaaagacgacacagggagaaagaggaaaccagacataagtcttctcgaagtaatagtagacgtcgccatgaaagtgaagaaggagatagtcacaggagacacaaacac

SEQ ID NO: 1289 - DNA, 2665 bp, Homo sapiens
cttttcgaggtcggccgcgtggctggaagacatggccactccagtcggtgttgagcacggcgagcagtctcaggcctttagtgatgatggtaaggctgcctgggtgggaaaacggggtcttccttgacacgacactaacatacttggcttcccttcctcagagacgaagtggtgacgataatctcggtttctccctcatagggtggttaggagggttaaaagtactggatgagaaaatgctttccaaacgttgagaaaatgttactatgtgaagggagagagctcaagcccgtcctcggcgtcatagggccggcttctgcgggggagagcgcctaacaacctgggcagccccgtgcgcctccgccgcgcgtgtgctgagcgtcatgcccaggggtcttcggtgcccgcgcacgggcagactctgacgatggtggttcttaattcagcatcaggagtgttaacgtgtgaagacgtgattccgcttggggtgtcttgaggacggccccaatcggtagttcatatttagctttacagataggagtcaataggattgtaaacttctggaaagccgtagttttaacaacgagccttttttcctcccccagaggcctttctttgtttggcatctgcagagacggtgaaaagcagagctccaggttgaaggatcagagtaatagatggagcccttaacatgagtaagagtgggtgcaggcagggcctgagtggtcactagaaatgagaaagcacagttggtgccatcacatacattcacctcctgctttattctgaagttcaagtatgagaatacgtgttgacatacaagccagctatggtaagaaattactcaaaactcagaatgctaattattttaatgataaaaatgagtagggtctttgcccgtgtgatttggggccactaggtgtcattgtaaccagcgtggatcctcgttagggcatgcagggatgaaagagacatggcaaatgaattttggatcgctaggatttaggaatctttgttattggctgagctgaggatgatttaaagttatccctgtctgaaatggtatcttttgtgaggaggtctgacttgctgaggctcagctgtttaatacaaatctggagaataaaccttaaggtggtttctgttagaatgaagcctgttatccttctcttttagattaaaggtggcggctgtggccttgaaaacagtcatgtgaaaactcatcaccttaaggtgttaagtgtaaggatcttcacgatgaaatttctgtaaatggtgagatttttagtactttcatagacttgaatatgcttatggtcctctttaagtattggtttgttagttttggggatgtgttggtcttccagggttacgattgcccagataatggaagtagtatggaattccttttgatagggtccttgccaagcactctcataaagagcattttttgtttgtttgttttgagacagagttttgctcttgttgcccaggctggagtgcgatggtgcgatcttggctcagcgcaacctctgcctcctgggttcaagctagtctcctgcctcggcctcccaagtagctgggattacaggcatgcaccaccacgcctagctaattttgtgtttttagtggagacggggtttctccatgttggtcaggctggtcttgaactcccgacttaaggtgatctgtgctgggattacaggcgtgagccaccttgcctggccataaatagtatttctaatatcaaccccatatgaggtaaatttttttccccactctgctgctgagtaagtaaaagtgaggcgtaaagagttcttttgcccaaagttatacaagcagttactgagttagactggcagttctgaactggggagcgatggtgttcctggcatctggtgaatgctactattaataaataccctggctgggcctggatatttatctcatgcctgtagtcccagcactttgggaggccgaagcagatggatcacctgaggtcaggagttcgagttcgagaccagcctggccaacatggtgaagccttgtctctactaaaaatacaaaaattagctgggtgtggtggcgggcacctgtggtcctagctacttgggagactgaggcgggagaatctcttgaacccaggaggcagaggtttgcagtgagctgagatggcaccattgtactccagtctaggcgacaagagcgaaactctgtaaataaataaataaataaatatcctacaatgcatacaacagcctgcatgaggaataattgatccacccagtatgtcagtagagctgaggttgagaaactcctgtataccacacgttaggctaactagagatctgagctctagtctcagcctattttctcaccagagtcttgtttcttcatttgtgaaacagggttagtgatttccaaacttgattattacatcagagccacctacaaagtgttaaaatatacacattcctgggcctcacctccaggcatgggtgagaatggctctggagtggagtccaggaatcatgtggccagtccaagagcaagtgggtagtaactagatcaggggtgtcaatcttttggcttccctgtgccacattggaagaattgtcttgggtcacacataaaataaactaacactaatgatagctgatgagct

SEQ ID NO: 1290 - DNA, 3373 bp, Homo sapiens
atagacagggccgactgccggccaggaggagggtggggtggggaaagccctcggccctcggagctgagggtgagacccaggcatgtggtcccgccgacctgctgcccagcagcccggatcccccggggctgccctggtggccaaggcaggtggagctagcggtcgaggtttctggactgaggcccctcccccagtgcggtcatcccacccagaacttcgctctgcccctgcccattctaggacagccgagagcccagcgacgtggatggggcagctaggggcagcagcttggatgcggaccctcagtcctcaggcagggagaaagaacctctgaagtaagccctcacctctgcaggtggggctcaggcccagagactgggatcagctggctcaggcagctcaggtcctggttcgtcccctagcccaggaggatgctgtgggagctgcagcagcggcaagagggagaatggggggaagcagcactagagaagttcccagagctcatcctgtcactggctgctctgctgaaattatcaataagaaatgccagttggatctgtgacatgtctgcctgcagctggatgggagcaacggacagcttgtcctccgaatgtgttttctgtatgtgtgcaagcgcgtgtgttccaaacgggcagtagcgtgtgggaaggaaaaagcctgacacttgtttttatcaatttgctgatgctcagtcccggcggctgcctcctttgcccccagctgctctgccatttctctcttttcaatcctgcatgatcctgagcagagataaaagcagatttccgcttctgctcccagatccaggagcagaccctgcaggcagctgctcctgatgtctcacagctattagtcttcaaaaaccccccgtgcctctgtgcacacgcgtctctcctccccagccagcccccctcccagcccagcggcgatgtctctacctggctggcccgtgcccttgacttccaggcagtagaagatggagttctctagacagcagcacttcagccgccactctgcctctgaagggaaggaagggaaaggggtgctggctactgtgaaataacaagagtccaagagcaaggtgtccagagtcagagctcctgggtttgaaccttgttccaccagcacatcctacctctgtggcctgggtaagtttctgaacacctctgtgcctcagtttctttagctgtaggatggagatcctactggtatctgtctcttagagttgtaagggttgattagataacgtgtggaagatgcttagcatgttgggtaagtgtcccatatatgtgagctggcacaatccggtttgcactgtaaattactgaacagtggtagattcaggacggctagagttcctcacatcctcactctctggtccttcctgccgtctctccacatacacagagctgggcgaccggtagttctgcaacagatcagaggatggcagagggtggcattgctggggtggggaagccccctgtaagcctgtactggagaagaccaccactgcctctctgtgcccagaaccatgtcccaacctccagtggtgacctcgacctggacagcgccactcccagctggctctgcttccggaatgaacctcagctccttgacaagacgggaggcgctgccctgctgtggtaccttcctccgtgtgaatgctaatctctctgctgggggagcctgagtgacggggaaaggctgcttggagctgcagggcggctgagggcagcaaccaggagcagggaggtgctgctcctgtaactgaggctcagagcggctgccagtctctcctggagactggagcatgaccagggaactaatgaggcggtgggggtgtggtgggagccagggaagtagccactgcagctgtggctgtccactgtcaccctggggtgtagatgtcaccttggggagtacccacccattccaagtgtgcagttgtgtgtgtgtgtggttgtgtgtgtgtgtgtgtgtgtgtgcgcgcagtcctgggcaagggcaaacagtacaggtggtgggccaagactagatgggtagggcacagtgcccactatgagacaggcacaatggcgagagagcaaaccctgctggttcctcaggctcccgtagcctctctgtggggggcctcactgttaggaagaagcccaagacctagagctagaggaagataatgcttctttgtgaacctcagaagaacagtttggttcgcacggaagcttatgttaacataatgatgatactaatcgtatgattaataaccactaacatgcattgggcgcttactatgtgctaggcactgtgccagctgctgtattttacgcactgtttcatttatgcggcaggaactgttatcatttatccaataaggaaagtgaggttcacagaacttgctcaaggtcactcatagctggcagtgaagccaggacctgagcctgggaaatctgacaccaaagcttgggatagagggggcccaagtctcgagttgggggccgtgaggaaattttgattgtgacctgtctacaaggcacaaggaatggagctgtggtcccgcccagcctgcctttgcaagtgggctggtgttggccagggtcattgccaccaatctgtcttcaggaactcacattcaagggcagaccagactctaggccctgagaagctggttcttgcctgccaggtgagggggagaggagagctgcccctttaggacccctcagtcttcctcaggaaggatgtggtggcctctggcagggatgacagacagcgaggtcatcacccacagtcactgcaactgccactctgttgcctccttcagccaggggcagggccctggggagaggacaggatggcagccagcagcccagctggagatgcggagcctgtccttcagctcctacttaatggaagcctcgcagatgcaagatggctccagcaggcccagcatcacttcttctcagtgtcccaaagccagaagagaggctgttgtttttaaaagcaggaaaactttcctaaacttggccagaattgcatcacagaccctttcctaaaacaatttccagcaaagggaatagacttaccatgtctggtacagatgaatcaaggtttgcccctgggggctggggaggggcttgtcccgctgaagcagactcttgcccagcagctgaacggagcctaggttcaccagacggaggaagagactggccactaacagtgcctgacacacagatgtgcttcctgtgatatcgctgctgccaccgttccaaatgtaagcagttggctgtctgggatactacctaccttcttttgtgttcttattaataaaattaaagattgctttctgggtagagaaatt

SEQ ID NO: 1291 - DNA, 2425 bp, Homo sapiens
aggactgcgttctggaggccgagccggaacccgtgcggcggcgctgggaagagactgtgcccctgcagctcccctgtcaccggctccaaggagcgtcgggctccccccgcccagccctgcagcacccatccggcaacgccagactcggcgcaacgggggcagctgcgactttaaatctctcagatccgcggcctgagggctgccgccaccgagaaatggaggcacagagctgtgaacaagagaccacggctcgccgaaatggcggtgccaggagcctgaaagggaatgcagccggcggggttgtcaaggacaacatttgttttggcgcaaccagcggtgccgtcaccaagaaaccgtcgactctgagaaaaaaagagaagttcggctaccgagaaactccgtgcagcaagtgctgtgacagcaaaaccgccggcttcgcgccgctggcgaaagagccaacggaaacgccgggtgctgcgaccgcgaagccggcactagagggcctcggatggagaaagccccgcaccgagacgaggaaactgtgcacagcacgactagcagttgacacaaacagaaaagtgtctcgtctgctctctgggagaaagcgtggatcaaaaccagcaactcagtggagagaaccccgcagccactgaagaagttgcccacgtggcggtggggccagagaaacaccgcgatttcgacgacagccgtagggataccacagagaaacatgcgcggccacagaagtacatccagctccgcgcaatcagtggttctgcgatccagaaaccgccagctgggctagactagaaacttctaaaaaactgtcgtcccatagcagctttcctaaccacgacagacagtcgcctttagggagcacctaacggtgctgagaccggcctgggccagcaaaagcgcagagcggtgccagtgccaagaaacgcccgacttggtgaaaccaaccttgtgaccaccgattccactggcttcgcaggacgcaacgggcgaaggcgcggcggagaaaccgcaggctcccttcaccgattatgctgcgagctggggatggtggggggcacccgcgaaattgtgaaaccagcggcgctgggacccagcgatcagctgcccgtagcaaatgtctgtgcagttgcaaaagataatttttggccgtgagaaggttgccgccagagagcgtccgataacgctgacaaaggcgtggcgttgccagtgagaaacagccggcgctgggaaaggaacggtgcagcgaccgaccaactgcgcgctcggtgccaccaaagtgctactggctctacccactctgtcccccacgggcttagggaagtctgatgtctttttcttttcttttttcctctgtcgcctaggctggtgcagtggtgtcatcttggctcagtgcagcctcgacttcctgggatccagcgatcctcccgcttcagcctctagagtagccgagaccacaggtcacccctcgctgccaggctctcttcccggtccagagcccacaggatcctacaggaggggccaacaactgcttgcctttgaaacttgaaactctcggtctaaggttccttaggagcgtaaaaggcacagcgttttctgatcgcagcttcaggcctcccgcccctgtcccggtacctctcctgcaggacggaactctgtgggaaccgctcgttgattctgatggttaactgtcagatatccttgatattggacataggatttggaagagggcaggagagaaaaatgaactgcaagactccagcacaagaggtgggattgctggcagatgtctgctccctctccaaacctaatgaacatctcaaagtgccatccactttcctatacccttgatctgtgaaatggatcactgacgctttctctgtctttccggaaatgcaaaacaggtgaattttcaagcgcttgaattgtctctcacacttttcagtcaagagtggggctataaactccttcctcataggaaataaggaactgccactgcttggaagtaaaacgtatttttcccataagctttcacatttcccaaaaaaaaattatacatccagatgtaatccccctaagaggcttacagaccctaccaggagcgttcccacgcgaacgcatcatctcccaatcggatcctgaaaacaccatgcaaccaattccatccttttctggatcaacctgggcagaggacaggtgcagaggagcccagagaagggccttgacaagtcaggagacccaatttggggtcgcaattgtcactcactccccaggcgtttgctttgatcttcccctcccaccatactacttcttctgctacctggtttctccctggtatttgaggatcctccaattgccttctggtcttacagacgggagaataaaggaaaaatggcatcgtttccacctt

SEQ ID NO: 1292 - DNA, 1833 bp, Homo sapiens
gtttttctgctctccgcccgtgtggagtggtgggggcctgggtgggaatgggcgtgtgccagcgcacgcgcgctccctggaaggagaagtctcagctagaacgagcggccctaggttttcggaagggaggatcagggatgtttgcgagcggccgcccctctgtcacctggagcaactgtggcgctgctcctccccgctggcccagagtttctgtggctctggttcgggctggccaaggccggcctgcgcactgcctttgtgcccaccgccctgcgccggggccccctgctgcactgcctccgcagctgcggcgcgcgcgcgctggtgctggcgccagagtttctggagtccctggagccggacctgcccgccctgagagccatggggctccacctgtgggctgcaggcccaggaacccaccctgctggaattagcgatttgctggctgaagtgtccgctgaagtggatgggccagtgccaggatacctctcttccccccagagcataacagatacgtgcctgtacatcttcacctctggcaccacgggcctccccaaggctgctcggatcagtcatctgaagatcctgcaatgccagggcttctatcagctgtgtggtgtccaccaggaagatgtgatctacctcgccctcccactctaccacatgtccggttccctgctgggcatcgtgggctgcatgggcattggggccacagtggtgctgaaatccaagttctcggctggtcagttctgggaagattgccagcagcacagggtgacggtgttccagtacattggggagctgtgccgataccttgtcaaccagcccccgagcaaggcagaacgtggccataaggtccggctggcagtgggcagcgggctgcgcccagatacctgggagcgttttgtgcggcgcttcgggcccctgcaggtgctggagacatatggactgacagagggcaacgtggccaccatcaactacacaggacagcggggcgctgtggggcgtgcttcctggctttacaaggagagccaattcgggacccccaggggcactgtatggccacatctccaggtgagccagggctgctggtggccccggtaagccagcagtccccattcctgggctatgctggcgggccagagctggcccaggggaagttgctaaaggatgtcttccggcctggggatgttttcttcaacactggggacctgctggtctgcgatgaccaaggttttctccgcttccatgatcgtactggagacaccttcaggtggaagggggagaatgtggccacaaccgaggtggcagaggtcttcgaggccctagattttcttcaggaggtgaacgtctatggagtcactgtgccagggcatgaaggcagggctggaatggcagccctagttctgcgtcccccccacgctttggaccttatgcagctctacacccacgtgtctgagaacttgccaccttatgcccggccccgattcctcaggctccaggagtctttggccaccacagagaccttcaaacagcggaaagttcggatggcaaatgagggcttcgaccccagcaccctgtctgacccactgtacgttctggaccaggctgtaggtgcctacctgcccctcacaactgcccggtacagcgccctcctggcaggaaaccttcgaatctgagaacttccacacctgaggcacctgagagaggaactctgtggggtgggggccgttgcaggtgtactgggctgtcagggatcttttctataccagaactgcggtcactattttgtaataaatgtggctggagctgatccagctgtctctgacctac

SEQ ID NO: 1293 - DNA, 2218 bp, Homo sapiens
agaatctttccaaaaacttgaatgtggaggggtagatgggataatgccgggagaggaggctggtgaaggacctcttagtgaagggagatttgttgctgtttctgagatgggaaagagaaacaagttgcagtgtagatggggaggatggagaggttgaaggtgtaggagagatgggtcaccatcagatgggacgtctgtgaaggagagacctcatctggcccacagcttggaaaggagagactgactgttgagttgatgcaagctcaggtgttgccaggcgggcgccatgacagtagagaggttaggatactgtcaagggtgtgtgtggccaaaggagtggttctgtgaatgtatgggagaaagggagaccgaccaccaggaagcactggtgaggcaggacccgggaggatgggaggctgcagcccgaatggtgcctgaaatagtttcaggggaaatgcttggttcccgaatcggatcgccgtattcgctggatcccctgatccgctggtctctaggtcccggatgctgcaattcttacaacaggacttggcatagggtaagcgcaaatgctgttaaccacactaacacactttttttttttctttttttttttgagacagagtctcactctgtcggcctggctggagtgcagtggcacgatctcggctcactgcaacctccggctccccggctcaagcaattctcctgcctcagcctcccgagtagctgggattacaggcatgtgccaccacgcccggctaatttttgtatttttagttgagatggggtttcaccatgttggcgaggctggtcttgaactcctgacctcaggtaatccgccagcctcggcctcccaaagtgctgggattacaagcgtgagccaccgtgcccggccaacagtttttaaatctgtggagacttcatttcccttgatgccttgcagccgcgccgactacaactcccatcatgcctggcagccgctggggccgcgattccgcacgtcccttacccgcttcactagtcccggcattcttcgctgttttcctaactcgcccgcttgactagcgccctggaacagccatttgggtcgtggagtgcgagcacggccggccaatcgccgagtcagagggccaggaggggcgcggccattcgccgcccggcccctgctccgtggctggttttctccgcgggcgcctcgggcggaacctggagataatgggcagcacctgggggagccctggctgggtgcggctcgctctttgcctgacgggcttagtgctctcgctctacgcgctgcacgtgaaggcggcgcgcgcccgggaccgggattaccgcgcgctctgcgacgtgggcaccgccatcagctgttcgcgcgtcttctcctccaggtgtgcacgggagtgggaggcgtggggcctcggagcagggcggccaggatgccagatgattattctggagtctgggattggtgtgcccggggaacggacacggggctggactgctcgcggggtcgttgcacaggggctgagctacccagcgatactggtgttcgaaataagagtgcgaggcaagggaccagacagtgctggggactgggattattccggggactcgcacgtgaattggatgccaaggaataacggtgaccaggaaaggcggggaggcaggatggcggtagagattgacgatggtctcaaggacggcgcgcaggtgaaggggggtgttggcgatggctgcgcccaggaacaaggtggcccggtctggctgtgcgtgatggccaggcgttagcataatgacggaatacagaggaggcgagtgagtggccagggagctggagattctggggtccagggcaaagataatctgcccccgactcccagtctctgatgcaaaaccgagtgaaccgttatactagccttgccattttaagaattacttaagggccgggcgcggtggcccactcctgtaatcccagcactttgggaggccgaggcggatggatcacttgaagtcaggagttgaccagcctggccaacatggtgaaagcctgtctctaccaaaaatagaaaaattaatcgggcgctatggcgggtgccttaatcccagctactcgggggggctaaggcaggagaatcgcttgaacccgggaggcggaggtttcagtgagccgagatcgcgccactgcactccagcctgggccagagtgagactccgtctc

SEQ ID NO: 1294 - DNA, 2442 bp, Homo sapiens
tttgctttgttgtctgtttgtccatgcctgtctgtccatgcctccatctattcttttcttttttcttcttttgttttttgagatggagttttgctctgtcacccaggctggagtgcagtggtgcaatcttggctcgctgcagcctccacctcccaggttcaagtgattctcctgcctcagcctcccgagtagctgggattacaggcatgtgctaccacacctggctaattttggtatttttaatagagacggggtttcaccatgttggtcaggctggtctcgaactcctaacttcaagtgatctgcccgctttggcctcccaaagtgttgggattacaggcctgagccaccctgcccggcctaacgcatccatattgtttcttgatgcatttcacagtaagtggtgaacatccgcttgtgcatgtcgttgactagagttcagcattaaaaacagagggaattataatgacatctgactcgaggcaggggagaggcacccaggcaggtggacctggctgaagttggaagagaaggttccttttccctgctgtttctgcgtctggaaacttctggggccacgtctgggtaacttcagggtggggcatgccatcccacagggcaggccgggctgctgcaggccagtcttccttaagtggcccccagctggtgccctcaaacactgttgaggctgcattgttgttgttgttgttgttgttattttatttattttttgagacagagtcttactccatcacccaagctggagtgcagtagcacgatgtcggcttactgcaacctccgcctcctgagttcaagtgattctcctgcctcagcctccccagtagcacactgccatgtctggctaatttttgtatttttagtagatacagggtttcactgtattggccagtggtctcgaactcctggccaatacaggtcgaactcctgacctcaggtgatccacctgcctcagcctcccaaagtgctggaattgcaggcatgagccactgtgctcggctgagattgcattgttgttgagggtgcattgttgttgagggtgcattgttgttgaggctggattgttgttgaggctgcattgttgctgaggctgcattgttgctgaggctgcattgttgttgaggctgcattgttgttgaggctgcattgttgtgttggccacagacggggcggggcctgtgacgggcagtgactcagcctctctcccctcattcttccacagctggagccagacggactgctggtgtgggtcctggcaggcgccctggggctcagcctcgtcttctccctggtctcagtcccattgcagtgcttccagctcagcagagtctatggcttctgcctgctcctcttctacctgaacttccttgtcgtggccctcctcactgaatttggagtgattcacctgaaaagcatgtgactgaagccgcttagtgctgtggcctcactgcaggcaggagccccgcccctcctgccgggggaggcccagggaccggagcatttctgcaaggcccttgtgggcacgagagtgcggcccttgctgctggagatctgaggtcactgctgtgagctgggagaactgctgtgtacctcttgctgccagcacccaacagccttgccgtggggaccttggaaacctggctttgctctggacaaagggttccagagagaagctagaagccccccttgaatgacccccagagcccctctgagaagggctggagtttgggggaaggggatggctggatgtgctccaggccatgctggaggtacccccgaggcacaggcactgcccgttccccttgcctgggcttcaggccttctggcaccttctcaggacacaagtggctgcccaaccctgactcagagaatgagggtggcttggacccctgggaatcaggccgccgagggctgagctccagagccgcaccatctgccacaaacagaattcgagacatacttaattttgaatttctccttgccacgttaataaagccaaaagcagcgggtgctattcgtggcaacacacttcactgaacccacttgcttccaaaatgatgccagcccgaggcactgctacgccagcagctgccacatgggatggtggctcaggcgctccctccaggattctgcccctgcctgtccacagactcctttgtgctggaacctgggctcctccagctgccaggcaggagtcggtaggactgtgcctgtgcctccctcagcggggccctgggcggggttccaaggcctgcgagctgggaaaggacagatgaggggacctcgtgccttcttgctgtcatgcaatgaccccgccttatgttgccgaaataagcaactcttaggtttgcctgactgccttatgctggtaaagaaaagggattcaactgtctcttttccaaataaaaaaaaagtcaaaatttc

SEQ ID NO: 1295 - DNA, 2335 bp, Homo sapiens
agatcgaaagacttagcctacaccattttaattttagaaatggcaatggctagagtgaaaaacatgaaggctgctaaaccaatcacacattccagaaaaaaatagcgcttttataaaactcactccattgtggcccacagaacacccaaggccaaaaagattagaaagtttagaaagggcagttatctcaacagaccgatgctcgcaaagaggccgctgttctctgcagcaaagagcctcatacattcgcaagggattttttcatccttaggagacctgagtcctcaagaaaaccctcttctggaagtagttgctccttcagaacgttttacagaaaacactaatgtaaaagacacaactaatgtaaaagacacaaaagagatgtgttcaaagacacatctctgaaaacacaaactacaatcatcctcctgaggcagtttccgctgggactgcattcaacttagaaccaactgttaaacaaactgagacaaaatgggaatacaacaatgtgggcattgacttgtcccctgagcccaaaagcttcaattacccattgctctcgtccccaggtgatcagcttgaaattcagctaaccgagcagctacggtccctcatccccaacgaggatgtgagaaagttcatgtctcatgttatctggaccttgaaaatggaatgttcagaaacacatgtgcaagggagctgtgccaagctcatgtcgcgaacaggcctcctgatgaagcttctcagcgagcagcaggaagcaaaggcattgaatgtagaatgggatacggaccaacaaaaaacaaattatattaatgagaacatggaacagaatgaacagaaagagcagaagtcaagtgagctcatgaaagaagttccaggatatgactataagaacaaactcatcttcgcaatatctgtgactgtcatactaataattttgattataattttttgttttatagaggtaaagacaataattaattcaggttttcaaaatacaatcctgtgtttgtgtggattcagaatccacaaactgaaaaccaacgtcactttcccacttgacattcttcttctgtcatttaaggctgaggtgtgctttgttcttttactgcaatgtatattccaggattgttaaaggatcctcgcttccaggaggtctctgtgaaataaaaccaagttaatcccactagactattttaagaagttaagttgatataatagcaaaatttctcccacccaaaactatgtcaacaattggatgtactcactgagtcaccccttactctgcctctaatttatttccttgttgcttaaatgatgagagacatataatctccaccctcacggagttgtcatcaccctggagaggaagaagacagccaaaagagagaagtattgtcttgtagacttactagattcacatagtatcatccttctccagtgtgtaaggtgttgtctaaataggtccagttaaagaactacagggtagccatttttaaaaaaaaattttggccacgttttcaaattcacaggggagggggaatgtctcatactccagccctcctgagcctaggccctctgtgagatgtgtcaccatttcttggacaccatatgagacattccccctcggattagagatgctcaacctgcatcaacaaatctaaagcctgcatctggctaccctggggcgagtcctgtttacagtgcctattcctggagctcgcctctttttgccttttgtttgattatgtgatgtattacttttcccagcaggccagtgctagcatactggaagagggatttaataagctggcacccttgatgctatgctcctaatccaaccttatttgcctcattggccatttccattatggtggcagccctccattccagccacagcagcccctcagcgtcccccagtcacactgtccccattgctgctcatctgtgcctttgtccatctacaatgcccttatttcactctgcctgtgggagtcctgtgaatctctccaaagccaactcagttcatctttctgcttgaaaccttccctgaataggccaggtgcggtggctcacgcctgtaatcccagcactttgggaggccaaggcaggcggatcacaaggtcaggagatcgagaccatcctggctaacacagaccattctctactaaaaatgcaaaaaattagctgggtgtggtggcgggcgtgtgtcgtcccagctacttgtgaggctgaagcaggaaaatggcatgaacctgggaggtggagcatgcagccagccaagatcgggccgctgcactccagcctgggggacagagcgagactctgcctc

SEQ ID NO: 1296 - DNA, 3138 bp, Homo sapiens
tccgtggctctggggcactgaggagcggcgcccgcggggcagcgaggagcccgatgcagggttctgcgcgtcatttccggtcccgcgggcgccccgtgaagcccacctggatccgccagcgctgtgccactccccagtgccgagctccgagctgtctccgcggcctcgcgcccggcccctccaccgcgcgcctctcaggccccgcccgccagcgtccctttgttgtgaaggcgccggggcctagcgctatgcctgcggcggagactgcatcaggctctcgcgtctgcttctgcgctttgcctgggagaggccctggtggcctcgttcctggcgcccggagtccctgctgcggccccacccccgggcggtcacggtgacccatgctgcccagcctggaggtaaaatcgttcgtggctgtggcttcagcatgtcgtcctcggtgaaaaccccagcactggaagagctggttcctggctccgaagagaagccgaaaggcaggtcgcctctcagctggggctctctgtttggtcaccgaagtgagaagattgtttttgccaagagcgacggcggcacagatgagaacgtactgaccgtcaccatcacggagaccacggtcatcgagtcagacttgggtgtgtggagctcgcgggcgctgctctacctcacgctgtggttcttcttcagcttctgcacgctcttcctcaacaagtacatcctgtccctgctgggaggcgagcccagcatgctaggtgcggtgcagatgctgtccaccacggttatcgggtgtgtgaaaaccctcgttccttgctgtttgtatcagcacaaggcccggctttcctacccacccaacttccttatgacgatgctgtttgtgggtctgatgaggtttgcaactgtggttttgggtttggtcagcctgaaaaatgtggcggtttcgtttgctgagacggtgaagagctccgcccccatcttcacggtgatcatgtctcggatgattctgggggagtacacagggctgctggtcaacctctccctcatcccagtcatgggcgggctggcgctgtgcacggccactgagatcagcttcaatgtcctggggttctcggccgcactgtccaccaacatcatggactgtttgcaaaatgttttttcaaaaaagctgctcagcggggacaaatacaggttctcggccccggagctgcagttctacaccagcgccgctgcggtggccatgctcgtcccggcccgggttttctttacggacgtcccagtgatcgggaggagcgggaagagcttcagctacaaccaggacgtggtgctgctgcttctgacagacggagtcctgttccaccttcagagcatcacggcgtacgccctcatggggaaaatctccccggtgactttcagcgtcgccagcaccgtgaaacatgccttgtccatctggctcagcgtaatcgttttcggcaacaagatcaccagcttgtcggccgttggcacagccctggtgaccgttggggtcctgctctacaacaaagccaggcaacaccagcaggaggcgctgcagagcctggctgcagccactggccgggccccagacgacacagtggagccgctgcttccacgggaccccaggcagcatccctgagagcaggaagctgccagctgctgctgtcctcgtgacactgcatcccccagaaatgggcagggacgccctcctccatggccctgctggggtgcaggacatggggagctaagttggccattgcctgcggctttctcggtttgtcggtgaagaccagcagaaactcaaactggggattccaggtatcagcttcctggagtagagaccagaccagtagctgactgtgtccgccgagcccatccccgtgtaatgtgaaaacagcctctgaggctcccatgctgggggtgcccacttcctctctgggcgacaccccagggtccaccgggagccagaggtgggtccagtgccaacgagagccgctccctgccacagccaagagagccctcggcttcccacaccagccatcgaaggccctgaggccctggaccggcggcagactggccctgggcatgaggccacagagcagggccgaagggaggggacagagggccctggaaggaagggtctcctgctgccacggtgggcactcagaacttctccccacctgacccagggctgtgggcatcctcagactatcccagaggcatcgcaagcctcaagctgcagcattgcacggcactcaagggctatgaccacggaggccgttcagtcgcttctgtttagaggaaggccccctacctcttccacaccctgccctcctatcccttccacaccctgggctgcgtgagctccccgcaaccccagggcaccctgccctcctacctgtgggggtttccagccctgaggttgaggacaaacctctcgtgtttaacttgggaggagatgtgtacgttccttttcttttttggactctgagtatgaggcaggctgttctgaggtccccgtggggtgagcctgtctgtcctccctcagagcccactgttcctatcatcatctagcacctgtccggttccccacgtgagccttgggcaggacgctgcagtgttgatggtttgggttacgtggcgtttacctgggcgccgtccttactgaaaaaggaaacgtccacactgaatgtttctggggcgcgtggtgtgtgtcaggcgcccaccctgtcccactctccccaagggacagtagtacggcacactggggccaccagccagctcaactcatcctcctgtgtcacgcacccccgagggcgcaggaggcctgaggagtggctactggagccgtgtgttaggcagaggcttctgaccatgtctgagctctttacccccaatctcgcagctggcggattcccatgcccggtgcagcctgttgccagccagcctttgagacccagagctccagggcttgtcagaggcagcatggggctccagtggtcctgagtctcatttccctgcctgctctttaggcctttggcacccatggtcacttcactggctttccatttggcttctcacctgggaaatacaaaaatagcccctcctgaagataaaatcattcagaaacag

SEQ ID NO: 1297 - DNA, 2847 bp, Homo sapiens
tacttggtgttttgatagagctgtaacacctacaataccaccagtagcattggttcttgagaggagacatagcatgcattccctcagatataatccttcaataaatactactgaagcagctctctaccaggaaggaaaacagcactcatcctcatcctcccgtggactcactgtttttgtcttgcctattctgtgctgtaattctcacatcttaactaaaggagctaccacaactaaacaaacagacaaaaaaaaatcagagtataccttcacaaaataagcagtctatatgaaataagggagttgcatttggtttttttgtcagtaagtctgtaatgctcgatatatcaactttcagaattacagtaagtcagagcaaagagaatgaaatctgtagctcagcttgtttatttttttggtttgcttctgctgaattttgtttcccccaagtcagaatacgagtctttttgtgttctctctcttctcttattcttccgagaagtgaaggtggtgggtgtacagcccatatttgtttactttttctgtagctcatatatctattattactggtggtttcttagtggaaatttttctttcactctcactttggctttacctccaagtgctttcttctcttggctgcaattgagcactataatttgtggctttccggagggggagccttggtggtcaggtggaggaggcaggccacattccaaaagtggagtggtaggtgttccagacagagtgctgattcaagagtgagtaggggtgtagggtgaaagttggctactaattcaagcctcacctgaggcagtgttgctcaaacagaaaagtgccctctctaattagctgcccccatatgcgcttagattaatgacagccaactaacttagaaaccccttccagagtaagctagccaaacaatagatgttccatggacatgacaaagagctaattttcttgtgctaaggaatttttagctcttgtatttgtggtggactgcctcatcacctaatgaaggtgaagtacattctccattttaggaggcagagttaaaacattttcctcctgtggatgtctgattagaaaaaaaaaaaatctcctacttcactgtacctttccagcaagtcttatcctctcaaagcactgtgtaaagctttgaaattaactggttcagtgagtagattatattttggtactttcctatttgtccttaaaaacattttctgactgttggatgtaaaagaagatattaatgaaaggttgaaacttcattatcattgattctttttaaacacccccctccataacctgctgttttctgcatttgaaataggaagattgtgacaaatgatttcattctgaaattgctgttgaatagaaagttttgatattataactctcattcaattcaaaggatatagatttcatttacctttatataaaaaatggtgatagtcatttttcctccatatttgtactctgaaagaaatatattctaggctttctcattagttagcctggccttaaatgaaatcatggaaacaaataattcacatcttaagtattttttcagttttctagaaaactttatgattaaaagttgctaagttcatttcacatttttcccaaggtgtgaaatacaattctgtaaagacatttccataaacaataatttatggggtcacactgtgtggtactttcaaagttatgtggaaagtgtttcttttgatctcctctgaaacatgtgactgaaagaataataccttttgtggtctcaaatatttcagttttcagtcgtgaactttaaaattcacatgagcaaaaagaaacaccgcctgaaaaccaggcagtttttcttccctagatgcccagaaacattttgagccattccaaaccactgggatcatttgctctgatttcagataagcagaataaaataaacaaactcttgcccatgtgggaagtggttctgctgtctcttgttctaaccctgcaaagcctgaatgtctccccagcatctttgaatgggtctcattgtttatttattgtgcttttcacaagtgcttgtaactgtacccttgttttactaatagctttcttctaaagtgggttgacatttcagttaattttcagtgtcctcaatgtttttccttaaattgggccagactgactggcctgtttagttagtctcgtatagattgtagcacataaaaataaggaacatttattagatatttttgaatttgttttcttctttaagaaatgtcaggtcaagagaaatttttctttcacattcttcaattatttgtgttgataaataattgaatagaagttttaaacctgtgactatcctagaagttttaagtttttacattaaaacctattagatatgtaaatgtatacatttttattcatttttgaatgtaattctgtttaaaatcttaacatgacgaaatttaggaaattgttcgaagtcttgtctagatgagcaattttgaacactttacataacattcagatttttattgcatttattttaaaaacatacataaaacctttttcatctgtagaaataaactagaaatgaaactacagggaatattgtccttgtaccaggaagtaaaatctaccaactgtaggtctctattggcacggaaatgggcatcattaggcaaaacccagaaacaggttccagtacatagtgaaccttactgaaatgaagaaatgacatttccattaaataggaaaagcatggattattcagtaaatattatggcgtggctctcaccaaagatagtactataaggaaattccaagtatagtaatagcacaaatagaatc

SEQ ID NO: 1298 - DNA, 2130 bp, Homo sapiens
aaaacctggtaagtgcagttgccctgtgatggcaggtggaacccggctgtgcacacagctaggccttattgttccccatgctgttccctgcactgttccccatgctgttccctgcactgttctctgtgctgttccctgcactgttccccatgctgttccctgaactattccctgtgctgttccccatgttgttccctgcactgctccctgcactgttccacatgctgtttcctgcactattccccatgctgttccctgcacttttctctgcgccattccccatgcgttccctgcactgttccccgcgctgttccccatgctgttccccgcgctgttccccatgctgttccctgcactgttccccatgctgttccctgcaatgctccctgcactgttccccgcactgctccctgcactgttccccatgctgtttcctgcactattccccatgctgttccctgcacttttctctgtgccgttccccatgcattccctgcactgttccctgcactgttccccatgctgttccctgcaatgctccctgcactgttccccgcactgctccctgcactattccccatgctgttccctgcacttttctctgtgccgttccccatgcattccctgcactgttccctgcactgttccccatgctgttccctgcactgttccccatgctgtttcctgcaccgttccccatgctgttccctgcagggttccctgcactgttccccatgctgtttcctgcaccgttccccatgctgttccctgcagggttccctgcactgttccccatgctgttccctgcacatttcatgccccagaccttcccattctcccaccaacacactggatcatccttcaaaagcttctgtagtgtctccaaccactcaagtgctgggactgggtgggggcaggatggagttagaccctgcagaccctggccttcgaggtccgtccccctcagacgtctcccccaacgccatggccggctcttgaaggccacagagagatccacgtgctggacaccgactacgagggctacgccatcctgcgggtgtccctgatgtggcggggcaggaactttcacgtcctcaagtactttagtaagcttggccctggggggctctgcccagctgctgctctcccagggactgcccgcccagcccccctgtgccccacagctcggagccttgaggacaaggaccggctggggttctggaagtttcgggagctgacagcagacactggtctctacctggcggcccggcctggtgagcccaggggccttggggtggaggctgggctgggccctgtgggctgactctgcagctcctcatgctggcctatcctgcagtgcggtgtgccgagctcctgaaggaggtgagcctgacccccgaccctggcctgtgctgaagttcccgggcccctggcccagtccctggccctgtcaggagcccccgtggctccgcctcccggccctgggctgggccttctcaccccttcctgtgaacaggacaccaaacaccactggtgggcagctccagagatgagtctgtctcctggtttggaaagagctggaacctccagagtggtgaccctaggctgccaggcagggaccctgggaggctggggtcacggggtgcagagctgggtggggcaggggagcagaaatggcgccttttcttcggtgttccgtgcaggactgccggctgcttctgcccccgaaggtcccgtcggcggcggggcacagatcctgcgggcgctgcctcagggctcccatgttgggcactgcgagaacccagtgtctccctcacctcgctttgtcttggccctagaggctgggcctgttaccccattttgcagattgagaaggcgctcagggagctgggtgctttgcgcaaaaccaggcagcgaggacagaagtcccgccgtgtggccctcatcgaagccccgtggggcctccagagaccacacgggcctgagcccctgcacttctgtgtcgcaggagctgatttaatggagttcctgcctcagaccacaaggttcggcgcgcccgcccacccctgcccctcctgggcaccctgcccaccaggtcacctgcacctgctttgaataaactgtgaagtc

SEQ ID NO: 1299 - DNA, 2016 bp, Homo sapiens
tgccatggtatttcaacatgaataatttttttagcaaaaaattttattatggttgggattacaggcgtgagccacggcgcctggccagggcttcattctctataaaagcaaaaaaacaacatgcttaagattttaagatgtttaatactcaattttgcacttcaaaaatatattaagagctgattctgttgaaagagcgtgtgtgtgtgtgtgtgtgtgtgtgtgtgtgtaggggtggaaacaatgatagagattctaaataaatccaagaactgtgaagggttcagtgagaggaggacaggcaggggcatctggacatgggtgtgcatgcacagacccggctgtagccgggtggctgatcagcagcaccttgaagactttacagagtgtttctgccatctgcacccatcctggccccgcccggccctgtttcccctcttactgcagctcatcttccccgacctggtggaggggctggtgctggtgaacatcgaccccaatggcaaaggctggatagactgggctgccaccaagctctccggcctaactagcactttacccgacacggtgctctcccacctcttcagccaggaggagctggtgaacaacacagagttggtgcagagctaccggcagcagattgggaacgtggtgaaccaggccaacctgcagctcttctggaacatgtacaacagccactttcctggtgctctctgggcccagctggtgctgtagggccacgcaggcaggggcgtcaaggggtttctctgcccaaggaagacagaacatggagaaccgtcagggcaggaaccccacagactgtcccttccagcccacactctgccacctcctggccctgtcccaattctgagccaaggcctccccgaggcagaagttgcctggtcctctgtccccacagtgacctgactgggggtgagggagaaggaggagagagcccatgtgtggtgtgtgtgcccctgagaactttgtggtgactgcctttgggagcccgcaggtggccagaggcaggggtagctgagttcctggagaccccttttttgcccccaggttccccagagggcaacgccatcagtagcagtgtggtgtttcaggcagagctctggccaggctgtgccagtgtgtcccggacgcatcactaaggaagagagagtttatttagtcaactggcccaaggcagcgaggcttctacagtcccacaccccatagccgcctgggctggggcttactgggggctgaaggttctggacatgaacaagggtcaggtagaagagaaaggcttcccctacaccccagcctcctgctgtcccctgaagcccaggactgcgttgtatgctttccatccactcaccttaccccatagcatcttgcggcccagaaaccagagccatttgtctcagaccctaaatcaataatcacaaaccccaaaacgggagagagcagtgaaaacatgcagggctgtggacgggggaagggttgtggcgggtgttctgaggctgagaggacacctatatgcgtatttcctctacacacatcaccccccttctataatcttaagccatgactagcctggtggcgtgttagtttctgcccagttctaccccctcatgtgcttcttctgaatactgaatgtgactgtttgaaagctggtagaattcatccctcttactgtagataacactgcaaatcttggaattttgttttttgctgtttccagatgtatctataaatatctatacattatatgtgtgtgtgtgtgtgtgtgtgtgtgtgtgtgtgtgtacatcgggtcctcccatgtgtggtgttcttctggaggttgtctctttggtcaaggtgaacttttaatgtttattattttcttctccgcacaaagtaaagagcctaattttgtgtattctggtggctgctgtcatgagatgataaaatgtaaaacaaaactctagtcaacgtagaaagagttaactgtgctgaaaaactaataaagaacctaagaag

SEQ ID NO: 1300 - DNA, 2396 bp, Homo sapiens
tttaagatttgttaggtgggaccagcaatatttatgtagggcaaatttttccacaccactgaggcaaaactcttttgtgtactcaactcaatgttcaatgcattaagaagtttttcttgtcagactggcagaaacatgcacaatttccagttctttgtgaacgctggatactatttcctttaatcctttctgataggtctttccctggcctcctgtagttttctcagatacatgtgcttatcaatactctgatgaatactcaaagggaggcatttttcagatatgctgggttctatctctttgcagctctgtactctctgatactctgtcctttgaactctagccacattgttttttccagactttcaactctggtactctgcagggctccatttgggttccctgtcccaatgccacagcccggaatctctcttaaacttgagataattgttggactcactcacctcatttgtattctgtctcccagggataactgtccttcctgcctcctgcccactgtcttgaataccatagtttcatttattatatttgatttgtagttgttttaggtgagggagtaaatctagtcactgttgctccaacttgaataaaagcagaagtctccctggggaatttttgaaaaagacaacttcctttttttttttttttttttttgaggcggaattttgatctttttgcccaggctggagtgcaatggcgtgatctcagctcaccgcaacctctgcctcccgggttcaagcgattctcctgcctcagcctcccaggtggctgggactacaggcatgtaccaccacgcctggctaatttggtatttttggtagggatggggtttctctgtgttggtcaggctggtctcgaactccccacctcaggtgatctgcccacctcagcctccaaaagtgctgggattacaggcgtgagccaccatgcctggcaattgctacaaagagaataaaatacctaggaatacaacttacaagggttgtgaaggacctctgcaaggagaactacaaatcactgctcaaggaaatgagaggacacaaacaaatggaaaaacattccatgctcatggataggaagagtcaatattgtgaaaatggccatactgcccgaagtaatttataaattcaatgctatccccatcaagctaccattgactttcttcacagaattggaaaaaactactttaaatttcatatggaaccaaaaaagagcccgtatagccaaaacaatcctaagcaaaaagaacaaagctggaagcatcacgctacctgacttcaaactacgctacaaggctgcagtaaccaaaacagcatggtactggtaccaaaacagatatatagaccaatggaacaaaacagaggcctcagaaataacaccacacatctaaaaccatctgatctttgacaaacctgacagaaacaagcaatggggaaaggactccctatttaataaatggtgctgggaaaactggctagccatatgcaggaagctgaaactggatcccttccttacaccttagacaaaaattaactcaagatggattaaagacttaaatgtaagacctaaaaccataaaaaccctagaagaaaacctaggcaataccattcaggacataggcatgggcaaagactttatgactaaaacaccaaaagcaatggcaacaaaatccaaaattgacaagtgggatctaattaaatgaaagagcttctgcacagcaaaagaaactatcatcagagtgaacaggcaacctacaaaatgggagaaaacttttgcaatctatccatctgacaaaggggtgatatccagaatctacaaagaacttaaatttacaagaaaaaaacaaccccatcaaaaagtgggtgaaggatatgaacggacgcttgtcaaaagaagacgtttatgcagccagcaaacatgaaaaaagctcatcatcactgttcattagagaaatgcaaatcaaaaccgcaatgagataccatctcatgccagttagaatggtggtcattaaaaagtcaggaaacaacagatgctggagaggatgtggagaaataggaacacttttacactgttggtgggagggtaaattagttcaaccattgtggaagacagtgtggcaattcaccaaggatctggtactagaaataccatttgacccagcaatcccgttactgggtatatacccaaaggattataaatgaactcccgaccgcaggtgatctgcccgcctcagcgtccaaagtgctgggattacaggcgtgagccaccatgcctggcaattgctacaaagagaataaaatacctaggaatacaacttataaggacctcttcaaggagagctacaaaccactgctcaaggaaataaaagaggacac

SEQ ID NO: 1301 - DNA, 2747 bp, Homo sapiens
tacccacctgaatcaccgagtacatgttgcttgtaccgtcaggctcttggttcttggcccctggccctatgcctgcaacactgtcacctgcacgtggattgggaaccacatagcccccggacctgctaaggccattaaggacaggatggtgatgcctcggctgactgacgtgagaagattgtcatgacccatggcctctactgctgtcctaccaacagaaacttcataatgttgtgcaggcgttaccactacctagttccagaacattgccatcacccccaaaataaatcttgcattcattaagcagtcacccctattttcccccatccctgtcaaccactgatttatgttctgtctctatggattcccctgttccggataattcacgtaaatggaataacacaatagatgccttttatcatgggtttctttcacttaggatgttttgtagggtaatccatatagcatgtatcaggacttcattttttttttttttttttgagatggagtttcattcttcttgcccaggctggagtgcagtggtgcagtctcagctcacttcaacctctgccttctaggttcaagcgattctcctgtcttggcttcccaagtagccaggattacaggcgcctggcaccatgcccagctactttttttgtatttttagtagagacagggtttcaccatgttggccaggctggtctcaaactcctgacctcaggtgatccgcctgcctcagcctcccaacgtgctgggattacaggcgtgagccaccatggtcagccttcattcattttcatggagaaaaatatttcattgtatgagtataccacattttgtttatccatttatccattgattggttgtttctacttttttttagctattatgaataatattgctgtgaacatttgtgtacaaggttttagtggacacaagtttttatttttcttgggtatatatctaggagtggaattgctgggtcatattgtaattctgttcaactttttgaagaacttcccaactgttctccatggtggctgtgccattgtatattcctaccagcagtgtatgaagttacaaatttctccacatcctgagaacccctttattattttctgtttttctttttgattatagccatcctagtaggtgtaaagtggtatctcattgtgattttattttgcatttccctaaatgattaatgatattgagcatcttttcatgtgcttcttggccactagtatatcttctttgaagaaatgtctattcaagtctttggcagtttctaaatgagttattgtctttttgttgttaggttgtaagagttataatctggataacagatccttattagatatgtaatttgcacatattttctcccattttgtgggttgtcttttgtcttttttattttttattgcttgtgttttggtatcattattgataattcattgttaaattaaaggtcatgaagagttactcttactttttcttctataatttttagttttagctcttgtattcatgtctgtaatcaattgaagttaatttttaatatagtatgtgttaggagtccagcttcattgttttgcatgtatctatgcaattgacccaaagtgatttgttgaaaaatattattttctgatggtatggtcctgacacccttgtagaaattcaattgaagatatatgtatgagtttacttctgcagtctcaattctattctattggtctaaatgtttatctttatgccagtaccagcctgttttggttattttagttttgtaataaaatagacaaacatttggccgattaatcaagacaaaaagaaaagtatatagaaataatattatgaaagaaaagggggagcatattgaaaaacaccataaagattaaaaagattaagggacagtgttaacaatttatgccaatagggtttgaaagtttagagaaaatagacaaattcctagcaaaatataaattatcaaaacctactcaagaaaaaatagaaatcttatatagtcacaaggtattaaatattcaattcttcctagagacccaaatatatgctttctacccgtaactcactgtaaataaaaagaaagggataatatattgtgcaaactctagtcaaaaaaaagttggaatgacaatattaatataaacaaaagtggacttcaaaagaagcaatattatcagagagaaagagggcactgcttggtgaattgccccctgataaagacataacaataccggaagtaaaaattgacataactgcaaggggaaattgacaaatccacaattatatttgggatttaaatgctttactcttaataattaataaaagttagctaaaaaattaattttagctaaataaattagctaaaaagttaacaaggatagatctgaacaacactaggataaacttgtcctaatggacatttatagaccactataaccaaaagtggtagaattcacaatttttgcaagtacacatggaatattcaccaaaataaaccatatcctgatttataaaataaactaacaaactggcttctctcacttagcaatatgaatttaaatttcccccatatctcttcatggctttatacctcatttccttttattgctgaataatgtttcattttatggatgggccataaaatgtttatctatgcacctatagagggacatcttggttgcttccaagttttggccaatattaataaagctgttataaacatt

SEQ ID NO: 1302 - DNA, 2604 bp, Homo sapiens
gtgctgccccaagtgcagtccaggttatcgtgtgaaggaggcctgcggggagctgacgggcacagtgtgtgaaccctgccctccaggcacctacattgcccacctcaatggcctaagcaagtgtctgcagtgccaaatgtgtgacccaggtaagaggccagcacagccggcccagtctccgcttgggcagcctggatgcccccgcaccctgcaccctctctccatggccacagtgccccaggaaggccccggctgccccaggccaggtcccaaccccatctccatggatgcaccctgcaggggacgccttgaggtcagcctccggcccccgtccacctctgtctcacctctcactttgtcaccgccaggtgggccatcctgagcttggcgactgacccttatccctcgtccttggctcctctggtgcccggggtgggtgcccagacctctcctgtgcccacgtccctagctgcaaagtggaatgggatggtgctgggactctccggccggcactcgggcctgctgcttccccacagggcttcttgtccctttctcctccagatattggttccccctgtgacctcaggggaagaggtcacctggaggctggtgcccacctgagtccaggcagacagaaaggggaaccagacccagaggtggcctttgagtcactgagcgcagagcctgtccatgcggccaacggctctgtccccttggagcctcatgccaggctcagcatggccagtgctccctgcggccaggcaggactgcacctgcgggacagggctgacggcacacctgggggcagggcctgagcctacagggaggcacagggcaggtgggctagccatgaacagaagaggaagctggagtgctttgggggttcatgcatgtaggctgggatttggggctcacacctcaacctgcatgcccagttccatgcccctcccctcttgtgaaagcacctgtctacttgggctgaggatgtgggggcacaggtggcaggtgaggctgccctcaggaggggcccaggcccagcttgtaccccacctccaccagtacctgaagaagtggggctctcaccctacctgcctctgccattggaatggcctggtttgcacagatgggaaacccgtttgcggggtgggtgtctgggtgggcacgtggggcgaggacctgcctgcgggaccctgccctggaactgacagtgcaagctcggcgtcctgcccatctgggcagaaggctggtttctcccatcaacgaagccctcccaggaccttcctgcaagccctcgtcccacacgcagctctgccgtcccttggtgtccctcccggcctcaggtcctccatgctgggtacctctgggcacctcgtttggctgagccaggggttcagcctggcagggcgccctggcagcagtccttggcctgtggatgctgtcctggcccgtggatggtgtcccggcctccacgtacccctctcagcccctcctcttggactccagccatgggcctgcgcgcgagccggaactgctccaggacagagaacgccgtgtgtggctgcagcccaggccacttctgcatcgtccaggacggggaccactgcgccgcgtgccgcgcttacgccacctccagcccgggccagagggtgcagaagggaggcaccgagagtcaggacaccctgtgtcagaactgccccccggggaccttctctcccaatgggaccctggaggaatgtcagcaccagaccaagtgcagctggctggtgacgaaggccggagctgggaccagcagctcccactgggtatggtggtttctctcagggagcctcgtcatcgtcattgtttgctccacagttggcctaatcatatgtgtgaaaagaagaaagccaaggggtgatgtagtcaaggtgatcgtctccgtccagcggaaaagacaggaggcagaaggtgaggccacagtcattgaggccctgcaggcccctccggacgtcaccacggtggccgtggaggagacaataccctcattcacggggaggagcccaaaccactgacccacagactctgcaccccggcgccagagatacctggagcgacggctgctgaaagaggctgtccacctggcggaaccaccggagcccggaggcttgggggctccgccctgggctggcttccgtctcctccagtggagggagaggtggggcccctgctggggtagagctggggacgccacgtgccattcccatgggccagtgagggcctggggcctctgttctgctgtggcctgagctccccagagtcctgaggaggagcgccagttgcccctcgctcacagaccacacacccagccctcctgggccagcccagagggcccttcagaccccagctgtctgcgcgtctgactcttgtggcctcagcaggacaggccccgggcactgcctcacagccaaggctggactgggttggctgcagtgtggtgtttagtggataccacatcggaagtgattttctaaattggatttgaattcggctcctgttttctatttgtcatgaaacagtgtatttggggagatgctgtgggaggatgtaaatatcttgtttctcctc

SEQ ID NO: 1303 - DNA, 2824 bp, Homo sapiens
ttcaaatacagaaatacctgtgtattcagttacatgagtagctgtctttctgtgtttattaatacaatgggctgaataaaaacagctgtcctgaggttatctggcaagatgaggaaagagaaacaaagcaagtcattattgtaccttctcaagataagttctttattctcatccacactcttccatcagcatctccctgcccagaattttcacaatgatcctatactaaaacctaactcagtgtcacggttattaaccagtacgatagcaaggacacatgagaatctgttaatacaagcacatgcgatggcgcaggctcatgctgagcaagcaccattaacacccctcctccttcccagcgccagcacagcactgctcaacagacatgtaaacaccgggccttttatgcacagaagcaaggggagcctcagacccaaggccctatgcacaacgttgtgtgattccctttgaacggaaagctcagttagcaaaaggaatttgggtatctgataatctaaacatcattcccattgttaaagtgcttaattattcacatggcacaaaaacccaggttttgcaacccatagtcaaatccagatgcaaacatggacgggtaacacttaaaatccctgattgtacagatatggcccatctgagatccatattgggaagctgcacaaatggaaagctataaaacacaaacactcttctttcataaaagacattttttcagatagctgaaagcacaatgaatgttgaggtattttgttaacaaatggagaagccaagttcaagggaagtcaagtcacttgctaaaagatgcaaagttagaagtcaagaagtgacatctatttcggtgctctgccaatgaaagtgatttttattccttccctatagaatctaaaagaagaccaggtatagtggctcacagctgtaattccagtgctttgggaggctgaagcagggaggatcgcttgaggccagaagttcaagatcagcctgggcaacatagcaagatgctatctctacaaaaaaaaaataaataaaaataaaaatcagccaggcatggtggtgcatacctatagtcctagctgcttgggagactgaagtgtgaggaggatcgcttgagcccaggagttcaaggctgcagtgagccatgatcatgccactgcactccaggctgggtgacagagcaagaccttgtcccttaaaaaattttttttcaaagaatctaaaaggaaaaagggaagactactgagttcatgtacagctcaaagaagtggaatagggaagtttaaaagaaaagggaaaagaaaacacacacacaagaatagacactgttggcaaccctacagagtcagagtttgaaagtgagagttggaaacttgacctctgagtttgctggaggaagccagcaacatgatttagaaaggataatataatcataatggcaggaagtgagcacagtcttcttggctggagaatctcagttgcagtgtttggggcagactgactggaaatgatgctatgtcggggaccatgtttgaaagcctaaaatctgagttgacaaggagatgttccatggaggctctgggaaagagggactcgaaggcagacccccacacagcggactagtaaggtctcgctctgtcacccaggctggagtgcagtggcaccatttcggctcgctgcagcctcaacctcctgggctcaagcaatctttccacctcagcctcctgagcggctgggaccacaggtgcatgccaccatgcccaggtaatttttgtactttttgtacagacagggttttaacatgttgcccacgctggtctcgaactcctgagctcaagcggtctgcctgcctcagcttcccgaagtgctggaggtgttttatggattgagtactgttcagttgtaccctatgaaagtgacccaccacaatggcctgttttcctgagcaattctagagagacagcagaaggggctggtggctcccgtgaggctagaagggcagaacagcagaggaggagagggttggaacaaaattgggcagtggcctctgtgcttgctggctccccagccccaagccgcctctctgtgggaaccagggaacattcatactgctcgaacgtggctcttcccacagtcagacaccactggccagccaggatctcccctcctgttgaaaaatgctctcccttgcagctcccactaggaaacctggaaggccaaactgtttatgacattgtttccctaaaatgtgctcagacaccatgttttataaagtttctgtctcttctttctgttaagaaaggagaaaaaggatcccagctactcaggaggctgaggcatgagaattgcttgaaccagggaggtggaggttgcagtgagccgagattgtgccactgcactccagcctgggcaacagagcgagactctgtctcaaaaaaaaaaaaaaaaaaaaaaaaggagaaaaaggaaaaacatttccagcactcttgtccacctcctcagttggaagtgtaataaaaagattcttctggctgggcatggtggctcacacctgtggtcccagcactttgggaggccgaggtgggcagatcacttgaagccaagagttcaagaccagcctggccaacatggtgaaaccctgtctctactaaaaatataaaaaattagccaggtgtagtggcatgcgcctgtggtcccagctactcaggaggctgagacaggagaattgcttgaacctgggaggtggaggctgcagtgagccgagatcacaccactgcactccaccccagatgacagagccacgcttcatctc

SEQ ID NO: 1304 - DNA, 3133 bp, Homo sapiens
agctctgcctccagggacttctgctcgtggtggctcatcggtggcacccagcccaagtcccgggcttcggatggctggtgtgggccctcagaccccacgttctgttggcactgctgtctggctagagctagaaggcgggctctgatgggaagccacatggctgtgtggggagctgccctgttccctgagcgctgtgctggacccctgcaggcacctggtgcttatcctcaagacggaggatgttgtcttgaggaaactgaggctcagagaaaaggacttgcccagatcacagggccagtaaaaggcagctggctgactccagcaggcccagggttctttgtgccacaccacctggacactggctgtgctgtgagccgctgctacctcctgcagaagaccagtgcccaggggccctatgggtgaagccctgctggtgtgcagcaatggcatgctctgtggggagctggaagcagagctgtcctttggaacccagagggagagggagtgagcactgaggggacacaaagccgggaggcgcagggtgtctgggtagtgccaccagctccgccgtggccgggttccaaagaccagcctgcatccccacttggcacgaccgctgcagggaagtgcatgtcctttgggtcgggatggtcacctgcatttatttacctctggaagaaggagacagtgctgggacttacctcctgggcctggtcagcagtccctgggtgcgtcatggtggtccatgggcagacgtggccatgctgatgcacaggtgggtgtggtccctcaggcttgagctgtgcttgagggagcagtggagggctgcagctgaagtgctgggctgtgtgttcctacgattggacaaaacatccttagatgttaaaaacccctatttacccataagcatggctgataaagcagatacgtaaacgtcagatgtacacaatatgatctgcaaaaatggtgcataccagtttgttaccccgtgtactaaatattttctttatgtctgccaagtttttacattggatttgagagattgtgatcgctttcagtcacctaagtagcagccccgtgcaggtgtgacaagggtgtcagggtgccccaccagcccgactattcagggagcagtgtcccgggtggggtgggctgcaggcaacggccaggcctcctggaggagaagctggcggccatgccgcatgggcagaggtaggcctggaggcagcggcagggatgggacagggggcaggagatgtgggtatgcacagggttggtctgggaggtaggctggaaaggggctgggttctgccatagggcccagagcgggcaggcgtcccgggagtcttgagcgcggcatggtctctgcggccctaatttcgcagtctctccccagatcaccgcacagcagatcaccacccctggcgcgcagcagaaggttgcctacgccgcgcagccggcccttaagacccagtttcttaccacacccatctcccaggcccagaaactggccggggcccagcaagtgcagacccagatccaggttgcaaaacttcctcaagttgtccaacagcaaacacccgtggccagcatccagcaagttgcctctgcttcccagcaggcttctccacagactgtggcgctcacgcaggcgacggcggccgggcagcaggtgcagatgatccctgcagtgaccgcgactgcccaggtggttcagcagaaactcattcagcagcaggtggtgaccacggcgtcggccccgctccagactccaggcgctcccaacccagcccaggtgcccgccagctccgacagcccaagccagcagcccaagttacagatgagggtccctgctgtcaggctaaagacacctactaagcctccgtgccagtagtcagggcagcagggctgcctctcatctaaagcaaaactaccttcctcacagaaaacgctttattagtgaaccctgggaccatgtcacgcaagagattcagcactgggaaagatataattgaaacaaaatagtgtaatcattttattaaaatgcatcccacactgcaggacaaatggtccttatggagtgccgtgttctctgtactacgtggctcatggaaaaagtgacaacatggcttcctctaaatcatttcacctttcagtccccacccgcacccgtcccctagagccatagtactgtgttctgaaagccatttagaatttctttgtgagcatgtagtgctttgcacgccacagaagccgtctgccgtgtgtgaggagcatacaatggactttctaaagataaggcgtgggcttccacagtgtctgccagagtttagttctttataccttactgaaaaatgcctcgtggtcttcgcagaggggaaggcctgtctaaagtcaatcatccgagatgggttttccattccaaagaaaggcaatatggttccttccttccctcctaaaatatgacttaacttttaagagaaatgttctgacacccacctaaacacacaaggcacgttcctggcctgtgttcaagggaaatgatcagtcattgcattgttattccaaagagcagccaacagtggcctcccccaggccctaccctgcaatgggattcgctttcattaatggaaacttctgggactgatgcccaactcagtgcactcaagacgcatctccagctttcgggggaagctggtattggacatagtgtgttaaacagctcctgagaacctttgggacactctgccatggctggcgtgaggcccagaggaccacgcagaggcaatggtagtacagatgtcacagctgagggtacgatgaggcctgggctcagtgagccaggacgaatgtgacagacaccccttgctgccacagtcagccctttgacgaaggtgggctggtgattctggaagtattggctatagcggtgggcccagtcaactcttccttgtggacttacgacagcagattttctctaggataagcttgtgtggttctgccagtgaagcagagaaccacctgtgctgttgtggaaggcgtgccgttgagggggaaaacgaagcccagtatttgctactgtttttcctttttttactatgacaggaaaataaatgcaattttagtggaattg

SEQ ID NO: 1305 - DNA, 2750 bp, Homo sapiens
ttttagtagagacggcgtttcactatgttggccaggctggtctcaaactcctgacctcatgatctgcccacctcggtctcccaaagtgctgggattacaggggtgagctacagcgcccggcctacaaaattttctagttaaccatcaggcaatcaaagcaccccactctgccaagcgttctcagtgacaagggtttctgtgctgtcaggctgctcagccatgctccctgcactctgcgccaccttcccttgcactaggtgtgctacttactagctgtgcggcctcagtccatgccgagcaagggtgcagggaatgagctaaggcacaggaagcgctcggaacagagcccggggtaaaggtgcgcggtcacggtaagcactatgacagcccgaggtggcagggtactcaccagcggggcctctgactctgtagccgggccctcattctgtgcctcatccttgggctccttgaccacctcctctttgatggcttcttcctccttggtggcttcttccttggccgcctcctccttctcaggttcaggtggggacacgaccttttcaggaaggctcagtagcatcttataaactctatagccaaaatccctctggagcatctccagaaacagctcggccagcaccatcacctgatggggaggtgggagggtccatgagcatcaggaagaaagactgcttcaggcccacaaatcccagcccacagcctccccaagactcttgacacctgcctcaaaagagatcctttcctttggcctccgatcctccacaatcccatggagggacaggtttacacagccagggcgtgcgatgacagcaggttctagggggggtggaggggcctctgggagatcagtgtccgtttcctgctgtgtggtggcctctggagtttctgcgttccgtctagaagtgtctgctgcttgctccaaggcatcaggtgcctgttcagtaggctccgtttcctgtgacaacagctgaaatgagaccctctgggtcccgggattaggccacctatatcccccgctgctggctaaggcacagccttaccccttgtgcctcctgggttgggggagctgcctctgcagctttctgctggcacagggcctcccactcctccaaagtaggcatgatggtccagacatccggcaggtacaccaccactgtctgaagccgccgggggggtcccggctgcaggtactgaaactcggcaaagcgccacctgcacatggcaaaaggaggtactaacttctttagtgacaactccacgcagacaccacgttcacaggcaagggcttcagtttccagtcagcactcaatgagcacacactgcgaaccaagctttgaagacacaacaggaaagctacagaccaagtcctcaagaaatgatcagtcagtggggaggccgcaaccacacaagcaccctacaaggtgcaaggacaactccagggagtctcaagtgcagcctggtggctcagccagattttggcatacaccccaccctaccctgaggcaccagagggggaaggaacgggactagggggcagagagctaaccagcagaaaggggcagggaccgggccttcccaacaaaacctccccaacctggtgcattggtgcagctgaggctcaggaagcccactcaccacttggtacagccgctcaaatcaatgccagtctgggcctgcgcacagcggatggcggtacgcaccagcacctgcgggtcagcctgggggtcgaggccatccagggaaggagaccattcacccccaaccagcactgcctcctcttctttcctgcccagcaaaaactgcaagaagagatcagggatacaaaacaaaaaactacattacctgggtctcccactgcagggcaaggctgccacccatcaggatgaaggcagccggaagtggggaagtccaccacacagtgaggtctctatctgcaaacatgaaccagccacctcgctctctctgactagtcgtaacagctctgagctgcaccttcctcctgggtgaaatgaggggtgttcggctctgagatgcctcgttttatgcattcaggaacaggagccgaacactcaaaacatgacaggttgtgcacattacccgtgaatgcatctcctcctgctctccagctcttaccttaacctgcttcagaggatgctctggcgtctcccttggctcagccatgtcatccacaaggagcatgcaacaacgatacaattcctccaaccccggggaagagagcagcagtacctgtgcaggaggagacactcagagctgccttcagcctccagaaatcagataagtgagagacgcctgtcagcttaccttcgaactataagcggggtcactgtctgcagtgatgggctcagcaccagcgtctggagctgcctccttttcagaagagacctggatccggcttggatgatggagggaaaagggctggctcagggggaaggctgatagccaactcagatgcacggacagaaaatctgaggggaccaggaggctgcggtaacggcgctggagttctaggaagtcacagatggggctacaggaagacagcaagggaatccagactgagcaaagactaaaacattcgaaatgaaaccatcaaagatttgaaaaaatgggcgaattttttttcagtctgagaacttttgaagtaaggcacctctcaaggaagctagatcagatctgaccacttaatttacaaactctagatggcaaaagtc

SEQ ID NO: 1306 - DNA, 2196 bp, Homo sapiens
tcggcaattttaatcctcaaatgcaatccttgtcagattgagatcacagaaacaacaacttaaaataagtaaattaaaaaggccaacatttaattaaaggacacacactgttattaaggggggtgtgtgtgtgcgtgtgtgtgtgtatgtgtgtgtgttgctttatctttttaatgctctgtcttggaagggaatgttcatatatatatgtatatattttatactcacctatttgggaaagcagaagtgaggttatcgcttcaagtgactgctttagcagtgaggttggttatcattggttcacgtgtttgtatctgaatgtgttaccatcagtagaatctccagcatgtggagaagagagcttattagtcatgtttcttttttcagtgttcatgggggagtttatccagatgttttacttgtttcagtctaccttagattgtgctgaaatgtcctcttctgtggctcaggagaaagcgtagaaaggccattcatgaatagaaatgagagacccttttagcaagtagaaacaacctcagtttgctaaaggttttcctcttaactcttcacactcaccctttttatataggtttctactcaggtgacctgaaggatatgagaaacatttttcttcctctgtgaaacactaccactcccagactttaacacagacttttcattaaattccattttaacattttaatgaaaaaggtggcttttttttttcatgtgccagtgaaagaggaaagttctgctagttatgtgagactcactttctttttttttgagatggagattcgctcttattgcccaggctggagtgcagtggcgccatctcagctcgctgcaacctctgcttcctgggttcaagcgattctccttcctaagcctcccgagtagctgggattataggcacgcgtcaccacgcccggctaattttgtacttttagtagagacagggtttctccacgttagtcaggctggtctcgaactcctgaactcaggtgatccgcccgccttggcctcccaaagtgctgggattacaggcgtgagccaccatgcccagccctcattttcaacagttttagaaataattactatctgaaaagaaccagaatgacagaatcttagcactggtagttttacatagggtggtgttatggtcctagataggtgtcctgtagaaatgttaaacacgggtgagatgtgggaagtggctgttttctactggagatggagaggagccacctccccacgctgagcatctgtgggcatcatgaacatttggaacttaagccacaatcatttgaatttttttggatgccccagttgttttccttctgtcaccaacaactttgggacttccctactgcagaattgtcgcatattaagtaggagacctcagttgttatggagtttttctcctccctagatacctagatctgtgaaagaaatccacatagcaaacgcttgtctagagctacatctctggacattttttttcctttttctgtagcaatagtgaaaaatttcttattcttacagtccaaatatatgtaagtgtacttaattcttaagaagtttattttgacactgacattttagtggtattgatgatacagttctacctttaattttatttgtttttttttttaatcattagagatggggtctcactgtgttgccgtggctggtcttgaactcttgggctcaaacagtcctcctgcctcaacccccaaggtgctgcacccttaattttaacttgtttcatttaagttacatatttgaaatgtcagactgtactttatgaactgccttaaattacttttcaaacaagatgggttataaataaggtgatgctttggcctattatttttaatatctacatttttacttttttgtgagataaaaactaatggggctggacacagtggctcacacctataatcctagcactttgggagacccagagaggcggattgcttgagcctaggaattcaagaccagcctgggcaacatggtaaaaccttgtatctacaaaaaaaatacaaaaattagctgggcttggtggtacccacctgtagtcccagctacagggacagctgagatgggaggattgattgagtccaggatgttgaggctgcagtgggcaccactgcacttcagcctggatgacagagagagaacctgtctcag

SEQ ID NO: 1307 - DNA, 1762 bp, Homo sapiens
actctggggctggcgcaagccctcattgacgccgggcgcgtgcgttccgctgcctccagcccctgggcaccgctgccgtgcgctcgctggcggggagaggcctgcagaagtcaggccaggtgtctctctttcccttgggcccgcggcccaaccccatggcaccaggcagcccccagcggtattgcgacctctgcgtcagtcgcgctcagtccctagatacaggtgtgccggagaagcccagggaagggatgcgtgaccatcactacaccctgccccacgacgcggtgggacgcgcaccctgaccctccccagagccgcgcccaggaccttgcctgggcggaaaatggcagccgttgccgggaaggagcggcgagcgagaggcaggccccggccagagacactgggagccatccctaggagggagggaggcgaggcgggcttgagccgagccttcaagccactggcgcaggcgccattgtcctgtgagacttcgctgagaaaactcaaattcaaaggcatggctctgtgagcgctgatgaggctgcccgcacggctcccttccacctcgacctctggttctacttcacactgcagaactgggttctggactttgggcgtcccattgccatgctggtattccctctcgagtggtttccactcaacaagcccagtgttggggactacttccacatggcctacaacgtcatcacgccctttctcttgctcaaggtactgtcccagggcccccactctctcctgtcatccccattctttgcacacctggcaggaaggtgatgctaagccctgtgtcctgactcaagcacgctcctgcctgctgctggggggtgaaggctgtgacagagcagcatgtccagggcctggggcccggggaaggcggagctgccggtggcctggagggatggaaaatatgccccaagaaagggcttttgatttgagcctcagcctggcgtgccagtgggggaagcagagaggtgttcaggtagaaggacctaaagacaaggctgtgcttgggaaaccgtaaaacatttggggaggctgaggcagaagtgactggaggtccagggagaggtcaaggacccactgggaagagaggaagaagccaggtggcaggagaggcagcagcagcagctgaactccatcctctgccctggagagccctgagatgtcactgggagcacgagcaggaactgctggctttgcactttgccaagtaaggcctttaaaactactataggttgagcatccctaatccaaaaatctgaaatctgaaatgctccaaaggagtctgaaattttttaagcactggcatgatactataagtagaaaactcggccaggcgcggtggctggagcctgtaatccctgcactttgggaggctgaggtgggtggatcacttgaggtcaggagcctggccaacatggtgaaacccccgtctccattaaaaatagaaaaaattggccaggcgcagtggctcatgcgtgtaatcccagcactttgggaggctgaggcgggcggatcacctgatgtcaggagttcgagaccagcctggccaacatggtgaaactccatctctactaaaaatacaaaaaaaagtagccgggcatgctggcaggcacctgtagtcccagctactcgggaggctgaggccagagaatcacttgaacccgggaggtagaggttgcagtgagccaagatcacgccattgcactccagcccgggcaagacagtgagacttcatctc

SEQ ID NO: 1308 - DNA, 2222 bp, Homo sapiens
atatgcaccagtgtcaacataccaggaaagaaacagcaaacccaaaaatttggatctgcaatggacagctcttaccttgacaaccaaggtattgctccctccaagaagccaatgccatcttacaaatgccaaagccactgggctaaccagcagaccctttcccaaagagccccacttggcttcaccggccagtggaccaaccaacgcagattccaatcagcaagccactgtgggactgcacgtcactcactttgtccagctagatcaggtacctttttagatcctgtgtcctcaattatactggactgtcaactgcctgaggtaaggaaattaatcttttacttcttcagccttcgccttctcaacttgttccagctacacttatcaacggagttgagttcttatcaggtcctcagacatataaatgatgcaaacctagtgccatttctggtctggcctaactctaaggtagaagagttagggaataaaagttaataaaagttttcagtacatttatctccttccattgttccagagccttgtctagaaaaatctgttttcttcactggtcctgtcgggagaaatctcttgaggttatctatcaggtccagtcctacctgcatattcctaaagccacagagaatgaggctatagcttcatgttttaacaacaggaaaccaagcacaaagactgaaactataggacccaggtctgtatcctctcagggaaggcagaataacaatgtcatgtaatgatgatgataaaaaaggtctaacgtatcaaataaacactaacactatcctgttggctaactgagcccctctacctgcccaagtcctattcctgggctggggagaggcaacaaacagtgccattaggagcactgagtctctcctcccacctctttctgaaatgtcagtcattggtatctcaggtgccagtgctggaggctgcagactgaccttgcatgtcaacagctgattaaaacagccatttttatggcctgcttcagacacgcacatattatcagaactaattaggctgaacaattttcaaaagtcctaagccacgaacaactcaaacctgtcagacaagtcatgcacctgactacttcaaacaccctctttacctgcagagtcacgcaaggcagagctttcactcgtctatgcatttcttcacctatttatcaggactctttctgttagatttgaaatgggtcagggcagtgagtcttgggcctgctactccacaaatcaagcattctttctaggtctggctcttgtgctacgtgtacaggcaggcagcccctcccctgccccctcattctgagggctctctgggagcaggcagaagcattttctgctagctgtgccctcacagtccttaagagtacaaaacttaatggtacaggagaggagacatcaccccccaccggctggctagatgctgctgctggaagctgtgagtctcttaccacctcctcactgatctttgttgggggaaggggcactgttggtgaatcagcatatttttgcagcctagagaaagacaaagccaagagcctttctgctcagagtctggcagttatggggtctagaactctactctgactgttcctctgaaaggaacgtacaaacaccacaaaatgttccttttaaacatttatacacgtaagtccaacaagttggactggcttatcagaaacagaccaagggaataaaataaattccaaaggaaaggaaacagacaatacatcaaaactaagacattctgcaaatcaattggcctagattcctcactaatatcagtatcacaaaggacaacaaaagttgtaggaactgttctagtttaaaggaaacagaagagatatgacagctgaatgtaatgtgcaatggatgattaaaaatacagctataaaggatattactgggataattgggaagttttgcatacggagtatattagatagtatttttgtaataatttaaattttgctgagagcaatcttgtagtgtggttgtgtagagcaatatatatcacactgaatttatgtgctgtggaagtatttagggatgaaatctaatgatgagtacaactaaatctcaaatggttcagaaatatgtgtgtgtgctcgtatgtattttacataaaacaaatatgtcacaatgttaactggtgaatctaaatgaagggtatatggttgttcattatactattctagc

SEQ ID NO: 1309 - DNA, 3075 bp, Homo sapiens
aagaaggtgccgcggcggcgccggagatgtgtaattaagtgaaccatatatgtttcatcatcatggagaccttggagaattatctgagcaccaggttcatatgtattcgatctcagaggcatctattggacaacaaaacactctttcagttgtgaactttatttatttattattattattttttgagacagagttttgctcttgttgcccaggttagagtgcagtggcacgatctcggctcactgcagtctccgcctcccaggttcaagcgattctcttgcctctgcctcccgagtagctgggattacaggcatctgctaccacgcctggccaattttttgtattttcagttgaaacgaggtttcaccatattggccaggctggtctcgaacttctgacctcaggtgatccaccccccgcctcgtcctccaaaagagctgggattacaagtgtgagccaccgcgcccggcccagttgtggactttaacagagggaagctttaaacatgtttaaccacaggcccaatttgaacaaagatacttcaatcattatagagaggaaaacagtactttttgttcaattgtgcaaactctccaagtatctaatggagaagtagagaagaaccctaatgaaactgagtgtgaatgaggctcagctaggcttctacttgggttcactttctcatctgtctgcctgtcctgggattgaccctcgctcctctgaagaccagcctgaaagccttaaaactggtcagatgatggatgagtctgatgaggactttaaagaactctgcgctagctttttccaaagggtgaaaaaacatggaatcaaggaagtgtcaggagaaaggaagacacaaaaggctgcctcaaacggcactcagataagaagcaaattgaaaaggaccaaacaaactgctaccaagaccaaaacccttcaaggccctgcagagaagaaacctccgtctggcagccaggcccctaggactaaaaagcaaagggtaaccaaatggcaagcaagtgaaccggcccactctgtgaatggggaggggggtgtgcttgcctctgctccagatccacctgtgctccgggaaacagcacaaaacacccagacgggtaaccagcaagaaccatcgccaaacctttccagagagaaaaccagagagaatgtgcccaacagcgactcccagcctcctccttcctgtttgacaacagcagtgccaagtccctccaaaccccgcacagcacaattggtcctacagcgaatgcagcagttcaagagagcagaccccgagcgtttgagacacgcttcagaagagtgctccctcgaggctgcgcgggaagaaaatgtcccaaaggatcctcaagaggagatgatggcggggaatgtgtatgggcttgggccccctgccccagagagcgacgctgcggtggccttgaccctgcagcaggagtttgcacgggtaggagcatcggcacatgatgatagcctggaggaaaagggtttgttcttctgccagatttgtcaaaagaacctctcagccatgaacgtgacccgaagggaacagcatgtgaacaggtgggggcagcttgggccgtcgcctctcccgtgtatgtgaccagaatccccaagcaccccagggctggagtgcggatctccacaccttaccatgacaacagcacctcagctttgttgtcaacctacccctttttaaaaataacttcgttgagatacaattcacagaacatatagttcacccatttaaactgaacaaatcactacttttgggatattcacacagttgggcaactgtcaccacaatcacttctggattattctcatcacccccaaaagaatccccacacccattggcagccactccctattgcccctctctcccctgacaaccactaatcaacattctgtctggatggatttgccgattctgaaattgcacagttgtccttttgtgtctgccttctttgacttaatatgttgtttttgaggttcatccatgttgtagcatggagcaggcttcattcctttttatggctgagcagtatctcattgtatggctagactgtgtttttcccattcttagatgaggaatatgaccatggtttatcctttcgtccattggcggacatttggagcatttctaccctttgggattgtggatagagctgccgtgaacatgggtttcatgtatttgtttgggtacctgctttcagttctttggggtctctacttaggagtggaatttctaagtcatcatgtaactgcatttaatctttccttgctttctttagccaactttgctgacagatacctaagtgtagtgtctaggggctgactgccgggagacggagccaggctgtgtagaggggattggctttggggaacttgctttgaccacagcacgtctgtgttgacctggacccacatttgctccaatccacattcctggggagggtggttctcctgtattgactgttttccttcaggtgcttggatgaagctgaaaagacactaagaccttctgtgcctcagatccctgagtgcccgatttgtgggaaaccgtttcttaccttaaagagcagaaccagtcacttgaagcagtgtgctgtgaagatggaggttggcccccagctcctgcttcaggctgtgcggctgcagacagcacagcctgagggtagcagcagcccacccatgttcaggtaagtcgacgaaaaggaagaaaaccaagccaaataatgctgtgtgcactcagggctttttctatttaaaaaagctttttatgggctggacgcagtagttcacacctgtaatcgcagcactttgggaggccaaggtgggcagatcaccttagatcaggagttcgataccagcctggccgacatggtacaatctcgtctctactaaaaatacaaaaattagcatggtggcacatgcctgtagtcccagctacttgggaggctgaggcaggagaatcacttgaacccagaaggtagaggttgcagtgagccaagatcgtaccactgcactccagcctggacagagtgagatcctgtctcc

SEQ ID NO: 1310 - DNA, 2469 bp, Homo sapiens
ttgaaatgctcgatgatcttctcttcccgcacgttctcgggccgggcgtggcggctcacacctgtaatctcagcactttggaaggccctggcggaaggatctcttgacgtcaggacttccaaaacagttgggcaacacagcaagaccccgttcccaggctgggggcaaagccgggctcggtggctcacgcctgtaattccagcactttgggaggccgaggtgggcggatcacctgagctcaggagttcgagaccagcctgaccaacatggtgaaacccatctctactaaacatacaaaaattacccgagcgtattggcgggcgcctgtagtcccagctacatgggaggctgaggcaggagaatcgcttgaacccgggaggcgaaggttgcagtgagccgagactgcgccactgcactacagcctggatgacaagagactcccgtctcaaaaaaaaaaaaaaaaaagacacctttctttgggcctagtgagcaaacattctacgcagtgcctaatataagccggcccaggcaccacccaagccttcggccaggactgttttcccgtttcgagaaggctccatcacactccacacgggatccagtcaacagccgttccaaacatggcgcgggaaggggtggaagacaagccagcgcgacgccgtccagcctcatccccggggcacaaaggggagactaatctccaggaaactcggggtacagaatcgataaccccacaagaaactagtttccgcgagtgggccttaaggaaaaagcaggtcgggcacaagcgagctgttcagacgcacttcacagcaaagactcgcggacaacacagcgagacgaaaacggccccgtgcgcaggcgcgcggaaacacgactagcgcgcttcgggacgacccctcccccttccctcaaaggccaaggaagtggctccgacgcgcttgcgcgaggacggaatgttgaggggagggggaattctttcccttcattgtcagagagaaccgcccccgcacggcgagcgcgcgcgcgctcacgcaccactctcacactccggcgcgccaaaggctttccgcttggcgtctcgcgcatgcgcggagggggaagcagtggcgaaattggatgctttttgctgagtttctcagagaagtttctggaaagatggagccaaagggacgctggggggtggggagcgccaggaagcaagcgtttgaaagaaagcgaaaaaacccaagcgcaccgcgacacctccaaccttcgagccacggcccaagcagagcccaaggccactgagaccctcacgccagagaaaaagcacagggaccgcggcagccgctcctccctctgccactgctcagcccccgagactccccagcacggggagagggcagggggtagccatgagaaacctagagcgctcactggacttttgcgaggtggaaggaaagccgaaacccgccctttggagccgcctgtgcgcacgggccccgtcgagtgggctcagtacgttaggactcagcgtggccgccaaagcattggttgggggcgtctttcactaatttttcctaggttttctctcctatcgggctctgtggtcctttcaccacccatcttcactttggtggcctgacgctaacgctgcgagttggggaaaccgtagtaaccccgggcctgaggggcgtcccgggcggcggtgctccgtttcttccagcggttgcccctttaagaaaaagccccccggagaggggcccgtgtggctgagtaaaggtggcgtgcgcccgcacaaaggcgccgcgttgttggcgggctccggaccctgttgcccctgggcggggcggcgtgggaagaccggggcgcctgggcggggagaacgacgttggcgctagcggggcagggcagggggagggagtcacggcatttagcaggtgcttctccgcgaccgagcgactgccattttgtggtgcggccgccgccatttcgcgcggccgaggggcggggtgtgggcggagcggcgggcgcgcccgggctgtccctcggggcggcgggctaacgcggccgctttgttcttcgcttctcggctcgaggccccagtctcgaccgccgaccgcctcggaaccgggctgcatccgagctgccacgcggcgtgtgaaccttgaagcgcggccggggaatccgcaaggcgccgactctcttcctccttgcaagcccttcgaaagtgagatttctcaccccacccttgcagggtggagagaacacgtttcaaaaaggggatgcctagaactcagccgtgggaagtgcctgtctaaagccttgtgctggtgccagtagcaaacccgtgcgcgtgctcggctttgagcgatcatggagctctgcaaatagctcaactgcagagcgtgccccttagagctcctgtgctgctgggaggcctcataaaggtgccaaaaccaggtgtccccagcggttggcctcttt

SEQ ID NO: 1311 - DNA, 2545 bp, Homo sapiens
aaagcagaacaatggctgggggtgagcaggtggccttggccagtgctctgccccaagggccctttaccagagatcaggggtttgtgtccctgcctaaccaggacacctccgatctccacctgcaggccctggaccactgtggcactgtggacacaaggccgcttctgccccttggacgccgagccccttcccacctctgggatcttgcactggctattgcttctgctctgcctggaacttcttccccggatccctgtgaaatgtcacctcttcagagaggccttcaccactgtctttcctgcccagttcttggttgataggttcctgtcagctccttctgggcaggagcttcttgtgctgtgtgctctgcctagagacagtgcttgccacgaagtaggtgagcagaccctccatgagtggcaggaaaggtgggtgcaccctcatgcccctccggagtctggcctgggctactcagaggccagcctccatctgaggtgggtttgtctggggtggcgtcagcccctgcggccctctctgggcctctctgcattggcattgttccactgcagcctggggcctcgaccaacatagtggggtcagggtagaaaccagattgtgaaaggtgaagcctgagactcctctgccacgtccctgagatgctgtgaggctgccgccaaagaaacatgagcttgctggggccaccctagggtgacagctaggagagaagaaaaacaggcagccaggtgagaagggagagccttgggctggctgcagctccaagctggctagagggcaacaggcagcctcctgtgcaggacagacgcatgaagacagccaccctgtggaggttattcctggatactaggtgggaaagtcggcaagcaaaaggacaggtccagctcaagcttctaaaagcaatgctgggggacggtgcagcaaggtgttcctggaaatgacctcggcaacacatcttagaagatgagcaggacccaacctgacagatacacgctgcgggcagaagaggccaagctgccagaggctctgtgattggctgcggcacgatgacccgcgcacggattggctgcttcgggccggggggccgggcccgggggacagaatccgcccccgaaccttcaaagagggtaccccccggcaggagctggcagacccaggaggtgcgacagacccgcggggcaaacggactggggccaagagccgggagcgcgggcgcaaaggcaccagggcccgcccagggcgccgcgcagcacggccttgggggttctgcgggccttcgggtgcgcgtctcgcctctagccatggggtccgcagcgttggagatcctgggcctggtgctgtgcctggtgggctgggggggtctgatcctggcgtgcgggctgcccatgtggcaggtgaccgccttcctggaccacaacatcgtgacggcgcagaccacctggaaggggctgtggatgtcgtgcgtggtgcagagcaccgggcacatgcagtgcaaagtgtacgactcggtgctggctctgagcaccgaggtgcaggcggcgcgggcgctcaccgtgagcgccgtgctgctggcgttcgttgcgctcttcgtgaccctggcgggcgcgcagtgcaccacctgcgtggccccgggcccggccaaggcgcgtgtggccctcacgggaggcgtgctctacctgttttgcgggctgctggcgctcgtgccactctgctggttcgccaacattgtcgtccgcgagttttacgacccgtctgtgcccgtgtcgcagaagtacgagctgggcgcagcgctgtacatcggctgggcggccaccgcgctgctcatggtaggcggctgcctcttgtgctgcggcgcctgggtctgcaccggccgtcccgacctcagcttccccgtgaagtactcagcgccgcggcggcccacggccaccggcgactacgacaagaagaactacgtctgagggcgctgggcacggccgggcccctcctgccagccacgcctgcgaggcgttggataagcctggggatccccgcatggaccgcggcttccgccgggtagcgcggcgcgcaggctcctcggaacgtccggctctgcgccccgacgcggctcctggatccgctcctgcctgcgcccgcagctgaccttctcctgccactagcccggccctgcccttaacagacggaatgaagtttccttttctgtgcgcggcgctgtttccataggcagagcgggtgtcagactgaggatttcgcttcccctccaagacgctgggggtcttggctgctgccttacttcccagaggctcctgctgacttcggaggggcggatgcagagcccagggcccccaccggaagatgtgtacacctggtctttactccatcggcagggcccgagcccagggaccagtgacttggcctggacctcccggtctcactccagcatctccccaggcaaggcttgtgggcaccggagcttgagagagggcgggagtgggaaggctaagaatctgcttagtaaatggtttgaactctc

SEQ ID NO: 1312 - DNA, 2558 bp, Homo sapiens
aggccttccaggatagaccctcaagagcccactcactctaaaccactagccccaatggagctggagccaatgtacagcaatgtaaatcctggagatagcaacccgatttattcccagatctggagcatccagcatacaaaagaaaactcagctaattgtccaatgatgcatcaagagcatgaggaacttacagtcctctattcagaactggagaagacacacccagacgactctgcaggggaggctagcagcagaggcagggcccatgaagaagatgatgaagaaaactatgagaatgtaccacgtgtattactggcctcagaccactagccccttacccagagtggcccacaggaaacagcctgcaccatttttttttctgttctctccaaccacacatcatccatctctccagactctgcctcctacgaggctgggctgcagggtatgtgaggctgcgcaaaaggtctgcaaatctcccctgtgcctgatctgtgtgttccccaggaagagagcaggcagcctctgagcaagcactgtgttattttcacagtggagacacgtggcaaggcaggagggccctcagctcctagggctgtcgaatagaggaggagagagaaatggtctagccagggttacaagggcacaatcatgaccatttgatccaagtgtgatcgaaagctgttaatgtgctctctgtataaacaatttgctccaaatattttgtttcccttttttgtgtggctggtagtggcattgctgatgttttggtgtatatgctgtatccttgctaccatattgggaacagccaaaagaagttatagaacaagaatttaaggtgactctatctgaagtgtatttttgtacttacagggtgacattcccaaccaaattaccctagttatgatgaaaaataacttcagcatttcattaaagactctgctagtttaatatgtgacttgtatccccactgcaaagaccttatgtgtgaagaatcacattaattgtaatttttgcttcatgacatagtctcatcattttccatacatgatagatttctagtcagtcagttttattcttataagcacccattaaccccgagacaataacctactatatctatgtggcttctcccattctcttcctctacctcactccatctgataaaaaaccattctaaatctcatgttcattattcccatgctctcctatttctatcatattaatgtatctacatgttttccttaaatatgtttttatattagttttaactataagttaaagaccatattgttgtagataaatttttttagtactttctcttcatgttgtatttctaagattcatccatattgttgcgtgttgctatagttcatttgtttttattgctgtttagtatttacttgtgtaaaatatctggcttaatgttttcctagctatcaccatcaaaaactctttccacagtgtgttgaatttttaatatgacaaaaatgaaaatgtaccaacaattttcagtgacttcacctccattctgaaatcctgatgtttccaaatatctctgaacacctcaagtcctagggacaactgagattatattaacattaatctctgaatgttgccaattctaggccttcacttggttcatgtaggaacaccaagtccctttcaaagcaccacatcttcctctaatcaatatttcttggagtccctagggaatgtcttacatgcattcaaacaatcaccatttctggagatacactacagggtcaccataaactctgctacccttaggttccatcactatggaagctgagtttcaccagaaggcacttttgtcctccattacgaccagcaaagccagctaagccacagctgctggcctcaaaaaatgtgatgatcaatccacactgctcccactggcctctgttacccttatcctggcctttgagtgcagggcatgatgtcctgcccgtactgagatgctgatctctgccagttcatgttcatattggcattaaaattttaaggtcccttgaagagggaggaggcaaatgtctctgtcttctatgtgatacattctgctgtttttttctctatggtgaaaatatgtaaaccggttttgggtaccaaccaccaggctgtatatggaggctctcctcctttctaaccctgctgctgatttggaattaccttgccaagcccctttgtgccttatagtgaactttctctaagggacctgtcatctcttatcattgtttatccattttctagattctgaacccaagaaagaacaaagttcaagattttccatgtctttgtaacacttagccctgtgcaaatcagagtatgtgagtggaagaaggggtgagtcctaactgtacatctcggatataacaaatgtgcaaattctgattgattgccctgtaaaatgaattattctcatgcagtgctctacttgacttttatctttgaattcacaactaaaaacccatagcccagaaatctaaaaaaagtaattttagtggagcctttgaaaataaaagaccattggaaaaagt

SEQ ID NO: 1313 - DNA, 2052 bp, Homo sapiens
aagcgaagacttggcctgccacaccctaagtaccaccacccaccaccagaggcgaccgccagcccccgtcgccatcagccatctccagggctgaggaactgagcccatgtacctgtcacaaaacaaacaagcaaaaaacagataaatccctcagagacaggctagccttgacatggaccccgattctcacctggactccaaaagctatcttgacctactggcatctctgacccaaatcttaattgcccccatcgccctctacatccccccagcactgaccctcaccaggactccagccccaattccatcccaaatctgtgtagcatctgcttctgccgattctaagagccctagcacctgccaagtccccccattacccacctgcccacactcagaagcctctttggtgggatgctaatgggaaggagtcttgcctctctggaggcaggaggggctggccttgtgcccctccgggcctctgagaggtgggcgcaggagaacagcactcacgaggggacctccttcaccctgggaaagggtggtttctttgctatttcacagtcacaggctgaatccttcacttggccctgcccaccgtacaggtatgctcactgccggctttagggaggccagaaaccaacctgctcctgcaaaaagaatccaggcttgttctgagtgcctgctgtaggccaggcaagttggtcactgttgcatgaggggcagtgcctctcactcttgggcctgatgccaagggaggtggcctgtcccggtcgcatgcagacatcctggccatcccagccacacatgcacgtgagaggctgggtgccggcagggttcctgagggactggaagatgtggccccctgcctgcctccttcctcttgtgaatataaggggccagttcccagcccaaagccccacccggggccctcatgtttcatcaccaacaggcctactgtctggctccttttgacctcatcaaagtccggctacaaaaccagacagagccaagggcccagccagggagccccccaccccggtaccaggggcccgtgcactgtgcagcctccatcttccgggaggaggggccccgggggctgttccgaggagcctgggccctgacgctgagggacacccccacggtggggatctacttcatcacctatgaagggctctgtcgccagtacacaccagaaggccagaatcccagctcagccacggtgctgtggcagggggctttgcaggcattgcttcctgggtggcagccacgcccttagacgtgatcaagtcccggatgcagatggatggactgagacgcagagtgtaccaggggatgctggactgcatgtagagacggggtttcaccatgtcggccaggatggtcttgatctcctgactttgtgatccgcccgcgtcggcctctcagggtgctgggattacaggcgtgagccaccgcgcccggctgccttcacctcttaaggagctctgagactccacttctgagagtccctgcggcctcccacctccctgcctttcaaagctctctcccccatgacccaggataaccctatgtctcctcccccagaatccttcagtggctctcatcaccttcaggaaaagcccaaactccttccaccctccaggttcctccctccccacgaggctttgttctcctggggttgcttcctggaccctgaacaagttgtgctctcattggccgggcctggccagcagtgcacagtgcctggcaggttgactctaccatccccggggctggccccgctctcctccgagacccaggctgagcccagtcccctcacccttccttgacttacctccccacctgaggctgactttggggttcccagacaccctacccacacacatgccttgatcatagcacttgcctgcgcttcttcagagtcattaatttgcttctcggcttccccactggactgtgagctgcctgaggtcagggattgcgctttggatggtttccagcctgagcctggtgcttgaacagacgtgtgcaataaatgctcgttaaatgatg

SEQ ID NO: 1314 - DNA, 2174 bp, Homo sapiens
agctaaggcgcgctggatccccggagggcggaggacctccacggtgcacccagcttttcccagccaccttccagcggggccctcccccgcgtacccccatttggcagatgagaaaattgaggctcccagaggccaagtgattctcaaggtcacacgaggaagcggtagagccaggcggggacggctctgggtggctcttaggaaaagtccgcctgagaactccgtacaggagctcccctgtcctccagcctgggggagtgagtatgtgtagggccggggtacctttccgtggggcaaggctctgccaaaatctgggagtgaggggagtcagggagctggggccgcagggcgggccctgcaccgcaaatgggaggggggcgacggaatgggcgtgcgcacccatgggggtgtgtgcatgtgtgtgggagtgtacatgcgtggagaggcactgccttgcgtgtgtgcacacgtgtgaggatgtcagcgcctgtgtggccgcgggactcaaggctggcctggctcaagtgaacagcacgtccaggaggcgacctcgcccgcgggtttgcattctggggtggacgagctgggtatgtgtgcctgagggtttcttcgtgcaggtgtgcacagggtgtgggtgccattgtgtgtgagagacggaggatgggaggccggtgcctgtggcccggtgcgtgtaagtgcggacgcctgcacctccacttaggtccccggcctccgacgactaacttgggtgtggagtgtttgcccctgccagggtgcgtatgaccccgccagtgaccggagttgctaatggtgtcatgcacccaccggccacccttggcgcgagcgcccccctctggacaccctgctccgtgcgcgctcacagttcgcctgtgcggggccggggccagggtcaggagccggggatagggaggaagagggcctgtggacaagctgagccgggacccctgggacctttgcggaggtggcctgggagcgctcagttcccaggctgaggcttcccgctgacgcctcctggccgcagcgggctccccccgccccaggaatgttcctctcccatccagtccgcctcccctagggcaggccccctgggggctgccgcagccccgcctcgccttcctgggctcccgggagggggcgaggcgagcaggacgcctgggttctctccccccacctcccataccagggagaaattcctccgaggtcccctcaggctctgggttcccaaaataaccctgcgggggaagggaggctgtggagggagggaagcgggaggggcgcagagccgagctgcggggtgctgcaggtgcctctggggagagggcgcgaggagaaggcgccctgcggggggctgggcgccagccagtcctgggatcttggttcgtccccatcctcgtgaagcccctcggccttcccgcgactccgagggtgggccggaagcctctctgcgggtccgtttcccaactggcgggttgcaccatcccgggccagaccgtttaaccccgggagtggccgcgggggacaactccgcccctgtccagcagggggcgtgcccgccccgccccgtttctgcccgcggggccgctcccccgcccgcgactccgcagactcccgctctgcctctcccgggacaggggttcggtccgagcccggtgggaggctcccggagcgcagcctgggcccagcccaccccgcgccggcggccatggcaggcaccctggacctggacaagggctgcacggtggaggagctgctccgcgggtgcatcgaagccttcgatgactccgggaaggtgcgggacccgcagctggtgcgcatgttcctcatgatgcacccctggtacatcccctcctctcagctggcggccaagctgctccacatctaccaacaatcccggaaggacaactccaattccctgcaggtgaaaacgtgccacctggtcaggtactggatctccgccttcccagcggagtttgacttgaacccggagttggctgagcagatcaaggagctgaaggctctgctagaccaagaagggaaccgacggcacagcagcctaatcgacatagacagcgtgtgcgtggggggagcacagagggctgggggggcactcagtatcctataccatctgtgcttaataaatgtctgttgaactg

SEQ ID NO: 1315 - DNA, 2395 bp, Homo sapiens
gacgtcaaacgccgtgtgctcacccacgtgtggtgcccctctcccggtgtaggcgctggagctgaggacgcctttcctgcgggcgtagttgctggctgctcgggcactgggacctcggcggcttggggacgctggccgcgaagtagggagcgcaggtggccgctcggggtgagggccctgggtcatggagcacttcttgctggaggtggcagccgcgccgctgcggttaatcgcagccaagaacgagaagagccgcagtgagttgggcaggttcttggccaagcaggtgtggacacctcaagatcgccagtgtgtcctgagtaccttagcacagttgcttttggataaggactgtactgtgctggttggtcgccagcttcgccctctccttttggatttgctggaaaggaatgccgaagccattaaagctggaggccaaatcaaccatgatctgcatgaacggctatgtgtgtcgatgagcaaactcattggtaaccatcctgatgtcctcccgtttgccctgagatatttcaaggacacatccccagtctttcaaagacttttcctagagagttcagatgctaatccagtacgctatggacgtaggaggatgaagctccgggacctaatggaagcagccttcaagtttctgcagcaggagcagtctgtgttccgggagctctgggactggagtgtgtgtgtccctctcctcagaagccatgacaccttggttcgctggtatacagccaattgtcttgctttggttacctgtatgaatgaagagcacaagttatcatttcttaagaagatatttaatagtgatgaattgatccatttcaggttgaggttattagaagaggcccagttgcaggacttggagaaggccttggttttggccaatccagaagtctccctttggcgtaagcagaaggagctgcagtacttacagggacatcttgtttcgtctgacctctcccctagggtgacagctgtttgtggtgtggtgctgcctgggcagctgccagcccctggagagctgggtggtaataggagttcttcacgtgaacaggagctggcccttaggtcttatgtgctggttgagtctgtctgcaaaagtcttcagaccctggctatggcggttgcttctcagaatgctgtgttgttggaaggaccaataggatgtggcaaaacttccttagttgaatatttagctgcagtgacaggtagaacaaagcctcctcagcttctcaaagtccagcttggagatcagactgacagtaagatgcttttggggatgtatcgctgcacagatgttcctggagagtttgtgtggcagcctggcaccctgacacaggcagccacaatgggccactggatccttctggaggatattgactatgcccccttagacgtggtttctgtgctgatccctctcttggagaatggagagctcttgattcctggccgaggtgactgtctgaaagtggcacctggatttcagttttttgcaaccaggagactcttgagctgtggaggaaattggtatcgaccgctaaacagtcatgctactttgctagacaaatattggaccaaaattcacctggataacctggataagagagaactgaatgaggttcttcagagcagatatcctagcctattggcagtggttgatcacctgcttgacatttatatccaacttactggagagaaacatcactcttggagtgatagttctgttggatgtgaacaggcacctgaagaagtttcagaagccagaagagaaaacaaaagaccaacccttgagggaagagaattatctctaaggtactggactaaacagttttttcttttctttctttcttttttttttgtgagacagattcctgctctgttacccaggctggagtgcagtggtgcagttttggctcactccaacctccgcctcctaggttcaaagttcttaccagctagaagtaaatagtcaggttttgaaattataggttgcttcatggtgtcagatccctttttcagatttataattaatgactgggaaggctcgattagggtaatgtttttaactttaaaaaataacttttaaagaccaacttgggagtggctcctaacataattctttcactgaatgcccttttctgacacttggagtcttaaataagtcttcttggatttcgctatctatgacttctgtgccactctgtgttctcagtggttgacttcccctttgagaagtgagaattagaaatgggcatctcctcaggctaggcgcggtggctcacgcctgtaatcccagcactttgggaggccgaggtgggcggaccatgagatcaggagttcgagaccatcctggccaacatggtgaaaccccatctctact

SEQ ID NO: 1316 - DNA, 2526 bp, Homo sapiens
gcgcccgcgggaaacccgggcccgttgcatccgctgggtgtagccgtggggatggcaggttcggggaggctggtcctacggccctggattcgggagctgattctggggtcagagacaccctccagtccacgagccgggcagctgcttgaggtgagcccccattcagggcccggagaccgaggcggaggcccggggtggcgggattgacgccgctcgccgccgtcaggtactacaggacgccgaggccgcggtcgcgggcccatcccacgcccctgatacgtccgacgtcggggccacgctgcttgtgtctgacgggacccacagtgtccgatgcctggtgacgcgggaggccctggacacctcggactggtgagaggccccgcgcggctctggagggaggagaaggagttcggcttccgcgggacagagggccggctgctgctgctgcaggactgcggggttcatgtccaggtcgctgagggcggcgcggtgagtggtgagactgccttgggcgggttaccgggcatgactcttcgtgacgattctgagacccccccttccccccgaactcctccagcccgcagagttctatctccaggtggaccgcttcagcctgctgcccacggagcagccccggctacgggtgcctggttggtaagtgatgcctccgccctccagcagctctccccaccccagcctggccggcgctggcagacgcctatggggtaggagggcttgggcccccattaactacccttctctttttcttagcaaccaagacttagatgttcagaaaaagctctatgactgccttgagtgagtctggggttgggctcgggggccacgtgttgtttggtgaggggatggtgtatctaggtagacaggcctcagcatggttcctgagtcctggccactctcttcctgtagggagcacctttcagagtccacctcgtccaatgcaggtactgtagagcttgaccagtgatcctaacacgctgtgcagtgatctctccagccttaaccttatgcttcctcaataagctgtcttccccctcaccctcctggtcctcccctttaagccttgactcatcccatggtcccctgtccccaggcctatcactgtcccagcttctggatgaaatgcgggaggaccaggagcatcagggggcactcgtgtgcctggctgaaagctgcctgacactggagggcccttgcacagcaccccctgtcacccactgggctgcctcacgatgcaaggccacggtcagtctggggatttgcttgggagatgtcagggtgaggagttgggcaagggtcatatcccacaggacatgagagtaaacgggcctgtcctacagagttcatgtcccacagggagaagctgtgtacactgtccccagctcaatgctgtgcatctctgagaatgaccagctaattctgagctctctaggcccctgtcagaggacacagggtaagggggactggagaggttggggggatacctggggcccaggtccacagtgctgataagacttcctgaaccccccaggccctgagctgcccccaccagacccggctctgcaggacctatctctgaccctcatagcctctcctccttcctcacccagttcctcaggtgaggtgatgcacaggtcacaggcactcactgccgcctgtcagtcaggttcccgggctgcgcaggatgctgtgaaaggtgcacggtgggtgggggatgaacacggtccctgcagtcctgtctgagctcgcaggccactcagctgccctgagcggagagggctgtgcctacaataagtcccctcctcctcaggaaccccggccttacccggccacatgtcatccgaggaaagtggtaccagcatcagccttctgcctgccctgtccttggctgctccagacccagggcagagaagcagctcccagccctcaccagccatctgctcagcccctgccaccctgacccccaggtccccacacgccagccgtacccccagctccccactccagagctgcactcccagtctctcaccccgtagccatgtccccagtccacaccaggctcttgtgaccaggccccagaaacctagcctggagttcaaggagtttgtagggttgccctgcaagaatcggccgccttttcccaggaccggagctaccaggggagcccaggagccctgctctgtctgggaacccccaaagaggcatcgtgatggttctgccttccagtatgagtatgagccaccctgcacgtccctctgtgctcgggtccaagctgtcaggtgagtgcctgggtctgccccaactcttggtcactagtcccaggctccattgacctgcagcggtggtttctttccaggcttcctccccagctcatggcctgggccttgcactttctgatggatgcacagccagggtctgagccaactccgatgtgagacgtcacgcaggacagataccgctccacactctgcttcctttgagttttttaataaaataatctcatgcggc

SEQ ID NO: 1317 - DNA, 3111 bp, Homo sapiens
aggaagccattacatacatctgaatcagagatgtggttaattaattcaggagtgaataatcagaaaacctgtacatgacatctcagattaaaagatgaacacaagctagccaaagagggaagggcatttcaggcaattgaaaaacatgtacagtggcattaggtcccaagaccataacctattccaacactataaacagcctggtatggcagtagcaaaggatatgtggcaagagtgtaatccaaacaagaaagtatggtaccctgaacttaagccagtggtggtagggaggaagaggcagggttgtatccatatggtcaactgtagtgaggtgaggaaagaggaacttgggataaccgagtttctggctttgagtgggcagatgacagtgccattgactaaaatagggagaaccagggcagtgggaaagatgagttcaagtttatacatgctgctgttctgaaagagccatctatatagtaggcagctggatatatggagttctccagcttagaaagaggctgaggctggacatagtttggaaaccacaggtgagtaggcagtgagtaaagccatgggaaagactaagcttaccagggaagtacaaaacgagaagagcttattagtccagaacctgggacgcactggcattgaaggagcaagagttctaagatgggtaattttattgtgagacatacggcacattgtaggatgtttagcaccatccctgcactctacccactagatgccagtaggacccactcagtggtgacagtcaagacacagacatgtctccagacatgcccaaatgtcccctggcggcgggggacaaaatcaccctagttgagaaccaccaaaattaagaggagtctccaggatgctgacaaaggagggttattgaatgaacttccttttgcaaatgttttattcaaaaatgacatacacaaaaatgtataatccctcccccaatataggattaggtgtcactcaccaacatgcccaaaatcacattaagtgatcaaacccagattggaacctgacttttatagtctgactccaaagcctgtgctctaagcctaaatcacttaacccctaactccataaggtctccattaggcttcaagtgctgtgaggagagggctgattcagtctttttcatcattataatcctagcatttggctctgacacttagcaacaggagttcaaatatttactgaatgagtcacacttcacacttaactctgaaaatatgcgttattcatagacctacactgaggtatttaacactgatagcttacagacaacacgttagggcaccaaggggaagatgctcccatcctgacaagaaatcagcagcattggttttgagaattttgttccccagaacagaggctctgccatcaaccatttcacttgcattagcggaaagttcctctcctattgcctccttatccagcacatcccatgccgcattgaggcctcaaggagatgggggaagaggagtggaaacaagaatggaatggaatatttttattaaatgaacaaattataacttttgacagtatcataaactggtagtcatagggaacaattttctatcaagtaagctttttaaaaggtttaaacctctaacctctattcaaaaatgttggcctaggctgggtgcagtggctcacacctttaatcccagcactttgggaggctgatgggggtggatcacctgaggtcaggagttgaagaccagcctggccaacatggcgaaaccctgttgctactaagaaaacacaaaaaccagccaggagtggtgatatacgtccgtaatccctgcttcttgggaggctgaggcaggagaattgcttgaacccagaaagcagaggttgcagtgaaccaagatcatgccactgcactccagcctgggcaacagagcaagactccatctcaaacacaaaaagatgttgactgggcgcagtggctcatgcctgtaatcccagcattttgggaggccgagacaggtggatcacttgaggttaggagttcaagaccagtctggcaaacatggtgaaaccctgtctctactgaaaatacaaaaattacccgggcatggtggcacatgcctgtaaatcccagctactcgggaggctgaggcaggagaatcacttgaacttgggaggcagaggttgcaatgagccaagatggccccactgtactccagcctgggcgacacagcgagactccatctcaaaagaaaaaacacacacaatgttttaggaacttgaataggtgccacttactgtatatacctacctcagcatattttccctcactaattggccccaattggtacctttttgatgaagggactgtatgtccacaaattcctgcttaaatattgtgggagatccctgcaagggctaagccagtgatgtcaaatactataatagacattgctgatgtacatttttctgatgtacatatctacatatgaggctcagagatatagcctcagaatatttatcaatatttcaggcagccacatcatttccaagagaaaatatttcatctctgcctaaagccaaccttaggggtagcctggaggatacagaattcaggggatgccagcaacacctaaaaggtttagcagaaggacatcttcccaggatgagtatccaggtccaggtatgctatagagacctaaaaagtagaatgatgggaaatccataaatgcactttagtcagttcaacctacatacttgaacatctttttgtgttgcttggaagccacggagggaagctataaagcaatctgagagttgagaaagtttgccactctggccgaccagtggctcaagcctgtaatcccagcactttgagaggccaaagtgggcagatcacctgaggtcaggagttccagaccagcctggccaacatggtgaaaccccatctctactaaaaatacaaaacttagccaggtgtggtggcgcatgcatgtagtcccagctactgaggaggctgaggcaggagaatcgcctgaacctgggaggcagaggttgcagtgagccaagatcgtgccccttcactccagactgggtgacagagcaaggctccgtctc

SEQ ID NO: 1318 - DNA, 2751 bp, Homo sapiens
agtttatgacagaagggcaaaaacattgactgcctcaaggtctcaagcaccagtcttcaccgcggaaagcatgttgtggctgttccaatcgctcctgtttgtcttctgctttggcccagggaatgtagtttcacaaagcagcttaaccccattgatggtgaacgggattctgggggagtcagtaactcttcccctggagtttcctgcaggagagaaggtcaacttcatcacttggcttttcaatgaaacatctcttgccttcatagtaccccatgaaaccaaaagtccagaaatccacgtgactaatccgaaacagggaaagcgactgaacttcacccagtcctactccctgcaactcagcaacctgaagatggaagacacaggctcttacagagcccagatatccacaaagacctctgcaaagctgtccagttacactctgaggatattaagacaactgaggaacatacaagttaccaatcacagtcagctatttcagaatatgacctgtgagctccatctgacttgctctgtggaggatgcagatgacaatgtctcattcagatgggaggccttgggaaacacactttcaagtcagccaaacctcactgtctcctgggaccccaggatttccagtgaacaggactacacctgcatagcagagaatgctgtcagtaatttatccttctctgtctctgcccagaagctttgcgaagatgttaaaattcaatatacagataccaaaatgattctgtttatggtttctgggatatgcatagtcttcggtttcatcatactgctgttacttgttttgaggaaaagaagagattccctatctttgtctactcagcgaacacagggccccgagtccgcaaggaacctagagtatgtttcagtgtctccaacgaacaacactgtgtatgcttcagtcactcattcaaacagggaaacagaaatctggacacctagagaaaatgatactatcacaatttactccacaattaatcattccaaagagagtaaacccactttttccagggcaactgcccttgacaatgtcgtgtaagttgctgaaaggcctcagaggaattcgggaatgacacgtcttctgatcccatgagacagaacaaagaacaggaagcttggttcctgttgttcctggcaacagaatttgaatatctaggataggatgatcacctccagtccttcggacttaaacctgcctacctgagtcaacacctaaggataacatcatttccagcatgtggttcaaataatattttccaatccacttcaggccaaaacatgctaaagataacacaccagcacattgactctctctttgataactaagcaaatggaattatggttgacagagagtttatgatccagaagacaaccacttctctccttttagaaagcagcaggattgacttattgagaaataatgcagtgtgttggttacatgtgtagtctctggagttggatgggcccatcctgatacaagttgagcatcccttgtctgaaatgcttgggattagaaatgtttcagatttcaattttttttcagattttggaatatttgcattatatttagcggttgagtatccaaatccaaaaatccaaaattcaaaatgctccaataagcatttcccttgagtttcattgatgtcgatgcagtgctcaaaatctcagattttggagcattttggatattggatttttggatttgggatgctcaacttgtacaatgtttattagacacatctcctgggacatactgcctaaccttttggagccttagtctcccagactgaaaaaggaagaggatggtattacatcagctccattgtttgagccaagaatctaagtcatccctgactccagtgtctttgtcaccaggccctttggactctacctcagaaatatttcttggaccttccacttctcctccaactccttgaccaccatcctgtatccaaccatcaccacctctaacctgaatcctaccttaagatcagaacagttgtcctcacttttgttcttgtccctctccaacccactctccacaagatggccagagtaatgtttttaatataaattggatccttcagtttcctgcttaaaaccctgcaggtttcccaatgcactcagaaagaaatccagtttccatggccctggatggtctggcccacctccagcctcagctagcattacccttctgacactctctatgtagcctccctgatcttctttcagctcctctattaaaggaaaagttctttatgttaattatttacatcttcctgcaggcccttcctctgcctgctggggtcctcctattctttaggtttaattttaaatatgtcacctcctaagagaaaccttcccagaccactctttctaaaatgaatcttctaggctgggcatggtggctcacacctgtaatccctgtactttgggaggccaaggggggagatcacttgaggtcaggagttcaagaccagcctggccaacttggtgaaaccccgtctttactaaaaatacaaaaaaattagccaggcgtggtggtgcacccctaaaatcccagctacttgagagactgaggcaggagaatcgcttgaacccaggaggtggaggttccagtgagccaaaatcatgccaatgtattccagtctgggtgacagagtgagactctgtctcaaaaaataaataaataaaataaaatgaaatagatcttataaaaaaaag

SEQ ID NO: 1319 - DNA, 2232 bp, Homo sapiens
acttgtttgtatacaaccacgcccggcaggatgaccaccagatgaccggccgcagcaatgcctccactcagtcccagttgggcaaagtttcactccactgcggcgacgtgaacaagaatcacggcttccttatcgtacctgccacaacacatgggaattatgggagtacaatttaagatgagatatggatgagaacacagagccaaaccatatcaactctatcttcatgtttgtttacatttctctcaactgtatgttttgtgacccagaatgtgatcctggtaaacattccatttgagaagaatgtgtattctgctgttgttggaagctgcgttgtcattgatgaaggaatatttcgaagcgctgaacaattcttgataaagttccgaaacaaacaaagcacaatcttccctcgatttacatgggagttgcattcctggaaaattcagtatattttaaaaccatgcaaaatatccttttaaaaaaatatgtaacatggagtttaggaccaaggctcaggatatttccaatccatggttgggtgcggaacctgcggatacagaggactgactataatatcaagagatcataaggctgtcggaatggactctttgtggcaataagataccatattataaacaggacccaaggtcatgccaggaggctcgtgtggtccctgtttgtcatccagtcaatacggccatcagcttctggccccagacacctttcctctgcactgtggcacagaggagcagactgctttggagggcagcttcctgggagctccagggaccctggccaggcggccactgccactgacttcctcggctcactgagcccgtgcctgcagctctcgtgtttcctctgtgctgcagtggacgcttatcttcccccgatggcacatttctttgtcacagacaggaccctcactggcagtcggaggacatcaagccctagtacaggaagggacattttcacactaatctgtgccagctggagcagtcctgccatctgaacatcatattttggaaccctgagaagctaggatgcagttaacagctagatgtcaattccctgcaggcagagaccagttctctgctgccatgtctttaaggcctgatgcaccatagattaattcaaatccagtgtctaccactcactcggcttaatgtaagacaagatgaagactccagacttcagaacttcagtgtccgcagatgaggattttaaatgcttcgcctacaacctcaattgttgtggagccaaagatgcaacagctttgaagaatagaagaattactctatatttgtcaggatctacgtgacaaacaagcgccacttggcttacattacttgcctggcttggatcccatggaatggaggagcattggaaccaagaggaaaaaaattaaagtgctttgggacagcgagccaaactcttacatagtatttgaaatggtgtggcaaacatgaaattattttaggctcaagattggtgctagttttttaccctctttttgaaaaaatagtaaaatgcacataaagggccctgccagaggtttagctcataaaatctgccaatcattggatgtgctaattggtgtagcaatccagtggtggcctggattaggactcaaaaactgacccttaccacccttggtgtcctgcagcaaagacagcctaaatcgaaaagactgatggaagtatatcaaattacgaatttctctatccctgaaaaatgcctgcaatttctgtttctccatcactccagaaatactcaaaacagcaaaaattaaatacatatgaagtgaacacaaaagacctccacagaaaaatcagtggctcatctgttgacgctattgctcattgctcggctggccagtcatctgggctaagttttgactttgggccagtgcttcaaaatcagcaacctttcagccaaaagactgtggaatgcagccaagaccacctgtggaaagtgaattatagcatctttaatttactaccttgggctatgatgtcagaaacccagcatggagggcgcaccagttcttgtgtgggaaatctctcagagcccccatggaggcccccaaagtggctctggcaaagctgtaggggtggaggtaacaaaaaaggggacacctggctctccttcttaaatcagctcaccatgggcacacatttatattggaattttagggtcagaaaataccaaaattaaatcttctagaag

SEQ ID NO: 1320 - DNA, 2362 bp, Homo sapiens
ttttaagatgaagtcttgctctcttgccggggctggagtgcagtggcatgacttcggctcactgcaacctccaccgcccagcttcaggcgtttctcctgcctcaccctcccaagagctgggattacaggcgtgcaccaccattcctggctaatttttgtatttttagtacagatgaggtttcaccatgttggccaggctggttttgaactcatgaccttaagcggtctgcctgccttagcctcccaaaatgctgggattacaggcatgagctactatgcctggcctggtttgattttagagatagacaggctctgtgttgccctggctacagtgcagtggctgttcacagctgtgatcatggcacaccgcagccccaaactcaaggtgggctcaagctgtcttcctatctcagccttcctggtagctaggaccacaggcacactccaccacacccagctagttctaggtgttttgagtaagttagacacttggtgagctttgtgtataaaagactcagtgacctgcttagattaaaactagggcagtggaatgaaaaattctcatgggaagtgacagtttattttcttcacttactggtaaatgaaagccaaaaagctgaattttcctaagtaaactagaaagaacatggagtgtgtgtgactaactaggatgtttgtgtttacgtttacaaagataactttcacctacagtggttgtagatacaagtaataaaaatgaacaagaccagtattctaacgtggttaccttccaagattggaaatttaaccaggcgttgaaatgctgaaaatttctgttagaaaagatgggcgaaggaattaatggtggatactgaaaccacagttggctgtatgagttgaactgtaacaggcaatacctgttgtatggccaacatgattactcagttgcagtgcacatgttggctggttggcatatgctctgtaagcgcagcttggcagtctttaagatccatagaaatactctttgacgtttgatctctaagttccatttctgggcatttgtccttaaggaatggaaaagcaggcaaactaaagctagtcattgcagcaataacccactggaaacaactgaaaatataatgagagaattgtagagtgctggataaaatgttgtgggtccactcaaaatgattcgagtgttgtagtgtggaaaatgcccaagccaggggggacacatttaaaatggtgggtacactctgattgtgattatcaaatatatagatggacaaggacaggagggttttttgaaaagtaaagacagatgagaagtgtaatataacctaagtctttaaaacgtagaaacatttaaaaatacaattgctttgaatttgagtggactcatataaaacaagaattgtctggatttgctgtcttgctgttaaggcagggttcttgaaaagagctgtgtgtccactgcctcaatcactcctcacagtcctgctgcttctctccttgctgaaaatgctttaggggtggaatgtctgttcttaaccactgtgggtggcttcataaatcacctccttactgaagtgtgcttgttaggcctattggttatcaaatggggcacagtgtagctgcctcttaaaaagttgtgaggaatgagttagaactggatctgaagtcctcaggtaataggcatggctatgactgggtgactttaagcattgttgcttctcaacttgctttgtatcctcagcagtcaaaccaggtgctcttggctccattcagactcttgggttctgctcttgaccattttgcaaagagttctgaaccttcatgggcaaggtcaagcaccctgtgactgggggagaacctttgaacctggagtgtgggcctgggttcgccccggatccctgtccattgcttgctgtgggccttggtttctttatctgtaaaatggaggtaatgcctggattacaaggctgctataaggatgagaggggacaatgagggtactttttaatgaaagcattcttgtcaccaccagggaaccatagtcaggatttgggggcatgtaggtgtcattccacagccacttaccaagcagccctctcttagcttggtgctgggactcattgcctctccaatggaattttccaagtgtgttgagggctgtcttgctccttacctacttgattctcttgcagatcttactgtgccgagattgctcacaatgtttcctccaagaaccgcaaagccatcgtggaaagagctgcccaactggccatcagagtcaccaaccccaatgccaggctgcgcagtgaagaaaatgagtaggcagctcatgtgcacgttttctgtttaaataaatgtaaaaactgcc

SEQ ID NO: 1321 - DNA, 2669 bp, Homo sapiens
ccaaggatccaaattatggacaaataaagtccctaaatggactcacattctcagagcaatttgtttcacaccccttctctagtagatgttgcaagagcaggtgatggaactagattcagactttctctgaatacagagctcaaagttttatttagctaaaagctgagaagttctgcttttggtaataggtacactacttttcccagccatctctgtggaggctttgcaaagataggactctgaaaagctcctgataatccctggaacagactacctcccatgtcctttgacctgaagttgtgagttgtcagactgacacattgaaatttcacccatctgatgtaaatactaataaatggctaaagagataaaaagtaatcgtcaggaaagaggagccacaggtctggtgaattcacaaactgaactggtcataggacagtggaaagtagactgtagtacttttcctttccttaaggtcgtctgctacaaagaaccaccacttcatgtaagagctgctttggactccttaagtttcatacatatgtctgagggcttgtgtagtagagccatgcgtgaggaatttgcaactctcagagcagtctcttggaaccctggggctcctttccatgtttctctgggggctgaaagagtgactcatgtctgggaatggtatgtatggcagagtatgtgggcatttggttttcttcactggtgtgcccacatcctctgtcccatgattttcaacttagataaagagatagatatttgtttcccacatcttggagataagtaaaatgatattcctcttatgccataccacataactaatctgcatgacaagaccagttagggattgttggttgcaggatacagtgatcatttagtagatctgatcaatcaaaagagctacaatccaaaagcaactattgggaaaggcctagaagcatctctaggaccattgtttcttagacctatactcatagaattgcctctcttctcagcaaaacctggaaatccaccggaagataaaacagtctgagcaggagctagcctatctggaaaggagagaacgagaggtaaactttggtgacctattactcccttgacctcagctctttttgctttctgatatagacttcataggctgtgctgatccctccttataagaagatggagaacaaaagcagcctcaaaagatagtgcatacatttgccaaattatataatacaatcaaaataggtgctttttattatttgtaagtttatacttcaatgaagttgatatcttttttaaaaggtggtgttagggtctctaggtagataacactcctctttcctgcttagcttttaaattagttgagttaatgaacaagtgttgaatagcgctgctgaaatagcatcttttactattaaaggctaagctggaggaagtagcttagtgtcagagtcaaatggacttgctacctcaaccacacagttagggtgaattacccagtcataggcttcactggcctctctcatgatggttaagaacccacctatgggtcaggcacggtggctcacgcctataatcccagtactttgggaggctgagacgggcggatcacttgagctcacaagtttgaaaccagcctgggcgacatggcgaaatcctatctctacaaaaaatataaaaattaggtggacatggggtgtgtgcctgtagtcccagctacttgagaggctgagggaggatcgcatgagctgggaggcagaggttgcagtgagctgagtttgtgccactgcgctccagcctgggtcatagagccagaccttgtctcaaaaaaaaaaaaaaaaaaggaagccacctgtggagagccaggcacagtggcacatgcatgtaatcccagcagtttaggaggctgaggtgggagaattgcttgagcccaagagttccaggctgcagtgagctatgatcacagccctgtactccagcctgggtcacagagtaagtccctgtctcaaaaccaaacaaaagaatccacctatggaggactgttagagatagtgaattcacaaactgaactggccataggacagtggaaagtagattgtagtatttttcctttccttagagttgtctactacaaagaaccacctctccatgtaagagctgctttggactccttaagttttatattatatgcccgagggcttgtatagtggagggcttgtgtactttcccctgcttctcagaaggggaaaagacagcggaaccaagcgtgccaacttattctttccaaatgtttaagttaggaagtcactgctttctctagaagaacgtgtaaaggagtgagagattccaggagttaccaagtgagctactttcactttaaaagaaataacaaggccgggtgcggtggctcacacctgtaatcccagcactttgggaggccgaggctggtggatcatgaggtcaggagttcgagactagcctgactaacatagtgaaaccccgtctctactaaaaatagaaaaattagctgggcattgtggcactcacctgtagtcccagctacttgggaggctgaggcaggagaatcgcttgaacctgggaggcggaggttgcagtgagctgagatcacgccagtgtactccagcctgggcaacagagtgagactctgtctcaag

SEQ ID NO: 1322 - DNA, 3179 bp, Homo sapiens
atacttacaattacgagatttatatttgcattagtctctttggctggtgggtaggggtgagaggctcttcctggatcccttattttctacaggagaggaggaaaacacctgggatgctccagtgctcttacgcagataatgatcattaacatcagcctctctgatcaaaggctctatttatgaaatgtttggaaatgaatgctgtttttcaacaggagaagtgattaaaattactggtctcaaagttaagaagatcatagctgaaatttgtgagcagattgaaggttgtgagtttctacagccatttgaactgcctatgaattttccaggtctttttaagattgtggctgataaaactccataccttactatggaagaaatcacaaggaccattcatattggaccaagtagactagggcatccttgcttctatcatcagaaggatataaaactagagaacctcatcataaagcagggtgagcaaatcatgctcaactcagttgaagagattgatggagaaataatggtgagctgtgcagtagcaaggaatcatcaaactcactcatttaatttgcctttgtcacaagaaggagaattctacgagtgtgaagatgaacgtatttacactctaaaggagattgttgaatggaagattcctaagaacagaacaagaactgtaaaccttacagatttttcaaataagtgggactcaacgaatccatttcctaaagacttttgtggtaccctgattctcaagcctgtttatgaaattcaaggtgtgatgaaatttcgaaaagatataatccgcatcctccccagtctagatgtcgaagtcaaagacatcactgattcttacgatgctaactggtttcttcagctgttatcaacagaagatctttttgaaatgactagtaaagagttccccatagtgactgaagtcatagaagcacctgaaggaaaccacctgccccaaagcattttacagcctgggaaaaccattgtgatccacaaaaagtaccaggcatcaagaatcttagcttcagaaattagaagcaattttcctaaaagacacttcttgatccccactagctataaaggcaagttcaagcggcgaccgagggagttcccaacggcctatgacctagagatcgctaagagtgaaaaggagcctcttcacgtcgtggccaccaaagcgtttcattcccctcatgacaagctgtcatccgtatctgttggggaccagtttctggtgcatcagtcagagacgactgaagtcctctgtgagggaataaaaaaagtggtgaatgttctggcctgtgaaaaaatcctcaaaaagtcctatgaggctgcgctgctccctttgtacatggaaggaggttttgtagaggtgattcatgataagaaacagtacccgatttctgagctctgtaaacagttccgtttgcccttcaatgtgaaggtgtctgtcagggatctttccattgaagaggacgtgttggctgccacaccaggactgcagttgaaggaggacattacagactcttacctactcataagtgactttgccaaccccacggagtgctgggaaattcctgtgggccgcttgaatatgactgttcagttagttagtaatttctctagggatgcagaaccatttctagtcaggactctggtagaagagatcactgaagagcaatattacatgatgcggagatatgaaagctcagcctcacatcccccacctcgccctccgaaacacccctcagtagaggaaacaaagttaaccctgctaaccttagcagaagaaaggacggtagacctgcccaagtctcccaagcgtcatcacgtagacataaccaagaaacttcacccaaatcaagctggcctggattcaaaagtactgattggtagtcagaatgatttggtggatgaagagaaagaaaggagcaaccgtggggccacagcagtagcagaaacattcaaaaatgaaaaacatcaaaaataacaagatgtgacagaagccacttaggcagcaaacataaatgttgcagtgaaaaaagaagctagccttctagctgaaaaacgagtattccccaatggactccagaagaaacttgattcatcgctgcaaaggaaagaacaaccttaaaacttttaacagataaaacttacagaaacctatgatatagaattcatatagtctattctgttgtgtctaaatctgtaggcattgtgttgttgttctttaggacgtatttatttaacttgcacattttttcagattcttatttctactaccaacaactaagtaattgggaaataattctgtatttcagtttctgagtaaaaccagtctgaaataggataaaagccaccaaatattttcttttttttccagaatttgttttgccattttttagtgctatcatcattcctaacaagactaacttacggaaaaataattatatctgactgatttaaaatgttcaggtttcttatccaaatcccttggaactatggaaaggagtttgatttcacattcacagtgtatttacaaaatacgctgtgtcataaatatgtttgaattccaacagccaaagccattgagagtcataggagttttccataaccttctcttctatgacccaacaacaagctcatgactgaaatttcaccagatttctgagacgatgtcttaatattctatgtgctatgtaccagataattctttagatgaatgtttcttaggattgtaggaaaattatctagttaatcataatatttgatggaaagaaaaagacaataaaattgtaatataataaatttggctgacaagaaaccaaagtgattcttaattagtatacatcagaatgatgctcttatagttgtaccatctataaaaattactttaagggctctcacattttaataatttatcttattatgtattaagtatacaggaacaatattatttttcctttaacaaaatgaagagacaggctatctggttaatgttacataggaatttaatagtaatgcttgaacttcatccatagatcatactctgtacaaaatttgttagctaacatcctatctcataattattttatgttttgtggagaaatttgttgattttgtaccaaagtgtttctgaagacaataaattgtgagtcaacttt

SEQ ID NO: 1323 - DNA, 2379 bp, Homo sapiens
atctcagaatgaaggcatggctggggtctggctgtctcctggtggccggaaggagacagacggcaaaggagaagctgcctgtctctgcacaggtccatgtccctgaggaaagccaacgtcacagagaaatgatgaccactttctcaaacctggcttcggatttgcacgttggctgccaaagctgatcagcagcgggctttgtgaagatgcctggtctaccacgtgcctccagctggtcacgcccaagactccctgagccctctggaagggcagcacttgcccagtgcctccctccaggtcctgccacatccaagaaccacctggactattatttacttagtattttaaaccaatgtactttttaaactccaattttttaataagatcatttatgtcaccatataacacccaaagcagtagaatttgtcatacacagaaggcaatgctaaaaatacaatgaaaatggaaccaggaagtctagcttgatacccttggcctgtataactgagccttgtgccagttaaaagggcaaagcagtaggtgctcagggggtgtcggggccctgaaagctgatctgatccgctgctgcgtattcactaccgccctgggacgcctccagcagaccacctcactgggggaaacatcaggacagcgtggccaggagcccaatgctgccacctcatagatgggtatctgagatgagtcatcgaacttctgcaagcctcagtttcctccctggtctaatggaaccctccttggcggcttcacagggtgatgcttggggcaggtgatggagatgtgggagaggcagttatttttaaccacccagccaagccccttgccaggagggactcccagaaatgaagccttacccttgagggagttccccgccactccaagcttggggcctgggatggcagctgtgagggcaccagcaccatctggggactcgctgggtaccaattatcaccgcccttgggctacttcaaaggctgcccacacagacacaccctccttggtaaccagtcctcaggaggaagggcacccaaggaaagggggaaggcttcctgggctagagccccttcagggtctgacacgccattgacactgaccacgtcattcattaagcaagcaccaactatacatcattcactatcccaatctaatttgcacaagcccttaggcaggtgctactattatccctgttttacagagaaggaaaccgaggcttaggagatgaagtctgaggtgttggtggagctgggatttaaaccaaaatatgtccaactgcaaagcatgtaagtaacaattttagagggtatacggaggtgaccctaagtaacaaggaatcacatatagtgagcaagcaatttgcttttcagtttttggtcaatccttatgattatttagaggagaaagttcagtttggtgctggtatatcttatgtttatcacccgacagttgttaatctctttttaacaaagaatacaggccaaggccctgtgactttagctggctttggtatttggccaaaagttaatgactttggcagttagtgtttttatccatgccaagcgatgatgattttctctttagtgacagacattttttaaaaaataaattcacataaaaaagtagttttacagatgaagcactaaaactagtgcatttcatcttaaactgcaaattataaagggaataatagtaacttgacagtggagagacctggcagacaccaccttcaccaactgatcaaagttaacatcgccagaaaggggacagatggcatgtgcctctcgataagatgcactgaagacacacactcacttctgcaatattcctgccaagaatgcctcatctgaatctaatctcgagtataaccatcagacaaacccaaattgagagacagtttacaaaacaccagccttgtactctgcttaatatgtcaatgtcacaagagagaaagacagactgaagagctgatccagactgaagaaggctcgagattaatgcaaaagctgatctgggattgcatcttggacctcaactctcccctttttattgttaagggacactactgggacaatttttttttttttttcgttttgagacagggtctcgctcagtcacccaggctggagtgcagtggtggaataataactcactgcagccttgaactcccggactcaagcaatcctcctgcctgagccttccgagtaactgggactatgggcgtgtaccacaacacctcgctattttttttttcctactttttgtagagacggggtctcactatgttgcccaggctggtttcaaactcaagtgatccttccacctcagcctctataaaatttgaataaagttgtagatgaaattggt

SEQ ID NO: 1324 - DNA, 2515 bp, Homo sapiens
tttagagatgaggaaattgaggcctagggagattaagttaccagttcaaagtagtgcagctacttaaaggatggaggcaggatgcaaactcaagcttaagccaccattatacttctctagcactataggatttgagtctcccgatggctcctcatacccacacttcaaaccctgccttcttaccatctcctcttgctccttgacccaaagccctgccatggcctcctctctctcatctacagtaaaaggcaggctgtttacacaggcccacaagacccttgattatcattcccctgttatcttactatcttactgttcactcctctacctctctccactgaagccaccctggcctcctcccattttagtttctttgcactgacagggctgcttttaagaacatgtttcattcaagtatgaaaataactcatctcctgcaagtctaaataaatatcaccttttcagtgacacctaccctgaacatatattctcttaacccctgaccccactatattttataatttacttttttcttattaatagtctgctgttactcaccccaccatacacacacaggaatgtaagttctatgaggtcaggagctctcccttccccattttgttcactgccatttttcaaacacccagaacagtgctgggtacataatgggtgttgggtagatgtttgttgactgaagatggatgaagctcaggtgtgtccaatttcaaaaccactgagtactgagtcacacttgcgtatattttatatgtgaacacaaacctacttgtctgtatctgccaagttaatctgggtcacttctaactgtatgatgatcagagtatcctgtgcaaatacatgtgggagctacttcctttaatttccagtctctcttgagacagcactaatgaagctgtcacttgtggcttcctatagggccagacatggtcagaaattgtggtcagccagcttccacatatgaggatactaccccagccctgaagagcggctttttttgtttgttcatttttggtaactttgcctttacaaaagaagaaatattatgcttgttattaccagccttgttgaggactgagatgtgggaggatgattaaggagcatggtaccttaggcagtatttgtagtgagtgaaaaaggatgtagctttatgattaagctacaatttttgccaccctgctattcaaagtgttgaatagaggccggaagtggtggctcacacctgttaccccagcactttgggaggctgaggcgggtggatcacgaggtcaggagatcaaaaccatcctggccagcgtggtgaagccccgtctctactaagaaaaattagctgggtgtggtgcatctgtggtcccagctgcttgggaggctgaggcggtggagttgcttgagcctgggaggcggaggttgcagtgagccaagatcatgccaatgcattccagcctggcgacagagcgagattctgtctcaaaaaaaaaaaaaagtattaaatagaaatcatgtttctctttttgaaaaaaaaaaataggttattcttggtgagaatttgacttcaaattgtccagaggttatctatgaaattaaagaagagacacctgttttctacaaactcgttcctgatcctgtgaagaatatctacatttatctaacagctgggaaagaggtaggtagaaatactagttattgcttctgatttatgaataaaaatggtttaattgatgtcattatctagtagcaaagcttttactttgaactacagagtttaagcagtgccccaggctttgaggagacccgcagtggttcacaggcacggaattaaaaaccttactgactgtcagtaagtaagcaagaaatattatctatttagacaattttattattggctatatttccagtgccaagtttttcagaggagggtgtgcttggaaatgggcgcataatcagcaaggtaactgaatttacacatttattgtgtgggcactgaacggttagatgcatttatgaatatacccaatgggactggctttggaatttggggttaatatcaggccacagtctcatacacattcatgaaccaggaaatatatggtactccccctccccctcttcatttatcttgctgttttggcttttcttttgcttctgcttactgaaataaaagtaatatatttttatattttcttcatctttaccaagtgctgtcaccaagggaaggggaaaagaaactaattgttaatgagtctctactatgcattagtcactattctttgcatgatctctgtctaggtgcatagaattgtgtacatatacatacacacaagtgtagaaaacagtgttaatgaaatgtgttactgaccgggcatggtggctcatgcctgtcaccccggcactttgggaggctgaggcaggaggatcgcttgaggccgggagtttaaggctgcagtgagccatgatcaaaccactgtaccctagcctgggtgatggagcaagaccctgtctc

SEQ ID NO: 1325 - DNA, 2339 bp, Homo sapiens
ttttttgtagagacagggtttcaccatgttggccaggctggtctcaaattcctgacctcaagtaatccgcccacctctgcctccaaaagtgctgggattacaggcatgagccaccgtgcctggccgacctcagctcttttgaatctttcttccttgtcattaaccctgcctcagtggctcctataccagcccaccaaaaaagcacccctgcccaccttagctggccagcgtgcccactccctccctagccacaagcctgtgccccacgcctgggccctgcttcgtccgaagcagccttcttccaatagtgaggaaaaccctgaactcctgttactgacagttgtcattcatcccttgaatgcttactgtggttccccggaaacaattacctggctggcctcggttaattctcacaattctttccagtgctatcactcatgtgtctgtccactgctaccttggctttctccaaggtactttctccaagactcagttccttccttggtctctggtttctccagatacctgcccatggcgtgcctgggtcctgcctcagggaatccagcctggatagttgccagaaagggttgtgaggattggatgcccccctttgtctttgtcttttcattcattccttcgttcctttcttcccttccttccttccttcctctctctctctctctctctttctttctctctctctttctctttctctgtctctttttctttcttttctttcgcacttgtcacccaggctggagtgcagtggcgcaatcttggctcactacaatctccgcctcccagattcaagcgattctccggcctcagcctcccaagtagctgcgattacagacgcccaccaccatgtctggctaattttttgtaatttcagtagagatggggtttcaccatgttggccaggctggtctcaaactcctgacctcaggtgatccgcccaccttggcctcccaaagtgctggaattacaggcgtgagtaccatgtccggcctccttccctttcatttcttctcttccctttcatttcttctcttcccttttcctcccttcctccctccctcccttcctttcttccttcccctctgttctcttccttccctccctctctcccctctgtccatacatttttgttgagaaccttttctgtgccaggtagttgcaggcactcgagcatagagccccatgtagacctggcccctgtaagctgacctgcagcaggccagaccaggccccatgtgtgcaccctcctctcctggcctttgtgtcctccttaactaacacgggctctcttgtccccctgccttggtacaggcccagtttgacctggcctttgtcgtccgctacaagcctgatgagcagccctcactgatgccacaccatgatgcctccaccttcaccatcaacatcgccctgaaccgagtcggggtggattacgagggcgggggctgtcggttcctgcgctacaactgttccatccgagccccaaggaagggctggaccctcatgcaccctggacgactcacgcattaccatgaggggctccccaccaccaggggcacccgctacatcgcagtctccttcgtcgatccctaattggccaggcctgactctcttggacctttcttctttgccgacaaccactgcccagcagcctctgggacctcggggtcccagggaacccagtccagcctcctggctgttgacttcccattgctcttggagccaccaatcaaagagattcaaagagattcctgcaggccagaggcggaacacacctttatggctggggctctccgtggtgttctggacccagcccctggagacaccattcacttttactgctttgtagtgactcgtgctctccaacctgtcttcctgaaaaaccaaggcccccttcccccacctcttccatggggtgagacttgagcagaacaggggcttccccaagttgcccagaaagactgtctgggtgagaagccatggccagagcttctcccaggcacaggtgttgcaccagggacttctgcttcaagttttggggtaaagacacctggatcagactccaagggctgccctgagtctgggacttctgcctccatggctggtcatgagagcaaaccgtagtcccctggagacagcgactccagagaacctcttgggagacagaagaggcatctgtgcacagctcgatcttctacttgcctgtggggaggggagtgacaggtccacacaccacactgggtcaccctgtcctggatgcctctgaagagagggacagaccgtcagaaactggagagtttctattaaaggtcatttaaccc

SEQ ID NO: 1326 - DNA, 2846 bp, Homo sapiens
tcaattttataagaaactgttaagctgttttccacagtggttgtactattttgcattcccgctagcaacgtatgagagttccagttctgtatccttttcaacacttggtattgtcagttaaaaaaattattttagttagtatgcagtggtatctcattaaagacacacaaatggccaataagcagatgaaaagatgctcaatatcattggccactggggaaatgcaaatcaaaaccacagtgagataccacttcacacccaccaggtttactataatcaaaagatggaaaataacaagtgttgataagaatctagagaaaatggaaccctcatacactattggtgggaatgtggggtggtgcagttgctctgaaaaacagttcctaacattaggttaaatagagttgccatatgatccagtaactccactcctgggtatatacctaagataattgaaaacataagtccaaacaaaaacttgcatgtgaatgtttatggaaatattgttcatagtagcccaagagtggaaacaacccggatttctatcgactaatgaatggataaacaaattttggtttatgcaggggattgaactatgtagtgatgcaccatgctccaacatgggtggactttgagaaccttatgctaagtaaaagaagcgagtgacacaagaccacatactttatgatcccatttgtttggaatgttcagaatatggaaatctatagattcaggaagtagattagtggttgtctggggttggtggggatagagggattagaggttgacagctacaggatgcagagttttattttgggataaagagaatgttctaaagttgattgtggtgatggatgcacaactctatacaacaaaccattgaattgtatactttaagtgggtgaattatatggtatgtgacatatctgaaagctgttaaatttaccagttttaagagtacaatttaatttttagtgaatatacagaattgtgcacatatcaccacaaaatagttttggaagatttttattattccagaaagattctttgtgcttattagtagtcaatgcctatttccactccagccccgggcaaccacttcatctgctttctgtctctagatttacccttttggcatatttcatataaatggaatcatattccttttgaaatcatacagtttttgcttccatcttcttaggaccagtttctccaatccttgttaatgcttgttactgtctgtattgtttattacagctatcctggtaggtatgtaatgatgtcttattgtggttctaattttcattttcctaaagatcaatgattttgaatatctttttatgtgctcattagtcattcttatatctttggtgaaatgtgtattcaaatcttttgtctatttaagaaattggattttttttattgttgacttttcagagttctttatatattttggtacaaagtttttctggttagatatgtgatgtaaaaatattttattccagtctatggcttgtattttcattctcctaacaatgtcatttgcagagcaaaagtttttaattttgataaaatcgagttaatttttttttctattatgtatctgagaactcactgcctaacccaggatcttaaagattttctcctatgttttattttttaaaattttgaagttttattttacatttataccactttgagttaattatagtacaaggtgtgaggtataggttgaggatccttttttttgcatgtgggtggtcaattgttctggcaccacttgatgaaaatgctatcttttttctattcaactgattttgcacctttgtcaaaaatcaatggaccatatttgtgtggatctacttctgtgtgcttccctgtgtgttaacttttctcttgctctgtctccttttgtcttcctgtccctacttgtgtttttttttcagttttctattacttttctgattctctccctccttctcctgattttcccttcccccattcccttcctcaaaatgaagcatttagattgcattgttttatatatcatacttatttttagtttaaaaagcagatgtgaagcgtttgtgtttttctttacaagtacaatatgctggaaacaaattaacttttaaattataatccctttttttttttgggacggagtctcgctctgttgcccaggctggagtgcagtggtgtgatctcggctcatgccattctcctgcctcagcctcccaggtggctgggactacgggcgcccaccaccacgcccagctagttttttgtatttttagtagagatggggtttcgccgtgttgggcaggatggtctcgatctcctgacctcgtgatctgcctgccttggcctcccaaggggctgggatcacaggcgtgagccattgtgcctgaccaaattataacccttaattaatttttctcagtgaattagtgaccttaacgaaagatggcaatctctcttcccaaactgtgtgtttcagaacttctgcaaaaggcatcacttctccagtgttacagtttctttaaaaaagaaattagtggctggacatggtggctcatgcctctaattccagcacattgtgaagctgaggtgggaggatagctttaacccaggagttcgagaccggctgggcagtgtggcgagaccccatctctacagaaaatggaaaagttagctgggtgtggtggtggcatgcgcctgtggtcttagctgcttgggaggctgaggcaggaggattgtttgagcccaggaggttgaggctgcagtcagctgtgttcacaccactgcacttgcacttcagcctgggtgacagagtgagacacttt

SEQ ID NO: 1327 - DNA, 2347 bp, Homo sapiens
gctgcgggaaattgctggagaagggggagccaagctggagtaaggctggcggtctcccgcattgacttcataaccaagttctgggtccctgcctctggagtgcctgatgagacaaaacggctcctcgtcctgcatccccgctgctacttccagaattcaggcctcgtggtctggagcctgcactgttccatgagcctcctgagcaacctggagtcctctgtctttcttccctcagtgagatgcgcctacttctccctggagaagctcgaggaagcaggaatgctggagatgagctgctcctcactctcactcctgggtgtgctgggcagtggggtgcaatgtgcacgtaggtgcacactctccctgggcggcagcgagaagcagaggtctgatctgtggtcggatgaggagaggaagtgcaagtaaagcagctgcagcgagacctcgtctgctcaggggcttgttcttacatcttttgcagggctgttttgaagtcagtattcacttaagcactccaaattacccagcacaccctgcctgcatggcgctgcgctgcaccttcactctggtcacgggtctggcagtcggctcaccaattcgtcctgcttccctgggactcgccggcttttagcactgcaattcactcagcaaactgggactgttggtcaccctacctggcagccagtgataaggtgagggccactcctgggagggaggacacctgtggggaaaattcttgtgttatttatttctccttcgggatagggtgcctgcagcgcttcatgggagggggtgggctgatgctgcgggctcagaagtttcaagggcatctggggagaccagatattcagagaccttctcctagatgtgcctgttccatgtatcagggacacaggttttcccaacagggctggtgtcattggcatgacagacctgccttggctgagcgttcacccgtcttcggagttcagccaccttagcaagtcctgggtttgttcttcagattttgctgctcgcccattgcctggatcgggggctactttgtaaaccaccaggaagactccagtgtttctgcttaatttttagatgtttgttaattgctcttggcctctcattaatcccctgtgggtcatccaggaaatatactcaccactgtctgttctctgagttttcatttccaggcatccgccctgcctggatctcctcacctgccaggaacttcctctccacaagccggccatcccagcaaaagttctaacaccaaagatgactgccaggggcatgaaggggatgtgcttccagggcatttgctggcagggcgtctcgtgatctcttggtattggtgtgagcacagcctggcaggagagggcagatctccatgcaaagtatgtcagaaagcagatggaagccaggccccctcctgaaagaggctccttgaagataattctaacatctttgtcatcagtgttgacatctcttgattgtatcctgtcattccatttgagatcttcctggttctggctggcatcctctgacatcactccagcagaagaaagggaaggaacacgctgcattactgcgtggtcacaaggtccccgtctgatctgccttcactccacctttcagagtcttatgtttgttttgtgtatattatcaaggggttttaggtcacttagtcggaagaatagggaaaagtatgtctactccagcttaatggaagtggaattctcctgagaacctttttttgatacaaaatatgtacttgtgcatattttgtatcaaaatatataatgtacatgtcccttttgtacatgtatataaattgtatataaatatttagggttataaaaataaccaaagacaccaaaaactgccacaggtggatttgagaagatgtggaaatgcctcactgctaagacatgctcattcttgacaggctgggaaccctgaatgctgtagtgtcaccactgccctgtcctgtacctacctatcttttcactcatttcctccaagctcaggttttcagtttggggtatgtgccacctaacagtgagctgtggaactgcagcacaatcatcaaattcaaaaaaggcaaggacatcttgctcagtttttaagatacgccatagatggagtaaaccaaaacctttgattccagatccttaaccctgattaaaaacaacacaacccttcatgttgatttaaaacatcccttgcaaaagatggtttgaatattccaagttggaaatacccagtcttttaaagttacagcaccctttttgatacaaaaaatgtgcatgacagaaattgtacagtgagtagtgttataaaaataaccaaacacacc

SEQ ID NO: 1328 - DNA, 2242 bp, Homo sapiens
gctctcttaacgatatagctctggcccaattaagctataaaatgtcacaggtagcagtgtccttagagaacacctaagctgagaactccctcatttttcagagggggggatctgagggtcagtgaggagatctgttttgtccagggtcatcagtgagttaggggatgagccgggacttgaaccctacagtggaagaaatgtgagccacagaacttaccatgttgcttgttgacttcctctggcacattccactgtattttccccgaagcctctccccagcctctcagccccactcctcgtggctccactccctattactcagaggtgttcagctccacccactagtctcccagcatggcagtttctgcccattacaggcctacaatacctgcgagcctgtcagccccctgcctcccacctctcaccacccgccccggaaatggttctgttgttaccggaccaatcagggcacccagcagcgtctagaacttggggctgataatggcatcgtgaatagaggaaattagagctgaatgcattcacagtgaatattcctcccagggcagacggggccattcgctgagtggcacatgacagatgttcacatggaacccagtcgcagggccaccttcactcctctcaccagcacggctgtctcccagccctggccgtgctttagagcactctgcatccccaaccctggccctccaagccctgcaggagccagtggttctgcatgtctcctctagtacctctcaagcacatggccttggccctgaagagcgtagtggttgatcgcacagcctttggggttagatgtatctgcttccaagtcccaaccttctgcctcactgctgggcaggccgggcaacatgcctgaatctcagtgcccccatctgtaaaatggggataattaatacccaccccacagtggtcatgtgaattcaatgtgattatgagtgtaaagagtttgtccccatgcctggtatacagcaggtgttcaataaacgatggctattatgattatcgattgctctctgtcacctgtgtatcctccaaatgcatgactggcctctgcaattcatctgcctcaaagtttacttctttgtaaccttcccagtaccttgcatatattaggtgcaggattaaggtgttgtgattgagatgatggtgacgatgatgatgaagatgctgatggggatgcagaggagggggagaagattaggcaagaatgtaaaagccctcatgggtcttagaaatcacaagagggcaatttgttgcagcagaaattgaatttcctttggagttatacagatgtgctgaaatttactgtcagcagcaggaaactcacacaccctgccgggtccatgccacattgttctgtgtggctggggaaagttacctcatctctctgagtctgggtctcagtccctcatcttctccagggctgttgttaggagtgaatgaagccatgctcacaaagtgcttagcacagtacttggcctagtgggtgttcgattcacagtggatattgctgttgctactcttgtcagtatatttctgatctccccaacttacagatcaccactccccttgagagcagagttgtacacttcattgtgtatgcttctggagggcagggatggaacatccattcatttagtcaacaactgtggattgagcagtgtctctatgcctgccactgtgctcagctctgaccacacagcagtgaacagaatagatgagctctctctgtcctcatggagctcacagcccagtggggaagacagatatataggcaacaagtttttaattgcaagtaaaggtgccagccccaaaaaacaccaagtcacaggatacagaacaatgtgggatggaccgggcagggtgtgtgagtttcctgttgctgctgtaacaaattatcacaaattcagtggcttaaaactaataaaaatgggccgggtgcagtggctcatgcctgtaatcccagcactttgagaggccgaggtgggcggatcacctgaggtcaggagttcgagactagcctggccgacatggtgaaaccctgtctctacaaaaatagaaaaattagccgggtgtgactgcaggcacctatctgtagtcctggctgctccaagaggctgaggtgggagaatggcttcaaaccatgaggtggaggttgcagtgagccgagattgtgccattgcactccggcctgggcaacagagcgagactctgtctc

SEQ ID NO: 1329 - DNA, 2230 bp, Homo sapiens
tttgaacaaattttagacttacagaaaagttgcaaaaatagcctagagaatcctgcatgcccttcgcctggcctgctcccgaatggccacagtgtgggcgcgcagccgaggctccacgtcaccaatgcgacccagtcagtaccgcctgctccctctggacgcccttctccagccatggtccccccaggcactcagcccccggcccctctgcctttcctcagcttgccctttggaagtgtggccagcagtgttttcagagtccctcagcctgggtttgtcccgtctttccttgtgtggatgagggccctgcactgttggcgggggcagcactggacacacccttccccaggcacagcccaggcctggcccacatgcagcttcggtcacgggggatgttgacacagcgcctagttggagcagcgtccacagatttttccttagaaagctcctgtcttctttttatagtgagcagatgcctcagggagataccttgagactctttgaaccttaagcttggacccactagttttggcatccattggtgaatattggctgcaatagttgttctgtgctgtttgcctaatagtgattttctctctttttttttttgagatggagtctcgttctgtcgcccaggctggagtgcagtggcgcgatctcggctcactgcagtctccgcctctcgggttcatgccattctcctgcctcagcctcccaatgtatctggggctacgggtgcccgcgaccatgcctggctaaatttttgtatttttttttcagtagagacggggtttcactgtgttggccaggatggtcttgatctcttgacctcgtgatctgcctgccttggcctcccaaggtgctgggattacagacgtgagccaccatgcccggccctaatagtgattttctatttctctctttcctttttaactttttatttgaactaacttcagacttgtacgtgagttgcagaaatagtcctagaaggggtctggacaggcaaaatgggggcctgaagggggcagagagatttctggccaaggaagttatggttaccaggcatagcagtatatggggcagaggctgcagcaggagccgggcgtggtggtagatggggcagaggctgcagcaggagccgggcgtggcggtagatggggcagaggctgcagcaggagctgggcgtggaggtagatggggcagaggctgcagcaggagctgggcgtggaggtagatggggcagaggctgcagcaggagctgggcatggaggtagatggggcagaggctgcagcaggaacaggcgtggaggtagatggggcagaggctgcagcaggagctgggcgtggaggtagatggggcagaggctgctgcaggagccgggcgtggaggtagatggggcagaggctgcagcaggaacaggcgtggaggtagatggggcagaggctgcagcaggagctgcgcgtggaggtagatggggcagaggctgcagcaggagctgggcatggaggtagatggggcagaggcatggaggtagatgcggcagaggctgcagcaagagccgggcgtggaggtagatggggcagaggctgcagcaggaacaggcgtggcagtagatggggctgaggctgcagcaggaacaggcgtggcagtagatggggcagaggctgcagcagaactgtgcaggagggaagtcactcactcttcactctcacgggcttcccctggctgctcagtagggtcctttggaagctgctgagaactgcaaatgcttagcccacccaggctccgtgtgacacagccaggagtgagctccacagctctgtgtggtggacatccagcctccctaccctgggaaagctgaaatgcaaagaaacacgtgttttagtagctaattattggcctttgagcttccaaaaccccacattccggcaatctgtagagctcttcaggccaggcgcattggctcatgcctgtaatcccagcactttgggaggctggggcgggaggatcacttgagcccaggagttcaagaccagcctgggcagcatagggagaccccgtctctacaaaaaataagaaattagctgggtatggtggcttgtgcctgtcgtcccagctactcaggaggctgaggcgggaggatcgcttgagcccgggaggaggaagctgcagtgagccgacatcgcgccactgcactccagtctgggtgacagagggagaccctgactc

SEQ ID NO: 1330 - DNA, 2736 bp, Homo sapiens
actgaggctggggacaagtggccatttgagaaccagaccttcttcaaaagtcttaaacgtgagtgagctgaatgtttaagaaaaacgggagttttagaaatgacaaactctttcaccccataacccctaacacctgtggctctgacagctctttgcatctctacatcctctacctccattggccagaccacccaagaactacttatttgacttctgctcccttctgcttgctcacgcagcattcattatcattatcattctctctccctcttccactcttcctcccccgcccttctgtcacacacacacacacacacacacacacacaccgtcttcacaatgcacatagaaacgtcctgatcccatttgtgtagatcaccaaaaagggcttcgccaccatccccgcaccaaatttcaacacacacgtccactccctttctgagacaaaacaacccctctcctctcctccctgtgccgaccccactggctagaagacgtgggaagcgcggggagggaggataagggctctgaatgcttctgtccccaccggctcaccgttccctcgcccccgccccgacagcattatcgccgccttcccgctctttacctgccaacaggttcctaatttcctcagggagggggtagggagaggaggtgctgctggggttgggcatgttagggagcgcagggcgtgcggggaaaggacctgcgctgaaaaggtgaccgacggggtggggctgcggctgcgacctagactcaggctagcggcccggattaagaacagcggggctacgagtcgggacactgccgggccggggctcacaacaaggaagtcactgaatctccagcgagctgcagctggactgtcggcccagccccgcccagagggccggggcggggagatgggtgggaagggacacgaagggcctgaggggtccaactgcgcatgtgtattcctcggttttcccggccccagaagaaagagcctgtgggcaagccacgcccaccgctacgccgggaagcaggaggaggagccactggtgggaagggggcggactgaggctgcgtcacctgatgctgcgtcacctgatccagcgtccggagcgccttacagccattttcggtactggtgccatcacaactgctgatcgtttctgcaggattccagaaaataatgtatccatgatacagagtgtatacaagttttgcgattacgccttctgcgtaacagtcagtcccaccgcagtttaacccacaaggaattttctcttgtcctaaactattatggccttctttgtccgattgaacggaggtaacgaagtctcgtcttccgccagtcgtccgggcgaagccagtctggagccgctccggagcgcgcgttgtgattggctcttacattacttttctacctaattcgtatccttggggtgacagattttccccactacaaggaagactgggaagttctaagcaccgtcctttggcaggaaaaaacaaacaaaacaaaacaaaaaaacagaaggccgaatagacattggcaccactgtccatctacaagcatcaaaaataaaattgctggtggtggttagtagaataaaattataaaatctgctcactccaacttgaccatttagtcaacaaatacttactgtcttctatctgtaaagcttcttaaaagttttctcttttaaaaaaaatggcttctttaaaacctttaacaggcatacatctttgtgcttcccagatattgcattttttaacaaattgaaggtttgtggcaaccctgcatcaagcaaatctgtgggcgccatttttccaaaagcatgtgctcagttcatgtctctgtcacattttggtgattctaacaatatttcaaactttttcattattattgtatatgttatggtgatctttgaagttactattataattactttgggacatcacaaacagcacccatataagacagcgactgtaatccataaatgtgtgtgttctgactgctctaccaaccctataccttcctccatatctctccctctcttgggcctccccattccttgagacacaacaatattgacattaagccaattaataaccctacgatggcctctgagtgttccagtaaaagaatcattttactttaaatcaaaagcttactttaaatcaaaagctagaaatgattaagcttagtgaggaaggcatattgaaagccgagacagaccaaaagctagggctcttgcaccaaacagccaggtagtgaatgcaagggaaaagtccttgaaggaaagtaaaaatgctactccagtgaacacacgaatgataagaaagcgaaggaggcttattgctggtaaagaaacgttttcatgttctggatagaagatcaaaccagacataacattcccttaagccaacgcctaatcgagtgcaaggccctaactctcttcaagtctacgaaggctgagaggtaaagaagctgcagaagaaaagttggaagttagcagaggttggttcatgatgtttaaggaaataagccatcttcagagcataaaattgtaaggtgaagcagcaaatgctggtgaagcagctgcagcaagttatcaaaaagatctagctaaggccaggtgcagtggctcatgcctgtaatcctagcactttgggaggatgaggcgggcggatcatgaggtcaggagatcgggaccatcctggctaacacagtgaaaccccgtctctact

SEQ ID NO: 1331 - DNA, 3407 bp, Homo sapiens
aacaacgcgtggctatgcgagcatggctctacctcctcttcggagccggctgcggacgctagggcctctctccctcctccacggaatggttggctgtcagggaagcacatgggcctccatatcccggcggaataggtcagcttggttctcacgaaggaaagggcctcccagcaggtgacccagggtagccagaacacccagctccctcctcatccctggagctggggagacctctgagacccagacatccccgtgtggggagaagaggccagtcggcttggctgtggccaagtgggactgggaccaggataagatctcctgggctcaaccaagcgggctgagctgggctggttcctgggcaggctgtgagctgccccaggcaggcccccggccggctctgacccgggccctgctgccccctgctggaactgggcagacgctgttgctgcaggctctggtgtacgacgccataaagggcaatgggaggaagaagtcacccccagcctgcaggaaccaggtggaggctgaagtcattgtccactctgactttagtgcatctaacgggaaccctgacctccatctccaagacctggagcctgaggaccccctgcctccagaggctcctgatctcatctcgggtgttggggatccagggcagggggcagcctggctggacagggagttgggagggtgtgagctggcagcccccgggccagacagacttacctgcttgccagaggcagccagtgcttcctgctcctacccggacctccagccaggcgaggtgctagaggagacccctggagatagctgccagctcaaatccccctgccctctaggagccagcccaggcctgcccagatccccggtctcctcctctgcctagctcttcccagaggatgtggtttggggcaggcaggtatggatcacataggatgcgatacctgtggccgtgtatgtccacatgtgtgcctgtagatacatcatcaagccctttggagcttcctaagttgctttggctgaggggagaggaaaacatggattattcactccccccatactctttgtgatacacatgtgacatgtgaaagacatacgagacatagctacatgtgatgtgcacatgtgtgaagtgcatgtatgcgtactggttgttgagctgggaaaccgtggccaggcagtggtcactacagcctgattggtcctccaggtcagaacggtgccccacagtggtcagtccccagccctgtgggcccccacctccatcgcccagccttttattacacactctgagagtgtctccaatgcctgtctgacaaagacagtcccagcccattctcctgtctggctgggttgggtgcaagcaggctctgaatgcctggcatttcagctgcatcacctcccagctccttattgcccaaatagagagggtggccctggctcccctccgagcaactctgcatttaattttgtaatctgggaagtgcctggttttgaaaatccgctttctctcactcttcccctccttccttgcccctggctgctctagtgttctgtctcccagtcacctcgctctcccagcaccagtgcccttctcctgctcccagatactctttcctttcctctctcctgttttccttcctctgctatctctcacacctctcccagactatgtcatcttgttctcctgcctgggttcaaactctgcatccttctctaacaacgtgactacctcatgtctgcttcaaggcccccgtgcccttcctgtatccgcggctgccgcgcactcgcctgccatcctcctgcctcctcttcactcagtgcttctgcttgccctgccccaggcagcccacccacgcccagtgcgggtgtggagaagatcttctggcttccctgcatcttgcctttgggattgggatccaagggttctccatggatggatccaagtcatagaggggaatgtttgagacagggaaggggactgtgatccagaggctcagaataaaaagatgccctcccttctatgcaggggggcaagtttactggatggagatgatttgggcctctcttccagaagaagctaaaggaagagaaggggagtgagagttcagggaggcccttcccaccctgtgaggcttgacttgatctggattggggatgacaggaatctcaccctctggggtgctggcaaggaggtctttgcacaggaaaaggggtagctcatttcagtttgttttttctttaaattgaatcctcaagtcattttctgttcacctgccgcacagggacaagcttgacttctattttctgtgtagtgaaaacaatgtcatttatttggtttttcacctcagccctctcataggagcatagaatgttagggtctttactccctaatgatgtctgattggcacatcaagagttaactctgccttctgggccaaattcgaaataaccagtccatttttccttttttttttttttttttttaaatggtggaatgtctctcagcacagttgcggcttcctcaaaccctgaaagcatctgtgtttattatactcgggtgtcactcactgttgatgtctgcacctacgtttccacctcctccccctccttcagccagcctatgataacactaaagattattaatgttggttttgtatctcgttaaagacagaattgtcacttgtagtatttctgtagcattcagcgctgctgtggctaacaccactgtgtatgtttcatcattgctctgaaggtcaaaagcctcattttattttgctggtttgattttttttttttaaagaagaaaaaaaaactgccctgaattaaatggctgttttaacagtaggctcttagcattataccacatagtcatttttcatgttcttgtttaacaggcactgaggttctggtttaaattaaatagctgcaaatgagacaatttataacccattaggttgggtggaaaattgtttctcaaaagcaaataagtaataaatctggtatctgcctataactcacagttgataagaaagtggccatttctcactagcactatatatgatttgggctctgggtaatttggaagtgttaggtttgtgtctttgtagcagtatttttattagaaaagaatctattggccttttacagggtattaatccctttgtcacctaccattgatgccttaagttttctgagtctcaattaaaaatcttccttttcttgatgcatgacaagtgtaatcagtacttgctcatttatttgtctgtatttagtttatgctgtactatttaattatccttccagcgttttttttttctccttacaaatatgatactctttagtgttaagctaaggcattgattcatgtatctgtccttataatgaattaataaactattttccag

SEQ ID NO: 1332 - DNA, 2297 bp, Homo sapiens
gttttacaagataactgccagacttttttccaaagtggttgtgccattttatactctcaccaccaacaaatgagaattctggttattccacaccttcaacaacatttggggtatttcacctggtttataatttgcatttctttgatgactaatgaaagacattttgtcatatatgtatttgatgtttatttatcttccattgtgaagtgtctgtttaaatcttttgaccacattttaatagggcaacttttctttttattattgaattatagtcctttatctattctgaatacaattccttcatcagatatgcgttctgtgaatattttttcccaggctgcagcctgcctattcatttttctactggtgtattttgtgaagttttaaaactcaatgcagtacaatttatcattttaatgggtatgtatttctgtttcctatgtaagaaatctttgcctgcccctcaaatagtgaagatagcttattttcttctagaagattgatagttttatgttttacttttaaatttataattcattttgtgtgtgtgtgtatgtatgtgtgtgtggtatgaggcaggagtcaaggctaaggatatttcgttgtctagcacatttttgttgaaaactcttttctttctttattagattgctctgatgcttttgttgaaaattaaattatatgtgtgattctatttctagactcttttctgatctattgatttatttatctatcctacaccagtaccatactaatgaatatagctttaaaataagttttaaaatcaaacaagttctctttgttttcttttcaagattactttaaacattttagattctctgtattttcatataaattttagaatcagattgtcaattcctacaaagaaaacctgttgaaattataattgggattgtaataaatctttagatcaattttagataactgacatcttaaaacgttgtatcctccaacccataaacaaggtatgtctcttcacagatttagatctttcaaaatttttctcagcaaggttttgtagtcttcagtgcacaagtcatacacatgtttttaaaatttattcctaagtattttatgtttctgtaaaaagaatttttaaaaatttcattttctgattgctactagtagatacaaatatcattaatttttgtggattgaccttgtatcctgcaatcttactaagctcacttgttggttctagtagctatttattttactttattttattttatttttgagacgaaatctcactcttgtcccccaggctggagtgcaagggcacgatctcagctcaccacaaccttcgcctcccaggttcaagcaatcctccttcctcagcccccaagaagctgggattacaggcatgtgccaccatgccaggctaattttatatttgtagtagagatggggtttctccatgtgggtcaggctggccttgaactcttgacctcaggtgatctacccgccttggcctcccaaagtactgggatttcaggagtgagccaccgcacctggccgctctttttttattccttaggtttttatatgtaaacattttatgtctcaactgagatttcccttcttttttttccttccaattggtattcttttttaaaaaaattttatttcattggctccaatctccagtacaatgatgaatagaagcagtgagagacagcattgttgctttgttcccaatcttagagagaaatcactcagtatttcaccattatgtgtgatattagttgtagatttttttatgggcactcttcacttcatcagcttgaaaggtacacttttatttccaatttgcagaaaagaaaatcacaagtggcgctgaatttgtcatatgacttttttgatccattgggatgatcatgctgattttctccctcattcaccattaatatagtgaattactttgatagattattttgaaagttaaattaacctttcattcctgggataaatctgacttagccaaaacatattatttttctggtaaagattttttgtctacattcatgaggactatttgtctgtaatttttttctcataatgtctttatcagatttttgtatagctgcataaactgaattaagaagcattctttttctgttttctgcaatagttcataaaagattggtgttactttttccctgaaatgttgatataattcaccagtgaaataatctgggcctagagttttctttgtggaaatgtttttgatgacaagttcaatttctttaataaataaatgactacttagatttctg

SEQ ID NO: 1333 - DNA, 2158 bp, Homo sapiens
agatgcacgtgagccgccgctccgcggagcgtgggagagggctctccctggaaactccacagagttggagtcggaagagatcaacgaggtttaaactcggaggcattgcacgatacaaaggggatttggagcgctaggggaggtgaccctaaagaacgggactatctgggtgcaaagtgacggcagatcaactcacctgcctggtgaagaggatggcagtgtcccagtactcggggtgcttgtcactcactttgttcagcttcttctgccaggcacagaagttgcgcagcgtcagggccgcattgccggtgaccttgggcccggagtcacgatctctaagaagcagcaccttgaccacaacgatgttgatggggttgaggatgctgggatggcggtagagtcgcgccgccgttgccagcagcgtcagcagataatgttccaggtccgcgccgtggaacttgaccattgactcgtccgcgaccaccagcgtctccacgtaccgcgggatagacacgaaacgcttggcgcgcccagacctgcgccggctacgactctccccgaagcccgcccgccgcggcttgtaagggtccagggcccgtaggatggcggggttccagcccgaggccaccccgcagcgagaggtggggtctccggaaggcccgcccggaacaccccggcgctggagaaggtgtgcgccctggctgttgcgctgcgccgccggcgcgctagcattgggcagcgggctaatgacatactcggcgcctcggtagccaaaggctccgcggagccccccgcacaggctcacagcagcgaacgagtccggctcggcgttcacgtccccagaatagaagcagcgtcgcaggtctgaagagcccccggtgagcccctggagggggacgcccagatgctcagtggagaaggcgggagccaagaactgagcatccggcgtcaggtgtaggtaaaagtcctcctgaaatgctgtgatctgaaaaatgagtccctgatccccggagtcctcgggaccccgccagtagtagcggcggccgttaatgtccgggtccagtcggatgggaacgactacctcccgctctggctcagagcctccagcggttcgcccggcgaaagccagggttaggatgcccagcagaagcatggcgccgggcagcgcaccgccgcgctgtgggaaggggctgggccgggctctccggccgctgccgcggtctccgtgcagcccgcactctggaaccgccaacgctacgggacagccggcagttcccagaaaggagagccaagggagggagactcctcccagggcggcgagcgtgcacccggcagcccgcgcttcctacctgtgcctttccaagcaaagcgcgccctgggagcttaagtacaatcgctgtcaagtgcaaggacgaagatttgcagccgagaactagcggaaggtgccgggcggcttctcgcaaccgcagccactcgcagcgcagcaagccaggcgctgggcgagcctattaaaggccccctcctctttggacggcccagtcagcgcccctcccctcactcccctcccagcctcccagagctcgctgccggagcctccaggggccaccggagaactcggtcccgcctccagagcggagagccacttggcggggagggaatggcattgagctgaggcaggaggcgtgggctggcccgagaaaccggcgctgaagtctcagtttgcgttttgctcttggttatgccccactgtcccgacgcctcactcgcttctgcccccgcggacagcgttcactctctgggtcttagtcttttatctcagggcagatcaggtcagcagctaggaatgaagacccttcactgacccgtccccaggcccacctcatccctgctgttgcaacatccctgctgtttcttaatcacagagtcccctaaaagacccagaatcaagaaccacccccccccccccgcgtaaatgtcctattgccagaagagcaataggacaggggcatgggagccctctggaacccaagaccgcctagccccaaggtctgccctgggcccatggtgtgctggatgggctggggcaaactcttcagttctcaggaatcttgccagccagttgttaatcacggacattattaaaaattaaactaaacac

SEQ ID NO: 1334 - DNA, 2121 bp, Homo sapiens
atgaaaaagtcaaacaaaggtatatttcctaaaagaaaattatataggactgcttatagcctcttgagaaatttgaaaaacctagggttcagagaaaaggaggaaaaacaattcagtggtgggaaacgtcagtcctttaggagaagctgaaggaactggagctgtttggtctcaaggatccatgtgttatcgctgagtgttggccggagagtttatggagcaagtttttgtttgcacaaaggcctaaaagagacagaaaggggcatacattgctcttcaacaaagtttgcatgaaaatttcaagaaacgatgcagtgctgaggacccccaggcacgcggtggagtcgcctcctccagagagttttcaaaacagagcagcttttaggctctgtagcctgaaccccagctggggagccgaggtctcttccagctccttcagtgctctgagaattgtcttctcgtcccagcaacaggcttgcctcgtgggctgcagagcggccaggccacccttagaaccatcgttggtgttttccaggcaatcgtgaaggaacatcctccatcagaaacagaagagaagaacaaaatcactgctgcgatcttttattccatcagcttgacccagcagggactccaaggggtggagctgggaacattcctcataaagcgagtcgtcaaggagttgcaggtaagcgacacgcagggagccccggtcacgcttggcttccgtgtggtcaggtcagcgaacctcgtggggtgtcaggtgccatgagggacacagatgaagacaggagctaaagggaggggcagggggtagaaaaggtgccagagaccccttggcaactcctaggagccatgagtctcccagagagatgagaatgatgctgagagaggcctccaacccagctgcccagttgactgcaagacgcagttgtattctgaggtcatcaactctctctagggtgacctcgttctgacctggtcaggacactctggatttcacgtgtcatcctggtgtaagtgtcactctgaaatgtcccagccagatggcacagctggtagtcatcctgccacgcctgtcctccccctgcccctgcccacactctcagggcctctgacacctgatgtgctgttagcttgggccttctcatggcctgtgagggagtgctgaggtgagaccagacagctcgaaggtaaatgcatcggcttttaatctaactctcctctctttgctgccctgtgaaaaacatattaaccatcctacatcagaaatgttgatgttcactccaggcctaggctttcaaaaaccaccagcctcatcagggacttggataaattccaatgagtagaatctaataattaggtgcggtagctagatgtttgctaatgactggctctgagcagggtgttcactgtgttgggggctgcacatggctgcagcagaggccttcctttgaggacgacagtgtggagtggggacgtttacatgctcctagtaaattcataatcaatttctaattgaagccctcaggattcagctgggcgtgggcttcattaccacgccgccatgtttcccccgggtaacaatgagccgtagctcattcccacagtttcctcattcctctgtcttcactgagggtggtgattagcaggacggggtggggaaatgtatcagggtaaggaaggcaggaagaggaggagcagatcccgggattcgggggagttgggccttagcccagcagctgtcctgagggtgtcgcttaactgcccctgggcggccagcctagaagtcctcaaagggagtctggaagggaacaaatggcccctctgcgtggaggcgctcgtcagggtttacaaaagcaaaacacagctgggcgcagtggctcacgcctgtaatcccagccgaggcaggcagatcacctggggtcaggagttcgagactagcctggcgaacgtggtgaaaccccgtctctactaaaaatataaaaattaggcatggtggtgcatgcctgtagtcccagctactcgggaggccgaggcaggagaatcacttgaacctaggaggcggagattgcagtgagccaagactgcaccattgcgctccagcctgggagagacagtctc

SEQ ID NO: 1335 - DNA, 2108 bp, Homo sapiens
ctgggcctcacgaagcagcatcggaggtgcctcagccatggcatggatccctctcttcctcggcctccttgcttactgcacaggatcggtggcctcctacgatctgattcagacaccctcgttgtccgtgtccccgggactgacagccaccatcacctgctctggagacagactggggtctagatttgtttcctggtatcaacagaggtcaggccagtctcctgtagtggtcctctttcaagacaacaagcggccctcagggatccctgagcgcttctctggctccaactctggggacacagccactttaaatatcaccggtgcccagactttggatgaggctcattattactgtcaagtgtgggacgccgacactggtgtgattttcggcggagggaccaaactgaccgtcctaggtgagactctctgcgtcatctctttttttgtctgtcctctatcaaatgaagatcagtctttttccctccattccaggcctgaccgaggccctctgtcctccctgctcagaccgtcaattggctcaccacgtcgtcacacccactctatgactgacaccagggtcagggggcaagatggagtggcttactgagccccatttgtctgtctgtctgtctccctgtctgtctgtccagttttctctttgtatatcattcttcctgacaggcgctgactgggtctctaagtcttgttctgttcagattttttcactctgaattcttgtcgggccagctttgtccttgggtcgcctgggttacatctcctggggaattgagagaaaggggtccgagggggggcacctcccgggagactttgcaagggcccagtgccctcgggagtgatgtccgggactcacagacctgggacccagaggcagcatccagacgcagattgaggtagtggtgggggggctgccctgggcgtctgggggctgccagggactgagccctgaggcagcctgagactcaggaaaccccctccggagcgagagggaaaagcagactctggacaccagaaagccagggaaggggtcagaaaaggagtggatgtgacagaagggcggactcctgagtctcttcagagtgtctcccctgtgtccagggggatcagaggggcagagtccaccgcgtgaaagccccactgctatgaccaggtagccgggacgtggggtggctgccagaagagcctccacagacttagagagagcccaggacaacaggcaggctccccgatccccccccgcccttgccccgtgcacgggctcccgaacacacatttgccttgaacagcctgagggaccaaaaggccccagtatcccacagaggtgaggagccaggccagagaagtaaccccagagttcgctgtgccagggtcagggcgctgagggtcagatgtcggtgttgggggccaaggccccgagagatctcaggacaggtggtcaggtgtctaaggttacacagctccccgtgcagatcaggacatagtggaaaacaccctgacccctctgcctggcatagaccttcagacacagagcccctgaacaagggcaccccaacacctcatcatatactgaggtcaggggctccccaggtggacaccaggactctgcccccctgcccctcatccaccccgcaggtcagcccaaggctgccccctcggtcactctgttcccgccctcctctgaggagcttcaagccaacaaggccacactggtgtgtctcataagtgacttctacccgggagccgtgacagtggcctggaaggcagatagcagccccgtcaaggcgggagtggagaccaccacaccctccaaacaaagcaacaacaagtacgcggccagcagctatctgagcctgacgcctgagcagtggaagtcccacagaagctacagctgccaggtcacgcatgaagggagcaccgtggagaagacagtggcccctacagaatgttcataggttctaaaccctcaccccccccacgggagactagagctgcaggatcccaggggaggggtctctcctcccaccccaaggcatcaagcccttctccctgcactcaatcaaccctcaataaatattctcattgtcaatcag

SEQ ID NO: 1336 - DNA, 1896 bp, Homo sapiens
attcgcgtggaggcgcgtcgcgcgcagcggacgccgacagaatccccgaggcgcctggcgcgggcgcgggcgcgaaggcgatccgggcgccaccccgcggtcatcggtcaccggtcgctctcaggaacagcaggtgaggtctccgcggcccggcttcgcgccgtagggtcgccgcgctcctcgtcggccgggggcggggttggagaaggcgggcagagaggccggaaaacgcaggcgccagctcgcgcccaggtccgggccaggttcagctgggatgcgtgagccgatggaggctcccctggcatctgggagtgagtgtccagagaatagcttccctagttgacccacgagccatgtctgtgcccacgaatgtgggagcctgaggccatggggggtccccgagagagagagggtgtctgggcacttgcccatgaacggaccactgcatgcctgagagagaagggccctgacaccaggaacttgtgtggactcagggcgagtggccacctggaaggacacttctcagccagtgtgcccactgggagggggacagcgtgtcccttgctggctcgagtccacagggcaccagctgctttgggcacaggggagctggttctggggctgctctactccatgggggccacggtgaggatgagaccaggccaggttccttggttgggccctgggccctatgccaggttggctctgagttggatgcgcactgccagccaggatataaccaacaatgtccccagattcccgtgccacctggggccaggcaaaataggttaaaatccactggcagacccatttgtaagtgctccgagtgcaccgtcaaggtgggagcttgggaatgggcgacctcacctgccgcacctggacttgccagcacaggtctcttctcaccttgccagtctgcggcttccttccctcctgcgccccctggctacgcaggcctggaaacagctccttagggatcccagctgaacagctcctgggcttgggctatacctcccagtgggagggtctggcctggggtctgagggccaggggtggtgtggtgggcggggtgtgcctaacatccaagaatctactccaaataagggaaaatatgaaagagctggattttggcttcccaggactgcccgatctggtggctttgggatcgggcgacatctggcggttgatactatgttctagggacaagaaccctctacacgcccattccttgtttcctctaaatagggaaaagctagggctggaagacacggcacccacctcctgacactctttctgctggaattgaccactggtcactctgactcagtttccctgagctctgaagattaaggaatgaacccagacaacccagctcaatggcccttagtggagagagagtcaattattgatggaattccgtgcctgggaacttgctttccagtggggcagggggaccagaaggacaacttcaagcccgtcttgaatggggcccgtgcagggaggggtctgtatgggttcccccttcccagccctccctcccacctccaccccagctcccagacgcccaggcgcacttggtgcaggtgtgtctcaaagtggtcaggagaggggacaatatacaggggttggcctcagtactggaaaatgccatttgcaccccctaacaccactactagtgggaaaaaccagtggggcctcaggctgccccgaagtgaatgtgctgggcggatcacagccccaccacgtgtcatgtagacacccagggctacaggagagtcaaccatatttgggcatgacgtgctggccaacccagggcctccatctctcactggtctttagcagataaattaattattactagaattgaacaggagggacagatacctgccttcctag

SEQ ID NO: 1337 - DNA, 1499 bp, Homo sapiens
ggtgtgccaggccggggccaagtcggaggcccctcgctctgggtgggcgctggggcccgcgagggctactgtaaggacccctggcttctgaggatactgcgtctagaactttctccgtatgggtgccgaggcgtcctcctcttggtgccctggcactgctcttcccgaagaacgcctttcagttaaacgggcgtcggaaatctcgggcttcctggggcagggatcgtcgggagaggccgctctggacgtgttgacacacgtgctggagggggcaggaaacaagctcacatcttcctgtgggaaaccttctagcaacaggatgagtctgcagtggactgcagttgccaccttcctctatgcggaggtctttgttgtgttgcttctctgcattcccttcatttctcctaaaagatggcagaagattttcaagtcccggctggtggagttgttagtgtcctatggcaacaccttctttgtggttctcattgtcatccttgtgctgttggtcatcgatgccgtgcgcgaaattcggaagtatgatgatgtgacggaaaaggtgaacctccagaacaatcccggggccatggagcacttccacatgaagcttttccgtgcccagaggaatctctacattgctggcttttccttgctgctgtccttcctgcttagacgcctggtgactctcatttcgcagcaggccacgctgctggcctccaatgaagcctttaaaaagcaggcggagagtgctagtgaggcggccaagaagtacatggaggagaatgaccagctcaagaagggagctgctgttgacggaggcaagttggatgtcgggaatgctgaggtgaagttggaggaagagaacaggagcctgaaggctgacctgcagaagctaaaggacgagctggccagcactaagcaaaaactagagaaagctgaaaaccaggttctggccatgcggaagcagtctgagggcctcaccaaggagtacgaccgcttgctggaggagcacgcaaagctgcaggctgcagtagatggtcccatggacaagaaggaagagtaagggcctccttcctcccctgcctgcagctggcttccacctggcacgtgcctgctgcttcctgagagcccggcctctccctccagtacttctgtttgtgcccttctgcttcccccattcccttccacagctcatagctcgtcatctcggcccttgtccacactctccaagcacattacaggggacctgattgctacacgttcagaatgcgtttgctgtcatcctgcttggcctggccaggcctggcacagccttggcttccacgcctgagcgtggagagcacgagttagttgtagtccggcttgcggtggggctgacttcctgttggtttgagcccctttttgttttgccctctgggtgttttctttggtcccgcaggagggtgggtggagcaggtggactggagtttctcttgagggcaataaaagttgtcatggtgtgt

SEQ ID NO: 1338 - DNA, 3488 bp, Homo sapiens
agtgcggaggaggcgcggcaggggacggggctgttgttgcagggcggcccagacaggacgccctgtctcctttctctcctacaaccgctttttaaaagtctgtttctgtttttagcagcggctgccggcctcgtcgtcctccacctacggggatgacctggcttctgtggccccggggcctttacagcaggacgtgaagctgaatggagccggccttgaggtggaggactcagaccctgagcctgaaggggaggcggaggacaggtaacagctgggcccaccccagagataagagacataggctcaatatctccccacctccctcccctaccaacctcccccgacgacctgccccgactcctccgccccgccccgaccccccactggcagtgggagtgactcagggtcagaggctcagagttcctggggacaaagtgggacattcatcctccctccaccctggcccacgcaacacccaccagcgaacagctgtgcgcgggcgcacgcgcgcgtgtgtgtgtgtgtgtgtgtgtgtgcgtgcgcgcgcgcgcgcgcatacgggtcaaggatcccttatccgaaatgctggggggaccagcagtgtttcggatttcagattttttcacatttcagaatgcttgcattatatagttagctaaggttcagcatccctaatctaaaaatctgaaatgccccaatgagcattgcctttgagcacgtcaagtcgctgctcaaaaagacttggattttggaacatttcagatttaggatttttggactagggaagttttgcctgtagttaacagtgtgcggtttcctcatgggcagatttgtgtaatctcaaccatagtcaacaaacagcccatctgcacaggatccttccagctgctcttccataacttcatctctcccctcaacacctgcaaccactaagccattttccccctacccgtctgtaattttgttattttgagaatgccaggtaaatggaatcagagcggataatctttggagcatgattcccttgcattcacctgtgttgtttcgtgtatccatagtttattctttttttaatctgggctcactgcaatctccgcctcctgggttcaagcgattctcctgtctcagcctccccagaagctgggattacaggggcccgccaccatgcccggctaattttttttgtatttttagtagaggtggggtttcaccatgttggccaggctggtcttgaactcttgacctcaggtgatccacccgcgttggcctcccaaagcgctggtattgcaggcatgagccaccatgccaggcctattcttttatttttcaaacgaggtctcactgtgttgcccaggctggagtgtagtggcgtggtcatggctcactgcagccttgacctcctgagctcaagtgatcctcttgcctcagcctcctgagtagctgggaccacaggcacacactaccaccacgcccagctagtgtgtgtgtgtgtgtgtgtgtgtgtgtgtgtgtgtgtgtgttgtagagatggggtctctgtatgttgcccaagctggagtgccatggctgttcatagacatgatcattgtgcactgcagcctcaaattcctgggctcaagtgatcctcccatctcagtctcccaaagctttgggattacaggcgtgagccactgtgcccggcctggagtttgttcttttgtattgctgggtagtgtgctatgggtagcttttcgatttggttggtggtctgacacaagctactcccctcttaccgcacatggacacccagagcccatcactgtggtccactggaaggggaaaggaggcagagttgtacagtgccaggcctgggccatgtgtcccccatccagttggggttctgccatctaaatgaggaggtggcagctggcctgagccccgtggagttgggttcaggaaaggggtgtggggtcccatcccgaagtcctggcggccccataggaatctttctcctctcctggccagtcagagcggcttctcttcctaacggctgccctgctgagagcaggacgacaccatctggctgcatcctgtccctatcagcctgtgactctgtatggtgggtgggcagacctcagcccaggtgacacctgcctctaaatgaacccaaggaacagaatgacagagatctgcccgtccctaggatgagactcttgggacccaggtgtgggctcagcagtcaccggtgtggtgcaggggggacagctggaggtcccttgggagatcccccaccttcctagctacagctggagctccaagcaccccaaccccccagccttggagctgggcatcattttcctggggccacggcagctcccacagcctgacattctgttcccgggagaagaaacattcccagaaagcactcgtgtggccaaaagcctctttctgagcaaacacgatgtggactaaattagcaaaacatccagccggtgggcaacttcaaaacggaacaggctgcgtttctctgaaacacaaagccccggcctccctttggggcacccaggaccccaaattgccctaagactgtcccagctctcgcaccctctgccttcgccccccggggacctcgggctcacatcacaaggccctgcggggaagcagatggctctcagcaaatgcactttcagcttccggctgccggggctgggtgaccccggtgcttcctcaccgtgagttcctgatgtcctcgtgcccagaggaccagcccactcccagggcccccaggcccagaacctgcctgccttggggggccctaccagctgcctgccaccagtaccagcagactttgattcccctttgtgacccctggcacctgcttatgtctgcatttgcccatcttctccggggtggtatttatttcagccaacaccgctcagccctgatctctgccagcacggaggcccctcgctgcctgtgagatcaaggtctgaggctgccctggccggtgggttccccacccctggcaccctacaagcgacaggccctgtggctccttcctcagcccgaggccccgtgcccacttgctgtagaggatgttgtaagataaaacctcatctccagggtcacagccgggcctcggcctcctgtgagcagcgggaacctggaaagcagcacccagagcgccagcccgttccacagatggggccagactccggcccctcagagacatagtggccgggtggtgggggcccacaggccagggcttctgagccctgtcttcgtctacagcccagcctttcagagtggtggggaggagggtttatggatgtcaaacacctgcaccttgagataatcctacaaccacatgcagttgtgggaccgcagtttggtcctggggaccattcatacccacacacccagcttgtgcctgtggttaacatctcagaaaactctggtaaatgatcactccaggatattgacaagaatacacgttactgatcttactc

SEQ ID NO: 1339 - DNA, 2283 bp, Homo sapiens
atgtatatatatgtgtatatatatatatatatagcataggcaacttaaaccatgccagagggaattgaaaatagggacctacaggagaaacaagaaagaatgaatactagttggctctactcaataggaagacccagggagaagttggaattaactcagatttccagcctgggtgactctgaatggctgtgaatggcagtgttcttattaacagggattgagaaggcacataggaatagaacagcattacccttggacagtgaatttaaggtgttgcctgttggacatctgccatgtcttgtcacttttcgatatgggtctggccctcaggcaatagcagagatttgaatggagctgtagagtcacaagtcatctttatagacatgttagttgaagccatacgcatagatgagctcatctgggagatgaatttaaatcaaagagatcaaaatttccttgtttcacttaactaatcttcttagccatttactcttattgtgagcctggcttttccacctgaccaagttcttcttgttccaggaattcaaagataaagaaaccaggctctattatttctttctgattgattgatatttggtttctaaaagaaattttcttccttctctacattcacaaactcttctattcttttgccacattttatacacttaagtttaaaccagtttccatgtatattttgtctatattatgtttgttattgagaaataggcatttttgggaagaaagaatttggcattttggaaataatcagaaaattaaaaaatgcacacaccactttcccattcttctccccaccccaacccctacccctatcctcaaatgcttagctagtgaaatattaaaatgttgtaatagaaattggagtcaaggtctccttgctgaagagaccatctattttcagagactggaaggagagagaacaaaccaatcaagagtcattggtttgttgcctctattgttttatttctgacctgcgcaaatagcttttgaagtggagatatgctagttcttggcaactaatacttttctgggcatgcattttatgaaataataggtatgtatctgcctcattcttttaggctatgtgtttctctagtttaaaaataatttgccaatgaaggtctatctgtatttatgcaatccctaaatttgtatttaccttatgtgcgtatgttttaaatgtgtgtatggaggcttattttggatgctgtagatgggagagagtgccatcatctagtacactgttatatgccacaagaaataattgcacagccatttcttaattttaaggtttttcttttcaacaggttttgcactgattgcaaaaataaagtcctccgagcatacaatatccttattggtgaacttgactgcagcaaagaaaagggctactgtgctgcactttatgaaggcttgcggtgctgtccacatgaacgacacatacatgtttgctgtgaaacagacttcattgcacatcttttgggtcgtgctgagccagagttcgcaggagggcgaagagaaaggcatgcaaagacaatagatatagctcaagaagaagttctgacctgcttgggaattcatctttatgaaagactgcatcgaatctggcagaagctacgggcagaagagcagacatggcagatgcttttctatcttggtgttgatgctttacgcaagagttttgagatgaccgtggaaaaagtacagggtattagcagattggaacaactttgtgaggaattttcagaagaggaacgagtaagagaactcaagcaagaaaagaaacgccaaaaacggaagaatagacgaaaaaataagtgtgtgtgtgatattcctactcccttacaaacagcagatgaaaaggaagtaagccaagagaaggaaacagacttcatagaaaatagcagctgcaaagcctgtggcagcactgaagatggtaatacttgtgtagaagtaattgttaccaatgaaaatacatcatgtacctgtcctagcagtggcaatcttttggggtcccctaaaataaagaaaggcttatctccacactgtaatggtagtgattgtggatattcatctagcatggaagggagtgaaacaggttctcgggagggttcggatgttgcctgcactgaaggcatttgtaatcatgatgaacacggtgatgactcttgtgttcatcactgtgaagacaaagaggatgatggtgatagttgtgttgaatgttgggcaaattctgaagagaacgacacaaaaggaaaaaat

SEQ ID NO: 1340 - DNA, 2099 bp, Homo sapiens
gtacgaaagagaaacccggagggcgccggggactgggccggggtctgcagggctcagctgagcccatgagctcccagagctaacccctgaacacccaggcgggcaaagggctgatgtcggtagtccccatcctggaggggcaggctctgcgcatctgctcctggcatggcgctgcggcacctcgccctcctggctggccttctcgtgggagtcgccagcaagtccatggagaacacggacactgatgtcccagccccagaggtgctgaccaggtccactgctggtgtcagaggggcctgtgcctcgcagaggggagccctccgctgcctgctgggcccagctgcccgagtgctgtgtggatgtggtgggcgtcaacgccagctgcccaggcgcaagtctgtgtggtccaggctgttacaggcgctggaacgcggacgggagcgccagctgcgtccgctgtgggaacggaaccctcccagcctacaacggctccgagtgtagaagctttgctggcccgggtgcgccattccccatgaacagaagctcagggacccccgggcggccacatcctggggctccgcgcgtggccgcctccctcttcctgggcacgttcttcattagctccggcctcatcctctccgtagctgggttcttctacctcaagcgctccagtaaactccccagggcctgctacagaagaaacaaagctccggccctgcagcctggcgaagccgctgcaatgatccccccgccacagtcctcagacgtggggtctgcaggaaaggaggacccaccacgacagggcagacccccaatacctgctcctccttgaagtccagctccacccgaggacagacgcagccggcctccgccaggccctcctgagcagccatcgcttcagtggtgctgggtcaggcggacccaagagtcagcccgtacggaagccgcgctacgtcaggcgggagcggcccctggacagggccacggatcccgctgccttcccgggggaggcccgtatcagcaatgtctgacctggaggccgagaccacgccacgcacttggcggcagggacccggaggccgaccccttggcgggaaccagcacaaagtgttggcatcgcccggcgcccgggacagtcctgggcacagcctcggctctgggtccctccgcctcccagcgacggacgccaaagggtcccgggccgcctgaggctcctccccaccacagccatctcgtttatcggaccaggagcaggcatccatgagacctcagagcttcagatcgaggccttggggggtccgggcccccccaggaaacacggtgaggccccagcgcctgcagccaaagctggcacgatctatggggcaggtgccgctctgcctagaaaagccaggggctctgctgccgtgccctccagagcccacagcgggcaggactcctccagcaccaccacacccagtggcccgagacccctctgagaacagtgaggctggtcctcgtgccgttccagccggtgcccggccagtggggaggacacagcctaggaaccagctgcctgagaccagggtgcctctgggctgtcctcccgcgtggcggagaccccaagcacgcagccacccatttccggagctgcaggatagagcttcctcttgatctctgtttttaagcagaaattcattgtgcagaaaagtcctccagagctctgtggccccgctcggatccgctggacccccatgcctggctggtccctgcccacgtggggcaggcccacatctaacccccacaagtcactgcctcactgcacctgccaaggctgccctggcgctgagtcctggggtccctcccggagttcctgggagaaaggcgccgtcgtggccgcctcccgcacgccaggcccgggctccaccgtgggtctcagacgccctgcggcaccggcaccgtctgctttagcatgggacccccatctgaggggtggcctggccttcggggtccccacgctcctttgcgaagtccactgtgggtgccatcatggtctccgggacctgggccagcgggaacgtgggggcactgggtgtgctgatataaagtcggcattactc

SEQ ID NO: 1341 - DNA, 1991 bp, Homo sapiens
cttcagcctctctccagcatctccaacctaatgcagctcaaatgggactcgtgagttccccagctgagctccaatcggggcaccagctgcttaagcccaaaatggacattgacctcagcttttatgcatcaaatgtatcaggaagtctccagtttgtttttacgtctggaaatatatctgaaatccatgtgcccaccctaccccctcatagctttctgccaccagacaaatccaaggctcctttgtctgtccccattttactcctgcccctccagaaatttctcctcacggctgttcaaagaaaatctagactcctcagcacagccaacctgtctctccctccctcacccacgtggcctttgaagacatggagccatagaggagaaccaagtgctggatgtgggctttttcatgggcatctgttttgaggagaaaagttgtaaatgtttttgtcttattttcatagcattgggaatggtaccacctcccgaaaatgtcagaatgaattctgttaatttcaagaacattctacagtgggagtcacctgcttttgccgaagggaacctgactttcacagctcagtacctaagttataggatattccaagataaatgcatgaatactaccttgacggaatgtgatttctcaagtctttccaagtatggtgaccacaccttgagagtcagggctgaatttgcagatgagcattcagactgggtaaacatcaccttctgtcctgtggatgacaccattattggaccccctggaatgcaagtagaagtacttgctgattctttacatatgcgtttcttagcccctaaaattgagaatgaatacgaaacttggactatgaagaatgtgtataactcatggacttataatgtgcaatactggaaaaacggtactgatgaaaagtttcaaattactccccagtatgactttgaggtcctcagaaacctggagccatggacaacttattgtgttcaagttcgagggtttcttcctgatcggaacaaagctggggaatggagtgagcctgtctgtgagcaaacaacccatgacgaaacggtcccctcctggatggtggccgtcatcctcatggcctcggtcttcatggtctgcctggcactcctcggctgcttcgccttgctgtggtgcgtttacaagaagacaaagtacgccttctcccctaggaattctcttccacagcacctgaaagagtttttgggccatcctcatcataacacacttctgtttttctcctttccattgtcggatgagaatgatgtttttgacaagctaagtgtcattgcagaagactctgagagcggcaagcagaatcctggtgacagctgcagcctcgggaccccgcctgggcaggggccccaaagctaggctctgagaaggaaacacactcggctgggcacagtgacgtactccatctcacatctgcctcagtgagggatcagggcagcaaacaagggccaagaccatctgagccagccccacatctagaactcccagaccctggacttagccaccagagagctacattttaaaggctgtcttggcaaaaatactccatttgggaactcactgccttataaaggctttcatgatgttttcagaagttggccactgagagtgtaattttcagccttttatatcactaaaataagatcatgttttaattgtgagaaacagggccgagcacagtggctcacgcctgtaataccagcaccttagaggtcgaggcaggcggatcacttgaggtcaggagttcaagaccagcctggccaatatggtgaaacccagtctctactaaaaatacaaaaattagctaggcatgatggcgcatgcctataatcccagctactcgagtgcctgaggcaggagaattgcatgaacccgggaggaggaggaggaggttgcagtgagccgagatagcggcactgcactccagcctgggtgacaaagtgagactccatctc

SEQ ID NO: 1342 - DNA, 1816 bp, Homo sapiens
gaagtgctcccagatgaacttggccgagagcatcaccatggccacgccaagtaggcggggctaggaccccacccacaccccctccctggaatcccagggcccacctgggtgatgttatcccagagacagggacaagagatgagaggatggaaatgtctctgggaaaaaggctgcaggagctggaggtgatgagcagagcaggcgaaggaaagggaggcccctcctccctccatgttagagaagggagccctagatctggccaccagcggcctgtgcacacctggggctgagggcacacagggctgcacatacacactcaaggccactgtgagaacaggtgagcagggccagagggctatggaaagcccggctgaaggctgcacctccaggctgaagagagctttaccggcatccgccaggaagcctgggctctggggctgtgtcattgtagatgaccatttccaggtcatggccacagccccggttctggtcacagctgggccaccaatcctcctgcgccacccaccacttagccatcgggccgtcttcagggcatcggccggcctcagctgctgcagccagaccctggcgttgcggaaggctggccagtccacatcctgcagcctacgaggaggtcaggtctttgtcagcaaaggtgggaaaccaggggagcggcggcaccaggctccagagacatttgaaatgacttcagaagacccagggccactcagggtgaccacatcggacagctgcctcccacaggctgtgacggatgtttaagcaagggatcgatggtcacctgactctcaggagtgcaggagaggccactgagacccattcagaagggactgggtgttggtccctgtggactcggcctctggctggtggtgaggaggaggatttctcaccacccatcctctggcccctgctgcccaagggagcagactcctgtgagctgggttccgggaagtccatctccagcaggaactccaggccaagcgcgcatctctgtgatcgtgtgtcaccatggcggtgcgtgcgtgagtgcatgcgtgtgcactggtctgtggcctgtggtgcgtgagttccactaggacccatgtgaggtggagggtcttccacctcccctcccattcgggccctccctgtgccacacagacacccatctgtgccttccccttctgtgccaccaaaaatggaagagatagacacttaaaagaagcaactcaaatggaatgaaatcgtttctgttggggaatgctcaagacgttcaatcatcttagaaaatcccaccccacctcccgctgcagattaattactgtaagtgcaactccaatcgggctggtgaccccccaggaaacctctgaagctgtcccaggctgttcccaacatgggacctccactctggcacaccaggacccgaggcccctgacaggctcctcgttcctgcctcgctcaaggctcaggtcccccacctgaaatactccctcccaccagcatctcctgcctcgctcctgctgccaggtccccaaaagctcttgttcatgagctcgcctgccatccacagcccccaccagaacccaagtggctgtggaattcgctgccctgattctctgcccagagcctcggtccagactgtgttccctggcgaattagtgttcagcatttttgtttatttgtttgttctttaacaaaagttgttttggtttgagattcagcaaaaatacacactgcattcagcttcctctccattcaggattcagtaaattggttgttttcctgtcaaaaaaaaaaaaaaaaaaaaaaaaaaaaaaag

SEQ ID NO: 1343 - DNA, 2153 bp, Homo sapiens
gcagagggtcccacggtggaagcgagagaggaggactgaacattcttcacgatctgaaaggaaaagaagagattctttcgggatgtttgacggttatgatagctgcagtgaggacacaagcagcagctccagctccgaagagagtgaggaagaagtcgctcctttaccttctaatctcccgattatcaaaaacaatgggcaagtctacacatacccagatggtaaatctggcatggctacctgtgagatgtgtgggatggttggcgtccgagatgctttttactctaaaacaaagcgtttctgtagcgtttcatgttcaagaagttactcgtcaaactccaagaaggcaagcattttggccagacttcagggtaagcctccaacaaagaaagcaaaagttcttcagaaacaacctttagttgctaagctagccgcatatgctcagtatcaagctaccttgcaaaatcaagcaaagacaaaagcagcagtctccatggaaggtttcagctggggtaactacatcaatagcaatagctttatagcagctccggttacctgttttaaacatgcacctatggggacctgctggggtgatatctcagaaaatgtgagagtagaagttcccaatacagactgcagcctacctaccaaagtcttctggattgctggaattgtaaaattagcaggttacaatgcccttttaagatatgaaggatttgaaaatgactctggtctggacttctggtgcaatatatgtggttctgatatccatccagttggttggtgtgcagccagcggaaaacctcttgttcctcctagaactattcagcataaatatacaaactggaaagcttttctagtgaaacgacttactggtgccaaaacactgcctcctgatttctcccaaaaggtttcagagagtatgcagtatcctttcaaaccttgcatgagagtagaagtggttgacaagaggcatttgtgtcgaacacgagtagcagtggtggaaagtgtaattggaggaagattaagactagtgtatgaagaaagcgaagatagaacagatgacttctggtgccatatgcacagcccattaatacatcatattggttggtctcgaagcataggtcatcgattcaaaagatctgatattacaaagaaacaggatggacattttgatacaccaccacatttatttgctaaggtaaaagaagtagaccagagtggggaatggttcaaggaaggaatgaaattggaagctatagacccattaaatctttctacaatatgtgtcgcaaccattagaaaggttacacaaaacttccttttaaatggtttgactacctcagggaaactggctccattgcagcaccagtaaaactatttaataaggatgttccaaatcacggatttcgtgtaggaatgaaattagaagcagtagatctcatggagccacgtttaatatgtgtagccacagtaactcgaattattcatcgtctcttgaggatacattttgatggatgggaagaagagtatgatcagtgggtagactgtgagtcacctgacctctatcctgtagggtggtgtcagttaactggatatcaactacagcctccagcatcacagtgtaagttggtatacagaaaaggtgtccttttgtaaaaatcagcaattctccagaggactatctcacataagtcatcttatgagctcacaggacaagaatatacctatgtctgattggttgccaggtaagacattaagactcaacaacaatatcacagaatcagaccatgtgtcccatggcaatgtgaatccaatagtcaattacataatgactatagaaacacaacagtcaccaaattaaactagacttactattttagtgagttaaaaattacatactaaaagtttattggtaggtaataaatgcttttgagtaaatagtggaaaatgtctcatgttgaggctatggttttgtaggaacaagtacccttattttcagagcatcatgtacttaagtataatggtcttggtaaagatagttcatataagttgtatctagacaactgtatcgtctaaattgtaaacaattatctagtaccaattttccctttttatttttcagcatcaagagaaaaccaatcagcttcatc

SEQ ID NO: 1344 - DNA, 1919 bp, Homo sapiens
gatttggccccgactgcgagccggacgggatggtggaggggcggagggcgctgctgggggcctgggaggctggatttagggctgcctgggcggtaccgcccgaggggcaagacccgacaggcggggcgcgcgccgcaactccacagacaaacgaatttaaaggagcaaccgaggaggcacctgcgaaagaaagcccacacacaggtgaatttaaaggagcagccctggtgtcacctatcagtaaaagaatgttagaacgactttccaagtttgaagttggagatgctgaaaatgttgcttcatatgaactatttggagttttcctcgtcttactggatgtcactctcgtccttgccgacctaattttcactgacagcaaactttatattcctttggagtatcgttctatttctctagctattgccttattttttctcatggatgttcttcttcgagtatttgtagaaggtttttgatctaggccctgattcccagacagcacctttggatccacctggaggctaggagaacttgccatcctgaagggaaggacacaggcctggctgtttttaccatgtgatgactgtagagccccagggccttcagcaaactcatgcaatagctaaggagtggttacagcaggtcttgggcaagaccccgtgctgtgctggcctcaggtctgacccaatgcagtcacagtagtggtggccacagaggtgcttatgtcactcaaccccaagctttaggtgcctcagaacagagagagagactctgtttgtttgggagaaagtaagggaagaaaacaagagtctctttttggtaatgcagagaattatcctggatcttgtccaagaccattaaggcagtaccgctatgagtctgcaagaaccagagtttaggaggcttggggtgccccctaaagcagatagagattagatcacagtatccaagttctttcaagtatctggaaagccttcccaagaaagatgggtacaaacaagccctgacagtgaaaactacaataaatacagtgaaaactacaatcaatacctaactcttcaatgcccagacaccaaagaacatctgctagcatcaacactatccaggaaaacatgacctcaccaaatgaactaaataagacaccaggggccaatcctgtagaaacagagatatgtgacctttcagacaaagaaatcaaaatagctgtgttgaggaaactcaaagaaattcaatataacacagggaaggaattcataattctattagataagtttaacaaagagatggaaataatttaaaagaatcaagcagaaattctggagccaaaaaatgtaattggcatgccaaagaatgcattagagtcttttaatagcagaattgataaaccagaagaaagaattaatgagcttgaagacaggctatttcaaaatacatagaggagacaaaggaaagaataaaaaacaatgacgcatgcctacaggatctagaaaatagcctcaaaaggacaaatctaagtggtattggccttaaagaggaggtggggagtgtagaaagtgtattcaaagggatagtaacggaacgtcccaaacctacagaaagatatcaatatccaagtacaagaaagttataaaacaccgagcagatgtaactcaaagaagactacctcaagggatttaataatcacagtcccaaagatcaaggataaagaaaggatcttaaaagcagcaagagaaaagaaaccaataatatacaatggagctacaatatatctggcagcagactctttagtagaaacgtttcaggccaggagagagtggcatgacatattgaaagtgctgaaggaaaaaaacatttaccctagaacagtgtatccagtgaaaatatccttcaaagtgaaggggaaataaacacttttccac

SEQ ID NO: 1345 - DNA, 1695 bp, Homo sapiens
ccggctggtcgggcccagcagcgtggtgtgtcttcccaatggcacctggacaggggagcagccccactgtagaggtatcagtgaatgctccagccagccttgtcaaaatggtggtacatgtgtagaaggagtcaaccagtacagatgcatttgtcctccaggaaggactgggaaccgctgtcagcatcaggcccagactgccgcccccgagggcagcgtggccggcgactccgccttcagccgcgcgccgcgctgtgcgcaggtggagcgggctcagcactgcagctgcgaggccggattccacctgagcggcgccgccggcgacagcgtctgccaggacgtgaacgagtgtgagctctacgggcaggaggggcgcccccggctctgcatgcacgcctgcgtgaacaccccgggctcttaccgttgcacctgccccggtggataccgaactctggctgacgggaagagctgtgaggatgtggatgaatgtgtgggcctgcagccggtgtgcccccaggggaccacatgcatcaacaccggtggaagcttccagtgtgtcagccctgagtgccccgagggcagcggcaatgtgagctacgtgaagacgtctccattccagtgtgagcggaacccctgccccatggacagcaggccctgccgccatctgcccaagaccatctccttccattacctctctctgccttccaacctgaagacgcccatcacgctcttccgcatggccacagcctctgcccccggccgagctgggcccaacagcctgcggtttgggatcgtgggtgggaacagccgcggccactttgtgatgcagcgttcagaccggcagactggggatctgatccttgtgcagaacctggaggggcctcagacgctggaggtggacgtcgacatgtcggaatacctggaccgctccttccaggccaaccacgtgtccaaggtcaccatctttgtatccccctatgacttctgagggtacacaggggcactggggtgtggagagctgacctcatttctcttccccgaaggctcagcttcgggcaccgactgcgtggagcctcccgcctgttcccgcccactcaccagtgcacccaggcttctagggcagcgttgcacggcgccccatggaatagcacggaagagcagccacaaaactcaactgctgccatcactcttttttttttttctgctttgaggcccttcccttagattatgcactaactttcttaaaactttttcatccaggggatgggtggctttccaaaatgctgtgcaaatggccttgtgagtttgaactagctggggagagaaaaggtggcaatgtgtgtcaggtgactatcagcccttctgcctttttgtagccaggcttgctatgaatgaaacggttctagtcgtgcggggggccctagtcatgcctctgcgcatgtggcataggaagtggagtctcctcccatgacccagcacgttgttcttatctgccttttcctctgtgacatgcctgcctgcctgccttctcatcagagagtcacaggagggccttaaaccccacgcagatccttctagaccaaggacccactgttaaaagcatggattctgcctgagttacttcccttttgagaaatcatatctcaaatacataacctggtaatataactgaaaaaataaaagtgattgctcctt

SEQ ID NO: 1346 - DNA, 1767 bp, Homo sapiens
tcctggatcaaaggaaataccttttaagattcctggtaggtattacaaaattacttttcaatttataatgcaactaggaattaacaagtgtaccctgtccactaaagtctcaccaacactgaagctcataaatttaatatctcaaggctactttaatttgcattgatttaattatgaggggaagatgtgtttacattatgaacttcctctgaagcacactttctgttcccatccattgtggatgtggtgtaagggtctaaagataaaggttccaatgtcagggaacctcaggtcttagtcttatgattttcatgctcccaccccagccaggttgtgggctgtgaactgtccccaccagggcctctgctagcctgcatggtgcctttgtgcaaattagaaaatggcaccctctctgggaagatgcagttgcccccctcaccacccccccaccacttgaccagtggaatttctagccttgatgtgatggagagtggccaactgagggcagtggcactggtttgccttcttccacaggtccctctcctccaggtgcccttccagcctcacctttgcagtgtttgccgtcccctgtgtagccagacttgcagatgcacttgtatgacctcggggtgttctggcagatagcatcgatgtggcagttgtcagtcccctccacacactcatccacatctggcaggggcagagggggcacatgagaacctctgttggcacctcttaaggggtgtcttgaaggtgggcttccaagggcagaatcccctcttctctaaaacagaggcagtgaccccctccagaaacaggtgctgtctcacatctctctgatttcagagtaggcagacactgattttgggaattcagaaggaacccccactgccctcaaaaatactaaattcacagtgacagctaaaactccatcattcgaaacactcctttttttatttgaaaacaaacaaaaaacccttagagtgggtagtacacttaacttgattaggaataatcaacttaaagtgaatgagtttacggagaaggcttagagggaaagttaagggaaaaggcatgggaacagtggtctctgggaaggtggcagggtccagcaatcactagtaaaggaggaagaaagggggatggggcatctgagggatcttcatctgtgtcatgattctgcttgagaccaggcctgcttccacttgcccaccatggagccaagaagctttagaggaaaaatgttccatcctggatgattttcctcggcccctgtgctgccaacaatggagacatccagagctggcagaggttggcaccagctacctgaagcctaataagtgcagcccttcaggccctaatccccagtgtttagccctctgtctcctggccctagctctaacaataggtgctatacacacagctatacttgaaggaagaggccactcaccatctagcaaaaaagaggatggttaggaaaggacatagatgatgccaggcgcggtggctcatgcctgtaatcccagcactttgggaggccaaggcaggtggatcatgaggtcaggagttcgagaccagcctgaccttgatgaaaccccatctctactaaaaatacaaaaattagccaggtgtggtgatgtgtgcctgtaatcccagctactcaggaggctgtggcaggagaatcgcttgaaccagggaggcggaggttgcagtgagctgagatcgcgctaatgcactccagcctgggcgacagtgagactctatctc

SEQ ID NO: 1347 - DNA, 2422 bp, Homo sapiens
cagaggagggaaatccagggaagggctgaatgctctgtgtttaagggagagatagaatggacagctgggcaaacacacacccggggactcctttctccaagaccgatgggcattgggggtggcagaggaaataccagcatggaacaacatcccagggacccgcgtcctccccaggttacagtcctgggtccctgcatggctgcatgttgtctgcaggccacatctcctcaggactcccgcactcatcactttcccattgctatggaagagaggtgtcaaggtggcacctgcctccctgtccgtagtgctcaggtgtgtggctaccagaggaaaagccactcccaacctttgccgacaaccatcccgtttctgggttcctggagaagtctgggaagctgctctgttgtagaggctgaaaggagggctggtgagagcccccagctgaaaccagccctgccccttacccttcctcacccctctaccttcactctcctcctaacactccagggttttgttttttgtttgttttttgcttttctcaccccagggctcctgcctctccagcctggagacagatttgctttgggattgttacaaaaataataataacccaaatgcagagaagccacggaaagggctgagggcaaccctcccctccccccgccctcctccctccccattccaaaccgagtacaaaaccgcacccaaagcagacattctgtacaggggggtgggtgggctggggagcaagcgggaggggcggccctgcggttgctctgtacaagtccgggttggtgacggccccagcagtccccacagggcccctggggggcgcaggaagtgggcaggcgcctctagatgaaatattccttcttgtcgtcccctcctgactgcccgccttctgcattgatgatggccgtgtccgcgtctggagcatcgtcggagccttttgcctcatgtgtcagtagtggccaaggaagatgagcatgatgagcagcaggaagacaatgaaagccacgatcccaccgatgatggcgtgtcccgcccacttaaggatattcctggaagaagatgcagtagctccttctaccaccaggcgtcagcactggaaacagacgcagtccaacaggactccctctgcctggctgttgagcacaaagcagaggggagatcagcaagataccaaccacaagggcacaagaactttctctcactgccaatcatcatcagattggtctggagagatctgggggcagagaccggagctcagtgcattgtccttgctcttggcatcctacaatagccttgttgtgctgaggcagctcccacatgctgaggtctgcccctggagtgggaatcacccatccagacattctgatcccaagaactcagacctcttatcgctgggaggcctggctcttatcccctcaactgttttaatgagtgtctcaagtaagggagcctctgatgtttccccgacaatgcatttcccctattctgagaaaagataagactttctggcgggacccacagccattgggatcttcaaaaaaatcgcccgtcaactctccataaaggggcctctgtgtcaccctgtcactactcctgaagctgggttttgtggtcacagctttgagaagaacttcagagaaggagcatcacctggtccttctagaagatatggcatctgagaaaagattctgtctcttggcatagtacaagcttctctctattttctgtccagacccagtacactgtgcttaaggtgggcagaaaaaaaaatgacagcagttgcatgcacccaatacctagtcttaggagaagcaactctgagaagagccagttagagaaggaaatgcacctgcgcctgcacttgagaggctttggggcctctgcacacagaattattgttcttgttgtcagacaagtgcaggggatggaagatggtgtcacccaggccaccactaccaaagaaaggcagatgagagcccacccttctaatgttttttcactaagcggccattacacattctagagtggacctgggacctaagccctcagggaccccagtggtgggctggttttcctttactccactccccgtcacagtttggggatgttatcaggaagcattttaaaaaagggaataagatggacagagaaaggagattctggaggaagagaactgaggagggcttaccattaacattgagggtgtagtaggccttgtagctgcccatgttgctggtggctgtgcagccgtaggtgccactgtcactcttgttgaggaaagggaagatcagggcactctcctgggtcatcttcaggggtggcacactgccctccttctcccataggtactgctgggggctgtcgaggcagacaaatcagaagagctcaggagagcataggccagggagct

SEQ ID NO: 1348 - DNA, 1991 bp, Homo sapiens
cactttcctgcgagtcgctctccgaagtgtcgctgtccaccggctcctcgtccggggtgtctctcacagccagcagggccactaagtcggggacaccatttttgtcttctttggtgttcaagcggatggattcggccccagctggctccttctctgcctcttctttcttcgatttgtcggtgacggtgaccagagccaagaactcgcggggaccgtcttcttccccctcggagttgcagggcgcccactgcctaaccagctccctggcagcggcctgcagcgtggcgtacagcgcgctctggtcctcttctccgctcaggtcgccctggtcgatctcctcgatcacgatgcccaggctctcgtcggaagagtcctcggcctcactcctcgcgggagcagacggccgtcctcctcggcttctcttcttgcccttctgggtcaacctgttgcgtctggttctgtttctgcgaccccgacggcccctccttgggttcctggctgccccaagaagcgagccagcctgccctgttacctccccagaatcctgggcctgcgtctccgaagcgggaggggtgggtgcctccccgggggtcccagcctccgcggcctgcgtgggcccgtcatccagcagcaggcgtctcatctgcctcaggaccctcgtgtcctgcgcacggtccttccacagaaccctccagaccccatccttgcctgggatctccctgggaatggcagcgtgattgacgtcctccacaaactccaccagggcggcctgggccttctcgttcatcaaagccttcatgtgtcgcaacctgaacgtgcccaggggcaggagggtcggctgcaggacggcttcgacgtctgcctgctccaggccctccgggatgccggtgaccagcagggccctgtgcgcgtccacgtccaggctccggcaccagtcctgcaaaaggctcatggccatggtgcagcccccttggcgctgatcttggggcagcagggagcccgagataggggtgggctgcagcgcacggtgtcaatgcaaccctagaaagccacttgcagggcttagagtcccggttccggtgaatgtggcaaggctggagtggggctcggggctcgggggctctagctgcctgctggccggctggacgcagtgaccttcccccgggacccctctccagagctgtctgaggatccgcggggggcttacgtgtctgctttccaggacagctccctccctctctccctgacacaggcctgagtgactcggcaccgcagccaggtgcaggggggcggcgccgagtgcacctggagaggcgtgggaggtagcagccgcagcttgcctggcgctcgcgccgcgtctgagcgcgcaccctgggcctgaatctcagcagttccgctgcgacgcggctgctcgcgcgtgcgcctgcgcagagggagccgcacaccctcccctgtcccccgcccaaccgtctccatggcaacggtgcagccttgagctggggtctgcgtcgctgtggcctgagacgcttttcttaaaggtcccgatgacaaggacttggggcctggaagcaccactttcattaaccagcaaaaaacaaggccgaaaccacagagggccagaaatcactcaaggatacccgacctcattcaggggatagaggcctccttccagagggtaccggcatcactgggggttacaattcccccttccaggggccaggtggaattcaggattatataggcctaaatcaaagggcactggccttgcagcgtaggaccaggacttactcgggatactggcctcattcacagtatatgggtctcagtatcaaataggggggcccaggcaccacctgtgagcaagacaccattcagggtatatgggcctcacttgcagggtacaggccccactcgatgggaccggccctcactcccatacacgttcctgtattctgaactatgcatgcacaataaatcctgtggttttgcac

SEQ ID NO: 1349 - DNA, 2247 bp, Homo sapiens
gtgtgtgtgtgcatgtccgcatgttgctctgtgtgtgtgcatgtccgcgtgttgcttgtgtttgtgtgtgcgtgtccgtgtgtcgctcgtctgtgtgtgaacatctgtgcttgtcctgtatctgtgtttatctgtatacttccatgtctgtgtgacagagtccttgtgtctgtgtgtctacatgtctgcgcgtgtccctgtgtctttttgtatatatatccatgcctgtgtgcctgtgttcctgcgtgtgcttgtgtgtgcacgtgtgcatttgtgtgtttgtcagagtatgtgtgcatgtgtgtgtctgtcagcgtatccatgtgtgcatgtgtgtgtctgtcagcgtatccgtgtgtgcatgtgtgtgtctgtcagcttaaccatgtgtgcatgtgtttgtcagtgtatccgtgtgtgcatctgtgtatctgtccatgtatccgcgtgtgcctgtgtgtacctttgtgtgagcatcaagggacctcccaggcctggtgctcaccgtccgccccaacgcaccctgcattgcagcgactccagctcggacacagacagcttctacggcgcagttgagcggcctgtggatatcagcctttccccgtaccccacggacaatgaagactatgagcacgacgatgaggatgactcctacctggagcctgactccccggagcccggaaggcttgaggatgccctgatgcacccaccggcttacccaccacccccagtgcccacgcccaggaagccagccttctctgacatgccccgggcccactcctttacctccaagggccccggtcccctactgccacccccgccccctaagcacggcctcccagatgttggcctggctgctgaggactccaagagggacccactgtgcccgaggcgggctgagccttgccccagggtacctgctaccccccgaaggatgagcgatccccctctgagcaccatgcccaccgcacccggcctccggaaacccccttgcttccgggagagtgccagccccagcccggagccctggacccctggccacggggcctgctccacttccagtgctgccatcatggccactgccacctccagaaactgtgacaaactcaagtccttccacctgtccccccgaggaccacccacatctgagcccccacctgtgccagccaacaagcccaagttcctgaagatagctgaagaggaccccccaagggaggcagccatgcccggactctttgtgccccccgtggctccccggcctcctgcgctgaagctgccagtgcctgaggccatggcgcggcccgcagtcctgcccaggccagagaagccgcagctcccgcacctccagcgatcaccccccgatgggcagagtttcaggagcttctcctttgaaaagccccggcaaccctcacaggctgacactggcggggacgactcggacgaggactatgagaaggtgccactgcccaactcggtcttcgtcaacaccacggagtcctgcgaagtggaaaggttgttcaaggctacaagcccccggggagagccccaggatggactctactgcatccggaactcctctaccaagtcggggaaggtcctggttgtgtgggacgaaacctctaacaaagtgaggaactatcgcatttttgagaaggactctaagttctacctggagggcgaggtcctgtttgtgagtgtgggcagcatggtggagcactaccacacccacgtgctgcccagccaccagagcctgctgctgcggcacccctacggctacactgggcctaggtgatggcagtccatgtggctgccaggccaaggcagtcacaggggccctgaccccaggccacacagacggacatgggcccacatgggagggtgagcaggagcaaggctgtgcttgcctagggcctctgtgatggacatctcgtaggacccagccagtctcatccagcaggttgggttctagggctgaaccaggcgccaggctccagaggacgaagggactctgttgccccacactaacttgccctgtcccaatcccagaaacccaggaccaagctgtgcctgggctccaaggacaggaacactggtccccccatcacactcacccctaagtgggctgggagccaggcagggccagggcagctgggtgggggccggggctggccctgggacccccaggaacgctaagacacaggctccagtaggggctgttgcctccaataaagcagcagtgagctttgc

SEQ ID NO: 1350 - DNA, 1632 bp, Homo sapiens
agctctgggagaggagccccagccgtgagattcccaggagtttccacttggtgatcagcaccgaacacagaccccccaccatggagtttgggcttagctgggttttccttgttgctattttaaaaggtgtccaatgtgagccgcacctggtggagtctgggggaggcttggtggaaccagggcggtccttgcgactctcctgcacagcgtctggattcgcccttggtgactatgctgtgagctggctccgccaggctccaggaaagggactggagtgggtgggtttcattagaagtgagacgcttggtgggacaccagaaaacgccgcgtctcttgaaggccgatgtttgatctcaagagatgattccaaaaattccgcctatctgcacctaagcagcctgaagttcgaggacacaggccgatactattgcatggcagaccgttatgatgagagggattatttctacgtcggcgggggccagggaaccctggtcaccgtctcctccgcctccaccaagggcccatcggtcttccccctggcaccctcctccaagagcacctctgggggcacagcggccctgggctgcctggtcaaggactacttccccgaaccggtgacggtgtcgtggaactcaggcgccctgaccagcggcgtgcacaccttcccggctgtcctacagtcctcaggactctactccctcagcagcgtggtgaccgtgccctccagcagcttgggcacccagacctacatctgcaacgtgaatcacaagcccagcaacaccaaggtggacaagaaagttgagcccaaatcttgtgacaaaactcacacatgcccaccgtgcccagcacctgaactcctggggggaccgtcagtcttcctcttccccccaaaacccaaggacaccctcatgatctcccggacccctgaggtcacatgcgtggtggtggacgtgagccacgaagaccctgaggtcaagttcaactggtacgtggacggcgtggaggtgcataatgccaagacaaagccgcgggaggagcagtacaacagcacgtaccgtgtggtcagcgtcctcaccgtcctgcaccaggactggctgaatggcaaggagtacaagtgcaaggtctccaacaaagccctcccagcccccatcgagaaaaccatctccaaagccaaagggcagccccgagaaccacaggtgtacaccctgcccccatcccgggatgagctgaccaagaaccaggtcagcctgacctgcctggtcaaaggcttctatcccagcgacatcgccgtggagtgggagagcaatgggcagccggagaacaactacaagaccacgcctcccgtgctggactccgacggctccttcttcctctacagcaagctcaccgtggacaagagcaggtggcagcaggggaacgtcttctcatgctccgtgatgcatgaggctctgcacaaccactacacgcagaagagcctctccctgtctccgggtaaatgagtgcgacggccggcaagcccccgctccccgggctctcgcggtcgcacgaggatgcttggcacgtaccccgtgtacatacttcccgggcgcccagcatggaaataaagcacccagcgctgccctgggcccctgc

SEQ ID NO: 1351 - DNA, 1616 bp, Homo sapiens
agctctgggagaggagcccagcactagaagtcggcggtgtctccaatcggggaccaccactgagcacagaggactcagcatggagtttgggctgacctgggtcttcctcgttgctcttcttagaggtgtccagtgtcaggtccacctggtggagtcagggggaggcgtcggccagcctgggaagtctctgaaactctcctgtcaggcttttcatctggacttcaaacacttaggcatgcactgggtccgccaggcgccaggcaagggcctggaatggctggcggtcatatggtatgatggaagcaacatcttttatgcggactccattaaagaccgattcataatttccagagacaatggcaacagaacactatatctccagatggacaatttgagagccgacgacaccgctgtctacttttgtgtgacggggaggagggaatctgggtcctctctctggggccagggaacactggtcaccgtctcgtcagcctccaccaagggcccatcggtcttccccctggcaccctcctccaagagcacctctgggggcacagcggccctgggctgcctggtcaaggactacttcccggctgtcctacagtcctcaggactctactccctcagcagcgtggtgaccgtgccctccagcagcttgggcacccagacctacatctgcaacgtgaatcacaagcccggcaacaccaaggtggacaagaaagttgagcccaaatcttgtgacaaaactcacacatgcccaccgtgcccagcacctgaactcctggggggaccgtcagtcttcctcttccccccaaaacccaaggacaccctcatgatctcccggacccctgaggtcacatgcgtggtggtggacgtgagccacgaagaccctgaggtcaagttcaactggtacgtggacggcgtggaggtgcataatgccaagacaaagccgcgggaggagcagtacaacagcacgtaccgtgtggtcagcgtcctcaccgtcctgcaccaggactggctgaatggcaaggagtacaagtgcaaggtctccaacaaagccctcccagcccccatcgagaaaaccatctccaaagccaaagggcagccccgagaaccacaggtgtacaccctgcccccatcccgggatgagctgaccaagaaccaggtcagcctgacctgcctggtcaaaggcttctatcccagcgacatcgccgtggagtgggagagcaatgggcagccggagaacaactacaagaccacgcctcccgtgctggactccgacggctccttcttcctctacagcaagctcaccgtggacaagagcaggtggcagcaggggaacgtcttctcatgctccgtgatgcatgaggctctgcacaaccactacacgcagaagagcctctccctgtctccgggtaaatgagtgcgacggccggcaagcccccgctccccgggctctcgcggtcgcacgaggatgcttggcacgtaccccgtgtacatacttcccgggcgcccagcatggaaataaagcacccagcgctgccctgggcccctgcaaaaaaaaaaaaaaaaaaaaaaaaaaaaaaaaaaaaaaaaaaaaaaaaaaaaaaaaaaag

SEQ ID NO: 1352 - DNA, 3518 bp, Homo sapiens
gcaaaatggggataacagtactcaccaaaaagagctgctgcgaagatgaaatgaaaggtctggggtttccagagtccgcggttttgctaagaagccgcagtgatgttgacgcggctggtcctcagtgcacacctgagtagcacgacctctccgccctggacgcacgctgccatcagctgggagctggacaacgtgctgatgcctagtcccagaatctggccccaggtgactccaacaggcaggtctgcctctgtcaggagtgagggtaacacctcctcactctggaatttctcagctgggcaggatgtgcatgccatagtaaccagaacctgtgagtctgtgctgagctctgccgtctacacccacggctgtggctgcgtgaggtctgccacaaacattacctgtcagtcctcaggacaacaaaggcaggcggcccggcaggaagaggagaactcaatctgcaaggcccatgatagtagagagggccgcctgggctaccccctcagtgcccatcagcctggttccggtggtcctaactagccctgtctccttgccaatagccctgtgctccccagccccctcccccatgcagacggctgctatgacatccctgttccttaaagtgcggggttcctcgctgccttctcctccctaactggcaccctgtgcaaacctgctgcagagaacagtgtcttgggcagtgcgatagtcctccagttcaccaacagtaaaaatggtctcaatggggagagatgtctgactgcaagcgctgagtccttccagaggagggctggagggacaggagggcggatcaggtggcctcctgagctggttcctggcgccgatgtaatggatgctgattaccagcggtgagggcatcgtggaagggactgcagaggtgtgcgagatgagtggaatgaggccccaggtgctgatttttatgcccaggatgctcctggctgtcatgggctcccaggggctccaggcatgcacagctcttccgcctcttctcgaagcagaatgccccagaaagggcacctttactatccagggtggctagagtcgccggtggctgtgcgtgggggctgagggctagaatcagggcaaggggctttcagtgaaacgcagagccaggcagggacagcgcggatctcagaacagtctttgtcagatgggacacttcatccccgcggagctgtccgtgcacacagcgttctctgattgccaagctgttaagcactctgcggaagggagctgctgggaaggcggacgaggcatctcaggtgggtgaggggctccgctgcatcagcgttgctcagacccaccatccctggggagctgtcactgacgcccaggtttccccttctcagtacatcctgtgcctcctttctgggctgcctcagtccctcaaaggggagctccccacatgggtgggattattgttgagaacagtcagggtgttgacgaggatgcaggactgaggttgctcccagagtcactcagtgtccctcgttttgctcggagacatcctgacctgggcaagctctttagggagcatctttcctgtctgtgccgcattctccatggcctttgcactctttttgcttttgttttaaacacgtcatcaattcattgcctgcagcagcttgtactgccttttggtttttctttgcagaacagctctggaagtgaagtgtgtgtgtgtgtgtttgcgtgcactactctggactgggtgccttacacgtgttaacacacttgatcagctcagcaacactgtggaataagtgtaatgtgtccattattcagatcaggagactgagattcagagcagggagggaacttgccagagaccacatggcttgcaagcagcagaacctgggtttgaactgacagcggcctgacttcagaacccacgctttcccaccctcctacttcacacccatttgagtccagccatcttggttctgaatcataaccctgactctcctggccacatcctatgctccacattacatgttactctacaggttaccaccctgggtctctttcctatataagaaatagaaatatttgtggaaatcctaatgttcatgacatctctgccattttatcaggaaaaattctatcctaccaaatactggtataatgtacttggcccccctggattggattggtataggttaagagcagatataaggtctgaaataatcccggtattcctagtatgtggaattattatcatggaatcataatggcagtttgcacctctgttgggctctttcaactcctgtgttggctcaggagaatcctatcacattagtccccttttgtagttggatagttgggcttgccagaaggcacacaaatttgggttaactcatttccaggattctggcattgtagacacagaaacaccgactgtgaagttttatgtaatacaaacactgggagatttagcaataggcctgccaggcggccctggcttctggctgcacaacaaaggggggtggctggtgctgaatggggcaacagaaggtgagtttggggcctgcagagcctcgggtagcccagaggagcgagagagtattggctgttcattttaactccatccttggaggattccccaccacaagcctaaggaagtaataaaacctcatgcattattttttgatatctggagagaaacacgtaccctagaaatgctgtggactaattccatggttactttgtcattaaagaaaccaaaatactgagaggtcaccataaacacaaaaaggcagagagagaaggattaaatggtgtttcatgtaaggatctttaaagggagacagaattctagtctgaaaggagcgcaggcagatctggcattttgcttggggagttcaattctttggagaaaatacagagacaaaaagaccattttgatggtatttaaaatatccctctgcccagtgtatctaagtgagtctaaatatattcagcaattttttaaagggcagatattaggcccgattcaaggtatggaatatagattcgaaagggttagtgataggtgagtgcctttcaggtagctttgcatcacagaccaagcccattattgaggactgtacgtatggagcaggcccgtgagcttgtgactgagtttcccaacctgccaggctcccatttgcttaggatgaatatttttctgccctccctggtgagccactgtgggccactcgccactccttacaccccttccctttaatacctcgcttggcttacttgcaaaatccacatgcatcctcctggatctcacagaagatgtatgaaaagtcatggccatgaaaagggcacggaaatcaaattaattaattttgctttttccccacgtttgtttctgtctgtctggtacttttcctttttaagcctgccatctctttgaaagtgagccgcacagtgataatccattttcttcattgtaaccccacagtgtatgtattccacattaaataataaaagggattaataattaaatc

SEQ ID NO: 1353 - DNA, 3620 bp, Homo sapiens
agagcggcggccggtcccgcgcggagcccggcgcccctccagcccgagccaggacgccgccggccccggtcccggccccgggcacgcagcgagccagggatgtgagcggcgccccgcggcatggcagcctcaggggtgcccagaggatgcgacatcctcatcgtctacagcccggatgccaaggaatggtgccagtacctgcagaccctgttcctgtccagtcggcaggtccgcagccagaagatactgactcacaggctgggccccgaggcctccttctcggcagaggacctaagccttttcctcagcacccgctgtgtcgtggtgctgctgtccgcggagctggtgcagcacttccacaagcccgccttgctgcccctgctgcagagagctttccatcctccgcaccgcgtggtcaggctgctctgcggcgtgcgggacagcgaggagttcctagacttctttccagattgggcccattggcaggagctcacctgtgacgatgagccagagacctacgtggcagctgtgaaaaaagccatttccgaagattctggctgtgactcagtcactgacactgagcctgaggacgagaaggttgtttcctactcgaagcagcagaacctgccgacggtgacttcacctgggaacctgatggtggtgcagccggaccgcattcgctgtggggcagaaaccactgtctatgttattgtgagatgtaagctggatgacagggtggcgacagaagcagagttttctcctgaggattctccctctgtaaggatggaagccaaggtggagaatgagtacaccatttcagtgaaggctcccaacctttcatctgggaacgtttctctgaagatatattctggagacttagtggtgtgtgaaaccgttatcagctattatactgacatggaagaaattgggaatttattgtccaatgccgcgaatcctgtggaattcatgtgtcaggcctttaaaattgtgccctacaacacagagacccttgataaactgctaaccgaatccctgaagaacaatatccctgcaagcggactgcacctctttggaatcaaccagctggaagaagaagatatgatgacaaatcagagggatgaagagctgcccaccctgttgcattttgctgcgaagtatggactgaagaacctcactgccttgttgctcacctgcccaggagccctgcaggcgtacagcgtggccaacaagcatggccactaccccaacaccatcgctgagaaacacggcttcagggacctgcggcagttcatcgacgagtatgtggaaacggtggacatgctcaagagtcacattaaagaggaactgatgcacggggaggaggctgatgctgtgtacgagtccatggcccacctttccacagacctgcttatgaaatgctcgctcaaccccggctgtgacgaggatctctatgagtccatggctgcctttgtcccagctgccactgaagacctctatgttgaaatgcttcaggccagtacatctaacccaatccctggagatggtttctctcgggccactaaggactctatgatccgcaagtttttagaaggcaacagcatgggaatgaccaatctggagagagatcagtgccatcttggtcaggaagaagatgtttatcacacggtggatgacgatgaggccttttctgtggacttggccagcaggccccctgtcccagtgcccagaccagagaccactgctcctggtgctcaccagctgcctgacaacgaaccatacatttttaaagtttttgcagaaaaaagtcaagagcggcctgggaatttctacgtttcctcagagagcatcaggaaagggccgcccgtcagaccatggagggacaggccccagtcaagtatatatgacccttttgcgggaatgaaaacgccaggccagcggcagcttatcaccctccaggagcaggtgaagctgggcattgtcaacgtggatgaggctgtgctccacttcaaagagtggcagctcaaccagaagaaacgatcggagtcctttcgtttccagcaggaaaatcttaaacggctaagagacagcatcacccgaagacagagagagaagcaaaaatcaggaaagcagacagacttggagatcacggtcccaattcggcactcacagcacctgcctgcaaaagtggagtttggagtctatgagagtggccccaggaaaagtgtcattccccctaggacggagctgagacgaggagactggaaaacagacagcacctccagcacagcaagtagcacaagtaaccgctccagcacccggagcctcctcagtgtgagcagcgggatggaaggggacaacgaggataatgaagtccctgaggttaccagaagtcgcagtccaggccccccacaagtggatgggacacccaccatgtccctcgagagaccccccagggtgcctccgagagctgcctcacagaggcctccgaccagggagaccttccatcctcctccacctgttccacccagaggacgctgattccacctcctaaaacctgcctacttcaggactttaagactcacagtcttcagcctgttaatgatgtcttcatgttgagttttatagcatgactgttgaccttaagatccattctcattgctgataatgctgcagccctgctggtttgggcttgcctcgaagattttattaaggcacgaagaagtgaaaaactaagggcttcattcaccatcaccaagtatatcgaaccatatacttgtttgccaaaaggatgaagacttaatcgaaatacttacctctaatttgccatatcagaagcctaaaaagaatgatcataaatgtacttcaccagtgattttactgaaatgcacttatattagtctttatgtatttgctagttcagcctgatttctagaagaggttatagtgtgagacttgtagtattcaagtaagataagtgacctaattttaaaataattcttctacttttctgtatattcagcagggtatttaagtgctagggctggtcacacacaaccaactgaaaaagactagagggattagtacaaactcctcttatacagaaggcaaatctgaggttccacagaagtctggaaccaagactattcagttggttaaataaagaggttagtctagactgggcctgctcattctaggtcaccacattttccatctccaaatagccaggccctctctccctcaagaaatgcccagatgtagaaattcatcagtgcctattggtcttccagaattttccatcttccgtatctcccaggcatgagactaccaagtttgtttgttttctttccaatttgggaatttatacttcagtatggtttcaacgcagttatgtttccagagaacatctagaagtggctggaaaccagaagctggggattccagggaccccacttagtgctctatttcctttataggttttatttctggtcatagagagagaaggacctttgactttttcttcgttgaggcttctgaggaggaaaaacaaacctaaaatagaaatacagtcagcctttcaaatccatgggttctgtgtccgtggattcaaccaaccttggatc

SEQ ID NO: 1354 - DNA, 3837 bp, Homo sapiens
gtttatcccgcgcagcagctgccgcctcgggacacgctcattcccacggccaccggcaagccactcctggcgactccccgggacctgaggagccgcggcgcggaggtgaccctccccggcctgcgcctcccttcttcctcctccccagctgggcgcgtggtcgcgtcgcccggggtctctgctgatgcccgagaaatgggctgggggtgccgggtgccaggatggggtggggcggccctaggccggcctgacttcgggaccgggctgcgggcgagggtctcggggcccggctcggccggcttccgggccgagaaagaagggcagaggaagcggtcagggtcccctccggccccggcctccctcccggagtataagcccttggaggccaggttttgggttgctgccgcccagccctttcggtctccacttctccccacggacgtttacagctgctcgctttatttctccctccattcccccgtggagccccctcggcagcggaggggtcgcgtgcttctcctctcccgcctgcgcctccccccttcccacccgacagcccaggaggagctgcgggcgcggccctgggacggccggagcctggggcttctgctcgctcgcgccctcccaggcgttgccgcgggtccgagcccccgcagaggtgggcatagccccggggccgcagaaaacgaaggcagctgggcagggatgctcaatttcccgagccccactttcctttcacagctcactgggatgtgtagttcttccgcccgcaggcctgcgccgaggagaagcacgactcggggccttagaaactacaagtccctgcatcccccgcgacaagggcaggagaggcgtggtgctgggcgttctggggctaggtggtgggagttgggaaccaacaaagggggttgtggggaacggtgccttctctgtactgggcagtttgcacgttacacatgttctttgtctaatcttcgccggaacccggtgaggcattattgtatccagcttagagaaagcttaactactggccaaacatcacaaagctcccaagtagtagagatggcatcgaacccagagccctaagtatgtcccttacaaagcgtgcctcagtgaggagtgtcgaagggggatgagattggcttatccaagagggccagttgggaggagctgtggtaaggaaaaagtgatgggaatagcaattagagtatgacatgcaattacaaggagttttgaatacaagtgaaatttacaggggtccattccaaagccggttagagtctagggagaatggatcttaagcacacgataataattgggttttaattattttagatattgtatgagagacaagcatattacagggacaattaagtatttgtggctggactagttttaaaaaaccaactggaaagcttcatacatttcaagtgaaagctctcatatgctttcctgtcctttagctaatgagatcaacggggtattattcttattctgtttattgcaagcaccttttctgtgggtgtccaattaatataatagatccattgatttgatggcattaaaaaagactcccactcttattctcaatgaaaccgaatttttctggcattatggttatgcttttaaaaagtccttccttgtctgttagagatatgtactaaagtatctgccagcgaaataatataaagtctgaaatgtgctttaaaacacaccagcccatccactcccctcctcccacccacccagctccagacatggaggtataaatgaaacaattggaaactgttgaaaatagttgaccttgggtgacatgtacttgtacttaattatttattgctgcaaattgccacaaacgtagtggccttaaaacaagacagatttttctcacagtttttatggatcaggtgtccaggtacactcagtcccccacttagggtctcacgcctgccatcaaggagctggccaggctgcgttcacattcactggagaagaactggcttccactctgactccgggcacaggcaaaattcctttccttgcagcagtaggaccgagggccctggcttcttgctggctggagactggagactgtcctcagctccaagagggaacctgcaattcctagaggttacctggacttcattgtcacttgggctttccgagcacagccacttattttgtcaggcctgcaaggagagtccccagagtgagtctccagcaagacagaattttatataacataaagcaatcccacgggggcaacttcaaatgtgaacattctgttggccagaaagcatgttttgcacacactcaaagggagaggagtacacagggcatgaaccctagggtgaggggcaccccggagtgcatccaccacagtgtacatgagagtccattatgcttttcttacctaccacatctactcatgtttatgtttgacattttccataataaaaagaaatgaattcgttttaaaatgttacctaaagtttccacagcaaataagataatgctgatatgatttctaaataagctgatacaattgtctgtagttgtcttccaggggataacttttttcttcccactccatgtgtactaagacctctgcggttaattcacttgtatgggttaccctcccctaagagcgttcactagaacctggtgtgtgatagctgcagagttcacctcaccagctacagttgatcttgaacaatatgggtttgaacagcgtggatgcccttagacacggatttttttcaaccaaatgcagatggaaaatacagcatccgtgggatgggaaatgcgagtattcagagggcaaaggcccactcttcctatatgcaggttctgtggagcctgtttaaggacctgaatatgtgcagattcaggtatacgcaggtgatcctggaaccaatctcctgaggatactgagggatgactgtaaaacctactgtataagggatggtagagtttattcatttattttacagttatctatttcagggcctagattgtgctaagtactgttttagcagcagtgatacaaaaagatccaagatagaagcttatatttggggactgggggagaggtggagagaataaacaaataaataaatgactagtaagacaatttcagagagtaattacaagaacgaaaaaacaaagcagggttatgggatggagagactggggtcgggcagagaatcgaatgatgggaaggggcaagtaccaagtcctcaaggcagaacaacctggaaaattctaggggtacaaagaaaaaccagtctggctggagtggagcgagggccagggagagagggaaaaaggaacaggaattcattctgtgtgcaccagcatcaattctgtatgccacactctgtacccaccatcggtgtaagtgttgaggggtctgaaagaaaaatcaccgtccttgccctccaggaatgtatagattccaaactttaatgctagagggacgtcagcgtatctagaattagagaccaaaacttgtatttctcaaacaaggacactgaaaagtcaaaagacctgctaaaaattccttgagaatgcctcgccaataacaaataatccaaaaatgagtcttgaattgaattgaaagagtgcatgatctacttttgctaaatggggtttagcctaatactgcctctttacatattttaagtttggcctaaaggtttctctgtacactgaactgtagcctaaatggaagtgtaaacagagtgtgatctactcgggtgtcaattactgagttttggccactcaattgtggccagctgttcaaaccatgttcaaataagacaaatgctgagctgt

SEQ ID NO: 1355 - DNA, 2759 bp, Homo sapiens
gtccttagacaaagcggtcgccgcccccgcccggccccctggtctctgtctccgtccctcctcctttgctgcctctttccctcctcctctccctccctcctcccctccctccagtctccggatctccctcggtccctctctcctcctcttcctctctctggacgcccggctcctccgcaccccctcccccgggggtcccgcggcctgtgagttgactgaggggctcagacttggggagtgggtgtctcctcgcccctgtccttgctcccgtccctggcccggaccttggctgtctcctctttgtgccgagattgtcagtctgtgcggctacagcggggtggagacggccggctctgtcacggcttcatgagagcggggacggggcgcaggacttgcaggcgccggggagaagagacatggagccggcccttggcactctggggtcgcgtggggcagtcggtgggggaggcaggcggtggtgacaggacagggtgggggtggacgccagggttctgggaacgcgctggcagccctgacgcccaggttcccctcacccctgccacatttctctcttctccctcacgccaactttccttttcgcccttctctctctttctcacatcctagagacggtctttaatacgcattaaccctgtgctgccacatctggctcctgccctcattgcctccaatccggactcttcctctcacatcacccccaccacccccaacttgggctcacaacttctcttcactttttccatttccccagttctctgccttccgtctttccctctgtcctcatccttagcccctctgccctgctttgtgtcccacctctccccctccacttcctctcctcccaccctcagtctcacccccgggctgtctcactctctggagcctctccttcctgttctctgtccccagtgctccctaccctcacctcaagacgaccatggccaccatcccagactggaagctacagctgctagcccggcgccggcaggaggaggcgtccgttcgaggccgagagaaagcagaacgggagcgcctgtcccagatgccagcctggaaacgagggctcctggagcgccgccgggccaagcttgggctgtcccctggggagcctagccctgtgctagggactgtagaggctggacctccagacccggatgagtctgcggtccttctggagaccatcgggccagtgcaccagaaccgattcatccggcaggagcggcagcagcagcagcagcaacaacaacggagtgaagagctgctagcagagagaaagcctgggcctctggaggcccgggagcggagacccagccctggggagatgcgggatcagagccccaagggaagagagtcaagagaagagagactaagtccgagggagaccagagagaggaggctggggatagggggagcccaagagttgagcctgaggcctctggaggctcgggactggaggcaaagcccaggagaggtgggagacaggagctcccgactgtcagaggcatggaaatggaggctgagtcctggagaaactccagagcggagtctgagactagcagagtctcgagagcaaagccccaggagaaaagaggtggaaagtagactgagcccaggggaatctgcctaccagaagttgggcctgacaggggcccataaatggagacctgactccagagagtctcaggaacagagtttggtacaactggaggcaacagagtggaggctgaggtcaggagaagaaagacaagactactcggaagaatgtgggagaaaagaagagtggccagttccaggggtagctccaaaagagactgcagagctgtccgagaccctgacaagggaggcccaaggcaacagttctgcaggagtggaggcagcagagcagaggcctgtggaagatggcgagaggggcatgaagccaacagaagggtggaaatggaccctgataatgagcctggcagggaagggcaaccaacatcttgtaacttgctttccccaccctgtttctgggggcagagccaattgcccaatttctaccctaatccaaagtccctggtgtgggtggggttaaacgtgctggtgcatcctaggtcatccaagagtgagcgccaagtcctgagaaggggcacagaactccctggagggtggagatggagcacctgccccccatggcagggtacactctccccacagccttcctccccaccatcccgtggggactctcgggatttaagcactcgtctctctgggaggcccagaccccactccatttataggcacatctccttcatttcctaggtcactgcccctttgtttacagctcctgcctcctcccttgaccacagcctggtttacaaattccatcagctcccagccccacctgccaaagtcccaggtttacaagccacgcttacttgctgtgtctgcgtggaattctctcctctgtcccctccagtctcctcattggagtgacctgaaggtgtggcttcctccactttttctcagtattactttgccttagttttccccaagagggaaggctggaactcttaactctgtaccccttgatagttatttaattctgtttctcctagtggttcacaattgaactgaattgagatggtgtcgggtggctaaggagacacctcacctctccttccccattgtgccgcctttatcaattgcctgttttgttttgtttgttttttaactttccataataaaatggagttctcttc

SEQ ID NO: 1356 - DNA, 4129 bp, Homo sapiens
ctttgttgaagattaaaagccacttagaatctaccatttacactcaagatctgcatgtgcacaaattcttccatcattgccagctgattcagtcaggctcgaaagaagttccaggggagctcattaaatatttaaagtgtttgcatgccatggagatccaagtcatgatacagtttctacctgtaattcttatgcaactcttccgagttctcacaaatatgacccatgaagatgacgttcctatcaactgcaccatggttctcttacatattgtatcaaagtgccatgaagaaggcttggatagttatctaagatcattcataaagtatagcttccgacctgaaaaaccgagtgctcctcaggcccagctgatacatgaaaccctggctactacgatgatagcaatattgaaacagtctgcagattttttatcaataaacaaattgctaaagtactcatggtttttctttgaaataattgcaaagtcaatggccacatacttgttggaagagaataagattaagcttccccgaggccagagatttcccgagacatatcatcatgtcttacattcactgcttcttgcaataattccccatgtgactattcggtatgcggagattcccgatgagtccagaaatgtgaactatagtttggctagcttcctgaagcgctgtttgacactaatggatagaggatttattttcaatttaataaatgactatatatctggattcagccccaaagatcctaaggttctggctgaatacaagtttgaatttctgcaaacaatttgcaatcacgaacattacattcctctgaacttgccaatggcatttgcaaaacctaaactgcagcgggttcaagattcaaatcttgaatacagtttatcagatgagtattgcaagcatcacttcttggttggtctacttctgagggaaacttccattgctcttcaggacaattatgagatcagatatacagctatctctgttataaagaatcttttgataaaacatgcatttgacacaagataccagcacaagaaccaacaagccaaaatagcacaattgtacctcccctttgttggactacttttggaaaatatacagcgattagcaggtcgagataccttgtattcttgtgcagccatgcctaattctgcatccagagatgagtttccatgtggctttacttcacctgccaatagagggagtctgagcactgacaaagacaccgcttatgggtcttttcaaaatggacatggaattaagagagaagattcaagaggttccctcatcccagaaggagcaacaggatttccagatcagggcaacactggtgaaaatacccgacagagttctacaaggagtagtgtatcccagtataaccgcctggatcagtatgaaatcagaagcctcctgatgtgctacctgtatatagtaaaaatgatttcagaagatactctcttaacttactggaataaagtatcacctcaggagctcataaacattcttatacttttagaagtatgcttgtttcactttagatatatggggaaaagaaacatagcaagggtgcatgatgcctggctgtcaaaacacttcggaatagaccgaaaatcgcaaaccatgcctgctcttcgaaacagatcaggagtaatgcaggcccggcttcagcatcttagtagcctagaaagttcatttacacttaatcacagttctacaacaactgaagcagacattttccaccaggcacttcttgaaggcaatacagctactgaagtttccctaacagtactagacaccatatcatttttcactcagtgcttcaagacccaacttttaaataatgatggccataacccattaatgaaaaaagtgtttgatatacatcttgcttttcttaaaaatggacaatctgaagtgtcgctgaaacatgtatttgcctcactgagagctttcatcagtaagtttccttcagcatttttcaaaggaagagtaaacatgtgtgctgcattttgctatgaggttttaaagtgctgcacatcgaagattagctcaaccaggaatgaagcatctgcacttttgtatcttttgatgagaaacaactttgagtataccaaaaggaaaacctttttgaggacacatctacagataataattgctgtaagccaactgatagctgatgtagcactaagcggaggatcaagatttcaggagtctttattcattatcaataattttgcaaatagtgacagacctatgaaggcaactgcctttcccgcagaagtcaaagacttgaccaagagaatccgcactgttcttatggccactgcccaaatgaaggagcatgagaaagaccctgaaatgctaattgatctccagtatagcttagccaagtcctatgcaagcaccccagagctcaggaaaacctggcttgatagcatggccaagattcatgtaaaaaatggagatttttcagaggctgcgatgtgttatgtccatgtagcagctctagttgcagagtttcttcatcgaaaaaaattatttcctaacggatgttcagcgttcaagaaaattactcccaatatagatgaagaaggagcaatgaaagaagatgctgggatgatggatgtccattatagtgaagaggtcttgctggagttgctagaacaatgtgtggatggcttatggaaggcagaacgttatgaaataatttctgagatttccaagttgatcgttccaatttatgagaaacgtcgtgagtttgagaaacttactcaagtttatagaactcttcatggagcttacacaaaaattctggaagttatgcatacaaaaaagagacttttaggcactttcttcagagttgccttttatggccaatctttttttgaagaagaagatggaaaggagtacatctataaagaaccaaagctcactggcctctcagaaatttccttgagacttgttaaactttatggtgaaaagtttggtacggagaatgtcaaaataattcaggattcagacaaggtaaatgccaaagagcttgatccaaaatatgctcatatacaagttacttatgtgaagccttactttgatgacaaagaactcacagaaaggaagaccgagtttgaaagaaatcataatatcagcagatttgtttttgaggccccttacactttatcaggcaaaaaacagggctgtatagaagaacagtgcaaacgccgtacaatcttgacaacttcaaactcgtttccttacgtgaagaagaggattcctattaactgtgaacagcagattaatttaaaaccaattgatgttgccactgatgaaataaaagataaaactgcagagctgcaaaagctttgctcctctactgacgtggacatgattcagctccaacttaaattgcagggctgtgtttctgtgcaggtcaatgctggtccattagcatatgcaagagctttcttaaatgacagccaagctagcaagtatccacctaagaaagtgagtgagttgaaagacatgtttaggaaatttatacaagcatgcagcattgcacttgaactaaatgagcggctaattaaagaagatcaagttgagtaccatgaagggctaaagtcaaatttcagagacatggtaaaagaattatctgacattatccatgagcagatattacaagaagacacaatgcattctccctggatgagcaacacattacatgtattttgtgcaattagtggtacatcaagtgaccgaggttatggttccccaagatacgctgaagtgtgaggcaatgcagatgtacgtgacaatgagactgacctttctcaggaatatttggagctgtgcaaatgttaaaatttaaagatttgatatacatggagtgtttcttctcgacaccaaaattttcatgtgttccagcagggtgcttacatatttgtaaataagcaacttgaaagtgcctggaaaattgcaccactgtgcttggtttgtacttttttaggtaaatctatatgctgaaaagtagagctcaaaaacagtagttcaatttgcttaattattgcttaaaataatggtactatgtaaaattgtataatggaatacaataaaaggtaaaactt

SEQ ID NO: 1357 - DNA, 3346 bp, Homo sapiens
gagagccgagaaccgcctactccaggaggaaagcccgagggttgtgggtcctgctatagccagggccaagctccaggaaatcgtggccattcaggggtagtttgcagcctcatttgtaacattattgtgttgtcctgtgcatttccaatgcattacataaagacatggtcgcttttaggagaaatgtctgaaaaactaagaagatgcagaaaggaactgactgcagccattgaccgggcctttgaaggagttagttattcccaggagtgcacaggccagcagaggctggaactgagcgccgcgccgctctccttctcgctgcccgtgcacaggctcctctgcagaagacatcctctggcagcctgctcttctgctgctccttttgctgctgtcccatgtgctcctgagaatgagaaccctgcctttgcaacaaaccatgccccggtaaatgcaaaaccacatgctctgtgccccgagagaaaacctctaaccagcaaggaaaatgtattgatgcattcctccattttggcacctgaaagagagtcttggagaactgcaggagagggggaaaactggagaaaagaaaatttaaggaaagatatggagagagatttgaaggctgactcaaacatgccactcaacaattctagccaagaggtcacaaaggatctgcttgatatgattgaccatacaagcatccgaactattgaagaattggctggaaaaatagaatttgaaaacgaattgaaccacatgtgtggtcattgccaagattcacccttcaaagaggaagcctgggccctgctcatggacaagagccctcagaaggccacagatgctgaccctggcagcctcaaacaggcttttgatgatcataatattgttgagactgttctggacttggaagaggactacaatgtgatgacgtcttttaaataccaaattgagtaaggacagttatctaagctttgattccttacagcaggaggctgcccttgagcctgagcagaagcagctacaatggccgtcaggggccacatttctcaaaaggttggcagaacctgaattaccagaccctttttaaatcccagttgtgtccctttttaagctgtgagaccagttttttgaattccattgctttgaaatgtttcctattactgattttttttttttaactttccttgacatcttgaatgtgtttttttgattgatgttcaatatacccagtacccatggtaggtgtgggtcatgggcctctgctgtgtctcttagtgttcttttccacgggcccctaaaaaagtacaggagtggccaggcacagtggctcacgtctgtaatcccagcactttgggaggccaaggcgagtggatcacttgaggttaggagtttgagaccagcctggccaacatggcgaaaccccatctccactaaaaatacaaaaattagccaggagtggtggtgtgcacctgtagtcccagctactttggaggctgaggtaggagaattgcttgaacctggaggcggaggttgcaatgagccgagatggcaccgctcccctccatcctgagtgacagagcaagactctgtctcaaaaaaataataatttagctggtcatggtggttcgtgcctgtagttccagctacttgggtagggactgaggcgaaaggatcacttgaggccaggaggcagaggttgcagtgagctgagatcacgccactgcactccagcatgagtgacagagtgagaccctgtctcaaaaaaaaaaagaaaaaaaaagggaagaaaggaaactgaatctcagggaagtgcccacctcctgagctaataagaggaaggaatatgggggtgaggcagagctggcaaaaggctgttttttgttttgattgtttttaaagaccaagtgaagtatagtataagaagtggggaaggagtggaacaaggagttagatctgtaactgtgagtagtcaattgagataactcaatacctttggacctgattgtttttaaagactgagggtagtataagaagaggggaaggagtagaacaaggagttagatctgaaactgtgagtagtcgattgagataactcactacctttggaccagccagggctgtttataagtgctaaagcccgaacaaaccaaagagttggggagaaaggcctaactaacagctgagtgattgtctaacagactgtcttttaggccagtgactctggcatagggcaggctgcatagccagcaacatcccttaccacaggtctagtgattcctctgggctcaaatgtggaggctacacacccactccttagcagaggttggcctggcacctgctggtgccccaagaactatggcatggttagaccctggccacttgattgcatgtgcctccccagtgggcgtgccctggttcccaaccagttgtggccactgccactgccctgcctggggcaggagttgaggttaaggctaactacaggctccttccaggccacctaccactcagaccctgcaggaggtagcacaaagcattcacagcctgtggagtcagaggccaatttcttctccctgagcaagaagaatggaagcaaatgaaaagtgctcacagtatgctcaactgcccctgctcaggtgaagaatagcctgtctggatggagagatgtcaggctacttgatactcagaaaaacaggtctcaaaacagtgccttccaaataatacatgtggatgtggacactcttctatagacgaggtggagcttaattcctgtccttacccccatattcccacctcattaccaccctttgaaggtgaactagacttaatgatacttcccacgactaaagtagggaaagggaaaagtcacaaacttatagtggggaagcctggcagacacctaaccaagtgatgtcatgtatatgtcatgagaggggtgcatcacttccctggtattcctaccaaaaacccaaattcccagtgtatgatcttgagacaaatgttagacaaatccagacgtggggtacattctacaagatacctggccagaactcaagactgttgagatggccgggtgcagtggctcatgcctataatccccgacactttgggaggctgaggcgggcagatcacttgaggtcagaagttcgagaccagcctggcaaacatggtgaaaccccatctctgctaaaaatacaaaaattagccaggcatcatggcatgtgcctttagtcatagctacacaggaggctgaggcaggagaattgcttgaacccaggaggtggaggttgcagtgagccaagatcgcatcactgcactccagcctgggcaacaagcaagactccacctc

SEQ ID NO: 1358 - DNA, 4323 bp, Homo sapiens
catatttactttgacttagatgttttgggagtacagtagtgatctttatatagcttgtaattcaaaatatgcagaatttataaagaacattaaaatatcagataaaatatttttagttaagattaatagcttattgcaaattatgtatacacatgtaaaaataattgtgtatcataaatcagtgctgtttaaatgatggaattttaaaatgtagaattgatcacctgccacctctgatttttcatacagcatagagagagttcatcttcatctggccattcactctactttgtgtctcactcagtggttctttttgcgtttttgtttgagacaagtttcactttgtctcccaggctggagagcagtggcatcattatagctcactgcattgtcaaactcttgagttcaagcacccagctaatttttattttatttttagtagagatggaatcttgctgtgttgcccaggctggtcttgaactcctgccctctagcagtcctccagcctcagtggttcttaacatacagatcataatgtcctttgacaatatgaagaaggatatgattcccttcagaaaaatgcctagtgctctgctccagcattttatataataattgacctggctttttaaaattgcacagtgtaaattagtgtttcttgaatgaaattcgtaagggtttctttcatccatttactaagcttttatttatagaggtcagggaacaaaggttatctgataacatccttacttcctagataaggctgaaaacctaagataatttagtaactttgcacaaagtcgctcataagcatgaaaattgaacttagcacatctactaatatgaaaccaaaccaggctaatcagagtgttgggtatttactgcaaatacccgccaagtcagtcgatcctgcttatctgggaatttacctactgtttccattcctttcactgatgacatttcttttttcttgagatggcgtctcgctttgtcacccaggctggagtggagtggcgtgatcttggctcactgcaacctccgcctcccgggttcaagcagttctcctgcctcagcctcccaagtagctgggattataggcatgtgccaacacgcccagctactttttgtatttttagtagcgatggggtttcatcatgttggccaggctcgaactcttgacctcaagcccacctctgcctccctgccaaaaggggtgggattataggcatgagctactatgcccagtccactgatggatgacatttctaataagtggcaaatagtatcattctgcttattgtggaagggtagtaacaaaccatcctattaaatggatgtgttatatttattttgcgttctcttccctcaacagatggagcagcatattgtatgggacgtatgaattctgactgttggtacttatatactctggatttcccagagagtcgggtaatcagtcagccagatcaaaccttggaaattctgatgagtgagcttgacccagcagttatggaccagttctacatgaaagatggtgttactgcaaaggatgtcactcgtgtaagcatttttagtaataattgttgctggactcttctgcgtggggactaaattttatttttcattctgtaacttttaagttcagggtaacaagtgctagtttgttacataggtaaacttgtgtcatgggggtttgtcgtacacagtatttcgtcacccaggtgttaagcctagtacccattagttatttttcctggtcctctcccttctcccaccctgggactaaattttggactcaattgaagtttatttgtcaaacccttgttaaactcggtctttttcccccccaggagagtggaattcgtgacctgataccaggttctgtcattgatgccacaatgttcaatccttgtgggtattcgatgaatggaatgaaatcggatggaacttattggactattcacatcactccagaaccagaattttcttatgttagctttgaaacaaacttaagtcagacctcctatgatgacctgatcaggaaagttgtagaagtcttcaagccaggaaaatttgtgaccaccttgtttgttaatcagagttctaaatgtcgcacagtgcttgcttcgccccagaagattgaaggttttaagcgtcttgattgccagagtgctatgttcaatgattacaattttgtttttaccagttttgctaagaagcagcaacaacagcagagttgattaagaaaaatgaagaaaaaacgcaaaaagagaacacatgtagaaggtggtggatgctttctagatgtcgatgctgggggcagtgctttccataaccaccactgtgtagttgcagaaagccctagatgtaatgatagtgtaatcattttgaattgtatgcattattatatcaaggagttagatatcttgcatgaatgctctcttctgtgtttaggtattctctgccactcttgctgtgaaattgaagtgcatgtagaaaaaaccttttactatatgaaactttacaacacttgtgaaagcaactcaatttggtttatgcacagtgtaatatttctccaagtatcatccaaaattccccacagacaaggctttcgtcctcattaggtgttggcctcagcctaaccctctaggactgttctattaaactgctgccagaattttacatccagttacctccactttctagaacatattctttactaatgttattgaaaccaatttctacttcatactgatgtttttggaaacagcaattaaagtttttcttccatgagttgagtccttaagaaaatgattccagttactcattttgcatatttgctattttaacattattggaccctgcatttatagtcctttgatttcttccctctccctggtgtctcccccaagaccccaaataaagcaatacactgttaacactgtgggtttatatactaattctataccccagatggggaatgggggagatggtccctgggcttaatattctttaaagggcatgggaatttagcctctcttttattgtaatgtgctcttttggaaaatagttggttagcagggaagacccagagttgtagattgagattagggtgtactggctgaactgtggaaaacatacaattctgtgttcctcagtaaatgagattagcgtctaatgagtagcacccctttactaacttagtagtagtataaaatcatttttatttagttaattaccagagagatttagcataattttgttctggattcagtaaatcaagtcagcttggatcattcaccttaacttttcctttagcagccatttccactagtttccattaagtagtgttctataaactttgatccaaagcagaatcaatgtcttttccatctcgtgacttaaagttctgtgactgtgatgcatgtgagtgttccgacttcatctgttcctcttaactacggtgtttcccttaccatggcattcataggatgaaatgaatgactgcccagaatgagaatttgtccagattattcagataaacatcataaagcagaatacattataaataagtagaatatgaataaatagaataataaaattccaaaatactcaatgggaaatgactagtaatataggctttcaagagttggtaccttttagctatatttgcagattctctgggattttaaggaactgagaaaacagcaaagttgactaaattttatatttcttgtcctctaaatattttgataatttctggattgatgcagtgatgtttttgttccttccgtatttataaatgaaacacctttttttagtgtttctaaacctaaaatctacttggtttgaaatcaagtggttggaacactgtttgacttttatttgaagcatgttgttgattgaaaatttcattgaggaagttttcaatcagtgtgatcagtttgattctgtaatgagcacagcacctaatattttgaggagctctgttttgaggaccaatgcttaaggtggactttgttcgtaaacaatatcccaatagatttgttgacttgaggtctggtttggttttgtttttgttttgttttgttttgtttccaatagaattaagaattctaatgttgaaaaactgcacaaatttttatgggacaaagcctagaaaagagaaaggtagtttgaatcataatctaaatcatcgtatgatagaagagggaaagttttggtgccataatttctcctttcactggtgttggacttaaatcagttgaaatgtatttctgtaccacaatttacgcttcaataaaagtttaattgtctagtgac

SEQ ID NO: 1359 - DNA, 3510 bp, Homo sapiens
tcacgcggcgggggctctcgtgtgaggacgggagcagagccaaatgcaccagctgtcagccagactgaaggtgaagggagccaacaggctcatgtctgaatacaaggtcttcagcccacccctggaggcagtatgttaggattcttccgaacagagaatctggggtctgttctaaaggggcctagagcatggccatggtcactgtatcttcagaaatgtttaaagttttgtctttcttggtcattggaagaggcaaaaaaggaaaaaaaaaaaaagcaggaatgagggaagactcaattttgcacattctctctgtgttcccctgaggataaattggaaacgaaataggaatacaggacttttaggtatgagccagttcagtgtgttaagacacttgctttctaaccctttgctttttggcagtaatcggattgctggacgacttgtcttttaagacctctctaagtactgatgataaaaacagcccttcaacagggaaaataaccttccattctattttctaccgagcagagaggaaagaacatcagctgagccaggagggttatcaagttgcaggatgaccctgtttatcttgtgagactcagtttgctttaaatgttttcagagatcatatggttgcttttgtatatacttttgtttgtataacttggaatcatttttctgctaatcttttgattttaaatatgtctctggtatgtagtacaaggtttgagggtttttttttttttgtagtttgaaacatagcatttttaaagataattttgttcatttacatttattgttatgttttactagatctgctgtctgttttgcttgtttttgtttcattataatttgatttcctaagtacttgtggttttaggttgacctgtgcctagctccatgtatctttcatttgagatttcttagaccttatcaaacttatttttctttttttgagatggaatctcgctctgttgccaggctggagtgcagtggcgccatcttggctcactgccatttctgcctcccaggttcaagccattctcctgccttagcctcctgagtagctgggattacaggctcgcgccactacacccagctgatttttatatttttagtagattagggttttcaccgtgttggccaggctggtctcgatctcctgacctcatgatctgctctcctcagcctcccaaagtgctgggattacaggcatgagccaccatccatggctctcaaacttatttttcttaatctaaatcttctaatagctaaccgactggaacttcaagtgttcttatttctgtagattgccatatatagctatcacaaagcagaggaactttggacttttcttctataagcatcttaagctgttggcttcctccttctgaaagctctctgcccctccctcatgccgtggggctcagggttgagaaatacattaattctcaattctcctttctggctcttacatccaacttgtgttctttcattgcacggatcacatacacttagtaacacactgtagtggggtgggaacagaaaggatctcaagggtgttctgtcattctgggcaaatctctccaagcccagcccatgagtcttatcttcaaaaagtaaaataaaataaagttaatatactgagggctgaacgagaacatgagtgaggctgttcctggcacacatcagctgcttgataaaaattaacctcccgttctccactttgttagtgttctcagtggctttgcgtgccaaatgcattgtctttttattgtaaagcttgacttcgggatgctcctgggctcatcattcttggcaatatggcgacttttttgttttttatttttttaattgtggtggaattcatttaacataaaatgaacctttttatgtttatttatttattttgagacagatctcaccctgtcgcccaggctggagtgcagtggcgcgatcttggctcactgcaacgtccgcctcccgggttcaagcgattctcctgcctcagcctccccagtagctgggattgcaggcgcccgccaccacgcccggctgatttttgtagttttagtagagatggggttccgccatgttggccaggctggtctcgaactcctgacctcaggtgatctgcctgcctcggcctccaaagtgctgggatgacgggcgtgagccaccgcacctggcctgaaccattttaaagtgtacaattcagtggctttcagaacattcacagtgttgtgcaagccctacctctgtctggttccaaaactttttcatcaccccaaaaggagatggtggctctttcaagacgccagctttggcatcaactggaccttctggttgtctgacttcggacaagcattgtaatttccagcctttgcttcctcacctttaaaatggaaataatgttgatcaccttacgggcctttttaaaaagaacttgattgaggtatgatgtatgtacctcaaaatcaagtcatcctaagtgtactttttcagtactttttcgtgaatttgtggagttgtgcacccattaccacaatcccaattttagaacgtctctatcatttcctgttcccatctccagctctgtgtaaccacgagtctgctttctgtctgtatgggtttgccttttttagacatttataccaatggcagctgacagtacatggtcttcatgcctggcttctttcactcagcatcctgtttccgaggttcatccatgtagttgcgtgtggcagcgcttcattcctctctgtggctgaggaatattccattgtgtggacggaccgtgttttgataatccactcctctgttgatggacataggggttgcttccaccttccatgattcatatttactactgtgtgtcattctcagtactgtggcactgtgctggtacacataagtgcttaataattgtgagccaccgcgcctggcctaatactgctttattacaacgttatctgtgggtcggatccttttatattggttaacagatgaccctgactcagaataatctttttcaatggctttttgagggaagcttgtgaagttctggtgaatcttctttttcacttcactttcagtgagctgaaagtaaccaaactaaatacatgtattgtgtaaagggacaggacaagacagccttaaaaaattgaatatagttggtgagacaactcagaagtacaggtttgagcatcccttattcaaaatgcttgagaagtgttttgggttctggaatatttgcattaatgcttgccagttgagcatcccaggtccggaaatccacagtgctccaatgagcctttcccctgagtgtcacatctgtattggcactcaaaaagtttcatattttggagcatttcagatttcagatttgggatgcttcatctatattgacagctgcaagaacagaaaggaagaagagattatttttgtgggagaacagtttctcccatagtgtttcctgtggaatgctagtgtctcataaagtcttct

SEQ ID NO: 1360 - DNA, 3479 bp, Homo sapiens
aatgctgatgccaggaccttgtcctgccaggaagcctctgattagggctgtgaaccaacttccttttcacatctgcaaggacacttggaggcaactgcccaaggccactctgaggagggttgaatgttctttattaaaaggactgaggatcatgtgtgttggtgggccttggactctgctctaagacacatggaggcaaccactcaaggccactctgagaagggttgaacgtgctttaaattaaaaggactgaggatcatgtgtgttggtgtgtcttggactctgctctaagactcatggaggcaaccactcaaggtcactctgagaagggttgaacgtgctttattaaaaggactgaggatcatgtgtgttggtgtgtcccggagtctgctctaagagctgcacgggggcttggatcaatgcctgaatccagtgttcctgagtgcagagcatctttgctctgggtgagctttgaccatcctggagaagaaggctgctgcgggggtgggacaaagccaagaccaatgcccagcggccaaggccagccagatggctctgtgctggcagccagtgtacacagattttacctgaaggaaaatgtcacgttttccacagacaactgaagaaaaagagctctttggattaccctaattgtgatttactcattggaaccactgttttggattgtccaaaattaagtctcaaagcttaaatatgaggcttcagggagttatcctgaaatcagtgcttggtatcttcttgttttttgcttgttttttaaaaccttaattctcatatttttctgtcatatttctcagtgcctggtacattatcaccattaatccatgccagttatgtacagttttgcatgtttgttttttattttactcttttctctccttcattccctattcctgttcccccataggtgcccagtctaatgtatttgatatctgtccttagagcctccgtatctgtgaagactagagtcatgcacttcatcacatttcagtaacgatgggccgcatgtaccacagtcccatgagatgatagaggtgcagaaaaattcctgtcatctagtgacatcgtagccatcataacatcacaacacgactctcatttgtggtgaccctggtgtacacaaacctactgtactgccagttgtataaaagtctagcacatccagctacgcacagtacatacttgaaaattataataaatgaccatgttactggtttatgtaattactatattatactttttaatcattattttagagtgtacaacttctacttgtaaaaaaaaaaaaagttaactgtaaaacagcctcaggcaggcccttcagtaggaattccagaagaaggcactgttgtcctaggagatgacagctccatgtgtgttactgccctgatgaccctccgtgggtacaagatgtggagctggactacagtgatattgaagatctcgaccctgtaggcctaggctaaggtgtggctgtgtcttgatttttagcaaaaatgttttaaaagtaaaaatgttaaaaatagaaaacagtttatagaataaggatataaagaaaatattttgtacagctgtataatttttttttgtctttcttttcctttttctttttttttttttgagacggagtcttgctctgtcgcccagctggagtgcagtggtgtgatctcggctcactgcaacctctgcctcctggggtcaagcgactcttctgcctcagcctcctgagtggctgggactaccggcaagtgccaccatgcctggctaatttttgtattttttgtggagattttcaccatcttggccaggctggtcttgaactcctgacctggtgatccacccgccttggcctcccaaagtggtggggttacaggcgtgaactacagggcctggcctgtttgtgttttaagctaagtgttgttaggagtcaaaaagttaaaaaataaaagttgctaaagtaaaaaagttacagtcagcaaaagctaatttattaatgaagaaagaaatgtatgttttgatcaatttagtgtagcctaagtgtccagtgtttatagtctacaggagtgtacaggaacgtcctaggtcttcacatcctctcaccactcactcattgactcactcacccagagtagcttccagacctgcaagctccattcatggtaactcccctatacaggtgttacagtacttaaaattttatatcctatttttactgtaggttgtctctgtctagatatatttggatacacacatacttaccaatgtgttacagttgcctgcagcactcagtacagtaacatgctgcacagctttgtaacctagaaacaacaggctacacctatagcctctgtgtagtaggctgtgccatctgggtttgtgttctacaacgttgcattctacaatgttcacacaaggatgaaatcgcctaaggacacatttctcagaatgcttcctcattgtcaagcaatgcatgactgtatatagaattgttcataaatactgtgtttttcatccatgtaaatggcatgccatttctacctatccacgtctgcacaccagctcatgcccctcattcatgctcctttctgctgctcaccgctccacagctggcagcccctgcattccatccatccattcccccaaacatgggcatgttgctatcagcagggagctgtgatggacccctcacagggtcctcttattcctcgtgcaagcctttccctgggaagttcctcccagcattgctggtcagggggaacacacactcacatcttccctaaatgctaccagtgctatggtgttatcagaaactttatttatttattttttgccaatatgatagctatcaagctaccccatctctactaaaaatacaaaattaggcctttagtagaaaccctgtctctagtaaaaatacaaaaattagctgggcatggtggcacacacctgtaataccagctacttggtggctgaggcaggagaattgcttgaacccaggaggcagaagctgcagtgagccaagattgcaccactgcactctagcctgggcaacagagaacctgtcttaaaaacaaaaacaaaaaaaatggcacaggtctgattattaggaagctgaggttcttttttatacttagtattcactgaagtgtgaattacctttcatgtcctctaaacataccaacaaggaggctggagttaggacttatgttagagccagcctgcctggggcacagcctggccctgccatttattgactgtgtgactttgagaaagcttcctcatgtaactctatcttagcttccctgcctgtaataagtaaaaacagcaactacctcatagatttgtaaagattacataaaataatacatgcaatgcatggcaaacgacagtcaacgaatgttattattatattaactattgccatattataaatataaataaatataaatgatataaac

SEQ ID NO: 1361 - DNA, 3058 bp, Homo sapiens
actagaggcagcagccagccagcccagcccttctctggtgcctgccggtgtggtcctctcccagagactggggggccttcatctgccccatgaggaaaagaggagtggaggaccatggaaagggatccagaaaaagaaggaaacaccaagtcccaggggcatgagctggaagggagggctgctcctcccaggggaggctggggactgagagctgtccccaagagtggaaaaggagggagctgggcaagacccagcattgttagtaaccagctctgtggtcttgacttgacctcactgattctcagtctcctcacttggaaaagggcaaaacagccacgtgcaggccgtggtgggcacccgggctgtctgcagatagcttggctcattgttggtcctcagtacgcagccctcgtagccaagcagcttgggcctacactctgggcccaggggagtggctgtcgctggcatcccctggaataacatgctccgggggtcaaagattccttagctggaaaggtctaggaggagactcccgctctgctccctcctgcaccagcgctgtgccccccgccggccaggcagagccatccgatgccgctgggccgcccactgaggatctgctggctgcagcgggtggaaggacctgctcggctggaacgtttttttttttttttccctcccaggcgacgtccgatgggtgtgtcgggcaggaggtgatatttgacaggctgcgcgcgggcgagctgccgcggagcacccggcaggggctgacagcatggcctcgcccgacccgcccgccaccagctacgccccgtccgacgtgccctcgggggtcgcgctgttcctcaccatccctttcgccttcttcctgcccgagctgatatttgggttcttggtctggaccatggtagccgccacccacatagtataccccttgctgcaaggatgggtgatgtatgtctcgctcacctcgtttctcatctccttgatgttcctgttgtcttacttgtttggattttacaaaagatttgaatcctggagagttctggacagcctgtaccacgggaccactggcatcctgtacatgagcgctgccgtcctacaagtacatgccacgattgtttctgagaaactgctggacccaagaatttactacattaattcggcagcctcgttcttcgccttcatcgccacgctgctctacattctccatgccttcagcatctattaccactgatgcacaggcgccaggccaagggggaaatgctctttgaaagctccaattattggtccccaaaagcagcttccaacgtttgccatctggatgacaaacggaagatccactaaaacgtccacgggattaacagaacgtccttgcagactgagcgatgacaccacactttgtttggacatttaaattcactctgctgaataggaggaagcttttctttttcctgggaaaacaactgtctcttggaattatctgaccatgaacttgctcttctagacaactcacatcaaagccctcactccactaatggagaatcctagccccactaatgccaagtctgtttggggattttgcctcagctatgggcttccctagagtaggtctaggggaatactcagtctgatcttttttttgtttgttttattttgttttttttgagacggagtctcgctcttcctccaaggctggagtgcagtgacgcgatctccactcactgcaggctccgcctcccgggttcccgccattctcctgcctcagcctcccgagtagccgggactacaggcgcccaccaccatgcccggctaatttagttgtatttttagtagagatggggtttcaccgtattagccaggatggtctcgatctcctgacctcgtgatccgcccgcctcggcctcccaaagtgctgggattacaggcgtgagccaccgtgcccggcctgattctcttaaaattgaagaggtgctgccaaggccttcagatctaacgcagatgcatagaccttgttcctggtacttgttcagcctgtgctggggagccgtggtcccgagttccctgggaggctgacagggtcaagccaccctgcccaccaccctcccacttcccctcccctttcctctccagcattaggattcaagggaaatctgcatgaagccaattttgagggtagacgtgtggggaaaataaatcattatacagtaagacctggggcttgaggggtggggaatggggagggaagggcatagcctgctcctccatgagtctgacatctcggaaactgagcagctgccggacgcctgggtcaggaatccaagaccccacctcttaaggactggttcctcagaaagcaccctcagggaaaaaggtgaaaacattacatccgtggattctcctgccacaaccgcattggaagaaaaggctgccgcaacatctcagcgaggagtgaaggacccatgtcccaggaaccgcgctgcgccacctgcactcacccccctcacattctcttaagcacccggtggccctccgaggcctggcggaatggtggtgcccacggggttgggcaagggctcaccaggacctcaacgggcaaagttgtgcacactaaaatatcaaatcaaggtgcttggttttaaagtaaatgtttttctaaagaaagctgtgttcttctgttgacccagacgaatagggcacagccctgtaactgcacgtgccttctgtcattgggaatgaaataaattattacgagaaagggacttgtcctaactggtttgaggccttacagttttgtatctacatttttcccctcctggggtttgcggggacagggacagaactacaggagtcatgggaaagaaaattctggcttcactactgctcactgctcactttctgatcactctgatacttttttttttttttttttttgcaacctgataccttgaaaagcttctatgtgtctctccttttgttgcctggcagctgtctaggatgatcactgattactatttactaagtagccacatgcaaataaaagttgtttggtaaaatg

SEQ ID NO: 1362 - DNA, 3751 bp, Homo sapiens
gttagcactatcattttcccagatgttcatattatttctgcaataaattaaaagggagtgtgtcaaatgctgtcatgtctgaaattagcattcatattcttttgcaatggggatgatcagtcgtgtgtactacatgaaccatgtctgatggtagcttgttcccactgtcattttgttttctggttgaagattaatgagctcagccacacaaacaagagttcttcattgacctctacagtccctgcctgtttggaaacatctatggttttgtataacccctgtcatttaactgacagtgttagaagatatccccctgatgtgttactgtaaccaagaaagcatgaacgttaccctttctggtgacagcctgccatgggctgctgtggctgatacttatagaattgttgctccaaaattttggctccacttgagctgtccagaagtgtacctgacatttgtgtattaccactcaccttggatctccttactagtgtaattatttccacatcaatccaggactgaaaggaaaaattttttcaccaggattggcagcctgtagctctgtgacctcagtcaacccatcatgttgtgttgtgggcggggggcaagaattctttagagaaccaagttgcgagaaagattccaatccagtgaaagtaaaaagtaagaagacatttagatagttgctatattttgggaagatgtcaaaacaggtttttagggaggaggtatgaggtgttgtgttgttttgtttgtttttattcagttgtataatgaatataacaaattaagtagccagaaggagctgcatgtaaattagcaccacttttaaatgtcaacaataaatttgaggtgagcttcctgggtgatgccaacatttaaatgtctttctaaccgtatatgttttaaatggtgagagaactatagcaaaaatggaaacataatgccctcgtcgttttttgattttaggataagtttctctctcaaattttggccttacgtgtccatactgaggggttgtatgcatattagtacaaggctgacttttactgtggtaaaatacacataacatatagtttatattttaacaattttttttttgagacggagtttcactctttttgctcaggctgcagtgcagtggcacaatctcggctcactgcaacctctacctcccaggttcaagcgattctcctgcctcagcctcccgagtagccgggattacaggtgcccaccactacgctcgactaattttttgtgtttttagtagaaacggggtttcaccatttagccaggctgatctggactcctgaccttgggcgatccgcctacctcggcatcccaaagtgctgggattacgggtgtgagccactgcgcccggccctaacaatttttaagtgacagtgacattaagcatattcacactgttgtgcaaccctcaccaccatccaccctcagaactttttaaaatctccaagactgactttttttcaaagcaggcaactttaattccctacctggtatctggattccttttccttttcatgctatcttttcatcatacctcttctaatctgagtatttcctctgggcttaaaagagcctcagtggagaagtacaacctaagagggagttaggtacaacctaggagggagtcaggaggagagagttaggttagttagtacaacctaagagggagttaaatggatcaggaaaatcgtgttttatctccaaagtaaaatgataactatgggtggcttctgggctcaatttagaatattatcattgaaaagtccccaagaaactattaattcagagccaccctggtgagttgaatttcttgaatgtcttcatggtcttgaaccaaagtcatttccacccaagggagagtcaggtgaaagtccccagggccctctctaggggaccggagacctccagactaagctggtggaggatgggctcaacctccatgagagaagagcagccaggatcagggggcattaacgttaattttcccaggacttttctgcaaatgggtattggatggaaatatttgttctcagtcagatgagtttctcctattttagtgagaccaaagaaagacaattttaattctgtccaagctgacttttttgaatgctctggaaatgttggaattccacatcaaagtacgtaactgttttaaactgataactaacccaatatgtgaaaatatatgcaagcatgaataaagggttgactaattccagaattagcaataattttctcttaaatagcaaatttctaaagctgtatgattctctttgcaagaatgtttttcacactgcttaataagaccagttaatgtgtaaaacagaaaaaagtatatatatatatcatatgtcttttcatgcatctgaaactttaactgtctatagggttgcttgtcatagttgaacattatttaattaacttattgactatatatgggtatacttttctctatagccattcacttttttaaagttttaattatttaattgacaaattagctattcattttccttcaaatcctgtttttatcacaatgtccattttacagctagacacaaaatttagtgggtccaaattgttcaatcacttctatgttatttgttcagaatagtggatctttgcttaattcacttctgttttaatcccatcatattcctttaggccaagaaaaggaaagctgatttggattacatttatgcttaatatcaacatggtttataagtggacagaaaaacactcactcacgtattcagccacgtatggtctggagtgctctgtagaacagcccgaagtgtacaccatgtctctgcacttgaagctcatggaatgtgttggaggagactcaagctccatgtgggaacagtgtggcccaagagccagcatggaggagggctgtgtgagcagactgctatagaatgctaaagttataatcctagctggtgtctcgttctgtttaaaaaaatcaaatttctgtatgtaattgacgtattggtccttatagtcagtaccatcaggtcttagattgttaagtcattttgctgccaccagaccagtgagagtcactcacttatttgtaatgattcttgggaagtttagtcaagagaatatccttgaataaagaagtacatgttttaagtattttcatcgtagtctagatgggctgtaaaacccatttccacacgagtataaatttaaaacagaaacatcaaggtgtcagcaatcatgattttgttttgcttgttcacaagtttgaaaaggtgcatgaggcaccaatcagtgacactggaatgctttaaggatggtttgtgactttaccccattgtgccttatcatttgtcagcaaacttactgggccaaacacaaatggctgagacactcctggcccatttcttgtcatcgctgccatccccaaagacagactctgggaaacaacttgggaactgcttcaagtccatgccaggtcatggcttcgtccgcctcccagcatgtacctggacttcctttgggtgccggcttttctgctggactaagagattcatggaaagaaccccagggcaaggtgaggagaagcagctggtacagactgatgacgaaggagaggaccagaaaagctgcttgggtgtggtggaagtttcagtgtaatgtgattcctagtaggcacatctgtgactcccttaaataaaaagggccagagatgaggggacgcctggtgaaaatg

SEQ ID NO: 1363 - DNA, 3309 bp, Homo sapiens
gtggctgttttagtttgcattcccactggcaatctgtcacgtttctgttgctctgtgtctttgttagcacttggtgttatcagtgttttttagttgagccattctaacaagtctagtgggatctcattgtggttttaatttgcacttccgtaatggctaagaatgctgagtatcgtgttcttctttgccactcttgtatcctctgtgaagtttctgttcagatcttttgcacagaaaaagctgtatcatggaaccagtaaaataaccaaggagaggttgattaaagttctgtttataaccctagaagattcctgccctagggatatgggatggctgaacgtaggacaccgacactggacagatgaaatagcagtttattagtcatgcatgctcacagccctggggtgggggacaccgcatgccacacgggggctgcacttgggaacagagtgaaccacgaggggctgtggaaggcaaaatttgtagtaacaggagggtgagatgaccttgcttccatgggaagatgtgattggcttgtttgaataactctgggccggcagggatgagcagactggagtcagctctccgccataaggaggctgtttggctttgggacctgatctgtgggagcagagcttggaggagaccttgtggttaggctatttgaggccttcttgattttaccgacgtcaaggcagcacataatatttagtcttcatttcaggccacacaagacattcttatatatctacactctgtggcactttttgaaaggttttgtccttagtgtttagcagttgattatgatgtgccttgtcatggcttcttttggatttatcttgtgtgggctttgcacagattctttaatctgcctgggtttatgtcatttgctgaacctaggaagttttcagccattagttctttggatatttttttcagcattcaccttttctctcctgttattaacctgtggggtctgtgctaattctaggtagttagtttcagaatcgaattgcattgtgggacacatagctgggtgtcacaaagaactggagaactgcttggtgcaaaagtccatacgtttgatgtcagaagtgttgtaaacagaggaactgtttccttagagatttttagatactcattatttgtaatctggatgggatatcatgtctttcaccgattgagatacatttttctaattatgttgtttagacatttagtcacagccttctgtgatggagtgtgtttacacttcaaggttaaggttctctcttctcttcgcttactgtgtaaggagttttatgacagttgtttttgactgaaacttgacattgtcagtggcctaaagtcatttttctcagcttttcctttgtgtcccagtgctcttgaattatgctatcagtcacagtgcccctgcatagcactgcttcccagttggcagtggagtagggccttgtaaagagttaaaagatttttgaatcatactcctgttctacaccctcccttttcccatgggtgcacatgcattgggactcactggataaaagcaattggtgtgaaactgaagtaggtaaatatcaaagactaagtttctctgttgtgaaatctactaggaagctaatgaaatatcattttggaagacatgctttaaataatttgatatattggtttgttttcttttcttttcttttttttttttcagatggagtcttgctctgttgcccaggctggagtgcagtggtgccatcttggctcactgcaagctctgcctcctgggttcatgccattgtcctgcctcagcctcctgagtagctggaactatagacgtccaccatcatacctggtgaatttttgtatttttagtagagacggggttttaccatgttagccaagatggtctccatcttctgacctcgtgatccacccacctcggcctcttagagtgcttgggattacaggcgtaagccaccactcccggccgatatattgctttatgaaaattatactggatctgttacaggtacgattgatgtattttatttttaagttgtcaaacattcagttaatgatgtgtgttgtaacttttcggggagggacatttgcagagactgacagatggtatggcattctgaaaagcggttacagattaaaaaaattttaattctgcagatgatagtgttgaaccaagtggaacaaagaaagaagatctggatgacagagagaaaaaagatgaaactcctgcacctgtatatggggccaagtcaattctggagagctgggtatggagtaagcaaccaggtaatctttgatcagagatagaaattagtgtagacattttgcctccagatcctcaagtggttttagaaattggttctctaattctgtgggagaaggttgatactggtatagtcttacacgtcattgaaactggaaaagatagctagatattctcctactcatgttttggataatgagataaattattttatgcttcacacacttggagtatgtcatctactgtaatatagtatctgaatgaatactttaaataaaatacatttctgtaaattaattgtatactttaaaaatctgtgaataaatttgagtagcaagtctcagaagcttgattctaaatattaaagatacatccttccttgggagggagcatgtagcaaatgtgttactgtggttgtaagcatgctgtctttctggaggtcgcttcgttcctgcatccactgttttcatttgagggatgttcacggaataccaggcactaaagggccagaatcatccccctacaggaccagcacttggccctggccatcctgctggagctggctgtgcagagaggcatgctgaggtgagggctggtgcagaccgggaatgctttggggaagcgcctctgtatccaaatacctgttgcattgtgtgcgtttcactgaatcgtgtgactgcagcaggtgtggtgctctacagagaaccatgtcccagggctctctcttttccttttcttcacttcctgttttatgctcagttttctagcctgggaactgttcttctttttttttctttcagttttcctcatttaattatttttattccatgaatttaagaccctagatcttcatgtaaatgtgctctttgagcttcttaactggtctttcctatcagcagaaggcgatgtcttgtgctaaaatctcagtgtcaattcagtgatttaactaccacggctttactttcgtttcctttcatatcccaagtatttcttcacttctatctagctgtttgcttttatttttgatcaaccat

SEQ ID NO: 1364 - DNA, 3107 bp, Homo sapiens
tttcacattcctccttgactccaggccctgctgagtctggcctcatatctatacagtgtttctcctctgtattggctctgccaccacagtagttgaaactctcattttctgcgatgagagtagtctcaccgagcacctaggaggcagtccaggctctttagcatggtgttggaagcccttaatgatctgctacagcctgggcctccagcctcctctccttccacagcatgtactctgcacagtagccatactgtcttcttttggatctgcccccatagtgtgttctctcaagtttttggcacctttgtccatgtcctctgtgtttagaatgcctttctccatctcatcgtacctctgtcctgccacactgcacttgacatcacccctttttaaactctttatttccccctttttaactcttttagggttttctctaagacctaagtccttcctccaagtactccccaagcctcctaagtcacagctcatttagtttgtcattctttgtgctgctgcaactgtagcacctaccttgtatttaaacagttttattattttgtttatttgagacagggtctggctctgtccccaggctagagtgcagtggtacaatctcagctcaccacaacctctgtctcctgggtagctcaagcccacctcccattcagcctcccaagtagctgggactgcaggcgcacgccactgcctggctaatttttggatttttttgtggagatgaggtctcactatgttgcccaggctggtctcaaactcccgagctcaaacaatccacccaccacagcctcccaaagtgctaggattataggcatgagccatcgcgcctggcctgattattgatttaaacatctgccttcctagaaaactgtgaactcctagaagaatgattttgtcaggtttgtatccccacatttagcctggagcttgctatagtaatctcacagtgtgcatgttgatgattttagcatttgttgttttaggactaacaatgcacaccgtttctaacttctgtttctcctcagcctttgcttctacatactggaatgggacggttatgcacactggatgaatctgtctccctggcaaccatgattgatcgaataaaaagacacctaaaactatctcatattcgcttagcccttggggtggggagaaccttaggtaaatatagctccttcatctatccagtatgcctactgttaacattggacaaagatcgaaactcttggttgtattaatatgtgatagagaatgtgttagcaactcataggagataattggtttacgttattgattagggtgggccaggttctgatgtggaatacatctcattgacttaatcaatgagatttatttctctgtcatgctatgtgttcatttcaagttggtcattgtaggaagtctgaccattgtagactggttgctgttgcagagggagggagttttgcagggtcttaaaccatcagtttaaaattccaggaaacatgttaatttctgctcaactcattttccagaattagtcatgttgcccaatacaagcaagggaggcataaagtgcagtcttaccatgtgtcaggaagagagctggaatcatgattgctacaattacaacataaactttgcacttataagactggtaatattttctagtgaggtgctactgagtgatctgatccattgtagtttctaagtcttgtagttttttcttctggcctttcctggtacttttgagaacaaaaagagtgaacagacatttgttcaacaccttcagtgagcctagcactgtactgattgtctgtcctaagtacgtgagctcctgctggcaaaagcagtggggtacagcggttataggtgtggattctgagcttagacaacctggcttcagatttgtctgtcctgtttgctgcatgtctttgacaagtttatgccctctgtgtcacagtagcctcatctgtaaaaactgcattaataaaacctaactcagaaggtggtagtataatccatgtgacatggcacagtgattggctcacattaagtataaagtgctagctgttgttagttttgtggttggtactatttctcccattttataggtgaacaattgtggttcagagagataagtaactttattagttcgttctcacgctgctatgaagaaatacctgagactaggtaatttataaagaaaagaggtttaattgactcacagttctgcatggctggggaggccacaggaaacttacaatcatgttggaaggcacctcttctcagggtggcaggagagagaatgagtgcaagcaagagaaatgccagatgcttatgaaaccatcagatctcgtgagactcacgcattatcacaagaacagcatgggggaactgcccccatgatccaattacctccacctggtcccgcccttgacccgtgggaattatggggattatattcaaggtgagatttggatggggacacagagccaaaccatatcagtaacttatctaaaagtccagttagatcaaacaacccaagggagttagtgtccaaagaaaatggatagcagaggtgggatttgacttccaaaataactccaaagccccctctttgagataccctgctgctgaactggagtgtccactaaagtgttcattttagaaacccaagtgctaaatacttggattttggctcgaaagttgctgttatttcactttccagaggatgctttttgagaataaatagtatatttaaaaatagtgccaaatccatttgtagcattcctctttttatagtccttttagttccttagcttcctcacctgagaatagagatagtacttgcttacctctcactgttgtctgaagacccaggtgagattattttacctagcactgttgcaatacagcctagagctgcaccattagtactattcagtggtttgtgagtttgtgcagccatgtccaaaggaataacggtgcccccttcagcagcacatatactaaaaattggatgatatagattagcatggcccctatgcaaagattacacgcaaatttgtgcattgttccgtattttgcgcaatttacaaaggttgttg

SEQ ID NO: 1365 - DNA, 3425 bp, Homo sapiens
ccttgaggagcctgagttgtgaataaacatgtgaatccttattcttgatgcccctatctcaagaggaaggctcaatggcttgttctaggggagccaaagtctttgtgcatgttgttcaggctggaccagcaaggtagtttgtttggagggaggagggagctgtttaagaagactacatatgtaagttttgagaacactgatcttttatttgaaaaatagggtcaacttttactcacctgccatgttctgagtttaaggtttgatatccttggccatcaactgttgcagggaaaccaccctaaataatgaagaaaagaagtcgtctcagtgtaaaaaaaaaaagtggtgggcttattttcttttcttttgtctgttgttccctcttcccctcccccagagagaaattctcaaaagaacaactcaaaaaacaaaatggcttcctagtgagaacttcagtgatgatcctttcctccatttggggtatgggcttttttttctttttacactgagattattcttctttcctgcattatttagggtgtctgatgccatcaagtgttgcaggagaaacttcagtcttggctgttccttcttggagggaccactcagtagagcctctaagggacccaaatccttcagaccttttggagaacctggatgacagtgtgttttcgaagcggcatgcaaaactggagctggatgagaagagaaggaaaagatgggatattcagaggatcagggaacaaagaattttacagcgactgcagctcagaatgtataaaaagaaaggaattcaggaatctgagcctgaggttacctcatttttccctgagccagatgatgttgaaagtttgatgattacccccttcttgcctgttgtagcatttggacgaccattaccaaaattaactccacagaattttgagctaccctggttggatgagcgtagccgatgcagattggagatccagaagaagcaaacacctcaccggacgtgtaggaaatagctgtgctggcaagaaccctgtcttcagatagttgtagcatgccattcccgagagtggcagagacctgtatatgtgacctttgtcctcacatatgttatcactcgctgataataccctttcatacttccttgactttgttttcattactctgatttcacaaaaactctttcattcggctaattgtgagttatggagggtgattgggatttcttttcccttttttgggaaatgggctctcaagctaaagctataggatggcagattcagaagtttcaggggtctgtttctatacatttgcctatgttaaaggggtaaaagggctctcttcattagacatgtggaagatgaagcagccccttcctttagagctgtgcctgcatggcactcttctcaccctggtacaccctccttatagtgggtatagtgatttttaaccctaaaataaaacaaacaacctcaccatgagctttaggaccagaagaggaatgacaagtgaagcgatgaagcaagccatcttcacagagtagaaaagacatcggagagttggtagataactgtctgaaaagatagttgttcatttgaaactattctgtgatacagtcatgtgggaagggatgtttggctgtgattattttttcagttaatggataacaatttctttactgctcaaaaaccaaaatctttggaaaagaaagtggggatggttagtttcagaacaagttacagctgtaaacaaaagcacttagtatttgggatggcatgccaaaacctgtataaatgtccttgtatcacatcacttctcaagtattccttcattgggcttcatccttttagcagaactcttggtggtgggatagagacttagggagggtagggggagagtgtggaaataggtgcttcctttggctggcaaatgtctacatcttgaaacaaacagatgtacctaatgagcttctccattcactttgtaaaaataatttgtatgtgtaccatcttggtcctctcccctcccgttttgttaaaatatcaggatagcactcccaggccactttggtctcagtgtaagatccctattaactatctgaaaggaaaatagagccaagacctctggtctcaaatatataggaattgcctttctttagtcttcaggactattgtgtgaaaacaagtaggggtctaatctcctagaaggtaggggcttttatccttaaagagaatatgtccccagattattagcacttttagaggagaagccaaggtatgtagggtgtgtggctggcccatcagtggagcacgaagagagaatgggataccattgtgggaagagaagaaaagttcctcaggggcctcccactgctaaagttttttgtgagatgttgatctgtgcttcctggatttgacttttaaaggaattattctggcagcacatgtagtattcttggatgatcttgctgctcttatttctccttttgtgtgtgtgtgtgtgtgtgtgtggctatgggttttcatttgtaactccatctgcttaggagagtgggctctctataagggaacctgctgtaaacttcattgcagcaaggatgtagagagaaataggacttaattccactaggggctctcatctcacaccttaaggaggagatttctagaaaaactgggccagattttctttgttctccatcattttaatgtggcaggctgttcagttttcttactcttacctatgtgatatttcttcgtaacgtgtccaaaaagaaaaaagacccaatcagtgtctcttgactttgttctttgatccctcagtttcttcttgatttcagcatgtgtcgggttcctaattttgggtatgagttagcaaatttaaccattgtgtttgtgccctacccaggggactccccagtttctgacttgaagtagactgagaagaatccacgaggtgctatctggccagatttaagtagattctatttccttggttctccctctccctgaggacctcttattttattgtcccctcttctaggttaattctcctttgatttgactttgttgagaaggaggttggacagtagattagcaaagttccaagtgcaaaattacagtgtgttagagtgtggggggaaaattagtcttatttttccctacatgggatacaacactgtgaattcaatcttcaactgaaggccctgcagttctcctaaaacatagttgtttgtttttctttaacaaagtttaagctagtgttaataaattaaaaaaaattgcttgtctgtctacttcagctttgttttatgcccatttcatattgttgtctgtgttgtaattcataacttttgataccatttctgatgtgtaaaattggttgtcttgtaaatatcttataaagagttcaattgtaaataaactattgtggctgtt

SEQ ID NO: 1366 - DNA, 3375 bp, Homo sapiens
aagttaacagttcacccagtgtgtgtgttcccagtctcatatcatatttaacacagactgaacttgcagacattagcatgcttagaagtgactctgaaaacatacttacaaactatgaaaatcaaagccgagtggaaacaaatgaacgtgcaaatgaatgtagtcattctaaaaacattcaaaactttccaagtgatttaatagaaaatcctattatgaaatcaaaaatgagtaaattctatggtgtgaatgaaacagagaatgaagataatacaaacagggattcacctatctttgactattcccccaggctaagtgccttgttaagtcatgataaattgatgcacagtcagggaagttttaatgatacacacaccccagagagcaatggaaataagtgtgaagccccagccttatcattcagtgacaaaaccatgttgtcaggtcaaagaataggagaaaaatttcaagaccagtttctgggaattgcagctattaacatcagtttaccaggagagcagtatggacagaaatctttaaatatgatttctagtaatcctcaagtacaatatcacaatgataaatacatttcaaatacttctggtgaggatgaaaaaacacatccaggttttcagcagatgcctgaagacaaggaagatgagtctgaaatagaagagtattcctgtgctgtgactccagggggtgatactgataatgccattgtgtctcttacttgtgctacaccattgcttgatgaaaccatcagtgctagtgactatgaaacgtcactgctgaatgatcagcagaataacacaggaacagacactgatagtgatgatgatttttatgatactcccttgtttgaagatgatgaccatgattctttgcttcttgatggtgatgatcgtgattgcctgcaccctgaggactacgacacactgcaagaggaaaatgatgagacggcttctcctgctgatgttttttatgatgtctcaaaagagaatgaaaattccatggttccccagggggcaccagttggtagcttaagtgtgaagaacaaagcacattgtcttcaggatttccttatggatgttgagaaagatgaattagattctggtgaaaaaatacatttaaatcctgttggctcagataaggtgaatggacagtcactggaaactggatcagaaagggaatgcacaaatatccttgaaggtgatgaatctgactcattgactgattatgatattgtaggaggaaaagagagcttcactgcatcattaaaatttgatgacagtggcagttggagaggaagaaaggaagagtatgtaactggacaggaatttcactccgatactgatcatttagattctatgcaaagtgaagaaagttatggggattatatatatgacagtaatgatcaggatgacgatgatgatgatggcattgatgaagaaggaggaggtataagagatgagaatggaaagcccaggtgccaaaatgtggctgaagatatggatatccagttgtgtgcctctattttaaatgaaaacagtgatgaaaatgaaaatattaatacaatgattcttctggataaagtgcacagttgtagctctttagaaaaacagcaaagggtaaatgttgtacagctagcatcacctagtgaaaataacttagttactgaaaaaagcaaccttccagaatatacaactgagattgctggaaaaagcaaagaaaatctgttgaaccatgagatggtacttaaggatgtattgccgcctatcattaaagacactgaatctgaaaaaacttttggccctgcaagtatttcacatgataataataatatcagttcaacttctgaattaggtactgatctagcaaacacaaaggttaagttgattcaagggtcagaattgccagaattgactgattctgtgaaaggtaaagatgaatattttaagaatatgacaccaaaagttgactcatctcttgatcacatcatttgtactgagcctgatttaataggaaaacctgctgaggaaagccatttgtcattgatagcctctgtaactgacaaagatcctcaaggaaatggaagcgatctcattaaagggagagatggcaaaagtgatattctaatagaagatgaaacatcaattcagaaaatgtacttgggtgaaggagaagtgcttgtagaaggtctagtagaagaagaaaataggcatctcaaacttttgcctggtaaaaatacaagggatagtttcaagttaattaatagtcagtttccatttccacaaatcacaaacaatgaagaacttaatcagaaaggaagccttaaaaaagcaactgtaactcttaaagatgaaccaaataatctacaaataatagttagtaaaagtcctgttcagtttgagaatcttgaagaaatttttgacacatcagtttccaaagagattagtgatgacattacttcagacattacatcgtgggaagggaatacacattttgaggagtcattcactgatggacctgagaaagagcttgatctgtttacttacttaaaacattgtgctaaaaatataaaagcaaaagatgtagccaaaccaaatgaagatgtcccaagccatgttttaataactgcccctcccatgaaagaacatttacaattaggagttaataatacaaaagagaagtccactagtacccaaaaagactcacctcttaatgacatgatccaaagcaatgatctttgtagtaaagaaagcatctcaggaggaggaacagaaatttctcagttcacaccagaaagtattgaagccacactttcaatattatctcgtaaacatgtagaagatgttgggaaaaatgattttctgcagtcggagcggtgtgcaaatggattaggaaatgataactccagtaacactttaaatactgactattcattcttagaaattaataataagaaagaaagaattgagcaacagctaccaaaagaacaagccttgtctccaagatcccaagaaaaggaggttcagattcctgaattgtctcaggtatttgtggaggatgtaaaggatatcttaaaaagcaggttgaaagaaggtcatatgaaacctcaagaggttgaagaaccttcagcctgtgcagacactaaaattttaattcaaaatttaattaaaaggattaccacatcacagttggtaaatgaggcatctactgtgcccagcgactctcaaatgagtgactcttctggagtttcccccatgactaactcatcagaactaaagccagaaagtagagatgatcctttctgtattggaaatcttaagtctgagcttctccttaatatattgaagcaagatcaacatagcc

SEQ ID NO: 1367 - DNA, 3051 bp, Homo sapiens
aatgagcgcctcgggccgcccagcgcagccggagtatccacctcgatgaccacgggctgagccccgcgccgccaccatgtccgtggccttcgcgtctgcccggccaagaggcaaaggggaggttacgcagcaaaccatccagaagtttttgaagaatgccggccagtcatcgagtgcccttggtttgggtacaaggtgcgttttcctaacttgcgggtctgaaagtgcgtccattcccccttcacgcctggttgcggtttcggcggactagaatttctacgcagaagtctccctcaggatcagaccgtagcccttccggaaacctccatgatgctggacgagaaccaccacctgatccagtgcatcctggagtaccagagcaagggcaagacggccgagtgcacgcagtaccagcagatcctgcaccggaacctggtatacctggccacgatcgcagactccaaccagaacatgcagtccctgcttcctgccccgccatcagcacgggcctgccaccctcctccctcctgcagggccagattggcaacgggccgagccacgtgtccatgcagcagacggcgcctaacacgctgcccaccgcctccatgagcatctctgggcccggctacagccacgcgggacccgcctcgcagggcgtccccatgcaggggcaaggcaccatcggcaactacgtgtctcggaccaacatcaacatgcagtccaacccagtctccatgatgcagcagcaggcggccacgtcgcactacagctcggcgcagggcggcagccagcactaccagggccagtcgtccatcgccatgatggggcagggcagccaggggagcagcatgatggggcagcggcccatggcgccctaccggccctcccagcaaggctcttcccagcagtacctgggccaggaggagtactatggcgagcagtacagccacagccagggcgccgcggagcccatgggccagcagtactaccccgacggccatggcgattacgcctaccagcagtcatcctacacggagcagagctacgaccggtccttcgaggagtccacgcagcactactatgaggggggaaactcccagtacagccagcagcaggccgggtaccagcagggtgccgcgcagcagcagacgtactcccagcagcagtaccccagccagcagagctaccccgggcagcagcagggctacgggtctgcccagggagccccgtcacagtaccccggctaccagcaaggccaaggccagcagtacggaagctaccgagcaccgcagacagcgccgtctgcccagcagcagcggccctacggctatgaacagggccagtatggaaattaccagcagtaagggacacacattctggctggagcccttgtggtagcgtgttcatccaggggccggatgggctggcggcagctctggtgaattgtgacatgttggttacctgttcgcccagtgccacgtctgcatgtgaagcgtgctcatttcatgctgggtatgacgccgagcgcacaccactggcgtgagacagcgcttggtggtgtgatacttttggtgctgtgtatagtattgtatgtcggtacacggagaggtatcctttttttgtcccccgcccccttctcaatgtttctagctagctttgggggtcattttgtcatcagagcattctgtgcccagggacaggacagatctcgaggacaccacagtccacctgttcccgtcaacagacgttaggtctcattttcctcctcatgcagtgttgtagtgtgggttgtcaacttttctttaactggctacgccacagctggacacacatgcagcccctggagggcagcctcttcctgtgcctcgatggggtgggtgggagggcatcttctgtgcgttgggtcagtttctgttacgtaacgaaaaggataaacatctcccacgggagaggccacagatggccacttccagagcttgcccattgcctgtctctcgccaattccgtttatccaaaaaggtacatgtttttgtattaaaaagtaaacagggatcagtgactgtattccaaataaatatgaatccctaagggccgtggacaaattgcctaacccagggccagcggtattgctgaaggaaaggggcagctctctgggaagtgggccctcagagattactctggctttgacctttgtttagctgatggtcatttctgggattggaatatttaataagcccaattctaagttgataggtaattttaaatattcaaaccaaatcttcccaacagttggcaagttgtttattttatattatttcttccaggacctacttgctcagatctccaagcaagcatttcttttcttttagggatgtctgaaagtcacatccagttacattactgtgttctttctaatgaaaagtaaaggttttatatagagaaacttgagtaatttttacatttctaagacattaaatcccatttaaattctgtgtgaacattaaagacagcacacttgcaaaagtatggtcaaaggaaaaaaatcccacatttcaattaacaagtagcatggacatttgatcaacctttagttggaataataatattcatatttgctatgaatccttttaaaaaaatctttggataaatgctgacagatttccaagaactaccaagaaaatacaagagatatccaatgcttgatatatgaggcctagtaataacgatatttctctttaattgatgttttgttttaaaagttaaaagtaattcttggcgtggtggttcacgcctgtaatcccagcactttgggaggccgaagcgggcggatcacctgaggtcgggagttcgagaccagcctgaccaacatggagaaaccccgcccctactaaaaatacaaaattagccaggtatggtggtgcatacctgtaatcccagctactcgggaacctgaggcaggagaatggcttgaacccaggagacagaggttgtggtggggcaagatcgcaccattgcacccgagcctaggcaacaagagtgaaattccgtctc

SEQ ID NO: 1368 - DNA, 3480 bp, Homo sapiens
gtttatacaatatttacacagtggctacaatattcacaaaattcttatgttctcttatgaaaaatatacacttttcattttgtcttcttcttttttttttttttttagatggagtttggctcttgtcacccaggctggagtgcaatggcgcaatctcagctcactgcaacctctgcctcccgggttcaagcgattctcctgctccagcctcccatatagctgggattataggtgcctgccaccatgcccagctaatttttgtgtttttagtagagatggagtctcaccacataggccaggcagtctcgaactcctgacctcaggtgatccacccaccttggcctctctaaatactgggattacaggcgtgagccactgcatccgacctcattttgtttttttcaattctgttatcggcatttctttcttttttttttttaatgtataggtgttctgtcatacgttattgtgagctttggttctttgaacaggtgatctattctcttacattttgtgctttttatcttgggtgcctagcattctgtttttttgatcctatgtcataattttttgagaaaatgtttgatactgcaagatcattgtttagtggtctgttttctacttcagtattctaccagagaacatattttttaggggagaagggttatggttttgtaagaaactttaaatatacttttaggagacccacaatcatttacagttttatctttggcctttgaataggttcttttttctttaatgtctccgtatttgcagaactgagctctgtacgttataaatttgcttaaagattttgattttttcttcagaatatggtatacttaaaattaattaattaagacagtttcttttttcttttctttttttttttttcgagacagggtcttgctctgtcacctaggctagagtggagtggcatgaacacaacgcactgcagcctctacctcctgggctcaagcagtcctcccacctcagtctcctgagtagctgagactacagctgtgcgccaccacatctggctaattttatttttatttttgtagagacaggagtcttgccatgttgcccaggctgatctcaaactcctaggcttaagtgatcctcccgccttagcctcccaagtgctaggattacaggcatcagccaccacgcctggcctgatagtttccacatagtttttcatgacttagaagatatcattgccatgtaggttttatttttaaaagtcttgagctcttcttaaatatacattataaagagcaagcatagatggaaagtgcatattgaacacatctgtgcatttgagaaggcaggctttcatatgctgtcatgagcaaaaagtagaagtgataaatgcaagttatgttttgagattgcttacaccgtgacaagatgccatcacttgtgatgttatgaactgttataaactctttgcttctgctaagaagcagtctaaatataatcaacgtacagtgagctctttgaagccaaccaaggcaggcagaaccctcttaaatatgagactgatgtataggttctctctatggtcagtatcactggataagccttctcctttcataagaaaggatgtatttaaatacattttattttgctaaatcctgtttagttttcagccattaaatgtcacatgaagccttgatagaatttgttcataatggctcatgtattattattatttttgagatggagttttgctcttaatgatattattattatttgagacagagttttgctcttattgcccaggctggagtgcagtggcgtgatcttggctcactgcaacctctgcctcccagcttcaagcgattctcctgtatcagcctcccaagtagctgggattataggcatgtgccaccatgcccagcaaattttgtatttttttttggtagagacagggttcaaccatgttggtcaggctggtctcgaactcctgaccgcaagtgatccacacgccttggtctcccaaagtgctgggattacggtgttagccactacacctggcctggattgtgtattatttatgtctgtagtttatatgcttagttgttgcctatagtgatctgggtaagattcaaacatttatcttttgtatcttctacagaagtgctttgagcatcaaatttgttttaacgttaaattgtagtttgctgtattaaaatagatcaatgaatataattcagtcttttaggggcaccaagtaaagcataaggtcatatatactatacaatatgtttattgcacttcccatggggataaatcactctgtcattcctagttattttaaaaaaagaactttatgattacggtcctctttctcacatactgcaaacttaaaagatacatacaccaaatataggtctgttttaaaggagaggaaaaatagttcaaggagtttttgcctctttgtttttaaatagattattctgccattttttaaaggaaagggaaaatgaaaacagcatgtctttttaaacattgaaaagaaatatggaggctttaaaccgcaaactgaaaaagctgagtagaacaaaggcagtggagcatacaatacaattctatttatttgaggttaattgaagttaataatttttaaatttttttctaattttatgccttaaaataggtttctgattacataaaatttgaatagaacactcaagaagtatgtagatttttgaaaaacccaaacaatattcttcttagatttttggaggcaaaatttagaccagtatactaattcaaaagacaaatatttcagaggaagtggagtatagtatttaacattttgtttgcaattttactttttcttcccttcttccctattgaaccttgattaaaatgtatgaatacaatacttggatttttttttcagcttagactctgataatttcagtggtagtggggaaacctgaatttgtcagcatgattatttgtaactcagattgttcaaatgtatatagaaggtccccttcaagtgttgtttctccaagtagtcataaatgtagcaagtataaatcagaatatcatcttataatcttacagagttaacctaatgagtcaatacctttataagcaaaaccatgataaatttaaaaacaacagaaatgtggcatgattacttatttatttgttccaggtgactctaaatagttgatttttctgcctgaaggatcctgaacatatttagttaccctgtagttatttaggaatttaaaccagaagactttgaagttgtatattcttgcaatgcataaaatgacattataatcaacaaacttatggtttgtttcaattgatgcacacaaaaaataacttatagttagacttttctatttcaagtaaagctttgagttacttatttttatacatattcatcatgtaccctttattgtttctaggtgttgatatactttaataaaaatgatatgtttaatattt

SEQ ID NO: 1369 - DNA, 2994 bp, Homo sapiens
agtgcatgagcagctgccagggatctctccatgggccccgtcgtccccagcctggggcttctggaaggagcacccacacggatggtggcggcagcagtcctgcaggcgagcaggaacccagccagcacaggacaggggccgcggtgcagagaaagccctggccttctggtggtctctggcggcaagaccaacagcctgggccaggggaggccccccacacccaggcctttggagaatggccatgggggcaggagcttgggtccagggcccctggactgggtggagatgccggatcaccagcgccacccttccacagctcctcctacaggattagcttggcaggtgtggagccctcgttggtgcaggcagccctggggcagttggtgcggctctcctgctcagacgacactgccccggaatcccaggctgcctggcagaaagatggccagcccatctcctctgacaggcacaggctgcagttcgacggatccctgatcatccaccccctgcaggcagaggacgcgggcacctacagctgtggcagcacccggccaggccgcgactcccagaagatccaacttcgcatcatagggggtgacatggccgtgctgtctgaggctgagctgagccgcttccctcagcccagggacccagctcaggactttggccaagcgggggctgctgggcccctgggggccatcccctcttcacacccacagcctgcaaacaggctgcgtttggaccagaaccagccccgggtggtggatgccagtccaggccagcggatccggatgacctgccgtgccgaaggcttcccgcccccagccatcgagtggcagagagatgggcagcctgtctcttctcccagcacccaccgcccagcccagggaccctggcagggactgcgtcgaccagccagagctggccaactgtgatttgatcctgcaggcccagctttgtggcaatgagtattactccagcttctgctgtgccagctgttcacgtttccagcctcacgctcagcccatctggcagtagggatgaaggctagttccagccccagtccaaaatagttcatagggctagggagaaaggaagatggactcttggcttcctctctctggctggcaaagggagttatcttctggaatacattagctctttcaaaaacccacccagtgtttagcctcaacggcagccagttaccagcttctctctgtagccttcagcagtgtttgcatctctgacataaccacaggctgctgttttcaagaagagcaatctgtttggataagaaaaacctttactttacagcttccctttataatttgttacacaggaatagttaaatgcatttgtttgtttgttttttgagacagagtttcactcttgttgcccaggctggagggcaatggcgcgatctcagctcactgcaacctccgtctcctgggttcttgattctcctgtgtcagccttctgagtagctaggattacagatgcctatcaccatgcctgggtaatttttgtatttttagttgagatggggtttcaccatgttggccaggctggtctcgaacttctgacctcagatgatctgcccgcctcagcctcccaaagtgctgggattacaggcatgagccaccacgcccagccatcaatgcattttttttattttttttttgagacagagtttcgcacttcttgcccaggctggagtacaatggtgcgatcttggctcactgcagcctccacctcctgggttcaagcgcttctccagcctcagcctcctgagtagctgggattacaggtatgtgccaccatgcctggctaattttgtatttttagtagagacggggtttctccatgttggtcagactggtcttgaactcccgacctcaggtaatccgcccgcctcggcctcccaaaatgctgggattagaggtgtgagccactgtgcccagcccatcaatgtgttttaaagctagctgtcagggttccacttaatttaaagctgggcagggagatgtgtaatgatttcaaagttaacacctgtttgttttctaaagggcatgccaagtcctgctgtatcagggaagtattctgtgctaaaatcagcgatggttcattgctctagtctctctcacccttctaggcagtgcatcagtcagctctaaatctggtgcagagggttaacagcataacccttgttggcaaaatggaatagatgttaagacctcaaatagggatttgggatgaaacagctgcagttagcactgttatctgagcatgaaagaactggaaacgctccttacgtcgagatgttggaccttgaagccctcctgaggccaacatgcaaatctggctgtgacggttcatctgacacctgtgtaaagcagaccagcctgctctgtacagtgacaatgaggagcccctctcttccttaagtaggaatctgtgaagcaaaatgtttgctgccaaagacaaatcagactgtcagtcattaaaaacagcattagcaggatgaggatagcaatggggaagggttgtgggcaatgcagtaacagggaaatggcttcagaaatggtttgagttggaagacaacattcttcatctctcaggacttctaattccttgatgctaaaagaagaggcatggattctatgagcttccaagtccctttccactttaaccttctacaaatctttcagaggactgcctagtagcaaaggttattcctggacacaggaaagacgggcattacagggaccaaagctctgaaaggtgacttttattaccaacacactggctggaaaagggacaaaccacatcacgggtgagtgatacttctcagtcttctctactcattcaacaaaggaaatgtgggctggggcagaggtcttttttcatttaatactggaaaaatattgaagagcatccatgttcacttatggctggttttgctatagaaattggaaaataaaggccacttttttg

SEQ ID NO: 1370 - DNA, 4196 bp, Homo sapiens
aagcactaatggactaagacaaaaagattccattatgaaagtgaaaaggcaaccgcagagtggcagaagcttttggagatgatgaatatgtttacttcctggattgcggtgatgataccatgagtgtatacatatgtgtgtatacataatgtatacaaattgtgttcattgattatgtacagtttctttgtataccaattataccttaataaagctaaggaaaaaaaaaagaaaatccagaataaatatgcatggtatgacccatttatttaaaaaaaaaaagagggaatgcgaagcagtggttttggtgcgaacacaaaaattctggcttcaacagcatttaaattcccaaaccaagcatgtttatgttttaattctttgtggccataaattgtacagctcaggcctttatagtctctcagattctgtgaatgtggggaattagttttactcataaaaagttttgttcttggggataaattttttaaaaaaatttttgtatagttagcacactgagaaaatacagacaaaggcatacagatgcaagaaatgaggtagctgaatagaccaaagaatgatatagggcccagaaggtaggcaaagagaaagttgttgggtttatggttacaagtaaactagcagttgtggtgcagatagttttatttcccccacattaatctgaacagcccatccagacttaaacactgctttttgcatttacttctaggcaggaagacagggttctgatggtgtgagtctccttcaactcagcaaaccaccttggtctgcctcgagtttccaacacccctcctgcctgctagtgataggtgtgaggcaggttgatgaacatggaacttttttcttttggtcccaaagcatgctactcctggagtttcattcagtgaatgagaactatagtttggttctgtgagatctctatgaatcaaggcggccactgaagcggagaaaagaaatgcttaaatgttaagaaagtttgaagtgcagaaaaaggtgattgtaaatccatatggttaagcttagcccatttcttaaaaggcttgattgctcattcctccattcattgatttactcactcttccaatccatgttattgagtcttgctctgtaattccggatggttgtgcttttaagtactgcatagtggttgtatgtctgtgttagcattgctgaatgtatcagggaattcatttttttatccccattcattcgttccattcatctgtttctctctctctctctctttgtgtgtgtgtgtgtgtgtgtgtgtgtgtgtgtgtgtgtgttatgcctagaaaacatttctcaagaattagaattacgatatgctgtcaaacacaatgacttatttgaacctcttttatttgtaggttgaagcactggacaatgccacatactttgtggatggtgtgggtcttgggggtcatcatcagcctctccaaggaagaatcctccaatcaggcttctctgtcttgtgaccgcaatggtatctgcaagggcagctcaggatctttaaactccactccctcagggctcacagaagctgtaaaaagccttgacctgtccaacaacaggatcacctacattagcaacagtgacctacagaggtgtgtgaacctccaggctctggtgctgacatccaatggaattaacacaatagaggaagattctttttcttccctgggcagtcttgaacatttagacttatcctataattacttatctaatttatcgtcttcctggttcaagcccctttcttctttaacattcttaaacttactgggaaatccttacaaaaccctaggggaaacatctcttttttctcatctcacaaaattgcaaatcctgagagtgggaaatatggacaccttcactaagattcaaagaaaagattttgctggacttaccttccttgaggaacttgagattgatgcttcagatctacagagctatgagccaaaaagtttgaagtcaattcagaatgtaagtcatctgatccttcatatgaagcagcatattttactgctggagatttttgtagatgttacaagttccgtggaatgtttggaactgcgagatactgatttggacactttccatttttcagaactatccactggtgaaacaaattcattgattaaaaagtttacatttagaaatgtgaaaatcaccgatgaaagtttgtttcaggttatgaaacttttgaatcagatttctggattgttagaattagagtttgatgactgtacccttaatggagttggtaattttagagcatctgataatgacagagttatagatccaggtaaagtggaaacgttaacaatccggaggctgcatattccaaggttttacttattttatgatctgagcactttatattcacttacagaaagagttaaaagaatcacagtagaaaacagtaaagtttttctggttccttgtttactttcacaacatttaaaatcattagaatacttggatctcagtgaaaatttgatggttgaagaatacttgaaaaattcagcctgtgaggatgcctggccctctctacaaactttaattttaaggcaaaatcatttggcatcattggaaaaaaccggagagactttgctcactctgaaaaacttgactaacattgatatcagtaagaatagttttcattctatgcctgaaacttgtcagtggccagaaaagatgaaatatttgaacttatccagcacacgaatacacagtgtaacaggctgcattcccaagacactggaaattttagatgttagcaacaacaatctcaatttattttctttgaatttgccgcaactcaaagaactttatatttccagaaataagttgatgactctaccagatgcctccctcttacccatgttactagtattgaaaatcagtaggaatgcaataactacgttttctaaggagcaacttgactcatttcacacactgaagactttggaagctggtggcaataacttcatttgctcctgtgaattcctctccttcactcaggagcagcaagcactggccaaagtcttgattgattggccagcaaattacctgtgtgactctccatcccatgtgcgtggccagcaggttcaggatgtccgcctctcggtgtcggaatgtcacaggacagcactggtgtctggcatgtgctgtgctctgttcctgctgatcctgctcacgggggtcctgtgccaccgtttccatggcctgtggtatatgaaaatgatgtgggcctggctccaggccaaaaggaagcccaggaaagctcccagcaggaacatctgctatgatgcatttgtttcttacagtgagcgggatgcctactgggtggagaaccttatggtccaggagctggagaacttcaatccccccttcaagttgtgtcttcataagcgggacttcattcctggcaagtggatcattgacaatatcattgactccattgaaaagagccacaaaactgtctttgtgctttctgaaaactttgtgaagagtgagtggtgcaagtatgaactggacttctcccatttccgtctttttgatgagaacaatgatgctgccattctcattcttctggagcccattgagaaaaaagccattccccagcgcttctgcaagctgcggaagataatgaacaccaagacctacctggagtggcccatggacgaggctcagcgggaaggattttgggtaaatctgagagctgcgataaagtcctaggttcccatatttaagaccagtctttgtctagttgggatctttatgtcactagttatagttaagttcattcagacataattatataaaaactacgtggatgtaccgtcatttgaggacttgcttactaaaactacaaaacttcaaattttgtctggggtgctgttttataaacatatgccagatttaaaaattggtttttggtttttcttttttctatgagataaccatgatcataagtctattactgatatctgaatatagtcccttggtatccaagggaattggttgcaggatcctcgtggatatcaaaattcatagatgatcaagtcccttataagagtggcatagtatttgcatataacctgtgtacattctcctgtatactttaaatcatctctagattacttatgatacccaatacaatgtaaatactatgt

SEQ ID NO: 1371 - DNA, 3297 bp, Homo sapiens
agcttgtccccgcctagcaaggagtcggctaagaactggatcctagcgaggagcccggcacagacagcgaatgaccgcagccagacagtcgctcttgctcttcctcggccctgcggcaggatccgccggtgcaggggcctctccccggactccacgcgtgtctggagggctctcgggttagggaagggggctttggagacgccccgggcggccgggcggtggcgggacgcgggccctttaagaaggagcgcggggcgcggccaggtaggggcgggtccagggcggatcagcgctgcgccggcgccggcccgggagccggatttggagcgcgaggcgccggtgggggcggagggggctgcgcggcggaggctcccgtggcctcggacgctcctcctagctagcggccgccgcccgccgccgcctgcgcctccagctccttcgccccggcgggcccggccgccgcttccggcagctcacctgggaagcgctcacctgggacgcgctcacctgggacgcgctacctgcctccgggcgcctgggcttcaggatgaaggaccgtctggagcagctgaaggccaagcagctgacacaggatgatgatactgatgcggttgagattgctatcgacaacacggcttttatggacgagttcttttctgagattgaggaaactcggcttaacattgacaagatctcagaacatgtagaggaggctaagaaactctacagtatcattctctctgcaccgattccagagccaaaaaccaaggatgacctagagcagctcacgactgagattaagaaaagggccaacaacgtccggaacaaactgaagagcatggagaagcatattgaagaagatgaggtcaggtcatcggcagaccttcggattcggaaatcccagcactctgtcctttctcggaagtttgtggaggtgatgaccaaatacaatgaagctcaagtggacttccgagaacgcagcaaagggcgaatccagcggcagctcgaaattactggcaaaaagacaaccgatgaggagctggaggagatgttggagagtggcaacccggccatcttcacttctgggatcattgactcacagatttccaagcaagccctcagtgagattgagggacgacacaaggacattgtgaggctggagagcagcatcaaggagcttcacgacatgtttatggacatcgccatgctggtggagaatcagggtgagatgttagataacatagagttgaatgtcatgcacacagtggaccacgtggagaaggcacgagatgaaacgaaaaaagctgtgaaataccagagtcaggcccggaagaaattgataattatcattgtgctagtagttgtgttgctgggcattttagcattgattattggactttccgttgggctgaattaagagtggcctaagaggctgctgcactgaaataaactgatttcactccagactggtgtggccacccttgtcttcagatgagaatggagtctgaatggccttcctgagagcgagtgcgacccgttcctttgtttccttgcaaccacccttggacctgactcagctaacaatctagccctgggggaatgtgatctacctgatgcgaccctgagttctccccagagcctcctcctgccccaccagctctcaagtaccttttctcctggactgtgtggacccacccagctttcttcctccctgttgtgtgtcagattatgccttgcacttgggaaagctcttgtgagactctcccaaggtgctgtatttttctacctcatggagtattctcccagaaactgcaatgtatttttttaggggagtatctttaacaaagcagaatgattcttctaagtttggcaacaagaaggcttggatctgagtcttctacctggcaggatgccaatcctgtttgttgtccgtatgtcctgaaaacatgagggactggcagatgtcattttggtctaaagagctgacttgtttgaaattcagccttaaattaagctcttagttgttcagcttggggggcaactttgatttttctctgtgttgcagtctctcatatttactcaaggagggaccaggatgatacagtcatctgaggttatgctttgcaaaaggctgacggtatggaatatgtttccatgtctgagtcttagaaactggctgctcattgttagaaagtgatgctttgtgagactattgtcttggggccaaaaataatcagggattttaaattgggcaagggacaaggtgctagaatcctaagctctggaaatatttcatgacactggtgtattcactcatgtgttccagatgtattctaattgtgtatgaaatgtatgtacacataagtgtgtgtgtctcaggaagtaggaaataaaaatggaagctattatgacctcaaaaaaaaaaaagccaactttgagctaggataaaaattgggtaaaggacatttgcttacctgcaaatgaatcactgtggaaatgtgatcttcccatatcatcaagaaacttgttttctggatgaatactgggagaataaaatgagaactctggagtgagctaaattgatcccaattaagtttttctgcttagcagacagaaggtataattttttgacacccttccccacctggtgcctatgctaggcttgtcctgagaacatccctcagtaacttgatattcacatgacctacaggatgtcccatctgcagggctgagtcagttggggaacaccagaggctacacagtagctcttcctgctactcggttaatgagcttggcaggttctttgtctcactgaattcttatcatggaaacagcagcagcagccgctaggaaatcttcaagtgtagtgtctgtgctaacccagtggtaaatcccttagatcccctgctggtctctggcagtctccttgattttgggtaccatgtatattttccgctttgactttaacgctttctaggatagggtaagcacccttaattcaggcactgtccattagcttcctttgcaaaggctacttatggccggtcacaatccagcactcagacagagccaaggcaatatcctcttgcccatggctatgatgtcagacagtggatgggctccagcaacaagagacaaaataactaaaggcctttgctctcctctgacattgaggcctggggcttacagtttggaatacaacatgtgaaggtttttgttgttgtttgtattttttagatgtaaacttgattattttattgctaatttaaaaataaaaatgactttgtattgattgtg

SEQ ID NO: 1372 - DNA, 3096 bp, Homo sapiens
ttttgagatggagttttgctctttcgtccaggctggagcacagtggcatgatctcggctcactgcaaccttcaatttccggtttcaagcgattctcctccctcagcctcctgagtagctgggattacgggcgcatgtcgccacgcccagctgatttttgtgtttctagtacagacaggatttcatcatgttggccaggctggtctcaaactcctcaccttgtgatccacccaccttggcctccaaaggtgctgggattacacaggcatgagccactgctcctggcaagagattcttttttattaggtgggcattatttgtgatcttttctattgaaaagtaaaaacattagaatgtaagatgcataatgaaaatgtaagtggagaggttctttggggttaacttataatattgagtggtgcatgaggttggtgttcagagtaatattctgcattatgaaaaaacatttaattttatttaaaatttagtttatcatactaattgtacttttatataagatgcagtacatttttaaaattttagattgtgtgaagttaatagtttaacatttttaacatgttaaatactattgtgcattcaatgaagcattattataccacaaaccttaccctgttccaccttactgaagggtataggtaaaagatggtaacgatatactatttagtaacataatggattaacatctctagtaattttttttgccagtggctttaaaccgcaaataagttaaagaatattgtttctgtaggttaaatttttattttgtttttaatcatttaaatttaattttggtgggtacataatatgagtatatatttatgcacttatatggcatattttagtacaggaatacaatatataatagtagcatcagggttaagtgaggcatccttcacccatagcatttctcctttgttttacaaacaatccaaacctacactttttaaaaattttttgttgttgttgttcttgttgttgttgggacggagtctcgctctgtcgcccaggctggagtgtgcagtctcggctcactgcaagctccacttcccgggttcacgccattttcctgcctcagcctcccaggcggctgggactgcaggcgcccgccaccatgcccggctaattttttgtatttttggtggagatggggtttcgccatgttggccaggatggtctcaatctcctgacctcgtgatctggtctcgatctcctgacctcatgatctgcctgccttgacctcccggggtgctgggattacaggcatgagccaccgtgcccggccactttttataaattttaaaatgtacaattgttatttactatagagttatttttatggtcataatacaaattatatatgagtataaataaaattcatttctaaactattaatattttttccaaattgttatatatttttctttgaacatgtggcctgtctgcctgcaaacatgcagactttttgattcacatagagttaaatatgtattagtctaaagacaaactttaggtgtaagaaaattatggaataagtgtgtgtgtgtgagtatgagtttgtacctattttcagaaaagaacaatatgggaataaaaatcattttaataaggtggctactataaaactaaaaaccttaaaaaatgctgaaagcaaatgtatactttgtgctttgtattgaatttattactgtacaatccatgacttacagttctgaaccttttcatgcaaattctctgtatatacttgcctggtactcatgctagacccatactttttttgtttcttacattttttttgttttatggtttaggaagtattcattatatgagctggtctgtgattataagaatttttatgaaatttagtgcacacaaaataatttttagatgtaattccaaaagtagtgtattaagttacattttatttagtgagagcactccattttgttcttttaaggggagaacaatatataagttttcttttctttagtgattgttcctttcactttttataattgacataagtatatttatttattgagtcaatttgttcaggtaagtactggggggcttcataagtcatgaggatgtttttatatataaatgtagcaaacatacattacagttcttactgtgtaatcgatgctccataataattcacaaatattcctgctggagttagtttgtaatttcaagtcagaaatgaaagatatcagtggtgaagaaataagattgattcttcatatggagtggacattttttccagactataaaactgaatcttgctgaatttaaagagaaattctggccgaggcggatggatcacctgaggttaggagtttcagaccagcctggtgaaacccggtctctactaataaactacggagattagctgattgtggtggcatccacctgtagcccagctgctcgggaggctgaggcagaagaattgcttgaacccgggaggcgaagattgtggtgagccgagattgtgccattgcactacagcctgggtgacagaatgagactcataaaaaaaaaaataaattctgcttcttttattttctacttctcttcagatttgtttctcgtatgtattttccaactatgtatgcatcacagcccttctttttctgagttatagctacagttttctgactgttctcttcacgccatttcatttcgcctggtattttgtagattttgatgacaaaattctatttttagtgcacttaaaaatggattttaactggtgagttcgcttatcaatataacattcagattagttaattaggataaaagccaggtgtggtggctcacgcctctgatcccagcactttgagaggccgaggcaagtggatcacttaagctcaggagttcgagaccagcctgaccaacatggtgaaaccccgtgtctactacaaatacaaaattagccacatgttgtggcgcatgcctgtggtcccagctactcgggaggctgatgcgggagagtcgcttgaacccgggaggcggaggttgcagtgagccgaaattgcgccattgcactccggcctggacaagagcaaaactctgtctc

SEQ ID NO: 1373 - DNA, 4035 bp, Homo sapiens
atttatgcactgaaagctcctaaatcttttcctaaaggtgatatatggtggaatcctgaacaactgaaagaagacagcagggactatctgcacttgctcattgggctgtttgagatgatgctcaatggtgccgatgctgttcatttcagagttctgatgaaacttttcataaaggtgcatctagaagatgtttttcagttattcaagttctgttctgttttatggacctatggttctagcctttcaaatccactaaactgcagtgtgaaaacagtgctgcagactcaagctctttatgtgggctgtgcaatgctttcttctcagaagacacagtgtaaacaccaactggcatccatatcttctccagtggtgacatctttactcattaacctgggaagccccgtaaaagaagttcgtagggctgccattcagtgtctccaggccctcagtggagtggcatccccgttttatctgataatagatcatttgatttctaaagcagaggagatcacttcagatgctgcctatgttattcaggatttggctactttatttgaggaactacagagagaaaagaaactgaaatctcatcagaagttgtctgaaactttgaaaaacttacttagttgtgtgtatagttgcccatcttatatagcaaaagatttgatgaaagtacttcagggagtcaacggtgagattacaaaaccattttttgcagccatatcagatgaaaaagttcagcagaagcttttaagaatgttgtttgatttattggtgaactgtaaaaactcacattgtgctcagactgtcagcagtgtttttaaagggatttccgttaatgctgaacaagtccgaatagaactggagccaccagataaagctaaacccttgggcacagttcagcaaaaaagaaggcaaaaaatgcagcagaaaaaatcacaagatctagaatctgttcaggaagttggaggttcttactggcaaagggtaactctcatcctggaattactgcagcacaaaaagaagctcagaagtcctcagatattggtgccaactctttttaacttgctatcaagatgtttagaacccttgccacaagagcagggaaatatggaatacaccaaacaattaattcttagttgtctgctcaacatctgccaaaaactatctccagatggtggcaaaatacccaaagatattttagatgaggagaagttcaacgtggagttgatagttcagtgcatccgcctttcggagatgccgcagacccatcaccatgcccttttacttttgggcactgttgctggaatatttccggataaagttttacacaatatcatgtctatttttacatttatgggagccaatgtcatgcgcctagatgatacttacagttttcaagttattaacaagacagtgaaaatggttattcccgcacttattcagtctgatagtggagattctatagaagtttcaagaaacgttgaagagattgtggtaaaaatcattagtgtatttgtggatgcgctgccacacgtcccggagcacaggcgcctgcccatccttgttcaacttgttgatacactgggtgcagagaaattcctctggattctcctcatcttgctttttgaacagtatgtcacaaaaacagtgctggcggctgcctatggcgaaaaggatgctattttagaagcagacactgaattttggttttcagtctgttgtgagtttagtgtccagcatcagatacaaagcttgatgaatatcctccagtacttactaaagctgccagaggaaaaagaagaaaccattcccaaagcagtgtcatttaataagagtgaatcacaagaagaaatgctacaggtttttaatgtagagactcacactagcaagcaactgcggcattttaaatttttgtcagtgtccttcatgtctcagctcctgtcttccaataattttctgaaaaaggtagttgagagtggtggtcctgagattttaaaaggccttgaagagaggttgctggagaccgttctcggctatatcagtgcagttgcacagtccatggaaaggaacgcagacaaactcaccgtgaagttctggcgcgcgctccttagtaaagcttacgacctgttagataaggtcaatgccttgctgcccacagagacattcattcctgtgatcagagggctggtgggcaatcccctgccatctgttcgccgcaaagcgctggaccttttgaataacaagctgcagcaaaatatatcctggaagaagacaatagttacccgtttcctaaaactggttccagaccttttggccattgtgcagcgtaagaaaaaggaaggggaagaagaacaagcaatcaacagacagacagcgttgtataccttaaagcttttatgcaagaattttggtgcagaaaatccagatccttttgtcccagtgctgaacactgctgtgaaactgattgctccagagagaaaggaggagaagaatgtcctgggaagcgcgctgctgtgcatagcagaggtgacctccaccctggaggcgctggccatcccccagcttcccagcctgatgccaccgttgctgacaacaatgaagaacaccagcgagctggtctccagcgaggtctacctgctcagtgccttggctgctctgcagaaggttgtggagactctcccgcacttcatcagcccctatctggaaggcattctctcccaggtgattcatctggagaaaatcactagtgaaatgggttctgcgtcacaggctaatatccgtctcacatctcttaaaaagacactggctaccacacttgcaccccgagtcctgttgcccgccatcaaaaaaacttacaagcagattgagaagaactggaagaatcacatgggtccgtttatgggcatcttgcaagagcatattggggtgatgaagaaggaagagctcacctcccatcagtctcagctaaccgcctttttcctggaggccctggacttccgagcccagcactctgagaacgatctggaggaagttggaaaaacggaaaattgtatcattgactgtctagtagccatggttgtcaaactttccgaggtcacattcaggcccctgttcttcaagctgtttgattgggctaaaacagaagatgccccaaaggacaggttgttgacattttacaacttggcagattgcattgctgaaaagctgaaagggctttttactctgtttgccggccacttagtgaagccttttgctgacaccttgaaccaggtgaacatctccaaaacagatgaagcattttttgactctgaaaatgaccctgaaaagtgctgcttgctgttgcagtttattttgaactgtttatacaaaatcttcctttttgatacccagcattttataagtaaagagagagcagaagccttgatgatgcctctggtggatcagctggaaaacaggcttgggggagaagagaaattccaggaacgggtgacaaagcacctgataccatgcatcgcacagttttcggtggccatggcggatgactctctttggaaaccactgaactaccagattctgctaaagacgagagactcctcgcctaaggttcgatttgctgctttgattactgtgttagcactggctgaaaaactaaaggagaattatattgtcttgctaccagaatccattcctttcttagcagagttgatggaagatgaatgtgaagaagtagaacatcagtgccaaaagactattcagcaactggaaactgtcctgggagagccactccagagctatttctaagactttctgtggtgtttcatactctactcagagttcacactcatatttcatatttttatttttgggtgttgggtgccatgttacttttggtgccttaatacacctacttggattacttacaaatgttttatcacttctttacaaaatccccacctggcttgtgctgccacataagcctctcctgcctatcgtatagagctgcagaaagagtaaatgatacacggtattttt

SEQ ID NO: 1374 - DNA, 2186 bp, Homo sapiens
cttgccattgttggtcacccggccaagcctctctgcctcaggcgttctcccagaagatctgcccactctcttccccacaccagcccctagagactgaactgaaaaccctcctcagcagggagcctcttctgattaacttcatccagctctggtcacccatcagctcttaaaatgtcaagtggggactgttctttggtatccgttcatttgttgctttgtaaagtgttcccatgtccttgtcttgtctcaagtagattgcaagctcaggagggtagactgggagcccctgagtggagcctgctcaggccggggctccctgagggcagggctggggctgttctcatactggggctttctgccccaggaccacaccttcctgtcctctctgctcttatggtgccggaggctgcagtgacccaggggcccccaggaatggggaggccgcctgcctcatcgccaggcctcctcacttggccctaaccccagcctttgttttccatttccctcagatgtgacaagccgaggcggtgagccgggcaggaggaaggagcctccctcagggtttcgggaaccagatctctcaccaggaaagactgatacagaacgatcgatacagaaaccacgctgccgccaccacaccatcaccatcgacagaacagtccttaatccagaaacctgaaatgaaggaagaggagactctgcgcagagcactttgggtccggagggcgagactccggcggaagcattcccgggcgggtgacccagcacggtccctcttggaattggattcgccattttatttttcttgctgctaaatcaccgagcccggaagattagagagttttatttctgggattcctgtagacacacccacccacatacatacatttatatatatatatattatatatatataaaaataaatatctctattttatatatataaaatatatatattctttttttaaattaacagtgctaatgttattggtgtcttcactggatgtatttgactgctgtggacttgagttgggaggggaatgttcccactcagatcctgacagggaagaggaggagatgagagactctggcatgatcttttttttgtcccacttggtggggccagggtcctctcccctgcccaggaatgtgcaaggccagggcatgggggcaaatatgacccagttttgggaacaccgacaaacccagccctggcgctgagcctctctaccccaggtcagacggacagaaagacagatcacaggtacagggatgaggacaccggctctgaccaggagtttggggagcttcaggacattgctgtgctttggggattccctccacatgctgcacgcgcatctcgcccccaggggcactgcctggaagattcaggagcctgggcggccttcgcttactctcacctgcttctgagttgcccaggaggccactggcagatgtcccggcgaagagaagagacacattgttggaagaagcagcccatgacagctccccttcctgggactcgccctcatcctcttcctgctccccttcctggggtgcagcctaaaaggacctatgtcctcacaccattgaaaccactagttctgtccccccaggagacctggttgtgtgtgtgtgagtggttgaccttcctccatcccctggtccttcccttcccttcccgaggcacagagagacagggcaggatccacgtgcccattgtggaggcagagaaaagagaaagtgttttatatacggtacttatttaatatccctttttaattagaaattaaaacagttaatttaattaaagagtagggtttttttttcagtattcttggttaatatttaatttcaactatttatgagatgtatcttttgctctctcttgctctcttatttgtaccggtttttgtatataaaattcatgtttccaatctctctctccctgatcggtgacagtcactagcttatcttgaacagatatttaattttgctaacactcagctctgccctccccgatcccctggctccccagcacacattcctttgaaataaggtttcaatatacatctacatactatatatatatttggcaacttgtatttgtgtgtatatatatatatatgtttatgtatatatgtgattctgataaaatagacattgctattctgttttttatatgt

SEQ ID NO: 1375 - DNA, 2286 bp, Homo sapiens
acagagccgtaaaggcgcgcgggaacatggggctgtatgctgcagctgcaggcgtgttggccggcgtggagagccgccagggctctatcaaggggttggtgtactccagcaacttccagaacgtgaagcagctgtacgcgctggtgtgcgaaacgcagcgctactccgccgtgctggatgctgtgatcgccagcgccggcctcctccgtgcggagaagaagctgcggccgcacctggccaaggtgaggggaggggagggacggggaagtgaaccccgacggtcagcgctttgtcatctggtctcagctctgctgccgtgcacggcgggactggagcaagtcgctcatctgaaatgagtatgagccgaccttccctgggttacgaattaagatgggatgaaaatgctttaactttgagtgttttgaaggattaaataaccgaagtacaaagtggtagtggcggagactgtaaggaagtcgggcgtggcggcgcgcacctgtggtcccagctactcgggaggctgagggaggaggatcacttgagcccaggaggtcgaagctgcagtgagctatgatctggccactgcacttcagcctgggcgacagagctagaccccattctaaaaagaaaacccaaacccacgaaagggtaatgttggcaagaagttgggtgcagaggtgtctactggtgaacatcggtggagaaagggtctaaggctgggaagcgagacgccaggttccgatcctgttctgtagttaatttctggtgtgatcttggataaggtatcccacctgtatcttgtcaggtgatctgtttagccattccattgccggggctccattagagttagttctaaggcattcatgcttcatgcttagggcatttttgtttttgtctttgttccctcattcccaggtgctagtgtatgagttgttgttgggaaagggctttcgagggggtgggggccgatggaaggctctgttgggccggcaccaggcgaggctcaaggctgagttggctcggctcaaggttcatcggggtgtgagccggaatgaggacctgttggaagtgggatccaggcctggtccagcctcccagctgcctcgatttgtgcgtgtgaacactctcaagacctgctccgatgatgtagttgattatttcaagagacaaggtttctcctatcagggtcgggcttccagcctcgatgacttacgagccctcaaggggaagcattttctcctggaccccttgatgccggagctgctggtgtttcccgcccagacagatctgcatgaacacccactgtaccgggccggacacctcattctgcaggacagggccagctgtctcccagccatgctgctggaccccccgccaggctcccatgtcatcgatgcctgtgccgccccaggcaataagaccagtcacttggctgctcttctgaagaaccaaggatctttgcctttgacctggatgccaagcggctggcatccatggccacgctgctggcccgggctggcgtctcttgctgtgaactggctgaggaggacttcctggcggtctccccctcggatccacgctaccatgaggtccactacatcctgctggatccttcctgcagtggctcgggtatgccgagcagacagctggaggagcccggggcaggcacacctagcccggtgcgtctgcatgccctggcagggttccagcagcgagccctgtgccacgcgctcactttcccttccctgcagcggctcgtctactccacgtgctccctctgccaggagaagaatgaagacgtggtgcgagatgcgctgcagcagaacccgggcgccttcaggctagctcccgccctgcctgcctggccccaccgaggcctgagcacgttcccgggtgccgagcactgcctccgggcctcccctgagaccacactcagcagtggcttcttcgttgctgtaattgaacgggtcgaggtgccaagctcagcctcacaggccaaagcatcagcaccagaacgcacacccagcccagccccaaagagaaagaagagacagcaaagagccgcagccggtgcttgcacaccgccttgcacatagcagaggctccgggctgactccttcctggtgggaaaggaagatgcctgtcctctccgtggaggaccctgggccctcaccgcaggaagcagtttgggttttgaaaggttattgggtcccttccttgggctgtgttcttgctggtgagcaaagtgttgcctgcaaaaataaaatgcagaacgtactctacgat

SEQ ID NO: 1376 - DNA, 2156 bp, Homo sapiens
agtgcggacgtcgccattcctggcccatgggaagattgcgtttcacctgctcctgaaggccgaaggtggctctagcgcatcctttgtcgcgccgtgacctgcaggtactgacagatccgtagggaggacaccgtgacttcccggacgctgggaaatggtgagtgtgcggggccagtgtccgaggggaggtttctggttggaaccgtctgtggccgaggccggggacctccttgcagtcaactccggggtttgcagacccgggggccaccgcgggcgcagttcggccctcggtcctctctgtgggagctggacccgcagccgggagccccagcgtcctgtcccgtccccgcggggcgacctcggcccccggccctggagccctctatgggcagctctgcgcccgcagccccgcgtctccccggattgttcggtgacagcgggagggtcctggggagatcccatctcggtctgtggggtttgtgcgtttaagaaaccacttggttggaaaccttacgatgaatccacgggtgcgtttcctcacttgtgagaaccgaagcctggctaggtccttgctgccggggtcaggttcctgtggctgttcaaacgcccctgccctcatcaccagggactgaccccctctagtgctcccagcactcaagtctgggggtgtttttgaccttctgaatgtgggctttcttttcgaactgcggggaaggggactccttatcttaactgatcagaaagtttgtgtttcttccctttggactccttgatcaaatattaattctagccacccttaattccagtttcccttcgctctgggtaattttgttcccttgcgtgaatgtgtgcgatttttagtttctttggtttctggatggaatttattgtgagcttgttcaggttcttttaaattttcttgtttgtgtgtgtttatctgtgtggtttctacccaagagatttcgcctatgttggagtgccatgatgatgcaaaatctctgtatgtcatttgttccgtatataagtggtaagcatttttttttgtgtgtgacggagtctcgctctgtcgcccgggatggagtgcagtggcgcgatctccagctcgctgcaagctccgcctcccaggttcaagccattctgcctcagccttcccagtagctgggactacaggcgcccgccaccacgcccagctaatttttttgtatttttagtagagacgggcggatcacctgaggtaaggagttcaagaccaccctgaccaacatggtgagatccatctctactaaaaatacaaaaaaaaattagccgagcctggtggcacacacctgtaatctcagctactcaggaggttgaggcaggagaattagaattgcttgaacccaggaggcagaggttgcagtgagctaatgccactgcactccagccttgagactctgtctcaaaaaaaactaactaaataaataaaggtagtttgcatatattgtagccaagcttgccacgaatgtgaatttagtatgtgttgaattatgtcagattctgaatggtgctgtgtctgttcattcagtttgatttgtaaagcttatcggtctaggtatatgtagccattttagtaaattatattgaaaaatgggtgagggtaaggtttttcacctgtaggatgatgaaatacagctctaatatatgttaaggtggaagcatattaatgttggtcatcccttaaaatatgtgtctcattgggtgattctgtacatttttttttataagtttctcagttgtggtgtttaattggtacccttgaaaacaagtatatttaggacaactctgtctacataatcttctgttgttttagcatgtgtttcagaagtcgtgtgtgtaggcccgggtgtggtggctcatgcctgtaatcccagcactttgagagaccgagatgggtgaatcacctgagtcaggagttcgagaccagcctggccaacgtggtgaaactttgtctctcctgaaaatacaagaaattagctggatgtgggggctggcgcctgtggttccagctactcgggaggctgaggcaggagaattgcttgaacccaggaggctgaggttgcagcgagctgagattgcgccattgcactccagcctggatgacagaggaagactgcctc

SEQ ID NO: 1377 - DNA, 2254 bp, Homo sapiens
aatatctcgtcatggactgtgccccgctcgagcctctccacatgcagccggaaggaaagtggagggagctgctcctttccgtagccggggtgcccaccccaaccaggctgcctctgccacccaagacagaggttctctgataataatttgtggggcttgtttccagagaccacacctgaagctgccaactccccggagggaaggtcctgattaatggccgatgaatttctccttaaggccctgaaactgcctactcagaaccaagccagtttttcctgcctgtcctgtttgggcaggcagaggaggcagctagaaacccattatgcaggggatggggaccaaaccaatgcacaactcctacgtactgatggtggtcttacgtttccctaagtttctgccgactaaactgtgcacacgttctcaggacctcctgaagctgcgtcacaggcgctgatcaaagaacacaaccaagagtttggccttttcttcagcactgggaattgtgatccaaagcttttcctgatgaggtacaaagttggagaaacaaaacgcaaactaagcaacaatgaaacagaacagagtgaatctgctgtagctcaagagaggacgtagctgcccccaccccgcatccccgggctcgggtttgccttgctgacctctgctgccacctggtgccgcacagagaaactgaggagaaaccacatcagtctccttcagcctcagcttcacatctgtgggtcaagcaaccctttcagaagctgtataatgtgggaaagctttcctctcaggaaaatgcacacatccaactttgagaagatgcccttgggggtgcttcaaggatcctagataataaccccctttcccgaacatccaagaacctaagtttttttttttttttgagaaagtctcgctctctctcccattctggagtgcagtggcgtgatcttggctcactgcaagctccacctcccaggttcaagccattctcctgcctcagcctcccaagtagctggggctacaggcacctgccaccacacccggctaatttttttgtatttttagtagagacggggtttcaccgtgttagccagaatcgtcttgatctcctgaccttgtgatccacccgcctcggcctcccaaagtgctgggattacaggtgtgagccaccacacctggtccaagaacccaacttttagatctagagtgatgtcagcatgacattgatttcctgaggcccaggggtgaaggagctgaggacagcagaggggtgaaggaagtcagctacagacagcagcagctgatgcacaggcctcccagcgcctgaagtcacccggaattgggaagtgctcagaagcttacaaagctgcctcgagatggcaccaaaagcgaaggaagctcctgctcctcctaaagccgaagccaaagcgaaggctttaaaggccaagaaggcagtgttgaaaggtgtccgcagccacacgcaaaaaagaagatccgcatgtcactcaccttcaggcggcccaagacactgcgactccggaggcagcccagatatcctcggaagagtacccccacgagaaacaagcttggccactatgctatcatcaagtttccgctggccactgagtcggccgtgaagaagatagaagaaaacaacacgcttgtgttcactgtggatgttaaagacaacaagcaccagatcagacaggctgtgaagaaggtctatgacagtgatgtggccaaggtcaccaccctgatttgtcctgataaagagaagaaggcatatgttcgacttgctcctgattatgatgctttcgatgttgtaacaaaattgggatcacctaaactgagtccagctggctaactctaaatatatgtgtatcttttcagcataaaaaaataatgtttttcataagaatgacaacttaattagaatcaaatctataagctttaagattttatgtttctagtaagtataatattagcttatttgactagaactcaagcagaataggaatttatgcttgttttatattcaataataattttgaagatacagttgttttattacaccaaaaatactatattaatcttatttaactaagttttatccaaatcatgttaacttaagaaacatttgatcagttcctatatttctaggagtttggtgaatatttatttataaatgcttatttttttccaagccaagttagaatagagcacttttagaggatttcataaatgaattttgcaatgc

SEQ ID NO: 1378 - DNA, 2831 bp, Homo sapiens
catggtgctctgtaatcccacctgtaatcccagcattttaggaggcagaggcaggaagattgcttgagcctaggagttcaagaccagcctgggcaacatagcaagacccgtctctacaaaacaaaacaaaacaaaacaaacaaacaaaaaaattagccaggtgtggtggtgcacgcctgtggtcctagctactcgggaggttgaggtaggaggatttcttgagtctgggaggtcaaggctacagtgagccaagatcacaccactacactccagcctgggcaacagagcgagaccctgtctttaaaaaaaaaaagtccttgagtcatgattccagatgcaatcgcagatatgggggctgcaaccctccgatgggctggggttcacgtctacaccacatggctggagcacaggccaggaggggctccggctggggaagcatgtggggagcctggctgtgggacccaggcggccccgggccctgtcgccctgcagtgcaggtcagctctgcggacgctcggctcatggtctttgacaagacggaagggacgtggcggctgctgtgctcctcgcgctccaacgccagggtagccggactcagctgcgaggagatgggcttcctcaggtactgggggccctcggaggggtgggagccgggaggggctggggagcaggcctaacccctgccccgcccagggcactgacccactccgagctggacgtgcgaacggcgggcgccaatggcacgtcgggcttcttctgtgtggacgaggggaggctgccccacacccagaggctgctggaggtcatctccgtgtggtgaggagggcagcgggcaggtggggcaacacctcagacccccaaggcactccctctccccgttttccttccacctgtcttaactggtctctatttcctttctttctgtgtctccaatcccatctctcccagtgattgccccagaggccgtttcttggccgccatctgccaaggtgagatcctaaaactcagaaccctctcctttaggcccttggggaggccacgtcccctcaagctccccaggatggggccatgtactttcagaccccctagggcagggccaagcctgggctctggggacctgggctccagtcccctgtcgccgcccccctgctgacccttgtcccacagactgtggccgcaggaagctgcccgtggaccgcatcgtgggaggccgggacaccagcttgggccggtggccgtggcaagtcagccttcgctatgatggagcacacctctgtgggggatccctgctctccggggactgggtgctgacagccgcccactgcttcccggagtgagtgccccccaatggcgctgatgatggggaggcagaggagcggagagacagtggggaggagggcggattgtgcccaggcaggtggccaccctccacccctttccctggtaggcggaaccgggtcctgtcccgatggcgagtgtttgccggtgccgtggcccaggcctctccccacggtctgcagctgggggtgcaggctgtggtctaccacgggggctatcttccctttcgggaccccaacagcgaggagaacagcaacgatattgccctggtccacctctccagtcccctgcccctcacaggtaagtctaagggctgagccatggggcttgaggacccgaggccaggaggacagaggaggggaccaggggcacaaggcaatcaacttatggctcaggcatccttggcaataaggggaatgatctcgagggagcacaaagtgggccttaactatcaatgatcagtgcagccaatttggaaaatttgccagcatttccccaagaagtatacataaagttaccattggacccaacacttccactcccaggacaggaggtatatacctaagacaaatggaaactgtgtctgcaccaaaactcgtacatcagtgttcatagcagcattattcataatagcccaaagatggaaacagcccaagagtgtttcatcggacaaatgcataaagaaaatgtggtatattgaccgggcgcggtggctcatgcctgtaatcccagcactttgggaggccgaggtgggtggatcacgaggtcaggagtttgaaaccagcctggccaacatggtgaaactccatctctactaaaaatacaaaaattagcctggcgtggtggcacacgcctgtaatcccagctactcgggaggatgaggcaggagaatctcttgaacccgggaggtggagattgcagtgagccgagatcacaccactgcactccagcctggctgacagagcaaggctctgtcatcttgaaaataaataaataaataacaaaaaaaatgtggtatatccacacaacgggagaatattggaccatagaaatgaatgaggtactgattcatgctaccacaaggatgaaacttgagaacagtgctgaatgagacaagccagccgcaaaggccacatactgtaggatgccacttgtatgaaatgtacaaggctgggcacggtggctcacgcctgtaatcctggcactctgggcagctgagatgggaggattgtttgtgctcaggagtttaagaccagcctgggcaacatagcaagaccccatcacttaaaaaaatgagctaggtgtggtgacggatacctgtagttccagttactcaggaggctaaggcaggaggatcacttgagcccaggagtttgaggctgcagtgggctaggattgtgccactgtactccagcctgggtaacagagcaaaaccttgtctgttaaaaaagaagaaagaaagaaagagaaagaaaagaaaggaaggaaggaag

SEQ ID NO: 1379 - DNA, 1797 bp, Homo sapiens
agaagggcgggggtgccgcgagcatgttgggggtggccagtggctacagccaagggtgagcgggtccagtgtggagcccgggagtaagtggcaggctgtggccatgaccaatacagcccacgcatctgtctggagtggtgagtacctggaccctcccatccctgcaggctgctggtggaccggttctcaggccggttctgggcctggctggaacgggaggagttcctggtccccaagaatgtgctggacatcgtggcgggacagacggtcacctggatgggcctcttctactgccccctgctgcccctgctgaatagcgtcttcctcttcctcaccttctacatcaagaaggtgacggctcatggctggggggtatggggttcgtgcctctgggtggatgccttgagctgggctcgcctcctgctcctgctcctgcccccttccctgggtgtcagccccctggggtctgcataactcgctgactcctggttgctattgcttgcgcccccagtacaccctcctgaagaactccagggcatcttcgcggcccttccgtgcctccagctccaccttcttcttccagctagtgctcctcctgggcctgcttctggctgcagtgcccctgggctatgtggtcagcagcatccactcctcctgggactgcggcctcttcaccaactactcagcaccctggcaagtggtcccggagctggtggcccttgggctcccgcccattggccagcgtgccctccactacctgggctcccacgccttcagcttccccctcctcatcatgctcaggttctcagggcagcaggggccatgggaggggacacctggagggggaggtccttccttccatgggggtggtgagcctgtgcacccccaaccaggagccagacgcagaaagccaagggaagcaggggcctctgaaaagcaggaacctcctgggcccaccctctgggctgccatggggattgcaggatcactggggaagcaccgtgtctgggtggctgcagctgctgagctattggtattgctgtgccagaggggaggggatgaggggctctgcgaggaaggagaggagggtctcatcctcagatacagcagtgtgcagtgagaagaccccagtaccgcgtattgtagagattgaggtggggagagaggaagtcagggagaggcgcctgtggccccaggggcaactgaccacgaatccccttcccacccaagccttgtcctgacggtgtgcgtctcccagacccaggccaatgccagggccatccacaggctccggaagcagctggtgtgggtgagtgtcctcggggctggtgaggggacagcagcttcagtggaaacccttccctatgtgtggccgagggcctagaacacgtctgagcggttcaggtgggttcttcccactggagggcgtggcctcaggctgagagtggagacggggaaggggaggaagagaacagctcgggctcctgagaccaggagccagacctggtaagtacatgaccttaggggctgggcctttgcctgtaatcccaacgctttggaggcccaggcaggaggatcggatcacttgaagccatgagttaaaaccagcctgggcaacaaagcaagaccctggtctccaccaaaaataagtaattaattttttaaaaggagaatgtggccgggcgtggtgactcacgcctgtaatcccagcactttcagaggccgaggtgggtggatcacctgaggtcaggagttcaagaccagcctggccaaaatagcgaaaccccgtctctactt

SEQ ID NO: 1380 - DNA, 1915 bp, Homo sapiens
acagtaacagcccacacctggaattgtccgcagtcctgggcggggtcactcacagtaacaggccacacctggaattgtccagcattcctcaacaggaaacagttaaagaaagtgtgtctaaccacacatggaaggccactgggcaatgaaaatgcatgaacttctggcgtccacaatctagtggatgaatctcaaaagatacttcgagcaaaaacaccggacagaagcgtccgtgccagccccgcaggctgcctgtgtgccaggctatcccgtgccatctgatccgggagaagcaggactttcttgcacagggtcttcaggaactggatattgtgccagccagttttctgtaattagtcatctcagaacaatttttctccctgagctgcggcccctcccaaggctcagcttggaggacaccaacaatgaggacaccaacaatgagcacctcctgggcagccctgaggacccacacatggaggccgcacagcccagcccctaccctgaggcacaccgtctacacaaaccccggcctggacccagcctcatggcccacaggcaggtcctgaggacacccacagcattgctgtgagccacttcctgcacagtgcgcgggcaggatcaggacatagctgctggagcctccaccctgaaaaccccactcttcccagagcccagaggccagggcaggtccccagctgtgcacagcgctgtttaacccaggcccttgctctttgagctcagcctctgggagagtttaacacagaaaaggccctgccctggcctcctaagatgaaaatctaggtggggacggggggcacaagtgtagttaaacacctgtgagcaaagcactgctgtggatggatttgcggggaacacattgacaccctaccctttccacacagagaaacacaaacatactcatgcacactcacacacatgcacactcacatgcatgcacactcacacgcatatacacattcacacacacgcacaatgttcacactcacacgcacaatgttcacactcacacatgcacataatcacacatgcattcacactcacacgcatacacacacatgcacacacacccatattcacccatacacacactgacacacatgctgaaacacacccacacatgcatacacacaatgcatgcatacttacaagtacacacatatacacacacatttgcatacatacagttgcatgcagagagcttcacacatgcacacacaggcattcacaagctgtcccacacatgcacatacactctcactgacactctcagacacacatgcatactcgcgctcacactcatgcacacaacacaagccacgcgagcagcagccaagaagcacatggcgtcaggtgcgccctccctcacctatgacccagccaggcggcatcctgcattttaaatacaacggctccccccagcccttcaggtcttcttctcaccgatcaagtgtgtgttcacgcgtgtgttcctgacatcccctttggcatggggctgtgcttccagcctgcagaatctgcatgtggctggtgagagcgatccctggggacattgccaggaagcctcccacagccgggaagcagcgctgaggtataggagggagcttctctgggggcctggaagggttaactgagactgttaggcgtgctctcaaatgattacacaaatcactgttgtaaatcacaatatccctgactttggaatttttatcttgttttcaggtaaagatcatcttgttctgctgaaagtcaaaagcagcccctattgttgttttttaaataactctctaattaaaaccaaacaattctgtagactcttccataggaaatatattcatgaggctgatgcttatagaaagttttatcttgtgagttattaaataaaaatgcattc

SEQ ID NO: 1381 - DNA, 1811 bp, Homo sapiens
caatatgagtttactcagagacagtagaaactattcccaggaaactgtgcctaaggccaatttcggtttctctggcattagtccattagaagatgaaataaacaaagggtctaaaatctcaggcctgcaatactctatacctgacaccgagaaccagacgctgaattacggaaagacaaaggagatggaaaagcaaaatacggataagtgtcacgtttcctctcacactagactaacagaatcaagcgtgcatgattttaaaacagaagatcaagaggttatcacgacagattttggccaagttgttctaagacccaaggaggcaaggcatgctaacgtgaaccctaatgaggatggagaatcaagttcaagttctcccactgaagaaaatgcagccactgacaatattgccttcatgattaccgaaaccactgtccaggttctttccagtggggaggtgcatgatattgttagccaaaagggagaagacatacagacggttaatatcgatgccagaaaagagatgaccccccgacaagaagggactgacaatgaggatccagtcgtgtgcctggacaagaaaccagtgatcatcattttcgatgagcccatggacatccggtctgcctataagagactttcaactatctttgaggaatgtgatgaggaattagagagaatgatgatggaggaaaagatagaggaggaggaagaggaggaaaatggggattctgtagtccagaataataacacttcccagatgtctcataagaaggtggccccaggcaatcttagaaccggacaacaggtggaaacaaagtcacagccacactccctggccacagagaccagaaacccaggaggacaggaaatgaacagaacggagctgaacaagttcagccacgtggattctccaaattcggaatgcaagggtgaggacgcgaccgatgaccagtttgaaagccccaagaaaaagtttaaattcaaattccctaagaagcaactcgccgctctcactcaagccattcgcaccggaactaaaacagggaagaagactttgcaagtggtagtctatgaagaagaggaagaggatggcaccctgaaacagcacaaagaagccaagcgcttcgaaatcgctaggtctcaacctgaagacacccctgaaaacacagtgaggaggcaagagcagcccagcatcgagagtacatctccgatttcaagaactgatgaaattagaaaaaacacctacagaacattggatagcctggagcagaccattaaacagctcgaaaatacaatcagtgaaatgagtcccaaagccctagttgatacctcatgttcttccaacagagattctgttgcaagttcatcccacatagcccaagaggcctctccccgacccttgctagttccggatgaaggtcccactgccctagagccccctacgtcgataccttcagcttcacgtaagggctccagcggggccccacagacgagcaggatgcctgtccccatgagtgccaagaacagacccggaaccctggacaaacccggcaagcagtccaaactgcaggatccccgccaatatcgtcaggtagttttaccttaaacccacttttggatggacgctatttcagttaagcaagtcactgacttagtttataccaaatattgtgctttctttgtaagataacggtttacatagacatcctggatctgggggcatgaagaaagtctaaataaacctttgttacacttttttaccacgcttttgcatgcttgcaataaaacatcttttactttgtgactcc

SEQ ID NO: 1382 - DNA, 1839 bp, Homo sapiens
ctctgacattggaggactcctcggctacgtcctggactcctgcacaagaggactcctgccctgccacaccctggacacctgcactagagaaccctgccccgtcgccccctagactatggcacgggaggacccttgccaccgacttcggcacggtaagacccctgacccgccttgcactggattccagcactggaggaccccctgccacggcgctctctggactacccctgcgccaccgcgtcctgcactacagcacagcaggaccgccgtcccaccgcgcactggactgaggcacagcaggaccaccactcccacatgccctggaccactgcaggacaggtcccccactccgccgcgccctggaatatggcactggaggacccccgtcctgccgctccgcggactccaccaccgaagaccctcgcccccctgcgccctggacaaaggcacgggaggacccggcttcaccgacccgtgggctatcgcataggaaaacccccacctccacccccaccccgcgccagagactctgacaagagaggacccctgccccctgctccccggactacagcaaggcaggaaccaccttcctccaagatcctcactatggcaactgtggacccccgccctggtacgccctggactaagtcaccaaaggaccccgaccccacaacgccgtgaactccagcattggaggaccattgccttactgcggactcaagcactggactatcgcagggcaggatccctgtcccgccatgccctacactatggcacgggaggacccagcctcactgtgctctggactccagcaccggaggactcctacacggaggactccggctctgccacgtcctggactcctgaacaagagaacccccgccccgctgcaccttggatatagcaaggcaggaatcccgccctgtcgcgctctggactgtggcacctgaggatccacgccccagcgcgccctggactactgctccgcaggactcctgttccaccgcaccctggactatggcaccagaggacccagctccccgcgaccgggactaaggcaccagaggacccagccccctggcgtcttggactatggcgccagaggacccagcccctcgcatcctggactatggcaccagaggacccagcctccctgcgtcatggactatggcaccagaggacccagcccctcgcgccctggactatggcagcagaggacccagcccctcgcatcctggactatggcagcagaggacccagcctccctgcgtcatggactaaggcaccagaggacccagccccctcgggccctggactatggcagcagaggacccagcccctcgcatcctggactatggcaccagaggacccagcctccctgcgtcatggactatggcaccagaggacccagcccctcgcgccctggactatggcagcagaggacccagccccctggcgtcctggactaaggcacagtaggaccccgcagcatcgtgtactcctgcacaggaggaccctcgcagggctgcgtcctggactgagctactgaaggagcctcacccctgcctcaccctggactaaggcactggagaactcttgctctgcagagccgcggactcttgcaggagagaacctgcgcccagccgtgccctggactgtggcacagcagggcccacaccgcgccatggactcctgtactggaggaagagtagtgacaaatgtccaggtttacaagttgaaaagtagcaatcaatgtgttacaatggatggatttgatgtaaaattacaaatgctgaaaacattatgtgtaattgcctagccagatcaattacacaagac

SEQ ID NO: 1383 - DNA, 2123 bp, Homo sapiens
agagaaggggtctcgctgtgttgtccactctggtcttgaactccagggctcaactgatcctcccttataggcctcccaaagtgctgggattacaggcatgaaccaccatgcctagccctgttttcttccttatgtgggtttttggggatggattatataggggccattcatttttgtttgtggtggttccgacacaattctcatttcagtgtcattgttattatcaaattgcctttagctacattggattttttggggtgtttttgtttttttgagacagagtctcgctgtcagccaggcttgagtgcaatggtgccatcttggctcactgcaacctcccctcctgggttcaagcgattctcccacctcagcctcctgagtagctgggactacaggtgtgcaccaccatgcccagctaatttttgtatttttagtagagacagggtttcaccgtattggccaggttggtcttgaactcctgacctcaagtgatccgcccgcctcagccttccgaagtgctgggattacaggcataagccaccatgccctgccttattttcttaaattacatatgatgaaaatgtaaaaggtttttgctaagcctcatgtagatgccctccacagcagtcacctgtgtgttttttaaactcttgagtttagcaagtgtgggtatcatcctgctttgaggcggaactcggcacacacacactgtgcctgccctacagaatccggctttttcagcagctcagactgtgccatcgcctcttgggagcatgacagtggctccgtttgtgaggggacaccatccaggttgctgagtcattaggaatcacagaattcctacggaagaaagaaatacacccagacaaccttggacccaagcacctcagccgagacatggatggggagcagctagagggagctagcagcgagaagagggaacgtgaggctgcggaggagggactggcctcagtgaaaaggcccagaagagaagccctgtccaacgataccactgaatctcttgctgccaacagcagaggccgggagaagcccaggcccttgcatgctttggccgctggtttttcccctccagtaaatgtgactgtctctccccgttctgaagaaagccatacaacgacggtttctggtggcaatgggagcgtgttccaggcgggcccgcagcttcaggcactggctaacttagaagccaggagggggtctataggtgctgctctctcatcccgggatgtcagtgggctgcctgtttatgctcagtcaggagagcctaggaggctgacccaggcacaggtggcagcgtttcctggagagaatgctttggaacactcttcagaccaggacacctgggacagcctgaggagcccgggtttctgcagccctttgtcatctggtggtggagcagagtccctgccgcctggggggcctggacatgcagaggcaggacacctcggcaaggtttgtgacttccacctgaaccaccagcagcccagccccaccagcgtcctgcctacagaggtggcagcccctccgcttgagaaaattttgtctgtggatagcgtggcagtggactgtgcctacaggactgtgcccaagccagggcctcagcctggcccacatggatcactattgactgaagggtgtctcagaagcctttcgggggacttgaaccggttcccctgtgggatggaggtgcactctggccagagagaactggagagcgtggttgctgtcggcgaagccatggcttttgaaatttccaatgggagccatgagttactgtctcagggacagaagcagatttttattcagacttccgatgggcttatcttgtcccctccaggtacaatagtgtctcaggaggaggacattgtcacagtgactgatgcagaggggcgtgcctgcggatgggcccgctagaaggagttcctctagaagctgtggagtcggtcgtcaccgtggagccagagccctcacagtgaagtggagtcagatcctagattcgtctgattttatccagagaaggtctatggcaagcaatgtatatttttctaatgtgaatattgcacagatgaaccttttatttataaagaataatgtctttctgc

SEQ ID NO: 1384 - DNA, 1918 bp, Homo sapiens
gcgggtggggcggccgggcctgcgctggggacggctctggggactgcggccggcgccgggacctggaggggacgctggggccgaagcagcatgtgacaccgaccaggattcagccctgatggaggctgaggaggcccagcgtggagcctctcctcccatctctgccatagaggaattcagcattatccctgaggctcccatgaggagcagccaggtctctgccttggggcttgaagctcaagaagatgaggacccatcctataagtggagagaggaacacagactctcagcaactcagcagagtgagttaagggatgtgtgtgactatgcgattgagacgatgccctcttttcccaaggaaggttctgcagatgtggagcccaatcaggaaagccttgtggctgaggcctgtgacactccggaacactgggaggcagtaccccagagcctagcaggccgacaagcaaggactctagctcccccagagctctgggcctgccccattcagagtgagcatctagacatggccccattttccagtgacctgggaagcgaagaagaggaggtggaattttggccaggacttacttctttgacattgggatctggacaggcagaagaagaagaggaaacctcttcagataactctggtcagaccagatattattctccctgcgaagagcatcctgcagagaccaaccagaatgaaggcgctgaaagtgggactatcaggcagggggaagagctgccatctgaggagctgcaggaaagtcaagggctcttgcatccccaggaggtccaagttctggaggagcagggacagcaggaagcaggatttcggggggaaggaactctgagggaggatgtttgtgccgatgggctattaggggaggaacagatgatagagcaggttaatgatgaaaagggagaacagaagcaaaaacaggaacaggtacaagatgtgatgcttgggagacaaggagaaagaatggggctcactggggagccagagggtctgaatgacggtgagtgggagcaggaggatatggagaggaaggctcagggtcagggaggtccagaacagggagaagagaggaagagggagctgcaggtgccagaagagaacagggcggactctcaggacgaaaagagtcaaacctttttgggaaaatcagaggaagtaactggaaagcaagaagatcatggtataaaggagaaaggggtgccagtcagcgggcaggaggcgaaagagccagagagttgggatgggggcaggctgggggcagtgggaagagcgaggagcagggaagaggagaatgagcatcatgggccttcaatgcccgctctgatagcccctgaggactctcctcactgtgacctgtttccaggtgcctcatatctcgtgactcagattcccgggactcagacagagtccagggctgaggaactgtcccccgcagctctgtctcccttgctagagcccatcagatgctctcaccagcccatttctctactgggctcctttttgactgaggagtcacctgacaaggaaaaacttctatcagtactttgatatgtcacagtttcatgtttatccagttcaatgtatttttaaatttttccttgagacttctttgactgatagattattgtgaagtgtgtttttaaatttccaaatgtttagggattttcatatctttcttatgctgatttccaattggattccctacaatgatttctggttttcatctgctctggatgattactatctcttttaaatttgttgtggcgagttttagggcctaggacagctctatcttgccatgtgtttcatcagcactcaaaaaaaatatgtgtattctgctgttactgtgtggaatattctgtaaatgccaaatagattcttttggttaatggc

SEQ ID NO: 1385 - DNA, 2117 bp, Homo sapiens
taggccctggcatttgctttagctgcttttgtagaattgacatgagggagactgtccctctagaggaaaacgctcagctattaccaatgaggaaaaggcaatactgatgtgctggggttttttgttttttttaatctcaaacttaggaaaagatgcaagtgcgttacaaagaattttgtttcctgaaccgtgtgagtcagttgctgagagtctgctacccgcccacgatacagacactgaacaggaagtcagcatggacgcagtactcctagcgggtcctcaggcccagtcatgtcctctaggaaaaggatccagttcaggagcaggagctgcacttggttgtcatctctttggtctccttctgattggaagctttttgacttccaagacgtggatacttttgaagtgttctgaatttgtagaatgttcctcagtttgtgtttgcctggtgtttcctcagcactggattcaggctaagcatctttggcaggagtgtgacagcactgacactcttgggtggcacgtactttcaaagtgcccattactgatgatgtgcatttgaccacttggtgaagacggtgtctgctgggcatctccagtgtgactttccctttctaactgaacagtgttttgtggcagactctcaaaatctgtaaataccccttcctcagcaaactttcagatcaattcatatgtattggggtgtgtgtgtgtgtgtgtgtgtgtgtgtgtgtgtgtgtagttccctatttaaagggctatactgtattccattaatagtaactgtttgttaggatgctcagattgtcccgagtttggccagtggaagccccttcacataggcttcggtgtcctttggacatgtccttatcattccttgagcactcccttgctttctggcaaaacagactttgggttcatcctgtcctttccctgcctagccccggaatcagccctcactccttttagtggagaataataaatacttttagcagcaaaggtctgggtctaggggtgctcactgcagttggggtgtcactgttcccaggtgctcccagtggacagaggtcgttcttgttttcttctttctgtgtctaactcctcagagaaacctggctcccactgtcctgtttacctgcctgactgcctccatacataagcagcctccctcccctgccaccaccccgtccctgcagatgccttcctcacccacttgggctctcatactgcacatcaggctgcccacactgactccccctatcggaccaccccagccctgcacatacagcccacacggatgccagcctcaccctgcccatgctgagtccccgtgctgtggtgttcctccacatggacagctccacaccctacttgggctgacacccgccctccccacaagcaccccgtccttaccctgcactgggccacccccacgtgtggatgtcctctgtggtaggcagagtggcgcccctaaagatggccacaccctaagccctggaacgtgtgaatgttacatggcaaaaggaactttgcagataaaaattaagattgtaaactttaaaacagggaaattatcctggatcatctgcatgggtccaatgcaatcacaaggatccataagaatagaaaaggcaggcagaaagaagggtcggtgggagagagggactgggcctgctgctgctggtggaaaatgaagtgccacgagtcaggagggagggtggccttcacagactggcaaaggcctcagctggcagccagcaaggaaatgctgacctcagctggcccacaactccaagaaattaaattctgccaacaataatcctcagcaaggaaacggattctcccttagagacgccagagagaacggtcctgccaacagcaagactttagcctggagacactcgtgttggacttctgacctacagaactgagataaaattgtggtttttatttatttatttatttatttttgagacggagtcttgctctgtcgcccaggctggggtgcagtgagccgagatcgcgccactgcactctagcctgagcaacgagcgaaactctacctcaaaaaaaaaaaaaaaaaaaatctgttctgaaataaagcatgagacacctag

SEQ ID NO: 1386 - DNA, 3655 bp, Homo sapiens
tcttggtgaagtgagattcagactgagtggggtcacagcacagggcactgtcttgcctggctttatctgagccagtcacacctctcctggccactatctgtggtctagccccctttgtgcagaaagagaaagaagagccttgaggaccagcctagtcaggctgaagaaatgtcaacaattgggagttttgaaggattccaggctgtgtctctgaagcaagagggagatgaccaaccctctgagactgaccacctatcgatggaggaagaggacccgatgccaagacagatttcaaggcagtcaagtgtgaccgaatcaactctttaccccaatccttatcatcagccttatatctcacggaagtactttgctacacggccgggggccattgagactgccatggaagacttgaaaggtcacgtagctgagacttctggagagaccattcaaggcttctggctcttgacaaagatagaccactggaacaatgagaaggagagaattctactggtcacagacaagactctcttgatctgcaaatacgacttcatcatgctgagttgtgtgcagctgcagcggattcctctgagcgctgtctatcgcatctgcctgggcaagttcaccttccctgggatgtccctggacaagagacaaggagaaggccttaggatctactgggggagtccggaggagcagtctcttctgtcccgctggaacccatggtccactgaagttccttatgctactttcactgagcatcctatgaaatacaccagtgagaaattccttgaaatttgcaagttgtctgggttcatgtctaagcttgttccagctatccagaatgcccacaagaattcaactggatctggaagaggaaagaaactgatggtgttaactgaacccattttgattgagacctacacagggctgatgtcattcattggaaaccgcaacaaacttggctattcccttgcccgtgggagtattggtttttgagagtctttttggtaccataagcatatcatccacagatatgtcactttgaaaattccagtttgacccacgctatttttggactgaaacaattaattatttttaaatgacgctttatgatttagaaatttagtatttccgaaaatttaaaagcttgattggactgatagatacacactttagacctcatacaagaataatcaaattttcttaaaactagaaaataaatgctgctgagcctatcaaatactgttatcaaatgagtgcctgatcatcaactcaggaaagaagactctaagtcctgttgcttcagctctctaaatgtaggctttttttttttttttttttaggtcttggtcttcagccctcttatcctgatttattctctcattggggtctcactgtctctagtattttagctaccacttgataaggatgacttccaaatttatattcccattcccaatatttattccaagactcagttttgcatttctgactgctaatcatctatatatcagtgtcccagtggcctcttaattgagcattatcaaaatcctgtggtatttatatggtcccagttatccatccctgaagtctgtcaattttgatttctctaaattccttgccatgacatcctatatatgatcacatctctatacggcttagcattgtattccgatgcccagatgtcaaacttgaagctcattctcttatcaaaattgttcatgtattcctcctttccattcttatagctgtattattagatcaggtttttaattctgctcaaccaattattaccacagcctgttaaatggaatccctactccaaggctgactgtttcaatctatcctacacttggtttctagctcatttacttataccatcttttgttcaaatatatattttttaataacagacctttttcttctaaagaaatcttttgtagaagcagcatatacgaagcagataaaagtaggttcaatgcggttggagtgaagatgagaatgccacaggcatctttctttctaggcctcagaggtgctgcatatggaatgtccatggatcgcagagggttttgaagaccatgttttcaaaaacactgtcttaacactctattgtcattgctcttttccctcttatttcctctttgtctcttcccgacttagatctaattttcaacaacccaggaaattatctcatatgtttgcatctctcaagtttcttttcttttttctttcagagtcttattttatctaaatttatgtagaaaaaaaagctttgaatgttgactacatagacattactacaataagctttttgcctttcccgagactcaaaattgacacatctttgttgatgtttaagttgaaattccagccaactttttttgacttttatgtgaagtttaaagtcttttctttgaaaagcttgcttcctcaatttcaaagatttgtcctctgatatatttataaacatcaatttaatgcagacattcaaaccctaaaccttgaataactcttattttattttgtctttgtttacttccattaatttttttttctttccctctcttccgcctttacagcacccactttttcttccccccatgatggcaaatattgttatagtcctcaaggcagggaacttctattcagactgtaaaaggaaatgttgaaatccatagctgtcctgtcaacagtagtggaatgaaaagtcgttggattgttttggcactggttctgaagcaggcataattggcaaattattataatactgctgcccgaaaatccccatttgcctcaagatagtggcatttattggcagaagcctctgaaatgtccagcacattcttttgagttaccatttaaggatcagcctgacaatcgacttctctctgcacatttgccccctttgtaacctaagccagactgttcccaaatgaccttctaaaggacacagtgcaccatcatcaatggaaacagttcagaaaggatgacaggagggagatgtttcttagttctgagagccagtctgtaacaatgggataagcatttaatggaatcaaagctgttttgcataaagagtgaactcagagacgacaagagggtctttatgaattcccttcacattttgtaaaaactgtcatatataggctatccccttaattgataaatgggatctagaaagcggtattatgaccagagggtgagaagatttaggaatttggatagcagttcaagataagaaagaacttcttatagttataaattttcaatgatggaatgggttgcttctttaaacagtgagcccaccatcacttggtatgttcaaggaaagactagataaagtcgatattgtgagaggaattgctgtatgataccgtttggagaaatgattgacataatcttttaaggccggtgaccctatcattttccaaataattgttgctagtacttagttaattagacccatttttttcttaggaaagagttggatcaatcatgggagaccctgaaaaatttccttacctttcctaaggtttaatttcctcttctgcgaaatggagacaattatattacttttgcttatttcataaagatcttgtgaggattcaatgaaatgaggttaaattcttttattaaacagaaagttttgagt

SEQ ID NO: 1387 - DNA, 1922 bp, Homo sapiens
aatctcaagcagaagagcaagagaagcaaaactcggttccctgtgaactcaagaggctttgcccagaagggatgcaaccagttatttcagcattaaatatccagacacagacagtacagacccatcctgctccaagaaacacatcagagcactgcactctgcctgcctgtgatgcccaggaagagcacagagatactgttgacggctccatcgcaaggactgagtcagcttcaggggaaatttggagacagacacacatggacggagaacatcatgtgaacacaaaggcagagatcagtgtgatgtcggcaaaccaaggagcaccaaggattaccagcaagccaccagaagcgaggagagaggcccgggacagatctctccctagcgccttcagcctgcgtggcctcactgacactttgatcttgggcttctgtcctccagaactgtgagacaatcaatttctgctgtgtaagccacctggtctgcggcactttgttatagcagccctagaaaactaagatggaactcgccggctggtcactgtcttccctcttatcacactaccttcccttactgcagctacttatttaactgtttcccaccaaaagaccctaacatccaggagtgtggggcccacatctgcctaattcgccactacggcccaagcccacctctggcacactggaggtgttcaagatgtgagctgacatatgaaagagctgtcctgactagttctagaatctcaggcatgtgactccccctcccagaatgtcaatttccccatctctctgcagagggaaaagaaaataattggagtagatgacctctgtgagtccttcgggctcaaaagatggccgggactcaccactgaaggtgtctgcatccatcatggtcagatcaggccatgagaaaccccactagaggtgctaaacagagggaatgggtcacagaggtgtgggaagcctgagaaaccactgcggccttcctgctggacttcagagaagggctggcctcattttatgggctttctgaaacccatattcagagaaacacacccaattcagcatggactggcaatgcctatccccaaggaaactccaaaaggggtgagtctcctgggcagtggtcactgagttactacaaggcctttggggttggggtggggatggtgggtcaacaggctcccctagaagccctgtgccctgacaaagtaaacaatggcaaaacatgtgcttcccagcactcacctccccacctccttctaacatcagaactgggtttctgatgatgggagaaaatgtaaatgaaatcaacggaaggatgatcctgtgagtaatctgacaagggagaaccagcttcctctcccatgaaccccagctgccttggctttcacccagacccctggcccacccggtgtcctccccagacggtggtactcacccacactgctgagggagctgctgctttctgagtctgagggcatggtggacaggacgctgtaggtagaacctggggaaagaggggagaccatgttactaaccccaaggggtcactcgtcttcaccccaagccagctgatcatcagtcaatgccaggccatgagagctacatgcaccaggcactagaaatccacatccacaggccaagcagaggaggcgcgctcagcagatctggacttcggcgtttctgccaggcctcccacctcactttatcggcccctcctgctctgggcaggcgggcagaggggaacttggagtcagtcagctggcttcttgttgggacatctggggaaaggcttagcaagggagtgacatgccccaggtaaacatggggtgtgggggtttcctccacatctctagcaatatgattctggcttccatgcagagggtaacagagcagaaattaaagaacaactgaactatc

SEQ ID NO: 1388 - DNA, 1860 bp, Homo sapiens
actccttcacctcctacattccttctacattatcccccaatgttctgttcttcctccacccaaagataaaaccaaaatagatattgtagaagtaaatgacctaaaacaaactttagcaattgaaacaggatatcaagatgcaaatgcctggatggaatggattaaatattccgtccacactttaaacaaaagcaattgttatgcttgtgcgcacagcaggccagaggcccagattgtcccctttccactcagatggtcctcccgtcgaccaagcatgggctgtatggtagctctcttccaggattctacagcttggggcaatatatcatgccaagctctctctctgctctatcctgaagttcaacaccctgcgggtcagcccccgagggccatccagcttccgtctcccaatgtcagtttcatctcatgtctctcatgacaagggaaaacttggcattccgtggaagcttaatgggatgtagtgagcttaagcccttccaagagcttacccatcagtctgctgttagtcattctcgagcggatgtagcggatgtatggtggtattgtggtggacccttactggacactctgccaagtaactggagtggtacttgcactcttgtccaattcgctatcccttttgcccttgcatttcttcaaccagaaaaagaaaagccacaacaccgtaaaataagagaagccccttatgggtcttttgactctcaagtttatttagacgcaactggagtcccacagggagtaccacacaaattcaaagctcaagaccagatagctgcaggatttgaatcaatattttggtgggtaactatcagtaaaaacatagattggataaattacatctattataaccagcagcggtttattaactacactagagatgctgtcaaaggaatagctgaacagttagggcctactagccagatggcttgggaaaacagaatggccctagacatgatattagccaaaaaaggtggagtttgtgttatgatcaaaactcaatgttgtaccttcatcccaaacaatactgcccctagtgggagcataacaagggccttacaaggccttactgctttatccaatgaattagctaaaaattctggagtcaatgaccctttttcaggatggctagaaaggtggtttggtaaatggaaaggaatcatagcctcaattcttacttctcttgcagccgtaataggtgtagtcattctttttgggtgttgtgtcacaccatgtatccgtgggctagtacagaggcttatagaaacagtacttactaaaacctcccttagctctcctccaccttattcagataagcttttccttttagaggatcaagtcgaacagcaaagccaagacttgttaaaaaggtttgaagaggaaggaccataacaattgaaagggggaaattataagatacagtaaattcctcttcaaagatttagcctgttgacttccttattctttgttctcaaactcgacttccttgttgtccatgcctccttgtccctagttactgtgaacaaccttcccaccagttctaatcaataactcacatctgctcccttggttacccactctgcacccattcttcccactgaaactgcacttcccaccactgtaactcacatcccccttcccttccttatttggaaaagtattcacaaatagccaatcgggtcaacttagaatgagcggtccaaccccagcccctgggggagtgacacagaggtagggactgtgttagggataaaaaccttttccttcctttgttcagtgtgctcctgtgatcatgattgatgcaggcagcacccttctgcagaagtaaattgccttgctgag

SEQ ID NO: 1389 - DNA, 2744 bp, Homo sapiens
gtcgctaggaaacgagcgagcccgacgccaggggcggagctctggcctcctcgccgagttgggggaggcaggtgcgacaggagaatggacagtaagaaggggagacccaaagctgcagctgggaagtggcagacgctccaccctgggcccaagacaagagctgctgctgggaagcccggggagaaccgcccgccgcagaggaaagcgggctggcaggcgagggagcccgcgtcggctgagagcccacaggcccccacagatggagtttcgctctgttgccaggctggagtgcactggggcttggctcactgctacctccgcctcccaggttcgggcaattctcctgcctcagcctcctgagtagctgggactacaggcacccaccaccacacccagctagtttttgtgtttttagtggagacagggtttcaccatgttggccaggatggtctcgatctcttgaccttgtgatccgcccgtctcagcctcccaaagtgctgggattacaggcgtgagccaccaggcctggctccttttccactttcatggaccctcgtgattgcattggatctccccgggtaatctgggatgttcttcctggcctaaggtcagctgattagcaaccttagttcatctgcagtctccattctctttttgctgaatcacgtcaagtattcacaagttccagggggcaggaggtggacatctttgggggacattattccgcccaccagaaaacccaggagcagccacagccccaagacgaggcagggaaggagtgctgctgtctgccggtgaagatgaactgcttctgaccctcccgagcgaggatattgagaagaaagaatttgccaagatgctagtcacacaccaagtacagaggctatgttggtcggctgcggcaaaaagaccactcgcggcgtggcagctctcactggccctgctgcctcttcaagttgactgcagtccatcacccacggtcattattaatttgtttttgcaaaggccaggcaggtgaatctaatggagatggaaaccaccacacctgcttccctggtctctgatgttggtgttaacctctgcaattcctcaagcaaagcactccttctatcaggctcactgtcttgctggagggaggaagttccacaggctctcacttggttctttctgccgtaacaacccttactcctccggccaaggagccaatgtgagcattcagctggcagctaagaatgtgtatcccaataaacagggcagacctacagacccactggacccactagagatggacttgggccacagtgccttccatgacttcagtaaacagaggggtgtggtaatcttgtcaaagtcctggcgtcaatgtcagtgtccggctacacaccatgttcccgtcctcgaaaagcctctctgtacccctctatgttggtgacacaaccctggcaaatggccacagactcctttggggacagagtaggagcgtaactggtgggagtggttggcatgccttgtattgggagagccgcacgccctagggcttccagcctcctcttcagtttggcagctgtgagtctgaatttcactcaaatctggaaactgggtgagagactgtggcagctgctgtccggctggcagagcctgacgtgtctctgatcatactcactgggtcagcaacaccctactgaccttgtccagaatcccacatcccagttgatatcagggcaatcagtttcctggctgttttccccaatatcaacccgggcttacagaagacagtcaccacagagctcctgccaggagttcactcattcgtgcatttcttccttttttttttctttttgagatggagtctcgctctgtcgcccaggctggagtgcagtggagcgatctcggctcattgcaacctccgcctcctgggttcaggcgattctcttgcctcagcctcccaggtagctgggatagcaggtgtgtgccaccacgcccagctaatttttgtatttttagtggagatggggtttcatcatgttgcccaggctggtctcaaattcctgacctcaggtgatctgccctcagcctcccaaagtgctgggattacaggcttcagccaccacacccagcctcattcatacatctcttattgttgttgtttgagacagggtctttctctgtcacccaggatggagtgcagtgttgtgatcatgcctcagtgcagcgatcatggctcagtgcagcctcaaactcttgggctcaagcggtgctccaacctcagcctcctgagtagctaggactataggcacacagcaccatgccccggctatttttttattttgtagagatggggtctcactatgttgcccaggctagtcttgaactcctggcctcaagcaatcctcccacctcggcctcccaaagtgctgggattaaaggcgtgagccaccgtacctggcccttggtggaatctttagggttttctattcatacatataaaatcatatcattggcaaacagagataattttacttcctcctttccaatttggatgccttagatttcttttccttgcctaactgctctgtctagaactcccagcactatgctgaatagagtggcaagagcaggcatttgccttgttcctaaccttagagaaaaatccttcagccttttaccattgaggatgatgtttgctgttagtttttcataaatgatctatatcaggctgaataaatttctatttctaaaaaaac

SEQ ID NO: 1390 - DNA, 2040 bp, Homo sapiens
acacctgagctcgccctgcggtcccgggcagtgactccgccgagcctcggtgggggaggggacaggggagagaatagggaagaggggcgcgatctgtgtctgggacccgttgccaagaaacccgaccctcgggctctggccatcagcagccgcggtgcagctgcctccccctgcctccaggtcgcccagcagagctttctagagctgggtgctcagaagaccccaggcggaggcaagaaccttgggccgcggctctgtgggaaaagccctcggggaagccagacggcgcgctccagctccccatcgcgggcgtgggccccggggtggaggcagttgggtcgcggccctgccacccccatgctgcacggcctcggcccagtgccaccacctctgtgggccgccgtttcagcctccagatggggtggcggcgggccccagcccttgccccaagtctctaaggaagggtctggcctggcccgcccagatccgagctgctgcgtacgcgcggggctgggagctgcaaaaacgcccggggcccagggtgagcggctgggccctcgggggacccggcgcgcgcgggggctccagctccgccctgttgggggccagagcaggagggaggccgccccagcttgttctgggccgcagccctgccgaccgcacgggacaggcgccgcgtcctctctgggcctccaagacgcagactagaagcccatagctgctgggaagatgggcaccccaggtctccgcgcacggccttcccagggccacggtgaaacatggatgcgacactcaggcaccttcccggcccccggcgaaaacgcaaagcctgagcccatgatgggctcggaagctctgcgggattgagtcatcagaggaatgctgatctagaagtacaatggctggaagacacccgcagaaaccgcgggcactggagagcaagtgcagctttaatctccaggcgtgatttagatggaaagcagcctgaagaccagttaagagaaccgcgagcagagcgcgctggactagcaccaacagacgtgagttcgagaccgtcctgccccttaatcctgtgtgaccttggtccattttttaagtctgtgagcctcgcagtgttctcattcctgaaaagagcctgccccatctccggactgcagtgagaacaaaaggagactatgaacatgactttttgccacttttgaagccccacactgaggaaagattttcctagcacttgggagattttctttagcaccagctgccaagaatgctgggaaggagatagccccatcccagaaggaagacaccttaaatcagaactttatttttcctcctatgaaaatacaatctaatactggagaagtgtaaaaattaaggagtcattagaagccatttgttgttgttgttgttgttattgttttgagacaggatcttactctgtcacccaggctggagtgaggtggcacgatcattgctcactgtagcctccaactcctggactcaaacaatcctcccttctcggcctcccaagtacctgggacgagaggtgcactgggcgtggtagcacacatctgtagtcccaggtactttagaagccgagaagggaggtctcactattttgcccaggctggtctccaactcctgggatcaagccatcctcttgcctcggcttcccaaagtgttgggattataggtgtgagccaccactcccagcctgttgttttaactttctatcaaagaaatggatggagggtggacagggatgctgggtgctttagattagacttgaaagagttaacagcataggttacagaatcacacatacccgaattggaatctcgtcttgaccctttactaccactgtttcgttatgttagtgacttaacctctctgtgcttcagtttcttcatctgtaaaatgaagaaaatggcaccaacctgtggggttgttgagaagatgaaatgcaatagtgaatgtaaaagtgcctgacaggacccagcacgtggtaatacataataaatgctagctagttttggtttc

SEQ ID NO: 1391 - DNA, 2506 bp, Homo sapiens
aaattttaggccgggcacggtggctcacatctgtaatccccacactttgggaagccaaggtgggcggatcacgaggtcaggagtttgagaccagcctggccaacatggggaaaccacgtctctactaaaaatacaaaaattagccgagtgtggaggcatgtgcctgtagtcccagctactcgggaggctgaggcaggagaatcgcttcaacccaggaggcggagattgcagtgagctgagatcgcgccattgcactccagcctgggcgacagagcaagaccccgtcttgggaaaaaaaaaaaagaaagaaagaaagaaaatttaaaatccttgacgtaatggaaagccattaaaatagatcactggaaatgggtaaaacttccctggaacccgtctgggccccagcagaggtctggcctctatgtcagaggtctgggccgggcacaggaagaaatcgggtggccaccacagccccgtgggtacgccaggctggggccctgtggggccggctgcatctgccatttcgtggcctcgggagccaggtgccctgtcgggggcaggaggtctgtgtgtcctgcacagctgctgggtgtgatggctgctgtgtgtgggggcagggccttggcctcttccttggggcctggggggtcaggggctgcatccaccgaggccacccgtccccgcagacaacctcctgcaccagcagatgctgcagtcggagatccaggccatgaagaagctgcggcacaaacacatcctggcgctgtacgccgtggtgtccgtgggggaccccgtgtacatcatcacggagctcatggccaagggcagcctgctggagctgctccgcgactctgatgagaaagtcctgcccgtttcggagctgctggacatcgcctggcaggtggctgagggcatgtgttacctggagtcgcagaattacatccaccgggacctggccgccaggaacatcctcgtcggggaaaacaccctctgcaaagttggggacttcgggttagccaggcttatcaaggaggacgtctacctctcccatgaccacaatatcccctacaagtggacggcccctgaagcgctctcccgaggccattactccaccaaatccgacgtctggtcctttgggattctcctgcatgagatgttcagcaggggtcaggtgccctacccaggtactgtccccactgtccctgactgggcatgagaggcagagtgggggaggtcctgggtagccggcagggacgctggggggtgcctcccccacgggcttcagggccctccgcgggccatcgcctgaactccacacctgcaccattctctgagcacccaggctggtgcctggagctgcctgttggagccctgtccagagggaggtgttagcagtggacagtgtgctgggtggcgccaaggcatggcagctgaggctgcggggaaggccccaggaaggggcagtggatggctggtgtggcttcttgggggagggtaggcaggtgggccccagctcttctcacccctgtcggccgcaggcatgtccaaccatgaggccttcctgagggtggacgccggctaccgcatgccctgccctctggagtgcccgcccagcgtgcacaagctgatgctgacatgctggtgcagggaccccgagcagagaccctgcttcaaggccctgcgggagaggctctccagcttcaccagctacgagaacccgacctgagctgctgtggagcgggcatggccgggccctgctgaggaggggcctgggcagagggcctggacctgggatcaaggcccacgcgcttccctggggtttactgaggtgatgggtgcaggaaaggttcacaaatgtggagtgtctgcgtccaatacacgcgtgtgctcctctccttactccatcgtgtgtgccttgggtctcagctgctgacacgcagcctgctctggagcctgcagatgagatccgggagactgacacgaagccagcagaggtcagaggggactctgaccacagcccgctctctggctgtctgtctgcagtgcccggctgagggtgggaggcaaacacgccttgttcctgctcttcccagttcagcttggtgggagaaagtcattcgcgtggctcgggacgctcatgtaaatttggttttggtgctcaagggttctttcctcccaggggcaggtgtttctttcctgtttgtcttgtgtcttgagagcttggccttatgaccagtgagaactctctccctggtctctgccagcccaagcatcactgcccgaggcgccagctcagtttcaccgtccacgtccacaaggggcttttcccaccttcacctttgtcgctgggtcagtgctggaaagcgcccctcactcctgcgctgacaagggcccttctctactgtctgtggggtggttccgggctgggggggctgcctcctttgcacctgattttgaaggtgtctctttcatccatggttaagtcataaaaagcttattggttttg

SEQ ID NO: 1392 - DNA, 2358 bp, Homo sapiens
atctcccagatgaaattcctttgcctctggttattggaacgaaagttacagcacgattacgtggtgttcatgatggtttgttcactggacaaatagatgctgtggatactcttaatgctacttatagagtaacttttgataggacagggcttggaacccgtaccatccctgactatgaagttctcagtaatgaacctcatgagacaatgccaattgctgcctttggacaaaaacagcggccttctcgattttttatgaccccaccacggttacattatactcctcctctccagtcaccaattatagataatgatcctttattaggacagtcgccgtggagaagtaaaatttctggctctgacactgaaacattaggtggttttccagtagaatttcttatccaagtgaccagattatcaaaaattctcatgattaaaaaggaacatatcaagaaattaagggaaatgaacacagaagcagaaaaattgaaatcatattccatgcccatcagcattgaatttcagcggagatatgcaacaattgttctggagcttgaacagctgaacaaggacctaaacaaagttttgcataaagttcaacagtattgctatgagcttgctccagaccaggggctccagcctgcagatcagccaacagatatgagacgcaggtgtgaggaagaagcacaggaaattgttcggcatgcaaattcctcaacaggacagccctgcgttgaaaatgaaaatctgacagacttaatttccaggcttacagctattttgttacaaattaagtgtctagcagaaggaggagacctgaattcctttgaattcaaatcacttacagactcattaaatgatatcaagagtacaatagacgcttctaatatcagttgctttcagaataatgtagaaatccatgttgcacatattcagagtggcctgagccagatgggaaacttacatgcttttgcagcaaataacaccaacagagactgagtaaagatttcattattccaactgcacgggacattgtttttgagaagttcttttcctttatataggcttccaacaccaaataacctaactgctggaaaacaagggaaatttaaatctccaaataaggcattttaatagactgtactgcttcttaaaccagcattgctgaccagcattatatttatttttcttttattattcagatgcagtagcattgcttatgttacatatgtttatattcacaaatatttttaaactgaaatatctgaacataatataatttcgtggaagaatacattgaccattttttttaatgtgcatgaattcaccgcaacacatgcagacaactgctgcaatggagagtatgaagaaacctggtctttttattcatgtcggtggcagtgtggaaattccatccagaaaattacaactccacttgatttagttgatcaccatctcagtcttcaaaagataacatcatgaggtgtgggaagtcctagttttaaggaaaccactgaaatatagatgggaaatgtggactttacaagtatatgttatatatacttgcaatgtgacatggttctgtagatcattttataataataaatattttaatttatcataacatataaaagaaacctttgttgtttgttgaaagaaaatgaaggaacagggggaaaaaaggtgcaaaatgctaaatttctaaaaatggatttggcatgtcttcccatcagttcaggtcaaaagtgcattgttgtgagatttattaaaaaaaaaatgataacacactattttcatatttttttgtttatttgcacaacttttaaaccagattactggttaaaatccaacagtacacaatttataaagtaaaaagattttataaggaaaacaaatataataaccagtgctgtgaaatgcagaagaaaggcttgttttggttgtttttcttttttaggaaaaccctgcctaaaatgttaatcttgtaaaaagtatgtatttggaattttcttcgttttaatagaatattataaagtcaaaatataaatttttttcaaatttggagtttaagatatagctgtagaggtggttttaattcctttagatgtctcataaaatgagactttttatatgttaatgtataataaaactgaaacaagattattttccatttgaaatttttgtatagtttaaaaaggcttccgtattctttgttggtattgtgccactgcagaactttagtgcagagtttatatttagctaaactgttatgttaattaagaaatgcataaatcttctattcttaatatttgtaattctaaataaattgatctatgaaaaaaaaaaaaaaaaaaaaaac

SEQ ID NO: 1393 - DNA, 1821 bp, Homo sapiens
gcatgaccgtgacggctgggttgggaccggaacgccgaagcggggttgggggtggcagaaaagcatctgctttgtaagacctacacgaggtgcaggagtggttgggcctcccctctccacttaagcaagcgcccagactgatggcgatggtgatggcagcagttactcgcacaaccccagttaagctgcgctccgggagatacatccagaaagtgcccagaagaaacttcctgctggaaaaaatgaaaaagcagtatttataacattagaatctggataatttgttaacatggcagaaaataatgaaaatattagtaaaaatgtagatgtaaggcccaaaactagtcggagcagaagtgccgacagaaaagacggttatgtgtggagtggaaaggagttatcttggtcaaaaaagagtgagagttattcagatgctgagacagtgaatggtatagagaaaaccgaagtgtctttaaggaaccaagaaaggaagcacagctgttcatccattgagttggacttagatcattcctgtgggcatcgatttttaggccgatctcttaaacagaaactgcaagatgccgtggggcagtgttttccaataaagaattgtagtagtcggcactcttcagggcttccgtctaaaaggaaaattcatatcagtgaactcatgttagataagtgtcctttcccacctcgatcagatttagcctttaggtggcattttattaaacgacacactgctcctataaattccaaatcagatgaatgggtaagcacagacttgtctcagactgaattgagggatggtcagctaaaacgaagaaatatggaagaaaatataaactgtttctcacataccaatgttcagccctgtgtcataaccaccgacaatgctttgtgtagagaaggtcctatgactggctctgtgatgaacctggtttcaaataacagtatagaagatagtgatatggattccgatgatgaaattctaacactttgcacaagttccagaaaaagaaacaaacccaaatgggatttggatgatgaaatcctgcagttggaaacacctcctaaataccacacgcagattgattatgtccactgtcttgtaccagacctccttcagatcaataacaacccatgttactggggagtgatggataaatacgcagccgaagcactactggaaggaaaaccagagggtacctttttacttcgagactcagcacaggaagactatttattctctgttagttttagacgctatagtcgttctcttcatgctagaattgaacagtggaatcacaactttagctttgatgcacatgacccctgtgtcttccattctcctgacattactgggctcctagaacattataaggacccaagcgcctgtatgttctttgaaccacttctatccactcccttaattcggactttccctttttccctgcagcatatatgcagaacagttatttgtaactgtacaacttatgatggcatcgatgcccttccaattccttcttctatgaaattatatctgaaggaatatcattataaatcaaaagttagagtactcaggattgatgcaccagaacagcaatgctagtaacaggatgggaacatgggaatgataatatatattttttcttttaatattttatttttctttttatgccactttggatttttctacaaaggcagtggtgtccaaaataaaatctctgccctaaattttactaataaatccatttttctagtgatacacaaattgtttaaggttatacactcgagcttaaatagatatttttaaccagg

SEQ ID NO: 1394 - DNA, 1771 bp, Homo sapiens
attattatggaacatcccactatatcttgctgatgttcctggttacgaattctatttggccggattttaaagttagccaccccagcttttgtcagcttggtatttgtgttaacgttttaatccttatgaaatggtcctttttatctcagctaatattccttgtcattgattctatttgtctgttattaaaattagtcaccagcttttgtctgctggatatttacatggtttgtcatccttttagtttaaacaaatctagatctttgtgttttaaagtacatttcctgcaaaaagcatataggcacttttttattctgtctctcaacccctgtatgagaaatagtgtttagttcatttacatttaatgtaattgctatagctagatttaaacctattttgccatttcctttctgttaataccatctgttttttttctcttacagtttttcccccctctggttagttttgtctctttcatttgttatgtccatgttttactttgtggccttgaacaaatttattgtagctgctttaaagtgcttttttgctgattttcaatatcagggtcattttgaggtcttttttgtagactctttttttcacattttccttttctcccctaatttttaataatttctatttgttgataacatgttgaagctcctctgcatcctgttatctttctctgcaaagtcttgattcttattccagcagaccattgacttgccagaactcaaactttgtccccctgtttcagctttaagttgcttttctccagggccccctagagtcttacctgagtgtgcataattcaggggcttgtaggtatttagttggggttcatacaaacatttcatggctcacttcttggcaactttcttttatgtagactattgactgccctcagatgaacagccacataaaatcaaatgttacctggtaagatttcctcttacccttactctcatttctaccagcttttggtcatgctctagtgcctttatgttgtggagtttttttctttcccagaatgtataaatgttagagttctccagtattggggaaagtcatgttaatgtatgtaaagtataaatacatccacaaggttgcttgataaaatgcttatctcagattaggtaaatttaactttttttcttgtttgaaattagctacattgaataacctgtttataatcagacaaaaaagttatttaaaaatgtggtaggaagcagtaagatctattctctttgatgagtctgtagctctagcttgcttttattttaagttactatgactcccagtagcggctgatggtcattttatactcaaaattcagtttttcaaagtagttttcaaattcggctcacgatacagtatattttaaaagtttgcatttcagaacttttcaaaatgaaatatctcatttctttctgcatagctaaatgcaaaatttcattcctctgtttttattagctaaatgcattgaacaactcacagataatcatttagtagctagtacgcggtaaatcttaagtaaaagtccgctgtcagaaaatggagttcttattggatagcataaatgtggcatgttttgccagaaatgtccttgagtcttcataagtttaaagaaagtttattttaaagaaaaacatattctgggtgtggtggctcacgcctgtaattccagcactttgggaggccgaggcgggcagatcacgaggtccggagattgagaccatcctggctagcacggtgaggccccgtctctact

SEQ ID NO: 1395 - DNA, 1821 bp, Homo sapiens
cttgtttcacttaactaatcttcttagccatttactcttattgtgagcctggcttttccacctgaccaagttcttcttgttccaggaattcaaagataaagaaaccaggctctattatttctttctgattgattgatatttggtttctaaaagaaattttcttccttctctacattcacaaactcttctattcttttgccacattttatacacttaagtttaaaccagtttccatgtatattttgtctatattatgtttgttattgagaaataggcatttttgggaagaaagaatttggcattttggaaataatcagaaaattaaaaaatgcacacaccactttcccattcttctccccaccccaacccctacccctatcctcaaatgcttagctagtgaaatattaaaatgttgtaatagaaattggagtcaaggtctccttgctgaagagaccatctattttcagagactggaaggagagagaacaaaccaatcaagagtcattggtttgttgcctctattgttttatttctgacctgcgcaaatagcttttgaagtggagatatgctagttcttggcaactaatacttttctgggcatgcattttatgaaataataggtatgtatctgcctcattcttttaggctatgtgtttctctagtttaaaaataatttgccaatgaaggtctatctgtatttatgcaatccctaaatttgtatttaccttatgtgcgtatgttttaaatgtgtgtatggaggcttattttggatgctgtagatgggagagagtgccatcatctagtacactgttatatgccacaagaaataattgcacagccatttcttaattttaaggtttttcttttcaacaggttttgcactgattgcaaaaataaagtcctccgagcatacaatatccttattggtgaacttgactgcagcaaagaaaagggctactgtgctgcactttatgaaggcttgcggtgctgtccacatgaacgacacatacatgtttgctgtgaaacagacttcattgcacatcttttgggtcgtgctgagccagagttcgcaggagggcgaagagaaaggcatgcaaagacaatagatatagctcaagaagaagttctgacctgcttgggaattcatctttatgaaagactgcatcgaatctggcagaagctacgggcagaagagcagacatggcagatgcttttctatcttggtgttgatgctttacgcaagagttttgagatgaccgtggaaaaagtacagggtattagcagattggaacaactttgtgaggaattttcagaagaggaacgagtaagagaactcaagcaagaaaagaaacgccaaaaacggaagaatagacgaaaaaataagtgtgtgtgtgatattcctactcccttacaaacagcagatgaaaaggaagtaagccaagagaaggaaacagacttcatagaaaatagcagctgcaaagcctgtggcagcactgaagatggtaatacttgtgtagaagtaattgttaccaatgaaaatacatcatgtacctgtcctagcagtggcaatcttttggggtcccctaaaataaagaaaggcttatctccacactgtaatggtagtgattgtggatattcatctagcatgtaagggagtgaaacaggttctcgggagggttcggatgttgcctgcactgaaggcatttgtaatcatgatgaacacggtgatgactcttgtgttcatcactgtgaagacaaagaggatgatggtgatagttgtgttgaatgttgggcaaattctgaagagaacgacacaaaagg

SEQ ID NO: 1396 - DNA, 2570 bp, Homo sapiens
acccttcacttaccgcgcgcccggggtgactcggatccgtccaacacgtcggggaatcctttctgtcctcacccccgggcgccccagcgccggaacgctgctgcctctgtgtagctgctcccggaaggagtttcatcaaacttttaaggggctttggttttgggttgtgttgataaaataccaagaaggggcatgaaggcacgaacgtcccgggttcgtctccctgctggtcccaagcctgaatcccagggcgggggaatgtctaggtccttccgggccggcaaggtgtggtcgctcagggacccctgtccgaagacgctagggaaaagaggcacagcctgtgggtcgcagtggccaggagcgcgtggccgctgctggtgagagagtggtagacgcctggctttcaggtcctgagctgcgggcaccggagcgtgggaccccggctgcagcaccgccacgcgctcccgccctcccacctgcagggcgggggatgtctgtccaagaggccggggcgacaagcccgccggccaggattctcaaggaaccaggcccagctcagcctctctcggcgggaccagagtgggaccggggccgcggcgtccgaagacgctgcgggccaggggtcctcctcggcgccagctccgtttcctggggtctcgcgacgtccggacatcagggtcgggggtgtggagacggcggcggagccagagtccccaccaagtcagttccaggaggcggcccgcgcgcttcccgcagtgtccgggaggtcgctgggggtggctttgcgtgcaacccgggtaaaggccctgcagccgtgaggctggcgctgggaggagggtggaaaatctcaaagtcaccaatcccggtgcaaatggcggcaggggccgcgggctgtcggacgcaggcgagaggccaaaggctgacttcgcgcggccgtgagtccccagaggcaacaggggtacctgagcgccgaggggatcccgagactcggagaaaccggaagagcctgaccccagggagcggagagtttggggtgcgctctcagagctgtgactccacggtcccggaatccttggaaagggcgctctgggctcagagctcccaactagccggaggacctgggctagcgcccaggcctggagcgtctgggagggggcgctgggtctcggcccccctccccccaaaagggactgagacttttttctgcgtgcttccttcggcgcttcgggcagctctgtcctgcggcccaagctggggagaagacagcggcccgcgccacagggagctgcgcccggacccagactcccgccgcgcttctgcagagcggagccctaggtgcccacctggtagccccagaaaggccggacctgggcgccgggacgctcgcggggccgcacttggaggggctttccgggtcctggccgggcgggctctcctgcggcgcggaatggaatagagcgccggctgcagagccacccggacggggaaaagcagcggtggcgccggccagccccgggtcccgactctggagggaggaaggagcgggcgggtgggggtgggggtgagggcgagggttgcggggagcgtttagaaggccctgggcagccagaagaagaaaagaggacgcactctcccctagggaccagagggtccctgcgtactccccccaggcccgggacacaggttcccccagcgcccctccgcctcccagtctattcggcttgccccagcgcgctgccccacgtccccgaggccccggcccaggcccagccggcgagtcccggcctgctccactctgcacaaaacgaaacccaaatgcccaaaaagctcaggagggaaatttaacaaaaaccctgtcccccgccccacaccccctttcacttttaacaagccagctgccaagagaaaattgaaataaaaacgaaatgatagatagcggaggacactattttccaaatggtgaaatatcctctaaaaacatgttccccaaggccaacttcgcggctggtagccccttccgacgcctttgcctcccagaaaatcacaacaaagcgatcggaaattcggccacggtcccgggaagaaggagtagcagtgaggccccggaacccactgcggccgaaactgccatgctctctttaaccaaaataaaaaagataagaagaagaagtaaaaccctttaatacatcaaatatacggaattttaatctttaaagcgatacattgtctattattttagtacatgacgtaaaccttgtccccttctcagcgggtggacttaaaaattaaaaatagttaagtgttccttttaaagaacaaaataaggcaaatgaggttttggaatagaattttttctttttctttttttttttgttgttttcttccagaatacatacaaaaaaatacccattctcttcgatggtatacaccttaaaaataattgcaatttgaaatcagagctgacaaattgtgactttttttttcattttttttgtaacaaacatgcatgtaaatttgtgtttcaatcagacattaaataacgtacaatacaatcatagcaattttaaagt

SEQ ID NO: 1397 - DNA, 2082 bp, Homo sapiens
ggtgcataataaagccatgtcccacctgcctacggccccccgagtgttgtttcaactacctgccatccattcacccactccccttggaccccagctcaggttggaacctgataattggcgtagtcaacaggattctgaggtgagtgagtcctcagcccctgatggtcctgggtcagctatgtggtctcagcatgggttgtggtaccttgtggcagccttcctgctcagatgggccccggtgaaaacacgggtgatggtggacgggtctcccatgaccatggagaaggcgctgaagcactttgaagcacagagcactgaaaaggagcgagcctttgccggcagagttggatgggcgtttttgactgtgctacaggaagtgcacactcagtccctgagggatacagctcaggtaagggacctccagggtcaagcagagcgcctggagatccggacatacagcttgaaacgagaattagggcctgccactagtgtgggcctgggccagccatcccagtcagagacccccgccaggtctgataccaaggaggaagaacctccactgcaggctcacccagtggtccgtcagaaaatagagcaggaacagccactggggccccagggcgtgggggttcagggaccccctactgtggtggagcacatgtcatacagtgcctataccccaactgacttgcataaattaggtaaacagtgtcagcagtgcatgggggaacccctatctacctggatgctttgccttttggatgagggagctgatggtattgtctgctctgcctctgaaatggaaaagttggcctccattatgacccatccctccaacagcgattgcaggtgagcaggcggttaacacaggggcgaggcgaccacaccctgactgaatggctgatggctgtcatagaatggtatggaacaatgccagagaaataccaaaaactgtgagtaaatggcattcatatgcagagctggtgcaggtaattcaggaaatgggtatgtggcaagttttgtttgatttaaatacctgagggccatatgttgaatgctttccctcccacatgagggaacttgtgttgagctctgcacccctgagtgctttcggctctctggccactgtccttactctgtacatggggcactgcgtacatgagatgactactgccatggtggccctcagagaagcagagggccattggcaggaccagggactttgtgccataaaaaaggggaaggtaccccttccacaggggccacctcatgggacaaaaaaccgccccagtgggtgacctgcacacagatgggaattgacttgatttgggctggggttgaccgagataaaactgataggcaacccagtgaagtgctgttaactttgtggaggcaattgtccccagagcagcaattccagaaaatgcccaagacggggcaggatgatgttgctcgacccagttccaccaggatgctccagctcaaagactacttgaaggatctgcaccacccttccagcagcagctatggacggcttgccctgccacatacacttagcttctatggagaactggacatggctagagacttggggtcccatgggcgatgcctggaatgtgaaatgggagcggtggctcacgcctgtaatctcagcactttgggaggccgaggcaggcggatcacgaggtcaggagatcgagaccatcctggctaacacggtgaaaccccgtctctactaaaaatacaaaaaattagccggacgtggtggcgggcgcctgtggtcccagctactcgggaggctgaggcaggagaatggcgtgaacccgggaggcggagctttcagtgagacgagatggcgccactgcactccagcctgggctacggagtgagactccgcctcaaaaaaaaaaaaaaaaaaaaaaaaaagctttcctttggggcaaatattttattattctagggttcatcatgataaaaatatgtgaagaaactaaccaatgaatattttatggaaaccaaaatattttaaaaatactgattagaaaatcgaatctaccatcatatagtgatattattttgctc

SEQ ID NO: 1398 - DNA, 2811 bp, Homo sapiens
ttaaaatgcctcttgtaaataccttagtattttggggagtttctgggaattctgtcggacaggactgctttatttatggtagctttagagtatgttactatctacctcttatcttcacttaccatttatcttttccagtgttttcttacctattcttaaactttcattctcctaaaaaaatgtcagtgtttggaccagttccaaaagagagtgccattaggattcttagaggaatcatattaaatcaatacattaattttcgggggtggcctcaggatcttcagcaggggtctgtgtttctttgtctcaccctgcagggcttcagaggacagggagtttccagcaacatgagggtaagaggatggtagatgtggggtcagagactgtgccggtagtaagtggggtagaggtctgttctccaggagcaatactggcagacaggtggtcccacatccctgccaggtctacctgagagctctgggaacgaggaagtactgatgggtctggccatgtttcacagcagataaagcaggactccagaggagcccacctctcccttaagaggggaccagccagtctactctatgccgcctcagcccccactggctctccagctagcatctccttttttttactaatgccaatcagcccagacagggtccttcagtttgaatcaatttagtgtaacagcctggcccactccagctccaaagccaggggagaattcggatgctttgctggcaaagccctccctgatggattttgggcggcttgcagaaatgaacataaacagagatggcgatgttatctatggacatcgtaagtgagcagccacccgacccacaggagcttgaaacgagatctcagggcagatggaacttccccgagagaaggacctctttctcaggcctctggaaagtcctctgtcatgctcatgtctcagtcccccgattcaggaatccctcgccgacaccctgcttccttgccctctcgtccccctgcccgcctgcctccccatcaactcctctccgttttctgtctccctaggaaataagcaaagagggcaatcgcctccttggaggctctggagacaattatagggtgagcctaggggcaggcagggttggctttaggagaagggatggtgaagcatgctaagatcctgggaaaagaaacaaaaatatcagtttcttcttgcaagctgctctgaatctgcgtccagtgaccatcaagagaccaaaacagggttctgggatccccatctccatctttggttcattcattccttccttccttttgatttggatcggagccatgttacttttgtaaggggagaaaacagataaaagtaacagaagaatggtcaaggggatttccatacttagggaggcagtgttgagaaggagaaagtcactgagctttgaggtagaagatgaggtttcgaaagccagctctggccaggcaccagcataactgtaatcccagcactttgggaggctgaggtgtggggatcatttgagcccagaagtttgagaccagcctgagcaacgtaggaagaccctgtctctactttttaaaaagaaaataataggccatgtgcagtggctcacacctgtaatcccaggtagctaggattacatgcctcagcctcccaagtagctgggattacaggcatgtgccaccatgcctgactaattttgtatttttagtagagatggggtttcactatgttggccaggctgttttcaaactcctgacctcaggtgatccacccacctcggcctctcaaagtgctgggattacaggcgtgacccacgatgcccagcctcaaaaaaatttaagatatatattaaaatcaccaccagctctatcatgtcatctgtatatcttcaggcaagtcagctaacctctccgagcctgagcttcctccagtaaaatgaggacagtgaaacctgactcacgcagccttcagttactgtacagctttccatgtcaccaccagaccaaggtgttgtggagtccagactctggagacagatgctgcataaggcatggtgcttggcgtgccgtgggactacacgttagctaatctcatttgcttgaggtgttttggggacagaccaggatggaggcaagagtctgaatattgagattcaggggactgggtggggttccatgggagcaatccattctaagaaagctttcccaagtgaactttttggtgctgtgtaaggaagagaaggcagctttatagagaggaggacaggaagcctggaccgaggtggggatgaagcaatccggggcaggttgacaggtggcaggcatgataggaagcataagccttggacatcggtcccccttttccccacccaggggcaagggtcgagctggggcagtggaggaggtgacgctgttggtggagtcaatactgtggtgagtggaggcaacactccaccttgggctgggaccatggtgtcacacaatcctcgcctcccctcctgccactcagatctcccgactctggctcacaaagtgggttcttctctcatcccatatctccttggttccatagaactctgagacgtctcctgggatgtttaactttgacactttctggaagaattttaaatccaagctgggtttcatcaactgggatgccataaacaaggaccagagaagctctcgcatcccgtgacctccagacaaggagccaccagattggatgggagcccccacactccctccttaaaacaccaccctctcatcactaatctcagcccttgcccttgaaataaaccttagctgccccac

SEQ ID NO: 1399 - DNA, 1895 bp, Homo sapiens
ttggtgggcgggagctacgccggcccaagccccgccggggaccagcgagccgggaggaggagcaggcgccacagccgccccgcgccccgcgcccgcttgtaatccggtccgctccttattcagccgccgggaactgcgaggaggcgtcatgtagcagcagcagcaaatccgcctcgcatttgcaactctttttttttttttggtggggcggggggcgcgcggcaaaattctgtctccgcccccccttttcttgcccacttccatttgcaagctgcatctgcctctctaaaaaaattgaggagttcggggaagggcagggggccataaatcagagttggacctgcaataacccccacacctacagggcaaccatgaccgaggagagctctgacgttcccagggagttgatagaaagcataaaggatgttattggcagaaagataaaaatttcagtgaagaagaaagtaaagttggaagttaagggagacaaagttgaaaacaaagtgctggtgcttacatcatgccgagccttccttgtaacagcgcgaatccccaccaagctcgagttaaccttcagctacttggagattcatggcgtcgtttgcagcaagtcagctcagatgattgtggaaactgagaagtgcagcatttccatgaagatggcgtcgcccgaggacgtgagtgaggtgctggctcacataggcacctgcctgaggaagatatttcctggcctctctccagtgagaatcatgaaaaaagtctccatggagccatctgagcgcctggctagtctccaggcgctgtgggacagccagaccgtggctgagcagggcccctgtggtggattttctcagatgtatgcctgtgtttgtgactggcttggattttcatacagggaagaagtacaatgggatgtggatacaatttatcttacccaagacaccagggaattgaatttacaagattttagtcatcttgaccacagggacctaatacctatcattgctgctctggaatataatcagtggttcacaaaactgtcctctaaggatctaaaactgtccactgatgtctgtgaacagatcttgagggtggtgagtaggtccaatcgactggaagaattggtgttggaaaatgctggacttagaacagattttgcacaaaaactggccagtgctctagcacataatcccaactcaggactccacacaattaaccttgctggcaacccactggaggatagaggtgtgtcctctttaagtattcaatttgccaaactcccaaagggattaaagcacttaaatttatctaaaacctcattatcacctaaaggggtgaacagcctttctcagtcactcagtgccaatccattgaccgcctctacccttgtccacctcgacctctcagggaacgtccttcgtggagatgacctctcacacatgtataattttttggcccagccaaatgccattgttcatctggatttatccaatacagaatgttccctggacatggtctgtggagctcttctccgtggatgccttcaatatttagctgtgctcaacctctccagaactgtcttctctcaccggaaaggaaaagaagtacctccatctttcaagcaattttttagtagttctctggctttgatgcacatcaacctttcaggcacaaaactgtctcctgagcccttaaaagcactgttattgggcctggcttgtaatcataacttgaaaggggtttctctggatctcagcaactgtgagctgagatcaggaggtgctcaagtattagaaggttgcattgctgaaatacacaacatcacccagcttggaactagatacagaaatgctgttttgagagtgtactgaataaaagattacatgtttgaaaac

SEQ ID NO: 1400 - DNA, 1856 bp, Homo sapiens
ctttatcgctttcagatttggaggccaatcactgccaccttttatttccctgtgggtccaggaactggatttctttatttggtcaatttatatttcttatatcagtattctacgcgacttgaaacaggagcttttgatgggaggccagcagactatttattcatgctcctctttaactggatttgcatcgtgattactggcttagcaatggatatgcagttgctgatgattcctctgatcatgtcagtactttatgtctgggcccagctgaacagagacatgattgtatcattttggtttggaacacgatttaaggcctgctatttaccctgggttatccttggattcaactatatcatcggaggctcatacccaatggacttgggaggaagaaattttctatccacacctcagtttttgtaccgctggctgcccagtaggagaggaggagtatcaggatttggtgtgccccctgctagcatgaggcgagctgctgatcagaatggcggaggcgggagacacaactggggccagggctttcgacttggagaccagtgaaggggcggcctcgggcagccgctcctctcaagccacatttcctcccagtgctgggtgcgcttaacaactgcgttctggctaacactgttggacctgacccacactgaatgtagtctttcagtacgagacaaagtttcttaaatcccgaagaaaaatataagtgttccacaagtttcacgattctcattcaagtccttactgctgtgaagaacaaataccaactgtgcaaattgcaaaactgactacattttttggtgtcttctcttctcccctttccgtctgaataatgggttttagcgggtcctagtctgctggcattgagctggggctgggtcaccaaacccttcccaaaaggacccttatctctttcttgcacacatgcctctctcccacttttcccaacccccacatttgcaactagaagaggttgcccataaaattgctctgcccttgacaggttctgttatttattgacttttgccaaggcttggtcacaacaatcatattcacgtaattttccccctttggtggcagaactgtagcaatagggggagaagacaagcagcggatgaagcgttttctcagcttttggaattgcttcgacctgacatccgttgtaaccgtttgccacttcttcagatatttttataaaaaagtaccactgagtcagtgagggccacagattggtattaatgagatacgagggttgttgctgggtgtttgtttcctgagctaagtgatcaagactgtagtggagttgcagctaacatgggttaggtttaaaccgtgggggatgcaacccctttgcgtttcatatgtaggcctactggctttgtgtagctggagtagttgggttgctttgtgttaggaggatccagatcatgttggctacagggagatgctctctttgagaggctcctgggcattgattccatttcaatctcattctggatatgtgttcattgagtaaaggaggagagaccctcatacgctatttaaatgtcacttttttgcctatcccccgttttttggtcatgtttcaattaattgtgaggaaggcgcagctcctctctgcacgtagatcattttttaaagctaatgtaagcacatctaagggaataacatgatttaaggttgaaatggctttagaatcatttgggtttgagggtgtgttattttgagtcatgaatgtacaagctctgtgaatcagaccagcttaaatacccacacctttttttcgtaggtgggcttttcctatcagagcttggctcataaccaaataaagttttttgaaggcc

SEQ ID NO: 1401 - DNA, 2640 bp, Homo sapiens
ttttatgtaagagaaacagaccagagttcctccgatggccaggaaccttttagtacttccgtttatctgttgaacatatccaaagcttgaatactaatatgcatacccagcctctcaaagaagctaaaaggatgcctgacaggcccatcaaatgggacaagtcttattactcctttactggattcaaggaccctgatgaagaccttgaacaagtctcgagagtggaaacaactctcacatcctggttagataacaatgggaaaagtgctgttaaaaagctaaagaacagtttgccacttagaaaagaactagatcgtttaaaagatgaactgtctcatcaattgcaactctcagatatcaggtggcagaggagctggggcatcgcccaccgctgtagccagctgcatagtttaagccgcttagcacagcagaatttggaaacacttaaaaaagcaaaagggtgtacaatcatatttacagaccgttctggcatgagtgcagtgggccatgtgatgctaggaacaatggatgtccatcaccactggacaaaactttttgaaagattgccaagttattttgaccttcagaggaggctgatgattttagaagaccaaataagctatcttttaggtggcatacaagttgtttatattgaagaattacagccagtattgacacttgaagaatattactctcttcttgatgtgttttataatagactgttgaaaagtagaatactatttcaccctcgaagtttgcgtggtttacaaatgatccttaacagtgacagatatgctccaagcttgcatgaactcgggcattttaatattccaacactctgtgatccagcaaatctccagtggtttattctcaccaaagctcagcaggcaagagagaacatgaaaagaaaggaagagttaaaggttattgaaaatgaattgatacaggcatcaacaaagaaattttctttggagaagttatataaagagcccagcatttctagtatacaaatggtggattgttgtaagagacttctagaacaatcactgccttacctacatgggatgcacctctgcatttcacatttttactctgttatgcaagatggagacctttgtattccttggaattggaagaatggagaagccattaagtaacacagaaatctgttttatttttttaagagataagaaaggaacttaaattaaaaatatttaaatccacaatttgatataacagtattatttacataagaacaaagtttatgttggttggcaaggctagataaaaagatgttagaatgaaagaacatatttttagtgatatgtaaatgaaggattctacaatagtcatatatttttatatgaatgaatgttgggttgggctggagaggtatgtgtgtgtaaatataaaggtctcacattcagagtatagctctgaaataatggaactcatgtctacaattcaacatgcatctgtatagttacatctcatgtaaatatacacagacatattttgcagccagtaattgacagttaatgtccaaaacaggtgattgataggtaacagaaattagataaccaccaattttgcccaagagaaagactagaaggactaaaagcagttgaatgtatggtactgacattgtcataagcagtctgataaccagtttattgaaacgtgtgcattaacagagaatttaattttaaacccataatttctcctatccattaaaatattataattgttagtagtatgaaaccaacaggaaatgttttttaatcatttagtgaggtgattcatttgtttcatgggcaaacactatccaggaaaagccttgcttgcctgtttcccaaagagctctaagaaataggatcaagtgtaaaatggttcagaccattcaggatttcttgtcactcttctcaaccccgatcttcctgttattactgatgtttgaaaccctgtcattagccccggcctggttaaagcccctcagagtcacctctcattcatagcaatagaattcaaccccaagtggttgatggtgtccccagcacagccgagagacctgatctctggattcagtgcttttagctcttcgagtttaccctaagataccttcgggcaatatttttaaccaacccaaaagctcttcaggtcatttctgaagaggacaaggtgaatcttggcttggaacaccatttttgggctcttgctactgaatgaatcagaaaggaattttttctgaagagcattagaaagtaaaggagatgttaaaataagttcttgaagtatgttttatatttatctaaaacactgattttaaaagtttacattcaaatgtgtattcaaaagaagtactgatttgtaattattatagtttgtgtgtatcatcccttttaaccgtgcctaacaactgtacttaaattttgttttctagtgtaacaaatgtttcccataagattttctagagccaaataatgggagtgaaaaattccttaagtgttatataagaaaatatattagaaaatcagctttggattatacgatttctaaaatatactaatacagaatcctcagtaatatgttttgaattggattttttctcagaactgttacataataaataatacatcaacc

SEQ ID NO: 1402 - DNA, 2178 bp, Homo sapiens
ggcctgctggagtcagcatggccgcggcccctgactacccagctcccttctatccctcgagcggcaggaatccgtccccacgcccttttcctttaaagggcaacgggccgaaggtggggcgggcggcgcggctcccgcgatccattcaggtcaaaagggagagtgatcaaacaggagagccgaggggacctatattcagagacttaaccggacacctggacagaccattacaacttgggacttttcaggagaatgagggaaatgtagttattgcacctgagcctcactccagctctgaggtcctcttcacttctctttggaagaaaattggatatcttttcctagttgaaagagtagagatctgatttctccaaggatcatcgctttttgacacgggattattagaagcattcattcatctatcaaggagttttgggatacttgccataagccaagccctctgataggtgctggaaacatcaagctctgtgcccaggaagttcatccttggactgcacgcatgaacgagtttgctgtcttcccattggattcagccagtccgcggtcctggagcaaattcaggacctgacacataagaactggtggagaattacctgcagaatagatgctgaatctttgtgcctctctgctctccaagaagatggcatgctccttgatgacaagagccacctctgatctcccccatccagtcaaaatcttccagaaaacagaccatcaatatggatttgcagcatgtattgtgattgtttaacataattttccaacagccaattatgtgtggccactatacgtagatatttctttagctcatattttaatacctgtcctgtcattctacattacatatgtggaagacctttaacccagtttagtttatatataataagtacaaaagggaaaaaagaaagctgccttttttcacctctttggggacttcttcagtctttttccagatgtggaatccagatcgtgttattttctttccagactgggcctaggagcaatacgttaagagtcagcaaagcctcaagaatcatccagctcttcagcaaagcctcaagaatcatccagctcttttctcctcttcaaagttgcccttcttttctctgaacattaatgtatctctctgtatcacttatccattgctgtgcagcaaactacctcaaaacctagcactttcagtcagcaaacacttatcagtttacagagtttctgagatcagaagtcaaggagtggttcacgtcggtggttctggctcagtctctcatggggctgcagtggaggtgcagaatctgacggggctgacgattcacttccaagctcactggtgcggctgttttcaggacaactcagctccctgccacatgggcctctccatagaacgcttataacacagcagctggcttcccccagagtaagtgattcaagagagcaagccaccaaggctgggtgcggtggctcacacctgtaatcccagcactttgggaggcggaggtggatggatcacctgaggtcaggagtgtgagaccagcctggccaacagagcgaaaccctgtctctgggaaaaatacaaaaattagccaggcatgatgtgatggtgggcgcctgtgatcccagctactctggaggctgaggcaagagaattgcttgatcctggggggcagaggttgcagtgagctgagataaaaaagagagagcaagccaccaaatgggagccacacacccttttataatctggtctctgaagtcatccattgtatcctattctgtagaagtaaatcactaagtccagtcccggaagggcaattagactctatctcttgaaggaagaagtatgaatttttgcatggacagtcatgcactgcctaatgacgttttgtcaatgatggaccacatatgtaacggtggtcccattagataataatggaactgaacagttcctgctgcctaatgacactgaggccaccataacatcatggtgcaagacattccttatgtgtttgtggtgatgccggtggaaacaaacctactgtgctgccagttgtacaaatgtctaggccatacaattatgtacagtgcgtaatacttgaacataataacaaatgactatgctactaaaaaaaaaaaaaaaaaaaaaaaaaaaaaaaggccacatgt

SEQ ID NO: 1403 - DNA, 2720 bp, Homo sapiens
ttcagaggggacttagcaaggaaggaaggtatcagagttataggaacactgaatataagaactggaagcagctttatgatcagttctcgaatgccctgccttctcgttctcaattcagtatcctttccattgttccttgctgtatattattggccagccagtctggatggagcggcagggatggttcaaataaatgaaggccataccaaagtcatcctattgaaggctcatgttgggcttaggccagagctcactgatactgagatgtcccttattctgtgtctctttcactgtctatggtattactctgctttcacagaagagcgagtcttggggaacagaaacacccgtatcatcctagttcaacagcttcttgcaactcccaaatttacttatttcctgcctcctgcctttttcattgatctagctgccagtgaaatatttgctgcttctcagtgacctttgtatttgatatgaattgtttattttcacttttaagttgaaatataatttgtatattatacaatatacccatttaaggtgtacaattcagtggtttttagcagtcagttgtgcagccatcacaatttgacagtattttctttccccctagaagaaacaccatacgaattcattgttaccccatttcccccttttctccagcctttcacaacgactaatctactttttctctatggatttgtctagtccggattttttttttcttttttttgagacggtcttgctctgttgcctaagctggtgtgcagaggtggaggctgcagtgatcatggctcacagcaacctcgacctcccgggctcaagtaagtgatcctcctacttcagcctcctgagtaattgagactgcaggcacacaccaccacgccctgctaattttttattttttgtggacacgaggtttcattatgctgcccaggttggtctcgaactattgggctcgatcaatccttctcatttcctcctcccaacctgttgggattacaggtgtggtccaccacacctggccctggatatttcatttaaatgaaattgtcaaatgcatggccttttgtgtctggcttatttcacttagcataacattttcaagattcatccatgttgtagcatgtgtcagaacttcattttgatagctaaataagtttctgttggaaggatgtatcacattttgcttatccattgatcatttcatggatttttttctgtcgttaagaattagtaggaaaaattggatatactgctgactttatcagcttctgacagatctcagtgtcttcagtttaatattaagaaattgagctgggcgcagtggctcatgcctgtaattccagcactttgcggggctgaggcgggcagattgttcgagctcaggagttcgggaccagccttggcaacatggtgatacctcgtcttttaaaaaaatacaaaaattggccaggcatagtggcatgtgcctatagtcccaactattcaggaggctgaaaaaaataaataaataaaataatgttaacaaaattctattagtatgagtattgagaaagaaggtgatttgggtagcttttttttggtcacaacacttttacacaggacagtaatatcacttctttagatctatatgtcgacacttagttttctagacatttctatgtacatgatcttattagaccctcttaatgactgaggtaggactgtatcagatgtgatctagagtatgttaagtgatatatagctaatcagtaagagacccaaaataggtgtccagctcttccggttctctagttcagtgttttcccatatcctctgcctttcaaatgagtttttaaaggtgaaaaatgcccatttgtttcctctagagttttgttccttttacagttaaaataaatcgctagagtaaagccttgtcatttgaaagagaattggatttatactttatggccctaaggggcaaactatctggagaaaaggttttatgtagtataagaatgaaatttacaataatagctgaatgacagtggaatgggctgctttggaaggcaactagtcccttttgctgggctgtacaggcacatgcttgaccatcacttggagttattttcaaaaacatgttgaataaacctgataattctataatgtagcctatgggctaatagatttgaaaactaattttagatttgtttttctttcagctccatttatcttaaagaaattggacagcatatgaagacaggacatcacatatgaatgcacgatatgaagagcctggttacagtttcgactcctctctgcaagtgaataggcccagaaaggtgtaagagactctttgaatggacataaaattctgcttgttaagaacaagtttggctctggtaactgaccttcaaagctaaaatataaaactatttgggaagtatgaaacgatgtctcgtgatctggtgtacccttatccctgtgacgtttggcctctgacaatactggtataattgtaaataatgtcaaactccgttttctagcaagtattaagggagctgtgtctgaaatggcactgtcttgtcagtcatttctgtttacctttttcttctgcccagagtgtatttgtgaagagtctcttatattatgttttgtggaaatcagcacacaaccacaatgacatttaagcacaggatcattattagtctatgtttttaataaacatatcaattaag

SEQ ID NO: 1404 - DNA, 2757 bp, Homo sapiens
atgcgggtgggagagccaggagggcatggggtgcatggtgagatgaaaacgatgtgtgcttgtgacaaaaagcccagaagaggcagtaaggagggaggagtctatcccttatggagagcacatggacttctgggtgggtgtcctgcagttcccttcctcttgagtctttttaactgggggtccggtgtgtttgtgatcaatgacatgtatgcgtgtgcatgtgtacctttgcaggtacacatgtgtggtgtgtgtgcatttgcttggtgtgcgtgcatttgtgtgtgtgtttgtgtgtgcatgcatgtgtgtgtgtttgtggtaggtttgtgcacacatcctgcatacctttgtgcctgggagtggcatgtgtgtggtgggtgtcgctgtgcatgatggagttgcagccgtggtgcatttgtgagattacctcggtggcctaaattggggattaggagggcatcctcaggtccttcccactgtctgctcgtctgcccacaggcggctgtgccctaaacaggaggaggccattcacgcctcgcctgagttgtgtccaaggtgtgcgtgtggccaggggtccatccgcttccctctagcccagcccctgaacacagctgcagtgcacggccccactcctcagctctgctccccatcccaactcgaagacgctgccctggccctgtgtgtgcagctcatgtggactgggagggcagggcaggtgcaggtcttggggcaagagctggagctgtcttttccttcctgcacagccgcagagcaggtggatggggctgcttccctgcaagggcccagggccaggccccctggggatttattcgtggcttagaagggtggggccagaagcaggcgtagtggggattagggactcagcacccccagctctcagtccagcagacagacccaccccaggctgactacagaggctgcacctcagcaaacaggtaggccctgttcttggggaggattcccaccaggcaaaggccagctcccgggccctcacctgccacgtgtccaagctaggatcctgtttgcctttcccttgggggctgggagggaggcctccaaccccctctggcattaccagcatcacagataggagtcccaagtcctatgagaagttcctggaataggtgtagattcagtagatctttacaagaccatatctgcagggcaaggtaccagaggacagaggcggggacagggacacttccattccagacctagcagcccagcactcagcaccatgcatgggagcaaatggctggactcctgggtggggtgggggtctcagagcaggctcccagagggcttggaggtgactccaccaggtggggacggcagctcccaggtagggtgtcatcagagtagacagcattgcttgctagggacccctggggaggctgacagggtcagtgggtttcagttggggggctcccctgctgagaacccagtaaagccggccttccattcgtctcccgtgtgcccagagcctggtctgagggccgccctgtgcatgccggcccttccaacgtggcagagctcagggggaagaacacccaggctctcaggagactctcaggccaatgtctccatccctgggtcagccctttcctgccatgaattcaggaaggcagaggcagctcagcagatggggactagaggccgcactgctatccacagcctctcttctcacccccaggcatgtcgggccccaggcctgtggtgctgagcgggccttcgggagctgggaagagcaccctgctgaagaggctgctccaggagcacagcggcatctttggcttcagcgtgtcccgtgagtccagggctctcgtggaggggtgcgtagacctcaaggctgctgagtagtcctaacaccgtgagcaggccaggagcccaaacccaacaggcacacccaccctgcagactgtccgaactcttgcacactcccccccacacagaacctgaggttatcacactcctgctgtcctgcgtgcctgtgtctcccttccctgggtctgttgagtactgataactgggccacagtgtttctttctgggagaaccctcgccttgtaggctcctgcgccttcccagtggtgtgcttcactggctgcctgcatcctggggctcaagtgctgtcaggactgcaagggaaacgctgggtggggcattgggctccgagcagcccccgatgggtgacaggtctctctgctagataccacgaggaacccgaggcccggcgaggagaacggcaaaggtgagtggggtggggccctatggctggagcacccccagtgtgggcagggctgctgggccctgcagctgtgttggctgtgctgcccgtctcctgcccccatcaatccctaatctgtgagatgggtccttgcctccaagggccggtgaactcaatcagggtgtcagcgccacagcgtggtgtcgccttccttgggtacagtgtgagaggccggccaaggcctggggctgtcttcctcccaccttggaggcggccacagtgctgctgtccccagccctgtcctggactcggcacttatcagcacttttgagctgtcttctggggtcctggtaaaaagggctactctgcctgcctgattcaagacaagggacccccttcccaacagcacccccgccccttgccgtgcaacccagtggtctccagtcaccccaccacatcgtcccctctgtaacctgacggtctccagttcccccaccaccttccccc

SEQ ID NO: 1405 - DNA, 2138 bp, Homo sapiens
ttaggtctgacctctttgtcctgtgtgtaggtgaaagcagtctcatttctgtgtagtactgtggcgggaatgcacccagctctgctgtaggtggagggtctcagttacctgctgtacttcctccagacaggactgttgttctagtaactctcagcaatgaaggaaccaatgcagtctccgactttactggcttgagtttcgctcttgttgcccaggctgagtgcaggggcgtgatctcggctcactgcagcctctgcctcctgggttcaagcgactctcctgcctcagcctcctgggtagctgggattacaggtgcccaccaccaggcctggctaatttttgtatttttaatagagacggggcttcgccacgttgcccaggctgatctcgaactcaagggatggctcacctcggcctccaaagtgctgggattacaggcgtgagccaccgcgcctggcctttcctggctgcttatactcactcaccctgcagaaaacacagagaccaggcaggcgccgctgtgggttctgaagagcgttcgccgcagcggtggtgaagagccagagcgggaagccaaaacggctcctcctcgggctggtcccagcctctcagcggggaggagggctctagtcctggcgtgcagacagtgttctgtggctgccgtgtgttggacagactggaaagaccggaatgccactgggggcaggtgggttaggtaggttggccagagggctcacatctggggttgaaggaaacgggataaaagccactgagtttcctgggccgggacctgagcgctacccgtgtctccacctcgccctcccgtgtgcgtggctttctcctagctcttgggcacattctcacgtcccccccataacccgtcaccttcatttctgctggtgcttttgggagtcagacctacagactgcatcagcatcaccaggcagtttgctttctggagccttttccagaactgtcaagcagactctgggggcaaggcctcgggatcctcattttaaatacaaggtttaagcccttcgtttcaggatggatttctgcagccactacttcccagctactgtccttcgtcctgcccgggttttcagagcctgatgctgccactggcgacccacaccccctcagctgcttttcagaaccacacgataaaatctgccccgaaagctgctgcagcactgtctgcgctcacagtgcccaccacaccaccgcccacaggccaggccagccaggcttccgattctgccctttcctggagacccatcctcctccctccgggagtgatgcccgctggtcagctggagcgagcctctctattgccgaaaagccttttctgacactcctgcatctttagtttgggacatctctcccactaccaaacttaaaccacatgagggcaggggcttcatttttaagcagttggctttggtgaggctggtggtgatgaactagcaacaccatcttgccctggtaggtgacttcccccagcactgagttggaacaaagcagaagctttctgtgtggaaacagcattcggtttggtgatccttctatgtaagaatacgatctgatgttttctaagttaattaatacaaaatacatattgataaaacactagataaaagatcacagatagattcattacaaaatttttataatgggtataaaatcaccagtccccttgcataagctctaaccacagtgagctaccctgtttcagctgtaacacagtctcctgtgaatcacaagatacattaactactgataatttttctgtgaaggatctatattggaaggcgtctgacaacctccaccagcaccttttgatgaagaactggagtctgacttggttcgttagtggattacttctgagcttgcaacatagctcactgaagagctgttagatcctggggtggccacgtcacttgtgtttatttgttctgtaaatgctgcgttcctaatttagtaaaataaaagaatagacactaaaatcatgttgatctataattacacctatgggatcaataagcatgtcagactgattaatgtctactgtgaaaatttggtagtaaattttcatttgatattagatataaatatctgaatataaataattttaatat

SEQ ID NO: 1406 - DNA, 1801 bp, Homo sapiens
gcaggtcttgctgcagctgctgtgcgggatgggggtgaagttcccaggtcaatcgagttgtgtccctaggaggattatggctgcctctgctgagtcatgcaggttgtcagggaagtgggggaaagccagcagtcacaggcctcacccagctcccatgcaatccaaagggccattctcactcccaccgtgccccctctctgcaacagcactgagtctgttttcagacagtggacaagcagggctgagaacttgccccatgttacccaccttccagctgcagtagaaaagggctttagttcttcctgcacctgtggagtctacatgccggatatgtgccctcccctaagttctggccaagaggcttctcaaccagttcaaattgttacaaagttcagctgaagacttccttctccctgtggcattttccccgaaggatccctgtggtgccaggcagaaatggcctgcttggggacccagagagctccaagggcctctcccactgcttcctctaccccggtatttcgcttggctctccaaactgactcagctccaggtaaggctggaatcttttcccgcaaactagaccttcaggttccccagtgggggtgtgtgtttgggggtggatgatctccctttcccacttccacagtttgggcactcacggtatttggggtgtctcccgggtcctgcaggagcaatccacttccttcagagggtctgtgggtcctctgggattcctgatttattcctgcagtcattctggagctaaaattcatgatgcgaccctccacacagtgttctgtccatccaagtcagagctgcaatctagtcctgcctcctgtctgccataatcttgagtatctctacttctacttctgtggcacagaaggtctccccagctcctattccctgaatcctcctccttctcccctctttctctgtctctctccctcagtctgtcgtctttaattttttttaatcaatgttttgtggtttttagtgtacaagtctttcacctcctaagtattttatttttttcagtgcaattataaatgggagttttcctaattttctttccagatagttcattattacttcacaggtttttaaggtaactaaacaaagaaagaacaggacaaaaaaaaaaccctttttaattctagttttcattcaaatgtgtttattgagtacctaccatgtaaagttactgttttagcactggaaatataatgttgaaaaagttaggaagggtttctgctctcatgagcttatattccagtagaggaagcagtcaataaacaataaatataagtgctatgaggaaaaaataaagcaggataaaaagttagccataggaatggatggctttttagataggatggtcagggaaggtctcactgattgttaactcttaagacccaaataaggtaagggaggagacatgagacaatatgggggaagtacattctagacagaaacaaacagcccatgcatagattctgaggcaggaacatacttggatttgaagagaataagaaggccagttggttagagtgcagagaagaaagagatgaggtcagagagactggtggggttggattagagacagaaagaggctagagggccctcaggtctttgactcttaccagtatggaccaccagacctgtgagtgagtaatgtttcaaattattctagccccagatctcaagctgctctatagagatgagcctgccccactgtgtcctgtctaaacttctggcccgcagaatctgcgagcacaataaatggttgtttaacacc

SEQ ID NO: 1407 - DNA, 1972 bp, Homo sapiens
aagtgctgactgggaccgacagtgagggaggggagcccagagggaagttgataacccaaatgtcatctggtatctccagttgttcattccttgatattgctgatgataatgttacaaactgtaccagggaaagcaaacatagtcactgcccctggtaagaaggcaggggaataactatcttagaaaatttgatgaaaatcaagtttgtaaaatattaatacctgaaaagtcatatacttacatctccaacattcatttaaaactgagttgtgggatatgtaagttgcatttgtgtgcatgtgtatgtatgtatgtatgtatgcagaaacattttgatttgtggatgttttatgccttaaaatatttactggcttgaaaatatattttaactggcttaaaattttagaggtgagctccctgtgaatatccgtgttaaattgaccattttgaaatttaagacaatatatatatcgtttcagatattgttccactattttgatcagaaaagtatgctagagaaccatattttacataaaagaatatatatattaacatttttcagtcagcagatatttattttatgtcatgcccatttcattttctttttcactgttagggacttttgccgtcaggatgaaaagtgtgattattactttagtgtggatgcagatgttgttttgacaaatccaaggactttaaaaattttgattgaacaaaacagaaagatcattgctcctcttgtaactcgtcatggaaagctgtggtccaatttctggggagcattgagtcctgatggatactatgcacgatctgaagattatgtggatattgttcaagggaatagagtaggagtatggaatgtcccatatatggctaatgtgtacttaattaaaggaaagacactccgatcagagatgaatgaaaggaactattttgttcgtgataaactggatcctgatatggctctttgccgaaatgctagagaaatgactttacaaagggaaaaagactcccctactccggaaacattccaaatgctcagccccccaaagggtgtatttatgtacatttctaatagacatgaatttggaaggctattatccactgctaattacaatacttcccattataacaatgacctctggcagatttttgaaaatcctgtggactggaaggaaaagtatataaaccgtgattattcaaagattttcactgaaaatatagttgaacagccctgtccagatgtcttttggttccccatattttctgaaaaagcctgtgatgaattggtagaagaaatggaacattacggcaaatggtctgggggaaaacatcatgatagccgtatatctggtggttatgaaaatgtcccaactgatgatatccacatgaagcaagttgatctggagaatgtatggcttcattttatccgggagttcattgcaccagttacactgaaggtctttgcaggctattatacgaagggatttgcactactgaattttgtagtaaaatactcccctgaacgacagcgttctcttcgtcctcatcatgatgcttctacatttaccataaacattgcacttaataacgtgggagaagactttcagggaggtggttgcaaatttctaaggtacaattgctctattgagtcaccacgaaaaggctggagcttcatgcatcctgggagactcacacatttgcatgaaggacttcctgttaaaaatggaacaagatacattgcagtgtcatttatagatccctaagttatttacttttcattgaattgaaatttattttggatgaatgactggcatgaacacgtctttgaagttgtggctgagaagatgagaggaatatttaaataacatcaacagaacaacttcactttgggccaaacatttgaaaaactttttataaaaaattgtttgatatttcttaatgtctgctctgagccttaaaacacagattg

SEQ ID NO: 1408 - DNA, 2088 bp, Homo sapiens
tgtgtctttgttaggagatttcgtaccatgttaatcattatggaaacactacttaagagaatatggctgaaatatgtttgggtttttaaaaatatctttcttacagactaatattgtctgtggacctttctacatttgtttgtttgtttttgaaacagttttgtcgcccaggctggagtgcagtggcgcgatatcagctcgctgcagccgcctcctcccaggttcaagcgattctcatgcctcagcctcttgagtggctgggactacaggtgcgcgccaccacgcccaactaattttttgtattttcagtagagacgaggtttcaccatgttggccaggctggtctcgaacccctggcctcaggtgatctgagcctcccaaagtgctgaaattacaggcgtgagccaccccacctggcccctttctacattttctaagttcctctctctgaggacaaagggtcaggagcgtagacaacgcagaaagcttctgcagacgtggtcctagttatgccagtgttgccaccctgtgtgttgcaggtcagagacgagcagcaccagtgtcccctggggaatctgaaggtccccctcagccagctgctcaccagtgaggacatgactgtgagccagcgcttccagctcggtaactcgggtccaaacagcaccatcaagatgaagattgccctgcgggtgctccatctcgaaaagcgagaaaggcctccagaccaccaacactcagctcaagtcaaacgtccctctgtgtccaaagaggggaggaaaacatccatcaaatctcatatgtctgggtctccaggccctggtggcagcaacacagctccatccacaccagtcattgggggcagtgataagcctggtatggaagaaaaggcccagccgcctgaggctggccctcaggggctgcacgacctgggcagaagctcctccagcctcctggcctccccaggccacatctcagtcaaggagccgacccccagcatcgcctcggacatctcgctgcccatcgccacccaggagctgcggcaaaggctgaggcagctggaaaacgggacgaccctgggacagtctccactggggcagatccagctgaccatccagcacagctcgcagaaacaagcttatcgtggtcgtgcatgcctgcagaaacctcattgccttctctgaggacggctctgacccctatgtccgcatgtatttattaccagacaagaggcggtcaggaaggaggaaaacacacgtgtcaaagaaaacattaaatccagtgtttgatcaaagctttgatttcagtgtttcgttaccagaagtgcagaggagaacgctcgacgttgccgtgaagaacagcggcggcttcctgtccaaagacaaagggctccttggcaaagtattggttgctctggcatctgaagaacttgccaaaggctggacccagtggtatgacctcacggaagatgggacgaggcctcaggcgatgacatagccgcagcaggcaggaggtgtcctcttcagcgtagctctccacctctacccggaacacaccctctcacagacgtaccaatgttatttttataatttcatggatttagttatacataccttaatagttttataaaattgttgacatttcaggcaaatttggccaatattatcattgaattttctgtgttggatttcctctaggatttcgccagttcctacaacgtgcagtagggcggcggtagctcttgtgtctgtggactctgctcagctgtgtccgtaggagtcggatgtgtctgtgctttattatggccttgtttatatatcactgaggtatactatgccatgtaaatagactattttttataatctttacatgctggtttaaattcagaaggaaatagattaaggaaatatatatattttcttctaaaacttattaaattagtgtgacaaataatcattttcatcttggcagcaaaaagttctcagtgacctattttgtggtgtttctttttgaaaagaaaagctgaaatattattaaatgttagtatgtttctgcccattatgaaagatgaaataaagtattcaaaatatt

SEQ ID NO: 1409 - DNA, 1718 bp, Homo sapiens
agcatcatccaacaaccacatcccttctctgcagaagcctctgagaggaaagttcttcaccatggactggacctggagggtcctctgcgtgctggctgtagctccaggtgctcgcttacaggtgcaattgacgcagtctggggctgcgttgaagaagcctggggcctcactaaagctgtcctgcagggcatccgctgactcctccatcacctacaacatacactggctgcgccggccccctggacagggctttgagtggttgggcaaaatcaactctcgtgactctatcaccaattctgccccgagatttcagggcagcgtcaccatgacgagggacaggtcctcgagtacattctacttggacctgaggagcctcagatctgacgacacggccgtctactattgtactcgcagtatttggccccttgactactttgattcctggggccagggaacccaggtcaccgtctctccagcacccaccaaggctccggatgtgttccccatcatatcagggtgcagacacccaaaggataacagccctgtggtcctggcatgcttgataactgggtaccacccaacgtccgtgactgtcacctggtacatggggacacagagccagccccagagaaccttccctgagatacaaagacgggacagctactacatgacaagcagccagctctccacccccctccagcagtggcgccaaggcgagtacaaatgcgtggtccagcacaccgccagcaagagtaagaaggagatcttccgctggccagagtctccaaaggcacaggcctcctcagtgcccactgcacaaccccaagcagagggcagcctcgccaaggcaaccacagccccagccaccacccgtaacacaggaagaggaggagaagagaagaagaaggagaaggagaaagaggaacaagaagagagagagacaaagacacagagtgtccgagccacacccagcctcttggcgtctacctgctaacccctgcagtgcaggacctgtggctccgggacaaagccaccttcacctgcttcgtggtgggcagtgacctgaaggatgctcacctgacctgggaggtggccgggaaggtccccacagggggcgtggaggaagggctgctggagcggcacagcaacggctcccagagccagcacagccgtctgaccctgcccaggtccttgtggaacgcggggacctccgtcacctgcacactgaaccatcccagcctcccaccccagaggttgatggcgctgagagaacccgctgcgcaggcacccgtcaagctttccctgaacctgctggcctcgtctgaccctcccgaggcggcctcgtggctcctgtgtgaggtgtctggcttctcgccccccaacatcctcctgatgtggctggaggaccagcgtgaggtgaacacttctgggtttgcccccgcacgcccccctccacagcccgggagcaccacgttctgggcctggagtgtgctgcgtgtcccagccccgcccagccctcagccagccacctacacgtgtgtggtcagccacgaggactcccggactctgctcaacgccagccggagcctagaagtcagctatgtaacagaccatggccccatgaaatgatcccggaccagatccgtccacacctgccactcagcagctctggccgagctcacagtacaaccacaataaactcttgttgaatgaactct

SEQ ID NO: 1410 - DNA, 2636 bp, Homo sapiens
aatattattgtttgagtgtttgaatgataaactttggaatttactgcatccagttagaaaagtttacttttggccaggtgtggcggctcacgcctgtaatcccagcactttgggaggtcgaggtggacagatcacctgaggtcaggagtttgagaccagcctcaccgacatggagaaacctagtctctactaaaaatacaaaattagctgggcatggtggcacatgcctgtaatcctggctacttgggaggctgaggcaggagaatcacttggacctgggaggtggaggttgcagtgagccgagatcgttccattgcactccatcctgggcaataagagcgaaactctgtctcaaaaaaaaaaaggaaagtttacttttaagagtgatctgggggttagcagcgtgagttactgacagctcagacagtggctttgagaatgaagggagtcatcaaaggtggccggagaccctattcgactccacaggaccgtgcttgattcgagaacagtaagacctttcaacaaaaccagtgtcagggtccaagattggaggcgttgggagtcggggcaagggcagaagcagggagaccaggaggccagggtgccgcagcgtccagtggtcactggtggtggcggcttgcacctgagtggaagctgtggtggtggcaagaaatgcatccagcacgtgtatggtgcccagcaccccccctttgatccactgttacatggcactttgctcaggtccacggccaagatgccgaccacaccagtgaaggccaagagggtcagcaccttccaggagtttgagagcaataccagcgatgcctgggacgctggggaggacgacgatgagctcctggccatggcggcggagagcctgaactccgaggtggtcatggagacggccaaccgtgtgctgcgtaaccacagccagcggcaggggcggcccacgctgcaggaggggccagggcttcagcagaagcccaggcccgaggcagagccgccctcaccccccagcggcgacctccggctggtgaagtcggtcagtgagagccacacgtcctgtcctgcagaaagtgccagcgatgccgcccctctgcagaggtcccagtctctcccacactcggccaccgtcacgctgggtggcacatctgaccccagcactctcagcagctcagcgctgagcgaaagagaggcctcccggctcgacaagttcaagcagctgcttgccggccccaacacggaccttgaggaattacggaggttgagctggtccggaatccctaagccagtgcgtccaatgacgtggaagctcctctcaggttaccttcccgccaatgtagaccggagaccagccactctccagagaaaacaaaaagaatattttgcatttattgagcactattacgattctaggaacgacgaagttcaccaggacacatacaggcagatccacatagacatccctcgcatgagccctgaagcgttgatcctgcagcccaaggtgacggagatttttgaaaggatcttgttcatatgggcgatccgccacccagccagtggatacgttcagggtataaatgatctcgtcactcctttctttgtggtcttcatttgtgaatacatagcctttccaggttgtggtcggcctcagattcccatccttgctgtgatctggagagatgagccttacccgaggacagatgaacagattatcctcagaagatgaggacatatccaagacaactacacctttgcccaacctgggattcaaatgaaagtgaaaatgttagaagaactcgtgagccggattgatgagcaagtgcaccggcacctggaccaacacgaagtgagatacctgcagtttgccttccgctggatgaacaacctgctgatgagggaggtgcccctgcgttgtaccatccgcctgtgggacacctaccagtctgaaccggacggcttttctcatttccacttgtacgtgtgcgctgcttttctcgtgagatggaggaaggaaatactagaagaaaaagattttcaagagctgctgctcttcctccagaacctgcccacagcccactgggatgatgaggacatcagcctgttgctggccgaggcctaccgcctcaagtttgcttttgccgacgcccccaatcactacaagaaatgagcccaggcccacccgcagctggcctcactgtcccgggtggcgcgccccacctgcctggctggtggtaggcccctgtgagctggtcccgggctgctaaaaggccttgtgaggtggccccaccctccaggggagctggtgaagatgggccacagacctggtctagggctgacaaagacagggacagcctttgttttctgagataccaaagagagccaggggagggccccgggttcggcggccagaggcaggtcaggggtcccctctccctctccctgcaatgtccttgccaaatgactgcctcctgctgcccctagtccggggcagcctaggaggccgaccctctttggagtcctgctgtctgggtgccagggccggaacgaggtagtggccatctcatacctactctgaaatgcaaaacttctattctgttgagtgaaagaataaaatgtagacaaaatctagaccg

SEQ ID NO: 1411 - DNA, 1922 bp, Homo sapiens
actcacaagcttctcggccccgaccttcgccctgggaggttctggccaggtgccgggaggggcgctgtgtcgagggcgatccccccaaagcagcgtcccgtgctaaaggtaccccagggtactgcctcccacatctcagtgcaggctggatgaattggccttgtctgtgtttcctgtctgagtgtgagtgtgagtgctccctgcgatggaatgtcgtcgtgtccaagggttggttcccaccttgcaccctgagctgaggggataggcttcagccaccctcgaccctgaactggaataattaggtactgcttaggatgaatatgatttggagaaattccatttcttgtctaaggctaggaaaggtgccacacagataccaaagtggttaccacccagtggcccctctgggatcaaggattttaactgacccagccaaagtttttgaacacaacatgtgggatcacatgcagtggtctaaggaagaagaagcagcagccagaaaaaaagtaaaagaaaactcagctgtgcgagtccttctggaagagcaagttaagtatgagagagaagctagtaaatactgggacacattttacaagattcataagaataagtttttcaaggatcgtaattggctgttgagggaatttcctgaaattcttccagttgatcaaaaacctgaagagaaggcgagagaatcatcatgggatcatgtaaaaactagtgctacaaatcgtttctcaagaatgcactgtcctactgtgcctgatgaaaaaaatcattatgagaaaagttctggttcttcagaaggtcaaagcaaaacagaatctgatttttccaacctagactctgaaaaacacaaaaaaggacctatggagactggattgtttcctggtagcaatgccactttcaggatactagaggttggttgtggagctggaaatagtgtgtttccaattttgaacactttggagaactctccggagtcctttctgtattgttgtgattttgcttctggagctgtggagctcgtaaagtcacactcgtcctacagagcaacccagtgttttgcctttgttcatgatgtatgtgatgatggcttaccttacccttttccagatgggatcctggatgtcattctccttgtctttgtgctctcttctattcatcctgacaggatgcaaggtgttgtaaaccgactgtccaagttactgaaacctgggggaatgctgttatttcgagactatggaagatatgataagactcagcttcgttttaaaaagggacattgtttatctgaaaatttttatgttcgaggagatggtaccagagcatatttctttacaaaaggggaagtccacagtatgttctgcaaagccagtttagatgaaaagcaaaatctggttgatcgccgcttacaagttaataggaaaaaacaagtgaaaatgcaccgagtgtggattcaaggcaaattccagaaaccattgcaccagactcagaatagctccaatatggtatctacactcctttcacaagactgaactttgtaacatgttaaggtacaaagccagaggactgtgctattcaaggactactgtaagtctattgtttctcaaaagacaatgagaaaaaaagaagagaatttgtatttcctgccgttttgtcataggtgagctcctttgtgcattttaagcacatgtaagtggttcagcacagtatgcctttttctgtgctttgaaaacttgatatgctcaagcttgtttgaatttattacatctaaccattttgcttgttccttgatttttataagcattcaattaagttagtattatgtcaagtaattttgagaaaatgtaacttgacattttttgcaagtaaaaaaaattgtttatttgtttaggcttagtaaaccagttcccaaacac

SEQ ID NO: 1412 - DNA, 2958 bp, Homo sapiens
ctttctcctggggaggcagaccacagagtcaaggaactaataacaaattgaatttctccagtataatcagagtcaattattcctgtatgtatagtaacaccttttaatttttttttgttgagatggagtctcactctgtcactcaggctggagtgcagtggcacgatcttggctcactgcaagctccgcctcccgggttcatgccattctcttgtctcaacctcccaagtagctgggattataggcgcccaccacaacacctggctattagtttttgtattttttagtagagacgaggtttcaccatgttagccaggatggtctcaatctcctgacctcatgatctgcctgccttggcctcccagagtgctgggattacagtcgtgagctaccacacctggcacaccttttaaatttagactagaccttccaagtaatagaccgactgttcctgaggataagggtctcctaactcccatggggaccttctttggtggctccccaggaagtgtgtccggaattggttccttctggtgggttcttggtcttgctgacttcaagaatgaagccgcggaccctcatggtaagtgttatagctcttaaagatggtgtgtccggagtttgttccttcagatgttcagatgtgtctggagtttcttccttccggtgggtttgtggtctcgcttgacttcaggagtgaagccacagaactttgcagtgttacagctcttaaaggggcacgtctggagttgttggttcctcctgatgggttcgtggccttgctgacttcaggaatgaagccacagaccctcacggtgagtgttacagctcataaaggtagtgcagacccagaggaagcagcagcaaaatttattgtgaagagcaaaagaacaaagcttccacagcatgaaacagcaccccagcggattgccactgcggcttgggtggccagcttttattcccttacttggccccacccacatcctgctgattggtccattttacagagaggtgattggtccgtttttacacagtgctgattggtgcgtttacaaacctttagctagacagagtgctgattgatgtgtttacaatccttaggtagacagaaaagttacccaagtccccacccgacccagaagcccagtcggcttcacctctcctaaggagatggtaattgtgctgtagaggtctatggcagcactgcctgctgaagtgggggacaattgttgcacgtttgtaagggcatggctgtgccttggtttgttgaggggctcgaggcaggcctctcttcccgtttcctgaaagaggttgtccatccttgttaaatttagaatgacactgacttgcccagtgtttgcttttcttacactggagacatataccgggacttttctgttgactgatggtagtaatggttgccttttgatttccttttctacattcctttcttgggtgtccaaattgaccacaattaaagcaagggcctgagaaatggggtatattctttcctactcttaatccagccatagcctgagctaaaagagttgccttatgtaagttacctccaatgccatcgcaatccttaatatatttagctaaatgagccgtccctctcaggggtctaatagcagtttgacactgcactagcattttcgtatgcaggaagctgtattacaacatcctgagccgttttattagtaatggctttatacacagcctcttggagctgagcaataaaatcaatatatggttctttaggtccttgacggatagaactgacagaaggatgtttttcgcctgtaacatttatcctttcccatgcccataagcacacaaagcgcagctgaacaatggcagcatcctccattactgcttgatttctctaatcaaccccagttagggccaactcccattaactgttcaaaggaaacaggcacaggtggctgtgcttgtatgttttcccctgcctgagtttgagcttcatcagcccaccaggttttaaactgcaaatactgagatagggtgagaacagattttgtcaaagtatcccagccacatggtattaatctattatcaagagccatattttttaatagagtttgcacaaaaggagagttcggtccgtattgactaatggcttgcttaaattcctttagtaacttaaaaggaaaagtggccaattagctgtattctgtcttctctgctggatgatagtaacaggaaattgccatgcttcaaggtctccctcggctctagctttatgaatagaattttctatagcatcaccaattgctccaggttttaatattgcaactataggagtagtaagtttttcagctaattcatcttctcacccattaagaggagagagaggaggtggccattcacttaatttagcagggggcgccgacgggctagtaaaacatactttttttagttttcctttctttaatctcctccggtagctgttcctcacactcagaatctgaagttagttttttacactcatcctcctcttcctcatctcaatctgcctcatcatctgtttgaaatggctcaagagctgcctttattagcgcccacatgaccaaatagaaactggaatatctgctccctctttatacgccttttaaaaatctctgccgattctctcccattcatccgactccatagtcgcttgttccggaagccatgggcaaaactgctttactgtactaaagagtgataacaaattctgagtactaactttcactccccctcttcataataaatgccaacaaattctgagtactttcactccccctcttcgtaataaatgccttaagaaatttaaataaggccgggcgcggtggctcacacctgtaatcccagcactttgggaggccgaggcgggcggatcacgaggtcaggagatcgagaccgtcctggctggcacggtgaaacctcgtctctact

SEQ ID NO: 1413 - DNA, 2182 bp, Homo sapiens
atgtgttctgctttcccagggtccatggcaggagggctgcagcggcctcatttattcatttgtgccaggcaccctgttaatcatggagataccacgctgacctgccttcaaggagaccatattctagtaggagagctgagcagcgagatggccatgtgtagatggtgctatatgaaagatcaccctgatgtagaagccaggtggggcatcttggcttcctgctccttttctttcatatgacaccgaaaagtctctggatattgcagttgggccagacctgcagaaaaagagaacattcagttaaacagaagaacatattctggagaaaatggggaagagagtgaagacacagctggttcaagggaaaaatgccaactgagcacagagagaaaaatgcctgctgagagctccacaaataaagaaacaacttacataaagtggtgagaagcacaggagaggacagggccggggctgagaggctgaagttccaggaccggttctgcatttgctgctgtgtgacatggggccagtgacttcccatctctgggcttcagttttctcaattatcatctattctcctgctttctctataacattcatttattgattccttgattcaagaatatttcttaagcacccagtttgtgccaggtacagctgtcagtgctagtgattcagcaatgaacaaagtggacaaaaagcacatccttatgtgagccctcatgcatgcagcaaacacaatcagtgaaatatggtgcagattcatttgtaataaggagaaaacagaaagcacagaaggggtcaggcagtctaatctggaagggtgacctctgagtcaagacataaggaggtgagggagtgagccaggaggacatctgggcaaagcctgctccaggcagaggggacagccagtgtgagagctgccctgaatgcaaagcctacccactgccccttcttttggtgtctccactggcctgctggctgcagcagccttctatcagacctcccagcctccatctcctcccctggggtcttctagccccacatggccagccagggtgactctaaaatataagtcagaccccaacacgtccctgctcaaaacccaccaggtgctcccaccacattcaatgcagtgcaagtcctcaccatggtcctctagcatctctccaagcccatctgcctcctctctccctcacttgctcctttccagctacactggcctctgctgtacctgggacatgccaagcaagacccagccttggggtctttgctcacggcctctgcctggatgttcttcccccagttatccacaggtctggcttcctgactttattcagaggccaccctctcaagaagacacccttgactgtttcgtctaagcaagaccctgtcacatccaaccactcgcctcgctttattttcccttacagcatttatcatgacctcccatcattttatatatttataatagtagatatgatcaatggatcagatgtttattatgtgatggacactgttctaaacatcctagaattaattcatcttctcccaaactccttgagattggtattgccattgaccacattttatatatcaataacccaagatagagagaggttaagaaatttgctcaaggtctcccatctggtgagtgtcagatcaggattcaaaccctggagcttccattatgagccacaacactctagaccagggctgcccagtagaactttgcaatgatgaaaatgttctgtgtctgcactgcccgaagtgactgccactggatatgtgtaagtgttgagcatttgaaatatgtgtgaccaaggaactgaattttgaattttattgcatttccatgactttagatttaaatagccaggctagtggctaccaaattgtacatagagccctcgcacctcttatttgctcctttgttaatttctgtctgccacataaggatgaaactggcctatgcattagtttcctcattttacagtaagggaaacacccctggtacaaagtaaatactcaatgctcattaatcaccatcatcatcaccattattataacattatcattattagtctccatgagatcgatgactttatgtttgttcactcctgaatcccattacattctttagcacatagcaggtgttcaataaatatattatgaatgaatg

SEQ ID NO: 1414 - DNA, 1946 bp, Homo sapiens
ctccaatacctaatatttaaaaattaccttttggaaactgatttataggacatattttcttccaggtatcttacctttatattgcagaaatccttaaccagaaacaaacacttctgttttctaaatgaaacaccattctttctgattatccgattctcattttactcacgggtttgatctagttatattttttccagctttattttcaaaatttttccatttttttgtgaattttattgcgataccaattatgaaataaaatcttcagttctcatctctgtatcacctcttaccattagatttaatttagtcatggatgagcctaattattgatggtaataacaatctcaactttaaacttggaagaagctacttcttcatttatggattgatttggattatctggcttttaatctatataaacaacagctctttgaacaagtcatttttattaagtaggaaactagactttcatagcttccatttagcattgttacatagaaaacaggaagacaatatcttaagagtatggaaattgaaaatcaaacctaatcttagtgcatgtaatccttttgtctgaagtgcaactcatttttcttctttcttgatattcttgattttcaaagaaatactgatttcagcatttatttttcttagagagctaggaattaataaccttcatcatattatcaaaatttttttaagtgccggacagctatactttgaaggaagcagaattgaagatgggaagttcattgggactgtgtcttggaaaagcaccaagttcgtctcagttgttcctgttttttgcaatggggagtgacgttcaacctgggacagaaatggaaatcgtagtagaagaaacaatatctgtgagagattgtttaaagttaatgctgaagaaatctggcctacaaggagatgcctggcatttacgaaaaatggattggtgctatgaagctggagagcctttatgtgaagaagatgcaacactgaaagaacttctgatatgttctggagatactttgcttttaattgaaggacaacttcctcctctgggtttcctgaaggtgcccatctggtggtaccagcttcagggtccctcaggacactgggagagtcatcaggaccagaccaactgtacttcgtcttggggcagagtttggagagccacttccagccaaggtgagaacagaatgggatttcagcagccagtgcatcataaagagaagtaaattgactgcctgtgctctgagagtcaattgatatatttatttttaaaacgtaagatcttgaaaatcaagacctattaatttcataagtcattccagacatcacataataataacactgtgccatttctgtacgtgctctgtaacctctgtaaagcactatatatcttgttgtttattattatatcaatatattacactttccaaagacttttatgtatcatctctcaagatcctcagggcaacaggggccccatttatcaccacgtaccagaatattgagacttcatccaattctaatgatgtcattttagcccacaggggcagagaccaggagtccacatcctacatgtcttccaatctttctgcctcaaaaccctcaggaactgcttctagggcatttgatatcatctcactgacttctgagaaggaacatagacaagtacaagcatgttgtcttactcagcactcagccgcacacatcacgatgggcagaagtcactatcagtgagttctgttgcccttgtacaaagaggagttccacttcattataaagaaatggagcgagtatatttttaataggcccaactctttagctatgtttttctttttatcaggctttacttatttagtttttctagtgccttgaagtatattacttatatttctttttaatcttttcagcctcagtaataaaattaatataaatgagtc

SEQ ID NO: 1415 - DNA, 2162 bp, Homo sapiens
cttcacctggggattgcaaaggaagtgagaacatccccgagcaagaccaaaaattgctgaataaacacaaacccccttgagaatcacgccaagaggtgctgcctcttcacctggggattgcaaagcctgaccgccatggacagcgtgcccctcatctgtgactactgctctggcttcagcaaggtgggatttgcaggaatggaaagcccaatgggcatgttccccactgtcctcgggaaacttcggcacgatgtgagtgatgtcggggtctcctccctgtggggtgctgctcatccagaggtggcctgctggcccggtcaaccccatcccctctgccacagggcggccaaggcaatctgctgagcggggcgtggtgggtgcgaacgtgcctccacaaatccaagtcgggagcacctggcttgataacatacagatggccgggccacctagagtctctgcctcagctggtcgggggtgggagatggggtgggcaaggccttgcccctctcaccactcccagcatgcggcccactctgagagccgcaggcttagagagagcagcgatgtgtaaatcagtaaagtggatgcattgtgaaaaatcagtcttactgcccgtctcccatctctggctcttctcacattcagagaggtatggacacagagaaggagcaatttgcctttaggctaaacgggagtccattagggtgagtggcaatggacactcagcctccgtgataggaaggcagtaggagggcaggtggggactgggacacaggccctccaagaggcccatctctgacatgccagcaagtggatcccacatcgccagatcttcctgtgtttcaagggaatttagaaacacaggtgtttctattgtggtaaagtatacacagtgtaaagctgtgttaactgcacagttcagtggcatcaagaacattcaccaccatctatctccagaacgttctcatcctcccaaacggaagctctggccccattaaaaaccaactgctcatccccctcccccggacaacacagtcgcgtcataactgaaactgggcgagtgggtctgagcctggctgcatgccaggtagggacagagatgcctcttctcccggaagaggaaccacctgctccgagaggtgacttctcgaatccacatggtgacaaagtggtgggggcaagaccccccagtgcaactgcgttcccagctcatgctctggatcatggagctcatcctctggaagttccaatcgtccgtggtagggagcagcgtcgtgacgtggaagatctcagatgtcgcaggacctcatggcgatcactcttgctctttgcagcacttggagcaaattattggcagtgtttctaattatccaagatacactggctcccggagctgtgacagaggagaaaatcccgtctccctctctaagaggataaaatgcacatggatgctgggagccagtggatttcctcctcgttgtccaagtggcagggatcatagcagggaccaccctggcaaatcgcaggtgcctgcactcgagctagccaaccagcttgctgcttggggattatggagctcagtggttaagagctggggcttcagggccggggagactgaggctccaatctcagccttgtcctcagcacatgcatgactcagcgcaagggtgctgctgtggcagaggcatctcttttgcataatgtgattgtccaaagtatgtatctcagagattcggcctgaaggttaaatgagatgagtgaatgtatgtttggtgcagtttctggaccatagggagtgtttagcaatgatgacgatagcagtgatgataacaatgactagtatattcgtgtattcgcttaaaacaacagaaatgtggccatgtgcggtgggtcacgcctgtaatcccagcactttgggaggccaaggtgggtggatcacctgaggtcaggagtttgagaccagcctggccaacatggcaaaaccccgtctctactaaaaatacaaaaattagctgggcgtggtggcacacgcctgtaattccagctactctggaggctgaggcaggagaatcgcttgaacccgggaggcagagggtgcagtgagctgagatcgcgccactgcactccacctgggcgacagagtgagacttcatctcaaaaac

SEQ ID NO: 1416 - DNA, 2756 bp, Homo sapiens
ctttctggtctcggccgcagaagcgagatggtgagttgtgactgtggtgtttgtgaatcgcgttccatcctcgtcctttgtgcctctctgtttgctgtgcttggggggctggcaagattccggataaggggaactggtgggctggaaagaggcatgcggtggccctcaagagccagaagaatgactgctaactggtgcctggggggcctatcccgccgtaattgtggtgctagagccgcattgtgtcctttgcctcggtccaacctttggagacctttcacggctctagccttggttgggagccgagggaaggagtttgggaatgtttggctctgtgtaacaatgaaataattcattggtgatgctctctggccggagtctgtaaagataaggtgcatttcagaacattgcaactcttgcggagggttttaggtaacgtgaaatgcgggtagtggtctctgacttggcattcgtggaaagaggcttctcccgcagtttcgatctttacgattgcctttaaattttatcagtaattggtttcccggagaactcgagtaaatctagaagttgccaggtttcagaactatttattcctttaatgtgcagacgaagggaacgtcatcgtttggaaagcgtcgcaataagacgcacacgttgtgccgccgctgtggctctaaggcctaccaccttcagaagtcgacctgtggcaaatgtggctaccctgccaagcgcaagagaaagtgtaagtaacatttttcaggccaactgtgttagcttttgtttgtattgcacttaagtgggggcataggtttgaactttatttggtgcctatcttaaaactcgtacatctgtatgccgatgaggtggcataaaactcgtgtgttaacaacacctacaaggtgtgtgggagaacaccgtttgaaatcttttctgaacttatgttttagataactggagtgccaaggctaaaagacgaaataccaccggaactggtcgaatgaggcacctaaaaattgtataccgcagattcaggtacagtttgtatgttcgatcataattggtccagtgggcttgaatgaaaccctcgtgtttacttgtaaaaagataacagtaccctgatggttactggggatgagatgttggaagctttttatttattgttgtttttgaggcagggtttcactatgttgcccaggcttgagtgtagtggcacgatcacggctcagtgcagcctcagtctccccagcctcaggtaatctcatctcagccgcccgagtacccgggactacaggtgtgcgctgccacatgcccagctaatttttgtatttattgtagagaatgggatattgtcatgttacccaggataatctcggaactcctgggctcaggccagatgttgaaagcttttatcttctgccgctgtaaccttgacatcagttagtttggattttattagtagttttttcactaaacagtagtataaattaaataacaggagcattgtttgaactagggtcccaaagtgttgatatttattaggtttaattggtgtcaaaatttgtcaagacagtagtgaataaggtctggagtcaggcttggttcaacctttagtatagtggctgtgggcaagagtgctgtagaaaattgccctggttgctgctgttgccttgggctcttgttactcaagtcttggccttagagttataaatgcagaatctcagctccgccgtagacttagctgagagaacctgcatattaaagagtagtttctaagagattaacccatctaagatctcagctaagattcagaatgatgcagacttaactttaaagctggtgctccttccgttactatgttctatttcagcaattctcagctattgatactttgggctggataattctttgtggtgggattgtccagtgcaaaattgaatattttgcagaatccctagcctctacccactcagtctccggagtgtccagttttaaagatagcaagacagttcagggctttgtagacacccataggtgtgttcatgtgctgaagcaactttctttgcatttagggtcataacgtttttgtgggcttaatgttgagtggtctgttagtacaatataggagttaagagcttgaactgaagccaggcttttaaaagtaggatagttgacctttcttagagtagatacttcttagagtagatacagatgttaaataagttaaaatgcaaagctcttggtttagaaaatgtctgccattaaacatgctaattgttttttccttgcttagtgaaagtagttgggatctattctcagtatagggaaccattttcacaaataatctgtgatctcttgccaaatatgaacaaacatactggcccaatgactagtatagccaaataagtttttgagcctttattgcagttgcagttaactatatccgaaaatgggtatctttaagcaaagtgaagaatttcagcttatcagtgatgttgtaaaaataaatgtctgaacatatgaatgcagtattgatttcagcatttaactgagataagcgcattgaaatctgtttaacaaaaattaaaatgtatgcatcgatgttgctgaagtaacttgttcttgtttttgacatcctgcaggcatggattccgtgaaggaacaacacctaaacccaagagggcagctgttgcagcatccagttcatcttaagaatgtcaacgattagtcatgcaataaatgttctggttttaaaaaat

SEQ ID NO: 1417 - DNA, 4313 bp, Homo sapiens
ggtggctaagcagcagcaagggcctaggtgaggtgggatcgatggatgggccacaggtgtcctttctcctcagctgccaggtggaacagtgcaggagaaacaagctgtggcaggaggcctgggggcaaggaagtacaaggggcagctcagccggccacagacccaagctgggaggacccaaggccatgaggggttgatgggccaggaggctgggcagagaggagccaagtagctggagatgaggtgaggtgggagaggtagggacctccaggcttgtggtcagaggaaggcatttcagatctgagcaatatgcgtgagccccaggtgagtgtgagagccaagtcaggtctctgctgagatctaggtggttacagtggaggggaactctgagtggatgggggaggcatagccatcactaccaatgatgggggtaggggggcatcatccagggccacggggaaaggggatgggcattctggaactcatcccttcctctgttcctttcatcacaacaaacgttatggagattatgcgataccaggcactgtgctagctgatagggtgggggtcagagtacccagcgaggctagacattgtgtgggattcagagaaagcatataatagggctcctcccacaagaagcttgtggccacaccagggagagagaatggatgcacatgagcatacgaaactcttagaaggacttaggcaggaagcacaggtgataggcagaatgtgtgatatgagggtaagggctgagcactgatgaatcccctaatgattttggtaaaaatcattaagttaaggtggatacacatcttgtcatatgatcaaatggtttcgcgaaaaatcaataatcagacaacaagatgtgcgaactcgatattttacacgactctctttaccaattctgccccgaattacacttaaaacgactcaacagcttaacgttggcttgccacgcattacttgactgtaaaactctcactcttaccgaacttggccgtaacctgccaaccaaagcgagaacaaaacataacatcaaacgaatcgaccgattgttaggtaatcgtcacctccacaaagagcgactcgctgtataccgttggcatgctagctttatctgttcgggcaatacgatgcccattgtacttgttgactggtctgatattcgtgagcaaaaacgacttatggtattgcgagcttcagtcgcactacacggtcgttctgttactctttatgagaaagcgttcccgctttcagagcaatgttcaaagaaagctcatgaccaatttctagccgaccttgcgagcattctaccgagtaacaccacaccgctcattgtcagtgatgctggctttaaagtgccatggtataaatccgttgagaagctgggttggtactggttaagtcgagtaagaggaaaagtacaatatgcagacctaggagcggaaaactggaaacctatcagcaacttacatgatatgtcatctagtcactcaaagactttaggctataagaggctgactaaaagcaatccaatctcatgccaaattctattgtataaatctcgctctaaaggccgaaaaaatcagcgctcgacacggactcattgtcaccacccgtcacctaaaatctactcagcgtcggcaaaggagccatgggttctagcaactaacttacctgttgaaattcgaacacccaaacaacttgttaatatctattcgaagcgaatgcagattgaagaaaccttccgagacttgaaaagtcctgcctacggactaggcctacgccatagccgaacgagcagctcagagcgttttgatatcatgctgctaatcgccctgatgcttcaactaacatgttggcttgcgggcgttcatgctcagaaacaaggttgggacaagcacttccaggctaacacagtcagaaatcgaaacgtactctcaacagttcgcttaggcatggaagttttgcggcattctggctacacaataacaagggaagacttactcgtggctgcaaccctactagctcaaaatttattcacacatggttacgctttggggaaattatgaggggatctctcagggctgagcaaccaacgcagaggaattggagaggccagaataatcagaaaagctttggagggggtaggatgtgacctacattttcagaacaagagtggagtagaaaaggcattccaggtgggataaacagcggaggcaaatacatgagagggaattaaatctgttgtgatttatttgatagtaagattgacctgcctggcatcgagttgaagtagaggcaaaagacactgaatatttgcaaggaggtccttagaatggagtgatatggaaataaacagccattataggttcttgagcaggaacattttgcatgaaaagcactgctttggaatgatgagtctagaaaggtaacactgacctctctaaggtggcattctagggagagacctgagtatttggggctgagattgagagaggagcttacttttcttggtatatttttatttactattcaagttctgcatcatgtgtgtttactgcctatttaataattatttttaaatttaaagaacccattgtggcagcagggggaattctctaagctcagttactaaagggttatgaagctgggtatggtagcacacacctgtagtctcagctacttgggaggctgaggtgcgaggatcgcttgagtttaggagttagtgggaggatttcttgagcccaggagttaagagaccagcctgggcatcaaaaaaattaagttaaattaaaatgttaaaaggttctgtatatggtggagatggaggagatcgggggaggagatgagaaaggggcaagcataagtaggaacaaatgcaatatttccccagctgcgcgagggcaggagcaggaagaactaaacccaattaggaacaacagaggacagatgagtagatagcagacatctgacgggaaatggccacgccacacttctcacccaggcagttcaacgtaggcaatttctgagtgccctggtattttttgtgtaagtgtctagaaaacagatcacaaagttagccaaattaaaaaggaagcagggagtcctatttctccgagaagaaagatttacaggtgggatctcaggcaggagccaagctggagaagcaggcttgattccttgtagtgggtgaggagactgctgggagagggcagggaagcagagaccggcaaaaagctgccccaacaagaatcctgtgcctgccaacctggtttacaaacatttcccactttatccccctcagaaagtcacagcacccatttcatgttctgtgaggctcccaaggagggaaacttctagtttgctgtcctttacctcacccctgtgaccacagcactaatttctcatgaattcttgttaccaatgagatacaaatgtttggggagctctggcctggtctgattttgagctctgtggaaatacgcagaccacgggggaggaggccgggaaatggactcggtttgagggcttgctcaaggatgcggttttgtttttcggctgatttactccaagacagccagagattgttctgtcgttgccacagaggtgactaaacaggaaggtaagtttgaggtaggaagaaaaccatccccaggagtttcatgtagcaaagaaggaagtagctgttacaaatgggtgacagtttacatgtgggtctaacagtctcagctctgttgttcaatctttcagttatactcagagagtaagcgggaggagccttggggctgctattgagtgcagcatcctgaaggctgttcttcaagtgttactcagactactatcccaagagcactcaaggcagttcttcctccatccctgctccctagctcccttggctttgatgagtttattacaaaagggctattcactttagaataggagggtaattaagactcctggtctgcagcccagatttactgcattttacaagttaataatatgatttttttttgtagctccaattgattggtaacagaagatgaagacaacagcataactaaattattttaaaaactaaaaagccatctgatttctcatttgagtattacaatttttgaacaactgttggaaatgtaacttgaagcagctgctttaagaagaaatacccactaacaaagaacaagcattagttttggctgtcatcaacttattatatgactaggtgcttgctttttttgtcagtaaattgtttttactgatgatgtagatacttttgtaaataaatgtaaatatgtacacaagtg

SEQ ID NO: 1418 - DNA, 2016 bp, Homo sapiens
agcacacaacaacttccaaatgcctgaaccgcagtggccagacattcctccagaacctcctcccccaggagcttgctgcaagtgccagaaatctgaccaccagggcaaggaatgcctgcagcccagggattcctcccaagccatgtcccatctgtgcgggaccccactggaaatcggactgttcaactcacctggcagccactcccagcgcccctggaactctggcccaaggctctctgactgactccttcttggcttagtggctgaagactgacgctgcctgatcgcctcagaagccctgtagaccaccatggacaccgagctttaggtaactctcacagtggagggtaagtctgtccccttcttaatcaatatggaggctacccactccacattaccttcttttcaagggcctgtttcccttgcctccataactgttgtgggtattgacagccaggcttctaatcctcttaaaactccccaactctggtgccaacttgaacaacactcttttatgcactcttttttagttatctccacctgcccagttcccttatcaggccgagatattttaaccaaattatctgcttccctgactattcctggactacagctgcatctcattgctgcccttcttcccaatccaaagcctcctttgcgtcctcctcttgtattcccccaccttaacccacaagtataagatacctctactccctccttggcgaccgatcatgcaccccttaccatctcattaaaacctaatcacgcttacccgactcaatgccaatatcccatcccacagcatgctttgaaaggattaaagcctgttatcactcacctgctacagcatggccttttaaagcctataaactctccttacaattcccccgttttacctgtcctaaaaccagacaaggcttacaacttagttcagaatctgtgccttatcaaccaaattgttttgcctatccaccccgtggtgccaaacccatatactctcctatcctcaatacctccctctactacccattattctgttctggatctcaaacatgctttctttactattcctttgcactcttcatctcagcctctctttgccttcacttagactgaccctgacacccattaggctcagcagcttacctgggctgtgctgccgcaaggttccagggacagccctcattacttcagccaagctctttctcatgatctactttctttccacccctccacttctcaccttattcaatatattgatgaccttcttctttgtagcccctcctttgaatcttctcaacaagacatacttctgctccttcagcatttattctccaaaggatatcgggtatccccctccaaagctcaaatttcttctccatccgttacctacctcggcataattcttcacaaaaacacaggtgccctccctgctgatggtgtctgattaatctcccaaacctcaatcccttacaaaacaacaactcccttccttcctaggtatggttagtgcggtcagaattcttacacaagagccaggaccgcaccctgtagcctttctgtccaaacaacttgaccttactgttttagcctagccctcatgtctgcatgcagcagctgccgctgctttaataattttagaggccctaaaaatcacaaactatgctcaactcactctctacatttctcataacttccaaaatctattttcttcctcatacctgacgcatatactttctgctccccggctccttcagctgtactcactctttgttcttgccccaccttaactgagtgattaaccctgtgaatttgcttctcctggctcagaagctcccccactgagcaccttgtgacccccgcccctgcccaccagagaacagacccctttgactgtaattttccattaccttcccaaatcctataaaacggccccacccctatctcccttcgctgactcttttcggactcagcccacctgcccccaggtgaaataaacagccatattgctcacac

SEQ ID NO: 1419 - DNA, 3091 bp, Homo sapiens
aatgctgtcaggagcaacatgccacccttcagtcctgcatcttctgtggtctcagatactgcacacaacagacggatcagcagctcactctcaggaacagggctgccaatcccctagaatatacaagcaagtccgggcgatgctggaccctttcccttctcagctgatcacttgtttccaaggcccttatttcctggggcacatggcctatgacattctcccgatgccagttgccgtgtcagccacgttctccgatggaaacagtagaaacgaactgggatcatgtcagcagatggaagaagggaggaagggggagaggagatcattattgccaggtgatacagaagagggctgagccgccagccttgagaagggagactctggactctcagggtgattcagggaaaggtgactcagcccaaacaccttcagtcccagaggcaaattcctggaagactggggcaagagccaacctgaacaagaatggaggtggaaagggtgggaaggagggaagctgtgagctacctgaagtggggcagggggccccccagaggatgggatgctatgaaagtgaaaacatggctacacaccctgcctcatttatctattaccagcccccccaaaattggtgtcttaaaaccattatcatctatgtcatgagtctgtgcggcgagttgggtggtccttctgcctcccctagtctagctgtgtctgcagtcaccggggactggcccgggctggccagtcttccaggctcatgtccaggccgcggtgggtgcctgctatcagctgagactgtcagtcggagcatctccacctcccctcataggacctcctcatgcaccacgggcatctcagcataaagtgacctccccgtgcaccacaggcatctcagcatggagcgacctcccaacgcaccatggacatctcagcatagagtgacctccccacgcaccatgggcatctcagcatggagcgacctccccgcgcaccacaggcatctcagtatagagtgacctccccacgcaccacgggcatctcagcatagagtgacctccccatgcaccacgggtatctcagcatggagcgacctccccgtgcaccacgggcatctcagcatggagtgacctccccacgcaccacgggcatctcagcatggagcgacctccccgtgcaccacgggcatctcagcatggagctggaacagaagacaggacattcgatggtgcaagtggaagctgcatacaggtcaagagccagcctgggaggtccccatgcccctctgcctcatcctgttgaccacagctaatcacggactcgcccaaatttcacaggagagggaacagcctccacttctaggtgggagtggccgagaggccatgcctttaaccagcactctcctcttcctcctttctattcctccctctccattctctcttctgctctctcttgtgccacccgctgtccacacttggccccgagcaagggcaagcggataaagacccctgaggtcagtgatgagaggactcatgcatatcgaggacctctttggggaaggaggacccaaagctacaaaatcctaggaatggcaggaggcacagggagaggcaagggagtggagagtcctggcaagcccccagcacacaccctgggattagggaggctcccagccagcaagaggaagcttgacccagggggagctgctcccccagccccagcagcctcgctgaggcagagccaagaggcatgtgggcatgccaggaagtccccctcacttgagggctcagctcctgcaggctcggagcctgctgggggcaagggccaggtccttgggccctgccttcacgtgactaatttcctggagtcctgccaagtacagtctgggtccagggcctctgttaaccttttctcacttggttacacctcactgggcccaaaggtgttgcatttgccctttggctcccagagacatgcaccacaagggctgtggaccaatgtcctttcctctaacccctctccgctgcctcctgactgcaaaacacccatttctcccttgggagggtggggactctggctgatggctcagccccacattcagggcaaaggacagttggggaggattgagctgtccgccccctgcctcgtcccccaggtctcccaccagacagtgaccaacaactgctaaatccctgaggcgcccctcctccactcctcctcaactgtctcatagattttggcagctgcctctctctctctgcctccacctagtaccctctccctccatccctcaccccttcctatcttcctctctccctcctcccgcaaggtctccctgggcaccttccaggcccaggtgctgcacccctagaaatgaccagggctcagtccctgagctgacatcacccctcccaatcctgcaggccaggggagagacagagccagctggcaaagccctcagcaagtggcagcaagacccccagaagacactgccaagtgctggaagatggtgggcctttccatctggagaaaagctacgataaataaaaataaatattactcatcaataaaaagaaatgagctatcaagccacaaaaagatatggagcaacctcaaatgcatattgctaatctaattggaagaagccagtctgaaaaggctgcatactgtacaattccaactctatgatattctgcaaaaggcaaaactatagaaacagtaagatcagtggttgctgtgggggttcgggatgaacaggtggagcacagaggagttttagggcagagacactattctgtaggatcctgtaatggtggatacctcgcattatttctgcaaacccataggatgtacaacaccactagtgaactctaatgtaaattatggactttagttcataatagtgtgtcaatacttgttaatcagtggtaacaaacgtactactatcctcatgcaagatgtcaatggggaaactggtggggaggtgggggtggaggtcacgaggtcactgcaaactctgttctttctgtgcaattctgtaaatgtaaacctctaaaacagaaagtctattttttaaaatggtacacaaaataat

SEQ ID NO: 1420 - DNA, 2370 bp, Homo sapiens
tgaaagacaaggccaaacatttggataaatgtttgaagatgctcgatatgagctttaaagatgctgaacggggtgatgacacctcctgtgaaaacctgcttgatgctttttcaataaagttatctgagacacatggctatggggtacaggaggaattcactgaggaaaacaaattactagaggcttgtattttcaaaaataatgaactccttaaaaatattcaagatgtgcagagtcaaatcagtaaaattggtcttaaggatcctactgttccagctgtgaaacatcggaaaaaatcattaatcagactggataaggttctagatgaatatgaagaagagaagagacatttacaagaaatggctaattctcttccacacttcaaagatggcagagaaaaaaccgtgaatcaacagtgccaaaatacagtagtcttgtgggagaataccaaagccttggtcaccgaatgtcttgaacaatgtgggagagttttggagctcttaaaacaatatcagaattttaaaagcatcttgacaactttgattcaaaaagaagagagtgtcatctccctgcaggcttcgtacatgggaaaggagaacctgaagaaaaggatagcagagattgaaattgtcaaagaagaatttaatgagcatttagaagttgtagacaagataaaccaggtctgcaaaaatctacaattttatctaaataaaatgaaaacttttgaagagcccccttttgaaaaagaggctaatattattgtggatagatggcttgatataaatgagaagacagaagattactatgaaaatcttggtcgagctctagctttgtgggacaaactttttaacttaaaaaatgtcattgatgagtggacagaaaaggcccttcaaaaaatggaattacatcaattgactgaagaggacagagaaaggctgaaggaagaattacaagtccatgaacaaaaaacttcagaattttctagaagagtggctgaaatacagtttttgctccaaagcagtgaaatacctcttgaattgcaggtcatggagtcctctattttgaacaagatggaacatgtacagaagtgcttaacaggagaatccaactgccatgcactcagtggcagcactgctgagctaagggaggatctcgaccaagccaagacccagatcgggatgactgaatccctcttaaaagccctgtctccttctgacagcttggagatcttcactaaactagaggagatacaacagcagattctacagcaaaaacacagtatgatattacttgagaatcaaataggttgtctgactcctgaactctctgaattgaaaaagcaatatgaaagtgtcagtgatttatttaataccaaaaaaagtgttttgcaagatcacttttctaagttattgaatgatcaatgcaagaactttaatgactggttcagcaacattaaagtgaaccttaaggagtgttttgaatcatcagaaacaaaaaagagtgtggaacaaaagctacaaaaactttctgatttcttgactcttgaaggaagaaacagtaaaataaagcaggtggacagcgtactgaagcatgtgaagaagcatctgcccaaagcacatgtgaaggagcttatcagttggctcgtgggtcaggaattcgaattagaaaaaatggagtccatatgccaggctcgagcaaaggagcttgaagactccttgcagcagctactgagactccaggatgaccatagaaacctgaggaagtggttgactaatcaagaagagaaatggaaaggaacggaagaaccaggggagaaaactgagctgttctgccaagctttagctagaaagagggaacagtttgaatctgtggcccaattgaacaactctttgaaggaatatgggtttactgaagaagaagaaataataatggaagcaacatgtttgatggatagataccagacattactgagacaactaagtgaaatcgaggaagaggataagttactacccacagaggaccagagctttaatgatcttgcacatggtgtaattcattggataaaagagattaaagagtcccttatggttttgaattcatccgaaggcaaaatgccacttgaggaaagaatccaaaaaatcaaggaaatcattttgctgaagcctgaaggggatgccagaatagagaccatcacgaagcaggctgagagcagcgaggccccgctggttcagaagaccctcactgacatcagcaaccagtgggacaacacactccatttagctagcacctacctaagccatcaagaaaagcttctactagaaggagagaaatatttacaaagtaaggaggatctgagattaatgctcatag

SEQ ID NO: 1421 - DNA, 2117 bp, Homo sapiens
aagacccgggatccacgggaggcggcggccgcagcctgggattccccagggacccccccggagccgccgcgtctcccatggacttgcccggggactccaggtgagagcgtacccgggcggcccgcctgtcttgaccccgggagatggggatcctggcgaccgtgccgggaaactacagagccagcgacaggttcgggcgaccgtcctctgcttctttcaccctccagcccgcctggccagccgcgtctgtgccgccagcctctgactcgagcattatggggagccaggagcccgaaacggccgaggctgcagctcccgggggccccttctcccctggaaaaggcctctcggcgggtcctggccgtggtgctagaagatgtcatggctgttcacatggtccccgtggtgccctcaaagcagacctccataccacagcaccacagctaccatcaggatcctgtccacaggcagccgcctgcctcgccaccccggcaggccgggtggtcctcgcaggccaggtgagcatggcaggatgggggtaagccgagggcccagctgagccattttaatcttcctgttccctcgctaggcctcccgaccctctgtgtttgtgtcgcgagcccttgagccgcatccaccggacctcttccaccctgaggcggcgatcaaggacaacccctggcccagaggagggcccttcacaaaaggtggaccgggccccccagcccaccctggtggtgatgctggaagacatcgccagtcctagaccccccgctgagggcttcattgatgagacccccaacttcatcatcccagcacaaagagctgagcccatgaggatagttcgccagccaacgcctccacctggggacctagaacccccattccagccatctgctctgcctgcagaccctctggagagcccaccaacagccccagatcctgctctggagctcccatccaccccaccaccgtccagccttttacgcccccgcctcagtccctggggcttggccccgctcttccgttccgtccgctccaagctggagagctttgctgacatcttcctcacgcccaacaaaaccccacagcccccacccccgtcccccccaatgaagctggagttgaagatcgccatctcagaggccgagcagtctggggctgctgagggcactgcgtctgtcagcccccggcccccaatccgccagtggcgaactcaggaccacaataccccagcacttctccctaagccctctctgggccgaagctactcctgccctgatctggggccccctggcccaggtacctgcacctggccacctgctccaccccaaccaagccgaccacggccgcggcggcacactgtgggtggtggggaaatggcccgagccccgccaccccctcggccctgtctccggaaagaggtcttccctctcggaggagtgggagcctccccttctctcaccacatcttgctcgtccacggcatccacttccttctccggaccagcagaacccagggaaggagccaagagcctcaaaggaccaggtgctttcagaacctgagaccaagaccatgggaaaggtttctcgattcagaatacgcagaacaccagcccgtcctcagctaaaccttacaccaatgggactgcctcgaccaatcaggttgaacaagaaggagttcagcttggaagaaatttacaccaacaagaattaccaatcacccacaaccaggaggacctttgagaccatctttgaggaaccccgggagcgcaatgggactctgattttcaccagctcaaggaagctccggcgggctgtggaatttcgggacagcagccttcctcgatcacgaagaccgtcccgtggggtccgggctgcagggggcaggactgttcctcccaatgtggcccccagccctgatgtgggccccctgctccagcagcggctggaggagctagatgccttgctcctggaggaagaaacagtagatcgggagcagccccactggacctaggtgccccatctgttggtcatccatcctgaagggacaggaaacctcccaggcagttatttttttttctctatatttctagtaaagttttcgatatgtttctg

SEQ ID NO: 1422 - DNA, 3665 bp, Homo sapiens
aaccgcagtcgcggggtctgggagccctctattggagattctgcctcccctgggacagatggcttcttgagcacactcccacgatgggtggctgctctgggtattcatccatggggttcttccgcggtgaagccagcttgtcgtgctgtcccccttgtcaatgaagccatcatggttctggtcaatcatgttgaaagcctccttaaactcctggatgtggaactggtcaaacatcacgaagacattggatgtggccccctgtgctgtggtcgcttcttggtcttggctttggtccacttgctgaacattttggcttcagtaagcagtaccttgaagagaaattggagagggagtcaattcctaggatagcagagagatggacaacagacagaatgtcaccccagctctgatctttgccatcacagttgctacaatcggctctttccagtttggctacaacactggggtcatcaatgctcctgagacgatcataaaggaatttatcaataaaactttgacggacaaggcaaatgcccctccctctgaggtgctgctcacgaatctctggtccttgtctgtggccatattttccgtcgggggtatgatcggctccttttccgtcggactctttgttaaccgctttggcaggcgcaattcaatgctgattgtcaacctgttggctgccactggtggctgccttatgggactgtgtaaaatagctgagtcagttgaaatgctgatcctgggccgcttggttattggcctcttctgcggactctgcacaggttttgtgcccatgtacattggagagatctcgcctactgccctgaggggtgcctttggcactctcaaccagctgggcatagttattggaattctggtggcccagatctttggtctggaactcatccttgggtctgaagagctatggccggtgctattaggctttaccatccttccagctatcctgcaaagtgcagcccttccatgttgccctgaaagtcccagatttttgctcattaacagaaaaaaagaggagaatgctacgcggatcctccagcggttgtggggcacccaggatgtatcccaagacatccaggagatgaaagatgagagtgcaaggatgtcacaagaaaagcaagtcaccgtgctggagctctttagagtgtccagctaccgacagcccatcatcatttccattgtgctccagctctctcagcagctctctgggatcaatgctgtgttctattactcaacaggaatcttcaaggatgcaggtgttcaacagcccatctatgccaccatcagcgcgggtgtggttaatactatcttcactttactttctctatttctggtggaaagggcaggaagaaggactctgcatatgataggccttggagggatggctttttgttccacgctcatgactgtttctttgttattaaagaatcactataatgggatgagctttgtctgtattggggctatcttggtctttgtggcctgttttgaaattggaccaggccccattccctggtttattgtggccgaactcttcagccagggcccccgcccagctgcgatggcagtggccggctgctccaactggacctccaacttcctagtcggattgctcttcccctctgctgcttactatttaggagcctacgtttttattatcttcaccggcttcctcattaccttcctggcctttaccttcttcaaagtccctgagacccgtggcaggacttttgaggatatcacacgggcctttgaagggcaggcacacggtgcagatagatctggaaaggacggcgtcatggggatgaacagcatcgagcctgctaaggagaccaccaccaatgtctaagtcgtgcctccttccacctccctcccggcatgggaaagccacctctccctcaacaagggagagacctcatcaggatgaacccaggacgcttctgaatgctgctacttgatttctttctcatcccacgcactccatgagcaccccaaggctgcagtttgttggatcttcaatggctttttaaattttatttcctggacatcctcttctgcttaggagagaccgagtgaacctaccttcatttcaggagggattggccgcttggcacatgacaactttgccagcttttcctcccttgggttctgatattgccacactaggggatataggagaggaaaagtaaggtgcagttgccccaacctcagacttaccaggaagcagatacatgtgagtgtggaaggcagagggggtttatgtaagagcaccttcctcacttccatacagctctacgcggcaaattaacttgagttttatttatcttatcctctggtttaattacataaatatttattttttaagtgtaattttgccaaataataacaacagaaggaaattgagattagagggaggtgtttaaagagaggttatagagtaaaagatttgatgctggagaggttaaggtgcaataagaattcagggagaaatgttgttcattattggagggtaaatgatgtggtgcctgaggtctgtacattacctcttaacaatttctgtccttcagatgaaaactctttgatttctcagaaaagttgtatgcctatttaataaagctactcatttcctttggaactttatctttaagataatagtttacatgtagtagtacttgaaatctaggattattaactaatatgggcattgtagttaatggcggttgatgggttctaattttggatggagtccagggaagagaaagtgatttctagaaagcctgttcccctcactggacgaaataactccttgtagtagtctcattacttttgaagtaatcccgccacctatctagtgggagagccatccaaatgagaaacctaaaataattggttcttggtagagattcattatttctccactttgttctttaggagattttaggtgttgattttctgttttattttaactcatacctttaaaggaattccccaaagaatgtttatagcaaacttggaatttgtaacctcagctctgggagaggatttttttctgagcgattattatctaaagtgtgttgttgctttaggctcacggcacgcttgcgtatgtctgttaccatgtcactgtggtcctatgccgaatgccctcaggggacttgaatctttccaataaaccaggtttagacagtatgagtcaatgtgcagtgcagcccacacttgagaggatgaatgtatgtgcactgtcactttgctctgggtggaagtatgttattgttgacttattttctctgtgtttgttcctacagcccctttttcatatgttgctcagtctccctttcccttcttggtgcttacacatctcagaccctttagccaaacccttgccagtgacagtattttggttctcagttctcactgttccctctgctcctggagcctttgaataaaaatgcacgtagctatggagtggggtttagctggaaaggtggccttccaacttcacgtcaacttctggctcctcagtttggcagtaaggcagggaagttgttttcctatttctcactgagaagattgtgaatatttccatatggattttccattattgtttgtttgattctttgttttaaaataaaaattctgaatgt

SEQ ID NO: 1423 - DNA, 5241 bp, Homo sapiens
acagtgcccgcccgacgggcagcgagcagcagggagtctccccgaggccccgccccgcgagggcgcccagcctccctgggccttgagtcagaagctgccatcagtcatgctcttaaacggggactgcccagagagcctgaagaaggaggcggcggcggccgagccacccagggaaaatgggcttgacgaggccggcccgggagatgagaccaccggccaggaagtcattgtcattcaggacacgggcttttctgtgaagatcctcgcccctgggatcgagcccttctccctgcaggtgtccccccaggagatggtgcaggagattcaccaggtgctcatggaccgggaggacacgtgtcaccgtacctgcttctcactgcacctggatggcaacgtgctggaccacttctcggagctgcgcagcgtcgaggggctgcaggagggctctgtgctgcgtgtggtggaagagccgtacacggtgcgtgaggcccgcatccacgtgcgccatgtccgagacctgctcaagagcctggacccatccgatgccttcaacggggttgactgcaactccttgtccttcctgagtgtcttcaccgacggcgacctgggagacagcgggaagcggaagaagggcttggagatggaccccatcgactgcacaccacccgagtacatcctgccagggagccgggagcggccactgtgtcccctgcagccccaaaaccgtgactggaagcccttgcagtgcctgaaagtactcaccacgagcggatggaacccgcccccggggaaccggaagatgcacggggacctcatgtacctgtttgtgatcacagccgaggaccggcaagtcagcatcaccgcgtccacacggggcttttacctgaatcagtccacagcttatcacttcaaccccaagcccgccagcccccgcttcctaagccattccctagtggagctgctcaaccagatcagcccgaccttcaagaagaacttcgctgtgctgcagaagaaaagggtccagcgccacccgttcgagaggatcgccaccccattccaggtgtacagctggacagccccccaggcggagcatgccatggattgcgtgcgtgcagaggacgcctacacctcgaggctgggctatgaggagcacattcctggacagacccgagactggaatgaggagctgcagacgacgagggagctgcctcgcaagaacctgcctgagcggctgctccgagaaagggccatattcaaggtgcacagcgacttcaccgcggcagccaccaggggcgccatggccgtcattgacggcaacgtgatggccatcaaccccagcgaggagaccaagatgcagatgttcatctggaacaacatcttcttcagcctgggcttcgacgtccgagaccactacaaggacttcgggggggacgtggcggcctacgtggcgcccaccaacgacctgaatggcgtccgcacgtacaacgcggtggacgtggaggggctgtacacgctgggcacggtggtggtggattaccgcggctaccgggtcacggcccagtccatcatccccggcatcctggagcgggaccaggagcagagcgtcatctacggctccatcgacttcggcaagaccgtggtgtcacacccgcggtacctggagctgctggagcgcacgagtcggcccctcaagatcctgcggcaccaggtgctcaacgaccgtgacgaggaggtggagctctgctcctcggtcgagtgcaagggcatcattggcaacgacgggcgccactacatcctcgacctgctgcgcaccttccccccggacctcaacttcctgcccgtgcctggcgaggagctgcctgaggaatgcgcccgcgccggcttcccccgcgcccaccggcacaagctctgctgcctgcgccaggagctggtgggcgccttcgtggagcacaggtacctcctctttatgaagctggccgccttgcagctgatgcagcagaacgccagccagctggagaccccctcctccctggaaaatggtggtccttcctccttggagtccaagtctgaggatcctccaggacaggaggcgggaagtgaggaggagggtagcagcgccagcggcctggccaaggtgaaggagctggcagagaccatcgccgcagacgacggcacagaccctcggagccgggaggtgatccgcaacgcgtgcaaggcggtcggctccatcagcagcaccgccttcgacattcgcttcaatcctgacatcttctcaccaggggttcgtttccctgagtcctgccaggatgaagttcgggaccagaagcagctgctgaaggacgcggctgccttcctgctctcctgccagatccctggcttggtgaaggactgcatggagcacgcggtcctgcccgtggacggggcaacgctggcagaggtgatgcgccagcggggcatcaacatgcgctacctgggcaaggtgctggagctggtgctgcggagcccggcccgccaccagctggaccacgtctttaaaatcggcattggagaactcatcacccgctcggccaagcacatcttcaagacgtacttacagggagtcgagctctccggcctctcagccgccatcagccacttcctgaactgcttcctgagctcctacccaaaccccgtggcccacctgcccgccgacgagctggtctccaaggagcggaataagaggaggaaaaccggcccccgggggctgcagataacacagcctgggctgtcatgaccccccaggagctctggaagaacatctgccaggaggccaagaactactttgacttcgacctcgagtgtgagaccgtggaccaggctgtggagacctacggcctgcagaagataacgctcctgcgggagatctcgctgaaaacagggatccaggtcctgctgaaggagtacagcttcgacagtcgccacaagcccgcgttcaccgaggaggacgtgctcaacatcttccccgtggtcaagcacgtcaaccccaaggcctcggatgccttccatttcttccagagcgggcaggccaaagtgcagcagggcttcctgaaggagggctgtgagctcatcaatgaggccctgaacctgtttaacaacgtctacggagccatgcacgtggagacctgcgcctgcctgcgcctcctcgcccgcctccactacatcatgggcgactacgcagaggccctgagtaaccagcagaaggcggtgctgatgagcgagcgggtgatgggcaccgagcaccccaacaccatccaggaatacatgcacctggccctgtactgcttcgccagcagccagctgtccaccgccctgagcctgctgtaccgcgcccgctacctcatgctgctggtgttcggggaagaccaccccgagatggcgctgctggacaacaacatcgggctggtgctgcacggggtgatggagtacgacctgtcgctgcgcttcctggagaacgcgctggccgtcagcaccaagtaccacgggcccaaggccctcaaggtggccctcagccaccaccttgtcgcccgagtctacgagagcaaagctgagttccggtcggccctgcagcacgagaaggagggttacaccatctacaagacgcagctgggcgaggaccatgagaagaccaaggaaagctccgagtacctcaagtgcctgacccagcaggccgtggccctgcagcgcaccatgagcgagatctaccgcaacggctccagcgccaacatcccgcccctcaagttcacggcccccagcatggccagcgtcttggagcagctgaacgtcattaacggcatcctcttcattcctctcagccaaaaagacctggagaatctgaaagccgaggtggcgcggcggcaccagctccaggaggccagcagaaacagggatagagccgaggagcccatggctaccgagcccgcgccagcgggggccccaggagacctgggctcccagcccccggctgccaaggacccttctccgagcgtgcagggatagagagggagccagacggacagccagccagcggccccgtcaccagggagcccgactgcgggagaagggggcgagcctgcgggcggaagaggaagcaaggccctcttcctccacgtctcaccccaccccacccccgtgtcctcctgggagcctggcctgcctgccccgcagaaggtgtttttgcgctggttcaatgaatagatgatgcagaggccccattggagacacgtgaatggcgtgtgcggccatcagttcccggctggggggcaggtgttgcttcggcccccgccctccggccggcgtgtgcgagtgcgcccctggctgtgagtgttgaccgttcctctcccctgtacatagcccgagccagtcctgagtgggtgactcctgagtgggtgacgcgcagacgggatttctcaggtcatttgtatggtcgacatgatggctgctgctttggctgccaccacccccgggcccagcctgtctgaaagttcagggtttaggccgaaaaacccggtggggaggggtggggagccggagctctgtggcggggctggagggctggggtgcactttagtttggggcgggacgggagccgccgttgtgactggcgtggtctggctgctgctcccgaacggaggggtcggggttggcttgctgggccctcagagcccagtgggtggctctgactcggctccctactccctgcacccagctgggcgcagccttggggcctgcggtctgaatgtatccctcccctcagttttaacctgagctgccgaacgcacagtgggccgggggcgaggctgggggaagcggggcccaattacggatcccgggagttacaggtgccgacgtgatgtcgcttctctggtgcccagctcccttcctggtctgagactagctctgggggtggcgggggcccccacacgctgctcccgctccaccctgcccgtgctgctgctctgtgcctgctgtcagagccctggtgggggaggatgtggccaccctgagacccggaggagacgggcgtctgcctgggtttgcggagagccgcttatgggtgtggtccgtccagacaccttgtttcaagggggatgggcgtgagcgggcaagcagagcatccccaccgctgagcaagaactttttcttgtttttaaaccatcacgtcctcatttcacattggaataaagtgagtttttgaaacctgcg

SEQ ID NO: 1424 - DNA, 3922 bp, Homo sapiens
aactctccatcccccactgcccggtgccagcgctcggcttcggtgggttctcccgggtctgggctcacgtctcctctgcgcgccttgtgctcccctatcccacagatacgcaggcttctggagaccctgggtggacgccggaggcaagaaagaagaggagacgccgaaccacgccgcggaggcggtgagtgagccacgcgtctcaggccgcgcctcccacgggtgcagaagatcgaccagggctctcgggacgcagggcctgagagagacatgcgagacaccgggtcctgcctctcgcttaacatcccgcctgccggtggccataaaggtgccgacgcggcggatgtgtcctctggagcgatgggccacaggcacccagccgggagcgaggctgctgagagccctggggttacattcccagcgggcacgaggaacactgggtcgtgcacgtttccactttctagaaggaggtgggtgataactggattcacttcctttcctctccagatgcccgatggccctggaatgaccgcagcctcaggaaagctttaccaattcaggcacccagtcaggtgagtgacaggcctcgccgaaggtctcccgctcctccagccccagggaggagccaggggcatcgcgcagcccagctccgcagctggtcctgcagtctctctctctctctctgaaaatctggcttcaaggttacttatcttctcactcatcaaattgaaaaaggtaggggctcacggtcccacgtaaagggactattgatgaatacatactcagtgaacttgatgaatatattacgaagagggaaaggggatgatatggtaaaagagcggtgacatcttgtgctggcaaaacagtttttatttttaaatcctaaagggttcgaatgaaattgacttcgcatcaggcagagtgtgtatgctgcttttgtcttgcaatctggaaggaagaatgggattaacagttacagtcttacaagtttgccgagtaggaaaaaatagaaatgtaatgaaaatcctaaagattattgagaatggttatagaaagggtcaaaagtttatttaacttgcggagctagtttactgttcctagtcacaggaagtcagcctttatctaagattctgtgtcacttttattcaggtgaaatgttaagaattctgcagttttcctgcctccgagagctgttaaatgaagagctggatgatgtttgtaaagtgcccctggtcataaataacacatagaagtcattacatctaatttcctaccgtgtactagcactggtgaaggacacaggaaagtagtcacagcacatggcaagtgttgtaatggaatttagtttggttagttttacaagtatgggcagggcacgaagtgcctaaatctgtcagtggtagggggaagggtcagggaagtgtatattataagttgtggttacctggctgagtcttggaaaagttagtcagatgaatgggaagtgggagcaaaagaaatagcattggaaaagagaagcaggatcatgaaacggtgtggctccttgcgggaactccaaggagtttaggtgtgtgaagttgtggtcattttagcagggtaatcagaggccaaatcttgcacactcttgtacagagttctgtcctgatcctgtatgtagtgttgggaacccatgggctttattccgaaggtagtcttgggggttatatgttaaataggcttagtcagggcatcaaaagtaaaactggaagttctgcaatttttcaggtaagaaataatgatgaaccattgtaagacagtggaagtgagggtgagactgggtgaatctaggaaatacttgaatgacaaaatagattaggctttataacgtattggatatgttaggtgaagaagaggtaaaaggccagaatggctcctaagtttgtggctggtgagcaggtgaatgctgtactaaaagaatgtaaattagggctgaaaacagatttgggaggtgagatcatgagtcaagttttccacttatcatatttaatgtgcctatggggcatccaaagagtgatatcctgtagagaactgcgtacgtaagttaggggcccagagtcaagatcttaagtggaaatacagacttgggagtccatggtaaatgtagggtggggaaatcatgacagtgggccaggtcatcctagtttgtttagagggagggctgatgttctcaatgaaaacctgagggaaggccagcatctaaccagtacacagagaaagagaggtccacaaggagacggagaagaatcagaacaggaagaaactcagaaaagtatgcgggccctgggagaaaaatggcccacagtgagaaattctggacagagtatcataatgactagcattctttgggtttgccagttccagttacgcattaggaaataaattgtttcttatataagaaattcctttcttttctgaagtacggttacaatttaattgttctcttatattttatttttattcatttatatcttgactaatatggtgtgttttattctttttattcagctgtcaactttttgagggtagggaccatgatttattcatctttaaattgtgaattatgttggcacaagggatcactaaaatatttattgaacgactgaataattgatagttacttgtttaagcatcaaaaatataaactttttttatgatttttgctggaaacatttataaactgcattgtttgtttttctgccttttaaagtggagcatactgaacataatgtaatcttccatttgttgggatgactccattgtatggatatatgggctgtttaccctgcactaaaatgactgcactgtacttggtgattcagccttatctctcctctttcttttccttgatgaagaccagaaggcaagattagtatttgtcagatttttgaaattctgaggtaatcatacctacatgccagttatttgtataaaacatatataatttctcaacatttcatatgatattcacaaatttagttgaatggggagaagacaggcacatagaatcaaagttgaggtcagaagtagtctttctatgcctcaagttgtgagtgcatagacaaaaattttaaaatactggtttttatacatttttaaacttacgttgtctacttctataagagttaaatctgtgagttttaaataagataataggttatttccacctttttgtaaggtgcataatattttgtcatctttataaagctggctatcattaaagtttttaatgtagtggtagaactcaattcattttttccaaaggaatttagaaactggaagacaaatcttctatatattataagaataaatatatccataatgtacaaagtaaggtaaacattgatcttatgcatatccagggtttagtgtaaatttgtttgatccaatttacagcttgaataaagatttacaataatcaaacaattattgatacttgggcaggtagattccatgaaggctgtgatagtagcatattttaactctgtatcttaaggctatatccaaatgtataagtcaattgttaaatatatggagctcttgaaatttgaccatttcatgagtttaaagatcctgaatgtgaaaaaataaaacatgttgtctgcttctttcagactattttggccaaaatcaaaatgttatgattacttatatcaagaagcagaagctcttctgaaaaattttccaattcaagccacaatttcattttatgaagattctgatagcgaagatgaaattgaggatctgacctgtgaaaattaatctgattagctacttttgattatatccaaagcttgtggggtttaaatttagtgtacaaatgtatcataattattttaaactaatttatttgtatataaattattaataaaatgaaatattttgt

SEQ ID NO: 1425 - DNA, 3676 bp, Homo sapiens
agaagctgcgctgaggctgccccacagggcgcaggccccgaccctcagcgtccaccgtctgctgcctacatccgcccgcccggcgtccgaccccttcagcggcgacgggcggagctggagccccgggcctgggcgccaggtgggctcctgggagggtgatgaagcaggccctggtggacgataccgaggatgtgtccctggactttggaaacgaggaggagctggcctttaggaaagccaagatcaggaacacgcattccccgatgacatgagacacctgccccgtgggctgcgtgtgagcttggagctcagtgactggtggtggaaaaacccaacctttacctttagggaactggccgtcatctctgctaggcgggaaggcagtgactgctgtcacgtttcacttcaaagatgaccgtgtttcgaagagggcaagtgatatttggagtcaagtggcgggaaagtactggattcttcgaaggggaggaaaaaaaacagtgtcagcatgactgtctggggactgctgacctaatgatgtgtccccagggctacagcctgagtttctgcgtcatatgcaccggggagaacattccattgagccacgctaacacccccagcaaagtctgaagtggtaaagggagttcagtgaccatccgcttagctcttggagtgagggcgccttctgggtcctttcctagacaccccttggccacctttttccacctgtttttccgagtgagtgccatcgtcacctacgtgagctgcgactggttcagcaagagctttgtgggctgttttgtcatggtgctgctcctcctgtccctggacttctggtctgtgaagaatgtaaccggaagactcctggtgggccttcgatggtggaaccagatagatgaagatgggaagagccactggatctttgaagccaggaaggtctctccgaatagcattgctgccacagaagctgaagcacgaatcttctggctgggcctcataatctgccccatgatatggattgtgtttttttttagcaccttattttccttgaagctaaagtggctggctctggtggttgctgggatctctctccaagctgcaaacctgtatggctacatcctttgtaagatgggaggcaacagtgacattggcaaggtcacagccagtttcctgtcccagacagtgttccagacggcctgcccaggtgactttcagaagcctggcctcgaggggctggagattcaccagcattaggaactgatgaggttctcttcttttgactgatggagattacaaaactcttggattcctggaaaacaagacgacaggcatagagtgctaatggcttgtctaccccttgacagccctgtcctgtgctggggagggctgtgttttgacaggggtggaatcctctggctagttccataaaaagacctgtgtctgtgatgccctgagtctttgaaagtgaccggaatacctcacactacccatcttgctcataaccagtggctgcggccttcctcggaccatctatagatggaggattctgggaatgctgtttccttacccttgacatcattcttctaggcaagtaaaacccagccacaaactcagagaccacagctttaacaaacactgacacctctgccctaactctggggcctctgatggctgccactggctgaatgtggcctgcacgtgggtttggtctggctcaacaaagtttttatttttattttttatttttttgagacacggtctcacgctgttgcccaggctggagtgcagtggcgcgatctcgccttactgcagcctccgcctcccaggttcaagcgattctcctgcctcagcctcctgagtagctgggactacaggcatgcgccaccacacccggctaattttcatatttttagtagagacagtgtttctccatgttagccaggctggtcttgaactcctgaccagcctcaagtgatctgcctgcctccttcacccaaagtgctgggattccaggtgtgagccactgcacctggcctttttttttttatcagttacttttaaaaatgaattactttatccctttattgggatgtatttcctaagccataaatttcaccctcaccatgttttttaaactatgaattaattcacaatactcacacattgagagatttctcatggactcctggcttcctcggctatgggggccactctgtggtcatcacagaccccaccacccacctgtccttccacacccctggctcctttatgttgcttcctgccccacaggcatctgcatttagtactcatggaaatacttactctgaattatacttctgtaggctaacgtggctggggaatctggggcgtcaatgaaaaaagactggcctttgtcacaattcttaccttaaaaaagaaacaaacggaagacaattcagtccaagaggaaaacagaatggccacaagatcttggggctctttccgtgctggtgacaatgggaagatcttgagcccgcttcactcgtaatgaagaacaaagtagaaaagaccagtggggtctcagggaccttccttccagcagggtccccagccagcatttcagcgtggctaaataatcaggtggtgtacagaaaatgcaggttccagggccctacagagaactgattcagcagcttccacatgggcccaggagtctgcattttaagagattagcttttgagtgaaaggatcatgaatgcacatggttaaaaaaagtacagaatgcaaaaggatatggcataaaaggccaagtccgaaaagggctactagtgttctaggtgtctttccagaaagattatgcgcatataaatgtgcacacttgcatgtgtgcgcacacacatacacacactctcatatacctaaaatacgaatgggagcacatgacacacacattctgcctgctgctttgtctgtgtataattttatcttccaggtcatctgtgctggtgtctatcagtctgctagtctttccccgccatgtggccattgttccagtcccctcctatgcacacccaggtttctctaggaccatgttatcccagagccaggtggacaggacacaaggggctaggggtcaatgggggtgttctcgcctccagtctgccctgccagcccccagtcgtgggtggacctgccatcagcttgctctgcccactccccaggcctgagctgctggcgaaacaggcaagtgactgcactgcccatggccggtcaccagcctcaggtgaaccctaggaggggttcctacctagcactcatcatttcctcaacttcactactgtgtcgccctgtgggacagggaagtccaagtcggggaagaagcctgtggggaggggttggtgggagatggggagcccatatggcccagtgagtcaggaagatagggtccagaggcagggaacataaggccaattcgcacttgagccataacaggaaatgtcctctccataggacgtatgccgtaaatgactttgtaactttacttcatccttttcgtttatatagggcgtacctcaagtagagggtatttaaacacaaaaactctgtaatggggcctttgagcccctattctcaggcccgttctcctcccacaccgtggagttgactttcattttcaataaatcccttccttccttccttt

SEQ ID NO: 1426 - DNA, 3765 bp, Homo sapiens
attttggcattgttcttcgagcagcgtgcattttggtagacactagccgtatgtggctattgagcacttaaaatgtggctagtgtaactaaagaactgcattttaaattttatttagtcttagttaatttaaaatttaaataaaatggcattatgtggctcatggcttactatattgcacagcatggatcttgaacatcgttttccacattaactttccctttctaacatttcgaggaaacagttttgtgagactgaaatctaagtcattcttctcaagcctgggtctgtggaaaggcctatgctggctgtttacctttttcccttaaatagtttttaaggtcccgagactagatgagattaccaagtcttctctcttacagagcagtcagtaaggcaagaaaacacatcttacagatccataccagggactggaatccaaaattgtcagatgcatttttaggtgaattggctgaaaaatgtgttgggacctccatctccgaagcagcatccctcagcttttgaaccacaaagacctcgacatcttctggctactgtggagccgatatcaaggccctgtgcactgaagccgccctgattgcactgcggaggcgttatccccagatctatgctagcagtcataaactgcagctggatgtttcctcaatagtgcttagtgcccaagatttttaccatgcaatgcagaatatcgtgcctgcttcccaacgtgctgtgatgtcttcagggcatgcactatcccccatcataagaccactgctggaaagaagcttcaacaacatcctagcagtcttgcaaaaagtgtttcctcatgctgaaattagccagagtgacaaaaaagaagatatagaaactttaattttagaggatagtgaagatgaaaatgctttatcaatttttgagaccaattgtcactcaggatcaccaaagaaacagtcatcatctgctgctatacataaaccctaccttcattttacaatgtcaccatatcatcagccaacctcttacaggccacgcttattgctctctggagaacggggctcaggtcaaacttctcaccttgctccagcacttttgcacactctagaaagattctctgtgcatagactagatctcccagcactttattcagttagtgccaaaacacctgaggaatcatgtgcacagacaaaattactgcaggttgtatgcaagtaaaagaattactcagtaccatttaaaataaatacaaatgatttagtagaaaaatataaatcaacaaaattgaccccagagaagagagaatctaaacaatcactgtggaagaagaaattcagcaagtatcttaaaaccactaaacatagatggtttcacagcccaaaataaactctacatgggcagtggaactataaaagtactggaaaaattcacaagaactttggaaaaaaataatccttggatttccaagatccaggataggagggtacgtgtttgcagaaaaggtcaaaatttgagagtcctgaaggagttgtactgtacaactgttctggattggtggatatgcaaatattaaggaagggaaggagcaaatattacttttgatatttttcgtgaagctcgaagaacagtacctagtattgtttacatgcctcacattggggattggtgggaagctgtcagtgaaactgtgagagcaacttttctgacattgctacaagatataccatcattttcacctatatttttattgtctacctctgaaaccatgtacagtgaactgcctgaagaggttaaatgtatctttagaatacagtatgaagaggtcttgtatattcaaaggcctattgaagaagacagaagaaaattttttcaagaattgattctcaatcaggcatcaatggctccaccacgaaggaaacatgctgctctttgtgctatggaagtgcttcctcttgcactaccttctccacctcgtcaattatcagaatcagaaaaaagtcgaatggaggaccaggaggaaaatactttaagagagttgcggttgtttctcagggatgtaaccaagaggctggccacagataaacgctttaacatcttcagcaaaccggtggatattgaagaggtttcagattatcttgaagtaatcaaggaaccaatggacttatcaacagtaataactaaaattgataaacataattacctgactgcaaaggatttcctgaaagatattgacctcatctgtagcaatgctttagagtataatccagataaggacccaggagataaaataattaggcacagggcttgtaccctgaaggacactgcacatgctatcattgcagctgaattagatccagaatttaataaactttgtgaggaaattaaggaagcaagaataaaaagaggcttatcagtaacatcagaacaaataaatcctcatagtactggagctcggaagacagaaactagagtcgaagaggcatttcggcacaaacaaagaaatccaatggatgtgtggcacaactctgcaaataaatgtgcatttcgggttcggagaaaatcaaggcggagatcacagtggggtaaaggaattattaagaaaaggaaagttaataatttaaaaaaagatgaagaagacaccaaatttgcagactatgagaaccatacggaggacaggaaattattagagaatggagagtttgaggtaagcactgactgccatgaggaaaatggagaagagactggagacttatctatgaccaatgatgaatcatcctgtgacatcatggacttggaccaggggcagaggcttaacaatggagcaggcacaaaagagaactttgcatctactgaggaggaaagttcaaatgaatctctactggtcaacagcagcagttccttaaacccggagcagacctccaggaaagagactttccttaaaggaaattgtctaaatggtgaggcttccactgacagttttgaaggaataccagttctggaatgtcagaatggcaagcttgaagtagtttctttctgtgatagtggagataaatgtagttctgaacaaaagattcttctggaggaccagtcaaaagaaaaaccagaaacttcgactgaaaatcatggagatgatcttgagaaactagaggcactggaatgtagcaataatgagaagttagaacctggctctgatgtggaggttaaagatgcagaactggataaagaaggtgcttctaaagtaaagaaataccgtaaattaattttagagcaggcaaaaacgacaagcctggaactggttccagaagagccatctgagcctgtgcctcctcttatagttgatcgtgagagattgaagaaattgcttgatttgttggtggataaaagcaacaatctggcagttgatcagcttgagagattatattctcttcttagtcagtgtatctaccgtcatcgtaaagattatgacaaatcacaacttgtagaggagatggaaagaacagttcatatgtttgagacattcctatgaacttttcaagatgagtggtttatcctctccaatctgctcctcacagagcagtcttctgagccattcaatttcaaattgcaccaattatgtgcagagccttggtgtaaagtgctctctcactcattctttctctctgttgaatttggtgctattgtctcaggtacctgaaaccaaccagcctacaagaaccaaacagaacttcagaaacatgttgtattttccacaaataaaaaatacaacccc

SEQ ID NO: 1427 - DNA, 3097 bp, Homo sapiens
tatgatatggacataatcacgtctttgtgtatatggacatgttcacgtgtttgtgtgtacggacatattcacgcgtttgtgatacggccatattcacgcgtttgtgtgatacggccatattcacgcgtttgtgtgatacggacattcacgcgtttgtgtgtaggacatattcacatatttgtgtgtatggacatattcacgcgtttgtgatacagacatattcacgcatttgtgtgtacagacattcacgcgtttgtgtgatacggatatattcacgcatttgtgatacagacatattcacgcgtttgtgtgatacggccatattcacgtgtttgtgtgatacggacattcacgcgtttgtgtgtaggacatattcacgcgtttgtgtgtacagacatattcacagcctcgaaagagtggaatcctgaacacgtggctttgtgcattctccacttcaggttcaacgactttagtcatttccttactaatttttaaaatgactttaatcatttaggtttaaatgactttagtcatttccttactaattttttaacacccgaaattttaatgactgcttgtttgctgtcattagaatgtactacatttaactaacttatttaagccataatattgtatatttagagagtttccagttttattttaataaactaggctgtggtgaattttttcacgtatgctctgtgtaaatatctgattattcatttaataaaatgtcccagaagtgagtattgaattaaagggcatacacagtttaagcctgtgatatgtgttataaaattggcctccaggagagcagtgtctgccccagggtcagtgccatggtggtgagtgaagctcccccacccacagaggccctgagcagggagccgtccggtgacccaagcaggctggtcttgctggccccttccttgcccagggccttgagagagggctccttgagtgcctggcaggccactctgctggctgacagctgtgtgggaagggcccagggccctgtctgcccagccggctgagcacagacggtcttgcctccaaggggtttggattcctcagcagagccgtggaaggtgcagtgatggtgagaaactgcccgtcacacagtgaaaagcctggcgccgtgacggtgagaaactgcccgtcacacagtgaaaggcctggcgcggtgatggtgagaaacttcccggcacacagtgaaaagcctggtgcagttacgtgcttgttgggtggatttggagggaagaaaagctgccggaagctcaacccatggccgtccttgcttggagatgcaccaaatccctcctgggtggcggcatcactggggactgggacgcagccgtgagtgggacagactggtcagcaggcagcagcttgtcctggcatgtgacccctggcacagggagagactcccgggagaccctcagctctgagcagtcaggagctctggcgcaggtcacctggcgggatgtggagcatctgggcctgaaggtcttggcgcttccaaaagctccggccgcggcgtctcttgagttgtggctcgtcccctcccactgggcaggactgggggttcctggggtgttcagtttttagtctgagctctgctctacctttcttctgtccgtttagtttgcttggcataaattccatattactttgccaatcttcgatttattgacggggaagcctgtcctggagccaccttcttccacgcgtcttgttaacttgggggccggcagggagccctcaactctctgcggtcacaacacattgaagtggacaagtgatgagtcctgtgcagcggaggctctgggtggggggcagggagaagggctttctccagaaaggtggtccctgtgggctctgcccaccttcacactcccctgggtctggcccaggaatgcccagtccggcagctgtagccgtagccattagtgactgggcctcatgaggaggagtggaaatgggcccagcccggccatctggggtgctgctttctttggaaacttgagttggctgcagctctgagggaggtggaacgttctgggccactgaggagggcatccctcctgtgtgaacggcattttcttcctggctccctctgaaggctgtgtcagccacagcatttccagggctgctgaggctgcctgtctgtctttcccctctggtgtgatgtttagaaagacaaatgagtgctggggcctggggggtggccctggggtcagggaggtgctggagctgctccgggaagcgacccaggaatgcagaccaagggcctgctgggtattccggggcggcagcctggtgctggtcgggtgggaagcgtgagtggggagaggagtccgagatgccacctttctgatctggggagctggggccttccccaacaggagaaacatgagaaagattcgacttggcagtgcggggagggaagttagtactggtcgtggtgacctgtggcccgctcagaacatgatggtttcatgggtgtagctgtcccctcagagagcgcctgcaggccgggcacctgctccgaaggcgtccccttcagttggcgagcccttgtggggcgagggctgccccgagttaatttcaccacgagcccctcaaactcttgggccactgggaagtttccaggttcttcttatcccaaggcgtgaggaagaagtttgtgatctcagtcgtctgtcttgggtcccagacctccctgtgcagcttttcctaagaacgccagggcgtttgtatttcctgccaatgatggcggcttttcatgagccacgggggccgtcttcccctgagtacgtcggggcctcctgcgtttagtccgaaaacctcacgtctgcacgtcttgccgtgagctgctcggagccgtgggaagtcaggaattgagggatggtttcatgttagaagtctgttaatgtaactcatcacatcaacatgaaaaaattgatccccttaaatgcagaaaaacaaaaattcacattcatccatgacaaaaacttaacatactggaattgaaagatttttttaacatgataaaaagtatcctagcctgggcaacatgtcgaaaccctatctctac

SEQ ID NO: 1428 - DNA, 4001 bp, Homo sapiens
acttaacaaccgaagtaacccgcaatgcggaagggcgaggggattgcgagtcaccgagtttcccgcgcggcttgagtcacggcctagaaagagagatgttggggttcccaggaccaggacagaggtggtagtgaactctcatgggcatccagagaaggtcaggccccttgctgacaggcctatctgtggggctactgctgctcttcagctgggtgacccttgtccagccaacctctctctcagctctggtccaccaccctcacttgtgccagaccacccgggatgtccatggccgtcactaccctggtttcttttgccctcgtctgtctgattctccagaggaagcctactgctgccacctgcaggctgcagggggctcctgctgcacccgggctgaatttgaggccctgtaccaagtcaatctgtccgctcttccgcccccgcccatcctcaggggcccaggcccgctcctagtgctgggcctctacaacctactggttgtgaccctgatgaccgtagacctcgtgcacttctgctgcggtcggggccggagtctgggctggagccaccgcaggcctccctctgggtcctccgccgcgagctccctgcaggtctctgcggggacagcttaggtgcgcccggagcttgcctgcacctgcgatccagagccaagcgccccgcccctgcccgggcgcgctccctccttagccctgcccctctctgaccccacctccgacgcaagagtggggcggggcagctgccggtggcgtcccgaacccagactcgccccgccccagagactgcgcctgcgcgggcacgagacaacctctccgcgatgactgccagctcagtggagcagctgcggaaggagggcaatgagctgttcaaatgtggagactacgggggcgccctggcggcctacactcaggccctgggtctggacgcgacgccccaggaccaggccgttctgcaccggaaccgggccgcctgccacctcaagctggaagattacgacaaagcagaaacagaggcatccaaagccattgaaaaggatggtggggatgtcaaagcactctaccggcggagccaagccctagagaagctgggccgcctggaccaggctgtccttgacctgcagagatgtgtgagcttggagcccaagaacaaagttttccaggaggccttgcggaacatcgggggccagattcaggagaaggtgcgatacatgtcctcgacggatgccaaagtggaacagatgtttcagatactgttggacccagaagagaagggcactgagaaaaagcaaaaggcttctcagaacctggtggtgctggccagggaggatgctggagcggagaagatcttccggagtaatggggttcagctcttgcaacgtttactggacatgggagagactgacctcatgctggcggctctgcgtacgctggttggcatttgctctgagcatcagtcacggacagtggcaaccctgagcatactgggaactcggcgagtagtctccatcctgggcgtggaaagccaggctgtgtccctggctgcctgccacctgctgcaggttatgtttgatgccctcaaggaaggtgtcaaaaaaggcttccgaggcaaagaaggtgccatcattgtggatcctgcccgggagctgaaggtcctcatcagtaacctcttagatctgctgacagaggtgggggtctctggccaaggccgagacaatgccctgaccctcctgattaaagcggtgccccggaagtctctcaaggaccccaacaacagcctcaccctctgggtcatcgaccaaggtctgaaaaagattttggaagtggggggctctctacaggaccctcctggggagctcgcagtgaccgcaaacagccgcatgagcgcctctattctcctcagcaagctctttgatgacctcaagtgtgatgcggagagggagaatttccacagactttgtgaaaactacatcaagagctggtttgagggccaagggctggccgggaagctacgggccatccagacggtgtcctgcctcctgcagggcccatgtgacgctggcaaccgggccttggagctgagcggtgtcatggagagtgtgattgctctgtgtgcctctgagcaggaggaggagcagctggtggccgtggaggctctgatccatgcagccggcaaggctaagcgggcctcattcatcactgccaatggtgtctcgctgctgaaggacctatataagtgcagcgagaaggacagcatccgcatccgggcgctagtgggactctgtaagctcggttcggctggagggactgacttcagcatgaagcagtttgctgaaggctccactctcaaactggctaagcagtgtcgaaagtggctgtgcaatgaccagatcgacgcaggcactcggcgctgggcagtggagggcctggcttacctgacctttgatgccgacgtgaaggaagagtttgtggaggatgcggctgctctgaaagctctgttccagctcagcaggttggaggagaggtcagtgctctttgcggtggcctcagcgctggtgaactgcaccaacagctatgactacgaggagcccgaccccaagatggtggagctggccaagtatgccaagcagcatgtgcccgagcagcaccccaaggacaagccaagcttcgtgcgggctcgggtgaagaagctgctggcagcgggtgtggtgtcggccatggtgtgcatggtgaagacggagagccctgtgctgaccagttcctgcagagagctgctctccagggtcttcttggctttagtggaagaggtagaggaccgaggcactgtggttgcccagggaggcggcagggcgctgatcccgctggccctggaaggcacggacgtggggcagacaaaggcagcccaggcccttgccaagctcaccatcacctccaacccggagatgaccttccctggcgagcggatctatgaggtggtccggcccctcgtctccctgttgcacctcaactgctcaggcctgcagaacttcgaggcgctcatggccctaacaaacctggctgggatcagcgagaggctccggcagaagatcctgaaggagaaggctgtgcccatgatagaaggctacatgtttgaggagcatgagatgatccgccgggcagccacggagtgcatgtgtaacttggccatgagcaaggaggtgcaggacctcttcgaagcccagggcaatgaccgactgaagctgctggtgctgtacagtggagaggatgatgagctgctacagcgggcagctgccgggggcttggccatgcttacctccatgcggcccacgctctgcagccgcattccccaagtgaccacacactggctggagatcctgcaggccctgcttctgagctccaaccaggagctgcagcaccggggtgctgtggtggtgctgaacatggtggaggcctcgagggagattgccagcaccctgatggagagtgagatgatggagatcttgtcagtgctagctaagggtgaccacagccctgtcacaagggctgctgcagcctgcctggacaaagcagtggaatatgggcttatccaacccaaccaagatggagagtgagggggttgtccctgggcccaaggctcatgcacacgctacctattgtggcacggagagtaaggacggaagcagctttggctggtggtggctggcatgcccaatactcttgcccatcctcgcttgctgccctaggatgtcctctgttctgagtcagcggccacgttcagtcacacagccctgcttggccagcactgcctgcagcctcactcagaggggccctttttctgtactactgtagtcagctgggaatggggaaggtgcatcccaacacagcctgtggatcctggggcatctggaagggcgcacacatcagcagcctcaccagctgtgagcctgctatcaggcctgcccctccaataaaagtgtgtagaactcc

SEQ ID NO: 1429 - DNA, 2293 bp, Homo sapiens
atattctgtctgtgctatccaatgaggtcgccactagccactgcagctgtcgagcacgcaagataataagtcgcgctttcttcctcaaacttggcgaacttggagggagcttgtccccagagaggaggatgtggtgagccccggagaggagacggtggaggccctgctgggcctggtccgcagccgccactccccctgggctctgctgaacaactcgaatgcagaagacagtttcctgagagaattggccatccggaacccgctgacgatcacagacaccttcttctactcctacttccggtccctgcgggtaatagacaagaaggtcaccctggtggataaagacctcctgaaatttctaaagctggaggagttggtactgagcgccaatcgaatcaaggaggtggatgccaccaatctgccccccacactcaaggagcccttttggcctcccagagacgcattcctatgggttgagaaggtgccagatgttatgcagctcccccactgccaatccagcatcaccccccattccagatgttgaagtgtctttcacaaaaggaaaagaaacttcccaagacctgctgcaggaatcttttcttcctgggtttttaaaagggagtcggggtggtgccagggaggccaggtgtgctggagctctacggcaatgagatcagcagcatggagtgtctgtgtgcccacccacccgccggcctgcagcacttggggttaggccacaacaaacttctaggccccttggaaagtctctacgtcaccgctaatcactggggaagagtgaggctgggattgggagatgctgtgctgacagcggccgcttgtgtttttcttctgttctcagagctgagatcaatttgctttctagtttgtggcagcaggctgcttgccccctgctcacctggcttcttgacccccagacggtcctgctcaccttccaggcccaacctcgtctccctggacctgggcttcaacgacctgacagacctgcagagcatggtcaccagcctgaggaccctccggcacctgcgactcctggtgctgaagggaaacccactggccttggtgccctactaccgcggcctcaccatcgacagcctggcccagctctgcgtgctggacgacatcaccgtgtctcccaatgagaagcatctcttccgggggctcagcctcaatggcgatctcttggcacaggaggcgcagtttgtggtgaccatcggaaacatcagaggagtcctggacacctctgtcttagacccggaacccaggcccgaaggccctttcatcacttacaactattacgtgacctatgattttgtgaaagatgaagaaggcgaaatgaatgagtccgcgggcgtcctggccgagatcgtcaagccctctcccagcttagaattattagttgaggaatctcctgaagaggtcgtggaagacgtcatcgaagacattgttgaagaggttactgaagaggtcgaagggtctctggagtctgaggtggaggagtcaggagagtcggagctgtctgtcatctcggggccttcgaccatcttgcagatgccgagggcctctgcagaagagctggccaagttgaggctgcgtatagatccccggctctgcccgtccccagggactgtcctcttcagcactgcccacaagccctgggctgaggtcatcccctgcagttacgagatgcagcactctctcagggacctggtcccactgaaggccttcctgctggcggggaccaccgtgaccatcgtggaggagaagattctctcctggcctgtggtgctacctgctgttgacagtcccctgtctgccaagaaaggaaagggggagaaagacaagaaagggaaggagaaagacaggacggggaaaggagagaaagagccggccaaggagtggaaggtgctgaagaagaagaaagagccgcccaaggagctccggcagaacccccccatcctccaggtgctgggccggggcctggtgatcctggagcccctgctcgccggggagcccctggtgtccaccgtgtgcaacttcggcgtggtccgcacattgacatctgacaggctgacgttggccagggattcaaagaagattaagaaagttgccaaaaaagaaaagccgaaagccgtgattccgatctacgaaggcgattaccaccctgagcccctgaccgtagaggtgcagatccagctgaaccagtgccgctcggcggaggaggctctgcgcatgttcgccgtgtagggcgtgggcagtaaaggctgttcccagc

SEQ ID NO: 1430 - DNA, 1721 bp, Homo sapiens
cacaacatgtgcctgtttgtacagggctcttggcctacaatgtccttcctgctacctctataattcaagcttggggtggctgctgtcaccttgcttctcctataaaagccatgaaacttctcaatcagaaaatagatgaaaaaatcacccaatccagtgatttttaaaactttttagaccacaaaaccttttcttcaagcaatatcttccacagaggcccaatatgtaaaacagaaaaaatgggttgagtagggtacaagacaccactctcaaatgcagcaaggcctccacaatagtccctgaggcccccagagctccagggagctcagtgtaaaaaccactgatgcagtccaagggcctcatttacagaggagggaacagggggaaagtaaaatggccacagtacacaggaagcacaggcaaggttaggttaggatttgggtgccctgactctgtggcctttgtccttggggcttgctgtgggcatcctgctctctctgcaggttgtcggttcaatggggacatgggcagggtggagcactaggaggggctgggtttgcattcccaaatggcatgtctccaaatccctattgggatttcttccaaatattcctcctatttggagcacctttcccgaataaggcatgaaggctgcatgatattggccaagtccctagccttctctgccagtcggcccccagagatggtgtaagaagatctgagtgtgctgctcttcaatcctggagttgaaagtcatccaccagtctttccaagaggggttgaagaaaaggaggaagggtgattgatgatgagggaggagaaaaagaagagcccaggagtaccatggagaaggagaagagaagatgaggaaagcctactctcccctccaagttctgaggggctgtctcctccttccttccctcctccatgccctcagcttgcaggagcagccaatggtatggcctttaacaaggggcccctcctcagcatctgatgctctctcctcagggggaccttaccacccctcagagtgctgcttcacctacactacctacaagatcccgcgtcagcggattatggattactatgagaccaacagccagtgctccaagcccggaattgtcttcatcaccaaaaggggccattccgtctgtaccaaccccagtgacaagtgggtccaggactatatcaaggacatgaaggagaactgagtgacccagaaggggtggcgaaggcacagctcagagacataaagagaagatgccaaggccccctcctccacccaccgctaactctcagccccagtcaccctcttggagcttccctgctttgaattaaagaccactcatgctcttccctggcctcattcctttctacgggatttactcattggccatgcactgaggacaccagggtgtggcaccctcggcatcaagcctcgctctgcagaagttttgctggagcctggtacaaaaaataggtcaggcctgcaatgcaggtagtgagaagcagaaagtgagaaagaaaagcagtgtaaagaccgtctcctcctcagcaacaacagtagcagaccccgttttcttaatgctttctatactccaagcactctgctaggcagtctgtatgcattatcttatttaagcttcatgacaagtgtaaaagctacaaatcatcatttgattttttaggtaacacttcataaagggctctctatagcagtc

SEQ ID NO: 1431 - DNA, 1793 bp, Homo sapiens
gttgctccgcatggtcctgggctgtgggggtagccaggctcggggcacctgagctggaggcggaagcgtgaaataaggactgagtgggcaaagagaacctgggctgagcagacatggccgcttaccaacaagaagagcagatgcagcttccccgagctgatgccattcgttcacgtctcatcgatactttctctctcattgagcatttgcaaggcttgagccaagctgtgccgcggcacactatcagggagttacttgatccttcccgccagaagaaacttatattgggagatcaacaccagctagtgcgtttctctataaagcctcagcgtatagaacagatttcacatgcccagaggctgttgagcaggcttcatgtgcgctgcagtcagaggccacctctttctttgtgggccggatgggtccttgagtgtcctctcttcaaaaacttcatcatcttcctggtctttttgaatacgatcatattgatggttgaaatagaattgctggaatccacaaataccaaactatggccattgaagctgaccttggaggtggcagcttggtttatcttgcttattttcatcctggagatccttcttaagtggctatccaacttttctgttttctggaagagtgcctggaatgtctttgactttgttgttaccatgttgtccctgcttcccgaggttgtggtattggtaggggtaacaggccaatcggtgtggcttcagcttctgaggatctgccgggtgctgaggtctctcaaactccttgcacaattccgtcaaattcaaattattattttggtcctggtcagggccctcaagagcatgaccttcctcttgatgttgctgctcatcttcttctacatttttgctgtgactggtgtctacgtcttctcagagtacacccgttcacctcgtcaggacctggagtaccatgtgtccttctcggacctcccgaattccctggtaacagtgttcattctcttcaccttggatcattggtatgcactgcttcaggacgtctggaaggtgcctgaagtcagtcgcatcttcagcagcatctatttcatcctttggttgttgcttggctccattatctttcgaagtatcatagtagccatgatggttactaactttcagaatatcaggaaagagctgaatgaggagatggcgcgtcgggaggttcagctcaaagctgacatgttcaagcggcagatcatccagaggagaaaaaacatgtcacatgaagcactgacgtcaagccatagcaaaatagaggacagaggagctagtcaacaaagggaaagtttggacttatcagaagtgtctgaagtagagtctaattatggtgccactgaagaggatttaataacatctgcatcaaaaacagaagagaccttgtcaaaaaagagagagtaccagtcttccccctgtgtctcctccacatcctcttcctattcttcctcttctgaatccagattttctgaatctattggtcgtttggactgggagactcttgtgcacgaaaatctgcccgggctaatggaaatggatcaggatgaccgtgtttggcccagagactcactcttccgatattttgagttgctagaaaagcttcagtataacctagaggaacgtaagaagttacaagagtttgcagtgcaggcactgatgaacttggaagacaagtaaagcaatggatggcttcaatatccttgggcccagcaaaagataatgaagggaattgttggaaatagagaattgaaaatataaacattcagatag

SEQ ID NO: 1432 - DNA, 2083 bp, Homo sapiens
acttcccaacggcttcctgctggcagccccgaagccgcaccatgttccgcctctggttgctgctggccgggctctgcggcctcctggcgtcaagacccggttttcaaaattcacttctacagatcgtaattccagagaaaatccaaacaaatacaaatgacagttcagaaatagaatatgaacaaatatcctatattattccaatagatgagaaactgtacactgtgcaccttaaacaaagatattttttagcagataattttatgatctatttgtacaatcaaggatctatgaatacttattcttcagatattcagactcaatgctactatcaaggaaatattgaaggatatccagattccatggtcacactcagcacgtgctctggactaagaggaatactgcaatttgaaaatgtttcttatggaattgagcctctggaatctgcagttgaatttcagcatgttctttacaaattaaagaatgaagacaatgatattgcaatttttattgacagaagcctgaaagaacaaccaatggatgacaacatttttataagtgaaaaatcagaaccagctgttccagatttatttcctctttatctagaaatgcatattgtggtggacaaaactttgtatgattactggggctctgatagcatgatagtaacaaataaagtcatcgaaattgttggccttgcaaattcaatgttcacccaatttaaagttactattgtgctgtcatcattggagttatggtcagatgaaaataagatttctacagttggtgaggcagattggagggaaatgaaatctgtgattgtggtactgaggctcaatgtggacctgcaagctgttgtgattttcgaacttgtgtactgaaagacggagcaaaatgttataaaggactgtgctgcaaagactgtcaaattttacaatcaggcgttgaatgtaggccgaaagcacatcctgaatgtgacatcgctgaaaattgtaatggaagctcaccagaatgtggtcctgacataactttaatcaatggactttcatgcaaaaataataagtttatttgttatgacggagactgccatgatctcgatgcacgttgtgagagtgtatttggaaaaggttcaagaaatgctccatttgcctgctatgaagaaatacaatctcaatcagacagatttgggaactgtggtagggatagaaataacaaatatgtgttctgtggatggaggaatcttatatgtggaagattagtttgtacctaccctactcgaaagcctttccatcaagaaaatggtgatgtgatttatgctttcgtacgagattctgtatgcataaccgtagactacaaattgcctcgaacagttccagatccactggctgtcaaaaatggctctcagtgtgatattgggagggtttgtgtaaatcgtgaatgtgtagaatcaaggataattaaggcttcagcacatgtttgttcacaacagtgttctggacatggagtgtgtgattccagaaacaagtgccattgttcgccaggctataagcctccaaactgccaaatacgttccaaaggattttccatatttcctgaggaagatatgggttcaatcatggaaagagcatctgggaagactgaaaacacctggcttctaggtttcctcattgctcttcctattctcattgtaacaaccgcaatagttttggcaaggaaacagttgaaaaagtggttcgccaaggaagaggaattcccaagtagcgaatctaaatcggaaggtagcacacagacatatgccagccaatccagctcagaaggcagcactcagacatatgccagccaaaccagatcagaaagcagcagtcaagctgatactagcaaatccaaatcagaagatagtgctgaagcatatactagcagatccaaatcacaggacagtacccaaacacaaagcagtagtaactagtgattccttcagaaggcaacggataacatcgagagtctcgctaagaaatgaaaattctgtctttccttccgtggtcacagctgaaagaaacaataaattgagtgtggatcaatttgc

SEQ ID NO: 1433 - DNA, 1712 bp, Homo sapiens
atagctacacataaggatttttgctttcatggggcctcctattgggcaaagccctaaacaggcacaaagggaaaatcacaataatggagacccaacctctgctcctgaacacctgagctgataggagagacccagcaatgacctcaaggagctcccagtccaggaagtggggataggagaagggaagtaaacagaaagactgcccctgggggagctcttagactcatagagggagacaagacatgcaacagcaacgtgtgtacatatactaatgatatctgtggttttgtgctgggaggaggaaacagcagggaatcataggaagctggtccaaggggctccaatgaagaagtctcaagccaggttgctcagaagacgaggccctgggaatccaactccaggcttcccgctaggggtggggcagtcccagctccaggacccagcaacagccgctcggtttccagagtgctggcgctctcccctccgtggccgcgggagggcgctcagctcccgcacacgggcaccacctccccgtccagggcccctcaccgttgaggcattccatctctggctcctcgccctcgggctgcttctgcagccgcttggctttgcagcgcttcttgcagtagaacatgaggcccagcacggcaatgatgtaggccacagcggcacccaccgacaacccaatggtctggatcatcttgtaggggggagggctgccagggccctccgactcctccggcacaggcttgtctgagagacacacagatgggtctgggcaggggctgctaagcaaaagaagccctgcttctctactaactcctcccaaccccatcaacagggcaacttaacagatggcccgggagggtcaccaccttcactggctttaacaagggccagcaggtcctcatgccccaccaaggtcaaacgaagactctgaaggagatgaggccaggggttcccaagctggctttgcatcggaagccaagacaggcgacacggataagcacacctgtcaaggagctaccacaaacccacgttatttgttaagcttcccaagtgacttgataatgtgagtcaggccccggagagcagcatttgggagcttcaggtttagaattccaggcactgcctggcacagagcaggtttttcaataagcagatctgtagaagggatctgctggtctaggggccttttaatggcccacactgaggggcctcaagaggcattaggggaatgaagggagaccatgcaggatcccccaactgccacacacaccccagtggctcccaccaagggggcctcctcagttcattttcatccatttaaactttcacattatactttgtctagaaaaataactctgctgccaaaccaagaaagtttaagagcttctcatttaaaccactttcacctgtggatgcagaaacaagtccccagaggagaaataagtctcccaggggcagagagttaagtgcagggccttttacctgacccatcatcctctctgggcctcctggagaaaagaaccttgtcctactgcattctgacctggtcctcctccccagccacccagagatatgtgtggctgctgcaggaacctgggaggcagcattgtaggaagagaacacccccccactcccccacaacacacacacacacacaccgaccgttggatgttaaataaacgacagcccggctttgagcaagg

SEQ ID NO: 1434 - DNA, 2384 bp, Homo sapiens
gttttttaaaagcaaggataagcagaaagggacatggattttagttgatggatgactcactcactacattcaactgaactgaatctgctctataccagcaaagggacaaattcagaaaataaattgaagatggccatgctgtaacttctaaacatggtttgcttctcagatttacctaaactaagaaaggtttgctttaagaaatagtgctcccttcagaatggaagaatttatctgcctcttatttgatgtggatcagagctaagatggctgactaaataaacatgggggactggaatctccttggagatactctggaggaagttcacatccactccaccatgattggaaagatctggctcaccatcctgttcatatttcgaatgcttgttctgggtgtagcagctgaagatgtctggaatgatgagcagtccggcttcatctgcaatacagaacaaccaggctgcagaaatgtatgctacgaccaggcctttcctatctccctcattagatactgggttctgcaggtgatatttgtgtcttcaccatccctggtctacatgggccatgcattgtaccgactgagagttcttgaggaagagaggcaaaggatgaaagctcagttaagagtagaactggaggaggtagagtttgaaatgcctagggatcggaggagattggagcaagagctttgtcagctggagaaaaggaaactaaataaagctccactcagaggaaccttgctttgcacttatgtgatacacattttcactcgctctgtggttgaagttggattcatgattggacagtaccttttatatggatttcacttagagccgctatttaagtgccatggccacccgtgtccaaatataatcgactgttttgtctcaagaccaacagaaaagacaatattcctattatttatgcaatctatagccactatttcacttttcttaaacattcttgaaattttccacctaggttttaaaaagattaaaagagggctttggggaaaatacaagttgaagaaggaacataatgaattccatgcaaacaaggcaaaacaaaatgtagccaaataccagagcacatctgcaaattcactgaagcgactcccttctgcccctgattataatctgttagtggaaaagcaaacacacactgcagtgtaccctagtttaaattcatcttctgtattccagccaaatcctgacaatcatagtgtaaatgatgagaaatgcattttggatgaacaggaaactgtactttctaatgagatttccacacttagtactagttgtagtcattttcaacacatcagttcaaacaataacaaagacactcataaaatatttggaaaagaacttaatggtaaccagttaatggaaaaaagagaaactgaaggcaaagacagcaaaaggaactactactctagaggtcaccgttctattccaggtgttgctatagatggagagaacaacatgaggcagtcaccccaaacagttttctccttgccagctaactgcgattggaaaccgcggtggcttagagctacatggggttcctctacagaacatgaaaaccgggggtcacctcctaaagtgcctggctcaaaagctactgcaagctcgttactgctcatcctccagaggcccacatcaagtcagccacgactcaaggagactccaaagataaaagctgaagccaaaatatatgattctaaacaccctcctcagctactgcaaagcactgtgagcactttctcaggacgagagccaagaagcccagcacctatgggtcaccacagtttccgaggtcccagatgaaaaagatgcgctcgctaccaccgtgcggcggtcctttctctcgcaatagtctcaatgctcccgggccctgcctccggacgccaggacagaggccgccgactcgaagcgtgagcagttccggaggtacttggagaagtcgggggtgctggacacgctgaccaaggtgttggtagccttatatgaagaaccagagaaacctaacagtgctttggattttttaaagcatcacttaggagctgctactccagaaaatccagaaatagagctgcttcgcctagaactggccgaaatgaaagagaagtatgaagctattgtagaagaaaataaaaaactgaaagcaaagcttgctcagtatgaaccacctcaggaggagaagcgtgctgaataggattcttctcagtttgaaagacaatgaaaaatggttttgtatgacttgaatagtttgtatagtatataatcttttctgaacagatgctatagaactcttttaatatgtttaattcacctatcacactctgttaaaaacacatagaatcatcaataaaaactcaatat

SEQ ID NO: 1435 - DNA, 2794 bp, Homo sapiens
aaagccgtttgggaacttgtggaggcggggtggtagagtgcagagacgagatcgcgaagctttgaaaagcgcgggcaacatccgggcacctgggccgtcgagctgaggcgcgccttccgagcctgctttttagggcggatggcagccatgctgaatatttgggaaagcagttcaagctctatcacgaattagtgacgagttctggctagacccatctaaaaaaggtcttgctctaagatgtgtgaattcttctcggtcagcatatggatgtgtcctgttctctcctgtgttttttcagcattatcaatggtcagctttagtgaaaatgagtgaaaatgaacttgacacaacactgcatttaaaatgcaaattgggaatgaagtcaattttgcccatctttagatgtctgaattcccttgaaagaaatatagagaagtgcagaatattcaccagatctgataaatgcaaagtagttattcaattcttctacagacatggtattaaaagaactcataatatatgttttcaagaaagtcagcctttgcaagttatttttgacaagaatgtttgtactaatacgctaatgattcaaccaagattgcttgctgatgccattgttctttttacatcaagtcaagaggaagttactcttgctgttactccactgaatttttgcctcaagagttctaatgaggaatcaatggatttgagcaatgctgtacacagtgagatgtttgttggctcagatgagtttgacttctttcaaattggaatggacactgagataacattttgtttcaaagaattgaagggaatactgacattttcagaagctacacatgctcctatatccatttattttgatttccctgggaaacctctggctttgagtattgatgatatgttagtggaagctaactttattttggccacattagctgatgaacaaagtagagcatcttcaccacagtcactgtgtctttcacagaaacgaaaaaggtcagatctgattgaaaaaaaggctggcaaaaatgtaactggccaggccctggaatgtatttcaaaaaaagcagcaccaagaaggctttatcctaaggagactctcacaaacatatctgcattggaaaactgtggcagccctgcaatgaaaagagtggatggagatgtcagtgaagtatcagaaagcagtgtcagcaacacagaggaagtgccagggtctctgtgtctcagaaagttttcttgcatgttctttggagcagtttcttctgaccagcaagaacacttcaaccaccctttcgacagtctggcaagagcaagtgacagtgaagaggacatgaataatggcagtttctctatattctaatgcttaatgatggctgagctgggccccagcccagtgactggctcatttgcccctcaagcacgagtttgcatgtttagtgtctaaaagaggttgtccaggacttccttttaatggaggatgggcttttaaaccacatcatcttgtacaacaaccatatctagaaatagctgtttgtcaagtgtatgtaacttgctttaaatccattatgctacttgtgaggcagaagagttttctgtgaaggaaaaaagcccattagagttcttcaattcaatgcacgttcaccctagagcttttaacatctttgctagttttataaaggtatttaaactttattcaacagccatttagagtgccatcaagatggcttgaaatggaattttgtgatttgtagtcaggtatcttttgtatttgattgcaaacatttggattttagttttctcatgtaataccatggccttttttgtgcattgttttttatattttaagactttaagtagaataaaccctggaaaaaagatcaagagtaaaaatatatagtcactttcacttggcttttttagacggagtctcactttgtcactcaggctcaagtgcagtggtgcaatctctgctcactgcaacatctgcctcccaggtccaagcgattctcctgcctcagcctcccgtgcagctgggattgcaggtgcgtgccaccatgcctggctaatttctggtattttgtagagacagggtttcgccatgttggccagggtggtcttgaactcctggcctcaagtgatctgcccacctcggcctcccaaagtgctgggattacagacttgagccactgcgcccaacctggagtgtttttacatattgtaaaattttatttcctaacctcaaattgttctgattttcagatgtgattttttattttgcagtgtgctgcaggaaagaatttaatggaagtgatgccaaatatttctgtattatctgacatagaacagtatcctccactgccaagacagcctgagtttggagtggaataaggtggaagacaaatgtctctgttctttggccctttaagagttagctttttacctgcacaaatggactaaaaaatctggcacaaaacattgttatgtaatgtcttatgatgtgtgcctctccctcccccaaacctgtttacagtcaattataacctgacaaacgagacttttgtaacatattattgttacatctttctgaaaccttcaaaccgtaaggaagtgttaactggcaagcagttgtactttagactttgtgagaaattcataaaggtggctgagtggatttgcatgctttagaactgtgaatagagttctaactgaaaccagaattaatttggctcttgtagcttagtaatgagtcatagctacccacaataacctaataaaaactcaagttcatccc

SEQ ID NO: 1436 - DNA, 2621 bp, Homo sapiens
aaaagttataacagagactaaagaagaaagacgcttactgaataaggtgggatccaacaagagtgtagtatggaatgcaatagcttatgaattactttttttctgagggagctcaacagaatgacacctaagaaagggaaagtctttgacacttggtacgtttgtgatttttggtcattacttgaaaattaataagtttgaaatcactactcttagaaatggaagaaagtgatgactctaatcagcctttctcagcgtgtaggcaagaaattcgaaagagaagatgacccagcaaaccaatggtaggcaaatcccagcaaactgatgtaatagagaaaaagaaacacatggccataccaaaatcatctagccccaaagctacccatcgtattggtaatacttctggaagcaaaggcagctactctgccaaagcctatgagtctattagagtatcttctgagcttcagcaaacttggacaaagagaaagcatggacaggaaatgactagtaagtctctccagacagacaccattgtagaagagaaaaaagaagtcaagttagttgaggaaaccgtggtacctgaagaaaagtcagctgatgttagagaagctgctattgaattgccagagagtgttcaggatgtagaaattccaccaaacataccttcagttcaactaaaaatggacagatctcagcagaccagccgtacaggatactggaccatgatgaacatcccccctgtagaaaaagtggacaaggaacaacagacatactttagtgaatcagaaatagtggttatttccaggccagatagttcttctacaaagtcaaaggaagatgccctgaaacataaatcgtcgggaaagatttttgctagtgaacaccctgaatttcaaccagcaacaaacagcaatgaagaaattgggcagaaaaatatcagcagaacttcatttactcaggagactaaaaaaggtcccccggtacttttagaagatgagcttagggaagaagtaactgtacctgttgtacaagaaggttctgctgttaaaaaagtggcttctgctgaaatagagcctccatcaacagaaaaattcccagctaaaatacagcctccattagttgaagaggccactgctaaagcggagcccagacctgctgaagagacccatgtccaagtacagccatcaactgaagagactcctgatgctgaggcagccactgcagttgcggagaattctgttaaagttcagcctccacctgctgaagaggcccctttagtggagtttcctgctgaaattcagcctccatcagctgaagagtctccttctgtagagcttctggccgaaattctgcctccatcagctgaagagtccccttcagaagagcctcctgctgaaattctgcctccaccagctgaaaagtctccttcagtagagcttcttggtgaaattcggtctccctcagcacaaaaggctcccattgaagtacagcctttaccagctgagggcgcccttgaagaggccccagctaaagtagagcctcccactgttgaagagacccttgctgaagttcagcctctattacctgaagaggctcctagagaagaggctcgagaacttcagctttcaacagctatggagacccctgcagaagaggctcctactgaatttcagtctccattacctaaagagaccactgcagaagaggcctctgctgaaattcagcttctagcagctacagaggcttctgcagaagaggctcctgctgaagttcagcctccaccagctgaggaggcccccgctgaagttcagcctccaccagctgaggaggcccccgctgaagttcagcctccaccagctgaggaggcccccgctgaagttcagcctccaccagctgaggaggcccccgctgaagttcagcctccaccagctgaggaggcccccgctgaagttcagcctccaccagctgaggaggccccctctgaagttcagcctccaccagctgaggaggcccctgctgaagttcagtctctaccagctgaggagactcctatagaagagacccttgctgcagtacactctcccccagctgatgatgtccctgcagaagaggcctccgttgacaaacattccccaccagctgatttgcttctgactgaggagtttcctataggagaggcctctgctgaagtttcacctccaccatctgaacaaacccctgaagatgaggctctggtagagaatgtgtctacagaatttcagtcaccgcaggtggcaggaattccagcagtaaaattaggatcggttgttttggaaggtgaagcaaaatttgaagaggtttcaaaaatcaattctgtccttaaagatttgtctaataccaatgatggacaggctcccactcttgaaatagaaagtgtttttcatatagaattaaaacaacgtcctcctgaactgtagtcaggttgtacctaagctagcaatcagaagctacatggttttggaagaacatactttagaaaagggtgggcagcaggaagtagctttgtcaataaggcaaattaaaggggaccccaagacttggaatacaggttggaaaatgaacaataaaaactgtagcagcat

SEQ ID NO: 1437 - DNA, 1881 bp, Homo sapiens
acacaggcgggtggggatcctttcaacagggctcccagcaatagagcagtcccactctcccagatgagctggagaagtagctacctctcccagacagagttggggtcaaattcatgcacatccaattcccatcaaagcctactcttcccagggcttgctgggagggaaggataactgcaggctcccctgggatgcccccaggtgagggaagttcacagagtttgagacagaggtgaatggacaggtgtgcttcttagggaagcagtcgagaggtggcaagaagttggcagctgccctcaagagggtcctggcaccatggacaatgacaagcctcttcagcctgagacagaagatgagattgaaattgagccagtacgacagagcagcgataaaatgctctactgtgaggccgaatccccgccgactgttgaaaaagtgaaaccagcctgggagaattcggaaacagacctggagattgaagtttccccaagaagggaagcaccgaaagagaacacttgtgaagcaagagaatgacgctggttccatctgacaggatgatgagaaatttttcaccactggacaaaaggagctgtacctggaggcctgcaagctgatgggtgtagtgcctgtctcctacttcattcggaacatggaggagtcctacgtgaacctcaaccaccacggcctgggccccaggggtaccaaggctattgctatagccctggtgtccaacatggctgttaccaaactggagctggaagacaattgcatcatggaggagggcgtcttgagcctggtggagatgctacaagagaactactacctccaggagatgaatatttccaacaatcaccttggtttggagggggccagaatcatctcagatttctttgagagaaacagttcttctatctggagccttgagctttcaggaaatgacttcaaggaagactccgcagcactgctctgccaagccctgtcgaccaattaccaaattaaaaagctggatctcagtcacaaccaattctctgatgtaggaggggagcacctgggccagatgctggccatcaacgtggggctcacgtcactggatctgagctggaataacttccacacaaggggagctgtggccttgtgcaatggtctccgggggaagtcctccgactcaaccgctgcctggtctacctggatatcggtggcaatgacatcggcaatgaaggggcctccaaaatcagcaaaggactggaatccaatgaaagcctcagagttctgaagcttttcctgaatcccataaatatggacggggctattttacttatcctggctatcaagaggaaccccaaatccaggatggaagagcttgatatttccaacgtgctggtgtccgagcagttcatgaaaacgttggacggagtgtatgccgttcacccgcagctggacgtggtattcaaggcagtacaaggcctctctcccaagaaaaccatcttcttgttgacaaaccccatgaaactgatccagagctatgcagaccaacacaaaatcacgatcgtggacttcttcaagagcttgaaccctactgggacaatgaagatgtctgtggatgagttccagaaagtgatgatagagcaaaacaaggtccccctgaaccagtaccaggtcagggaggtgataaagaagctcgatgagaagacaggcatggtgaacttcagtttcttgaacacgatgaagccatagcaacaagtctggtctagaaagaagtctcggcgagaggagtcctcgcaagtcggatggtggcagggaggagagcaagaggtggctgaaatctcgatggacagatgctgtggcaggggctgggcacaagcaaataaagtctggcttggt

SEQ ID NO: 1438 - DNA, 2553 bp, Homo sapiens
ttttttcctaggccagcgggcggttgtctgtggctccgcgactgggcgccccgtcacggaggtgcatttgttgaaattttcagtgctcaaggaaaaaatcctggagcaaaatggaagatccttggtagtccatctgtgatttggaaagagtttgataaagaagttaaaagttttgtgtttgtcctggaaggcagcagccaaacaaacaaaattcagttaccaaaggagaataagcaaagccttggattgatccagaggtttcttgtacttcagatttacgtacccctgggacaagacttctccactgaattgctaattactgatttagggaacatcaaaagaagattatatttatcaacggtccataaggaactatcctccacccctcttcatgcaaaaattccactcttcatgatcaaacgtaaaatttggtgcaatctatgcattgacttagtagcattcaccagtgaaatattcaagggggcagttttccagtcattggatggaattgttgtctcagctaactgtaagctacggaagatcttcaccttaaaatcaaagccacaagacactgctgataaggatgctgtctatggtgttcccttttcaacagatgagcctacagatattataccacgaagctgtcaactaatgacagatgttccacatgtcacacagctgctaaacatgactaaacttcgccaaactgaaataaaattcggaggccatcctctaagatcagcagaatcagatcagttcattaacagaggaacaagtattacacggaacagtaaaaatcaagatgtttgtcatatcgcatttggatccaaagttcttgggccacctccactctctggcagaaggaataacatgaagatatccagcgagacagtgagatccgttgggtccaaaaataaccgatcatgccagccgtccactgtagagaagtgtgttaatggtacagaaatgtcagccttgctgatacctgagtctgaggaacaaggaaataaagaaaatattcaccaaataaagcagactgtacctattcatgcagccaatctacatattatgcatccgcatccccctcaagaaccatcagcagataagaataataacagaagaagattacggttaaaaagtaccagcagagaaaggacagagacacccagcggtagctcttcaggaaataataggattgaagataaagcatcaactatcctcaccactgtgtcccaacaaggagcagagctgttgaactccggcactctaggaccccagtctcctgatcaatcagatgagtggatttttcctgaaaatgctgatcacatttcatatctggcatccagcagacagtctctacttctgggtgatgactcctgcaacccatcacacctgtggctggaagccagcaaagagagtgaacacgaccagcaggcagaggaatcccagagtgttccaaaggacattttcactttttcatcaagaccacgatcagcacctcatggaaagactcagactatgtccccagaggagctctcatttattttggatctaaaagaggataacagtgtgacaagcagagacacccaatcagaggatgatttttacggcggcgacagcagtgaagaggaatatgactggcgaaactatcagccaagccagatgagtgaatccgagttacagatgctagcaagcctacggtggcaacaaaatgaagaactggaggatgctgggacctcccatggcctgagtgcctcccaggtggacaactgtaatgtcagcataagtaccagcagtgacgacacaaccacctggaactcctgcctgccaccccctgtcaaccagggtcgccactatcagaaagaaatgaacccaccttctccttctaatccccgggactggttaaatatgttgagcccaccaatcgttcctcccagtcaacagccggctgagcagcgtccagattcctgtgaaagtttgagtgttcaaggtgaagaagacctcagtgtggaagaggacgaggaagtactgactttgttgtatgacccttgtctgaactgttactttgacccccaaacagggaaatactatgagttggtataatgcctccttccggggcagagagcaggcactcccagctggagcagaatagcagttcagggtcgcttaaggagtcaccacaacttatgtgttgggtgaccacaaaatcaacagtaactgagagaaacgaattcattttgtaaataatgttcaacgttaagaatacctatattccttttgtagatgagtatgattttgaaactgaagaaattaatacagaggcaagattttaggagtttgaattggttcttgtttgttctcattctacatataattttgtttatttcagataattttatgtaaacaaattaagagttattcattcaaattttttgcagtgttaatctgtaaatgatggcttgatgtacagaaaatgtatttttgcttaaaagatgcctgggtaccttttattttatggcatttgtattaaaaataaagtatgatggtaagaag

SEQ ID NO: 1439 - DNA, 2347 bp, Homo sapiens
aaatcggggcccatgtgtgctgttgggaatgtaggatggtgcagctgctgtgtggaggcccccccaaaatttaacatagaattaccatatggtggggcaaccccacttctgggtatcaaagaaatggaagtgggaacttgaagaggaatctggccaccgcgttcattgcagcgctgttcacgatggcccaacggtgggagcaacccgagtgtccgctgatgggtggtgggtaagaagctggggcccatccacacgttggaataggattcagcctggaaaaggaaggacgtttggacgcacgctgcgacatgcacgggccttgaggaagttatgcgagtgaaataagccacaacaggacaaataccgtacgattccatttgcatgagctccctagagtagccagatccacagagacagaaaagagaatgaacgtgcgcatcgaccccagtagcctgtccttcaacatgtggaaggagatccctatccccttctatctctccgtctacttctttgacgtcatgaaccccagcgagatcctgaagggcgagaagccgcaggtgcgggagcgcgggccctacgtgtacagggagttcaggcacaaaagcaacatcaccttcaacaacaacgacaccgtgtccttcctcgagtaccgcaccttccagttccagccctccaagtcccacggctcggagagcgactacatcgtcatgcccaacatcctggtcttgggtgcggcggtgatgatggagaataagcccatgaccctgaagctcatcatgaccttggcattcaccaccctcggcgaacgtgccttcatgaaccgcactgtgggtgagatcatgtggggctacaaggacccccttgtgaatctcatcaacaagtactttccaggcatgttccccttcaaggacaagttcggattatttgctgagctcaacaactccgactctgggctcttcacggtgttcacgggggtccagaacatcagcaggatccacctcgtggacaagtggaacgggctgagcaaggttgacttctggcattccgatcagtgcaacatgatcaatggaacttctgggcaaatgtggccgcccttcatgactcctgagtcctcgctggagttctacagcccggaggcctgccgatccatgaagctaatgtacaaggagtcaggggtgtttgaaggcatccccacctatcgcttcgtggctcccaaaaccctgtttgccaacgggtccatctacccacccaacgaaggcttctgcccgtgcctggagtctggaattcagaacgtcagcacctgcaggttcagtgcccccttgtttctctcccatcctcacttcctcaacgccgacccggttctggcagaagcggtgactggcctgcaccctaaccaggaggcacactccttgttcctggacatccacccggtcacgggaatccccatgaactgctctgtgaaactgcagctgagcctctacatgaaatctgtcgcaggcattggacaaactgggaagattgagcctgtggtcctgccgctgctctggtttgcagagagcggggccatggagggggagactcttcacacattctacactcagctggtgttgatgcccaaggtgatgcactatgcccagtacgtcctcctggcgctgggctgcgtcctgctgctggtccctgtcatctgccaaatccggagccaagtaggtgctggccagagggcagcccgggctgacagccattcgcttgcctgctgggggaaaggggcctcagatcggaccctctggccaaccgcagcctggagcccacctccagcagcagtcctgcgtctctgccggagtgggagcggtcactgctgggggctgcgcagcacgcttgcgtcttttgcatgccgcgttgccactactctgcctgttctggaaggcctgggaccctcccttggagggggcacaggtgggctttgagtaatgagacctggtacttgcatcatccattcatcaagtcagcacccggggatgccaggttctgttaggggcgaggggacgtacagcagtagaggagacagctgagatccctgctcagggggattgaggggggctggcatcccagccggggagacagatgaaaaccaagtaaatcagcagaaaagataatttcactcatgataggagctgtgaggggttagagccaaatagaaatacagcgtgagccacgtgtgaggttttcagtttaaattttctaatagccacttaacagtcaaaggaaacaggtggaattaattttaatcttatttaacccaaatatatgcaaagtattatcacttcaacatgtaatcagtataaacggc

SEQ ID NO: 1440 - DNA, 2346 bp, Homo sapiens
aaaatgcagggcgcagcagccgctgcagtggagccggtaggcctggccggcgggctgaaaggaagtgcgagctgtccgcccagggccgggtatccgcccctgcaggctgtggaggggatgtcaggagactggctggcctcttttcttggcccccgactccttccagtctgacactgaagactttataagcttccccccgaccaccctccacgggctccactctccacgggcctgggcttgcgccgcttcgagatcagcctgggggtcgcgccctcctggtcttgtccacgaagcgccgttcttgggccgttaggagctgctgggaagggctctgataggcccactcctcttctccacccaggagatgagaaggagggcaggcctttttaatctgatcagaatgttaacccatctctccgccttgcggtagaacccctggatacattatttgccctctcgaaaggcaggctctgaatttgattcaggtatatttcttcatagctaaccagcacaatggaaaactcagggaaagcaaataaaaaggatacacatgacgggccaccaaaagaaattaaactgcctaccagtgaagcacttctagactatcaatgtcaaataaaggaagatgccgtggagcaattcatgtttcaaataaagacacttaggaaaaagaaccaaaaatatcatgaaagaaatagccgcttaaaagaagaacagatttggcacatacggcatctactaaaggaactgagtgaagagaaggcagagggattgccagttgtaacaagagaggatgttgaagaagcgatgaaggaaaaatggaagtttgaaagagaccaggaaaaaaacttgagagatatgcgcatgcaaataagtaatgctgagaaactatttcttgagaaactcagtgaaaaggaatattgggaggagtacaagaatgtagggagtgaacgacatgctaaactcattacctccttacaaaatgacatcaacacagttaaagagaatgcagagaaaatgtcagaacactataaaatcactctggaagatactagaaagaaaataatcaaggaaactttgttgcaactggaccaaaagaaggaatgggccacacagaatgctgtaaagctcattgacaagggcagttatctagagatctgggagaatgactggctcaaaaaagaggttgcaattcacaggaaggaagttgaagaattaaaaaatgctattcatgaactggaagcagaaaatttggtgcttattgatcaactatccaactgtagacttgtggatctcaagatacccaggtatccagtgctacattcctgtcccacctctaatcctcgtcatctgctgctgctgcctttggaatcatgtctaatctctgccaggcgttgctggcgactatatcttacccaagctgctggactagaagtgccacctgaagaaatgtctttggaattgccagaaacacatatagaagagaagtcagaattgcaacccacagaagtagaaagtagagacttgatgtcctcatcagatgagagcactatcttacatcttagtcatgaaaatagcatcgaagatctccagtatgtgaagatagataaagaggaaaactcaggcacagagtttggggacactgatatgaagtacttactatatgaggatgagaaggatttcaaggattatgtaaacttgggccccctgggagtgaagcttatgagtgtggagagcaagaaaatgcccattcattttcaagagaaggaaattccagtcaaactctataaagatgtcaggagcccagaaagccacatcacatataagatgatgaagtcttttctctaagacggaaagctgcaaaggaaacacaacttttccttataaatgttctttgggaactgaagtatatccgttgcccattttacttacactttggctcatttttaaaccagctgttatttctaaaggtcatatttacatttaaaatcaaaggtattcagctattcatttacttgcatggtatgagtgaccaaaacggaagcacgctttgtatttctacactgaagtattcagaagcatgacagtgggttcaaggtagtctctgaggttccttttcacacacaaaaaattcactgattaatctgtgattccagtatgaaatagttccattagaaatgtttctaagaaaaacttagaagtttgcatagcattgtctacacatctttccctctgaggatgctcaatgtgatagacagccagtctataatgcaagccaattctccgtagtttaaccctgtgtattagtctgttctcatgctgctaataaagacataattgaaactg

SEQ ID NO: 1441 - DNA, 2496 bp, Homo sapiens
atcttggagatggaggaaagcttgccagaacaactgcacaccccatccactcctcatgttctcagtttgttcttctctgtgatacaaccagcatcacgagaacagccagcagcagctccagcgtgataaaattttcactccttgacaagtgtaagaagccggaaaactgtgcccagccagaagttttgtgtcgcccctttgagatgctgtctaacctccacgagctgcttccgaatcacctgatggagacgctttattcccgcaagagtgaagaggacaagaaaaaatgtgagaatcctgaactctctggcttagaaagaatcttagcaagacatcagttgccaaaagagattaatctgaccccaaagccgaacagaatgcccccgtggaaaagaaaaatcatcaacaatgtaactgacgggtggaagaaatgtcacttgttgaagagaaacacgaaagagcctccaatgtccaccatagttgtcagtaatactattccttccattttgctcccttgctacatggctgaaaaagaacatgcaacccactgaagacctcaagtcagtgatctgtaggctgtcagcatttggcccaattcagtcagccactgtttgtggacgtcaaagtgctatagtggcattcaaagacatgacttcagcctgtaatgctgtgagtgcttttcaaagtaggaccccaggcaccatgttccagtgttcctggcaacaacgactcatgtcaaaagacaaaacttattcaaaaaaatgtacccagaagacacagcctaaggaatacaagcaggaaactgagaaacctgccaacaacagctaaagggacacaaacagtgtctcctgaatctttcagaataacatgaaagctgtatacctattgtggaatttgattagaatccggaacagtcagagttggaacaatgttcacaacaaaatgcaagttaataatgaaggaaaaataaaatcagtcaaatcagcctaatgctttgggaaaaatctaaattcagttaattctaccacaaacaacatgtaacctgcttatgactggcaacgctgaaggaggattcaaaggctctcatctcgcgctgcttgcctgacctcttgctttctaggagctgacttaccctgtcagatgcatacacggcatcgaatagcccaaggagggtgacggagatgcccacagctggaccattgaccactgcaatcagaggcttaggaaaatctataaaacagcccacaaattccctacagaaatggaaacacaaaatcattaaatgtgccaaagcagcatgactaaagcatgggcaagacagtctgactctgagataaagccttctgtcaggctgggtgtttccacagccaccaccagcagtgcctccttgtcctgccacttccctggtcttccgcaccagattcatccagggcatccgtctgaatggcagtggatggaagaccaaccagtgagacctatgggtcaaccctggtttgaatcttgtattctggacagtgagttcagggctgtaaaccagccgcagtcttagagattaggttgggtgactgagcacatgctgcaatatcacaacaagtgggaattacagatttggcaggaataaagagaaaagccttcatgacctcctcctgtgtttacaagactccttcgagtctcctaccttcagcgttcatggaaatctcccattcctctggctggatgagaatttgctaaattcctctgcctcagtgcaagataattttgtttacaactatagctcacttttatgttttccagtcaaatctcatgagaccagcaggatgaacaggtaacagaggtcaaagagaaagaatgaatgcccacctatggatggaggcagtttagagaaatatgcttgtccaaagtcacaattaactgcactgacacagagaagcagatattgcacttttgctcaactaaataccactttgatgactaagaacgggccctctgggatcagacaaaggaaaatcacagtgccttctgggtatatcagaacctacctgaaattcacaaactctaaacaatgaatgctcaactctgttgtatgaagtagccacaattaccaaccttcctgcacaaatcaaacaagagatatcttaaaataggaatgatgctgaaactctacagcttttgtgtgaaacacatagaagaagaaagtaaaacaggacaaactccgtgggcaggctccacctgactagaggattccaatgaaggactcaaactggacaccaaatccacatagttctgcctggcagcttcctgaacggacgatgacaaacaacctcagcccatggtcaatgaatacgcactttgagaaagttactatactaataactaacaccttgcaatgaagaaagaatagaagcacatcaagatcttgaagactccatttacaatggcttaatgagaagcacaaacttctttagaagtacagcaaataaaagcacagtaactagt

SEQ ID NO: 1442 - DNA, 2075 bp, Homo sapiens
aactcaggcccaagtcacaggaatctgaatggtggggtgaccttctcctctagtttaatttcattgcaatactgagaaacttcaactgttttgtctttagaagggaaattcatgtttgtgccaggccagcctttgtaaaagcctttaattggattcactagaagtctgtcttcccgcagtacatatactgtgaattttctccttcggcatttcaaccacttggaatggccactaaagtggcttttgatctaaagtaaactctgattctgtgttgatggggaaccatttctctctaacatggtggtttctttaagatgtttgacttgggccacatgagaataacagatctttgggcagtccaagcaagagcctcctgatctagcagccaagactccccctgacctttggccatgtaccccaaccctctcatctactgcacctgctgggacccctggaacttgggaccacggaagctaatcaagacccctcaactaccacgcaagaactccacagggagttccaagctaactcctcttctaccagctccaaaaaatcacaattacctccaaccaacaaaacctgttgtttccccaaaaatgaaaatccattcagcaaggcaagaagagactaataaatcattttatgtgagtaaaggcaggagagggcggtgacactaaaatttattgagtgcctactatgtgcaagcatgggccctttacatttttatacttaccttgtcgaatcttcacaaagatcctgggaggaggtgctgttaatattgcacattatgcacggcaggaagtgatcaacgtgtcacctggctatcaacttgttcggaatcgggaacagatttctgtcaccttaggggatgagatgtttgataggaaaaagcggtgggaatcggagatcccggacaaaggcagattttccaggaccaacatcatttctgacctagaagagcaaatctcagagctgacagcaataattgaacaaatgaacagagaccaccagtctgcccagaaattgggagctcaaagaggcccatgaagcagaactcagtgagttggagaacaactacgaagcagccttgaaggcagagaagttggctgcccaagagaagctagaggagatgggaaaagaatacaagtatttgaagaatatgtttcgtacgtatcaggacagtatttatgatgaaatggaagagaagtggtcaaaacagaaggcgagatggaagaaggatgagaagttcgagcgagaaaatatcctgctacagcaaaaaaaaaagatgaccaaaaaattcgaaatggagtcaggagaagaagataagaaaataaatgaatcctgcagtgctgtctttgagaacttcattcaagagaaggaggagctcttgaaacaacatcaaagtgacaccttgcaattagaagagctgagaaaaaccaaagagtccaggtgccctggagaagagaccaaataaatagacattggcatgatgtcctgcaacagcttcttcttatgcaggtcatgcaggaagaattgcatgcacaagcccttatcctagagtcactgaacacaaacctctactatacccagttggaactccagaaagagaaagctatagtgggaaatctggagaaaatgcttcaaaccaagtttgctgaaactgaagaaaagtataagcacaccatacagatcctgacggaagagaacattcatctgaagcaaaagataatttctaagaatgaagaaatttgtgaaggatgttctgggagattggcctctattactgtttctaaggatgattctgacactgtgcaagatggtagcaagaaaggacaagaatcataaacaaaaagttgctctgcattgttgaagatggttggcacaccatttctgtaggcccaggaaactcctgggagggttttcttgagaaaatgcatataatgagtttagttcttgggttgctctgactcgctgaatgtctgaaaatgtttgaattctcatctgaatttcacagcttatcacggactcttcactgaaaaatgatgctctccatactgggagctgagctttctctg

SEQ ID NO: 1443 - DNA, 1956 bp, Homo sapiens
cctagcctcaagcgatactcccgcctcagcctcccaaagtgctaggattacagatttgagccaccatgcctggcctcatctggtcattctaaatagtattcccaccacaccccaaaacatctccctattcacttgttttgttttgttttgtttttgagatggagtctcactctattgcccagactgaagtgcagtggcacaatcgtgactcactgcaacttctgccttctgggttcaagcaattctcctgcctcagcctcctgagtagctgggattacaggcgtgcaccaccatgcccagctaattttttttttttttgagatggagtcttgctctgttgcccaggctggagtgcaatggcatgatctcagctcaccgcaacctccacctcctgggttcaagtggttctcctgcctcagcctcttgagtagctggaattacaggtgcatgccaccacgtctggctaatttttgtatttttagtagagatggggtttcactatgttggccaggctggtctcgaactcctgacctcaggtaatctgcctgccttggcctcccaaagtactaggattataggtatgggccactgcggctggccaatttttgtattttcagtaaagacagcattttgccatgttggctaggctggtctaaagtgacctggcctaagtgatcggcctgccttggcctaccccagtgttggtattacaggcataagccaccgcgcccagccctccctattcactttgctactccccttgacttatctgcatgctgatggccaccctatctttatattccaggacaccatggatacccagggaccagtctcccagccttttcagcagcctgagaaacctggtcgtgtccgtcgtcggaagactaggcgggaacgtaacaaggccctggtgggcagccgccggccattagcccaccacgatcctcctgtggccattcgggatccacctgtggtccctactgcctccaagctcgtggtcataacccagggccggctgagccgggagcaccggggtctcttcaaccacgaggtgaaatccctagatgttgcaaggctgcttagcagtgggaccctggtgccaggcagccccacactccccgccaagccctccccaagcccaggcagggcccaggaaccagccccacggtccagggacaaagagaaccaggtgcctggaggttcgggcccaggcccacccagttccccagagttgtctggcgtggggcagctgctggcagagctgcagtgtcagctgagtttgccacaggccttcccccggaggaacctgattcaggatgccagggatgccatcgtgcacaccttgcaggcctgtcatggttgtgtgcctgaccttgccctggtgcttcggggctgccagccacccttgccaggggccaagcctggggtctctgagagaaagatgacacccttctggattaatagccctgatcaagtcccagagcaggagaggcaaaggaagcaacaagggacaaaggagttcaccttccccatgccctacacctccagcatgcccactgcgcacagggggagtctggcaccgccaagaggtccctggccaccatactttccctcactgtcttcgccatctggaacagcctggggtcccccaacagcgtttgacttgttaaaaagcatctggctggtagccacgccaccccctcctcggccctggggggttggcctccctcagcccctgcctcagccttcatcacccctgttgccccgaacctctgtcctggactggagccccagccccccttccccactgcccagcctctcctgggtagtagcccagagcagtccggaagcctggtcttttccacccatgagactgtactgaggagaggctgaggctagggctggggacagatatcttgtactcccagtgacctcaataaagtacttttcatggtc

SEQ ID NO: 1444 - DNA, 2391 bp, Homo sapiens
agttggagaggaggacttcaggcgggtgggacaagagaaactgaatctgaggtccttggggagaagcaggccctggagtcctgggcagcagatgccaggctctgagccccatgactgctgaccctcctcccctccctctcatcctcagcccagagtgaaagtgtccccaggccaaaagcccagggctccaggctgccatcaggatggtgggtgaaggaccctaccttatctcagatctggaccagcgaggccggcggagatcctttgcagaaagatatgaccccagcctgaagaccatgatcccagtgcgaccctgtgcaaggttagcacccaacccggtggatgatgccgggctactctccttcgccacattttcctggctcacgccggtgatggtgaaaggctaccggcaaaggctgaccgtagacaccctgcccccattgtcgacatatgactcatctgacaccaatgccaaaagatttcgagtcctttgggatgaagaggtagcaagggtgggtcctgagaaggcctctctgagccacgtggtgtggaaattccagaggacacgcgtgttgatggacatcgtggccaacatcctgtgcatcatcatggcagccatagggccgacagttctcattcaccaaatcctccagcagactgagaggacctctgggaaagtctgggttggcattggactgtgcatagccctttttgccaccgagtttaccaaagtcttcttttgggcccttgcctgggccatcaactaccgcacggccatccggttgaaggtggcgctctccaccttggtttttgaaaacctagtgtccttcaagacattgacccacatctctgttggcgaggtgctcaatatactgtcaagtgatagctattctttgtttgaagctgccttgttttgtcctttgccagccaccatcccgatcctaatggtcttttgtgtggcgtacgcctttttcattctggggcccacagctctcatcgggatatcagtgtatgtcatattcatacccgtccagatgtttatggccaagctcaattcagctttccgaaggtcagcaattttggtgacagacaagcgagttcagacaatgaatgagtttctgacctgcatcaggctgatcaaaatgtatgcctgggagaaatcttttaccaacactatccaagatataagaaggagggaaagaaaattactggaaaaagctggatttgtccaaagtggaaactctgccctggcccccatcgtgtccaccatagccatcgtgctgacattatcctgccacatcctcctgagacgcaaactcaccgcacccgtggcatttagtgtgattgccatgtttaatgtaatgaagttttccattgcaatcttgcccttctccatcaaagcaatggctgaagcgaatgtctctctaaggagaatgaagaaaattctcatagataaaagccccccatcttacatcacccaaccagaagacccagatactgtcttgcttttagcaaatgccaccttgacatgggagcatgaagccagcaggaaaagtaccccaaagaaattgcagaaccagaaaaggcatttatgcaagaaacagaggtcagaggcatacagtgagaggagtccaccagccaagggagccactggcccagaggagcaaagtgacagcctcaaatcggttctgcacagcataagctttgtggtgagaaaggggaagatcttgggaatatgtgggaatgtgggaagtggaaagagctccctccttgcagctctcctaggacagatgcagctgcagaaaggggtggtggcagtcaatggaactttggcctacgtttcacagcaggcatggatctttcatggaaatgtgagagaaaacatactctttggagaaaagtatgatcaccaaaggtaatattaacttttaaagcaggaggcacatttgtgtttggtacacactctcctacagatgctgatgctgttggtaatgactgctaagtgggttctgagtttaatgaattctgattaaacattcatcagatccacacagacactggttttcctcttcctgagccaagcgttcaggagaggcgacttctgcagacctgcgactgcacactgggaagaggatagaatcggcacttcattcccagggcagaggagcatatgttccgaggttctctgcaacagggcatatgtggtctgactagagaaaagtgaatccagcaattttgctttaggctgagtacccaaaactgctcagaatcatgagcaagtatgtaatgaatcagccctgacattattaattgacatcagagctatcaggatatattatcactgttagtgtcctcagaatggtctaactaaataaaaacaaagctcaactt

SEQ ID NO: 1445 - DNA, 1639 bp, Homo sapiens
aaaacaaaacaaacccgaggcagcatggagaggggccgtggcccctgcagcggaaccggacccagtccctgagccgcccctacacccacagacagcatcgcacagaattattttaaaaaaaagcagtgatccaagcaattgaattggaagcactctggggaaacctgctgtttattgtggaaatcatcttcgatcttggaattgaaagtaaagctggaaaggaatttacaaacaagaaaaaaaagaagtttggaatcggattcacaggatctgggcttggaaatgcctcagcctagtgtaagcggaatggatccgcctttcggggatgcctttcgaagccacaccttttcggaacaaactctgatgagcacagatctcttagcaaacagttcggatccagatttcatgtatgaactggatagagagatgaactaccaacagaatcctagagacaactttctttctttggaggactgcaaagacattgaaaatctggagtctttcacagatgtcctggataatgagggtgctttaacctcaaactgggaacagtgggatacatactgtgaagacctaacgaaatataccaaactaaccagctgtgacatctggggaacaaaagaagtggattacttgggtcttgatgacttttctagtccttaccaagatgaagaggttataagtaaaactccaactttagctcaacttaatagtgaggactcacagtctgtttctgattccctttattaccccgattcacttttcagtgtcaaacaaaatcccttaccctcttcattccctggtaaaaagatcacaagcagagcagctgctcctgtgtgttcttctaagactctgcaggctgaggtccctttgtcagactgtgtccaaaaagcaagtaaacccacttcaagcacacaaatcatggtgaagaccaacatgtatcataatgaaaaggtgaactttcatgttgaatgtaaagactatgtaaaaaaggcaaaggtaaagatcaacccagtgcaacagagccggcccttgttgagccagattcacacagatgcagcaaaggagaacacctgctactgtggtgcagtggcaaagagacaagagaaaaaagggatggagcctcttcaaggtcatgccactcccgctttgccttttaaagaaacccaggaactattactaagtcccctgccccaggaaggtcctgggtcacttgcagcaggagagagcagcagtctttctgccagtacatcagtctcagattcatcccagaaaaaagaagagcacaattattctctttttgtctccgacaacttgggtgaacagccaactaaatgcagtcctgaagaagatgaggaggacgaggaggatgttgatgatgaggaccatgatgaaggattcggcagtgagcatgaactgtctgaaaatgaggaggaggaagaagaggaagaggattatgaagatgacaaggatgatgatattagtgatactttctctgaaccaggtattataatgcttgcaagcttaccagactgacctttgtattactattttgaaatagaaaggtttttgtttctgttttgtttggataatttctttattttagtttgggaattaaatgacttaaaccttggattgg

SEQ ID NO: 1446 - DNA, 2047 bp, Homo sapiens
attaaggccacgccccttttccgcattctagtgcagccctggtgacgcctcctgtggctcagtcacatagctgtgtggtacatgactggaggcatatcactgtcctcgcctggatcacgccaatgtgaccccaaccccacctccctccccaccccatgatgtccgaaaaaacccaacaaagaaaattggctgggaccaagagaaagttcacagactatcatcagtggaacagtgctggtgttggtactggagcaaccgacaccaaaaagaagaaaataaataatggcactaaccctcagacaaccacttctggggggctgccattcacctgaggataaacaacagaaccgagctcagctgaaagaggaaaagaaggcaagccaccaacatcagcaagccctaaggaggcagctagaggcccaggatcataccatacgaatccttaagtgtcagaaaactgaactggaaacagtgctccatgacagccaggatgctgccaggaaatttgaagaagattccaaggatctggcaggccgcctgcatcattcctggtactttgcaggagagttacagcgggctctctctgctatgtccgcagagcacaagagggcggacaggtacatcaaggagttaacaaaggagagggaagccctgagtctggagctgcacaggaacatgtaggatgggggagcgggggatgggaggtctgagagcccttagcatgggtggtgtgctgggaggtggtgggtacaggtgagcatgctagggggtcatacaggtttacatgtgtgcgcagggaagctccagtgatggctgtgccactgactcatggggtagcctcaggcaactcacgtcttctctctggcctgccacctgggacttttaattcctggggtcccttccaatgccatggttctgtggttgtggggcgagggtagagggtcgatcaccaaagcggtcctttctgttcttcgctcattcctttctctactgcctctggccatggcataaccaatgaggagctgaaggagaaaaatgccgaactacaagaaaaacttcgactggtagaaactgaaaagtctgagatccagctccacatcaaggagctaaaaaggaaactggagacggacaaaatcccgctgccacaggttcaaaccagcactttgcaggagaagatgtggaggcaggaggaggagctacgggatcaggagaagctacggaagcacgaggagaagacgtggagacaggagcagaggctgcgggaccaggagaaggagctgcggaagcaggagaagcagatgctgaagcagaaggagcaaatggcggagcaggaggaacagatgcagaagcaggaggagcaggtgcgaaagcaggaggagcaggtgcggaagcaggaagagcagatgtggaagcaggaggagcagatgcggaagcaggaggagcaaatgcggaagcaggagaagcagatgggggagcaggaggagcagatgcggaaacgggaggagcagatgcggaagcgggaggagcagatcacgcagctgccccctggaatgaagaacacccaggagcacccaggcttaggcagcacctcctgcatcctattcttctaccgaggagacaagaaaaagatcaagatcatcaatatctaaaaagaacggtcaacaaggcctacagaagtgtaagccgccacgtgaccttgtgaatacagtctgagaacaaacttgaaaaaaagaaaatttattttaaattgtggcaaaatactggccgggcatggcggcctgcacctgtaatcacaccactttgggaggcctaggcgggtggatcaccaatcctaggtacgtgggaggctgaggttgcagtgagctgagatcacaccactgcactccagtctgggtgacagagtgaaactcccatttcaaaaaaaaaaaaaaaaatttctacctgaggactctaatatctatgtatgtttctattgttttttttgtttgttttctcctttcgtcttgtcttgtcttatggcgtgcctagtaaagttttatctgcctcc

SEQ ID NO: 1447 - DNA, 1911 bp, Homo sapiens
tttcgggcggagcataggggacgatgggtgtccttccccggggaggagggctcgggcagctctcggcggcccacaggaaacgggaggctgcggctccccagggcgttgccctcagacccacaccgcgcccaggacccgggtaagcagaaggaaatgaccccgcccatgagaacacagggcactgagacaaagtccaagaaagctctaagagtggagggaagcagcggagcaaaaggaagagtcagagcgacacccgcgcggcggcatttccaaacagacctgccagcgccaagaaacaggtcgcgccccccatccagctgcatcctggaccccacgcagacgcggagcaggacccacctcccacgcgctccccaaaccctcaccgcaagcggagcggctgacactgaccaagtcccacacagcctgggactccaaggtcgaagccgccggccgctcaccctccgcgaggctctgacggacggcgcccttcccaggctcgcgagcactccccgccaacggctacccatcgcggtccgcctcccaggcattgggcccgcagcgactcccgcctgcaggcccagaggcacagtcgctctcccagtccccgaggggacaagagacacctgcagcacggcaatcccctacacctgtgaggccccctaagcccgcaaggccccctacacctgtaacctcccttcacctacaagatccctgcacctgcaaggacccctacacctgcaacttccctacacctgcaatctccctacacctgcaacctccgtacgcctgcaacctcctttcacctacgagatccctaaacctgcaacctccttacacctgcgtgagcgtcaccccggctgaggcgctggcagaaggcggtgcgggtggagccttcgccaacgtcctgggccccctgagtgctgcatgccagtcctaccagccgctcggtcatctgccaccgcccagcaatggcttcagcatgcagtccctgctaggggactccagggaggagcatcctggccagggctggtgccacagagcagcccagcttctgcaggcagggaactgctgctaaggaagaaggcaagtggcttctatctcttcttatcagatcctcttactgactcttttgagctctaaaaatttttcagctgtttctactggactctttcaggaagacaattgtatctgtctaatatgaacacttctaattattttagacttttttgtcttcagctaaggccttcaaaccttaataccacagaactcggtcacagactgcagcagccaccactcgtctatcgcttgtgtaccaacaggactgtgccatcaacagaaacaccacagagctacatcaatgggggtgctgtgaaaaccggttcaaaacaggcaaatggatctacataaccaaaccgaaagagagcaacgtatgcacaaatggcaataaatgaatttcagagtcttaaatgtcagaaatcaccataagcatcagcatcagctcagagacttctggaaaaaacagcaggaagcaataacgttgagttaacaactgaaactttttcaggtggacgaccggagagcccagccagagcctgtgccaggtacctgcccgttgtggtgtcggccctgccctccagggccgagcccttctcctgcccggggactggtgtcacggtcgaggtggtgtctgctttagctatcgtcacctctttggccttggagctctcctccccacagtggggacaatagctggcgttattgactcgagaggcacagtctttgtggaaacggtgagagatgctgctctcgggctgacactccataaaattaccctaaaaatgggaggacaaaaaaaaatttttgttttaattggggttaatatttagaaaaataaagtactactaaactggc

SEQ ID NO: 1448 - DNA, 2491 bp, Homo sapiens
attcaacacaagagggtctccctgtccagcctttccctccctccctccatcaggcctcagctgagcccaaagtggaaaccccgtttcctctgggatctgagaagtcccaattctttcttccaactctgaatcccaggcttaactagacaatggcttttggatccttgtgccagcccttccacccccccatacacacataagtccagccaagcacccctcagaattcaagcccctcccctaagactcacaatcagaagggactgcctatgcctctgagccccaccccaaaaccaagcacggcctggaagaaagccatcctggagcatgcacacacacacacatacgcaagcacacacagccagacgtgcagaaacaggaatggttacacatacacggtcccggagcacagacctgcccgtggacacacagccagccagactcgcaaacaggtccttgcagctacacacaaaccatcctcaaccgtgagcccgcacaccacggcatgcgtgttcatgcatgtgcacaaacatccacagagccctgctcccttggtctttaggagcatctgagaccccaactgaggcgggactcggcccctgccctatggcactcacactccttggacatgcccacttcaaagcacttctgcagtcggcagtactggcagcggttccgggtcaccttgttgatgatgcagttcttgtcccggtgacacgtgtacaccatgttcttctggatgctgcggcggaagaagccctgggtatggaggggagggagtcaggttgtccacacccacagtgggagcagtgcctggctacggtctcagtctaggggaggagggccaggccagctgctgcccccaagcgtttgcccatcgcctacctgagcaggccagaaaagctggggagaatgattcacctaaaaggatcctcctcaggagaatcccagtacctgcctcaacactgcaggatgggcaggagtcttcccccaacccacagcacacacctgactcctcccttccagggaaaagacctcagggctgctggtgagtcagaaataggaagacatggggctaactgggcaacagccagggatctggaacccacacccctgaactcagaacacaggaaaagaagacaagcccgaagaggccaggaggcagatacacgggctggccagagaaatggaggcgaacacacacatgcactcaggagcaaggcagaaagatgtgagttcaccaagacaggtgtgcaccgacccatcacagacacagacccaggctggccaggggctccacatacaggctgaccagagggacaggcggacagaggaagaacagaccaggaacaaccagacaggacaggcagacacacagcctgagtccttgtgctttgcccttgacctccgtcccacatctggggatagctactccaggctgaagagcagcccagagctgcaaggcccaaagctgtgaagattctgagccccaatctctggaggaagaaacgcacacagaggctcaggccccagggaaaggaggagaagccgggcgcagggctgctaaggaccaggtatacctgcaccctggcacctaacgtgaggatggggaaatccagccagacactggggagcccacagcccgggcacctgaaggggaagctaaggcagggtgcctgctcctaactgcctcctgccaggctgccatggtgaggttcaggcagggccgccgggggaggcctcctgggtccccagccaagagccagtcggcagccagctcaccatggcaacctgggcagcggtggcagagcaggcgtacgccctgccagctggaggatagagacagggaaaggagctgaggcaggaggggacctctggtttgagggagccctgcacatttatgggggaggacctgtggggaaactgtggtaggtgtccctgcttgctgccaacttccacagagaaagaagagcagcaacttcagggacaccccccaactgcacactcccaggacacagaagtggggacatcccattgacctcatcaagctgtccttcccaatgaccccttcaactcaccttgcagccctcacaggcgctgaccccatagtggtagcctgaggacttgtcctgacagacaaagcaaggcttgtagatgcggggtagagggggtggcgagggagggctgggcactatctcttcagaactgctgctctgggtctcaatggctagagagagaagaggggaggggcagttagagacctaggtcgccatccttagtaccaagctccaccctgcctcaccgtccctcctaagagcctctcccagcctcaccactgctggcaggattcaagtcttaagaaaactgggactccccagccagactcagggcaggaggctgccaatgaagcctccagcaccccatcactcctctggactcctaggacccccaccttcaaaaccacaaagatacaatgataaaccatcacatttgt

SEQ ID NO: 1449 - DNA, 2678 bp, Homo sapiens
acaatcatggcggaaggcaaggaggagcaagtcacctcgcagtgattgtgaggctcccccagccacgtggagctttttgtgcggggatcggcttacatgccgtgcctgagagcgctcgatgaagaccagattctcaggggtgccgcgcgcggtggggagccagcaccaagcctccctcgcctttgcaaaccctggggaaatcctctccagcctgcgtctcccaacaacaatagcctttgacttgggaaaacatcctgttgaatttcaccaaagcctgcaacatacatgtctagaagaacatctcactgcttgcttgtttcaaagaccttctccaaatgaaaagcaacatcacgaaataaatccagagtgtgcagagtggagactccactacatgcatccacagccttggtgtcgccggcagggtcactgtttctcatgcaaagaaaggcaaacaaacgcttagaggcatcggacacttactcaaggctcaccaaggtgctcagagccagtgtgagaaaccggggctcccaattcttgcgcagtgctcatgccacactctgcgggctgtgcacacctgggtctcctctctctatcattctggtgtaactctgaggtccccaaaggcaggatgttgggtgtccagggggagccccgaggaactgagcactaggggcagccttggctttactttttctgtgttacatgaaactgataagaaagaggtcattggtttggactgaactcctgccctaggctccaacagaccaaaccaaaatggagtcactcgtgctaagattcacatcaccaaaaagaaactaagatccttatccgacctgctgagaaatccggggagagagacaatagccaaactggccagttttagcctgcatgatgaagaagccatcctctgcttcaacctttacaagaaaagtaactttgaaatgaccaattggctttttgttctctgtgttagcttttctcagtccttttctgccttcaaaagccaacctccactacttggctcattgcaacactcatgaatatagggtctcgctctgttgcccaggctagagcgcggtggtgcaatcaaagctccctgaagcttcaaacatctgggctcaagtgctcctcctgcctcagcctcccaagtagctgggattacaggtgcatgacaccacacctagcaaatttttaaaaaatgtttttgtaagatggggcctagctatgttgcccaagctggtcttgaacttcttggctcaagtgatccttccaccttgggctgccaaagtgctgggattacagatgtgagccactgcgcctggccttttatttatttattttttttctgaggcagggtcttgctctgttgccgaggctggggtgtaatcgtgcaatgacagctcactgcagcctcagcctcctgagctcaagtaatcttcccacctcagcctcctgagtagctgggactacaggcatgcaccaccacacctggccaattttttgtattttttgtagagacgggattttgctatgttgccgaggctggtctcgaactcctgggctcaaggaatctacccttcttgaccttccaaagtgctgggattgcaggcatgagccactgcatgtggccagggttaaatacctttaagaggctcagcccagcgcctgggtttcaaggtgctcagtacatgttagtcaaaatagggtgaacttgacacaggaggagcctcccgctccctgggtcacatgtcatgtttccagaactatttctgtttgtgttttttgagatggagttttgctcttgtccaccaggatggagtgtaatggcctgatcttggctcactgcaacctctgcctcccgggttcaggtgattctcctgcctcagcctcccaagtagctgggactacaggcacacaccactgcacccagctaatttttgtatttttagtagagacggagtttcaccatgttggccaggctggtctcgaactcctgacctcaagtgatctgcccgcctcggcctcccaaaatgctgggattacaggcgtgagccattgggcctggactttattcttctactttcttaataaacttactttcgctttacagactcaccctgaattcttttttttttttttctttgagacagggtctcactgtgttgcccaggttgaatggcactatctcggctcactgcaacctccacctcccaggttcaagtgatcctcctgcctcagcctcctgagtagctgggattacaggcacgcgccatcacgcctgggtaatttttgtatttttggtagagatgggtttttgccatgttggccagcctggtgtcaaactccagggctcaagtgatccatccgccttggcctcccaattacaggggtgagccaccgcccctgtccaagaaccctctcttggggtctagatctgcacccctttcctgtggagtttgaagaccccacagaggaagaggatgagcgtagaacacagcttcttcccctctcagtcccaggacctcgccctgcactcttccacccatcaaccatctccacacttcagcccactccaaaacccccaaaccccagccccaaactcctcagggagatagatttgaggtttcctcccatctcctcatttagtgacgctatgattaaacctttttctctgctgc

SEQ ID NO: 1450 - DNA, 1705 bp, Homo sapiens
agcgcagggaacggcgggagccgggaggtgacggctagcagcgtgagaaggccgctggctcctgagaaatccccctcctccaggtggttttgtccttttggaccaattatctaacctgggcctggactccatctaccactgtcctgcctggttcactgcagctcacttcatcttcctgtgccttctctgaaagggcccctccaaaagtttcctgggtatgtcccctcaagagatggggtttcaccatgtttccagggctggtctcgaactcctgggacctcaagtgatccgcccacctcgggctcccgaagtgctgggattataggcgtgaaccaccgtgcctgaccaggatgatgggaatttttaatgggaaggctgtgacacaacctaaaagaggcaccattagtgaggcaagcaggcagaagtctttggataggaggagcaatgaacctgggagagagcatcgagcaggggcacatgtggagaacctgcttcggaacctattagaggcagaaaagaccctgggcaagtccagttcccatggatcaggcattccttggattgtccgccctgcatttgtcttctctctttcccttttccttgcagtacccccaggctcccactcctgttcccggaaccaagctaggtccggctgcattttctggaggctcaataacaagaagcagacaaactaggaaagaagggaattgactactatagccggatacagggagaaggccggagataattccaccagaccaactcaaaagtgttaaaattttcttagtgcagtctagcattcgcctaagtctattggtaactaattttgtttcagctagaaggtcagaggcaaaaaaaagaaatgctaagtccgattaaaagggccccagtaccttcaaggcctgtctatggtggtacggagtgattatttctatcttatctcttttacagcttggtctggagagctgccttagacttcccaatgaatttattaaaacagctgcctctgtaaccttgacttgtctcagattttgtcgacctgagatgggtcctggcactaggaatgtaaaactgtctctattattttggtttgctccagcaagggagaagcccatgcaaggctcctactgactgtatgtttcatttctagcttggatgtctcagcaccgatttctctaggtttaactatttgctcaatgttcaggcagcactgtggaaatctgtctgtgtaacgggtgctacgcaggcctgtctgtgcgactgtcatgcaggcctgtctgtgcgattgtcagggagaattggcctgccacactcccactcatttctgcattctcattaaggcatattaaggattagaaagggattgctaggccaggcctggctagtcttctttaaatggaactttcagaaagaaaggggaaaaccaaaacaatttcccccttcaactttttaactgtgtttctcttgggccaaagacctcttagggatatcccccgggagctctttttgcgaaggatgttttgtttttcctttgtgaatagggactaattcattcattaaagcaacatctactgagcttgtattacaggtaagcactgctccaggtgctggggaaaacggagtgaactgaaatcacaaaaaccctgcagcgctcatgccatgtacgttctattgaggaaaacaagcaataaacaagattaataat

SEQ ID NO: 1451 - DNA, 1946 bp, Homo sapiens
aaaaagcgtgcgcctcggccttctaggggtaccccaaggcagacagaaggcccatgagggaaaggtgcagcagtccatctggtgcttgagtgtcaacctaaggcctgatgtctatgttggaccttgggttcacctgaggcctgatatccacctggggcctcaatgtccaaatggggcctgatgcccatctgggtcctgggtgtccacctgcagcatggatgtccactggtactttatgtccaccaggggcctaatgtccacctaagacctggtgttcacctggggtctgatgttcagctgaagacaggatgtccacctggaaccgaggaatccacccagggactggtgttgaactggggcctgatgaccacccggggacaaggtacacatcaggcttgttgtccacctgtcaccagatgtccacctgagtcctgatgtccatcttgatcctgtttgtccacattaggcctgatgtccagctggggcctaggtacccactgggggcttcctgttaacctggggactggtgtcattctggggcctaatgaccacctgggttgtattattcacctagggcctggtgtccacttggggcttgagtgtaaccttggacctggcacccacataggattgggtatcaaactggccccttggtgtccagttaagacatcatgtgaacctggcgcctgagtgtccacatgggtccaaatgactactgggggcctgaatgtcaacctagaatctgaggtttactaggggcctaggtatccacctggggcccaatgtccacctgagcctgggtgtcaacctggggcctgatgtaaacctctagttcactatccaccttgggcttaatgtcaacctggagcccgatgtccacctgagtactgatgttcacctttgacctgatgtccacctgtggactgtttatccacccatggcctgatgttcacctggggctgaatgtccaactgtgacctgttgtgcacctggaacctaggcatccacctgcagcctgatgttcagctgggctgggacccggagttcacctgaggcatgatgtccacctgaagcttgatgttcacctgggggctgggtgtccacttggggcccaatatccacctggagactaggtacccacctgggatctggtgttcactcaagattggtgttcagctgtggcctaatgaccacctgggtcacggtgtctaccttggactgggtgctcacctggagccagtgttcactgggggcctagtgtgcacctgagactgggggatgcacctggggcctggtgtctacctggtgcctaggtatccacttggggcctaatgttcatctggaatctgatatccacctggggccttgtaattacctgggttctgggcatccacctagggcttgagtatcctcctggggccttgagttttactagggactcgtgtctgccttggacctgggtgtatatctgttgcctaatgtacaccttgagagtgatgtcaacctggggacagatgtcctcttggggtctgagtgtacacctggtgtctgatgtctgcctggggacttgtgttcaccttagacctgatattcacctggggactgggcgtccacgaggggctgatgttcagctggacactggatatccacctggggcttggggatccatccagaaactgatgtcaaactggggcctgatgtctacctgcggactaggtatccatgtgaggcttgatgttcatccacggccagacgtccatctgatgcttgatgtccaccttactcctgggtgtctactagagacctcatgtccaactagaatttaggaacctactgggggcctcgtgtaaacctggggactggtatgaagctgggtcctaatgatcccctgggtcatattattcacctagggcctcatgtccacttggggcttcagtgtcaacctt

SEQ ID NO: 1452 - DNA, 2555 bp, Homo sapiens
acttccgttccaccatcgctgctggagcagctgccttcaggccctgcgccgcctccggagtccatggccggcacgcgctgggtactcggggcgctgctccggggctgcggctgtaactgcagcagctgccggcgcaccggcgccgcctgcctgcccttctactccgccgcggccgctgcctcccagacgcgtggcctccagaccgggcctgtgcctcccgggaggctggcggggcctcccgctgtggccacctctgccgcggccgcggccgccgcgtcctaccctgccctccgtgcctctctgctgccgcagtcgctggcggcggcggccgccgtcccgacgcgcagctacagccaggagtccaaaactacttacctggaagaccttccaccaccccctgagtatgaattggccccgtccaagttagaagaggaagtggatgatgtctttctcattcgagctcaaggactgccctggtcatgcactatggaagatgtgcttaactttttttcagactgcagaatccgcaacggtgagaatggaatacattttctcctaaacagagatgggaaacgaaggggtgatgccttaattgaaatggagtcagagcaggatgtgcagaaagccttagagaagcaccgcatgtacatgggccagcggtatgtggaagtatatgagataaacaatgaagatgtggatgccttaatgaagagcttgcaggtcaaatcttcgcctgtggtaaatgatggtgtggttcgtttgagaggacttccttatagttgcaatgagaaagacattgtagacttctttgcaggactgaatatagttgacattacttttgtgatggactatagagggaggcgaaaaacaggggaagcctatgtgcaatttgaagaaccagaaatggccaaccaagccctgttgaaacacagggaagaaattggtaatcgatacatcgagatatttccaagcagaaggaatgaagttcgaacacatgtcggttcttataagggaaagaaaatcgcatcttttcctactgctaagtatataactgagccagaaatggtctttgaagaacatgaagtaaatgaggatattcaacccatgacagcttttgaaagtgagaaggaaatagaattgcctaaggaggtgccagaaaagcttccagaggctgctgattttggaactacgtcttctctgcattttgtccacatgagaggattacctttccaagccaatgcccaagacattataaacttttttgctccactcaagcctgttagaatcaccatggaatacagctccagtgggaaggccactggagaagctgatgtgcactttgagacccatgaggatgctgttgcagcgatgctcaaggatcggtcccacgttcatcataggtatattgaactgttcctgaattcatgtccaaaaggaaaataagactctaggggctccagataataagggtgaagcaagaagcatttcatttgcacatctttcttggacttgggatatacagttccagtttattagcagcaactgctagggaaatgattttggtgttttgggttaattgcttctaagaaaagtttcatagtggactgtttagaagaagaaatgaaagatccagtttgggattatgaaataaaccacaaattaaaatttttgtttaaactgtccaggatctgatttaaaaatatggtctttgttttatatgattaaatggtttgttttcatagatgatatgttactcattgtaaagaccacatatttttattcagcagtgttctttaaacgctttcatttaaaaagtaactttttttttttgcctgtgaattgagtgctctgatgtaaaacttctcatggagtgaaacagtgatttattttaaccaaacattcaccaaagcaaagaacggtttcagacctttgaactggtatggtttggcagaatagttttaaattttgctgtatttgattacttagagataggaatttttaaaaatcaaaacaaaaaataccacagcttagtgtaaatgacaatttggcggttttatgtctttagaaatgttttgcctttctaagccttgtgctaaaggcgtataacggtggtgcctatctacttaagggggcattctagtcttaacttaaaagttgtctaaactgtccctccctggctttttttggtttggggtagacctaagggtgtttgttagtctcaaaactgtgaagtgacatgtcagaacagtccagactggtaagaaaattaatggcttcacttgaatttaaaccagctctagataggaaaaaaatcagtctcctcatttgctttttaaatggagtagtacatcccatattttagaacaagtaggggtgccttgcttaaataaaaatagcatttaatgtataattgtgtgaagggtttatggataaagctgtacttctgtcacaatgtggcagtactttctgctttaatattaaacagcttgttatttaaatattggacaaaatggctggcttcaaaatatagtcattaataaactaactttatgtgc

SEQ ID NO: 1453 - DNA, 2291 bp, Homo sapiens
gagcgctttctccatccagctggccgtcatgccgctccttgccgagatggggtttcacaattttggccaggctggtcttgaactcctgacctcgtgattgtcttacatgtccgtgtgaagagaccaaacaggctttgtaggctgtgcatgcctgtgtactgcaagtaccagttccataagactccagttcacaagaccaagggggagccccatggaacccacgtttatttccaggacatcaacgtcatcttccttggggcactgcaccccagtgacctaagggaatacctggagggcccccccatggtggtggaagttcacgaccgggaccgcaagtcagaggagtgttctcagaagcccgtgctgtttggggaggaccctctggattcatacctcaacttccaggccctcatctctcccagagagacagagaacaacccctttgagtcccagaacaagatgtggtacccttatggcatcgcccaggtcagttttgctgacctcctccttggccacaagtacttgaatctggccgtccccatccacagctgtgaggttcagcccacacactgcggccaggacagcaggagaaggaaggttgtggggcttggggtccccagagatggccaccagcacggcccaatgcccaggggcaactacctagaggctgactcccagctcaagttgcgagtggacatcgcggtgccactgagggccggggccagagctgctgatcctgaccttgggggctcccagtttggccgcatcatcttcgtctttgactttaagaaggtctccctgctccacagcctgctgcaggacatcaccatgatcaacgctaaggccctcggcctggactcctaccctgtcaggaccctgcagcagatcctgtcagccttcaaggtgcgtgtgcgggtccaggagcagcagcacctggatgtgctcactggcttccacctgctggacgggaagacacaccttttcatcctggaaggcctggccgaccaaggcttgaggcagctgtgggagaaccaccaaagctggattcccaggtcagaacacaggaaatacaaggtgctgtacaactcacagctgctgttccgcagccggctctatggggacctggaggccatcctgtaccacgtgcacctcttccagcccacggagctgctgctgcagcaggcggtgttcttcctgcgagacactgagcggaggcgggtcttccaggctctagccaggatccacgacatctgctataacagcaccaccctctgggacgtgacggtgagggacctgctgccctcctctgctatgataaaagacttgagccaagagtttgggatgcccctttcgcaagaagaactcacagatgagaaactgtttgccctaccacctcagcctgcccccaatcttgaggactaccacagtcggaactccaccctcaccttagagatccacgcccaccaggagccaagaaagagattcacgtactcacaggattacctctcagccatggtggagcccctggacttgaaggaagaggagaagaaagcccagaagaaatcccgccaggcctggctcacagccaggggattccaagtgacaggtcttcagagcgacaccgaaagcagctttcaggatctcaagctgccacccatcaaagagctgaatgaggagtggaaggaaaactccctgtttgctaatgtactggagcctgtgttggatcgagacaggtggagctgggacaggcaccacgtggactttgatctgtacaagaaaccaccacctttcctcgagctgctcccttcgcccgcaccaaagcctgtaacagtcaggaagaagaaagggaacagccccatctcctgagcagcacagaccctcccacggccaccgcatggtgaacctgcacagcctcccccacacccgaccacaccctcctcaacaatcaacttcattaaagtgcagcaggacagatggcagcagccaggccctgtgtgaggctgggctgggctcacctcgtggtcgtggttgcggagcccaatgcggatggagcggctggcccgcgacagcacggccgtcatgccatacaggttgatgaggatgttggccacccgcttcagtaccagctgctcctccatgatggtctgggatcacagaggctccaagtggggactcactacctagaccagtcccccacatggtccctccctgggctgcatctttgcctgtcttagtctcctgtgttccttgagaaagtggagtcaataacacctttctcttcaggttgtggg

SEQ ID NO: 1454 - DNA, 2259 bp, Homo sapiens
aggaccttgtgggctgggcagcggcctccggccgggaggcaccagctcttcgaacaatgtttaaaagtctcttctgttcatcctaccggggtgccgtctcctgccggtcttttcatctcaccagggccctcgcccgggcaccccccggccaatggaccacagctgcacccggttcatccaccgccggggaccacccactcggacccgagccggcttcaagaggggcaagaggccaaggatccagcagaggcctcgggctcgagtctcagggaccatccctgcgtcacgtctgcacccagcaccggcctcacagcccggcccctgccctgcaccaggccactgccctgttggcccggcccacgagaggccaatggggagcagccaggaggagggactccggtgtcagccaagccagccagaccacgacgcagatggacactgtgggccggacctggagggggcagaaagagcctctgccacacccggaccccctgggctcctgaacagccaccggcctgcagactcggatgacactaacgccgccgggccctcagctgccctcctggaggggctcctgctggggggtgggaagccatcgccccacagcacccggccggggcccttcttctacattggaggcagcaacggggccacaatcatcagctcctactgcaaaagcaagggctggcagcgcatccatgacagccgccgggacgactacacgctgaagtggtgtgaggtcaagagccgagacagctacggcagcttccgggaaggagagcagctgctggaccagcttcccaacaacaagctcctcaccaccaagatcgggctgctcagcacccttcggggacgggcacgggccatgagcaaggccagcaaggtgccggggggggtccaggccaggctggaaaaggacgcagcagcgcccgccctggaggacctcccgtggacaagcccaggatacctcaggccacagagggtcctgagaatggaagagtttttcccagagacctaccgcctggacctcaaacacgagagagaggcctttttcaccttgtttgatgaaacccagatatggatctgcaagcccacagcctccaaccagggcaaaggcatcttcctgctccggaaccaggaggaagttgccgccctgcaggccaagacccggagcatggaggacgaccccatccaccacaagacgccgttccgggggcctcaggcgcgggtggtgcagaggtacatccagaacccgctgctggtggacgggagaaagtttgacgtgcgctcctacctgctcattgcctgcaccacaccctacatgatcttctttggccacggctatgctcgcctcacccttagcctttacgacccccattccagcgacctcggcggccacttgaccaaccagttcatgcagaagaagagccctctgtacatgctgctgaaggagcacacggtgtggagcatggaacacctcaaccgctacatcagtgacacgttctggaaggcccggggcctcgccaaggactgggtcttcaccaccctcaagaagcggatgcagcagatcatggcccactgctttctggccgccaagcccaagctggactgcaagctgggttactttgacctcattggctgtgacttcctgattgatgacaacttcaaggtatggctgctggagatgaattctaacccagccctgcacaccaactgcgaggtcctgaaggaggtcatcccaggtgtggtcatcgagaccctggacctggtgctcgagaccttccggaagagcctgcgcggccagaagatgttgcctctgctgtcccagcgccgcttcgtgctcctgcacaacggtgaggccgacccgcggccgcacctggggggctcgtgcagcctccgccgctggccgcccctgcccacccgccaggccaagtcctccgggccacccatgccgcatgccccagaccagccgggcgcccgcaggcctgcgccacctcccttggtgccgcagcgtccccggccacccggccccgacctggacagcgcccacgatggggagccccaggccccgggcacggagcagtcgggcacaggcaacaggcacccggcgcaagagccttccccggggacagccaaggaggaacgcgaggagcctgagaacgcgaggccctaggggcagccacccgcgcccagcgccccgcgccccgcgccccagccgtgctgcctgccctcagggacctataaagcccactttgctac

SEQ ID NO: 1455 - DNA, 2067 bp, Homo sapiens
ccgtaggagcgaagtcgaatggcgcccccagcggcttggggtgggatctcagtgcctcattcctggcggccccgggagggcgatgccaagtttcgctcttgttccctgggctgcagtgcagtggcaccatctcggctcaccgcaacctccgcctcccaagttcaagcgattctcctgcctcagcctccccagtatctgggattacaggtatgcgccaccacgcccggctaattttgtatttttagtagagacggggtttctccatgttggtcaggctggtcttgaactcccgacctcaggtgattctcccgcctcggcctcccaaagtactgggattacaggcgtgagccactgcgcctggcctactaatactaggttttattccgggcccttcacagttaatgttggaggcccctggaggatggccacacctgggctatttgcagaagcctggacagcacagcaggcagagttaaagcagttaaggcagtatcagctgaagggccacccagctgtgcgtgtgcccaggctccaagaataaggaggttggggggcagtcctaagaaaggaagtcattacctatcggcaacccaggagcagacgctggcataacggcgcacacacagtaaaggtcagaggttcttcttagaatagtccttaggtgttagtcaaacccatgccctgccccaaggagttcattcattcattcactcattcattcactcactcactcactggttctgtttattcactcatttctctatcacatatccatttattgtcattcacccacttatttactcatacattcattcatttgctcatcaatttatttggtacctacatggagccaggtacaggtcttgattaaagagatctggggaggagtgctcccaagaagttcagagcctcactggtgaaggaaagccatgtaaagacagatcttgagaacccaagatcatcaaggagtatccatgatcaagcagagcagggaaggctttttgctttgttttgttttgtttttaacatgctgtgtggttcagtaaaattaaaacaggcacaatgatatcctggatgacaagagctggaggctgtcattctaacaatgtagtgagactggctgtcttgtctcatgcccacccctggaaacatgcgcaggaactcaaagcacctagcacagaggaagtgtctggttgttttaaaggaaaaacaaaaccaaaaaaagcacctcctgctctgaccacccctatttccagttttcccttttggcacagcaaagatgaccttgggactgaggtggaaccatgtaattcttcgtaattccagagtcaggcagacctgggtatgaattccatctttactaactgtgtgactcactgtgtggccatgccaagttacgaggtctctctgtttcctccttcctaaaaaggagataacatccatctcgaaggaagatctggcctgaagagcagtcactcttgcctggcatgcagagaatgccaaatcatattaatgactggccagaatgaagtgcgtgacctcatcactccataactgacaggaaacaactgctagggcaagaaaaaagggtctccagtgagtattcttgtccacacacatccccactcacgttcctggaccactgcatctaactgccgcagcagctaatgaaccttctggaataaaggaccagtttcttaagaagggattgagacctccagtggcctcccacattgtttccggcaagaatttaaaaattatttgcaacatatagtaataaaaactaaccacaggctgggcgcagtggctcgcgcctgtagtcccagcactttgggaggctgaggcaggtggatcacctgaggtcaggagttcgaggccagcctgaccaatatggtgaaaccctgtttctcctaaaaatacaaaaattagctgggcatggtggtgggcgcctgtaatctcagctactcaggaggctgaaacaggagaactgcttgaatctgggaggtagatgttgcagtgagccgatatcgcgccattgcactccagcctgggcaatgactccgtctc

SEQ ID NO: 1456 - DNA, 1801 bp, Homo sapiens
aaaatgcagcgaggagatggtgggcagaggggggccagtgcgggggtcggggaacacaggcagggctcggccccagccccacggctggcccccgtgaaatttcaaattaggctacaaatacatcagacagcatcggcatggagctgctaccaccaaaggtggccagctgggaggagacggggtttgggggattaccttggggttctccaggattccagcctcgtagctgcggaggggaaaggaaagacagggtcagctggggagggacatggcatgtccccatcccccaacacacacaccccattgtgcccatgagcctggtctgccttttactctctgccagagcatctgctgccaacctgcctgaaacattctgggcccaccatagtcacccgtggagctgcaggttgtaagaaagagctggggcctttacctgtcttctggggactgccccggggctctgcacgtggttgggggggcctctgcctctgccttaaacactcttcccctgtgccacatctgggcctcttctccatccttgaatgccacctcctctaagaagccctccttgatactcctgatgaggccgggtccccatgatctatctccccaacaacactcagcagaactgcaatgagggcagtgcatgagccgggcgcttcgacctctgtcctgcctgaggcctctcagctccccgagggcagggaccactggtgtgagggtcaccaggacgtcctggggcagcgcgtggccgtcctttggaatgagcccgggaggaccaaggatgggtggagggtgggatttacctgatgtgcatgaggttctcatccatgctccacgggttcttgggagtgaccgggatgggaatcccgtgttgctgcaggaaagagacagcacaggtggaggtaaggcggctggaaggacgcgtgaggtccgtcccaggggccctgctttttcagagagccccaaactctggcccccattcagacaagaccctggctacctcctagtgttggtcacggtcacctccctggggggaccctattgctggacatgccccagagaaactgcaggaccgtgtgtctgcaatgctgaccttggaggttccttccagaagactttgagtctacatctcaaggacccctgaagcactgagcaagcacgcaggtgccatgcccagccaggtctcccggcaccagccaaccagccccgccaccaccctacgagctggggcttgtgtgaacccgctcgcactgtggaccggggcacctggcaccagagcccaggcagtgcttcctgtggaccccaggacaggaggacacccacctctgcccaggaggcccaggctaagagggctgcaggtcacgcatggaaggcccacctgactcagccttaagaggaggaagaagatgaggcttgtcgccctggggacccgcaccacccttgatgacgcccgactggaatccagctcgtgcactccagcctcctcctgcactcggacacctggcactgctctcctggccccaagcttatagggcacagggtgcactgaaggggccccacccagcccctcagagccagcgagactggatgctctgcctctgagccccttcagcccctcagccccactggatccctgtgggaaccacaggcagcccccaccgggtcaccctcccatctctctcctgatgggatcgaccccactcaggctcattcccaagatggtgagattctagaggcctcctgcagggagcagctgtttccccatcaccaccttaacattaaaatgaggctaaatgct

SEQ ID NO: 1457 - DNA, 2209 bp, Homo sapiens
cacaccttattcaccatcatagaattcatactggagagagaccctataaatgtgaagaatgtggtaaagccttcagtcaaaattcagcccttattctacaccagagaatccatactggagagaaaccatatgaatgtaatgaatgtgggaagacctttagggttagttcacagcttattcagcatcagagaattcatactgaagaaagataccatgaatgcaatgagtgtggcaaagccttcgagcatagctcaggccttattagacaccagaaaattcatactggagaaaaaccatatctgtgtaatgaatgtgggaagggcttcgggcagagttctgagcttatccggcatcagagaattcatacaggggacaaaccctatgaatgtaatgaatgtgggaaaacttttggccagaactcagagattattagacatattagaattcatactggtgagaagccctatgtatgtaaggaatgtgggaaggccttcagggggaactcagaacttcttagacatgagagaattcacactggagagaaaccctatgaatgctttgagtgtggaaaggctttcaggcggacctctcaccttattgtccaccagagaattcatactggagagaaaccccatcaatgtaatgagtgtgcaagaaccttttgggataattctgagctgcttctccaccagaaaattcatattggagagaaaccttatgaatgtagcgagtgtgagaaaacatttagccagcattcccaacttatcatacatcagagaattcacactggagagaagccttatgagtgccaagaatgtcagaagacttttagtcggagctctcacctcctccgacatcaaagtgttcactgtatggagtaatctgcaaaataggaaagcttttagtggaaaagctaaagtccaacttattcatttgttcataatatgcaaatatgcaccccaagtattcaaatccaatgaatggacagaacctcctctgtcctcccactgattttaaatagttggttgaagaagatgaggcacttttttttttttttttaagcattggggtcttgctctgttgcccaggatgggatgcagtggcacagtcgtaactcactgcttccttgaactcctgggctcaaacagtcctcctgcctcagccttccaaatagctaggactgcaggcactaatgaggcacttttatgaattattcattgagaggtttcagtgtgctaagttaaatcataaaagctctttcaggccttaatttcccctctgtccttccttccccttctcctcccccagtggatcacataacaaacattaagggtctgtaccagccatctttcctaaattactcttcagcaaaattgtgggaacaggattccaccacctcctaagaatgagagttgactcattgactgttaccccctgaaatattagaaagtcataatttagaagacacacctcattctcctgtccatgtttagcattggaataatttagtaagctgttattagcttcaaagtcgtccagccctgctatgaagttactttagaagatggcagcattaatgaagaagcaggctcatttcacatctgtcagccttccttattcatctgaagaggctgccatgatggaggaactgacaggcaatttacaacgggattataagtgaaggccttagaatccagaggggccgattaggcaacaccaggggataaacaattggggtcacactgctcggcatgggcagaagcagctcttcaggagctgtccacacttcaggggtgctcagactgactgctcctaagaattctgctgcatatatttttagccccatctcctgccactgctgacagatattgtgacagtaagtagcagacaggactgtggcttcacctcctccgggcacctggctacagtgatgagtcagttcacctgatgacaaaccagggtctggccttgccaaagcacttaagttctcatgacctggaccacactggaggccctggctaagtcaggatgtcgtagcctcttcttggttttgccccttggccttgaaattcttttttcttgaataactttaaaaaaatagagataaagtcttgctatgttgcccaggctggtcttgaatgcctgggctccagcaatctttttgcctcaacttcccaaagtattgagattacaggtgtgagctaccatg

SEQ ID NO: 1458 - DNA, 1753 bp, Homo sapiens
ctgcgctgcgccgcccggcctcactccgcggcccgccaggacccggccccggtgaacgggctcggggtgccgaggtccggctgcggggccgggaagccacctccaccttgccgtctgttacgacccccgaggcgcaaggctgagccccatctcgctatccgggtccggaggggttcaccttagaaggattttttgaagctcttggcgctggctctaaaagaacccacttccttgcggatttcaggagtcaagaatccttaaacggagccaatttgctttgtaaagccaattgcccaagtgacttgagttcgaaaggagatacttcctggacaactgctataaaaacaacaacaaatacttttattaattcggggagcctggtcaccaactggatgctcagttgaggggagatggaaccctgagcagcccatgtacatggaagatctttattgcagagatcttcaaaccaggaaactgaggctaaagagtttagtattctgccaaggccagctaatagttacagagcatggttccaaattcagagctgtcggaagcttaagcccatgtgatgaaccacgaatgtgattttacctcatttaagccttgcagcaaactctgccaagctgtctctaccaggccagaatttggggcaggcaagattttcagcatccctaaaatcacactaagaagataaacatggaaacagcttggagctgccctacccatagtgaggtggtactgactggaagacagcttaaacgatttggagaaaagtggaatacattaatctcagaaaactctaccacctgtagaaagagagctaaaatggagacaaccacaggcagtctaagatacgctgaactactacagaaaataatgcagcatgaaggaatgctggaaggatcttctaagggtgtgaggatacaggcgtcaaagaccccgtgctgagacagctccataacaacatgcagatatttggcaatgagggttcagaagaggacttgctgtggagaagagagaaaagagatgggaagactctgtgaatgaatagagaacactctgcaagcatcccagttcctttggttgccctgcagtctgcaggtaccaggagaaatcaaaagccgcctggaagggctttctgtctgtatggagtcaaggcagtgtcttcaaatctgtgctttctaaaacaaagaaataaccttgatgaaacaaattttccccagaggaaggggagagcccacagtgagctggtaaagaagatgcctggagcaggcagcatcctcaaatggaagagatggtgtcttgctatgttgcccaagctggtcttaaattcctggcatcaagtgatcctcctgcctcagcctcccaaagtactgggattacagaacaaaacaatcagcaggcgggtctgcggcattctaagaacagacactggcaggaacaaaggttacagaagtgaatgactctaagaatcaagcaagacatggagtggcagaaaattaaattctgaatccctaaaagacatgatgcaaagatgacctcctctcccaaggacatgtcctcatcctgcgctgaccgtgtgtggtcatttcagaaaaagcgaacaatggagaacctgcttgaatgatacttagacctgggacaactgaaaggagttgcacttatacaattcggtgcagtggagtcccctgggaggagccccagtcacacgggaagagacagtcacagctgtaataaatgatggctagcatgt

SEQ ID NO: 1459 - DNA, 2308 bp, Homo sapiens
cagtcagcaactgtgtgtcactaatacccggactccttcatcagtcagaaagcagttgtttgcctgtgtgcctaagacaagtcctccagcaacagtgatttcttctgtgacaagcacttgtagttccctgccttctgtctcctctgcacctatcactagcgggcaagctcccaccaaagagaaagtgtccacacaggaccagcccatggcaaacctatgtaccccatcttcaactgcaaacagttgcagtagctctgccagcaacaccccgggagctccagaaactcacccatccagtagtcccactcctacttccagtaacacacaagaggaggcacagccatccagtgtgtctgatttaagtcctatgtcaatgccttttgcatctaactcagaacctgctccattgactttgacatcacccagaatggttgctgctgataatcaggacaccagtaatttacctcagttagctgtaccagcacctcgagtttctcatcgaatgcagcccagaggttctttttactccatggtaccaaatgcaactattcaccaggatccccagtctatttttgttacgaatccagttactttaacaccacctcaaggcccaccagctgcagtgcagctttcttcagctgtgaacattatgaatggttctcagatgcacataaacccagcaaataagtctttgccacctacatttggcccagccacacttttcaatcacttcagcagtctttttgatagtagtcaggtgccagctaaccagggctggggagatggtccactgtcctcacgagttgctacagatgcctctttcactgttcagtcagcgttcctgggtaactcagtgcttggacacttggaaaacatgcaccctgataactcaaaggcacctggcttcagaccaccttcccagcgagtttctactagtccagttgggttaccatccattgacccatcaggcagctccccatcttcctcttctgctcctctggcaagtttttccggcataccaggaacaagggttttcctgcaagggccagctcctgttgggactcctagtttcaacagacaacatttttctccccatccttggacaagcgcctcaaactcatgtgactctcctattccatctgtttcttcgggatcatcttcacctctttcagccacttctgccccaccaacgttgggccaaccaaaaggagtcagtgccagtcaagatcgaaagatacctcccccaattggaacagagagactggcccgaattcggcaaggagggtctgttgcacaagccccggcggggaccagttttgtcgctcccgttggacacagtggaatctggtcatttggtgtcaatgctgtgtcagaaggcttatcaggttggtcgcaatctgtgatggggaaccatccaatgcatcaacaattatcagacccaagcacattctcccaacatcagccaatggagagagatgattctggaatggtagccccctctaacatttttcatcagcctatgggtctgccaatttccatgtatggaggcaccataataccctctcatcctcagcttgctgatgttccaggaggccctctgtttaatggacttcacaatccagatcctgcttggaaccctatgataaaagttatccaaaattcaactgaatgcactgatgcccagcaggccagtctgcttccttcagtccctgctctcaaaggggaaatcccatcacctcagctaaccagaccgaagaagagaattggacggccgatggtggcctctcctaaccagaggcaccaggatcatctacgaccgaaagttcctgctggagtgcaagaactcacccattgcccggacacccccctgctgcctccctcagattcccggggtcacaactcctccaacagcccctctctccaagctggaggagctgaaggagcaggagacagaggaagagatacccgatgacgcacaatttgaaatggacatctaatccagtgcagatgacctggcatgtggagttacagagggatccctcatgccactgctgccaccacctcttcctggggcatccaaaggccagctggcctcatctaatctggaagggagtgacttgttagttccaggcctcctttagttctgaggcagctagaccagggataggagtgggcaacttgccaagcccttaactctacttcctcttcagtctgtggtactcctcctaaccctaaaccctctatgctcaggggctggaactggggaatggagtaagtcaccttctgactgcttagtaaacattcaaag

SEQ ID NO: 1460 - DNA, 1436 bp, Homo sapiens
attgcgcgtgctcagttctgttcagcggctgcaggctgctaagcggctccgggagctgatttggatagaggctgttgagcagggctgaagttggctaatgccgtgtgctgttggctttcaacaattccgatagagaaactgaagcacagagaggttatgcagctttcccaggttcatgtagctggtaagaacagagtccatgttcttatcactcaagatgttctgttggggacggcatgccatggtcttaaggatcgcccccttctcagatgatctgctgctcacctcagatacctacagagactctgctggtgcctgtcaaagctctaatacctcaaggaatgtcagaatatgggacagaaggagccaggacatccaccttgcactgttctgggaggaagaaatacattttctggcctgcgcagggtggctcacgcctgtaatcccagggcgctgggattatgggtgtgagccaccacacccagcctgcttcacaagttttaactctgttactgttgatgatgtacctcacagacccgccagtcatgccacatgtgaatcttgagtgagcaatttaagtttgagtttcttcctagaaaataataaaatgctataggaaaaacagatgtaatttccagagaaagggcagaggactttcttacatttttttgggtactcagtccaaaaagtacttgggtggttgctatccatcaagcaatgtgctagcccatttcacatatattttgctactataatagttgatacaaagttctgcatagttaaaccataggaccagaaggttatactaataataaaaatttggtttgaaaatacttggagaggccgggtgtggtggctcacgcctgtggtcccagcgctttgggaggccgaggcgggcggatcacagggtcgggagattgagaccatcctggctaacacggtgaaaccccgtctctgctgagaatgcaaaaattggccgggcgtggctgcgtgtgcctgtagtcacagctgctagggaggctgaggcaggagaatggcgtgggcccgggaggctggagtgcagtggcgggatctcggctcgctgcaacctccgcctcccgggttcaggcagttctgcctcggcctcccaggtggctgggattgcaggcgcccatcaccacgcctggctgatttttgtatttttagtagagatggatttgtccgtgttggccaggctggttgcaaactgctgacctcaggtgatctgcccgccttggcctcccggggtgctgggattacaggcgtgagtctccctctgtcgcccaggctggagcgcggtggctcgatcttggctcactgaggcaggagaattgcttgaacccaggaggcagaggttgcagtgagctgagatcgtgccgctgcgcttcagcctgggcgacagagtaagaatctgtctc

SEQ ID NO: 1461 - DNA, 1878 bp, Homo sapiens
agacaacactagatggggtggtcagggaaggtctgttgagctgaggctgaaggatgagaaaggccaggaaggacttacttgggaaaatgtttgtggtgatatgtatgagtgctgcaggtgaaacaaaaatgaagccagtgtagttggatcagatacctcaaatcagctatgcatccacagccccagagctaagtgataacaccaggtatgactttttctctcgagtggttccgcctgactcctaccaagcccaagccatggtggacatcgtgacagcactgggatggaattatgtttcgacactggcttctgaggggaactatggtgagagcggtgtggaggccttcacccagatctcgagggagattgaaaatgtatgaaaggcctggtcttgttggacagattgggctaattgatttaattggacaactgttcacacctgctgtggtgtttgcattgctcagtcacagaaaatcccacgtgaaccaagacctggagaatttgaaaaaattatcaaacgcctgctagaaacacctaatgctcgagcagtgattatgtttgccaatgaggatgacatcaggaggatattggaagcagcaaaaaaactaaaccaaagtgggcattttctctggattggctcagatagttggggatccaaaatagcacctgtctatcagcaagaggagattgcagaaggggctgtgacaattttgcccaaacgagcatcaattgatggatttgatcgatactttagaagccgaactcttgccaataatcgaagaaatgtgtggtttgcagaattctgggaggagaattttggctgcaagttaggatcacatgggaaaaggaacagtcatataaagaaatgcacagggctggagcgaattgctcgggattcatcttatgaacaggaaggaaaggtccaatttgtaattgatgctgtatattccatggcttacgccctgcacaatatgcacaaagatctctgccctggatacattggcctttgtccacgaatgagtaccattgatgggaaagagctacttggttatattcgggctgtaaattttaatggttgccgaagagggatccagatgtctctaccctggccaactctttttactccttcattttccagtagttgggcagtgctggcactgtgaacgctgtgaaggttacaactaccaggtggatgagctgtcctgtgaactttgccctctggatcagagacccaacatgaaccgcacaggctgccagcttatccccatcatcaaattggagtggcattctccctgggctgtggtgcctgtgtttgttgcaatattgggaatcatcgccaccacctttgtgatcgtgacctttgtccgctataatgacacacctatcgtgagggcttcaggacgcgaacttagttacgtgctcctaacggggatttttctctgttattcaatcacgtttttaatgattgcagcaccagatacaatcatatgctccttccgacgggtcttcctaggacttggcatgtgtttcagctatgcagcccttctgaccaaaacaaaccgtatccaccgaatatttgagcaggggaagaaatctgtcacagcgcccaagttcattagtccagcatctcagctggtgatcaccttcagcctcatctccgtccagctccttggagtgtttgtctggtttgttgtggatcccccccacatcatcattgactatggagagcagcggacactagatccagagaaggccaggggagtgctcaagtgtgacatttctgatctctcactcatttgttcacttggatacagtatcctcttgatggtcacttgtactgtttatgccattaaaacgagaggtgtcccagagactttc

SEQ ID NO: 1462 - DNA, 1962 bp, Homo sapiens
atctatgtttgccctgcttcctgccagttggaaagacattgaagcccctggatttccatggagctgtcatgagggccttggatgacatggaccatgaaggcagagacacattggcccgggaggagctgaggcagggcctgagtgaactcccagccatccacgaccttcatcaaggcatcctggaggagctggaggaaaggctgtcaaattgggagagccagcagaaggtagctgacgtcttccttgcccgggagcaggggtttgatcaccacgccactcacatcctgcagttcgacaggtacctaggtctgctcagtgagaattgcctccactctccccggctggcagctgctgtccgtgaatttgagcagagtgtacaaggaggcagccagactgcgaagcatcggctgctgcgggtggttcaacgcctcttccagtaccaagtgctcctcacagactatttaaacaacctttgtccggactccgccgagtacgacaacacacagggtgcactgagcctcatctccaaagtcacagaccgtgccaacgacagcatggagcaaggggaaaacctgcagaagctggtccacattgagcacagcgtccggggccaaggggatctcctccagccaggaagggagtttctgaaggaagggacgctgatgaaagtaacggggaaaaacagacggccccggcacctatttctgatgaacgatgtgctcctgtacacctatccccagaaggatgggaagtaccggctgaagaacacattggctgtggccaacatgaaggtcagccgccctgtgatggagaaagtgccctacgctctaaagattgagacttccgagtcctgcctgatgctgtctgcgagctcctgtgcagagagggacgagtggtatggctgtctgagcagagccctccctgaggactacaaggcccaggcgctggctgcattccaccatagcgtggagatacgagagaggctgggggttagccttggggagaggccccccaccctggtgcctgtcacacacgtcatgatgtgcatgaactgcggctgcgacttctccctcaccctgcggcgtcatcactgtcacgcctgtggcaagatcgtgtgccggaactgttcgcggaacaagtacccgctgaagtacctgaaggacaggatggccaaggtctgcgacggctgcttcggggagctgaagaagcggggcagggctgtcccgggcctgatgagagagcggcctgtgagcatgagcttcccgctgtcttcaccccgcttctcgggcagtgccttttcatccgtcttccagagcattaacccctcgaccttcaagaagcagaagaaagtcccttcagccctgacagaggtggctgcctctggagagggctctgccatcagtggctatctcagccggtgtaagaggggcaagcggcactggaagaagctctggtttgtcatcaaaggcaaagttctctacacctacatggccagtgaggacaaagtggccttggagagtatgcctctgctaggcttcaccattgctccagaaaaggaagagggcagcagtgaagtaggacctatttttcacctttaccacaagaaaaccctattttatagcttcaaagcagaagataccaattcagctcagaggtggatcgaggccatggaagatgcgagtgtgttatagcagttatcaagcatgtggacttgtaacaaattcttaggtcaatatgtgaatgcttttagaagctaagctgtggctcaactcatccggacacacacctggattcagcaatgaggcctgaccttttttgctataaccgccccaccactcccctgcccttgccaacatcttcatgaatggaatccttaagggatatttatggacctctccttttctgtgttttccacccctacccccacccgccacccagtaataaactatttccttaccccgc

SEQ ID NO: 1463 - DNA, 1827 bp, Homo sapiens
gaagcggtgcgttttaacaagagcctgggtgccggcgggctgaggcgtaaaatggcgtcagcccccaaaatggcgtcagccccaagtgaggacggggcaggggttttattgtctcctataaacagggggcgtctcggtctgacgtaactgctacgcggtacccggatggcctctttctccatcttcaggggcgcctagatgccaacctcatctccctggtcccggagaggagctttgaggggctgtcctccctccgccacctctggctggacgacaatgcactcacggagatccctgtcagggccctcaacaacctccctgccctgcaggccatgaccctggccctcaaccgcatcagccacatccccgactacgcgttccagaatctcaccagccttgtggtgctgcatttgcataacaaccgcatccagcatctggggacccacagcttcgaggggctgcacaatctggagacactagacctgaattataacaagctgcaggagttccctgtggccatccggaccctgggcagactgcaggaactgttcaagcgattctcctgcctcagcctcccgagttgctgggactacaggcacgcaccaccatgcccagggggttccataacaacaacatcaaggccatcccagaaaaggccttcatggggaaccctctgctacagacgatacacttttatgataacccaatccagtttgtgggaagatcggcattccagtacctgcctaaactccacacactatctctgaatggtgccatggacatccaggagtttccagatctcaaaggcaccaccagcctggagatcctgaccctgacccgcgcaggcatccggctgctcccatcggggatgtgccaacagctgcccaggctccgagtcctggaactgtctcacaatcaaattgaggagctgcccagcctgcacaggtgtcagaaattggaggaaatcggcctccaacacaaccgcatctgggaaattggagctgacaccttcagccagctgagctcctgtgattctacccaggccctggtagccttctctgatgtggatctcattctggaagcttctgaagctgggcggccccctgggctggagacctatggcttcccctcagtgaccctcatctcctgtcagcagccaggggcccccaggctggagggcagccattgtgtagagccagaggggaaccactttgggaacccccaaccctccatggatggagaactgctgctgagggcagagggatctacgccagcaggtggaggcttgtcagggggtggcggctttcagccctctggcttggcctttgcttcacacgtgtaaatatccctccccattcttctcttcccctctcttccctttcctctctccccctcggtgaatgatggctgcttctaaaacaaatacaaccaaaactcagcagtgtgatctatagcaggatggcccagtccctggctccactgatcacctctctcctgtgaccatcaccaacgggtgcctcttggcctggctttcccttggccttcctcagcttcaccttgatactgggcctcttccttgtcatgtctgaagctgtggaccagagacctggacttttgtctgcttaagggaaatgagggaagtaaagacagtgaaggggtggagggttgatcagggcacagtggacagggagacctcacagagaaaggcctggaaggtgatttcccgtgtgactcatggataggatacaaaatgtgttccatgtaccattaatcttgacatatgccatgcataaagacttcctattaaaataagctttggaagagatt

SEQ ID NO: 1464 - DNA, 1853 bp, Homo sapiens
agttcagtttggcggttccggtaccgctctcacattggggcgggatgtgggagcggctgaactgcgcagcaggggacttttattctcgtctccttcagtgtcctgcagagataaagtgatgactgactcctgagtgtgaataacgggagagataatgtagttctgtttttcacatgtggttctgcgtttcaggaaatttaatgaagaaaagaaaggaatccgtaaagacccatttctctatgagcctttagaaaaggaagaaacaagtcatattgaagaacttcaatctgaagaaactgccatatctgatttctctactggcgaaaatgttggaccacttgctttaccagttgggaaggcaaggcagttaattggactttacaccatggcccacaatcctaatatgacccatttgaagattaatctgccagttactgcccttcctcccctttgggtaagatgtgacagttcagatcctgaaggtacttgttggctaggagctgagcttatcacaacaaacaacagcattacaggaattgtcttatatgtggtcagttgtaaagctgataaaaattattctgtaaatcttgaaaacctaaaaaatttacacaagaaaagacatcacttgtctactgtaacatccaaaggctttgcccagtatgagctctttaagtcctctgccttggatgatacaatcacagcatcacaaactgcgatcgctttggatatttcctggagtcctgtggatgagattcttcaaatccctccactctcttcaactgcaactctgaatattaaagtggaatcaggagagcccagaggtcctttgaatcatctctacagagaactgaaatttcttcttgttttggctgatggtttgaggactggtgtcactgaatggctcgagcccctggaagcaaaatctgctgttgaacttgttcaggaatttctgaatgacttaaataagctggatggatttggtgattctacaaaaaaagacactgaggttgagaccttgaagcatgacactgctgcagtcgatcgttccgtcaagcgtcttttcaaagttcggagtgatcttgattttgctgagcaactgtggtgcaaaatgagcagtagtgtgatttcataccaagacttggtgaagtgtttcacattgatcatccagagtctacaacgtggtgatatacagccatggctccatagtggaagtaacagtttactaagtaagctcattcatcagtcttatcatggaaccatggacacagtttctctcagtgggactattccagttcaaatgcttttggaaattggtttggacaaactaaagaaagattatatcagttttttcataggtcaggaacttgcatctttgaatcatttggaatacttcattgctccatcagtagatatacaagaacaggtttatcgtgtccaaaaactccaccatattctagaaatattagtcagttgcatgcctttcattaaatctcaacatgaactcctcttttctttaacacagatctgcataaagtattacaaacaaaatcctcttgatgagcaacacatttttcagctgccagtcagaccaactgctgtaaagaacttatatcaaagtgagaagccacagaaatggagagtggaaatatatagtggtcaaaagaagattaagacagtttggcaactgagtgacagctcacccatagaccatctgaattttcacaaacctgatttttcggaattaacactaaacggtagcctggaagaaaggatattctttactaacatggttacctgcagccaggtgcatttcaagtgaagtgtgctgatgaagtcctctataagcacaagcc

SEQ ID NO: 1465 - DNA, 1940 bp, Homo sapiens
ggaccaggaacaatctcagttacaaagtgaactactaaatattgagtctcaatgtattatgttgggtgaaggaatcaaggaacgacaacgaagaattaaagaatttcaagaaaagatagataaggtagaagacgatatcttccaacacttctgtgaagaaattggcgtggaaaatattcgtgaatttgagaacaaacatgttaaacggcaacaagaaattgatcaaaaaagattagaatttgaaaaacaaaaaactcggcttaatgttcaacttgagtatagtcgcagtcaccttaagaagaaactgaataagatcaacacattaaaagaaactatccagaaaggtagtgaagatattgatcacctaaagaaggctgaagaaaactgtctgcagacagtgaatgaactcatggcaaagcagcagcaacttaaggacatacgtgtcactcagaactccagtgccgagaaagttcaaactcaaattgaagaggaacggaagaagtttctggctgttgatagggaagtggggaaattgcaaaaagaagttgtaagtattcaaacttctctggaacagaaacgattagagaagcataacttgctgcttgattgcaaagtgcaagacattgagataatccttttgtcggggtcactggatgacatcattgaagtggagatgggaactgaagcagaaagtacccaggcaacaattgatatctatgaaaaagaagaagcctttgaaatagactacagctctctaaaagaggatttgaaggctctacagtctgatcaagaaatcgaggcccaccttaggctcttattgcagcaagtagcatcccaggaagatatcttactgaaaacagcagccccaaacctacgagcactggagaacttaaagactgtcagagacaagtttcaagagtccacagatgcttttgaggccagcagaaaggaagccagaatgtgtaggcaagagttcgagcaagtgaaaaaaaggagatacgatcttttcacccagtgttttgagcatgtctcaatctcaattgatcaaatctacaagaagctctgcagaaacaacagcgcccaagcatttcttagcccagagaaccctgaagaaccttacttggagggaattagctataactgtgtggccccaggcaaacggtttatgccaatggacaatttgtcagggggagaaaagtgtgtggcagccttggctctcctgtttgccgtgcacagttttcgtcctgccccattctttgttttagatgaagtggatgcagccctagacaatactaacataggcaaagtgtcaagttacatcaaagagcaaactcaagaccagtttcagatgatagtcatctccctaaaagaagagttctattccagagccgacgcgctgatcggcatctatcctgagtacgatgactgcatgttcagccgagttttgaccctagatctttctcagtatccagacactgaaggccaagaaagcagcaagaggcacggagagtcccgctaggggcagtcctgcagcagtcacctgatcactgttcagttcccactctaatactcacacagctcctccacaggagacttctggagcaagcaggaccagcctggtgcaccctttaagagaaaccttagtcgttctagccaaagaggctgtggctcactttagttgagtgttcagacctcattctagtagggaaagttttcagtgagagctggtgttaaatgagtttttaaaaaacaaacaaaaggtacaattttgtactataattctaacttctattttgaaataagctagtttggttggaaaaattttgaattcagcttcatcttcactctgatcttgccttacacccaagtaatcttgaagggaacttctcttggtttttaaacatactagttataagattgttaataaactgttgaacctg

SEQ ID NO: 1466 - DNA, 2515 bp, Homo sapiens
aaaactcgattcaccatcgccagccacgggaggactgggaggacctccagaggaggttaggtcgacttcatggtaactttagatccggaaacctcccaggatttttcttgtcttccctttgatctctcttccacctacccaacaggacaggactcgccgcctttctttcccggcagaaaggggtccgttgcggacaagaccaaagtgagcagctggtttcccctacttgtccttccgggcctgggcgtctcgggaactcaggctgacccgacacctaactcctggcgagtgggaccaccaggagcctggaagagcgcgcgcaccgagatggaagttgggcgccggggtcgagaaccgcggtcaaaccctcttcttccaggggcaccgcgcacctgcccccggggatgccgaaggaagtgacccataaagcttctctgcaaccgaaagaggcctgaagctccgggagggccgagaggagcctcgttgagcaaacccagccctctgcctggctggccctggtcaacaggctcggaagaggccgatttggaggacagaacggaagaaaagacctaaaggtttcgaatctcatgacgcagagatgttaaaaatctccaatcctaaggtccgactgtgcgggggagcgagggggtctcaagctggatcgacccctgagccttcatctggagagtcctctgcacaagctcagacagcaggacaacgcgcatcagtggttctcaagagggggcaacttcgcccttacacgcctctcccatccccgctgggacactaggtcacgaatgggggaagcggggagggagaatgctaaccccctggcatgtatctagtcagcggaggcgacggctgctgctaaacaccttacaatccacgggagggcccctcccctaccccgaagtagctattccgcagaggtggagagactcgcgtgtagctcaatgcccacgcacttagccgatgggaaatcacgaattgatgaccagttggctcttggatgtgaggaaaaatctccagagtcagagggaactctcgaagttttgcccggagcaaacggaagggtggcgttgccatcgcctaagatgggaaaatggcaggtgtcacaggttgcaggggaaggtcggagaccagctgagggccccggagccttcctggaaagagtttcccatccagcccgcctcggtttccgcatccgtcttattccttatgacgttgagggtgctggcgtctgggtcctttatgatgcagagggtgcccccgtctcaccccgggcgcctccgcgctcccgcctcctcctggcaacctggtgcgcggctccggatctggcgacccacgaccggctggtcacttgctgccacctcgcaaaggcgcgtctctagtccagtggtgagctgcggccgggtcgctgtaactcgctccaggactcgggactcgtggccttggtgtccctcgcggagccctcggtgtgtcgcctgcaggctctttttttgaagaaagcagggagggaatggccttgtgagagactccaggagcaaagagcgaccctcacaaggcccaagtcctcccagagctcagggaagctgtggcttctgacggaagaagggagagaaagctccctcctgtgtgtccctggtggtctagtggctaggattcggcgctttcaccgctgcggcccgggttcgattcccggtcagggaatcgttttacactggccgccctcccgcaggaatcttccttcactacgctgtcagccggcctgctccaagagccagaagcagaacagtctcctcagcggggtcaaagacgggcgaaggagggcaagtgcttgtggaccacctctcacgacacaccgttcctatttatctccgtgtccgtcatccgcgggagcagctttagagagcgactgagcatctcggtccggtgtacacagcccggcagagatgccagcccccgtggagctgcacccaataagcccaccttctttcccgtcgccaccccggagacgcccatcgggctgagctgcgaataactaagagagaggccaagccaagtcgtggcgtttgtggcagccccggacacgggcaccagccagtcagcggagcctcctcacctccgttgccagcgaaggcgctcgttaggccttgggaagaggggagagaccgtggtcacgaagggggttctcccagagtgaagcttcttcatcgcactctagagttgctgattcctgtgatttcctccatgtgggaaacggtgtttgtgctagaagaggctgcgctctttacctgacataagggggttcaagactgacatcgcctcacgcctacccgaaaacgtttacatggcttgtctctttttttttctgtcctaaagtcgcctcatcttcacatcccctcattttttcttccacactcgagagtgtctctctctctcattaaaagctccaccaaatatttgaaatatctcaaccagaaagactgcaataaatacattatttcattcgtgg

SEQ ID NO: 1467 - DNA, 1940 bp, Homo sapiens
aatagattgtactggcttcggcttacctgctgtgagcccactggcaggctcctggaagctagccttcgcccttgctctttcaccggcactccctgcattaatttagaaaaagatcctgcagggattaacaggacctgatggatcccctggctccattgggtcaaagggacaaaaaggagaacctggtgtgcctggatcgcgtggatttccaggccgtggtattcctggaccccctggtcctcctgggacagcaggactccctggagagcttggccgtgtaggacctgttggaacaattggctttcatgatggagatccattgtgtcccaatgcctgtccaccaggtcgctcaggatatccaggcctaccaggcatgaggggtcataaaggggctaaaggagaaattggtgaaccaggaagacaaggacacaagggtgaagaaggtgaccagggagaactcggagaagttggagctcaaggacctccaggagcccagggtttgcgaggcatcaccggcatagttggggacaaaggggaaaaaggtgctcggggcttagatggtgaacctgggcctcagggtcttcctggtgcacctggtgatcaaggacagcgaggacctccaggagaagcaggtcccaaaggagatagaggggctgaaggtgctagaggaattcctggtctccctgggcccaaaggagacacgggtttgccaggtgtggatggccgtgatgggatccctggaatgcctggaacaaagggtgaaccaggaaaacctgggcctcctggtgatgcaggattgcaggggttaccaggtgtacctggaattcctggtgcaaagggtgttgctggtgaaaagggtagcacaggtgctccagggaagcctggtcagatgggaaattcaggcaaaccgggccaacaggggcctccaggagaggtgggaccccgaggaccccaggggcttcctggcagtagaggagaattaggaccagtgggatccccaggcctaccaggtaaactgggtgtagtcggtgaaccgggtccaaagggtgaacagggtgcctctggtgaagaaggtgaagcaggagaaaggggggaacttggagatataggattacctggcccaaagggatctgcaggtaatcctggggaacctggcttgagagggcctgagggaagtcgggggcttcctggagtggaaggaccaagaggaccacctggaccccggggtgtgcagggagaacagggtgccaccggcctgcctggtgtccagggccctccgggtagagcaccgacagatcagcacattaagcaggtttgcatgagagtcatacaagaacattttgctgagatggctgccagtcttaagcgtccagactcaggtgccactgggcttcctggaaggcctggccctcctggtccccccggccctcctggagagaatggtttcccaggccagatgggaattcgtggccttccgggcattaaggggccccctggtgctcttggtttgaggggacctaaaggtgacttgggagaaaagggggagcgtggccctccaggaagaggtcccaacggtttgcctggagctataggtctcccaggtgacccaggccctgccagctatggcagaaatggccgagacggtgagcgaggccccccaggggtggcaggaattcctggagtgcctggacccccgggacctcctgggcttcccggtttctgtgagccagcctcctgcaccatgcaggctggtcagcgagcatttaacaaagggcctgacccttgaaaggcttactgctgcatggctgtctgcatgaaccacgcctggtgaaggagcctgggtgagaaacaccatccaaagctggggcaaagatgattaccttcagcatgattacaatgtattaccttcagtatgattacagaagtcctacttgacaatc

SEQ ID NO: 1468 - DNA, 2868 bp, Homo sapiens
gagatgacctcctctggctgtgatttggcatttcctccgtatctaacttgcctgggggactcctgccaagccagaggagcagggcacaaatggaggcagatcctgctggagatgggcatggggagggggactgacagagcacccttggctgctgttagacagttgttcagtcatcacacctgttaacccaagttggtcgggtctgtccaggtgctgtgactcaccttgccggctcagaagagacactgaatgatacggtggggagcacaggcctaggggaatcctgcagctgagtatctggcttttgctctgccaatggtccagtagattagggggtctgtggcctgtttcctcatgctctgagattctgtgcccagcccaggtctctctgttctggaaacaaaggcccagatccccatatttccttcttgctgttttgttttggtttttgaagagtctcgttctctctcctggagtgcaatggtgtgattttggctccctgcagcctctgccttccaggttcaagtgatgctcatgcctcagcctccccagtagctcagattacagacatgcatcatcatgccaggctaatttttttgtatttttagtggagacagggtttcaccatgttgcccaggctggtctcaaactcctggcttcaagtgattcacctgcttcagcctcctaaagtgctgggattacatgcatgagccactgtgcccagcctcttgctgtttttatactttctccatagccataactgtttttgatggaagtttttgtttttttgaatttcttatttttattacccctgcatcatctgctaccctgaaggatctggagtcctcgagccgctgtgaagcagtcctcaagcggcagttatggcagtccataaaggctcgggcacagctggaagcacacgtgacacagatgttggaacaagtccagctagagacagatgaatatactcaacatctaaaaggagagagggcccggtggcagcagagggtatggaaaatgtcagaggaggtttgcacatggaaggaggagaagaagcatgacaggcatcgggtacaggagctggagaggagcttggccgaactcaaaaactagatggctgaacccctgcccctggagcccccagcagggccctctgaggtggaacagcagctacaagctgaggccgagcacccgaggaaggagcaggagagtctggcaggacagctccaagctcaggtgcaaaacaatcaaggcttgagtcacctgaactgggagcaggaggagaggctgctggaacgggagacgctgcgggagcaggagaggctgcaggagctggaggagaagctgcaggagtaggagaggctgggagagcgggaggagagtctgcgggagcgggaggagagtctgcgggagcgggaggagaggctacgggagtgggaggagaggctgcggagcaggaggacaggctgctcgagctggggcggaaagccaagctctgggaggagcaggcagagacgtgcatgcaggccctgcggaaccacaccaccatcaaccacgtgctctctcagaaccatgagctcgactagcagctggctgggccacagagcggcttagaggagctgaacaacgagaataagagtgcactacagttggagcagcaagtaaaggagctgcaggagaagctgggcaagctgaaggagactgtaacctctgcccatccaagaagggctgggaggagcacctggaaggtaccagccagcagaaccagcagctacaggcccagttgagcctcatggcactccctaggcaaggagatggaggagaacatctggacaacgtggaagaggaggctcagcttggcccatgctgagcatcccggaggacctggagagcaggtggcgtttttcaactccgctggagccagtgcccaggaggagcaggtatggcttatgtgggcagctgagggagcaaagggtgtggtgccagcgcctgactcacccgggtggccttggcccagaaggagccagaggtagtggaaccagccccagggactggggatgagtctgtgtgtgggtagactcatcaggccctgcagggatccatggagaagttgcagagtggctttatggacctcctgaaggagaaggtggacctgaaggagtgggtggagaaactagagcttcgatccatccacctctcaggacaggcagacaccatcagaaagtaaatcacaacatacgagggccagagggcagcgccaaagacgcggcaccaggaggaggaggacatcatcaggctggcccaggacaaagaggagatgaagatggggcattgcagcacctctgtgggggtgggggtggggtgggtgtgagcgtgggcaggggcactggcaccagcgtggcagctgagcacccctcccttcaggtgaaactgctggagctgcaggagctggtgttgcggcttgcaggcggtcacaacgaggggcatggcaaattcctggccgctgcccagaaccctgctgatgatcctgctccaggggccccagcccctcaggagcttggggctgctgacaagcagggtgatttttgtgaggcgagccgacagcctggagcctgcaccaggagaggccagggagggttgtccccatgacaaccccactgcacagcagctcatgcagtttcttcctgtgatgcgggacccccaggagtacccaggcttgggcagcagcccctgcatgccattcttttaccaggctgccaagaacagggagctaaacatcaccatcatctaagagctggtcaagaaattaaaaaagaagaaaaaaaagttatggggttaatctcctacacaattcatttacttcatttg

SEQ ID NO: 1469 - DNA, 1924 bp, Homo sapiens
atatcgggggtgcactggcacagaggaaaggccatgtgaagcaagaaggcagccatctgcaagccaaggagagaaatttcagaaggaaccaaccctaccaacatcttgatcttggactttaagctgccagacctagatagcttcacacataaggaaccaccttagcatccttcactcaatgctgaaagtgagcatctggtctgcctttgggccaatgctaaatctcttcaacagcatcctttaccgaagcaacattgtcccagaatctgctgaagcagcaagaaaagaggtcagcagtaggaccaagctgcatatcttcttaggcaggagtgcatcactattgaggccaaatggacactcactagcaaggtggctggaaacaactgttctagaaagaacccaaggaaaaatttccaggaggaacccaaacagaaaaatctattttatacattttctacagaaaatgcaccccatcattgcttatagcccacccacgtggactgctcattctgtgaatcatgttttacaggtgcgttttggctactgaaagcttggagtcaaacctgtatgcctcttcctttgtctgccaatatattttgtatattaggcctcggccctggctccaatttagattaccattttttcccctactttgtccctctctttgaccttttaacttacttctattctttgtgtgcagaactttgtaagccctgttagatccttgctgcagcaatgtacataagcaatgtaataaacagaaaggatgagatattcaatgcccatatcaaatcatcctgtgtgtgtagaatcacaagtgcatttcattctagacacaagacataattttgcacatttcaaaatgcagtaaacgattcctagaatgctattttagaagctttccttaggaaacagcaccacgtggcataactcacctaccccagtagtgtgatctccctttggtcctgtgtaggaagtgggagtttctcccctcctcctgtgccagctgctccggtttcttttctcctgagtaaatgtacattcatcttgctcgaaagtacactctccaggtggaggtggaagtttctctgcaagaaaatagcagatgttgcaatcactgagactctttcaatgactctgtgttgctagcagcccactctgcatgtatgaatgttgtctggccatatgccatgcgatggagaggcagcccccattggtggcccacctacacggagccactgcttccagctagaggctgcattccactgcgggtcctgccacagacatagagaacaatcagatatacagatctaaaatactgggctactttgagaaaaaaactttctctgacttgtgaatttttatgaatttctttttataaagctctggaaattataggtatattgcctttatgaaaatatggaaaataataaaatttcataatgcaggcactttcttcagaaatcctggatgagtgaagggtatcctcataacaactccacagttgctttgtaggtaggggagaatgtgagagtgctaaatggactcctggaggcatagctgtgtggaacaaatgacttcacttctctgtgccttagagttcttatctctaatgtgggaatattgatggtagtcacttcatgggtctgtgaggattaaatgagatggtatatgtaaagtgatcatttttaatgtgaagttctcaataattaaatttgagaacttattttgccacccagaggtttattttccttttcccaaatccaatgtttatgtctttgaatgctatcttcaataacattcataattattagaatggtgcttcttcccaatttattggggacttttcctttgactaaacttggttgtacctccctatatccagattcttagccaaatttttctaataaatagcttgtttcat

SEQ ID NO: 1470 - DNA, 2112 bp, Homo sapiens
acttgagctgtctctgctgcctctccaggggccacctggcctcaggaccccaggcaagcaccgtgggttgggaaccaacctggtggaaaactaaaatcagcccatcttcaggtctaccgcggcggatgaagcctcacgcagaacagatacagttgcttggcaagcagggggctgcagtttctcaactttgccctttggtgcttgtaagtggacatatctgcagagaagaaaggagacattttcaaagaattgctcttactgcctcctccttgtcctgtggctctcagctcaaatggcacctcctccaagaagccttccctgattttctacccttctctgtgctcccagtttcctggactgcccgtgccacagacgtgctggcactgtctgttgacatggcttgctctctacttccccactggactgggcactctgcaagggcaaagactgtgtttggcccctctttgtggctgcagctgtgccttgcacaggttcaggcacagtacgggtgttcactaatgtttgctgaatgaatcaatgaacaaatattcccttccagttctgctccacctctggactcctgccccacaggggagaaaccctttttgaaagcacctgtgacatagttcaagatcaccaatgtcgggcgagggtaggacatgcaccctggagtccagccatacctcagcacagccctcctgcccacatcgccaaggccctgtcagaggcatgacaaacagcttggctgatggcttataatgtcaaagatgatggaaacagggaggcgacggctgaaagaatgggttggggacgcttgtcataactttatttgtgggagacacactgtctaccttgattctccaaactgccctaaaaagaacatacatttttacagaggaggaaaccgaagcttgaagaggagaaatgacatatccaagtgccccatgaaggaggacaaaagcccaggaggcagctgtcgcatcatcctcttcctttccctgcacatccgctacatcccttggtcctactgatttcacctgccgtttcctctatgtccaacgttactcagtccaagtccccaagcatttcctgcctcgacagttattctaccccatcctcccctgctgctctcaaactcctccttcttttttttttttgagacagactcttgatgcccaggctggagtgcaatggcgcgatctcggctcactgcaacctccgcctcccaggttcgggtggctctcttgcctcggcctcccaagtagctgggattgcagcgtgcgccaccacacccagctgatttttgtatatttggtagagataaagggtttcaccatgttggccaggctggtcttcaactcttgacctcaggtgatgtgcccgccttggcctcccaaagtgctgggattacaggcttgagccactgcgccagcaaactcattcttcttcttacagactctcttatttgagttcacctaaaagcctgagataaggaattggatgtacagaatttatttgcatggccatcccaggaaacacttggaagtaggggagtgggaaaggaagacagggaggggtaggcagccaggaaaagggttatcgagcaggttacactgtggataacgggggcttgattccaccagacctctgggagcccatgaataacacctcggagttctcctgcctgcggagttggggagcagggtatttatctactaggtcctatgggggcaggggtgttcattctcaggcacctctgacctgcttcacaggcgggaagagtgtgctccagagttgttaaagaaagtctttaggtaaagagacacagtgggctgggcacagtggctcacgcctgtaatcccaacactttgggaggccaaggcgggtggatcacctgaggtcaggagttcgggaccagcctgaccaacatggtgaaaccccgtctctgttaaaaatacaaagatcagctgggagtggtggtgggtgcctgtagtcccagctccttgggaggctggggcaggagaatcacctgaaccagggaggcggaggttgcagtgagccgagattgcgccactgcactccagcctgggtgacagagtaagactctgtctt

SEQ ID NO: 1471 - DNA, 2089 bp, Homo sapiens
atttctccctgcctttgcctgggcttgtcctgaagcctgctcatgggaacagctggaaagaaccatgtgccgccagtctgagctttttattttgttttacttagaaagatagagacagggtcttgccatgttgcccaggctggtctcgaactcctgggctcaagtgatcctcctgcctcggccttccaaagggctggggttacaggcgtgtgccaccgcactcagccgcagccagtctgttttcaaagatggtctttgggttaatgacaattctctctctgcttactctccaggcagtgtggctttctgaatccaaggaggctgggcatagggagatgggatttgtttgcccggtttggactcagcattttttgtactcgatttaatagactcataaaatgtcaaaggtttaagtgagcttagagttgatctggcccaaacctggctgatcagaatctccaggggaagttttattgaaatgccagatctctgcgttctgagatcctgatttagtaactccagggttggaacctgagttttttgtttttttgtgtgtgtgtgtgaaggcaaggtcttactctgttgctctggctggagtgcagtggtgtgatcacagctcactgcagccttgaattcctgggcctaagcaaccctcttgcctcagccttccaagtagctgggactccgggggtacaccactgtgcccggctaattttaaatgtttttgtagagatggcatctcactatgttgcccaggccagtctcaaactcttgagctcaagtgatcctcctgccttagcctcctaaagtgctgggattacaggcatgagccaccgtgcctggctgatactagcattcttttttattttttattatttttttaagatagagtcttgctctgttgcccaggctggagtgcagtggcacagtctcagctcagtgcaacctccgcctcccaggttcaagcaattctcctgcctcagcctcccaagtagctgggataacaggcacatgccaccacgcctgcgcttgatcgtgggaggcagagcttgcattattgtgccactccattctagcctgggcaacagagcgagactctgtcttccaaacaaagcggaaaaagattatctgcgagaatgactgcattggccccttgggtgggagggcttctccagggcaaggtgaggggatgcccagtgctgggagtgctgcctggagaggagtcagttccagtggcgggggccctgggttttggctgaggactgcgtgttggcagctgctctgcctctcacagcccttcccagctgcacacgtcgtgagcgtcagtgtgcaatcacaggcctgcctcctttgggccactttgtgaccatgttttttgcttgtggggcagggtaatttcaggatccaaattggtgcagttggatgttctcagccccgagaggcagctcttcccgttctaggctttttgttttgttttgtagaaatggagtcctacgacgttgcccaggctggtctcaaactcctgggctcaagtgatcctcccaccttggcctcccaatgtgctgggattacaggcatgagccactgtgccgtgctgattttcttgatactattttttgtagagctggggtcttgctgtgttgcccaggctggtctcgaactcctggccacaagccaccctcctgcctcagcctcccagagtgctgggattacatccccttcttaccttctctgtcagaggagcccccacagcatgtgagtactgagtcatgcggtcttgtggttgctgaacgggctctgctgctctggtcctaggctctgtatgtggatgtgatccgtgtgaacagctactactcttggtatcgcaactacgggcacctggagttgattcagctgcagctggccgcccagtttgagaattggtgtaagacatcacaatcccattattcagagcgcgtatggagcggaaacgcttgtagggcttcaccagattgtatatattcctaccagatggagataattacagctttaaaaatttttattttttcattttatttcacacattgacattaaatttttatggacacat

SEQ ID NO: 1472 - DNA, 2050 bp, Homo sapiens
atcatctgggcatgtatggtatctgtatctacgtcaagacctgggctttgctccacttggagtcagctgattggcgggagggcatctgaaattgagaggaggtttcaggacgtttacccagccctttagtggggatctgtccgggactgtgcagtctgaacctgcaactgtaaaagtgctgtttggactgtggacaagttaggttataaattttgacctctgaatggacgcaaccaatattagcctttaatgcagttagactcattttgtcagaggtctggaaaattaggaaaaactaccatatgtccaagccttcatgcttttcgaaaatcaggattcataccatgagggaagatgccagctgctagctataccaaaggacagaatggaaaaaaggctctccacaagccagagagccaaactcaggcagaaagcaatgaagaagaattaggacttttaaatgtcctacacccaagctgttttagcagctccaaccaccacagccagaacgcacctggcctctgctccacctcaacagctcccactgcagtaccaccatacggggcccttagcactggcctctgcgttggaccggattgccttgatgctaccaagtgaggcatcagaccaataagagggagctactctgccgcctcagtataatgagagaacagagacggcctctccctccagtgcttgacagggaacatgatttagcaaggaagtgccatggccggagcaagggaattaccatttacagggatggccatgggtggcttggatgagagtgggcaacctgtcagacattactggacatccagcccattttcaacatctaacttgtgaaatggaaaaactccaccccactttatacaatggatccccagaaaatgactgatctctatgtgtctatctgtgctacccacccgtgtacctgagcagatgtgtagtctctcctaaatatgtttctggctgcagaccaaagaaggtccagagtcttggtgcctccatgaaacaaatccaaataccccaaacctgaagggaccattctggatgcaaaccctaattggggctccaattgataaggggacatggcccatctggaatattcacaaacattcttcctgtttggactcaggaaaggggtaccaaaacaggaagcctcactaggaatgaccccttccccgctccagagacaaagaaacagaagtttcaaccataaacgtggaatgaacaaggaagcctctgcatcagaaaaatcgaggcaagcctctggaacacagccagtgtgcctagtgtaaggagaaaggccactgaaaggatgactgtcccaaaagaaaggaccaaggggccagaaaaaggaggaatacgatgaggaagaagctcacagtcaaataatggagcagggtcactgctctgaccacagagagtgatgcctgggggctctccttaatcactcagagacaattaaaatttccccacaggaaccctgggtacaactgacagtgaggaaaaaattaattgatttcctggttgatactgggcaaactattcagttttaacactttatgagcaaaaagcaccaaaatgattgtacctgtgataggagttgcaagaataatgcaacaaaaggctttcctacaacctctagaatgcaaactagaaagtttggacctaaggcactgctatttctatatgtaagaatgcccaattcccttgctgggaaaagacctattatgcaaattaaatacacaagtaatttctccccagagaaacaactatggctgcaggtcctgctaaagcaagcactgcaacaaagatgttactcacttgccttaagaagaaacaagaattctccctcagaagtctatgagagagtgcgtaattgtgaataggcagaaggaatcccaggaaaaacaagaaatatacagtgagtgcatatagaaaaaatagaaggggctactgcgacctgggcggcggggaggaggcgaataaaaaaatcagtatacattaagaaaggaagccttagaaggaatacagcctgtctttc

SEQ ID NO: 1473 - DNA, 2145 bp, Homo sapiens
gtgatggaatgtcctgaggggataaaagctggagtcggtctcagcacatctcagttactcattttgactcgtttggacaagtgagttactacagcgctgatttggaaaaatgactagaaagctacctccaatttctcggcctcaaccccagcctcattttctttctgttccttcccgctctcgtcttccagccctccttccccccgttactcctcaaacttcctgccgtcagcctcctctccagagccgtccaagttgttcgattttctgccctacccgtttgcccaagctgactaatgtcgccccttcccagtaccctacctcaaggaacttcctgcccggcccttcctctgttactaccagggcgtccgtgtgccgccgccctgttcgtcaggcacccctttcccggtgtccccctatctttccccctcaccctcctcatagcccttctttctagtcccctgtactctagtccccactccctatccagccacccccaaccagacctgacggcttgcaaatctcaccctggagaaatggtttccctcctactggggcagttcccaggcggtccagaattgccaggacttgtggattcccagcagcgacctggcagacacggggaatccaagaccatggcaagcgaacattcggcctggcctgcgcctttcctctcctgcctgggcagccagactgcacaagcctctgcatttgaactggcttctccgtggaacttggtttgtaaccacggagcaaactgcaggaccaggggcagagaaggtaggggagtgaaaagcatcgaatctgttctcaaggagggaggtgattggacaacgtgaggtctagttttatgttcattacctcctgggtttgccagttgatggcgagcctttttcctggcagtatccagaggcggttctagtaaagaggctggattccgagaggccagagcggtatcatacgaacgccgttgcctggagacggagtggggtgccattgcctagagactgcagaaggcccgcagccaagcgagtggtaagaggacgccgagagagccccggacccacggagcagccccaaggctatggcgggacacccgaaagagagggtggtcacagatgaggtccatcagaaccagatcttgcgggagctgtacctcaaagagttacgaacccagaaactccacacgcagtaccatgtgaatcccctgcgcaaggttcacaggattacgaggaagcctatgtcttggcatgataacctggaggaacccgcagacgccaggtttctgaatctcattcaccatgctgcccaggggccaacgaagaagtacccggaggcacagactgaaaaccaggaaattgggtgggactcagaagccttggtcgacccagaacgccgtgaccacaggatgaaccacttcagggtctacagtgacatcactctgtacaaagctaaaatgtggagcttgggagaagatgatcgccacaagtagcatctcagctgtggagtcaggccctggatttaatgccctaaatatccactgcctagaagactaaacattattttaaccccccgtcccccatccataattcatggataatggcaaaaattaggaagcataaaaaatatgcggaagaaggaaataaaaattgcccattatctcaccatatggaagtgactaatgttagcattttaaaccatttgtctttaaaattaataataaattgcatatatttattgtgtacaatgtgatgttttgaaatacgtatacattgtggaatggttaaatcgagtatctcacatacttattttgtggtgagaggacttaaaatctattctcttagcgattttcaagaatacaatacattgttattaactgtagtcactacagtgtatgacaactctcttgaacttattcctcctaactgaaattttgtatcctttagccaacatcgccccaattcctacccctaacccctggtaatcaccattctaatctctacttctatgagtttgacttttttagatttagaaaatgtggtatatttacttaatggaatacaattcagccttaaaaaagaaagaaatcccatcatttacagcaacatggatgaacttgaaggacattatgttaagtgaaataag

SEQ ID NO: 1474 - DNA, 2107 bp, Homo sapiens
agatgcgagcgcctgcgcaggtacgcacgctccgctggagcctggggtggcctggcagtcgtggccgagacgtgtttgctgcacttcggtgcgcacaggcactgcggtgccaacctcttggttccgccctccccccgcaggcgcccacgcgtgacctcggccgcccacaggccttcgactcttcccggactccaggtcccaggccgccccgctccaccctgcggatgatggagacaaagtcccccacaagcccctcatatggggcaagggggaaggtaccacctggggcggggcctggctccccactgagcagaggtgctggccaaggcgctccccttagtgagacaaggtttcaccatgttgcccaggcttttctcaaactcctgagctcaagcaatccgcccacctcagcctccgaaagtgctaggattataggcgtgagccactgcacccagccccaggtggcaagtctttctgataggcactgctccaaagtgaatcacactgtgctaagcccccgcaagggagtgcctttgcagcttacagctgcacactcgtcatctcaggaggtccttgcaacagtcccctttcacgggtaaagaaactgaggcctctactcaacctcacagagcaagctaatgccagactaaaacctctggcctccaaaccccatgccctttctttttgtaagctacacagactgtcagggcaaatgtccactggataaaagcatgagatgatgaatggacggaaattaaccaaaaaggtcatcaacacattttcaacagatccatcaatgtgcactcaaagaagctgagacaggcctaacctttaaaggctgatgtcaaggaaggggagcagcaggatggtactcggtctgacccaggggggtcgctcccctgagcctatgtgtgtttggagtggacgagaatgggagagagattagaaaaacagcagcatcatgtgaattacagatgcacaggaaagcttacagcctgtctagacaaattcacttatgttacagatgaggaaactgaggctcagaaagaggaagggacttgcccaaggccacatagcaaaggaatagcaaagttgagacaaaaataatggacattgtgactctgagtcaagtgagaaacagagagactgatggagaagtgtgtgtgtgtgtgtgtgtgtgtgtgtgtttatgtgcatgcagtgtgcactcactcagggggccagggtcctgaatttagaaacactaccaccaagaaggcattatgcctaccctacccaggcagtgggggctggagccagggcctgggggctggaaccagggcccagggcctggaggggatggtaagcctccagccccaccttctccaggaaggggttggtggtctggcacgggccaagcgtacctggccatccacaatgctcacctccaccacggtgatctctggccgggtaagcagctctcggccctcttggctgcctagcttccagaggcgggactcttgctgcattcccagaagcttcttcaactccgactccaggaaacctgagagccagagagatggcaagggacagggagatggcagggaacaggcaggagtaggatggagcagcccactgggaacccaaggacccggaggtgcaaccgctccctgagcctcatcccagctctgtgtggttcctgctcaccctcagccacagccctctcttcttccaggacgtagagccagccaggtaccacccctccttcgccctgccttccccaggaagctcactctttgagggccttctctggcagcggcagcatgagagcctgcgtcttcacccactggggacagcatgcaaggggcaggtatttgcccccaccaccaaccaactcaagagcctggatctggaacccaaactgcctgcactcaagtcccagctctgcccatcactagctgtgtgacatcgggcaagttctcactgtgaactggagatggcaataggacctacctcagagtcgtaaaatgcaggattttatgaaaagtgcttaaagagggtctgccccattaatggctatgtaaatgtgaaccacgattttcatcatattatgtatgctatcaccact

SEQ ID NO: 1475 - DNA, 1825 bp, Homo sapiens
agcattcttataggagtctccagcctctctttgcagttttcaagacaggaagttgacttcttccttgcagctccttccacagtgaacaacttggctgtcagagaggttctgattacaaaacccagtccagccacaaaaagcttctgcagaagcctgcctaatgtttacaaacctacgatgcagccactacaattatccccatttcaaggtcgaagaaatggagatttatagaagttgtcaaatcgcttactagcacacagctaataagtagtaaagccatctctcaaatccaggaaatctaactgccctgcctgagctctgagtcaagggtcctactttggctgccagccagcgacgacttcaagggaatctggaaactgttcttcaggaagaaacccattagtttggaactggagaattcctttgcatcagatactaaaatgaaagaaccacttttaggtggtgagtgtgacaaggcagtggcatcacagctggggctgctagatgaaattaagacagaacccgacaatgctcaagagtattgtcataggcaacagtccagaactcaggagaatgaactgaaaataaatgctgtgttttcagagagtgcttcacagttgactgcaggcattcagctttctctggcatcatctggcgtgaataaaatgcttccttcagtttcaaccacagctattcaggtttcctgtgctggttgtaaaaaaattctccagaaggggcaaactgcttatcagaggaaaggatctgctcaacttttctgctccataccatgcatcactgaatacatttcatctgccagttcaccagttccttctaagagaacttgttcaaactgctcaaaagacattttaaatccaaaggatgtgattagtgtccagctggaagacactacctcttgcaaaactttttgcagcctatcttgtctttcatcatatgaagaaaaaagaaaaccatttgttaccatatgtactaatagcattttgaccaagtgcagcatgtgccagaagactgctattattcagtatgaagtaaaataccaaaatgtgaaacataatctttgcagtaatgcctgcctttcaaagtttcactctgctaacaacttcatcatgaactgctgtgagaactgtggcacttactgttacaccagctctagtctgtcccacatacttcagatggaaggacagtctcattactttaatagttcaaagagtattacagcatataagcagaaacctgccaaaccacttatatctgttccttgcaaaccattgaagccctcagatgaaatgattgagactacgagtgatttggggaagacagagcttttctgctctattaattgtttctctgcatacagtaaagctaagatggaatcttcttcagtaagtgttgtttctgtggtgcatgatacttcaacagagcttctttctccaaagaaagatacgactccagttataagcaatatagtgtcattggcagacaccgatgttgccttgcccatcatgaacactgatgtcttacaagatacagtttcttcagtaacagcaacagcagatgtcattgtggatctttctaagagttcacctagtgaacccagtaatgctgttgctagtagtagtacggaacagccaagcgtttcaccatcttcatcagtattcagtcagcatgcaattggttccagtacagaagtacaaaaagacaatatgaaatctatgaaaataagtgatgaactatgtcacccaaaatgtacatccaaagtacaaaaagttaaaggtaaatcacgaagtattaaaaaatcttgttgtgc

SEQ ID NO: 1476 - DNA, 2174 bp, Homo sapiens
ggacaaccacccccacgtcagcaatgacacttcgccgcagtaaaggcgggtgctagcaacctgcttcttcactgttaaggtctacagcaaaccaatcctcttcctccgttagtgcgagttccggccaatgacgttcgccctcttaggtttttttttttagcccgccctccaaaagcgtgacagccgttgggtcataagtctacagggcagaatgttcacgtggcctatttcacgacccagagttcctctgaccagagggtttttttttttccttttcctttttttttttttcctgcagggaggcattatgggtttgtggtttttttccccccccactgggagaggaagtgtctacgtggcctgcggaaataggataggcggaaatgagctaaggttcccgcgagtggggaagcgcgaggtcaaatctggggccacgcccccagtcctgtggcgcaactccccgaacacggaaaaaaaaggcgcagtgggggttctgctgtgtttgcaagtgagggtcgtgagtgcaacgggcgcaaggcattaaggccagtgtgttagtgcgcgggcaggctcgcgtggtgctggggttgctgtgtgagcggccctcgtggctcgggaggtgctgtgtttgcgcaggcgtgcgcccctggcgtcgggactggtgagagccacggcgggcgcgcgcgcgtgcgtgatggtgggggcggtgcagggaggggtttgctactgcgcgcaggttgttatctatttctgtgttatatttgaaaatgttctaatgaaaaggaaaataaataattaaggaaaggcgacaataacagataaaggggcactgtcagaaatattttggctttccgtactgatttaattactttaaaaatacacttcctacgttttcctccgtgccaaaatcctgtcgtaaaccacggccctccaatgattcagagccaaacccttccatcgccgcattagcaactccaaagggaggcttctttcaagttctctagtatcgtcctccctcccctcctccacacctaccccctcccttcaaggttgcgtgcagttctcttggcacaaatacaattttcctgtgagaatatctatctacgacagccttcccctccgttagggactccggatttctgtggcgactgaggcgctcttacctttgcgtcctgatctccaagcaagcacactgaccttcttcaggcaaatacgcactgttaattttccagaaagttctgtgagtaaggtttatacctctcgagtctgccactagatgccgccaaatcccagcaaaggattggctgtttggtccctgggattctgggattttgtttccctcccccctcccctttctgatttgctgaacggtaatatctataggcatcatggatatcgttcattcctaggaaaaaataaaatcaacttctgtaaatagcactagtaggcaggggactgtgacccaagatccaaataattttgctcatttctttccttttctccttgggttaaaaaaaaaaaaaggcccctctccatccctcttttcttttgtccttgccttgtttaatcaaagagttaatgaatgacgcaagcactgatgctgaagatcctaaccctttttcctcaccttttcaaatgctcgcaactcacccaaactgaaaatacagatagctgttccgtcagtaaagatagataagaactcatcagtaaaacctggactctggtattgaaaactgattttccttttctcttgaaatttgtatcagatatgtgtttttgcaccctattttctgtagtggtattggtaaactttattgtgtctttggggtaagagaaagagacctaattgtaaacctcattccaccacttactagtctcagtaccctgggcaaatgatttatgttttgtgatcctcagtttttttgtatgctttctatattttagatgctgtgttatatcgttcacgttgatttttttattcatcaccaagtccttattagatgagcactactggatcaaagtcaaacaacaaaaatcatacccctttcaattatctatcttatatacttgtacaccacacaggagaatcgcttggactggggaagcagaagttgcagtgagccgagactgcaccactgcactctaacctgggcaacaaagtgagactccatctc

SEQ ID NO: 1477 - DNA, 1791 bp, Homo sapiens
tgaggtctccattggaatctctcccttctcgtatctccagttgcatttgatgttaatacctcatagcaaatttatccctttttaagtacccagagccggcggtgtagagctctcgagcgagcaccccgcgtagtccccaagtgcgggactgggcctatgctactacaggcgctcgctgcctaagcctgtctgtgtgtggcagtgtcctagtcgtcctcccctcctccttcggcatctgctctgcattagtctgtcccaggcctccgcaggcgccgatgattaaatcatcatcattaaccagggcctgccccccccatccccggcagcaggggggagaatgggggaataagatcactaccaagtccctgggggtctctcactccccatcccccggcaccctctccgagactctgcaaagcccaagaaactccctccgtgaagccgggagaagacccgccatctggacgaagctccgctacgcggacgccgacagggcggcattacgaggagaggacccaggaggggcttcttcagcagggtcgtcgtcacagaagaccgacgaccctgagcgggtagcgggcacagactgccaggcctttgggggtaggagggggcagtctttcgcaggctccgaaagttagtcttgaggtcgcgtagggcctattatgatgatttctacaggaggttgaagagataagacccttccctgtgctcccccccccccactccttaattacggattgagcaggggaggggccggtggggctcaggtgagcacacagggagaaagggacgtgggcggggccttacagagggtgagcgaatccgaaaagacctagaacctcgttgctgggagacaagtcccgccctgcaggcggcaccggaagtggccggctgggatcagcctttaagatggcgtctcctcaggggggccagattgcgatcgcgatgaggcttcggaaccagctccagtcagtgtacaagatggacccgctacggaacgaggaggaggttcgagtgaagatcaaagacttgaatgaacacattgtttgctgcctatgcgccggctacttcgtggatgccaccaccatcacagagtgtcttcatactttctgcaagagttgtattgtgaagtacctccaaactagcaagtactgccccatgtgcaacattaagatccacgagacacagccactgctcaacctcaaactggaccgggtcatgcaggacatcgtgtataagctggtgcctggcttgcaagacagtgaagagaaacggattcgggaattctaccagtcccgaggtttggaccgggtcacccagcccactggggaagagccagcactgagcaacctcggcctccccttcagcagctttgaccactctaaagcccactactatcgctatgatgagcagttgaacctgtgcctggagcggctgagttctggcaaagacaagaataaaagcgtcctgcagaacaagtatgtccgatgttctgttagagctgaggtacgccatctccggagggtcctgtgtcaccgcttgatgctaaaccctcagcatgtgcagctcctttttgacaatgaagttctccctgatcacatgacaatgaagcagatatggctctcccgctggttcggcaagccatcccctttgcttttacaatacagtgtgaaagagaagaggaggtaggggccaagcccccaccccatcccactccccttccctccccagatatttatgtgaaatgaactgcagctttattttttgaaataaaaacttttaaaaagc

SEQ ID NO: 1478 - DNA, 1042 bp, Homo sapiens
agctgccatgttgtggggatgctcaaggagccctgaggagaggcccatgtgatgaggagctgagaggacttgggccaaaagccagtggagaattgaggtctcctgtcagtagccatataagcaagtattctggaagcacatcctccattcccagtcaatatcttaacttcaacctcatgaaagaccttgagcctagctcagccactcccagactcctgacccacagatactgtgtgagacaccttgaatcacagatagttggagatgaaaaggaccttagaaaccatgagaaacaccatgggcgaggagactggggagctctggagccataaacctggcttcaggtcccagttctgccactcaccaactgagtggccaaggacggcatttttcagagaacaggagggagctgcttccttaagtatcgcctgggatcacattcagactggagatgttgccagaagcaaatccacctcggtggggattctggtcgacccaggagaccctctgctcctgagggaactgctgaggggcttgggctatgactccaggaccaagagttttgggagagactttccttccctggacaaggaaaaggaagtggagctaccagctgctgctctgggaggctagaggctcatctctctaccatgcaccctttccgaagctctgttctctgagggcttctggaaatacccgctttaatcagagttaagccggatttgaaggttgcgatgattagatgtgtcaaaaaaattttacatctaataacacccaacgctgtcaagaatgtggaaaaaaacagacatgtatgcattgttgatgcgagtgtcaattggtgcccattttttggagggagtttgctagtatcattagaatgtgaaatagatatgctttcagactcaacatttccacttctaagagtcaattctagagaaatatgtgcacatggacacaaagagtcgggcatgaagatgtttgcagaaatgttgtttgcaactgcaaaaaacagtaaaataaaaagccaccaaatcaaaaaacc

SEQ ID NO: 1479 - DNA, 2766 bp, Homo sapiens
actccttttggctcatgctctgtgtgtattttttcaagggaatagaagataatgatgaacttccctctgccaaaggccgcaaggtgttgaggagtctggtggtgtgtgagaacgggctgcccatcaaggaggggctcagctgcaatggcccaaggccggtggggctgcgctccacactgcagggccgcggggagatggtggagcagctacgggagctgacacggctgctggaggccaaggacttccggtcccggatggaaggcgtggggcagctcctggagctctgcaaggccaagacggagcttgtcactgcccacctggtccaggtctttgatgctttcaccccaaggcttcaggattccaacaagaaagtgaaccagtgggcgctggagtccttcgccaagatgatccccctcctcagagagagcttacaccccatgctgctctccatcatcatcactgttgcagacaacctcaactccaagaactcagggatttacgctgctgccgtggctgtgctggatgcgatggttgagagcctggacaacctttgccttctaccagcgcttgctgggcgagtgcgtttcctgagtggccgtgcggtgctggatgtcacagatcgcctggcaggtgagcacccccagccccaccccaccccatctcctggcagatttctgttctctcctggtctgtggttgaaccattcacccagttatcttagacctgaaataatcccccccaatcatttaaaattttgaaaatctgctttttttgtgtgtgacaatctccatattgccagaagacaattttgtttttgatcaaaatgaagtaggtttgtacaaaagcaaaagtgtttttaaaaaactgttacaggttgaatctccctaatcagaaaattagaaatgctccaaaacctgaaactttttgagcgctgacatgacattaaaagaaaatgtacattggggcatttccgatttcagatttttggattagggatgcagaactggtatcatgaaaatattccaaaatcagaaaaagagccgaagtacttctggtaccaaacattttagataagggacactcaacctgtgtgcgtttcttcctccttgcaaacaaggctgcttctagcctatagagtacctttgtgtgagtcagaaaaaagcctcctttttcagacagaccatgcctagtgggtgcatatggcttggtcagttgacagcaccatcaagagaattagaaaaagttgccatgtacaactttagcatgtgcagcctggcaagcaggcaccagctgggtttcaacccctcaggaccccttggccagtgctgggactgtattatgtggagacggggccttagcctgagtctactcagccttgctcaagcttcagctggtgaagggttgctccaatcctgtttctgctttgagtctgcaggagaagtccaagtgacttcattccagggctgaaatctgttcttgtggtccttgaggtggcaacacagaaaggacacaggctttggtgtccacacacccatctgccaccaccagccctgaccttgggcaggttacttatcttggtttcatgatcatttttgcttgcacaaagcctcctcccctgccttgggaaggtcccatctagggaggggggcagagggactctgttccctagactcccgatggtccccctgaaatgcagacagatcatgcaccagccctgctttaatctttgtgagactcctgagctgtcttcaggatagtgtccaggccccctggagtggcccacagctgtcactgctgctctaggatgtgccgccttcctcccaccccagctctatgctcattgaatcctcatgaccaccccacaggaggatgtagattccacttggtggagaaaaggagaatggagctcagaaaagtgaaatgcacaaggtctcttggtgaggagcccaggatgtgtcctgggagcctggctgaagggccaagaccccaaccctgtgctgtgctgcttccccctggcactctgcctcctgggtgcctgcatgcagtggccggtctctcaacttcttgctctgcccacttgtggctgccctgcccggaaagccttctccattcttcttcctctacctgggggatgcctgcttggctctggcattaccttctccctgtgtgcttctcaagactgcatcccacatggtatcactggtctgtctactgccctcccctcctagcccagctgtgagcatccagagaggggcctggcacatgctgcatggctgaggaccttggcaccagctgccctttcagcttctcccctgccccatctcttgcgcctggccttgcctctatgcaggttctgtccttccagcattcctggagtggcctcttaccttacgggaaggcaggtgcgagtgaggcagggctggctgcaggtgagctgggggagaacagggtatgtaagtaagatggtcctagacaccagacaaggaaccctttgccattgctcaaagtcagcattttctgcatgaaaggtttacctgtccttgtctgggtaatttacggggcccagaggtgggcaagtatcttcaccttatccacttactgtaattttttcttgtctatttccaagagacctcaaaagaagagcttctccataggtcttctgttaactctgtgtccaccaggaacacagaagaaaatttttattgacacaggcgaggcctaataatagcacagcttaataggagtaaatcttctgctaattacttc

SEQ ID NO: 1480 - DNA, 844 bp, Homo sapiens
ataaagcccgctccgcatcatgacgtcacagtgcgcgtagtcccgccccctcgctttctccctctgctcctccgtccgctcccgtcggacggggacattgcaatgaggcgggatcgcggccctaagccggccctgggtggagctggcgaggtggaaccaggtgggatggcagcctctcccacgggccgtcccagacggctccaacgctacctccagagcggcgaattcgaccagtttcgggacttccccatctttgagagcaacttcgtacaggtgactcggttgggagaagttgccaacgaggtcaccatgggggtggcagcctccagtccagccctggagctcccggacctattgcttctggccggccctgccaaggagaacggacacctgcaactcttcgggctgttccccttgaagttcgtccagctctttgtccacgacaaaagccggtgtcagctcgaggtcaagttgaacaccagccgcaccttctacttgcagctgcgggccccactcaagacccgagaccgagagttcggccagtgggtgcggctgctctaccgcctgcgcttcctctctgcttctgctgtgcccttcacgcaggagtaagaggtgctggaggatgtagatggggagggtgatgatgatgaggtggaggcccagagggagtgggaggagccccaaggcgtggaagccagacttgaccccaagacctctgaactctggggactctgagtcttccagcatccttcaaggtcaccgaatgaccagagatcaaagtaccttgcctcagggccgggcagatgagatattaaagttaataaaggtcagtccattaagaacc

SEQ ID NO: 1481 - DNA, 1800 bp, Homo sapiens
atcatcacacacccccgcaccccgggagcggaggcgaggaccagcctgccgagcctcgccgggcccacagtcctccctccagcccgcgcctccgccaggctccgtgaggaaactcccccgcgaccacccccggctcctgccatcactccatccggaaccgaacccgaacctccgcacccggccgcccgagccccgcggcgacccggccctcccatggcaccgccgaagcccccggttctcccacgctcctcatctcccaccctggagaagcccccgtcttcctcccccggcctcaactccgaccttctaggcagccccaaacttgacgaggccggcggggcgaccggctccccgccccccgcgcctcgggcctccccggacccgcgcgtccccgctccctcccccagccacgagctggatccggggtgctggcgtgactcaccggcggcggccgcaccttacagatgccagtctgctcggctatgggccggatcttgtggatgaaagcgaaggggtccgcgaactcttcccagctgggttcgaagaccgggcactcgggtggaggcaggaactcgcccagcgggcccgggcccccgaggggcagcgccgggcgcgggcctgggtgcagtgtggtggccgcctccatcaccgcaggctgggcaagggcgaggcgaaggtgggctccgggaccgaggctgcgagctccgctcggtccgagacccgtgcagacgcggctcgagcaacagcaagtccgagttgtacgggcaacggcagcaccttgggctttttcagcctccgacgacgacgtctcgccgcaagcccacgccgtgcgcctccgccgccacggcgaggaaaaagagtcccaccccacccccatcgacccaccctccgcgcgcggctccccgccccgcccccgaatcgggcggggccgcgccttccgctgtggatggagtttatccttagggtttcagttgagccaacttttattgaccatttactatgtatcagagttcctgccctgaagaagttaagtctggtagaaaggatcagtcccataagccaatcattcaatcacgtcagtacacaatggtaggtgcagtaaaacccaggagggggttttggaaagagtattggaaacggagaaggattttccagtagagataacagcttgaacatacacatagcatgttcatgagaaggcaatagtagtaataataataataacgtaacattttggggcactttcatatcctaggcactgttctaattgcatcgcatgattaatcacacaaccctatgagataggtactcttatttccactttacaataaggaaagtgaggcataggtaggttaagcaatttgccataattcacatggctaataagtgatggagactattgggaggtggagatgttgcagggaaaataatcatccacaaacagtctatgacgaggtcagacttgagaggggcaaaagacttgaaataatccagacaaggaatgataggatctaaattaaggcagtggtgctgataattatgaggaagggatgcaaaggtaggaaataaaattaggacatagtgacagattgaggggggacgacgaggtattaagattcagatgtctggcgtacctgcctgagtagatgctagcccgttggcattgctggaacattcaccccaattatatacagaaggcgagttactcaagggaagaagatactgtgttcatttctggacattttgaatttgaggtgtctctggtacatacaggtagaaatacacaacggggtatccttc

SEQ ID NO: 1482 - DNA, 2187 bp, Homo sapiens
gagaacctattatgtgacagtccctgggctgagtgtcacaagcattatgtcatttaattcttttggatttttgtttgagacaggatctctctctgtcacccaggctggagtgcagcggtgcaatcaaggctcactgcagccacagcctcctaggttcaagtgatccttccactttagcctcccaagtagctgggaccacaggcatgcaccaccacgtccagctttttttttttttttttttttctggtagagatggggtcttcctgtgttgcccaggttggtctggaactcctgggctcccaccttcacctcctaaagtgctgggattataggcatgagccatcacacccagccttttggttttctttggggttttgtgtgtgcgtgtgtgtgtgtgtatgtgtgtttactatgtcattgaattatttcagcaagcctatgggatggcttccatgttcctatttaacagatgaggaaatggagactcagtcacttgcccaggtgcacccagcactcaggttgctttgttcacagctatatccccaatgcccagaataatactcagcatataatggaggctttgtaggaagaatgaatgaatgaatggcagagctggggtttgaacctagatctgtttgactctatactcttaagaactcagctgcatgagttgtgtttaattaaaatatttggtgctttttttttttttgctacaaaatctcactctgtcacccaggctggaggtgcagtcttggctcactgcaacctccgcctcccaggttcaagcaattctcctgcctcagcctcccgagtagctgggattacaggcacgcaccaccatgcctggctaattttcgtatttttagtagaggcagggtttcaccatgttggcgaagctagtctagagctcctaacctcaagtgatccacctgcctcagcctcccaaagtgctgggattacaggcctgagccaccacacctggccatttagtgttattttaacaaatacctaatattaatggtggcttaagcaagatgatgttttattgctttttcatttaaaagtcaggggcagttttccagagctgataggatggttttataaacaaggggccctgtttccttctttttgcaccaacattttcaacgcataacctgcatctcctgggccgtagtggctgcttcagcttccaccatcacatctgcgttgcagccagctggaacagaagaggaaaggtagagcctgtcccagcccactaagggcataacctggaagttgcccacatttcttctgctcacatcctcattggccagaacttggtcatgtggtcagtcctcactgcaaaggaagctgggaaacgtagtttttatgctgaaggctacattctagggaacactgtggctcttaccataagagaaagaaaaggaacctgggtacagcaaggtagctcgcagtctctgatgtgtgtttgtgtgcagtacctgaggaatttggctccgatgtggggacttgatgaggagccttgtcattgagggagtaacaaattgccagtggggactgggggcccttatctgagacttcagtgtgacagccttctgcccctcctgtcccccaccaggatgccaaggatgggcgcttgttcaatgagcagaacttcttccagcgggccgccaagcctctgcaaggtacctgacagggaactgggcaaggaggggagagtgaggggggcgccaacttggtcacagcacttgacttctacctgcaggcatgagaagggtgggcttagattaaaggcccaggtttgctcccatctgtgtccataacctgactcctgtgacccctcaggcctcagtgtgtgttgtgactggctcacaccagctcttggaagccaagtattaaattttcaggctgggcgtgggttgacgcctatactcccagcactttgggaggctgaggtgggcaggtcacttgaggccaggagtttgagaccatcctgggcaatgtggcaaaaccttatctctactgaaaatacaaaaattagccgggtgtaatggcatgcacctgtgatcccagctactcaagaggctgagctgagagaattgcttgagcccgggagacagagattgcagtgagctgtgattgtgccactgcactccagcctgagcaacagagccagaccctgtctcc

SEQ ID NO: 1483 - DNA, 1733 bp, Homo sapiens
tactggtacaagccactgtgctcagcctcacttttaaaatatgcatttttttgtttctgagattgtttttctctgttagttatctgcatttcttctttccgtgaattacctattcccatcctttgtgcatttttgtatttttttctcattgatttatcaaggtctttatgatgctgcttcctaacattgtatatatactgcttcacaatttataaagcacttttcctatgtgtaataacactcgatccagttctgagttgcattttgtggtctcagaatagttagcctaacctgccttcagtcttcctgctagtgagaggagtctggactcccacccagatttccagatcctaaaatgaatgttccttttgctacactgcagtttgcaatttccatcttccaaatccaggagtattttgggaaggttttgtttttctgacgtctgttccacaagagcagagctcatgaatggccatgatttaattccccaagtctctgctggagccttcccagctgtcatgaggttgagtatggctttatcatcatgaaacaagtcatcagagtctttgaatcttgcgtaggaattggaagtcggggtataccaggataggttttcagcaccaggtgtggcactcaccctccggtatgcttggcagagtttgtgaagcggctccggtactgcgaatacctagggaagtatttctgtgactgctgccactcatatgcagagtcgtgcatccctgcccgaatcctgatgatgtgggacttcaagaagtactacgtcagcaatttctccaaacagctgctcgacagcatatggcaccagcccattttcaatttgctgagcatcggccaaagcctgtatgcgaaagccaaggagctggacagagtgaaggaaattcaggagcagctcttccatatcaagaagctgttgaagacctgtaggtttgctaacagtgcattaaaggagttcgagcaggtgccgggacacttgactgatgagctccacctgttctcccttgaggacctggtcaggatcaagaaagggctgctggcacccttactcaaggacattctgaaagcttcccttgcacatgtggctggctgtgagctgtgtcaaggaaagggctttatttgtgaattttgccagaatacgactgtcatcttcccatttcagacagcaacatgtagaagatgttcagcgtgcagggcttgctttcacaaacagtgcttccagtcctccgagtgcccccggtgtgcgaggatcacagcgaggagaaaacttctggaaagtgtggcctctgcagcaacatgatgcccctgagtactgtgaaaaagactgttcaacatgccttatgataacaccgatttgtgtctattattggtgacattgttttagatattgggtattgtatattaaggaaaaagatggtctatattctctttattgcatatacttaatgtttcaaaagaatgcagattctgtgtttaagcacagggctgatagttgtggttttgtttacaaatgttctgttttggctgctattggttttttaaagaggttttttatacttttgtatttgaatagttatgtttcactgatgctgagccagtttgtatgtgtgtgcatatatgtgaactgtaactgacaagatgaattactcagtttctctttctctaaagcttgtttgatgaaactggttggtcctttcagtgaacaaaaatatgacccc

SEQ ID NO: 1484 - DNA, 2008 bp, Homo sapiens
aaaaacatagaatgtgcctaccctccacccagtgcttgaacatcccttccccctcatcactccggggaaggatcctgctcaacacccaactactcattcaaacctggaacccgaaactttaatgaaggttgctctactgagatttttctccccaccgaacatgtctgtgacccacaaagaagcccatgaaagaaagtgcccagagaaaccagagctgtggaaggctggctcgacggtgcccctcactgcccctgagaaaacagacccatttcctctctgcccacctctttccctgacatgtccccagcagcagtcctgtattcccagttcctctcaagatgttctgaatagtctctgggtatcctctcattgccttcaactcaagatatctaaaaccaaaactcattgtcttcccactcaaaacgtcctcccctttctgctgccaaccccagtcagtattgtctgcaggcttccaggcttggatccttgactcacggccacccaagcttccttcccccgtgtgcgattagtcagtaagtcttagtagtgatgagggcttcctgcaccgtgactgtccggcatgctttttcctctcccatttcctcagccaccagcaattccaggcccctctttacttcgtatgtattctagcgagatcaactggcaagacaaagctcagacgtcacctccagaaggttttcatggcttgtgataatctggcttcacctgtattctacttcatgagacaactgactatctcgtggcctcttccctgtggcctccatctctctttgcagctccagtccctggcacatgcttggcacacagctcactgcagctgctcaatgagttttgtggactggatgtttgcttgtgggaagtggaagcagggaccagatggatgggcagaaggattgtcctattcaaatatgcactggtggtcctgtcttgtgtttgggcaccagttgaatccaagagctctcaacctgtggagtgtcggatgaaatctatggaatccctcctcagaaaagcaaatgaacccacacaatgatggcgcagtttcattgtcatcagcctcctgaggcgtatccacaatcaccaggatatgggaacaaaggaattgtgtttaaatgtaaaaaagaagttctagaatttccacagaatttacattcttcttgttgtaaggaatatgcctggtaatggaactcaaatatcagcttggatcgccctggcctttgaaatttgaggtaaaattaggcttaagccgtatccagcgcacaacagaaacctcagtgtctcccacccagggactgtctcggaggctgtgtgttcagatgtcacttctgcctcccggcatctgctcctgagttttcactcttcagcctcccctcccaaggcctccttcctaccctggcgctgggcttcttgccccgtccccctagaatccgtggcacaggggctttatctgtgtggagtctctacagacggttagaaacacagagtcagctagaaattaagcagtaggcagctgtgatgttttttgacagcctcatttctaaaaccccttcagcaaccccagtcaaggagcttctccctctagactccagcctcctgctgagtcacctgcaccgtctctgccttcctccccttcctcacatcctccctggccccatcttccaattcctctgaacttctgcagagcagccagctcttcctccagcttcaacttccccaccccaagcaggtggggcatcctgaccctgagcaaaagcagttctctccctaagaaacaccggtgacttttgttcatggcactccatggatgcaaagctctgagttctgttgaacagggactcacctacgagtggtggtgctatcagctgagacgggaagcagcactcagtagaagaagaaaaggcctggactggtgtgggcatgcactggctcgtgagaagcagggaaggtcgctcttatgggtcccgtttctaagtgacgttcacggcctggc

SEQ ID NO: 1485 - DNA, 2414 bp, Homo sapiens
ggtggatgccggttattgccgctgtggggcacgtggttctctggtggatgccggttattgccactgtggggtgtgtggttctctggtggatgctggttattgccgctgtggggcgcgtggttctctggtggatgccggttattgccgctgtggggtgtgtggttctctggtggatgctggttattgccactgtggggcgcgtggttctctggtggatgccggttattgccgctgtggggcacgtggttctctggtgggtgctgattcaattccggacccacgtggctctaggctgtctggggccacagcatacaggaaagttgataatcacaggtgtggcatgttccctctccactgcccacccccagctgtgagcccacccctgcccctctggagacgccaagccagaatgcaggagtgctgctgtgagagtagcttcaaaaccgtcaaaacttctatcaaaagcagttattccaaaccttctgtgtcatattgttgggaatgcattcctttttgaaagtctgcacttggtcacgggtgggctggcacctgctatcgatggatgtttcttcatcctctgagctcccagtggggcttcagagcaggggccagagcagccccacacccgctccctctgcagatcgctgctgctcagcttttcatggccagaaaagctcttttctaatgggagtattgacttggagaattttcaaagtttggcaagaatccactgcagcctggatgggttgatatttatgatgtgtttggtgttgtttgattttgtttatctgtttttaatcccttctgtaatcagagcaaacgtagggatgtgagaggcaagatgaaagtgaaaacagtaaaaatacagccagagtttgtctccacctcctcacaacctattacatgaatgaaacgaaggctctgagtgactcctcccctaaaagtgcagttggcaggaatgggacccaaaacaaaatggcttctccttagtcccgtagacttcgggtcaatgcaaggtgcaggatgcacttagccatgtgtgaatcgtggtcaccatgttgccagctctgaaaactgcagatttgacccaccctttccatggggcagggttaacctgagaagaggctatgctgggctgtggggtccatgctcagctacaggcgtggcaggaagacatctcggctcagcacagggcgtggccgagcaacccggctagtgtggggtccagggaggagaaacccaacagacaggaaacactgtctgaaacttggaaagatacatcctatccaaccaaaatgaggaaagcctctcaagagaagcgatgctttgaatccagagtatgagacccagccgaggctgctggtgttggaatgtggagaagagttgggaagatcagccctcaaggtccggagctgctgggaatgagacaaatgttggggtgacctaaggctggggctgtgagctggcccacgtaggagccaccatttccattcatgttttagattcatttatgaaacagacagaaattgcctaattgagaactagctggtccatgtttgaggccaacctaaatagagaattcttgccattttaaaaccctgcgtcaatctaaacaacacctcacttgactaggtggcctggttttcttgtttcagcattttgcctctacaggattgtttttgaggaaatagttaaaactgagaattttatatgatagggatctgaagaagagaaattggaaatggggaaaaatggtttcaaaaatgaagtttatctgcaatgtagttattatggaccagactcagtgaactgggaacagtccactgaaactgtgcggcccaagacagttgagcttttggttgagtgaatttaagcatttgggctgaagctctgaagctatgttcggttaaacacttatcagtctgccagcatgaataaaaggagaaatgcctgccacattccttaagacactccctatttttaacgaactgtctgtagagtttgggcaatgtagttcttcctcaaagttccttccacatggactagcttcagtgaatgtttctcatgtaaaatagatgcttttattttcagccatgatgattttctccaatgattctaccccattttgcaaagcaccatgacagtattaaatgatgccatgagaagcacgtgtcagtcccaggtgacaacacaacttcagcagagcatccagcgtgtatagtgtgcacgaggtgaagaaggctgggctgggccaagacctgggaagcaaatcctatgacttctcctctttgtgaattaatggcacccccttttatagtctgaccaaatatcttaaagattttatgacccaattccttttctcctggtatttgaaatgggaattaaatgcaataaaatcaatatagtaaaatcgt

SEQ ID NO: 1486 - DNA, 1824 bp, Homo sapiens
aatgtgtcctcaggcctgtccccgcaggtgggctccctccaggagcaccagctctgcctgagtcatccttcattctgcaggattcagaagcaaccggacggggtgcaggagactgaggaattgggagagagacagacagatgctggggatgtgcccttggcccaagggtcaggcctggctcctccctgcatggccagaacttttcacatggcttaggcagggcccttctgccctccaaacatcagtttccccatatgccaagacatctccctgagctggtagatgagatgggttaagacagcatgaggaacagggcagcagaaagacgggggtggtcccaaggggccccagagctgcagtgccctgaccttgtccagctcctcctggttgccaaagagcgggtggtagcggcggtacttgccctcacggtacttggcctccaggtggcaccgccgggtgctggggctgctgctgggctgcagggcctcactggggggcacgttggctgcccagaagcggttcccagcgccattccccagctgtaagaagagctgtgggggtgtgcaggaggtcagacgggccagctgacagccaggggccgtgccgggcagaaacttggtttctgaggttgttaggaaaggggctgggagagccaggccatctgcccactttcccaatggggaaggtgaggacagcctgtcctgctggtggctggggatgctcctgccaccagcactgggctctgagcctaggtctcaggctcagtgacaggacagggagtcagcagactgacaggtggatgcctcaggccttgcacctggtcccaggggccttgctgctgccccacccagttccacatctggagctctgcattcctgaggctgtgacagctggggatgggtgcctaacctgtcagccaatggggtgggcagggattttggaaacctctcctatccctgacattcctctctgggcaagagggatgggggtggattctgggtgagtgcagggatccagcatttggtaatcagttccttcattcggctcctcattccacagccatttcctaggccccccaccttgcctccttgtcaggtcctgtatggggtgctggagtcacagcacagaacaaagcagaacagtccttgccactactgattcactctgtgtcttccagcaagttattttctctccctgggcttcaaggctgtaaactggttattctaatcctaactcctggcttgttctgaaagtcagttaattaacatatgcaaagtccttagcacttatgtgccaaacacaccgtggggaggtgagaaacggatgtgacactccaagtgtctggagtctgcagcctgggtctaccctcccattgcaggttctcccctatatctaccacatatgggtacctgggagtttccagtacaggggcataaatgtacacgtgtgtgcacacacagcacacatatatatacccactggtacatgtgagttcagatgaaatggaggctgagggcctctgaggggctgtgcaaggtaggggagaaggccctgggtcagccagaagtgggatggaaagaggcagggatggtggtcaatatgcatttacagggtaatctcaggcagattacagccctgcccaggacctcagtttacacatctattcaatggatgacagtgaaattagatcagaagttagcaaattctttctctaaagggcgaaatagtaattattttcggctttacagaacacatacagtctctgctgcattttcttcctttttttttctttaaaaaaaaataacactttacaactataaaaac

SEQ ID NO: 1487 - DNA, 1742 bp, Homo sapiens
agtagacatcgcgcaggcgtcgtcagtagacatcgcgcaggcgtcgtcagtagacatcgcgcaggcgtcgtcagtagacatcgcgcaggcgtcgtcagtagacatcgcgcaggcgtcgtcagtagacatcgcgcaggcgtcgtcagtagacatcgcgcaggcgtcgtcagtagacatcgcgcaggcgatgggtgaggcggctttggccgccatgttttcgtcgcagtaactgccttggtgtcagtagtcattgccagtttcgggcgttctggacaattgggatgctgcagagttcatggctggggctgctcgttgggtgggacaagaatcctctgcaatggtttgttttggctgcccaggaggtgcgtcaagtcgctgccgctcccctcgtgggcgtcaggcctcaagagttccccgcctagaaaatggagctcagcgagtcgtgcgtaccatggtgcacctggttttgcagcctaagcgagtcactttagtgcatcctcctcgcggattggagcctgtttgcacccctatagcccgaatgagacccaagtcacacgggctcagaagttctttgcccctggccatgatcccccagccagccacccgagtttccaggcctcaggcgctttggaaacgcctgtacgtcgcctgtacctgaatggcaggtactcatctgctttagctacatcatagtctgcaccacttctgccagctcgattgcagcctggatttgagtcagaaacttttcatggtggatgagggttgtaaatatccaaagcgactccagatgaaattgccctcatcaaaggaagctcagatgacagatttctgcatagaagccaaaaaagccttccctcaaggaaagagtcagtttcaagtatttgcaaactcagaacagtgtcaattttagatcactacaatgctgccccatcaaggaagaaccctattgctccctggcgtctctccttgagccctaaacacagtagattcagaaactaagtcagcaaatggaggaagattcttaaccgtgataagttggaaaacgtgcgtcagagggccacatcccttcctcgagttcaggctaccacctgactgccacccctgagacagcaagaccaatgcttcttcttcctcatcaccctcatcagtgtgaagacaaggatgaagacctttatgatgatccacttccactgaacacatactcctgcttatgtgtcagtctgtctcctcctcttgtgtccaagggaagtcatcgctcccgctggctcagaaccatggctgtgccagccggcacccaggtgtggagacaagatctacaaccccttggagcagtgctgttacaatgacgccatcgtgtccctgagcgagacccgccaatgtggtcccccctgcaccttctggccctgctttgagctctgctgtcttgattcctttggcctcacaaacgattttgttgtgaagctgaaggttcagggtgtgaattcccagtgccactcatctcccatctccagtaaatgtgaaagcagaagacgttttccctgagaagacatagaaagaaaatcaactttcactaaggcatctcagaaacataggctagggtaatatgtgtaccagtagagaagcctgaggaatttacaaaatgatgcagctccaagccattgtatggcccatgtgggagactgatgggacatggagaatgacagtagattatcaggaaataaataaagtggtttttccaatgt

SEQ ID NO: 1488 - DNA, 1988 bp, Homo sapiens
aatttggacaggggaagggggagggaagttgccattcagagcctgcagtgcctgcattttccccgaattgtttaaccctcatgcttcagaattaggctgaggcttgcggggtgggtcatgttgacctgggtgaacagagatccctttaagaagaacttctccatgttccagaggcgcgttcttactgcaggtgagtggcagtatgggaattagtccacaggccccttctcgaatgcctgccctctcttgttccttgtcctcaacgtctttgaaacttgggcttgttgggaagacacctgcaaaaggatggatgcacatgaccttcagctctaatgaatcaagctgctgatgaggaattcactgggctcccaatccagagagcttcgcacacacccactggggttgagacgagcactgggtttatttattgtggacttttggagtctgaaggactcttgccacccatctgtttcacggaacagaacctgaggctcagagggagcaaggcgctcccccacagccgcattgagagcctgagcctgggcacccgatggagtgaatgaggctggagtcccagacctgcctctcatgagcacgtcgcccactgagcctcagcgtcatcatctggaaaacagggataatattatgacctcagaagcttcgggggaggaagtaagtgaaataatgcatttcagatgctcagcgccttttaagtgcttgatgctcattccccaagattacatgagagacatggaaaatctttaatgaccaaggacccacccagggtcactcagccgggacccttggtccgtggcccagagtgtctccagtgcccctgcattgaggccctaaacaaggccagaagcaggtgccggggacccctctggattccaccagagcaccttcctaggatcatggctcccaaaacggaagggaaggagacagcgcagtttgcaaagaggcaggatttaagcaccagggtggccctgtggcgcctcaggaaaatgtttgcctgtcagtatctgctctcgttcccacctgtccccacaaagcgaggccataagtcctcggcgtggcattggagggtctctgaaggccctgagagctgtgtcagccacggtgtgttatgaagcaaggcagatgttttgttaattatttacacagcgtcggcccctcagaggactgcgctgacaggagcggctgtcacaggcctggccgtggggcagaagtgagcagccgtcttcccctggcagtcctcctgaaaaggtctgcatggcaaggcctgagggagtcctgcacattttatgcccccgccccccaaagccatttgggtttcccttaaactggcttgttttcctgagccggtggagagatccttgtcctccggaagtggctatcgctctggggcggcttctctgccagctcgtcacaccctagacccagctgtagtctgtgtggtgggagagggtgtcaccaggctctggaggtccactcctctgtagtcacctcatgcaaggagggcttcacaggggcccagcctctactccctcatccggaaaacgggccagtaacaccaggcaccagccccgtgatcctcaggcacccttgggggtgatctgccttagaaattcaactttaggattagaattctgctaagaggtaccatgtgacaaaaaaggtagtgtaaaaatcacaaagaccaggacaggctcatgcctataatcccagcactttgagaggccgaggcgggcagatcacttgaggtcaggagtttgagaccagcccagccaacatggcaaaaccccatcgctactaaaaatacgaaaaattagctgggcgtggtggtggacacctttaatcccagctactcgggagcctgaggagcctgaggcgtgagaatcacttgaacctgggagacagaggctgcagtgagctgagattgtgccactgcactccagcctaggcaacagagcgagactctgtatcat

SEQ ID NO: 1489 - DNA, 1952 bp, Homo sapiens
acttcgcatatgttatttctaatcttcacaaaaatcttaccaggcaggcctcatattcccattttcagatgagaaaaccaaggcccagaaaggttaagtatcttgctcaaggccacacagccagcaaggaaggggcagggctggattcaaatgcaagtctgcctctgtgctccgtgtgtggacagccagcccccttccacatctgctgcctgcctgggttcctacctgaagcgcccatcgctctcagaggtgtgcaggccgatccaccagtgctgctcctgggcccgggagaactggagaagccaggcgggcaggtgtgggtaggcagccccctgccctcatcccgggcctgccctcccccagcctgcagccccctgctcaatccaatgcccaccttctgcaagttgtggctcaggaagtctagctccgcctggctgtgcacggaggtcagctcggcctggaaccacgtgcagatgcgctgcgcctgcgcccacgtggagtggtgctcaaagaacttgtactcggcctcctggaagcgcagccattcccgtcggcctgcaggagcagcgcgggcgtgggagcggcggccaggcagaggctgcacgccaggccccggaggcgggcgcggcagggccggggcagagccaggcggcagcaggcgagcctgcaggcacaccggacccaggcaggcaccgtgccaggccccaggccccaggcttgcctcgcctcccagacggaagcaaacagggctgtggctgcctccgtccgagccaaccccgtccctcttctctcgaccggaactcctcatcccctccatttcattcaggcctctcgggacttaccccagagttgacgccctctcccacgcgatgggtagcgggatgggctggggggtgctcaccttgagggctgtcgtcgggctcccgcacgtccgtacctaggggaacaaggacaaagacgttgtgaggaaaggagaccctccctggaattcctggccccgccacccttcgctccatcccgcgtcccccagcgccactccggccaacctctggggatcttgcagatccagtccagctgtgtgtcgcactgcatggccacccactgcagggaggccaggtccagcaccgcacagcctcggatgtcgtcgtcgtcgtgccggctccggtcgaaattgtggtaagagaactggaggaggcgggtggagggaagaggaacgtgaggcgcaaggtgcaggccgcccccatgcccggaacaggtgaacaagaggcctggcctgagctgcgaattctcaccgggggccgggtgacccctctcggacctgctttcctgaagccggctccgactgggggcccggccctcaagaaaacccgcccacctccaggccccgccccaaacaggccccgcccaccaagctcccggcctcgcagtcccaagtaccccaggccccctcacccctacgccgtcgctccagcgccaactctgaccccctctgggatcccgacggttcaggccgatccagaaccagtgctgctcgtggatctcgggttctgattcacttcagcacaacccaggagtggggacggaagagatgggaagtgagaggggcaggaacccaaacgtgccccctgtcccttgcagctgtgaccggggcagcccccagggcctggggcctctccatctgggcttcacattgacccatcgatacagcgttgaggtcacttcggtaaagttctccccacaagacagagctggggagagctggaccaagccatccactcaaggggcagtggcccctcccctttgtttgggttccttttgggtgggggtgccctgtccagcaagattctgcaggcttttactttacggagtttaggaagttcagatgaggaggtggcagggatctacggctctggagttaaataaacctggattcaagtatccgttcacccatg

SEQ ID NO: 1490 - DNA, 2110 bp, Homo sapiens
tcagtatctccatagctctttactgctatggttggccccagtcatttagggaactcatcactcatgcagagcgtcactcagcagtggtgcttaggagcatcagcttgcatcggggcaggcttggttccaaagcccaggcctcctccatgtggttccacaacaggaaaagggaacaatcagacctcttccagtgtggtcatgaggatacaagaagatcatgtcaatattggcattcataatggccagacactgtggcgcatgcctgtaatcccagcaatttgggaggctgaggtgggcagatggcgtgagccccagaatttgaaaccagcctgggcaacatggcaaaaccagtctcttctgaaaatacaaaaaattggctaggcttagtggtgcacatctgtagtctcagctacttgggaggctgaggtgggaggattgcttaaacccagggaggctgaggcttcagtgagctatgatgacaccactgtactccagcctgggtgacagagcgataccctatctcaaaacaaaaacaaaggcaaaacaacattcaaaatagtagcaatagctactatgtgccaagcccagacacctctttgagtccttgctgtcaccctatcaggtaagtgtgcttcgaagttacacgaagcagatggcttagtatctggcccatggtaagggcctaaaaagtggtagccccagtggtggggatgctgctgctgctgctgaccattaacccccatctgctccaccttcttccaggcagcctgtgaaacgtttgatgtccgaagccaacagcacattcagatccccaagctctacacctccaatgtgacctggggcttgcaccacttcaggctcgtgcaggactcacagcctttggacctcagctaagggacctgcttctctgtagcacatggggcttgtttgtgttggggtctgagccctgagctcatggtcaaggagaaccccaggtccttctgaacagagacagctggcctcggggcctccctctcactgcatgcaagagcctgttagggcacaagactcaaggcgctgagggaggctgtttcaggagggagccgcagaaggatggtggagagagaaggggacagcatccgccgagggcctactgtgtgccaggcactgtccagggctcctggcccacatgggctaagtgaatctggacactcctcctgggagaaaggcacagatggagaaattgcagttcagggaggtgaagcaagctgctagcctgtggccactttgggatctgagcgccagccttctagccacaaaggcagcaaagggtcatgaagaaggcatcacagaggcgattccaggctgtagtggtgaactctccactctgcacccccaggtgctgtgccctgtgccctgattagatagtcctgaaggtttctacatgtttaagatatccccaatgtcaacgatgctctcctgtggatcccaagctgtggagatgtcctgggactttccattttaggttcctaaattgaatttcccaacacctagaagcaacccagctgccctgtatcagaccaaggacctttatttgtgattcagaaacagtggaataaaaggaaaggaaagaaaaccccaacagccacctcaggaggatgccccaagggtagtgctctggtgtcactgactcagacatgtgggggcttctgccacccacgctcaagagccactttgccgtttcaccgtctctgtgtcctccacagccctcagcagcatgcacgccaataacatgttcaccacgaggctcaaatctcagcagaagctacagagtccaacatccaggtaagggaaagtgcagggcttctcgggtgatgctctactgattttattttaatgaatgaaagaccagaagaagtcagtctttgaagggagaggagaggagcatctgctggcattagcagccatgccatcggtaggactggctcacctggtaacctgtggccacctgtgcttttacatctactcttggttaaccacgggccacttttccagcttggactctaagcgtctgttccacttcctctccttcctcattgaactctttcactaaaaggagagtgcaagagag

SEQ ID NO: 1491 - DNA, 1586 bp, Homo sapiens
agtagcagtccggtcctagggactagcaggcaccaagaaactgataatgttcctttgaattggcttctgtatttgcttcatcaatgtctctcatactgaatatcttaagagagatgctggaatattttggcgttcctgtagaacagttagaagtaacttcagcatatttgtcatcactctggaagaaacagacaggaagaaatttaagatccacatgagagaggattgagcaccgcctttgagaaggttttgctgatttgggaaaataaagactatggatcaactaggagtattgttcgtattattgggaaaatgcttccactggaaccttgtcgaagacctaattttgagttgatcccgctcttgaactctgtagactctgataattgtggatctatggttccatcttttgctgatattttgtatgtggcaaatgatgaagaagccagttatctcagatttcgaaatagtatatggaaaaatgaagaagagaaagtggaaatttttcatcctttgcgactagttcgggatccactgtcacctgctgtaagacagaaagaaactgtgaaaaatgacctgcctgtaaatgaagctgcaattagaaaaatagctgcccttgaaaatgagctgacttttcttcgctctcagattgcagcaattgtggaaatgcaggaactgaaaaatagtacaaattctagttcctttggcttgagtgacgagcgcattagtttgggtcagctgtcatcatcgcgggctgcccatctgagtgtggacccagatcagcttccaggttcagtgctttctcctcctcctcctccaccacttcctcctcagttttcatctctccagccaccgtgttttcctcccgtacaaccaggatctaataatatttgtgactcagataatccagcaactgaaatgagcaaacagaacccggctgctaataagaccaattatagtcatcattcaaaaagccagagaaataaagatattccaaacatgttggacgttctaaaggatatgaataaggttaagcttcgtgcaattgagcggtcacctggcggtagacccattcataagaggaaaagacagaattcacattgggatccagtttctttaatatctcatgcacttaaacagaaatttgcatttcaagaagatgattcttttgagaaagagaatagatcttgggaatcttccccattttctagtccagaaacttcaaggtttggacatcacatttcacagtcagaaggacagcgaactaaagaagaaatggtcaacacaaaagctgttgaccaaggtatcagcaacacaagccttctaaactcaaggatttaaactcaacttaaggttgagctttaaacttccaaaacttcttcctggatgataaattattcttagaaactgatttggactgttaaaggctaaaagtagatgtatttaaagactcttcttgacacattttgcctacacttgctatgtaaatatgtatgcctgtcatttttgtttcctttgttcctttttacgtttatactctgttcttctgtacatagagcttaaaataaacattctttttgaacttg

SEQ ID NO: 1492 - DNA, 1965 bp, Homo sapiens
tccactgccagtgccccaggtcagccctccccgactctggcctcaactgtcggaacaggctcctccctggtctccctgcctccaggctgcctgtccaggccagcctccacatggtcacttggtgatcttcagaaacatagccttcatgtgtactcagaattggcaggtgaaccctcacacacacaccaatgcacacacttaccttcccagccctctcttcctcccacggctcctcagcacaggccgtgccctctagctgggctactcactgcacgcagcagcaccgtgtgcttgctcttgtctctgggcttcccgggccctacctcctgcacaaagccctcccttggtctttcctgccctcctcgtgctctctgtctccctcagccccgcagtgcctgcagtaggttcgcagtgctcatctggcctccctcccacatcctgctttgtcttgtcagccgctgctttttttttcttttcctccattccaggctgggctgtagctgctcccataaagggatcacagtttgtgttccacgcagaaggagcacagaacacttccaggcatatccttggagctcaagacaggttgctcagctaggccagagaagagagggatctgttcatttccagccctgcaggcctgttggctgttttgtgcatttatgtagcttttaagtgcagactaatagctatcatttattgcatgcccactatgtgccaggcactgtgccaggcattctatgtgagctttcttatttactcctcccaacaatcctatacattaggtatcattattgtcctcattttacctgagaatggaagtgaggcacagagatgaaccacagagtttgttctgggtccatggtcctgttgtttctatgttctgtctgctctactacactgcctttcagaggcaggtctggaagttcagagaccaagttcaaaccctggagtgttggggtatgaagtggcttgagattttgaatctttcctaccccatccctctctttgctcagcatcttcaaagccatggggcagggcctgccagacgaggagcaggagaagctgctgcgcatctgttccatttatacccagagtggagaaaacagcctggtgcaggagggctctgaggcctcccccattgggaagtcaccatatacactagacagcctgtattggagcgtcaagccagccagctccagcttcgggtctgaagcaaaggcccagcaacaggaggagcagggcagtgttaatgatgtcaaggaagaggagaaggaggagaaagaggtcttgccagaccaggtagaggaggaggaagaaaatgatgaccaagaggaggaagaggaggatgaagatgatgaagatgatgaagaggaagacagaatggaggtggggcctttctctacagggcaagagtcccccactgccgagaatgctaggcttctggcccagaaaagaggagctttgcagggctctgcatggcaggttagctcagaagacgtgcgatgggacacatttcccctaggccgaatgccaggtcagaccgaggacccagcagagctcatgctggagaattatgacaccatgtatcttttggaccagcctgtgctagagcagcggctggaaccctcaacatgcaagactgacaccttgggcctgagctgtggtgtcggcagtggcaactgcagcaacagcagcagcagcaacttcgagggccttctctggagccaggggcagctgcatgggctcaaaactggcctgcagctcttctgatggccatccctggtgcaagtgttcatccagccgtgccagggcaacagcccaccccctagtacaactgatgctccctgagacaacctgggagacagcctggatcagccacatcaactcagttgtccaccacaggggaattttgaatgtcttttgtttttgttttgttttgaaaaataataaacaggcaactgt

SEQ ID NO: 1493 - DNA, 2397 bp, Homo sapiens
aataagcatgaatacgacctggctacctgaaggaggtaggacggggaaccgagcagcagcaggtggtggaatgccagggaaatccaaccgtgcttcccacgctggcatcgctctgattatgaccaatcctctaatcttattctcacaattagggaggaagaaaaaaaaacaaacccaaaccaaaaaagaagttggtaggtgactctgtgagactactgttttataaagggagcgtttccttttataaaatttagctgagcagatgctaggcagcccacaggaggccactattcccctcagctgtacagtttgggaaaatacctacacacccggagaacagagagcttggtgtgtgttgagttcgctcctgttcatcagcagccctttccccgtctctggccaccagggggacctgcaaccaagtatgtgttctttcaggcgagcgggaacgcgtctgcataaatctagtccaatccagggccccgtagcaaggcgccaaagctgggggcagcgcatttctgttctctcgcgagcacgacgcggtgcctcccagtcctcctccggccctccctctccgccctcccggcccgcgagcgctcgggccccttccagtggctcgcggcaggtggcgctgtctgcggcgtcgcagcggcccgggctgcagcagagacgatctcccggcgggctgtgcggcccggctctccggcggcagcgagtgccacgtcccaagtgctacgcggaggattagagcaggcggtgcgctgggggcgggagcagcgcggagcccggctcggccacaccgatcgcccgccgccatgggctcctcgcaaagcgtcgagatcccgggcgggggcaccgagggctaccacgttctgcgggtacaagaaaattccccaggacacagagctggtttggagcctttctttgattttattgtttctattaatggttcaagattaaataaagacaatgacactcttaaggatctgctgaaagcaaacgttgaaaagcctgtaaagatgcttatctatagcagcaaaacattggaactgcgagagacctcagtcacaccaagtaacctgtggggcggccagggcttattgggagtgagcattcgtttctgcagctttgatggggcaaatgaaaatgtttggcatgtgctggaggtggaatcaaattctcctgcagcactggcaggtcttagaccacacagtgattatataattggagcagatacagtcatgaatgagtctgaagatctattcagccttatcgaaacacatgaagcaaaaccattgaaactgtatgtgtacaacacagacactgataactgtcgagaagtgattattacaccaaattctgcatggggtggagaaggcagcctaggatgtggcattggatatggttatttgcatcgaatacctacacgcccatttgaggaaggaaagaaaatttctcttccaggacaaatggctggtacacctattacacctcttaaagatgggtttacagaggtccagctgtcctcagttaatcccccgtctttgtcaccaccaggaactacaggaattgaacagagtctgactggactttctattagctcaactccaccagctgtcagtagtgttctcagtacaggtgtaccaacagtaccgttattgccaccacaagtaaaccagtccctcacttctgtgccaccaatgaatccagctactacattaccaggtctgatgcctttaccagcaggactgcccaacctccccaacctcaacctcaacctcccagcaccacacatcatgccaggggttggcttaccagaacttgtaaacccaggtctgccacctcttccttccatgcctccccgaaacttacctggcattgcacctctccccctgccatccgagttcctcccgtcattccccttggttccagagagctcttctgcagcaagctcaggagagctgctgtcttccctcccgcccaccagcaacgcaccctctgaccctgccacaactactgcaaaggcagacgctgcctcctcctcactgtggatgtgacgccccccactgccaaggcccccaccaccgttgaggacagagtcggcgacttcaccccagtcagcgagaagcctgtttctgcggctgtggatgccaatgcttctgagtcaccttaactttgaaccattctttggaattggcgtggtatatttaaccacgggagcgtgtctggaaacgcaaactatcattaatttcatactagtttgtaccgtatctgtaggcatcctgtaaataattccaaggggaaaactaaacgaggacgtgggttgtatcctgccaggttgagtggggctcacacgctagggtgagatgtcagaaagcgcttgtattttaaacaacc

SEQ ID NO: 1494 - DNA, 2075 bp, Homo sapiens
aatcaatgagatcactggattttggaatgagaacccaagttacaagggaagcaataagtcgcctgtgtgaagctgtccccggggcaaatggagccattaaaaagcgaaagcctccagttaagttcctatcaacagtccttggcaaaagtaatcttcagttttcaggaatgaatataaaactgaccatctcaacatgcagtctcacattgatgaatcttgacaaccaacagattattgcaaatcatcatatgcagtctatttcatttgcctctggaggggatcctgatactacagactatgttgcctacgtagctaaagatccagttaatcaacgagcctgtcacatattggaatgccacaatggaatggcccaagacgtcataagtaccatagggcaggcttttgaactccggtttaaacagtacttgaaaaatccttctttgaatacttcttgtgaaagtgaggaggtgcatattgatagccatgccgaggagagagaagatcatgaatattacaatgaaattccagggaagcagccaccagtaggtggtgtttcagatatgcggatcaaagttcaagccacggaacaaatggcttactgccccatacagtgtgaaaagttgtgctatttgcctggaaactccaagtgcagcagtgtatatgagaactgtttagaacaaagcagggcaataggtaatgtccatccaagaggggtgcagtcccagcgagatacctcattattgaagcacacgtgccgagtggatctctttgatgacccctgctacattaatacacaggctcttcaaagtacacctggctctgctggaaatcaaaggtcagcccaaccactggggagcccatggcactgcggaaaggcaccagaaactgttcagccgggtgccacagcccagcctgccagctcacattctttgccacacattaagcagcagctgtggagcgaagaatgctatcatggcaagctgagcaggaaggcggcagagagcctcttggtaaaggatggggactttttggttcgagagagtgcaacatcccctggccaatatgtgctgagtggactacagggaggccaagcaaaacatcttctcctggtggatcctgaaggcaaggtgaggaccaaggatcatgtatttgataatgtcggccaccttatcagataccatatggataacagtttgccaatcatctcctctggaagcgaagtaagccttaaacaaccagtgagaaaagataataatccagcacttttgcattccaacaaatgacagtattgaagcaccatcacactgatatttcaagaaaccccattttgtattaggacacaaagataatttaaactttgtttatagataaaatagagcacaaactgtgaagtgcatctttccaagaccatcatggaccaggtcctctataaaatgaagaactaacaaaaattagtcttcagaaatgaaaatcagaaaagaggaagagggttggtcattttaaaagaaattatatgtatgcacggatgtcactttttaaggccatattgcattgataacaagctaaaagcacaactaaaatttcacatgctaacgacaacttgaatgaactgctggggcagtggtatgtgcctttcaacttgataatttgggggacattttcatattgggagattaattctaagtatcttcattttctatgactatagaaccatttgccaaaaaaaaaagcttttcttgctacaaaaaataagcaattttcttgagccttattgactttattacattttctgtttagcagcatttttcactgcaatgttaaaataaatatgacattgaattcgaactgtgtgtatgtcagtggaatcaaatcaaaagccactaacatggctgtctgtttcactggactgtcccatttgctggttaaaaggattggggcccaaatcctctggcctagcatttctcagtgtttgctattcagactgtctaaatacagcatgtgacaagctgaagaagccaaatctagcagtcatttctgatttcattatattctccccctcttcctgctaaaaagac

SEQ ID NO: 1495 - DNA, 2463 bp, Homo sapiens
gaagatggcggcgcacaagtcaggtccggcacatgtttccgcggagcggacccagcaatgacggatgatatcacctcttcttctctggtgagagtctgaggatagagacttttttctcaccatgaatgtcaccccagaggtcaagagtcgtgggatgaagtttgctgaggagcagctgctaaagcatggatggactcaaggtaggacatgaccctgccaaggagttcacaaaccactggtggaatgagctcttcaacaagactgcggccaacttggtagtggaaactgggcaggatggagtacagataaggagcctttctaaggagaccacccgttataatcatcccaagcccaacttgctgtatcagaagtttgtgaaggtattagaggctgtgggtaacagagtccatcctttttctcttccctggtttccctggggcctgaacagttgccttgtatgccttatcaattctcagaactttcctaacatagtgggatcctgtgaccagccttgctgttgcttacttagactgcccagaccctcagcaggaattgagatcttcaggttccgtggatcctgccatctgttaagggagcagcaatagggcgtgggaggtagggtacagtctcttaagtcaggagctgccaaattttgggggggccaggggacatctaattcaaaggacttagaagccagaggagacctgagagattatctggaccatccctgctttgcagatgtggctaaaagggtgaaaagtggtttgctgaagagcccacagctggctagtaatggcaaacaggactggaacccaggacttcaggcctccactttctactgtaccaataggaggaagctaacatgtaatggtcattatgtgctaagggctatacatgttacctagcaaatctttcccatttctctacatctctgttaccatctactaccccacttcgggccatcatcatctcttgcctaatttctttctccagcagcctcctaagaacacctgtagtctcactccccaccccaacctttgtggaggatggacttctccacaaagcatccagtgttctctctaaaacataaatgtcatcatgtcactgggtcttgtttgacctaggatgacacaatccagatttatcggactggcttatatggctctgcatgcctgttcctgccatctccagcctcatctcttcacttttctccaggaccactactttagcctaaccattagcataacagattccaatctgtttcttttctttgaaggtacgacagtcttccatcttcaggttattgcacatgttgctccctctgcttgggacattcttctccctttccccctttaccttctgagtttctcttatcctccagagctcagcttatacatcagttacttttagaagccattctctgaagtctgagttgagtacccttcctctatcacaggcaacacttccatcatattgcctatgtagattccatctgggctgggcccatctcattcttattccactctgaatccccaactccttggcccatagtagactctcaattaatctgattaaatgaaggtactgtgaacaggtactatggtcggggtggagcggggcatctttactgtcagtcactggcacttgtccactgtgaagacctgatgaaccagagcatttcctcttcttgttctgctcaccagccagctgtgggcgagagaggccaaagctgctgcacatcccagcagcagcagcccatctcctatccaagttcgagtatgcaggatggcacacctccctgtggctcctcaaggagcaatggtgggggctggcaaaccactgcctggagctataaattcttagggggcttccacaagggaatagggatggtgatggtgttgagaaggccttatctacccccatgacccctcctagatggctacattgacttcaggtggagagaagccaaacaaagacttggagagctgcagtgatgacgacaaccaggggtccaagtccccaaagatgtgagacttcattttagctcttggggaatgtgggaagagatgtcttcagatggcaagagaaagggctaaatctaatgcttgactgggggcttcttgggggtgggtggaactgtgttgtactaatctttgtatccctagtacctcaaaaagtgccaggtcctgaacaagaattcagtgttgaaggaatgttttagaaggaggagaggtcaagcctttccaccaggtctgtttgtaactgctgatctcccctaacagtctgactgatgagatgctgctccaagcctgtgaggggcgaacagcacacaaggctgcccgtcttgggatcacaatgaaggccaagcttgctcgcctagaggcccaggagcaggccttcctggctcgtctcaaaggccaggaccctggggcccctcaactgcagtcagagagcaagcccccc

SEQ ID NO: 1496 - DNA, 1898 bp, Homo sapiens
gagaggagcagaggtctgtagaggtagagacgtaggcttcggatcttttagaattctgctggaagtctccaagtcaagaggatctacaaagaaatactgagtggagactatactgagattctgttaaagacccacttgaattcagcccccattaggagaaactttggccggagcagccaacacatcacctggaagtcttcagactagactattgaagagtggattgtgtactgagggctcccaagtgcttccagaagccaataaaggatcacttcagtttacttcacggctaaggagtaacccttaagaaccatggccaaacgcctgcaagcagagttgtcctgtccagtttgcctggattttttctcctgttccatttctctctcttgtacacacgtgttctgctttgattgcatccagaggtatatactagaaaaccatgattttagagcgatgtgccccttgtgtcgagacgtggtgaaggtacctgctttggaagaatggcaagtgagcgtcctaacacttatgaccaagcagcacaatagccgacttgagcaaagtctgcacgtgagggaggagctccggcattttcgggaggatgtgaccctggatgcagccactgccagctccctccttgtcttctccaatgatctaagaagcgctcagtgtaagaagatccaccacgatctgacaaaagatcccaggctggcctgtgtcctgggtactccctgcttctcctccggccaacattactgggaggttgaagtgggagaggtgaagtcatggtccctgggcgtctgcaaggagccggctgacagaaagagcaatgatttattccctgggcatggcttctggatcagcatgaaggcaggagcaatccatgctaacacccacctggagagaattcctgcaagccctcgccttcgccgtgtgggaattttcctggatgctgacttagaagaaatccagttttttgatgttgacaataatgtcctcatctatacacatgatggtttcttctctttggagcttttgtgtccattcttctgtcttgagctcttgggagaaggggagagtggcaacgtcctgaccatctgcccatgagaaagtcagcccttcctagaagctttctgagaggtgaaagagaattttggcctgagaaaggtcagcatgattgaggaagagataatgtgctatagtgcaaagacttggtaaatttttaaagtagattttgtagactttgtagcaaaacaattttcggatttttggggtaaattttgtggaatttgtagctaggtaactggggtctttagggatgttattaagtactgtaagcttcagttttctagtctgtagatgcggataattgtatctcagtcaaacagctgtggtaattagagacaatactatgcctttgtcttatagtaaataacaaatagagaaatcttagattgtaagtaagctagatattaggttttgtggatagacaatatctttttcattatttcaagctgttttgtgtaattcctgataatgtctgaggaggaagaaaaattcaacagccagtgtgagttattttgttgatacagcatgaaatttcagagacaaactgatattggggaagaactaagtttttcatttttattttctttgaaacacagccacataagttttcttgaaagacaaagaactttgaccaaaatgcattgttaatggtgattcatattcttatgggaagtgtcatttacccatctcaataattggactattgtgatttataagaattcttatcaaccatgttaactaacacatattcatcaaaaattgttttcaaggttgcttttggattttttatttgtagaatttattttcttgcaaataaatttataaagcattgg

SEQ ID NO: 1497 - DNA, 1423 bp, Homo sapiens
gataaccagcaaaactgcaaagggaggcaggaaaaccacccgcagggaggccagtgtgggtttaaggtgatggcattccccagccctgcccggcaccggcctcccaagcctgggacctgggggctccctgcctccttccagatggaggaagtgagaccaggaccacagactgggcgctccctgctgagtctgtggccctgaaggctgttcagctctaagcgtcggtgcacggacaggccagacagggctgtattgctccaatcgccctgcaagaatcacagccagacgggggcttcccgagtgctgcccaccttgccggcacgcaggaggaggtggcatggactggggaggaggaagcactctcactcctgctggagcctctgcccaggaaccccgattggcccagccgtccctggggaggcccatcccacgtgtcccgcaccccgtgtctgtcagcactgatcagggtctcccagacacctgctctggggttgccatggggacgagcgggagggtgagtgtggcgcacacagctgtctgtagacacacagagggcatgcacgcatgtgtctgtgctcacctgcatgtgttcacacggactgggcaccgccggaggtgttcacacagcggtgtacaccgacccctctgcagatgtgcacacacccagcaaggctacgtccacaggcgtgtatgtgttcttgcaccaggaggtgggtcacgccccacaccacacatcgtatactctgtccctgcggcacgcacctgtctgggtgcaccaggcagtctaagcccatgtcacctatgtgtacacatatgtgcacatacctactcaggcacaccagtgtgtgtacacggctgtccaggcacactgggcagtccaagcccacgcctgcccagactcttggaatcgggcactttctgaggctgccccgatgggcgttcctttccccagccagtacatcctctcttcctaaccccacgtctgctggactcttaaggtgtccacgcggccatgaacatctccagggcctgcactgcccactaccaggaccccagcggaacccagcatctggtcactaggggtctgcatgggcagtcacttcctgggggcctgcaccccttaaggagggtgaaggacgggccagcccagctggggctgaatcctcacagccttgttcacggggagaggctgacctgcgcccattttacagacaacaaaactgaggctgagagagtaacagcccggccagcacatggcagagcgtggcgcaggcccaggcctgccttgtgaggtccctgccgttccctgcagggtacatagaggcggaagctgatgtggcccccactgggcgttctttcactttctctcctttgattccacagtcctcagacctaggaattaaagaaacgtccgtagtttccg

SEQ ID NO: 1498 - DNA, 1660 bp, Homo sapiens
tattgtttagtgtgtgtgtgtgtgtgtgtgtgtgtgtgtgtgtatgtcagggtcttgctgggtcccccagactgtagtgcagtggcatgatctcggctcgctgcagcctcaacctcctaggctcaagtgatcctcctgccccagcctcccgagtagctgagactacaggcacgcaccaccacgcctggctgatttttgtattttttgtagagacgggggaactcaccatgttgcccaggttggtcttgaactcctggactctcctgccttggcctcctaaagtgatgggattacagggatgagccagggcacaagtgtttcaaaggctttgttccaagataaaaaagataaaacatctctccagtttctgaacagacaaaccagaattcagtgtgatcaagtggaagaaaggcaaaaagagaagtttttatgggcacttagtttattttgttaggaaatttggacaatgttatgtgataactaagaacacaaaagcaaagaaacaaaagaagcatcgcatgccgatgggaaaagtggaactaagacggagctgcatagccatgagcatgtccatcagaccaaacacgaggagttgtgatttcatttccctgaggtcagtgacctggacagtttcacagctgctgtgctgttctcatatttttccatgagatcgttcctattagtttggaagcttttcagacggaaagacatgaaacaccaaagaaaaacagcaacagagttcaagaccacagaggagggggagaccagacaggatgggaaggatgggagtcttacctacagggcagatacctgcagcccctgcccggaggccgggggcccgcctagcagcagcattgcttctggcagcagcatttctgttggcaacagcccttcccatagccacagccacacgagccgcaggtgcggcggcagcagcagatcacgggagtgctgcagcagcctccacagcagccgcggcagcaggggcagcagctggagcagcagcccacccggtagcacctgcaggtggtgcagctgccacagccaccaccacagccaccaccgcagccaccaccgcagccaccactgcagccaccaccacagccaccaccacagcggccaccacagccaccacaacttccacaaccacagcaacccatggtgtcagtagaggactcaggtgaagtgagcagagaggactcaggagaggtgaggaggtctgatgcctccttctgctgggggacacccttatgtaccatcttggggaaaggaagagggagtgacccaggacacatgaccagtggtcacttccttgttgttgctactgcagtttccatgataaggttatctaggactattccttgtttacatccttatggactatatttgacccaaaacatttgctaattttcacttgtctctgttaaaaccagattaaaagcaagccaagagatgctaacatgtaggagaggatcttcatttactcagaaaccacttgaatccttgagacttcgggttaagccggaacccaaggtggctgccagctgcttttccatctctctgccatggcttctctccaggaaatcaccctgctttcatggaaattcccgagatgcaaaagagtaaataagagcatccaaataaaacatgtcatttttgc

SEQ ID NO: 1499 - DNA, 2639 bp, Homo sapiens
gatgaggtcacagagttgttaaaggaggcctcattagatgcgctctctgacagggaagttggcataaggtctgtttctttgctgggtcatattttacagtgtgatctcttcactctgaaagcagagaaacacattttcaatatattttccattacggctccttctagaacactgtgttgtttctcctagtaaaggggctattccttgaaaaataactctaggtttagctgattttattgtttttattaataattgacgatgcctctaagaaaaaggaaatccccagagaggactgcatcttcaaaatcccccgaaatctctaggtcccatgtaaacagtataaaggaaagaacgtcatcagttggtttgcctagtgttattccaaactctacacgccgtgtgagctttgcacctaacctgccttctatgaaaacatctcaggatattggagactctaggatctctctaaagactcttttgaatgctattaaaaccatggagggaagactggaaggcaaaatagagattctagcctcaagacctttaataaatgatgaatcaccaaattttcttaaacaggactcggtgaaatctattcttgaaagaagtaaagaggagctgtcccgaacagtgaagtgtcgtaatgcggccctgaaagagagccagaagttgaaagaagacctcgaggctgtggaggacagggaaaacaagaaggtgggaaactttcagcgacaattggcagaagctaaagaagacaactgcaaagtcacaatcatgttggagaatgtgctggcttctcacagttaaagaataaatggtctgagtttaatagggcatattgcctctatgttatgagagaacaaggatctcaatcaacagagggtgcagaagctggaagctgaagtggaccagtggcaggccaggatgcttgtcatggaggaccagcacaacagtgagattgaatctctacaaaaagctctaggtgtagccagagaagacaacaggaaacttgctatgagtctggaacaagctctccagacaaataatcatctgcaaacaaagctagatcacattcaagagcaattggaaagcaaagaacttgagcgacagaatttggaaaccttcaaagaccggatgactgaagagtccaaagtggaagcagaattgcatgctgaacgcatagaagctctaagaaagcagtttcaaaccgagagagaaactacaaagaaagtggcacaacgggaagtggctgagctgaagaaagcccttgatgaagctaacttcagatcagtggaagtgtcccggaccaaccgagagctgcgacagaaacttgcagagctagaaaaaatactagaaagtaacaaggagaaaataaagaatcaaaagacccaaattaagctccacttgtcagctaaggcgaataatgctcagaatatagaaaggatgaaggttgtatgggaaacctcttctcacttcctggataccctgtgaggatgtagtcagtcaatggtgtctagggaagacaggttttagaaccctaccagccccatgtattctctgggaattatagccagttgtctttggggagactttttcagtggagtcactgctgtgtaaatgtttgatttctcatttgctgccagtgtcacattccggctccctatctgtcccttccgtgttgattgtactggactttgctcttttgggatcagtgggctagatgggaaagaaagctcagcaggaactggtaactttgggtctcatattggattctttctgtcatcctataggcaaaaagagcaagccagtttttccactgatcatctttttatgttattttccaattacttttagcaaatagaaaaagaattgaagcaaatggagctaattaaggatcaatatcagaaaaagaactatgaacagtctttgagtatccagagatttgtgtgtgaaatgactaacctgcagaaagagatgcagatgttggctaagagccaatatgatgcctcagtgcggaataaacagcaagagctgcacctagaagcagagcggaaaataaggcaggagctagagaatcggtgccaggaattggaagaaactgtcagacacctgaagaaatgtaaagaggcaacagagaatacgctgaaagaagccagtgtggaatcagaacagataacagctaatctggaagaagctcatcgctggtttaagcacaggtttgatggtctacaacttgagctgacaaaaaaccggttgcagaggccttctggggaagacaggtggcaggaaaaggaccaagatgtaaaacatgatgtcatgtccaaccaatctgttctgcatcgatgggagagaaaacagaatcttaggcccatgcccaagaagtatcattctgaggtacagaggaagtgatgtccttgacaagggagcttctttatgtgtagctacactccatgattccaagagcccagcagccggggctggcctgtttctagagtcataagaacatgaagtctttgatgtgggctgaagattttggacctgagtttatcactttatgaactcttatatcagtacaaaactacccctttttttgtcccttttcacattttccacccaataaatttgtgttaatttgttgt

SEQ ID NO: 1500 - DNA, 2175 bp, Homo sapiens
attaatcaatgcagagacggggcaagtggagtatttgcagggttggcctggagcccagcatgcgccccctcccacacatccaggacagggatctggacggctgtgggttcaggtcaacaaatgtccatggagtcacccatcaatccaaggctcccagcagaaggcagacagtgtgacttggctacaggctttgccattcgctgcctgtgagacacaagcaagtaggcgaagatatccaagcctcagttctcatgaagcatcagaatgatggtgccactggctacatggagaagcaaggagaggagaatgctagctgcactccctggctacacgcaaacagatgcagcacgaagccttgggaaccttggcaagggatttaaacagtctccctctaatgcatataacatggtgctgctggatttcccagaacaggattttaagatggttccgagagtggaacctggtaactcctgggagcacctctctgcttggtctgctctgggggtgggctgctggcccatctgtggctagcctcaggatagagggaagggagctgcagcagctgccatgacgtgttgggaagggaactgtcatgtttgcagcagccctggtgggtctgatgtttttttaattatccttcaagttccaaaagcacatccatgtctctggggacacataacaagccatgtcactttatgttcctttggaactatgtctctttggactgtctggcttatagttgttgttcagggccaagtgatgtgtcacccttctctgaaatgtctgcatcctgtgaattgtttagcctactttcccctgaccccaggctcaggcccctcttctctgctctcaccatacctttcaccccacatccagtcccctcccaaaatcctcccagttttacttctgtgcccttttgagagggcacagtcatttatactttaagctttccaccagaaagtcggatgctgaagatgtccaggacaaacttaagtttcagtgtttgttgaactctctgtgccctctccagtagactgcctttcctcatgccctcagactctactctacctgcctgttctgcaggactaaccccacgtggagacagtcagcccccaccccagtggggacatgcactggagagcttccagaaggcctgcagatagcttctctcctgccctaccatagtgcccgaaattcccaccagaaatgccactcttgtggattacagcatccagctccagaaagcctttgagttgttacctcaattttgcttttgaggaaatgaaggatgaggattccagtgacttttccaagttcaagatcaaccactggcaagatcagagctgaacctggccaaatgaacacaaatcccatgctctttccacaccaccacactggtgcaggaaggacgatttgatttttcacagctctagagcaggatgacttgcccagatttcaccccttgagaattaggaggagggaaagggaatttcagaggatttcttcttcttcttcttctttttttttttttttgagatggagtcttgctctgtcacccaggctggagtgcagtggcatgatctcggctcactgcaacctccacctcccaggttcaagcaattctcctgcctcagcctcccgagtagctgggattacaggcgtccatcaccatgcttggctaatttttgtattcttagtagagatggggccaccatattggccaggctggtctcaaactttttaccttgtgatctgcctgcctcggcctcccaaagtgttgggattacaggcatgagccaccatgcctggcccagttttcttctttatacttattttttcaagacattgcagcattgccttaacctctctctttctttttttttttttttttgagatggagtctcgctttgttgcccaggctggagtacaatggcatgatctcagctcactgcaacctatacctccctgaggcaggagaatcgcttgaacctgggaggcagaggttgcagtgagctgagatcgtgccactgcactcaagcctgggtgacagagcgaaactccgtctcaaaaaaaaaagtttcttccttacatgtatgtttctattagttttcttcttggtctttctcatttagtcttgtgttgtcttttggcattcatagtaaacttttatctgcc

SEQ ID NO: 1501 - DNA, 2101 bp, Homo sapiens
attcttttcttggacccaaagatgcaagtccctttgaggccccgacgaccctgggcagcatgcaccataccagagaatccaaggatggagagccaagcccacgatcagctgcccacaccatgcccaggaggaagaaaggctactgcgagtgctgtcaggaggccttcgaggagctccatgtgcatcttcagagtgcccagcaccggagctttgccctggaagcccatctatatgcagaagtggacaggatcattgctcagctcagccacagctttgcagacatccctttccaggctggcctccccaggtggtcaggttccccagcttctgattgtgaccctctctgtcctgagactctgcacccccatcagccctcccatcccagggcagcatctcccaggataaggaaagaagacagctgccaggcatcagtgacccaaggcagggctgcgggccagcagcgatggacagaatcactagatggtgtgatgggacctcctgcaagtcacacatgtgtgagtgccacaaccctcctgccggccttgcccaagggctccagggagcagggctgcctctgtccctgcccagcctcctttacccagtctcatctggtcacttccttggctctgctgcctggggagtggtcgcctgcagaggacatgcccctccatccctcccaagaaaactcctttgccccggcggacattcctgttaagggcccactcctcttccctgaagccagaccgtggcttatgtctgcacgctgctgggttcgtccctttccttttgtgacatggggttgcctcattccccatgacaccacccctctgcatgaggaagtttccccttgcccctgtctcagacttggatacctttacctgctgctcacacaaagcctgtggtgccgggttcgggtgccctcattgtcaactgcaggacccattccccgaacctcacatccgtgtacccttgccttcccctcctatctcaatgatcatgaccttggacatctctgccaggccaaaccccaaggctggaacactcctcagccatttctccattgcggcttcctggctgtagactcaggttagaggtgaacccagaacacctgagacttgacccaggatggatgggtgctgcttgatgtgaatgaggtcccgcagtggctccttggcgtgagcactgctcagactcctttccactccagccccctttccacatcgcaccagatgacttttacccagacccagtgggcattgccttatcttgcagtcagtcccttttcaacatgttgccgtttctttctgaagaggtgtcctccctccacaagtcacactgtctgtccctggccctccagcccacctcgccaaccactcttgttggtttccttctcagacttgccacctttcccctctgccccaaaatgccatgctcctctcctggaaaacacttgagttgattcagtaaatcgacttcaagtacttgaaggctcccaccttctgttctctggctccttcctgcggtctatacctaccgcctcctcttcacctccttcccttccacacttccttcctgggtagctctgcctgaagcattccactaagatcatctattccaaggtcatggacaggctactggtgaccaaagttggttccttttctcctttctttcctccttgaagcctggctcccttggtcgcagcagcccctcagtggcctggttctcctgtccccctgcccttcctcaccattgcccattccctcgttcgttcattcagcacaggccttgccgtctgccctgagtcagctccgagacacctgaagagccctccagccctaactactttactcagactaggtccccaggcctttgttcttgcctcttctcgctgagcctttcacttctcggcagatgtgaccgattggtagctccaccccaactcccttctgctgggtggaatgcaggagctagctgcctccaactcactgtgacctcagaaaaatgcctttattactcgggcctcagtttcctcgtctttaagtaaggggcttggatgagatgatttcaggaccctttccaataataaaatactgtgactgcc

SEQ ID NO: 1502 - DNA, 1864 bp, Homo sapiens
gcataccaggtagatcaagatgcacacaccagaagatgatagagtatgacaggatccgagctacaagcaaggagcttggagtcaacaaggctttaaacaggggaaggatgccaacacctagttttccgtatcccgggtggtgcctctacttatggcaagtgtgtccatcagcagaaagaataaatcgcctcttggaacacttgccaccttccatctcgtttgatgacgtacacgttttctcctgagacaagcaagctcccacacggtcaaccccacaccggagccgagaaccggcctctccccaactcctggaccccaggaaagctggcaaagcgctgatccccagagtggcaagaggcttagggcggggatccagacacccagggaaagaagtgctgtcccaggaccccagccaaaagaagagactagactcactgaaggagacgagaataaaagtcctctgctgcgcagttcagccgctcccacatcccgccccaatgcgtgtgctcgcccactgatatcggtgtactccgaaaagggggagtcatctggcaaaaatgtcactttgcctgctgtattcaaggctcctattcgaccagatattgtgaactttgttcacaccaacttgcgcaaaaacaacagacagccctatgctgtcagtgaattagcaggtcatcagactagtgctgagtcttggggtactggcagagctgtggctcgaattcccagagttcgaggtggtgggactcaccgctctggccagggtgcttttggaaacatgtgtcgtggaggccgaatgtttgcaccaaccaaaacctggcgccgttggcatcgtagagtgaacacaacccaaaaacgatacgccatctgttctgccctggctgcctcagccctaccagcactggtcatgtctaaaggtcatcgtattgaggaagttcctgaacttcctttggtagttgaagataaagttgaaggctacaagaagaccaaggaagctgttttgctccttaagaaacttaaagcctggaatgatatcaaaaaggtctatgcctctcagcgaatgagagctggcaaaggcaaaatgagaaaccgtcgccgtatccagcgcaggggcccgtgcatcatctataatgaggataatggtatcatcaaggccttcagaaacatccctggaattactctgcttaatgtaagcaagctgaacattttgaagcttgctcctggtgggcatgtgggacgtttctgcatttggactgaaagtgctttccggaagttagatgaattgtacggcacttggcgtaaagccgcttccctcaagagtaactacaatcttcccatgcacaagatgattaatacagatcttagcagaatcttgaaaagcccagagatccaaagagcccttcgagcaccacgcaagaagatccatcgcagagtcctaaagaagaacccactgaaaaacttgagaatcatgttgaagctaaacccatatgcaaagaccatgcgccggaacaccattcttcgccaggccaggaatcacaagctccgggtggataaggcagctgctgcagcagcggcactacaagccaaatcagatgagaaggcggcggttgcaggcaagaagcctgtggtaggtaagaaaggaaagaaggctgctgttggtgttaagaagcagaagaagcctctggtgggaaaaaaggcagcagctaccaagaaaccagcccctgaaaagaagcctgcagagaagaaacctactacagaggagaagaagcctgctgcataaactcttaaatttgattattccataaaggtcaaatcattttggacagcttcttttgaataaagacctgattatacaggcagtgag

SEQ ID NO: 1503 - DNA, 1801 bp, Homo sapiens
attaggaaggcccccagctgtggccagcccagggccgggctgcccaccgtgccagcccagtttcaatgacccacctgagggtttccatcgtgggccaggggaccggcgcaggcggcatccggagccaggcagtggccagcccatcccgggcagggtcataggtggggctgcaggcctcgaagccgccatgtgaaggcagcagcgaccccaggcagggcgggccaggttgaccttgcacctgctctcccctcagccccgcggccatgccgaccctggtcgtgggcacgccgcccacctgcctgggggacacacctcagccctgccacaagaacagccagaggcagggccccttctcccatggggccccagggagagcagccgactggaaggctgttgccaagcccaggctttgcgcacctgcagctgaggatgacgtggcagccctgaggtggcccgggccctcccagcagccagacccaccctgggcagctccccacgtggtcgggtctgacgacctcaaggaaccaggcccctgggggaaggcgtgcagcctgcccatgtggtccacaggcccggaggctagggatggggacagctcggtgtcatcgggccgcctctcgtgctcttcggggggccacgacgtgtgtgtgtcttggaaggagaggccaccccaggtgttggggccccagcagaggcccagaaagagtgacgcgcggctggagcagctgagagacaagatccgggcccaggcgtggcagcaggggagctgtgcgtccctgggcacctcagccccctccagcgcctccagactccacaaagcctccatgctgacgcttaggaggaaaggccaagaggcaaaaaatccccctccagcccctgaatgctcaggtttcagcatcttgagtgcagctgagcgcagagttgaagccaaggcatcccacggccaggggcgcgagctctccagggtctcccagcaccaggttcctgttctgagggaaaaacccaaaagggtcaaaagcagttcttgcaaaagagagaagacccccaagttgccctcccctagaagagcggccaaagacaaacacaaagacgaaggttggcagtcttgctcccattttgtagatgaggcaaccgaggttcacagagtttccacagcctgcccggggctgcacagaggcagagcctcccacccgtccagcccaaggccggtgctcctaacctggaagcccagccgtgtgcacctggggccacgcctgggcagcttgtcgaggccaccctccaggcgtggattctggggccaccgaaccacagcattttggagacaccagcaagagcccccaggtggagtgaacgcctgagattggctttgtgggaccctcactccaagtgtgagcagtgccagctcgctggccactcctgtaatgctccatgcctcagtttctccacactgcgtgcaatcacagccccggggccgtggggaggggcactgcgtggcgtgcgttctgtccgtgcccaggtgcctaagcatctgtcccgtgtcatcagttgccggcccctctgctcctaggcagagcagcagcttccagccgagagtaaacgcctctgtgcccatacccagggaggacacgcgggtgaggtgggagctcagcggggctgcggggccaccgtgtgcattcagcggggccagaggccgagcagaaggggactgcgatgtagggacccgggcacccagaaggttccggaaggccgtggaaacatgcgtacaatataacaattttctgcatgatcaccccctccctcc

SEQ ID NO: 1504 - DNA, 2043 bp, Homo sapiens
agccgagtccggccctccatacccttgggcggagcaggaggcagggccgggctcgttgcgcgcctgatcagtgcagccccggcctttgtcccctaccctgtttctgcaactacatccccgaccctgtcctgggaccttcgtcccggagcccaggctctgggatttccctcagtccctggcagggttgaaagtccgggatggggacttcctaaagctccgggacgccgtgggatgggctcaagtgcgggtggctttgcccagaccgcagtcgggaagtgggaactggacagtaggggtgcgggggaggctctccagggtgctcgggaatgttctcaggaagaagacttgacatagagcaagagctggttccacaccggagaggcggggatttccctaggatcactggacctgctgggatcagcctctgcccagccctggcaggggagggagttgacgggctgacacaggaaactcccctgaaacctgtttctcagcttcccggcccagctggggcacccactggaaggagaggccaggcggaagaccctggctccgtcatggcctctgccctgaggccaccccgtgtccccaagcctaagggtgtcctgccttcacactactatgagagctttctagagaagaaggggccctgtgaccggcccaggaaaaactccgtgaacctcagctgctggggcgaaggccaggacaggattacaagaagttctgggcaggcctgcagggtctcaccatttatttctacaatagcaatcgggacttccagcacgtggagaagctcaacttgggagcatttgagaaactcacagatgagattccctggggaagctcacgtgaccctggcacccacttcagcctgattctccgggatcaggagatcaagttcaaggtagagaccttggagtgtcgggaaatgtggaaaggcttcatcttaacggtggtggagctccgtgtcccgaccgacttgaccctgcttcctgggcacctatacatgatgtctgaagtcttggccaaagaggaggcgcgccgtgcactggagacaccctcgtgcttcctgaaggtgagccggctggaggcacaactgctcctggagcgctaccccgagtgcgggaacctgctgctgcggcccagcggggacggcgccgacggcgtgtcggtcaccacgcggcagatgcacaacgggacgcacgtggtccggcattacaaggtgaagcgggagggccccaagtacgtgatcgatgtggaacagccgttctcttgcacctccctggacgccgtggtcaactatttcgtgtcgcataccaaaaaggcgctggtgccattcctgttagacgaggactacgagaaggtgctaggctacgtggaagccgataaggagaatggcgagaatgtgtgggtggcgccctccgctccgggcccaggtcctgcaccctgcacaggtggccccaagccgctgtcacctgcgtctagccaggacaagctgcccccactgcccccactaccgaaccaggaagagaactacgtgacccccattggagatggcccagctgttgactatgagaaccaagatgtggcttcctctagttggccagtcatcctgaagccaaagaagttgccaaagcctcctgccaagcttccaaagccacccgttggacccaagccagagaaggggtttcaccatgttgcccaggctggtctcgaactcctgacctcaagtgatccacccacctcagcctcccaaagtgctgggattaccggcgtgagccaccacacctggcctcatctgtcttctcttccagagcccaaagtctttaatggtggcttgggcaggaagctgccagtcagttcagcccagcctctcttccccacagccgggctggcagacatgacggcagagctacagaagaagctggagaagaggcgggcactggagcactgattcggacacaccagggaccagcgggctagtcccagggcatggcccagcggccagattctttttcccaggattaaaactctgaccccagg

SEQ ID NO: 1505 - DNA, 2082 bp, Homo sapiens
gttctaaaccgcccacgtcagcgcctggcgcgggcccgaacaaaccacggcatggagacggaatgatgcagactcctatccgcgagatacctgctgtaatttcgctgtggttcgtgaggacgcgtcctgggctgccctgagaagcctacgtctccccttcgaggcccgggaagacctccgaccccgctgacaatgctgggccctcagccagacctgccctgcgtgccacgttctgttctaagatcgggctgccgagctgtggcctggaagcccagtgggagtcatgaaggagggaacacgtgtggagcccttgtagggggaggggcagccctgcagagatctaagaaaaaattccggaaaaatgagcagcaacctccaaggccaggcatcggtgcaggggacaaggggtcgtagctggaggggcttaggtgaggctgccgggaagggacgatgtggttggtggagtgcacaggcagggacctcactggactttcctgtctgctcggcatggacaggcagcccaggagaaggcagcacgtggccgggtgcagggacgtaccacccccacttccccaggggagctggggtcagacgagtcccaggcactccatcctctgcagcaagtcaggttgtgatttactagggggtggtgaatataatggagagacttctggggaggaattcctggctcccgcgtggacttgcagagctcaacaggcagccacgtggctgagtgtccagcaaacatcacataaggctttgggtcctgcaggtggggctgccatgagcagcaagctcagtccagaagaacagttcctctccaggatccacttcctgcgcacttttatgtgcagtgtagctggagcagagctccccggaattccacaggcaactgagaacggagagggatgcaggccagccagggatccagcgtcttccccatcgtcactctccatggcctccgtctgcacacagtgttcgtctgcacagcttgtcagcgcgttatcatgacttctatttggcaccggcccgtctgtccactgtcctggcttgttccaagcgctgccttctccaactggggtcctggctgcagagctgtctgctccccacgttgggcaactccagccaagattcctacacccaaatgtgaccgtgttgctcacgaagaaggctcagctttgcgtgtgcccagccgtgtgcacagctcgtcccaactcctgcgggtggcacctgcctctcccacctccagtctttcccctgtgatgagcagatgaccaccgccctccagggtcagcgtttggctgtttgtgtgcctgcccacccgcctccctgtgcctgggcctgccctgtgcctgcacacaggaggggctcatggcgtttgccctacacggatgggctgtcctgggagctactggacagtcaccttggtgggaatgccagaggcatgggcattaggtccccccggccagcctccgttgccacatgggctatttttgtccatcgcgtgggacaacctagtattgggggaaaactcagtccactctaaagaagcatcggcgttttggatggacgaatgctgcttcatgcgactccatgtcaatggactattttattcaactcgggtatttatgagtgtctcctctgtgccagccacgtgtgaaagaagaactccaagttactggacaccaggacaaaccaggagtctcgctgtgtcacccaggctggagtgcagtggtgtgatcttggcttactgcaacctctgcctcccaggttcaagtgattctcctgcctcagcctcccaagtacctgggactacagatctttagataagcactctttcaaccaaatgccaatcagaaaatctttgaatccacctgtgagctggaagccccgctgtgctttgtgttgtcctgccttttcggaccaatgtaaatctcacatgtactgattgatgcgtacatctccttaaaacgtataaaatcaagctgtaacccaaccaccttgggcatgtgttctgaggacctcttgaggctgtgtcactggtcatgatccttaaccttggcaacataaacttctaaactg

SEQ ID NO: 1506 - DNA, 1941 bp, Homo sapiens
ttacaatcatggtagaaggcaaagcgttaccaaagatgtcttacatggcaggagcaagatgaaggaggagaagtgctacacacttttaaacaatcagatttcatgaaaactcattcactcactatcacaaggacagcatctaggggtggtgctaacccattcgtgagaagctgccctcatgatccaatcacctcccaccatgccctgcctccaacattggggattataattgaacatgagatgtggatggggacacagatccaaaccatatcaaagtgtgtggtttttttctttttgggattgtttgcttttctagacagggttgtctcattctgttttttcaggctggagtgcattggcgcaatcgtagctcaactgcagcctccaactcctgggctcaagcagtcctccggcctcagactatattttctttgtgattggcaggacatgtacctttgatttgccaatatattcttcaagatagggctatggctgtttgctcacatagaagtaaggaaatgagacatttataaaatgtatcagatttgtgcctgctgcctcctccccttcctcctccttaggccagcaacctgctgctcctgggcacttttcaaccagtaaaagaatattagaatgggccgggtgcagtggctcatgtcagtaatcccagcactttgggaggacaaggcaggcagatcacctgaggtcagtagtatgagaccagcctggctaacatggtggaatcctttctgtactaaaaatataaaaattacccaagcatggtggtgggtgcctgtaattccagctacttgggggactgaggcaggagaatcgcttgaacctgggagacggaggttgcagtgagccgagatcacgcactctactccagcctggcgacagagtgagactccgtctcaaagaatattggaaagtgattacctgtgttctagatgataattctgtgacgtcctggaaaagaaagttgggaaggcttaacaacatcacagtgacctcacttggtcatatgtgcaccaccttcctgtctgagaaccacctgcactattatggacttgacctttttatcaactcacttgaactggattcttaaaagttgttatgaccagtgtaagtaaaaaacaatcttcagttgtcttacatagatggcaaccctaaacatacatatatatgaaacttacatggcatcattaaattctaaccttacactgttacctgccaaagttatggcctgagaccgggcctttcattgtttaaaatggagattgacagggagtaggaaagtgtcaaagacaggctagctttaaactaagactttctcctccgtatgatcaagatggaaatgcaggtggagagggagggagtggtgttcttgctctgcgttccacaggcacctgggatcgtctcatgggtagcacaggtggtgcacagcctacatgctcaatgacactgaatgctgagggcctgcgtgggctgatgccaccccgcgaggttctcttcttctttccttttccctctctttcctctcctctcttctttcttcagttttttttttttttttttttggtggtggggggcccacctcatagttttgttctgaacgtatgtaaaaccactaacagaaatattttaaaattcaggataagggccgggggcagtggctgacgcctataatcccagcactttaggaggccacggtgcgtagatcacgaggtcaggagtttgagaccaacctgaccaacatggtgaaaccccctctgttctaaaaatacaaaaattagctgggcatggtggcgcacgcctataatcccagctactcaggaggctgaggcagaagaattgcttgaacccgggaggcggaggttgcagtgagctgagatcgtgccactgctctccagtctgggcggcagagcgagactctgtctc

SEQ ID NO: 1507 - DNA, 2546 bp, Homo sapiens
aaaagagaaactcatttcagccccagccctggggctgcctgacctgacaaagccatttacactatatgtgtcagagagagaaaaaatggcagttggaattttaacccagacggtggggccctggccaagactggtagcctacctctccaaacaactagatggagtttttaaagattggcccccgtgtttgagggccttggcagcaactgccctgctagcacaagaagtggataaactaactcttgggcaaaacctgaacataaaggcctcccatgctgtggtgactttaatgaataccaaagggcatcattggctcatgaatgctagactaactaggtaccaaaacttactctgtgaaaagccctgcataactattgaagtttgcaacaccttgaaccccgccaccttactcccggtaccagagagcccagttgaacagaactgtgtagaggtattggacacagtttattctagcaggctggacctccaagaccatacttgggcatcagtagactgggagctgtatgtggacaggagcagctttgtcaacccacaaggagagaggtgtgcgtgatatgcagtggtaaccctggacgctgtcattgaagccaaatcattgccccagggtacttcagcccagaaggccgaactcattgctttaatttgggccttagagctaagtgaaggtaagactgtaaatatttatactggctctcggtatgccttcttaaccctcgaagtgcatggggcgttatataaaggaaaagtcctgttgaactctgggggaaaagacatatatcagcaagagatcctgcagttattgaggcagtatggaagctccaaaaggtggcagtcatgcactgcaaagaacaccagtgaacttccaccttgattgcattgggcaactcctgagctgactcagaggctcgaaaatcagcatccaccccctaccgggcatcagtcacagtccccctgctccctcaggtacctgaccttgtacttacttaatctaaagaagagaaggaccttctccaggcagagggagggcaggtgatagaagaaggatggatccagttgttggatggaagaatagccatgccataactgctaggagccgcagtcgtactggctgtgcaggagaccacccacctaggtcaagatcacttgaaaagttgttgggccagtacttctacatctcgcatctgtcagcccttgccagaaatagtggtgcagcagtgtgttgcctgccggcagcgcagtgctgagcaaggtccaaccatcccacccggcatacgagcttctggagcagctccctttgaagatttccaagtagactttactgagatgcccaaatgtggaggtaacaagaaattgctagttctagtgtgtacatactctgggtgggtagaggcctatccaacacggactgagaaagctcgtgaagtaacccgtgtgcttctctgagatctcatccctaagtttgggctgcccttacgaatcagcttggacaacgggctggcatttgtggctgactcggtacagaagacagcaaaggtgattgggtgtggatcaaggattggaacatagccccgttgcggccacagtggaaaggaccccagaccgttgtcttgaccacccccacagccataaaagtagaggaaatcccagcctggatccaccacagtcacataaagcccgcagcacctgagacctgggaggggaaaccaagcccagacaacccatgcaaggtgactttgaagaagatgacaagccctgccccaatcacacccggaagctgacgggtccacgcatggccaaagcatgaggaaactcatcgtgggactcattttccttaaatttcggacttgtgcagtaaggacttcaactgaccttcctcagactgaggactgttcaagttactgagtagggcaaaaagttaaaacagtctttctgttttatagttattatgaatgtactggactctaaaagggacttgtgtgtataatgccacccagtacaaggaatgcatcccaggaagtgaccaacctgatgtgtgctataacccgttagaactacttgatctccgttggaaaacaggagagtatgtaactctaggaatcgatggaactggactggcaggaagacctgggttgtgaacatgacagtgagaactctcactagtgaatgaggttctcaaagggggaaatgaggagcgaggccatttctcttactgtctcctgtctctgaagagaaggaggaagtaaaaagttgaaaaacaacaggaatgaagtcagtggcaaggccagccagtgccactgatgaccaggcctgaggttaaaaggttaaccccccactctaaccacatctgctcttaatctatcacaaccgtttcatgtggaaccccttagagttgtaagcccttaaaagggccaggaactctggctttggcgagctcggttcttgagacatgagtctgccgaagctcccggctgttgagacgtgagtctgccgaggctcccggccaaataaagccaaatccttccttc

SEQ ID NO: 1508 - DNA, 1732 bp, Homo sapiens
agcagacctcagtcattggcaggtaggccctcaagggtcctcgtccggatttctgggtatcctgtctcaaaggccctgcgatgcagcaggaccctgagttgccctctgtgactcgtttttgcctgccactctgcgccaggtgctacgtgcagccccagtgggtgtttgactcagtgaacgccaggctccttctccccgtggcagagtacttctctggggtgcagctgcccccacacctttcaccctttgtgaccgagaaggaaggagattacgttccacctgagaagctgaagctgctggctctgcagcggggagaggacccaggtgagcgggatgggactgggctggccttgacccctgggcccacgctggctgtttcccttagctgccaaggtggaaagctccagggaacaggcagtaggagcagaaagccctttgaagtcacctgtagaataaggcttaggagaagggacatctacctcctggggtcaggtgttatttgacgttcaggatgactgagcagaagaacatgctgcattgtcatcagagtttacattggaggcgacagagctcaggactgggggtcttggaatttcctctgatggcagctgggctgtggggaggtgcaagagagggccacaattgggacatccctgaactgcccatggctaaagacggcagggtcagagaggatggggcctgggcctgttgtcaccctgccagagagacagtagattcccagggcattcagaggacattggctttctctaggaaacctgaatgagtcagaagaggaggaggaagaggacgacaacaacgaaggtgatggtgatgaagagggagaaaatgaggaggaggaggaagatgcagaggctggttcagaaaaggaggaagaggcccggctggcagccctggaagagcagaggatggaggggaaggtagggggagctgcaatgcggggcttggcctgggaagcggccctgcttggtgcctgctctggcctagaaggtcaggagccagaggactgtggaggtcgggagaacctgcccccataagcaccctccttgtgtccccagaagcccagggtgatggcaggcaccttgaagctggaggataagcagcggctggcccaggaggaggagagtgaggccaagcgcctggccattatgatgatgaagaagcgggagaagtacctgtaccagaagatcatgtttggcaagaggcgaaaaatccgagaggccaacaagctggcggagaagcggaaagcccacgatgaggcggtgaggtctgagaagaaggccaagaaggcaaggccggagtgagtgcctgcggcccctcacagggctgaggccagcccctagcagctggatgtggcagaggcaggccagaggacctaagtgtgatggaccagagtcacttctcctcctcctttctccagccagccctgacccctcatgctctctggctgggccagtgggcagccctcgcttcccttggatggagctgccctgctggtgcctggtcagagaagaggcctctgtgcccagcctgattctctgctcccaggagccagtgacatgaggtgcagaggcccacccagccccctacctactgcccccattcatcctggctttccacagccccctcccacacagttggacccgtgattctcagggtgctgtgatggggtgagggtagggggagcatttgttattaaatgactggacttttg

SEQ ID NO: 1509 - DNA, 2129 bp, Homo sapiens
aagtactgcattcaaagaaatacaaacacaaccagaaagtattataagtctatattcagcatttcaaatctgtcctgtctatcaaggaaacaccgaaggaggaggtaaattcttaatgcatagcagacatttaaaaattctctctcaccattgctgcccagtcactaccctgcatgtgaatgccagcttgtctcttgagttgtctctttcctattctcagcttccacccccaaacacatttagagcacaggtcttttctgtcacacttgccagtcttccttgcctgctcttattatgtaaatcaaattcaccactctgtcctgttttgttttcatctctgcttcactcaataccccgactccctcaggaccgtgttgcttctgccctgaatgagttcttttctcccgggctgcagggaccacagaggtcttcttcttattacttcatggactgtatgaattccacccacctggtgacatcatggcaggtggtttggagatgaactggtatcctgccctgtgttaaatgtcctcagactggagctcagaacttttgagtattttcaaaagggtcaccgtgtctccagagaaatgctcccaacagtcctaactgaagtcagcactgaactgggcaaaggactcaagaaaaaaagtttccttcctcctcgatgtgttgctcaaagcactgcgtgagaccacacggagcagtatctaagcattgagcaacactcagaagggcagcaggacaaatgcgtagctgctaatgacccctctcctgccaatgctttcctccctcagccccctctagggtcaccgaacagctgtaaatacaagctgaccaccctcaaggagctgggatggagggaggttttctccagtctccagttctgcctttgcacctctgtggcctctcaaatgctcagccagtattttgagtacacccaacctcacccaggagatatatgtcacccagaaacatgtgctctccagaaagtcttcctgacatcatcggggcagtcctcctccacctcctcctcttcccagcaattcgttctgcaaattaatgccatccaaacaatcctcgagaactatctaggaaaggacgaggaccaaattaccaagcctttggatctaatccatgtggcatcccatctgtgagctccggggagattcaaagttggccagtgctggaggccaatcatatttataccatttccatatggcaccttttgattgagacttggcaagcacatgatcggattggaggaagacagagagcaagacgttggaacaagcagcaggggtggagcctgggacacaaggtcagcacatagcaagcccttgctttggagcagaggtggccggtttccagggcagtgagtatttgaggcagtaattgtgatcttcagcttcactggtgcaagtatcacctgtgagaaagcaggcattgggtgtgattaattagtatgcttctttagcatatggggtgagggagggacaggggctaatttgagcagtcagggacaaggagtcaacatcagtgtggagtgataacgtttgtacaccaagctggtaaatagacatcctagttacatatgattctattggcattgcctacagaggagaaaaaagtgatcaagtggttgtggattttatgtttgcttacctgttttttaaaaaaaaggtgaataaggaactttataaagatgttggattccagcatgttagacattgtagtggattgaattttgatccccaaaaagatatgtcccaagtcttaacctcacagtagctgtcaatgtgagcttatatagagcctttgcaaatgtattaagttaagcatctccagacgagatcatcctggattcagtgtgggctctaaattcaatgactggtggtggtacaagagaaaggagagagagacaaacagacccagagacacacagaggggaaggccatcagaagacgaggcagctattggagttacgcagccagagccaagggatgccagaagccaacagaagctggaggagtcaaggaaggattctcccctagaaccctggaagggactgtggccctgctgacgctttctgggctccaaaactgagtgagaataaatttctgttgttt

SEQ ID NO: 1510 - DNA, 2233 bp, Homo sapiens
acctcaccatcaagaaaggccctggtccaggatgtgcaaggtgtgatgaaatcacagggctggggaaggtcagctcggggtcacaagaagcctgatgggcaggaaagagcatgaaagccccagccagcctcacctgtgcggctgggaggactcacagaaaccctctgtacccagtcatgggccaaagacaccgtcatgcaagggggtgaaggctccacactcgtcccggccccgggcgtggaagcaggacctcgagcagtctctggcagcagcctatgtgccggtcgttgtggactctaaggggcagaatccggacaagctcaggttcaatttctacacctcccagtactccaactccctgaaccccttctacactttgcagaagcctacctgtggctacctgtaccgccgggacactgaccacacccgcaagcgctttgatgtgcctcctgccaacttggtcttgtggcgctcctaggcctgagccaaacggaagcccccgacccttcaccctcacccctgtgacctcaggtccccaaggggaagggctgctcactgcaggaggagtgacctatattcgggctaagacagctgtgccatgcccacctattgacaatgataaagggaggtctctcttctcagcagcagttaaagtttgtccttcctttccctggcatctgaatgggtggctgtggggtacagtctcccctggggctgcaaggatttagtggagactcttaacaccagttctctggcatctgtgagtttgagtgtgggccatcatcttcttccttctgctctctccctctccacatttcccggtaccatctgatccatcaggcccttctttgctcaggcctgaaggactcaggcctgtgagagaggacggccccgttgtcggccaagacacctttgggcgaggagcagcgaacagggcctgtccatctcagacgtcagccccctgaaggcctgagcaatgggcaacgtgatggagggaaagtcagtggaggagctgagcagcaccgagtgccaccagtggtacaagaagttcatgactgagtgcccctctggccaactcaccctctatgagttccgccagttcttcggcctcaagaacctgagcccgtcggccagccagtacgtggaacagatgtttgagacttttgacttcaacaaggacggctacattgatttcatggagtacgtggcagcgctcagcttggtcctcaaggggaaggtggaacagaagctccgctggtacttcaagctctatgatgtagatggcaacggctgcattgaccgcgatgagctgctcaccatcatccaggccattcgcgccattaacccctgcagcgataccaccatgactgcagaggagttcaccgatacagtgttctccaagattgacgtcaacggggatggggaactctccctggaagagtttatagagggcgtccagaaggaccagatgctcctggacacactgacacgaagcctggaccttacccgcatcgtgcgcaggctccagaatggcgagcaagacgaggagggggctgacgaggccgctgaggcagccggctgagtgcaccgcccggctgcttctgcactagcgggtggggtggtatggtggtgcctgttggtggtgttcttgtcttaaccctagatagaatctaatgaactcagaggcttagctcgcctctttagggtccatggtggcagcagagaggcagaagtgggagtccagagccaggaacagtgaaggatggttcctggcccctctgagtgacagctggtggcagcactccttgctggggggcactgttcaacatccctctgccgtcgggtgaccccctagcccttctgactcctctcccagcttttcccagctttccccactgagcttctccagtccatgctcttctggacgtggactctctgaggcagaactgagcttttccaggcctcttatggaatcctgcagatccagtggctgcagcttcaatcccagtgctgcaatcacacatccattctgccctgggggaccctggagcctacttgtgcgctttgcatttcattgattgacgcctcccttcaacaagcatttactgagcgcctactatgtactaatgctagatgttagatgtacaaagaagacagttttcatcctctaggaactcataggctaatggtgagacacacagacaaacatcattataataaaatatgctaagag

SEQ ID NO: 1511 - DNA, 5069 bp, Homo sapiens
gtgcttcccgctgcggggacgttcgagcaatggcagccctgctgagatccgcgcgttggttgctgcgtgccggggcggccccgcgcctcccgctctccctgcgcctcctccctggcggcccgggccggctgcatgccgcctcctatctgcccgccgctcgcgccgggcccgtggccggaggactactgagcccagccaggctgtatgccattgctgccaaagaaaaagatattcaagaggagtccactttttcttctaggaaaatttccaatcaatttgattgggctctaatgagactagatctttctgttcgaagaactggccgcattccaaagaagcttctacaaaaagtttttaatgatacctgccgctcaggtggcctaggtggtagtcatgccttgcttctactacgtagttgtggttctctcttgcctgaactaaagcttgaagagagaacagaatttgctcataggatatgggacacacttcagaaattaggtgctgtgtatgatgtgagtcactataatgctttacttaaagtctatcttcaaaatgaatataaattctcaccaactgatttcctggcaaaaatggaggaagcaaacattcaaccaaatcgagtgacataccagagattgattgcttcttattgtaatgtaggagatattgaaggtgccagcaagattcttggatttatgaaaactaaggatctcccagttacagaggcagtattcagtgcccttgtgacagggcatgccagagctggtgatatggagaatgcagaaaacattctcacagtgatgagagatgccggaattgagcctggtccagacacatacctcgcattattgaatgcatatgctgagaagggcgacattgaccatgttaagcagactctggagaaggtggagaagtccgagcttcaccttatggaccgtgatttactgcaaattatttttagcttcagtaaagctgggtatcctcagtatgtctcagaaattttggaaaaagttacatgtgaaagaagatatattccagatgcaatgaacctcattttacttttagtcactgaaaaattggaagatgtagcgttgcaaattttactagcatgccccgtatcaaaggaagatggcccaagtgtctttggcagtttctttttacaacactgtgtgactatgaatacgcctgtggagaagctaacagactactgtaagaagttaaaggaagtccagatgcactcctttcctctgcagttcaccctccattgtgctttactcgccaataaaactgatttggcaaaagccttaatgaaggctgtgaaggaggaaggttttcctatcagacctcactatttctggccattgctagttggacgtcggaaggaaaaaaatgttcaaggtataattgaaatcctcaaaggaatgcaagaattgggagtacatcctgatcaggaaacatatacagattatgtgattccatgctttgatagtgtaaactcagcacgagccattttgcaggaaaatggatgtctgtctgatagtgatatgttttctcaagctggattgagaagtgaagcagcaaatgggaacttagactttgtattatcatttttgaaatcaaatacattgcccatctcgctgcagtctataagaagtagcctactgctaggcttcaggaggtctatgaatataaatctttggagcgagataacagaattgttgtacaaggatggacgttattgccaggagcctcgaggaccgacggaagctgttggctattttctttataacttgattgacagcatgagtgactcagaggtacaggccaaggaggagcatttgagacaatacttccatcagctggagaagatgaatgtaaaaattcctgaaaatatctacagaggcattcgtaatctcctggaaagctaccatgttcctgaattgattaaggatgctcacttgttggttgagagtaagaatttagactttcaaaaaactgtgcaacttacatcatctgaattggagtccacacttgaaacactaaaagctgaaaatcgacctataagagatgtcctaaagcaactcatattagtgctttgttcagaagagaatatgcaaaaagcccttgaattgagagcaaaatatgaatccgacatggttactggtggctatgcagctttaataaatttatgctgtcgacatgataaagtagaagatgccttgaacttgaaagaagaatttgaccgcttagattcatctgctgtccttgacaccggcaagtatgtaggccttgtaagagtattggcaaagcatggcaagctccaagatgctattaacattctgaaggagatgaaagagaaggatgttcttatcaaagatacaacagccttgtcctttttccacatgctaaatggcgcagctttaagaggtgaaattgaaacagtaaaacagttgcatgaagccatcgtgactctagggttagcagaaccatccaccaacataagtttcccattggtcactgtacacttggaaaagggcgacctatctactgctcttgaggtcgccattgactgctatgaaaagtataaagtattaccaaggattcatgatgtcttgtgtaaactggtagagaaaggcgagactgatctaattcagaaagcaatggactttgtgagccaagaacaaggtgaaatggtgatgctctatgatctcttctttgccttcctacaaacaggaaattacaaagaggccaagaagatcattgagactccagggattagagctcgatctgcaaggcttcagtggttttgtgacagatgtgttgcaaataatcaggttgaaactctggaaaaattagtggagctgacacagaagctatttgaatgtgatagagaccagatgtactacaatctgctaaaactgtataaaataaacggtgactggcaaagagctgatgcagtctggaataaaatccaagaagaaaatgttattcctcgtgaaaagacattaagattattagcagaaatccttagagagggtaaccaggaagttccgtttgacgtacctgagttgtggtatgaagatgaaaaacattccctgaattcttcgtcagcctcaaccacagaacctgatttccagaaagatatattgattgcctgccgattgaaccaaaaaaaaggggcatatgatattttcctgaatgcaaaagagcaaaacattgtgtttaatgctgaaacctacagcaatctcattaaattactgatgtcagaagattattttacacaagcaatggaagtgaaagcattcgcggagacccacatcaagggcttcacactgaacgatgctgccaacagccgcctcatcataacgcaagttaggcgggattatttgaaagaggctgtgacaacactgaaaacagtattggatcagcagcagaccccttctaggttagcagtgacccgtgtcattcaggcattggccatgaagggtgatgttgaaaacatagaagtagttcagaagatgttaaatggactcgaagactccattggactttcaaaaatggttttcatcaataacattgctttggctcaaataaagaataatgacatagatgccgcaatagaaaacattgaaaatatgcttacttcagagaataaagtcattgaaccccaatacttcggcttggcatacttattcagaaaagtaatagaggagcagttggaaccagcagttgaaaagataagcatcatggcggagagattggccaatcagtttgcaatttataaacctgtcactgattttttccttcaacttgtggatgcaggcaaggtggatgatgccagagctctcctacagagatgtggtgcaattgctgaacaaaccccgattttgttgttgttcctccttaggaattctaggaaacaaggaaaggcatcaactgtgaaatctgtgttagaattgattcctgaattaaatgaaaaggaagaagcatacaattccctcatgaaaagctatgtctcagagaaagatgtcacatctgctaaagcactgtatgaacatttgactgcaaagaatacaaaattggatgatctgtttctaaagcgttacgcatctttgctgaagtatgctggagagcctgtccctttcattgaaccccctgaaagctttgaattttatgcacagcagctaagaaaattgagggaaaactcttcttgaaataaccaggcgatactttgttttgtatatatttgtgattctgtgtctacatgttattttgaagtatatctgagggaaaaataaatgaaaattttctttatgtacttatgtatgtgtgatgcatgttcaaagtcttattgaccataactctgtgcacttggttattggacatttttggagtttttttctctgggaaaaatcgatagtgttttcttcaatgctgctgctgtgtgaagccatactttttcaggattcttcccctaattggctctttggtttccctgctctgtttcatttatttcattaaaatgttattcctttatttaagattcacttattagtctgctgtttctctgaaaaattttagagctaggtatagtgaccgtgaactttctaacgcataatattctgtgatacagccattccgtacatgtgtgaagtcctgcataactttcgaactttgttaaatgttggcactaggagtcatcagatctaggcttcatcattttccagtgagaagcagagacccaaagggcctgttacttgtgcttggtctggggactgtctgtcatgcctggaggctcttcggcacacttccccatctttcccttctgccactgtggcttcaagcacctctgttcatagggcgtctctgaaattgagtctcggtcatgacttatcccgaagtagagcaatgtgtttcctctcattgtagtttcaggactttgtcagtacaagctctgccctaggcttgttactttatactcatatcctgaaaagatgtgatttcatctatgaaggggtaaaatattggtttgtatttaattgtttgaaataaaagtgatccctatattg

SEQ ID NO: 1512 - DNA, 4048 bp, Homo sapiens
agatcaaaaaagacaaagaagggcattgcataatggtaaaggcatcaataaaacaaaaagagctaactatcctaaatatatatgccctcaatacaagagcacccagattcataaagcaagttcttagagacctacaaagacatttagacacccacacaataatagtgggagactttaatatcccactgtcaatatttgatacatcaatgagacagaaaattaacaaggatattcaggacttgaactcagctctggaccaagcagacctaatagacatctacagaactctccaccccaaatcaacagaatatacattcttctcagcaccatatctcacttattctcaaactgaccacataattggaagtaaaacactcctcagcaaatgcaaaagaatggaaatcataacagtctctcagatcacagtgcaatcaaattagaactcaggattaagaaactcactcaaaactgcacacctacatggaaactgaacaacctgctcctgaatgactactgggtaaataatgaaattaaggcagaaataaataagtttttgaaaccaatgagaacaaagacacaatttacagaatctctgggacacatttaaagcagtgtttagagggaaatttatagcactaatgcccacaggagacagcaggaaagatctaaaatagacaccctaaaatcacaaaagaactagagaagctagagcaaacaaattcaaaagatagcagaagacaagaagtaactaagatcagagcagaactgaaggaaatagagacacaaaacacccttcaaaaaatcagtgaatcaaggagctgttttttttaaaacattaacaaaacagatagagtagattaataaagaagaaaagagagaagaatcaaatagacacaataaaaaatgaagaagggaatatcaccctgatcccacagaaatacaaactaccatcagcgaatactataaacacctccatgcgaataaactagaaaatctagaagaaatggataaattcttggacacatacaccctcccaagtctagtccaggaagaagttgaatccctgaatagaccaataacaagttccgaaattgaggcagtaattaatagcctgccaacccaaaaaagccaaggaccagatggattcacagccgaattctaccagaggtacaagaggagctgataccattccttctaaaactattccaaacaatagaaaaagagggactcctccctaactcattttatgaggccagcatcatcctgataccaaaacctggcagagacacaacaaaaaaagaaaatttcagttcaatatccctgatgaacacatcgatgcaaaaatcctcaataaaatactggctaaccgaatgcagcagcacattaaaaatttatccaccatgatcaagtcagcttcatccctgggatgcaaggctggttcaacatatggaaatcaataaacgtaatccatcacataaacagaaccaatgacaaaaaccacaattatctcaatagatgcagaaaaggccttcaataaaattcaacacccttcatgctaaaaacactcaataaactaggtattgatgaaatgtagctcaaaatagtaagagctatttatgacacagccagtatcatactgaatggacaaaagctggaagcattctctttgaaaaccagagcaagacaagaatgccctctctcaccacttctattcaacatagtatgggaagtacaggctggggcaatcaggcaagagaaagaaataaagggtattcaaataggaagagaggaagtcaaattgtttctgtttacagatgacatgattgtatatttagaaaacctcatcatctcagccccaaaactccttaagctaataagcaaattcgacaaagtctcaggatacaaaatcaatatgcaaaaatcgcaagcattcctatacatcaataatcgacaatcagaaagccaaatcatgagtgaactcccattcacaattgctactaagagaataaaatacctaggaatacaacttacaagggatgtgaaggacctctttgaggagaactacgaaccactgctcaaggaaataagagagaggacacaaacaaaaaacattccactctcatggataggaataatcaatatcgtgaaaatggccacactgcccaaagtaatttatagaatcaatgctattcccatcgagctaccattgacttttttcacagaattagaaaaaaatgactttaaatttcatatggaaccaaaaaacagctcgtatagccaagacaatcctaagcaaaaaagagcaaagctagaggcatcatgctacctgacttcaaactgtactacagtgctacagtaaccaaaacagcatggtactgatatgaaaacagatatatagaccaatggaacagaactgaggcctcagaaataacaccacacatctacaaccatctgatctttgagaaacctgacaaaaataagcaatggggaaaggattccctatttaataaatggtgttgggaaaactggctagccatatgcagaaaactaaaactggaccccttccttaccccttatacaaaaattaactcaatatgaattaaagatgtaaatgtaagacctaaaaccataacaaccctagaagaaaacctagacaataccattcaggacataggcatgggcaaagactttatgactaaaacaccaaaagcaattgcaacaaatgccaaaattgacaaatgggatctaagtagactaaagagcttctgcacagcaaaagaaactattatcagagtgaacaggcaagctacagaatgggagaaaatttttgcaatctatccatctggcaaagggctaacatccagaatctacaaggaacatgaacaaatgtacaagaaaaaaacaagcaaccccatcaaaaagtgggcgaaggatatgagcagacacttttcaaaagaagacatttatgcagccaacaaacaaatgaaaaacagctcatcatcactggtcatttgagaaatgcaaatcaaagccacagtgagataccatctcaggccagttagaatggtgatcattaaaaagtcaggaaacaacagatactggagaggatgtggagaaataggaatgcttttacactgttggtgggagtgtaaattacttcaaccattgtggaagacagtgcagtggttcctcaaggatctagaactagaaataccatttgacccagcaatcccattactgggtatataccgaaaggattataatcattttgctataaagacacatgcacatgtatgtttattgcagcagtattcacaatagcaaagacttgaaaccaccccaaatgcccatcaatgataggatagataaagaaaatgtggcacatatacaccatggaatactatgcagccataaaaaagaatgagtttatgtcctttccagggacatggatgaagctgaaaccatcattctcagcaaactaacacaagaacaaaaaaataaacaccacatattctcacttataagtgggagttgaacaacgaggacatatgggcacagggaggagaacatcacacaccaaggcctgttgggtggtgggggacaagaggagagacagcattaggagaaatacctaatgtagatgttgggttgatgggtgcagcaaatgaccatggcacatgtataactgtgtaacaaacctgcaggttctgcacatgtatcccagaacttaaagtataatttaaaaaatcaattttttaaataattccatgtatatgacatactcagaataggcaaatctatagagacagaaagtagattaaagacagaacatttcttatgatttgggggatggtggaaagatagggaaaatggaggttattacatgaaaggcatggagtcttttttgagatgataaaaatgttcaaaatgactgtggttatgattgcacatatctacagacaaatatctgcaaatattgaattgtacattttaaatgtgtaaattgtatggtgtatgaagtacatctcaataaagttgtttaaaaacc

SEQ ID NO: 1513 - DNA, 4660 bp, Homo sapiens
attcgctgcggtgctaggactggataaggggaagtccccggggcctggcgagagccctgagatcagctctaggctagggagctcggcagaaacccgtgggggagagagggcaccccaggagctctggagccttaggaccatggacgctctcaataggaaccaaataggccctggatgccagacccagaccatggtgcagaaaggacccttggacctgatcgagacaggcaaagggctgaaagtgcaaacggacaaaccccacctggtgagcctgggcagtgggcgactcagcacagccatcaccctcctgccgctggaggaagggaggacggtgattggctctgcagccagagacatctcactacagggcccaggcctggctccagagcactgctacatcgagaacctgcggggcaccctcaccctctacccctgtggcaatgcctgcactattgatgggctccctgtccggcagcctacccggctcactcaggtagagacgggacttcaccacattggccaggctggtctccaactcccgacctcaggctgcatgttgtgcctgggtcagtccaccttccttcgctttaaccacccggctgaagccaagtggatgaaaagcatgattccagcagggggccgagcccctgggcccccctacagccctgttcctgcagaatcagaaagtctggtaaatgggaaccacaccccacagactgcaacacggggaccctctgcctgtgccagccacagttccctggtgagctctattgagaaggacctgcaagagatcatggactcactggtgctagaggagcctggagctgctggcaagaagcctgccgcaacctctccactgtcaccgatggctaatggtgggcgctacctgctgtctcccccaaccagccccggcgccatgtctgtgggctccagctatgagaacacctctccagccttctctccactctcttcaccagccagcagtggaagctgtgccagtcactcacccagtgggcaagagccaggaccttctgtgcccccgctggtacctgcccgttcctccagctaccatctggccctacagcccccacagtcccgcccaagtggtgctcgctccgagagtcctcggctgagcaggaaagggggccatgagaggcctcccagccctggcctccggggtctgctgacagacagccctgcagctactgtcttggcggagcagcgaggagcctggcgttgccacccaacgcctatgggagagtatggagcgctcagatgaggaaaatctcaaggaggagtgcagcagcactgagagcacccagcaggagcacgaagatgcacctagcaccaagctccagggagaggtgctagccctggaagaagagcgggctcaggtgctggggcacgtggagcagctcaaggtccgtgtgaaggagctagagcagcagctgcaggagtcagcccgagaggccgaaatggagcgggcactgctgcagggagagagggaggcagagcgggcactgctgcagaaggagcagaaggcagtggatcagctgcaggagaagctggtggccttggagacaggcatccagaaggagagggacaaggagagggcggagctggccgcgggacggaggcacctggaggcccgccaggcgctctacgccgagctccagacgcagctcgataactgccccgagtcagtgcgggaacagttacaggagcagctgagaagggaggcagaggccctggagactgagacaaagctctttgaggacttggagttccagcagttggagcgggagagccgcgtggaggaggagcgcgagctggccggccaggggctgctccggagcaaggctgagctgctccgcagcatcgccaagaggaaggagcgcctggccatcctggacagtcaggctgggcagatccgggctcaggccgtgcaggaatcagaacgcctggcccgggacaagaatgcctccttacagctgctgcaaaaggagaaggagaagctgactgtgctggaaaggagataccactcactcacagggggcaggcctttcccgaagaccacatcgaccctcaaagagatggagaagctgctgctccctgctgtagacttagagcagtggtaccaggagctgatggccgggctggggactggccccgctgcagcctcccctcactcttctcccccgcctctgcccgccaaagcttcccgtcagctgcaggtttaccgctccaagatggatggcgaggccaccagcccccttccccggacccgcagcggccccctcccctcctcctctggctcttcctcctcctcctcccagctcagcgtggctaccctggggcgtagcccctccccaaagagcgctctactcacccagaatggcacgggcagccttcctcgcaacctggcagccacactgcaggacatcgagaccaagcgccaactagctctgcagcagaagggacaacaagtgattgaagagcagcggcggcgactggctgagctgaagcagaaagcggcagctgaggcacagtgccagtgggatgcccttcacggggcagcacccttcccagcgggcccctcgggcttcccccctctcatgcaccactctatcctacaccacctgcctgcggggcgggagcgtggggaggagggtgagcacgcctatgatacgctgagtctggagagctctgacagcatggagaccagcatctccaccgggggcaactcggcctgctcccctgacaacatgtccagcgtgagtggtctggacatggggaagatcgaggagatggagaagatgctgaaagaggctcatgcagagaagaaccggctcatggagtcgagggagcgggagatggagctgcggcggcaggccctggaggaggagcggcggaggcgtgagcaggtagaacggaggctgcagagtgagagtgcccggaggcagcagctggtcgagaaggaggtcaagatgcgggagaaacaattttcccaggcacgacccctgacccgctacctgccaatccggaaggaggactttgacctgaagacacatattgagtcatcgggccatggtgttgatacctgcctgcacgtggtgctcagcagcaaggtctgccgtggctacttggtcaagatgggcggcaagattaaatcatggaagaagcgctggtttgtcttcgaccggctcaagcgcaccctttcctattatgtggacaagcatgagacgaagctgaagggagtcatctatttccaggccattgaggaagtgtactacgaccacctgcgcagtgcagccaagagcccgaacccagccctcaccttctgcgtaaagacccatgaccggctgtactacatggtggccccatctgcagaggccatgcgtatctggatggatgtcattgtcacaggggctgagggctacactcagttcatgaactaactgccgtgggcctcctggcagagcacaactggggcttttgtataagaagactttaatattctgtaaggagcttggtcctgtgagtttctgggctctggcctcctgaagaaccagccagaagaagaaaagtagaggtggctttgctgcctcctgggagcccagaacttgcagtaaccctttagggtcctgccccaggcccagccagggctgaggagctgtcacagagagggcctcagctctgacctgacacctgctctccccagcctgttttctcttttctaaaagacaaattatggtaccataagctgccaaagatcccctcctgcctcagacccctttgccaggggctttgggggctgagcagagccacatccagagtggggtaatagctcaggcggcccgcttcccatttctcaaaccccgctctgccccattgttctcctttcccttatactttttattaccttgctcaagggccagagatctcaagtgtcaaccttgaggtcccagctccatcccctagttgcagactcatcaccatggttaccatagtgactgcttcattgccatggttacatactaattgctgcagctctgtggcccagcccactgcttcagctgtgggccatctgagggtacgtgccatcatctctccagcccaggcccctgggcatctcatgctggggggaagggactgaatacctttttccttccccctgcctgtgtcttcagccctgatgcacaggctgccagccccccagtccagccctctcccttccactggtgccttgcttagagccagaagggatgaagccgggggatctatggaacagaggaggagcgatgcagttgggagaggaagctagaagggttatggttggagttctgtacagtgttgagtttccgacagggaaagaggattcctccaatgctcctagagagaaagcctgagcaggagatgatgcagcagaggggaagggccctgtggtgccgccgcccttccttcagcctccgaagggtgatggaaatggagagtggaggaccaggcctccagctgtctggcctcgcccttcacgccttaacactaagcccacctcccctgctctccttcccagcattgagcccttggttgcctgggcccaggctgggggttttcagtatttgtaagcatttcagcagaacaataaagcctttggactacg

SEQ ID NO: 1514 - DNA, 3547 bp, Homo sapiens
atactgctacaagagacattggcatgttaaatacaagtgtcccaaatgacatggatgaacagcaaaatgcgagagaaagcttagaggatcaaaacttgaaagaccaagatcatctttatgaggaggaaataggagcagtaggtggaattgactacaatgacacaaatcagaatgcccagtctgaacaaaatggttcaagtgatttattatgtgacttgaatacaagttcttatgacacttctgctctttgtaatggctttcctttggaaaatatatgtacccaggtcatagaccagaatcagaatttacatggtgattcaaaacaaagtaacttaacaaatggagactatgtggcatcatcagatggcacttcaaaaccttccagctcacttgcggtggcagcacaacttagggaaataataccatccagtgctttgcctaatggcacagttcagcatatcctcatgccagatgatgaaggtgaaggtgaattgtgttggaaaaaagtagacttaggggacgtgaagaatgtggatgtcttatctttcagtcatgctccttcattcaattttctttctaattcatgttggtctaaaccaaaggaagataaagcagtagatacatcagatttggaagttgcagaagatcctatgggcctccaaggaatagatctgatcacagcagcattgcttttttgtctaggagattctccaggagggaggggtatatctgatagccgcatggctgatatttatcacattgacgttgggactcagactttttcacttccatctgcaatattagctacaagtacaatggttggggagatagcttcagcttcagcttgtgatcatgccaatccacagctttcaaatccaagtccgtttcagacacttgggctggatttagtattggaatgtgtcgctaggtaccaacccaagcagcgttcaatgtttacctttgtgtgtggacagttatttagaaggaaagaattttcttcccactttaagaatgtgcatggtgacattcatgctggactcaatggctgaatggaacagaggtgccctttagcttactatggttgtacctattctcagcgtagattttgtccatcaatacaaggagcaaagattatacatgaccgccatttgaggtcatttggagttcagccatgtgtatctacagtattagtggagcctgctagaaactgtgtgttgggattacataatgaccatctaagtagtcttccttttgaggtcctgcagcatattgcaggctttctcgatggcttcagcttatgtcagctctcatgtgtatccaagttaatgagggatgtgtgtggcagcctgcttcagtctcgtggcatggtcatactgcagtgggggaaaaggaagtatccagaaggaaattcatcatggcagataaaagaaaaggtatggcgatttagtactgcattttgttctgttaatgaatggaaatttgctgacatcctaagcatggcagaccacttgaagaaatgcagttacaatgttgtcgagaaacgggaggaagcaatccctttgccatgtatgtgtgtgacacgagaactcactaaagaaggacgttcactacgctcagttttaaaacctgtactttaaaagttgtaatattactagcacatatatgcaagcacctagtataatttctttgtaatatgtgaaactttattaatgtattaaatattacaactagctaaatttattgtcactgtgtatataatgttttgaagtgacatctatttttataaagtactgtttagttggaaaaagttgccttaatgtttgaaatgtgtgaaatttttggaacttgctggacagggtgatttaatttttagctacataattttaagaattagtattttcagtggtgtgcatattttggttcttaaatttttgcttcttaaactaaaaaaatcctgaccaatttatttgttgttttctgtgggttgcgacccatgcaatcaaaaagcaaaattttgattgagattttttacagcataggtttttcatataaaaatattctgaatttgttaagcactgccataatatcattataatgtttttgtcttttagtgcttccctatacaattgttaatgcacaaatgatctctaatatatacttacatacgtaaaatcataaagtttggtaatgcagtttatcgttttaaaaataatccacaaagatgtttttatctcacatacttacaactcaacacacagagtgaccatgtgcagctttcttttttgttagatgccacatccgaagactcatcgcagtgtgttatatgacaggacaaagcaaaaacaaacaaaaagcaagcctgtgaatataatttaatttgaaactgctcctggtattatatatttgctagttatctaatgttttaaaagaaaatatacctcatttaggtttgaattgggcgtattgtgtaaatttcaaatattcagaatgcaaagggcttgactattaaatgtttgcctttgatgtttataaacattacaactatgttgttttaagacatttaaaaacgtgaaatttgttatctttgtaaaatgacaatcatgcagaaacctgtcttggttgacaatctctttgaaacatttccgagttaatttcccataggcttcaccaccaagaaagtaagaattgcatctttacataatgatcaaggtataatggaaaaatatacctattcttgaagtagtttattatagttttcaaattgatttataccattattaacctgatgtggtctgcttaaaaaatgaatatatcagtatttagaaataaattgcaaaggtgggaatatatacttaaataatttgtcttaagtaaattagcatttggtagtctgaaatggtgacagattacttgttaaaattgtgaaaactctgttgtgtcctctcttcctacatttgtccctgagagtactccacgattactaggttcttgattcccttatatggcaatcaggcagaggcgttccttaagcattagagagttctgaagcttaagatttgttttggttggatgaagtccttagtacagttgaaaaacagagcattaaagactaatcaattgttttgcctcaccagtcattttaaatagtagaatacttatttctcagtgcttaaaatttctttttcaactgtgagattgaataaacagtctctatttctgtggaaaaaacaacagaaaagagatattaaataccataaaatgtaactctgccttttaaagttttgctgaagaatgtgtctgtggttaggatagcacaagcattaacttttgttttatagttatgctttttaaaattcattgtttttaaatttagacttcttatttccacactggattatgagatacttaacaatttttccaccttatatttcttttacacattttgctgttctcttttttgttattgttatgccaccataccattttgttaaaatgttttctttgtgaaacatttgttcaagttctaataaaattaatgttttccctt

SEQ ID NO: 1515 - DNA, 4531 bp, Homo sapiens
tatgtgaatgtattttaaccaaagtggaatcctatgcctagagttttatattcttccttttcttcactaactgtatatcaagaatagtttcccatgacattaaatttttttatgttggagcataatttttaatgcctttggaagattctagtctataaatggtcaataatttacttcaccacttctgtattactggatctttacgtcgttggaattttttatcttacaaatgtttttacagtgtatgctagtatgcatgttgttatccatatttcaaattatttacttgatgtatatcattaggagtgagattgccgatcaaaaggcatgcatatttttgaaggctcgtgactcctatggtcagttggcccctagaaaagtgcccgtgttcagcaccggcttcagcatgagtcggggggctgagattattgtgggggctggttgcagggtctggcgagttcagtttgtattggctgttggctttgttgaagtagtcctctggaagacttacagacaaatgccctcatttccatctctttctcaggaggaggcaacatggcaagagcaggaagcccctcggagagacactcccaccgaaagttcttgcgcagtggccgccattggcaccctggaaggcagccccccaggtatctccacctccttctttaggaaggtgctgggctggcccctcaggctgccgagggacctgtgtaactggatgcagggactcctgcaagctgctggcctccatatcagggacaatgcttacaactactgctacatgtacgagctcctgagcctggggctgccactcctctgggcgttctctgaggtcctggcagccatgtacagggaatctgagggctccctcgagagcatctgcaactgggtgctcaggtgcttcccagtcaagctccgctgacatggctggctgccccaaagtgccttcacatttccagggaggcttcagatggcagtgcgtttgcagtttgctcaggctctggccaggaagcctagcattctctaagcaattagctcaaagccaaagaatttcacatgggccacctccgcctggccttatcagggtgaacatctactcacggtgctagggccagggatgatatgaaggatcttttctatagctttgtgagccatacttctgggtttacatttcaatttttttaattttaattagcccagagaaagcatttttttctatgagtgtcaatttttctaaacatgggtttgaagcttataaccagttttataaaccccttgaacactgcagtgagttatcaaagccactgcctgcaaagtggatgatttaagattttacacgcatgaaaatgagtgtgccatctcctgaccagtgccttttgacttaggtacccagatgccacttgtcagcagcaggatactttttacaacacgaagcataattattttagaagaagagagtagaagggcagaatagaattcaacttacagaagcacggagtagtgtgtggttggctgttatctgtccccctgggaggaggactgttttgctcccttgttttgatgttaaacagtagcttaaaggctttcccccccataccaactcacagccaaatgacaaagaaccgtggggtttcaacagattctacaaacatgcattttcccttcccactaatgggcactgcagggaaagcccattggcatttgaccatggagctgatgcagtgccaaagatgagctctttcaactgatggcattttagcccctgtggctcccagcggatcccccagcccgggctgcaggctgagccaaggctgtgcagggtccatattggtcaggccaagtggagtggaagactctgtccacttatgtggtgtcctttgggactgagggggtttgttagcacatcaggctattgctgggaagcgtggcctgcccagtgagcattgcctgtggacatcctgactgcttagctgctccgctgccacacatatgtggtcaaaacagaaaccaatttcacactgccctgggaaaggaatgggtctgacctccaggggaagctctaccatatcttgactggcagggaaggctgggagtggaagctatttatggactgatccaaaggacatatgcatgagtaagggtaaaaatgagcatgcaggtccacctgtgttcttactctgggtatctagaagagtcctcagctctccctactccacgctgcctagacatacacagctgcagggtctggctgaacaatcaaggggccgccagagaaaggccatctacggtgcgcagtgtatctggagttgctgggcccaagatagctctgtggagttatcactagagatgcctctggattaactaagaggtgtgcctgggtgtgggtgaggagtcagaacctttgagagctttgagatgacagtttctatggggcgggaagaaggaggtgcatttctacaaacacttccctgaaatccttgggaaaaacagaggcatggccgtggccaactctgtgggaactggcgcctctgtccttgttggcactgttctcagtccgatgacttgcattgtgttttctccaatttttgctgggattttaatgttcagcatggtgggaggaacccttgattccttttgtttgagtatagaaagtaaatttttgaggtcatgatgtgaacggccatgttattgtgattatcttcagctcaggataggctgagatgctttgtggagtgttccatgaagcccgagtcggaatctctgactgtcgtgtacagccataaggagactggtttgaattactgtggcgagacagggcgtgcctgtcagaaatctgagatgtttgtacgctctgagatgttgaacctttctggtgggcagcaccgacacccaggggtggacccccgaggatgaatgcctctaggcctccgcaacatattcaagaatgaatgggagacgctagagtaaaatgggggcagagaggatatccgggagcaagatgcaaactgtgtgcatccactctcgtaaacaagtagctggtcacaaccagaaaggttcatctctcctaagcaaacagcgactctttcagaggaagtttccctctttcaatcgtggccttattttcaactccggtgccttctcgtgatgttaatcatttccttttttccccacactaagctctcttttctatctttctctctctttccaatcttacgccatggccatcagttcatttcagccttccagtgctacacccacttcttggctgacacacttctgctctaaggtgactggttttcttgccaattttcaaagagtggtactaacccccaacccgctttccgcaccccgtcctctccgccagcagtactggttgcactaactgtgagtgtcttgcatactgatggactcatttggtggcatggttggctaacagcatggcggggggtgttcagcttgagacccatgcctgtgttcatttcccatggagctggcagcctggtctaccccaagtgcatgccccgcctctcctctctcccttgggtctgcctgcgtgcatgcttctccagttgcgtctgcgaagctacctactttcttgggagggtcgaccttgatcatgaaacaataccatgagggggcctctgtcacctttgaaaagaacactttttgagcagcctcaaaaagctcatacataccagcgccttcttaaattggctctaatgtaaagattgttaatgtcatttatcaaaaccataggtgattatttggagggatttaaaaaacttaattactctcaggcctcatcccaagcttgacacatgctctgtaggttgaacacataatcacaaatattctagcaaatgctgccttggttgcagcctgcactgtagacccaagggttttgctgtggctcttcttatctcccttggctcataaagccccagatgatgccagagcttcaattagagccatcatcatcccaggcagggatatctttgagaaatgactcagttcagccccaggcccctgtgactctgcttaaagcacacatttctgctgactcttgtacctggggcagcaggataatcaccaacacactcttaacgagaaacaacacaccaagcacagtggagctgtcctaggcaacactcgcggtctcaggctgcggtgggcgtctgtcctgcatgtggcccagaccaccctgacccccgggcctgcctgcctggccctgcatgctgcacgctcactgtatttgtgcagatcctggccagtacaaagtcgttgctcttgtcttatcttctcttacagagtctccctccctttatagaatgtcaaccaaagagtgccctcctcccctctcagcctcctctttagctagcctccccatctcatcacaacgcatgtctgtgacctttggtaatcatttacagtgccacacggaaccctgtattttgcacacagcaaaacaaacaatgtttagctttatttatggtatttgatgctgtaaatggaaataaatattgttctttat

SEQ ID NO: 1516 - DNA, 3946 bp, Homo sapiens
atctgtttcccaaatcagagttggtggacagagcaacgacaatccagctggagcgatggttcagggtatgtgttcacccagccctttcgggacgtcgcgtgcctgcactgtgggaacgcaagtggacagccggtccctgccgtgggcgctaggggccagtgctcagcgcgggaatattcccaccgccacgtgcgcgcggacagcgggtactctgaggaggggcctgcagcccggctggggctgggaagacttcctggacgaggggcagcccgggttttcctcaaggatgagctggagtcggcccccggcgcaggagcaaggtgccgggagagggccgagctgggtgagaggcctgggccagccaacagcggccttcgagcagggaccgcgcagctccgtgtccccgcagtgggagggcggcgggcaggggccgggcgagttaggccgcaagcatctgctggggccgtcgcagcaccatcccacagaccgccactgaatcaacagcagccagttctccctgggctctggaggccggaagtccaagagcaagcatcgggatgggtccctccttggcctgcaggtggcggccttctggctgcgtcctcccagggccttccttctgggcagcacacctggctgctctgtgtcctgatcccctcttctgaggacaccaggcagattggattggggccagataccttccaagaggcagtcctggacaaaggcagcaggatatgccgggctggcagaggcaagggatcagtggacaaccaaatggccttcaaaccaacagaggatgggtaaatttggatgcatggatttgggggctttatgaatttagacattttaaaatatgtattaataagtaacagaaacttacttctttaggcacaatattagaaatattggaagtatattagaagttattaaaccaactggagatctttttagccaatgttttaaacacatttatgactagagcaaaaacttactttcaaaatattgtgatagttgtatgtcgacataacttaggaaaattgcacacatttttatcttatgtagtttaaaactattcttctgtgaagaggtgcataagtttcacccgattgccaaagagtccatggctcaaaaaaggttaagaatccctgtttaaccaaagccacggatgagatgaggtggagtccaaggagaggaaactaaagactcattttaccctctagtaataagacgtttgggggctaggacttcagaaaagttcaactgctctggagcaactggaaagttcagggcttcaaaatataatacaggtaaagaaaagcaaagtattggtattcttctgatgacaaatgttctttgattttcatcatccttctgaacacaagtcacaagtttgaaaacctgtataatgctgatcatctcaagtaccctcttccttcaatcttgggtgtgtttatttgaaacctaacaatgtgtgcaaaaccaggagaaggctggggagtgagggattttgccaaagtcacacaagtgtgtgtgctgtttttgctccaagctgattagatgcttctattgttatgtatcaagacatctcagggtgtggttgccctaaaggagacagtgaggcaagaaggtgacggcatttgtagttaccagccaccctcctgctcttttaggatgtttgtgtatacacaccctaatgccagcacatgaggatgtggagaccaggcccaggaggaatccatcctcacaaacactgaagaacccagttatccgtgtgctgatccacacgctgccggcaaagcctgtagctggcaggcatcatgccacatttctctcccaaagcaaccctataaacgtaatccttgaacagggccttctcatttccagcagctctttcataattttgtgctttctactttttgaaatgttgtcttggctcatcccacttgaacctacagccgtcagcttctttaataggggtgtctataaagaactgccctaaaatatgcttttccagtgcacttaatgtctttccaattacatccagatgtgaaaagctgaaggaacagttctcaggactggacaagatgacataaatcttgcagctgacagagatcccactgagctcagttggggaaactcacagagaacttgtttggggccagaaaagcggctgggtataaagacagatgtgtacactcggattcaaaaaaatatgttaagagagagaaagcattcctctaacacagtgcctacaaatacggctgaggcatgaagcaggctgggctacccaccccccgcaactagatcaaaggaggtgattgaaaaggctttggagagagcagaccaactcagcgatgcttcctggtctccttaattgctcttctcagggtgaggaaggtgggcactcctgacagaccttgctggaggagaacaagggctgtttgtgcagctgaggacttggcttttatttttttaatgattaggttttgtacactttccagaatgttccttttaaaaatagtatattcttccttctcttctccagatgctaggaagtgcaggttcaacccaaaccgtgtctatttcaaagggacacaaaaacccagagctggagttaaaggagcttggcggcatgctgcccaaggactgaaggctttggttttcttttaccttcccaagtaattttgtttttgaaggttggaaaacaaattccacagaaggatcagcttctgcaggatacagcctggagcaaggcagagcaaggagctgggtgcagggctgagccaggaccagggcagacatggtctctcagacaggtgccgccctagacagacagctcctgatgcatccaggggctcgctttctagtatttcaggttcccaggggaggaactgagggttttcttttttctctcaagaggctccctccaattatccactgcctcttctctaactcttctctctctctctccctatcatgacacccggctctgtgacagaggacagaggggcttcgctgcacacttgctctgaggaggctcaaagggcccatttgcagcacctggtcagggccactcttgcaaacctcgcctgggcccagcccacccagtgctggagaagccctgtcctccttggctgagaccttttgcttttcctgccatgcatcccacggaaggcctgatgatggtgcatttcattgacaattttatgaccctggccatttccccctgtaacaatatctttaaaatggctccttgtcttcaggtgggtgagagcagggctgtgctcttccctctccttcctgtcactaaacgtctgtgccttaagcaataacactgaagtagtagaatgtgagttctggatcacagaactgcacacataactttgaccacttttgtttccatcctgagataaaagccaaaacgtattttttaaatttatgttttacatcttttagttgggcattgcttttctgagtgaattctaagtattgtaaagatgtcttcgaagacagacaacctcgactctaaagaaattaatgcaaattacagtgtatctcagtgacatgctaatttatagcaccgtaaaggtacagttcaaagctccaacgagccagaagaaagtcggtggattgatggtttgcagtaagaaaggtttagaaacaataaaatgtaactaggattttagtttggaaatgaactaggggtccatttgttccacgttactgagtttttaatttagatctgctgttaaaacctaatgcattttgtatttgtggctagtaaatgactctgactcggtgtcttcaaggagacattgaaaaagaacaggaacaattctcaaagataagacttgtagctgcaggtttcttaacaaaaaatataatctctagatctcacctctaaaatgtgattacaaagcagaaaagtaaaatgaaacaaagaaac

SEQ ID NO: 1517 - DNA, 3829 bp, Homo sapiens
tcaacaacacattaaagttggggtgcagtgtcccaggttcactcaacccttcccgttttcttgtctgtgtgtgtctactttgctctgttccctggtggcagcggcggtggcaatgttggtgcatgggcctcctaggacaaggggaaagtgagtatgcccttttcttgcttcctgccaggcatctgcagcctggcgcaagctctggccaggtcttcaagcaaggtacctggagatgttcttttccaatttctggattggtaacttgaggcaaattctgggcactagagtcaggactaagatgagacttgaatcaggggagtctggggtcctgagaggcagaggcctgaaaccatctagagcatgtggggagctgggtgtgtgttcaggccagttgcctttctctgtgcttcaatgttccaggtacccttggagggactgagatcctagggattgctggagcctggctgcatggcctggccaccctgatgcccttgcgttctccgtgacaggacagcaaggctgaggagaatggctcccacagcttcatgcactccatggacccacagctggagcggcaaatggaaaccacccagaacctggtggactcctacatggccattgtcaacaagaccgtgtggaacctcatggttggtgcgaagcccaagaccatcatgcacatcatgatctacaatgtgcatgcaccgcctcatggggaccaaggagttcatcttctcggagctgctgtccaacctgcgctcgcgtgggaacgagaagacactcatggaggagtcggcagagcaggcacagcggcgcgacgagatgctgcttctcagagctgctgtccaacctgcactcgcgtgggaaccagaagacactcgtggaggagtcggcagagcaggcacagcggcgcgacgagactcgcgtgggaagaaatagacactcctggaggagtcggcagagcaggcacagcggcgcgacgagactcgcgtgggaacgagaagacactcctggaggcgtcggcagagcaggcagaccaaggagttcatcttctcggagctgctgtccaacctgcactcgcgtagggacaagaagacactcctgcaggagtcggcggagcaggcagaccgaggagttcatcttctcagagctgctgtccaacctgcactcgcgtgggaacgagaagacactcctggaggagtcggcggagcaggcacagcggcgcgacgagactcgcgtgggaagaaatagacactcctggaggagtcggcggagcaggcagaccaaggagttcatcttctcagagctgctgtccaacctgcactcgcgtgggaacgagaagacactcgtggaggagtcggcagagcaggcacagcggcgcgacgagactcgcgtgggaagaaatagacactcctggaggagtcggcagagcaggcagaccaaggagttcatctcggagctgctgtccaacctgcactcacgtagggacaagaagacactcctggaggagtcggcggagcaggcatagcggcgcgacgagatgctgcacatgcaccacgtgctgaaagaggctctcagcatcatcggcgacatcaacacgaacaccgtcagcacagctacgggggcccgtggacgacgcctagctgcagaaattcaaatttattcagctgaactagcattttgaaattccatgtttctgatgaactctaaccttccttctaagcaaatcgaaagctgcattatactgaatgaggaagagcacaaatacttggctcaatgaggtatcgcaaaagactgtatgcactttgaagaaagacaaccaagcccagcaaaagaatggcatacgggagttgctgcacaagcctgggtgctccacgctgtcagtgtggctcacctcacaaagatctttggagagaaggaggtggggatcctagtgcagtgagagcctcccctgcccctgcctgcccaccctgcctgaggactctactcaccaccatgcttgtcagcacccacaagctcctggggggctggggctcctggaccaggctcatcagcaagcttcagggcagtggccgggaatttgctgtgtccctcgttgtagtcaccacaagccgcaacatcttctccagcagctccagcagcttcacctggagggaggggtgctcagctgttatgcatctaccggcgcccaccctcacgcccacccccacccctgcagagatgttgcacaccctaccttcatctcctccatgtcctgggccagcctgatgatgtcctcctccagttgccgcatctttggcactgccccctggctgtgttctagggtgatgaactttcctgcaggaggacagggctcagacgctgaggtccctccgacggccctgcagctccccctgccgtgccctggcctcccactaactgatgacttctgtctttccagtactggatgaatcgaagttctagtttctccgctcgctccctcaggtccaccttctcctccaggaggtccataaggccactctggagccaaaataatggggtcacatctcggcagcaacacccacccctgcccttcttggcccatgccaggactcagtcacctccagcttctccatgacctcctgcatggcccggtgggtctccccactcacagactggcccctagtcactggggctgggaccgctgcctctggcttctgctgggccgaggccaccaggtgagccatgcgctggcagcacaccctctgctctttcacctgctctcataaccgtgcctgctcctcctgggcattggctccagcggagttgaaaaatgcaacctgagggcaagaggtgagcattcttgtaggggcatacacagaacgaacggggcagggaggtggagtgcagcctcttcccttggggcctcagagagtgcatctgttggtcacaggtgaaatggtgtctgaccactggctcctggaagggatgagggtccagagaaatcagaaggcagggaaaccaagagcataaaggggtcttggagggaccacagaggaaggtggcaaaatgggtacagggggagtcaggctcaccgtggcctcccagctctccaggtcctccgggttgcttggcatgggccgaggtgcctcctcctcactgtgtaacactgagccagccactacccagagagcagctgctgttctttatttttacttttaagaaccaagatcaggcatagtcccactaccagtcgatgtgggagttctgacccgctccctttctgacctgggccagttcagccatccttaggcaacttggtggccccccgctcccaggaggacatcatattgatgccaaacttagtgcgggcacccggtcggcatagggaccagctgttctaaaggtctcttccaacctttgcctttttctttgctgcggccaatttgctctgttgagtttcttctgccattgcggggtggggagggaggcggggttggggccacgtgagcaaaatcccagtgagcactgatgaacacctccacttgcctaccaggcagctgtgtgactgagcccgaggaggcataactagggcccccatagaatgcagaacaggggcgtggccttaatgctccaagcccattggtcaatgacaaagatgagagggaaagggggtgtggccaggcagcagtatgtccagagggacctgtggctcacaaggaaagctgtccatgcaactgctgtccccgcctactctgaggggaggggccgccccctctgggaaaggggaggggccggcttttgctttaaaagctttaaaactttaaaaaatatatgtgtgtatactttatgt

SEQ ID NO: 1518 - DNA, 4281 bp, Homo sapiens
ccagtaaaaacttctgttataatccctttagtcctctttttttcagtttttatgaagaacagtttgtcagcatcttcatttatgcaggacaatgtaatttgacccagtctccatcgaaggcaagagattataagaaggaaggagataaaaatgatgcaagttgttttgaacttccttatgtgctagataatatggataacatgaaagatgccacatacattattccgtagtaaataggcattatcttaagtagtcattgtttttaagtaacctaccaggtcacatatctaagccccgtttttcactgattgacttaattctgtttttcctcgtaagatcttttacatgttgtaaaggtttgtttttttggttattgttttttaaatagccccacatggttatccatttatattatgattttgtaattcaggtttagtttatggttgtcctttatcacttgtttttgtcatgcttgtgtctgtgctcatcttgtatgtggtggcagaacgcaacagttgtcccttttgaattttacttttgttttgtaaaaacctaaaatgcaaagttcctttgttatgctttcttaattgtgttgacataaggttgtgggttttgttttcaagatttccttgatagctgccgtgccagtactctattggctgagctcgatgatgatgaggacttacctgagccagatgaagaagatgatgagaatgaagatgacaatcaggaggaccaagaatacgaggagattctgagacgcccatccctgcaacgtcgagctggctcccgctctgatgtaacgcatcatgctgttacctcgcagctaccacaggtacctgctggagcagggagccgacctattggggagcaggaagaagaagagtacgaaactaaaggaggacgccggagaacatgggatgatgattatgtgctaaagagacagttttctgcattggttcctgcttttgatcctagacctggtcgtactaatgtccagcagacaactgatctagaaataccacccccagggacccctcattcagagctcttggaagaagtcgaatgtactccgtcacctcgattagctctcactttgaaagtaacaggtcttggaacgactcgtgaagttgaattaccactcaccaatttcagatcaaccatcttttactatgtacaaaaattgcttcaattgtcctgtaatggcaatgtgaaatcagataaacttaggcgtatttgggagcccacatacacaatcatgtacagagaaatgaaggattctgataaagaaaaggaaaatggaaaaatgggttgctggtctatagagcatgtggagcagtaccttggcactgatgaattaccaaagaatgacttgataacctacctgcagaagaatgcagacgctgctttcctgcgccactggaaattaactggcactaataaaagtattaggaaaaacagaaattgttctcagctcatagctgcatataaggatttttgtgagcatggaacaaagtctgggttaaaccagggggccatttctactcttcaaagtagtgatattcttaatttaacaaaagaacaacctcaggccaaagcaggcaatggacagaactcttgtggagtagaagatgtccttcagcttctgcgtattctatatatagttgcaagtgacccttattcaagaatatcccaggaagatggtgatgaacagcctcagtttacttttccaccagatgaattcactagcaaaaaaattacaacaaaaatattacagcagattgaggaaccattggcactggcaagtggggctctgccagactggtgtgaacaattaaccagcaaatgtccttttctaataccatttgaaactagacagctttatttcacatgtacagcatttggcgcctcaagagcaatagtatggttacagaaccgacgtgaagccactgtggagcgaacgagaaccacaagcagtgttaggcgagatgaccctggagagtttcgagttggtcgtctcaagcatgaaagagtaaaagttccacgtggcgagtcactgatggaatgggctgagaatgtcatgcaaatacatgcagatcggaaatcagttcttgaggttgaatttttaggagaagaaggaactggcttgggacccacattagagttttatgctctggtggcagcagaattccagagaactgacttgggagcttggctttgtgatgataattttccagatgatgaatctcgtcacgttgatcttggaggtggattgaaacctcctggatattatgtgcagaggtcatgtggactgttcacagcaccatttccacaggatagtgatgagcttgaaaggatcacgaaactgtttcatttccttggaattttcttggccaaatgcattcaagacaatagacttgtggacttacctatttctaaacctttttttaaacttatgtgtatgggtgacattaaaagcaatatgagtaaactgatttatgagtcacgaggtgatagagacttacactgtactgaaagtcagtctgaagcttctacagaagaaggtcatgattcactctcggtaggaagccttgaagaggattcaaaatcagaatttattcttgatccccctaaaccaaaacccccagcttggtttaatggaattttgacttgggaagactttgaattagtaaacccacacagagccagatttttaaaagaaattaaagaccttgctatcaagaggcgccaaattttaagcaacaaaggtctttctgaagatgagaagaacacaaaattacaggaactagtgctgaagaatccatcaggttctgggcctccacttagcatagaggatttaggtttaaatttccagttttgcccttcctcaagaatatatggttttacagctgtggatctcaagccaagtggtgaagatgagatgataacaatggataatgcagaagaatatgtggatttgatgtttgacttttgtatgcatacgggtattcagaaacaaatggaagcctttagagatgggtttaataaagtttttccaatggagaaattaagttccttcagccatgaagaagtccaaatgattctttgtggaaaccagtcaccatcctgggcagcagaggatattatcaattacactgaacctaagctgggttatacacgtgacagccctggtttcctgaggtttgtgagggttttatgtggcatgtcttctgatgaaaggaaagcattcttgcagtttaccactggttgttcaactctacccccaggtggactggctaacctgcatcccaggctcacggttgtacgcaaggttgatgctactgatgcaagctatccatcagtcaatacatgtgtgcattaccttaagttgcctgaatattcttccgaggagatcatgagagagcgcctgctagctgctacaatggagaaaggctttcatctcaattgagctttgaagtgcaatgggagacatcagagactttaaaaatactagtgaagcctcttgtgtttgtgtgcagagaagtatatgatccaccatgctaatgacacttgcctttttttccaccattaaggctttaagaacatgtggaataagttttttagctgctaatgacaaaacaaatcctgtaactacccagccagcaagtatatagcacagaacactgtgttactttacaagggcttatgtgactggaataaggtggtcccacttgactgttccaaagagcagcttctcagatcttcagtgttcactggtaaatttctaacagtgtatttgtgtaaagtttgtcatttcatactccatacactacagttgctgtcactgatccctgttttgctggcttttaagctacttggtcaaaaatcctgcttccttaaaacatagagaattaatgagcatctcaagctttttcttttcctttttaatgatgcctgcactatcaagagtattctagtgttctctctttgtttggcatataatcatgcaccaaactttttatttctttaaggtgggagtatatttttatttcctaaatgccatactatgaagatcaaagtcttaagtgtgtttgcagctcaaaaataaagatgtattaaggggggaaaacctggtctaagtgcaaggcacacttacagcgagttttactttcggttgtattttctttgtatattataaacatttatttaacttgttgccgtttgaagtaaaaaatttccaaaatgtatgctcaacaataatcattaaaatgtttgcagcgt

SEQ ID NO: 1519 - DNA, 3612 bp, Homo sapiens
tttttcccttccggcggcctctccgggcccagaagctcctcaagtcggcctctccagacccacttgcagcctcccggtatcctctccgggcccagctcttcctcccggctgcgtctgcaggcccgactcctgcctcccaacaacctctttggactcagtgcctgctcagctcctggtggccttggtcggcccacagcttcctgaagccaagctccccaggcccagctcgggcctcatggtggcctctcctggctcagctcctgccctccgacggcgtctccaggccccaaatggcctcgggtcggtgggcttctccaggcccagcttgggcctcccggcggcctctgcaggctcaagtggtcctgaagtcagcctctccaggcccagctccggcctcccagcaagcaagctcttttggctcagctcctgcccagctcccgccggcttttgtagaccctgaactttctccagcgatgctcctcagtcccacctgcctcccggtggcctgtacaggcccaggtctggctggagaacagcctctcaggccccactcttgcctcctaggggcatctccaggcccagctctggcctcacggcggcctcccgggaccaagtccctgcctgcctcccagcagcctgtgtgcggcccagctcctccgtcacggtggcctgttcaggcccaactcatgcctctggcaccctttcgagaggcgtgagcccctgcctcacattggcctctctcacgctgagggagttcagcgtgggcccctgtctcacactggcctctctcacgctgagggaggtcagcatgagcccctgcctcacactggtctctctcacgctgagagcaatcctccctcacgctggcctgttgagacccagctcatgcctctgttggcctttccaggcccagcccctgcctgttggcggcctctagatgtccagcctctacctcaacagtgggccctccacgcccacctcttgcctggccgtggcctcttcgggccaggctcccgccttggggcagcccccgcaggcccagctcctgcctcacggccctccggaggccaagctcatgcgtcagggcagcctctcccagcctggcgtttgctcctttgcatgggctccaggccctggacttcctccagtcggcctctccaggcccagctcttcctcccggcagcctctgcaggaccagactgtcgtcaagtaggcctgtccagggacagctccttcctcccggcggcctctgtaggcccagactgtcatcaagtaggcctgtccaaggacagctcctgcctcccggtggcctctgttggcccaagtcgtcctcaagtctgcctccccaggcccagctctggcctctcggcggcctctccaggtgcaaaagttcctcgagtccgtctctccaggctcagctcctcctgtctcccagtggcctctttcagcccagcccagctcatgcctcccggtggccttcccaggccctgcttttgactttccgcggcctctgcaggccccgaacttgaccaccagtcggcctctccaggcctggcctcctgcctgttgacagccactagaggcccagcctctacctcaacagtgtgccctccaggcccacctcttgcctcgccgtggcctcctcgggccaggctcccacctcgggacggcctccgcaggcccagctcctgcctcacggaggccctctagaggccaagctcatgcgtcgtggcggcctctcccggcctggcgtttgctcctttgcatgggctccaggtcctgcactccctccagtcggcctctccaggcccagctcttcctcccggcagcctctgcaggaccagactgtcgtcaagtaggcctgtccagggacagctcctgcttcccggcggcctctgtaggcccagactgtcatcaagtaggcctgtccagggacagctcctgcctctcggtggcctctgcaggcccaaatcatcctccccaggcccagctccggcctctcggcggcctctccaggtgcaaaagtttgaatcagtatctccaggcccaggtcctcctgtctcccagtggcctcttttggcccagcccagttcatgcctcctggcggccttcccaggccccacttttgactttccgcggcctctgcagattccgaacttgacctccagtcggcctctcctggcccggcctcctgccttccgaaggcctgcacaggcccagtctctgcctcacagcggactctccacgcccagctagctctcgcctcactgcagcctcccgagtccaaagctcctgcctcttggccgcttcggcaggcccagctcccacctgccagtggcctcttctggcccatggggttcattccacacaacggcctttccaggcccattttttcccttccgactgcctctcaggacccagaacctctgggcccacttgaggagatgcagccgggaggaacagctgggcttgcagaggctgccatgcgggaggcagaggctgggcctcctgaagtcggcctctccagacccacttgcagactcccggcatcctctctgggctcagctcttcctcccggctgcgtctccaggcccgactccggcctcccaacaacctctttggactcagctcccgcccagctcccggtggccctggttggcccacaacttcctgaagccaagctccccagccccagctcaggcctcacggtggcctctccaggctcagctcctgccctctgacagcgtctccaggccccgaacggcctccagtcggtggattcctctatgcccagcttgggcctcccggcagcctctgctggcccaaatcgtcctgaagtcgccctctccaggcccagctccggcctcccggcagcctctccaggcgcaacgcgtcgtcaacgagggcccctccggggtcagctcctgcctctcatcagcctctagaggccagtctggcggcctctgcaggcccagactgcccttgagtcaggctctccagggccagctccagcctcctggcagactctgcaggcccaagtcgtcctcaagtcggcctggaagtgggcctggaagagctgcattttggcctccccgggcccagctccgtcctctcggcggcctctccaggtgcaaaacttcctcgagtcagcctctccaggtccagctcctcctgcctcccagtggcctctttcagcccagcccagctcgtggctgtaggcagccttcccaggccctgcttttgacttttggcggcctcttcaggcccagaacttgatctccagtcagcttttgcaggcccggcatcctgcctcccgaaggcctgcacgggcccggcctcggaatcacagcagactctccacgcccagctagctctcgcctcactgtggcctccccagtccaaagctcctgcctttcggccgcttcggcaggcccagctcccgcctgccagtggcctctttaggcccagctcattcctcacattggcctttccaggccccgtttttcccttccggcagcctcttggcctctaattttttttatcttttgtgtataaatcccaaaatatggaattttggaacatttccaccattatataaatattttggtaggt

SEQ ID NO: 1520 - DNA, 4129 bp, Homo sapiens
gactctgctgcttttcctgggcagggcctgcttgctccagctctcaagtctgacttgcatctacactgcgggcaagatgcggctgcaagaccgcatcgccacgttcttcttcccaaaaggcatgatgctcaccacggctgcgctgatgctcttcttcttacacctgggcatcttcatcagagacgtgcacaacttctgcatcacctaccactatgaccacatgagctttcactacacggtcgtcctgatggtaggctcagggcagggacgcaagggctggctgtgggagacccgaggggctgatggaaaccccactgttgtgcgagggggccactctcccactggatgggcctacagttctcccaggtgatcagcatctgctgggctgccatggggtcactctatgctgagatgacagaaaacaagtacgtctgcttctccgccctgaccatcctgagtgagtggcaggagtgggagggtgcaagagggagcggggagctttggaaccctgagatgtggcaaggagtagccagggaagggtactggggctcatggggggctctgtcccccgcccagtgctcaacggagccatgttcttcaaccgcctgtccttggagtttctggccatcgagtaccgggaggagcaccactgaggcctggggagtcggaacagggctaaggagggggaagcaaaaggctgcctcgggtgttttaataaagttgttgtttatttccacctgccagctccttcatggggcgaggggtcggaggctggagacccgggaggaaagcaggtcaagacaaatgcttgacccacggggactccaggcctggcctgcagccactctggtggacttggctttgggtctggggtcttagtgtcttaggcttgagggagaggggcagtgaagaggtgccctcagcctccccattaccccgcctctcctccacagaacccacatcctaggctggcctagccacaagcaagggggctcaggaggggcccacgcggatgtgagggttcatgagtgggtccaggttgggatcgctgtcagctgcggcccggcctaggcgagacatgagggcaaggagggccaggaagcccagcagtcccaagagtagcagcagccccgcccgctggagcagggtcagcggccgcttccgagacccagcccggctcctggggggatgaggggaaaatcaggtcaggccccagtccctggtggcccccgcggctggagagaagccctggtcaccacccattcctgagcctccatctcctcgtctgtgcctcagggatgatcactcctgcacctgccaccatagggcgttattgtgcagctcaaaccagctgaggcgcacgactgtattctggaaaccacagtgtgtcagacgtcggggagaattacaaagattagggggtgtcagatcgggaaggggcctcaaagagcctgagttcaaacctcctgtgtaggaggcatagagacagtcccagagagaagcaaaacacagcttctgctgcacagccaaggcctctctgcacagccccagcaccaggtactgttactccccagaacgagccccttttgtcatgaaaccatcccttccaggacctctggctcccattccctctccaccccttcctggcattccgccctgcctgaccctgtgtaccttagcagccgggccagccaacccaaggccggccgacgtcggtacttgtcatcgtcacagtctccatggaggcctggtgtccggtcatcatcccgcgtatcatacaccttcctaggggctacagggtggagccactagcatcaatagactcaggaaaactggccgctttggggagggctagggggatcacctgctctcctcagtctgacagaacatctcagaattgtgaggaggtaatggctgtgcctggattaaggaaaggttcctccgggtgggtctctggatcctcaagctccccctatacgaaccattccaccctcttcctatccttctgcggcctggataactcccaggctcaccgtgagtcaagggctcaggattgcccatgtggatcactgtgtgctgctcgggccggcctggggaagctgggggccggggggcctggctgtagaaggctggggtagcagaggcgctgtctacctcctctggtccaggggtactgctggctgtgggtggaaagagagccgtcagcagaagcagtgcatagagctcaggggtagagcatgtgactgcagaccaagggagctgtcagcagagcagggaggctaaagcccaaacagtcggtggaagccaccacttaccattaaaactagaccagtcagagaagtcagacgtgttgaggggctcgggctctgggctcaccacctcatcgatctggaggaaggaatctgggtcaccaggctgcctagtattgtccccacccacccatctgactcaggtggggcccagggcagatagatggtcagacagacgagggactctcaccagagggaggcccagtcctgcccgggcccagttgactgtggccagcttctctctcagtgcggaggccacggggccagccaggttggttggggggaagatggggccattgcagctggggcactgatagccggcaggtgccgtgtttcggggtagctgggcagcacgttcattgaggcaggcccagtgaaagagatcttagggcccatgagacaggggagaagagacatgaggaagaagacacttagggctcctagcctagcaatagtccccagaccattgcaggacatatggacacatgtgtgtgtgccagagccttctcctccccgtcctgttccctaaaatgtcagtcttcttggctaccaccatctaagtccaggcaggtgctaccaagctgtccagctcacaggggtaagtttgggtaggaagaaaacgccacctcccctttcagtcctttcaatgagtcctctctgggcctgcactcatcatattctttgggctaatggctaataatgaacagtttcagaaaaggttcctcgatacacacacaggcacacatatacatgtacacatccctgggcacaaatgtacatgtccttataagcacataatcaaacacaagtggcattccctatatctacactatgggtacaggagccctcacacatacacatctatacactcacaggtttgctaacaggcaccctcaaccatgcattctcttgcactcccacaacacacctgtgttcatatgttcacatacatacatttacccattcattcaccccaagtacagatcaacacactaacactcatttaaacacacaatgtacattaagtgcctgcaagtacacacatgcactcacaaggagaaacacatatggagctgactcttgcatgagctccttcaaaaactggagctaaggctcttaccccagattcaggtcaaagtcatgacacatatgtctgctgacttcttttagctaactttaatgtgggaaactcacttcctctctgtttagccttggaatcagtggtggatcctgaatatctgaaagcaacatgccggtctggctagctaatagtcacggccaccagcatacccgtaagcttgactggttctcgctgaaacctccagattggcagggcttaatttttaggaaagaggaactaggagctttaatttttaggaaagacagtgaggcctagaaaggaagaataacttgcctgaacttacacagcaggtaaggaactttaacaggactagaatctgggctctgagactcgggggactcactgtcctgctgcttgaggagggcctggaaaccagtcaccaagctggcccctgaggctggcctgatccccccgaggtgccaaggcctcaccatagcagacaaggcgggtcgtctctcggctggccaggggtatgttgcacaggcggcaattggggttgtagtcgctatcttggagccattgcaggtaggactggacgatgcactggagtgggagagagatgtcacaactggtgctggggctgctcggcctatcaccccaaggtccgactgtctctttttctctagccacagaggagactcatcctttcgtttgtttaatcaataaatatttattgagc

SEQ ID NO: 1521 - DNA, 3645 bp, Homo sapiens
agtttgaggccaacactaggaagtgtctggaaccggatccggaggcttcacaatctatatgttgcctccaaaggacctgcagagaaacgcctcctgattttgtcttacaatggaacttaaaaagtcgcctgacggtggatggggctgggtgattgtgtttgtctccttccttactcagtttttgtgttacggatccccactagctgttggagtcctgtacatagaatggctggatgcctttggtgaaggaaaaggaaaaacagcctgggttggatccctggcaagtggagttggcttgcttgcaagtcctgtctgcagtctctgtgtctcatcttttggagcaagacctgtcacaatcttcagtggcttcatggtggctggaggcctgatgttgagcagttttgctcccaatatctactttctgtttttttcctatggcattgttgtaggtcttggatgtggtttattatacactgcaacagtgaccattacgtgccagtattttgacgatcgccgaggcctagcgcttggcctgatttcaacaggttcaagcgttggccttttcatatatgctgctctgcagaggatgctggttgagttctatggactggatggatgcttgctgattgtgggtgctttagctttaaatatattagcctgtggcagtctgatgagacccctccaatcttctgattgtcctttgcctaaaaaaatagctccagaagatctaccagataaatactccatttacaatgaaaaaggaaagaatctggaagaaaacataaacattcttgacaagagctacagtagtgaggaaaaatgcaggatcacgttagccaatggtgactggaaacaagacagcctacttcataaaaaccccacagtgacacacacaaaagagcctgaaacgtacaaaaagaaagttgcagaacagacatatttttgcaaacagcttgccaagaggaagtggcagttatataaaaactactgtggtgaaactgtggctctttttaaaaacaaagtattttcagcccttttcattgctatcttactctttgacatcggagggtttccaccttcattacttatggaagatgtagcaagaagttcaaacgtgaaagaagaagagtttattatgccacttatttccattataggcattatgacagcagttggtaaactgcttttagggatactggctgacttcaagtggattaataccttgtatctttatgttgctaccttaatcatcatgggcctagccttgtgtgcaattccatttgccaaaagctatgtcacattggcgttgctttctgggatcctagggtttcttactggtaattggtccatctttccatatgtgaccacgaagactgtgggaattgaaaaattagcccatgcctatgggatattaatgttctttgctggacttggaaatagcctaggaccacccatcgttggttggttttatgactggacccagacctatgatattgcattttattttagtggcttctgcgtcctgctgggaggttttattctgctgctggcagccttgccctcttgggatacatgcaacaagcaactccccaagccagctccaacaactttcttgtacaaagttgcctctaatgtttagaagaatattggaagacactatttttgctattttataccatatagcaacgatattttaacagattctcaagcaaattttctagagtcaagactattttctcatagcaaaatttcacaatgactgactctgaatgaattatttttttttatatatcctattttttatgtagtgtatgcgtagcctctatctcgtatttttttctatttctcctccccacaccatcaatgggactattctgttttgctgttatacactagttcttaacattgtaaaaagtttgaccagcctcagaaggctttctctgtgtaaagaagtataatttctctgccgactccatttaatccactgcaaggcacctagagagactgctcctattttaaaagtgatgcaagcatcatgataagatatgtgtgaagcccactaggaaataaatcattctcttctctatgtttgacttgctagtaaacagaagacttcaagccagccaggaaattaaagtggcgactaaaacagccttaagaattgcagtggagcaaattggtcattttttaaaaaaatatattttaacctacagtcaccagttttcattattctatttacctcactgaagtactcgcatgttgtttggtacccactgagcaactgtttcagttcctaaggtatttgctgagatgtgggtgaactccaaatggagaagtagtcactgtagactttcttcatggttgaccactccaaccttgctcacttttgcttcttggccatccactcagctgatgtttcctgggaagtgctaattttacctgtttccaaattggaaacacatttctcaatcattccgttctggcaaatgggaaacatccatttgctttgggcacagtggggatgggctgcaagttcttgcatatcctcccagtgaagcatttatttgctactatcagattttaccactatcaaatataattcaagggcagaattaaacgtgagtgtgtgtgtgtgtgtgtgtgtgtgctatgcatgctctaagtctgcatgggatatgggaatggaaaagggcaataagaaattaatacccttatgcagttgcatttaaccttaagaaaaatgtccttgggataaactccaatgtttaatacattgattttttttctaaagaaatgggttttaaactttggtatgcatcagaattccctatagatctttttgaaaatataggtacctgggtatcacacatagaacttttaattctgctggtgtaggctgttgcccaaacatctataattttactgagctcttcaagtgattctgataacacagcctggattgagaatttttataagattggcaatggaaaaacatttattcttttaaataataatttttttaaaacccaagaggtcaggggattttataaaccaatagccaagtgttctttaaataggaggcacccttcccattgtgccaaaatcatcttttcatttattttgaaatttgtatgattattttatacttgtatgttgcctttcttcgaaggcgcctgaagcactttataaacacaaatcctcacaatacctctgtgaggtaggtaaatagtacttttctatgtagtaaacctggaatatggagaatttcataacagttcattctacttaataatgcaataatggagctccaagttgtcttggacttctacaccacactcagacttctggaaagttttctgtacctcattctttagtccctgtcaaggttagtaaataaaataagtgacataaaaaaaaaaaaactaaactacttgttgtgttgaaagttcctttttgccagttatgttcaggaaacccaataacctgaaaaagtttgactttgatgtgacatcttcatattcatcaatgctgataattgtccaaaggcatcttcactatgtctgctaaataacatccaatgtgggcgttatctgttgtctaggggatgaattttaagttacaataaaatatttttctttgttttgc

SEQ ID NO: 1522 - DNA, 3827 bp, Homo sapiens
aatgcaaggtagcgttaacgtttctgaggctgaaggagtggtgtttactataataatatgatggtgaagaatttggcccacaagaaacacttattcaagcctacaattttccctgggcaagggaaggtcaccgtgtctatgtcccagcaaattctgaagacacacatcaagctcctgcaagcttggctactgtggcagccagagaaatgacttataggggagagaaacacgtacttggaaagaattgacccagctgaattggaaaatgtgggaaggggatggggaagaggctgctccacctgagatccggctccaggacttacagcaaggggaacttggcaacatggccaatctttcctaagctgctcagcttacaagaaaaggaatcatactgctaagaattcaaacgtcagcagtcatagtccctgactccacctcttctgccacaaacatcagcatggtggtatcagccggcccttggtccagcgagaaggcagagatgaacattctagaaatcaacgagaaattgcgcccccagctggcagagaacaaacagcagttcagaaacctcaaagagaaatgttttgtaactcaactggccggcttcctggccaaccgacagaagaaatacaaatatgaagagtgcaaagacctcataaaatctatgctgaggaatgagcgacagttcaaggaggagatgcttgcagagcagctcaagcaagctgaggagcttaggcaatataaagtcctggttcactctcaggaacgagagctgacccagttaagggagaagttacgggaagggagagatgcctcccgctcattgaatcagcatctccaggccctcctcactccggatgagccagaaaagtcccaggggcaggacctccaagaacagctggctgaggggtgtagactggcacagcaccttgtccaaaagctcagcccagaaaatgataacgatgacgatgaagatgttcaagttgaggtggctgagaaagtgcagaaatcgtctgcccccagggagatgcagaaggctgaagaaaaggaagtccctgaggactcactggaggaatgtgccatcacttgttcaaatagccatggcccttatgactccaaccagccacataggaaaaccaaaatcacatttgaggaagacaaagtcgactcaactctcattggctcatcccctcatgttgaatgggaggatgctgtacacattatcccagaaaatgaaagtgatgatgaggaagaggaagaaaaagggccagtgtctcccaggaatctgcaggagtctgaagaggaggaagtcccccaagagtcctgggatgaaggttattcgactctctcaattcctcctgaaatgttggcctcgtacaagtcttacagcagcacatttcactcattagaggaacagcaagtctgcatggctgttgacataggcagatatcggtgggatcaagtgaaaaaggaggaccaagaggcaacaggtccgaggctcagcagggagctgctggatgagaaagagcctgaagtcttgcaggactcactggatagatgttattcaactccttcaggttgtcttgaactgactgactcatgccagccctacaggagtgccttttacgtattggagcaacagcgtgttggcttggctgttgacatggatgaaattgaaaagtaccaagaagtggaagaagaccaagacccatcatgccccaggctcagcagggagctgctggatgagaaagagcctgaagtcttgcaggactcactggatagatgtcattcgactccttcaggttatcttgaactgcctgacttaggccagccctacagcagtgctgtttactcattggaggaacagtaccttggcttggctcttgacatggacagaattaaaaaggaccaagaagaggaagaagaccaaggcccaccatgccccaggctcagcagggagctgctggaggtagtagagcctgaagtcttgcaggactcactggatagatgttattcaactccttccagttgtcttgaacagcctgactcctgccagccctatggaagttccttttatgcattggaggaaaaacatgttggcttttctcttgacgtgggagaaattgaaaagaaggggaaggggaagaaaagaaggggaagaagatcaaagaagaaaagaaggagaaggggaagaaaagaaggggaagaagatcaaaacccaccatgccccaggctcaacggcgtgctgatggaagtggaagagcctgaagtcttacaggactcactggatagatgttattcgactccgttaatgtactttgaactacctgactcattccagcactacagaagtgtgttttactcatttgaggaacagcacatcagcttcgccctttacgtggacaataggttttttactttgacggtgacaagtctccacctggtgttccagatgggagtcatattcccacaataagcagcccttactaagccgagaggtgtcattcctgcaggcaggacctataggcacgtgaagatttgaatgaaactatagttccatttggaagcccagacataggatgggtcagtgggcatggctctattcctattctcagagcatgtcagtgtcaacctgtgctcagtctgaagacaatggacccacgttaggtgtgacacgttcacataactgtgcagcacatgccgggagtgatcagtcagacattttaatttgaaccacgtatctctgggtagctacaaagttcctcagggatttcattttgcaggcatgtctctgagcttctatacctgctcaaggtcagtgtcatctttgtgtttagctcatccaaaggtgttaccctggtttcaatgaacctaacctcattctttgtgtcttcagtgttggcttgttttagctgatccatctgtaacacaggagggatccttggctgaggattgtatttcagaaccaccaactgctcttgacaattgttaacccgctaggctcctttggttagagaagccacagtccttcagcctccaattggtgtcagtacttaggaagaccacagctagatggacaaacagcattgggaggccttagccctgctcctctcagttccatcctgtagagaacaggagtcaggagccgctggcaggagacagcatgtcacccaggactctgccggtgcagaatatgaacaatgccatgttcttgcagaaaacgcttagcctgagtttcattctgaagttgtctgaaaatgtcttcatgattaaattcagcctaaacattttgccgggaacactgcagagacaatgctgtgagtttccaacctcagcccatctgcgggcagagaaggtctagtttgtccatcaccattatgatatcaggactggttacttggttaaggaggggtctaggagatctgtcccttttagagacaccttacttataatgaagtacttgggaaagcggttttcaagagtataaatatcctgtattctaatgatcatcctctaaacattttatcatttattaatcctccctgcctgtgtctattattatattcatatctctacgctggaaattttgcgtctcaatttttactgtgcctttgtttttactagtgtctgttgttgcaaaaagaagaaaacattctctgcctgagttttaatttttgtccgaagttaattttaatctatacaattcaaaccttttgcctatcactctggatttttggattgttttttacattcagtgttataatatttgattatgctgattggttttggtgggtactgatgcgaattaataaaaacatttcatttcc

SEQ ID NO: 1523 - DNA, 4130 bp, Homo sapiens
attggcctgtcccagtactcccaggcctttcagaaccacctggttgatgggcggatgctgaattccctgatgaagcgagacctggagaagcacctgaacgtgtccaagaagttccaccaggtcagcatcctgctggggatcgagctgctgtaccaagtgaacttcagcagggaggccctccaggagcgccgggcccgctgcgagacgcagaacattgaccccgtggtgtggaccaaccagcgggtgctcaagtgggttcgagacatcgacctgaaggagtacgcagacaacctgaccaacagcggcgtccatggtgctgtgctggtgctggagcccacattcaatgccgaggccatggccactgccctgggcatccccagtgggaagcacatcctccggagacacctggcagaggagatgagcgccgtcttccacccagccaactccacaggcatccgggaggctgagcgttttggaacgccccctggcagggcctccagcgtcacgcggacaggaaaggaggagaacagcagcggtctcaagtacaaggctggccgactgcccctggggaagataggaaggggcttcagcagcaaagatcccgatttccatgatgactatggctctcttcaaaacgaagattgcggagacgatgacccccagagcaggctggaacagtgccgtctggaaggctacaacagcctggaggtcaccaacgtgtaaggaactggtggctccaccagacccaacgtgagagacccaggaaggaagagaagccagatggccccaggtgtcgttctcactgtacatagcggccgcaggctgaggatgtcccttgctcctgggcaaaatcccgatggactctgtggtttcagctccacagcgcccaggagagagaagacaccagctcacctgtcttgggtgggccatggactttcctgttcagctggagatgggcccagaggacctgtcacagtgtccggccctgcctccatccaggatacacaggctccacctcagagtgaccgtcactgtggagcagccaagcagtccctggagccttaaacggagctgccaaggtgggaagaggcccacagttccctaaaacacccttccggcgggagcaggggggaccccaaccccacaccccagcgcccagtgcattggcagagccgggtgcaggaagtgctgcctcttgccgagacgtcggacagggcgggggttggggaactctcggctacagcatcttacccttgactgagaacttgggtcctgacttggctcactgaatctctcttgggagaatgcaaaatccttccacctgaaaagctctgtgacacatgggggtggacgtattgaagagctgtttgccgatccacccaggagtggctacgctgagtggggagccggtgaatgatccgtgcaggagtggggcttagcagccacatttctaggagatgcagatatcctatcaccagaatgaaagctattgggacaacaggatcggggatgaccgatggccccatatggtgaatctctggcctgtggtttggctttactgagattccaaaccccactatctgcactccgtgacagtggtatggagtgtggcaatgagtctggggtctggggcagggaaatgcttgacactgttaacccaacaaacctttgttgtgatgtccctgtcacctgaaacataggtgacatagctcaccaatgtcctaaccgagacacaaactccacagagcaaaatcatttggtattggtggggagaaccccagcccttttcttgacctgccactgttatgctgtgtggcttcttcccagtggcctcacctctctgtgcctcgatgtcttcatctacgatacttctggttccctcccagggacatcgtgaggattaacacttgctaatatctgtaacacaatttgtaacctctcaggagacaatgggaagttatggggtagctaatttcccatttacaacacagaaatgatatagagctagttcgctccaactctttaggttgaagcagtgtgcaaaaggaagaaaagaaatgtttaatgttcagacctgccaagagcctccaacagggctcaagaaacatataaatcccatgagcacagccttgaaaaccagtttgactcaagccttcgggcctcagttcattgaccagatgacagccacgtgatgattagggaaggacggatgcattgcgattctgcttacacatcgggttatcaaagcgagtcacttgttgggaccatgatgctcgacctccttcaaggccgtttgcactggggcttgagtttccaagattcacaacaggtgtcagcctctgagaaccctcaaagcgtgtgttcttcaacctggcaaattgtttcccctcatgggggaagccgagctctgatgaacttgagaattacacctctctcatgccgaagaccgtggtgttccccctaatgacataaacgcagcctttcttgctgtctgagaccaaatgtctagttggtagacaggtggatgtttggcctcctaagggcacacttctgatcctgggccccaggtggtgaatctctggcatgtggcttggctttgttgagactccaaattccattatcttcatgacattcggcctcatccatagggtcctgaagctgcagtccacagctcagaaaggagaggtgagacctccctccaacctggtgccacaggtctctcccaagccacatccagcctggatgacctgggaccccagaaactgccgtttgggaggcagcaacagcaacgtgcccaggcaggcagttattcccacagagtgagccagaattgtagcagggcacttgaatgcagagctgatgatttgaaaccaacgttcacccaacttgtcagaaatggcacttacatggttcgatcttgctggagacaagtggacaattgggggtcactggcagagacggtattgcccaaaatgttcacagcaggaggccagcaggcctgaggcaacacgggcaaccgcgaatgcctcttttggtttaaattatgccatcacaaccctctttcaccgatgaggctccccatccctgacagccaggtgagcatttggagctggtttctcaacatgaggatgggttggttgttaaattaacaacctccacagtatcagattgagtgagctttgtctgctggaaaaacctgaaacgtcaactctgcttcaaggtcggcaagaagaacagaaggcggagacttggcagagagactcaagctgattgtcacaggctacagaggggccagctccagaacagtgaccagctacatcctgtccaagcagcccgagtgtggtcttggtccctgcagggcgatgtgggcatctggacctggggacgatgtggatgcacttcttggaaagctgttgtagcttgtgcctgtgggtggagaaggcacctgcccggtagactctcagctttctgacccccaggagcctctgcaaggcccctttgtccttggctgagccggacctttcttttggaaatctgtctgtctgttggcatcgctgttttcagaccccaggctgcagaggaggggagaagccacacaacaatctggacccaataaagtggagagaagggcgtctctacacagcccggccagcgtggagggccccaggacagggacccaaaagcttgacgtcactgaacagggctgggtactggcagaacaggaagatttggccagaggtgacctcagtgttccctccaggggcatccaggcccctctgacctggggagaagaaggcccatgctcaggcccacctccctcttcccatcagagcccatgcgtcctgggcaccaccacttccactctgcttttcgaggctctggagggctcttcctgctgtgaaaggaaaggagaagaaagcctgtgggcaatggcaacctctgagtctggcattcttgccaatggctggccagcgaggagaatctcccgagccctgacacacaaaggcattttgtggctgcagaggaaatgggttggctctgaacaaagatgcagtttctagggccgtggccccaaatcacttccccgagagtgaattttaacactgtaacaataaatactactgcacagc

SEQ ID NO: 1524 - DNA, 4208 bp, Homo sapiens
attccagttattgttctcatagcagtgttatcttcttgacttcctccagcactgacttttcattataatccttaaacatttggtcattgtggattagagaactatgagcgtttgcagagtgattatgtgacagatgaccacgacagagagttttcagtcgcagacctctcggttcagatattcacggttccttcacttgctcgaatgctcatcacagaagaaaacttgatgagcattatcattaagacttttatggatcatttgagacatcgagatgcccagggcagatttcagtttgaacgatacactgctttacaagccttcaaatttaggagagtacagagccttattttagatctcaagtatgtgttaattagcaaaccaactgaatggtcagatgagctgaggcagaagttcctagaagggtttgatgcctttttggaattactaaaatgtatgcaggaaacatccctatatacaaaacagaatctagaagtagaaacgaacagggaatggatccaattacacgtcaagtaggacaacatattgaaatggaaccagagtgggaagcagccttcacactacaaatgaaattaacacatgtcatttcaatgatgcaggactggtgtgcttcagatgaaaaagtgttaatcgaagcttacaagaaatgtctcgctgtactgatgcagtgtcatggtggttatactgatggtgaacagccaatcacactaagcatttgtggacattcagtggaaactatcagatactgtgtttcccaagaaaaagttagcattcacctcccagtttctcgcttacttgcaggtttacatgtattattaagcaaaagtgaagtggcatataaatttccagagctcctacctctaagtgaacttagcccacccatgttgatagaacaccctcttagatgtcttgttctgtgtgcccaagtacatgccggaatgtggagaagaaatgggttctctctagtaaaccagatttattactaccataatgtgaaatgcagacgtgagatgtttgacaaggatgtagtaatgcttcagacaggtgtctccatgatggatccaaatcatttcctgatgatcatgctcagccgctttgaactttatcagattttcagtactccagactatggaaaaagatttagttctgagattacccataaggatgttgttcagcagaacaatactctaatagaagaaatgctatacctcattataatgcttgttggagagagatttagtcctggagttggacaggtaaatgctacagatgaaatcaagcgagagattatccatcagttgagtatcaagcctatggctcatagtgaattggtaaagtctttacctgaagatgagaacaaggagactggcatggagagtgtaatcgaagcagttgcccatttcaagaaacctggattaacaggacgaggcatgtatgaactgaaaccagaatgtgccaaagagttcaacttgtatttctatcacttttcaagggcagaacagtccaaggcagaagaagcgcaacggaaattgagaagacaaaatagagaagatacagcactcccacctccggtgttgcctccattctgccctctgtttgcaagcctggttaacattttgcagtcagatgtcatgttgtgcatcatgggaacaattctgcaatgggctgtggaacataatggatatgcctggtcagagtccatgctgcaaagggtgttacatttaattggcatggcactacaagaagaaaaacaacatttagagaatgtcacggaagagcatgtagtaacatttaccttcactcagaagatatcaaaacctggtgaagcgccaaaaaattctcctagcatactagctatgctggaaacactacaaaatgctccctacctagaagtccacaaagacatgattcggtggatattgaagacttttaatgctgttaaaaagatgagggagagttcacctaccagtcccgtggcagagacagaaggaaccataatggaagagcataatttcagagttcaagggacaaagacaaagctgagaggaagagaaaagcagagattgccagactgcgcagagaaaagatcatggctcagatgtctgaaatgcagcggcattttattgatgaaaacaaagaactctttcagcagacattagaactggatgcctcaacctctgctgttcttgatcatagccctgtggcttcagatatgacacttacagcactgggccccgcacaaactcaggttcctgaacaaagacaattcgttacatgtatattgtgtcaagaggagcaagaagttaaagtggaaagcagggcaatggtcttggcagcatttgttcagagatcaactgtattatcaaaaaacagaagtaaatttattcaagatccagaaaaatatgatccattattcatgcaccctgatctgtcttgtggaacacacactagtagctgtgggcacattatgcatgcccattgttggcaaaggtattttgattccgttcaagctaaagaacagcgaaggcaacagagattacgcttacatacgagctatgatgtagaaaacggagaattcctttgccccctttgtgaatgcttgagtaatactgttattcctctgctgcttcctccaagaaatatttttaacaacaggttaaatttttcagaccaaccaaatctgactcagtggattagaacaatatctcagcaaataaaagcattacagcttcttaggaaagaagaaagtactcctaataatgcctctacaaagaattcagaaaatgtggatgaattacagctccctgaagggttcaggcctgattttcgtcctaagatcccttattctgagagcataaaagaaatgctaacgacatttggaactgctacctacaaggtgggactaaaggttcatcccaatgaagaggatcctcgtgttcccataatgtgttggggtagctgcgcgtacaccatccaaagcatagaaagaattttgagtgatgaagataaaccattgtttggtcctttaccttgcagactggatgactgtcttaggtcattgacgagatttgccgcagcacactggacagtggcatcagtttcagtggtgcaaggacatttttgtaaactttttgcatcactggtgcctaatgacagccatgaggaacttccatgcatattagatattgacatgtttcatttattgaagagaatggcatggatcaagaaaatcccccttgtgaagaagaatcagcagttcttgctttgtataaaacacttcaccagtatacgggaagtgccttgaaagaaataccatccggctggcatctgtggaggagtgtcagagctggaatcatgcctttcctgaagtgttctgctttattttttcattacttaaatggagttccttccccacccgacattcaagttcctggaacaagccattttgaacatttatgtagctatctttccctaccaaacaacctcatttgcctttttcaagaaaatagtgagataatgaattcactgattgaaagttggtgccgtaacagtgaagttaaaagatatctagaaggtgaaagagatgctataagatatccaagagaatctaacaaattaataaaccttccagaggattacagcagcctcattaatcaagcatccaatttctcgtgcccgaaatcaggtggtgataagagcagagccccaactctgtgccttgtgtgcggatctctgctgtgctcccagagttactgctgccagactgaactggaaggggaggatgtaggagcctgcacagctcacacctactcctgtggctctggagtgggcatcttcctgagagtacgggaatgtcaggtgctatttttagctggcaaaaccaaaggctgtttttattctcctccttaccttgatgactatggggagaccgaccagggactcagacggggaaatcctttacatttatgcaaagagcgattcaagaagattcagaagctctggcaccaacacagtgtcacagaggaaattggacatgcacaggaagccaatcagacactggttggcattgactggcaacatttataattattgcaccaccaaaaaacacaaacttggatttttttaacccagttggctttttaagaaagaaagaagttctgctgaatttggaaataaattctttattt

SEQ ID NO: 1525 - DNA, 3890 bp, Homo sapiens
cttgaaagtatttttattggtggagatataagatcacaacttccggaagaggcaaaaaagtttgacaacatcgataaagtatttaaaaggatcatgggtgagaccttaaaagaccccgtgatcaagaggtgctgtgaagccccaaaccgcctcagtgacctacagaacgtcagcgagggcctggagaaatgccagaaaagcctcaacgactacttagattcgaagagaaatgctttcccaaggttcttcttcatttctgacgatgagttgcttagcattctggggagcagcgacccactctgcgtccaggagcacatgatcaagatgtacgacaacatagcatcactgaggtttaatgacggcgatagtggagaaaaactggtgtccgcgatgatttcagcagaaggagaagtcatggagtttcggaagatcgtgcgggctgaagggcgcgtggaggactggatgacggcagttttgaatgagatgagaagaactaatagactaattaccaaagaggctatttttagatactgtgaagacagaagcagagtcgactggatgctcctgtaccagggcatggtggtgctggccgctagccaggtgtggtggacctgggaggtggaagacgtcttccacaaagcgcaaaaaggggagaagcaggccatgaagaactatggcaggaaaatgcaccggcagatcgatgagttggtaacgcgcatcaccatgccgctaagcaaaaacgacaggaaaaaatacaacactgttctcatcattgatgtgcatgccagagacatagttgattctttcataagaggcagtatcctggaggcccgagagtttgactgggaaagtcagttgcggttttattgggaccgggagccggatgagctgaacatccgccagtgcacgggaacctttggttacggctacgagtacatgggcctgaacggcaggctggtcatcacgcccctcaccgatcggatttacctgacgctcacccaggcgctgtccatgtatctaggtggggcccccgccggcccagcaggaaccggcaaaaccgagaccaccaaggacctggcgaaagccttgggcttgctctgtgttgtcaccaactgtggcgaaggcatggattacagggccgtggggaagattttctctggcctggcacagtgcggggcttggggctgctttgatgagtttaatcgaatcgatgcttctgtgctctccgtgatctcctcccagatccagacgatccgaaatgctctgatccatcagttaaccacgttccagtttgaagggcaggagatttccctggactcccgcatgggcatcttcatcaccatgaaccccggctacgcaggccgcacggagctgcccgagtcggtgaaggcgctgttcaggcctgtggtcgtgatcgtgcccgacctgcagcagatctgtgagatcatgctcttctctgagggcttcctggaggccaagactctggcgaaaaagatgacggttctgtataagctggcccgggagcagctgtccaagcagtatcactatgattttggactcagagccctgaaatcggtgctggtcatggctggtgagctgaagagaggctcctctgaccttagggaggacgtggtgctgatgagggccttgcgagacatgaacttgcccaaatttgtgcttgaagatgttcctcttttccttggtttgatttcggatctgtttcctgggctggactgccctcgcgtccgctaccctgacttcaacgatgcggtagagcaggtcctggaggagaacggctacgcggtcctacccatccaggtggataaagtggttcaaatgttcgagaccatgttaacccgccacacgacgatggtggtggggcccaccagagggggcaagtccgtcgtcattaacactctgtgtcaggcccagaccaacctctcttgatttaggcttgggctgacgacaaagttgtacatcctgaaccccaaagccgtgagtgtcatagaactctacggcatcctggacccaaccacccgagactggacagatggggtgttgtcaaacatcttcagggaaatcaacaagccaacagacaagaaggagcgaaagtatattttatttgatggtgatgtggatgctctatgggtggaaaacatgaattctgtgatggatgacaacaggttgttgacattggccaacggggaacgcatccggctccaagcacactgtgccctgctctttgaggttggagatttacagtatgcctcccctgcaactgtctctcgatgtggaatggtttatgtggatcctaaaaacttgaaatatcgaccatactggaaaaaatgggttaatcaaataccaaacaaggtggagcaatacaatttgaatagtctctttgagaagtatgtgccctatctcatggatgtgatagtggaaggaattgtggatggaagacaagcagaaaagctgaagacaatagttcctcagacagacctcaatatggtaacccagttagccaagatgttggatgcgttgctagaaggagaaatagaagaccttgacctgctggagtgctacttcctggaggctttgtactgctctctgggagcctccctgcttgaggatggaaggatgaaatttgacgaatatatcaaacgccttgcttctttgtctactgttgacacagaaggagtttgggccaaccctggggaactgccaggtcaacttccaaccttgtatgactttcattttgataacaaacggaatcaatgggtcccatggagtaaattagttccagagtatattcatgcccccgagaggaaattcatcaacatcctggacgtttcatgagagcattgtggctgtgagtggcaagctgacattctgcacgctagcactttacaaaaatattgtgcaagacctacctcccactccgtcaaagttccattacatcttcaaccttcgagatctctcacgggtttttaatggtcttgtcctcactaacccggagcgattccagacggtggcccagatggtgagagtctggaggaatgagtgtctgagagtcttccacgaccggctgatcagtgaaacagacaagcagctggtacaacagcacataggcagcttggttgtggaacattttaaagatgacgtggaggtggtgatgagggatcccatattgtttggagacttccagatggctctgcacgaaggagaaccacgcatttatgaagacatccaggactacgaggcggccaaggctctgttccaggaaattcttgaagagtataatgaaagcaacaccaaaatgaacttggttctcttcgacgatgctctggagcatttaacccgggtgcaccgtatcatccgcatggaccgcggccacgccctgctggtcggggtagggggctcagggaagcagtctctttcgaggctggctgccttcacagccagctgtgaggtcagtccacgtaccctcccagaaataggtttacgatgccagtttctgcagttggtagttcgtgtacatattggaacaatccacagcagatcatagcatgatgttttcatagagtatcgaggtgggtgttttggtttgttttattttttcttgtttttggcttgatattactatattttaactgaatagccagagcatctaagtacaggtgttctttggcttaggatagggttacatcctgataaaataatcataagtcaaaaatattgtcagttgaaaatacatttaatatcccaattaacccatcataaagttgaaaaatcctaagtggaaccatcaaagccggggaccatctgtattgctttgtttttaggatggagaatgtcagatcaagttagaaagtcaaatacaagcacatcctgtg

SEQ ID NO: 1526 - DNA, 3084 bp, Homo sapiens
tggtgctccttccggctcatatgcgcggtggttctcctctaggtcaccatggctttgtcattggttactccctctttctaaggcgccctcttgtttggtgggcagtattgggtgggtccccccacagcttcgtgaggtgggctagaggagctgggcatcgggtcagtgccccggcctgctgggggccctgtggggccgcgtgtgccccggtgcctggaaggccgactctcttgacagcaggtcttctctccaaacgtatccacccagccaggtgtctgccatggggctgcttagagtcggccacaaaatcaacccgtctgcagggtcagtggcttggcattgggctttggggcctgtccctgtggctggcagcctgcctgctgcccggtccacgcctctgttgccttggatttgggttctgagtgaatgcagccttgcctcttggaccgtcctgtgagacgggcagctctccacctgcgtcctcagcactgcgcccttgttgcaggtatggcgtcatcattgtgggcaacccgaaggcactatcaaagcagccgctctggaaccacctgctgaactactataaggagcagaaggtgctggtggaggggccgctcaacaacctgcgtgagagcctcatgcagttcagcaagccacggaagctggtcaacactatcaacccgggagcccgcttcatgaccacagccatgtatgatgcccgggaggccatcatcccaggctccgtctatgatcggagcagccagggccggccttccagcatgtacttccagacccatgaccagattggcatgatcagtgccggccctagccacgtggctgccatgaacattcccatccccttcaacctggtcatgccacccatgccaccgcctggctattttggacaagccaacgggcctgctgcaggtgagcatctgtggctgcggctgggtgtggccctcctgagagctcttgagggtgtgcttgtctgcgaggccctggcctccttcggatcaccctggactgctgtctttcagggcgaggcaccccgaaaggcaagactggtcgtgggggacgccagaagaaccgctttgggcttcctggacccagccagactaacctccccaacagccaagccagccaggatgtggcgtcacagcccttctctcagggcgccctgacgcagggctacatctccatgagccagccttcccagatgagccagcccggcctctcccagccggagctgtcccaggacagttaccttggtgacgagtttaaatcacaaatcgacgtggcgctctcacaggactccacgtaccagggagagcgggcttaccagcatggcggggtgacggggctgtcccagtattaaaaggtggcggcggaagagctaagcaacgtggcttagtccatcagcatcttattctgggtaataaaaaataaaaataaacggatacctgttttccactgctaaaactgaagcaccactgtgtgagcaacaggaagggagagcgcacgagggagaggagccgaggccgagcgccccctgctggcccgcggcggcgaggagcagagggagcggaggaggggccggcccgcgggagccgcggccaccaggaggccccgctccgtcccatcggggctgcggccagggcggagggaggaagaccctcatctcagagtagccctttcctctgttcttttatttctttttctctttgattgaaaggggactacgtcttagcaggaaaaaaaacttcgcatttctgtgcccgagcaggctccttgcaaagacagcagcgtgcggggcagagccccgggagggcgcgtctgtccacgcctaccggacgcgccgaggtcgcgctgcctgtgttctccgagggccttcatttaaagaaaataagggtgttttgggtttttctctttgtttttttcaagattcttttaaaggagtactgaagaatactttcctaagtttgtctctaaaatcttagcggtggacctgggagatttgagaagcttccagaaacagtttaaacaagccagcgctactggagaagaggagcaacacctgtgccgcggccggaggagttttgttgttggttttagcttccagtggcttctttctgcggggcatcaggctgctggggtagccgcccgccgagcctggaagctgctcgttctccgctggactcagaagccaagctgcttcccgcctagactcggcgcagggccccgcaccggtgaggaaggtgcttttggccccattgcgaggggccttggccaggactggccctgtggccaggaggcgagaaggtggctgttcccggattgacggctttttcccgggggcctttggaagatttggtggaaggacaagagggcctgtccctgtccccgtccccaggaggtaccgacagtccctgtgctggttagacacggagcgctgcacaccgaaagcccaaattgggagctctgcctgccggcaactttgctgatggggtgattgctgcttctggggggtaaggaaacaagttacagaaattaccgcgttctgtgtgaagggactgagggtgtggtgtcattggcagagggtcattttaggagagctgccccagcccctcgaacacctggcttggggtgtcattctgcctggcggccaggcctccagcttcccctgccccgggcctggggctgtcactggccctgatccgaacacctccagattccggcttctacatgggacagacggggacgcacaggccaccttccttctggcagggactcttatttattcccattgctctagggctttcggtttccccttcttccggtaggccgcgtagaggcatgcaccgggtaggtttccgcggtgaccccgcggcggcctgagggacgctccctgccccatcccggctgttgggctgggccgctttgcctctgcttcgccctgtgctgtgttctccagctttgtagcagcagccttgacaaacccaggcgcactgtaccaaggcaatgtaacttttgattttcggtcaatttaagttcttttgtcaccaaatattaataaacagttttgacttc

SEQ ID NO: 1527 - DNA, 5027 bp, Homo sapiens
agaaagtatctagactgatcctctcattttacaaagggtggcaatgaggtggcccagggatgggcaggaatgggcctgcccaaagcttcctgacatggcaatctcatgccaccttgcatccagccaaggaaatactggacactacagaggcctgtatgctcagtcaacctggcaccatcgggtcccccagagactcatagagtatccagggcagtgggtatgcccctctcccttacccatcccactctgttccaggcacgccatccctccttgttcctgactcttgactacgtccttgtttatcctctcacctctggttcggtctcccaactcatcatttctctctctcactccctctctcactcaccttctcgctctcactctctcgctctcctcagatttaccaggctggctatttctacttctgacactttgccctagttggggcctagagacccagcccccagccccagctcctacccactggccagtgcccagaaggatcatggcaggacccagacacacatgttcacgtggccagtagatcccagttacaggcagtagaacgtgggtgagtagcaacagtgtacggctccatgacaagcacaggtagcctagccgtgtagcaatgggtcactcttccatagcaaccaaacaaaattacatagcaatggatgaactcaagcgaccatgaggcacagtgacaagcaatcgaacgtggccgcggagcagtggagtgtcgttgcataacaatagacccagccgtagaagcatgtcacacagccctgcaccgcaggagggtgcaatcacgggaatgagtacggagcacagtgtggaagacgtgggcagacatacagagtagtagcactgggacacaactgagtagcaatggcacggtcacagtgtgtgtggctcctggacatgcggccagggagcggtggccggcagcaggtcccagggctggagcagcaggcgccagcgacatggcagtggttgagttgtggtcaaatgaagaaccgcctccctcacgctgggccgttgtctccggctgagcctcttggcctcccctgatttcaggagtgtgtttgtctatatccagtctcatcatgcattccccggagcccaaaaaacaattttatctctgattcccttcagatccgacttcagcttaataggaaattgaacattttctggagagaaaagcgctctgggaatagatgagagtggagaagaggaggtctatgcctctctgtgcaatgctgcctgctgcccctggccctgcctgtcccatccccatggctcactaagcccactgtggctccctgcccctggatgtgcccttgatctacctcattcccagactgcaacccaaccatttcttctcaccttggaacacttcgttttgatgcaggcctttcaagttccatttggtcaacatggtacaaaactctggtcctgggtgggcccatcaaggtcaaggtcccatgggtatggtcttgggtcaagtgtagggcctcaggcagaggtagaggaagccttatctcccgtctgagtagctcaggaagccattgggaagaggtgagcctttaagtgagtgtgaagagtgaggtgttaaggttcatcctgaacatggcaactccccaaatagtcaacagcctgcaagcatctgccctccactctctgggcaccctgagcccatctcacacggagccaggccatgcctcctgacgccaggaggggagcaggtaaggcgagggggctctatgccacctctagatggaccgacttcctccacaaagggcttctgaaacacctgccatgtgcctggactccccattcctccagcctgtcagaaaaccagaactctccaccctgccatgtgcccagccctgtgtccagctggggcagggacatggggacaaagaggccaaggacctcagctctgagaattccccagtggacaggagcaagccatacccggggagacgattagtggcacagagtaggcacacagtaaatatttggtgggggatgaacaggcaaaggaggggcatggttgggacaatgtagctttttaactgccacacttacccagcactcctggacacacctagtgagcccttagtgaatgagagagagctggggaggtggtggatagggggagaggcaggcaaggaagtcttcctggaggaggcagactatgctttggataaagaaaggcagatgtgctcatttactatggaagaattgtgtattcagtgttgtttccagcacagaaattcaagcacagggttgcttccctcctcttcctgtctctctccctgtctctcctgctctctctcgctctctctctttttctccctcccccctctctctctccacctctctctccttctctctctctctgcctcctctgtttccctccctccttctgccttgctcagaggagatttgtggcagaccagagggccctcataccaggagatgaataattgacaagggttgttaaaagattcagtggagtttttccaacctccttacactggaataactcatttctttcattctgtttttgaaagcctttccccctccctccacctgtctcctccacatccccgccccctctgagcataccgcttttgtttctcttcctttcttgagtctgctggaccctagaatgattcggccttaatccctcggtttctctaaatccccttccccagctgtccccaccccacttgccgtgctccggaggtgtaggttgacttcagcagagacagccccagatcatgagtgcagagaggaaggaggaccagggaagctgtggcctctcccaagtcccagtgtgccagaggtgggctcggtcctcagaaaggcaagcctcccagcacagggacccctttcctcgcaggcaggcggaggggtgctctggggacgctgggtgaccatgtgccttggtttctccatcttagcatgctgcttaccctaccctacctgcctctcaggatcagatgggagaggtgaggccccccagaaagggcggctggccgtgtagcagagacaccctgagcctagtcctttctgtccggctggcatggccctggggtgaccacccatccctgtctgtccaggactgacgggtttccagactatgaggtgttcagtgcttaaaccaagacagtcccaggcaaacctggatgggggccaccctacgtggcacagaaacctcccctgtcccaggtctgccccactggaggttgccacactctctaccctgtcagcctccctcatccacagggcatactccccctgcccagtctggcccagctccgtgctgtccatgcactcatagtgctcccactgctcctgcaagtgaccttgaccttccttcccttctctgggccccagttcctgcctctgacagcacaggcggttggagcagatgttcctgagtgccctgaggctcctgcactgtggctgcagccttggtcctgcccccagacccacacccaggatggggtctgcagcctggtgaggccgacagcagagcagtcagacccggcctccactcctcagcaccacctggtggcaggtgattaactctgagcaggagtcttttgaggctgccagcagcagtcaccaggggagggacttggagcacccctgcacactacccactttggtggcaacaagcagcaggaacgtcagcctagggtggtgacattgcaaagccccgggagcctgggattggcccccaggagcaggaataagcagcccccccagggccactagttcaggcaccaagcccagcctgggagcagggtcacccagggtctgggagtacgagagggcccaggccccaggtcctttggaaccaagagaggctgaggaactacaagagaaacagggagtgagacagagacaaagagagcagagccaaccagggcccacccaacggcctccaaacagacgcccttgactcagtgtccccttcaggccatcccacaccagccacaagacacgttcccaaaacactggccaccccagccttcctgctgtgtcccctcagtctccgtagcccctgactctactgcccagcgtgattgccccatttgctgggtttgtgctctctcccagtcacctctccaagcatccctgttctgtgcagcacacactcacgagctcccgcccaggcccagctccccgaaggcaggaaggcttctcagggccccagccctcctcagcgtctcccctgcactcctgcaggccccgagctgggagcaccgcctgctgacaggggctggagggggtcctacaattaaatacttaagacaaggcaaccgacctaagccatggctgagaacactcgccagctcttttccctttcctgtccctcccccaactctgacctttttctctccaattcctaaacacaatcacacacagtgcttaccaagcattttagcgaggaagggagggagggagaggagaagggtagaaaggaagaaataaggatcacatcccacatgtgtctgttacttccctctgcagacccctcctctcacctgcatagctcttgcaggtttgtgttccatctccaccactccgaagctgtgtgaccttggataaatcactccacctctctgctcctgtctcctcattgttaagtagagggaacactgtcaccctgtccacctcttgagactatgggggggattaacaagagaatgaggggcaatgtgttggaaactgtaaagggctgtccactttgcaggagacttaatagtcactgtgttcctggggccctgcgatcaaggcggagaataaaaaggaagcaaaaatcccccaggcctctccctctgaccctttctccggcagggctgttcccagacccctgacccacttctcctccctccttcccccatccctccgagtctcagcgggccattctcctcctccatccatcacctgagactaaagagattaataaacgagactcataactcagctgctgggatgcagcagat

SEQ ID NO: 1528 - DNA, 3874 bp, Homo sapiens
gcatcagttttgaaaagctgcttagtggtacgcacgtgctaggtgaaggcatgctttgtgactgcggtggttgacaccagcccttctcccttctcagtctgtcatgtcaagagtctaagctgatggctggcaggttgcctggtcatttctgggttttctgttccgctactagaaaggtagagccagtcttacctactgtagaaaatgttaggaaggcagccaggcacagggtgataaaaccaatgagatgatcagggctaagaacagtaatcaggttttccacatcttgctggtgttggcataagccaggaaagtttcagtgtggccacatggggtattttctaataattaaaaactcgtcttcattctctcttcttggttacattcctatcccatgcgtcccacattccatgaacctttcttcctctagaccactctcctatacgtgtggacacctccccaagaaagagcatgtcagaaaggaagtggtctttgatttatgaccttgggctgtgatttgggacagatggtctcaagagaaacagctggaaactgccaccacagcatctctttgaggacccccatggattgctgtgcgcagaggagaccccatgggtaccactcaggctgccaatggccccacacagtctctacctttcctggggagctacggagcaggctctgggtttggcattttgcttctgtccctcgagtgaaatgtgcctctgcttcatttctggaagatcgggtttgtgatttttgtgattctgctttagcccaggattcgagggatcatgtccacatttgtaggccatccagggagcagagagaaacttttagggccgtgataaagacaagccaagcggaaaatagcctgtgccctcattggcacacctggtgtctttatttccattagccctgattgatcaagcgttgctggtctgtgggcacttcacgctcccagagagaccagattggagctgtcctgttgaatctggcctgtaccagatcatcactggagagtgggagggggcgtcttgttagattcctaggtaacccctgcccccattcctaacatatcactttccagtatttcccaagagcctgaattaatagttaactagctgctggaaatcaaaagttagatcttgagaatactaagttgataagtcaggcttggccagtatccatatgctgcatccacagcaaatagagtggccatttattgggcacagtctctccatggcgggtgtgcaatctgaacccacaggagctgttttgctctcacttaggagactagcattcattattgtcccaggcagttcaggaaaagctgatttggtcacagcttaattaggaaatccagtgtgagctactacattcatgagttgctgttttctctgtagcagtttcgtcacctttactaattggccttaaataattaagttgggcagggtcactcaggatttctgcttaccaaagcacaacagccacagcaaagggccaaatacggccgtggtccggggccgtgagcccggcactcatcaggcagactaggaaaggcactgtgggttagcccgatactgggaggagacccatgggggagagaccgcggctggaagggcgtgtagagatatcatcctgatgctggggcagcctcactggcggcaggctttgtcctaagtcctgtaagtcatggggtaaggggtagtagcagagacacagaaatgtagctcagcagaagctggcctcttctgcacacttgacattcagaaaaaaagttcctctgccaggaacttgcaagtacaaagcctgggacattctcaggcgtctgtcagaacttgatctgttatcttgtctgccagggtaaagagctgcagagaaatggattcttgtcctcatccacgggtccaccttccaggactttaggctgcagcatcatcacacgtatgcgggagagaaagtgggggcttgggaaggtactggggcagagggaggccacaggaagcatatttcagtagagagggaattgtccccatttaatattatttgttttttgcgagttatttattgaatgcaggtgtggatagcctgtctcatgctaggcagccccttcacttgaggcccatatagttttagcttctataatgaataccatctatgtttcttatttttatgattcttatatatacccatgcattttaatactaaacattttaatatatgtccctttagtcatgggatgtgttccagtgtgttttgaggtgtagaatactctgtgacaagggctcacctaggctttacttattacagatgtgatggctgttggcaaacaaaacctccgtagagcttgggtggtagaaactgaatcctgacactgatatttcactgtctgtgccgaggggagcctgatatttctgtgtttcatactggctctacctggtgtaatcattcctcaaacctcaaaccaagaattctgctgagaaggcagtggacattgttagaggcagtctccccctgcctgtcgctccccatattccaaggaactggctggtctttaatcctgaactgaatcattggattaagtagcaacgatactggttagaaacaatggggtgtggtgagcaacttggattatcccaggatttaggtgatgtcagggtggctgcatgctccatcttagacattaccattgcttgataccaacttcctagcagcttgctgccatttaacacagcacatgtttgacaagttaccgtgtttgactggtttaggtctgctggcttttaagaaatttctcctagtgggaatgtaaagactgaattaaaaccttgtttcctacctcatttattaggttccatcaaattccaagagcttgtcggggcccaaacacaagggatacataggaatcctttgcctttctttaagtcactagccttgcatttgccacgtctgccctggcgatgtctcccccggttccattttaccctgatctggaagatgagcactgagagaatcagatgaatttcatggagcatttttgtaaccaataaacttctgggtcccagggctccagaggttcttgcccacagctgcttttttccaagcagaaggctagtcgctggaactccgagatgcatacaccactgtgactcttcccttgctcccagcatgccttgctctgtccttgtgagtatcctcctagggacttcatgtgatggaactggattttcttttccaggctgacagataaggcagtgaaggactattccgcttaccgttcttcccttctcttttgggccctcgtcgatctcatttacaacatgtttaagaaggtgcctaccagtaacacagagggaggctggtcctgctctctcgctgagtacatccgccacaacgacatgcccatctacgaagctgccgacaaagccctgaaaaccttccaggaggagttcatgccagtggagaccttctcagagttcctcgatgtggccggtcttttatcagaaatcaccgatccagagagcttcctgaaggacctgttgaactcagtcccctgaccaccacacagcagctgcggcggcgaagacgaagctggcttgccttccaccctctgttctccctccttgtgcattaagttccctccgcgggatgctgcattgttaccccgccctcccctctctcatttttcttggtgtggcttggggtttttaggcttcctgttttatctcgtgtgtgtggtgcaccagctatgaggttgtctgtaacccaagccatcaaagggcctgtacatacctaggagccatgagttgtcccggccagcttcatacttgagtgtgcacatcttgagaaataaacaagtgacttaacacac

SEQ ID NO: 1529 - DNA, 5002 bp, Homo sapiens
agccttcattaacgtgatttactgaggcccctgtcattcctggctcttagtaaggattttccagataggacagctgtgattacgcaggcagagaaaggttacagatcaggttaccaaccccctcctactgacttcaggtagtttgatagggtgagggcagattatcccatggagcatgcacccagggaggaggggcagcgggaaagagaacgaacagaagggcgagagaattggcaggatccgtctcctacctcttcctaggcccacagccagtgcctttggagtactgaggcgcgcacagagtccttagcccggcgcagggcgcgcagcccaggctgagatccgctgcttctgtggaagtgagcatggttgggcagcgggtgctgcttctagtggccttccttctttctggggtcctgctctcagaggctgccaaaatcctgacaatatctacactgggtgagtgcttggccggagaattcccagacaggcgcgtcccggatccccgcactgccagggctccagcgaacggcgattgatcagagttatccaggcgattttccaggctgggcttgcggacctggctggaggagggagaagcccatctagccgtggggcagagaggggcctctattgctgaggtggaagccattacctactgttggaccgggtgtctcagattcttcaagagcatggtcataatgtgactatgcttcatcagagtggaaagtttttgatcccagatattaaagaggaggaaaaatcataccaagttatcaggtggttttcacctgaagatcatcaaaaaagaattaagaagcattttgatagctacatagaaacagcattggatggcagaaaagaatctgaagcccttgtaaagctaatggaaatatttgggactcaatgtagttatttgctaagcagaaaggatataatggattccttaaagaatgagaactatgatctggtatttgttgaagcatttgatttctgttctttcctgattgctgagaagcttgtgaaaccatttgtggccattcttcccaccacattcggctctttggattttgggctaccaagccccttgtcttatgttccagtattcccttccttgctgactgatcacatggacttctggggccgagtgaagaattttctgatgttctttagtttctccaggagccaatgggacatgcagtctacatttgacaacaccatcaaggagcatttcccagaaggctctaggccagttttgtctcatcttctactgaaagcagagttgtggtttgttaactctgattttgcctttgattttgcccggcccctgcttcccaacactgtttatattggaggcttgatggaaaaacctattaaaccagtaccacaaaatgggcaaccagctctcttcaccacccccagcttattctcctctggagtgtatcctgaaccactgagatggctttgaccctcagaatctggaggaaaaacacctcctagcctgtgtatcctgaaccactgagtctgctttgaccctcagaatctggaggaaaaacacctcctagccctcggaacaaaggtttggccaaattatgaaggactggcttggtctcaggaaggaaccattcattgtgataccatctggcagctggacattttctgtaggcgtgaggacgaatggcctgaggccccacatgtgcaggctttttataccttgcagggaaatctagatctttgctgacagtgtaggattgatccagccctcctgctttgtcatttcaggagaggctgcaaagggcaattccagggaactaaagaaacaaatcccagaggcactcccagcagagaagccagctccctccagctctgctcctctgggtccacctcaacctctctatccagcttcagtctctcgcttgcctaatcctagaaatcctcaccctagacaagccccagtctcactcctcctcttccaacagatgccaggtgaatttggccccagtaaggtgcaggtctccttccccctacaggacttaaagtacattaagggggatttttggcaagttttcacatgaccctgacagatagatagaggctttccagaatttaacccaggtatttgaactctcttggagagacattgtgttacttttgaatcagatcctgatgaacactgagaagcaggctgctctgcaagtagcagagagatttggggatgagctttgtttcacatatagtgtcaggaaagggggcaaactttatccgactggaagagaagcagtaccagtaaatgaccctggatgggatggatcccagtgttgaaatgggagactggaagaggagatactttcaggacttggacaacttcattgccaactttggggatgcagggtttgtccttgtggcctttggctccatgttgaacacccatcagtcccaggaagtcctcaagaagatgcacaatgcctttgcccacctccctcaaggagtgatatggacatgtcagagttctcattggcccagagatgttcatttggccacaaatgtgaaaattgtggactggcttcctcagagtgacctcctggctcaccccagcatccgtctttttgtcactcatggtgggcagaacagcgtaatggaggccatccgtcatggtgtgcccatggtgggattaccagtcaatggagaccagcatggaaacatggtccgagtagtagccaaaaattatggtgtctctatccggttgaatcaggtcacagccgacacactgacacttacaatgaaacaagtcatagaagacaagaggtatgtggctctctaagcatgtggtcactaaggctgaatgaagatagaaaacacaagggatactgtgtatgtatttttcacaataatagctgaaacttctgtgacatggaataacatgtgtgtgatgctaacagcccacctgttttctctggtaagtctctaggaagactaatttaggttagatgctgagaattactttcctaccttaaggctgtgatggcgacaaattatatacacatgatctctttgactgatcttatatttgggagtccctctagtggaattccaactgaagcggggggtttctttgtgtgtttccccagtgtgcctgctcttctcacctctggcttcttcgtctgtgctgctccctagaacacccttcccttctcttcacaggactggctccttcatgacatttgggtctcttctccaatgtttcttccatagacagggttgtgtctttgacaatcctaactagcctcctctcccactcagcctaatcataatatactatttccttcctaacacttttcaagatttgtaatgactccatttatttatgtttttattaattgtctggcccccaacacaaaagagtagagagtcagcttcataagtacagcaatgtctctctctttttttcaactctgttcccagtgcttactgcagagcctgccacaaaataagtttccatgaatttcagttaagtgaggaaataaaagcggcatagtgaccttcttggttactgcccatccagccaatgatcttataatcaagaaggactgaataccttattatggtttcagaaacacaaaccctgaatcaggtacaagtcggcagtggtggcagccagtgtcatcctgcactctcagcccctgagccccgcacagcggctggtgggctggatcgaccacatcctccagactgggggagcgacgcacctcaagccctatgccttccagcagccttggcatgagcagtacctcattgatgtctttgtgtttctgctggggctcactctgggcactatgtggctttgtgggaagctgctgggtgtggtggccaggtggctgcgtggggccaggaaggtgaagaagacatgaggctaggtgtagccttgggtgaggggagggcatccctggtcctttgaaggttctccccaccccagcacacgccacccctctgttctctcttcagctccacctgccactgatcctgcaacttgcttctttctattctctgcctctgtttagaaatcttcacacaccactgaggcttcttgacttgccccttgtgacttgaaaccccagctcagatacaaattttcacctgccagccctgcctcctcctttctcccttttcctagacacaggactctgacaacttcatcctccttgtttagatgacttcccagtttccagtccccatttctccttctatcacttttcataaaaaaactcaggaaatatttgacatatcttccatttcaaattcttccattttatgcagatatcttgcccttcctataagctctcctcaaagctcaggaaacctggtctgctctcctgcatttagggaaggagaacccctgccaagacctttgctcactgcctgagaccccttccttagagagcacctcctttgctggtcagacatggagcctgcagttggtcacagatgatactgctttatttcagtttttacagttgccttcttaagattcccgtcttataaatggagtacagggaacctcaagtagtgaagtggaaatccatgtgtaaggctttgtggcttcaggtaccagtggctaaggtagttttaaagactttgttgattttagaaaaagtccatcttccatcccctacatggcagttaatacccttctatatggtaaaaccttagagattaccttaatctgctaggaacagaagcaagaaaaaccatggcgtaaacacccccagagtttttgttcatttgtttcatctttcttgataaagcccgaaggtagcccattcagggctgttgtggttggttgctccatcatgtcatcaatagcccatatcttttcttttttatcttccttagtataacaccaaactacctctctgatagctggtgttcatgaaatattttaccttcaaatgattgtacctttttatttgctttagagttctgaaataaaatgaaattccactgt

SEQ ID NO: 1530 - DNA, 3955 bp, Homo sapiens
ttatgtttgtttgtttttgagacagggtcttgctctgtcgcccaggctggagtgcagtggtgtgatcttggctcactgcaatctctgcctcctgggctcaagcagtcctcctacctcagcctccttgagtagctgagaccacaggtgtgcaccatcatgcccagctaatttttgtattttttgtagagacagggttttgccatgttgcccagactggtctccaactcctaggctcatgtgatcctcctgcctcagcctgctgggctgctgggattacaggctgagccaccgcaccagccacagtgttttctgatgaccctgaaccacggttttattttcaattcttcattcctgttctcattccttaatgctgggtgccttcttgctgcccattttgaactcactgccagtgtgtctctgctgtcatctgatgtgcagagctataggtgctgcggcgaagggtgcaggcttggagccgtttaaacaacctggcccagcctcctcactccctgctgaccttggtcaaggcttcagtctctaaacctcagctttctcatctgcagagcacagacaaaaccacctgcctttgagctgtcttataaagcctaaatcaatgcgcacagcaggtacacagcaatgcttgataaattgttactattattgggtgaattttaggttttttttgttgttgttgttgttttgagacagagtctctctgttgtcctggctggagcacagcagtgcgatcttggctcactgcaacctccatcttctgaggttcaagtgattctcgtgccccagcctcccaagtagctgggattacaggtgcctgccaccacatccagctaattttttttatttttaagtagagatgggcttttgccatgcttccccagctggtcttgaactcctggcctcaagtgatcctcctgtctcggcctcccaaagtgctgggattacaggcttgagccaccgcacccgtccagaattttagatttttttaaatccgtggttgaaaaataggctatggctggcttactcattgtgctttagggaagcatgtatttgagtgaaggaaatgataaaaggaatttcatatcgggcccgggcgccgcccaccctgcaagacagtttacagatgcctgccctgacagctgtctgcagttagccagcgtcagccgaggggtcctgagatccgctgaaggctgcctttgcatgccgacggcaagggaaaagtgccacatgtccctgggcttgccacaggtgacctttggatgggaccattctccagacagcgcagctcgtctttccagaacactcatggggagtgtgcctgtgtctggctggctgtgtgggctcccattcagttcattccccttctccagcctttaggcatgaccctaaaggcagaggtctcaagcacttgccaggggtgagccagcggtgggggcgcccctgccagggcaggcctgctgtgggggcttggtcagcgagtcttctccccacacgcaggatttcctcccgtccactgcctctgcccacaggtgacctttctcttttaaaggaattggggtcccttggtacccccacaaaccctgagttccctctctcctttctgcgtcctttctgctcgcctgcatgtgcctgcagcatcatgaccgctgggaagacacttccctgcacctgcacgctgtctgcaggcgtctctggccatcctgggctgagctgcgtgatctcgggtagcggccctttgttcacccgtgcaggatgtctttggaattggtctctagtgtcctttataaataactggtataaaagaaccccgggcaatggccttgcagaaagcccacacttcagagctgggctggtgtccagcgcgagaagcctgaggccgtcctgagctggaagccgcgtcctggttctgtggggccatccttcccggacaactggctggggggcacaagactctggtggccgacaagaggcccacctgcttggcctccctcttgtccttccccacacggccctctgaacaggactaactccctctgaggcccacgtgtgacaaagatgcaccgttctcaccacggaactcttcagccctgcagttctcccgaaggtgaatgagggcatcccagagtccccatcaggagacagacgatgctgcgttcccagcagccccagagccctcccaggcgcgcaggtctcctgccggcaaacagatctcccggcacgagcccctccacacttctgggaagagtgtcttcagctcaccaggccggagccaggggaagagaccaagggaggaggctccaagaacccctgggtgggggggacaagcactcaaagccaggactggcacccctcacatgccagcacccacggggtcaggtgtgccctgctgtctctggggaccccgcaggcctctggccacctgcccagcagcaagccccgtcgagcacccccagccggccttcctgggggcgggctaggcctcacatggcttttttttaaatatggaaaaccagtgtaaccccaaagcaagttttaggagaaaatataattcctattactctgtcgtctataattccattctgctcttaactcttcattttttcccactgtctgttctgcagacatacgatggttgttttctgcttcctaatcatctagtgacatttttcatcttctgcacctctcacggggcgtggctgtgcggtactcggccacaccaaggtgcacgtgagaagcgtaattgggcgtaaagatcagcgtctccatgcagagtggcggttctctccctttctgctgctaccttccatctgtctcctcccaactgttgcttagagaaagttattgtaatttcataaaacgtactcagtgtaagtcatcaaaactcatgtttagcagagacttcctctctggacaaaaatactgtaggtgtctcctgtgggcgctccctgaccatcccaggaggaggggtcctaccagtgccaacgccctccccctgtccgcagaactggtcatgctgctggagtggtggtcctgcacggagtgtacactgttcacggaccaggccacggtagagcgctttgggaaggagcacgcagtcatcatcctcaaccacaacttcgagatcgacttcctctgtgggtggaccatgtgtgagcgcttcggagtgctggggagctccaaggtcctcgctaagaaggagctgctctacgtgcccctcatcggctggacgtggtactttctggagattgtgttctgcaagcggaagtgggaggaggaccgggacaccgtggtcgaagggctgaggcgcctgtcggactaccccgagtacatgtggtttctcctgtactgcgaggggacgcgcttcacggagaccaagcaccgcgttagcatggaggtggcggctgctaaggggcttcctgtcctcaagtaccacctgctgccgcggaccaagggcttcaccaccgcagtcaagtgcctccgggggacagtcgcagctgtctatgatgtaaccctgaacttcagaggaaacaagaacccgtccctgctggggatcctctacgggaagaagtacgaggcggacatgtgcgtgaggagatttcctctggaagacatcccgctggatgaaaaggaagcagctcagtggcttcataaactgtaccaggagaaggacgcgctccaggagatatataatcagaagggcatgtttccaggggagcagtttaagcctgcccggaggccgtggaccctcctgaacttcctgtcctgggccaccattctcctgtctcccctcttcagttttgtcttgggcgtctttgccagcggatcacctctcctgatcctgactttcttggggtttgtgggagcagcttcctttggagttcgcagactgataggagtaactgagatagaaaaaggctccagctacggaaaccaagagttt

SEQ ID NO: 1531 - DNA, 6136 bp, Homo sapiens
acaaccgtcctctgtgactggagctcgactgaagagagctgcgactctgaggacgtagtcaatggaggccatggttctactgaccaactccttcagaggaaccgggaggacaaaccacaacggcgaacaggctagattcgaaggcgggcggggtgcatgcacagagggcctcgaactctggcaccatcttgggcccccgcgggctggacgctcggcctttccctggggtcggccaggttggtgggcttgcgtcccgcgcctcttcgacacacagacttcccgtctcttggggagataccgccgatgtcctccagacggcagtgctggggattccagtcggcgccgggctgcaggcctcgcgctgagacccagcccgtcgtggttgggcgttacccaggtgacctgataatcacaggactcatccgccagacgtggtctcttctctgccttgccccaccgacggcttccagttttgcagctagagtcttcgaaaaaggcgagcaacttcccagaacggctgctgaagtctggggcccatccccttacccctagtgcgcccattctacgctagcgtttctcagaacttgctatttccgattattagcattgatttgactgggggaaaagcctgtgagacgcctagcgcggaggataggaaatggctttcgacaagaagcagttgctggggtactcagcctcttttacacagttctgtggagatgcagattacgtcaaaatgtacccagtgtacaactgaatattttttggtaaatgtatgagttgtacagccatcaccgcaacccacttttagaatgtttacgtcaaccaatcccaccatccccagttccctcgagcccatttgaggatcagccccaggcaagcactaatccactttatggctcttgagatttcccttttctggacgttccatgaaaactgaattgtacagtttatgatgttttcttcttacctttagcagaacacttttgaagttcatccatattgtaacgtttatgtagagtttggtctcttttagaggaagctagttttggttcagaactgctttgctgagtgaatcgtagagactgttgacattgcttgaaagctgtaggtgtaccacgcacccctttatgcccttaagtttggctcagttttgtcaatttcttttttccctggattgagcatgtataattaggattctcagacttattagctgaaagtctgttaaggatgccgggtttgttcacttgctggcttggatttggatccaggccctctcgcttgtgtgattttggacaaccatttaacctccttatgtcttagtctgcaggggatatttattcctagtttaaatgagttattgcatgaggagtgtttagtgtctggcacatagttcagctaaaaatgttagctatcattatcttgcatggttttttttttaattgtgccttttttttttttttttttttagtggtgatgagttagagatgagtgctattgcaacccagtgagctagggtattaaaacttgtctgttttcttatgacccagatcaatttgtggcacatacttatttgcttcctgggagttggtaggaaatttatacagctcaccaagattattttgatagttacttttggtacgttatattttttcaggaaattatgtatttccttatgtttgcagatttattaataaaagtaaatggtggggtgttaagactaatctctggagggcagaaatgagggttagagtgctgagctctatgtggaacatacggcaatttgtttaacatcccgaggacccaggttcatccgtggaattggataacaatggcaccctaccttcctggttgtcaggaagattaaatggaaatcttctatttaaccacagcacctggcagcacagggaaagttccataactgccagctgttgttatttccattctgcagcgttctttccaattaaaacagcttagggattgtaaacctctgtgaaccagttaattaaaatgaactgggaagccctccactgttttctaggccttggaacactttatggaacagagacattatttgttccttgaaagttggaggttagtttccattcctactccagtcaccttttgaggccatgctttttcttccttttttcgggggttggggggtactttttgtgcactactcctcccttttaataagagttttaaatataataacaaagagggtcagcaaatcttttctgtaaatggccaaacagagaatatttcaggctttgttcgatataccgatgtcttgtcaaaattactcagttctgtccttgtagtgtgaaagcagctgtaaataaatgggtgtgtctgggtccagtaaaacacagccaatgttatttatgaacattgaaatttaggtttcatttaattttctcatgaaatattttgtttttttcaaccatcaagttttttttgtttttttttgagacggagtcttgctctgtcgcccaggctggagtgcagtggtgcgatctcggctcactgcaacctccgcctcccaggttcatgcgattctcctgcctcaccctcctgagtagctgggactacaggtgtgtgccaccacgcctggctaattttttgtatttttagtggagacggagtttcaccttgttagtcaggatggtctcgatctcctgacctcgtgatccacccacctcggcctcccaacatgctgggattacaggcatgagccactgtgcctggcccatctatttttgattcaaccgaatttttgtattttggctgtgtgaactgtataaaaacacagcagactggacttggcctgcttgctgtaatttgctgacccctaccatagtatttcatgacacagtgactagtggtgtgatgtagagtcagaaagacgtgggtttaataaaattttggttctgatatgtgttaattgggtgtatttgggcaaattagcacatcactcagcctcatggtcttcatcttgcaataggcagtaaacttacctaccttcttggttgtcagttgggataatacatgtgaagggagtcagtgtgataatccacagtgctaggagtccagtgaatcatatattagctatagcatattcttttttgagagttggttgagtagactaagtgctggagggtagagctagatgacttggtttttaatcctagccactttctagccatgtgactttgtgccagtcatctaccctctctgtgcttccccttcctcatctgtaaaatagggattattaatagtacctaccttagatagttgtcatgaagatttgagaagctaacaattataaagtgctcagacacattcctggtacatacacattcttattatgtcaaaataaggtatatttggggttgaaaatccatgtgctttcttcaaatgaaacacttttgtctctttttgctgaaatttacacaatttataaagcataagaattatttgttctttggaaatgtgaagaaagttgcctataaatggcaaaggcttggagaactttttgaggaaagtactcccctgacgtctgccaagtgtttattatctcccttcctttcaagaacgttccatttcattatggctttcaaatttaatagcctagaaatgtactgagtggtggttgagggctgaggctcaggaatctaacagatttgagtttgatttctagctctgccaccctttagcttgtaacctgggaaaagatacctcttaaggcttgcctctcatctgtaaaacctgggtaataatggcatctaccttattaagttgttatgataattaaacataatcattcacataaggtgcttggtgccaggccttacccattgtaaaagtttaataaattatagctattatttttattattctccagggcactcttgaattaagatgcacttggaagccatctgctagcttcttaaatggacagcttccctcttattgtaggtttgaaatgcttaatagcattgtaggttgagtattccttatctgaaatgcttgacaccagaagtgttttggatttctgatttttttggatttgggattttcaactgtatatgaattatttgttcttaggaggctgccttcatgaacctgttagtcataagtttgttttcttttttttttttttttttttttttttttttagacggacttttgctcttgttgcccaggctggagtgcaatggcgcaatctcggctcaccgcaacctccacctcccaggttcaagcaattctctcgcctcagcctccctagtagctgggattacaggcatgcaccatcacgcctggctaattttttttttttttttgtatttttagtagagatggggtttctccatgttggtcaggctggtctcgaactcctgacctcaggtgatccgcccacctcggcctgccaaagtgctgggattacaagcgtgagccaccacgcccaacccataagtttgttttctaagaaaaaggggggccgtttcttgaagattttcagtgcgtttgcataggattgtgttgggagatagtaagcagtatagacagaaaaactcgtatttgaattctggctttctcaactatttagattatgaccatgagtagatagtgtcccctctgagctgcagatttctcgtctacaaaataagtatattagtttcagtttcattaaggttgttaggaaaatacacctagatatgtatttttaataacagccttaccaagatataattcgtctgccatacaattcacctatttacagtgtgtacagttcagtggtgtttagtaatattcagagttgtatggccatcactgccctcaatctgagaacattttaattaccctaaaaaaaaactcttcactcctcattcccctcttcctccaaccgtagggaaccattcacctattttctgtctatagatttgcctattctggacatttcatataaatggaatcatacaaggtgtgagcttttgtgactgcctttttttacttagcctactgttttcaaagttcatctatgctgtagcatgtattagaacgttgttcttttctattgccaaataatattctgttgtttggctatacattatttatctgttcatcagctaatggccatttgggttttttcccctttttggctatgttatgaataatgctgttaagaacattgatgtgcaagtttttgtgtgaacatgtgttttaattttacctaccagtagaattactgggtcatgtggtaactctatgtttaacgttttgaagaactgccagattgttttccaagtggcacccagatcttttataaagcacttactccagtgcctggcacagggtaagtatcccatacaagatagctattcttgtaacacattttcattgtaggaaatatgttcttgaaagccactcttctaatttagttcaatgaattggcaagccctcgtctttttcttcttaatgtcctgggaactatctgtgcagactaagaataatttgttccttaggcattggaagaacacttacagtcaaacagatttcaagtaattttgtttccctagaaaattatgcatttctttaaggttttccagtttattaatacagaattaatgtaggatagtggttgcagagtctgacctctggagttacttactggatatgcttcagtttccttatatgtaaaatagaggtgatgagaacacctatctcaggaattgtgaggatgagctgcgaatacatgtaatgcttgatgcagtatatagcacacgggaaatattcaataaatattagttttatctcatggagcctgtgggggctagattattaaaatgtaccagaaagttttaacatacaggattctttgtaagaaggcttttcttaccttttttcccccccatttggcagtcagtttgctaatttttattttccttgaaaatgttccttttcattaaaattttcatatgtactcatctaaaatcatattgaatattaacttttttaaacttttaataggtaatatatttgtgtggtttgaaattcaaaaaggagaaaattcctcctcccatctttccctctctatagataaccagtgtctcagaagatgtgtttgagtcag

SEQ ID NO: 1532 - DNA, 3523 bp, Homo sapiens
atccagcccctccaggttgactcaagtcagagtgtgtgggggccagtcatggaacagagggagcctcctgcccagggcaagcgtggggagaccaccaggggccccagacaggtgagccgctccagcagggacagcacaggtggtgcatggtcggggctggacatcggggttagtcggcaaggatgaggagtctctggggatggaggctgaggcttggggttctcaggcaagggcaggcctaggtgcagcagagaattgtttggagggaggaaatcaagctttccttctagaaagggtgacagggaccaaagggagagggcagggacagcccctggaaagggcaggtgaggaaggtgaggctggaggggacccaagaagggatcctggggaggtagtggccaagagcagggtgagggccaggccgcacctttcgctgtacccagctctccctggggtggccctggccctgctctgctgtcccctgcaggacaggtgcctcaggcttgtcccagcttgtcctacagcaggtcctcagcacccacaggtcctgccttgggctctgcagaagcagggagtggtgaggtcaggaccctgggccacagaagaaatggtctgggggacaaggacgggggttgggggactgacagctgttttctgaaggcccggggagtggaggagaggggtgaggggccaaggcttggggctcagtatgggggcagctgcagggggtgagggggacagtggggccagtgaagagggcctagggtctggtatctgcagcaggcactcacagaggacagactgtttgcaaggtaggtcaggtgacagggagccaggggggctgaggaggctcagggcctgactccagggagagcagttgccatcccccaggtccagaggggccctgggaggagtccaggcagggctgaagctggaagaagtaagaggggctggcactcaaggactgcagccactggccaggtggggccaggtcggaccggctgccttccctggtctcagccccagccttctgtggctgcctcccccatcggagccatcagagagcaggatgtggaaggggcaggtgaaggacagcctctgtgatagtccctggtgtgctgcagcctggggtgaggggccttggggatgggaagggctgggagctgggagacgatggctcccagcacttggtcctgaggggccttggagcagcttcccccaggcctgcagaggcaacttctgacactcggggagctgaggccaagggaaggctccccagacacaaggagaaggggctgggggcagccagaaggctttgggctaccctccctggaggctcaggtcccaggtgacccctccagctgtgttccttccaagattgggacctgcaaagattgcagatgtgaggaaaggaaggtgtcttgggcattcttcccagtgtggctgagctgtgcctgtgaggacatgcagacactcagaggacctgtcctcaggggccccagggtgaaggtcaagatctcaccttacaaccagccgggccctgactacttccagccaccaggcccccaggacaggagcaggacagtggttatttccccagtggacggggggctccaggtcacataagaataacatgccctgtgacaaggcgtggggatgaaaatgcttccccctgggctgagattccaggacacctgagatggggggaccccggccacatgtttagagctctcagggaacctggagggcccctcagcctctgttcccctactggggagaacagaggcctggtggtagcaatttcagggaactcagagaaacactgttccccagaccttggagctccctctgtgcctggctctcactgtgaggccccccaccagctggtcctgctcagggagcctccacgtgtccccctggttcctccggccagcctaggggtggagggtgcggtccccatggcctgtaggaagtagggctcagaggggcaaagtcaccgccctgaggtcaccaggaggtcccggcagagggggttggggcctggctcagggcctgttctccctgctgagctcagtgggatggggccatctcaagggtcccactgtttttctctggtctctgccccagcatgtggtgggaccttgatttccatactctcatgtcaccagtctgttggggggcagaggttatggggtcactgatatcacctggctcattcctcccccatccaggctgtcccatgagaatgtctaatctgtatgtcatcggagtcaataatgtgttttgctatcgctctggttccagggatattgctcagccaaagggccagcatcccagtgaagaagatcagaaagaggcttccggtcaccaggagactcctggggagggcctaggctgggagtgggacacgggtggggttggatggaagagtaccaggtgggcctaggatggatggaggaggctgtgtccccagctacaggcctggagatgttacgggacccaacaggcccccagcctccatccctgtgctgggttctcaggtttagtgggggcagtgcctggggactcagagggaccctgaccccagagcttggagacccctctggagcatgcctggctctcactgtgaggcccgcaccagccagtcctgctctgagagcctcctcgtgtccccctggcttgtcctgccagcctgggggtggagggtgtggtccccatggcttgtgggagggagggcccagaggggcaaagtcaccaccctgaggccaccaggagatccctgcagagggcagagtgggttggggcctgccttagggtctgttccccttgagctcggtgggacagggccatctcgagggtcccagtgtttttttctggtccctgccccagtgtttaatgggacacagcccctcacatccccagtctgtggggggcagaggtcatgggtcactgacatcccctggctcattcctcccacattcacccaacagaccccttatcctccatccccctgctgagactggggattggctcagggcctgttctccccactgagtttggtgggatggggccatcttgagggtctgggtgtttttctcaggtgggacctagatccccacagtccctcacgtgcccaatctgtggggtgggcatggggtcaccaaggtcacctggttcattcttcccccatccagattccgtctctagagcctttgaggtcactcctgacgctgacatggctgtgaagagctgggtgccaggcattactgcctccaaggttgctttgcgaggaataggtggggcatcaggaagaagccagttgcaggcaaggcctctgctgatgctgcttttttctcctgtacccatccatgggagggagctgtgagatggcctggcagaacccgctcttggaccccacagaatgagaggctcaccctgcacaggaacatcctggggcagcaggctcagcacattttaaattttgagtatgaacaaagtaaacttcagggttaaaaaaaaacac

SEQ ID NO: 1533 - DNA, 3854 bp, Homo sapiens
attttcgcttcagctcgcactgcacctgggaggtgagggcagcgggaacgcccgtgagcctgggcaggtgcgggcggctgctatgggaagcgcggcccgcgagcctccagctctccctcccgcctgctcccgtatctgtgttgccagcagatggacagaaacagaaacggccttgggggcagaggctggagggagcgggaactggacggccacaggagggcgggggacgctgccagactctaagactgtgcgtgggtggtttggggatcgccactgccgcggtaagcgcagtcccacagtctcagatagttaatatttctctgaaaagattttccttagcagccggggttgtgacggtgctgggcctccgtctccttccctgttcccagcgggcagggaatgttagccctgggagggggtggggatgagtgaggggtgcccggacggcagaggagggaggaggacaagtggcactactcgggctcagctttgcagaagccgtgctggtgaaagctgcatgtcaagcaaagaaagcgccagcaaccgcagcgtggggcgggagggtcaggggtcaggggacggggccaggccgttggagcagcccggagacagcctccctggctgggaatgaacgcagggcagagctcggctccgggcttcctccccagggactcacaggacgctgtgcagccccaccccccaacccaggcccggctttctgggactcacaagctatggtcaggagcgagacgccgaccatggggaaaaacagattctgtctagacccggccgggagctttcccgagagggctccgagacggacggcagtcgatgctacttagggtggacggaaggacggcggggtttggaagctgggcccagaagagtgggtttgcctgtgtcgttgtgggttctctgatggggacacagaactgtggggtcccgggcagtaactcgagcccgcggaagacaggcatgtgtgggggctgcggcaccaggctgggcagcatctcaggaagcaagtgagtacctgtgcttggttccaaggcggccatgaacttacctcactgttcaggaaacagtagaggacggccaccaccaggccctgcaatgagaagagatggtcaggcaggacccgcgctcgggggagggcggccgcctccgcacacctacctggaacgacccgaggcacagctcaaacagtatctggtatttggaggagatgctgatgggaaacacggcaaacaccatgtagtggacgccgaacagcgggataagcaggagcgtggacttggccagcctcctgcacagaaggagatgagccagctcagctgctggaccctcggaccctctgcaagcctggctgggtccttctcaggagggggcagctgggtgtgggaggggctccacacctcctctccactgctggagtccccgcccaacaagaaaaaccactgtttctttacgtttatgtctgaggcccctgtgcatatctagcactcagggcctgggaacgtgcattccggaagtgtccgtttctcccaaattccctcacaaggacacatgctgtgtcctggggttcatggctggcaggggcaagattccctgtgagtgaccccaaacctacacaggccccgcctgggagcccggcccatcctgaggcaggcatgggacaagaaggctggcctccaccgctgccacacgcaggtttaaatgatgagaaccgatcctgctcccggacctgcagctcgtaacagctgggctccgtgggagccaggtccctcagtcagcggcagaggacctgcctgattccctctattaacgcatctgaagtttgctggaaaagaggcctatctgcggctgagctcttggcccctatccagggaggttttgctacttctgtgaccagagttacacagaaaggacctcgtgtggcctcaagggtgtctcggccttttctgttgtcctggaaagggaacagattttgtttccaaataaaagcatccatctccaagtccaatttaacaaacactcccaaagaaccaatgcaaaggtcagcatagaaactaaacaagattcacaggaaatccaagttcaacctgaaaggcaaccaagaacgatcttattcgggggtctctgccacacaggcaccaccggactcccctgagcagggacaaggtcatgctgccatgcggggtctgacatggaatcccatccctcgtgtgggcaagcagagacgggatactccctggatttagacactacacagcagaattagattctctggtttaccagactcttttgcaatactctggtgccaggcagcaaatatccggcaaatatagactgcattgatcctcctgaccttagtgacattattacttccatgttacagatggggaagctgaggcatggagtggcaaagtgacttccctcagggcactggccggtatctgcacccagctttggggctgttggccatgctcctgtctaaccgcccctccccaaatccatccctgttttctaaggtgggagaaaagggaaatgcaggccaggcaccctcctaggctgggcggcagggttcctgccatggtacagctctgtgcacagccgcccttccacccccggtcagtctgagcccgaggcaccttctgggctgggccaaccacttccacaccaagccagtgtttagtttatacttgaattttggtttttacctttttaaaaaaaaaataaattcttgatataaatttatggagtctttgcattactttatagattccccggatcatcatgaattagctggatgactgggggtgactggctgaacgtctgccctgtcttcatctactgaagggagatcacaatgccatcttcatgtaatcacgtgggcaggaaacgctttctgaatttttattaagtacaaggcctggtattagggctggcagtagacacacggccatggacacatggccatgtctgagggggagacagaattaaatgtaaaataaaaaatactgtgtggtcaaggagaaaaagacaggctgtataacatgtaagtgggcggatgcttaaacaagcaagttcactggagaggactttcttctggccttgaaataaaagaaatggtgcctgacttccacagttgccaaggccagaagtgcccctgctgagtcctcccaggtcatcaggtgcagaatcacaccctatctagatggcgggtgttttaaaccaccaaattttggagtgatttgttacttcgccagggaaatgctgtccagggcctctctgagccttgggcaggagcagagccctggggcccagcctcgaggtgtgacagtggcggaggcggagtcgccgcacctccagggccttcctggcagcgtgggggtctcctgtctccacacggcatccccatcagggacggccaggccgggacacacactcacttgtactgagactggtcgttgccgccgacatctggggatgttaacttctgcagcaaaattcgtataatactaatgaaaaggacaaaattgacctgcacaagagataataagtttgtgaaacagacacgtggatccctaatttgccctgaagtccacctgatttcgaccctcccctccgctccctcagtccctccctccttccctgggaactgcctctgggggtccacatgcctgaagaggtccttttccgggaaggctgagtgatgcgtggaatggggtcagttctatttaataaaggatggcaggcttgctgtctgcccaagtgtgtgattccacagataatccacatgtcaacagggactacttacgatgatggaaattaaaatcggtattcgtatgacccac

SEQ ID NO: 1534 - DNA, 4722 bp, Homo sapiens
ctccccttctagaacacagatgccacaaaagtgagactgttttattatcccatgggtccttgatgctctgttcctttttgtcagtttgtcttctctctgttgttcctgttgttgtcttccatttagtgcttctttcctctgtccctttcatcctgctgttgagcccacccactttttatgtatggtactgtttttttttttcagttctgaaatttttatttgtttttactttatatcttttttcctgtggcttcctttttctttgtggatgctttccatttttccattagcttcaggtgttattgtacttgctttttggagcatttttatgagggcttctttaaaatcttcgtgggatattttggacatttccgtcatctggaaccatcatctgttaatggtcttttttcatttagcttgagatcttcctgtgtttttggtattacaagtcatttctgattgaaaacagggcatttgcacattaggttatgagactgggtcttgtttaaacgttctcttttcagttggccttctttgacattcctctggctggggaaggtggggatgttacctcattactgccaggtggaggtagaagtgtcagctttccaccaggtctctgttgacacctgaggggcctagtcagccctgggcagaagtggcatcccctctccttatctgtttctgccagcacagtgctggtttgttcttggtatggtgagagtcttcaccctccactagacctcttctgacagcacaccagctggagaaagaaggggaacctctttcctgcttgacagagacaggatgcaggctcccagtgtggtctgcactgccttagtgtcagggggttgggtggggatcaagcctcagctccctatttggccttctctgaagctcctaagcagaggtattggggtgcttcttacagtctttcaagaatggactttaggactccttcttcagcctttgatgatgtaaatggagttagggcctcagtttttctgtgatatttggctggagtagagcagttattgtctaagtgttttctctcttgctgggctgccccttttctagtcctttggccagagagagcaggcttttgtctcttctctttttatctgtgcatactggcatttctgggttgctggttcttcagtttcatgccatggatataggaagggaaaagaaaactgagggaacccactaccacgttttcccttgggaaacgtttgttttttagaaaatgacctgggcttttagtagtgcttagtgggaggattaggggaaaggatgtttactccatcttattggaagcagaattcttctgagctatttttaactggttaagacttcatgtatttaatggtcttgtctagtaaaatttctactatatggtattcggataaaataatatatttcatagctaaacaaacataagatacataattattttctaaaggacaacagatgagaatgactttgcctgatataagagggtaaatcttttaaatttaactctgcgttctgtgcctaggttggggcaaacacaatggataatcctttgttgaaatacagtgcaaaggattacttcttcaaagctgccctctgccacttcatagtagacgagttgaatgccaagcttgctcttgagaaatatgaggaaatgtttccagcatttactgattcaagagaatgtaaattattgaaaaaactcctagaagctcatgaagaacagaacagtgaagcttacactgaagcagtgaaggaatttgactcaatatctcgcttggatcagtggctgaccaccatgttgcttcgcatcaaaaagtccatccaaggggatggagaaggagatggagacctaaaatgaaatgtttttgtctttgtggcatgcagctaactcctctttagttttgtcttagggtcaagtgatctttatgggatgcctatttaatggcttaattttgttgcatatgagccagacggcctgtgtattgtttaagctcgccaagtctgtgttgctgtgaaatgaatgaaggagaggctcctgttcatcttgtggtaatgatgggttgtttcatgcttatcagaacccccagcgttttctgagaagtacttcagaatctcattcctcatatttcattggtatttgtggagcctatgtttaatgttgccacgtgtttttatgtcctttttgttggacttgagtactcagcccagttgttctcatagatgctttgcattttctctgtgctttggcatctgaatatgttctttaaatgtgtgtttagtttaggacagttactaggaatgagtttataacttcattagaaatcatttctatttttgttatcctgtgattattttgatggtgctagtgactagtttctttgctttttgtgttgttccgtatgctaacatgtgcatggcaaaaatttagaatagccagggtctgtaggcatcacattgtgaggaagggagctttctggaagtacttgcttcatgtatggatgagtgtcaaagtgaatttgatttgtacttagacacacgcgtttacacacacacacatatcacaagatctgttagaaatggaatttttctctttttctggagatagttttcacttttagttggagtggaaatccctttatatttacattgaagtattttaattggcatagcctgctcattattttcatgtttatacactttcccacgttgaggtggtgtgttctgtgctgtgactatagaaatcttggtcagggctggatagattatctaagtcaagcttgagaatgaatgtatgtaattttcctgtttattgtacatgatgggttaggtggggtgaatgtggtacaggaatgtcctgtatgcccaagtgggcaagaaccccaacttgtttctcaggggacttgattgttctcttagctggtggaatatgttggcttatgtgtttgaactctgtcgtgtttaattggtttatataatatatgtatgctatcttgattcatgaacttgatcctattaatttatatgctgatattgtactttagacatacgcttgtctcctgaatgtcctctgaatatttatagttaaatgatttatatttgaaatgtgttgccagacttaacccagcagacactctgacatcacggagcttcactgatgacaggtaacgaaacttcctatgttatgtcaggtagtagtaagtagtattggaatgatgttttcatttttggtggctctcaactggaattggtagtgtttccaggccaagggtcgactgcaggttgtttgagaaatgatgagtaggtcagtctaggaagaaagagaaagtagcaggaaaggaagtgggaagggccagccaaggacagactgtagaggatccacatcaggtggccacgaggacttgcaggctatagttatggtggtgacatgcatgaggtgggctggtagagcaggaagctctgtgatgtcagagcatctactgggactacaggtgcactgtagtccccactactgggggtggcaatgaagacactctgtctgttgggccctagaatttaatgtggatttcctccttccttccaagttctgagattcttaaatgagagctggctgtcttctagaggtaagacctggaatggagtccagttggtactttttcactccctcttagaatctcttatgaaaaaatgatcagagagaaaagtggggttttgtttccccacctaataatatatcctacaaccagccaaatgcacttttgtgaaaatggggtgtgaggagtggttctgcagcttgagtcctctggttttaagtagtttgtttctacttgtttaaagaatcttctggtctgaccacttaaagtaaaaactacatgatttattttcgggcaattatgtttagctttcatcattatactccaacagacccgtctgaaggggtatttttttttaacaataatgtttgtaacattttgttgtgtcaattagagggtcacttgtttgtattgcaataaacactgggaccagttccggggttaagaattaatttttgtttttaatatttcacatgaaaagaatcaaagtaattgtaatggctagaagagacctgccagaagattaaaaaaaagaatgagagaaaagcccagttagtggtgtgcaaacttacttcctttaaatgtcccatggatgtaggacagtgccatgtttcaagatgcctgtgagctaggtcttcaagatttatagaatgttacttatgaacaaaatataattatttatggtacaattcttgtactttagcaaatctggagttagttcatagtcaaagtcagttaatatttcttagaggaaagttttgctttttgtggcaacatttttatagcttgtgtgagttcttttttatttaatgatttgaaagcagtatttttgcacagtcgtgaccgtgtgtggtggcatcactgtaaccaaagtatatgcaccagcccttgtgcatttattgtttctcctgattttgtggatttaaatgtccaaatgcaaacctttgtgacttcctttggaggacttggcagcacagcatgcccccgtgacctgcctgctgtggtatgagctatgaccaagagcaggcttcctgctccatggagtcctgagttgctctggggcaggggattacgttatgaaaactaaccatgtgtaacaataaatctaccttagcag

SEQ ID NO: 1535 - DNA, 3797 bp, Homo sapiens
aacatcaccactctccggccagtgagaccgtcacagcaccccagaggagacaaattctggagctcagagagctggggtgtgcctgaccctcacagccaagcgcatggcgcggaagaactgcctggtgaagaacctggaggcggtggagacgctgggctccacgtccaccatctgctcagacaagacgggcaccctcacccagaaccgcatgaccgtcgcccacatgtggtttgatatgaccgtgtatgaggccgacaccactgaagaacagactggaaaaacatttaccaagagctctgatacctggtttatgctggcccgaatcgctggcctctgcaaccgggctgactttaaggctaatcaggagatcctgcccattgctaagagggccacaacaggtgatgcttccgagtcagccctcctcaagttcatcgagcagtcttacagctctgtggcggagatgagagagaaaaaccccaaggtggcagagattccctttaattctaccaacaagtaccaggtacagaacccacaaaggcgacctagcgggcatttcctgtccatcacaagaggaaccccatggagagctccttttcatacatcagagatcaagaggaaatgcaaaacccacatttctctctccttgctgcgggttgtcccctcgggttcatttcatgaatgtgccctttccctcccccaccacagccacaaggactcccatgcccaaccacactagctagcccctctcaggagacttctcacgcttttaggagacagaggcccagggactagaatgactaacttatttttggattgtacttcacagttttcaaagtattttctacactatctcttataaaaacccaatgaagggccaggtgtgtggctcatgcctgtaatcccagcagtttgggaggccaaggtgggcagatcacctgaggtcaggaattcaagaccaggctgaccaacatggtgaaacccccatctctgctaaaaatgcaaaaaatcagccaggcatagtggcggtgcctgtaatcccagcagtttccgaggccaaggttggtagatcacctgaggtcaggagttcaagaccagcctgaccagcatggtaaaacccccgtctctgctaaaaattcaaaaaatcagcccggcatagtggcggtgcctgtaatcccagctactcgggaggctgaagcaggagaatcacttgaacccagaggcagaggttgcagtgagctgagatcacaccactgcactccagcctgggcgacagagtgagactccatcttcaaaaacaaaaacaaaacacaacaaaaaaccccatgaaggaggcaaggcagaggcttttatgttttgtcgaaggaactaagattttgcaaagttaaatggactgacctgaggtcataatgcattcttgctagccccagaacacaggtctttggacttttttttttttttttttgagacggcgtctggctctgtcacccaggctagagtgcaatagcgcaatcttggctcactgcaacctctgcttccagggttccagcgattctcctgccttagcctcccaagtggctgggattatgggcacatgccaccatgcccagctaatttttgtatttttagtagagacggggtttttccatgctggccaggctagtcttgaactcctgacctcaagcaatccacccgcctcggcctcccaaagtgctgggattacaggcatgagccgctacgcctggccttccgactctttttctttcctgtctactctcttttctttctttgccagccccactatttctgctctctcgccatccagttggcaaggatgcaggggaaaggtgagagtgcctggttctgcccccagggagcttcaggctgagaagataatagagattcctgtgcaaataataccaggctgcagttttctggaaaaaggaggaggggctgggctcaacctggggcgagatgtgactggggaggggagggaacaaaagaaatgggggtatgaaacacattttttttacctttgaaaccttccccttctttttgcccctgatccttggtctctcctcctgtcccatcagtgctccctttgctctccctagatgtccatccaccttcgggaggacagctcccagacccacgtactgatgatgaagggtgctccggagaggatcttggagttttgttctacctttcttctgaatgggcaggagtactcaatgaacgatgaaatgaaggaagccttccaaaatgcctatttagaactgggaggtctgggggaacgtgtgctaggcttctgcttcttgaatctgcctagcagcttctccaagggattcccatttaatacagatgaaataaatttccccatggacaacctttgttttgtgggcctcatatccatgattgaccctccccgagctgcagtgcctgatgctgtgagcaagtgtcgcagtgcaggaattaaggtgatcatggtaacaggagatcatcccattacagctaaggccattgccaagggtgtgggcatcatctcagaaggcactgagacggcagaggaagtcgctgcccggcttaagatccctatcagcaaggtcgatgccagtgctgccaaagccattgtggtgcatggtgcagaactgaaggacatacagtccaagcagcttgatcagatcctccagaaccaccctgagatcgtgtttgctcggacctcccctcagcagaagctcatcattgtcgagggatgtcagaggctgggagccgttgtggccgtgacaggtgacggggtgaacgactcccctgcgctgaagaaggctgacattggcattgccatgggcatctctggctctgacgtctctaagcaggcagccgacatgatcctgctggatgacaactttgcctccatcgtcacgggggtggaggagggccgcctgatctttgacaacctgaagaaatccatcatgtacaccctgaccagcaacatccccgagatcacgcccttcctgatgttcatcatcctcggtatacccctgcctctgggaaccataaccatcctctgcattgatctcggcactgacatggtccctgccatctccttggcttatgagtcagctgaaagcgacatcatgaagaggcttccaaggaacccaaagacggataatctggtgaaccaccgtctcattggcatggcctatggacagattgggatgatccaggctctggctggattctttacctactttgtaatcctggctgagaatggttttaggcctgttgatctgctgggcatccgcctccactgggaagataaatacttgaatgacctggaggacagctacggacagcagtggacctatgagcaacgaaaagttgtggagttcacatgccaaacggccttttttgtcaccatcgtggttgtgcagtgggcggatctcatcatctccaagactcgccgcaactcacttttccagcagggcatgagaaacaaagtcttaatatttgggatcctggaggagacactcttggctgcatttctgtcctacactccaggcatggacgtggccctgcgaatgtacccactcaagataacctggtggctctgtgccattccctacagtattctcatcttcgtctatgatgaaatcagaaaactcctcatccgtcagcacccggatggctgggtggaaagggagacgtactactaaactcagcagatgaagagcttcatgtgacacaggggtgttgtgagagctgggatggggccagagattataagtttgacacaacatctg

SEQ ID NO: 1536 - DNA, 3607 bp, Homo sapiens
cggcctgagcgtgatgctccgggttctcggcggcggctgtggccttggccggggccttgggtctctcccggtcgtgagcgatcagcgcctctccgccggccgggctagccgggacagagaggagacggccacgaagagaggaggcagtgagcaacaggacgagaccgcggcgtctccagcctcggtaccatggccgggatcatcaagaaacaaatcttgaagcacctctccagatttaccaaaaatttatctcctgacaagataaatctaagtacccttaaaggagaaggtgaactgaagaatttggagttggatgaagaagtactccagaatatgttggatttgccaacatggcttgctatcaacaaagttttttgtaataaagcgtccattaggatcccatggacaaaactgaaaacacatcccatctgtttgtccctggataaagtaataatggaaatgagtacatgtgaagaaccaagaagccctaatggcccatcaccaattgcaactgcttcaggacaaagtgaatacggctttgctgaaaaagtagttgagggaatttctgtttctgtaaattctatagtcatcagaattggagcaaaagccttcaatgcatcatttgaactttctcagcttcggatctatagtgtaaatgcacactgggaacatggagatttgagatttactcgtattcaggatccacagagaggagaggttttgacttttaaagaaataaattggcagatgataagaatagaggcagatgccacccaaagttcacatcttgaaattatgtgtgctcctgttcgattaataaccaaccaatcaaaaatcagagtcacacttaaaagaatgttaaaggactgcaatgtcatagcaacaaagttagttctaatattggatgacttattatgggttttgactgatccccagttgaaagctatggtacaatatgcaaagtctcttagtgaagcaatagaaaaatcaacagaacaaaggaagagtatggctcctgaacctacacagagctctacagtagtcgcatctgcccagcaagtgaagacaacgcagacttcaaatgctcctgatgtaaatgatgcaattgtgaaactattcaatgattttgatgttaaggaaacctcccatcatttagtgatttctcatctagatctacacatatgtgatgacattcatgctaaagaaaaagagtcaaacagacgtattactggaggggcaatgcaactctcttttacacagctaactatagattattatccttatcataaagcaggagatagttgtaatcattggatgtattttagtgatgcaaccaaaacaaaaaatggatgggccaatgagttattgcatgaatttgagtgcaacgttgaaatgcttaaacaggctgtgaaggatcataatgtaggttcacctcctaaatccccaacacatgcctctccccagcacacacaaacagagaaggactaccctctgaaagggacatgcagaacaccttcagtattatctcaacaatcaaaagctaagctaatgtctagttctgttgtggttagacttgcagatttcaatatataccaggtctctacagcggaacaatgtcgttcttcccccaaaagcatgatttgctgcaataaaaaatccctatatcttccacaagaaatgtcagctgtctatatagaattcacagaatattactatccagatggaaaggattttccaattccatctcccaacctctatagccagctgaatgcactacagtttactgtggatgaaagaagcattctatggttaaatcaatttctgttggatttaaaacagagtcttaatcagttcatggctgtgtacaagttgaatgacaattcaaaatctgacgagcatgttgatgttcgagttgatggcttaatgctaaagtttgtcattccttctgaagtgaaatctgaatgtcatcaagatcagccacgtgcaatttctattcagagttctgaaatgattgccacaaatacaaggcactgtccaaactgtcgacattctgacctagaagctttgtttcaagactttaaagattgtgatttttttagtaaaacatataccagcttccccaaatcttgtgacaattttaatcttctacatccaattttccagagacatgctcatgaacaagataccaaaatgcatgaaatttataaaggaaatattactccccaattgaataaaaacactcttaaaacttctgctgccacggatgtttgggctgtgtacttttctcaattttggatagattatgaagggatgaaaagtggaaaaggacggccaataagttttgtagactcattccctctttccatttggatttgtcaaccaacaagatatgcagagtcacaaaaagagccgcagacttgtaatcaggtatctctaaatacatcacaaagtgaatctagtgatctggctggccgattgaagcggaagaagctcttgaaggagtattatagtacagagtctgagcctttgacaaatggtggtcagaagccttcttcatcagatacatttttcagattttccccttcctcgtcagaggcagatattcatctcctagttcatgttcataaacatgtcagtatgcagattaatcactaccagtatctgcttctacttttcctgcatgagtcacttatcctgctttcagagaacttaaggaaagatgtagaagctgtaactggcagtcctgctagtcagacatccatttgtattggaattttacttagaagtgcagaactggctcttttgctccatccagtggatcaagcaaatactcttaagtctcctgtttctgaaagtgtgagcccagtggtacctgattatttgcctacagaaaatggggattttttgtcttcaaaaagaaaacaaattagtagggatataaatagaattagaagtgtaactgttaatcatatgtcagacaacagatctatgagtgttgaccttagccatatccctttaaaggatcctttgctttttaaatcagctagtgatacaaatctgcaaaaaggcatttcttttatggactatttatcagataaacatttagggaaaataagtgaagatgaaagtagtggacttgtttacaaaagtggctcaggagaaattggatcagaaacaagtgacaaaaaggattcattttatacagattcaagtagtatcttaaactacagagaagattcgaatatactttcatttgatagtgatggtaatcaaaacatactttcaagtactttaactagtaaaggaaatgaaaccatagagtccatctttaaagctgaagatttgcttccagaagcagcttcactctctgaaaacctggatatcagtaaagaagagacccccccagttagaacacttaaatcacagtcatctttaagtggaaagcctaaggaacgttgcccacccaacctggctcctctctgtgtttcttataagaatatgaaaagaagctcttcacaaatgtcattggataccatttcacttgacagcatgatattggaagaacagttattagaaagtgatggaagtgatagccatatgtttttgg

SEQ ID NO: 1537 - DNA, 3579 bp, Homo sapiens
aagctcagcattcagatttgcccaatgtcactattaggcctccagacatgcagctcactatagcaacagagcctactgcagaggtgggaagttctccaatccaccaggaggctacagctcaggtctcagggccaggaagtgatgtagaaccttctgccacccagcatggtggtgcacctctgcgtccagagtcatcagaagatgctggacctttagcaggtcaacaggagacttcagttcaatctccagaacctgttaataatgagaacccctctccaacccagcaggaagctgcagctgagcatccacagacccctgaggaggctgagtcttctccagcccagcaagaggcccaacctcagactccagatccccctaaggaggtagaaccttctctagtccagcaagagttcccagctgagccaccagagcccctaaggaggttgaaccatctgcaacccagcagcaagcctcaggtcagcctccaaagtccactgaagaggtcagtcctccaccacagcaggagataccagctcagccatcagagccacctgagaaggtcaaaccatctccagtcctacagcagaccccaactcagcttttagagccacctaaagaggtagaatcctctccagttcagcaggcaggccctgctcagtcctcagaggcccctgtggtcatagaaccctctcggacccagcagatggccccatcttcacctccagagctccctcaggaagtggaaccatctcttaactcagcagggggttccagctcagactccagagccccctatggaggcagaaccttctccaatccagcaggaggccacagttcagactccagagccccctatggaggtagaaccttcaagccagcagctggtcccagctcagcatccagagtcacctaaggaggttgcagcccaacctccagtgcatgagatgacaattccaatagcaggccaggaccaagcccagattccagtatcacccagtgtcacatttcaacctttagacctgggacttaccgtcactccaaaatccactatggaggctgagtattctacaaccccaaggaagactacagctcctccaaaacaccctgaggtgatgcttccacctcctgaccaggttcaggctcagcacacaaacctaacaggtcatagttcaacctttgcacctggaacttaccacaactccgcaaccatgtttttttcctccaaccatgaagaactcaactcagcttccagagacacctacagaggttgcagctcaacctccagctcattatgaggtgacaattccaacaccaggtcaggatcaagctcagcattcaacactgtccagtgtcacagttcagcctttgggcctggggcttaccatcactccagaatccatgacagaggttgaactttctccaaccattcaggagaccccaacttagcctcctaaggaagttgtaccccaacctccagcatatcaaggggtaacagttccaacaccaggtcaggatcaagctcagcatccaatgtcacccagcgttacagctcaacctttggacctgggacttaccatcactccagaacccactacagaggttgaacattctacacccctgaagaagattcctcccaagcaccctaaagtgacacttccacatccagaccaggttcagactctccattcgaacctgactcaagtcacagttcaacctttggatctggaacttaccttaactccagaatccactatggaggttgaaccttttccaaccatgcagaagaccccaactcagcctccagagctacgtaaggaggttgtagctcaacctcctgtgtattatgagacgtccatgccaacacgaggccaggatcaagctcagcatccaacatcacccagagtcacagttcaacctttggatctggggcttaccatcactccagaatccattacaaaggttgaaccgtctacagccctgatgactacagctcctcctccagagcaccttgaggtgacacttccaccgccagacaagggtcaggctcagcattcaaacctgactcaagtcacagttcaacctctggacctggagcttaccataactatagaacctactatagatgttaaaccgtctccaaccacggaggagacctcaactcagtctccagacctggggcttgccatcactccagaacccactacagagattggatattctacagccctggagaagactatagctccacgtccagaccaggttcagactcagcatcgaaacctgactgaagtcacaggtccacctactgaactagaacctactcaggattcactggtgcagtctgaaaattacgcccaaaataaggctttaactgcaccagaggaacagaaggcctccacaagcaccaacatatgtgatctctgtacctgcggagatgagacgctgtcgtgtatcgatctcagcccaaagcagaggctccgctgagtgcctgtgccagagcccaacacctacaatggcaccttcaccatcttaaatttccaaggaaactatatttcttacattggtgaagatgtatggaaagcatacagttggactgagaaactgaatcttggttgcaatttactgacagaactgagctttggaacctttcaggcctggcacggaatgcagtttttacacaagttgtccggattgatggcttattttaaaaaattttcttactcacttcattggttctaataatacaagctccataattttggaaactgaatgactctgcaatgtagaaaggctataccttggcccggcgcggtggctcacgcctgtaatcccagcactttgagaggccgaggcgggcggatcacaggatgcccgggcatttgtagagaacactgccaaagaaaaaaaggctcaggagtccagccccaagggagctggaacagcctcacatggtgcaggggccaagaagttagccaagaactacttcatttcccaccccccatcaaatgatgccaaggagactaactccgaagaggactgatgtaaaatgcttctgcccagcatgggtgttcactgcacgagagcacttggccaagggggtgagtggggctgaaaatcctgctcaggctccatgctgagccacatacaaagtctccccgagacattgtggggcccttctggacagacatggagagcttctgaaagtcccgcatgcttggaattattttcaagaccccagggtagaatggaggttgcactattcgggccggccactctcctactggctgacaggatgctgcccgagatgaaacagggtgtgtgtgcaccacggagtcagtccaagactcctgttctcactcagggattcttcatttcttcttcctattgcctccacttcatgttattttcttcccttcccatttacaagtaaaactgaccagagccccaggaataaatggttttcttggcttcctccttgctcccatctggacccagtcccctggttcctgttggtcatttgcaaaccaagaggaccacaataaacaaatctctattttttttttaaatattaaagcattc

SEQ ID NO: 1538 - DNA, 3437 bp, Homo sapiens
atatatatatatctcgtaaatatggctaaagaatatggaccccctaataatgtggttgcatctacaaacatacattggttttactaataatgtgccattatataaagatgatcgccagtttaaacctgttttattaggttgtccccaaacttcttaatgtctcaaggtctgttaggtgctttctgttttcttttctgggtttcttttttctttccctttctcctttcccctttccttttcctccttcctcttcccctttcccttttccctttcctcttccccttccccctttcctctttttcctctttcccctctttgcctttccctttttttttttctttccctttcccttttgacaaagtgcccaggctggatgcaatcacagctcactgcgacctgcacctcctgggctgcagcaatcctcccaccttagcctctggagtagctgggattacaggcgcagaccaccacacctggctaatttttgtattttttgtagagctggggtttcaaccgtgttgcccaggttggtctcaaactcctgagctcaagcgatctcacccgccttggcctcccaaagtgctgggattacaggcgtgagcctggcctgctttctgttttcaagccttactaaatataataaatagggtagggttctgtctcatacatatctgtattcctgataagctagcgtagcatagtttctggctcttggtaggtactcagtaaatattcatggaataaataagaaagaaggatttggagtattagaattaattgtgacataagttaacttacaagcctccaaattatcaggtaggcctaggattgattggtcatttatatggagatttttttttttaacttcatttctgaagaaaagatttgatgctgctgaaatgtcagaattaagagtataattttgggcctgaaactgaagctcttttctaagaattgactgtccagtgcaaaaattaaactcacattcattcgaagaatcattgaagctttagaattttatacatgaggataccagcttttatagttactcaattggtcagtagctacacaaatcatctaattctgaactatctgtgtgtgtgtgtgtgtgtgtgtgtgtgtgtgtgtatatatatatgtatatacacacacacatacaggtttttctgcatgtacgtgatcctctaaaataatggttgatgtttattaagcttttctccccctcccctaaagtagagtcgtgatctatttgacatgattatttaggtacaaactagactatttaaaataaactgctaatggacttttaaatatgttggataagtttcaagaggtgggcagtgtttttaaagctcagtagatcagcatatgttataaaaaagcaattaaaaaattttaaaagtcatgtgtggcagggactggcttcctttagagttggattaattttttttttctttaatagctacagaatccagaagtcagatttcagcaacaactggaacaactcagtgcaatgggatttttgaaccgtgaagcaaacttgcaagctctaatagcaacaggaggtgatatcaatgcagctattgaaaggttactgggctcccagccatcatagcagcatttctgtatcttgaaaaaatgtaatttatttttgataacggctcttaaactttaaaatacctgctttatttcattttgactcttggaattctgtgctgttataaacaaacccaatatgatgcattttaaggtggagtacagtaagatgtgtgggtttttctgttttttcttttctggaacagtgggaattaaggctactgcatgcatcacttctgcatttattgtaattttttaaaaacatcaccttttatagttgggtgaccagattttgtcctgcatctgtccagtttatttgctttttaaacattagcctatggtagtaatttatgtagaataaaagcattaaaaagaagcaaatcatttgcactctataatttgtggtacagtattgcttattgtgactttggcatgcatttttgcaaacaatgctgtaagatttatactactgataattttgttttatttgtatacaatatagagtatgcacatttgggactgcatttctggaaacatactgcaataggctctctgagcaaaacacctgtaactaaaaaagtgaagataagaaaatactcttaaagctgagtatttcctaattgtatagaatcttacagcatctttgacaaacatctcccagcaaaagtgccggttagtcaggtttgttgaaaatacagtagaaaagctgattctggttatctctttaaggacaattaattgtacagacacataatgtaacattgtctcaacattcattcacagattgactgtaaattaccttaatctttgtgcagactgaaggaacactgtagtataccccaaagtgcatttgcctaggacttctcagcttctcccataggtagtttaacaggcattaaaatttgtaattgaaatgttgctttcactgaaaaagtgtcttgatgtttcagttatttttaatcgccataaaaaaatagaactatcttttgggtttatctgttttctcatgcacaggcaatacacaaatttaaaatgagttgtgagccaattgtttctgaagtgttttggtagttctattaagaaatagttaaatattgtgcttttcagagcctcagagaaagggggacggggtgggggggtggggcagcggaatctgtccttgatggggccagcttaaataatactggcaaccaagattctgttaggatttctgtgcatatagtgtagtaaagaagtatcattcaggggtgaaaaacaaagagccgttttaatgatgttgagtacatttggctgttttatagcctttttcttccctcccccaaagaattctgtttgcctaactcccaaactgttggggtggtacattcctttaggaccaattaaaacataattgagggtcagtgatacatttggctgactctggttcagtattctcttaggtgattatattctctcatgtacagttacaggaaattaaaatgttaaagtaacctaaaatgaattcagaccaataaaatcaagggaaatacaagttgattgcattacttctgtatgttgcttgctattaaaaaggttaagaggccaggttacccaccagtccttgcactgttctgacactttccccaggaggaaaacaagtacaaaggttacggtggaggcataagtagaagagattgttaagaagggtattcatgtgtctttgctctttctgctttatgcctcagtttggtttaaaaacttctgtactggcaaatggtggtattcagtgtgggatagtgtcataactaatttgacaatttattaatcataaaataacaataaatctctagcttttacacttg

SEQ ID NO: 1539 - DNA, 913 bp, Homo sapiens
aatgctactctgctgaagtgagcacctggacaacaaaatgagggattttagaagtttctcttgacccaaaaggaagattgcagcccagctgtaaaggaacccatgtctgctaagtaccctattatattttcctcatagttcttgccttgatgtttttgttccactcaggtctttgttcagacttcacctcctcacagggacctctcctgggcccctctctagattggcccctctgccactccaggtcccttcctgtgctttatcctgctctccacctgatgtcacataactcttttttttttttttttgagacagagtctcactctgtctccaggctggagtgcaatggtgcgatctcggctcactgcaacctttgcctcccaggttcaagtgattctcctgcctcagcctcccaagtagctgggactacaggtgtgtgccaccacgcccagctaattttgtttgtatttttagtaaagacagggttttgccatgttggccaggctcgtcttgaactcctgacctcaagtgatccacccacctctgcctcccaaagtgctgggattacaggcgtgagccaccgcacccggccatgtggtcatataactctttatgtgccattgtctctccctagactgttggcttcctgagggcaggcactttgtctttatatctccagccccccaaacatatttgccagtcaaggaatatttgttgagtgaatgactagtgtttcccaacttggaaaagaaagactagaaatattaaagaccttgaggatcccaagaggaaaatctgatgatgtcccaaggaaagagctgtgtgcctatatttggcagcactgactgaggaactgggagggaaacatttttttttcttctgtgttaattcggtacaataaagaagaaatgcc

SEQ ID NO: 1540 - DNA, 3726 bp, Homo sapiens
aagatgaacaattccctggattatctggcctaccctgttatcgtctctaatcacaggcaaagcacaaccttcagaaagaaactggactttggccactacgtatctcacaagaatagaatacaaatagcgaagcctactgttgataccaaacctccagtggcgcacacaaatcacattttaaaattgagcaaactacagggtgaacaaaagaaaatcaacaaaatcgagtatgaaaacaagcaactgtgtcagaaaatcgcaaatgcccatcgcggccctgccaaggtggattgctggaatgaatatttttccaagagcttaaacagagaaacaaggaaccgcgagctagtgagaatcaccatggaaaaccagggcattctgaagaggcttgttgatcgcaaaccccactatgaccgcagggcatctgagatagactggcagaattcaaggcgctatatcagaaataccacgagatatcttctctcccaaaatgaataggttactcaccatggaaaagatacaagagaaggccctaggatttcttggctgctcaggatctcaagacactcccgactggctgaatgctccatcttcagatgcttcaataaagcttggaacataaaatgcgtaagttacatttaggggacccaaaggctttatgttctcattccaaaatggggcaggcagaaggaaagatgcaatgagcatttttatttggggctatgaaaagaagttttaacgagagagagagagagaaatctgagagaactctttaaaacatacaccatcatcaccatcccgtggaagaagaaaagctggggtgagatcatccagccacaagtacagcactgtcaaaatggaaaacgaaatcacatgacaacatcaaggttcagaaaacacaaggaacaaatgccattagttcctctgtgaatacacacgatcggaaaagaatgcctcattgaagtttccatggactctgttcatttatagggagcagcagcagtgaaaatgtctcaaaacatacggtgagacaatgttgcaggcctgctatgattggtcatgctagttttcagcccaactatattagtcagcatttgccaaagagacagactcaataggagagagagagagagagagagagcgagagagatagatagagagtgagagagagagagaaagagagagagagaggagaggatttatttggggaattggctcacaagatcatggaagctaaagaagtcccaccacaggccatctgcaagctggagaccctggtggagcagggcagacaacccccaaagtggggcttagcctgcgagtgttcttggcttcacccaggaaagaatttaagggtgagccagtggtagggtagaagaagacagttttattgaagcagcagtgttacagctccatgactgctcctgcagtacagggctaccccaaaggcagagagttttgcagtcatagttatacgtacttttaattacatgtagattaaggggcggtttgtgcagaaattctagggaaggagtagtaatttttttttttttttgagatgaaatctcactctgtcgcccaggctggagtgcagatggcgcgatctcagctcactgcaacctccgcctcctgggttcaagcgattctcctgcctcagcctcccaagtagctgagactacaggcactcgccaccacgcccagctaatttttgtatttttagtagagacgaggtttcaccatcttggccaggctggtcttgaactcctgacctcgtgatccgcccgcctcggcctctcaaagtgctgggattacaggcgtgagccaccatgtccggcctataggaaagggtagtaatttttgggtccttgggtcattgccctggaaaggggtggtaactcctaggtgttgctacggtaatggtaaactgacatggcacactagtgggagtgtcttatggaaagctgcttccacccctttcctgttttagctagtcctcaattggatcctgtgtccaagccccgcctctggagtcaaggcctgcctcccacctcactgggatgctggtagcatggcttggtccaagcccaaaaacctcagaaccaagaagaaggtggtgtaactctcagttcgaggccaaaggctgagaacccactaggggggacaagggtgctggtgtgagtcttggagtacaaaggccaaggagcctagagttgttgtcccaggacaggagaggaagagtgtattccagttccagcagatagattgacatattcgcctcttgtctgtttttgttctttctgaatccacagcaagttggatgatgcctctccacattgagagtggatcttcccacatagttcactcagacttacatgctaatctcccctggaaacactcacagacacacccaaaaataatgctttaccaggtttctattcagtcaagttggcaccttaaattaaccatcgcactgactttttaaactttctattttgaaataatgaaaattcacaggtagttgcacataaaggaacagggaggcctcctgcaccctttacccagtctccaccaatgttagcatcttgcgtaactggagtacaatatcaaaaccaggaaactgacattggcatgatgcatggaacctatgcaggtttcatcagttatacatgcactcatttttgtacatatatgtatagctctatgcggtttttgccacatgtatagctttgtgtaaccacattcgagatacttaaaaccactattatcaaaagacactcttattgccacccttttagccacagtcacctcagaccctcaagcctaactcttggcaatcacaatctgttttccacctctctgttagttcatggtattacgtaaatggcgtcatgcaatgtatgttcatccttttgagattggcttttttcactcaggataatttccttgatgttcatccaagttgtgtgtgcctttttattgctgagtagtattccatggtatggacatgctacaatatatttaaccatacatccatcaaaggacattggggtagtttctagtttttcaaacattattattattattattattattattttgagatggagtctcattctgttgcccaggctggagtgcagtggcacgatcttggctcactgcaacctccacctctggggttcaagcgattctcctgcctcagcctcctgagtagctgggattacaagcatgcatcaccaggcccggctaatttttatatttttagtagagacagggtttcaccatgttgacccggctggtctcaaattcctgacctcaggtgatccacctgcctcggcctcccaaagtgctgggattacagacatgagccaccacacctggcctgattttttaaatagcaaattttgaaagttatttacatattataggaataagtcctttgcctgctatgcgccttgcatgtatttttctcccagtctataatttgtcttttcatcctcagggtctttgacagagtaaaatatttttatttggatgacatccaatatatcaatgatgaaactgttctatatcttgactctatcaatgtcaatatccttgttgtgatactgtaccatatagttttgcactatgctaccactgggggaatctggtaaggagtttacaggatctctctgtattatttcctacatgcatgtgaatatacaattatctcaaaataaaaagctt

SEQ ID NO: 1541 - DNA, 4229 bp, Homo sapiens
agaattgcgcatgcgcgcctgtctcccgggacgctagagcaggcggttcctgggctgctccgagacggaacctcactatgttgcccaggctggtctcgaactccttgtctcaagggatcctcccaccttggcctcccaaagctctgggattatcagcatgagccaccatgccaagccaaaaccaggagttcaatggtgtaaattccagtctgagtccacaggccgaagagcgaggagtgctgatgtacaagggcaggagaagatggatgtcacagctcaagaagcgagaacaaatttgcccttctatctttttgttctattcagcccaggatccctgggacaggaagcagcagcagttaaacagtcacacatcagtgctccagcaagtgaactgaggtgcatccaactaaggagcagatccaggaccagaggaaataaaattatctgggagcagggccaggaaggtgctggtctgcacggtcgatgaattttcaacgagcagtgattctgttcctcatctttcattgctttatgggacttcagggaatgaaagcataacatcctgctttcccataagttctctggctgctacactggcaccaattaaagacatgtctatgcaattaatcaaaaccaatttggaagcactctggcgctgctcctctgatgtgctgcctgctccacatacagtagttcctcagctgcggtgatggagccaggcacataggagcttttgatgaactggctgtactggccccaagtgttaactatgtcatctgacatgactaatgaggctccggacttgatccgcgtgagcggagcagccctgctgtctggaggaggctcagtttccacagccagcctgggaagaggctgcaacgtgcagggtacacactgcatcatgtcagctggagtcctagaggcctctagcgttggagctgggagtcatccatggagagggtgatggaaactgtgggccaggctctgtgttgggcgccagtgtgaatgtgacccaatttaaacttctagctcagcctcctcattttagacctgaaaatcaagacccagcaaaagtgtgaggcttgccaaagacctgaactttggagagagaaatgatggagaaagcagggtctctgccctagatgagaggtaaatatgtatgagggtaacaactggggcctggtgcaagtatacttcatcaagggttaaccataggcttcctttcttccttctgcaaacctttatcaaggggaagggttgcttgtgcccttgtcacctcagcaattccaagagcatggaatttggagtcaacagatctgtgtttgagtcccagccctactttgagttgatgtaatcttgcaaatcacttcatttttctgagccttggtttcctcagctgtaacattggaataggccatatactgcccagccagcctacttccatgagcccttctgtgactcaactgagttaatgggtgtgaaagtgtaagtaagagcctctgcacgtgttagttattattccagttttcatccccctaaggagcactggctgaaatctctggaatatggatccacagatagctttaactctcttcctcttcctgcctctttcaaatggacataaaaaccaattggtcatccgcctaaaatctcaacagctttcccagagagcccatgcatagaaagaggaagaactcaaccgttgtaaattaatgtcattccatacattgattgagcacctaccacatgccagacattgtgtgagggatcggagttggataagacatgtttcttggccaccttgagaagctcaccatttagtaggagaaacagagctgggcataaataactataatgtactgcagacaaatgcaattgccataggaaagatacaaatcaagtgttttgggagccagaggatggagtgattcattccccaaaaggagactggaaaaaggttcatcaacgaagtggtactgaaggatgggcagggcttagctctgtcaggaagaacgaggcagggcactccagacagagagaccagcataggcaaatgtatgaaatctggaaaggaatggtgatctaaaggacagaacaaaatcaagtaaggtattgggagtgagcatgaatcaaagaaaaatcactgcaccccaactctgaaactcaggcataaatgttgctgtttcactgttctctttgctggctgaggtcaccttggcctctgtccctcagtcagagaaaatcccacactggcccttcctccagcaaagccaaacccaagccccagccagcagaagcaaaaacaaatgaacagggatcaacaataccattagatgcaaaaattcttgagctgggaaggccaggtcacagccatacctccccagccagggtaagagcttgatcagatgtggcaatgacaccaaccctggagcacgatggcaaggaacttaacttaagcctcttggcatgggtcacaggctacatttttctccttcccccctcatccaaaagaagctagcttcttctttatgagtgctgctgtcagaatggctttggaaagcctagagctgcagctgaactcaaggcatggccatgggccaccccacggacttgtattttctcagtctttctatctttcgttgcgaattttttttattgtgcaaataatacagtgttaagaacggaaacttcaagaagagaaagaggaaagagagcatccactcacatgtcatctgtttccatttctccttgccctttcctgctgttgtccatgagcataattttttggccgcttttattactgatacaactacgtattctgtttttattgcttagccttgtatcatacaaggctacttattgccagcccctggtgtccacactggcttggcattgttctcccaagactgaaaaaatatgccaggtgtcatgtaaagggactttccgcagataacatgatcgccattgacaactggcatcatgtggcagaggaaaagcatcgaccgctctgccatcatgttgacttgggttggaatctcagctcctctacttcgaagctagatggccctgggcagatcattccatctctttgagccacagttcctcatctataagatggggatggcattagtaccatcttatgatactaatgggatcacagtgagaattaagtgagataccaaaaggggaatgctcaataaagagcagctctccttcccaacccttgaggggctgacctagacaccactctgctttttcctctcttgcccacatttggccacctcccctcccctggacccagcaggccccctgggtgagcccacctaaattatgacaggcataccagtctgcatatttattattcactgggtgaatttgctgtcttttacttaagtattttcctctgatgaaacttttgtttttgtccagtttttcactatttccaataatgatgcaaaaaaaaaataccagtgtgtgccgctcaccctatgctttaaaaattgtattttctcagaaacaatccccaggagtaggatcactgagatagaggatagaaacattttcaaggtttctgatgtgtatttccaaattgcttttcagatttgtacctgttatgctgccaccaatttgagggagggaaccacttaggctacattggaggccgctgggccctggtcacaaacttctgtctctgctttatttctaccattgtcttctcttaacatggctcctgaacttctcactctatgggacaattcattgtttgtccccaaaatgatgctcccatacttttgtgcctttgtacttcctattagtcttcaccacccttgcccaagaatattcttcctttaagataccctctcaccttagagctcaacctttgtggaactgggaacttctatactctcttcaagacccagttcaaacacccctctctctgtgaaccagttccaatccccccaagcagagttcgtcacttttgttataagtggtacctggaggaacccttggcatccaagtgttcaccaagagtcagccatcccctaacctcagctacaggccccagttttcgtgattctctcttctcttttcctctctcactctttgcaccaggcaatctcaccaggttttcccaactcatgtcctaaatattcttagatccacttatctttgcctcatggtcattgccagagctatcacctctccaggattcctgcaatggtccccac

SEQ ID NO: 1542 - DNA, 3732 bp, Homo sapiens
cacatggacccagcttcagttcacccaccgaaactttgtccgcctccctttatttttatttttatttttatttttatgtttttaagcataacctcccggagacggccaaggaaggcgaagtacttggatgagatgctaagttctttgcccgtgcgcctgcagcccgactccaatgcctcctcgagggtggtcctagggagctgccgggtgagggagccgctgaagcgttggccgcgccaggcttggcacgcgatgtccccaccgggtgctgagttccgtgctaatgcattatgtaaatgcttaaattctgcagacaaaggccacaatggagagcctcgggtggctccacaaagctgcccagtcggcgctaataggtttcatcagcagattctacgcacgcctgagggtactctgcggatgatggatgaaggaacattcattttacctggaagacgaagggggccatagagaccaggcgtgagggaaaacggctccccattatccttggaggccgggcctttgctgccaccctcaatctgccgtcagcgatctgtccccgtctccctgcttgccggtgacttttgttcattcacaaacgattgcgcatcacattatagtcccagcaaagaggagaaaactcccacaaacgagtcgaaagaggaagttggagaaggggagagagccagtggacgtggagatttttttattttcccagtttactcccaaaatttaaagaaaagcgcccaggtggcgagttgctgaaactcatcagctgcgcacagggagcttgctagcctctagcagcacagcagtcagcacccttcgctaaaatcgggggagtctgatagacctcggtgtgtacgttcaatgcagacccgacctcacactctgaactggctcctctgggccagttctgggaaagcgccaataccgaagcctcttgtgtcacgggccaaagggcccctggagatgaaaggaaacgtgataattaacggtttccgtccctggtggtcactaaggcggcttataatgcttatgactgcctccacctggggaacttgagggagacaaaagcatggagaattgcttcagggctccacatagctatatacatatatatgaattcttttatgtatataaaaatatatacatatgtatacattttatatacatgaaagaattagctatagactcaatagccttgtcccaccgcgttttggaagacgcaagcagtgccaagctgatttgcgtttcatttttctttttcccccggtggggtccactttctggccgccttcttgggaaagggctttacttcaaaaagaaaggaggtgagagcgatacgaggcatgaatctgtataggtggctcaagatgcagatactctgctgccatggaaatgaatagggcgcggagtgtccatagtttcttgaaggatatttttgcctctgataaattccaattttttaagccagaacgttatgccattaagtgatttattttgctcagtggaattgcctgaaagtaaccctctcctgctgctctgcgtgctaggacttcggcttccggaagcgacagcccgaaggaggcagtgaaaagtcttcatttgccttgtttctgaagtcttcccagaactcttatgcgggaagcggttagcgatgattaggcagcttttcaactgcaaaaatatagcgtggaatgagctcctctctcagctggacttctccccgcccccgaccccccttcgtcaaggaccattgcaaatttactttgcaaaaggcagcttctcaatgttctcaaaatctcatctatttctgtggttgagaggtcagtttttaatggctccctggaggcacacttcataaaaatacgtttacacactaataggcttatgcccccaataatattttcctacctgcctcaattttagctaaacaaagggaagactatagctgtaggtggaaaggcccaagagaaatctaacattagttcttctaaatcagaagatgtcacatggagataggagaaattcctctaccctgagtagctggagagacctctggtttcccggaccgttaagaaaggtggctacattctgtgataacgttctgcgtgcaaacgccttaaatacatgcgaatgcgtcaccaggtctggcggcgagatttagaaagagcctggactttcctggtcaacactcagacagactgtgctgagcggtcgactcccactttggccaccgcttcccctacccgcctgcagaagaaggaatgacagctacagtgtccccgcagggtggtcggccccggggcagcgccctcgcacctgccgcgctcaggcccacgtccatttcccccagtaacgcatacaggccaagcaagatccgcttgggtctcagcgcagaagaggccgaaattgaggctcacaggtcccagcttacttctgcacctcatcttcccacggctacctcaccagaggtccctggagagtttctgttcttaagaactaggacagggaagaggtgcagagttccacagaaacctaacgccctagaaggctaacagatttcccacctgcaggctttttatctctggatgccccctgctcctcagagaagtctttggatggaagacatgatcacagtattagtaataataataactaatatttacggtgtgcttcctgtgtattaggcactgaactaagcattttcttatttaatcctcataaccctatgaggtattatctccattttacacaggaagaaattgaagcttataacttcgtctagtcagtgtgctaatgtgtggggatcaggacttaaccacaggtctcttttgccccaggtcctttaccgtcactgggaaggcctgcctttccatcagtctaaccaccgattacacatcatttattgaatacctgctatatggcaggtgctatgaccaaccctagaggttcaataaaacacctcaccctaaacttagatcccacaatttctttgtaatctgtaattaatttcccctcttctctcatgtcacgaggtctaatttttaacatcattttactgggatagtgagaatagagctggttaaggttctgattaatagtatgccatcactaggaaggctacaaaatcctacaccctccttagggtgtaggatgaatctggggtggggaagttcaatgtcttacccaagggcacagagtcaggagcagaatgcaggcccagtgttccagacttcattatctcagattttcttttacttgagctctaggcctgagaaatttggttttctaaactgcatgttttaaaattcttgtccttcttaggcattactttgttgttcttggatttttttagattactaaatcattgggctataaataatgataatcttaacatttgtttttttcttagctatccatctatattcagttcttttacaaatgtccaggtctggtcccctggacataaataggggccctaactagctaactccaaaggtgtggggaaaacaaagttgtttgtgaactttgttctgacagcagaggaaaagaagcagacacttctccatggagcctcctaactcagtgctacatgcagtgttaggccaatagggatcaattaccccctgggaggagattttccctggcttccttcctggtgactagcatcttattatgaggacctcactttagcctattgtctttagaaagattaaaagctgcagcttc

SEQ ID NO: 1543 - DNA, 3930 bp, Homo sapiens
cgggacatggatgtatttttctccccacagctctgtgctcaagccttgcagagggagatggcagagaggaaggctgcgggcaagcagcacaggtaggtgattgtgatggacaaattttaaggatgtttttgttttaagatgaagctttgactgtctagtaaagaaaacagtgttttaattcttctacaagtcaactctttcactgtcttcaagacaggaaatgatggaaaagcagggagtgctggagagacacatgagtcaggaggcagcccagggacagctagggctagagaaccctttctggagaggtaggagctctctgggaaggcacccacttaacttctgctccacaatccacacccctgcttctcctttctggggtgagggcttgggttgggtaattgttatgtttcctggaaacagttccaagcacttactaaagagaacagttatcccgctgggtggcaggaccgtttttctcacgtgccacagctgaatgactcttggctggtcccctgtgaatagcggagcacaggcccctccactgactgtggacatcattccaccctgatgtcttggttacttttaactgaggggatgagcctagaaggcaaatgggtcagctccccttccaaccttgagtcagtgggaaggctttattttttttattattatttgagaaaagtaacactaataacattttagaatgggagccataagtgctgatgagagcagaaattttctggctatgtcttcatggatcaatatttcttcttttcttaaagaatcagaagacatagccagaaaacagagaagacaaaggtaaatgctggagtcattttccctctgcctagttcaggacagttttgtcttttcctacagcgccctctcctggcctgtcctctgctctctgggttctgtggtgccttttctaactggacttttttgaaagcaaaatcttccccatgagctttcaggcttctccatttccagctggtcatctttggtggcacctccagaagccataaatgcttaagggccaagggctgcagggctgtcactgttctgtttccagaaataacatgagaggatgccattgaactccactgaggtaggtcttatggcccagtagaccctgactgattccttttactcaagatggtgtgggatcccctttccaaaatatgtggggcttcctttttttttttttttgctgtgattttcttttctgctatgaggtaagtgattaaccttcagaatatccgccgtaatcccagaagtgaaaactcattgatccaacattaatatgtgctttgtgcaattttgaatgttctttggcaaagtcaattccataattcatcacagtcccatctctgttgttaactgtgttgagcaaaaacgcccccaccctcacccagtgttgcccttgatctaatattctaagtgtcagaggttccatattttaatagaaaatgtgccctggctgtgaggtagtggagagtgaacgtcactcattacctacagggacaattctcaatgaaggccttaaatgatgctcaattaagctggttctcatgtggcctctgtgtcttcgacagctgctgaatcctctgatcacacacgatgggacttgtacacttgaaatcaaacatatttttaaaacttctgttgttgagaattcccacctcatttttccatggacaaaattattctttatgtcatagtgcacttaaaatttggtattacctagaagttaaagaaatatgataaccgtgccaaactgctatctctaggtaagattattccgtcagaaaaccctctcccagttcccctgtagctcttcaggaatccccatctccccatagctctttgtgcccatggatggcgcttccaaagtagagaagaccgtttgtcaagaagggaagcagaagggggacgagagggtcttgcaggcagagctggaatcgacttccactctgcttcttgcaagctgtgtgatgctaggtgaaatttctccttcctctggagcctctattttcttagatttggagcagggtggtcacactgaccttgtagatttctgagaatcagagacagcacatgaaaagcctggaggccattctcttaagagtagctgtgactcatgtgtggacaatgggcttttcatgcttctgtttctctctgtttatctgatgcaaggaacatgctccggtgatgatggtgagggaggaattagaatagacatagacgcccctgtgtcagaaacatgcttctttattactgggttatgactctgtcttcccagggacaggccccagcctgcgtacatttgcagacagagtggcgtgtggggatagcagtttgtccccacgacttttcttcactcccctgctgttggaaggacccagttgaagggacactttatggcattgatgctgccattttgaaacctggaggagggaaaggtgcaagggactatcacctgaggcataaggtgcagcttgtgttggttttggtgtttttgtgtccatcatattcatatatttcaaaacattttcacctcctgacttgtaggtcaatgtggctacagggaagcctcatcctttctcagaatggccctacttgcccgatgtcatggctggcccttcaggaccattgatgggctgccagccgcctcctctacctgggtgttgtctgggaactcaaacactccctccatctgaaggttttctgggacctcaacaaactcctccactggagagtcctctgggaattcaaccacctccactcgactgtcctctgggaactcagccacctcctgcactagagagtcccctgaaaacttaaccacctcctccactcgattgttctctggggccttatccagctcctgcagctgtcagtcctccaggacctcatccacctactgcagctgcctgtctttccggacctcatccaccacctgcggctgtcaatcctccaggacctcaatcacctgctgcacctgttggtcctccatgacctcattgacccacggcatgcatctgacctcatccacctcctgcagctgtcagtcctccgggacctcattcacctcctgcagctgtcggtcctccgggacctcatccacctctcgaagctggtggtcctccggaacctcatccacctcctgcagctggtggtcctccgggacctcatccaccttttgcagctgttggtcttccgggacctcattcacctcctgcagctgttggtcctctgggacttcatccacaccctgcagctgtaggtcttctgggacctcatccacctcctgcagctgttggtcctctgggacctcatccacctcctggagctgtaagtcttctgggacctcatcaacatgctacatgtgtctgtcttccgggacctcatccacctcctacagctcttggtcctcccagacctcatccacgtccagcatgtgtcttccctccaggacctcatccatcttttatagctgccttcctctaggacatcatttacctttttgttctgtgaggcctctgggacctccgactacatctccacttagtaacctctggatcctcagccaccccttctacctgggtggcgtctggcccctcaataaccaccttcacatgaatctcctcggttacttcaataatttccatttgtggcccctgggacttcagccacttcctccaccagggtctcctctagtacatctgccacctcctccacttggctggcctctgctatctgaactcctccaggacctcaaccagctcccctacccattgttgcctgtaggacctcgaccacgacctccacatgtactacttggtatatttatctgaacagtatgaactgagttgcaaaatggattcatctttccctttctgaatgaatagaaatgttacagattgt

SEQ ID NO: 1544 - DNA, 4089 bp, Homo sapiens
agaaatcaaatagcagctcccatgcattggcaccgtccacagtgcctgaccctgtgctaaatgcttttcagtcttcattgcgcttgaatcctcacaataatcctgcaagacccttcctggatatggtgtaccacgcgctggacagcccggatgatgattaccatgccctgttcgtgctctgcctcctctatgccatgtctcataataaaggcatggatcctgaaaaattagagcgaatccagctccccgtgccaaatgcagccgagaagaccacctacaaccacccgctagctgaaagactcatcaggatcatgaacaacgctgcccagccaggtgcccacttggggtgttgtctgtccacagggccacgcagttgtaggaagcagaccccactgggagcctgagccctgggtgctaggcctgagccttctgagaatccgggcccatcccaacctctccctctgcctcccaacccctgcatcctgggccagccctcctgcctgctgggactgtgtcttagctctgggtctccttttgccatcccatcccctgccacttggtaaccatctttcttcttccacaccccgcccttcttttgctgagattgtcaatgttttcgcccccaccccgctatgtctgggtggcccaaggtaatattatgagaaagaactaggctgacagtggagtgaggggagaacattcgaaggtttaacgggccagtagacgtaggagacagagttttgttaccagcaacagttgtgggtaggtatggaaacaggtaggagtgagaatgcgcttggagaaaaactcacttggactgggcagctgaagagaggttacgctagtgctggggctgagtggggtggggccaggagagccgatggagccgagaccacccagtccttggtcatccctggggcttgtattatgtttgggaagacctattttttgtgatagcgctttttcttttctttttttttttttgagatggagtctcgcactgtcacctgggctggagtgtaatggagtgatctctgctcacggcaacctccgcctcccaggttcatgcgattctcctgcctcagccttctgagtagctgggattacaggtgcacactaccacacccagctatttttttgtatttttagttgagacagggtttcactatgttggccagactggtctcgaactcctgacctcatgatccacccacctcggcctcccaaagtgctgggattacaaggttgggccactgcgcctggcctgctgtttcattttttaggcagatccccttttctcacttattttcacctgacttacaatgcattaacaaagggactggcagggaggtgggcagaggggtgtatctgcctttagttttttcccagtgacctatcgtggtctctgatgtttccaaggccttagaggcatagcctgaaggcctcctcctctccacagtgggacctttcaccagaaataaacttgaaagacccacagaggagtttgcataagagcagttgtccttcagtcagtcagttacagatgcttctaggagagatgccagatgcgggttttggctttctgagcacctgcagtctaccactacccagctatgagacctaggacaagtcacttcacttttctaagcctcaatctttccagcactcattgcaataggtttttatagagattccttcaggacctatataaagtgtttggcactgtgcctcgttcacagtggtaagtaagtaatagcatagtaagtaagctgtgttagagctctcttggtcttgacagaaacccgactcactctggcttaaacaatacaagcagacaaagctgtgttagcttataaagactgctgaggcctagcttcaggcaaagctggatccaggggctcaaacagtatttttccacctttggcctctgccaccttctgggttgacgagataaatgccagcccctccagctagccctttctgcactgagactctagacttactctacgggagacacttagatttgaacagtctagttggaagagagatctcgaagtgatatttgtagaatactttactaagattaaaaatgctggcaagggtgaggaggtggccgatatagattataatgcttgtgcccctcagggcgtcaccacggtcctctgctcagcccggcacaaggagaatttctcttaacccagcagttccagcagattgtgaggttgagccttactggctctgactggctcccttgcctggttcttacctagtcactgggaccaagggaatatggagcaccccaactggccaggtgatgtgcccaaccctggaacggggaaggaggatcagctccacccaaatcacatgacccagagtgggactggcggctctctaaaggaagtgggggtgcagggccactttccaggcctcaacagtgtttagtcaccctctttttcctgcaccctgtcagtaaagggacttcagggaagtatttggtataggtagttttgatggagaacattgaattctaactgatggggaatggtttgggcatggggggttcccactgtgtccccactggatgttgggagccatgagcagttggtctatcatgtgacctgctagcctcaacgtggataggcagcagtcttgggtttaagggcgccccaccctgggtgtgcaaggcttaccctggtgtgctctgcagatgggaagatccggctggcgacgctggagctgagctgcctgcttctgaagcagcaagtcctgatgagtgctggctgcatcatgaaggacgtgcacctggcctgcctggagggtgcgagagaagaaagtgttcaccttgtacgacatttttataagggagaagacatttttttggacatgtttgaagatgagtataggagcatgacagtaagtgaggggctgggacacacttgggctggtgtgcgcctgtgtccctgccaagctccccctgcccatcccagagggagttttttgacttagggctttgtgaccaaatagcacagattgatggggaagcagatttagaatggtgtcttgtgatccccaccactgttaaaatttcagactatattctctccctctaacatgggaggtgtccgatgaatcaggatgattctctgctatgaatagtaattttggggacagtatcattttattgaggacttactctgtgctggatgtatatagcatgctgtacagattatatctcttcatcctcacatcaaccaacggtaatagctactgccattgtccctttcttgctgaattagtctcttctcatactgctacgcagaaatacccaagactgggtaatttataaagaaaagaggtttaattgactcacagttccacattgccggagaggcctcaggaaacttacgatcatggtggaaggcacctcttcacagggtgacaggagagagaattagtgcaaggagaaaagatgccagatgcttagaaaaccatcagatttcatgagaacttactcactatcatgagaacagtataagggaaactgctcccatgattcagttaccggcacatggttctgcccttgacacgtggggattctcatgtgtctcaccattcaaggtgcgatttgggtgaggacacagagccaaaccatatcacttgctaatgaggaaactgagtcagagaggtctagtgatgtacccaagtctgcccggccggtgagtggcagagccacgcttctagaggaggacagcccagccccgcatcccccgtgcttctccatgtattatgtccctgcctccctgtttgctgctccactggaatgtttcagcatgcagctctccctccagtctgtagtgccagcacatgggcttccttcctcctcccgcaggcagaatcgcgggaagccataggttcagaagatcccagctttctctgctttgcgcgtttgtctctgttatcccagcacctgcccttggctaggtactccataagtacgtgataagtgatccttcttgtggatattacccaccaaagcatgtgtgatttgggaagtttataataaacctaagtgttttaagtgtcaaaaag

SEQ ID NO: 1545 - DNA, 3685 bp, Homo sapiens
taaaaaatgatgtaacagctaatttaacaactaaaaagcaatcttaataatgacttaggaattaagaacatggagctctaaatatttttaatatataaaaaatcctgaggaacagctttcttccctttgattctattccactgactgccttctgtttacacaatgagagtgatgcttacattctttatccccaaaccaatcaggatcagatttgcaaactcatcaggaaaaaatggaagaaaagggagtcctctgaaatcaagacttttctactgcttcagtaacattaaaaataaacagctaggagaggtttttttgtttttgtttttgtttgtttttggcttggggagtgtgggtggaagggggttgtctaaatggtgtgcaaggaaaatcaatacccaactaacatataaacatgaaggattataccagcaaaaatttaaggtacccagattctttctaatttttttctgtttataatttttcataatgaaaagttgggtacattaattaattatacctagtctctatacatgaaaaaaaatctagtagaagtatggtttacagtgctacaatttaagcacattaattgtgatccatggttatttactctacaaaaattacttagtgctaaattactaaaacttgctagcatttcccttttaaaaatcacactggattattttatcgtttctgctggtttttgttcatgttaacagctcatttccaaatatatgttaattcagtagaagttcataaagaacttaaatgctataatgctaacaaacccctgtatcagaggaaccagcccccaatatttcagcataggttctattttccataagtgttggccagctgagaaataaaaagagtacaaagagaggaattttacagctgggccgctgggggtgacatcacatatcggtaggactgtgatgcccacctgagccttaaagccagcaagttttttattaagggtttcaaaaggggagggggtgtaagaacagggagtaggtacaaagatcacatgcttcaaagggcaaaaaggagaacaaagatcacaaggcaaagggcaaaaacaaacatcacaagacaaagagcaaaagcagaatgactgaaaagggtctatgttcagcggtgcatgtattgtcttgataaacatcttaaacaacagaaaacagggttctagagcagagaactggtctgacctcaaatttaccagggcggggtttcccaatcctagtaagcctgagggtactgcaggaggccagggtgtatttcagtccttatctcaactgcataaggcagactctcccagtgcgactgtttatagacctccccctaggaacgcattcctttcccagggtcttaattattaatattccttgctaggaaaagacttcagcaatatcttccctacttgcacatccatttataggctctctgcaagaagaaaaatatggctgtattctgcccgatcccacaagcagtcagaccttatggttgtcttctcttgttccctgaaaatcgctgttactctgttctatttcaaggtgcactgatttcatattgttcaaacacacatgttttataatcaatttgtacagttaacacagtagtggtcctgagtgacatacatcctcagcttacaaagataacaggattaagagattaaggtaagagatgcataagaaattataaaagtattaattttgggaactgataaatgtccatattaaaatgaaatattcacaatttatgttcagagattgaagtaaagacaggcataagaaattataaaagtattaatttggggaactgataaatgtccatatcaaaatgaaatcttcacaatttatattcctctgctgtggctccagctggtccctccattcagggtccttgacttcctgcaacacccctgtctaggtctgaacacagacaaaaaatgatcctggagacagatattgttgttaccttagagttgggttttcatgaatgtatttgatcaaaaccagctatactattaaataataacagaacaccctcttctaactagttacataatctttcctaaagactttctcctttgttttttcagtccacattcctgtaaatgtggcaggaataagaaaaccccagtttcccgctctcacctttgaggcccccgacaaagacagaaagaaggagctatccaggagctgatcctccttgcaaagctgtgccttgcagagatgcacgtgtgcatttcagctacatcatgccgcgctgttgtaatactgtataaagacctcaatctatccagagtatttttatataatgttggatgagttaggatttgtaatgctgttgaagtttctgggaacacataatatgtagccagtttaacaaagaagctgtcaggtgcacagcccttcctgggtttttttcttgtgttccctgtggtctctgacccattaggctaaagagagacaagagaagcccccaacctgattctcatgacagctccatcaagaatgtgggatgtgccgaccaaggatttgagaaagttgtacagaaatgtgttcatcaaatctggtcaagggactaagctcctagctgaccattcattctgaagattgcatggaggatgaacatctgggaatcctgttaatgagaaggctgaatcacaggcacctgggccaaagggtgtgagcattcatgttctctgctcaccttggtttccgcacaccttcgcaatgtgaacaggtcaggagtccctcccgtccacctcctctgtaacagctggggttccaggcatggtttaggccctgttccagcaataagaaccaatctgctgtacaatctgaggacttggctgtgttatttacaaaatgatgctgtggttctgagattatttgggacatttttggctctcctttagtggacacctagagccacagattcccttctttactaaacaaatcccatggattctgatttctgggtcttaggattttaaaagtgaagggatatttttcttatatttgtgagttcagttccgatggtgcccgtggtcaaaagcgaaaaacatggacaattcctattcattcttagcactttgacatgtcttggggaaaagcttacattttaatttaaaagaaagatcaattatatccatgcttaacaggatcagcaggagctttataaatgactttacagagactaataagggatttgatctttctttttttgttatcgaggcttttgaaatgtggaacttgtgtgttctgctttatatgttatattcaatatcttttcagatgcagtctatattttatgctgagttttaaaaatgaaatactttatgcaaacaggcaaaattggtaccaaagggaaacattaaccatgaggaagagcatttttctaaggagaacaggtgacaatatacacatgtgcgctaatcgtaaaatgagcatcttagtctttaaaacacatcagaattgaatacgaataatctatttgtcgatgaaataaacacaactctttgaggatttgagactacattcaccctttattcacagtcacttgcagttttgcttttctctgcatttctctgctgtaagatgactgttgcattgttgaattgtattttgagtggatatttttgtttggtaacaattaaaattttaaatcgtaaaaaatg

SEQ ID NO: 1546 - DNA, 4455 bp, Homo sapiens
tttattttatttgtgagacagagtcttgctctgtcgcccaggctgaagtgcagtggcgccatctcggctcactgcagtctctacctcctgagttcaagtgattcttgtgcctcagcctcccaagtagctgggattacaggcgtgcatcattacacctggctaatttttgtatttttagtagagatggggtttcaccatgttggtcaggctggtctcaaactcctgacctcaagtgatctgcccgccttggcctcccaaagtgctggtattacaggtgtgaaccattgcatcccacctattttttattttttgaggcagggtcttgctctgtcatccaggctggagtgcagtggtctaagcacagctcacttcagcctcaacctcctgggctccagccatcctcccaccttagcctcccaagtagctgtgaccacaggtgcacaccatcacactctgctaatttttgttttgttttgagatagggttctcactgtgtcacctgggctcaagtacagtggtgtgatcatagctcactgtagcctcgaactcctgggcttaagcgatcctcttagcctcccaaagtgctgggattacaggtgtgaaccactgtgcccagcctccatttttttccagttgaagaaactaaggcttaaagaggcttaaataatttgtccaaggattcacatttaactaagtagttaggattgcactcagatttgtcctactctagaggccaaaccctttagacactatactataacagctcttagaactagagaagttggcaagagcaggttttgtttttaagatatattgactttagagacacgaattgtttctattcttcataggaaagtactagttcagaatatagcagtagcccaaaggatggtagtggttaatctggaaaaatggaaaaggaattcaggaaagacttaataaagggcatgtgatacttgaaagatgagtagttgatatactgaaagtggcaacgacattcctattagaacagcatgacaaaggacattcctattggaaagaacagcatgacaaaggtacaggggcagaaagcggcataatatgttaggtaaatgaaaaagtagttaagtgtggctgaaatgtaggaggcaaagcagggagctgatactagcagggcagattatgaaagaccttttatcacacatattcagtaggtccttttcaatgccaaatggttcattttgcttgggcagaagtgaactgaccagctcctaaataagcatgtcaagctcatttagcatgtcagcttgttttgtgggatgatctcacccttgcccctgaaattccagcttccaactgagtggctgaagataagtggactagagtttggaacagatctagattagcttctagaggttccatttgtcaaatgagaagtctacccttccattttcctttccagtagaataaataatgcttggaaacctcttgggtgggagggggaggggaggaaaagtaaacttttgttttgatttttgtagccctcccaggcccaatacttcaaagcatcctacctctgctcaatatatattacttggagaggattgaggaaactgccctcaagaaaggcctctcaactcaggccatctggcgccgactctgggatgaactgatgaagacaaggccttccagtttggaaagtgtgacatgttggcgagccaagtttatggaggcctttttttcccatgttctacgtgggaccattgatgtgtcttctgacaggcgtctttgtgatcagcggttctcacctcttctgcacagctcccgccatgtccgacagctcaccatctgtaacatgctgcagggtgcaaccgagctggtggctgagcccaaccgcagggttctggagaccctggccagctccctgcacactctcaagttccgccacctgctgttctctgatgtggctgctcagcagtcacttcggcagctgttgcatcagctcattcaccatggggctgtcagtcaagtgtcgctatactcctggcctgtgcctgagtcagcccttttcatccttattctcaccatgagtgctggcttctggcaaccagggcctggtggcccaccctgccgcctctgtggagaggcctcccgaggccgggccccatcccgagatgaagggtccctcttattgggctcacgtcggccccgccgggatgctgctgagcgatgtgctgcagccctgatggccagccggcgtaagagtgaagccaagcagatgcccagagctgcacctgccactcgggtaacacgccggagcacacaggagagcctgacagcaggcggaacagaccttaagagggagctgcaccccccagccacctcccatgaggctcctggcaccaagcggtcaccttctgctccagcagccacctcctctgcctcttcttctacatcctcatacaaacgggcaccagctagctcagccccacagcctaagcccctaaagcgtttcaagcgagctgcagggaagaagggtgctcgcacccgtcaggggcctggtgcagagtctgaagacctgtatgacttcgtttttattgtggctggcgagaaggaggatggcgaagagatggagattggggaagtggcttgtggagctttggatggatcagatcccagctgcctggggcttccagcactggaagcttcacaaagattccgcagcatctccaccttggagctattcacagttccactctccacagaggcagccctgacactatgccacctgctgagctcctgggtgtcactggagagcctcacactctcctacaatggcctgggctctaacatcttccgcctgctagacagcctgcgggccctgtcaggccaggctggatgtcgcctccgtgccctgcatctcagtgacctgttctcaccactgcccatcctggagctgacacgtgctatcgtgcgagcactgcccctgctacgggtcctctctattcgtgttgaccacccaagccagcgggacaaccctggtgtgccagggaatgcagggccccctagccacataataggcgatgaggagataccagaaaactgcctggagcagttggagatgggatttccacggggagcccagccatccccactgctgtgctccgttctgaaggcctcgggttctctgcagcagctgtccctggatagtgccacctttgcctctccccaggattttgggcttgttttgcaaacactcaaagagtacaacctagccctgaaaagactgagcttccatgacatgaatctcgctgactgtcagagcgaggtgctctttttgctacagaatctgactctgcaagagattaccttctccttctgccgtctgtttgagaagcgcccagcccaatttctgcctgagatggttgctgctatgaagggcaactccacactgaagggcctccggctgccagggaaccgcctgggtgggggccagaccctggggagggagaggggaaaggagctaggcctttgacctaaaaactcactggataaaggcaaagacctctccactgggaacgtgggagttggaatacagatatttctgtgctggggcttcaggaaccagcagggctggttctgccagccatagttgggttgggatacccttgtcccctgttcttgggtggaggtgataggcgttctccccttctctccagggaatgctggcctgctggccttggcagatgttttctcagaggattcatcctcctctctctgtcagctggacatcagttccaactgcatcaagccagatgggcttctggagttcgccaagcggctggagcgctggggccgtggagcctttggtcacctgcgcctcttccaaaactggctggaccaggatgcagtcacagccagggaagccatccggcggctccgggctacctgccatgtggttagcgactcatgggactcatcccaggccttcgcagattatgttagcaccatgtgatggggcccgtacctcacagtctcatgctcggtaccatcagcttgcaggggctgaagcatgggctgcccagaaccccaaccaccagttctatctttctctttctgtcaccttttttctcttttttccttcttcccttgcactgaggtcctggaggccttgatgaggcccagcaaacaggcattctcacagctgggtttatagtctttgggccccttactcagtatcctgggaaccctgggccaggaggttacagtggtcatcataattgctgaagagatcccctcccctgcccctgggttcctgccttccctcctcaagcaggcacccaggctttagagaagtatagggggcttcttccctgctgggcttaccacactgctctcaggcctcaaaccctttcatacctttattcttttttttaaccaaaaaagtttttcttataaaataaattttgggcaaac

SEQ ID NO: 1547 - DNA, 4156 bp, Homo sapiens
acacagacacatggatgcacagacacacctacagacatgcacacacacacctataaacatgcacagacacacctacagacacctacacacagacacgtctacacacacacgtacacacagacacacacacagacacccacacacacacacagacacccacacacacagacgctgacacacacagacacgcagacatgtagacacacagacacacagacgcacacagaggaagagaaaaggggagaaacagggaaacaaaccagcctggaaaaggctggggtgatggagacaggacccctcagagagccgcgtgcttttaaagcaaaggcacagagaatacaaaagagccggtgggaattaaaaatgcaacaccggggttgggatttaagtcaaggaaactgcccagaagggaaccctggggatgggactgtgggtgtaaatccgaggtgccgcacagcagggtcaccgtggagccccaggcgagaggggaggcccggggagatacaggcacagagccggaggaaggaggtgtggtcctggccagccctgggtgcccaccgaggccactagcagccctccagccttcctggggacacacagggctggaaccggcccaggaggctcccagccgggaattccaggaattccatacctggcctaccaggtgtggaggtgggaaaaggtgtggaggtgggaaaaggtgaggagacatccgtccctccgggaagcctggaagactctcacaggagtgagctgtcagggaaaagatgcagcagctgtgagcttgcagctgacctgatgactgtgtgccccagcctctccagctgtacagcgtcagcctctctccagctgcacagcgtcagcctctctccacctgcacagtgtcagcctctctccacctgcacagcggctgggagcagcagcctctccacctgcacagcgtcagcctctctccacctgcacagcgtcagcctctctccacctgcacagcggctgggagcagcagcctctccaccggcacagcggcagcctctctccacctgcacagcgtcagcctctctccacctgcacagcgtcagcctctctccacctgcacagcggctgggagcagcagtctctccacctgcacagcggcagcctctctccacctgcacagcgtcagcctctccacctgcacagcgtcagcctctctccacctgcacagtggctgggagcagcagcctctccacctgcacagcgtcagcctctttccacctgcacagcgtcagcctctctccacctgcacagcggctgggagcagcagcctctccaccggcacagcggcagcctctctccacctgcacggcagcagcctctccaccggcacagcggcagcctctctccacctgcacggtggcagcctctctccacctgcacagcggctgggagcagcagcctctccacctgcacaacagcagcctctctccacctgcacagcagctgggagcagcagcctcgcagggttgctgcaaagatggagtttccacatgtaatgtcaggacagcacccgccacacactgcgcagtctgcagggctgtggtgatggtgactgtgggggtgacgggaggcagagagctcagggacagctcaggataggcgggaacacaagcacatgtgaaaagcaaggcgatcgccaactctgaggaaaacaaatgggcaccacccggggaggccgggcagctctgccccaaacatcattcgtgccgggatgatatggacagggcagcgtgtggaagacaagcccctttcaccgtccacggggaatttctgcactggaagctccagaagcagcagcatcaggtgctttttggaaacaggcagttagaaagcggaagcacagcacccacccccccacccaggaaactgcctccgtctcttctgctgcagaagaagcagcagctggaagaggcagccaggtgctgatttcatcgtaagcctgaggcctcctttgggcttttctaactttatgtccttatgatgttcacaaataactaaataagttgtgagctgttatttcttgtcattgaaattaaaggtgtttttttttttaatttttttagacgaagtctcactctgtcgcccaggctggagtgcaatggcgcaatcgcggctcactgtaacctccgcctcccaggttcaaacaattctcccgcctcagcctcctgagtagctgggattacaggcgcctgctgccatgcccggctaatttttgtatttttagtagagacagggtttctccatgttgaccaggctggtctcaaactcctgacctcgtgatccgcccacctcggcctcccaaagtgctgggattacaggcgtgagccaccgccccggactgaaatcaaaggtttcttaagcagctgcccgctgtgtgtgtggtgaacccggggcctgaatgcaggtgggacgcagcctcccaagcgccgggagccgctggctcctcacgcctgtcgatctagcaaatgtgctttggagtctctgacggacgcgattctgaatccagaaggaaagcgtctcactccgagatgctgactgacgtgtcctttatagcggtgggacttgggaagccggtgacgcccggtgtggaggacggttgtgacgcccctcggtggggacacggtgtaaaggcggcgtggaaacttggtgcacgaccttacaataaattgtaaaataagcgttttacctggtgagatgaaaagaccggcaggagacggcaccccggtaggatgaacagaagagacttttaaacctgaagaaatcatccaaaaagcgaccacatgttagtgtcctgctgcgagttctccccccagaatccaagcttggccacgtggggccctaggaaggtactgacattgttcgaagagctggtgcctcccggccggaggccgctgtcaaaggacgcacgacctgtgggctcaagcagccgtccgtccaggacttgctctgcggaggcagacctggtcccaggccacggagctcgtcccagggctgcccagccctcccaccccaccgggtacacacaccgttccccggcctggcctggacccgagcctctcgcacggtggcgctggggtccgggacccgcagagcaggctcagcctggccccaccctacccgatccctgtccagtcccctccccagcctcctcctctcctgagcagcctcccgaggggacccgcaggcagggcgtaggagggcggggccgagcccactggaccccagctggtggccgccggcgcttcttacctgcccagcccacaaggtcctgggggcctgggccaggaaacaacagtggtgacctggcaaccgtctcctggcaacccccacccagccggaacccagaggtgagcttgggttttcggaggatggggaggggctgctgagtggcggggccagcccgggaagccgggctgagggctgaggctggagaagggcacagcctcatgggcacagctgcctcccagtcactgctgggactgcctgagcctgagccccagttgctgcccctccgcccggccctcccaggatggtccctgagccgtctctcaggccccacccatgctcagcaccccaggacctggcccgggccaggctctgcgtgcaccctggtgatgttggctggatacacggctgccgatccctgagcattctctgtgcttcacgtggtcgggtccctgttctcactccacagcggacgaggtgccactgtgcccccctctgcaaacaggaaccgggggctccacaaagtgagtgccccccagagggggactcacatctatcggtccaaactgcacctttctgtaagcccctcgctgtgtcacagacctcggccaaagtgaagcattccgcaggggtttgggccgtgaggaacagcctgcccgacacctgacttgaacactctgcggggaaaaacaccgaggaacatcacgattaccttctgcgggaacaagggccaaacaaacggcctcatcctgaagccgtgtggcccgggccgctcccacccatacctataggcaccccagcccgtaggcggcagtgggctctggcatccagctggtcccccacctctgcaggtgtttgcaatgtacccgtgttgatgtaaggctgccctttctcc

SEQ ID NO: 1548 - DNA, 4711 bp, Homo sapiens
cactgtattctgtgagcattataagtttggttctattaatgtaagaataatttcattttctgtaatttaatgttttctcttaaggtatgccttgacaatctgcatcattttttaatttggcatagtattccgttctatggatgttccatgatttatttaacctttgatctgctggtgaacatttagtcagcttcatctattgctgaacattttgctattcaacacaatgctttaatgaacactcttatttttacacatttgtgttctttagaaccaattactatgagtcaaaattgtgcatatttagttttagtagatacagtactgcaaaatattcctctaaaaaagcttaacaacagtgctaatttccctataccgtccctacctgtggataccatcagacttttaacttttttgcagtttaaaaagacattacacatgcactcatacacacaaaagcagtctttgcttaaatgtcaccttcttaatgaggtcatcatgattttcttcttaaaactgaaataccacccccctcagcattccttaatcccctttacgttattttctatagttcttaccaccttctggcatgctgttgtttctctccttattctagactgtaggctccaaaaaggcaaaagtttgggtttttgtcctgttaattatgaacaatgcttggcagatgataaaaaaactcacatatttattgaattaaatggccatggcaattgtagaatacacatgaatttcagccatagctgttatgtttctcccttggcccatctgtccctggtttaaatacatctcacctgacaagaaagttctcttaaaagtagccacaactgcttacagtgcattactctaagcaaatcacccatgtctggctattagcaggccgtgtgggagaaggaaatactgtctgtataccaacgtgatcagcagtaggctgcatatacaacagtggttctataagattataatgaagctgaaaaattcctattgcctaatgatgtcataccccgttgtaatgctcatgatattgtggcagaacactttactttgtctatgttaagatacacaaataccattgtgttacagttgtctactgtattcagtacagtaacatgtacaagtttatagcctaggcccagtacactctaccatatagcctaggtttatattaggctataccatctaggtttgtgtaagaggctataccatctaggtttgtgttagtacactcttaggatgtttgcaccatgacagaaccacctaatgatgcatttctcagaacatatcccatcattaagaaacacatgactgtactccttcctactctggactcccagggcagctgattatcaacaaagtgtagcccagccagtgctggccatccaaccttgcttattttagcccttcccttcctgtttctttcttgccaatgcctaagggggcctagaaacaagaaccaaccctattaaaacagacattctatccaggcaagtgactggcactgatctcccccacactaggtgcagcccactccctaccatccctttggctccacaccctttacagtaacaatggcagcttagtcaaacagagaactgaggtttggtagagcaccaagtttcattgtttttgtcaggccagattttggatgtgaaagagttatcagactaagagaaaacaaaggatagtgacagttcagagtagctggagttgcttacactatataacagctaagagttgtttatctaccactttagcattttggtgatacatataaaaatccttagctcctatgtatttccttcacatttatcaacatctataatgtcctccctttcagtggcgtatcatgtcaggtttgcttcaaataaagaaatgtgatcataatgaatattttcactgtgatgtatttaatggagaggctaggtggtggttttgatagttcaattcaaggctaatcagggggtctgcaatgctagtaaccttcatcctaacctggaaaaaaaaaaaaggcagtgatcactaggtaccactggcaggcctaaaaagaaaagaatatggtaggagaagctgtgcagtctaaggaaattgtgtattgtatttatttcacattccatttagtgatgagttgctttattcctggtccattacttatttcatcatctctccctgctagagcagtataggggtgaagtttgatgacaaagttctggaaagcagatagaggttttcaggaacttagacgttccagagtaagaatctgagcaagagagaggaagagacttgaatacagagtaggaagcttttattaggaatgtcaaagtagtggagcgggaataacaaaaaccagaagaagcttcacttgattataattaatttgcagtggttggtaaaggcaggcaccaagccagattcaccactttataaataataaatctgtgggggtgatgttgtgaaagatgcatggtaaggttgcatcagcaaggtgaatcactgagtgggtgggaccgtctagaaaagcatctgtgtttggaaagggatcattctacagcttagtccagaacaccttgaacacacagcatagcagaatcttgactgtaatacttggagcaaatgtcactggcaaaaatggcatatatgctgggatgttcataacaaatagttaaatattgttggtcctttcgcatatagaatctcggtattagaggaaaatagtaaactgaaactctatttctgttctgcaagagccaatttcacctattgtattacttcgttaccaattgcagctgtgtagtcagtcatccataggattctttttgttagacacaaagtagaaaccagctgttggccgttgagacaagtaggaatcttaggaaatgttagcctgccagttcctacttttcctaactacctgcctcaccacccccatcaaatggtggtcatgttttttgtcacccaccattcaggggagatgctatcaacgaaccacgctggctacacacaaataccttttcctcagatgatattaatcatctttgccttaaaaactgaagctctaccaagttttcactatgagagaaaaaaaattacaacacctagccttgtagttaacaccacaactgactaatggaagttgacaagatctaaatgcttatacaaactatcccaaggtcacaggaaattaatggcaatattatacaaggttagggtagttcactttctataggaatttggattttacttcttaaactacaatggaaatgtctcaggcagtctgctttgggaatgtattcttgaataatactgatttctcattgaaggaaaaaacactatatccaacaactcagatatggcagaagtgaagtcaatgttccgggaagttcttccaaagcaaggtatgtacatcacaaatattgaggtcattgattattacaggactaaagaagtcataggcagtgtcacatagcaggcttaatagctaaacatctgcagctattgtgttccgtattatctcatttactgtcttttactatatgctttttcatgacatccagtaaaaggataacaaatgaaacattgtttcttatacctaaaattgcctattaattagctaattcctaaaattcctaattacaatatgaattttttttaagagacaggttgtcactctgccacccaggcttgggtacagctggcacaaccgtagctcaccgcagccttgaactactgggctcctgccctagcctactgatttgctagtactacaggcatgtgctaccatgcctggctaatttgttcttatttttgtagagaagggatctcaatgtgttgcctaggctggtctcaaacccctgggctcaaacaaacaatccaacccctttggcatcccaaagtgctgggataacaggtaagagctaccatgccctactcaatatgaaacttcagtgaaagaaataatggaatttactatgttaaataaggtctgaaagtggagaaagagaaacctgaagcaacagtaagaaaagccgaaggtttaaaccttcagtcatttgaatatttacgttaaatatcatattttgctatatttttttgcactatgtatatatatattctgccaaatcttattttaagattaaacttctgacacaaaaagttgtgtcttatggtagcatagattcttgggtagaacgctcaaaacttgtcttcctcagaagcaccctactagtaagaaatgcgcttatagaatgacaatgatctttctggttccagagcaaaactcaatttaggtacaagagtttttcagtgacaagagattaattttttagaccttcattctagctgcaaatccaactacaaacaactgggttatctttcttgaattaattcttatttcttgttaaacttagggccactgtttgtggaagatataatgacaatggtgctgtgtaaacccaaacttttacccttaaaatctctgactctggaaaaactagagaaaatgcatcaagcagcacagaatacaattcgccaacaagaaatggcagaaaaggatcaacggcaaataacccactgaatgataactgagcactttagggaacaacctgccttatctactatttaacaataactagaaaatatgcttctgtgtgctgaaagtagtatgtgttatcaataaaattgatagtattcatagaaatac

SEQ ID NO: 1549 - DNA, 3394 bp, Homo sapiens
gtgcttgagaaggttcaatggcgtggcagggactagcggccgagttcctgcaggtgccggcggtgacgcgggcttacaccgcagcctgtgtcctcaccaccgccgcggtggtaagcggccgggcggaccggacgtcgccttggttacagcctctggcgggaggggtgagggtcgccatggttacggcgtggctcccgggcagctcttggctggcccctggttccacagcagctggagctcctcagcccctttcaactctacttcaacccgcaccttgtgttccggaagttccaggtctggaggctcgtcaccaacttcctcttcttcgggcccctgggattcagcttcttcttcaacatgctcttcgtgttccgctactgccgcatgctggaagagggctccttccgcggccgcacggccgacttcgtcttcatgtttctcttcgggggcgtccttatgaccgtatccttcccgcaggctctggaacctcgggctagggcgcctcggcgtccagcctgtgttggtcctggggccaacacagccatgccagaaagggacacagtcgctgtctccagcttagtatgtgttgagggcccactctgtgctcagctgcaggggtcagggctagatcttcagtgctgtatgcaaaatacaaagccacgcacaaaagagccaggcaccgttcctgccttgggcgctcatgggcttctcgctgctgctgggcaactccatcctcgtggacctgctggggattgcggtgggccatatctactacttcctggaggacgtcttccccaaccagcctggaggcaagaggctcctgcagacccctggcttcctgtgagtgttgagagccctccctccctctccccaccctcagaaggatccccaccgatggggacctgtgctggcctgtgctcaacacgggcccctccccacagaaagctgctcctggatgtccctgcagaagaccccaattacctgcccctccctgaggaacagccaggaccccatctgccacccccgcagcagtgacccccacccagggccaggcctaagaggcttctggcagcttccatcctacccatgacccctacttggggcagaaaaaacccatcctaaaggctgggcccatgcaagggcccacctgaataaacagaatgagctgcagtctcttggcccacagcactggcttccccatctcacctggccacatccttctatgcctgccccgtcctcactcagtgtggcctctcagcccaactgcaggtggtaggataggggtgcccacagagggcaaagaaactgcccatggttgcctggcagagctttgagctcacaggttgccaggcagagcttttgagctcacaggtgacaggctcagggttctcatcctggccccaccagggccttgggcaagtcctgcccaccataggcctctgctacctgccagccagcggggaagttcaccagatttcggctgctggggccaggacaggcctctcctaggttgtgccaaaccagcctacagatgttcctgccagtggtgccttcaggctgatgccaatctagcctctcctgtctctcatcagccaccctgacaggtgggcgtatgcctcatttttcatctggtgatgccaaagccccatggattcaggtgcagaagagggccaggactaggtcttctgccctttctatgacctcagagcctaagttttcaccttagcagagttctgagactgggtgaggcagggacttctggaaggttctgttcctgccctttttagctgaggacgtgtgtgagccttatccgacccctgtggctcatttttctcttctgacctggcagctttccttgttgttctaagcctgtccatgttgtggtttatttctggatgctcagtggcacggggcctcctccaaagacaggttgtcattttcatggtaacaacactgttctctgttgagtctgccctccgtgttgtagccagaccttgtggagatggctttgcggcggtgtgagctggcggtcaggagtacccagccttcccggcacctcccagccaggtggccctgcccgacctgtggggtgaggcagccaaggttccttccatccccccagttgtggagacacagggctgcctcaccctttcattgccgaggttcctacctcatggacagaacaaacacctcagcaatgaaacctgttcatgtctaagagcagctgggctgggaatcttcccctttgttcaaggccttccagtaaggcccagctgtccccttgctgtgcatggggctctggggagttccactctttgatggagggcagaggccctgagtgcaaactccctgggaagagtcccatgctaacatgtgctcaaaggagcccccctctcacatctcagcgaccaagaaccccaatccctaatcagagctctgcctctgccccatatggggccctaccccacttccagggagcacagcagcctctgaccctagccctgccctggcagcatgggacctgccaacagctgagggtggcagcagtctgtgctgggatctgtgcccggatctgtgcccattctcttcagtaaggctggagctgcgagccagtttgctgccctcccagatcctgtgtccattctgaagaatggggacacctccctattacagatgagaacagaggggacatgaactccttggaggcagggctgggaagggaccctgggctgtgtctcctccctgtaccgtgtcaactccaagagctggcaccaggccgggagggctattcccatattcctcacagctggcttgtaaggcaggagctggcccaggccacagcacctgctggggtgggaaagggccccagctgacctggctatgggtgccactggagctagaacagccctcctgcacccaggctggcgacagcccagcagtgcccacacaggactgggccctccgcaggggacttcagagcagcaaggccccagctggcagtagcctgaccatctggacacagcagagccagggcggcccagggacggcaggagagctcgcggcaccttcctgaggccaagcaaggggagcagggttagggctgttcctgaaaggcagagagcctctgccctgagcctcacagctactcttctcagctctctgggtctggaaggagaacaggctgaggggagctgagaggagctgaggtgctacccggagccccattcacccccacctgcccacttgggaatctgaggcagaggagggtgaggcctgtgtgccaaccttgttcacataccaccttcgtccccccaggccccggccccactcctggctctcattatttttatgttaaaactttgaagaaattgaacatgacctgttgaagaaattg

SEQ ID NO: 1550 - DNA, 3738 bp, Homo sapiens
catgtttattatgcttgggcctttgagtcaaacactggctccttttctgcttctccattgtcagcctagcatgcttgaattctgtttctcctctggaaaccttgcacactactttgattcaccttgttactgggaaaatggaaaatactctctacattttttttttttttttgagatggagtctcactctgtcacccaggctggtgtgcagtggtgtgatctcggctcactgtaacctccaactcctgggatcaagcgcttctcttgcctcagccttccgagtagctgggatcacagacttgcaccaccatgcccagctaatttttgtatttttagtagagactggatttcaccatgttggccaggttggtcttgaactcctgacctcaagtgatccacctgcctcagtatccgaaagtgctgggattacaggcatgagccaccgtgcctggccctctctacgaatatttagctggtgatacgtttctaccagagaaacatttttttacataactcacttcatgtgggagccatgcgtccaagagagacatcattttgggtgaagggcacatccagacatgtgccagcattaccctacaagatacctggttatcaactaaatgtctacattgcatgtcagcaaccatccatggaaacttactattttttatccagctcaccctgtttgccacattccaattaaaattcatagccaggcttacccaaaataccatttaatcacattttatagacaaaacttcaaggtgttcaggtccatgtataaaaatttaaatgtcttcttgtattaagaaaaggaacaatctatgatccaaatttcaagatatttagaaaattgccttatccagactaatggtccccaactctgaccacattagactcacctggggaattaaaaaaaatacattgatgcctgggccccaccccagagattctgatagaattggtctggagtggacccagagcactaatattttcaaatgttcctcagctgagtctcacaggcagcttggttgagaaccgttgcacctgactgtaaaagagggctctgagctgggaacttttttgctgtgaccttattgctctagcatttttatttcattttacatattcaacaaatttatgtttaagagggaaatatttttaaaatacttctttgggtatcttttctcccaataatccatacactcttctcttcaccttgcaacctcattatggctaaggcagagatttatcacccctgggaaggagaagctgggttctgccaagaacggtgatttgcaaccctagatgccctttagaatcacctggggagctataaaaaaattgccagtgcctggaatccacttcagactaattaaatcagaatttggggggatgggctgaaggattactactataaaagtacatcaggcttaatacttttttattatgcagctaacattgagaaccatggatctaataagaaatgacttgtcaacttaaaataagattcttatttcttaaaatctctcatgttctaacccaaacttttaaaattcagagaaaataatttacttacctatagctggaggtgatagaggttattgacaatatgattttatgatttaatctaatatttattgaacgcttactatatgcaaggcagatgtaattgaaaacaccttctggaaacttttttgtttgtttactttgggtcagctagaaggagcctggggtgaatgtatgagtctaggtccctgcaggaaagagatggcacactcaaactggagatatggcataacagtgctagataagaatttggctttgatactaactagccacacagcatcctaatgttattttggaaatttctgttctgattttcctagatatagaggtgtgacttgggcaccatggaggtaaagatgctcctgaagatatttaggaaagtagctagggatggtctccagaataaagaagagatttccattcattcaaaaaataatttattgggtgactatcatgtatagacacagggccaggtgttaggaatctaaaataaagacagaatccctgccctcaaggagactagtttcatggggattcaggaaaacacatagaggtaaatagtaacaaggtttacctggaggttgtggagtcagctttctggagtctcttgaaagtggctcagttgcttttaaagagaaggatttgagtatctgccaaatatttgtgagttgtgcatgtgtgtgtttgtatgtgtgtgtgtaaacatacatgtgcatgcttgtacacacattcttcatatagaaagaattcttactggggtatagtgggggaggaacgagggaaaatctagtagcttttttcttaacatttttttctggtgtgaacataagcagaaactcaacacagcacaggctgcgagggaaggaaaattcatcaagtctaaactatcttctctcttctggcacaaaagtaagtgacatcaacaggatgtggggtttcaggatgagccttgagtccgatgaaatgaattaaacctcacaactctttggaacaggaacctgttttcatgtgagttccccaacagcttttgggggagccttgaaacaaatggatttagcatctggagatttttggtaggtttgatttgcttctctaacatccggtacttttgcaaaaatctttgaacacagaaagctaaaccaaagcccaggaggaggcaagtgtccaagaacatatggaagcctaagaggtgaatatgctcctctttgcctctgtcatgatgtacatcctttcagccttgacttttagcaagtgacatttagcagagatgtgagggtctgtcactctgacatttgacagctatgaagattcattctcaacagagcaatagttacgggttcaaggggcaggctggttggcctattctagtttttgtgagggagaaacaataccttgggagatcgattctctagtaatatgtatttggttgttgttcaacctcagtgagacacagagactgagatgggtcccagaaggagtagggaagagggactgaagagggtctgagtgagggatggaggtggttgttggcatttatttaggagcattgcagagttgccttttaaagatctctttaaagacaatagaaaggagtagagaccgatccctttataacgtgggggtttagcattatctcatttttgatatgcagaaggatatctcattattgtgttggatgccccttaaatgcttcaaactttcttcctgaatgtacccagggcaattttgggggtgttaatgtggcctcgcaggcaaagggagatgaacaggatgacctcttgcgaggtagtcctagcatctctaaccctacggttgtcaagtctctgacaccattctgcttctgacgtgtctcttaaacttcaagtgacctatatttaggagattacgtaaaaagtattgaaagcaaatggccattctgctctaaggtcagagttctgctgtggctgataatgctgctttgatctccaggcccctgcctgtctgtatctatggtatctgtcagccagcttcactctggacttgaccttttgctggcctagacctgtggttactgtcaggggtctaatctcttagcatgtcacctctggcaattttttaaaaaatccccaaatcttacaattcagatatctcagattttgcttcagcccattgcaaagtcttttcgaaatt

SEQ ID NO: 1551 - DNA, 3725 bp, Homo sapiens
atcaagccagctgccagggcagcgggcgcagggcttgggcactggagcccagccccggaccgcacctccagcagtgctgggtgcagaaggcagtcactgtggcagtggagagacagagtgtgtacccagacacgtgttgcttctggggtaaggttctgaaggctgagtagccagcgggatgcccggcttgctgaattggatcacgggggcagccctgcccctcaccgcgtctgatgttacctcctgtgtcagcggttatgccctgggcctaactgcctccctcacctatggcaacctggaagcccagcccttccagggcctcttcgtgtaccccctggatgagtgcaccacggtgatcggctttgaggcagtcattgccgaccgtgtcgtgacagtacagatcaaggacaaagccaagctggagagcggccacttcgatgcctcccatgttcgatccccaacagtcacagggaacattctgcaagacggggtttccatagcccctcattcctgcacaccgggaaaggtgaccttggacgaggatttggagcggatcctgttcgtggccaacctggggaccattgcccccatggagaatgtcaccatcttcatcagcacctcctcggagctcccaacgctgcccagcggggctgtgagggtccttctgcctgctgtctgtgccccaaccgtgccccagttctgcaccaagagcactggcacctccaaccaacaggcccagggcaaagacaggcactgcttcggtgcctgggccccgggctcctggaataagttgtgcctggcgactctcctgaacaccgaagtgtccaaccccatggagtatgagttcaacttccagctggagatccgtgggccatgtctgctcgcaggtggggaaattgaggcagcctggccatggtcacactgcaggtcaggagcccctaacggggctggcatgtcactcatctctggcctggatctcggtgtgccccagcgaactcctctctctcctgacctcatgagcctatatcccccttgcctttctatgccactcaggggtggagagtcccactcatgagattcgtgccgacgccgccccatctgcccgctcggccaagagcatcatcatcaccttggccaacaagcacacctttgaccggcctgtggagatcctcatccaccccagcgagccccatatgccccatgtcctgatagagaaaggggacatgaccctgggagagtttgaccagcgcttgaagggaagaacagatttcattaaagggatgaagaagaagagcagagcagagcggaagacagaaatcattcgaaaacgcctccacaaagacattccccaccactccgtcatcatgctcaacttctgtcccgacctccagtcagtccagccgtgcctgagaaaggcccacggggagttcatcttcctcattgacaggagcagcagcatgagcgggatcagcatgcaccgagtcaaggatgccatgttggtggcccttaagagcctcatgccagcctgcctcttcaatatcattgggtttggatccacatttaagagcctttttccttccagccagacctacagtgaggacagcttggccatggcttgtgatgacatccagagaatgaaggccgacatgggtgggaccaacatcctttcccctctcaagtgggtcatcaggcagccagtgcaccgaggccacccgcggctcctcttcgtgatcacagatggcgctgtcaacaacacagggaaggtgctggagctggtgcgaaatcacgccttctccaccaggtgctatagctttggaattggacccaacgtctgccacagactggtgaaaggactggcatctgtgtccgagggcagtgctgagctcctgatggagggggagcggctgcaacccaagatggtcaaatccttgaagaaggccatggccccagtcctgagcgatgtgactgtggagtggatcttccctgagaccactgaggtcctggtctcacccgtcagcgccagctccctcttccctggagaacggctggtggggtatggcattgtatgtgatgcttctttgcacatctccaatcccagatctgacaagaggcgccggtacagcatgctgcactctcaggagtctggcagctctgtcttctaccactctcaggatgacggacccgggctggaaggtggagactgtgccaagaactcgggggcacccttcatcctagggcaggccaaaaatgcccggctagccagcggagactctaccaccaagcacgatctgaacctctctcagcgacggagggcatacagcaccaaccagatcaccaatcacaagcccctcccaagagccaccatggcaagtgaccccatgccagctgccaagagatacccactgcggaaagccaggctgcaggacctcaccaaccagaccagcctggatgtccagcggtggcagattgatttgcaggccttcatctgccttacctccgaggacaccttccaaatcaggacacccaccggtcaataagctcgctcattccctgcacacacactgcccagttggcaaggaacatttgcatgtgctctttcatttgactttatagcagacctgggggaggagagagtttaggggcccaccttggctcagtacagatgtggaaattgagagccagagaggtagggcacttatccaaggtcacacagccagtcagaggattgtaacctgtctgacctttgaaggaccccctgccttcaaagccttttattccccctcattagattgcacctcctacaaattccaggggatatacatttacccagggcagagaggattttttgtttatttgtttgtttgtttgttgagacagagtctcgctctgttgcccaggctggagtgcagtggtgccatctcagctcactgcaacctctacctcctaggttcgagcaattctcatgcctcagccttccaagtagctgggattacaggcatgtgccaccatacctggctaacttttgtattttatttatttatttatttttgagatggagttttgctcgtgttgcccaggctggagtgcaatggcgcaatctcagctcactgcaacctctgcctcctgggttcaagcgattctcctgcctcagcctcctgagtagctgagattacaggcatgtaccgctatgcccggctaatttttgtatttttggtagagacagggtttcaccatgttggccaggctagtctcgaactcctggcctcaggtgatccacctgcctcgaactcccaaagcactgggattacaggtgtgggccaccacgcctggcctgatttttgtatttttagtagagacagggttttgccatattgcccgggctggtcttgaactcctgggctcaagcgatctgcctgcctcggcctcccaaaggtctgggattacagaagtgagcaaccatgcctggcagcagagagaatttgagagttagggagccacagctaggccagggtttctcagcctcagcaccatggacacgataattttatatttgggggcaattctgtgcactgtagaatgttcggcagcatcccttggcctctgctcgctagaggcctcctgggaataacaccatccccaatcatgacaaccaaaaatgtctgcagacactgccaaatgttccctggggagctaaatcacctggttgagcaccattgtcctaaacc

SEQ ID NO: 1552 - DNA, 3957 bp, Homo sapiens
gtgctctttggagtagcgtggggttctggggttaagccacagagccctgcttaaaggagagacaggtgcatgcactggggactacttagaaacagctctggtggtcttgtagggtcagaaccactagaaattttgtttatatatagattttaaagtggttgctggggacacatataaacccttaacttctttaacttagccctgtgaagactgctggccctgcgctgctttagcacaatgatcagttggccctgaatgagttgcagaaggccttctccctggtataggtacctaactgggacctatgggagactggtccctgacccagagtttcaggtgaccttacttccgttcctttcagtgagatcatctccctgcaacaagggtttgggttgtggacctcagactaggaaaagttcttcctgcttaaattcagtgagcctcaaacttttaagttagtggagtcctagtgagacttagggaaaagccaaaaactactcctgcagggccagtgatcaaggacagttgtgagaattggttgcaaagctccattacagagaaaataatagctatatctggcttagtaaataaaggtagcagtgcgttctggcttacaacatagacctcattttacctagtgttgggtggccgaggaatcaaggtcagtagtagtttgattcaagagtgtgtgatatttgaggcaaaaaaggctagtaattcaaagcaatctaaaggagaatgataattttaaaatacatattcagtaagtctatggttttaaaatagttgaaaagaaataagtaacaggcttatgaatttcatttttgaaaagaccataaagtacaaatttctccatgactgacatcagagtgatactcggctgcctctgctgctgctgtctcttctgtctgactccattcgcaatagccttttcttcctatccctggcttaccgagtaaagtagaaacttgccatcagcccaggattctgttttcgagggtagccccagagaggatgctctgttctcattaataatttttacagctctcaatataaatcctttttatacttattatattctgtctcttggggtaacaaagtagtgtacccattaagtgaacgtattccttctaattagtttagagcccagctgcattaaccttgagggatgttcagttacagtattcaaggttctgaactccccatcagcctttcccttttcatgttgaaagcccagttatttagaatttgtccttccatttaatctgttcataatggcctcgggaagacagagctggaaacctgcagtccttaattcctttcagaacaaaaagtgggaagtctagtaaggcagaccttttagtctctataataaaagaataccagtatcggtctcaaaaaaggagtgtgtcacttcagggatattttaaatcacctctctaaatctgcagtcttgtgttgtctctcaaatttaggaaaaagaaatgtgcaaactagaatggggatttttgggatagaatgaaaacctatacctgtacctaacctagctctctttccaaaccatttatatcaaacactgtcttgaatgtgtacttggcctctgttaaaatgatggttttaggaaaggagctaggtttggacagaatagctatataaagccagcagttctcgtagtattattgctgacatgaccagggaggacaagcagcttagcttctcagatcaaaaacaagtaccagtagttcctgcttaaggctggtaaataatatcttgaaattctcaagttggaaaccagtctcaaacccatttctttgcaagaagttgtatatttagggtcatggttagggctttccagtctaggagtccttccagtggtctgtttcttgatagcatgcttttacagtctgcatggatgtaataacgcttttggtatagtgattgtcttgagtactgcttgactctggtcttgatgcccacaaatggctagcgtgcttgtcttcccatgcagtggaaggaagacagttaaatgaaatagtagtattagatatatatgaaaaagaaaacagcaaaataaatttgaagttaatgctttcgtctcttgtaaggtaaggcatatactgcttgcttacacaagaactattggcattttctttttttcgtttgaaacaaatatgaaaaatagtattttggttttaagaaatttttattttagcatacaacatataactgacatttgttttttcttttttgtcttgtaaacttaattcttaaaacttaggaaaatttttggataggacaacttggtgattcagctataacagatcttatttcaataataactttactgcaatatgtattcatacattttcaaatttgtgccttaggaaatcacaagtgcttttatagtgtgaagtgttaatggctgaatccaactgaatcaccaactagtaagtgggggtctggttgatgttctggaataatattgggagattgtgaattgttccagacataccaactgaactttcattcattatcaaagtttgcaaaacttcccaagccccttaacatttagcacatttgaggatgttcgtgatgctgaagacgctttacataatttggacagaaagtggatttgtggacggcagattgaaatacagtttgcccagggggatcgaaagacaccaaatcagatgaaagccaaggaagggaggaatgtgtacagttcttcacgctatgatgattatgacagatacagacgttctagaagccgaagttatgaaaggaggagatcaagaagtcggtcttttgattacaactatagaagatcgtatagtcctagaaacagtagaccgactggaagaccacggcgtagcagaagccattccgacaatgatagattcaaacaccgaaatcgatctttttcaagatctaaatccaattcaagatcacggtccaagtcccagcccaagaaagaaatgaaggctaaatcacgttctaggtctgcatctcacaccaaaactagaggcacctctaaaacagattccaaaacacattataagtctggctcaagatatgaaaaggaatcaaggaaaaaagaaccacctagatccaaatctcagtcaagatcacagtctaggtctaggtcaaaatctagatcaaggtcttggactagtcctaagtccagtggccactgatagtatgaaccatggtcatttttaggcatgtatcattcatttactcatagtttggtttacttaaattatcaggaatacaatgttgcaatgatgcttaaaaaacacttgttagttttccctgtaccaggcaatggttataattaaaatgatatgctgttgagaagccactcttaagagtccagtttgtttaatgttatgggcagctaccaatttgtggtgtctctgtatatttttgtaaagattctcattttttatgcttgaagtatttggtgaaaagatgttggttgaccataatttgcaacattgtctcattaaaaataaactttcatattcatatttggtagaactgttaacctagaaatgtagcttgctaataagatagaatgatacaaaagtgaagtagtagccacagtacaacactgactgctcagacacatttaggttcagggtggacctttatgtcttgtcaagatgtctaggcccggctgggcgtggtggctcacacctgtaatcccagcactttgggaggccgaggcgggcggatcacgaggtcaggagttcgagaccagcctgaccaacacggtgaaaccccgtctctactaaaaatacaaaaattatccgggcatggtggcacatgcctgtaatctcagctactcaggaggctgaggcaagagaatcgcttgaacctgggaggtagaagttgcagtgagccaaaatcacgccactgcactccagcctgggcaacagagtgagactccgtctc

SEQ ID NO: 1553 - DNA, 3654 bp, Homo sapiens
atttgagctgaggatgctgggatggatttttacatgagcagttggcccttaaatcatgagcccaacttaagtgcccaaggaaatggcacagcagggagagggacatcacacacaccaccaaatcctcttgttagtctctggtttccacatccttttccaaatcttcaggccagctcatagcctcacttttccatctcttctccattcctccaaagtagagcttcctgctgctacaggaatagctgcgaagtgggaaagatcaagggttgtaagagctgccccagataatctacaaagagctttgctagaattaggttgtgcatctctgaacctgagctactacatgtgttgggtcagggaccatgcttacctaccagctcaagaattgacagaggaggtatctaagaaatgcttgttggatgaataaataaacagctgagtgggtgtttatatgagcctgaaaactgcctgcaccagcacaaaagtaaagccctgacaccctcaggccacacctactggaaaaagatatgtcagccccagaaaaatgtgggcaacttgaggtaagtccggagcaacacaggaaactgccctcctcttctgtcttctcttccactgtgatgctcaaaatctcttcaagactggtcatctaatcagcaggatgtaagacggtcattcttcactgtggccattcagaagtttcctggtaacctggctttctcttgaccattgccccacgagcatggtggtgacaagcttgggctctgaaatccgacagccccaagtttgaaacctatagcttcttacttgctagctgtgagacttgggcaaattacttaaccttaatttcctcgctctgtaaaatggggatataatattgggtaatacactaagcctaatgtcagggatataattagtgctcaataaatgtatctctattacccccacatcccattctgccattcccttctttctcttcctcccgcaaacctccaacttcatcattgcctatgaacagccaaaaggtaaaacaatcacaaaactaggcagttttggacagcccagaagttgtttacaagtctacaagtaaccactgcagtctgcccagctgcctggtcttctgaaaagcaaacttagaagccggtgatgtccatgatctcacagaatttcctaggaatgacagggacgtgtattcacaaagttactcttgactctttaaaagaagacaaccatgttttgctcccacgatatcccaaggggcacctagattgctgggggcctgtggtccgagaagtaatgccacctggaaaagtgggtgtgactggtttagggtccaggtctgagaactggggtaagccacttcgtgtcttagttcgcttatgtgtaaaacagagggattggaccagatgatcagtaaagaaacttccaatgttaagacttcaagggtaaatggctctttgatagagagggatcatagaaaagtaagagccacacagcttaacctcccaggggacaattaaaatgctttcatgtgaagtgaatgacggtgtggtagggtttgacgtgaacgtaatggcataggagggtcggagggcacgggggcctctcaacctcattctcagcaccagatgtagtgcctggagcatctgaagagggactaagagattccgtcctcaccccagctctaaagatgcctccaccatgagaaagagacagggagtccctgacactttctgctcccaccttggaagacaggggaggaggaaggccccagcgtcttccatcactgctgcagacaccaaccaaccccctgcccttctccctgctcctctgcttcaactctcccctgggcccccaccccaaacagccctctgttccgctttagatgttagctgcacttcacctgtaaaacacctttctttgccaaatttgtcaaaaattttggcatagtgtttgcataaatttgcaggtaggattccagagaccctgactccgagggtgtaagagaaaaaatcatgcctgcacttgcagtcaaaggaggctttcaggagggcacactggatttgctacacagggctgggagaggcactcagtttgtgaggctgggatgccctgacaggagcttcccctcgatcgaggaaatcggaactttttcaatgttggcttcaaatcgtggctaataggcagaaaaaaagctcttctcaccatgagggaagactggggaggtgggaagggggacagggcccatctattccatccaagaggggtcaaggaaggacagtggcaagctcaagtctggagctgtttcctccccatagtgaaagtctggtaactttacccagaagttctgatttttctagttagccaaacagggctctgatttccaagattaggttaaatccagaagagtttgggggatgaaggaatctggatgaacaatgggaggtggaaccattgccccaccatcagcaacaccttaacaggaacaaactcctctgcccactcgtcatatccacagtttcagagaagagaatgtcccagctagaaaagcaagtggacaagtgccaacccgatgaggccactgaattgtgagtggagacctctgagcaacttggtaaagaaagcagcctccccctgagaagtggggggcttgggaaaacctccccaggtgaacagacaggaaggaggggcttagtgacagccctcggaagggagtgtctatccactggccacagtgatgactggggtgacacccatgccacagaaaaaacacaaagtgcaccaaagccagttagagcggacattgagtttattatttgccaaagaagaggagggtctcatttcattaagaaaggtcagggcagctctccaaactgaagtggaacaggacagatatactgtggtaaagttttgttcaaaggtctgattggctcaaaaagcaagatgtaaactcttttgggactggctgctgttctgattttgtgtcacagaggaacaagcacggctcacaggagatcctggatgggtctgacctgtggtgcgtggccctggcaggctggtgtctgtgcctcctctcgtcgaggtgggagttttctctggcacccacttgggttaagagtgaggagccctggggcccatggacctgctgcacagctctgtgcccatcagcacctggctctctggtcctcaccgccaaggatggagtgatatgcagccctcctggccacagggatgaggaaacctcatgaaagcagttggagaattttgttggcatgtgaccatcatattttctaaccatgaaaactgagtcacagagcgccacgccccagtaagttggaggatacacgattaaaacactgctgaatagcggggaacaaaaggcaaactgggccaggcatgctcacgcctgtaatcccagcgctttgggaggccgaggcgggcggatcacgaggtcaagaaatcgagaccagcctggccaacgtggtgaaaccccgtctctactaaaaatacaaaaattagctgggcatgatggcacatgcctatagtcccagctactcaggaggctgaggcaggggaatcacttgaacccgggaggtggaggttgcagtgagctgagatcacaccactgcactccagcctggcaacagaacgctgtct

SEQ ID NO: 1554 - DNA, 4122 bp, Homo sapiens
aggagatggaggagagcctaggggtgcagaggaaagtctcgaaggcgctggttgaggagggcctgggtcgagaggagctgggacgggggaagagtagaatctaaagtccttgagggctaaggagagaagttgaggtagggactggtcggaatacatgggtgggggcgtggtgagagtgtagtttttgggaggctgtagagttggaaggggctggtggctgcggttttgatgctgacatgaccatatacttggcctttgtttctctgcagctccccagagacgctcatcctacagcctcagctcgggcccagccttctctctccagctgccaccacagcctggaggcgcctgcctccaccctcccgaatggtgctcctcctagcaggcctcggtccaggatccaagccccctttgccccctgccttggagctgttgctccgggtttgtcacagtggactccctgtggcgggaagggaagaacttttgcacagacaaggcttcagctctaggaaccccactgacaacttgaatctcaacctctaacctagtgtgaggttcttcctgtgcccaccttttctgccttttgagaagagaaactcttctcctggccatctagagcccaggaagccccaagctggggccctggtcccagcatgtcagtcctctcttgtgcatagggctctgccctccccctgtcagcatggctgagctcagacaggttccaggagggcgggagaccccacagggggagctgcggcctgaagttgtagaggatgaagtccctaggagcccagtcgcagaagagcctggaggaggtggaagcagcagcagtgaggccaaattgtccccaagagaggaggaagaactggatcctagaatacagctgagtgccaggagtccctggtgaagcaggccaaatggaatgtgttgctgactgcccaaaactgtcccaggtcctcagtggattcctgctcagcctttccctgggtgtcgcctagtagtaacaacttatgctgagccatccaatccattgatgatcttgtcaggagctggaagttgatgactggaagcatttgaggccatggaatccagtggggatcacgtcttggactttgatttgccacatgaacattgcagggtggcctttaccaactgaccccccacaatcaatgtttgttgcatttccaatccctgtccttttcctacgtgggctgtggttttcctagattacagcacttctttctttactgagatgtccttccagtggtgtcctcattcccaggagggtggtcacagtggaaggaaagtgagatcaaaggtcggtcctggatccagacccaagtctgtcactaattttccgcctggttgtttctcatctatcaaatgcaaagttgctgagaaagaatattccagcaggaggtgctgaaagaactggtcactcgtctcccagatagcctaaaagcccctgtaggcctcgtcaagccccaggaagctgggcccccagggaggaggagttggagcacctgaaccaggccagcgaggagatcaaccaggtggaactacagctggatgaggtcaggaccacctatcggaggatcctacaggagtcggcgaggaaactgaatacacagggttcccacttggggagctgcatcgagaaagcccggccctactatgaggctcggcggctggctaaggaggggaaaaggctagcagcctttgggagtgctggatttcacacatctaccctccactggcaaaatttttatttcttctagtccatatccttatgaaatattctttatagaatgttgcttccttggcatttatcctcagcacagtttgggaaatgaagccgacattgctagctcagcaggagacacagaaggcagcgctgcggtacgagcgggccgtaagcatgcacaacgctgctcgagaaatggtgtttgtggctgagcagggcgtcatggctgacaagaaccgactggaccccacgtggcaggagatgctgaaccatgctacctgcaaggtgaatgaggcggaggaagagcggcttcgaggtgagcgggagcaccagcgagtgactcggctgtgccaacaggctgaggctcgggtccaagccctgcagaagaccctccggagggccatcggcaagagccgcccctactttgagctcaaggcccagttcagccagatcctggaggagcacaaggccaaggtgacagaactggagcagcaggtagctcaggccaagacgcgctactccgtggcccttcgtaacctggagcagatcagcgagcagattcacgcacggcgccgcgggggtctgcctccccaccccctgggccctcggcgctcctcccccgtgggggccgaggcaggacccgaggacatggaggacggagacagcgggattgagggggccgagggtgcggggctggaggagggcagcagcctggggcccggccccgcccccgacaccgataccctgagtctgctgagcctgcgcacggtggcttcagacctgcagaagtgcgactccgtggagcacttgcgaggcctctcggaccacgtcagtctggacggccaagagctgggaacgcggagtggagggcgccggggcagcgacggcggagcccgtgggggtcggcaccagcgcagcgtcagcctgtagccgaggggccagggttcctggcttgaatctgccaccacgggccggttggggcccacagtcttctcacgccctctcctctggggcctcgtcttcccgaaggtccccttctccagtgcttccctgggagaggccagctgtgttcgagtcctctgtgcctgccctggcgttctcacagcctcccccttcccctcagcaggcggctctctttgccttacccattcagaaggctcgccctcggcgctctgtctgcctctgcctgccagctcatcacgatctgcagggcattgaccctttgctttccctttctgctccctctctttccatctgtttggctttttccctcagggaacttggtctagaaggcactgggaagctcatcagagaaaatgggtgctgggcctgagtactcccgtcggaggggatggacagtcacccctcccgttggtttccagccccgccccccttcccaaggcaactctggagggtaccctaggtatgctgctgagccctgccccccgtcctgctccagcctgcccgtgtgtaacctgtaagatgtactgtgtgcctccggaagacaccacctttcccttcagcattccctttcatgacctgaggcactctgcgatgtgtgccccaaagcagaacttacagggcctgcaggaagctggtgtcagggagagaaacccaaccccactgtcaacatagggagcatcaccaactccagactggctcctgtgggtatggtgtttccgctgggctgggtcctcaacattgccaaggtgctagtgggtccctaagagggcccatgttgggggtgaagtcatgaggtcctgaaggcttaggcccctgtcattcccaccctcgctcttgctgcacagttgtgtttactttttctgggtagaggatgctgaactgactcagcaccctcctgcaggacggggttagggaatttggtgctcaattgctctcccttgctcttccccaaactgaaaatacctactgcaggatccctcggggcacactgaagcttggctgccaaccctcttacttcctttgttacagggaggggttggcttggggtgaaaagttctgccctccgcagggagcagctccagctgcctggcagtgctcccagtttgtagggaagccacaccagatctgggtgccttgggagaaccagtccttccttttgacccaccccaggaagatggagtgctcttttctaggcccatgttctgccagcaaccgggatgcgtgggcaactggactctgcacgggggtctacaggttgagggaggttggtcacaatgagaacctcggggtttgaggtggccatgggcagacagccgaaagggagggagggtgtgggtgtgcgtgtgtgcatgtgctggtgtgtaagggggaaagggtctttcctggttttatttaaataaagtagtttatgtaac

SEQ ID NO: 1555 - DNA, 4068 bp, Homo sapiens
ttaattcaaccagttggccagaatccctttgtttgggatgtaaaggcaatacaagctttcaatgaatttatagataatgcatggcaaaaaaatctagaattaaaatgtacaatatttgctctggcttcaattaatgaagaactgtttaacattgtggatttgctaaccccctttcagagtgcatgccatttcttggtagaaaagagacttgcaagaccagtaaaacttcagaagcctttggagtcctctgttcagctacattcctacttctattctacacatgatatgaaaattggaagtgaagaattagtttatataacgcatattgatgacccttggacattttattgccagctggcaagaaatgcaaatattttagaagagttgtcatgtagtattacacaattaagtaaagttttgctgaatttaaaaacatctcccttgaaccctggaaccttgtgccttgccaagtatactgatggaaactggtataggggcatagtaatagagaaagagccaaagaaagtcttctttgttgattttgggaatatttatgtagtaacaagtgatgatctgcttccaatacctagtgatgcatatgatgtcttacttttgcccatgcaagctgtcagatgttcattatccgatattcctgatcatataccagaagaagtggtggtgtggtttcaggagactattttagataagtcattgaaggctttagttgtagcaaaagatccagatggaacactgattatagaactatatggtgacaatattcaaattagtgctagtattaataagaagttggggctacttagttacaaagatagaataagaaaaaaagaaagtgaagtcctctgttctacaactgaaactcttgaagaaaaaaatgagaatatgaagttgccatgtacagagtatttaagtaaatcagtagggtacaagttacctaataaagaaattttggaagagtcatataaacctcagatcaactcatcatacaaggaactcaaacttttacaaagtttaacaaaaacaaacttagtcactcaatatcaagactctgtgggaaataaaaatagtcaagtgtttccattaacaacagaaaagaaagaagaaatttctgctgagacacccttgaaaacagcaagagtagaagctactctttcagagagaaaaataggagattcatgtgacaaagatttgcctctgaaattttgtgagttcccacagaagactataatgcctggatttaaaacaactgtatatgtttctcatataaatgacctttcagacttttatgttcaactaatagaagatgaagctgaaattagtcatctttcagagagattaaacagtgttaaaacaaggcccgaatattatgtaggtccacctttgcaaagaggagatatgatatgtgctgttttcccagaagataatttatggtatcgtgctgtgatcaaggagcaacaacccaatgaccttctctctgtgcagtttatagattatggcaatgtttctgtggttcatactaacaaaataggtaggcttgaccttgttaatgcaatattgccggggttgtgcattcattgctccttgcagggatttgaggttcctgacaataaaaattctaagaaaatgatgcattacttttcccaacggaccagcgaggctgcaataagatgtgaatttgttaaatttcaagacagatgggaagttattcttgctgatgaacatgggatcatagcagatgatatgattagcaggtatgctctcagtgaaaaatctcaagtagaactttctacccaagtaattaaaagtgccagttcaaagtctgttaacaaatcagacattgacacttcagtatttcttaactggtataatccagaaaagaaaatgataagagcttatgccactgtgatagatggacctgagtacttttggtgtcagtttgctgatacggagaaacttcagtgtttagaagtagaagtacagactgctggagaacaggtagcagacaggagaaattgtatcccatgtccttatattggagatccttgtatagtaagatacagagaagatggacattattatagggcacttatcactaatatttgtgaagattatcttgtatctgtcaggcttgtggactttggaaacattgaagactgtgtggacccaaaagcactctgggccattccttctgaacttctgtcggttcccatgcaagcctttccatgttgcctctcagggtttaacatttcagaaggattatgttctcaagagggaaatgactatttctatgaaataataacagaagatgtgttggaaataacaatactagaaatcagaagggatgtttgtgatatccctttagcaattgttgacttgaaaagcaaaggtaaaagtattaatgagaaaatggagaaatattctaagactggtattaaaagtgctcttccctatgaaaatattgactcagagataaagcagactcttgggtcctacaatcttgatgtaggacttaagaaattaagtaataaagctgtacaaaataaaatatatatggaacaacagacagatgagcttgctgaaataactgaaaaagatgtaaacattattggaaccaaaccaagtaacttccgtgaccctaaaactgataacatttgtgaagggtttgaaaacccctgcaaagataaaattgatactgaggaactggaaggtgaattagagtgccatctggttgacaaagcagagtttgatgataaatacctgattacaggatttaacacattactaccacatgctaatgaaacaaaggagatactagaactgaattcacttgaggtgccgctttctcctgatgatgaatcaaaagaattcttagaactggaatctattgagttacagaattctctggtggtggatgaagaaaaaggggagctaagcccggtgccaccgaatgtgccactctcccaagagtgtgtcacaaaaggcgccatggagctatttacactgcagcttcctctcagctgtgaagctgagaaacagccagaactagaactacctacagcccagctgcctttagatgacaagatggatcctttgtctttaggagttagtcagaaagcacaggaatccatgtgtactgaggacatgagaaagtcaagttgtgtagaatcttttgatgaccagcgcaggatgtcattgcatctacatggagcagattgtgatcctaaaacacagaatgaaatgaatatatgtgaagaagaatttgtagagtataaaaacagggatgccatttcggcattgatgcctttgttctctgaggaagaaagcagtgatggaagcaagcacaataatggtttaccagatcatatctcagctcaactacagaacacctacactctgaaagcctttactgttggatctaaatgtgttgtgtggtcaagtctaagaaacacatggtctaaatgtgagattttagaaacagctgaagaaggaacaaggaaaaggggtttggaggtgatggagatttaaccgtggatctatagctgtggccaatcagtcagaagctgcccttgaacaagtggcatcttacgcagaccaacagagtatttgagaaaattgaaaacatgtaaccacaagaagttgtcattttcaaaaacttctatataggtggaaaacaaattaggtctcaggttgatggtggggtgtgtttatagtgatcctgttatatatacagatctgggatctttcgtctttattgtcttacgtttctaattagttgggaggatttattttgctaaacagtttactaacacattacatttcaaaaactattttggtacctttcaaatacagtgtttaaattaaaatagaaaaataagggctcatgacaagtacattatttgattctacttaggatagctttttagcaggatctccttcagaatttttgtcttgactttgaatctttgcctgtttgtctaaacatttgactaacattctgtttgaatttggaagtattctaatacaagatttgaataaagtttatccttaaat

SEQ ID NO: 1556 - DNA, 3465 bp, Homo sapiens
ttcgcctgtattttgctcctgcgctggtagcttgggtttgggcacagtgccatctggggttctaaacttcctggacaaaggccagctgctgctgatgggaaactcaatcacctacagggaccaggcagccgtggaaaaccacctggagcagcgtctgcaccagccccagaagctgctggaggacctgaggaagacagacgcccagcagttccgcactgccatgaaatgcctcttagaagacaagaaggacggcttggacctgaaagacatcatcatcgacttaggagagattcgagaacgagccttgcagagccctggcgtgaaccgcagcctgtttctcatcacactggagaggtgtttccagatgctgaactccctggagtgtgtggagatcctgggcaaggtgctgagggggtcctcagggagctttctccagccagacatcacagagcggctccctcgggacctgcgcgaggatgcctttaagaacctatctgcagtgttcaaagatctctacgacaaaacctcggctcattcccagagagctctctattcctggatgactggaatactgcagacatcctccaatgccactgatgactctgcttcatgggtcagtgcggaacacttatgggttttgggcagatacatggttcacctatcgtttgaagaaattacgaaaattagtcctatagaaattgggctgtttatcagctatgacaacgccaccaagcagctggacatggtctatgacatcacacctgagctggcccaggcgtttctggagaggatcagctcctccaactttaacatgaggaatacctccaccatccacaggctggggctgctggtttgtttctacaatgacctggaattgctggatgccactgtggctcaagtcctgctttaccagatgatcaagtgcagccacctgaggggcttccaggctggcgtccagaagctcaaagcagaactcctggacattgccatggagaaccagaccctcaatgagaccctgggttctttgtcggatgcagttgtaggtttgacctacagccaactggaatccctctcccccgaggctgtgcacggagccatctccaccctcaaccaggtctcaggttgggccaagagccaggtcatcatcttgtctgccaaatacttggcccatgagaaggtgctgtctttctacaatgtcagccagatgggcgcactgctggctggggtcagcacccaggccttctgcagcatgaaacgcaaggacatctcgcaggtcctgagaagtgccgtctcccagtatgtatccgacttgtcacctgcccagcagcaaggtatcctcagcaagatggtccaagcggaagacactgccccaggcatcgtggagatacaaggggctttctttaaggaagtgtctctctttgatttaaggaggcaacctggattcaactctacagtcctgaaggataaggaacttggaaggagccaggctctgttcctgtatgagcttctgttaaagaccaccagaaggcctgaggagcttttgagtgctgggcagctggtcaaaggcgtgacctgctcacacattgatgccatgagcactgacttctttctggcccatttccaggattttcagaacaacttcgccctgctttcaccctatcaggttaattgtttggcgtggaaatactgggaagtttccagattgtctatgccacctttcctcttggctgcactcccggcccgctacctggcttctgtcccagcctcccagtgtgtgccctttctgatcagcctggggaagagctggttggactccttggttttagattcccacaaaaagacttcagtcctcaggaaagtgcagcagtgcctggacgactccattgctgatgagtacactgtggacatcatggggaacctgctgtgtcacttgccggcagccatcatcgacagggggatctcccccagggcttgggcgactgctctacacggcctcagagactgcccagacctcaaccctgagcaaaaggctgcagtgaggctcaagctcctgggacagtatggactccctcagcactggacagctgagaccacgaaggacttgggaccctttctagtacttttctcaggagatgaattaagctctatagccacaaagtttcctgagatccttctgcaagcagcttccaagatggccaggaccctgcccactaaagaattcctctgggctgtctttcagtctgttcggaacagcagtgataagatccccagctatgaccctatgcctggttgccatggagtcgtggccccctcttctgatgacatcttcaagttggccgaagccaacgcctgctgggccctggaggacctgcggtgcatggaggaagacacattcatcaggaccgtggaactgctgggagctgtccagggtttcagccggcctcagctgatgaccctgaaggagaaagcaatacaggtttgggacatgccatcttactggagagaacaccatatcgtctccctggggcgcattgctctggctcttaatgagagtgagctggagcagctggacctcagctccatagacactgtggcttccctaagctggcaaacagaatggaccccgggacaggctgaatccattttgcaagggtacctggatgattcaggatacagtatccaggacctgaagagctttcatttggtaggacttggtgcaaccctgtgtgctataaacatcactgaaatcccacttataaagatctcagaattcagggtggtagtggccagaattgggaccctgctctgcagcacacatgtcttagccgagtttaagaggaaggctgaagttgtgtttggggatcccactgagtggaccagttctgtcttgcaggagcttgggaccattgcagctggattaactaaggcagagctccggatgcttgacaaggatttgatgccatatttccagccatcagcaataaaatgccttcctgatgagatattcaaagagctgtccgcggagcagatcgcctccctgggtccggagaacgccgcggcggtgacccacgcccagcgccggcggctcagtccactgcagctgcagagcctccagcaggcgctagatggcgccaagactcactcctggcaggacgcgcccgctagcgccggtcccactagaacctcatcctcgcgttctcccgcaggagctctccagtcgtggggtctttggcttggttgtcccctgctggttctaatggccaagctcctgtggtgagtggcctgagcgcatcgtcctgtgttgccccaagcagctggccaacgtgtgtagagacaggatgctccagatggtgggacacccttccctggatccagaccctcatctagggcagggaaaccctggggccttgatggtgaaaatgcaccccaaatgaaaaataattattaaaaatgatcttgcaaatt

SEQ ID NO: 1557 - DNA, 4435 bp, Homo sapiens
cttgttctcattatatatgtggtatattttacagggaaattatattttctttcacactttacttgttatttctctaggagaggactgctgttttttcttaaagttcataaaatagatatatttgtgtatatgaaccaaactgaaggcacttctaatgagtgtttctacatttttagggaagcaggaattgaggaacagattctccagccatggattgtggtgaatctcgtggtggctcttctggttggattatcttggctatttttgtcttataggccaggcatggatcttagtgaagagttaatgttctcctcagaggtggaagaatatcctgataaagagaaagaaatcaaagcctcttcataataccagctcacctttggaggaataatgacccagtatttgtcccatttttgtttttaaatgtatttttataagatgtatacatgtgtatttgtaatagattttttgattatataatactgaaacatctctcaatattatgaaaaatgttaaaattgtgtttgctgtttatgtctaaacattaatttgtctagcattatcatcttaatgacaaagggaataatgaactagaaaccagcaagtgaaagtgtttatttcctattttctcaaaacagttgtatttataactattaccttaaaaagcactggtttagaaaaagccataacttaaatagtgttataaaatatatatcaggtttaaacataaatttagcgaatatggtagaagggaaaaaagccttcatttttgacctccccttactgaataaattgaaatatgaagtttgtcttttctgaaactggcttagtgattgagtatcatgtaataattataatataatttagcttgaaagatgctctacattatgaccaataaaaagggaatgtatgttttgtttgaaaaattatataacctaaattttttacctagaagtaactaaaaagttgcttctcattataatctgtactagtggttctcatatctggttgtacatcaggatcatagagggagattttaaaaatctatgtagcaaaagaggctgagcagggcaaggctcaggggaataaaggagagacctgtgagcttgtgggctcccagttgacatctgcagtaccctttcctctgtcccttttttctgagtgacaagaaataggagtagaaattcaccatctctgttctccagctctttgtcagagaggtttctggttttccaggaaatccccctcttgagatgggtcctgcactgggaaagatctcttcagaactatatccaatggtacctcagctgttgtatatgagaccctaaagctcaagttgaggagaagactagctatgggaaaaaatgtttcaaaggctgttgagcacatcaataaaactattgagcctgccctgattagcaagcacctgaatgttatagaacagaagaggattgacaaattgatgatagagacagttgaccctgacaataggtctaaatttggagtgaacattatactgggaatctcttttgctgtttgtaaggctggagctgccgaaaagggattctccctgctgtcacagaattgtgaatttgctggcaattctgaaggcatcctgctagttccagctttcactgtgaccagcaatggttctcaatctggcaataagctggcagtataggagttcataatcttccccgtcagcaaacttcagggaagccatgctcgttagagccaaggcttagcacacttgagccgtgtcatcaaagagaaatgtgagaaagctgctgccaatgtgggggattgtggtaggctgcataatgcctcctaaagatgtccatgtcctaatccctggaacttgtgaatatactactttacttggccaaagggatttgcagatatgattaaggttatgaaccttaaaacggggacattatcctgtattatccagaagggtccagtgtaatcttatgagtccttaaaagcagagaagaaagccttttatgtctgtggtcagagaggtcagaagttatgatattgctggctttgaagatggaagagggggccatgagccaaggagagtaatgaccttgcagctgagtacggcccttggccaacaatgagcaaggaaatggatttcagtcacataaccacaaggaactgagttctatgagtatcccaaatgagcaaggaaacaaatcctcccctagagccaagaaaggaaggcagctctgtggataccttggttttggcctggtgctgcccatgtcatacttttgacatacagaactgtaagatagcaagtgtatgttgactaagctgctaaattggtggtgattgcttatggcagcaatagaaagctatatatcctagagaataaagaaggctagagctgctgtggaatgcacttgggaaagctggctacattgataatatgtaactgccatgggcatagttgcctttgtattcttccaggtctgggaagtacaacttagacttcagatctcgtaatgacccaggaggcatataaacctgagcagctagtggccctgtacaagtccttcatcagggaaaaacattgagtattccctgattaaggacttgtacagaggactctgttttccctggtgtttctggtgtgtctcaaaaattgtttgactgtgatgacagggaagtttggaagaagttcactgctaatgcatgtctccaggaagcagggaatgatctcacagtgacacttgaggcacattgctgaggccgtcgatgagaattcatgtaactttctccagcttacagtggactagattgacatgcgagctgatccagtccaattggtagggcatcatggtttctcattactcactgacttaaaatacttttattgccatcctggtgaagcactgcactgggtagataacacaggggcaccttgctgatcagagcccttggccaggtacaaagagctcagtttctaaaactctgtcatttcaataatgttataaattgaatcatacagtatgtaattttatgggattcgctttttttctgttgatctctttttttctgagtcatctcagctgttgtgtgtatcaatagttcatttccttttactgttttgtttggtttaactcattgacctattgaaggatatctgggctcattccagtctgtgaataatgctgctgtggacattcatgtgcaagtttttgtgtgaacattaagttttcatttctttaagataaatgcccaggagtgaaactgatgggttgtatgtagttacaaactgccaagctgttttccagagttggcggtaccattctaatttcccatgacaattttttgaagagtccaagctagttgctttagagtgcctcacctacattttttaattgtctgactttttcctaatgacatcacttaatttgttcctcaatctcctgaatttcctatagactggtggttaggtctggtggtttgattagattttttaaaaaaatatgacttcatctgtgatgctgtgtactttatgttgcataacatgaaccctaagaacagagtgagctgctggacagcaagtttcatggggtgcagtaattaacacaccacatagtataaatctgaaataatgacaaatgtgttaagggccttgggatattgggccatgtactctgaggagcacaaggtgaggtgcaggttcctgcccctaaagaactctatcttttgagattagcaactaacagtgtgagcccactaataggatgtgaaagttgtcaaaatcaagttctggtcattgtgttaaaaatcctaacaaatagagctggggaaggccgtgaaaggacgattttcatgcacagatgtctgataatgaggactatcattaaaagactgcacaaaaccacaccttgcacaaaggccatcacaacctgacacacacaaaaaatacttctatgaggacatttgcccagcaactccctgtccaatgtccaactggcaacatccttgttattgatccttgtagccaaggataattctctcaaaacaatcatttttgctttaaaaaccgttgtcttccttgacctccctgtatatgcacatagtttactgtggcacttgtattcttattgcaatgcctactcctgaataaacatcattttctttcagagagtctccctctctgttatttaggctgacaaggatatgccaagaagtagcttggatatagcagttaactctgcctttaggatgtgtgtatggggatataagagttaactaaaagctgacctttgagttggtccttgaataaaagaagaatagattccaaaaataagaggaataaataatgatcctgagctaggagagtacattttgcagacctttggtttccatattaagaaattcagatttttatgtacaataaagaagttctggaattctc

SEQ ID NO: 1558 - DNA, 5362 bp, Homo sapiens
ttttatgcaaaacatcccttttccttcaccacaaagaccgagaatccttgtccagctgtcagtccatgatgcattaatattatcacagccagtttctacacctttaccactaagtggagccaactttagcaccttgctaatgaatctgggtcctgagaattgtgcaacactgctgctctttgttttacttgagagtaaaattctgctgcattctcttaggccagctgtcttgactggggtagctgaagctgttgtagctatgatctttccatttcagtggcaatgcccatatattcccctttgtcctctttcactggctgcagtgcttagtgcacctttaccatttatagttggagttgactcaaggtattttgatcttcatgacccaccacaagatgttgtttgcattgacttggatacgaacatgttatatgtatcagatgaaaagaagaacatgaactggaagcaacttcccaaaaagccgtgcaaaaatctacttagcaccttaaagaaattgtatccccagctgtcttcagttcaccaaaaaactcaagaaggctcagcgattgacatgactccaattgaagcagatttctcctggcaaaagaagatgacacagcttgagatggaaattcaagaggcatttttgcgctttatggcgtctattttaaaaggatatagaacatatctcagaccaatcacagaggctccttcaaataaagccacagctgctgattcattgtttgaccgacagggatttttaaaaagtcgagatcgtgcctatgcaaaattctatacccttttatccaaaacacagatttttattcgtttcattgaagaatgcagttttgtaagtgataaagatactggattagcattttttgatgactgcatagaaaagttgtttcctgataaaggcacagagaaaacagataaggttgattttgattcagcagaagataccagattgatagaactagatgattcacagaaaggtgagcatactgtatttataatgccgccagagccacctcctgatgatggaaaggacctgtcaccaaagtacagttacaaatactttccaagactggaccttaagctttttgacagaccgcaggagttgaaactttgttttagtagacaccctactgggaatagcattacaaagagtccacctctcatggctaagagaactaaacaggaaataaaaacagctcataaattggcgaagagatgttatacaaatccaccacagtgggccaagtgtctgtttagtcattgttacagtttatggtttatttgtcttccggcctatgttagagtttctcatcctaaagtcagagcacttcagcaggcatatgatgtacttattaagatgaggaaaacagatgtggatcccttagatgaggtgtgctatcgagtagtgatgcagctttgtggactttggggtcatcctgttttagcagtgagagtcttatttgaaatgaaaactgctaggataaagcctaatgctattacttatggttattataataaggtagtcttggagagcccgtggcctagcagtacccgcagtggtattttcttatggacgaaggtacggaatgtggtacgtggcttggcacagtttaggcagccgcttaaaaagactgtgcaaaggtcacaggtctcctcaatatcaggtggtcagtctgaccaaggatacgggtctaaggatgaacttataaaggatgatgcagaaattcatgtgcctgaagaacaggcagcaagagaattgataactaaaacaaaaatgcaaacagaagaggtgtgtgatgcctctgctattgtggcaaaacattcacaacctagtccagagcctcacagtcctactgaacctcctgcatggggcagcagtattgtgaaagttccgtctggtatatttgatgtcaacagcaggaaaagtagcactggtagtatatcaaatgtgctgttttctactcaagatccagttgaagatgcagtctttggcgaagctactaatctcaagaagaatggtgatagaggagaaaaaagacaaaagcattttcctgagaggagttgtagttttagttctgaaagtcgagcaggaatgttgcttaagaagagtagtttggattcgaattcaagtgaaatggctatcatgatgggagcagatgccaagattctcacagcagcattgacatgtcctaagacttctctacttcatattgcaagaacccatagctttgagaatgttagctgtcacctacctgatagtaggacttgtatgtctgaaagcacttggaatcctgagcacagatcatctccggtgccagagatgcttgaggaaagccaagaactccttgagcctgtggttgatgacgtacctaaaactactgcaacagtagatacatatgagagtctactaagtgatagtaacagtaatcagtccagagacttgaaaacagtatccaaagatctgaggaataagagaagtagtttatatggtattgctaaggtggttcagagggaagatgttgaaactggactagatcctttgtctcttttagccactgaatgtacaggaggaaaaactcctgattctgaagataagttgttttctccagttattgcacgtaatctggctgatgaaatagaaagctatatgaacctaaaaagtcccctaggtagtaaatcttctagtatggaattacacagagaggaaaacagagagtctggcatgactactgcatttattcatgctctagagaggagatcaagcctacctttagatcatggttcaccagcacaggaaaatcctgaaagtgaaaagagctcacctgcagtgtccaggtctaaaacttttactgggcgtttcaagcagcaaaccccctctcgaactcataaagaacgttcaacttctttgtcagcactggtgcgttcttcgccacatggctcgttgggttctgtagtaaattctttgtcagggctaaagctggataatatactctcagggcccaagatagatgtcctgaaatctggtatgaaacaagcagcgacagtagccagtaagatgtgggtagctgttgcgtctgcctacagctactcagatgatgaggaagaaactaatagagactacagcttcccagctggcctagaagaccatattttgggggagaatatatcgcctaacacaagtatctcagggttggtccccagtgaacttacccagagcaacacaagtcttggcagtagcagcagtagtggagatgtaggaaaactgcattatccaacaggtgaagttccatttccaagaggcatgaaagggcaagactttgaaaaatcagatcatggttcttctcaaaataccagcatgtctagcatctatcagaattgtgcaatggaggttttgatgtccagttgttcacagtgtagagcttgtggagctttagtttatgatgaagaaattatggctggatggacagcagatgactcaaatttgaatacagcttgtccattctgtaaaagcaacttcttgcctcttctcaatatagaattcaaagatttgagaggttctgcaagctttttcctgaaaccaagtacctctggtgacagtttacaaagtggaagcattccattggcaaatgaatccttggagcacaaacctgtatccagtttagcagaacctgacttgatcaactttatggacttcccaaaacataaccagatcataactgaagaaacaggctctgcagttgaaccaagtgatgaaataaagagagccagtggagatgtccaaactatgaaaatttcatctgtgcctaatagtttatcaaagcgaaatgtgtctttgactcgaagtcacagtgttggaggcccattgcagaatattgactttacccagcgaccgtttcatggcatctcaacagttagtcttccaaatagtctgcaggaagttgtggatcctttaggaaaaagacccaatcctccccctgtttctgtgccctacttgagtcctctagtactccgtaaagaacttgaatctttgctagaaaatgaaggtgatcaggtgattcatacatcttctttcatcaatcaacatccaatcattttctggaacctcgtttggtatttcagacgtttggaccttcctagtaacttgccaggacttatcctcacatctgaacattgtaatgaaggtgtacagcttcctctgtcatctctgtcccaggatagcaaacttgtgtatattcagctgttatgggataatatcaaccttcatcaggaaccaagagaacctctgtatgtctcatggaggaattttaattctgaaaagaaatcatctctcctgtcagaggaacaacaagaaacaagcactttagtagaaaccatcaggcagagtattcagcacaataatgttcttaaacccatcaacctactttcacagcaaatgaagccaggcatgaaaagacaaaggagtttatacagagaaatcctcttcttatcattagtgtctctaggaagagagaatattgatattgaggcatttgacaatgaatatggaattgcatacaatagtctgtcttcagagattcttgaaaggttgcagaaaattgatgctccaccaagtgccagtgtcgagtggtgcaggaagtgttttggagcgcctctcatttaaatagagattcactagaatgttgacacacaaggcttggggattagatttcatctggaaacattcaagttttttttccaaatcgtaagaactggtgaatacggaattgaagtaactcttggggacaatatataatgaattatgattcatattgcattaccttgaaatatgaagtgccatttgaatgtcccagggcttattaatattgaagattttcaacccctgaactgcttttctgcctctgtggaaaactactttgggattcttcagtatttgtagtagtttgatagaaataatgaggaaccatattcattctaggcattgtttatatttgaagttactgagtttgaggaatggcaaattaaatttgcctaacccccaaaacaaatgaaatatctcaattataaaagcaacatggccgggcacggtggctcaggcctgtaatcccagcactttgggaggctgagcaaggtgggtggatcacttgaggccaggagttcgagaccagcctggccaacacggtgagaccctgtctttactaaaaatacaaaaattagccaggcgcaccactgtagtcccagctactcaggctgaggcaggagaatcgcttgaactgaggcagaggctacagtgagtggagatcacgccactgcaactccagcttgggtgacagagtgagaccgtctc

SEQ ID NO: 1559 - DNA, 3840 bp, Homo sapiens
taagtccgggcagcggttggcccctgggcacgcggggtcggggccgcccctggtccaccgctgctgctcggtggctgggccgtccgcctccacccctctcgcagtcatgtgcctggcagggtgaggggcgggggccggcgatgcccgcgaggctgccccccagactcctgggctggaaggagcgattggccgccgaggtgggaaagcaggcctgcgccttggggtctcctcgaggtgtgttccttattccctgcatcctgatagccctggtcggaggaatccccattttcttcttggagatctcgctgggccagttcatgaaggccggcagcatcaatgtctggaacatctgtcccttgttcaaaggtgagcagcccttggccagcctcagggactgcccccttttcccagctggctcccacttgagaaatcttttcctgtcctgagcaccaggcctggggccacgtgatggcatcccagtctcgaggggggagcctggaggagatgttcaggccgcacagtgaatttggggaagcagggactagagggggcataggcagctccacaaggcaaggacaggccaggcatagccgggctggggatgggacctgcccagcacacttggctctctaggtaggtcctactattactgtccccaaggacgctggggcacagacaggtggagcgacgtactgaggttgcccactacgggggcaactgtctccaacactacctcaggctactagaaactccccccctccccaccaccaccaccaccagctgctgaggactggagctactgggtggccaggtggaggcttggacctcctggaaccgccatggtggcagtgggacccacagaaggggccaggtgtgtaaggctggagactcaacagcacttggtcagatggggacaggaggagaggggctcgctctgccttgggtctagggggcggctggaggagaggagagaggctggggagtcagcccagtgttggggctcacacaagggggagtccaggggagtcaggagcaccacaaacaaggctccagaaggacagacggtgggagcactgccagcctgggtggggagataaaggggtggcaggggaggtggccaggaaagaatctacatggcaaggacttcccggccccaggcctgggctatgcctccatggtgatcgttttctactgcaacacctactacatcatggtgctggcctggggcttctattacctggtcaagtcctttagcaccacgctgccctgggccacatgtggccacacctggaacactcccgactgtgtggagatcttccgccatgaagactgtgccagtgccagcctggccaacctcacttgtgaccagcttgctgaccgccagtcccctgtcatcgagttctgggagaacaaagtcttgaggctgtctgggggactggaggtgccaggggccctcaactgggaggtgaccctttgtctgctggcctgctgggtgctggtctacttctgtgtctgaaagggggtcaaatccatgggaaaggtaccactagaggcatgcaggggggagggtggctcagccctgggagctggatgtctgtgccaggcacacccgtagcaacgggaggtgaccagacagagtctagccctaaggaagggggaggtactgaaagccaagcaacactccccaccctgcaaatccagggcccagcagcctttgctcctgtggggagaggccccagcaggcactgtcccttccctgtgcccatcacccccaccggtgccctcctgccagtctctgactcttgtgacagtctgctggacctggtctggccatctgttacctgcctatcttgccttggggacacagagcagagtctggccacatcccttgggggctcctggtcaggctggggagtcacctgaacaaagaagacaatgtccagagctgtgggacatggccagctccctgggggacaaggtccccagagcagcatgtgggaagagggggcagacagtgtggcagccgcatcttgcctgcctctgcctggcccagttccactcttcacctgctcagccccgacctctctccagaagaggaggggggcccggccctgatccaatatcccgctccctgcctgggcctcccatgcgtgcactgcccacacactcacacagctctcactccccacatgctccatgcctcctgtccccactgaggagagctcctagaggctcgcccgctccccactgacatgcatccctgcagacaaacgaggcgcccagagagcttccccactgcacttgccagggctgccggggcccagccttgcccctagcttcctctggcgggagctatggctcggaggagaatggggacctctgaacatacctgcccgcaagggggaccggaggtgctcggagtgggcttgtgagggaggtggtgccgcagtccccgctgagcagcctggccccccagatcgtgtacttcactgctacattcccctacgtggtcctggtcgtgctgcttgtgcttggagtgctgctgcctggcgccctggacagcatcatttactatctcaagcctgactggtcaaagctggggtcccctcaggtgaggtggaggtggggaggctgcagcagggtgttgtgggggagccctgcaggcccctcatgcctgcactctccagccctcctctaggtatggatagatgtggggacccagattttcttttcttatgccattggcctgggggccctcacagccctgggcagctacaaccgcttcaacaacaactgctacaagacgccatcatcctggctgtcatcaacagtgggaccagcttctttgctggcttcgtggtcttctccatcctgggcttcatggctgcagagcagggcatgcacatctccaaggtggcagagtcagggtgggatgtatgtcttccagctgtttgactactactcagccagtggcaccaccctgctctggcaggccttttgggagtgcgtggtggtggtctgggtgtatggagctgaccgcttcacggacgacattgcctgtatgatcgggtaccgaccttgcccctggatgaaatggtgctggtccttcttcaccccgctggtttgcatgggcatcttcatcttcaacgttgtgtactacaagccgctggtctacaaaaacaccaacgtgtacccgtggtggggtgaggccatgggctgggccttcgtgctgtcctccatgctgtgcatgccactgcacctcctgggctgcctcctcagggccaagggcaccatggctgagtgctggaagcacctgacccagcccatctggggcctccaccacttggagtaccgagctcaggatgcagatgtcaggggcctgaccaccctgaccccagtgtccgagagcagcaaggtcgtcgtggtggagagtgtcatgggacagctcagctcacatcaccagctcacctctggtctgtggggcaagaggctgcaatattccatcctgggtgtctgggctgctaacctggcctgctcaggcttcccaccctgtgccctgggctgggcacacccccgggaagggaccccggacacggctcccacatccaggctcaaggcggatgcacttcctgcacctccagtcttctgtgtagcggctttaacccacgtatgtctgtcacgtccagtcccgagacggctgagtgaccccaagaaaggcttccctgacacccggacagaggctggagggctggggctgggtgagggtggtgggcctgcggggacattcttactgtgctaaaaagccactgcaaacatagcaataaaaacctgtcattttcc

SEQ ID NO: 1560 - DNA, 3844 bp, Homo sapiens
tgggactacaggtgcctgccacgcctggctaattttttgtatttttagtagagacggggtttcactgtgttagccaggatggtctcggtcttcagatcttgtgatctgcccaccttggcctcccaacgtgctgggattataggtgtgagccactgtgccaggccaaccgtaaggttttttctttttcttttttttttttttgagatggagtctagctctgtcaccaggcttgagtgcagtgatgtgatctcagctcaccacaacctccgaccccctggttcaagtgattctcctgccttagactcccaagtagctaggattacgggcatgcgccaccacacccagctaatttttgtatttttggtagagacggggtttcaccatattggccaggatggtctccatctccttacctcgtgatccacccgcctcagcctcccaaagtgctgggcctataggtgtgagccacggtgcccagccagccctaagcttttatgcttctatgaggattgctagtacatcttttctttgagctttgaactctttcccattctctagattttcatttctccttgctgcagatggccacttcaaattcaaaatgtttgaaatgggaagcaaatttaccaccaagtcaaccttttctcctgttatattaccctcttatttctacctataacactacagtgcttccagtcagcagggcttgaacttggagtcttttttaaaaaatggcttacttgagatgtaatcaaactttacatattgaatgtataaagtttggtctgttttagaaccattgcaaccatcaagatgatcaactctatcaccccaaaagtatctttaagttctttttaaatttatttctctctctagctccatcctgaggcaaatgctgatctaatttctgtcactatagatttcttttcattttcttgagttttgtatgaatgaaatcatacagtgtgtactcagcacaatgatgtggagatttatccacattgttgcatgcattcatatctttttctttttattgccaaatagtacgtcacacatggatgtaccataatttgtttatccattcacttgttgatgacatttggattgtttccaatttttgatttttagaaataaagctgctattaacattggtattgtaaaccaaaaagtacctgagacaagtcttaatcaatttaaaagtttattttgccaaggttaaggacgcggccatgacacagcctcagaaagtcctgatgacatgtgcccaaagtaataggctacaactgggttttacacatttctgagagacaaaaaacatcagtcagtacatgtaagatgtacattggtttggtcccgaaatgtaggacaacaggatgtggaggcttccaggtcataggcagattaaaagatttttctgattggcagttggttgagttatataaagacctggaatctaatctgtcgtgggagttttaagaaaagtaaaattaaaataaagacctggaatcagtagaaagaaatgtctgggttacaataaagggttgtggagaccaaggttttatcatccagatgaagcctccaggtagtaggcttcagagagaatagattgtaaatgtttcttatcagacttaaagagccttttctatcagttttaaggtctgtgttgatgttaatggtattgaggcacgtctgacttctccttcccatcatggcctgaactagttttacaggttaactttggaatgcccttggctgagaggagaggtccattcagaatgtttgcgggcttagaattttatttttgatttgaagtatacaagtctctcgagtaaatttctaggaggtaagtgtatacttaaatttcaaagaaactgccaagctgtttccgaaagtagtcgtacaattcctatcagcagcatgtgagagtatagttgctccatatcctcactgtctttatccatttatgatactataacaaaatgttccagttctagtacacatatatacatgcagaatatataacaagcagaatataatcttttatcttttaactttaatcttttctgactctattagtccgttctcacgcagctaataaagacataataaagactgaataatttataaaggaaagaggttaatttgctcacagttcagcatggctagggaggcctcaggaaacttacaatcatggcggaagggaaagcaggcatgtccttcttcatatggcagcagcaaggagaagtgcaaagtgaaggaggggaaaagccccttataaaaccaacagatctcgtaagaactcactcactatcacaagaacagtatggaggtaattgtccccatgattcaattacctcccaccacattcctcccacaacatgtgggaattatgggaactacaatttaagatgaaatatgggtggggacatagccgaaccatatcactgatcattgagtatattattaactttctacgtagattcaatgattcagcttcatattattaactttctatgtagactcaatgattcaactacttaaatatgtctaggctactaataaaccttcttgaatgaataacagatgaacaactgaatataaatgaaaacagatggccataaagaagaggattcagaattgtcatcagcccttcacaatcactgcattttctctaataagctcacatgcccatagcacattgccaaagtttattgacttcttccagaatttttgtataaaattatgattatgatctcatagagttcaggattgcttaccaaagagcataccctcaccaggatgatgccctttcaaaggacctggtgccccaaggagcactgggggagggaggcatacagatgcattgcatgacattcttaacctaaaccctgctttatgatctcagaatcttccaaacttctagtccttccagatctgaaaatctgtagtcactccatgatccagagacagaaggcaagcagaatttggtatctggataccaaacactgatgttgtgttgtgaatctttgttatcaagattcttgtgcctttaaattacgtatttgtggatttgacctattgagatatatcaatattcctatgcatatatacatatttgcccaataaatcttttgataaacaaagaagggtagtataattcttagaaaacagtggtttctgctattgagctatttgctttagatttgatgtgtctataaatggctatacaaaatatgttttaagtagtgataatagattagatattaagcaactgaatgtggcagctaggactaaggtatattaccaagtttttatcttcattgaacaaatcatagaagaaagtggggaattcatttcatacctttctctgtatatactccatattgatttaactacttaaatcatctcatgggtatataactcttatttcatctatatctttttttccctgactcctctgatagcttaggagagaagaaaggtatgttcagaggcatatgcaaagacctgccagaacactcacaaatggggtgatgagagtaacggggtagtgagaagcattaattttgtatagaagtcagatatacaagcattaaaatatatgcctattataaccacttaaattatggttcattttgatagaaaaaaattctgctgaaaatctaatttcaggcagttgttcaccaagcagaatcatagtaactatcctatctgtgctttctatgtatttatcttgctgactgattgtgcttgttatggtaatcatttactagtcactctatgtaatgtctcacaaactgtaacttgaataaaggcaagttactagaccttagtaccaaaaagt

SEQ ID NO: 1561 - DNA, 4445 bp, Homo sapiens
aaaggggatgcccagagctcagttgcttgaaggcgatgggaaatctcgtcatccctctagggaagggcagggcaggcagggttgagagtgggcagaggattccacccccagctcccagaccatctgtggagtgcacaggagacgacattgcacttcagatggagaaaatgctctttcctctgaagagccctagtgccacatggctgagccctagctccactccctggatgatggatttcatcctcaccagtgtgtgtggcctagtgctcctcttcctattgctcctctacgtccacagtgacccaccctcacccccgcccgggaggaagaggagcagcagggagcctcaaagggagagaagcgggaggtccaggagcaggaagatctcagctctgaaagcttgcagaatcctcctgagggagctggaggagactcgggacctgaactaccttctggaaagccacctgaggaagctcgctggcgaaggcagctcccacctgcccttaggtggagaccccctgggggacgtgtgtaaaccagtgcctgctaaggcccaccagccgcatgggaaatgcatgcaagatccgtctcctgccagcttgtccccaccagctcccccagctcctctggcctccaccctgtcaccaggcccgatgaccttctcagagccttttggaccacactcaaccctgagtgcctccgggccaccagagcccttgcttcccctaaaatgccctgcaacccagccacatgtggtttttcctccttcaccacagccgcatggtcccctggcctcctctccacctccacccgactccagcctggctggacttcagtgtggctccacaacatgccccgtcccccagagctcccctctacacaaccaggtgctgcctcctccaaccagggtgatctctggcctggggtgctccagcgatcccatctgggacctctattgctggagggaggctgccaccacctggggcctctccacctactcacatggcaaatcccagccacggcatcttcccgaccacccctcagaggcttccttctggggagaccccacacccaagcacatggaggtaggtggctgcacattcatccaccctgacgtgcagaagctgctggagaccctcatcgccaagagagcactgatgaagatgtggcaggagaaagaaagaaaacgggccgaccacccgcacatgacatcactggggaaggagtgggacatcacgaccctaaatcccttctggaacgtgtcaacccagccacagcagctgccccgtcctcagcaagtctctgatgccacaaccgtggggaaccacttacagcagaaacgcagccagcttttctgggacctcccctctctcaatagcgagtccctggcgaccacagtctgggtttctaggaacccttcctcacagaatgcacactctgtaccactggataaagcctccacttctcttccaggtgaacctgaggttgaggcatcctcacagctttcccaggcaccgccccagccccaccacatggcccagccccaacatttcactccagcctggccccagtcccagcccccacctttggctgagatccagacccaggcccacctctcaccccctgtcccaagcctggggtgctcttctccaccccagattaggggctgtggggcatcttaccctacatcccaggagaggacacagtctgtcatccccactggaaaggagtatcttgaatggcccttgaagaagcgaccaaagtggaagagggttttgccctctctcctcaaaaagtctcaggctgttctgagccagcccactgcccaccttccccaagagaggccggcctcctggagccccaagtcagcccccatccttcccggggttgtcaccagccctgagctcccagagcactggtggcaaggaaggaatgccatccaccaggagcagtcctgtggccctcccagcagattgcaggcatctggggacctgctacagcctgatggggaattcccagggaggccccagagtcaggcagaagacacgcagcaggccctcttgccctcccagccttctgaatttgcagggaagggcaggaaggatgtgcagaagaccgggttcaggagctccggaaggttctctgacaaggggtgcttagggtccaaactagggccggacccaagccgggatcaaggctcaggaaggacctcagtgaaggctctggacgaagacaaggaggcagaaggtgacttacggaggtcctggaagtaccaatcagtaagttccacacccagggacccagacaaggagcatctggaaaacaagctgcaaatccatctggccaggaaggtaggggagatcaaagagggctggatccccatgcctgtgcgtcgctcctggctcatggccaaatgtgctgttcccaagtctgacacccacaggaaacctgagaagctggcatcctggaggggtgggaaagcccacgtgaacacctcccaggagctttccttcctccatccctgcacccagcagatactggaagtacatcttgtaaggttctgtgtgaggcacagctggggtacagacctccagtccctggagcccataaatgtctggtcaggtgaggctcaggccccgcccttcccacaatccacctttaccccctgggcctcctgggtatctcgggttgaatctgtacccaaggttcccattttcctgggaaaacgtcctcagagtggtccaggagacaacagaacaacaagcaagtcagtcccgaccgtgagtggccctctcgctgccccaccgcctgagcaggagggagtccagaggcccccgagagggtcccagtcagctgatacccatgggcgatcagaggcctttccgactggacacaagggcagggggtgttctcagcccccaacatgcagccttgtgggcagaacctggcagagcaggactgtcctggaatccgggaaacccaaacccagactagaggggagtatgggttcagaaatggctgggaacgaggcatggcttgagagtgagagcatgtccccaggagacccctgtagtagcagagccctgcaagagctcagcatagggtcccagtgggcaagggctgaagatgccctgcaggcactgaaagtgggggagaagcccccaacttgggaagtcaccttgggagccagtgtgagggcaagttcgggaagtgttcaggaggatctgaggagcacaggggctctggggaccactggtaacccctcagcgtcttcagtctgtgttgctcaggatccagagcagctgcacctgaaagcgcaggtggtcagtgagattgcgctcatagtgcaggtggactcagaggagcagctgccaggccgtgccccgggcatcctcctccaggacggcgccacaggcctgtgccttccaggccgccacatggacatgctcaccgccgcagacaggctgcccactcaagcccctctgtccacctcccagagtgtgtctggtaagaacatgacagcttcccaggggccatgtgccctcctatggaagggaggggacagtccagggcagcaggagcctgggagcccaaaagcaaaggccccacagaagagtcagaagacgctgggctgtgcgggcaagggcgaggcccacaggaggcccagaacaggggagcagggacacaggtccaagggacccaggacctctgaagccagtgggaggagccaccctgcccaagccagggaaataggagacaaacaagaaaggaaatacaaccagcttcagctggagaagggacagacaccaccagaaagccacttccagagaaagatcagtcaccatccacagggtctacaccccaggaaaggaggcacacggtgggaagatgtcctgcagaaaggcaagcctggggcagatgctttccagagctgggggtctggcccaccaaggcagtttatggactgcatggctgacaaagcctggaccatcagcagagttgtgggacaaatcctggtggacaaactggggcttcagtggggacgaggtccctcagaggtcaatcgccacaaaggtgacttccacgcccaggagaatgtgccttcctgctgccacaggggtcactgccaccaagaacgtagcagagagatgagagctctggcctgcagccctaaagccacccccaagggccaccactgtcctgtcaaaaacaggggcatcagagacagagacagcagttgggccccacctcccagggagcctgtgtccccagctggtccccaccaccacaggccaagaatggcaagcacctcgggcggcccccatccacagctgcaggaactgatgtctgcacagaggtgtcttgcctcctgaactagaccagtcttcttgcatgtctcctgggggagacagggggttctactcaaataaaactgatgcctacac

SEQ ID NO: 1562 - DNA, 4137 bp, Homo sapiens
cttaacagtggggttaattcagactctaaaatctttcagctctaacactccaagaaaggctgtgtttgcgggaagcatgcagttgctggccggagtcaagctgtgcacgggaaggaccctaaccaaccacccgcactatgaagacagcagcctgagagagcggaccagagcggtttatcagatatatgccaagagggcaccagaggaagtgcatgccctcctaaggtccttcggcactgactacgtaatcctggaagacagcatctgctacgagcggaggcaccgccggggctgccgactccgggacctgctggacattgccaacggccacatgatggatggcccaggagagaatgatcctgatttgaaacctgcagaccaccctcgcttctgtgaagagatcaaaagaaacctgcctccctacgtggcctacttcaccagagtgttccagaacaaaaccttccacgtttacaagctgtccagaaacaagtagcgcagatttctgcccagtgtctatttttgatacggagaaactgcatcatgatgaaactcaatagatgacgtttcctatgtaagtaggtagcccaaaccttcaagctgtgatatgagtaagttctacagatgtttacacaagtgttgccatctttgaaagcatcttctacaagcagaagtctttttcgttgtgtgtctatctttctcattaatgttctttagcctaaatgttaacaactttctaagagtgacctagaattatgttgttggagagaatgatgtgtgttccatggatacctggataggcacataacatgttggaagatgagcacctgctcaggatttgaaatacgtttaattttcaggtgacttaagacagctatgattgaatcaactagagatgatgatcgacttatttaatatgatttcactggtgaagaccaattggtagctttttaaaaagcactttagtgtcctgttttaccttaaaatgttataatattttccagttgtcatgctgtcaacattaacaaaaaaaatcatgttaaggctttgtatcaaacattttgttacactctgtctgaaatgtaatgtggagtacttcagcagtatgtgtcatgtattgtgtgtgtctgtgtgtgtgcatgtgcacacatgtgttttaatgctgggcacagaaaagtgttacaagttccatatcgtaagtccttaaaggggcagaaatatatgtagccaagtagaatttattacattttagtgttattattttaaaacttactgatactctttaacctctcctgcagtaatagttttgctttatttcttactcatttcaatttattgggtttgcaaaattttgtaaactttttgtgtttttagcctttgtattttttacagcctagaatcttgcaaagtctgaatattttttaaatgttctatcttaactagttcactaatacagtatttttagcagacagcattttcagacagcattttcataccaagtttgacttgtggtctccaatcttactgggaaggccctggtagtgtaattcttttccttattaaaaggtaaccaagtgcctctaagtcatgcttatttgtaaacaacaaagaagagtatatgtacctgctcaaaatttttttgataattgcttatataattaatttctaatgatgaggacatgtaaaagttgccagtaagaacatagtatgcatttaattaaatcaagatggctaatggaattaactttctcccctgttcttgccaggtggaaatgatttaagcatttctccttgcagttgtattgaagtaaattaccataggcatcaagatggctgcatcacattttcaaatgattttatattcagttgctacttataaagcagcattcaaaaagtcttttacactgtcatgttggacacaagcagactcagcttttatcaaaacttgtttaaataaaaaattgacagtagctgggttattaaattatgcaactgaaactcctgaattatatcttttctgtatcccttaataagattggagaccactgccgtttaggataatacaataataaaacgttttaatcagtactaaaactttaattaagccaataatgatgcatgcctgttatagctgacagcatgggtcagtacatccttcagcgagtgccttactctaattgaaaccaagcacacgtaaggtacaatatgttagactctgtgattttgttttcaaaatcctctgttatggctatatttaaatttattttaaatattcctgtatgtattcatctaagcatttgggcatttggagtcttaatatacaagaaacacgtacttaaatttttatgcttatcaccgcaatgatggcaaacagtgattttttttttcatagtttaggtgtcattgttgccagcacctttagtgctcagtcttcagtgaaaaatataaagtgccaaaaaaatcttgcaagacagaatccatacttaacactctttccaagacactgtgaccatgtacagtagctatttcctgatgaccaaatctctcaacgaatcatgttattaataaatatttttagcactcatcagtattctccaatgtgaccttctcattggagtacacagaaggaaagcaaagaagagcatctgacttctagctctggcttacagcctctctaccaggccgaagcaagagacccgcggcagcagctccccgccactcagacctgggtggtgataacctcaaagaatggctctgttttctattgacagaaaacccacttgattttgcttctgagttagcagtcagaagaccctctaagtacaatagaagtgctcttaacggactctgcctgtgtgactcccaggccccggagtctccatctctctcgtaagccacctgccacagcacagctggaggctgttctctggtgttctcagcgctccggctccctccctggagttgtgcacccgtcccaaactcctccatgcaagttctgcttcctcttataagtacacaactcagttaagtattcacatacacacagaaaatacgggtgtgaaaagaaagaattttctgtaaaaattaagttgaatactttggtaaaaagtgataaaggctgagttgccaataaaagttgcttttaaattaggtgtggctgggaatattataagatattggggaaaatatacaaatcaagaaaatttctgagcttagattgcttcatagatttatttaagtactcatcccacctttaaaacctctaaactgagaagaagggacccaaatcatgttattggtgtgatttatgtgagaagtagaactgtagtcattggacccttaggcaaaggaaaatccgcgtctttatatcagaagatcggcaaacgaatgtatattacacagtttaggttatgattccctactttaacctacttactttattaaatgaccgactactgatactgatcacaatagttattagagattctaatttagttggaaggttctaatcactttcattacaggcatttgaaaaatagggattcatttcgaatatattagccaggagcatagttagatgttacccaggccatttatcatcctgttaatgatgattttcccgacccttgtgagatcagcgtgacaggagtgtgtgtgtgtgtgtgtgtttctgtgggtgtgtggttttggttgggtgctgccaggtggcaaaggcatatgtaaatacatctgatctgcatctttatttcacagttaactaaaaaatgtctattctgattccatattgattttgtctaagatgtaaaaatttgagttcatctttggccaaaacctacctgaattaacatacaaaatatttgatttttaaaatttaattcaaatctcaaaatcaattaagtattctcagatcctatatcttggttaatatgctcccagatactttaaacatggcaaccttttggcctaagagaatgtttgttcatggaaaaaagcttttgagatgagagggtgtcttactttcttgtggcaattgattttctgttttaacaccctttgggtaaaatcttgcaaagagcttttataatttgttttactgaattgtatggagattgtataccaagtaaagctcttttaaattac

SEQ ID NO: 1563 - DNA, 4868 bp, Homo sapiens
agttgcttcaggcagctgagctattcagaccatggagaatatcctctgttttctgaacagctatactgagacagtgctgagccctgactcacattgtttggatattgacctcaacttcatctgcttgagtgggttggggttgtttatactgtacttgttctacatggtattgaccctgtattcatcacccaccgaaaaaaataatgacacccaaaagcatcagggcagagccaggaggaaaagaaaaagcgtgacatttaaagaccggaaaagtttgcagaaggaagcagaagaggaaagaaagctacattcttttctgaaaagctttggacctcctgtttcctgcagtcccctgggccagcatcatgataccaccctctttcgtcgactgttatgcccagaccctgtctgtcgggtgtgtaacagagcaactgctgatatccagcgactgctgtcttgggagtccctgaaagatgctgctccctctgtgtcccctttggcttcttcagcttctggggctgagtcatcgttcactctggcttccaccccctcagcaaccactccagaagacctaatattgtcctctcggcctaagccctctccaccaccccccttaattctctcacctgacctgatcaccaccttagctgacttattttcaccctcaccactgagggaccctctgccaccacagcctgtttctcccttggattccaagttccccatagaccattccccaccccaacagcttccctttccccttctcccaccacatcacattgagagagtggagcccagcctccaacctgaggccagtttgtctctgaacaccatcttttcatttggctccaccctatgccaagatatttcccaggccgtgaatcgcactgattcatgtgctcgtcatcatggaccaccaaccccatctgctttaccaccggaagattgcactgtgactcagtctaaatcaaatctcaccgtcttgaagacttttccggaaatgttatctctaggtggctctggtgggtcatccacctctgccccaacaacgaaaggcattgaccattcatgccctgcatcttcagaattctcctggtggcagcctcatgccaaggactctttttcctctaattttgtgccatctgatttcatggaggagcttcttacccttcattcttctgaggcctctttaggggggcactctgtggccaacatcatacagcctgttaacatctcttttctcagccatgacattccggcactcctggagagacaagtcaaaagaaggggtgatttcctgatgtggaaagaaaatggaaagaaaccaggatcattcccaacacaacttaggccaaactaccaactaaattcctcacggaatatgttaacctcaactgctgttaagcatgacttagcagaatcctttcctttttgggccagtaaaggcaaactagagtggcagcacatccatcagcagcccccatattctaagtgttttgaggaccatttagagcaaaaatatgtccagctcttctggggtctcccatctttgcacagcgagtctctgcatcctactgtttttgtccaacatggccgttcctccatgtttgtattcttcaatggcattacaaatacatctatgtcccatgaatccccagtacttccccctccccaacctctgttcttgcctagtacccaacctctacccttgcctcaaaccctgccccgaggtcagtccctacatctcactcaggtgaagtccctggctcaacctcaatctccattcccagccctaccacctagtcctctattcctgattagggtgtgtggcgtgtgttttcatagaccccagaatgaggcacggtctcttatgccatctgaaattaatcatctggagtggaacgtgttgcagaaagtgcaggaaagtgtgtggggtttaccctctgtggttcaaaaatcccaggaagacttttgtcctccagctcccaatcctgtattggtcagaaagtccttcaaggtccatgttcccatctccatcattcctggagattttccactcagctctgaggtaaggaagaaactagagcaacacattcgaaggaggctcatccagcgcagatggggcctgccccgcagaatccatgagtctctgtcattgctacgtcctcagaacaaaatttcagagctatctgtgtcagagagcattcatggtccattaaatatctctttggttgagggtcagaggtgcaatgttctaaagaagtccgcatcaagcttccctagaagcttccacgagaggagctcaaatatgctttccatggagaatgtggggaattatcagggatgcagccaggagactgccccaaaaaaccatctcttgcatgatccggagacatcttcagaggaggatctgaggtctaactctgagagagacctaggaactcatatgatgcatctgtcagggaatgattcaggggtgagactaggtcagaaacaacttgaaaatgccctgacagtacatttgagcaagaaatttgaggaaatcaatgagggtcgaatgcctgggactgtgcatagttcatggcactcagtcaagcagacaatatgtcttcctgagaaatcccacagccaaattaaacatcgaaatttggcagcattggtgagtgaggaccacggcgttgatacctcccaggagatgtccttccttagttccaacaaacaaaagatgttggaagcccatattaaatctttccatatgaagcccatattaaatctttccatatgaggatgctgtggggccttccccgcaagatccgtgaacccatagaaatcttcaaatcagaagaggatatttccaattccttttcccatttctaccttccctcctcagccagctttatttctcagggagattccaaagatggggtctctaagtctcatagacgaagcacttttcaaggagaaaagttgggaacaacaagctcagtccctgtccttaatcatcctcagcctgtctcctcacctattggcaaagaagggcaggggaccctgagaagacaattttctgatactgaccatgaccttatagagacagatgccaaagatggtgcctccacgccccttagaagaggcactacatattttcaaggagaaaaattagaaacaacaagctcattctccatcttgggtcatcctcacctcgtcacctcacctgttgatcaagaaaagcaggggaccctcagaagagaattcgctgatactgacgaggatcttacagaaagtgtctggacaactgaggatggcagacagacttttctgccccccacacacagcatcatagacgaagtcagtcagaaacagactgtacttgccagtagatgcagtgcagagctgcccatactgcaagctggagttggccgtgattcaagggataagagagagagtgccagtaataatgttaacaggcttcagggcagtagaaagacctttcctgtcaccaatgggtcgaaggagatgttcaaggaagaggagatctgtactcttcaatcacaaactaggaacaacttgacaaccagcaagtcaggaagctgcttagtgacaaacgtgaaaagaagcacttctcatgaaactgaaattttcccaccaagaatatcagttcctcaaactcctaaatcatcatatcttaaaaatcagatgttgagccagttaaagttggtccagaggaagcatagccaacctcagagccatttcactggcatgtctcttgccttagataacttgagttccaaggacttactgactcatgcccagggcatctcgaatcaggacttgggaacttcccaggtgctgcatgtccacttggaggtcagaggaatccgtgtggcacagcagcaggagcacagggtccctacgcatgtcttacagaaatgccaagttaagaatttttcaccagctacaaagagagtgagccctttaagacccaatggaggagagcttggtggaggggatgcagggttggggacatcccaactcactagaaagagcctccctgttcataacaaggcatcaggagaggtgcctgggagcaaatcttccccaaccttgaaaacacagcctccttctgaaaaccttttcagaaaatggatgcagaccttattgcagtggtttaataaacctagcataatgtgtgaagaacaagaaagttcttgggaaaagggtagctccctgtcatcatctgtgcagaatagaagtcgagttacaagtagagctgcttttactggtgctactgaagctcagaaaattaggaaagacactggggagttcctagaagaaaagctggggcatagccatgggatagatatcacctgtccctaagaacccttttccttcccagtggagcttgggaaagctcagcacaacccagaagtgcaggtcagagcagagcccttccagggctatccccgcaactacacagctccctcccgcaaagtgacatgtaccaaatcttgcagccaacaagctatctttgttggacagaattatcctacaaggattagacagatcatagacaaggacagacagccccaggaagttgaggcatttaaggggaagatattgtatcaaaggcatccccaatccatgccccacagggatcctgtgccacatctaaaccccacttgtcagcgtcaagtcaccctggtgtgtccagctgtcccaattagtggcaaaagcactgtgttcagtgatgtgcctttactaactggacacaaaatgcattggaagtatttgcagggaggcaaatctccccccacaaaataattcactacttgttgagaatcttgattctccctaataaatgttctaataag

SEQ ID NO: 1564 - DNA, 4164 bp, Homo sapiens
agtgccgtagacagggccggcccacaggcgtgaggccagagttagtggtgagctcctgtgggtctgcactgcaccccaaccatggacaggcagtgttctgaaaagccacacagctgcaccccgacgggtagagtgtcgtcagccgtgtcccaaaactccagaatctccccccctgtctccacatccatgaaggactcatcttgcatggaggtacaccaggactctgcccgcagggacagatggtcacaccccaccaccatcctgcttcacaagtcgcagagcagccaggccacactgatgccacaggagcacaggatgttcatgggggaagcctacagtgcagccacctgcttcaagatgctgcaggacatgaacagtgctgaccccttccacttgaagtacatcatcaagaagatcaagaacatggctcatggctcccccaagctggtgatggaaaccatccacgactacttcatagacaacccagagatctccagcaggcacaagttccggctgttccagaccctggagatggtcatcggggccagtgacgtcctggaggagacctgggagaaaaccttcacacggctcgctctggagaacatgaccaaggccacggagctggaagacatataccaggacgcggccagcaacatgctggtggccatctgcaggcactcgtggcgggtggtggcgcagcatctggagacggagctcctgacgggcgtcttcccacacagaagcctcctctacgtgatgggcgtcctgtcctccagcgaggagctcttcagccaggaagacaaggcctgctgggaagagcaactgatccagatggccatcaagtcagtcccgttcctgagcacggatgtgtggtccaaggagctgctgtggacactcaccacgcccagctggacccaacaggagcagtcccctgagaaggccttcatgtttacctactatgggctaatccttcaagctgaaaaaaatggtgccacggtcaggagacacctgcaagccctcctggaaacatcccaccagtggcccaagcagagggagggcatggctctgacctcggggctggcggccacacgccacctggatgacgtctgggccgtcctggaccagtttggcaggagcaggcccatcagatggagtctccccagctcctccccaaagaactcggaggacctgcgctggaaatgggccagcagcaccatcctcctggcatacggccaggtggcagccaaagcccgggcccacatcctcccgtgggtggacaacatcgtgtccaggatggtcttctacttccactacagctcttgggacgagaccctgaagcagagcttcctcacagccaccctgatgctgatgggtgcggtgagccggagtgagggcgcccacagctacgagttcttccagacctctgagctcctccagtgtctgatggttttgatggagaaggagccccaggacactctgtgcacgcggagtcgccagcaggccatgcacatcgcgtccagcctctgcaagctgaggcctcccatagacttggaaaggaagtctcagctcctgtccacctgcttccgcagcgtgtttgccctgccactgctggatgccctggagaagcacacctgcctctttctggagcctcccaacatccagctgtggcccgtggctcgggagcgggcaggctggacgcaccagggctggggacccagggcagttcttcactgctctgagcacctacagagcctgtacagcaggaccatggaggcgctggacttcatgctgcaaagcctcatcatgcagaaccccaccgccgacgagctgcatttcctgctgtcgcacctgtacatctggctggcgtcggagaaggcgcatgagcggcagcgggctgtgcacagctgcatgatcctcctcaaattcctgaaccacaatggctacttggacccaaaagaggacttcaaaaggattgggcaattggtgggcatactggggatgctgtgccaggacccagacagggccacccagcgctgcagcctggaaggggcaagccatctctaccagctcttgatgtgccacaaaacaggagaagctttgcaggcagaatcacaggcccccaaggagctctcccaggcccattcggacggagccccactctggaacagcagagaccagaaggccactcccctgggcccccaggagatggcaaagaaccacatcttccagctctgcagcttccaagtcatcaagaatatcatgcagcagctcacactggcagagttgagcgacctcatctggacggccatcgacggcctgggctccaccagccccttccgcgtgcaggcagcctccgagatgctgctcacagccgtccaggagcacggggccaagctggagatcgtttccagcatggcccaggccatccgcctccgcctgtgctctgtccacatcccgcaagccaaggaaaagaccctgcacgccatcaccctgctggcccggagccacacctgtgagctggtggccaccttcctgaacatctccatccccttggacagccacaccttccagctgtggagggccctgggggctgagcagcccacgagccacctggtgctgaccacactgctggcctgtctgcaggagcgacccctgcccaccggtgccagcgacagcagcccctgccccaaggagaagacctacctgcgtttgctggctgccatgaacatgctgcacgagctgcagtttgcccgggagttcaagcaggccgtgcaggagggctaccccaagctcttcctggccctcctcacccagatgcactatgtcttggagctgaacctgcccagcgagccccagcccaagcagcaggcccaggaggcggccgtgcccagcccccaaagctgcagcacgtcactggaggcactgaagagcctgctgtccaccacggggcactggcatgactttgcccacctggagctgcagggatcctgggagctcttcaccaccatccacacctacccgaagggcgtgggcccccttgccagggccatggtgcagaaccactgcaggcagatcccagcggtgctgcgtcagctgctgcccagcctgcagagcccacaggagcgtgagaggaaggtggccatcctcatcctcaccaagttcctctacagccctgtcctgctggaggtgcttcccaaacaagctgccttgaccgtgctggcacaaggcctccacgaccccagccctgaggtccgcgtgttgagtctgcagggcctaagcaacatcctcttccacccagataagggaagcctgctccagggacagctgcggcccttgctcgacagcttcttccagagcagcgaccaggtgatcgtgtgcatcatgggcaccgtgtcagacacgctgcaccgcctgggcgcgcagggcacagggagtcagagcctcggcgttgccatcagcacacgctccttctttaatgacgagcgggacgggattcgggcggcagccatggcactgttcggggacctggtggcggccatggcagacagggagctgagcggcctgcggacccaggtgcaccagagcatggtgcccctgctcctacacctgaaggaccaatgcccagctgtcgccacgcaggccaagttcaccttctaccgctgtgctgtgctgctccgctggcggctactgcacaccctcttctgcacgctggcctgggagaggggcctcagcgcccgccacttcctctggacctgcctgatgacccgcagccaggaggaattcagcatccacttgtcacaggccctcagctacctgcacagccactcctgccacatcaagacctgggtgacactcttcataggccacaccatctgctaccacccccaggccgtgttccagatgctgaatgctgtggacaccaacctgctgttccgcacttttgaacatctcagaagtgaccctgagcccagcatccgggaattcgccaccagccagctctccttcctccagaaggtgtcggccagacccaagcagtgacctccagccatcctcccccacccaccgccttcccctcccgtgtccacctggtcagccctgccccatccgccccccacagagcttggttgcataacgtttttccatttgaaagaaaggtctagattc

SEQ ID NO: 1565 - DNA, 5254 bp, Homo sapiens
attcccacttctcctcacggcgttaccttcctgccgttcccacttctcctcaatggtgtttccttcccgcctttcccacttctcaccagcgttaccttcccgccattcctacttctcctcaacgacgttaccttccctctgttcccacttctcactggcgttaccttcatgctgttcctacttctcctcatgccattaccttcctgccattcccacttctcctcacgcattaccttcctgctgttcccaattctctctggcgttaccttcctgctgttctgccgttcacgcgtgtttatatgtgtttgcatgtgtttacatgtgtttgcatgtgcctgtgtctgcatatgcgcatttccctgaatcgacggaggggtcaggacgcctcctccccactagctgtgctgacctgggagcagcaggttcggccctcaccccaggtaggacgtgccccctccttgatatgcccacttcagcgaatcacgtgtggcctgagggctctgctcaagggccctagccgggaaacagcctgctgggagaccaaccaggtgcccccacacctgtggtggacattgactccctccaggcggtggctgagggcagccccagccaagtctgtgccagccgaggctgctggggacccttcctctcccccttccctgttctgttcttccttcccacccttcctcctccctccctccttttctttttttgggtttcaccttagactaagtaaacacactggcctgaattatgtaagcccctcttgcagcctgggcagatacatttaaaaataaaacttgtcaggtgttgttaccttccagcctcctcaaagctgagctctccaatctcaggactatttacagccacaccagcagcagtgctgactcggcaccacaggcgcggcctcttgtggggaaggagcagggaccctccaccgtgcttggtttctttccccaccttcctctcggtggggctgggagtggggtgatttggaaacactcagagggtttagacatgaatgagtctggtcgaattccccactctggacagcgagtccaggcactgcctggcggtctggtcggggttcctggggggaggttcagagcagggtatggcaggagcaagacccgggtgtcttgtgtccccgaaaggagcaagaggaggcagcaggaaacccggacggcgctgagcggaggcctgggcgcacgtcctggaggaagaggcatcgttaccgggagtgcccgaggcacagtgcacagatgggctggtacagggtcctgggagcactgcgggaccgggcagggctctgctgagcctcaggagagggagggcgctggttcccgcatcctgtccccctcccctggtgatctgccaaggggagcagcccagggagggggagctgggagtcagggagcgctgtccttcatgagtacaaatccaaatcccaggccggctccccaggagcataggctgcaaggacagggcaccagctgtttatttgggtcaggactcaggggagggggaagatcaccccaggagcagagctgtccacccacttggtccctggatcccccaggtcctggagggcctgacctcaaggaactgactctgcctgggctggtagggctctgacccctggcttccgtgcggccagagaccgccaaacacgagtgaggggcagtttaattgtctgctgtggtcttaaaaaccaggaggcccagagtcgcagcaatcggccgtgcttctttagaggcccctccctccgcctcccacagggcagccactccagcacccctttcaggttcttccccagcccaggccctgctccctggccctccctcttgctactggttcccgacactcacgttcctcccacgggaccacgactgagacagcacacgagggcccactgtgagtatctggggcccgttttatgcacaaagagcccggcactcgccatcagatccatctcctacctgctctaagccacactgccctcctgccaggctggtagggtctctggggctgggctgggtagacggggctgcgcagctggagacgtgcccacctccctgcctgtgaccccatccaggtgccctgactcaggcactggcgaccagtcctgaggttgctcagcacagcccctccctcaccgctgcccccaagccatcgcttgccagaggctggcttgctgtcttcacggctctgggaagtcacttcggagaaactgacctctgagtgggaaagtgactcactcgccgaggttcaggacggactcggcggcaagggcgtcttggagggaggtctcgagtgccagggttctcctctcatctcctcccatccagcaccgtgtactgaagttgcctgcctctttcctcatgtcagggacagccccgtcccccagcacccaaggatgacagtatgtcctggtagccagcgaggcccagatcccacacctggccacacgcaccagcgtggcctccaggagagggtgtgaggtctcctccggctgtccacggtgggcccagacataggatcttcccctgtggggaggacggggggcagcccaccctgggaagaggggtgagccacccacagagaatgaggctaggcccacttgggcctgagggcatggcctgcacccagctgggcaggctgggcaggggcacactggatgggaatgggagctgaggctgccctggaggggttggagctgtgcccactggggatggatggacacccctggatgacggacacccctggatgacggacacccctggtcagccagtggcccagctcatgcccctgtccggaggcccagcccagcccagcacacacaaagccaggcgtcagggctcaggcacagagcacggccatggccagatgtacccgggcccctctggggagtgtgcaggggccgcccggggtgggctctgggtgccgggtcctgcctcggtgctgaggacatcagcccaggtccgcactgcccttgacccagggggctgacaccccccagtgcagaaagaatggcccaagggggttggcgggggtgctccatggagaaggggctatctgagcccctcaggcaccctctgccagccatgcctgccctgagcggctgccctgcagcacctggactgtccctttgggacgggcctcggtccctctccccaggggatttgctgtacagccccacagggacgcccaagggatcactatctttgtggctggaggaagaagacacgtgtggcagtggccatgtggtcttgttgggagtggccacctgccctcctggggtctccaggccagaggccaggccacaggccaaccaaggacagcctggccatccggccctagccgggctggacctcctgtgtggattctgaaatccaccggcttcccagggttgtcaacccctgggctctcgctcctgtggggatgggtatttccctctctggcgagacatttccaaattcagaggctgtggtttgatggctggggtcctgtggtgccgggctgtgccttccagaggcgccagcttcaggctgtgactggtgacgagaatctaggtcaacccacgccgctcacagcctccttccagcgtgtcattgtcccagcctcgtccacacacagctcccccaaaaccctgcagcgtcatttctgttctgactccaggtgggctctgccgctgcctgtgagatgaggccagatcctcgccgcccgcacctgcctctccccaactcgccctgcgcgggacaggtggacgccgcccacacctacctctcccccactcaccctgcccgggagaggtggacgctgtctgcacctgcctctccccaacgcgccctgcccgggagaggtggatgccgcccgcacctgcctctcccccactctccctgcctgggagagatggacgccgcctgtgcctgcctctccccgacttgccctgcccaggagaggtggataccaagcatgttcttggcaacttgctgcccacacacggtgcggtccaggctgcagcgtcacagccctggagcctgctgggagtgcacagcccaatagccaccccagcccctcttcgagggcagattcccatcagcctgagctgcctgcaggatgagtacaggggtccctccgcagggcagagccaggagctgtggaaatgctctttgcagaggccccacctagatgccccacgggggtgtcccctggctgagtccacagggagggttgaggctgcctcggccatgtctgcggcgcacgtccccggtgcacatccccggcgcaggctgtgtctcctcgcagccccaactgacttcctttccttcctgtggtctgcacttccaccatccttaccccctccttatcctcagagacacctcctgacaccctcctccatgctctgccctggttgggatgcctcttgggctgttccgggccccaggctagagccactgcctctgtttctctgggtgagtccttgccctgctgcaggaaacctccgcgtgctgtctaagaagtcgtgcaaactggccaggcctggaagggctgaggcatcctttctccctgatggatggtttgcgtgagtataaaattcaaggctggaagccagattcctgtggaatttggaaggcccggctccattgtcttccggctccagcgttgttgaggcgaagtctgacgtccatgcagactctgattcccgtgtggggacagccctggggtcctgccgtcctgggacatcgctccggcacccctacgctgcttcttgaaacgtttctgtcgacttcccacctcccgggaatttgttgaatcttttttctgtgaatgccagttctgtcttcctcacggctggttaattcccttctgctccttaactgtcatcgcatggggttaatgagaggaggagagaaaacgtctgtggtttcgttttccttcctggatttcgacaatgtggatgcgtccttgggggaaaggtgggctcgggatccaggcatagaccgtgcgggggcctctccaggagccagtgtgggggagtccagcgcagcagggccagggccaggtggggcagagtgaagacaccagggcaccgcggggccagtgagtttgttgcctcagctgagacaaagtctcagcaaatcatcagtgttcctcttctgtgaggtctttccacgcaccaggccagggtgtcatcaccagacccctccggtgctgaaggatctccccggaaaatagatattaattgcttttc

SEQ ID NO: 1566 - DNA, 4238 bp, Homo sapiens
ctgccatagtggaagtttctcaagaggcttggcctctgcaggaggcttctgcctggaaacagtgggcggtggtgtgggtgcaggatcttcttgatgctgatctcctgatagtgagacctcatgtgatctggttgtctaacagggtgtggtacctctttcctctctctgtcttgctcctacccctgccatatgaaacatctcattgccacttggcctcctggtatgattaggaagggcctggtcagtgtgggcctggtcagtgaactagtcagttgggacttggtcagtgaggcctatttactgggggaatggtcagccagggtctgcttagagagggtctcattagagggatcgagtagtgcaggtcttggtgagtggggacctagtggcagacaaatgtttggtgtctggtcagtgcaaacctgggctgcagggcttggtgagtggagacctggtcagctgtggcttagtggtagccttgtcagaatgggctgggtcactggtgacccggtcaaggggtgctattcagtggaggcctggtcacatggcacctagtcagcagggcatgtcctcatcagtgaggcccttgtcagtgggaccctggtcatggcagcctggtcaggtcagtggaacctaatcagtgggggcctggtcagagaggacttgatcagtggtggcttttgtagcactggtctatggggtgacctggtcaacgggggtctgagcggtacatgcctgttcagtggtgcctagtcactaggttcctggtcggggcatctggtcaccgcaggcctggttagtagggacctggtcactggcagcctgttccctggagacctggtcagtggggcttcatctgtggggccaggcaatggggtcatgattggtggaatgtggtcagggaggccttgtcagtaaggccctggtcagtgaggccttgtcagtgaggtccttgtcagtggggtcctggacactgtgggcctggcagcgggaatctagttagtggggcctggtgatgggggcctaatcagtgagagtgtggtcagggaggacctgatgtgcgggatctggtcagcagggacctggtcagtggggctgctgagcactgctgggaggtgtcaggggaaatgcatgttatcaggggccctatggacagctgggatggcccagtggtgtccaatggcccagtcaaaagtggacaaagcaggtgtttggatggacctgggagatcttgctcagagattctgaaagaacaaaggtaaaggaagggccagagtggctagagagatggtaacagtctatgggctgcacaggatggaggaagccagggaacaggcagggtgggcagtaggggtgcagggagaggcaggtgcatgctgggaggtcggaccctgtgagggctgtgggggcgtcaggtggggtgggctccaggtgcactctcagtgtgcactgggcaggtctcggtccaggctctctggaccctggtcgggtgatgtggtcactccctgggggactgctgtcaggcctagccacccacccttggcagcactgtcccatctcaggactggactttctcagatcctgcagagggcacagcctccagcccaggaggggcagccccttggtgcagcctaagctctccatgggcctggagcatccctgccagccctgcgctccctctactcccaggtcccgcttttcaagtgtcagccagcagagaggctccgtcctcccttccctatgtgtctcctgggctaaaacttggggcgcattgggacagggatggtgctttcctcaggcccatttagggaggggactggctcccagcctggcacaggtcctcagctctgccttggttgccttagagtgacatggatcagtcagtgccctgaaggtaaatggaagagactgtccctgctgtgtgggaggctggtctagggatggagggcttggcaggtcctcccagtctgtcaggcctggacagcactgtcctgtctcaggactcagaaaatctggtcttgggatgggacggtgctgcccagggtgggtggccagggcttgacagcagtcccccagggagtgaccacatcagccaaccagggtccagggagcctggcctgagacccacccagtgcattgagggtgcacctggagcccaccccacctgatgcccccacagccctcgcagggtctgacctcccagcatgcacctgcctctccctgcaccccagatgtccaccctgccttttccctgatttcctccatcctgtccagcaggatgggctggtcagtgggatagcctctgtgcacattttgtggcaagtaggagtgacacatcattcctgggaggccccgtggttcctgccaaacccaaccccagaattctccctgaggtggttttaccaaacccataacccagaactgctattgtggtttgggggtcagcacccaccagtgccagggcactactgggaggctgggacctgaccaaagcccatggtgtctgtggcctgaggacagggtgtcttggggccatgaggacaggccaccaatggccgttgggtcatagggcctgagccccagtgtttgtccttccctggctccttctggttcagtcccatcagggctctggatcccaagacgcagcatccaaggttccctccaggaatcctggtggctcggcttactttgtcatgtttcatctgatagcaaaaatatcagatcggctgcacagaaaaatggctcaaagtgcttaatgaccagaagaaatctgggagcagcaagaaggtaatgtggagaggggaggacctccatgactggtgtctgcagagccaggggtacaggcacccagtgcagtgacctggcaccacctgcctctcagagggtgggtagcacactgtccttacctgggggacagcaggcctggtcaccggcttttctccctgtccctgcaagcatcacattgctggaagagaatctcatgccagagcttggaccatccctagctggggggttaggggttgtctcttggtgacctaaatgaaaaaataggtccagatcagagttcgtgatgcatagcactcacccactctttgaatcatgggaggggaggcctagtcctaggtaaacctaaactctttgaggaaccacagagcccaaggctggaaacctccagaatcctccagcccctgatcccccccccccccccggggacctctgtggcctgtctcaccagagcactcttctgtctgtagaggtctcaggtgctctacaagggagtcccatttcagatgtggggctgggtatggtcactcctgctggatgtctagaaggtgaaagccaaggacctaggaaaataccagatacagcctttccaccgtcatccagagcaggacaaacacgccaggtggtgtcaggagcccaggtctccagctggagggaatgtcaaccctgcagtgggagcccatcatgcatcctaggcacagatgctaacgtaggcaccgcaggaatcccagtgaatatattgccaccatcttggagctcagtgccctcatagtgtaacagcaccagcagatctgcctgtgcacagacttcctgtactacctcactcctgaggggagatgcttctgcagggcctgcgacctggtgcacaactttagacaccatcatcctggagcggcactgcaccctcactagccagggtgttgatgacttcctcaatgccaaggccacgttcaagattttcgacttcagtgatgcgtttgtgctgagcaagccaagagacccaagcctgccttgctgccacttaggatgtgacagcacagccagtggcctctactggatcctggtacccctgagaagacacccagacactgggagtgctgccacctcgtggtgcaagagttctgagggacggcaattctgaagacattgaatgccattttgcacaccctggtcagaatgaaacattccttgggaactcgggccgtgagaagcatccttcctgatcacctgactgtagaaacatccttatcgcaccctcccgggcaaaggcccaacagcctgactgcaggaacatccttgccatatcctgccgggcagcaagctctaccgcccacacccctccttcccagtcccatgatcaccccagcctgtgagaggcagttggtgctggcagtaagctggtttcctcctctgcagggttttgctagtaataaaggtgttgctgttgaagccgt

SEQ ID NO: 1567 - DNA, 3472 bp, Homo sapiens
ggagccccgcccgctggcgcgggggccaggagtgcccgggggattgagttgcagccggggtggtgtcggggtttcccggctcagcacattctcccctactccccacagccgccccgatattaatagccctgccgcagcccatccagctggctcagagccgttccccatgcccgggtgtctccatcaccccagaaaacatgcaaaacagctcggcgcctctgtgttcctgactgtgaaatggggatagggctctgtgtcccaccagcgaggtgctggaagaggctcacgaggagctccagagggcagcctctagagcggcccgcggccactattattatcggcctttctattgtggagaggagtaaacagactcagagaggtcccgtggatttctcaaggtcacacagcgccccagcagcggagcaggaatgcaaacccaggatctccgccgcgagatccaccccggcgcccccgagtcccgcagttcccggcttcaggacaaccccttgccaggtccaacccgagctccttcacccccatccggcccctccctcctcccccatatttagtgcgaattcgatctggggctgggctgggccctacttaatggggcccgggtgtccgagagcgtgccgagcggagcgaagccaggagcccgatcgagatgatgatggttatgcagcccgagggtctgggggccggggaggggcgctttgcgggcggcggcgggggcggcgagtacatggaacaggaggaggactgggaccgcgacctgctgctggacccggcctggtgcaactcacacctgcgcaaggcaggcacccagatcgagaacatcgaggaagatttccgcaatggcctcaaactcatgctgctcctggaggtcatttcaggtgagaggctgcctaggccagataaaggcaagatgcgcttccacaaaatcgccaacgttaacaaggccctggacttcattgccagcaagggggttaaactggtgtccattggtgctgaagagattgttgacgggaacctgaagatgaccctgggcatgatctggaccatcatccttcgcttcgccatccaggacatctctgtggaagaaacctcagccaaggaaggcttgcttctgtggtgccagaggaagacagcaccgtaccgcaacgtcaacgtgcagaacttccacaccagctggaaggatggcctggccctctgtgccctcatccaccgacaccgccctgacctcatcgactacgccaaactgcgaaaggatgaccccatcggaaacctgaacactgcctttgaggtggcagagaaatacctggacatccccaagatgttggatgcagaagacattgtgaacaccccaaagccggatgagaaggccatcatgacctatgtgtcctgcttctaccatgcctttgccggggctgagcaggcagagacagctgccaacaggatctgcaaggtgctggcagtgaaccaggaaaacgagaagctgatggaggagtatgagaagcttgccagtgagctgctggagtggatccgccgcactgtcccatggctggagaaccgtgtgggtgagcccagcatgagtgccatgcagcgcaaactagaggactttcgggactaccggcgtctgcacaagccgccccgcattcaggaaaagtgccagctggagatcaacttcaacacactgcagaccaagttgcggctcagccaccggcctgccttcatgccctccgagggcaagctggtctcggacatcgccaacgcctggcgggggctggagcaggtggaaaagggctatgaggactggctgctctcggagatccggcgcctgcagcgactccagcacctggctgagaagttccggcagaaggcctccctgcacgaagcctggacccggggaaaggaggagatgctgagccagcgcgactacgattcggctttgctacaggaggtgcgggcgttgctgcggcgccacgaggcctttgagagcgacctggcggcgcaccaggaccgcgtggagcacattgccgcgctggcccaggagctcaatgagctggactaccacgaggcagcctcagtgaatagccgctgccaggccatctgcgatcagtgggacaacctgggcaccctgacccagaagaggcgggatgcgctagagcggatggagaagctcctggagaccattgaccagctgcaactggagtttgcccggcgggccgcgcccttcaacaactggctggatggtgccgtggaggacctgcaggacgtgtggctggtacactctgtggaggagacccagagcctgctgacagcgcacgatcagttcaaggcaacactgcccgaggctgaccgagagcgaggtgccatcatgggcatccagggtgagatccagaagatctgccagacgtatgggctgcggccctgctccaccaatccctacatcaccctcagcccgcaggacatcaacaccaagtgggatatggtccgaaagctggtgcccagccgtgaccagacactgcaggaggagctggcacggcagcaggtaaacgagaggctccggcgacagtttgcggcccaggccaatgccattggaccctggatccaggcgaaggtggaggaagtggggcggctggcagcagggctagctggctctctggaggagcagatggctgggctacggcagcaggagcagaacattatcaactacaagactaacattgaccggctggagggtgaccaccagctgctgcaggagagcctggtgttcgacagtaagcacaccgtctacagcatggagcacatccgcgtgggctgggagcagctgctcacctccattgcccgcaccatcaatgaagtggagaaccaggtactgacccgagacgccaagggactgagccaggagcagctcaacgagttccgagcatccttcaaccactttgacaggaagcggaatgggatgatggagcctgatgacttccgagcttgcctcatctccatgggctatgacctgggggaagtggagtttgctcgcatcatgaccatggtggaccccaacgcagctggggtggtgaccttccaggccttcatagacttcatgacccgagagacagccgagactgacacgactgagcaagttgtagcttccttcaagatcttggcaggagacaagaactacatcacccccgaggagctgcggcgcgagctccctgccaagcaggccgagtactgcatccgccgtatggtgccctacaagggatccggggccccggctggagccctggactacgtggccttctccagtgccctctatggggagagcgacctttgaccccaaccactgaggttctctatgcaagatggagagaggatgcaccctgtggctgatcccatccgtccctcggagcaagggcctaagagaaaagccagccaagtgcttctgaataaagatccctctctgggtctc

SEQ ID NO: 1568 - DNA, 5248 bp, Homo sapiens
atttttccaggtgcaggctcctggtgggaaaccaagaggccgctcttctgctctcagtgtcagggaaaggcagggacgcccccattttgctttctgtagtttgaggtggactcctagccttcctccaggacagccccgcctcactggctaggcgtcttggggcctcagccgctctgcggggtgtggggcagacaggaccagggagctccatcttgtcgagggaaactcaaactgcaggccacagagccaggagctgcatcctggccacactgaccctcaggccttcccatcaggagcctgtacctggagaaggtgacaccaagacacagggagccccatgacccctgccatggtgcctctttttgctacaaagtgggtttccagctcagaagcagggctgccgggggtgctaggaccgcacaggtggggttggcaggggggattctacacatgtgcctgggagtctatttcaggcagaacagactgtgtcccttgagagcagcaggtgtgaagtgaaactgccctgcctccagacggcgggctcagggcgaggcacttagcgtggagggcgtgctaggctccagcccacagcggtggccacccagctgacatgccttcggaggagtccatgccgctgactcagcgctttctgtgccgcagggacacctggtcgccatcacatggactcgctatttttgcactcgaggctattccaggaagtccatccagacagagcacgccttccccagcctcctcttattggcctgcagccctgctctccccacgtctggtgatctgtaaagagggcttgttctgcgtgggtgggacctgctctagatccatcttggaaaatgagctcatgccgttggtgtaaccaccattcctgcccccatgccactctgccccggggcctgctggctgacgtccatggtgcagtcgtgatgtccacgagcctgtctgtgccctcgctgcggccgactctctctaggagcgtccccacaggatgcagaacctccctttgagctcggtgttccctgctcctcacagagccacccccaagcctttcccagctgtccgcatcaccactgtcccgggctcgttcacttcaggccctggagagccagcccagccctcactggtgtccggagtcagtgatacacagcgctcaagtgactcttcccacccacaggaagtgggtgatgaggtgccccccgggggcttcccttgctgctgcccgccaggatctccctgcttgggactacagcatgcgggggaggtcaggctggagttggtgtgggagcctttcccagcctttcctctgcattggtgccctccccaggaggcatctgagctgcaaaaggggcgaatgcgatgtagacacttgggccccgggactcgcctgtgtcatctgggctgggccccacaaacaccacaaacaccttttccaccacgcaatagatggctgctgggctgcccaggggtgtgatgtggagctgggaaacccagcctgggaaggcagcattccaggagctgctttccaaaagaagaatagcctccaccaggaaggtgtggctgagccccagagccccagaaacctgcgggaagctccaaaggggggcctgccagaggatacacacccaccctacctcctgcacacgggatcctccaaccagacagtgtggcccaagcagcctggctactttcaccttagccagcagccctgggccacactggggatggtcccaaacatggcctgtgctgctgtcacggtgctaaggggcctggcaagcacggggtctttcttgctggacggaggcacaggtgccagaatctatcttttgccctacagtgtcccggcacagcctagatctatggaccccttcaccgggtgctttatcccccaccccccagaactcctgggaccattgagatgcccaggagatgggggggccctgtgcctgtgtcccgttgctgctatagcagccaccacatctaccagctctgcagggtggccaccgggcacggcctcgccaggctgacgtcgaggaaagccagccgtgctgtgggtttccttccctctggctctccacttctgcctccctcttccactgtttttggtttgggtttttgttttgttccgttttgtttttttttgagacagggtcagctgtcttgcccaggctggagttcaggggctattcccaggtgtaaccctagctcactgcaacctccaactgctgggcttaagtgatcctcctgcctcagcctgagtagctgggactacaggtgtgtgctcccacgtctggcaagcctctttcagtataactgtatgggtttttctccatctttttttcgtctttacaatttttgttctcaaggacttgggctgtttgacttgagtcttccagtctggattttgctgataagatggaacacctcgagagtgcatctttgttaacatttagacatgcgtcccctcctcgcttgctcagtggaattacgattgcacttggaaatgtatcgtgttgggtgtgttccttaagctgaacttccgtagatctggcaggacatttaacaccagaacacgaagcctgcttcagaagtgactgaaacggcatctgcctcacagtgcatatttaaaaaatgattttgttgtgtgaataattatgctgccatctacagataagtgagatcagaaacattagtttcatatattgtagtttttagtttctgaatacttattggattctttttcttttttttttgagatggagtttcgctctgttgccaggctggagtgcactggggcttggctcactgctacctccgcctcccaggttcaggcaattctcctgcctcagcctcctgagtagctgggactacaggcacccaccaccacacccagctagtttttgtgtttttagtagagacagggtttcaccatgttggccaggatggtctcgatctcttgaccttgtgatccgcccgtctcagcctcccaaagtgctgggattacaggcgtgagccaccaggcctggctccttttccactttcatggaccctcgtgattgcattggatctccccgggtaatctgggatgttcttcctggcctaaggtcagctgattagcaaccttagttcatctgcagtctccattctctttttgctgaatcacgtcaagtattcacaagttccagggggcaggaggtggacatctttgggggacattattccgcccaccagaaaacccaggagcagccgcagccccaagacgaggcagggaaggagtgctgctgtctgccggtgaagatgaactgcttctgaccctcccgagcgaggatattgagaagaaagaatttgccaagatgctagtcacacaccaagtacagaggctatgttggtcggctgcagcaaaaagaccactcgcggcgtggcagctctcactggccctgctgcctcttcaagttgactgcagtccatcacccacggtcattattaatttgtttttgcaaaggccaggcaggtgaatctaatggagatggaaaccaccacacctgcttccctggtctctgatgttggtgttaacctctgcaattcctcaagcaaagcactccttctatcaggctcactgtcttgctggagggaggaagttccacaggctctcacttggttctttctgccgtaacaacccttactcctccggccaaggagccaatgtgagcattcagctggcagctaagaatgtgtatcccaataaacagggcagacctacagacccactggacccactagagatggacttgggccacagtgccttccatgacttcagtaaacagaggggtgtggtgatcttgtcaaagtcctggcgtcaatgtcagtgtccggctacacaccatgttcccgtcctcgaaaagcctctctgtacccctctatgttggtgacacttaaccctggcaaatggccacagactcctttggggacagagtaggagcgtaactggtgggagtggttggcatgttttgtattgggagagccgcacgccctagggcttccagcctcctcttcagtttggcagctgtgagtctgaatttcactcaaatctggaaactgggtgagagactgtggcagctgctgtccggctggcagagcctgacgtgtctctgatcatactcactgggtcagcaacaccctactgaccttgtccagaatcccacatcccggttgatatcagggcaatcagtttcctggctgttttccccaatatcaacccgggcttacagaagacagtcaccacagagctcctgccaggagttcactcattcgtgcatttcttcctttttttttttctttttgagatggagtctcgctctgtcgcccaggctggagtgcagtggagcgatctcggctcattgcaacctccgcctcctgggttcaagcgattctcttgcctcagcctcccaggtagctgggatagcaggtgtgtgccaccacgcccagctaatttttgtatttttagtagagatggggtttcatcatgttgcccaggctggtctcaaattcctgacctcaggtgatctgccctcagcctcccaaagtgctgggattacaggcttcagccaccacacccagcctcattcatacatttcttattgttgttgtttgagacagggtctttctctgtcacccaggatggagtgcagtgttgtgatcatgcctcagtgcagcgatcatggctcagtgcagcctcaaactcttgggctcaagcagtgctccaacctcagcctcctgagtagctaggactataggcacacagcaccatgccccggctatttttttattttgtagagatggggtctcactatgttgcccaggctagtcttgaactcctggcctcaagcaatcctcccacctcggcctcccaaagtgctgggattaaaggcgtgagccaccgtaccttgcccttggtggaatctttagggttttctattcatacatataaaatcatatcattggcaaacagagataattttacttcctcctttccaatttggatgccttagatttcttttccttgcctaactgctctgtctagaactcccagcactatgctgaatagagtggcaagagcaggcatttgccttgttcctaaccttagagaaaaatccttcagccttttaccattgaggatgatgtttgctgttagtttttcataaatgatctatatcaggctgaataaatttctatttct

SEQ ID NO: 1569 - DNA, 4664 bp, Homo sapiens
gtggcacccctgggggcataaggcagatggttttcagctcagaggttttgatttcagaagagactgacaacaggaagctccggattataggggaggccatgggtgggaccatcttggagagaattagcagtcttgacttagctgcatccatatgcttgtgcctgagaaaccagtatcagccctttcctcacttagaaatgtatctctacccctgttcctcctgcaacagccacatccttgattggggaaggagaaggaagtagagagggaaggaattggtgggggtaggatttggggtttgggtcccaaggcctgtctcagcctgcctaccccggggttggccttgggatcggggcaaagcagggtgcaggggataaaaaatgagagttggagtcgtatttcaagtgggaccagaatttatacaatctgggctacaggccagttctcccttggctcgcttgatgaagtagaactaggaactacaactatgaactggctctatgccacagctcacaattttccatcttcggtcacgatggagcccttgtagcccttgacagcagaactgttacacatgaggtctttgatccatggcaaaccctttcttgaagtagcagttttatcactgtggcccttccttcctcagaattcctaataagggagggaggatcccggcctaacctcagctctcctgttctcctcagacctctgtgtgagcggcggaagtttcttcatgacaacatggttgaaattccaaaccggatcatgttctcagaaatgaagcgagtcacagtaagtgaagaccctatgctaggcagtgtcctagaagtttgaaagcagggcagagaactccttgggtcaactgcgactggaagaataaatcttaatgtcttatggagcctcctgataatgttggcctttgactattgcatatgttgcctgctagtcttcacccagaagggtagggcatggaaatccttcctaggtaagcctcctgtgtttcaaagccacagcagccctctgtttgggatgagaagcaacctgctttctaaccctttgtcccttatatttcaagtaagggtgtttccagtggacacttaactagtgtgtgaaaaggaacaacccccactcactcaccaccttctccactctcacaccaacttcagcatctctcttgtccctcagaaagctttggacttggctgacatgataacccgggtgatccaggagggattggaggggctggtgctgaaggatgtgaagggtacatatgagcctgggaagcggcactggctgaaagtgaagaaagactatttgaacgagggggccatggccgacacagctgacctggtggtccttggagccttctatgggcaagggagcaaaggtcagggtggcctctgccccctggggtggtactgttttagaaggtaccgcttgaggtacaggctggccttgttactggcttgatctgccagcatggccagttatgacttccgaagtcctaggatctagggccccaagctggcctgagtcacctcaggcagagctgcttactcggttagggagaagtcagaatagagtaccctatgctagcctagcagaaggacgcttaccaccaattatttcgtcagggcctgacagctttctcctcaggcaaaatctctttcctgactggaaaggaagctggagtctgaggaactaatacttttaagcaatctatcatgtgtccaacacagttcaatgccccagagcccaacaggttgggtgtgattatccctcatttacagaagaggaaattggggcttataaaggttaaaattacacagttagtaagaggtagctccaagaggtaaactctggcactctgacggccaggacccaaggtcctctccctggccctgggctcttgggactggcagagatggctcctccaacccacactcatctcacactcccctcccaggcggcatgatgtcaatcttcctcatgggctgctacgaccctggcagccagaagtggtgcacagtcaccaagtgtgcaggaggccatgatgatgccacgcttgcccgcctgcagaatgaactagacatggtgaagatcagcaaggaccccagcaaaatacccagctggttgaaggtcaacaagatctactatcctgacttcatcgtcccagacccaaagaaagctgccgtgtgggagatcacaggggctgaattctccaaatcggaggctcatacagctgacgggatctccatccgattccctcgctgcacccgaatccgagatgataaggactggaaatctgccactaaccttccccaactcaaggaactgtaccagttgtccaaggagaaggcagacttcactgtagtggctggagatgaggggagctccactacagggggtagcagtgaagagaataagggtccctcagggtctgctgtgtcccgcaaggcccccagcaagccctcagccagtaccaagaaagcagaagggaagctgagtaactccaacagcaaagatggcaacatgcagactgcaaaaccttccgctatgaaggtgggggagaagctggccacaaagtcttctccagtgaaagtaggggagaagcggaaagctgctgatgagacgctgtgccaaacaaaggtgagggtaaaaacagcaacacaccacgtgggccagtttagcccaggttgtgttcccaaccttctgtacaagaagtttgaaagaggatgagcaaaggtgtttggggaacatcggctaaacctcttccctgcctgcagccactcctctgtcgtgggcagggtcagcaatgctgctgctcaccctatgtcctcttgttgccttgcagaggcggccagccagtgagcagagaggaagaactgtgccagcaggcaggagatagaacagcccggcctagccaggagagactgcagggactcactcagctgctggccccaagtcaaaatttacattaaagggaaaagaccagtctgggtgtgggaatgcagcattgagtttgtggtcagggtggaagcaggtccagcaagcagcgagtcggggagagggcactggcttggtgactctcctcccacctgaggagccttttccctgttacattttcttgtcagtcttgggtttggcaacatctcctgagcaattctttttttttttgagataagtctcgctctgttgcctaggctggagtgaagtggtgcaatcacagcacactgcaacctccgctcactgcaacctccgcctcccaggttcaagcgattctccggcttcagcctcccgagtagctgggagtataggcatgtgccaccatgcccggctaatttttgtatttttagtagagacgggatttcaccatgttggtcaggctggtcccaaagtcctgacctcaagtgatccgcctgccttggtctcccaaagtgctgggattacaggcctgagccaccatacccggcctcttttgagcactttctgatgccaagaactaggtttagtactggctcaactctgggggagctgatgcctcaaaggacagatagagaagtaaacatatgattgacacccatgtcattgcgcccccacgctccccaccgccatccaggagtaagcatagaagtctcacagcacaaggcctgaactcggtccccaacagacctgtagaaacctttcccctctctcttcccagcctgaagtccttgaacccattgagagtagtaagcaggactcctgacccctcagtctagcaggttgtacagagtagactgcttggtctcaggggacatcactgagtctgggggcactgagtcagagccagctccgcctgcccaccatgactgggtggctcttatacacatgtactcttcccatctccaggtcccagatgtcgaggcctgtccactctccttttcccctaggcagggatggaggggcgtgtcagtcctgtataatttggagtgactggaggggtgggggtattgatgcatggtattccagtaaacttctctgcttgtgtcctaactctaggctccctcattctgtcccgtgctcatttgggtgaagacccatctgtacccagtgtaggtctgaccccaccctgacccctctgcatttgcaggtattgctggacatcttcactggggtgcggctttacttgccaccctccacaccagacttcagccgtctcagacgctactttgtggcattcgacggggacctggtacaggaatttgatatgacttcagccacgcacgtgctgggtagcagggacaagaaccctgcggcccagcaggtctccccagagtggatttgggcatgtatccggaaacggagactggtagctccctgctaggtttgctgtcttccctctccctcaggccatactctcctttaccatactactggactggactcaggctggaggcagatagacacagtatagggggaatgggcttgcttctcccaaacccaccagttctccactgtctcttctggaccaggaattagttgctgtgggtgccacagctgaagtcagtttgtcttgctggtttaaatagatctttcagagctgggtgctgggtttgccatctttttgttttctttgaaaagcagcttagttaccctttttataaataaaatatcttgcagtt

SEQ ID NO: 1570 - DNA, 3832 bp, Homo sapiens
ttgtcattaggcaggctgttctttctggtccatttgaaatacagtaaaacctcaaacattgggaccccactcatgtggagtttgtgattactcagctaatgtttgactgtgtaaatggtgtgcttgaaagattaatagcgcgaaggaggtgcttacgtgcatgctattttccctggtgtttccaagggctctcacgcccatggcccagccccacttgcctctcagtgtcccctcgctctctgcatcctctctctacacagctgggccaccctcccctcccctctggccctggtccctgcctggaaccctctcctgacaccccaccttctgtgcttaggtcatggctcacctccactgtctggagactccaaaggctgctcctgaatgctaaccctacctctgccaccagagtggccagctctgtgccagacgaggccactgtcctactgcatggtggaatttagcccttcccatggccaggtctgtagcagagggagatgtagtcagtcagaacctagaaagctttgtagcatagaaatcatgctgctaaatggttgggctccagaggtgccatatgttggagtcacggtcactcctctgtggcaggcagcatcagcccctgggcctgccgccgtcctttcctgccctgagtttccccaattcagacaccgcctcctccgtggtgctgccgaggagcccccaaccctccgtctttggtgaaggaaaagtaaaattgtttctaaggatgaaggcattcattctgaatttaaaaaattgaatcatatttaaaattattaacttttgtacaaacctctgagcacaaccatgggaaaattggagactaactgtgaatgtgatgacagcccaaatataggcaaaaagtgtggcaggcaaagggagccacatggaaagtcagatccatgcagcccactatcccttcatcatcaagacactgcctcgaaccacagaaacatctctttggatccagcaaaaaccaagggcaggagctgtgcttagagggctctcctttccgctcctgcacagaacccttcatccccctctggcagcttctttgcaccctttggggtggaggtcagggtggagggaaggcggtcttcctgctgtggggagacaagctgatttgcagctcatgttccatgcccatcaaacgtgtgagtgcacatacaggaagccaaaaggacagaaaacatcacgcactcttaaaatgagcctaacgtcctgtacaaaagcctgtgtcctgttgctgtaggtttaggtgactgatgattagggagtcttttttcaaccgtaaggtttactgagacttcagtgggaagtggacctgaccaagctaggaggccttccttaattctgatgaatgtgccacgatctcagccagcctcaaaagaactcttgaaaggggaactatcaatgtataataatgagaggcgatttagaatccgtagccaagactcctacaatccattcattcttctttttttttccagacggagtctttctctgtcccccaggctggagtgcagtggtgtgatcttggctcactgcaacctccacctcccgggttcaagtgattctcctgcctcagcctcccgagtagctgggattacagtcgcccgccaccatgcctggctaatttttgtatttttagtagagacaggatttcaccatgttggccaggctggtcttgaactcctgacctcaggtgatccgcccacctcggcctcccaaagtgctgggattacaggtgtgagccaccacacccgtttcattcttttgttcactcattcctcattcaacaaacacacagtggaaatccatatttctgtttctgcttttaatcacaggaagagtgaattgtctacacagttgttgatgtgctggatacatgaaaaatgtagtgtgtgtttcaacctgcttgctttaaaatattgcatgcagtctgtggggttcaactctctatagttgtggcctcacagtttagtttatccaacaggaaaataaaacaaacataccagagagaaaggtgtgtgtgtttcagtgtgatttgctgttcagactctacccgtaatctctctaaactcagtgtcctttttatgaaacgagaatggtaatagcacttcccttgcatcccctctttgtggagcaggtggtatcagtgaaggtatctaaattctgctgtgttcctctctgcattcccaaatagataagaaagacaggaaggaggagtatttttgtgcctcagactcccataatggtatgagtaccctcctccttctcctccctcacactgcatgtgatttggaagaaaagtgtctgctggcccccagggaatggaaggtgctaatctttgctgtcttcaacatccaagcatgtggccattacacaggtggcagagggcaggggaagtcttagctgccgcactggatccctcacctcagaagtaagacaactgtttttctctaatagatagttggacaaaaggactttgaaaaaattagccagatgtagaatccctgttgttttgcccctacgtctgaataaaagcaatgacttgtgattgttaaatggctcctaaaatgtagcactaacagatgtgtcttgaaatatttttaatatattaaaaactagaacatcttttgtggtcatacagaaagtatggtgattagccgagggttgagcacagctggggtgcggttctggcatttggagctgccatcattcttttcctggctgctctggcctctgatccaatcccaggtaagccacaggctcagccagaaaaagcacagtcacgccagactcgcagcaagagctgctgggatccagccactgcccttagttacatcttttaaagattactttctgggcctaagtaagaaccttaaatattttgacctaaggttgttataactctttcaagatgaaaacaaaatagaataagttaaaaaaattcaaaccagaatgtgcgaaatcaaatgacatttgagttgttcaactgaaaacattgcaaagccagctttgtggaaggagtcttcaaaaccagacaccctgtgtcagtgggtggcagtgttttaagtaacctttgctcttttcaagtcttttgaagcaatgaaatatgaacactgctacaacaaacacccccacctctttcagagttttttttttttttttttttgagacagagttttgttcttgttgcccaggctggagtgcaatggtgtggtctcagctcactgcaacctttgcctcctgggttcaagcaattcttgtgcctcagcctcccaagtagctgggtttacaggcacccgccaccatgccagctaattttttttttttgtatttttagtagagacgaggtttcaccgtgtactcctgacctgaggtgatccgcccgcctcggcctcccaaagtgctgggattacaggcatgagccaccgcgcctggccagaattgttcttcactcatgctacatgccttacctccaagacatcttaaacatgtagtcttagacacatagaacaaaatgaaagtgatgtggacaaagttcagcagctcctcaagcccagatttattgcctttgggagtcctttgtgtctcgccttggtaatgtccaaaggcctattctgtttaagataccatgattacttctctgaagttgagaaacataagattcaaccagatgaagaattctgttattaccacattaattatcatatgccatctggggatttttgtttttaaataccctgtcatcatgtggtagatctatatatgctgacacggaaagatcactaagacataacttttcgtg

SEQ ID NO: 1571 - DNA, 3629 bp, Homo sapiens
atgaacagcaaaggcaaggaccgagggtggcagaggccgtcggggggagtactgctggcccagagcgagcggattcggagcccagggtcaccaaacgccaggtttggggtgggctgcgccatgctccttggccggctgcagtccagggcgctgcgcctgacgccttcgtcatacccaaattacggcagcttgctgcctccaggccctttcctccgtaaactctgtggcgcagtttggagctgcgggctcgggtggtgggggggcttgacatgatgggcatccgcaggagcaaatagagcgctagcgcaggcattcgcgtaggccaatggagagccggcggaggcggggcgccgcgctccggaacccccagcggggccgaacttaactactgaattgctggagttggttcgtgggccggggcctgtgaggtctcttttccttcccttcgcaccccctcgcccttcgctgacgggatcagaacttctccccttttctgtggttgtaccagtgtgtctgtcggaacatgattcccataacgcaggaataggttgagggggtaaaaaaggaatagaaaaaaaaaaaaaaaaaggccgagcgaggttgctcacgcctgtaatcccagcagtttgggaggtcgaggcgggcggatcacctgaggtcaagagttcgagaccagcctggccaacgtggtgaaaccccgtctctattaaaaaatacaaaaatcagctgggcgtggtggcgggcgcctgtaatcccagctactcgggaggctggggtaggagaattgcttgaacccaggagacggaggttgcagtgagccgagatcgcgccactgcactccagcctgggcaaaagagcgagactccgtctcagaacaaacaaaaaaccaaacctgatcccccgcttttccagtgaggatattcctcctcacccctcagccctgcacccttttcccagtctcacggttcacttccatcattcacaccctttgtttggaagtcgaccttgaatagtaatctgtaaggaaaatcagaactgctgttacccacgaagtctgggctggttgtagacaggctgtggagactacctagagcagaggcacccttgataagccagaacagcagcaggccagaaccccagacctgtcctgcattccggagggaacttgggcccaggtagacttaaccccttacttcggtatgttagtaggagcagtgagcagtgcctttcttgtctcgttagaatccagcaccttccattttaagggtgcaaagacaatgcatattttcttagttccaggaatcaggccctctggggcagactatttgcaaatccccttctgcttgctcccactaagttagctacccgatatgacctgcctcattttggtagctctgtgtagtaggcaaccttcattttttttcttgtctttcaggtcaatatccaacacagccaacctaccctgtgcagcctcctgggaatccagtataccctcagaccttgcatcttcctcaggctccaccctataccgatgctccacctgcctactcagaggtgcttccagtttgccagatttgaactagctgggaatactcttagggtggtcctttagtccttagctaaatctgacttcacatatttactcttcacaaatgctaacatgaataatctaaaacactatataatttggcaatttttgtcggagttgaaagtgcattatttgatgattttgtgttatttggcacaggctaaggtgcagaagatgaatttgcgttctgtgagcccaacattagctatagcagaaagtgatccaggagaatattgaaggccagtggaaaggcaacttgtataatcttacaaaaagtataacctgcataaggagaattaagaattagctcattaaagagatctcaaataggaatgtcataaagtaacattttgccttctcttctgcctcttctagctctatcgtccgagctttgtgcacccaggggctgccacagtccccaccatgtcagccgcatttcctggagcctctctgtatcttcccatggcccagtctgtggctgttgggcctttaggttccacaatccccatggcttattatccagtcggtcccatctatccacctggctccacagtgctggtggaaggagggtatgatgcaggtgccagatttggagctggggctactgctggcaacattcctcctccacctcctggatgccctcccaatgctgctcagcttgcagtcatgcagggagccaacgtcctcgtaactcagcggaaggggaacttcttcatgggtggttcagatggtggctacaccatctggtgaggaaccaaggccacctctgtgccgggaaagacatcacataccttcagcacttctcacaatgtaactgctttagtcatattaacctgaagttgcagtttagacacatgttgttggggtgtctttctggtgcccaaactttcaggcacttttcaaatttaataaggaaccatgtaatggtagcagtacctccctaaagcattttgaggtaggggaggtatccattcataaaatgaatgtgggtgaagccgccctaaggattttcctttaatttctctggagtaatactgtaccatactggtctttgcttttagtaataaaacatcaaattaggtttggagggaactttgatcttcctaagaattaaagttgccaaattattctgattggtctttaatctcctttaagtctttgatatatattacttgttataaatggaacgcattagttgtctgccttttcctttccatcccttgccccacccatcccatctccaaccctagtcttccatttcctcccgccagtctccattgaatcaatggtgcaggacagaaagccagtcagactaatttccttctttcctcgcacttctccccactcgtcatcttttaactagtgtttcacaaggatcctctgaaaccctctctgtgccccaagtacagatgccattacttctgctttcgtatctcctcataggttgtctctgcatacacgaacctaacccaaatttgctttggtgccagaaaaactgagctatgtttgaacaaagatgtcgtgcaaactgtactgtgaacaacagttggtttaaaatatgaggggcaaggaggaggatgcatttcaaaagcttgattgatgtgttcagagctaaattaagaggagttttcagatcaaaaactggttaccattttttgtcagagtgtctgatgcggccactcattcggctccccagaattcctagactgggttaatagggtcatattgtgaatgtctcactacaaaatgacttgagtccagtgaaatctcattagggtttaagaatatttcagggatccttaatgttttgatttttgttttctgaaattggattttattttattttatcttataatttcagttcatctaaattgtgtgttctgtacatgtgatgtttgactgtaccattgactgttatggaagttcagcgttgtatgtctctctctacactgtggtgcacttaacttgtggaatttttatactaaaaatgtagaataaagactattttgaagatttgaataaagtgatgaagttgcattac

SEQ ID NO: 1572 - DNA, 3488 bp, Homo sapiens
agcgactcactcgggccccttccacgtgggggaggatttgtttttttgctctttgtattaagttcctgctgttcagttgtggggtccacactgctttcatgagctgtaacactcacgatgatggtctgcagcttcgctcctgaagccagcgagaccacaaacccactgggaggaacgagcaagtctagacgcgccaccttaagagctgtaacactcactgcgaaggtctgcagtttcactcttgagctagcgagaccaagaacccaccggaaggaagaaactcggaacacatctgaacatcagaagaaacaaactccagacacgctgcctttaacaactgtaatactcactgcgagggtccagcacttcattcttgaagtcagtgagaccgagaacccaccaattctggacacactattatgaatttttttttttttttgagacggagtctcactgtcacccaggctggagtgcagtggcacaatcttggctcactgcaacctctgcctcgggtttaagtgattctcctgcatcagcctccccagtagctggggttacaggtgtatgccaccaggcctgacgaatttttgtatttttaggagagggggcttcacaaggttggtcaggttggtctctaacttctgacctcgtgatcctcccgccttggcctcccaaaatgctgggatgacaggcgtcagccaccgtgcccagctgctattatgaatattcctgtacacacgcctcttgtgtacatatgtgtgcatttctctaagctagtagttctcgaactgtggcctctggaccagcagtatcagtatctgaaaatttcttagaaatgtaaattcttgggttcctgaactattgaagcaacaactgtgaatgtgactctctgactttaacaatccctccaggtgattctaatgcatgctgaaatttaagaaccacggtatacctgggagtgaaattgatgggccataaaagggagtttcgtgctccaactttggcatccctagaaaactgcatgaagctttctcagatggccgttcagggacttcagcaatttaagtctccccttctgcagctccctcatattgaagaggacaatcttagacgggtttctaatcataagaagtataaaattaaaactatccaggatttggtgagtttaaaagaatcagatcgtcacactctactgcacttccttgaagatgaaaaatatgaagaggttatggctgtccttgggagttttccatatgtgaccatggatataaaatcacaggtgttagatgatgaagatagcaacaacatcacagtaggatccttagttacagtgttggttaagttgacaaggcaaacaatggctgaagtatttgaaaaggagcagtccatctgtgctgcagaggaacagccagcagaagatgggcagggtgaaactaacaagaacaggacaaaaggaggatggcaacagaagagtaaaggacccaagaaaactgctaaatcaaaaaaaaagaaacctttaaaaaaaaaacctacacctgtgctattaccacagtcaaagcaacagaaacaaaagcaggcaaatggagtcgttgggaatgaagctgcagtaaaggaagatgaagaagaagtttcagataagggcagtgattctgaagaagaagaattacaacaaagcatacagcgaaaagagagagctctattggaaaccaaatcaaaaataacacatcctgtgtatagcctttactttcctgaggaaaaacaagaatggtggtggctttacattgcagataggaaggagcagacattaatatccatgccatatcatgtgtgtacgctgaaagatacagaggaggtagagctgaagtttcctgcaccaggcaagcctggaaattatcagtatactgtgtttctgagatcagactcctatatgggtttggatcagattaaaccattgaagttggaagttcatgaggctaagcctgtgccagaaaatcacccacagtgggatacagcaatagagggggatgaagaccaggaggacagtgagggctttgaagatagctttgaggaagaagaggaggaagaagaagatgatgactaagcagtactctgaatggaccacagtgtttgcacatatttgcaattttttgctgttttggaagtgtatcataaaccagaaacagtacagaactgatgttgagggaggtgtagtttttttactctagaaatgggtgcataatataactaggcagtggcggtgccttggtacaacctgaaaaatgttaaggcttattgaaacctttcaagtaggggatggtacatttatttcatctgcaaatgataataaatcctttgttattataactgtccagaagtgtgggctatgtattatctgatcagtctatggtcccagtaaaagtaaagatgcaggaaacacagtctgtaaatgagcgacttttctttgttcagctttagttttagcaaacaccacaaatatgttttaagtaacatcgctcaagtttaagtaacatcgctcaagttgataatctcttgataagctctgttgttgacattttgcagtgatacaacagctccactcatagatttaaacttttatttttacttatcttggtcataagttggcattctctcacattccacatgatatagagggctacgttttggaattttccttttcttaattgcccagagttatcagacagattataaaaatggcttttaatggcttaaaccatttctaaacctctatcttagcagatcaatgcaggatctaattcttttgataagttctagctctaaaagtgatagtgggactgtatgttttctgatactggtggcttatgttattaaaccttttttaaaaaaggttcactctaaaagctgaactacatccttagttttcagtctacttgactctatcaggagctttttaaggaaagtaagtataacatgcaaaggaagctttttttgtattcattttggactcctgtcaataaaaatagaagtttgttgactcgttttatgtttcaatggtgtgtgtctttttactatcaggacataaatagggcaatccacttctttatttttcaactaaagattgaatagtttgtacattactgctaaagtgactgctatttctgtatactgtagaaaaacccaggagtgagagggatttcccctcatagtacaactggaaggatagtgcttgtaaagagtagagatgtgtacatgatgaatcattgagggagggtggatatttttattcctagatatggaggaaacataagtctgtagtattataaaactgattgtaataattctttcctatcaaaatctccataggtcaaaatattgttggaatactaaaatttgcagccttgtttactttaaaaggttgccactttcagtgcagaatactaccggcatcttgttactgcaatagttggaaataaaatgtgaaaattagc

SEQ ID NO: 1573 - DNA, 5302 bp, Homo sapiens
agaccggcccctgcgcgatatgagcaccgctcaggactgcagctgttgggcaccagcagccaggtctgcaggctccgcgaagcctggcccggaccgtagcttctgcaagcagtccaggtgtatcctggggtcactggagggcagagcctgctcagagcgagtacagaagcagcccaggtcttcccagcaccaggttcactggaagtgccaggccaccacctccttcatgctcctctgtgatcacctctccaagtcccggtgtcaggagccttctctgtggccgccctggagagacttgagcctgggacgtgacgtgctgggctgtgaagctttctgagaagggaaacctgtggcctgacctgcctgaatgctgcacccaacctcatctcttcctgggagaaaccaacaactgtcagcattgacaccatcaggcctttcccttctaatttaaccttgcagccaaccacacggctatctgtgcgggatctctccccaagctcaaggacatgagatgcggatcaggcccaagaggctggatgccaaacctatcctctccatgtgaagcaccaacttgggggtgtcaactaaaaatatgagacccgtaaacttggaaaggaaaactttatttcttgagaagggttgcaaactgcaggctgggaagtgacacctccagctgagaccacaaacagtggactttctcaaactggggtattgacctctgatgaaccgccatgcaaacccgtgcctttcaacataaaaagaagcccttcgaggtgctcaccttcaagcttgctagaggaggaggaagagcaggttgagtttgacataactagaatgggttgagcctttccagcagagtaaggttctttcatggtggacagtggccacccactgccatttctacaagaagattttgcttcttaggcactgagttcctggttctttcactagagaaaaatgagtaggttggcaatccagtacttccatcttctgtgaagacctgggcaggcgacgggggcttgggggcgggggcagggaccaaagacaaggctgccatttgctgtgcccaccacagagggacatttactccacctgaagcacaagtattttctcagtgatgttggctcctacaaagtcaaaaggggtaggctccctggcttacgctccaggagtttggactgaaagggacactaaaagtgtcttcctctaagtttatgatgttgccctcctctggctacaacagtgctctggccataagcatcccaggttctctgaatgatggtgggtatggaaatgttcccaaacacaggtatggcggtgtcccctcccactgtaccaatctatgcccagggctggaaggtccgtggtgctctgaactggattcataaacagtagcatctccaaccacaagtgtggtgtcaggccctccaacagtagcacatgtgctcccgtgggtgcctgatagaaagtgggaacatgtgtttattagccaggtgggccccaaatgctctgacgaggtgcagaaagaggactctttgtcacagttgtgctgtgccctcccattgcaacacatgtgctctgaacaggtggagcccaggtgctttgcatgtaggcggacacaagagggcctctaagcacaagtgtggtgttggaaccctcaaggctaccgatgcattctggccaggtgtgtcccaggtggtctgactatagacagcaacagaattatctccagcaccgttatagagatacccgtccaactgatgtgctctagcgggatgggacccgggtgatccgaacacaaggaggaacagaagtttattctgatatatgctccttcttagcgatgttatctacttcaatagtaacggtatgctttggctgggtgggcctcagtcactctgtagccaggaaggaaagggctcccaaaacagatttctgctccgtagagctgatcttccctcattgcaacagggatgctataggcaggcaggacctggtgctcaggtctaagcccctcctagaataagttgtggttctgagtgttgtcagcccttctgcagatttcaatgacccctgacaaggagccagggtttgggacagacacaatgactgcaaacctgccaccacccaaaggggcttagatattgatggtgcatggcactgctgcagtggccctttatcttgatccccttttttttttgagacggagtttcgctctgttgcccaggctggagtgcagtggcgcgatcttggctcactgcaagctccgcctccagggttcatgccattctcctgcctcaggcctccacctctcaggttcaagcgattctcccgcctccgcctctgcctcctgggttcaagcaaacctccgtctcctggatccaagtgattctcctgcctcagcctcccaattagctgggactacaggtgtgcgcaaccacgcccagctaatttttgtatttttagtagagatggggtttcaccatgttggccaggctggtctcgaactcctgacctcaggtgatctgcgcgcctcggcctcccaaagtgctgggattacaggcgtgagacaccgtgcccggccctcagtctcttttaagcaaggatcaggggagtaatcagatggcccatatagcgctcctgctattgaaggagcgcagatgtcgctcagatagcgacaggaagagaagtcagtttccccctacaggtaggatcagtacttttcctaagtggctgcacttctttgaggtgcaagcatacagtgctgtctttctgagagccctggcgtgacaccaaggggaggcccccttctgatgtaaacactgagcttgctgggttgcataaggcctctcaggggtgatataaaccgagggggtaaaggtgaccgtgttgctcccaggaactgttttcagaagatgcacaggtgcagcaggaggattcctgccagaagcaggaacagagagggcagggagaaaaaggaggatggtggcctgggggccaggcggggtgaggcttactgaggaagttgtccgtgaagagcagtttgtgtgctgtctgacactgagagtctagtaagaaatttggagaggtctcctagctgcatgttcctccaaggcaaaccatgctggatgtttgtgacatgtcattggaacacacaccagagaaagtgtgtgctagagcagagagggaagacaaggcaccaaaggacaaaggggaatcccagcaggacttttgagagcttgagacagctcatgctctttgcaggtgcttggcaccaggtgtgcccgatgacatggaaaagcatccaggactgtgtattataggaccccacataactgtcacccccagatcgccaggtctgcaggctcctcagcatctaacctaggggcagcaactagtgcctgtgagtctcctagcccttttctctggggttattggaggtcagaggtcagagcgccctagatcctgccaggaaggggccctggctcacaggaggtcagggtaggagaggtgggggtgtggccagcagggatcaactctgtctcatgccattactggtgcacccaggtggcccagcagggctgcagctgcaagacacgtgctctgatggggaggagagaccaagcagtgtggggcgtgatttgccctgacctcttcctttcaggcaacctctgcagaggacactagtttacccccacaatgtccccttcccatgtggtagctcagggttaccacacactctttcctccagggatccctctagggcctctcaagtcttggagcaggcatatcttctctgtggccacccaggaaggtgtgggtccatgggcatgagatgtgagtccagctgggctgtgaaggtttctgagatgggtacttggcaccccaattttcccaggtcctgcaccccataccatcccttccaggcaagcagatcttccctcttttaacaaatttttcgaattgcaaacagcatttaggactttgcgccttcctcaggtcacccatgtgggcgtaagggagagtcaggatttgaactcagactgtctgattccagagtttatccattgaccacctgacagtggtgatgcctcatcatgtgtgtcacgtatttacatttttaaatagtccttagggtacttagcaccatgtacacctgtcatgagagtgttcactgcctgcatcagaagatgcagggtggagagcaccaattgtcagcacaaccatattgggcatttctctgctaaatgagtcttgcacaaaccacacagctgtctgtgaactatcttctcccaggtacaggacaggaggccacttaggtgcaagatacactctgtcttaagagccttatgctccaaggacaccaacatctcttgtgacaattccatagacctactttttaggatcctggctgaaattggcaatttactgatatcaaatagtgtactctatcaggatggtaaatagttccttatatttagaactcttttttttttttggacagagtttcactcttgttgcccaggctggagtgcaatagtgcaatctcagctccctatagcctccacctcccgggttcaagtgattatcctgcctcagcctctcgagtagctgggactacaggcatgcaccactatgcccagctaattttgtatttttagtagacactgggtttcaccacgttggtcaggctggtctcgaactcctgacctcaggtgatccacctacctcagcttcccaaaagcgtgagccaccgcgcccggcctttagaatgctttaattttctctcagagactattttgtggttgggaatgacaaattacagttcatgagctgaattctttccagtctgtttctgtaatgccaataaccttagaatggtgataagagttttcaaagtttgtagaaaagaggaaaggaaaaaagggagaaaaacagaggaaaatatgcaacagagaccatatgcaatcttcagagcctataatatctactatctggtcctttacagaaaaatttgcctcttttgtgattttcagtgtataagtcttgtacagtatttactaatttatccttatgtgttttataagttttttgtatgctatcgtaaatggtatcttttacattttagttttcagtattcaccactggaaaatacagttgatttttatatattcaccttgtatgctagaactttgctaaattcactctttacttttaatagtttctttgtgaattccttaggatattctatgttcacagtcatgttttctatgaacaaagagagttttgcttcttccttttt

SEQ ID NO: 1574 - DNA, 4121 bp, Homo sapiens
acaatggagtaggttggatccctaatccagtctgccttctatccttataaaagggggaaattggatacagagacacaagcaacgggagcatgccgtgtgaacatgaaggtagagatcaggtcgaggcatcagctagccaaggaaatgccaaagatgggagcaaacccccggaagccatgagagcggcctgggacagatccttccccagggcttcatagggagcgtggaccagctgacacctgatttcagacttctagcttacagaagatgtaattttctttttcaaaatgtcttctacgtggcaagttggctgcctcttcccagacatctcatcactattccagtcaagaaggggaagaacaaaaggcatacccacactaggtcagctccacttcaccgctttcctgaaaactctccccagagagctctgttttatctcattggctgggacggtgtctcatggccagccctggcttcagaggaggctgggagtattattattattttttaagatggtgtcttgctctgttgtccagtttggagtgcaatggcgtgatcttggctcattgcaacctccgcctcccgggttcaagcgattctcctgcctcagcctctcaagtagctgggattacaggcccacaccaccacacccagctaatttttgtatttttagtagagacggagttttgccatgttggccaagctggtctcaaactgcagacctcaggtgatccacccaccttggcctcccaaaatgctggaattacaggtgtgagccaccacgcccggccaaggatgtttttttttaattgaaggtacattgctgcctgaaacaaagtcagggttccattagtgaggaaaagaagaagaatgacttttgaacaggcaactattggttagtagatccaggttttgtaaaacctggagccgctacagtcccccttaggaagaagaatttaaaaaccccagtacaagacttggtacaaaaatgaaaacttatttagaataataacaaatcacaacaaattttaaaatattttaagttgacaaatatcaaaaacgttgcgaaaacattataaaactaatataaaattgtattaattggatacctgatatccacctttataatatcttcttttttttacattttttgcttcttcgtcatttttgattacctctttggaagccaatgattttataatatttttcctgtggagaaaatagataattcagagtactcctataatgatgggaacaaattttaatgttggttggaaaactttgtcagcctcataactcattattggtaatctcaggtagttttttgagattgttttcaaatttggagaaaggtctatcattctttcataaatgaatgctaacacttggaagaattctatttcttccaggcttcttactgggattttattaattttcatgatgaaaagcaactgaacaattgcaaaccagaacatgactcgactaacacctcctaaacctcagtgctggcacccatcacctggagaggcataggagaaatgcagatgcccaggctcctccacatcccactgaattgaagcctcagagtagcagggtctaggaatcagcattttactaaatgccccaggtgactcctgctgagcagtcctgggctatgcgacacccccagttgccttgtgactctgagggtctgcaaatccagacctctcctattggaagaatgacattttcaacccttatgtctcttcctctgcccatagactcctggtgccaggcaccatagcacacattgccagtgccatggcaaggagggcactcctgggagccattagcctgttcagggagcaacaactcgacccacacagactggctcagacctacataaacacaccccactaaacccaaaccaaggcatccccaactcaatcccccttcagctacatccccaaaatgcccttggcctccgcagcagctccaaagtgggaggaagcatgatgagggcggcatagggaaagagacagagggtattatgggttggattgtgtcctccagaacttgagtgctgaagccctaacccccaggagctcagaatgtgactgtatttggtgataggacctttaaagaggtcactgagcttaaatgaggtctttagggtgggacctaatgcaatatgcctggtgtccttataagaagagattaagacacagaaggaagcccctgtggagacacagtgagaagatggccatctgcaagccaaggagaggggacttggaggaaaccaacaccttggtctcagacttgaagcctcctgaactgtgaaaaataagtttctgttgttaaagctcttcagtctgtggaaccctgtcttggaaaccctggcagccagcttagccagttacagctaaaatatcttgcttttggaaagtatttccaaacacaaggccacatgaacccagagctctggctctcccaggccttggaagggtctgtacttagcttcacaaggaattcacccccgctgccaccacgtggtcactacataaccctcaggacgacctatggggcagggggtcaggtaccaccaagatctccctattagggacgagaggttggggcccaggggctcactcacagcaagcagcatggaagccacgagtcttccgaagccaaagctgccttccccgccccgtgtgccctgagcccacaagtggtagggaggaagcgccctgagccctggaagtggtagagaggcaggtttcagctccctataaagacaaacattctcatcagaggggctcctctctgggaagctgtgagcacccaacacctgtgatgggctggtcacttgcaaagatggtggaaagaaacttcagttcctgctgctcttgcagagtagagtgtggtcaccaccaccactgcagggctgggctgctgggattaaattccagctgtgtcaggtacccatggtgaccttaggcaagtaagtgaacctttagtttccttatctgtaagattaatcttttaatcataataactgcataggtttgggtggggattcagtgagtgaatatatgtgactctgggtttgtttcctgggctgccctaatacagtatcacagactgggaggcctgaaacaacagacatttattttctcacagttatgcctggccagagtccacagtcagggtgttggcagggctgtgcttcccctagaggctctaggagaggatccttcttggcctcttccagctcccggtggctccaggacttccttggcttgcggccgcatcactccagtctctgcctctgtattacacggcttcctcctctttgtgtgagtgtcttttataaggatgtcattggatggaggactcacccagataacccaggaggatctcttctcaagctccctaacttaatcatacctgcaaagactctttttccaaatgagttcccatatcacagtttccaggatgtggacatacctttagttattatgaattatatggttatttatctacagctgtgataattctaaaggaggaagagaagttggtaggagaccatgtaacatggagattggcttggtctgaggggcagagtcttccttgaggtggttagcttgagtattagctagctagaagaagaggaacagaaacaatgtcccagggccagtgaacagcagcatgaaggcccagagttaggatttgaccttccacttgaaagggagccactgggggctcttggggcagggcgagagtggcaggattaaaggaggcctgtgagcacgtgtggaagagcagcctgacctcaccagccccgtggaagatcccaccaagaccggtgcacatctactgtgctggcactctgcctaggcaccaggaacacagcagggaaacagctgtttgtgcccccaagggctcatgggccagtgggagagacagaagagtacctggatcattctgatggggtagccctgggctataaaagtgcagaggaaggggccaggtgcagtgtcgcatgtctataatcctagtgctttgggaggctgaggcagaaggatcccttcaaaccaggagttcaagccagcctgggcagcatagcaagaccttgtctctac

SEQ ID NO: 1575 - DNA, 4242 bp, Homo sapiens
tctgcttgcaccctacagctgcggatccttccagaatttagcctcaggttgcagtactgtgtgcagagcccaagccacagctcacagcctgcatgctctgccccgttcctgcacctggagcccccttcccagtgacacaggtcctcatcgccttcatagtggccacttctgaggcctttccaccctctctggattccattctcacctcctctctcatggcactcagcactccgatttctgtgactttcttgatcatgcgtctcccctggtgcagtgtgagctccctaaggccaggggtctgtgcccagtctgtggtatgtggtggagccccagtgagtaagagttcctggctaaactccaacattattgggagagtccctacttcattgacttggaagctgagccacaagggactctgtgatgtgcccatgtccgcaagcaggacatagagccacattcgggggacccagaccccccagtcactgccagatcccacccctcaagcgtgcctggtaccctcctggcatttctcccctcccaaccctcgcatgtgcccactacgggaacagggccttccattgtccccttggctcccagcgcatggtcagagctcaggaaatgcagagtgtgggcagagggagggacagatggtgagggtgcccctgtctgtccgcaggcccgggaggtcaagcgggaggccctggagtgcagcctcaagttcgtcggcttcattgtggtctcctgcccgctcaaggctgactccaaggccgtgatccgggagatccagaatgcgtcccaccgggtggtcatgatcacgggagacaacccgctcactgcatgccacgtggcccaggagctgcacttcattgaaaaggcccacacgctgatcctgcagcctccctccgagaaaggtgaggccctagcctggcccacagtggggaagggggaccctgagtccaagaacagctcccatcgcaacagcccacctgtgtaccaggcctcagcagcacagtgtcttcaaatgcctggcaccactaatcacagccctggcccactgggcacctcggacagcatgtgagcgttcactgggtcgcaggtcccaggatgtgcggcatgtaggtgtttatttaccataatgaggcgatagtctgactgccagctcgggtttcctgtgcactcatgggcagatactgctcctaccacgcttactccccatcctcagtgtcatcctcatttcacaccctctttggcccggcaagctgcccatgtaccgagtgctcccttcccgagcacagggactgctggcatcctcagccacagttgatggcagtttgcccagtgctcagcctgaccagaccccaggcggagcgctccgtgcgtgttactgcgttggtccctccaccccatcctgcaccacacggggtggcttgccttccccacaccacaggggaggaagcgggctgggtcagctctcggggcccctgctttgtagagaagggacagaggctcagaagtgaacccacttgcccaggtcacttccaatccatggctaaggattggaatccagacagcctgattccagagctcaaggctccaacctctccccagtgacctctttgagcaatgccctggattcagattgatgaagaggcagacatagagacccagcccctcccagctagaggtgtggggcttaccagatacctgccccagagctagaggtgaagcccctgtgggcgcacgcagttcaggacctgcatgagtgttgacagggccctaagaagaaccacatggagcagtgttgccacagggctgctggcagcaaacattcacaggtctgggccagagcagcttccggaacctccaggccacctctcagaggactcggtccctgccctccctctgttctattggtcgcaggcctccccctgtcccagccccagctaccggggtcttccagggcctggggattgtgggcaggtggcatggagcggatgagcagaactgttgattgacaagcgaagctggtctagcaacagctgcagcacaagccaggtggaagtgtgctgcccttcagcttgagatggtccagggtgagcaggcagtgccaggagggctggcgggccgcccttggccatcctcagcgcccagcatccaagccagggccagccagcaagaaaggggaagtggagcaagaagatgttgagaactcaggggccctgtcagagttgggagggggcccagccccgagaaaacaggatttcagagaggccacgggcgcagggataaatgaggtgagggcctggtgtggggtttcccaaggagagcgcaatagcccccttctgtgtgtttcaggttagggggccttgcatgaggtgggggcatggcttagctggggtcagactgcccaggttctaatctggctgtgtcccgggctctcaggcaagtagctcaggccccaggctcttggttccaccctgtgcacctgagggacattctttgtggagtccccagagaagggctgggggtcacctgggtgggtagggaggtgcgggctccagagaggagagactggctggtgctggggtccgagtggagggagggtgcttctgagcccggtcagccaagcccccagccctaaccctaggtgctgcccgcaggccggcagtgcgagtggcgctccattgacggcagcatcgtgctgcccctggcccggggctccccaaaggcactggccctggagtacgcactgtgcctcacaggcgacggcttggcccacctgcaggccaccgacccccagcagctgctccgcctcatcccccatgtgcaggtgttcgcccgtgtggctcccaagcagaaggagtttgtcatcaccagcctgaaggagctgggctacgtgaccctcatgtgtggggatggcaccaacgacgtgggcgccctgaagcatgctgacgtgggtgtggcgctcttggccaatgcccctgagcgggttgtcgagcggcgacggcggccccgggacagcccaaccctgagcaacagtggcatcagagccacctccaggacagccaagcagcggtcggggctccctccctccgaggagcagccaacctcccagagggaccgcctgagccaggtgctgcgagacctcgaggacgagagtacgcccattgtgaaactgggggatgccagcatcgcagcacccttcacctccaagctctcatccatccagtgcatctgccacgtgatcaagcagggccgctgcacgctggtgaccacgctacagatgttcaagatcctggcgctcaatgccctcatcctggcctacagccagagcgtcctctacctggagggagtcaagttcagtgacttccaggccaccctacaggggctgctgctggccggctgcttcctcttcatctcccgttccaagcccctcaagaccctctcccgagaacggcccctgcccaacatcttcaacctgtacaccatcctcaccgtcatgctccagttctttgtgcacttcctgagccttgtctacctgtaccgtgaggcccaggcccggagccccgagaagcaggagcagttcgtggacttgtacaaggagtttgagccaagcctggtcaacagcaccgtctacatcatggccatggccatgcagatggccaccttcgccatcaattacaaagtaaggcctgggccctgcccgaacattcactgtctgcccacccagccccaccccatgaagccatctgtccctcatccccacagggcccgcccttcatggagagcctgcccgagaacaagcccctggtgtggagtctggcagtttcactcctggccatcattggcctgctcctcggctcctcgcccgacttcaacagccagtttggcctcgtggacatccctgtggagttcaagctggtcattgcccaggtcctgctcctggacttctgcctggcgctcctggccgaccgcgtcctgcagttcttcctggggaccccgaagctgaaagtgccttcctgagatggcagtgctggtacccactgcccaccctggctgccgctgggcgggaaccccaacagggccccgggagggaaccctgcccccaaccccccacagcaaggctgtacagtctcgcccttggaagactgagctgggacccccacagccatccgctggcttggccagcagaaccagccccaagccagcacctttggtaaataaagcagcatctgagatttt

SEQ ID NO: 1576 - DNA, 4588 bp, Homo sapiens
aaaaaagtgaacaaggaacagcaggtgaggcactggctctgggcaactttcagacgggggcttcaagatgatctggaggtttcagaggattgtcactttagagaaaaaagtagcagacttggtctccaaagactggtgactccaaggtgtggctcaacacccagctgaagaggcagtcaatgcgaacggcatcagcccatgaaccgagtgtgtcctacgtgctggcgctgcgctctcccaccagctgctccaggcaggcactcccatccattttccgatgaggaggtggatgtttggaggcagagagtccatgctgagagcctgctgcagacacgtttgaaaggtggaccccagcccttgtcccagaatgtctcttccgtggctgggtctgccccagaggaacagaagcaatggcctggcgtctgtttccagctctgctccttccttgaggcttctggcggctgtgatcaaaaggcagccctcactggggggagtacgcaacatcttcaacgacctaagagctcctagtaaatgggaaccagtcacttgactcgaagactgaggaccacaaagaaggcagcatgcttcactgggacttgcaggctgccgctccagtccctctgcagctgcacaagcaggaaccagtcttttgggtaagaaactctcctttccctaagaactggtgttaactgttgttaaaggtcagagagagcactgtggcctccaccctccctgggcacttggtaggtacacaagtaagctccgctcaccacagtgcccaaaccacatcttgctcggggtatacaaaagccaggaacactgacattaggtaatatcacccaagggataaaggaagaggcatgtgaaccagtagccgcctgaagtgctgaagtgtgtgctatactcactgtaaggttttccaattctagctgtcgcactgtataatatgacttgatatcttcagagatcaatgttaatttcaaatttgtgtcttcaaagatcatctctttttcttctttttgtggccagtattgtgcgcattttaactggggaaacaaataatagtgaattattgtgagcaatatggcagtttttctatggcaggaggcttggagcacatcccacaagcttcatgataactcaaaggcctgggggtttctgaacatggaagccatggtcagcacagatgcctgcctcatggggagatgggggtgggggcacgaagctgctgaccggggcaggttgtgcagacagggctcagacttccaaacccatcggctccccggtcaaacgtggcaacgggatcctgcagggctctgacgctttctcaccgtctacgaggtgaagccagattgaacaaaaggctttgaaactcctctgtgtagccatttcaaacattacccaggacctgatcaggctgctggcatagaatgtaggtgccttaccctgcacagaaaactcacaggcaattaaaaataaaactgggagagacagcaggtgaggccctttggagaggctgagcagttatcaccaaatacagactccctttcagagaaggcttggagacaggctccccagggcttgccctttcattctggtttggttcagttcattcagaaaaatacttttgatgttctattttgataatctcagacactatctgatgttctcagtttaaatgtagctcattaaatttttctttaaaacaagaaaatttatgaaaatttggtttcatttagggtctaagacaaaaactgactcgaatttagtgacattttacttgaactaagtttctgcctcagttacacaaatgtttctgctcatggataactgttgtggacaaaaatggcaggtcagcaggggcagagctaccgggtcagcctgaccatgtgcctggacagagggaagctcaaagcccttatgattttcagcaaaagaaatgtcagcgtgtgtcaacagctctttggcaaatgacactggcagttcacgtgcactgacccactcaatacctcctctggggcaaaggatggtgtgggtgaagggaaccacttcagggccagctgtctgtcagaagacactgctgtgcccagcagtgacaaggtggactatgggggagggctgagggggaaatgctacggacatgcagcaggaattcagaagagggaaatgtttcaggtcagccaaggttacagaaaagagagatcagagaaagctctgtgcaagaggcaggttttgaaggatgactaggatttcctaggcagtgactgcaaataagaggctgaaaagagcagctggagaaggggccagcagaggcccagatcacagacgactggcagcaggcccagggacctgtggcatcatctgggggcaatgaggagccaggaagcacgtgaggagggtgaatatagaaccacaaatgcctattggtcctgctctactggagctggaagctgcccaaaagacaaaaccaaagcaaaatgtgggagaaacaaattaggaaacaccaggttgtggtgccagcatcacagcaaacttcacagtgccagaccagaagccaacagagctttctcaagagtctggacacaagcctgtctgaagtcttagccagtttcatccatgtcaccttcctggatcaatgatgagttgccaaaagtgaactcttgaatggggacaatctgtcaccattgaagcaattctgccacttggcatggaggcgctaattacatggcaagacccccacttagccaaagtgggtgtggcagctaaaagcaggaacttagaagaatgtgaaaagatgaattaatcccacacttctaacaactagatcttataatgcctcaagaccccagaaacaagagactgatctgacaggttccaccccacccgtgctggggtgggcattccacagagtgagcagacagagaaggaagcgaagaacagaaatgcaggaggaagaggccacccttcctcatctcataagcagggcagacgagtcttaaagctcacctccagacagcaagcactcactttcaaaaccaaacctaatgcttaataaccctctgtaatctgggtaaagactaagactttggaactgtacaagtgaggaattctgtcatgcaactaagtgtcaataacccaatatttatttttaaggactctcaggtgtctacagcaacaagctatgctctgtcatttccaatagaaatttttgttttaaacacacaaaatttttaaaaggcacaagatcacatttccagttaccctattacattgatatatacggccatgaaaagtagatggatttttattagaacacagtacttcaccaggcctcaaattgagtcctatcttgggctggtaccagaggaacatggcagtgccaacatgctagcatctctcatagttgctgtttccaccatgaaggcagatgttaaacagtccttggggccttcccaaacaagtgggcaagtggtgtttggaaaacctatgaaagacatctacagtaaccctgtgacgggtaatttggtttcgccaaaaattattaacacagagaactaagtaagtaattcttaacacagagaactaagtacgagagaaaaatgaattatatggaccctgtgatacaaaatgcagtgtcttgtgcatgaaagcacctgaaagcaaacggcagctttagtgaggatttcaggagggagatacgggtgagattctgcaatggccaattaaactcaccttgcttacttcccccttctaaacaacaatcccaacccttacgccatggtgcagcctacactgaggtgtctaaagtcaatccttaaacagaaccagtgagaactctagccatctggatgaccccagtctaacacacacaatcatcttctgcataactggtttccaggaagcccagggtcccaaaagataacaggcatgtttgccaaaaataagagggagcatcctacactatttggtgaaggaaggaaatcagaagacaagtatgcattaaatgaaaactccccaaaagctggttttaccacaagctgtgtggatcatttataattagattagctgagcaaataagatactgtaacttctcatgatttctcccagccagccctctgggagggataatgctgatacagaattgaaaatgttgatcccaaagaaactttaacaatctcaaaccatacattgcttttcatgccaatctgcacgcccaagtaatcctccagtggaatgggatacttaacaaaggaaagcagggactgctggcacagttatcacagtaaactacagcaaagccaaccagccatgttctcgatgccaccacagtaacccaaagggaaaggttgtcacagtggatctgtgggccatttgtggtcagtcttgagtgggagacaatgaagcacagggcctggtgaggctggaacacataactacagcactggacactgctcaaatacataactacagcgctggacaccactccttgctgtaatgtgacaacaattgctaaagcaaaccttgtgctcacagcaaagaggttttgccaaacacttagcaacaaagaaataaataagaagcaaatgct

SEQ ID NO: 1577 - DNA, 3613 bp, Homo sapiens
tgttttggccggcagagagcaccagcgctcactggctctcagcgcctgtcagcaggcagaagccatttccctatctggaaggcacgtctgggtgtccacatggcacggccaatagtgcgcagcatgcagagccgggccgggagaaggcccggccatgcccagctgccccccactctccccggcctcgggcttgagagggtacctgtcctggcttagtcacctggaaaccaaaatccttcgcagcttccagaattctccagtacaggaggagaagccgtccacgttcagagccgccttagacggtttgcctgtcaccggcattcctggacctggaaacgggtgcccccagccaggccggggaccactgtgtgcccagaattctcctcccgtcctttttccccttgcccggctcccagctgcccagggaagaagggagccggctgcaaggcgcagtccaaaccaggccgggggccgtgaccatcggcagtgccccccagagcaggctcctcgtgcaggaatatgggtcactgccttccagggagtcctttttttcttctggtttctaagtcgccacctcttgctttacctcagatagaagcatccagaacgctgtagtatcggcaaagcagaagctggtgtggtgcttgctcagggtcggtgcatgcggttctgcccgtggccccactggcggcatcgtgaggccaggcgtgtctgggagcttgtttttccagagtgccctgtgccagacggctcccggcctcctctgagtcagtcatgtccctgcaggactggaactaggacggccggtcacagagtcagtggtcctgtcgaggctcctgctgtggtgttggggtgggtctccctccagaaccttcactgtgcggggagcacagcaaaaccggaggcctgccaacggcctgcaggctgacgggggtgcgggggcactttctctcttgggtgcgggcttttccctcctggtgccctgcctctgtgcagcacgaagcggtctcctgtggggggagggcctgtgtgccaggctaatgagatgcccggatgtggcggggctgtctgtgtttggggtccctggctgtggtgccttctgaagaggagcccttttctgtggttaactgagcatccaaccctttgcgttctcggctggccttcccgtcctggcaacaccaaggtcattctggtcctcagtggcgttgctgtggctctttatcacctccactgcaattggtttttgtttgtttgttttggggggatggcgcctcgctctgtcatccgtctaggcagtggtgcaatcatggcttactgcggccttgactacccggactcaagcagtcctcccacctcagcctcccgagtagctgggaccacaggtgcacaccaccatgcccagctaatttctgtgttttttgtagagacagggtctcactatgttgctcaggccagtctcaaactcatgagctcaagcgatcctcccacctcagcctcccaaagggctgagattacaggtgtgagcccccgaatccggtgtgcactgctgtttacttagtatttttctttaactagatttatttttaaacaaggctttgtccaaggacatttggctcgcaggcacagagctgattaactcgttatgtatcttttgataataaggcagcgatcattaagaaaaacgtgtagccaatgaaataacatgttctgggccccaccactggactgggaggtgcagcgcatccaagcagaggctgcctcctgccctccacgcctgctgctctcgcaggcaggggctctgctgcttacagcagtgcggccatctcggcttctctccacatcgtctgtcacgcgctggtccccaccatacctctcgccaccccgtgcctctgtccccgtgcggcctgaggagctccagctttccctgccagcggtgctctgggagtggggacgtgatgcagggcgagcatgatgcaacggggcaccccagacccttccctcccgtggggggaggggtgtggcacgcagaggggcagagggcggggacactggccccgtgggggaagaaggtgctgtcacagccgttactgtcccccgtgggaccccagcctggagccccccatcctttggctcctgcctgtggccactcagctctcaggtggccacatgcacatcccctgctccttccctgcgcacctgccctgcccagtggcctttctggtcccagctactgaaaccggtgagctgctccagggtgaggctgctttctggctcctggtgtatttggacacagataggcccttagtgtccagaggcgccccatgcagccctcatggtcagcaggacacccaggatagaccccctccacgcagcacctgggccctgggagcggctgcttttaggatgccacctgttcctgggcgccttgtttttagcttctgacctgaagatgagcgggggagcgcggtggcgagggcacgtgggcgtggctcacggtctcctctctgtggcaggtacatgtcccagagcaagcacacggaggcccgggagctcatgtactcgggagccctgctcttcttcagccatggccagcaaaacagtgcagcagacttgtccatgctggtcctggagtccctggagaaggcggaagtggaggtggctgacgagctgctggaaaatctggctaaagtgttcagcctgatggaccccaactctcctgagcgcgtgacctttgtgtccagagccctgaagtggtccagtgggggctccgggaagctgggccacccccggctgcaccagctgctggccctcaccctgtggaaagaacaaaactattgtgagtcgaggtatcattttctgcactcagcggacggggagggctgtgccaacatgctggtggagtattccacgtcccgcggcttccgcagcgaggtggacatgttcgtggcccaggccgtgctacagtttctctgtttaaaaaacaaaagtagcgcatcggtggtcttcacgacgtacacccagaagcacccgtccatcgaggacgggcctccgtttgtggagccgctgcttaacttcatctggttcctgctgctggctgtggacggtgggaagctgacggtgttcactgtgctgtgtgagcagtaccagccatccctccggcgggaccccatgtacaacgagtacctcgaccgcataggacagctgttcttcggcgtcccgcccaagcagacgtcttcctacgggggcctgctcgggaaccttctgaccagcctcatgggctcctcagagcaggaggatggggaggagagccccagcgacggcagccccatcgagctggactgaactggccaggccacgtggagacaccacggtcgacgacggctggagggacgtttcggaggcgagtcctgggtggctcctcgccttgggggctcctggccctgaggctggcggtggccgcatgccggcgcgtgtctgtttctgtgcggcggctcagggtggcgcggctgctgctcactgtgctgctgggacccaagagtggggcgtcgcccctgctggccgccgcgtcccccgagattgacccacaataaagcacaggccttaccgcggcgtc

SEQ ID NO: 1578 - DNA, 4642 bp, Homo sapiens
acctttttacagaatttaatactgtctgaaatgtacttgttggtggtgtcctgccactaaatcccggagggaacggatttttgtctgttttgctccccatgatctaaaacagtacttggcacaagaggttcaacaactcgttgaattaatgaatagtggacatgaacttgacaaaacaggttccctgcctcaagaggcatggccgcagtgaggagacgttaaaagaattaaaactgtatatgtttagtgggaacacaggagcctttaaattagctcagaggatttacatagatacctgcgataaaatggggttacatctcagatctttggactctcgtgctgatgccctttccattataccataatgcttgttctctgtaaagactacatggattgaaaacactatgtatcagctgtcttagcccattgttggaacaaggcaaggtagacataaaatctgcatatccccaccgtttgaatctcttttaccttgccaatgatgtcatacagaactgtaaaaggaaaaatgcaatcatattccgtgaatcatttgctgatgtacttcctgaagcagctgctctagtgaaggatccatctgtctctaagtctgtagaacgaatctttaaaatctgggaagatagaaatgtatacccagaagaaatgattgtggcattgagagaagctttgacatctacaaatccaaaagctgctctcaagtctaagatagttgctgaatttcgatctcaggccctaattgaagagctgttgctatacaagcgctcagaagatcagatagaactgaaggaaaagcagttgtcaactatgagggtggatgtgtgcagcacagaaactctcaaatgcttaaaagataaaacaggtgggaagaagttctccaaagaatttgaagaggcaagctccaagctggaagaatttgtgaatggattagataagcaggtgaaaaacggaccctcattaacagaagcactggaaaatgctggaattttctatgaagcacaatacaaagaagtaaaagtggtggctaatgcatataaaacctttgctaaccgagtaaacaatttaaagaagaagttggatcaattgaagtcaacccttccagatcctgaagaatcaccagttccttccccaagcatggacgctccctccccgactggttctgagtctccttttcagggaatgggaggtgaggaatcccagtcaccaaccgtggagagtgagaaatctgccacacctgaacctgtgacagataatcgtgatgtggaagacatggaactctcagatgtggaagatgatgggtcaaaaatcattgtcgaggacaggaaggaaaaacctgcagagaagtcagctgtatccacttctgtacctacaaagccaacagaaaatatctcaaaggcctcttcatgtaccccagtgcctgtgaccatgacagcaactccacctcttccaaagcctgtgaatacttctctttccccttccccagcattggctttgccaaacctggctaatgtggatctggcaaagatcagttccatccttagcagtttaacatcagtcatgaaaaatactggggtcagtcctgcatcaagaccttctccaggaacgcccaccagccccagcaacctcaccagtggcctgaaaacacctgcacctgccacgacaacatctcacaaccctctggcaaatatcctctccaaggtggagatcaccccagagagcattctgtctgcactttccaaaacccagacacagtcagcccctgcactgcaaggcctgtcatctttacttcagagtgttactgggaacccagttccagccagtgaagctgcctcacagagcacttcagcctcccctgccaacaccacagtctctaccataaagggaagaaatctgccctccagtgcccaaccttttattcccaaaagcttcaactattctcctaactcatcaacttctgaagtctcttcaacttcagccagcaaggcctcaattgggcaaagcccagggctcccaagcactacttttaaactaccttccaactctttggggtttacagctacccacaatactagccctgctgccccacctactgaagttaccatctgccaatcttcagaggtctccaagccaaagctggagtcagagtccacctccccaagcctggaaatgaagattcacaacttcttaaaaggtaatcctggtttcagtggcttaaacttaaacatcccaatcctgagcagtttggggtccagcgccccatcagagagccatccctcagacttccagcgtggccctactagcacctcaatcgacaacattgatggaacccctgtacgggatgaacggagtgggacacccacccaggatgagatgatggacaagcccacatccagcagtgtagatactatgtccctgctttctaagatcattagccctggttcctcaacacccagcagtacaagatcaccaccccctgggagagatgaaagctacccccgagagctctccaattctgtatctacatatcgaccctttggtctgggcagtgaatctccctataagcagccttctgatggaatggagagaccatcttccctgatggactcttcacaggaaaagttctacccagatacttctttccaagaagatgaggattaccgagattttgagtattcagggcctccaccctctgccatgatgaacctagagaagaaaccagccaaatctatcctgaaatcaagcaagctgtctgataccaccgagtaccagccaattctgtccagttatagccacagagcccaagaatttggggtaaagcctgccttccctccatctgtaagggccctcctggactctagtgagaactgtgaccgtctctcatcttcccctgggctatttggtgccttcagcgtaagagggaatgaacctgggtctgaccggtcaccatcaccgaaacacccttgccgctcccacgggtcacccacccacgtcaggcgtggagaaagtcctggcctccaccatttccaccacgtcgacgattgaatttaagaatatgcttaaaaacgcctcacgtaagccctcagatgataagcattttggccaggctcccagcaagggcactccaagtgatggtgtcagtctctcaaacctcacccaacccagcttgaccgccactgatcagcagcaacaagaagagcactaccgcatagaaacccgcgtctcctcctcctgcttagacttgcctgatagcacagaagaaaagggggcccctatagaaaccttgggttatcacagtgcatccaataggaggatgtcaggggagccgatccagaccgtagagtccatccgagttcctgggaagggaaatagaggacatgggcgtgaggcttcaagggtgggttggtttgatctgagcacatcaggtagctcttttgacaatggcccttcaagtgcctctgagttggcatcccttgggggtgggggcagcggaggcctcactggctttaaaacagcaccatacaaggaacgggcacctcaatttcaggagagtgtcggcagctttcgttccaacagtttcaactcaacatttgagcatcatcttcccccatcccccttggaacatgggacacccttccagagagagccagtggggccatcatctgccccacctgtccctcctaaggatcatggtggtatcttctctcgagatgcacccactcatctaccctctgtggatctttcgaaccccttcacaaaggaggcagccctggcccatgctgccccaccccctcctcctggagagcacagtggaattcctttccctaccccacctcctcctccccctcctggggaacatagcagcagtggtgggagtggtgtccccttttctactccaccccctcctccaccccctgttgaccactctggagttgtacccttcccagccccaccactggcagagcacggagtggcaggggctgtggcagtatttcccaaggaccatagttccctccttcaagggaccctggctgagcattttggggtactcccaggacccagggaccacgggggccccacccaacgggacctcaacggccctggccttagccgtgtacgagagagcctcaccctaccctcccattctctggaacacctgggcccaccccatggaggaggaggtgggggaggcatcaacagcagcagtggcccccccttgggtccctcacacagagacaccatcagccggagtggtataatcttacggagtccccggccagactttcggcctagggaaccttttctcagcagagacccatttcacagtttaaagagacccaggccaccttttgctaggggccctccgttctttgcaccaaaacgcccattcttccctcccaggtactgatggaaaccaagggaaaggcattttgaacagtctagagaacattggaagtaggagtttggtttattgttgttgtttttatttgttttctctttctcgattttttttttattataacaaagggcctctcttccaaagtaagaaatcacatacgcttacgttttactattcaattcaatcctccctcccattgcacttatctaccttccccaagttgtttgtatt

SEQ ID NO: 1579 - DNA, 3671 bp, Homo sapiens
ctgctttgtgagggaagggcaaggtcagaaggtgctcaccctttccacagcaagcacgcggcacacgtgtgccacacgctgaacctgccttggtcgtagctggctcctttgttaaggtcagcgccccccaagaccacgtgctgtgcaggcagtgttgggatctcgggaactgtggggttccacttagaaactagtgtctggcccagcagcctacacaggagagtttgcggttacagcacagagacggtttcggggacagaaacatcctttctcactcctgccggaatgctgctcacggctccactgaggaaagccctgcttgatggaaactcaactctgccatcatctgcagcccagtgcgacggcagtcaaaggccagggagagctatgctttgttttatagaaacatgcctagaaatggtcgccttaagttatttaacccactccctattgtcgggttttgagtttgtttctagtcttttccaactgcaaactgcactgtagtgaccattctcacagctacctcttttcacacaaaagtaataatttccctttggtagatttctaaaaataaattgctagttcagagagatgaccaattccaaggcttctgatcagctctgcccaatcactgcccgtggtgaggtgccccccgagactgtacttgccgtgtcctggggccactgccctctcctgccagtttttgttcccaactgaaagggcctcttgtttctctttttcttggtcctttttaggatgtatcattgttcattccccttcgtgagctccgtcgtgttttatttccttctctgcgttctcaggttgccctcggagtggagtctgtggctttccaccggagcagcgcccaggaagtgttttcgtgtgatgaaagtgtatgtctgaagttcgttatgaactcgtcctagctccagagctagtgtgcatgcatgtcactggtcgtacagataattgatgagcaattggtgtcgtctgaagcagtgacagcctgggtgtgtcagtgtctccaaaacggttccactgtggcatcctacaaatgggctgcgtcctgggagccattgagaagttgtacctcctttacggagggttctctggaatagcaaattagggaaaatgcattctgaggttctgtatttacaataataatttataagcaaataactcacatttcatcctcagtatttttcagtgctgtacaagcgtcttgaattactctggtagcttttccagaaagacccatgacttcaccacatttctcgagttacgatgaaggtagagtctggggccctgagtgagcatcagatgctggaagctggggctgggaggggccaagcattggggacagactccagacacctgcaccaccccctggccccatgagatacgttctcagaccttcccaagaaggatctgtggctcctctcagtgctgtgaagtgcagggggcttccctctggaattcagcccatctctccctcctactttggctggctccagatgccatttagaggaaatgtttggcccatttcccaggtgccagcttttcccatgaggaagctgtcagtgcttcctggtcagggaaatcttttgggcgtgatttggtcagtcacagtctgttggggtgaggtggtgcgtggagaggacaggatttggaaccaagggtccctggattagaatccctgctccatacctcactggctgtgtgaccccaggctcgcgaatctgcctctcttgatctgtttcctcatgagtaaagggaaatgactttgtactctggagtgggcctcactcattcatgtgccaggcatcgtgctaggtgctagggcacaccccaaggcgttcgggaagcagaggctgccgtccctggcctggggcctccctgcagtgatgggaatgtagccctggtgcccccacaccctgcccttcaggagccgtggtttccttctgctctctcctgggaggcgcacacccctctgcacccagagccaaggagggcaggcagccctgggaccctcttcaggcaccgcagccagggtctgtgttacccacaggtcctctggatgtcagcatggcagccacaaacctggagaaccagctgcacagcgcacagaagaacctcctgttccttcagcgggagcatgccagcacgctcaaggggctgcactccgagatcaggcggctgcagcagcactgcacagatttaacatatgagctgacagtcaaaagttcggaacagacaggagacgggacttctaaaagcagtgaattaaagaaaagatgtgaagagctggaagcccaactgaaagtgaaagagaacgaaaatgctgagttgttgaaagaactggagcagaaaaacgcgatgatcacagtgctggagaacaccatcaaggagcgagagaagaagtacctggaggagctgaaggccaagagtcacaagctgaccctgctgtctagcgagctggagcagcgggccagcaccatcgcctacctgacctcccagctgcacgccgccaagaagaagctcatgagctccagcgggacctcagatgccagcccgtcagggagccccgtgctggccagctacaagccagcgccccccaaagacaagctacccgaaacgcctcgccgccgcatgaaaaagagcctctcagcccccttgcacccggaatttgaagaggtctacagattcggggcagagagcaggaaactccttttgcgggaaccagtggatgctatgcccgaccccaccccatttctgctggctagggagtccgccgaggtccacctcatcaaagagaggcccctcgtcatcccccccatcgcctccgaccgaagcggcgagcagcacagcccggcccgcgaaaagccgcacaaggcccacgtcggggtggcacatcggatccaccacgccaccccgccgcaggcccagcccgaggtgaagaccctggcggtcgaccaggtgaacggaggcaaggtggtgaggaagcactcagggacggacagaactgtgtgaagcccgccgtgccccaccccgcgctgtccatgcactgtgagcaccactgggaaatctcagccacaccttttctgtttaatcccatgcatgccaaacacttttcacacctaccgacccattctccttctgcttctcttgccctcttcttcacaccaaaatatgatcgtgtccctgccgcagaatatgtatttcctaattgctgtggccaaacgcctgtgtgccgaatcgcttgcttctgatcccgctccgtgtaacctaagtgcgctgcaggcaaagcccaggccacggctgcgtcactactgatgttcacgatgccacacagtcacacacctaattcattctcaagtcggagcaacacataccaaccttgaccttatcctcaagctccagggcagcctggccgagcagcccctgctccctcctggagacccttgtcacctcccgagctcctcctggagacccctgtcacctcctgaccaacctttcccagggcggcaccgatcaccgagcagccgtgcgtgtatctcaaggaactaaataagatgacgctactcctcatagcaccacaacctgaatgtgtgttcatatttttttgttagttttatccaaaatgtttaagatcccaacaaactttattttct

SEQ ID NO: 1580 - DNA, 3489 bp, Homo sapiens
attccaagctgtcaccccgaagctgagtgaactccgcaaagcgtcttctgtgtacctgggaggagcatggtgccatttcccttcctccttcagactttcttctacatggaaggccccgtcctccacaggtcccagcctcagctgacactcgggtcccaggaggctctgcgaaggtttgctgggcggttcccccgcacgccgggctacaacaaaggaacacagcatgacacgtgctgtgaacctcagctgtgagacaaccgaaggagagacaacattcagcaaaaacagagcccaaactgtccccgtttctctcagccccaactgctccatggcttggagtgcagcaaatgtttcagccgcgctcaaagggaaggctttgctctggagtcagcatgcagagctcgcctcgactcccctccgtgccgctcctcaccagcactggctgggtttgaatctcagctccctggctcctcgctgtaagccctggaatgcaaaccccaagggccaaacaccccgaggctctcaggtcccaggcgcggacaccttcctggccttggctgtcatggcccagatggaagcaaagacaactcccctctccacaggtcggctggtcctcctgccccgagagcaggagcccaggcacaggctctgtacagagttctccatctacttctcccagggtggctatgcaaaggccgtctgcctctcgctctctgggtcccacctgcagcctgtcccagtggattctgtaggctccacagtgatgctgggaaaagacccaaacacccggacaaagcacgtggacagctgccaatgccaaaacggcaggaagcaagggaaaggcagctggctccgaccctttgccaaccgtgtgcaacgctgcaggcacctagagccagcgaggagctaccaaactggttcccatctatgcttgcagcggctgctgtcgcagaggcaggacaggggtgcatggctatgccaagtatccttctgggatgagccgattctcttgtcccaggtcgggcatgatggagaggccagaaggtagaagaccgggatcacggaacaggatcaggaccccagaacaggaccgagaccatgaaacaggaagcaagctacatccagcacccagttcagagagagggctggggacgccgacactccacctccttcccagcaaactcggaaggctccagggcatccctggagctgctctggcagagaagaatcagtgtccacacgtgcagctctcgctcgaggaagggcaggggcgacatcagaggcatgctttgcacagcacacgcttctagaatggctgggatttcaaccttgaaagtctcaactccttcttcctcctcagatcttgggattttgaaagtgattcctaaatgcctttcgatctcatttttgccgaaggagatggtcctaatttactgcattccaattggaaacatttttgagagtaaaaatacctgaagacatgttgggcctggaggtagcagactcaaaattaaagcaggggcccctctatccaccgccccccagattgcattaaacacagcatgttggggatcagtgagttgccatggccctgcaatcagacattttgccctctgaaatttagccttgattttgaagccctgagtttagtatatttagatgagctgacgggcccagggagtcactcagaaagggtagaggtccttcagagctgcgttaagatacagtgggagggggtcaaattgctaatttcatctgccactgaaaactcccaaacagcagagaacttcccagaagacttgtgaagttgggagtctgcaggtggcgggggttgggtggggaggtgatggcattctacccctaagagagcattttgaagttgaagctcaacttaaaatatttgtgcctatttttgagacagggtcttgctctgtcacccaggctggagtgcaatggcaccatctcagctcactgcagcctcgacctcccaggcttgagcaatcctctcacctcagcctcctgagtagctgggactacaggcatgcaccaccacacttggctaatgtgtgtatgtgtgtgtgtgtttgtagaaatggggttttgccctgttgcccaggctggtctcaaactcccgaactcaagccacctgctctcctcggcctcccaaagtgttgggattacagatgtgcatcatcgtgcccagccacattatgctttttagagggacatcaccaatcagacagtggcctgggctggacacagcatccctggaagacggcccctctctaaggtgtcatctgccattagccaaggaccctcttgtctctctagctccaagtctccacagaggatgtgctcaaaatgacctctgtggagaccctctctccagataaagcctccttcagataaagcctcttgcggataaagcctaaagcactggtggtcaggacttcaacgtgtgaattccaggaggacacacttcagcccattacagacctgatggcttctgccagacacccagccgatccccatggcttatggaggaagaagacaagtggagacggggaggtggtcgggcgaccctttccacggccagcagcaactgcacccgtgtctgggcacctcctgagtgctgtaagcccccatgcatcatcaagacggaggcccaggcaagggcaggtgggagctgaaacccgtctcaggagatccccaagccaccttcccttggtcccagcccagattgtggctcccctgtgtgcctcccaggccccaggatagacgtcaaccgtgtccccttgtgggtgccttgagcttagcacctgcctgtcccttccaggggcccctctaatacaggacttacatcttcatgaagacactaactgtactagtgcgtgttctccagaggagcagagccactcaaggtgtgcgcatcagaagagagctattttaaggaactggctgacgctgtcaggccttcaactgattgggtgaggcccaccccttttgacgagagccacctgctttactcgaaggctaatctcatctagaaacacctttacagcaccaccgtccaaagtggagatgatgtcagcaaaggggatattgaagcagatggagtggtacagatggtgggtcactaaaacgcaggttgaaggcttttcacatcaagtcatgcctgtgcccacagacaggggaggaggtggcatgaggctccaagctctggagccttggaagtcaggcaggccccactggaatcacagccccctactcccaggcacacctaaggagtcagtctctcctgaccgatggatccaacttcacagctgcgactgagcaccagggggacgtggcgctgggaaattgtcccggcagacgagactgaaccctagaagggccccatggtaaaactgataaagcctgaaatgtgtgtgcagacatgggcctctttattaccacacaacgaccattaaaatctctctgctatggtgt

SEQ ID NO: 1581 - DNA, 3526 bp, Homo sapiens
atatagcgcaaagctgcggtatggagaaaagcctagaacccacagccgccatgatgacgcaaacaaaattaaaagggtcaagaactcaaggcccactgtttcacctaagaagaaaaggaagaagatgaaggggagaagagaagctctgatttgggtcaatatggaaaggggaggctgacgcaggctgcccaagagccagcctttagcttagtgacggtgatgcggatccgccatcttgaagcgccgcccggcagaggactctcaagacgccacagccccaccacggccacttctcccaaggtacaggtgcgcccgcattcactgaggtcggcctggcccacccctaccccaagaagcgaatcgcccttcattcaaggcaatgaccagcaagactatcacaaagagaaccacggtgaaaaatcccaaagggctttctgggccctgggaagatgtctgtcatctgggactagtgggaagaactcaaaaagtgaccctatttgccaagctcatctaataacacatacagctgttattttcttttcagactctaaaatgcaagggttcccagagccctgctgagttacctggtgtcgctcccatcctgatgcccgggcggtggccgccttctctgtccagccctccctgaaaatgaccccaggctaaggatcagctcagagccccgagctgtttttgtagctttcatgttgacagaacatcctggccactctgctgagagctccatctcccggctcccgatacactgagtcatcttccaaagaggaaaaaaaacaacaaagcagccgtcaccagggtccccattgccgtcgactgacgactcactggctgtcgtcacactctgctccgcggcccccgaattggtaacgaggggcttcagggtgcccagctcccctcccgtgggactcagcagcgtcagggaagcaggcagccactgctgagattcagaaagaagggaaactaacctggcatcaaaaggctcccaggaaagctcactgaccctccctctgccgtcaccagcccccaccactcagatgccatggcatgttcctgatgcagaagtaaaggggtatttatggcaggtgggggacagtacaccttgcaggcttgaagggcgtaacgcctaggttacctcctctgcgcccctgctgtgataccacttagggcacaggagctcctgtctcccccatttcttctctagccccctgctatgctcccattttaagtccctgataaaccactgggtagggatgggaacctatttgctgccaatatattaggcatttctgtataacagttgtagtagctccatctcactgaaaacttaaatcatatgacttgtctaaagtcactcagctaagaagaaggatcacaatgaaaacctaggtctgttcaagtccagtgtctctgctccctgctctctaattctggagcttattctggctttgaagatgctgtatcccactccacctctccctcctcttgtacgaggaaggcaaccaggataactgagtcagttaatccatcaatttcagctacaagaaaaaagccatcatcttgagtgaacctgaccacaaaggaagaggagaaagttaatgacagtgtcaaggaacagctgagggacccagaccatggacacaagattgaccacccaaactccctcagagcattagggacttacaaaattccttaaatagacaaattttggggatctacttcataacagccatcttgtaaacaccagtaattcagagaggaaaaatgtaaaggctttggaagaccagggctctagtcatgaccaggccacttactagacatgggatgctccccacagggctgtggaaaggagtaaatgaagtaactgcagggaaagtgtataacatggtatctgtcaaacagaaggcaccaaataggtatttgttttccttctcctttctctagcctccctcctggagctcccagtctgataggtgacataagacttatacacaaataatcataacacaacaaaagtaccataaaaagggacagactgtatggaagtttggctgaaagggcaggggtggttatgagaactgcttcttgccaaggaaatcaggagaggtccacggagaaagtgagactgccacaggtggatgcagaggagaagaggcatggaaaacatcactggtgaaaacagataggaaaaggaagttgcctggttttgttggaacctatggtccaccaaaagaaactgagagaggtaagactgtacaggaaacctaaggccagttacggccagcattgagcatcacgctaaagggaaggaattttactctgggaattatgagaaaccattttaagtttctgagcaagaaagacaagatggccgctgcacgcagaagggcctggagagagggggaacgggcagcggggagcctcacaagaggactacagctggaaccatggcactggcagggggcatggaggagaaagagaagaaaaacagtaagcaggcaggaccatccgaacagatcctcaaagctgccatggacctcacttccctgtccccacagggaggctgctggagacagagcctatttggggaacacaaaccacgggtctgacacgtctgagatgagctgccgagcctctgcctccactctcattcagacactcagcttttccgaactactccaagcaccaggctgatgaggacatgggaaacccacgctctggcaaagccgggcccaggtgttgaacccctacccagacgccttccacctgaatccccacccaggactgtgtccaagggtgggactaggcggctctgcccctagagccaccttcattgcggcagccaccactgtgcctgcctctgctgtgcttttgccccccctccccctccccacaaacgtgagacctgcgacagacaggttagagagccgggaccctgatttttcgaggcctccctcccccaaccaaaggcggacagcctgctgccctagttttattctgattctcctcattccctagactgacaaacctttctaacccggggcctccaaacctcccgtctcccactgacttttctggaaatcccaccagatgcggagtttcgagcaatttcctggggtcagtcccccatcctcacctttccaagcaccacgtagtagtagcttccagaaggtagatctttcccatactgggctcagctcacaactggctcttgagggcctctggacagccccggacgtcaatgcaaatctgttgtccccagggagtagcccagagtcagcaggaagcccagggtggtggcagtatcagcagcagcagctctgccctaccttgcccatgcgtttccaggggagccaagaattattttgccgcaacactgaggtgtggctgattggaaaattcccttttccaacaccaaactagagaataaatattttcttccaatttggtcaaccctctgcatacccatctccctagcattcttccctctaaataaaaagttttgggagccctg

SEQ ID NO: 1582 - DNA, 4989 bp, Homo sapiens
accacgcccaccccgctgaagcgccgcgagggtgcgtttggggctctgggtgatgggcccgaccggggttagggggctgggagggtcggccacgtgagcctgatcagtcctgtggggccgggccacgctaggcacagagcctttgcttgcagctgggctagggccaggtggccggtgctggagggcgctcagcctctccggacatggcctggctcctgggttcaacgcgcggggccctggtttgcaaggctgcggaagcgcttgccagcacagatttccaggggctgccctgtgggttgcccctgacgcccccacttcccttctcatcccagacactgtggtccaggaggtgcagagttcagggcctgcagagcacgtccccccacgaagccatccttgggcgagcaccaagaaagcgggctgatgaatgggcttccaccccgaggtccagacagctgccttccctgctgactcagctcgggaaagctgccgaggcagaaacttttctaagagcagaaaaataaggcgcgaggccccggcgctgtctgtggtgaaggagcgaggcttgagagaggccctgaaccctggaggagcctggaggagcctggagttcccagtcgggcccgctccagcccaggagggaacagtagcagcacaagtccgtgcatcccggatggaggcttcatttgcccagagccctccaggcgcctttgggagctaagttgtgggtctcccggttcccatgtgaggaatccgaggccccgcggaaacccataaacgacatccagcagggtaggatggacccgctgggcctggcgtggagcccacctgtgcactttgcatacccactgcctgctcagcccctcacaccttcccttttcagccactccccgacttgtaggctgggggtgtggccagaggcttcccagggctctgcagagaaacagaatcagtaggagatacatacatacacacatacacacacacacacacacacacatatacacatatacatgatatattattatatctatgtatctatgtatctatctatctggagagagggagagaggagaggagacaggctggcaagttcaaaatctgcggagctgatgtcccaactcgaaggccgccgggcaggaggaattctcccttgctccaggtagggtcaggtcagccttttctcctattcaggccttcgagtgatagaatgaggcccacccacttagggagggtaatctgctttactcagcctacttatttaatgtttatccacagacacatctagaataatgtctgaacaactgtctggccacctcgtgtcctggtggagttgacacgtaaaataggcagagctgctgcaggtgcctgggcatgagctccaccagtctgatcctaatttttcatccataaagagcatgtcgtcagcatgactgaggctaatgagtcgacaccatctatgagccaacaccatctatgagccatgatgtgtgtggcccacagcggctctgtcggactcactatgggcagtttccactggccctcccagaagggatcatgcgggcagtagtatcaatgctttttatttttttttttttttgagatgaagtctcgctctgttgcccaggctggagtgcagtggcacaatctcggctcaccgcaacctctgcctcccaggttcaagcatttctcctgcctcagcatcctgagtagctgggattacaggtgctcgccaccatgcccggctaatttttgtatttttagtagagacagggtttcaccatgttggccaggctggtctcgaacttctgacctcacgatctgcctgcctcagcctcccaaagtgctgggattacaggcgtgagccaccgcgcccggcccggcccgtatcaatgcttttaagtattcaccagttgctccttggccaggatgactgtagctgatgtctgcaggactgatgatgataagctaagatgacacctcctccctgggggccacagagccacgatctatagatctgtgaggccaccaggacctctagggtcagtcggccccgcagaggctgattttatctgagggcagaggagccagggagagttataagcagggctcaaagcacatcacatttgcttcacagagagggctaggggtgcttcccttccctttatggtgatgggtcccagtctgggctcaatgtgtagcccacaggcctctttgctggtcaaggaggtggactacacagtgggatgttggtcccacaccacctgccctgatgtgtccctgaaaccaaatctggtgcgagaacgcctgtacttaagtatatgaaaaatttaaggtgttttgaaaacaactatgtagggctgccagaggggaacagatgtcatattggcacataaacaattaactgggaccagctgcatccttcactcaccatcacctacgccatcaagaagaatggcattgtagggaacaagatgagggctatgagtgctccgggcctggaaatgtgctggtcaccactattccagacaagaggcttcttgttcccccccacctgcagaactcagtttcctcacagagtggggcacaaatctcaaatagccacatagctgccctcaggggtacggttttactggggagtccagacctggccataggaggccattctcgacacggccatgtgcacagagcagagttccaactacaggcagccatagaccagcttcctgcacagctctgaggcctcggccaaccagagtaatcctgtgctatatttacctgcctctaacatggtccctgccctatctatgcaccttgcattttctgtaagcatccagcatccaggacagggccgggcatagtgtaggtaggcaggaatgtttattgagtgaatggatgaatggatggatggctgagtagtaaacagatgaagaggtgagtggatagatgaataggtgggttgatgggtgggagatggatgggtggatggggccaaagggaagcaatgccattatgggtggagggagctctacagactgttttcccaacctcagggcagaggctgtctctcctctagggcttatgtggcactggggtcccctttgttctctatctttgaaaggccaaggtcaggcaggcacctgattatgtaggaggtaggcgatgcctgaatccctttcatactgtggcgcttgatttacctacacataaaatgagagcccacacactgacccttgttgccatggcagggccggggcagcacagagtgtggggtcccagggatctgctgctgggtttccagtaagcatgatgtcatgatgtcattccaggaaaggagagcttcagggtcagcagagccagctggagatgacctagggaataaactcagagggacaatgcgtcttggcctctggctgcgggctgggatttgagatctggggaggtgagcagcctgctagggtgtggggctccccaggcctgcccttccttcctctggaggctttcaggctgtccaccttccatgctcagagaggcctcccctgggatttgagagccttgtgagctcccctctatggggaggtggggtgacaggcaaatctgctttgtccaggagctccttctcagatatgggtactgatgcaaacctttaccatgctatgtgtccctgttaattagccaggtcctgctcggtggtgacccacgtgctttgccctccagtctccctggttgatgcagggcatgtgggctactctggtgtttgtctgaactattgctgtatgcccagcacaggtgagcaccaaagaggtgatcttgggtttaggaggtccaagaggggagtcattcaagaggggagtcattcaatctctcagggctcctggtgggggctttttggatagatgctgagctgactagttaaaagaaaaaagggcacaggtgggcttggtcctcctacctctctctcccccactgtcagggatgtgggttgttcttggggtgagagggggataaggctgagtcgagtgggttactgaatggctgcagggggatgatgccatctgcttgagccatgggccaggtgtggaatcttggagcatgtcagaaaggagagaggctttgtggccagacacacctggcttgcaacccccctctcaatgccatgcatgtgaccttgggggcatcacttaacttctgtgggcatcagtgtcctcatcttcaaaaatgcaaatggcaacatctatttaggatatttcttattaggattgatgagattttattaaaaatttctagcacatggggggctcccagaaaagctagctcctatcattttttcaatgcgagtagttcctgggtgagcaagacttccatttcccagcctttcccatgtttgcagaacacacagaacatggcactgtttgtctggcacaggggtatgtggaggcaggaggtgtcaggaggctatgttggctgcagatgcccctcctcttgctcactgggagccattcctggctgatctgggctccctctggggcaactctgagctaaagaccctcgcctgggggtctacgtggagctaaacctctctctccctgcctacggggtgctgactcatgtcttcacccaggatggattccagacaggactcttgaggatgaggcgggggctccttcttcctgctgtgacctcctgcaacctgcacacatcaggggcacggaggaggcagttgattgtgctgatcatttcgtaaatgcctcctccaagccaggcagcccgcagggcagtttacgtgcatcgtcatcacaaatccttgaaatcatgaaagagagagaggcacagagagattaatttcccacagtcaacagctgcgacgggccagatctggattttaagaaagttcgaatttttaaaattgtggtaaaattcacgtaacacaatttattatttaagccttttaaaatgtacagctcagtggcattaaagtacattcacatc

SEQ ID NO: 1583 - DNA, 4286 bp, Homo sapiens
tgcctattaaactcctgctccaaactcactcgatgtgtgtgtgcatgtccttgacctcaatatctggtcgtgtgaccaagaacctcagtattcaccccagacaacaaggctgcttcattttgagggctcgtctgggatttgaaggtgacttcatcagaatggaaagtctctggctgacaaacaattgcctcctcaaataccaagctttgctgctaaagggatctgcagtccagctgaaaacctgcccttgcctgagcccagccactttctcccagagaaaactggagaacctaaacatgattgtgaacagaatggcttccggtggcctgggactccttggggaaacagaaaatgcaccacaaatcccattttaggaaaaatctgttttcctcggagcccctggaattaaaggtgaataaatacctctcaaaatcgtctttgtcttctggctatgcttgcttattaggccctggaagctgtattcctagctctgttctgaaagaacctcactcagaggccaataatccaattgggacattggcaaatgcaaaatcttataactgctggatcttcttctgtttgtgtggttatatatgtgttacttgtgtaatgcctattaaaaaaaggagctctaattaattggcctaagaaaaataagcgcttaaatcaaacatttttaagggaaaagtaaaagctgtggtacctttcagttcatgtgactttaatctttaaaaataaaaagagtcttaggaattattggtaaaatacaaatgtcttcaaggtataaaaatgtggtctaaattatgcaggtcaaatactagtttgctaaatgttttaaggttgtaaactgctttttttttttttgagatggagtcttgctctgtcgccagactggagtgcagtagtgcgatcttggcccactgcaacctctgactccctggttcaagtgattctcctgtctcagcctcctgagtagctgggattacaggcacgcgccaccacatccatctaatttttgcatttttagtagagacggggtttcaccatgttggccaggatggtctcgatctcctgacctcgtgatccgcccgccttggcctcccaaagtgctgggattacaggcaggagccattgcgactggccataaaactacttctttatttagcctttaaaaactatcaacgtgcctgcttcacaattggtagcacctgggaacatacggaagcaaccaagcccctaactatgctgaaaggagtcaaacattatctgcatccagcacataattaaaacaacctaacaggttttacattaaagttaaaaattactaaaagttaccattataacatgtgattgaaactactgaacatggaattacatggaaagtgtgtaaaaacagtaaaagatgtttttatttaaagattataagagggcatggaaatgtatattttgcttagaaataaagaattgtcttaaagtagaaggtttaagcaaattgtaaaaaaaaactgtaaaaatcttgcaaaaaaaaacactgcgtgtaaacatattaactaaatgcaaaagggcattatatggtttttttctgtaaattaatcactgaaataaaagcacagcaaggttttcttaaaatgctaatctactctttagcaaaacttgtcaagggttataacaggtatgtgaaaatctcatttcatggtcaaactggttaaaattaaataggattgtctataatgtttcatttaaaattaagtttaacattaatagcaaactaatgcaagggtaaaatttaactttctctcttaacacgggattttcatggaatagaaaaggctaatgaatggtttttgctttttcaaatttctggctcaacattttggcaaaaacaaaaacttttggtaatctaaaattctatttcataatatcaagtgttttaaattttaaatatacttaacaggcttcccaaagtcaaactttagtctcaagtctgtctttcctaacccctggcttttgggtgctgcagaggacccctgaagcatctagaagagaggtaaacagtattatttaacatgttgaggtacataaaattgccaaaatgatgtctaatactcttcaggttatactttagggaataatattaacatgtgttccaaaactgtatgggatgtctatggttctagtgtctgaatatgtgctattacaattaaggttgttatgctgggtttttgaaaaacacaaaaataaccaaatttctttgtcaattgtatttctgactgtatccaaactggacattttgtcatttacagacaattgttgttttgttttaattctcttcaaaagatggttcataatcaagccatgggactttaacaagttctctccaatgcaggtttgtcatgaccaaaaaatgtatgggactcataaaaggctaaaatgtttataaatatcaaaacaaaagttaatggaatgaactgaactaatagaaaactaaagcaatattcttcacttattcttagaacacggctaatccttattttattttttagagtcaaaaaaacttgtcttaagctagctacagcctttgataactaagcaaagtgtactactataggcaaagtttggagcatgtttatgtctctctgcctaattcctgtagaatttggaaactagttataaatattcttaaattacaacaatatagttgtttgaatcagtgcagcaagaatccattttctcttgcaacaaaacacaattggaaaaactggttgttttaccaaggctttgactagaagggtatatttccctttaaggaatcaagcttaacttgctgagccaataaaagcccctggggaaaactggcctcatatctgtctacacagtctccatacagggttcctgacctgcagtgagtaaagaatgtcactttctaacaggcctaggaaccccatgcttctggaacctcaagaaggaaaaaaatttatccaactcacaggtatttgaaagtacaaacctatggctgggcttggctttaaaaagtcctatctaaaattcctcatggaacaaggttccatcaaagccaatctaagaggcttatgtaaggatgattattcttgctgtactttatgcaaataattaggccaagtataggactgaagtctgttttgcaaacaactcagtcctatcatagattatttttaacaaaaatgaggactagagaaagagaaattatgttttaagacttatcatacatctgttattaacctgtagtcccatcagttgtttttaagttcttgcctacattttaaactaaccctgcttactcctgtcaaccaaccaggaatctctggctgcagctcagagaaaacagaaaggcatcggtaatagaaaaatctggaaacatgttctagttctgggcaattatcctacaaatcctgccaggtaaactagaaccccagggtttctcccttttttgggaaagtaagaccaaggaagctaaacaaagccaagccccatatacccacttacagcagcacaacccatctgaatggctcacaggtatcaaacaaactctgttgtcatggttacggcctatagtgcccccattaataatagtaatcttaatactcatatttagaacctatattctaaacctccttgtgaagtttatctcttctcgcttagaaaccatcaagcttcagatggtgctgaaaatggagccgaaaatgaaactgccctcctacgagggacccttaaatcaaccccaggaggagccctagctgctgttccccacacaacgccactctccagcaggaagtagccagaagaaatcgtcacccagtttcccctagcagcagttatggatttcattcctgaggggggaaatatgttataggaggcagaaagaaatgatttaggcgcagtaagattgaggagctaaaaacagacttgggtggatgtctgcagctgcaagaagatgtgtgggaacagacacagaaactctccctcccagataagcaagacaaagaaacacagaataagagtccatctatgtggtcagagaatgggataagagctgatttaaaaaaactctgctctatatagaaggcacacctggtcccaaccaaaccactggaccctaggaggataagacctcctctgctcatgagccccctcctcagtagcccatttataaaaaccctgacaattttactaccacttggcaacccgctcgggacccctctctgtgatggagagctgttcttttcttttgcctattaaactcctgctcc

SEQ ID NO: 1584 - DNA, 4598 bp, Homo sapiens
aactaactcaggtcctgaaggactctttcatcggcaatgccaaaacctgcatgatcgccaacatctcaccaagccacgtggccactgaacacactctcaacaccttgcgctatgctgaccgggtcaaagaactaaagaaaggcattaagtgttgcacttcagttaccagtcgaaatcggacatctggaaactcctctccaaaacgaattcagagctcccctggggctttgtcagaggacaaatgttctcccaaaaaagtcaagctgggatttcagcagtcactcacagtggcagcccctggttccacgagagggaaggtccatcctctgaccagccacccacccaacattccttttacttctgcacctaaggtctctggtaaaaggggtggctccagagggagtccttcacaagagtgggtcattcatgctagccctgtgaaaggaactgtgcgctctggacatgtggccaaaaaaaagccagaagagtcagcaccattgtgctctgagaaaaatcgaatgggcaacaaaactgtccttgggtgggaaagcagggcctcaggcccaggagaaggcctagtgcgtggtaagctgtccaccaagtgcaagaaagtgcagacagtgcagccagtacagaagcagcttgtgtctcgagttgagctctcctttggcaacgcccaccacagggctgagtacagtcaagacagccagaggggcacgcctgctaggcctgcctctgaagcttggacaaacatcccgccacatcagaaggagagggaggaacatctgcgtttctatcaccagcagttccaacagccacctctcctccaacagaagttaaaataccaaccactgaaaaggtctttacgccagtacaggcccccagagggtcagctcacgaatgagactccgcctctgttccactcttactctgaaaaccatgatggagcccaagtagaggaacttgatgacagtgatttcagtgaagattctttttcacacatctttagtcagagggccacaaagcaaaggaacaccctggagaatagcgaagactcattcttcctgcaccagacgtggggacagggtcctgagaagcaggtggcagaaagacagcagagtctgttttctagccccaggacaggtgacaagaaagatctaactaaaagctgggtggactccagggaccccataaaccacagaagagcagcactcgatcacagctgcagcccaagtaaggggcccgtggactggagcagagagaactctacttcctcagggccttctcccagagacagcctggcagagaagccatactgttcacaggtagatttcatatatagacaggaaagaggtggaggctcttcctttgatctcagaaaggatgcctcccaaagtgaggtttctggggagaatgagggcaacttgccatccccagaggaagatggtttcactatctcattgtcccacgttgcagttcctggatccccagaccaaagagacacagtcaccacacctctgagagaagtcagtgcagacggcccaatccaggtgaccagcactgtgaaaaacggtcatgctgtcccaggagaggatcctagggggcagttaggcacgcatgctgaatatgcttctggactcatgtctcccctcaccatgtccctcctggagaacccagacaacgaagggtctcctccctcggagcagctggtccaggatggggctacgcacagtctagtggcagagagcacagggggcccagttgtgagccacacagtgccatctggtgatcaagaggcagccttgccagtgtcttcagcaactaggcacctgtggctgtcctcatctccccctgataataagcctggtggtgatcttccagctctgtccccatcacccatccgtcagcacccagctgacaagctgcccagcagggaggcagacctaggagaggcctgccagagcagagagactgtacttttctcccacgaacacatgggtagtgagcagtatgatgctgatgcagaggagacggggctggatggctcctggggtttcccaggaaagcccttcaccaccatacatatgggggtaccccattctggacctacactcaccccacgaacaggaagtagtgatgtggctgaccagctctgggcccaggagagaaaacatcctacaaggcttggttggcaggagtttggtttgtccacagaccccatcaagttgccctgcaacagtgaaaatgtcacatggctcaaacccaggccgatctcaaggtgcttagcaaggccaagttctcccttggttcccagctgctctcccaagactgcagggacactccgtcagcccaccctggagcaagcgcagcaggtggtcatccgagcacaccaggaacagctggatgaaatggctgagctcggcttcaaggaggagacgctgatgagccagctggcttctaatgattttgaagattttgtgacccagctggatgaaatcatggttctgaaatccaagtgtatccagagtctaaggagccagctgcagctctatctcacctgccacgggcccaccgcagcccctgagggaacagtgccgtcttagagccagaccctgtgccgagatggtgggggccctgcaggagtctgtgctgggctctcaggctggaggagcctctgccaggtcctccctgcacacaccagaacccacacgctggtcctgcctatgctagcgtcaccccagccccacgtggcttcagataggtcccagcttctccctcagggacaggcccctgtccctcagttccatgcacaggagtgcctccaagggtgggccaggccgaagaacctaatgcctttcccttgtgcctagagaatatgattaactaaccccttgcctgtgggaatatatttgggtctaataaccctgaagtttctaagtttggggatcagaggatggggtggtcagtggtagcctagaggtcagaggtcacaagacagagaagacaacatgctgagaccagaggcttcaccagctgaattctgtgcctaacttagaagactaaacactggcccaaacttaaccattggtgctagggggacaggggtggggtgagctctgccccatcagcccttggagattgatttggggatttagaggcgtttttgaaaatgtaaatagcataaaccttgacttgatgtgtcactgacagcagcagatgtgagacaggccttatatttacagctcccttcccttcctgcaatccagtgttgaggcagaagagggtgcctgtgtcacacatcaatttttctcctgacttttgctcgggtgaaaggcctctgtacaatgcccgatactctcatgcttccatggcagctcctggctcctatctgggacacctcactacccagccccctcatggaatagtccatctcctagcctggccttcatccagttcaccctgcccagccaccctgcctctcaggggtctgtgctgggaaccttggcagttgaacagagtgctctgttcaacagtctgaggcctctgaaacagaattcacacacaaaccttcagccaagttctgcctgctgtgtatctttttagcaggaagcagctcaggacagggaagacaaagtagcctccaggtgccaattactttaaagccactctgggtcaaatggagattcatgagtcacggccttggcccgaacgcccattactatgtgagcctttatttccttcagataaaggataactttttacggttttaaaaggagggcttaattaaaaggccaagaagagggttaaatggctctcttgagacactagcagcctggtccagtcaccctttgtcagcctgacagtgcctcatctgaccgccaggaggcatccttattggtgcttcccggctgcagggcactgcggcccctccctcacatgatcactaaaaaccttcaaagacccagtctagccaaaagctcaagtgggacaatggcacagtattaaggtcaaggacaaaaacttacttactttaggaatgaaccctattctatcatcatatacaacagcaccactgagagctggtgaaacagtttaaatcccatcctctgcttgtggcaaatgatgcataaatgcctgctgctcacagtaaaagggcttcttcctcttttactgggtgatccccctgaaggcccagcctatcccaactccacagtcaggaaggcctacgtccttggtccacagacggagctgggccaggtttaaaagactcagtctaggcttgcctttgcaaaccaaaaacgaggacaggtctgaagtgggaagaaagctccgaaatagaaaacggttaggtcctattctatccccagcaaatctaagcaagaaatctctttatacaccacatggcccccccactcccataaaacagccttggtaataaagaagttatcacaccaagacataccttttagatttttattagtagttctctctgaagaatcaaaatagttagcaaattattttagattcaagactgtatatcctttgtatttagatctttaatgatgtacaacataatacaaaacaaaccagagagactg

SEQ ID NO: 1585 - DNA, 3583 bp, Homo sapiens
acaccgactgatggagacagaaccacatacacatgagcctatcaattctggctcatcatatcacctatcaaagaatggtagagaaacacaacagggagggaggagagggaaactgaatgagtacattttgctggaaggaaggaatcaccacttggggttttagggggtaagagaggagcatggagagacatgctgagcacacagcaccagaacaaacaggtggaggagacgttagtactagaaagaggaacaaaagtacaagagaaaaaggcgtagaacaaaagaagaggtgaaatgaggacacagcggacttatatctgtttggccaactctagactccatggactagtggtaaggaactgtctccgagattaacagcacatagcacaggagctattcttagctggctgcgctggctgaagctgtaggcaccttcccccaaccatgtcaggtgtgcttccaactgcactttttccaactgcaatctccctgaacaatacgtggccatcccaaaaacagccattctaaaatgaactctagtgttctagcacttggcacagtatcagaagaatccttatccccattatacacacctatacatgcacatgcccatcacatagcctggtcagaaaagagctctggggctctcagggctgcacgtcctgtaacatcactgatgaggctgttttgtcataaaataaaagcacagaggtgggaacaactccaaaccaccctcccctcacttagtcatgtatttacctactgatttgggtgccagttatttattcctaagtaacacctagtatttactagctacaaaacaggctctgttgcaggtgaagtattccaaagtgaggttttgtgcctagagcagagtagcctgggagaacatcagctcctcaagaaaacattctccaactagcccactgtacacccaaggtgaaggaccctctggtagtgcacatcgccacctttcgctggctcaccataggacagaggagaacgttttcacatttcactctctggcttttgtttcagtaatacctttgaatggcagagtttacttaacagataacatatctgaaagcctcacttgaaaaccaatgctgcagtatctgcttcatttccctgggaggtggacaggcttcctgatgggccatgcgaggtctgccagtctgtctggcccagaacagctcccctgcacctgtgaacacctggctggccacagcactcaagccaagaggcctatctaccactccaggtgggggtggcctgaaaaggaagggccagaagcaggtggcctccgctggccaggtgcagtggggtttttctcagacacacacgataaagtgtgtttgcaggctcactgtgagtcctgctggagggtttcagggccccccagttagtttgctttcctgggacatgtaccttctgatcatgcccctttccatgttatggttaatgtaacaggataatcctccagttatctgggacaagtcacaagacaagaggagcaaacagtgttcgcttgtttgaactgggacacatttccaaaagggagcatgaaatgacatgatccagcagcagcttagggagcttatgttttaattcccccctacccggagaatcgggcttgaacaggatttaaggtgcacaggtgagctttagcaattcatcagttacgtgtagagtagtaaaatccaacagccccctttgatctgcaaaagtgtgcagttctgtcctcactccccaccagttggccactgctggggcattggcagagctgggctcttgtgctttgatagatggtgatgtttaaatcgggtatcagtttctattaaaaaatgctgagggacttagcttctaatcacactaaaatgaagacctagatgacgtcgtgttctggcattctgggtacacgtgaagaatgcccaccaagaacacgctccgtgattggatgtttaggagagaagagaaactacttcactttcatgacattctttttaaactaaaagagtagacatgtgaagaacaaagacagaccgacgcactgacttcacttcattaaatacatactggtaaatgcagagaaatctattaactgccaaaataattgacattctttggccacgcatatttatatttaacactttgtgctgttaacaccaccagagctcatgtcatgtgggggtgcatgtgactgcacacccagggtaaaactgcacactgtgaacaccacactttccactagcctgggatcaagcctagcagagaagggtcggaaaagccagccaggccagacaacatagtggaaatactagagaggaggcaaagtatcagttatacttctttcagggtttgattatgctactttgaagtgaggactatttgcattttaataaaagccagaaagcaggagacagctgtgtaactgcatgtttcttagaaataagttgagtatccatttcagtgaaacccataaagtagagcagaaatagacccacggttaactgctgaaccttgaagctcatcttccataatttccatattgcgcctacaaactaaacacacaagtcatgatggggagctggcagtgtcccctgagattctgaaatggatgcctgtttgattcatgttcagagaggaagaagagacacagagaggaagaaggatggctgctgccagtttttacatcactggccacatgcagaaaggcaaaggtaaaggacgaatgcacaaaccttcctctcacagtccgccacgatcccttcatgaggctcagacgctgctctgcacttacagccatttactccaggacacaggagatggttatcaaatggaatcagttaaggtatacatatccccaggactacagctgcagttaaatgctgaattccagtactcatggtcaatgaagttactttttatgaaatgtacataacagatctttccaaaaaagcagaatttcaaaacaactgaattcaattatttttttaaaaagtagcctgcatgaaaccacctttgaagtcacaaagtcaaagtcacaaatatataacacgctcccattcttcttcaataattattcttcttaaaagacaatcaaaatactaaaagtgctggttgagtgactggattactggtaattttgaaatttcttctttataccttcccatattttcagaattttctgtaacagacagtatcactttgatattcagggggaaaaaaagttaaatttcttatcttgagttggtttaaaacaagaaactaaatatgctgaactgtaataaaaatacaggaaaggtatcacaccagaaaacaaagcttggttactttatgcagagaccagaatcataccacggctgcaatggtcaactcagcactcaaatccagatttcaacaacttgagcaacatgaactggactcccagggggcctccctactcaggagtgctgggcacaccatcagtaatgccacccatctcccaggacaagcactacgaaagagaggccagactatcacctggatttcatattaacagatttggttattataaattaaattgaaatgaatttcaacctcc

SEQ ID NO: 1586 - DNA, 3484 bp, Homo sapiens
ctaagcctgctccacctcgccgtgacctcaccctggactctcctactcctgacctcttccctctcgggctgggcccacccctgacttcctgagagcctggcctggcccctcgctgcgccctagggggatgacccccgaccccggtcctacgccttagccctaccccgcccccatcgtgacacacgcactaatgacacagacattgatccccgagtgctcctcatttcccagatggggcggctgggaagaggcactcctcacctaccagacgaagggcagccaggcagaggcactcctcacatcccagacgatgggtggccgggcagaggcactcctcacctcccagacggggcggctgggcagaggtgctcctcacctcccagggggggcagccaggcagaggggctcctcacctcccagacaatgggcagccaggcagaggtgctcctcatttccaagacggggtggccaggcagaggcactcctcacctcccagacatcgcggccaggcagaggtgctccccacttcccagatggggcagctgggcagaggcgctcctcacctcccagatgaggcggcctggcagaggcgctcctcacctcccagatgatgggcagctgggcaaaggcgctcctcacctcccagactgggcggccaggcagaggtgctcctcgcctcccacatggggtggccgggcagaggcgctcctcacctcctagatggggtggccgggcagaggcgctcctcacctcccagacggggagaccaggaagaggcactcctcacctcccagatggggcggcctggcagaggcgctcctcacctcccagatgatgggcagctgggcaaaggcgctcctcacctcccagactgggcggccaggcagaggcgctcctcgcctcccacatggggtggctgggcagaggcgctcctcacctcctagatggggtggccgggcagcggcgctcctcacctcccagacggggagaccaggaagaggtgctcctcacttcccagatggggcggccaggcagaggcgctcctcacttcccagatggtgtgtcatccgtgaagaggcgcttctcacctcccagatgattggcagccagagaaaggtgctcctcacttcccagatggggcggccgagaaatgccactccccattcccagatggggtggaggtcaggcagaggcgctcctcacctcccagatggggcagccgggcagaggcgctcctcacctcccagatggggaggctgggcagaggcgctcttcacttcccagagggggtggccgggcagaggcgctcaactgccagaccgggcggccggccagaggaactcctcacctcccagacaatgggcggctggggagaggtgctcctcacctcccagatgatgggcagccaggcagaggcgctcctcacttcccagatggggcgccgggcagaggcgctcttcacttcccagatggcgcggccaggcagaggcgctcctcagttcccagattgtgtgtcgtccattcagaggcactcctcacctaccagatgatgggcagctggagggaggcactcctcacctcccagatggggcgactgggaagaggcgctccccacttcccagacagggtgggagctgggcagaggcgctcctcacaacccagacagggtggccgggcagaggcgctcctcacctcccagacaatgggcggccaggcagaagcactcctcacttcccagatggggcggctgggcagaggcgctcctcacttcccagatggtgtgtcatccatgcagaggcgctcctcacctcccagatgatgggcagcaggagaaaggtgctcctcacttcccagatggggcagctgggcaaaggcgctccccacttcccagatggggtggcggtcaggcagaggtgctcctcacaacccagacggggcagccaggcagtggcgctcctcacttcccagacggggctgccgggcagaggcgctcctcacttcccagagggggtggccgggcagaggcgctcctcaactgccagactgggcagccggcaagaggaactcctcacctccaagatgatgggcggccgggcagaggcacttcccacctcccagacggggcggccgggcagaggcgctcctcacctcccagacagggtggccgggcagaggcgctcctcacctcctagacggggcggccgggcagaggcgctccacacttcccagatggggtggtggccggacaggggcgctcctcacaacctggatggggcggccgggcagaggcactccccacttcccagacggggcagccgggcagagtggccaggcagaggcactcctcacaacccagatggggcggccgggcagaggcgctcctcacctcccagatggggcagccgggaagaggcactcctcacctcccagacattgggtggccaggcagaggcactcctcacctcccagatggggtggctgggcagaggggctccccacttcccagacaaggtggccgggcagagacgttactcacctcccagatgatgggctcaaacaaagggccaaattacctataaagtaaattagattaacaactgacttatcagcagaaaccctgcaacctagaaaagattggggcctagcgttagtcttcttaaagaaaaaaaaatgccatccaataatttcttttttttggagacagagtctcactttgccacccaggctggagtgcagtggtgtgatgtcagctcactgcaacctctgcttcctggattcaagcaattctcctgcctcagcctcaccagtagctgggattgcaggtgtgcgccaccacacttggcaaattttggtatttttaatagggagtttcttcatgttggccaggctggtcttgaactgctgacctcaggtgatctgcctgccttggcctcccaaagtgctaggattacaggtgcgagccactgcacccagccagtgcaagaatttcataacctgccagtctgagcttcataaagaaaggaaaataaggtatttccagacaagaaaatgctaagggaagtcgttacctccagactgactctaaaagaaatgtttaaaggagtttggctcgtgaaaataaaagaatgatacttgctaccataaaagcatacatgaatacaaaatgtacagaacctataaagcaattaaacaattgagactacaaggtaactagctaacactataaaaggaagaaaacctaacacatcaatattaagcttgattgtaaatggctgaaatgctccactgaatagacacaaagtggcaaactggataaaaaaagaagacacttctgctgcctttgagagacccatctcatgtgtaatgataccaacaggctcaaagtaaatggatggaaaaatattcatcacataaatgaaaaacaaaaaaggagaggtattgctattcttgtatcagataaaacagacattaaactaacaacagt

SEQ ID NO: 1587 - DNA, 5282 bp, Homo sapiens
tttactgaaatttgatgacctagatggaacacatgctctgatgtcccgcatggtccagaatgagatcccctacttcatctggaccactcggcgggatgtgctcgactgtcgcttcctctccaaggatcagatgataaaccactacgcccgggctggctcctttaccacaaaggtgggtctatgtctcaatctccggaatttgccgtggtttgatgaggttgatgccaactccttcttcccacgctgctactgcctgggggctgaggatgacaaaaaagccttcataggtaaggagacccgcagccctatgcctgaacctcaggctgacagagcagggctgaagctctggctcatattggagagaaacaggcctctcttcatgccctcatctgcctgccccagcagatttccctttccaccctcaatccttatccttccctaatgtgccctcccttaataagcctcttagcttggtcaactctgacctccagaaaaacttgggtagcttggcttatattctagagcaggttctaaaagttggtcagtcccttgagtttggaatccagaacagattccaggcttatatcaagttccatttgttgaattgggttccaaaaaagtctgcaggctttggatttctaaggcagactaggttccgattccacaatatgttctaaattcaggttagaatttggatccagattctatgctagatttaaattacattcagaatctgaactaggacacagtctggttctcaggacagaataagtatcaaaagtaggtgatgaacagaagaaacaaatcagacaatgggtccaagccagattctgaaggcagaatatgatccaagtcaggtcagatttggggtctggttacacaactgaaacaggagcaagttcttttttttttttgagacggagtctcgctctgtcacccaggctggggtgcagtggcgcgatcttggctcactgcaagctccgcctcccgggttcccgccattctcctgcctcggcctcccgagtggctgggactacaggcgcccgccatcacgcctggctaattttttgtatttttagtagagacggggtttcactgtgttggccgggatggtctcgatctcctgacctcatgatccatccacctcagcctcccaaagtgctgggattacaggcgtcagccaccgtgaccagcctgaaacaggagcaagttctaaactcaggctctagagtcagaaaaggtagagtcaggttctggatccaaaatggggcaagtcatgatcaggttctggaaccagaacaggcctcaagcctaggggctgagcagggtatcccctggcctgggagcagaggacttctggctgactgctgcccgcaacgttctcaagctggtggtgaagtctgagtggaagtcataccctattcaggcagtagaggaagaggcctcaggtaagtactgtggttacctccactctcccacccatttatcctccacccatccgcccttccacctatctgcccttctacctatctattcatccacgcacctactggttcatccacacatctgtgtatgattcacatctacccatctatccatccatccaccagccatccatccactcatccacccacgtattcacccactctctgatctaccgattcacccacccacccttccactcatccttccatcctcccacctgtcacccattgttaatctcttcattcatctacctgatgtcagctccatactccccatccatctatccactccctgcctacctatccttccacagatccacctacccatctatctacctgctattccattctcccatctactacctatctgttcttcaggccatccactcatccattcttctgtcccaggtacctagacacttgtcttcccatccgtttgttagttgatccactcctcattcagccctcccatgggcctggcatgtagccgagcaccctggagagggcagactaagaagacatggtccgtccctgcctgtgaggagttcaggtctctgaggaggaggaagcagtgaaactgggctttacacatggcctgagaacagcttaggcctgaacataaggaacagcttggagtggaggggacacagaggaaccctcactatcatgcatgccaacccaaccactgcctgccctttcccttctggatttagctcgtgtctccaggctcctagtcctgtaatccagggacccatcagcgagggattcagggaagcagaggcagccctccaggaaggaggaaaatccctgcctcttccagagagactcccccattgctgtctcttgtgtgtgtcatgcacaaggaaggcttggttgtgtgccaggataaggggcacaagggcctcgggtgtggccagagaccccatgcttaagcttttatggtataggtcaggctgcaggggtttgagggcctcagttgtatatcagaatcttcagagcactgcgatgttcaggggtgagtcaggtctgtagatgtgcacggggtcttctgaagggtcagtttctgtaatcactttcaggtgtgtcagggccttgtgcagtaacagtgcacacagaagttagtgtttctgtgggctaagggttgtagctctgtatcaggattctgggagtgggtctggatttctggtgtgtggacttaagaagctgtgtcagacttgggggaggggcgttcatgtataactgggttcacataggccaagactcccaggtgcattttaggcagagcctcaggtgtgttagaggtcccaggggcagagaggctataggtgctgtcagaggccttggggacatttagggcagagcctcgagtgacaggtcctgggacagtgggagccaagggcaagtgctagagttgcagtgaatttagagcaaagcctcagctaagtgacacatcccagggcagtaggggatctatctaggttcgtgctgggcctcaggtaagtgacaggccttaggacaatgggggctgtggcatgcgtcaggttacctgccttgatatgggatcgtgacaggcccctccctatgtgcaggagacaagcagcccaagaaacaggagaaaaacccagtgttggtgtccccagagtttgtggatgaagctctgtgtgcgtgcgaggagtaccttagcaacttggcccacatggacatcgacaaggacctggaggccccgctgtacctcacccccgagggctggtccctcttcctccagcgctactaccaagtggtccacgaaggggcagaactcaggcacctcgacactcaggtccagcgctgtgaggacatcctgcagcagctgcaggccgtggtaccccagatagacatggaaggggatcgcaacatctggatcgtgaagccaggagccaagtcccgtggacgaggcatcatgtgcatggaccacctggaggagatgctgaagctggtgaacggcaaccccgtggtgatgaaggacggcaagtgggtggtgcagaagtatattgagcggcccctcctcatctttggcaccaagtttgacctcagacagtggttcctggtaactgactggaacccacttaccgtgtggttctaccgcgacagctatatccgcttttccacgcagcccttctccctgaagaacctggacaacttccaagttgtttgaatctggtcatgtgaaaacctatttaagccttggtttccacatctgaagaatggaggtctgaagaaaaatataaaaaacagtgaagtgggtactgttactacccccattttgcagatgtgaagagcacacagacactgggatggttaactgagactatgcacaaagcacttactactgcggcccccgtaactagcgccctcagagcagccctgagagataagagtggttctggccctagaagaatgtggtggggcccaggcctctgtcctttttgtccttcccagtagggccccatctcaagttgaatagtgcagggtggcccagggctgcttccaggacttgcctgtcctccctgagtttggatgggagagacacaagggcctggacctcagttttctgttctctgccccagctcagtgcacctgtgcaacaactccatccagaagcacctggagaactcatgccatcggcatccactgcttccgccagacaacatgtggtctagccagaggttccaggcccacctgcaggagatgggtgccccaaatgcatggtccaccatcatcgtgcctggcatgaaggatgctgtgatccacgcacttcagacctcccaggacaccgtgcaatgtcggaaggccagctttgagctctatggcgctgacttcgtgttcggggaggacttccagccctggctgattgagatcaacgccagccccacgatggcaccctccacagcagtcactgcccggctctgtgctggcgtgcaagctgacaccctgcgcgtggtcattgaccggaggctggaccgcaactgtgacacaggagcctttgagctcatctataagcagcctgctgtggaggtgcctcaatatgtgggcatccggctcctggtagagggcttcaccatcaagaagcccatggcgatgtgtcatcggcggatgggggtccgcccagcagtccctctgctgacccagcgaggctctggggaagccgaggtatcaggaagtttaaggaagttgcccaaggttgcacagctcagaaggggcacagctgggatgcagacccagcccgtcaccacttccccagcctccacaccaaggcccagctgccttctccccatgtactccgacaccagggccaggtcctcagacgacagcacagcaagctggtgggcactaaggccctgtcgaccacaggcaaggccttgaggactctacccacggctaaggtcttcatttccctcccaccgaaccttgatttcaaggtggcacccagcatcctgaagccaagaaaggctcctgctctcctgtgcctccgaggcccccagctggaagtgccttgttgcctctgccctttgaagtcggaacaattcctagcacctgtcggaaggtcaaggccaaaggcaaattcaaggccagactgtgacaaacccagggctgaggcctgccccatgaagaggctgagccccctgaaacccctgccccttgttggtacattccagaggcgcaggggcctgggggatatgaagctagggaagcccctgcttcgattccccactgcccttgtcctggatccaacaccaaataaaaagaaacaagtgaagt

SEQ ID NO: 1588 - DNA, 3626 bp, Homo sapiens
actctcacgccgaatacacagtgggggctggcggcggtggctgcggggttcaccctcgtccttccccagccccgtcgagcagtgggagggcaagtgtccgagacgctgcttcctgccccggcagcatccggccagaaggcgccctcgccgtcacccaggcgctgcatggaactgcaaccatgaatgaagaaaatatagatggaacaaatggatgcagtaaagttcgaactggtattcagaatgaagcagcattacttgctttgatggaaaagactggttacaacatggttcaggaaaatggacaaaggaaatttggcggtcctcctccaggttgggaaggtccacctccacctagaggctgtgaagtttttgtaggaaaaatacctcgtgatatgtatgaagatgagttagttcctgtatttgaaagagctgggaagatatatgaatttcgacttatgatggaatttagtggtgaaaatcgaggttatgcttttgtgatgtacactacaaaagaagaagcccaattagccatcagaattcttaataattatgaaattcgaccagggaagtttattggtgtgtgtgtaagcctggataattgtagattatttattggagctattcccaaggaaaagaagaaagaagaaattttagatgaaatgaagaaagttacagaaggagttgtagatgtcattgtttatccaagtgcaactgataagaccaaaaatcgtggttttgcatttgtggaatatgaatctcacagagctgctgctatggcaaggaggaaactaattccaggaacattccaactatggggccacaccattcaggtagattgggctgacccagagaaagaggtggatgaggaaaccatgcagagagttaaagttctttatgtaagaaatttaatgatctcaactacagaggaaacaattaaagcagaattcaataaatttaagcctggtgcagttgaacgggtaaagaaacttagagattatgcttttgttcactttttcaaccgagaagatgcagtggctgccatgtctgttatgaatggaaaatgcattgatggagcaagtattgaggtaacactagctaaaccagtaaataaagaaaacacttggagacagcatcttaacggtcagattagtccaaattctgaaaatctgattgtgtttgctaacaaagaagagagccacccaaaaactctaggcaagctgccaactcttcctgctcgtctcaatggtcagcatagcccaagtccgcctgaagttgaaagatgcacttaccctttttatcctggaacaaagcttactccaattagtatgtattctttaaaatccaatcattttaattctgcagtaatgcatttggattattactgcaacaaaaataactgggcaccaccagaatattatttatattcaacaacaagtcaagatgggaaagtactcttggtgtataagatagttattcctgctattgcaaatggatcccagagttacttcatgccagacaaactctgtactacgttagaagatgcaaaggaactggcagcccagtttacattacttcatttgggtcctttctgatgttgcttgagcttactctcctgcagttgatctcattcctgttggctaaacattaagtcccatgacaacattaagttaatgcacctatggtgtaggcatcatttatagtaccaggacagtattatagaaaaaaaccttacctgtacattagatgacctaatttcttttcttccattcctagaaacaccataatgtttctaaataatgattttatagtcattgtcacacccttggcttattttacactaaagaacatagttgagtttttggaaggtacaggatttaaaaatttggtctgtaatatacacacacacatataaatgttgcagttaatgaaacaggaaattattgatgcataagatgaatgtttattgtgaaacagtatttcaaatgttattttttaataatttggtttaattggatatttttctgtactataagttgataatggttttttgaagtaactataagttgataatggttttttgaagtttatttaataaaggtgattcattatactgttttatcataccagtaggacttttaatgttaaatcagtatgttgagttagataagtgtttatattagtatttaaataatgaaatattggccagctagtttataccaaatgtttttgcagtccaggggtgaatgtttctgctggtttgatgcctaatacagcttcaaagaaaaaaaaaaagcaaatatgaattcactgttttttatcttttcttcatggactaccccttagaaccaaatttaaaagaagcttctttgtagagcaagagaaatgagacgttctctttttctataatcaaaactccaagaaatagtagatatccaagaattcattctggtaagatctctgaaacattgcgtgagtaaaggaaaggtaatactgacaaaactctcaggatttgcagtgcagtgaatgctgaaataatctttaaccagcaatatagtatcatcaagatttccagtgttagaacattatgttaaaatgtgattattgtttaatgctttgtctctttaaattaaatttgtgtccataaagatgtacagcataattgttcatgtatttatttacagactacaatttccatcgcagctcaataaatagtctttcccctgttagtgctaccctctcttctgggactcccagcgtgcttccttatacttcaaggccttattcttatccaggctatcctttgtcaccaacaatatcacttgctaatggcagccatgttggacagcggctatgtatctccaatcaggcctccttcttctgaagaaaatactaacattagtatgaaaatttgtgtaaatttgtagtatgaaaacttgcaaattaaaatattgttttattttagaatcgggtttgcatatttggttttaaaaaggtatttattccaaagtactaaacatcagctataattcagaataacatggagttgtagaatttataaaaatgcaaagtttaaaaagttattcagtggtttctcttgataaaggtacagcaaactactattctttttaaacttctaggattttcttctactttctgagtgggcaatagaacctagtcatttatgtttttttttttttttgcataattttactaaatagtatttcacaaatattaaagcacttgaagacaatggttatagtagatttgattaccaaggatcactatctgtactggagattagaacaattatatgaccagaagcatctaaccattatgtaaaaagaaatgatgagacaaaaagattaagatacaaattttgtgcagtactaaagaaaaagcagtctaccattgtggtccttgaaaataactatagatatttttgttatttgttagacacaaattataattttgttgttaatgtatttaagcattttatagttatgctttgtgtttttgatattctttgtattgttaataacaagtgttatgggtttttaatgttgaaatcatgtgttaatttttgtacttgaattcaaattttttgacattaaatatgtgatgcttct

SEQ ID NO: 1589 - DNA, 4038 bp, Homo sapiens
aacagtttccagataaagacctaaatgtgaatggcacagctgcaaggaatggtaagaagacagacacagagacaactgccttgaaagaagagcttattatgtacagttcccaaggaagagtgggcgtgccacaccatgcaaggccacatggggaagtaccagggtcattcaggaggcataaggagcaatgtgaaagcatgggccagagctttcttttattgtgtttttttgtgggaaggaatgaacgttttttttgtgggaaggaatgagcgagacagggtagacgagctgaacaaacttaggattggatagttcgaataatttggcagaccagagaggtggtctctagctgcctagtacctggctctgaggagatttagagtaagggaagcattggctgtgtgtggtggttgggggtatgcacctgggattggttggtttgcatatgagaagcatgctcacaggcaggttgtttgctacctctagcagttagctatcccagagaggggcagtcactccctgggtccttaaggtcctaagatgtcaaagcattcttaaaaaaaaaaaaaaaattactaatacaagttgtttgtggaattggatttgaaaccaggcagtgtggtcctacagagcacattcttaaacttctttgctattattttgcctacaaagaaacaacagttagacttagatttctcctgagcaacaagaaatatcagtgaaaataccattaatgtaccaaaggaaacctactgttattctaaattctaaacccagaattccaaacccagctattactattttttttttttttttttctgagacagagtcttactctgtctcccaggctaaagtgtagtgcgtgatcatggctcactgaaacctctgtctcccaggctcaagcaattcctctgcctcagcctcccgagtagctgggaatacaggcacatgccaacaggcccagctaattttttaaatttttttggagagatgaagtctcactggtcttgaactcctgggctggcctagagctcctgggctcaagcagtctgcccaccttggcctccaagtgctgggattgcaggcatgagtcaccacgcctggcccaaacacaactattttttagtatatctaaaatagagcatttttagacatgctgagagtgagagtgctaactacatatatgccttcatgaaggaactatcaaaggatataccttcatcaagaatgatttgaacctaggaggaagttgtggatgcaagaaacaaaaaatgtccctggctgcttattgcgtcatctgttgcagaagaataggaacctctacttccccaccaaaaagtggcacacactggagagatatcaaggttctttatttcttacatatgaagttctggccctgaagaaggctgtgacattagatactcaagtggtagaacgagaaaaaatgaagtcatatatatatgtgcacacagtttctttagataaaggagaaaatcatggtattgcctggcaggcaagaaaagaacttcacaaagcagtaagaaaagtattggcaacatcagccaagatactgcggaatccatttgctgatccttttagtacagttgatatagaagatcatgagtgtgctgtgtggctgctcctacggaagagcaagtcagatgacaaaaccacgcgactcgaggctgtgcgggaaatgtcggagacccatcactggcatgggctccattccagacttattgtatcagagaaatcagaggaagtgccctggcccacagattttggaaaagttccccacttgatccagaagtactcacccagattaccagtataggataattgctcaagcctgtgatccgaaaactcttattggtttggcacgaagcgaagagagtgatcttcgcttttttctcctaccacctcctttgccatctttaaaagaagattcttccactgaagaagagctcagacagttgctggcttccttacctcaaacagagctagatgagtgtatccagtattttacatctttggctcttagtgaaagcagtcaaagtctagctgctcagaagggtggtttatggtgttttggaggaaatggacttccttatgctgaaagttttggagaagttccttcagcaacagtggaaatgttctgtttagaagctatagtaaaacattctgagatatccacacattgtgataaaatcgaagcaaatggaggcctgcagctacttcagaggctgtaccgacttcacaaggactgccctaaagtacagagaaatataatgcgtgtcattggaaatatggctttgaatgaacatcttcattcttctatagttcgctcaggctgggtttccatcatggcagaagcaatgaaatctccccacattatggagtcctcacacgctgccagaatcctggcaaatctagaccgagaaactgtgcaagaaaaatatcaggatggcgtatatgtgctgcatccccaatatcgaacaagtcagcccattaaagcagatgtcctttttattcatggccttatgggagcagcattcaaaacatggcgccagcaggacagtgagcaggctgtaattgaaaaacctatggaggatgaagacagatatacgacgtgctggcccaagacatggttagcaaaagactgtcctgctctccgaattatatctgtggagtatgacaccagcctcagcgactggagagcaaggtgccctatggaaagaaagtccattgcattcagaagcaacgaacttcttaggaagctcagagctgctggtgttggggataggccagtggtttggatatcacatagcatgggaggtcttcttgtcaaaaagatgctgttggaagcctctacgaagccagaaatgagtactgttatcaacaataccagaggaataattttttatagtgtccctcatcatggatcacgtttggctgaatactctgttaatattcgctatcttctcttcccctcgttggaagtcaaagaactcagcaaggattctcctgcacttaaaacactacaagatgactttctggagtttgctaaagacaaaaacttccaggtgctgaattttgtggaaacactaccaacctacattggcagcatgattaagctccatgtggtacctgtggaatcagcagatttaggcattggagatctaattcctgtggatgttaaccatttgaacatttgtaagccaaagaaaaaggatgcttttttgtaccagcgtactttacaattcattcgtgaagctttagccaaagaccttgaaaactaacagttgtgctcttccagttttcatatgtgaattcagtgcaagaaacttggtgttctgtttcttcttttaagctctatgcaatcatgcaaacatagtgatcatagcgtcaacatggtctggagtgtgttgcagactacagaacattgttctcccttcaagcgctgtaaagcaccaacccggaagtggcaggcacagaaggaagggctggatcgggcccctttggtgtaaagaagtccctgtgtgctgctttatggttcgcagtgttgggcttggtgactggagcaaagctgctgtgagagagtgtcctttcccatctgtgactttcctggtgcatccaggaggggcacggcaggttctgaggtaactcaacttaccataaaaatgccattaagagagtacctaaaatggagagaagaatgaactagaacattcaagactcttttacttctgggtattgatttgctgtacatttttaaagtttgagtttttagctcagttctaccttttatctgacacattattactagtgttaactttgttagacttattgtcatgtctgggtcagttccttgtatctattttcgtattcctgagaacaaatctttttcttagaaaaattctagcttataataattcttttcagactgtagctgcctatgcttggaatttgtcctagataaggataaagtagctaatccattattgatcacagtatgaagtaaaactattctaagccatt

SEQ ID NO: 1590 - DNA, 5633 bp, Homo sapiens
gcacaacaacaaaaggacttggactggccggcctgggcgcagcgacccgagggctggagccggccccgcgcctgccgtctgggtacctgaacgaggtgcagcgcagcccggccccaccgcagctacctcagcagtcccgccccgcccgcgtccttccccgccgagccggcggccgctcccttccccgcgcagccccgcacggcccgggcccacgtacaatgactcttcttgcttttcacctaagttgaataagcaccctgtgcactttaatctcctgtcggtaccattgggccaactaaagacaaggttttgaaatctcagctataaaagacatccagccaaactctcagtcttgccttaacaatgttccagaggctgaataaaatgtttgtgggtgaagtcagttcttcctccaaccaagaaccagaattcaatgagaaagaagatgatgaatggattcttgttgacttcatagatacttgcactggtttctcagcagaaggagaagaagaagaggaggacatcagtgaagagtcacctactgagcacccttcagtcttttcctgtttaccggcatctcttgagtgcttggctgatacaagtgattcctgctttctccagtttgagtcatgtccaatggaggagagctggtttatcaccccacccccatgttttactgcaggtggattaaccactatcaaggtggaaacaagtcctatggaaaaccttctcattgaacatcccagcatgtctgtctatgctgtgcataactcctgccctggtctcagtgaggccacccgtgggactgatgaattacatagcccaagtagtcccagggccaggaaaagctgcttataagactcacgggcacagaagtggaagctcaaaatgaaatggggcagcatattcattgttatgttgcagctcttgctgctcatacaacttttctggaacaacccaagagctttcgcccttcccagtggataaaagaacacagtgaaagacagcctcttaacagaaatagccttcgtcgccaaaatcttaccagggattgccaccctcggcaagtcaagcacaatggctgggttgttcatcagccctgcccgcgtcagtacaattactaatagtttcaagttttgttggttggtttctcttggtttgtgcttacatgtatggatgtgtgtatatgtacagtgaaaatgttgtctctttacaaccaattgataaccaatcacatagttttatcagtgtatttagacactatcttgaaaatcagatttatatgctgtgtatcacataatgccttgcctttaacatttactttttttgtacactttttcagattatttctggaaacatatcaatataattacagtgtttgggggtgtctttaaatatattaggttatacattagtcagcattttaaagacatttcttcccaagtacgagaataggcatctttcattttcattttattttgtattacttaatcttttaagcaagcaaaaatttattctcagggtcagctgtacactttattgaccagtacttgataatctctctgtatatgatgaatacatttttacacactaacattagcattaacaggtgatagttgccatggatataatggaattatggctggactttcttttgaaagaaaacttgatgtattctgtgtgtatggtttttccccagattagtcatacagttcatttggaattcaggtacattaagctttagtgaagagtgcatgcagtaattccaatgtgactgcatgacgtggtacagacattacaggtgttgtagacagaggcacttgtctcgtgcagagggattaaattagacctgtgagattatatttggaaaaattcatgtctgtaactaacccattagtgcagtatttaatttgttactattccttcccgccaattctgtccactcctcacctcgcatcagctataaatttggaagtacttgtccaggcactcaagtgacttcatatttctctctgcccatgggaaaagagataggctttatatttccacagagtgaaaaatcctctgtcatggagcctgtcctgccaagtggcaagagtgtggggactgtctggtgatgatgtctttcatggcatctgagtgaagagtgacaggttggctcaacttttttctttttttttttttaattgccttgtattgtaagtattcttccctgcagtccaagtgacttttcattttttgttttaacttcaggcaaaatctttaaccactctggcctctgtttcccccaccaacggggagcagtgacatttacctccctcacagagtcactgtgaggattctatactgatttgaagtggagctgttcagaactgaaccttgtaggaaattccaagggcctttctactgaatctggtgatggggtggggccgtggcactttctctgccacagctgttcttcacagtgttggtgctaatgaggccagggtgcagggttcgattcacacgtaggccagttaacttagagaaaatctatttccttacctctagccagtcacttcctttttccgcagttgtgatgggttttgctgagccatccactctgactgatttcctctgaagtaaacatatttacaatccaaagcaattctactgacagaagtgttgccttcataatcaaacagcttgtttttccatctcctctgcaaccctaattaaatgagtacaggtctacaaaatgttttcaaggagaaaagcagcatatccttaagtgaagtattatatttttcaataaccctgtagtggcttgatgcagggaaccctgggggactttcagcgaagagctgtgctcttttctgactagattagagcgtttggagtggaagacgtcaaatgtgtagtgagatggaggttttacattgttcttctactggctgtgatgaagtgccagaatgtctctttagaacaagagttagattccccctttctccttattgccccttccgttttgacttcccctttatttatttgttgtctaattaggggccaagtctgtaaagttttgtcaaagtgagttagaagttgttttctcttactatttgtgtttaccagagttgggagataagatagtttccatgaaggtgtgtatgttttatacgatgtttgttatagggccatgcattggtaacttgaaaatagaccagcttaatgtcttcaggatgtaaaactctgaatacacggcgtctctttttcatacattgcatgtaagttgttagtacctcacaagctacagaagttcagccatgagattttgtttggcaacatgaacagatttgtgtataactgcaatggcctttttttccagatttccttattgactttttgtttgccttacctggggctagttttttatgctttgtacctagaaaacaaaaaattacattcgttgggctttttttcaaggttgggattaccacaccacctggaatatcatactgtggtttctgcctaaaattggcacatgtaagtattgaagaaaatggttatataattcagttgaaactcttggttattagatgttaggcatctcctgtatgtaagacacaaggccaaccacaacacagaacgatgttgacctgttaagtattctctgaaacatggccaaaatgcattttatgagcttttttttttgctattgtaaatattagtggtttacaatgcgctttagacatatttctttaaaatgcaagcagtgagaaataagacctctctgaattagtagctctaaactgttaacatagaatgttacttggaaaaagtctggaatatgtggtgtacacaagcagtgcttcgtgaatgagtttcttagcttttatagtgcgccatgtttctcaaagtttgtttttgttgacaaaacattttataatatatatcttatgtttattttttttctcaactaattgtgtactgcactgtaaggtgaaaattagccatccattatttatcttctgtggcaatgcatttatatggttgattgggtggggaattttttgcagaaagatgcaaagtgattgggttttcgacttcctatcgcagggagcttttaagaaatattaatttcctatacatttttccaatccccatgcaaactgttcctgtttacataccttctctgttgtatcagtactttgagtgagaagacagtttatttaaaacttgagcaggctgttcagcattgtttctgcttctgaaatctgtatagtacactggtttgtaatcattatgtcttcattgaaatccttgctacttctcttcctcctcaatgaaatacattatatattatctttatgtactcttaagaaaaacgagcaaggaagagtatcttcattattctcattttctctgagttggaaacaaaaacatgaaggactccaactagaagacagatatttacatttaaatagattagtgggaaaactttaagagtttccacatattagttttcattttttgagtcaagagactgctccttgtactgggagacactagtagtatatgtttgtaatgttactttaaaattatctttttattttataaggcccataaatactggttaaactctgttaaaagtgggccttctatcttggatggtttcactgccatcagccatgctgatatattagaaatggcatccctatctacttactttaatgcttaaaattatacataaaatgctttatttagaaaacctacatgatacagtggtgtcagccttgccatgtatcagtttcacttgaaatttgagaccaattaaatttcaactgtttagggtggagaaagaggtactggaaaacatgcagatgaggatatcttttatgtgcaacagtatcctttgcatgggaggagagttactcttgaaaggcaggcagcttaagtggacaatgttttgtatatagttgagaattttacgacacttttaaaaattgtgtaattgttaaatgtccagttttgctctgttttgcctgaagtttcagtatttgttttctaggtggacctctgaaaaccaaaccagtacctggggaggttagatgtgtgtttcaggcttggagtgtatgagtggttttgcttgtattttcctccagagattttgaactttaataattgcgtgtgtgtttttttttttttttaagtggctttgtttttttttctcaagtaaaattgtgaacatatttcctttataggggcagggcatgagttagggagactgaagagtattgtagactgtacatgtgccttcttaatgtgtttctcgacacattttttttcagtaacttgaaaattcaaaagggacatttggttaggttactgtacatcaatctatgcataaatggcagcttgttttcttgagccacggtctaaattttgtttttatagaaattttttatactgattggttcatagatggtcagttttgtacacagactgaacaatacagcactttgccaaaaatgagtgtagcattgtttaaacattgtgtgttaacacctgttctttgtaattgggttgtggtgcattttgcactacctggagttacagttttcaatctatcagtaaataaagtgtcctttaacttc

SEQ ID NO: 1591 - DNA, 5082 bp, Homo sapiens
atctgtccacctatccacctgtccatcctagtatgagctggctgcctctcgagctgccttccgaccttccatgggtccacatgtgtgggcagtctgttttctgtccagcttggggctggcactcctggcccttgaatgaggaccctgctgtgggcacccacgtcctgcaggcagctggagtgggacagagggccatcgatctcaggagatgccgccagcaggcccgggctggacaggccgactggtcctgcctctagagcctggcagcatctctcctatccgttggcagccttactgtgcattccacttcctgtgtggccttgggcaatcgctgcaccctctgtgcctcggttttctctccaagtggagtggggatgcagcggcacctgccccgggactgtgggatgaaatgagatgctgggttgtgctcgggggttgtgctcagcagtcactgaaggcactgcagccacttcactcttccctccttctgctcctgtccttttagggatgtttcagcagcccctgagaaggaagaggaggaagctgagggcccgctgagggcgcaggacctgagggagtcctacatccagctcgtccagggtgtgcaggagtggcaggatggttgcatgtaccagggggagtttgggttgaacatgaagcttggatatggcaaattctcttggcccacaggcgaggtaactgcttccacactttctccgcctcctcccctagggcctctggtggctggcctttatccttccaagagtgatgggacgggaacttttaggcccatcaacaggaagggtgctaggctaaagtttttcctccttgagaaatgtccagagaaaagcatctttcccaacttccaaaatcacacccatggtttgctggggtcccaggatgaggtttgggaagctgtgacttaagaagataagttcttattctgggcagacgttttaaaattatgaattgccatagcgactcgtatatttaccttggtgaaattgcctgtgtctaggcttaagcagaaggcagcgaatgttctaaaagacaaaatgagaacaagttttgcacccccaggctaggtcctgagcccacattcaatgcagctgaaactgaaaaggcctctgttggcgcttgccatggaaagtccaggggtaaggtagcctcaggcctggctggatccaggattctaatgatgtaactaggtcctctctctttccatctccacgagggggttctaagactgaccttgttccatctgcccagcccctgggggtggcatcaaacacccctgggaaagggaaaggccccagcaggacgctggtctgacttggggatgcatgaagtgcatcaagatggggcaggggtaaggcgtcctctggttggccaggcctggcccaggcactggggctgggtcccttggggaatcctctctgtagggagagggcatctgttgtcagaagaaagggaagggacactaagctgtgaaaactgccatgcccttcacgtcggggtcaggtctgggtggactgtgagcatggatggctgtgcgggcactccaggcccaccctgtttctgagaaaaaggtggtgcttggcactcagcatgaggtctcctggctggaagcccttgtcatgaatgtcacattctttttttttttcgagatggaatttcactcttgttgcccaggctggagtgcaaatggcacgatctcggctcactgcaacctctgcctccagggttctagtgattctcctgcctcagcctcctgagtagctgggattacaggcatgcaccaccacgcccagctaatttttgtatttttagtagagacagggtttcaccatgttggtcaggctggtcttgaactcctgaccttagatgatccgcctgcctcggcctcccaaagtgctggaattacagatgtgagccaccacacccggccaaatgtcacattctttttccctctgggggccttggtaaaggggcaggctctgatacactcactcctgttgtttgtggagctcacgtgtccaaccagtgctgaagagttataaatcagagtcctcccctgtgcctactggggcctacagccagccttccagggccagcctgtcacctgtgaacctggcagggagctcagcagcatggggctcctgagtggggacaggaccctccaaacctaagatcaaggtcaccagggagaaggcatgtccgtgctctcctgactcaggatgtctaggtagttttaagcctccccacagtcccccacctgaggagaagacagagagggagcctggctatcaggctgactgcctggtaacccctctgggtgcttcagttgccgactctaatagtcgcatgccaggcatccctgagttctgccacagccctgggtggtccccattcattgccaaccaggcatggtggctcagcctcaagggcatcccgtcaggttctggaagagcagcaatttctcaccaacttctccatctcacagtcataccatgggcagttttaccgggaccactgccatggcctgggtacctacatgtggccagatggctccagtttcacgggcacattttacctcagccaccgagaaggctacggcaccatgtacatgaagacacggcttttccagactcactgccacaacgacattgtcaaccttctcctggactgtggggccgacgtgaacaagtgctcagatgagggtctcacggcactcagcatgtgtttcctcctccactaccccgcccagtccttcaagcccaatgttgctgaacggaccatacctgagccccaggaacctccaaaattcccagttgttccaatcctttcatcatcatttatggacacaaacctggagtctctgtactatgaggtgaacgtgccttcccagggtagctatgagctgaggccaccgccagcaccactgctcctgccacgcgtctcaggcagccacgagggcggccacttccaggacaccgggcagtgtggggggtccatggaccacaggagcagctctctgaagggggactccccgttggtgaagggcagccttggccatgtggaaagcgggcttgaggacgtgttgggaaacacagaccggggcagtctgtgcagtgctgagacgaaatttgagtccaacgtgtgtgtgtgcgacttctccatcgagctctcgcaggccatgctggagagaagcgcccagtcccacagcttgctgaagatggcctcgccctcaccgtgcaccagcagcttcgacaaagggaccatgcggaggatggcgctgtccatgatcgagtaggtcctggcaccagctggtgggggtggagggccaccatcagggctgaatcctatgctcagcagacccacgtctcttccctgtgccagtgggaggcgttgtgtctggagatgtgtgtctgaatgtgtgagcatccctgtgtcggtggctccacgccatggccagccctgtgggggtgccacggtgacgggctgttttcagtgccaccccagccctgtgggggtgccacggtgacgggctgtttttagtaccacgccagccctgctttggcctttggcactggcctgaagtgtctctgtgggagcctcagcaggggccactgtcaggggtcctatcctagccatagtgcacgtgagtgacacctgcctgggcagctctcacacccctgctgtccaccctgtctataccagtgtgtctcaaaatgtggtctatgcacccccgggggtccaagaccctttcagggagtctgtggggtcaaaatgattctcttgataaccctgagactctgttagccttctccttgtgttgatgttggtggatggtatgaagacagggccgtgcagaccaccagcccccagcgtgcagggcagcagtgcccggcctgcttgggggcatggtattccttcaccgcttccccgcaagaagcgcttcccccagggccagagtagcaacagaatgcggcatcttcccaacctcctgccccatttttgattggaagaatgaccactggtatgtggctgttcattctcctgaacacagcctgccactttaaggaaaacatatgacactatttgttgctggcgaaatttacattttcaagtgaatagcagaattctggacacttgccaccaccaccaagaccttcatagcttcccttaactttgagacatgggtgttcagaggtttttcacgtgagatggcgttagcagcgcagttttgtgatactgcctgaagacatgccgacagtgcccagatctcttctattggtgagccagcttttcccacacggccaagttctgatgttgaaccattgccaggtgggtgaagatccattgacagtgagaggtgggcccgtgggcttcagtgcagccaggcgcagaaggctggttcatgagtgtccagctccgccaggtagctagctcaccacccccagcctgggttcatgtagttcaaataggaagaccacgatgatcagaaaggctgctcaaatactccctcgtccagccgcgtacctgggggaggctgaatctccactcacttccaccaaggctgtgcagagcagataggggaatccagcaaaggtggaaaacagtgccatccttctccccaactggttttgttttgtaaaataactttttgtgacagtgttacttattagtaacatgcagtgggtttgttatggttaacaagttggtgagcattattgagaggtgaagccagctgagcttctgggttgggtggggacttggagaacttttgtgtctagctaaaggattgtaaatgcaccaatcaatgctcagtgtctagctaaaggattgtaaatgcaccaatcagcactctgtaaaattgaccaatcagcgttctgtaaaatggaccaatcagtggtctgtaaaatggaccagtcagcaggatgtgggcggggccaaaaaagggaataaaagctggccaccgccaggctccccaccagcctgcagcgacaacctgcttagtttcctttctgtgctgtggaagctttgttctttcagtcttcacaataaatcttgctgctgctc

SEQ ID NO: 1592 - DNA, 3720 bp, Homo sapiens
gtcagggggagaggcgggcggcgctcacgcctggcctgagggggccgagactgaggcggttgcggaataggactgctagccccgcccagagtccctaccctttggagaactgcgcttctctttcggagggagtgttcgccgccgccgcggccgccacctggagtttcttcagactccagatttccctgtcaaccacgaggagtccagagaggaaacgcggagcggagacaacagtacctgacgcctctttcagcccggcttcacaccttccctcgatagcgacttcacctttaccagcccatgcccctgaaggcctcgctggagatcgagtaccaagttttagatggagcaggattagatattgatttccatcttgcctctccagaaggcaaaaccttagtttttgaacaaagaaaatcagatggagttcacacgtgtataagaagtaaaaatgggccaggcactgcggttcacgcctataatcccagcactttccgaggccgagtgtagagactgaagttggtgattacatgttctgctttgacaatacattcagcaccatttctgagaaggtgattttctttgaattaatcctggataatatgggagaacaggcacaagaacaagaagattggaagaaatatattactggcacagatatattggatatgaaactggaagacatcctggaatccatcaacagcatcaagtccagactaagcaaaagtgggcacatacaaattctgcttagagcatttgaagctcgtgatcgaaacatacaagaaagcaactttgatagagtcaatttctggtctatggttaatttagtggtcatggtggtggtgtcagccattcaagtttatatgctgaagagtctgtttgaagataagaggaaaagtagaacttaaaactccaaactagagtacgtaacattgaaaaatgaggcataaaaatgcaataaactgttacagtcaagaccattaatggtcttctccaaaatattttgagatataaaagtaggaaacaggtataattttaatgtgaaaattaagtcttcactttctgtgcaagtaatcctgctgatccagttgtacttaagtgtgtaacaggaatattttgcagaatataggtttaactgaatgaagccatattaataactgcattttcctaactttgaaaaattttgcaaatgtcttaggtgatttaaataaatgagtattggacctaattgcaacaccagtctgtttttaacaggttctattacccagaacttttttgtaaatgcggcagttacaaattaactgtggaagttttcagttttaagttataaatcacctgagaattacctaatgatggattgaataaatctttagactacaaaagcccaacttttctctatttacatatgcatctctcctataatgtaaatagaataatagctttgaaatacaattaggtttttgagatttttataaccaaatacatttcagtgtaacatattagcagaaagcattagtctttgtactttgcttacattcccaaaagctgacattttcacgattcttaaaaacacaaagttacacttactaaaattaggacatgttttctctttgaaatgaagaatatagtttaaaagcttcctcctccatagggacacattttctctaacccttaactaaagtgtaggattttaaaattaaatgtgaggtaaaataagtttatttttaatagtatctgtcaagttaatatctgtcaacagttaataatcatgttatgttaattttaacatgattgctgacttggataattcattattaccagcagttatgaaggaaatattgctaaaatgatctgggtctaccataaataaatatctccttttctgagctctaagaattatcagaaacaggaaagaatttagaaaaacttgagaaaacctaatccaaaataaaattcacttaagtagaactataaataaatatctagaatctgactggctcatcatgacatcctactcataacataaatcaaaggagatgattaatttccagttagctggaagaaactttggctgtaggtttttattttctacaagaattctggtttgaattatttttgtaagcaggtacattttataaaatgtaagccctactgtaaggtttagcactgggtgtacatatttattaaaaatttttattataacaacttttattaaaatggcctttctgaacactttatttattgatgttgaagtaaggattagaaacatagactcccaagttttaaacacctaaatgtgaataacccatatatacaacaaagtttctgccatctagctttttgaagtctatgggggtcttactcaagtactagtaatttaacttcatcatgaatgaactataatttttaagttatgcccatttataacgttgtttatgactacattgtgagttagaaacaaacttaaaatttggggtatagaacccctcaacaggttagtaatgctggaattcttgatgagcaataatgataaccagagagtgatttcatttacactcatagtagtataaaaagagatacatttccctcttaggcccctgggagaagagcagcttagatttccctactggcaaggtttttaaaaatgaggtaaatgccgtatatgatcaattaccttaattggccaagaaaatgcttcaggtgtctaggggtatcctctgcaacacttgcagaacaaaggtcaataagatccttgcctatgaatacccctcccttttgcgctgttaaatttgcaatgagaagcaaatttacagtaccataactaataaagcagggtacagatataaactactgcatcttttctataaaactgtgattaagaattctacctctcctgtatggctgttactgtactgtactctctgactccttacctaacaatgaatttgttacataatcttctacatgtatgatttgtgccactgatcttaaacctatgattcagtaacttcttaccatataaaaacgataattgctttatttggaaaagaatttaggaatactaaggacaattatttttatagacaaagtaaaaagacagatatttaagaggcataaccaaaaaagcaaaacttgtaaacagagtaaaaatctttaatatttctaaagacatactgtttatctgcttcatatgctttttttaatttcactattccatttctaaattaaagttatgctaaattgagtaagctgtttatcacttaacagctcattttgtctttttcaatatacaaattttaaaaatactacaatatttaactaaggcccaaccgatttccataatgtagcagttaccgtgttcacctcacactaaggcctagagtttgctctgatatgcatttggatggttaatgttatgctgttctttcatgtgaatgtcaagacatggagggtgtttgtaattttatggtaaaattaatccttcttacacataatggtgtcttaaaattgacaaaaaatgagcacttacaattgtatgtctcctcaaatgaaaattctttatctgaaattttaaaagacattgattccgcatgtaaggatttttcatctgaagtacaataatgcacaatcagtgttgctcaaactgctttatacttataaacagccatcttaaataagcaacgtattgtgagtactgatatgtatataataaaaattatc

SEQ ID NO: 1593 - DNA, 3517 bp, Homo sapiens
ttttaaaaataaatagtgaatattaattctgtatccacacccagtctccctcaacttcaccagctaggtcagttgctggtggagatgagctgctcccccaacagggctggacacagttgggagaagagggggcagcccctgggtgtggtgcggccgttgccagccccaaccctgtcacttgtgcttttatcttggtcccctcccatcgcttccgttgttccccacaaccgtgtgtggctctgtgctggtcctgggtctcaggaaagcctcccttcagagagagaatgtgtgttcctactgcccctcccatttccctctatggcactgctgctcccgtccccgcggacctccccctcactgggggatgccttttgctctctgcagccctgccctctgctctccttcagggtctccagggaacccctccgaattgccacttgccgaggggctgttctcagtcctcagtttcttagcctctggtatctgatgctgctgacgacagcttccttcctgacttcgggatttctgaccccttttcctgcctgtgcattagctgcgtcccctccgtgcactgggttccgtggctgttctgcccctggtgctgcccaggcgtgcccactctgacagttcagagctggcttcctacaaatgttgctaaatcattccccttgagtgaatctgtagatttcacacagtcctaacaaaatctcagttttttatactacacaagctacatgcaaaggcaaaggacctagaacagttaaaaccatttttctaaagaatgaagtggagtctgtggtttcaagacttaccccagtgatgagggtcaggcagtggtagaggagggacaggccatggggcagagtagccagctaggcctttgcctcaggcttttcagcagatggcctggggtgtggggatgttcaagctgccagggacccacttcaggacaagtgggtgcttcctgattttcatctggtgctgtgaacgtctgtgtgtgtgtggctcttggtgcctttgtcttgggtttctctggcgggtgacaagcagtgggatagccgtctggggcttcccgataggtgtgcgcgcagtgaggcagcagggcgcccgtctcccatcccgacaggtgtgcgcacgcagtgaggcagcagggtgtccatctcccagcaccctctgcgctcaactggctgtttcctgccgtgtaagtcactcttgcccattagcaccgagctaaacatcgttccagcctcgctttggctgttcccgcttcctcttttaagcaagcctgtttctttcactcactttccagtttggcctttccttatgatctcttgtgtcttctgggtgtcattcctgggcttcgcctctccctggtggatgtggccgcacgccaggatgggtgacagtggcacttgctcatgccgtccctccactgttgactccacccctgttcctgcgtgtcctcgaatgccagccctgagcagagtgcagagaggaagctgcagcgtccccctgcttggccatgtgtgtcttcaggggaggcagacagtgaagccgtgttttcatttaggatctatgggagggagagcagcccctagtgatcaagagagagacacgagggaaacacgtgcgggaggccacacatgcagggaggccagggaaagtggagagagactggaacccccaggccgaccctttattgggtccagggcgttctgcacacaggtttcccttggggagttttaactggtgggtttaatacaagcgggcacgagccccgtggggccacgctgtgactgtgggggactccgtggtgtggctgcacagtccatgtggggcgtggggtccgtggggacatggggggtggtcaccaggggacagtgcgtagggcgggcgtctgggtggatcagctcgaggaagggggatgtgaactgaaaattgttgcgggtggcagccccgcttctggtcagagaaagtccagcctagattcagagtggatgccgaggcggcctaagatgatgagcgttcctgcaagatgtaaagcactcgaggggcaggggtgctgcatcctacacagggtgggtctagagcagaagagcccgtggcgatttggggactcgcattggggcagggctgtgcacagggagcccaagggaggacagaggccagtgctcctcaaacctgatggcatgcacacgcatacacacgcatgcacgtgtcctgatggcacgcacacacatgcccacgcccatgcgtcctgatggcacgcacgtgcacacgcgtcctgatggcatgcacatacacatgcacacacacgtgtcctgatggcatgcagacacgcacatacatgcgtcctgatggcatacacacacacatgcacacaagtgcgtcctgatggcatgcacacactcagacacgcacacacgcgtcctgatggcatgcacacacgtgcgtcctgatggcatgcacacacatgcacacacgtgcgtcctgatggcatgcacacacacatgcacacacgtgcgtcctgatggcatgcacacactcagacacgcacacacgcgtcctgatggcatgcacacacacgtcaacgcatgcaggtgtggccagggagtcctggcttgtgcacttgtggtcctctggttggggttggccccaagctctgaatttccaaccaactccaggtgcagcctgggcagccagcgtgtgggcctcgggctggggcggggctgccatgaggcagctcatagagggcctgggagcagggccaggggaagccacacagggtgtgcggctctagattgatttgaaggtggggccaacaggatttgctcatggagtgggtgtgataccaggaggatggagttgccaagttgccatttggtggaagtggccggatttctgtcctggatgggggcgtctgggcgctgtgctgtggacggtcagtgtagtggcctggagtgtgcacagggcccgtgggtgcagggtgggggaagtggctgagcagccattgcagggctcctgatgggaggccgtgaaactagggcgaccccaggaggatgccaggactgagaggagagcaccctgtgcttgggtgggcgaagaggggctggctggagtgggaagagggggtggggagtggaggagctagaccagggtggggctttggagaggcggagccaggagtggccccttataaggctatgccgttgggtggtcagaaaccagtggtatggctgggggaggtggctcacgcctataatcccagcaccttgggaggccgaggcgggcggatcatgaggtcaggagatagagaccatcctggctaacacggtgaaaccccgtctctactaaaattaaaaaaaaaattagctgggtgtggtggcgcgcgcctatagtcccaactactcaggaggctgaggcagaataatcacttgaacctgggaggcagaggttgcagtgagccaggatcgagccactgcactccagcctgggcgacagagcaagattctgtctc

SEQ ID NO: 1594 - DNA, 4226 bp, Homo sapiens
cagctgttccaggtctggcagaatgaaaatgaacgaattcatgcccaagagactatacggcggttgcagcggtactgggaagcgcgccagctgcgcctgctcaacttcatcctgcatgtaccctacgagcccccagcctcagagcgctccaagaggcaggtgctccgcagcccccaatgggaggtagtggacaaagatagtggcaccttcatcctctcagattacagcaacctgcaggattccatccaggaaagtcttcaggtgttgtccaagatcttggccatcgaaaagtcaggagatttaaacaaaatagctttggagtgggtggccatcatgcatggcctgggtgccctgctggaggtgtggctgactttccagcagaagtggatttttctgaataaagttctgcatgagatgaagatccagtttcctaatgctgacctggtagggaagggggttgaggcagagagggcaagaagggttcctgaatagcagggctcagcgtgggaaaggggagctgccacttcatattggccctcacttttatcctctccctcaccacagaactctcgtttcaaggtcatggatgaccagtatcgaaccctgatgcgcatctctgtagctgaccccatggttctgtcacttgtagtgcccagtgccgagaggagcccttacttccaaggccagcagctgcaacaactgctgcaagcaggatcggtggagctggagggcatcatcatgagtctggagagcgtgctctatggggtgtgtgctcacttcccccgcctcttcttccttagtgacagtgagctggtagccctgctggctgctcgactggaatcatgcgaagcccagctatgggtacgacgctgctttcctcatgtgcatgctgtgagcttcaggtcttgcccaactggtgagaaaaacacagatgactgggagtcaagcccaaacacacagactcaggtggaggcacttgcagtgctaggggcaggtggggaggaggtgaagctgcagggtccccttcctctgcatccagatctccctaagtggctggcctctctggagaagtgtctgcgcttggcactggtgcacatgctgcagggctgtgtggctgctcgccttgctcgaggcccatctctaggtgaggccctcaagcaactgcccaagcaaaacaagttgtacctgcaactgtatgtccagcactggatcgacttagtccaggccttcccatggcagtgtgtgctggtggcagaggaggtggtatggcgggccgagatggaggaggctctgcttgagtggggtaccctggccatggtctccatgcatatgcgcaagcttgaggtactggtgaattttatgcgggcccagagggcttcccaaggtgggcagtccctgccttctgtccgccagaccagccttctcagtgccctgctggtcatggcagtgactcaccgggatatagcacagctgctggaacagcaccaggtcagtgatctcacagactttcactgggtccgccaactcaagtatcacttgggttcacctcacataatccccaaaagccccctacagagtcttaagactattgcatcttctgaaccctctctgtcaccagcggcatgctggatagatgtgctaggcaggtccttcctgtacaattacgagtatctgggacctagactagggcctctacccagcctactgcctgaacggccagccctggtactattattggccctagaggaggtggcctgtgggaccgtactgggtcctaatggtgtgggcaagagagctatagtgaacagcctggcacaggccctgggccgccagctggtgatgctaccctgctcacctcagatagaggctcaatgcctgagcaactatctgaatggtgccctgcagggtggtgcctggctgctgttggagaaagttcatcagctgccccctggcttgctctctgccctgggccagcgcctgggtgaactgcaccacttgtatgccccactgtaccaggaggcttcccgaaacacaagcaccatagaccccacccagccccagctccttggcagtagcttctttgaaaaacatcacgtgtctgtgcgccttggctatggctgtctcctggtactgcgtgccctgagctctgctgtgcctgccaacctgcacctgctgctgcggcctgtggcattggcattgcctgatctgcggcaagtggcagagctgactctgctgggtgcagggatgagggatgccttccagatggctacccgcctatccaaattcttctctctagagcgtgagctggtgtctgggcccctgccctgccgcctgccactgctcaagcagatactggaagacacaatacggacactaaatgtgaccaaggaggaaccgaagtgccagaagcctcgcagcctagctgccattgaggaggctgccctactgcatgccctactgcgctcaccactgtttagcattctcaatgggctccacctgcacaacctccgagggctgttgtgtgcgcttttccctagcgccagccaagtgctggcagaacctatgacttacaagctgatgaagccattggtggtggaggaactgcaacaggtaggtctggatcccagccctgacattttggggtccttggaacagttgagccaggccctgagccgggcctcaggcattctgctcctgggccctgcgggcagcggcaagaccatttgttggcacagcttatttaagatccagaatcggctggcagccatggaggacacctcaacccaaggctgccagcctgtggaaattacccacctgtaccccagtggcctcagcccccaggagttcctgggatggctagagggctcctgctggcatcatggcatctttcccaaggtacttcgtgcagccggtcagtgtaacaacatgggccaaaagaggcagacagaggaatcaatcgggatccagcactggataatatgtgatggagcctccaatggtgcttggctggactccatcacttgcctcctgagtgagcttccccagcttagtctccccagtggacagcagatagcacgacccccaggcacctttctcttgatggaggtggctgacacaacaggcatatcccccacagtggtaggctgttgtgccctagtctggtgtggtggagagcagacttggcagtgtatacttagtgccctgatggcatcccttccttatgagtaccgcctgcagcaccggacagtcgctgagctcaaccacatggctgaggttctggtgcctgcaacattgcgattcctcacctgccaaggtgtcagctctctgctgcaggtacacgggcagcaggctgtttgtgcaggtgtggcagaagttaccagcatggcacgcatcttgcatagtctgcttgacctccaccttcgcctaaaggaggagaaggcccctggcccagaggacctcagctatagtgatcctgtggcccaaagcttcaggtcttcaaaaagcagctttctaaaccggtcccaggttgacagtgacgatgtgccagataagtgcagggaacacttgctggctgtcagcagttttctttttgccttgatctggggctttggagcccaccttccctccaggtacctaccaggatgggggatgggagatgcagagggctgagatggactggcccatggaagtaaaaacccacatgacatcactgttagggtatggtggagtgtgtgagtgtgtcataaatggaagtgttgtaactgtctgacgcttttgcctgtgtgtccatctgagcaggttctggcccatctttgataccttcataagggattctattagtcgcctcttgtatgtgatggacctgcttctgtcagggggacagccagtgttgctggctggagaggcagcaacagggaagtcagcctttgtggaggtgctggtagagccacatcacccttacatatacagccccatccaccctgccttcagttcctcccacctccgtctcctgctgagcagaggaatccagggccaaacacaagccagcccacagcctgggcatcaccaggattctaaaccctccctcctcttcttgctggaggacctgcacctagccacttctggtgaggagctgcgaagagggaaggaaggagctactgtcatctcttgagactataaaatccctagcaatattcattgactctcaaatatatgtctgtagatct

SEQ ID NO: 1595 - DNA, 8331 bp, Homo sapiens
tttcaaattgtttttcaaaacacagggtaacatcctaataaacaaatgaatcatgcttcctgcaacaccttttcacaaacagaaaccccaaaatatgcctgcaatgttctgacaaaaaaagaggccattgtccaattagcaaaacacctgaatttattcagagtgagggaggaatccagcaactgcttggatgttacctggagagaaggctgtgggaaacatcactcgttgcaggctccgtttagcctgtgtgaggccttcagcaagatgcaacctgccctgacccatcaagcatggttctgctcaccatgccaccgagatccagcaggctccttggcaatgagaagatgcaactgtgttagttgtggtctcctgcagaaggactggcccccaccacaaacataaaccctgcattgagcctgagttattgtcctggtgctgagagcaaaattaattgtttgaaaaaaaagtgctttctaataaactaagaggaaagtgatgccatcccatatcttgctacccagctgggtggggactttgtaagctgtcagcaccaatatgggagacgtgggatggaaaatagcccaggccaaggtcagatacagacaagaacagaggcaagtctccaagcctgggatgtggagctgtcagcactacagggcatcgggcaagctcaggatggagtcaacagctggagatgccaagttggagcaggggcattccatgggcatccaagagttgagctggcaggatggggaatggggccagcagagaataagggcgtgctcccctcttcctttgcctgattcaccactacttatcttttataccttggctcagacatcattttatctcaaagaaggccatcatcctgcaattctcctcaatagcacctaccattgaagtgagtcaatgggtgactgattttggagtcctgcctgctagaacataaactccacgagctagacccccatctgtcttctttatggccacatctctggtacccagcaccatgtgtgacccattgtcagccctcaatacatcttactgggaggaaggaaagatgaataaagggcacagaagaagaaggaggtagggaggaaggatgggaaggacaaatcggaagaaggtgcacactaagctgtgtctggttccagatcctgtttctaaggagctgctggtgggcttgtaaatgcaggtgggcgtggccgaccctgaaggcatagcacccccagcccagtgactgacctgtgtggtagacattggaggtcacatggtttaagaacctggcacataaatccttcctggaaaaataatcacattgtatttcttggtgtttcatctcctgacaggggtttttctttctctggtgtttgagatgaaaacaagctgtgacctgaaactatagacacttctcaaggatgatggtatgttgatagaatgtagttaaaatgctcattagggatcatctactattgtaaagaacagggtagaggaagagtagggtaggcagagtctcttaatccttggatttattcaacaggattttaccaaaacaggatgaacctctgaaaaaagacaagcatttacaataacattgtaaataaaacctaatgaaagacatctgaagtctacagacaaatgaacagccttaagaagcctgaatcttacaggcaatgacctttgccaatagctttaataccaatagagttgctgatattgattatccaatctgtggcaggtaggagtccaggagtgcaaaggcacttgggacagtgggtttgggaatattagctgggtgagaggaagcagtggtcctgaaacttaatgttcctatgatttaactggggctgagtaggtctgagatggggccttagattttgcttttttaacaagcaatgtctatgcaggtgagtattaagagtaaacttaaacagtttttcctctgctctcacactaacacaacaacagttatcaacacagacaggagaattctgttatccccaaatatgagggggtttctccccatcagcaagcagcccatcagttctgcagtggacaccagctggttgccctccgattcaattctgacatcgtctactggaagatagtgtcagatcccacaggtctgactctacagagaccacagattctttgagttgcaaggaatgaagaggtcactcaacctagttcaagcgatgaggtttatggtgaagaaattgcaaagcagtgagagtgatggaaacttctggaaaacaggattgtggagtagccaggcctggaagagactggaaccaggtatcatcctgagtccagggcagctcaaggcacctcaggggcagaggtttgtgtaattctttatttcttgctgttcttcgaagggctttcttttatctcagagcttccactaccccatgcttctcctaacttctgccagctcgccgcctctcagagcccctcgtctgactcaaagtctctgtttctgcttcctttcagcattttccccactgaagacaggacccttgctagtttctaattcaggcctcaagagcaagaagctgacccgcccctcctggcaggcaaagcacatcacccaggcgccccagggccctgccagcctgcaaccaagcttcttagtcaggctaggtgtgccccagctttctaaacacctggggccaggaaggggcaggatgggcctcatggtacaacctcgctgccaggacagcaggtgctgcctcctgggaagggccttttaaagatatggtgggtgtggtatttgcctcctctgtgaaatccacggctggctgagctccaagctttgtagtccttggagagttaatcttggtggctctctcttatgcaaaaaaaaacttcagagaagtattgggagacttcctatttggaaatttctagtctgtactgctaaagggagtaggggtaggggagtcatttttcagttttttttctttttcttttttttttttttttaggcagggtcttgccttgttgcccaggctggagtgcagtgatgcaatcacggctcactgcagctcgacctcgcaggctcaagcgatcctcctgaatagctgggaccacaggtgtgcatcaccacacctggctaattattttgtagtttttgtagagatggggtctcaccttattgcccaggctgatctcaaactcctgggctcaagtgatgctccctcctttgcctcccaaagtgctgggattacccatgagccacagcacctggcccatttttcagtttttaaaggtctggtggttttccgaaaccttcacttgggatttggcatgttaattacgactaaacccctgatccttccccacacctcctgggggatgattaggtcagggccaggccatccccgctcctcctggaggctgcaggaggcactccacacatctccccacgggcagcatctgctcactccctctgctcatgtttattgagcactcgatgtgctaggtacagttctcagacctgggggtacaatactgaacccaaaagacaaccgtctctgtcctcatagagcttatgttctaatgaggagagacaattcataaatataacaaatgtgtgaattatagcttccgttagaaggtgataagtgcttcaggaaaagaaaatatgtcagagtaagtggggtaggaagtgcgggtgaggagaggaggtagacagatgaaatgtttgatagcacagggagggtaagtcattgagaagctgttatttgagccaagcctcgatggaggtgcgggaagctttgagaattttgtaatatcccccagcacaagacactagaggcaccttggagtcttgtgaaagcaacactgaaaactctgggaataaacagcagagaagtaagggtgtgacaagtcaggaatattccatggctatgcaccaagaatggccctgcacaaatatttaggaggagtggcagtgagaggatttgagggtcaaaagtgttaaagtagaaatatgagaaattacaacaaagtccaggttcacttcagtgtattattattttcattttttgtaaaatattttgaaaaatttcaaaataaagttgctaaaagactttgtcgtgataatgacgttgcagttatgtaggagaatggccttattcttttttgttttgttttgtttttgagactgagtcttgctgcgtcacccaggctggagtgcggtggcacagtcatggctcactgaagccttgacctcccagactcaagtgaacctcccgccttagcttcctgagtagctgggtgtacaggcaagtgccatcatacccagctaattttaagattttttgtagagatggggtctcgccttgttgtccaggctccttgaactcctggacacaagtgaacctcccgcctcggcctcctgagtagctgggattacaggtgcatgccaccacgcccggctaattttttgtatttttagtggagatggggtttcactgtgttagccaggatggtctcaatctcctgacctcatgatccgcccgcctcagcctcccaaagtgctgggattacaggcgtgagccaccgtgcctggcctttttttttgttttttttgagacggagtttcgttcttgttgcccaagctggagtgcaatggcgcgacctcggctcactgcaacttcctcctccagggttcaagtgattctcctgcctcagcctccagagtagctgggattacaggcgcccaccaccatgcctggctcattttttgtatttttagtagcaatggggtttcaccatgttggccaagctggtctcgaactcctgacctcaggtgatccacccgcctgggcctcccaaagtactgggattacaggcatgagccaccgcacttggcctgttttgtattttttctatgagacatgcctggtggtagagagatttggactggctaacctgtttttcttttgctgccactttgtttgggttctatccaaagcaaaccttgggatcagagtttgagtgtaagctgtttatttggcagatgtagtgggttgaatggtggcccctcaaaagatatattcatgtcctaacccccgcaacctgtgaatgttacattatttagaaaaatagtttattgtcgatgtaattaagttaaggatcttgagatgagattatcctagattacccaggtgggccctaaatcccatgacaaatgtccttagaagagacagaagaggagaaggcatggacacagaggaggagaaggccgtgtgaagatggaggcagagattacagtgatgcagccacaagccaaggaagcctggagcccccagaagccagaagaggcaaagaaggattctccctagagccgtcagagtgagtgcagccctgctgccaactggattgtgagcttctggcctctagaactgcaaggaaattaatttctgttgtcttaagccaccaagtttggggtcatttgttaaggcagtcttaggagaggaatacagcaagtgattccaggaagcagaggcatggagtgggaaagtgagacgcagtgggatgcaagccaataaagggaatgctcaggggtgcatcgctgccctggggagcttctgagaggagtgagaaggccgggctatcccccagctccattcttgctggttgagggtcactcctttgggctcaatgctcaatatactcttggtctgcagagcatgctcctaaggtattgtgtgtaggattttggagtggaccaagggctctggacagagtggagtggacagcagctcctctgcccctaccctttggctgctcattgattagctgaaagccctacaggcataggtatgggaagaaaaaatgaggttcagtagatagagagtaacatactttgacacccaaaacaaattagactggtggactccagttagaatgtccaactccaagacctgatcagttcgtgtatccacctctggcaaatatgtgacaggtgactcctttctgcacagcatggaaatattaatccactttctttgggatattatagttggaatatgagtttttttcaggtttattttagaatatatttgataacttcctgtttattaatattgaatggaatgttcacatgttcccattatatttgtcttacatgtaaaagctctataatcgtgcattaaatcaacctgccttgtagtataagctagaaatgctgctagatgctctgtgtggagactggatctccaatgactctggcacctcacagcacccagcacagtgtaagaaaacagcaggtgcacaataaagacatgctgttaggtttatccctctccttcctggtctctccttccagcccctggactccatcacaatcatttccaagcagtgctcctgcagctttcatttcttgctcgtctgttatttgttgctcccagccagcaatgttcttttcttgtctcttttcttctagtctctctgggtagattcctgcagtgctttttggcacggctgggtggggaactctccgagactgtctacatcatttttcaaagctcccaccatcagacttggcatttcatatacagctttgaacactgtcaactggtgccttcaccttttcccttaatgagggctcaagggtaccctttagcacagaataaatgtacacatctgaaattgaacattaaaatgtatctgcttgttttaaaactcagtttttccttttcaggttggagaacgtcttggaaatggcatgcctttacttgtgggtttccattagggcctcctgggtatgatcctggctgtagcctccttttttcttagctatttatttctcttatgagctggaactgagagggaagaggatccggaggactaaggtagttttgttcctagccatctttggcttgaatccttttggcatcctctgataagcagaaatagcatcatctgtctctactaatggcattatcttagctggaagaagtgatttattcaaatgctctaataattatagctcacatctatcgagtgcttaccacacgccaggctcctgtgctaagtgcttggcattctttatctccattttcatcttcacaacaaccttctgaagttgctcctttatcatctccatttcacagatgaggagaccgagacttgggaagtctaagtgcatgctggaaccacacaggtagtggagctaggattcgagcccaggtctgtttgacttagaacatgtgacttagaacatgtgagttagaacatgttctgaacacaactttcagggcacatggccttggatcgcaagactccctcatcttctgctttttaaaacagttacatggagaagtgactccatgttgaaaaggcaaccacagcttctgaaagtgtccttagggaacctcactattaggagccaggtctatccaagtcagtacaaatgaagcgagggatgctggccaaggcacagggtgggctttttctgttcaggaaaacaaggttgtttttaaaaggagatttgttgaaagggacattagaaggagagtgtgaacactttggaatgtggagatggacggggagtaagacccaagcatctcacaccatttggggcagcatcaaagcttttatgagtgtcctctcccatagcaactcggcacctctgctggttcctgcctcacctgtccttcagcttgtaccaagtcatccactcaggaggcggaattgtgctttgctgtcatgaaatctctattggggaagatcaatggaaaaaggactactcagaagacagggatcagctcaaaccattcattcctggttttcatgggggtatgaggagagcagagcaaagtgtgtgtgtgtgtgtgtgtgtgtgtctgtgtgtctgttattgtgtgtgtctgtgtctgttattgtgtgtgtgtgtgtgtgtgtgtgtgtttgtagatggggtctctggctctattgcccaggctggtcttgaactcctgtactcaagagatcctcctgcctcggcctcccaaaatgctaagattataggcatgccatcacgcctggcccagagcaaagagttttgaccgctgagcatccaaggattaacaggggactgaaagcagggaagaaacgggtctctggtgcatggggtgctggggaacaaggaaagtggtggcctgaccctggtctagtcagatgggcaggtgttgccctggccccagggaattctggcccagcatggtcctgcctgaagtgtgtcctggcttcctgtctttcctggctgtctggcttttatcacacaggaacagaagacataaataaattgggaatatggataccaaaaaaaaaaaaaag

SEQ ID NO: 1596 - DNA, 3776 bp, Homo sapiens
gctttccccaagaaaggctggcccagggaggcttctataaaccttctccctaactcttccagcctgatttctccttgacccaagaatcgcagcctcctgggggctgttgggaaggggcgtggctgcccgctgggttcagttccccttccttcccacgagggtcctcacctgctccagcatgtccttagcaaggtcctcctgctcatccatcttcaagatggcctgccggatctcctcgttagaaagcttcaacctaaggcaaaaccccacctcaatccaggacagccctcaaaccttcttctccaaaaggtaccacctccgccttccctcattccctaacaggacttgggaatatatttaatagtattcccccctcacctcctctacaaagccttcttagattagactagtatgattcagtccacaaacttgataatgagcattttagtgtcaaaatagagacgtgagggtctctgttctcttgataatccatcagagctgataggggcatttgggagtaaaagagatgtcttcaatgtagaccaaagggacagggcaaagggttcctgatccttctcctcctcctcatgcttaaaaaatgcacagcatctccacgggaggacaggattatcggcaagccactaagagggcaatttcctgctgccttcattctcagaacacagaatcgctctcagtcttctgacagcgcctcagctcccacacagctgtcccaatcagtcttgctgtctgggagagggagaagccacacacccccatagcccttccctatcccctccacatgcacccccattaggaaccctggggattcagaactctttccaccatcaagtgggggaaactgaggcctgggggcttgtgagaagaaagggaggaggatgtctcagaggcggctggggcagcactaagaatagtatgggaggtggtgccctctgaccctgctcaggcaggaggcccccccgtacagaagctgtgctgttagcgcagatactgccctgtttgttctgcagccgcgggaaatgcttaggggctgagatcatgctgctccatggcctgagccaagcgaggccctccgtgggcttagagcaactcagctgccagacgctgaccaggctgggcaagggcctcgtgactgggcagtttcctgcctgcagagccccaaactgctgctcaaggcaggttcccgagagacagttccagatcaatgcctgcccctcccaggggacagcagagagggagaggcccgagactgccaccactccgttcctccaccccctttgtcccccaggcatccaactcaaccaccttcttttgcacatacttggaaagaaggatgatgcagttttgggccctccggccatcaatgaccgacagctctttgaccttgcgggaagccaggtagatgtcttcagtggagcccagctctttctgcaaccaacaagtcaagtggacagttgaggtgtgggttccctaatcctcctcttacccgccccgcaagagccacctcctaccaatccaggaatgctcctggtgtgaggggaagggggaagaaaaagacaggagagagaggagggtggataatagctaactttaagagacggtatctgggacttttccataggctccaatgggttggggaaggacaccgagaagccccccttcctattttttttatttttttagagattttttttagaaattatccactctgggcaatgagggaaggggctgtgccagtgggtcagggtatgactgatctctgtggctttgggcaatgtgacataacctcccatgactccaacagaatcaactcccattcccactgcccaacccagaggccctcctcaggcttatgctgagaacctggttgcaaacccccctagggaacagttgctgactcctagggacttcaggcacagcccaagatgcccagggtagagagcatccacaagttcagaggtatggaaactgaagcagaactctctcctctgagtcccagcaggcagattctggagaaatcattgatcccgccccactccttctcttgggcccctggcgaggtagacaggaggctgtctagtgtgctgttcttcctctgggaggtccctcttgcacaacttcaggggccgccttgcatggttatctttgtgaattgtgtcgtgcctaccctgtgtgtccttacaggaaaggctctcctttggcctggtgggtaagacagtagacctagaagccttctcctcattccaggagacattgacctccactgctgccaggggtctatttgattacctccctctgctacatttcttctttctctttgggggccctctcccataccaccctgtatgaatggggaataaggtagaaagtggaatggacaagtcctctctgtcaggcccagtacagagcagcagcccgggacagcagttaaaagttggagtggtcagagccccgagagtaactcacctgctgagaaggattagttatcagctcctaggcagcagccacagccaacagagaattaaacatgcacaacattagccaagacatttggggacccagaaatagcatgacagacacagggatccctcagcatctacactgtccacttcatcccagtgagacccatggttgtagacaggcacccataagtggcactagacaggagctgcttctagcagacatgcactcacggagaagccaaacgaagcggagatcaggcagctcctcccatctgcctagtgcgaccaccactccccagttagggcagaccaaacccctgagttctcccaccccaggctttgctgcctgttcttccttttcctctgctgaaaacctgcagagagggtggaggacattcctccatcctgggatgagttcacctttctaaatagaggaggagtcacaaatgaactcgatctggaagctccagaaagttgtgtttactgaggcagagaaaagcaagtgcccttgaatttgctcactgcccctcatctgtcctttgatgtgcaaggggaactgaagaggcacagcacgcacctctgttctccctgacgccgatggagtggaagctactgactcaaaactcgcatggggcacagagaagaccatgactcccaggacctcccctgccccacaaccaactgagagaagaggcaacaaggtccaggatccgaaatacctgcatgtcatcaatctcattccatacggtgccagggacacgctcctaaaattcaggcccacccccagcttccagcatctgccagaaggacttgaggctcttcgaggaggtataactgaggtctggagccagagagcggtaagtctgttcctaatattccctacatgttgacactcaccgcgtcgccctgatgtgcccaccttgcataattttcaaatttaattttcccaccactctggccaagagcccatcatctctagtctagactcctgggacttctgcccgctggagatatccttcacatgccagggaaagctttctcaaaagcatgtttcattatgtttcccccgtggtgcactgcctttggggtcaggcgggcctagctggctgacgctcccagccctgccatcctgtgggactgtgggaagatggagggatgagatttttctcccatgtcacataaaaggaaactgagtctccatgattttttttacctcaccgagatgacgtgagaagtgagataacatacttcaaacatacatggtagggccactaataataatctatttattatatg

SEQ ID NO: 1597 - DNA, 3944 bp, Homo sapiens
aaagatttcactggtatcaatactaagttaagtggcaacacccattataccccactttgtgctcctacaagtccaaataaggcactaccagaacttaaccaagatatgacctgtaccaaaaatccacaaaacttaaaccaaattcatgaggaaactgcaaagaaagcacagaacttggtgctccccaaccgaaagtcaccaagccctgtagcaccacatccttcaaccttcgtagctacgccagcctcccataatttagtcaatcagacaaatgggacaacaaaagagagtgctttgctgttgcatgtgctgttgatggtgccagatgggaaagattttattagtggagaatctgagaaacaatcaccatgcaatgtttatttaaattgtaaactcttcagcacagaggaagtcaccagatctgtcatcgcatggggcacaacacaaccggtctttaacttttctcaggtgattcctgtctctctgtcttccaaatacctggaaaggcttaagaacaatgtgatggtaattgaaacttggaataaggtgcggagcccaggacaggacaagctgctcgggctggtgaaacttcccctccaccagttttacatgtcattcaaagatgctaagatttctcgcctgctgctggatgcccagtacccagttgttgctgtcgacagctacatgcctgtgattgatgtgttttcaggccaccaaaatgggagtcttcgagtctttttagctatgggttcttcaaatcaaataatggcactacaaagattaaagaatgaagaaggaacactccctcccttcagccctaggccagcccatttcctggaccagccaactgcagcatctgttgctatggcagaggaccgaggaaatggactgatggagcactgctttgagatccatatagagatggttaaagggctagcccctcttcaggcaacagtctggggagaagcagattgttatgtccagtactactttccagttcaacactctcaatccagtgtgctgaaaggacctgagttccttgaaaatggaattactctgaagcccttcagaactgcaaccacactctgtgttccagatcccatctttaatagtgaacaccatcactctctcctgttgccagctgaggttccagtgcaaaggctcctactaagtgctttctctgcacagggcctcgtgcctggaggtggagtccagtttgaaatctggtgcagatactattatcctaatgtgagagaccagaaggtcgccaaaggaaccttgccattatcaaggatctgtgctatggtaaccacccagcatcgtgaggatgtgggaatacagacctttaatctccctttaacccccaggattgagaacaggaaagaattgaggaaccagtcatcaggtttactggatgtgggcctaaggtacaggcgtagtccaagaacagcagagggagttcttgctgcccgaactgtttccatctcagtccagattatcagagcctgtggtctgcaagcagcagccaaggctttggctgaacaggaacccgctctacagtttagtgccacagtcggggtcaatgcctctgtcaccactcatctctccttcctgccccagggagaacagcgccgaacccaccctgtggcctgttctttctgccctgagttctcccatcacgttgagttcacatgtaacttggtgactcagcactgtagtggagaggcctgtttcctagcagagttgttggagtttgcagaagttatttttgctgtctatcatgaaaataccaagtcagcaagtgatataatcagtattgagtcatgcaaagagtatctgcttggagtagtaaaagttccaacaaaagagctgctgatcaagagatctgggatcacaggatggtatcctatcattttaccagaagacgggggcctacctcatggcctggagctcatgcagaagatcgtgggtggtctggagctttcgatttccttcacgcatcgtggagatagagaacgggtgttggaagctgctgagcatttgggctggagctttgagaacagcctgaaagattttgtcagaatggatgaaggggagccagccactgtcaccatctccaccccaaggctgtggctgcccatccattgtgtgctgcttgctggccacaaccacattcataagaatacatattgctaccttcgctacaagttctatgatcatgaagccttttggacccctctcaagaagcctaaggaatctgtaaacaaaaagcagattatggtcactttcaaggcatccaaaagagcagaagtcaccagaggcccatcactgctttggtacttcagggaggagaggctagagatccaagtgtggcgagcttatggcaatgacagtgtggagagaccccatcagacagacagctggattggctcagcctatgtggacctggccagacttggggagaggtcagcgaggacgctaactgtcagtggtgtgtatcctctgtttggacgaaatgcttccaacctctcaggagctgccttgcgagttcatgtggttctttcctctctttcctcacaccttgagcccactcatgagctggactccatggactgcagcagccacagtgagtctgagcagctccccagaaggaatgatgaggtccagctctctccaccagaagtcatctcctgccaccagaagtctcctgcctccacccaggtcccctgcagcagcaccacagctgaagtccgcctgacgcgggagggccctgctgatttggatggaacgtttgcagtcagcatcctagtagaaagagcaatgcacttgagcttgaaagggagccccttgacagagcggaaagtatcgatacccagttgttgtgtatcctttgcaacagccgatgagtcatctcctgtatacacccaagtggttgaaaacacagattcccccatctggaattttcaacagcagtcaaggctatcaaaagagctgcttctggacccacaacaaaccctggtcttcaaagtttggcataaaggagatgaggagagggtgattggctttgcctcggtggacctctccccacttctctctggcttccagtttgtctgtggctggtacaacatcacagacttcagtggagagtgccaggggcagataaaagttgctgtctcccctttggagagtttgatacacttcaaagaagaaaggcaagaaaggcgtggagtggagacctcaaaatcactgatcccaatatacagtcccttttccttccctgcctctgatacgtatgctgcattctccagccacatggcaaggcagaccctagaccaacttgctcatgcctcctcaaaggagcttgatttctcctctcctgggagaagtgataccacaagaagccaagcatcacgccatgaagagcatgtgcagaacattcgccggtttcatgaatccctgcatcttcagggagaggcacccttgccatgtgatgacaaactgaccacatcacctttgtcctcccaaacctccattctgacttctctcaggaagaatctgagtgagcttgatcagattcagaggtacttccgccagaagctcaccaagcctttcctacccctcagccctcagactcaaacggccatctcacagcaccaggagagctgtagggaccatcttgggccaggtgccagcagcctagaccctgggagccagtgtatcctggagaaatccagtaacctggtgttgcaagtcagctccttaatcacaggtagttactgaagtaactggaagcatgaacatgcccaccaggactcccagctcccaacgattcctgagcatgagcagatagtctctgaaagcatttccacagatgtatctacaactatagattagattctggtcctctgatattagaataaagtactaaaaattgtaccgccttg

SEQ ID NO: 1598 - DNA, 4602 bp, Homo sapiens
tgtcacagccttgtccttgacggggctccaggcccagtcccagccccatcctcacctctccgaagacgggccggaccagcgtggacaggcactgggacctcggctgcctcttgacgggctccgcaggctgcaaaggagtggaggcccagggtgagcagggcagtgcaggtgacaggcagggcactcccatccctgcccaggctctagccttgaagagacagaggctgggagcagcctgtcggggcacatgtccagggccggccccaaaaccatcaagccacccggatggcctgactctgagggcgactcccaccctctcctggctctgagggcctgtgactcccaccctctcctgactctgagggcctgtgactcccaccctctcctgactctgagggcctgtgactcccaccctctcctgactctgagggcctgtgactcccaccctctcctcacaaatttggctccaaacaggccctcatcttcccggcacatgctggggctcggggtctccacaccaggcctagtgccacagtgggcttcagaccacccctgcctttcccaagctccttgtccaagctccagacactgggtggacaaagctgggtcccgcatccagcccatcccacggccccaggggtgcacagagggcaaaggccaggccaggaacagaccttctgtgaactgtgcagggccgtccccttgtgaagcttgctgtgtggactcggccggatggtaggggggaacgtccagatggggccctgctccccgtcctccgcctcgccatcactgaagaggatgaggagttgccagggccagtggggagagggccaggaggcatgagggcctcagggcacacctcacggccaagggaaacccgaggtaccagacggggctctgccaggccacggggtccagctgatgcctcagcaggccctgtcctgcagccttgagggggtccctgcccaacactatatctggtcaccctcacccccagggcccacgcccctgcttctggagtggggaccacccacgtcacagcacctagggtcaccatgaggataaaccaggtccctacatgtcagagtcctcagagctggactcctcgccatgcccctctgacttccagcgcttatagcggtcgatgagctccgtgaggaaggaggtcttcttggtgtagcgtgtgatgaacttgtgcttcaggagctccttggccgtgggccgctgcagggggtcaggggaacactagtcactgggcccagccaagctctgcctaagggaagcaaacgtgaggcagcctggaccggggcgggccctcacagctacaaggctggtgggcctgggcctccgggctgtgccgcccaccccaagcgaacgccctccctccacgtcctgtctagaagggaccgggccagaggcgggccttacgaatcgggggtctttgttgaggcaggcctccacgaactccttgaagggcttgctgtgctggccctccagtgtgggtgggctgttcttgggaatcaggaacaggacgcgcatggggtggaggtcagagtttggaggctcccccttggccagctcgatggctgtgatccccagggaccagatgtcagcctggacagaacacaaggactgttgctgccctgagcacccgagccaggcatggtgcccgcacctgcccgcccgctgcacccaccttgaagtcgtaggccgactgcttgatgacctcaggtgccatccagaagggggtgcccacgaatgtgttcctcttaatctgcgtgtctgtgagctgccctgctaccccaaagtccgccagcttcacgtcaccctgctccgagagtagcacgttggcagctgcttgacacaggacaggcaggcgtcatcccaggctccacgtggctccaccccgggccccctgagaagggccagggtaccatccacctggcctcctagggcacagcagggctgtcctcaggacctcagccctccttgccactctcaaacccagggccacctagggccacaggggcactgccagcaggagcccaacggctccactccgagctccagggctcttcctgcatttggcttttacaacaaatcccaacgacaagcgacttcgcccactgggggctaccgcagaggtgaccctgaccaagggtgtagccaacacgggcctgccaggaagccccctgctccaccagaatcgtcccctacatgacagagatggctcgttgccagtggcaagtccctccccatgggctggcccagcctcccgtctgctctcagcagggccagaccacacgctggggctactcaattctacacctgctgctgtgccgtgcaccacagggaaccaacaactccagccaagtgtggccctttcctacactcagtccacagctggtttcctcagcgtacaaggaaaccgttacaagtagtatcttctggaaagggagcgagacaggactgctcagtttcagggtggccacaaggttctctatactccagaccctgggcaccactagccacttgcccctcacaggccccggcctctctaaggtcagtggggctcaggacgttacaagagccacatccacccccagcaggacctttgatgtctcggtggatcttgcgttcggagtgcagataatccaggcccttcagaatctcccgcaggatcgtggcaatgtatgtctcctccaggggacctggtttaagctggagaggaaggtgcgacagcagggcctcagctcctgtcccaggcccaatgcctgagttctctgcctctctcacagggaagggctgtccctgcagatagctgggggcttcgtgttcctttactttccaaacagaactaagtttcagatgggagtggggtggtggaggctctttctaaagcatataaaccagcctcaccttactgtcatgtaacagaaaaataggctcccagccatctccccgcaggcctgcccccgcccactcccacaggccaggacccctttcagcaccaactgggcagacgtgcagatggcagttcatttttgctttagacgattcctaattaacacctaacgtgccatgacaccaaacgagaggtggcccctggagcccatgagtctgaggggcaggggactcggacactgcatgaccccccactgccatggcctatgcctcaccaagtccagtgctgagccgccgcccaggtactccatgatgatccatagcttggtgctctgggaccggagacaaacccatcagcatttggcagcaagaggaagggcatgctccagggtgggagtcacaggccggagtcagccagggcccaggccccaccggtcccatccctgccaagaaccctgaacaggaaagggctctctcggccttgcccatcttcccctcctgccacactactgctacagatgctcagaggacaggttgagtacacacagcagtggctgactccacttcaccaagaccccatcaaaaaccaggctgctgatccagtcctacagggctgggaagagggcatggctggcaagcatgtgacccgacacacccatcaccctcctgggcaggatggccacagcgttccctacaccccagacactggcaccaccagccacctgctcctcacaggcccactcaccactgccagtaggggccccccagagtgctcctagcagcaccctcactgcattaccacaggcaggcaagtgggtcccaatggccatttagagccaactgaccctcgtggacgagggctcacaccctgcctgcccagggcagtttcccggagggcatgcactgaaccgtcaagaccgccttgcaccctctggcatgtcactcagtccctctgacatggaagagagccgggcacagcaccagcagggtccccgcctccccacaacaggcacctttaggtaggagccaaagtagcgggtgatgtaggggctgtcgcactgactgaggacagtgatctcctgctggatgtcctcgatctcatcctcggcctcctccaggtcgatgatcttgatggccaccacctcctttgtgtggttatcgatgcccttgtagacctccccaaacgagcccttgccaatgcggtcgagcttggtgaagagctcctcagggtccactcgagagtgctgtggggccagggcggggacagagggcagacagcgccggtcacaagaggcgggggacaggcagaggctgccctgctggggaggaagggacctgtagggaagggggagtccaagggagcgcacctcaattcttctctggtttcttcctttctccctttttgttcaaaaactaaacttgggcgggcgtggtggctcacgcctgtaattctagcactttgggaggccgaggcaggtggatcacttgaggtcaggagttcgagaccagcctggccagcatggtgaaaccccatctctaatacaaaaaaattatctgggcgtggcggctcatgcctgtaatcccagctactcaggaggctgaggcaggagaattgcttgaacccgggaggcggaggttgcagtgagccaagaccgcaccattgcactccaacctgggcaacaagaatcaaactccatt

SEQ ID NO: 1599 - DNA, 3380 bp, Homo sapiens
attccccgcacccacccacgtcttcccgggagtcgtatcccgagcatggaggttactgagaccgttatttcttcatggcctgcctagcttaagcagtagctggaaaagatgtctcgggctgttcgtcttccagtcccctgtcctgttcaacttggtaccttaagaaatgactccctggaagctcagcttcatgagtatgtcaaacaagggaactatgtgaaagtgaagaaaattcttaagaaaggaatttatgttgatgcagttaactccttgggccaaacagcactttttgttgcggcgttattgggccttaggaaattcgttgatgttctggtggattatggatcagatccaaatcaccgctgctttgatgggagcacccctgtccatgcagcagcattttcgggcaatcagtggatccttagcaaactgctggatgcaggaggtgacctgcgactccacgatgagaggggtcaaaacccgaagacttgggctttgacagcaggaaaggagcgtagcacccagatagtggagttcatgcagcgctgtgcctcacacatgcaggccatcatccagggcttctcttacgacctcctgaagaagatagactccccgcagcggcttgtctacagcccatcctggtgtgggggcctcgtgcagggaaaccctaatggctctcctaaccgactgcttaaagctggagtcatttctgctcaaaatatctacagctttggttttgggaagttttatcttactggggcgacacagatggcctatctaggatctcttccggtcattggagaaaaggaagtgattcaagctgatgatgagcccaccttctctttcttcagcggcccctacatggtcatgaccaacctagtgtggaatgggagcagggtcacagtgaaagagctgaatctccccacccaagcctctgcagtttcgaaatcaacgagatctactcaggctgcttgattttggaagatgacatagaagagcctccaggagctgcttcatctttggaggcagacggacctaaccaggtagatgaactgaaatccatggaagaagagctggataagatggagagagaggcgtgttgttttggcagtgaggatgagagctcttcaaaagctgagacagagtactcttttgatgactgggactggcaaaacggttcactcagttcactcagccttcctgagtcaaccagagaagccaagagcaatttgaacaacatgtccacgactgaggagtatctcatcagtaagtgtgtgctggatctaaagattatgcagacaataatgcacgagaatgatgataggctgaggaatatcgagcagatattagatgaagtcgagatgaaacagaaggaacaggaagagcgcatgtctttatgggccacttcaagagagtttacaaatgcctacaagttacctctggccgtgggccctccatctttaaactatattcctcctgtcctacagctttcagggggtcagaagccagacaccagtggcaactacccaaccctaccaagatttccaagaatgctgccgactctttgtgaccctggaaaacagaacacagatgaacaatttcagtgcactcaaggagccaaggacagtttggaaacaagcaggatccaaaataccagtagccagggaagacctagagagtccactgcccaagccaaagccacacagtttaatagtgcactcttcactctgtcaagccaccggcagggaccttctgcatcacccagctgtcactgggactctaccaggatgagtgtggaacctgtttcttctgaaatctataatgcagagtccagaaataaagatgatggaaaggtacacttaaaatggaaaatggaggtgaaagaaatggcaaagaaagcagctactggacagctcacagtacctccttggcatcctcagagtagtctgactttagagagcgaggctgaaaatgagcccgacgccctgctgcagccccccattaggagcccagaaaacacggattggcagcgagttattgagtatcatagggaaaatgatgagcccagaggaaatggcaagtttgacaagacgggcaacaatgactgtgacagtgaccagcatggcagacagcccaggcttggaagcttcaccagtatcaggcacccatctcccagacaaaaggagcaaccagagcatagtgaagccttccaagcaagttctgacacattggtggctgtagagaaatcttacagtcatcagtccatgcaatcaacttgttcaccagagtcttctgaggatataacagatgaatttttaactccagacgatgaatatttttactcctcgactgctcaagaaaacttagctctagagacctcgagtcccatagaagaggactttgaaggaatacaaggtgcatttgcccaacctcaagtctctggtgaggaaaagttccaaatgagaaaaattcttggaaagaatgctgagattttgcccaggtctcaatttcaacctgtacgaagtactgaagatgaacaagaagagacatcaaaggagtcaccaaaggaactgaaagagaaagacatatcattgacggatattcaagacctgtctagtatctcctatgaaccagacagctcttttaaggaagcttcatgcaaaacacccaaaataaaccatgcacctaccagtgtcagcactccactcagcccagggtccgtttcttcagctgccagtcagtataaagactgccttgaaagtatcacatttcaggttaagacagagtttgcctcttgctggaacagtcaagaatttattcaaactttgtctgatgactttataagtgtccgagagagagcaaagaaactggattctctccttacttcctctgaaactcccccttcaagactgactggtcttaaaagattgtcttcatttattggggctggatcccccagccttgttaaggcatgtgactcatcaccaccccatgccacccagagaaggagcctgcctaaagtagaagccttctcacagcatcacattgatgagctgccaccaccatctcaggagctacttgatgacattgagctcttgaaacagcagcagggctcatccacggtgttgcatgagaacacagcaagtgatggaggaggcactgcaaatgatcaaaggcacttagaagaacaagaaactgacagtaaaaaagaagatagtagtatgcttttgtccaaagaaactgaagatcttggagaggacacagagagagctcactctactctggatgaggacctggaaagatggctgcagccacctgaggagagcgtggagctacaagaccttcccaagggctctgaaagggagacaaatatcaaggat

SEQ ID NO: 1600 - DNA, 3447 bp, Homo sapiens
atgccaggtatcgtgctgctgttacaaagaacttgatttgtttattttctgaacatgtcggtgatgttttcgtgaccagaaatacaccataggacacaggaacttttttttttagatggagttttgctctgtcacttaggctggagtgcagtggcaagatcttggctcactgcaacctctgcctcccaggttcaaacgattctcctgcctcagcctcctgagtagctgggattacaggcgcaagccaccatgccaggaaatttttatagttttataaaaattttatagctgggattacatgcatgcgccaccacgcccagctaattttcatagttttagtagagatggggttttaccatgttggccaggctggtctcaaacttctgacctcaagtgatctgcccacctttgcctcccaaagtgctgggaatacaggcatgggccaccgtaggaacttaatgtttatgtcagttatcagttagtctatggtaaaattggttttgttatccattgttttgcttaaagtcacagttcctaaattaagtaactacttactgcagttagatttcatgcccatccatagggggattttggcaattgcttggagcatggcagatcctgaattgttactgagctgtggaaaagatgctaggattctctgctccaatccaaacacaggagaggtgttatatgaacttcccaccaacacacagtggtgcttcgatattcagtggtgtccccgaaatcctgctgtcttatcagctgcttcgtttgatgggcgtatcagtgtttattctatcatgggaggaagcacagatggtttaagacagaaacaagttgacaagctttcatcatcttttgggaatcttgatccctttggcacaggacagccccttcctccgttacaaattccacagcagactgctcagcatagtatagtgctgcctctgaagaagccgcccaagtggattcgaaggcctgttggtgcttctttttcatttggaggcaaactggttacgtttgagaatgtcagaatgccttctcatcagggagctgagcagcagcagcagcagcaccatgtgttcattagtcaggttgtaacagaaaaggagttcctcagccgatcagaccaacttcagcaggctgtgcagtcacaaggatttatcaattattgccaaaaaaaaattgatgcttctcagactgaatttgagaaaaatgtgtggtcctttttgaaggtaaactttgaggatgattctcgtggaaaataccttgaacttctaggatacagaaaagaagatctaggaaagaagcacattaaagaggaaaaagaagaatctgaatttctaccctcatctggaggaacatttaatatctctgtcagtggggacattgatggtttaattactcaggctttgctgacgggcaattttgagagtgctgttgacctttgtttacatgataaccgcatggccgatgccattatattggccatagcaggtggacaagaactcttggctcgaacccagaaaaaatacttcgcaaaatcccaaagcaaaattaccaggctcatcactgcagtggtgatgaagaactggaaagagattgttgagtcttgtgatcttaaaaattggagagaggctttagctgcagtattgacttatgcaaagccggatgaattttcagccctttgtgatcttttgggaaccaggcttgaaaatgaaggagatagcctcctgcagactcaagcatgtctctgctatatttgtgcagggaatgtagagaaattagttgcatgttggactaaagctcaagatggaagccaccctttgtcacttcaggatctgattgagaaagttgtcatcctgcgaaaagctgtgcaactcactcaagccatggacactagtactgtaggagttctcttggctgcgaagatgagtcagtatgccaatttgttggcagctcagggcagtattgctgcagccttggcttttcttcctgacaacaccaaccagccaaatatcatgcagcttcgtgacagactttgtagagcacaaggagagcctgtagcaggacatgaatcacctaaaattccgtacgagaaacagcagctccccaagggcaggcctggaccagttgctggccaccaccagatgccaagagttcaaactcaacaatattatccccatgttagaattgcccctactgtcactacctggagtaacaaaactcctactgcccttcccagccatccacctgcagcctctccctctgacacacagggagaaaatcctccacctccgggtttcataatgcatggaaatgttaatccaaatgctgctggtcagcttcccacatctccaggtcatatgcacacccaggtaccaccttatccacagccacagccttatcaaccagcccagccgtatcccttcggaacaggggggtcagcaatgtatcgacctcagcagcctgttgctcctcctacttcaaacgcttaccctaacaccccttacatatcttctgcttcttcctatactgggcagtctcagctgtacgcagcacagcaccaggcctcttcacctacctccagccctgctacttctttccctcctcccccttcctctggagcatccttccagcatggcggaccaggagctccaccatcatcttcagcttatgcactgcctcctggaacaacaggtcctcagaatggttggaatgaccctccagctttgaacagagtacccaaaaagaagaagatgcctgaaaacttcatgcctcctgttcccatcacatcaccaatcatgaacccgttgggtgacccccagtcacaaatgctgcagcaacagccttcagctccagtaccactgtcaagccagtcttcattcccacagccacatcttccaggtggccagcccttccatggcgtacagcaacctcttggtcaaacaggcatgccaccatctttttcaaagcccaatattgaaggtgccccaggggctcctattggaaataccttccagcatgtgcagtctttgccaacaaaaaaaattaccaagaaacctattccagatgagcacctcattctaaagaccacatttgaggatcttattcagcgctgcctttcttcagcaacagaccctcaaaccaagaggaagctagatgatgccagcaaacgtttggagtttctgtatgataaacttagggaacagacactttcaccaacaatcaccagtggtttacacaacattgcaaggagcattgaaactcgaaactactcagaaggattgaccatgcatacccacatagttagcaccagcaacttcagtgagacctctgctttcatgccagttctcaaagttgttctcacccaggccaataagctgggtgtctaaaaggacagcttctcttccactcaatattgccatttttccaaagaaacatgtt

SEQ ID NO: 1601 - DNA, 4555 bp, Homo sapiens
cctgtttttgttgccaagtctaaaggaccgacaacagccaaagtgcaaatcacattcttcaagagctgccgcttacgatttgttagtagagatggtaaaggggtctgttgagaactacaggctaatacacaactgggttatggcacaacacatgcagtcccatgcaccttataaatgggattactggcctcatgaagatgtccgtgctgaatgtagatttgttggccttactaaccttggagctacttgttacttagcttctactattcagcaactttatatgatacctgaggcaagacaggctgtcttcactgccaagtattcagaggatatgaagcacaagaccactcttctggagcttcagaaaatgtttacatatttaatggagagtgaatgcaaagcatataatcctagacctttctgtaaaacatacaccatggataagcagcctctgaatactggggaacagaaagatatgacagagttttttactgatctaattaccaaaatcgaagaaatgtctcccgaactgaaaaataccgtcaaaagtttatttggaggtgtaattacaaacaatgttgtatccttggattgtgaacatgttagtcaaactgctgaagagttttatactgtgaggtgccaagtggctgatatgaagaacatttatgaatctcttgatgaagttactataaaagacactttggaaggtgataacatgtatacttgttctcattgtgggaagaaagtacgagctgaaaaaagggcatgttttaagaaattgcctcgcattttgagtttcaatactatgagatacacatttaatatggtcacgatgatgaaagagaaagtgaatacacacttttccttcccattacgtttggacatgacgccctatacagaagattttcttatgggaaagagtgagaggaaagaaggttttaaagaagtcagtgatcattcaaaagactcagagagctatgaatatgacttgataggagtgactgttcacacaggaacggcagatggtggacactattatagctttatcagagatatagtaaatccccatgcttataaaaacaataaatggtatctttttaatgatgctgaggtaaaaccttttgattctgctcaacttgcatctgaatgttttggtggagagatgacgaccaagacctatgattctgttacagataaatttatggacttctcttttgaaaagacacacagtgcatatatgctgttttacaagcgcatggaaccagaggaagaaaatggcagagaatacaaatttgatgtttcgtcagagttactagagtggatttggcatgataacatgcagtttcttcaagacaaaaacatttttgaacatacatattttggatttatgtggcaattgtgtagttgtattcccagtacattaccagatcctaaagctgtgtccttaatgacagcaaagttaagcacttcctttgtcctagagacatttattcattctaaagaaaagcccacgatgcttcagtggattgaactgttgacgaaacagtttaataatagtcaggcagcttgtgagtggtttttagatcgtatggctgatgacgactggtggccaatgcagatactaattaagtgccctaatcaaattgtgagacagatgtttcagcgtttgtgtatccatgtgattcagaggctgagacctgtgcatgctcatctctatttgcagccaggaatggaagatgggtcagatgatatggatacctcagtagaagatattggtggtcgttcatgtgtcactcgctttgtgagaaccctgttattaattatggaacatggtgtaaaacctcacagtaaacatcttacagagtattttgccttcctttacgaatttgcaaaaatgggtgaagaagagagccaatttttgctttcattgcaagctatatctacaatggtacatttttacatgggaacaaaaggacctgaaaatcctcaagttgaagtgttatcagaggaagaaggggaagaagaagaggaggaagaagatatcctctctctggcagaagaaaaatacaggccagctgcccttgaaaagatgatagctttagttgctcttttggttgaacagtctcgatcagaaaggcatttgacattatcacagactgacatggcagcattaacaggaggaaagggatttcccttcttgtttcaacatattcgtgatggcatcaatataagacaaacttgtaatctgattttcagcctgtgtcgatacaataatcgacttgcagaacatattgtatctatgcttttcacatcaatagcaaagttgactcctgaggcagccaatcctttctttaagttgttgactatgctaatggagtttgctggtggacctccaggaatgcctccctttgcatcttatattctgcagaggatatgggaggtgattgaatacaatccttctcagtgtctagattggttggcagtgcagacaccccgaaataaactggcacacagctgggtcttacagaatatggaaaactgggtcgagcggtttcttttggctcacaattatcctagagtgaggacttctgcagcttatcttctggtgtcccttataccaagcaattcattccgtcagatgttccggtcaacaaggtctttgcacatcccaacccgtgaccttccactcagtccagacacaacagtagtcctacatcaggtctacaacgtgctccttggtttgctctcaagagccaaactttatgttgatgctgctgttcatggcactacaaagctagtgccctattttagctttatgacttactgtttaatttccaaaactgagaagctgatgttttccacatatttcatggatttgtggaaccttttccagcctaaactttctgagccagcaatagctacaaatcacaataaacaggctttgctttcattttggtacaatgtctgtgctgactgtccagagaatatccgccttattgttcagaacccagtggtaaccaagaacattgccttcaattacatccttgctgaccatgatgatcaggatgtggtgctttttaaccgtgggatgctgccagcgtactatggcattctgaggctctgctgtgagcagtctcctgcattcacacgacaactggcttctcaccagaacatccagtgggcctttaagaatcttacaccacatgccagccaataccctggagcagtagaagaactgtttaacctgatgcagctgtttatagctcagaggccagatatgagagaagaagaattagaagatattaaacagttcaagaaaacaaccataagttgttacttacgttgcttagatggccgctcctgctggactactttaataagtgccttcagaatactattagaatctgatgaagacagacttcttgttgtatttaatcgaggattgattctaatgacagagtctttcaacactttgcacatgatgtatcacgaagctacagcttgccatgtgactggagatttagtagaacttctgtcaatatttctttcggttttgaagtctacacgcccttatcttcagagaaaagatgtgaaacaagcattaatccagtggcaggagcgaattgaatttgcccataaactgttaactcttcttaattcctatagtcctccagaacttagaaatgcctgtatagatgtcctcaaggaacttgtacttttgagtccccatgattttcttcatactctggttccctttctacaacacaaccattgtacttaccatcacagtaatataccaatgtctcttggaccttatttcccttgtcgagaaaatatcaagctaataggagggaaaagcaatattcggcctccgcgccctgaactcaatatgtgcctcttgcccacaatggtggaaaccagtaagggcaaagatgacgtttatgatcgtatgctgctagactacttcttttcttatcatcagttcatccatctattatgccgagttgcaatcaactgtgaaaaatttactgaaacattagttaagctgagtgtcctagttgcctatgaaggtttgccacttcatcttgcactgttccccaaactttggactgagctatgccagactcagtctgctatgtcaaaaaactgcatcaagcttttgtgtgaagatcctgttttcgcagaatatattaaatgtatcctaatggatgaaagaacttttttaaacaacaacattgtctacacgttcatgacacatttccttctaaaggttcaaagtcaagtgttttctgaagcaaactgtgccaatttgatcagcactcttattacaaacttgataagccagtatcagaacctacagtctgatttctccaaccgagttgaaatttccaaagcaagtgcttctttaaatggggacctgagggcactcgctttgctcctgtcagtacacactcccaaacagttaaacccagctctaattccaactctgcaagagcttttaagcaaatgcaggacttgtctgcaacagagaaactcactccaagagcaagaagcc

SEQ ID NO: 1602 - DNA, 4087 bp, Homo sapiens
atccttccaatggatccttgtggtgccaggcaggaatgggctgcttggggacctaggaagcccccagggcctttctgctgcttcttctaccctcccccacacctttactcgactcactaacttgactcagctccaggtggatcggatcattttctgtgtcttcttagaagttgacttcaaaatctacaaaaagaaaatgaatgagtttttctccgtagacgataataatgaagaagaagaggatgttgaaatgaaagaagattcagatgagaacggtccagaggagaagcaaagtgtggaagaaatggaagagcagagccaagatgcagatggtgtcaacactgtcactgtgcccggccctgcttcagaagaggcagttgaagactgtaaagatgaagattttgcaaaggatgaaaatattacaaaaggcggtgaagtgacagatcattctgtgcgtgaccaagatcatcccgatggacaagagaatgattcaacgaagaatgaaataaaaattgaaacagaatcgcagagctcatatatggaaacagaagaactttcatcaaaccaagaagatgccgtgattgtggagcaaccagaagtgattccattaacagaggaccaagaagaaaaagaaggtgaaaaagctccaggcgaggacacacctaggatgcctgggaaaagtgaaggctccagtgacctagaaaatactccaggtcctgatgcaggggcacaagatgaagcgaaggaacaaagaaatggaactaaatgacaatcctcagcatcgcaaggcctctcctggctctgggggagctcgggaagatagcagcacacgctgtggaggagggtgggggtggggggaaggcaagtcccatggaaggacggggaatcctttactctaatttctccagctgcattttgttccgtttatctgcagaaaaagaaagaaaaaaaagaaaaaaaaagtttcctttaatttggtggagggacccatgttgacgcatctttcaggcattatccttgtaatttctgtcttttctcttacaactttgccccagggtcacagtggcttgattgaacactcacatgtgtatcctggcccctgtctgctttcttggttatttcacaaagctggtcacacagtggtttattcaaaggaaggggaggaagacagtggtttgataagctgcaggataaattttaggaatcaatgagcccagcagcagtataatccccagacagaggaggcaggatagaaaatgggcaaaagcctcggaaaccacttggaaaaggtctggacaatgaggtgaaaatattttcttcagggttcccaaggcacaatttgttccaagtggctaatgagaaatatggaagctgaattttttccagagcagagtgcagaggcataacagaagggtgggccctggcagccatctgggtctcttccttcctaaccatggtggcaggtgcatccttctttgacactgactttcagcagagcttacttggttcatgaggtcttcacatggagactaccagcaagaggtgactctctgctgcataactgtaaaggatggccctttgctaggtgttacagttaaaagctaagaaaaggggcactgcatttaggacccaaacatatgcctatgaatatcaaaagctcctcctgaaattgctgtgagttttccataaaagaatatcctgtcttcacccaaggcttgacagcccacagagtggtctcatttgaaattacaggaaattagagcttttgcttgcagttctgccttcctggcctgtgtttaaatgctgtcacttgtttatgccaagttcaaggctgattcaatggttggtcccctcacccagaaaaccctgaaggggaggatacagctctgaaggggggcagcagtactaaaaacccaagatgccagtggtatagtgggcacaagggatggcgaccatgaggatgccaggcatcatcaccaatatctatcctagagccagtataaggccagatgcctacttcccacagcctccccgggttccaaagtcatgtcattgttttcagtggaaacatatcgtttgttgcatatcttcttaaatccatcttccttgtaagggctttagaactaaaacttacttatattgtttttccttaacagagggagaaaaatagtggattattatttctaaaataaaaggatgttctgctttctaaatatcccatcaaaatcttcagttttgcacttttttgatggaaaattcatcttatcttcctatgactttggttttagcctttctgaatttgttaccccttctggatggcttatttgatatactggaatagttaacaagctatacttcagcatatgcactatattctaacaaattttttttaataaaatcaagacatcagcaagaatgacatttacgtgacctcataatgtgggattatggccttctgttgctattccagtttgatatggaagcatctatatcctctattgccattagatgttgttgcttttcagaaaagtaacgaaaaggctcgttttaaagaatccaagaaacgatgtcatccaaatattgacagtttctacatttcatgccatctttataactcaattgaaagttgccgtcattcttgtgaagtatttgacaagtgcaatctgctagaagctcgtttttcttgtgactcccaaatgttagtgctacttagcctcagtaatgagttacagttgagaaaaacatgagggaaacagagggacagagattttctaatgaacaatgatggaagagacctaatgtccttgctagaaacagccaggatggaaattatccagccctggcattctccttatcatcaatgacagtcattttattcatttatttcaaatgtgggtgggctagaagtggaaggagggaattctctctgcctaaaaattctagaagaatgaaagtaatctttgtatccaggaaactaagagaatgaggaataaatatcttcagcccgactcctgaatttgtttattcttccatctatagttagattgtgttttcatttttgctttgtcatgctttttggttgttatttggctatacagttttatgctttaaaacaaatgataaagttaatttccaattcaatagtgaaatattaacaatctaactatagccagatcaaagacacctgaacacagaaaacctttatttgctggtgctgccattgcacaggctgtacaatgaaatagatttgaaaagctgattgattttcctgcacataaattctggatgtcaatttccaaccaaactctaatccagctatgtggcatgaagagttacaggagggagggaggaaaatagccctatattagtcatgtttgcatacagaggatcaaagtaggccttcaccataatagttctaattaaaatggtcctcgctgtaggagagacaaaggggcttttcctctagctggtaactattcagatgatggacaagtcttctttcataaaagattacaaagaaggcatccgaatcactgtctgtgatactaggtcacatattaatcactgcagctaattgtaaatctttctatgaaacactgaaaagcctctttgtgaattaatacagttctgcttgatgcacttgatttgaaaagacatttctctgtatgtggcgcatgtcggctttgctttgaaaaataacaaagttagcagaatatgttcaatatattttcttggggaatagggtttttatcacatgattcattaaggatttgccttaccctgacatttgtgatataaaggaaaatcagaaaaaaagtaattttcttgatcaagatatgtttttacttaatgcaaataaatgtagtctgttgcttgcaaggaaaaaaaaatggcttctgatatctggtataaactgctaaataggataatacgtgcctcttttgttaaaccagcatttaaatgctggactgcttctaaatctgtttgtttcttttcatctgtgccatacactaaaaaacaactgttgccttcatactatatttgttagagcagaatacaaataaaatttgtttgagaggataatgtg

SEQ ID NO: 1603 - DNA, 5148 bp, Homo sapiens
ataaaattatgcaaagtattgtgacaaaactgcatcaatttgttgactattaaagtgctccttgaacattatatttcctgggtcttttctgtgtgtggagtcagcaaactgttttttgctacctggactttgtcttcttttacagctctggattcttaaaagtaccacataggtagcaaacctgtgaagggtatgagattttaccctacttgcaggctaataaagtgagcacaccacatgggttcatggatcctggcagaagttatgagactcataggtcagagacaaaggacagtttattatagcaatagcagtggccagattatcagcatttacactggttccctgagccccaggccccaagaagagggccaggtgagacctgcacacgcagtgggctgcattacaagaggaacccccatgcttaggggaccctggtatttgataatgggcagtaagcctgcctgacttttgctccagagacagacactatctctgtcatccaagactgttcactagataaacatccttgaaaatataagtctggaacctggcaattggtgtctattcttaccagatgtataaaaatgtgagaggccttggagaatcatatcccaagaatcagcagtttcttttactggacctttaagattgagacttgtaaggtcctgatgcagtgacttgtaaggtcactttgtctctcttgtgaatgttactgttttttctcttctgaggttatgaccaaagaatcctcaaggcgagtgatccttcaggtttgagacagccacatgcaggaagacaggacttgtagagtgttggggccaagtgtgtggttagaatccttggggtggggaaagagtttgttctagactccagtgtagtccttgtggctaccaggtctgacgtgccaaggacacgggaaagctgggagtgaggatactcatagtcatagcaccttacaccagaataaaagtttttttttttctttttaagtgatgagagaatggctagtctgattttgccaacatgggctgctatttgcttaagaccttgatggtataaggagtgaagatgcaatcagggtaaaaggcggtctggagttgtggtgtgctggcaaaccagccctctggggcaaaaaattaaaaagccttgatatggagtgtttgctgatacctatgatgtaaatattcccgccatggccactttgcagctaccagcaaggcatcctggcaccagggattgggaggagatggcatagtcctaagagtcagccttgggcattgggccatgtgggactgggcagtggggtatctggtctggttctaagtgctgtgatgaagcagtagcagctgtaatagctggcatttcccgtgtgctcatcacatagcagatgttattccaaggactgtatgttctttatcatccctcatttgatagacaagacaactgagacacaaaagggtgaaataaacagtaagtactccatcccaggccatctcatccagagggtgctgtcttgaccactctactactctggttgatgggaggcagtaaattgtccatcagtatacttcttcatcaaagctacatagtcaaaaagccacaggaggctgtgaggagaagctcactgctgctctgttgaagtctgtattggtttcctatggccactcttaacaaattaccacaacctcagtggcttaaaacaacacaaatatatcattctgtcatcctggacacgagccaaaggttgtcggcagaagcgaattgcttccagaggtgctatagggtgctgcccattccttgccccttttccgcttctagaggctgcccattttccttggcttgtggctgcatcattctggctgcttctattgtcacacctcctctctgaccctccctgcctccttgtaaggacacttgggattatgcccatccagataatctagaataatctcccattttgtgattcttaataacatctgcaaagcctcttttaccttgcagaataagatattcacaggttctggtgaggaggacagggacatctctgaaggggagggaagcaggagatagggtctggaggcatggaattggcttcctaaggccaattcaggctgacttcctagaactaagtcaaaaggaaaaccccaactttccacgctcaagtaacaaaaggaccagaggctgctcccttttgcaacctccccacccccagccccttttctgcatggcaggtgaaaaattgaaagtatcgctaattgatcccctcccacaaccaatcagactggtcttaggccaagtcttcatttgcctaggagtataactttgtaacttcagcctctgattggtcgttttacacaaccagtcagatgtttgtatagggtggtgtaactttgtaactttgcttcagcctctgattggtcccctcccacaaccaatcaaactgatcatggacctctgcttcatttacatagggtgtacaccaagtaaccaatgggaaacctctagagggtatttaaatcccagaaaattctgtaaccgggttcttgagctgcttaggctgctcccaccctgtggagcgtactttcgtttttcaataaatctcttttgttgcttcattctttacttgctttgtgcgttttgtccatttctttatcaagacgccaagaacctggacaccctccaccggtaacaggaggagcattagtcagcctaccacagactccaacgaacgttttttgagaggaaatgaaagaatattcctaagttattgggtgccttttcttcaggaatccctgaaagtgggggtttgcaattttccctggattgaaaacagaaatgcttcctacacaaacatgattgagaccttgtactctaggtgtaaaaaaacagagtaggtcatactctgtgggttatggtcagagagatctggttagaagttcccaggtaggcgacagccctagatgtgtgacacttctaggagaatctctggctatgtggatacgtccaggtgtgtaaggcagcctcagggactgccaccacttggtcacatacatgtccctccaactaatcctagctctcaaggacaggcggttctggggcctgtgttgcccatgagacttggtccacggcaagcctgtgacggagtgaaagtgaggggacacccaatttgaaaactcggcaggaagccagactccatgacatacaaatagatcaaagtgaatcggctccgttgtttggggaaatacctgaggtttgttgtttcgtgccaagaagattaacaacacggacacacgtgggtgggttaaggagcagaaagtttaacaggcagaaaaaagagaacagctcccccatgcagagggaggaggactccgaatggatcttcccattcctggcgggaagcagactgatatatagaggagggggtttgaagaggtggtatttgatttacatagagcccaagggattggtttgaccaggtgtgccatttacatagccctcgaagaaactggccattccaccttgatcttttattatgcagatagggttttttacttggccagagccttgacacctgcacacatggcaacaaacagaagggaggcgaaatcttccatattggatgcacctgtcttccaggtgcagctgccggcatttatctgtgcaagcttctagcttgcttatttatgcttgcagcttgacttttcaggctgctttctgttggaaaagaaatggttttgggggctgctttttattaaaagaaaagccttaccaaggactcctgtaccctatctgcctaaattttttttaactactatattaaaaggtctgtaagtgggagctggccctaaaagtaggttgtagagattatttggatgtgccaacaagcttcatctgcagcttggactgtctccattggaaggcctctggcagattttgtaaaaagttatataacaattttactataggaaaaacttggctacagatatgaatttatattacccatcattggctggttccttatcctgaacattggtttccttggaatctgattttggcttgtttggcctttaaaaaccccagaagaatggggtttctgccagattattttctggttttcagtctcactgaatgtcacaaaggccttggtttatggttcccaactggtaaagaaacgtcaaactttgcctctcttagttccttctacatgacaatgggtggcagttgctcatatggaagcatttcttttccccctaaagcctatgagacaggctgcaacttaaacccctattttattaaaggagaggaaatgtccaagagcccagagatagtgggtaaaagcatcataaggactagaaatggggtcttcttgttgctaattagtaggggtgaggggtaagtggcagatgtgactgccatccatgcccagacagggaattgtccttgaacctactcatgcggtgtcttctggggtacagtgagtccacagggcaggacggccttggagtcaagagcccagactcacattctatctcaggcttcataactcaattgctccatgaccttaagccaatttagttccctcatctgtaaaaatggggataacaactgaatttacctcatgggattgtgtaatgcccaaccttgtttttactaaccctgtttttagactctccctcttcctttaatcacctagccttgtttccacctgaattgactctcccttagctaagacagccagacagactccatcttggctctttcactggcaccccttcctcaaggacttaacttgtgcaagctgactcccagcacatccaagaatgcaattaactgataagatactgtggcaagctatatccgcaattcccaggaattcgtctgattgataacgcccaaagccccgggtctatcaccttgtaatagtcttaaagcccctgcacctggaactgtttactttcctgtaaccatttatccttttaactttttgcctactttatttctgtaaaattgttttaactagacccccccctcccctttctaaaccaaagtataaaagaaaatctagccctttcctcggggctgagaaaattttgagtgttagccgtctctcggtcgctggctaataaaggactcttaattcgtctt

SEQ ID NO: 1604 - DNA, 3619 bp, Homo sapiens
aattccaaatcatgctttagggcatggccatcaggcatctcttcctaatacacaggtccttttagattctgcctgtgatttacaaattcttcagcagtcaatactgcaggcaggtttaggtcaagtaaaggcatctttacaagcacagcgtgttcaaagccctcaacaaatagtacatcccttccttcagatggaaggtcatgttattcaaagcaatggtgatcattctcagcagcaactccatcctcaaaattctgaagttatgaaaatggacctctctgagtcttcaaaaccattacaacaacatctaacaacaaagggccattttagtgaaacaaatcaacatgattcaaagaatcagtttgtttctcttggatcgatgtgtttcccagaggcagtgcttcttagtgatgaaagaaatattttatcaaatgtagatgatatcttagcagctacagcagcagcttgtggagttacacctactgatttttccaagtcaacttcaaatgaaaccatgcaggctgttgaagatggtgattctaaatctcattttcagcagtcattagatgtcaggcatgtgacttcagattttaactctatgacagctacagtaggaaagccacagaatataaatgatacttccttaaatggaaatcaggttactgtgaacctttcaccagtacctgcccttcagtcaaaaatgactcttgatcaacagcacattgaaacacctggtcaaaatataccaactaaagtaacttcagcagtggttggaccaagtcatgaagtccaggagcaaagttctggcccattcaagaaacagtctgctaccaatcttgaatctgaagaagacagtgaagctcctgttgatagtacattaaataataacagaaaccaagagtttgtttctagtagtagaagtataagtggagagagtgctacatcagagagtgaatttaccttagggggtgacgacagtggtgtgtcaatgaacccagctaggagtgcacttgcactgttggccatggcccaatctggggatgcagtcagtgtcaagattgaagaagaaaaccaagatttaatgcattttaaccttcaaaagaaaagagctaaaggaaaagggcaagttaaagaggaagacaacagtaatcagaaacagctgaaaagacctgcccaaggcaaacgccagaatccaaggggaacagatatttacttaccgtatactcctccttcctcagaaagctgccatgatggttatcagcatcaagaaaaaatgagatagaagatcaaagaggtggaggaaaaacaaccggaagtcaaaacaggatttattgcttctttcttagattttctgaaatccgggcccaagcagcagttttccactcttgctgtacgaatgcctaacaggactagacggccagggacccagatggttcgtacattttgtcccccaccacttcccaagccttcatctacaacacccacacctttagtgtctgaaactggcggtaacagtccatcagataaagttgataatgaacttaaaaacttggaacatttatcttcattttcttctgatgaagatgatcctggatatagtcaagatgcttataaaagcgtctctactcccttaactactttggatgctacttctgataaaaagaagaaaacagaagccctacaggtggcaactactagcccaactgccaatactactggtactgctactacttcctcaaccactgtgggtgcagttaagcaagaacctctccactctacttcatatgcagtaaatattctggaaaatataagctcttcagaatcctcaaagcccattgaacttgatggtcttccttcagaccagtttgcaaaaggacaggacactgttgccatagaaggttttacagatgaggaggacacagaaagcggaggagaaggccaatacagagagcgtgatgaatttgtggtaaagatagaagacatagagacttttaaggaggctttaaaaacaggaaaagaacctccagctatttggaaagtacaaaaagctttattacagaaatttgttcctgaaattcgagatggtcaaagagaatttgctgctacaaatagttatcttggatattttggagatgcaaagagtaaatacaaaagaatatatgtgaagttcattgaaaatgcaaacaagaaggaatatgtcagagtgtgttctaaaaagccaagaaataaaccttcacaaactatcagaactgttcaagctaagccaagtagtagcagtaaaacttctgatcctctagcatcaaaaactacaactacaaaagccccttccgtgaaacccaaagttaaacagccaaaagtaaaggctgagccaccaccaaagaaacggaaaaaatggaaagaagaattttcatcatcccaatctgactcatctcctgagatccatactagtagtagtgacgatgaggaatttgaacctcccgctccctttgtcactcgctttttgaacacaagagcaatgaaggaaacctttaagagctacatggaattgcttgttagcattgccttggaccctgacacaatgcaagccttagagaagagcaatgatgagctacttttacctcatatgaaaaaaatagatggcatgctaaatgataaccgaaagagacttcttttgaatcttcatttggatcaatcattcaagaatgctttggaaagttttcctgaactaacaataattactcgagattctaaagcaaagagtggaggaactgctatttctaaaatcaaaatgaatggcaaagcctataataagaaaactctaaggacttctaaaacaaccaccaaatctgcacaagagtttgctgtcgatccagagaaaatacagttgtattctttgtatcattcactccatcattataagtaccatgtttatctgatatgtaaggatgagatttcttcggtgcagaaaaaaaatgaagatttaggacaggaggaaattgttcaactttgtatgaaaaatgtaaaatgggtggaggacctctttgaaaaatttggagaacttctaaatcatgtacagcagaaatgttcctgacttttccacaaaaatcccatctttttatagcactaatgaaatggcagatatggggtggtcaaagataatcagatgtcaagtagtggccttctgcaggccggccgcttccatcatggaactgtcattaccacctctgctgaaggacagtggtgcggcctttaggaacgaagttagtcctctggaaatggacctaaatcccaccacatttttaccctaatgaatgatttttctattttgtaaaccattgggtaacttgagtcatattttcagaaacattttttgacaaatgatgaagcatgcactaagtataatttttttttattgctagagaagtaacacttaaagtaacgattttttttttctgactccggctaaacaccagaatgacagagaagtggcagaaaccatatgtttgtactcacatctggccacaaaaccagaaatactgtacattatgtaaagaggtctggtgtggtgtgacatcctgtataagaatatcatcaatttaaaatataaaatttggaaact

SEQ ID NO: 1605 - DNA, 3789 bp, Homo sapiens
cgctgggtaccctgggcaagtcacttcacctgagcttcgggtcccagagccatgaacctggaaacacacctggtgcctactaagtgctccacagagagcagcactgcgactgacctcccagctcctccgggacttcccatcggcacccccagctccactgcacctcctccctcagggtctgcccatttagtgttctgggttatgagcccccaggaaggcccctggctacagcaatctgagccgctgtggggggggtctcaaccaaccgacaagctctctgctttcacagacttctacgctggaaagctggagccatgctgtcagccccagccacacacctgccacctcctgctgtgtgaccctggccaagtccctgagcatctctgggcttcactgtcctcaactgtataactacctaccctcctggatgaaaagacccatggtgtgcaaagtgttaaaagaggcctggcctggccaggcatggtggctcatgcctgtaatcccagcactttgggaggccaaggcaggtggatcacctgaggtcaggagttcgagaccagcctggccaacatggagaaaccccatctctagcaaaaatacaaaaattagccagacacggtggcaggcacctgtaatcccagctacttgggaggctgaggcaggagaattgcttgagcccggaaggcagaggttgcagtgagccaagattgtgccattgcattccagtctgggcgacagagtgagacaccatctcaaaaaaaaaaaaaagaggcctggcctgtactgtggtcagtgtcacagaggctgcccttactaccactactgtcgtcctggaaatcacccaggtggactgttccattctacagatcaggaagctgaagctaggggaagaaagggctcactccaggtctccagggctttctatgcatggacccagcagcagcaccggaccacctgggtacttgttagaaacccaagtcctcagccctgccctggagctcctgaatcagcactctggggatggggcccagccgctggtgttttaacaagccttcctccaggttctgatgcaagacagtgttccagaatgactggtccaggtcaagctccctctgcttggcctggccctggctccaggccccacccgtcttaccccatctcgggatgcagtgcaatggcacggggctcgtccatgtcctctgacaccaggatcttgtgggaggtgctgttgaggcacgtcacctcgatgtgttcagtgcctgtgtgggtccaatagaggcttcgggccacccagttgactgcgatgtcatcggggtcgttgatcttggtgttgatcagcgtctgcgccccagacccatccaggtatgccctgcggatggcccacacctcgtcatccgtccagtagacgtggccctccattgggtcatagttgatggcgatggcatgctggatgtcgtccagctgcagcacgatgtcggtgaagtccggtgtgtccagcgagaccctccattggtccgtctaccgggccagcagcaggacctccttggctcctgtggggacaggtgcagtgggccaggcaagggaaaaactcagccaggtccccagggctctccttgcaaaggctggtaatgttaggtgacacgcacccagcccatgctacgtggtcactcgttcatcctcatgacaggtctgggaggctggcactgttttctcattttatagatgagagaactgaggcacagagccaggccatcaggcttcaaccgctggatgggagctgcctcacagtcccccttgtcttctgccagcccctctcctggccacacaccagccccaaccacaagtcccaccgggtaccgagctgaagacccacctgctggccgtgctgctcagcgtccccagcacacccaccccaccttgcaggggctcacccttcccgcccagctcaacgccacctcatccctgaagctctctccctcccctccaccaacgagggcagcttcaggtcccaggaccgtgcctgggggggctcccaggcaggaccaaacgtacccatcaagtaaatcaccctctttactcactgcccagatgctcccgggtcactgagatgaagggaaaccctggttccgaagcccaggggcaccaagagctaacacagttttgtggccacttgagacaccaggcaacacaggtgcaagatgagaaacacctccagggcatgcgttctggtcacggctagacccagggccctggctccttggatggggctccaccgtggcctccacacagctaggccatcagaatgtagcgatgacccccagtaactcagacctggtttctaaacagggtcccacagagaacaggtaaggcactgtccatgcacttccaactgcgtttcagaaccaccccatgaagcaaccaccccacagccacctgggtctctgctgcaccccaggcccgagcctgctgctggctaagcaggttgaggccaagcctctccaagcatgggtggacaggcttcagggtggcacttacgcaggtggatgaggggagagcctagtcctctcaggatgtccctgcagacaggctggacacagctggggacaggaggatgctgaggtgattctagtctcaaaaaccccctctctagctgagggaaagatttgccggacctcaagattcgcacatattaaatccccaaggaaagttctctgctctgggcatctgtgccttgccaaactcaccagcgtggcctgacagcgtacggccggcacaagagaggctcgactcaggctctctcggcagccacagcaacactcaagagagcagctgagcagcagggcccagggatcagctgtggacggggtcctgctgctcaggcccagcagcatgtaaacccaaagaccccccaccacccactccacaggacacccccccaagctttcacccatggccctccagtgggcttctaagtttggggggcaggggcggttacaggattctcttatgaaccccctgtggcccaccttctacatgctcctgaccccccagggcccggggatccacacacagtggcatcagcatttctgattgtgtcctatgaccccccagttgggatttttcagagtttccggcagaagttgcatgtggagacccatgcagactcggggcccccagggtgccccataaccctgacacggatccttctgaggctgctggggtcaggatgtggctccctccccgagttagggcattgttcactgatttgttccagacctttctggtttcaaggatgcacagagccaagaaggtcagggtcagagatcccccctcaacatcatgtggccatgcccccacagtcacaatccgcatgggggcccggggctgagccagcccagagcatccctcatgccctggcccctagacctggccctgcagccaactgccaggtctcctgagtgccctaccaggctgcagccttcagccttcaaacaacagtacccaggctctggctgttgccaggaggaatgcagagacctgaagagctgttccaggatcccggcgtccagcatttcaaggaaggacaggagccccttctgaatcctgctccaagccccctcgtgcataatccgattcatccactagagggcgcccaggtgatggtgacagcggcacaggcccagggctagggaaacggaggcaggcaggctggggacagtgaggtggaggcagcactcagaaagtgccccaactgcctggctacaatggaaatctctgagagccaaattc

SEQ ID NO: 1606 - DNA, 4524 bp, Homo sapiens
ggaacctcggctcccgggaagccccgagcctgggggaaccctgggcaccctgtgaaccctgtggtctgcactggctgccctgctgctgtcgcggggctgcgggcggacgacctgagcccgagctccgagggcccggagcggggcgccagggcctagggtcgcgggggccaggggcgcgccagggtggctgagagagcgaaatgtcatcagtgcagtcacaacaggagcagttgtcccagtcagatccatctccgtcaccaaactcatgtagttcctttgagctaatagacatggatgctggcagcttgtatgaaccagtttctccccattggttttattgtaagataatagattctaaggagacatggattcctttcaactctgaggattcacagcagctggaagaggcatatagctctggaaaaggttgtaatgggagagttgttcctactgatgggggcagatatgatgttcatttgggggagaggatgcggtatgctgtatactgggatgaactggcatcggaagtgagacgatgtacgtggttttacaagggggacaaagacaataagtatgttccctactcggagagcttcagccaagttttagaggaaacttacatgcttgctgtaactttggatgaatggaaaaagaaactggaatctcccaacagagaaattattattttacacaatccaaagcttatggtgcattaccagccagttgcagggtctgatgattggggttcaacacccacggagcagggtcgaccaagaactgtgaagagaggagttgagaacatctctgttgacattcattgtggagaacctttacaaatagatcacttggtttttgtagtccatgggattggaccagcttgtgatctccgctttcgaagcattgtacagtgtgttaatgattttcgcagtgtttccttgaacttgctacagacacattttaagaaagcccaagaaaatcagcagattgggagggtagaatttcttccagtcaactggcacagtcctttgcattctactggtgtggatgtagatctgcagcgaataaccctgcccagcattaaccgcctcaggcacttcaccaatgacacaattctggatgtcttcttctacaatagtcccacctactgtcagactattgtggacacagttgcttctgaaatgaaccgaatatacacactttttctacagaggaaccctgatttcaaagggggtgtatccattgctggtcatagtttaggttcgcttatattgtttgatatcctaacaaatcagaaagattctttgggggatattgacagtgaaaaggattcgctaaatattgtaatggatcaaggagatacacctacactagaggaagatttgaagaaacttcagctctctgaattctttgatatctttgagaaggagaaagtagataaggaagctctggctttatgtacagaccgagatcttcaggaaataggaattcctttaggaccaagaaagaagatattaaactatttcagcaccagaaaaaactcaatgggtattaagagaccagccccgcagcctgcttcaggggcaaacatccccaaagaatctgagttctgcagtagcagtaatactagaaatggtgactatctggatgttggcattgggcaggtgtctgtgaaatacccccggctcatctataaaccagagatattctttgcctttggatctcccattggaatgttccttactgtccgaggactaaaaagaattgatcccaactacagatttccaacgtgcaaaggtttcttcaatatttatcacccttttgatcctgtggcctataggattgaaccaatggtggtcccaggagtggaatttgagccaatgctgatcccacatcataaaggcaggaagcggatgcacttagaactgagagagggcttgaccaggatgagtatggaccttaagaacaacttgctaggttcgctgcggatggcctggaagtcttttaccagagctccataccctgccttacaagcttcagaaacaccagaagaaactgaagcagaacctgaatcaacttcagagaagcctagtgatgttaacacagaagagacctctgtggcagttaaagaagaagtcctgcctatcaatgtggggatgctgaatggaggccaacgcattgactatgtgctacaggagaagcctattgaaagttttaatgagtatttatttgctttacaaagccatctatgctactgggagtctgaagatacagtattgctcgtcctcaaagagatctaccaaacccagggtatcttccttgatcagcctttacagtaaaaatgacccatctatggctgcttaatacggacattgagggatccttccccagaaaatccacctgtttgttgctgcaattttcctctcctcagctgcgtcatttcctgcatgttgcctgccacttactcaccactggggtctttggaagataatcttcctctttggaaatgaatggaaaagcaaaaggccctattacttttaaccactggcttcatataaacacttgccatttttttctgcatagctgggggtggtttgtgtctttaattctttgatgatagtttatagttgccacactttattgattagtacttgacagggtgtaaagcctattttgggtttgatttgttttgggtggggtagacatgtttttaaggaacttattgcttatctttagaaaatgttctagtttggaaacagattcttgagattcagaaggcattttggagtacacttatctcttgtttgtgttgaactgaaggctaagtctcagtggacatggaaaagacttttgggtgatttatttttgaacctgcatttctttcttatgtgtagtgtatgaagaaagactagaatgtagctttaaaaaagtgttgtttactctcttagaactgacagacttattgccagaaatcactgatgttcattgtttttgcaactgtttgagctgctgtaagagtctaaagttgacaagttagttcatgttaggtgcatctttataaagcaaagatgttgtatatcctaggcctcccttttatatttgatagaagttatttgctaatagcttctattcttacgttgaaaatagttgtaaaagctgatgaacctgaaattgtgtagcctctacaggctgctgaggttctaaataaaaccttttagtggtgcctttatggtgaaacagaatttgtcacctgccatttctacttgagctaaggtagtattgtgtatcctctttccttcttaggtatccataatccacaaagcatatttaaaaggctcttggcacgggcagcattggttgagcaggtaggtttggctagggggaaatgtttaacttgttctgaaagaaaaacttatgtctgtagggtccaagaaacagctattccagagttagtgtcagctgagtctggaacatatgaagtgaggtttacttctaagaacacaagtgactgcacactaattttgtcaaggcatcttttcactactttgctgtagatttttcttcttcattggtcagtttgtcattgtctttgtagttctctttatgataatcctttatacttgctctcagattccacaggcctctgtttatagagtggcaaaggcaggcgagctgtggtttattgtttataaatttttttataaatgttatggtattcaaagccactgacatttaatatttactgaagccattccttagacagcagtggtctttatccctttctggaaagaaaaggaaaatgaagggtaattactgtcaccatggagattgtagaggtaaggttggggtataggtcaggcctggcctttctttgtcatctgcttatagtctagtgctaagtatgccactaagtttcagatatatggaatactttatttttttaaaggtatataaactctgagttattgagaattaagtattcactgtatattaaggggaagcttttgccaagttgtggtcttcaaatttatgtttactcttcctattggcagaataggtgctatttaagagtaaaccaaaggataagcagagggagtccctataaccaaagatggacagcatagccctggatagccagataaaccactctttgtattaagaaatgtttctttcctagtggtgaggggtgggtaactgtgaaagagctttatatcttgtctattcatggtattatagctgtatattcccaggatgataagcttgattgaaatcctgtatttagtcatatattatttgcgctgcttcatttgtatcatgtgcaatctctagaccaaccctatttttaaactctggtacagcatcattttgtacatattcccagctgcagaactagtatcacttatctcagcaaaagagattgtttgcatggaaagattaatagcactgattagatttctaatattttgcatttttgaaatgtttgttttctacgtgattatatttaaaactttagtaaatactaacatg

SEQ ID NO: 1607 - DNA, 3896 bp, Homo sapiens
ccttttgctcactgcctcctaatctcaaggacccacgggatggaaggcagtccttttgctcactgcctcctaatctcaaggacccacgggatggaaggcagtccttttgctcactgcctcgcagtctcaaggacccatgggaaggaaggcagtccttttactcactgcctcctaatctcaaggacccacgggatggaaggcagtccttttgctcactgcctcctaatctcaaggacccacgggatggaaggcagtccttttgctcactgcctcgcagtctcaaggacccatgggaaggaaggcagtccttttactcactgcctcctaatctcaaggacccacatgatggaaggcagtccttttgctcactgcctcctggtgcagtcaggataatcagggctcgctgtcaggtgtcttggggaccatgttcctgatgggtttcttggttagctgggaactaagcagaagccccttggcgccagccctgctaataaaaaatctcctggaaagtagaaatggaaaaatatttccaattatgaatttgagagatgaaatcatgcatctggagaaaatgagcccacacctggaaagaagactgtctggaactaatggaggggaggctgcagaggaagacagcatcccttaggatggccccagggctctttatcctgtgaccttttacctgttgggagacacagcagcaagtgtaggaagccacgtattctcatctgtgcttgatggtgtatttcacaaagcccctgtctctgtgaggatgtgcaactctccagaaggatgctttgaagaagaaacaggaaggagcacagtcccaccatacctcttgcctggggcagtggtggaaaatgcacaggctcccaagcccctcagaatagggttaggttcaagagcgatgttcaaaatatctatcagccactgaagcccaggaaccaaataaacagaatagatcacagcctttgtcctgatgtggggtcccagaggcctgtgcggtaccaggaatgtacccattagttggtggatttaggtgccgtttgaaatttccaaggcaggtagaggagaaagacgaggggctgtggggctagggagaagagattcagggagcttggagaagtggtgatttgccaagctgtgtaaagcatgcatttcaagatcttagcagccagtgtgtccgacgggaattctattatggttagtggcctccttcgtctccccagacccacatttataaccaccacaatgtggatcacagtctactgtaatggtctgatcatgtgcctaatgccccaaccaagtaaaaacactttaaagacaggagttgtgtccttttaataagtgcacccaatgtcaagagtgatgcctgcctggtttctgtttcatgcctggagaatttgcattggtgagttgaggacagccgccaaggtgtcagggcagggatggtgggcacagtgggcagcctgtggccggtgtcttgccatggtgaggaggtgtgagtctccaccgggaagcagggccgtaggaggccagctaaggcatggatcccaccctcaaccctcagagtggctcccatgctccacccagggtggcaagagggaacggccaatgccagcagtcagttcagtactctgcctccattgctgttttcccagctttctgtgcagatcctggagcagccagaggcagcataaagctggggagagaggaggaggaggaggaaagatggaagagcccacactccttcctccgaggctccgggagaggaacatctccctggactggaaggttccaattagacagtactagtcttttaaaatagctgacgatgactcttaattatctaaaataattatatgtaattgagatctggcacaggctggagaaagaaatcaagctttttatatttgtctcctcattgagtttagctcacttaatccactggatacacatctacccttacaacaaatacttactgagaaactattacagataagacatggtcctgaggagcaagggcctgcggatacaaattgttcaatgatctctaacctctggcatctcagtccaacagtgggaatggtggctcagcaactcaatacagcataacaccaagagggctgtcataaaaggacaaacacattaaaaattactatggagaaggatgaaggtaattgtctaggtggctggcagctgtggcctatgcccttgtgtgcccatgctgtggtctctactaacactccatgatgggaaatgccccaggagacggatcctgcctgtgggtagtgggtgcttttgaagaaagtgagatggaaacagactagctaggaagccactggatgtggggcaggatggtgtgtagggacaaaaagaaaagacaagaacccgttttgatagaatcgctcactgggaacatctttttttatgaatatcaaactaattctccaagtcagcctggagtgcagagtggccagtgggaatgcatgccgctgaaattgcttaattaaaggcatgatatcctgtgttcatttaatactttacttcatggtcactgtttcttatctcacagcaaggtccaggcctcagcatcatgcagagaacactgcatcatccagaggccagcatcagagcctcctgggtaactgcaggaaggggtccttgtcttggtggccccaagtggaacacctttcaaatgaatgcccccacctatagggtgggtgtatggagggtgaaggagaagcgatcacacttatggtttcaggacccagggaagataaaaaagcagaggtgactgagcgtctggggaagaaggtgataaacagcttctcagagcttgcagcacagacagctccattcataacttgttaaatggaagctcaggaatgctttcaacaagcggggacatcttatctgcagcatggatgagaaatttcactcacaacaaagctcggcatagaaagggctcttatctcagagtccagaatgaggatattagtaacactgcctgcttctttctcaaaccctattagcgtcaggtaataggtttcaccagtggcttttagcatttgctcagctgcagagagctactgaaaaagaaagtttctttggaaacaagaagacttatactgagaaacattacccgatcattgaggttgctattgattcaggtatttctgaatagttgcctggaaagcatttctgtagagtgagtcaggcttttgcccttcacttttgttttgaagatgagagtagttgcttctgggcaaggtttcaggaagccaacatacacacacacacacacacacacacaaaactgtgtatgtgtgtgtttctgtgaatgtacgtctttatgattttatgctttactgaaatcgtttgaaactaagggaatacatgaggaagcttctagggatccctgaagttcatgaatttgtatagaagacatctgtggctttttaaaatttgtactggagagcagggccatgctctaattaatgacacgagtaaatatacaaagcacttctgcctacattactggtgaaaaggcctgaaagaggtaggtgagagctatgctttctataaggttggagcaaacaacaaatgcaaaagccctgagttaggaacgttcctgagatgctccagaaatagccaggagggcagtgtggatggagcagcgtgagtgaggaagggagttgtaagtgatgaggccagagagaactgatgtgtaatggtatgggtacggcttacacaccatcacacatcagttctggtggccagtgcagtggctcccgcttgtgatcccagctactggggaggccaaggcaggaaatatagcttgagaccaagaatttcagacctgcctgggcaacatagtgagaccctgactctac

SEQ ID NO: 1608 - DNA, 4990 bp, Homo sapiens
catgggcaccttctgatatttggttttggatgcagcaaaccatatgaaaagattcctgatcagatgttcttccatactgactatcgaccacttattagagattctaataattatgtcttagatgagcaaactcagcaggctcctcatcttatgcctccaccattcttggtagatgtagatggaaatcctcatccaaccaagtatcagagattagtaccaggccgagaaaattctgcagatgaacatttgattccacagctgggctatgtggcaacaagtgatggagaggtgattgaacaaattataagcctgcaaaccaatgataatgatgaacgcagcccagaatcgagtattcttgatggaatgataagacagttgcagcagcagcaagatcagagaatgggagcagatcaggatactattccaagaggactttcaaatggtgaagaaacaccccggagaggttttagaaggctgagcttagacattcagtcccctccaaatattggtctgcgtcgtagtggacaagttgaaggtgttcgtcagatgcatcaaaacgctccacgcagtcagattgctacagaacgtgacctgcaggcttggaaacgaagagtggttgtaccagaggtaccactaggcatatttaggaagctggaagacttccgattagagaaaggtgaagaggaaagaaatctttatataataggaagaaaaagaaagactcttcagctctcacataagtcggattcagtggttttggtatcacagtctagacaaaggacatgtaggcgtaaatatccaaattatggtagaagaaatcgtagctggcgtgagttatcttctggaaatgagtcttcaagctctgtaagacatgagacttcctgtgatcagagtgaaggttctggttcttcagaagaggatgaatggagaagtgacagaaaaagtgagagttacagcgaaagttcaagtgactcttcatctagatattccgattggacagctgatgcgggcatcaatttgcagcctcctttaagaacatcatgtcgtcgacgaattactcgattttgtagtagttcagaagatgaaatatctactgagaatttatctcctccaaaaagaagacgaaagagaaagaaagaaaataagcctaagaaggagaatttgcggaggatgactccagcagagcttgcaaatatggagcatttatatgaatttcaccctccagtttggattactgacaccacacttagaaaatctccttttgttcctcaaatgggtgatgaggtaatatattttcgacagggtcatgaagcttatattgaggctgtaagaagaaataatatttatgaactgaaccctaataaggagccatggagaaaaatggatcttagggatcaagaattggttaaaatagttggaatacgatatgaagttgggccccctacactctgttgcctaaaactagcatttatagatccagcaactggaaaacttatggacaaatctttctctattagatatcatgatatgccagatgttattgactttcttgtattgcgtcaattttatgatgaagcaagacagaggaattggcagtcttgtgacagattccgctctattattgatgatgcttggtggtttggaacagtgttaagtcaagagccataccaaccacagtatcctgatagtcatttccagtgttatattgttaggtgggataatactgaaattgaaaaacttagcccatgggacatggaaccaattcctgataatgttgatccacctgaagaattaggagctagtatttctgtcacaacagatgagctagagaaattgctctataaaccacaagctggtgaatggggtcagaaatcaagagatgaagaatgtgatagaattatcagtggaggctgtctgcgttagtttgggaagtcagatatatagaacataatgccagaacatttaacgaacctgagagtgtaattgcaagatcagctaaaaagataactgaccaacttttaaaatttatcaagaatcaacactgtacaaatatctcagaactttctaacacatctgaaaatgatgagcaaaatgctgaggatttggatgatagtgatcttcctaaaacatcttctggaaggaggagagtccatgatgggaaaaaaagcatcagagctacgaactatgttgaaagcaactggaagaaacagtgtaaggaactagtgaacttaatttttcagggtgaagattctgaaccatttagacaacctgttgatttggttgaatatccagactacagagatattatagataccccaatggattttggaacagtaagggaaactctagatgcgggaaattatgacagccctttggagttttgcaaagacatccggctgatatttagcaatgcaaaagcgtatacaccaaacaaaagatcaaagatttatagtatgaccttgagattatctgccttatttgaagaaaaaatgaagaaaatctcttctgattttaaaattggtcaaaaattcaatgaaaaacttcgaagaagccagaggttcaagcaacggcaaaattgtaaaggtgacagtcagcctaacaaaagtatcagaaacctcaagccgaagaggttaaaatctcagacaaaaataattcctgagttggtaggttctcctacccagtctacctcaagtaggacagcttatcttggaacccacaagacaagtgctggtatctcttcaggtgttacttctggtgactcttcagattcagcagaatcatcagaaaggaggaaaagaaatagacctataacaaatggttctacattatctgaaagtgaagtggaagattctttagctacctctttgtcatcgtcagcttccagtagttctgaggaaagcaaagagagttccagagctcgtgaatcctcctcacgcagtgggctatccagaagcagcaatctcagggtaaccagaactagagctgctcaaagaaaaactggtcccgtttcattagcaaatggatgtggcagaaaagccactcgaaagagagtctatttaagtgattctgataacaattcattggagactggtgaaattctaaaagccagagctggaaataaccgaaaagtcttaaggaagtgtgctgctgtggctgccaataaaataaagctaatgagtgatgtagaagagaattctagctctgaaagtgtctgttctggtcggaagctgcctcaccgcaatgcttctgctgtagctagaaaaaagttattacataattctgaagatgaacagagcttaaagtcagaaattgaagaagaggagctaaaagatgaaaatcaactattaccagtgtccagttctcacactgcccagagcaatgttgatgaatctgaaaacagagactcagagtcagaaagtgatttgcgggtagcccggaaaaattggcatgctaatggttacaagtcccatactccagcaccttcaaagacaaaatttcttaaaatagagtcttctgaggaagactctaaaagtcacgattcagatcatgcatgtaacagaactgctggcccatcaacgtctgtgcagaaacttaaggcagagagcatctcagaggaagcagattctgaaccaggaagatctggtggtaggaaatacaatacatttcacaagaatgcgagtttctttaaaaaaaccaagattctgagtgactcagaagactctgaatctgaagagcaagatagagaagatgggaaatgtcataaaatggaaatgaacccaatttcaggaaatctgaactgtgaccctattgctatgtcccagtgttcctcagatcatggatgtgaaactgatttagattcagatgatgacaaaatagaaaaaccaaacaattttatgaaagattctgcatcacaagacaatggactaagcagaaaaatttccaggaaaagggtctgttccagtgactcagacagtagtttacaggtggttaagaaatcatcaaaagccagaacaggtctcctgaggattactcgaagatgtgcagctacggctgccaataagatcaagctcatgagtgatgtagaagatgtcagtttagaaaatgtgcacactagaagcaaaaatggaaggaaaaaacctctccatcttgcttgtactacagctaagaagaaattgagtgattgtgaaggaagtgtacattgtgaagtaccaagtgaacagtatgcctgtgaaggcaagccacctgatcctgactccgaaggtagtacaaaagtgcttagtcaggctctaaatggagactcagactctgaagatatgttgaattcagaacacaagcacaggcataccaatattcacaaaatagatgcaccttctaaaagaaaaagttcctctgttacatcttcaggagaagattcaaaaagtcatattccagggagtgagactgataggacattttcttcagagtcaaccttggcacaaaaagctactgcagagaataattttgaagtggaactgaattatgggctgcgcaggtggaatggcagaagactcaggacctatggaaaggctccttttagtaagacaaaagtgattcatgattcacaggaaacagcagagaaggaagtaaaaaggaagagatcgcatcctgaattggaaaatgtgaaaatctctgaaacaactgggaattcaaagtttagacctgatactagttccaaatcatcagatttgggatctgtaactgaatcagatattgactgtactgataatacaaaaaccaaaaggaggaaaacgaaaggaaaagcaaaagtagttagaaaagaatttgttcctagagacagagaacccaatacaaaagtgagaacatgtatgcataatcagaaggatgcagtgcagatgcctagtgaaactctgaaagcaaaaatggtacctgagaaagttccccgcagatgtgctactgttgctgcaaataaaataaagataatgagtaatct

SEQ ID NO: 1609 - DNA, 3742 bp, Homo sapiens
aaaaaaaaaaccatctccaagctgggtgcaatgtctcatgccagtaatcccagctactcaggaggctgaggagagaggattgcttgagcccaggagttcaagtctagcctgggcaatatggcaagacctcatctcttaagaaaagcaaaactccaccttccatgccccagatgaaaagtgataaaagagagtgggcctttgtgaagaccgcaagacataactggtattcacgtagattcttcttcctatcaaacgatgagctgctggaaatcttgtccgagacaaaggaccctctccgagtgcagccgcacttgaagaagtgctttgaaggaattgccaagcttgagtttacagacaatctgggaattgtgggcatgatcagctcggaaaaagaaactgttccattcatacagaaaatctacccagctaatgccaagggcatggtggaaaagtggctccagcaggtggagcagatgatgctggccagtatgcgagaagtcattggacttgggattgaagcatatgtcaaggtccctcgaaatcactgggtcttacagtggcctggacaggtggttatctgtgtctcctccatcttttggacccaggaggtgtcccaagccctggcggaaaataccttactggattttctgaaaaagagcaatgatcagattgcgcagattgtccagctggtgcgagggaagctgagcagtggagctcgactcactctcggggccctcacggtcatcgatgtccacgcccgcgacgtggtggccaagttatctgaggacagggtctccgatctgaatgatttccaatggatctcacagctgcgctactactgggtggccaaggatgtgcaggtgcagattatcaccacagaagccttgtatggctatgagtacctgggaaactccccccggctggtgatcacacccctcaccgaccgctgctacaggacactgatgggagctttgaagctgaaccttgggggtgctccagagggtccagctgggactggcaagacagaaaccaccaaagatttggccaaagccttggctaagcagtgtgtggtcttcaactgctccgatggtttggattacaaagctatggggaagttcttcaaggggctggcacaggctggagcatgggcgtgctttgatgagttcaacaggatcgaggtagaagtgctgtctgtggtcgctcagcagatcctcagcatccaacaagccatcattcggaagctaaagacattcatctttgaagggactgagctctctctgaacccaacctgcgctgtgttcatcaccatgaaccccgggtatgctggcagggctgaactgcccgacaatctcaaggccttgttccggacagtggccatgatggtcccagattacgccctcattggagaaatgtccctctactccacggggtttctggactccagaagtctcgcccagaagatcgttgcgacctaccgcctgtgctcggaacaactgtcctctcagcatcactatgactacggtatgcgcgctgtcaactctgtgcttactgccgcaggaaacctgaagctcaagtatccagaggagaatgaaagtgtcctgctgctccgggcattgcttgatgtcaatctggccaagttcttagcgcaagatgtccctctgtttcagggaattatatctgatttatttcctggagttgttcttccaaagccagactatgaagtttttctgaaagtgctgaatgataacatcaaaaagatgaaactccagccagtaccttggtttatagggaaaattatccagatctacgaaatgatgctggtgagacatggctatatgattgtaggagaccccatgggcggcaagacctctgcttataaagtgttggctgcagctctcggcgatttacacgcagccaatcagatggaggagtttgctgtggagtacaagatcatcaaccccaaggctatcacgatggggcagctgtatgggtgctttgaccaagtgagccacgagtggatggatggtgtccttgccaatgctttccgggagcaagcgtcttcactctctgatgatcgcaagtggattatatttgatgggccagtggatgctatttggattgaaaatatgaacactgttctggatgacaataaaaagctgtgtctcatgagtggggaaattatccagatgaactccaagatgagcctgatcttcgagcccgccgacctcgagcaagcctctccagccactgtgagcaggtgtgggatgatctacatggagccccatcaactaggctggaagcccctgaaggattcctacatggacaccctgccctccagtctcaccaaggagcacaaagaattggtcaatgacatgttcatgtggcttgtccagccctgcctggaatttggtcgccttcattgtaaatttgttgtccagacatctcccatccaccttgccttctcaatgatgagactgtactcttctctgcttgatgaaatcagggcagtagaagaggaggaaatggaattaggtgaaggcctgtcaagtcaacagatctttctctggctccaaggactgtttctcttttccttggtgtggaccgtggctggcaccatcaacgcagacagcagaaagaaatttgatgtgtttttccgcaacctgatcatgggcatggatgataaccacccaaggcccaaaagcgtcaaactcaccaaaaacaacatctttccagaaagaggaagcatctatgatttttattttatcaaacaagctagtggacattgagaaacgtggacacagtatatcaccaaagaggaggaaaaagttccagctggtgcaaaggtctcagaactcatcatccccacaatggagacagcccggcagtccttcttcttgaaaacctacttagaccatgagattccaatgctgttcgtgggtcccacaggcactggcaaatcagccatcaccaacaacttccttctccaccttcccaaaaatacgtacctacccaactgcatcaatttctctgccagaacctcagccaatcagacccaggatatcatcatgtccaagctggatcgacgacggaagggccttttcgggcctcccatagggaagaaagcagtggtgtttgtggatgacctcaacatgccagccaaagaggtgtatggggcccagccacccatcgagctcctgaggcagtggattgaccatggttactggtttgacaagaaagacacaaccaggctggacatcgtggacatgctgctcgtgacagccatggggccccccgggggaggaaggaatgacattactggtatgtgaagggaagagctcattcctctttccctccatccccagcagagctgggccacctttatgaaaggtgggttggtgtgccacagtctgtcctgccaaaccacgtggcaggagcatggagcagaagcatgtgtaggctacaggcatcatgttggaaattgtgtgaaatagaaggggacgatggcaagaagatgtgaggagtgtttggctaggccctagagaaacagagagtctcataggaaaaggagagttcagtgtggccagcatgtgttccgggagggaggctccatccagaagcctcaactaggggtgcatgacagtcatccattgtattcgttataattctttaggttgccagagacagaatgcctaacccaaagtgccctaagcaaaattaataacaataaaaatagcaaataaat

SEQ ID NO: 1610 - DNA, 3038 bp, Homo sapiens
aacgggacgcggctcctgggtggcgagcaggcgcgtgtgtagggacgaagtttcactcttgttgcccaggctggagtgcaatggcacaatctcagctcactgcaacctctgcctcccgggttcaagtgattctcctgcctcagccttccaagtagctgggattacaggagttagaaatggagtcaatatatcttcaaaagcaccttggggcctgtttaactcaaggtcttgcagaagtggcaagagttcgcccagtggatccgatagaatatttagcattgtggatttacaagtataaggaaaatgtgaccatggaacaactgagacaaaaggaaatggccaagctggagcgtgaaagagaattagctctgatggagcaggaaatgatggagaggctcaaagcagaggagctcttacttcagcagcaacagctggcattgcagctagagttggaaatgcaagaaaaggagaggcagagaatacaagaactacagagagctcaagaacaattaggcaaggagatgagaatgaatatggaaaatctagttaggaatgaagatattctacattcagaggaagcaacactagactcaggcaaaacactagctgaaatcagcgatcgttatggagcacctaacttgagcagagtggaagaacttgatgaaccaatgttttctgatgtcagtatcagtgtgttttgtgaaaaaactcgtttttgtttttgtttttgattttttttacttaggtaaagcctagggaaaatgaggctaggccaggattggttggcaaataggccttttgcttcagagaaagaaaatcagttccctggttgcggattatattcctaattggcattctgcccttttgtgaagtgtgtcactggcttatctatatctccgtatctgtgacttcaaaacctcttcaaaatatgttttaaaatcattttgtgaaatatataatctttaaatttggtgtggggggcacgatttttgttctcagtagcaaaccctggaaccaaattaatgccttaatgagaatgcatgcttctccagtatgtaagtacatttgtttatttaagaaacatgccacatcttccatatgccaggcactgtgcctgatgctgtggtgaataaggcgatggctttgaccttatggagtttattgtcaggggagaaacagacaattagatgaacatttaatagtcatggttagtgggaccacataatttattgtccaaaccagtatgcttttgagaatgagagccggatcagcagatgtaagccaggactgtcctggaagaagggtacattttggtcactttaattggtgtacacggacaaggggggacagccagcacagttgaggaacctcagtcagggaaggaagctaatgatttgctactcactggtggcatgggaggctgaggatagtgctccaggcagagagcatggaaggtgtgaagacccagataggagagcgtgtagagggagtgaggcagggaggggtgagagctgaggccagggagaaagcaggggccagaccatgaaagcacttgtcatttctgttcagaggcttagattttatcctgaaggcagtggagactcatatgatgagagctacattttgcaaagaccatctggtaacagtgtggggaagaaaatggagaagtaggtgtcaggagatggcttaggaggtagtaatctaggggacaagatgtcgatggcctgaagtaaatgttgttttcaagagctgttcagaaaatggagctgcacagactcagtgctaattgtttaaagttttattaaaggtcagctatgatttggcactatgcagggagctagaaaatgccaatgaacaaaatggattgggcttctgcccttgggggccgtgggccaatggggaaggttctttgagggacagagtagggagagacctgacctgggctggacaagtcttcctcaggaggtgaagttcaaggaattagcctgagatgagcccagaggaaagagacagcaaaatgctttcaagggactgaagtcatccagtattaatggctaacgtccatggagctaggaaaatggtgtgattttaagctggagaggtggataaaggcagagcacactgggtcttgtatgttgccttagggattttggacttaagtgcagtaggagttattgaaaggacttaaagattcaatctgtgtttttataaggtggagagaggattggtgtggagcaggagtggaaaaagggagaccacttaggaagttattgcactgatccagatgtaagatgactagggttagacagcagagatggagggaactgagtggatttaagattggcttacaggatcagtgcggggcagggtcaggatgaagcctaaatgtcttccttgggctactgagttaagagtgttaacatttgatgagttgatgaacataagaggaagcaggtttttaaaaaatgatggcttcagttgcagagatgttgactctcaggtggctctgagatatgcaggtgaaaacagccaagaacagttgatgttaggaaggggcccaggccggagatataaattcagcagtcatgggcatatgtgctgaatgaagcaaggggattgagtaaggtacctaggagagagtgcagtgtgtgaaggcctgggggctcagggaggaaccattagcaattctaacattgaagggatggccacaggaagaggagcctacaagaaggatgagaatgcatagtaagagaagtagaagaaaggatggaacaataactactttgagaacataatttatggttatattcaatttgagtatcatttgaaatcatctgaaactcccaaaaagtttcattcatgtagtcacatagaagttacctaaagtttatttctttggcttgtgccttttcacagttctaattgtattaaggcatatttactttttgttttgcttttagattgcattaaacattgatcaagatttgtaggaccaaccaacctaagagcaataaatgtttttgtttgtttcaaatttc

SEQ ID NO: 1611 - DNA, 4109 bp, Homo sapiens
caatgggtgttgttagcccaagaatttcataatgtggtgacaatgggaccttaacttgttcactcatgccaacagcagcagaagacctgtggcagagtgctagcaggtgtcagggtgcctgcctccctgcgggtgtttgccacaatggcagaggcaacgcagctgggggagagggtccctgctgatgactgtgtgtgtggtcatgctgaagattgtgccttctctgtgcctcacaagcagaggaggttgctcctagggggagaaggatctgctatactctatgccatgctagcacaagggcaaggggaaggtgctggtaggggtggggctagctgtgcccatcaagactccatctgcaatggtgatcagtgggaagaggaggggcaggactgcactcccgtgctctggcagggcaaggaaagcaaaacctgcctgatcagacactcaccagcaaagtgatgtggggagttgccctgggcccaggggaagctgcagtgtggggagggagcatgtgggctggtgcatggtgatggggtactctgctggtgctctccactggtcaggcatggtctgccagtgcagaagctatggtgtgggcccccagagcccccaagactgctcagcaagcaggtgtggcctggctggggccccaggagaggccagcagagcaaggggtcctcaagttggactggccctgtttgatgggcaagaccaccctgcagagttcaggtctgatgattccccgagggctaaagtctcctgtgggagcaagttgagcctagtggggatggctgtccctggccattctccactacagacacttctacgcccaaccctctgggctccacatcaactggcttgccacccctaccacttctctaagcagctctccctgacaactcgatgagtgtctgtgctggtcaaggggatttctcctgccagggttccagaggcctatgatgagatcaggttgctctttgccagttcaactcacccattccccaagagcctttggggaccaagaacaagccttggtacataggcttgcatgcagcattcccagttactccctttctgccctgcttctgcatcttcccttcatctactctcagtgccttccctttgaagatctattaggagcatgtcagtcatctctgtccctcagtgggagctgttccacctggctgtatctagttagccatcttgcctgatcctgatttgaaggatttttctggtggagttgaatgatcacccgtctcagcagctgactcttcactttaaacccaggaccaacctcagccatagtcccatggcagaggcaccagagactccttccaagtctcctggaccaacactaactcatagaactggtctctgatcctccaccatcatttaggttcatgacattggcaatttagggagtgtggggaactctgagacccttgtccaagggaaaagatgaccataaaaagctgtaaggcaaaaaggtcattggttaccttgttttgtttcccaaggccaggtgtgaggaggatgtggacctgttcagagaggttatctacacactcctgggactcatgatgaacctgcgtcttcaggctccctttgtctctgaggtatggcattcttgtctccctgcctggagccctgggacaacctgtacacattctgtggcataaaaccattctcatgttcacgaagagacagaagcatgtacactcacacactggccgtggaatgggaaaaggctggagggatgcgctctccctttgctctgctgagggatggatggatcaccactcagtcatgtattcactcagaaaacagactgggtatccaaggtgtgctgagcagagtatgaggtgctgcatttacaaagtcaaataaaaggcggttcctgctatcagggtaatgccctggagttaggggagacagacatggggaggaataaaagcagtaaaagatggtgttgtgagggaacctgggcatagtgtggtggtgctaaaaaggagacggtgctcagaagaagctccgctgagaattcagattgtcagaaaattaaaatctcctgctggcctctccccattgttgtaggtttgggctgtggaggtgagcagaaggtgcctgtctttactaaacagccaggatggaggaatcctgacagtaagtttctcccagggaaatccagaagcagcttccattgttcttgttttgttttgttttgttttgttttattatcagtgtaatctttttgaagttgccacctttgagaatctgctgactctgagatatggtgtggatatactattcagaataatgtacacaagcacataaataccaggttttgtctacagtttcagagatttggtgacctccttgctgtgtccgtcatctgtggatcccctagagtccaggaacccaacttaagaatcccccttccgtatggtctgaaatttaaccagcttagatgatataatcgatccgatctgtcctatttcaaaatatcctgtgcaaattggacagatcaagtgtccaacttatttagaatcccttttttccataagaaaaaaaaaaagccaagcccatattttaagccagtgatcctagaggttgtttgtgcataatagttttaccctctttttaaaatatatgctgaaatggctttctcaattctgtgtctgacatttgagtaagaaaactgagaaaggcctatatgttagcacagtgcatcaggagaagaatattagtatgattcaagaggctatttgccatcaccctagaacgtattcttcactcacattaagtgatcacccgtttttctccctgtcagggcaggaccctaatggctagggaagcaattagggccacatctagggtgggtctgggaaaccagcctttcaagggttgcagactgaggactgcctccacagtttaaaaaatgttctgagtagatccaacataccctgtttgggggtagcactctttaaacgtccccaaagtcaattcagacaggatagggcaaaggttttgtgcgtgtgcattttcacagacggggcatcgtagctttcatcagatcctcaaaagaggtctatgacccccaaagtggtaagcaccaccgtttccggatggtccagacctaaaggtgagcctacactagtgcctgagtaaacctttaggagagctcttgggccagatttccccagcattccttgtgtgccacgttgggtgcttcccagcttgctgagcagagcagcagcttcaccatgggcatctggtccttgtctagcacagtctccactgtcttgggcctgaaaggggatccgtggtgtcaactatagcaaaattctaggatctttaggaagcagattagggaaacaagattgataatacacaagtttatcttttctccctctggagacctcattaaaatgagattaaagccattgggggggaacaaaaaaagtagagacctacgttgacagtgaacaggcaatggttaccaataggtaagtaattttaacaagtttcctgaagatggagaacagctgcaagggtggtaattaatgaggcagggctgaggaaacctttgtatggagtacaaatggaggaacacgtagctgggcagtagcaggtttgccttataataccctggagaggatgaagatttcaaaactcccgatacaacagagagcagaagtacaaggcagtggagctgcgtttgctggcaggcatctatcctccaggcataaaatcagaacacttttatctctaaagaactgaaaaactggagaaaacatttttctttctagtatacgggggtgccacctctatatctttccatacttctgataaacttcccataaacatagcatgcccaaacatattttcttgcttttttcatacatgtgattgggcaggtaaagggtcaaccagacattgcaggaaagctacacacataaataggaaaaccaagataaacataaaaattgatccaaaagaaatagagatgatataggaaacagaagaaaaaaatagtaactatcatttgtatcctgagaaagatttaagatagttatatccataaaagagtaacagcttggcatttattt

SEQ ID NO: 1612 - DNA, 3608 bp, Homo sapiens
atttggcctccaaccatccctaagaggcaaaatgtttttgcctgcagtcttagttgcagaactgttttctgcccgattgcccagaagctgaaggccttggctcccgtgatcaacactttagggaaatacgcaatgtttccatgtctgtccccacctccacccttgatagccaatcaccacctacagcccacaccgccaaatgcacagccctttgttctctcatgccccatggttcccgtgaacattcagtagagatccctaaagaccagcttgcctcaccaacagagccaaggccttgggagcagcagtgctaccacggtaatggacagagttatcgaggcacatacttcaccactgtcacaggaagaacctgccaagcttggtcatctatgacgccacatcagcacagtaggaccccagaaaagtacccaaatgcatacgtctttgttctttaccataagagaaggaagggccaactgaagtttctattagaagagtcatgtttcgagctgactgctcaagactcaacttgtgtcagatgcaaagggcatagcaaaatgtctcaggaacattgccttggagcaaagagtctgagagaagagaaatattaggctggctctccttcctcctagttttatggagcaggaggatatctggaggcgaggagatcacattaaggaaaaagtcaggaccacaaacgaccaaacacttagagtacctttccacaccacccactgagggccaatgcagcctttccaccttggaatactatcattctaacctccaattcctgaagtgaaagttgtgttggccttttctgtcttggttcaagagaaaaaaatatttgcatatctatggagaggcaaatgtctctctttctgtatctacgtcttttccaatgggtagaaacacacttggtcctgagcaccagtgctctgacaagatacaggttgccagcaagggaagagcaaaggcaagaaggcagatgagagtcaacaaagaggcagatgctgaaaattaagcctggtgggtagatggtcagaagccctggtctgaccaccctgtgtccagcctctctgctgtaagtggctaccaaagacatggaaaaatggtttctgcatgttagacaacagacggtagaggaccaagagaattgtgagagggggaacaatgcgatcaactccataagtgccctccctggctgtcttcttggagacccttcctgcactgaagagcagggagatggagcacatgtggactgtagctatcttgctgaatggaggagagagactggagtttgggattactcaggtagctaggatttttctaggcctgctaagaatgagagcggatgtgtggaggaaaggagctctgggaatatgcatagaagtctcctcaagtcattggctaaacatgaagctgcttgtgcacagaaaagggctccacaggagagtggggccaaggacatctactgagcaactacaaggggacaactatgagaaaacagcatctacaaggaaacagtgagctcagtaaagatgacagtgctcacatagcactagcggatattagagttctaaccagccagaggagagagaagtcactgaacatcttgggcattcagtagagaccccagaaaagccagactttaagggtagaattaatatattcctagaataaaggcagctccagacaaaacctagctgagcctaaaggcaaatctcttaagcatcaaaaaggtttccaagtcaattaactgcctgctagaggaaaacacaaccctccttagaggtaaacagcaaaatcaagtggctcagctatgcggtatcgacagtgtgagtcctaaatttaaaaactccctaaacatagaaagcgttggttatgacccacgaccaggagaaaaatcagtcaatacaaataggcccagaaatgacaggaatgattagaatggcataaaaattggacctatcagtgtgttaactgagttctagcatttcagaaaatatgagtatggaacctagcagatgtaacatcaagagaaagtaacagtataaaagagcaatatcaaattagaactctagtgaaaggtatgccttaaatcaaaaaagtactgggtggcctcctcatccagttagaagtttcagaagaaaaactaactgaaagaaaatttatagaaactacagaaacagctacgcgtgcgcgcgcacatgcacacacacacacacagacactcacacatgcacaagcttacaaacacacacaaacacactcacatccacaaatcctgaaaagtgaaatcaaccaagcctcacagacacaaaggaaaatataaaaaggtttcctacctgtgagaagcaaggcacagaaggagaggaaggtgatactgaaacaataacaagtacctgaagcaagaatggctgaaaaccttcctaatatgaagaacgttaagtaattacagattcaataggctcagtggatcagaaagggaattttcaaaaagaaaactgtatgaagcactttggtacatcactgtttgactctcagaagacaaagatatagtatcaagaaatatcttgtgagaaactgtaggaaaaagagctgtgtcttgctagaggaacggtgatacaaatggctaatgtgttctcatcagaaacatggcaaactgcaggcaaaggaatatcattaaaatgataaacagggaaaagaagagatcaactgagaatgctacatccagctatacactgccttgaaaatcatcaatgttgtataattgcattttgtgcaccccccaaacaagaaatccgaaagctatgagaatttggaatcagcaggcttatgtcacaaaagatgtggcccaaagggaattacgtacaagaagaatagtacaaggtgggaactttctgcatcccacgtattgaagaacccagcaaatggcaaatgtagattggcctgaccaggaactactgcaggaatccagattctgggaaacaaccctggtgttacacaactgatccgtgtgtgaggtgggagtactgcaacctgacacaatgctcagaaacagaatcagtgtcctagagactcccactgttgttccagttccaagcatggaggctcattctgaagcagcaccaactgagcaaacccctgtggtccggcagtgctaccatggtaatggacagagttatcaaggcacattctccaccactgtcacaggaaggacatgtcaatcttggtcatccatgacaccacaccggcatcagaggaccccagaaaactacccaaatgaactctatgtttgggaatgggaaaggataacggggcaagaaggcaaccactgttactgggacgccacgccaagaatggactgcccggttttgaaacactctgcagtacacgtgtcacaggagaatgacctgtgggagagacacatgtttagaaggaagagaaagggcaaatgtacgttttttacgatttaaaattttaattgttaccaaacaaaaatatccactcaaaatacaattcaacaatgcaacagtcatcttacagcagagaaatgcagagaaaagcaaaactgcaagtgactgtgaataaagggtgaatgtagtctc

SEQ ID NO: 1613 - DNA, 3820 bp, Homo sapiens
gagcggagttgggggttgttgcgagccctggaggggagaggagacggggaggcgacgggatggggccagctgggaaggggacgcgaggctccaggctggactccgctctctgccccctcccggactcggctgtctgtcccctccctccagacagggtctgctgaccaccgcgtggcctgggagtctccggtggcctagggaagtgaagcgcggccctggggaaggcctggagcaacccatccccagaactcccacgagggggcgtcccaacccgtcttcgactgttggccaaaatgcgctgccaatgctggcagccttacgcagtgcccgcgggggatatgaggccccccgcgcggccctgaaccccaccggattccccgggccggcccgaccgcccccacctagtccctggccccgcgagtgcaacccccgacactaacggcctttacgcgacatccgagcagcgtgtctatcccaaaggcctaggagcatttgcccggctcggtcaaatctagcgcaagtttgaagcctgcggcctcgcaattttagcagcttcgttccaggccaggagtctctgtggagtcttcttgaataagctgtgaaacatttccccacccgcttccctttcttggcccaggcttcctgaccacagcctcacctttgagcagctcagagccctgcctgccaggatgcgagccactgcctggatcgtggctctgcagggccacccatgatggaacaggtcgcctggacgtccaccacctccatgccgagaggagggggccacagccctggcatgcagccctgcccagtagcccggcacctgcccctgccacgcaggaagccccccggcctgccagcagcctcaggcctccccgctgtggcgtgcccgacccatctgatgggctgagtgcccgcaaccgacagaagaggttcgtgctttctggcgggcgctgggagaagacggacctcacctacaggtaggggcctgggagcaggacactaggatgccacctgtgtgtccgtgggtaagccagctgccctcacagctgctgcttgagacacaggccagggtagatcttcgtgtctaacagacctgtgtgtccactgaaccccagggaggtcatctatgggcaaaccccctgaaaccccaacttagacacatacacatatggagaccctccctcagcagaggggcagagcctccgtcatcatgcaaagagtcgcagcacatgcctgcggacgggtgttcagtcactcaggcagcctttacaagagacctgtgaggaccaggctctgggactccacggtgaatgaggcagacacagccccatcctctgtgtcagtctgaggtgggtgtcagccatgtcattgtccaactctaccatcacaacttgggcttcgagcaggtggagacagtggtaagcggggagaggcaatagtgggcatctcactgggtgacctgggaggaccctgggcaggtgatggggaagctgaggctcacacatcctgcgggtggggacccagcctgaagaatgggctggtgtcacacagcattggagctgagactggggtctttagaatttcctaggtgggggcctgggaaccaacaggggctcaaggaaccaaggtgtccccacagtgagtggcactgtcaggtctaggatgggggtctcgggacccctggtcctggttctttccactgaattcagacacttgtatttgcctaagtatgagcaaaccacatacacatgtgcccatgtggccagggagaccagtgcgctgaagctgaggcccagagtacacctggcctgtgtcctgagtgttcacacacccaccaagcatccaggggcaactcctggtgcctcagccatcgggggctgtcccttccctgaggcccaggcccctccatctccctccaggatccttcggttcccatggcagttggtgcaggagcaggtgcggcagacgatggcagaggccctaaaggtatggagcgatgtgacgccactcacctttactgaggtgcacgagggccgtgctgacatcatgatcgacttcgccaggtactggcatggggacgacctgccgtttgatgggcctgggggcatcctggcccatgccttcttccccaagactcaccgagaaggggatgtccacttcgactatgatgagacctggactatcggggatgaccagggcacagacctgctgcaggtggcagcccatgaatttggccacgtgctggggctgcagcacacaacagcagccaaggccctgatgtccgccttctacacctttcgctacccactgagtctcagcccagatgactgcaggggcgttcaacacctatatggccagccctggcccactgtcacctccaggaccccagccctgggcccccaggctgggatagacaccaatgagattgcaccgctggagccagacgccccgccagatgcctgtgaggcctcctttgacgcggtctccaccatccgaggcgagctctttttcttcaaagcgggctttgtgtggcgcctccgtgggggccagctgcagcccggctacccagcattggcctctcgccactggcagggactgcccagccctgtggacgctgccttcgaggatgcccagggccacatttggttcttccaaggtgctcagtactgggtgtacgacggtgaaaagccagtcctgggccccgcacccctcaccgagctgggcctggtgaggttcccggtccatgctgccttggtctggggtcccgagaagaacaagatctacttcttccgaggcagggactactggcgtttccaccccagcacccggcgtgtagacagtcccgtgccccgcagggccactgactggagaggggtgccctctgagatcgacgctgccttccaggatgctgatggctatgcctacttcctgcgcggccgcctctactggaagtttgaccctgtgaaggtgaaggctctggaaggcttcccccgtctcgtgggtcctgacttctttggctgtgccgagcctgccaacactttcctctgaccatggcttggatgccctcaggggtgctgacccctgccaggccacgaatatcaggctagagacccatggccatctttgtggctgtgggcaccaggcatgggactgagcccatgtctcctcagggggatggggtggggtacaaccaccatgacaactgccgggagggccacgcaggtcgtggtcacctgccagcgactgtctcagactgggcagggaggctttggcatgacttaagaggaagggcagtcttgggcccgctatgcaggtcctggcaaacctggctgccctgtctccatccctgtccctcagggtagcaccatggcaggactgggggaactggagtgtccttgctgtatccctgttgtgaggttccttccaggggctggcactgaagcaagggtgctggggccccatggccttcagccctggctgagcaactgggctgtagggcagggccacttcctgaggtcaggtcttggtaggtgcctgcatctgtctgccttctggctgacaatcctggaaatctgttctccagaatccaggccaaaaagttcacagtcaaatggggaggggtattcttcatgcaggagaccccaggccctggaggctgcaacatacctcaatcctgtcccaggccggatcctcctgaagcccttttcgcagcactgctatcctccaaagccattgtaaatgtgtgtacagtgtgtataaaccttcttcttctttttttttttaaactgaggattgtcattaaacacagttgttttct

SEQ ID NO: 1614 - DNA, 4189 bp, Homo sapiens
actctgcaggcgcattcccgtagccttcgcggttgtactgaggaaaggtgccgagtgcacggatttggagagccatcttaggaattcccttttcccgtatctgcaatgttgatgatattaactgttttcttgagcaacaatgaacagattttaacagaagttcctataacaccggaaacaacctgtcgagatgttgtagaattttgcaaggaacctggagaaggcagctgccatttagctgaagtgtggaggggaaatgaacgtcccataccctttgatcatatgatgtacgaacatcttcagaaatggggtccacggagggaagaagtgaaatttttccttcgacacgaggactccccaactgagaacagtgaacaaggtggccgtcagacccaagagcaacgaactcagagaaatgtaataaatgtacctggagaaaaacgtactgaaaatggggactcatatctgggataacatactgttacaattcaacaagaagaagacaaccaacttaaaaatagacatctcatcaaagaagagagacaagtggctaacaggcatatgaaaagatgcttaacatttccagtcattggggaaacgcaaattgaaaccacagtgagacaccattacacatccacaagaattaagctataagcaaaaagacaaatattagcaagaatgtggacacactggtgtccattgctggtggaaatgtaaaatagtgcaatcgctttggagaacagtttggcagtcttttaaaaagctaaacataaactcaccatacaagccaggaattccactcctaggtatctactcaagagaaatgaaatatctgctcgcacagacttctatgcaaatgtgcacagcagcactgttactcataccagctaagagatagcccaaatgtccattaactggtgaatggataaacaaattgtggtgtatccatctgactgaatatgatgcagcattaaaaagaaaccactcaacacagatgaacctcaaaaacctcacagcaggtgtgaaagactacctatggtatgacttcacttatatgaagcgtccggaagaaagttgggaatccacgtgttgaacttaccctctcagagctccaagatatggcagctaggcaacagcagcagattgaaaatcagcagcagatgttggttgccaaggaacagcgtttacattttctaaagcaacaggagcgccgtcagcagcagtctatttctgaaaatgaaaagcttcagaaattgaaagaacgagttgaagcccaggagaacaagctgaagaaaattcgtgcaatgagaggacaagtcgactacagcaaaatcatgaacggcaatctgtctgctgaaatagaaaggttcagtgccatgttccaggaaaagaagcaggaagtacagactgcaattttaagggttgatcagcttagtcagcaattggaagatttaaagaaaggaaaactgaatgggttccagtcttacaatggcaaattgacgggaccagcggcggtggagttaaaaagactgtaccaagaactacagattcgtaaccaacttaaccaggaacaaaattcaaaacttcagcagcagaaggaactcttaaataagcgcaacatggaggtggccatgatggacaagcgaatcagtgaactgcgtgaacgtctctatgggaaaaaaattcagctgaaccgtgtgaatggcacgtcatcaccacagtcccctctgagcacatcgggcagggtcgctgctgtggggccttatatccaggttcccagtgccggaagctttcctgtgctgggggaccctataaagccccagtctctcagtattgcctcaaatgctgctcatggaagatccaaatccgctaatgatggaaactggccaacattaaaacagaattcaagctcttccgtgaaaccagtgcaggtggccggtgcagactggaaggatccgagcgtggaggggtctgtcaagcagggcactgtctccagccagcctgtgcccttctcagcactgggacccacggagaagccgggcatcgagattggtaaagtgccacctcccatcccgggtgtaggcaagcagctgcctccaagctatgggacatacccaagtcctacacctctgggtcctgggtcgacaagctccctggaaaggaggaaggaaggcagcttgcccaggcccagtgcaggcctgccaagtcgacagaggcccaccctgctgcccgccacaggcagcaccccccagccaggctcctcacaacagattcagcagaggatttccgtaccgccaagtcccacgtacccgccagcgggaccacctgcatttccagctggggacagcaagcctgaactcccactgacagtggccattaggcctttcctggctgataaagggtcaaggccacagtctcccaggaaaggaccccagacagtgaattcaagttccatatactccatgtacctccagcaagccacaccacctaagaattaccagccggcagcacacagcgccttaaataagtcagttaaagcagtgtatggtaagcccgttttaccttcgggttcaacctctccatcgccgctgccgtttcttcacgggtcactgtccacgggcacaccacagcctcagccaccttcagaaagtactgagaaagagcctgagcaggatggccccgccgccccggcgggcccaacatccagaagctgctgtaccagcgcttcaacactcagccccaccaagctcacgcccatcgtgcattcgccactgcgctaccagagtgatgcagacctggaggccctccgcaggaagctggccaacgcgccccggcccctgaaaaagcgcagctccatcacagagcccgagggcccctttctaccagcccagcccctcccaggacttcatgggcaccttggccgatgtggacaatggaaacaccaatgccaatggaaacctggaagagctcccccctgcccagcccacagccccactccccgctgagcctgccccgtcatcagatgccaatgataatgagttaccttcccccgaaccagaggagctcatctgtccccaaaccacccaccaaactgccgagccggcagaggacaataacaacaacgtggccacggtccccaccacggagcagatcccgagtcctgtggctgaggccccatctccaggggaagagcaggtccctccagcacctcttccccctgccagccaccctcctgccacctccacgaacaagcggaccaacttgaagaagcccaactcggagcggacggggcacgggctgagagtccggtttaaccccctggcactgctcctagacgcgtctctggaaggagagttcgatctggtgcagaggatcatctatgaggtggaagatcccagcaagcccaacgacgaagggatcaccccactgcacaacgccgtctgcgccggccaccatcacatcgtgaagttcctgctggattttggtgtcaacgtgaatgctgctgatagtgatggatggacgccgctgcactgcgctgcctcttgtaacagcgttcacctctgcaaacagctggtggagagtggtgccgccatttttgcctcaaccataagcgacattgaaactgctgcagacaagtgtgaggagatggaggaaggctacatccagtgctcccagtttctatatggggtgcaggaaaagctgggtgtgatgaacaaaggtgtggcgtatgctctgtgggactacgaggcccagaacagtgacgagctgtccttccacgaaggggacgccctcaccatcctgaggcgcaaggacgaaagcgagactgagtggtggtgggctcgccttggagaccgggagggctatgtgcccaaaaacctgctggggctgtatccacggatcaaaccccgacagcgaacactcgcctgaacttccttttggagcaccgcatggtcttgccagctaccaggagccacttaagagattattgtgctgttttccaggaaagctgcagctagaaaatggtcttaatggtgctcactttagcagacagcgtccacaatgtgaatcctacagtttccaggtgaggccctttctccagtttgcccattaactgggagaggtactttcgcctccaaggactgaattttgccaattactataaatccaaataaatacccactttcaaaac

SEQ ID NO: 1615 - DNA, 4071 bp, Homo sapiens
aagcctttgcagaggccagcgaatgggccctgcagctcaggccctggtgggccttggcctcagcactggggatgccactaccccgtcaaaacctgtagctggctccttctagaatgtgctatcaccctgccctcagcctctgagcacagtgagggctgtatgtccccactggacagtgcaagtggcctgggggtgtgtcagatggggaggttaaagtcacacagccccagaccgcagaatcaggactggaacccagacctcactggctctgatttgtgtagaaacccctggaagctgcctggagcagggcaaggagggttgagcagctggttcactgctgctcctggcccatgttttaggtgttgtgggggcatcttacagagctcttttgggaatccccctctgctccctgtgtccctgggcccttgtcgggtgacaagcggcgcccaagaactctcagaccaaggtcctggccttaagtgactccagatctcggggagacacagccagacacagccaagccagtcctgtgaggtcaggctggggacatccagaaaggtggcagccttgggggccgggatagtgttggtgcaggcagggcaaggttggctaggcaggggctgccacagagatgggcaccacagcagtcagagcacaagtgccggagcagacggctgaatggccacaatgggctcaggtgagggtccaggggcccagaagagcttgggatgccctgtcctgagcctgttaggctagagtgtccacaagagcgggacaccccccaggatcactcaagtcttcaaaaccagattctgtggggtaccccaagctggcattgggggaacctacccaggagcgctgaaggaggactctccttccccaggctgctttcagacagaggtccttggctttctacagggagcccagccaggctcacaataagccaggcctagcggaagagagcagtttttcttgctctgaggtttcaaaagggcttggtgaattttaaaaagctccaagacccacctggagctcactttcaaggtgcagctacagggcagtgtagagttgttgggctttgtgtctcaggaggagcatctctgcactctggagaagtatctggtggcgtcaaagccaggtctcaggagttggttttggggatgtgtccatcttggcttcccaagtgctccctgggctgccaggagccatcatctagggaattttccaggtcttacctgaaccccacatccaggcttacagggctttgagtcctcggtccagacagggtcagtccagcactgctggtcgcctgtgtagcacaggctcctgtctgccgtctccaggcccttgccatagcaacagggatgggcatttatgggccctgatggctcttactgagctcttcctgccacatcctgaggatgctagggctgcaactggggtggccctgtgcagtcacaaagcagggagtccggattggaggattcttacatgctggtgcccccagagcccctgcgtgtctgcgggggcctcccatgagagccaactcaattgtggaagacaaaccggaggggctgctgcccttctcagaacctgaaacctggaaccctatatgaatctgcatttctgatcagcccccattgtgggtctagggctaacggccatcagtgctttttctctgcttgaacaggtagaagcccccaaagttgtccattggccatgcccctgtgagggcatgagccagaagtgagggcagtttgtttttcagtgatacttcagagagggccatttgagatgggctctgaggagagtaacaacatggtggtgcctgccatgcagctcgccagcaagatcccggacatgtcggtacagctgtggtcgtcagcactgctgagagacctgaataaagcctgtgggaacgccatggatgcccatgaagccgcccagatgcaccagaacttctcgcagcagctgctccaggaccacattgaggcctgcagcctccccgaacacaacctcatcacgtggactgacggtccaccccccgtgcagttccaagctcagaatggacccaacaccagcctggccagcctcctgtgaggccttgatggggccatccagctccgcagggcctgcgcgtctccggcttccacccagacggcactcaagcctgcccccgaggcgtgcttccttcctgattgtctctagagcttccaagtcctgggaatgtgcggggccagtccctgccctcccaggaggggtggtagccgttcccacctcgcagcaggacccccagtgcagaggctcacaggtggcacacaggcgctgtctctccagagccatccttcagagtggacctcagtgccagtcctgcctcagcatctgggtcacgtcggccaggagtagggtgcaggcctccagcaggtcctaatcctgtgtgccagggcaggcagtgccccaggggcaccacgcctgactctccatcacccaggccttgatgccgagcgggagtagagtgtttcctctgctcaaggcaatttccagagcccggatgccagtttctggcctgaatttggagggaagaagtaatggccctagtgtgggacgaagcacagatcccagcacttttcccagctttctctccagcgtcagtccctgcagcagctggggcctctggtcaggaaccctcagggacccaggaactcagcttccaaacatctgcaccttgaccggactcgccatcccgccgtgggggtgcaggtgattgtaaacacgggtgtgcatgtggatgcacacgggtgtgcggtgaagatctgtggagatggagctgggagctgaggctcctgttgcaccagccaccttcccccatcttgtggctgctgaggggcaggaagcgggggagtgggctcgtctcctaaatttaagatcacctcctcagctagcttagagtgcgtggcacgggccccccgcccccgagatctggagcccagggactttcttcctggcagatctgtggccttccctgctcagcctcttggtccccccactccctccaccgcctcaccttccctgctgggtctctggggcacagtgtgaaacccgcaccctagccaggccccagggagcctccgctgggcccagacagcagcgtttggttttatccacttttcttggataatcaggaggtgccccagtggtcacagtgtggcattccgagttggggcgggtggtcgggtcaagatagcagcagcaggtgtcagggctcaagacaccaccccctccagcttctggggcccaggagcctctccctgctacagggggtgggggtcctgctcagcagggtaggtggtggttttaggtcttgtcaccctcactcagtggaactgcctctgggagctttggcgtctgtgactaaagggacgctggattgctcaggtcagctgctcggggctcccaggctgggtgtgccttagccacaggcagggctgtcaataacccccttcctcactggccaccacctgacatcagcaccagtgacaggctggtcagagggcggggctggtgagggtttgtcctaagaggaccaccgccatctctgggtctccagggggagagcctggccctgtcctttgctacccagggctgcccccaggcccatgaagccaataggagagcgtgtggcactggcccacaaactgtccctgtcctgtcttcctcccgagccatggcctctgctagctccaccttgaaggagccccccacatcctcccctacatcccagagatgccaccacttgtgtctccacaatgtgctcctgcccacccgggttccgcactgtccgacccctgtacaccactcatgtcaccacggcgtgcatcatgttcatccccatctatttatttaagcctttctttgcttgtagggcattttgtatgtagagcagttgaaaacagaacctcagaacttaacatctgtcctgatgttaaagtgcttttcatgaccaccctgttatctatgtatatgtaaagttaagaatgagatcttaagtttacaattaaaaactcagtactc

SEQ ID NO: 1616 - DNA, 3834 bp, Homo sapiens
aatactggaggtcacatttcaacatgagctttgtaggggacacaatgtccaaatcatatcacttattctgtctctcccttccttttttggtgctacctgcctatcctaccttccttcttccaaacttccctccccttgccatctttcttcccagccctcctcattgtttttctctctacctttccattttttctagctttttcttcttctctttccattattcctattttcttatggaaagatgctctcttgcttttactttccccttgtgtctcccccactttgtcttttgtaaccactccattttctttatctccttacttccttgaatgccttagtttttcttccttccaactgttcttccacttgtatatctagttttatagcaattagggccatttctacagcacttcaaactaaatacatgttaaactgggcatttctacttctggaagtggctgatttggttgtcctaggccaaacaccaggaaaggaagcttggcttggggatgttggaccacttggctggggcggtggttcagttgcatcttagtctcagagatgaaggagagtcacggctactcaccgccagagcaagacaccctccagccatagttccaattctacgatggcatagcgtagtagccctgtagctgcagggtgtggagcctagtgtttgctttttctctacggtgagcacagttacgtggactccagatttttgcttcagtgtcttgaggatcttgatgccaatctacgaaaattaaactcccgtctgtttgtgattcgtggacaaccagcagatgtgtttcccaggcttttcaaggaatggaacattactaaactttcaattgagtatgattctgagccctttggaaaggaacgagacgcagctattaagaaactggcaactgaagctggagtagaagtcattgtaagaatttcacatacattatatgacctagacaagatcatagaactcaatggtggacaaccgcctctaacttataaaagattccagactctcatcagcaaaatggaaccactagagataccagtagagacaattacttcagaagtgatagaaaagtgcacaactcctctgtctgatgaccatgatgagaaatatggagtcccttcactggaagagctaggttttgatacagatggcttatcctctgcagtgtggccaggtggagaaactgaagcacttactcgtttggaaaggcatttggaaagaaaagcttgggtggcaaattttgaaagacctcgaatgaatgcgaattctctgcttgcaagccctactggacttagtccttatctccgatttggttgtttgtcatgtcgactgttttacttcaaactaacagatctctacaaaaaggtaaagaagaacagttcccctcccctttccctttatgggcaactgttatggcgtgaatttttctatacagcagcaacaaataatccacgctttgataaaatggaaggaaaccctatctgtgttcagattccttgggataaaaatcctgaggctttagccaaatgggcggaaggccggacaggctttccatggattgatgccatcatgacacagcttcgtcaggagggttggattcatcatctagccaggcatgcagttgcttgcttcctgacacgaggggacctgtggattagttgggaagaaggaatgaaggtatttgaagaattattgcttgatgcagattggagcataaatgctggaagttggatgtggctgtcttgtagttccttttttcaacagttttttcactgctattgccctgttggttttggtaggagaacagatcccaatggagactatatcaggcgttatttgcctgtcctaagaggcttccctgcaaaatatatctatgatccctggaatgcaccagaaggtatccaaaaggtagccaaatgtttgataggagttaattatcctaaaccaatggtgaaccatgctgaggcaagccgtttgaatatcgaaaggatgaaacagatctatcagcagctttcacgatatagaggactagaaaatttttttgtcctttaggtcttctggcatcagtaccttctaatcctaatgggaatggaggcttcatgggatattctgcagaaaatatcccaggttgtagcagcagtggaagttgctctcaagggagtggtattttacactatgctcatggcgacagtcagcaaactcacctgttgaagcaaggtaagaatgaagcattggagcatactgttctttttccttttcctatcttaaacatacattttttaaatgtgcaggaagaagctccatgggcactggtctcagtggtgggaaacgtcctagtcaggaagaggacacacagagtattggtcctaaagtccagagacagagcactaattaggtaaatattttagagctgtatttcttgctttagaagagtatataattaacataaattaagataatttcaaaaatggagcaaatctctattttcaaaccagaaaatcttgaggcattaatttttaagcaatttttacaaactcagttaatttttggtcaagagacatgcatctgtactggagaaattgttgcaccagttttatattcatctgaaccaatgctctttaaattagagatgtttatgattttgtggtcaagttttttcttagaaaaagacaacttttttatttccttactatgtaactatgagtctaaaacaattaaagtggcctgtttattttagtgacattaatataatctttttatgaactttcccctaaatctttgcctcttaaatgttgataaatttcttttatctgttatgatgcttctaaaatctaaattatttccaatttgggaatagttcaaaattttttaaaatgctggcccttattagaagtatcagaaagccttgcctgcattcaatttaattggatttgggatgtcattttgtgatttaaattaatatgaaaaatatttatacgttggatttgccagtttttaaaaattttctgtttcttcagtttctaacactgtttacattttttattgcttagtttttttatgtcaacctaattagactataagtatcttgaagataaggtcaataaacactcatcacatttttgtcattgaattatttgcaatcaagctttacctagtttttttttcccccttaaatcacagaaaacattcaggaggaatactgttgcagctgaaattggtggggagttcaatacttttcaattaagttatttaaaaatattcttcattgatggaaagcagttacatattgaaatatgttgtttctaatgacatttctgtggtttttaactttttaatgaatttcacagaggacaattggtaatttgtatataaagaacttggcaagagaatttgcttaatgtaaatataaacagtcacaattagtatagacccatcgatatatttttgataatttttcatgtatggtaaagttaaaatgacaaattgatattctgatataaaactcaaagttttgaagtcagtgggaaaaaaggaggtttttagactttcttaaaagacgttaaaattttaggacagaattttcttgatgttgtttgatctaactttgcactctttgataataatgttttagataatgtgcgtaatccaaattggtattgtagcctctgttaacacagacagtatatgttttaaactttgatgtaaacctttttagacccaaacttgtggaagtatcatgtgttaagttctctgtctctgtttctttgttcatttattactaaaatgaacttgttattaaagtatatgcaaatatg

SEQ ID NO: 1617 - DNA, 3829 bp, Homo sapiens
gctttacatatggtccttcatttcctgcatttaaagttcccgatgaagatgccagtctgatccctccagaaatggataatgagtgtgttgcacagacatggtttcgctttttacacatgttaagtaatcctgtggatttgagtaacccagctattataagctctactcccaaatttcaggaacagttcttgaatgtgagcggaatgccgcaagaattgaatcagtatccctgccttaaacatctgcctcaaatattttttcgtgccatgcgtggaatcagctgtctggtggatgcattcttaggtatttctagaccccgatcagacagtgctcccccaacacccgtgaatagattaagtatgcctcaaagtgctgctgtcagtaccacccccccacataaccggaggcaccgggctgttactgtgaataaggccaccatgaagacaagcacagttagtactgctcatgcctctaaagttcagcaccagacgtcctccacctctcctctgtcaagtccaaatcagactagttcagaaccccggccactgcctgcccctcggagaccaaaggttaacagcatcttgaatctctttggatcatggttatttgatgcagcatttgttcactgtaaacttcataatgggataaacagagacagcagcatgactgccattacaacacaagctagcatggagtttcgacggaaagggtcacaaatgtccacagacaccatggtttccaatcctatgtttgatgcaagtgaatttcctgataactatgaagcaggaagagctgaggcttgtgggacactgtgtaggattttttgtagcaagaagactggagaagagattctgccagcttatttatccagattttacatgcttttaattcaaggtttgcagataaatgattatgtgtgccatcctgtcttggccagcgttattctaaactctcctcctttgttctgctgtgacttgaaagggattgatgttgtggttccttactttatttcagctcttgaaaccattttgcctgacagagaactctcaaaattcaaaagctatgtaaatccaacagaattgcgaagatcctccattaatatcctgctttctttgttgcccctccctcatcattttggcacagtcaaatctgaggtggtcctggaaggaaagtttagtaacgatgacagctcttctcatgataaaccaataacttttctgtccctgaagttgagacttgtgaatatattaataggtgccttgcaaactgaaacggaccccaacaacacccaaatgatattaggggcaatgttaaatattgttcaagattcagcacttttggaagccattggttgccagatggagatgggtggtggagaaaataacctgaagagtcatagtcgcaccaatagtggtattagttcagcaagtggtggaagcacggagcccacgactcccgatagtgagagacctgctcaagctctcttaagagttatgctcttaatacagattcagctgctgggctcctgattcgcagcattcatctcgtcacccaaagactcaactcccagtggcgccaagacatgagcatatcactggcagctctagagctcctctctggtcttgcaaaggtaaaagtgatggttgactcaggagaccggaagcgagccatcagttctgtgtgcacctacattgtttatcagtgtagtcggccagctcctttacactccagggatctgcactccatgatagtggcagcttttcagtgtctctgtgtctggctgacagagcaccctgatatgcttgatgaaaaggactgccttaaggaagtactggagattgtggaactgggtatctcaggaagtaagtccaagaacaatgagcaagaggtcaagtacaaaggagataaggagccaaaccctgcatctatgagggtaaaggatgctgctgaagccaccctaacatgcattatgcagttgctcggcgcatttccttcacctagtggtcctgcctctccttgtagtcttgtgaatgagaccactttgattaaatactccaggctgccaaccataaacaagcatagtttccggtactttgtcttggataacagtgtcatcctggcaatgctggaacaacctcttggaaatgagcagagtaagtttatagtactttgagccttctctactgcttaatcagtgttaccagtaccatgaagctgtttccaggatcagggaaggacagcctacagattctaagtaggtcagaaagatttctagctgtgggacaatagcacctgaaaaataggggggcaaaaaaatagaatatacatattacatggagtcttttaaaggctcttgatgtgcatctgaactagctctgtagttttataaaaggtggtgttttagtgggttccattgtgttgtttatctttgtcactttttcttcccccttgaacttcggatcctgcccctctgctcccctccctctcactcctcatgttctgtatcaattgttggtgctacctacacaggctagaaacttgaggagttatctttacctgccccttcctgttactcacttatataattagtttctaagtttccatcttcccagggacccttgaatttttcctttcctctgtattttcccaatacatccaagtgcaggtccttattatttctcacctagattattacagctgtttcctacctactctgattccctcaacccctaaaccccttgccagttctaacatgtgttttccctactttcatcctacttgctgccaccatagtattcatcttcaaccacaaatgaccatgccagtgccctactgaaaatccttcagtgattttccattaacacaacatgcactgttttcctcctttccctccccctcagttataagccatctcacaatatgtgattatcactgcgacccaaactatccacaagtacattttttttttctgatggtaattggcatcagccagtatgtaaaagaagcatgttctcagacccttattgctgggaaggggaaggaaagtgaaggttacagaatctgtgggtataaagtgacccatggagtcacctggtatacaattcccttagttatgagtgaaaaaactcaggctcacagagggtatatgacttgcccagggttacttgggactagagcccagattttctaaaccctgtattgtccctttctattattattgtcgcacagtgataggatttgctcagtgattaaagatttgccttcttgcctttgtaaaggtgaagagttctgtgccagttttgttgattatatgagtaagagctcataaatccatgaagtgaaagtgagacatttccctgcagtttgagatgaaaagaataccatcataaacttctgttgtgttgtggtgagatgcggtgacattaatgtgaaatggaatggtgccttttattattgtctaacttcagaactgctactcccaagtcttttctacaggcatctcatccttctctaccctagacatggagcttgcttggctttctttcctagcctgtgcctgttcatgattcctccagcctcctactccaagccatctgctgaggagtctgcaaaatcccagtgtccccttcaggcttcctggcctttttccagctttttaaagactctcctactttcattccaaataatttcattgcataggaagtgtaccaaaaatacaagcaattggaattgtatagatttacaaggacattttaatagtttattgtaataataagaaattatagagaagtttgaaggcgtttgactcccatatctgagacggaagaat

SEQ ID NO: 1618 - DNA, 3596 bp, Homo sapiens
ctaaaaaaagaatcccaggattttacctcctgtgtgttttcttcttgcttcttcatggtccgtgataccagctgaggttgttagtacaataaaaccaaaccggccggatagaagcagattattctgccatttttccagatgtttgagttgcacatcaaatctggggctgattactcaacgcttgtttagcctacctgtgaggttcacaacaatttttcccagctctgtaatcatcagtgattcaaatttgccaatgtagccatacttcaccattacagtgagaaaccagatgatgattttggagcacagcctaataagaacctggggtttgcctcttctttcggcattgttgatgctcttgagagcatcaggcaggacattcatgtgcaccattgtggcggcacgaaaagatggcggaaagagccaaacgacaaccctttcattgctcttgacaccgtgggtcaggaatttgggtaaagctcatttggatggctcatttttgttcctcgtggtgttgggaaggcttgacgagagctagagatccaagaaggcctcactcatgtgttggacacctcagttctctttggacttttttctatccaagtggtttctggagagggctatatttgggagtgatctgtcatacttctctttgctatcggatttctatcttcatcatgccatcatcactcaggctatcatcatcacccggtcttatcagatattgccaaattatgatgtcataacttactatgactgtccccactgtccatgaaaaaacacagaaaagattagatacttctcagggaggtccctgttcatctttatggcctcactttagtcctctcagaaggtacttttttttcttcaatcttcctcagtgcaaatatccaccctcaatcaacatcaacatgggttggtgttactccaattcactcctctttttcttttcttttttttttgtttttgtttttttgagatggagtctcgctctgtcacccaggctggagtgcagtggcgtgatcttggctcacggcaacctctgactcccaggttcacgccattctcctgacttagcctcctgagtagctgggactacaggcacctgccacaacgcttggctaattttttgtatttttagtaaaaagacggggtttcaccgtgttagccaggatggtctccatctcctggccttgtgatccgcccgccttggcctcccaagtgccggaattacaggcgtgaaccaccgtgcctggccttcattctcctctttctataacgcaatcttaggatgcaaaaccaagcaaagtctgaattaatctatctagaatagcaccgtggagtcacagccatggtcaggcccctccaaagaacagactggatttcggaacccatgtctctccctgccacaagcaactagtccatatgccacttggaagcagccactgtggatcttggcttctttcttgcttcctcctcaatagttactgccactgatttagtgctaaagagataggaacatcacttaaaaccatctctacacataaatccacttagaataattttttcccctggaggatctattattgaagtacaaggctttactgtttattctactgtagacaccacaggacaccatgttcttggttagaattgagtacttgagaaactatatgaataattgcttgttgaacagtacacgtgaattatctctattttccagctaaagattgagcctaaaatgattagtatttttgtaattttgaatcatttgatccatttgaagttggattagtgacaaagtcttattcatttttcaagtgttagttctgagggcttctcccagaactagcagcaaccagcgttgctgctagataatattgcacctttaagctaacaagtaaaaagctgatcctctgggttgatgttgtctcatgctagggctctaggcagagtgggctggagttcagtccccagccatcttcttagcagggcattctagatgtttaatcgtttatgttgacgtgttgatatcacttccattagccatttgttagaattactaaattaaatttacataattcaaggatctaaaaagaccagaagttcagtcagagccatttttctgagatatttctgcatccctctgaagaagataatttgtccaaacttaacaaaaacaggtgttaaaattgagtacgttctgagaatactcagactttttttaagactttttttagtctcaaaccctacatgaaatacaatcccttaaatcttccaatcttagagctagaagaaaagtcgagcaccctcactttacccagaggcaattttgtgccccagatgacaaagctcttagatctactcatttgcttatggctccaccagtacttctaggtcaggccctctttcacctgaaggattagccatacttctggaaccattttccaggttccttgaaataaatatcttctctttgctggggaccctagtttcctgttaagtagtgaatgacccttctttcctcccgccagccacagtcctatttcacagaggaagagaatgaccagcaagtcaacttctactacagagaagcagcaactgataaaaggccaaatcttacaaggtgccaacgtgaagaaaaaggcccactatcctgcagccaactcatatcaaaagtcaatctgtttagtcctctctgccggggtgaatctacagtttttctttttgtctccctcttgccccatcaccaggtggttgtcgttgtccttcccggctagttgccaataaagttgttacaaagtgaccttgagtgtcttccttggtgcacccgaaaccccgccttcttcatccgggtgctgcggcgcgaataagagccggaccgcgcttgcgcattgagtcccactccttcgacctctgctgcagcccgtgccgccgccgcctcctgggaagagaggaagcgggagaggagcccacgtcgcctgtcacccaatatctccagccgcgcagtcccgaagagtgtaagatgttcgcctgcgccaagctcgcctgcaccccctctctgatccgagctggatccagagttgcatacagaccaatttctgcatcagtgttatctcaaccagaggctagtaggactggagagggctctgcggtatttaatggggcccagaatggtgtgtctcagctaatccaaagggggtttcagaccagtgcaatcagcagagacattgatactgctgccaaatttattggtgcaggtgctgcaacagtaggagtggctggttctggtgctggtattggaacagtctttggcagccttatcattggttatgccagaaacccttcgctgaagcagcagctgttctcatatgctatcctgggatttgccttgtctgaagctatgggtctcttttgtttgatggttgctttcttgattttgtttgccatgtaacaaattactgcttgacatgttggcattcatattaattacggatgtaattctgtgtatcttactgtgactccgaaaactgtagtattggtgtcatgggaatgtacgttatttccaaagtcatttcattaaagatgaaaacttt

SEQ ID NO: 1619 - DNA, 4026 bp, Homo sapiens
attcattcattccagtaactttgaggccctccttcagtgcctagcccccagcagagcaatggaggattcaataccaaaaacatagttcctgcccttctgtaacttgggattcagctacatatacttagttatgtgatagttgctgccatgtctttgggttgaacaagaaaggctgcctttggctgttctgcctgggaagacttcctgggcttaaggatttccttaagtgcttcaagggaagctcatccttgctctcaatcaggagcccacaacaccagcctattagcttttgctcttcctgctctgttttcaggttgacaagcctaacacaacagcttcaaaacacacacatgcacagtaagttaagccactgtttctttgtaccacttacctgtatttcttggatcatgcttttcctggattttcttttcagagctgtcagaatacatttcctactctgccactgcaagatcctggctggcagccccatcactgtttgcacagctctctcgtgcaggcagggccagggagagacctcagcaatggcttcctacgtggcacgaaacttgctgatgagtcccagcaagacagtggggcctgcctctgccagaccctgtgctctgaagagtagtccttatggagagatggggctggggtgatggggaggggggcaagatgatggaaagcatttaggaagcctcacactgggagggggcttcaggtctagcgggagaagactcagagcagcagaactggtcagctaaccaaacactcataactaacattgttctgtactttatggtcacagacactatctcattggatcctcatctaaatcctgaaggctaccatctaccctcattttataaagactctaaggctcaaattagttaagtgactatagcagatcagggggcagagccagacctagagcccagggctgcctaacaccagcactcttgagctgtagcttcatggtttatggccactgacagacagttggcccagggaaagccactcaactgactctgaagtgcacctggttagagatggtagcctttctaatggaacataattccggctgaggttgatgagaaatgatgaggattgtgctatggactgaactcttttcccagaattcatatgttaaagccctaacctgcaatgtagttgtatttcgagacagggcttttaggaggtaattaaatgaggttgtaagggcggtgccctaatccagtaggactgatggccttataaaaggaaaggagagatctcgctctctaaatgccctcaccaaggagagaccatgtgagcacatagcaagaaggcagctgtctgccaacaaggaaggccctcaccagccccaccatgctggttccctgataccagacttgcagcctccagaactgtggaaaataagtttctgttgtttaagtggcccagtctatggtatattgttatggcagcccaagccaactaagatagttttgtattgaatctataaacttcctccctccactgaaaattcacctacggtttccaggtgtccactagcctctgctttgaagaccaaaaggggagctatgcacctacggtcttgtctccagagaatgatcaggaatagctccaaggaagccttgaagtactctctcttgtgttctgtttagtcaaagagtttccatctgatttgtcccaaattcaaaatgtaggaatgtaattttcagtgagaaagattatatttatttactgatttatttttatgtgtgtctcccatcttttttaaaaataaactagggggtacaagtgtatttctgttacatggacatattgaatagtgatgaagtctgggcttttagtgtaacagtcacctgaatagtatacattgtacccatcaggtaatttctcattcctcactcctctcccactttcccacctttccctcccatttctgttctttcactctctatgttcatgtgtacacagtatttagctcccacttataggcaaaaacatgtggtatttgactttctgaatatttcacttaagataatggcctccagatccatccatgttgctgcaaaagacatgatttcattttttttatggctgagtagtattttatggtgtatttatatatgcccatacatacctcactttctttatgcagtcatctgttgatggacatttaggttagtccatctctttgctattgtgaatagtgctgtcataaacatacacgtgtgagtatcctttttatatggtgatttattttcctttgggtagatacccagttggtagttctattttcggttgagaaacctccatactgttttccatagaagttgtactaatttacattcccaccaacagcgtataagcgttctcttttctctgtatcctcgccaacatctgttattctttgactttttaataatagccattctgattggtgtaagatggtatctcattgtggttttaatttgcattcatctgatgattagtgatgttgagcattttttcatatgcttgttggccatttgtatgtcaaaaagaatatatttaaagatccagcattttgggtcatcttctcattcttaattgggtacttggtgacaccggtgtatacactttgtgaaaattcagcttattcacctaagcgaggtaggtgagtggccataggggtgtgtgtgtgtgtgtgtgtgtgtgtgtgtgtgtgtgtgtgtgtgtgatgtcaataaaaaggttacttctttttaaattcaccaccttaaaacccagagcaatggagcaatttgcctagggtcacaaagccagttggtaaataaatacaagaacccagatctcctagctctttagttagcacctatttaagaatcacatccaggaacaaggttccatttcaatgtcttttgatctgaatgttgttggaaattccgttgatttcctcagagccctactctgcgtctgaaggtgggcatcatatttgaaagactgcttctgattactattgaggccatgcatgctccctacttgctctctctggctgatgagtgtggccaccaaagaaatctacaggtagtccattccctgccgttggtgcagtgctctggaaggaagctctgtgggaagcccctttatgtttgtgttggccttgtgcactctgaaagatgaggcaggtggctggccaggctcacagtggtgcctgccttaggacttatgggcagccctttgtctggacaaaggtgacagaccaacagttattgacttagtaacagctccatcagtaaggcaaatggagagaacaccatagtgtaaatctgagatgtctcttaattatgcgtattttgttcattgagcaagactctcatattccatgatgactccactgactttggaaagctcaagcagtccaagtgacattttaccacctaaggcctaagagtgaatggtgggatgaaataaaactgagccctactctcatctccacatctttcaaaaagcccctcagacaaccctctcaagacaaccctactcaaaaccctgatcattaaggtcaggctgtttgcatttccagccctgccccctgccccaaagggtagtgcttagtccaattcagctgacggttcatctgtgctcatgacatcagactgccaccctctatgccacaagcccacctgaattagcccacagtgctgcagaagctctgccagttgcccttccagtatttcagtgacccacggctgatcaaagtactgttcccttcacttatcgctgcttgttacaacaaccatcagaacaagatcattctggagcaagagatgagctgtgttttactggccactttcattcaggatttggcacagactccaggtcaagcggaaaaccagccttaccaacccaaagggaaatgccttggttcccaagactatcttgagctggctaacagatttcctcagcaggcctgggaagaagctcgacagtttttcttgaaaaaagagaaaaaataaatgttttggttgattctgt

SEQ ID NO: 1620 - DNA, 3764 bp, Homo sapiens
cttcgcgcccacgcccctgggaggctcgccctgcccacccctcgcccccgcagagctccaccctcccccaccccggagccgcctggttcctcctccgcagaacccgcctccactcactcctcctccgcctccagcgccacctcgtatctcctcattcccgacatgtcctgggctccgaacgtctcctggggagcggcatgattgaatcagggattccctagccccaggtccccttctccgtcattctcaggacgaggctgcccagttctcaggtaatctgaggctgatgcccccgagaagcctcagttgccaccacgggacagggtgggcttggagatttgggaggcactggaagttaaggggtgaggaggccggtcatctccggggcctggggcatttagggggccagggcgagaggtttggcggtcatggggctgggagatttggggccctgggtgaggattttcaggggctggggtcacctggagggggggctgagaggggtcagcgcagcctaaactcccgccctccctggctccaccccggaaacggaccgttactattacgtcacagggatgccgttgcgcactaggtttgcctgtcccccggaaggggtggggtgttcatgtctcccagaggaggcggagtcgaaacgtcatcttacggggtgaggccaggggcggagtcggttgattaagatgcgggcaaaggaccctcttttataggtgtcaggtcaggttttggagctacaccttggggggccgaggcttccgcagcaggcagcaagaaaagagagttgggactaagtccagtactgttttcttaatccccacgtctcctctacccctccctgggcttctgccctgccgagtgcctctcttgcctgccttcctccccttgtatgaccctgggccgaggaggaataggtcctcagatagagtccagtctagaaaaggccaggctacggaaatacctagttgagtggcctcggctaagtcactgaatggccggagggtcattgcccttcctctctggtctgagacctatcttcttgtgatttttttttttttttttttttttgctacattcattcaatcaacaaatatttgctgaatgaccacctgtgtgtcaggcactgtgctgggcatggggatgtagtagtaaagaagacaggtggccgggcacggtggctcacgcctttaatcccagcactttgggaggccgaggtgggtggatcacgagttcaggagttcaagaccagcctggccaagatggtgaaaccccgtctctactaaaaatacaaaagttagccgggcgtggtggcaggcgcctgtaatcccagctactcgggaggctgaggcagagaattgcttgaaactgggaggcggaggttgctgtgagctgagatcgcaccactgcactccagcctgggtgacagagtgagactccgtctcaaacaaaacaaaacaaaacaaccaacaaacaagacaggcaccttgtctgccctctgagaggtaggggtagagctgggaggatcaaaagagaatagtgagattcttactataaatggagcaggctggctggaagaagtagaaggtgtcaagaaagggcaatcaacccagtgtgggaggttggaaatagctgccccagagctctgacatcccagtcaaggcccagtactgagctgtagtcggtttgagtaaggggaaagacagttttggggctgggctgactgtataggagggagtggccagaaataagtggggtgaaagtttcctctggttgaaatgtgaggaatggatacccctcttctctccctcatcccaccctctttctccctctcattcttgtcttcccttgtctgagccacatagagagagcagacagagagatccatgggtgctaggtggttttattggaagcactgcagtctgggagttcagaagctatgctttcaccacgttcaccctttcactcacattcacactcatgttgacactccaggcctggctgggtcaggtctggtgccgaggaactagaggcctggtcttcccttctggtccttggttccccaggccagggctgtctctggcactgtcatgggctaactgctgtggctcttgctctgggaaaggaaggagaggaagggccatgggctgtaatcttagacagggctcagagggggcagacaggactggggagggccaggctttccttggcagaggtcttccgcagtctccagtttgtgcaatccatccagggctggtctagaggctgcctttcagtgtggtgaatctggagtcagagagaatggagccatagaactcatcttcctgaaaggccctggtgtgaggggcagatgctggggaccagatctgggaacctgttttaggggcttccttgtgggagggattgggcaaggagaagtgaaggaagtaacatggtgaatggagacctggatgatggaggaagtgattgggaggggaggagactggacattctccaccccgactcataggacaaagtgccctgcagccatccctgaagaggaggtagcagaaggcaccaaaaatgttcccaggaattaggtgttgatttgctaagaggcagagtccccagagttgttggtatctcccagagctagggagtgagtattagctttagggcttaacatgggaaggccatagccctgactggaacttgggatatctgtgtccagagctttagtgttgctctctactccacccacatgcactgttctcttcttcctctgggaagtccaggctagagagacagagcctataaagagaagagcagccagaggctccaggacccatccaggcactgatacgtacaggaacagctggggtacaggcacatctacatcacacaggtgcacacaaagggcataggcatacccacaccacacaggcacacacatagactgcaaaggaatacacacaatgcacaggtatacccatgtcacacaggacgtaaagtcatcacaagggcacacccatttggcatatgtacggtctcaggtgcatatcagtctcaggacctggatgttgatattgtgaaaggagaataaatctcagaacccccaaatcattcaaccaaggggaaagtcaagctgggaattgtgtcaggcaaacctgcctcttgttttattcctaaaagagatagctacaaagaaaaagctacatacctccctcacaatttgtccacagggaaattccttatgggcctcaagatctttaccttaaaacagttgtgctgaatttcaccctggcaatgtaaactgatagcttatcttcacaggtgcaggacaatagacagaactcaaagtcatccctctgctcacctgagacaaatgtgtatctgattgcttcttctgccctatttatgcaaaaatgcagatccactgagccagactaaggcatcagtgtgactattcctttactccccactccatgtaaattgtgtattcagtgaaaggctgatcaaagacccccaaaaatgcagccttttgtctcttatctacctatgacctggaagcccccacttcgagttgtcccgcctttccagactgaaccagtgtacaccttacacgtattgattgatgtctcatgtctccccaaaatgtataaaaccaagctgtgcaccgaccacctttagcacgtgttgtcagaacctcctgaggctgtatcatgtcatgagtgtgtgctcaaccttggcaaaataaactttctaagttgattgag

SEQ ID NO: 1621 - DNA, 3680 bp, Homo sapiens
gcggttgtggctcaggggtcagctcctgctagtgccaggacactactgggaggctgggacccgaccaaagcccatggtgtctctggcctgagaacaaggtgtcttgggaccataaggccaggccaccaatggccattgggtcataggggctcagccccaatctttgtctttccctggctccttctgattcagtcccatcagggccctggatcccaagactcagcatccaaggtcccctccaggaatcctggcagctcagcatactttatcctgtttcatctgagagcaaaaatgtaaaattggatgcacagaaaagtgactcaaagtgcttaatgactagaagaaatctaggagcagcaagaaggtaatgtggagggagggacctccatgaccggtgtctgcagagccaggggtacaggcacccagtgctgtggcctggcaccacctgcctctcagagggtgggtggcacactccttaaccagaggacagcaggcctggtcaccagcttttctacctgtccctgtaagcatcacattgctggaggaaaatctcatgccagagcttggaccatccctagctcaggggttaggggttgtcccttggtgacctaaatgaaaaaacaggtccagaacagagttcctgatgctggacactcattcagtctttgaatcgtgggaggggaggcctggtactaggtagacctaacctctttgaggaaccacagagcccaaggctggaaatctccagaatcctccaccccctgatcctccctggggacccctgtggcctgtctcactgagaactcttccatctgtagatgtctgggctgctgtacaagggagtcccctttcaggtgtggtgctagacatggtcactcctgctggatgtctaggtggtagaaaccaaggacctagggaaataccaggtacagcctttccccgctcatccagagcaggacaaacaggccaggcggtgtcaggagcccaggtctccagctggagggaacgtcaaccctgcggtgggagcaggggccctttgcacatcctaggcacagatggtaatgtagacaccacaggtaagctgggcttggtacctacccctccccggattcagaaagaaaccaaacaaggagctttgtgcggaatgaaacctcctttcctcccagaagcactgctgactgtttggtggttgccatttgtggcagtgagcctttgtttgttctgaggttgggctggtttctcctcttggtcctgccctacagatcataaaggagaacagcaagaggtccccagcaaacatccacagatggccttggaacctcaccctgcaggaatgccagtgaacatactgctgacatcttggagctcagtaccctcatagtgtaacggcgtcagtagatctgcctgtgcttggacttcctgtactacccattcctgaggggcgatgcttctgcagggcctgtgacttggtgcacaacttcagacaccatcatcttgcagcagcaccgcaccctcactagccagggtgttgatgacttcctcaaggccaaggccacattcaaggcttcggactttattgatgcgcttgtgctgagcaaggtggcttctccaggatcttaattcaggaggtagaatggagcttgagatcaagtgtctgatcaagcctcagtgtatgggcgctgttcatcctctggtgctgaagcagccaagagacccaagtctgcctggctgcctcttaggatatgacagcagagccagtggcctctactagatcctgtacaacctcacaaaacacccagacatcgggagtgctgccagcctgtgatgcaagagtcctaatcctgaagacattgaatgacctgtcattctgctgtttttaccaaaaaggatcatgaggatcagagaggaaaagtcacttgcccaaaatcacacagctgaacagtggtggagttcaactttgaccatgggctgtctggccccaaggtgtatgcttgcttctctcccaagagactcctttcttatcaggctcaaatgaatgaaaggaggatgttaaagttcctagaagctttaattgaatgaaagttcctagtagatctgtacctactaaaaaccacacttctgaagctacgtggccaccagaagacacagctagtctgccatgtaaaaaaggaaaggtggcgtgtgccctgaaggcgcaggggtgagaggcagggaaatggagacccccacagccagcatcagtggccctcatcacagccctccaggagatatcaaaggagacaacgccattattgacgagatcactcccaagcggattggagattgtcccaatacttagacctatagcaaggccttgggagaaatggtggtgcagcaggagagcaggaacctaaccattgccatcctaaggccctccattgtgcggagcaacgtcgcaccagcttttcctgggttgggttgataatctaaatggatgtagccgactcattattgcggctgggaaagggtttcttctgtccataaaagctactccaatggctgtgggagacttaattccaattccaggtgatacagccgtcaatctcccactagctgtaggatggtgtgtgtgctgcagttcacagggcaaaggagatagaagtggatgaaatgagagaattttctttaattgaactctggttaatgccaaaagtgttcaatcactatgtgtggggaagtttcctggtacaaaggaaaaaaaaacaacctaagtcagtgttagtctaccactgtacatctggtaacctcaatccctgcaaccggggcaaaatgggtttccaggtcttggcaacctttgaaattccaattccatttgagagagctttgacgaggccatatgctgatttcaccaccagcaacttcagaacccagtactggaatgccatcagccagcaggcccctgccatcatctatgacttctatctgtggctcactggaaggaaacccagctaccgaaggaagataccctcatcaacccaattttacaaatggagaaatagaagttaagggaagaatctgaagtagtctcaaaggcagtgacaggaaggatgtggagaaagctgagtgtcaaagtcagtattcaggaccggctttactgctactttgagatgaatgaagaaatcagagggaacgcagtgtgctgatgctaaagcagctgtcaccacccagctgtgtgacataggacatattctttctctgtctcacttgactaatatgatatgtcagaggagacatgattgtaattgcctaaagcaattcttgtgatcaagactcagaagcacgaacagtattgccctctgtgttagcccctttataagggaggatatcatcttcagcatgctgaattgtcatctttcttagcagtgcaaatgactaaaacttagccaatgtagagtttgtccaaatttggagctcataactcagttcttgagcaaagtgaaaagaaaacattgtgattatggggaaaatatttgatgggacttatcaaataaagataggaaaagaagaaaacccaaatattataggcagaaatgctaaaggttttaaaatatgtcaggattggaagaaggcatggataaagaacaaagttcagttaggaaagagaaacacagaaggaagagacacaataaaagtcattatgt

SEQ ID NO: 1622 - DNA, 4348 bp, Homo sapiens
ctagatcttctggacaaacttctgcgatacgaccatcaacagagactgactgccaaagaggccatggagcacccatacttctaccctgtggtgaaggagcagtcccagccttgtgcagacaatgctgtgctttccagtggtctcacggcagcacgatgaagactggaaagcgacgggtaatgcggcattgatgcttgccaataaaaccaaccaaccaaacacaaaccttgaaggaaaactacagtgtgataaaaagaaattcttatcattccttctaaatgcacagaagagtaaagacctaaaagtctgtcaaaaagcaagaaagaaactccccagtgctagtctccagggagctgtcactgtggcagcatggggatgcacctagttcaggatctgaaggagctctgcctttggaatgcatgggagatagagactcggagttgttgtacatttacctttgtttaacagggcaccactgttgaattaacccattcagtcaacaagctctgaatgtctgacttcctatctattccattgtggtctgggtttcctttggtgaaattcaggctcaagtcttagcgaaatgtcagcagtctatactgacacaccagcctcatttacaaaaaggagatattaaaacagtgacagtattttttttttaagctctttacaaatccacgttttatgtattttttaatgacatgagctctccaggaaatgtacctcatccccgcagttttcctccaagtggattcatttgggagcaaactgcagtcactttcacaagagtcctctttgatgtcaggagggatcacgaaaccttgcaatgccatgaactggtccatggttatcatcaaaagttccatgctaagtgcataacttggagctcactataacctttgttgatttccctaaccataaaatcttgttgctatttttttgttgctttttctttctttttttttttttttggcagccttgtaaggagaacttcaccatttcccagcacatccctatgtgtgcgcctattttaatgcacctctctgaaacagagacctttttgttcacaaccataactaaagctggaaagtcagtcttcaggcaaggcgagggaggaaaacatcccattagaattttttcaggaaagacttatggaaaaaaatctctctctcccacctccttttatccccatgagacacagtttcccactgtaatcagggtaatatgcatttgtaagttctgatatgtgatacatttatgtgatggcaaagataagtctgtcttgcatgcaggtactagagttgtgtgggcagggtcatctgaaactcaagcaactcagaggaatatacaaggggcttggggaagaaaatggtgctcccggagcaagtgttggatccattttgcaaaccttcatgttagcagagaaagctagagtttgtttaaacaaaaatagggctgatttcattttggggactcaggagcaacatggtttgtaggcagtcccctcaccccagctgcagggccatgccacagctgtggggacttcacacacctaggctagaactagaggtgtctaccacatcaccctttaagatttctttattaactatttaataatgccatacatttttataaggttagatgtttgtttgaaacatttgtttacattccatattccaataaaatcttattggtattggtagcagatcctactctaaatgtagattctatttttgtcgtttggtctgtgggaacttaaaatacaaatgaaactcttctcttattatagagttgagtttatagagtaaaaaataaataagatcccaaagccaaggaatgcattcagttaaggttctcataccaatgctgcctgcttgcattgcacattctgtatactaatgtaaacatttgttctacctgaaaatcaaaagcaagatgtgagctctttggctaaacctgtattgatatgtcaggcagcaaaactcagtgtttgagattatcaaaagccttctaatatgcccttataggcaatcctgaagcattggttatcatcagggagatgtgccactgcgtgtctttcctgctccccctccaatctcctttatcaccccaccccactcctcagccctcacttttttttttaagttgcctgtctggaccaggcaagaggtgcctactggagggtcttggtgaagcggtaactccattcctttcccttgggtcccccaaaggtaataaaagtacctggaggagaatagtcaggtgattgacctctgcctgtctctctgacggtgatgtaggtgcagacaccgcctgcctgccttgtcctggggttttgtaactgcagctttgacacaggcattcttcctttgaagcacacagcttgcttttccagcacctagacttttacctctcttcatgccttagacttagaccataactgggcttgaaatgctcaccccttcctgggtctggtcttggcacctaggctattcttttccaaactgaagtgagtccagtttcagaccatctcttttcctgtctccaaaaaccatttttgtttccaaacctagctcccccgaaattttaagactatttacctagattcggagatggtcttggagagttccaaaaggggtgtgtgtgtgtctgtgtgtgtgtctgtgtgtgtgtctgtgtgtgtgtgtgtgtgtgtctgtgtgtctaatatttagactaaaccatggtaaatgtacgcacccagtatccttttcagttagcatattctttcttaaactcatctcagtacttttcatttgtttgcttcattatcttaaacaggttaaaagtgcctatgataaggacttaattatttcctaaagaaaagcaaaaaatgtggggaacagggtagtgttatactatcatctcaggtactgcctatgttcaagaacatagacctggtatggtgagaacaaaaggttcctatgccaaatccagatggctatatcatttgttggctacaagtgagcctgactgcaaggtttgcttctgctgagaaatcccatggtgagagtagaactcatgaagtgctgagtcacatttgcacctctggtgtggtggcagttcactctcccctggatgctgtcagctggccttgctttcatcctatccctgtaggcagggtaggtggctgggtaggagaagctattgagtgtatgacgcagaccaagctttcctgggccttctcaccaactagagaagcgctgatgtcgttcattgaggcacttaaacaccagtcactcagccaggcctcctcccagacattctgtaacatgtcagcactcacaaggtttaaagcaaatgtgttcccttgcagagaggaaggtgctctcagactgatagattagaggagacagacaaactcgtaatccttggggacttgaagagagtggctaggggaagggctgttaaaagaaaagggaccaataagaaaatccatctaaaggtagctcttgaggaggaaattaacttcttgaggggataaattagagggtaccaagttcatgttctggaatgtaccctggggagggcgctgcccactggattggtcccagtggactgaaaggtggtgctctcgagtcaggcgcttagtcccagagagagctgggtgccgcggggctcgtggtctgtgcctactcagggaaatgacttaggttctcccaggtgctctgttgataaggatggaagcagaactactttgagacacaagcaacaattggaagagtttttttatatgaactgaaatagatctaagagagcccggttaacagtttcctttaataccagttcagattaaatggttactttaggaacctgtgttactgtgtgagcacccacagaaacaagcaaacttatttcctacaaaaaatgaggggataataaccgatcagagtcacagtcgtttcaatataaacccttccgaaagcaaaagcagggaccacatgagcacacaagaagccaaagtttgtcagtgatcttaataaattaagactgagtaacatcctgcctttagaaaaaaataaccccgaggtggagaccagggcaggggaggtggcggagaagcatcgggccagatcaaccgttaataacatgcttctgagctatgtggatgtataaatgaaaacacccccaactaggtattgtagaggctggaaaaagatgtgatgggattatacaggtgatgcatatttttgttttgagactcaacaatgtgctacaaatgtgatacttaaccctgaactgcatgtattggggattgttttttaaaaagaaaaaaaacaactttgaatcaataaattaacagtttttc

SEQ ID NO: 1623 - DNA, 4765 bp, Homo sapiens
tttccccttctgtccatggtgtatctggtggggacaccgtccagccccattacagagagtttatgagaaaatgtccagcctcatgtatcctcacgggcttggtcatagcactcaagccagctctgcagccgccacgcgtgtgtgccagagtgtgctctggagtgtgcaggctgtgtgctgcgctgggactctttggacgaatctgacctgtggttcccactgcacagcgacatgctgggggaatgcagaatgagggactagaatggcctttaccaaggccacgctttgtttcgagtctgccagcttcttggtggctgggtctgggaaggggcgggagcacctaggtgttgcaatgccaggtccatccaggcacactgcctggcctggcgtgacctggacacacactgaccccatgccagggcactgctgggcagactggcttctcctgccctgcccagtggcttggggtcaggcttgccctcccgctgggaggccaccctgtgtcacagtgtgtcccagatgtcaccttcctccctgcacttctatgtgccgttattccattatttacttaaatgctctctttaaattgacgcattgcaagattgagaatttgtttcagtgctttacaaacagcattttcagttgccatggaaaggctatgctggtaaggctgggatgtgggagagagctggtagggacccctgcccggtgacatgtccagatgtgatcaggagggtcagagaggacggagacgaggacagtttctcaggtgtgactagggtaacttagtgcccccctgaggttacctcgctctggcaggagcctgggcccctcctctgaggactcctgcatttcacatctctgggctgggggtccacagggcactgacgtgtcctgggatttgaaagccccatctatgtctgagtccagtggctgagccagtactccctggggccactgagaggggtccgggcatggtccactgtgtctggggattcagcagcccctggattgaactccataaagcaagtgcaagatcaaggaaaggacaatggaagtgacctttagacaaacgtttgggcatcacaatcactgtctttcatagggtggcctagccttaggtctgttggggtggtgttggggcatggtctgctgtggacgctgctgcccagggcacgttctgcgtgtgtggagctattgcaagtctggtgttgccaggcttcttaatgtctgccagatgtgtggggataatttgtctatcatgtgtatgatgatgtgcattttcctgatttctaatgaatttgagtatccattctataattatgaagagctgatgaacagctcttggttggctctaaagctgcctgtgaatatcgtatatttgtccccactctctctgttttgcagcagctctgaaaaagggcagcccctggaccttgtctaggacctagacccagcaagcctctggtgctgctggccaggctcttgtctctcttgtctccagtgtcctgagccttgcctgcctcgtcctggctcttaactggctcctccacccatgtggaaggtttcctccctccagctccatcctcagaactcaacagtccaggcccacttctgatcccatatcaacgaccaagatgagaaaaacggtgttctttccctcaaagatctaacagcctagtggggtggcagcagggggactgacagctgttcccacatagcatgtgccataaactagattcatgggtggagtcaggaaaggcttcacagagcaggaggtggctgaactgagtcttgagggatgaataggagttcgccacatggatataggaaggcctttcaggcaaaggctgtaggtctttacagatcatagcttgttcagaaaaccaatcatccattcatgcacttaacaaccatgtgttgagcacctcctgtgttccaggcatggttctagatgctggggacacagcagtgagtgagaaggtctctgaccccatagaggggtcaagagtagaggagagagacagacaaagagcaagaaagatgatcaccaaggaaacgacacagtcagttaggtgctacatgccagggaagaatgggtgaaggtggcatggggctggggcagatgagcagtaggagagccacacatatatagaagcttcgagggagagacagagcacctcacaggccagtggggacgggcaggctatcagggatggcaccgggatgagcaactccttatatggacaacaatcaaattagatccctcttcacagtgtgaactcttcctggaacatgccagggtactgaaaaacgaaagctagtatttatgctataatgtgggctggcccgtgctgcccagcagaactctcagctgcctctcagctgtctgtgttgtccagggtggcagcctctggctgctcatggtgctgaatggcacttgaagtgtggctcatgcagccagggagctgctgatttaattgaactgaaatagctaccctggcccatggcaccatgttgcacacacacccccaaaggctggtggtgcccatttgctgtgcatctgtgcaccttctcatggaagtctcattccatcaaaccacattatgggttatttcacagatgtgtacacagagaggggaggtcccatgtcccaggtcacacgcagccagtcagcattagagctgagatgccaagctctcagccacacatgtgcactcacctggaacatctgtggagctgttagaatcgctgccacttttcatgaaactgaagtgcatctttgggtttgcaactaaagaaaccagctgctacaatgtcactaacataggattcaaaagcccttcggatttctggcagtctgtgcatagcaccctgcctcgggagttggctccttgtctagtatttaatacatccccaaacttggctttattttcagctgcctttgccttcattgtggtgaaagatagtgcgggtgactcagatgtggtggtgcaggagctcaagtccatggtggccaccaagatcgccaaatatgctgtgcctgatgagatcctggtggtgaaacgtcttccaaaaaccaggtctgggaaggtcatgcggcggctcctgaggaagatcatcactagtgaggcccaggagctgggagacactaccaccttggaggaccccagcatcatcgcagagatcctgagtgtctaccagaagtgcaaggacaagcaggctgctgctaagtgagctggcaccttgtggggctcttgggatgggcgggcacccaagccctggcttgtccttcccagaaggtacccctgaggttggcgtcttcctacgtcccagaagcagcccccaccccacacatgacccacaccgccctcacgtgaagctgggctgagagccctttctcccatccattggaggtcccaggagtgtcacccatggagaggctatgcgacatggctagggctggttctgccatctgagtttggtttcctggaatgaaaaggcattgccatctccattcctctgccctcttgagccagcacaggaaggtgaggccctgggatagcgcgcctgctcagataacacagagctagttagctagtagcaaccgtgttttctccagatctgtctagatacaaaggtcagaaatcttatttttatacttttatattgtggaagaacagcatgcaacactcacatgtagtgtgtggatttacttgaacatgttctttttaacatgtagttatgaaaatctccttttttgcctctactggtgaggaaacatgaggatcagaggccacatttttaattattgttagtgtatttggaagtctgaattggagatgtttgtacctctgtctaaacagttcccttgagaacttccaagcctccggcatcttttcctggtgagtgtttctcctgtgcttggttgtgtataatggagctaactcctaagcggtggggtgaatgtggccgccttagttctgaagctactccagttatgttctgtttcttcaagctgtgatccagaaagatttttgtgcccccagatgcctcttgataggagaggcaacatactccaaatagttgggttcttcagggaagctattagaaactcaggtgacttgttagagcactaacttggtcagagccaaatcctggcaaacgctgcctgaccttcactctgtggttggggcggtgagaaccactgaggtccaatgatgagacttggaggtctggatccagtctctctttgttttaatgtgacttaggtgctgtcaacattagcaagataatggaaatcacgacgccagtgggtgcttacctccctgctaggcatgcaggggctggcggttggcaggggaaggaggcccagtgagccgggtcccttaggggagggagagtttgtcctctttgccccacagtctacccttcagggccttgtggcagtgccagtgttcggggggtgtctgggccactgagtacccactcggtcgtggttgtgctggcctcttgggtgagtgaacctgtgaagcccaggaggtggtgttggctgcagggtacacaaatactgagtggtggtcttttgttacaggcttagcaacaaagctgtgccctgggcatggggggctgtagtgtagctacagttgtgcgtttgtgaaatggcttagctttccatgttgctgagaggaacctggacatggtcccgggcatctgaatgatctgtaggggagggagttcaaataaagctttattttgttcattt

SEQ ID NO: 1624 - DNA, 5150 bp, Homo sapiens
agaactggtgctgctgttgtaaaagttcgaattcatgaaccattctataagaaagtggcagcagccttaatacgtctgcttgttttggagaatatatttcttataccatcccatgatatttatctcttagtaggaacatatattaaataccaagttgcaaaaatggttcaagggagagtgacagaggtgaaatttcccctggaacattatatactggaattgcaagaccatagagttgcacttaatgggtctcattctgagaaagtggctatactggatgacaaaacagccatggtgactgcctcacaactgggccagactaatcttgtctttgtccataaaaatgttcatatgcgatctgtgtctggactcccaaattgcaccatatatgttgtagagcctggatttttaggtttcactgtccaacctggaaaccgatggagtctagaggtgggacaggtatatgtcattacagtagacgtctttgataaaagcagcacaaaggtctatatttcagataatctcaggattacatacgactttcctaaggagtactttgaagagcaactaactaccgtgaatggatcttaccatatagtaaaagccctgaaggatggtgttgtggtaataaatgcatccctgacctccatcatttaccagaataaagatattcagcctataaaatttctaatcaaacaccaacaagaagtgaagatttattttcccatcatgcttacacccaaatttctggcatttcctcatcatcctatgggaatgttatatcgttataaagtacaggtagagggtggcagtggcaactttacctggacttcttctaatgaaacagtggtcatagtaaccacgaaaggagtggtgactgcaggtcaggtcagggggaatagtactgttttggcccgagatgtacaaaatccctttcgatatggagaaattaagatacatgtcctgaaactgaacaaaatggaactgttaccatttcatgctgatgtggagattggccagattatagaaatacccattgcaatgtatcacataaataaagagaccaaagaagccatggcattcacagactgctctcatttatccttggatctgaacatggataaacaaggagtctttactcttctcaaagaaggtattcaaagacctggaccaatgcattgttccagtacacatatcgcagctaaatctcttggccatactctggtaacagtaagtgtgaatgaatgtgacaagtacttggagagcagtgctacatttgctgcttatgaacccctaaaggctttaaatcctgtggaagtggcattggtgacatggcagtctgtgaaggaaatggtatttgaagggggtcctcgtccatggatcttggagccctcccgattttttttggaattgaatgcggagaagacagagaagattggaatagcacaagtgtggctgccatctaagagaaaacagaaccagtacatctaccggatccaatgcctggatttaggggaacaagttctcacattccgaattggaaatcatccaggtgtcctgaaccctagtccagctgtagaggttttgcaggttcgcttcatttgtgcccaccctgccagtatgtcagtaactccagtatacaaggtgccagctggtgcccagccatgtcctctgccacagcacaacaaatggctgattcctgtatcaagactgagggacacagtcctggaactagcagtgtttgatcaacataggagaaagtttgataatttcagttcactaatgctagaatggaaatcctccaatgaaacactagcccatttcgaagattataaatcagtggaaatggtagcaaaagatggtggcagtgggcagacccggttacatggtcatcagatccttaaagtacatcagataaaagggactgtactgattggagtcaattttgtgggctattcagagaagaaaagcccaaaagaaatttccaacttgcccagatctgtagatgtggaactgctcctggtagatgatgtaactgtagtgcctgagaatgccaccatctataaccaccctgatgtaaaggaaacatttagccttgtggaaggatctggttattttttagtcaacagcagtgagcagggtgttgtcaccatcacttacatggaagcagaaagctctgttgagttagttccattacatcctggattttttaccttggaggtctatgatctttgtttggctttcttgggtccagcaacagcccacctcagggtgtcagacatacaagagctggagcttgatctgattgataaggttgaaatagacaaaactgtgttagtgactgtgagggttcttggctcttccaaacgcccattccaaaataaatacttcagaaacatggaactcaaactgcagttggcttctgccattgtcaccctgacaccaatggagcaacaggacgaatactctgaaaattatattcttcgagctaccactattgggcaaaccacacttgtggctattgccaaggacaagatgggaagaaaatacacatcaactcctcggcacattgaagtgtttcctccattcagacttcttccagagaaaatgacactgattccaatgaatatgatgcaggtaatgtctgaaggtggcccccagccccaatccatcgttcacttctccatcagtaatcagaccgtggctgttgttaataggagggggcaagttacagggaagattgttggcacagctgtggttcatggcaccatccagacagtaaatgaagatactggcaaagtcattgtgttttctcaggatgaagtacagattgaagttgttcagctaagggctgttaggatccttgcagctgcaactcggctcatcacagctaccaagatgccagtttatgtcatgggagtaaccagtacccagacccccttctccttcagcaatgctaatcctgggctcacattccactggtctatgagcaaaagggatgtattggatctagtgcccaggcattcagaggtttttctacagctcccagtagagcataactttgccatggttgtccatacaaaagcagcaggcaggaccagtatcaaggtcactgttcactgcatgaacagttcctctgggcagtttgaggggaatttgttggaactctctgatgaagtacagatcctggtgtttgaaaaactccaactcttctatccagagtgccaaccagagcagattctgatgcctataaattctcagctcaaactccataccaacagggaaggagctgccttcgtgagttctcgtgttctcaagtgtttccctaattcatccgtcattgaggaggatggtgaagggctcctgaaagctggttccattgcaggtactgctgtattggaagtcacttctatagaaccttttggagtcaaccaaacaaccataactggggtccaggtagcaccggtgacatacctgcgagtgagcagccaacccaagctatacacagcccaaggaaggaccctgtcagcatttcccttgggcatgtctcttaccttcactgttcagttttataatagtatcggagagaaattccacacacacaatacccagctttatctggctctgaacagagatgacttgctgcatattggaccagggaataagaactatacttacatggcccaggctgtgaacagagggctgacacttgtggggctttgggaccggagacatccaggcatggcagattatattcctgttgctgtagagcatgccattgagccagacaccaagcttacctttgttggagatatcatctgcttcagtactcaccttgtcagccagcatggtgaacctgggatatggatgatttctgccaacaatattctacagacagacattgtcactggagtaggagtggccaggagtccggggactgcaatgatttttcatgacatcccaggagtagtgaaaacatatcgagaggtggtggtcaatgcatcatcaagattaatgctcagttatgacctcaagacttatctcaccaataccctcaattcaactgtattcaagctcttcatcaccactggcagaaatggtgtcaatcttaaaggattctgtaccccaaaccaggccttggccattacaaaagtacttcttccagcgaccctcatgctgtgccatgtacagttcagtaatactttgctagacattccagcaagtaaagtctttcaggtccattcagatttcagtatggagaaaggggtttatgtctgcataatcaaggttcgaccgcagtcagaggagctgctacaggccctcagtgtggctgacacctcagtctatgggtgggctacactggtcagtgaacgtagcaagaatggaatgcaacgaatcctcattcctttcatcccagccttttatattaaccagtcagaattggttcttagccacaaacaagatatcggggagataagagtactgggagtggacagagttcttaggaagctagaggtcatctccagctccccagttctagtggtcgctggccatagccactctcccctcactcctggcctggccatttactctgtaagagtggtcaacttcacttccttccagcaaatggcatcacctgttttcatcaatatttcctgtgtactcaccagtcaaagtgaggcagtggtagtgagggctatgaaagataagttgggtgcagatcactgtgaagattccgccatcctcaagcggttcactggctcttaccagatcctgctcttgaccctctttgcagtgctggcatcaacagcttccatcttcctagcatacagtgccttcctaaacaagatacaaacagttccagttgtgtatgtaccaactctaggaacaccacagccaggttttttaactccacaagttctccccctcacttcatgagtctacaacctccattggcccaaagtcggctgcaacattggttatggagtataaggcactaacctctgcttggacaagtttctcttaactgcaggggaatgaagatttctagtcctcgacaagaagcctaacagcaacttctacattaagtttccagataaggcttctgagaactataaataaagcatcctaagctgcttcttaaaactggt

SEQ ID NO: 1625 - DNA, 3781 bp, Homo sapiens
tagaagaactgcgtacacaacttacgaaagcagaaggtgatcgaaagggtttacagcatcaagtatctcagatttccaagcaacagtcaaactatcaggatgaacaaggggaggactggagatttaggagaggggttgagcgggaaaaacaggacctggagaagcaaatgtcagatttgagagtgcagctgaacttcagcgcaatggcatctgagttagaggaagtgaaacggtgcatggagagaaaagacaaggagaaagcacatttggcatcacaagtagagaatttaacacgtgaactggagaatggggaaaaacagcaactgcagatgttggatcgacttaaggagatccagaatcactttgacacatgtgaggccgagcgtaagcatgctgaccttcagatctcagagctgactcgccatgcggaggatgcaaccaagcaggctgagcggtacctcagtgagctccagcagtcagaggctctgaaagaggaggcggagaagaggagggaagacctgaaactgaaagctcaagaatccattaggcagtggaagcttaagcataagaagttagaacgagcgttggagaaacaatctgaaactgttgatgaactgacaggcaagaataatcagattttaaaagaaaaggatgaattgaaaacccagctgtatgcagcattacaacaaatagagaatcttcgaaaggaattgaatgatgtcctaacaaagcgtgcccttcaggaggaggagcttcactccaaggaggagaaattacgtgatattaagtctcatcaagctgaccttgaattggaagttaagaattccctggataccatccatagactggagagcgaattgaaaaagcagagtaagatccaaagccagatgaaagttgagaaagctcacttggaggaagaaattgcagagctcaagaagagccaggcccaggacaaagctaaacttcttgagatgcaagagtccatcaaggacctgagtgccatccgagcagatcttgctaataaattggctgaggaagagagagccaagaaagcagtgcttaaggacctttctgacctcactgcacaggcaaaatccagggatgaagaaacagctacaatcatcacacagttaaagctggaacgagatgtgcaccagagggagctgaaagatctcacatcatcattgcagagtgtgaaaacaaaacacgaacagaatatccaggagcttatgaagcactttaagaaagaaaagagtgaggctgagaatcatatcaggactctgaaggctgaaagtttagaagagaagaatatggctaaaattcatcgtggtcagctggagaagttgaaatcacagtgtgacagactgacagaggaattaacccagaatgaaaatgagaacaaaaaactgaagctaaaatatcaatgtttgaaggatcaactagaagaaagggaaaaacatataagcattgaagaggagcacttaaggaggatggaagaggccagattgcagctcaaggatcaacttctttgcttggagactgaacaggaatccattcttggtgtgataggaaaggaaattgatgcagcttgtaaaacattctccaaggactcagtggagaaattaaaagttttttcatctggtcctgatatacattatgacccacatcgctggttagcagaaagcaagactaaacttcagtggctctgtgaggaactgaaagagagagaaaacagagagaaaaatctgcgacaccagctgatgctctgcagacaacaactcaggaatttgactgaaaacaaggaatctgagttgcagtgtctctttcaacagatagaaaggcaggagcagcttctggatgaaatacatcgtgagaagagagatctactggaagagacccaaagaaaagatgaagaaatgggatctctgcaggaccgtgtaattgcattagaaacgagtacccaagtggccttggaccatctggagtctgtgcctgagaaactgagcctactagaagatttcaaagacttcagaaggtgaggtttcaccatgttgcccaggctggtctcgaactcctggactagagctatcctcccaccttggcctcctaaagtgctgggattgcaggattcctgcagttcatctgagagaactgatggaagatattccaaatacagggttcgcagaaattctcttcagcatcaccaagatgacaccaagtacagaaccaaaagtttcaaaggtgacagaacctttctggaaggttcccacactcgtgggttagatcactcatcctcttggcaggatcacagtcgcttcctgtctagtccaagattttcatacgtgaactagggtgttttaaatagcatttccaggaaaggaaggctggaaggctgctgtcaaccacactacactgcttaaatctcgtggagccatgatggtgcatcaggttttgctatgcctatcttctctgcaacccaagagagggaacaaagagcagccaggtgggattagatgctgggggcttaagcaataactgactccattttctgtttctacactccagccagtgccaagtgattttttaaaaatttaaatacttttctgccctatcaaatacagggtatacactactgaaagaacgctctgctagtaaaaagtgtttattgattcaagcagaaaaaaggggggaaaaaactgtgggtgtcagatgaagctgaagggaagtatccaggaagagagggaggaatggggagcttttcttttgagtgtcctattaaaatgtgtgagtggaagttgggggtggatttcatgagtaaatatggaattttgccaccaaattctttcctccagagctaatattctcatgggatgttaatattaatacaaggaaaaaggccctgggtgaagaaaaattattttccccttcaggggcagagttctctcaggacgacagtgaggttaaagagttccagaaaatgctagtagaactttaagcacgctatcattaacagacagaaaaacagactacaacctactggattcattttggaaagtagaaaaaaggaatctggtaaaatcagccaaagcaaggacctttccccctccttagaactcgctaagctttccatggtgtgtgggccttttagttccactcattattcaggcctaattcaggtcatcaaaatagaaatgcatgggacaggtgactgacatgactgcatcgtggtttagatgtatagataacacggggaggtgctttacattttaagactttgttcataattcttttatttatggtttctctgaatcattcttttggaacattctaaaagagccagaggaaaaaaatggaactttttctcaagggacttgacttagtggatagctaaatgtccagtttcaaaagcttatccttttgaaatgcttttatacttataaaagcccaaagaaaccttaatatgggccacataactataatgtaatttttccaaggtaggaaaggcagtaatactgtactattagaatatatggattttcataagagcagctgttgtttcactaaggtttacattattttaggtcctagttttctgtttggaggtgtattaatgagttccttggttaatttattcccattctctatatttctgattcttaattgtatgatgtggtttatattcattgttttgacgtgataggaatgccaacaatgtgcctttggttttcttatgcttaaaaaataaaaaaataaataaacattaaatgtaaaaaaaaaaaag

SEQ ID NO: 1626 - DNA, 4652 bp, Homo sapiens
actagtgtgagattcatgcagcatcataggaaggggggtgatgtgtttgaaaacagtgagcaggctaatgtattaatctgctaattctgtctcctgagttttctctcttttcctccctcctgccacatgaagtgtgcttggcttcttacctaccataattagacatcttttcttcctcagagaaggcatgagacagggatttgattgtagttatcactgtaaacatcaaactgatttttatgcagaactattgccccagggcataccttccaaggaacctggtctctccttacctagcgaattccacatacacatagatgtacacctacctgtacactcacagattgggtggtgattaaagggacagaatcggggaccagcttcttgttaggaatgcagtgttgccacggcatgacagcatggagcagttgagggaatggctgcccaggagaactcagaactcttgaaatgtagttccaggctgccatcattgccctgatattcaggccgtcagacagatgtgtgttgtaggccctgaacggcacagagagtggcagaacaggctacataaacagctcagtccagaattgtctttccagactgcctgccctcagtcacaacccccaccagggaagggaagcggccccaagactccttcctccttcacccactcgaggaaacagagttcctgttacgtggcatgaatgatgtcttttggccccagttaatccctctgagtcaccaggtggcctttgccaagtgctggagctggaagagatgatagagacactcatctggcgtcctgaggctctcctcacagctgttgaattctagaggtgcatttcagtgtcttggggcatggcaagactttggaggctccctgagcagagcagtggagatgcccaaaaagaaggaagaacctaggatggcagatggggccccccttgccctggggaacttcatgtttgtactttctcaggaagcacacatttccccagttcagcgggagagagtggggagactagcagggaaattgctttccagctttgtgctgggtggttggggtgagggtggccacggaaggaggtgaaatcaggctgacctcaagatagacccaagatgtcccagttctggccgctctaagtctctaaagcagcagctggtgggaggggcagtattgggcagtatgtcagggaggccacctgtctgctcacacagtacaattgatgtgcccctcccaggcatatatccctcttcctccttgctgggcccccatgggtagataaggtgactggaggggtgccaagaaaagggcggtgcccccacaggcatctgaaaacaaagctgctgctccatttgcccagtttgaagattagaatggttttgtgattagccaggagggggtgggggtcagagttctggacacctcactggagtcgggggtcagcataccctaccaaggctgacattcactcctaggtaatggcctgggaccctcaggtgacttgtccactctctggctatgtattgttgaatgaaaaggggacatgtaaatctcgtttcagctgttctgaaataacccttgccacatgggaacacagtctattcaacatgaagaattcaaacctaacacaagtgggtgagaagcaggaacccactgctaggccccaccgcgttccctcagaggtggtctcagtagctggaacttggagaagtagttttggtggggtgttgggacgtgggtgaatccaggtcctggtttggaattgctctggtgggaaccgtcagctaacgtcagttggaagctctgtgtcctccccctcctgagtcctgtttttcctggaggaccttggcccacccctgtggaatgtggggatgtggggaagaaagctgactgcttttactcccactcagaaaattcggttgcgctcttcttcaagggggtgctcctcagcctgcaccccagtgaaggggcctctgaggaactcccagtgccactggcaaacagtctgtaacctttgggccccagccacctcccagcccctgttctcttaattcctgccttcttggcttggagggaggaatctccatttgtaaaagctgagttagggaactagagggttcctgaagctttaaagcgcctcaaagccctcaccctgcacgtgacctgtcacctggagcctgccccagcccccacgcctgcctgttcttataggggctccggtgcctccagggtcacacagcaccatgtggaaactattcctcagggcagctctccttggcctttttatcccctgaatcatgcatttttctgcccttatttggtgtggtttggttgctgggcagctgtccagggtgagtttgcaggaggaagcacagccaagcagcctcgctctgcttatgggacagtcttcctcccaccctccctgagagtgaaagggccccacagagaccatcaggcatggatgctgaactgctgggaagggagctcaggctttttctttttagtccccaagagaagaattctttctcagatgtttttgtggttggagaatatttttgccattgctttgagaagacttcccctcctaactccccctctttccttggaatttccttccttaaatggaaagccttcaacattcactccaagctcgcccttttgctcccccaaggaaaaataacaagcaaacagaggtgcttgcccagtgtctctggaggggcttcccttagaggtgggctgtgtgatcccctgccaggagggggcgatgggggccacttgttcattaacgatgttaggctcaaggtaactgaaccttttttgcacatgcctctctgcagagagttgtgcataaacacactgctcggcaggacagagcaagattgggaactgagggcaaatcccttcctccgtgcgtcgaactcttgatcccaggccttaaaagtgggatctctgcactctgggctttctctagcttccccagggaagggaggctcggggtgaggtgggcacggggcatctttcctgcccaactgtgaagtcctaaaaagcttcacaaagtttctattgaatgacagctttcttcttctctttctccagggttgagttccagaataaattctacagcgggaccggtttcaagttcttacccttctccttcgagcatattcgggaagggaagtttgaagagtgagtccctgtgagggccgtgtgccccatgctaccctccccgcctccctccacagtgatcagctgtgcctctctgcctgttggttgtgatctgtgggcaccagctcattcgtgtcaccctgtctgtgagtcatttagatagaatagtcctccttgggtctcccaccacccctagctttgtgtgtagtgtagtgattttctggctgtcactcatactcactgggcaccagccttgccctcttagcctccatccatccagacagcccttcccacctcctggtggtgagccagtctgcattcccacgccatcccaaagccctttcatcttccccgtgcattgtagatggaaggagcacccatgccattcacatctagactttgagttccctgcatctgccaccgtagtttctagcaggagtagtggggggagtaatacagattcttccctagaaggggacactggtaacatgtcccactcttggattagcaggggtgggtccaggaagatgatatttgcgtcttttgcccacccccctggcattcagctggacccaactaggccatcatgagtggcttctccctgtcatccccaggggtcataggatatctacaccgcctttctgaccccaccctgcactcccatcctttcctctctccccgttcatgccctgcactacatagcacagccgggatgcttggaacagaggccttggctgctccgcagtgcacagggcttccctctctcggggttggcttcttcccaggccttgcatgggccctgcccacaagcacaccctcaggccgagggtgcagactgatgctcttccctgatggagaccctgagatcttccccacccccaatcatgatgtcttcagtgtgggactggggtcctcttggttctgcctgcagcctgcctggctccgcccctagtgccccctcctcaccacactggccccaggtctcaggaggggtgtcctgggcagggaaggtcagtgtcactgatggtttgctgtttggaagccattggcagggctgccgtgcatgtggctgtgagggctgcacagtcctgccaaggggcttcctccttgtcaccccgaaccttgtaatcgtgtgctggcgtggcagccctggctaagttaatccccaccgctttcagtggtagaaagaattccctgagtgggccaggctggtgccctcctcctaccctggcttttctgagtgagctgcctggagccctcatcccctctcccaggctgggctggccctgggcggggccactgtgtgctggcccactgtgacctgacccgaccttgtgcagcccccctgccctggtgtcctgggttttcgtgatgatctttgctctgtttccagtggggtttgaagcagagttcagggaaccctgcccaaggtcctcctgttcagacattcctatgttgaataaagtatgtttgacttccccgg

SEQ ID NO: 1627 - DNA, 3739 bp, Homo sapiens
agtgtgattcattatgacaatgaggccatcgctcggctgttggaccggaaccaggatgcaactgaggacactgacgtgcagaacatgaatgagtatctcagctccttcaaggtggcacagtacgtcgtgcgggaagaagacaaggtgagactggacttcagagagcaacgtaggcacagacagtactggtaaacacagaagggtaccttctgagacagtgcaggagaaacactgtcagagggattagaggagagatttagaaaacatgaggagagcacattgcaggtaagagatggcatggaacatgcgcaatgtccagaaaatgtatgcagagccacgaagctgcaggagtggggagaccggattgggctgacgcagcagagtagggatttccttgcagtggaaggattagcaaagaaggagacccccagtgttcattcattctgttgcccttcagattgaggaaattgagcgagagatcatcaagcaggaggagaatgtggaccctgactactgggagaagctgctgaggcatcactatgagcaacagcaggaagacctagcccggaatctaggcaagggcaagcgggttcgcaagcaagttaactacaatgatgctgctcaggaagaccaagacaaccagtcagagtactcggtgggttcagaggaggaggatgaagacttcgatgaacgtcctgaagggcgtagacagtcaaagaggcagctccggaatgagaaagataagccactgcctccactgctggcccgagtcgggggcaacattgaggtgctgggcttcaacacccgtcagcggaaggctttcctcaatgctgtgatgcgctgggggatgccaccacaggatgccttcaccacacagtggctggtgcgggacctgaggggcaagactgagaaggagtttaaggcctatgtgtctttgttcatgcgccatctgtgtgagcctggggcagacggctctgaaacctttgccgatggggtccctcgggagggactgagtcgccagcaggtgttgacccgcattggagtcatgtctctcgtcaaaaagaaggtgcaggagtttgagcacatcaatgggcgttggtcaatgccggaactgatgcctgaccccagcgccgattctaagcgctcctccagagcctcctctcctaccaaaacgtctcccaccactcctgaggcttctgctaccaacagtccctgcacctctaaacctgctactccagctccaagtgagaaaggagaaggcataaggacacctcttgagaaggaggaagctgaaaaccaggaggaaaagccagagaagaacagcagaattggggagaagatggagacagaggctgatgcccccagcccagccccatcacttggggagcggctggagccaaggaagattcctctagaggatgaggtgccaggggtgcctggagagatggagcctgaacctgggtaccgtggggacagagagaagtcagccacagagtcgacgccaggagaaaggggggaggagaagccgttggatggacaggaacacagggagaggccggagggggaaacaggggatttgggcaagagagcagaagatgtaaaaggtgaccgggagcttcgaccagggcctcgagatgagccacggtccaatgggcgacgagaggaaaagacagagaagccccggttcatgttcaatatcgccgatggtggcttcacagagcttcacacactgtggcagaatgaggaacgggcagctatttcctcggggaaactcaatgagatctggcacagaagacatgactattggcttctggctgggattgtcctccatggctatgcacggtggcaggacatccagaatgatgctcaatttgccattatcaacgagccatttaaaactgaagccaataaggggaactttctggagatgaaaaataagttcctggcccggaggttcaagctcctggagcaggcgctggtgattgaggagcagctgcggcgggcggcctacctgaacctgtcgcaggagccggcgcaccccgccatggccctccacgcccgcttcgccgaggccgagtgcctggccgagagccaccagcacctctccaaggagtcgctggcggggaacaagccggccaacgccgtcctgcacaaggttctgaaccagctggaggagttgctgagcgacatgaaggcggacgtgacccgcctgccagccacgctgtcccgaataccccccatcgcagcccgccttcagatgtccgagcgcagcatcctcagtcggctggccagcaagggcacggagcctcaccccacaccggcctacccgccgggtccctacgctacacctccggggtacggggcggccttcagcgccgcacccgtaggggccctggccgccgcaggcgccaattacagccagatgcctgcagggtccttcatcacagccgccaccaacggccctccagtgcttgtgaagaaggagaaggaaatggtgggggcattggtgtcagacgggctggatcggaaggagccccgagccggggaggtgatctgtatagacgactgactggatcccaggcctgcccttcacccaggccccgtccccgaggccgacccccagctcaagcgctggggcctgctgccagccctccaccttccccaccccttgggccatcactgggctaggaacccctttgcccctctctgcagctcctctcttcaagaagggccctttgtctttctccactcccacacacctttcccaccaagccttgaagactgtgctggtgagaagaagtctgggtgggagatggctggcagggtcttccaagtaccttcctcccacactgccaagtatacacaacttcccagtaaatggttgtggggaggaaagaggtggagcctccccagccgtttccctgcagaatcagctctgtctcatgtggaagtggagaatcagccttgcctggcctttaggaacttttgtggggaagagagctttgaagagaggagggggactttagagagggatgaaaatgagccctgggagggaggaagggacgaggaggggtggctgcatgttaccgtcccctacctctccccacgtggagggtggagcagttatgagggaggaagtcaactgctgttcagcctcagaataaaggtgccgttcactggctcagttacctcctgtgtaccggcatcttgtgttgggaatgttcccccctccctagggaccaaggaccacccctacaaaaagagtaatggttgggtgatactccctcaagccaaagaggagctccccaacctgttctagggacccaggtaacctagaagggtgggagagaatacaatgggccagatgtggtggaagcccagctctggggctcaggttcctggaagacttctactaccctccctcctcaaggcctggatacagactaaatttgtataagtcaggcaggggacctagtcagggtcttgggagctaccttgtcgttgggaccagagcaaaatagtggagggcaggctagggaaatgtgggcacatcccccctcccaggaggggccggggagagtggcagtttgcatggcgaaccccccacttcctctttgctgccccttcactttcttgctgcccctttcccagtctctcttcacacccactcctggtctgtcctgatcccctcttctgtatcaggtttattggttgtacatataaattatactttcctttc

SEQ ID NO: 1628 - DNA, 3714 bp, Homo sapiens
agaccacaggacctgggtgaccctgcctcccacagccctcacctccaggagtgactgtgggctctgggcccaggactggctgcttgttgcggttccttctcaaagggagccactgtccacaggtccaagtgcctgctgggcggctgttcccagaggcagcccctgcaggtgtgcagcaaaggggccgacacagagctcttgggtcaaggctggcacgtgctccttgcttacctggaggtcatcagagttgccccacgcccctggccttcgggcaggtggaggcattgggttcctctaaggtctttggttggggaagtttgggcccagaacacagcactctgtcctcaaagactatgacgtcacatgcaggttgcgtcacacgcaggtcgcggtgcactccatccttggaagtgttcctggccgtagccaggctgagggtgcctgcagacccaggcctgtccacaagatgtccccccacggacatgcctggccgctgcttcagggagggtcagagggatgattggggcagagggatggatttgcccaaatgtggcagccaggccccatgcatttggcatggccagctccttcaggaaggcgggagagatggaacaaggtggtgactctccagggcagagcggcaaggccctaaggtgtggactccaggggaagcgggctcaccccaacgggccgagctccgcaggtgtggtgggcttttccctaaccccgggccctgttgtttgacatggaaacagctttctccctcagtcctgcatgttgagtgtccagaaccggatggtgacaccaggcagactgggtgctgtcataggccctccttccacagagttcatgcacccctgtgtgcaccaggcctggcgtggagtggagcccacttgagtggagggaggcagagcgtggcgacgcgcagggaagtgcctgtgactgagaaggcaccccctgcaggcccagagcctccatggtgacagttctgagcgcagcatgctgcccacgtgcagcacatccctgccctgtgggattgttagaaggtgcgctgtggccggcatccctgggacaggatgggacgtggcatgggctgggtgcctgcagtcctcctgccgtacccaccatgggcccaagcgccaccaccccttgccttgcccagggctgtctcctcccttccctcctccttggcccccatgtccctgttcaggtctttcctgaaccccactctgttcctggagggggaggcgtccctcctggggctctgctgccaagttcgtggtgctgaccttgtttctgagggccatggcccctccctgataggtagaccccagcgtgaggacgtccatttcaccctgcgttccctgggcctggctgctgatcgagggaagggtggctgccccggcaaaaggggctgctagctcctggcttgagagttctaggatgagttggtttcaggaaatggagagaattctgaaagtcctgaaggcagccctgatgttggtcttgtgagtgtggtggtttgacctgggctctgggaacagacttggcttggaatcccagctgcactgttcagtacctctgtgaccttgagcaggtgacatggcctctctgagcctcaatctcctctgagaagcgggttcacactaagcactaagcatggcctccctgaggtcagaggtcagatgcgtgcccagggcttggtgaggtatgtggcaggagtcagtgtgagatgagcagagcctctttttttttgagacagggtctctctctgtctcccaggcaggagtgcagtggcgcaatcacagctcactgcagcctctacctcctgggctcgagttatcctgtctcagcctcccagtagctggaactataggcacacaccacaccctgctaagtttttattttagcagagatggggtctcactatattgtctaggctggtcttaaactctggctcacgtgatccgtcttggcctcccaagtgctgggatttcaggtggcagccgccacacccagtcaaatggagcctcctgttacaacaaggctgctcagggaacagtaacttctcggtcctaatacttattctttcccagggaggctcagcctggtgtggcactttgtgttgaaccagtgagtgaatcattagaatccttgttttcctcatagaacttccaaccaggtttattttcacttttaactttgccattgcctaatgcccaaaagcaagtgggaactctgggcctccccagctgggtttgagcaggtgctggggtgttccgcctgcagcctcctccccgccgccccctcctcccaaacccggtggcttacggcaccagcgtggcctctcccagctctggaggccagaagcccaacctcaaggtgtggacagacccacgctccctctgcaggctccagggaggatccttcctgccttttcccacttctggtggctccacgcactcccgggcttgtggctccagtttctgcctccgcctccgtgccgcactgttcctgcgtgtctgtgtctccatgtggtgatttcctcacagggacaccagtcattggattaggacttaacctgtgacatcttaacttgatgacatctgctaagaccctcagggggcgacacagttcaactaagaccctctttccatctgaggtcccattcacaggtactggggttaggacttcaccctgtcttctgggggcgatacccttcaacctacaacagcccttggtgagtgtccacaacgctaatgaggtgagagtggcatcccctcaagcgaacaactttccccaaattgcagccagatgtggcccagcaaagagccagggtgcagccatcagcaagcagagccccccagttctggagggtgtgtgccgagatgcttctggggaaaggcctgggcctggggctgggctgcagctgtgggacaagctgctgtctgggccaggagccactcagcgtcgccaagctgctgtccaagttaaaccaattcagcatctggcaccttgtttacaagcgtgatttgggggtttcttgctctccagctggcaagcagctggcagtggtcagctgaggccagagcctgggggcacatctcccatggcagcccagagggcaatggacaccccccactccgcccagccctgtgaccccatatggatgctttcgctgggtgaggctgcagcccccgcagggagtgctggacttgggcgcttttgctttacctgggacttgatgagatggggcacccgagaccagccacgcattccacagctgtgccccagggtccaggggatggggctgggggtggtcggacaaaaccactgcccacacttggagctgggggcagccgaacaacaccactgcccacgccttcctggcgagagacggttccagtctccccggtgctggcgtgggcacgccgtgggacagaagcgcagtcattcggcagaggctcccggctgttctcacattgtcagacccaccgtcaaggtcatttcaacggcccctttgcccggccgggcctcctgagttccctctgagcctcagagcagctcgtacacacagctttgggtttctaatggggatggggtcttcaggcctcagccccttctgggcatttcttccgttacaaaggaaaggaaatgtaccgaacactagaaacagtgtttaataaatagcagatttctcaaaaaaaaaaaaag

SEQ ID NO: 1629 - DNA, 4399 bp, Homo sapiens
caacctttagacctagggcttactataactccagtatccacaaaggaggctgagcattcgacaaccctgagaaaaactgcagttcctccaaaacaccctgaagtgactcttgcaactccagaccatgtgcaggctcagcacacaaacctaactgaggtcacagtttaaactttggatctgaaacttaccacaattccacaacctactacagagaatatatttcctccaaccatggagaactcaaatcaacttccagaaccacctacggaggttgtagctcaacttccacctcgttatgaggtgacaattccaacacaaggtcaggatcaagctcagctttcaacactggccagtgtcacacttcaacctttggacctggggtttatcatcactccagaatccactacagaaattgaactttctccaaccatgcaggagaccccaactcagcctcctaaggaatttgtaccccaacctccagtatatcaagaggtgagtgttccaacaccgggtcaggatcaagctcagcatccaatgtcacctagcgttacagttcaacctctggacctggtggacttaccataactccagaacccactacagaggttgaacattctacacccctgaaaaagactacagttcctccaaagcaccctgagatgacacttccacatccacaccaggttcagactctacattcaaacctgattcaagtcacagttcaacctttgggtctgaaacttaccttaactctatggaggttgaatcctctatggaggttgaaccttctccaaccatgcagaagaccccaactcggcctccagagctacctaaggagtttgtagctcaaccgcctgtgtattattatcagatacccattccaacaccaagccaagatcaagctctgcccttctacagccccgatgactacagctcctcctccaaagcatcctgaagtgacacatccacctccagacaagaaccaggctcagcatccaaacctgactcaattcacagttcaatctttggacctggagcttaccataactacagaacctactacagaggttaaaacttctccaaccatggaggagacctcaactcagccttcagacctgggatttgccatagttccagaactcaccatagagactgaacattctacaggcctggacaagactacagctccacatccagaccaagttcagactcagcattgaaacctgactgaagtcacacatttcaccttctgaactagaacctactcagaattcactggtgcagtctgaaagttatgcccaaaataaggctttaactgcacaggaggaaccgaaggcctctacacgcaccaacatatgtgatctctatacctgcagagatgaaacactctcatgtattgatctcagcccaaagcagaggctccaccaagtgcctgtaccagagcccagcacctgcaatgacaccttcaccatcctgtgagaattgtctttcctcaattgttctgtgtcctgcctgacatgacagccttttcgtggaggccttcctgggcctcctttatctcaccaaaccgaactgacagcggactttctgctttcacctttcttgtcaattcttccttctcctggttctcctttactgttaggccccttctctggtcttttacttgtgattgctcttaacccttttcttatccactttcctttagccccatcacatcattgcttaacagcggctctcctcccattttcacttcaccctctttacagcagcctgtccctcttcccatctcagtgatgatgctctaagtggttaagagttgattctgtagccaggctgcctgggtttgaacccaggtctgtcatttattagcttggttaccctgagcaagttattcttctctgtgactcagtttcctcatctttaaactggggattatgctagttaccacgccataggattgttgtgagatttaagtgagtgcatacatgtattgcttacattggtgcctagcatatgtgggagtgttggctgctaacatgattactcagtcctttagttatgtccagaacgcatctttgtccctggctttctatctgtagcagtcgttttctgtcaacccttggccaagtatgatactgtcttcagaaatgaaaatgataggagggaagaaagagactaggcatgaaaaggaggtatatataatgaaatactacaagataatgcagaccatcggtgctaggattcaccagaatctgtgatccttgaggtgtggagatcagggaaagctacatcaataagctaaaacttacttgggacttaaagtgtagctataatttgttaaatagaaaacaaatgggagtacagtctaggcaaagtcatgattacaggtatggttgaaatttggtagacaaggctgcagctcagcctccagagaaccccagggaggtggactcttcctcaacccaattagagggcccagctcagacaccagagtgcactgaggagatgaaatattttgcccccagcaggggaccccagctgagcctccaggtcctcctgtggaggctgaaccttcccccagtcagcaggagcagccagctcagccttctgagttttctggggaggtggaattttctcagacccaggagacccccaactctgcctccagagtcttctatagagagtgtagctcaaactccactgaatcatgaagtgacagttcaaactcagggtgaggatcaagctcattataccttgccgagcattacagttaaacctgcagatgtagagattagcataacttcagagcctaccacggacactgactcttctccagcccagcaggcggccccaaaccagcatccagagcaggtgtaaccttctgcaacccaacaggaggccacaactgagcctccaggtcctcatgtgaatgctgaacattccccagtgagcaggagcagccaggtctgccttctgggttttctggagaagttgagtcctctctagcctgcaggagaccccagcccagcctccagaacatcatcaagtaacagttccacctcctggtcaccatcaagttcaatactgagatttgcccaatgtcactgttaagcctccaaatatgcagctcaccatagcaacacagcctactgcagaggtgggaactttgccagtccatcaggaggctacagctcagctctcagggccagttaatgatgtggaacattctgacatccagcatggggccccgcctctgcctacagagtcatcggaagagactggacctttaccagttcaacaggagacttcagttgaatctccagaacctactaaagatgagaacccctctccaatacagtaggaggctgcaggtgagcatccacagacccctgagtaggtcgagtcttctccaacccagcaagatgccccagctcagccttcagagctccctaatgaagttgtagctcaacctccagagcatcacagagtaatagtttctcctataagtcatgaggaagttcagcctccaacatttcaccatgtcattgttaagcctgtggatcacatggttaccatgactccagagttcacctatcaggtggaagttttaactcaacacagggccccagctcagcctttaatatcccctgagcagtttaaacatttgaaagaccagcaaaagattatcattcagcagctaaatacccctggaaatgatgaacttccgccaaatctatcaagagcccatgactccatctccaactcagctctcctcagacatttcatgcttatccaacgagtgtataaaaggcccaagaagacaaggttcagagagcttccggatagctgaacgcatggaggctgacaggacagtgaaggagaactcatccacgcgctgggcgagtggtgcaccccaactccacaggaacggaagctcctccagatcttgccttgtgttatctttccatctggctatttatttgcatcctttttaaatgtaagtaagtgcttccataagttccgtgagctcctccagcaaattaatcaaccccgaagagggtgggtcatggtaaccccaacttgaagccagctggtcagacattctggaagcccagactcgtgactggtgggaaggagggagcagttctgtggaactgattcctcaacctgtggtttctgaggctatttccaggtagatggtgtcacagttgaattaactggtggacacccggctgtgtccactgcagaactaattgcttacttggtgtgtgggaagaaacccctacatattttgtcacagaagtcttctgtattattatggtgtaagagaacaggaaaaatgcatgttgactgttttttccacactcccagtccacaaaagttttctccacttatgaac

SEQ ID NO: 1630 - DNA, 3168 bp, Homo sapiens
aaaatccctggggctgatagagatggcgggcggaaggccggccaataaggctcccggaaccgggctgggcgggaccccgggggtgccttcctgggttgggtggaccggtccctggttcgccgggtcctgcgcagcaatgcgtctgcttgctggtggaattcgccagccgccagcctcgctggcccaggtgcttgacagcatcaaaggtcaaagtgtgttcttcatgctaacatctatgagaaaaccgaacgcttctttttctgaaagtgctcagatttattctgctgaatatcggttcgtacaaacgacagccgcattacagtttattgtcacatcaaaagggaaaggccaaaaaaatatataacttaggcaagatttttgaaactttattgaaactcgaaagacaaactgctgtctcttcctccagtgatgttcttcctccttcaatctctaccttccccaaaatgatgtacatacagcccttagatgagaaaacgtttattgaagatggttgtctcaacttccaaaccttcagccttgtctctccgctcaacctttttttaaaaataaaacttcatctgattttaatcgactattgccatcatcgtcgataaatgtttcttgacagaatactgctgattctgagaattgggaaagaaagaaattgtccagatagttctctgatatacttgggaaggacatacatctttatttatttatttattcattatttattcaataatggtgtaatgtgacatgtgctaaatttctaaatgaaaggtgtcaataataagggctacaggatctgggagcagggagtcatttcggacggcagaagatgcgtcaggaggaaatattcagactgaaaggactgcaataagtaaaaagtgggacgatgaaagggcagatgtctgaatggaatgctgccaggcttcttccaggaacaacaaatgagtgccttttacatttgtcatgtgttgactgaataaaagtataccactcttaaactttcaaatatcaacaccaatccttgatgcttccctttaagcattttccgcaaaagctgtcttcctgaatcctgattgatgtctttgttcttcatcatcatcgagatacttaaaaatcatttgaagaagccacctgatatctggaacaaagagcatattaaattagtcccaatgcagccatgcatccagggggcccttgattaatgttaattggtgatgacagcatctctgtcgtgtaaattaagaatggcacaaacaagacacagtggaacatagaacaaaagtcatctgcaggaaggcagcccatcttacagagtaagaaaggcacaactttggttgtgcacacagctttgttaccacaaaatgctaaggtgagatcagcaaaagcaagtgtgtagaatgtagcctgcctgctaaacaagcgcaatgatcactgcagaagagctctgctgagcagggagtaaatgacaggaaaaccaaacagcagattgtaaaaataactcagtcacatcccaggcttgctagagaagtatcataaagacttaaggaagaagattttactttgctattgttaaacaaaagcctacccaagtttaagaggcaaagatataggaatgggaaaaaaaaaagtgactaccttagtaaatgagttttgtagcctgtgttttaccagctcttatcttctctgctactgcaggaaacagtacccagtaccctacaaagctccacccatgttttggggagtccctaggaggtatttcacatgtgctcgcagcaaccacatagcgtatgccgggcagcactgccccttgttccaatagccatgcatctgtaggtgtcactcttgctgctggctatcacagccactttagcttggtactgagtcttcactgggcacagcaactgggtacagccactcctcaaactgcctggcattggtggtaatctatggcaaagcacctctcctttttgcgttaccctctttgaagtgagtaacactatgtcttagagagccttcttttcatttgtgtttagcctttctcatcgccaaagggctcaaaatgaagtccgtggagtctaagccaaaaagtaattcctcaagtgacagatctcatgctatgcttctctcttccactagctaaggccctcttactgggacagtggtatcacacctggctcactcttccctttgttgatttctctatttctcataggaatagatttctgtctattgctcgtgagagactgaatttgcacaacctatatgaagggcattttggcaatttgatccaggagttcctcttctataaatttatcttacagatagactcacacatatgtgaaaaaaaatattcatttaaagttgtttaatgtactgtttctagttacaaaaggttgaaaactacctaaatgtccatttagagagaactagtcaaatacattacggttcatccaaattcaaagagtagcgcaggttgttctgctcctttgggccttctgatcctgcatggatatgttaggtccagctaggaaaacagaccctacacaaggcatttcaacaaagagaacttaatataagctattggttcattagctattgaagaacttaaagccaaaaggataaagaagaggaactccaggaagcagctcatactgtaaggctgagagaacaaaaggaaaatgttgaggttactagaatgcggaggtttgtaggagaggcctcctggagttggtcagaccgctgagaaagggccactgccccactggtggggtgcctctgaggggacaaaatgagactctctgggaacgtctggaaaagagacaagctggagactgcaatgaactgccactgtggggtagaagatcactgttcaggtgctgcggggaggaacagcaaacaaaacagagcatcccagtctttccctagcttcctttcttggcaaacataacagggagctggccatgtgatttgcacagtctgaagggtgagactggaactgacatgcaacagcttattaacttgcacacttccatacaacccctaacaagcaagaagcacctctttatgagctaacatagaagactctcaaagaaaagaagcaaggcttagaagactgtttatggtataccatcagttgaaataaaagaaagacgagtgaat

SEQ ID NO: 1631 - DNA, 3716 bp, Homo sapiens
cttataaatagccacatattcaaactattatctgaagcaaaatggccacacaaggcaagagcagatgtggcatgtcacagcttacttttccttgcttctcagggcccctagtgagggcatacaaattcctgtgatacacactattgaagtcaagtctttccagatcaggaaagcacaatttttcctgcaacgttgcctttttatattcatagtttctatctctttcaagaacttacatgaagaatctatctgcttctgtttaaaggaaaactctccgggttttgaactaaactcagcattagcaaggctgtatccttttcccaaggaaaaaagtaaagtgtctacatattccaaaagaatgtctccaggttttagcatcctagaaagcctgatttcccccactatattagaaagaagcaaatgagagagtttaaagaaacaaactgttatgtttcacagtgaatttaattaaaaatgtatgtagatatagttgatttttcataatacaaaaggacctaggacctatgtcaaagtactctccaaactgatcataaatgttttaaatattttttgctttaaacagcaagttcatctgtgatacataatggagaattccagaaaagatcattttagagtttggtttcaaattttattccttttttccaaaacgatatttgtatatagaaattcgaaaaattaaatgatatcctctacactgtaatacacacagatgtctctgggtgaactgctgactacataaatagatctttaccatagtaacctaaagaccatactgttcaagaccagagatttacaggttcagaaactcagactcatcagtgctcaagggccagtctttcacttacttgggactgcaggtttttatcaacaatgtgcatgacatattttaaaaagaaaaatccatttgttaatgtacaatgaaagttataaccatcaggtggattaggtaatatctaagtttattatttcacctgttggcaaattacatgggaaattacagtgatcaatagtttgcctattagtcgtagaaataaaaaagaagggggagaattttgcaacttgaatgtagaatggcctcagactctgagaatgttaaattcccttcctgattgaggaccaaactgcaaaaaggccagatattccttatggtgttatagcttgccagatcaccacgcaattgcctaggttgctacaaccagcgttgtagctgagacgctccttgttctgtgccaatgactggtgaactcccttctgaggaccatcttcttttaggtagaattacagtgatattgctaacaagtcgtctgtgagatactctgaaggtgcctttgcatgtttcctcactgtcccacatatgcctcttgttttcatattactgaaatagatcttgccatagcccctagattgagaaacaagcataagattaacttgagtttaacctaagtctactgctatttggcctcagaggagttgctaaaaaagataaggactggttgaagacaggtaataagcgaaagatgaagaaggaacaagttgaaatccaagctatgtaatcaacagttatataattgagagttctttagatacatgattacttgttagccttagtgcttgcagagaacagttttcaataacttctctaattttaagctgataccagtgtctcttagttcactgattccactaatttctgaagcatcttttaagctacctcttgatttcctcatcacaaaatttagtctctcttcccatgagatcaaagttagaaaaagtgcctatatttttaccatttcaaaataaaatgtagacttaaaaatttcaaccaactttgagaaactatagacagagtttttatatagaaggaccccaaaacaacaaattttgtccaggatcgctcagtacaaatgctaacctgaaacttgtatttcagaacttccattctcctaaagggcagagtcactggaccagtatgtgttatatgtattttggctctttacatttactctttagttccatcttaatacacacaagcacgcgtgcacacaaacacacacacacattcacacatttatttaaaaccttaacattttaatagttacttctaaagtgtgtcaacttaatctcactctgagtgtgacagggagttagtgcctatgtgaatatattttttcatcacattcagtttttgctattgagggaaaattatctttccatctcatgtagtgcaaacttaaatcttaaatcatttaaatatgttttatttttccaaagcttacatttctgcattacaaatggtgtccattgattggaagtcaagctcactagcattcactgcatgagctatgcatgagcatgttaaggccaccatgttctgcctggcaaaataaatactttgtcattttcctaagtgttggataattccctgacctttaaaaaggactttggagaacagattttcctctaaataatgtattaatagaccaacaagtaatttttttaaaataataatcatgaagtttaacatacttcaagctatctttacaactctgaaggttatctttgggtttctgttattcccatagaataagttgaaccaaaatttgtaattgtcttgctgtcactcaaaagaaatagatatgttttgtaattgtttgcattgaggaatcagaggaaggatttgcagatcaaatctgactaattttcaaattttgtcaaattccttatcttgttcttttaatcataggcttatggtatgatttggccctgcatgagagttcactgatataactcaaacacatgtttttactaaaagtggaattagtcctgtatcttcatatgaaaagacattataaacagcaaaactcactttactacagttttatttttatcattccctagcaatatattactgatcattgctagcatgtaaaatcttttcatatttttgcttaagagccatatataagtaatttattaaataaaacttttctgatttgattcttccactttgtttcaaatagtacctactgacagaggtttcccatacttttaacacacattgttagaagtattttattatatacacttttaatggctctattaaccttaaaaaaaaagttaatgatatccacctaaatcactatccctgctaggaagagaatcttggtggtataaaaatgtaggcctcttaatctgcattgtggatgtgtgatgaaaaacatagcttatcattcttttttctcttttttagccttggaatggatggctttggccaaccagttggcattcttggacgccctgccacagcatatggattccgccctgatgaaccttactactatggctatggatcttgataaagtatctgtttccatgtgtaatctcagcttagaagaaatctgtgtgggttgggttaattttggatctttgcctaataatgcatgttgatgttattgtgggtctgtgtttgtttttatttttatatgttgttagctgcagattaaccccagcccctctgtcttctgttaagtacagttgatactgacattgttcactcatcaaaccacatcttgatgctaagtaacatttcccatgagcctcaaaactgaatgctgaaaagctactagactggaaaacaaacactgcattatgtatgttaagtgactaatttaatttcaattaaaaagcgtaaagtg

SEQ ID NO: 1632 - DNA, 3602 bp, Homo sapiens
ttgggagaaaatgagacccccccccccccccgccacttccaacagctcagtgattaccaaagatagtgcaggtaaatccgttaattgcttcttttctgtagttggccagcttgactgatggtttatagtagttttctttctttattcaggaaggcaaatgggtggggaagccagaaagactctttaaataggatttcctgggagtgcggatattgaacttaagcagaccgaggtgagcctcagttgaaactgtaatgacagatttggagccccaggattttggtttgacatttgctggtattgttgggctgccaaggctgtttggagattcgttggtcgttctgagcttgttggatgacagaggaacttttgactctagcagtggtagtggcaggttttttttgtctaggcatgggtcgagaactaaagtatctgggaagcagtgtacattaacctacttttcatttcccatactctcttctccctcacttcctcctccccttccctccccattttgtttgtttgtttgagagaggcttcctgtgaagctgttagcatcataatacaaggcccagggcggtatgttttggggtcttagttttaggtgaggtgtatctgtggtgtctttatacagtttatctatgaacaaggcttatatatggaagagactgccaataaaaagaaggcctctgtaagaactgacctaggtgtaagttgaccctttcattgcttatgtttgtttttgacctgcccttcctttagagactcaagtgctttccctgggttttagaagggtcaaggttgctcctctttcctaactggaaaagacaatgatgttttatttccaagcacatatctgagttgtatgtgtggacagcactgagactgagtctttccacagctaggactgagtgtctccacatcctttctgaagcctacgaagctcatttatgtgctctgagatacatctattcaagcacataccaaggaaatgctcactgtgcatttggaagtaggtgttggacagttggactgcagatgttaggtgtctgtgtctctccacaacataggcatcaaccccaatctgccttacgttggccgtgagcattggtagagtcagcctgacttggcggaagcacgtgtaggtggtcttgcctgttagcttcttactcccccttgctgtgccctttgaggagtttgcctcacgttataattctacatattaggctcagcacctgtttttctttctggatgcatctacagcttaggttcctttaggtgtgaaaagtatgtccccatataggataggttgggttataaaggtgtcatttcctattctttgctgcatcttgaacagctgaccatggtgtggtgtcctttgatagtgttgtttgacagacaaagggctatctggcgatatgcttggcattttcctggggaatgtaactttatggacgtctcaactgaggctgacatgtcacaagatattgagcatattttcaggcacttaggattggttttagaaataaacagatctgcttcttacagctacttcatctgttccagctccaaagacaacaggccctccctctgccctcccgtctgtgagctccctgcccagcaccacctcctgcactgcacttctgccgtccacatcccagcacactggcgacctgactagcagccctctctctcagcttagcagttcgctctccagccaccagagtagcctctctgcacatgcagccctctcctcgagcacgtcacacacacatgccagtgtggagagcgcctcttcccaccagtcctcagccaccttctccacggcagcgacctccgtctcaagttccgcatcctcaggcgtcagcctgtccagtagcatgaacaccgcgaacagcctctgtctgggtgggacccccgcgagtgcatccagcagcagtagcagggccgcgcccttggtgacctcaggcaaagcacccccaaacttacctcagggggtgcctcccctgctgcacaaccagtacctcgtaggtcccggaggactgcttcctgcctacccgatctatggctatgacgagctccagatgctgcagtcacggctgccagtggactactatggaattccctttgctgcacccacagcgcttgccagccgagatgggagcctagctaataatccatatccaggtgatgtcacaaagtttggccgtggggactctgcatcccctgcacccgctaccacaccagctcagccacagcagagccaatcacagacccaccacacagcccagcagcccttcgtgaatcctgcactgccacctggctatagctacactggtcttccctactacacaggcatgcccagtgccttccagtatggccccaccatgtttgtccctccagcctcagccaagcaacatggggtgaacctcagcactcccacacctcccttccagcaggccagtggttatggccagcacggctacagtacaggttatgacgacctgacccaggggacagcagcaggagactactccaaaggtggctatgctggatcatcgcaggcaccaaacaagtctgcaggttctgggcctggcaaaggagtatcagtgtcttcaagcaccactggtctacctgatatgactggttctgtctacaataagacacagacttttgacaagcagggatttcatgcagggacgcctccacctttcagcctgccctcggtcttgggctccactgggcccctggcctcgggagcggcccctggctatgcacccccaccattcctacacatcttgccagcccaccagcagccccactcacagctgctgcaccaccaccttccgcaggatgcacagagtggctcgggtcagcgcagccagcccagctccctgcagcccaagtctcaagcctccaaacctgcctacggcaactctccatactggacaaactaaacccagaagagaggggtgggctggggcaaggcttatcctgggcaggagagaacacacgagcacgtatttgggagcccagtgccctttcctagaattcccgacatgtgtcagccatgcctctgtggggagtctgcctcccagactggctactgtatgtaatgtatttatgtatgtatttgtaaatgtgatagaagtctgggggggagttgggggatggcggcagatgttagccaggtctgccctccccattcaagccccttctccactgtagcaaaataagcacccccaccccatctgccttcaggtcttcttcacagcctgcactgcccagtgggccactaggggcagtctctggaggggctggttcaaggctgtttgggtataggggtcaggtaccaatgaagaatcacgacttgtctcactcctttggaaattgttttctttcctgtgtaattacttcatacctctgtttttgagaaactgttccgtttgtcatctgtcatggtctccttccaccaaatcttcatctgggaatagcagcggtatccctccacccaagtatggccacctgtttgtcttcatatagaacaggggcttctggtctggtcatgtccctagagacttactagagactggctgaccatg

SEQ ID NO: 1633 - DNA, 4460 bp, Homo sapiens
gttgacccgcgtggggcccgggcatgactggacacgcccccaggcctctcctggcactatctgggttcaggccgcagaaagggcagactgcgggactctgggctggagtcgcaggacacgggcagcccctatggggccgaagcacgtcctcaggcagcctggcccctccgagcggcatcaccctgaggtgcctgcgtggacaccaagggcaggccccccatgctggctctgcaggcagcgctggggctggaccctgcacccacccggccggggctgccctgcactgctcctttctgagcccaggatggcggcccaggtgactctggaggacgcgctgtccaacgtggacctcctggaggagctgcccctgcccgaccagcagccctgcatcgagcccccgccatcctcgctgctctaccagaacgagatgctggaggagggccaagaatatgctgtcatgctgtacacctggaggagctgctcccgggccatcccacaggtgagatgtaacgagcagcctaacagagtggaaatctacgagaaaaccgtggaggttctggagcctgaggtcacaaaactgatgaatttcatgtacttccagagaaatgccattgagcgtttctgcggggaagtgaggcgcctgtgccatgccgagaggaggaaggacttcgtgtcagaagcctacctgatcacactgggcaaattcatcaacatgttcgctgtgctggacgagctgaagaacatgaagtgcagtgtgaagaacgaccactcagcgtacaagagggccgctcagtttttacgtaaaatggcagatccacagtccatccaggaatcgcagaatctgtccatgttcctggccaatcataacaagatcacacagtctctgcagcagcagctcgaagtgatttctggctacgaagagctcctggcagatattgtgaatctgtgtgtggattactacgagaacaggatgtatttgacgcccagtgagaaacacatgcttctcaaagtcatgggatttggtctgtacctgatggatgggagtgtcagtaacatctataagttggatgccaagaaaagaataaacttatccaaaatcgacaagtacttcaagcaactccaggtggttccgctatttggggacatgcaaatagaactggcaagatatatcaagaccagcgcccactacgaggaaaataaatctcgatggacgtgcacatcctccggcagcagccctcagtacaacatctgcgagcagatgatccagatccgcgaggaccacatgcgcttcatttcggagctggcgcgctacagcaacagcgaggtggtcacgggctcgggccgccaggaggcccagaagacggacgcggagtaccgcaagctcttcgacctggcgctgcagggcctgcagctgttgtcgcagtggagcgcgcacgtgatggaagtgtattcctggaagcttgtgcaccccaccgacaagtactccaacaaggactgccccgacagcgctgaagagtacgagcgtgccacgcgctacaactacaccagcgaggagaagtttgccctagtggaggtgatcgccatgatcaaaggcctgcaggtgctgatgggcaggatggagagcgtgttcaaccacgccatccggcacaccgtctatgccgcactgcaggacttctcccaggtgacccttagggagccgctgcggcaggccatcaagaagaagaagaacgtcatccagagtgtcctgcaggccatcaggaagaccgtgtgtgactgggagacggggcatgagcccttcaatgacccagccttgcggggcgagaaggaccccaagagcggcttcgacataaaagtaccacgccgcgccgtgggaccctccagcactcagctttacatggtgagaaccatgctagagtccctcattgcagacaaaagtggttccaagaaaaccttgagaagtagccttgaggggcccaccatattggacatagaaaaatttcatcgagagtcattcttctacactcacttgataaatttcagtgaaacgctgcagcagtgctgtgacctttcgcagctgtggttccgagagttcttcctggagctgaccatgggcaggaggatccagttccccattgagatgtcgatgccctggatcctgacggaccacatcctggagaccaaggaggcatcgatgatggagtacgtgctctactccctggacctgtacaatgacagcgcccactacgcgctcaccaggttcaacaagcagttcctgtacgacgaaattgaggccgaggtgaatctatgttttgaccaatttgtttacaagctagcagaccagatatttgcctattataaggttatggcaggaagtttgcttcttgataaacggttacgatcagaatgcaagaatcagggagccacgatccacctcccgccgtctaaccgctacgagacgctgctgaagcagaggcatgtgcagctcctcggcagatcaatagacctcaatcgtctgatcacccagcgcgtctcagcagccatgtataagtccctagaactggcgattggacgatttgaaagtgaagatttgacctccatagttgagctggatggcctgttggaaatcaaccgcatgacccacaagctgctgagccggtacctgacgctggacggcttcgacgccatgttccgggaggccaaccacaacgtgtcagcgccctacgggaggatcaccctgcacgtcttctgggagctcaactatgacttcctgcccaactactgctacaacggctctaccaaccggtttgttcggacagtgttaccattttctcaggaatttcaaagagataagcagcctaatgcacagcctcagtatctgcatggatccaaggctttgaacttggcctactccagcatttacggcagctaccggaacttcgtgggacctccacactttcaagtcatctgccggcttctcggctaccagggtatcgccgtggtcatggaggagctgctgaaggtcgtcaagagcctgctgcaaggcacaatcctgcagtacgtgaagacgctgatggaggtgatgcccaagatctgccgcctgccccggcacgagtacggctctcctggtatcctggagttcttccaccaccagctgaaggacatcgtggagtacgcagagctgaagacggtgcgcttccagaacctgcacgcggctcctttccagaacatcttgccgcgagtccatgtgaaagagggggagagacttgatgccaaaatgaaaagactagaatcaaagtatgccccgctgcatcttgtcccactgattgaaagactggggacccctcagcaaattgccatcgcaagagagggggacctgctgacaaaggagcgcctctgctgcggcctgtccatgtttgaggtcatcctgacacggatccggagctttctggatgaccccatctggcgcgggcctctgcccagcaatggggtcatgcatgtggacgagtgtgtggagtttcacagactgtggagtgccatgcagtttgtctactgcattcccgtggggacacacgagttcacagtcgagcagtgctttggtgatgggctacactgggctggctgtatgatcatcgtacttcttgggcagcagcggcgttttgctgtgctggatttctgctaccatctacttaaagtccagaaacatgatggcaaagatgagattattaaaaatgtgcctttgaagaagatggtggagagaattcgcaagttccagattctcaatgatgagatcatcaccatcctggataagtacctgaagtcaggcgacggggagggcacgccagtggagcatgtgcgctgcttccagccgcccatccaccagtccctcgccagcagctgagggcacgcgctgcactccgtaactcaacatggcatgcctttctctccgtaaactatttagtgagatttttagggactatttttcagtatctctgtacctgttaaagggggtgcttttcgatctaaaaacttaattttataaaattgacttatttttctagactaaaattgtatatgcttttggtaattaggaactcttgagaatattggctgctgattgttgccatcacgttcctacaaaattgtttttctatgggatgttctggcagctgtgtcataaaatgctgctgggttcattcattcattccataagaaacttaataccagcaaatgcattaaatcccttgccagttaccattaactgtaactatttagcttttgtttagggatctttctgatggtcttttatgagcaatcttagttctaagtcattgttcccatcccttttttgtgtgtttcagaaaatagtgaacttgattcccctgcttccactaaatccagttgtgacaaaatctaacgtgacatcagatcgaaaggttatagaaataaaactaatgagatct

SEQ ID NO: 1634 - DNA, 3696 bp, Homo sapiens
gtgaaaatgcatcattaggcgatttcatcgtgctgtgaacatcacagaggggacttacacaaagctagacgacgcagtccaccacacacctggctgtatggagtagcctattgctcctaggctacaaactgtgcccactactgtactgaatgctgccagcggctgtaacacaatgggaaggatctgtgcattgaaatacatcaaaacatagatgaggtacagggaaaatctggtcttacagtctgatgggaccactgtggtatacgcaatctatcactgaccggaacatgactgaaatgtttccaaaacacacaggatgctcggttgggtctgctgcagcaccagccacactggaaaccctggtggctttagggaccactagaagccacgctcgacctcccctctgccaggaaagccagcacactgaggagctagccatcaggcaccagcaccaggctccagccctccatgtgggcctctctgaccctgacgtcacagagaaccccagtgacccggccagcggggctgcctgcacctgcttcctgcacaactccccccaggccgctctgccgggggcaggaaagcactgtccctcaggggtggctaattctaggctttgcctctcccaaaaccattactcggatcatccagatgctaaccccagatacatcattcatctctcagatccgttctgtcttcatctgtggtcgacagctcatcaggttgaatcttcagaaatgacttaaatccacacaccagggtcaggagcagaaggcggctagctggggaccattctgagttgtctatttgcagagactggtcattttctccctgctgtttgtcacttcattgcccctcaacactgcccgagggtcaacataaggggaagaagaaggtccatctgcaggtaaatagaaactttctgggtttccagaacagaggctggaccgcccactgcaggaatatgcaggttcacagggtcatttgctgcaacaagttatttatacaaaatatgggtaacaacttaaatgcccatgagtaggagacgagctgaataagccggcgatggttcagtaaacccacacagtggggctctgcgcagctgagaagctggaaggcctctgcggatgggtttggagtgacttccaggataaactgagtaccaaagagtttctatggtataccacccttcacaggagacagaaggggctatttaaaaagtacatgtatctgttcatttggcacaaaagagatacaaaacacacacacacacacgaatgggaccggcttacctggggaagtgggtgggaacagggtgcaggggatggaggatggagacagagcgggggtgcgccgtggctcggaggaagccttcagaaccacacgatggttcacatacccctcaaatacatcaacactgaaaatcaaccaacctgtgggggacccagaagagagtaccagtgacagcagatgaacttgactgtgttctaagtgacactacaggaagggaggcagaagaaaggagccagctatggaacgcagagaaatggtatcttaactacatggtgtaaggctaaaagcagagagggtgggaacaaacactgtcccctcatcaggacatacgtttcccacaagggtgtgggttagcaattctgaacctgtgtgtgcagcacatttatacaaataaaattattgagaataatgagagacaggtttcctactttgggagaaagaagaacatacaaggaaaggctaaatgaatcccacagtcttagaccagaaacaggtatcagaatgcaatcctagtttgcaacacagacacacatacagacacacagaaaaatgcaggaagatgcaggtgcacgcgtgtgcttctgagaacacacacacacagatttcccggctctgtccaccgagagaggactgagaacagtgacgctccagcagaaatgagcacgcctgtccctaatcctgctttctaaacgccattctccaaccaaaggcaccagggctccttagggaaagagccgattccatgagcccagcatatctttaatgcctgaatgtaaggagggactcagaaaatgagggaggcatcaaaggaggcagaaaccaactggacagagctcccgacggtcacggccgcgacaacgggagcaacagaatccgtaatgatagagccggacagcgccctgtgagatgaaatagtacccctgagtcatagcaacaccagcaactgaataaataaatcacggtttgtacttatcacagaattccaattaataaatgcagaaggaatggtggaaatagaaagtcatcattaggcaaacattacagtcaaaatttttgcaggcaagagcaatcaaaatgtagaaattcatgaaggaagatgagctgaaggaaggttgtgtagtttcacggtatctccccaccaccaagatatttattctaggcaaaggggaaaaccatccctttacagtgggttcatctggcagacaccacctcactcatgccatccacgtgagcgttaccggcaacaatgagcattcacatcccatatttgctatgctggagccgaattactccccactaaagtcacctgttgaagccctaacccccaagacctcagaatgtgacagtgtttggagtcagggtctttgaaggggtgattaagataaaatgaggtcattagagtaggccctaatccaacgtgaccagtatccttataagaagagatcagggccgagcgcggtggctcatacctgtaatcccagcactttgggaggctgaggcagaatcgcctgagcccaggagttcaagaccagcctaagcaacatagtgagatctcatctctacaaataactgaaaaatgagcagggcattgtgatgcatgtctgaggtcccagattctcaggaggctgacgcaggaggatggtttgagcccggcgatcagggctgcagtgagccgtgactgcacctctgcactccagcctgggcaagagagagagactctgtctcaaaaaaagaaaaaatggaagatcaggacacagacacgcacaagggacgaccatgtgaggacatagggagaagacactgtctgcaagccaaggagagaggccttgggagaaaccaaacctactgacaccttgatcttggatttccaacccctagaacgacgagaaaataaatgtctcttgcttggtagcccacaggccgactcacacagcctgatgctgcgataagaaaggaccatttcacttccctggcgttcttgtcaaagacgcacagcatcggcctaatcaggaggaagcatcggacagtgaccagggatgctccacaaagcaccagccggccgccgcgaagtgtcaaagtcatgggagacaacgggaagctaagaacccgtacagactgcagttgcctaggagacgtgacaactaagcgctctgtgccagccgagatgagaccccgggactgaaaaaaagctgcaagtgaggaaactgacaccattcaaaaaacgtctgtcgttaatatcagtgtcaatttactggtttcaatcattgtacttaaaaataccaccatcagggaagacggatgaatgatctgtatgtctgtagacatacaggggcattctgtactattcttgacatttttttctgtaactttaaaatcatttcagaataaaaagcttaaaacatt

SEQ ID NO: 1635 - DNA, 4747 bp, Homo sapiens
aactgcatctacttgagtgggttggggttgtttatgctgtactttttctatgtggtattgatgctgtgtttgtcaacccttgggaaaaataatgatatccaaaagcatcagggcagagccaggaggagaaagaaaggtgggacatataaagaccggaaaagtttccagagagaagccgaagaggaaaggaagttgctttctattctgaaaagctttggacctcctgcttcctgcagtcccctgggtcagcatcatgataccacccgctttcatcgactgttatgcccagaccccgtctgtcaggtgtgtaacagagcaactgctgatatccagcgactgctgtcttgggagtccctgaaagatgctgttccctttgtgtcccctttggcttcttcagcttctgcgactgagtcatcattcactctggcttccaccccctcagcaaccactccagaagacctaatattgtccccgcagcctaagccttctctactgccccacttaattctctcccctgacctgatcaccaccttagctgacttattttcaccctcaccactgagggaccctctgccaccacagcctgtttctcccttggattccaagttccccatagaccattccctaccccaacagcttccctctccccttttcccaccgcatcacattcagagagcggagcccagtctccaacctgaggccagtttgtctctgaacactgtctttttatttgactccaccctatcccaagatatgaaccccttatcaaatatttcccaggccatgaatgccactgattcatgtgcttggcatcacgaaccaccaaacccatctgctttaccactggaggactgccctgtaactcagtctaaagcaagtcccacagtattgaagccttttccggagatgttatctctaggtagttctggtggatcatccacatgtgccccaacaatcagaggcattgacattcatgccctgcatcttcagaattctcctggtggcagcctcatgacaaggacttttttccttccactattgcaccatatgatttcatgcaagagcttcttacccttcattcttctgagatcactataggagggcactctgtggtcaacctcacagagcctattaacctctcatttatcagtcatgacattctggcactcctggagagacaagtcaaaaaaaggagtgatttcctgatgtggaaagaaaatgaaaataaagcagaatcttttccaaaacaacgtaggccaaactatcaactaaattcttcacagaaaatgttagcctcaattgcagataagcaagacttggcaacctcccttcctttttggggccagtaaagacagactagaacaactgcacatccatcagcagcccccatattctaagtgttttgaggaccatttggagcaaaaatatgtccagctcttctggggtctcccatctttgcacagtgagtctctgcatcctactattcttgtccaacgtggccattcctccatgtttgtattcttcaatggcattacaaatacatctatatcccatgaatccccagtacttccccctccccagactctgtccttgcctagtacccaacctctaccctcgcctcaaaccctgcccagaggtcagtccccacatctcactcaggtccagtcccaggctcaatatcaatctccaatcccagccctactacctagtcctctatttctgtttaggtgtgtggattgtgttttcatagaccccaggatgaggcacggtctcttatgccatctgaaattaatcatctggagtagaacgtgttgcagaaagtgcaggaaagtgtgtggggtttaccctctgtggttcaaaaatcccaggaagacttttgtcctccaggtaccaatgctgtattggtcagaaagtctttcaaggtccatgttcccatctccatcattcctggagattttccactcagctctgaggtaaggaagaaactagagcaacacattcgaaagaggctcatccagcgcagatggggcctgccccgcagaatccatgagtctctgtcattgctacgtcctcagagcaaaatttcagagctatctgtgtcagacagcattcatggaccgttaaatatctctttggttgagggtcagaggtgcaatgttctaaagaagtccgcatcaagcttccctagaagcttccacgagaggagctcaaatatgctttccatggagaatgtggggaattatcagggatacagccaggagactgccccaaaagatcacctattgcatgatccagagacatcttcagacgaggatctgaggtctaactctgagagagacctagaaactcatatgatgcatctgtcagggaatgactcaggggtgagactaggtcagaaacaacttgaaaatgccctgacagtacgtttgagcaagaaatttgagaaaatcaatgagggtcgaatgcctgggactgtgcatagttcatggcactcagtcaagcagacaatgtctcttcctgagaaatcccaaagccaaattaaacatcaaaatctggtagcattggtgagtgaggaccactgcgttgatacttcccaggagatttccttccttggttccaacaaacaaaagatgttggaagcccatattaaaactttccgtatgaggatgctgtggggccttccctgcaaggtccttgaatccatagaaatcttcaaatcggaagaggatatttccaattccttttcccatttctaccttccctcctcagccagctttatttctcagggagattccaaagatggggtctctaagtcttgtagacgaagcacttttcaaggagaaaagttgggaacaacaagctcagtccctgtccttaatcatcctcagcctgtctcctcacctattggcaaagaagggcaggggaccctgagaagacaattttctgatattgaccatgaccttatagagacagatgccaaagatggtgcctccacgccccttagaagaggcactacatattttcaaggagaaaaattagaaacaacaagctcattctccatcttgggtcatcctcacctcgtcacctcacctgttgatcaagaaaagcaggggaccctcagaagagaattcgctgatactgacgaggatcttacagaaagtgtctggacaactgaggatggcagacagacttttctgccccccacatacagcatcatagacgaagtcagtcagaaacagactatacttgccagtagatgcagcgcagagctgcccatactgcaagctggagttggccgtgattcaagggataagagagagagtgccagtaataatgttaacaggcttcagggcagtggaaagacctttcctgtcaccaatgggtcgaaggagatgttcaaggaagaggagatctgtactcttcaatcacaaactaggaacaacttgacaaccagcaagtcaggaagctgcttagtgacaaacgtgaaaagaagcacttctcatgaaactgaaattttcccaccaagaatatcagttcctcaaactcctaaatcatcatatcttaaaaatcagatgttgagccagttaaagttggtccagaggaagcatagccaacctcagagccatttcactggcatgtctcttgccttagataacttgagttccaaggacttactgactcatgcccagggcatctcgaatcaggacttgggaacttcccaggtgctgcatgtccacttggaggtcagaggaatccgtgtggcacagcagcaggagcacagggtccctacgcatgtcttacagaaatgccaagttaagaatttttcaccagctgcaaagagagtgagccctttaagacccaatggaggagagcttggtggaggggatgcagggctggggacatcccaactcactagaaagagcctccctgttcataacaaggcatcaggagaggtgcctgggagcaaatcttccccaaccttgaaaacacagcctccttctgaaaaccttttcagaaaatggatgcagaccttattgcagtggtttaataaacctagcataatgtgtgaagaacaagaaagttcttgggaaaagggtagctccctgtcatcatctgtgcagaatagaagtcgagttacaagtagagctgcttttactggtgctactgaagctcagaaaattaggaaagacactggggagttcctagaagaaaagctggggcatagccatgggatagatatcacctgtccctaagaacccttttccttcccagtggagcttgggaaagctcggcacaacccagaagtgcaggtcagagcagagcctttccagggctatccccgcaactacacagctccctcccgcaaagtgacatgtaccaaatcttgcagccaacaagctatctttgttggacagaattatcctacaaggattagacagatcatagacaaggacagacagccccaggaagttgaggcatttaaggggaagatattgtatcaaaggcatccccaatccatgccccacagggatcctgtaccacatctaaaccccacttgtcagcgtcaagtcaccctggtgtgtccagctgtcccaattagtggcaaaagcactgtgttcagtgatgtgcctttactaactggacacaaaatgcattggaagtatttgcagggaggcaaatctccccccacaaaataattcactacttgttgagaatcttgattctccctaataaatgttctaataag

SEQ ID NO: 1636 - DNA, 4944 bp, Homo sapiens
ccagaactgagtaagaattgtgataaagagtgtttatctgtatattcaggcttcctttaaaattaattacaagaaagttcaactgaaaattggtgaaagttttgaaaaatccaaaattactgtttgtcctgaggaagagctcttacatagttactctaaagagggacaaaattaaaggaagtgccctctaacccaatgaatcatgtccctgactgcaaggaagcagatgcatcttggagtgtcgaactctgtagtatcccaggcattgcctgaacaggaggagaacatcacaaacctgtcttttcattgtatttatactctgggtccctcaaacacacctgccagtcatcttctaagctttattcaaatgaaaataaatcagactgtaaaacttgtaactatccagacatgtagcctgtttctcagagatgaagagaattgttgtaatgatacagaaatagaaaaattagggaacccagtagttatggttgaaatgaaagaggaccaagagtttgatatgcaaatgacaaaaaaatataaaccaaaataccgttaattggaaattagacattagacattggcctcagtctagagatccaaaaagtctgtttgatttgtggtttgtttactctaaagaaatgaagcatgtgatacagatagaaagccacagtatttctgctgttacagacacttacaaaaacaaaaatccagtaagcacttgttccacaagccatatggaacttagaagctcttctaaagcttagaagatgactggcaagtatgtttcagggagccacataagacagttccactgctaatagctataaaagcatgaaacctgcatgagaaaatgtgagttattctccaccccatagtgacagaacatcaaaagcatatctagaagaagacttacagcaagatatgcaaaggcttaagaatgaggtgggcatgttacaagtagagttcctggctttgaagaaagaaagcttaactataaaaagaaagaggttcacttgctgcttctctttttataaattatctgattcattctggttttctactcaagaaaatctcatgtgtctagttacagtgtggttatctaaatgcataattatgtgtctaagtagatcagtgctgctatctaaatgacagttctggaaaacactctcataatctttgttcattagtcaacctgagtctcactatcagtcttccaagtggcacatgggctgggaaaataatttagccatatgccatgtgaccttctgaatcagctaaacataaagaaaattgctaaagaaataagctctagattcttcttactgtattcatttaaagatgacttacatttatttaaatgataaaatggtaacacgatgggagggaaacaatgactgagaagagacatgaaaatgtatctagcctggagacttgtaacaaatattatcagccaaaggcgtctgtttaatgtgctttcatgcatgcaagtttatttgtctgactcaagctgtttaaacttataattccataatggccattttaaatatttttggaaacaaatacatatacttttgcatatttaaaaaaaatcaccactctccaatgtttctgttgaatcacacttttacattatgttgtttaataaaatatggtaagttttgacatgtatgattttatcatgtaagtagcataacttctcagccaaatatttatcatttgactctatagtggaaagctgagttctgtacattgtgttctaaagatagacaaaaatctagagattttcttaaaagcagatgaggcctcctgccatcctctgaggcattaaattgctttgccaaagtcacgcttttaatttatttgactaatttgatatatttatctggtaatttatgtaatgcagcaatatgtaattgtatcttcccttttggtgccatgaagtgctaggtaatgccaccttaggagctttgggtgaattatttaatatttattggttttacttctattatcaagtagataatggggctagagtagacaactattctgtatatcttccagctataaacttttgtggtgattgaatgtaaacttggggaacatctcattttctaggattctgcactagcaactcagcagtgtcactctgctccttgagttgtggtaaactttggttcctctatttcagtgagcaccttcacttttttgatatcccaggatccaagtgaaaaaataaggataaaagacagtggggaaaataacagcttagtgcagaacagggaaagcttcttttctgtttctgaagccccacaaggtcacctcctctcaatctggctatttcatggagaatccaggtgacaaagacagaagacacattttatgtctgtgtctttttgtttctctgtttttgtgttgatatatttacaccacagaagtaactgtgatctggtggagaactagaagtagagtcagaagccctgggaacatcctgcagcttgcttatatttttaacctctctttttaagaattgtgataagaaattcatcaatgtatgtacgtagaagtgcttagtacaatgtctagatttatgatttagtaaatgaaattcttataactgactaaaaatgttgagtcaaatcacaatagaatattatcagggaaacagaacttctaaaactttgagaaattttatcggtccaaatacacgtggaggtaaagctcttactacagggtggtatctgggttagatatcagagtatagatgcaatttcctttttccaatattttaatttagtcaaatttgttaatattttactttatgctttgagtttgttgtaattcagagaaaggcttttccaattctgatattcttaacagttctctagtgtgtatgtgtgtgtttttagttttatggattcattgacttcaaataaagttttgaactttttgaaatttatgctctttaaggttcaaggttttgcttcaactttttctccagttggatatccacttacagcaacttttaattgcatgaatgtacaggttgttctttcacttcagagataaacatgatatgttattttattgagtgctagctgaaaatttcttttgttttatttaagattttcaaagttatagaaaaaagaaggatgtgatatatacaaattgcatattgaagggagatattgccacactcaaacaggaataatacacaataaaaaatgacagtgtcaaaaaggaaaaggaatatattcaggaaattaagagtattagagaaataaatgctaactttgaaaaaagtgcaagactcaatgaggaaatgacaacaaaaacgatgtcccagtattgtcaacagcttaatggcctcaaagctgagaatacaaggctgaattcaaaattggagaaggaagaacaccacacagatggactggaagctgaagttgaattcttccattctaggctggctgctgctataaatgagcacaatgaaagtttagaaacgaaagacctagaacttgttttacagagagcacataatttttccgtacataaaaaaataagttctactgtttctcaactaaaagataaaaatgagttgcttactgaacaattttctaaagctcagatgaagttcaataccttaaaaggtaagctccatgagataagagatgctctcagggaaaagacattggctttagaaagtgtacagatggaccaaaggcaagcacagcatcgaataaaggaaatggagcagattcatccaaatgaggaaactaaaggagtcgatccaccggaaagcacaactgtgtagaggagagactatgtcaactagaatgtgacagtctcttgcttcaacgacaactagagggtgctcataaggaaggcaatgataaagagatagtaattaatatccaaggaggctgtcttgagagtggaaagatcttctagaagagaaaaataagaaactaatgaatgaatataattctataaaagaaaaactgtttcagtatgtaaaagaagaaggagaagtaagtatgaagaaagataaatatatttaaccttccagaaagaaaatttaaacatttcattgtggctatatgttgaatctagttcaatataataataaatagatgaaaatgtatttaccatactgtataattccattaacatgaaacatccagaaaagacatgtatagggacagaaagaagatgaatgtttctgtagggctggggctggaaatgggtcgtgactgctgatgggcatgagggatcatcctggagtgatgaaaatgttctaaagctggattgtaaagatgactgcacgactggtaaatttactaaaaatctttgaactgtatgttaaaacagataaattctgtagtatgtaaatcatattttagcaaagctgttttaataaaaaaacaaaaaaaatatgtttactgtatcagcttggaaacataccttgtttccaggaaataaaaggtagagctgacagatgctttcctttgagtaaacacattatgtcacctatgaaattttagtagctacagagtaatgttcatacagtatgtagtcttatactgctgaaataataaatttaatgtctttatgttgtcacattttaagaccataatgaagcagataaattgatatcttgtacctgaaataagtattttgaaattaagattcaattaagtgagccactttgacacttaattctagatttcccagatgaactgaagtgtgttgctctgtcttgtggtgcttttccttcagtggctcttttatgtattttagttggcataactttattttgattcatatcaatgtgacttaagtctgaaaatatgtcagtctcacattatgtatttttctgaccacttaatattttaaagacatctacttgttataaaatcacaatttggaataaatgtggtaaattttagc

SEQ ID NO: 1637 - DNA, 4064 bp, Homo sapiens
agctctattaggacgaacccaggcacttagccatgcaggaacaatggcaagcctttagcccgatcgggagtggcaatgggcgcctcgatggatcaggagcacagcggacaccctgccagatctggagggatggaagtcagcggtgggtctgcgaaagcgcaaacaggagtggtggacagcaagcgaaagctcacctcgagccgtaaggaacacggaacaaaagagagtgcagttgcaagatttaatagagtgaagacagagctcccatacaaaaagagaggacccaaagaggtagctattgccggctcaaatccctgggtttatatcccgatcattgtccgtccgctgtgctctcaggcgaaagatgattggctatttctttaccccctgtttttgcctaattagcattttagtgagctctctgactggtcaggtgtgagctaagttgcaagccccgtgtttaaagatggacgcggtcaccttcccagctaggcttagggatttttagttggcctaggaaatccagctagtcctgtctctcaccactaggatcagtgaagtcctaaaagtaaatgtcaatgccagtgctgataccaaaaggctaaactgtggccgctacacattgaaggggatgaatctctcactccttcattaagctggaaacttaatagtgctaaagtggtcctacgataatcctacaactctcctccagaataaaaaattccaaatgtgtaacagtgatagtcctacaggtccagttcaacaaaatttgagctcacaataaaaaaggaaatcatcaaacacaaaatgaaataaggaaccatgagtgagaatcagcaaaatcaatgatggtttaagatcccaactgaagaggttagttactagaatgatcagacatagaacacaaatataagcatagtatagtatacatttaaataagtaggaagttgaataaaaattgagcaaagaacaaaaggctatcaagaatgaccaatcaaattgactttttagaaatatgaaatgtaactgctgaaaattagactctagatgggttatacaaggcattacacactgttgaagggagcatgagggaactaaaagatagattcaaataaactacttgatatggtttggatatttgtttcctccaaatctcatgttgaaatgtgatcctcagtgctggagttggtacctagtgggaggtgtttgggtcatggggcctcatgaatggcttagtgccatcttcacagtaatgaatgagttctcactttgtgagtttatgtgagatcaggttgtttaaaagagactggcacctcctccctctcttgcttcctctcttgccatgttatatgcctgatcccttttcatcttctgccatcactgtaagcttactgaggcactcaccagaagcagatgctggcaccatgcttcctgtacagcctgaagaactgtgagccaattaaatcttttttctttataaattatcccatctcagatattcttttctagtaatggaaaatgaactaaaacacaaaattggtgctgaggagtgtagcattgctatatagatacttgaaaatgcagaagcaatgggaagagattgaagattttggaggatcagaagaagacaagaagataagggaatgtttggaacttcttagtgactagttaaataattgtgaccaaaatgttattacatgtatgggcagtgatggccaggctgacaaggtctcagatggaaatgaggactttattgggaactggagtaaaagtcacttgtgttacaccctagcaaagggcttggctacgttatgtctgcatcgtagggatctgtagaaggttgaacttatctgtgatgacttatggtatctggtggaagaaatttctaagcagcaaagctggctgctcctcacaacttaggatcaaataggagcaaaggaatgacttaaagttggaacttacatttaaaagaaaagcagggcataaaaatttggaaaaattgcagactagtcatgtggcagagaaaggaaacactttttcaggagagaaatgcaagcaccctttggagcaaggaatgctagagagatttgcctaacaaaaagggagccaggtggtaatatccaagacaatgggaaaaaagcctccaagatatttcagaagtctttgggacagcccttcccatcacaggcccagaggcctaaaagcaaagaatggtttcaggggccaggcctggaacaccactgtcctgtgcagccttgggatgctgctccctgcatccaaactgctacagctccagccttggctcaaagggcctcagatacagcttgggccactgcttcaaaaggtgcaagctgtaagccttggtggtttccatgtggtgttaagcctaaaggtgcacagaatgaaagcatgaaggaggcttggcagcttccccctagatttcagaggctgtatcggaaaacttgcttgcttaggcagaagcccgctgcaggggtggtgcccctgtagagagcccttgttagggcagtgccaaggggaaatgtggggttggagcctccacacagagttcccattggggcactgattattggagctatgggaatggggccactccagcccccaatggtagactcgttgacagcatgcactctgagcctggaaaagccacaggcactcaattccaacatgtgagagcagctgcggggctgtatcctgcaaagccataggattggagcagcccaaggccttgggagttcacctcttgtaccagtgtgtcctggatgtgggaaatgtattcaaaggagaccattttggagtgttaagatttgattaatgcctcactgggtttcagacttgtgtggggcttgtttctcctttcttttgatcaatttgtctcttttggagtaggaatatttacccaatgcctataccatcattgtattttggaagtaagtaacttgattttaattttacaggctcacagttggcaggaacattccttgagtctgagatgagactttggaccttttgagttgatgctgaaatgagttgagacttttggggaccattgggaaggaatgattgtattttgtaatgtgagaaggatgtgagatctgaggggccagggagggaataatggcttggatgttagtcccctgaaaatctcacgttgaaatgtgtttcccaatgttggaattgtggctagtggaaggtgttggcgtcatgggggtagatccctcatcagtggcttagtaccatcttcccaataatgaatgagttttcaccctgagttcacgtgagatctggttgtttaaaagagcctagcacctccttcctctctctggctccctctctcgtcatgtgagaggtctgctcccacttcaccttcggtcatgattgtgagcttcatgagcccttaccagaaacagatgctggtgccatgcttcctgtatagtctacagaactgtgagtcaattaaacctcttttctttatgaattacccagctgcaggtattattttatagcaacgcaaaatggactaacatagtacccacatatggtatagggagacaaggatgcgtgtgaaaagttaatacgtatgcagaatagaataagaaaggctggtatactcccagtcgaagtcgcaggaaaacacactagaaataatggtgtagacaagaaaatgtcttagacttttctacaacttatgaaaaacacgagttcacaaatatgaaaagcaaagtatataaaattcagaggttaaaaaatttagacaactctagtgaacccgcagaataccaaagtcaaaagaaaagtcttaaaaggacttgaagagaaaagccagattaatctcaaattgaatggaaagcagacgttcagcagcaacaatggaagcaagaaggtaactaacatctggttctcagagaaaatgactgttaaactgaagttgtgaacaaagaaaaactatcttttaagaaaaagggtaaaataggagaaaggttattcgctgggggattttgtttaaaattgtatttcttctttaaataaaattagtggctttaaat

SEQ ID NO: 1638 - DNA, 3308 bp, Homo sapiens
aacgggatgccttggaaagcatcgttctgcagcaggactgctcaaccggccaatcagaacacagggaaccatgaaagagccccagctctgtccctgtgtgaatctcagggctgtttcgaggatgaaaaggaggtgtttagccccgagcctcacgtggaaacatctgatgagcctttgccaatatgctcgggacctggggacggctggggtgaccccatcgcaaggccgggccgtggaaacaatctcagccctggaaccagcgcctgggaagtcccgcggtggatccgcgtcacgggggaggattggctcagcactggtcctgcggaatgtgtttttatcaatgacttgacgacgtgaaaaacatgtttataaaacgagcagatggtgccgagctgagagggaggtgacgcagtgactcaggaaccacaagctctggaggctgaacgagaatcggttacaggagatgaacacaaggctcgattctcctgttaaacttgactgtcaccaacggggggtggggggtgcgcgaggccctgggctccaccgaagaccttaaggaaaagactctggatgttagtgggttcggcctcagaatcagccggcgctgagatgtgcacctggcaggatgaacgtaacttctggtggataaagtgggaggcctgatccaggaagaagcacaccgtggcctggggcccctctggagggtaggtcttccaagtcacgggaaacagggcgcccaggagacggtgagcccggctgctgccaccccgaaggccaggctcgccccacactgtgagaccctccccacacgaagattctgtaagcggaatcggaaggaggatgtgagaaggacgggtagccatgccacaccaggccagacatcttaccaacctatcggttcagttttaagaaagagagcaaagaggatctaaaatctgaactttgagcagctgaactgtgtggagtatcaacgtggctcctgacaaccccaccggcactgtttctttgcactggaggtcctgaagagctcacggaaggtgcacttgcagttgtagttcagagatgatgcttttagacaatctttcccttcgagaagtagcctaatgagaaggactctgtagatctcttcctaaaaaagaatcctcagtctctggcagaacagctgcccagaacagcttctgcctgtgaggtagcaaagaaaaaggcccacacagaatttgctgggatattttctttccaacaccaacaaaccgacagccttcccaaatcctagggcagagtcggctggcactgagatcaaaaggggtgaagggaaggcagccaggctgggagtctctctccagcaactttcttggcgaggtgacatatatgcccagaacctttttctatggaaggaaaaagaaaaccctggcttaatcatcagagttaggagaatcacccacgtattcatctttaaaagcaaatcatgataacttttggtcactcagaagtaaccaaggcaaaatattcctcttaggggactctgtttagagttttgggagagaaaaaaaaaaaaactaaaccaaaggtttatttagaaataaattgttttctgagtattctaaggaaagctatgcttagccaaagtgcttcagcccttgtacatgtttcaaatacttctgtagaagtttgaaatggacatggattttcccaacacacacgcacaatctcaggtgagcccaagacagcctatgaggatggcactggggagtctggatttcagctctgacgggcgggctctaaaccccaaagttcttgtcggccaagtgggggggtttcttgtgaggaccagaggtggcacatccacgggcatgggggacgctggctcacgatgccccagtgatgccgtggttaggacactgctcacgcagctgcagcgcagagcacgggggacgctggctcacgatgccccagtgatgccgtggttaggacgccgttcacgcagctgcagcgcagagcacgggggacgctggctcacgatgccccagtgatgctgtggttaggacgctgttcacgcagctgcagcgcagagcacgggggatgctggctcacgatgccccagtgatgccatggttaggatgctgctcaagcagctgcagcgcagggccagtgtggtgaccctgactcctgggaacggtgatcagctgggcctctgcctcactggaccacgctgcaaggcaagggcctgggagatgcccacagccgcgcctctggctgtgaggcagctgtggtcctccagcagcaatgccctcagaagctgggagatgtgaaccccacatgactctcctccttgctgtcttcctgtccctgagccttcagctcttcgttgtctctgtcttgtctctctgcattgtttgtcctggttctctctctctctctcgttattacaacatagagccaaaaatacttttttgtttaggatatggcaccaaaatagtatcatatccctgttcttcatctgaaatgcagacaagcgaaatgctgcataattcttttttaaacattcaaaaaacagaaaatgcatgttaagttctttaaacttctgagataatacaactagacctagcatggtgccagccaagcattgcataatgtgtgtttccttctcctttgggggctcattccgatcagggtgcatctgggaagtcgggcgactgtgtccatctcctgggtggaagaatgacccagggaagtgctccatggggaaggcggggcatgagagaagggaggggtggtcccgaggaccctttccatagacctgggagttcccggtgagcacgcggaaaggacgcggtgggagcggcaggtgcagagggaggacttgaaggttccatccctaacagaggacagcgtggccgagtactcatgcttccaaccctgcacagaggatagtgcatgcccagcatgcagactcgcttccatcgcgacacagaggacagcatggagcccagctcgagtgccgtccccccaccatgacagcgcagcatgggccttccaagccacagagccacagggaagccagtcctcctggaccgtgtgtggctgttttggagccagttgtgtcctgtgaagagcgcagcggccgcaggtgaggcaggagtgaagatggaggaggcggccatctctctggggcctggcaacagcgagagcttttgccaagccactgtctcccggaggacaagatctccttcccaaaagcaagatgaccaagagtatggagaagaaagtaggtaatacaagtttgctcagaataaacctatgtgttcatg

SEQ ID NO: 1639 - DNA, 3463 bp, Homo sapiens
tatatgtgaagtgggcggttgtaaagttagctttctcttcatttagctgtcactggacagaaaaatatgagctgtgggcagatgcccctggatgagagccagtagccagtctctggcctctctgtgccctcccctaggagcccccgaccccgccatgggtcccctcctggcctctgccagcctctcccactcttgcttcattgacctctggctcacctttattttttctcccgtctcttcccacttctggtttctttgtttgggtttatcacagatcctttcctcttccctcctttcatatttctaagccctctcaagagagaagaatcatatttttcctcaaccatcgctctatctctggcacccagcacattgccaggctgagttggcactcaaaaatgtttgtagaacaaactactctctctatacatctttctgacttggtggggaagaaggtccaaaactttgctgatgactccttggatgaagaaacttctcatacagtggtgtgagccctggagtcagaatggttggcttgagccccaatttcattactgcctggccaggtgaaggagattctgttcatcagtggcagccagggatgtctctccttcctaccctgactctcctctttctgctgggtcccctcccggatacagggctcacacctgtggacctcagagccagcgtcaagaccaagaggaaagaaatcaccaaaagccagacccttgtatagagggaaggggaaggaagggagggaagacagactcctctggggatacatgcgactgtcttggctgggaaatctgatctggtgggggactcaccccctcctctcgaatcagctcagccctgatgtgtctttgtgggcttgggtttctctgtgcctgaaagatgaggcgtggggtgggggtggccgggctgctggttgaggctgaattcttctgagcaatgtggttgtgtttactgggagggtgggagggccagacctttttcctgccttccaggcttcggagataaggcagaaagtgaggatgaaggatagaatgggtaatactctgaaaccacaagaaagagttctggcttttgtctctgccccacagctcagacatttcctggggcatctggaaggaagctgacccactcccaccaccctggggtcccagcccatggggagcacagaacctcagtgggcacccctttcttccattctacctcctttccattgtcagtttagccacaaaattattttagcttttttactgccagtcccaccctcagttttccctgccacatgagcccagccctagagctgagcttttctccctgcctcccagcacagccaaagccacagagaccctaggcaggtgacagagcccagcctggcatgcatcggccttgagggctctgctgcaggaccaccttccccttccttgctggcctctcaggggtcgtggccagcctgcatcctggacacagaccagccccaaagcaaccagtgccaagccctggggatagacagtcacctggtataaaaaacaccaccacctttattagaatgctgggcagccttttttttctctctctctccttttttttttttttaaacaaaaaaaacacaaaagtgtctgtacaaaaatggggatcaggatctcagtctgtagaaatctgttttattcttaccaacatccaatatcatttccatggcatagctctgggctggtcccgtggaagagattccaaatatgtggtgatttctggtggaatttctgcccccttggaggggaagatgactgcatggcatgctgggagtgcaggcacatggcaggagtgagggtggctggagctgaggagccagtgtgcctcagtctatgctgaccttggcctttacaccctccttagtgtcagacaccagtgcgccccctgctggtggggaggggaagcagggctgactccaccccatcatgggagactcccttttggtttccatctcatcatgaagagcttcagtccacgcggcgttctcctcccattttcctgggttccctgaacgatgagccaagtaagctgtcttagctggagagatgacaatggacttggacaaagtctggaggaagcagggcagtgtctccctgcctccagcccagagttcaggtgaggggactcagtttgtggtaggaagagtcctggctgcttcgaagccccttctcctaggcagccccaccttgttctaagagaaaagaccctgtaacgtgttccctgctgggggctgacagtgccagctgctctcgcagcctccagaaccatctggggcttggaggcagaggtgcttcctccgtggtgtccaggcaggggtgggctgggagcgactgggaatggaaaaagaggtgggcagctcattctgcaggtccatgcaaccgatcacgtggtccagttcagaaggccgggtggctccttgggctttaccctgagcgagacgaggcttggagacttatagtcaccatctgaggaaggctcaaagctgtggccccccagggtggggggaaagccatggatggagtagatgccagggtgagccgcagaaggggctggcacccccatgaagccagccacactcccatgggggtgggaatatggagacatgcatggggaggggatgccctctggagacacaaggcaggggcctccagggctcccagatcctggactggcccacagggagttctgcagctgaaaagagagggaaagaaggcccatgagcctgtagcctcaggagctgacttccctacccaggggctttctctttgtccttggggccccagaaactttccaggaaacctccacttggctcagatctaccccctctcacccccaacactggcagtggcatctcaggaggcccctgccactgttctcaaaacgaaattttcttctgtgattcctttgtgttccgcatgcgtcattcatgagacaggcaagagccccggtttgcagagaaagaagtgaagtggtgtacccactgtcatacagaacgctgacgctctccaggtttcttcaggccagacctcatattctttttggtgaccctgccaggtcctggttcaggtagggctggggtcttacctgagggtggctgtcagtacggggcagcacagagatgtcataggcagccgtgaaggggttccgcccctcctggatcttcccataacgctcgcgcttccgccacttggctctgcggttctggaaccagacctgggggcaggttgtgggggtttgagggggtgatagggcagccctgaggaaaggagcctgctagggagagctgatggttgtgtcctcttgtgggatggggagcaggctccaggatggaggatctcaactgttaatccacactgttctccaggccagggaagcctgggaggaagcctgggagaggcccaagcccacagtgggtaattggccc

SEQ ID NO: 1640 - DNA, 3711 bp, Homo sapiens
agtttgcaagtgcgtcgcggagccggcctcggaaatatggcgacagcttcagctttcagtgtgagggagccgagggcccagccaaaccctgcgggaggcaattcctgggtacccttcccatattttcggtctttgggctgcgccgtggtaacctcagagcctggttgcgtgctcaccagcgacaagtgtctttcactgggacatgaaaggggagtgggaagtgccgtgcagtttcagggtggtttctggttaattacattttcatgggttttcgcagagtctgggggcaatttgtgtcctccagagaccagggaccagggccgaagctacggcaggggagacgcggccagggccgtggcttctagtgcgagctcggttcgcgtccgttcccgtctggcgcccgggcctccgggagcccagggccttgaatgagacagtgctcgtccttgaaaaagcagttctaggtcactcggcctgctttgccagcattccgggccccagctcaccttccgccatccatgttgacaacaccagttctacgacgaagcgggcgattcctcttgcctggaatttcactcgtccccggtatcgaacccccgccccaattttctacgttacaactccagcgtatttttaacggcgcagccaatatcacctccttggtataaagcctgcgctgtcctggaccttcttaggagtgcaggcttaggaacaggagctatgctgttttattatttttctttagtttaatttttttttttttagagatgggatctcgctgtgtcgcccaggctagagtgcagtggcgggatcatagcttactgcaggctggggtcaagcaatcctcccgcctcagcctcctgagtgtatgggattataggcgcaggcctctatgccattgtaaatgctgtggattttgagtatttgacctctatgagcctcagtttttgcatctcaacattgagataatactagtacctcataaggttatgtgacgattaaatggaaagctcttacaatataagtgcttaataagtatgttatcatatgtgcttccaaagtactttgtgtaggccttttataacgcttgccctttctattaccattatttgttcttgcctgccctactagactgagattctcaaaagctggaactgtcttgtttataatctcagcgtctgtcagtgctgggcaaatgtaaagctaagaaatgatttcttagaaaactttttaaaagcagtctttcttctcctttccctttcttcctttccttcactttttcctctttgagataggaattttcaaacctagagaagaagctgagaccctagggggaaagattgggacctttttgttgttgttctcagtggtgaccaaaagagccttaacattcacctcagcctgacaactttagacaggtttcttctggatgttaggcccctgacctcccctttctttgagtgtttactttagaaaacttgtgattgcaaaattcttctctgctcctttgaaatgtgtataaatctccttagaagcttatgccagttttacgacctagggaatgtctttctcaaggacctgtgagccatccctttgaaatgtaatcatcaaggaagatagcacccctatctctcagtctctgtgggagggtgggagcctaacctcctgtgggtgccttgtttggaattgtaaaactacagcttgttttgaagatacaagaaagtgtccttttcctttgcagttagcaaacacagatgtcatgtgatttcccgtacagcagctcttaaaaacttcccagacccttgtttgagtagtgttgagtttaatctcgtattgcaatagtcttaaggtctttcttgcctgtttaactttgatgcaaattttgacaatggaaattttaggttctgcatttatcgtttcttcccaattacagtggtttctcctttctccttgttaagaagagcttctcacatcctctgatttctggagaaatcaatttggactcaaaagattggagttttgtggagtgaagctactgtttttgttttgttttgttttgttttgttttgcctgagatagagtctcactctgtcacccaggctggagtgcagtggtgtaattatggctcactgcagcctctgcctcctgggttcaagtgatcctcctgcctcagcctctcaagtagctagaattacaagcatgtgctaccacgcccagctaatttttgtatttttattagagacggggtttcaccatgttgaccaagctggtcttgagctcctggcctcaagtaatctgcccaccttggcctcccacagtgctggaatcacaggtgtgagccaccacgcgctgccagaagctactgttttaagtcatcattgcaaagggtagtgtgtgatgcgcaggagtggaaagggcagtacatctatttgagagcatcccaaatgaggtccattcatattatggaagtgcactgcgaaataaagaacaggcctacccccttgttttattatgaaggggtatgagaaaaatgcaattttcaaagaaagagaactgctgaggatgtagtaccttctcaaagaaagctgtgtttggttaaggtgagaagctagaggaagccacagagggcagggttacaaattgaaagacttctgcaatggtagaggtagtatgcagaagggttccttaaaatacagggatccatgtaagatgaggaggtaaggtggagtaggattgaggtggaatgaaatgaaagatggaagagaaaaaggaaggcagtaaggggagaggggagttaatttggggtatggataacagggaaggaaataggtaacctgagaagcttggtagaggcacttgccacttgcatgggaagggaaatatcatgcagacggtcctgttgctaaaggaagctagaggatttaggagaaggggtttggcacactggcctctatcacccatccgtccccgacaacacacaacacagacaaattgagtgcactgttgacatttagtatcattctccccccatgactggtggaagctaagaagatgaagttcagggtgctgatcttttttttttttctttaactgacttttcttatctgagtacttacccctagttccctctttcttcccttcccttccctccctccctccttccctcccttccttccttccttcttcttcttcattttttttttttttaatgagacaaggtcttgctgcgttgctcaggctggagtgcagcagtgctatcattgctcgtgcagccttaacctcccaggctcaagcaatcctcccacctcagcctcctcagtagctgggactacaggcatgtgccaccacacccagttcattttttaaattttttgtagagatgggtctccctatgttgcccaggcaggtctcaaactccatcctcagcctcccaaagtgctgagattacagtcatgagccactgcgcccagccctttttttcttgcttctttacctacttttcacaggaattgggtagatgagggtagacccaggaagtgagagtggaatttgagaaagaaaaacagtaaaatgaagagctgaaaaataaaagagtttatttctaaatgtatgtacgaaactcaggttgggggactagcatgtaaaggtatatacaaataaaatggagttaagtgcacttatttattgaatcctgttgtgagaacttttgag

SEQ ID NO: 1641 - DNA, 3365 bp, Homo sapiens
acacgctgcaccctgaacagtctgggaccagcggtcagggaacaaggaatcgagatgctcacctgcagctcccaggtgagcggctctctagagcttgcctgggagctgctgaggagctcacggtattccaggaagctccccatccatgcctcagcctgtggctcagaagcagggtcttcgcagaagattgccccgagctgttgcaaagctcaccattgtcacctgcctgcaacggcctctcttttccactctccaaattccttgtattggcaggctctaatctggaattataccggtgatgggattctggaaaatccctcagatttctccaggatgcaaggagaccatggaagaggttggtgtaatgccaagttagcaacagaaaatacagagccccacacctcagtgccatcaccatcgccatcggcactcacaccagcatgtccaccactgtgtccttctcacccctcggcacccccctctaccattgcctcttccacaaccaccctcaccaccatcctccattaatagcacaattcctgcctcctatcccatcaccaccacgggtgtccccggcaccagcagcaccaacactgctcccagcagagccatcgttaccagccccgctgtcagtcccatcttgagcatctggcatatgttggagaactgctcactccctcttccccatgggaatctcaggcctctcttcctattgccctgagatttgcagaaccttcctgaaggaaacattctttgccccatggatactggccttgaccatgggatgcagcaagactgccacacatcatggcccaacagaagctttcagaggcagcccaagttcctgctgtctctgagtggcactgtcatgagagaggggtgtgcaggtcagagctgattctccagcctgggacccacagtgagaagctatgggaggtggggccctggcagctgcctgtaggcaccagtgagtgaagtggggggaactagatgtttgtcgtgagccactgagaggtggaagctgtcactgtggtatagccgaacaagatacaacctctgctacctccaccaccttcaccttcatcatcaccattactgtcaccactgccaaccacaccaatggctcactaggagccattcccatcacctcctcatcatacctgcaccatcactgccaaccacaacaaaggctcgctgttaccatctcctctggcatgaccatcaccaccaccactaccatcatcaattactctcaagcacaagccttgctgctgtcaccaccagcatcaccatcatcatgatcaactccaccatcacccataattactctccccctcacacccaccatgaccattacctccacatcaacactgctcccatggtcacctctactatttaatgacaccttatccatctccatggacacccaccgtgcctctccccaccagcaacacagtcaacagcagtgcctctcccactgccaccgccatcatggagaactgtgcagggcaagcatctttctcccgccccaggaacaagcctgcaagggacagcaggtgctaactgctaaccgagacatagtgacaaaaatccagccacagagataaagaatcaggttcatctgtagctacatccagtggagaagttctgctcttcaactcctctgctaagccacatgtgtcagcaggtgtagaattgagtggaacacttctttggatttgctgtccgctgcagccttggccctggtttcacatcccctccctcactgactcgctgtgtgaccttgagcactgtgtgtctctgagcctggttcatccaagagtttaccgacggccctcgtgtgccagccactgtcctagacagggacagactttcccgcctttgtggagcttaccccggaagacctggccagataatgggcacaaaaaaagcaggctcttgtccccaccccagcctgcctgaaccccaccttggcctcctcttgcctcagctgctgcccagccatcggccgagtggacatacccaggacgcccttgcccgcctcccccaccacggccacagacctttgtcactcaccaaggctggaatcccgtggctgatcctgcctctgccctttggctcccgggactcagcccacaccacctgggtcacagagcatcccattcccacacaccgttgtggccacctcaccagcaggggcaggcccatatgcccaggtttgcctggtgaggagctgggggcgggggtatgccccgccccgggagctgacgtcataaaaggagctctggagggcagcccactctggcctggccccacagcggcagtgtccctcccctccccccactcctctcagtgggggcccctccagtccctgagaattggtactacgaaaaggtgaactcctgggcagaatcttgcctagagcttgcggagtccagccaggcccctgctgaagggccccagaccaccggccacttctcccccgtccatctgaccagctgggcccctgcgcccacctggcctccacgttccctctcctctcacccacacccctggccatggctaactactacgaagtgctgggcgtgcaggccagcgcttccccggaggacatcaagaaagcctaccgcaagctggcccttcgttggcaccccgacaagaaccctgacaataaggaggaggcggagaagaagttcaagctggtgtctgaggcctatgaggttctgtctgactccaagaaacgctccctgtatgaccgtgctggctgtgacagctggcgggctggtggcggggccagcacgccctaccacagccccttcgacaccggctacaccttccgtaaccctgaggacatcttccgggagtttttcggtggcctggaccctttctcctttgagttctgggacagcccattcaatagtgaccgtggtggccggggccatggcctgaggggggccttctcggcaggctttggagaatttccggccttcatggaggccttctcatccttcaacatgctgggctgcagcgggggcagccacaccaccttctcatccacctccttcgggggctccagttctggcagctcggggttcaagtcggtgatgtcgtccaccgagatgatcaatggccacaaggtcaccaccaagcgcatcgtggagaacgggcaggagcgcgtggaggtggaggaagacgggcagctcaagtcggtgactgtgaacggcaaggagcagctcaaatggatggacagcaagtaggcgctggccacccggccctgccttcccaccaccaccaccgtgcatggggcagcaaacacgtggggccgcagacatagcctgatggttaataaatgtgccaagtgagtt

SEQ ID NO: 1642 - DNA, 3931 bp, Homo sapiens
atgtcaaactgatgagcatccatcgtatttgtagacacccctcaaaggagagttgtacagcctattccactgacatcctgaccaaggcatctccatcatgcctaggtggagttggcctttttccttacattctgtcttcactggagaccaggcaggtgaatcagctgggtgtgaagtggccttcagccatgtcctctcctggggaatccatccccctccttccactctttccttgtaattggaattggaccacctggtgcccacggctctctggggtgaagctccctcttggtgtgtcctgttcttcagtgacatttatttttgctttcctcatgtcccctcttgcagtgctcatcctgttgttacagtagctatttgtagcctatgcaccagcctgtgtgttcttggggccaaggactgtgtcctatgctccttcctgtcccctgtattgcatattgtaccatgaacctagtagtgagtgtcccatgcatgtttgctgaatgagggagtgaatgtctgacagacgtttcatggcttgcatccagcctgcccctaaatgtttccctaatttctaatgctgacactagacaccccactgaaggactagggtgtctaactattccatgctaagtatgggcaaaagaggacagtttgaccaagatgctcttttacccttgtgtatccaagttccctctgatcattaaatgagcagagacttcacacagaaggtgttgctactgctgcagatggaggtcagaattaaggtactgctactgttgatctcagacctttgaaagccagacccaagcttggggtcttggggatggggatgctaggggatgggatggccagatacaccagagtggctgggaatgaaagagtgtcccggaaaacctgcttcctcggagccgatcctgtgtgagcagaagaaatctatccacagaggggtgagatcgcagagcaagtgggttacctaaaaatagcagtgctggtttcccacagttagagatgggtcctctgccattcatctcaattgttttgtgcaagtttgcttatttattgagagtgagagaaaaggatcaaaccattcatccaaagatggaaatctgcaacctcttctacaatgatcagccagacagatgagctgagtgagaagtccctgaaatctcagaggcctagggctggccaggagagtgggatgggcatgcttaggagagtggggtgggcatggttaggagctgcccccagcttgccctgccttcgtagcagagttgatggtgggctgaaccttacccccaacatggggacttttgcaggggaggcagacctgtgtgtacatgtgagggtacatagacatacatgaacgtctagctctctgagggaagagatgagatgcataaaccacctaacccagcacaaagtacacacaataggtgcttagtaaatgttaattagggagtcaagtaggtagaagttgaggtcagggcaggaggaggcagggatagaggaacataatgtgaagtagccagagtatttttgacaaaaaggtgtggattttggagtcaggaaagcctaggttcaaatcccagttccaccacttgttaacatggtaacctcaggccagttacttaacctctcagagtatcagagtcttcacctatacattttgagaatggcatgacatctcatggtgttactaggattattaagtaaaataatatatttagagtacctgtaccagcccggggttcgataaattacagctgtttttctttttattatcatttattgtgaatatcatggacaatgaggttcctcagtttattaacagttagaatcttactttaaaaaaagaacccaaattaggctgggcatggtggctcatgcctgtaatcccagcagtttgggaggccaaggcgggtggattgcttgaggccaggagttcgagaccagcctgggcaacatagtaagatcccatctctaaaaaaaaaaaaacaaaagaacccaagttggaaatacttgcaagtcatgtatctaatctgataaggggttaatatccagaatatatagagaactcataaaactcaacaataacaaaacaagccattcaattaaaaaatgggcaaaagacttgaataggcatttctccaaaggagatataaatggccaataaacacatgaaaaggtgttcaacaacactaatcattagggaaatgcaaatcaaaactacaatgagataccacctcatacctatcggtattaggatggctactatcactgtcaatggggatgtaaatgatacagtcactctggaaaacagtatggcaattcctcaaaaaattaaaaatataattaccatatgatccacaattctacttctgggtatgtacccaaaataattgaaagcagggtctcaaagagatctttgtacacccatgttcattcttcacaatagccaaaatggggaagcaactcacccattgtccattgtacattgatagatgaatggatatgcaaaatatagtgtatacatatatatacatatacacacacacaatggaatattattcagcctttaaaaatgaaattctaacatacattacaatatggataaacctcaaggatgttatttttggtgaaataagcaagtcacaaaaagacaaatattgtatgattccatttatatgaagtacttagagtagtcaaactcattgagtagaaaagagaatgatgatccagggaatgtggggagaggaaaatggggcgtttttgtttagtgagtacagagtttcagttttgcaaaatgaaaagcattatgaagatggatggtggtgatgtttgtacaatattgtgaatgtacttaataccactgatgtgtaatttaaaaaggattaagatggtaaactttgcatgcattttatcacagcaaaaaaaattggaaaagcactaaaatcaaagataccaattttcccctaatcgatccatagatttaatgcaatcccaatgaaaacatcagtaggcttttaaaaaactgaaattgacaaatgtattctaaaatttatattgaaatgcaaagacctcataatagccaaaacaattttgaaaaaatgcaaagttggaagatttatactaccagacttcaagagatactataaagctacagcaataaagtattggcataaggataggcatattaatgaatggaacagaatggagagtttaaatgtagatccatagacatgtatggtcaattgattttcgaccaagctactgaggttttccacgaggaaaggttagtcttttcaacaaatgatgctgaaaaagttggatatccatttggaagaaaccccaaaaacccaaaaaaacaaaaagccttaattcttcttacttatcacaacacacagaattcaactcaaaatggatcataggccttgggacaagtaatattatgtgtcaacttgactgggtcacaggtgcccatacatttggtgaaacatcattctgggtgtttctgtgagggtgtttttggatggaattaacatttaacttggtaggctggataaagctgagtgctctccctaatgtgggtgggcctcgtctaatcagttgaaggcctgactagaacaaaaaggctgacattcctttgagtaagagaggattcctcctgcctgatggcatttgagctgggctgtcaactttttcctgcccttggacttgaactaaaacactggctcttcctgagtcttgagcctgccagctttgcactggaactataccatcagctttcctgattctcaggcctttagagttgtccagaactatactgtcagctctcccggctctccagcttgccgactcactctgcagatcttgtgacttgtcagcctccatcaccatgtgagccaattcattataataaatatcttttcat

SEQ ID NO: 1643 - DNA, 3789 bp, Homo sapiens
agttgattcctagaggtggaatccattaaactgacaaagccccagtccccgggtcctaatagtcgggactattaggtcatcctgggtactcaggcctctagactctagactgagctgccttggtcactcggggacagttggcagagtattcgtggtcagggaggtgacccgtggtcagcaggatcaggccacccagggacaaagggtgcttctgcgccaggccctggagaaggacagagcggtggggactcggggtcggccgcagataggggagtcaccacctgccggcaatcagccatgactgcctttgcactgtccatgctctcagcccaccacctcctccccctgccattgcagtggctaacactggagacgaagaccaagacaccaccgcctttctccagtacctctcaaatcagcacaggcaaggacaaaggcctcaatccacaactgctgaagatggaccctggccacatgggatggtcagacacgcctgcccagctatctgcaggcgaagaggctcagaagaggtttaggggcctgaaggacatcttgcttccatgtccatatgagcaggctatttctgctccatgagttaattttgccatataaaatacttaatttcagccattccagggtgctgtaggatgcacagcttcccatcagcccacctgaactccagccatgccattttgataccaggaataaggtcacctgctttcctgccccttaggaggccagagccgtggaagcaaaatggcacttctgtttacctgttatattatttttttgtcatccttatatgtttgaaaaatgcaattatatgaaaaaagtttagtaattacagacataacagcagaaagtcctcggaaccaagcttattctcatggccgattctgctccacctgggactctgctgtgctgcgggcatcctgtggtcagaatcgcagaggggccatcagggaggaccttcccagaggatggacctcacgtgactgctgcgtgggcaagtggcactggccactctgcctggagagaggagtaaatgcagggctggccaggcgacctgcacactctgctaccggccttgtccatctttagcctctaatttgaaaatgaggatcacacagaccaagagtatctttgagggttagtacagaccacagaaatgccctgggcctttcactctctccttttgcaaattcccatgtgtggaaatgccgtttggataatgagggagcctgaaggaggtggacacatgagcagccccgacaggcctggctccatcctctgaaaatggggccccgtgcccggcgtgtggccttactggttcagtcttctttacagtggtaggttttgagtgcccagatgcccagtgcctcctacctggaacagcacaggatctggcagacccctggaagaatcacatgcacacttaaatattcagggagttcccacccagcagagctcgcctctgtggctaccttggtcttgctgctgatatctgccagaaaaggcctggacttggagacaagcctgggatttacactcagtccttccccatctggctggttccatttccttggctctcactgctggaggtctgtgctcctgaacatcaagtcagagggggcatctgaatgcagggcagggagcctcagatgggaagaagtcagaggaaccagaatgtgtcagaaaatgccaagtcatgtgcctgagctcaaaagtcagctgggccacaggctggctgtgtgatcttgggcaagttcaaccagcttctttatacctcttttcttgcctcaaaatgataagagaaaccacttcactaatacactgagggctgctattaagttctatgtacaaagacccatggcaggccctatgcccttcggtgagcactactcctccttacaatttactgccaggaacactgggcaagagaacttcagtggagcagggattggctgagcatgagccagggttgggggaagtaaataatgggctgttgccagggcctgagcccaacagagaaaggctgtgtgcagagggagggcctcaggtcctggggctcctcctggcctctttcgtcccgactacttcacaccctcctctaacaacgactcccacctccttttccagctctccttgatcctgctcagggtggcgcctgctgtccctggtcccttggtccccacctgcctcagtgccccccagtcacatctgctgtttctgccatgggtcagcagacagggtaggggtgactggtggtgcagaagaaaccatctgagagggggaccccaacacggacagggcacagacggggcttccaccaatctcagtggatgaagattctgtccctgccatccccgcattctctccctggtctcagaggccctcctgggtctccagttgtcctctctcccacctccacactttcttgttccagtcctgctcttggatttctttaataattttcctacctccaagatcccctgatgatcagtttctgcctggggtcaccaggcgactgaccatggtggggatggtgacttgagactcctggaccacagtgcaggtgacatatgcaacctacagagtgaaaaggaacagtgtcactgctgggtcattttgaagatgaggcttaggtaatggattaaagacttaaatgttagacctaaaaccataaaaaccctagaagaaaacctaggcaataccattcaggccataggcatgggcgaggacttcatgactaaaacaccaaaagcaatggcaacaaaagccaaaattgacaaatggcatctaattaaactaaagagcttctgcacagcaaaagaaactaccatcagaatgaacaggcaacctacagaatgggagaaaatttttgcaatctacccatctgacaaagggctaatatccagaatctgcaaagaacttaaacaaatttacaagataaaatcaaacaactccatcaataagtgggcaaaggatatgaacagacacttctcgaaagaagacatttatgcagccaaaagacacatgaaagaatgttcatcatcactggccatcagagaaatgcaaatcaaaaccaccgtgagatactatctcacaccagttagaatggcaatcattaaaaagtcaggaaacaacaggtgctggaaaggatatggagaaataggaacacttttacactgttggtgggactgtaaactagttcaaccattgtggaagacagtgtggcgattcctcaaggatctagaactagaaataccatttgatccagcgatcccattactgggtatatacccaaaggattataaatcatgctgctataaagacacatgcacacgtaagtttattttggcactactcacaatagcaaagacttggaaccaacccaaatgtccatcaatgatagactggattaagaaaatgtggcacatgtacaccatagaatactatgcagccataaaaagaatgagttcatgtcctttgtagggacatggatgaagctggaaactatcattctgagcaaactatcacaaggacagaaaaccaaacaccacatgttctcactcataggtgggaattgaacaatgggaacacttggacacagggtggggaacatcacacactggggcctgtcatggggtgaggggaggggggagggatagcattaggagatatacctaatgtaaatgacgagttaatgggtgcagcacaccaacatggcacatgtatacatatgtaacaaacctgcacgttgtgcacatgtacccgagaacttaaagt

SEQ ID NO: 1644 - DNA, 3274 bp, Homo sapiens
tttccagaggtgggggctcccaagacgtgtggaggagtccctgaggcagcttatgccaaacccaccattgtattaccaacctggaaatgaccagccagtttctttcaacctgaagaatacttctcaggtctctcttcacagatctgagaccatttccctccagacctggtgttcatgtgtggctggccagcccatccagaccttctgggtttctgaatggtccacaatgaacccagaacaaagacaccactgtcagcaaactccaaaccctatggctctagccttgccctctccagcccttaaagccctaagtggcccccatccacagtctgggggacaagataatgactcagggagtgatctccagcagaaatacagccagctattctgtgggctcccttctctgcacagtgagtccctggttgccactttcatgggatctcaaggcctccccaagattgaaaatgtgcccaagccccccttgaaggatccttttctcttcaatgagctctccttcccccaactgctccctaaaacttcaccccagtcagccccaccctcttccccactttccccaaactgggtgtctccatctgaccatcaacgagctcagatcaatgtcccatttctgactctggctgagtatgaagccttggagtggcacctgctacagaggcaactccagcttcagtggggctggccagctgccctccagaggtctcagcacacccagtgcctcatgcagcatgagccctgtggcaaagctcagtctcctgagaccacgacagcttcccagacagggaagtccatctcagtgctcaccagggaactactcttcttcccggagcatgcccggaagctgctggaattccacatccagaaacagtcgattcaccatcgctggggcctgcctcagaagatccagcagtccatccagttgctccttacctccactgaccagcagactgtgtccagcagcagcacagccctagccaacgtgagcatcccccagcctgtagccctagaggccaacggggcttgcgatgtgctgtcacccattgcggccccagtgtccatccccaggccacacttgttaactcaggtcaaggcaatactgcagagccacatcgactccaaatgtggacaaatccaccagggcaagatccccgcctgtgtacacaggtcctgggactgcagaatttctggggtcctggcagtggctccttttccctgcattccagaaagccagttcctggaactgcagacagcaagtgacccagacctgcatcacaaagttatgccctggatgccaacggcccttgatcagcagcaacaggctttaccaggtactgtcactgaacaccctaagctgctccgagtcttgtctgtggaagccattgagaaactggagacaactttacggcacaagcatctggccttcctgtcggggctgcctgctctgtattatgtggcgctccccagggccctggccccggcagtcactagccaatctgtcatcacagagatggtgcctagtcctgtggaaatcccagcagagcctctgattcagatggtttcatttgaagaacagtgtataagtcttgggccatgccctcaaggcaacaatgagagttgtacagacgttgcaaaagagttccagcctgcagtgccagtaaaaggaacaatggagacgctgcctctagaaagccagacgcatcctactagcccccactcactccagacacatatcttgaccaaactaaacttccacctgagaaaaaaggtcctagagatacaatggggaattcccattagggcaaggaagtccagggaacaaactgttgcagcaccagagaacatatccacacagaagtctcttgaaagtctaaaccaccaaggggagacattgctccaggaactgcccatcccaccagacactcttcctgcccctaatccagaaggggttcaccttaaagaacagctggccaatgacttgaaggcagtgcagcagaaccaaaagcaatccaattccaaagctgtaccccagggttctgcccactcggtctccaagatctcacagcccattggggacatgacagaggcccacatgccttgtgttcaggtagaggccaatgtgaacaaacccagcctggaggaaccctgtggccctgagcctcaaagccctagcaagagcaaggacccagcccatgtccccatgctagcagaaaacagagaggacccagaggaaaccaaagcagccagggactacagagaaggggatgcggggtttgggcgctcctcaaccagagaagagagacgccctgctgaagaccagaggccagcagggatgcttccaaacaagacaccccgagggtcctggcgatggagccatagctttcatcttgctgatccctgtcaacacagcccccagcatcaccctcagcttaagctcccacagctacctccacgagtccctggggagaaagagtctgagaaggacctgcaagacagtcaaaccaagctaactgtcatccttgaaccagcgacaattcctgagaatgcccagactgtgttgccccagtcttcacagggtcagcctttcctgagccaaccaactcaggctaagcctttgcagggccaaactttgcaaggccaagttttgcatgggctggtgatgccagtccatgctcaaaagaagcccagccttacagagtctagcttcagaaataaaattaaatgttttctgcagcatattaaccccaagacaaaaggcaaagggcatgaggactccatgttctcagccgctgcgaaggtggccaaaaccagaaaagaaaatgttgcaaagagcctggctccagccaagagccctgtggggagaagtaagacggagaagccgacagggtgctccaaggcccaatctcgtcctgctcagaagctggtgggcccagccttcttggatggtccccaatccctagacgataagctccggctacactccagacaacctggctctgcctcagccctgggctacccccgccactgccctcgtcactgtcctcgagaggcttgtgccaacaaaccagggcacccaacctagctcctgaccctcacctcagatagaaacattggtccgctcaaggagaatatgcagagccatgaaaaagagtttataggctccccaactgctgcagccctccagaggaccagtattgtcatttccataaatgtgcaggtgggacagatgccactagaaatacactctatatttctcagc

SEQ ID NO: 1645 - DNA, 2997 bp, Homo sapiens
actccttcggcgttggctcttgcgccggggtcgttgtttcgtgacaaccactcaggtagccgtttctgagacggcagatgcggccgctttagccctgagcgggctccgcggctccctggacggtctctgccagtgcccgactcttctcttccggactccacgccaagcagcgaccctgagccaacagccagagcgcccagaaatggcggcctggactgcctcgcactggccagtcaaggggatcctgaagaacaagacctctacagcttcctctatggtggcctcggctgaacagcccagcgggagtgtcgaggaggagctgagcaaaaaatcccagaagtgggaagaaatgaacatcctggcgacatatcatccagcggacaaagactatggtttaatgaaaatagttgaaccaagcaccccttcctgtcgtaagatgggtgatggtgaagatgcgtgtagtggtatagaaaccactgaagccgtggcaccagatatcttagctaagaaattagctgttgctgaaggctcgaacccaaagtatcgggttcaggaacaagaaagcagtggagaggaggctagtgacctctcacctgaagaacgagaaaaaaggcgacaatttcaaatgaaaaggaagcttcactacaatgagggactcaatatcaaactagctagagaattaatttgaaaagacctacatgatgacaaggatgaagaaatgttaaagactgcaggtggagaaagcatgaagacggaagaatcaaatcaaagctctacaacaagtgaccaacggcaaaacacattcagttctcctagcaccaccatgatctcaggactaaccactgcacacccgtgatgggattccaaaccttcgctgcaagaggacaaggtgacgagttgctgacagtgaaggctaaactaacgcggacagtgaagtgctacatgagtcggactcagactccaggtgaagcagccagcagaggtcagagagagacagctcacgttccggataaaataaaaaatggggatattgacctcctgtcactactgcatggactttgatggtttccaatcattactttctcctctgtgtcaatctgcctcttcgagaaattcatactcctggtgctgttcaagtcagtagaagaaccatttcttcgaattccttctcaccagaggtatttgtgctgcctgttgatgtagaaaaggaaaatgcccacttttatgttgcagatatgattatatcagcaatggagaaaatgaagtgtaacattctgagtcaacagcagacagagagctggagtaaagaagtcagtgggttacttgggagtgatcagcctgactctgaaatgacttttgataccaacataaagcaagagtctgggtcttctacttcttcatacagtggctatgaaggttgtgctgtgttacaggtcagcccagtgactgaaacacgtacttaccatgatgtgaaagagatttgcaaatgcgatgttgatgaatttgttattttagagcttggagattttaatgatatcacagaaacctgtagctgttcctgcagctcctctaagagtgtcacttatgagccagacttcaattctgcagaattattagccaaagagctgtaccgcgtgttccagaagtgctggatactgtcagtagttaattctcagctggcaggttccctgagtgcagctggctcgatagtcgtaaatgaagagtgtgtccgaaaagactttgaatccagtatgaatgtagtacaggaaattaaatttaagtctaggatcagagggactgaagactgggctcctcctagatttcaaatcatatttaatattcatccaccactcaagagggaccttgtggtggcagcccagaattttttctgtgccggctgtggaactccagtagagcctaagtttgtgaagcggctccggtactgcgaatacctagggaagtatttctgtgactgctgccactcatatgcagagtcgtgcatccctgcccgaatcctgatgatgtgggacttcaagaagtactacgtcagcaatttctccaaacagctgctcgacagcatatggcaccagcccattttcaatttgctgagcatcggccaaagcctgtatgcgaaagccaaggagctggacagagtgaaggaaattcaggagcagctcttccatatcaagaagctgttgaagacctgtaggtttgctaacagtgcattaaaggagttcgagcaggtgccgggacacttgactgatgagctccacccgttctcccttgaggacctggtcaggatcaagaaagggctgctggcacccttactcaaggacattctgaaagcttcccttgcacatgtggctggctgtgagctgtgtcaaggaaagggctttatttgtgaattttgccagaatacgactgtcatcttcccatttcagacagcaacatgtagaagatgttcagcgtgcagggcttgctttcacaaacagtgcttccagtcctccgagtgcccccggtgtgcgaggatcacagcgaggagaaaacttctggaaagtgtggcctctgcagcaacatgatgcccctgaatactgtgaaaaagactgttcaacatgccttatgataacaccgatttgtgtctattattggtgacattgttttagatattgggtattgtatattaaggaaaaagatggtctatattctctttattgcatatacttaatgtttcaaaagaatgcagattctgtgtttaagcacagggctgatagttgtggttttgtttacaaatgttctgttttggctgctattggttttttaaagaggttttttatacttttgtatttgaatagttatgtttcactgatgctgagccagtttgtatgtgtgtgcatatatgtgaactgtaactgacaagatgaattactcagtttctctttctctaaagcttgtttgatgaaactggttggtcctttcagtgaacaaaaatatgacccc

SEQ ID NO: 1646 - DNA, 3933 bp, Homo sapiens
agacttggccaaaaaggagtatgaggccctcaacgcccagcttgtggaggagctccaggcattcaaccaggctgctcggaagattctgttgaactgtctatgcagcttcattaccctccttagggacctgatgctcgtggcacagcaggcttactccacacttgtgccgatgccactgttggtttcaagcatttctgagattcagaatcaagtactagaagagatccaaaatttgaattgtgtgaaagaaaacagtgccacctttattgagaggaaactcagttttgaaaagaagaaacctgtgcagattctgccagaaatgccacatcaaactgacattcatcgctccaaacttctatccacatatagtgcagaggaactctatcaagctaagcgcaagtgcaatgctacacaagaatatgacatcaatcttctggaaggagacttggtggctgtgatagaacagaaagatccactggggagtacaagcaggtggcttgtggacacaggaaatgtgaaaggatatgtttattcctccttcctaaaaccctacaatccagcaaaaatgcagaaagtggatgctgagaacaggttctgtgacgatgattttgagaacatcagcctcttcgtgtcttcacggccagctagtgacagtgtcacaggcacctcagaaagcagcattggtgatagcagctcatctcttagtggcacatgtggaaagtttgaaacaaatggtactgatgttgacagttttcaagaagtagacgaacagattttctatgcagttcatgcttttcaagcacggagtgaccatgaactcagccttcaggaataccagagagttcatatactcaggttttgtgacctaagtggcaataaagagtggtggttagctgaagctcaagggcagaaaggatacgtgccagctaactaccttggaaagatgacttatgcttaagaaaataagccttcaacttttattttccagcaagttgttgattgactacctcataaaactgacattacaaaactttggaccagaaagcaagaaacctctgaactacagaaactgatactgtactgggttttcaggaatactgtacttcctaacaggattattgcatgaatgtattataaaggatacatgttgaaagaaatactaagccaacagaaatagcaaagcaaatgacccaagcttcaactatcaactatttaaaagtgaagatcttttgaaggagtaattatattcttttatcatcaagaaaggttggatccaaaggtttttcaatttacttttttttttactgtatgatgtattttgccttaaatgtttttgtttttcatattgctctcttgcaaatgcatacatgtttatatacatacatataaaccatatatattatgtagctttatacacgtatgtggataatatgaattatacacctatatgtataaatcagagtatacaccaaatatacataagaagaatataccaccaactagaagtctttgataatatattttgttaatgtttcgtttatatgttttgaactaagactgaataacttgatattaacatgtaacattactgaatgcacactatatgccagacattgttctaagtgctttatatgtagtaacttgtttaatattcaaaacattatgaagaaaccatggcccaaaaaggtgaagtaatttaatccaaatcacattgctattaagtggtgggcctggacttaaacctaggtagtgtaaaccaaaaataaaattctaaggcttccaaccatctaaatagacttccccttcagccagggcttttttctttcttttcttgttgttttttttttttttaaagagacaataaaaggaggtttttttattcaaaggtataactggataagtagatttgtttacaatcattcttgtgaaatacttttttaaaaaaatacgatcaacttctttgcaaatagtagacacatacctcaacaatgatgacctaatttttgatccataatgtaagattaggtagaaataggcaagctcacactgctaaattaactatcaaatactcagtcaaaactccatttgtggcccccacttcttgatctatttctgttccacttcgtcttctaccatcttgccgactttcctgagcaactgctttgtcgactctctctacctgaccaattgccagatcgacaacctgactggcctgaccagccactcctctgtctggaattaaaagatgtttccatcataatattctttaatttcaggtaatttagctggcactgagagtatccagccggaatcgtgccactttgcctgtaacctttgactcaattggaggaatatcaaagcaaacacccatatttcctttcaggaggcacactctggtaatctgagacactgcattactattcagctttctaagttctttccaagcacagctgacatcctgtatttcctctaggctttccagagtcatggtcacaaaccccttatcagagttgattaaagatcatggttcaaagcttgatacaccagaaatgtgggctaaagctgcagccaatgcatctatcgcccctttctcttctatcagtatctgagctgatggttggaaaaaaatcaacagcagcataagaaatggaagccagagaccttatggcatccatgcttttaaatttaactaaatccattgtagaaggaacacctacacatttaaaagtaatttgtgttttttgttccacatgtcttagttgacctttctcttggttgataaaaacatatacaaacccctgtctgtccagctttacccacgcatccagagagatggatataggactcaatatcctgaggaggagaactttgaatcaccaggtcaactacaggaatgtccaaaccacgaggagccacattggttgccaccaaaactttataattacctctctgaagccttttagtgtaatttctctttgtgactgtgcaatgtccccatgtaaacacagtgcattctgttttgtgcggattcatggccatgtcagttacattcttcttcgtctcacagaaaataatagccctcccttcagatccactgtagacttgaaggacatctcattttcatctgtgttttataaaggaggaaattgaggacctcacatggagggactggaatttaaaaccaggtcttctgactttaaggcctttcttttagtgttttcccttttcttttccttaagtcactaaaatctgtagttatataatcttacataaagcatatgcaaaatagaaaaatgatagtcaccacatatctactaatgggattaaaatgtacaatcctaaaagcttacttgttagcacacttgcttatctgtccattcattcattgaaccagtaagtatttattgagagttagtgggaatacaatgctgtgcaagacaaacaagatccctccattcataccacttaaattctagtggggaaaacatctgcacataacaaactaaataaaatgatcataaaataataaatgctatttatataaaactggctactttcattactgctcagttaaagggtcttgtagctcattttatgacatgaaaaaaatcaaggtctaaaagctccttgagacaatttaaactctaataccaaatatacctctataaaataccaaactgagctaaatacggtatatgtgtacttatacatatgtacataacctaaatatacgtgtgcacacattatctatacaaagagccatactcagtgaaagataaattacctcctaaactaaagtcccctctgaggtacaacagaaattaaaataattgcttctcttctcaactctatgtagcacgtattttccatgatgggataaatgttttcatttcaagtgccaatgtgtgaactgtaataaacattactgctttc

SEQ ID NO: 1647 - DNA, 4747 bp, Homo sapiens
aacttctttattgagagggtgagaaagaaccttcacattgtcctcgccatgagtccaataggggatgccttcaggaaccgcctgcggatgttcccttcgctgatcaattgctgtacgattgattggttccagtcctggcccacagatgccctagagttggtggctaacaaatttctagaggatgtggagcttgatgacaacattcgggtagaggtcgtgtccatgtgcaaatatttccaagagagcgtcaagaagctgtcactcgattattacaacaaacttcgaagacacaactatgttacccccacctcctaccttgaattgattctaaccttcaagacgctcctgaatagcaagaggcaagaggtggctatgatgagggaccgctacctgacaggcttgcagaaactcgactttgcagcttctcaggtagcggttatgcaaagagaactgacagctcttcaacctcaactcatcctcacctccgaggaaactgccaagatgatggtgaaaattgaagcggagacgagagaagctgatggaaagaaacttctggtgcaggcagatgaaaaagaagccaatgttgctgctgccattgcccaaggaatcaagaacgaatgtgagggggacctagctgaggcaatgcctgcactcgaggctgcactagctgctctggacaccctgaacccggccgacatctcgctggtgaagtcgatgcagaacccaccaggccctgtcaaactggtcatggagagcatctgcatcatgaaagggatgaagccagagaggaagccagaccccagtggctccggtaagatgatagaagattactggggggtatccaaaaagattcttggggatctgaaattcttggagagtcttaagacatatgacaaagacaacatccccccactgaccatgaagcggatccgggaaaggtttatcaatcacccggaattccagccagctgtcattaaaaatgtatcgtcggcctgcgagggtctgtgcaagtgggtgagggccatggaggtgtacgatcgcgtggccaaggtggtggctcccaaacgggagcgactgagggaggcagaggggaagctggctgcacagatgcagaagctgaaccagaaaagagcagagctgaagctggtggtagatcggctccaggccctgaatgacgactttgaagagatgaacaccaagaaaaaggacttggaggaaaacattgaaatctgctcccaaaagctggtcagggcagagaaactgatcagtggtcttgggggagagaaggacagatggaccgaagctgcccgacagctggggatccgctatactaatctgactggtgacgtgttgctgtcctcaggaactgtggcttacctgggcgcttttacagtggattatcgggtccagtgccaaaatcagtggttggctgaatgtaaggacaaggtcatccctggcttcagtgacttcagtctcagccacacgttaggggatcccataaaaatccgtgcctggcagattgctgggcttcccgttgactccttctccatcgacaatggcatcattgtatccaattccagacgctgggccttaatgattgaccctcacgggcaggccaataaatggattaagaacatggagaaggcgaataaactggctgtcatcaagttctctgatagcaactacatgaggatgctggaaaacgcgctgcagttaggcacccctgtcttgattgaaaacattggagaagagctggatgcttctatcgaacctatcttgctcaaggcaacattcaaacagcaaggagttgagtacatgaggctgggtgaaaacatcattgaatattccagggattttaagttatacatcacaacccgtttgaggaatccacattacctcccagaagttgccgtgaaggtctgtctcctcaacttcatgatcacccccttgggtctccaagatcaactccttggcatcgtggctgcgaaggagaagccagagctggaagagaaaaagaaccagttgattgtggaaagtgccaagaacaagaagcatctcaaggaaattgaagataagatcttggaggttctctccatgtccaagggtaacatcctggaggatgaaaccgccatcaaagttctgtcctcctccaaagtgctatcagaagagatctcagagaaacagaaagttgcttccatgacagaaacgcagattgacgagactcggatgggctacaagccagtggctgtgcattctgccaccatcttcttttgtatctcggacctggccaacatcgagccgatgtaccagtactccctgacttggttcataaatctctacatgcattccttgacccacagcacgaagagcgaggaactgaatctgcgcatcaagtacatcattgaccatttcaccctgagcatctacaacaacgtgtgccgttctctgtttgagaaggacaagctactcttctctctcctcctgaccatcggcatcatgaaacagaagaaggaaattacggaggaggtgtggtacttccttctcactggaggcatcgcactggataacccctaccccaatccagctccccaatggctgtctgagaaggcatgggcagagattgtccgtgcatctgccttacccaaactgcatggcctgatggagcatttggaacagaacctgggtgaatggaagctgatctatgactcggcctggccccatgaggagcaactccctgggtcttggaagttctctcaaggattggagaagatggtgatccttcgatgtttgcggcctgacaaaatggtgccagcggtccgggagttcattgctgaacatatgggaaagctgtatatcgaagcccctacgttcgatctccagggatcctacaatgattccagctgctgtgcgcctttgatttttgtgttgtctccaagtgcagacccaatggcaggcctgctgaagtttgctgatgatcttggtatgggaggtaccagaacacagaccatcttccttggccaaggccaaggccctattgctgccaaaatgatcaacaatgccatcaaagacgggacctgggtggtcttacagaactgccacctggccgcaagctggatgcctaccctggagaagatttgtgaggaggtgattgttcctgagagcaccaatgccagattcagactctggctaaccagctatccatcagagaagtttccagtcagcattctccagaatggaatcaaaatgaccaatgagccccccaaagggctccgggccaacctgttgcgctcctacctcaatgaccccatctcagatcctgtgttcttccaaagctgtgcaaaggcggtgatgtggcaaaagatgttatttggcctttgtttcttccacgccgttgttcaagagagaagaaacttcggccccctagggtggaatattccctatgaattcaacgaatctgacctgaggactagtatgtggcagatccagatgtttctcaatgactacaaggaggtgccctttgatgctctgacctacctgacaggggaatgtaattacggaggcagagtgactgatgacaaagaccggcgtctcctgctgtcacttctgtccatgttctactgtaaggaaattgaggaggactattactccctcgctcctggagacacttactacatccctcctcatggctcctaccagtcctatatcgactatctcaggaatctccccatcacagcccacccagaagtgttcggcctccatgagaacgcagacatcaccaaagacaaccaggaaaccaaccagctgtttgagggggtcctgctgaccctccctagacagtcaggaggaagtggcaagtcccctcaggaagtggttgaggagttggcacaagacattctctccaagcttcccagagactttgacctggaagaggtcatgaagttgtaccccgtggtctatgaagaatccatgaataccgtcctaaggcaggagctcatcagattcaacaggctgaccaaagtggttcggaggagcctcatcaatcttggccgagccatcaaaggacaggtcctgatgtcctcggagctagaggaagtctttaacagcatgcttgtgggtaaagtgccagccatgtgggcagccaagtcttacccatcactgaagcctctggggggctacgtggctgacctgctggcccgcctgaccttcttccaggaatggattgacaaggggccccctgtggtattttggatctctggattctacttcacacagtcttttttgactggcgtctctcaaaattatgcccggaaatataccatccccattgaccacattggatttgagtttgaggtaaccccacaagaaacagtgatggagaataaccccgaagatggggcctacatcaaagggctcttcttagaaggtgcccgttgggacaggaaaacgatgcagattggggaatctctccccaaaatcctctatgacccactgcccatcatttggctgaaacctggggagagcgcaatgtttctgcatcaggacatctatgtgtgtccagtctacaaaacaagtgcccgcagaggaaccctctccaccacaggccactctaccaactatgtcctctccattgagcttccaacagacatgccccagaagcactggataaaccgaggggtggcctcactgtgccagctggataactgatggcatttgtctcaagacagaaaataaaaagcatttcattctt

SEQ ID NO: 1648 - DNA, 3330 bp, Homo sapiens
atgcagggggcgccacgagctcgtttcggaagccggaccccgcccgcagccgccgcttcgtcgtcgtcgccgtcctgcacgcccgccacatcccagggccacttgaggactccggcgcagccgccgcccgcgtcccccgccgcctcctcgtcgtcttcgttcgccgctgtcgtcaggtatggcccaggcgcggcggcggccgccggcaccggcggcacgggtagcgacagcgccagcctggagctcagcgcagagagtcgaatgatcttggatgcctttgcccagcagtgcagtcgagttcttagcctcttaaattgtggaggaaaactcctggactccaaccattctcagtccatgatttcttgcgtaaagcaggaaggctcaagttacaacgaaagacaggagcactgtcacattgggaaaggggtccacagtcagacctcagacaatgtagacatagagatgcagtatatgcaaaggaaacaacaaacttctgcctttttgagggttttcactgactctctacaaaattacctgctctcgggaagctttccaactccaaacccctcgtcagccagtgaatatggccatctggccgacgtggatcctctgtcaacctctcctgtgcatacattaggtggctggacttccccagcaacgtccgaatcccatggccacccatcttcatctacactgccagaagaggaggaggaggaggacgaggaaggctattgtcctcgatgccaagagctggagcaggaggttatttcactgcaacaagaaaatgaagagctcagaaggaaattagagagcatcccagtgccctgccagaccgttttagattacttgaagatggttctgcagcaccacaaccaactcctgataccacagccagctgaccagccgacagagggaagcaagcagctgttgaacaactatcctgtctacataacgagcaaacagtgggatgaggctgtaaattcttcaaagaaagatgggagacggctccttcgatacctcatcagatttgttttcacaaccgatgagcttaagtactcatgcggccttgggaaaaggaaaaggtcagtgcagtcaggagagacaggtcccgaaagacgccctctggatccagttaaagtaacatgcctccgaggtactgcatccttccgctcagtgtcaccatctgtgatctcatttcaccgcattggctgtggctctccccgtacaagtgttcagccttctgtattttgatttctttctgctgagaacgtctaggcttcatgtggcccatctactcagtcttgagaagctcttttaaaaacctccgtttgccttagcgttgttgttctctcttagtggtacataagcatcgcatagcacctcatgtttcacgcttcaaattcagattttctttgctgccagagaaggccacctccagcaaaactggagcataggggaacacacagaagaagggaaggtgtggaaaatttttttaatgggtacaatgttacctcatttccagttctagtttgtgtccccttctaataccttctcaagaatacttggcccaactccttaaatttgtttaggattaattctccttaatgctaaaatacaccttgcccagtagaacatttctcttttggttaaaaaaaaaaagtttctattaagtgtactgcagagataatacgacttcagcagtattaatagctgattactttgcagttgatctgcactattgtaggccaggcagaggggtgggaaggaggaatcaggaggtatccagttgattcagcaagtgcaaatacagagctagacaaatagaagtgttatagtgccaacaaaacattgttcacacctgaaaaatccatatcaaaaagctcaatattaacctatacagttcagtggcagttttattggctggaaagacttaatattgatttactgaaatagggataaaaatttttcctggtgaggaaatcacagtaaaaaaaaaaagccggattatcactgctaaggccctagttattggaaagaatactctacttctgcactccctcctgagatgctcacagtgattctggacattatgtgcctaggatgcatatgtagtttttgttagcagctgagattccctaggcctacccccagacattctgattcagaagggatggggcaggcatgcgtggttcctagatcaagacaaccttaggggcgtatgcacacatggcccacgattcaggaagccacctgagacgaaaatgcctgtatttactaggcacaagtgctccagcacacctcctattagttggtctgaatattccacttactcagagtgactaagtggcagaaatttccagggtctgtcctgccaaactagccatagttttctgtattccctgacatcatcagagatgatggagttactctccaaggggcagtgttgagcttgggggcttgactgagtgccctgtctgtgtgtactcaagggagttgcctttgggcttataaaggagccaaataaggggtctcatcgctgtatcattttccagaaattcttactcaacattttacatttctatagcaagtcagtagaactgatggattaaaatacatcccagagaactagtgctgctgctctggaaacactgcaggagccactgtcacactgatgcctgatgcagtccaggctgcctaaccagagactgctgtctccagctcatttttcacttagggccacaatgcgtggacctccatcccgcttttggttgggaaatacgtaggcaagatatggtgattatctgtgttggaggcagctgcgacagttcactcttctgggcatgttaattgctttttggtaaaattaaatatttagaggagataacacgtaaaaaatatttgtcagcccatgtatagaaatgacattttcagaaataagtatagctaatcacacaacattctaagaacatgggtaccttttctgaactaacacttaggcacctcctcagtcattaagactgttattttattgtactctatcttcaaattagtagctggttaaagaataccatgctaatggtatttgctgtgcttctggagatagtaacattctcaaaatgtgagcaggtaacaacttgggttttgaaatctgtctccttgacttacaccagacatggtgcatcccatgccttacaaatcaaatttaccttttatttcaacagcaaatgttccttagagggattaccctctatatctgtgtaatttttttttttacttttgcacatgagaagaaaatttgtatggaataaattgggtctaatgagtgacatc

SEQ ID NO: 1649 - DNA, 4652 bp, Homo sapiens
agaacacggtgggtgctgggcttcctggtcatcttgtggaagtggggttgggccaggggacacgggatggggagatgctgccacctgggcttggttagcccattcgtgggcaccaagggcagcaggagcctgggcagctggagggcaggaggactctcagggaggggagagtcagctgcacagagtcagagccggagggtgtggctccaggacacagagggtggccacggggaggatgagatgccctctgctgatggggatgaaaggcatttgacttgggctgtgggggtcagctgcggactcctgtgggaccctcagcagagacgtcctaaaggctcccaacaagctggcgacacaaggatggtgccttggctgaaagccgagatcacctggccacggtggctgtccccagatctggctgcatgaggccccacgggcagctgttcacctacccagcagggagtgcctctcactggccagcagctgcaccagtgcccagaatgcatcttcctcaggcagataaaggagaaacaaggtggcaatgtggctcaggtccctgcagtagcccacctcctgcaagagccagagtcgccatggaaggacatcacctgggagggccgaggtcacctgggaggactcatgtcattggagagggcagaggtgactggggaggcttcctctgaagaggcttcctcaggatgcaaattcatttcatgacaagagccaagtccatcaggcacttcagcaccttgtccaaattgtctcctgagagcaccgtcctgcatgtgacactgccaagctcccaggctttggggcagccccaggaggagggtgtcatttcttgttctgagaagtgcccaggtgacaggcccaggtgacaccaggagtccaggccccaagtcctttgtgtctcagcttgaccccttgagaccacccccttgcttggaggtttatgccagcagtgacctggaatcctacctcctatatcctggtgggtcacaaatactaactttaaaagaagcaacgacacccccatcagacacccactcctgtgaatatggaaatatggcccaggaacctcactgccgggaatactcaccgggttatactctgaatatgccacaaggatgtagaatagttcccgctgcctaggaaacagagaaagggggctagggtttggtttgtgcagatgctgttagtttcactttgtctacaaatcctaacaacaaatcccatttcaggttcagatgattcaccagataagcagtgaactttcagggcctgagattattgaagaaatgtttcagtaaaatccacatctgtgacatgcaaatagcccagttgtacagggagttgaccgatccttttcactctgaatgattttttttttttttcagtttgcacacacgccagttcagtctttgggtgtacagttcctccacggttccaaaccagtgtgcagagtctcccggccaccactccagcccctcctggagtgactcctgatctttcaaatctccagggtttcccctatgcacccagcctctccccgatccgtcagcccctggccacccagactgcttctcagtccctatggtttggtcttttccagaatggcctaggaatgggaatcctactgtggtagcttattgggtctggcttctttcccttagcaaaatgcatctaggatccacccacattcctgcgggcatcactggctcattcccttttctcactgggtcttctgtttgaaaggaggaccagactgtctctccccattcccgtgttgaaggccatccccgaaggcttcgtgtgtgactgatgaggaatcaagcagtgaacgtggcatgcaggtttcatgtggatgtcagttttcaaatcagtgggttcaatatctgtgacgccttggggacgtgtggttcaagtccattgagctttgtgagccactgcccaactggctgccaacgtggctgtgccatgtcatattcccagcagacctggatgagagtttccaggacccctaattctcccagcatttggtgctgtcagtgttgcctggggaggctcatgggctctccatcctgccaccctcccgtgggtcctaccatgggtccccgtgggtcagggagagcacctttcaccattatgcatgattttgtttgctgtcttctgtctcctcaggatcctcctgggttctggccccacatgttccagcctggcccagggcttggaaccagggaggtgcttggttcatggtgccggctgctccctgggctaggagagctcttggcagctctgtcatccctcctgggtgatcctggcttctgctctgggaaagtccccatccctctcattcaccccatctcctctgggaccctgtggctctcgtaggcttacttcactccatatcgatccctgaagaagacatggttctggagagtcctgctcacgtccagtttgatctggtggatgtgttcagaagacctcttgcccttctccttcatgatctgtagggcagggccaagaggaggaagcagcctcagaacagatggaagactccctgccccaaatggcagtcagcccacagtcagcgctttgggaaggaaggaaagaaggaaggtttccttgtgcagaaagctgctttttggcttgttactgaagccagggagggtcaccagagccgagttcatctgtggtgactatgtcaccatctgtgcccaggaagtgcatctgaccatcccccccacccccccaggctgggcttgacgttcactccagctggaggcctgggcccctgacacagcctgtcctgtttgttgtgctctggctgagcatacctagtattttttggggtgttttgacttgatttcctgaatgttcaggaggactgacaacaccaggccccggatgttcatgggaatgcccttatagatgcgatctatgagctgtgggcagaaaacaatctggtgtcacaggccatggggtgaccccagtgaggatcagagcccagggattctggaaatttttggttttggccccatgattcctcagtagaggtgagatcaagctgggacagggtctcccttcccaggactgaaagagtggatggacactcagagttgaaactgtgatccgaacctttttcttccttcaggtcaccagggcatccctagccttgagctccaggtggtcccagccctagattcagattccctcccagcaaggtgacgcttgcacgaataggcaggcaatctgacgaccaggcctgcagtcttctgtgcaaggacagtgtgccacccgccctctgagaggctgacggtgccaggccacagccatgggtgcctctcttctgtctctgcagagagtacttccggggcctctccctccacacattacctttttgctgtttttatatgactcgcatttgcccagcatttccagccacttgctctttctttttttctcctgccgaatttgctgccaaatgaggaatgttggagttagcggagctgccaggcttcccagagccgcccgtggatgctgggccttgggctctggagccctggtgggacccagctggaaggagccagggaagggcagaccctaagggctgagagcctttgagcaaatgagcgccagtgggctggctttgggaccccaggatgtgccatccttaggccacagacacaccagtcttaggtcccagcctctaggtgggttcctgacacaagcgggcagccacccccaagccaggactgtggttctcactttggaattttatcaaactgccaaagttacagcaactggggtcaggtctctgctgcccctcccagtgacagcgtgttgccctcacccgccaccgcccaggccagctgcttcctctgcctcactgaccacccgcccagtccctacgtccctggaccagcccctccatgcatcaggctcttacctttgcctcccgtgcagtcacaggaggcagctccgtctcactgtaaggcaactcaggcagagctgaggacctgcacagggcctggagccacccaagcctgggagccgacccccagaaaggactggcactgtccctatccagctcagggctcagcccaggagaagtcacagggaagggaggacaaggaccttcctgtggggctgactcccaggaggggcaggacctgggagaaggagtgcagggacagcctggctggggttactggggccctggcatggggggtggtcaggctgcacaatggggctgcgcgtcctggactcaaggtggtgctttctgctggagctgagaaaggttagccctgagatgggatgggggccacccagggtgggcgaccgggccctgacaggagtccctcagggagtgaccacatcaccccgccagggtcaaaggagcctgccctgagacctgcccggtgtactctgggtgcaccaggggcccatcccacttgacagccccaaggctcttgcaggttctgacctcccagcatccacctgcctctccctgcatctgagccacacaccctgcatttcagaagtggcacggctcatcagctccctccctccctgtcctcccctgtctcctttcctcctcctgggttcatgttgtaataaaagaagattgttggtgtgtaattaatttgctc

SEQ ID NO: 1650 - DNA, 3461 bp, Homo sapiens
taagcgcccgccaggacaggctcctggtgggttgtaaggagaacggcaggaagaagtgctcccaggaagctgcctagccaccgccaccaccacagggttccatccaactgacttatggcatcaggagctttgaattgtctcatctccaagactctgaaggtccttacaacactagcaatccccttcatgccttaggggatctctacatgatgtcctgctcagatgatggaaagccagcccccttcctcttgcaaactggcttcttgcacagtcacctggccttagactagaaccatggctctcaaatttcagggaaagtatgatcaagcagttcatcaggaagcacaaatgccacatggacagggcaattctttttcaagaagacccacagacttctcctgcctaggctctgaagaagccacaaaaatctgtccttccactaggctttcaggagagatgagccgtctccatttccatcagtcactcagctcttccccaacaccacagacaactggccgccttggaggctcttccaagtttcttgtagcagactctttagttgttataatgttccagaaactgaagtgggaatggaagctatcaagttttctgtactccaaaaattgtctccagcacattccctgagaaagtgttgcatccttgccctgaacaccttccaacagaatgactaaggaatactcaatgctagaccattccagcctgttcacccaccaagaggtggaacttgtctgaagctacaggaccacaattgaccataccctcccctccttctttgctttatctttttggaacatattctgtttattattaacatttttaaactatgagacttaaagataatctgttctaagcccctaatcttgtacatgactaaaaaaaatcacaaggacaaatagaatgcatgcacaccatcactctcctatcctctacccacagcagagatcactaatcaattaaagcaatcttttctactgcacacaggtgtggccttaaaatccttctggacagaaggcttcaggcagacttttcatatttaatcataaacataaatgacatcaaacattaaacccatttgtcaatccagtgttaaatgatgctaaagtagtttgtggtaaaactgggcccatgtctcctctctctcagcttattgacctttctgctacatcacaatgttgtacttatgttgaaatgtcacactttacatcttctgcaaatattccctctaggtttaacttttccaacaaaatatctcatcatgtttttgtcttttcatttttgttcttgaataagtaatacatttacttgtttcaaactcaaagcaatgtaaaggtatactctgggaagtcatgctaccacccaagtctccatccacttcattcctccacttttattagtttattgtttatccttccaaggtttctttatgcaaatacatgcaaatcaaatatatattctcattttctgtgctggccatacacaaaatgtagcatattatatatacttgttgtacctttctttttttaacttaacaatataacctagaaatggatttttctcactttttcgtaggtttataatcatactacttttgacatttaggtcatttgaataagattcaatctataagacctgccttcttaaaccctgttttggtcctctctgagattcgatgccactatttggccagttaaaactaagcggccctttttgcttaagtttaattatccatgatcgatcttcttcaaaatgtaggtgaagtttctctactatccagcacatgatatggccaatgtttttattaagaaaataaattttattaaagccactacatgaaatatttcttttgatggacactaaaataataagcatacataaagtatcataatagcttaataataattcagtattttggagttgccaagtataaaactggaggcttcagaattaattttaaggattgagccctggttattagcagacacatgtctgctttaaaactttgtccttttcactattagaaagccaaaggctgctttggctcttagagccttagtagagcctcagaattgacccattaggctagtctctgattaaatggaccccaaagtgttagcctgaactcttttgttaattgccttgagtgagtttgcctaatcaaaggaacgtgtgaaacctctgatctgtatggcagccttaagatttctgatcttcattatcttctataaaagtacatcacttttgtatttttcagttccttttcaatcccctgataagaatgacctgttaatagataaacttaggcacattaaaattttaacaagtttatttgagcattcagcaattcatgaacccagcagtctcagactacaagtggttcagcactccactgagagggtgcaaggggaaaacttgtataaggtgtttgtggaagcaagacaaagaaaatatctgattgatttaggctgaaaatctctagttacaggttggttagcaatttctgattggttaaactaaagttttattttagtatttaggttgagttaggttttggtttgcttacaaaggcactggagccatctcagcctagtggacttgaaatcaattattataatagatcccctacctaagaaagccagcatccctaaaggaaaataaatactgaggactttatgcaaagcaaagaaatggatgtaaagacgtggatcctcattgccctcacaatacttcttttccttgaaaaaaggctgagaatggataaagataaatttaggcacagtaaggacaaagataaagaatagcaagaacttgtagcttggattattgatgccagagaagtggagaccccatgtggagaatatttttacccgtttcccaccactgcttcccggacagagataatctgggacccctgtgagtatagcccagctggcaaccttgccatatttccatcctgcaaggcttcattcaggacagcgcaggaacttataggtcagtctaaacactaaacaagaacattagccttaacaacacaaattagtaattcatttcttccttatgtagctgagcacttaatgatccaaatcttggcgactgagttgggtaatagttcattgctggatgacccatcttgactttcaaagttgctattgtttttacattatcctcaagtgttatcattaagttgtgagcaagactaattttcttaatcattcccaatctccccaaccatttttcactgaataatatcatcaacaggctgcacaaattggacatctgagatttagttgaattagtaacacctaaaagatcatttatggctgcagcaataagcctcccatttcatctaattagagagcaagattatttccctaaatccccactaatattttgagttgacaaacaatgaagcaatcctgataaagtgaataaatgagtttcat

SEQ ID NO: 1651 - DNA, 4240 bp, Homo sapiens
agcgcgaggtcagccgcgccgagccgcccatgtcgctgcagcgggagcccccgcggcccgagccgccgccgccgttcccgccgctgcccttgcagccgcccccgccgcgggagtcggcttcccgggctgagcagccgccgcggccgccgagggagacggtgcgcctggagctggtgcttaaggaccccaccgacgagagctgcgtggagttcagttacccggagctgctgctgtgcggagaacaacggaagaagctcattcacacagaagacccatttaatgatgaacatcaggagaggcaagaggtggaaatgttggctaagaagtttgaaatgaaatatggtgggaaaccccgtaaacaccggaaggatcggctacaagatttaattgatataggctttggctatgatgagacagatccatttattgataactcagaggcttatgatgaattagttcccgcttctctaacaacaaaatatggaggcttttatatcaacactggcactctacagtttcgccaagcttcagatactgaagaagatgatattacagacaaccaaaagcacaagccacccaaggtccccaaaataaaagaggatgatattgagatgaagaagcggaagcggaaagaggaaggggaaaaggagaagaagccaaggaaaaaagttcccaaacaactgggagttgtggctctaaattcacacaagtctgaaaaaaagaagaaacgttataaagattctctttctctagctgccatgattagaaaattccagaaagagaaggatgcattaaagaaggagtctaaccccaaagtcccagtgaccttgtcaaccccttctctgaataaacccccatgtgctgctgcagcactggggaatgacgtcccggacttaaatctgagcagcggtgatccagaccttcccatttttgttagcacaaatgaacatgagctgtttcaggaagctgaaaatgccctagagatgctagatgattttgacttcgacagattactggatgctgcttctgatggtagccccctatctgagtcggggggtgaaaatggaaccaccacccagccaacctacacttctcaggttatgcccaaagtggtacctacactcccagagggtctacctgtacttcttgaaaaacgtatcgaagaccttcgtgtagctgccaaactttttgatgaagaaggaaggaaaaaattctttacacaggatatgaataatattcttctggacattgagttacagctacaagaactaggccctgtcattcgcagtggtgtctactcccaccttgaagcttttgtgccatgcaataaagaaacactagtaaaacgtctgaagaagttacatctcaatgtccaggatgatcgtttaagagaacctctgcaaaaactgaaactggctgttagcaatgtcatgcctgaacagctatttaaataccaggaggactgccaggctcgtagtcaagctaagtgtgccaaattgcagacagatgaagaacgagaaaaaaatggatctgaagaggatgatgatgagaaaccaggaaaacgtgtcataggaccaagaaagaaattccactgggatgacactatcagaactttgttatgtaaccttgttgagatcaaattgggatgctatgagttagaaccaaataaaagccagtctgctgaagattatcttaagtcttttatggagacagaagtgaagcccctgtggcctaagggctggatgcaggcaagaatgctttttaaggaaagccggagtgttcataatcatcttacttctgctccggcaaagaaaaaggtgattcctgcacctaaacccaaagtaaaggaggtgatggtaaagacccttcctctccattctttccccactatgcttaaggagtgtagtccaaaaaaggaccagaaaactccaacatccctggtggcttcggttagcggtcctccaacgagctccagcacagctgccattgctgcagctagctctagctctgcaccagcccaagaaaccatctgcctcgacgactcactagatgaagacctttctttccattcaccttcactggatcttgtttctgaagctttagcggttatcaacaatgggaacaagggccctccagttggctcaaggataagcatgccaaccacaaagcctcgtccaggactgagagaagaaaaattagcaagtatcatgagtaagctgccactagctactcccaaaaaactagattctactcagactacacattcttcaagtcttattgctggtcacacagggccagtaccaaagaaaccccaggatttagctcatactggcatctcttcaggccttattgctggttcttccattcagaaccctaaagtttctttagaacctttgccagccaggctacttcaacaaggacttcagaggtcaagccagattcacacttcttcctcttcacagacccatgtctcctcttcttcccaagcccaaattgctgcctcttctcatgctctgggaacatccgaggcccaagatgcttcttcgttaacacaagtaacaaaggtgcaccagcattcagctgtccagcagaactatgtgtctccattacaggccaccatcagtaaatcccagaccaaccccgtcgtgaagttaagtaataatccccaactctcctgttcctcctcacttattaagacttcagataagccacttatgtaccgccttcccttatctaccccctcacctggaaatggttctcaagggtcccaccccctggtttctaggacagtacctagcaccactacctccagtaactatttagccaaggctatggtgtcacagatctccacgcagggtttcaaatctcccttctcgatggctgcctccccaaaacttgccgcatctcccaagcctgccacatctcctaaacccctgccctcgcctaagccttctgcctcacccaagccctctctgtcagctaagccttcagtatcaactaaacttatttctaaatccaacccaactcccaagcctactgtatccccaagtagttccagtccaaatgcactagttgcccagggtagccactccagcactaacagcccagtccataaacagcccagtggaatgaacatcagcagacagtctcccaccttgaatttattgccctctagtcgcacttcaggccttccacctacaaaaaatcttcaggccccctcaaagctaacaaactcatcatccactggaactgttgggaagaacagcttgagtggaattgcaatgaatgtacctgccagcagaggtagcaaccttaactcaagcggagctaataggactagtctgtctgggggaacaggaagtggaacacagggtgctaccaaaccattgtctactccacatagaccatccactgcctcagggtcttcagtggtaacagccagtgtgcagtccacagcaggagcatcattattggctaatgcctcacctctgactctcatgacatcacctttgtctgtaacaaatcaaaatgtgactccttttgggatgctgggtggccttgttccagtgaccatgcccttccagtttcccttggagatatttggctttggaacggacacagctggagtgacaaccacctcgggatctacctcagccgctttccaccatagcctaactcagaatttactaaagggtttacagccaggaggagctcagcatgcagcaacgctttcccactcacctctgcctgcacacttacagcaagcatttcacgatggaggccaaagtaaaggggacactaaattaccacggaaatctcagtgactgcccagcaagcaaaggagacgaaatgtttagttgactgatggaatctacctgatgggaaagtacttatgtggtcatagggctgctgtttctgtcgatgtttacattctctcgtcccaagcactgtggtgaggaggaaaaagaaaagaaaacattacttgagcaaagccaggtgcaggaggaagaaatgcttttgtgcaaagttagtgacctttggtctcttctaaagaatgacagagttaccgtattaacagacttgaaagagactcagttgtcaaacccacagaaatacaaatttgatttttcccgggggaggaagaaggaagtgaagagaatttgggtaaactccatccatcctgggggttggatctgaacacttacagacataattggtaataaaaggcattaaaaactgg

SEQ ID NO: 1652 - DNA, 3762 bp, Homo sapiens
agagagctgcgacgtgcccccactcaagtccatggccatgcgcctgcacttccagccgcctcaccccaactgcctttacacggtggagctcgaagccttcgccatctataaggtcctgcagagctacagtaatattgaggaggactgcaccatgtgcccatcctggtgcctgacggtgcgggcacgaggccacagctatttcgctggctttgagcaccacatcccccagtattccctagatgtccccaagctatttccagcagtgtcctccggtgagcccacctaccgcagcctgctcctggtcaacaaagactgcaagctgctgaccttcagcctggccccccagagaggctcagacgtcatccttcggcccacttcgggccttgtggcacccggggcccaccagatcatcctcatctgcacctaccctgagggcagctcctggaagcagcacactttctatctgcagtgcaatgcttccccccagtatctcaaggaggtgagcatgtacagccgggaggagccactgcagctgaagctggacacccacaaaagcctctacttcaagcccacctgggtgggctgctcctccaccagccccttcaccttccgcaacccctcgcgtctgcccctgcagttcgagtggagggtctctgagcagcatcgaaagctgctggctgtccagccctccagggggctaatccagcccaacgagagacttacgctgacgtggaccttcagccctttggaggagaccaagtacctgttccaagtggggatgtgggtctgggaagccggcctgtccccaaatgccaaccccgctgccaccacccactacatgctccggctggtgggcgttgggctcaccagcagcctctctgcaaaggaaaaggagctggcctttgggaatgtgctggtgaacagcaagcagtccaggttccttgtcctcctgaatgacggcaactgcaccctctattaccgcctctacctggagcagggcagccctgaggccgttgacaaccaccccctcgctctgcagctggaccgaacagaggggagcatgccaccccggtcccaggacaccatctgcctgactgcctgtcccaagcagcggtcccagtactcctggaccatcacctactctctcctttcccacagagataacaaggctggggggaagcaggagctgtgctgcgtctccctggtggccgtgtaccccttgctttccatcctggatgtcagctccatgggcagtgctgagggtatcacccggaagcacctgtggcgcctcttctctctggacctgcttaacagttacttggagcgtgaccccaccccctgtgagctcacctacaaggtgcccacccggcacagcatgagccagatcccccccgtcctcacccctttaaggcttgacttcaatttcggggccgcaccattcaaggccccaccttccgtggtattcctggccctgaagaacagcggagtggtgtccctggactgggccttcctccttccaagtgaccagcggattgacgtggagctctgggcagagcaagcagagttgaattccactgagctccaccagatgcgcgtgcaggacaattgcctcttctccatcagccccaaggctgggagcctgagtcctgggcaggagcagatggtggagttaaaatacagccacctgttcatcggtactgatcacctcccagtgctcttcaaggtgtcccatggccgggagatcctgctaaatttcataggtgtgacagtgaagccggagcagaagtatgtgcacttcacctctactacccaccagttcatccccattcccattggtgacacgctacccccacggcagatttatgagctgtataatggtggctcagtgcccgtgacatatgaggtccagaccgatgtcctgtcacaggttcaggaaaaaaattttgatcaccccatcttttgctgcctcaaccccaaaggggagatccagccaggcagcactgcccgggtcttgtggatcttctcacctatcgaggccaagacctacacggtggacgtgcccatacacatcctgggatggaactcggccctcatccacttccagggagtgggctacaacccccatatgatgggggacacagccccattccacaacatctcctcgtgggacaacagttccatacactctaggctggtggtgcctggacagaatgtcttcctgtcccagtctcatatttccctgggaaacatacctgtgcagagcaagtgcagccgcctgctcttcctcaacaacatctccaagaacgaggaaattgccttctcctggcagccaagtcctctagattttggggaggtgtctgtgagtcccatgataggggtggtggctcctgaagagacggtcccatttgtggtgaccttgagggcctctgtgcatgccagcttctacagtgcagacctggtatgcaagctgtactcgcagcagctcatgaggcagtatcacaaggagctgcaggagtggaaggacgagaaggtgcggcaggaagtggagttcaccatcaccgacatgaaagtgaagaagagaacatgctgcacagcctgtgaacctgcgaggaagtacaagacactgcctcccatcaagaaccagcagtctgtcagccggcctgccagctggaaactgcagaccccaaaggaggaggtgtcctggccctgcccccagccaccctcgccaggcatactctgcctgggccttactgcccgagcccatgccaccgactactttctggctaacttcttctcagggtttccctgccactttttgcaccgggagctgccaaagaggaaggcccccagggaagagtcagagacttctgaggaaaaatcccctaacaagtggggccctgtttccaagcagaagaagcagctcctggttgacattctcaccacaataatcaggggcctgctggaagacaagaacttccatgaggctgtggaccaaagcctggtggagcaggtgccgtacttccgccaattctggaatgagcagtcaactaagttcatggaccagaaaaacagcctgtacttaatgccaatcctgcctgtaccctccagcagctgggaggatgggaagggcaagcagccgaaggaagacagaccagagcactatccagggttgggaaagaaggaagagggggaggaggagaagggtgaagaggaagaagaagagttggaggaggaagaggaggaagaagaggagacagaagaggaggagttgggcaaggaggagatagaggagaaggaggaggagagggatgagaaggaagagaaagtgagctgggcgggcatcgggcccacaccacagcctgagtcccaggagtccatgcaatggcagtggcaacagcagctgaatgtcatggtgaaggaggagcaagaacaggacgagaaggaggccatcagaaggctcccggccttcgccaacctgcaggaggcgctgctggagaacatgatccagaacatcctggtggaggcgagccgcggggaggtggtactcacctcgcggccacgcgtcatcgccctgccgccgttctgcgtgcccaggagtctgaccccggacacgctgctgccgacgcagcaagcagaggtactccacccggtggtgccacttcctaccgaccttccgtaaatgcccgcgcccagcctctccgacatgccgctaggggtcacgcctggccccctctccaccgccagtaaaagcatctagtcttt

SEQ ID NO: 1653 - DNA, 4366 bp, Homo sapiens
aatccgggcgaccagaggaaaggccggcagagggcggcaagactatacagtgcccagagaaagcaggctctggccaggcgtggtggctcacacctgtaatctcagaacactgggaggccaaggcgggaagatcccttgagaccaggagtttgagaccagcgtgaataagatgggtgaaaatgctgtgatacctttcctcagccctcaaaagggtcatggctgccgggagtggtggctcatgcctataatcccagcactttgggaggccgaggtgggcagatcacctgaggtcaggagtttgagaccagcctggctaacatggcgaaaccctttctctactaaaaatacaaaaattagccagtcgtggtggcgggcgcctgtaatcccagctacttgggaaactgaggcaggagaatcgcttgaacctgggaggttggaggttgcagtgagccgagattgggccactgcactgcagcctggccaatggagcatttcaaaaaaaaagaaagaaagaaagaaaaaggaggggggttgtcatggttgacactcctataatgaaagacaggttaacaagacaaaagcacggcaaatttattcagtcagaattttgcgtgacacggaagcattcacaatgaagactcaaagacccaagggaaaactgtccatttttatgcttagattcaatgaggagtggacaaccatgtaaaaatgggattggacaaaaaggaaataatctaatgtaatagattgaaggggaacaacccagcaaggcctgactatttggattcttcttggcctctctgtgtggcattccttcctccctggtatagagcaggaccccttctggaataagggttttatgatctactatcagacaaggtagaccagagaatttctttatggccagctcatatgcagaaaggcaatggaagttgagagaaatatgtttagtttctatgacccactgtggggcagaggaattctgatttctatggcctgccttagggtagaagggggaccaggagacaggagggcaggagaagcccagagagagactttgtttctagggtccttccagtatccttcggctcaaagtactcagcatatcaaagcaccttactttggggcattgtttttctgagctccaatgctgtaaaagacacaatggtttttattttccaaaaattgctagatgcagctttttgcatttgccacaatcttattaccacctgtaagtaagcaccactagctgatagtttttattcataaaacatcatcattgtatcctaagagaatgagattggtattggtctttagattttacttctataagcagatcagctacatggatgaaagactgatataaaatggaaagctgaatttccagaattttagggatatttgcactcaaagaatctaataacagaatatttagatctgcttattaatctatcattttaattacattttaatttatgaatttaaagttacaatgagtaaaaaatccttttaggtttttattaatcagtaacacctgaacagtttttgtaaattgctttagagtagatttactccagacgaggcagctgagtccggaatacctttcccctaaggaaagcaaccttgttgccatgcagccttcaatttgcctttgtagtcatagaccatgtatgaaatatcaatcctttctaaatgaagtgactgccaatcaaatctttcttttaaacttcccactagagcaatattaagaatacacagggaagttatgaagttgtgattatgccgaataaacacaaattcctggcccttcttaaccatgaattatttctaaacattattaacccattattttttagaacacatccgtgaaaagtgaaaacaatggatagaaaaaccaaaactctgaccacatatgtggtcagttctgtagcctacacttttcctttttgaagtgtttttatttgccaaaggaagacagcaaaggaaagaacctcttagtggcaagtaggtgtcactgtgtacttgtcagccactgagagtgcaccagtcttgtcagctccctgggccgcttggggatgcagaagattcagttgcttgtagcataggtgctttcccccaggcctaaataggacttatttagaatgtataaataatgttccttgcatttcctaatgtttatttcccttgcctcattatccaaaatactgtgaatttttagctgaggaagctgacttcttatggtgtatcctggattttcttccctggaaagcctgtgaatttcaaaggaaacaaagtttaggtctcaggcttccccttatttatcttgagaatgaagggttttgaagaggtggcctttgcaattcatctctatgatccttttcttttgtttcaaacctacatacttcaggtgctccaatgttgttttcttataaagtgctttctttcctagttgttgattaaagttttttccagtatatctcattttacaaacctccccctctttctgagtcatttatctcatttcctaggctgattgtatgatttcacttagtgaaacagcttcctgtgtgcacaaggagtctgtgactatacagatgtcaatcagtttttaattatgtggaggctgattattgtgtttcatagcttatttgtaattcttttcttttttctttgcttgcccttaaagagagaatgggcagcgtatagtccattttattgtttgttacttgttctggaaaaatgtcatagagaagaagatagaggagatatttataaaatatttatgtttataaagttgaatctgagaatggaaagattgtggattgactatctcttttctagctcaagatctagaactgatgatgtcctttgattgttacagttacagacaagttttaaagacagcttcaaaattaccttccccaaataataacattgggacaggtttgtgcttcctagtttgatattgcttcagagaaagttagtgaggaaatgttaatacaaggaagtaaagtaaaagaaaacaaaaaccaaacactactagtatgtttagtaattattattctgagtatgagtcttgggacttttggcctgattacctggagacaaattccctaagggatcatcaccccacctgaaaaatgggctaacatgatttcttagttttagagttctgtgagttggagattagttcatcaagcacacttgcaaagaactctataggggtagtcaggagacagcctccagctccatctctgtcactccatagttgtatatggctttggccagtcactttatctctctgtgaatttccttatgtatgaagtgagcttcaccagcttctctctgtgcctcttccagctccttgttagctgtccgtacttttgttaagatggcctcaggagaacagggtaggtgatggtgaagcatagacttgaagtcagatgtttgtaattggggttccatgggtgagcttcagagggacatgaatcccttgaagttttatgcaaatgtgtgtatgcatgtgcatttttatgaatagaagattttttcccatcagattctcagtggcatctgtgactccctatccctctttcacaaggttaagaactactgtattgtaggagagggagataaatgaaggctggagggagtaactggtgaaggctttatgaaagaggaagttcctgagttggctttggagcctgagttttaatagataggagaaggaaaggagcattccagtagatggtaacaatatgaataaagggatgtagctaattcttatggcaagtataatatgtcagtcactgattgtctttataaatcccacaacaggcctaagaggtagatgttatcaatatcctcatcttatagatgagaagactgagggtcataaagattaagttattaagttactatgcagttaatagtttgtagaatcaggatttgaacctttgcagtccgatctcagagtccatgcacataaacactacatcataaagcttcttctttctggttcactagcaatttgatttgcctagaatagatgatttgtattggggacaggtaagaaataggcttggcaaatggtcaggatggtgccaactgtggtgcaactttaggatcaagaagaagaatttcaatttgatgctataggcaatagggagtcatggaaggttttagaccagtgaagacataaccacaatggtattttcttaactttattatttaaatcttccatgttcttactaattttgtgttttcttgatctatcagttactgaaagatgtgttgaaactttctactttgattataaattcccattctgtatttgatgctctaatattaaaagcataacattttg

SEQ ID NO: 1654 - DNA, 3555 bp, Homo sapiens
actttccagccgcagagtagtgcagctgtaaatcgagaggaggtgactgatgagaggcctgcagtggaaccaagatccagagcacaggcgtgttggatctcctgcctgctctgccagttcttttcttcttcttcttctttttgagacggagtcttgctccgtcttcaggctggagtgcagtggcaggatcttggctcactgcaacctccacctcccgggttcaagcgattctcctgcctcagcctcccgagtagctgggactacaggcatgtgccaccatgccctgctaatttttgtatttttagtagagatggggtttcactatgttggccaggttggtcttgatctcttgaccttgtgatccgcccgccttggcttcccaaagtgctgggattacaggcgtcagccatcgcgcccagagcctggggcttctaccacaccctctgcactctaccaggtgcacaacccaaccagtttcatttctagacttaaaaatgatacagcaaggacttggaaaggagctctctggagggctccagagggaaaagagctgggtttgtttgtttgtttttaacattaattgagtaatacatgcaaatatcgtgctctttgctcctgcttctgtggatccagagcaaaggactgccatacccagagagagagcccagatccaacaagctgcttctgtccagcccttctcctccctacttagcaagggcacttgctcttccctattctcaccagagaggcacaagcgctccgtcccttctagaggcaggcagagggaagagaaagggtctgttgtttttctctcctgtttctcgctccctctctgctgatcacaaagctgctgaccgggtcagaaagtcctgatggaaatccaccagcgctgggcaggcccctcctcctccagggagcttgtccttgcctaatttttcttcgtcctgatgagaacaaaaaagagagagagaagaaaagaaaaaccacaaacttcctttgaaaaccagcttgtagtcagggcccggagcgcatgccatagactcggcgactcaggaatcctgaagactctctgagcgacctggagcaccttggctgtgtccctgcctgccttcaccctcctccagtgcccccagtactgggcgtgagtccggaagtggccacaacccagcctggaccgtcgcttataaagctgtgtaaacctgtataagctcaggcgttgacagctggaaggcagctggcactggcagcccccttcattgcacctatctcccccatctcattgccacggctgaaccctccttctcaatcttggaacagcacccccttctttaagggaagctgactccacccatgtgttcaatcccaccagtcttccctcccaagtctggaagccccacgacctcttggtctcatctggtcacagcaagttagaggtggaaagagctcagcacggggcccttctgtttacacatatactgcccatagccaggagttactgcacaaacactagccagccttctacactacattccttttccaagacttttctgggttagtttgctttccagcccactgatttccttcttattggacaggtcactcttttgcatcccaagcctggcttaggcaagtccctgaggttagtaaacaccttcagtgcccctcagccgagtcccttttgaccatggaataccatcagcctgaggatccagcccctggtaaggccgggactgcagaagcagtcatccctgaaaaccatgaggttctggcaggcccagatgagcaccctcaggacacagatgcaagagatgctgatggggaggctagagaacgggagccagcagaccaagctttgctgcctagccagtgtggggacaaccttgagtcccctctgcctgaagctagctcagctccaccggggccaacccttgggacactgcctgaagtagagacaataagggcatgctccatgccccaggagcttcctcagtcccccaggacccgacagcctgagccagatttctactgtgtcaagtggatcccttggaaaggagaacagacacccatcatcacccagagcactaacggcccttgccctctccttgccatcatgaacatcctctttcttcagtggaaggtgaagctccccccgcagaaggaagtgatcacatcggatgagctcatggcccatcttggaaactgcctcctgtccatcaagccccaggagaagtcagagggacttcagcttaattttcagcagaatgtggatgatgcaatgacagtgctgcctaaactggccacaggtctggatgtcaatgtgcgattcacaggcgtctctgattttgagtatacacccgagtgcagtgtctttgacctgctaggcatacctctgtaccatggctggcttgttgatccacagagtcctgaggctgtgcgtgcagttgggaaactgagttacaaccagctggtggagaggatcatcacctgcaaacactccagtgacaccaacctcgtgacagaaggcctgattgcagagcagttcctggagaccaccgcggcccagctgacctaccacggactgtgtgagctgacagcagctgctaaggagggtgaacttagcgtctttttccgaaacaaccactttagcaccatgactaagcataagagtcacttatacctactggtcactgaccagggctttctacaggaggagcaagtcgtatgggagagcctgcacaatgtggatggagacagctgcttttgtgactctgactttcacctgagtcattccctgggcaaggggcctggagcagaaggtgggagtggctccccagaaaagcagctgcaggtagaccaggactacctgattgctctgtccctgcagcagcaacagccacgaggcccgctggggcttaccgacttggagctggcccagcagcttcagcaagaggagtatcaacagcagcaggcagcgcagccagtgcggatgcggacgcgggtcctgtcactgcaggggagaggagccacatctggacgcccagccggggagcgtcggcagaggccgaagcacgagtcagactgcattctgctgtagctctgccccagtgccaggctggcctgccccttcttccagaggctatggctagttggcttgctcccccgcctccacccctgagatgtgctggataacttatttatggactgttggggatgagagcaggcaacaaatgccaaggtcagacttggtaatgtccttgacctcacgtgctgctgccttctctgcctcccacccagggcaacactaggattggtgggtttctggttctcaactcccggtccctgaatagtcacacgtatgtacagactgaggctctggggtgaggtccctatccagaatgcatctcttctgcttcccatccctgctgcctggatgctcctgatcacctaggcaggcctgtctccagttgtttcagagcttaatttgggtttctatctcttatttgtaatgccttcctggggtttggaaataaaacttctggccgggcacggtggctc

SEQ ID NO: 1655 - DNA, 3662 bp, Homo sapiens
gagtttgatgtcatcaccctgcaaacgatgaaacaaatccccattttattgatgactgataacttcaaatgtgacaagaggattcatttccttattcaatcattccacaaatattcactgagcatctcctacgtgccaggcaccaggctggactttaggatcaatcataataattttcaggttatggataatgccaatgggcacttaggatgatcagggagggcagttctgagaaggggcatatgagctgtgttccagttgtctattgctgtgtgacaaactgccccaaaacttaatggcttaaaacaatgacagaaattacattactcatgaatctgcagtttaggcaggtggggacagcatgtctctgctccacctaacatcagctgaaggtgggaactggaatcatctggaggcttcctcacttacatgtctagtggttgatgctgactgatgttggctgttggcaaggacctctgacaggtctgttccccgaaacacctgcatgtggtacatggctttgtcacagcatgatggctgggttccaagggtgagcctcacaagacagagaaccaggtggaggctgtgccatctttggtcacctagtctaagaagttacagtcacttctataccatttaattcattagtagcaagccactgaggctagtccatgttcaagaggaggggaattggattccccctttttttaggatagaaaagaatttgtggacatgttttcaaatgaccacaaactatgacctaaagaaattagtggaagagcattccaggaagaattgtaaagtctctgatgctggaaaggcttggtgtgtttaaggaaatgaaaggccagaaaggcttgagcacagcaagggcagaaggtaagatttgaggttagatgtggacagaagccatattaggcagttataggtgcttggattttattctggatgcagtgagggctgttgaaagatttaaggtttgtattcacttcttgagaggatcactccagctaatatgcagagaatggattgaggtgagataagggtagggaaaaccagttaggatgctattggagtggtttggggagagagagtgatggcttggacaagaatgttggcactggagatgaaaagaagtagatagaaatggtggaagtaaatgaacaagtctaccaggagactgaatgtgagagaaggaaaggaaggcaggaaacaagaattcttgggttttaggctcatgtccatcttgatggtggagccctttctgtgattggaagactaagagaggaacttgttgatacgggcaaaaggtaaaatccagagtccagttctaggcacgtcaaacttgagaggtttgtaaggtatactgaaggcaagaagtagacatttggatatatgagcctgaaactcagtggagagcttgggactggaaatataaatttgggaattatcagcatatggatggtatttaaagctgtaggcctcggtgaggtcaccaggggaaaatctagaacaaaagagtgtggagactgagccctgtaaagggtagcctgcaaaggagattgaaaaggagtggccaaaaaagacagcagggaaactagggcattggatgttatagatacccgagaaagcgttggtctgaatgaccgttaagactcctccagatatgaatttctgtaactttatggatgtttcaaatcccttcaagctgggaaattctgtctctgttgcatctttgggataacaaacttcctgaagaatcactgtgtcttttcaaagactgaaaatggattcccagcaatgtgaaatcttgtgcctgagtcctaaagtgatcaaaggtaaggttgagcctaggacaaaatgaggatcccctggagggaagctagggcaacacagtaagtggcaaaagaatacgagtgaggttatttgactatcctcttccagtagggctggctcagctatggcagaccccagggtggttaggacaaatggcagccccatacagggacatacatgaacactgatccttgtttttttcctttttggggcctttctgaatctccactccatgtgcagggttgacctgtttccttgaggaactctgagatttgcatcaatggagttatctgagggctctgtggcttgggctctgtgcaggagggcagcctggcaattggattgttcctgctggctggtgccattgtgtgatattgagtcaccagaatggtgccgatgcactgcttttgggtgataatcaggcgcaggatgaattcggggcactgggctactgatggtcaactgttagcacctgggcttgggctgtgtgtgggcacccatgcctcagctctcacctgttcatgttcctccatggtaccatctctgatttgtggcgttcaaaggcgtaggatggcagcaagcctcctttaccctgtatatccatccccttgctgttggcacctaaggttgtcaccccatgccctcatcagtctctgtaccacatatcaggaagtcctccagtggtggctatgcctgccttctctgaggactttaaagaccttggctttgccacgccaacaggctcttccaaccagtgcctttcctccaaatgatatggcgatgttttgctttcccaggtcgatcttaagccattcccaacaaggagtggacatccttgtgtgaaaaacactgtttttcttgctccagtcacgtctccttgcctttcttgtcttttggtggtagtgtgcagaagcagaggtgcaggaaatgttgaaagggatcacattctaagaatgtagttataatggcctgaagaattcaagagaatacatggttggaagatgtgtcactttatggttacactataaaactccaaatgaaaaataaattatcattcatactttcctgaatattctgggtaaggcttgcattttggtcattattaatgaagtacagaaacaacctctgagagagtggttggatgccagtatttgcaggtgccacgatgaatgatgcagcactatcagtcaagatgcaaccaacattagacaaatggtatcagagaaccacagaggcgaaaaaacaaaaccaaaacccaaaactatattgtttcaatacaaacaggttccaaaagctatgacatcgtgagtgacaacaatgttgccgcctctttctcacaataggaaataaaactttaaccaaaagagcatgggcagatatttcccggatctgaacaggaatagctggtgtctggactctatgaagaatcttcatgtgcagtgatagaagaataaacacatttgcagacttttgtagtgcacagtgaccggtgaccagcagcatgtgtttccataggcatcttctctcagtaccccagaaggtgaattgccagtgagtcctgccaggatgcccctcggtgactgcaccacccggtaagtcatggctgtgtacttcccatcaaggtctggatctcagctcaggtagtgggggctgctcttccatagtcattccatccttgtgtgctctgcctcagccctggggatagtggccgctttctgtacatgtcagtcctctattctttagacttcttgttaccccattagcagccaattctcttttgttactgcttagcagccaactttttttatattaaactttccccaacc

SEQ ID NO: 1656 - DNA, 3821 bp, Homo sapiens
agccgtccagaagaagagagagttgggccgaggaggactccagggctcagccatgaggagatctgggcggtggtctcctcttcctcgcggcctctgcccgtccactgcccggccctgacatcacgaacgtggcaggccagcctcttccatcacgaacaggccagtcgagaagacaagacattcagaggggcgcgatgtatggaacccagtcctgagaggcctgcatgcagtcagcaggagccgaccctgggaatggacgcgatggcctcggaacacagggatgtcctcgtgctgctgcccagccgggagcaactgcggctggccgtgggggtgaaggctactggccgcgagcttttccagcaagtgtgcaacgtggcgagcatcagagacgcgcagttctttggcctctgtgtggtcagaaacaatgagtatatatttatggatttggagcaaaagctcagcaagtacttctcaaaagattggaagaaagaaagaaatgaactgctccgtccagaggggctgtccgcagggggactgtggtgagccctgaggctgcaagcaggtgtgcccgcccgaagcccgcctttgcagatgttcttgaacgctgtagaccacgtcccactcagggttctccgggtagaaaataccatgagtcgaattgtcagctatggctgcagacacctgagcttcgactttaagctgagtgtgaagcaatccaggcccccccaactgggaagacaggacagccagcggcacctccctgcggctcacttgctctttcttgcattttccccactagggaaatgagaaacccagagcccccttcgtggccttcctccgagtgcagcactacgtggaaaacggaagggtcataagtagagacggggtttctctgtgttggtcaagctggtctcaaactcccgacctcaggtgatccacccgcctcgacctcccaaagtgctgggattacagagctgccttagagcttctagggtaacaaagacgtccctcaggaggatcctgagacttacttccagaacagagcttcagggcgaccacagggcacggcacctgtactactgccacttgaaggagcgcgtgctgaggtcacagtgcgctcaccgggaggaagcctacttcctgctggctgcctgcgcgctgcaggctgacctgggcgagcaccgggagtcggcccatgccgggaggtacttcgagccacactcctacttcccacagtggatcatcaccaagagggggattgactacatcctccggcacatgcctaccctgcaccgtgagcgccagggcctgagccccaaggaggccatgctgtgcttcatccaggaggcctgccggctggaggacgtgcccgtgcacttcttcaggctgcacaaggataagaaggaaggtcgtcccaccgtgatcctgggactggccctcaggggagtgcacatctaccaggaggtggaccgtgctccgcagctgctgtacgacctcccctggccccacgttgggaagctggcatttctgggaaagaagctggagatccagctggatgggctgcccgcagcacagaagctggtttactacacggggtgcacctggcggtccaggcacctgctgcacctgctgcgcgccagccaccagctccacctccgcgtgcggcccactctgcaacagctgcggcagcgggaggaggcagaagagaagcagcactaccgggagtcctatatcagcgatgagctggagctggacctggccagcaggagcttcccgggcagtggggtcagcagccagcactgcccccactgcctctcacgccactccgccgacagccacggcagttcctacacgtcaggcatcaaggccaactcctggctcagggaatccagagagatgtctgtggacgtgcccttggaggtccacgggctccatgagaaggagccgtcctccagccccaggaccagccgcagccaccccagcacacgtggtgacagccaagccactcgtcaggagccctgcacccaggtcaggaccagaggccagagcgccgaggccgtgcaccagtttcctcccgtataaaataggaggccgttcttgaccactgaggtgcttccagagctagtgttcaaggcccacactcagacctgatcctaaattacaccaaacgctaagagtccaggtccactgagttaaaaggcagaaagcagccccaggaaagaagctgggcaaggtgggggcctcctgaaatgcatcaaaggaagatgccaagcctctctcgcagagatccaggaaatgacagccggggtcagtgaggagcagcacagccatggcctggacgacatgcagctgcaccagctggccctgcacccagcgcccacctcactcagccataccttccaccgcgccctggactgcaggctggcaggcccctgcgagaccagggccactctccccagcaagaggtccagcaactgtctcgccctggacctgttcggagaggctccaccacaggagtttgtggtgtaggcaccacccacccagcagtaccgtccgcaccgccaggctcagcccctgcccaccccacttccacatggccctcgtcccttcctgcccgccagatgctgcctgcacttccgcagccagcacgctccacaggttcacctgtaagaggtgtggagctggctctgacatcaacctgggaggtaacaaacaggtcccgcacctcatgcctgtctgccatacacccgggagctctttccctcagggtctcagggagccagttcaaggtctggctgtcaagtgtccagagagccatggtgttggcccctgaggcagcctgtcacccatcctaatctgggagagaaggtgacacagctgggcccagaccctggagagacagctctgcagtttcccacactgtcagctccccaagagacagtcctgatgggcacaggctgccagagctcccaagccggagttcacagtcatcactgtgcaggacccaggttcctcccagacctgaacccctctctgcaactcctgtttgcaagcgctgggcctgccagacagaggcccctcttgtggtgcaagcccagctctgtcacctgagatccagccagagaccctcctccaccatccacagtcaatggctgtgctttcccttccaagccagggcttccaaagaccccactgccccggagctgaagccgactctgctcccatctcagccatgaggcctcaggacccactctgctcacaggtggcttccttaagccattgccctggctggggttgggctggtgcagcccagctggcggaggggcgaagctttggtgacagacggagagtgggggactagctgtgcatggcacctgctctgatccggtgggctccacgggtagtgcgacctcggttctgtgggctctggaaggccaccagggtagggtctccccagggctcctccccctgcacaacactcctgcacacgtgcaaacctgctgtcctctgcatttagaggaatggcccgtgcatccctgctagtctcaggcccatcccagagcactgagaggccacaatcgttcagccctgtgccctgaacaccactgcccccttcactgtctgtgtgtggtgaagaccacgccacaccaccctccagctcactggagacaagcatgagcttgagccccatggcctggtgcagggctgcgtgcattgaggccgcctctttgacgggtccatccagggggaccctctcctttctgtgaaagggaatcgtgtgtgtgccccaggcacgtgtaataaagaacccgagcagatgc

SEQ ID NO: 1657 - DNA, 3791 bp, Homo sapiens
atgaaacctgagggtgactgtgggtgatggagaagtggaagtgagaggtgacaacgtgctggcagccctcgctcactctcagcgccttctctgcctcggcgtccggtctggccatgcttgaggagcccttcagccctccactgcgctgtgggggcccctctctgggctggccgaggccggagccggctccctctgcttgcagggaggtgtggagggagaggccgcaggcgggaactggggctgcgcgcagcgatggcaggccagcgcgtgttccgagtgggagtgggctcagcggcagctgcggagggggcgccgggtaccccagcactgccggcctgcctgccccacgctcgaattctcgcagcgcctcagccgcctccccgccgggcagggctagggacctgcagcccgccttgcctgagtccacccgcggtgggctcccagcggccaagcctccctgacgagagccgcccctgctccgcagcaccaggtcccattgaccacccaaggactgaggagtgcaggcgctcggcacaggactggcaggcagctccatccgctatctcaagggaaaaaaaattaaatagccaaatccccaaacaagttaattttagctaggattaaggaggtcctctctgctttaatctttacaaggaaagcaactgaaaggaacaatccacattctgttctctgtttctgctttccccagcccttattctttctataaagccaacctcctctgcttagctctatggaacactcattctattttaaagaatgaggtgttgtccgattataaatcacaaaagctaattaagatgtttaactaaatttgatataattttttttttttgtcttttgacagcccttcctctgacgtgcacaggatatgaaaatgtctgatagtgttgtggctgcagtgagacctgggagtggcagtttctttcactgcagttgtctgtccaaagcgaagtgaactagcaagtctcttacaaaagggcaagctctgaactgcgcacagtgtgagcacagacacagtggggctaatctacaggggcagtgttagcagcaatgggttgtccaagatttctgagaggattagcacctagaaaataatcttattttgctttgtggtgtcagacaaaggaactgaatgagaaaattattgaagggcatattgtagctgatatgcagatccaaggctgactttcttcctctcccttgaatccacttatcacaaaaatatggaatgagcagaacttatgggcataaccataaaccaattttcctttgtttcctactgtctctttaaagttttctcagtgggagaaatcttctgtgtccttggatgaagacttactcagtaaattactttatgatcactgataggtaataaaagatcctatggtcatttaaaaataaaccatagaattttaattcagaaattattatcctagttccatataataatctagactccaaacttgatttaaaggtaaattttctctaccttcctaagttagagcttcctgcagtctttcccttctatctctcctcctgcctactaacctgttttctgacctgttacattttatttgccctgataaattgggtgaacagggtgattactaagcagctgcttcaacttgtcagaggacagttgaccagcctgggtctcaccctttgtattccctgtcatacctcaatccactttgtttctcccattgtagatggtacttatgctattggagtctccctgacgttctctcttgacttgagatgaagggaatacaccttatacattgcacctctacttccatcccactagcagctttctacaaataagtcttgtctaaataagtttcctctgatgccccacaacccaattcttttttattctcaaggtcaatgaggggtatagtgaaacctgacacataactggtttttggttattttcttggaaaatttttcatttttgtttaacacctcacttgagtacctggctaatcaaaatgtgggcccgggatgggcagcattggcatcacctgggagcttgttagaaaagctcaggccccagcccagacctacaaaatcaaaatctgcattttagggagctctccaggtgattcgcatgcacattacattttgagaagccctgcttttgaagtcctttcaactgtttcttggtgtctcaatcttcctatttactttcctgttacacatttagagtccaatgtcctaatgtagctttgtgggttctattttcagaaaggaggagtgccagtgtctgccctttgcaattgcagatctcaaactatttataaacctattaataacttaaatgtctttttactgaattcaaatgttctattgtcacatcaaattcagtatatcctacatcaaatccagcattttcccccaaatccgacacctattctaactccttttacccattctttgatatctaataatggacagtcttctccaagactatttccttgaccactgaagcacagggtgatcactcaactcttgtaccgtgccagcctttagcacttatgacagcctcttttttatttatgtttatactggcttgaactaacatttaatttttcattcattcagcatttcttgggcactttctatgttccaaccaatgtttaaacagctgttaaagaacaaaacaaattagtcttctgtcctcttgaaagttacattttcagggggagaaagatacaaaaaatagataaatatgtaatttcataccacaatgacggctttcaaattgataatgtcaggctcaacctctccttttaattgtaattcatgtaaccagtgtctgctcaatatctttacttaaatatctagtatgcacctcaaacttactgtatccaaaaccgaattcttgattttcacttcaacaccctcttttcctaatgctctccatctcaatgtacaacatcaccatctccacaaaaatcctctttctttcataccccacttttaatccatcagaaaatccctataattctactttcaaaacatacccaaattattgctacttctctccacttcctctgcaacagctctgtggaggtctccaatgtctcctctggactgctataccagccacctgacagccatcctgcctccctcatccctctactacagtacgtactctaccagtacgctgagccatctttcacagagttagtttgagcattccctagctcaaaactctcccattgcttcctgttgcactgagaattaaatctaaagacttcacagagtccctcaaggccctacagactcttggtccccatgctgcccctctgactcacctcctccctaccactcttgccttcctttctcatccccgtcactttggcccacttgatgttctttgaacacacacatctggctatctccccaagtctttgcaattgcttaaaccactcttcccagatacccagaagacttgctttctcattttcttaaattatctctgtattcaaatatcaccccctcaagaggtctatcctgactttctctctcaccttctccttttctttatggtatttagccataattcgccccccatacacatgcatttgtttattcatctgttggtttattgtctgtctcctcactaaaatgtaattactccaaaatgtaatttccacaatagcaataaatttatctttttattttaactactgcctgcccagcacccagaacagtcgttgaaaagagcagacattcaataaatatttgctgagtaaatgaacatt

SEQ ID NO: 1658 - DNA, 2864 bp, Homo sapiens
aaactttgctgaaaaaagtgcgtcaaccagaaacactcaataacaaggctcccagggaccctgggttctgaggcagagatggcagggaccacagtgctgcaggagtttagtggagggagcttgctcctggctggctggagggcagctcagcttcctggatggaggaagcaggcctgtatggcgggctggggctcaggcagaacactccatggagcccaggcctctgcaaaggaatgctcctgccctgttctcctgttttgcccttggaaaggatagatgatggcttgctctggtcctcgttccctggtcctccctcccctagtcctctctcccttggttcttctcccatagcccttcctctgctggtcctccctcccccagtcctcctcccctggtcctctttcccctggtcttcctaccctagtcctccctctcctcatgcccttcccctggtcctccttccgctggtcttacctacctagtcctccgtcccctcttcctcctccagcagtcctccctgccctggtcctcctccctcagtgctccctgccctgcttctcctcccttgttggtcagtcaggtgtgtcacactgtggtgggctgggtggtcaacaccaggacaaggagttgagagacccccttcacatcagggagaaagagctcctatgtcaagggagcccccagtctgagggggagacatggctgctaccttgaggaagtgtccaatttaagggaagagacacagtctctgttttggggagcctggcctcatctgcccctggagaaagccactcaagagcattgcagagcaggcgcgaatgagcgctcatcaacagggagaaaccagcctccccagggcgcagggagggaggagcgagctggctgacagttcctggaaaccagtcagaggggccgttcctcggggcatgacgctggctcctgcacagatcctgctcctctgtggccttcctgggctgccctcccctcctccgggactgctctggactgacattgctcaggctggagtgcaatggtgtgatctcggctcactgcaacctccacctcccaggttcaagctattctcctgcctcagcctcctgagtagctgggattacagatcctggtggctgtggttggtaattccagcttcgtgctggctacaggtggatgatgcccacctggctgccgatgacctctgcaccaagtgaggctgggtctctggagctgccccaggggctggacaagctgaccctggccggggccaacctggagatgcagattgagaacctcaaggaggacctggtctacctgaagaagaaccacaagcagaaaatgaacgtcctttgaggtcaggtggatgaggatgtcagtgtgaagatggacactgtgcctggagtgaacctgagctgcatcctgaatgagatgcgtgaccaggacaagacattggtggagaagagctgcaaggatgccgagggctggttcttcagcatgaaagaggggctgagctgcgaggtggccaccaacacagaggccctgcagagtggctggatagagatatggagctctacgtctctgtgcagaacctgagccgtcccagctcagcaagaaagcatcgctggagggcagcctggtggagatggaggtgtgttacaggaccctgccggcccagctgcaggggcttaacagaagcatggagcagcagctgtgcgagctctgctgcgacacggagcaccaggaccacaagcacaggtccttctggacgtgaagacgtggctggagcaggagatcgccacctaccgccgcttgctggaggttgaggacgcccagaggtgatactgacgatgcaggctggagtctggctgaggagccttgaatgccaagttaaagcgtctggactagatcacgtaggcaatggggagccatggagggatttggagcaggagagtgaaatgaacatcaagagattttagaacattcactctggctgcagagggagaaatggatcagaggggtcagggcggggccagagagatgtgtcagggggctggagcagggagtctggccagagaagtcccgtgcggtggtgggtagtggggcaggggaaggaaggtggtgcacgcagaagagaggttatagctcaaaacagcgggactggatgcctggatctcggggtaagcatggctcacagtcaggactcagtaagtgtcgggtgaacacatgaaggagcaggcattgatggccctgggtttctggttctgatgactgtgtgagtggtgaagagcaaggtgggtggtggttgggtttgcagttgggaagggtgatcaggccttcagctgagagtgtcccggagtctccatgcttagtcacacgttgcagatttttgctccccggaaatggtgaagtccatctatagtctaacaacagtctctcctgctttaattgggtctatttgttgggccctctgggttatggaaaaaccacttgctcagcttctccttgtaaattcctggctggccactcagtactccttgtccctggcctcgcagcccacccgggaagccacagtgaccagccaccaggtgtgccatcgtggaggaagtccaggttggagaggtggtcttcttctgtgagcaggtccacttctccacccactgagacccctttctgtctgcgacagccccacctcgagggccacggcacagccatcagctccagctcccagcatgctactgccacgccccgagtgtccgtctgggccccggtgcatggcctgttgtctttctgtatctactttctgcagcccctcactgaggaggcctcctgggtttgtccagtgcctactattaaagctttgctccaagttc

SEQ ID NO: 1659 - DNA, 3361 bp, Homo sapiens
aagccagctgccctgtcatgacggtatgcatgcagccccatggagaggcccacatcatgaggaactaaccaagcactaacttgcctggtgtttcaataggccactttggaggcagattctccagccttggtcaggccttcagatgactgcagccctggctgatgacttgactgccacctcatgagagaccttgagccagaaccacccagccaagccactcctggattcctgatccacagaaactaggtgaaacgtcaagaatgactaaaagccaacattcaagaagacagcatctgcaaacaagtgttgatcccaagtgtaatcctagggaacccgacttaaggcctccccatctgaagaacacaatctcaaggaagaatttaaggggaaacctgtctacacagtttgactttctgtaaagaattgccatgctactcctgaggatctaggataatactgaaagaagcacatatggggcacaagatttctagcactttaaagcttaatgctttaaaagtatgttttgaggcttctttaaaagtttatggatcttgcccagagctggagtcggagcccccgaggctgccgccgagagtgcccgcgagcccgtggcccagccgaagctctttcccgccgcctctccgcgcctcgtccccgtccagccccacccaacccccaacccagcctggtcccctgaccctcagtctggcccggtctggcctcccagcagggtcacgcaactgccccggggacgatgaaaggaggataaatggtgcccaaggtggacagcggtgccttcctgctgctcttcctgctcttgctgtcactgagccgttgcggccagtggggaccctctgctgagacaggctctgtgtccagcacctgctccgggtcacgctctgggggagtaggagtcgcacgactgtctcagccttggatttgactttggcctcatccacctaggggccacgggagaaccatgtgggttaccaagttcaaggggagagagaagaagctgatgaaaatagaggctcatctgggactgccttccttctctggctccacccttgacttcttcagagcttgggctttaagccgtgagctccatctcattccctgggccgcaagaagctcactgggcccgcgtctctggaggctgttgggggggcccttcctctgtctccatagtcgacggcttgctggggaaacccaggatctccgactgcctggacatttgcattgctgtcccctcgggttttgtctcaggctgtgcctggggctgtgcctctccctcaggctccagcttggtggcagacttcttgtcagagccaggttcgggggtccacaagggttcagttccccgggaactctccccctccttgttgatggccacagagggagatccccgtgccttgggctgcatccagcagtggctgaggatctcgtcgatgtggagccgccggttgacgtcgggctgcagcatgtggtagatgaggtccttgcactcgcctgtcaggtgcttggagcgtgggaagttgacgcggtgctccttctggatacgcagcatcttcttgatgttggagtcgtcgtagggcatggagccgcagaccatgatgtagaggatcacgcctaggctccagatgtcgtacaccttgggctggtagggaatgccctgcagcacctctggggccgcatacgctggtgccccacagaaggtcttgcttaaggccattcgaccactgtcatcccgcaggcagcgcttggagaagctgaagtcggacagcttgatgttgaagtccttgtcaaggagaaggttgtcacacttgaggtcccggtggacgacgtccaggtcgtggcagtacttgatggccaaggaaagctggtggaacttcttgcgagcttcgtcctcatgcagggctccccgggttttgattaactcgaggaggtcgccctggaccgcgagctccatgacgatgtagaccttgccatgtgatgtctcaaagacctcgtaggtcttaatgatggagcagtggtttaacatggccagaatctcaatttcccggggaaggaatttctccaagaagtctgcgggggccttcttgcggtcgatgatcttgatcgccacattgaacttcaggcgctcagagtaagcagattttacttttgcataggagccctctcctaaatttatccccaggaggtagcctcgtcgcttgaggacagcagcgtcatccatggtgccaggaatgcccagtgcctctgaggctgccctctacagccccgaggcgcatgggccagcagtgtgctcatttacatcctggatagagagtcctttgggctggccaggcctgctgttcctgcctcctagaggccaagactctggagtggaacatttggcactgtctcccagatgacttcagcgagtgaagtcacaaaggaggagtgccctgggggaatgagaccctggcctgaggcacttggacttggaatcctggaaggctggccagtaggctggagcagacaagatgagcagaaagtggcctcgtgtcttgctgggacctgagcccttgatgctgtccacacaggtgaccctcaggagtgcagagcagggccaagaagagtggtgtgtcaagaaggtagacagcttcctggccccggagtcacacagtttgagatgcctggattctgccgcctccctatacatctcttcccttgtctgagcctttgctggcttcttacagcagctctgtaggaggacagctggcaggagttctgctcttggctgtgagctccctcctggggacctgcccagctcacggccctggctgggctcccagggcatatctggggctgggggctgaaggtggggcctggatgccaccctgagcactggcagctgctctgaggacattacaagcagcaggggaagcactggacagcaaccatcatttcttctggcagtggagcctctgctgtgactggttctgtgtccagcacctgctctgggccacaccgtcaggaagaaggagttgcatgactgtcctagccttggatttgactttggcctcatccacctagagggagtgagaactccttcctcacatgagccaggtggaaccctgggcccttcaggagtgagttagtagagctggatgtcgctcaggctgggttgggtcaccaccagctgtggcccttctcccttttctctgctccttcaccttgttccccaactctgactgcccactgccagtcctttgtgcgtggttggtgctccttcctccagacagcctccttctccttcctgctggggaaaccccaagtgctgtctcttggaaaccaaaaataaaattctaatctcccc

SEQ ID NO: 1660 - DNA, 3217 bp, Homo sapiens
tgttagaatgtggtcaattggaacactataaacaggaggtagaagaaagagcaaggcaggagatagcagaacaattagaaaacattggtctacttttacagtcacagaaaatagctcatgaccagttacagttaaaagaggaaagcaatgctactatgaaaagtcagatggaacttagaattaaagatctggaattcaaactctacaaagcaagaacttcacaagcggactgtaatacaacagaattggaaaaatataaggagctgtatctagaagaattaaaacttagagaatctttgtcagatgaactaaacaagcgtaaagaaattctagcagatgtcagtaccaaacttcttcaagaaaaagagtggagcagatctttatttacttctcatactacaaggccagtcctagagtcagcatgcaatggaaatcttaatgaaaatttaggtctcagcagaatacatattccaagagaagccttaagaattcctaccttaaactcattgtcttcaaatatcagaatggagagcgacttgtcaaaggaagacaagaatggaggacactttctggaactccaggcttgacaacatctctcggtgttgtgactcgcatcctgttgtgagcagttatggtgccagggatcaccaggtgggttcactattccaaggtaaagctgtatgactcatctctggcagaggaagtcgtaaaggtcccactggacacctggaccactgagcccctccagggtctcaaactcctcttcaagcaaagccaaaagaataaagataagtaaattagtaatgctttggattgttataccatgaatcgtaatactccttgcaggtttactaatatgtctttgctactgtgaaccaataccaccccccacccactgccaggaaaaggtctgttcttccctacctggatttaaatctcaaagcaataatctgggtggtgttctctctaatactcactgagttaacaagttctttttccataatcaacagacatcttgatttggctctaatctgttcttgttgggaccatgcagccaaatgctctatgctcactaatgcttctagctaaaatcaccctcataggccccaacagcccacaactatatataaaaaaaaaatctacaagaagctcaacaactaccgaagttcaccaaatcttcctatccctcaacctatgggctaagcatgaattatttctatccagggcaggaacagcctacccagccacgatacaagaatagaaaacttctcaagcccagtttagcttcacctatcactgaggcttctctatacaaaaccttcccagagatgcatacagtacctaacacaagcaaaggggactttcaggcttttcttaagcccacttgcactattttaggccccttgttttcccccttcaccatcagtcaggtactcctaggcatcactactgccacagattctggaactttggtgggttctctcaaccctgcgcactgcaacacaaccatcaccattgtcaatacctctcatacttctttttttctagaaactgaaatctcccaataccaagtaaggttctctaccttaccaagccagtagtggtcatgcaaaaatttcaaatctttaactccctttggaggctcttttccttgacattactagacacatgctcttctgggaaaataagaaccatcctcctattcaaactactcactcatgtctggctcccctagcagctgcaactttagtgacagaatatcacatcttgcgtagccaacaatggtaatgtttggaattgaccttgcctccttccgtatccattcttgtctacgtatgacagaactttgttttctatgtgggacacaggcccacctctgcctctctgcaaactggaccagaacacgcatgctggcttacctcacccctagcatctcattgccccaggtgatgcttctctgcccttgctcttatttataacctcacactggggcccaccaagcaattcaattaattccctttctcgttgggcttggcatcaccacaggtgccatgatgggaatagccagcattggcacttactcctgaacctaccacagcctgtctctggaattggcccaagggatagaaacgactagttgctgtaacagagttacagtggcaagtcagttctctcgcagctatagttctcaaacatggtagaggtcttgacatgctggctgcagctcagggaggaacttggctgtgcttggagaagagtgctgatttgggttaagagatcagggcaggctcaggagcacatttgagatctcataaactaggcttctcacctttgggaaggggctactggggtgtcacctggttctgattctcatggctcctccccttcctgggacccctgacctctatcttccttcttctcttttctgggtcttgcttcttgaatctactaagtaagtttattttatcccatctagacgccgtcagacttcaaatggtcttgtgacaaggatatcaacctctttcctgcccttgaggacaaccaagtttctgtatgtctcctctggacactgtgggtcaaaccttttgagagacaacaacaacctctgaaaccctcttgccatgacagcaagcaaggaggagggaccagaagaccctcgacgccccttttcagcaggaagtagctacagaagaatgacctccaccctatttcccaaaagatttctgggtcccaactccttaaggaataaacgtgaaagggggcagttagtcagatattagcaggcaggaggggaggtacccatgttggaaggaacagcccagaccacctcttaagatgcccagtactcactttatggtcaaactcaaaatgtggctaactagatcctgataagggagaaaaaaggcaaaagcagaattcttgagagccacacaggtgcaatgagtacaaatttgatggctatatgaccttcccgggtggcagtaatgagcaacgtccccatcgggtggaatttgtattgatcactgcgtccagtgcatgtacatgaaccacagtaagggatgatccccccaagccttggtgagaactggacaaggaaagaagcaagaccatagaatatcgaatgcagaatgtcccggggctgtttccagcagggtcagcccactcctctgttggagtgtacttttacttccccaataaaacttttgcctgctttact

SEQ ID NO: 1661 - DNA, 5237 bp, Homo sapiens
gtttcaggaccgttggcaccgggctaacggttccaccacgtccgccgccctggacgcccgcggcctgcccctccctgcctctcctgcgccgatacacttcgagtggattctggccatttgagcattctctccaactctccaatccccagtctgcccccacgggggtctcccccacctctcccccgtcccacagcctaaacccctcttcgccctgaacctcccttttcctcatgcggtgaatgggcactggccccgctcagactcccaggagcaccagagctggccctgagccaagccctgccccaccaggacctggggacacgggtgactcagacgtgactcaggaaggctcaggtcctgctggcatccgcagagccccaccagcatgggcagcctcggccagagagaagatctccaagatgaggacaggaactcagcattcacctggaaggtccaggccaacaaccgtgcctacaacgggcagttcaaggagaaggtgatcctgtgctggcaaaggaagaaatacaagaccaatgtcatccgcacggccaagtacaacttctactcgttcctgccgctgaacctgtacgagcagttccaccgcgtgtccaacctgttcttcctcatcatcatcatcctgcagagcattcccgacatctccacgctgccctggttctcgctcagtacccctatggtctgcctcctcttcatccgtgccacccgggacctggtggacgacatggggagacacaagagtgacagagccatcaacaacagaccctgccagattctgatggggaagagtccgacaggaaccgggcctgcattcattaggcgtttggccgggacgaggacagaggccgaggccctgatggcgaacccttgcagagcttagggctcgggcgatggggaggacaaggaaagtctgaagaggacgtgggtgcaggaccctggaggtcactgggtgggagcgtggacccgcggggagtggggtgggagcccggggaaggcttcctgagggggcaaaggcccggaggtggggactgcagctgcgggccccccgtcatcccgtgcctctggtctcccggtgtggggagggttggcagagggaggggcctccttcacaaccccctctccccgcagcttcaagcagaagaaatggcaggatctgtgcgtgggggatgtggtctgtctccgcaaggacaacatcgtcccagccgacatgctcttgctggccagcacggagcccagcagcctgtgctatgtggagacggtggacattgacggggagaccaacttgaagttcagacaggccctgatggtcacccacaaagaactggccactataaagaagatggcgtcctttcaaggcacagtgacgtgtgaggcgcctaacagtcggatgcaccacttcgtggggtgcctggaatggaatgacaagaaatactccctggacattggcaacctcctcctccgaggctgcaggattcgcaacacagacacctgctatggactggtcatttatgctggttttgacacaaaaattatgaagaactgtggcaagatccatttgaagagaaccaagctggacctcctggtgaacaagctggtggttgtgatcttcatctccgtggtgcttgtctgcctggtgttggccttcggcttcggtttctcagtcaaagaattcaaagaccaccactactacctctcgggggtgcatgggagcagcgtggccgcagagtccttcttcgtcttctggagcttcctcatcctgctcagcgtcaccatcccgatgtccatgttcatcctgtccgagttcatctacctggggaacagcgtcttcatcgactgggacgtgcagatgtactacaagccgcaggacgtgcctgccaaggcccgcagcaccagcctcaacgaccacctgggccaggtggaatacatcttctcggacaagacgggcacgctcacgcagaacatcttgaccttcaacaagtgctgcatcagcggccgcgtctatgggccggattcagaggccacgacccgacctaaggagaacccctacctctggaacaagttcgccgacgggaagctgctcttccacaatgcggccctgctgcacctcgtgcggaccaacggggacgaggccgtgcgggagttctggcgcctgctggccatctgccacacggtgatggtgcgggagagcccccgtgagcgcccagaccagctgttgtaccaggcggcctcccccgacgagggggcgctggtcaccgcagcccggaacttcggctacgtgttcctgtcccgcacccaggacaccgtcacgatcatggagctgggggaggaacgggtctaccaggtcctggccataatggacttcaacagcacgcgcaaacggatgtcggtgctggttcgaaagccagagggcgccatctgcctgtacaccaagggcgccgacacggtcatcttcgaacgcttgcacaggaggggggcaatggaatttgccacagaggaggccttggctgcctttgcccaggagaccctgcggacactgtgcctggcctacagggaggtggctgaggacatttacgaggactggcagcagcgccaccaggaggccagcctcctgctgcagaaccgggcacaggccctgcaacaggtgtacaacgagatggagcaggacctcaggctgctgggagccacagccatcgaggacagactccaggacggtgtccctgaaaccatcaaatgtctcaagaagagcaacatcaaaatatgggtgctcaccggggacaagcaggaaacggctgtgaacatcggcttcgcctgcgagctgctgtcagagaatatgctcattctggaggagaaggagattagccgcatcctggagacctactgggaaaacagtaacaaccttctaaccagggagtccctgtcgcaggtcaagctggccttggtcattaacggagacttcctggcgcctgtccctgctgtgccggaggttcgggctcccgctggctgcaccgccagcccaggactccagagcccgccgtagctccgaggtgctgcaggagcgcgccttcgtggacctggcgtccaagtgccaggcggtcatctgctgccgcgtgacgcccaagcagaaggccctgatcgtggccctggtcaagaagtaccaccaggtggtgaccctggccatcggggacggtgccaacgacatcaacatgatcaagaccgcggacgtgggcgtggggctggcgggccaggagggcatgcaggcagttcagaacagcgacttcgtgctcggccagttctgcttcctgcagcgcctcctgctggtgcacggccgctggtcctacgtgcggatctgcaagttcctgcgctacttcttctacaagagcatggccagcatgatggtgcaggtctggtttgcctgctacaacggcttcaccggccagcccctgtatgaaggatggttcctggctcttttcaacctcctgtacagcaccctgccagttctctacattgggctctttgagcaggacgtgagcgcagagcagagcctggagaagccggagctgtacgtggtggggcagaaggacgagctcttcaactactgggtcttcgtccaagccatcgcccatggtgtgaccacctctctggtcaacttcttcatgacactgtggatcagccgcgacacggcgggacccgccagcttcagcgaccaccagtcctttgcggtcgtggtggccctgtcttgcctgctgtccatcaccatggaggtcattcttatcatcaagtactggaccgccctgtgcgtggcgaccatcctcctcagccttggtttctacgccatcatgactaccaccacccagagcttctggctcttcagagtatcccccacgaccttcccgtttctgtacgccgacctcagcgtgatgtcctctccctccatcctgctggtggtcctgctgagcgtgtccataaacaccttccctgtcctggccctccgagtcatcttcccagccctcaaggagctacgtgccaaggaggagaaagtggaggagggccccagcgaggagattttcaccatggagcccttgcctcatgtacaccgggagtctcgtgcccgccgttccagctatgctttctcccaccgtgagggatatgcaaacctcatcactcagggcacaattctgcggaggggaccaggggtcagcagtgacatagcatctgaatccctagacccatctgatgaagaggcagcttcgagcccaaaagagtcacagtgacacctcaggaagatgtccttcctggggaagaagaagcaccagccacaggggcaggtgtcctcccaggaagtacagctcccccctacacctagctcatcattttctatggatagacaatccgctcttcatccagaaaaccaacctgccctccccaaatatgtgctcaccagcagcaacaggctatctgagtctttccaagagcaattgccaagggcacaggagaggtcattgtcacccaagcagaggccaccttctcctgagaagttgctgttgaccaaggagaggtcacattcttttcaggagaaatcactgttgcacagagaaagccagctgtcgtcatttgagagccagccacagcctctggggagccagtcatttctttcaggccagctgacgttggagagccagccagactcctcggaggagaagtcagcatttttgaagccctccacaccgttccggaagagctggcaaaaggagcctcacacccccaaggaggggacggtgccacttccagacaagacccacaaatctcaggtggagactctgccaccaagtctggaagaatcgtccacgtccacgagcgagcagcctatggaggtggagctgtggcccgcggagaagcagtcatcatcatccatggagtggctgctggtgcccggggaggagcagctatccttgcccccagaggagcagtcattgccctctgcggaggggaccagggttcagcagtgacgtagcatctgaatccctagacccatctgatgaagaggcatcttcgagcccaaaggagtcacgctggcatatcaggaagatgtccttcctgggaagaagaagttccagccagttctgctgcaagtcaaccagcatgcagggggccttcctctaaagacaaggactccacatgcttttctttttctaataaaccagggtccatctgaccccagcgct

SEQ ID NO: 1662 - DNA, 3373 bp, Homo sapiens
ttaaaggatgcgaaaataagcagccacaggttgaagaagaaatggagaagcacagaagtaatagcacagaattatcaggaaccctaactgatggtactactgttggcaatgatgatgatggactaaatcagcagattcctaggaaggaaaatggagagcatgacaggcctgcagataaaacatctaatgaaaagaacgaggtcaaaaaccaaatatatcctgaggctgactttgctgactcaatggagccatctgaaatagcctcagaggattgtgaattgtctcactctgtttatgagaattttatgttgctgattgaacaacttagaatggagtataaagattctgctagcctaccaagaatccaagacacattttgtttgtgtgaacacttactgaaacttaagaataatcactgtgaccaacttacagtaaaacttaaacaaatggaaaatatggtcagtgtactacaaaatgagctatctgaaacaaaaaagacaaaattacagttagaacttcaaaaaattgaatgggagaaagagctgtacgatttgagacttgccttaaaacaagaaaatgaggagaaaagaaatgccgatatgttgtataataaagatagtgaacagttaagaataaaagaagaggagtgtgggaaagtggttgaaacaaagcaacaacttaaatggaatctgagaagacttgttaaggaattgaggacagtaagaaataacttggatctggttgtgcaggagagaaacgatgcccagaagcaactttctgaagaacaggatgccagaatattacaagatcagattctgacgagtaaacaaaaggaactagaaatggctcgaaagaaaatgaattctgagatttctcataggcatcagaaagaaaaggatctctttcatgaagattgcatgttgcaggaagaaattgccttgctgagactggaaatagatacaataaaaaatcagaacaagcaaaaggaaaagaaatattttgaggacattgaggctgtgaaagaaaagaatgataaccttcaaaaaattataaaactaaatgaggaaacattaacagaaacaatactccagtacagtggacagctgaacaatctgacagctgagaacaaaatactcaattctgaactggagaatgggaaacagaaccaagaaagactagaaatagaaatggaatcataccgttgtagactagctgctgctgtacgtgactgtgatcaaagtcagacagcaagagacctaaaacttgatttccagagaacaagacaagagtgggttcgtttacatgacaatgaaggttgatatgtctggcctacaagctaagaatgagattctttctgaaaaactttctaatgctgaaagtaaaattaacagcctacaaattcagctccataacacaagagatgctcttggaagagagagtttgattttggaacgtgtgcaaagagacctcagccaaacacagtgtcagaagaaagaaactgaacaaatgtaccaaattgaacaaagcaaactgaagaaatacattgccaagcaggaatctgtagaggagagattatctcaactacaaagtgaaaatatgttgcttcgacagcaactggatgatgctcacaagaaagctaacagtcaagaaaagacaagcagtactatccaagaccagtttcattctgctgccaaaaatcttcgagctgagagtgaaaagcagattctttcactacaagagaagaacaaggagctgatggatgaatataatcatttaaaagaaagaatggatcaatgtgagaaagagaaagcaggaagaaaagtagttatgagagaattccaacaagaatggaccgatctcctaaaacaacaacctacgtcagaggctacctcacgttgtcacattaatttagatgagacacaggattcaaagaagaaattgggtcaaatcagaagtgaaattgaccttacagaagcacaggaaactgtaccttcacgatgtctacatctggatgcagagaatgaagttcttcaacttcaacagacattattctctatgaaagcaatacaaaagcaatgtgaaacactacagaagaataagaagcagctgaaacaagaagtagtaaacctcaaaagttatatggaaagaaatatgttagaacgtggtaaagctgaatggcataaactgttgattgaagaaagagcaaggaaggagatagaagaaaaattaaacgaagccattctcaccttgcagaaacaagcagcagtatctcatgaacagttagtacagttaagggaggataatactacttcaataaaaactcagatggaactcacaatcaaagatctggaatctgaaatctccagaataaaaacttcgcaagccgactttaataaaaccgaattggaaagatataaggaactctacctagaagaagtgaaagttagagaatccttgtcaaatgaactcagtagaactaatgagatgatagcagaggtcagtacgcaacttactgtggagaaagagcagaccagatccagatctctattcactgcttatgctacaaggccagtcctagagtcaccttgcgttggaaatcttaatgatagtgaaggtctcaacagaaaacatattccaagaaaaaagaggtctgctcttaaggacatggagagctacttgttgaaggttagctatcttttttccttcggcgttcagatttctgatagaactcttgtatgttatttggtaaaatagttacttaattgtcttgtgtatggtaagtaaaagtaataattacctgtgttaataaagagaggagacagaaattttaccgttatttttaagtctctggagctctcattgataagagattactcttttgttaactttatttaataaatgtaaccaaactgacacattttaaatttttttaaaaactgcatttaagttagattttaaccaaaggtttactttgatgtgctttgtcttactaattgattttagtttgtctggggttcacttttaatgggtttagtgtgcctggggtcacttttaaagtttttctgcgtcatctcaggttttctacctgtcatcatatgtgaatgattggtgtccaaacactaaccacccatggatgtttattatttaaaaggacccaaggtgaatacttttatatgttatataaacctgcaacacttgattaatctgttctttaagttaaaagttttgtgattttcttatatgagtacatctgtaattgctattgcacttaatagtgttttaatcccaattttagtaaaatgtgtctattgctatgcaatagcacagtggttttgaaatagttaaatcaaataaatatttgaatttttaaagt

SEQ ID NO: 1663 - DNA, 5094 bp, Homo sapiens
gttcccagggcccccagtctgaggagggaggcccagcctagccctctggaggctccaacctgatggggggagggacatccctgctttctgaaccccctgtctgaggggggagacacaattggctctctggagacccccatgtgatggaagaggcacagccctgtcctctggaaaccctgtttgaggagggaagcacattcagggtcggggggatgcagccttgctttctgagaccccagtatgaggagggaggcacagccctgcctgctggtgccctgaggctgaggtgggcagatgcagccctaatctcagggagcccccagccaatcctgcaggagccatttactcccctccttctgggagcagcgaagaagagcatgagttcagcgccgcggactacgccctggcagcagccctggctctgacggcctcctccgagctgtcttgggaagcccagctgagacgccagacctctgccgtggagctggaggagcgagggcagaagcgggtgggcttcggcaatgactgggagaggactgagatcgccttcctgcagacccaccggctgctgcgccagaggcgggactggaagacgctgaggcggcggacagaggagaaggtccaggaggccaaggagctgagggagctgtgctacggccgcgggccctggttctggatccctcttcgctcccacgccgtctgggagcacaccacggtcctgctgacctgcactgtccaggcctcaccaccaccccaggtcacctggtacaaaaatgacacacggattgatccccgcctctttcgtgccggaaaataccgaatcaccaacaactacgggctgctgtccctggagattaggagatgcgccattgaggactcagcaacttacactgtgcgagtgaagaacgcccacggccaggcctcctccttcgccaaagtcctcgtccgcacttacctggggaaggatgctggcttcgattcagagatcttcaaaagatcgacgtttggccccagcgtggaattcacctcggtgctgaagccagtctttgctcgtgagaaggaacccttctccctgtcatgcttgttttcggaagatgtgttagatgctgagagcatccagtggttccgagatgggagcctactgaggtcctcgagacgtcggaagatcctctacacagaccgccaggcatccctgaaggtgtcctgcacctacaaggaggacgaggggctctacatggtccgggtgccctcgcccttcggaccccgggaacagagcacctacgtgcttgtgagagatgccgaggccgagaaccccggggccccaggctccccactgaacgtccgatgcctggatgtgaacagagactgcctcatcctgacttgggccccgcccagtgacacccggggcaaccccatcactgcctacaccattgagcggtgccagggcgagtctggggaatggatcgcctgccatgaggcccccggagggacttgtcggtgcccaatccaaggcctcgtcgaaggtcagagctatcggttccgggtgagagccatcagcagggtaggcagcagcgtcccctccaaggcctcagagttggttgtcatgggtgaccatgatgcagcccggaggaagacagagatcccctttgatctgggaaacaagatcaccatcagcacagacgcttttgaagatactgtgaccatcccctcaccgccaaccaatgtccatgccagcgagatccgagaggcctatgtggttctggcctgggaggagcccagcccccggggcagagcaccactgacgtactccctggagaagtcagtcataggtagtggcacctgggaggccatcagctcggaaagccctgtgagatccccgagattcgccgttctggacctggagaaaaagaagtcgtatgtcttcagagtgcgagcaatgaaccagtatggcctgagcgatccctcggagcccagcgaacccatcgccttgcggggcccgccagctaccctccctcctccagctcaagttcaagctttcagagacacacagacctctgtctccctgacatgggatcctgtgaaagacccagagctcctgggttattacatctactcccggaaggtggggacatctgagtggcaaacagttaacaacaaacccatccaaggcaccaggtacgtctgcccacccgtatcagtctgttctcacactgctataaagacatacctgagactgggtaatttcttttataaagaaaagaggtttaatcagctcacagttctgcgacctatacaggcttctttttctggggaggcctcaggaaacttatgattatggcggaaggcgagggggaaggaagcatgtcttacatggcgggagcaggagagggagaaagagcaaagcaggaagtgctacacacttccaaacaagcagatctcatgagaacttgctccctatcttgacaacagcaaagcggacatccgcccccatgatccaatctcctcccacgaggtccctcccccaacactggggattacaattcaacatgagatttgagtgggagtacagagccaaaccagatcacccctcttcctgcaccaggcatccttgaaagggggccataatgataatgaagcccagcatttcacaatatttaccctgcgccaggtactgttctggcatttttcatatgtgaggtcatctagttctacctgcaagcctaaatgtgtaggactattatttttattattttacagatgaagaaactgaggcatggagaggttacataacttgccaaagccccttgtagcttagtaaatggcaggactgggacttgaacccagatggtctttttcaacaaactttgttgagaatgtgctatttgcaggactccatggatagagatgaccatgccttggtctcatccctccaggagcttaaacccagagagaggtggggagggcagagcagtggagagctttggagccagggaggcctgagttcaggctccataccacccctcaccctttctgtatcagtcagggttctctagagggacagactaataggatagatgtatataggaaagggagtttattaaggactattgactcacacaatcacaaagtaaagtcgtacaaccggctgtttgcaagctgaggagcgaggaagccagtccgagtcccaaaacctcaaaagtagggaagccaacagtgcagccttcagtttgtggccgaaggcctgagagctcctggcaaaccactggtgtaagtcccagtccaaaagctaaagaacttggagtccaattttcaaggtcaggaagcatccaacatggaagaaagatgaaggcctggctgagaagagctccctgcaaaacaagatttgctctaggagaacgttgataggtgaagagagagaaagaggtccacaattgggtcttatcaagaagggacaggatgagaaggacatttttctctaagctagagcatccttgcgtgtctctggatgacaattctctttgagggctctgaaaggactcggtgtttttgcatcccagcattagtgcaggtattaacagccacatgttctttttcaaggacaaagcccaaagtcttgaagatgtaccatgtggcgctgggtttggggttggctgcctttgctttaaattagaacctttcctagcgtatttgcgttttaagggtggatctggaaaagcaaacatcctttaaaactcttaggtctaccccctccacggtgtcatctcaggcattgccatgggatcaagggcaatatttttaggaagaattgacctgaaccttcaaattctaccacgctggtgaccacttattccacaaagttgttctagcaagtttgggaatgtctccaggctgtttgtacatccatgaaagctgcacatttctctcccaggtttacagttcccgggctgaggacggggaaggagtacgagttttgtgtcaggtcagtcagcgaggctggggtaggcgagagctcagccgccaccgagcccatcagggtcaagcaggctctgggtgagtccaagggcaggtccagcctgcaaacctccctgggctgggcagggagctggggctcatagatcacatcttggagggcccagtcctggtggccagtggcacatacgccctctgagggaaactggagctggccctggctgccctttcctttgggaaggaagtaaccatggcttgaggccatgggatggggcctgagcagctctggggggtggggaagccctcagacccagaaacctgaggctccgatgccctcctgaggcacagatactactggctcagggaaaaacccctggagtagggcaggcaccaactagaggaggctcgtcagctccctcaggccccactgtccaatccagccacccctagggagcagctgtcctcacctccttacctccctgtagctaccccgtctgccccatatggctttgccctcctgaactgcgggaagaatgaaatggtcattgggtggaaaccccccaagcgtcgtggaggtggcaagatcctgggctacttcctggaccagcatgactcggaagagctggactggcatgcggtcaatcagcagcccatccccacccgggtctgcaaggtagggctggaaggtggccccagcctgtgtcatgacttgtttagcagcgaccagagggcactgcttgagtcttggagtctgacagaggctgacagaagtctcaagttcccctgcctcagccatcgagatcattttccagtgcagacccaccttgaacagaactgtttagagccaccaagcttgagctgggattgcttgagctcaggagtttgggagtttgagaccagtctgcaacatgttcaaaaccctgtcttgacaaaaaatacaaaaattagctgagtgtggtggcacgcgcctgtagtcctggctactcgagaggctaacacaggaggactgcatgagcccagaaggttgaggctgcagtgagccatgttcatgccactgcactccagcctgggtgacaaagtgagaccatgtctcaaaaaataaaaataaaagcaaagcccccacag

SEQ ID NO: 1664 - DNA, 3827 bp, Homo sapiens
attctatgggttttcttcagtccctggacagatggagtcttattctgtcgccaggctggagtgcagtggtatgatcttggctcactgcagcctccgcctcccaggttcaagcgattctcctgcctcagcctgctgagtagctgcgactacaggcgtgcgtcaccacacccagctaatttttgtatttttaatagggacatttttagtatttttagggttttaccatgttggccaggatggactcgatctcctgacctcatgatccacctgcctcagcctctcaaagtgctgggactacaggtgtgagccaccgtacccagcctcgaaggttggtcagcacattgtctcaagtagccttttgatgtcactgtggccatggccaactggtaggaccagcaccccataccccgaagccagaatgaccgaagaagcatgccgaacacggagtcagaaacgagcgcttgaacgggacccaacagaggacgatgtggagagcaagaaaataaaaatggagagaggattgttggcttcagatttaaacactgacggagacatgagggtgacacctgagccgggagaggtccaacccaaggattgctgagggcaacagaggccacggccatggccatgggcagaggcgaagggctggtgggcgatgggcccgtggacatgcgcacctcacacagtgacatgaagtccgagaggagacccccctcacctgacgtgattgtgctctccgacaacgagcagccctcgagcccgagagtgaatgggctgaccacggtggccttgaaggagactagcaccgaggccctcatgaaaagcagtcctgaagaacgagaaaggatgatcaagcagctgaaggaagaattgaggttagaagaagcaaaactcgtgttgttgaaaaagttgcggcagagtcaaatacaaaaggaagccaccgcccagaagcccacaggttctgttgggagcaccgtgaccacccctcccccgcttgttcggggcactcagaacattcctgctggcaagccatcactccagacctcttcagctcggatgcccggcagtgtcatacccccgcccctggtccgaggtgggcagcaggcgtcctcaaagctggggccacaggcgagctcacaggtcgtcatgcccccactcgtcaggggggctcagcaaatccacagcattaggcaacattccagcacagggccaccgcccctcctcctggccccccgggcgtcggtgcccagtgtgcagattcagggacagaggatcatccagcagggcctcatccgcgtcgccaatgttcccaacaccagcctgctcgtcaacatcccacagcccaccccagcatcactgaaggggacaacagccacctccgctcaggccaactccacccccactagtgtggcctctgtggtcacctctgccgagtctccagcaagccgacaggcggccgccaagctggcgctgcgcaaacagctggagaagacgctactcgagatccccccacccaagcccccagccccagagatgaacttcctgcccagcgccgccaacaacgagttcatctacctggtcggcctggaggaggtggtgcagaacctactggagacacaagcaggcaggatgtcggccgccactgtgctgtcccgggagccctacatgtgtgcacagtgcaagacggacttcacgtgccgctggcgggaggagaagagcggcgccatcatgtgtgagaactgcatgacaaccaaccagaagaaggcgctcaaggtggagcacaccagccggctgaaggccgcctttgtgaaggcgctgcagcaggaacaggagattgagcagcggctcctgcagcagggcacggcccctgcacaggccaaggccgagcccaccgctgccccacaccccgtgctgaagcaggtcataaaaccccggcgtaagttggcgttccgctcaggagaggcccgcgactggagtaacggggctgtgctacaggcctccagccagctgtcccggggttcggccacgacgccccgaggtgtcctgcacacgttcagtccgtcacccaaactgcagaactcagcctcggccacagccctggtcagcaggaccggcagacattctgagagaaccgtgagcgccggcaagggcagcgccacctccaactggaagaagacgcccctcagcacaggcgggacccttgcgtttgtcagcccaagcctggcggtgcacaagagctcctcggccgtggaccgccagcgagagtacctcctggacatgatcccaccccgctccatcccccagtcagccacgtggaaatagtgcgagccaggccccgtggaagacgggctccctcctcccccacctggcccctggtctagaaggacccactgcaccaccctccgctggctcgggaagacaccgtgcccgccccaagagcaagcaccggccatgctgcagaggcaagacctcaattcttggctgcaaagtttcatcagggctagggggctggtgccgcctcataggcagacgaggatcatcgctgggggacccttcccgtgggctttcttcctttctctctttgcctttagtttgcccgacaccagcagaaaagtggaccttgggggctggttctgctcctggcccccttgttcagcccctgccggcacacgggcggctcaccctggacactgtgatgcgcatgggcaaggccagcgcccggggcttctgaaccgagcggggtgtttcatttttttgcttttccctgtcttaggctcccaatctttgactgccttcccatggcgatctataagttgaaagattttttttttttttaatcacctcatgatgatggagttaaaagtaaaccgtgcagaccctggggtccctgttgtacgctgcatcatcccgctggccctgtgccctggagggtgggcggctcatggtgccacagcccctggcagggacggccggcccgcccccgtgactgacggacagatgcagggatggccgaggcagccctcgctccagctgaacgcctccattgctgcttgttctggagacccccgcccccgcaccttccagacttagcagaagaacaaactgaagaacagacccagccagagaagcagggattccagaagctgcccattaagggagaaggagaggatccagtcggcagcagccctgagcagaaagctggaggggggactgtcgcggggtttttctgttgtggtttattttattaaattttttccttttttctattcatttcgatggacgcaatcttaagccaccctggccttgctcctgggaggtgagcgtgcacaggtgtgtgcaggtcaggaggtgccgtccaggtgtgcggcgagccgctgcgcacagatgtcaggatttccgtttgggtctagtttagaacctgtccttaaacctaggggttgctgtcaggatttgctttcagacttttttttttttttgtaattccctttagagtctacaaaaatgtttttaaaaggatcaggtctgcttttagtttcatttttgtttctttcccgtcccactctttaaaaactggttccgtgaggaaaggcagaagccgttccgtgtctcttgcaggctgggccggcttcatgccagtgcgagggcgtcccgtgcccacgtacatacgtatgtctccatgagttctgggctccaccagttccaattgagctccagccctggttttcctacccatgcagttagggactttaatttaattttttttttgtagggccaccgccttcaaacacaactgctacaacattctaataaaggctcatttaaccccc

SEQ ID NO: 1665 - DNA, 3014 bp, Homo sapiens
ccaccaaaccgaccaccacctggtagcatcttggggtttcctgggcgtggcctgtaaatttgtatcatcacaaggggccagtgaccagtaaccagtgaccagtggccttcatactggacacatgcactggttggcttcagccacccagacatccgctagtatcgtctcttcttcccttctatctgcagttgatgtttcttcttctctgaccatgtcagaatatttccaaaatacgtctttacctggaactgcaaattctcggcagttctctcttcctgtggtgagcaatgcagctttcttaacaggaagcatctccaacttctccagagcctctgctccagccatcagctcagcatggctacagccatcagcctctggcacctccttccagccactcatgggcagtgcctacctttaccaacattctagcacaactatgttgtctggggttactggccagagccatatctgtacttcagctgcctcttatccaggcgtttttgagtgggatagtacagcaagcacagtaaagaagtcatcctcactcagggacttcactgtgactgtcattgatcagaacacagctgtctcttccatgtctatgacagcccagtattataaaacttcagataccaatactatggtccctctgtatccatcactatctgccagccttgttcaggggacactaactcaaattccaaatcagcagggccataacctgtcacttccctgccagataggaagccaggtctattactataatcaaggcacactggggcctcaactatcctgcctgcaatcttatggctctgtgtcatacacaggatatagggcttctgcccatcaaccagaaatggtgatggtgctgaaggaggttcagcccacaaatgtcctaccaccagtctctacttctgggatgtattactctgtgtcttctcaacccatcacagaaaccagtgttcaagtgatggaaacttccctggggatggatacttccctgggattgcaatctccaagccagacattttgtctgccacaaactccagaattctccaagtccttcagtagcagaaatacccagacacttgagagtaacccatcacctgagcttggggacatttcaataactccagtccagagtcctactaatctcttgacactgtctccagctccaagccaggaaaaaaaatgagaatgagaatttggatgagattaaaaccaacctttcaaagcctctagatgtccaccagatcctaataggaaatcaagatcctccactacttcctgtagaaatccccgatattcacccgcttctggcctgcattgatcctcttggccaagaggagcagcctggttctgaaaatgccaatctaagaaataagagcctgagtcttgaggaccaagggatatttgaaaatgggattgagtctagcagtgatttggcagacatcactacatgggtggaggatacttacctccccccgatcttcagttccttacaagatcttgaccaacctgaaagtccctcagcaaagaaagccaaagataccagtgccatcaaggtaaatcaggtgcaggaaaagtcatgtgtcataaagggtcactctgatcaagtcaggaagaacaagcataaagcttccgagcctatccagggtgctcccaaggccaaaatccagccaaagaacccagagtgcctattagagagagaagtggttgttggcagtgctacagtcagtaacagcgcttctgtgaacaaggccaagcattctagcaacaaacctcacaaggctgcatccagcaggatcagcaaaactaagagccatgggcaggaaaagaccaaagggaacagaaagaacagctccaagaaatctgaagagagtaagcagtcagggaaaaaagtcaaggtagaagagaagcaaaccattcccaatatgaaacggaagaaaaatcaacctgagcttagccaaaagacccttaaaaagccccgaagctccctaggcatgcacatgctagagtccgtgcaagttttccatgcactcgggaaaaagatcgatatgaaaactggattctcttcctccaggaccctgggaagctcaagcaacacccaaaaccgccagccattcccagctctcaaaccatggctggatatccaacatgagggtaaaggcccggagaaaattcaagtcaaggcccagaaactagatggtagtgctgaaaaagagtgtacatctccatcccactctgagttgccaccacctgggaaggtcaagttgatacctttgccctttctgaccctggaccaacctcaagctcgacatgtttctcggcggccaaaccctctagcctcacgtaggcctgctgtggcttaccctgctcgacctgattctactaactcagctcaatcgaatgcagtcaatccatcccgaccagctcctaccaacacatctttgacaggtcctgccacaccagctcagccaatttcagccaaagcaacccaacccagttcagccaaccctacccagcctactgtccctcaatctgctgcttctaggccatcagcctacaaaacatcatcttgttcttctctgcagcgggagcctgtttccactgctgtgaccagtctccggtcactgcccaagcctcaaaatcaatttctaatccaagacttcagcctccaaccccgtccatggaggaaacccactgttcctgagccagtaatgtcaacgcccatcacagaagagcagaggccagagcgtgaggccatgaagagaaaggctcaacaagagcgtgagaatgctgccaaatacacctctttggggaaagtgcagtttttcattgaaagggaaagagatatggaaattgctgaatactatggctacacaatctaagagctgagattgttggttttactttggataccgctggttttccacatatatagatagatactaatttatttattctgatatatttttaaaacataataaagaaatgtaatagaattgattaat

SEQ ID NO: 1666 - DNA, 3210 bp, Homo sapiens
tagtgaatttctttttcaccttttggtgtctttagctacaaaactccagggagaatctttaaataatggacataatcaaagcaaaaatgttctaaacctctgtcagtccaaatggtgaaaaacgtgcagagatagcctgagggaggattgacaggtggatggaggctgaggaggccccagggagcccaggaagcttcttagtaggcgataatctccttcttgcatggggttgagaaaccttctggaatgcagggtggggaagctgaaggaggctggggtttggaatccggtctgagtcccaggcccctcttacaagctggagacttggggcaggtcagctcgcctctctgtggtgccggtggggctttcagcaggttaggaggaagcagcggaactgggcctgagactggcgacttgctgtctccctcactgtctcactctctccatctctctccccgtctcactcccactcactccatctcccactctctctcattctctcaccgtctcactccgtgtctcatttgctctctcactcattcttttctctctccctcactctccctctgcctctctctccccctccgtcttgtgcacacattgacaaatggtgcctgagtgctcgctgataacctgcagcccatattggcagctgccacactgctccctcagggaggccttaagcttcgtggcttgcatcctgtgcctgagtgaagcatcttatcctgagtcccacagatcttgtcgtgagtttcctcaaactgttgaagtacagattagtaggtaacccggctgggcgcggtggctcatgcttgtaatcccagcactttgggaggccaaggcgggtggatcacgaggtgaagagtttgagaccagcctggccaacatagtgaaaccccgtctctactaaaaatacaaaaattagctgggtgtggtggcatgcgcctgtaatcccagctacttgggaggctgaggcaggggaattgcttgaacccaggaggcagaagttgcagtgagcggagaccatgccattgcattccagcctgggcaacgagcaagatgacgtctcagaaaaacaaaacaaaacaaaacaaaacaaacaaaaaaacaacccactgacgctgaaaaaacactgatttgtttctaaatcatgaagctttgctgcttgtcttgcatgtagggccttttagcctgtgtgttgctgtccgtggccaatgaccgaacccctgcattggagcttgcagtgaagtggacagctccggcatgagtcctcccctcccttctcctcagctttcccagaaaatccttccacgtgtggccgactgtggagcatgcctaactctgctgacatgtcttccttggatgatcgtcacatttggtgtccagtaagccttcatgaatttatttctgcctcagcagccttaattttggttgacattaccatgttgcaagccctgaaccaggaagttggggtctggtggccccactgccagtttggatgaggggtactcctctaggggaattctgagctcagagggtcccccagagtagtcgaggggaccccagagtagtcagggggccagaggaggtttctccaagtggcctgagggtacctccaaggcaaagaggcagatgcaaatgagggaaaggcatgctccacccaggagttgcagctggaggggtgcccaggaagaaggaagaagtgaaataaggatgcgctgggagaaggtgaagacgcagtctcatcatgtattgaaagtgtgatttcactgtggaggcaacgggagcccctgaaggagtaatcttgttactcctttaaatatgcacatgctacaaaatccaaaagatgcagagggtatgctgaacagtgagtctctcccatcctgttcgtcatctgggcccctttctaggggtgctgccgtgccctgtgtgttcatgtggagcgatttcacatgaacacaagcgaaccctcacactccaagctgcagctttgtgctgctcccttgctgttccttcagatgctcatgccacagttgcccatccttctatttgtgatgggcatttgtgtgctcctagacttttttcgtgtgtgtgtgtgtgtgtgtgcatgtagtgtgtattttcatgttattaagcatatgttgccacgattactcttataactcttatatatgggaagactagatctgtctgtctgtggggcatggtggtggccaagggcttggtgttcaccagagagtgttgcagtcacctgttcaccacccctacccacaccccgctaccctgccccagcctgagatcctgcctagatcgtcagcatgcagtcgagggcctggctaaagttgatcgttaataaatctgacaaattaaagatgacaggaatagccaaatgaataaatgttgataaccgatcacagaaggcttgagccaggattgccgtagcagacaaaaccctgtcatgttgctctcagaagacaattatttatttaacttttaaaatctttagcaataactctagtcttctgtgggctaaaagatctaggaaaacagcccactaaatgtctacatatgaacacaaggaagtactgccaaggcgttctttacttcattgtcagtaatagtgcaaaatcagaaacagcatgagtatccgtcattagggtagtggttaagacaaaatcatggcacatctgtgctgtggaatgctatgaagtcatcataaaaatgagactgttctatatgtctactcatggaaacagcttaagacttctgaaagcagctttattaagatataactcacatactataaagtttaactatttagtctgcaagttaacggtttttagcataactatcactgcagccgattttaaaacattttcatcaccccagaaagaacttttagctcatcttcctatctctccatatgcctcccccagtcctaagcaatctctagtctactttctgtctctatagatttccctattctgggcatttcatttaaatgcaattatataatatgtggtcttttgtgcctgtttttttcacttagcatgttttcaagtttcatccatgatgtagcacgtatcagtactacattgctttttatggaatggtatggctataccacacttcgtttgtcaattgatgggtatttgggtttttcccaccttttgtctattatgaacaatgttgctatgaacgttcacatac

SEQ ID NO: 1667 - DNA, 3337 bp, Homo sapiens
aagaacaaattcacgttttgtgaaggtggtcctgatgtcggctaccatcagctgtaaagagtttgcagactactttgctgttcctgttcaaaacaagatgaatcctgcatatatttttgaagtggaaggcaagccccattcagttgaagagtattatcttaatgatttggagcacattcatcatagcaagctctctcctcatctcctggaggaaccggtgataactaaggatatatatgaagttgctgtctctctcattcagatgtttgatgacttagatatgaaggagagtgggaacaaggcttggtcgggggcccagtttgtgttggagcgaagcagtgtgttggtgtttttgccaggtctgggtgaaataaattatatgcatgaacttctcacaagcctggttcataaaaggttgcaggtctatccactccattcaagtgtggctttagaagaacagaataatgtctttttaagtccagtccctgggtacagaaagattattctgtccaccaatattgcagagagttctgtcacagttccagatgtcaaatatgttatagatttttgtttgactagaactttggtctgtgatgaagatacaaattatcagagtctgcgattgagttgggcctctaaaaccagctgtaatcagagaaaaggccgtgctggacgagtgtctagagggtactgttaccggctggtacacaaggatttctgggacaactccatccctgatcatgttgttcctgagatgttgcgttgtccattaggaagcacgatcttgaaagtgaaattacttgacatgggtgagccgagagctctgctggccactgccctttccccgcctggtctgagtgacattgagcgcaccatccttctactaaaggaggttggagcacttgcagtgagtgggcagagagaagatgaaaacccccatgatggtgaattgaccttcttaggaagagttttagcccaacttcctgtaaatcagcaacttggtaaactcatagtccttggacatgtatttggatgtctagatgaatgtcttattatagcggcagctctttctttgaagaatttttttgcaatgcctttccggcagcatctcgatggatataggaacaaagtgaatttctctggcagtagcaagagtgactgtattgcacttgttgaggcatttaaaacatggaaggcttgcagacagacaggggagctgcggtacccgaaggatgaacttaattggggacggttaaattacattcaaatcaagagaattagagaggtggctgaattatatgaagaattgaagactagaatctcacagttcaacatgcatgttgattctcggcgacctgtcatggaccaagagtatatatataagcagcgattcatcctacaggttgtattggcaggtgctttctatccaaattactttacttttggacagccggatgaggagatggcggtgagggagctggctggcaaggaccccaagacaactgtcgtgttgaaacacattcctccctatggatttctttactataaacaactacagtctctctttagacagtgtggtcaagtcaaatccattgtatttgatggtgcaaaagcctttgtggaattctcacgaaatccaacagagagatttaaaacccttcctgcagtatatatggcaattaagatgtctcaactaaaagtttcacttgaactcagcgttcattctgcagaggaaattgaagggaaggtgcaaggcatgaacgtctcaaagctcaggaacacaagggtgaatgtggacttccagaagcagacggtagatcctatgcaagtctcctttaacacatcagacaggtcccagacagttacagatctccttctaactattgatgtcacagaggtggttgaagtgggacacttttggggatacaggattgatgaaaacaactcagagattctgaaaaagcttactgctgaaatcaaccaactgacgctggtgcccttgcccactcacccacatccagacttggtctgtctggcaccttttgctgattttgataaacaacgctactttagagctcaagtcctttatgtttctggaaattctgctgaggtattctttgtagattatggcaataagtctcatgtagatctacatcttttgatggagattccctgtcaatttcttgaacttcctttccaggctttggaatttaagatttgcaaaatgagaccatcagcaaagtctcttgtttgtggcaagcactggagtgacggggccagccagtggttcgcctctctggtgagcggctgcaccctccttgtgaaggtcttctctgtggtgcacagcgtcctgcacgtggatgtgtaccagtactcaggggtccaggatgccatcaacataagagacgtcctcatccagcagggctatgccgagctcacggaggagtcctacgagtccaaggttaatattctcagggctgctattaacaagctagtctgtgatggaccaaatggatgcaagtgtcttgggccagagagagttgcgcagcttcaagacattgcccgtcagaagcttttaggtttgttctgtcagtcaaaaccaagggagaagattgttcccaagtggcatgaaaagccctacgagtggaatcaggttgatccaaagctggtcatggagcaggccgaccgtgagagcagcagagggaagaacacctttctctaccagctccacaaactggttgtgctcggcacctgagcatgtccacaggtggcctccagcacacccctcgggaagctgtggaggctggattccaggctccctccgcagactgactttcctctgtgtctgggtgttacagtctgtgcccactgcatcctaaaggccttttctttcttcttttctctttgggtgatagtcagagagtggtgtttttgttcaggtgggaaggattggaaactctagtcttttctagaaacagaaaatcactgtattaaatattttggaaagattgttctgaaagaagtctgtttggataaagagctgtattttgctttaaatttattaaggtaaatataagtagttaatcttagatgtaaggttccagaatgtgcttacatattctgttctgttacagtgatttaaaccagtagtataggaaaaaacttaaaaaacaaaaaaaccatgtagtattttctgatttttttttccatgagggaaaatatctaatttttataagactaagttgagttatacttcttggttcacattttggaaatcagagattacagattacatggccatagcttatctgtgttaaaacaataaaagcattaaatg

SEQ ID NO: 1668 - DNA, 3188 bp, Homo sapiens
agtgagcactgggatgtggcaaggcagatccctgcttcagagctgcctgggaggactgagctgccagaaccagttcagccccaccacagcccaactcaaattgaaatccactttattattagaattttggtggaaggagaaagcaaatctgagagcaagccaagatgttaaagtggattagctggagacagtccaaggcaaacaaggctcaactctctggtggatgtgagctgacagtggtcctccaggacttcagtgcgggccacagcagtgagctgaccatccaggtggggcagacggtagagctgctggagcggcccagcgagcggcctggttggtgtctggtccgtaccaccgaacggagcccgcccttggagggtctggtccccagcagcgccctgtgcatctcacactcccgaagcagcgtggagatggactgcttcttccccttggtgaaagatgcatactctcattcctcaagcgagaatggaggcaagtccgagtccgtggccaacctgcaggcccagccctccctgaactccatccacagttccccgggtcccaagcgctccaccaacactcttaagaagtggctgacgagtcctgtgcgtcggcttaacagcgggaaggcagatggaaacatcaaaaagcagaagaaagttcgcgatggtcggaagagctttgacctgggatctcccaagcctggggatgaaacaacccctcagggagacagcgctgatgagaagagcaagaaaggttggggtgaagatgagccggatgaagagtcacacacacccctcccaccacctatgaagatttttgacaacgaccctacacaggatgaaatgagtctagaaggaagctcataccgggggagcttgaaagaccctgcaggctgcctgaatgaggggatggccccacccacacctcctaaaaacccagaagaagaacagaaagccaaggccctgagaggcaggatgtttgtcctgaatgagctggtacagacagagaaagactatgtcaaggatctgggcattgtggtggagggcttcatgaagagaatagaagaaaagggtgtccctgaggatatgcgaggaaaggacaaaatcgtgtttggaaatattcatcagatttatgactggcataaggattttttcctggcggaactggaaaagtgtatccaggagcaagacagattggcacagctctttattaagcacgagcggaagctgcacatctacgtgtggtattgtcagaataagccgcgctcagagtacatcgttgctgagtatgacgcctactttgaggaggtaaaacaggagataaatcagaggctgacactgagtgacttcctcatcaagcccattcagagaataacaaaataccagttgctcctcaaggacttcctgagatacagtgagaaggctggtttggagtgttcagatattgagaaagcagtggagttaatgtgccttgttcccaaacgctgcaatgacatgatgaatctaggacgtctgcagggctttgagggcactctgactgctcaggggaagctgctgcagcaggacacattctatgtgatcgagctggatgcaggcatgcagtcccggaccaaagagaggcgcgtgttcctcttcgagcagattgtcatcttcagtgaactgctcaggaagggatccctcacccctggctacatgttcaaaaggagcatcaagatgaattacttggtcctggaggagaatgtggacaatgatccctgcaagtttgcactcatgaacagagagacttctgagagggttgttctgcaagccgccaacgctgacatccagcaggcctgggtgcaggacatcaatcaagtcttagaaacacagcgagactttttgaatgcactgcaatcgcccattgagtatcaacggaaagaaaggagcacagctgtgatgaggtctcaacctgccaggcttccccaagccagccccaggccctactcctctgttcctgcgggctcagagaagcccccaaagggctccagctataacccacctctgcctcccctgaagatatctacctccaatggcagtccagggtttgaataccaccagcctggggacaagttcgaagccagcaagaacgacctgggaggctgcaatgggacctcgtccatggccgtgatcaaagattactatgcactgaaggagaatgaaatctgtgtgagccaaggtgaggtggtccaggtcctcgccgtcaaccagcagaacatgtgtctggtgtaccagcctgccagcgaccattcccccgccgccgagggctgggtcccaggcagcatcctggcgcccctcaccaaagccacagcagcggaaagtagtgacgggagcatcaagtaagtgcctcgttggcttccccgggagaggagtatgaggattaaaaatattcagaaacaaacaaaagaacacaaaaatgcaaacacatggtagggaattactactgcttattctcaacagtaccacagaaccagtgtttgagtgctgacaccatatgcaacatggggcatccgggctggagtgatccagttttttagttggtggtggcgatgatttttctttccttttggtttataattttctgttcatttttccccctttctcccccacattcattaagaaccctactgaaaccctaggtgacaaaaggtgtgccttctgttgccacatttgacccaccacaggactcactggactggacttctatttatattgtattaagtaactgatatatatatatatatatatttttgattgacaccaaaaaattaccttggcacaaatgccagacctgtgaaggtcagaggcccgctgcttttcccaggagggagggaactttttggttgtctgtggcaattcctctgtacagattgtaactttttaaaaatttcccttcaccccgtcacttgaatatatgttcatagtaatttgtaagatacttcttttccttattttggttgcaagacccttccgaacacattcctgtataaagtattttgcactatttaaagaaacccatatggatgaagtcaggatgtgcaatatgatggcgtcacagtgctcatcgttgtacctgtaatgtaactaatcagtttaaatgtactattttaaatatgtaaaataaattttcaccatgagcatgttttaatg

SEQ ID NO: 1669 - DNA, 3300 bp, Homo sapiens
tttcaaactgtcctccaacaaaggtaatataggaaaaaagatccaccagcttagaggtaaaaaggagtgaacaaataagtaacactcaatagttttaccaaattttcaaacatacttttactacatctttttcaagtaacatgctcttaagggcagttaccatcgatatgtcactatcatgtgcgtttctcaccaagctccttttacatgcaaaagcctgttatgcaaactccacccaatatagtaaacatttcattaataattacatcaatagagtttacaaacttttcacctatttacttgcatttttaatctttcttcttaagacttcatttcttttcttttaccttgtcgaatgtcttgccaaactgactaatgtttttagtgtttcagtatgtttcgtttcttcaccagcttcaaaagaattctgtcatctcaaatttcaggggcttttccacattactaaaaacagatttttctcatttagaccagaacttctagtctaagttcttcattgttaggaatttaactggccttctggctcaggtctttggcacctgtgacatgaaacgggctccaaaatgtaatttatgtaactctcaatcttgtatataaaatgaaatccatgaaggaaaaaaatataattaaaacatcaaaagtttaaaatttaaaaaatcctttactttgaatttgtaaaccaaattaatgagtcactttaaacaatatcttttaagaaaattttataaggttcagtcagaactctcacattctaaaaagacgtgaggtagaatttttccctgtgtacactaggtccttttcttgtcacctggcctcaaatttttctgaaagcagaattattaccagctttacgtatcttgcctattaactcccaacaatgccccaaagcaaagagcataatttgtggctcctggtgattagatttatactttaatttgtcaagttttaaaatttttttcaatatgcccagttacatccatttcaaatgattctggctgatgtctttcctagagacctgatcatttgtatgtgtgaaccatcatgatacttctttaatgaaaccatctgtgactgttctatttcctactttccagttgatgtttcatgtggacaatggtgcgggcagattcactgctgtctatgatgctggggttccagggcatttgtgtgatggacaatggcataaagtcactgccaacaagatcaaacaccgcattgagctcacagtcgatgggaaccaggtggaagcccaaagcccaaacccagcatctacatcagctgacacaaatgaccctgtgtttgttggaggcttcccaggtgagtgttggctaccccagcaacaatttctttgctctcttatgttactggttttgaaaacatttatatttacatgtgtctaagaatgtgtgcttatgtgtacttgcttcctagctttagaatctgcttagaatctgcaccttacctaaaatttccagtgtgtaaaatgaacatattacttatataaaccacatgggactgaacttttcatgagagcccccaaagtttccttcgtggagagattgaagctggaggaaatgaatttggcttataaaagatatgaggcatttaacagcaattggagccaaacttggtgttctttctgatttttttaaaattaatataccagaggaatcataaaatgttatggaacttatttcctcaagttctggaaatcattgggttaaacatagctaatttcccccttatgttattatagagtttatatttatattacaaagaaacgcaagcaataaatcctcattcagaatccttctctagcacattaaatatagcatgtgaactgtagagatttacctaaagtgcccataaacaagagtggccaacttgatgagaagtaagccaagtgcctcttaataagtactgtaataacatagcctcctggaatggtctttcatcattttgtcaagaggaacttttatccctgtttatataaagctcctttgctaaatgaaacaagcaaaatgtatattcagcaattgttgacagagcaatgttgatagaaatgcaatgggggcccaacgacagctcctctttccaaagtggcttctgtgttttaaaaagatcttttgcttcaatcaggataaattccaagatattatgaaggaggtaatgtacttctccattcagtctatgataatgggatcctaattaacacctagtaggcctactgaaacaagcacctctataataagaggaagattctacatgaatatccaacctacttaacctttagggatttatttttacaatgtaagaaagtgataaagtcaccttcaaaaagttctaagtcagtacttaaaagtatttgatcaattgctttgtttcatgaagtaacattttacaattttaagtcacaactataaatttgttcatcccaaaccaagttatttcatgtcttaagatgtataattctagatgttttcatatgttataactattaaaaagttgaggctggacatggtggctcatgcctgtaatcccaacactttggaattacactttgggcatagatggggagatctcttgagcccaggagttggagagcagcctgggcaacacggcgaagggaggatcgcttgagcccaggaggttgaggctgcagtaagccttgattgcgccattgcactccagcctgggcaacagagcaagaacctgtctcaaaaaattttaagttgatctttctttctctacaattctattagtaaggctaaaaacaaaaccactaactttgcataaaacagcattccaatttaatctcaagctaacagttgactttgaaacatgctcttaatatttggtgcaggacatttcaaagctgagccctcttgcattgcctttttcagatgacctcaagcagtttggcctaacaaccagtattccgttccgaggttgcatcagatccctgaagctcaccaaaggcacaggcaagccactggaggttaattttgccaaggccctggaactgaggggcgttcaacctgtatcatgcccagccaactaataaaaataagtgtaaccccaggaagagtctgtcaaaacaagtatatcaagtaaaacaaacaaatatattttacctatatatgttaattaaactaatttgtgcatgtacatagaattccttctgtattcagatggtgctaattcagactccagactgaattttaattcaagttctttctcaagtctataaatattaaactgattatttcattctaaataaat

SEQ ID NO: 1670 - DNA, 3218 bp, Homo sapiens
cattttctctttgtggaggctgggttcgcgtgctcttctgagctgtggtcgtcatggaccggaagcgtgtgcggcgcgcctgccttgaggccagcatcagggaagggtgtcccaggtgcaggcgaagcttccttcaggtgctcctggaggacttttggctcgcaagcgcttctccattctcccaacgtctcgggcctggtgagtctggatgtgagcgcatcccacggggcccaaggcacagagagagggaggaacggggtggagggagggaagcgtgtgcaggggccaggagcgccaggctgctcgggcttcccggcccccgcagcccgccaggagctgtggccccgctcgtgccaaggcagaggcctgccctcctgctgctggcgctgtcacctccccgtgctcctgcctcctgagtccctgagggcctcctgtcatctggaactggaaatgttagtgaagtgacgttttgtgaatatttattggcctttgcgtctttgtcttcattttcagtgctggcttttctgttgggtcatttgtattcttacgttgatttgaagaatttaaaaaggtattctataaattaatcctttatggggtcatttgtagtgcagatagttgtttcttagtctggtcattgtaccttaattatatttcacatttctttcttgctggtaaataagaagctaattgattttatagattgattttgtatcgtgttacctggcttaattcacatattcatagccatcatttttggattgtggtgggtttttcatgtacttatgtacatgtagttatgtacttacgtacttacgtacttaaatacttacgtacttagtgtcagccacgcgtgtgtctccatccttgtgcctgaagcctgtatcttctctccagtatcaccatcccgtaatgactgaagcccacgtctgcccttgtgtattgtcacctggtctgtcctctgcctgcactttatgccccctgtcagaagtctccatttcttggtcctgcagcccgtgccagccgtgtgagtctccatcctgtgtgcttgcagcacattgcttgccttgaatgttgccatctccttagccttcaggcagtagcagtcctccagtgcctcaatccctgtgtttgcagcccattctgatgtttttgtccgtctgtcccctgagcttctgcccatgccagcttatgtttgctacattctctgtccccctaatccgtgtccacagtcagtgttttcatccatgctttttgggccatgtctgcactcgtgtgtctccttcccctgtgccttcagcccatttctgtcctttttctggatcatttctcccgggagactgtgcccaaaactcctatccccagtgtttgtacgtgcagccagtctatttcgttgagtatctccgtctgttgttactgcagcagaggcgtgtcattgagtgtgcctgcttcccatgcctgtcttcctgtgtctccagcccttgtccatgcagcccacattaggactcttgtgactccacccttcagcctacagccacatctaccttcgggtatctttatctctgtgccccctgcccacgccaaccttcacctactcctctatcctgcacctttacccgtgtctgtccctggtgtgcctctctgccatgcagctgtagccagcgagctccctttttgtctggatcccctgtgattgtagcccaggtcttctctcctgtgcctgcagcccgtgtctgcccttgaatgtccccatcctctgtgcttgtcacccactggccaggcctagcatgtttccactctgtgcctacacccatgtctgcctccagggtctccactcatggtgccacagtttggttcccggtccctatcctcctggggtggattctggcattgtgttgggagggagaaggtgacccatgaaagcgaagcctggaatgatgtaatgggcaaggaggctgccattcagcaggctgcacagtggcagagaagacatggccagtcagaatcctccctgcatcggggcactcacgtggggctgtgcctggtgtggggagtaaggggaagctggagtaggaggtctggagccacctggccctcttgggcctgagaccctccccactgcaggggctccatcacttccctggtggtcctgcctcctgggatcctgccctgcagtgtttctgcagggatcctctcacctggaacttgcagtggcgggtttcatgtgaggtagagtttagcaaatgtttattggcgtctgggccttacttttcttcatatgctttgctcattttgtgcgtgtttttgtagggtcctttttttatatttatttgaaggatttatcttaaatctgcaaattgatcctttattggctcatttttgtcatagatacttgttctctagtttgatcattattttctattggtttcatactagtatatagtaatctggttgataacaataatgtatccagtaagttattaattgaaacagttttggggtttccaaggattgtctaggcatgtaatagtgtcatatacacataatgacaattttttttgtttaaaaattaatcctaatgcctttttatttcctactgtattgtttctccactacaatgctgattaaagagtgatagcaggcatcctcgtctgttcttgcactgggggaaaaagcttcccataattctctgttagttatgttatttgttattggctagtattagactttatcagatttcatcaaattaaggaagttgctttttttttttgagatggagtcttgctcttgttgcccaggctggagtccaatggctcgctctcagctcactgcaacctccacctcctaggttcaagcgattctcctgcctcagcttcccgagtagctggcagggaaaacccagctgcagcctagacctagcccagatagtaaattagcagggctgggagtctctgtcatatcagcagtcatatgtcttaaaaccagaatctacccagattatatatatatatcttgtatctgccgctgccattaccttcttttcactttatgtcaaaaaaaggaaaagaatcccagcactgaggcaggaggattgcttgagcccaggagtttaagtctgcagtgagctgtgatagcaccactccactccagcctgggtgacagagggagaccctgtctgaaaaaaagaaaagaaaagaaaacctgtcatgttactgccc

SEQ ID NO: 1671 - DNA, 3053 bp, Homo sapiens
aactgccacctgggagactgctggtaaagatgggaggtggcctttgccgctttccatcttctcactgcagtttcttcacgtgggccacttgtacttaaaatgtcttcttaatttattctttttacttccccagctccaatttgtctacagatttacaaatttgttttatagttttatgactcaatttgtattttcggtcctatgaagctttttgccttaaatatttttctctgtttataagaatgtgctgtttcctaggccagttttgtacacactcttccatagaatagatccagaagaaacacaacaatactgccttcatcatatcaggagatcttgataccaaatacgagtgttgcctccaagatgcaagatcctgagggctccaaagaatccactgtccgtcgcaaatcgacggtccgccagctcagtttcagagacgtggtgctccgctgcaggcctcatcctcaggtgcaccctggcagtcagccatctgaaggtactatggaaattcagttactcactcttgggagcagaaggattccagaccattcctgtgtgcaccctggcagggagccatctgaaggtactgtagaaattcagttactcacccttgcaagcataaggattccagattcttcagggtcccaaacttcagataactctaaaattgctacactatattcttctttatttcatgtgtgccaatttaaatgtacaagtcaatcactagtgctacaaatgcagaagtaaagatgtatttccacttcaagtttggttcacttttaagagtaaagaacacgtcaatgcaaggtttagatattaatgcaaggtttagatataatgtctagctgattgttagacattagctaaaatggaactcttcctgagatagcgttgccacattttcaaacaaatggacatcatgtgaaacttgtaaattaacttaaaaattgcagtagtacagaaagttcccatataccctcccccctcagtatcttttttgtgaccacatcttacatgaatgtggtgcatttgttatagtggttgaagcaatagcgatatcttcttcttaatgaaagtctagagtttgcactaaggctcaccctgtgttgttcagcctatggattttgacaaactcgtaatgtcatccatcacccagacagaagagtttcacacccaaaacatgaccaatgctgaacctattaatccctttcttcttttcctaggacccctgactactatagatcatttattttattgcctctatggattttctttcccaaaattctatagaattggaatcataaagtatgcagccacttaggactaactgatttcgcttagcaacatacatgcaagatttcatatctttttgtagcttaatggcttacaaatttttatcagtgaatcgtattccattgggtccatgtaatggtgtgggttggtgcactcaccgcctgaagagcatctcagctgcttccagttcaggcaattacgaatacagctgccctcattcttgtgcagattttgcaatgggtgtaattttaaaatttaactgggtaaatgtttagaattttaatcagttttttgtataataacactatgttttcctttgtaagaattaggtagaattcagtaaaatctactgggcattttttaaaaagttattgttggtttaatttctataatacatacaagcctactcagattatctgagtctcctttgggtagttatggtttctgcctttgaaggaattttgctgtcagatttgtgagcatagatttattctaagtattcctttattatcttcttcatattcatgggatcagcaggaatgattcctctttttatttacattatttataaattgtgtcttctatcttttctctgtggttagcctggctggaggtttatcaattctgtttatcttttctaagaagcagcttttggttttgttttgttctctgtttattttattatttctattataatgaatatattttttttctatgttaatgttgggtttacattacacaatacttttttctctagtttcccaaggtggaaggtaagaaaactgaattaagattgtttttagttttctagatagcattgtgaatggaactgatgtcacagaagtgtgcatttaataatcaaaataatacatattgtgtatttttcaccaaaataatgatttaaaatccagtaatatagatggtaagtgcagaaggagcatatgtagattcaggaacgttaaacattgtaactttttttaaaaagaggatatttaccaggcctctttctatgaggagaccctgtcctggagtgatgccgtgcatttgtgtgctgcctgggtgaacactgcctacttcacagtgatgagggtggcttagacagagacccgaggctctgtcctccagggctctcctgatggtctcctttaccttccttcaccaccaaggagggtggcccagcagcagctcagcctgtgctctcacccacctcctctgcacacaccagtcctcgtcctcagcacccaaggctgccagaggtccttcagcagctcccgtggctgacagtgactctacgtttcctagatttcagggaccacctggaggggagcggaccagagagacttcctcggaataggctgtggctcttcacaaggtgtcttctatgctttatttgggagccattgccttgagcgttatttcccagatggttttctaatgtcaccaactgaagaaaagacccatgcacacaggacacagcatgatctgatgctcacagcgttttccttcctctctgaaaacggactcagcgattctggcaagcggtacttactctgagatcacccgtttgctaaggaaaaatcttagtactgagaaaggtgacactttcctccctgcttttgctggagagacactttggttatgagttatttctagcataacacagtttatttcagaagtccagctcaatagcagaccaaggcatgaacaacacatgaaaatttatgttgggaaaatatatattgtatgtctgcttg

SEQ ID NO: 1672 - DNA, 3000 bp, Homo sapiens
gcaagcgcgaagggcccatcggcggcgagagcgactcggaggaggtgcgcaacatccgctgcctcacgcccactcgctccttctacccggcgcccgggccctggcccaagagcttctccgatcggcagcagatgaaggacatccgctcggaggccgagcgcctgggcaagaccatcgaccggctcatcgccgacacgagcaccatcatcaccgaggcgcgcatctacgtggccaacggggacctgttcggactcatggacgaggaggacgacggcagccgcatccgggagcacgagctgctctaccgcatcaacgctcagatgaaggccttccgcaaggagctgcagaccttcatcgaccgcctcgaggtgcccaagtctgcggacgaccgcggcgccgaggagcccatttccatgttccagcctatcattttacttattctcattcttgtattattttcatcactttcttacacaacaatatttaaacttgtcttcctttttacactgttttttgtactgtaaatctttcatcatttaccattcattgtagtattttcagtttgtttattttgttcacccttcaagacaagaagtaaaagaagtataatttctgtagtaaccaatgctataaaaacactgaagactgcttatttctttaaaaagatacaactcatcttaccaagaccaaattcaataagaagcccaaacactaaaatatttcaggctttattttaaaggcaagtgagactgcttcaaataaaacaacttcaagcttccaagaaacagttaagaggaggcagagaagagcagaaacacttctttgctgacacttacactgttgccatggacctacataagcagtgggagaacacagagactaactggcataaggaaaagatggaattactggaccagtttgacaatgaaagaaaggaatgggaaagtcaatggaagattatgcagaagaaaatagaagagctttgccgggaagtaaagctttggaggaaaatcaatatcaatgaaagtgctaagatcattgatctttaccatgagaagaccattccagagaaagtgatagaatcttccccaaattaccccgatttaggacaaagtgaatttataaggacgaatcacaaagatggtctgagaaaagaaaataaaagagagcagagcttagtcagtggaggaaatcaaatgtgtaaggaacaaaaagcaacaaaaaaatcaaaagtagggtttttggatcctttggctacagacaaccaaaaggaatgtgaggcctggcctgacctgaggacttctgaggaagacagcaagagctgttctggcgccctcagtacagctcttgaagaacttgcgaaggtgagtgaagaattatgcagctttcaagaggaaattcgaaagcggtctaaccatagaaggatgaagtcagattcttttctccaggaaatgccaaatgtaactaatatacctcatggggaccccatgatcaacaatgaccagtgcattcttccaatcagtttagaaaaagaaaaacagaaaaacaggaagaatctgagctgtaccaatgtgctccagagcaattctacgaaaaaatgtggaattgatacaatcgatttaaaaagaaatgaaactccaccagttcctcctccaagaagcacctctcgaaattttcccagctcggattctgaacaagcctatgaaagatggaaggaaaggttagaccacaacagctgggtgccccatgagggtcgaagtaaaaggaattacaaccctcacttccctttgagacaacaagagatgtctatgttgtatccaaatgaagggaaaacttcgaaagatggtatcatcttttcctctttggtaccagaagtcaaaatagatagcaagcctccaagtaatgaagatgttggacttagcatgtggtcatgtgacattgggataggtgcaaaaaggagcccctctacttcgtggtttcagaaaacctgctctacccccagtaatccaaaatatgaaatggtgatcccagatcaccctgctaaatctcatcctgatcttcatgtaagtaatgactgtagctcctcagtagcagagagcagtagcccacttagaaatttcagttgtggctttgaaaggactacaaggaatgagaagctggcagcaaagactgatgaatttaacagaactgtatttagaacagatagaaattgtcaggcaatacagcaaaatcacagctgctcaaaatcatcggaggatctcaagccctgtgatacctcatctactcacacaggtagcatatcacaaagtaacgatgtgtccggtatttggaaaaccaatgcccacatgcctgtgcccatggaaaatgtgcctgataatcccaccaagaaatccacaacaggcctagtaagacaaatgcagggacacctaagtcctcgcagttatcgaaatatgctccacgagcatgactggagaccgagtaatttgtctggccgtccgaggtcagctgatcccaggtcaaattatggtgttgtggaaaagctgctgaaaacctatgagacagcaacagagtctgcattgcaaaattctaagtgcttccaggataattggaccaaatgtaattctgatgtcagtggtggtgccacattaagtcagcatttagaaatgctccaaatggaacaacagtttcagcaaaagacagctgtgtgggggggacaggaagtgaagcaaggaatagatccgaaaaagataacagaggaatccatgtcagtgaacgcctcacatggaaaaggattttcccgacctgctagaccagcaaatcgtcgtctcccctccagatgggcatccagatctccatctgcaccccctgccttgcggagaactacccacaactataccatttctctgcgatccgaagcattgatggtttaagtctttggcctggattgctatattacagaagttctagtcccacttgtcaaacagagcattctgagtgttt

SEQ ID NO: 1673 - DNA, 3331 bp, Homo sapiens
atggacacaagcagtagtgcacacccgcatcttccatctctaaaggcagaggaatctcaaatgaagactcaagtcatcactcatagggagaacagccgcctaatcatgcaaaagcagaaaaaagaactagaagcatctaatgcaaaacaaagcattcaactacaaaaattatttcaaagaaatgttctggattcattttattcatatgttcctctttctcccaaacgtaaagatcagaaaggcagattaacaataagagatctgaaaagagaattgagcaccaaatatttaactatgaaaatccagaatcacccaattccacagatgcttaatatcacggggcgtggtacaccaagcaatagaaagaaattagagtatgatgttaagttaaagaacatagcttcgtggagtaaagatgtctcaggaatatttatcagaagtctttctatttccatcatgcgttcacctcacactgaccctaagacaaacctagaaagagaaaagagaatctgtcttcctaaattccaggaaaaatcaccaaacactagtgaaatgtctaagagagacactttaacaattgtaaaaggggaacagaattttacaaacacggttccacaagatccccagccctttgcagtggacaaacaacaaatgcagaaacttcctaatgtcaaatcagaagcaaacctcagaagtgaaatgaataaaaaatacttaaaggcacaaacaaaagaacggattgttccagagcatgatgtctcaaggatcattaaaaaaccagacttacgtatcatcgagcaggaagaaaagattctaaaacgcattctgacacccacagagtgtccatctatgcttgaagatccaaagttacccaagcaaagggatcagagtgaaccagtatgggacatgaccacacaaaaggttcagcagcaaaaagctttcccaggaactgtgcccataccgcctcaagttaaaagtagcgaagtcaaaatagttgcagacagtacaaatgcagaacatttacttcccatttgtgaagcaaccaaagctatctctgagtcccaggttaaaaatatgatccaagacaaagtttcttctgataaactagataacatacaagcctataagcctgacgacttgaagtcaccaccttttccagagggtccagatacaatatcaacagcaatatatcccaaaacgcagcacaaatcccttttagaacagtttactcccaaagaaaaaaataagcttactagtcatttagagtcaaaagcacttgaaatacaactgaatctgataccagagatggcaaggaaatctttacaaatgttcaacttttatccaaaagggactatttcaaaagataacagttggaggttctattctagacataaaacaatgaactttatgtctctagaagggactgataccatagaacctaactcaaaacataaacaccaaaaggattcacctcttgccagcaatatgaagacactgattgttgatgtttcaagtgacagtgaggagacaatcacaaagctacagagtattaataagctagaaaatggaacatctgcagtgacttctgctagtgagatgctattgcctcataccctccaaaaccactcagtagaagaaaaaggcaaactcctcatgcacttttctgtgaaaacattggagatacaaatgaaagcctttcccagaattgtaagagaatcttatgcaatgaccagtgctcatgagagaaagaaacccttatctaactgtattcatcctggtttcacaggaccaaaacgacaaaacagaattttgttactttctgaggagaaatctctccatcaaatagatcttgatttacaatacaaataccttcgttttcccctggggcttcctgttggaagtacgttccctaagccaaatgtacttcccaaacatagtaagttaaacacaattgcagtgtgtaaaaacgtaaatgctggtggacaaagtggtagtctttccattgatacagaactgttagaacaacatatttctttcaaaaagcaaagtccccatgaaaactcatcactcatcagaaaattcccacagccaacccttgtgtgtgcttctgaccgtgatctgcacagcccgaggaagaaagatactcaagttctttcagagtcagaattccatgtgactccagaaaaaaacaaacaatatcatgtatggtttcaagaaagaaatacatgtgaatctgttgatttaaggacccagagaaatgctactggttcagctgtttcatgtgaaactcagatttctgaagattttgttgatattcagacagatattgagagtccagctgacttggacgagtgttcatgtcttgaagtaagtgagagtgaggaatgtgtgtttctggaagccaactcttatttaagtcaggaatcagaaaacattctatttgaattacagacaggcattcctttggaaaatgtctacaaaatcacgactgatttgaaatcattttacagtgaagattcaggttcccattgtactagagagtgcagaaaggaaaccttaattattacaccaccttcctgtaagtcccacaaaagcagtaaatatagatcatcttccaaaatgaaatctcctgactggttgtgtcatagttcatcaaatactgcggaaattcagtctaggtcatctagtgtatcattcagtgaagagaagatttcatggactaccaatagcagaacaagttactcttcagctcccttaactgaatcaaatattaaatcacatcttgcaaaaaaccaaggcaagtctcacaggcacccagaaagccaagaaagaaagaaggccagatctgatttatttaggaagaacagcagtcattgggaccacgattacagttgtacacacagcaaagggaaacgtgacagaaagaagagagtgtatgattatgagtcagaaagattggattgtttccaaagcaaacataaatcagcatcaaaacctcatcatgacgatatcaacttctattctgaaagaaaacaaaaccggccctttttttttgcctgtgtaccggcagactcactggaggttatacccaaaaccattcgctggactattccccctgaaaccttaaggaaaagaaacttcagaattcccctagtggcaaagatttcaagttcttggaatatatggagttcctccaaaaagttgttggggtcgctctcggggtcccttactaccgtttttcatagctgacattaccatagctaaactcctctgaagtggacagctggtcgctattgtgatattctgtgaaaaatacaatcatataacatcc

SEQ ID NO: 1674 - DNA, 3366 bp, Homo sapiens
gactgtgctttggtgaaggggcttaatgcctccgctgtcttgcaggagttttaatacccctcccatcctgtgctgtctccttgctaggatcaagacgactgcaaaccagccaaggacaaaggcctcacaggtgctcattgtccacccacaggcgtgtgcccacagaccttcaagaagatggttctcactcctctcgccctttgccctcattgagaaagctacccacagctatacactgggacggagaaggaagctggctacaagatggggcaagcatgtctgtcactcaaacgctggccttcctcgccaagtcacccatttggcacattttcccggatgcccgtgatagtggcattgtgctgtggcattggcctctgctctgtcctccctcttgttctgtctgcccagttcctgtgaagcctagaggtttcttagtctggctcaatgtcttcaacaaagaacacttcccagtccattagggagaaatttcgctgggctcccttttatgattgcttccctccccaaacctgtttctggatgataggttgtcatgatcctggagttctgggcttccatacctgtcttggacaggaaagctccctttgtctgcatgtcccaagtgatggcttcgtggtccatcaaggaagagcgggaggcaaccccactgtggctgaccttcgccttctagaaaagttagtgttgcatcccacctgcccttcctctctcattcctgagggccatcccgttcctctgctcctggggaaagtgcctccaagcactgaatcttttggctgccacggatgtcagggagccaaagggactgggttttgctgggtgcagaggaggtggcatcaggggtacctacaggtggcaggatgtcggtgtggtgtcgtttgttgaaacctcttggcccctctggcagtcatccctgaatgtggcttggactcaggcacaggccctgtctcacaggttttctagtgtgcttggcttttccttggctttgtgtgggaggtcccagtgacccacctgcacatacctggacatcactatccgcctcagcatcgccccatatggcctcaaagacacacactgactccatctgctcttggggaacattagtgccacgtgtggtcacattggctccatctcggactcacctctgtctctccttgcacatgctgcggaaagcagtgtcgggatgccagagccccgaaccttggagatgaagtcaggccactgctccacctaggaaggagggaggcagtgggctcatgggtcagtgcattttcagctgacagttcgccttgcagcccttaggatctttctgtgccccagcgagacccttcccgcctcactgcattgtaaccccattcctgatcacccagtgggatccatagtcaggtcgaagaggattccagagagcccagccacaccctgaagctcctcctccaccggcaaccaaagcagaagaccgatcaaggaggtcctgatgacaggacctctatgggtacaacccttgggtctcccgcaggaccctctcgtagtcctcttcccacccgccgcctcggactgcgctgctgctgccaccgctgccccagtcccctcagccgcgcgtcgccgccattttttaaaggatctgccgccggactctcgggagcaagcggggattcagtctcgccagtgcgcatgcgcaaggcctgagcttccgctttggtcgtagtgattgccactgttgcccgtggatgggtccccgagactttgcgaagtaggagccccgtgtgatagtgcgtcagagttgggtctgagagcagtcctggccaaggcattaacaggatcgtctccagagcctgggattctcggagggttgaccaccaggaagaaacctcagaaggaagaaacctcagaaggtagaaacctcaggcggatcgccggggcggcagcgcgagatcccagcctcaggcccggattcggggagggtcgacgaggcccctttcccaatcttcacttcacccgccgcagcaccagtccccgcagccaccgctccgcggtcatttttcttttctttctttctttcttttttttatagtcggaatctcactctgtcactcagtggagtgcagtggcgggatctcagctgactgcaaactctgccgcccaggttcaagtgattctcttgcctccacctcccgagtacctggtactagagggattagtcagagtcggggctaagaccagtcctggccagggcatcaacaggatagtctctggaggccgggattcacggagggtcgtccaggaggaagaaactgcaggtggagggccgggcaagcagcgcaggatcccaggttcaggcctgcacggacggtgtgccagtgagtctcttcaaaaaaggagaggtttgcttgtgtgcccctgggctgctctctcaccagtgggttgttgtcatggagagcagaaccctgaaaattcaggggctgcctgcgtgtaggtgttaccgtgccactgctgtatgtctttgtgcgtttgtgtgtgtgcgtatgtctctctcttgtttctctctctcccctttctcactcttttgctctgtgtccctgtgtgcatgtgtgtgtgtgttgggacatatgtgccctgtgcgccagaggacggtatcttctatgtccgcctttcttgtggtcagcctctccccgcgtctctgcctggcttgtgtggcccgttgtcagtcatttttctggcggttccagtttaggtttgtgaaggtccagatgaggtgaggagctgcgtctctctcataagaatttaaatcacctccccaccctgagaggcctcttttccaggataaaggcctccacccccaagccaaggataatagcctcaccggagaggtcattgtctacctgcaggagcagtgcagagcgacctgaaagaaggtggttctcattcatctctctctttcatctccttgagaaatctagccacagggtaacacaggttttgagaggatgggaacgggacgtggcaaggatctgtgagtgtgcaggctgtgtttcacatatcattaaacatagtccagtgagggttctgcagataactggcgtttaagtttgttttattgaatcaaggaaaaagaaaaaatactgagaaaaaaatgacgcaacttgcctgccagcccatctgactgttacaaatttaatagtagtttttatttatcttctcatgtaaaggtccttggcagtgatacctaatttcctaagatagccttgctttatattgtgtgattaagatgtcatgcatatcagagtatctggaaattcttctcaacgtcctttacatacgtgattaatcacatttccaaaaatccacccctcc

SEQ ID NO: 1675 - DNA, 2759 bp, Homo sapiens
caaagctgcagtatgcactactctaaagtatgtttggcaaagtaccccatacaatgatgaaccttggtataaccaaaagactcagaaagagcgagagaccttgaaggttttaaaaatgttcaccgacttcctatcatttatggttctattcaactttatcattcctgtctccatgtacgtcacagtagaaatgcagaaattcttgggctccttcttcatctcatgggataaggacttttatgatgaagaaattaatgaaggagccctggttaacacatcagaccttaatgaagaacttggtcaggtggattatgtatttacagataagactggaacactcactgaaaacagcatggaattcattgaatgctgcatagatggccacaaatataaaggtgtaactcaagaggttgatggattatctcaaactgatggaactttaacatattttgacaaagtagataagaatcgagaagagctgtttctacgtgccttgtgtttatgtcatactgtagaaatcaaaacaaacgatgctgttgatggagctacagaatcagctgaattaacctatatctcctcttcaccagatgaaatagctttggtgaaaggagctaaaaggtacgggttcacatttttaggaaatcgaaatggatatatgagagtagagaaccaaagaaaagaaatagaagaatatgaacctcttcacaccttaaactttgatgctgtccggcgacgtatgagtgtaattgtgaagactcaagaaggagacatacttctcttttgtaaaggagcagactcggcagtttttcccagagtgcaaaatcatgaaattgagttaactaaagtccatgtggaacgtaatgcaatggatgggtatcggacactctgtgtagccttcaaagaaattgctccagatgattatgaaagaattaacagacagctcatagaggcaaaaatggccttacaagacagagaagaaaaaatggaaaaagttttcgatgatattgagacaaacatgaatttaattggagccactgcagttgaagacaagctacaagatcaagctgcagagaccattgaagctctgcatgcagcaggcctgaaagtctgggtgctcactggggacaagatggagacagctaaatccacatgctatgcctgccgccttttccagaccaacactgagctcttagaactaaccacaaaaaccattgaagaaagtgaaaggaaagaagatcgattacatgaattattgatagaatatcgcaagaaattgctgcatgagtttcctaaaagtactagaagctttaaaaaagcatggacagaacatcaggaatatggattaatcatagatggctccacattgtcactcatactaaattctagtcaagactctagttcaaacaattacaaaagcattttcctacaaatatgtatgaagtgtactgcagtgctctgctgtcggatggcaccattacagaaagcccagattgtcagaatggtgaagaatttaaaaggcagcccaataactctgtcgataggtgatggtgccaatgatgttagtatgatcttggaatcccatgtgggaataggtattaaaggcaaagaaggtcgccaagcagctaggaatagcgattattctgttccaaagtttaaacacttaaagaaactgctgttggctcatggacatctatattatgtgagagtagcacaccttgtacagtacttcttctataagaacctttgtttcattttgccacagtttttgtaccagttcttctgtggattctcacaacagccactgtatgatgctgcttaccttacaatgtacaatatctgcttcacatccttgcccatcctggcctatagtctactggaacagcacatcaacattgacactctgacctcagatccccgattgtatatgaaaatttctggcaatgccatgctacagttgggccccttcttatattggacatttctggctgcctttgaagggacagtgttcttctttgggacttactttctttttcagactgcatccctagaagaaaatggaaaggtatacggaaactggacttttggaaccattgtttttacagtcttagtattcactgtaaccctgaagcttgccttggatacccgattctggacgtggataaatcactttgtgatttggggttctttagccttctatgtatttttctcattcttctggggaggaattatttggccttttctcaagcaacagagaatgtattttgtatttgcccaaatgctgtcttctgtatccacatggttggctataattcttctaatatttatcagcctgttccctgagattcttctgatagtattaaagaatgtaagaagaagaagtgccagggtaacgaaacgcctcccttcctcaggaacatctgctatcttcatgctttctcaaacttccagcaatcacagtttctcttggagtgaataagagaaatctgagctgtagaagggcatctgactcattatccgccagaccttcagtcagacctcttcttttacgaacattctcagacgaatctaatgtattgtaacagaatccgaatcttgaactgcctatgttattgtcctacaagcatactgacagtggttacagctaaaaaagaaagcatgaagaaacaactacaaaaagttatcatctcaggatacttgatatgcaacacactaaaccactctcatgtctagagttcacaataaatgttcattaaaatacc

SEQ ID NO: 1676 - DNA, 2974 bp, Homo sapiens
cttacacctgcgtgagcgtcaccccggctgaggcgctggcagaaggcggtgcgggtggagccttcgccaacgtcctgggccccctgagtgctgcatgccagcccagcttctgcaggcagatgacagaagagcagaccgatgaaaacatgagtgtctgtggtgagttcggatggcagcgtgtggcacctcgctcagtgctctccagaaactgcagacacggcatgaaatcttgcaacacgagggaccaggacaccgaagggcagcaggggagatgactccacatgaccaagacgggagcccgggagagatgaggccacacggccaagatgggagcccaggggagatgacaccacatgagaccaagaccggagccggagggagagatgacgccacacgaccaagactggagctggagggagatgactccacacaaccaagaccagagcccgggagagatgactccacacgaccaagaccggagcccgggagagatgactccacacgaccaagaccagagcccgggggagatgacaccacaggccctcactggtgtggccagagcctgcccaaagagtgtgtgtgagatgtgagacacccctgcagatgctgaaaccctgagaaacagcacccttggattcagggcaaactagagataaagccaatctctctctcttcctggagaatctcaggaaaaccgcttagattctaaagggaagaaaaaatagaaatccctctaagaccagcaacagtaagttctgcaggacgggttatcaaattaaacatcaggctaggaatttaacccgaagttccagactggtcagaccccgggcactgcatggacagcagcaccaagggacataatgatttcctcccaatacatcatgttatttcacggcactaaactcacaagaggctgtaaaacagaacgaagagctctgtactcccctcactcggcctccccaaagacgacgtttcagacaagcacagagcacaggcagtcagcagggagccctggcagggccaggccactcagccccacagccatgtcccttttctacactcccttgttttcctgactgacggaagcagacacaaaggaactcacgctggacaactcagttagcataaaggttaaaagcaaacaaacggaaccctgctatgcgaggcacttgcagggcggtgagaccaaaacggctgctgttcccggggagggcacccaggcgtccaccaggtgtccagggagccagcaacgctgtgtctcacgggggtgcgaatgtcagggccagagtaggatgatttgttaaccagatgtttacattttaaggacctttctgtatgcatgatgcaaccatatgtttttgggttttaattttaatatttaaaaaagaaagccaaagagaacccagtgtctttcaaaggagtgacaagctaaattctcaaaaggaagaatggaagtcagaagacagtggcatcattccttacatgacctgaggaaaaccaccagcaacctggaattccaggcacaggaggaatgtcttcaagaagcctccacagccagcagtggacatggagaatgggctcagcacggcccaccctcacgggctcagcacaccccaccctcaggggctcagcacggcccaccctcacgggctcagcgcaccccaccctcacgggctcagcgcacccacattcatggccttgcccagctcctggggccatcggggtagcactcatacagcccttgttcctgtctggtccattcccccacgtggctctgcacactcatccccattcaggtccatcggcaacagaacagaatcatgccacacccttcactaggcctcccaggagaggagagggcctcccagccgaatgcctggccctccaccagcatctgctctcgagccccacaacaccagctcctgcctcttccagaccacgctcttcctcttcctcagagccccacctatgaacgtcctggcatcactcctgccctgaacagcccagccctcactccagctctgcctgtgtctggacgaccaccccccactccctgacctcaccccctcccacaagcctgttcccaccagatcagccacttccctcatggtctcaccatgaaccacagcccacatgactcgtcttgaggccaccccactgtctctgaatccttttctgcttctccctgacatacccagcagcctccgtggctcctcctgcatggagctggcccccagtgcccccagtgcctacctcggctcagcgcttctcacggcacactttcctctcagcctccaggagccccccacaaacccctggcttactggaccccagttcactcagctgctccctccctcacccccctgccagggcttggctcccccatcatcatctcattcagtcttgaccttggtaagtcaagtctgcatgtgagactgacaggaaccactggggcaaaaactggaaagtttgtaactaacagagagaagagaaatggcaaaatcaaaataaaaccaattcaaaagacgcaagaacgaccaaaaagtggaaagtctgtaacttccagagagaagagaaacggcaaaatcgaaataaaaccaattcaaaagatgcacgaacgaccaaaaaagtattggcttcaaaaggctggcactatggtctgaatgcaatttatttaccggggctgggggccccaatgaggttttgaggctgggcctttaagaggctacgaggctgtgaagatggagccacgcctctctgaaaggcggagtcagcccccaggaatggacctgctccctgtgggcggcctggtccacagcaaggctgtgctggagcatcttcctcttggcgtggttcctggctgtgttcgggaacagcacgaggtcctcaccataagtcaccaaaggcagcccctcgaccttgggcttcccagcctgcagaactgtgagaaataaatttcttttctttataaatg

SEQ ID NO: 1677 - DNA, 3259 bp, Homo sapiens
aaggaatgccagcagctaccagaaaccggaagggcaaggaatgcattctccccagagccttcagaggaagcatgactctgctaacaccatgattcacaattctggcctccaagaacagagagaataagcctctattgtttaaaccacctggtttgtcctaattcgttattgcagccacaggaaactaatacagaaggctaaaatgaaaacgatgaagaggtgcagtatattcaggctgagaaaaacaacaagggcccaatggaggctgccacactttttctcaagttcctgttggagctccaggaggaaggctggttccgtggctttttggatgccctagaccatgcagagctagggtgttttctatcaacagaagaatcatgaagttcataaatttggaaaggagagctttatttttcataaagggttgcagtctgcatggtggccattttgacaggctgggaagtgtagcctcgggccagaagcaggaaacaggcacttggagggtggggagagtaaaacagagatttatgctgaatagggtgaccaaatattcagtaagctacaggaggagtcatgaaagtagaagcatgcacctgggcaggttattctggactttatgaagccattgaaagttgggatttcaaaaaaattgaaaagttggaggagtatagattacttttaaaacgtttacaaccagaatttaaaaccagaattatcccaaccgatatcatttctgatctgtctgaatgtttaattaatcaggaatgtgaagaaattctacagatttgctctactaaggggatgatggcaggtgcagagaaattggtggaatgccttctcagatcagacaaggaaaactggcccaaaactttgaaacttgctttggagaaagaaaggaacaagttcagtgaactgtggattgtagagaaaggtataaaagatgttgaaacagaagatcttgaggataagatggaaacttctgacatacagattttctaccaagaagatccagaatgccagaatcttagtgagaattcatgtccaccttcagaagtgtctgatacaaacttgtacagcccatttaaaccaagaaattaccaattagagcttgctttgcctgctatgaaaggaaaaaacacaataatatgtgctcctacaggttgtggaaaaacctttgtttcactgcttatatgtgaacatcatcttaaaaaattcccacaaggacaaaaggggaaagttgtcttttttgcgaatcagatcccagtgtatgaacagcagaaatctgtattctcaaaatactttgaaagacatgggtatagagttacaggcatttctggagcaacagctgagaatgtcccagtggaacagattgttgagaacaatgacatcatcattttaactccacagattcttgtgaacaaccttaaaaagggaacgattccatcactatccatctttactttgatgatatttgatgaatgccacaacactagtaaacaacacccgtacaatatgatcatgtttaattatctagatcagaaacttggaggatcttcaggcccactgccccaggtcattgggctgactgcctcggttggtgttggggatgccaaaaacacagatgaagccttggattatatctgcaagctgtgtgcttctcttgatgcgtcagtgatagcaacagtcaaacacaatctggaggaactggagcaagttgtttataagccccagaagtttttcaggaaagtggaatcacggattagcgacaaatttaaatacatcatagctcagctgatgagggacacagagagtctggcaaagagaatctgcaaagacctcgaaaacttatctcaaattcaaaatagggaatttggaacacagaaatatgaacaatggattgttacagttcagaaagcatgcatggtgttccagatgccagacaaagatgaagagagcaggatttgtaaagccctgtttttatacacttcacatttgcggaaatataatgatgccctcattatcagtgagcatgcacgaatgaaagatgctctggattacttgaaagacttcttcagcaatgtccgagcagcaggattcgatgagattgagcaagatcttactcagagatttgaagaaaagctgcaggaactagaaagtgtttccagggatcccagcaatgagaatcctaaacttgaagacctctgcttcatcttacaagaagagtaccacttaaacccagagacaataacaattctctttgtgaaaaccagagcacttgtggacgctttaaaaaattggattgaaggaaatcctaaactcagttttctaaaacctggcatattgactggacgtggcaaaacaaatcagaacacaggaatgaccctcccggcacagaagtgtatattggatgcattcaaagccagtggagatcacaatattctgattgccacctcagttgctgatgaaggcattgacattgcacagtgcaatcttgtcatcctttatgagtatgtgggcaatgtcatcaaaatgatccaaaccagaggcagaggaagagcaagaggtagcaagtgcttccttctgactagtaatgctggtgtaattgaaaaagaacaaataaacatgtacaaagaaaaaatgatgaatgactctattttacgccttcagacatgggacgaagcagtatttagggaaaagattctgcatatacagactcatgaaaaattcatcagagatagtcaagaaaaaccaaaacctgtacctgataaggaaaataaaaaactgctctgcagaaagtgcaaagccttggcatgttacacagctgacgtaagagtgatagaggaatgccattacactgtgcttggagatgcttttaaggaatgctttgtgagtagaccacatcccaagccaaagcagttttcaagttttgaaaaaagagcaaagatattctgtgcccgacagaactgcagccatgactggggaatccatgtgaagtacaagacatttgagattccagttataaaaattgaaagttttgtggtggaggatattgcaactggagttcagacactgtactcgaagtggaaggactttcattttgagaagataccatttgatccagcagaaatgtccaaatgatatcaggtcctcaatcttcagctacagggaatgagtaactttgagtggagaagaaacaaacatagtgggtataatcatggatcgcttgtacccctgtgaaaatatattttttaaaaat

SEQ ID NO: 1678 - DNA, 3833 bp, Homo sapiens
gctgatgcatccccgcactgctcggtggaaccggtggtggatgtgcatgcaccctggcggcatctgctgctccctttgcataagacgggagggtatacgtttcctgagctgatctgactctgagagccagggagcttcggctggggcatctccctgagaagcagcatggagcagcctaacagtaagggctatagcctgggaaggacccctcagggcccagagtgcagcagtgctcctgcagtccaagtggggacccacaggggcctagagtataacccggggaagattcttccaggatcagactatgggttgggaaatcctccagcccttgaccccaagctcccacatttacccctgcccccggccccacccacactctcagacttggggcagccacggaagtcacccctgacaggcactgataagaagtacccgctgatgaagcagcgtgggttctactccgacatcctcagccctggaaccttagatcaacttggggaggtatgtcgtggcccccgaatgagccagaacctcctgcggcaggctgaccttgacaagttcaccccaagagtcggaagctttgaggttcctgaagacttccaggagcgcatggagcagcagtgcatcgggtccaccacccggctgctcgcccagactgacttcccactgcaggcctacgagcccaagatgcaggtgcctttccaggtgctgccaggccagcatcctcgcaagattgagatcgagaggaggaaacagcagtacctgagcctggacattgagcagttgctgttcagccagggcatcgactccaacaagctcatgcccaggcacctggaccaccagcacccccaaaccatcgaacagggccatgacccaatcttccccatctacctcccactgaaggtatttgacaatgaggactttgactgccggactcccagagagtggatcaacatgggcttggagccagggtctctggacaggaaacctgtcccgggaaaagccctcttgcccactgatgacttcctggggcatgaggaccccaagagtcagaagctgaagtacaaatggtgcgaggtcggcgtcctggactacgacgaggagaagaagctatacctggtacacaagacagacgagaaaggcctggtgcgagatgagatggggaggcccatcctgaatgcaggggtcaccactgaaggaaggccaccccttcaggtctgtcagtactgggtgccacggatccagcttctcttctgcgctgaggacccttgcatgttcgcacaacgtgtggtccaggccaacgccctgcgcaagaacacggaagcactgctgctctacaacttgtatgtggactgcatgccctctgacggccagcatgtcatcagtgaacagagcctgagcaagatcaagcagtgggccctgagcacgcctcggatgcgcaaaggcccctcggttctagagcacctcagcagtcttgccagagaagtgagcctggactatgagcgcagcatgaacaagatcaactttgaccacgttgtctcttccaagcccgagaccttctcctacgtcaccctccccaagaaggaggaggagcaggtgcctgagcgagggctggtgagtgtccccaagtaccacttctgggagcagaaggaggacttcactttcgtgtccctgctcacacggccagaggtcatcacggccctcagcaaggtgagggccgagtgcaacaaggtgaccgccatgtccctgttccactcgagcctctccaagtacagccacctggaggaatttgagcagatccagtcacagaccttctcccaggtgcagatgttcctcaaggacagctggatcagctcgctaaaggtggccatgcgcagcagcctgcgcgacatgagcaagggctggtacaacctctacgagaccaactgggaggtgtacctcatgtccaagctgcgcaagctgatggagctggtgaagtacatgctgcaggacacactgcgcttcctggtgcaggactcacttgccagcttctcacagttcatcagcgacacctgttgcagcgtgctcaactgcaccgatgacatggtctggggtgacgacttaattaacagcccctacaggccccggaagaatcccctgttcatcatggacctggtgctggacagctctggggtgcactatagcaccccactggagcagtttgaggcatctctgctgaacctcttcgacaagggcatcctggccacccatgccgtgccccagctggagaagctggtgatggaggacatcttcatcagcggtgaccccctgctggagtccgtgggccttcatgagccactggtggaagagctacgggccaccattgccagtgccgtgtccaaggccatgatcccactgcaggcctacgccaaggagtaccgaaagtacctggagctgaacaacaatgacattgcctcctttctcaaaacctaccagacgcagggcctgttggcccaggaggtgcgggaggtagtgctcacccacctgcgggagaaggagatcctggacagctcgctgcccagcagcatcatcattgggcctttctacatcaacaccgacaatgtcaagcagagcctgtccaagaaacgcaaggccctggccacttccgtgctggacatccttgccaagaacctgcataaggaggtggatagcatctgcgaggagttccgcagcatcagccgcaagatctatgagaagcccaacagcattgaggagctggctgagctgcgagagtggatgaagggcatcccggagaggctggtgggcctggaggagcggattgtgaaggtcatggatgactaccaggtcatggatgaattcctctacaacctcagctcagatgacttcaatgacaaatggattgccagcaactggccttctaagatccttgggcagatagagctggtgcagcagcagcatgtggaggatgaggagaagttccgcaaaatccagatcatggatcagaacaacttccaagagaagctggaagggctgcagctggtagtagctggcttctccatccatgtggagatttcacgtgcacacgagatcgccaacgaggtgcggcgtgtcaagaagcagctgaaggactgccagcagctggccatgctctacaacaaccgcgagcgcatcttcagcttgcccatcaccaattatgacaagctctccaggatggtgaaggagttccaaccctacctggacctttggaccacagcgtctgactggctgcgctggtcggagagctggatgaatgaccccctctctgccatcgatgctgagcagctggagaagaacgtggttgaagccttcaagaccatgcacaagtgcgtgaagcagtttaaggacatgccagcctgccaggaagtggccttggacatccgggcccgcatcgaggagttcaaaccatacatcccactgatccaggggctgcgcaaccctggcatgcggatccggcactgggagacactgtccaaccagatcaacatcaatgtcaggcccaaggccaacctgacctttgctcgctgcctggagatgaacctgcaggaccatatcgagagcatcagcaaggtggctgaggtggctggcaaggagtacgccatcgagcaggtgggtagccaccagcgggcccagccactccagccaggccctgccggacagcctgacctcctgctctggcaaccacagccacttgggaggatgacagtaataagccccatccctggggtcatgaggcccaggggttgagatgcattctattaagtgagttaataatgcacataaaattcttgacagtg

SEQ ID NO: 1679 - DNA, 3419 bp, Homo sapiens
agctaagcaccaggagctgagcactgcccgctgtgcctgcctgcaagtctgacatggctcaggagaaaatggagctggaccttgagcctgacacatcttatgggggaaccctgaggagatccagcagcgctcccctaatccatgggctcagtgacctttcacaggttttccaaccttacacacttagaactcggaggaatagtacaacaattatgagccgtcacagcctgttgctgtcatcctcacctaatcgtattcctagtagcagactgcatcagatcaaaagggaagaaggcctggatatggtgaacagagaaactgcacatgaaagggaaatgcaaacggcaatgcagataagccaatcatgggatgagagcttgagcctgagtgacagtgattttgacaagccggagaaattatattctcctaagagaattgacttcactccagtttctccagcaccttcacccaccaggggattcggaaagatgttcgtgagcagcagtggattgccaccaagtccagttcccagtccaagacgattttcaaggagaagtcagagtccagtcaagtgcattagacccagtgttcttggtcctcttaaaagaaaaggtgaaatggagacagaaagtcagcccaagagactcttccaaggcactaccaatatgttatctccagatgccgcgcaactgtctgatctcagttcatgttcagatattttggatggcagtagtagcagcagtggcttatcctcagacccgctggctaaaggcagcgctaccgcagagtctccagtagcatgctccaattcatgctcttcgttcatcttgatggatgatctctcacccaagtgacttaaccatttctgattcaacgttttaactgctgtttcctacataaaatgtttagtggggaacgcagagaactttgatccataatgaggattaaagttttacagatttcacacattctgatgctattattactctttggcatctctcttctccaaagttcaattttgtgagcctagtgaccttactagtatctggttttgctgatctcattttggatttagtgattaaatctcaaatgctgatttttgattgcttagaggaatcttttttcttagtgcctcaaaaaacacctattttgagtctatacatttaagaaaggcactgatgtgtattgcctttaatggtccttttccgcagcagtgatatgacagatttgatcagaaattctcttgcttgagagatttttttttgtcctctgttgactacatagtttcaaatctctctttatttcatgatgatatataaattgcttttaattatattaaatttttatttttctgcatcagcttcaagtacattattttgtttccctttcctgtttgagccgcttatgccatttctcacagaggggaagaaatacgtagttgctttcattactcttattgcttctttgctgttggggtgtgtgaagtgagcattgattttagtgctgagaatgtaaacggacttacaggatgcttggattagtcatcacaggttcttatgactttgctaccacagttgatatatttctcctcaaacctgttgccctaaggaatatataaaatattgttgatatttctaggtggtgttatcaaggagaagaaattcctgccttgaccagatgtgtggagcatctacaaatgaatgaatagttatttacacacaaaccactgtgtacaaaagcgtccatggagctgtcagtgtctcgagtggtattatgaggcctcaggtgccttggggtacattgtcatgctataagggatgtatatcataaggtatggtggaagaggggccttatgtgaatgattgccacatactgtttctgttgctgctttttttccgattcctttttgtcattggatttgtttgttttgtcatgtggtgaatggtgttttagttattgtgttgctgccagaatcagaatccagttcttgttcttactgccttatagttattgtgttgccaccagaatcagaatccagttcttgttcatactgccttgtagtgagggcagtttaatatctacaaagaagcttttagaagctgaaaaagtcaatgtgattgtgcattctgcttttaagaagctgtttcagctatgaactgtgtatgtgctataagtgtgaggtaccataagttatttaatttttaaaagaggaaactcctgagtgagctgtttaagaaatctgagtgtgatctattgttacgttatttataactaggtaaaatgtctgtcgtgatagatttcttttaacgttcagatactgtggttgggttgtctatatttaatatgcagatttgcctgctggaatcataatccatttttaagtgaatgtaagaaatgaaaactactgcatttgtgtcttttgaaggcaaggatccttggattttaaaggaagagtatgtgctttgaaggcactcagagactagtaatagcatatggtttgaagggaaacccattctctttcaattacaagagagcatcacttagcgtgcagtacttctgttacagcatccgatgtgtcctttattttaaattgtaaccataacagccattaatggctttatttcttgtattgctctcatctgggaaaagtctctacttcttcaaacgtaacataaatctattatgaagcttgtcccctagtatgccattataaagaaaaaattcttcgatggtatgcagtgtatctattctgtttgtaaaagatcatgtcaaaatgttctgcctctataatgataatagatggttttgtctttcaggatatttatccacctactgtcttctttgccttaaagggacacttggccatcatttttaggctcgaacttaacactgttaagaaataactgaaatatgatggtatttacattaatttttgaaattcaatggtgggatagaattaggtcaggaaatggaagttgttccaatggtgtgagaactaggagacaagatgattcactttattatttaaaccaagcttcatttttagtttttgttgtttaaatggactggaaagttaagtttttgcagggattgttttgaaataaagagatatgctaactcacagatgaactttgttaagacccctttatttttatataaagtctaatatttgaaaagcgattgttataaagtaaaattctctcttcctattctaatatatatcatatatttcaggcttctatttgaaaacaggtataagagatgatatgatacaaccctatagataatgttttttgcttgattgacttatataatcactgtttcatgattactgcttttggaataataggaagttttgtgaaatgctggccttgtgtatatcttagaatgcaaatttaataaagtgtgtatacatgcat

SEQ ID NO: 1680 - DNA, 3030 bp, Homo sapiens
gtttactccccaaaatatctctcagaggtccccaagctgaccccaaaagcaggaagaaaaagctgctcaagaaagcggccctgttttccaagctctcgccagcacagccagcacggaaggcgttcgtagaggaagtggaagcccagctgatgaccaagcatcccttggccatgtaccccaatctgggagaagatatgcctccagatctcctactacaggtactgaaaccgctggaccctgagaggaagctggaggacgcaggctcttgtgagggccaggagaagacaactgacgaacccacggagcctggtaaatacccctgtggggaattctcccctcggcctcccgagactcgggtgtcctgtctccccccggagcctcccaagactccggtgtccagtctccgcccggagcctccagagactggagtgtcccatctccgcccacagcctcccaagactcaggtgtccagtctccacctggagcctccagagactggagtgtcccatctccgcccagagcctcccaagactcaggtgtccagtctccacctggagcctcccgagactggagtgtcccatctctacctggagccttctgggactggagtgtctcatctctgcccagagcctcccaagactcgcgtatctcatctccatcgggagcctcctgagactggagtgcctgatctctgcctggagcctcccaagtcacgcgtatctcatctccgcccagagccttctgagactggagtgtcccatctccacccagagcctcccaagactctggtgtccagtctccacccagagcctcccgagactggagtgtcccatctctgcccggaacctccagagactcgcgtatctcctctccgccagctgcctcccgaggctggagtgtcccatctctgcccggaacctcccaagactcgcgtacctcctctccgcccagagacccccaagaatggagtgtctcctctcttcccggagcctcccaagactcgcatatctaatctccgctcggagcctcccaagattggagtgtcccatctctgcctggagcctcccaagactcgcggatctcatctccgcccggaacctcctgagactggagtgtcccatctccgcccagagcctcccaagactcgggtgtccagtctccacctggagcctcctgagactggagtgtcccatctctgcccggagcctccagagaagaacgtatctcatctccgcccagagcctcccgacactggagtgtcccatctctgcccagagccccccaagacacgcgtatctcatctccgcccagagccttctgagactggagtgtcccatctccgcccagagcctcccaagattctggtgtccagtctccaccaggcacctcctgagagtagcgtatctcatctccgcccagagcctcctgagactggagtgtcccatctccgcccagagcctcccaagactcggatgtacagtctccgcccggagcctcccgatactggagtgtcccatctctgcccagagcctcccaagactcgggtgtccagtctccccccggagccccccgagactggagtgtcccatctctgcccggagcctccagagactcgcgtatctcatctccgcccagagcctcctgagactggagtgtcccatctccgcccagagcctcccaagactcggatgtacagtctccgcccggagcctcccaatactggagtgtcccatctctgcccagagcctcccaagactcgggtgtccagtctccccccggagccccccgagactggagtgtcccatctctgcccggagcctccagagactcgcgtatctcatctccgcccagagcctcctgagactggagtgtcccgtctccacccagagcctcccaagactcgggtgtccagtctccacgcggagcctcctgagagtcgcgtatctcatctctgcccggagcctcctgagactggagtgtcccatctccgcccagagcctcccaagcctcgggtttccagtctccgcccagagcctcttgagactcgcgtatctcatctccgcccggagcctcctgagactggagtgtcccatctccacccagagcttcccaagcctcgggtatccagtctccacctggagcctcccaagactcgtcgagtgtccagtctccgcctggagcctcccaagactggtcgggtgtccagtctctgcccggagcctaccaagaccggagcgtcccatctaaaagaactgtttcaggaaggtacatcaagcacaatggagtgtgtttctgactctcttcaacgtagacacacatcgagaaaactccgtgacttcaagtgggctggagacctaggagttaatgaagaatccatcagcagtctgtttgactttacccctgagtgcagagcaacctatcaagaccaaaagaataagaaggcaaacgagtgttcctcagggctgaagtacagcatggagctagacgaaatggatgaggtcaaattcttctcacaggaaaaagacttggacgggaaaatccagaatgcaccaaattctcatagtgcacagcatgtgaagatggggtatggagcatggtacctcaagcctaagttggggaaaaagctaagaagtgatgaacctttgattgaccccaagctcgtacttgaaaagcctgatgaacccgacattcttgacggtctttatggaccaatcgcctttaaggatttcattctaagcaagggctatgaaatgcctggcatcattcaaaggctgtttgccaggaggggatggacttatgactctgttaagactcctattcaacgtgcaatgcaagtttacaagtacaaagaagacgtcacagatgcatcggaagaagattagatggttttgaatttactagttaattgggtatttcttgctctcattttaaacatcagtcagaatttatgatgactggccccaggaatgtacaacgttggcaacatctgtaaattcaatacctaatgtttataaatatttcttaatgacc

SEQ ID NO: 1681 - DNA, 2927 bp, Homo sapiens
atctgcaagctgaggaaaaaggaggccagtccaaatcccaaagctgaagaactcggagtccgatgttcaagggcaggaagcatcgagcacgggagaacgatggatctcttccgcatcctccaggccgcatctccagcacctcacaccctgctggcagcgacagacactggtccccgccagctccggggtcttgtcccgtgcccagccagcacccagccatcgcccagccagtgcccagccatgctgccccgggcgctgctgctctccttctgcgcagcagaacagggttgggaagggagcttcgccctcatcgcccctaaccagacagtactcagccagcgtccagaaggcagcagtcagaaacagtgcggctccagcagctttctttctagcggggctaagacattcctcaaagagacggccgcgcaggtcacttcagaagcatgtgcaatgcagggaaggacatcaccggggtgtggacagggacgggcgttgtgggggtctgtggaccagggggcggcaagggttctcggagaaagggagccgtgggtgagcctgagggggagaaggagccaccaagaaagccaggaaaagccctggcttggagggtggcggctgctgatgcaggtgggaggggagggcgcagggccccatggctgcgacccacatggcggtgggtggtcaggttttaggccctctggctgcagagtcggggcgtgtggggactgccgagggtagaggggtcttgggcccaggtgtcggcaggcaggcagagaagggctaagttcaaggccatggaactgactagaggctcccgggtagggctggagaggccggcgggaggggcgccctgcatggggctggggtgccaggggtggacaccgtcctaaaatcaattatgcgggccacagccagtcattaaaaaaataagcagaatgcttttctcagtgacaggaagcatcctcccctacggtgggtgtgaggagcttgttctccttggcaagtgcctcctcagccctggcccctggcttccatgccacggcctgtgcccagctctccagtctcattctcctctcctggggcatttagcttgaagggttccttgtggcccagacccccaaggtcccagcaccaagcccttctttccttcccttctcttccttccttttcaatacattgagcccttgtgatgtggctggcatcatgctgggccctgggaatataatgaatgaggctcgttctttgctcctaagttgcctataccaggtgatacagacagacaagcaaaaaggtctcttccctaaaagcttttaaaaaatcctgatgctagtcccagcagcagatctttgctttagggtgggcctggaaattggtatatttgaaaagcttcctaggtgactccagcttgcagctctggttatgagccccagatggaggggcagtgccctgccatggatatgggcctggagctgagagcctgcccagggtacttgagtctgggctgtattccttcccactgagtgaccttggctgtgcctctttaactctctgtgacttggttccttcatttgtaaaacagagtgctatcttaggcagctggaagaattccttgagctgatggcacatggcgggtgctcagcaagcattgtctattgttatcaagcactaacaaaggtgcactgcagcatgtaggaaaggcacctcaccttttctgtagaaaggatggggcagaagagtgaggagttagctgggcaaagggactggggagatgagggaatgggagaataggaatcgtggattgagggagctggaggaggtggccggctcttcaagaacaagagaacagcttgtgccaaggctgggaggtagagctggatatgactggtgggccagcggcgaagtgcagagtgggcgggaagaggctggggaggcccacccgagtgtggctgaaagctctttgaggactaggggctggggtggggacagccatgctatgacagcctctcctgttccagccctgcagctggtgagcagtaagagggacttggttctggtgaaggaggcgctgagctggtacgacgcccagcagcactgccggctgcactacacagacctcgctgacctgcagccaagtggcctgtggaagctctactccctcatgaccagcaccccggcttggattggcctcttcttcgacgcaagcacttctggcctgagatggtccagcggctccaccttcacagccctggagtggggccagaagctacctgaatttggggtgggcttctgtgccacgctgtacacttggctgaaattacccagcataggggctgcctcctgcacagcccagaagcccttcctctgctactgtggtgtgttcacattcatatttcaggcttggtctttcccccaggggcctcactctgttgcccaggctggagtgcagtggtgtgatcatagctcactgtaacctccaactcctgggctcaggtgattctcctgcctcagcctcctgagcagctgggactacaggtgcatgccaccatacctggctaattaaaaaacaaaacaaaacaaacaaaaaaccaaccttaatagagacagggtctcgctatgttgcccaggctggtctcaaattcttgccttcaaatgatcctcctgcctcaagtctcccaaagtgctgggattataggcatgagccattgggcctggcccagggttggttttcaatagcaaatgacggggcagggagagacagagagagaagcaccctttcagaggataactggtcatgactttactctttttgccacatcactttctctctgtggcctctatttctatctcctctgcacccctattcgaagacctcaatagaaaaaatgggtgtaagtcaggatagaatacaaataaaatttggaaatttc

SEQ ID NO: 1682 - DNA, 3026 bp, Homo sapiens
ctagtcctgttgaactcagatgactgcagccacaggagtgatcccagagtcttttgcactgggaggagaaggtggaacaggagacacccacattctagttggtccctgctgtctccaagaggtggtgtaccaggagtcctacagatgtgaagctaggttaaaaccagttctggggatgctttcaaatcaaagaggatttaaaaatgtgactcccagttgcatttccggagccaagcagcatcctggcttgggggcctggtgtctaccacacttctgcgcattcttcctccaagccacatctcctgagaataaagcaagatgccattggcaatgtctactcagaactacttgaatgactcatcaatcaacaggcttgaatgctcttcttcctctatgattcaacggtttgattgactgaactgaaactaaaacccaaccctagtggtcattttagacttgagcagatacagtcagaatctcaatcacatgtcatcagcaggccctccttggcctccttattgcagctgggctcctgagcagctctccctcactcagggaggaaacgaacggctcctttcagtagggcagacgaaggctgctggctgatgcaactgctcctgtgtccacttcccagcaagggtgcaaaacaggatttgtgcttgtgctggtgaatctgggcttcacctagcaaatcagggggacaccaaaatgaaaacagccctagaggcatggagaaagcctcaggtgcactaaggtgccaacagaaacgatgcatctcagagttgacagtcatgactcaaataggacgtgaaggcaacatgtgggtgagagtagcagctatgggtgtaaatatgatcaaatatgggggaggtgtccagatttcttggacatggttacaatcagtatttattttctctcttagtgaacgagtttttggtttttcaatactgctaattttacaggcaattcactacgttccctgggaggtggagtggccttcctccctgctgtgcgtgggttacacagcctgcctcacttccctgtgggtccttcatcacctgcatgctcacatgattccattatttgagctcatggcaggaaatagaacctgattcaacattttgctaagtattattttcaccacactgaatagggtccttttttgatctgcaacccacagctgggctgtggttctctcaacacaggtagactgaaaagcttcctcctgcattgatttctcagcatgggctgaccacatgttcacaagtacttgttcttttccatacgtcccaatgcaggcaggcactggcagagcaggacagctgtgtccaggagttcagggaacaaaataaggctactgtaacttcagtcaacttcaaggcacggtgtaaaataaagtaagagattatcagtcaaatagccatttgcattaaaattctccactttaagaagctgagatctttgctttattttttaaaaagcaaaatgaagtcagttttaatggagatatacaattgttaactgttgggtcattttgaaaggctttcttccttaaaatgagtctcagctgatagctactcactaatgctgataattatctgaagcaaaataaatacaaatgtctgggttaatgaagactgaaacaggataatgcctggacactaaattttccaagaacaaggaacacaattgttctctacatacccctgcaaaaatgcttaatggccaggacacaggaatcttgtgtacttagagaccttgttaggatggagccccgggggcaccaccactggccttcgagccaaggtctcacagagagggcagcaagggggagcagctcatcctcctccccagctagggagacactaggacagcagtggagtggagtccgaaatctgccatagaagccccagcttactatttgctcactgagcagcaagtcaacctcagtttctctgtgcctacaggggagtaacagctgttcacactaaagggtgcttgtgaggatgatataagaatgaatatggacctgctctgacaacactgaagttccagacaaaagaataggcattagttatctgatttgaaggactgtgggggattggaattttaaaaataaacctcaacccaactccttctcttgtggggcctcggttgaacaactgggcacttgcactgccttctgaatatgtggatggattttgcctgctttggagaagcatatgaactcctcagggcatctagtgccctagagtgtgccaaaggaacaaggaggactacaaatgggtgatgcctggagcttaacccacctccatttgggattcggagctctggtttctgtgttcagctagaatcttcgacagtcatttaatgtctctctttcttagttttactcatttgttgaatggggattatattagccttactttccttgaaggtcttaatgagaatgaaatgagataatttttaagtatatatatgcatttctaatttccatcagactggagcgtcggtataagtcctgggtgttctggaaagttttatttatttagaaacagtttaggctgattgctatctccctatgctaactttttgtttttttagtaaactttttattttggaatactttcaaatttacagaaaagtttcaaagataacaagagttctcatttgcccttcacccagtttccccataactatggctcattgtaaaaactaggaaaccaatattaatgcattactaataactatagactttattcagattttaccagtttttctactcatgttcttctgtcccaggattcaatacatgatactgcattgtatttagttaccatatctcctgagtctcttctgctctgtgatggcttcagtcttttttcgtcttccatgcatcgtcagttttaatgggtactaggcaggtattatggacaagcttggcaaatccacagcccatgggccacatgaggcccaggataactttgaatgtggcccagtacaaattcataaactttttaaaaaac

SEQ ID NO: 1683 - DNA, 4769 bp, Homo sapiens
ttgtctaggcctgacttggagagcagcagcagcagcagcagcagcagcagcaacagcaacctggcctcacacctgggctctcctgtcctggatgaggtgaacaacttcccttggaacctgcagagctcacggggatctgaggagggtatggctcagtcagacttgggtctcagagatcaacacttcagccccttcttagatcctcacatgtcccacatgcagagccctgacgaggagcagtcagaaagtgaagactactctgaggaccagaggttctaccagcacatcctgcagatggtcaagatctccaggtggccggagggcctggggctgcctgagagcatgcaggacatgccgtgcagacacagcgccagcacagtctgttgcatggcagctgagtcttctaggatgtctagtgagggtgagcacgaggccatcagagtcatggagagggactcgaggtttctgtcatgggagccagagctgctggaacatcctcaggaggtggccctcgcccctgcttggcaagaggcctctcagcaagcccatttccagccaagcagcagcaccctcaggcaggggctagtccagcagagctccagcagagggcttactacagagccaggcaagatgcagcatctcaaccaggccttgggttcctcattagccccagttcatgttcctcttgggggcctggctcctttacgaggtcttgtggataccccaccctctgctcttcgtggatctcaaagcgtgagcctggggagctcagtggagtctggacgtcagcttggagaactcatgctgccttcacagggtctcaagacctctgcttatacaaaggtctcttgggctccatatatgaggacaagactgctctcagcctcttgggtttaggagaagaaaccaatgaggaggatgaggaggaaagtgacaaccagagtgtccacagctcaagtgagcctcttaggaacctacacctggacattggggcactggggggtgactttgagtatgaggagtctctgagaacaagccagccagaggagaagaaggatgtttctctggattcagatgctgccggtccccctactccctgcaagccctccagcccaggtgcagacagcagtctgagcagtgctgttggcaaagggcgacagggaagtggagcaagacctggtcttccagaaaaagaggaaaatgagaagagtgaacctaagatttgcaggaatctggtgacccccaaggcagaccctacaggcagtgagcctgccaaagcctctgaaaaggaagcaccagaggacacagtagatgcaggagaggagggttccaggagggaagaggcagccaaggagccaaagaagaaggcttctgctctggaagagggcagttcagacgccagccaagaactggaaattagtgaacacatgaaggaaccacagctctcagactccatagcttctgaccccaagtccttccatggcctggacttcggttttcgcagccggatctcggagcacctgctggatgttgatgtgctttccccagtcctgggtggagcttgtcggcaggcccagcaaccactgggaatagaagacaaggatgacagccagtccagccaagatgagctgcagagcaagcagtccaaaggcctggaggagaggtaccataggttatctcctccacttccacacgaggagcgggcccagagtccccctcgcagcctggccactgaagaagagcccccccagggccccgaggggcagcccgagtggaaggaggcagaggagcttggggaggactctgcagccagcctcagcctgcagctgtccctccagaggcgatccacagagcctgtggctcccccagagcagctctcagaggctgcactaaaggccatggaagaggcagtggcccaagtactcgagcaagaccagaggcacctgctggaatccaagcaagagaagatgcagcaactgcgggagaagctgtgccaagaggaggaagaggagatcctccggcttcaccagcagaaagagcaatctctcagttccttgagggagcggctgcagaaagccattgaggaggaggaggcccggatgagagaggaggaaagccagaggctatcctggctccgagctcaggtccagtccagcacacaagcagatgaggaccaaatcagggctgagcaagaggcttccctgcagaaactgagagaagagttggagtctcaacagaaggctgagagggccagcttggaacagaaaaataggcaaatgctggagcagctcaaggaagagatagaggcttcggagaagagcgagcaggctgccctgaatgctgcaaaggagaaggctctgcagcagctgagggagcagctggaaggggagaggaaagaagctgtggcaacgctggagaaggagcacagtgctgagctggagcggctctgctcctcattggaggccaagcaccgggaggtggtctccagcctccagaagaagatacaggaagctcaacagaaagaggaggcccagctgcagaagtgccttgggcaagtggagcacagagttcaccagaagtcttatcacgtggctgggtatgagcacgagctcagcagtctcctgcgagagaagcgccaggaagtggaaggggagcatgagaggaggttggacaagatgaaggaggagcaccagcaagtgatggctaaggccagagagcagtatgaagctgaggagaggaagcagcgggctgagcttctggggcacctgaccggagagctggagcgcctgcagagggcccatgaacgagaactggagactgtgaggcaggagcaacacaagcgtcttgaggacttgcggcgccggcacagggagcaggaaaggaagctccaggatttagagttggaccttgaaaccagagctaaagatgtcaaggccagattggctctgctggaggtccaggtgagggatctgcaggagtccttgacctcagagtcatagcttctctagcagagggcaggctctgcccctcagacctggggtctgcagtcagccagaaaatcctgtctcttccctgcaaggaggagaccgcccggagggagaagcagcagctgcttgatgtgcagaggcaggttgctctgaagagtgaggaagccacagccacccatcagcagctggaggaggcacagaaggagcacacccacctgttgcagtcaaaccagcagctccgagaaattcttgatgagctgcaggcccgcaagctgaagctggagtcccaagtggatctgctgcaggctcagagccagcaactgcagaaacacttcagcagcctggaggctgaagctcaaaagaagcagcacctgttgagagaagtgacagttgaggaaaataatgcttccccacattttgagccagatctccatattgaggacctgaggaaatcccttggaacaaaccagaccaaagaggtgtcttcttctctctcccagagcaaggaggacttatacttggacagcctgtcctcccacaatgtctggcacctcctctctgctgagggggtagccctccgtagtgccaaggagttccttgtgcagcagacacgctccatgcggaggcggcagacagctctgaaagctgcccagcagcattggcgccatgagctggccagtgcgcaggaggtggccaaagacccaccaggcatcaaggccctggaagatatgcgcaagaacctggagaaggagaccaggcacctggatgagatgaagtcggccatgcggaaaggccacaacctgctgaagaagaaagaggagaagctgaatcagttggagtcctctctttgggaagaggcctcagatgagggcactctgggaggatcccccaccaagaaggcagtaaccttcgacctcagtgacatggacagcctgagcagtgaaagttctgaatctttttccccgcctcacctcgactcaaccccgagtctcacctcccgcaagatccacgggcttagccactccctccggcagatcagcagccagctgagcagtgtcctcagcatcctggacagcctcaaccctcagtcgccgccgccgctcctcgcctccatgccagcccagctccctccccgggaccctaagagcacccccacccccacctactatggctccctggccaggttctcagccttatcatctgctacacccacgtccacccaatgggcctgggattcagggcaggggcccaggctcccctcctctgtggctcaaacggtggacgacttcctgttggagaagtggcgcaagtattttccatctggcatcccgctgctcagcaacagccccaccccgctggagagcaggctgggttacatgtctgccagtgagcagctccggctcctacagcactcccattcgcaagtccctgaggcgggcagcaccacctttcagggcataattgaggccaaccggaggtggctggaacgtgtcaagaatgaccccaggttacctctcttctcttcaacacccaagccaaaagctactttgagcctcctgcagctgggccttgatgagcacaacagagtgaaggtgtatcgcttctgaggccctgagcaggggcttggggcagcccagcctctcctccacccagaccaagtgcctgaggagctgcctgccttcttccatctgagaaagcaccctccttccccctttgacttgcaggagccaccagggaccagggggttgagtggaacagtaaagccacacattctgtgactat

SEQ ID NO: 1684 - DNA, 3961 bp, Homo sapiens
agtggtctggggtcagaggtcaggtttcagttggtggtcaaatgtcatgctctggaggaagggtatgaggagtcaggggtcagaagtcaggccagcaattccccaggtgtgtggttgggccagacgccaggctcccaagaacctcacctgtgaccctggatgtcctcacaggttaaagggtctcagggacctagagactggcaacatggtgtgcggtggcccggtagaccctggggtgggggtcagagatggagataggcacagagacattctgagagccagagacagaaagaccaaaaacgacagaaatagagacacagagagatatcgggaggggcagagacctagaaagccagaataagagggagtcagaggatccactgtgaaagagacacagaagccacagagacacagcagagatggagacagacagggaaggaaaacagatttcaggggaaggaggggatgcagggacaaggacagaaaagagcccggctcttcctcccagggtccctggggcagcccagtggggctaagggtccctgagtggggctgggggtccccgccgggccccgtcccgtgcagggcgcagcctggggaaagctaggaggccgtatagtgatctccttgggtgtcctccttaactatacaacctcctacctcagcccggggggcgcggcaggtggacagacccgacagacagacagacagggaccaggaggaccagggatgagggggagggccggggaggccccagccgcgatggtgagcccccgacacggacccacagacacgagcttgtgtgcggcgaaggccccgcaagatggagctcacagtctgatggaagagacagagccagccgcagacagtcccaatcccgggtgatctgggtatgacacagggagaggccagaggctgtgagagcccagggcgggaggaatcctggcagctggagacggcagagaggacctccagagaaggcgtggttgtggcatgacctccactaaggcccttccaggcagagggcacagctgaagcgaaggcccaaggcaggaaaccaaggaggtgctgggaggacaacaaagcccttaagtctgactagagcctccgaagccaggagccaaggagcacaggagatgaggctggtggggcgagcgggcggggtcagattcttagggagtttcaggccaggctgggaacttagccttctgagggtgacagggagccctggaaggttgtgagcaaggggcggggacacggttatagctgaatgtcagaccccgctgaggctgtgtggagtggagggggagagacgggtggaggctggggaggaggccccctccctgcagtttgcgggctaggacctggggagagaggaaggggtggggcaggaatgtgaggagctggagatggctggagactgctgggcactgggggcagagaacaggaacctgtggacgggaaacaggtaggaaaactacaactccctgagtctggcccaggaacggatggggcaggagttgctttcaatggggaactaggaggaagaagagggtagaggagagagatgctgtgggcatctgagaacttagtggacattaagagccagggaaaacgttcaggatgtatggtgctgggctttcaacagtgcatctccctccctccctatcctccagccacccagttctcctctctggggacagcatatattcactaatttcttatgtatctttccagaggaattttatacatctatgcacatatataccaccctcctcttttctgtcccctgataggatcacattattctgcaccttggttttttttttttttttacatgatatccaaagatcctcccatatctaggcttatagaacctcctcattcattttaatagtgatataatattccattgtattcatctatttattcctagtgtattcagttaattgggagattgggaggttttttatgtcaagaaactaatggttatgcatattgatatttacagatttgcgtatgtatgtatgtatgtatgtatgtatgtatgtatgtatgtatttatttatttttgagacggattgcccaggctggagtgcagtggcattatctcagatcactgcaacctctgccttccaggttcaagccattctcccacctcagcctcccacgtggttggaactacaggcctgcgccaccaggcccggctaatttttgtgtattctgtagagatggggttttgccacgtttgctggactggtcttgaacttctgacctcaagtgatcctcccaccttggctgagccaccacacctggcccaaatttgctgatttttaaagtgattttgtccaatgcttttaagcctctaaacccagatattcgataaatgcttacttctagatcctttaaaatttgttgataattactaacaatgggataataataatgacaacagataccctttattgaatgactacttggagccagttcctgggatgagtatttgttatacattatatcattgattacacagaaaccttattattagaaactattattatcccaattgtaaggatggaatactgaataggatgcagttctgaatagcgagttgcccaagctcacaaagtatgtgatggagctagagattcaaacccaggtctctctggctccttctttggggtgggcttgctctgggaaaatatgctatttctaaggattgacactgggtacatttaaacttgtcatgcacacaaattcatgtatgattaagaaggaccctttgtcagacccctcactttcacttacgatctagagttactgtcattctacattcaccctggatgccctgtagacagatcaggacaggcaccacatcacagtccttgtcctggccctgatcctgttgtgttgtgattttctacgtctgggtctgtctttgggaatttactgagggcacagtctgggtctgagtcatttctgtgtcctcaatatcactccacccaggcatggctcagagcaggggctcaggaaaatgtttgctaagtgaatgaatgaggagatgagtgaataataaatgacttgtggattaggctgggacttgcttaagccccccaggaacagtgaccataattcccattagtttctgaaacataaggcctctgttctgttctcatcagttagcaagtcacagggaccactggttccttcattctctgaaatacagggctccaaatctctcagcacataagactcatctactgcaattcctacaaatatccagaactcaggatccatcattgccttcactccctgaaacagggggccaccattcccatcagacattggcacacaagtacaggttgagcatccttaatgcaaaaatctcgaatctgaaatgctccaaaatcaaaaactttttgagcaccgacgtaacgtcagaagtgaaaaatttcattccatcacttgatctcatgtgatagattgcagtcaaaactttgtttcatggggctgggcacagtggcttatgcctgtaatccagctgtttgggaggctaaggcaggaggatcacttgagcccaggaatttgagaccagcctgggcaacatagtgggattcccatctctacaataaaaaaatttaaagcttagcagggcatggtgatgcatgcttcttctcccagctactagggaggctgaggtgggaggattgcttaagcccaggaagttgaggctgcactccagcctggttgatagagtgagaccctgtcttaaaacaaacaaaaaaccttgtttcatgcacaaaaatattgtataaaattatcttcaggctatgtgtagaaggcatatataaatgaaatgaaaacaaatgaattttgtgtttggacttgggtctcatccccaaatatctgattttatatatatgaaaatagtccaaaatacaaaataaaaaaatcaaacctg

SEQ ID NO: 1685 - DNA, 3453 bp, Homo sapiens
acatgctagcgcgtccaggggtggaggcgtggcgcaggcgcagagacgcacgcctacgggcgggggttgggggtgcgtgtgttgcaggagcaaagtcgcacggcgccgggctgggggcggggcgccgtgcacgcgcagaaactcacgtcacggcggcgcggcgcagagacgggtggaacttcagtaatccgaaaagccgggatcgaccgccccttgcttgcagccgggcactacaggacccgcttgctcacggtgctgtgccagggcgccccctgctggcgactagggcaactgcagggctctcttgcttagagtggtggccaccgccccctgctggcgccggggcactgcagggtcctcttgcttactgtatagtggtggcacgccgcctgctggcagctacggacattgcagggtcctcttgctcaaggtgtactggcagcacgcccgcctgctggcagctggggacactgctgggccctcttgctccaacagtagtggcggattatagggaaacaccaggagcatatgctgtttggtctcagtagactcctaaatatgggattcctgggtttaaaagtataaaataaatatgtttaatttgttaactgattaccatcagaattgtactgttctgtatcccaccaccaatgtctaggagtgcctgtttctccacaaagtgtttacttttggatttttgccagtctaacaggtgaagccctggagattcttattagtgatttgggctggggcctggccacgtgtatttttttaaatttccactgatgattttgctgcatggccggtgttgagaatgactgcgcaaatttgccggatttcctttgctgttcctgcatgtagtttaaacgagattgccagcaccgggtatcattcaccatttttctttttgttaacttgccgtcagccttttctttgacctcttctttctgttcatgtgtatttgctgtctcttagcccagacttcccgtgtcctttccaccaagcctttgagaggtcacagggtcttgatgctgtggtcttgatctgcaggtgtctgacttccagcaactgctggcctgtgccagggtgcaagctgagcactggagtggagttttcctgtggagaggagccatgcctagagtgggatgggccattgttcatcttctggcccctgttgtctgcatgtaacttaataccacaaccaggcataggggaaagattggaggaaagatgagtgagagcatcaacttctctgacaacctaggccagtaagtagtgcttgtgctcatctccttggctgtgatacgtggccggccctcgctccagcagctggacccctacctgccatctgctgccatcggagcccaaagccgggctgtgactgctcagaccagccggctggagggaggggctcagcaggtctggctttggccctgggagagcaggtggaagatcaggcaggccatcgctgccacagaacccagtggattggcctaggtgggatctctgagctcaacaagccctctctgggtggtaggtgcagagaggggaggggcagagccgcaggcacagccaagagggctgaagaaatggtagaacggagcagctggtgatgtgtgggcccaccggccccaggctcctgtctccccccaggtgtgtggtgatgccaggcatgcccttccccagcatcaggtctccagagctgcagaagacgacggccgacttggatcacaatcttgtgagtgtccccagtgttgcagaggtgagaggagagtagacagtgagtgggagtggcgtcgcccctagggctctactgggccggcgtctcctgtctcctggagaggcttcgatgcccctccactccctcttgatattccctgtgatgtcatctggagccctgctgcttgcagtggcctataaagcctcctggtctggctccaaggcctggcagagtctttcccagggaaagctacaagcagcaaacagtccgcatgggtcatccccttcactcccagctcagagcccaggccaggggcccccaagaaaggctctggtggagaacctgtgcatgaaggctgtcaaccagtccataggcaagcctggctgcctccagctgggtggacagacaggggctggagaaggggagaagaggaaaggggggttgcctgccctgtctcctacctgaggctgaggaaggagaaggggatgcactgttggggaggcagctgtaactcaaagccttagcctctgttcccacgaaggcagggccatcaggcaccaaagggattctgccagcatagtgctcctggattagtgatacacccggcaccctgtcctggacaagctgttggcctggatctgagccctcgtggaggtcaaagccacctttggttctgccattgctgctgtgtggaagttcactcctgccttttcctttccctagagcctccaccaccccgagatcacatttctcactgccttttgtctgcccagtttcaccagaagtaggcctcttcctgacaggcagctgcaccactgcctggcgctgcgcccttcctttgctctgcccgctggagacggtgtttgtcatgggcctgatctgcagggatcctgctacaaaggtgaaacccagaagagtgtggagtccagagtgttgccaggacccaggcacaggcattagtgcccgttggagaaaacaggggaaccccgaagaaatggtgggtcctggccatccgtgagatcttcccagggcagctcccctctgtggaatccaatctgtcttccatcctgtgtggccgagggccaggcttctcactgggcctctgcaggaggctgccatttgtcctgcccaccttcttagaagggagacggagcagacccatctgctactgccctttctataataactaaagttagctgccctggactattcaccccctagtctcaatttaaaaagatccccatggccacagggcccctgcctgggggcttgtcacctcccccaccttcttcctgagtcactcctgcagccttgctccctaacctgccccacagccttgcctggatttctatctccctggcttggtgccagttcctccaagtcgatggcacctccctccctctcaaccacttgagcaaactccaagacatcttctaccccaacaccagcaattgtgccaagggccattaggctctcagcatgactatttttagagaccctgtgtctgtcactgaaaccttttttgtgggaaactattcctcccatctgcaacagctgcccctgctgactgcccttctctcctccctctcatcccagagaaacaagtcagctgggagcttctgcccccactgcctagggaccaacaggggcaggaggcagtcactgaccccgagacgtttgcatcctgcacagctagagatcctttattaaaagcacactgttggtttctgctc

SEQ ID NO: 1686 - DNA, 3252 bp, Homo sapiens
ccacagatcggagctatgtgagtaggagaaggagaactaaaaagagtgtggatacaagcgtccaaactgatgatgaagatcaggatgagcgggatatgcctactagatcaaggaggaaagctcgtgtagggaaatatggtgacagcatgacagaggctgacaagaccaaacccctttccaaagtctccagcatagcagttcaaacggtagcagagatatctgtgcaaactgaaccagttggaaccataagaacaccctccatacgggcacgagtggatgccaaggtagaaataattaaacacatttcagcacctgaaaagacttacaaagggggcagtttaggatgtcaaacagaagcagattcagacacacaaagtcctcaatatctgagtgccacatctccacccaaagacaagaaacgcccaacacctttagagattggttattcatctcacctccgggcagattccacagtacagctggctccttccccacccaaatcccccaaagtcctttactcacccatctcaccactttcaccaggcaaagccttagaatcagcctttgtaccttatgaaaaacccctccctgatgatataagtccacagaaagtactgcatccagatatggctaaagttcccccagcaagtcctaagacagccaagatgatgcagcgttctatgtctgaccccaagcctctgagtccaacagcagacgaaagttccagggctccttttcagtataccgagggctatacgactaaaggttctcaaaccatgacatcctctggagcccagaaaaaagttaaaagaactctgccaaatccacctcctgaggagatttccacaggaactcaatccacattcagcacaatgggcacagtttccaggagaaggatctgcagaaccaacacaatggcacgagccaagattctccaggacatagacagagagcttgatcttgtggaaagggagtctgcaaaacttcgaaagaaacaagcagagcttgatgaagaagaaaaggagattgatgctaagctacgatacctggaaatgggaattaacaggaggaaagaggccctattaaaggagagagaaaagagagaacgagcctacctccagggagtagctgaggatcgtgattacatgtctgacagtgaagtgagtagcacaagaccaacccgaatagaaagtcagcatggcattgagcgaccaagaactgctccccaaactgaattcagccagtttataccaccacaaacccaaacagaatctcaactagttcctccgacaagtccttacacacaataccagtactcttcccctgctcttcctacccaagcacccacctcatacactcaacagtctcattttgagcaacaaactttgtaccatcagcaagtttcaccttatcagactcagccaacattccaagctgtggcaacaatgtccttcacacctcaagttcaacctacaccaaccccacagccttcttatcagttaccttcacagatgatggtgatacaacagaagccacggcaaactacattatatttggagcccaagataacctcaaactatgaagtgattcgcaaccaaccccttatgatagcacctgtttctacggataacacatttgctgtttcccatcttggtagtaagtacaatagtttagacttgagaataggtttggaggaaagaagtagcatggcaagcagtccaatatcaagcatatctgcagattctttctatgcagatattgatcaccatactccacgaaattatgtcctaattgacgacattggagagatcaccaaaggaacagcggcattaagcaccgcatttagccttcatgaaaaggatctgtcaaaaacagaccgtctccttcgaaccactgagacacgccggtctcaagaagtgacagatttcctagcacctttacagtcttcctctagattgcatagttatgtgaaggcggaggaagacccaatggaggatccttacgagttaaagcttctgaaacatcagattaaacaggaatttcgtagagggacagagagcttagatcaccttgctggtctttctcattattaccatgctgatactagctacagacattttccaaaatctgagaagtatagcatcagtagactcacacttgaaaaacaagcagcaaaacaactgccagcagccatactttatcaaaagcagtcaaagcataagaaatcactaattgaccctaaaatgtcaaaattttcacctattcaagaaagtagagaccttgaacctgattattcaagctatatgacttctagcacttcatctattggtggcatttcctccagggcaaggctccttcaagatgacatcacttttggcctcagaaaaaatattacagaccaacaaaaatttatgggatcttctcttggcacaggactgggcacattaggaaataccatacgctcagctctgcaggatgaagcggataagccatacagtagtggcagcaggtccagaccttcctccagaccttcctctgtctatgggcttgatttatcaattaaaagggattcttctagctcttccctaagactgaaagcccaagaggctgaagctctagatgtttcctttagtcatgcatcatcctctgccagaactaagccgaccagtttgccaattagtcaaagtagaggaagaataccaattgtggcccagaattctgaagaagaaagcccactcagtcctgttggccagccaatgggaatggccagggctgcagctggacccctgccaccaatatctgcagacaccagggatcagtttggatcaagccactcattgcctgaagttcagcaacacatgagggaagaatcacggactcgaggctatgaccgtgacatagcattcatcatggatgacttccaacatgccatgtcagacagtgaaggtaaattgggcctcaaactaccctgttactctcaaaactcaaactcttatttttctgcatgtttaatttcccttctccagagatgtatcctacttttcttggtgtgtcttttgcatgtttacttcaattttatttcttgtaaatggaaattttatcatgtgtatagattctgtagcatgcttttctttatttagttttactttattcctttattgttctgtttcttgattgtttgcttgatttgtttggtgtctgcttttctaaaaccattatcaaataattctgtcaataaaatatggtcatcct

SEQ ID NO: 1687 - DNA, 3419 bp, Homo sapiens
attaactaccctttgatttgtttgtgtgacctgatttttcctggacgcctgacaagaactcgggtaccaagagggcagagtgtaaaaggctgtcaccctgaccctccgctgagctagttaacacctagccatccacggacggcaaatgctaaaagagcagtgattgtaacacacgtcttcttgggcttcgagggtcacagacaccccctcctggatggcagagctaacggagcattgtaacacacttggacactgccgcgggtctgcacaaaccctgctcccgccagagaggcagctgcaatatttaattcagcctttggaagttttttgggcatcgttataacacccctgctcctgctgctttttcttggttcatcttcttctgtgcctttcacatctattttttctcagctttttatgactgttgtggttcctctcatcattggacagattgtccgaagatacatcaaggattggcttgagagaaagaagcctccttttggtgctatcagcagcagtgtactcctcatgatcatctacacaacattctgtgacacgttctctaacccaaatattgacctggataaattcagccttgttctcatactgttcataatattttctatccagctgagttttatgcttttaactttcatcttttcaacaaggaataattcgggtttcacaccagcagacacagtggctatcattttctgttctacacacaaatcccttacattgggaattccgatgctgaagatcgtgtttgcaggccatgagcatctctctttaatatctgtacccttgctcatctaccacccagctcagatccttctgggaagtgtgttggtgccaacaatcaagtcttggatggtatcaaggcagaagggagtgaagctgacaaggccgacagtataacaaaggaggtggactttctgtagcaatgtatatatgtacaggattgtacatactagcaattctgaagacttgtacttgtgaatgttgcctcaatgcatattttatttttttacacaaaaatatgagatcctgtttaagtgccttaaaatgtatttgacaagagcgttatttccaaaatatgctttgttgattactgccaggggtggtacaatatttgggggttaattttgctttcctaatgcaggaatcagtcatggtaagtgacaaaaagcaaacatgctttccctgcagcacctttgtgtaatacaaccctatagtagttactgtaatgtttgaaatgaggtcacaccatcaggaaaatgcccttctgatgacagtgaaaatttccaaagtcttattcatgcatactttgatttactgtgtgattctttttttctacgactgtgacatgcctcttccttatcaactcagcaggggtcatagatcgaatagatgctgaaaagcgtaagatatatgcattccttgacatcatttttaaagacattccttcaaatagtttccacacagaaattcctcactcccattatgagagattgtggttatatgtcttaaatttattataagctgcttcaaagaaagggtctgaatgtttgaattatgagtgaaatcatgtgaaattttgagttaaactctgtgatttgattttcagggtctttaaaatatatcttaatatcttcttcctctttattcaataatttctgtcttgcacttacacactcataacagccaaatatgaggcacaaaaatgttacaatcagtttgaaagcagcatcaattaatggtagattctattcacattccacaacccagaccaaatttttttcctattacgcagatgtgctgagcactttccagattgcccctgttggccaaaagcagcctgttacatcctggaattaagcacacttaaggtatttgagacaatttattaatgaaaatttccttggcagatttgacaaatgttggcaatatttttttaaaagttaaatcatattgctttcatgaataaatgaaaatataaaggtcatggatgcaaacaaatgttacatatacacattctgtctctccagatgaaaagaacatgcaaaaccatttaataaccaaaatatcaagtaaaattagttcccaacggggcagcagctttcaaatgagtgtccaatatttgcttctgctatagctgcaagaactgtaactggacccaagtagagaatgaagccacgtatagaactacgagaacacttttctgtgtttcccccatgccgtcctgtcacatcctcttacacgtcctctcttgatttgatagacaatattggcatcctgggtctcactgaggccgtgctatgtcctcagcagctgtttttgttgtttcgttattatgcccacaacaaaaaatcattccttagaaactcaccaagtttatctactgtgtaaatttatattattgttactaccaggtctcatcttttgtcaatgtcattgaataaacttcataagagttattctcagtgtgaattttaaggctaatgccagatcctgcaaaaatctatgctaaccaggctgtagtacacactgttataaagaattttacttgtgtctaaaactacagtaattttgcttaggtaattgtgcttacctatggagcacaggaaggctcttaggttttgttcctacaagtttctttgaattttggagtaaatggaagtgtctgtctgtctgtcatctatctgccctatcataaaaatctttctccctaacattaaaatactgatccccgcccccaacttatctacctctattgtctaacacctatagtaggtgtgatcatgggataaaattcaactgaaaatgctatgataacattttatcgtttgctttaaaaatgtgctttgttttcaaataatctttacatagtgaactttggtggcgttagtgatatgtttatgcctatttcttttttttacacaaattccttggcatattttttcataaagaacaaaaaataaaatcaaaatttatttttaattcatgcttattgggatttaattattcagagcttaaaatattttgttatgtttatacactgtaaagctatctgttttatgcatttgttttgtctaaatgtatttatgaaagaaatacattagattatatttatgtttactcatttttccacctggattttttttaatggttgttacaaaattagattttttaatgggtaataatgttggtattttcatgttttttcttagtattaaaatttttgtgggttttttaaaatttttccctattctgttaaaaattaacacacctctagctaatgttcagtgtttgtgctaaataccaaattttttcaaaaggattggttaagtcataaagtggattatttatgatgactggaagatgaaaataattatatgattaaacaaagaatgtttcag

SEQ ID NO: 1688 - DNA, 3269 bp, Homo sapiens
aacgtcttccaagggagattgcgtctccactttcaccctggtactgagaggttgagcacaaaattggtaaccaatgctgcgcttccagcaaattttcccaccagcacccaatcctgggatacttattctctttgtctcacatcctacaggaacgcagtcgcggggtatatccccctgaaaaccattggcctggggtacatcatctaaagatcctaggattgctgcaggtcagcagtctccactggaaaaaaagatcttgcatgtatttcaagtcctctgatgaatcatgtgatctactagaccctgaagatacagtgaagagcaaaagaacacagatgaaatgagaaacaaaaacgatggagaaaaccaaaaaaggggacacatgggatccaggcaataggagagccagcataagagagaggcagagggatgcccaggatgaggtgaagacgatcttggaaatcagcccagatgtgcatgcaccagtccacgtgtggcaggaccaagggaagtgtcttcacaaagatgaggctttgatttgttggagaaactgttaccagaaaaacaggtcccgatcccgaccccaaaagagtattcttggatcttgcacaggaaggaattaaagggaagtaagaagttacagctcagtgcaccatgaagttgagacagagatggagacatcccagcaccacttctctggaacaggaaaggtgatcggggaaggaatgtagcctgagagtagctccctccttttctatctgcgggaagaaaacgtcctgtgagaggccaggaaggtagcagggccatgaggtcctagaggaacctcctagtcttggaacctcgagaagtttccagaaatgtgtgactgcaaaccaagggcaggatcaggagaaacaaggaaagcagatgtgggtcctggaccaactgccctcctaaggtctgtcctcagcagggaccttcccctgacctgtgattactggggtcagatccccatcactacaatcatcaagcagtgaccacagctccagtgaccacagctccaaggagaaccagcccgggagatctacaggagatcgagcaggctccccatggcccctggtacccgcgcgctgcagcgtctccttcccgttctccaggtgtctgcggagccactccatgcaggtgccctccaggcatactgctcatacccgcggaggagacgcccgtcgggccccaggtcgcagccaaacattccctggaggatgtgataccctggcccagttcccgcggtcagccccgcccaccgagccctggcccggcccctagcaacctgcggagattttggcctcaactgaagatgaaaccagtttccaatgatcagaaatccaggagaggtttccctgagtgcttctggctcagggcctctcacaaggttgcagtccagttgtcagcctaggcctgcatcatctgaggacttcactgagcaaggccatagaggagtcctcgagctacaattggccatcagaggagtcccctgtctcctaggaatgtcctgccttagtgtcactggggtacactcctttggaaaccagaacctcgtatcctgcacagcccagtgttgggagataaaatatgcgaaataccccattgagtgaatctaagagattggacatggagccaaacctgcttccgccttttgatttctggacacacatgttcttcctattgagaacacagaactctagagacgtctctgattcaaacaatgcactgtgtcctgaaagatggcacccacccctcagagtgcttcctccaggctggcactgagttgtgcctgtagaagacctgtccagccttccttgtggctggcagctcctgggtagtgcagatggtgataggattagtggaacccacagccgtggaaacactgaaactttccctgcaaagtgggtccttcaggcagataatgggctaggagcactgcctagcctgcagaccaggaatgtcaacagcacccagagagtggtgctggctgtgtctgagagcaggacaggaaaacccacccatagaatcggtacctaaccctgtgaagatgaaactctggcccttccaggttggaagtagctaaatgtagtcaacttgttacttagtgggtagtcatgtaaagaaatagtgccccactagggcacatcatgggcctcaattgctgatgagttggacattcagaggtggcagcagctggacctgccttggtgtggggaagtcagtgctgctggccccttacggagcctcatgcctgccactgtggttgctccattcatgcactcatcctaccaggcctgggctgacccatggtgaaagctggctaactgccatttgtctgtttggtagttcagtgccacttcagacttgggtgttttctgtgggtgtcagcaagggattcaagctcaacccaggtggactgttttcacctgatgatgaatgctgttgggcctgtaccatctatgactttgtgggtcacacaggcacttggaaccccgtagttgcttggtatcccgtggtcaaacattctattgaatcaggacaaggaacactaaaagttgcttctaacagggggcatgtgtctctgctgtggatgacatgatcttactccagaatcccaggccctccactgtgactctcccactggtgcttggttcagctccatcctgtgtctttccccaccactggcaccaccagccccaggggtctgagggatggtggctgcttgtaccatggcctggatctgctgcagggtcctttcctgtgtaggccccacttgaagctggcatcctcctatgtcacctagactgtgggccaaagcaaaatgtctagatgtggaatgtggtgttgttataattcaaagaggctcaccaagcagtgtgcttccttgcttctggtgaggatgcaagatgcaacagtttttcttttaccttggaggggacacacctgcattcccctaaacacttggcacttgttcacccataaaacttcacttcagtgcccacctttgaagctgtataaggtttatcttcaccttgtggggtgcgtgtgttttgcaaaggactacagtgcactttcttcctgctgctcatctactccagtcaacatgaagttgtcaatgaaatgtgctgatttaatatcctaaaggatatgcagtatgtccagtacagtcttaagcctatactatagagggcacaggtgttacaatagccctgaggcaaacaataaataaatgtgtcgttgattcc

SEQ ID NO: 1689 - DNA, 3433 bp, Homo sapiens
agaggagggcgcgcgcccggaggcagcaggcggagccgggaggcgggcgttcgagagaaaatggaagtcgggtagcggcgactgcggcgctgcgggctggcggagcggagcggcgcggcgcggcagtgttctcaggcgctgtggtctcaccttccactggggcaacaatgggccatttccagcagggacggcgcagtgttggcctgcatgcctgactgccacacacctccagaatcaggtgtctgaaaagtggcagtgacgaaagaagagactctcccggccgaggccccagtgcatggagagaaggaagaaatcaatttcctaattggtaccatatacatcagatggatggtttctagtgtgcttccaaaccccacctcggctgagtgttgggcagcacttctacatgatcctatgactcttgatatggacgcagtcctgtcagactttgttcggtccacgggggcagaacctggtctggccagagacctgctggaagcacctccaactgtgatccaccttcctgagcccggtcgctgctgcctgcacgctgtccaggggtcccggctgcacccagtgggacagagggtggcagtggtgagtgctcactcacctcacccactgctgggtcctgcctttggctttcacaggcaaaaactgggacctgacagccgctctgagcgactatgagcagctccgccaggtgcacacagccaatctgccacatgtgttcaatgaagggcggggtcccaagcagccagggcgagagccacagcccgggcacaaggtggagcgaccctgcctgcagaggcaggacgacattgcccaagaaaagcggctttcccgggggatttcccacgccagctcagccatcgtctccctggcccggtcccacgtggcaagtgaatgcaacaacgagcagttccccctggagatgccaatctacacattccagttgccagacctgagcgtgtacagcgaggatttcaggagcttcatcgagcgggacttgatcgagcaggcaacaatggtggctttggagcaggcagtgtttcctcaccaccctaacatcccaatgaagaaagcgttcaagaagcaagacaaactctcttctttggaatgtttaaggagaaaataatgagtccaaaacaaatgtctaaaacagatttaggttcttcctgagacaaagcaatgccagtttcactcataatcattcacattataaacattgcaaaatcacatatctgggggtttctcaggcacgcatgtggaagatgttatggctgtctcctcaggcccaccacgcccctcccagtgggagccccgcctgcctgcacgggctgacagtgcacatggagcatgtcctcagccagtgggaagccctgctcctgctggggtggggaagcatcgccttccagtgctgacccagccttcagccagctcttcatgtccactgtggagtggagcctccacttccaaggcttggtccgtggagacgtccccagatgtgtcatcccaggagtttagggctgcagccagcaatgcactgttagggagtagagcttttctcggtgctcggcgaagacccaataaaattaccaagcactttctagagttccagaagaagacaggagagaagtacctgcaggttggtatgattctgatattggtggatggaccaatcaggaccctggtaggaaagaaaaggcagcacaaaactgtgagataaaggactccataaagggactgctttccaaggagtgggcaggatttaaggacactagtgaaggatactaccgttcctgggactaccctcaggcctggcaaaaagacaagggatgagagtggctgatggagatagccacgggcagtaggtgtggcatccgggagagagaagatgctggggaaataaatactctgaccacactcttcctccaccatccaggttctgaccagtgcctcttaatggcagaagggcagattgcggggagctcactgatgtggtccacgcaggtcaccctctgcatacagagcagcatggagaaggatagacggtagatctgtggggccaatgggaaacatccagaaagtcaatgtgccgggaagttttaccagacctggcttctgtgtacacgtgtacacctgctttcatgccattgcttgtcattgtttgcccagggctgtcgtcatccaccactttcaagagggaaggcacaagatgcgtttagacaaaggacgagatgtgcctagtggggcttatttgtgttgggcaggcttgcagtcaggtcgtagccacaggactcatagaagcctcaccaatggcatgcttgacattagaacaggctctacattcccaacagctggatctcatgttgtgactgtggagaaattctcatctcagctgcttcgcagccatcaagagcaatccaatgactggcacccacagccttgctctgtcttacctcagcaagactcaacaaacataaaacaattcagctagattagcaataatctaaaccactcactgtgggggctggctattttaaagacgcttctatatgactaattcagataagatattttcaatagaaaaagctcactattcatagagaagcggaaattagtatttgttaagaaagaaacaagtttcatgggttactctctgttgaatgctacggcggtgtagacctttatacagctcagcactgacgattgctaatagcttgggtgatcatagcagctgcctgagtgctgtgtttcgtgtgaagcacagtctcatgcaaggttgtaggtagaccccaccatgttaccttctccttgagccctaccatgcttagcaaaagccttcacttcttttgaacgtcttttctgttatttttttccatattttgcattttaatttttatcacttatattttaccttccagactagcattttaagatgggactctggcttcatccagtcttgaaaaataccttttaaaaacccaaacttagtgagttaagatgttaaattatgaatagctcattgtttatgttgggcaccacgaagagaaccaactggaagcagagatcagtgaaggcaggaagctcaggctcccacccagtggtggagaagccatctggtctacactcgcaggaggccttgaggaagtgggtctcactcttcagggagtggtcaaaggtgcttgtggtgcaattcgcgcctgaagatcagggatctgcctgggacaggagtcctagtagccaacatgtcttcctcgtccctcacgctgaaaaataataaaagtggccaaacgcgatggctcacgcctataatcctagcactttgggaggccaaggcaggagaatcacttgagctcagaagtccgagaccagcttgagcaacatagtaagaccccatctctacaaataataaacaaattagccaagc

SEQ ID NO: 1690 - DNA, 3227 bp, Homo sapiens
attgtgctaagcagggctcaggatggccaggcaggaatgaggctgggaagagaggactggggagcagggtggagttcctcggggcctgtggcaggcaaggcagggcagggaggagacaaggcagggcagggaggagacaagccagagatactccacctggctagaatctcccacaggcgtggcccaaggcacagaaactggggtggaatgagggtggactctggtcagtgggactcagtaaggtgggttggaaccagtgagctggatgtgtggcccttcaggggatggagatcctagatgtggactcagaaatcagtgtgtttcctggaccctcctgacaagtaagttagaacagaagaggcatctatgtggggccttgactcaccccaggtattttgccactagtttcaacattccttctctgagaacacaaacatacatgggagatagaggtgtttacaatcctatttcctacctatacacaaagccctgggccactgaatcagtaaaatttatggtgattaagcctctgcacaggggtggtccagtatcaccatggaaacatcacacccttctcccagcccaggaagtgatggagggtgatgggtaggcacagtgtcaggaatcaggcttagacagaggcacgtgcagcactggagatgactgatggagggagagagaggctctggagcaagggagcttatcacctgctggtgtcccaaggaggaccagatccaactgagtgaatctagcagcacaaattgggatctgagctctgcagatgtgggggaggaactggtaatgctccctcatagtccctccctttgaacaggagctggcctttgactctcaagtccagcatctagttattactgagatgtgcttccctgaagattccttctggggtgggaagtagggctgccagtttctctgcggcaaaccccagagattaggatgttgtttgtttttcaaattttaacattttattgtgctttttcctctatcttttaaagatcagagcccagttattggccaaagcagagcctctggctgtcctggacaaagctgccagtcagagctgcttgctcagtgtggggcatctggtgtgactggtgggaccctgtgtttcaaggtactgcgccccagcgcccagcacatgctggggcctcaggagatggttgtaggatatctgggtctaagtttcccccaaagccaaccctgagataagacttgggtgcaggatcctgggaagcccaggggaaactacaggtgcagcgcctggaaaagagaaagcctgtgaagtttacgccagagcccactccagctggggcctctgatgagcctgtggagagcctcggggtgttcccttcagaagacgagagcctggggagacccctacactgagaggagggctgcccctcaaggcagaaaggtagtagcactgcaacagctgcaggtgcactctgggggcccaggctgagcctctagtgtctgtacaggggatggtaggccagtgtttgttgagacttggacaagtcttgcaatgtggcaggagatgatggccaatgtgcagcagagagccatgcaggggtcagctctcctcctactgagccctcttcacctctcccagcccctactggtgcactcccatttttgcctaagctgtgtgagtttggtttctggaacttgcacccaaactgtccttactgaagtggaaatgacattataaacccaaagccttggagacaaatgtgacctcccttcgctcttgctctagaagcaaggctgggtgggctgagctcccatgctcaaaacttgtgttgtgaaatgctccaaggggtgctttttgtgaaattactgacagcacctaggacctgatggccagttccagatgctaacaagatgaagtcgaccaactgctccttttaccacacaaacaacttttatttgcatgtggctacttagtaaatattaaacagtgatcatcctagacagctgcccggcaacaaaagggagacacatggtggcttttcaaggtatcaggttgcaaaaaaaaagtattagagtgatagaaagtgagcagtgagcagtaatgaagccagaattttctttcccaggactcctgtagttctgtccctgcccctgcaaaccccaggaggagaaaaaggttgatactaaactgtaagcactcgaatcagttaagaagcccctttctcataatttatttcattccaaatgacagaaggcaagtgcagttacagggctgtgccctactcatctgggtcagcagaagagcacagctttctttagaaaaacatttactttaaaaccaagcaccttgatttgatattttagtgtgcacaactttgcccgttgagccctggcccaacccggtgggcaccaccattctgccaggcctcgaagggccacagggtgcttaagagaatgtgagggggtgagtgcaggtggaggagcgcggtccccgggacatggttccttcactcctcgctgagatcatgcggcagccttttcttccaatccagttgtggcaggagaatccttggatgtaatgttttcaccttcttccctgagggtcttttctgaggaaccaggcattttcttgtccttaagaggtggggtcttggagtcctgacccaggcgtccggcagctgcacagtttctgagatgtcagactcatggaggagcaggctatgcccttccctccccattccccacccctcaagccccaggtcttactgtataatgatttattttccacacaaatctaccctcaaaattggcttcatgcagattttccttggatcccaatgctggagaggaaaggggaggggaagtgggagggtggtgggcagggtggcttgaccctgccagcctccccgggaactcaggaccatggctccccagcacaggctgaacaagtaccaggagcaaggtctgtggatctgcattagatctgaaggccttggtggcacttcttcaattttaagataatcaggctgagtattcccctgaacctactctagggaagcccacagctgaggcaaaatccccaaacaggcttgacagtggagctgggattctcaacagtaagggctttcatgtgagtttgctagaagaggaagttcacggtcagataattccaagagacagttactttcccaggaaaaggaaaataaaggcttcctcctattcagtagagtgaattt

SEQ ID NO: 1691 - DNA, 2992 bp, Homo sapiens
aaagagtgaagcagcgttctaaagggaagcatgactactattaattctatttaaaatgggtgtaaagaagaagaaagaaatgcaagttgctgcgctgaccatttgccatcaggaccttgaaactttgaaatcttttgctgatgtggaagggaaaaatctagcttctttgctgttacattgtgtgcaactcacggatggagtgtcacaaatccattatattaaacagattgtgcctctgctggagaaagcagataaaaatggcatgtgtgatcccactattcaaagttgtttggatatcttagcaggcatttatctttctttgagtctaaagaatcccttgaagaaagtattggcaagctcactaaatagcctgcctgatttttttctacctgaggctatgcaccgttttacttctcgtcttcaggaagaattgaatactactgacttatactcttacaggaaagttactgacaatatttcttcctgtatggagaactttaacttgggtagagcaagtgttaataatctgcttaaaaatgtgcttcattttctgcagaagagtttaattgaaatcctggaagaaaatagaaaatgtgctggaaatcatattattcaaacacagttgatgaatgacttactggtaggcattagagtttcaatgatgttagtacagaaagtacaagatttccagggaaatctttggaagacttccgattctcccatatggcaaaatatgtgtggattgctgagtatttttaccaaggttttaagcgatgatgatctgttacggactgtacagagcacatctggattagctattattctttttattaagactatgtttcacccgtctgaaaagattcctcatttgattagcagtgtgctgcttcgttcagtggactgcaccagtgtccccgagtggtttatgagcagctgcaggagcctctgttgtggtgacatctctcagtcagctgtcttattcctctgtcaggggacacttgccatgttggactggcagaacggaagcatgggtcggagtggggaggccctgctcttggatactgcacatgttttgttcaccttgagttcacagattaaagagccaacgctggaaatgtttctgtctagaatcttagcatcctggactaattcagccatacaagtccttgaatcaagttccccgagcctaacggacagcctgaatgggaattcaagtatagttgggagacttttggaatatgtctatacccattgggaacatccattggatgctctgagacaccaaaccaaaatcatgttcaaaaaccttctccaaatgcaccggctcactgtggaaggtgcagatttcgtccctgatcctttctttgtggaattgactgagagtcttttacgattggaatggcatattaaaggaaagtacacgtgccttggttgtttggtagagtgcataggagttgaacatattttggctatagataaaactattccatctcaaatcttagaggtgatgggagaccagtcattggtaccttatgcaagtgacctcttggaaaccatgtttagaaatcataagagtcatttgaaatcccagactgctgagagttcttggattgaccagtggcatgagacttgggtttctcctctcctttttatattgtgtgaaggaaacttggatcaaaaatcttacgtgattgattattacttgccaaaattattaagttacagccctgaaagcttacagtacatggtaaagattcttcagacttctattgatgctaaaactggacaagagcaatctttcccatccttagggtcttgtaatagcaggggggctctgggagctttgatggcatgtctgcgaatagctagagctcatggacatcttcagtctgcaactgatacctgggagaacctcgtgtctgatgcaagaataaagcaaggcttaattcatcagcattgccaagtaaggatagatacattaggcttgctttgtgaaagtaatcggagcacagaaattgtttccatggaagaaatgcagtggattcagttctttattacatacaatcttaacagccagtctccaggagtgcggcaacagatctgttctcttcttaaaaagttgttttgtaggatacaggaaagttctcaggtactttataaattggagcagagtaaatccaaacgtgaaccagagaatgagttaaccaaacagcacccttctgtttctttacagcagtataagaatttcatgtcatccatttgtaacagtctttttgaagcattgtttcctggatcttcctactcgactagattttcagctttaaccattttaggttcaatagctgaagtttttcatgtcccagaaggcagaatttatacagtatatcagctgagtcatgatattgatgttggtcgtttccaaacactaatggaatgttttaccagcacttttgaagacgtgaaaattttagcatttgatcttctgatgaagttatcaaaaacagctgtacattttcaggattcggggaaactgcaaggcttatttcaggcagcattggagctcagcacaagcaccaaaccatacgactgtgtgacagcttcctacctgctgaacttcttaatctggcaggatgctctaccgtcatccttgtctgcctacttaactcagcaagttgcatgtgataatggagataggcctgctgctgtggtggaaaggaacacattaatggttatcaaatgcttgatggaaaatcttgaggaagaagtatctcaggctgaaaattctctgcttcaggcagcagcagcatttccaatgtatgggcgagtccactgtataacaggagctttgcagaagttatctctaaagtaaggatttccacagctgcctcctgtctcagaaatccattcatttctgagctttaacctctggttggaatgtgtcctgggaaaggaatgcagtctattgctttgaataaaattgaaaatcagattt

SEQ ID NO: 1692 - DNA, 3148 bp, Homo sapiens
ctatggaaaacacgtttacctgagcttctgcagcctctggaaggaaagaacatcagtaccgttctatgggaaaccatgctgcttcagttgctcaaagaatccttatggaagatcagtgatgtggcctggaccattcagctgactcaggatttcaaacagcaaatgggcagttacagcaataactccactgagaagaaattcctttggaaagccttgggaacaaccttagcatgctgccaagattcagactttgtaaactcacagattaaggagtttctgactgctcccaaccaactgggggatcaaagacagggaataacatctattttaggatactgtgccgagaaccatttggatattgttttaaaagttcttaaaacattccaaaatcaggaaaagtttttcatgaatcgatgtaagagccttttttctgggaaaaagagcctgaccaagacagatgtcatggtcatctatggagcagtggccctccatgctcccaagaagcaacttctctccagacttaatcaagatatcatatcccaagtcctgtctcttcatggccagtgctctcaggttctgggcatgtctgtgatgaacaaggacatggatctgcaaatgagtttcacaagaagcatcactgagattggcattgctgtccaagatgctgaggatcaggggttccagttttcctacaaggagatgctgattggttacatgctggacttcattagagacgagcccctggattccttagctagccctattcggtggaaagccttaatcgccattaggtatctcagtaaactgaaacctcagctctcactacaagaccaccttaacattcttgaggagaatattcggaggctgctgccccttccacctctggaaaatctgaaaagtgaaggccagacagacaaggacaaggagcacattcaatttctctatgaacgatccatggacgccctaggaaaacttctgaagaccatgatgtgggataatgtgaatgcagaggactgtcaagaaatgtttaatcttctccaaatgtggcttgtttcacaaaaagagtgggaaagagaaagagccttccagatcactgcgaaagtgctgacaaatgatattgaggcaccagagaactttaaaattggttcactgcttggacttctggctcctcactcctgtgataccctgcccaccatccgtcaggcggctgctagctcaactattggtctgttctatataaaaggcattcacttggaagtggaaagactgcagggtttgcaggaagggctggaaagtgatgacgtgcaggttcagatcaagatttcttctaaaatagctaagattgtcagtaagttcatcccaaatgaagaaattctgatgttcctagaggaaatgctggacggtctggagagcctcaaccccacttgtacaaaggcctgtggcatatggatgatcactgtcctgaagcagcagggagctgctctggaagatcagctattggagatcttaggcacaatctaccatcacatgccagtcctcagacaaaaagaagaaagttttcagttcattctagaagccatctcccagatagccagctttcacatggatacagttgttgtcaaccttttacagaagcctctgccttttgacagggacacaaagacattgtggaaggcgctggctgaaaagccagcctccagtgggaaactcttgcaagccttaatagacaaactggagactgagttagaagatgacatcgccagggttgaggcaatttcagtggcctgtgctatgtatgaagtgatctcaatgggcacctctgtcaccggcttgtatccagagctgttcactctcctcctgaagctggttagctgcacactgggccagaagatgcccacttgtccctggagccataggcggcatgtgatgcagcagggagaacagcagcagatcccagacccctgcaggctttcaactgctactttaaaatgtttgcaagcccaagccatgagagaaggccttgcaaaggaatctgatgagggggacaacttatggactctactcagcagtcctagtacccaccacataggcgtatgttcactggccaggagcatggcagtgtggcaacacggagtcatactggacatcatggaacagctgctctcatctcttacctcctcctcggagaactaccggataaccggcgcagctttcttctctgagctcatgaaggaaccaatcctttggaagcatgggaatctgcgaaatgtgctgatcttgatggatcaaagtgcctgggactccaacgccactctgaggcagatggccatccgagggctcggcaacacagcatccggggctcctcacaaggtgaagaaacataagcagttaatgctagaatctatcatcagaggcctgtatcacctagctcgcactgaagtcgtctgtgaaagcttgaaggctctaaaaaaaatcctggagctgctgacagaccgagacgtgagcttctacttcaaggaaatagtgctgcaaacaaggaccttctttgaagatgagcaggatgatgtgagattgactgccatcttcttatttgaggacctggcacccctaacaggaagaaggtggaagattttttttgctgaagaaataaaaaagagcctgatttcgttccttctgcacctttgggatcccaaccccaagattggagttgcttgccgtgatgtcttgatggtctgcattccctttttgggcctccaggagctctatggggtattagaccgtctccttgatcaggatctaccaagggccagggatttctataggcaattctgtgtgaaactggccgagaaaaaccaggaaattctgtggatcctccacacacactccttcaccttcttcaccagcacctgggaggtgatcaggagtgcagctgtcaaactcacagatgccgttgttctcaatttgaccagccaatatgtggagttactagacagagaacaactgaccacacgactccaagcacttcgtcaagatccatgtattagtgtccagagagcagctgaggctgctttgcagaccctcctgagaaggtgtaaagagacaagcattcctctgtaagccatcaagaaataaactgctggcttttcct

SEQ ID NO: 1693 - DNA, 2894 bp, Homo sapiens
aaatgataacagaaattagacgacggggttccaaagatcccctggtgaaggctctccagctgcttgacagtccctgtgaacccgcagacggtggcctgaaatcagagaccttggccaaaagacggagttccaaggacctcctggggaagccgccacagctatacgacactccctacgagcctgcagaaggggggcccagggcagaggggaaggcgcggcccccagacagccggctgcccgagaacgacgagaggcccgcggcagagtacgagcagccatgggagtggaagaaggagcagatcgtgcgggctctgtcagtttgaaggagctgagcgaccttccttcagggaggagacagtgaggcagcaccaccggcagaagagctggacccagaagatcctgaagccagccctctcggaccacagtgagggagagaaagtggacccgggcctgcccctggagaagcagccctggtatcatggtgccatcagccgtgctgaggctgagagtcgactacagccctgcaaagaagctggttacctggttcgaaatagtgagtcagggaacagcaggtactccattgccctaaagactagtcaaggatgtgtccacatcatagtggctcagaccaaagacaacaaatacacactgaatcagacaagcgctgtgtttgacagcatccctgaagtggtacactattattccaatgaaaagttgcctttcaaaggggcagaacacatgactttactctacccagtgcacagcaagcttcactaagattcagccactgcaagccctgggcctctggcaccttcaagggcatcatcagcgcacaaccagcatctcagaggacaaggctggactagcaactgctagaaaatgggagtcttccttgaaaagtcagagagtgatttgttttgttttgtttgagacgaagtctcgctgtgttgcccaggctggagtgcaatggcgcaatcttggctcactgcaacatctgactcctgggttcaagcagttcttccccatcagcctcccaagtaggtgggactataggttcgcaccaccactcccagctaattttttttttgtatttttagtagagatggggtttcgccgtcttcgtcaggctggtctcaaactcctgacctcaaatgatccacccacctcagtctccccgagtgcctggattacaggcatgagccactgcacccggccaagtctttggtcttaaagtgattccatgacactttgtttgtggcctgtcccttgtttccttgctaagtagttctacaataagaaatcatgatttagctgttgcctccagctctggggtagggtgttctttttatggtgtgaccctcaggaaggttaagtcaggagttcaggagcatcagagttctctagaaatgtgcctacttgttacctggaatacctggtctctaaacaaaccaacaaaaaatccacgtggcttttccacatgatggtgcagactggaagaggatgttatattggactcgttattggggaaatgaatgagcgggagaaaatgtgaatgacgggcaagaaggtggtctttctccctcagaagtcctaattcagctctggagttcatggaaatccgcaacttcagagtgtggcctaaggattattttgttggtcagcctttccaagaaagtgtgtgttctctcaatctctgtggattttctcattttttagcaaatcagtgagataagcataaataggaaggaagataccccaggtttaagaatcaccaatatcattaggcattggcatcattattagaattctgaattatagaataaaaggtacaacaaaaatttcatttctgaattttaaaattctggaaatttgcaaagctccacaactgtttttttactgaattaattacatagaacttcgatgtcttttgtttcatcatcattgggcattttagttgctatggaataatttttaatttttgtctctaaaattagatttgctttgtagtaaattttttaaaaatgcaaccctaagatctgattatatgaactgggtctctaaagcctacaaagattctctcgttctgtaccaagcagactgccttgtactatacagaagtgtttgaaaagacctagagggtttctcttaaataccattacttaagattcatagtattaggatctttatgatttatcatgagcttatatcaccagtttatttactgtgaaaaaaaccatgggaatggcatactgtgagaagagtactatggtgaatggctccagaattaaaattcagcagatgtgtctgtattctggggttggtcatttgggtctcaaaactgccccatatgcaaatgtactgactgtcatcaatgaaaagttaacctttgtagcttataaatacacacaaaatgttgatttggttaattttttaggaaagtatacctttgtagttactagttacatttgactgtaagatttagaggttagtaaatttttgcttctttattcagataagatctcagccaaaaggttgtgtgatctttgattttaaaaatttaagaggaacttttcctcactggaacacaatgattttattaataaagaatgtaggctgggtgcggtggctcatgcacgtaatcccaacaatttgggaggctgaggcaggcagatcacgtgaggtcaggagtttgagaccagcctggccaacatggtgaaaccctgtctctagtaaaaatacaaaaattagctgggcacggtggcgggcacctgtagttccagctgcttgggaggctgaggcacgagaatcacttgagcccaggaggtggaggttgcagtgagccaagattatgtcactgcactccatcctgggtgacaagagcgaaactccatctc

SEQ ID NO: 1694 - DNA, 3218 bp, Homo sapiens
atgttgacaacatcagggggaggcacaggacctttggaggggctacaagaggaagcctccatttcccttataacagccctcacagtgtcccttaaaaccactagaccctgctgtttgttcattggaagagttagcccagcttttgaccagcttctgtggaacatctctaccctgccctgcagactaccctgtgactcctggaagtctaggtcctttgttgcatggagaggatgcaaaccacgtgctgcagctcccgatgccttttccgagcagattcctcagagggggtgcctgacatcagagatgaatttcagccaatgcctccgaagaggcagatgcagaaacctcactcctctcagtaaccctgagcaaagcactcaacctctctgagcctcgggtttccatctgtaaaatgggctcaagctaagttgtctctccagtccatcccaggcctacccatgtacgactaattggatgaagccaattctccccctttctccaagaaaaactggtctgcttgaagccccattgctgagcttccatgagctcccacagggagacatacacactcacacacacactcgcacatacagtcacatactcacacagacacactcacacacagtgacacacatgcactcacacatggatacatatactcacacacataaacacacacacaaacttacacacatatacatatacattcatatacacatgcaatcacacatacacaaatacacacatacacgcccttacacaggcttgcaaactcatgctcactgtttttcacacacacattctccccagtatagctagtattgctcctaggtacagcagcttgcttgtgtcatctttctggttctgctgcacccggcaccacctctgcaggtccccccctgggctgccttcatggctgagacaaagtttgccaaccacagccatgtggccctgaacaggagaactgtccagcgtgccctgagttaggatgtggcaacctcttctcagcactaaaaacggggacacgaggtctcacagcaggacagaacatttgctatcaggatgcttcatggtataagattaagacttatcatttattgactacataagtgtctgcatgacagatgctcctacaccttattttatttaattttcacaacaaccacatgaggtcttgatccaagtgaatttatcttcaatctgccaaatgtcatcctgataaactcagggcagtatcccagcttttagagaccatcgtggatttggacactgccaactgctgacttagataccccacccagcttcccactccaatgctaacatccagatcttaataagaagaatgaggaggaggaggagggagcaaaggagaagatgaatacataatgatgagaaagagagggaagacgaaaaaaggagggggagacaataatagcaacgaggaagaaaaggaggagagaaaattaggaactatctggggacctttcatcccacccgggacccctgagggttactgctgttgcatgcatcagcactgcatggagtaaggtcagagatgtcctccagaaccccaacagaacaagggccagaccgaagctcctcaaggtggaaaatgacatgagtctggcttcgcttctccacagggagcccccgccagctcctcgtgcccgtctctcccttgcctacagactcacagccttccgcttactttaggatcattcccagggtgaacatcagatttgagtctcatccacctccaggcttcatccctaatgcctctcccacagcaccttagatgggggatctcattccaggtcatgccatgccctggccagggtgttctctgggtcggggccctgagcacacacacagcagcccagcgctgcctggctcatgctttcctcgggggacccacctgcggcctttgcacctgcagatcctcctctgtccagactgctgtgggcacagcgcagttgcaccttcctccccttcacagacaccagctgctctagacggtgatggatctatgaagcccttgttctccttgctccgaagatgatatgaaaagttgctttgtggttgtcagctctcctcagtaggctcagttcatgcccgggctctcaccccctgacactctttactggccctcgtcactctgtcattatgagtgtcctgggaagggctcctcctggctctcgtccctctgacctcagcaagacctccctctgaaccacacagacatctctcattatcaccccacatccttcctacttggaagaaccagatttagttccaggactcccccactgctttcagagcccccagatcacaggaaatcaagtgatgatctttgaaactttctgaaactgagctccccaagtctacaggggatctaaccatgcctggccttccccaccaacacagagcacatctccccaaggctcccaacccacgtgggccacaaatcagggtctgctattacccaactcagcaggtgttgcagcctgagagatgaagcctcaccaaccccaccatgttaaaagctcatggttcttggtttatcacccgtcccctgggccctgactgtacactgatcattcactcatctgggaaccactggccacattctcccacattatctgtctctctataccttacccaggtaaccgagactccaatccagctctgctgtatccaacctgtgaccttgggcaaagtgtggatcctctccatgcctctgctttctcacccgtaaagagggtcaccttggatctgtcttcactggattgttggaaagattagattgattagtacagtcaaagtgctaaggagcctggctcagtaaatgttagggggatcagttcttatcacactgagtgcaaagggatagagtccactccatggaggccttcccatcactcctgagctctcagggaccagcgacctacaatgtttaaagaatgaccaaacagcttgggcatttttctccttcccgctccaactacagaagaaagaactcttggcaaacagctggataaactctttttcctgagatgtctgaaggcacctgccccaagccaactggccagcctcctgctgttctgagctgcaggtcaggcaccagatcttattcagagacaccatgtacccccgaccctccatgcagtgctttgctgctctacctttctcttcagctaaaacatacaaaagcagaaaat

SEQ ID NO: 1695 - DNA, 3230 bp, Homo sapiens
agggcttcaccatgccaaatccaaaatgttctgttgttgatctctggtatcaacagctcagaaactgcagaacagacccctgacagttaccaacactttcctccaaacagcattctgtttactgtttcatgtattctcaggcacatgcacacgaagacggatcaagccgctaccccaaaccggcggcaaatgactattcttttgttactgaccatcaggagttcaactttgctccactttgggaagtggaacaaatgctctggtgaagacagggagcacaggacatatttacctggaggggatatcaaagagcagcctcaagacttgcaaaacaaagtcgtcccaatgaattatctgtgcctacagccgcacttggcaccttcggctaagccagcgtctgacaagcagttgttcccacggcagccacccctgccttccatcttagggactcacccagaaaattctccaacctgctccacgactacaaaactcttctaatgcttttgaacgcccaccatttgttctccattcatccaatcaactttccactgcacatcttctctctctaccggcgcccaggcaaggggccacttctcatctgtatgctaattattttgccacatggacaaaagtaataatgctttcagacaggaaactaacaggcctgaagtcgaagatggaaattaataagttgacaccactaaacgacagggaagacgggcatgcgtacagcgctctgccgggcgggtgaagtgcagcctccatcaaaaggcagcagacagacagcgccgggctgcgagtcccgcctgtgctgcgtgcatcaggctcacgctcccttagagaccacatcgctgcagcagaagagcctcggaagcatcctgctgacttaccctgtctcaggctgcctccttgaagcaacacaaaacatatccacttccccaaatcctaaggtgggagggaacttcactgctgatctagatatttttcaagctacagctgtggattaaaccagtaatttctaaccttcctgtgtatcaagcttgcaacacagtcagacacgagtggagatgtgtgcagtatgctgcttgccttgtacccacaggcccctaaatctctagagcagaatgtgtatcatgagcagtgctgtatttaatgtaatagatgagagctgtaaataccggagtcaggctgttagcagctaccagctaggcaatatatctaaaaatatctctcgtatcattgatgttatggtaaattcatgctgtggccaaagaaacctcacagaagtaagctgaacctacagtattttagatggcattgctggttaacatccaagcaaaacaaaaagaggttccaaaacctgtcacttcttaaaataaaagaatggtgacacaagagttaactctaaccaattcttaaaatcgttttcgggttgccaacctcactatattattctgtttcagtatgagcttcttgcatcgttttcttttaaaacaaaagctatgaaactacttgtctaagaaagttaaaacatttttcaccttttattattgtttgaagaaaaaaatatagaaaaagttttctttgaaaagacaagtcctaatatggtttttaaaatagctaagggaacatagatacctgatgttcattagcatttttttctggcttaaaaaagtgctgattttataaatggcttcttgagtcaagccacagatgttttactctggtggtgaccataccgtttcactctctgcaaacctctctcctataacactcaccgctatgaaaggctacgttaaatcataaaggctactttagcacctcccaccctcgccccaggaaactagccttgaatacacagactcatgtttaacaacaactccgggcagcatgcagacatagcagtgcccacaatggcattacactgaaggagaagctcttttgagagagggtccattgttggcgcgttcacacgcctaaccaagagactttaggaagtgttgtgtatgcaatcaaatgagagctggagataggcaggcaggtggagaaacaactatttttgaagtacttaagagaagaactgggagctgcaaccaccaggcaaattaagaaaaaaagaaatcctatgtaacctttacaataaaaggaaagaggtacctttttgtggaagagctggtggccatcaagccaaatcctgttccgcagtctgcttctcacccacgcagggctctgtctgccgtggagagaccatcgcacgtgctggtcacagttccctctgtgtttccattccattcacccctaccctctggcgcccgcactccaccagcccactatccacagtgagtgagagtcgagagcagaacagcacgagggagcagccactgcaggctttccacagagcacagctctgactgtggtttccgtggggagactgacagagaagccccaagttaccaggaacaccctcttccagctctcagaggtaattcctctgaagaccgagctcttccctgatgtgttgggaccagacttactggttactatagaggctgcaattcccttcccatcgagccctgctagacaccactgcagtctgaaagcaaggaaagctttaagagaatgtcctgtaccattccatcttctcacaacacaatactccttacagtaagactaaaatattcccccccgccaacttttccaataatcaccacgtggggagcagagattattttaaaagaggtacatggtaggaaaattttcctagcagaacagcctaatacagcaatgcttatcactctttctctatctaataaataagcattcatgcattctttctagttttataacacctggcttacattttctctgccatctctgattacttctacagataccctgaggactcattatgatgtcaaagccaaaaacacttccattgtagaaacatgcatagaaaaatcactgtgtatgcttgaacaatgcaggtgtgaaagaaacacagagagaagagagggtggcaaaacagacaaacagggaccaagttaaagagagagggggcagaagagagagaaaggaaagtggagagaaagagagagaagagacaagacacaaagatattacaaacagaaccacattgcattgaaatagcccactgatggaaaaaatggatagctgttgcctttaaataatctaatatcagaaaaaatcatgcaataaaatactataaaagt

SEQ ID NO: 1696 - DNA, 3392 bp, Homo sapiens
tttagtgcttggtacttactgaaatctagatacaaaattacataaattggtaggaactgaaagtttttcccatattgtaactttaaaaaattgaagtaaaatttatatgtggtaaaatgcaaacatcttacatgtacaatttgattagttttgataaaattatacacctatgtaaccaccacctcagtcaagatctagaacattttcatcacccagaaagtccccttatcatttctttccagcaaatcctcacctcccaaaggcaacctgtcactatagattatttcacctgttcatatacttcatacgtactcttttgtttcttgtttaagcttaacctaacgttctcaatactcatctactttgctgtatgtatcagtagttcacttaaaaaatttctgggttgttttccattgtatgaatatcctacaattgatatatgatttctcatgttaacttctaacttgttttcagttttatagagtagaaagttttgattatgataaaatccagtttatcaaaattttattttatggttaatgctctctgtgtcccatttaagaaattgttgtctactcccaagggcataaaattttttctcctttgttttcttctacacatgtaatagctttagctcttacgatgaagtttatgatccatttcacatcaactaatttttagggagattaatattcacttttcccttatgtttattcaattgttccagcaacatttgttgaaaagaccacccttcccagaacttagttgaggatttgggctattggtttataacctttttttcttctcagattaacagcttgtcagatttttgcatcaggcttaagcagtctcataaaatgaggtgaaagcattcttttctcctttattttcagaaagcatttgtgtactattgatgttaagccttccttcaaggttgaatttaccagtgaacccaattgcacctgaagttttctctttgggaaatttttattatatatttagtttctctaatatgtatgggaatattcagatctgttttttcatgagttaattttgttaagttgtagtttttttttaaaggaatttgttcatttcatttaagttaccaaatgttttgccataaagttgtttataatagttccatattgttcttttaatgtctataggatctgtagtgatgtctgcttttattcctgatattgttaatttgtgttcttaaagtctttttccttattcttgctaggtgcttattagttttattaattctttaaaagaaaaactttggattttattaatttgttctattgtttgctgatttcaactctgatctttattattcctgtcttactacttactttggatttaatttgcccttccttctctagcttgttaaggtggagatttagataattgattttaaatatttttcttgtctctaatataggcgcttaaagctgtaagttcccttcttcaaacactgttctggctgcatcccacaaattttgatacattatgttattattattcagttagaaatacattctaatttttcttctgatttcttccctgacccatgggttatttagaaatatgttatttaatttgtaactactaggagattatctagatatctcagtattattgattttcaatttaattttgtggtaagataacatacttgtgagtttcagtctttggattttaaggtttacagtgggtgtttttcaccaaaattaggaaatttttggccgttattttttccaatattttatcagctccagtttccttcaggactcaattatattaggtcattttatattgttccaaatatccgtgaggcttttatattttccaataatttcttccctctcttcttcaaagtgtattatttttattgacttgtcctcaagctcacttctctttcttctacaacctgcttttaagcccatctagtgagtttttaattccagttctagtattttatttggtcccttgtatgtgtatttagttgccatttctccactgttaatctcttaacttactaaaactacattttcctttaattctttacatatttacaatagctgctcgaatgtctttgtctgctaagtccaacatctgggccatttctgatttggtttctgttgaccaattaaaatgcttttttggtttatttatttatttttgactatggataacattttccatatatagctggtatatgtttcttatgtatctggtgaatttttaattgaataccgacattacaattaaaaatattgtagagtaggccgggcacagtggctcacacttgtaatcccagcactttgagaggctgaggcgggcggatcacaaggtcaggagtttgagaccagcctggccagcatagtaaaaccctgtctctactaaaaaaattcaaaaaattagctgggcgtggtgctgggtgcctgtagtcccagctactcaagaggctgaggcaggagaatcgtttgaacccaggaggcggaggttgcagtgagccgagattgcacaactgcactccagcctgggccacagtgcgagactccgtctcaaaaacgaacaaacaaacaaaaaacaataaatattgtagagtagttggattccattatcttcctctgaatagtattgattcttattttaacaggcaattcagttactgggtggtcaccttaaactattgtgggcttggttttatgctttgttagtacagatctgtggaagatctgtgatcttgaggtgtttcttcaggtccctctattttaataggacttaacttgcaaactgtgtctctgttgtggatctcatcagtacttggtttcagaccttgttagtgtggatttaggggagatctaaactagagcttggcttttacttctatagtgtagcattttgatgtctcaactgaatgccagcagtgttattaaagttattaacaagatcgctctgttctgatagggccaggaactctgcttttactctaacattgcttttcttctaatatctctgttcccttctcaactctgtaatatctgctatctgataaacctagcactatctaactgtgaattaagttaggaatcacatgcaattttccatgtaaactcctgggtctcccttctcttcatagccaccttttctctgatgtcttgtctcgtagattacagtgactttcaccagcctgaactctaatttctgctgcctcaggtcagtgggatcactttgatctgctaagactgcaactcttgaccaggcacagtggctcacgcctataatcctagcactttgggaggccgaggcgggcagattgcctgagctcaggagttcgagaccagcctgagcaacatggtgaaactccatctctactaaaatac

SEQ ID NO: 1697 - DNA, 3565 bp, Homo sapiens
ctgttttcgttggccgcgctgggatggccgccacagctgtaggtgctgctagtgtttagcgctggtctttgccgggcgttgagggcagctcagcctccttgtttgtccggttcgcctgtgcgtggtactcaagggcaccagtattcccgcggtcggcagcatgggtcgggagtcacgccactatcgaaaacgatcggcatcccggggtcgctctggaagtcggtctagaagtcgctcaccctcagacaaaagaagtaaacgtggagatgacagacggtctagaagtagagatagagataggaggagagagaggtctcgtagcagggataaaagaagatctcggtcaagggacaggaagcgtctgagatctaggtccaaagagaaaactgatggtggggaaagttctaaagagaagaaaaaagacaaagatgacaaggaggatgaaaaagaaaaagatgctggcaactttgaccagaataagctggaagaagaaatgagaaagcgaaaagaaagagtagaaaaatggcgagaagagcaacgtaaaaaggctatggaaaacataggagaactgaaaaaggaaatcgaagagatgaaacaagggaaaaagtggagtttagaggacgatgatgatgacgaagatgatcctgcagaagctgaaaaggagggaaatgaaatggagggtgaggagttagatccattagatgcttacatggaagaagtgaaagaggaagtaaaaaaatttaacatgagaagtgtaaaaggtggtgggggaaatgaaaagaagtctgggccaacggtcacaaaagttgtcactgttgtgacaaccaaaaaagcagttgtggattctgataagaagaaaggtgagctgatggagaatgaccaggatgccatggagtattcttcagaggaggaagaagttgatcttcagacagcccttacagggtatcaaacaaaacagcgaaagcttctagaaccagttgatcatggaaaaattgagtatgagccatttaggaaaaacttctatgttgaagttccagaactagcaaaaatgtctcaagaagaggtaaatgtgtttcgattggaaatggagggcattacagttaaaggaaaaggttgccccaaaccaattaaatcctgggtccagtgtggaatttccatgaagatcttaaattccctcaagaagcatggctatgaaaagcccacgcccatccaaacccaagctattcctgctataatgtctggacgagatttgattggcattgccaaaacaggaagtggaaagaccattgcttttctgttgcccatgtttagacacatcatggatcagaggtcattagaggaaggagaggggccaatagctgtcatcatgactccaactcgagaactggctttacagattactaaagagtgtaagaagttttccaagactttgggacttagagtggtctgtgtttacggaggaacaggaatcagtgagcagattgctgagctgaaaagaggtgctgaaattattgtttgcacacctggtcgaatgattgacatgttagccgctaacagtggtgatgctgtcagataatggctgatgtggctcgatgcttcatctcagtcttagttttatgatgtgttttggagagggctgttttctgaattttacaggttcttcaggccctatgatggtcgggtcacaaatcttcgaagagtgacatatgttgttttagatgaagcagacagaatgtttgacatgggttttgaaccccaggtcatgcgcatcgtggataatgttcgtcctgatcgacagacggttatgttttcagctactttccccagagctatggaggctttggctcgcaggatcctcagtaaacctattgaagtacaagttggaggcaggagtgtggtttgctcagatgtggagcaacaagtgattgtgattgaagaagaaaagaaattcttgaagttacttgagcttctaggccattatcaagagtcaggatctgtcattatatttgtggataagcaggaacatgctgatggtcttcttaaggatttaatgagagcatcttatccttgcatgtctcttcatggaggcattgatcaatatgacagagatagcatcataaatgactttaagaatgggacctgcaaacttcttgtggctacctctgttgctgcccgaggtctagatgtgaaacatctgattcttgtagtaaattatagctgccccaaccattatgaggattatgtacacagagcagggcggactggaagagcaggaaacaagggttatgcttatacttttatcacagaggatcaagctcgctatgctggtgacataattaaagctcttgaattgtcagggactgcagtacctcctgatttagagaaactgtggagtgatttcaaagatcagcagaaagctgaggggaaaataattaaaaagagtagtgggttctctggtaagggattcaagtttgatgaaacagaacaagctttggctaatgagaggaagaagttacaaaaagcagctcttggtctacaagattcagatgatgaggatgctgcagttgatattgatgagcaaattgaaagcatgtttaattcaaagaagagagtaaaggatatggctgctcctggaacatcaagtgttcctgctccaactgcaggaaatgctgagaaattagaaattgctaagagattggctcttagaatcaatgcccagaagaatttgggcatcgagtctcaggtagatgtgatgcagcaggccaccaatgcaattcttaggggtggcaccattctggctcccactgtttctgcaaaaaccattgcagaacaacttgctgaaaagatcaatgccaagctcaattatgtgccgttagagaaacaagaagaagagagacaggatggtggacagaatgaatcttttaagagatatgaagaagaattagagatcaatgacttcccacagactgctaggtggaaagttacctctaaggaagctctgcagagaatcagtgaatactctgaagccgcaattacaatcagaggaacctacttccctcctggcaaagaacccaaggaaggcgagcggaagatttacttggcaattgaaagtgccaatgaactggctgtgcagaaagcaaaggcagaaatcaccaggctcataaaagaagagctgatccggctgcaaaattcataccaaccaacaaataaaggaagatacaaagtcttatagacatccggaaaaaagatttttacctgtgctggtctatgatgtatgtggcagttgctgtctgcagtttacaatgtattgtaaatgaagattttttaaattctatcttgctgattttttttaaatataagaaactggtacttggtaaagaaatctgtccgtaagtacccccacaatcagtcaaactatatttaaagccagcctgttttcagagtatgatgtcctttaatgtaaactcaaatatcaatattttaaatgtccggataatattctagaggtttaaaaaatggaaatatttgaactttctattgaagacaataaagtacacaagtcgtt

SEQ ID NO: 1698 - DNA, 3044 bp, Homo sapiens
atgctggacctcctggaggacttcctggagtacgaaggctacaagtatgagcggattgatggtggcatcaccgggggcctccggcaggaggcaatcgacagattcaatgcccccggggcccagcagttctgcttcctcctctcaacccgggcaggtggtctgggcatcaacctggccacggcggacactgtcatcatctacgactcggactggaacccgcacaatgacatccaggtcagtgctgctgccgcccaccaccctcccagggggcctctcatcccgggcctcaggccttcagccgcgcccaccgcatcggccagaacaagaaggtgatgatctaccgcttcgtgactcgggcctcggtggaggagcgcatcacgcaggtggccaagcgcaagatgatgctcacccacctggtggtgcggcccggcctcggctccaagtcggggtccatgaccaagcaggagctggacgacatcctcaagttcggcacggaggaactcttcaaggacgacgtggagggcatgatgtctcagggctagaggccggtcacacccatccctgatgtccagtcctccaaaggggggaacttggccgccagtgcaaagaagaagcacggtagcaccccgccaggtgacaacaaggacgtggaggacagcagtgtgatccactatgacgatgcggccatctccaagctgctggaccggaaccaggacgctacagatgacacggagctacagaacatgaacgagtacctgagctccttcaaggtggcgcagtacgtggtgcgcgaggaggacggcgtggaggaggtggagcgggaaatcatcaagcaggaggagaacgtggaccccgactactgggagaagctgctgcggcaccactatgagcagcagcaggaggacctggcccgcaacctgggcaagggcaagcgcatccgcaagcaggtcaactacaacgatgcctcccaggaggaccaggagtggcaggatgagctctctgataaccagtcagaatattccattggctctgaggatgaggatgaggactttgaagagaggccggaagggcagagtggacgacgacaatcccggaggcagctgaagagtgacagggacaagcccctgcccccgcttctcgcccgagttggtggcaacatcgaggtgctgggcttcaatgcccgacagcggaaggcctttctgaacgccatcatgcgctggggcatgcccccgcaggacgccttcaactcccactggctggtgcgggaccttcgagggaagagcgagaaggagtttagagcctatgtgtccctcttcatgcggcacctgtgtgagccgggggcggatggtgcagagaccttcgcagacggcgtgccccgggagggcctctccaggcagcacgtgctgacccgcatcggggtcatgtcactagttaggaagaaggttcaggagtttgagcatgtcaacgggaagtacagcaccccagacttgatccctgaggggcccgaggggaagaagccgggcgaggtgatctcctcggaccccaacacaccagtgcccgccagccctgcccacctcctgccagccccgctgggcctgccagacaaaatggaagcccagctgggctacatggatgagaaagaccccggggcacagaagccaaggcagcccctggaagtccaggcccttccagccgccttggatagagtggagagtgaggacaagcacgagagcccagccagcaaggagagagcccgagaggagcggccagaggagacggagaaggccccgccctccccggagcagctgccgagagaggaggtgcttcctgagaaggagaagatcctggacaagctggagctgagcttgatccacagcagaggggacagttccgaactcaggccagatgacaccaaggctgaggagaaggagcccattgaaacacagcaaaatggtgacaaagaggaagatgacgaggggaagaaggaggacaagaaggggaaattcaagttcatgttcaacatcgcggacgggggcttcacggagttgcacacgctgtggcagaacgaggagcgggctgctgtatcctctgggaaaatctacgacatctggcaccggcgccatgactactggctgctggcgggcatcgtgacgcacggctacgcccgctggcaggacatccagaatgacccacggtacatgatcctcaacgagcccttcaagtctgaggtccacaagggcaactacctggagatgaagaacaagttcctggcccgcaggtttaagctgctggagcaggcgttggtcattgaggagcagctccggagggccgcgtacctgaacatgacgcaggaccccaaccaccccgccatggccctcaacgcccgcctggctgaagtggagtgcctcgccgagagccaccagcacctgtccaaggagtcccttgctgggaacaagcctgccaatgccgtcctgcacaaggtcctgaaccagctggaggagctgctgagcgacatgaaggccgacgtgacccggctgccatccatgctgtcccgcatccccccggtggccgcccggctgcagatgtcggagcgcagcatcctgagccgcctgaccaaccgcgccggggaccccaccatccagcagatatctagccgtcctcgagacttccctgtgttgcagcgctcatttccagctgagccacgcctgccgggccacctgcccgacccacatgggagagaaaagctgccacctttttaggagccagcgccaccttgggacaaaaagggaaacctagtaatgccatcacatggaggacgaggcccagctcagctgggccagagcccagaagtgccacctcatcataattcaagtgttcttccacacagcgttgcccccacaaccacgccggacgtgccccctcgccaccttttccagacgacttcttagaagagatttcatttatttgtacatcttttgcactttcctattgaagacttgaacacgtttgtcttgataaaagttggatgacgtatggaagattcg

SEQ ID NO: 1699 - DNA, 2981 bp, Homo sapiens
ctgcggctgcggttctggcagccgagcccccgcggtgctgcagcccagctttagcgcgcagaccgacccgcgccccttcttcgccgccggcagcctctaatccacgcggcgcgttgcggcaggtgccctgggcgtactgaggcgcggtggcctgagcccggccgccatcgatgaccccggtcgcggacttgcttcaggctggccaccccccgtcttgtttcatcatctgtgttgagtaaccatggggaggaagctggacctgtctggtttgactgatgatgaaacagagcatgttcttcaggtggttcaaagagacttcaatcttcgcaaaaaagaagaagaacgactaagtgagctgaagcagaagctggatgaggaaggcagcaagtgcagcatcctctcgaagcaccagcagtttgtggagcactgctgcatgcgctgctgctcgcccttcaccttcctcgtcaacaccaagcgccagtgtggagattgcaaattcaatgtctgcaagagctgctgctcctaccagaagcacgaaaaggcctgggtctgctgcgtctgccagcaagcgaggcttctgagggcccaatctctggaatggttctacaataatgtgaagagccgcttcaagcgctttggcagtgccaaggttctgaagaacctgtacaggaagcaccggctggagagtggcgcgtgcttcgacattctaggaggaagcctttttgagtcaaacctggagaatgaaggaagcatttctggcagtgattcaacattttataggcagtcagaaggacatagtgtgatggacaccttggctgtggccctacgggtggctgaagaggccattgaggaagcaatttccaaagcagaggcatatggggacagcctggacaagcaaaatgaggccagttacctgcgggaccacaaggaggagctaactgaggaactggccacgacaatcctgcagaagattatacgaaaacagaagagcaaaagtgagcagcaagtggaagaagagccaggatggccacatccccagagttgcagcacaaaggtggcagatgaggggacctcagcatcccctggaggctaccgtgctcccgctgccctctggaggtcccagtctgccttctcaatcactggagaagaagccctgaagacccctccagtggaggctccatcgaggcagccaagggaccaaggccaacacccgagagcagagtctgctctgcccagctggaagagtgtggacaggctggatgaaacaaacctggccccagttttgcagagccccgacgggaactgggtggccctgaaggatggcgctccaccccccacccgactactggccaaacctaagagcgggacgtttcaggccctggaggtggcctccagtgtggcatctgcctacgatgagatgggctccgatagcgaggaagactttgactggagtgaggccttgagcaagctgtgtcccaggtcccgggccctgcccaggaacccccagcctcagcccacacaggcccagagctctgaccaaggccccatagctgcctccccatcctctgcactctcccccaaccctgaggccatgtgctctgactcggagacctcctccgcaggctcttcccgagaagttgggcaccaggccagactgtcctggttgcagaggaaggcccccaggaaccctgcagctgagaagatgcgcttgcatggagagctggacgtgaacttcaacccccagttggccagcagggagacctcggacagcagcgagccggaggaggccccccacaccacagaccggcgggccaggaggtggagaggagcccgattgggctcagaagggccaagcaaagaaccatcttcccccagcgcccagctccgggatctagacacacatcaggtgtcggatgatttatcagagacagacatcagcaatgaggctcgggacccccagactctcacagacaccacagaggagaaacggagaaacaggctgtacgagttagcaatgaaaatgagtgaaaaggagacttcttcaggggaggatcaggagtctgagcccaagacagaatctgagaaccagaaggaaagtctgtcctctgaagacaacagccagagtgtccaggaagagctgaagaaggtatacctggcagcaggcactgtgtatggactggagacccagctgactgagctagaagatgccgcccgctgcatccacagtggcactgatgagacccatctggcggatctggaggaccaggtggccacggctgcagcccaagtccaccatgctgaactccagatttcagatattgagagccggatttcagccctgaccattgcaggattaaacatagcaccatgtgtgcgcttcacaagaagacgggatcagaagcaaaggacccaggtacaaaccatagatacatcaaggcagcaaaggaggaaactgcctgctccaccggtgaaagccgaaaaaattgagacatcttcagtgactaccattaaaacatttaaccacaacttcattctccaaggctcctcaacaaacaggactaaggaaaggaaaggcaccaccaaggatttgatggagcctgctctggagtcagctgtgatgtactgacaccatggaattccactgccagtgacccactgcctccggccgtacacgacagtgccttgacccaacagccatcgagtactgtatgtatttccacctgaggagaaggcctggggaggccacagtgcaccattgcacagggctgtcctgatacctcatccagaaagccgtctcagacttcagcactgcggtcttgcccactctctgccttaggctcccaggggaatccaagacagaaaatgaagacactggcttccaacagcagcgctccatgtttaagatacatattttccctgtttgctttgctactgtatgttgactttaagatctttttttaaatacatttgattcagctagt

SEQ ID NO: 1700 - DNA, 4109 bp, Homo sapiens
acatgccttctggtttgactggagtaatcctggtagaatccacgtagctctgaagacttacaagagcagtgattcccaggctttctcagcaatgtaccccatttcctgacatttacagctgaaggtgaagtttcccttttgcaaggagaaaattttggtggagaattatccaacaagaaaaagacctgtggctattaagatagacaagaagaagggaggcaaattccagccttttaaaaagttgtttggcaaaaggaaaaagaaagacccttcgttgttccgggtgccgtcgttggggaagaagagttactctcaccagagtgtcagcaatgggaccttctcttcggatgaggagaccctggaagacaatctaaggtccttcaactattctatgggaacccgggcattttcccatgacagtatttttatccctgatgggggagcagaaagtgagcagacagttcaagcaatgtcacaggacaacatcctgggcaaagtcaaaactcttcagcaacagttgggcaagaatatcaagtttgggcagcggtcacccaatgccattcccatgaataaggcaaacagtggagaggctagcttagaagaggatctgttcctgaccagtcccatggaaattgtgactcagcaggacatcgtcctctcagacgcagagaacaagtccagtgatacgccaagttctctaagtcctctgaatctccctggagctggaagtgagatggaagagaaggttgctcccgttaaaccgtctcggccaaaaaggcacttctcttctgctggcaccatcgaaagtgtcaacttagatgccatccccctggccatcgctcgcctggacaacagtgccgccaagcacaagctggctgttaagccaaaaaaacagagggtgtcaaagaagcacaggcgccttgcccaggatccacaacatgagcaaggcggccttgagagtcggccctgcctggaccagaacggacacccaggcgaggacaagccaacgtggcacgaagaggaacccaatccgctggattccgaggaagagagaagacgccaagaagactactggcgagaactggaggccaagtgcaagcggcaaaaggcggaagcagccgagaagagacgcctagaggagcagaggctgcaggcgctggagaggaggctttgggaagagaacagaaggcaggagctcttggaggaggagggcgaggggcaggagccgcctctagaggcggaaagggcgccgcgggaagagcagcagcggagcctggaagcgccacgttgggaggacgcggagcggagggagcgtgaggagcgcgagcgcctggaggcggaggaggagcgaaggcgtctgcaggcccaggcccaagcggaggagaggcggcggctggaggaggacgccaggctggaggagcggaggcggcaggaggaggaggaaggaagatgcgcggaggagctcaaaaggcaggaggaggaggaggctgagggatgggaagagctggaacagcaggaggcggaggtgcaggggccgcccgaggcgttggaggagactggggagggccggcggggcgcggaggaggaggatctgggggaagaggaggaggagggccaggcgcacctggaggactggagggggcagctcagtgagcttctgaacgactttgaggagaggctcgaagaccaggaacgcctgaaacccgaaggacaaagagaacactccgaggagccaggtatttgcgaggagcagaacccagaggccgagcggcgaagagagcagcagggaaggagcggggatttccagggggccgatcgtcctgggcccgaggaaaagagagaagaaggggacacggagcctctcctgaaacaagaggggccggtggaagccgcgcagcctccggtggagaggaaagaagccgccgcccttgaacaaggccgcaaggtggaggagctgcggtggcaggaggtggacgagagacagaccatgccccggccctacacgttccaggtgtcctccggagggaagcagattctctttcccaaagtcaacctgagccccgtgacgcccgcaaaggacacggggctcaccgctgctccccaggaaccaaaggcccccaaagccagcccagtccagcacgccctaccgtcgtccctgagcgttccccacaccgccattctggtcacgggcgcgcagctctgtggcccggcagtcaacctgagccagatcaaggacaccgcgtgcaagtccctcctgggcttggaggagaagaagcacgcggaagccccagctggggagaaccctccccgaggccccggcgacgcgagggcgggcagcgggaaggctaagctcccccaggagtctcccagcagcgcgtccgcactcgcagaatgggcttccattcggtccagaatcctgaagaacgcagagagtgacccgcgcagcagcgagagggaccagttgaggcccggtgatgagtccactcccaggggccggtgtgattcccgcgggaaccaacggaagactccgccagtcaatgcaaagttctctattatgcctgcctggcagaaattttccgatggtggcacggagacctccaaacagagcacggaagctgaaagcatacgaaaaagacccatgctgggacccagcgaagagacagccccccagcctcctcctgctggtgttcgcgagctcgggaagggtccggagaagttggggatgcaccgggagcccgcagacaccaccgagggatgcaaatttgccaaagacctcccgtctttccttgtcccaagccttccttaccctccgcagaaagtggtggcccacacagagttcacgacctcgtcggacagcgagactgcaaacgggatagcaaagccagaccctgtgatgccaggtggagaggaaaaagcctcaccgtttggaataaaattgagaaggaccaactattccttgcgcttcaactgcgaccaacaggcagaacagaagaagaagaagaggcacagcagcaccggagacagcgcggatgcagggccgcctgcagcggggagcgctcgtggagagaaagagatggagggtgtggccctcaagcatggtccatccctcccccaagagcggaagcaagccccttccacccggagggactccgctgaaccttccagcagccgctctgttcctgtggcccaccctgggcctccaccggccagcagccagaccccggctccggagcacgacaaggcagcaaacaaaatgccactggcacaaaagccagcactggctcccaagcccaccagtcagaccccaccagcatccccactttccaaactgagcaggccctacttggtagagctgctgtctcgccgagcagggaggccggacccagagccaagtgagccgtccaaggaggaccaggagagcagtgaccgccggccaccctcgcccccaggccccgaggaaaggaagggacagaagagggatgaggaggaagaggcgacagagaggaaacctgcttccccacctctgcctgccactcagcaagagaaaccttctcaaacacccgaggccgggaggaaagagaagccgatgcttcagagcagacactccttagatggctccaaacttacagagaaagtggaaactgctcagccgctgtggataacgttagcactgcaaaagcaaaaggggtttcgggagcagcaggcgacgcgggaggagagaaagcaagccagagaggccaaacaggcagaaaagctctccaaagaaaatgtcagtgtcagcgtgcagcctggaagcagcagtgtcagcagagcaggttccctgcacaagtccactgctctgccagaagagaagaggcccgagactgcagtgtccaggcttgagcgcagagaacagctgaaaaaggccaatactcttcctacgtctgtgacagtggagatctccgactcggctcccccagcgccgctggtaaaagaagtcaccaagaggttttccaccccggatgctgcccccgtgtcaacagaaccagcctggctggctttggccaaaaggaaagcaaaggcttggagcgactgtccacagattattaagtaaagagtgactctcaccc

SEQ ID NO: 1701 - DNA, 3242 bp, Homo sapiens
atctcaacggggataaatatgtatccactttgctctcccagatcctgttccttgaactccatcaaactaggcagatagttttacattggagtgtacaaattatcccatgttgacagatgtttgtcacttagtaacttctttccaagtttttccccctcccctaagctttctttccagcttgctttgttgttttaaaatatgcatgtctctcactggaatgccagtcacgagtgcaaactttgtgtccagcctcccacatgaaatgatccttttaaagggaactcgatatgtctcaatctgcacttcactcaaagcctctgggtacgggccactcactcactggtcctggctccaaaataactcagcagaaacgagtttccaactaaaaatcccctcgaatgtcacccagggaagaaatatagctcctataattaaaggaggcaacggccagagggggagtgcagccggcagccaaaaaagaaaagtaagagttttatttatttgctgattgaacttgggttgtcatgaccagcaggtttatccacattagaagtgctggaggtttgtactatatgtgcacaggaggtagaggtggggagaaaaggaaggagaaggaaagtaggaagaataacagaccaggccaattttgaaggagagaaaatgatctctgtgggacaacgtaaataaacttcctagcactggatttgactaaaaacttgtagctgaggaatatgtggagaggggttcagaggagatggggggtaattatagtaaactcttagatgtggggtatcatcaggaaaaggaggactctgttttccccagaaaagtaatgtgacagcaggaaatttattagctgtgctgtgtgtggcggttaggtatgtggggggtggaattatggagggaggctccagagaaaggaagaagttccaggactcaaagcagaagtgtcatggaaccaggagccctccactctccttgacaaaagttgcctaggaggtgtagatgtgaaatctctagaagacattatctttgcaccttattagtttcatctatttgagctgattctggcattagaaccacatataaaatgagtcagcgcacaggatgaagaacacctccccacctcttgggccaccctccaaaagggggtagtagtgattataagcttcaaaacacaaggagtactcagcctgggcagcccatttctattaaagaggcaaaactttagtactgatgaaaaacagatgatttttttcttcctctctgaaacagttactctcttttactgatgtgaagtgacgtcagcaatgcctgccctatccccttggagagaggggagagaggaggagggtatggaaggaaggagctgggagaaagagcaagagaaaaagagaaagaggaattgacagaagagaaaaaagggtggtggggggagagaatgagaatgtatatcctacactttggggggccaaaaatccacaaagagtgggcaaaacaatgctttagaagcctgtgattgataagacacctttccttgctctcacccgatctacatattctaacatatggaaagcttagaggccctgtgcacttatagaagccgataatgcattagctctcagcaatatttacagcaccactcttaatacacaccagatggttcgcgactgtgccgcctcagccagctcactcctcgattttactcggcggcactttgttgcaattacgctccatgctgagaccaattttattggtgacctatttttcatatttgcagcattttatgttaaaaacctcctctctggcctttttgttaagggcagcgctcaggaagggagagtttaggaggacagcggtgctgtgggtctgtcgaggtggatattaatatttatcgtgatgttacataccttgggtttaagtgagtaaaccggatagacataagtactccggtcattatgtttgttcactaacccctgtttgtcagacccccacggactctacacggcgcgcttgcctcagagtcaatacatcggaccataaatattgtattccattaattatcaccccactggcttatcctgggcgccggcgtcctcgagcgacgcagggcaaatgaggacgcttcctgagcatatttctaggctgggaaccccgctgaaatttccgcggtgcctgggaattcctagagcctgagcgcctggctcaacccggtctgggcctggggctggcgtgcagggaaggggagctggcgggagaaggcccgacgccgccaggagcactcggtaccagttatcttgctacgcagaaggccactgggagaatcccatttggcacgccggaaaaggctttcaactttatctcccgccatgtaaataaccccgagtgcctgactgagggactttgttttgcaccgaacaatataaatattctatttgctacaacgcaggtgtgctcttcctacctaaactctcccctccctgcctcgcttatggtaactctttctacccaccccctcccctggttaaaaaaaaatcacagatgtttactttattgatataacctataccgtggttaggctgagaataatacgcctcaactaacagtcatttagcaaataatagaggcgttctggatgctttccaacgttacacatgtacttggtcataaaatgatacgtgaaaaaattaacatctgctttcctaaaataaagtgtgccaagtagctttttatgaattctttcctcattttaaaaagaaatatggagagacaaactagcacccagatgtatagcacatttataatggttttagaatttaaaggtagctattcattgcacaagccatttaaaaactgacgttttaaaagctacttaaccccagacatcttcgaatcctgaggagtcttccaaattttattatttaaagaggaatttactgtaatttaattgcgtatcaaggcagaactatgtgcaagtcggggcactgcagcctcagctcaacagaaattccatctcgccttttatttacctaatttctcagcaaggttcccaggcccttaagaaggccgagctggaaagtttagttgggctcttttttgttgttgtttaattccactattaggaaatgaggcctacctttgaattatttcattatgatttggccttttgggggaaggggtgggaactataatcattagtggctttttattatttctacaataaatggctagattctttgttg

SEQ ID NO: 1702 - DNA, 4804 bp, Homo sapiens
ccagaactgggtgtttttaggaagcttagatagccggcgcgcaggcgctttctaggtgattttacgtctcacgttggaaacagcacggtgagaaccagggtcttgtttccactgacatccgtgttcccaaactcccaggatgtgcttgtagcagggacgtgcgagaggagggagctctgcactgaggaaggatgcatggcccgacgaccgggcgtctgtgccgctgtgtccggacctccgtctgctgtgagcaggggcctcacaggcgccccataccccatacccagtctgcagatctggctcttttggtttcagcccttgagctctgtgttctcccgccagggatggcagcacctctgcaggagagtggaggaggggagccctgccccagcccctcacctgagcccaaaccctggccagggcacagggaacacccacccactcagggccagtctgtggccaacagactttgaaggtgtccggcgggggttggcctggaagagctctgtgtccagtcggccgtgatgtgtgtctttgttcaagggagagttgagacagacgttcccacaggtgaccctggcagggcagaacaggcctgaggtttgactttaccatcaaaaaggagagaaggggcaaatgttagcacttttcctggtgcttttccttacggtgtaaaggaatcttatcagatctcccagttgtggcccgtgtttgagggagagacagggagtgtgtgtccatcccttccctcccagggtcccgtgtgctcagggcagggtatgccttttccccacactggcctcgtctccacagcctggcacacaccccttcctgtcttgctgtggtcagggagcccccacatgcacatgccatccttacagcagccccagggcatggcacacccccattttatagccaggaaactgggcctggctagccagggatttgcctggtgtcacagccctgtgggcagcaggacatgtccttacctcgccgacctagggggctcaggtcacagggtcacacggagtcacacggcgggagaagtccctgtgcaaaactccatttcgctgctttccccaaattcatggttaggtaaccggtttagtaacctctgtggactccaccttgatgtttaaacaaatccatgatgatatcatgtggtaaaaggtaggatttttttcaaaaggaaggtgtgtttatacaaacacatgtggggtcttaaagccactgggggaggagtcacagctccagggaagagggggtgcagctgagccctgctcagccaccggccacacacctctcactcctgtaaagaaggcagtagcacgccctccctactgcagcaggtgaagggccctgtgcagtgggtgctgtccgaaggttgatgctagaatgtcagccctttgagagctgggccctggggccctggggacagtctggtctggccagtggtcagccttggtggtggaggacagagtcgcagggagttacccaccctgaagtaacccaggggagctgccgaaatgcaaacccagaggtgtgggccggatacctgcaaggccactggcgtctccttgacgactcagacccacagtgcctagattaggacacacaacccaatacagaccctagagagctaacctggagggcccatccactttatttctgtccagttggagaaatcagggacctggaagatgccccaccactgtgagtgctctgggggcacccagcagcagctcctgtcagccaccaccgcgtttctagcacgacatggtcgtgagttaaatcagcagagcctgctaagggacgagcagatagaaaacataacagtaagaagatcagtcagaaaactcgcgtggcccaggatgcaggatgcttgagctcttgtggttcagctcagacagttggggctgacctgggaccccgtgcgctgagggggcggctcccagcatgagttccagggcccctcaccttcggtgacacatgggaacgtgcctctggcagcacctttacaaaacacttgcaggtggccctcaagacactttgtacaggacagtgaggtccttggttcctgctctatctgataagattcttttacttcctcagctgacgcagcactgtggcctcacagccctggggcttgtttcaaagctgggctgcagccgggtccctgtctggaggttgactggcctttaactccgaggattgggttgtttatgatgaaaactcttggcagattcaaaacccatgggagggtttgggctgcacagaggtgacacacatccttccctgaagtgtccctctctggtgcacagggtccccccacccccacgtgtggtcaccgcgaacaccgataccacgggtcctcatgggaagtggcgtggggcccgcacagccaggggctggtagccgctccctccacccccaggctgccaccaggcctggtgcagccctgtccatgtcccgagtcctgacagctgttcgtggtcttcactctcccttgactctgtgtggtccatttgttgtctggccatgagtttctgaatcacctgaaagcgtctccactgacgggacctgtggggcaggtggggcctctctcacctgcccggatttcagagtcagggtgggtgggaagaggctgcaggtcggagtcactgttttgaaggcgagggaaatactgaagccaaaatgaggcctcaggagccccacacgatggcttgggaggggtgtattgctgcccccacgtcaggagggccaccccctccctgtcttcagggcggtcatgagaggcagcaagctgtgactgacgtagacccacttcctacgtagactggcttttggtgaattggttttggtcaccttttagagctttcttttgttgtttggacttcttggggtaaattatttcccaaaagtatttactcagatgactgataaaattttcaaaaccgtaataattagtggagacctcttactgggcagatcactcttcgattcttttgctttaagaaacttggagtcggaagcatcaaggctgaactgtttccctcccacccgctgaactggccagctcagctctgcccgcccagaggaagtgggcctacacaatccagggacagtatgccatccctcacccggatgtgagtcttcactttgtcttcctctcacctttctcttctcatggttgtttacctacctgcatgctgctgttaattgctactaacattaatattacacaataatattaatcaacttctcagcgttcctgacctgtgtcgtatccatatgacctcgaataaccttttaacctcttagcactaattctgcttgtgttgaggacttggcctgatgtcaaattgtctcaattctgccgcagttctgggttttcctccctcccacggggcctgggagggaactaagacgggctctgtccccgtgcagggcagtgaggatgtgctcacccgccacaggcaggcgtcagtgatactttctctgcgcctaagaagttgggtgacattatcaaacaggccacaaagataccttggcaagcacatttgagggcctggtgaaattaactccccctttcagagtccacatgaaaacgtagggtccatctacacacacagatccaggctgtggaaagccagtggaataggcctttgtcttcattccagaatcagtgggatgccaggcgggcatagcgtccttggctccgcccgggccatgcggagctgggtcccatgcagctccatgaccgggggctccgacacctcttttctgctcctgctgggtctaggtgtaattccagtgctgggggaagaagttaccctcagataaacggtcggtgtaattccagtgctgggggaagaagttaccctcagataaaccgtcggtgtaattccagtgctgggggaagaagttaccctcagataaaccgtcggtgtaattccagtgctgggggaagaagttactctcagatgaaccgtcggtgtaattccagtgctggaggaagaagttactctcagataaacggtcggtgtaattccagtgctgggggaagaagttaccctcagataaaccattggtgtaattccagtgctgggggaagaagttaccctcagataaaccgtcggtgtaattccagtgctggaggaagaagttaccctcagataaaccactggtgtaattccagtgctggaggaagaagttactctcagataaactgtcggtgtaattccagtgctggaggaagaagatagtctcagatcatccatcggaggggaaccctgggcggctctgggctgtgcggctcagaccccttaggggccaagagataaaaggtgcaaactgtgagcaaagggcctctctggaggcggctttagggcccccagggagtgacggccgcactggcaggcactggggagaggagaggggagagcaacagagaacgagagacggccccaccggaagtgcttcgtgctgtcagcagatggggcaaacctggagttggttctgaggaggtttctcttctctaaaccattttgaacgtttgcccagctcagtagctgctcctcgtaacgcagttccagtctgtgtgctgctccctctgaactgcgagaggcacctctgagctggttgggaggtggccgccaggtgagcgggctgctccagagccttctgcaaaccctgatgcttttgagttgggggcaaggacgtccatctgagtgagatgagaaggcaggtcaggagtgtttttaagagttaatgatcattaaataaatctttgatatagagatgc

SEQ ID NO: 1703 - DNA, 3011 bp, Homo sapiens
tgtttgttaaattatatgtagggacagggtcttccaacctttcccgagctggtctcaagctcctgggctgaagtgatcctcctgcctcagcctctcaaagtgctggtattataggcataagccaccacgccctgcccatttttctaagttggattattttacactccagtctgctgtgaatgagagttccagttgttgcgtatcgcaatcaatttgtgattgcctacaaatgatgtgccgtgatgaaattgtccctggtgtccgagaggatcgcaaagaatttcccttcctttctctcctttctgctccccttgtactgtctactccttaaactggtacttgatccaggaacataatggggatggacagtgcagatggcacacatggcctcagtctattggagcatctcaaaggaattagtctgcaaattctagtgcatctaggtggagcacaggaaggaagagaggtgcagactcacgtatggccctggggcacctgccatcctctcgcgcccgtacagcccttacctgccagcacttaccctacccagcttgagttctgggccttctcaccagcacatcgctgggacctggtcgacttcaggtaagtttatttcatggctccctcccccacgacctgcacatgccatatgttccttcccagccccatgtcacttgaaatgttctatcatgtccaagacttctctcctcatcctaaagtgcagaaaataaggatggagaagagaaggagaagagaatcaagagagattcattgagagggaggatcagaagctcctgggcaccccatactgtagaataaaaatattcattatggtgtttttcttgcaaaatattcccctctacataattatgtttttacatgaataatataaatttaaacaggagaaatactttttgaagagtctgagaatcttcataaagttcaggcggccacgaattagctgtgtgacctggggcatgccccttagactctgagcctcagcttctctgtatgtaaaatgggttgaagccgcccttccccacaagcaccctgtgcacaggcaatgcccagccccattattttctggactccgtggccaagcatgcttaggacacacagccacatacttctgggcagtgtcatctggcaacttgctgtcatgtcagtgtggtcaagcattgtagacctctatgaaccaaatatgcttcaggcttgggttgagcacaggagagggaggagggaaaggtcactggggctgggagtgcctgcttccctctgtgagtgtcaccccagtccacccagtaccatacctttctctctctggacccacttccttttgctgccggctcctccccattgaataacagccaagttgctttggtttctatttctttgttaagtcgttccctctacaaaggacttcctagtgggtgtgaaaggcagcggtggccacagaggcggcggagagatggccttcagcagttcccaggctccctacctgagtccagctgtccccttttctgggactattcaaggaggtctccaggacggacttcagatcactgtcaatgggaccgttctcagctccagtggaaccaggtttgctgtgaactttcagactggcttcagtggaaatgacattgccttccacttcaaccctcggtttgaagatggagggtacgtggtgtgcaacacgaggcagaacggaagctgggggcccgaggagaggaagacacacatgcctttccagaaggggatgccctttgacctctgcttcctggtgcagagctcagatttcaaggtgatggtgaacgggatcctcttcgtgcagtacttccaccgcgtgcccttccaccgtgtggacaccatctccgtcaatggctctgtgcagctgtcctacatcagcttccagcctcccggcgtgtggcctgccaacccggctcccattacccagacagtcatccacacagtgcagagcgcccctggacagatgttctctactcccgccatcccacctatgatgtacccccaccccgcctatccgatgcctttcatcaccaccattctgggagggctgtacccatccaagtccatcctcctgtcaggcactgtcctgcccagtgctcagaggttccacatcaacctgtgctctgggaaccacatcgccttccacctgaacccccgttttgatgagaatgctgtggtccgcaacacccagatcgacaactcctgggggtctgaggagcgaagtctgccccgaaaaatgcccttcgtccgtggccagagcttctcagtgtggatcttgtgtgaagctcactgcctcaaggtggccgtggatggtcagcacctgtttgaatactaccatcgcctgaggaacctgcccaccatcaacagactggaagtggggggcgacatccagctgacccatgtgcagacataggcggcttcctggccctggggccggggactggggtgtggggcagtctgggtcctctcatcatccccacttcccaggcccagcctttccaaccctgcctgggatctgggctttaatgcagaggccatgtccttgtctggtcctgcttctggctacagccaccctggaacggagaaggcagctgacggggattgccttcctcagccgcagcagcacctggggctccagctgctggaatcctaccatcccaggaggcaggcacagccagggagaggggaggagtgggcagtgaagatgaagccccatgctcagtcccctcccatcccccacgcagctccaccccagtcccaagccaccagctgtctgctcctggtgggaggtggcctcctcagcccctcctctctgacctttaacctcactctcaccttgcaccgtgcaccaacccttcacccctcctggaaagcaggcctgatggcttcccactggcctccaccacctgaccagagtgttctcttcaggggactggctcctttcccagtgtccttaaaataaagaaatgaaaatgcttgttggc

SEQ ID NO: 1704 - DNA, 3324 bp, Homo sapiens
cctggagcaagcgtgtccatcttatgtgtcctccacacctccaaatccccacgctggtgttgtggcactcattctagcctaatttcatccattattgtttccctatctcaaggagataaaaactgttaaaaggaccataaaaccaccatcccaccacagaattccaaatatcccatcgatgttcaaatcttcctaattgccttataaattgcttcatgttttaagtttgcttgctggaacccggcagcatccgtgtgacctttacgacatgacctttctgtctccctgacgccgacgctcttttcttagttcagctgaagaatgggcttgtgtatcctgcactctgccgaccggttccctgtggttttgcgtgttctgctccatccttttgagaggtggtcagaccgaggccgcatcaggctcccctgcaattccgtttggcgggagcagcttgcgggtctcagggcacctcggtggcactgttgttgtgccttcctccaccgttagctggaagagtaaagagaaacccaaggttcacgttcgtcactaaaacacccgctcttcgattatacggatgtttcatgcatttgtgatacagttacttactgatgtaccttttggccatttttaatcatctgctgtttaaaatgctgctgcagtatttgtatatatacataatttcgctcaagtggctctgtgtggaataaattctaaaaatttctgggtcaaagagcacacacattcaatcccagtctggctgttcaccacccgcagctgctgtgccaacccaacccaccagcgatggagcacctgcctcgtgcccttaaagggagggaaagcatcttctcacatatttataaactgctttatttccccttcagtaaattattattttcattagcccatttttctattggtcagtatttttcataaggaaaactctccgacatgctgcaaattttcctgccatttgatatttttgtatttttgccattgtgatataatcaaattaagtgactttcatttatggagtctgattcattctaagacaatcactcctggttgtgaaatttaaaaaacaacattgtcccattttgcttctgggatttctagtttttaattacatctttgatacaactggaatttcttttgattacagatgccaatttttctatttggataattgtcccaacatcgtttacatcactgcttttccaggaacgaaatgccgtctatgttggttgtgaacgtgcatttggcacctggcagggccaaccctcatggcgtgtgcgtgaacacatccctaaaccatagtctaatttatcctatttttgtagttcatgtgagcagaatccagtgtctgtgttctcgcatctggttttcactccacgtgtttggggtgtgtgcgtatcgctgtgcatggtgtggactttctccacgtcccgtgtgcaaacgccaccccacccagaggccacgccaggacccaggcctgtgggcagtggttcccggtttgcccttgcaaggacgctgtgtcctcctgcgtgagcatccctgcctcgggtctaatcctgggagtggaaggcaggtcgtgggtgtggctgcatcctcagcttctctggatgatgcccaggaacatgcccagagccagagggcccagctgctcggctccctcacactgggctgggcacttggtcgccagccgtttggggagtgtgttctcatggtggtttcaggtgtgagtctgaccaacaaccccccgtgcccgctggacactggagttccttcctctctggcggtgtttctcatcagggttccccaccggcctactgcacgctgcgtctctcctgacctgtaggagtcccctacacctctggctgctcgactttgttggtttaatgttttgcaaatgtcttcctccattttgtggtttgccttttcattctcctaatggaacatgttgctttacagaagcatctagttttaacagagtcttgtttaagacggtgtcaacacgcactgggctggcctggtccctgaactcaggtgtgtttcctttgcaaactctagagcagagagacaagggaggaaggacagatagcggcagagtgtgtggaaatgttttccaggaaggatggctttgagtgacagcatcatttgagtgacagcagtggtaggtggtgtaatggattctgatgtggtgggggtaaggggcgcagccaagctccgattcctcctgctgggcccaaggaccaaggactgtgacaggaatgcatagtccctcctctgtcctgccagaggccagagacttgtgtccaccactctgccgggctgtcttcaggaacttgttcaggaggtgctggggtgcagggcacgtctgaaaggcatttctggacacctgctgtggcctcatacaggagagtaggtgacctggccaaggccagcacacaggacaagattaagcatccagggacccagggtcacagccctcactccattgcaggggtggggatgacagaggccagaggggatcagacaggggcagctgttgatggttctgagatgcagtttctgtctgaggggcctcctcccactcctggcctgtgcagaggggtgggtgtgtggagggaaggtgggtctgccctggtcaaacagcagaggcattgcctgttagtctcattccattccgagtgcccccagggagagtcagccaccttatgtagagaggcaaggccagaaggcagggggggcctcccctctggtgaccaacagggcctgtggtacaagcagtgccggctgctgccctctctggcctttgtctccttccagcctctccgctattagcagaggagcagaacacttgacaggtggacacaggccacccccaacccctggccctggaggaggctccacagtggcctcctagagccaggagaccggactgagctgaatctgctgctcctgacaggacctcacagggggcgcctttgaggacaacctgaggtcactgcacttgcaggagggccaggacttccttcacttcagctgacggacccatggcagctgctcccagtgcatcccaggccagcaggagctttgtgagctgcaggcatggcgatggtgcgcctgttccacacccagcaggcgcaaccagagtctcgtgtgtgccgaccacaggagccaagccttttccactgtgtggactcatgtggccaaggctaggcctggtcacccaggaccctcaccacgtgaccccagccaatcgggacagttcaaggaggaggagacccctattacacaggttggaataaaatatttaaatctcgt

SEQ ID NO: 1705 - DNA, 3579 bp, Homo sapiens
aaccgccttcacagcaccggaagagtcgctaggaggcagccatgcttaaagacgagtttcatctgaaatttttcatgtgtgtgattcagtctcgccagttagtcaggactcctcagagaacagctggggaagcttctacttccagcatgctcataccaaagccaccaccaaagacagacatcttgaagagtctagatactatggatgatccagacaccgtgggaagcatacctgttttcaaaactgaatgtgcagaggtagagataaaagtaagcaagaggaagagggcagtggtaaaagcaagaggagacccgactgtggagacaatgaagcaaagggaagagtggatcatgacccatgaagagcaccatgcagccaaaaccctggggattggcaaagccattgctgtcttaacctctggtggagatgcccaagagatgggacgggatcggccaggtgcagtggctcacacctgtaatcccaggactttgggaggccgaggcgggcagatcacccgaggttgggagttcgagaccagcctgaccaacatggagaaaccccgtctctactaaaaatacaaaattagctgggcgtggtggtgcatgcctgtaatcccagccacttgggaggctgaggcaggagaatcgcttgaacccgggaggcagaggttgcggtatgaatgctgctgtcagggctgtggttcgagttggtatcttcaccggtgcccgtgtcttctttgtccatgagggttatcaaggcctggtggatggtggagatcacatcaaggaagccacctgggagagcgtttcgatgatgcttcagctgggaggcacggtgattggaagtgcccggtgcaaggactttcgggaacgagaaggacgactccgagctgcctacaacctggtgaagcgtgggatcaccaatctctgtgtcattgggggtgatggcagcctcactggggctgacaccttccgttctgagtggagtgacttgttgagtgacctccagaaagcaggtaagatcacagatgaggaggctacgaagtccagctacctgaacattgtgggcctggttgggtcaattgacaatgacttctgtggcaccgatatgaccattggcactgactctgccctgcatcggatcatggaaattgtagatgccatcactaccactgcccagagccaccagaggacatttgtgttagaagtaatgggccgccactgtggatacctggcccttgtcacctctctgtcctgtggggccgactgggtttttattcctgaatgtccaccagatgacgactgggaggaacacctttgtcgccgactcagcgagacaaggacccgtggttctcgtctcaacatcatcattgtggctgagggtgcaattgacaagaatggaaaaccaatcacctcagaagacatcaagaatgttcgtatgaatgaagccagagaggccttagaatccatagcccattcccttctggcttctgagtctcctgacattgcttctccccttggtccttctgcacatctctccctggttccctgcccctgattgcctcccacaaagaaccattacaagacaagaggctgagctgtccatggtttacccaagtctctgcttgttttcttcctttgactctgcgtaaccctctctctgtccctctgttggtcccttcagctggtggttaagcgtctgggatatgacacccgggttactgtcttggggcatgtgcagaggggtgggacgccatcagcctttgacagaattctgggcagcaggatgggtgtggaagcagtgatggcacttttggaggggaccccagataccccagcctgtgtagtgagcctctctggtaaccaggctgtgcgcctgcccctcatggaatgtgtccaggtgaccaaagatgtgaccaaggccatggatgagaagaaatttgacgaagccctgaagctgagaggccggagcttcatgaacaactgggaggtgtacaagcttctagctcatgtcagacccccggtatctaagagtggttcgcacacagtggctgtgatgaacgtgggggctccggctgcaggcatgaatgctgctgttcgctccactgtgaggattggccttatccagggcaaccgagtgctcgttgtccatgatggtttcgagggcctggccaaggggcagatagaggaagctggctggagctatgttgggggctggactgaccaaggtggctctaaacttgggactaaaaggactctacccaagaagagctttgaacagatcagtgccaatataactaagtttaacattcagggccttgtcatcattgggggctttgaggcttacacagggggcctggaactgatggagggcaggaagcagtttgatgagctctgcatcccatttgtggtcattcctgctacagtctccaacaatgtccctggctcagacttcagcgttggggctgacacagcactcaatactatctgcacaacctgtgaccgcatcaagcagtcagcagctggcaccaagcgtcgggtgtttatcattgagactatgggtggctactgtggctacctggctaccatggctggactggcagctggggccgatgctgcctacatttttgaggagcccttcaccattcgagacctgcaggcaaatgttgaacatctggtgcaaaagatgaaaacaactgtgaaaaggggcttggtgttaaggaatgaaaagtgcaatgagaactataccactgacttcattttcaacctgtactctgaggaggggaagggcatcttcgacagcaggaagaatgtgcttggtcacatgcagcagggtgggagcccaaccccatttgataggaattttgccactaagatgggcgccaaggctatgaactggatgtctgggaaaatcaaagagagttaccgtaatgggcggatctttgccaatactccagattcgggctgtgttctggggatgcgtaagagggctctggtcttccaaccagtggctgagctgaaggaccagacagattttgagcatcgaatccccaaggaacagtggtggctgaaactgaggcccatcctcaaaatcctagccaagtacgagattgacttggacacttcagaccatgcccacctggagcacatcacccggaagcggtccggggaagctgccgtctaaacctctctggagtgaggggaatagattacctgatcatggtcagctcacaccctaataagtccacatcttctcagtgttttagctgtttttttcattaggtttccttttattctgtaccttgcagccatgaccagttctggccaggagctggaggagcaggcagtgggtgggagctccttttaggtagaatttaacatgacttctgccccagctttatctgtcacacaaggctgggcacctctagtgctactgctagatatcacttactcagttagaattttcctaaaaataagctttatttatttctttgtgataacaaagagtcttggttcctctactacttttactacagtgacaaattgtaactacactaataaatgccaactggtcactgtg

SEQ ID NO: 1706 - DNA, 3041 bp, Homo sapiens
ggagagagtgcacagggttgctggccaggctgggtggctgtcctcacccttgatgacagatggcaccaactggccgcagcagatccactctcgggcgagcacatcgctcgcgtctccatcacacccaggactcagatccactgggctggaggcaggtccgcaggtccacagagtagaggctgcgtggctgcaggagtcagatggcggggtgaggcccctgcggctcagtcagccagcctgctggccctgtctgccaagacacagagaggggtggtgcacctcacccaggcaggattgtgagccagagagggggggtatggaagtggagctggagccatgtccccacctgtccctgctgataagaggtggcccagtgggcttccttccagctgggtctcccagggcagcctggaaggctctgattggcagagcgttggtggcagtcacatggaaactagctgtcttgggcagaggggctttttgcagttttcaagggcactctgtttttctccatgctgacccgctttagcagcccagtttccagagtctcttcaacgcattgattagtccaggcgcctcaggcacacccaacgctgatttgtccccccaggtcgccatgggctactcacactccttggtgatagcaagagatgaaagtgagactgagaaagagaagatcaagaaactgccagaatacaacccccgaaccctctgatgctcccggagactcctccgactccacacctctcgcggcagctgtcatttccatgtgcactgggacgggaagtcaaacgaggaatttaaaaaagcaaaagttgaccgaaggtgcatttttgtttagactccctgaggttccgttttacacatgatccaacgttaactacctttttttctgtatgctttccaaagtccttttttttcccttaatgttgaattaaaatacttgctcatagttgatttaccattcctacaaaagaggcagaaactttgagcaatctaggttttttttttttttaagttttttctttcttcctttcctgaatacactccccaaaacacccctttccagttacaattagcatcgtgatccaagcagatgccacatggaagaggaatcgccatttactcagaaaaaatgtcccttacaggaaccggcagcagctaggcagtcaccggcccgcctccatccaaaatcacgctcgcgtgcttcggaagcatccgggtcactccttctccgctttttcttgcagatgggcctaggccggtgtcggttctgtttctccccttggctgcctgtacgcccacagccttctggctgcgacattatagaatcggccgtgtcccccctggtgggggattggggatctgtgtttagccatttatatctactttagctgttaaagaggtccaaatgaaaatcaggtgattgtggaaccatggggacttgggggtggggcagaggtgggaacatttgtatcagttgagtcagcttggtggctccctgtggagccagggctgagccttgtcacgcgcactcgccaattaagagatggaccagccagcagtcaagtgcattctccagtccttgcaagaaggatcagccctttctgtgccagcctcgatcgccttgtgctttggtctctttttctcccccccgcctggatcctgcctcgcgcgggccgtcctgttgctgagactcggggtaccgttctgctgacccagctccctttagtcacgtttgcttggctctggtaccaaatagttgggattaccgaagagtccccttccttgcgtgtcagcacggatgctgtgactgccacctgcgtcctcgtcaagtgcccgagctcgccgccgtgtgtgctgcgctgagtgagttatgaggtgcctttcccggaaccctcctctcgcctggacccaagagaggcgacagctgtggctggggctcttggtttccagagggtctggactggtttgggtgctttaaaatagatatttagttcagtggtgcttatgggggagatgggactagaacttaagtgtgagacttgggtggatgggaaagttaaatattggtctcttcaagttttttttttcttttgctttgttaccacttgtcactgtctccatgttaaaatgccaaaaatgatgtagttgttgttgcttttttccctattttccaccccagtcgctccttaccgtgactcctgcccttggagggcatgtagcagtgtctgtcctgccagtcccaaggccctgtgggaggagactggcctgcatctctctaagacttagtctgacgccacgcgcatctcttgttctgtgttcaatcagtagtccaggggagaagcttctgctacttcagagctttgctaaactaacctaatttgtccaaatcaccccaaaaccaccatctctgacgtaagcttccatgcgacagcctgatccgtttccctggacaggtctctttcctggaatgcagcccaggcacctgtgctcctggcacccttgaggtctctcctttgagccgtggtcaccgagagggttgaggacgcagcacccgaggtcccagcctttgcaggagcctccctgggcttagctggacttagatcttcggtggcctcatgtaaacgtggcagccagcctcttctagaaccctagcccagggactggagcaggaaagggaccttcaaagtgaagactgccttgtcccgcagctccttctggcttagattgaaacatgggcttcctaatgggttaaatcctttaaaataaggagttgtgggggaagggtgtcgtgcactcctagagaaaggtacacagttgcccggttgggaatgtgcttggcgctgaccctgcgggcatctgactggtcttccagctcaggaaaaagaatttgaaagaggcttagcgtgaaggggaatcaaagaggaggttgtgatttggtcgaaggtgcctggtttagtgctgtaattgtcttattatttttttatatatatatttcttggagtaaacattttaaataaacaacattgtctactgtc

SEQ ID NO: 1707 - DNA, 4018 bp, Homo sapiens
atgggatcttctggacttttgagcctcctggtgctattcgtcctcttagcgaatgtccagggacctggtctgactgattggttatttcccaggagatgtcccaaaatcagagaagaatgtgaattccaagaaagggatgtgtgtacaaaggacagacaatgccaggacaacaagaagtgttgtgtcttcagctgcgaaaaaaaatgtttagatctcaaacaaggtaatattcagagctgcagaataaccaacccctcctccccctgtcctcaccttctgccttcctggactggctttgtgccctgatcgctgagggctggtctctggcaaaactgctggacttgggagacctgcgatttagattcattactgtgccaaatatggtgtgtgccattaggaatgaccttatcctatcaggtaatgtctgagactcagtttcccagaacaaatcattggtgaatcagtggcattgaatcagattcttttggctatttggatacctgtcactcttataattttttgagctcccaggtggccatcgttgccctaacatatgctgcaagtgataaattaagcaatttatatttcccaacttttttgctatggagtgaccacctctctgcctacacaaatccaactttgcaccaaaacgcctctcctgactgctccagaacagagggtttctcctttctgctgcatcttagtttcatgcccatcaccctgggatgcaaaaagactatcaaagattctgtttttattcattcaacaaatactgattgagtgcctctgagacccacaataggatttggtctcagtgtggtcaggggggttgggattgccttctttgagaaagaaaatctggggttgagttgagaaagatgggtaatgttttaggcaaaaagtgggtggaggggttttccaggcacaggcagtagcatgcacaaaggctcagtggtggggccttgggagtccagaacgcagagtgagcacgagcatggtacaaggaaaacagattctgggtgggcagagatcaaacaattcaggtatggtgggccagattaaagagtcttgcctggatcccaagggctatggcaatccaccgaggcggggcatcatatgaccaggttcatactacatctatcgagtttaaaataggaggaacagagtatcttaaaggacttcaagatgatagaaatggtggccggaactagaggtagctgaggggatgaagaagagtaggacctgcttgaaagaaagagtaggacataggaggcaaagtgaacaggacttgacagagaagtagagtgggcaggttagggggctaagtcactcatatgccagcaggtaaggattctgaattcagccatcctgagttcaactcttacctccagtttttacgagcctttttgtcttggataaattaacaactttccctcactgtgagtcagtttcctcagataataaaaggatcagtgtaaaagattattttgaggatccaattgatctgcatgatgtgattagagttatgcctggcacacagtagccacctgatacctattcgcttatttgtaattcttggctaagggctcctaaatagcagagatcatgccttttctctgttccttgaagcattgagcacataataggtgctcaatgaataatttattcagttcagatcaggatacatttcgtttatcctcaacgttccataaggttctgtactgtgccaggctacctgttaggaattgggatgccaagatgaaagcagatacactagaaactcactccctgctcactagaaactcacagcctcagggatgagactgaagatataaacaaatgaaaaatgaatgcacaagactctgaagcaaggtgtggcagtgaggaatgtagaatggggtcaagagtgacatcacagcagttgatgtctgagaaaggttttgaagtaagaagagtgtcactgtgagcagtgcaaagggatggaggtatagaggtagcacggtgtgttgagtactgctggagcatgtggctcaaaggggttctgcggcaggagaggaggccagcgtcacagtaggagccagacaatgaagggccttgtgggtcatgggaggacattgtcatagagtgaaggtaggtcttctctgtgcaatgacatgataagcctggctctcagatccatcagatccttctctctggtgggaagcatgaaggattgattggaggggccaggaatggaggcagggggatcaatctgaggtcacctcaacagtccaggcatgagacactgaggcttatattaaagagactggcagagaggtgagctattaggaggtaaaaatcaacaggatctaattgttttagcagtggagatttacccaaatggaactgtgtaagcattatttagttgggacctgcatttgtttggtagagttgctataacaaagcaccactgactgggagtcttaaacaacagaaatgtattgtctcacagttcctcaggctagaagtccgagatcaaggtgtcagcatggttggttccttgtcagggttatggggaagaagcatgttccattgctctcccctggcttctggtgctttgctggcaatctttggtgttctttggcttgtagacacatcaccccgatctctgccttcacattcatatggtgttctcacagtgtgtgtgcctctgtccaaattaacctgtttgtataaggacaccagtcatattggtataggggcccaccctattttggtctgacctcattttagctaattacacctgcaacaaccctatctccagggatgcagatgcccactctggggtctccttgcaaatgtgtgcaatatgtcagtggagctgtgctcctgccatgtgataagagaaaaggagcctactccagtttcttctatagcagttgccagggagaataataacaactgtttatttctggagtgggcacactgagttttcaactctggagtctctctgcagatgtatgcgaaatgccaaaagaaactggcccctgcctggcttattttcttcattggtggtatgacaagaaagataatacttgctccatgtttgtctatggtggctgccagggaaacaataacaacttccaatccaaagccaactgcctgaacacctgcaagaataaacgtaagtcctaggggccccggtctttcatcctctccagtcccatgccaggaggtctgggtgttggctggtccattccaggacagctacatctttggcagacctggtgctgacagaaccagctctgatcaggaggtaagaatgcacctggcaaaaggcaagacaaagttactttctgagtatgaggaactgaggatgagaagggatgtagaagtaatcaatgctggcaagtatgaggggaattaggaggggtggaggaagggtgtagaagtggtgaaatctcagagatgaattgcagaagaggcacaggacgctaaacttaagacacgttgaccaaccaacccttctaagccatcaatgtctcaacacaactctttggcagcgattcactcctatttgtttttccttgaaggagatggagagctccccaaagcaaacccactactttttagtgtctttctgtgcaaagatgtataaacataacttcaagctccaaagatgagctgaacccaagatgctcagctgtttctgtcctacgttctctgcaggctttccctgattggataaggatgcactggaagaactgccagaatgtggctcatgctctgagtactgttcctgtacctgactgatgctccagactggcttccagtttcactctcagcattccaagatcttagcccttcccagaacagaacgcttgcatctacctcctcttcctccatctttggctcttttgatgcacaatatccatccgttttgatttcatctttatgtcccctttatctccaacttctagaactcccagtttatacctgtgtcactctcaattttttccagtaaagtacttgatgtagt

SEQ ID NO: 1708 - DNA, 5052 bp, Homo sapiens
agtcccagctacttgggaggctgaggcaggaggattgcttgagcccaggagttggaggctacaataagctatgatccagctgctgcactctagcttgggtgacagagaccctgtcttcttaagacaaatccagaatttgggacatcttataatttagttgccctggattcttcaaaagtttaagctatgaagaaggacatccctcacactctgaaacagatctccttcagagacagagttttgcagcctctcatcagcttcctggatatgctcccacacctcagcctactggtctttctggaatatttgatactagtgtgaacagtgccagcagtaacactaaagagtcttcagtgatgaattttctgtctactgctgaatcccgaactgctcaggctgctgcttcaggaactactctcttaccacaattcagggctccatcctggcagacaggcatgcattcctcagcagcaactgagctgtttgctactggacctttgccaagcactggaacacttccaccatctctctctgcttatcagcatcccaccaccttcagcaatagaaactttgctaccacttcacctttggtgcttcaggattcaacttttaacactacatcaaatggaattttaagtcatcatgaccctttgctacaaatcaagacttcccagggaactgttccaactgctttggcatttgagcgcctgggcagttctgtattaagtaacagcataccacctcagtcttcaacataccgctcagctcaagagtctgcaccccatcttttacaacctcaatttagtttgttgccttcagcacttgggggatcccagcagactcctcaagcctacagttcaactctctttactagttctactgcttccattgaaagagctcttcttcgagaatgtagtgttattaaacaccatcagcggccttcaggtacccagtcaattcaggcacaactgactggttcacagcactccttacatagttatctatcaaattcaagtgtagttaattttcaggaaacaaccaggcagtcatctttatcctgtagcccaattggagattccactcagaatttgccagactctagcccgacccagaattatatttctatgcattcttcccaaaatgttcagactcaagagtcatcatctccccagtcccagaagtttttgcctgctgtccagtcatcatcttttgcatcctctactcattgtcagacattacaaaataacataacttcccctgacccaaagtcttatgctgaaagaaagcttgactcagatgtgtatccatcttcaaagcaagaagatggttttccaatgcaagagttacaggtgttgcagccacaagcatctcttgagtcatcaacccaaaggctatctgatggagaaattaatgctcaagaatcaacttataaggtgtcaaaggcagatgacagatattctcagagtgtaatcagaagtaattcccgtcttgaagatcaagttattggggttgctctgcaagcatcaaaaaaagaagaaagtgttgttggttcagtgacacaacttaaccaacaaattggccaagtcaataatgcagctacccttgatcttaagaactcaactaatttaatacagactccacaaataaggttgaatactaaagacttaaagcagcaacatcctctcatacttaaggtgcatgagtccaaggtccaggaacagcacgatcaaataattaatgcttcatctcagattcaaattccaaatcatgctttagggcatggccatcaggcatctcttcctaatacacaggtccttttagattctgcctgtgatttacaaattcttcagcagtcaatactgcaggcaggtttaggtcaagtaaaggcatctttacaagcacagcgtgttcaaagccctcaacaaatagtacatcccttccttcagatggaaggtcatgttattcaaagcaatggtgatcattctcagcagcaactccatcctcaaaattctgaagttatgaaaatggacctctctgagtcttcaaaaccattacaacaacatctaacaacaaagggccattttagtgaaacaaatcaacatgattcaaagaatcagtttgtttctcttggatcgatgtgtttcccagaggcagtgcttcttagtgatgaaagaaatattttatcaaatgtagatgatatcttagcagctacagcagcagcttgtggagttacacctactgatttttccaagtcaacttcaaatgaaaccatgcaggctgttgaagatggtgattctaaatctcattttcagcagtcattagatgtcaggcatgtgacttcagattttaactctatgacagctacagtaggaaagccacagaatataaatgatacttccttaaatggaaatcaggttactgtgaacctttcaccagtacctgcccttcagtcaaaaatgactcttgatcaacagcacattgaaacacctggtcaaaatataccaactaaagtaacttcagcagtggttggaccaagtcatgaagtccaggagcaaagttctggcccattcaagaaacagtctgctaccaatcttgaatctgaagaagacagtgaagctcctgttgatagtacattaaataataacagaaaccaagagtttgtttctagtagtagaagtataagtggagagagtgctacatcagagagtgaatttaccttagggggtgacgacagtggtgtgtcaatgaacccagctaggagtgcacttgcactgttggccatggcccaatctggggatgcagtcagtgtcaagattgaagaagaaaaccaagatttaatgcattttaaccttcaaaagaaaagagctaaaggaaaagggcaagttaaagaggaagacaacagtaatcagaaacagctgaaaagacctgcccaaggcaaacgccagaatccaaggggaacagatatttacttaccgtatactcctccttcctcagaaagctgccatgatggttatcagcatcaagaaaaaatgagacagaagatcaaagaggtggaggaaaaacaaccggaagtcaaaacaggatttattgcttctttcttagattttctgaaatccgggcccaagcagcagttttccactcttgctgtacgaatgcctaacaggactagacggccagggacccagatggttcgtacattttgtcccccaccacttcccaagccttcatctacaacacccacacctttagtgtctgaaactggcggtaacagtccatcagataaagttgataatgaacttaaaaacttggaacatttatcttcattttcttctgatgaagatgatcctggatatagtcaagatgcttataaaagcgtctctactcccttaactactttggatgctacttctgataaaaagaagaaaacagaagccctacaggtggcaactactagcccaactgccaatactactggtactgctactacttcctcaaccactgtgggtgcagttaagcaagaacctctccactctacttcatatgcagtaaatattctggaaaatataagctcttcagaatcctcaaagcccattgaacttgatggtcttccttcagaccagtttgcaaaaggacaggacactgttgccatagaaggttttacagatgaggaggacacagaaagcggaggagaaggccaatacagagagcgtgatgaatttgtggtaaagatagaagacatagagacttttaaggaggctttaaaaacaggaaaagaacctccagctatttggaaagtacaaaaagctttattacagaaatttgttcctgaaattcgagatggtcaaagagaatttgctgctacaaatagttatcttggatattttggagatgcaaagagtaaatacaaaagaatatatgtgaagttcattgaaaatgcaaacaagaaggaatatgtcagagtgtgttctaaaaagccaagaaataaaccttcacaaactatcagaactgttcaagctaagccaagtagtagcagtaaaacttctgatcctctagcatcaaaaactacaactacaaaagccccttccgtgaaacccaaagttaaacagccaaaagtaaaggctgagccaccaccaaagaaacggaaaaaatggaaagaagaattttcatcatcccaatctgactcatctcctgagatccatactagtagtagtgacgatgaggaatttgaacctcccgctccctttgtcactcgctttttgaacacaagagcaatgaaggaaacctttaagagctacatggaatagcttgttagcattgccttggaccctgacacaatgcaagccttagagaagagcaatgatgagctacttttacctcatatgaaaaaaatagatggcatgctaaatgataaccgaaagagacttcttttgaatcttcatttggatcaatcattcaagaatgctttggaaagttttcctgaactaacaataattactcgagattctaaagcaaagagtggaggaactgctatttctaaaatcaaaatgaatggcaaagcctataataagaaaactctaaggacttctaaaacaaccaccaaatctgcacaagagtttgctgtcgatccagagaaaatacagttgtattctttgtatcattcactccatcattataagtaccatgtttatctgatatgtaaggatgagatttcttcggtgcagaaaaaaaatgaagatttaggacaggaggaaattgttcaactttgtatgaaaaatgtaaaatgggtggaggacctctttgaaaaatttggagaacttctaaatcataccggaatgttgggagaaatgcaaagcgtctcagttagcagcaccagaagatcagagcagcagaatattctagaggctgggaagtccaagatcaaggtacctgtatctggtgactgttgagagccttcttgctgtgccttagaatgaaagaaggtggagggcaaggtgatatgaacaatgtgcctttacatggcaaaagaatgaaagaaagtaaacctattcccac

SEQ ID NO: 1709 - DNA, 3243 bp, Homo sapiens
aactctatgacattggtcttggcagtaatttcttggatatgacaccaaaaagcacaggcaacaaaagcaaaaatggccaagtggaactgtgttaaactaacagctcttgcacagcagagggaaccatggaaaagagtgaaaaggcagcctgtggaatgggagaaaacatctggaggctatttctgacaagggattgatttccaaaatacgtaaggaacccctgcaactcaatagtgagaaaactggtgacgtgaaaaatggaccaaagacttgaatagacatgtctccaaagaagacatacaaatacccagcaggtgtatggaaatgtgcttaacatcctaactatcaaggaaaggcaaacaaaaaccacagtgagataccatctcctagctgatgggaccactgttaccagaaagcccaaagataacaagcgctggggagggtgtggggaacatggaacccttgtgcactgttggggggatgcaaaatgccacaaccgttacagaaaactggaggcctcaaaacatgaaaaacagaatcaccatacgatctagcagttccacttacaggtcttgattcaaaagaatcaaaatgggtattttgaagagagacctgtactgctagtgttccttgcagcactgttcacaatagccaagtgaacagataaagaaaatgaagtgtatacctgcagtaggatgctgtgcgtgcagcctgaaagaaggaaatcctgccattcgtgacaacgtgggtgaccatgaaggagattatgcaaaatgaaataagccagacacagaaagaaactgcatggttccacttaaatgtgatatccagcatagactcacagaagtaaagggtggaatggcggtcatcaggggattgggggagagggaaatggggagctacttaatcaatgggatgaaatttcattaaacaagatgagaatgttctagagatatgccgtactacatggtacctgtagtcaacaataatgtagacttagaaatgtgttaagcggtggctctcatgttcactcttcttaccacagtaaaatcagcacttagaccttggccctggttcaaggcgtcctccggagctgaggcaggggctcttgtaagcggcaccactggccttgccggaccccagcctaagcccttccctgcctccccatttccttttggttgaatccaaaaaaaacctggtcccatctggcttcacttcctgccacccggtgctagcgccctggcctctccgttgttgagaactgattgccatcggcctttgcacagggccagtgcatgtggctcttggtgcaagtgacacccctggcattgtgcagttcctggtgtgccgcacagtagaccctgtgctgatgaccagccatggccttttctgtcatctaagaacttacagatgtttgtcagtttgctttactttttttcttcgtactcacaaaagtaatggtctggcagtttttaaaaaggcaggggagcaaacagtacaggaatgaaagaggaggccgttttccttcgtacttaggaaacgtgcatcaccagcagctgtcacgatgccagaggctgcttctcccttcgtcttgcctggcccctgcctgggtcctgccaggcttcccctgaactcacacggaagctcagatgaccagcttaggcagggtggatggccctccaagctttggccaggttgccacgactggaaggaggaagtggtaactccaaagttggcttctcctcggggtggtcggcttttctgcccaggaggctgggtagtggaatttctgggttcttctgtagaatagagacctgcccttgggccctcacactcaacactgggcgaagtgcagcgtgttgcttgtctgtagcatggccactgcacccaccgtccccttcaccctgttaccctgtgagacgggtgcggcagagcctgcatccctcctccagctggggaggcagaagcgcagaagcttcgggtgacctcctgaggggtgtctgcctagccagggacgtctccattccccacaggcagggccgctgtctgcctcgcagcccatggggctctgctggcgtgaacgcggccttgcagggtggcagagggagagcgagcagcgggggcgggggaggagcacagggtgtgcagttgggtcataaactcactgcttagatggagttactaaggagttagaaagcaatgcttactgctgtatcatatttgagtgattttttctggttcttctaaaacctaaacatggggtaaaaatgacttaccttcacgttagtcatgaaatcttatattatgctgtgattatgtctcttttttattttaactgtagcatcggtgtgtggctatttttaaagacaaacagaacaagcctactggttttgccctgggaagtatcgaggggagagttgctattcactatatcaaccccccgaacccgtaagtgtgactctgtcagcttgcagatttcactggactttttttaacaaaggaagacttacatgaacctttgtctttcagcgccaaagataacttcacctttaaatgtcatcgatctaatggaaccaacacttcagctcctcaggacatttatgcggtaaatggaatcgcgttccatcctgttcatggcacccttgcaactgtgggatctgatggtagattcagcttctgggacaaagatgccagaacaaaactaaaaacttcggaacagttagatcagcccatctcagcttgctgtttcaatcacaatggaaacatatttgcatacgcttccagctacgactggtcaaagggacatgaattttataatccccagaaaaaaaattacattttcctgcgtaatgcagccgaagagctaaagcccaggaataagaagtagtggctggagactctggctcagccagagttgtttctctccactctgcctcatctctgtacgaatttgggtcccagccttgttgggttgtcagccatggacatggatttcaacccctggagaaaacgatgtcattgttcagcagctgagagcccaggcgtccgcggcgacttgccgtctctccattccactgcctgttgcagagtttttctgtaactaagggggttgaggttattgtagacgttagattgcgggcaccgccagggattttgcagcgcttcagtgtacgtgttagagaatattggaaaagcgtctgtgagccccgtgctgtattttgtaataaagtcttttgcagattg

SEQ ID NO: 1710 - DNA, 2529 bp, Homo sapiens
aggaaaccgttgggtggggccaggagagcgttgggtggggccaggaaaccgtctggtgggatccccgcagctgcttttcacctgctgttcctcctgcgcttcctaagaggaagaatcaatgccgtgggtggagcccaagcccaggccggggccggagcagaagcccaagctcaccaaaccggactctgccaccgggccgcagtggtaccaggaatctcaggaatcggagtcggaaggcaagcagccacccccgggacccctggcacccccgaaatcccccgaaccctcaggacccctggcgtcggagcaggatgcacccctgccagagggggacgatgcacccccccggccgtcgatgctggacgatgcaccccgcctgccgctggagctggacgatgcacccctgccggaggaggaaacccccgaacccacggccatctgcaggcaccggcaccgctgtcacaccgactgcctagaggggctgctgtcccgcaccttccagtggctggggtggcaggtgggcgcgcacccctggatcttcctgctggcgcccttgatgctgacagccgcgttgggcaccggcttcctgtacctacccaaggacgaagaggaagacctagaggagcattacacccctgtggggagcccggccaaggcggagcggcgcttcgtgcagggtcatttcaccaccaacgactcctaccgcttctccgcctccaggaggagcaccgaagccaatttcgtctcgcttctggtggtctcctacagcgactcactgctggacccagctacctttgcagaagtcagcaaactggacggcgcggtgcaggatctgcgcgtggcgcgggaaaagggaagccagatccagtaccagcaggtgtgcgcgaggtacagggcgctctgcgtgccccccaacccgatcctgtacgcctggcaggtgaacaaaacgctcaacctgagcagcatctccttccccgcctacaaccacggcaggcatcccctctacctgaccggcttcttcggaggatacatcttggggggcagcctaggaatgggccagttactcctgcgggccaaagccatgcggctgctgtactacctgaagaccgaggaccctgagtacgacgtgcagagcaagcagtggctcacccatttgctcgatcaatttaccaacattaagaacatcttggccttgaaaaaaattgaggtagtccactttacatcgctttccagacaactggaatttgaggcaacttctgtgactgtgatccctgtgtttcacctggcatacattctcatcattctgtttgcagtcacatcatgctttgggtttgactgcatacgaaacaaaatgtgtgttgcggcctttggagtgatttctgctttcttggcagtggtgagcggctttggcctgctgttgcacattggggtgccatttgtcatcatagttgccaattcaccatttcttattctaggtgttggggtcgatgacatgtttatcatgatttctgcctggcataagaccaaccttgcaggtgacatacgagagcggatgtccaatgtctattcaaaagcggcagtgtctattacaatcaccaccatcactaacatcctggccttatatacagggattatgagctcttttaggtccgtacaatgtttttgcatctatacaggaacgaccctgttattttgctatttttataacatcacgtgttttggagcatttatggccttggatggtaaaagagaagtagtctgcctatgctggttgaaaaaggctgacccaaaatggccctcatttaaaaagttctgctgtttcccatttggttctgtcccagatgaacatggaactgatatccatccaatgagtttgttttttagagactattttggcccctttctcacaaggagtgagtccaagtattttgtagtctttatatatgttttgtacatcataagcagtatatatgggtgtttccatgtgcaggaaggtttagaccttcgaaatctggcaagtgacgattcctacatcacaccatattttaacgtagaggagaattatttttcagattatggtcccagggttatggttattgttactaaaaaagttgactactgggataaagatgttaggcaaaaactggaaaactgtactaaaatttttgaaaaaaatgtctatgtagataaaaatcttacagagttttggttagatgcatatgtgcaatatttaaaaggtaacagccaagatcctaatgagaagaatacttttatgaacaatattcctgattttttaagcaattttccaaattttcagcatgatattaatatttcttcatcaaatgaaatcatttcttcccggggcttcattcagacaacagatgtttcttcctcagccaaaaagaaaatattgttattccaattacgacgcatagctgaagactgtcaaattcccctaatggtgtataaccaggcatttatatattttgatcagtatgctgcaatattagaagacactgttagaaatgt

SEQ ID NO: 1711 - DNA, 4115 bp, Homo sapiens
agtcgcggggtctgggaggagacctgaatgaaatgagggagccttgggagcatgatccaggcggagggaactggattcgggaggaggaactgccttggccttgaaagatacctaccaggagttcaagtgctgtgcgggtgcatcagctttgtagatttgtgcaagatgaaaattggaattgtcttaggaaattatggatcattcatttattcagtgctggattcattcagtgatttatgtctgaagtgtgacagaaggggagtaaggccaagtgtccttgccctctattggagattctgcctcccctgggacagatggcttcttgagcacactcccacgatgggtggctgctctggtacatctcatccacttcttcatctgtgaagctgtcacccatggtggtgagcagctcctggaggtggtcctcatgagtgaaacctgaggattcctcgttgaagcaggtattcatccatggggttcttccgcggtgaagccagcttgtcgtgctgtcccccttgtcaatgaagccatcatggttctggtcaatcatgttgaaagcctccttaaactcctggatgtggaactggtcaaacatcacgaagacattggatgtggccccctgtgctgtggtcgcttcttggtcttggctttggtccacttgctgaacattttggcttcaggaagcagtaccttgaagagaaattggagagggagtcaattcctaggatagcagagagatggacaacagacagaatagatggagtttcacaatggtggccatgtgtctggaattggtgggttcttggtctcactgacttcaagaatgaagccgcacaccctcgcagtcaccccagctctgatctttgccatcacagttgctacaatcggctctttccagtttggctacaacactggggtcatcaatgctcctgagacgatcataaaggaatttatcaataaaactttgacggacaaggcaaatgcccctccctctgaggtgctgctcacgaatctctggtccttgtctgtggccatattttccgtcgggggtatgatcggctccttttccgtcggactctttgttaaccgctttggcaggcgcaattcaatgctgattgtcaacctgttggctgccactggtggctgccttatgggactgtgtaaaatagctgagtcagttgaaatgctgatcctgggccgcttggttattggcctcttctgcggactctgcacaggttttgtgcccatgtacattggagagatctcgcctactgccctgaggggtgcctttggcactctcaaccagctgggcatagttattggaattctggtggcccagatctttggtctggaactcatccttgggtctgaagagctatggccggtgctattaggctttaccatccttccagctatcctgcaaagtgcagcccttccatgttgccctgaaagtcccagatttttgctcattaacagaaaaaaagaggagaatgctacgcggatcctccagcggttgtggggcacccaggatgtatcccaagacatccaggagatgaaagatgagagtgcaaggatgtcacaagaaaagcaagtcaccgtgctggagctctttagagtgtccagctaccgacagcccatcatcatttccattgtgctccagctctctcagcagctctctgggatcaatgctgtgttctattactcaacaggaatcttcaaggatgcaggtgttcaacagcccatctatgccaccatcagcgcgggtgtggttaatactatcttcactttactttctctatttctggtggaaagggcaggaagaaggactctgcatatgataggccttggagggatggctttttgttccacgctcatgactgtttctttgttattaaagaatcactataatgggatgagctttgtctgtattggggctatcttggtctttgtggcctgttttgaaattggaccaggccccattccctggtttattgtggccgaactcttcagccagggcccccgcccagctgcgatggcagtggccggctgctccaactggacctccaacttcctagtcggattgctcttcccctctgctgcttactatttaggagcctacgtttttattatcttcaccggcttcctcattaccttcttggcctttaccttcttcaaagtccctgagacccgtggcaggacttttgaggatatcacacgggcctttgaagggcaggcacacggtgcagatagatctggaaaggacggcgtcatggggatgaacagcatcgagcctgctaaggagaccaccaccaatgtctaagtcgtgcctccttccacctccctcccggcatgggaaagccacctctccctcaacaagggagagactttatcaggatgaacccaggacgcttctgaatgctgctacttgatttctttctcatcccacgcactccatgagcaccccaaggctgcagtttgttggatcttcaatggctttttaaattttatttcctggacatcctcttctgcttaggagagaccgagtgaacctaccttcatttcaggagggattggccgcttggcacatgacaactttgccagcttttcctcccttgggttctgatattgccgcactaggggatataggagaggaaaagtaaggtgcagttgccccaacctcagacttaccaggaagcagatacatgtgagtgtggaaggcagagggggtttatgtaagagcaccttcctcacttccatacagctctacgcggcaaattaacttgagttttatttatcttatcctctggtttaattacataaatatttattttttaagtgtaattttgccaaataataacaacagaaggaaattgagattagagggaggtgtttaaagagaggttatagagtaaaagatttgatgctggagaggttaaggtgcaataagaattcagggagaaatgttgttcattattggagggtaaatgatgtggtgcctgaggtctgtacattacctcttaacaatttctgtccttcagatgaaaactctttgatttctcagaaaagttgtatgcctatttaataaagctactcatttcctttggaactttatctttaagataatagtttacatgtagtagtacttgaaatctaggattattaactaatatgggcattgtagttaatggcggttgatgggttctaattttggatggagtccagggaagagaaagtgatttctagaaagcctgttcccctcactggacgaaataactccttgtagtagtctcattacttttgaagtaatcccgccacctatctagtgggagagccatccaaatgagaaacctaaaataattggttcttggtagagattcattatttctccactttgttctttaggagattttaggtgttgattttctgttttattttaactcatacctttaaaggaattccccaaagaatgtttatagcaaacttggaatttgtaacctcagctctgggagaggatttttttctgagcgattattatctaaagtgtgttgttgctttaggctcacggcacgcttgcgtatgtctgttaccatgtcactgtggtcctatgccgaatgccctcaggggacttgaatctttccaataaaccaggtttagacagtatgagtcaatgtgcagtgcagcccacacttgagaggatgaatgtatgtgcactgtcactttgctctgggtggaagtatgttattgttgacttattttctctgtgtttgttcctacagcccctttttcatatgttgctcagtctccctttcccttcttggtgcttacacatctcagaccctttagccaaacccttgccagtgacagtattttggttctcagttctcactgttccctctgctcctggagcctttgaataaaaatgcacgtagctatggagtggggtttagctggaaaggtggccttccaacttcacgtcaacttctggctcctcagtttggcagtaaggcagggaagttgttttcctatttctcactgagaagattgtgaatatttccatatggattttccattattgtttgtttgattctttgttttaaaataaaaattctgaatgt

SEQ ID NO: 1712 - DNA, 2863 bp, Homo sapiens
ctgcctaccgggagctgacggacgacgactgccaacaccttagccccagctggcccaggaaactgctgcggtggcaggtggcggcggcaggagggctcggctgccccgagcgcccgccaggcttctgccctaagaagatggcctactatggaaaatgcattgaaactgtgatcgagcaactcgacaaatttacacccaagagggacaaccctgagcagttcctggaggctgcggccacctccctgcagctgaccgtgttttccacagagacctgctcttcgtatggggaggtgctcctggcacccagaatgtgtgtcaggccaggctctggtgaaagaagccttggccgggacccgggatatgacatccacactgcggttccatcctcagtcaacacagatgagaagggtcagccctggagcgcccccatgccccacccccactttggggggcatcttatctcgggaaatgggtcctccatcccccaggcgccccagggctgtggcagtgagggtgcgcaaggccacaacttgtgctgtatttgtggtaaccgagacttgggaatcactgactgggtctccgacagaggcaggggctggcctgggcagtgaggctcccggggagccgagggctgcaggcttctgtacacacctccttcatcttcctacccacacctggaagaagtcacaggcccacctggaggctgcccaactcctcagctcctgtcctcccatccctgggttttcctcacagctccatcctggtcctggcaccccctgcaacctcggcagccctgccccactcaggggcctccctgtcacctggtctcagctcccaccacgaggtgctgatctcacatccaccacctgtcagtggcatgtgcctggggaacaggagcttggattgcagggcccctgcctctaggaatgtgggacttggtctccattggatggggcctccagaggaagctgagcccaccaggggaaatcctggggggctgtcacatgggccatcaccaacccatcattgcccaggagcagggagcgggcactcgccccctggaaagagggcgctcatagcaagtgtgctaattcaggctgcctgcctgtccttgcaggccacagccctctgtgccgctgtgctctggatgaacttggcctatgtgcgctgcttttctgcacggcccctgggggctgccctggccatgctccagctcccgctctcactacctgctcaggtgcacctgtgctgttcccccaggccacagtctgagcccaccttcccttggggtagaatgaggggttcatccttcattagctacctctggggcagcctcaagaaagcccagaggggaggtggtgtgagtgggttacaaaggctacaggggttggggccaaggcctctgccgtaagagaaggcctggggcccccacccatccctgctcccagcttctggaagaggcgcctcctccggctggggcctggcagccagcaggggttggagaggggagcagggcctgtgtgcagagctgcaggcctccgtgggcacctctccctccacttcagcaccctctggcccccagctctttccctgagcccctgagcactgtggggaagtgatgcaaacagctcgggcccaggttcatccacactcctcttcccagctaaggcctcagcacgacgggcacacctctcatcccgccggcctgccctcgccttgcacgtccaaaacagacaatagcgaaggcccaggtccccttggccagaagcccgtcctgggagctggcgtcacccaccccactgcctgggcccacctgtagcccggcccctctgaccagcccaagagcagctccagcagctcctcctatccgtccccctcatttccctcaggatctttcccgtcagccacccgtgctgctacgtctctcaccctaaaaacattttttttaagtcctctgtactcccctgaggctcccgcggtccttcccttctatctaacagattcctcgaagtccctgccaccagcggcagctcttcctccatcctccctcacacccctccctgcggacttcccccacccctccacccacagcgccagtctgggtcaccccgcacccccttgttgccaaatccagtggggcagcctcagctcctctgacccagctgaccccgcccccagctccggggccttccgatcagcttcctgggtaccccctgcgccaggcctgcatctcacctggcagccactccttctcaggctcgggcctcccctgtcgggtgtgcggggtgcacgggctcagcggctgctctctgctctctttgctatacacactcctggtcccctcgcctgctgacagctcctgctcctccctccatccttgacctctcccgagcctggactcacatctccttgggtgtccagtgggcacctcccgtgtgacacgtcagtagatgaatgaatccatgtgacctcccccagagctgctgatccgggcatccccagttcagccggcagccgctccgtctccccttgctccagtgggaaccctggcgcctcctgggcacccccattcctctagaccacatctgttcatcatcagctctgccttcgactctgccatgtgtgcactctgctccagctgcactggtctcctagtgtttctggaacattccacgcgctccccactgcactagctgttgcctccacctgggaaactttccccctgatgctgtcttggcctgcgcagccacatagcaccttggcagggaaaggggtgtgtgtttaccccttcctcaagcaaaaagtggtaaagttcatgtctttatttcttgataataaccattacaaaaaaaatgagtttgtt

SEQ ID NO: 1713 - DNA, 1172 bp, Homo sapiens
ctgaaagatctgctttcaaactcacttatgtagcttttggcaggagactttggttccttatgatgtgtgcttcttcacatggctgtttataacatggttccccgcagagtgggtatacagagaaagtgggagttgtccagcgagtgcgcacctaatctcagaagtgacacgccatcatttctgctatattttactggttatacagaccaatgcttgtacaatgtgggagggaactctataactgtgaatattataagacaggggtcactggggaccgtcttggaaactgactctcacagtccgaaacccttcagatatgctttaatctatgagttcacaataatatttaaaacaaacagctgggcacggtggccagcgcctatagtcccagctattcaggaggttgaggaaggaggattctttgagcccaggggtttggggctgtagtgtgctatgatggtgcctgtaaatagccattgcactcccgcctgggcaatatagctgactccatctctaaaaacaagcaaacaagcaaacaaagttgttcttctaaggatgacagagaaccatatgttatcttaaaaactggggaaatagtgcggtggctcacgcctgtaatcccagcactttgggaggccgaggcgggcggatcacgaggtcaggagaatgagaccatcctagctaacacggtgaaaccccgtctctacttaaaatacaaaaatattagccaggcgtggtggtgggcccctgtaatcccagctacttgggaggctgaggcaggagaatggcgtgaacccgggaggcagagcttgcagtgagctgagatcgtgccaccgcactccagcctgggagacagagcaagactccgtctcaaacaaacaaacaaacaaacaaacaaaaaacctggggaaataggctgggcgcagcttatgcctgtaatctcagcactttgggctgatcatgaggtcaggagttcaagaccagcctgaccaacatggtgaaatcccatctgtatacaaaaaattagccaggcatgatggtgcgcacctgtgatcccagctccttgggaggctgaggcaagagaatcgcttgaacccgggaggtggaggttgcagtgagccgagattgtgccattgcactccagcctgggcaacggagtgagacttcgtctc

SEQ ID NO: 1714 - DNA, 1439 bp, Homo sapiens
gacagtgccaacaggagcaaagccagctatccttactgctacaagacccatcaccaaaatgattgtaacgcagccaaaaggaataggttctacagttcaaccagcagctaaaatcatcccaacaaaaattgtttatgggcagcaagggaaaacgcaggttcttattaaacccaaaccagtgacttttcaagcgacagttgttagtgaacaaacaagacagctagtaacagaaacattacagcaagcatccagggtagcagaggctggtaattcatctattcaggaaggaaaagaagaaccacagaattatacagatagtagttcctcttctacagagtcctcccagagttcccaagattcccagcctgtagttcatgtaattgcttcccggcgtcaggattggtcagaacatgagattgcaatggagactagccctaccataatttatcaggatgtatccagtgaatcacaatcagctacttcaacaatcaaagctctgttagaactccaacagacaacagtaaaggaaaaattggaatctaaaccaagacaacccactattgacctgagtcaaatggcagtgcctattcagatgacccaggaaaagagacattctcctgagagtccatcaattgctgtggtagagtcagaactagtagctgaatacatcactactgtcagccatcgctcccagccccaacagccttcccagccccagcggaccctgctccagcatgtggctcagtcacagaccgcaacacagacttcggtggtggtgaagtccatcccagcatcttcccctggagcaatcacccacattatgcagcaggcattaagcagtcacactgcttttaccaaacacagcgaggaacttggaactgaggagggcgaggttgaagagatggacactttagaccctcagacaggtctgttttaccgatctgccctgactcagtcacagtcagctaaacagcagaaacttagccagcccccgctggaacagactcagctgcaagtgaaaactctgcagtgcttccagactaaacagaagcagaccatccacctgcaggcagaccagctccagcacaaactcccgcaaatgccccagctttccatcaggcatcaaaaactcacccctctccagcaagaacaagcacagcccaagccagatgtacagcacacacagcatcccatggtggccgaagacaggcagcttcctaccttaatggcacagcccccgcaaactgtagtacaggtgcttgcagtgaaaaccacgcagcagctccctaaactgcagcaggctccgaaccaaccaaaaatctacgtgcaaccccaaaccccccagagccaaatgtcgctcccagcttcttcagagaaacagacggcaagccaggtaacggaatattgatagcatgcaaagttaaacttctctgttcacg

SEQ ID NO: 1715 - DNA, 3291 bp, Homo sapiens
gcggcacaggcggcggcgtctccagggggagccaaggacctgttcgttcttctttgggctataagaaggcagaggatgagatgtcccgggccacgtctgttggagaccagctggaggcacccgcccgcaccatttacctcaaccaaccgccacctctatgacttcactggaaacttgaacttagatgggaaaagccttgttgcccttgggcctgaccagatcttattaagaggtacacagcttagaaatactcagtgggtctttggcatagttgtttatactggacacgacaccaaactcatgcagaattcaaccaaagcgcctctcaagagatcaaatgttgagaaggtgactaacgtgcagatcctggtgttgtttggcatcctcttggtcatggccttggtgagctcggcgggggccctgtactggaacaggtctcatggtgaaaagaactggtacatcaagaagatggacaccacctcagataattttggatacaacctactgacgttcatcatcttatacaacaatcttattcccatcagtctgttggtgactcttgaggttgtgaagtatactcaagcccttttcataaactgggacacagatatgtattatataggaaatgacactcctgccatggccaggacatcaaaccttaatgaagagcttgggcaggtgaaatatctcttttctgacaagactggaacgcttacatgcaatatcatgaactttaagaagtgcagcattgccggagtaacctatggtcacttcccagaattggcaagagagccgtcttcagatgacttctgtcggatgcctcctccctgtagtgattcctgtgactttgatgaccccaggctgttgaagaacattgaggatcgccatcccacagccccttgcattcaggagttcctcacccttctggccgtgtgccacacggttgttcctgagaaggatggagataacatcatctaccaggcctcttccccagatgaagctgctttggtgaaaggagctaaaaagctgggctttgtcttcacagccagaacaccattctcagtcatcatagaagcgatgggacaggaacaaacatttggaatccttaatgtcctggaattttctagtgacagaaaaagaatgtctgtaattgttcgaactccttcaggacgacttcggctttactgtaaaggggctgataatgtgatttttgagagactttcaaaagactcaaaatatatggaggaaacattatgccatctggaatactttgccacggaaggcttccggactctctgtgtggcttatgctgatctctctgagaatgagtatgaggagtggctgaaagtctatcaggaagccagcaccatattgaaggacagagctcaacggttggaagagtgttacgagatcattgagaagaatttgctgctacttggagccacagccatagaagatcgccttcaagcaggagttccagaaaccatcgcaacactgttgaaggcagaaattaaaatatgggtgttgacaggagacaaacaagaaactgcgattaatatagggtattcctgccgattggtatcgcagaatatggcccttatcctattgaaggaggactctttggatgccacaagggcagccattactcagcactgcactgaccttgggaatttgctgggcaaggaaaatgacgtggccctcatcatcgatggccacaccctgaagtacgcgctctccttcgaagtccggaggagtttcctggatttggcactctcgtgcaaagcggtcatatgctgcagagtgtctcctctgcagaagtctgagatagtggatgtggtgaagaagcgggtgaaggccatcaccctcgccatcggagacggcgccaacgatgtcgggatgatccagacagcccacgtgggtgtgggaatcagtgggaatgaaggcatgcaggccaccaacaactcggattacgccatcgcacagttttcctacttagagaagcttctgttggttcatggagcctggagctacaaccgggtgaccaagtgcatcttgtactgcttctataagaacgtggtcctgtatattattgagctttggttcgcctttgttaatggattttctgggcagattttatttgaacgttggtgcatcggcctgtacaatgtgattttcaccgctttgccgcccttcactctgggaatctttgagaggtcttgcactcaggagagcatgctcaggtttccccagctctacaaaatcacccagaatggcgaaggcttcaacacaaaggttttctggggtcactgcatcaacgccttggtccactccctcatcctcttctggtttcccatgaaagctctggagcatgatactgtgttgacaagtggtcatgctaccgactatttatttgttggaaatattgtttacacatatgttgttgttactgtttgtctgaaagctggtttggagaccacagcttggactaaattcagtcatctggctgtctggggaagcatgctgacctggctggtgttttttggcatctactcgaccatctggcccaccattcccattgctccagatatgagaggacaggcaactatggtcctgagctccgcacacttctggttgggattatttctggttcctactgcctgtttgattgaagatgtggcatggagagcagccaagcacacctgcaaaaagacattgctggaggaggtgcaggagctggaaaccaagtctcgagtcctgggaaaagcggtgctgcgggatagcaatggaaagaggctgaacgagcgcgaccgcctgatcaagaggctgggccggaagacgcccccgacgctgttccggggcagctccctgcagcagggcgtcccgcatgggtatgctttttctcaagaagaacacggagctgttagtcaggaagaagtcatccgtgcttatgacaccaccaaaaagaaatccaggaagaaataagacatgaattttcctgactgatcttaggaaagagattcagtttgttgcacccagtgttaacacatctttgtcagagaagactggcgtcagcagccaaaacaccaggaaacacatttctgtggccttagccaagcagtttgttagttacatattccctcgcaaacctggagtgcagaccacaggggaagctatctttgccctcccaactcgtctgcagtgcttagcctaacttttgtttatgtcgttatgaagcattcaactgtgctctgtgaggtgtgaaattaaaaacattatgtttcaccaatattt

SEQ ID NO: 1716 - DNA, 3518 bp, Homo sapiens
actcaccccaggatcgctgggaaaagtcttggactgaggagctccaaaaaggaagctgtggcgctgcgtagggaaggagggaagaaagtaggtctccgagatgctgcggcttgtggtgcagtcggccaagattgacccaccactagccccactacccaggccctgcatgtccatcgacttcagagatatcaagaaaagaactcgtgtggtggaagggaatgatcccgtgtggaatgagattcattggcctggccacagtactgctcaagccattgttgaaacaaccaagtgaggtcctttttgtgaaggacttgaccctgctcaaccattccatgaagcctacagattgtactgtcaccctacaggtggcccacatgagcaaccaggatattgagaagacaggagctgaagaccacctgggcataacggcaagagaggcagccagtcagaaactgatggtccctggctccactgcgcacagggctctgtcctcaaagcctcagcactttcaggttcgagtgaaggtgtttgaagcccgacagctcatgggcaacaacatcaaaccagtggtgaaggtgtccatcgcaggccagcagcaccagacacgcatcaagatgggaaacaaccctttctttaatgaggtgggctgaacggggcacatcaggcaaggagccagccaagggctgggcatccccggtgggcagccggcaagcttgctccttgactagggtgtcttcatgtgtttgttccacaagcatttactgagtgtctactgagggccaagcactgaaaatacagaacagtataactcagagccctgtatctgaggagctggtgggctggtgggggcacaactcatgaatccgtaaacaattacaacagagcagatcctggtttacagaggtctgggagtattgctattggaggttcgaagcacagacccagaccatgtatgtctcattgctgctggagccccaaattgtagcactgtgcctgatacacagtaggtgctccataaatacttgttgaattaattagtaaatgaacaaataaaagataaaagcacagtggaagctggaaggagtaagtgagtaatgaggctgggggtggcggagaggactcagaagggctccagcaaccctgaaggaagattttaccagggaaagacagacaggatgggaaaagataattcaggaaaaagtcatggtgttttcaaaggcctggaaccaagcaagccgcagacttgacagcagaactatagctatgggtgtggctggaggagactggctggaggggagcctacagtgtgggctggggtcccatcctggacactactcaggagccatggaggacttaagcagaggagtgacaggcctaggtttgcatttgggaaagaagtttctggctgccacggggagcagggacagagtggactggcagggcaacctagaaggaggtgtgggctcaaatctccatcctgggcagctagctgggccctgagttctccaggaatctcctaccattccccattctgggcagaaaaccctccaggaggctgggcttggtggctcatgcctgtaattccagaactttgggagaccgtggtgagtggatcacctgaggtccggagttcgaaaccatcctgaccaatatggtgaaaccctgtctcttttgtaaaaatacaaaaattagccacatgcagtggcaggtgcctgtaatcccatctactcaggaggctgaggcaggagaatcgtttgaacccgaggttgcagtgagttgagattgcaccaccacactccagcctaggtgacagagcgagactccgcctaaaaataggaaaccctctaggagcccgggaggcctctgcttctgggggagcatgagagaagtggcacaagttgagtatcccttacccaaaatgcatggtatcagaagtgttttggatttcagatttttttgggaatctggaatatttgcattgtaccagttcagcattcgtaataatgaaaatctgaaacccagaatgctccagtgagcatttcctttgagggtcatgttggcactcagaaagtttcagattttggagcattttttatttcagatttttggattaggaatactcagcctgtacttgtaaacccattgaaatgggtaaagttgtggaaagaagcacattattctgagctttcaggtttactgagtgcttgggtgaagtggcggaagaaatcatccactctaccccaattctctttgcctcagatcttcttccagaattttcatgaggttcctgcaaagttctttgatgagaccatcttaatccaggtgaggagccaaactggtccccagcaaggtgggtttcttgtcccacttcaatactgggaagcactacagctccagcccccacccttagagccaggggcacttcagattgtcttcctgatccccaccactttcttcaccccctggcacccagattattcattcatttactcatttattcaacaaatgttgtggattgccaactgccaggccctgaactgggcgccaaggtgaacaaggcagccccttcccatgtgccaggattttcaagccaccaaaggcccctccaagtagaatactccattcccttaccaaagggagccagtaacaatgtggaacatgtggttatcaggtgcctactatgtgcccagcacagggctaaggagaacaaagaggcctcttcctttgaagaatttactgttcttgggaacaaaggcacagaggaaacaaccaggagagcatgtaatggataacgttgagtgcaacaccttgctttgtgttgacttggggcaaggaaattgacctctctgatcaatttcctcatcagtaaaatggaattaaaaatctgaacctcacagggttcctctgagagtgaaatgagaacacccatgtgcaagtgtctgccccattaggaagcattcaatacgtcaggaggatcctggttgtgcctttgctatacctcttacaggggctgagggaaattgggattgtgaataattaaaatatttctgggaactcccttgcaggtggtgaactcctcagcaatgagatacaaagcagagatcgggagatttcaagtgagtactgtacatgggaggaggttcagtgaaacagttattaaaacagagacccatgctgggctccatgcccaagtctagggaaaaggacttggattttcacacagaaagatccagacttggccgggtgcagtggctcgcacctgtggtcccagcactttgggaggccgaggccggtggatcacgaggtcgggagatcgagaccatcgtggctagcacagtgaaaccctgtctctactggaaatacaaaaaattggcggggtgaggtggcgggtgcctgtggtcccagctgctcgggaggctggggcgggagaattgcttgaacccaggaggcggagcttgcagtgagccgagaccgcaccactgcactccagcctgggcgacagggtgagactccatctc

SEQ ID NO: 1717 - DNA, 3893 bp, Homo sapiens
acaaaggggctcctctggggagggtgggggtagatgagagtggggacttggatctgcctgccaggccgtcctgggcgctgcaggaagcaacatgacttaggtaactgcccagaggtcccaggcatcttcaagaccctggccctctccccaggtgcaccagacatgatgcagcagccgcgagtggagacagataccatcggggctggcgaggggccacagcaggcagtgccctggtcagcctgggtcacgaggcatggctgggtgcgctggtgggtgagccacatgcccccgagctggatccagtggtggagcacctcgaactggcggcaaccgctgcagcgcctgctgtggggtctggaggggatactctacctgctgctggcactgatgttgtgccatgcactcttcaccactggctcccacctgctgagctccttgtggcctgtcgtggccgcggtgtggcgccacctgctaccggctctcctgctgctggtgctcagtgctctgcctgccctcctcttcacggcctccttcctgctgctcttctccacactgctgagccttgtgggcctcctcacctccatgactcacccaggcgacactcaggatttggatcaatagaagggcaaccccatcccactgcctgtgtctgttgagccctggcctagggcctgagaccccacggggagagggagggcaatgggatcagggctccctgccttggcaggcccagacccctagtccctaacaggtagactggcctgaccccggactccttcctcaagtcaatgctgcaggttcctggtgtgaggggctgggggctttgagaagagggggcaagacagatggcttagccattggtgaaaattgcttagccaggggcagagcttgaccaagccactgatagcgcccatatggatgtgatgatacccgtggggcccccttggcaactgacagcatctttttctcatagccactcagctgtctcagcttcagactcactgagaacttctacctgggtaccactggccttgccattcctcccaccaatcccctctttccacttccaggagaaccacagactctagagagggtcccagtgacaaaaatctatcagggagaaggctggccagaagccccaggagacctcaactcactcgctctccaaaccttgcagcccacgcatcctcctccctagacttcctacttcctgcctcagtctgcatccccaagtctgagaaatgggccaactggggtcagacagcacctactcactctctaagaatcccaaggtctgttatggaaaaatgatcaagaaatcccatttcacccacttacacaatgtgtggccttggccaattaattcatttgagcctcaatgttacgtgggccacttctgtcatggggttgttgtgagtcaaagacaatatctatttgtgaagcattttgtagaagccaaaaacctgtaagatgttgttttgagctctaagaactttctgtaggcgcataagatcttttgaccccaaagactgttgaaggaacaggaagcttctctgggctttcagatcaactctctgtcctggatagaattttggccctaaaatggtaaacaagaggtcggttaagtgtgtacaagatgtaaaaggtcatgtgccatgaaatctcaaaatgtgcagatgttgaactattttgattatgaaatgcttgggcctggggctgggtgccagatgcttgcacagctgtgtgagtggggacagcacagccccagggtttccaaaactgacccagcaagccgctcaggcaccagaagggctttggaaagggcaatcctttgatgccctgaatgctggccgttcgttcacttgctggcccctccaacaaaacattgagtgatcggtaattaccaagtaaggtacatgatagacaactttatccacacctgacccccacccaagccctggccatccccaactcctgcccagttctgatccctgctttatctataaccctagaatccttgctcttgaagccccagacccaaggtccccctcttttgtcccataaatactcagggccttggggctagcccctagaaccctggttcatttttgccttagacttttgcaaccctccatgccacggattagatgccttcagcatcagtgccaaaacccaaggtccagtccttcctttctgtttctttgtatttctcccgcattatggcatggtagtgagagcgaggtaggacatggggctgatgtggtctcatggttggatgggttttggtgcatgagctgaggctgggcgtgagtcccagcactctcacttactaactccatgcccttagtggaaatcgctaaaccttcctcaacttcactttcctcatgggtaaaactaaggcaagaacccctgtcttagggctctggcatgtgagtgaaggacctgggaccactcctagcaccacaaattatagctatgctgtgaccatcccattttagagatgagaagtcaggcccaggatagccagttgccagtggcaaggccaggccatctgagtcctaccaggctactcaagggaaggtgaagggggcaaaggaaacacaaacaacctaactaactgaagaccccaaggcttctcaagagctcctatcagagctaaagcccaggcctagggaagtcatgagtcaagccaatctagatggcaagctgaggattcaggatcccatgtggtgagggcagagaccaggctgcctggcctagatccatcattgacttggccatgcattgctagccagggacgttgctctggagccttgggtccattccaatgaagggagagaggagtttggggccctgaccagatgctctagtggatgggatgtgggcagcagcaaggagaagaccttcttcctttccccacagactatataccttttaccctcctgcccagctggtatggggtaaggaggtgcacccagactagagagctgatgggcaatactcatcaaattagatccacatataccctaggacccagaaccccagaatgaattttcacagaggtccataagggccttgcccctcaaaatgtagtcccagaatcagcaacacaggcatcacctggaagctggttggaaatacagtctcaggccctgctccagacaggccaaatcagagtctgcatttttttttttttttttttttgagacagagtcttgctctgttgtccaggctggagtgcagtggtgcaatctcggctcactgcgctccacctcccaggtccaagcaattctcctgcctcagcctcctgagtagctgggattacaggcgcctgccaccgagtccgacaaacttttgtatttttagtagagacagggtttcaccatgttggccaggctggtcttgaatccctgacctcaggtgatctgcccaccatagcctcccaaagtgctgggattacaggcgtgagccaccgtgcctggccaagagcctgcattttaacaagattcccaggtgatacattgtaccctgtttgagaagtgaagcataagggggtattatgagaatgcctattgcactgttactagtgggagcaggataggtaaagggaagggtaaaacaaggcagatgggcccaaggggcagtaattagaaggggcagaaggtacatgaaccaatcttaaaatcttagcattgaaaaagaaatggaatgagaatacaattcctcttacacaaatttaaaagcatgtcagcaaaacaagacactttttggcaagaacacataaaaacgaaagataaacagaatggaatggacaactctaggggcaggcaagtgggagtagggtatagagataacaggcaataaagctagagagcttgcagaggcgaaacgtg

SEQ ID NO: 1718 - DNA, 3607 bp, Homo sapiens
aaaaggtgactagagtgctaagccagtcaacagggaaaacttggctcctgactttgggtctttcttctcagtctatatggaagaaaactgagaaaaaatataaaaaagaagaacacaactagttgcgcatctcctaaagagatggaatcgccacttatatatgtttcagttttgcttttgaacatatttgaattttcatcaggaatagtatataataaagatgatacagagaaacgctttgcatgttctaacaaagggttccctcaagagaatgaaataatcaagttgtatcttttcttagaaaacttgaaaatccagtgtttcttccaaactgaaaatgaaattgcatcaaaagcaatgctaagtgtgttcacatcaggaggacttgctcccagcttgggaatcatgaatagtacatataatggcatcttccactttaatttaacgttgttcagtgatcggattttgtggttggttgatattcctagagaaaacatcacacaaagcacagatattgcagctgtagaagaatggttagtaagaatcactttacatcatggactaaatatttatgctactgaaggaactctattggatgttattcgagaaccgattcttcagtggactcctggggatgtgattccagaaagtgaaatcagtaaattatatccacatgtggtagatctcaaagtgacaaaatgcccctgtgccaatgatgtggcattactaggcttcattgtggatacaatagttgatggtgtttacataggcataacctttggtggattctggcatgattatgataccacatggtttaacatgacacagactatctattcccaacttcaagaagaatatgaagacctttcattggtggatatggttttaacgaatcattttttagttatcctcacctctttgggcctttttgtaagtgaagatcttcgttatccatcacgccacagcttatcgttttccagggcagacttttgtggttttgaaagggttgactatgtgaaaggaaaactgtggtataatgaaagatgttttgctaacagagagcactttgaagttgattatgttacagttacctttgagagaaacagaaccctaagtgagtcaagctcttgtttttatagtcaggaaccatttcttgaatgggtaccctgcttacctcacatttttaaaggaataaaaatttttccaactgtgctaacatttcttgttgaccaagagcgtggtactggagtttacctcttctataacaaggtcaggaaaactgccattgcctctgtgagcaccctgagaaataatgaaccaaattcacaatcaaaatttccaatttttcggtttccttcatcattctcttctcccgttggaatggtatttcatccccgaagccactttttgtatgcttatggcaatcagatatggctttcagttgatggcggcaacacctttcaattaatagctaactttcatgatgatatcataaagaagacttttcatagtttttatacatcagctattacttttgtttctcaacgtggaaaggtttactcgacaaaggcaggaatgggaagatacagtgcagtcggaagtgttactgagagaattttcacattatactatgatcacttgggattcctacataagctgactctgggtcgctttgaagctagtggaccacccacagcctttggaaattctagaaatctttttggacagcctccagatatgggctttgagactgcgcttgccccacagcacacctccttagatgaaattatcttttttgcatatgtacctgagaacgaaccccaggaaacgatctacagcaagaagttcggcaatatacactatggaaaagtgatacactctgggaaaactggaagagcttacataagaaaggtattgcaacatacgactcctaaaggatttttgtcctcagttattgcagaaatgaaagagccctttggattagaagaagtgaatgagagctcttgtttgtctagttcccttttgattaataaagctggaaatgtctataaactcactcttgattcacaagttgttcaggccttgtttgaagatacagatatagagaagactgtagtgcttcccgggtacagcagcttcctcatcacaagcattttagataataagaatgcattagccattgctaccatgcctgaaagtgcacccaacaatatgacctttctaaagagcacatggttcttatacaactttgggcaaaggaatggacgaacatggaaaatatattcaaaaccatgtaattattggtttcaacatgatgattcaccatccctcaacattgtgaaatacattgatctgggaaactcttatgttttaaaagctaaggtcatacggaatgcaaaaggttttcgaatgcttgaaataccactactgactgtgtttgttggaaaccctaatttgttggaagttacagctgaagtcacttttgatgatactgacagttatgtaataacaatttctgcagctagcaaagttttacatcagggttcaacttcactggcatttattatgtggtcagcctctactgagtgctttgttacgacaatggtgccaacactgaaaagcagctgtagttatctcagatctatgcatcacattcctagcaaatttatcccatttgaagactggattagtggagttcataaagacagtcagggttttaacctcatcaaaactttgccgataaactacaggcctccatctaatatgggaattgctattccactcacagataatttttatcatgcagatcctagcaaacccataccaagaaacatgtttcacatgtcaaagaaaaccggtaaattcaaacagtgtgctaatgtttccactcgggaggagtgtaactgcacaaaggatcagaagttttcacatgctgttgctttctcggattgcagggaaaaagttcctcgctttaagtttccaattacacaatatccagtttctttggaaattatcaacgaggatggacgtgtcccattgcaatctccatatctggttactgtgactgaagtgaacatgaggcacaactggaaactgaaacacactgtgccagaaaatattaaaagaatgaaacaattagtagaaccaattcttggtgctgcagtgtataatccttcaggtctcaacttaagcataaagggctctgaacttttccactttagagtgaccgtcatttcaggagtaactttttgtaacttaattgaagaatttcagatttatgttgatggggcaccattgccattcccaggacacacgcttattgccgtggcaacagcggtagtgctagggggattaatttttatagcatttatgtttcaactgcaaggcatccatccgtggaggacattccaaagatggattagaagaaaccaagagaagttttcaagtatctctctcagtgagctgattcatagatcaaagtctgaagagtgaacacatggtgatcataatttctctttattttctagttttatcagccaattcctagaacaatatatttaaatgttaaatatgcaagctacataaaatcctaaagaattgtcattat

SEQ ID NO: 1719 - DNA, 4707 bp, Homo sapiens
ggtgctacggagatcctccccattttacacgaggaaatgagacacagagagggttcttgggagccctggagccggccggtgggggagcccccggaggcgggctgggactatacccagtggaagcaggagcgggagcagatcgacctagcccgcctcgcccggcacagagacgcacagggtgactggcgccgcccgtgggacctggacaaggccaagtccacgctacaggactgcagccagctgaggggagaaggcccggccagggcaggcagcagaaggggtcccaggagccaccagaaactacagcccccaccattgctccctgatggaaaaggtcggggcgggcaagccaacagaccctcggtggcaccagccacaggcagcaaagcccggggcaaggagaggctgactggcagggcccgaaggtgggatatgaaggaagacaaggaggagctggaaggtcaggagggaagccaaagcaccagagagactcccagtgaggaggagcaagcccagaagcagagtgggatggagcagggccgactggggagcgcccctgcagccagcccagccctggcatccccagaggggccgaagggggagtcagtggcttccacagccagctcagtcccctgctctccacaggagcctgacttggctcctcttgacctctccctaggaggggctggcatccctgggcccagggagagcgggtgtgtgctcggtctgaggcctggggcccaggagagccctgtgtcttggccagagggctctaagcagcagcccctggggtggagcaatcaccaggctgagctggaagtacagacttgccctgagccacagagaggagcagggctcccagagcccggagaagacaggtctggcaagtctggggcccagcagggcctggccccgagaagccggcccacgagaggaggcagccaaaggtcgagaggcacagcaggtgtgaggcgcaggacagggcgccctggcccggcaggaagatgctgaacacagctcctgggagctggggagtccccggggagaggaaaagggaatcactctgttaaaggccctccgcgtgatggccatgtggttgccggtggcttgcgccattgtcactgagcagtgtggcaaactctccagcatggcgaccttgtgagggcaaggagtggcctccctgcacctcacacgctcatctctgtgcacatgtgtgttttcacgcacgggcacagcccctggtgtattcctgtactagtatctggcatctgaggctggtgcaccctgacctgggcctactgctgcccaggccacaagccttctccactatgatgagagaacaaggcttggtggcacccagcacctggctctcctggctccccgtcacccccccagggcctggcctccctctccagctgcaggctttcacctcttgcctgggctggattcccccagtcccagattcccaggatgcccaaccaggggaatcccagtaaccatgcgccagcctcctgcctctcctgagtggtggctgaggcctggaggaggagaggccacacagctggcagggtctggcctgggcaaagaagagtagagctcacgtcttcttggtgaaaaggaggatctctggaaagtcctcctctctgaaatgggttgggatggggagcgacaacctcctcttcccacagcaggatgggagagcttactcccaggcccccacacccaggtcagacatcacgtgcaccctgaatgtaggcaagggcctggccctgcagcccagggtcatttcctgctctttccacttcctctttccccaccgtcctgcactagcaccagggccaggccaaggcaagaatcagacagctactccacagacagagaaacaacttccagctaagtatgacatcaggacttgtctttcctactaagcctccatccccgcccctcccctgaggcccacgtctgctgaattatccggactccgcacaagctgtggcttcctctcagttcaacaaacatttcctgagcacccactaccagtaatccagccggtaggcgacggagactgccagcaggagggagggaagaaagccagtcatccggcagatctgggctgttctgggcgggagctgttctgggccacaggtgccctacagggctgggggcaggatggcggtaggagccccaggggaccctcccacctctgcctggcagaagcaagtgcccttctttcttgttatgtgtgccttctgctcctgagccctagtgtggacctcaccgcatggtcccctctgccccctccttctggtcctgccatggctgctgctctctgctgaaggctgtggggctctagggagagtccagatcaccctgggatttctccactgcccaatgtgaagcctaaactgtggggtcccagctcagccttcctcactggctctcaactccaccccacccctctattcaggaaggtgaggggcatctctttagcagaccagactgttttgagaagtgtctctcatactttaactgaagagtcatgcagattctaatggtctggggagggcctgagagttcgtcttttttttttttttttagttagggtcctgctgttatcacctaggctggagtgcagtggcacaatcatggctcactgcagcctcgaaccctccaggctcaggcgatcctctcacatcaacctcttgagtagccgggactacaggtgtgccaccacacctggctaatttttgtattttttgtagaggcagggtttcaccatgttgcccaggctggtctccaactcctgggctcaagcaatctgctcgccttggcctcctaaactgctgggattacaggcatgagccaccacacctggccgagaattcgtatttctaagaggcttcaggtgaagcccatgctggttcctggaccatggttttgagtagttaagggtttggactagaatatatgaagggctgggggtgaagacagactctagactctaaaggttggtggctggctatgtaggggatgggggagtgctacccctgtcaggtggtgggggcttcctggctgcagagttgggtgggagacttggggaagatgctttggaaggcagtgagtgggtggtgtcaacttctagtagtgcagtgggagatctggtcagggatgggatggagtgaagggggcagaggcatttggtgtggggttgatcagaggaattttggaaaggcttggaaacattcctatgtatgtgagacacacctatgccagggcaaagactccaagctcaagtttttctcttgccttctagtcacaagaacatggctttggagtgtgacactggcctaggaatccatgactcccaaaggacggggctggggtagaggaggttcaggcaaagcccttagattttggagacatcaggcagatgtctccaaaaatgattgtgatcaagaatctgaattataagattcacagtctgctccccaacccagtgctgccaactgtacagctgcgcctccacgaaggggcatatgccaggctcgtctgaccctggaatgaggatgtaggaagcaggcagagctccggttcagccctcacaatgggactgaagcaggagagaaggctgggcagaagggctgtggggaagtagggcttgtctccatggatgacgtccagaaggatgtcaggaggaggaatatcacaggagttatagacattggagggagcagagactggcacaggacctcttcattgcaggaagatggtagtgtaggcaggtaacattgagctcttttcaaaaaaggagagctcttcttcaagataaggaagtggtagttatggtggtaacccccggctatcagtccggatggttgccacccctcctgctgtaggatggaagcagccatggagtgggagggaggcgcaataagacacccctccacagagcttggcatcatgggaagctggttctacctcttcctggctcctttgtttaaaggcctggctgggagccttccttttgggtgtctttctcttctccaaccaacagaaaagactgctcttcaaaggtggagggtcttcatgaaacacagctgccaggagcccaggcacagggctgggggcctggaaaaaggagggcacacaggaggagggaggagctggtagggagatgctggctttacctaaggtctcgaaacaaggagggcagaataggcagaggcctctccgttccaggcccatttttgacagatggcgggacggaaatgcaatagaccagcctgcaagaaagacatgtgttttgatgacaggcagtgtggccgggtggaacaagcacaggccttggaatccaatggactgaatcagaaccctaggcctgccatctgtcagccgggtgacctgggtcaattttagcctctaaaagcctcagtctccttatctgcaaaatgaggcttgtgatacctgttttgaagggttgctgagaaaattaaagataagggtatccaaaatagtctacggccataccaccctgaacgtgcctaatctcgtaagctaagcagggtcaggcctggttagtacctggatggggagagtatggaaaacatacctgcccgcagttggagttggactgtcttaacagtagcgtggcacacagaaggcactcagtaaatacttgttgaataaatgaagtagcgatttggtgtg

SEQ ID NO: 1720 - DNA, 3104 bp, Homo sapiens
aaatgatgagaaaaccttcttcagataagataccatcaattgacaaaacattggtcaataaagttgttcactcctctgtttgtaatattttaaatgactatggatctcaagactctatttggaagaatataaacagtaatggagaaaatttagcaagaagactaactagtgcagtgataaatgaaattttccaacatcaggttaacttgatattttgtgatgaggtttcagtttcagcatgtttgcctctggaatctaaggatgttgttaaaaaggtccaaaagttggcccaaacagccagcaaagaatgtcaaacttcatcaccatatacaataatattacctcataaatttttggagaatgtgatttctgctcttttctccaaaattttctcaacaatatccagcacaaaaacaaaagaacctgaggacaatttgtccacagaactgaatttccttcaaatgaagttagtaagtgcagttgcaacagagatctcccaagataaatatatgactatacagtatgtagaaaccttacaatctgatgatgatgaaattattcaattagtggttcagtctgtttataataatctcttgccacagtttggatcacaagagattatacaaaattgtgtaaccagtggatgcaaaatcctttcagaaaacatagttgacttggttctacgagaagtggctagcaatcagctgcagagctatttttgtggagagctaactccacatcagtgtgtggaagttgaaaacatcgttgaaaagatccttaaagatgttttccaaactactgatgtgccccaacctaaaccttcacatgctgataagctgtcttataacataatagaagaaattgctgtgaaatttttatcaaagcttttatctatatttccaaaagtacataaagaaagaacaaaatctctagagactgatatgcaaaaaataacttcaaaagtactaaattcagtccaagaatttatctccaaaagtaagattaaacttgtaccacccaccaaggaatcacctactgtgcctgtagctgataatgcaactattgaaaacatagttaattctatttataccagtgttttaaagcactctggctcttatacttctgtatttaaagatttaatgggtaaaagcaatgtcctctctgatacaataggctttttaatggtgaatgcaatttcgaattctgaatttcaacctcaagtagaggaagaagtatcaaattcagaattagttctggaagctgtcaaaattatggaaaaagtgatcaaaattattgatgaacttaagtctaaggaaaagtcttcatccagaaaaggtttgacattagatgccaaacttttagaagaggtgttggccttgttcttggctaaactaataaggttgccaagttcctcaagcaaagatgaaaaaaacttatcaaagactgagttaaataaaattgcatctcaactgtcaaaattggtaacagctgaaatttccagaagtagcattagtctaatagcttctgatcctgaagagcactgtttaaatccagaaaatacagaaaggatttatcaggttgtcgattccgtttatagtaacatactgcaacaatcaggaaccaacaaagaattttattatgatataaaagatacaaatacagcctttcctaaaaaagtggctagtttaattattgatggagtttcaagttttccattagatacaattaactcaacaatttcaaatgctgatctctctggagagctagacgttaatagaattgttcaaaaggcccaagaacatgcttttaatgtgattcctgaattagagcaagaaaagttagatcaaaatttatctgaagaggaatctccaattaaaatagttccacatgttggaaaaaaaccagtcaaaatagatccaaaaattatttcagaacacttagcagttatttctataaaaactcaacctcttgagaaacttaagcaggagtgtttgaaaagaactggacatagcatagcagaactgagaagagcatcaataagtgggagaaattactccttaggatcacctgatttagaaaagagaaagacagaaagacgtacctcattggataagactggaagactggatgtaaaacccctagaggccgttgctagaaattcatttcagaatataagaaagcctgatattacaaaggtggagctcttaaaagatgttcaaagtaaaaatgatcttattgttcgattagaagctcatgatattgatcaagtgtatttggaaaattacataaaagaggaacgagattctgatgaagatgaagttgttttaacacagacttttgcaaaagaagaaggcatcaaagtatttgaagatcaagtgaaagaagtcaagaagccaatacaaagcaaactttctcctaagtcaacactaagcacgagcagcctgaaaaaatttttgtcactaagtaaatgttgtcagaccacagccagtgcaaatattgaaagtactgaagcaatctcaaatcaggtaatagaatccaaggagacacatgttaaaagagctgttgctgagcttgacatggccacaccaaagacgatgcctgaaacagcctcttcatcttgggaggaaaagccccagtgtaagaaagaagaaaagaatcttgttactgaaccaacacattacttcatacacagaattatgagttcatcttcatacaaccaagaagatctcatttcatctactggtgaggctgaagattgtcactcagacccaagtgctaaaatattagaagaaagttctcaggaacaaaagccagagcatggaaacagtgttaagtttatcaccatctttgaaagatccaaggatgttcttggcagtgcaaatccctcaaaggaagtcatttcagaaactcccaagcccgatgtctccaaacaaggatctaaaatgctgacaaaaatgtcttcagctttgtcaaaggtgttttctcaatgtaacaccaatatttccagatcttcctcaccagctcaccaggatgaacactgaagcttttgtacctgatataagtatgcttacttcttttagaaaataaaatggtttctaaagcat

SEQ ID NO: 1721 - DNA, 3087 bp, Homo sapiens
gaccgcagcagagccggaggggtgggcaggcgcgggtccgggagacgcgcggggaaacgcgcggagccgtgtctgctcaatcaagtcaaatactgaacaacttcctggcggagaggctgagaattttatacttgcttgctcgaaagcacctcaaataagatgatccacgccaacacctcccctttacaggttttaaaatattcttataactatgactgaaaacaagacagtttcctcttcttccactagagatgatcaaaccaatataggtttaacatgtcaggaagtaaaggctctcagagagaaggcatggtcaaggacaaatgaaggcaatgccatgtctcaaagtttggttatatatggagcctctaaggagaacagtgaaggttttcatgaaagtaaaatgacaaatactgaaggggtgaataaaggcatttactttagctacccatgtcgacgtcacagctgtgccgtagtaaatattccagcaccttgtgtcaacaaaatgatttcacacatccaagatgtggagtccaaaatacaggagcatttgaaaaggtttgaaacttcttttgaagaatggagcagaacttcttccacaaaagacctgaaagaagattggagtgtaactacaccagtgaaagaggtcaaaccaggagaaaagagagatgaaaagtgtccagagttaaagcaggaaatggaaacattgctctcagaggccattcgtctcattaaaagtctagaaactgaccgggcagacgctgaagaagctttaaaacaacagagatcaagaaagaatatgattaacatgaaaattgactcttggtcagtctggaaacttcaagaactcccattggctgtgcagaaagaacatgaggcctatttgagtgatgttatagaattacaatggcatcttgaagataaagctaatcaactacaacattttgaaaaacaaaagacagagttagaagaagcaaatgcaaagattcaagcagacatagactacatgaatgaacatggccctctactggactctaagcagaatcaggaacttcaagatctgaagaaccattataaaaaaaaaatggaggtaatggacctacacagaaaagttaatgaagaacttgaagaagctttagaagcctgtgaaaatgccagattgaaggctcagcaaattaaagaagagattgataaggatatttaccaggatgaaaaaaccatagaggcctacaagagagagatatatcaacttaacagtctatttgatcattactcttcatcagtgataaatgttaatactaatattgaggaggaggaagaggaagtgactgaagcaataagggaaacaaagtcatcaaaaaatgaattacattctctatcaaaaatgctggaagatttgagaagagtttatgaccaactaacctggaagcaaaaaagtcatgaaaatcagtatctggaagcagttaatgatttttatgctgcaaaaaaaacatgggatattgagctttctgatgttgcaaaagatttttcagctatttctttggcatgtacaaaactgacggaagacaataaaaaacttgagattgatattaacaaaataacagaaaaaaccaatgaaagcatacggaaaaaatcaaaatacgaatctgaaataaaatatttgacaataatgaagttaaagaatgataaacatctcaagaacatctataaggaggcttatcgcattggtactcttttccacctaaccaaacacaagacagatgaaatggaagataaaatagcagaagtgagaagaaagttcaagggtagagaagaattcctgaaaaaactcactcaaggtgaagtggctgctggaatggtgcttcagaaaaaactatattccatttacgaagtccaggcacttgagcggaaagagcttataaaaaatagagcaatatgtgccatgtcactggcagaactacaggaacctctgcttcaactagaagatgaagctgaaagaatcagaagtctcaacaaagaacattctgttagtaaacgctcagcaatttttaaagacctagaagcaactaaaagtaagacaatgattttttatgcaaaaataaatgaattgaatgaggaattaaaagcaaaagaagaagaaaagaaaagttttgatcagacacttgaaatattgaagaacaaatttataactatgagatttaaaagggaacatgcacaaactgtgtttgatcattatatgcaagagaaaaaagactgtgaagagagaatctttgaggaagatcagagatttagagtgctccttgctgtaagacaaaaaactcttcaagatacccaaaaaataatagctgattcacttgaagaaaatctgcgtttagctcaagagtatcaacagctacagtttacattcttaaaagaaaaggacaattatttcaatatatatgataaacagctatcacttgatacttcaattagagataagaaacagctctgtcagctgcagagaaggatgcacacactgtggcaggagcacttcaaactggtggtcctcttcagccagatgaggctggccaacttccagacagactctcaggagagtattcagaaaatattagctgtgcaggaggaatcttcaaatttaatgcaacacatcttaggtttcttccagactttgacagatggcacatgcgaaaacgatggttaagcaaacaaccaatgtatcttggatgctgaaataaaagacaagaaaagtcacacagttcagataacagtgtaattggacattcacctgtttgccatttcacacttccatgaacgaaaaactcactcacctcccagcatgctttgccactcttttactcacagcaaatccataacaatgaaacaggtgactttcatgctgctgtcaggaacgatctaatttcagctctgggtgactgattgcaattggctttgcctcatctgataattaatctatgtcaccattaattggaagagagaataattactggcggtgttgacagtgactgttcgcttccccagatttccctatcgtcttggcccaaataaaggctttgccattcagtactt

SEQ ID NO: 1722 - DNA, 2697 bp, Homo sapiens
aacttacaacctttaaaacaaggaagacccaccctgttcccaggagctttccagatccaccaagggcaggtgggaagagaccttgaagtatcagggttcgagccccgagaggagatccaaggggaccccctcctccatctgactgaggaacggactccccacttccaccaacccaactcgtcatggctgctcggaaatctcatattcaactcaaaaaaggaggcgaaactcctctcaacgcctgcattttaagcagcggctcctcggctcttgtgcgctgttcaggcgctcgcagatcgtccctgctcttccctccaccctgcagtgagctcctggcagctgggccggacgcagcttcccatgagcagaggatcgacctgggagcctggtgggtgatctccgcccagaccaagcatgagaaccccaagtccagtgggacaggccacagaccagcgactgctgcccatgcctgtcctggggactccagacagtgccgagggaaaggagaaatcattcattcagccattcattcgttgacccaggcaattattcattcattcattcaacagatattgactgagtcctccctttgaggcaggcactgttttatgcactgaaatacaactatttatacaacagacactcttccctccccccatggaggttctgttcaagcggggagacagtcatttgttaaatgaaacataaaatctcagtgacaattagagctctgggggagaatgaaggagcaggaagaggcagacgaggaggagccggggctgccaggtgcagtagcccaggttgcgcactgctcaactttgctgtaggattcacatcacagtcatcagagtcacactgggcagttttccagtagatggccgcactgtgtctcaggaagggcccattgccgctttgtccaaggccatctcatgggctcaaagccatgggaggggaggggtcctgccaggatgacacagagtctggggccctcactttcctcccatcagatgatgcccagcctgggaaggcactgagaccgcagcggagtgggccagggggcagtgagaggaggggacgtgggtggggcagggctggggcactggaggagcaggtcaggcagggcccgtcagcccaggggcaccccaggactcaagcccgcagccgaccctgctctgctaggcctcactgcagctgtgggaaggggaagcatggagccctccctcaaggtcagtgcagcgcctggcttgagctcatgacggtgaccgtcccctgctgccaccattgtagtcactgccctggtgggcagcctggaccccagctccaccgcgcatggactgtgtggtcttgggcagtgccaagctcagcctcacgggcctgtggggacggtcacaggaggtccacgtgccaggcccagggttcatgcacagggttaccaccactgcgaggttgcctgccccgtcttgtacccggccgtccatgtcctcacctcaggcagcaggacaaaggcaagtggaactgagaggggagagagaggccagagtcccctgcagccctgtccccaggaccagtgccaagagcaacctcagaggagggacctgggagtggctggttccagtccccacccccactccgatgggaaagtgaccccgggtgacctgccaaggtcacagggcagagctagggcgaggtctaagcacctcatgtctgagcagaggaacccactcaaggcccaccaggacccacacggccagtgttgtcatcactgagacatagagacgggggcccccgagccacacagctggacagtgagaaaaccaggctcccagcagtgagctggccgcatgcccagggccttccacagctccacacagcccagcctccaaaccaactcaggatgggcccagggctcaaatgcccccaaggcccaggcagaaccgtgggagtgcaggtgcccaggggtgacgatagggaacggtggggactgcggagaaccggagagggcttccctcctaagggcagtgaacctcaaagttccctaaacctacagagcccaccaagctcacctctccagggggcttcagtccagtctcaagagtggcacctggtgaagggggttcttgggatgtgacagtgacctccgaagcctggacatttgctctgtaaggagggggtctgggcttttaaaatgtcctgctgagaaaagagaagacacagggtgggttcgggcacaagggatgtgacggaaggaacagcccctctgcagcggtggcggttcagagggcccaatcagcacacgacccccaccctggcccctgcagaaaggcaggcctggtgcggaagctgaaactcgaagcctagcgcgaaggccccgcagatgtcagtcgtggggtgcgccagaggcaatgggggccccgtgatgagtgcgaccctaactgggttatgttgatgaacgcagggattttcacatcagagttaggaatggcggtgacaataaactaaggaatggtttccgtggatacagttgacacgcggaatcttgtgtcttagaaagcctgtcttgaggctggttacagtggttcacgcctataatcccaacattttgagaggccaaggagggaggatcgcttgaggctagcagttcaagaccagcctggccagcatagcaagattccatgtttattaaaaattttgaaaggc

SEQ ID NO: 1723 - DNA, 3057 bp, Homo sapiens
tgttagtgattcaaaacactctattgcaaatgcaaaattcttggaaacagcaaaaaaagattctgaccagagctgggtcagtgaggtagttaaagtggatctaacccaatcaagtgttacaaatgcttcttcaggaaatgatcacttgaacgtggaaaaagagaagtatgtctcttacatttctcctttaagtgcagtttctgtcatggaagataagctgcataagcgaagtccacctccagagactataaaatctaaacttaatacttcagtagatactcacaagataaaatccagcccatcacctgaagttgttaaacccaaaataactcattctcctgattctgtaaagtctaaggccacttatgtgaacagccaagctactggtgaaagaagattggcaaataagatagaacatgagctatcaagatgcagttttcatccaattcctactcgaagcagtacattagaaactacaaagagtcctcttatcattgataaaaatgagcattttacagtttacagagatcctgcacttattgggtcagaaacaggagctaatcatatttcacctttcctaagccagcatccttttcctcttcactcctcatctcatagaacctgtttaaatccaggtacccatcatcctgccttaactcctgcaccccatttactagccggatcatctagtcaaactccattacctaccattaacactcatcctctgactagtggtccacaccatgctgttcatcaccctcatttacttcccactgtgttacctggagtgcctactgcctccttacttggtggccacccacgactagagagtgctcatgccagcagcttgagccacttagcgctagcacaccagcaacaacaacagttgttacagcaccagtcacctcatcttcttggacaagcccatccttctgcttcatataatcagcttggactttatccaattatttggcagtatccaaatggaacacatgcatactcaggacttggtttgccttcttctaagtgggttcacccagaaaatgcagttaatgctgaagcttcattaaggaggaattctcccagtccttggctacatcagcccacccctgtgacctcagcagatggtattggattacttagtcacattcctgtcagaccttccagtgcagagcctcatcggcctcttaaaattacagcccattccagtccaccattgacaaaaactttagtagatcatcataaggaagaattagaaagaaaagcttttatggaaccattacggtctgttgcatccacatcagccaaaaatgacctggatctaaataggtcacagactggaaaagattgtcacttacataggcattttgtggatccagtattaaatcagttacagaggccaccccaggagactggagagaggttaaacaaatacaaagaggaacaccgtcgaattcttcaagaaagtattgatgttgctccctttacaactaaaatcaagggacttgagggtgagagagagaattattccagagtggcatcatcatcttccagtcctaaaagccatatcatcaaacaagatatggatgtagaacgctcagtatcagatctttataaaatgaagcactcagtgcctcagagtttaccccaaagtaactatttcactacattgtctaatagtgtggtcaatgaaccaccaagatcatacccatccaaagaagtttcaaatatttacggtgataaacagagtaatgcccttgcagcggcagcagctaatcctcaaactctgacttcatttataacatctctttcaaagcctccacctttgattaaacaccaaccagaaagtgaaggtttagtaggcaagataccagaacatcttccacatcagattgcatctcactcagtaacaaccttcagaaatgattgtaggagtcctacccatttgacagtttcttctacaaatacactccgcagtatgcctgcattacatagagcaccagtatttcacccaccaatccatcacagcctggaaagaaaggaaggcagctatagtagtctttcccctccaactttaactccggtgatgccagtaaatgctggtggtaaagttcaagaatcacagaagcctccaactctaatacccgaaccaaaagactcccaggcaaattttaagagttcttcagaacagagtttgacggagatgtggagacctaataataacctcagcaaagagaaaactgaatggcatgtggagaaaagcagcggaaagttacaggctgctatggcatctgtcattgtgcgtccatcttctagtacaaaaactgatagtatgccagcaatgcagttagcttctaaagatcgagttagtgaaagatcttcagctggggcacataaaacagattgcctcaaactagcagaagccggagaaactggaagaatcattttgccaaatgtgaattcagacagtgttcacacaaaatctgaaaaaaactttcaggctgtctcacagggcagtgttcccagttcagtcatgtctgctgtaaatacgatgtgtaataccaaaacggatgtaatcacatctgctgccgatactaccagtgtttccagctggggtggttcagaagtaatttcctctttatcaaataccattttggcctctacatcatcagaatgtgtatcttcaaaaagtgtcagtcagccagtggctcaaaaacaagaatgcaaggtcagcaccacagcaccagttacattagccagtagtaagacaggaagtgttgttcaacccagttctgggttctcaggcacaactgattttatccatttaaaaaagcacaaggcagcattggctgcagctcagtataaaagtagtaatgccagtgagactgaacctaatgctataaaaaatcagacactttcagcctcccttcctctggatagcactgtaatctgtagtacaattaacaaagcaaactctgtaggaaatgggcaagcttcccagacaagtcaaccaaactaccatactaaactgaaaaaggcctggctcaccagacactc

SEQ ID NO: 1724 - DNA, 3377 bp, Homo sapiens
ttgtttaataaaatgaaactttcaaaatatttaggaagctgactccttttgttgcaacagagtctcactctgttgcccaggctgtagtgcagtggcatgatctcagttcactgtaacctctgcctcccgggttcaagcaatttttgtgcctcagcctcccgagtagctgggattacaggcatgcaccaccatgtctggctaatttttgtttttttagtagagacggggtttcaccatgtcggccaggctggtctcaaactccaggcttcaagtgatctgtctgccttccaaagtgctgggattacaggcgggagccagtgcattctgcctgctgactttgttttttgttgttgttgtttttttgttttttgtttttcctttttagcattgcttggtagtcttcatgtaaggctcagctttattgtgtgtttttaggatattatcaactcactggtaacaacagtattcatgctcatcgtatctgtgttggcactgataccagaaaccacaacattgacagttggtggaggggtaagtggaagtctttctgcttgctttcttcaggttttatcagaatgcaaatttacttggaaaacagatgtaagaatagaaagctatactatattcatccttgagattcctaggccaatatacaatgcctagtggcttaatatttttgtctgtgaatgcttgccctgattaacatgaaggagtatgattttatactagaagcagaattaacccaataaaggggttcctacagatttcttataggtacgtagggctagactagactgacaaaagctactggaatcagttacagcacttagctctgagaaacctgatgtcaagcaaaacaaaacaaaaggatggatgagtttcatagctctcccttttacagaaaaggatacataccatttgttaagatgagacagactgttttgagctcagttatttcttgttcagatccttcagatagaatataatagatgatgtccttacggtaagagaacattggcagggcaccttgcaactaaaggatcattttgaacccggcttgaagagaagcagatcaattccatcagacctcatcctagaaagcaagccagaatatgactcaagtaatttagttatagttctatctgatattcttctaagatttctcatacaaggttcaaaatcatttagcttttctaggttctgacctagagaattgaattagaaagttcttaaataaatcttcctacttccatgttctttcatagtatgggtcacttaggagaactctcagccatatatgtcagaagccatgattttcatctcccttaggccctgagcaacttcatgaggagtcagaattattctagaaatgagatagctctgtatcaatttcccccagttgtttttgaagataatactcatctttctactgtgaagaaggaaggaccaggcataggatttactttcattcacttttttactcattcattcatttactcatttcttaagtgtactttggcaggggctgacaaaatatagagctgtgctattcagtatagtaaccatagttgctagccacatggggctactgagcactggaaatgtggctagtctgaatcaagatcagctgtaagtataaaaatacacatttaatttcaaagatttattacccccaacaaggaatgtagaatattttgttaataactttgttgattacatgttaaatgataatattttagacatactgagctaaatatattaaaatctatgacttatttttttcttttttttttttttctgagacagagtctgtctctgtcgcccaggctggtggagtgcagtggtgctatctcagctcactgcaagctctgcctcccgggttcacgccattctcctgcctcagcctcccaagtagctgggactacaggcatccgccaccatgcctggctaattttttgtatttttagtagagacggagtttcaccgtgttaacaaggatggtctcgatcttccgacgtcgtgatccgcctgcctcggtctcccaaagtgctgggattacaggcgtgagccaccgcgcccggccgacttttttctttacatttataatgtggctgttaaaaaatctttaattatgtggctgtgttacactggtgactcatattatgctgctttcagacagcactgactagagtgtgagccccgtcctcaagttgcttagagcttaacacaggagacacaagtggaaaccgctgtatataagctgttgacagggagctgcatggtgcagaaaagaggaaactacctctctggcagtggaattgctgtttgctgagaataaaggaaaaaaaatggaaaaggttccaggtagaggagccaatagtgtacagagtgccagtcatgaaaagattggtaggaggtattcagtgtggtcagaacctaggaggcagtggcttgagactctgggtggaaaaggagactgtgagagccatgtctggagccaggaagccaaacttcctgatgactggaagaagctgaccaaacagcatgcaaggaatgacatccccctctcccaccccaggcaccagctctcagatagccatcagagtgtctgaaggcccccacgtgttcttagttattgtttttatctaattttactttcttaaggtctatttagaatctcaccctttaagcagatgtagcctagcctttgagagttcactttggatcatcttattaactccagttttctggagctacagtccccatgatttaatattgagctggtgttaactttgaccttttcttctgtagagtttgtcagtagagaagtcagagttgaacactggggttagaaatattaataactaaatatcctcagtagggcttaaaagaatacatgcaagagcaggtcaagagataaaagcaaacaagtatggatttcagagcccacactgctttattatttttctgctcacttaaattatcttttctctttctataggcaagtatttagaaaacttagcaatgaggagaataagatgatctctgaagtctctccatgttagtattagatgaagcacagggagcaatccgagtaccctagcaagagaggaatctggtgggcagaccacttaaaacttgtgtgaatgacaggagtggggaccatggttagggcagtgacacttgtctttctttccaggtgtttgcacttgtgacagcagtatgctgtcttgccgacggggcccttatttaccggaagcttctgttcaatcccagcggtccttaccagaaaaagcctgtgcatgaaaaaaaagaagttttgtaattttatattactttttagtttgatactaagtattaaacatatttctgtattc

SEQ ID NO: 1725 - DNA, 2929 bp, Homo sapiens
agcggccctgcgtgcatccctcagcaaccccaacctctagggaggggagaaggctgaaggtcaagttgatcaccagtggacagtgatttaacaaatcatgcctacatgatagcctccataaaatcccaaaaggacagagttcagagagcttctggttggccggaaaagaggcataaactcggagaacccaagaccccggcctggcgtgcagccccagcagccggaccagccttgggcaacagcgtgcgacgttcagctgtctgtgtctccagtgctcccattccatcgcacctgaatgagggatttgggagagaacacagcctctcgtcggaacgctcctgcacacccttctcgcaacccccaccacctgccccccactcccgaccagagcagccgccgtcctggtgtctcccatcagagggctgagcgtgcgttcgagcttctcctgcatcatgaccaggatgctctgggacaccttgtccacgtctgtgtccaccagtcctgctcagaatctccccaggggcttttccacgatgcccatccaggcgtcaccctcactctaggccaggaggagaaggcatgccctgaggattcagcctcttcttcttcatccctcccagcacccagtgtgttgggtgcacacacaggtgtcgggccccaggctggaggccacgtgccaggctggcaggatttgtccactgtgaagctcgacgcccccgcaggccctgtgctgcccgcccggatccccctgcctcaggatgccctccacaccctccgaattcccagccgctgctctggggcctgcacagagggcttgggcccagcacctggaaactccaaagaggcaaacgggttcatgtccaggttttgtcagatcgcttccgaggctgccctcttcgccgtggctgctgagtgcagagctgggcatctgagtggacagagtggtgctctgcttccttgcatctcctgggccatgcgtggtgacctgtgcccactgcatcgctcctgtgtgccctgtgcatgtgaccgtgtctttcccgtgtattcaatgctgcttcatgtcttccagttccgctttgtggtttgtgagtgaccagtgcatcccgttcctgctgcagcagctgcaatgtgcactgtcctgcaggaagccctcggggtagggcctgggggctgtgggaagctcagcaacaagtgctccattatgccaggaggtctcctcaggatgagccccatgtgcagcctacattgtgctactctctcagatccagtgtgcagctctcctcctgggacttccctccacaacttttctcagttgaatccactatgtgttggatcccaggtcttcctctttattttctccttcattttgctggagcacatcctcaagtaactttctaaaataagtttaaacaggtaaatgttttggaaggttgaatgccacaaaacatctttattctaccttcatacttgactcataatattgctggaaccaatttctaagttcaaaatcatttttcaggagctaggaattgaactcaacctatctaattccaaaattagggttattttatttgacacgatctctggctaggaagcaagcacaacagctccaccgttattggcaagttactgaaagcaaccctttgacagcagccgcagatccacagccatacagaattttcctttttaaacaagttgctcaccattaggatgctctgatttctccatttgtaaaatgaagattctctgtcaacttttggttttagtttttggtctggcatatttggtaagctacaagtgatctttggctgaaaatcagtcatgtgtggcgggtcgtttcaccaggtgccctgcacccagagatctagggccctcaatcgtccttcagttgctgtcagtgcaagggcaatctcacctaaccctccacagggaaaggcaactgccacacgcctctgagagcagggatgcagcaagcgctgactctgggcttacaggggtcccgcccataacagcgcaccacagaccagggctcaccccacaaacatttttctcgctcagtcctggaggcagaaaggccaacatcagggtgccagcatggctggcgtctggtgaggctctcttcctggtttgcagactgttgccatggtattgtgataataacaaaatatagatttggtcttcgtcccagattcccaacaccagagcttctaagagacctggaacctcttgagtgatgagcgtgtcttttgtgtgctgacgagaggacagagctggtgacccttgggcagcttcaggaagggactgctccccagaaagaccaaggcaggacttataggtgaggactttcagatccaccccaacctccaggaagcgggaggggagagaggacaggagctgaagatggaactgattaccgatggccaagaatttaatccattattctgttaatgaaaaaccaaactctgtaaaacattttaaagaggtttattgggacccctaatacggtgaccacagcttggagaaaaaacaaacccaagaagcctagagtgagtgttcctgaggtgcctggattacagtctggcttcatgcactttaggggacaggcgttacaggtggacgagatatatattggctcagctcgaacacgcgggatatctggaagcaagccttatcggttataggtggattcagagagtcttcagtttgcggctggttaaaggagcaaagctttatctaaaacctagagtcagcgatgaggacatctgcacccgaaacatggggcaggggtgactaacagggtgcatgacttgacttaaccctcgtctgacatggtcttgggtcctgtttgtaactggggctcttattgccacggtcagttctgtcagccttctgatctctgttttgacattaatgcctaaattccaaaggg

SEQ ID NO: 1726 - DNA, 4449 bp, Homo sapiens
ctcacctatttcttaatttgcactattaatggccaagttatagtcccttctgcaaatgtcaaattacaacctgaagaagtactttaagttagaaatgaaaagttagaatctgttcaccccatacaattaagaaaccgtgatggctatcgtgacctccctggaaaaaagggggttctgaggttgtaggttcagcctcagagcgagtttacctgggaactgcttttgtccacagaagatcacacaagggcatgaatggtttctcaaagccttccaacaacacgagtcccaaatgctgacgagcaagaaatactgtgcatttttcataaagctaaactaggtccactcaaaggatggccctgttttcagagatggtgcctttcccatattaaagagtataactgtgtcagtggtagatggcgagtttctctttatttatgtccatgcttggaaagaccagaatgttggcacacctctgttggctgcctgccattcccctcccattttgcagaaactttacttgtccatgaaattgaaaagtcagagaactactgccctaaaatcccaaggtcaaaatcaacagaactgtcttttgacatacaccacacttctgactgcaaggttgatcattaaaatgaaatcccactttgacaaactgggtcgggcacccagatttggggcacgtaaagctttagatctaggctcctagcaaaataggctgaacataggaccccaatcccttctagcttgtagtgtttctcctgagaaatctgctgttaatctgataggttttcctttataggttacctggtgcttctgtctcacagactcttaaagttctttctttcattttaactttgtccggaattggtgggttcttggtcttgctgacttcaagaatgaagccacggaccctcatggtgagtattacagctcttaaagatggtgtgtccagagtttgttccttcagatgttcagatgcatccagagtttcttccttctggtgggtttgtggtctcgctgacttcaggagtgaacctgcagaccttcgcagtgagtgttgcagctcttaaaggcagcacagacccaaggagtgagcagcagtaacatttaccacaaagaccaaaagaacaaagcttccacagtgtggaaggtgacccgaacgggttgcactgctggctcaggcagcctgcgtttattcccttatctgaccccacccacatcctgctgattggtccattttacagagagctgattggcccattttacagacagctgattggtctgttttgacagggtgctgattggtgcgtttataaaccttgagctagacacagagtgctgactggtgcatttacaatcctttagctagacacaaaagttctccaagtccctagatttagctagacacagagcactgattgatgtgtttacaaaccttcagctagacacagagtgctgattggtgcatttacaatcctttagctagacacaaaagttctccaagtccccactggattagctagacatagagcactgattggtgcatttacaaaccttgagctagacacagggtgctgattggtgtatttacaaaccttgagctagacacaaagtgctgactggtgtatttataaacctttagctagacataaaagttctccaagtccccacccgactcaggagtccagctggctttgcctactggatcccatgctggggccgtgggtggagctgcctgctagtcccacaccatgcccccgcactcctcagcccttgggcggtcaatgggactggttgcagagcagggggcggcgcccgtccgggaggctctggccatgagggagcagggcagggggagggggggactcaggcatggcgggttgcaagtcccacgccctgctccacggggaggcagctgaggcccagcgagaattcaagcacagcccaggtgagctggcagtgctgggggacccggcacaccctccacagctgctggccggggtgctaagcccctcactgcctggggccggcggcaccagccggccactcctaggtcggggcccgccaagccctcactggcccgcgagctctccctccacacctccccacaagcggagggagcccgctttggccttggccagtccagagaggggcttccacagtgcagcggcgggctgaagggctcctcaagcacagccagagtggatgccgaggccaaggaggcgccgagagcgagtgagggctactagcacattgtcacctctcatttggataacctgatgacaatatgcctagatgaagatctttttgcaatggatttctcaggtgttctttgtgcttctcgtatttggatgtctaggtctctagcaaggccggggaagttttcctcgattattcccccaaatatgttttccaagcttttagatttctcttcttcctcaggaacaccaattattcttaggtttggtcgtttaacacaatcccagacttcttggaggctttgttcatattttcttattcttttttgtctttgttggattgggttaatttgaagaccttgtcttcgagctctgaatttctttattctacttgttgaattctattgctgagactttccagagcattttgcatttctaaaaatgtgtccaaagtttcctgaatttttgattgttttttctttaagctatctatttccctgagtgatttctcccttcacttcttgtatcattttttggatttccttacattgggcttcacctttctctggtccttccctgattaataactaacctcctgaattctttttcaggtaaatcaggtatttcttcttggtttggatccattgccagtgaactagtatgttttttggggggtgttgaagcgtcttgttttgtcatattaccagggtttgttcatttgggtaggctctgtcagagggaaggtctagggctgaaggctgttcagattcttttgtcccgtggggtgttctcttcatgtagtactctgccccttttcctatggatgtggcttcctatgagccaaacttgcggtgattgttgtctctcttctgggtctagccacccagcgaatcttcccagttccaggctggtactggaggttatctgcagagtcctgtgatgtgaaccatctatgggtctctcagccatggctaccagtgcctgttcggtggaggtggcagagggtacaatggagctttggtgggttaatggtctattttttttgctggttggcctcctgccaggaggtggtcctttccagaaagcatcagctgtggtaatatggggaggaaccagcagtgggcggggccctagaactcccaagatttatttgccctttgtcttcctgccagggtgcatagggaaggaccatcaggtgggggtggagctaggcgtgtctgagctcagactctccttgggcgggtcttgctgcggctgctgtagggaatgtgggtgagattcccaggtcactggagtcgtgtacctaggagagttatggctgcctctgctgagtcatgcaggttgtcagggaagtgggggaaagctggcagtcacaggcctcacccagctcccacacaaacccaagggccggtcttactcccaccgtgttcccccacaactgccccgagtctgtttccaggcagagggtgagactggcttgaaaatttgccccaaggctgtgcccctcccagcagcgaaagaaaagggctgtagttcttcccccacctgtgaagtctgcatgctggattcgtgcagttgcccaagttctggccaggaggcttctcaccctgtttaaattgttacgaagttcaactagagaattcttctccctgtggagttttatcccttgctcctctggccaccctcccgatggatccctgtggtgccaggcaggaatgggccttctggggacccagcgagctcccacggcctttctgctgcttcctctacccctgtatttcgctctgctgagtctgacttagctccaggtcctcagccagcagagccacgttccttatgagcaccgtgggtttatttcattttcctacaccactgacccgaatatgcccggcgccatggggactccggctttgggagaagctgacgttgttatccccaggaatagctgtcactccggtccagatggcaggcaagaaggactaccctgcactgctttccttggatgagaatgaactcgaagagcagtttgtgaaaggacacggtccagggggccaggcaaccaacaaaaccagcaactgcgtggtgctgaagcacatcccctcaggcatcgttgtaaagtgccatcagacaagatcagttgatcagaacagaaagctagctcggaaaatcctacaagagaaagtagatgttttctacaatggtgaaaacagtcctgttcacaaagaaaaacgagaagcggcgaagaaaaaac

SEQ ID NO: 1727 - DNA, 3653 bp, Homo sapiens
aggacatgggcagggacaaataagggaataaaagctggccgcagggaagcccgcagctgcaaccggctctggttcttttcggtgctgtggaagctttgttttttcgctcttcacagtaaatcttgctgctgtatattctttgggtccacgccgcctttgagatgtaacactcataacactcaccctgaaagtccgtggcttcattcttgaagtcagcgagaccacgaacccaccggaaggaaccaactctggacacagtggcatgatctcggctctctgcagcctctgcctcttgggttcaaacgattctcctgcctcagcctcccaagtagctgggactacaggtgtgtgctagcacacccggctaagttttgtatgtttagtagaaacgggtttcaccatattggccaggctggtcttgaactccagacctcaactgatccaccggcctcagcaccccaaagtgctgggattacaggcgtgagccaccacaccaggctgagatctgacggttttataaggggcttttcccccttctgcttggcacttctccttagtgccaccatgtgaagaaggatgtgtttgcttttccctccgccatgattgtaagtttcctgaggcctcccagccctgcagaactgcttatccaaatcccttgggctcattgaaggttatggtgggcggggtaaagggggccttccggctactctttccccggctgaagaagaaaaggctaagggaccccatgagaagtatggctacaattcatacctcagtgaaaaaatttcactggaccgttccattccggattatcgtcccaccaagtgtaaggagctcaagtactccaaggacctgccccagatatccatcatattcatcttcgtgaacgaggccctgtcggtgatcctgcggtccgtgcacagtgccgtcaatcacacgcccacacacctgctgaaggaaatcattctggtggatgacaacagcgacgaagaggagctgaaggtccccctagaggagtatgtccacaaacgctaccccgggctggtgaaggtggtaagaaatcagaagagggaaggcctgatccgcgctcgcattgagggctggaaggtggctaccgggcaggtcactggcttctttgatgcccacgtggaattcaccgctggctgggctgagccggttctatcccgcatccaggaaaaccggaagcgtgtgatcctcccctccattgacaacatcaaacaggacaactttgaggtgcagcggtacgagaactcggcccacgggtacagctgggagctgtggtgcatgtacatcagccccccaaaagactggtgggacgccggagacccttctctccccatcaggaccccagccatgataggctgctcgttcgtggtcaacaggaagttcttcggtgaaattggtcttctggatcctggcatggatgtatacggaggagaaaatattgaactgggaatcaaggtatggctctgtgggggcagcatggaggtccttccttgctcacgggtggcccacattgagcggaagaagaagccatataatagcaacattggcttctacaccaagaggaatgctcttcgcgttgctgaggtctggatggacgattacaagtctcatgtgtacatagcgtggaacctgccgctggagaatccgggaattgacatcggtgatgtctccgaaagaagagcattaaggaaaagtttaaagtgtaagaatttccagtggtacctggaccatgtttacccagaaatgagaagatacaataataccgttgcttacggggagcttcgcaacaacaaggcaaaagacgtctgcttggaccaggggccgctggagaaccacacagcaatattgtatccgtgccatggctggggaccacagcttgcccgctacaccaaggaaggcttcctgcacttgggtgccctggggaccaccacactcctccctgacacccgctgcctggtggacaactccaagagtcggctgccccagctcctggactgcgacaaggtcaagagcagcctgtacaagcgctggaacttcatccagaatggagccatcatgaacaagggcacgggacgctgcctggaggtggagaaccggggcctggctggcatcgacctcatcctccgcagctgcacaggtcagaggtggaccattaagaactccatcaagtagagggagggagctggggcactggagcctggcccccaggacatggctgctccccccaacatctggaccagctgccctggcggagagacagcaaggggccggcaggtgctcgatgggccccccagggcttctccagggcagcacagggaccccggatgaagactctgtcccccctcaggcattcagctgcccacaagtttcctgcaccctggaaaagccccccacccttcctctgggaaactgacagctgtcttccacagcctctgatgtggacctggtactgaggagcaagactgtccagttctcctccacatctcccatcccagaatcaggatctgggactggcagggtcccctcctgtgtctcatctcttgcagcagcagctgctgaactccagccatcaacacggtgggaggcagcgggggcttcagccatgtcctagctccccgccctaaaaggaggcagtgaggaccaggcactatttcctccgaggttacttctacccagatgacacctgcctgttcacgccccaaggcagctactgcccctaacccttcccaccagggtagctttgggcactgcagctctggacttttctggcccctcctgagatgacctgatggagctgatgctttctctcctaatccctgggcactaggctcttatcagtgtgcttgggccagctctcctgcctgtgtctagaggaagccagagacagaaataggctaagcctgcagtaggatctcagccacaagggccccgcaggatggagctgggtcaaggaccagggagccctgactcccagaggctgccaccggggagaagcagcggtcctccatccagaacctaagggctgaagcaaaggctgccaggacccttgaagatgcttttggctcacctcatttcaccccacgctctgttggctggcagaggagaaggcagtcgtttccgctctgaagagtattttttttgattgccctctggttagggtgcacatataaatcagagttaatatatgaacgcgtgtgcatgcacaagtgtgtgtgtgcctgcgtgctgtgcgtggcagggtgtgtgtgtgtgtgtctggctgtgcgttccggagtgtgtgacgatgctgacctagctgtgtggccttgggcttgctgcttcattactcacctggatggggacgagggatgagaagggtgtgggtttggccccatgtcactggccggaaggatgtgtctcagccctgccctgtggggtgcccccgatgggaggctgtcccatctcccagtccccatctctttttccccacactgtccctggccaagccctgcccagagctgaaccctgtagctgcccccttgccctgtgtgggattcgcagtgtctcatttggtgacgtcttactggtgatcatctcctcaccccatctccaaccttgtggaataaatacatgttagcacttcccag

SEQ ID NO: 1728 - DNA, 3266 bp, Homo sapiens
ataaaaaaaaagtggctgaaaaactggaaaaggttcaagctgaagaagaaatattagagagaaatctaactaactgtgaaaaagaaaataaaaggctacaagaaaggtgtggtctatataaaagtgaacttgaaattctgaaagagaaattaaggcagttaaaagaagaaaataacaacggaaaagaaaaattaaggatcatggcagtgaaaacttcagaagtcatggcacaactaactgaatctagacaaagtattttgaagctagagagtgagttagagaacaaagacgaaatacttagagacaaattttctttaatgaatgaaaaccgagaattaaaggtccgtgttgcagcacagaatgagcgactagatttatgtcaacaagaaattgaaagttcaagggtagaactaagaagtttggaaaagattatatcccagttgccattaaaaagagaattatttggctttaaatcatatctttctaaataccagatgagtagcttctcaaacaaggaagaccgttgcattggctgctgtgaggcaaataaattggtgatttcggaattgagaattaagcttgcaataaaagaggcagaaattcaaaagcttcatgcaaacctgactgcaaatcagttatctcagagtcttattacttgtaatgacagccaagaaagtagcaaattaagtagtttagaaacagaacctgtaaagctaggtggtcatcaagtagcagaaagcgtaaaagatcaaaatcaacatactatgaacaagcaatatgaaaaagagaggcaaagacttgttactggaatagaagaactacgtactaagctgatacaaatagaagctgaaaattctgatttgaaggttaacatggctcacagaactagtcagtttcagctgattcaagaggagctgctagagaaagcttcaaactccagcaaactggaaagtgaaatgacaaagaaatgttctcaacttttaactcttgagaaacagctggaagaaaagatagttgcttattcctctattgctgcaaaaaatgcagaactagaacaggagcttatggaaaagaatgaaaagataaggagtctagaaaccaatattaatacagagcatgagaaaatttgtttagcctttgaaaaagcaaagaaaattcacttggaacagcataaagaaatggaaaagcagattgaaagacttgaagctcaactagagaaaaaggaccaacaatttaaagaacaagaaaagactatgtccatgttgcaacaagatataatatgcaaacaacatcatcttgaatcactagatagactcttgacggaaagcaaaggggaaatgaaaaaggaaaatatgaagaaagatgaagctttaaaagcattacagaaccaagtatctgaagaaacaatcaaggttaggcaactagattcagcattggaaatttgtaaggaagaacttgtcttgcatttgaatcaattggaaggaaataaggaaaagtttgaaaaacagttaaagaagaaatctgaagaagtatattgtttacagaaagagctaaagataaaaaatcacagtcttcaagagacttctgagcaaaacgttattctacagcatactcttcagcaacagcagcaaatgttacaacaagagacaattagaaatggagagctagaagatactcaaactaaacttgaaaaacaggtgtcaaaactggaacaagaacttcaaaaacaaagggaaagttcagctgaaaagttgagaaaaatggaggagaaatgtgaatcagctgcacatgaagcagatttgaaaaggcaaaaagtgattgagcttactggcactgccaggcaagtaaagattgagatggatcagtacaaagaagagctgtctaaaatggaaaaggaaataatgcacctaaaacgagatggagaaaataaagcaatgcacttctctcaattagatatgatcttagatcagacaaagacagagctagaaaagaaaacaaatgctgtaaaggagttagaaaagttacagcacagtactgaaactgaactaacagaagccttgcaaaaacgggaagtacttgagactgaactacaaaatgctcatggagaattaaaaagtactttaagacaactccaggaattgagagatgtactacagaaggctcaattatcattagaggaaaaatacactactataaaggatctcacagctgaacttagagaatgcaagatggagattgaagacgaaaagcaggagctccttgaaatggatcaggcacttaaagagagaaattgggaactaaagcaaagagcagctcaggttacacatttggatatgactattcgtgagcacagaggagaaatggaacaaaaaataattaaattagaaggtactctggagaaatcagaattggaacttaaagaatgtaacaaacagatagaaagtctgaatgacaaattacaaaatgctaaagaacagcttcgagaaaaagagtttataatgctacaaaatgaacaggagataagtcaactgaaaaaagaaattgaaagaacacaacaaaggatgaaagaaatggagagtgttatgaaagagcaagaacagtacattgccactcagtgcaaggaggccatagatttggggcaaaaattgaggctgacccgggagcaggtgcagaactctcatacagaattggcagaggctcgtcatcagcaagtccaagcacagagagaaatagaaaggctctctagtgaactggaggatatgaagcaactctctaaagagaaagatgctcatggaaaccatttagctgaagaactgggggcttctaaagtacgtgaagctcatttagaagcaagaatgcaagcagaaatcaagaaattgtcagcagaagtagaatctctcaaagaagcttatcatatggagatgatttcacatcaagagaaccatgcaaagtggaagatttctgctgactctcaaaagtcttctgttcagcaactaaacgaacagttagagaaggcaaaattggaattagaagaagctcaggatactgtaagcaatttgcatcaacaagtccaagataggaatgaagtaattgaagctgcaaatgaagcattacttactaaaggagaaaatgtgtaattcaaagaagatactgatgtgttgaaaaaatggaatttttggtactgtgctgtttacttattatatgtagctcatacttcatagaagctgttattttgcttttgaataaattttatatttcaatatttt

SEQ ID NO: 1729 - DNA, 3549 bp, Homo sapiens
attgcaagaatcccttctcatctcatcaccagagaacatcattcaacttctacctgaacacttccagtaataggaattttcaaaatttcaagctaattggtttccttgttagactctaagtgctctaagtattagaagagctctttgttgtatttagccaaaatttctgtccttttaatttccacccattggtccttgttgtgtaacagcaaacacatgcttctcctactgttattaatttaatcatcaaatattcaaatgcctatttatgtgccaggagctcagctaattacacatatttttcatttaatcctcacaacaaggttacttagcccataagaaacttactgctattgaaactcagaacagaatgactaacttcttaaagataccatgaaagtaatagtacactctttagagaatacaaagaagttttttaatgtggcaagtcatatgatgaatttattaagaaaactgaagccgagcttagccaagatttggaaacatcaccaacagccaagcctcagattaaaacgctctcctcagcttctgaaaaacccaagatcaaacccctcacaccactacacagatctgaaacggcaaagaattggaaatcactaacagagtcagaacgttccagaggatccctggagtctattgctgaacatgttgatgcttcactgtctggttctgagagatcagtatcagaaaggtctttatctgcatatgcaaagagagtaaatgaatgggacagtcgaacagaagattttcagaccccatctccagttctcagatcatcaaggaaaatcagagaagaatctggagattctctagaaaatgtacctgcattacatcttctcaaagaattaaatgccactagtagaattcttgatatgtcagatggcaaggttggagaatctagtaaaaaatcagaaataaaagaaatagagtatacaaaattgaagaagagtaagattgaagatgccttttctaaagaaggtaaatctgatgtcttactgaaattagtcctagaacagggagattcatctgaaattctttcaaagaaagatcttcctttagattctgaaaatgttcagaaagacctagttggattagctattgaaaatctccataaaagtgaggaaatgttgaaagagagacagtcagatcaagatatgaatcatagtccaaacatccaatcaggaaaagacattcacgaacaaaagaacacaaaggaaaaagatttgtcttggtcagaacatctttttgctcctaaagagataccatactctgaagattttgaagtgtcttctttcaagaaagaaatttcagctgaattgtacaaagatgattttgaggtgtcatctttgctgtcactcaggaaagactctcagtcttgcagagataagccacagccaatgaggagctctacaagtggagccactagctttggtagtaatgaggaaatcagtgagtgcctaagtgagaaaagcctttctatccatagcaatgttcattctgacaggctgttggaactcaagtcccctactgagctgatgaaaagtgaggagcgcagtgatgtggagcatgaacagcaagttactgaatccccttccttggcttcagttcctactgcagacgagttatttgatttccacattggtgatagggtgttgattggaaatgttcagccaggaattcttcgattcaaaggtgagactagttttgctaaaggattttgggccggagtggagttagataaacctgaaggaaataacaatggaacatatgatggtattgcatattttgagtgcaaagaaaagcatggtatttttgctcctcctcaaaaaatatctcacattccagaaaactttgatgactatgtagacattaatgaagatgaagactgttattcagatgaacgatatcagtgctataatcaagagcaaaatgatacagagggtccaaaagacagagaaaaggatgtcagtgaatatttttatgagaaatccctacctagtgtgaatgatatagaagcctcagttaatagaagtagaagccttaaaatagaaacagacaatgtacaggacatttctggggtacttgaagcccatgttcaccagcagtcttcagtggattcacagatttcttcaaaggaaaacaaagacctcatttctgatgccacagaaaaggtttccatcgctgcagaagatgacactttagacaataccttttccgaagaattggagaagcaacagcagtttacagaagaggaagacaacctatatgctgaagcttcagaaaagctttgtacaccacttctggatcttttaacaagagaaaaaaaccaactggaagcccagctgaagtcatcactaaatgaggaaaaaaagtcaaaacaacaactggaaaaaatcagcttactgacagacagtttactaaaagtctttgtaaaggacacagtcaatcaactacaacaaatcaaaaaaaccagggatgagaaaatccagcttagcaatcaggagcttcttggtgatgaccaaaagaaagtaacaccccaagacctatcccaaaatgttgaggaacagtcgccaagtatttcaggttgcttcttaagttctgaattggaagatgaaaaagaagagatttcctctccagatatgtgtcccagaccggagagcccagtatttggtgccagtgggcaggaagaacttgctaagagacttgctgaacttgaactcagccgggagttcctgagcgcgttaggagatgatcaagactggtttgatgaagactttggtttgagctcttctcacaagatccaaaaaaataaggcagaagaaaccattgtacctctaatggcagaacctaaaagagtaacccaacaaccatgtgaaacattattggcagtcccccatactgcagaagaagtagagattcttgtacataatgcagcagaagaactttggaaatggaaagaattaggccacgatcttcatagcatcagtattcctacaaaactgcttggctgtgccagtaaaggtctagatatagaaagcactagtaaaagggtctacaaacaggcggtttttgatttaacaaaagagatttttgaggaaatatttgctgaggatcccaacttaaatcaacctgtctggatgaagccatgtagaatcaactctagttatttccgacgagtgaaaaatccaaataaccttgatgaaatcaagagcttcatagcaagtgaagtactcaagttgttcagtcttaaaaaggagccaaaccacaaaacagattggcagaaaatgatgaaatttggaagaaagaaaagagaccgagtggatcatatcctggttcaggagctccatgaggaggaggcacagtgggtgaactatgatgaggatgagttgtgtgtgaaaatgcagctagccgacgggatctttgagaccctgatcaaagatactattgatgttctgaatcagatcagtgaaaagcaggggagaatgctacttgtgtgacatcttgcaaataaatcgaacgctgagtgct

SEQ ID NO: 1730 - DNA, 3341 bp, Homo sapiens
agaacagatgcaggacccgggcctggtcgtgtccaccgtgaccttcacacagatcacacctcccttccctgacctaccactccaaaccggggctcccctccacattagcctacctcccagccgtggccctcaccattccctcttcctgcagtgctttgccttgcacatctacctgtctgaagccctcaagacatcctccatggagtccattcccgtctcgccaagctcccagagccttcacctgcccctctctcttcctttgccagaagtcgtgaggatggtggtcaggaagattcagacagatggggtgcaaatcctgagcagccccttcccaattctaggacgctggacgggccagttgccctctagagtttctttatctgtaatggagaaggtcctaataatcacacctccttgaaaggggcgaggcctgagtgcagggatcccgggtgtgaaggacagggctgggggcctggaagtccagccacccccgtgacagggttttcttgaacttctgtaggttggtccaggatttggcactggtgggtgcacatgggcctggactgtccgaaatcgctctgtcctattcaggggacatttggatgcgcagggaccaaagcaggtgacctgctgtaggctgtgcagtgtatgtgcagtacagatggagaggctgctaggacttgggaggtggcacagatgaactcaccagggggtttagggaaggcttcctggaggaagaggagagctgaggggtgagcatttctggggaagcatggacaaaggccaagtagtgggaacgactctggcaggcagcggggaagagaggagaggctggtgttagggtctcagtgatgtggagatgggctcatggactcgttctggacccagtgagagaactgagccttctctctgaggtcatattcctgggaaaagactctgagactcttaagatttgcacacaggaggcctctgcatcatcttcagacaaagaggaaatcctagattttagcagggatgaggggctacttctgcaggctcagagagtttagtgggggtcaaggttcttgagtgcagtgattcagatgttcccatcctacaatgcagggccccacttctttgctgtcagggtcttggcctggccttggtgtaaccagcctgctgggattgaaactataaccccctgaggatctttgactcttgtgataaagtcctgtgcttttctgcctctggttgcagatgagaatcatcttatatcctgccaagggggcttctcatgttcacatttcaccgtaaatttattttgaatcttactcagtcttgccttgtctttctccaaagcattgatagctcccagccacagccatcccattccatagttcttataattacacttccctgagcctgtctgacacctgagatgttgcacccattcacaggtatcccaagctggttcacaatgagcagttacatccatcacatgtcaggattgtcagggctccccctgcctccatggagaggttctcgtcagcacaacaatgcccactttagggttggccttctgggaccacttctggcaccagctccgatagggtccattccctggagtcagactctgagatggaggtcatgtgcaggtgtttactggagagtactcttgggaaccacacctgtgaggggtgaaggacgcagggttgggcagcaggaaaagttgggctgtgaggcattctcaagcctgagccaattccacagacagccctggaggtgggctggcccatcagagctgtccccattgaggccaagggaccaggcctctgtgcacccccactccacctctgtgaccacaggcagtggagccacatctgctcggggtacagcctggggagggactcggatgagaggagtcagcaggcaacacccttggcagtgaggggatgagggcctcgtgccgaaggggtaatctgggtgatgcagcccagcatccacatcatgagacttgtgcagcttggacccaggttctggttatgcctcttgccagcgctgaggcctcgggtgagtcacaagaactctctgaacccagtatcccacctgcaaaatggaccattgccacgcctccacctcctggggttggttaggagtggggtctgaggtgggctctgagacacagtgtgagcttgaagggtgcacctgtgggacagggccaggttccagtcaccatccaggtgggaactagggggcctctcagcaggctccccatcctctcactggacaggcccctggcagccaggtttgaggaaatgggagacatgggctaagtctgtaccatcgataaaacccatggaagttgtccaagcacttggtcaaggggccagggatgaaaatagtggaggggcatgcagagggtatctgctcagcctgctcagtgggttaattagcgtggatggaggtaggctgggttcaggggcctgaacttcaggatgactggtagtgttcaacaaagtgtcaggcagcctggggaggggccttaaaacagcccctgggccgtgcgtgttgactcatgcctgtaatcccagcactttgggaggccgaggtgggcagatcacctgaggtcaggagttcaagaccagcctggccaatatggtgaaacccatctttactaaaaatacaaaaaattagctgggcatggtggcgcacacctgtaatcccaggtactcgggaggctgaggcaggggaatcgcttgaacccagggggcagaggttgcaatgagccgagatcgcgccattgcactccagcctgggcaacaaaagtgaaactccgtctcaaaaaaaaacagcccctggtgggagggataaaagtgatgatggcagaggcagggtggctgtccatggagggggcactaagggccattggggtggatgaggagcccctacagaggtcatggactggtcacttttgaggcctctgtaggcacagtggttttgtacacaccacaaatgagtcctcatttccaagggccccatgtaggcggggagacagctcagaggcaggtcccatgtccaggactggcacagggtcagagcccctgggtcttgttggctaaggacacccgtgacatcggccagtgtggctggtgcggtggggtgtgacgtcggcgggcgtcttgcggatgtgactgtgggcagggaggggaggcctgccgatgggaagggaaggctctgagtcaggcatgcgcgcagcaggcctgccttttacaaacgatcatcagcctcagtgttccaacagcctctttcactctgtaaaagccttttctttggaaaaataaaagaagattggaggcaagtac

SEQ ID NO: 1731 - DNA, 3073 bp, Homo sapiens
tttctaaaaatgatttacagacgtttaagaataagataatgagtgaattgattagcaatggcatccagatatatcagctcccaacagatgaagaaactgctgctcaagcgaactcctcagttagtgggctgttaccctttgctgtggtagggagtacagatgaagtgaaagttggaaaaaggatggtcagaggccgtcactacccttggggagttttgcaagtggaaaatgaaaatcactgtgacttcgttaagctccgagatatgcttctttgtaccaatatggaaaatctaaaagaaaaaacccacactcagcactatgaatgttataggtaccaaaaactgcagaaaatgggctttacagatgtgggtccaaacaaccagccagttagttttcaagaaatctttgaagccaaaagacaagagttctatgatcaatgtcagagggaagaagaagagttgaaacagagatttatgcagcgagtcaaggagaaagaagcaacatttaaagaagctgaaaaagagctgcaggacaagttcgagcatcttaaaatgattcaacaggaggagataaggaagctcgaggaagagaaaaaacaactggaaggagaaatcatagatttttataaaatgaaagctgcctccgaagcactgcagactcagctgagcaccgatacaaagaaagacaaacatcgtaagaaataatagtttctcttactattctgagagccctatcattctacatcgcaacttcctgtgagattgtctttgtagcatttaactctgaagttctcattttaaaaattggcttgcttattgtatattttccccaactaaagtgtgaactcctagcggggtgtggtggctcatgcctgtaatcccggcactttgggaggctgaggcgggtggaccacctgaggtcaggagttcaaaaccagcctgaccaaaatgatgaaaccctgcctctactaaaaatacaaaaattagctgggtttggtggccagtacctgtaatcccagccacttgggaggctgaggcaggagaagcacttgaaccccggaggtggaggttgcagtgagccaagatctcaccattgtactccagcctgggtgacaagagcaaaactccgcctcaaaaaaaaaaaaaaaaaaaaaagtatgaactcccagaaggcagatcctgtgtccatcttttcagattctgtatcttggcatttaggacgtacactaacacaaatatgactttcaatcaatatttgccaaaatgaaaaaacaaaagaaacacgtagcatcatgtaaaaggagctggttaggtggagaaatttatttaccatagtcctgcttttggatccagtagtgacttttaacttttatatccaaatagaagctggaggctttgttggggactcataggcataaaatgttaagttatacaaatctaattaataggcctattttcctttttaagttctactactgataatttcttgacagtttttatgataaaaggttggaatttgataagaactcccatgcttttgtgtcagacttaaaactgatattagaataaagaattcaaaagctagagaaagagttgcatttgaatgataatattatgtgttacagatttggggtatatgccaaagttatcaaagttgtagaaaataaggccaggtgtggtggctcacacctgtaatcccagcactttgggaggccgaggtgggcggatcacttgcggtcaggagcttgagaacagcccggccaacatgacgaaaccccatctctactaataatacaaaagttagccgggtgtggtgttgtgcacctgtagtccctgctactcggaaagctgaggcaggagaatcgcttgtagccaggaggcagaggttgtagtgagcagagattgcgccactgcactccagcctgggtgacagagcgctgagtcaccacacctggtataagccactgtgcctgacccacaatgacttttatacatattgttaaatcatcttacagattttataatttgggggaagaaaaattttactaaatgatcttttaatggaaactctacaagaaccagaatctttgctttgttcacttatgtatccattcctaggcctagaaaaatgtctgacgcatagcagcaattattcattgaataaatggacccagcaatagtacattagctatgccatatgcatacattaaaaatgtagattattgactttcaaaagataattaatgtaacttcttactgcttctgaacatgtttgtgagttatattgctgagggacctttatcttctcattctttcatcttaatccaatgttattaaaactgaaactgaaatcaccaatattattccatatttaaaaataacatctaccttataaaaattatcattgtgctgcatttgagaatagactttttaggtaataatggtataatccatagggtttttgagggcacagaaggattcatgctaacagaacattttattttctattttccaagagctataaaacatgatattatatgatactataaggcatatttttattttccataattttttctaaaaaaaattagtgttggttttccatataacttttaactttataagtaaatatttgtctctttcagctccagtttcatgtgaaatagagtttccagatttatgtagcatggaaagttttaatacgtcagttactgatttttgccagtcattttctcaattatttacttcttttatctttagttgattttttttgtagtgacaagttttgtttctattctcatttccttttgtgtatattctatgtagatttcgtttttggttactatgaaaattacatataacatcctggagttataacattctgatttgaatttatttcaacttaacttcaatcacataccaaaattctactgctatataggtctactctttttaggttattgatgtaacaaattgtatctttattcattgtacaccacctaacagatttataattacattttatgcatttgtcttttaaatcctgtagaaaataaaaagcggagttacaaacc

SEQ ID NO: 1732 - DNA, 5133 bp, Homo sapiens
ttaagttgaaaattccagttgatgaagacgtaactccaatgctattcattgagctggttctctatcttcctagcgtcagtaaattcataaaaattcgtgatttcctttgctttccaagggagaactcaacctttctacttactgttagaccagtacattggtgcctggccccagtgcaagccaatggctctgccatgtctagtgcccccatttcatggagggatgggcagaggcattttcagaaatgctcgtctctgcagcccttcacttggaacaaatgccacaaagatctctggagatgctttgttccaggtttttcaacagtttctgcatttggggatgaggaggaattcctaccaattttggtagttcttgcaagtattggttagggatgctctgtccttaaacccatttatgcctagtttccattatcggaatgctgagcatgtgggagttatttatatcctgctgctcagggtcatcgccaaggtctgattgcagaaattcaaaaagttgcaacctcaggcataaatgagttaagggagatgccagcatatgtggctgataggttcatcaaatgtggccatccagattgctgagtttaaaacatgctgtactttaatgatgtggtatgggagaaaaagaaggcaaatatcccagtaaggttttgatactgattacatgttgaaatggtaatatttgggggcatgttggagttaaatataatagattgctaatgaattttaccagtttctttcttcttaatgtggatcccagaaaattgaaactagcccataaggctcactctctatctctattggacagtgccggtttataaggagaagggctgtcttttcttgtatgataaatgtttccagagaaaactttgcaagaatagttactaactttttcctttgtttgcggaacacagacaacaataatttgggatgcccacacaggagaagccaaacagcagtttccttttcattcaggtgagttttttgttgttgttgttgttgtttgtttttttgtaattcaaaaataataattcaggtcgagcccagtggcttacgcctgtaatcccagcactttgggaagccgaagcaggtggattgcatgaggtcaggagttcaagaccagcctgggcaacatggcaaaacccatcactacaaaaaatacgataactagccaggcgtggtggtccacacctgtagtcccagccacttgggaggttgaggtaggaggatggcttgagcccaggagatggagtttgcggtgagccaagattgcgctactgcactccatcctgggcgacagagccagaccgtgtctcaaaaactactaataataataatccaaaattaggctgggcactgtggctgatgcctgtaattccagcacttcggaaggctgagacaggagggtcacttgagcccaggggttctagaccagcctggacaacaaagcaagaccccgtttctacaaaaaatataaaacattagtcgggtgttgtggtacacacctctagttttagctacccgggaagctgaggcaggaggattgcttgagccaggaaatcaaggttgcagtgagctgtgattgcaccactgtattccagcctaggtgacagaatgagatcctgagataccccttaaagtaactgaatgcgccgagtatggagcccaggaggcctcattggtcagaaggagacccattttgtggcaagcattgattgctcttaaggtttgcaagatagagatgacctcggcacccacctgctcagagctctgaaacacagcagtgagccagccacagaagcagtgcgggctcctttctcttgctgttctaaagggatgctgttttgggggctccctgaaaccactcccaggattggtggtttgctgcgaggacccccaggactcaacatactcacagctaagatttctaacagcacaagaatttagtgcaacattagcaaagggaaacggtgcacacggccaaatccggagcttcgaaggctcctctcccagtggactctcacaggccatgctgaattcttccaggaataagttgtaactatgcctgtgaagtgttttataccagggaagctccatagagtctcagtgcccagagtttttattgggggttggccgtgtaagcacccagtgcctagtacaagccaaaactgcagacccccagaaggaaagcaggggcacagcataaacacactgtttgcacaaacaagtgttagcagagtgagccgcttgcgtctgttaggggagggtgggaactctccggaaatctaaaatctcagtcgctagccaagggccggccttgcaagcaagcctctgtagggagatcagcctcgggcctgtggtgttagcaccttcctacacagatgtgtggccgctgctctggagccaactacatccctttgtgcactggagccaggccaggccacatgcgttagcccagggctctggagtctgtagagattccgattttccagattcccacctgattcttcgtgggtcgttttgggtttttttgtttgtttgtttggagacagagttttactctgtcacccaggttggagtgcagtggtgcgatctcagctcattgcagcctccgcctcccatgctcaagcgattctcctgcctcggcctcccgagtagctgggattacaggcatgcaccaccaagcccagctaatttttgtatttttagtagaaacggggtttcaccatgttggccaggctggtctcaaactcctgacctcaagtgatctgcccacctcggtcttccaaaatgattcttcattttctttcccacctccctcctctgtgtaactcagtcctgatgttagacgtggcctcttaaaacaaagacagatggccacccgcagagctaatagactattggaagtctttagactggcttaaagtggacagaagtgggtaggtgccacttcccttaagggcaaatgtctgatccgtcttgaaggaatccctaaatatgtgggacgaaagttaactattctatcagctgtccctggggcattgtccaggaggagatctgagtgtctttcttgtcatgcagcttggggtgcttaaatgatgttctgaatgggagggctaactgcaacaaccatccaaggcagaacagccatcggcgcctggggagggctccaggcaggggacatgggccctgcaggaaacaagaccatgaaccgaaggtcccgtcgaggcacgattgtgttagatgcataggcacccacgtctgttatattccatgcagtacttcagcagggactcctcatacaggcagctcagagagtgagggagactcagggaggacgctgtttctgctctgctgccctggagagggagagccactcctgcacagcttgggacccacaccaaacacacctctcagggttgccggtgaaatttgttactggtgttgctttaattgacactgttgatgaaggtgctgagcatacgagagacaaaaggctcccaatgcaggtagcacgtgtactaggtcctccagaaagtgttcttcaccccaaagggaaaccctgtacccattccatctttccctggcaactccacctacagcctgtgatctgtgtgtcatctccatgccagacacttgctactctgtgctctagactgcaaatcaaagcaggtggctagtgagaatagccttcctaatggagttccgtcacgtttggcttaagtgccaaaacctacctttgtaggcaggaaggatgctatgacaggttcacagccctagacacgcagaccccggggggtgaggcagggatgtctaatgcagaaagctctggcttctgtttttcagagaaaaatatgcccgaggtaaacatcaataaggttcctctaacacttgtgtcttaagaattcatctgtaaactatttcagcagaaaataatctttcccaaagtgtccccaggccctatggaagggtttcctacccagctgacccaggaagaccacaaaccacattgttctgaattgcgtgagcttctcacctgtgatctggctggccatgaggtagacccaattcccgtcggcaggtcagacatatctaggcgttacttgctctctttttggtgtcaatcagtgtgttaaagaacgttcaaaatgaagagaaagaagctcgctcttccaggtgaaacgcagctgggaagagctgtgaggagcgcctttctgtggctgtggcaggtttggtgtttaatggggcgataggagacattgccttgccccactagcttttccccagtaacacctcgtgggggcgcccttggtcaccgtcggcaggaagccttagctcagagcctcgtggtggagtgaaactcggccgcagaaaggaatgaactattgatgcacgacagccaggagagatctcaagggcattttgccgagtgacaaaagccagtctcagaaggttgcatgctctgtgctttcattgatgtaacgttctcatgatgctaaaatgctagaaacctgggacccgtcagcgctgtgggagttgagggagcatgtgaggaggttgtgtgccgatacagtagctgagggagatcttagtggcgacggaacacttctgggtctcggttgcagcgatacacatctacccatgtgataaaatgacagcactctacaggcaaattgcaccagtgtcagcttgccagcgtcgatacaacgctacggctacgcgaaatgtaaccctcaggagaacctgggtgaaggggacacaggacctctctgtgttacctttgcagcttcctgtaaatctctaagtatttcaaaaggaaactgactggctgggcccagaagaatgagggctattgaaccaaactggcctatgcatgggagggagggcacagaggcccccagtgtagctcagccctcttaccggccattcacccacatggttccaagcattgtggctgcaggagctggctcagagtggggctaaccacctgagcacgggggagcctctctttagatcaggaatgtccagtcttttggtttccctgggccacattgaaagaagaattgtcttgggccacacataaaatacgctaacactaacaatagcttgatgagct

SEQ ID NO: 1733 - DNA, 4291 bp, Homo sapiens
atgaaaagcggcatgattaacctaacatcagggttggctacaggtgtgacaaataaaaaggaagtggatgaagataaagtgggaatttgtactcaaaaacatagtgagaatgtatcaaaagttacttcaactaccactgtgaaaagtaaagatactcaggagccaaatttgagtgaaacatttaataataatgaaattgagaagaaaagaaatttaattccaacagataaaaaagggaaagatgatgagataaacacacatttttcattaataattgatgatacagaatatgagaaggaagtacttggatcagattctgaaataggctataaaaagaagattgacaatgcaagggaaagctcatttaaaaaagatgacaagctctttcagttatcctccttgaagtccaagagaaatctagggactacaacagatactttggaaataagaactcgaacatcaagcaatgaggggagaagagactctccaacacaaacgtgtagggatgaggaacaccactcagattatgaacatgttcaaaatgtcattgaaaatatttttgaagatgttttagaactatcttcttctccagaaccagcatattattcgaaactcagttatgaccaaagccccccaggtgataatgtattaaatgtaattcaagagattagcagggattcggcacagtctgttacaacaaaaaaagtatcctcctcaactaacaaaaatatctctgccaaagaaaaagaagaggaagagagagaaaaagagaaagtaagagaggagattaaaagtgaacccagtaaaccagatgatcctcaaaaccaacaagaaagtaaacctggaatttttcccgctaagtttttagaagatgttattactgagatggttaaacaattgatcttttcttctataccagaaacacaaatacaagatagatgtcaaaatgttagtgataagcaaaatcaagccaaactctatgacactgctatgaaactcatcaattcactgttaaaggagttctcagatgctcaaattaaggttttcaggccagataagggaaatcagttccctgggggtaaagtgtcttcagttcctaaagtacctccaaggtataaagagccaactacagatgaagcaccatccagcattaagataaaatctgcagataaaatgccacctatgcataaaatgatgagaaaaccttcttcagataagataccatcaattgacaaaacattggtcaataaagttgttcactcctctgtttgtaatattttaaatgactatggatctcaagactctatttggaagaatataaacagtaatggagaaaatttagcaagaagactaactagtgcagtgataaatgaaattttccaacatcaggttaacttgatattttgtgatgaggtttcagtttcagcatgtttgcctctggaatctaaggatgttgttaaaaaggtccaaaagttggcccaaacagccagcaaagaatgtcaaacttcatcaccatatacaataatattacctcataaatttttggagaatgtgatttctgctcttttctccaaaattttctcaacaatatccagcacaaaaacaaaagaacctgaggacaatttgtccacagaactgaatttccttcaaatgaagttagtaagtgcagttgcaacagagatctcccaagataaatatatgactatacagtatgtagaaaccttacaatctgatgatgatgaaattattcaattagtggttcagtctgtttataataatctcttgccacagtttggatcacaagagattatacaaaattgtgtaaccagtggatgcaaaatcctttcagaaaacatagttgacttggttctacgagaagtggctagcaatcagctgcagagctatttttgtggagagctaactccacatcagtgtgtggaagttgaaaacatcgttgaaaagatccttaaagatgttttccaaactactgatgtgccccaacctaaaccttcacatgctgataagctgtcttataacataatagaagaaattgctgtgaaatttttatcaaagcttttatctatatttccaaaagtacataaagaaagaacaaaatctctagagactgatatgcaaaaaataacttcaaaagtactaaattcagtccaagaatttatctccaaaagtaagattaaacttgtaccacccaccaaggaatcacctactgtgcctgtagctgataatgcaactattgaaaacatagttaattctatttataccagtgttttaaagcactctggctcttatacttctgtatttaaagatttaatgggtaaaagcaatgtcctctctgatacaataggctttttaatggtgaatgcaatttcgaattctgaatttcaacctcaagtagaggaagaagtatcaaattcagaattagttctggaagctgtcaaaattatggaaaaagtgatcaaaattattgatgaacttaagtctaaggaaaagtcttcatccagaaaaggtttgacattagatgccaaacttttagaagaggtgttggccttgttcttggctaaactaataaggttgccaagttcctcaagcaaagatgaaaaaaacttatcaaagactgagttaaataaaattgcatctcaactgtcaaaattggtaacagctgaaatttccagaagtagcattagtctaatagcttctgatcctgaagagcactgtttaaatccagaaaatacagaaaggatttatcaggttgtcgattccgtttatagtaacatactgcaacaatcaggaaccaacaaagaattttattatgatataaaagatacaaatacagcctttcctaaaaaagtggctagtttaattattgatggagtttcaagttttccattagatacaattaactcaactttcaaatgctgatctctctggagagctagacgttaatagaattgttcaaaaggcccaagaacatgcttttaatgtgattcctgaattagagcaagaaaagttagatcaaaatttatctgaagaggaatctccaattaaaatagttccacatgttggaaaaaaaccagtcaaaatagatccaaaaattatttcagaacacttagcagttatttctataaaaactcaacctcttgagaaacttaagcaggagtgtttgaaaagaactggacatagcatagcagaactgagaagagcatcaataagtgggagaaattactccttaggatcacctgatttagaaaagagaaagacagaaagacgtacctcattggataagactggaagactggatgtaaaacccctagaggccgttgctagaaattcatttcagaatataagaaagcctgatattacaaaggtggagctcttaaaagatgttcaaagtaaaaatgatcttattgttcgattagtagctcatgatattgatcaagtgtatttggaaaattacataaaagaggaacgagattctgatgaagatgaagttgttttaacacagacttttgcaaaagaagaaggcatcaaagtatttgaagatcaagtgaaagaagtcaagaagccaatacaaagcaaactttctcctaagtcaacactaagcacgagcagcctgaaaaaatttttgtcactaagtaaatgttgtcagaccacagccagtgcaaatattgaaagtactgaagcaatctcaaatcaggtaatagaatccaaggagacacatgttaaaagagctgttgctgagcttgacatggccacaccaaagacgatgcctgaaacagcctcttcatcttgggaggaaaagccccagtgtaagaaagaagaaaagaatcttgttactgaaccaacacattacttcatacacagaattatgagttcatcttcatacaaccaagaagatctcatttcatctactggtgaggctgaagattgtcactcagacccaagtgctaaaatattagaagaaagttctcaggaacaaaagccagagcatggaaacagtgttaagtttatcaccatctttgaaagatccaaggatgttcttggcagtgcaaatccctcaaaggaagtcatttcagaaactcccaagcccgatgtctccaaacaaggatctaaaatgctgacaaaaatgtcttcagctttgtcaaaggtgttttctcaatgtaacaccaatatttccagatcttcctcaccagctcaccaggatgaacactgaagcttttgtacctgatataagtatgcttacttcttttagaaaataaaatggtttttaaagcat

SEQ ID NO: 1734 - DNA, 3943 bp, Homo sapiens
ccggtgcaggtccttggtatgctgagcgccgttcccctgggcccactgttgtttctctatactttgtctctgtgtcttatttcttttctcagtctctcgtcccacccaactagaaatacccacagttgtggaggggaaagtcaccccttcacttttcttttcttttctttctttttccttccttcctttttctttcttttctttcttttttttttttttttgacggagtcttgttctgtcacccaggctggagtgcaatggcgctatctcggctcactgcaacctccacctcccaggttcaagcaatcctcttgcctcagcctcccgagtatctggaattacaggcgtgtgccaccacgcccagctagtttttgtattattagtagagatggggtttcaccatgttggccaggctggtctcgaactcctgatctcaggtgatccacctgcctcagcctcccaaagtgctgggattacaggcctgagccaccgtgcccggcccagaacaattttcatataatctattgacttgcctgccctaagacaaaggccgttgttttgaggtagccttggtttactttccaagttccatctgcttttccactggagttcagaggtctttcatggccagcccattctgccatccatgacctttgatggagcctgttctcagctcaaggcaatctccagaaactgaagaacatgacctttctaaatgcaatgtccttagcgtgaatgtctccacaaaacttttgcactgacctgacaaatgcatcctttcaagtgcagtagaagtccatgcatcctggcaaaactgaagtgtaagcataccccatgaagtatgaatgtaccctacaaagtgcaagcatatcccgcaaatgggtaccttgtggagccagatgaacaggcttcctgaagaaaattaagtctgtgagaccttagccaaagcatgggaattcaagaggacttactgaaggccacccccctactcacctcccatcctgaagacaactgaggccaagaagacaactgagtccaaggggctcttgcaggccctaatgtattggtttaggatgatgcagggaggagagttgtagtttgcttcaaatcccacttctgatgccaagaatgtgaatgaaagttctctgaaaaagggagtgccagggtgggcccatgggcctcctctggcagtgctgggcttgagggcctgagcaaggcactgccctcacggagcggccaggctctccttagggatggctttgggcggaagctcttgagaactcctctcaatctggcttggggcttgccctcactctcctcatctcctgcctctgtcccagtcacagccctgtgcctgccacggagaagacggagctgatcctagaaggccaagctggctgagctggccagatggtacgactacatcactacctgggtgaaggctgtgacagagcagggcaccaagctgttcaatgaggagctcaacctgctttcagtggcctacacatacatggtcaggggatcacaggtctgcctagagggtcaccttgagcattgagcagaaaactgttacctccgacaagaagttgcagctgattaagggctatcaggagaaagtagagtctgagctgagatccatctgtaccacagtcctggaattgctggatgagtatttaatagctgatgcaactaatccagagagtaaggtcttctaattgaaaatgaagggagattacttcctgtaccttgccgaagttgcaagtggtgatgattgaaaacaagatagataattcccaaggagcttaccaagaagtatttgatataagcaagaaagagagtcaattcacccacccaatctacctggggcttgctcttaacttttctgtattttactgtgagacccttaataatgcagagctcacctgcatgctgaataaaacagatacactgcagaacttgatacacggaatgaagattcatacaaagacagcacccttatctgcttagagacaacctaacactatggatatcagacagtgcaaggaagaatgtgatgcagtagaaggggctgaaaactaaatgcataaagagtgtcatccttcctcccttcaagaaacctttttatgcatctcctttccttattccacttgaatttcctatagcaaagaaacccattcatgtgcttggaattaactgtttatagctttttcacactgcatctttgggaaaatgccattccctgatttgtgtttgtcttggccttcctgatgtgcagttactgctgtagaaaagcattcatagcttaatttcatataaacttaagtaccttccaaatgcttatgtagaggactaaaaaatgtatctggtatttaagtaatctgaaccagttttgcaaatgactgtgttttgtattactgtggagatataaaaatgtagttaattataatttaaagaatgttctgccaagaccagctcagttgtggagaccctaacccagaggtgctagaggaattaaagacacgcacacagaaatatagtgtgtggagtgggaaatcaggggactgacagccttcagagctgagagccatgaacagagatttacccacatatttattgacagcaagccagtgataaacattgtttctatagaatatagattaactaaaagtattccttatgggaaacaaaagggatgggctgaaacaaagggatgggctctggcaagttatctgcagcagaaacatgtccttaaggcacagatttctcatgctattgtttgtggttcaggaatgcctttaagcagttttctgccctgagtgggccaggtgttcctcgccctcattctggtaaacccacggccttcagcgtgggcattatggccatcacgaacatgtcacagtgctgcagagattttgtttatggccagttttggggccagtttatggccagatttgggggcctatccccagcagtgttcgatgtaacttcttaatttctacattccctcccttactctttgggggtttcttctcaataatcaacttttccatgctcttaatgtattctttttagtagaaatccagaaatatcagattgaatggaaaagtgcttgccatttctgggttgaggtgtcacaaattgaaatgtctcctatatcacatattatggaggtcatgtgaatctgtggaaagagtaaataagagtttccttattcactcttcatatgctgctgtttaagttggcagctttccttcccaataaaaattcatttacacttcctgcctttatagttctggtatctactttactatgtaatagaagtagcatgttgctgccagaatactagcatttcttttggcaaactgaagtacatgtcacttcttaacacactagaaaggggaaacaaagcacacaagtccaagtctaaaactttagtacatttctatgcagatttgtgtatatgtaaggaggtgtcctgtttgtctagtgattgttatttagttggacaactattgtgtgttgctcgtcattgactgaagtcccaaaaaagtcttgtgaaaatgttatgccctatgtaacagcagaataacataaaataaaattacattaaaagtgatggcagaaccacaattactattgcaccaacctaatataaaccatttactatggctttgtaacaattgcatattcctatattaagggacaggtgaatttactactttctaaagtttattgataattcccttttgtgtaaaatgtggtagtgatacctatatttctgcatcatgatatacttgtctagggatgcctggacatgtataagattggactgcatttcttagaatgttttactatagatcagtctcctgggctatctcttcctcagacataaatgatatctggttaagtgttatgtgaaataaagtgaacattttaaaacttt

SEQ ID NO: 1735 - DNA, 3597 bp, Homo sapiens
agagggaataaactccatctgtgcaatctggaacctgcagcacagagctaaccagctgagctgtgtattagagtcagtgaggctcccatcaatggaggtatgtaagcagaagcagatggcatcttgtcaaggaacgtgctcccagaaagggagctgggtcagattcccctccaaaccccagagttctgagatggcactcctctcattcagccatgaccatctagtggcatggaagagtccaagtggcagggaaaataatgcccccacgaaactcctgcttgatttgcgaatgtgggaaattctggcagacagagagatggctgttgcactagacttgccctgggtaggtcacttactcccccgggcctcagttttatttccaggaaaatggaaatgaaggatgaagtcttcctgagggcctcttgctggtgatgttatctgctacacgcccaagaccaagaacagtccctggcccacggtggtggcatgcagtcattgtttgaagagtccctcaacaaaggaagagaagagctctgcacatctgggcgtgcctggtgtgggaccttctccttttcctccccactctgccatctcacccttcacccccagccaatgcagagagagggccaggggtcagcagactcccatccacagaacggattttggtatgaccagggaactaggaatttctttgtacatttttaaagcatggcatattgggttaaatggtgctccacacatgcaaatttatgctcacctcgaacctcagaatgtgaccttatttgggaatagagactttgcagatataattagtgaagacaaggtcatcctggaataggctagaccctaaatccaatggctgtgttcttataagaagcaggaaacttggacaaacacacacagagaagtccatacaaaaaggcagctgcagagatggagtggggtggccaagaagaagccaaggactgccagtaaccatcagaggctggaagaggcaaggaaggaaactgccctgggcttggggcctgcccacaccttgatgtcagactctggtccagagcagtgtgagaatacgtttctgttactttaagccatccaatctgtggtccttcattatggcagccatgggacacagatgcaggttgtatattaaagcaataccaaccaaaatgaaacaaaaccaagtagaacatgcaacagagacagcgtatgcccctaaagcttaaagtatgtaccatctagccctttacagaaaacgtttgccaacccctgttcttgagtagaatccaaactccctatcactatcccagcgttcacagcctactgtctccccagcctcatcccaggccatccctcctccttgtagccaccactcttgccatgctcagtctcactcactgaccatccaccttttttttgcctcagggcctttgtgtacgcagctgatcacagctcatgcaccacttcctcagggcagcctctttcccatctccccacagcctgggtcgagcacattgtgacactacttcagagaaccctgacctcccttttcccaacacaatcatggggtaattaagtacaattactagctagtgataatgaattataatcaatcgagaagttcaattaactgggtgatcattcacttactgcctgcccccatactaagttgtcaactccatggggtaggggctaagtcaccagtaaccaccacagtgctttgtacagatcaaatacgtcctctagaaatatttgtgggacggatgggtagatggataaatgaatacatggattaagaggtagatggatagatggatggataggtagatggatgcatgagtagattgatggataggtagatggatgaatggatgagtagactgatggatgggtagatggatggatggaaggatggatgggcagatgaatggatgtatagatgggtagacagatgggcaaatggacagatggacagatggattgagggagagatgggtggatgagtaggtggatggatggatagatggatgggtagatgaatggatggtagataaatggatgagtaggtggatggatagatggatgaatgggtagacggatggatgggtagatgaatgggtagatagacggatgggtagatagatggatagatggatgaatggatagatggattggtaggtagatgaataggtagatgcatgaatggatacatggatggatgggtagatggatggatagatggatgaatgggtagatggatggacaggtagatggatgaatggatagatggattggtaggtggatgaataggtagatggatgaatggatacatggatggatgggtagatggatgtatggatgaacaaacataatttcaggagctccccaggctagtctggacttccagcccctcccctccatgtctgtagttagtcctaggttcctacctggcctggagtcccacctagacctcagatccaatagataaaagtgattctcttgttcccatgtctcagtagccctgtatgacaaattaaaaactgagtgggtttgaataaagggccacgaagcccccatttgggcccagatctatactgagtaggactctagacacccagggatgaatgacacccagcttctgaccttgatctcctaaagctatggagaggaggtgacatcgaaagacacagcatcagagggcctggggtccagtcaagatgccccaactgccacccccatacattaactgcagtccccaaatatggcggcaagctccatcttgcttctgcagccatggacaagagtgttccatcccatctcgcttggcaaacctgatttccctacctcccaaggctacatttgcacccacaggaacctctgtcgatagggaaacaagtgtctaactgtcagagattatcaacatgctaatggagacctcattacccagccttacaagaatcaatatccaaagaagaatggaatgtcgggcaaagctcccctcccctctccagcaggcttgaggatgggtaagaagacaacagtgtgagggtttcaggtgctgagtggtcctgacatctgagccccatgtacccagagccgtccctatttctttactgtccttcaaagatgtcagtgcaggggccaggggtggaagagcctgtggtttgctgggggcgcatcttgggctggcacagtctcagacaccctacgagcacttctcctatgctcttccacatggttcccgggagcagcactgtcacctccaccttagagatggccactgtcacctgcccaagccatcgagagacaaagcacagcccctgtctacctgacagcggggtctgtcttctttctttctaccaccacctgcctccagtagagggattcctcagaaatgaccttccaggtgaaaatccattcatccctcgccctccatcccaccccataatacagtgtattctctgaggctctttttaggagctgagttaataaagactgtcaaatcccgagagtctgccagaagcttcctggccccagccacctcggataggaatgagtgagacagaacaaacagatcaataaaggtaattacaagcc

SEQ ID NO: 1736 - DNA, 3113 bp, Homo sapiens
tcacttaataatatatctactcagagcaagtggctgaaatatcaaaacacatcccaatgcaacgtggctactccaaacagagttgataagagaataactgatggcttctttgctgaggctgtttctgggatgcattttagagacacaagtgaaagacagagtgatgctgtcaatgaaagctctttagactctgtgcatttgcaaatgataaaaggcatgctctatcaacagcggcaggattttagcagtcaagattcggtttccagaaagaaagtactttctctgaatttaaagcagacttctaagacagaggaaattaaaaatgtattaggagggtctacctgctacaactacagtgtaaaggatttacaggagataagtggctctgagctgtgctttccaagtgggcagaaaataaaatctgcttatcttccccaaaggcaaattcacataccagctgtttttcagtctcctgctcattataagcagactttcacatcttgcctcatagaacatctaaatatattgctgtttgggttagcacaaaacctgcagaaagctctttcaaaagttgacatatcattttatacatcattgaagggagagaaactgaaaaacgcagaaaataatgtaccatcctgccatcatagtcaacctgcaaaacttgtcatggttaaaaaggaaggtccaaataagggtcgtctcttttatacatgtgatggacccaaagctgatcgatgtaaattctttaaatggcttgaggacgtgactccaggatattcaacacaggaaggagctcgacctggcatggttttaagtgatattaagagtattggcttatatttaagaagtcaaaagataccactttatgaggaatgccagcttttggtgagaaaaggatttgattttcagagaaaacagtatggcaaactaaagaagtttactactgtaaatcctgagttttataatgaaccaaaaaccaaactttatcttaagctaagtcggaaggaaagatcttcagcttatagcaaaaatgatctttgggtggtttcaaaaaccctagactttgagctggatacttttatcgcatgtagtgctttctttggaccatcatctatcaatgagatagaaatactgcctttgaaaggctatttcccttctaattggcccactaacatggttgtccatgcgttattggtttgtaatgctagcacagaactgactactttgaaaaacattcaggactactttaatccagctactctacctctaacacagtacctgttaacaacgtcttcgccaactatagttagtaacaaaagagtcagtaagagaaaatttatcccaccagccttcacaaatgtcagtacaaaatttgaactactcagcctaggagcaacattgaagttagctagtgagttgattcaggtacacaagttaaacaaggatcaagctacagctctaattcaaatagctcaaatgatggcatcacatgaaagcattgaagaagtgaaggaactgcaaactcataccttccctatcacaatcatacatggtgtgtttggagcaggaaagagttacttgctggcagtggtgattttgttctttgtacagctgtttgaaaagagtgaagctcccaccattggaaatgcaaggccgtggaaacttctgatttcttcttctactaatgtggctgttgacagagtacttcttgggcttctcagtcttggatttgaaaactttatcagagttgggagtgttaggaagattgccaaaccaattttaccttatagcttgcatgctggctcagaaaatgaaagtgaacagttaaaagaactacatgcactaatgaaagaagacctgactcctacggaaagagtctatgtgagaaaaagcattgagcagcataaactggggaccaatagaaccctgctgaagcaggttcgagtagttggagttacctgtgcagcctgcccattcccatgcatgaatgatcttaaatttcctgtagttgtgctggatgagtgtagtcagataactgaaccggcctctctccttcccattgcaaggtttgagtgtgaaaagctgattcttgttggggatcccaaacagctacctcctactattcagggttctgatgcagctcatgaaaatggattggaacaaactctttttgatcgactttgcttaatgggtcacaagccaattctattgagaactcaataccgttgtcatcctgcaatcagtgctattgctaatgatctgttttacaaaggagccctcatgaatggtgtaacagaaatagagcggagccctttattggaatggctaccaaccctgtgtttttataatgttaaaggactagaacagatagaaagagataacagctttcataatgtggcagaagctacgtttacactcaagctgattcaatcactgattgcaagtggaatagcaggctctatgattggtgtgataacattatacaaatcccagatgtacaagctttgtcatttactcagtgctgtggactttcaccatcctgatattaaaactgtgcaggtgtccacagtagatgcttttcagggagctgaaaaggagatcattattctgtcctgtgtaaggacaagacaagtaggattcattgattcagaaaaaagaatgaatgttgcattgactagaggaaagaggcatttgttgattgtgggaaatttagcctgtttgaggaaaaatcaactttggggacgagtgatccaacactgcgaaggaagggaagatggattgcaacatgcaaaccagtatgaaccacagctgaaccatctccttaaagattattttgaaaaacaagtggaagaaaaacagaagaaaaagagtgaaaaagagaaatctaaagataaatctcattcataaaaagacatggtgtaaatattttgtatttatgtaaattcagactcattttacatgatatattttttatatttttattactctaaaccctcttattaaaaatatgatatttaaataacatagtaaacacatgtaaaaattttgttcttcaaaaaagtgtacaaaaggtagtataaaatcctactaataaaaataagcttttttct

SEQ ID NO: 1737 - DNA, 5058 bp, Homo sapiens
agacagctagccaagattctaaagaaacccagacaaggcagggtggagaccgagaggagaaatttattccagaaattaactgttagcagtagtgtttcttaatacataagctatatcatactcctcaagtagattctttgcttaaaactttcactgtaaataattttatagcaaccatgtgaataacttaagaataatagaatcagtcccatttgtaggcactgtagaccatctccattccctacatgtcagagactctgggggatgaattggagatattaagaggtaaaatgatgcagagaagaccaaggtcagcagaagtcaaatacttctatttctttaaaattttgcttaggctacgcctggctattttgaagtatttatttattgatgataaaggaatactttttgtaagtagtagaaaacacctaccaactttgcctactctcttgagtagactaaaactgtttttggtaaaggatcctcttttagatttcaaaggacagatcttcacagaagctaatttttccagggaatgtttctctcttcaagaaactttggaagcttttgtgaaagaagatttttgtatggataaagtgaacttttgtcaagagaaactagaagatacaatatgtttaaatgagccgtcaagttttcttattgagtatgaattcttaatacctccaagcctcaaaccagaaattgatattccatcactctcagaactgaaggagttattaaacccagtgccagaaataataaactatgtagatgaaaaggaaaagctttttgaaagagatcttactaacaagcatggaattgaggatatcggggatataaaattcagctccacagagattttgaccattcaaagccagagtgaaccagaagagtgcagtaaaccaggagagttagaaatgccactaactcctctattcctaacatgccaacattcttcagtgaattcattacgtacagaacttcagacatttccattatctccggtttgtaaaattaatttgcttactgctgaagaatcagctaatgaatactacatgatgtggcaattagaaagatgtagaagccctttgaacccatttttgcttacagtgccaagaattcaagagccccacagccaatattcagttacagatttgaaaaagatattttctgttaaagaagaaagccttgtgattaatctggaaaaggcagagtggtggaaacaagcaggactaaatctgaaaatgatggaaacattggaacatctgaatacatatttatgtcatgataatttgtcttctaatgacactaaaattgagatatttgcctacgaaagtgcttcaattagaatcatgtctagaacataaaagtcgttcttcacctattgcacttattgatgaaaaatctacaaatgctcatttatcacttccacaaaagagtccatctctggcaaaagaagtaccagatctatgtttttctgatgactatttctctgataaaggagcagcaaaagaagaaaaaccaaagaatgaccaagaaccagtaaacagaataatccaaaagaaagaaaataacgatcactttgaacttgactgcacaggaccatctattaaatcaccttcctcttcaataattaaaaaagcatcttttgaacatggcaaaaaacaagagaatgatttggaccttttgagcgactttattatgctgcgaaataaatataagacttgcacctcaaagactgaagtcacaaacagtgatgaaaaacatgataaagaagcatgttctttgacacttcaagaagaaagtcctattgttcatattaataaaaccctggaggaaataaatcaggaaaggggaacagatagtgtcattgaaattcaagcgtcagatagccagtgccaagcattttgcctcctcgaagcagcagcttctcctatcttaaaaaaccttgtatccttgtgtaccctccctactgctaattggaaatttgccactgttatttttgaccaaacaaggtttctcttaaaggaacaagaaaaagtagtaagtgatgctgttcgccaaggtacaattgatgaaagagaaatgactttcaagcatgccgctctcttacatcttctggtaacaattagagatgtccttttaacatgcagcttggacacagcattgggatatttgtcgaaggcaaaagatatctacaacagcattttaggcccctatttgggtgacatttggagacagctggagattgtacagtttattagggggaaaaagcctgaaaccaactacaagatacaagaattgcaatgtcagatactaagttggatgcaaagtcaacagcaaattaaggtactgattataataagaatggactcagacggtgaaaaacattttctcattaaaattcttaacaaaatagaaggtttaacactgactgtccttcattcaaatgaaagaaaagattttctggaatctgaaggtgttttaaggggtacaagttcctgtgtagttgtacataatcaatatattggagcagatttcccctggagtaatttctcatttgtggtggaatacaattatgtggaagactcttgttggactaaacactgcaaagagttgaatattccttacatggcctttaaagtgattcttccagacacagttttagaaagaagcaccttgctggatagatttggaggttttcttttggaaattcagattccatatgtgttttttgcatctgaaggacttcttaatactccagacatacttcagctgctagaatccaactataacatctcactagtagagagaggctgcagtgagtcattgaaactctttggaagttcagagtgttatgtagtggtgacaattgatgaacacactgccataattttgcaggatctagaagaattgaattgtgagaaggcatcagacaatatcattatgaggctgatggcattatcattacagtacagatattgttggataattttatataccaaagaaacattaaattcagagtatccgcttacagaaaagacacttcatcacctagcactgatttatgcagctttggtttcatttgggctaaactctgaagaactggatgtaaagcttataattgccccaggagtagaagcaactgccttgataattcgacaaattgctgaccacagtttaatgacctcaaagagagatcctcatgaatggttggataaatcctggcttaaagtttcaccatctgaggaagaaatgtacttacttgattttccatgtattaacccattggtggctcagctcatgctaaataaaggaccttcactgcattggatattattagcaactctgtgtcaacttcaggaactcctacctgaagtcccagaaaaagtgttaaagcatttttgtagcatcacttccctattcaagattggttcttcttccataacaaaatcaccgcaaatttcgtcacctcaggaaaataggaatcagattagtaccttgtcttctcaaagttcagcttctgatttagactctgtcattcaagaacataatgaatattatcagtatttaggattaggagagacagtgcaggaagacaaaaccaccactttgaatgacaactcttccattatggaactaaaaggaatctcaagttttttaccacctgtgacttcatacaatcagaccagctactggaaagactccagctgtaaatctaatatagggcagaatactccttttctaattaatatagaatcaaggagaccggcttataactcctttctaaaccacagtgattcagagtcagatgtcttttctttgggtctaacacaaatgaactgtgaaactataaaatcaccaactgacactcagaagagagtgtcagttgtcccccgttttataaattctcagaaaaggagaacacatgaagcaaaaggtttcataaataaagatgtatcggaccctatcttttcactagagggcactcaatctcctcttcattggaactttaagaaaaatatatgggaacaagagaatcacccgttcaacttacaatatggtgcacagcagactgcatgtaacaaattgtactctcagaaaggtaatttattcactgatcagcaaaaatgtctatcagatgagtctgaaggcctcacatgtgaaagttcaaaagatgagactttctggagagaattaccatctgtccccagtttggatttatttcgtgcttctgattctaatgcaaatcaaaaagaattcaacagcctttatttctaccaaagagctggaaaaagtttaggacagaaaaggcaccatgaatcttcatttaactcaggagacaaggaatcattaacaggttttatgtgctcacaactaccacaattcaaaaaacgacgtctagcatatgaaaaagtccctggtagagttgatgggcagactcggctgaggtttttttgaaggaggagaagagcaatgttacatgccatattccactgtttttgatgctaatccactagcgcaattatttagatttgctcatacactaaagaaaacacaattgttcatatatgtctcagtatttctgtattaaatattcataatatgtattctgccctatggtttgcatctttgtaagttaaatattctaatttatcaattagcagaataattatcataagatccaaaatgtcttccagacacccctgcacacaggccatttaaatgagtctccatcacagtctgaccctttgagtcaggaagtgaagatcatcacagttaaccctcccacatcaagaaagttaaaacctaggacaaaattgaagttagaaaacttccaacttaaagtatcattttctgtaaacacaatttaagaacaaattactaagaggaaatatttgcaacccagataataggaaaaaaagtttacatttctcatatataaagaattcctacaaattgatagaaagaagacaacctgatagaagaatgggcaaaatatatgaacagatatttcctcagaaaaaaacaaaaattgtcattaaacatttgaaacac

SEQ ID NO: 1738 - DNA, 3038 bp, Homo sapiens
gtgacttccgcaggactgccaagttcaagccgccagggccagggcactgctagcagctgggctgagccctgttctcccggcgttcccaccgcccagtggcaatagctgtgaacggcggcaggagcatggcagtggaacaataaggaaaagatcttttaaaaaaaagatataatacagaagccaagcaaggcggccccgacctgtaaccccagcactctgggaggcagaggcgggcgggcggatcgcttgagcccaggagtttgagaccagcctggccaacataggaaggcctcgtcaaaaagacaaaagggtaaaacgaatttaataaaatgaagtttaacttttactcatgtttgtatctaatgacaagcttttaaaactgaaaagttcactactggctcctgcctggcggctccagcccgactgggggccggggcctccctgcactgtggggtcacgagtgcccctggacagctcccgagcgccctccgacccgcatgctcagcgcagccccgtcggcggcgcgccacgggcagagcgggctcagcgggggacggaagctcatcgctgcgaccgggatcccgcaggctcgctccgcagggccgcggctcctctccgtgcaggtgctgggcccgcgggggcggggcgtccacacggtccgcgccgagacccaagcggggaaaaagcgaagagcggacagcggggcaggtgccacagggagcctccgccccaccgcgcgagcagcaagtctgcggcgcttgacacctgcactgcgaatgccaggccgcagcccgggctcccaagacgcgaatacgcgcgcctgctcgtgacgtcattttttgcggtcttcccgagagccagcagagggcgccgccatgatgttttacggaagccgatagtccttgctcagcggcaccccgtccttccggctctcggctttgccacaaagcttcccgaagacgcggccgctacccggagacgcggtcgccacccagaagcgctctcccgggaagccccgctcgtgggaccgcgccacctgcgccgcctctgcggcccgcagcccgacgggcgccgccatgttggggtcctagcgagggacgcgtaggtgtcttcataagatgccggggcagcggcgcgcgctttcccccaagatggcgtccatgcgggagagcgacacgggcctgtggctgcacaacaagctgggggccacggacgagctgtgggcgccgcccagcatcgcgtccctgctcacggccgcggtcatcgacaacatccgtctctgcttccatggcctctcgtcggcagtgaagctcaagttgctactcgggacgctgcacctcccgcgccgcacggtggacgagatgaagggcgccctaatggagatcatccagctcgccagcctcgactcggacccctgggtgctcatggtcgccgacatcttgaagtcctttccggacacaggctcgcttaacctggagctggaggagcagaatcccaacgttcaggatattttgggagaacttagagaaaaggtgggtgagtgtgaagcgtctgccatgctgccactggagtgccagtacttgaacaaaaacgccctgacgaccctcgcgggacccctcactcccccggtgaagcattttcagttaaagcggaaacccaagagcgccacgctgcgggcggagctgctgcagaagtccacggagaccgcccagcagttgaagcggagcgccggggtgcccttccacgccaagggccgggggctgctgcggaagatggacaccaccaccccactcaaaggcatcccgaagcaggcgcccttcagaagccccacggcgcccagcgtcttcagccccacagggaaccggacccccatcccgccttccaggacgctgctgcggaaggaacgaggtgtgaagctgctggacatctctgagctggatatggttggcgctggccgagaggcgaagcggagaaggaagactctcgatgcggaggtggtggagaagccggccaaggaggaaacggtggtggagaacgccaccccggactacgcagccggcctggtgtccacgcagaaacttgggtccctgaacaatgagcctgcgctgccctccacgagctaccttccctccacgcccagcgtggttcccgcctcctcctacatccccagctccgagacgcccccagccccatcttcccgggaagccagccgcccaccagaggagcccagcgccccgagccccacgttgccagcgcagttcaagcagcgggcgcccatgtacaacagcggcctgagccctgccacacccacgcctgcggcgcccacctcgcctctgacacccaccacacctccggctgtcgcccctaccactcagacacccccggttgccatggtggccccgcagacccaggcccctgctcagcagcagcctaagaagaacctgtccctcacgagagagcagatgttcgctgcccaggagatgttcaagacggccaacaaagtcacgcggcccgagaaggccctcatcctgggcttcatggccggctcccgagagaacccgtgccaggagcagggggacgtgatccagatcaagctgagcgagcacacggaggacctgcccaaggcggacggccagggtagcacaaccatgctggtggacacagtgtttgagatgaactatgccacgggccagtggacgcgcttcaagaagtacaagcccatgaccaatgtgtcctagaaccacctgcctcacagctggccgtcacttgtgggggtccacgggacgatggctttgccagcttaaagtaaccggatggcggacacctggcccccgaggtcccccggccgccgccctgctgctgacccagcctgttttaagttctggatgcgtttctctggggtatttggggcttatttttaaaattttaatatgggttcttttttgtgtgatttaagacactttttggactcaacgttacatttttgaatgtagtaagtaaattaaccaaaaaagttacaacttcctaattttagtgac

SEQ ID NO: 1739 - DNA, 3824 bp, Homo sapiens
agtgtggcctgggctgactaatgtacactctctacacccctaagaaaggggttgtggaactctgagtgggctgtggaagtattttcagaaaccacgcagatagaagatccaagaaaacaatggaggggggaacaggagaagatgctcaaggactacctctctgtggcacgggatgccctccggacacagaaggaactgtaccatgtgaaggagcagaggctggcgctggccctggatgaatacgtgcgattaaatgatgcctataaggaaaagtcaagttctcacacaagcttattctcaggatcttcatccagtactaaatatgatcccgatattttaaaagctgagatctccactacaagattaagggttaaagagctaaagagagagctctcacagatgaagcaggaactgctctataaagaacaaggctttgaaacattgcagcaaattgataaaaaaatgtctggaggccagagcgggtatgaactcagtgaagccaaagccattctaacagaactaaaatctatcagaaaggcaattagctcaggagaaaaagaaaaacaagatctgatgcagagtcttgctaagctgcaggagcggtttcatttggatcagaacattggcagatctgagccagatttgagatgtagtcctgtgaactctcatttatgtctctccagacagacccttgatgctgggtcacaaacaagcatttccggagatattggagtaagaagtagatcaaatttagctgaaaaggtcaggctaagcctacagtatgaagaagccaaaagaagtatggccaacttaaaaattgaactgtcaaaattggacagtgaggcctggcctggggcactggatattgagaaggaaaaactgatgctgattaatgaaaaagaagaacttttgaaagagcttcagttcgtcaccccacagaaacgtacccaagatgaattagaacgcctagaagctgaaaggcagcggctggaagaagagttgctgtctgtgaggggaacaccaagcagagctctggccgagagattgagattggaagagagaagaaaagagctgctacagaaacttgaagaaactactaaattaactacttatttgcattcacaacttaaaagcctctctgccagcaccctgtccatgtcatctgggagcagcctgggttccctggcatcgagtcggggctctctgaacacctccagcagagggtcactcaactccctcagttccaccgaactctattacagcagtcaaagtgatcagatagatgtggattatcagtataaactggacttccttctgcaagagaaaagcggttacattccttctggacccatcaccaccatccatgaaaacgaggtggtcaagtcccctagccagcctggccagagtggactctgtggagtggcagctgcagcaacaggccacactcctccactggctgaggccccgaagtctgtggcctccctgtcctcgaggtcctccctttcctccttgtctcctccaggctctcccttggttttggaaggcacgtttcccatgtcttcttctcatgatgcctctctccatcagttcactgctgactttgaagactgtgagttgagtagccattttgcagatatcagcctcatcgaaaatcagattttgctggattctgattcaggaggagcctcccagtctctttcagaggataaagaccttaatgaatgtgctagggagccattatatgaaggaactgcagatgtggaaaaatcattaccaaaaagaagagtgatccacttgcttggggagaaaaccacttgtgtgtcggctgctgtgtctgatgagtctgtggctggagacagtggggtctatgaagctttcgtgaaacaacctagtgaaatggaagatgtcacatacagtgaagaggatgtagccattgtagagaccgcccaggttcagataggactcagatacaatgcaaaaagttcaagtttcatggtgattatagcacagctccgaaaccttcatgccttcttgatacctcatacttcaaaagtatattttagggttgccgttcttccttcctcaactgatgtcagctgtctgtttcgcacaaaagttcatccgcccacagaatccattttattcaatgatgtgttcagagtcgccatttcccaaacagccttacaacagaagacactgaggaagaactttacctttgtgacagctatcactcatggagtgtgcttaccactcccagtaccaatgccaagctttgcgtgactgctgtgtatatattatctcatttaatcctcatgacaacctgatgaaagattggttatgaaatggatgattatccactattttcagataaggagctgcttagagagtattggagctttcgggaagatgtgatgttactgtttaaagcaatatgacatttaaatgctacagcagaagacttcacagttaactaattgctggaactcagatcagcctggcagatttaccattttccagtgaggttttcactctatggtataacttgcttccttccaagcaaatgccttgtaaaaagaatgaagaaaatgaggactctgtatttcaaccaaaccagccgttagtagattctatagacttggatgcagtgtcagccttacttgcaagaacatcagctgagttgttagctgtggaacaagaattagcacaagaagaagaagaagaatcaggacaagaagagccaaggggcccagatggagactggctaacaatgctaagagaggcctctgatgaaattgtggctgaaaaagaggctgaagttaaattgccagaggacagtagctgtacagaagatttaagttcatgcactagtgtgcctgagatgaatgaagacgggaacaggaaagaaagcaactgtgccaaagacctcagaagtcagccacctactagaataccaacactggttgacaaagagacaaacactgatgaagccgctaatgacaatatggcagttcgccccaaagagcgcagcagcctgagctctagacagcatccgtttgtgaggagcagtgtgatagtgcgctcacagaccttttctccaggagagcggaaccagtacatctgcaggttaaatcggagtgacagtgacagttcaaccctggctaaaaaatcactgtttgtgagaaactccaccgaacgccgcagtttgagggtcaaaaggacggtttgccagtcagtccttagaagaacaacacaggaatgcccagtgcggacatctctagacttagaactggaccttcagtcatctctgacccggcagagccgcctcaatgatgagctgcaggcgctgagggacttgcggcagaagctggaggaactgaaagctcagggagagactgaccttccaccaggcgtgctggaggatgagaggttccagaggcttctgaagcaagctgagaagcaggctgaacagtccaaagaagagcagaagcaaggtctgaatgcagagaagttgatgaggcaagtctccaaggacgtgtgtcggctccgggagcagagccagaaggtgcctcggcaggtgcagtccttcagggagaagattgcctacttcaccagagcaaagataagcatcccatccctgccagctgatgatgtgtgattacatgacttaagaaattattttttcatctgttcactttcttagggagggtaaaagactgaagatttgtgtttttgttttggtgtttggttttttttggtaacgtaactgtcaactcttgaagaacttttatttcacatcagattttcaacacattaatttgtaaagt

SEQ ID NO: 1740 - DNA, 3112 bp, Homo sapiens
gggcccagccattacaaattttttaaattattattattattttttttagtgatggggtctcattatgtagcccaggttggagtgcagtggctattcataggcatggtcatagtgcactgcagccttgaactcgtggcctcaagcgatcgtcctgcctcagcctcccgagtagctaggaccatatatgcacacccctttgcctggcttaagttatacagcttttgttcctatcctcacccatgtgtatttatttccaggaaatctacaatttcatttattcatatgggattaacaataagctatcatcagtccagtggggttatgaatggtatgttattattctatctctactaaattcattgagcatggagcagaagtcttgattttaatggacttaggggagtttgatgggactgtttttatgaaggagaaatttgtcttttacacataagttgccaaaaccagtgctgttgctgactaaggactaagtgcctatcccttgcctagctatgcgcagtctggccttgactggaagcaggaatcgtgacatctctgaccagattggatgtaaactgcctgcttgtgctaaggagttgtgtctgctggttcttggctcccatcctagagttctctatgaaatgactcattataaggaagtctattaaaaacaaatctctccccattttagagtatctcttaaaatttcttcttaataagagaattttggtgctttcagttccagttagtgccaagaaatttgaagtgtgtattgaagaaggctatgataattacagtacttgaatttcttgtaaagatagatgctttgggaagtgagtgtatttcccttttatttgaaagacagaagcttggaaattctaccagacttaaaaaaaaatttttctctcactgcaagtccacagcctaatggaaagtgctccaagtttctctagtgaaagtggcttcacttacctcagcatttaagatccttccccattgttgtagttttataggtattttagattatctatttaaaaaggcagctgcctgtcaaatgatccacataaataaaataagattgtgcagaagtgtagaatataaccacatgccaatccttaggaaacagtgggaaatgttttactttaaaaatgtagggttttgcttttacaaaactgatctttgaccaccggttctctcaggctttgccttttctagttcaatgatcttttctactagttcccccctcccttccctcaaaggcctgaatagacacttcccagtttgggaaatagaccttcattagttacacctggctcagcatttttttttcttttctgcacatctgcttagcatcatgtatttgaaggtgccacatacatgtttgctaacgttgctttagatgctgttgagtcataagaagataagcagtgctagggaggattcagtccagcttgatattcttctccacaagtgtgacttgggtagggaaagggggacactttctttggtcaagacggaaaaacagattcatgttacctgtcattagcatagtaaaaactatgggaaatgtcttagtccattccggctgctataacaaaataccatcaactgggtggtctataatgaacaaaaattcccacttctggaggctgggaagtcaaagatcaagcgtctggccttcaaagatgtgccttctctgtaaactcacatgatggaaggggcaaaggacctctctaggttctcttttataagggcactaatcccactcttgaatgcttcctcacatgacctaaccacctcctgaagaccccacctattgataagtatcattaccttgggagttaggttttcaacatatgaattttgggagatacaggcattcagaccacagtggaaaattaagcttaactgatggggagatttaggagatgcagtgagagagctttgttgtgctgtgtgctctgtgctctcaatattatgcttttaggaaggccattgccttctcaagagtttaggtatgtgctgcaagcactcagctttttgtaatttacatccttcctctacggatggttgaatgaatgaattgctctgaattcttgtacctatttctatttctggcctgtgcaattgagtttaatgttcgctaaccacatataaagttgtgcttagcaatgtttctcaagtggtgatgtttattgtttttctagattatatagagtaatacagaatatactttccagaatatgacacatctttgtattctctccataccttttataattttataaatgtgattttataatgtttttaacttatccttgctgcaatgaaaatttccacaacaaagtttattagaggaaaaacatacattttacttactgtattaattacccttatttgaagacggttttttgttatgtgttgtgatgagaaataacaagcagtattccctgtatagccgagtattacttttggctaaagttaggataatgttctttgccctattttgtcattgcccattttttcttcttgttagggaggcagaggtggtggtggagacaactgggaacagctagaactgagttaatatctttagagaatagtctgctatgacattgtttttgtttccctctataaacccttcaaataatttttaagaaattcctctgggccagtcgcaatggctcagacctgtattcccagcactttgggaggccgaggcaggcggatcacgaggtcaggagatcgagaccatcctggctaacacggtgaaaccccgtctctactaaaaatacaaaaaattagatgggcgtggttggtggcgggtgcctgtagtcccagctacttgggaggctgaggcaggagaatggcgtaaacccaggaggcggaggtagcagtgagccaagatcatgctactgcacgccagcctgggtgacagagtgagactccgtgtgaaaaaaaaaaaaaatagctgggcctgttggcgtgcacctgtagtcccagctactcaggaggctgaagcagaagaattgcttgaacccgggaggtggaggttgcagtgagccgagatcgcaccactgcactcaagcctggccacagagcaagactccgtctc

SEQ ID NO: 1741 - DNA, 3257 bp, Homo sapiens
aacgatctcaacaaaatcaaccccgtctaccagttctccctcaaggtgcgccctgcagctggggctgggtgcctccctcaaggtggggctgcatctgggctccacagccaggcctgttgcccacacagccatcgggcagtgccagggccaccctcagagggcagacctggtccagcctgcagatggagctggaagagggggagccaggggcccccatcagtcctacacccattctccccaggagagggtatgagctgctccctcctccctgctcttcccctggtgcctccaggcactcacaacccaatcaaaacaaactggatggcctggcatggtggctcatgcctgtcatctcagcactatggggggccgaggcgggtggatcacctgaggtcaggagttcaagaccagcctgaccaacatggtgaaaccctgtctgtactaaaaataaaaaaaaaattagccaggtgtggtggtgtgcgccttgggaggctgaggcaggagaatcgcttgaacactgcaacctccctcactgcagagggtgcagtgagccaagatcacgccactgcactccagcctgggcgacagagcaagactctgtctcaaagaaacaaaacaaactggaggccaccacaggtggcggggagtggtgaagggctccatctctgcacgcctccatggctctcggtggcggatccccaggccttcaacgtggtgtttgagaaagccatccagaggaccacccctgccaacgaggtgaagcagcgggtgatcaacctgacggacgagatcacctactccgtctacatgtacacggcccggggactcttcgagagggacaaactcattttcctggcacaagttacgtttcaggtcctgtccatgaagaaggagctgaacccagtggagctggatttcctcctgcggttcccttttaaggccggagtggtctcaccagtggacttcctccagcatcaaggctggggcgggatcaaggccctctcggagatggatgagttcaaaaatctggacagtgacatcgaaggatctgccaagcgctggaaaaagctggtggagtcggaagcccccgagaaggagatcttccccaaggagtggaagaacaagacggccctgcagaagctgtgcatggtgcgctgcctgcggccagatcgcatgacctacgctatcaagaacttcgtggaggaaaagatgggcagcaagttcgtggaaggccggagtgttgagttttctaagtcctacgaggagagcagcccctccacgtcaatcttcttcatcctctccccgggggttgaccccttgaaagacgtggaagccctgggaaaaaaactagggtttaccatagacaatggaaaactccataatgtgtccctggggcagggacaagaggtggtggctgagaacgccctggacgtggctgcagagaaaggacactgggtcattctgcagaatatccacctggtggcccggtggctgggaacactggacaagaagctggagcgctacagcacgggcagccatgaggactaccgggtgttcatcagcgcggagcctgcccccagccccgagacccacatcatcccccagggcattctggagaacgccatcaagatcaccaacgagccccccacgggcatgcacgccaacttgcacaaggccctggacctgttcacccaggacaccctggagatgtgcaccaaggagatggagttcaagtgcatgctcttcgccctgtgctacttccacgctgtggtggcagagaggcgcaagttcggcgcccagggctggaaccggtcgtaccccttcaacaacggggacctcaccatctccatcaacgtgctctacaactacctggaggccaaccccaaggtgccctgggacgatctccgctacctttttggtgaaatcatgtatggcggccacatcacagatgactgggaccgtcggctgtgcaggacctacctggctgaatacatccggacggagatgctggagggagacgtcctgctggcccccggctttcagatcccccccaacctggactacaagggttaccacgaatacatcgatgagaacctgccccctgagagtccctatctgtatggcctgcaccccaacgcagagattggctttctgacggtcacctcagagaagctgttccgcactgtcctggaaatgcagccaaaagagacggactcgggggcaggcacgggagtgtcccgcgaggagaaggtgaaggccgtgctggacgacatcctggagaagattccggagactttcaacatggctgagatcatggcaaaggcagcggaaaagaccccctatgtggtagtcgcctttcaagaatgtgaaagaatgaacatcctgaccaacgaaatgcgccgttcgctcaaggagctgaacctggggctgaagggagaactgaccatcacgaccgacgtggaagatctgtccacggctctcttctatgacaccgtgcctgatacgtgggtggcccgggcctacccctccatgatgggcctggcggcctggtacgcagacctgctgctccgcatcagggaactcgaggcctggacgacagactttgccctgcccaccaccgtgtggctggccggcttcttcaacccccagtcgttcctcacggccatcatgcagtccatggccaggaagaacgagtggcccctggacaagatgtgtctgtctgtcgaggtgaccaagaaaaaccgagaggacatgaccgctcctccgcgagagggctcctacgtgtacggactcttcatggaaggggctcgctgggacacccagactggagtcatcgctgaagcgcggctgaaagagctgaccccggccatgcctgtcatcttcatcaaggccattcctgtggaccgcatggagaccaagaacatctatgagtgtcccgtgtacaaaacacgcatccgcggccccacctatgtctggacctttaacttgaagaccaaagagaaggcagcgaagtggatcctggcagccgtggcgctgctcctacaggtttagctcgctcctgcctcacagcccacactccctggggctggaccacaactcagcccttcacctgtgcacctgtgacttattctttacaggaactggtggtggtttttcgttctcttaaataatcaggtgctttgtaaccaagcacatcggaaccagagggtggaggttggtgtggaagaggtggggcagattaaagccagtggagccac

SEQ ID NO: 1742 - DNA, 3261 bp, Homo sapiens
agtttgtctggtggtggaaggaggtggtggctgcgcccgccatgctggggctcgtgttcttctcttccgcttcaggctttggtgaaatgggctgaggaagggggaattgaactgagagactccttgtccgtcccccatttctttcttttttttttttttgagatggagtctcgctctgtcgcccaggctggagtgcagtgggacaattttagctcactgcaacctccgcctcccgggttcgagcggttctcctgcctcagcctcccgagtagctgggattgcatgcgcccgccaccacacctggctaatttttgtatttttagtggagacggggtttcgccacgttggccaggccggtaccgaactcccgacctcaggcggtccacccgcctcggcctcccaaggtgctgggattacaggcgtgagacacagcgcctggcctgtcctttttatgtattgccatcttttcttttcttttcttttctgtgagatccctgttgagttttgttaacaaggctatgctgatataatgtgtggagaagtgttctctctttttctattctttgaaagtgctagtgtaggattgatgttatttattttttatgtgtttggaagaagtcaccagccatctggacctagagttttctttgtggaaagactttaaattacaaattctatttcttttataaaaatacaactattcagatgttctattttatttctgggtctcactctgttacgcaggctggagtacagtggcacattcttgactgactgcaacctccacctcccaggctcaagcgatcctcccaccttggatctgctttgtctctattgttttttctgcaggtgctgggagagtacttgttggcatatgctgatggtcatctgcatgattggactcttccatatctgctccagaagcttgagtgtctccactacaggaagagtctttgtcattactggttttagaaaagctgtcctcagagccaccatttttcttgatgcctttcacggtgacaacggccagcacttgccctgaggacatctcttcaggaagctctgctacaagaatggcgaagcaatcttttttcttggcatctcattttgccctgtgaagagatagggctgcttctggggacttttcactgatcaccatccccgccaggtcatccttgaaatcatttacctggactccctagggtgccttcacattacatggggcctccttttccttgatgttgttggcaaattctttcactggattatctatgggaactttttccttggcacatttgtcggcattcagatccagtggagcatcctcatgtgagctttcgttggtgaggtcttccaccagggtatcctccatgggaactttttccttggctcatttgtcagcctttaaatttagcaaaacatccccatctgagcttttgttggcaaggtcttccaccagggtatcctccgtgggaacttttccttggtgaattcatcagccttcaatccagtagagcgtcctcatctgagctttcattggcaaggtctttcaccagggtatcctctgtgggaactttttctttcatgcgtttgtcaaccttcaagtccagtgaggcatccttatctgagctttcgtttccaaggtcttccaccagggtatcctccatgggaactttttccttggcacgttctttggccttcaaatccagtggggtgtcctaatctgaaatttcattggcgaggtcttccagaggatcctccatggcacctttttccttggcacattcattggccttccaaagccatggggcattttcatctgagctttcactggcttggtatccttccaggatatcttccatgtgaacacttgcctgagttgctgagtctgtcaagtgaacagcaagaacctgttcagaggaagtgtcgctggtctgctcccccgccaggttgtccttgaaatcttcagatggctacctgccagggtgcacatgaggatgacacctgcggtggcacattctctctctaaaactgcgctggcagaccatggattcgccatggacagtggagtctcctgaaacctgagtatccactgctgcatcttggaggcaatactctagccttcacgagcacccttctactccagtcaggctgaagtctccctcgctgtcaccgccacaactgtaggaggtgagccacagagccgtgccatctgcaagctccaaactccacctcaccacaggtgactcctccttcactttctcctccagcctttctcagaatggctgggcgggcaaagccagaaaagccactctggccacactgcagcctctgttgccaccaccaactgcagtgaggcaagccatggtgccacaggctccaacctccagcatgtggcaggtgattccccttccccttctcctggttctctaagccaggaacagagtagctcggtgggcagatacagaagagcctaaaatctgttgtactattttaagaaaaacttctcttgcctgtgatcccagcactttgggaggccgaggtgggtggatcacccaaagtcgggagttcaagaccggcctggccagcgtggcggaacctcatcgctactaaaaatacaaaaaacaaaaaacaaacaaaaaaaaattagctggatattgtggtgcgtgcctgttatccctgctctttgggaggctgaggcaggagaatcacttgaacctgtgttagaatcaaaatgcttgtttcttggtgtcgcaaggaaaaattagcattcagacaaaaagttttctcagcaaggcaattttactttctgtagaaagggtgctgcccatcagcaatcctgccaggagagcacaatgaacaaagaaaggcaggaatatttatcccttatgcattgggtccttactgctgtgtcctgtctccattggttggagctggacctcacagtctaagctaaacccaattggctaacaacttaaaaaactttcttaaataggtaaaggcaatggagaacaaaggaaaagaggaagttgcttgccaaaagacttggagaagtaataacatttccaaataaggaaagggcataagctgtgagctgggacatgcttgagcacgtcgagaccaaatatcttggttaatgtacaaggacacagaaggtacttatttccttatatctaacaactacataagatatggtttaaaaaagagttactaacacaaagcaaagaggcttaaaaaaagttaattaaaaatattatttct

SEQ ID NO: 1743 - DNA, 3012 bp, Homo sapiens
attccatacagctgattcttggactgcgacataatttaaggctctaagaaggtggctgcacttggatctcttacaaagcatcatattttcaatgaggagaccattgaagtgatgtcacgtggctgttcatctgacctgaggtttcacacatggctagggctgagaatgctgaaaaacattatagcagtagctcttctgatgctagggaagaatgaaaaggaagcccctgcccctccaatggagcctgaagtccccgagatgtctcaaagcaaaactgaacatatgaaaactccagaagaggagctgcagccagaaagctctcctgctgaaacttcagcctgcaaagatcctctaaaacctttaaagatcaggccagtctcccagcccttcgtgaatccagctgtgaagaacaaggctgaggaatgtgagacgtggatagacaggttcaggaagctggaaaatgccctctacctgtgtgatctgagtaacacaggagttctggagaaggaacgagccagacgcctcattcacaactacaatctcatttacaacctgtccctgagccctcagaaaatcgaccaggccttgcgcagattccgttcgggagaaaatatgctcttggagccagcactgcggtacttaaaggagctatgataacaagcccatattgtgagaacagatgtttcccttatctccctttttacccagacacatgtttctccccagcctaagtgtagtggcggaggcattgtcagagtggaggccgatgcagctattgtagatgcttttgatttggacttagtttctggctatgatgctcactcataagcagttcaaagtgatcagaggaaacctagttttatcttttgatgtggcaagaacccagctacttagaatctccttctgttttaataaaacttattattaatattacatgtttgattttttcctacattgctaatcaaactatgttgtttcaaaccccacaattccacatagtaaaaaaaacattaaatgttgccactttcccacagtgcctggaacctagtagacctatgaacatcatttttggataggtaaatcatcccttctcctggtcattattctaggaaggatttccataccataagaaaaataaaagtattaccaatacactatcttaatcttaagcagtagaagaaacatttcaagtgaggttttctgaacaagtccaatattttctgcagtacaaaactaaacaacattacactgtctccaggggtattttccaaaagtccaagatagaagttttgaggaaggactccttgggacaaagcgttttgggaataggtaacatcctttgctctgcctggacaggaaaaccaggtggaactttccatcagctcccatagttcttctgttcttaacatcccccctgactttgcaccactcacatagcacacagttacacacgtatcacaccatacaggtagcatgagctcattgaagaaacactggcctggagcttcagagacaatgtgctcccagcaccatcactaatactgggtgatcagggtactgagtttccaatctgtgtgccagacaaaatgaacaagttaggtcaaggggaaaatcaaacagaaaggcctctgagcatccctttctatccattttataaaatgaggtgcttcatgtactcttatagacaaggccttaagaacaaaactatttggatccactgaaataaatggtctctaagggtcttctagtctgacctgctttggtttttataatccttgagttgtccagaaaaatgactcttgaaaccgactgaccaccctttctagaacccttggactttctggctgccttttaggtcaaaagagcaagcaaatagacacggctttctcattctaacaaaatgccaagtaaggacaattagaatagtaggtcaaaaatttaatatgccttgagcaactattgtgtttgaggaacctgacatactttgtttggtctatctctgacaattcaataagacaggtttcacagctctgtttcacagatgaggaaacagactcagaggacaagaaagctgtttggttgtgccagttaatatctgctagaaggttcgtgcttcctgtgaaggactggtcaactgatactgagaaggtctcactttacccttcatctctgggactgctgaacattcaagaagcttccaaagtactttgaacaacggtctatgtgaaatggcatagggaggtcaggccactactacaagctgtgtcattgtgaacttctaataaccactgtgttgggaaagtctggtgtcagtcttgaccagtgtcctccaaaaaaaccttcccaaatggatgtctgtggatagtggactggttatccttcagtgtgctctggagatgcttggtgtcaattgagtatgtcccaactcccccaaaaacctcaggctttaaggatggaaagggcacagaatgacagaggcaggttctcatcagctgggcagactctttcccagctgtgtggccctgaacaagtccctacttacctgagagcatcattcatattaaatgagataatgcatgcaaattgcccagtgctatgcctggcacatagacatgctccataagggaaactagcttattttagtcttatacaggatttcattttaccccatccaatgggccaaatggttgaatgccttttccaggtacagacattttccaagcccacagatggttcaccgactgtgtggtcctggagggcacagaatatgtgttccacattcctgtctctcattctctgtcctgtacttactccacaaagtaaaccaatgaggttggcattatcatgcccattgtacaggtgagaaacagaggctcagggtagtgtatgtacttgcctaaggacttatagctgtgagtgactgagccaggattagaacccagtcttgcataactccaagttcctcaatgctgttggccacagttagagcaaataaaccatacaattctcttt

SEQ ID NO: 1744 - DNA, 3738 bp, Homo sapiens
tagattttggtgttagcaagctgtgtgaccagggaacagccaccttccctctctggacctcagagtgctcacgtataaagtgatgaaatggcagagaatgctgtgcgttcaccaaatcccatcttgccttcctgaatactcagattataattcccagtctcctttgtacttagatggggctgtggaattgttctgtggcttgtgcagtgtcggtggaagtgggataaacctcttgtgcagccccaactcactctctctgtgctggagagatgtaggagatttgatggaggatgctgaagtcctaggagatgttagagccatgcgatggaagagtcctggtccccgagtgactgtatggaacagagaccccactgcattggaacatgagataagtgagaaataaactttggacacaggtgttattgtcatggtgattggcatatacaggtcgggtagaccagatgataagatttccaactgtgcctatggaggaccttactggggatagaggtggacaggatctgaatgctctgactcctgctttcaaattagacttattgttgagattttgctgacagaagagggtccctagttaaagtgagactgagaaacactggacaagataattgcaatgactcttgcccctctcagtggttgagtgatactgaaatctgggccatagcctcatctctgctgaggttccctctaccatgtcggagaccctcatgtgtttggatgggctccactgggcaggttctgggaaggacagatggtgagcaaatactgactttggaccagactatgttctactccctacttctaaagactttacattttagtggacagaaaacatggagccacgtatttgagaaaaatatttgtgtagtagaaaaaagcagaacgattagaaggcggaggattgaactctggtctggccctctaactaatttgctgactattcttgggtctccaatttcctttatctcctggactcaagtgattctccctcctttgcctcccaaagtgctgggattacagatgtgagccaccatgcccagctcccaatttcctcctgtataaaatcagagaatcactggatacattccaactatcacttttggttcttcaaatttttctgatgccatcatctacaaagcagctttgtctgggttggtatccagagtgattatggcacctgtgtgctcagctgattgaggacaaatgggcaaggacaaagaacaaaacactttgtggctgcagaagccacctgtgtcctaaacttgctctgtagacattttctttctgtcccaaagaatattgtagcaacaaaacttgacttgtgtagtacagtactttggtctggagctggtggggagatggggtagccatggttctgcacttcagagccaccttaacgatgcaattccaggctccctgcaaatttggcagtggaatagtgtgatggccaaggagacagctttgctattgtcagacaaacctgggtttgaatttccacctaaatctcagctctaccacttaccaggtgtgtgacattagacaagctgcctaacttctctgagcttcaatttcctcatctgtaaaatatagataaaatcggaggtaaaaaagtgttgttaagtatttaattgagacaatatgatgatcctgataataaaaaatgatgatgataaccatgacagctaagatttcttaggcatctataatgtgtcagacttcgggtcctgcattttgtttgttttatctcatttcatcttgactgcagtcctctaaagtatgtaccgtgcgtgtaacatgcttggcacaggttcctgcacataaaagatgttggatatgtgattcagtcatccattcactcattcattcatctatttactcattctacacatcatttttgaatgcctactgtgtgtcacgcattgtgcgaagtccttggctccctggcatgtgcagtcaaggagaggaatggtcatccaacaactaattatacaactaataaatgaattgcaattgggcagctttaagaatactgagggatgagatctgattcctggccaggggaatctgggcagtcattctggaggaggtggcatgacctggtccaggaagaacaggtgagcctggtagtgagacactaggaaaaggcttcccaaggagaggtcagtggaagcagagccatgggagcgggagagccgaggggatattgaatgtctgccaggaaacttgtggattgatacaggagtccatcaggctgggcagtgggatggagggctggccagccacgtgacgaagggtctcaactgtggggatgagtgtggggctttattctgtaagccaagagacaccaccctaagtcccagagcaacatcaacgggaacttgctcttcactggagatggcagcttgtttgaagttctgactcagctgctcatcggctgcataacctcaggtgagacatctgacattttgagcctcagtttcctcaacagtaaaatggggacaacaccacccacttaaagttatgaagtttaaatgagacggcatttgtgaacctcctttgcaaatgcaaagccctgagcacatgcatagttacttattctgactgctcctggccagtggaatggaaggtcacacccggtgtcctctgatgttccttctggttccaaaatcccaattcagaaagagagggcaggtcatgcccaagttatgaatagtgcccaataaggatgggagagcctgactctatgagttgacccggacatcaaaaccacatattgttctcgacaccataaagtgtcttgcagaaaatcagagactatttctatgtgtttagaggaaaaaaaaatctgagaagttttaactagcttcccttaattaattaagtaagccaatcaactttttttctcattgctgatgataacattcccttggtcttttctaaaccttggaagagaaacagacattgctttgctacggctcggcaggcactaggatagaaggttcagtttgtgaggttccttcctgttgcagctagttttcatgtcgggttaccagcagggtgtgttaggatgctcccgagggggtcaggtgagggacacagggtcactctcttagtgagtcctgtgaaacactaacattaacatattaattcacaaagctctcagttaatgccagacctccaaattgaatcattctctgttgttctgatatgctctaagatctcttttggatgggagagtgtgaatgtagttgacttttagaatctgaggttattttatttatttttcgagtgtgggcttattcctgctttcacctgacaggttctctaacaccgtgaataccaaaaagaagggattccacggtgccttcaaaatgtacagctgtctttcctcccatgaaagcccagggatggagttggtttacttttgaatgcttcccattagcacacacggatgacatccagcccttgaaccatgtttaattgaaaatggcaaataaacattgcccagccggagctcccgtgcctggaagctaaattaaaaggaaaaatgaccagcttcctgactgtccacacggcctttccatatgtaacgtgggatgttgcatttggagttgcattaattttttatcattccttagtaattaacattgtatttctgctgataaaccccatcaatatggtgatttgattatcacaacataaaactactcattaaactcc

SEQ ID NO: 1745 - DNA, 4214 bp, Homo sapiens
acacatttgtggctgctcaaagctgctctccttctgcgtcattacaggcgatctctaggcacgtgcttggttcttggagaagtggcgtctggctgtggaggatgaccgtggcagaactgcttccggctgttgagcgctggctgagagctgcttggcgtgcacagatcggtttcagcacagtctcgggagcagccccgggcagtgcagaaagcgaggcccaggtgacatcacacaaaaaggatatgaaaagaagaggtcaaagttaattggagcctaccttccgcagcctccgagggtggaccaagctttgccgcaagaacgccgggctcctgtcactccttcctccgcctctcgctaccaccgccgacggtcttcagggtcacgagatgagcgctatcggtcagacgtccacacggaagctgtccaggcggctctggccaaacacaaagagcggaagatggcagtgcctatgccttccaaacgcaggtccctggtcgtgcagacctcgatggacgcctacacccctccagatacctcttctggctcagaagatgaaggctcagtgcagggggacccccagggcacccccacctccagccagggcagcatcaatatggagcactggatcagccaggccatccacggctccaccacgtccaccacctcctcgtcctctacgcagagcgggggcagcggggctgcccacaggctggcggacgtcatggctcagacccacatagaaaatcattctgcacctcctgacgtaaccacgtacacctcagagcactcgatacaggtggagagaccgcagggttccacggggtcccggacagcgcccaagtacggcaacgccgagctcatggagaccggggatggagtaccagtaagtagccgggtgtcagcaaaaatccagcagcttgtcaataccctcaaacgaccgaaacgaccacctttacgagaattctttgtcgatgactttgaagaattattagaagttcaacaaccggatccgaaccaaccaaagccggagggggcccagatgctggccatgcgcggagagcagctgggcgtggtcacgaactggccgccgtcgctggaggccgcactgcagaggtggggcaccatctcgcccaaggcgccctgcctgaccaccatggacaccaacgggaagcccctctacatcctcacttacggcaagctgtggacaagaagtatgaaggtcgcttacagcattctacacaaattaggcacaaagcaggaacccatggtccggcctggagatagggtggcactggtgttccccaacaatgatccggctgccttcatggcggctttctacggctgcctgctggccgaggtggtccccgtgcccatcgaggtgccactcaccaggaaggacgcagggagccagcagataggtttcttgcttggaagctgtggagttactgtagccttgactagtgacgcctgccataaaggacttccaaaaagcccaacgggagagatcccacagtttaaaggttggccaaagctgctgtggtttgtcacagagtctaaacatctctccaaaccgccccgagactggttcccacacattaaagatgccaataacgacactgcgtatattgagtacaagacgtgtaaggatggcagtgtgctgggtgtgacggtgacgaggactgcgctgctgacacactgccaggccctgacgcaggcgtgtggctacacggaagctgaaaccattgtgaatgtgctggatttcaagaaggacgtcgggctctggcatggcatcctgacaagcgtcatgaacatgatgcatgtgatcagcatcccgtactcgctgatgaaggtgaaccctctctcctggatccagaaggtctgccagtacaaagcaaaagtggcgtgtgtgaaatcgagggatatgcattgggcattagtagcacacagagatcagagatacatcaacctctcctctctgcgaatgctgatagtggcggacggcgcgaacccctggtctatttcttcttgcgatgcatttctcaatgtcttccaaagtaaaggccttcgacaggaggtcatctgtccttgtgccagctcgccagaggccctcactgtggccatccggaggcccacggatgacagtaaccagcccccgggccggggtgtcctctccatgcatggactgacctatggggtcattcgtgtggactcggaagagaagctgtccgtgctcaccgtgcaggatgtcggcctcgtgatgcctggagccatcatgtgttcagtgaagccagacggggttcctcagctgtgcagaacggatgagatcggggagctgtgtgtgtgtgcagttgcgacgggcacgtcctactatggcctctctggcatgaccaagaacacctttgagcatacttccaacaagggcaaataacattttatgaatgaagagagattactttaaaactaacagacgttgtttaaaatgtaccttgactcttcactcgtcttttacattgtggttttgtaaaccaagtaatcagttattgctgattggcctcctgtgagacttctgggtgttatctgttcagggttcagaggcaggaggctccagcaggtgtttcccatgacaagctccggggctccgatcagtgaatacccattcataaggacaggcttgctggggttcgtgggtcccggaggcctcgtcttcgtggtgggcaagatggatggcctcatggtggtcagcgggcgcaggcacaacgccgacgacatcgtggccactgcgctggccgtagaacccatgaagtttgtctaccggggaaggatagccgtgttctcggtgaccgtgctgcacgacgagaggatcgtgatcgtggctgagcagaggcctgactccacggaagaggacagtttccagtggatgagccgtgtgctgcaggcgattgacagtatacatcaagttggagtttattgcctggccttggtgccagcaaacaccctccccaaaaccccgcttggtgggatccatttatcagaaacaaaacagctttttctggagggctctctgcacccctgcaatgtcctaatgtgcccccacacctgcgtcacaaacttgcctaagcctcgacagaagcagccagaaatcggccctgcctctgtgatggtggggaacctggtctctgggaagagaatcgcccaggccagtggcagagacctgggtcagatcgaagataacgaccaggcacgcaagttcctgttcctctcagaggtcttgcagtggagagcacagaccaccccggaccacatcctctacacgctgctcaactgtcgggtgaggcgcggagctggccttccctggctactggcctcaaggggcctagcctggttcctgggagcgctcctgcttctttctttgaatccttttgcttcagtcttatgggaattctttttatgttttgctattttgactgagacttttgtacctagggattgtttttaaacgtaaccatttgtgcagttatttacacctatttgtgtgtacagatattttagcaacctatttacaatatttctcccccaaaatgagtaatgatatctgcaagagagaaatcgtaagtctatgagatatttgcatttttattttgattactaaactagtttttgttttgttttgtgttttgaggcagtctcgctctgttgcccaggctagagttcagtggcacgatctccgctcactgcaacctccacctccctggttgaagcaattctcgtgcatcagcctccgggtagctgggactacaagtgcccaccaccacatctggctaatttttgtatttttagtatttagagatggggtttcaccatgttggcgaggatggtcttgaattcctggccttgagtgatccacctgccttggcctcccaaagtgctgggattacaggcgtgagtcaccacaccgagccctaaaccacttttttatacaccagaagttatgtttattgcagactcaggaatgaaaatcatttccactttgtaattaaatttcctgtttacactttacatgagaaaactacactcatcaaatattgttccaccgtagtacttaagagtaaggcattaaataaacaagctaatactattaacaagaaaaattaaatgcaaaaatcttaatatgcttgttactactttttaccatggaaataaagcttgaaaaatgg

SEQ ID NO: 1746 - DNA, 3359 bp, Homo sapiens
tgatactgaagagtagggcattgctataaagatacctgaaaatgtgaaatcagctttggaactgggtaacaggcagaggtttgaacaatttggtgggctcagaagaagacaggaagatgagggaaaatttggaaattctcagagacttgttaaactgttatgaccaaaatgctgttaatgatatggacaatgaggtccagggtaatgagatctcagatgaaagtgaggaacttattgggaactggagcaaaggttacttttgttatgtgttagcaaagaatctggtggcattgtacccctgccctaggaatctatggaactttgaacttgagagtgatgatttggggtatctggcagaagaaatttctaagcaccaatgtgttgaagatgtggcctggctgcttctaacaacctatgctaataatgtatgagcaaagaaaggacataaaactagaacttacgtttaaaggggaagcaaaacataaacgtttgaaaaatttgcaaactagtcatgtggtagaaaagaaaagcccattttccggggagcagttcagactggctgcagaaatttgtatagctaaaaggaaggcacatgctgatagccatgacaatgggggaaatgcctccaaggcatttcagagatctttgtggcagcccctcccatcacaggcctggaggcctgggaggacagaatggttttgtgggcctcacttagagcctgactaccctgtgcaggcttgggacactgctccctgcatcccagccattctcgctccagctgtggctcaaaggggcccaggtacagcttgggccactgcttcagaaggtgcaaaccataagccttggtggtttccacatgctgttaagcctgtgggtatgcagagtgcaagagttgaggcttgggaacctccacctggatttcagaggatgtgtggaaaagcctggatgtccagacagtagcctgctgaaggggcagagccctcatggagaacccctaccagggcattgcagaggggaaacgtgggactgtagctcccacacagagtctccactggagtgttgcctagtgaagctgtgagaagagggccaccttcctcaagactctggaatggtagatacactaacagcttgcacctgttgcctggaagagctacaagcactcaacatcagcctttgagagcagctctgggagctgaaccctgcaaagctgtaggggtggaactgcccaagatcttgggagcccatccgttgaatcagtgtgccctggatgtgagacatggagtcaaaggagattgttttggatctttaagatttcaggactgccctactgagtttcagacttgcatggggcctctagcccaattgttttggccaatttctcccttttggaatgggagtatttacccaatgcctatacctccattgtatcttggaagtaactaacttgttttttattttataggctcatagatggaaggggctagctttgtctcagatgagactttggactttagactttcgagttaacgttggaatgagttaagactttggggggctgttgggaaggcatgattggattttgcagtgtgagaaggacatgagatttgggaggggccaagagtggaatgataggattcggatctgtgtccccacccaaatcttatgtcaaaatgtagcactaatgtgggaggtggggcatgggaggtgattggatcatggaggcagtttttcataaatgatttagcactgtccccatgcagtggttctcatgatagtgagtgagttctcatgagatggggttgttttaaagtgtgtagcacctcccccctttctctcttcctcctgctccagccatgagaagatgcctgctctgactttgccttccactgtgaataaaagcttcctgaggcctcctcagaagcagatgctgccatgcttcctgtacagcctgtggaactgtgagccaattaaacttttctttataaactatccagtctctagccaggtgtggtggtgtgtgcctgtagtcccagctacttgggaggctgaggcaggaggattgcttgagctcaggagttcgaggctgcagtgagttataattgcaccactgtacttcagccagggcaacagagcaagaccctgtctcaaaaataaataaataaataataaattacccaatcacaggtatttctttgtagcagtgagagaatggactaatacaccctccataccacaccctactacttcacctccctttccaactactgtagaagatactcactgttatcatttactatcttataagtgcaaaaactaaagtttaaagaggttaagtaattggctcaaggtatcacagctggtaaacagaggcactgagatttgttctcttttggtttgaccctagaaccctctcctaacatttttttttattttgactcttgtttggcagaataagtagcaaggacaccatcatctttgctgaggaaagatgactattattagtagtaggcaagtggagagtcgtcagtgttccatcagcttttcccctgtgtctctcatcccatgaatgaagagcagatgtgaaaattgctgccagccactcacttgtcagatgagaactgacttggctgtgctcattacaaaattaatttttaggcttattacaaaattaataaggcatgtgaaatatagatgtcctcaagatttataaactttaatttagaagtgtctttgattctaatacaaatctatttttacttacagtaagatagcaaagaaaaaagtctctggaaagattctggatatgtctaaggaaaatttgattagatgggccagtgtttcagtaacacacacaagaagcttctgaataacttgtaaaagtgagatgatgtgccccactttgatttaaattccattacatgtatcctcaggaattagcaaaaaaatttttttttcataataaaactcattagatgattttgacttataaagaataacttgtttgagaataaaatttgtctggacacaagtattggttctgtaaaatgaaaggaaatatctaaacttctgtgcaactctccgttaaagataatcctaaggctacttcagatatatttttgttattcaggatatggaatgagcatgaacgtttgcattttaatggtcaaaagaaccattaaggagagaagctcccaaaatataataagacatgactagtttcaactctatgttgcctctgtatgtttggaattccttgtaattccatatgtatttggatgatgtttacctttgctgtatctttgatgaaatgatgtgttaaactaacttcctgcagtaaataaaggaggaaattgtaaagc

SEQ ID NO: 1747 - DNA, 4300 bp, Homo sapiens
aacgcaacgaggttctgccagggagatggcagcacgaccaaatactggtgcctcaccactccgggggggtgggtggtcacgggccagtgcaccccctgagtcctggttgcaatgcaggctctcaggcctcaccgtgacctcgcgctggtgcaacgggagaacgccctgaccgcagcctggccaggctcgctgtgcaccaagtcccagccccattctcttcctgtcctggctctgcctcctctaccagctgagtcagaatctgcattttcaccagctccccaggtgctctgtgtgcacattcgttcggaaagtattgttttagaagaggcctctccacttctagcctggtttcttccaaaaccacatagatgtttttgttccccaggtcttgtgttctgtgtattttccacagtgccgcagggaaggcagtgcagacagtgaagttaagagtacaggctctgaagtcaaactggtccgtccaaagccaactgccaagggctgtcgggaaaatgtcctgagatacgcacagatatgccagcaaggctctgcgcctccttagcagctaacgtagagagttctccgccactgtagaatccgcacagaacacatgctcagtgcatatccacaaacagcatggaaggacaaggtgggacggagtttctgaaaaatggagatcccagtgctggtggccattagtttctaccagcagctccagagcagggcaagaagctggaggaacaacgtttgaggataaactttgtgaggttctggagtccagggtgatgcttctgagttgacaaaaacagggtttcaccatgttggccaggaaggtctttatgtcttgacctcgtgatccacccgcctcagcctcccaaagtgctgggattacaggcgtgagccaccccgcccggccgtgtctcatctttgaaatggggcaatagccctgtcatccgcagagcagctgcagagatgactcacaggcagcactcggcccagcgcctggcgtggctgtgactgctgccaccatcacgcctgtggcccgtcctctcaccatggcctgcagagaacgcataggagataacagtggcccacagaggagagcagccactgagggagaggcgggagagcgggcagccgcacctgctctggggagagtgctatggagcacacagaaggattgtcctgggagcaaggggccagaagagaaagctgccctaggttctgccccgccagccgggagcctcctgcctcgggaagcggagcgatgcccacccacacggcgggccctgtgttacccagttctcagtggcttcgcggagccttccaccacacagccacggcctcctgagaagacaccactgacccccacctcatgccaccccactgcctgctggggagacagacctcagtgcctgattcatgggcttctgagaaggttctgaagggaacatggagagcccctggtcctgtggctggcacagagtaagcaccagctgcacgccaggaagggtgctgcaggaccaggaaggagcagtgggtaggggctagctcgagagggggtacaagggtgcgactccctccaacctgcaaggggcacactcaactctcgaatcccttcactcaactaccactgcaccatcctgttattaaccagtctgataaatggatcttaagatattcaaacagcatcatgctcaaagtgagaacttcaactttaaacaaacgatggtgaacataagtaacaattttacattgacttttatttaataaaaccacctatttacaattcaaaaaagtcctactttgatacactttactaaataaaattaaaggttaactgtacaagcaattaaaacatgatatgtagcaagtgttatcaggagttttcagcaaactatttaaaatagtcaaaaactgagcagttaaaaagtaccttctgaagtgaatgccgtttctaaatgggatcccaatgcctggcgggagaggcagcctcactctactgtgcaggctggacaaaggtcccggccctgaagtcttagactgtgagagtcaacggcatgtgaagtggagtgtgcagacctctggaggagcagcacgtcaatgtctcatttccagtttacttaaaccacacacagaggcagcctctacacttgccaacagcctctgtgccgaggtgttaagggaccctggccggggactcagaacttagaactttctggcctctgaagaggacccaggaaactggcgagacctcatgtgacccctgaacaggtcatacaagccacttctgaactaagattgggaaggtgttccacactggcatgggatcctgttcagaagcggaatacatcgtagtgctatctggagagactgatgtgaaactgcttcaccaggaacacgcagggctgggcgctgaagacacagaagatccccaggggcaatctgaacacactgcacgaggccctttgccgcgccaccttctgtacgacttaaggaacatctttatgtacagtaagaaaatatatacatctttaaggaacggaacgcccgtaacatgaacaaaaataagtacatctgcgaggacaacagcgcacaggcctcaggcggcccctcccacaggcccagctcagaccagattacattcaacatcttgatgtcaggaaatggctacgtctggaggccaccgggacccccccgtgaagacaggacgcctcctccgagaggaggtgagtcagcatttaaaggccgaggcagaaagtggtctccacgatgctctgcagcctccctggagattcagctgagatgtaggggcagagtccgggaaacgtgacacatgatagtgctgggaaggagggcacggggcagccactggctcagcaacctgctcctgcacctcgaggagcattagcgggtatggcaggcataaaaagtccagagaacgaatgccagctcggctttccttccccagcccctagcccaaggctcctgttacaagctatacagacagagccaaacagccctcaacatcagaaatgagatcagcctgggggcaccccctggggtgggaagtgtggctgagaagggccgtggagtgcagagcaccccaaggcacacatgtacgcatgactaaccaagcccgtgaccgggtccgcagaatgctccccaggaccagcctgccagcggaccgccacgtgggccctgcttccagacactggcctgccctttagactgcgcagctgcaaaacggttcatttctgtgattttggataaccaaagtcctcacacaaagttctacaattagtcaaggaaaagacagaacaaaaaatttgccaacgaccctgggaaagtcagctaaaatggggaggctgatggtccagtatgagcatctgacgagattgtctaggctgttagacgtgtgttgctcgctcctccgtctgtacaacgggtcatgaagcacacgttctaaagtcaaatgtgtgagggactcactggcacttaggatgggtccagctgtgcagggctcaaaggcagagaggagccactgctggcacaaggggccacctcccccacatgtgctgttctgggctgctgccctggcctccactgaacaggcaggtgggagagggcccagccacacatctctttctctacccttttacttacagggggctgattccactctgtgttctctccgcttttaagcctatctctattgccacagggcttcctcgcaaatagctcctcctctcgaactttccacctccgcaggaccgatgccagggagcagtctcccagagcgcagtcccactggagcccacgtgtgcacctgcagcctctacactgtgactgtgtcaaggcaacatggcccagagctcacctgcaggctgggtcgatgcccaggtatccacaaacacacatcagtggccatcctcagagagcccctgttcctttaatgctatctttcgtaggtgagttttagaaacgtgacctccagctctggaaaaactatctcaataactcaatcagcgatccctttcttatcgaaaacatgtaaatatcagccaaagcatctcaagtctcccaaataacatctctcatgcatcctggctaagactgtaacatacttcccagtagttgacatagaaacattacaatttaattagcttttgctgaaataaaggagtgggggtgagccactgcccatcgttcaactgtgcagcagatgcagtggctggctgtggtccgcagcagctcatccttccactgagctgcttaaggctaagccttggtttaattcttt

SEQ ID NO: 1748 - DNA, 3980 bp, Homo sapiens
gtttctggccgagctgatgtggccgtggcacagctcagaagcgacgctccgcccaccccgacgcggtctctatggtaaccggtcaccgcttctatggagtggcgtttactaccaattgcaaataagaaaattccagattccattccaagatggccaaataggaacagctccagcctgcagctcccagcgtgattaatgtagaagatgggtgatttctgcatttccaactaagctgaaaatggcaaaaacaggagcagaagatcacagagaagcactatctcagtcttccttatccctcttgactgaagcaatggaagtattacagcaaagtagccctgaaggcactttggatgggaatactgtaaacccaatttacaaatatattttgaatgatttaccaagagagtttatgtcatcccaggcaaaagcagttattaaaactactgatgattatttgcagtctcagtttggccccaacagactcgtgcattcagcagcagtatcagaagggtcaggacttcaagattgctccacacatcaaacagcatcagatcacagccatgatgaaatatcagacctagatagctacaaatcaaacagtaaaaacaattcttgttctatatcagcatccaagagaaacagacctgtcagtgctccagtgggtcaactgagggttgcagagttctcttctttaaaatttcagtcagcccggaattggcagaaattgtctcaaagacacaaacttcaaccaagagtgattaaagtaacagcttacaaaaatggatctagaacagtctttgccagagttactgtaccaaccatcaccttgctgctggaggagtgcacagaaaagctgaatctgaacatggccgcaagacgagtgttcttggcagacggcaaggaagccctcgaacctgaagatataccccatgaagccgatgtttatgtttcaacgggagagccctttttaaatccattcaaaaaaattaaaggttttagatacttgtacaataagaatgaatctaaatttaccagccagatatttttatgatttgtatggcagaaaaattgaagatatttcaaaagttcctctgcttgaaaaatgcctgcaaaattccatcacacctttgcgaggaccactttgggtctctaagggagaaggtttcagcccctcaggagctaagatgtacatccaaggagttcttttggccctgtaccaacgattaaagtctgcaaaaaaatattataaacagagaactgggtctcactatgttgcccaggcaagcctcaatctcctgtgctcaagggatcctcctgcctcagccttccgagttgctgagactacagttgaacctggtcatgaatgaacagaaggagaaaattacagaaaaagtcattctttcaatgacggcaaaggaacaccataaggaacaggaagaagtgagcaggcggattgatgaattgcagacagctatcaaaagtaacataggtcatctctgtaaacttggcccccaattacaggctgagcaggagcaattctcctcttatgtctaccaacacattaaaagccttccagcaaacacgcttgtcccaggaggcctgcagcttaaggtatttgaaaatggtaaaaacactggagagatctctgttggtatcagtaaaaaagatttgggatcggatagcccaattcaaactgaccatatgatggaaagattacttctcaagattcatcaaaggcttcaaggttcttccatcaacccaccaggcctcaattattcttcaatgcggctttttgatgagaatggccaagaaattaagaatccactttcgctgaagaatgagcaaaaaatttgggtctcttatggtagagcatacagatctccactaaatcttgctttgggtttgacctttgaccgagtgagtgcatttgccagaggtgatatcatggttgcatataagacctttttggatcctaatgctgttctgctacctggatgtggcaattgggaagtttgtgagggatttccaattaatttcaactgtaccagtcaacagatacctgaccagtttgaaaaggtggacttggagaaccattttctacagaacaaggtagatcccaatattgtccttcatgcctctgtttccattggaaagtggagtttctcaggcagtgaagcaagcagcaggagtcaaatagcgccatcgatcctgtggcctgtagccagtgtgtggctgatcaccaagactggaatgatcctgagccgagcgataactcagggctgcctggctattggtcatcctatcagagtcaaggctgctgagggaacatcactagaaggatataaattaatcttacagaaaagacatagtggagatgactctcagaagtgggtgtttggaactgatggttgcatttattcaaaggcttatcctcagtttgttctgacctacctagaggagctaaatgcacaagtagatgtgacccagacagagtatcacattcaccatggtgcctggaccacagctcatcaggaacatggcagaaacttagcagaagaggttctgcaagaaagtgccagcaaccttggtctgaagcaactgccagaaccctcagacacccatttaatgccagaaggttctcttgaggagacgggggagctgacagtagcactggtgaggaaactggaagagaaacatcctaaggcttctgctcagaggtgggccataaaacatgaaggaaccagtaagccaggccagtggaaacattctagagttgaaaatcctctatggaacaagcttacctacatgtggcctgtccttcccagtggccaacttaatgaggcaatgcagacagagcaaggaaggagatagacttggttcctaagttcatgaggcttacagattaagaagtataagctatgagtcaacaaggaagaaacaagaaaaggaaggagacagagttgatgaataaaggagaaggaagggagagagaagaaactcacagaaaaagtttggtgttccagaaatcaaggctatgcattgagccagtttatttagtcatatagtcactgtgaagaaagatcagctgggctgattgtccaaatgggcctgaaaattaagtaaaaatactaaatctaggaaaaccatctaacaaacaacaccctgagtgagactccaattctcctgttagttccttgacaagaaactttcaaaatagaatgatgactaaggaagtatgaacaatatagaaatatggaattatcttggtaatgtctcagactgcattaatactaaaaactatgtacctctcagtggtgacagctgctttgagaactgatttcatgctgtcctcacttttaaatattattcatactaaaaggcaattgataatatttttatgaacaaacagcatttaatatatctagggatatcagtattttttaaatatggtaaagccttattgaaaaccaacattaataaattcttttggtttcttttgtgactaagttcactggaaaaaattagaggaactcaagttattttctcactctatgggggaaaagttgtgaattgaaaaattgtgcttctaaacacttaaaggtaaggagcaatggattttcatattcaaggaaggaattgtggtaaaaagtaagattaaaaagatgtacgattttggaatgagctgttggatagttattttaaagtatctaaattaaaatatatccatttggacgggccatgccagacagaacaaagctaaaagtttattactctattgagagatgataataagtagctaccagaataaagaggggggaaaaggagacgtgggaaggctcaggagagaacattgaagaatatattatattgttaatagcaaatagataaaagaggactaatatagctatgaaacttagattgctggttaagagctggactcccaaaacgaacacatgctctctctcttatgagagagagat

SEQ ID NO: 1749 - DNA, 3043 bp, Homo sapiens
tatgaaaacaggcagcaggtcggatttggcaacccctgctctaagtgattctcatggtcaggtgagggtgggcatgtttgtgatgcaatatggccagaggctttatttgtatgtttatttaacaaacacccaagtctcacagtgacatcaattaatatcctaaatgctgtacagatattaactcatttaatcatcagaacatccccattttacatatgaggaaactgaggcataaggcgctagtaagtggtggcggtaggatcttatttgaagccagcagtctggcttgtgagtgttctgttggtgtgtccgctatgctgcctttgagggacagtgtcccagaggagatacctgtgctcaggaacaggattgtacaaggagtggagaggaggtggatccaggcaggagtggagggaacaaggttaccaccttgttgtgaaagttcatggaataggctgggtgcagtgtctcatgcctgtaatcccagcattttgggaggccacggcagatggaacacctgaggtcaggagttcgagaccagcctggccaactggtgaaacctcatctctactaaaaatacagaaattagctgggtgtggtggcgtgtgcctgtagtcccagctactccggaggctgaggcgggagaatcgcttgaacccgggaggaggaggttgcagtgagccaagatcgcgccactgcactccagcctgggtgacagagccagactcattgaaaaaaaaaaagaagtcatgtaatagactgggatagcagggagctctgtgtgctgaagggagacaagggagtagggaaggaaaggcagtcaaggctgaagagcctgactaggaggcttggtcttcagccgctcagcaatgaggaaaaataggggcatttggggcagagaagtgacatgactgagctggactccccacttgtggagttggggtccatacatcatccccctgcacactcccctctctgacacacatacaccgacccacacgtttatctcaggcaggagggagccaaagtttctctgatgtctcctgatcagcttcggaacaagtttccctggataaacacagagggagtggctttggcgtcttatggtgaggcttgcttgcagaggggacagcttttttcctgaagatggagactaaggggtgctacacgttgggagtctcggtactccacagccaagctgaaggaggaacacttccctcctgtgtcacgggaactgccctgggccgtggtagttctctgtccttcatcaggctttgtctctgtggttcagttggttaagatgaccttccccggcttacaagccctagagaggggttggggggcacaggaaatacaatccaagagcagaagtcctcatccctctttgtgagttctctttttcttatcacagggatggaggacgaaggttggtttgacccctggtgtctgctccaggggcttcggcgaaaggtccagtccttgggagtccttttctgccagggagaggtgacacgtgagtctgagcttgtttcctctagcaaccggggcataggcctagactaggtcttatcttctcactcacaagctaagcaagggctggagggggaaaggggtctccctgagagcaggtcctaggcatcttgacctgggctcctcactgatctgcgttgtgacttgtgatctgcttgatgattgcacctgagcactgtcctgtcagagtgtggccaagctcatgccagctccctcatctctgtttgcttcagtgtctgtgggaaagctcccatccttccagctttctttccttaagaaaccagtgaaatccccatttcattcctcttcagcacctctacggcctatttttcattttcctctctgcaggttttgtctcttcatctcaacgcatgttgaccacagatgacaaagcggtggtcttgaaaaggatccatgaagtccatgtgaagatggaccgcagcctggagtaccagcctgtggaatgcgccattgtgatcaacgcagccggagcctggtctgcgcaaatcgcagcactggctggtgttggagaggggccgcctggcaccctgcagggcaccaagctacctgtggagccgaggaaaaggtatgtgtatgtgtggcactgcccccagggaccaggcctagagactccgcttgttgcagacaccagtggagcctattttcgccgggaaggattaggtagcaactacctaggtggtcgtagccccactgagcaggaagaaccggacccggcgaacctggaagtggaccatgatttcttccaggacaaggtgtggccccatttggccctgagggtcccagcttttgagactctgaaggttcagagcgcctgggccggctattacgactacaacacctttgaccagaatggcgtggtgggcccccacccgctagttgtcaacatgtactttgctactggcttcagtggtcacgggctccagcaggcccctggcattgggcgagctgtagcagagatggtactgaagggcaggttccagaccatcgacctgagccccttcctctttacccgcttttacttgggagagaagatccaggagaacaacatcatctgagcatgtgtgctctgcactggctccactggcttgcatcctggctgtgttcacagccttgtttgctgcttccatcttccccagtactgtgccaggccttctccccctccccagtgtcctctcctctcagggaggccattgcacccatatggctgggcaggcacaggcagtgaggccgaggccaatagcgagtgatgagcgggatcctaggactgatctgtagcccatgctgatgtcacccaccagggcaatccatctggaggcctgagcaccctggcccaggactggcttcatcctggcactgaccaggaaagactgcctctgaccctcttagcagacagagcccaggcatgggagcactctagggcagcctggctcaggtttattgattttcgtctgtttaccctatccattaatcaatacatgtaattaactccttc

SEQ ID NO: 1750 - DNA, 1039 bp, Homo sapiens
agtgtccctcccctccccccactcctctcagtgggggcccctccagtccctgagaattggtactacgaaaaggtgaactcctgggcagaatcttgcctagagcttgcggagtccagccaggcccctgctgaagggccccagaccaccggccacttctcccccgtccatctgaccagctgggcccctgcgcccacctggcctccacgttccctctcctctcacccacacccctggccatggctaactactacgaagtgctgggcgtgcaggccagcgcttccccggaggacatcaagaaagcctaccgcaagctggcccttcgttggcaccccgacaagaaccctgacaataaggaggaggcggagaagaagttcaagctggtgtctgaggcctatgaggttctgtctgactccaagaaacgctccctgtatgaccgtgctggctgtgacagctggcgggctggtggcggggccagcacgccctaccacagccccttcgacaccggctacaccttccgtaaccctgaggacatcttccgggagtttttcggtggcctggaccctttctcctttgagttctgggacagcccattcaatagtgaccgtggtggccggggccatggcctgaggggggccttctcggcaggctttggagaatttccggccttcatggaggccttctcatccttcaacatgctgggctgcagcgggggcagccacaccaccttctcatccacctccttcgggggctccagttctggcagctcggggttcaagtcggtgatgtcgtccaccgagatgatcaatggccacaaggtcaccaccaagcgcatcgtggagaacgggcaggagcgcgtggaggtggaggaagacgggcagctcaagtcggtgactgtgaacggcaaggagcagctcaaatggatggacagcaagtaggcgctggccacccggccctgccttcccaccaccaccaccgtgcatggggcagcaaacacgtggggccgcagacatagcctgatggttaataaatgtgccaagtg

SEQ ID NO: 1751 - DNA, 3886 bp, Homo sapiens
acaaacaatgcgagtgcgtccaggagtccgctcggtcgtgcgccagactccgaacctagggggccccgggccctccctgagcaccgcgcgcaaaggcccggccccagggccaggcaactccagcgccgaggccgtccagtgcggctggagggcagaggccgagaggcgcggcgcggaacttgagccccttgtcccggcgcaccggggaaccatgaggtcccaggtctccccgctgcgctgcttgaggctcggccatggcccagcagagagccctgccccagagcaaggagacgctgctgcagtcctacaacaagcggctgaaggacgacattaagtccatcatggacaacttcaccgagatcatcaagaccgccaagattgaggacgagacgcaggtgtcacgggccactcagggtgaacaggacaattacgagatgcatgtgcgagccgccaacatcgtccgagccggcgagtccctgatgaagctggtgtccgacctcaagcagttcctgatcctcaatgacttcccctccgtgaacgaggccattgaccagcgcaaccagcagctgcgcacactgcaggaggagtgcgaccggaagctcatcacgctgcgagacgagatctccattgacctctacgagctggaggaggagtattactcgtccaggtataaatagcgctggactccccatgcagagcgggagcctgcctacctgggcctggccagcaggcagggctgccttctgctttttcaaattcttgctggtcttagcagtggagccatgcctgggtttcagagcagagctcctggccagagcgtttgaccgacagacaattcacatccatatgccagggccctgggcctttcccacagtgcaatgtgatgaaaaccacaggactcacgccagtcggataggccgagtctggagaagggaggcgcctggctgtatcccccgcaggccctcttccgagagccttcctcctcgggcagtgcgttctggggctgtgctgctcctgttaccttctgaatccatatgtagagatttcagccaaggctgggccagccttttttgggcagtcaggtccacacctatgtccagggcaccagggatgcaattccatgtggatgtcaccaaaccccagtgtggaggcagggacagtcatgggaatgtgggggatgaagcccaggcagggaatggccttgaaagccattggagctccaattcgtgacccactcagccttatccacggagctggagccaacctacgtgccaggccccgtgctgggtcccagggatgcagaagggtcaaaacccatcatcctgacccttgtggggctccgtaagaagctgaaaccttcgaccgtttgagctggaggggccctgagaaatcagagtctacgtatcatttacttagggggaaacttaggctggagacagggaggccttccactctgccccagtagcttagaaaatcaagattcagtccagcagatgcagagtccatgtccatcttgtgccttctcctggacaaacctttccttcctggtggtggatttaaaatactcctttctgcccattggccatgctgggagccacagatatccagagccagcatgacctggggcttggtttccctgccctgggctcagtggcactgctgagctgcagcagtcctagagttttccagggggttctgagggaatctttggtccccagtactcattaactcagcagacatgaggcagcatttcctccacactagggtggctgagaggggtcctggggtgtttcagacccttctgggcatctccttccacagctgttcagtttgtcggtctctttgaggcagccaccgtccctgagggcccctgcacagagcagctgtgggcctgtaattcagcctgcctgccttgccttggggcagggagagagggaacctgctcacggccctgcagcagagcagggcgcaaacccaggacatctgtgccaggcttcccatgccctcccccaacagtccctcagcttcacccagcggggcttccaggccagcctgtgtcccctcccgcaggcctcctgtccacaccagcgccccctggggggcctcacacagcccctgtggcagaagcagttgccctcctctgtacattgcctttaagcgaccaggtcctggccgagtttcctctgccccttcttgctggtcccccaaagggcgctccgctccctgccctgccctgccctgttccgcatgagctgcgcctctgtgctcgcctgccccctctctgcttgttagttgctctttctggctctgcctctcctttgcgttcctcgggatgccactctgtgcccaggacggttctgagactgaacactgagggcaggagcaagggaggaagccaggggcgaggcaggccgcgggaaagccagggcccctgcctgcaggttagaaagaggcgagcgtggattgtcacagctgcgggcatgggaagggctagctgagctcttcacctgcatcctggctgccgtgaggattccccgtgttagaggtggggacgcctgctggaggccgcctggctgatgtagggctatcgggaagtgccagggcctgtgttcccaactgtcgcccccttcaggctaagtctcaggcagggacagacccagaaagaacacagtctgccctcagagagctctttgcagtgtagtgacactggggtttctgcagtcagggaggagggagggtggccaggctgacagctttttgcaagaggagggggaccagcaccagctgggaggcataggctaggacaggcccacgtggaggctgggcaggaagggcctgctgaggtcacacagctgttggtggttgggccagggcggcttcctcctttcagaatgctagggtggctctcaccactggccgcctctccttgccaggcctgccaactcaggggacagatggagcaggagtggagaaagggaaaggcaggtctggggtgtggtcgtgttttcttaactctgcttctgtcttgctctcccctcccctggctttcctctctgcctgctcctgtctctccctggggtttctggtggtggaaaagctcaagcctttgcgaagctaatgacctgcctctgtgcgaagcttacgggaggctggacctcgacacagactctgctgatggcctctcggcccctctgctggcgtccccggagcccagtgctggccccctacaggtggcagcccctgcccactcccatgctggtggccctggccccactgagcacgcctgagcctccggggccacgcttcgttctcaggaacaaaacctgaggcagccctttggatgccctcacagccttgcttctctcagcctaggttcccatttggggacttcaggaccccagagccactaggacttccttgggaagcccgttagcccagggtgggtcccgccaggacagtagggaaacagttgtttccctagccatttccgaatagcccatcattccgagtcatcatctctgtttgctgccttcctggccagccaggtggaagaaagtttccaagctaggtctggcccgttggggatctcagcagtggggcaggagggtgcctgatttcggggagtcctgacccgagcctgttgtcagagttgggaggggctctgagcagtgttgggcaggccgggtctcccatcccgaggccagcgttcctgtgcagagccccatccactggttcttgccctgagccacatatgtctgtgccatgggctgagtgccacgacaggcccgtgtgacagctactgcccacgcatgtggaagctaggtgggactcattcctaattctgccgttgtaatgagacttgattaaaacaccgccacttttttgc

SEQ ID NO: 1752 - DNA, 3631 bp, Homo sapiens
cagccatgacattccggcactcctggagagacaagtcaaaagaaggggtgatttcctgatgtggaaagaaaatggaaagaaaccaggatcattcccaacacaacttaggccaaactaccaactaaattcctcacggaatatgttaacctcaactgctgttaagcatgacttagcagaatcctttcctttttgggccagtaaaggcaaactagagtggcagcacatccatcagcagcccccatattctaagtgttttgaggaccatttagagcaaaaatatgtccagctcttctggggtctcccatctttgcacagcgagtctctgcatcctactgtttttgtccaacatggccgttcctccatgtttgtattcttcaatggcattacaaatacatctatgtcccatgaatccccagtacttccccctccccaacctctgttcttgcctagtacccaacctctacccttgcctcaaaccctgccccgaggtcagtccctacatctcactcaggtgaagtccctggctcaacctcaatctccattcccagccctaccacctagtcctctattcctgattagggtgtgtggcgtgtgttttcatagaccccagaatgaggcacggtctcttatgccatctgaaattaatcatctggagtggaacgtgttgcagaaagtgcaggaaagtgtgtggggtttaccctctgtggttcaaaaatcccaggaagacttttgtcctccagctcccaatcctgtattggtcagaaagtccttcaaggtccatgttcccatctccatcattcctggagattttccactcagctctgaggtaaggaagaaactagagcaacacattcgaaagaggctcatccagcgcagatggggcctgccccgcagaatccatgagtctctgtcattgctacgtcctcagaacaaaatttcagagctatctgtgtcagagagcattcatggtccattaaatatctctttggttgagggtcagaggtgcaatgttctaaagaagtccgcatcaagcttccctagaagcttccacgagaggagctcaaatatgctttccatggagaatgtggggaattatcagggatgcagccaggagactgccccaaaaaaaccatctcttgcatgatccggagacatcttcagaggaggatctgaggtctaactctgagagagacctaggaactcatatgatgcatctgtcagggaatgattcaggggtgagactaggtcagaaacaacttgaaaatgccctgacagtacatttgagcaagaaatttgaggaaatcaatgagggtcgaatgcctgggactgtgcatagttcatggcactcagtcaagcagacaatatgtcttcctgagaaatcccacagccaaattaaacatcgaaatttggcagcattggtgagtgaggaccaccgcgttgatacctcccaggagatgtccttccttagttccaacaaacaaaagatgttggaagcccatattaaatctttccatatgaagcccatattaaatctttccatatgaggatgctgtggggccttccccgcaagatccgtgaacccacagaaatcttcaaatcagaagaggatatttccaattccttttcccatttctaccttccctcctcagccagctttatttctcagggagattccaaagatggggtctctaagtcttgtagacgaagcacttttcaaggagaaaagttgggaacaacaagctcagtccctgtccttaatcatcctcagcctgtctcctcacctattggcaaagaagggcaggggaccctgagaagacaattttctgatactgaccatgaccttatagagacagatgccaaagatggtgcctccacgccccttagaagaggcactacatattttcaaggagaaaaattagaaacaacaagctcattctccatcttgggtcatcctcacctcgtcacctcacctgttgatcaagaaaagcaggggaccctcagaagagaattcgctgatactgacgaggatcttacagaaagtgtctggacaactgaggatggcagacagacttttctgccccccacacacagcatcatagacgaagtcagtcagaaacagactgtacttgccagtagatgcagtgcagagctgcccatactgcaagctggagttggccgtgattcaagggataagagagagagtgccagtaataatgttaacaggcttcagggcagtagaaagacctttcctgtcaccaatgggtcgaaggagatgttcaaggaagaggagatctgtactcttcaatcacaaactaggaacaacttgacaaccagcaagtcaggaagctgcttagtgacaaacgtgaaaagaagcacttctcatgaaactgaaattttcccaccaagaatatcagttcctcaaactcctaaatcatcatatcttaaaaatcagatgttgagccagttaaagttggtccagaggaagcatagctaacctcagagccatttcactggcatgtctcttgccttagataacttgagttccaaggacttactgactcatgcccagggcatctcgaatcaggacttgggaacttcccaggtgctgcatgtccacttggaggtcagaggaatccgtgtggcacagcagcaggagcccagggtccctacgcatgtcttacagaaatgccaagttaagaatttttcaccagctacaaagagagtgagccctctaagacctaatggaggagagcttggtggaggggatgcagggttggggacatcccaactcagaagaaagagccatgctattcataacaagacatcaagggagtcgcttgggagcaaatcttccccaaccttgaaaacacagcctcctcctgaaaaccttttcggaacattgatgaagacctttttgcagcagtctaataaacccatcataacatatggaaaacaagaaagttcctaggaaaagggtagctccttgtcatcatctgtgcagaatagaggtcgagttaaaagtagagctgtctttactgggactattgaagctcagaaaattaggaaagacactggggagttcatagaagagaagctggggcatagacattgaatagatatcacctgtccccaggggcccctttcctccccagtgcagcttgggaaatctcagaatgtgccagaactgcaggtcagagcagagcctgtccagggctatccctgcaactacatggctccctcctgcaaagtgacatgtaccaaatcttgcagccaacaagctatctttgtcggccagaattatcctgcaatgattagacagatcatagacaaggacagatagccccaggaagttggacatttaaggggaagatattgtgtcaaaggcatccccaatccatgccccacaggaagcctgtgccacagccaaaccccacttgcagtgtgaagtcaacctggtgcctccggtcatcctgaccagtgctaaaaacactgtgttcagtgatgtgcctttactaactggacagaaaatacttccaaagcatttgcagggaggaaaatttccccccaaaaaataattaactccttgttgagaatcttgactctccccaataaacgttctaataagaataag

SEQ ID NO: 1753 - DNA, 3515 bp, Homo sapiens
agtgcgtgtggtgaggcaggacatggcggaggcaggaaaagtgcccttgagcctcgggcttaccggaggagaagcggcagagtggcctctgcagcggtacgcccgctgcataccctcaaacaccagagacccacctgggccatgcctggaagctgggacagccccctgccccacatggaaggtttttgattccaatgaagaatctggatatcttgttctcaccatagttatatcaggtcatttcttcattttccaaggacagacactactggaagggttttcactcattggtagcaaggactggttgaagattgtaagacgcgtggattgtctgttgtttggaacaacgataaaggacaagagtcgcctgtttcgagtacagttcagtggagagtcaaaggagcaggcgctggaacactgctgcagttgtgttcagaagctggcacaatacataaccgtgcaggtgcctgatggaaacatccaggagcttcagctgattcctggcccacccagggcaactgaaagtcaagggaaggattctgcaaagagtgtcccacggcagcctggatcccaccagcactcagaacaacagcaagtgtgtgtaacagcgggcacaggcgctccagacggaaggacctcactgacgcagttagctcagactcttctggcatcggaggagctgccccatgtctatgaacaatctgcatggggtgcagaagagttaggccccttcctacgtttgtgccttatggatcagaatttcccagcatttgtggaagaggtagaaaaggaactgaaaaagctggcgggtttgagaaattaatgctctatatacatatataactaaggaacttcaaagtattgaaaaatgcttcctcctaaaattaaagaagatattagaataaagagaaatctcaagaccctcaagaagacaaaaaggaggaaaagaaaactaagaccatagaggaagtatacatgtcgtccattgaaagtctggcggaggtaacagcgcgctgtattgagcagcttcataaagtagcagaattaattcttcatggacaagaagaggaaaaaccagctcaggaccaagcaaaagttctaataaaattaactactgcaatgtgcaatgaagtggcctctttatcaaagaagtttacgaattctttaaccactgttgggagcaacaagaaggccgaggtccttaaccccatgatcagtagtgtattgttagagggctgcaacagtacaacgtacatacaggatgccttccagctgctgctgcctgttctgcaggtctcacatatccagaccagttgtttgaaagcacagccgtgacctggccagactccatctagttaaaggagacagctggccgccttgcctcaatatgtaccatttaaggggatgttctctgtgcgcctggccacagacatccatttgaggacactacaagcaattttgcacagacaatattgagaatgcaaatttagagagagttatcatttctctcaatgtgtataattgtttttacaaacaattgtgttttctttatgttaatttaaacttacacagcttatattgaaaatttcctttcatctgaaatttatttacaaatattcgtgttcattttcctggttaagcatgctatatttagaaactcatggggagaccttagacttttgtttaatcctttatgtttcaacctttaaatgttccattcttatagtattactttaaatcaattctaaaactgaactttgttttgttacataaatgtcgcaggcaaaaataacactacttatagattttacctattatggtaaaaaataggaacatattgtcattctttttttttttttttttgagacagagtctcactctgtcgccaggctggagtgcgttggcacaatcccggctcactgcaacctccgcctcctgggttcaatcgattctcctgcctcagcctcctgagtagctgggactacaggtgtgtgccaccacgcccagccaattttttttgtatttttagtagagacagggtttcaccacgttggccaggatggtctcgatctcctgacctcgtgatctgcccgcctcagcctcccaaagtgctgggattacaggcttgagccaccgcgcccggccggtcattcattcttgcaacaagcatttattgagcacctactgtgtgctcacagtaaagaaacgtgatcttatcccagtagaggtagatattctgaaaaagaataattcttaaactgcttaaaacaggggtccccacccccaggccacagaccagtaccagtccgtggcactggttaggaaccaggccacacagcagggggtgagcggtgggtgagtgagcacagcttcatctgtatttacagctgctccccagagcttgcattactgcctgagctctgcctcccgtcaggtcagcagcagcattagagtctcatgggagtgcgaaccctgttgtgaactgcacatgcgagggatctaggttgtgcactccttatgagaatctaatgcctgatgaatctaatgcctcatgatctgaggttgaatagcttcgtgccgaaaccatcccccacccccatcccgctaccccgagtccgtgaaaaaattgtcttccatgaaaccggtccctggtaccagaaaggttggggaccactggcttaaaataccaataaatttttgaaccttaaaaactttgaagaacaaggtaaattggtgttttatttaatgtcctaccctttaatttgttgcattttcctatactctttacactattttatcccaaactatgtatatgaggtgaaaatatatatgaaaagggatactgaagaatatttagtttaaaattaatttcttacgatcacgagcacatggtggcataattacaaagcttggaagtattcaaatagaaaatcaaaggtgtttcaatacagtagaatcccaggactgcattttaaaatcgcctcacagatcacgctcgctggtggcaaatatcatcatcgttgctaaaggacagaaaatactgatgtgtgttttaactaactggtatattgatccatgggaggctgcacagaagaccctgcggccaggaggggcattgtcagtggctgcttctcctgagctccacgccttcattgcagctgcatgttcgatacaatacacctgcttcacagccccatggacatccctacaggtactgtcatgtgaagccttgcctagtagttctctccagggcaaatgaagctcacagtttcgcaaggtggaaacctcttattcacatttgctttgattccccgatggagtagactgcctttgttccatacaggcaaagtaaggatattttaatatcatcctacttcttattagcatttcatttgtctatgtactgtatttcatttgtatgtctcctgaaacatccaaatagagaacataagaacactttatgtacaatctggaaaaaaattacctgagaaatcaattaaagatttttccccttt

SEQ ID NO: 1754 - DNA, 3645 bp, Homo sapiens
aaaattgtaacttggccaggagaatcagaagctagaggaaaatggaggaggaaagaagaaccacatctgtttctaccgcgccatggcacccgggggggtctcgaattacacttccatcccaccttccccctccctcccggccagggtttggctcaggaatagttgaaactgtgattcactgctacagttctctgtgctgtcctggttgctacaagctgaagtctgctcagttctggggacgaaagaggtaatctacgagggattaaaaaatgagatatttgcagcaaatggggaagagccactggcaaaagtttggtgtctggatgtggaggagggaggctccctatggctgggggagggatgctgagggtctcagagggagccacagtcccagtaggagaggccacagaagagccatgtccttgggcagccagagccctcctggcactgccctgggcttgaggcaaatggcaagggaggctctgcggctgggctggcaggggccaggctcaccaggaagaggtggcggtcctggggggtgccgttcttggctgacagtttctggatttggccctccttgatcagttcattggccgggttgacaatgtcttcttccccacccagctgctcgtacacctccaagagcttgtgcattttctcctgcaagagacatgggactcaggcaccaaaggtctgtgagagtggctggtgacctagagatgcacggagtccttccctgcaaccgtggcccagaatccagagagggcaatgagctactgacaagggtgggagggaaaacagagtgatgtttgagttgggtattgaaggatgaataggagttcaccatgcagagcataaaaacaacgataaacaggaacagagctaaccattgctgtgagccatgtgctgttctacatgatacatgttttaactcacctagtgaggtgagtgccattgttatcttcattttacagacaaggaaactgaggcacagagcggtcagttgagtatctgagacccagactcggacaatccatatgtcaccttcccctgaccatggtgactggtggggtggtcacatgggtaaccagcacccagaagtgcgatgggacagcgtcaaagctcatgcttcagctctgagccagacgccagtgtagcagaacgcagaggtgagcctgcggcaacctcgacaacagccacatgtctgagtctgtacctgctgtgccttggaagccccgtccttggacctgagtgatctcagcctgtacatcctggaggcggctgggtttggctgacccttccgtctctggcaccaatgcagagttcttggcaggtgcccctgcaccctcctgggagcccttggccccagctcactctccgcatccttccggtctggggcgtcctgcgggagcctcttcagatagtccttgagcagcagctcgtaccgggggaccctctgcacgggctccagcatgtggtgctgcagcgtcaggttcccgcatacctcctgcttctgtggggacagagggagcattgggcactccaaggacacgtgtgtggatgccagccccaccggcttctggccaccacagccccaggaagctgcccggaactggctgcccagaactgactgtccttcaagacatggctgacacagaccacactttacaacgagggaaactgaggctcagagagactgaccaatggagcaagaactggaaccccaggcaggctggcccttggcccagagctggctctcttatacgcatcctcggtggagaaaataaatgcctggacaggactgtctcctcccgtcaagagtggcttttccccactctcacccacccgtgggcctaagcagggctccttcgacccctctgctgagaaatcaggcagagcttcgcccaaccatccccactgggtatcgggccagggcttgtccttatgcctagaagcagctcggggagtccttctgcagatcgctctcgatataaacacaccagtattccaatcaggtgctgagaccctcgcgctccacgtgtacccagctctgctcaccggctccctgtgcctcccctcgcaccctgcagcacctccttgctgccatgtctccatctggcatctgaaccccagacacgtgtgctgaatgctgcccacctgtcgcctctgtgctccccaatcgggtcctcctgcccaggccactttgcctctgcctcccctgatgatgcccactgggcagcctgtgagggcctgctgactttgtcgtcctgtccaccagcttccccacccacctgccagcaactcaagggcctcaaccaccctcacctggctcagggcccagaacagaacggcttccagctcagatgagctcaaaaatgcctgggatacaacagggtgagagaaacccaagtcgacaatcttcataaaaacaactgtttctgtcaagatattcacataatctccaagtatctccctacaagaaacttttttttttttttgagacggagtctcgctctgttgcctgggctggagtgcaatggcgcgatctcggctcactgcaacctccgcctcccaggttcaagcaattctcctgcctcagcctcctaagtaactgggattacaggtgcacaccaccacacctggctaatttttgtatttttagtagagatggggtttcactatattggtcaggctggtctcgaactcctgaccttgtgatctgcctacctcggtctcccaaagtgctaggattacaagcgtgagccatcgtgcctggccaagactttttttttttttttgatggagtcttgctctgttgcccagcctggagtgtagtggagtgatcttggctcactacagcctccgcctccccggctcaagcaattctgtctcagcctcccaagtagctgggattacaggtatgagtgtgccaccacacccagctaatttttgtatttttagtagagatagggtttcactatgttgcccagactggtctcgcacttctgacctcaggtgatccgcccacctgggcctcccaaagtgctgggattagaggcgtgagctaccacaagcggccaagaaacttaataggggaaaaaacccaacttcacctgaagagtcctgacagacacgccctttatcaagtgaatatccccaggaatgggatgcagagactgcgtcaccgggcaggacgcagggagaagagcacagcctcactccaggaaaaggcacagcctcaatcaaactgtggacaaacagcagaaaaacccaagcaggcagtctacaagtaactaggctgcacccctcaaaaagacaaggacagaggcctgttccagacccaagaggacaaatacaataatgagcgcaatgtgtggccctgggttgggttatggatcagaaaacaagaatgttattgggacaatcggtgacatctgagtgtgggctgcggagtagatagcaccaggacatcagtgtaaaatccccgattttgatcactgtgctgggagtacgcaagagaatatccttgttcacatgtttagtgataaagggttacggtgtctgcaacttagtttcaaaacgctcaaaagtctcatcatctgtatgagtttagagggaataataaagtaagccagacaaaatgtt

SEQ ID NO: 1755 - DNA, 3980 bp, Homo sapiens
ctcaccagaagctgagcagatgctggtgccatgcttgtacagcctgcagaattaagcttcaaaaaggacacactagatttaattagaaatgttaagattgcccaaaaaaagattacctagatttgagcaagttcaggatgaagacacctacctggaaaatttagcaatacaaagaaatgcatctgctttttttgaaaaatatgatcggagtgaaatacaagagttactaactactgcactagttagctggttgtctgccaaagaggatgtgcgctctcaagtagacctcccatgtggaattatgagtcaaatgaataacgtaggcttctccactgcaatcctactgactcccgtggaccctactgccctcttagactatagagaggtccatcaaatgataagagagttggctattggaatttattgcctaaatcaaatcccttccatcagtttagaagctaattatgatcagagttcttcttgtcaattacctccagcttattatgataccagaattgggcaaattctgatcaatattgactacatgctgaaagcactatggcatggaatatatatgcccaaagaaaaacgagctagattctctgaattgtggcgtgccatcatggacattgatcctgatggaaaacctcaaacaaataaagacattttttcagagtttagttcagcaggtttgactgatattacaagggatccagactttaatgaaatctatgatgaagacgtgaatgaagatccaacatatgatcccaacagccctgaagaaacagctgtatttatgaaatatgctgaaaatattatgctaaagttaacattcagtaccacacaaattcaacagtatgaaaatgtctttatatttgaaacaggctattggcttactaatgctataaaatataatcaggattatcttgatatctgtacctaccagagactacagcaaagattatatcttcaaaaaaagattattcaaaaacactttgagaagaaaaaagatatcagaagagggataggatacctaaagttaatatgttttctgattccatttctactgagtttaaagaagaaaatgaaagttccatatttaagtagtctgcttcagcctttttcagatgacaaggtcaagacagagcgagaattgcctccatttatttatggaagagattttaaatgccagaattttcactacaaagagaatcaatattttcatgttcatggaggaattgaatttgatatcagcaccccttcaattgagaatgccttggaagattttcagaaaaatttagaaaaaatacgagattgtgctgctaatacatttatagaagattcaggatataaagaatattactcaataccagtcatggaatttcatggaaaaagctactatgtgatctattttgaactagaaactttctatcagcaactatataagacacagtggtggggagccataaatgaaatagtgaacaatctgagactgaaaagacttccactgacagatgctcaattacatgaacaatttaagaaaaagcttggtttcaaaagagctatgaaatgcaagagtattccatttggtatgaagtccgctgttgaaagagggttgtctgcagttttccacacatttagccgtaaaacctcaagctcaacaatcaatgtttcagatgaagcaggttatactatttttcatcatgctgccctgcacaacagagtttctattatatgtcaactgtgcaatgctaacttcaaggtcaaccagaggcgctttgttacgttcagccaaggtccaacacctctacaccttgctgcacaggcttgctcattagaaacaacagtttgtctactgtgttccaaagctgattacacgctttctgaaaaaagaggctggatgccgattcactttgccgctttctatgacaacgtttgcatcattattgctctctgtaggaaggatcctagtttgctagaagctgaggcaacagctgagaatcagtgcactccactgttacttgctgccacttcaggagcactggacactattcaatacctgttttctatcggtgctaactggagaaaaacagatattaaaggaaataatataatccatttatcagtgttaacctttcatacagaggttctcaaatatataataaaattaaatattcctgaactcccagtgtggaaaactttggtagaaatgttacagtgtgaaagctataaacgaaggatgatggccgtcatgtccttggaagtaatttgcttagcaaatgatcaatactggagatgtattttggatgcaggcaccattcctgccttaatcaatctattaaaaagttccaaaataaaactgcagtgcaaaactgttgggttattgagtaatatctcaacccacaaaagtgcagtgcatgctttggtagaagcgggaggcattccatctctaatcaacctactggtttgtgatgagcctgaagtacactctcgctgtgctgtcattctatatgatattgctcaatgtgaaaacaaggatgttattgccaaatataatggaatcccaagcctgataaatctattgaacttaaacatagaaaatgtgctagtaaatgtaatgaactgtatacgggtattgtgtataggaaatgaaaacaatcaaagagctgtgagagaacataaaggcctcccatatcttatcagatttctgagttctgattcagatgtgttgaaggctgtatcttctgctgcaattgctgaggttgggcgtgacaataaggaaattcaggatgctatagctatggagggagcgattcctcctctggtggctctttttaaagggaaacaaattagtgtccaaatgaaaggtgcaatggctgtggaatcactggcaagtcacaacgctcttatacagaaagcatttctggaaaaatcgttaactaaatatcttttaaaactcctaaaggcatttcaaatagatgttaaggaacaaggagctgttgcactttgggccttggcaggacaaacactaaaacaacaaaaatatatggcagaacaaattggatacagctttataataaatatgcttttgtcaccatcagctaaaatgcagtatgttggaggtgaagctgtcatagctctaagtaaggacagcaggatgcatcaaaatcaaatatgtgaagggaatggaattgcaccattggttcgcttactaagaattagtacgattgctgaaggcacacttctcagtgtcatcagagcagtgggatccatttgtattggatatttgcttaagagcaggctatgcattaacactttttgccttcaataatcgctttcaacaatacttaatattggaaagtggaataatgaccatatctattttcgaacgttttcttgaatcaacagttgaaactgagaaggcaatggcagcatttcagattgttgtactggctaaagtcattagagatatggaccatattactttgtctgcaagaggtgttactattttagttgatagtctgtattcagttcagacttctactattgtcttgacagggaatttaatagcaagcctggctcattctagagctggtatcccagaagcatttaccacattaggaacaatccaacggctctgctatcatttgtactcgggaatagaagagtctggagaagaatggaggaccatccataattcctatctttaaaagagggaaggagcaccgaagaaaattaaaacctaaaattcaaccaaaagattctttgactttattacctcctgtaactaacttcatgggactcttcaaagcaacaaaaaagaccaaggattcccataatattttttctttttcgtctacaattacatcagatatcacaaatgtatcaagaccaagaatagtgtgtttgaaccaacttgggaaacatgtccagaaagccaacccagagcctgcagaaggctaataaaacattttagaatg

SEQ ID NO: 1756 - DNA, 3753 bp, Homo sapiens
atatttctgaggtggccctttgggagcaaaaagaaacattacatttacaaaagtaaacattttggccccacatagaaaagggcccctaccagcatagtctcttgttagaaaactcttcttgggcaaaaagaatggaaaaagagggttttggaaaatgatgaaaatgtagaagaagggaatgaagaagaggatttggaagaggatattcccaagcgaaagaacaggactagaggacgggctcgcggctctgcagggggcaggaggaggcacgacgccgcctctcaggaagaccacgacaaaccttacgtctgtgacatctgtggcaagcgctacaagaaccgaccggggctcagctaccactatgctcacactcacctggccagcgaggagggggatgaagctcaagaccaggagactcggtccccacccaaccacagaaatgagaaccacaggccccagaaaggaccggatggaacagtcattcccaataactactgtgacttctgcttggggggctccaacatgaacaagaagagtgggcggcctgaagagctggtgtcctgcgcagactgtggacgctctgctcatttgggaggagaaggcaggaaggagaaggaggcagcggccgcagcacgtaccacggaggacttattcggttccacgtcagaaagtgacacgtcaactttccacggctttgatgaggacgatttggaagagcctcgctcctgtcgaggacgccgcagtggccggggttcgcccacagcagataaaaagggcagttgctaaacccacgggacagactctctgggcaattagccatccccctctgactttggtcattgtgctggttctgatatatattttttttaatgaaaggcaactttagattttccctctatccttgctttttttcccttcacctcccacgtgtccctccatccctccccccacccctctgttttgggtatgtacaacagaagcacaaactactgaaacaaaacaaaacagcagaatgagcgttcttccgagagatggcatcgtgatgcgctatttattttccatagaaataggaagttagacggattgtctcttttctgaggggagggggtctttttgacaggagcagagttgatgtcctcaattttcatatttattggcaaaaggaagagaagaggaactttgggttggaaacaaagaaccaataacattaaaacattattatttatatattctagctgttattagaatcagactttttttgcgagagagagagagagagagagagaagggaaatcaaagaaatcgaagcaatatcctgtttagaggcaagccgcccggtggggagaatttcctcaatgggagacggttgcactattctgtgccccacggagtttgcggctccccgcggcagacccctccctcattctcctccctgacctttccatcttcctctctgcttgcgagaaaatgtcagtagttccagagaagtcggggtgcctatgcctggcctccctccacacctgggccctgaccagccgcctcctgggctcctcctcctccgtcagtagagctgctgttttgttattgctggtttttcctcactttcctcctggcaaagaacgacttccaaatgcagggatggaatataagcagaacgtcataggctcagcagtgactccaccacccgaggccgaggccgtgcttctggaagatagaaggagacatcatcgtgtgtttcccctccccttgcccctgttaagaaacgtatcaatacccattggatgatcaaggctaccgtatttcttctatttttttttatagtgcctgccaggcactttgttttatgtttccaatagcacttcctgaaataaaccaaagcaacactgctcaaggcccctggggcgatggagaaggccacccacctcactgacagtcccaagaatgaccggctgcgaggtcctagtcaaaagtcaacattatgacctggggactccagcatccttcaagcaagccatttccgaagaaggtgaaaagaagccaggatgattggcacctcctcctcctcctcctcttcttcctcttcccttgcccagccccctcctgtgcgtgtgtttcagacaacacaggagccagcacaggagtggaaaatcctgcagcgcaactcagctcagcccacagaagccttgggaatggcctcagtttgtgcaataagaagattttttttttctttttaaatcttcattatattttctttgattgtctgtgagaaagtacccaggtccgcctggaattactctacagtagaaataactgaacacaaacaaactgatggaaaaaaagagttaactattttatttatttcaatatttaaaaggaaaaaagtgctgacatggcacagtatttttgtttaaagtacctcctacttcaaaagttaagcgcaattttgtgaagacatgaaatcataagagtacttaatgtaaaataaaagactgcatattaactctaaagaaaaatgccccacattttaaataagaaaataaagatcaactctgctctctcaggctttttaaaaagccattcatgtatgtgctttaggtatttttatttctgcgagttggatgtggtaagtgaggagtgctcagtttttttttcctccttcaaaagtctattgaaagtgttggtgatgttaaatgattgtgtgttaagatttgactgaaataacttagccacaaatcagcagtttcccccaccctcattgccccctcaccccaggcaagccccttttatctgaatgtcagaagcagcctgcctcctagttatcatgtctgatgaggtctagctcaggaaggaattccatctattgatggaatatatcccctcaagttcaatagattcgaacacagagagctttgtttaaaataatgcagcaaaaaaaaaaaaaaaaaaagcaaaaataaaagcatcagctgaggtgatattagttcagtcacctaacaactcctagaagagatgaggaaagggaaccttctgctgagctggcttctggggcctgagcttccagagctgtccccaagggctaggaaggccgacctgaaggatgagaacctcaaattcagttgctggtgggagccaaggaagacggcgggtgttctaacatggccctttctggctgagctggcggaagtgggcgttttggccgatgggatgtatctcggcgctgtgtctgtggcccagcaaaggtgcagggctgactggctgagccactgggttctacccgcaggctccccactgcactgggctttcacacagccatgctcttgggtttccctcccttgtaagcagagtcataataacacacgaatagtctaaggctgggtattctggtcagcagaggtccttgagtcacagtgttactgaaatggttctgagcctgagaatctctttggcctctgaaagggcagggcaggtgggcaccgacttcctgccagtcctttcaggtttcctgttcaaagccagtcctgttggtggaggggatcaccgagagtgtctgtatcattttgtagcccttttctctgacgttttctggtagaaaatgtcccttgtcaaaatgctaataattatcataataatctgctttccaaccaactcccacaagtgacaacctgtgtagaactgtgataaaggtttgcataatgtagggtttgtaccaagtgtgtgtaagtttctgttaaataaaaagtctgtttccaatgc

SEQ ID NO: 1757 - DNA, 3282 bp, Homo sapiens
aatgtacaggaaaggacagtgaagacagggagctcaagtgacctcctccagggtatatagctgtggtgtgggaagcatcatgagaacacggtctttgatggggataattactctgaatctaccaggctgattaagccacagcagatcagcagcactcacagtgtgtgctacccttctgcatggtggaattgtggggaagtaactactagccagagactacctcaaggcctctttcatcaaggagaggcccatatgattagttttcaccagtgagctagatacagaggacctaacatacaactcagagtccctagaagatggagaaaacacagacaattggcagaggagatgagcatgtgattattgttaccacttgtctggaagcaaccagaatggagtggggaagactcaaggaggagatcttcacaggactcacctctcatcacagctcccgtgtggttgtaatcaccccagagggaaaaataatttcggttttttatggtttaattattggtgatagcagctgttttgaagacacaaacacagaagcaagttctagaacatactcacagtttccttggtcacagtgttgtcagtggttctataaaggtcttatgaatctctacttagttgaccacaagtagtaagcaagaaacaatcctgtaaagagaatggaggtcagaataaagaagccttgagggtttaaatcgcttcttgaaaagaaatgcccgtgtgtcaaggagctaagggagaccagcccaggaggagctgaatcctgccaacaatcacttgagtgaacttgagagtgaatcctctccatgttaagccttgaggcctgactgggtgtccagcactgggggaagatgtaggaaaaggagactccatcgtctttccccgggcgcaggaagtttatgtgtatgaggcagagtaacccaaggatgccaaggatccaaatgagaggtatgaacaatgtgttttggaaatggtcagagttggggtcaggagaaggcttcagagaggaggtggaatgtgggataggtgagattctcataggtgaagaagtgggatttgcagaattgcccctcaccctccactaacctttggaaagtctcaatctatatgctctttcatagtctttatccttgtttgtctgaagagcacaggatggtgaactgtccagacaaaggactcaaagaaaaaagatgctcaggcaatatactgcagggcagatgaggcactggcctgcctggaatgggctttgaggctttgctcattgatttgccagttaaatcccactcttgagtgattctcacagctgacctgaatgccctttgggatggccacctgctggctgcaccttcctctgcttatgtccgctccacatgcccatctgctctgttacagattccggtcagtgatcctggactgaaattttactctctctcctgatcagaaaggaaagtgattgtgctttccaactataaatctatttagtaaatatttactgggtacctacttttagcaaggcaccagggtaaaaatgtttgaagatctaaaaatctgcaaatacagtctgtctctttcctcaaagaatttgcagtctcttcatggagtggagttaaaaataaatacatgaatgaagatgctgcaagccagtgagatatgcacccagagaagagtaagcaatgaggtgggagttagagggaggagctgtcacttctggatggagggacaagggcaggttttttggggaagagtctgcgcagagcaacaggacttgaaattgagggaaggcagagctctaggttttatctaaaattctgcatgtggagtggcagttagtagaagctgattctcatgtcatttctttctcaaatcatttcatgtgttttcattactgaaaacaacccatctaaaggccatgataacttctggaaaaagtccatgctaatttctggtttacctagagctctcccagtttacatattattaataaaccttctttcattgtacaaactgtcatggtttgagagatgaattatataggcatcttaattcttgacaatgctttcagcagcctttcagaaattctaaggtcacaatgttggattagctgtttaagctgcaagcaacatggtagattttgggaagggatgtaagcttgaaccaagaaatcccctttattttgcttctaaatcaacatatacaaatcaacaaaaataagaagccaaggcaccctttttgcctagaaaagaagcaggtgggtgtgccagtcatacactcattgctgaggtatgctgataacacagcaatgatcatggataatctattaacacacttgagccatactcagtcttgttttgcagataaacatagtctgtgattattttacaacactgttaaggtgcagagggttgtccctcatttattacttgactaataaatactttaattacacttaataaataatgtaagcagggctcactgaagtggtaattctttaaattaattattaactgcatgcaaaaggctgcactgccagtaccactaaaagaaaattcaggctttaatctagtgattattcattatctggtataaaggctccatttgcatattattagggaaataaacttcggcctccttggcaatacagatagatctcaaagtccatgcattatgaatctccaaatactaaagcaatgataaacaatatgtaataaaatcctcagtttatagctttatagcagctggtttttgatttttcaaatatattacaatgataaagtgaccagttaatgtataagctctttgtgaaaggtggtgcctacagatggtcgactgataggaaacagtaaatgtgcaaactgctcatttcccttgagattggagtcataaagtgatctcagtaagatatgagaagaaaatacccatttaacccctttctctgcagcaacccaaacatggtagtgcactgaattgttttgtatgtgtctgtttctcctctcctctctggcttcacatcttcactttggaaaagtgaaagcggaatacctggttatccggaggtcactgtctccacacagagtggtgtccttgatgctagcttggggcaaagaagccaggccagcttgtggttgcaataggaatagaagagacttccttactccagtcccaccctaccccctcatcctgcctcaaccagtcatgcagagagatgctgaatggctgcctgctctcaggggaatgatttgtggaggtttaattaaaataatttaatcaatc

SEQ ID NO: 1758 - DNA, 3294 bp, Homo sapiens
attatgcaagcagctagcttaagggctggtatactgcagattgttgggctcaaaatcatcagaaatgtggaggctttgaaggccttccttagaaattcaagggccaccatggctcaccagtggtgttatggtgcaatgggcgctccgcagtttggactctcctatctagaaggctcagcaggtcattctgccaatacacctgcattccacatccttggggaccatgtctggatggctctgatgtgtcccatcttagtggaagagcaccgcaaggcgtccttccttcactttaaggaagccagagagacctgtgaagtcttctcaacatccctggttcatccatagggaggtttgtgaccacagggtagcttttctctctcttgggactttgagactttggcagaataatgtaaggatgaaataaatgattggtgtttgtttggtggtagcactggaacagatggtgaggaactattgtgcctgatctaaagctagctggttcctgtctgttcccagcctagttcttcaaaacttcccttcaaatccttgaaccccccagcatcctttcaatacattatcttttttcatgggcttgcaagagtaggtgcttgtaacaaaaccacctcagctaatgtgggtccatgatgccaatcacctcattctaattgtagtggcagcagatataactctggaatttagagactaagccttctacgcaatggagctgacatggtatttggcacattctaagggacaaggctcatgttcagggatggggcctactgatttgtatggaaatgacaactcatgcctgcaaagtggaaaatcaataaaaattattctgcaaccccacaaaaagtccccaaattttctagagctatccaggaatttctctgggaaggagcaaagataaggctggctctgttccgtcaggcagcagctgtaattatgagccaacagcttcagctcgtctgtcatttgggccaggagcactgccaagtttctgaagaatttcatgttttcttttcgcagaggtaaagagtggaactgaccagactccatctagtagtcttaggtatatactaaggaatgttgaaacccatccctcacacagtttaatgatggccaatgacaggcctggccagggttggcttaaataaagatggggactctagagttgggatttctgaggctagaagaacaggtaaaggtctaaaattctaggagataaacccaaagaaacaccaaatatgtggaatcaatgcaggtgtagaaatcttgccacaggtgttcagagataagagcaaaggcaagtgagccaggagcagtgaggcagcagggagcccttgctgagtgactgcccagaacatccagttgtcacttgcaactgatttttgcaggttagtccatctcttgtgcctagatggattcagggtcatgaacagagcagacaaatgagacagtaaaagcaagaaatagagattctgggtgaatcttcagcaacacaggcccctatgaaggaaaccatctgaacaatggcctggtggcccttcactattgtgaaacagtctagacatgagtccagtgagctgggggctctgacaccaatcagctctgtgaccgtgtcttataatcactgggcctcagttttatcttctgagaatatctcctccacctactttgcagggttattgcaaagatcagataaattataaaaatgtcagaaatcataagaaatccgaaaatgctgcagaaacctaacagcatcgtcaagattttctctcttctctctttttttctttttcttttttttttttttttgagatggagtcttgctctgttgcccaggttggagtgcagtggcgtgatctgagctcactgcaacctccacctcctgggttcaaacgattctcatgcctcagcctcctgagtaagctgggactacaagtgcgcaccaccatgcctggctaatttttgtgttttagtagagacggggttttgccacgttggcgagtctggtctcgaattcttcacctcaagtgatcctcccaccttggcctcccaaagtgctgcgattacaggcgtgaaccaccgtgcccagcctagatcttctcttttaaattgaaaaactaatgtttttttatttgcctgtcttgtctgcagagttcaaagttttcaaaaagcattattttctcgagagaaactgacatttcacagacctctgttaggaaatcaattgaagaggctaacaaacttgcataagctatttttaatgcgggaagtgagctaatgcacctgactccctacagccatcgctgtgacttaaagagaaaatgctcttgcgttgtaggttatggcttttctagtggctgttacaaagggggtccctccaactgagccacatcagctctataacgcagtgatatctggggtgtgttcagtggatagagccattgtgaaccccagagctctgtggacactacttgggttttgttttgtcattggatgtagtctggattccagatttaatgttgagagcaccgtccttgcatggtacctctaaaaagacaaaaacagctagaatattgtagtaataatatcttatatttactaagggtttttaattttacaaagcagttttacattttttctgcctgggtaaccctcaagctacaaataagctatgtgccacaaatttgactctaaattggttattggcattcagaatgcatttcccaagttcaagtgtggtcatttaactgtttgagttctgggtcctggggcaggacagaatgtggtcaaggagtgaagaagagaaagaacatctcctccttccctcttgtacacaaccgaagcttggtgaaaaaaaattcaaatggaaacagtcttcagaatcttcccttaaccattcctgagcccttctgttgtctccccaaccctttctttccaggctcctgtgcacagaccttgatggcctctggccatcaagcctgctccccccaacatgcacgtgaaaaacagccccgtgacgctgcttcccaatttgaatccttcagactggctgctgccatctccatcttacatgtggttgcctttgtattactatttgcactttgtattactgttagtgtaacttctccacacccaactgtagaccccactgagatccaggactaagccatattcatctttgcaaacttccctcttgattcctttttcagtcacagctcagagcacagtgatttgctaattattaaaaatactgacataaaaataaaaataaatacatcccct

SEQ ID NO: 1759 - DNA, 3460 bp, Homo sapiens
cctgtatgatcacctcaccatgctcacctgcagccttcccacctcccagcacatcacccacgctaagggccccacacctcccatcccaccctcccccatcctacctgttcttgtatgactccagcctgagggcatctctgtctttggttacctccttgatatactgcaaatacagaaaggttaagtcaggacaaaacaggcagaggagcagctggctggccagtaacaatagctataataactattccccagtcaacaattccttactctcaatcacagctgacatgttttcatggcatttccaagcctatagtctcatttgtttctcaaagaactcaataagggtggaagcgacggggaaagagatcaaatttatagctggctaccagaggcccagagagatcagagaatattgctattgttattacccttattactaccactgtttgaagctttgagcgcttcaccaggcaccatgctagcaatcccatttaattctcacaaccaccatatgagacagttactatttttacctctattgcgtagattaaaaaaatggggtattagaggttaattgcttgcctaagatcactcagacagagctgggatttgaacacccaggtatatctgattctctaaccctttttttcactgggggttgggacacagaaaggaaggaggaaattaactttttgttcactttttgaaagaatgataaattcacatagtcccaaactcagaaggtacagaagtgaaatatctcccagccaccctgtttctctctcctgagttttgtatgaatccttttgtggcaggccaattctccctgatagtcacacagacaggccttcatgacagtcacacagagagccctgcaccgcactccagttatacaaacaaatttccacagagctgccttaacattgagcaaatagttaaacctagggaaatccgtgcccaggtatcaaagctaaaaatgaaacatatggtcagtaggacccttgcataggcttctccctaacctggagcaagtcaaaataatagagacagtcttatattccttgtctcgggtcgacggaatctgagacgagtcaaggtaacagaggcagctgtttgaatagattcatcggagggtctaaggcagtctccagaccaagctgtaagggaggtaagatagaaataatcattcaggtaccacagtagacagaccttgaaggtaccagggccctcacagcttaatcagacttagcaagcattttttgcctctgaccttctagttgaaacaaaattagttatcagtggacttaggcgaatgctatactgtacgtagacacataaccccaacctatataaacactaagaatactgtaacatttcgagttggtctggtggagttatctccagccttctctctgtatccagttacagcaataaatccccttctttcctagtttgcttctcatttttgagcctcaagaaaacgcagccagacccagtctggctctgagaccactttcaagcatgttttatgtatattgtcatagtacttacacacaacacacacacacacacacacacacacacacacacggtccttctctctccacaaatggtaacatactaaagatactcttctgtactttcacagtgcaagtaccatatcccacacctaggatttggctaaggccacagccaagtgaaggcagggtaggcacttggcctctaagctctgcatccagtgctccacgtccaagctctgcttgctccccacagcactccccaactcatccacagcagccaactcagccgcaggctgcctctaacaaccacacacaaaaacaatgagaaatggcccatgctgctttctgggcaggacactccatcctgcagaagggacctaaaggtccctcactcctccacctgggaagctgggctgccaagggatggggcaggcggtaggactcacactgtccatgttcttctgctgcatggagacagcaaagagtccattacaactctcccacacactgctgggaatactgcaggccgctggccagatccatggactctcctgaaatgagagaggttgagatggggtccaaaggcctatcaaagcaccaggttgaaggatgacagggtgcccagattcccaccttcaaagtgcctggcagcacgttgcatatgatacagttcagtatttaattttcctttctcagacatcagtttgttggttctctgaatttgaacctttgggagaaaagccaagcaagtgctgaaagtgaaggaaagcaacattctccagaggacaggagggaacttcacaccctccactcacctctaactgcctctttagggttccctggttttgctggctttcttgcttttcctataggaagaggaagacaaagctcttactagggggaggcagagatggcacagcaaagacatgcccccagaattccaccaatgccccaggacaggcccacccatgggaccaggttatcagggaccctgtggggatgaggtggaacctggggggtgagccttcttcccaggctgggggtcagcaagacgagactagcacctctacatctgagtgccccccaaacccagcagtcatgctgtgagcaaagaaattacattactagtgtgattctagttgatccacaatttcttggttgtgctgtttccttgggagagtcaaaggaaggtgaccaagggtggccccctccactctattccccaggccatgaagcagtaggcaggggccaggagtggattttaaaggcaaagttctcagacccactaggatcatgaactggtaaactctcctcaagctcccaaggacagaggatttgggtctttgttggttttggcccacagccacagaactgaaagtctgaatctggattctctcaaaaggacagtgacataaacctctatgaggcaggaaaatagggtctggaggcagggaacctaaggctgtttcgctctgacttcctagaaccaaaatgaaaagaaaaccctaactttccatgtctaagtaacaaagaaccagaggctactacctctgaccttttctgtgaggcagatgggaaattggctgtctgcaacaagtaagactgattgctggtcaagtcttcatttgcaaagaagtataactttgtaacttcatcctagcctctgattggttgctttttgcaactcatcagattgtttgcacaggagtgtgacttttgtaacttcacttcagcctctggttggctgctttctgcaaccaatcagactgattgcggctaccatttcagttacatgaggtgagcatgaagtggccgatgggaaaattctggtgggtatttggaccaggaagattctgtatccaggcccctgagctgctgctcaggcccactcccacactgtggagtgtacttttgttttcaataaattcctgctttggttc

SEQ ID NO: 1760 - DNA, 2825 bp, Homo sapiens
agttcctttttttattccatggatggtgtgtttgggctggctcaccctgggatttctccggtccagccatgacccagactcattcactaaggtccgtatttgtctttcaaaggtatgtttgtatttcacccactttgcgtttcatggtgacccaatccaggggcttttccctggcacttcccacagcagagacatgctccttccttgcccgctaccctcaggggccagcagcaggaggtggcacttcacagtctggctgggggcctccctcagggcaaaatataattttatggaagaaagtgtttagcaatgctttcttgagacaggacctcgttctgtcacccagggtggggagtgcagtggtgcaattgagaggtaacagcatgctggcagtcctcacagccctcgctcgctctcggcgcctcctctgcctgggatcctactttggcggcacttgaggagcccttcagcctaccgctgcaccgtaggagcccctttctgggctggccaaggccggagcccactctctcagcttgcaaagaggtgtggagagagaggcgcgagcgggaaccggggctgcgtgccgcgcttgcgggccagctggagttccgggtaggcgtaggcttggcagccccgcactcagagcagccggccggccctgccggcactgggcaatgaaggacttagcacccgggccagcggctgcggaaggcgtactaggttccccagcagtgccagcccaccggcgctgcgctcaatttctcgccgggccttagctgccttccctcaaggcaagcctcaggactgcagcccgccatgcctgagccttcccccgcctccgtaagttcctgtgcagctggagcctccccgaggagcgccgccccctgctccacggcgcccagtcccatctaccgcccgagggctgagcaatgcgagcgcatggcgcaggactggcaggcagctccacctgcaaccccggtgcaggatccactaggtgaagccagctaggcttctaagtctggtaaggacgtggagagtctttatgtctagctcagagactgtaaacacaccaatcagcatcctgtgtctagctcagggtttatgagtgcaccaatcgacactctgtatctagctgctctggtggggccttggagaacctttatgtctagctcaaggattgtaaatacaccaatcagcactctgtatctagcgcaaggtttgtaaacacaccaatcagcaccctgtgtctagctcaaggtttgtgagtgcaccaatcgacactctgtatctagctgctctggtgaggccttggagaccctgtgtgtcaaaactgtatctaactaatctgataagaacgtggagaacctttatatctagctcaaggattgtaaacacaccaatcagtgtcctgtcaaaacagaccactcagctctaccaatcagcaggacgtgggtggggccagataagagaataaaagcaggctgcctgaaccagcagtggcaacctgcatcgcgtcttgttcaacactgtggaggctttgttgttttgttgtttgcaatagatcttgctactgctcactctttaggtccacactgcttttatggctgtaacactcactgtgaagaactgcagcttcgctcttgagctagcaagaccgcgaacccaccagaaagaagaaactccaaacacatctgaacatcagaaggaacaaactccagatgtgccaccttaagaactataacactcaccacaaaggtctgtggcttcattcttgaagtcagtgagaccaagaacccaccaattccagacacacaatcatagctcactgcagccttgaccttctgtgctcaagagatcctcccacctcagccttccagatagctggaactatagacatacagcactatgccccactaatttacctcactttattttttgtagagacagtatctcactatattgcccaggctggtcttgaactcctgtgctcaagcaatcctctcacttcagcctcccaaagtgctgagattataggtgtcagccactgtgcctggcccatagcaatgcttttgagacaaggttttaaaacctgctactataagataatcagttatatttgccttcaggggtaatttacctattgtgttgttattaaaggagtctgttggtggtaactccttggcttcagagtggccgtctccttgcaaggaaactttgaagaatttagtcaaacattagtgttacagagaaggacccaaggtccataggaagtggagtgtaatacacaagttctccagtcatttcctaactccgtttttaacatctcaccccaatagtttcccctggatccaattaaatacacatgtcatgcttttattcttaagcttgcttcttcctgatttccttggaaatgttttccttctgctccttataactttttgggttgaaggctcagttcatttattttatttatgggatttttggtttttgtttttagtcccctttcctctcctctgttgctcacagtgcagacaactttgtgcagtggaaacagtgcagcctttggggcctgaaagtcttttgttttgactcttggttcaacttcccatgagcaactgttaagtctcagttttttcgtgtgtaaaaggaaggcagtggtagccctctgcagtgttttttgaagattaaatgggatcgtggtatgtaaggaacattgcgcagtgcctgatacatggcagatgctcattggatacctgtctcctgatcatttcccaccctgcacatgtacaatgcctacctacttaataaaacaaaaccccatggtt

SEQ ID NO: 1761 - DNA, 3472 bp, Homo sapiens
aggaatagggaagaggccaggagctgagaaaggaagagaagtcacatagttgatggaggcctctgagaccatccacaggacagtttgacatctgctttaagtgagatgggtgccatcgcagagtcttgaatggcagagggacatggctttttaaaagatcattgtggctgctgtgtgaacagggggacctcagatgagcagaaccaggcactcaactgtgagatgactgcagagatgtgcaagagggcaaggtggtgcctggatttgctggtagcagctgagtcagtgaggaatggatggaggccagtgtgtgtgcagatggagccaaacgagctgccgtgggaaggatgggttggctgcagtcgagtgggaagggaggagttgggtaacttggaggattccagcctcagcaactgggcagaaggtgatgtgatttttctgaaaacaagggagaaatgggcttgggaagggaaatttgatttgagacatgctaattaaacatccaggagatgtgaatgtggagatcaggggagatgtcaggcaaaaatataaatataaatgtgtgggtcatgagcatatgggtggtgtttagagccatgaggccagagtgtccctacatagaggaagtgagtgtcatggcactctagccatcagagggcaggtcaggtgagtagtgaggaagatgaagagagtggtatttgaggaactgagtatagaaaatgctccagggaggaaggggggatgattgctagtgcgacaggccaaatgtgagctgagaataggagaccagatgtggcagtggtgaagccaccagatgacaagatggaactgacaagaggggcagtggagctgtggggatagccggaacggagtgcattcaaggcagagtggagacagcaagtatggacaactctgttttgctgtgaagataggcagagaaatggagtcccagctggaaggctgtgggctcagggcatggagatgggaatgattccatagagaaaggcttgctgctgatgctagagtggggtgggggacctcaagtgagaaggggttggtcttgaggggcacagtggagggctgccgggggaacagtttgagcagttgtttatatagacacagatgcaagttgaatagtggatttggtgggcagaagatgtgggtgttgtagtttcttggcgactttagaaacaagagcactgctgaataaggctagtaggctgggggtgttggaggctggtggagaaaggaggtggtgtgaaatgtcttctgtatttctagaaagttggaaaagtgaactgatgagggaaatgcagacacagtaggtcaagaaggcggccttaagacttgtggttttagatgaaaagagtggccaagaggcagattttgcccttacagtacacatgtgcaggcccggaacagaccaaaagttgtgtctatcctgagttgggctttaaccaagcaagtacagttgacggagagagggacaggaagattggtagtgtgaatgaaagaaggcaacaaagatggctgtggaaatgtagctgagcggggaaggggctcagagggaagatggtggggccagtggactggcctggaatcatgggattatcatagcaagaggacaagattggaggccctggcatgaaccaggatgtttgaaatcacaatttcttttttttctcctcctaacccactgtatcttagaagaaatagcaatttctgaagtggtgcagtgcatgggtgtgacctgagactggtggctgaggagggtgggcgatgaggtcagtgaggtgagggaacagagggctggagtgctgattgacagcaggagtagtggctgacaggagtagaggggctgaacctagagttgtgtggatggagggggagtgatggggccaaaggaggaggctgcaggtgtgtgtttgtgtggtctgatggtgcggtcttcagagaggtggggatgttagaggtggtctaaagggcaccatgagaagcaaagacaccttttttactgtacaccctgaggtttggtgggttagagaaaccacagcagcctgtgagagctgctgccacacagtgaccatgggcaacaggcaggtgctattggaacaagcagggagtgcaggctcagggaaaaagaggagaggggactggctgcctgcagacaggtagctccacagggcaccgatagggtttgggacaggtgggatatgcaagcctaaataggtggtagatgattccaggtgccagggtctgtccttgggccttgagcttcaatcctaattcccatcgctgactccaaggttctgcttggctgctgcccactgccttcaattcatacataaggacccagctctccattccatgtgtctcctttgagaaagaaccagcctagaggctgaggtggggtggtgcacttccatcaggagttcattggtttgagtgggattggcgggcaggggctggggtggacaataatgaagtcttttagctgggttcgtatcttacttggttgtcatgacccatcaggtaagggaggtccagacgggctccatgatttggataacaactaattagaacctgagcctcctgacctccaatactggtgcactctggtgagggacagtgggtggggtgggccaaggaggggccacagggtgggggcagatgctggagtgtccctcatatgcctgcagacacccgggactacatctgtgagttctgcgcccggtctttccgcactagcagcaaccttgtcatccacagacgtatccacactggagaaaaacccctgcagtgagtgctggggtggggtctgagggccaggggctagaagggaggaggtggagtctggaagctaggcatataggacacctaggcagtggggagcaggaggaaccccctagggaagtcatgatggcctgaggccttgttccttccctcttctgtccctgactccaggtgtgagatatgcgggtttacctgccgccagaaggcttccctgaactggcaccagcgcaagcatgcagagacggtggctgccttgcgcttcccctgtgaattctgcggcaagcgctttgagaagccagacagtgttgcagcccaccgtagcaaaagtcacccagccctgcttctagcccctcaagagtcacccagtggtcccctagagccctgtcccagcatctctgcccctgggcctctgggatccagcgaggggtccaggccctctgcatctcctcaggctccaaccctgcttcctcagcaatgagctctcctccagctttggctttgggaagccagactccagggactgaaaaggagcaacaaggagagggtctgcttgagaaatgccagatgcttggtccccaggaactaaggcgacagagtgcagggtgggggcaagactgggctgtaggggagctggactactttagtcttcctaaaggacaaaataaacagtattttatgc

SEQ ID NO: 1762 - DNA, 3547 bp, Homo sapiens
cttatacaatacaactaaaaaccggatatatacaggtaatttataaattaaacacaaaattaatttacttaatcatctccatagttaatgccagcatttctcaggatgaaggacattgatctattaaagagattagtatctctcccagatgagctgggttgtacctgaagcagggattttggtggggactgagagtacagctggatccacctgggcgatttgtcccatgtcattgcacgacaggcagagaggaaacagggattctgagaatatgccccccaaatgcctgtactcttatctggcagaaccacagcccttagagtgtttcagagacagccagttggagttttgcgtggctgctgtgccttcgtctggtgttgtggtcccacttctcaggtcactagaagtaagagtaacaactggtaatgtgtatccagcactgaatatgcatcaggcactattccaaacacctttaaggtatagtaacttctttcatcttcaggaagactctatgaggtgggcgtgatgattattcccattttataggtggacgaatggagggacacagaggtcatttgacttgctcaaggtcacgcagctagtagaaggcagaacctggaatttttaaaagtttatttttatgattatatatattttttgagatagagtctctgtcacccaggctggagtgcagtggcgggatctcgcaccactgcaacctccgcctcccgagttcaaacgattctcttgcctcagcctcccaagtagctgggattacaggcgcccaccatcatgtccatctcgttttttgtatttttaatagagacagggtttcaccatgttggccaggctgatcttgaactgttgaccacaggtgatccgcccgccttggcctcccaaagtgttgagattacgggcgtgagccgccatgcctggccaagagcctggatttaaacttggactgtctggctcattagttcttgctcttaacccctaccccatcaggccttctgccagccaggttggtgggacagcagggatttggattcaggcctgccagactctggtctttctgctgtcctgtgctgcagtagctactggaaagacacaaggagtgggagttcccgactctctttctgactggacatttgagagtggggttcctggctgccccgccctcccctctgtccatgtccatagttactgctttcacctgggcttgtccctccctcatattgaggcccagagtctgtcctgggagcttagtgaagggtgtgaatttcaccctcggtctagtgtcacattataaggcagtcagagggtggagctggggtctggccctcctctcattaatggtgcactcccgggaacctggcctcaggccttccgggaccctcactctctccctgtcctttcctgtctacccctagtgtttcacttcaagcccactacggtggtgacaagctgccagccgaagaatccaagagaactacatagaaggcggaagttggaccctgggaagatgcatgccaaaatctggttaatgaagacgtcgctcaggagcgggagggccgctctgcgagagctccgaagccgtgagaacttcctcagcaagctcaaccgggagctgatcgagaccatccaggagatggagaacagcacgaccctgcacgtgcgggccctgctgcagcagcaggacaccttggcgaccatcatcgacatcttggagtactcaaacaagaagaggctgcagcaattgaaatctgagcttcaggagtgggaagaaaagaagaaatgcaagatgagctatcttgagcagcaggcagagcagctgaatgccaagattgagaagacccaggaggaagtgaacttcctgagcacttacatggaccatgagtattccatcaagtctgtccagatctccactcttatgcgccagctgcagcaggttaaggacagccagcaggatgagctggatgacctcggtgagatgcgcagaaaggtcctggaatccttgtccgacaagattcagaagaagaagaaaaaaattctgagttctgtggtggcggtgagtagccagttgctgtgtgggagcggggatccaggtctcacccccaccccgccctcttccccatcctctgcctccaggcccactgcagccccatcggtctctaccatgttctgctgcccaggaagaggcacctgggggccagacctcttcttcctccacaggaaacccagcgtccctatgaagaggctctcctacagaagatgtggggaagccaggacttcctgaaatgcatgcaaaggttcagagaagtgcgtgggcaaggaaggtggtggtccctgtagggaagcagtggatgggcagtccccacggcctgtgggaatgagtcaggcttctcctgatctggcgctcaggaggtctctgattctggtgttggcctccctccttgccggtgccattactgtcacttgtctttcatctgggaaggcgattggcactgacctaggccttgcctcattagccagcaatgctggctaatgacccatttacaaccatcaccaaacatcacctattcagccattaaccaccgtgcatctttaccccttgattcttgttactgcccaccacccattatcagtgttaatgaacttcaccatcactgccttcttgaattaattttcattatcttgcctcttcactggtttttaatgtgcatgcccttcactatctctgccagcctccattcattcccacgattgagcattccccgccactttgtaacctgtctccattctccatgatccctcacctgtttcagcaccactgaatattgtcactaacttggaagccagccgcaccctgcatggggaagtcccctctctggagtccagcaagtcccagtgacagaacccataccatttccccagatagctttgctcctcgttcattttggcctttctccctttggttgggggccatttgcctctcccttctcccctgctgtgcctttcctctcagtttattgaccagtttgaggagaacatgcctgtattaagggccgaggtggaagagctccaagcccagacccgggaaccccgagaggtcatatttgaggatgttctgcttcggagacccaagtgcaccccagacatggatgtcatcctcaacattcctgtggaagagccactacccttctagatggcagtgccatgggccgccctcccctcctgctctcttcccagcacctggagccttggatcatttacttccaggaccggatctccattcagaccctgatctacagtctccctgttccctctgcccttcctccctctttctttccctccctccctccctcccttcttccccccttcccttccctcctccttccttcctcctctccctccctccctcctttctttcttcctgtggttttttcctctcttcttcccttctttctggttggtgctgctgggccaggtgggaatttctgattaaatctgctattccttttttaccaataaagctggatttacattt

SEQ ID NO: 1763 - DNA, 2908 bp, Homo sapiens
cggatggtgacaccaggcagactgggtgctgtcataggccctccttccacagagttcatgcacccctgtgtgcaccaggcctggcgtggagtggagcccacttgagtggagggaggcagagcgtggcgacgcgcagggaagtgcctgtgactgagaaggcaccccctgcaggcccagagcctccatggtgacagttctgagcgcagcatgctgcccacgtgcagcacatccctgccctgtgggattgttagaaggtgcgctgtggccggcatccctgggacaggatgggacgtggcatgggctgggtgcctgcagtcctcctgccgtacccaccatgggcccaagcgccaccaccccttgccttgcccagggctgtctcctcccttccctcctccttggcccccatgtccctgttcaggtctttcctgaaccccactctgttcctggagggggaggcgtccctcctggggctctgctgccaagttcgtggtgctgaccttgtttctgagggccatggcccctccctgataggtagaccccagcgtgaggacgtccatttcaccctgcgttccctgggcctggctgctgatcgagggaagggtggctgccccggcaaaaggggctgctagctcctggcttgagagttctaggatgagttggtttcaggaaatggagagaattctgaaagtcctgaaggcagccctgatgttggtcttgtgagtgtggtggtttgacctgggctctgggaacagacttggcttggaatcccagctgcactgttcagtacctctgtgaccttgagcaggtgacatggcctctctgagcctcaatctcctctgagaagcgggttcacactaagcactaagcatggcctccctgaggtcagaggtcagatgcgtgcccagggcttggtgaggtatgtggcaggagtcagtgtgagatgagcagagcctctttttttttgagacagggtctctctctgtctcccaggcaggagtgcagtggcgcaatcacagctcactgcagcctctacctcctgggctcgagttatcctgtctcagcctcccagtagctggaactataggcacacaccacactctgctaagtttttattttagcagagatggggtctcactatattgtctaggctggtcttaaactctggctcacgtgatccgtcttggcctcccaagtgctgggatttcaggtggcagccgccacacccagtcaaatggagcctcctgttacaacaaggctgctcagggaacagtaacttctcggtcctaatacttattctttcccagggaggctcagcctggtgtggcactttgtgttgaaccagtgagtgaatcattagaatccttgttttcctcatagaacttccaaccaggtttattttcacttttaactttgccattgcctaatgcccaaaagcaagtgggaactctgggcctccccagctgggtttgagcaggtgctggggtgttccgcctgcagcctcctccccgccgccccctcctcccaaacccggtggcttacggcaccagcgtggcctctcccagctctggaggccagaagcccaacctcaaggtgtggacagacccacgctccctctgcaggctccagggaggatccttcctgccttttcccacttctggtggctccacgcactcccgggcttgtggctccagtttctgcctccgcctccgtgccgcactgttcctgcgtgtctgtgtctccatgtggtgatttcctcacagggacaccagtcattggattaggacttaacctgtgacatcttaacttgatgacatctgctaagaccctcagggggcgacacagttcaactaagaccctctttccatccgaggtcccattcacaggtactggggttaggacttcaccctgtcttctgggggcgatacccttcaacctacaacagcccttggtgagtgtccacaacgctaatgaggtgagagtggcatcccctcaagcgaacaactttccccaaattgcagccagatgtggcccagcaaagagccagggtgcagccatcagcaagcagagccccccagttctggagggtgtgtgccgagatgcttctggggaaaggcctgggcctggggctgggctgcagctgtgggacaagctgctgtctgggccaggagccactcagcgtcgccaagctgctgtccaagttaaaccaattcagcatctggcaccttgtttacaagcgtgatttgggggtttcttgctctccagctggcaagcagctggcagtggtcagctgaggccagagcctgggggcacatctcccatggcagcccagagggcaatggacaccccccactccgcccagccctgtgaccccatatggatgctttcgctgggtgaggctgcagcccccgcagggagtgctggacttgggcgcttttgctttacctgggacttgatgagatggggcacccgagaccagccacgcattccacagctgtgccccagggtccaggggatggggctgggggtggtcggacaaaaccactgcccacacttggagctgggggcagccgaacaacaccactgcccacgccttcctggcgagagacggttccagtctccccggtgctggcgtgggcacgccgtgggacagaagcgcagtcattcggcagaggctcccggctgttctcacattgtcagacccaccgtcaaggtcatttcaacggcccctttgcccggccgggcctcctgagttccctctgagcctcagagcagctcgtacacacagctttgggtttctaatggggatggggtcttcaggcctcagccccttctgggcatttcttccgttacaaaggaaaggaaatgtaccgaacactagaaacagtgtttaataaatagcagatttctc

SEQ ID NO: 1764 - DNA, 4015 bp, Homo sapiens
tttccaatttttcattagttgtaagttctttctgatgcagaatctagtccagatcacacattacatttatttgcctcctgagtagctgggattatcatgcccaactaatttttgtatttttagtaaagatggggtttcgccattttgtgcaggctgatcttgaactcctgacctcatgatctacccgccttggcctcccaaaatgctgtgattacaggcatgagccattgcccccgggcttgcaagctcttttttaacttctcttcctggacaagtctctgttgtggctctccttcagtgtctctggccagtcattctcagactgggaaagccaggtccttctcctccttggccttctcatcatccatctccttcctcctgggccactcttctgtcctcatttattccgggtttttccttttcaaaaacctgtttcattcttatgtatcctgtggacttgatgaaatcttacatgacttcatacaatcacatggcacgcgtctcctggaaagttcagagatctgtctgttcattaaccccctccagtgggactctcattgatgtggcagcagcaacatgaggaatagaatcagaaaacatttcctgtagccatttggctcattggagtgaaggaattttttttacagttttcaagttatgctgttttctaaagttttgaccatttatttttatgtcacagagatgaaattgattttgaggtcttatttttgttacacaaatctagaggagagtgtgtcagtatctcttctaagtattagacacattcatttgctttttcctggaggaaaacatgcaggaacaagaacccaaaattctagatatcattaattttttaaatttaaataatttctaagagaaaagagacgttatccatacaataattatgcaactccagttattattattattagtattatttttgagacagagtctcaccctgttgcccaggctggagtacagtggtgtgatctcagctcactgcaacctctgcctctcaggttcaagcgattctcctgcctcagcctcccgagtagctgggattacaggcacatgctaccacacctggctaattttttgtatattcagtagagacggggtttcaccatgtctgtcttgaccatgaggcctcaccaccatgtgctcaccatcataaggccaggctggtcttgaactccctacctcaggtgatctgtccaccttggcctcccaaagtgctgcaattataggtgtgagccactgcgcatggcccccagttatgtttgaatggttgctttccatcttgtgggtgtgttctttagcaatgaccaggctgaagcaagttcctcccagatagttccatctttgcaaattaagagaaagacagctagtgtggataatggaagggtgacttccaatgtattctctggaattttagtgaaaaaattaatagtgggtacagctctgcacagatgggctcccttggttcatgtgaccacagatgttttggtatcgtattgcatgtgatttctgtagctgttaaggtattcccatagtaatacttatgtggacacgttcttgtaaaacttcccaccaaaattcagagtgaaaaaactaacatatcagggtgaaattatctcaggatgcaatatgaagtcttaagaagtataactattcatttcttgtctaaattgaacttgaatcttgagataatcccagaaagttttgacctcgccctgcctccgtccttaaatacattcccttgagttaggttgagccatcagactggtttgcagagtgcccagtcccaaaggctgggcaagagaccggtctttggtcttcatgactcagcatccagtctctgagggtgggtgaggctcagtcctcagtcttggtgactgtctttgtctgcttgtgctgctataacaaaatactgggtaatttataaacaatgaacatttatttctcccggttctgggggtggtaagtccaagatcaagttcccagcaggttcagtgtgtggtgagggctactctccgcttccaaagatggtgccttgttgcagcagcctcaggaggagatgaacgtcgtgtcctcatatgctggtgagcatgggctgcggggtctcgtcctcatctggggtgtccgtactggtgagggtgggctggggtggtctcatcctcatctagggggtttctgtagcagtgagggtgggctgcggggtgtcatcctcatctgtgggatgtccgtgctggccatcaccgagttgagcacttcccatcctggagtcttggccacaaccctcacatacagacaaaagtcgatttgggtccagcggctctttcagcacgtggtgccaacctaagacatgaggcctcctgctggagctccaggaaactctagtctctgccctcctcttgcatccgtaggatcgctgggctgctgctggggcttggcaatcctcagagaccttggacttgtctgcttggagataaggcacagtcatttcatctccaactgctgccaagccctgctggctggcaggacatttggactctctctccctgggttttcccaggacagaggttacagatccttcagctcttaggctgatgtcacttccactccttgatctcagcttacaggaaaggtggagagaaaaggcgatcagagcagagtccctttctgaagacacacttggtcctcccctgcctgggtctgcaggggtcagaagcatttccatagcagtcattttcatacaggccctggctcccattaggcaaccttcctctttggaaaacccaatagccaggaatttaaaaggcaggactcttttctcttaattttctcctgaaaaacccttccctgaggcaaccagacccagctgctgcccaaataggaaggaaggtcagaattgacaggaattcacaaggaaagagagcataggtttatatttcagggtatcagtcatgcggccatgggatcagatttggaactctgtgattaagctaatttctggcattaggctcaatccctctgtgacagagaagtgtaaaattgtcaaaaaatgagcattattttagcaacacaatcctgacactatgagagggagaaaactgggttggatcaagtattcatcttacccagtaagccattataactcaggcttttgatgcatattttgggctgttattcatcaaggtggtcaaagtcatgaagaactgtatgttattctataatatactttctatattaagtctgttcagatgataccacattttctacatcactgatccattaaaaaaaaatctttctttgaatgcctcttgccactaatcaggctatgatattcagtttttgagataggttaacaaattgaaaacccagctttaaatgttatggtagtttaaaaatagaagtgttttacttcaaactattctgagttgctgcttagagcaataaaaatgtactttatagcttgttaacctagatctcagggatatccgttctacaataatggaagtagatttgtttactgtctaaatcagccttgtcagaacaatgctctccagtgactttttaaagtcagagtaaaccaatacattctgtcttctgtgattatacagcatggcatggtgttctcttgtatacttgtgttttgaatatgagtaacagtctttagctgactttagcattttggagaaatctgtatatgtggcttctacttatataagcatctaccaaatatattaactgagttttatagtccggttattttccatttcagttacttccaagactcttcgatatgcacttacatacttcatactcattaaatgaagatattggaagctaccttattttgaggtacagcataaagcaccagcagagcttagttactacacattttagcacaatctcctgtaagttactgcatgctgcaaaagagctgaatgagtcaacagacattgtaatggtgatgtgtaactcataacctgaaataaactatgtcaaatcg

SEQ ID NO: 1765 - DNA, 3292 bp, Homo sapiens
ttttgaaaggtttatgtctcccgaatgccctttcacttcagctctgatgattggattcctgttttacttactgcagaattaactgtacaatatcatgcttacatgttcagtgaggatgaagtaaatgggcattatcaaagattgttgatggggttgtaattagtataatcccttttgaggtcacttgggtagtacctatcaaaataaatgtgcatgttatccagcaatcccatatctagaaatttatctgactgaaatattctgacttgtgtgcaaagacacacacaggtacacaaacatataatggtagggaattggttggctcgactggtacatttgtaactcttcagccctagagtaaaagtaagggaaatctatctgtatgacatgatatggcaagatgcccctagcatgttacgtacaaaaaggcagattgtatgtgtcctggatgtgtcacaagaagatgtgtatacttatccatttaagaactaattttaggtatacagaaaaagtctggaagattatacctcagttatttatgtttgccatgggagaggaaatttttactttctgtgcatttatatttaggatttttgtcatcaggaattatcactttttgactgaataaaagtttttaaaatatgctcacattaaagtttttcaaattttacaatgaaaatgacaatgacaaatcagtagaaaaagaaatgcatgtatcaaatgatgatgtgaactatcaacacaattaaatttgttattgcttttctgagtattatttctttaattgagaagattcaaattttggatgaaatcatggagggagttaatttaaagattacctttgcttttgtcttgagtcctagatgtcctcctaacctaattctgaaatagatcattgtattcagcttgttaatagatttttttttttttctgaactgctgtttttccaactttgttttaaggaataaacatcatcctgaccttcatctctgggcttgttccgggaagcgaaaagaccaagatcaaataatagctggggtggagaaaaaaatagctcaagacacagttaatcgagaagaaaagaaatatgtacagaaccataaagaaccacctcgtttgcccctaaaaatggaaggaacttatataacaagtgagcatagctatcaaaagccacaaagttttggtcaggactgtaaatctctcgcagaccctgggagctcagatgatgatgatgttagtagtttggaagaagaacaagaattccacatgagaagtaaaaacagtttacagtactcagcaaaagaacatggaatgcctgaaaagaatccagctgaagggaatacagtatttgtttataatgataaaaagggcaccgaagacccaggagactcacatcttcagtggcagctcaatctccttacacacatagaaaatgtgcagaacgaagttaccagcaggatggacctaatagaaaaagaagtcgatgttctggaaagctggcttgatttcacaggggagttggagccaccagatcctcttgcaagattgccccaacttaaacgccacataaaacagctcctaattgacatgggcaaagtacagcagatagcaactctttgctctgtatgacaacagtgaacacttaatgaaagaatgtggctttcttcagtcaaagcatttttattatccacgtgatggctaagtggataatttaaaagcttagtaatgtctggtcattcactgatttgtgatgtcaataggatggcaccttggaaagaaaaatgaagaacaactttatcaaggaagctagtatttaaaaacaaattcatgagcaagctgcaaatgagaatgtgttatatgccaaggaacaatgaagtagaatataatgtatactaagggatttcaagttctcagaatttttgagtagttgcttacgtgaagctcaagatacctgtagaaagaaatatggtatatttgtatagtttttaatagaaagatctatgtttataaaccagcacttggccaaaaacaaaattgtaaaggaaatttaaattctggagaattctacagggttgctctaagaactgtcttctcagcagttgatccagctgtacggaaatttagggtatttaaacttttaaaggatcatgagctgtttcttgggcgatgaatgttctcaatcagaaaactgacagtagaaatctcacttctggggaaaacagttgtggaattcttacttcattatgaatgtatttaaaaaacaaacaccaaataattggaatatattgcaggcattaagctcattaaaaacaaactggcttgcagaagggtccgatgtgccaagtgatcatgattctgctggaaagaggattttaaatattgtgggagttctcccaccctaagtcttacataatgccaccagtccatccaaaacctatatatcacctatactatatatatcatatatatagttgaatggcagtattcaggctcaacgtacagtttgatcctgagtatgcttggtgtttgccttcagaaaaaaaaaatacattgtaaataacctcagctgggatgaggagtgacagaatatcaaaataatttgtggctgtggatttttttaactgctagtagtggaatactggaaaagcttcatttctgaagatgaattttatttttaaaaaatacatgcacactcaaaacttttagctttgatcacaagtggacaaatttctgaaaccaaaggcaactaagttgctgtgttagctcttgctggattttgagcctaggtcctactgtctgccagtactcatgtgagttgtatgtgcccccagtgctacatacgcaggtatgcgtaagtgtgtatgcttgttttaaacaaacactcaacgtacatatgtacataatctacacatatttatatcacatatctagttttattactatagactatacgaattggtggttaacatgaaatgttaccttttaacagactgtttttaaaaattaaaaatgtatgtataggttttgaaatttttttaaaaggggagaaagactgttaagaggaggctatttgatgacataacacttgaatattttatgcctcattctgtttatcagttctcgcaatctgtataaatgcattttagaactgatagacagtaaacttgaatttatctttgataagaatacatgccactgtacattcagatattatttaaatttgcaaacacattgttctatatgtaagggtactgtatgtaaaactctgtattaaaactattccacatatcct

SEQ ID NO: 1766 - DNA, 3959 bp, Homo sapiens
agagggcaaacggcccctccaggagggagccgggagattacgcagctccatgtaggtccacgtttaggttgggaggatctaccatgaagaaggtcaagaagaaaaggtcagaggccagacgccaccgagactccacctcccagcatgctagctccaattccacctctcagcagcctagtcctgaatccacaccacagcagcctagccctgaatccacaccacagcattccagccttgaaaccacctcccggcagccagcattccaagcccttccagcacccgaaatccgccgctcctcttgctgccttttatctccagatgctaacgtgaaggcagcccctcaatccaggaaagcaggtgggctgtcttctagcttcagcagttccagccttcctgctgatggagttctgggtcatcccaaaggctggttcttgtaggatagtgatgcatggttaacgtgtatcctggagctgtgctgtagagtgggaaggtttttgtttttgtttctacccaagagaccaggattcctgggttttgtcatttctcatcatcctgagtctcactgaagacagccacacatacatataaacatttaacttggttccatagtaatacttgctcactaggaatcagcagtgccatgcaactgctaaaaaataaaaaccaaggatgcatttatagaagtatatggtttagaataagggaggtgatgatactgctttattctgtcctcatcaagctatccttttgggctgtaaaagatgcctgacaaactagtccaaggaagatagtctgggttgatggaggacgagaaggatcagggagaccatttagtgtatgacagtcaattgaaggaattggaggatgtctgtctgtcaagtggaagatgtgaatagacttgttccttattgtcctcagagatctaagggtctgatgtggtttggctgtgtccccacccaaatctcttcttgaattcccaggtgttgtaggaaggacccagtgggaagtgattgaatcacgggggagggtcttttccgtggtgttctcgtgatagtgaataagtttcatgagatctaatggttttaaaaaagggagtttccctgcacaaactctcttctcttgtctgccgccatgtgagatgtgcctttcaccttccaccatgattgtgaggcctccccagccacgtggaactgtaagttccacaaacctctttcttttgtaaattgcctagtctcagatatgtctttatcagcagtgtgaaaacagacaaatacaggcccatggataggatagccagacaaaatacaagactctcagttaaattttaattttagtaaacaacaaataatatttttagtatgtgtgtccccagtattgcatgggcatcctatatttttatttgctaaattagcaatcttacccatggaagacattagtgacagaaagccttcggctcaacataaaaaacttcccaacaattagctctgtctgaaaatggaatggctgtcaggaaaagtggttccctgtcttcttgggagccaaacagtgtctgtataagcattggattgtgtagagggaattcaagtggagttcaggaggtgggctggtttatactactaacaataatggtgatagcaaactaacattatcactaagcatttactgtgtacctagcattcagatcaggtgtcttaattttcacacgtgataatcctataaaagttcttccatattatctccattttatagatggggaaactgaggctcataggagtcaaacaggttgctcctgagcagatgctggtagccctgaaaagggaaacccactctattctgactccagaaccctcactttaaaccacagcactgacctttccattccaagaggcctacgagtctccacaagaggaagaacatctctgtccgagcatctcctggatctgccatgagccagtgcccacgactccatagccttgaacaggccacactccctgggccacagtttaccccccgggattgtgtgggcataaaataaataagtgatggagatgagagtgctaaatataaggcatgccatgccaatgatccttccatggccaggaatcaaacctttcttgacatatgatattgattttgagcaccatactatatgttgtaaagattgtgatcatcagccagtgagagaaacatttctgggttatggtcttcagaactggtatcttcagtattggtagaaagcaagactttccattcccaagtcttttaatgaacacatgtgactcatactcagagaagaatttggcccattgaacaggcaaagcaagaaagcaagaaatggtggtggctcgccagtggttacagcagacaccctatacttcttccaaaggaattctctgcgtagaaaggaatgttggagatgaaggatgagggcctgcaagtaaagcgtgccattttctaaaatccaagcctttttgtgtgcagaaatattgtagctcaagaaaatgccagtcttccactaggatgggtataatcagaaggatggacaataacaagtgttggtgaggatgtagagaagctggaatcctcatacactgtaggcgggaatgtgaaatggtgcagctgctgtggaaacagtctggtggttcctcagaggaacatgaagttaccttatgacccagcaattccacttctcagtatacatccaagagaattcgaagcatcttattaagcatattagaagcacaccaaaacttgtacacaaatgctcaaagcagcagcatttgtaatagccaaaaagtgggaacaacccaaatgtccatcagctgatgaatggataaacaaaatgtggtatgaaataccacagtacaatgagtatggtgaaatactatttggcaataaaaagagatagtgtcctgatacatggtacagcctggatgaaccttatagacacttggctaagtgaaagaatccagtctcccagaaacccacacatcgaatgattctatttacatgaaatgttcagaataggcaaatgcattgccagggactgggggaaatgggagagtggggagtaactgctcatggagatggggtttctttttggggaaatgaagacgttctgaaattagtggtgatggccacaaaactttgtgaatatactaaaaaccactgagcactctaaaagggtgaattttattgcctgggaatgatatctcaatttaaaaacttttttgtaattaaaaaaaaagacaagtcttgcctttagaatcccctcccctcattccgggaaagtacatgtcgtgggcaagtctaagcagaaagtgtattgaatctgccaggttgaccacctgtttcatgcagcttagggtcagaagaatctgtagctctgtcaagaagccgcagggctacagataggaaacaggagggaataatccagccagaaattatcttgcccaaccacagagggcatcatctacattctgctgggatccataccagaggaggacagaaacagaaaataggatcgggactggaaactagagctgtggttgtcttctggatggatcagaatgctctagatcaatggaacgtggcagctccaattccaggaatgtcagtgcagcctctcctgaggtgggcagtcacctgaaattccattttcactgaattaaacgtgagaaagcctgagttgagaaagccaacttctgcaatctactccccaaaagggcatatcccttaaattagctgagcctcggtttccttatttgtaaaacaagaccagcagtatcccctttacaggattactgtgaaattaaatgagatgagcatgctaagtgcaaagcatcctgaaggtgtaagccatggcaccatcagcaccacctccatcatcatcatcgttgttgtcgtcgctgttgctactcccaggtagcaccagtataaaacagccattttcccatgcg

SEQ ID NO: 1767 - DNA, 3554 bp, Homo sapiens
atgcaacctccaccctggtgacccctcctcctgtggcctacggcttgtcaggctaatgggctcaaaactgaccaggtcttccccacaaacctggtcctcatgttgacaggtggctgcttcatcctcacagttgcccagaccagagcctcagagccgtcctggactcctgcccaatgtccacctggccctgctatcccctctccaccacacctgacatccagtcagtggtcagactccacagctgggccctgcccacatggcccaagtccaccctggcctggcaagctgcaatggcacccaggagatgatgccctacaccccagggagccttcctgggagtcggccagtcaccttctgtgtgcctggctgtggcctgctgctctgccctcgccatgcacctgctccatgatgaaagctcatgcagtgcctcatgagggagatggcagccagtacttgctaagtagatagatgagccagacgtgtggctgtctgccagcctgctctaacagcctgacccatggactgggtcactaagaaacagaaatttcccacaggacagtagacctgtatttcatccagttcaacctgtggctggaattgccccaaaagtggtggcagtagagttcccacaagggagtgccccacaccatcctgagatggggctggttaggattctacagattgagcatgccagggtgattcgcccagagcatttattcgtggggcttttgtacagagtgggctgcagcagttcttgcaataggcagtgagagaaatgaagttctctctaggtatgtccgtgggggagggggttggtgaatggaatttatatgagggtttgaggaatctggctcaggctgagtccagtttctttctgtgttttgagcaacaacctagttactgtcatctgtgcctgggaacgttcatggctatggctcgggttcaagtctgcagaggaaattatacagttggcgaagtcacagagtggccaagggactctgtttctcagtcagcactgggaatgaaagtggaaaggggaagcaggggtacgtcacaacctccaaaatcagggtgcccagcacgctgaggttctggtaaggggtttcttccagactgcagacttccttcccgctgccttcacacagtagaaagctgcacaaagctcttggggtcccttttatgaaggctctgtcctcatgacctagtcacctccgaagcaccaacgccttggggtgaggatttcacatgggagttagggtgcacattcagtttaacacggcagggataggaccagtgctctgagggtgtctgggtagctgctggttcatccagaagtttactgggtaatactcagaaattccacaaatcattaaggtcattaccttgttaagctcccgatatggaatcgcgactagcagtgaccaattggcggtgttaactaggcgcatcttgtgtgttttcttttttctttttttatgagacagggtccgctcactcgttcaggttggagtgcagtggcgcgaagtcctgggttcgagatcctcccgcctcagcctcaaagcgttggggctacaggggcgcgcgcgcgcctggcccattttaacttcttatttttgagacagtctcgctctgtcgcccaggcgggagtgcagtggcgcgatctcggctcactgcaacctctgcctcccggctcaagtgattctcctgcttcagcctcctgagtagctggaattacaggtgtgcaccaccacacccggctaatttttgtatttgagtagagaccgggtttcaccatgttggacaggctagtctcgaactcccgacctcaagcgatccgcccgcctcggcctcccaacttgctgggattacaggcgagagccactccgcccggccccgttttaaccatttttaaacttccagttcagaggcgttcccgcgcccggcagggtaggcgcagtgcgcaggcgcccaaagccgacgtggaggtgatgcgcgggagcacagatccggggcagtgcgctgcgcagaggcgcgcggcgaagccgagtgggcgcgggagtgacgtcacggcgcgcgacgcggaggcggggtcgggcctgggtccgacggtagtgggtagcgggtctcgggttgcgggttgcaggttgcaagccgcaggccccaggcaactgccttcccggcgccatgttcggctccagtcgtggaggcgtgcgcggcgggcaggaccagttcaactgggaggacgtgaagactgacaagcagcgggagaactacctgggcaactcgctgatggcgccggtaggccgctggcagaagggccgcgacctcacctggtacgccaagggccgggcgccatgcgcgggcccgagccgcgaggaggaactggcagccgtgcgggaggcggagcgcgaggcgctgctggccgcccttggctacaagaacgtgaagaagcagcccacgggcctgagcaaggaggacttcgcggaggtctgcaagcgggaaggaggcgaccccgaggagaagggcgtggaccggctgctggggctggggagcgcaagtggctccgtgggccgcgtggcgatgtcccgagaggacaaggaggccgccaaactggggctgtctgtgttcacgcatcaccgcgtagagagcggcgggcccgggacctcggcagcctcggccaggaggaagccgcgggcggaggatcagacggaaagcaggggagtttctcgggtcacccttgaagagaggtcctaagtactggcagtggtcgggcgctgtgccgtgggagggcactcaggacctggggcggggccttttcctgccgtgggtggcacctccagggcttctcctggatggtgagcctgggcctgaccctaagagtggcctggtgggtgcagttgtgagagccacaggaaaagcaagaaggagaagaagaaaaagaaaaagaggaaacacaagaaagagaagaagaagaaagacaaagagcacaggcggccagctgaggccacctcctctcccacatctcctgagaggcccaggcaccaccaccatgactccgactccaactccccctgctgtaagaggaggaagcggggacacagtggggacaggaggagcccgtctcgcaggtggcatgacagaggctctgaggcctgatggctggaccctgctcactgctgttgtgggaccctgaaccctcccttcaccttgcttgcctcctgcctcggaagctccttgggtgtgggtgaagcccgaggctgctcctgtggaagtggctctgggcaccagcctgtggggctaaagacttgacagctagctctggagcagccggcttcctggaaaacctccaggtttcgcataccagggatggcccctggcttggcctgcgaaggtgaacctgcccagatttatcagtagaggctggactccctctgtgtcctgcccatggttgcagcagccatgggcctatgagcggtctaactgtggccaagtatggtgacctctatttttctttatattgactctttgtatttcaataaatatattttaaaagg

SEQ ID NO: 1768 - DNA, 3869 bp, Homo sapiens
gtatcaaagagtaatggaagtcacaggccatttgcctccacttaatgaaactgccaactttatatctaattctaagattaaaacatcagacacaacacagaaaaacagttttcaatcacatattaacagtgtagcaaatgacatagttgaaagtgttttggggaaaatgtacttggtagttgtgacatcattatatgaaaataataaaagtaggacagaagttgaaatatctgaccacaatgattccttactaatgaaaccattaaggtttagagaaactaaacaagcaggaaaaataagtaattcccctagatatgcgatatcacaggcttattcttatgtcgacagtcaaaatatctctgtgatggaaaacactcttttgccatatttaccattgcaagtgaagaaagacttaattcaaatggttctcaataagatcacaaattttgtctcacttcctttaaaggtgagccctaaggacaaccctaagccatgctttaaagcacatttaaaaacaagatcaaaaattaccactttgcctaaatttacaaaaaaaacacacttaggactgagtgctgctaaggccaaaagcaaaaccaagttaggtcctggagagaagaccctaaaagacagcagatccaagactgccattgggttgtcacacatcatgtcagctggagatgccaaaaatttactggacacaaaattgcccacttcagaactaaaaatatatgccaaggatataataattaacatcctagaaacaattgtgaaggaatttggaaaggtaaagcaaaccaaagctttaccatctgatcaaatcatagcagcaggtaaaatagttaatacagttttgcaagaattatatgttaccaataactgcaatttggcttacccgatgaaatcctcacatctcagactttcacaggggaatataggcataggatcccttcctaaacaacaagcatgtttttacttggagaatgtttcttcacagctagagcacatttttcctagagaaggtatatttaaaaaattgtttgacaagtggcaaacagaatcaaatgacaaggaaaatgaaaaatgtaagctattgatgatagctgaaaatgttttgactgaaatttcaataaaagcaaaagaattagaatattctctttcacttttaaatttgccccctcttgagaattgtgaaagcaggctttataatcattttgaaggagcttctactagagccgaggatactaaagcacaaattaatatgtttggaagggaaattgttgaaatgctacttgaaaaactacagctatgctttctgtcccaaattcccactccagatagtgaagaaactctatcaaacagtaaagaacacattactgctaaaagtaaatatggttttccaaacaagcatagcctcagcagtttaccaatctataacacaaagacaaaagaccaaatttctgtgggctccagcaaccaaattgttcaagagattgtagaaacggttttaaacatgttagagtcatttgtggacttgcagtttaaacatatctccaaatatgagttttctgaaattgtgaaaatgcctatagaaaacctttcttctatccaacagaaactgttaaacaaaaaaatgttgccaaaattacaaccactgaaaatgttttctgataaatccgagtcaaatactattaatttcaaggaaaacatacagaatatccttctacgggttcattcattccattcacaattacttacatatgctgttaatatcatcagtgacatgcttgctgtaattaagaacaagctagacaacgaaataagccaaatggaaccatcttcaattagcatattgaaagagaacattgtagcaagtgagatcattggcacactaatggaccagtgtacttatttcaatgagtctttgatacaaaacctttcaagagaaagtttgttccaaggagctgaaaatgcctacactgttaatcaggttgaattagcaactaatatgaaaatgttcacatcaaagttaaaggaaggtagtttggggattaatccttcacaagtgagtaaaactgggtttgtgttttgttcagatgaagatatgaaagaaaagtacagggtttcatcagatttacccacctctgtcagatcctctgtagaagacacagttaaaaactcagagccaacgaaaaggcctgattcagaaactatgccatcgtgttctactagaaacaaagtacaagaccacagaccaagggaatctaactttggtagttttgatcagaccatgaaaggaaatagctacctccctgaaggcagtttcttgcaaaagctgcttaggaaagcaagtgactccacagaagcagcattaaagcaagtcttgtcattcatagaaatgggaaaaggtgaaaatctaagagtgtttcattatgagaacctaaaaccagttgttgaaccaaaccaaattcagacaaccatttcccctctcaaaatatgtttagctgcagaaaatattgtcaatactgtgctatccagctgtggctttccaagtcaaccacacactaatgagaacagggaaataatgaaaccatttttcatatcaaaacaaagctctttatctgaagtatctggagggcaaaaggataacgaaaaaagtttgcttagaatgcaggataaaaaaatcaactatatacctgaggaagaaaatgaaaaccttgaagccagccgggaagattcttcttttttgcaaaaattgaaaaaaaaggagtacccaaagatagagactgtgaaggaagttgaagcctttacttttgctgatcatgaaatgggttccaatgaagttcatctgatagcaagacatgtcaccacatctgtggtcacatatttgaagaactttgaaactacaggccgttgctagaaattcatttcagaatataagaaagcctgatattacaaaggtggagctcttaaaagatgttcaaagtaaaaatgatcttattgttcgattagtagctcatgatattgatcaagtgtatttggaaaattacataaaagaggaacgagattctgatgaagatgaagttgttttaacacagacttttgcaaaagaagaaggcatcaaagtatttgaagatcaagtgaaagaagtcaagaagccaatacaaagcaaactttctcctaagtcaacactaagcacgagcagcctgaaaaaatttttgtcactaagtaaatgttgtcagaccacagccagtgcaaatattgaaagtactgaagcaatctcaaatcaggtaatagaatccaaggagacacatgttaaaagagctgttgctgagcttgacatggccacaccaaagacgatgcctgaaacagcctcttcatcttgggaggaaaagccccagtgtaagaaagaagaaaagaatcttgttactgaaccaacacattacttcatacacagaattatgagttcatcttcatacaaccaagaagatctcatttcatctactggtgaggctgaagattgtcactcagacccaagtgctaaaatattagaagaaagttctcaggaacaaaagccagagcatggaaacagtgttaagtttatcaccatctttgaaagatccaaggatgttcttggcagtgcaaatccctcaaaggaagtcatttcagaaactcccaagcccgatgtctccaaacaaggatctaaaatgctgacaaaaatgtcttcagctttgtcaaaggtgttttctcaatgtaacaccaatatttccagatcttcctcaccagctcaccaggatgaacactgaagcttttgtacctgatataagtatgcttacttcttttagaaaataaaatggtttttaaagcat

SEQ ID NO: 1769 - DNA, 3951 bp, Homo sapiens
atgccctaccctctccgcagaggagagttctggctggaggcttcctgtgggaaggtcccaccagcgcactgtgctttccttgttgtgtccaggagataaaataagcgggtgggtgaccctctgggggttccatccctccatggcctccctctcaggccctccatgtgcgtccactctccagcccatgtctgccacccacagccgaggcccctggacctggcccccagcgggggctgtgctctccgaccccagcttctccctcagccccttctctgctgcttcctcctcccctggctccatacttagcctcaacagcatgacccaactaccaccactgtctcccaagagccgtctgcttctctggccctttcctctgtccctaaaacctgcttcggtatggacccaactcctcccctctccacactcacgaaggggctgctcagcgctgctggagagaccccccccactaaactctgcccatcagacatccacaatccagcctctgcgaggccctcagagctacctggcaataggactccttgccccaaatcatctccccctcccttcatcctcttcttccagtcttcatcacttcctcatcacctctgacctttcctcctcagcagaggacctcagcccctctgtctacacagaatggccattagcagagaaccctccttaatgttccccaccccacctactccactccacacccacatccatccttgcctccactcagggcagcagctcttcctccacagcagagcctgtaggacaccacccacagctgctcccgacttgctgccctgccggcagggccctccttcctccccaggggctgacaatggcagactcactttcttgcctcccttgctgtaaggccagagcacgcgtgtcaggaacatggctgtgctttggtcaaggataggctgaggtaaacatccagagtgactcagcaagtttagagcgcaggcgtataactccacttgtcatcacagccatatagccataacatcggaaggctcatcatttggctctaagccactgttgtttgtaaaagctattattgccctgctgacactgtacaggcatgctggcacccagagaaagagccaaagctgtccattttgcaggtagacagggggagccagggcacagcacagttcagctcgtgcccagagagagaaagagttaagctgctgaccccgaaggcaggggagagtcggccatgcagctatgtgtgggagctggctgctgagaggagccacaaagccagagcagacagctgagtcaaggcggacagtgtgagagagctggtatgagtcagctgctgagagacctgttgagtaaaactacatttcacctgcttatggccccacgagtgttccttcagctacctgcccatctgcccactcccctcgaacctcagcatgggctggaacctgaccccaagcagggcatttggtatagttgtgaacctgacaacgtgaccttgtcctcctcaatgggacatcagggaaatctgcagggactcatagggagggttttcctccccgacggagggacaaggggagaaagctctgtctttggccaccttgagttgtgtttgcagctgccagagccataaaaccactggggaatcaaccaaggacacggtcactagtctagtggagaaaatgacctggatccttgagctgggtgggtccttggaagtctattcctgatccttgaaatgagataatgtactcctcatggttcaggccatatttgttgggtcatctgtcacttgcagctgaaggcatcttctcagccaaggctaacacttcacaggtcagtagaccgctcccctccccaagggatctgccctacactcacccctccatcctgtaatgtccacgtctctggcgcttttcctcctcagaatatgcaaatatatttatgcaatctgcacctgaccatcttaaaacaagcaacaacatcaacagtcttccctccctgcaatcttctgcattcttgcttaagaaggtggagaggctgggtgtggtggctcatgcctgtaattccagcactttgggaggccgaggtgggtggatcacctgaggttaggagtttgagaccagcctgaccaatatggtgaaatcccctctttactaaaaatacaaaaattagccaggcatggtggtgggtgcctgtagtcccagctacttgggaggctgagacaggagaattgcttgaacctggaaggcagagattgcagtgagccgagattgcgccactgcactccagcctgggtgacagagtgagactgtctggaaaaaaaaagaaggtggagaggtaaccacagattcccctgagaggcccctcagtaactaaaggaagagattctaatgtaaggatgaaaagccgtctttcgggagcactgggtaaacaggcctgctccacggtctctgctctgctgccctcggctcaccctgattctgtgtctaggacagtcacccttgttgcccagagtgatccttaagcgatttcatgtgtgcgtgtttgtgttttctctctccaaggggctgctctggcttctcccagcactgtggccctgcacacctggacgtccgtattttacaatctcccaggctgattctggcccgtatcaaaggagggcaccactgctggctgtgagccacttctacttcgtgattccttagtgtccaaattaccttgcatgggacgcataggatgtctcatgtaccttaggggctgtctcaactagtcctttttgaattttaacgtgcatatgaatcacctcaggattttaaaatgcagattttgatcgagtggctctggggtaggggctgagatcctgcgcttctaacgagcttcgtgaggctgctggtccacggaccacactttgagtagcaaggctctgaatcactgactgttggtattgcaggggaacatggaggtccggttccaatcctcttatttttcagataaggaaatatattcaaggaggttaggtaacataatttcccagcgctcctcagcaggagtggaaggaagcactgctccgccactgctcccagctcattacccaccttggcctagtggcgcttaggatttcatcccccacacttggtctgtcctgctctcctggaacagactcatcccctgggtgatcctaaccttgcttaacctgggagtgaggtgtcaggagggagccccttccctgaggtgggcaaaaaaagcaggaaatccctggtgggggagaaggtaatggcttttgccaatggtgctgaagacaaccacatgctttgaagatagagccctataagaaggtttcggaggtcctgcttcccctacctggccaggtaccctttaggctccacctgaataacgcccctgcctttctgagactgtctggatgctatatgtacttccatggggactcaggtatgcctccctgcacagacattcatgcgtctgcacgtcccacctggacccaagaagaaaaatggaagtaggaacagagaggagctgcaacaaatctccacacgcacactggctaccggcaacactgactgggctctcggctttccagaagatgaggcaagggggaaaagggaccatttgcttaggggtggcacctggggccacgtgctcacacagctctttcttcccaggtatacaggaatgtgctcatgcacgtaggtcgcaccgggggtttcttgagatgcagcagagaacccgttgtacgggtctgtgggacccccagcagggaaataaaggaaaatcttgagttccttcaagggaaattccaagctagcaccaagttagccctgagaagtaaataagtgacttgataagcaagaaggtaatagtagcttaaaacaatagccaaggaagctagaattacgagatgtttggtttccctatagaaactaaagataacatctt

SEQ ID NO: 1770 - DNA, 3103 bp, Homo sapiens
tttccatggaggtcacacttctggtgaagggagagccaccaccctgtcaccacgattccagtgggccaggccactgcccccaattccaaggcaagaagcaaatgtcaggggccagggccagagcccaacaccaggctcattcctctcaagagtccacccagtgccaagtgagcccctgcccggcctggcatcccagagcagggtgctcatcccatggcacagatgggaatgccaaagcccacagagaggccctggccccccactgccctgtgcccccacctcctcatgctcctgaaagacctggcccgtgcctgcaagcgcctgcctcggctcccagacgagaggcttgtcctgccactctcgtgctcaagagccacccatggctcccagtgcctggtaagcaggtggggagcacgaagccccgtgtgcccgccactctctgtacagatgctgatttcctctgcactctgggttgtctccttccacactgacagctgtgagttactccagtatcctcccacatttgcggctaaagatctatgatcatcagatccccaaagccagcgtcccagttgttctgtctggacttcagggaggccctggcacgctgagtctgtgcccagtccattgtcggctcagccatcgtcagtgtattctccgcccatggagtgcgctaggcccatggccactgtgcggtgccttgcctggggctgattctatacagagcttgacggaagcttccagactggttaattacggtcctaccaagtggagacaggcttctcaccactgcaggacagtggccctgggccgaaggagtcctgcggcctgtgtggcgtttagtgactggcacacgggtatgtagggacacttccaggacgggttcctgcaccgcccacgcttaccagggctctcacctcctgggactgcagcgctctgctgcggcaacactgtccctgctctagtttccatccaactccagagctgcggcactgcaggaggcctctccaggggcagagacgtgggtctggggtccggggtccaagcccaagcctgccacttcccggccacacgtgggcctggactttcactcgcccacaaagccagggttctgatgctgcccacagggctaccgaggtagacatgatccacgtaagcctccgagcactggccagcacgcagtaggtcctcaaaatatgtggctcgaagaacgtgctcaggaagctggaccacgagtgtcaggctgcatccgctggggccctgagccctgctataggacagccccggcccttgcaattcacacttggccctcctagctctcggctcctgtggccacactctcactcttgggccctgtctttgacggtgaccgccctccagccagtgcttgggtctgccgtgtcgttcattcctgcattcccttctctggtgttttccctgtgctaccaaggaccaggccctggggtctcgggagcaagacagacgggaccagagatggtgattgaggcgcccagaccagcatctgccttgctcccctgtgaccgctgcatcaaacgtctgcaggccgggagcttacactagaagtgcattttttcagggcctggaggtcagaggtctgaaatcaggctgccagcaggggtggccgtccaccacgagtgcaaaccccacagagcctccagccgccctggaggagactcaccctctgctccctctggaggctccaggagaggctgcttcctgcctctcccagcttccagtggccctgggcacccttggcttgtggccacatccttccagtctctgcttccatcttcacagggcctccttctctgtgtccaatctccctcggctttccttgtgtaaggacacacgccagccgtgggatttaaggcccacccagacgatccaggacgacctcacctcgagatccttcactcaaagaccctagttccaggtgagaccacaccactggctccaggcattacgctatggccatatccttgaggggcaccatccaacccccccgcagcatgtgagcgccagctgtgcctgggatggcctcctcggtgctctccaggcccagcctaagctgcacggggctgcctgctggcttcctggggtcccaccgtggccagaaccttccctgctatgtccttagggagccaggcctgcagaagacgcatccaagggagaatcaggccaggcttatgtttcgtgccctggaatatccaggagcccacccagcaccaaggggcagctggccaccttctgtttaccctggagctgctgggccccagcctgtgctcacagcccaccttttggccctgctgggactctgggtctggaatgctttccatgtgagcttcccaccaggagcagtggctgaggcttcagccagcccagcccagcccaggcagctgctgccagaactttcgcccagcagtgagctggtgattccctcctgaagagctgggaaaggagaagcacggacaaatgagaaagacggaggcctttccctgtctcctggggtctggaggcaggtggggactgtcctacacggagcctagaggtgggtggggactgtcctacatggagcccaggggcgggtggggacaggggagccgtccggggccttccctcatctgactggctctcccagcgtcctgcagatggcaggggaagcaggacatggcccacggtgaagacagctgcagcccgcctccctgcatgccttcctgtgaggatgccccgtgactgactcagaacccccgaggccacaccaggcccggctccccaaatgcctcccacaacccagaatggaggggcccaaaaaaacggagggcctgggacctggagggagtgggcctctggtgggtggtaggagtgagaaggagcttctctctttggccagggacgagggtggtctggcatcctggcagaggcaccaggcagtgaggacaatgagggctggatatggatgtcagacccatctatcctcgtgggagtggggtacagctgggacccatctatcctcccaggagcagagtgcagctgggataattatcaatgctttttccatgtaatgacaaaatgcacttttagc

SEQ ID NO: 1771 - DNA, 3857 bp, Homo sapiens
tttgaaagaaatagcagtaagccaactggatcaactgagcccagaggaacagttgctggtcaagtgtgctgcaatcattggtcactccttccatatagatttgctgcagcacctcctgcctggctgggataaaaataagctacttcaggtcttgagagctcttgtggatatacatgtgctctgctggtctgacaagagccaagagcttcctgctgagcccatattaatgccttcctctatcgacatcattgatggaaccaaagagaagaagacaaagttagatggtgggtcagcctctcttctcaggctacaagaagaattatccctaccacaaactgaggtgttggaatttggagtgcctctgctacgggcagctgcttgggagctctggcccaaggaacaacagatagctctgcaccttgaatgtgcctgctttctccaagttttggcctgccgctgtgggagctgccatggaggagactttgtcccctttcatcattttgcagtttgttctactaagaattccaaggggacctctcgattctgtacttacagagatactggctcagtgctaacacaagtgatcacagaaaaattgcagctgccttctccccaagaacagaggaagagttcctagatcaagtgaagaggaagctggctcagaccagccctgagaaagacctgttgaccacaaagccttgtcactgtaaggatatcctgaagttagtgctcttacccctcacccagcattgcttggtcgttggagaaaccacctgtgcattttattacctgctggaggctgcggctgcctgcttggacctgtcagataattatatggtctgtttcaacatgggacgtatcactttagccaaaaaattggctaggaaagcccttcgactgctgaaaaggaatttcccttggacctggtttggtgtccttttccagacattcctggaaaagtattggcattcctgtaccctgagccaacctccaaacgaccctagtgagaagtgagaagtcttcctaaaactgtagttaactagcctgagctttgcctttttgacctaaaactactctttttctatcaagtaatcttcaagcatctagcagacaagcagataacaagacatgtaacagtcagcatacatatatatatgcatgtaacagataagtgtataacatacagttctaactcttccaccttactcccccagccagttacatgtagcaaatagggattcaaagaatgaatcttttttttgaaacctctctctgaacttttcccgatcaagtgggattaatcaaaatggcatatgaggttaggagtagtgggatccaaggactatttctgaatttgaacatctgtagatggccccatgatgagtagattggagctcttatagggagggaacgttgggcattagtaaagaataagggtgtgctaaccaccctgtgcctcacaacagtaagaagaatttggcagtcctgcagcagcaggtgcattgcctctccctactctggcagctctataacctggaggccacagccagtagctacaggtttgcctgcctggctactcttatgcagaagaattcagctgatgagtttgcaaatgaagcccaggttgtctctacctatgtggagctctctcagttctcccagagtgtgggcatcaaggacaagtggctgcactgtgagcagatggccattcagaaaagcagtttatgttggttctccagggaggggttgttggccacagctcagctcatgcaggccctggcctacaccaagctctgccttggtcatcttgacttctccatcaagctgggtaatgggacttagggatggtgggtctagggcttttagagagtacatgttcacagctagacctcacatggtgctcttaaacctcctcaggttttcaagctcgtgagatatgcagacacctccagaaaccagctctggagaatctgattctctcagttctcttcagatctgcatttctgaagaagaagtattaagatcattttctgtcatttgtatttgtttcctaagaggggtgtgtatattttcccagagaagtttggagtggagagggagatgctgttccatttccacaccctgggatatccttcccttggccactccagacacattatcttaagtgtggaagagtcaggagtggaaatgcagagtcagagctactatatattcctcagtacttgggtctcatgtacaaagtttcttcaaaacaaaatctgcagggagatagagaattgcagcagctgaagactctggaaactgcctcaggggcaatctcccacctcctttgcctagagatgggtctgatcccaggcttagatattctctttataaatagagctatgaagagatttaaaggatgttaggctgctttgaaggtgtaagaccccttcctttcctacccatcctcctcactccctagctggtcccagtggctctctctctcggcagatttggtctgtgtgtccatgtactggagagtcagtgggcgctcatttctcagagttatgatgtccttggcctggcctgcttttactctgcttgcttagatctgctgctctatggaaaaggattgctgtgtcggccctttagtgagtgtctgcgtttcgttcaagtctacgagcacagccgtgttctaacctctcagagcaatgtcatgctgggggtccactcctccctggccatgtggtaatgtcttactcaagggctgtggaaaaggatagacatttatgtcatttaagctgtctctccccaccagacaggactgttgaacctctctaaccaacttttaaagaccattcacctcccataccctcccatcttattagaagggctcttgtcctttaacaggttttggcctataggtcaagggttacgtttagggttacattcaactgctagagtaacccatagcaaggctgaatataattggtctccttttaagtttccttgtatgtgagttagtagccttggtcactttctagcatcacaattctgattgtccatgaggtcttagagccttaaagaagtgatgattttaagcaaaagtcatggtgggtaagcagcggatattgctgcgagctgttactcttttcctccaggtttgcccaggaatcacagtgggacctgtttaagcactatttctccaacgcttgcagttggtgaaaagaaccaatgcctcgctatttggtgcacatggctttgtccgattcctagaatgccatgtgttaatgttacagaaaatgccagagggtatcttcatgcatattcctctagagcttcacagccaaacccttgaggcttattttgccatcagtaactccttcctgttcccccagccatgagtgaatatgctgaatgaggaccttttactgtaaggagttcttctctcaatgtgtgacctgccctgtctatcaccagtgggtatctgagcttaaggcctctgtaatgagatgtgaaaagagagaattgatgtccctgactaacagcatcagaccttttgacacctgcttgaccaggatttggataaaaggagaatttctgcaggaaaataactcttagaaaagaaacttaggaatacagagatttgacagagtggctgatgtcaaggagaacaaggatgcagaagaaactcaagatgtatgtatcaaaacaaaagaacaataacctgaagggaccatgattctgttattgtatataacacaaggaaatgccccagattctcctttaaaagatataatgtacatattaagtatactagcctttatagttactgctatctacatgtttatcaaaataaaagactatttttttct

SEQ ID NO: 1772 - DNA, 2950 bp, Homo sapiens
attcacgatcatccgggatgatgcttttgctggactttttcatcttgaatacctgttcattgaagggaacaaaatagaaaccatttcaagaaatgcctttcgtggcctccgtgacctgactcacctttctttggccaataaccacataaaagcactaccaagggatgtcttcagtgatttagactctctgattgaactagatttgaggggtaataaatttgaatgtgactgcaaagccaagtggctatacctgtggttaaagatgacaaattccaccgttcctgatgtgctgtgtattggtccaccagagtatcaggaaaagaagctaaatgacgtgaccagctttgactatgaatgcacaactacagattttgttgttcatcagactttaccctaccagtcggtttcagtggatacgttcaactccaagaacgatgtgtacgtggccatcgcgcagcccagcatggagaactgcatggtgctggagtgggaccacattgaaatgaatttccggagctatgacaacattacaggtcagtccatcgtgggctgtaaggccattctcatcgatgatcaggtctttgtggtggtagcccagctcttcggtggctctcacatttacaaatacgacgagagttggaccaaatttgtcaaattccaagacatagaggtctctcgcatttccaagcccaatgacatcgagctgtttcagatcgacgacgagacgttctttgtcatcgcagacagctcaaaggctggtctgtccacagtttataaatggaacagcaaaggattctattcttaccagccgctcccaggtccccatcatcctccagtggaataaaagctctaagaagtttgtcccccatggtgacatccccaacatggaggacgtactggctgtgaagagcttccgaatgcaaaataccctctacctttcccttacccgcttcatcggggactcccgggtcatgaggtggaacagtaagcagtttgtggagatccaagctcttccatcccggggggccatgaccctgcagcccttttcttttaaagataatcactacctggccctggggagtgactatacattctctcagatataccagtgggataaagagaagcagctattcaaaaagtttaaggagatttacgtgcaggcgcctcgttcattcacagctgtctccaccgacaggagagatttcttttttgcatccagtttcaaagggaaaacaaagatttttgaacatataattgttgacttaagtttgtgaaggtgtggtgggtgaaactaagagaaatgtagcattagctctcacaaaagaggaccaagaaaaatcaacaaacaaatcaaagccaggctcagagctctgaaattaaaaagcactgaaatagttagatgttttcaaacttttagaactcacattttaatcagggattacatttattggctaactgcatgacatgcccattctaccatttaaaaaaaaatcttaaagcctgtaatttctgagaaaagagtacagcatttactcttatcatctagaaatgtaatatgcttcccccccgctttttgatgaggaagaagacaattggataagatgggacagcacttataatgaaataaaaaaaaactttgagcccctctcattccactttagcaatctttttggtaagaactcttaaagccaaaagtctgctgaaaagatttgctgattattagtttaaaaatcttgtaacactcagcagtgctattttgagtcatcccagtttcctgaaagtaatgcccagtcttcctgaatcctccttaatagcagaaccttggtgattttgttggctcatatgaatgcttgtcatggatatgttaacaatttagtgtttgacattgcttcctctgccacaaagacaatactctggtgacacatgtctagacccagcacaggctgtaggcccaggagtgactcaaaggagtttttccctctttcttacggttcaaaggtgaccctggtggtggccagagcagtaatgcttgtttgatgctcttcatggctcatctgcttctcagaacccacccgttgagtttgtgggtaaccagcaggcaggctaaagactggtgcttttcatttcatcctttagagggatgaaacagttatttccgtctgatgagcattcggtagaatttttgaagtgagattttatgaagtcaaaggggactttacacagatctcgacctgctttgaaacctagaggtggccctttgatttgtgcgtgtccttgccctctggacaacttaatatttcaagtaatcgaataccaacttccctgccagcccacctgccttccgccccgcttgtgtaacagtcctgttttgttgagttgctgctattgcactgccagtgcagcccacaccaaatcacaacccaagatactcagataggaagactccttcctctcccagtactttaccaaaggaacccccgccaggacccacatggggccacgtgttggcagtggaatcagcctgtgcaggctggggatctcaggctgatcagtaggggccagctttggagccagccaagctgaatcccacactccaggtctgtgctcaagagaccagatggtgtatttccaaatgggcctctctggtatgggcaataggcaagctcctggggtctggttatgtggaagattcttagtggatgttccgcctggttagctggttctcttcagagaatataaagtgaatgcctttaggggtagctctgaaagagaaacccaacaacttcattcctagccatgaaagtagcacgatcatattgtactgtattgttattgtaaaatgactatttgccatgtcatgagtaggtagatgttttgccacaaatatgaatgtgtttgttgtttcctgactttaagcaatgaagattgagacaataaatagcactcagag

SEQ ID NO: 1773 - DNA, 3161 bp, Homo sapiens
gtgctttcagttaaaaggtttctgttgttgtagcttatgcagttgctctgttgctatggaaacgtgacatcaaaatgacgtttcccgtttaaaagcttttaactaaattcctgcctgtcagatgtaggccccattttgagcgtggagctgccttcgagcgagcgtgagcggcgcctcccgcccatggtgcgtggggccgggccggggccctcgctgagcgcgctctctcaccccacaggcgcctccggcatggcggcggccgaggggcccggctacctcgtgtctccccaggcggagaagcaccggcgggcccgcaactggacggacgccgagatgcgcggcctcatgctggtctgggaggagttcttcgacgggctcaagcagaccaagcgcaacgccaaggtgtacgagaagatggccagcaagctcttcgagatgaccggcgagcgcaggctgggcgaggagatcaagatcaagatcaccaacatgaccttccagtacaggaaattaaaatgcatgacagatagcgagtccgccccgcccgactggccctattacctagccattgatgggattctggccaaggtccccgagtcctgtgatggcaaactgccggacagccagccgccggggccctccacgtcccagaccgaggcgtccctgtcgccgcccgctaagtccacccctctgtacttcccgtataaccagtgctcctacgaaggccgcttcgaggatgatcgctccgacagctcctccagcttactgtcccttaagttcaggtcggaggagcggccggtgaagaagcgcaaggtgcagagctgccacctgcagaagaagcagctgcggctgctggaggccatggtggaggagcagcgccggctgagccgcgccgtggaggagacctgccgcgagatatcccgttgttacagcaccgtttgtagaagagggtgtcctgtcgctatggagtggctttggactctttcttgaagatggatggcctgtggatgtgtcgggcccgctctggagtctgcatcctgtccattgataatgatgtcagtcctcacgtcagtacacactttcctgattactcaggtgctgtgcctgagtgtccaaggccaatttctgacgctacattctggagtgttctactgacaccatctgccaggacccacacttccaagaatccccacctgtgtgcttctagagcagacagatggggtcagagctcagggcgggtggggtctggagtccggcctcccccaacagcccacctgctccccgcccggccgcctggcgcagaggccctagtttggagagcccattcacgctcggaatttggattcaaccacggggctgaccccccacctccctcattttccaaaacgcctttgtcttttcctgttcaaagaactttcaagagactttccaagttttgttcgggaacagtgtggctccccagggtgccagctggcatcttgtgcaattatcattaaattacagggacaattttaatttcatgataattagaaatatcaactgccgctcagccttcgaaactaatggaattttaatgggcagctgcttaggttacagctaagaatagcagcgctccaccgagcggctgcagcagggccctgagtgggcgccagcctccatgtgggagccgtgcccagggagccggggcacctggtgtgggctgcgggaggcaggccctgggtgaaccttcagcagctgcctgtaagggagaaaatgggaccgtcctggtcaggtggaggagacctgtgtcctggactttggaccccgaggccagcccattccccctgcaatgcagccccaggtccacctgccccacagccacagcctcagggcttggagctgagcctgcgacctcagactgtgccctctggggagcccacccactctgggcctcggcagcctgggctgaccaagaccttccactctgagcaaatctgcaagccgggggagccccaggccctcagacggaaggcgccctcactccttcctcttgaccttagaattacagtccaaggcccggaaacagtcattccccatgttgtgtccagttttccagtcatttgaagcagggatggaggagaggtgaatccagagcttgtcactccatcctggtggaaagtggaattaatggtgtctttcaattgggcagattttgcttttgataatatcaaattttagctaattttttttatggctaaaacattttgtgtcctaagaaatcttcaccaaggccagggagatattttcccatattgtattctagaagctgtggttacatctgggtctctgtccatctcaattgctttgtaggaaatgaaatggatatcagagccattttttccacgtgattcccctgttattccagaactgtttgttagaaagcctgccctttccctatcgcgagtgtctggtgcctttgtcaaaaagcaattcacagaacaggagggggtctattattattattatttttttttttttgagatggagtttcattcttgtcacccaggctggagtgcagtggcacgatctcagctcgctgcaacctccgtctcccagattcaagcaattctcctgcctcagcctcccaagtagctgtgattacaggcatccaccatcatgcctggctaatttttttttttgcatttttagtagaggcggggtttggctgcgttggccaggctggtcttgaactcctgacctcaggtgaacctcccgcctcgcctcccaaagtgctgggattacaggcgtgagccaccacacccggccgagtgggtctattttgagacaccattcggtcctgttggtctgtgcgtctgcattatcttggttactgtgcctttatagaaaatcttcaggtcacctagtgtaagtcttccaaacttcttcttttccaaaactgtttttgctaatctatatattttgccattctgtataaattttaaatcaccttattgatttctatccccaaaaaagcctgctgaaatttgtattgagatggaattgaattcatagtcccacttgataagaactgacatgttgaaaatattgtcttacaatttatgaacatggtgtatctcaccatttggagctgtctaatacatcctttattaaatttatttatcagt

SEQ ID NO: 1774 - DNA, 3071 bp, Homo sapiens
cccttagcgcagaagccccgcccacctagactgagccccacgttgctgccaaggctccacccactcccccactctcctcccgctcggtcccccaagcctggctggctccactcactctagcacccttcactgctgcctcctcagggaatgcttggccccagcgccttaggaaggagcctgctagggccttcagcactcagcggtttcttctacgcaatttctcagtttcaaataaagcccgtctgcggggcaatttcggccatccagacggtgaccggggcacccgcgatggccacctgagggacacagcagacagatgggggcagagagagagagagaaacaggcgtcgggtcctacagccagcatcagccgctgtcccggggccgccctggagcccgtgaggagcgctcatgcacatggggccggcaaggaaggggccctcagaccgcgtggcccccgtggacggtgcgtggcatgggggtgggcagggcgccacaggcgggcaggtgcggcccctccccgccgccgcagagggccgggtcccactgcccgtctgcctcctcctcctcctcatcgccgccgccccgcagtgccctgactgccgccggcctggggcccccccgccgctctgcacaccatgccccacctctgcccatccgaggccggggtcccgggctcagcctcccacagagagctgctggcggggttttgtgcagccggatgccatcctgcggtcggcggtggcgggcaatgaggaggggggctcggccccgtggggctgctgcagggagaaacagccacgtggcaaggcccctgccgaggcgcctccccgggcgtctctccctcttggatgaaaagtggctcgctggaagccccctgtccttccaggccctgctaaccctgcctgctatctggggatggctggacagatccagcagccatcttgctctgccacctcccaggtgagtggctctgggagccacgtcccctctgagggcgtcagtttgcccatccctaataaagggacattaacaggaagaggacccattttctagagggcacaaggaagaaaaagacgggtgcccaggcatgtgcaagggcacaaagaatggctggtgccatcgccgttgtcactaccagccacatccccaccaccgccactgccacgatttcaatgctggtgtcccctctgaagtccgtgctgagatcactactgcggccttcaagcgactgatccatggggcccactcatgtgaatgggatgaggggcccttataaaagggcctgatggagggaggccacggcttttccgctccttgcaacccctctgccgtgtaggaagcagcacagggcctctctggagggttgctgaccaggcaacctcgtgggaacagagagcagccctccccgacacagccctgccttggccttggacctcccagcctccagaactgtgagagattttcgttctttataaatccccaggctgtggggttttgttccagcagtgcaaaggggccgagatgatcgccatcaccaccgtcgtcatcaccagtgtcagcacaacttgtctctgtccctgcagggcgcagcccagagctgagcagcaaagcatacatccccttttgttctaaaagggcgcctcattgagcctgcgtcaccccagccagaagtgcccttctgcgggtggtattccagagccgctcccatgccctgcacccacacggcccagggctcccttcccgagacccaaaggacccagagcaacagggaggagttgttaccatttggtttttcagggccccttcgaaccgaagccctcgctgacaggagcccctgccgtcaatcacaaccacggcgtagcccagggaggccagtgtgttgagccgcaagtacttgatgcctttgaaggagttattcaccagctgcacctgtggggaggtgagggccagcagtccagcacgagatgccgggcaggacgggcctggcaggggagatgccggtgggctggggaccgggccgggctggggcctcagagcctaatgaaagcacctgtgccccggaggctctggatggacacctgggagtggcaaggcgggaggggcccatactcgggaccctgctagggagggggaagggccactgtcaggctctttctcagctgggccactgccccagtcctgcctggaacaactactctggcatgatggacattggggtggctccttctcgggtggggccatctgggcactgcggggtgctgagaagccactccaggccaggagaactcgcagtggtgatgaaccacaaagtacccagacatcgccccgtatcctctgtggggacagagctgctctgggtaagatgtgcgcctaagatggtccaactgccaatctgctgcctgcttttgacccctgctccaggaattgggcccagggcccatggccacctccataccaacctggagactaggggacttcctagaggaacaagggagagtcagcaggcggagggggaaggggaggccatccaggaagggcggggagcgtgcaaacgggcacagagaaaggagggtgaggggccccgaggaccctgtgtagtcagggcaggcggggtgggctggggcaccaggcaggtagccggggagcctcctctggttgactgttctacagctggcacttgagtggggatggggagtcctcgggtggatggtggggtgggggcctggggagcaggtgtgcactcacctgggggcctccatatacaaagaggacggtggggtgcttcttccctggctgcaaggcgtggggcttgtagatcatgccgtagagccgcacatccgagcgcgtgtggaaatggaagatctctggaggaacataatccggggggcagcctgcgggagacagggcggctatctggctgcccggggaagccacatccagctgacacccttgttctcctgcccaccccaagccttggagggtggaccaaagcaccccctcttttcctgggcttcccgagagttgataattgaaaaaaacgtttttttttcattaaataagatttgtac

SEQ ID NO: 1775 - DNA, 2919 bp, Homo sapiens
cttgcatttggcagacgagtcacccgggcagtgggatgaggatggcaccaacagagtcaacagaaggaagacggctctggccgggccccagggagggaggcagcggtaaggaaacaacttcagagaagttaagcaacttgcccaggccacacagctattcaccaaagagagctgatgctgagtctttcagaggagtgcctgcagcatttaaaaaatgcagagaagtgttcagagcctgctggggaagcagggagctgctatttctgttcaaggcaatcagtgaggctggacctgcccagaattcatgtggaatcaccctagagaaggctggtggcttggaagacactgggtctcactggctcagctgggcacggtgcaaggtgctatacataaatggtttcactgacccctggaaggatgctcaggcctggatactcattgtgagctgcaaaaaaggaaaggggacccctgagagggaaggcaggaactagggctcatggccagaggtgtggagctgcattgaaatctcttgagtgggatgcccatgcttccccaccagatcccagaaactcaacgtagtgtcctgatgtcctgactggctctgcagaagcccaggtgtcactccgggtgagtgggctcagatcctccacggtctacatcctccaggcactctgggcatccccgtcctctgggtggggacagctttctagctgtgctgggtgagggtgattatagccagcaatcctggctgggccttcgttcttgatccccggtaaaggcaggggctacagggtgccctggtgcacagaggctcactggctgctcaaggtctcctcccacaaccatctacatcctgactcagcgctgaattgtgatgctctggaggacaaggctggtgctcccacagtgtgtacctgccttcctggaggccaggatgccaagaactgcctcctagccacccgcttcttccaggcccttagaactccagccagagggctgcctgtagggcctgcttctgtgcagctgctcagagcagtgacagcactccttaccccgtccctgtctaccccacaagtgctgcctgcttacttgggtcgtgtccatgctggcctctgctcttggggcctggggagccagagccaccaaggacggacaggccagactcaggaagcagcctgtggtggggcagcccacctacactcgcccctcccttgagccttctcacccggcagcatccctgctggatgcaggttccctccatgcctccacccaggggcatccccacccctcattgcgaccgtctccagagcccttccttccctgcaccatccctgctccttcatctcctgccctttgcctgccctacctgtcgcctcagcaggcactcacatgggcacatcttggcctccctcctgagggccctgcccagaccagccaaaggaaggcaacctcaggcggcaccaggcagtgactgggcagtggggacaaggaccacaatgcccgtggctgtaggtgtcatgggttggggagggggtgtgggttcctggacctttgccctggtcctggggtgggcaggtggggttcctggttgaccctgcacacagcctccggggtggtctccagaggactgtgcagtgggggcagccagtggcagcctaaagagtgcaggatgggggtggggggtgcccactgaaacaaatgctcaagagcagctggttatggcaggactttaagtatatattcctgtacatcttttcaaacatatacacaaagcaattcacattttcatatactggaaaggcaggctaacttttcattttcctgcaacatgtgcatagtaataaaaaattctggccgagcgcagtggctcacccctgtaatcccagcactttggcaggccaaggtgggcggatcacaaggtcaggggttcgagattagcctgaccaacatggtgaaatcccgtctctactaagaatacaaagattagccgggcgtggtggcatacacctgtagtcccagctgctcgggaggctgaggcaggagaattgcatgagcatgggaggcagaggttgcagtgagccgagactgcgccactgcaccccaggctgggtgacagagctagactcagtctcaaaaaaaaaaaaaaaaaaaaaagttctatagccttcttccagtttctccccccaattaaatgtaataacaatctaatcagtgcactgaaagttaagataatagaaaaaatttcatccagaatcccaccacccacatgttaccgagggagaaattttaccacctcttgtttcaggccagttcaggcaggtgtacattgtctcagaagggagatatttctttcgtctgatactggagagtcaccagagtcgccagacaacaggacaggacactcatcttgcccacaggctaggtttgctggatgtcactaggtttgccagataccaactcttgtcagagttattccatttgcctgtttggaaaaggcagccttcacccctgcattcctagctcctgggctgacggcctgcctgacatctgagggtagtggagtgaggttggcacttgccctgcgctgagagtggaggggagataatggtttaggtgggaaagtacagcccctccagcttcagggatcagctcacagcagggggaaaagtcctagaggaagactggggtggggcatgtctgctcactcacaaaagcagattcattattacagggcctttaaagagggatgtgtgtgggtagatgggatcctcaccgaggtgtgacctgctttttctagtgtttgcgaggatgtctcattaacctgcaggaaagtgctggtttcaattcgatggtttgttttctgttctgtttcctttctgttacaaacacaaagggtacattaaagagcctttccccatc

SEQ ID NO: 1776 - DNA, 4118 bp, Homo sapiens
atctcaggagtaggctctgattccttggggccccaggagcctctcaggagtctacatcccaagatgttctaacttccagagtctccaagcccatcaagagcaagttttgctaaaagtgttctgagagcttatgaagcacatggtgagtggtcagtccctcagctcttccccagaggccctgggtcccatggggttagcagggacaggggaagcctggggctggtgagaggccaacttccagccagggcttgatctggttttcaatggattcaaagtttggcctccttttccttacctggaggggacagaggcactgggaccaggccaagctctggctgagccagggctaggggaagtacgtccactgggggcccatgccatggggaggtgttggggcacagccaccactgttctacctcttggggaagggtctgcagtggggtctggaatacagaggttttcacggaagcccaggggaccctgaacacttctattccttctatcaggacaaggaagggttgtgcatccggctttccaccttaaactggtttctatggtgcttcatcgatgagataaggatgcataggagaccccaggccaggtacctcctttccccacagtgctcagctcccccagcccaggggtctggcttccccaggaggacccagctcacccccaccccacaggaggcacaggcaggtctctgcagggcacacaagccaggacctgtatgatgggagctttacacaccagacaccagggaattctgggcagactgggccaagacccatcttggaagagccaaaggagccagggaagccacaagccctcaggaagccccttattctgggaaccacatttctgctgagatgagtccatccctatgaagagctgccggaccttgtctgacccagccttatggaagattgggtgggtctcttcccaagcagagggagcctcaggaagtccagactgagactacagtgggccctgctcaagccaccagccccgaggttggaaaggccaggtcctcccacacctgctgttcccacagacttccttcatgctcatcctgtggctctgggatgtctacctactgggaggtgagtgtgtggtgacaactatggtatacatggccttcacagccacagaattaagtccctgggtggccaatggtgcccagaaggagcatgcaggacagaccctgggacctatagccaggacagattcctggcttctggtgtgtgatgacctgagagcagcatccacactgtccacatggctctctgctccagcctggaggtagggccagaccaggcctggtgggctgggcagggagtggacccaggtaccaaacccactcctgacacaacccagatgaaaggcaagagtgtgttgagcacttccctgcccaggccttcctccagctgtggttttctgtgaacatctggacccctggggcagccacagtaggatccagcaccgcccagtggtgggtgcctggggcaggaacaaggtgcagacactgactctcccacagacccctcccagcctcatagtcaccctgtccctagaacaccccctgaagctgttcctgtttggcttgcaggagttccttcaggacacactgtcctaggcctgggccctggaggaggacatggtgatgaggcaccctgaggcctccatgggggaactgagaagcatgcactgtgacctgcacacccaggtgggcttcagcaccaagtctcctcctgtgtcaccctgcggggcagtaaatagtgggaagtgcccagacctcaccagccctgctccctgggccttcctccagcccctcctctccctcctcctctaagaagcttctgaaaccaggctgcctgagcctagggcaaaagctgaccttgggtttactggacatgcctcagagacaatgagacgtgagcaagactcttccaagcccctcccctgtaccctcctgctctcactcctgaaagccccagaaggacactggaggggtcagatccatctgtgcaagcccacaaccacacctgtgagtaccagcagccctggagagcagcagggggtcttcactcctgagcacccctccaagggcctaaaatcagtgtcagagaccctaagagaatctagggagagggcataggtgaaaccctggcccagagccagaattgattgctcagccgagtgtgggaacagtccagctctggcatggagatcccccagaggagtggagggtgtctcatccactgtggagataagcccccatattgtgtggcaaaggggctaggtaacagttaaggccccatccatctgagctctgaatcaaggctaaagcccaggctaagcagccctggggcaagagtgtgaggcaggaagactgagtcagcctgaaccctgggggctgtccctggagtgacttgagcttccctgacagcttccccactctaggctgcacacacacctcgctctgggagtagcagcctgcaggagtgtcctcagcattagaccagggggaccacacggggaccctgaggactgcagggacccaggtctgtggggtccagcctggcaaaagcaagatgttctcaatggaaaagctgaccaaatctgctttcctttcagccaaacctgagcaagcacccccaccacccaggcctctgcagatatcccccagcattgagaccctccccaaggggatgggctgcttctccctggcccacagcccagctccagcagcccatgggtatagccctcctgaaacaggagcctcatcctccctcaccctcacctggctatgctgtacccaaggccaaagcccagaggcataagggagcttctgcagagcccaggacagcaggctgctctctgggggccctggggactcagagtgtggccagcccatccccagctcaggatagaccacagagtgcttggtgattcctgcattggaactccctctctaagctccccatggacctggacctcagaggcctgtggttttcacagtagagcttggagcagagatgctaggcccctatcacttccatatgtgccctggacacctctaagatcataggactggcctagcccccaataccagacactgcccagccccctgatagcccagaggtagggccagagacaactctcctgcatgtgatgcctacagctgatcacccttggcagacagtgaacatcacggcccagaaggagccagggcagcacttggcaagctgccccaaagccccagagagctccttagacatggaaagtcaatactgatggggaagctggacacttggaggccactggagggaggggtgagcatggtgtccccacagcccaggccacccagcagcatgccctgcatccatggtcccaacctatagggcagaacccccctctcaacgcacaattcctagacccagagggccctagcccagactcaacctgagccctgaaagggaaggggcaccaggggtgccttggggcctccagcagcagccaagatacacaggagatggagccccctgtggccctggccagaactagtatttggcttaaggcggagcaagcccccttggagcactgcgtacatacccggggcctatgtgtgcctggcaaggccaagctgatgatgttaccaagctcaaactaccactggccaccttggtgagggtggggcagaaacacgtggaccagccaccaacctcatccattcaaggaagcagaaatggtcaggctcctgcaggataagtggccaccaccagaccaccaatggggcagagttctgaggcccaaggagatggcactggggccctgcttccagggtccacaatctgctccaggacacaagactgaagaaaactaagcaaatgagagtccaggaggctggatccctcatctgccattcttggcagttgcattttgtggtcagaaaaagtcaggaaacttggctctactcactgcaggaggctccaaggtgggaccagagcttccagcatagattcaacaatgcctaagaatgcctcttcttggggaaaaggactccttccttggcctcaaagcccccacttattttgattaaagcacaataaagtctt

SEQ ID NO: 1777 - DNA, 2985 bp, Homo sapiens
acttgtagacaagggcgtgtgagacctctggagccagaagaggcttgtaggagctaggtgggggtcagggggctgctggccaggaaaagtgaagtctgccaggagttgcctggtttatgtagactcataccacagaaccacgggttctggatgaggttcccctctccagggccggtgaagaatgttgacggtgactggactacagtaaaaatgcaagtttatcaagatgctcccagcacaaccctgtgtgcagggcctggccccacatatctgcagccactggctgtcctcaggggcaggtgtcatcccagctgcctgcagagatccaggcacagtcagctcaggagaacggtggccgagcagatcctccatctattcactggggtcctgcatagaaatgccatctttctcttggtgagtgtggcgtcccactctgaggtcagacgtggggactagcttctccaggcctcagaacctccggcagctccctccccgacatgcccacaattccacagccacgtggttagctccacttcactcaacaaacctgcacgggcccctgaggcagcaggcactgaggaagcaggtgagaaatctcccaatctacccttcccagagctctcggtcggtcgctgcatgcgacagagaacgggctggctgtgccacgggagaaacttcgacaggtggtaggagccaggttctggtcctggtctgccctctgacaggctgtgggacctccagcctcaatttcccacttgcagaatgagggaattggactgaagtctctggattcaagctgtgccttgaggacgccctctccctccccccaggattcgaagacgggcctacgtgcctgagggtggcagagtggacctggtttcacgcatgctcagagcccaaactgcccctgcaggcaacagccaagatccatgagtcaatgccatggcaggcaggggattgagtctaccaagcagctgcacgtgtctctgtgttacagacagagtttcaagaaggacctgcagctctggaaggcttgccaactgtgattggactggatgctctctggtcctgctggctacgggaggctggaggcccctgtctgctcattgcaccccgacttgatggccacagagccagggagcctcatgggccacctctgacccgctggcctggagggagcttcctgacttcacagtattgagacaattccaagatgctgaaaggcatcctgttaaaattaggagagacctcagggatatctaatttggacagcaccccctgcccaaagtcacacggccaggctgagcagggccagtcctgacccctgacgcccagccgggcccacaccatgagtgtgtggctcagccctgcagccccacttgctctgaccccttcatgagtcattcttccctgagctggataaggacaaatgggcagggaggcccgcagcatcccctagtcctgcccaccagcagctgtcccccagggctcctggtccccagcagtggggatatggccaggagctcccgaaacctgtgtcagcacggcctggggttctgttctgggcctccacactgagacagctttgggtagcgtgctgtctgcagatgcccctccgaaaactgatctgaaaaagcaaattcaatgaaaacagtatccaacggaggctgtggagggagtttaacaggcgcaatgcaatcacgcaggttggaatgaatccaagacttcgatgctcccagggaggccgcttgagttcagcagcagttgtataaaatgacacccgagatggcccagcttcccaaaatcagagcagaaaggggattccgaaagtggcatgtgaccgcgtccctggctcctgggccttctcacttcatgctccccacctgagctctctccatgggctgtaccttctctgcaggttcccagggcaagatgtacgcagtcatctgtttcaccacccgagcctggcccctgccagcagccagcacagaggcactcatcttctgagaccccagagtagcatgtgagggacccagaaaatgccccgatgggaagggcctttgggatcattttgatccaaggtcctcaatgcacttgactttgagaaagggagtcagaagccacagcgcaggggaccatagaaacagctaagggtctcgattctggctgagcctctccctgaccatgtgggatgggggcaagcttcagacctcatcggggcaggctttccacagtgtctatccctggctgtcctcacctgccagaggaaagagggtcgtaatccacaggcctcctgtgtggaggactctcggctcctgcatggaccctgccctgggagcacactcagcaccggggacaagggactaaccacaacccactgaaatgcaagccagactgcacagaacaggaggcctaagccaggtgcccggggagcccagaggaagaaatgactgcctctgcctgggagggatctgggaggattcacagagtggatgacactggagctgggagtactgaacagatcattaagagttggcaggcaatcttcccagctgggctgagaacatttctcagctccccaaaggcagaggagcttgtctgcagtcaggacctagctccgtgggaacctgagccatgccaggccacactcttggcagagccctgatgggcggatgtcgagggcttggactcaacagtgcctcatcctcgacttcatgccctggatccagctctgcttcattaatctttcccttctagaaatgcttcctcatgcactacttttccaacctcactgcagcaacatgacctctccacttgatgcgcttgttaaaacatacacagaaatagaaaaaagaacccaatgaacttctatcacctaaagtcaacaattttcaacacatggccacccttgtttcatccatatctccctttcatttccccaaccccagacaccatatcgtttcatccataaatatttataaatgc

SEQ ID NO: 1778 - DNA, 3686 bp, Homo sapiens
ttccttcttacagccaaaaaaagaaaggccaacttaccatcagatgctgaagaattttctacatttattaattccataatgagtgatgaaaatatgtccaagacacaaacagtttatgactcagactctcaatcaggttctagtgctaaagaaaaggaccgaggagcaaatttgtgtgtaatggatcattttatgaaaatctttttatactgcaggagagcaatggttcttgctcatcgtggtggctattggactctgcttcagaactgctgtcgggccttatggaactttactcaggaactacaaatacttcttaaacaggcagtggatcttgataaaacatttcctattagccaagatggtttcttctgcacctctgttttaccattctatttgggagcagaattacttattgacatgttaatacaactacaaaataccagttctattaagcctattgaagacaaaggagaattcagtgttccaagctgttatgggaatattaaaaatgacaacggtggttctagtcttacctttgagcatcctttggatgatgtaaatgtggttgatttgaaatggatccacgactttgtattaaaatctctggaagttttatatcaagtggaaaaatgggaaacactagtatctcttgccattcagttcaatacagtttcacatgagaggtatacagaacaagtgacaccacttctggtgtatgcacagcgccagcttctgctgagaatacagaagttcaagggcccagatattacccaacaaccttgtgcaaggtatgaggctgaatatggagagaagataacttgccgaaatttcattgggaagcagcttaagattaattcttcaaccattgaagcaacaagcaactgcacagatttgctaaaaatgcttatctcttcagaatacagccgagccaaagcgcttgtctgcgtgcccgtggacgtgacagacaccttgaggtgttttagagagacactggaaaaatccaaataccataacagatcaatccgacacagcagaaagttgctttcattatttcttgcacagacacaagatgttctccaagccagcaatcaaagaagtcttaaagttcaggcgttgcattcacttggaagtcttctcatcttcgcagaaaagaaaagggctgcttttaagtgttggtgtcaagctcttgatgacatattcagaaaaccagacgtgctacacacgtggaaagaatttggcccctcactcaccaatgtcaccaacagtcattcacctccgggtttcaaagactacagtgaggagtttctgtcaagagttggcatctgggggtgtttgcaaggagcagtcatatcagcaaagatagcacaatttattaagtcattgaatgttgaaaagaaaactgactgttgcattttgtctgcgttactctttcagggtttgcttagaacaacacttccacatcccaaagctgaacgttgctatgctcaatatgaaatcactcagcttctcccaggcattgaactcttctcagatagatacagggctgacatttgctctgtaattgcaagtctgtattacattatacgtgaactgcactttgttaggcaaaacctaatagttctgcctctccttgcattgtatcaatattttgtttctggaatttgtcaagacataacaagaaatctagaagcaagaatcctcaagatagaagtccttatagatttgagattcttttctgaagccttttatgagatatcccaaattttctatggaaaaaacatgccttgtccaatacctgcaggctataaagccactggaaaaatgaagatctttcaatcatttgactcaggaaaacctcttaccagtaaagaaaatatacaggcaattgatgaattaagaaataaaggcttgcctgcagttctggttacaattggccaaccacatctcttaaataagtttaattttgttaaagcatactttttcctaagtgtggctgcgacaataaattgtgtcccagaaaataaatttaagacagtaattaccaacaagagcaaaccaaacctaccaaacttgaaagagatatattcaaaggatgatggaagttcattttataatcttacaaaacttaaagatgagatcactcttagcatgctaaagtcgatgttactgatggaagctgaggacaggctaaacttccttctgtccgaggtggaacagaagaccctgtctcagtgctccgctggcgagctggagattgtggtggaggcccggcttcagctggctgcagttgctctgcagaggcaccgggcggcatacagtgctgcaatagtattttctacacttacacttctccaggattcaaaactttttgaaaagaaggtagtacaggatgacacagagaatcctgtctctccaggaacttctgtcactgaaaataaagatgacaatgagtttttagatcctatttccctaaatgcccgagaatatttcaacattcatctgtggttgaggtgccgcttagcattggtgactgcatttgttgcacagattcatggcattggaattgtgaaagaggatgatatgacagattgcctgagcctcatcaatgaagtgtgtatggaggcaaaaagcgcaggggacacggaactgcaggctgaattcttgacgcaagctgtaattcttggcctacaagaaaagcatttaaaggcagacatcatgacaaaccttcaggatataatacatttgctggaaggaaatgaatttatttctcctcaatcacggctaaccctggcaagaagcctagttttgctggatgacttaaccaaagctgagaaattcaaggaatctccctcttcaaaaacaggaaaattaaatttgttaactcgggctcatagcattctaactgaacagatgctagcttttggagaaacaattgaatttcgttcatcaaacactaaatatgcaaatccattacagcctttgaaaaatatctatcttccccatgtcatgttattggccaaaataaaaatgagaattggacatacagtggccaagcaagtatattacaagaataaaaggaaggacccctcgaagtggttacctgctcttcatctgtttgatgtggcactgaagctctgtagaacaacagcagtggaggaacatgaggtggaagctgaaatcctttttcagaaaggcaaaatagaacgtcaaatactaatggaagagaaatctccaagttttcaacttgagagtttatatgaagctatacaactaagcctgaaaaatgatcaaaactcaggattgataagagactcctacctagaaatggctctattgtattttcatctgaagaagccaaagataaaaatttcaggatcaccattaacacttaagcctcctctcagaagaagtagttctgttaaagaaacatcagcaaataaatttgaaatgtacagttcattagcctggattgcaataagagctgctgcacaggtcagtgaagctgtgctggcaattaacttacttattggaaagaagaatactagaatgcataaagttaaccaagtggcattaccaaatatcccagaatttgctgctctggatcttttgtcttcgtatacagattatttgcttggtatgtttggatgtctacatattatgcaaaaaaactgatatatgtaatatag

SEQ ID NO: 1779 - DNA, 4445 bp, Homo sapiens
gtttcttgctgtgtgaccttgggccaatatctgcactgccctgaccttcagagactagctgccgtcctttcactctctgaggccaggcctgggaaccctcggacaggtgtctgactttgggaaaccctcaagggcttcctgtcacattaatggctctccatccggatctgcaccccttttcctcctccttcgtggctaacttaatgaaaccaagtttgcaaatgaaacataatttcatagacagacatgttgttggaaggtctgggatggtcttaacagctgtctctctaattaccgcagatgctaacgaggtgcctggagcctctggttacaggagcagagctgctgtttgtttgccagggccgggtaggaggcagggctgccaaacctgcccctccattgaggtgtacacacacctgaaggcccttgggcaggcaggacctacagtggaccccatgcccaggctctgggcgggcctcgcctgtgtggccaactcacccagcccagacgtgaacgtttcccagggacagctctccattcactcaattcatccagcaagtgtctgtgatgccccatgcacaggctcagccagtgctagcagtagggtatagtgagcaggccaggcagctcccactccagaggggttgccaggggtgcacaggatccttcagagaacgacagatggcggggagactcagcgaggcagtggtcgggggtacgtgtgctaggcgctccccaggagcctttctgaagagggcacattgggttgggtccacaagggcccatgaagatgccaggggaaatttctggttgtagaggcagcagttgcaaaggccctgaggtgggacaggaggcggttctcatgctacagcgcggggagccggagggtgaggggtcaggtgcccgctgagggcccggggctgtgctgctggccctgtgctgtgcgcttgggtgctggtgaacctccctgggtgggcaagcctcctcaggtgggtatgtcagtatccatgacacaccatagttgtgtcccagagtaatatgggggcccagctgggtggtccctaggaggccagtggatcacagtcacacttggagttgcgtagtatggggtccgcttgtgccatgggcggtgggccatggggagctttgtcctgagcacctccagctggggagcaggcccctgggaggctggagctaggcggggatcctgctgagaccaggggagacttctgggtgaaataggcctcggccctccctgatgcaggtcccgcgtgccacgccatgttcctcgatacactactgcgcctcctggctcatgtgtaatttagggttttcatgtgatattgtgggatggtgggtatgttttgtttcctgattttcttgcagtctctgctgggctttgggactaaggctgtacttgcctcccaaagagttgggaagtgctgctcatttctccttgccaggaacaccatggctggcactcgacgggtggaggggcaggttgggggtaggcccgggggtcctggctgcagcctcatgccgccacccccgcaggagtgcgctggggagccgctgttcatgctgtactgcgccatcaagcagcagatggagaagggccccattgacgccatcacgggtgaggcacgctactccctgagtgaggacaagctcatccggcagcagattgactacaagacactgaccctgaactgtgtgaaccctgagaatgagaatgcacctgaggtgccggtgaaggggctggactgtgacacggtcacccaggccaaggagaagctgctggacgctgcctacaagggcgtgccctactcccagcggcccaaggccgcggacatggacctggagtggcgccagggccgcatggcgcgcatcatcctgcaggacgaggacgtcaccaccaagattgacaacgattggaagaggctgaacacactggctcactaccaggtgacagacgggtcctcggtggcactggtgcccaagcagacgtccgcctacaacatctccaactcctccaccttcaccaagtccctcagcagatacgagagcatgctgcgcacggccagcagccccgacagcctgcgctcgcgcacgcccatgatcacgcccgacctggagagcggcaccaagctgtggcacctggtgaagaaccacgaccacctggaccagcgtgagggtgaccgcggcagcaagatggtctcggagatctacttgacacggctactggccaccaagggcacactgcagaagtttgtggacgacctgtttgagaccatcttcagcacggcacaccggggctcagccctgccgctggccatcaagtacatgttcgacttcctggatgagcaggccgacaagcaccagatccacgatgctgacgtgcgccacacctggaagagcaactgcctgcccctgcgcttctgggtgaacgtgatcaagaacccacagtttgtgttcgacattcacaagaacagcaccacggacgcctgcttgtcggtggtggcccagaccttcatggactcctgctccacctctgagcacaagctgggcaaggactcaccctccaacaagctgctctacgccaaggacatccccaactacaagagctgggtggagaggtactatgcagacatcgccaagatgccagccatcagcgaccaggacatgagtgcgtatctggctgagcagtcccgcctgcacctgagccagttcaacagcatgagcgccttgcacgagatctactcctacatcaccaagtacaaggatgagatcctggcagccctggagaaggatgagcaggcgcggcggcagcggctgcggagcaagctggagcaggtggtggacacgatggccctgagcagctgagccccagctgtgatcatccagcatgatgcagcgtgaggacagctgagcagggaccgggacagccctcaccgcatgcgtgtggagtgtccggtggtgctcgggccgccgcagtgcagcgactgcccggccctccctcccctgcctcacccggtcgggtcccggctcttcctgtgtggaggtgatggtacctgccacaccacagctgcgcacacagctgcttgctcaggggccgggacagcactgggtgctcaggctggccaaggaccttcattgcctggcaagagctgcccagtggccttcatgggagaagggctgacctctgaggggctgaggggtgaggccagggccctccagggggaggggtagccagcttgggctgtccccttgagaccaggacaagaggctgggggtgtcagcattcccagctttccaagctgcccccaggcggcagagtctgagggtcccggggcccggttggcagctggagaaagaggcaaaaagcccgtagccgggcaagaggagctcaagtcggtctgggcccgttgccaccgactcccacctccagcacccatgcccgctgcaccgctgccatcctcagattcaccgcgtgctctgcgcggccgaggccggagcaccacatccacctcgccccagagaggctctgctccctcctatggaggggctgtgggccaggctgctcagactcctgggtggcttccagacggaccgggcagcccctctccgtcctcagggctgtgcctctgggagccactgggccaggggccccgggtcgcagagagcacgttcccgttatttattcccctccgcgtcctacacaggctgccctggcagctgtcttcaagggtaggctgagctccccaccctggagcccctgagggcggcccctgagcactcctctctctccactctctctgtccctgccccagcggcttccagtgtggcatctcagcagtgtcctggcccctccagagcagtgggacatctggggactgtttttgtgtttaggggaaaaaattctgctgcactctgcttgggccttgaggtctgtggcagggctcctctggcccgcagtggcctggatctatctgggccatgagtgacgggcagtgaccagagggactggaggccagcggtgtccacccttgccctcagcaagagagaatgcattcttaaaagaaagctgtacatgtatatatatgcatatatatatatgtggctctagcctcaggctccagccccagtggggtactgtacagttaactgaagaagaattttaaagacgatttgaacaagaaaatgaaggcagtgggaaagcaatgccaaatggttgtggagaaagtggccggagcctccctggagtggagcagccctgaagcctgtgccccccgacctgcgggccgctgttttggtttgacatgacaaggaaaggacttcctgctgaccctgagagcctctggggtgccgcggcaccacggggcatgcatgattgtgctagcgtttagtctgagttgatctttttaaaactgcaagtgttgaatact

SEQ ID NO: 1780 - DNA, 3641 bp, Homo sapiens
tacagctgaaagtaattcctttcagcctcaggtgaagactttgccatctccaattgatgctaaacagcagttgcaacggaaaatccagaagaagcagcaagaacagaaactacaatcccctttgccaggagaatctgcagcaaaaaagtcagaaagtgctacaagcaatggagtgactaatcttcctaatggaaatccttcaatcctttctcctcaacctattggtatcgttgtggcagctgtccctagtcccattccggtccagcggactaggcaattggtaacttcaccgagtccaatgagttcttctgacggcaaagttcttcccctcaatgtacaggtggtcactcagcacatgcagtctgtgaaacaggcaccaaagactccccagaacgttccagccagtcctggtggggatcgttctgcccggcaccgttaccctcagatcttacccaaaccagcgaacaccagtgcactcaccattcgctctccaactactgtcctctttactagtagtcccatcaaaactgctgttgtacccgcttcacacatgagttctctaaatgtggtgaaaatgacaacaatatccctcacacccagcaacagtaacacccctcttaaacattctgcctcagtcagcagtgctacaggaacaacagaagaatcaaggagtgttccacagatcaagaatggttctgtcgtgtcgcttcagtctcctgggtccaggagcagcagtgcggggggaacatctgctgtggaagtcaaagtggaacccgaaacatcatcagatgagcatcctgtacagtgccaagagaactctgatgaggctaaagctccccagacacctagtgcccttttggggcagaaaagtaatacagacggagcactgcagaaaccttcaaatgaaggtgtcattgaaataaaagcaactaaggtctgtgaccagaggaccaaatgtaaaagtcgctgtaataaaatgctgccaggcacgtcaacaggcaataatcaaagcactatcactctatcagttgcttctcagaacttaactttcaccagcagcagctcaccacctaatggtgactcaatcaataaagaccctaaattatgcactaaaagcccaagaaaacgactgtcttctacattgcaagagacccaggtgcctcctgtaaagaaaccaattgtggaacagctttcagcagctaccatagaagggcagaaacaaggcagtgttaagaaggaccaaaaggttccacattcagggaaaacagaaggttcaacagcaggtgctcagattcctagcaaggtatcagtaaatgtcagttcacacataggagcaaatcaacccttgaattcctctgcccttgttatcagtgattcagctttggaacagcaaacaaccccatcatcatctccagatataaaagtaaaacttgaaggaagtgtctttctcttggacagtgattcaaagtcagttggcagctttaatccaaatggatggcaacaaatcactaaagattctgagtttatatctgccagttgtgaacaacagcaagatatcagtgttatgacaattcctgagcactctgatatcaatgacttagagaaatctgtttgggaattagaaggaatgccacaggacacatatagccagcagctacatagccagatacaggaatcttctttaaatcaaatacaagcacattcttcagatcagttacctctgcaatctgaactgaaggagtttgagccttctgtttcccagacaaatgaaagctactttccttttgatgatgaacttacacaagatagtattgtggaagagctggtgcttatggagcagcaaatgtcaatgaacaattctcattcttacggcaactgtttgggaatgacccttcagagtcagtcagtaactccaggagctccaatgtcatctcacacttccagcacccacttctatcatccaatccacagcaatggcactccaatccacacacccacacccacacccacacccactcctactccaaccccaaccccaaccccgacatctgaaatgattgctggatctcagagtctgtcacgggagagcccttgctccaggctagcccagactacacctgtggatagtgctttaggaagtagccgacatacacccattggtactccacattctaactgcagcagtagtgtcccccccagccctgttgaatgcaggaatccgtttgcattcactccaataagctccagtatggcatatcatgacgccagcattgtctcaagtagtcctgtgaaaccgatgcaaagacccatggccacacaccctgacaaaaccaagcttgaatggatgaataatgggtatagtggggttggtaattcatcagtttctggccatggtattctcccaagctatcaggaactagtggaagaccgtttcaggaaacctcatgcttttgctgtgcctggacagtcttatcagtctcaatccagacatcatgacactcattttggtcgtttgactcctgtctctcctgtgcagcatcaaggtgccactgtaaataacaccaacaaacaggagggttttgcagtccctgcccctcttgataataaaggaactaattcatctgccagcagcaacttcagatgccggagtgtgagccctgctgttcatcgccaacgtaatcttagtggaagcaccctctatccagtatctaatatcccacgatctaatgtgaccccctttggaagtccagttaccccagaagttcatgttttcacaaatgttcacacagacgcatgtgccaacaacatagctcaaagaagccaatcagttccattgacagtcatgatgcagacagccttcccaaacgctcttcagaagcaagcaaacagtaaaaaaataaccaatgttttgttgagtaaacttgattccgacaatgatgatgcagtgagaggtttgggaatgaacaacctgccctctaattatacagcccggatgaatctcactcagattttggaaccttccactgtttttcctagtgccaacccacaaaatatgatcgattccagcacttctgtttatgagttccaaacaccatcttacctcaccaaaagtaatagcaccggtcagatcaatttttctcctggagataatcaagcacaatcagaaattggagagcaacaattagatttcaatagcactgttaaagacctgttgagtggagacagcttgcaaaccaaccagcagctggtaggtcagggagcatctgatctcactaatactgcatctgatttctctagcgatatcaggttgtcttctgagctctcaggcagcatcaatgatttgaacactttagacccaaatctactgtttgatccaggtcgtcagcagggacaagatgatgaagctacactggaagaattaaagaatgacccattatttcaacaaatttgcagtgaatccatgaattctatgacttcatcaggttttgaatggatagaaagcaaggaccatcctactgttgaaatgttgggttaaattgtgttttataacatgtagcacactgtatctaaagacatatgtattgtatttgtcttaatggaagtgcctcccgcagcagaaatactattaattgtgacatttt

SEQ ID NO: 1781 - DNA, 3063 bp, Homo sapiens
tgagtgctgctaaggccaaaagcaaaaccaagttaggtcctggagagaagaccctaaaagacagcagatccaagactgccattgggttgtcacacatcatgtcagctggagatgccaaaaatttactggacacaaaattgcccacttcagaactaaaaatatatgccaaggatataataattaacatcctagaaacaattgtgaaggaatttggaaaggtaaagcaaaccaaagctttaccatctgatcaaatcatagcagcaggtaaaatagttaatacagttttgcaagaattatatgttaccaataactgcaatttggcttacccgatgaaatcctcacatctcagactttcacaggggaatataggcacaggatcccttcctaaacaacaagcatgtttttacttggagaatgtttcttcacagctagagcacatttttcctagagaaggtatatttaaaaaattgtttgacaagtggcaaacagaatcaaatgacaaggaaaatgaaaaatgtaagctattgatgatagctgaaaatgttttgactgaaatttcaataaaagcaaaagaattagaatattctctttcacttttaaatttgccccctcttgagaattgtgaaagcaggttttataatcattttaaaggagcttctactagagccgaggatactaaggcacaaattaatatgtttggaagggaaattgttgaaatgctacttgaaaaactacagctatgctttctgtcccaaattcccactccagatagtgaagaaactctatcaaacagtaaagaacacattactgctaaaagtaaatatggttttccaaacaagcatagcctcagcagtttaccaatctataacacaaagacaaaagaccaaatttctgtgggctccagcaaccaaattgttcaagagattgtagaaacggttttaaacatgttagagtcatttgtggacttgcagtttaaacatatctccaaatatgagttttctgaaattgtgaaaatgcctatagaaaacctttcttctatccaacagaaactgttaaacaaaaaaaggttgccaaaattacaaccactgaaaatgttttctgataaatccgagtcaaatactattaatttcaaggaaaacatacagaatatccttctacgggttcattcattccattcacaattacttacatatgctgttaatatcatcagtgacatgcttgctgtaattaagaacaagctagacaacgaaataagccaaatggaaccatcttcaattagcatattgaaagagaacattgtagcaagtgagatcattggcacactaatggaccagtgtacttatttcaatgagtctttgatacaaaacctttcaagagaaagtttgttccaaggagctgaaaatgcctacactgttaatcaggttgaattagcaactaatatgaaaatgttcacatcaaagttaaaggaaggtagtttggggattaatccttcacaagtgagtaaaactgggtttgtgttttgttcagatgaagatatgaaagaaaagtacagggtttcatcagatttacccacctctgtcagatcctctgtagaagacacagttaaaaactcagagccaacgaaaaggcctgattcagaaactatgccatcgtgttctactagaaacaaagtacaagaccacagaccaagggaatctaactttggtagttttgatcagaccatgaaaggaaatagctacctccctgaaggcagtttcttgcaaaagctgcttaggaaagcaagtgactccacagaagcagcattaaagcaagtcttgtcattcatagaaatgggaaaaggtgaaaatctaagagtgtttcattatgagaacctaaaaccagttgttgaaccaaaccaaattcagacaaccatttcccctctcaaaatatgtttagctgcagaaaatattgtcaatactgtgctatccagctgtggctttccaagtcaaccacacactaatgagaacagggaaataatgaaaccatttttcatatcaaaacaaagctctttatctgaagtatctggagggcaaaaggataacgaaaaaagtttgcttagaatgcaggataaaaaaatcaactatatacctgaggaagaaaatgaaaaccttgaagccagccgggaagattcttcttttttgcaaaaattgaaaaaaaaggagtacccaaagatagagactgtgaaggaagttgaagcctttacttttgctgatcatgaaatgggttccaatgaagttcatctgatagcaagacatgtcaccacatctgtggtcacatatttgaagaactttgaaactacagtttttagtgaggaaaagatgtctgtttctacatggtcaaggaaaaaatacgaatcaaaacagttcctaagaaacatatacgatgattcttcaatttatcaatgttgtgaacatctcactgagtcagtactttaccatttaacttcgagcatttctgatggcaccaaaaagggtagagaaaaagagaaagcatgggaaattcaagaagcaacatttagcaagattatttcaattcattctcaagtgtttgagagcaggtcaatttccattggagaacttgctttatgtatttctgaaatcattattaaaattctttttaataataaaattatacaggctgacattgcacagaaaatggttgccatacctacaaaatacacttactgtccaggaatagtttctggtggctttgatgacctctttcaggatctcttagtaggagtgattcatgtactgtccaaagaaatagaagtagattatcactttgaaagcaatgtaagagacaaatcattttctatgcatagaaataatagtgtacccatttgcaacaaaatcaatagacaggcaagccccagagactggcaattttctactcaacaaattggtcaactttttcaaaaaaataagttaagttatcttgcatgtaagttaaacagcctggttggtaacctaaaaacaagtgaatccaaagaagtagtcaataaagtttttaatattgtttcag

SEQ ID NO: 1782 - DNA, 3330 bp, Homo sapiens
agtatatatgtaatgccgaagagaggttagggtttctttaggtttccgtactttcctgttgagcactgcggcgcaactcgccttgctgcggttggtggtggcgatggagattgcagcgcggctgaagggaacctactgggttggtgacatttacaagagagtcttgaagattttccagaacgggaaagattttgaaagaacaaagaggaactacagaatcattgcttacattgacacaattgaatgggaagccatcattctttaaagggcaatgaccaagcagtaccagcagagattgaagtaccagcagaaggctaagaagggatcatggcacaagttgcagttcccaccctgcccattgaagatgaggagtccatggaagatgaggagtctgttgaagacgaggagtccgttgaagatgagtccgcggagagcaggatgctggtgacattgctcatatcagctcttgagtccacgggagcttacagcttcattgcaccatgtgtggcatttgggtcctgtttggcagcaatgactgcctttctgtttagtgtctgtgtgctatgaagattgcaaacggggtccagatgcattctgttttgagaatgtcaatggatacactagctgctgctttggatttcaccggttggtggtagttgacccgctgtttggaatgcagccaatttaagtgaagaaatatccatacacgtggctctgttacaatggtgaaatctacaaccataagaaggtgcaacactattttgaatttgaataccagaccaaagtggatggtgagataatccttcgtctttatgacaaaggaggaattgagcaaacaatttgtgtgttggatggtgtgtttgcatttgttttactggattctgccaataagaaagtgttcctgggcagagatacatgaggagtcagaccttcgtttaaagcagtgacagaagatggatttttggctgtatgttcagaagctaaagttctggaggccacaagtccaaaatcaaggtgtgggcagaaatgcgctccctctgcagactcttggggaggatccttgcttcttccaggtctgcgactgtggttcctgcagccactggaaccagctctgcacagctcagacctgagtgatgaggacacagcttcgcagcagctcctgaatgttccggatgagctcggcttcctgagggaggagacgccctgagcaccagagccagtccctggtgaggatcccaggaggcccagctgctgcaggccttggtcaacacctgagcaaccacaaggagttgaatgccgggcctgagctctgactgtggcggaggcaggtcctgtgctgcggaggctgccctcaaagccattcagggccaggctgcctggcggaggctggatgggcaggaagcgccccaggacacatcggagtccccctaacctggggccaggggagccccagcctaggcgcgattccccacacggccagcggagggcgacgttggtctggcactgagaagcctgcggctcctggctcggcctcccctccgtctgcctggcgcatgcagtcctggggacccccagcccctccggcctcctcttctctgagagccccccaccagaaagtcctcactaggaagtccatacccttcctacagcacagacctctgggcccctgttctctccaccttcaccccctctcccaccacagcccacaccctcactccagccacaggagccggagctcctcctgggccattcccaccaccccgcccagggtctctccagccccaccatgtgccggccagtgccctcctcctggacctgacctccccccgtcctggcctctcccgcggccagaaccctcagtccatgctgctgtcaccacggtgcgcctggcctgacacagcctcctgatggggcttttgaggacagcagcccggagacttaccctaacccaggccgagtcagaacctgtggcaggcggcctgggaacctcttcttactgtccatcaaaattgggaggtcaggggaccttcagggactggtgtggtctgagaaacatcctcgagcctcgccatgactcagtttccccagatggcagcaggctggagcccacacgcagggcaggatgccaggctccaccttttgtctggaacctgcattcactgggcgcctctctttaggcagagcagagcagagctgcccgtgtttgtcccctgatctgtggccccaggagcccgagagaccacctgagccaacgagaaggcctctgggccagagcccagctctgcgaagtgggagacttctcagcctccacttccaggtgccctgaagtcgttggcagggggtgctgcctgcttggggctcccagactaagggaacacattcatgtggtgaccacgataggccctgcaggctgaggcacaggatttgaccaaggacgcatcagagataggagactgggccctcactcctgccagctgcaaactcccaaagcccccagccctctcatggggtgaagatgccctgaaggacactccagtgtgctcccacctctgggttctgccagccagagagtgggaccctcaggccacatgtgtcttgctggatctcagctttagggacccatcgtgctggcagctccctgagacctgggtcagggggtgtccattagagcaccttggtcaggacccagagatggggagggcagttggcatctccagaaagcaggaggtggggcatggctctgtgacagacgtccctgtgacagggaggattggagggacagaggggcgtgctcaggggcggaggggcagatgaggccaccaaagggcaccttgaacactggatggccccaggaaggcccttgaaccccatcctgattgatccagggcctgtgaccttggcccagactgcaggcctggggacttgagttcctttagtttcttaagaaactactatactcctttttggcatagctgtacgattttacattcccaccagtaatgtgtgaaagctctagtttttactcatgctcctcagcgtttgatgttttatttttattttagctattctgatatatatgtgttagtcattgtggtcttaatttgcaaatttctaatgactaatgatatttaacaccttttcttgttcataattaaataccatctgtattccttttcgcatatcatcaacacaaccgtgaaaaatcagaacaaaatttttcagacgacttcaaaatttttagaacaatactcaagggaaaaggtgtttatttagaacaatgaaaacaatgagacattaacttccaggttaaataaagttgattgtgtgcat

SEQ ID NO: 1783 - DNA, 2469 bp, Homo sapiens
ttatcaaatgctttttcaacaatagtttaaatgatcatatggtttttgtccttcattctgttgacatgatgtatcacattcattgatttgcatatgttgagtcatccttgcatccctaggataaattccacttggtcacgataaatgatcttttttttctttttttttttttttttttgtgagactgagtctcactctgtcgcccaggctggagtgcagtggtgcaatcttggcttaccgcaacctccatcttctgggttcaagtgattctcctgcctcagcctcccaagtagctgggactacaggttttccaggatttagggatggaagtactgtctggagttgccaaaggctataacatatgcctttttgcttatggacagacaggctctgggaagacatataccatgctgggcaccccagcctctgttgggttgacaccacggatatgtgagggtctcttcgtcagggagaaagactgtgcctcactgccttcctcctgtaggataaaagtaagttttctagaaatctataatgaacgggtgcgggatctgttgaagcaatctggtcaaaaaaagtcctataccctgcgggtcagggagcatccagagatggggccctatgtacaaggtttatctcaacatgtagttaccaattataagcaagtaatccaactcttggaggagggaattgcaaacagaatcacagcagccacccatgttcatgaggccagcagcagatcccacgccattttcacgatccactacacgcaggcaatcctggagaacaacctcccttctgaaatggctagcaagatcaaccttgtggacctagcaggcagcgaaagagcagatcccagttactgtaaggaccgcattgctgaaggagccaatatcaacaagtcccttgtgactctaggaattgtcatctccaccttagcccagaactcccaagttttcagcagctgccagagcctcaacagctcagtcagcaatggtggtgacagtgggatccttagctctccttctgggaccagcagtggaggggcaccctcccgaaggcagtcttatatcccataccgagactctgtgttgacctggctgctgaaggacagccttggaggcaactctaaaaccatcatggttgccagtgagtgggatgccagagctggacctgtgttgggactggtactctatctcagagaaagggccatggccccagtgagtgggatgccagagctggatctgtgttgggactggtactctatctcagagaaagggccatggccccagtgagtgggatgccagagctggatctgtgttgggactggtactctatctcagagaaagggccatgaccacctaggtttctcatttcatcaggggtcttatacagcatgggcagtagtaacaaggcaagtgattaagagctgggatggatgggctggcatgtttttaaactttctccttctacctcagcggtgtctcctgcacacactagctacagtgagaccatgagcacactgagatatgcatccagtgccaaaaacattatcaacaagccacgagtaaatgagatagaccagctgactaaagactggacccagaagtggaatgattggcaggccctcatggagcattacagtgtggacatcaacaggaggagggctggggtggtcatcgactccagcctgccacacttgatggccttggaggatgatgtgctcagcacaggtgttgtgctctatcatctcaaggtgaggaggctagtgtatccttttcttcctaagccactggttccagaggtcaaggagggaaaagctaggagcagcagccatgttactgtgaattgaaatcaagacagatgctacagagctgccttcaggtttgctctcaggaaacgtctacctgacaaattgtgatctgttttgccttcgtatgtatagagcagaagactggaaatcagaacaattgtttttcaactgctgctactgttgttcttatgtaacttacttttgttctctttgccttaatttcctcattttaaagtaagaatgatgcttatcatattccttttctggcttagtgaagcataggggtatagtcatggagagtgaaaccctaacctcaagataaccattagtgctcctaaactctacaaatacagactgctcaaaggtggctttcaggttgggcgcggtggctcacacctgtaatctcagcactttgggaggctgaggcgggcggatcacttggggtcgggagttcgggaccatcctggccaacatggtgaaaccccacctctgctgggaatacaagggttagccgggcgtggtggtgggagcctgtaatcccagctacttgggaggctggggcgggagaatcacttggacccaggaggtggaggttgcggtgagctgagatcgcgccactgcgctccagcctgggtgacaaagtaagactctgtctc

SEQ ID NO: 1784 - DNA, 4060 bp, Homo sapiens
gatttctccatcctgaacgtgcagcgggtcttcctgctctgtttcccaggctggagtgcaatggtaccatcatagctcactgcagccttaaacttccgggctcaagtgatcctcctgcctcggcctcccaatgcattgggattacaggtgtgagtccctgcgtctggccaggatgtatgtgagctttatttaggtttagcccctgccctagaatgcaagctcccccagagatctttgtctgcctgactcgatatgtatctcaaggacttagtgctcaatatatatctttgagtgggtgaaaaacaagcggtcttaaaaagaaaggaggtgagcccggggagataaggtcgcattcagtgccagtgcttggtcagccatgaccctgcaccatgcgagtgacattgggactggagcaaagggacacagcagagtggcccctggtgcccaggacccggcagagctctcggactggttgcaagccagcaatagtggctatgcccgtgtgggagacgcagcttgccttagacttcagcgggaaccaccatgtccggcacagccatttccatccttcccaggggttcttacgtgatcctggcagtctcagtcaaacttccaaactcagcagggaatgtgtgtgcttgtcctccaatctcaacaccctgggatgcagtgtcaggtgcaggtcagagacagcagtggagacccgattcccagccctgggctggggcccccacaaggcctccagcatctccccatggcccagtttcctcatctgcaggacaggctctcttgagaatttggggggatgatagacccaaaagcattctggagccagaggcttctgccttcgtcgggggcatcagggagtgtcagtcatgaattcaccatgacttctgaccacctctgcctggactccctcacctcagtgctgcctaagctgggtaaccaccagcttcctgggccttcaccccgcagggccttcctctccagtgatgcgcctggaaagagggatttctctttgcaaaggtctctggaattgccaagttatggctttaagcatatgtagggaaactccctcccctttgcacttttggagtttttttccagccctcaatagaaatcaatacagtgaccaggctgcccttttcaccacactctcaggctcctgaggaccctggtggaagatggactaagcacatcctgggcatcggggacaggcaccggctcctcaagcgtggacagggacagggatggggcggggcagcgctgcaggaggtggggcctgggctgattttcttgctgtactactttcagtcactacgtacctgttatgggttgaactaggctccctgtattagtcagagttctctagagggacagaactaatggaatataaaaaaataaatatatacatatatatggaagtttactaagtatgaatttacaggatcacaaggtccacaataagcaatctgcagcctgaggagcaaggggagccagtgtgagtcccaaaacctgaagaacttggagtccaatgttcgagggcaggaagcatccagcacaggagaaagctgtaggctgggaggctaaaccagtctctcttttcacatttttcagcctgctttatattctagctttgctgacagctgattagatggtgcccacctagactgaaggtggatctgcctttccaagccactgactcaaatgttaatctcctttggcaacacctcacagacacacccaggatcggtactttgcatccttcaacccaatcaagttgacactcagtattaaccatcacacccctcaaatgtatatgttcaaatcctaacctcagaacctctgaatgtgaccttagttggaaatagggtctttgcagatgtaattaaagacgaggttgttttccagtagggtgggccctaatccaatatgactggtatccttataaaacaggaaaatttgtttgtttgtttgtttgtttgtttaacttctattttaggttcaggggtccatgtgcaggtttgttacatgggtagattgtgtcatgggagtttagtgcacacattatttcatcactcgggtaataagcgtagtagccaatggatagctttttgctcctctccttcctcccaccctctacccttgagtaggctcaggtgtctcttgttctcttctttgtggccatgtgtgtttaatgtttagctcccactaataattgagaacatgtggtatttggttttctgttactagattagtttgcttaggattatggcctccagttccatccatgttcctgcaaaggacatgatctcattctttttgatggttgcatagtattccatagtgtatatgtaccacgcttttttatccagtctaccattgatggccatttaggttgattctatgtctttgctattgtaacggtgctgccatgaacattcgtctgcatgtgtctttgcggtagaatgatttctattcctttgggtacatacgctgtaatgggattgctgggtcgaatggtaatcctgtttaagttctttgaggagtcaccagactgctttccacatggctgaactaattcgcactcccaccagcagtgcagaagtgttccccaaaaggggacatttggacacagacacgcagaagcccactcctgcctcctcactcagcctggatttgtctcagtcgccctcgcttgcctctcacacgtgtgcaccctcacactgcttcagcatctgccggtcctccggcctttgctcttagagcagagattctcaacctttctccatttgggcttccctgagtggttccgtagttcatttatggtgcccgccacccaaaataaattcctggcagttctatttactaattaggtaggtccaaacaactcagtaatagtaggctgggtggtgtccaacagctgccttcgtgtatcactgggaaatcttaaagatcccacagtggcctgtgagtttgctgaaataccccaggtgcacagtttggggaacatagtcttatagatttgatgaattccctttttgcacctgtatatcactcacggggctgatctatgactggtgtgctagtccatttgtgtcacgatagaggtaaacctgagactgagtaacttacaaagaaaagaggtttagccgggcacagtggctcacgcctgtaatcccaacactttgggaggccaagtcgggtggatcacctgaggtcaggagttggagaccagcctgaccaacatggagaaacctcatctctactaaaaatacaagattagctgggcgtggtggtgcatgcttgtaatcccagctactagggcaggcagaggtccttctcagatgctttgggtcctgccattgaaagggaagaagagaagtcccttccctgggagagcctcagtgatccctgcacaagaccagccgtcttcctccgccccatattgttcagccctggcaccctgtgttgtgcgtggagtcccttgttttcctctatcttatcaggaaccagttctaggttcctaacctggtctgaccccggcaccctgtcctgttacacaagaaacccggatgctgatatatatatgtcccaacattgcccttccagagcctctccagctgtgactcactgttgacatggcaacccccaccccctggactcctcgctcaacccacaaagactatctcttgcgtactctgctctgaggtgttttaaaaagcgccaccataaacctgtaacacaagaatgaaacccagcaagaatcaggggacaggaaccaaggaacatgacatcacgtgagaactaagggccgctctgattgaccatagcatttggctctcagcctcccacggccaaggctaagggaggataggacaattgtctctctcactcttgaacaagagggagctcctggattcaccgggagagtaaatttgactagcttggacttctgcaaggtaatttgttgtgactgcatattaaggagactaatcttaacataatcttaacataatttctttatattaaggagattaaataaatccatggatatgtt

SEQ ID NO: 1785 - DNA, 2814 bp, Homo sapiens
aaataagctgggcgtggtggcgggtacctgcagtcccagctactcaggaggctgaggcaggaaaatggcgtggacctgggaggtggagcttgcagtgagccgagattgcgccactgcactccagcctgggcgacagagcgagactccatctcaaaaaaaaaaaaaaaaaagtggtatctatattatgactagttttcataacagtatatatctttcccatcctaatgatgaggaaactgaggctcagagaggttacctcactttctaagcattacctgccacatagatggtggtattagaatttataccgtggcctctttacctcttaaatttcttagtattttcattccatgctattttgagggaaaataacataactttaattttgtcttatctggagccttataataagtgctcagtatttactgagcagataaccttgtaaagtatttaggctgccagaattatagattaactgcaaattcttctaccatttgttctgttctggtgaattataaaggtaaactaaaaatgaaaccttaccaatttttggcatgttgatcttagaatgttaatagttttgagcttgaattgccactcagtctggatcagattgcctgcctggtgtctgtgatatatggaagtcctttaagatagtataaaaagtggagtttgaggtgttttccaaaattctgaataaaaattatagacttagtaatactgcacaaccaaatcagattcttatctgtttatttctggctggcagcactttagtccagtgagactactggtctcatgattgacagttatataaatgactgaacagagttaatatgcagtttggcagataaatttttcattttttttttttttggagatggggtcttgatatgttgctcaggctggagtacagtggctattattcacaggtgtgatcatagtgcactgcagcgtccaactcctggcctcaagcaatcctccctcctcagccccgtaactagctgggactacagggatacaccattgtgccttgcttagacacatttttaaacatggaatccatttgtgttacattaagaagtgttcttggctggggttggtggctcacgcctataattctagcacttctagagcccaggagtttgagaccagcctgggcaacatggcataactccgcctctacaaaaaatacaaacattgggcatggtggcacatgcctgtagttccagctacttgggaggctgaggtggaaggaccacctgagcccagggaagtagaggctgcagtgagccttgatggcaccactacattgcagtatgagtgatagagacaccatctcaaaaaacaaacaaacaaaaaaaaacagaagtgtccttgcctagtgagaaagattagaaactgctgcaatagaatcataggtccttaaaggtaccttaagctagtcatctttccttctcaatacaggaaccattatcatcctgatggatacccagtcggcctttgcatggctgtttttggttacttgctagtcagattgaattatttttttctttataccatattcaaatccatctaactttactcttctaaattctctttgtaccagcttgaaaaaacacttgagtgacatagcccttcagattttgaagttagccattaaatgtaactctccctagtaccattcagtatttcttgtatgagatgatttatagattgctctcaatgagaggatccttttttgaaatggttgattgctatcaaacagtatgtatatttatttattgccagtaagatttgaaaggattttttttttttttttttttttgagacggactctcactctgtcacccaggctggagtgcagtggcacgatctcggatcactgcaacctctgcctcccgggttcaagtgactctcccacatcagcctcccatgtagctgggattacaggcatccgccatcatgcccggctaaaatttttttgtatttttagtagagacggggctttacctgttggccaggctggtcttgaactcctgacctcaggtgatctgcctgccttggcctcccaaagtgctgtgattagaggcatgagccaccgcaccctgccaaaaggatatattaggccttataaatattttgactctctattttttttttttttttttttggagacagagttttgctcctgttgcccaggctggagtgcagtggggcagtctcagctcactgcaacctccgcctcctgggttcaagcagttctcctgcctcagtctcccgagtggctgggattacaggcacatgcccggctaatttttgtatttttagtggagatggggtttcaccgtgttggccaggctgacctcaaactcctgacctccgcccacctcagcctcccaaagtgctgggattacaggcgtgagccaccacgcccagccaaatatttttattataccatgcatattgtagaatatatgctcttggtactatgaggaatataaaatggtctcagtaagtattgtatgtgcagtgtcttgctgagattacatcttaataaaaactgttgaactgttcattaaattttcattaaagttctgtctagatggccaggcactgtggctcatgcctgtaatcccagtgctttgggaggccaaggcgggagggcccaaggccaggagttcaagaccagcctgggcaacatgacaagacctccatctctacaaaaaatgaaactaagaagttctgaataggaatgaaagggtggtaggtgctaggagtttgctgcttcttgaaccatagcactttgctaagttt

SEQ ID NO: 1786 - DNA, 3122 bp, Homo sapiens
caagaacaaagcaaatgtgcagaaggaaaaacattaagtggatgtccatgtccaccctcctagaaaagagctatttgcttttttttttttttttttttctgtcatggagtctcgctctgttgtccagactggagtgcagtggctcactgcaaactctacctcccgggttcaagagattctcctgcctcagcctcctgagtggctgggactacaggcgcacaacaccacgcccagctaattctttgtatttttagtggagatggggtttcaccgtgttggccaggatggtctcgatctcctgacctcgtgatctgcctgccttagcttcccaaagtgctgggattacaggcatacaggcgtgagcccctgcgcccggcctcactttttttttttttttttaattttagaaaacttacacctaagtagtcacatatgtagaacaggctgtcataaacttttttggttaggtaaagattcttaagcctggactacatttggttaggtaaagattcttaagcctggactacagcctcacgcctgtaatctcagcactttgggaggccaaggcgggtggatcacttgagttcaggagttcaagaccaccctggccaatgtggcaaaaccctgtctctactaaaaatacaaaaattagcttggcgtggtggatcacgcctgtagtcccagctacttgggaggctgagacagaagaatcgcttgaacccgggaggtggaggttgcagtgagctgagatcacgccactgcactccagcctgggcaacagagcaagactccatctcaataaaaaacaaaatgaaaaaaaaaaaaccaaaaaacgattcttaagcctattatgttgaaagtcattaagaaattttaaggatttcagcgcaaggaagttagatgcgtaagtttttgtcaccctgaatgggaaattcatcaccgaatgtcaggaattactgtgtctgttttctctccggctttggtacctggtattgccactgctactggaaattgtgaatttgtttactgtaaactacagattctcttgctgtgttggaatgtgattgccttggacgtgcttggatttggtgggaggtctatgttgtgttggtgcccacaccattttccaaagctgtgttgtccggggccaccctcttcaccttgggacaggtacatgccacacacacttccagtagagctcccactcaggaaggatgccagaattcaacccctatttgttactggaagtacgtaattccaaatcttcaatatttttaattattggtgggggaaaaaaaagacttgtgacccagcttagagctgatcttgctctactgggtgacactacgcctggtgggtaagcatctcgccagagctcccaggcacagggggagtgtgcgtgggttctgattcagctttgcttggtgttgacttggaggaactgcccgggtctccgtgatagcgtttcttctagaccataagctccctgtggctggggccgagaatttatgatgtttcaccagagacctagtgcaggcactggctcctattaggtatgcaacaactgggttctgtttgttgagtgaacaaattaatgaccacatgaatttgcagcttctgtaggagaaaaacggcgtcatcgatttagtctggtgtcctaaaaggaccatgagcctgtcatgggggggaattcagacagccttcttcggttatggggaggggggtgaggtgtgtgtgtgcacatgtgtgtgtgtgctgtcattcttgatgccacttaattttttttcttttctttttttttttttgagacagagtcttgctctgtcaccgaggctggagtgcagtggcgcgaacttggctcaccgcaagctccacctcccgggttcacaccattctcctgcctcagcctcccgagtacctgggactatgggcacctgccagcatgcccagctaattttttgtatttttagtggagacggggtttcaccgtgttggccaggatggtctggatctcctgacctcatgatccaccctcctcggccttccaaagtgctgggattacaggcgtgagccaccacgcccggcctttttttttcctttttacatagttaatgtatccaactgaattcttggtttgtttgttttcgttttcgtttttgtttttttgcaacggagtctcactctgttgcccgggctggagtgcaggggtgtgatctcagctcactgaaacctccgcctcccaggttcaagcgattctcctgcctcagccacctgagtagctgggattacaggcgcacgtcaccacgcctggctaatttttgtatttctaggagagacggggtttcaccacgttggccaggctggtctggaactcctgacctcaggtgatccacccgccttggcctctcaaaagtgctaggatgacaggcgtgagctactacgcccggccccaactgaattcttgatgccacttaattttgaatttcatttacccaattcaaaattcaaaaaatttgttttcctcatgaacctgagaccctgtgcatatcccatacttgctcttccctctttctctaaagccttttcgcccagtatttttatagtaaatgtggatggcttgaataattacaatgagaacaagacttctgtttgtggtaactttgagtggtaagattcatatgggtgtctttttttctttatacttttctgtgttttccatgttttctgaagtgaatgtggttactttttaaaattattttttaattttgtagagacggggtctcaaccatgttgcccaggttagtctggaactcctgctctcaaacgatcctcccaccttggcctcctaaagtgttgggattacaggcatgagccaccatgcccagctgcttttttaaatacatactttttatcatggacaatttcaaacatagacatagagtaacaagcttccacatggctgtggccggcttcagcagctatcatcttgtggccaggcttgttttatcttcacccccattcacctttccccctcgccccagttctttagaagcaaatcacagatgtcatcttactttgtctataaatatttcaaccaaaatttctagaagataagaattctt

SEQ ID NO: 1787 - DNA, 2696 bp, Homo sapiens
gcggagggagccgcgggatggaccgcaggtgaggccgatcgctcttccagggactacaggaggctggggaggaccaacggcgagagcagcacagcctaggacgggctggatacggtctggagtcgctagggctccaccgcactggaactacaattcccaacatgctccacagccgttggcctctccagccgtagccgttagcatcccgggggtcccctaagagtcttatgttcctctctgagtgggccccaaggaattattgcctctaaaggtgtccaagaaaggcttgagatctgaatttcttcattttgaaatggcccccagacacgcctgggcgttgtctttgaactttctcgcggaggcggagcccagtggatcctggggcttgtagtccatctaccccttgccttcgtgtcccccaggaatgtatgggaaatgctcggtgatataatccagccgcggttctttctttctttctttttttttaagacagagtctctcgctctgttggcccagactggagtgcagtggcacaatcttggctactgcaacctctgcccccgggttaaagcaattctcatgcctcagcctcccaggtagctgggactacaggcacctgccaccgcgcctggctaattttttatatttttagtagagacggggcttcgccatgttagtaaggctggtctcgaacacctgacctcaagtgatccacccgcctcggtgtaatcccaaagtgctgggattacaggcgtgagccaccacgcccggcgagccgcgattcttaacctgaactccacttcgcaatcacctgggacgctgcggaaaagacacggaggcccagccccactaatagatattctgattctgttggtctggaatgggaaccgcgcgcctgtaacgttgaaaagcccctcctagactggatccagggttgagaaccaccggctgtcagttcctgagttgctccctgttaagactgctccaggggcgggctcccaggactcacccttccactgtcgatatcctgaatgtgcaacggtgcttcatggaaatgacagtccgtctcctccaggaatctatgggaattgtctggttctgccctcctctaatgtccccctccccagggctgcggcgaaaccacgtgctgcctgaaccccactttcctcttgcagcctgccagttttctccattcaagatagtccctttggagatgcgcccctgggtcgaagccactactggccatcccagagccagacctggtgtcccaaggtgaggacacccctcaaagagtgctgagtgccagcccagtagcaagagaatgacctttagagggtaggaagacatgtgatgagagatagggatgagagatttaagagacagccccttgtcccctccccacggccctgcccttgtccccctctctaccacctggattccccatctgagcccccatcacactaggttgttatcattacaggatgtgtttcctcccctctggactgagactttgtgtgtgtcctggttcccctgcagggatgacccatgagacctcacactttttcttcttgtgctcttccctgatcttagaccctgagcccatccaggtctcagagatccaggctcccacaagctcccaaggctctagccacaggtcccaactcccctgagctgtttgaggagtcctggccatccagttcagggaccccctccctgcccagcaccactgagggacagatgtgggcctccccagcacccaccctgattgacagcggggactccgtggtggccaagtatataaacaggttccgccaggctcagcccaccagtcgagaggagcgccagcctgcaggcccaaccccagctgacttttggtggctgcagtctgactctccaggccccagcagtcaaagtgcagcagcaggagccaacaaaccagaaggaagaccccatacagctgtccctactgcggtcaacgtgaccagtgcatcccatgctgtggctccccttcaggaaataaagcaggtgacatccccattcactccctcccttgggtgcctgaactgacaacaccagccctaggacagaattagaagatcaggagcagtggctcacacctgtaatcccagcactttgggaggccaaggtgagaggactgcttgaggccaggagttcaagaccagcttgggtgacatggtgagattctgcctctactaaaaaaaaaaaaaaaaagagagagagagagagaaccaggtgtggtggtatgtacctgtaatcccagctacttgagagcctgaggctggaggatggcttgagcctaggagttcaaggctgctgtgagctatgatcatgccactgcactccagcctgggcagtagagcaagaccctgtctctatttaaaaaaaaaaaaaaaaaaaggcctgggcaccgtggctcatgcctgtggtcccggcactttggtaggctgaggcgggcggatcacgaggtcaggagttcgggaccagcctgaccaacatggtgaaaccccgtctctgctgaaaatgcaaaaattagccgggcgtggtggtacgcacctgtagtcccagctactcaggagcctgaggcaggagaattgcttggacccgggagacggaggttgcagtgagccgggatggcgccagcgcactccagcctggcgacagcaagactccatctc

SEQ ID NO: 1788 - DNA, 2728 bp, Homo sapiens
ttttaaccagataaggctggattagccacacctaactcttcagaagctctttggtctatgggaagacatgagtagagagaaaatgctaacacaaggcagtggttttataccagtactaagtgccctgatggctggaagagaaagattaattacgaactgggggaggcctcacaaggcaggtgagtggagcctgagagtcggcaaggccactgagcagcgataagtttgcctgacaccgctgggtgttccacgtttttctagtccatccaacaacccactgaggcagtattagctccattttacagatgggaaaactgaggctcaggaacaatagaatggcctacccaaagtaacctgactggtcggcagaagggctgggattcagtcttggacccgactgactcccaaagccagcagcactcagattctccccgggagcttgttaaaaatgcagacccctaaagattctaacatagcaggccggggtgaagcgggggggggcctgtatttttaacagtcacctgagtgtttccaacagagtttgggaaacactgataggagtggtaggatttgactgagcaaatgaaagcttgggaaaaggtcatcccgggaagtgggaccagcctgggtgaaggcatggaagtcaggaaggtatacaactggggaatgacaagtttgaggtgtctggagcatgggtgggcttggtgagaagaagcaggggtaggggtggactgaggtttcttgaagtcatgggttcttgcaaggccttggacttggtgttcccttccactctgagagagcagaggaggaacggcctagcgaggaagacaggcttcactgtgaccttgggcaaaccacctcccagctgcgatcatcagcttcaactatctctcaaaagccccctcccagagtcgtagggagggaaaataacatcgggcacataaaaaggcatggggagatgtaaagcccaatacaagacggaagagcatctttcatactttgaattcattcaagacgcagggttcttgtcttgcccactcaaagggaagtccacaaggaaaccagtggagcgagtgagtcagggctagggggagggctgatgcagagtccatgccctgtttctccagagacaggagggccttgcttcccagtggaactaactgcagacggcagggccacagttgtctgggtctggcctggggtgatacaggaaggccacctgggtgctagtcatggacagatgttttctggccctccaggaggggtgactcttgcctctccctggagcagacagctgactgcacctgcaccaccttccccacctccctgtctcccctgccacccgtggggtcaggtttccagcatgaccttcccagccccttctttgtatttggtcacagtcaatccccgaagaaaacgaagatatcaccttttacaaaaagcgaaaaaccaggtaagattccaagtagtgggtcatttggggggctcaccaaggcccactctggctggatttctcaggggattccagtcaacttggagatgagtccctgcccaaggatgctgctcatttcatctattcattcacttattcatattcattctttaacaaatatttatcgagcacccacaatgtgctgaactctggggatcagtgaggaagaattcagacaagttcctgctgtcacagaacttacatcccagcagggaggaatacagacaacaaattaaaacacctggggaggagtggagacagatactgtaaggagaataacaaggctctgtggtcagtagtgagaaggactggcaggtggggagagggctcctagagctgaacggcaggaaagatacagctctacccaagtctaggaagagccaaccagcaaagctcccacctcttggtgtgctggtggaaaaacaagcagaccatggtggctggggccttctgggtgggggacagtggtaagggaggcatgagacaggtgggaggagctggcctgcggtaaaggccaggtgtgtgcatgggtgtagaagagggttatgagcagggtgtgcatgccccctctggctactgtgtgcagcacggactatgggggacaagaatgggtgagggagaccaaggagaggctgctgcagtcatcctggtgccttagactagagtggggggcaggggtggcagcaggctggaggggagagaaaaggaaacacatcctcaatgtatattattctccctgattagaccatcaaaggtccagagtgcctggcagagaggcacagagtaggcatctcattgatatttgttacttggatgttgaaagaagagaggttggattccattcgctccattcctctcaggttggattccctcctcggtcaccagcagagctgagagcaggagctgggcttgactcagaccttcccctcagcactcacacatccacctgcagctcccaggtgggggccccaccttcccggtcctctcctgcctgctgtctctcctcccactagagtacattggagaagctcaagtcctccagatgcattcaagccagaacacagagaagaagacatcgaagccgagggcagagagctgaggggccctaacacttgcacctgccttgctcaagagcagccccaagggttcaggggtgtttctgtctccaccaccttcacagcagtacctgattccctaccgtgaaaactcttactaaataaaaccgtcttccctgag

SEQ ID NO: 1789 - DNA, 2978 bp, Homo sapiens
tgagttcactctgggcagagcccacagtgcacttgtcagcctgacccatgatttttcataagtttaaccaatgttaagaagtattttagaaactccccctttcccgacgggcactggagtgccctacacacgcccctcgcctctcgcccactgccgggaggccctgtggtctctgctgtactcaggcctgcctcggccagttctttcccgcactatctggaaatgcgtggaattgtgagcatctaccccgcggcccctcccgccagctcgctggggcgtcctgcaggccaggctccgggcgctgtctgctcctgcgtggtcccttccgccagctcgggcgctgtctgctcctgcgtggtccctcccgccagctcgctggggcgtcctgcaggccaggctccgggcgctgcctgctccaggggctggccttcgcttcctttctcacgaaagccttacttgtgcccgtcagtttcttcccacagaacaaatatggatttcaaggcgggcgttggggatttgatgtaggatttggggacagacatcctctgacctcagcgttgcccgctgcggagctttgccaggagctggcgtccgtgacttaagtgaaaagctgggtcaaacccagagctccctggctctgcgctacgccgtgtacatgttttctctgggctgacaggggccctgcccctggggcactgagccctccctgtgggtcctcgaacagaagccagggtctgtgcggcacccaccagctgctgggccatggcggagtgttctggtgcgggccagcgcctgaccggtgcgggcggcctcaggagaggagagcttgctcagtgcgtcacgtagtcagggctcaggctggggcccggctccagagcctggtcacattcccaagcttcattctcttcacctgtgaattgcaggcttccctggtgtgccctgcacatgagggaagacacgcgtgaagcactgggtccctccatggccttgggccgcaggaaccgtgggcgcacgagcttgggaaggacatgtcggaggccggcgcctgtgcgggcagaagctgtgtcctccagcccttccaccaccagcatgttctcatttccaggtttctctgtttaaaaaacaaaagtagcgcatcggtggtcttcacgacgtacacccagaagcacccgtccatcgaggacgggcctccgtttgtggagccgctgcttaacttcatctggttcctgctgctggctgtggacgggtgcgtcttgggatcctgcagggggagggggctgtgaatgtgcgggttgtgtgtagacgtggtgtggatagctgtgtgggtgtgtgtgcaagtgtagccatggtgtgggtagccgtgtgggtatatgcatagggtatgagtgctgggtgtagacgtggcataggtgtgtgtgcaggtctgttgggtgtagacatggtagtgcgggtagctgtgtgggtgtatgtgcaagtgtagacatggcgtgggggagtgtaggtgttgggcctctggtagtgtgggtgtgtgcaggtgtggggtggtgtgggtgcagacgtctggggggttgtgtgcgggtgttgggtatccatgtggtgtgggggtgtgtagacgtgtatacaggtgtgagtgcaggtgtagacggcgtatgtgcaggtgttgcgtgtctggtgtgggtagttggggtgcgtgcaggtatgtgtgttgtgtgtagacgtgtgggtagctgtgggggtgtgcaggtgtgtgtactgggtatagacgtggcatgggttgctgggtgtgtgcaggtgttgggtgtttgcaggtaagtgttgggcgcgggcgtggtggtgtttgcaggtgaggggtgtaggcgtgtgtgcaggtgagtgttgggtgtgggcgtggtggtgtgtgcaggcgagtgttgggtgcgggcgtggtgatgtgtgcaggcaagtgttgggtgtaggcgtggtgtgtgcaggtgagtgttgggtgtgggcgtggtggtgtttgcaggtgagtgttgggcgcgggcgcggtggtgtgtgcaggtgagtgttgggcgtgggcgtggtggtgtgtgcaggtgagtgttgggcgcgggcgcggtggtgtgtgcaggtgagtgttgggcgcgggcgcggtggtgtgtgcaggtgagtgttgggcgcgggcgtggtggtggttgcagatgagtgttgggtgtgggcgtggtgtgtgcaggtgagtgttgggcgtgggcgcggtggtgtgtgcaggtgagtgttgggtgcaggcatggttgcaggtgagtgttgggcgcgggcgcggtggtttgtgcaggtgagtgttgggtgcgggcatggtggttgcaggtgagtgctgcggtcaccaaagcaggtgctggccctcggacctgagagcccagccagggcccatgtggtctgcaaatgggagcggctgtttttgaacacggggtcattctgcagtcaggacgaaccggtccccgtcgcagacggagtgcacgtgccctgcgccacatcctcacgctcggtggagggacgcgtgcggcgggacggtgcctacgggtacttgcagctgtgtcccatgtggcatcccagagctgcgccctgctggtctctgtgagcgccacgctgctgtgctggaaatgccgctttaaaaagggataccgtgggactctgcccgtctctttcataacgcaatatttatttgtattgggtgatgattgattctttcgacctaacattttgggttttaaccaaataaccggtccaggagtgagcagctccgttctgtcagatgctactccaaatgttaccagaacgatgacaaaaggggagacgctctattttttcacagttaaatgacagttgtagattgatacgcagttgtgcatgggaaggggaaacgcacagctttatttactgtaaagtggaatttcaggaaggcttgtgtgaaccgttgcgcataaataaaccctttctaccgg

SEQ ID NO: 1790 - DNA, 2400 bp, Homo sapiens
aaaagaaaaaaaagaatctaatgcctgatgagctgaggtggaacagtttcatccccaaaccacccatccccacccccggctggtagaaaaactgccttccatgaaaccagtccctggtgccaaaaagattggggaccactggtttaagtcctgtagctttacagaccatagctagaaaggcaactggtattaattcaccctgcacgaggacctccgtctgcctccgctgagctgctgtctgctcacttccccgggtggcacaccggcctgcatgtaaccaactcctgaagcttttatctgggaatgtcctcttttttggggggtggggaagacagggtcttgctctgtcgcgcaggctggagtgcagtggtacggtctcggctcactgcactctccgcctcctgggttcgggagattctcctgcctcagcctcctgagtggctgggattacaggtgcgcgccactacactcagctcattttttctgtgtgctttttgtgtagtcgcggggttctcacagtgttgcccaggctggtgtcatactcctggcctcaagcaatcttcccgccttggcctcccaaagtgctgggattacaggcgtgagccacgatagcaagccttaactctaatttttgaagggctatttttagaattctcggttttgtcagtttcttccattgaatggtacctgttttcctgtttctttgaacgtcttgtgctttttgttgaaaactggtccttggccgggcgcggtggctcgagcctgtaatcccagcgctttgggaggccgaggtgggtggatcgcgaggtcaggagatcgagaccatcctggctaacgcggtgaaaccccgtctctactaaaaatacagaaaattggccgggcatggtggcgggcgcctgtagtcccagctgcttgggaggctgaggcgggagaatggcgtgagcatgggaggcggagcttgaagtgagccgagatcgtgccactgcactccagcctgggtgacagagtgagactccatctcaaaaaaaaagaaaactggtcctttgaaaacagactctgccagtctttgcagacaggttctgtgcttggaccctggggatcagtgtgaggtctcttccaggacccgtgcatctcttccgactctcgggcaagtgcttcagcctggtggagtccacgtgagtgcagggtgggtgcgagggtgggctggggcgcagcctgcggacccccctcatgccatctgtgtccccaggtacaagtatgagttctgcccgttccacaacgtgacccagcacgagcagaccttccgctggaacgcctacagtgggatcctcggcatctggcacgagtgggagatcgccaacaacaccttcacgggcatgtggatgagggacggtgacgcctgccgttcccggagccggcagagcaaggtggagctggcgtgtggaaaaagcaaccggctggcccatgtgtccgagccgagcacctgcgtctacgcgctgacgttcgagacccccctcgtctgccacccccacgccttgctaggtaggggtgcgggacgcagttgagcccagtggggtcagccgcgcacgcagccctgctggaggccctgtagtgctgggggccagggttgggacatggggtgcagctgagcctggcttctcttgggtcctcagtgtacccaaccctgccagaggccctgcagcggcagtgggaccaggtagagcaggacctggccgatgagctgatcaccccccaggtaagcgtgcgctcggggtggcccctggtgggcctggctgggagctgggtgctgcccctgcatcctccaccttcagggccatgagaagttgctgaggacactttttgaggatgctggctacttaaagaccccagaagaaaatgaacccaaccagctggagggaggtcctgacagcttggggtttgaggccctggaaaactgcaggaaggctcataaagaactctcaaaggagatcaaaaggctgaaaggtttgctcacccagcacggcatcccctacacgaggcccacagaaacttccaacttggagcacttgggccacgagacgcccagagccaagtctccagagcagccgcggggtgacccaggactgcgtgggagtttgtgaccttgtggtgggagagcagaggtggacgcggccgagagccctacagagaagctggctggtaggacccgcagggaccagctgaccaggcttgtgctcagagaagcagacaaaacaaagattcaaggttttaattaattcccatactgataaaaataactccatgaattctgtaaaccattgcataaatgctatagtgtaaaaaaatttaaacaagtgttaactttaaacagttcgctacaagtaaatgattataaatact

SEQ ID NO: 1791 - DNA, 2215 bp, Homo sapiens
aattaactgggcgtggtggcatgtgcctgtagtcccaactacttgggaggctgaggcgggagaattgtttgaaccagggaggcggaggttgcagtgagctgattgcaacactgccctccagtctgggcaacagagcgagagtctgtctcaaaaataaataaattttttaaaaaagtatatgggaggatgtgtgtaggttacatgcaaatatgacaccattttatatcagggacttcagcatccatgggttctggttatccttagagattctagaaccatctcccatggataccaggggatgactgtaccacacaccgggcatcttaaacagaaatgtctcctcccacagttctggaggctgaaagtctgagatcaaggtgtattgggatggctccttctgggtctgtgtgggagaaggagatcttaggtggtccaggctggaagtccgagatcgaggtgtattgggatggctccttctgggtccgtgtgggagaaggttctatgtctcccccggctctgggtggttctggcgattttgggtggtccgggctggaagtccgagattgaggtgtattgggatggctaattctgggtccgtgtgggataaggttctgtgtctcccctggctctgggtggtgctggtgatcatcttgggtggtccaggctggaagtctgagatcaaggtgtggtgggatggctccttctgggtccgtgtgggagaaggttctgtgtctcccccggctccaggtggtgctggtgatcatcttgggtggtccaggctggaagtctgagaccaaggtgtggtgggatggctccttctgggtccatgtgggagaaggttctgtgtctcccccagctccgggtggtgctggcgattgtgggtggtccaggctggtagatgcatcgcgggtcctgccttcatcttcacatggtgttctgccccctgacagtgtctgtgtccagatttccccttctcatagggacactagtcatcctggaccaaggccaccccaatgacctcttgtaacttcctcacctccgtcaagaccctgcctccaagtaaggtcaacttctgaggttctgaggttctgaggttctgaggttaggactccagaatgtctatttctggggacacgattcacggatcccagcggccttcttgggcgtgggcagggcaatttttctcaggccttcctccaacagcaagcctttgctgagtgaaaatagcaggttgcaagacaggatctatggtacaattccatttttgtcgaaagggttgccgacaataatgtgttatatgcaaagaaaaaaatctgaggggcgtccgccaaaatgttgaaaagagtggcgtctcagggcacgattgcaggtgatttttgtttgttttctgcagtagctgatagggacaggcattggggagctttagtgaagtctttgaagttgcatgcgtgttctacatgtgggtgcgtttaactgggaagaattcctcttagcttgcgatggattctcaaatggagctgagatccccaaatataaaccagctaacagggccctaaaattccatggagtctcatttcctgctgcgtgttctggaccagtgaggtgctgtggaatgtttacaatagaaccgggaagtgtgcctctgggtagggcggcagccctggtggagagggtgaggtctgggccaccccctcgaggccagccagggctgagtggagggcagaagcccctgatggaggatttttcttcacttgtatcccaagcagggtgcatatttgtgaggctttcataaagcacctgggataaaacacaggccagcagggatggcccagctcttggagcgccgtccgggctgggcctctggtgctctggccttcgtgagtgagttcttctgtggtggagacttaagcagataaaatattccttatttgggccgggcgcggtggctcatgcctgtagtcccagcactttgggaggctgaggcgggcggatcacgaggtcaggagatcgagaccattctggctagcacagtgaaaccctgtctctactgaaaaaaaaaaaaaaaaaaaaattggctgggcatggtggcgggtgcctgtagtcccagtgagaggctgaggtaggagagttgcttgaacccaggaggtagaggttgcagtgagcccagatcgcgccactgcactctagcctgggtgatagagcgagactccgtctc

SEQ ID NO: 1792 - DNA, 1955 bp, Homo sapiens
aagtcgcgtccaggcgctagtactcgtccccgtaaggttgtccgctcgtgccttggcttgtgtcctcggctacccctgggcctgcgcaccgctcctccaggagccttacacctcagccccgatgccagggcggccggggtgacctcgggctccccagtctcgggcttgcacacccctgcggcgcagagccaactccagcttgtctagcccggtcctccatccctgcagatggaactgttttcccgcgttgagacgtgcggtccgcttgtgctttcagaactagtaagactgctgcagagtccggaggaagaagtcacctagaaaagtctgggacagggcagtaagcttccttcttaatgtttgacctttgggggccgatgtgtgatacctcggatttgaatcaagaatctccaagcccattttccgcatgcatgtaaacgtgatgtaccgggatgggggctggtggtggaggaggagccagcccaacggatatgcgtttccagtggcagggacttgtgttaatttcttttttcttttttctttttttttcttttttccgagacggagtctcactctgtcgcccaggcgggagtgcagtggcgcgatctgggctcactgcaacctctgcctcctgggttcaagcaattctcctgcctcagcctcccaagtagctgggaatacaggtgtgcgccaccacgcccggctaatttttgtgtttttagtggagacggggtttcactatgttggccaggctggtctggaactcctgacctcgtgattcgcccgcctcggcctcccaaagtgctgggattacaggcgtgagccactgcgcccggccaacttgtgctaatttcttaaacttgcgtgatcacctggtgtacttgttgaaaaatacagctccctggcgtggcaggatcagaatctgccgaggtggaccgtgggaatctgtcatttttaaacaagtgtcccaggtggttcttttgctgaggcaagtgtgggaaatgtgtgaacccacgctcatccagtcttccttgtgaccggcagtccactgtgcgcaacgctgcagccatacagagggactacttgaagttagaactagcaccttggtcttgttggaataagcagatctgagtagagccagctgcagtcttatggttgtttagcagaagttattcttcttagcagagaatattatacggtcattttccagaactgtgaaaactctatcatttgttttaaaccagatgatgtgcttcatttctgtctttgacgtcttcagtttcttctcccctggctttacctcctttgctatcagtttgtgctttggttttgctgccaaccttataggcttaggtttggcggcaaaggcactagactctggtgccttcttttccttcgttgtcttaagcccttcttttcctctgccctcatgccctcaccacttcactcttttgaaggtcataatgaacacaaggtcagagatcccttttttggcgccaagcaccctgggctttttcgagatggagtctcactgtgtcacccaggcagtggcgcgactctgcgcactgcagcctccatctccctggttgaagcaattttcctgtctcagcctcctgagtagctgggactacaggtgcaagccacgacacctggctaatttttctgtttttagtagagacggggtttcgccatgctgatcaggctggtctcaaactcctgacctaaaatgatccacccaccttggcctcccaaagtgctaggattacaggtgtgggcccctgcgcctggcctttttttgttttgttttgtttaagacagagtctcactgtgtcaccgaggcaggagtgcagtagcataatctcggctcactgcaacctctgtctcccaggctcaagcgatcctcctacctcaggagttcaggaccagcctgggcaacatagtgagcccatctctac

SEQ ID NO: 1793 - DNA, 2118 bp, Homo sapiens
ctttctggctcttggaacgctcggctctgagaggctccaggtttctccgccagagctcctgtcgctctgtcagttgcgctgtgttcctctctagtcacaagagccttggggaagacagttggaagctcagacatgagaaatatgattccacaggacaatgaaaacccaccccaacagggtgaagcaaatcaaaatgatttcgctcttgttgcccaggctggagtacagtggctcgatctcggcccacagctgcctctgcttcctgggttcaagcgattcttctgcctcagcctcctgagtagctgtggttacagttggagtcttgctctgtcacccaggctggagtgcagtggcgcaatctcagcttacggcaagctccgcctcccgggttcatgccattctcctgcctcagcctcccgagtagctaggactacaggcgcccgccaccacacccggctaatttttgtatttttagtagagacaaggtttcaccgtgttagccaggatggtctcgatctcttgacctcgtgatctgcccacctcggtctcccaaagtgctgggatgacaggcgtgagccaccatgtccagctgtaacttagaactatttaaagaggcaaaggcataggagaataaaggaaggaagaagtaactcgtggaatgttgcgaaaggaaaaacacgtttaaggaagaggaacaggctatgacttaatgtttgcttggaccagtataagcatgccagggcaagtatttaggctaacttgtgggagttaagaatataaagttgccaagaccagcttggctggggagacgctaacccagcagcgctagaggaattaaagacaccacacacaccaaaatatagaggtgtgaagggggaaatcaggggtctcacagccttcagagctgagagtcttgaacagagatttatccacatatttattaacagcaaaccagtcattagcattgtttctatagatattaaattaactaaaagtatcccttatgggaaacaaagggatgagccgaattaaaggaataggttgggctagttaactgcagcaggagcatgtccttaaggcacagatagctcatgctattatttgtggcttaagaatgcttttaagcggttttccgccctgggcgggccaggtgttccttgccctcattctggtaaactcacaaccttccagtgtgggtgttagggccattatgaacatgttacagtgctgcagagattttgtttatggccagttttggggccagtttatggccagattttggggggcctgctcccaacatgtcccctttctttgatttgcaaatcaataaaagcaagggcagctttgtcacagtgagctacttctcgcaggagtcaggatccacgtctgcagactatacaaggacaacacagattaaaagcacagtcatcattgaaatcacagaacttccaagtgtttttatccattttcagctccttttaagcactccagttctggcattaaggtcagctgtgcctgggatgctttaaatatttgttcttttaattttaaatccttatattaagctcctacaatgcaccatatcatttgaggttgaggtgccactataccgccatggttccagataataggaacttttgccatacttcttatcatttctgccatctgaccgttttgttcagatcagctgaacatagtgtggccgtggcatgtagactgagaggtgcagtttaagctaaacatccccttaggggaccaattaataatgattccatagaaattgttgtgcagcacctctgcctgttccgcaatgcaatcttcctaaacaagtacgttcattttttctaactgggtccgatcctgtttacaaataggtttttgagggcggtatgcctcaattataggagcagatttattacggtaaatactgagattagaaagcatgtgtaactgtgtcatagagtgattgcatccaggcattattaccagtcaagattgataaatatgcccagtaagtataatcattctctgtgtcagcccttattgaaggaatactcaaggtagtggtgataactgctgtcatagctaccattaaattattcattgtgactggttgtc

SEQ ID NO: 1794 - DNA, 3048 bp, Homo sapiens
ctctgtaaaataaatgcgctgggccggatcttttccgagttctcttctcccctacgaattctagatccctcctctgtcctccctgcgccagggaccttcgggcgacccttccctgtacccccaccccaccctctctggaccccgtttctgcctcagtacggcgcgctgagctctgccccctgcccaggccctgaccccctcaggagccgcggtttcctggggtaacagtgggaaacgtgtcggccgtctccgctcaggcgcttgctgtgtacagaaaggctgattcaggcacaccggctctcgtcgccttggtggccctccccagccctcctccgcgcctgctccgggtggcgctccgctgggctcctcgtgcgcctgtccgcgaccgcacccacctcatcctggcaaccccatcgtggcatcacgtgttccctcatctgtcctcatggctggcgtgcccctctgcggtgagacctgcagaacaggaattggtgccgggtcagcagccggcgatgaagccgggcgaagcctgcaaaccccacccatacgccagcttcacatagctcctatccattgcacagcagcgtggggaagcaccgttctctaccctccaaacaaaagcatgaaccaggtgcagtggctcacgtctgtaatcccagcattttggaggccaaggtggatggatggattccttgagtccaggagttcaagaccagcctgggcaacatggtgaacccccatctctacaaaaatttagccagttttcagctgcccccagttgcctggccaggctgcctcgacggccctattcacgggccccagcctcctcgccgggctggaaggcgacaaccgcgaaaaggagggtgactctcctcggcgggggcttcgggtgacatcacatcctccaaatgcgaaatcaggctccgggccggccgaagggcgcaactttcccccctcggcgccccaccggctcccgcgcgcctcccctcgcgcccgagcttcgagccaagcagcgtcctggggagcgcgtcatggccttaccagtgaccgccttgctcctgccgctggccttgctgctccacgccgccaggccgagccagttccgggtgtcgccgctggatcggacctggaacctgggcgagacagtggagctgaagtgccaggtgctgctgtccaacccgacgtcgggctgctcgtggctcttccagccgcgcggcgccgccgccagtcccaccttcctcctatacctctcccaaaacaagcccaaggcggccgaggggctggacacccagcggttctcgggcaagaggttgggggacaccttcgtcctcaccctgagcgacttccgccgagagaacgagggctagtatttctgctcggccctgagcaactccatcatgtacttcagccacttcgtgccggtcttcctgccagcgaagcccaccacgacgccagcgccgcgaccaccaacaccggcgcccaccatcgcgtcgcagcccctgtccctgcgcccagaggcgtgccggccagcggcggggggcgcagtgcacacgagggggctggacttcgcctgtgatatctacatctgggcgcccttggccgggacttgtggggtccttctcctgtcactggttatcaccctttactgcaaccacaggaaccgaagacgtgtttgcaaatgtccccggcctgtggtcaaatcgggagacaagcccagcctttcggcgagatacgtctaaccctgtgcaacagccactacattacttcaaactgagatccttccttttgagggagcaagtccttccctttcattttttccagtcttcctccctgtgtattcattctcatgattattattttagtgggggcggggtgggaaagattactttttctttatgtgtttgacgggaaacaaaactaggtaaaatctacagtacaccacaagggtcacaatactgttgtgcgcacatcgcggtagggcgtggaaaggggcaggccagagctacccgcagagttctcagaatcatgctgagagagctggaggcacccatgccgtctcaacctcttccccgcccgttttacaaagggggaggctaaagcccagagacagcttgatcaaaggcacacagcaagtcagggttggagcagtagctggagggaccttgtctcccagctcagggctctttcctccacaccattcaggtctttctttccgaggcccctgtctcagggtgaggtgcttgagtctccaacggcaagggaacaagtacttcttgatacctgggatactgtgcccagagcctcgaggaggtaatgaattaaagaagagaactgcctttggcagagttctataatgtaaacaatatcagactttttttttttataatcaagcctaaaattgtatagacctaaaataaaatgaagtggtgagcttaaccctggaaaatgaatccctctatctctaaagaaaatctctgtgaaacccctatgtggaggcggaattgctctcccagcccttgcattgcagaggggcccatgaaagaggacaggctacccctttacaaatagaatttgagcatcagtgaggttaaactaaggccctcttgaatctctgaatttgagatacaaacatgttcctgggatcactgatgactttttatactttgtaaagacaattgttggagagcccctcacacagccctggcctctgctcaactagcagatacagggatgaggcagacctgactctcttaaggaggctgagagcccaaactgctgtcccaaacatgcacttccttgcttaaggtatggtacaagcaatgcctgcccattggagagaaaaaacttaagtagataaggaaataagaaccactcataattcttcaccttaggaataatctcctgttaatatggtgtacattcttcctgattattttctacacatacatgtaaaatatgtctttcttttttaaatagggttgtactatgctgttatgagtggctttaatgaataaacatttgtagcatcctctttaatgggtaaacagc

SEQ ID NO: 1795 - DNA, 3013 bp, Homo sapiens
gtaggtctgggaaggacacacgtgactctggtttgttctgggacagcagcagtcactgcaggaaaccccctgatgtggacatgggtttccctcagaggcgactgggcaagagtgtgggtgtcaccgcggggggcctcctcctgggcctgcaggagagacagaaccacaggcccctttgcggcttccaggcgggactgggattccctggggggctgggattctgtgcccttcatgactgcctggcccaggatctctctcacctgcagcaggaagaggctgggaccctcggccgggccgggtgctgcctggttctgaagcccttagcagcttgtccttcgagctcacgttctgctgtgcctggaggtgctggaagcctcaggagggcagggccaggtctgtcttatccactccgagcctggcattgcccgggacgtggggcgtttgtccagtattattcaaatgaccggacataatgaaggatggcgacaggacgaaggcttctgccctaagatttctcgcatctcgtttttaccatcttgtcttcgtggccctcacttgtggttgtgtctgctgtggtgttatggacactgctagtgttaatacagcacaataagaaagtgtgaaaggggccgggaaaggtggcgggagcggggcggcacgtgggttcccctcacagcactgtgcacggtgcctgcttgggttcctccatgtggaccagcaccgctgagcggccactctgcgccaggcactgttcatgggtgatcacggcagcccccttattacagacaagcaaactggggcttagccagctcaggaggctcgcaggtaggtgggggagcctggagctgaacccaggcgtctgacccaggtgctcccccttagccacctgcctccatgagcacttggcaccccagggccccgggggtgctgcacgtgagccgtggcgtagcttaatcgacgcgcacaaggattccgtgtattcagtgtttattgaggctgtgttttgaagcatgccattgataggttgaacataacgtttttcttagaataaaagcacattccatacactctactatggcagaataaggaggttcacagataattgagagaagccaccgaaacgtgctgttttctgaaggtctccctacgcgtgttgtagtaaatgtgtgtctctctgtgactgacagtatgctggcggtcagggcccaagctcagccttgcgtttgagtgtatctttagatggaaaaggcgttggtgtggtgtggattgtagcttcccgaaactcatggcgcctcccctcggacgtcggtgtcgtggcgcctccccgcggatgtcggtcttgggtgttttgggggagaaaacaagccccatccttcccgcggggtctctgggcttcacgcctgccttgccctctcagacaaaggccaggacttgtgcggcccacactagtgtatcgccctgtattagagtaaaacatgtttatcaaagaacattggaaaatcagacacaaagaagaaaataaaaatcacctacaagctgccacaccagaaaaaaaaaacacacttccagaaatttcccctctgcatacttatagtcagattgcatgaattgtttgcataatcatatttacttaaaataagtatagctttccttaagtataaattgtccctccacattttgtttgtttttgttttttatgtatgtactaatggtaattctcactgtaaagtctttcagtagtacagataaaataagtccttttcctccacccaatccatctcctgggggaaccactgctaatgataatagttgagtgggaattcttacgctttttaaaatgaggtaaaattcagataacatgaaatgaaccattaacgtgtgcggcttgggagtcgttggcctccccagtgctgcgtggctgtcccggggttctcgtcagcctccccggtgctgcgtggctgtcccggggttctcctaggcacctgcaggactgtgcagttctggctttgtctttcctgaaatgccatcacggtgtatgcacagtttagcatctcttttcattttgtatgttaattgaggttaactttattctttttgatgcctgtacagttttttgtttgtttgtttgtttttttgggatgcagtcttgctctgttgcccaggctggagtacagtgatgtgatctcagctcactgcaacctccacctcccgggctcaggcgattctcctgcctcagcctcctgagtggctgggactacgggcgcccactaccatgcccggctaatttttgtatttttagtagagacggggttccaccatgttggccaggctggtcttgaactcctgaccttgtgatccgcccaccttggcctcccagagtgctgggattgcagggatgagtcaccatgcccagcccaacacacattgtatcttttaaagtgagaggtggcacgtacctgtagtcccagctacttgggaggctgagaggcaggaggattgcttgagcccaggaggttgaggctgcagtgagctgagttcataccactgcacttcagcctgggcgagagtgagacctgtctcaaataaataaattaaaaaatgggctgggtactgtggctcatgcctgtagtcccagatcttgtgggaggcggaggtgggaggatcacatgaggcctggagtttgagaccagcctgggcaacatggcaagaccccatctctaaaaaagcagaaacaaattagctgggcatggtggcgtgtgcctgtacttccagctactcgggaggctggggtgggaggatcgcttgagctcaggaggcttgagaccagcctgggcaacacagtgagacttcttctcaacaaaaaatacaaaacgtcagctgggcatggtggccagcgcctgtagtcccagctacttgggcggctgaggcaggaggatcgcttgggcccggagttgaaggctgcagtgagctatgatcatgcccctgctaggccacagagcaagagcttatctct

SEQ ID NO: 1796 - DNA, 1810 bp, Homo sapiens
actatggcggttggaggaacggcagtgatcacacgtcggctgctgggaagatctggattctcgtttcaggtcaccatcagaaaagctaagtttgctgtatagtgaggatcaggagatctgatcctgattgcagaaccttccctgattacagaatcttgggattgttgagaggattacatgtaaagtaccaggacagtgcatggcacatgttgtatctcccacttcacccttctagaccatcccagaagatctataagatttcatctgggaaatcactaggagttcttggaagggaaagaaggaagattgttggttggaataaaaacagggttgaatgagttccagaaagcagggttctcaacctcgtggacagcaatctgcagaagaagagaacttcaaaaaaccaactagaagcaacatgcagaaaaatcttgaaccagctctcccaggaagatggggtggtcgctctgcagagaaccccccttcaggatccgtgaggaagaccagaaagaacaagcagaagactcctggaaacggagatggtggcagtaccagcgaagcacctcagccccctcggaagaaaagggcccgggcagaccccactgttgaaagtgaggaggcgtttaagaatagaatggaggttaaagtgaagattcctgaagaattaaaaccatggcttgttgaggactgggacttagttaccaggcagaagcagctgtttcaactccctgccaagaaaaatgtagatgcaattctggaggagtatgcaaattgcaagaaatcgcagggaaatgttgataataaggaatatgcggttaatgaagttgtggcaggaataaaagaatatttcaatgtgatgttgggcactcagctgctctacaaatttgagaggccccagtatgctgaaatcctcttggctcaccctgatgctccaatgtcccaggtttatggagcaccacacctactgagattatttgtaagaattggagcaatgttggcctatacgccccttgatgagaaaagccttgcattattgttgggctatttgcatgatttcctaaaatatctggcaaagaattctgcatctctctttactgccagtgattacaaagtggcttctgctgagtaccaccgcaaagccctgtgagcgtctacagacagctcaccatttttgtcctgtatctgtaaacactttttgttcttagtctttttcttgtaaaattgatgttctttaaaatcgttaatgtataacagggcttatgtttcagtttgttttccgttctgttttaaacagaaaataaaaggagtgtaagctccttttctcatttcaaagttgctaccagtgtatgcagtaattagaacaaagaagaaacattcagtagaacattttattgcctagttgacaacattgcttgaatgctggtggttcctatccctttgacactacacaattttctaatatgtgttaatgctatgtgacaaaacgccctgattcctagtgccaaaggttcaacttaatgtatatacctgaaaacccatgcatttgtgctctttttttttttttttatggtgcttgaagtaaaacagcccatcctctgcaagtccatctatgttgttcttaggcattctatctttgctcaaattgttgaaggatggtgatttgtttcatggtttttgtatttgagtctaatgcacgttctaacatgatagaggcaatgcattattgtgtagccacggttttctggaaaagttgatattttaggaattgtatttcagatcttaaataaaatttgtttctaaatttcaaagc

SEQ ID NO: 1797 - DNA, 2283 bp, Homo sapiens
aaaagatgctctaacaggaagtgggttaaggagctgcactgcttcctgccccctaaagctgagcggggcgaggagggcgagtgccaggctgggccacgagacacaggacacaatttcttgccagggtcctggtagcttcctcttcaacagccacttccgtgtggccggggccccaggggcaggagctgctgcccgttgcccaggccaccctccacccccaattgggagccctgcccccctggggccgggccaagcccagcagctggctgggatcccatgggggactggtagggcacaggtcttgggggatagaggtgaccgggccagtgccctggggctctggccatgaagtctcggcagaaaggaaagaagaagggcagcgcaaaggagcgggtttttgggtgcgacttgcaggagcacctgcagcactcaggccaggaggtgccccaggtgctaaagagctgtgcagaatttgtggaggagtatggagtggtggatgggatctaccgcctctcaggggtctcctccaacatccagaagcttcggaatttgagtcagagcggaagccagacctgcgtcgggatgtttacctccaagacattcactgcgtctcctccctgtgcaaggcctatttcagagaactgccggatcccctgctcacttaccggctctatgacaagtttgctgaggctgtaggagtgcaattggaacctgagcgcttggtcaagatcctagaggtgcttcgggaactccctgtcccaaactacaggaccctggagttcctcatgaggcacttggtacacatggcctcattcagtgcccagaccaacatgcatgctcgcaacctggccatcgtgtgggctcccaacctgctgaggtctaaggacatagaggcctcaggcttcaatgggacagcggctttcatggaggtgcgggtacaatccatcgtcgtggagttcatcctcacacacgtggaccagctctttgggggtgctgccctctctggtggtgaggtggagagtgggtggcgatcgcttccagggacccgggcatcaggcagccccgaggaccttatgcccaggccactgccttatcacctgcctagcatactgcaggctggcgatggacccccacagatgcggccctaccatactatcatcgagattgcagagcacaagaggaaggggtctttgaaggtcaggaagtggaggtctatcttcaatttaggtcgctctggccatgagactaagcgtaaacttccacggggggctgaggacagggaggataaatccaacaaggggacactgcggccagccaaaagcatgggctcactgagtgctgcagctggggccagtgatgagccagaggggctggtggggcccagcagcccccggccaagcccattgctgcctgagagcttggagaacgattctatagaggcagcagagggtgaacaggagcctgaggcagaagcactgggtggcacaaactctgaaccaggcacaccacgagctgggcggtcagccatccgggctgggggcagcagccgtgcagaacgctgtgctggtgtccacatctcagacccctacaatgtcaacctcccgctacacatcacctctatcctcagtgtgcccccgaacatcatctctaacgtttccttggccaggctcacccgtggccttgagtgccctgctctacagcaccggccaagccctgcctctggccctggccctggccctggccttggccctggccccccagatgaaaagttggaagcaagtccagcctcaagtcccctggcagactcaggcccagacgacttggctcctgccctggaggactcgctgtcccaggaggtgcaggactccttctccttcctagaggactcaagcagctcagaacctgagtgggtgggggcagaggatggggaggtggcccaggcagaagcagcaggagcagccttctcccctggggaggacgaccctgggatgggctacctggaggagctcctgggagttgggcctcaggtggaggagttctctgtggagccacccctggatgacctgtctctggatgaggcacagtttgtcttggcccccagctgctgttccgtggactccgctggccccaggcctgaagttgaggaggaaaatggggaggaagttttcctgagtgcctatgatgacctaagtccccttctgggactgcttctccagccaggctggggccacaggtcccactctagtgaaggtcaatgtctcagaataaaagctgtatttttac

SEQ ID NO: 1798 - DNA, 1233 bp, Homo sapiens
tgctgcctcctatagacccagactctgattggcagtggagtccagggcctgagctcaggcctgggaaagactaggccccctttaggtttcaggctttgaaggaccatccagacttagggagcctgggccttggggagggagagaccctgatgccaggactgagctttgggcagcgaggtggggagggaaggtggccgcattcagaggtgccttggactcacaacaacacccccacccccgtgtgtgcagccgtgttgccgcccgctgtgctatgagcagtcagagcgccgtctccacaagagtttacaaatgaaaatggaggaaatgtctttgtctggcctggataacagcaaactagaggccatcgctcaggagatatacgcggacctggtcgaggattcttgtttgggattctgctttgaggtacaccgggctgtcaagtgtggctacttcttcttggacgacacggaccctgatagcatgaaggattttgagatcgtggaccagccgggcttggacatctttggacagattttcaaccagtggaagagcaaggagtgtgtttgccccaattgcagtcgcagcattgccgcctcccgctttgctccccatctggagaagtgcctgggaatgggtcggaacagcagccgaatcgccaaccgccggattgccaatagcaacaatatgaataagtctgagagtgaccaagaagataatgatgacatcaatgacaacgactggtcctatggctcggagaagaaagccaagaagagaaagtcagacaagaaccccaattcccctcgaagatccaagtcattaaaacacaaaaatggggaacttagcaattcggatccttttaagtataacaattcaactgggatcagctatgagaccctggggccggaggagcttcgcagcctgctaaccacgcaatgtggggtgatttctgaacacaccaagaagatgtgcacaaggtccctgcgctgcccacagcacacagatgggcagaggcgaaccgtacggatttattttctcgggccctcggctgtccttccagaggtcgagagctccctggataatgacagctttgacatgactgacagccaggccctgatcagccggcttcagtgggacggctcctctgacctctcaccctctgattcaggctcctccaagacgagtgaaaatcagggatggggtctaggtaccaacagctctgagtcacggaaaacc

SEQ ID NO: 1799 - DNA, 1887 bp, Homo sapiens
ttttgacagtgttctggtttattgagttactattaagaacttagtgtacccttttatttagcagtatctctattttacttttttgtacttgtgtataagtagacacataggaaattactacctaggtcatattgttatcaactgaataagatatgaaaaagtttggtcctatttctgcctcaacaccatacttactgttgacatttattgtatttttctggactgacttaatagtttaaatatcaagataaggtataattctgaagccataactctgtggtagtttttttgtcagatacggttatctttggggttattatagcagttgagttgtatcattctatttgcttctaaatctgaagcattatattactaaaacattttttgatttgtgaatatgttgttaatggattatgtctcattttgcagtagtagttacattgcctgaaagatggccaaaaaaatagtgctagcttttgctgaccaatgtaacaatcaacttgccaatgctgctgtctcttccgatagctatgttctctgtaatattttaagaactcagttttttttttttttgtttgtttgtttgttttttgaggcagagtctcgctctgtcacccaggttggagtgcagtggcgccatcttggctcactgtatgctccgcctcccaggttcacgccattctcctgcctcagcctcccgagtagctgggactgcaggtgcctgccaccatgcccggctgattttttttgtatttttagtggagacgggatttcaccatgttggccgggatggtctcgatctcctgacctcatgagccaccatacccggccaggaactcagttcttaataagacttgtgttgtttttgattttttcccaagtctggttgatccttgtgttgttttttttttaaatgtgtattgtctgttcagctattttgcaggagttgcattcttaaaaaacttaaccatatcaaaaattgtgtttaaaggaggattattcagattggcaagcttttactaggaggagtttaaatgctgacgtatttaggtaactaaatactgagcaactttattctaagtacaaaatagatagcctttcttttgttttcactttcactatcattagcatagtgtttaataccttttcttcatctataacacaagtataatgatatataaagccactcaaataaagcagatatgttgtgcttttttcttattcatttgatgcttattccccatcatcatcatcatcatcatcatcatcatcatcatcatcatctagttatggccatgagaagtctccgtaatataaaccatccacactatattcatttgacattttgaaaattcaggagaaatacctgcatattaacctaatacactattacatagcctttagaaattgtaattttgaggtctataagtataggagcatgcttttgataacagtaagtgggggacaaggaagccaaacatgacactatgtatgctataattataataatataaaacagaaatgtgggaatagcattgttaggagttcagcctttagaatcattaaggaagaacctggttagaatctttattagctgtataactttaagcaagttatttaacttctctaagtttcagtttccttattcgaaataaggatgataatggtacctatgattcctctagggattaaatgagataatttagcaatggtcttggcacacatgtaataactactcagtaaaaattagctgttaaatctagaatatgacaggtatggtggctcatgcctataagcccagcactttgggaagctgaagctggaggattacttgagaccaggagtttgagaccagcctggtcaacatagcaagaccccttccctaac

SEQ ID NO: 1800 - DNA, 2238 bp, Homo sapiens
gagcggggagctgcacttctgggtgaaggaggctcgggacctcctgccgctgcgggcaggatccctggacacttacgtacaatggtgaggagtgctggccctccgggcttcccattcttttgcctgcagtggagtgcccaacctccacaaacccttactaatcaacctttgatcacgcagcctgggctttcaccactgagcaggggtgaaggggacggtttgagcaaaggcctggagtcagggaagttgaggacacctttgaggagctgcatttcagcgtgactggcgcctataggacttgttgaaaagctgaggctgagggctgcaagggtccttccatagagaacctgggaggccaggctgtggggcttggctgggaacttatagttcagtgtaagcttctaggggacttctaggggtgcctccaggtgctgcccccactgttagagagtgaaatggaggtgggcgggtcacttctgggtgtccactctgatgcagccagaggctgcagtacagaggtactgtacttctgagcaacactgtattttgcagagggggttcccaggctttgaaaaccttggaaacaggccgggcacggtggcttatgcctgtagtcccagcactttgagaggctgaggcgggtggatcacctgaggtcaggagtttgagaccagcctgaccggcatggtgaggccccatctctatcaagggtacaagaagttatccgggcgtggtggtgggtgcctgtggtcccagctacttgagagactgaggcgggagaatcactcgaacccagaaggttgcagtgaaccaagatcacgccactgcactccaacctgggcaaaacagagcgagactcgatctcaaaaaataaaaaaaaaccttggaaactgcttgaggaggggtggtggtggagcaacagggagataataaaagtcactgagccagcgagaatagcagaactgcatttcagagacattgctctgcagccctgtgaataggagttgtaacattattattattattattattatttttgagacggagtctcgctctgttgcccaggctggagtgcagtggcaccatcttggtgcactgcaagctccgcctcctgggttcacaccattctcctgcctcagcctcctgagtggctgggactgcaggcgcccgctaccacgcccggctaatttttttgtatttttggtagagacggggtttcaccatgttgaccaggatggtctcaatctcctgacctcgtgatccgcccgcctcggcctcccaaagtgctgggattgcaggcatgagccaccgcgcccggctattattattttttttaagatgcagtctcactctgttgcctaggctggagtgcagtggtgtgatttcagctcactgcagccgcagtctcctgggctccaacgattctcctgcctcagcctcccaagtagctgggattacaggtgcatgccaccatgcccagctaatttttgtatttttagtagagatggggtttcaccatgttggccaggctggtctcgaacttctgacctcaggtgatccacccacctcggcctcccaaagtgctgggattacaggcgtgagcaacctcgcccggccaggagctgtaacttttaaagccaggagacctgagaggaggctggtgcaaaggtcccagggcagtgagggtctaaggccaggcaggcaggagccaggggacatggacatatgtgagggagaatgagtgggacgtggtgactggatgactctagggagtgtgaggggggtcacctgatgccaggccacctcccgcacagcttcgtgctgcctgatgacagccgggccagccgccagcgtacaagggttgtgcgacgcagcctcagccctgtgttcaatcacaccatggtgtacgatggctttgggcctgctgacctgcgccaggcttgtgccgagctctccctctgggaccatggggccctggccaaccgccagctgggaggcacacgcctcagcctgggcaccggcagcagctatgggctgcaggtgccctggatggattccacacctgaggagaagcagctgtggcaagccctcctggagcagccgtgcgagtgggtggatggccttctacccctcagaaccaacctggcccccaggacgtagccccaccaagcctctctctctggacccccatctcagggcctgcccttggctaaagtcaataaagtctattctaagagc

SEQ ID NO: 1801 - DNA, 2374 bp, Homo sapiens
ttttttttttttcccaagcgaagcatgaacagttgctaagtggaaaatggaggctgaattttacatggtgattcttacctgcttgatcttcaggaactcagaagggtttcagattgtccatgtccagaaacaacagtgtcttttcaaaaatgagaaagtggtcgtgggctcatgcaacaggaccatccagaaccagcagtggatgtggactgaggatgaaaagctccttcatgttaaatctgcactgtgcttggccatctccaactcttcccgcggcccctcccgctcagccatcttggaccgctgttcccaggcaccccgatggacctgctatgatcaggaaggcttccttgaggtggaaaatgcctctctctttctccagaaacaaggctccagagtagtggtcaagaaggccaggaaatacctccatagctggatgaaaatagatgtcaacaaggagggaaaactggtcaatgaaagcctctgtttacaaaaagctggcctgggagcagaagtttcggtgaggagcactagaaacacggctccaccccagattctcactacctttaatgcagttccagatggcctggtattccttattaggaataccacagaggccttcatcagaaatgctgcagaaaactacagccaaaacagcagcgagaggcagcatcccaatctgcacatgactggaattacagacacatcatgggttttgtcgactactcagcccttctccagcaccactgaagagactggactggcggagccagagagatgtaacttcaccctggcggagtccaaggcctccagccattctgtgtctatccagtggagaattttgggctcaccctgtaactttagcctcatctatagcagtgacaccctgggggccgcgttgtgccctacctttcggatagacaacaccacatacggatgtaaccttcaagatttacaagcaggaaccatctataacttcaggattatttctctggatgaagagagaacagtggtcttgcaaacagatcctttacctcctgctaggtttggagtcagtaaagagaagacgacttcaaccagcttgcatgtttggtggactccttcttccggaaaagtcacctcatatgaggtgcaattatttgatgaaaataaccaaaagatacagggggttcaaattcaagaaagtacttcatggaatgaatacacttttttcaatctcactgctggtagtaaatacaatattgccatcacagctgtttctggaggaaaacgttctttttcagtttataccaatggatcaacagtgccatctccagtgaaagatattggtatttccacaaaagccaattctctcctgatttcctggtcccatggttctgggaatgtggaacgataccggctggtgctaatggataaagggatcctagttcatggcggtgttgtggacaaacatgctacttcctatgcttttcacgggctgacccctggctacctctacaacctcactgttatgactgaggctgcagggctgcaaaactacaggtggaaactagtcaggacagcccccatggaagtctcaaatctgaaggtgacaaatgatggcagtttgacctctctaaaagtcaaatggcaaagacctcctggaaatgtggattcttacaatatcaccctgtctcacaaagggaccatcaaggaatccagagtattagcaccttggattactgaaactcactttaaagagttagtccccggtcgactttatcaagttactgtcagctgtgtctctggtgaactgtctgctcagaagatggcagtgggcagaacatgtgagtcttgggctccagaatgttccttggttgctcaaatcactctctgatccaccttaaaataggacaaaatgagtcagcaggaaaactcctttcccaatctgagaagtggagcctatgtaactgaaggtgtctgtagtatggcccattcttctgagtcacttaggcaactgagtttggatttctgaatgatctgcatgttgtttctgtcttatgctttttcatgtcacgtcacttaagtagcataaatgcattagcattgataccagtatataaaacatttctgattcattcttacagtgagaaccagttagcatttaaccatgttttccatacattattttattaatttatgtcctcacttatctatccagtgccttatatatgtaaattactgtactattgttaaaacgactaagacatgctacttgcctttaaggcaggatccagcagactaccccatctggtgccaaatctggtctgtggcctgattttgtttagccctcaagctaagagtggtttttacatgtttaaagggttgtacaaac

SEQ ID NO: 1802 - DNA, 1994 bp, Homo sapiens
tttacggcaaggaaaccaaggttcagagattgtgggtgccccacgtgattctcacaaacactgcactctcccaggcccctcttttaaacacttttaaaatgaggtgacattcacatcgcatgaaattaactatttcaacgtgaataatgtggtggcatttgtgcactcacagtgctgtgcacccacccacaccgtctagtttcaaaaggcattcatctccccagaagaaacctcccgtcctcattaagcagttacccctccttggtatcccccaagcccctctcctggggtccgaagagggacttgccagtgagcggagctctgataataaggaatcaggcacccactgctggtccaggcctgggttggttttccacccagcagaggtggcagagccaggagggtctgggagcgctacaggggagccccatgcttgccgccggagccctgccccgccccgagcttccccaccagggggcagcagagagctttccagaacccgccgcggggctggagggaagcagtggctcagagctgctgacaaacctcatgttgaccccagaccgctgtctctgtgggttgggcttgggaattggagaggaggccgcatgattggaaacatgaagacggcacggcctggctggagcagcgggaagcgtcgacacggtcactgaggacacagacctcctgcctgccgggccgggcctgcagccattcctctcggggtggggtctgcagttccgggttgctctcagcccccgacctgcctcagagtcctgggggctttgggactgtgcctccccatttccacccaccctggctggtgccatcaggggcctggatcctgggatcctgttcctctcgggcagcagagcatgggggaccagaggaaacggtgggtcttcaagccccacattcaaaccccagcccaccactcacagtctgggggttcggggtgagggagttgatttctctgagccccagtttggtcaccactaaaatgagactgacatactggggcagagtgccagccccagggccaatagaggcctgtttcctactaacaatacttcttactcctaagaaaagctccaacaaccacacgctatggaacactcaacccaggtcaacttgtcagagacatgtgaaccagagcagctccatcttgaatgggggctgggtaaagtgaggctgagacctgccgggctgcattcccaggaggttaggcattcttagtcccaggatgagataggaggtcgcacaagatacaggtcatgaagaccttgctgataaagcagtttgcagtaaagaagccggccaaagcccaccaaacccaaggtggccacgagagtgacctctgattgtcctcacggctcattatatgctaattagaatgcattagctgctaaaagacacccccaccagcaccatgacagtttacagatgccatgacaacgtctggaggttaccttataaggtctcaaaagggaggggagaaactctcagttctgggaattgcccacccttttcctggaaaactcatgaatagttcaccccttgtttagcgtatgatcaagaaataaccatgaaaatgggcaaccagcagcctttggggccgctctgcctatggagtagccattctttttttttttttttttgaaatggagtctcgctctgttgcccgggctgcagtgcagtggcgtgatgtcggctcgctgcaacctccgcctcccgggttcaagcaattctcctgcctcagcctttctagtagctgggattgcaggaacccgccaccacgcccagctaattttttgtattttagtagagacagggttttgccgtgtcggaccaggctggtctcgaactcctcacctcaggtgatccacctgcctcggcatcccgaagttatgggattgcaggagtgagccactgtgcctggccagagtagccattcttttattccttttctttcctaataaacttgctttcacttt

SEQ ID NO: 1803 - DNA, 2394 bp, Homo sapiens
ctatatgactctagacagaaaaattttgctaacccctgctctgaagcaagacaaatttgcagagaataattttttgttgttttttttttttgagacgaagtttcactcttgttgcccaggctggagtgcaatggtgcaatcttgcctcaccacaacctctgcctcccaagttcaagtgattctcctgcctcagccccctgagtagctgggattgcaggcacatgccaccatgtccggcaaatagagatggggtttctccatgttggtcaggctggtctcgaactccggatctcaggtgttccagctgccttggccttccaaagtgctgggatgacaggcatgagccaccgtgcccggcagagactaatctttgtttttgttttttttgggggggtgtgggtggggggatgaaatctcatttactctgtcacccaaggctggagtgcagtggcatgatcttggctcgctgccgtctccacctcctgggttcaagcagttctcctgcctcagcctcccgagtggctgggattacaggcgcgtgccactgtgcctggctgattttttttgtatttttagtagagacagggtttcaccgttttggccagtctggtcttgaactcctgacctcaagtgatcctcccacctaagcctcccaaaatgctgggattataggcatgagccaccgtgcctggccttgcagagaataatctgaattcaccattgttgggggtggcagtacaatcagtgttcagtttgtcaagagtttcttatagtcaagctgtaaaggctgaagggactattattgttactctctcagattgccttccccaactctgaaatctcttttccctttattgaatctttgtggattgttcaactcaaccctctaattaaccacacttgcccattaaattgtgttctccctgtcttggaggttttaccattaaatggcttctctatagtggctagaccctcctaaatctttatcccagctctccaaaagatgggggagattctttcctttgggcagatggggaaactgaggtccatggaggggtcaggggaaaggggtcattaggtaaagccaatccttcccaatctacccctctgtcaccatatggaagcagttgtgttctattatttactgtgccttaaagaacaagatatttttctccccacaggagtctgtgtgaagcagcacaagcggttgacccaggccatccagaaagccagggatcatggtgagcatgagacggggcacacagcagttttgtttaggtatagggaagatgacttagggctagaaaatggatataaatgctcacacctgttcaagatggtagcacccagcatgttcttcctgacgttacattgtcccctgtcctttctcctgagtgtcttactttatcattgtcctgtctccttgttccttgtctttccatccttttccctcctattttacaactgctggtctcaatgccttaggaagttctttatataaatgtctggccctggactacatggcactgctgcataagttagtaaaaagtatacccctctgctagggcagatgcagcttcatagtccttgttcagcactgcacagctttgtaagcaagagccccagcagtatgtcagcccacacttgccctctgggccggtcacctgtttgcagtatacaacatgcataaatgtacctggtggctctgactggtccttccctttataatccttttcttacttcatctaaaccaccctcctcattgcctcttaaatttcttttcttttttaatcccttaggtctcctcatttaccacatcccccaggttgaaccacgggaccttgacttcagtacctctcatggggctgtgagtgctactccgccagcccccaccctggtctcaggtgacccctggtacccatggtacaactggaaacagccaccggagagagaactgtctcgccttcgccggctttaccagggtcatctccaagaagagagtggccccccacctgagtcaatgcccaagatgccccctagaacaccagcggaagcctcctccactgggcagacaggccctcagagtgctctgtaggagctgtagactgggaagagaggccaggcgtggtggctcactcctgtaatcccagcactttgggaagccaaggtgggctgatcacttgatcccaggagtttgagaccagcctgggcaccatggtgaaacctcgtctttaccaaaaaatacaaaaattagctgggtgtggtggtgcacacctgtagtctcaactattggggaggctaaggtaggatcacttgatcccaggaggcggaggttgcagtgagttgcagtcacacccctgcactccagcctgggtgacagctagaccctgtctc

SEQ ID NO: 1804 - DNA, 2031 bp, Homo sapiens
aggatgcttatcaacttattctctgtattcaggacactctcctttgtgagttgtgccacccaaatgttcttcttcctcggttttgctgtcactaactgtctgcttctgggagtgatgggttatgatcgttatgctgccatctgtcagcctttgcaatacgctgttctcatgagctggagagtatgtggacaactgatagcaacttgtattattagtggcttcctaatatctctggtgggaacaacttttgtctttagcctccctttctgtggctccaacaaggtcaaccactacttttgtgatatttcaccagttatccgtctcgcctgtgctgacagctacatcggtgaactggtcatcttcatcttcggggtcttggtgcttgttgtgcccttgatatttatctgcatttcctatggcttcattgtccgcaccatcctgaagatcccatcagctgaaggcaaacaaaaagccttctccacctgtgcttcccatctcattgtagtcattgtccattatggttgagcttcctttgtctacttgcgaccctcagccaaatatacatcgggcaaagataggctggtgacagtgacctataccatcatcaccccagtcttgaaccccatggtatacagcctcaggaacaacgatgtgcagatggctattcggaaactgattggaaagtctgggttttctcttaagactctatgagcagaatactttctaacagtatggacaccattagaacaattgtgtcacgattatttaaaccatgagattatctagtctatttatctaactaactgcgaggccttggattaattgtttgacatttggggcctacatgttctatgtaaagcagagatagcaatattttcttcctggagtcattgtaattaagatagattacaaaatatctggcaataaaacataactctcctcctctttctcttcttcctctgaatttaaagtcctcaaaagggtcttagcaaccatcattttttgccctatatttgtcttgcttgaccaagatctctgattgcactctgtttaaggttatgtccagcttaaaatgaggtgtccaggcctgaaggtggcttagatctagtggtatgacatggcagggaaaactgtaccatacaggtaattagatgatttaaaactggacactggttaggtcatgactgaagcgttgactcttctctgaatctaaattctaatatatggaaggtagggataatgtaatttccctgttttacttcatgggggctttatttgtatcttataaatagtataaaagaaagtgtaaaagcagtgcaaaatgtgaaaccatatacaatgtagagctcatttcaaacatgctttccataactgagaggattttatttctttcaaggtcctcaaaacaggtattttggaatggcttttctgactgctcctttgaaccacttcttatgcaatgtagaagttttgctatgtaacatagaagttatgcttcataatggaatggaaaacaatattcaaccattccgtcccatcttgggctaaaggtatctacgtggctttccacactgaatttattaggaagaggaagatacccagcttcaaatttatcatgggaatatataagatttgagagagaagtatcttggtgatcatctggtccaacctctcacctgtacagaaatttcttcatcagtatctctaagggaaacccttctccactgattgggcatcaacgacctcataaaatgtatattcccgttgcactcagctcatactattatcccctctcatttcagctgaagtttgcctctgcttttcatgcattgtatctcttgtgtcatacagtaagtcgagtcctgattcacagatgtttgagacagttatgatgacagtctgaacattttccataatttatgtgacctgaatttcagatgcctcactatcctgggtgcagttctctagctatgctgtagattatcagtattcttttaaaataataataaataaaactgaagttcatatttc

SEQ ID NO: 1805 - DNA, 2076 bp, Homo sapiens
ttctgtggtggttccaacctgtgataactgagaacaatacaaatagagatttgaaattcatgttgaatcatgaatcatatgtctgcatctctcaaaatctccaatagctccaaattccaggtctctgagttcatcctgctgggattcccgggcattcacagctggcaacactggctatctctgcccctggcactactgtatctctcagcacttgctgcaaacaccctcatcctcatcatcatctggcagaacccttctttacagcagcccatgtatattttccttggcatcctctgtatggtagacatgggtctggccactactatcatccctaagatcctggccatcttctggtttgatgccaaggttattagcctccctgagcgctttgctcagatttatgccattcacttctttgtgggcatggagtctggtatcctcctctgcatggcttttgatagatatgtggctatttgtcaccctcttcgctatccatcaattgtcaccagttccttaatcttaaaagctaccctgttcatggtgctgagaaatggcttatttgtcactccagtgcctgtgcttgcagcacagcgtgattattgctccaagagtgaaattgaacactgcctgtgctctaaccttggggtcacaagcctggcttgtgatgacaggaggccaaacagcatttgccagttggttctggcatggcttggaatggggagtgatctaagtcttattatactgtcatatattttgattctgtactctgtacttagactgaactcagctgaagctgcagccaaggccctgagcacttgtagttcacatctcaccctcatccttttcttttacactattgttgtagtgatttcagtgactcatctgacagagatgaaggctactttgattccagttctacttaatgtgttgcacaacatcatccccccttccctcaaccctacagtttatgcacttcagaccaaagaacttagggcagccttccaaaaggtgctgtttgcccttacaaaagaaataagatcttagagaccttctccatgatgtacatgaacctcagcttctcctaaactggatagtaaaatttcaaagaggataaatgagtaagtgaatacctttgggattccctttttatatttgcatgtaaataattgtgaaagcttcagaaaagatacaaaaaatcacagtagcctaaaatattgacaaaagctaaatatttaaatatatttgagaatatggaagaaatttctgccaaatcaaattggatttaaagaacttaatgattgatatctatctcttaaaataaaaatgaatataatcacacacccacaaatacacacacagacacacatacattcaatcagacaaatgagtgattgggacatgaatcacaggtcatgcttgcgcattgttagctgtaacttgggagctgcaacttgggagcaaagtcagtctgcctaaacaagcattactccagtaatatgaaatacagaggtcggaaaagaaaataattcagataaagccaaatcagtcaatgatgaggatttatgtggaatatgagatgactcagcttggacagacagaacccaaaagattcatctagctagaaggatctggtgcttacgccgtttgcctccccagatttgctctctgccctttgtgcactgctctgtaaactggagggctgactttcacatattgtaagcccaaactcctttgtctttcggtgttcagttgaattgagccaatgtgatgcgtgacagattacagttcaagaggagacagcatttgggctatttattattctactcccagcgtgctttgacatgagggttttcactggatatgtcccttctctggccacccacctgctacagctacagcttttatggaaatatagtaacaggcttgtcttgccttctttcttcaggccaaggggctgataaaggcttcctgatagtagtctctgagtgcccagcatccattattttttaatatccacttgttttcttaaaacaacctactactcaataccaacttcattaaattgtcttcaaactc

SEQ ID NO: 1806 - DNA, 2202 bp, Homo sapiens
gtttattgagcacctactattttccaggttctgtgctttgtactaggtaatcaacaatcacccagggctcccagctaggggaggccaacatgtaaactgattctgacagttcagggtcctgggtgccaagaaaggtatagactaatgattaattgcaatggggaggtgaatgttgaactggactgaaacgtaagtaggagttccctaggcatgggaaaggcaaggcacgagaagtcattccaggaccaaagagcagtaattgcaaagcatagagatctggaaggagctagttgtgtttacagaggaggggagggtggtctagagtaaggcgtgatgagacctaaaggtatcggaagctcaattgcatttgaggcctttccatttgggcttctgatacttttaggttttgtaaggttagtgggagccactgaaggtgttatgaaggacagcagctaatgtccacatgcacattcagacacatgcacagacaacagcagacttcctgctgtacatactttgaaaccaaagtggaaattcaggttctgaacttgtgtgaggcccttgaggtgcagccccagggaaagaggggccgggtttccagctgcgctactcttgccccgcagacatagatgagtgcagccaggacccgagcctgtgccttccccatggggcctgcaagaaccttcagggctcctatgtgtgtgtctgcgatgagggcttcactcccacccaggaccagcacggttgtgaggaggtggagcagccccactacaagaaggagtgctacctgaacttctatgacacagtgttctgcgacagcgtattggccaccaacgtgacccagcaggagtgctgctgctctctgggggccggctggggcgaccactgcgaaatctacccctgcccagtctacagctcagccgagttccacagcctctgcccagacggaaagggctacacccaggacaacaacatcgtcaactacggcatcccagcccaccgtgacatcgacgagtgcatgttgttcgggtcggagatttgcaaggagggcaagtgcgtgaacacgcagcctggctacgagtgctactgcaagcagggcttctactacgacgggaacctgctggaatgcgtggacgtggacgagtgcctggacgagtccaactgccggaacggagtgtgtgagaacacgcgcggcggctaccgctgtgcctgcacgccccctgccgagtacagtcccgcgcagcgccagtgcctgagcccggaagagatggacgtggacgagtgccaggacccggcagcctgccgccctggccgctgcgtcaacctgccgggctcctaccgctgcgagtgtcgcccgccctgggtgcccgggccctccggccgcgattgccagctccccgagagcccggccgagcgtgccccggagcggcgcgacgtgtgctggagccagcgcggagaggacggcatgtgcgctggccccctggccgggcctgccctcaccttcgacgactgctgctgccgccagggccgcggctggggcgcccaatgccgaccgtgcccgccgcgcggcgcggggtcccattgcccgacatcgcagagcgagagcaattccttctgggacacaagccccctgctgttggggaagcccccaagagatgaggacagttcagaggaggattcagacgagtgtcgctgcgtgagtggccgctgcgtgccgcggccgggcggcgccgtgtgcgagtgtcccggcggcttccagctcgacgcctcccgcgcccgctgcgtggatatcgacgagtgccgagagctgaaccagcgcgggccgctgtgcaagagcgagcgctgcgtgaacaccagcggctccttccgctgcgtctgcaaagccggcttcgcgcgcagccgcccgcacggggcctgcgttccccagcgccgccgctgacgccgccgacgccgccctcggcccagacctcggtgatcactgagggatttccgcgagctcggcctcacttctgccccgacttgtggctcggacccagggaccttcagggcccgcagaccctcccggcgccttgagacccgaggcgcccctaccggcccccctccccggttagcgggcggttgtaaggtctccggcgggcgctgcctgccttcctcccagagggtgtttcctagaaactgataaatcagatcgtgcctctttac

SEQ ID NO: 1807 - DNA, 2422 bp, Homo sapiens
atttatttgaaatgactatttgttgaacacagtatagttcaaggatattttttcatatgtatttccttaagagagccctgagcctgagattttggaggcttctttcacttgtttgaactttgaaggtatattttatctattttaaaaaacacttaagaattaacaaattctataaagcatcttttttcatagttttcattcatactttcagcaacttgaagggagagtttttaacgtagtctgtgtttttgagcactctgagcatttgatttcttcctggtatcaccggtaaatcactcaatatattattattcccaaaattcgtgaagctaagagatgagccatcttgaaaaacaacctggcatttgactggaggtgatactctctggaatcataggattaacaacttggaaaaggcctatgatactcctggtaaacctctttgtgctgctctctgtggtttgtgtcctcttaaatctagctggatttatcctaggctgccaaggggcccagtttgtgtccagcgtgcccaggtgtgatctggtggacttaggtgaaggcaagatttgcttctgttgtgaagaatttcaaccagccaagtgcacagacaaagaaaatgccttgaaactctttccggttcagccctgtagtgctgttcaccttctacttaagaaagtcctctttgccctgtgtgccttgaatgccctgaccaccaccgtctgcttggtggccgctgccctccgctacctccagatattcgcaaccaggagatcctgcatcgatgaatcccagatttctgctgaagaagcggaggatcatggacgcatccccgaccctgatgattttgtgccgcctgtgcctcccccttcctattttgccacgttttactcgtgcacaccccggatgaaccgcaggatggttggtcctgatgttattcccctgccacacatctacggagctcgaatcaaaggtgtggaagtgttctgtcctctggatcccccgccgccatatgaagctgtggtgagccagatggaccaggagcagggatcttcattccaaatgtcagaaggatcagaagctgctgtgatcccattggatctgggctgcacacaagtgactcaagatggggacattcctaacatacctgccgaagaaaatgcatccacctcaactcccagttcaaccctggtgcgtcctatcagaagccggagagccctcccacccttgaggaccaggtcgaagagtgaccctgtgctccatccttctgaggagagagctgccccagtgctcagctgtgaagctgcaacacagactgaaaggagactggatctggctgcagtgactctgaggagaggcttgagatctagagcttcgcgatgcagaccgcggtctttgatagattacaaatcctacatggacaccaagctgctggtggcgaggttcctggagcagtcctcttgtaccatgaccccagacatccatgaacttgtagaaaacattaaatctgttttgaaatctgatgaggagcacatggaggaagccatcacaagtgccagttttctagaacagataatggccccattgcagcccagcacatccagggcccacaggctgccctcgcggagacagcctggcctgctgcacctccagagctgcggcgaccttcacaccttcacaccagcggggaggccccgagccgagaggaggccccggcgagtggaggctgagcggccacacagcctcattggggtcatccgagagactgtcctgtgaaccctggaagacagaaggccactccaaggggaaggatccctctcctctctgccatttcttggctgggagctgtggtccacctcaaaaaaaaaggagcactctggaggacacgttttcccacctgttggctcccgtgtctgctgactgagggcattcaggagtaaatgcacaggtcggtccaggcccgtctgggtttgggatgcactgagttggaggttatgaaagctttgatcctcttcttcctctgctgggcctcgcagcattcccaagggtcacatgccctggcatgggcagaaactgggctaatgattctttgcccacttcacccctcgtgtctctctttgttgctaagttctttccctcttggaaggacagatctgccgggctgctatttatagttgcctttggcctttcactgctctgcgatttggcaggaaataaggcgattaaccctatgtgtccacaagcctcaagccttgtttcaggtcaccctcaaatcacactctctttaggcaaaacaggaaacttcttaagtgacaaattttaatgccagacatttaaggagaggattattgttgattccatttactcatgcttgcaaaactagagacccctaaggcagaactgagaataaacatgtttactttgg

SEQ ID NO: 1808 - DNA, 2074 bp, Homo sapiens
cattaatttgcccaagcccagagtgtgtgagaaagtgcctgcctgacatgtttttcttttccattaacacttctgtgataaacagcttagatgctcagagaaaaattaatgaaactattgtaacaatcatgcacatgtaggtaatttattaaggacaattaaaaagctttaaaaatcatccgtgaggcaaaatgaacaggaagatggtgtgtggcgggttttggcagggagcctgcccgtgggtgtacggaacaggtttctcttcccatcgccctcacccccatcagagcaacacagcagtggaaagcgtggattcctgctgtccaggctgttagtaacaaacattctatgctggttgcctgttgggtgaagccagggagatgtgtgactgtgtggtctggctgttctgctctaccttccttgggacccaggtatgctggttcctgggcctcccttccaggagcaggagcatgttgggtgacaacttggttattggacttttgttgtttgtgttggctctaggagcctcgaaaccaggtcaggggcagcaagggaagcctagagaggttaaggtggcactgtcatgacgacaccagccacttactagcttggaccttggcctctctgtgtaacgagcctgagcctcagcttcctcatctgcaaaatggggagaatcgttaggaaggagtggaggattggagcgaggatcacacaagatcatgcatgctgagggcctagcgtgatgcctggcaggtatgtagtaaatgttcaaatgtttaatattctttgttatcatgagcggcatcatgattgtgttgttggctgaaagccaagctagggttgacacccacatatcaaactccaaggccagtgcacttttcatgatgtgccagtacccacccactcacccttggatcctccctccaccgccactgttttacaggaatgccaatactgtgtcctgtgtgaatgctaggatgtactcactgagcctccttgaggcttgggtgaggcccctctttggaaggatggagctgcctagcttcctcctggtctcatctctatccccactccttctccaaccctgtcatggttcatagccccaaagtgacagatcttccacactctggaatttttttcacacgtgtggaggactgggattgctagaatttgtttctttttattggttggtgacccaagaaatctttgaccttgtggaccagtggtttctcaaatgcagatatatttaataaagtcagggtctgttagcggatggtattggtccctctctgggtatttatctttattttattgtttttccccaaggcttgatcgtagacacataggttatgtgtccattatagacatatgcatctattttcaagaagtaaattttagttcacttactgactagaaaggaaaagaaagtgttttagagtagacacgtcagacacgacagatttttttccctttccgtgctataaatgagcagtgaaaaatgacttttgctattaaaagctgtagcaccagccaggcgcagtggttcgtgcctgtaatcccagcactttgtgaggcccaggcaggcagatcatgaggtcaggagatcaagaccattctggccaacacggtgaaaccccgtctctactaaaagtacaaaaattagctgggtgtggtggcacgtgcctgtaatcccagctactcgggaggctgaggcgggagaatcgcctgaaccaggaagtcggaggttgcagtgagcctagataacaccactgcactctagcctggcaacagagtgagactccatctcaaaaaacaaacaaacaaacaaacaaacaaaaaactgtagcacctgtaaaaaatagtaaattataagacattatcaaagtttataggcactagaatttgaccttcagtaaattcaacattggagggtaacagggttttctttcctttcttcaaaatgaaaaatgagagggaggaaaaagatttatttccttctggggctggagtaacaactggaaatggtattccccagcttaaagaaagaaagaaagaaagaaggaaagaaagaaag

SEQ ID NO: 1809 - DNA, 2037 bp, Homo sapiens
attggttggctgccgcctgatggatagacgagggaggagtactctcttcagtgtgttctgacggagccgaagtacagaaaccatatttacaggtacatgtgacagcgttgcagctatgagtggaattttaaaggggaagtttgaagaagtcaacggctcctcaccctgctcttcagtgcaggaatcagatgatgaagttttcagctgtgacagtactgagagtgttgatagtgtcaatcgttcagttttaatgattttaccagaaaaaatgaggaaatatcaacagactgaaaatatgttttcagaggcatagaatcttcaggaaaatactggagttcctgagatctcaaggtacatgtgacagcactgcagcgatgagtggaattttaaagaggaagtttgaagaagttgacggctcctcaccctgctcctctgtgagggaatcagatgatgaagtttccagcagtgaaagtgctgacagtggggacagtgtcaatccatccacttctagtcattttaccccttcctccattctcaaaagggagaaacgactgaggacaaagaatgtacactttagttgtgtcaccgtgtactacttcaccaggaggcaaggcttcacaagtgtgcccagtcaagggggaagcaccctggggatgtccagccgccataacagcgtgcgccagtacactcttggcgagtttgcaagggagcaggagaggctccaccgggagatgttgagagaacaccttagggaggaaaagctgaactccttaaaactaaagatgactaagaatggcacagtagaatcagaagaagccagcactcttacactggatgacatttctgatgatgacattgacctggacaacacagaggtagatgagtacttcttcctacaacctttgccaacaaaaaaaacgaagagctctgctgcgtgcctctggagtgaaaaagattgacgtggaagaaaagcacgaactccgagccatccgcctctcacgagaggactgtggctgtgactgccgagtgttctgtgatccagacacgtgcacctgcagcctggctggcattaagtgccaggtggatcgtatgtctttcccatgcggctgcactaaagaaggatgtagtaacacagcaggtagaattgaatttaatcctatccgtgttcggactcactttttgcacacaataatgaaacttgaactggagaaaaaccgagagcagcaaatccccacgctgaatggctgccacagtgagataagtgctcacagtagttctatgggccctgtcgctcactccgtagaatattcaatcgcagacagttttgagattgaaactgagccccaggctgcagtgctgcacctgcagtcggctgaagaattagattgccaaggagaggaggaggaagaagaggaggatgggagcagcttttgcagcggagtcacagattctagcacgcaaagcttggcacctagtgagtcagacgaggaggaggaggaagaagaagaggaagaggaggaggaggatgacgatgatgacaaaggagatggcttcgtggaaggtttgggcacccatgccgaagttgtccctcttccttcagttctttgttattctgatggcaccgccgttcacgaaagccatgcaaagaatgcttctttttatgccaactcttcaactctgtattaccaaaatgatagcggtgtgccctgcaatagtttatatcctgaacacaggtccaatcaccctcaagtggaatttcactcatacttgaaaggcccctcccaagaagggtttgtctctgcattgaatggtgacagtcacatttcagagcatcctgctgaaaattctttgagccttgcagaaaagagcatattgcatgaagagtgcatcaaatcacccgtggttgagacagtccctgtttagtagcttaaattattctaggaccaactcttctcttatttaaggcactgtatttaattggatttcctgggctcatcattgtttaaactgaagaccaagaaaacttggacggtggtt

SEQ ID NO: 1810 - DNA, 3135 bp, Homo sapiens
tatgtttgaagtccccagtttagattggttattaagtaagcattcattagattttcaattatttataaaagctaaatataaagaaccacaaactatttcaacaagttaatacagccaaagcatatagataaatatatgaaatacagtaaatacatgagaccaaaaattcagtctttcatcagtctggaaataaacaaatattttgtgtgtgattgtttctgaaactgcagacaggtatttttaattcttaactcctactgtgttcagtacattattcagaagattagccaggaacagaaaatgtgcaatttaatttcccttaggttcaaggtataagctaaacagagtctttccctgcacaaattatcaagttggctgtgtttcactggataggagatgggacagtgggaatcttgtttgttcattgatgggcgtcattatttagatggtgaggcatttggctaccttgaaagtcatctttactccctgttaccctcactttattgaatttctttactttgactttcagagctctgggcagaaatcacatattagtttggaggactttgttattttattcaagttaaagtatagggtttccccaaattgaaaaccagagtagcctatgatcattccctgtgggattctttaactgttaaggcaaaagaaaatgcagttgcacttaagagtatatggataaaataaagaactgtgaagtgaaaaggggagagatttttttaaagatgactatattttaactcctcctgactagtaaattcaaggataccaggaaagatgaggtgtagactttaaaccttccaacattccattgtgttaatcattcttcctcatcaaagaggcagtaagggataatttagagtgactacagttacaaataatgtgctgtataagcacccaagagcagagataaggatggaattaagggtgttaaagaaaatatggcctctcttctttaccatttgattgtttttgctgtccctggagactcatatctctctctattcctaggaccaaagtttacacaactgccaaatatataaacaagaacaccccttaaaattcctgtgaaacattgtacatcttaagagagcagatgtgtctatgggctgtcacaaatatcagtcttgctatgttaagcataaacttaacaaatattagtggagacacactatttaggattcgcctaaaaccctctaagatagaggtccccaatcccggcccctgatcggccgcacctgcaggaggtgagtgatgggccagtgaacatcatagctgagctcagcctcctgtcagatcagtggccgcattggattctcataggtgtgagaacccaattgtgaagtgcacgtgtgagagatctaggttgtgctctccttatgagaatctaactaatgcctgatgatctggggtggaagagtttcatgccaaaaccatccccttgccctgtccattgaaaaattgtcctccacaaaacgggtccctggtgccaaaaaggttgggaaccactgctctaaggtgtccagtgttggctgacccctctccctacttatgcacccattggcttgcctaacagctgattgatttctgtttaaatagacacagtatattggggcagtttattgcatctttggtcatctcttttcctctgggtccctaggacggaagacaatatcctaagttgattctgtctaacaaaacatgagtaaaatgaggaattggttaggtaggtggcaaacagcaaagattatatggacttgtagcttgctccataagtagactttaaccaagtaagctatttgaaaaacaatcttaatttttttcaagtgttatttttaattctataggaatattttcataaaaataatgatgtccattatgttagcaactagaattacaatggcaagttttaggagatgcttgaaatgtgagatgttacatttaaaactataaagttatcgacctaagtatatgattgtacccatgtggcagtaaacttaaaacttccagtttcaggttttgttgtttgtttgtttgtttgttttaaagagttgttaatgggggaaaggaaaggaatatgtgagggagattggcttgcaaagcctaaaatatttcttatgtggccctatatagaaaaagcttgtgtattctggacaagagcaattaaaggaaatagtttggacttaaaacttctaaaaataaatagtgctcaaattgcacttggaagtcagagaccttgctggtcatcaaagggttcagttcagtcagtagttagtaaagacagaagccagcttagccaagagtcagaatacaaatattcagaaccgattaataggcaaataattatatataccatgtcccagccagtagatggaataatatgccaccattaaatttatattaacatgtaaaaatgtttggagtttagggctctttacccatatcttagtgacataggaagaaaattaagataaatcacaagcaactagaaaatagacatgttaactttattttagtacatactctggtaggatttttacataatcttacgtactagtcagccttcttagaagtgtcacatagtcaatatccttaaagagaaatggaagctaatcaggtaagtaaattgtgagctgaggcctacatcatgcttgctattcaaagagaataaagtaattggataaatgataatgcctccttgttgggaaaacagtcttcaaaaatggcactaagttacagttctaatgcaatagaatcactaattactatgaatacttgttttacttggcagattactaacaaagttaattggatacaataaatgtaaagattttcttttaaaacgacagattcttcagtgaggtgtaaacattttatagaacaattatcaaagctatattggacttaaatattggtcatgaatgtatgcacaccccataggtagctgccctccttgggcagcttttgactcctatgccaaattttaaaataaaggccgtggccaggcgtggtggctcatgcctgtaatcccaacacttcaggagtccaaagcgggcggatcgcgaggtcaggagatcgagaccgtcctggctaacacggtgaaaccctgtctctact

SEQ ID NO: 1811 - DNA, 1793 bp, Homo sapiens
agttctaaagtccccacgcacccacccggactcagaatctcctcagacgccgagatgcgggtcacggcgccccgaaccctcctcctgctgctctggggggcagtggccctgaccgagacctgggctggctcccactccatgaggtatttccacacctccgtgtcccggcccggccgcggggagccccgcttcatcaccgtgggctacgtggacgacacgctgttcgtgaggttcgacagcgacgccacgagtccgaggaaggagccgcgggcgccatggatagagcaggaggggccggagtattgggaccaggagacacagatctccaagaccaacacacagacttaccgagagagcctgcggaacctgcgcggctactacaacccggggcgcaggtcacgactccccatcccccacgtacggcccgggtcgccccgagtctccgggtccgagatccgcccccgaggccgcgggacccgcccagaccctcgaccggcgagagccccaggcgcgtttacccggtttcattttcagttgaggccaaaatccccgcgggttggtcggggcggggcggggctcggggggacggggctgaccgcgggggcggggccagggtctcacaccctccagagcatgtacggctgcgacgtggggccggacgggcgcctcctccgcgggcataaccagtacgcctacgacggcaaggattacatcgccctgaacgaggacctgcgctcctggaccgccgcggacacggcggctcagatcacccagcgcaagtgggaggcggcccgtgtggcggagcagctgagagcctacctggagggcgagtgcgtggagtggctccgcagatacctggagaacgggaaggagacgctgcagcgcgcggaccccccaaagacacacgtgacccaccaccccatctctgaccatgaggccaccctgaggtgctgggccctgggcttctaccctgcggaaatcacactgacctggcagcgggatggcgaggaccaaactcaggacactgagcttgtggagaccagaccagcaggagatagaaccttccagaagtgggcagctgtggtggtgccttctggagaagagcagagatacacatgccatgtacagcatgaggggctgccgaaacccctcaccctgagatgggagccgtcttcccagtccaccgtccccatcgtgggcattgttgctggcctggctgtcctagcagttgtggtcatcggagctgtggtcgctgctgtgatgtgtaggaggaagagctcaggtggaaaaggagggagctactctcaggctgcgtgcagcgacagtgcccagggctctgatgtgtctctcacagcttgaaaagcctgagacagctgtcttgtgagggactgagatgcaggatttcttcacgcctcccctttgtgacttcaagagcctctggcatctctttctgcaaaggcacctgaatgtgtctgcgtccctgttagcataatgtgaggaggtggagagaccagcccacccccgtgtccactgtgacccctgttcccatgctgacctgtgtttcctccccagtcatctttcctgttccagagaggtggggctggatgtctccatctctgtctcaactttatgtgcactgagctgcaacttcttacttccctactgaaaataagaatctgaatataaatttgttttctcaaatatttgctatgagaggttgatggattaattaaataagtcaattcctggaatttgagagagcaaataaagacctgagaaccttccagaatctg

SEQ ID NO: 1812 - DNA, 2385 bp, Homo sapiens
gagaggaggaggtgaggtgctgcgggaggtgagctgggctggtggggacaggggcagggcttggggctgggtctccggacagaggcctggcttttctgtcagggcagggcctagcccctgcccccataaaagaggagacatagggggcttggtgagataccctgaaacctcccccctctgaccccgcagccaggccccaggctggccgggagtggcccctcacactggttctccccactttctctgcctgtggcatcgaaggccccgggcaccatggcccaggccctgggggaggacctggtgcagcctcccgagctgcaggatgactccagctccttggggtccgactcagagctcagcgggcctggcccatatcgccaggccgaccgctatggattcattgggggcagctcagcagagccagggtaagggggcagggtgagggctggcggaatgctgggacagaggacagggggctgagggctgaattctggagggaggccgggagggtctggtggtagggattgggagggggactcagccagtagcacccctctgcaggtgccaggtggaaccctaaggtgggaagggtccggggaggcctctgtacgtctcttacccccagcctccgagggtttgcacccactactggggcagaacatccttcccctttgaacctctggctcaggaatcccagatccaaatcacagaacccatacctcctccttccccctttccccaagctacagacagaaacacaagtccagatatagacagaaacttgccccgggtcacacagatcagacacagacccagactcaaactcaggactctgggcttccagtccagggctctctccagccagcttcccctatgaattgtctgtgtccctgtcctgggtgacagccaaccagtccctcccccaatacacacccactcaccccttcagtctcctgcttctgcccacgtcggagccacatcctttcctgtccccgtgacaagcattggcagctcctgggtcacaggtcaccccacagggctcccagagatccctagggccaggagctgggttcacctgggtagcctggagggtggcagtgtgggccttgggtaacagctgcccagcgtctggatacctgtgccatgcacccccaggccgggccacccacctgcagacctcatccgccaacgggagatgaagtgggtggagatgacctcgcactgggagaaaaccatgtcccggcggtacaagaaggtgaggggggcaggggccccacttggcttccatggctcattcctctctgcctcagcccacatcttggcaaaatgtacccaccctgtgtcccagcacctccggcctttgctccctgccacccaaagtgggcccctgcctgctgatgagctgtgcctggggcctgccagcaggagctatggaggctgcctagtggagcccttggcctcacccacaggtaaagatgcagtgccggaaaggcatcccgtctgccctgcgcgcccgatgctggcccctgttgtgtggggcccatgtgtgccagaagaacagccctggcacctatcaggtgagggagtgggcaggggccccaattcccctacccagagcccctcaccacactgaaccctcacacccaccttcctggctacccacaggagctggcagaggcccctggagacccacagtggatggagaccattggcagggacctgcaccgtcaattccctctgcacgagatgtttgtgtcgcctcagggccacgggtacgaggccggtgatgcccagggacccccagccccacaagccccaggtgctccagcccactttccctagcccagctctacagtcttgcatctcaggggacccaggaaggcccagggaggctgaggcctgggcagaggcccccagagggtggagaagggggtgcctgcaggactggccccttatggggtcttccggcacaggcagcaggggctcctgcaggtgctcaaggcctacaccctgtatcgaccggagcagggctactgccaggcccaggggcccgtggctgctgtgctgctcatgcacctgcccccagaggtgagtgaccttgaccctgctctgggaaccctagtgacctaggcccagggaaccccatccccaggaactgtggcctcagaaacctgcaatccttgattcctggaccctgtcctagtgacccaggtcctcatgactgccagcctcagtgaccttcaagcctaatgaccttgactccaggaacctgggacccttgaccccagccttgaccccagtcatctaggaatctggatgttatcaccttgaccccacgactcctgattctgaacttggggactgcgaccccaaccccaaagaccc

SEQ ID NO: 1813 - DNA, 1620 bp, Homo sapiens
aggtctcagagaggagcctcagccctggactccaaggcctttccacttggtgatcagcactgagcacagaggactcaccatggagttggggctgagctgggttttccttgttgctattttagaaggtgtccattgtgaggtgcagctggtggaatctgggggaagattggtccgcccgggggggtccctgagactctcctgcacagcctctggatttgacttcagttattattggatggcttgggtccgccaggctccagggaaggggctggagtgggtggccaatataaggaaagatggaagtgacaaatattatgtggactctgtgaagggccgattctccatctccagagacaactccaagaactcactatatctgcaaatgaccagcctgagagccaacgacacggccgtctattattgtgcgacagtccccgatttagacagtgactccttcttgtggggccggggaaccctggtcaccgtctcctcagcctccaccaagggcccatcggtcttccccctggcaccctcctccaagagcacctctgggggcacagcggccctgggctgcctggtcaaggactacttccccgaaccggtgacggtgtcgtggaactcaggcgccctgaccagcggcgtgcacaccttcccggctgtcctacagtcctcaggactctactccctcagcagcgtggtgaccgtgccctccagcagcttgggcacccagacctacatctgcaacgtgaatcacaagcccagcaacaccaaggtggacaagaaagttgagcccaaatcttgtgacaaaactcacacatgcccaccgtgcccagcacctgaactcctggggggaccgtcagtcttcctcttccccccaaaacccaaggacaccctcatgatctcccggacccctgaggtcacatgcgtggtggtggacgtgagccacgaagaccctgaggtcaagttcaactggtacgtggacggcgtggaggtgcataatgccaagacaaagccgcgggaggagcagtacaacagcacgtaccgtgtggtcagcgtcctcaccgtcctgcaccaggactggctgaatggcaaggagtacaagtgcaaggtctccaacaaagccctcccagcccccatcgagaaaaccatctccaaagccaaagggcagccccgagaaccacaggtgtacaccctgcccccatcccgggatgagctgaccaagaaccaggtcagcctgacctgcctggtcaaaggcttctatcccagcgacatcgccgtggagtgggagagcaatgggcagccggagaacaactacaagaccacgcctcccgtgctggactccgacggctccttcttcctctacagcaagctcaccgtgggcaagagcaggtggcagcaggggaacgtcttctcatgctccgtgatgcatgagggtctgcacaaccactacacgcagaagagcctctccctgtctccgggtaaatgagtgcgacggccggcaagcccccgctccccgggctctcgcggtcgcacgaggatgcttggcacgtaccccgtgtacatacttcccgggcgcccagcatggaaataaagcacccagcgctgccctgggcccctgcg

SEQ ID NO: 1814 - DNA, 2274 bp, Homo sapiens
ctgctgagtgacagcctccccctggctctcctgcctcccccagctcttctccctgtggggagggagatctagcagttaggccctttatgcccacacccccaccatggaagaagggcagagcctgactcattggaatcccattgttgccagtttctctggtgcgtggtgacattttagatcaccctgcttatgtgaagctgtttttggcatgctgccctcccagggcaagcttgctgcttcccaggaggtatgtcccccgagtgcagcccctggggcacagacatttgtctcccagatgcatgaactaacacacctgtcgcatgcttgtgctgtggagcggctggacacctaggctgactttgaatggattataccaaacggactgatgtaagaccttttaaggaatggagcaagtggaatggctcagccctgctctgtcacttcccccatgcagcagatggttactgggtgctctgggaggaacaggaagcatctctgttgtaccaaggaaccagtgttggctccatagtaagacaagagtcagccgagcatggttattcacacctgtaatcccagcactttgggaggctgaggcagacagatcacctgaggttaggagttgagaccagcctggccaagatggtgaaaccccgtctctactaaaaatacaaaaattagctgggcgtggtggcgcatgcccatagtcccaggtacttgggaggcagaggcaggagaatcgcttgaacccgggaggctcggaggttgcaatgaaccgagatcgcaccactgcactccagcctgggctacagagcgagactccatctcgaaaaatatatatatatatgagtcaatatttgatcaggcatctcagccttcctcttagcagccctgctaagtgccccacacccctagggcaggaagttagctgatggacctgggagaggggtttggaaagcaaagagggccaggccttgttgcacactgcgcctctacccccagatggacatgggcctaaagctgggccatcccacactgactggcaactggcagatttcagaccccaatgccctcagcccaccatcacccttgaccccacaaccagcaataacaaaaagaccaaaagcctgtttcttccaccagccaccagcgcagttcctcttttccaccaggaaagctggagtagtcctgacgccatatataccacccgctccaaggaggattggattcactgttggtagagtggccatcaagccagaacctagccaaccaacacggagccagagggagaaggccaggggagggaggacctcagtggtgctcagcatcaactggctttggggtgggggcatgggatggagcagtcacttagcttcccatctggtgatgaggaccagcaagaatttgcaacaggaacgcagcttccatagcaaagtcaaggggaggggagctgccgccctgggcttgcctggcaggaattagcttatgtaccaaattgtttgtgacagtgctgagcaggagacgctggcttgtgaggaggaaggcttttttaaacaatttggttaaaatgttcaaattgccagctctgactcttgccctggagaggagggcagcggcctgctgttgactccctgatggctggagcagtggaagccactaagaatggctaaagatcacccaagctacgggcaagggcaatctcgtgggtccgcagcccaaggcagagagagacatggagtttaccacctccccggcagctcctgccactgcccagcgtcttgatgaaacagtatggaaacacggctgtcatttatccaggtgtctgcctagcaggtacaggaatgtgggcttggggactggagcccccaccttaaaaagaggtgaggcaatggaaaggaccagaggggacctgattcagcaatttacagtgccttggagctcgccagcagcacctcatttgcatctggattccagccctggcatctgcctcgccccgctctgctcacaaagtaaccccactgtctttccacaaagccaggcactccttagcctaacggcagatcctagccctgagtgcccagaaattctatgtaaagaatgagaaccaaaccaggctcccactaatttagaattcaaacaaccccaaagctaaaataaccccaatttttttctatattgcatagtcatcagtgagctttataattttgtcctagaaacccccccagagtccctaagtgcctttggcctatcaaagtaagactcatttatgttcagtct

SEQ ID NO: 1815 - DNA, 2238 bp, Homo sapiens
gtacagcagcctgggccatgtcggcgccgccggccctgcagatccgggaggcaaacgcacacctggcagccgtgcaccggcgcgcagcggagctggaggcgcggctggacgcggcggagcgcacggtgcacgcccaagccgagcgcctggccctccacgaccagcagctgcgcgccgccctagacgaactgggtcgcgccaaggaccgtgagattgccacactccaggagcagctgatgacctcagaagccactgtccacagcctgcaggccaccgtgcaccagagggacgagctcattaggcagttgcagccccgggctgagctgctgcaggacatctgccgccgccggccacccctggctgggctgctggatgccctggctgaggctgagcgcctggggcccctgccggccagtgaccccggccacccaccccccggtgggcctggtccaccccttgacaacagcactggggaagaggcggacagggaccacctccagcctgcagtgtttgggaccacagtgtgagcccggaatgcagattacagaatggagacagaaagccactgctgtcagtgtccttgggagtcaccagcaccctgcagggggaccctacggcagagccaaagtcctgtctaagcatcagaacaggctgaacagtcaaaaagttttcaaataggcccacaggccaggtgcagacgtttaacccagacagaagtgttcttgtttgtttttaagctttgaatcagtcacccttgctaaaaacctggcaatgcaaacacaaagatctggatttctggcaagacttggccaagcttgcctggagttcagggcaccctctttagccagggtgtgagtttctgttttttgtttttttttttttgggacagagtcccgctctgtcgccctggctggggtgcagtggtgcgattttggctggctgcaacctccgcctcccgggttcaagcgattctcctgtctcatccttcagagtagctgggattacaggcgcccaccaccacacccggatattttatatttttggtggagaccggggaggggagggggtttcaccatgttggccaggctggtctcgggctcctgaccttaggtgatccacccgcctcggccttcgaaagtgctgcagttataggtgtgggccaccgcgcccggccctagcctagcttttgtagcatgcaactgtctcctttttatacgccctaaagaatatatttttgaactccttgtttctgcgctgtccttcttagcccaggacattcagggtgctttgcttgttgtcaaaccagggaaaggagaaaactcctgtgcctttctgggccagcctgtcaccctggcctggtcggcagccattcccctacctcctcactcaggaactgtcacaccaggaaccggcgaggggcacagcctgtttcagaccagaaaggtcggaggccacccacggccttcaggatggcgcccgcctgcctgcctggcaacagtgacccctcagtgcagtaacaatgggcccattttctcctctggatgaacaaggaggggggttgtttgtacaaaggaaaggcaggctggggcctgtctgtgctcaagaataaaccggatgatttcctggcctgggggcaagagggaggccctctgtgttatttgtgcctcctggtagggtcctgctgggccaggtagaatctagggagtgtaggccaagcactctctacagcgattgcatctaatcttcgagtttccctgtagacacaggctttgtcctcattttacagctgtggaaagtgaggcccgggccgggcgcggtgtctcacgcctgtaatcccagcactttgggatgcgggtggatcgcctgaggtcaggagttcgagaccaccctggccaacgtggtgaaaccccgtctctgctaaaaatgctagaattggccgggcttggtggcgggtgcctgtaatcccagctactgaacccgggaggcggaggttgcagtgggtggggattgcgccactgcgctccagcctgggagacagggtgagactcagtctcaaagaaaacaacaacaacaacaacaacaacaacaacaacaacaaacagaggcccagaggtgtgaagggaacacactccgggtctggagggccagggccacttccaattctgggggaagttattgctgaaattctgttttctttctttctttcttttttttttaaagagacaaagtctcactgtt

SEQ ID NO: 1816 - DNA, 2167 bp, Homo sapiens
aattgctcagctgccagagaagtgactggaatagaggttgtagcttaggcaccgctgctccctccagtccctccgtgcagccgatgatggccctatggtccctgctccatctcaccttcctggggttcagcattaccttgctgttggtccacgggcagggcttccaagggacagcagccatctggccatccctcttcaacgtcaacttgtccaagaaggttcaggaaagcatccagatcccgaacaatgggagtgcgcccctgctcgtggatgtgcgggtgtttgtctccaacgtgtttaatgtggacatcctgcgatacacaatgtcctccatgctgctgcttaggctgtcctggctggacactcgcctggcctggaacactagtgcacacccgcggcacgccatcacgctgccctgggagtctctctggacaccaaggctcaccatcctggaggcgctctgggtggactggagggaccagagcccccaggctcgagtagaccaggacggccacgtgaagctcaacctggccctcaccacggagaccaactgcaactttgagctcctccacttcccccgggaccacagcaactgcagcctcagcttctacgctctcagcaacacgggtgctgacagggcaggggctgcagggttgaggaggggaggaggaaggtgggggaggggaactcccaggtctgtggtgcaggggcagggtgcggggcaaggggaaggggcaaaggcagacagaaggcgaactcccagatctgtgttcagagcagtctaccccaggcttaggcgggcagcacccgctctcccactgcgccccccactcgagtggcagcccatctctgtgctcagcggtagcctcagggcccctctctagggtgacagactcaaacattcgcagcagctctgcaatcccagaggtccgagcacatcagtcttctgtcctccccagagcaactgccctccacagccatggcgactgcagtggctcggccccttgcagcaaggccagaggctcaggttgccatggcctcactcctggaaaccacctgaaggtgcagccaccctgtataaacccatcaggtgacatctaacttggcagagaagtcctacccttccctccatgagagaccacagcggtagccctggggatcctgcttcagctgtgagatgatagactgacgagcctgtgaccacttctccctccatcatgaagtggtgcaaagtacatttatttttacaatgaaagctcatctatgaatctgataaaggccttccttcaactggagacaatttgggatgttgcaaaacaagcgatggagttagagttccaggcccacgtggtgaacgagattgtgagtgtcaagagggaatacgtagtttatgatctgaagacccaagtcccactccagcagctggtgccctgcttccaggtgacgctgaggctgaagaacacggcgctcaagtccatcatcgctctcttggtgcctgcagaggcactgctgttggctgacgtgtgcggggggttgctgcccctccgggccattgagcgcataggctacaaggtgacattgctgctgagttacctcgtcctccactcctccctggtgcaggccctgcccagctcctcctcctgcaacccactgctcatttactacttcaccatcctgctgctgctgctcttcctcagcaccatagagactgtgctgctggctgggctgctggcccggggcaaccttggggccaagagcggccccagcccagccccgagaggggaacagcgagagcacggcaacccagggcctcatcctgctgaagagccctccagaggagtaaaggggtcacagagaagctggcctgagactgctgaccgcatcttcttcctcgtgtatgtggttggggtgctgtgcacccaattcgtctttgcaggaatctggatgtgggcagcgtgcaagtctgacgcagcccctggagaggctgcaccccatggcaggcggcctagactgtaaaggggcagggcctgggctgcacaccttaggatgaagtttgctttcccatggctgggggcgggccatgacagggcctctggattaagccaccctgagctctccctccgctagcacacaagcacagagcgtgaaataaacccatctccagtgc

SEQ ID NO: 1817 - DNA, 1745 bp, Homo sapiens
aactaccagattcctcctctaaagaagcccctgggagcacagctcatcaccatggactggacctggaggttcctctttgtggtggcagcagctacaggtgtccagtcccaggtccaggtggtgcaatctggggcggaggtgaagaagcctgggtcctcggtgaagctctcctgcaaggcccctggagtcaccctcaccagttatagtttaacgtgggtgcgacaggcccctggacaagggctcgagtggatgggaaggatcgtccctaccgttggaatagcaactatcggacagaacttcaagggaagagtcacgatcaccgcggacaaatccacgagaacagcctatttggaggtgaacagtttgggctctgaagacacggccacttattactgtgcgagcgggcaagacgttgacttccgaaggggtgttgcttttgagatgtggggccaagggacaatggtcatcgtctcttccgcttccaccaagggcccatcggtcttccccctggcgccctgctccaggagcacctctgggggcacagcggccctgggctgcctggtcaaggactacttccccgaaccggtgacggtgtcgtggaactcaggcgccctgaccagcggcgtgcacaccttcccggctgtcctacagtcctcaggactctactccctcagcagcgtggtgaccgtgccctccagcagcttgggcacccagacctacacctgcaacgtgaatcacaagcccagcaacaccaaggtggacaagagagttgagctcaaaaccccacttggtgacacaactcacacatgcccacggtgcccagagcccaaatcttgtgacacacctcccccgtgcccacggtgcccagagcccaaatcttgtgacacacctcccccatgcccacggtgcccagagcccaaatcttgtgacacacctcccccgtgcccaaggtgcccagcacctgaactcctgggaggaccgtcagtcttcctcttccccccaaaacccaaggatacccttatgatttcccggacccctgaggtcacgtgcgtggtggtggacgtgagccacgaagaccccgaggtccagttcaagtggtacgtggacggcgtggaggtgcataatgccaagacaaagctgcgggaggagcagtacaacagcacgttccgtgtggtcagcgtcctcaccgtcctgcaccaggactggctgaacggcaaggagtacaagtgcaaggtctccaacaaagccctcccagcccccatcgagaaaaccatctccaaagccaaaggacagccccgagaaccacaggtgtacaccctgcccccatcccgggaggagatgaccaagaaccaggtcagcctgacctgcctggtcaaaggcttctaccccagcgacatcgccgtggagtgggagagcaatgggcagccggagaacaactacaacaccacgcctcccatgctggactccgacggctccttcttcctctacagcaagctcaccgtggacaagagcaggtggcagcaggggaacatcttctcatgctccgtgatgcatgaggctttgcacaaccgctacacgcagaagagcctctccctgtctccgggtaaatgagtgccatggtcggcaagcccccgctccccgggctctcggggtcgcgcgaggatgcttggcacgtaccccgtgtacatacttcccaggcacccagcatggaaataaagcacccagcgctgccctgggcccctgcg

SEQ ID NO: 1818 - DNA, 2307 bp, Homo sapiens
aactaaactataagaggtaagcagttctcagaggagacagaaggcaacagctctaccatcctccaaacatctgaagccccccatagaaactcctcttggaattggtggttccctgtctgacccaaatgctaggccgatttcaacccttctccttggtccggagtttcagactgggatttgaagcctgctgctatccaaaccaaaaatgtgctactcagaccatcagaccccctgactccaggtgcctagtccaagcagtttctcagaactttaattttgcaaaggatgtgttggatcagtggtcccagctggaaaaggacggactcagagggccttaccccgccctctggaaggttagtgccaaaggagaagaggacaaatggagctttgaaaggatgactcaactctccaagaaggccgccagcatcctctcagacacctgtgcccttagccatggagaccggctgatgataatcttgcccccaacacctgaagcctactggatctgcctggcctgtgaatcacctttgtgcctgggagcccccagctgactgccaagaaaattcgctatcaattacgcatgtctaaggcccagtgcattgtggctaatgaagctatggccccagttgtaaactctgccgtgtccgactgccccaccttgaaaaccaagctcctggtgtcagataagagctatgatgggtggttggatttcaagaagttgattcaagttgcccctccaaagcagacctacatgaggaccaaaagccaagatccaatggccatattcttcaccaagggtacaacaggagctcccaaaatggtcgagtattcccagtatggtttgggaatgggattcagccaggcttccagacggtggatggatctccagccaacagatgtcttgtggagtctgggtgatgcctttggtggatctttatccctgagcgctgtcttgggaacttggttccaaggagcctgtgtgtttctgtgtcacatgccaaccttctgccctgagactgttctaaatgtcctgtccagatttcccatcaccactctatctgcaaatccagagatgtaccaggaactgcttcagcacaagtgtttcaccagggtctactccgtgccacttccaaaacaataaaattgaagccaagctctctggggaagccattgccaccttatattgtccagattgtggatgaaaactcaaatctcctgcctccaggggaagaaggaaatattgcaatccgcataaaactaaaccaacctgcttctctgtactgtccacacatggtaagaaaattttcttctttcctaaatactttcattgttgctactaatcgtagtgccattattgttgagtactttatgatttgccaaatacttttgtcccaatttttaattttgcaaatttttgagtctccaaaaatgttaaatagtagcactcacctacattcacttcttattaagattttgccccatttacttcatatttgcacatttttgatgaggcatttgggagtaaatgcagacattatgacactttgtccttaaatatttcagcagcatcctcctaataaggactttcttcttaaacatcagcaccatcacatctatgaaaattaaaaataattatttaatactatctaatatctagccaatacttagactttctcaattgtactcagatgtgttttataccttttgtaaatccagaattcaatcaaagttcatgcatttatttggttctcatatctctttagttgtttttatctataactgttccaccaccatgtttttcgtgacgtggacattttgaagaatagaggacggttgtgttaaaaaatgcctcactttctaggcttacatattgtttctttataatgagatccaggataaacatctttctcaagactattatgtagatgatgtatatttcttatttgcttatggggggaaacattaggttgtctcattttggatgctgatcattttgatcttttgattaaggaggtgagtgccatttccattgtaaaggtacattttcctctttgtaattagtaataatctgccgtgtaacaatttgagactctgtaaatatcctattctccaattaactttcacccaatcattttagcatccatagatgattcttttctttttggaaacaattattaaaataaagagtggctgggcacagtggctcatgcctgtaatctcaacactttgggaagctaagatggacagatcacttgagcccaggggttcaagactagcctgggcaacatggcaaaactccatctctac

SEQ ID NO: 1819 - DNA, 2485 bp, Homo sapiens
agtggcgcaatcttggctcactgcaacctccgcctcccgggctcgggccattctcctgcctcagtctcccgaggagctgggactgcaggtgcacaccaccaggcctggctgatttttgcgtttttagtggggacggtatttcaccgtgttggtcagactggtcttgggctcctggcctcaggcgatctgcccgcctcggcctccctaagttttcggatcacaggcgtgagccaccacgcccggccggattgcaattttaaatagcataatcagagaggcttaatggaagaggtaatatttgaggaaagatctgaagaaggtaagggagtaggcactgaagatattgggggaacagtgctccccgagacatctgggcagccaggcacagggaccacaagcagaaaagggtcctgtgagggtttcgtgttttctttacaatttgtcaatgtgaacaccatgctcacaccaaagaacagcaagtttcctacctggcttctctgccttcctccttccttcccccccttcctccctccttccttcctttcttcctttcttccttccgttctccctttcttcccaatatgccccacttcaatggatgagttttccagctccctcggctgctttctgcattgcacatgacaagtatccactaaatattcattcattagaaacagccagacgatgctgagcctctgtagctctctagcatctaccatagcacagatctcaggaagacccacaagatacatttgtcaacaagtcgatggcctcctatgtggccctgtgctgtgtgctgaggctacaggaaggaacaaagcctcctatctgggggcccacttctgcagttaagttcatctggtgtcctttgtaatactgcaaagagaacttcttacgctgtagctgaatgagagaaatatcccattccaaacctctgatggaaactggccaagtcagcgtgtgagaggaagaaggaaggtaagaggtggaggaggtggaaggagggaacttcaaggtcttttggagcaatggtgtggttggcctgtgggaaactcagcggctgtgaattcagcctcattttgcccagcgtttggggggtgctcagtgccagagaacaacacgcttcctatgaaagattgcagagtaaaaacaaggaggcgtgttagagagccacaattcacacatattaactaaaaaacacagctataaatcatgtttatcaccatatggaagtcattatggaaagtgggagacaaatagacatgaagaaacaaaaattaggatttcatctgccctgattcttagtcatttattaccatccagctgggcacacactttaggaaccacgatgagcaagattacccaaccggaaacaccttgtcgccttaatcagattgaatgttatcttagctgtgatagagcaacagtgattttttttttttaactggaaggaacagatgaaaaacatctttttcttcaggattgacatttcttaacacagattacagcaggcaggcagttgacgtctcttcttaccctgccgatttggttatcttctgcagaacagaatcccttcagtgtcattccagccacaagcacaggaatctagtcactcattcgttcccccatttgatagaggcaggagccagccaaatggccaggccaatagggaagggtccccagagaacccccgacctgcccaggtcattgtgcacagggggcttatctaaacaagcccacagtcaaaaattccatcccttcacacctgcgcagtaagggaaataaaccaatgtggagtggctcagaccaagggcccacctgcccactggaagaatggggtggacccaccaggaattccccttaggcaggggaggagcctggccttttggactcatgggtggcagcctggcattcaatttgtgaggcggaagcctgcaggcaggaccctgcctttaactgagagctttccttttgcttaatcaattcagccctcctcacccttcaatgtgtccacgtgcctattttttcctggctgtgagacaagaacccagattaagctaaactaaggagcaaaaatccttgaatcacattcatggccctttgctgtgtgctgaggctacggggaggaaaaagactgtcaaggaccctgccctcaagaagtttagagtctggaaagagacacaggcattaaaaaagtaatttcaggccgggcacagtagctcatgcctgtgatcccagcacttgggaggctgaggtgggtggatcgcatgaggccaggagttagagaccagcctggctaacacggtgaaaccctgtctctgctggaagtgcaaaaattaaccaggcatggtggcaggtgcctgtggtcctagctacttgggaggctgaggcaggagaatcacttgaacccgggaggcggaggttgcaatgtgccgagataccaccactgcactccagcctgggagacagagcaagactctgcctc

SEQ ID NO: 1820 - DNA, 2840 bp, Homo sapiens
gtttaattttagctccagcaaatgtgtgagaacatgcaacgtttgccttcatgtgcttggcttatttttcttaacataatgacctctagttccatccatgttgttgaagatgatgggatcttgttcttttttatgattgaaaagtactctgttatgtatgtgcaccatatttactttgtccattcatgtaagggacacttaggttgcttctaaattttggctaatgtgaacactgctgcagtgaaaatggagcttcaaatatctctctgatgtcctgatttcctttcttttatgtacatacctagcaatgggattgctggataatattgtagctttatttttcattttttgaggaacctctagactggtctccatggtcattgtagtaatttacattcccaccaagagagtactagagttcaactttcacttttctccacatcctcaccagcatttattaatcacctgacttttggataaaagccattgtaactggggtgagataatatctcattgtcattttgatttgcatttctctgatgataaataatgttgagcaccctgtcatatggctttttgttatttgtaggctctcttttgagaaatttctattcaaattttttgcttatttatcatcagattttatcctatagagctgtttgtgtgccttatgtattcttgttattaattccttataggcagtttccagatattttctcccattttatgtgttgtctcttcactttgttgattgtttcacttcctgtttagaagctcgttaactgatgtgattccatttgttcatttttgcgttggctgcctgtgcttgtggggtattactcaagacatctttgttcagtttaatttcctggagagtttcaccaatgttttttgtagtagtttcatagtttgatgtcttagatttgtctctaatccgttttgatttaattttttttagatggcaagagatagaggtctagttttattcctctgaatatggatattcagtttttgtaacacaatttgttgaagagactcccccattatattgaggcaggaaaatagagtctggaggcagaaaacataagaccacttcacacttcacctttccatagggcatgggccataaataactttgtaactttatttcatcctctccatttacatagggcatactagggggtatttaaactcccaaaaattctgtaatggggcctttgagcccctacgcttgggctttttcccacactgtggagtgtattttcattttcaataaatcacttcatgccttccttgctttgtgcgttttgtccaattctttgttaaagacgtcaaggacctggacacctacaactggtaacgtatattttggccagccaggaggaagaagtaagcccaaagtttgggattcatttttctctctttcctttctgctccatacaagagctttctcttttcatttccaacttggaacacttggtgggcagcacctaaacgtggaggcaactgcaggtttctggctgtggcctgtgaaactaatgggtttccgtgcagagaaggctgactgccacctcctggtttgcttaaggaacctgggtctttttcatttttttttcctttatttctcagtctttaagtcgctgtttataattgccctgcccagaagggggaatgacttttttttttatcttttctgcacgtggtccccgatccctatgtgtggcgcagttcagagcaaactcgcacatgttttaagggacttaaaccttcttatgctaaattcttcccttaccgtactcaactggctacggaacaaaaaggcccacccggcatccagttctcattgcagttcatggctatttttataaagcttatagtgtgctctggaggtgcccacctaaggtcagagacatctgacactgagatcggatccacaggaggatactctgtgggtcctgcggacctcaaccttcccaaaggggacgttcttggcagaggttctgaggtctggtactaaaccctccttggaattttctctcatagttgcaatgctgtttggccccaacattgtttggaatttggagtttactgttgaatggaaaagtggaatggcattgtatctatgcaggcttttgtgctgtggttccaagcaggggacctggttaatgtgtgatgccctcctttggtatggtttggccccagtgctctttggattctggggaggtttggcctttaaaaatcaaactgccatggagactgctttacccaaaattttggttcacagccttcattggattatctactggggcaaagtaaaaccagtaagtttctattgctatctcatggctaaggttccaagctattgagtcttcatttatgtgtgtgtatacatgtctagatgtctttatttgcatgtacacttactgttatatgttatgtctaccaaattggcttataagtaaaagagcactcataagtaagtctaagcaattttcaagttcatgtgacttaaagtataactttactaaacaagctagctttaaaattattggtggaataaaaatataaatgccttcataattatcagcatacattttgtctgaattttatgtttgtctttgctaaatatttttaaatgtcagtgttaattcaagctgggagctacttagggtgagcctgccttcttccattctatccgaagtctcttctaaagttgcggaattgtccatatccattagttcaggattttttgttttttagggtttcactaaagtttcaggtttctatttaacatgtaattctgtataccaaatgtaccagaaagggttatgttattcatg

SEQ ID NO: 1821 - DNA, 1994 bp, Homo sapiens
aattggcctttgcccgcccctcctgccgggcctaggatacccccatggccttgggcttccctgggcttggtggaggaggcagctgcgggcggcaggagggaggcaggtactctttccccagggcccacgcagggctggcacaggctggctgggcctcgccctccctctctgcaggctccaggcactgcccccaccccgtcactcctttacaactgttctttctgttccccacagcgtccctggtggacgcaccctcggaacaaccttgcacagagcccagggccgggccgggccgttgcacactcgccctgggagacagcagcttcactgagaccacaattattctctggttccaaggaggaaactgaggctccaagagacaaagccacttgctcaaggtgacatccagcaaaaggctgagcctggtctggagccagggccacagggccaccctccactctggccacgaggcccccagaaggccgcagacactccttgtgtacaggaccacgctccaccctggccgtgatgccctcttgggccgtggacactccttctatacttcggggtcttgtatggccctggagggtggcaagggcttgggaattctttagctctgttgctggggaatgttcagattccaggcaagaagatgacacgactgcctctgtgagccgcccaccctgacccaccaggcctgtgctggccccacctgctccttctcgaatctgctgagggcttgctgctgcttctcaaccagcgcggccagcacagctctgtccctcttgctgtccaggcacctggggggaggtggcaacatcactgccaatgttgacagcccgtgcaagtggatatagaaagtcacagacacagccagccctggtcggccacatcaacctggaatgccctcccaaggtgcaggcaccagggaggacgcagccatgcgtggacaggcttggaagccttggggtggccagatggcccaacccgggctgtcactcttccacccctcacagccacttttggacttttgggtctaaagagacaaaggctagccgagagccgcccctgccaccctgaaggcccagcccaggccagtgggtcctctggggagggaggtgggggtcacccacatccaccccccacccatcatggaataaacaccctcagtctggcccgctcagacaccgggtgaggatgttaactggaatcacctttctggagaccaatgtggcagtatcaagcggcttccagatgcattctcactgacccggtcattccatttctaaggttttaccttaaggaaatgatctctctatcttcattaataatggcaaaacgttggagacaacctagaggcccggagatccgggacaagcgaagggagttacagccctgtctctacgccggtgcgccctgtgtgttatagcggttatgtagctacacagaaaggttttcctgacatataaattgaaaacgcaagttacaaaacagcacgtactgcccatttgcaagttgaaatagccatgtgtgtttctccccaaaacagagtatccgcactgggcgtggtggctctcgcctgtaatcccagcactttgagaggccgtggctggcggatcaactgaggtagggagttcgagaccagcctgaccaacatggagaaaccccatctctactaaaaatacaaaattagctgggcgtggtggcgcacacctgtagtcccagctactcgggagactgaggcaggagaatcccttgaacctgggaggcggaggttgcagtgagcctagatcgcgccacgcgcctctacactccagcctgagcaacaagagcgaaactctgtctcaaaacaaaacaaaacaaaacaaaaaaacaaagtatgcacaaagatgatctcagaggtcacctttggaacgatgggggtatttttttatttgtgtattgagtactttactgccttatgtaagtttcagcaaacacctattactgtttgg

SEQ ID NO: 1822 - DNA, 1730 bp, Homo sapiens
tttcaataaccagaacagtgcctggcacataatatatgttcagtgttgaataaatgagtgaatccacatacatttttactatatgttgtaatgtatatacaattttgcattacacttttttctttttctttttttttttttttttttttttgttttttgagacaaggtctccctctatcgcttaggctgcagtgcagtggcactatcttggctcattgcaaccttcgcttcctgggctcaaatgatcctcccacctcagcctcccaagtagcttggactacaggcgtgcaccatcacatctcactaatttttgtatttgtagagatgagattttgctgtgttgcccaggttggtcttgaatacctgggctcaagtgagctgtctgccttggactcccaaagtgctgggattacaggtgtgagccagtgtgcctggcctgcgttatgttttttttcatttgcggttgcatgttactagagtctttaaaattattgaataattataaaatattccattgagtagaaggagttcacttctcctcctacctgcttggtatttgcggttgttttccatttagctttgtgtgtttgtgtatgtgtttgttgaagtatatggatatgatagtggattatttctttaggttagatttccagaagtgagattaatgcatcaaatattgtgaacatttttatggcttttagtacacattgccgaattgttgctcaaaggtctttttttttcttctgaacattttatatgaacttactcttccactagcaatatgtgtgagtatgtgtatttaactgcagcctaccagcttttggtgttattaaaattatcaagggtaatttaaaaagtgaaagaatattgcttaatttgatttccttggttaccaggagattgaatagttcccatatttatttgctaattgtgatttttctttttgaataatcttttacttattttgactattgagattggttttacttacaaaatttaactttgtaattttcttagctacaaagccaatttaaatggcatggtcattagtgaagataccgtttacaaagttaccacaggcccaatattctctatggctctccatccatcagaaactagaactttggtagcagttggggccaaatttgggcaagttggactttgtgatttggtaagttattaaatttcttgaatatattatagtttgactaaagcaaataggctggaagagaataggctagagccatgtgtttataaatgttgcgtgagacttacaattttgggctttatgatgctttatgattccaaattttagaaatctggaagaatttaaatttgctttatagaactttaatatttttagcttgaatatcattaaccatctggtcataaattaactgccagaaaactttgttacactttgtgtgatcttttcacatatacatttaaagtggccgggcgcggtgggtcacgcctgtaatgccagcactttgagaggctgaggcggtcggatcacctgaggtcaggagttcgagaccagcctggccaacatggtgaaaccccgtctgtagtaaaaaaatacaaaaattagctgggcgtggtggtaggtgcctgtaatcccagctactcaggaggctgaggcaggagaattgcttgaacccaggagacggaggttggagtgagtcgacactgtgccatccagcctgggtgatagagtaagactccgtctc

SEQ ID NO: 1823 - DNA, 2214 bp, Homo sapiens
ctcctgtgtttgctgcacagcacttagcacaatgcaacgtgtgaccacctttgtgtgtttgcttgtttgttgcctgcctcctgcagtggactctgaggcctgcaggggctgggactgtgtctaccttgcttctcgttgtgtcccagcccccaggagctggtatgaagggggcactcagcgaacaaacctctgcggaaagatgaaggatgggtcctgtgtgcagagggagctctggacctttgagggtggctggaggctcctggacctgccttggaggacagacaccaggcaggggccagctgaggaggagtgccagtgatttctctgggcacctgggcagccccattcctattgcacctggccttgacccactccctgtgctgtctacattctctgtcacattaaatgctctgcctgccatttcagcctctgggaggatccacgagggtgtggggagagacgtcagacctgggtttggatcccagctcagccacttaatagctatgagaccttgcacaattccctttaactttccaagcctcagtttcttcctatgtaaaatgggcatacagagggacagccttctagcacgtgactcctggtgcttgattcgcttgaaactgccttatctacaatccaaaaagccctgcgacgagaagttgttttgtcaatatgctgcaaactcatttggcccccaaaatctgacctgagctgacgcgaggctctttgtaatctttactcaccccacttgtgtgaatattcatatgttccactgcagaaatatgaatgtgttccattgcaggtgttgcctgaggctccactgaagctatggcataatttgcagaatttgcacttcattacttttctgaaattcaaacagattctgaaactgcacgagttctggctgagagctgtggatctgtgcatgtgagtagctgctgaaaaccctcctgggtcacaggagggcccatgggggcctctggcagccatcgcagagcctgaaacccgttgtttccccttggctggcttctggtttcttggcagccagtgtcttcttagccacctggggttatgttgggttttgctggttcaggggcaggggttaaagcttagggcagggtgagccgaggtactcagacatttctgatgtgaatttaaaaggagaatttttttctaatgaatcatcagaagaaagaaatcagaaggaagtgtgtgaccaaggagaggaaattagggtttgcaaattgcatgagtcaccccctttctgactcctgggtgatcccttgcccttggcacttttcactcatctctgagactctcaaggccgtattctgcataacatgctggggctgtcatggttttattctggctccaaacctgcttctcattctagccatcagtataaatttctagttttgaatcactgccacgctgttttacttattattgtgttagccagtgtttcttccctgcccaagccctgctcagactcccgtttccccatcttagttagcatctacaacccattctccacccagaagccagaggccagtttctgaagtgcagcccacattccgggtttcagtctcatctccccagtgtggcccttgaagctcccttgtgataaggccctgcttgcctttctgtcttatcttgcaccgccttactattccatgaatgggcccttccctccagctcccaggctttggcaaatgctgttcccactggcctctgccctcgcctggctagtagtgtgcatgctgcgggtagatctgcttagaagccacctcttccgtgaagtctttttacaaggcccttgtctaggccccacgaacctggcttcccatctacttatcacccacccatattctgattcctggtcctgtccccttccctagaccatgagctccgggacaaagactgtgtgtccaccaggtgcagtggctcaggcctgtaatcagtcctagcactttgggaggctgaggtgggtggatcacctgaggtcaggagttcgagaccagcctggccaacatgatgaaaccccatctctactaaagatacaaaaattagttgggcatggtggcgcatgcctgtaattccagctactcaggaggctgaggcaggagaatcgcttgaacccaggaggccgaggttgcagtgagctgagatcatgccactgcactccagcctgggtgagagtaaggttctatcttt

SEQ ID NO: 1824 - DNA, 2081 bp, Homo sapiens
tgataaagcccgtgaaacattagtagaaaataccatagctgaggccactgcagcagcaattaaagttgtgaaagaaaagcttctcagggaactgcaagctagaaaacaagctgaaacagctttaagagaatttcaaaggcaatatgaaaaaatggagtttggagtattcccaatggaggcaacacactcatcaattgatgaagaagggtacattcaaggctcccaaagggacagaggcagctctttagtggacaccgaagaagccaaaacaaagtcagaaaatgtcctccatgatcaagctgctaaagttgataaagatgatggaaaagaaactggtgaaacattcacatttaaaaggcattctcaagatgctagtcaagatgtaaagttgtattcagatacagccccaacagaagacttgatagaagaggtaactgcagatcatccagaggttgtgaccatgattgaagagactataaaaatgtcacaggatataaactttgaacagccatatgaaaaacatgctgaaatcttacaggaagtccttggagaggtaatggaagaaaacaaggataggtttcctggtgccccaaaatatggaggctggattgtggacaactgccctattgtaaaagaattgtggatggccttaatcaagaaaggaattatacctgatttggtcatctatttatcagatacagaaaacaatggaaaatgtttatttaatagaatatatttacagaagaaatctgaaattgactctaagattttagaaagattattagaagaactacaaaagaaaaaaaaagaagaagaagaagcaagaaaagccacagaagaggaattgagactcgaagaagaaaatcgaaggctactggaacttatgaaagtgaaggcaaaagaagctgaagagactgataatgaggttgaagaggagattgaaggtgatgagttggaagttcacgaagagcctgaggcatctcacgatacccgagggtcatggttacctgaggagtttgaagcatctgaggtccctgaaactgagcctgaagcagtatctgagcctatcgaggaaactacagtggaaacagaaatcccgaaaggatccaaagagggcctggaaattgaaaaattatctgaaacagttgtactacctgagtttccagaagactcttatcctgatgttcccgaaatggagccatttaaagagaagattggttctttcatcatcctctggaaacagctagaagcaacaattagtgaggcttacattaaaattttaaacttggagattgctgacagaactccacaggaattacttcaaaaagtagttgagactatggaaaaaccatttcaatatactgcatgggagttaactggggaagattatgaggaagaaacagaagactaccagactgaagcagaggttgatgaggagctagaggaagaggaagaggaagagggtgaagataaaatgaaggagagaaagaggcatttgggagacacaaaacacttttgtccggtggtcctcaaagaaaacttcatcctgcaaccaggaaacacagaagaagcagccaagtatcgagaaaagatctactacttttcaagtgctgaggctaaagaaaagtttttggagcatcctgaggattatgtggctcatgaagaaccattgaaggtgagacagtattcctatcttaatgattgctcccacaggatttttttgggactgattaccaatcaccatcaatttacttaagggtgaaatccccaatctgatattacaatataaagaaaatatctaggctgggcgcggtggctcacgcctgtaatcccagcactttgggaggccgagacgggcggatcacgaggtcaggagatcgagaccatcctggctgacacggtgaaaccccgtctctactaaaaatacaaaaattagccgggcatggtggcacgtgcctgtagtcccagctacttgggaggctgaggcaggagaatggcgtgaacctgggaggcggagcttgcagtgagtcgagatcgcgccactgcgctccagcctgggcgacagagcgaaactccgtctc

SEQ ID NO: 1825 - DNA, 2033 bp, Homo sapiens
aggaaaccacccgcgctcggcggccgccagcagggcacaggcaggatggccgatgctgacaggaaccagcggtgactctggggcccctggcagcagctctgtctcctgaagatgaagtggcccaggtgaagcccaggccagccccaatggccagctcggagactgagatccgctgggctgagcctggcctggggaagggcccccagcggcggcgctgggcctgggccgaggacaagagggatgtggatagaagtagttcacaaagctgggaagaagagagactctttcccaatgccaccagccccgagctcctagaggacttccgcctggcccagcagcacctgccgcccctggagtgggacccacacccgcagcccgatgggcatcaggattccgagtcaggagagacttcgggagaagaggctgaagcagaggatgtggacagcccagcaagttcccatgagcctcttgcctggctcccccagcagggccgtcagctggacatgactgaagaggagccagatgggaccctcggaagtctggaggttgaggaggctggagagagctcctcaaggttggggtatgaggctggtctcagcttggaaggccatggaaacaccagccccatggctcttgggcatggtcaggccaggggctgggtggcttctggcgaacaagccagtggggacaaactttctgaacattccgaggtcaacccatccgttgaactcagcccggcaaggtcctggagcagtgggacagtgagcctcgaccaccctagtgacagccttgattctacctgggaaggagagaccgatggcccccagcccactgccctggcagaaaccttgccagagggccccagccaccacctcctaagcccagatggcagaactggaggcagtgttgctcgggcaacccccatggaattccaggactcctcagctcccccagcccagagtccgcagcatgccacagatagatggaggagagaaacgaccagattcttctgccctcagcccaaggaacacatctggaagcagacaaagacgtcacctaagccactcccttcccgattcattggctccatcagccccctgaatccccagcccaggccaacgcggcagggcaggccgctgcccagacagggagccactctggctggccgctcctcttctaatgcccccaagtatggccgggggcagttgaactacccactccctgatttctccaaggtagggccccgggtgagattccccaaagatgagagctaccgtccccccaagtccagaagccacaacaggaagcctcaggcccctgccaggcccctcatcttcaagtctccagctgagattgtgcaggaggtgctgttgagcagtggagaagcagccctggcaaaggacacgcctcctgcccaccctatcaccagggtaccccaagaatttcagacgcctgagcaagccactgagctggtccatcagctccaggttagtgggactcatggctgtggatgtgtcaccaaggcccctgttggcttggggtggaggctaattggggtggggaggcctggagtagaggctggctggggtggagaggcctgggatagagcctggctggggtgggaagccctaggacggaggctggtggggtggggaggcctggggtggaggctggctagggtgggaagccctgggatggaggccagtggggtggggaggcctggggtggggagccctggggtagagcctggtggggtggggaggcctggggtggaggctggctggggtaggaagccctgggatagaggctggtggggtggggaggcctggggtggaggctggcttgggcaggaagccctggggtagaggctggctgcggtagggaggcctggggtttgggccaggaactccctgctggtggagggagggtgtacctggagccctgagatacacccaagccctttgctcaaaaagaccagtgattgtactcgtgtttcaaggatgatctgtttgcttcttttcaacttctgctat

SEQ ID NO: 1826 - DNA, 1959 bp, Homo sapiens
actgcttttctgagaggccaggtggcaggatgtgggacgactccagctgacaaagacagtctaaccgtggggtaggggctggagcaggggccagcgacccacgtctacatgcatacttctcttacactgctgctactggaaaagctgaaccccgcgccaggaccccagccccctgcaaggacccgtgagcgtctgggaagctgtctctgggactgaagccccccacctccgccgggctggcggccactgcggtaccctacgccccgtcgggctggtcctgcacaatttgggaaaaagccgcagcgcttctgcaaggtctacgtggccatgagcatgcaacgcttggctccaaaaaagacacgaaaggagcaaagcgccaacgaccacccgatcggagggcccgaggggcgcctcttcaccagtcagctgcagcttaagttccgtgcattatctgaaaggaacagctggctggaggtatccagggctgtcactccaacctctgcagcagtgacctcaactcccagcacttcaaaacccagacagaaacgtccaacaaactcccagtccaggagcgctgcaaaaccaacgccagttgtttttctgcagaaaatcatcaactgtggagaagaagaagggaaataagaaagaaagaaaaccctaaaaaccaccctggcgcccgggcccgcaggcctcgggccggctctgaaaagtttgggctgtgcacgtgatgagcgcgtaggcgggagccccagacaggacccgggcgggcatttcgagaaaaagcagcggtgacagcctttggtccccatctccattgttcctgccagctctggaccccaggctgcatgagacgtaggtcccaggggacacccgaccccgtggccccagtcttagcttccactgcccctatctggctcatgtcttgctgtctggtgtcatgaactgggagtgcagtaaagaggagtgacaagcctgaggggccacgttcatacctgccactgccaactgtcctgatgtaactgctttgtcatcttgcctgccaggatttgtgacaagggcaagaatcttctgttccatatgcaacatcttctggcagccttgtcctttttctgtccttgacgactacaataacaaacagctgttgccgaggcattgctgttgacgtgttacctttgaaacctccctcctgttatggaataagcctcttccagatcatggatcattatcatctagtctgacaagcagccttgttgccacggagacccaaagggatcaggcgtggcatttgcctgcatcatcaccccctccaggggaactataaggactcttctgtgcgtcatgcgtggctgtcctgggactggctgccaccagacttttcctgcgggtaaaacctaaacaaatgatcagctgcagataatatcaagacctctgtttgatatgttaatagtgacagccagatttccacaattaacaatgaggtgggaagaaaacactgtagtcaccagacttgggaggagagggtttgtattcacataaacacaacctcacgtcactgcttgccaccacaaagggctctgttcactgttttgttctcaaagatcatccttgcgctcatcctctgatcttgaatttctacataactttctcagtttatatgccctgtggcaagtgcagcaagcactgtttcctgtttctaaacttgtagaaaatcatccatacatcttacagttgtcagttttaaccagataacagtggcactttgttgctgcttttttatctttagcttaggttaacaggaccctggaagtaaagttgttgatttattcaatagagtattctcaattaatttggctagatttctacatgattcaaaatctaaaaaagtagaaatgcatgcttacatgtctaaggcctgaaaaattggtagtgacatcccaaaataaatgaaggttttaaaac

SEQ ID NO: 1827 - DNA, 2292 bp, Homo sapiens
tatttttgcattttctgtagagatggggttttgctatgttgcccaggctggtctcaaactcctgggctcaagcgatctgcccaccttggcctctcaaagtgctaggattacaggcatgagtcactgggcctggccctcactattttcctattttctgggcacttgccgccccgagattcatatgcatttgtcgcttctccctgatcgtcgcacccactggaatgttggaatagactttacagcctccaacgggaatcccctcgacccttcctctttgcactatatcaaccctatgggcaccaacgaatatctgtcggccatctgggctgttgggcagatcattcaggactacgacagtgataagatgtttccagctctgggattcggggcccagttacccccagactggaagcagtacttcatcctcctcatcatcacggacggggtcatcagtgacatggaggagacacggcatgccgtggtgcaggcttccaagctgcccatgtccatcatcatcgtgggcgtgggcaatgcggacttcgctgccatggagttcctggatggggacagccgcatgctgcgctcccacacgggggaggaggcagcccgcgatattgtgcagttcgttccctttcgagagttccgcaacgtgagtgtgggcctgggctgggagggggcggttacaggatcccagccaccatagctcataatcaagcttgagagtcttggggttgtctggcccaatcctagacttctccactccattgactatgctcttctgagggcctgccatgtgccaggcgccgtgccaggccttgccccggtggtggccattgtgatagtgtgagcacttgcttccacaaactgatggaacatggagccgtgggcatctagcctgaggctctggggcagggcttcctggaggacctgccctctagtggggtctgatgagaggctggggctatccatgtggtgtaaagtgcaggaggagagaggggttttcctgatcatcacgccccagcaagccccctcattttgtagacggaaaacaaggcctcccagtcatcttaggttgacctcctctccctaaagccctctgcctgggagaatggtgtccccagccttgttcctgtaagtggctctggctttatttgcaggtgatcccagatctgcccacaaggaggccggggttggcctcctgatcactgccctagcagcagggtccatgaggagtcccataggggagcagtctctccactgtaccgctgtactgtaatgccacccccatactgctggctgggggcttaacccagcctcagcaagaactgcccatgctggtttgcacccagtggccctcacctctcttcccagcatcctctggggttgcctgcgatggttctactccttcctctggagcattcgcttcctaaggacaaaccctgggcatcggtcaccccttcatgcacaggtcggtgaccgagtacctccatgtgcctggcctgtggctggctgttcactagtgaaccatactgtcaggcccatttattcccgccaagaaggtgctcaggagatgtttgccggacacataggtgcttcccgcagacggagtcatcctaacccgttactcccaagcatctcaagtgctccaggtaacacttacacctaacctaaaggaaggcactgcgatcagggggaatttcaggcctggcctgggctgagatgagggatgccacttgcagacagccctggcccgcagccctaattttgtcctcaatggacacctgctgtagcagccctctgggcatagtaccgctcacaacttccggtcattaatccttattctctctcttccccaccccaccctcctccaccctgcaggcagcaaaagagaccttggccaaagctgtgctggcggagctgccccaacaagttgtgcagtatttcaagcataaaaacctgccccccaccaactcggagcccgcctgagctctagtgcccagcagcagcatgtcagctgagcctcctgccctcccccaggaacatgcacgctcactctgcttccttgtgggtggcctttttttaccgatccccttttttattttttacaaccggacctccacccccaacttcctccagcccagctgggcttcctttgttggagtcaactgttgatgcttccaggccaaactggcttcctctcctcctctccccacctttgccattcttaagtattgaatgtactttgtataattttagtggaattgttattgagaataaaatttttacaatcat

SEQ ID NO: 1828 - DNA, 3302 bp, Homo sapiens
agagcagatcagaggcaggggaaaaccacgcagaagcaggagctgaagacctcagaccggcaccagggacagcttaatgaagacaaactgaaggggaaactgagatccttagaaaaccagctatacacctgtacccagaaatactccccttggggcatgaaaaaagtactactggagatggaagaccagaaaaacagctatgagcagaaggccaaggagtcactgcagaaagtgctggaggagaaaatgaatgcagagcagcaactacagagcacacaggtatggggatgccacatagacatggggctggggacttcaggcagcttggggaacaaggggagccagctgcacaactccctggagccctctcctctctgatctccctcagcgatccctggccctggcagagcagaagtgtgaagagtggaggagccagtatgaggctctgaaggaggactggaggacccttgggacccagcacagggagctggagagccaactccacgtgcttcagtccaaactgcaggtaccaggcactgggggtggggagggaagacagggtatggggaggagggatggtgatgaaagaagctgttctggattagggactccaaaggcagctgacagcatctggctttcagttcctcagtcaccactactttgtaccaaattcactgttttggctctgaaatctaattttgagtttagcaaggatgtctgcattgctcatgcaaatgaactaagcgttcattggaatgacaccatcaccacccaaatgaaaagaactggctggaatattcatcagcctactaatgtcatctcccaacccactctccaaactccatcccaaaaaagcatccagttcagaattgcccactgttggcaaagaaagaatgtcactaatttatttacaggtgagtattaacactttctgccaatgtgtattttaagcaattacatttagcaattacaattagattcttggcatcctcaagggttccatcatcttcaatctgtcctaagcctcagtttccccatctctaaaatgaggataatagtacctacatcataaggtggttctgagtattaagtaagatgatccatgtaaagcacttagcacaatgcctggcacacaaaaacactcagtaaatattagctattattttgcatagatttatttacctggtttggaattttgaggatccacctcaaaagctgatctttgtaattttcctgaagcagggctcagaacagcccacttgataagagacagagtatgtgagtcttatcaaaggagtgaacccagctggtcactctgcgtggtatccacagctcaacctttgttgttttcttcttcccatcacctataaggcaactcctatgaagatttttgtgaggggttttttaactttaaatctttgtggaaaaaaaaagaccctaaccaaaaaaaaaactgatactgccagaagtagaaaaaagagaaaatgaaaacatccagaaaactaatgactttgtattccttaatttggtgatttaccaaagtgtcaagacatgactcccacaccaatgacaaccacttacatttcccctagaatggcagattttttaacgtactgggtttcctaaagcaattcttattttatatattctaatttatgtacatgaatgtgtcacttagacctgtcactagggatggtttagaaaataaacttacactgcacatgcctcagtccacttcaaaactactggcaaatgcctgtagtcccagctactcagaaggctaagatgggaggattgcttgagcccaagaggtcgaggctgcaatgtgctatgatggcaccactgcactccagtctgggtgacaaagtgagaccccatctctaaaaataaaaataaataaataaaagacgcgagttccttgtgaatatcaaaagtctaatctgctgttataaatatgaggaacaaagcaaagggaagaaataggaaaaaagaaagacttctctattttctcatctccctaacattccttctatctctaaaattccagacttttctacattttcctcttccatggtacccgccccccaacctccaccccaacactgacctccttctatattggcccttcctcctccttacagggagcagatagcagggacttacagatgaaccaggccctgcgatttttggaaaatgagcaccaggaactgcaggccaagattgaatgcctgcaaggggacagagacctgtgcagcttggatacccaggacctacaaggtactcttctccttgaaggccttgagtgcatggcagccatggccaagtgagctaagaaaaaagaaactgaattaagagaaaggcttcagccttttatttgtttgcttgattggttgattggctttataatctcattttaccttgagggagaggcaggactgttttaatcatccaaaattgaaaattaatttcactgtagtagatagagtatcttgttgtctgagctctcttttttagcccatccctctgggccagatcacagctgctcccacatcagtcacatatgtcaaggccacagtcctaatttgaaagggaaaggtcagttgaaacacaaggcatagagaaagtctctcagtcacatcctctgtgtccgctgatagagaggactagatagtgtgtaaacacaagcctcaatgcaacccaacattgttgatgcacaaaaacctgaggtacttggcttctggtttacctcttcagaactgggacacgaagatagagcaacttccaatagacacacgttaaagaccatgacaagacagcatctattactaatttccatcctaagtactgagttcattaagtcttgggttcctttattttggcttgcattattgcattttcagatcaactaaaaaggtcagaggcagagaaactcaccctggtgaccagagtacagcagttgcagggtttgcttcaaaatcaatccttacagcttcaagaacaggagaaactcttaacaaagaaaggtcagcaaatttattaccacaaattctaagatattgctcttctcttacctgcctagaggcagcgggatggactacatgacctcctggagtcccagccagttctgggagtctgttaagtccgggatgtgtgggagctttttaaggactgatcattggctctgaggacacttcaactagttagccttctatcttgaggtatataaactgtgaaaaagggtttctattctctctgaaagcacatgtctgtgttgaacatttcaataaatttattttgaactc

SEQ ID NO: 1829 - DNA, 2839 bp, Homo sapiens
ttgctgccattaatgtgtctctcttttttattctttgacctagggaagatttaggattcagatttatatcggaacaggtcagtcaccacccccccatcagtgcgttccactcggaaggtctcaaccatgacttcctgttccatggctccatctaccccaagctcaagttctggggcaaaagcgtggaggcggagccccgaggcaccatcaccctggagctgctcaagtgagtgtcgacataatgaagcctacacctggaccaaccccacctgctgcgtccacaacgtcatcatcgggaagctgtggatagagcagtatgggacagtggagattttaaaccacagaactggacataagtgtgtgcttcactttaaaccgtgtggattatttggaaaagaacttcacaaggtggaaggacacattcaagacaaaaacaaaaagaagctctttatgatctatggcaaatggacggaatgtttgtggggcatagatcctgtttcgtatgaatccttcaagaagcaggagaggagaggtgaccacctgagaaaggccaagctggtaagggctggggcgtccccgggcagagctgagccctgggtgctgagggctgccaggccgctgctgcctttagctcacctgttggggtcccagggaacctttgggccccaccaggagagatgaatgtgcagaatttgtctgtccagatgaaccatgtattgtgggttccagtatcagtgagggggtttatctgtatttctttccatttttttttttttttcccctccaggcagggtctccctctgttgcccaggctggagtgcagtggtgcagtcataactcactgcaacctccagctaccaggctcaagcagtcctccctccttagcctcccaagtggctaggactataggcatgtaccaccatgcctgactaatttttattttttttagagatggggtcttgctatgttgcccaggctggtcttgaactcctgggcttaagcagtcctcccacctcggcctcccaaagtgctgggattactaataggcatgaaccacaacacccagccggcatatctgtattttggttgcacggaggctgctgctataaaccgtgggcaccagtgcccacgagtcatacataattgctggcccccatggctggaagtatctgagggaacctcaggcaaggccgtttcttttctggaagctccaagttctgggtccttcttaataaatcttctcgctttctttgagttagcctagacatattgttaaaaatcaagtgaatttcaattttttgtttttagttgtgagtaccagataatatattcaacagccagaaagtactggcaaggcttttccccttagagctttggaatactcattatcttaagactagttgttcttgaacttaaaaataaaagggatagttcaaaagaggtgtcctattttctacataatgaattggaatgtaccaaacctgaaatgttcaatatttatttaacggaaacattcagcctcctccggatcccaagtgttttttatgttgttgtattcatttgtgctgttagacaccttttctaatcaccctcttttatttaaaaaggaaaattctgcttacacactagacagacctagaagggtaaatccatttagcgatgtcttttgatgctttcctgctccttgaggtgacctagaaacgggagttttctgtgaatccttgtccttgagctgcggctctccctcgccccagcctcgggccatggtgcctacagccagtgtgaatacagctagtgcaggaagccctgggctttgactcgcttgttttcagtggtctccctgaagagctgcttctggaatcattcccttttctaggacccatttattttgagaagcaatgtggcaggttttgtcttttcatcagggtgtagagagcctgaaacccccacacaggagccacttcttgatgggggcaaagctgcgctatctagaaagctctcagtcccagaacctgccttctggagaggcgccatgtgtgtgaatgaacctgctgtttggaaggcaccgctgtgtcgtcgcactcagactccatgaagccaccgctgtgtcgtcgcactcagactccatgaagcgctgtttcgcgtgcaccgcttctcccgaagggaaacacgcctggccactgacttccttcatctccacgaagggaaacgcctggccactgacttccttcgtctctgcgaagggaaacacctggccactgacctcctgtcgtcacctgaagggaaacacgcctggccgctgaccttctgtcatctccgtgaagggaaacacgcctggccactgacctctgtcgtctctgtgaagggaaacacgcctggccactgacctctgtcgtctccactctgggtgtccgttagaacagacagcacagccctacgaagggagtgtgagctgctttagggactggggcccagctcctctccgtacagtgatggacagacagtgtcatagactggagaggaaattcgattttctccttagtttaagaaaaaaaaggccgggtgtggtggcttacgcctgtaatctcagcacttttggaggccgaggtgggtggattgcctgaggtcaggatttcaagaccagcctggctaacatagtgaaaccccgtctctactaaaagtacaaacaattagccgggcatggttttgggcacctgtatttccagctactcgggaggctgaggcaggagaatctcttgaactcaggaggcagaggttgcagtgacccgagatcgcaccattgcactccagcctgggcaacagagcgagactccgtctg

SEQ ID NO: 1830 - DNA, 2430 bp, Homo sapiens
gtggctgttcattaccagcacggaaggtgcccactggcctggatacagcccagcactatgtggtgttgctttttaggatttccacgaaggccaggcacagtgcctcatgcctgtaatcgcagcactttgggaagccaaggcgggcagatcacttgagcccgggcattcgagaccagcctgggcaacatagggagaccccatctctacaaaaaatacaaaaattagccgggtccgcacttttagtcccagctacttgggaggctgaggtgggaggattgcttgagtccaggaggtggaggttgcagtgagccaagatcatgccactgcactccagcctaggtgacagagcaagaccctgtctttaaaaaacaaacaaaccaaaaaaaaaaaaagatttccatgaatccagtggacttgaatgggcatctctggggccacccaagccctgtggccaccgcgctgctttgtaaatcagggaaaggtgtagtgtccgttgagccttgggtgctgctgtcacagaagcacactggggcctgtgtgggaggcagcgggggctccttgacccttgagggcacctggccacagggagctcattgcctcagctctgcctccccttctccccagcctggctttctccggaccccctgtttctggaacagaggagggtcagagaagcaaagaccgaagaggacggccctgccaacaccgagcagaagctgaagtcctttccagaggaccctcagcacctgggggagtggggccacctggaccctgccgaggagaacctgaagagctaccggaagctgctcctgtgggggtatcagctttcccagcctgacgctgcctccaggctggacactgaggaactccggttggtggaaagagatccacaaggaagcagcctcccagaaggcgggaggcggcaggagagcgctgggtgcgcctgcgaggaggccgcccccgcgggggtgctgcctgagctgcctacggaggcgccccctggggacgcccttgccgatcccccgtcgggcaccactgaggaggaggaagagcagcctgggaaggccccggacccgcaggacccccaggacgcggagtccgactctgccaccggatcgcagaggcagtccgtcatccagcagcctgccccggacaggggcacggcgaaactgggaaccaagaggccgcaccccgaggatggggacgggcagagcctcgagggcgtctctagctccggcgacagcgcagggctggaggccgggcagggccctggggctgacgagccgggcttgtcccgcgggaagccctatgcctgcggcgagtgcggggaggccttcgcgtggctctcgcacctgatggagcaccacagcagccatggcggccggaagcgctacgcctgtcagggctgctggaagaccttccacttcagcctggccctagccgagcaccagaagacccacgagaaggagaaaagctacgcgctggggggcgcccggggcccccaaccgtccacccgcgaagcccaggcgggggctagggcgggcggtcccccagagagcgtggagggcgaggctccccccgcacccccagaggcgcagaggtgagccgctgtgctgtcccgttccggaggggccgctttgccggccgtgaatcccagacgaggcattgggcctttccacgcccctgggtggcggcttcctgtggtgtttgtggacgtcctctgcctgtgccctgaatccgctcctgaggctaagcgctcccaacgagaagggtccacgggaagccctcacctctgtaaacacaccctgggccagcgctcgcatccgaggggagccgccggatgtggaagaagactcggctttcctgcagccatttagtgccgccccatgctaggttatttgacattgtgcagtgtagagttgccttaaagtgcgtgatctgccagtgctttcttcaagtcacccttgccccgattcctcctgtttgcgctccccagggttgctcaagtggaaattttgtcagctgtttagccttttcgtacttggcgtgatgtcaacttcacttctaatctgcaaaagcagaagctgtttcctagtttacctcgcgtgtgtttacctatatggagtagctcgcagagatcacagaaatgcttgcagcctaaggcagggttttcagaccgtgggtcccagcccatttagtaaaatgggaaatcaattagcaagtggtcaccagcattacacagcaatgaagcagaataaagtaggccagaatgcatcatgtagtaaaggcaaatactgttttgtgaaacttttcacccatacatctaaatgtgagaactggttgcaatgtaagacatttcttgctgggaagttgtgagcaaaataagttgaaaacactaataaagatctgtctgtctgagcaaaggagact

SEQ ID NO: 1831 - DNA, 2650 bp, Homo sapiens
ctcttctccttttgcttcatccttctctggctgcttcccaggagggaatatttcaggtcctccttagcattggtgtgtcagtataagccccatgacaggaatccaccataagctatacgaggtgaccatggaatcacagatccggaatcatcgctcgcttcgcactcagttgtgcgtctcattgacacactttcaacctctaaaatgccctgaccacctaggaaatactttgtcgcccctgtgacttttcttaacttggtctgtgcagttacctggtcaccgcagtatgtgaggatcctttccgcctgtgttgctgagagtctgggtttatgtgtcaccttgggtgggacccaatctcctgtttgtgaggccaccgcaaagaggtggtgggatgcctctcctcaagagaggtgatcgtgggcttctcctgaaggagaacggtaatcccagatgagctcccaaattgttggcaataagagctcagagttgcaaagaaaatgatctccaaaagatttctcagcaaggcagatttacttctgcagaatggtgctgcttgcactcctggtcacagtgagagcaccccgaacaaaggaggtgaagtggtttttatccctaacacagctagttcctgcttctgtgttctatccccattggctagagtccaatctaaactagtcctgattggctattttaaacaggaggggtgtgggttacagcagtgggaagagcagttgccacgagcgagggagacttttccagataaggaacaaatgcgggttacaggttgggattggtgggagaaatgtttacagaatgggtaattaggagtgggaaggtatgaggaagttgaccttaagaacaaagaacaaggaagttaaactttgaagagaaacccatcatacctaacagtcttgtaagaaaggatgacaaagtgattgaacattgggtggagctaattttccttggccaattcacttagtaagataaggagctccaaatcatatttaagttgggagtcaattgattttacttaattcttgtgaggttcagttataagattcatcatactactaccatgagccatcctcagctccttgttacatgggcctgttaacatggcagctttgtctataagcaaacccaggagagaaagacatagcagagatggatgtttgaagtctataccttccaccccctttaaagagaaagtaacaccactccttttctgtgtcccttggggacactacctccatgtctggtcacatggctggactttacagcagataagcatactgtggcctgagaccatgattgtatgctttccttctgctgacctttacaatccctcaataaattgagctaacacagggaagcttttttaccaaataactgtgttgcatcatcctccagtttgcctggtgtccttaatcaatggaaggggaataagcaaactgagttttcttacaccttttgagtatagtgtttttgccatcatagatgtggctcctcataattctccaacttttatattaaaaaaccaaaacctcaaaaattgtagttcatgtcagtcagtgatgactcatcttagaagtattttgtttttggatgtgtgaatgtgcatagttcttaaagtccaacattcatgtaataagacatcttgcatataacaatgacccttacgtctaagatgttaaatagatcctaagcctggtataactttattcaagtatccttatttgcccctaaaatgtctttaatacacattacttgggttatttcttgaatgaacatacaggtatcccaatttctgtttttaagagaatggggtcttgctctgtcacccaggctggagtgcagtggtgcagtcatggcttgctgcatccatgatcctcctgcctcagcctcccaagtagatgggactgaaagcacacactgccatccctggctaatgttttcatattttgtagagttgcagccttgctacgtgacccaggctggagtgtagtagctattcacaggcatgattgcttgaaactcatggcttcaagggaaactcccaccctcaatatcctcagtagctgcaactacagccataccccccactgctcagcttctcatcctttaaaagatttttactggtagtgtcctcattctgggtttttgtcttctgtgtttactgtgacatgaagtcatttttagatgaaggttaaacattttgccaacgcaggtacaatatgggattcaataaaagtacagaattaaagttgtcttattagagattgggaagtttcccagctccgtttatcggtacttggccgtaccgataaaggggatggacttggagtgaccaggtcttagtcacatgtattttcataccctaaacaagaagcggtatagaccagaatggagcactgattgtaatccaccttctttcttagaaactggcgatggaatatgagaggagccctctggaaagaaaaggacagaccctgtgctttcatgaaagtgaagatctggctgaaccagttccacaaggttactgtatacatagcctgagtttaaaaggctgtgcccacttcaagaatgtcattgttagactttgaaatttctaactgcctacctgcataaagaaaataaaatcttttaaatc

SEQ ID NO: 1832 - DNA, 1963 bp, Homo sapiens
cacaacatctctaatctagcttctagatcagagagtcataagtacctttacagctcattacacacactactctatggaaaggattatcagtgctatggaagagaaccccgatagaacatcacgaaagtctggaaggattacaccattgaagatgccgtcattgttatagaaaaagttgtgaagaccataaagcccgaaacaataaattcctgttagagaaaactgtgtgcagatgctgtgagacaatcaaggaaatcatgaaagagattgtggatgtgacaagggtgaggaatgaaggatttcaagataagaatcttggagaaattcaacagctaataggtaccacaacagaggaattaacagaagatgacttgacggagatgagtgttctcaaaccaatgccagacaatgaggaaaaagagatagaagcagcagtgccagaaaacaagatgacattagacaatctggcagcagagttcccattattcaagacttcctttgacttcttttatgacatggactcttctatgggcactgaaactaaagcaaatggtgaaagaaggattggtaccatatagaaacaaacatttttagagaaatgcaaaagtaaagtcagaaattacagtgcatttcggtaaagttatactgagtgtgcctgcctcttctgcctccacttccacctcctctgccacccttaagatagcaagaccaacctctcctctccctcctcctcctcagcctactcaatgtgaagataacctttatgatgatctgattccagttaatcaatagtcaatgtattttcttttccataggattttcttagtaccatattttctctagctttattgtaagaatatagtatatggtacacataatatagaaaagaatgtgttcactgactttatgttattggtaaggcttctggtcaacataagctattagttaaatttttggggagtcaaaagttatacacagatttctgattgcactggtgtttggtgcctctaacccccatgttgttcaagggtcaactgtaaagagaaaaatggaatttagaagatgaaatgtttgcagttattttggtaagttaaaggacttcattttttgaaaacattgcattattgcacaggtactgtcaactgaaaaagttttacctactagttcccttaattgtggagcgaatttgtagtttttagtgaatataaatataacatttttctcttcctttttaggcatttgggatcacagctttgtgaattagaaaaactgatagataaaatgatgattgcagaattttctacttattctcacagtgacttaaatagaccactggaagatgactgtcaagttttagaagaggtatgtgttttaactgtggaatgaagttgatgccattgcttaacagtcttggcttagaacacatttttctcagattataggaatcaaaattatcttaaatttcaagggctatcagacctatgaagtccttcactagctatgtgacttgagcaagcaccatgattgttcactatcctatggaattagagaataaaataattgtatagcttaattagaaattagagttaaaatgagcttacagaccaagttaaaaatacagatataggatgaattaatttatattctgtgtttatgtgtgcgagtgctggagcttgtcttttataaaaagtgatcatagttgggcgcattggctccatgcctgtaaccccagcagtttgagaggctgaggtgggaagattgcttgagcccaggagtttgagaccagccttggcaacacagggagactccatctctacgaaaaataaaaaaattagctgggtgtagtggtgcatgcacacctgtagtcccagctacttgggtggctaaggcgagaggatcacttgagtccaggagtttgaggctgttagtgagccatgattgtgacatagcaagaccctgtctc

SEQ ID NO: 1833 - DNA, 2475 bp, Homo sapiens
ttttacagcctgccctgttggtaggcaattcctgttgttacattactcacaacaaagcttgcacatctatgatctttgatcagtgggaacagaaacttacagcagatttaagtcccttgcccactgtcctctgcttcgccagtgatggggctgaggtggagccggagactctggcccgtcgtggtccactcatgggtgcctgcatctggagggacacactgcacgtaccaagggtctccctcacatttgctcacgcaagctctgggtctgacaggtcccccgcccgcctcgctggctgcattcctctccccgtgggaagcagagcctccttcagatcccttgtctcccgagtctaccattgcacttttctccctaaatgtattaatatttgaaatggctgcgtccggcccttccgaggggcggatgagggaaaatgtgggccaaacaagactggaggtcccttgttgcaatgaggtctgcagccccacgtgaggtccctgtgcctaacacgtccaacctgccgtctgtcactaagtgctctgtgaatgtactgtgtgcacgtcccgtgtgcgggcgccctgtgtgggccctgtgtggcgtcacagtgcagccacaggacagccggggttatgaggcagctgtccccggcctgcagctctgggatgaggacagggcgacagggacttccgacctcctctcatagaaaaacgtgggtgctgcaccacccaaagtgaaaggctgaatttggaagtcccttttatcatacacattcagattgcctgtggaaattcagcaaaaatatgacatgcatttccattctatctgccttttaccttctcaaccttaaatcgactttcagttctgtgtcatgttttctcttctttttagaagacttctaatgacttgggaaaatacttttgaaggatgtgaaatggtgtttttgtgtctgctgtttgttgagtatcggtattttcagccttggttccctgtggagaagctggtgggtggggaggtgggctggctgcttaggtgagacctgcgcacgtgatgatgattactgaaaacaaagccaggagcttaattgggcatgtggccatggggatttgttattaattacctttgatctaacttaggcaaaaaggggagaaaaaaattacagggtcacagaatcccagggctaatcctaaaaaaacaaacaaaaagaagccctgcacagttttaaaatgtttccagtaattatgtttctgggagcagtgctggttttgttgtgctgagactgtcttgcatgctgtgggctgacgtgggcttgtgctgttgacagcaggagaaggtgcgtactggattcatgtcccggggctgccctcacaaagtactacacagactggtggcttaaaacagcaagaacgtgtcttcccccagttctagaggccagaagtcggtgtgtcagtagggtgggttgctttgggagactctgagggagtatgaacgcatacttgttcacagtattctaaacgtcttttacagtaaccattgtctttgtagttatttctctctccattctatttctgggatgccttttctctctcttttttgttaattagctttgctacatgttcattatattacttcaaagaaaaaatgtcaaaacaatctcaaggctggatgggattctcaagggcacccatcccaagctcaccccgtgcgaataatctccttactccacacccagctggctggcacagagaccactccactgaggacatggtgctgtcctcagcagctccagcctgcactgctgctcacccccaccccccagcgactgtaggttggagaagtgcgtgatgagatcataaaggaaagcacctgtgcttctctaggttcagtgaagaaagactggcaagggggtggaaggaggctcacgaggatgaatctccacaaagtcaagtctgatgtgtttgacagttcctgggatgtctctacagtagctcctcttgaaatctaaagcaacatgtccacattctaaaccactttcaaagatagtaataaaagttaaaaagttgggggaggtcagggaaacagactagataagaaacagcaaggaaacaaaaacaaaacatggcagaggaagatcatccacagtctatattatggcagtgaagaggaatgtgttaacactcctctgtaagaagaaaaagatggctgggtgcggtggctctcgccggtaatcccagcactttggggaggctgaggcaggtggatcacctgaggtcaggagtttgagaccagcctgaccgatatgatgaaaccctgtctctactaaaaatacaaaaattagccaggcatggtggcatgtgcctgtaatcccagctactcgggaggctgagacaggagaattgcttgaacccaggaggcggaggttgcaatgatctgatcgcactgttgccctccaaggcaacaagagcgaaattccatctc

SEQ ID NO: 1834 - DNA, 2342 bp, Homo sapiens
gacatgttactgaatgagaaatggctaccgtatccagaagtgccaagcccttttttgttgggcctgaccctagctcatcaagagctaggatgttcacctgtcaaccgcacgtctatgcaggtatggaacctggctaactgcaagctgaagaccaaccacattggccacacaggctatctgaacacggtgactgtctctccagatggatccctctgtgcttctggaggcaaggtatttggggacaaggcgtctcctactcagtggaagacagcgtcatggaaggagcacttagccagcgtctctaacgtaaaatggcaaacattagccaagatggttttaggaggataatgagataatggcaatctgagaatatgtttccaaagattactttcagcaaatgacagttaaggcatactatctggaagaaaaagatgattttctataagcctgtgggttttttttgttgtttttttgtttgtttgttttttgttttttttttgagacggagtctcactcggctgccaaggctggagtgcagtggcgcgatctcggctcactgcaaccatctcccgggttcaagcaattctcccatctcagcctcccgagtagctaggattacaggcacccgccatcactcctgggtaatttttgtatgttagtagagaggattttaccatgttggccaggctggtcttgaactcctgacctcaggtgatccgcccacctcggcttcccaaagtgctgggattacaggcatgagccaccgcacccagcctaaagttggtttcttgaagcagttgatgagattgggatcctggttttcagaaatgattggagtgatttatgtaagttgggaggggttttttgatggggttggtaaggtcttacgttaaaggaaaggtatacagagataaatattggtacttgagtcattagctttcaaagaagcctggggtaatggaggaaaggtaagaattgattctgacagaatcttgagatgggcagaattaacatctggaagaggtcacagtgtcctgatttaccttacctgtgtccaggatggccaggccatgttatgggatctcaacgaaggcaaacacctttacacgctagatggtggggacatcatcaacgccctgtgcttcagccctaaccgctactggctgtgtgctgccacaggccccagcatcaagatctgggtgagtgtgggttacaattgactgggtacctggctgcactctgagccctggcaatgttttggttattatatatgccatctgactcccacctgggagctaagctttctcagcctccacgtaatgacattttggtctgagtaactctgttgtggtgtgcagtcctgtacattccaggatgtttagcagcatttccagcttctactagatgtcagtagcaaaccatccttccactagtggcaactgaaaatgcatgtaggcattgatacatggaccccagggagcaaaatcatccctttttaacttgagaatcttgaggggcttttaagaggagactctcttgattggtaagtcttaaggttgcttttgccctgttccccaggatttagagggaaagatcattgtagatgaactgaagcaagaagttatcagtaccagcagcaaggcagaaccaccccagtgcacctccctggcctggtctgctgatggccaggtaagtgggtctgtcctctcaggtgattctgcttccagttaattttctccctctcattctgttagtatatctagtctgtcagacacaagagcagtgtccttggcataaagtgaaatgacaagccaggttgatgaggatgccctcgtttgccatgccagtgaatgtgtttctgcatcagagggaagactgatgtggaacgcagtggctgtcagccttcaattaataccttaattaatctgaccagttttcaaatgtctggagccttatcaccagctgtttcttcctcaaggaatacataaccaccacttacaagctggctgttgaaatgagagcggtttcttacagtctacccggcgttgtggcacatgcctactggaggctgaggtgggaggatctcttgaactgcaggggcttaaggctgtagtgagccaggatcgcacccctgcactccagcctagacaatggagcaaggtggacggatctcaaaaaaagccacttgggctgaatctagtgagactgcagaatttatgccagcctgacccgtcactgtcatttcttccctgcagactctgtttgctggctacacggacaacctggtgcgagtgtggcaggtgaccatcggcacacgctagaagtttatggcagagctttac

SEQ ID NO: 1835 - DNA, 2169 bp, Homo sapiens
gatgtggagcctgagtgcatcatggagaaggtggccaaggcttcaggtgccaactacagctttcacaaggagagtggccgcttccaggacgtgggaccccaggccccagtgggctctgtgtaccagaagaccaatgccgtgtctgagattaaaagggttggtaaagacagcttctgggccaaagcagagatggtcacactgaggctcggaaggaggaggagaaccgtcggctggaggaaaagcggcgggccgaggaggcacagcggcagctggagcaggagcgccgggagcgtgagctgcgtgaggctgcacgccgggagcagcgctatcaggagcagggtggcgaggccagcccccagaggacgtgggagcagcagcaagaagtggtttcaaggaaccgaaatgagcaggtaagatgggggtgctctacttgtttggacctgtcctggccacacgcagaagtccctgatctcggattgagggcccagcccagacctgggcagaggctgccctgcagtcagctggggcaggttggaatctgggcacctcaagaggtggcagtagagaggaaagccaaaggcggaagcgtcgggcttggaccacacctggtcctgggggaggccctgggagccccttggcttctgtgttttacttccttttttaacgttactttttatttttaaatgacttctctcctgagaacatgttttgcctcctggccccacactcacctttgaggggctactgggccgacagctggaggggctgtgatctggggagaggtggtgaaggttttgcccactgcaggggtcaacatgtgcttccctccaggagtctgccgtgcacccgagggagattttcaagcagaaggagagggccatgtccaccacctccatctccagtcctcagcctggcaagctgaggagccccttcctgcagaagcagctcacccaaccagagacccactttggcagagagccagctgctgccatctcaaggcccagggcagatctccctgctgaggagccggcgcccagcactcctccatgtctggtgcaggcagaagaggaggctgtgtatgaggaacctccagagcaggagaccttctacgagcagcccccactggtgcagcagcaaggtgctggctctgagcacattgaccaccacattcagggccaggggctcagtgggcaagggctctgtgcccgtgccctgtacgactaccaggcagccgacgacacagagatctcctttgaccccgagaacctcatcacgggcatcgaggtgatcgacgaaggctggtggcgtggctatgggccggatggccattttggcatgttccctgccaactacgtggagctcattgagtgaggctgagggcacatcttgcccttcccctctcagacatggcttccttattgctggaagaggaggcctgggagttgacattcagcactcttccaggaataggacccccagtgaggatgaggcctcagggctccctccggcttggcagactcagcctgtcaccccaaatgcagcaatggcctggtgattcccacacatccttcctgcatcccccgaccctcccagacagcttggctcttgcccctgacaggatactgagccaagccctgcctgtggccaagccctgagtggccactgccaagctgcggggaagggtcctgagcaggggcatctgggaggctctggctgccttctgcatttatttgccttttttctttttctcttgcttctaaggggtggtggccaccactgtttagaatgacccttgggaacagtgaacgtagagaattgtttttagcagagtttgtgaccaaagtcagagtggatcatggtggtttggcagcagggaatttgtcttgttggagcctgctctgtgctccccactccatttctctgtccctctgcctgggctatgggaagtggggatgcagatggccaagctcccaccctgggtattcaaaaacggcagacacaacatgttcctccacgcggctcactcgatgcctgcaggccccagtgtgtgcctcaactgattctgacttcaggaaaagtaacacagagtggccttggcctgttgtcttcccctattttctgtcccagctcatccgtgtctctgaagaacaaatatgcttttggaccacg

SEQ ID NO: 1836 - DNA, 2288 bp, Homo sapiens
acctggccagaagggattttttagaatgccgcagactaagcatgttgctaatggaagaggtccctgaatctttgtgggatttatctgctgcccccaaccttcagatttcttactagactagctaggcttctttctactttttgcccaccaactctaattagcatatcatcaggtagcagaccagtatgatgatgtgcgtgatgtccagattatccgtccccacaaactcttatgaaatggaaccccttgggcaaagcagtgaattggtattgctattgttcctagataaaggtttactacttttgattctctctattgataggaatcaagaagagaacacattcaccagattgataatcacatataaagtgctacaggctgtgctgatgtgttccagtgaagacatatctggcacagcagctatgatagaacctacctattggttaagtttgttaaagtgcattgtcattcaccttaatctatttgtttggggtttttgttggttttgtttcttacagggggcagataggtgaattgaaaggatatgaagcaccaccattctgcatcctttaagtctttcaagttgacactaatatctgcaatttatcctgggacatactcctgtcagtataagctcaaaccttgtatccaatgatcttcaagaagccttggatttctgtttaccagttgacagttactttggcaactggccacaggtcccttttaggaatgattgggggacagtcaccaataatacttgtagtggtatacactttccctacacttccctagggggatccagcaacacttttaatcaatgaattcctggttcctgagacattaaagttttaaaatatgtgcctcttaagatgatgaaatatagtaacttgatgtggttactatacacagtactagagggaagaattttccataacacaaatgtttagatttaaattcatgccttgaagccagataaatgaagtataagctataattacaaaacacctagttcttcagtgtttggatttatgaaaattgccatgattgttatctattgtgagttattaatccaagttacttttattacattttaacagttttagctataacataaattccatgggttttcgtttttgttttttgtactaccttaaaaaaacctatcattgttctgtggggttttttttgctcagttatgtgtttgtatcagctttatgcccagacccatactatatgtcttcacatataatatctcagtgttcacagtggtcttccttgggaggtgtttgactctcatttagatgcaaaactgagacccagaaatgtcatcttttttgacttttatgtcacagctggtaagtgaaagagtcagaattcaaattcatgtctcccaactctaaacccaaagctccttctactattccatagctatcttcctaaatctggtctattttctctccctctccctcccctcctcctctctcagttgatgtgaaattcacacaatataaaattaaccattttcaagtataactaccattcagtggcatttagtacattcacaatagtgtacagccagcacctgtatctagttccaaaatattttcatcatctcaaaggggagctcgtgccgattaagcagtcattccccattccccactcctcccagcccctggaaaccaggaatctgctctccgtccacatgggtctacctattctggatattttgtgtaaatggaatgctaccttatgtgacctttgtatctgactgctttcacttagcataatgctttcaagtttcatctaaattgtagggtgacaaagagtatgggcaatcagacaagtgacccaaagggaaaacagatgtaaacaggcctggctaaagcttgcagcaatttttggacaggttcatttctaacacatcaatgtagatagcagccccattccatgctgtaataccttataccttagatacaaaaatctgaacatcaaaaaaatctgcttacttggccgggcgcggtggctcacgcctgtaatcccagcactttgggaggccgaggagggcggatcacgaggtcaggagatcgagaccatcctggctaacacggtgaaaccccgtctctactaaaaatacaaaaaattagccgggctaggtggcgggtgcctgtggtcccagctactcgggaggctgaggcaggagaatggcgtgaaccccggggggcggagcctgcagtgagccgagatcgcgccactgcactcacgcccgggtgacagcgagacgctgtctc

SEQ ID NO: 1837 - DNA, 2086 bp, Homo sapiens
gttcttagagctcccgagatggtggcggccggctcccaaggtggcagcaagacttttgttctctgacctggggttcttggcctcctggattccaaagaatggaaccttggggccatgcgattactggtgtgattactgtctcctgactggaccctgactgctatagaattgacggagtctcactcagtcatccaggctggagtgcagtggcacagtctcggctcgctacaacctctgcctcccgggttcgaagtgattctcctgcctcagcctcctgagtggttgggattacaggcatggcctaccatgctctgctttttttctgagacagagttttgctcttgttgcccaaggagtgcaatggcatgatctcggctcactgcaacctccgcctctcaggttcaagcgattctcctgcctcaggctcccgagtggctggaattgcagataaatatgctgaggcatgttttcaaggaggggagagagattccttttcctcagccgggcacagagccaacctgaagtgtagcactgtggtgacctggcgggatctgctctccagtcactcccgagggcccttctggggacaaggagacttttctgtgcggcctgttgatttgatagagatgatgtcttgccacattgcccaggctggtctcaaactccaggcctaaagggatcttctgactttggcctcccaaagtgctgagattataggatcgaggctatcaagctacagatgatcttacaaatggaaccccaaatgagctcaactaataactaccaaggacccctggaccaacccgctggccctttcaatggcctaaagagttcccctctggaggacactacaactgcagggtcctttctttgcccctatccagcaggaagtagctagagtggtcatcacccaattcccaacagcagttggggtgtcttgttaagtggggagattgagaggtgaagccagctgggcttctgggttgggtggggacttggagaacttttctgtctagctagaggattgtaaacacaccaatcagtgctctgtgtctagctagaggtttgtaaatgcaccaatcagcactctgtaaaaacggaccaatcagcactctgtaaaatggaccaatcagtaggatgcgggcagggccaaataagggaataaaagctggccacctgagtcagcagtggcaacccactcgggtccccttccatgctgtggaagctttgttctttcactcttcacaataaatcttgctgctgctcactctttgggtccacaccacctttatgagctgcaacactcactgcgaaggtcttcagcttcactcctgaagtcagcgagaccacgaacccatggggaggaacaatcgacttcagacatgccacctttaagagctgtaacactcactgcgaaggtctgtggcttcactcctgaagtcagcaagaccacgaacccactggaaggaagaaatttcggacacatctgaacatctgaatgaacaaactctggacacgccatctttaagaactgtaacactcactgtgagggttcatgggttcattcttgaagtcagcaagaccaagaacccaccagaaggaaccaattccggacacagactcactgcaacctccacctcctggattcaagtgattctcctgcctcagcctccggagtagctgtgcctacaggcacaagccaccacacacggctaattttttgtatttttagtagagatggggtttcaccatgttgctcaggctggtctccaactcctgagctcaagtgatccacctgtctcggcctcccaaagtgttgggatacatgtgtgagccactgtgcccggcctcctctggattagttcttacaggaatagattagttcttgctcgagcaagttgttataaaagtgaggttgcctctagtgttttgcatcctcacatatgtctgcttacctcttgacctctctctgtgttatgacccagcacaaaagcccttaccagaagccaagcagatgctgatgccacaccccttggacttctcagtctacagagccatgaaacgaataaacctctctttataaatt

SEQ ID NO: 1838 - DNA, 1807 bp, Homo sapiens
tttgcagatgaggaaactgaggtacagaattcttagggaacttacccaaaatggcttttctgcactctgccctttggtattgtcccatgtgaattgtttaaaacttatgtgtatagtggcatgagtaggtgatttcagaaacagaactcacttttgttgtttggtcttaaaattaggaacttttcttcatctgggcttcatttccctgcaccttcccagctttctagtcatgcaagccacatgtctccacgtgaggggttcattggaaagcagccacagagccaccccctggctgggttcttccccagctctgcttcctccttccccaagtcctgcagctgctctctccatggcagaaccacttctccccttactggaggggaggtccactgaacaaatccaggagaggaatcattgtgttttccacagaagagaaagtacactggactttctgtgcaacctgttactacattttcacagagactcatatttgtgcagtgtaactcagttgaaacccagcaaaattaggctcccgtgtctccataaaggccaccatgatggtaacggttgtacttcaccttgtgtttggacagaggctgattgattttagccatcatcacaccgtgtctaacattctctttcactgtgctttgatcctctgttagaaagaacctggagcaaagattagcagaggtgctaaagggaagaaggaggaaaagcaggaagctggaaaggaaggtactgcaccatctgaaaatggtgaaactaaagctgaagaggtactttccataaatacctcccactgattgaatcagtgtctttaaagaaatttctcaatccttcagccggtgatagcacgttcttaatgtctctttttattgcctgtaatgttattgcagatccacatctctcgctcaactgttaatgtctcaacctccagaggcaccccacccagcacactgtcagtaaaggggcagattgaaacagtgagagttaagggtacagtagaaaattctgcatgtttgcagtgactagaatcagatagtagtgtggtggtttttttttttaatcattatgaagagtgggagcttgcaggtaaggcttctgtggtggtttgaaaagcagaaagcaataaatgaaacaaagtgtttgtgtaatatattcctgccttgtcttcttcactcagagttgaaataggttttgcagtaaagctggaaaaaaaaaagaaaacaaatgttcaaaactgtgtgtgttggtgggtggaatttcctttgcttatagtagtttcagtagtaactatatgtttttttttcctttctttttcacaggcacagaaaactgaatctgtagataacgagggagaatgaattgtcatgaaaaattggggttgattttatgtatctcttgggacaacttttaaaagctatttttaccaagtattttgtaaatgctaattttttaggactctactagttggcatacgaaaatatataaggatggacattttatcgtctcatagtcatgctttttggaaatttacatcatcctcaagtaaaataaatatcagttaaatattgaagctgtgtgtaagattgattcagcattccatgcacttgctttaaaatttagtcctgtgcatactgtggtgtttttactgtgcatatttgaatttttcatgcagtttttctagagcaataatcagtggtgcttttgtacctaggttttatgtgattttaatgaaacatggatagttgtggccacctgctgactatttgtggtttaaaataaaaggtttacttgtctgcag

SEQ ID NO: 1839 - DNA, 1779 bp, Homo sapiens
aactaaaacatcatggtactggtacaaaaatagatgcatagatcaatagagaaaaatagagaacccagaaatcaagccacatactgcaaccaactgatctttgacaaagtggacaaaaataaacaatggggaagtggcactctattcaacaaatggtgctaggaaaatggctggctttgtgcagaagaatgacactggatccctgtctctcaccatatacaaaaattaagatggattaaagacttaaatataagacctgaaactataaaagccctggaaggtaaaactcttttggatattggcctagacaaagagtttatggctaattccccaaaagcaaatgcaactaaatcaaaaatagacaaatggaacttaagttaaaaagcctctgcacagcaaaagaaataatcaacaaaataaacaggcaatctacagaatgggagaaaacatttgcaaattatgcctctgataataaaggactaataatatccggaatccacacagaattcaacaagaaaaaaaactccattaaaaagtggaccaaggtcatgaacagacacttctgaaaagaagacatgtaagtggccaacaaacatgaagaaatgctcaacatcattaatcagagaaatgcaaatcaaaaccacaatgagatatcatcttacacatgataataattgtcagaatagcaattattaaaaagtcaagaaacaacagttgttggtgtggatgcagaaaaaagagaatgcatgtatactgctcgtgggaacaactagttcaacccctgtggaaagcagtttggagatttctcaagaaactaaaaatagaattgccattcaacccagcaatcccactgctgggtgtctacccaaaggaagataaatcattctatgaaaatgcttgctcttgtgtgtttatcgcagcactattcacaatagcaaagtcatggattcaacctaaatgtctgtcagcagttgtctggataaagagaatgtggtgtatacacactgaaatactatgcagccataaaaatatgaaactgttgtcctttgcagcaacatggatgaaacctgaaggccactatcctaagtgaaataagtcagaaacagaaaataaaatactgcatgttcttataagtgggaactaaacagtgggtccacatagtcataaacaatagacactgggggactccaaaaggcaggagattaggaggggaatagggctgaaaaattaccttttgggtacaatgatcatttatgggtgatgggctcattagaagcccaaaccccagcattatgcaatatatccgtgtaacagtcctgcacatgtgtaccctgaatctaaaatcaaatcaaataagtagaaaataagaacaacaatccaagttcatagtagcaggtctcattcatgatcatcttatactttaaaatgtctttccttcttttacactctgctgtgtatggctatgcatttttatatgtgtgttacttttgcatatattatttaaatgataaaattatgagcctgtaatcccagcactttgggaggccgaggtgggcggatcatgaggtcaggagatcgagaccatcctggctaacacagtgaaaccccatctctactaaaaatacaaaaaattagccgggcgtggtggcgggcgcctgtagtcccagctactcgggaggctgaggcaggagaacggcgtgaacccggaggcggagcttgcagtgagccgagatgatgccgctgcactccagcctgggtgacagagcgagactctgtctc

SEQ ID NO: 1840 - DNA, 1910 bp, Homo sapiens
tgagtcaggacacagtcaacaatatggaagagacagtagggtcttttgatgaaagacaagaacagtatttctaaactctgactggacattttgcgaagccccacggatgcctattatacttcaatgagaaatttaaaaataaaagttgcagggcctggcttttattgcgagagagactaatgggcagccaaggccaagatcttcaagactaggacatctaggcttgactgtcacctgcttctcccctctctcttggggcactagtttcctgttgtactctgtcatgggaggacccaaatgatgaagaaagtgggtctcagggagaatgacaattgtcaaactagcctcggtttgcagaaatgcgctatgggccaggaaaagaggccagcccacggcctttgcaggctcccaggaaggtgtctattgaaggaagagagctggggaagctgagccaacagggctggaaggaagttggaaatcctttcagtggttcccttcctgtgaagttgctgagctcagggaggagttgcccccgctacagaatggtcagcagtgtgtgccaaagctccacccagaatctaggcccatgtcaatcctgcactaaggaccacacagtgctttctagctattctgtagttgtttttgtaactattcattatttaattatattcaaatatacttcctgcttcatagatttctaaatcctcgttttaaaaataccattactttctcataagcttctgtaattttttcttttttaccctttgtgtagaaagaatttccacccctaacccccttagtgtcttttgctttgcaaaactggacttttgctttggacttgggatgtctttatgaggcgtctgtctctgttttgtgatcagattcacagcagcgcgtttatgaggacaggtcagcccatgtgcccatgtgtgtctggatggacaggaggcctggcctctgggtgttttcactgcctaaatgcagaaactctcctttatgtggaaaatcaaactggccgagacctttaatatgcacaggcaaatgcacaggcaccttccagctacctgaggcagcctctccgggcaccccggcctgcagacatgcggtgtgaccctccacctgccaatccaggacctcccgcacccaaccccccatcctgattcccggtctctttccttcctctcccttcaggtcactgggctgtggtgagagaaggcctcacgaacccttggattccggataactggtcttggggcggggtggcttctgaacactgcccagtgctagccgagttctacactgaaaaggactggagcaagaaggacgcccctcggaacggcagcggggtggccttggagcgaagtgaagccaacatcaagcacgagcgatgatgacaccaaatccatgtgtccaccccgggacccaggagggcacagccaaggaatgagccctgtggggtgacgcttcagggcagagctgccttttaatttttattctcagagcatcagcacttgaggccttgccccacgccttctctgtggaccattcaggacctccagtgggggtggcgtgccaggcgcgtaccccaccaggtgggcaaagcagaaacctgcggggagcggagacgccttttatctctggatgccacagacctgagcagcattgggctggctgtccgctgctgactggatggcagcacaaggacaatatgagcagagggaggagaagaaggggtgctcaggctgcgggccacagtccagcagcgccagaagcactcatttctgaccaccaggctatgacgttcctgctgcgcattacagaaagcttttaactgtgatcaggcagtctgctcagatacattgagtggcgatttttagttttgttttgaaaaaataaacagattaacctgc

SEQ ID NO: 1841 - DNA, 2402 bp, Homo sapiens
aaataaagaagggaaagtgctgagggtgacggccccggggagcgctgcggctctacgtcaacctgcggcggccgccgactcatttggggccacgctggttgcattcgtcacgccggcgatgcctctcaaacccgcggcctgccgaggacgttcccacacgggagaccccagcgacgcgggcgcatctgtggctctcgagaaccgggccgcggagccgccgcgagcgcaagcgaggaatcggcgactgcgggggtggacagctggggcttgtagtcccctcgctaccctctattctggaagaggcgggtcgcggccgctgaactccagctctgcgcctgcccaggcggccgcacgctcaggggcgtggcatgggtgggtcgtgagttgggcggggcccacagggcgtgcgcgacgcagcggcgcggcgcgtggcgtaaggggcgtggcgccagtgggcgtggcgtggcgcagtgcgaagggacgcggtgcgcatgcgcgtgagggctgccgcgggtgggtggtatcgaggcctgtcgggtcagggcggttcgcgggtgctgtcagagctgggccggggcccctaggcagggtagccgggtcgtagaggcgggggccggtcgcggtcggtggagcgggatgaggatgtaggaggggcggacgtggcggaagccgcggggtccgcggggtcggtgcctctagggagccagggaggcctttcccgaggctcctggggaagaagaggcgaagcgagagtccctggggaacccccactccactcccagctggagactgggttgtgtctgcatggaccagagcccacagtgcgagttgctataggcaaccagccagggtggccagctccttcccgtttgcccgtgatgttctggttttgggaccaaagcatcctaggcctccagcccactgcagtgaccgaattctgcgccccctgcccatcttctcccgcagcttccctagattaggcttgggaggcaagaggaggcctcctgacctttcacactgcctttttaatattaagatgaagtcacactccacaactttcttccagccaggcccagacatgtccgtccttgtaagttaaaagcttccatgggagccttccttcctaatcaagatgcaaataatacggcactccgaacagacactaaaaacagctctcatctcaaagaacccagtgcttgtatcacagtatgagaaattagatgctggggaacaacgtttaatgaatgaagccttccagccagccagtgatctctttggacccattaccttgcattctccatcagattggatcacctcccaccctgaggctccccaagactttgaacagttcttcagtgatccttacagaaagacaccctctccaaacaaacgcagcatttatatacagtccattggctctctaggaaacaccagaattatcagtgaagaatatattaaatggctcacgggctactgtaaagcatatttctatggcttgagagtaaaactcctagaaccagttcctgtttctgtaacaagatgttcctttagagtcaatgagaacacacacaacctacaaattcatgcaggggacatcctgaagttcttgaaaaagaaaaaacctgaagatgccttctgtgttgtgggaataacaatgattgatctttacccaagagactcgtggaattttgtctttggacaggcctctttgacagatggtgtggggatattcagctttgccaggtatggcagtgatttttatagcatgcactataaaggcaaagtgaagaagctcaagaaaacatcttcaagtgactattcaattttcgacaactattatattccagaaataactagtgttttactacttcgatcctgtaagactttaacccatgagatcggacacatatttggactgcgacactgccagtggcttgcatgcctcatgcaaggctccaaccacttggaagaagctgaccggcgccctctaaacctttgccctatctgtttgcacaagttgcagtgtgctgttggcttcagcattgtagaaagatacaaagcactggtgaggtggattgatgatgaatcttctgacacacctggagcaactccagaacacagtcacgaggataatgggaatttaccgaaacccgtggaagcctttaaggaatggaaagagtggataataaaatgcctggctgttctccaaaaatgaggaccttcaaataggagtgattgaaataaataactacttgcatgttatgctttcatttgggtggaatacttcattggaataaactactgatcttgtgctgtgtcaaagtaacagactagaaccttctttcaagtacctgaattgaaatgaaactcattttgaataataaaaactctagaaactcttt

SEQ ID NO: 1842 - DNA, 2211 bp, Homo sapiens
agttggcaggctgctgcgggaggcggcggcggtaggaagccggagacagcagggtgacagaattggaaaatatttaactcttaacaaatgaattccccacttgaactctgccgaattcctgtgccacctcctcctttagaaaactgatcttaatacagagataaaagaggagtagaaggtaaaagaaaatgctgggaactgaccgttgtgttgtggaagaatggttatcagaattcaaggcattacctgacactcagatcaccagttatgcagcaactttacaccggaaaaaaacacttgtaccagccctctataaagttattcaagattcaaataatgagctcctggagcctgtctgccatcagctgtttgagctctatcgtagctcagaggttcgacttaagaggttcacactgcagttcttgccagaattgatgtgggtttatttacggcttacagttagccgagacagacagagtaatggttgcattgaagcacttctgttaggaatttacaatttggaaatcgctgataaagatgggaacaataaagttctgtctttcactatcccctccttatccaagccttcaatataccatgaaccttcaacaattggatccatggctttgacagaaggggcattgtgtcagcatgatctcatcagagttgtttatagtgatcttcatcctcagagggaaacattcactgcacagaaccggtttgaagtcctgagttttctcatgctgtgttataattctgctattgtatatatgcctgcctcatcttaccaatctctttgtcggatgggttccaggtgagaagagtgattattactaatcttcatatttatttgatagatatttattgagcacattctctaagccaagcactgttctaacttctggtattacagcagtaaacaaaactcatggagcttgcattcctgtaggagtccttatcctcatgaggctgtttttgttgttgttgttgttttggttttttatgagataggatttctctctgtcgcctaggctggagtacagtggctcaatcatagctcactgtgccctcagccttcttggctcaagggatcctcccgcctgggcctcccaagtagctgggaccacaggtgtacaccacgactctcagctaatttttgtagagaaagggtcttgctatgttgcccaggtttgtcttgaagttctggcctcaagcattcttgccacatcagccttccaaagtgctgcgagtacaggtgtgagccaccatgcctggcctcgtgcattcttgaaaatgttttcagcattaaagaaatattttctagctgaacgtggagttgtaccaagacatccaaatctagggttgtttagtgatatatcttattccctggttgccagtttttgtaaatcactttgagatctttgaaaaaaaatagtgctatatatggggaaagtcttaaggaatatgaacctcttcccatacatttcataaataactgtctctgtgttggagaaagtgattagcaatagtaccaatgatgtgtgtgtctcatttgtatgtagggggtggatattctgtatctcatggattataatctttactaaatcataatttctaataatttggacagacctaggcttaaatcttgttctgtcacccagactggagtgcagtggtgccatattggctcattcaacctttgcctctcaggttcaagtgatcttctcacctcagtctcctgagtagttgggactacaggtgcccaccaccatgctgggctattttttttttttttaaaagagaccgggtttcgcagtgttgcacaggcaggtcacaaactcctgggattaagtgatctgcctgccctggccttccaaagtgctgggattgcaggcatgagccaccacacctggcgttaaatttctaccatagaaaaaatgtaggccagggtcagtggcccatgcctgtagtcccagcatgatgggaggccaaggcctgaggtcaggagtttgagaccagcctggccagcgtggtgaaaccctgtctctatacaaaaatacaaaaattagctgggtggtggcgcatgcctgtagtcccagctatttgagaggctgaggcgtgtggatcacttgaacctggtaggcagggttgcagtgatctgagatcacgccactgcactccagcctgggcgacagagtgacaccttgtctc

SEQ ID NO: 1843 - DNA, 1919 bp, Homo sapiens
agttctctgtagtgtttgccaatgttggagccgtctgcaaagtgtccccggcaagaaggtaaataccctcatcgggggcgtccgggagaccccgacttccgcgccgccggcgaagaaggcagagggcgctggggagccctgcagttccgcagcacggggaacccggagaaaagcagcccccttcgcggcctcccctcccccgcgccttccctcccacatcgggctctcggggcagcagcggggaggggagaccggcgggggagggaggacagggaggcgaaggaattggggtggggggtgcgtgtgtggtggagggggtgggacgacacaggtgtcctgaggggaggagccgggaggaaggcgaggaggccgggccaagtgggggtgcggaggtcggggagacaggaacgcggctgcgggcgcgggaggctggggttctagggggccggggtggtagcggccggaagagaggacggcgagtgcagccacggtgtggctgcgagggagagggagcgcctagagtagggcaggggagggcggcccggggagggtctgcgggaaatgggcctgggggcgctggaggcggagcggcggggccggggcgcgccggagggtggcggcggcagctatttctgtagaatgggctagtggtaaagacgtaacttgccgaaatggggagggtaggtggggcccaggggacaaaatatatcctatgacaggcaagttctgctgtggctgttacgaactcctaccgtgatggctcggcttaaaggggtagttggcggtagtgaccttgccggggtgaagggagttgggcgaggagacaaagctcagttacggaatccgctgtgtgagagcaggaactctagtctcttcggggtcgagccgggggctgtggcttgggggctgggggtgctccgcagaggccattgagaagcacgccactctgggattcttagggaggcggtgggggtaatggccgtgggattctggaagtctttggaaatgtgtgtagaattttgcatttgtgaataattttctttggtaagggtccatatttgctgtgatgtccccttacccccatccccactccaaagggttaagaactgcttgagcagatagagagggaccattcaattagggtagacctgggaatttaccaaaggattttaaagtgggtggatcctgcagaaagaaaggctagagatgatcctttaaagatattttactgttaattgaaaacgttttttatttaatgtttgctttcacaattttggtgaacttttgctgagcattacttggcttctgatgcatcctgtgtttcagaccagcatcgtgaatacttgaaatcaaaattgtgatggacaggcagggtgatagtaaccttggaggagaaaagatttcaacatttctccaggatatttcttccccgtccttgctttctttagatgattcaagtacactgttgtgaactgagctgcggtggaaaaatcttatttaataaaactaccaaaaccaagacttactctccatctctgttttgtagtatggccagattttcattgttcagtttgtatcttactgcaaacaagagatatcacataacactttaattgtagattgctgcattttgcagcaggcctatattaaatttgcgaagcagttatgccaaactatctggtgtgtttgtgttttcctgctatggtttcaagtcaagtcactattgccatattttattatatggtaggctagtctgaaatttattcctaagtgatgataagttggtaggatatggtacatacttgctcacaaattactgcatttttccccataaaaaccagtgttttgtatttgtaagaatgttgctgtgtaatccaagtatgtattgttaatttcaaataaaatgctgtgtaattttt

SEQ ID NO: 1844 - DNA, 2331 bp, Homo sapiens
aatgcctacactcctccacctgcaggttttcattgaccggtttcgctacaatgccaacagggcctctcaagtgcagagtaaactcaagatgctggagaagctgtgagtacagcatccttggccagggcctgactcctgttctcttcgtctccttccgcatttgcacgccacccttgccctaccattctaggtctccccttcgctagaagccaactgtgacttcctcctctgctgggaagcagagtattccacactgttcttggagggctaatcttgactagcacatggcaaccactaatttactttctgtttctgcttctacgtatctgcttattctgggcatttcatataaatggaatcatacaatatgacctttgtgcctggtgtcttttacctggcgtcatgtgtgaggctcatccatattgtagcgtgcgtcagagcttcatttcttttcgtggctggataatattctgttgtgtggatatacagcattttgtttattgagtcatgaggggccatttgggttgtttccattttggttattatgaataatgttgctgtgaacattggtgtacaaatttttgtgtggacatatgttttcagcttgcttgggtgtatacctaggcgcagaattgctgggttacctggtaattccaaattaatgttttgaggaactgtcaaactgttttctaaagcaacaacatcattttacattcctaccaacaagggatgagagttccaatttctccatgtctttggcagcactgttattgacttttttttttttagttttagccatcctagtggctgtgaagtgatagctcattgtggttttgatttgcattgccttaataactaatgataatgtgcattgggagtttaattttgaagtgccctttctataagtgctggcaggaagcttaaaatcataaagcttagatgtttgcgacgtggaaacatatcacaatatagtaactggggataaaaagtcacaaaaagcctaattctattttttagcatacagtaaatgagaagaatggactctaaagtaatgatacctgagtggtaggagtacaagccctttctaagttttctctgaacatatattactcgtgtaggaagttatttttttaagtaataaatctagtctacctcatctcttctcccaggcctgagctgaagcctgtggacaaggaatcagaggtcgtaatgaagttccctgatgggtttgagaagttctcgccgccaattctgcagctagatgaggtggatttctactacgatccgaagcacgtcatcttcagtcgcctctctgtgtctgctgatctcgagtctcgcatctgtgtggttggagagaatggggctgggaagtctaccacgctgaagctgcttttgggggacctggcacctgttcggggcatcggacacgctcacaggtcaggcccacccgcacccctgcccccatgagcacatttgcaggcacccatgctgcctgcgctccttcgtggccattgcctttgtctgtttttccacttcggcttctgcctgcaggaatctgaagattggctatttcagccagcaccatgtggagcagctggacctaaacgtcagtgctgtggaactgctggcacgcaagtttcctgggcggcctgaggaggagtaccgtcaccagctgggtcggtatggcatctccggagaactggccatgcgtcctcttgccagcctgtctgggggccagaagagccgagtggcctttgctcagatgactatgccctgccccaacttctacattctggatgaacccacaaaccacctggacatggagaccattgaggctctgggccgtgccctcaacaatttcaggggtggtgtgattctggtgtcccacgatgagcgctttatcaggctggtgtgccgggagttgtgggtatgcgaaggaggcggcgtcacccgtgtggaaggaggatttgaccagtaccgcgccctcctccaggaacagttccgccgcgaaggcttcctctagggccaccaggctgaggactcgcccaggacatggactggtctctcagacccctgggccaccatgtaggccaccactccaggccgtggacttcccccaacttggggacagccttattcccaaatgtctctatccttttgactggagcatcttctgcacaaccttgggagcccatccaagggttggtgaggactggtctcccgggggtgggggtctggggggtaccctctggggttatagattcccccactgccccagctctgactggaccccaagtggctgctatgtaaattaaatctctccccgcgtct

SEQ ID NO: 1845 - DNA, 2944 bp, Homo sapiens
actttgggaggcagaggtgggtggatcacgaggtcaggagttcaagaccagcctggccgagatgatgaaaccccatgtctactaaaaatacgaaaattagccgggagtagtggtggtgctcctgtaatcccagctactcgggaggctgaggcaggagagtcacttgatcccggggggcagaggtcgtagtgagccgagatcgtaccattgcactccagcctgggcggcagagtgagactccgtctcaaaaaaaaaagaaaagcagactgcctaagaggatggacagatggacactgggtgagcagagtggcctggccgctggcacacctccctgggcaggaccaggcagcctccagaggggcttcaggagtgaccgggcctggcctccccaccacgggctagggtggacatttggggccttctggggccaaagtgcagactgctggggatgcaggtggcttggatgttctctgactttgttgctgggatctccgctaaagagtatctgcgctgtggcttctttgcaggagaagttttcaggttgctggaggaagagggcgtctccctccccgacctggaaccagcccctctggacagcctgtacgtatgtctgccaccaagaactgttattttagcttctaacgctgcctctgaggatagcatccccctgctctgggcttgcctccccgcagcccatcttggcgtccacagaagtggctggatagccaggcgcagtagctcacgcctgtcaccccagcactttgggaggccaaggtgggcagatcacctgaggtcaggagttcgagaccagctcggccaacatggtgaaacctcatctctactaaaaatacaaaatttagccagacatggtggtaatccatgccaggccctgtaatcccagctacttgggaggttgaggcatgagaattgcttgaacccaggaggcggagcttgcagtgagccaagatcacgccactgcactccagcctgggcgacagagcaagactccgtctcaaaagaaaaaaacaagaagtggctgggcccctgtgatggctggtgacacaggagctgttcctctgtgtctgtgacttgtctcccacctggaaatgcaaacactcatgtgtgagggacagaggccctgctcgggaggttggcaggcagcagccccagctgtgctgaggcccctccctccttgccaggtgcagcggtgcctctgcagaggagcccaccagccatcggggagggggctcggggggctacctggagcacgtgttccggcacgcggcccgagagctctttggaatccatgtggctgaggttacctacaaacccctgaggtcagtgggatgggccagatctctgggcagagcggccacacagcccccagccttcctcgggctgctgcctcccctggggtcctcccacagaggtgggctgggtggagggcagcctgcagggtttggaggggaccctggggccaggcagggccctcctggcgggctcagggtgtgaaggcacctaagcactccaggcctcagtcggcccattgtgggggatggtgaccctgagcccgagaggccagcatgggcaaaggtgatgggtgcctggcgcaggcacgcgaccacatcccaggagggagggccagggcctcacagacatccctggggagggaggcctgtttcacagacagcccgaggctggaggtgaggtcccctgctggactcaaggaagtgagccttccaccctctctctccgttcttgtccttccctctgcccaggagagagggagagagccctgggaggtacccggtcatcccctgaagcccagcaggcctccccttccaggcaggcaggagcctggtgggtgtgccatgtagacaaaccccgcctgtgccccccaggaacaaagacttccaggaggtgacactggagaaggagggccaggtgctgctgcacttcgcaatggcgtacggcttccgcaacatccagaacctggtgcagaggctcaaacgagggcgctgcccctaccactacgtggaggtcatggcctgcccctcaggctgcctgaacggcgggggccagctccaggccccagacaggcccagcagagagctcctccagcacgtggagagactgtacggcatggtccgggctgaggcgcccgaggacgcgcctggggttcaggagctgtacacacactggctgcagggcacggactcggagtgtgcaggtcgcttgctgcatacgcagtaccacgccgtggagaaggccagcactggcctgggcatccggtggtaggggctgcaggaccaggactcccaggaggccgtgtccatgtgtgacagcagaaccacatgccccaagaccccagggcttcccccaaaattctgagtgagctgcagggtgtgctgggacccgagtaggagctaggactagccaggacccgcagccgcctcgtcacctccagttgggtgcctctgggttcccactggctctgcccaggtggggtggggtggcccaggcagcagaaggttccctgaggtcccagagcctgttccgttggccctgggccgaggcccacaggtgctgcccttgctgctgctggtcgggcacccaagtgcgtgaggggcttcagcctgtcccggggttgcctgaggcagagcaagacgggttctcacccctgacttctggaggcttcccttgaagctctgtgcaaaaggtgggagacagagctggacctgcaggggtggtcccgccacaaccctgcgtgtggaccctggcaggggggggtgccaggcccctggaaagcaggggttaccgttacgaggctgtggtccggggcaagccaagtacgaagcagcagccatcgcgggctgcatcatcccccagccaggtccccaccaggcctgtctcccagcgtttgtctaataaacgcacccctcct

SEQ ID NO: 1846 - DNA, 3690 bp, Homo sapiens
attcttcttcttttctcccctttgttagcttggctttatgtcacactggccagaacagggtaaaatttttttagcttctctgccttagggagagcctgtctttattgattaaaagtgagatgatatatccagtccttgggatcgtgtttctatcccacctagactaggggagccgcaggtaccactgctctggaggctgcctctcctgcccacgctgagtagtgaggctgcagggccagctgtgggagcctgcaggaaggggtgtaaatgcccggtaagtacgagctccaggacagagccgtacccactgggggccgctgcctggaaaacagccttcctggtgagacaagaggctctttagagagccgaaatcacgccctcctgggcaggcggtttcaccaacatgtgccttgggaggggtggattctgccagtcgtgggtgtggtgctgacacccgcatggtggcccctccggtccctgatactctgacctacctctatggtcataagctggacatgaagacctatggtagttccacaggcctttgctgcagagacggtcctcactcagctgcagacaagacggtggccaccgtgacatgtggggtcacgtccgtgacttggccacctggtgcgagggacccacagcaaagcagaactgctggccggggtaggcctgcatcgcgtgcggggacagcagccactggcctttaccttacatcttgacgtccaagccagctccggagtttgcagtgaaaactcccagtcctgctggagactccttagttcagcttagcacagaacctcggaagacagcagttctattccgggtacttccttcagagctgagttacagtgcagggaagggagcagaggagccatgaggtcggctgcagcttcctgtgagtccgagcctcagcctcccactcgagctgaggggcgtgtcctggccatctctctcctaggcttctccctgtgttccccagtgctgtggtggtcttgcagaggctggccctggctcattcccaggacttccttgggccccgcacttgacccctgttgggtgaatgccattagggtccggccatcgctggcttcactctcctttagcaccttgtagatgtccatgcacacttccaccctcgcgccccacacgcgacgcagccctaccctggccagcagctgtgctttgctgcgggttccttgctgtagcagggacaggacccccaccccctgtcccgtctggccaccgacttcagcagaggctcggctgccgtgagggataccagtcatgggaaaactggcctccctgcagattcacagagcaaggtggttctcacagagaagtcagtggcttttttctacgttaatgctgtagcaaacgccaccttttctttcaccaccaatttatatttcttaacacccatggagcaaagtgtggtgatgtttgaactgtagcctggggctctcgctcccatgggactcctcggggaatttcccagcagcaggatcgcctctgtgtccttgcagggggtggcgtctgctgggggcacatcccatcgtgcagggggaacggctgaggtcacaggctttgcctgacaagtgccactcacggctgctgtccacgtgccagccctgggacacagccctctgccatccttccacccactcggaggccagggaggcacctccgtgccacactgcaggcaggcagggccgcgcttgggatctgccgccttcttgtcagtgctgctttgactaattgcctgaggcacggccggagtgacttgctatttttagaagctaattcaggcttcagatgccatctaggtaatgaggagagagttcaggaaagctgtatctaagctccagcaaaggcggcctcttccgtaccagctgtcgctgcgtttacactgagacgagcacacagtcgggggcgtggctcaggtgtcagggctgcgctgttccacagccccctggggcagcctggcgggaccagaactcagacacgcctgggcacaaatcagcctcttgggagagctgctttgcccgcagaattcttttgccattaagcggttgatgtcattctttgaatgagtgacagtaattccccacctcagggtgggctgcgggggagattcagttggaaaagtaacccatgaggttttgtgcctctgggggtcctgaggccccacccgtgcctgggattctctaagacaaaggacaagtcttaaagccttacagcatcttaagtcttagatcacatttagagagacctggtacaggtggaacagtgcaaccctcagaattctgcactggcccttcaagaaggcagttgtgggctctttggacccttgacggggatctgtcctctgtcctcctaagcacaaagatgggaattcttcccattgcctgtttctctccccatctcggcttctacacaatgcaaagtggcccgctaactagagtccgtgttcagttttgaatacatcaaccaattattttgggaagaaaagaatctgccaaagaaactggaaatacagtttggaatcatttaatcaagcctgcatttattaatcaaagtgcacttttagatttcatccgaagtgctcaagtgaacatttcccaatgggtgttaaacttgggtgcacagactctcacgtggctcttagtctcaagtccacacccccacttcatgctcttactcttggctgagtcccatggaggcccgttagggaatcctgcaggatcagccgttgaccaggacggacggacggacggctggctggggaataccatgcttatgtcattcagagacaagcatttcttgagcgcctgctgtcggggcttagccgggtgctgctgatggtgcactggtgtaagcccagcccacagttcctgtcctcatggaatttgcagcctagtgaggaagatcctcccaagtcaaataaccacaaggtaactgcagggagagacaccgggataatttctgtgaagagaggacatggggtggctccgagagcccctgacagagggaactttgtggtcctagaaaccaggtggtgttttcctgaggaaatgacattttcctctggatcagagctgaggaaggtgcctctgtgtgtcccgtggccgctgtgacactgaccacacacctggggctggaaaataatactcactctcccacagctctggagcgcaggagccatgggctgaggccagagtgtttgctccaggagcgtccctcgtggcccgttcaggtgcccagagttgcgggccttgcacgccttgtacgccttgttccctggcgcctcctccttccatgtgggtgtgcagcatcccgctccagggccttcagcctctgcgcccctcatctgctgatgcaggtgatggcatttagggcccacctgggtactcctaggattcacctttatcaccgcatgagggagcattcccaggttccagggattagggataggactgggattcctttgggggctgctctcccgcccaccactgtgccggaatgtgatgcacacagcggccagcatatccaaaggccccaggaggacctggggtggctggaacaggacctggtgccgggagcaggcggggccggggattcccgacaaaggcttgatgtgtacttgaagtgagcaaagggttttgaataaaccaagaactggatcag

SEQ ID NO: 1847 - DNA, 2874 bp, Homo sapiens
atttttggtgagctgggagactttctttccatttcttcttttctttgttttcccatgttgctttctgtaagcacgtttttcttttatgctgggaaaaaagccaataattttttgttgttgggggatggagtttcgcactgtggcccaggctggagtgcaatgtcacgatcttggctcactgcagcctccacctcccggattcaaaccattctcctgcctcagcagcctccacctcccgggttcaaacgattcttctgcctcagcagcttccacctcccgggttcaaacaattctcctgcctcagcctcctgagtagctgggattacgggcacctgccaccacactcagctaatttttgtatttttagtacagacagggttttgccgtgttgtccaggctggtctcgaactcgtgacctcaggtgatccacccacctcagcctcccaaagtgctgggattacaggtgtgagccactgtgcccggccaaagacgactttttaaaccttctgaaagtcagcttaaccagagagctgtgtgctccgcaggctgcctgggtccttcttggccacgaaagatcagtggttgctattacagctgttctgcccgagcagccctgattcttgccctggcagccggagcctctgctcactctgccttccttgctcacttctagagagtccgttttacgtcctcatcgagacttcaggctccaacgcaggccatgacgctgagaagctgggccacttcctggagcacgcgctgggctccggcctggtgaccgatgggaccatggccaccgaccagaggaaagtcaaggtgccctgtgtcctgcttgcaggtccccgctctctgtccgtccagtccagccttgtcttgggatgcctggaacggtcattggtgcagcctagacagtgtgggatgtggctgaaatgtgactgggtttcatggctttgagagagtagcctctttggatggaaaatgtattcctggtgtctaggccattttcattaatatttaaaaagtacttcctccccaccatgaccctccccaaccccatgctgtgggatgagcaaggggactgccccattgctggtcccctgcagcctgtggttaagcggccagtcagcggcagctccgcatagagtcgtgtggaaggagtggaggcaggaggagcccctggggctgtggaggcttagcctggacctcgggagtcctaggatgggcagttttccttccctaggaggaaggggcgttgactgtgtgaccagatgatttggccttttgaggccaaaggaaggaggggcaaggcctgggcagggggagccctcggtcaccgtcaccggggcctgggcagggggagccctcggtcaccgtcaccggggcctgggcagggggagccctcggtcaccgtcaccggggcctggatagtgggagccattggtcactgttaccgggacctgggtgggaggagccctcagttaccttcaccggggcctgggcagtgggaggcgcccttggtcaccgtcaccagggcctgagcagtgggcgcaggactttactcccgcttagttgatttcaggctcgtgttagcctgggtgttgcccttgccatcttcccccctcacctctgcctgccattcctgcctcagcctcccaaagctctgggaatacaggcgtgagccactgcgcccggccaagtgtttctcttagaatttcctgaaatgatagggtctctggaggggcaggtgctgggcttgagccctgggtaggaccctgcaggggagaggtggtcctgcagcccacagaggatggctctgtcctgttcctcatggtgcagatctccacaatggaagttcgaagcaagcaaaagccacgcaaaccacaggccgatctgtctgagccctaggatttggcccggttctgcttcagccaccagcaccgtctgctcctcctcagaatccttcctcccccgtggcccgcccgccgtgtccctcctcctccacggcccgcccaccgtgtccttccctcccccgtggcccacccaccatgtccttccctcccctgtggcccacccgccatgtccctgcctcccacccgacatgccccttgagctgcctgggccctgctgttgtccccactgcctgtgtgactctgcgcccccttccctaccctgccccaccctggttcagggagcgtccaggcccattctcatcctcagggccttccctggcccttgccactctgtgccgtgtcatgacctgaagctgcaggtgggcgcctcccccttccgtcatggctgtcccccttctgtgaggtgtcccagccgcctgattgccggagtcccagggtgctcggtgctgtcgtggagcctgggacattcactgtctgggattgattccagggttggagccacacctggtctggggcattcgctgtcctgggtcagagcccctcctggtctgggacattcgctgtctggggttggagccacacctggtctggggcatttgctgtccggggtcggagcctcacctggtgaagatacagaacatgctgctgccctaaccccgtgtggtgtgccccctgtccccgggtgtcgttcccatagccagcccttgtctcatctcgtctcatcctctagatgctgtgggccctgagggaagacagttatcagggcaagctgtgctctgagtttcgggttctgctcctacaaagaacgtgcggtgctgcgggcgagggccccggcacggacaagggccactgcagagtgtgtttctgctcgtcagctgccctgggcagcggatgggctgggcgatgcagctggatgcacatctcattctgtcatgaatgtccagtaaaaatctgaattggttgc

SEQ ID NO: 1848 - DNA, 2645 bp, Homo sapiens
ctcatttacttatattaaacaagattaacctcattcaaaacatactgcagtttataaattcacataaatacagaaactgatgcaattaaacaacttcaggatcttattttttcaattcttagattataatttttttctgcaggctataattacctgctccagtcaccaatgattattgttcaatttaactacatcaattataaacctcttatatccttaaagaaaattttaagtgaaaattacaatttcttaccaaaaggtttagagttttccaaatttcaaatatttccttccccctcccccatttccagtcagacatttcaaataaactaaaaataaccacatctcacctgcaacattcaataatagcaatcacttgatgtataaaattttaactatgctcccagttattttaagacacaaaaaagtggctgcctaccaatctgtcttcacaagttagaaatactacattgaagatataacatgggctgggcgcggtggctcatgcctgtaatcccagcactttgggaggctgaggcgggcggatcacgaggtcaggagatcgagaccatcctggataacatggtgaaaccccgtgtctgctaaaaatacaaaaaattagccgggcgtggtggcgggcccctgtagtcccaactacttgggaggctgaggcaggagaatggcgtgaacccgggaggcagagcttgcagtgagtggagatcgcgccactgcactccagcctgggcaacagagcgagactccatctcaaaaaaaaaaaaaaaaaaaaaaaaaagatttaacatgagggtttcaagtttcctccggtttaggcatttatacctttgtgcttgttttgtttcaggatgttactatagcattgatgttggataacccatatttatataccttaaaatgcaatcatttaaaacactaaggattacatttatggtggaactttgggaattttagaaagcaaccagtgttcttagatgtgtttattagccttatttctagaactatttctactaaagtgaaactgagaacttcgtactttagttgcatcttgaaatcaaaaatccctctgcaccaacaggagcctacatgagaataaccttttgcatctgctttaagtaaaatgtttgtcaagagttttactttaaatagttcattttttttatagtcttacacttctcatacgtctttggtaaaagctccattatacaatatggccaaagcgtgaaggaccaatactgtccaactataccaagatgtcccgcttaattttagttttcagacacactcataaacaaaacccactccaccttttcctgtatactgcctttgcagtctacatttcttaaattccctatttaattccttgaggatcactaaaattattccttaaggctatataggagccagatgctgctttacaattctgcatcaagcattaacatttggttcaaaatattatcatagtggttgcaatccagttactggtcctagccagctaaccaagtaatcttgttaggatctagatatcatcagcgagcacactgcttacacatgaagaaaaattaagtttacattcattgtaatctgtaggttctttgtcctcatcctccatccactttaatagtccatccctcaagtctacacatcattcattcatcatgcttccttccttaaaggagacagtgtactattgaaccaacagggtatcttttttattatttgcatgagttaatcctacaaacaaaattaaatacctttttttataaaacatatttttcagtgttctaattgatggaggtgtggatcacacatctataaaaaatgacttatagcttcagcttaatcagttgctataatgtgaaaacaggaatgtgtatttttttcaactaggtaaaaggtgcatataatttgaatggttacatgctttattaatgaacaaagtaaacctgttagtaatttttaaattactggtcttaggcgtttgtaacaaggtaaaagtatacattctagttttgcccaaaagtcacttaaaatatctacaaatatttaatctatgtgtggtgtaccccattattgctccaatttctgggaagagtgtttttttaaagtttaaaaaagaggaaaaacagcaaagtgactactttgcagtggaaaaaaaaagtgtgtccttcatgggttacactttcatatttttatgcagtgttaagttagctacgttatggggaacttgggttttattcctgctcgtgcatgatgtatgtttcagaacttatttgctgacatttcagagaacttcttacattacctgtttaacatactgaggtgcaactggaacatattacaatgatattactcatcatttgccactgtgggctaagtttactatactggtcttagatataaaaggtcacatttgaaattactaagttagaactcataagaaaggggggaaaggccttaaatataaaagacaaatgacagtttgattaagcaataattttcagtttactagatgaaacagacttgcaacatagtctgcatgaatgcaaaataagccatctacagcaagtgataaggaaactggacaaaaaaggaaaaaagcatacacaggaaaatgaaagattctctcg

SEQ ID NO: 1849 - DNA, 3009 bp, Homo sapiens
aaccgaaaggcccagtcacatgggagaaatcatgagtaggggaattattaattcctctgggagagtgctctcaaggcgggggaaatggcttagcctgcagcagttggggaccatcagtttctgtgctagaggcgtaatggacagattgcttttggatctctttcctcttgttcttgagttttaaaattttgtccttgtgtgtgtggtgcttgtgtctctgtcctgaggtttggggtgcttgtggctgagagtttctgtggaacctgatcagtgtttgtttgtcctctaacaggacagtgtcccaatgggctctcctgccttccttctctctctctttgtaagtattgaatggctgcaaggggtggtgttgccacaaagattctcagctcttaatgggggtgggtggcagagggaaatccaacatgcagactgtggcagtgtcttgaacttctgtttattcaggtcattgaataagaaactcttttcttctgcattcctgtctttctgcatgtgtgtgtgtgtgtgggctgggtagggactgtttttgagatcactgggctgaaatgtattctaggggtgaaggatctaggatgtacctgctcgtcatttcctgacttcaccttttaccaattcttttcttaacaaatttaaaattggtcagagcaggagctgctagctggctttttaacagtgtttctcataatggcagtactcagcaaatagtttttctcttgtctcctaaaattaagttgcaagactaatgtaacaaacagtaaaatttaagctaaagaactcagtataggctgggtgtggtggtttacgtctataattccaacactttgggaggctgaggtggaaggattgcttgagcccaggagtttgagaccagcctgggcaacgtagggagaccctgtctctacaaaatttaaaaacggcaacaacaacaaaaaaccctactagctgtgcagcggagtggtgcgcacctgtggtccctaactacaagctactcagaaggcaaggtaggagcatcactggggcccaggaggtcaaggctgcactgttcataccattgcactccagcctgggtgacagagcgagaccttgtctcaaaagaaaaaaaaaaacaatctcagtaataatgaccactgtggctgggtgtggtggctcacacctgtagtcccagcactttgggaggctgaggtgggcagatcacctgaggtcgggagttcgagaccagcctgaccaacatgtaaaaaccccgtctctactaaaaaaaaaaaaaaaaaattagccgggtgtggtggcatacgcctgtaatcccagctactcgggaggctaaggcaggagaatcgcttgaacccaggaggcggaggttgccgtgagctgagattgcaccattgcactccagcctgggcaacaagagtgaaactctgtctcaaacaaaaaaaaagaaaaaaaaaagtgaccactgcatcaatagtggctgctggaattacagataagcttaggagagctagcctaaagacttttattactttcctccataaattaactggctctgactctgtgttgttcattatgggacagtgaggtctgatgtaatggaagggcatcaggctagaaaactacatggtcttaaggtcattggataatctcttggggcattgttttccttggtgtgtgatgaagctaatataatgaggtacttgtccagcctacctcacagggatgttgtgaggataaaatgagataatagatatgaaactggcttggaaaaaaaagaaaagcattatacacatgcaaggttaccacctttttattttcactgttgcctcatgggcaacttatgttcatggactctaaaaattttagagtccttgcatattagaaatgtaaaaatggcctggcccagcaaaggtttcagtaattcatcttgcctacaggctgtaccacagacagaacattataatctccgttctttcttattggcctacaacagtgactctggatcccccaagcaaagcatttggctggctattgcaaggctggttaatgggatcttttatctattgaagacagcaaaatattgcacaagaggaaggagctgggctgcagggagagagcagcagatggaaagaagccttctaattgtcctgatctcatggaaaaccactgtcaggaggtgctagggaactagtgccagggtcagtctgcaggaaaggcctttcttatagggaccaacagttggacaggtatgttagtcaagaacctcactacccattgcccattctgactctcctacctttcttttactctcctgctcctttgcacatgatttgggcctgggtgggatgactaatagttattctgtgggaccctaggtgaattccaaggacctctgtagtgggcatgagcaagatattccatcctacatttcctctcacaaactaccaggtgttctttagccactctgtgggaagacagaaatatgcccctcatccctctggatttttctgctgattctcttccctctcccccaagaaaccaaatccccaacttttctgttgcaccgtctcttgtctcctgaccaactcatgctccctttctttctctgcctgtcatctaggatggaggaaccaggggacgccgctgtgccattgaagcagatatgaagatgaaaaagtgaagcctcagagttaccctctttgagccgaacctaaaataaaagtaaacaagatagagcttgggcttgcgggcccagttccagaggtggaagttacagaagaggaggtacctgggccacacgacatgagctggaaaatctctcttagagagttggagtagcacaattgcctgttttagggcagaaaccatgggctatgttaatgtcctaatgtgtagctagcagatcgtagctagtttgtattgtcttgtcaattgtacagactttttaaaaaaaacaaccaccagtgaaatgtgtgtgtatacaataaactgaaaaaaaaaact

SEQ ID NO: 1850 - DNA, 2089 bp, Homo sapiens
ttgcttccaaaggatcagggtaagccacataagtgttgcatttatcgtgtagatctttgctaatattgtggattatgtcttgtgacttttacctttacccaacttgaacatgtaactttctcccataaaatacagtgaaggataattttgtaatgtaagtgacttatataaacaagccattattctaagatacagatgctttgttcctatgacttcccatctcccctgccttgcctgactcataaggcttttaattctcacagccttctccctcttcaacccgttttaacaccacagatactggctggctctcagccccatatgcaggctcaggccatccttactttcctccacccatgttatatctcaccctatttctgaacatctgcataggttaaatggcctccagccctgcctgtagaatcatgcattgattataatcatgccaaaattataactgaatacatgtcatggatcttcagggttactcaagtggcttaaacttcaagtgtttcatctacagttgttaagagatcacggtccttaatgaatgaatacatggtgtcacggaaagattttgttccaaatctcttttgaagaaaacactaaggaatggcaggaggggcaagaaaatgccatggggatataagtaagacctgagttttgtgttagcatgtaggttaaagcatgtgggtgtacattaccttatagttctgtaatgcttagactcaggaaagcagatggtgcttctgaaaagaacaccaggttgcttattctttgggtttggccacagggatcaccctgagaaagctggtacggggcgccaccctggacatcgtggatggcatggctcagctcatggaagtactttccgtcactccaactcagaggtagtgatgccacagtttaggttaccagttattggggttccttgcctcagaggggaaaagctcattttaacagcaaagttactgacagctgagagtaatgaccagcaggaagaagctttttaggagacaggaacctaggttattaatatatccttactgatttctttccccagccctgagaacaatgaccttatttcctacaacagtgtctgggttgcgtgccagcagatgcctcagataccaagagataacaaagctgcagctcttttgatgctgaccaagaatgtggattttgtgaaggatgcacatgaagaaatggagcaggctgtggaagaatgtgacccttactctggcctcttgaatgatactgaggagaacaactctgacaaccacaatcatgaggatgatgtgttggggtttcccagcaatcaggacttgtattggtcagaggacgatcaagagctcataatcccatgccttgcgctggtgagagcatccaaagcctgcctgaagaaaattcggatgttagtggcagagaatgggaagaaggatcaggtggcacagctggatgacattgtggatatttctgatgaaatcagccctagtgtggatgatttggctctgagcatatatccacctatgtgtcacctgaccgtgcgaatcaatgtaagtactggctttgagggaatagctacagaacaaatgggcagaatttcactaatcactagtatttcctgtaagctatagggtacatatttattagtcacatttggatggaagtacaacagtaatgtcacagttcttgcatgcgtttggggttgataaatattcactgaagttgaattataatagccatgagctttggtagttctctcttccataatcacctgggtaatcattcagaaaagcccaaaggccttagaaaatgatgctttaaggctgggcgcggtagctcacacctgtaatcccagcactccaggaggcggaggtcaggagttgagaccagcctggccaacatggcgaaaccttgtctctactaagaatacaaaaattagccgggcatcatgcacctataatcccagctacttgggaggcttaagcaggagaatcgcttgaagccgggaagtggaggttgcagtgagccgacatcgcgccactgcactccagcctgagcaacagagcaagactctgtctcaaag

SEQ ID NO: 1851 - DNA, 2908 bp, Homo sapiens
aagtgactgtaggtttagatgaatggaaaatgaacttgccagttcacagctatgtccttcccaatttaggaggttaagggcaggaaaaacatgagaaactcttttgagaagctgcacaagctgacatggaggatcaaggatttcaaaagctttgaatataaagaggtgtcagacttacatcagagcctgagacttgacatgcctatttttgcactcgctcatttttcaaatttcataggcattgctccctccaaatcaccgctcttctaattttatcctggagtgtgcatcccagaagacataagctgacacaattgggaactgaagttgcttgaaaaagctggtgggatcagcatcatatatcactatttctcaaagattatctggtctcttgatggcaaatctacaatattgaaacctttgaaagagaaattgtgttttgtgagttacatgactaccgtttgcatccaaggtctcctctgtagtcaagagaagaatgcagaaactacatgtccaagaatctctttccagactctagacagcttatacgtatttggacaaggcaacgtgatgaagaaataatataattgtaggatcacctctgtccagtagctgttatccaacatctgcatacttagatttctggagagatatccatgaatgaccatgaaagtacagcaagtgattttcaagctgcaaacaaattttagcaagcaaatggaagaagaaagaggagagtggtggtgtgtgctttccctttaatggcagaacccaacagtcgtacacaccacttctaccctcttaagatgggtcagaatccaggcccaattccatgtatacatggaagagaggcttattaaagtagccttcagttgctggacagagttccatccaaaactacagttaataggtaagtcgagaacttacattaagtgataaatggcagtctctgccaaggaaaatattcttatccatgctcatggataagaagaatcaatatcatgaaaatggccatactgccaaaagtaatttatagattcaatgctatttccatcaagctaccattgactttcttcacagaattagaaaaaactactttaaatttcatacggaaccaaaaaagagcctgcatagccaagacaatcctcagcaaaaagaacaaagctggaggcagcatgctacctgacttcaaactacactacaaagctacagtaaccaaaacagcttggtgctggtaccaaaacagatacatagaccaagggaacagaacagaggcctaagaaataacaccacacatctacaaccattgaaactttgactaaccagacaaaaacaagccatggggaaaggattccctatttaatacatgctgatggaaaaactagctagccgtctgcagaaaactgaaactggaccttatacaaaaattaacttacatcttatacaaaaattaactcaagatagatcaaagatttaagtgtaagacctaaaaccaaaaaaccctagaagaaaacctaggcaataccattcaggacataggcattgccaaaaaccttatgatgaaaataccaaaaggaatggcaacaaaagccaaaattgacaaatgggatctaattaaactaaagagcttctgcacagcaaaagaaactaccatcagagtgaacaggcaacctacaaaatgggagaaaaattttgaaatctatctttctgacaaagggctaatatccagaatctataaggaacttaaacaaatttacaagaaaaaaacaaacaactccatcagaaattgggcaaaggatatgaacagacacatctcaaaagaagacatttatgcagccaccaaacacatgagaaaaagctcaacatcactggtcattagagaaatgcaaatcaaaaccacaatgagacaccatctcacatcagttaaaatggcgatcattaaaaagtcaggaaacaacagattctggagagaatgtggagaaatagaaatggttttacactgttggtgggagtgtaaattagttcaaccattgtggaagacagtgtggtgattcctcaaaaatctagaactagaaataacatttgaccctgaaatcacattactgggtatatacccaaagattataaatcattctactataaagacacatgcacacgtatctttattgcagcactattcacaatagcaaagatttagaaacaacccaagtgcccatcaatgatagactggactaagaaaatgtggcacatgtacaccatgggatactatgcagccataaaaagaatgagtttatgtcctttgcagggacatggatgaagctggaaaccatcattctcagcaaactaacacaggaacagaaaaccaaacaccgcatgttgtcactcataagtgggagttgaacaatgagaatatatgggcacagggaggggaacatcacacactggggcctgtctgggggttgggggcaatggaaaggatagcattaggtgaaatacgtaatgtagatggtgggttgatgggtgcagaaaaccaccatggcacatgtacacctatgtaacaaatctgcacgttctgcacatgtatcttagaacttaagcataacaaaaaaatatatttctgggcagaggaaaaatactttgaaatttacatttaatccagtaaaatttcagtgcattaaattaaagcttgtaatataataatgataataacagacagcatttaaagagcacctcttgtggataatcaagttattgagaaattatgtgtgttatctctgggataaagattgctgcatccttatattcttgtgtataaacagaccctgtatatgtaaaaaaaggaaagagaaaagtatttttaaatgcactaatttgtaattaccacataaactattactcatggaagatt

SEQ ID NO: 1852 - DNA, 1968 bp, Homo sapiens
gttcccaagttcaagcaattttcatgccgcagcctcctagctgggattacaggtatgcaccacctcgcctcacaaattctaatttttgtatttttagtagagacaggtttcaccatgttggccaggctggtcttgaactcccgacctcaggtgatccaccaaccttggcctcccaaagtgctgggattacaagcgtgagccactgcaccccgccaactatcattttttctctaatttcatttaattccttttgtttatatgatttgcttttctcatttttatcatccatattggttaatatatttttcatagtgtccacttttatttgtcctctttttagcttcatattcacttctgtgatggttattttacctgttttttggagatggtgtctcaatatgtttcctaggttggatctgaacgcctaggctcaagtgatcctcctgcctcagcctcctgagtagttggcattataggcatgtgccaccatgcccagtgtgatagttatgtgttttccttctacatccttttttttttttttttccttctgagacagggtcccactctgttgccgaagctggagtgcagtggcacgaacatgtctcactgcagcctcaacctcctgggctcaagctttcctcctgcctcagcctcctgtgtagctgggaccacaagcactcgtcaccacacctggataattttttgatgttttgtagagacggtgcttcagtttgttgcctgtgctggtcttgaactcctggcctcaggcggtccttctgctttggcctcccagattgctgggattacaggtgtgagtcactgtgcccggctcccttctgcttctttcctggattttgtcagttttgtcttgccttattttgtcatgttttccatgaatctctatatttgtatttttgtttgtccttcttggaaataattcattaagttttttttcagacagattttttttttttttttttggggcggagtctcgctctgtcgcccaggctggagtgtagggatcttggctcactgtaaacctccgcctcccggattcaagcgattctcctgcttcagcctcccaagtagctgggattacgggtgcacgacaccacaccctgctaatttttgtagttttggtagaggcgaggtttcgccctgttggccaggctggtctcgaactcctgacctcaggtgatccaccagcctcggccacccaaagtgctgggattacaggcatgagccactgcgcccggtccagatctttttttttttgagacagagtctcgctctgttgcccaggctggagtgccagtggcacagtctcagctgactgcaacctctgcctcccagttcaggcagttctcctgcctcagcctcacgaatagctgggattgcaggcatgcactaccacaccgggctaatttttgtatttttattagagacagggttttgccatgttgccccagctggtcttgaactcctggtctcaagtgatctgcccacctcggcctcccaaagtgctgggattacaagtgtgagccaccgtgcccggcgcactcacacgtttctaatgtctctccatgtccaaattttctcttcttacaaggacaccggtcacattagattagggctcactctgaacacctcattttaacataatcgcctctttaaagaccttgtctccaggccggactaggtggctcatgcctgtaatcccagcacttcgggaggcctaggcgggcagatcacaaggtcaggagatcgagaccatcctggccaacatggtgaaaccccgtctctgctaaagatacaaaaattagctgggcatggtggcgggcacctgtggtcccagctatttgggaggctgaggcagaagaatcgcttggacctgggaggcggaggttgcagtgagctgagattgtgccactgcactccagcctgggccacagagcgagattctgtctc

SEQ ID NO: 1853 - DNA, 2138 bp, Homo sapiens
aatcaacaaagaaacaatggatttaaactataccttgaaacaaatggacttaacagatatatacagaacatttcatccaacaactgccgaatacacactctattcaacagtgcatggaactttctccaagatagaccatatgataggccataaaatgagcttcaataaatttaagaaaactgaaattatatcaagcactctctcagaccacagtgaaataaaactggaaatcaactccagaaggaaccttcaaaaccacgcaaatacacgaaaattaaataacctgctcctgaatgagcattgggtcaaaaatgaaatcaagatggaaatttaaaaattcttcgaactgaatgacagtaatgacacaacctatcgaacctctgggatacagcaaaggtggtgctaagaggaaagttcacagccctaaacacctacaacaaaaatctgaaagagtgcaaacagacaatctaaggtcacacctcaaggaactagagaaacaagaacaaactgaaccgaaatccatcagtagaaaggaaatagccaagatcagagcacaatacaattgaaacaacaacaacaaaaatgcaaaagataaatgaaacaaaaactagttctttgaaaaggtaaataaaattgaaagaccattagtgagattaaccaagaaaagaagagagaaaatccaaataacctaattaagaaatgaaatgggagatattacaactgacaccacagaaatacagaagatcattcaaggctattgtgaacccctttatgcacataaactagaaaacctagaagagatggataaatttctggaaaaatacaacccacccagcttaaatcaggaaaaattagataccctaaacagaccaataagaagcagcgagattgaaatggcaatttaaaaattaccaacaagggctgagcgcagtggctcagtggctcatgcctgtaatcccagcactttgggaggctgaagccagtggatcatgaggtcaagagttcacgacccgcctggccaagacagtgaaaacccgtctctactaaaaatacaaaaatcagccaggtatggtggcaggcgcctataatcccagctacttgggaggctgaggtgggagatttgcttgagtctgggtggcagaggttgcagtgagcagagattgtgccattgcactccagcctgggtgacaaactgagactccgcctaaaaaaaaaataaataaataaaagaaaaattaccgacaaaacaaagtccaggcccagatggattaacagcagaattctaccagacattcaaaaaagaattggtaccaatcctattgacactatccacaagatagagaaagaaggaatcctccctaattcattctgtgaagccagcatcaccctaacaccaaaaccaggaaaggacataaccaaaaaagaaaactacagacctatatccttgctgaacatagatgccaaaatccttaaaaaaaaaaaaaaaaaaaaaactagctaaccaaattcaacaacatatcaaaaggataatccaccttgatcaagtgagtttcataccagggatgcagggatggtttaacatacacaagccgataaatgtgatacaccacataaacagaattaaaaacaaaaatcacatgatcatctcaattgatacaaaaaaaaattcaacaaaatccaacatccctttatgattaaaactcagcaaaattggcacacaagggacataccttaatgtaataaaaaccatctatgacaaacccacagccaacacaatactgaatggggaaaagatgaaagcattccctcttagaactagggcaaaacaagaatgcccactctcaccactcctcttcaatgtagtactggaagtcctagccaaagcaatcagacaagagaaagaaataaagggcatctaaatcagtaaagaggaagtcaaactgtcactgtttgctgatgatgactgtttaccttgaaaaccctaaggactcctctagaaagctcctagaactgataaaagaattcagcaaagtttccgaatacaagattaatgtacacaaatcagtagctcatctatacaccaacagcaaccaagcagagaatcaaatcaagaactcaaccccttttacaatagctgc

SEQ ID NO: 1854 - DNA, 2314 bp, Homo sapiens
taatttattttgtggattacagtaatgcttttgttggcctgttgtatgacaaactatttaaaggttcacattttgatttgtatttgccaacaagcccttttgcttgttaaagctatagctaactctcaggagataattgcagttctactcttagaggatggtgtctttcaaataatgtcttgtctgctgattttcagtaatgttaatataaggcaaaagggatattgtttactatacgtagcaatttttttagacagagtcttactctgtcgcccaggctggagtaccagtggcgggatcttggctcactgcaacctccgcttcccgggtttgagcaattctcctgccttagcctcccgagtagctgggactacaggcgcacggtactatgcccggctaattttgtatttttattagggacggggtttcactacattggccagactggtcttgaactcctgaccttgtgatctgtctgcctcggcctaccaaagtgctgagattacaggattttttttttttttaagtatgattatgtaccattgtatcatagtaaaactagccaaagaaatttatgaaaggatgaaaaaatgattctggccataaaaggtagtatattttggtgggttcttaagccagcatgataatggcgagtttttttcttctcaggaggaaaaaaagcaagagcagaagtcgtagtcatgaacgaaagagaagcaaaagtaaggaacggaagcgaagtagagacagagaaaggaaaaagagcaaaagccgtgaaagaaagcgaagtagaagcaaagagaggcgacggagccgctcaagaagtcgagatcgaagatttagaggccgctacagaagtccttactccggaccaaaatttaacagtgccatccgaggaaagattgggttgcctcatagcatcaaattaagcagacgacgttcccgaagcaaaagtccattcagaaaagacaagagccctgtgagagaacctattgataatttaactcctgaggaaagagatgcaaggacagtcttctgtatgcagctggcggcaagaattcgaccaagggatttggaagagtttttctctacagtaggaaaggttcgagatgtgaggatgatttctgacagaaattcaagacgttccaaaggaattgcttatgtggagttcgtcgatgttagctcagtgcctctagcaataggattaactggccaacgagttttaggcgtgccaatcatagtacaggcatcacaggcagaaaaaaacagagctgcagcaatggcaaacaatttacaaaagggaagtgctggacctatgaggctttatgtgggctcattacacttcaacataactgaagatatgcttcgtgggatctttgagccttttggaagaattgaaagtatccagctgatgatggacagtgaaactggtcgatccaagggatatggatttattacattttctgactcagaatgtgccaaaaaggctttggaacaacttaatggatttgaactagcaggaagaccaatgaaagttggtcatgttactgaacgtactgatgcttcgagtgctagttcatttttggacagtgatgaactggaaaggactggaattgatttgggaacaactggtcgtcttcagttaatggcaagacttgcagagggtacaggtttgcagattccgccagcagcacagcaagctctacagatgagtggctctttggcatttggtgctgtggcagaattctcttttgttatagatttgcaaacaagactttcccagcagactgaagcttcagctttagctgcagctgcctctgttcagccacttgcaacacaatgtttccaactctctaacatgtttaaccctcaaacagaagaagaagttggatgggataccgagattaaggatgatgtgattgaagaatgtaataaacatggaggagttattcatatttatgttgacaaaaattcagctcagggcaatgtgtatgtgaagtgcccatcaattgctgcagctattgctgctgtcaatgcattgcatggcaggtggtttgctggtaaaatgataacagcagcatatgtacctcttccaacttaccacaacctgtttcctgattctatgacagcaacacagctactggttccaagtagacgatgaaggaagatatagtcccttatgtatatagctttttttctttcttgagaattcatcttgagttatcttttatttagataaaaataaagaggcaaggatctactgtcatttgtatgcaatttcctgttaccttgaaaaaataaaaatgttaacagg

SEQ ID NO: 1855 - DNA, 2232 bp, Homo sapiens
tcacccatgtgctcagctctggactaagcactgtgaatgtggtttctgcggaggaagcatgcgggaacagccatcccctcccgactggaagagcacacagatgctggagtgagtgagcctgacctgggttcaagtctcacctctgctgctcatcatcggcaggcttgtaaaagttatttctcctctctgagcctccatttctttcatatagaatggggatctgtgttgcctgccatgagggttgttgtgaacatccaaaggaaattaagcaggagtacaatcactttggaaaactgtttggcagtgttgactgatgctgaacatgtgggtacctcaggacccagcagtcccactgcaggggacacactcagcagatatgtacccacgtgcaccaggaaatacctatgagaatgctgatgtgttatctatggacatcctacgacccagcatttccgctcagcacaaatgcatacgtatttgcaccatacgtgtcctctagacacatacgagaatgttctagcagcatgactcacatggcaccaaactggaagttcccagttgtggatcagcagaggaatagatggatagaggtggtgtatttctttttctttctttttttttttttttgagacagagtctcgctctgtctcccaggctggagtgcagtggcgcgatctgggatcactgcaagctccgcctcccaggttcacgccattctcctgccttagcctcctgagtagctgggactacaggcacctgccaccatgcctggctaattttttgtatttttagtagagacagggtttcaccgtagccaggatggtctcaatctcctgacctggtgatctgctcgcctcggcctcccaaagtgctgggattacagtcgtgagccaccgcacctggccgaggtggtgtgtttctataatagcacactacataacaacaaggttgaaaacatcaaccacacgtacagaatgggtggctctcacaaacactcggtggaaaaagccagacgcaggaggagattactgattgaccctatttatttaacttaaaaaatgggtgaaatcagtctatgctgttagaggtgaggacagtggttcttcccgagggcaggagggttcatgtatccttaaaggggtcacgggtcaggggctgatgggcggctgtcacattctgattcttcatctgggtgccagctctgcaggtgtattcactgtgaaaattcatcaagctgtgctttttgctctatgtatggtatgtttcaataaacagtttagttacaaaattaagtgcaataacgcatggaccaccatggttggcactgaatgtgtgcttaccgttattatttttattttctttttctcctcagcacctgaagtgacctggaatcagtgaagccaaagggactggcagtctgccctgcagggagtaccgacctatcccagttgtgtgaggctgcgagagaaagggagtgcatgtgcgcgcgtgcatgtgtgcgtgcgtgtgtgttcacgtgttctcgtgcgggcgcgtgagtggtcttcaaacgagggtcccgaaccccggggcggcaggaagggggccgactccacgctgtcctttgggatgatacttggatgcagctcttgggaccgtgttctgcagcccagccttcctgttggggtggggcctctcctactatgcaatttttcaagagctccttgaccctgctttttgcttcttgagttgtcttttgccattatggggactttggtttgacccaggggtcagccttaggaaggcctccaggaggaggccgagttccccttcagtaccacccctctctccccactttccctctcccggcaacatctttgggaatcaacagcatattgacacgttggagccgagcctgaacatgcccctcggccccagcacatggaaaacccccttccttgcctaaggtgtctgagtttctggctcttgaggcatttccagacttgaaattctcatcagtccattgctcttgagtctttgcagagaacctcagatcaggtgcacctgggagaaagactttgtccccacttacagatctatctcctcccttgggaagggcagggaatggggacggtgtatggaggggagggatctcctgcgcccttcattgccacacttggtgggaccatgaacatctttagtgtctgagcttctcaaattagctgcaataggaaaaaaacaaatcgggaaatg

SEQ ID NO: 1856 - DNA, 2054 bp, Homo sapiens
taatgagcaggctgcatcctgattaggttaaggtgggtggttgccatgcttggcgttggctctgtcccctgggataaaaggcgagaggcagccacatggacagctcctccagtggggtctcagactggagagacgccagcgggcgggggtcgttccctggagctcccgcatttgttatggtcgatgccccactacgttgtcaccttctccggaggacctcctgctctgtccttgacagatgggccccagtgggcccacccaggctggagatgaatctcaaagggactccatgcctgggagacctcagccaagcagggcagagaaataatcagacaacagtcagtgcatggcgcctgcagagttttgcacagggtccttcagaaggagggttagggaagacttcttgggggttagggcagttaagcaagatggataaagaaagcaaccacttatgtctgcatattttcttcatttcatcttcacaacagccctgagataggtacttgttttaaagctgaggtataaattggggttcagagagattgagtgctttcaacatgaacaaatgacagagagcaacgacttgaaccgggttacctgatgccaccgctggtcttaacctccatgttattagcgtattgggtaagtgaaaccgtgtgagccaagaagctggggtgagaaacagcacggaatagaggagagggctgcagaaaggcgtgatgtttctggagcaccgaattctactcacgaacacaggagtggaggcgggaaggggacactggaagctatggagggccttgtcagccacagtaaggaatgtggacctggtcctcagggtggtgaggggatggccccccatccagaggtttctcacaggggagtgattcggcctgtctctgccgcagtcaggaggaaggatgcagtgagagagggaaagtggagaggcggatggcggtgcagtctactccaggtcatgcttcttaccatctccctcattattcatccacagaaaatgattgctgttatatgacacactggttaacaaaggagggggctgtttgcaaacagaaacaaccaacccagggcctccagccatccaaagattctgcacagccagccacccctaaggctaagaaatcccaggtacatgcacaccagtcacagcatacctggactcagacaatgacagtggagaatgaggaacaagagctgggttcaaggaataattagcaagcaacgttggcattacgtagtgcagggacaaaggaggagggagatagcccgtgggattctggactaaattgggcaaatggtatgacatggttaggcttttgtgtccccgccccaatctcatcttgaattgtaatccccaagtgttgagggaaagacccggtgggagaggatcggatcatggggtggtttcccccacgctgttcttcggatagttagggagttctcatgagatctgatggttccataagcgtccgtcatttcctccactcacactctctcttgccaccttgtgaagaggtgcctgcttccccttccgctatgactgtaagtttccgaaacttccccagcaatgtagaactgtgagtcaatgaaacctcttttatttagaaattgcccagtcttgggcagttctttatagcagtgtgagaatagattaacacagtaaattggtaccaggagtgtgggacactaatacatggtagtttcctcattgctgtagggagcatggggacagggctcattccagggaaggtgatgagttcttttgggctgccctgtgtttgaagcaggtacagaagcctaacgggcagtggagcagggcagtggagtcaaacagaccgggtccatcttccagctccaccaacttagtagttccgttaccttttgcaaaaagcctgttcatttgtctgtaagacagggataagaataggttcatagaggctgaggtgggaggattgctagagcctgggaggcagaggttgcaatgagctgagatcatgccactgcgctccagcctgggtgacagagtgagaccctgtctt

SEQ ID NO: 1857 - DNA, 2297 bp, Homo sapiens
tttgggtgggataggggcataggcttgtgaagggcagtccggatccggaggaactcgtctttgtccctggtaggagagacacccccagtctatcctcgatgccgtcagccttggccatcttcacttgccgcccgaactcgcacccgtttcaggagcgtcatgtctacctggacgagcccatcaaaatcggccgctcagtggcccgctgtcgaccagcgcagaataatgccacttttgattgcaaagtgctatcaaggaaccacgctctcgtctggtttgatcacaagacgggcaagttttatcttcaagacactaaaagtagtaatggtacttttataaatagccagagattgagtcgaggctctgaagaaagtccaccatgtgaaattctttccggtgacattatccagtttggagtagacgtgacagagaatacacggaaagttacccatgggtgtattgtttccacaataaaactttttctaccagatggtatggaagcccggctccgctcagatgtcatccatgcaccattaccaagtcctgttgacaaagttgctgctaacactccaagtatgtactctcaggaactattccagctttctcagtatctacaggaggccttacatcgggaacaaatgttggaacagaagttagccacgcttcagcggctactagccatcacccaagaggcttcagataccagttggcaggctttaatagatgaagatagactcttatcacggttagaagttatgggaaaccaattacaggcatgctccaaaaatcaaacagaagatagtttacgaaaggaacttatagcattacaagaggataaacataactatgagacaacagccaaagagtccctgaggcgggttcttcaggagaaaattgaagtggttagaaaactttcagaagttgagcgaagtctgagtaatactgaagatgaatgtacccatctgaaagaaatgaatgaaaggactcaggaagaattaagagaattagccaacaaatataatggagcagttaatgagattaaagatttatctgataaattaaaggtagcagagggaaaacaagaggaaatccaacagaagggacaggctgagaaaaaagaattacaacataaaatagatgaaatggaagaaaaagaacaggagctccaggcaaaaatagaagctttgcaagctgataatgatttcaccaatgaaaggctaacagctttacaagtacggttagaacatcttcaggagaaaactcttaaagaatgcagcagcttggggatacaagttgatgacttcttacctaaaataaatgggagcacagaaaaagagaagctgatcgtcgaagggcatctaaccaaagcggtagaagaaacaaagctttcaaaagaaaatcagacaagagcaaaagaatctgatttttcagatactctgagtccaagcaaggaaaaaagcagtgacgacactacagacgcccaaatggatgagcaagacctaaatgagcctcttgccaaagtgtcccttttaaaaggtactttaacatgtttttatgacatcgtaaaccagggtatcaaatcaccctttgccataaaatctgttctagatattatgtgaagttttaatttttagttaagagattaagataggttctgtaaagtagcagggactaaaaatttaaagttttggtgtttatacccaatatttcaaactattgttgaataatttggatcagtcaagattacgagggacaaagtgttaagtggtagaatatgaaatgcagctgtgttttttgtttacccttgtgtctctaataggaatttattagcgcttttaacataattagaataaggtgaaaatcttaactttcttgaaagactcaccggtttactctgttatcatatggtagcagttgtaaatttccttattttctggtcttcttcatcttctaataaatatccccaggttcttatgacactcttctagaaattttgggctaagaaactttaggtggatggccgggcgtggtggctcacgcctgtggtctcagcactttgggaggctgaggcaggtggatcatctgaggtcgggagtttgagaccagcctggccggcatggagaaaccctgtctctactaaaaatacaagattagccgggtgtggtggcgcgtgcctgtggtctcagctactcgggaggctgaggcgggggaattgcttgaatgcaggaggcagaggttgtggtaagaggtcatgccattgcactccagcctgggcaataagagcgaaactccatctc

SEQ ID NO: 1858 - DNA, 3706 bp, Homo sapiens
ctcgcatgccatatccctccgtgtcccatcctgccctgtctgaccccatcagccccactcacttcctcacctccacgctcttgccagcttgtgcctcatagccagctcttttcattgccttctggggataggaagaggaaagataacgctgaaggcagttccctggcaatgctgggaggttggaatagaccagagcgtcccacaccttattgtggaatcacttgggagcttgtcaaaaattcctgagcccctccccacacctaatgttatcagtcaggatgagaatttggctgtgtgtgacagaaagctccaaatgacagcgtcttgagaggttggcaggggcccaggccccttctttcttgctgctgtgcagtccctaagatgttgccttcatctacatggtccagaatggctcacctccatgtccacattccaggcaagggcaagggaacgatgggatgctggagatggccacagattcccgctcacaacccagcacccagaacgaaaacctgagattccgagcccaggcatataagatgcaagactgagagtccacagtgctataacattgaaattaaaagtcagtggtacccggttcaaaagagctgactccaagatcccagacactcatatcctcaagactctataaatctctgattctgaaacgtgaaggtgccacagagcctgtgatgcagtgattccagaccatctgggtttcactctaggaaggcttcttgaaggagcaaacatctgtccttctcctgcccagagctgccaggtcacaaggacagaaccaagactcttgatacctctctaagtagcaggagggacagctggggctgggggctggggggttgtagggcactagagtttctgtccccaggctagattaaggcgaaggctctgctggattgggatatgaacctggaatttgatgggaaatgctaagccctctctgcctccggagttgtcctcccaccctattcagcctacccaggccccgggaaatccagcctcttctccaggctcctaaatgatgaggttgagccttcacccctccccaccaccgcctctgcttgcagattcccagcggcatcgggtcacagatgaggaggtccagcaaagcaggttccagatgccacccttggaggaaggtgagtcaggatgggaaggggtgtgaatggcagtcccacctccagagagtagctcagctcagcttgagaccttccagcaggaacctccctcaatgagtctttcctgactttcacaaatcctataggcagtaagtgctttttgaagtctgacttaaagccctcttgctgcactgcttctttcgtcaccattctccctttcctgccttaggacttgaagagttgcatgcctcccacatcccaactgccaaccctggacactgcattacagacccgccatccctgggccctcagtatcacccgaggagcaacagtgagtcgagcacctcttcaggggagggttactgcaatagtcccaaaagcaagctgcctccatggaacccccaggtgttttcttcagagaggagttccttcctggagcagcccccaaacttggagctggccggcacccagccagccttttcagcagggcccccggctgatgacagctccagcacctcatccggggagtggtaccagaacttccagccaccaccccagcccccttcggaggagcagtttggctgtccaggtgccaatatctggggaagggatgtgggagggggacagagagggactggggagtaaatgagtggggaactattggatgcattcgctcaaggggaaaaggagaaaggaagggtaaaagaagagagggaaagtaactttttaaaaaacaaagcaaggccaggcatggtagctcaagcctgtaatcccagcacaaggcaggaggattgcttgaggccaggaatttacgactagccccgggaacatagcaagaccagtctctacaaaactaaaaactaaatattagccaagggtagcacgtgcctatagtcccagctcctcaggaggctgaggtgggaggatcgtgtgagcccaggagatccaggctgcagtgagctatgatcgtatcactgtgtatcatgcccctgcagggtcagagcaagaccctctttctacaagaaaacaaacacaagcacaacaagaatatgaagaggtggggaaaatggatgtggacgggatggagaaatagtcaaacaggttgctttgataagaagtgagctccctgtcagtggaggcattcaagcagaagcagctggttggctccttgggggagactgtggtagcagaggggcttccaacattcaatcgtccaccgtgtcgtgcagtgtgccattgtggagaccatagccctgaaccagacagacgaggctattccctcagtgctgatgttctagtcagggacatggccggaagcaagatgatcagatggcttcatgcagcatcccacggggatagtgatgtggagccagaaccactcagctccgtcctgtggggcagcagggcaatgactgggtctcccactaatctgggcctctctgcccacagggtcccccagccctcagcctgactccaccgacaacgatgactacgatgacatcagcgcagcctaggccggggccagccgaggctcctggggtggctctgaccctctggcctcctgctctacctactccctttcccctttcccaccctcccagctcacctccccatggagctgagaggcctcccttggagagatggaaggaaacgttataccttgtacccctcggtctccatccatcaagccaaacctgctgccacagccctcccccggccccagatagcagccccagggaggatgctgcctccaagaggtgtgagccctctgtctcggggatgaacaagcagagtctgggctacctcttgacagctggtggaggggagttggggagctggactggatgactctggaggccccttccaaacctcaagtgtccggcgctttgattgcctgagtttctgacacttcagggcccagaggtcctgcgaggggcagaactggacccccatgccagtgctgctgcaggagggcccatatactagggtctgctgagctgttgtcactgatcggtgggcgctgggggggtagggtagcacaccagctgtcccaggctttgctccgggcggtaactgcacttgggcagggaatatagccttcctgggcacaactagctgacaatgacaggttgactgtgtacccccaaccaaggagctggggcccaaggccagtcctgccccagagacactccaagtccgccaggggcacagaccagttctgcagtgactgtccctggacaatgggtctttattctgagtttcctatggtttacaaagagggccccagcccagccccaccacagatcccagagataggggcccagtctccatgggggcaaggagcatagagatgttttccaggaaggggctcagaagctgcactaggccccgagtccccatgtgtctccttgaattgatgaggatgctcctgggagggatgcgtgactatgtggtgttgcacccggggctgcaaacgtctccgtgcagcccccagagagaggcccatgggctcagaccaggctttgttgtcctgctctgagtatcctgagattaaactgaattgctgaatg

SEQ ID NO: 1859 - DNA, 3243 bp, Homo sapiens
aacaacctttttactatgcccagagaagtcatcttacaggtggtctggactcatttcgacccagctctcaggcactgtgtaacctgcagatgttgggctggagaaggtggaagccatactagtgtatgcatgtgcttggccctcacatgcctcctcacgcacacactgaggtctccacttgagtgatcttcccttcagcctattctttctctgtgtccccattccagggatggccccctttccccatccaccagactagaaacttgagccttgttttagttgcttccttcccattttctagctagcctgtcaattactgagtcctcctcactctgcatggacaactctgtagtccatcccttgtgctttctatgcctacctctgctgtcctgctgggaacctccattctttcttgccgggatcccttcccagccgcttctctggtctcatggttttcacttcctctgtacaatccaactttttcatagcatccacagagatccttgtaaatataaccttgtccctcctgtactcaaaaccacagctcctcaaagaccccagggtagtgttgccagatacaatacaggatgcccagttaaatttgaatttcagatatacaacagatttttttttagtataagcatgtcccaaatactacatatggtaaattaaatgttcaaattccagctccattttctactcgtaatcttgggcaaacttgggcaagtgacttacttctctatgcctgtttccacatctataaaatgggaatacaagcaatatttctctcatagggttgtttcaaggactaaaggaggtaatatttgtagcattctaagaataatgcaggtctacagtaagtattccataaacctcttgctattgttattattataaggctttacatattttaaccctcttaatacattagtcttcctaacatcttaggaactttgtacatgctgttcactttgcttggattattcatcttcaagtctcaatagggtggcctccctcaggaagccatgatccctcaagataagtcagccttgccacctccgacttcgatagctctgtgttctccttagcattttacacagcctgtcataatacattttttattgcctgtcttcccctctggactgagtcctgtgacagcagagcctggagctgtcttggttgccaccatgtgcccaacattgtacaacatttatctgagcacctggtaggtggtcaacaaatagggagggaagggatgaattaatctgatgttacagaagttatctttaccctgaaagcacagtgagctatgggttttaagcagggcagacataatacaatttgagctccgagcattccagacctttgcacgtgctatttcttctatttactatgccttccttctctatctttgtttggctcagttctactaatttctcaaggtcttatcctttgcaggatgctttccctgagcccatcatgtttcctctgggatccctgccttgtggcctttttccatcacagccctgatcactgtgggctatcactgtcaggggactgtgtgagtctgtctgccaggactgtaaactcctcgaagggagtattagaaatgttctggtcgtcactgaggaaagctttgaaaatgattattgaaggagagtggtgggctgcctgtatacccacacttacaggtatctccctacacagatgtcacctgtgagaatcccagatgtcctttctcccagctcccagcactgccctcccagctagacctatgtgagcaggtgtttgggctctcagccttgtcagtagcccaggctgtggctcagacgaactcctactacggtggccagacccctggggctaacaaagtgctgtttgttaatggggacacagacccctggcatgtgctaagtgtaacacaggctttaggatcctcagaatcaactcttcttatccgcactggctcccactgcttggacatggcacctgagaggccctcagactcccccagcctccgcctagggcgccagaacatcttccagcagctacagacctggctcaagctggcaaaggagagccagattaagggtgaagtctgaatctcataccctttccactccctgcatggtcacctcagtcctggacatacttgttcactgaacaaaagaaagcagcttgttttgaaagaagaaactcccaggaattggaattcagcacctgttccgcacgtaattggcatgtgtctgcaaacatccttattcccaacttaaagtgctttattgtagagagttatggaaatataagtggatgattattctcattgtaaatattggtattttgaatgttaaatgtcaaacaaatgtgacttatgctggtgccctcgccctgctgatcagattctggttcaaattctgccactccagctcctgggttaggggctttgctgtaagtttctttttctggactttagatcctgaacctgtccttgcttctcagtttctctcactgtacccctttccctcagtctcttcctctctctttcccctgtcactatttgtctttctaatctccttctgtttctctgaatatcttcatttctatctctgtgtttctgtctatttctctgtttatctttctgtccttcaatctgtgtttttgtttctggctctccgtcagtgtctttttctctcctctctctcttgctctgccatggctatttccactgctctatttctgactctcatttttggtctctgtgtgtctcctagtcactttctttctcactctgtctctgtctctatttctgtctctcctctgctgtgtcctcaatctctctgtctccctgaggctctatttctgtctctcctctgctgtgtcctcaatctctctgtctccctgaggctctatttctgtctctgatgctcttcttctgtgtctctatttctcttcctgtcacttaatcttttccttctctatctctcttatttagtcttccttccacacccttcactcaccatcttttcccacaatcaaatatcactccctggtacttccagcttccaactctagggattcatgattctggtggagattccttcttccagggcctgggaggatagggctaatcccaagggtgcctgcttaggctatgttagctgtgacaggaacctgccatagatttgcactgttctttcctaaagatcaattattttcagcaataaatacttctcagctttttgt

SEQ ID NO: 1860 - DNA, 2182 bp, Homo sapiens
ttatgctgtgcttcctcttgaatgctttgctgcttagacatttcttccaccagataccctaaatcatctctctcaagttcaaagttccacagatctttagggcaggggcaaatgctaccagtctgtttgcatagcaagagtgacctttactccagttcccaaaaagttcctcatctccatctgagactacatcagcccagacttcattgtacatattactatcagtattttggtcaaggccattcaacaagtctttatgaagttccaaactttcctacatctccctgtcttcttctgagccctccaaactgttccaacctctgcctattacccagttccaaagtcgcttccacatatttggggatctttacagcagcaccccactcctggtaccaatttactgtattaatatgttctcgtgctgctataaggacagattctggactgggtaatttataaaggaaagaggtttaattgactaacagttccacatggctgcgaggccgcagaaaacttacaactatggtggaaggggaagcaaacacttccttcttcacatgatggcaggaaagagaagtgctgagcaaaaggggaaatgccccttataaaaccatcagatcttgtgagaactcactcactatcatgagaaaagcatgagggaaaccaccccatggttaaattccacccaccaggtcccttccatgacatgtgaggattatggtaactgcaattcaagatgagatttgggtggggacacaaccaaattatatcacctcccaagggctccatctccaaataccatcactttgggagttaggttacaatatattagttttggggacatatatattcagtgtacagcaaagttttatagtgtctaatagtattacagtatgagtggaacttttctttgcagttgacaagagaatctgatccatgcattggcaacaaaatatctctttcttgactctgaaaagatacacaatcaaggaagtgtgggaagactatcaggtagaagatacatactacccactcaatggtattttataggagagagatgatgaagaaaaaatgaaatacttcattgttaattgagaacttttatggtctggtcaagagcatggaacatctgtgttttagacaatcaatatttaagttgtaatttaccaaagctaagagtctatgaccaacaattcaaacaaaaagttatgtaaatgaggtatttctgtatgaatatggtctctttcataaaagcagaactagagatacaagatgatgaagaacatgctaagattatgaacagtaacactgttaaaacccttaccgaatgaaacaaatttgatatacaaatgacaggtccattctgatcctgatgcagcatgtgctcccagatattctattggaatgagggcctttttttttttttttgacagagtctcactctgtcacccaggctggagtgcagtggtgcgatctcgactcgctgcggccttcgcctcctgggttcaagctattcgtgtgcctcagcctcctgagtaactgtggctacatgtgctattaatttttgtatttttagtagagatggagtttcgccatgttggccaggctggtctctaactcctgacctcagatgatccacctgcctcagccacccaaagtgctgggattacaggcatgagccactgtgcctggccaagaaacatttttacatgcactgtattggctccagaaaatgaccatctcttgtaatcaaatcattaatgattcaaacgaagtgttttgtatgtgttctttatgctattaaaggcatcagaataatataatatggtcgaagtgccatgattctttatttcattacataatcaaactttattttgaaaaattatatattctttgcctgtatagctgccgtaatttgaatgtgtctttttcaaaatctacatgttgatgattaatggccattgtgatagcaatatgagtcgggaccagtaagaggtgattagtttgtgagggttcctgccttatgaataggagtcaggcccttatataaatgaggatccagccgggcatggtggctcaaggctgtaatcccacccagcactttgggaggccgaagcgggtggatcacgaggtcaggagatcgagaccatcctggctaacatggtcaaaccccattcctact

SEQ ID NO: 1861 - DNA, 2115 bp, Homo sapiens
atggagcagcttgactcatgcccatccgtgcccttgcctgaagtggcatcagccacgtagtctggtgcccatggcgtctgtgcatcagtatgcttgggaaactttggctttgtcactgacagaattattgagggcttcctccagaatgtgggtgatggagttaaacttcagaagagcatcctgtcacttttcctctggttctggcaaagagctgtgggtctgcttctgccacagtctgcagccagttccatggccccatgctttgccatgtggaggctctctcagagcatagggtcccccaaatcctcaccctcagaatcacatgggcggagaatggggaaaagctgaggaccccatcttgggcctcttgagtcacaaagagcctgcagtgcccttcctgcttccagagcagacttgctgcatgttcctggccggtgcctgggggcctggttattccctgagcctgctcctcccgtggggctctgggacactcagcactcgtgcatgtggcgtggcgtggcgtggcctggcaggggcagaggccactgcaccgcattgtgttcctgttgctccttctgccttctgagggagtggaagcacacctactttcaagagtcagccagaaaggctctttgaggctgtcacctgtgaggattctgtgtcctcacgggccagaggaagggcagggggctgtccctgtggagggcaggaggtgcagttcccttcttccccacatttgcttcctcttggccagaccttggggtgggtggaccctgctcagaataccttgcagtggccggaccaagtacccagagatgctccactcttcgcctcttccagttcaggcaaaacacaaaacgcaagaaaacttggtgggtgggagtcagagaaaggcagctgtggaggtctgtgtctcccaaggcttcttgccgcttgtccaggcctgtgctacacgtactgccatgcagaaatccctgcccgtccccactagcccttattttcagatgcaggaagtgaggctcctggggtcatcctcctcaccctgcttgagtccaggatgcatgcttgctccccagtggccctgtgggcagtaaggatggccatggcgctgtaggccactgtgttcctgcaagcaagggcagagccacactggggaactatgtgtctgattcctccctgagccccaggtctggcacagaggaaggctgtggagggcaacacctccctgccctgctccttcactccctgctctgcgtgtcatggcgactggcgtgtgttctgatttctcctgtgtggagcccagtgggtgtgctgcttgggcaggaggcatgctgctggcggggcaggatgtgcaccaggccggctgtggctgcactgggctgaaggggtgcttcggcaggccgtggtgctgcagggcagcaggtcggagggtcctggctaggagccagctcagcctcaggttcctgctgcctctgggtgtgtgtggctgtggccagatcctcaggggctcccgcccttgggaacccactgtatctggagggtgggagtttctggtgcggcagacctagggaaggtgaggcgaggtggggagttggcagaatccccatacctcgcagatttgctgagtctgtcttgtgcagagggccagagaatggcttatgggggcccaggttggatggggaaaggctaatggggtcagaccccaccccgtctacccctccagtcagcccagcgcccatcctgcagctcagctgggagcatcattctcctgctttgtacatagggtgtggtcccctggcacgtggccaccatcatgtctaggcctatgctaggaggcaaatggccaggctctgcctgtgtttttctcaacactacttttctgatatgagggcagcacctgcctctgaatgggaaatcatgcaactactcagaatgtgtcctcctcatctaatgctcatctgtttaatggtgatgcctcgcgtacaggatctggttacctgtgcagttgtgaatacccagaggttgggcagatcagtgtctctagtcctacccagttttaaagttcatggtaagatttgacctcatctcccgcaaataaatgtattggtgatttgg

SEQ ID NO: 1862 - DNA, 3887 bp, Homo sapiens
gcaaagatgctctaacaggaagtgggttaaggagctgcactgcttcctgccccctaaagctgagcggggcgaggagggcgagtgccaggctgggccacgagacacaggacacaatttcttgccagggtcctggtagcttcctcttcaacagccacttccgtgtggccggggccccaggggcaggagctgctgcccgttgcccaggccaccctccacccccaattgggagccctgcccccctggggccgggccaagcccagcagctggctgggatcccatgggggactggtagggcacaggtcttgggggatagaggtgaccgggccagtgccctggggctctggccatgaggtctaaggacatagaggcctcaggcttcaatgggacagcggccttcatggaggtgcgggtacaatccatcgtcgtggagttcatcctcacacacgtggaccagctctttgggggtgctgccctctctggtggtgaggtggagagtgggtggcgatcgcttccagggacccgggcatcaggcagccccgaggaccttatgcccaggccactgccttatcacctgcctagcatactgcaggctggcgatggacccccacagatgcggccctaccatactatcatcgagattgcagagcacaagaggaaggggtctttgaaggtcaggaagtggaggtctatcttcaatttaggtcgctctggccatgagactaagcgtaaacttccacggggggctgaggacagggaggataaatccaacaaggggacactgcggccagccaaaagcatggactcactgagtgctgcagctggggccagtgatgagccagaggggctggtggggcccagcagcccccggccaagcccattgctgcctgagagcttggagaacgattctatagaggcagcagagggtgaacaggagcctgaggcagaagcactgggtggcacaaactctgaaccaggcacaccacgagctgggcggtcagccatccgggctgggggcagcagccgtgcagaacgctgtgctggtgtccacatctcagacccctacaatgtcaacctcccgctacacatcacctctatcctcagtgtgcccccgaacatcatctctaacgtttccttggccaggctcacccgtggccttgagtgccctgctctacagcaccggccaagccctgcctctagccctggccctggccctggccttggccctggccccccagatgaaaagttggaagcaagtccagcctcaagtcccctggcagactcaggcccagacgacttggctcctgccctggaggactcgctgtcccaggaggtgcaggactccttctccttcctagaggactcaagcagctcagaacctgagtgggtgggggcagaggatggggaggtggcccaggcagaagcagcaggagcagccttctcccctggggaggacgaccctgggatgggctacctggaggagctcctgggagttgggcctcaggtggaggagttctctgtggagccacccctggatgacctgtctctggatgaggcacagtttgtcttggcccccagctgctgttccctggactccgctggccccaggcctgaagttgaggaggaaaatggggaggaagttttcctgagtgcctatgatgacctaagtccccttctgggacctaaacccccaatctggaagggttcagggagtctggagggagaggcagcaggatgtggaaggcaggctctgggacagggtggggaagagcaggcatgctgggaagttggggaggacaagcaggctgagcctggaggcaggctagacatcagggaagaggcagagggaagtccagagaccaaggtggaggctggaaaggccagtgaggatagaggggaggctgggggaagccaagagacaaaagtcagattgagagaagggagtagggaagagacagaggccaaggaagagaagtccaaaggtcagaagaaggctgacagtatggaggctaaaggtgtggaggaaccaggaggagatgagtatacagatgagaaggaaaaagaaattgagagagaagaggatgaacaaagagaggaagcccaggtagaagctggaagggacctagagcaaggggcccaggaagatcaagttgctgaggagaaatgggaagttgtacagaaacaagaggctgagggagtcagagaggatgaggacaaaggacagagggagaaggggtaccatgaagcaagaaaagaccaaggagatggtgaagacagcagaagcccagaagcagcaactgaaggaggagcaggggaggtcagcaaggaacgggagagtggggatggagaggctgagggagaccagagggctggagggtactatttagaagaggacaccctctctgaaggttcaggtgtagcgtccctggaggttgactgtgccaaagagggcaatcctcactcttctgagatggaagaggtagccccacagccacctcagccagaggagatggagcctgaggggcagcccagtccagacggctgtctatgcccctgttctcttggcctgggtggcgtgggcatgcgtctagcttccactctggttcaggtccaacaggtccgctctgtgcctgtggtgccccccaagccacagtttgccaagatgcccagtgcaatgtgtagcaagattcatgtggcacctgcaaatccatgcccgaggcctggccggcttgatgggactcctggagaaagggcttgggagtcccgagcttctcgatcctcttggaggaatgggggtagtctttcctttgatgctgctgtggccctagcccgggaccgccaaaggactgaggctcaaggagttcggcgaacccagacctgtactgagggtggggattactgcctcatccccagaacctccccttgtagcatgatctctgcccattctcctcggccccttagctgcctggagctcccatctgaaggtgcagaagggtctggatcccggagtcgtcttagtctgccccccagagaaccccaggttcctgaccccctgttgtcctctcagcgcaggtcatatgcatttgaaacacaggctaaccctgggaaaggtgaaggactgtgattaggaccacagccctgggcaaaggggaccagcaagttgtcttgaatctccagggttccggactagctgtctcctctgcagcatgagcagctgtagtgcccaactctataggctttggccctccagcttctctctttgactgtgggaggcactgccttggttggtttacctgaacttgtctccgacacaaagcacttatctcttaggagattcccaagaaagtcaacaagatcttgttcccagggagtgggtcattggccaaagggaacataaggtaggcagaaaacttaaaagagtttgttaaagtgaagactggagaaattcctcccttcctctgagctgtgaatctctcttcatgaaagccaaaggtagagacagggaggacagggccaggttagggccttccacacacaaacacttctagagttgcccattcctgttatgttcttggaccctaagatacctcctgtcccttctaaatccagattaagagaaacgtccaggaagagctctttgaagccctcaatatttgttggagggactggactcctctccagctccccaccctctgcctccagtcaccatgtgcaagagaggtcctgtacagatctctctgggctctcctttctcctttggaataacttgttcctatttcaggaaagggaaatggtgtcactcaggccctgggactgcttctccagccaggctggggccacaggtcccactctagtgaaggtcaatgtctcagaataaaagctgtattttt

SEQ ID NO: 1863 - DNA, 2582 bp, Homo sapiens
tttccccttttatgaaatacaaatatttgcacatccacaagataaagagaaagaacaagaaaatagaggaatgagacactctgtctttaggcccataataaatgttccgttcgcccccatgccggagccccaacctctaccttacagagctgcagtgatcacatgtcctggcatgccgttctccctctccaacagtgtcttcatatattatctaaacagctggtttcatgtgtatattaccctacacagcctcatcttttatgacgttggatataagttataaataaaagatcgtgaatttagcctgttttgactgagctcgttggactttaaatgggaatcattgagacctacaaatgtacatttccattgttttgacgccaaggtataatgcctggagttcataaataaaattatataaatgattctgtcttgcataaactgccagggagacaataggcgatgtgtccctcggccccctttggtgagcaggctggaggaatcaccaggttggtgcatccgagcgaggcaaagaggcagacccagccaactacactgcaagcagttccaactgcacagccagggacaggctccatggaaaaggctgttgttcaactgttggccttttcagccccattgtgcggacagcagtttttctctagggtaccaaagtgtccctcttcaatttacaatagtgtttgtatttcttagcttcacaaactgtgatatgagcaaactaaattatgctatttaacttgctttgtaggggaagaaagggactagagtcaaagcaaatggccacaccgtagtagtaataggatttaaacccatttctgcagactcccactctagagttccctttactctactgagcctcctatttcaagttgaagacatgattagtttgttggatttcattaactataaattgaacatgggtgctagagatatgatgatagacaagatagaagaattctctgctttccacaaagtttataggtccatagggaaggcagacattaaattatatgatgaatgctatgataagagatatttatgattcagcactggatgctggaggcacctagtgatatctaatctactctagtggatccagaaaggcttcctggaacaagagccattcaagaggacactggcagatgcacagatattacccaagcaaggggatagagtggaaaggagaatgtgcagaatgcctgagatgagttacagtgataggaagaaatccggatggctggagtgagtattccagggtaggcagtagctaaacccagggttttcgaggcaatcctaaagacagtgggcaggggagaaaaacagactatcaggtgactatgtgtggagagctacagagagcaccaggattagcttaacacaccagaatatacagagttcagtttagagtcccttgcctcatcctatctgatactgttaagaatgcacatatatctgttttcctaaaagtagactggggaaagagaagccagtgctctcttactggatgctattcttcgatttatttaatgtatgtttactgaatatctggtatattcaagggcatgtaccacattgtgctaagcactgttgaacattcaacgtacaagttaatatttattgagtgcttgcctgttacacacttagagttgtggtgattataaatgaagttgtgggcctcgtttacagtaatctcgctgaaagtaggacacaacaaaataagcaactaggcctgtctacaaacaggtattatgcacactgcttaatgttttaataaacaaccaagttgatctcagggttatatccaacaataagagaatttttggtttttaatgttattttttaaagacttagaactaatttcggttttatagtacaggtaccaaattaatttttgctcaaaaatataagtgcatattatgtgctaggcgttgtaccagtgatacaaattgaggacattgttccttgcctctgagaagcttgcaaacaagtgggaactataacaataaatatattacggtgggatgtgctataaaaatgttagaagatgttaaagtaatgtgggcaactttgtaaacctgtttaatttattccattccatcatactgcaaaaatgagaataatgcatttcctgctttttttttttttttttttttttttttgagacagagttccgctcttgttgcccaggctggagtgctatggtgcgatgttggctcactgcaacctctgcctcctgggttcaagcgattctcctgcctcagcctcctgagtcgctgggattacgggcgcccaccaccatgcccagctaatttttgttatttttagtagagacggggtttcgccatgttggctagcctggactcgaactcctgacctcaggtgatccacctgccttggcctcccaaagtgctgggattacaggtgtgagccactgcacccagcccatttcctgcatttttattgacacaattttaaataaaatgcttgaaatccaacacatttctgttttcttctgaaatgttctaaatagaacatttatttgtctaataaagttataaaattgc

SEQ ID NO: 1864 - DNA, 2202 bp, Homo sapiens
aaaatggagtccagggtaatctgtcagccgactgtacgacggggagccctgaagcactttaggaagcagagagcctgatgcacgctgggaaacggagtccactcactcagtctattagctgtgtatgcctcccagagctcggtgcgctctgggaaattgagtcggcccgcgtgaacctgcgggtctcgggccgtgaggcaagccgggaaatggagtcgtcgccacgccctcaccgcattgcaggtgtaaagcgatttttaaagcacgccgggaaatggagtctcaggtggtttttaagccccaggtggatactgcagttccggagatgggcgaggaaatggagtaggtttacgcgctcctctttccaggtacgctgggccgcagtccctgccgggaagtgtagtcagcaccaaggcctcagtgcagttgccacagcgagccctggtgtgttctgggaaatggagttcgacgtatcctccccattgactgagggggcgggatcgcccatgagctccaagcatgctggggaatagtccagacctgaccctctgtgaggccagtctgcggaggcttgccgggaagcgaagtccaatggccaccatcaggggcgtgtgaacgaaaggttagagactgcggcagttccctggagagacttaaaagtgtttcagcgcctccttcctcgcccccaggtccttctttaagaaagagccgaggtcgatcaaggactgctggaaaatggatccaagcacctttaagttccaggtgaccatagatcaggaaagaaaaaatgtcccctctctaaccgcaactctgcaaagattcgggaaacaaagttcccggcggtttctcagaacactaactagtcttcggatacagtctagcttttcctagcaatgtggttcgcaccaggaagctgaatggagcattaaaaagacggaaatgtcatttctgggcctggcgctgtggctcaggctgggcgccagtggctcacgcctgtaatcctagcactttgggaggccgaggctggcggatcatccgaggtcaggagttcgagaccagcctggccaacatagcgaaacccccgtctctactaaaagtacaaaaattagccgggtgtggtggcgggcgcctgtaataccagctactcaggaggctgaagcaggagaatcgcttgaacccgggaggcataggttgcagtgagccgagatcgcgccactgcactccagtctgggcgaaaagagtgagactccgtctcaaaaaaaaaaaaaaatcctgtcttgaaccaccattcagttttcagtttttggtttgttttgagacagagtctcgctctgccgcccaggctggcgggcagtggcgcaatcacgggtcgctgcggcctctgactcccaggctcaagcgatccccccacctaagcctcccatgtaggtgggactgcaggcgtgcaccatcacgcccagctaatttggtttggtttgttttttggggtggtggggggtagcggggtgggcttcgccatgttgcccaggctggtctccaattcctgggctcaagcgattctacctcagcctccaacgtgctggtatttcaggcttgagccacggcaccgggcctcccactcttgtgttttgcatcctccgcttcctaaattacaagatcccggaaagccaaaaataaggaagccagctgcctcaggttttgtgtactcagtgagtcgtcctatttatcgattaatacccgaaggagagtagcccccaaaaggcgctgggaaacagagttcctgtgtctgtatgtgtctcttcctcccccggaaatacttagaagtagaatgaaagcgttctcagcccctcccgcatcctggaatggtgggaaatggagtctctggacttcacgttaatccgagcttgtgcttatactaactgtcctgtcctttctgaaaccagaagaaagtcctgtccactcagtttgttcctgactgcaattccccgcggacacaactgcgggggtcggtagcgccaaagcctgttgagactacattacccagaaggcaaagtgcggaacacttccgctcccttcacaaagcaggtggccgcaccacgcgcggctaggcgcgggcgtttctgggagttgcagtttcccagccaaatggtacctgctgccctctgatggcagctctgagtcaaaaagtaaaaatttcagtcg

SEQ ID NO: 1865 - DNA, 2134 bp, Homo sapiens
aagacttcgtagggttagcgaaattgaggtttcttggtattgcgcgtttctcttccttgctgactctccgaatggccatggactcgtcgcttcaggcccgcctgtttcccggtctcgctatcaagatccaacgcagtaatggtgaggagcggggtccctaggtcaaggggactcgtgagcggtgagacgactgaaattactgcccgtccccggacacacagatgggctttcactctctttctctccctccctccttttcacacgcactcactccgggtctctgcactggcagtcattcttgcctacacaggggtgagagtccctgcgctgtacgtggtccctttcgcagtcctctgggagtgggcggaccttctccaaggctggtagacctcccagggaagttgggacttctaaattcacttcccttccaaaattctcccctgaaaatgccctgctcttatggggacctcggtctcctggcccctttactctcgaataaatattgcgcagttgcggtatgtcaggtaaacgggacagacaagaaccctgcgcttgaggagcttgtagtcgttctctcttttgcttaagcaggtaccgcagttctggcaggtctgatacccgtgtcattagggaaatggacagatatgaccgccagaaatgagttaggaaaaccccaaaagggccagatcctcaatgctatgttgaggaaaagttcatctaagggttgtggggaatcctgtgctcaaacataccttttgtatgttctcttttgtaggctctatctctctttttttgtaggctctcttgagtaggggtgaatccttatcccatgcagctcagtttaaaaacctgtccccagcccacctcactgtggatattctaaaggtgaagcccaggagatttatttgtttctcttagttttttttttttttttttttaaggtagctgcctgttccttcaggttaactccactttgggaatctctgtggaatcctaaaagtgaagctctcaggaaagagatgggtaactctggttttttcatactttataggtttaattcacagtgccaatgtaaggactgtgaacttggagaaatcctgtgtttcagtggaatgggcagaaggaggtgccacaaagggcaaagaggtaggttctatgagaattcctctaccacatttaatgtcttcctacataaaggatctgtgcagaagtggaatctgtgagagcctagtttctgatgctgtgctcttctcactcacgcctgtaatcccagaactttgggaggctgagacgggcagatcacctgatgtcgggagttcgagaccatcctggccaacatggcgaagcctgtctctactgaaaatacaaaaattagccagtcgtggtagtgcatgcctgtggtcccaactacttgggagcctgaggcaggagaactgcttgaacctgggaggcggaggttgcagtgagccgaaactgtgccgctgcactccagcctgggtgacagtgagaatctgtctcaaaaaaaaaaaaaaaaaaaattggctgggtgcggtggctcttgcctctaatcccgacactttgagaggcctggtctggaggattgcttgagctcaggagttcgagaccagcctgggaaaaatgttgagaccttgtctctacaaaaaaattaaaaattatcagggtgtggtggctcacgcctgtggttccagctactcgggaagctgaggtgggaggattgatttagcctgggaggttgaggctgcactgaaccatgatcgagccactgcactctggcctgggcgacagagtgagacctttcctcaaaaaataaaaatggtcttcttggctgggcacagtggctcacatgtataatcccagcactttgggaggccgaggtgggcagatcgctttgagctcagcagttcaagaccaggctgggcaacatgacaaaacctcatttctacaaaaaatacaaaaaacattagccgggcatggtggtgcatgcctgtggtcccagctgctctggaggctgaggctggagaattgctggagtctgggaaagcacaggtttcagtgagctgaaattgcaccactgctctccagcctcctgggcaacagaatgaggacttgtctc

SEQ ID NO: 1866 - DNA, 4293 bp, Homo sapiens
gggcctgggagctgcctctgaggaacacgccgcagggccaggcatgtgaggtctctgcgggtcatggagaacctccctgccgtgaccactgaggagccgacccccatggggaggggtcctgtgggaccctcaggaggtggcagcacccgggaccaggtccggactgtggtcatgaggccctctgtgagctgggagaaagcggggcccgaggaggccaaggcgccggtgagaggcgagagacctggagcgtttggcgccttcagaggagccaggcctttgcttggtctcccctaatcctgggaacctgctgtgttgcagacgaggctcctcctgcccgcgtggctgggcctgctgctgggacccctccctgccagatgggggtttatcccacagacctgaccctgcagctgctggctgtgcggaggaagagcagactgcgggaccccggcctacagcagaccctccggggccagctccgcctgctggagaatgatagccgggagatggcccgcgtgcttggggaattatcagccaggctgctgtccatccacagtgaccaggaccggatcgtggtgacgtttaagacttttgaagaaatctggaagttttccacctaccatgctctcggcttcactcatcactgcctggcaaacctgctcatggaccaggccttctggctgctcttgcccagtgaggaggaggagacggccatccaagtccatgtggatgagaacgccttaaggctgacccacgagagcctcctcatccaagaagggcccttctttgtcctgtgtcctgaccaccatgtgagagtgatgacgggtccccgggatgcaggaaatggcccccaggccctcaggcaggcttcgggggcaccccagggagaggcggccccggaaacagactcttcaccgccgagccccagcgtgtcctccgaggaggtggcagtggcggccgccccggagcctttgattccatttcatcagtgggctcttaggatcccccaggaccccatcgacgatgccatgggtggccctgtgatgcccggcaacccgctgatggctgtgggcctggcctcggcattggcagacttccagggctcggggcccgaagagatgaccttccgaggtggcgacctcatcgagatccttggggcgcaggtgcccagcctgccctggtgcgtgggccgacacgcagcctcgggccgggtggggtttgtgcggagcagcctcatcagcatgcagggccccgtgtccgagttggaaagtgcgatttttctcaatgaggaagaaaagtcattcttcagcgagggctgcttttctgaggaggatgccaggcagttgctgaggcggatgtcgggcaccgatgtctgcagcgtgtacagcctggactcagtagaggaagctgagaccgagcagccgcaggaaaaagaaatacctccaccttgcctgagcccggagccacaggagaccttgcagaaggtgaagaatgttctggaacaatgcaagacctgcccaggctgcccccaggagccagcgtcctggggtctctgtgcggcatccagcgacgtgagcttgcaggaccccgaggagccctccttctgcttggaagccgaggacgactgggaggacccagaggccctgagctcactgctgctgttcctgaacgcccctgggtacaaggccagcttccgtggcctgtacgatgtggcgctgccgtggctgagcagcgtgttccgcagcttcagcgacgaggaggagctgactgggcgcctggcacaggcccggggggcggccaagaaagctggcctcctcatggccctggccaggctctgcttcctcctggggcggctgtgcagcaggaggctcaagctgtcccaggcccgggtgtactttgaggaagcgctgggggccctggagggcagcttcggggacctgttcctggtggtggctgtgtacgccaacctggccagcatttaccggaagcagaagaaccgggagaagtgtgcacaggtggtgcccaaagccatggccctgctcctggggacgcccgaccacatctgcagcaccgaggcggagggggagctcctgcagctggcgctgcggcgggcggtgggtggccagagcctgcaggccgaggcccgggcctgcttcctgctggccaggcaccacgtgcacctcaagcagcccgaggaggccctgcccttcctagagcggctgctgcttttgcacagggactcgggagccccagaggccgcgtggctctcagactgctacctactcctggctgacatctacagccgcaagtgcctgccccacctggtgctgagctgtgtcaaggtggcctcattgcggacacggggctcgctggccggctcgctgaggagtgtgaacctggtgctccagaacgccccccagccccacagcctccctgcccagacttcccactacctcaggcaagcgctggcctccctgaccccgggcacaggccaggcgctgtgcggccccctctacaccagcttggcccagctgtacagccaccatggctgccacggcccggccatcaccttcatgacgcaggcagtggaagccagtgctattgccggagtccgtgccatcgtggaccacctggtggccctggcctggctgcacgtgcttcatgggcagagcccggtggccctggacatcctgcagtctgtccgggatgcagtggtggccagcgaggaccaggagggcgtgattgccaacatggtggccgtggctctgaagaggacgggccggacgaggcaggcagccgagagctactaccgcgccctgcgggtggctcgggacctgggccagcaaaggaaccaggcagtggggctggccaacttcggggccctgtgcctgcatgcgggtgccagcaggctggcccagcactacctcctggaggccgtgcggctgttctcgaggctgcccctcggggagtgtggccgggacttcacccacgtgctcctgcagctgggccatctctgcacccgccagggcccggcccagcagggcaagggctactacgagtgggcccttctggtcgccgtggagatgggccacgtggagagccagctgcgggccgtccagcggctgtgccacttctacagcgccgtcatgcccagcgaggcccagtgtgtcatctaccatgagctccagctctccctggcctgcaaggtggccgacaaggtgctggaggggcagctcctggagaccatcagccagctctacctgtccctgggcaccgagcgggcctacaaatccgcactggactacaccaaacgaagtctggggattttcattgacctccagaagaaagagaaggaggcgcatgcctggctgcaagcagggaagatctattacatcttgcggcagagcgagctggtggacctctacatccaggtggcacagaacgtggccctgtacacaggcgaccccaacctggggctggagctgtttgaggcggctggagacatcttcttcgacggggcctgggagcgggagaaagctgtgtccttctaccgggaccgggccctgcccctggcagtgactacgggcaaccgcaaggcggagctgcggctgtgcaacaagctggtggcactgctggccacgctggaggagccccaggagggcttggagtttgcccacatggccctagcactcagcatcaccctgggggaccggctgaacgagcgcgtggcctaccaccggctggccgccctgcaacaccgactgggccatggcgagctggcagagcacttctacctcaaggccctgtcgctctgcaactcgccgctggagtttgacgaggagaccctctactacgtgaaggtgtacctggtgctcggtgacatcatcttctacgacctgaaggacccgtttgatgcagccgggtactaccagctggcgctggcggccgccgtggacctgggcaacaagaaggcacagctgaagatctacacgcggctggccaccatctaccacaacttcctcctggaccgtgagaagtcgctcttcttctaccagaaggccaggaccttcgccacagagctcaacgtccgcagggtcaacctgcctcctctgccactctgcgggtgggccccctggttggcccccagccaccctcgctgaggacagcatccaagggagtgggttttgtgcaagggctgggggtctcctgcctctcctcgtgtcgccggtggctcattttctggcaaatggaggcacgaacgcaggggccaaatagcaataaatgggttttgttttt

SEQ ID NO: 1867 - DNA, 3645 bp, Homo sapiens
tcgggggtggggggacagtctctgtctgtcacccaggctggagtgcagtggcaccatctcagctcactgcagcctctgcctccagggttcaagtgactctcccacctcagcttcccaagtaggtgggactatagacatggggcaccacaccccactaatttttgtgtttttggtagagatggggttttgccatgttggccagactggtcttgaactcctgacctcaagcgatctacccgtctccacctcgcaaagtgttgggattagaggcgtgaaccaccgtgaccggctgagattgagttagtacctgaaaatgaattaataaaatattttgtagcaatagaacaaaggacaaaaaccacataatcatctcagtagatgcagaagtgtgtgacaaacaccaatatccctttatgagaaaaacagaaggaaattttctcaacctgataaagggcatctgaaaaacccacagctaacatcatattcagtggtgaaagaccaaaagttttttcctaagacaaagaacaaaacaaggatttccgctcttgctgcttgtctagccaaggcagttaggcaagaaaaagaattaaaagcatccagatggaaaggaaggcgtaaactctcttttgcatggtgattttatatgtcattctaagaagtttacacacacacaagaaattttagagataataaatgagttcagcatggttacgggacagaagactaacatacactaaccagttgttcaagacaattgaataggggagaatagtcatttcaacaaatgctgctggcagaagtggatatgaacatgcaaaagagtgaagcatatggatatccatatacaaaaatgaactcaataaaagccctacatgaagtgtaaaaactgtaaaactctgagaagaaaacgagtacattttcataatgttggattaggcagtaatttccagatttgatgcctaagcacaagcaaccaaagaaaaaatgcatcaattgtacttcaaaattaaacgttgttatgcttcataggacatcttcaagaagatgaaaagaatccccaaataatgggaggaaatatttctaaattttatgtctggtaatggacttgtatatgtaaagaactcttataattgaataataaaagggcaaatagcccaactgaagagggcaaaggatctgaataggcatttctgcaaaacacatgaaaagaagctcaacatcattagccatcagggaaatgatttcacttaatgcccacaaggatggctataatcagaacgagaagacagtaacaagtgttcacaaggatatggagaaatgggaacgttggaactgtcatatgttgctgtgagaatgtaaaatggtgcagccgttttggaaaatagcctggcatttcttcaaggttaaatgtagaattaacacgtgactcagcagttccatttctgggtttatacccaagagaaatgaaaatatatgtccacagaaaaacttgtacatggatgttcatagcagcagcatccataatagcctcaagtagaagcaactcaaatgtctgtcaactgatgaacagatgacaaaacatggtacaatggaatattactcagcaatgaaaaggaatgctttatatgttacaacatgattggaccctaaaaacatgccaaaaggctgtgtattatatgactccattgataggaaaggaatggtttacatgttacaacatgattgaaccttaaaaacatgccacaaactgtgtatgactccattgatatgagaggaatggtttacatgttacaacatgattgaaccctaaaaacatgtattatatgactccatttatatgaaatgtctcaaagaggcagattcatagaaagactagtggttgccaaggtcttcattttttaggggtgcactaatggatgtaggatttctttttagagtgattaaaatgttacaaaattgctggctgggtgcagtggcttatgcccataatcacagcacttcgggaggctgaagtgggaagatccaggagttgaagaccagcctgggcaacatagtgagaaaatgtctccctaaaaggaagaattaacctcatgtggtggtgtgcacctgtagttctagctactggggaggctgaggaggaaggattgcttgtcccgggaattcaaggttgcagtgagctatgattgcacccactgtacctcatcctgggagagagagcgagaccctgtctctaaaagaaaaataaatgttctgaaattgattatgttgacggtcacataactgaatatattaaaaacttaaattgtatactttaagttggtgattgtatgatatatgagttttatcaatacagctacttaaaaacctatagttatgcaaattaaaaatttcatttactggggataattgaaatgattataccgaacataatacatgtagaaacagtatagtttttgtattgctggatagtctgtttttttctttttcaatatttgaaactaaaggtcatgtaattgatgtttttcttacataactgtgaaatatttattctctgttgaaatgttttatcttacgttttctcctttaggaatgttacgttcataacttactaaggattagtgtatattttccaaccttgaggcatgaaattctggagcttattattgaaaaactactcaagctggatgtgaatgcatcccggcagggtattgaagatgctgaagaaacagcaaatcaaacttgtggtgggacagattccacggaaggattgtttaatatgggattcgcagaggcatttttggaacatctttggaaaaacttgcaggatccaagtaatcctgccatcatcaggcaggctgctggaaattatattggaagctttttggcaagagctaaatttatttctcttattactgtaaaaccatgcctagatcttttggttaactggctgcacatataccttaataaccaggattcgggaacaaaggcattctgcgatgttgctctccatggaccattttactcagcctgccaagctgtgttctacacctttgtttttagacacaagcagcttttgagcggaaacctgaaagaaggtttgcagtatcctcagagtctgaattttgagcggatagtgatgagccagctaaatcccctgaagatttgcctgccctcagtggttaacttttttgctgcaatcacaaagatgaagacttgtggatatggatggtggtgatggttgcacaacaatatcaatttattttataccactgaaccgtgcacttcaaaatggttaagatggctggggtgtagtggtgcgatcttggctcactgcaacctccacctcccgggttcaagtgattctcctgcctcagcctcccaaggagctgagattacaggcatgcgccaccacacctggctaattttgtatttttagtagggatggggtttcaccacgttagccagactggtctcgaactcctgacctcagatgatccacccaccttgacctcacttacaggcgtgagccaccgcgccttgtctctgttatatttatttctctatttaaattgatggatatatgcaaacctgatcattatcatacttatgccttgacacaagagaggcaataaactaatctaagtg

SEQ ID NO: 1868 - DNA, 2234 bp, Homo sapiens
taaggagcttggaagttccccccacctagctgtagtgggcagtttcagagtgggctgatccaggagtcctgaccaggtcagtagggtgatgtctagactccagtaccactgagaatgttgctatgttggctttctctgccacacagaaaagtcttttctttccttttcttttctttctttcttttttttttttttttttttttgagacggaccctccctctgttgaccaggctggagtgcagtggcacaatctcggctcaccacaacctccgcctcctgggttcaagtgattctcctgccttagcctcccgagtagctgggactatgggtgcgcactaccatgcctggctaatttttgtatttttagtagagacaaagtttcactacgttggcaaggctggtctcaaactcctgacctcgtgatctgcccacctcggcctcccaaagtgctgggattataggcgtgagccaccacgcctggcctaagactgtctttccaaatgacttcaaattccttcaaatgggtaacttcatttaaccaggtgggggcacctcccaaaacacaagttacccagctttcaagttgtggctctcatataaggaagtaactttctttgagagtatttacttgtgaaattagaaaagtagtaaatttctggaaaatgtctaacatgtattgctagcgtaggccgcagggcattgagaaacgtataccgctgcactgctggcccagctaaccaagggtctccttcacttctttgtcattaatagcctgagtaactaactccactttagttccctcaactgtgaaatggcaagtgatgctagattatctctaatgatctttgctaaaattttatgatccagatatccttatctgattctttctcagaatcactttaacagtttaataaaaacggcctgacatcaagagtttttttttttttaaagaaaagatactcaagcattgattataaatttcaacttgacccttaagtttttgcaaatctttcctactcttcctttaggatccagcccaccatcccatccactctacccaactcttcctttcaaagagtaggatttttctgcttcgtttttttactgctttgttcttacttagggttgctggaagcacatggaaggagggaagtagtcaaaacaagacagtgttgtgaggggagagatgagaagtcatgataagtaggtgggtgggtgacccacagggctggcatcagaaggaaacatagcaaaacatgatggatatgaggcttgctgtggggagggggattggcctttgtgagtggcagccgtctgctcccttcccgcttcccttagtgctccattgagctagcagcatgcagctgagaagttgaagttctgaccacatggcctctgctgccgctgctctgccccatcccaggcacctagccagctctgcattaaggaggtgaagtggatgcccaaggaaagaagtgcccccaaggagacttgctgagaccttgaacaagtgacacaatgtgagcagaacttgtcttgacagaaaatgctttgtctctaggtgttccagagagatgggcaagtgtcctatttcttagtgagagcctctaaacaaaccagcttgtgaacctccactgaaaagatctcatctgatgagcattttaataaagtgtcctgagtttggaggcttgccgtctttctcttggataaatatcttcatctcctagacttggaaaaacacattttctcctggggttacccattggcgtgtcttgagctgctctggtgataaccgtaataatgccaatactgatacgaacagcagaaaacagtaaccccaagaactctacagatgatcatcaaggaccactgtctcttaccatttgctgctttggtttgaaattctcactgcctcgtagatctcattttgagcactatacattcctaaagattgatttctttctatctgacttaaatttaggaatgattaaatcttcatttctcccatgatttgatcctaaaacattttgaaaggaaacagccttgagatctgtgattactaagacatacataacattcttatcacattagaaagcaagaattgactgttgcttgtcttgttcctgttgtcttgtcccctgaattcctgtttatctttgattgtatgtgggacattgtattttcagtacatttgtagaaataatgtgaagcctataaagatgttctctgcctcc

SEQ ID NO: 1869 - DNA, 2060 bp, Homo sapiens
tataatgagattttaagcatccattagaaaagcaagttttgctaaaatgttatgatggaaaaaatgcttattaaatagtaaaaagctgtaaaactattattttgtatgaggctgacattataaaacatatcatcaagaaccccaggaaggccgggctcagtggctcatgcctgtaatcccagcactttgggaggctgaggcgggtggatcacttgaggtcaggggttcgggaccagcctggccaacgtggtggaaccctgtctctactaaaaatacaaaagttagctggatgtggtggcgggtgcctgtggtcccggctgctcgggaggctgaggcaggagaagcacttgagcctgggaggcggaggttgcagtgggccgaggtcgtgtcactgcactccagcctgggtgtcacagtgagaatctgtctcaaaaaaagaaaaaaaaaaaaaaagaatcccaggaaaaataaagagacccaaatgttaggtgttggaattaattatatgacaccctacaggtgtcagcctctgcatccctctctctttcaaactccatgcagagtatcttatgtattgagacttttaaaaaataaataaataagatccttatatgacagagatataatctaaaatcccttgaggacgtattctttgccattatttacaaaggtgactcttttttcttgatataaaatgtaaggctgggtgtggtggctcatgcctgtagtcgcagcattttgggaggccaaggtgggaggatcacttgagcttgggtttgagaccagtccaggcaacatggagagatcccgtctctatggggaaaaaaaaaaaaaaggcattaagtacattcacattgttgtgtaatcaatcgctagggctcttttccagacttgcgacttttcaatgaaatattgttttggaagtcacatctacagtgactgaggtccagaggaggtgcatcgtgaatgcatgccttcaaagttttaaaaaacaaagattaggggagaagcaggttttggaaaagcagtccagtgtctcacctctaaatgtgcagcctgtgtggggttgaacccgctctgtctatggaaacgttggtgttgtgtgtctaagttagtaccgccatcatcttgcttttgttcctagccaggatgggagggctgggatccctcctttgacttctggctcgtgtccaggcagtttgcgtcactgactgaactggggctcctatcatgtcactgaggaactagtgttgattcttggagaaggtagtctcttggccttcctggtaggcagtgaaaccgttagaccctcagggcagtaaagctattcctgcctcagagctctgccagcaaaatcatcttgattctttaaacatgtaaatctcaggctacagatttcaggaaaagtcacttttttttccttactggggacttacacagcatgtgacttttcatttaagctttaccttacatctcctcctggttcaagctgcttgggcttgcaggggccccagatcataaatgctgataaagcacagtgactccgcagggtgtgtgctctcctcgggagtggaacactcagctctgggacaggccgctgtgtacccaagggcgtgcctagacggccacgggtgaggacggggcatggtggcacctggctctgactccgcatatttctcgagtatgaagtgatgtgaagtggggtccctgggtgtcctctgcatccacctgctcattgagtccttctgagcgcagctttggcaggagcagacagtctgggctggacctcgacctgctgccctggaaagaaagcccttgctccctgcacttgctgtcacagctgtgtcttcctgggccccctctggcttgggagtcgtcaccagctctgcactggtgtttggttgtgtgagctcctagtgttcccaaaggagtgagcactcatttggagaactgagtcctcccatgatggcactgcttaaaatccaaacccagagtcaagtccagaggtcctcgacctgtgaggcaagtatggtttttacatttttaaaagttcatacatc

SEQ ID NO: 1870 - DNA, 2849 bp, Homo sapiens
gaataatattcttgcaaaaaagaaaccctataagtgtgataaatgtagaaaagcctttattcatagatcatcgcttactaaacatgagaaaacacataaaggagagggagctttccctaatggaacagatcaaggaatttatcctggaaagaaacaccatgaatgtaccgactgtgggaaaacctttctctggaagacacagcttactgagcatcagagaattcacactggggagaagccctatgaatgtaatgaatgtgggagagccttccgaaaaaaaaccaacctgcatgatcatcagagaattcatactggagaaaaaccctattcttgtaaggaatgtgggaaaaacttcagccgaagttcagctcttactaaacaccagagaattcatactcgaaataaactctaggaaccgtgaaattaaggaatttgcagaatgctttagctaaaatgttctgattcaggatcagaggattcttagagagcttgggaatgtaatgaattacgtgtgtgtttatacgttgtgtgtggagaaaactgccagtagacagatttttttttttttttaacataaagacacattctcagatctgattacagactagtgtaaaaacagctacatgtatgtagctggttggggatgatatgcctgtatgttggactttgcttttgaatatatgtatgcaggatatcatcaagtttcaacatcttgacttgtgacccccaatgtcaacagcttttttaaaaaacaaattcctgcagtaatgaccaaaacccattttaaaaattgcttgacaactgcactcaactgcagctcttacattaacttcaccatggaaaccagttccaactccaggaagtcaccattcaaagaattagatcaactagcccaaccacttcattgtacagatgaagactgaaagccaaagatgtgaagtggtttccacagtatgatacagcctataagggtaaagctgggttaaaaatgcaggtttcctggatttggggccccatggccttgccagtgaaaaggttatttttggactcagagggctttaaaataaattttaagatgtatcagatacacaaacatttaatgggcacctatgggttggacactttgagaattcttaaaagtataagtgggagcaaaatgtatgcaaatttatcacaaactatttaaagcaacttcttggaggcttacaaaccacaatttaacagaaactgtagatggttgaactactagtgacttttttccccttttcccagttacaattatactttcagctaacatatgccagtttcacagaactattaagtccccttattgtactttttatggcatgcccatgaaaaagcactttcttaagcctacagtatcagatcaatgggaaaacaacagaaaactaagaggagaattttcccgttaattttcttgcagaaaagtataagtctaattgcccattgccataaattttgtcttgtactcagagaagcaacatgcactggctcattttatgtgcaaagaaaagatttcaccattaaaaaaattaacttggctaggtatggtgtctcacacctgtaatcccagcactttgggtggctaaggcagatagactgcttgaacccaggagttcaagaccagcctggacaacatggtgaaaccccatctctttaaaaaaaaaaaaaaatccaaaaattagctgggcatggtggcatgcagtggtagtcccagctactcaggaggctgaggtgggaggatcactggaacccgggagcagagactgcagtgagctgagatcacactactgcattccagcctgagcaacagagcaagacacacacacacatcaatttattttagttgtataatgcttttctattagtaaagcatcagctaagcttcagtggcctgctccatcccctaatgactcccatgggctatcctaaaggaacttccagaacctttgttggtgtgttgacattgaccatgcagaccaatttgggcacaactggacattgattccttttacacaagagctgcctcccaaagatagataaattttcccagccctaaatatgaatcatggggcaagatattggtcgtattgatggtgaacctttcctactggattctttgcatgccacatagcaggattcattgcctttctctcatcatggatggcatgcagcagcacccaagtattcttcattctttgcagggaaaaaattgtgcatgggggctgaaatgtagtatgtgtagctcaattagtctctcctctgtgatgcaaaatggaatattcaatggcagatctgcccttctgagatgctgaccatccaaaacaccttgtttatggtgcaccatgattagctcacacacaatgccaaggctgtgcttctattatctgatacatagtttgacaatgggtaattctactcagaccctccctactgattggctaggatgcctgtcaggaactcattatgctactggttgtttggggatccccatagtggactactttcaggaatggcatgaattgtaaccaactgagtgctgcccccactgttacggaagtttataaaaccttagttccagaagacccaaaggagagtactggtttgtgtttggtgcttggcctagatccagccaccactctgaaactcatcacatcttcattgacagggagggagcccaggacatatgtgtggctcattgaccagaaggctttcttagtcccaacagccatgaaccatgcacttatggatacccagccttttagggctacgtgaaatgcatccttgtaacatcattgtattctttcaataaatagccttctgagttg

SEQ ID NO: 1871 - DNA, 2159 bp, Homo sapiens
ggctccaaaaaaaaaaaaaaaaaagacgtttctcaagaaattatcttgtcttagccaggcttgagtgctcatgctagtaataccagcactttgggaggccaaggtgggaggattgcatgagccaggagttgaaaccagcctgatcaacaagagactgacgccatctctaccaaaaaaaaaaaatttaaaacaggtgtggtggtacacgcttgtagtcccagcttcttggaggctgaggcaggaggcttgcttgagcccgggggtttgaggctgcagtgagccatgatgatgccactgtactccagcctgggtaacagagcgagactcttgtcttgaaaacaaggaaagaaattatcttacagagtctcgaggaagagagatacagcagtgtcttccaatagtatgggaagcatccctgttttagggcttcagtctgactcttggccattgtttctcactgttgccatttcaaacagggcatttctttactgtccatacatgggaagaattttgaacatccgagaccctaagtatccgagactgctgccaacacacacacacaccttcctcccctcgtctccctccctgtcatcgtggcaaccaaaattatccatagggtgacggacaataccacctctgattaagaaccagtattctagggtttctggggtttccatttctgagaacagttccatgccagagcattgttttggtcaaggaagcgtagggtttatggatgctaaacagtgggaaggtgcacacgcagtgtgctgtcccgcttggatctgacgaatcttggaagtgttagtgcacctccgtttcacacttcctgtagaagcagctcttgtggattgtctggggcgtgagtataggctgtcctgtcctaccaagttacaccctttccattgaggcagaagtgaccaaggggaagggatccttgtaatataacccacaccatccccacagtgtgaacgtggcatcactgacacaatcagaaattcgagacatcatcctgggtatggagatctcggcaccgtcacagcagcggcagcagatcgctgagatcgagaagcagaccaaggaacaatcgcagctgacggcaacacagactcgcactgtcaacaagcatggcgatgagatcatcacctccaccaccagcaactatgagacccagactttctcatccaagactgagtggagggtcagggccatctctgctgccaacctgcacctaaggaccaatcacatctatgtttcatctgacgacatcaaggagactggctacacctacatccttcccaagaatgtgcttaagaagttcatctgcatatctgaccttcgggcccaagtgagtaagtggactcagctaggccacagtgtgtgcccaactcattttgtgcctaaaactcagacctgagattgtctggaacttgagatgctggtttcaagattcatggatgagtaattatacaaggatagccaaaacaacgaggtgggttttggccccatgagatagcaaaagctgtggcagctgagagagggtagtaattgtagtattggcctgatagtatttggaagagaacagatatggtcagaaacaaattcctgaccaggtgtgcgtgctggctcatgcctgtaatcccaacactcggctgggcacagtggctaatgcctataatcccagcactttgggaggcctaggtgggtggatcacctgaggtcaggggtttgagaccagcctgaccaatatggtgaaaccctgtctctactaaaaatacaaaaaattagccaggcatggtggcatgcgcccgtagttgcagctactagggaggttgagacaggagaattgcttgaacccgggaggtgaggtggagcttgcagtgagccaagattgcatcactgcactccagcctcggcaacagagcaagaccccgtctaaaaaaacaaaaccaaaaaaaacgtggctgtagtcccagctactcaggaggatgaggttgcttgaacgcaagcagtgagctttgatgaccccactgcactccaggctgggcacagtggctcatgactgtaatcccagcactgtgggaggccgaggtgggcagatcttttgagcccaggagttcgagaccagcctgggcaacatgacgaaatggagtctctac

SEQ ID NO: 1872 - DNA, 1926 bp, Homo sapiens
ctcagcgaagatggcggcagtggagaagcggcggcaagcggtaccaccgccggccggtttcacggacagcggccgccagtcggtatcccgggcggcgggggcggccgagagcgaggaggacttcctgcggcaggtcggcgtgacggaaatgctacgtgcggccctgctgaaggtgctggaggcgcggcccgaggagccgatcgccttcctggctcactacttcgagaacatgggcctgcgctcgcctgtaaacggcggcgccggggagcccccgggccagctcctgctgcagcagcagcgcctgggccgcgcgctatggcaccttcgcctggcccaccactcccagagggccgccttcaacaacaacgtgagcgtggcctacgagtgcctgagcgccggcgggcgcaggaagaggccggggctggacgggcgcacctacagcgagctgctcaggcgcatctgccgggacggccaagcccccgaggaggtggtggcgccgctgctgcgcaaggtgcagtgccgtgaccacgaggcggtgccgctgagcgtcttccgcgcgggcacactcacctgcttcgtgctgctggagttcgtggcgcgcgccggcgcgctcttccagctgctggaggactcggccgccgccgtggccgaccgccgcgtgggccaggccgtgctggacaccctggagggcgcgctgcaggccagcgacgccgccgcgcccgcgcgcttcctggaggccggctcgcgcttggcgcccatgacccgcgaggagtttctggagagggccgccgcgctcttcatcgcgaaggtcaagccggtgggctgaggcccgtgggccgcgcggatccgggatctgcgctggggggtccccgcgtgcggggcgcgcggagccttcccttcgccctggtgaggccctgccataaccaggcgcccagccctgcggaggaggccggggctcccaggaagcggacgcccggtccccacacagcgccgcggccgcccctccacccccgcgggagcccctgccccacgctaataaaatgtgttgcgaggctgacgctggtgtgtatgcgagcgcccgcctcccagccccggtgcccgcagaagacgcttttccccagcaggtcacccacggccccggaaccgcggcggctggaggctggattcgaggccggaaacgccgggacccctggacccggcctggtgggagcagcggagggggacgccccacggggccctgcggagcctgaagccggagagcaggcggctcttctggaacgcagggcccgggccctccagccccgcccggcccaggtatcctccctgagcctcagtctccccagatgtcaaatgaagaggccagctgggcagatggtagtgacattggtgagacaacagccctaacacttcccaggaactgaagtgcctcatgtgattgattcccaggcccaggcagcggaggttacaccctcagcaagggctcagctgggatctgcgcccggcctgctccagaacgcacagggcctcccactcgccaccggtggggagggtcgtccggtatcccccagtgcccaccaccaccaaccagaatcacttctcagactgcaagagcgaatccagccgggcgtggtggctcacgcctgtgaccccagcactttgggaggctggggcggcggatcacttgaggtcaggagttcaggatcagcctggccaacgtggtgaaaccctgtctctactaaaaatacgaaaaaaaaaaaaagctgggctgtggtggcaggcgcctgtgatcccagctactcgggaggctggggcaggagaataacttgaacccgggaggcagaggtggcagtgagccgagattgagccactgcactccaatctgtgcgacagagtgagaccctgtctcaaaaacaaaacaacaacaac

SEQ ID NO: 1873 - DNA, 2590 bp, Homo sapiens
cttttttccgcacttggggaagacgaatgccgaccattggctcagacaccataccacacaggcatttctggaggcatttcgcggcgttattatgggaagttgcgcggaccggggccttcgcgctacagccgaggagtctcagcgcctgccaggcgggagccgcacttccggcgaggtgtcttcgggagggggcgccacagcccgtggcagtgccggcctcccgccttaaccagcccgactcccgccgcgccagcaccgtggggagcgagtgggtcccgcccggccgcggcctggacctggcagccgggcttcgtgggcgctctgagccgtggcccgtggcgcggggtgatccttgtgcctggcgccggcctcagaaccccgtttacggctttccgcgcatacggaggttgctggggaccccgacacctgcgcgccctcgactggggcccgctccagcagtgaagacccaggcccttccctgggccgtggctgctcttggtgcctcatgggagcgcccggggtagggactcggctagtgacctgtaggacatgaggggcgagctgggagccgattcgcccacggcgtctccttcgccatggaggccccccacccattccactccggggttgcggccacgcaccataagagcaccttcaggtctgagctctttaggggtgggagtaggcagttcgtgagtccgggaaggcctgcggggtttcccgcctgctgcggacttagcgtggggccgaccggggctggcgagggctggcgaggactggcggggacccgcggggctgagccagctctcgcgaagccctcaagtgaggaacggcgcttgtggctgcgcgctctccgcagccaagttgcagggtccagcaggggctcaggtcctgttccctccgcagatcccggatctagggctctagtggtctcggccggagggaaggtgacgcgcagtgggcgcagacgcagagtgcggggcgccgaacgtgggaaggagcgggttcagcgcgctggtgagagtttcaggaaatccgggagagggcggtatttaccagtcccttccccgagagcaaccaggcaaatcggggaaggttagaggtgggggacctgcctgagccgggacaaaaaactttggagctagggccttctaaccctggagacttgccgactccggggcgggctctcgcactcaagtcccgagatgggatgattttccaactttcgtccagcctctccttccgctcccgccgctctgctagcactcccgcactctctccctgggtcacaaccctcgcctgcggaatacctgtctgaagggcgcgtcagtagaagcttcgtttcatactacctttcttactgttctcttcatctaaatcgcaggacattattctcggcttcatttccacatagcattcggcagtggacaaggagtaggcggacccgaacctgaacctgacagctgatgccgtgaagtggacacttgaagttcttggtttggctttagggagcgtttagggaatgtgttaggcagcaatcgggcaagcatgagctgtagcccaacccttccctccgtgggaaaattcaagttaggacgcaatgcgaggcctcttaaatctttaagatcctcgggtcagctcaaagagtctttagcaattcgttgttttgtcttgagaccattatcggtccctaagcacctaattatttaatggcagccctctgggtatatcgggtagactgataggtcttatctaacattcaaacacaagtttctggaggaaactctcatctgacttcctcctttcccacccgccgcccactgtcatttattttattaaatggaacccatttaaaatccaaatttataattattaaaaagcagtcttattacatattcttgaagatttggttgtgtacgatcatttaatcatgtagtttaatttctgtgttgttcccacattgccaacttgatggaggagagcagacccgaggacttttcaacctccaataaaaaagaagaggactttatggctggggtgaaaaggggctggtgagctacgacaatggggcagcatagctttactatgtgcaaaagcattcagacacatggcgacccttttgcaataaaactttattgatgatcgtttgaaagttatggcaactccaaggttataaaacttgtcataaaataccaagcagtcattagtttacctgacctcatttcaatataaacttccacaaaacattttattttgttccttcttataagtggagaaaagaagttgaagaggttaaatacagcggcccattattgaggatccaaaatctgcaatttgacactctgaccttcatccctgcaaataaagcagtaaaatttacattttattctttaatgttccgttattgcagaaaagttaatagtgtgtaaatgttattgtagaaaagataataacagctatgttttagttccaactgcccatttttagcacataacctgtgtttaattttggatggagactttttcctctttggaagatttgtaagatatatttaacaattattaaagaatatttgctccccgagctatgc

SEQ ID NO: 1874 - DNA, 2511 bp, Homo sapiens
ataaaatcttcacaatccatgttcttctgccatggcttcagctggtccctccatttggggcccctgacttcccataacactgaccaacgtggtgaaaccccgtctctactaaaggtgcaaggatcagctgagtgtgctggtgcgtccctggagtcccagctactcgggaggctgaggcgggagaatcgcttgaatccaggaggctggggttgcagtgagctgagatcgtgccactgcactccagcctggcgacagagcaagactccatttcaaacaaacaaacaaatgaacattgctattattctgaaatattatgttaggattaaatatgtaatatttcgatttttattgatgtataacatgcatacagaaatacatccacagtaaaggattaatgtaatgctcaataaattataacaaagctaatacatttgtgtagctatagactagaactacccgtttttgcccacaaaccacttcctcttcttttttcctcctccccaaatgtaaccacaatcttaagagctaatttttttttctttttttttttgagatggagacttgccctgtcacccaggctggagtgcagtggcgcggtcttggctcactgcaacctctgcctcctgggttcaagggattctcctgcctcagcctcccgggtggctgggattgcaagcgctcaccaccatgcccagctaaattttttttgtgtttttagtggagacggggtttcaccatgttggccaggctggtcatgaactgacctcgggtgatccacctgcctcagcctcccagagtgctgggattgcaggcgtgagccaccgtgcccagccaagaggcaatgttatagattgtttgtctttttatacaagtgttttattagagaatatttttaacttatacacagtaaccaaaatagtataataggctgatgctccacctgaacatctgctaattatgtctcatttctgtttaatttctacttcaactccttccccatccccactttattattttcattttctgtaagataagatgtatatgcatcgaaacatacagtcattactgtacctgtctgacaaatcagtacatctgtataagcgtttccctttcaattacagaattactaccagttaacaattattaatgtgcatgtgaatcacctggaaatatttgaaatacagattttgatacaatatatctgggtttttgcctgaaaatgtgtatttctaacaaagtacagatccatagagcacatggtaactacaagccctctttgtctaaagtgtataaaacttgatgaataaggccaagcgcggtggctcacgcctgtaatcccagcgctttgggaggctgaggcgggtggatcccgaggtcaagagatcgagaccagcctggccagcgtggtgaaaccccgtctctactaaaaatacaaaaattagctgggcatggtggcgggcgcttgtggtcccagccgctcgggaggctgaggcaggagaatcatatgaacctgggaggcagaggttgcagtgagccgagatcgcgccacttcacttcaacctgggtgacagagtgagagtccctctcaaaaaaaacaaaaacagaaacaacttgatgaataaaattaagaaaaattgggccgggcgcggtggctcatgctggtaatcccagcactttgggaggccgaggtgggcggatcccctgaggtcaggagtttgaggccagcctgaccaacatggagaaacctcctctctactaaaaatacaaaaaattagccaggtgtggtggcacatgcctgtaatcctagtggctcaggaggttgaggcaggagaatcgtttgaacctggaagatggaggttgcagtgagccgggatggcgccattgcactccagccagggcagcaagaccaaaactccatttcaaaaaaggaaaatcgacctcagataaaataacaaatcaaaatgcatgtgcaatatgcgacctgtgggagcatttcatcaacaatgtctcacagtcatatgtgacctttactgactcgcccaaaattcggtcatttatacaccaagtgcacataaatttcatagtttcctattaaaattatatttaatgcctttataaaatctaactcagttttctgatcaaattaagtaacattttatatgacgttttaagttccgtttatattaaacttacataattttattaggcagcgtatgcgtgtctactaccaaatattcttttgagttccagcatttgcacaggcaccacagctgagaagcacagattctgggtgtttgtctgtgagactgagccaaaggtggacgctgtgttcaactgctgaagggcatttttactgccttcctgacttgacagtgaaacacttaaaaagataatggaatggatgttaactcctgtcaaataggtcacttgcaatttcttccttatgtggaggttgcaatgagctgagatcatgccactggactccagccttggcgacagagggagactgtc

SEQ ID NO: 1875 - DNA, 2253 bp, Homo sapiens
agatgcagggcaagggaccccggaggggccgcggctatgccttgggcagccttggctctcccatcctctggcctccattgcggggcccacgcttacgttacctgaggggttgtgagccgcctctcgagacttggccgccagggtcaggagccacgggttcgaagttcggccccagagtggcgttggaccagccacgatccccccacgtcctcacacccggggcttcagtttcctcagggttcattcattcgttcagcaaatatttgtggagtgcttcctatgtgccagacacagatctagacattggggatacaaagaaagcaagacagacaaggcttctgccctcatggagcttacagtctagtgggaggagatggtcaacgacaagcaaatgcacaaggtcattaaagctatgacagtaactgggagagtggatactataggcagagccatcagaaggtctctgaggagagtagtatttaattgagagactagaggaatgatgacaaagaggctgagggagcagtagccccggggatgctcccaggccatattgcaattgggtgcttgtagggagctccccctccctttcttagcttttggcttttgctgtcctgcctggcaggggaatacagtggtgggcacagacatagtcatgattattgtttgtccttttggagctcaaagttcagattgcccagttaatttatttttccccccaagacggggtcttgctctgtcgcccaggctggagtgcagtggcgtgatctcgtcccactgcaacctccgcctcccgggttcagacgattctcctgcctcagcctcctgagtagctgggattacaggcatgcaccaccacgccctgctaattttttttttttttttcggtagagacggggtttcaccttgctagccaggatggtctcgatctcctggcctcgtgatccgcccgccttggcctcccaaagcgctgggattacaggcgtgagccatcgcgcccagccctgcctacttaatttgtacccgtgctttagacaaaaactcaggtcttccttgacatcacttcttcctcaagccaggtctctcttttaaatgctgccacagcttcatgagccttatctacatagctacatcatggtattggtttttatttgtttgtatggctaattggaaaagtatctgtctttccccattatgactgtaagctctgtgaagggcaggagcaggtttgttatttgcccaccttaatattctctgggcatcagtgcctgccacataataggtgttcaaaaatatttaaatggccgggcagtgactcatgcctgtaatcccagcattttgggaagccaaggcgggcggatcacctgaggtcaggagttccagaccagcctggccagcatggcaaaaccctctctctactaaaaatacaaaaattagccaggcgtatgcctgtattctcagcctcccaagtagctgggattacaggcgtgcaccaccacgccgggctaaatttttttgtatttttagtagagacggggtttctctatgttggtcaggctgatctcgaactcccgacctcaggtgatccgccagcctcagcctcccaaagtgctgggattacaggcgtgagccactgcacccggctctcactggtcttacgccaccttctggacactccctccttgagggcagaaaggagtcccaggcctgtccctagggacaaggcccagggaagagtgtatttggggagcaggggaggggagggtgttgagaaagctgaactggagtcaatcacccttcccacaaatcaccaaactgctggaactctccagccaaatgctgggagaaggacctggagggtgagtctttgctgacctctctctactctcaggcatgtcttttgtccttttcgtccatctatttctgtctgtcgctcactcgccccgctttctctgtctcaccttcatccactctgcaggcctgctccaccacagccctaatcctctggacgcttgtgtagggcctggggtgaattccctgtcccccatggtacctcgagaggggctggggagctcagcttggtctcagagtctccccaccagatactgtttaaaaaagtagcactgatgtgttttgtaatctgcccctcccagccctccgtggaggctgccagggccttgtacggtaaacctagctgcatgtaatctgtggacaatggcattctctacaatgcaataaaaacaattacccatg

SEQ ID NO: 1876 - DNA, 2966 bp, Homo sapiens
tgaggcagaagcatcgcctgggctggtgagatcaaggctgcggtgggccatgttcgcgccgctgcactccggcctggatgacagggtgagactttgtctcaaaaaaaaaaaaataataattaccaatttggccaatgggagactattcaagctgacttgtgtctttctaactcatccccatcatttcttcacacgtttccttgctttctggcacaagatagtattcttcctctgctctaaccctggaatcagccatttccccagggagctctggatccttttagtggaaagtctaaatcttggtattttgcaagatctggatgctaggtgtgctcattgccattggggtgccactgctctgcatgctctcagtggacacagccagggaatgtgtgtgtgctcatttctgtgtggaatgaaaaccatgtgttcatggtgctacctcatgacggaggtcattttcattttttccctttccatgtttgtagctctcctctctgatggtgagaaacctggtttctactatctttaatatttttacttattccctgtgcatgtggctgatctgtcatttttgctgccactcactcctctgctcaaacacccttctctccctgcttggttctcactctccgttccaggccacccccctgtgtggacacttacctcacccacttgggcaccaacacatcacaccaggtgattctaataggtagccaggtttgagaaccaccaagagttttcaggttgaactgcacttcaatctttttatcaagcatttcccaccccattgctaactcttactggttactagttattagcaagctgccaaacattctctttcataaggaacaacagccacaatgcttgcttctcactgctggaaggcatttaatcctcttgagaaacagcaagtgattggtggagtcctggctctgcttctggtttcccaggttgattatgctagtttcacaacaatgccatgttttcttctaccgagagcagtattggtatcattaagataccaagaaatgctgaggtttcattggtattctgtaacttgtattttgctgctacggggaagatagctgttaggtttatcctgttgttagctttcaattctaaagtgaatatgggctgggtgcggtggctcacgcctgtaatcccagcactttgggaggccgaggcgggcagatcatgaggtcaggagtttgagaccagccaggccaacattgtgaaaccccgtctctactaaaaatacaaaaattagctgtgcatggtggcgggcgcctgtagtcccagcaactcgggaggctgaggcaagagaattgctggaacccgggaggcggaggttgcagtcagctgagatcgcaccactgcactccaacctgggcaacagagcaagactccgtgtcaaaaaaaaaaattgttaaagccaatatgaaccccctctgaacctcactcagctttgaaagtgctcttgcaaatcatctactccagtcccctttacaacaaataacccctgcgtgcacttgtctgtgtgcgttctcaaatgtgttcttgtctgtctgctttttattgattttcaattttgcctttttccactgttctaatttgcctttctttaaaagtgtgaaggaagaagtgttctggaggaactacttttaccgcgtctccctgattaagcagtcagcccagctcatggccctggctgcccaacagcaggccgcagggaaggaggagaagagcaatggcagagagcaagatttgccgctggcagaggcagtacggcccaaaacgccacccgttgtaatcaaatctcagcttaaaactcaagaggatgaggaagaaatttctactagcccaggtgtttctgagtttgtcagtgatgccttcgatgcctgtaacctaaatcaggaagatctaaggaaagaaatggagcaactagtgcttgacaaaaagcaagaggagacagccgtactggaagaggattctgcagattgggaaaaagaactgcagcaggaacttcaagaatatgaagtggtgacagaatctgaaaaacgagatgaaaactgggataaggaaatagagaaaatgcttcaagaggaaaattagctgttcctgaaatagaagaataatccttaacagtctgcaaactgacattaaattctagatgttgacaattactgaatcagaaggcatgaaagagtataattttatgaaattcaaaattattcttttttcaagttgaaacttgcctcttctactttaaaaaagtatatagaacagttacttctaataatcagaaagagatgttttatagaacatttctttaatataaagttagagatgtcttcataggcagtatggctatctttgccacagaaacataagtaaaattttagagttctgttttccatgaggtcaaaaatataatttattcctcagtcatggttttctaaatatctgtactccacattccattttaattgatatgagggtgttaaagtacctacttaatgggttgattactatcaaaatgaccaaattataccaaagaacttaagaggaaacactttcagaactattcacttgccaggtattttctaaaattccacctgaaagccaaaagataaaataaataagttgattttaatgatataagcatcacacaattttacattaagaaatactgtgcaggccatgcgtggtggctcaggcctgtagtcccagcactttgggaggccgaggtgggcagatcaccggaggtcaggagttcgagaccagccttgccaacatagtgaaaccctgtctctactaaaaatacaaaaattagccgggcatggtggcgggcgcctgtaatcccagctactagggaggcttttgaacccaggaggcagaggttgcggcgagctgggatcgcgccactgcactccagcctgggtgatagagtgagattcagtctc

SEQ ID NO: 1877 - DNA, 2392 bp, Homo sapiens
gctgggagagcgaagctcctctgcactgggcccaggtgcgctcctcagcgtctccgggtggcggggcgcgcgggatggaggagtcttgggaggctgcgcccggaggccaagccggggcagagctcccaatggagcccgtgggaagcctggtccccacgctggagcagccgcaggtgcccgcgaaggtgcgacaacctgaaggtcccgaaagcagcccaagtccggccggggccgtggagaaggcggcgggcgcaggcctggagccctcgagcaagaaaaagccgccttcgcctcgccccgggtccccgcgcgtgccgccgctcagcctgggctacggggtctgccccgagccgccgtcaccgggccctgccttggtcaagctgccccggaatggcgaggcgcccggggctgagcctgcgcccagcgcctgggcgcccatggagctgcaggtagatgtgcgcgtgaagcccgtgggcgcggccggtggcagcagcacgccatcgcccaggccctccacgcgcttcctcaaggtgccggtgcccgagtcccctgccttctcccgccacgcggacccggcgcaccagctcctgctgcgcgcaccatcccagggcggcacgtggggccgccgctcgccgctggctgcagcccggacggagagcggctgcgacgcagagggccgggccagccccgcggaaggaagcgccggctccccgggctcccccacgtgctgccgctgcaaggagctggggctggagaaggaggatgcggcgctgttgccccgcgcggggttggacggcgacgagaagctgccccgggccgtaacgcttacggggctacccatgtacgtgaagtccctgtactgggccctggcgttcatggctgtgctcctggcagtctctggggttgtcattgtggtcctggcctcaagagcaggagccagatgccagcagtgccccccaggctgggtgttgtccgaggagcactgttactacttctctgcagaagcgcaggcctgggaagccagccaggctttctgctcagcctaccacgctaccctccccctgctaagccacacccaggacttcctgggcagatacccagtctccaggcactcctgggtgggggcctggcgaggcccccagggctggcactggatcgacgaggccccactcccgccccagctactccctgaggacggcgaggacaatctggatatcaactgtggggccctggaggaaggcacgctggtggctgcaaactgcagcactccaagaccctgggtctgtgccaaggggacccagtgatctgggctctgcctggtcctcagcctgccaggcagatgcagcaccccctacaggggaggccagttgagagcttgggcagcctcttcctggacccagttatccaggtcttcatgctctgctcaagggggccacatgagcgagcctaggagctggacttcaacccaggaagatgcatccgagggaaaggagattttctatggcctcaggcctgagtgccaatattagtctccagcttctgtggatgatcggtttgatgacattgggatggttgtttagcatttctgtgccttggtttcattaaaatgacaatttccccctagaggaaaaagacagggttaacaaccacagcggattccaatctgggttctcattccggctcatggaaatgagtctgccgttgttcagtggcagtgggacttgacagggataacgtcattgctgtgaattctacttcaggcagctgggtgtacatcggacacagcctaccggcagcctctggaaaattaaccaaggaaaaggagcggtcagccctggaaagaggggagagcaaggttttccttccccaccctgagagttggcaaagggttggcagacaggaaggttctgggtggagatcccgcatgtgggctggccagcccctggcacgctgatgcccaagggtgagacaaggcagagaggacagggccacctggcaggagaagccaggagagcaccccagcttggtaggtggaagctgaggagtctgagtgaaaaaggaaatcagagaaatgcaggcacgttccaggcagctcttctacccacagctgcagagacgaccgacctgaagatgtctccatgctggggtgcagtgaagaccttcaggctggaggatgtggctgacagagttgtgtagttcctagaatgaaacccacttgctatccgactccaaaggccgcattctttccatcccagcacgcagtagaggaatctagaaaggtattagtggcagcggagtgggaagccatcaggtggagtgagggagaaaggaggtaccaagttgtttcacacttgtgataatccactccctcggttatctgttgctttataac

SEQ ID NO: 1878 - DNA, 2636 bp, Homo sapiens
tgaactcctgacctcgtgatctgccctcctcggcctcccaaactgctgggattacagccttgagccaccacgcctggccccaaccttctttgtcaagtgtaacagagacagagaaacacgtggagcataaagaaggaacttgcacagtgctttctaaattgggcaaacacttaaaaagcaagaattttcatacagatctagatttctggcttctcttaaaatactggcagatctaacccactgggcacaccctcctgcagggctgggagccagcagctgccacttgctgtccccgcggtctgaagctcggctgcttccctgtgtgtctgcgtttatgcccgtgccccccgccgctcctgtcccatgcccacagtgggggctcctccagtccgcagggggcccagagtggtgaccctggagtccgctggcaccccctccttttggccagtacacctaggagcaggctggctgaccccatgcccctccccaggagggtttctcttcccctcccagttcgctgacctcgccctccacgccctccagcctggggccctcactctccagcaccagtggcatcgggaccagccccagtttgaggtcgctgcagagcctgctgggccccagttccaagttccgccatgctcagggcactgtcctgcaccgagacagccacatcaccaacctcaaggggctcaacctcaccacacctggtgagagtgacggcttctgtgccaacaagctgcgtgtggccgtgccgctgctcagcagcgggggacaggtggctgtgcttgagctacggaagcctggccgcctgcccgacacggcactgcccacgctgcagaatggggcagctgtgactgatctggcctgggacccctttgacccccatcgcctcgctgtggctggtgaggacgccaggatccgactgtggcgggtacccgcagagggcctggaagaggtgctcaccacgccagagactgtgctcacaggccacacggagaagatctgctccctgcgcttccacccactggcagccaatgtgctggcctcgtcctcctatgacctcactgttcgcatctgggaccttcaggctggagctgatcggctgaagctgcagggccaccaagaccagatcttcagcctggcctggagtcctgatgggcagcagctggccactgtctgcaaggatgggcgtgtgcgggtctacaggccccggagtggccctgagcccctgcaggaaggcccagggcccaagggaggacgcggagctcgcattgtctgggtatgtgatggtcgctgtctgctggtgtctggctttgacagccaaagtgagcgccagctgctcctatatgaagctgaggccctggccggcggacccttggcagtgttgggcctggacgtggctccctcaaccctgctgcccagctacgacccagacactggcctggtgctcctgaccggcaagggcgacacccgtgtattcctgtacgagctgctccccgagtcccctttcttcctggagtgcaacagcttcacatcgcctgacccccacaagggcctcgtcctcctgcctaagacggagtgcgacgtgcgggaagtggagctgatgcggtgcctgcggctgcgtcagtcctccctggagcctgtggccttccggctgccccgagtccggaaagagttcttccaggatgacgtgttcccagacacggctgtgatctgggagcctgtgctcagtgccgaggcctggctgcaaggcgctaatgggcagccctggcttctcagcctgcagcctcctgacatgagcccagtgagccaagccccccgagaggcccctgctcgtcgggccccatcctcagcgcagtacctggaagaaaagtctgaccagcaaaagaaggaggaggtaggcatgggagagagcagctgtgcggaggtgacagagtcctggctgcacctggccacggccccttagttctccatccccaacccagactgggacagcagccacatgtcacgtccccttcacaccagagcctggtggggagaccttccagagccctaccactgaccatggggcccgggaagtgggggagggcagtgggagccctgccctggccaggccaaacccagcctaagccggcagttctgggcccaagtgcttttgggaccttggagtatattttgagcacttgaggccatgtgcagagatagtagcccttgtatctggtgccacatgccgcagcctctcagtctcttactccccctgtctcttctttgtgtctttttcaatagaaacccatcgattttgtcagggctgtaattaaaatggctcttttgaggccgggcacggtggttcatgtctgtaatcctaacactttgggagcccaaggcaggcggattgcttgagctcaggagtttgagaccaccctgggcaacacggtgaaaccccgtctgtactaaaatacaaaaatttagccgggcatggtggcgggcgcctgtgatcccagctactcgggagactgaggcaggagaatcacttgaacccaggaggtggagattgcagtgagccgaaatcgtgccactgtactccagcctgggtgacagagcgagactccgtctcaataaataaataaataaat

SEQ ID NO: 1879 - DNA, 2170 bp, Homo sapiens
gaaaaagcggcgcggctcgttcaagatggcggagctcgaccagttgcctgacgagagctcttcagcaaaagcccttgtcagtttaaaagaaggaagcttatctaacacgtggaatgaaaagtacagttctttacagaaaacacctgtttggaaaggcaggaatacaagctctgctgtggaaatgaaatttacagcaacaatgtcaacaccagataagaaagcttcacagaagattggttttcgattacgtaatctgctcaagcttcctaaagcacataaatggtgtatatacgagtggttctattcaaatatagataaaccactttttgaaggtgataatgacttttgtgtatgtctaaaggaatcttttcctaatttgaaaacaagaaagttaacaagagtagaatggggaaaaattcggcggcttatgggaaaaccacggagatgttcttctgcattttttgaggaagagagatcagcattaaaacagaaacggcagaaaataaggctcttacaacaaaggaaagttgcagatgtttcacaattcaaagatctcccagatgaaattcctttgcctctggttattggaacgaaagttacagcacgattacgtggtgttcatgatggtttgttcactggacaaatagatgctgtggatactcttaatgctacttatagagtaacttttgataggacagggcttggaacccataccatccctgactatgaagttctcagtaatgaacctcatgagacaatgccaattgctgcctttggacaaaaacagcggccttctcgattttttatgaccccaccacggttacattatactcctcctctccagtcaccaattatagataatgatcctttattaggacagtcgccgtggagaagtaaaatttctggctctgacactgaaacattaggtggttttccagtagaatttcttatccaagtgaccagattatcaaaaattctcatgattaaaaaggaacatatcaagaaattaagggaaatgaacacagaagcagaaaaattgaaatcatattccatgcccatcagcattgaatttcagcggagatatgcaacaattgttctggagcttgaacagctgaacaaggacctaaacaaagttttgcataaagttcaacagtattgctatgagcttgctccagaccaggggctccagcctgcagatcagccaacagatatgagacgcaggtgtgaggaagaagcacaggaaattgttcggcatgcaaattcctcaacaggacagccctgcgttgaaaatgaaaatctgacagacttaatttccaggcttacagctattttgttacaaattaagtgtctagcagaaggaggagacctgaattcctttgaattcaaatcacttacagactcattaaatgatatcaagagtacaatagacgcttctaatatcagttgctttcagaataatgtagaaatccatgttgcacatattcagagtggcctgagccagatgggaaacttacatgcctttgcagcaaataacaccaacagagactgagtaaagatttcattattccaactgcacgggacattgtttttgagaagttcttttcctttatataggcttccaacaccaaataacctaactgctggaaaacaagggaaatttaaatctccaaataaggcattttaatagactgtactgcttcttaaaccagcattgctgaccagcattatatttatttttcttttattattcagatgcagtagcattgcttatgttacatatgtttatattcacaaatatttttaaactgaaatatctgaacataatataatttcgtggaagaatacattgaccattttttttaatgtgcatgaattcaccgcaacacatgcagacaactgctgcaatggagagtatgaagaaacctggtctttttattcatgtcggtggcagtgtggaaattccatccagaaaattacaactccacttgatttagttgatcaccatctcagtcttcaaaagataacatcatgaggtgtgggaagtcctagttttaaggaaaccactgaaatatagatgggaaatgtggactttacaagtatatgttatatatacttgcaatgtgacatggttctgtagatcattttataataataaatattttaatttatc

SEQ ID NO: 1880 - DNA, 1972 bp, Homo sapiens
attttatttgaagacgctcacggagcggctggctaggctgaggagagctcgccgggctctgaggcgcaggaattcaataaagaaaatggcagctcttactccaaggaagaggaagcaggattctttgaagtgtgacagccttttacacttcactgaaaatctgtttccatcacctaataaaaagcactgtttttatcaaaacagtgataaaaatgaagaaaacctgcattgctctcaacaagagcattttgttttaagtgcgctcaaaacaactgaaataaatagactgccatcagcaaatcaaggctcaccatttaaatctgcgctctccactgtatctttttacaaccaaaataagtggtacctcaatccactggagagaaagctgataaaagagagtagatctacttgtctaaaaactaatgatgaagataaatcttttcccattgtgacagaaaaaatgcaaggaaaaccagtctgctccaagaagaacaacaaaaaaccacagaagagtttaactgctaagtatcaaccaaagtatagacacatcaagcctgtatcaaggaattctagaaattccaagcaaaatcgagtgatctataagccaattgtggagaaggaaaataattgtcattcagctgaaaataattccaatgctcctcgggttctgagccaaaaaataaaaccacaagttacactccagggtggagcagcattttttgttagaaaaaaatcttctcttagaaaatcgtccctggaaaatgagccgtcactgggacgcacccaaaagagtaaatcagaagtcattgaagattctgatgtagagactgtcagtgaaaaaaaaacttttgcgacaaggcaagtgccaaagtgcttggtcctagaagagaaattgaaaattggactactgagtgcaagcagtaaaaataaagagaaattaataaaggattcatcagatgacagagtttcttcaaaggaacataaagttgataaaaatgaggctttttcttcagaggattctcttggtgagaataagacaatttctcctaagtccactgtctatccaatcttcagtgcatcttcagtcaattcaaaaagatctttaggtgaagaacagttttctgtgggatctgtcaacttcatgaaacagaccaatatccagaaaaatactaataccagagatacaagtaaaaaaacaaaagaccagctcatcatcgacgctggtcagaaacattttggggctactgtgtgcaagtcttgtggtatgatatatactgcttccaaccctgaagatgaaatgcagcatgtacagcatcaccacaggtttctggaaggaatcaaatatgtgggttggaagaaagaacgtgtagtagcagagttttgggatgggaaaatcgtgttggttctgccacatgatccaagctttgctatcaaaaaggtagaagatgtccaagaacttgttgataatgaattgggcttccagcaagttgttcctaaatgtccaaacaaaataaaaacttttctttttatatctgatgaaaagagagtagttgggtgtttaattgcagaacccatcaaacaggcatttcgtgtcctgtctgaaccaattggtccagaatccccaagctctacggaatgtcctagggcttggcaatgttcagatgtaccagaacctgcagtctgtgggataagtagaatctgggttttcagactgaagagaagaaagcgcattgcaagacgactggttgataccctcaggaattgcttcatgtttggctgttttctcagcactgatgaaatagcattttctgacccaacaccagatggcaagttatttgcaaccaagtactgcaacacccctaatttcctcgtatataattttaatagttaaagctgatttcagttataaaggagttactatctggataagttcaaagagctccttattataaaatacaaactatttaatatc

SEQ ID NO: 1881 - DNA, 2156 bp, Homo sapiens
aatacaagcgctttgggaggccgaggcgggtggatcacctgaggtcgggtgtttgaggccggcctgaccaacagggagaaaccccgtctctaaaaacacaaaatttgccaggtgtggtggtgcatgcctgtaatctcagctgctccggaggctgaggcaggagaatcgcttcaatccaggaggcggaggttgcagtgagccgagatcgtgccactgccctccagcctgggcaacaagagtgaaaaatccatctaaaaaaaaaattaattcagagacagaaaaagcatcttaatggtgatatgaacaggttgttcagcaaactacaacttgtgggccaaatgcaacctgtggcctgtttttgtacagtcaggtaagctaacaatgatttttacctctttacggtgtttcctcacttccatcccatgcaactcaggttccgaggccatagtattaatcactcactgtacatgcacaactccagtggggggtccagagtgatcattgcatccaggagccaaatctcatatttctttataaatattgaaacaaaactgtggagccaaattgttaatgaaagaaagattcattatatcttggaaaaggaagccaatgatgtgaataaggatgaagaggttgaagatggtcacaggaattgtcagaggaggagatggagaaagatgaggccaagaggggaaactgagtctacacacttcagtgtagggtttccctccatgagcccaaaatccaagggacaacccggagcctcccctcaaataatcctggcagcggactctcaatgagcataggaagtgagaggaacctttccagtgtctctaggaaaccgttcacactggagacccctgagaggacagctgagtaacacaccaataacaaactcagggagctcgagaagcaaagtctgtggccagcggccctgtgattccaaatgcccagcctctgacctgctccctgagaggtcagaacttcccttcatttccatctgcagaagcaagggactgggggtgaaccatggactgaagccacagcgcacatttctcagtgtgcaattgcagcccagggaaagggtgaaaggagcagtggtcactgaatgtactgtctcttttccacaacatgcatgtctttcttgaaaatgaaaatgactacttggagcatctcctaaccaggttaggcaaaggatgtgtggacacgagactcagagggccattcagagagggtggtcatggtcctactatccaacaacagcctgacgcctgctcacgggagacaccgccaagtaggtgcaggcatccagtgggaacctggagcaaggcgggcaggtcagggcggcgggaagggaccttaacagaccttctagtcggcgactttgaagattcttcaagacaatagccagttctgaagattcatccccgtttcttcactgtaaaagtaacacgttttttgtagatgacttggaaaatacagacagccatatgttagaagtaaacaaaaccactcctaacccgtctacttcttaaaagccagtacttaacatttgaagcgtatttcttttcatcgctttgttttaaggtttttgtggaatatttttcatcatttctatttagagggtcccgttttcttcacttaacatcaataccctaagcatttcttcctgttgctaagttcacgtgcaccccttccctaactgcataatactgggtcatatgggggtatcataattgacataaccaatgcccaaatatggaacatttagattgctctctctcttcaatttttcattttagactgcattaccatctactttcccgagcacggacttttgttcctgttccagattgtttctctaggatcaattcctagaagtggattgcttgattctcagggtgatacatatgccaaatagtataccagagtattgaaggtacttgtttctaggaatcccactttgacatatcgacgatgagaataattaatattcaaatagcctgacctatgtcaggcactgtgtaccacaaactagcttacaatggggctacactgttgtgccaccgggttttacatgtgaagaaaccatggtttgcagtgagccaagattgcgccattgcactccagcctgggcaacagagcaaaaacttcat

SEQ ID NO: 1882 - DNA, 2364 bp, Homo sapiens
ttgtagagatggggtttctccacgttggtcaggctggtctccaactcctgacctcaggtgatctgcccacctcggcctctcaaagtgctgggattataggcatgagccatcgcgcccggccagtgccagcaaattctaacccgatgagttttgctaaatgttgacatttggcgctttgtctggtgggtcaggtgagagtctgcgcaatcctccacatcctcagcccctcttcagacacgagcgccagcctgttcctgccactgtgtcctctggtgcggcctctcgctgggcatgggccctgcagcagcacctggccatctaagttcaggagggtgctgtgtgctgcctctcccttcagtcctgcctccttcaatctcagcagtcccaggtctggctctgctcccaggacgctggactctcccctcccagtggactcgcaggctggccgcctctgctcctcccgaccgcagcccctacctctctcccagactccagtcgcccgtgcccaccgctgcccacgtggcctctttccaggcggcagccagggcttctggcacgtcgggcgccagcactgtcgcttgtggccacggcccgcggagcttcagtcccttgagctcctcctccagagcagggccgagggtctcgccccagcccgactggctgtgcctgcagatgatgctggtcacgcagcttttcgtttcccggaacgcaggtgggatagcagtgcccttttctggcagtgcggcattctctctggcagtcattccgcccggagaggctcatcttgggcggttctgggcgacagctgtgtggctgcacagtggccagtgagaggcatctgggaaggtggcccttgtgtagggagtcactctccttccgtcacggtcacacctcatgaaatggttagattcttccaagtgccttctacgcccctggcagattttctagaatttgctgtcccagaagcttgagaagggtccggtgccacccgacagcagaagccgggatgccgctgagatgccagcgcttctgagtccctctcactgcctgccttctggtggagagaaggctgtcctgcgggcttatgccctccccacgctcctcgcaccgttcacgccattgtgcagcacagctgttaggaccaaattcatcttccccgcaaggacgagtcaggcccagtgttgcactggtcctgctgtctggcttctgctgcggaacttcctcaccttccaggcagggcccaggagccacaggagcgtgggcagggcagggtctgccctctgtgcttccgactcgccgcttgcgagctggagggacagtcacctcgacctggtgggctgggtgggtctggctgtgctgtgggctgtgcctcactcctgcaagtgggcactcagcggggttggggtcacgaggctgaggtcggcttaaagcaggagtgggcagttggcacatcatgtttctcctgcatcagggctgtggcaggaatgccgggtgactaccgtagacacttgtcaaggttgaggttcagagaaaggtgtggggtatcccggaggtcaccacagtgtgccaggaggttcaggttggccttccagagcccggcctgtgtgaaatccccacgagcacagaggacagaacgaaacatggtgttgttttgaaacagggtgttactgtgtcacccaggctggagtagagtggtgccacattttttgtagagacggggtgtccctgtgtagcccaggctggtcttgaactcctgggtacaagcagtcctccctcgtgggcctcccaaagtgctgggattacaggcgtgggctcccgtgaccagcctggaacgtgctgatgagcctctttttctcctgaaaccccggtgggaacagatggtggatgcttccaaaagcatcgaagctgtccatgaggacatccgcgtgctctctgaggacgccatctgcactgccacagagaagccgctgggggagctatggaagtgacccaaggctgcccactggagacgcctctccctgcagtcccccgagaggtgggagactcgcggaaggccccgtccccagcagagtccagaccccacaacttcaggagctctttcccggcagcagagatctgcaggctgcctcttctgccccggagctggggtgcactggggacccccgtggtggggaccttggcagtgtggacatgagcagagcgatggagcagtctcctgccctctcccctgtcctgatggcactctgttgtattttcttactgaagttcagtgataactctgagcagtttcattgtgatcactgtaaatggtaatcagttggaattctcctaaatgtcttccagacactagtaaaaaacgacctg

SEQ ID NO: 1883 - DNA, 2311 bp, Homo sapiens
agatggagatgatccttgacaggtctggtggctggttcggggtctactgaaggctgtcttgatcaggaaactgaagactctctgcttttgccacagcagttcctgcagcttccttgaggtgagcccagggcaggagcctccccacagccccagggatcacctgaatctgcagccactctttgggcctctgttttcctgttcataccctggttcctttgcccctcagcagagtggctgaggacctaccctacttcctccaagcccagaggggaagccggggaagcctcacagcccagaggtgtcctaaggggccttttccttagaagggccatggagcctggcccagagctcacgctcacggttcacacagcttcaccttgtaaggaacaaaatgaaacaaaaaatctcacacacccaggtgagaacaggaacatctggctttgggggactggtgggacccagcgtctaggctcatctaggcccgtctgccctctccagcctctgtgggggaagaggcagtacttcctcgttccagaccctctggccgggagcccaggtcttgggctatggagcagcccctgtgtgcaggcccccacctgcccgccactctcacaggcctctcctctccagaagcccctcccccagacaaaagcctagagggagagaggccggagtccccaggcctggcttgcagcctggctctgcccacgacccgctgcggagtcttgggcaagttctattctccctccgacccttgatcttggtttctttgaattgggagctgcggcaggtgaggggtctcttagagctctttccagaataccatggaagggaaaaatcctaacggctcaaagaagtttgctaagggtcaggaagcaggggatacacgggcctctcctacccgtgtaggaggcaggaagggtcaaagcagaggccagctctcccagactgtgggggaagggctgggggggggaggcccacgaggactggccacagccaccatgcaggaacgtcctggtgtggcctggcctggctctcacagacccaaggcttccgtgtagaatatgtctgtggttattaaacagacaggcctagtggaaacaaccctgccacctgcgtgttctctgagcctcagtttcttcctctggaaagtgggttaaccgcagtacccaactcataggccaccataaggattcaatgaggtgtgtttgcaaagtgcctggcagagagtaagctgctctgtttctcatccttgttattactgttattgagatggttgctgtcgttcttggggcccaagaagggaagccagccctgaagcaaatcctgctggagtgagcctgggcccagagacatggcaggcgggacaggcagctccaggcccagatgctgtccaggagcagggccaaagcaccctctcacttctgggtgtttgattcgggtcactggcctgggttagtgagaagggctggggacaggatgtttccctccctggtgcagcccccagcgccctgggtggccttgggctagaggctctgagtcctcagaagccaagttcatcaggcctcctgcctgtctgaccgccctgcccccactccatggttttccatcctgtcacttgtagggcggggtcggcgacctaggagggccatgggtggagcttggtctgaggctcaggaagcggatggaggtgggcaccagggacaggaagcctccaatccacccttgcgggccaccccctccctgcctggtgggcagtgcctttatggcctaaaggctggaccctgggggactactgctgacttttgttttaattggaaacaaactggtattaacttcccatataagtacagtgcaaacaacctagaagtttataaagggaaaagtgaaggtagcacccaaccgtcctgccccaccttcactttaacagggaatcaactgctggtagtccttgtgggtccttccagacactttatgtgtgcatttacaaatattatgcatagttatgtatttttaaaaggcaagcaaaggccgggtgcggtggctgatgcctgtaatcccagcactttgggaggccgaggcgggcggatcacaaggtcaggagatggagaccatcctggctaacacggtgaaaccccatctctactaaaaatgcaaaaaattggccgggcatggtggcgggcgcctgtggtcccggctgctcgggaggctgaggcggaggaatggcgtgggcccgggaggcggagcttgcagtgagccgagatcgtgccactgcactccagcctgggcaacagagtaagactccatctcc

SEQ ID NO: 1884 - DNA, 2031 bp, Homo sapiens
gaacagcggagccggacggggatcgccggcgggcggcaagcggaggcgacccaggcccggcggtctccgagatgtcacgatggctgtggccatggtcaaactgtgtgaaagagcgggtctgccgctacttgctgcaccactacttaggtcacttcttccaagagcacctcagcctggaccagctcagcctcgatctgtacaagggcagcgttgccctgcgagacatccacctggaaatctgggtgaggagccaggcccgagtccaggaagtctgtgaacgaggtgctggagtcaatggagtcaccgctggagctggtggaaggcttcgtgggctccatcgaggtggccgtgccctgggctgctctgctcaccgaccactgcacagtgcgcgtgtccggcctccagctcaccttgcagccccgccggggtccaggtgagggcagggcgaggctgggggcaggcaagtggggagagtgggctggggcgtccaggacctgactgggcctgcctgccttgagaccctgtttctccctacagcgccaggggctgccgactcacagagctgggcctcatgcatgaccacaagcctgcagctggcccaggagtgtctgcgggatgggctaccggagccctctgagccaccacagcccctggaggggctggagatgtttgcccagaccattgagactggtgagcaggcccctcctggccgccctgtctcctgcccttcagtggcacacagaacaggggctccagacaacggcacggccaccctggtgcccagatgggaaattctgcctcccctttgctgctctacctgacctgagacccctccccaactcctcagtgcttcggaggatcaaagtgaccttcctggacactgtcgtgagggtggagcactctccgggtgatggggaacgtggtgtggccgtcgaggtccgtgtgcagaggtaagggcaggccgatctggggtggactggtgtgaagatggggagtgggggctgctggatggtccccacccgcagcctaggttcctgggaagaggcagggtggatctggatgggcctcggtggtggtagggttggggaggtgggctgcatcgtgagcccggactggtgtccagaggccaggtgatacaggcccagagtggccgaggccccaagaaccaagttagatgctgagggtctgaggagcaagggctggcctgagcctccgggctggacatggtggttcaggacggcctaggtgtgatggggcagctctgcaggctaggctccctgaccccgtgcccctagagcagagcactgtgtggagagaggggctccaggcctggggtggccagggcacgggctgaccctacactctccagactggagtactgtgatgaggcagtgcgggacccaagccaggcgccgccggtggacgtgcatcagccgcctgccttcctgcacaagctgctgcagctggcaggggtccgcctgcactacgaggagctcctggcacaggaagagcctccagagccccccttgcagatcggcagctgctcagggtacatggagctgatggtgaagttgaagcaaaatgaggccttccctggccccaaggtgggtccccaggcccctggggagggggtgagtaccccatctcaagactcctcctcctcagcaaggctgattatctacagcccacagtggggatgtcaagtgggggatttacttccttcttggcagctaaagaaactgaggctgtaggccaggcacagggttcacacctgtaatcccagcactttgggaggccaaggtgggtggatcatctgaggtcaggagttcgagaccagcctggccaacatggtgaaaccccgtctctactaaaaatacaaaattagccaggcgtggtggcacatgcctgtaatcccagcttcttgggaggctgaggcgggagaatcgcttgaacccaggaggcagaggttgcagtgagccaagattgcaccactgcactgcagcctgggcaacaagagtgaaactccatctc

SEQ ID NO: 1885 - DNA, 2604 bp, Homo sapiens
aatgtttttaaggtccatccatgttgtatcagaccttctttcctttcatcactgaataataatctattgtatgtattctatgtgccacatttcgtttattcattcatctgttcatgaatacttgggttgtttacaccttttggctattgtaaataatgcagctatgaacataggcgtacaaatgtctagttcgtgttttcaattcttatgggtatatatcatacccaaaaggagtagaattgctgggccatatggtgattctatgtttaactttttgaggaactgccaaatggttttccgcagctgctgtaccattttacattcccaacagcaatttcaatttctccacatctttgtcaacacttgtgattttctgttgtgtgtgtgtatgtgaatatagccattctagtaggtcgtaatggtgcaattttaatatacatttttattattaatgaagctgagtatgattttatatggctaaggatcattcacatttcttttttttaaattatcttctcatctgtcagcccctccaatgaacgtacttagagatgaccttatgtaggtagactggacgggacttggtacccagctaaatgcaaggaatgacaaaagaatgagtgcttcatcctagtttctaggcctgtgtaactgggaagatgagatcactgttaatactgtcatgggactcttggagtattgcttttttggctggaaacctctgtggccagtggcacctttgcccaagttttgcttgggcatccaggagccggcataggtgtctgctccctgcaagactgcagctggaccaggtgtactgtaagcaggcagcttccacagctggcactggggaacatggtggtggccagaagcttggagacaccaggaactgcagagctccaaagagggtgtcacaggcctgtatcaggaatctcctaggtctgggctccctgaagggccacagctcttccctccttctctcttctctccttcttgtcacccgcaatgtggcaagcaaggggtgtgtttcagccctgtttgtgttatagctcctttagccccaccacttggcaggtcctgagttcttgtcctgtatccaggaagaatgaggtatgtggacatgttgaggatgagcaaggtgaagaggagctttatcaaacaacagaacagctcagaggagacccaggagggagctacaggcaaggtgtcccaacaagtgttcagctctcagcagagaggagaccctggagtgcttagctcctctccgcaggcaggtcttcccattgagtgttcagctcttagcagaaaggagaccctagagtgagtagctcctttccacagctggtcgtcccaagtgctcgaggctggctgagtctggggtttttatgggcttcagaggggaggaagtgggtgctgtttggtccatgggaggccatgggtgcacctggaaaaagcaccataagttcttactgtgatctgtgggatgggcagcctggcccgcaggtttcaggcctacccccagcttgaaggcaggacttcaccagggccctgtctttttgctcttgagcctgtctgtctcctgccactgttcatggtgtccaggctgttcatgccaaggggtgcttgcaggtcagtgtcgagctgctctcagcaccccctgggcctccttccagtgcttattggcacctaaagtctggaggcagccaaggtgtcaggaagctagtgtgtcagcactgccctgtgcatgcacacacctggctgggttgctatagcacctgggctcggcctcaattttgcactaagattggagtgggtgccgggagtggggagaggccaggcagcaggagcaggcacttccaagcctgcaggggcagggggatccttcctgggcccctgataatgcagtgatgtctgggtccacagccatggcttgagtggctgtagctgcgcccaagagggcagaggctcctgcccgctctgtggagcacacagagctctggccgtgcctccccactgcagccagcatcttggcagtggtcactccagatgggccacctcttccattgatatgacgctttgagaatgattgagaattattattttgataataggataaataagaaggaggcaaggtggggagattaactataagaataaattctctagggcttaaatgttaagaagttgaatgagataaaaaggcaagtttaaaagataatgcaaatgaacttttaaaaattatgacttgatattagattcttgaagatgaagaagataacagagcaaaatgtgacctgagatttatagccctggggattaggtatttgtgtcacagaaataaaataggatcatatgcaatgccctaatatgacttttgctctataattggagatcaatcttaacatgcaaatactcctaagagggttgttagtgaatatgtttacactaaaatataaatgatttctatcagagttccatttatgagcaggttctgattaggataagaggagactggtgcacagagaactgtagaagggcagttggtatggggccaagaggagacccagagtagggaaaaggaagcccaaagggccagtgggagcg

SEQ ID NO: 1886 - DNA, 2010 bp, Homo sapiens
agtgaagggaggatggcggatctgctaccttttgcggttcccaccaagagtgacaaaaccttgctagtgtgggagctgagctctggacccacggccgacgctttgtatagacaaggtctcgctgtgttgctcatgctggttttgaactcctggcctcaagccatcctcccatcttggcctcccagagagcaggattacaggctgtttctcttggaggtggtgcaggaggttgaggaaagcacctctgatgagcagatagctggaggctgttcccacagtcatgtctcagcgaagaagtcggagttcagcagccatcagaaccaaggcaaagacaatgcggccgtcatggtgcagagctgcctggaaggtgaaactgcccttgtcttcccagccttggagataaacgtggtcccactgaaccacaaagactgtccctggggagaagaacagagacccggctggacgggagatcatgcaaggagcagggccctacagaaatgccagtcggagggcagcggccacaggttgggtcccttcgggatgatggggaagtttgcaaaggtaaggaggcaggagctgggcagctcactaaagcagcgcggcttccaagcagcagaggagccagaagatcctgcttcagccccagatactgtacttgatcatctctttccctttccttcttgtctattctgactccttgagataaaagaaggaggaatgtctgttctcctggattcagacggggctcaagggacatcctggtgaatgtaagtaacaataaaggcccctaacatttattttacctcgactaagagccaagcactgtcgttttgttatctcatcagattcttctgggtagcaggcatttttgcccctatctgacaggtcaggaaactgagcagagaaaggtaggtggctgctttgccgtgggactgtgggacccttgccctctctaggccctgtgctcctctaaaggactggacaagggatccctggagctgggtgacttaaattctgagatccagtctcaccattgtcaaagtaaacaactgtggagttgtcggagtagccagggttgaagttggccatcaggggcgccacatactgagtagctgtgagcatccgatggatcacgtcccccatgaagatgaagcctagggtgggagaggtgcagaggagtcaccagaaatggcccagaggggccgctttgggggccttttccccaagggcaagaagggcagcgcaggcagagctggaagtgagcctgatgccacggcccctggggtgagggctaaggatgctgcttcccattgctgccacagccaccagccctggagtctcgggagggtacccagagggggatgcactgctctccagctctgcccacaggcactgaagccactgcttctgcccagagctcttagcctccctcgggaaagcagctccctctgtttctgcccctttccccatcctccaggagaactaatgcttcatgtttttccttggtgtctgtctctcctatttccacccatctctgctggagacccctatctcaattttaaaaaaaatcacccatcaagaaacaaagctccgtgcgtggcactctgtgcagagagatctgcacaaaggaagagtccgatggctgcctcccagcctgcttcctggattcacagtctttgcagatgaaacaagtcaagatgaaggcagaccggattagggtgggccctaaatccaatgaccggtgtctttatgtaaacgaagagggagatgtggatacagagtcgcagaggagacacagggaggatccctgtcacaatgaaggcagagattagagtgacgctgtttacaaaccaaggacaccaaggatttccaggagatccagaagctaggacaagacaaggaaggctcctttcccagggccttgagagggagcgtggccctgctgacaccttaatttcagacttctggcctccagaactgcaagtgaataaatttctgttgttttcagct

SEQ ID NO: 1887 - DNA, 2140 bp, Homo sapiens
aaagacaagactactcggaagaatgtgggagaaaagaagagtggccagttccaggggtagctccaaaagagactgcagagctgtccgagaccctgacaagggaggcccaaggcaacagttccgcaggagtggaggcagcagagcagaggcctgtggaagatggcgagaggggcatgaagccaacagaagggtggaaatggaccctgaactccaggaaggctcgagaatggacacccagggacatagaggctcaaactcagaaaccagaacctccagagtcagcagagaagcttctggaatctcccggtgtggaggctggagaaggggaggctgagaaggaggaggcgggggctcagggcaggcctctgagagccctgcagaactgctgctctgtgccctcccccctcccaccagaggacgctgggactggaggcctgagacagcaggaagaggaagcagtggagctccagcccccaccaccagcccctctgtctcccccacccccagccccaactgccccccaacctcctggggatcccctcatgagccgcctgttctatggggtgaaggcagggccaggggtgggggccccccgccgcagtggacacaccttcaccgtcaacccccggcggtctgtgccccctgcgaccccagccaccccaacctctccagccacagttgatgctgcagtcccgggggctgggaagaagcggtacccaactgccgaggagatcttggttctggggggctacctccgtctcagccgcagctgccttgccaaggggtcccccgaaagacaccacaaacagcttaagatctccttcagcgagacagccctggagaccacgtaccaatacccctccgagagttcggtactggagcgccgccgggccaagcttgggctgtcccctggggagcctagccctgtgctagggactgtagaggctggacctccagacccggatgagtctgcggtccttctggaggccatcgggccagtgcaccagaaccgattcatccggcaggagcggcagcagcagcagcagcaacaacaacggagtgaagagctgctagcagagagaaagcctgggcctctggaggcccgggagcggagacccagccctggggagatgcgggatcagagccccaagggaagagagtcaagagaagaggatgaggaagagctgctgctgctgcagccagagctccagggcgggctgcgcaccaaggccctgattgtggatgagtcctgccggcggtgaccatctcccaacatagggatatacctccctccttcttataactgaagatcctggagcccggaagattcagggcagacagaccctgataatgagcctggcagggaagggcaaccaacatcttgtaacttgctttccccaccctgtttctgggggcagagccaattgcccaatttctaccctaatccaaagtccctggtgtgggtggggttaaacgtgctggtgcatcctaggtcatccaagagtgagcgccaagtcctgagaaggggcacagaactccctggagggtggagatggagcacctgccccccatggcagggtacactctccccacagccttcctccccaccatcccgtggggactctcgggatttaagcactcgtctctctgggaggcccagaccccactccatttataggcacatctccttcatttcctaggtcactgcccctttgtttacagctcctgcctcctcccttgaccacagcctggtttacaaattccatcagctcccagccccacctgccaaagtcccaggtttacaagccacgcttacttgctgtgtctgcgtggaattctctcctctgtcccctccagtcccctcattggagtgacctgaaggtgtggcttcctccactttttctcagtattactttgccttagttttccccaagagggaaggctggaactcttaactctgtaccccttgatagttatttaattctgtttctcctagtggttcacaattgaactgaattgagatggtgtcgggtggctaaggagacacctcacctctccttccccattgtgccgcctttatcaattgcctgttttgttttgtttgttttttaactttccataataaaatggagttctcttc

SEQ ID NO: 1888 - DNA, 2704 bp, Homo sapiens
tcattcctaacagaattcctggtttccagactcaccctacacatcagtgacaaatgcctcttcctataaataccataggttgtctgctctcctatcccaaaccctttgatactgcccactggaaaatggagttcatgctcctccatgggctgggctttgccacatgcctaaccttcactgtctccatgctccccaatagtggggccggggctccagccagcctgcaccctccaccattctgcattaggcaaggcatctcctcacccactcccacagcctctttgcccaaatgcctgcactgccagctgaaattgcctgcagcccactttaacccagccctcactggtacctggaagtcctctcaccacacctctatcttcccctccacaagccttttctgattgctctgaggacaaatgcccccctgctcagtataatccactaggatggtccacatcacaccccaccttgtactgtggttacattcccaaatgtttccatttctcagcaaaagaactgatggggacgaggctggagtcctggtacagctcctagcacagaaggatctcaaagtaataccttcggaatgactgttgaataaatagctactttactgtccttttactcaagtattggtcttttattttcaactctttctgtcctttttccatttatatgctgcctaagaatcttgagcagtgtttcaggagagcacattgaatgggaatgagtgaataggtaagaggccaagatagagggaactcaggcatcaagggtgggcagggtcacttagtactggacaactcaagctctgatccctgggttaaaatcctgacttcaccacttactagctgtgtgacctaggggaaataacctctctgtgccttcattgcctcacctatgatagagttaataaaagtaactacctcatattgcttttgtgaggattaaataagtcaatgcataaaaaaaactaagttgggcacatagcattcttatgactatcattcttactattactcctactgttactattattgccagatccatcatccccaaggagggatgctgagtgtcaggatttcctcaccattttcctaattaattctttcctcccctgttcacaggatgacactcctgtccaggacactaaaatgtgaagaacagctcattgtgccccagtgatgaagttgctggacacatctctttgcaggtagcagcaacagttgtagcagcagcagacgaagccattgcagaggcagaatatgctgagtgtctggagtcagcctgaagacacagggtggattatttcctggcctccacaccaaacgttcccttgcagatggagactgaatctgagggcagcagacttttatcagcttgagtttatgtcatttgatggacttggttcaacaacaagaacttacttaaaacaatgtactgtggtgatgagtcccaggggcactggtcagcctgtggagccctggatgctatccacacccacctatccctgcagctaatttagctgatctctaatttaactgagctctaatttagctgatcagattttgcttgggtaaagttcctttttaatgttctaaagtgtttacggttctcaaatatcagttaaaaactaattttaggtggccataaacataaaatagaaaccctgtaagttacagaagaccctaaattgtatcaaaaccctagagacaacttttcaatttgatccaaatttgaactggccaaccagtctttaaaacactggactagaagagataatgattgaaacatttaaaaaaaaaaagtgctccattcgcaggagcttttcctgtcctgtggttttccagttggtgaccaccatgggaggtcgctggctcggctcactcccttctcccacccttgagaatgtggagaactcccatggagaggcagaatggcaggaggtttcatgtcccgcgttgcatctcctcctgaaagaaaagcagtgatacctgaataatgctggctctccgattgatcctgtgaggatgaatttgcatttccagaatccttgagcatggattagatgtttcctgggaggtgccttgagtaccattatgtgcaagctacataattaaaacatttttcttagtttccctgggaagcttttcttgactcacagcccaggttcttctgcccaacacaaaaggagtgagttggggtctttagtctcttcttattgggtagctcttgctttaatattctgtttggtgagtgtaagggattctgcaagggacagggggcctgactacccagtctttgacttgtatcctctcccctcttcatacactcctgctgaaaaatgttaatccaaatacacatttaaacttagggtcggtccttattctgatttgagtattttaatgtctcagtgtgctgatttggtagttggaagaattattcttctggaggtctgttagactacatcctacactgacttcagaaaacagtctgtcagacaaaaaggccttatgtcaccactggtacctcagtttcctcatcccatttacagtttttctaactccagggtagtgtttagtgttaatatttgggatatattttttttcaaaactgtttttaagtagtttgtaatttgtaacaaacttgtaacctggttgggactgatattgtcatagctatgataaactttggatattagcag

SEQ ID NO: 1889 - DNA, 2578 bp, Homo sapiens
agtcgggggtgcggggctgtgacctagaggcttcagtgtcgatccccgaggtgttcgcgcgcgccagctgtcctcgcggccgcctgcgcgctggccgcctgcgcgctgccagcccgcccgcccgccaggggctccgccgccctcgcctcggcctcgttagcccgccaggagccccgcagctcctccgggagcccgctggtaactcgcgtccctcgcgcttctccggcgcctgaggggcccgcctcgggccatggtgctctcccaggaggagccggactccgcgcggggcacgagcgaggcgcagccgctcggccccgcgcccacgggggccgctccgccgcccggcccgggaccctcggacagccccgaggcggctgtcgagaaggtggaggtggagctggcggggccggcgaccgcggagccccatgagccccccgaaccccccgagggcggctggggctggctggtgatgctggcggccatgtggtgcaacgggtcggtgttcggcatccagaacgcttgcggggtgctcttcgtgtccatgctggaaaccttcggctccaaagacgatgacaagatggtctttaagacagcatgggtaggttctctctccatggggatgattttcttttgctgcccaatagtcagcgtcttcacagacctatttggttgtcggaaaacagctgtcgtgggtgctgctgttggatttgttgggctcatgtccagttcttttgtaagttccatcgagcctctgtaccttacctatggaatcatatttgcctgcggctgctcctttgcataccagccttcattggtcattttgggacactatttcaagaagcgccttggactggtgaatggcattgtcactgctggcagcagtgtcttcacaatcctgctgcctttgctcttaagggttctgattgacagcgtgggcctcttttacacattgagggtgctctgcatcttcatgtttgttctctttctggctggctttacttaccgacctcttgctaccagtaccaaagataaagagagtggaggtagcggatcctccctcttttccaggaaaaagttcagtcctccaaaaaaaattttcaattttgccatcttcaaggtgacagcttatgcagtgtgggcagttggaataccacttgcactttttggatactttgtgccttatgttcacttgatgaaacatgtaaatgaaagatttcaagatgaaaaaaataaagaggttgttctcatgtgcattggcgtcacttcaggagttggacgactgctctttggccggattgcagattatgtgcctggtgtgaagaaggtttatctacaggtactctcctttttcttcattggtctgatgtccatgatgattcctctgtgtagcatctttggggccctcattgctgtgtgcctcatcatgggtctcttcgatggatgcttcatttccattatggctcccatagcctttgagttagttggtgcccaggatgtctcccaagcaattggatttctgctcggattcatgtctatacccatgactgttggcccacccattgcagggttacttcgtgacaaactgggctcctatgatgtggcattctacctcgctggagtccctccccttattggaggtgctgtgctttgttttatcccgtggatccatagtaagaagcaaagagagatcagtaaaaccactggaaaagaaaagatggagaaaatgttggaaaaccagaactctctgctgtcaagttcatctggaatgttcaagaaagaatctgactctattatttaatatcttacatacctccaccagactggacttgctttttgaattttaagcaagtttcctttccttttatacaaattgcaaatttcatatttttttaatcacatcctaggaatagcacaataattgggaaatagaacccttatcactagaagaaccattttctgccactaaatatctctgatgtttccatgagtctgagggcagagactctggtatatgaaaacatgtctgaaagtcacatattgtgaaaatttgaagctatctcagtaaaaagcagctttggaaactgtgaatgatctttagcttgtacaaatgtttaaaaatacctcaggctatactgaaagggttgcagtttggttaggagtggaaatattttgtttgttaatgatgtcttcagttctggtacctctgttttactttcttatgctctttggaaactttttgcaaaatttaagcctgggttctagataataccagatctacctaaacctcaagtctatgttaaagttgatttcctgctgttaaataagctatgatattaagatattctgacttgctccagtgtcaagggaccttctgggagcaggtgctaacatagtgttcagaatcaatatgtgagatgaaaaggatcccctccaggaggatcctgagctgttcagaaatcatttaagtttacagcgttgttccctttgcgtttgcagtgcgttttactcaagtagccagaaacaccccacgtttctgaatttgtttaaactgtaacaataaagtaaaatagaatgcatg

SEQ ID NO: 1890 - DNA, 2182 bp, Homo sapiens
agcaatactcacccagacagaagagaccacggtaaagatcagctgacggcctctgtgggaacaaagacagggaaaggggaaatgagttcaccagaaaccaacaggcagcacaggaggtggtaaacccgaaaaagaaaatgaagaaaaagaaatacgtgaattctggcacagtgagtagccaccccggtctctgcagccgggtgtagacattctgagccccaagctaggtctggtatcagggaggcccgtgcgtctgtgtgtgtgcaggggctgagcgtgggaatcagacatccaagagagatggggtggggaggggtggggcagatggagcaacagccaggggagagagttgacttgcagaccacacaacaggcgctggctgtatctagcatgaggaatcgcagagacatccacgggactccctgcaggaaggaagaggaagagaagtcgtatttattgggcccctaccctgggaaattccccacgttggtgcttttcacaggttgttgccctgagaggcagatattatcatcccctagtcatgaaagaggaaaccaaggctgcaagcaggaaagtgactcagccaaggtcacacagctagaaagtggtagagatgggactcaacatgacatctcactccagagctggcagctgctacgggcgctgcccctgcttaaccgtgaccttcctgggatgacacgccggcctagtggcttctcggggctggtcttgaggacattcatacgcttcttcagcaaatacttactgagtgctactgtgtgccaggcactattctaggcacatcagatacagctggaaacaagacagacccaaatccctggtgcttatattctagtgggaggagacagagaaaaaaaaaaaacacacacacacacacacacatgcctgtgtgtgtcagttgattatgagagctatggaaaaagtataaagggtaaagggacaggcaatggaggaagtattgaggatactggggaaagggaattccagcattcctgctgtagagaacagcacatgcaaaggccctgaggtggagctcacagtgcatttctagaacaagccactttctctgcagtgcaaacacacccagattcatcctctctgtgttccttcctcactctagaggcccatggctagtgcagccaagcctggtcatttgagtcaggcagactgtatctccagacctagaagaggttttcaggagctctggggttcctctgagaagcctcattttctccgtctgtaaagtaggactaataaatcatccccaccttgccactgcacagggcagctgtgacagacacatgggagatgcaggcttgtgaactgtaaaattactctgctcattcaaaggggactgaacaccacttctttgattgtaactgcttcacagactggggcttggagtcatatctcctttgtccaaggctgcggtgtttcttagtggagaggctgtcagcatttgggcaggaaaattcttcatctcacaggatgtttagcacccctggctgctgcccatagctaccagtagagccccagtcattatgagaacccccaaaattctcccacgccttcctaaattcccctagggaagacagcaccttccccagctgggaataaaaaggttcaaaaaccactgatctcatccagccttcttactttagagacgaagaaactgtggcctagagagggcatgcgatttgtcccaggtcacacagtgagctggagacagagcgggcctaggcccaggtctcttgactttccttttactccagcatttccccatcttcatcgcgaaaaatcacccgggatgcagaaagcttgctgaaatacagacgcccaggccagttccctgggattccactttaggaggcccaggaatctgtgtttagtgcttttcatcccttacttatggtgtgcagaatcccctggggatcttgtgaaaatgccaagaatctgcatttctgcatttctacctggcatcgaggtgatgctgacgctctggtctagggacactaccctttgaataggggaaagtctgctttcaccctgcgagcccctgggtgaacccatatggtcagggcagttagggcattgcttcatcctgggggttggaatggggagcggtcaactgtgtctgcagattagacttacgtgaagagct

SEQ ID NO: 1891 - DNA, 2622 bp, Homo sapiens
ggatttgcatggagctagttggtggcagaggcaagctatgctctcagagcatgcctgcattttaaaaggctggaaggaaatacgtccacatgctaacttgcccctggccacgcttttctggttcttatccatgttctgcagtaaacctgttttgctgtcaacaatcaacccagcatcatggcgaaaggcaaatggcctgagggccttctgcccagggttgggcttgcagcctgggtcccttgggctggaccgaggtggatctgggggcctgtgcatctcctggttactcccgggaactgaagggatggccctgctctgcccagatccccctcccagccctgggccagaatcctccttccagaacagccccttcagacatacttagccattcccagccccagcttcaggaagcctcctgtactttccagaactgattacgatgagtgtgaaaggaaggaggacgactgtgtgccggggacatcctgtcgaaacaccctcgggtctttcacttgtagctgcgagggaggagcccccgacttccctgtggaatattctgagagaccctgtgaaggtgactctcctggcaatgaaacctgggccaccagcccagagaggcctctcaccacagcagggaccaaggctgcctttgtgcaaggcaccagccccaccccccaaggcctgccccagcggctgaacctgaccggagcagtcagggtgctctgtgagatcgagaaggtggttgtcgccatccagaagcgcttcctgcagcaggaatccatccccgagtcctcgttgtacctcagccacccctcctgcaacgtgagccacagcaatggcacacacgtgctcctggaggccggctggagcgagtgtgggaccctcatgcagagcaacatgacgaacaccgtggtgaggaccacgctgaggaacgacctgtcccaggagggcatcatccaccacctgaagatcctgagccccatctactgcgccttccagaatgacctgctgacatcctccggcttcaccctggagtggggggtttacaccatcatcgaggacctccacggcgctgggaattttgttaccgaaatgcagttgtttatcggagactctcccatacctcagaattatagcgtgtctgccagtgacgatgtcaggatcgaagtggggctctacaggcagaaaagcaacctcaaggtggtcctgacggagtgctgggcaaccccgtctagcaacgcccgggaccccatcaccttcagcttcattaacaacagctgccccgtgcccaacacatacaccaacgtgattgagaacggcaactccaataaggcccagttcaagctgaggatcttttcctttatcaacaactccatcgtctacctgcactgcaaactccgcgtctgcatggaatcccccggagccacgtgcaaaatcaattgcaataactttcggttgctgcaaaatagtgaaacctctgccacacaccagatgtcctggggacccctcatccggtctgaaggtgagcctcctcatgcagaagcaggcctgggtgccggttatgtggtccttattgtggtggccatcttcgtgctggtggcgggaacagccacccttctgatcgtgcgctaccagagaatgaatgggagatacaactttaaaatccagtccaacaacttcagctaccaggtgttctacgaataggaggcgcaggctgacaggaaggtcgccgtgagtcaagctgcctccagaacctcagagcttccctggtgggctcccccgggatccccagtgtctctctgcacctccacccatccctcggttcttaactcttcaagccttaacggaggtctgctctgacgggtgggctctgccagagcccgggtgagcccagaaaggaagacagcagccatcgtctgtcccgaagaggcaggccgtcctgtaggtcctagaggagccacagcccaggggcagatgaaggggctgcggaagacgggggcagtcctgggggtgctgcggctacaccaccacccgcgcggcccccgcagcccagacctcccaggcctgtgaccctccacaccagccctcagaaccctcctgggcttgccctcccttggcgtccgtcaccctttggcaaatatagaatatttcacattctcagagagacccgaccgcgctcttgatgctctttcgaaaataggtcagtcttagaaatatactgctaatgttatttttagtggatgtttatgctgtttgacttttctcctgtgtaccaaggtattgcttttatttacacgacagcgactcaaaaggcactcgattaatgtgacaaccttttcaataagcagaaataacgtaggtacacatcactctttacatttttctaagcattttcacagccgtttcttcatataatccaaccacagtgggaggtgtgatttacccattacacaatgagaaaccagaggagccgatgagttacttaattgaggtcacagaatgaattagcaagaaaatggttctaaaatctaagtattttagtctagaattttctccattacatcatcctaagagataatgctctgtacttcatttgaaataaactggaattgtattagatagctc

SEQ ID NO: 1892 - DNA, 4095 bp, Homo sapiens
tgattcaatttcctcagtagtttagggttactcatattattcatttcatattgggtgagttccggtaactcgtgccttttgaagaattttgtgtccattttatctaagttgtcatatttttgtgtgtagagttgttcataatatctccttattatctttttggtgtctgaagggttatggcgatatcccctgtttcaacctcatatctaaaatatgccatttctgttttcttcttcatcagccttgctatagtttttttccattttattggtcttttcaaaggaccactttgtttccgtgagtttttaaattgtttttgtgtttccagtttattcattttttgcactcttctttttattaattcctgtctcctgcttgctttgagtttattttgctctactttttctagtttcttgaagtggtgatttaattgacttgaggcttttgctcttttctatgtcattcctttgcctccgtttatggctggggctggtgttgggggatgggtcccaggtgcctggctgcagggctgtccctcagtcctgaggcccctagtcagtctcccttcttcctctcccaccttggaatttctcctattcctgatccttgtgatgtttctagggttcatagttttacttctcagggaggtaaaactgcaccatcaagactggattgcatttgcttttcagttattcatccacccactggcttggaccaggaccagggctggcatttttgggtgctttcggtttgccagatgtagcatctttgctcaggtactaaggctggaaatgcattttaagttgtctaggctggcaggtaaaatgcaagatgccttgtggttacataagtgctgcaccagtggcgtgggagccgggtaagagactgtgcactagggttaggtgagtgttctgttttgactcacggtcattttgcagtttggctttctctcttcaagtaatactgagagccagggttgtgcagaacttactttgttttcattttttatttgatttggggaggatattttatacagataagtagctatgctgctgcaattgtacccagcaactcttaagtcaaccgaagatctttgagtgctttgactcaaatgtccactcccacatctcagggtcccacaacttccccatcagggccctaccccagcatagcaaccgttgaagctgagattcatcctcctctgtgattctgctactcttttaatgatgtccagggcccaaccctctattctttctgccctctagccacaagagataagaaagtgcagtgctgccaagaagtcctcttgctttcacgctgaaccttaactcataatcaatcactcgtagcttctcagcatatttccccaaaaaaaatatgcccagtgatagccatggaacaagttagtccttataactaccatttcccaatttgtttcaaaagcctgatgccaaggaatttcctgcctgtggttacgccatcccagcttactgccagtgaaagttttatcaattgcatcccagccatggtgcccagccccactcactgccagccctgaggtcctcattgcgagctgatgagtattcaggcttcaaatttatattttagagtaagctttacagacaacttaccaaggtcagtttctctgtaaggcagactagagatggatacaggaatgcaggaagcatcctgaagagctgtagggtcagcatgcctcaggaaatggggaggcaggactgtaggaggagcgaggtgctgagctacagtgcaggtagaacaaagacccagctgctcctgcggaggatcccaagggctgagagcgtcatgtagtgttttttaattgaggagagaagcgtggccttcctattttcaattcagccaatctttcttgtgggctgtcccctagaaggaggagtgaacttggaattgggcagtgcagctttcctcaagggagaagaagtcccagagagccacccagctgagaactgccggcctccaacaccccagcagccacagatgctgagttctccatttcttccttaaggacccaccagcaccattttatttatttaaaatatactgtaatatctttaatggcccaaactgctcgcgttaaaaatgttgattttaaaagcctgaactgctcatgttaaaaatgcagcgtccaaacatgtgcttccccgtaactgagtgtgcccaactaacagaaagatttcagatgacacctgcactggggtggaggtggcctaggtgacatctgaggccctcccaagcatgagacccatttccgtgactcaccaggatgttttctagccggaaggtttcattatgtccagtgttccatggctcctccaagttctgagaacacggagtcctccccttacttctggggctaagcagggaacctgcaactctcattgtgaagccatcctcaagccacctgcctacccttttatagtcattaaaatgtccctaggaatttggacttgttttgttccaaaggacatggtctcagggatcaacctaaggaacactagtgatgagcttctttaggtttgaatgcaagtaaccttgtgaccctccctaaaatccatgggcctcagtttccctagcagaatggaatgacaatccctgctcccataggcttgtgagggtcaagtgaggaaccccgttgccacatgtatgaatacctgagtacacaccccctccacctcttccctccaggagaataagctggcaacctgggacaggatgagtgagaatggggagcctctttctgtggcttctgccttgtgctggagtgaagatagcctgggcaggatgcaggttcaaaggtggggcatagatgggcccaggcagcctcagatggggtaagtggaggcccctacaatggcctcccaagtggtctctctcatagcccctcgtcttccctgatttccaggcccggcatcatcccttactgcgctgctcctcatagctgtcctcctgggccccatctacgtcccctggaagcagaagacctgactgtaagtacaaggaagggaggacagaccaagggctgtctcagaagggcaaggccaacaggaaggcccagcccacatgccatgcagcaccagggtccgtggagttaagctccctccgcaccctcggaagtcttggggaaccctttaaaaggctcccaacccacagaaattatgtgggtggtgtacaatgtgggatgcttgaaatgtgttcaaagatgtccacagtgccctaggagtttcatggaggcagtgatgagtgggtggtcccttgcaggctatctgtagattatttgaatgctgggactccatggggtcagagaaatccacattgtaaactaatgttgagaaacccaaatgggaagccctgaaggctgtttgtgctctgaccctctgtgtgtctgagtggaaggaatattggaaagggcatcaggacttggcaggatggctgagcaggcagagttctatcaggactgcctgtccaccagtgacaggtatcccaggagaccagccccgagaacataacagactctcaggaaacatgtcttgaaagatgagcagatgactaagtgtggatgtgttttcctacagctccttccttcctcccctgccacgtgggaccctcatctctgctgcctccttcctttcctgagaggctcagcttgagagaatgagccagtgagaagcttctctagacttggctccaaacatctcccctcccaagacatctgcctgcccacaggctcctgttgctccttcacacagacctggatgccccagagcaaggtcttcattcatggtcctgagcaggtgccatgggattgggctctgggcactgacttaacggcacctccctagaaggcgagaaacatgccaaatctaaacacaccaggactcccatccatcgccttgagactgaccgtaaaccacagacgctctccaggttctcaagagttatcctgccttccagattcctgcctatcccaactccccagccttgttgaggttctctattgcctcttgaatacaaatgcactcccaaagtggttttaagaaaataaaaagattatccttc

SEQ ID NO: 1893 - DNA, 3111 bp, Homo sapiens
atataattccagagtacatctctgcatttgcaaacactgagggaggctatctttttattggagtggatgataagagtaggaaagtcctgggatgtgccaaagaacaggttgaccctgactctttgaaaaatgtaattgcaagagcaatttctaagttgcccattgttcatttttgctcttcaaaacctcgggtagagtacagcaccaaaatcgtagaagtgttttgtgggaaagagttgtatggctatctctgtgtgattaaagtgaaggcattctgttgtgtggtgttctcggaagctcccaagtcatggatggtgagggagaagtacatccgccccttgacaactgaggaatgggtagagaaaatgatggacgcagatccagagtttcctccagactttgctgaggcctttgagtctcagttgagtctatctgacagtccttcactttgcagaccagtgtattctaagaaaggtctggaacacaaagctgatctacaacaacatttatttccagttccaccaggacatttggaatgtactccagagtccctctggaaggagctgtctttacagcatgaaggactaaaggagttaatacacaagcaaatgcgacctttctcccagggaattgtgatcctctctagaagctgggctgtggacctgaacttgcaggagaagccaggagtcatctgtgatgctctgctgatagcacagaacagcacccccattctctacaccattctcagggagcaggatgcagagggccaggactactgcactcgcaccgcctttactttgaagcagaagctagtgaacatggggggctacaccgggaaggtgtgtgtcagggccaaggtcctctgcctgagtcctgagagcagcacagaggccttggaggctgcagtgtctccgatggattaccctgcgtcctatagccttgcaggcacccagcacatggaagccctgctgcagtccctcgtgattgtcttactcggcttcaggtctctcttgagtgaccagctcggctgtgaggttttaaatctgctcacagcccagcagtatgagatattctccagaagcctccgcaagaacagagagttgtttgtccacggcttacctggctcagggaagaccatcatggccatgaagatcatggagaagatcaggaatgtgtttcactgtgaggcacacagaattctctacgtttgtgaaaaccagcctctgaggaactttatcagtgttagaaatatctgccgagcagagacccggaaaactttcctaagagaaaaatttgaacacattcaacacatcgtcattgacgaagctcagaatttccgtactgaagatggggactggtataggaaggcaaaaaccatcactcagagagaaaaggattgtccaggagttctctggatctttctggactactttcagaccagtcacttgggtcacagtggccttccccctctctcagcacagtatccaagagaagagctcaccagagtagttcgcaatgcagatgaaatagccgagtacatacaacaagaaatgcaactaattatagaaaatcctccaattaatatcccccatgggtatctggcaattctcagtgaagctaaatgggttccaggtgttccaggcaacacaaaaattattaaaaactttactttggagcaaatagtgacctatgtggcagacacctgcaggtgcttctttgaaaggggctattctccaaaggatgttgctgtgcttgtcagcaccgtgacagaagtggagcagtatcagtctaagctcttgaaagcaatgaggaagaaaatggtggtgcagctcagtgatgcatgtgatatgttgggtgtgcacattgtgttggacagtgtccggcgattctcaggcctggaaaggagcatagtgtttgggatccatccaaggacagctgacccagctatcttacccaatattctgatctgtctggcttccagggcaaaacagcacctatatatttttctgtgaagtgactattaggaagaactccaaaccaaaatactgtgtaaatgtctatgggtgacagtctgctgatggtagaaacctttctttttagttcacaagtcagttagagatttggacagagctgacacaaagagtttggagctcccccatttctggctctcctttcaggggttcctcccccaactcttttcagcagtggtggctgccccccattctgacccctgactcttgcagccagaaagatggtggttttctaaaggaactttagctgtgctgcacaatgcagacctgtgtcttgctctctgggtaaaagccataaaaataagaaactcagcctgtggcctttcttccaaggctggagttctcgagttctcttttatgtgacttcgtgtagtttgttgctttaaaaaatttgtccagaattgttttctgcagaagcatggtctgttaggagcttacaggccataggagaagcagttgtttcctgaatttatctttgctgtattcatttagggcttgggagagtcccaagataattcagtcactgtcagattaatcatttcggcagaacaaacaatattgttatgattatttaatccttaaaattgtgatctccagagtttgttatcagaataacccagaccaaggcttaattgtaatagtgaacattaatggtacctttacagagaaattataggccaagagaaaatgctggctttcagtagaagttaatattagaaacccaaatctggttctgaaagtgtgtatcagatgtacggtgaacaaacttgggaaagattttctttaaaaatcaatgagcgttggccaggcacggtggctcacacctgtaatcccagctgtttgggaggctgaggcaggtggatcacctgaggtcaggagttcaagaccagcctggccaacatggagaaaccccatctctactaaaaatacaaaaattagcagggcatggtggtgcatgcctgtatcccagctacttgggaggctgaagcatgagaatcacttgaatcctggaggcagaggttgcagtgagctgagatcatgtcactgtactccagcctgggcaacagagtgagactgtccc

SEQ ID NO: 1894 - DNA, 3724 bp, Homo sapiens
ttaacaatgactttattaccgggaaggacgagtcaaaaaataggaaggcctgggaaccctcaggctcgccactctaggttttagagacctgaaacatcacagaagcttctgagtggttctgaagattcaagaggtttgcaggttgctatgttaatgttgtttgtctttggagtcttacttcatgaagtctcactgagtggtcagaatgaagctcctcctaatactcacagcattccaggcgaacctctgtataactatgccagcatccgcttgccagaggagcacattcccttctttttgcacaacaataggcatattgccactgtctgtaggaaagactctctttgtccatataagaaacacctagagaagctaaagtactgctggggttatgagaaatcctgcaaaccagagttcaggtttggttacccagtttgcagctatgtcgacatgggatggacggacactcttgagtcagctgaggacatattttggaaacaagctgactttggatatgccagagagaggctggaggagatgcatgtgctctgtcagcctaaggaaacgagtgactcaagtctggtgtgttcccgttatcttcagtactgcagggcaaccaatctctatcttgatttaagaaacatcaagagaaatcatgacagatttaaggaggactttttccagagtggtgaaattggagggcactgtaaacttgacatccgtacattgacgtctgaaggtcggcgcaaaagccctctgcagtcatggtgttaacatgtatcaccacttctgtgatttcatcaatctttatattactcagcacgttaataactcattcagtactgacgtgtacatcgtgatgtgggacacctgtctttcacctcccgccatggttctgaggcctccccagccatgtggaactagttcttacggatatggtgacctattctccgacacatggaatgcatttactgattatgacgttatacatttgaaaacttatgattccaaaagggtatgttttaaagaagctgttttttcattactcccccgcatgaggtatgggctgttctataatactcctctgatatctggctgtcaaaatactggactattcagggcatttgcccagcatgtactacacagactaaacatcacacaagaaggacctaaggatggaaaaattcgagtcaccattcttgcacggagcacccgaagttcaccaactactctttcgatgtagaagaatttatgtatcttgtccttcaggctgcagaccacgtattgcaacacccaaagtggccatttaagaagaaacatgatgagctataaatatgctgagtctgtttgcaaaaagagagtgtttaaacactccaacacccagacttagaattaaatcagtaaagcaatctgttatttcctatccccgaattaccttttctatgccaaaacataccttcaggatattgttatgtgttgtatagatgttaagtgtttcatgtggtttttgtgtcattgctatttatcaatagcaataattttgcactgaaaactttttatagttcaaaaattaagcatggactccccagtatactttaactttctttctttcttttttttttttttggagacagagtctcactgtcacccaggctggagtgcagtggcatgatctcagtttatgcaacttctgcctccccaggttcaagcgattcttttgcctcagccacctgactagctgggattgcagcctgcaccaccacacctggctaaatttttgttgttgtcgttgagatacagtttcactctgtcacccaggctggagtgcagtggcatgatctcagctcactgcaacctctgccttctggattcaagtgattcttgtgccttagcctcccaagtagctgggattacaggcgtgcaccaccacgcccagttgatttttgtatttttgatagagacggagtttcaccgtgttggccaggctggtctcgaactctgggttcaagaaatcctcccaccttgcctcccaaagtgctgggattacaggtgtgagccaccacgcatggccctgaactttctctttttaggaataccaaagttttcaactttttcagctttagaatttgtaaatatttttgtagaatatcatatgactgtaattccagagtgttccaacttgtttatgatatatttgggtaaatttacaactgttcttttatttgccataatctggttataacactgtttgtggtaggaaaggaaaacatgcaaaacatacacacacacacacacacacacacacacacgcagagttgtgattctcagtaccaagctataggaccatgttatagatcagcgtttagtcacctccaggttatatgcatcgagaacctgaataaatcatgccactatattaatttatattacatgtttcatatttaaatcatgttttcctaaaatgtagcaactacatgtgataaaagcaaattagaacattctgtaggactgtcttgcataccttctgtctggtttccactgattccttcttagccatggagagcatttgtgattaattaatttatatatgaaataatggtttccattttatgcgagtatttgtaactgcatataccagtgcgtgtgcgtctacctctgtcagcatgaaagtattccagtctttaatttcaaaaacttcaaattagcctcatgaagagaatttttccctgtgaaaagtaagaccaagaaaaaacaaactaaagacatgtgacttattcaatgaaagtgaaaaagaagctctaaaacagtgtcattgattaaaaagaatatctggaatgtagccccactctttgagtgggattcatttcttactgcttatgaactttcaatttagtagtcagaaaccatggatttattttactgcacaatgtgaagtttacattttattaacacttgagtagtctgatttagagactagttacttctattttttaaaataatggagtaacaaattacagaatagctaaataattttttaaaaatattttacagttgtaaaaaatatccatcagaaaaatgacacacaaaacaaaatatctggacctttacagaagacgtttgctgacccccactttaaaggattggaacagtcttctagaattgaggaatatttattaaaatacctgtaaagaaaatagtgaatcactgtagcaatggctttgattcagaccttaaaatcacataagaagaattacaacatgttatggatttttaagtggcaggtattgtaactgttttttgtgtgcaaaatactgagtaaccactgggaaaatatttcagatgaaagggatgacaaaagcatgttgcgctttgcatcagcaaggcattgacttctgaaaaaatgatctgaaaaaagtttcaccgtttgtcttcttacctcattttaagaagcatgtgaaaatgggatactatagactactgagaatttcagaaattgagaacaatttcataataaaacggctatatttgaagagagaatacattttatataaacaggaaaatacatttgacactttatggaattttatgagactttttgtgggaacagaaggtcttcaaattgtaaaatgtaaagattgctctttttattaagtctttaacagggatgtatttcattgtatgttttgggtatggctttggaataaatcattttatattttatttg

SEQ ID NO: 1895 - DNA, 2889 bp, Homo sapiens
atgtggaaatttcgcatctggcccacctgctgctctgcacactatccccgccttccccaggcaggaagcagggctgctgtgagctagaaactgggctttttgcctggtggcaacccggaggctgcagggagggcctggggcacctgggctgagctgtgggaggggactcagggccactagacccgggtaccagtgcctgggccactggttctggggagcgccaaatgtgccgaagggttctgagtcaggctgtatgggggtcttacggcccctccccggagccctaccccacctggagtctgggagatgggcaacaggtgcctggtcactgtggtgtttgccaactcctgggctccttccccgggatgccgcttggggcctgggagaggtggagtgggtgggcagtctttcctgctgcaggttcaggactgggtgaggcggcgtgggtgggcctcccttctgacccgggtctctcccgctgcaggttcgggattgggagaggcggcatgggcgggcctccctcccgacacaggatctttcctgctgcaagttcgggaccaggagaggcggcatgggtgggcctccctcctgacacaggatctttcctgctgcaggtttgggaccaggagaggcggcatgggtgggcctccctcctgacccaggtgtctcccgctgcaggttcgggactgggagaggcgatgtgggtgggcctgacacagggtctctccggctgcaggttcaggactgggaggggcggcgtgggtgggcctccctcctgacccgggtctctcccgctgcaggttcgggactgggagaagtggcatgggtggacctccctcctgacacagcgtctctcccgcaggtttggaaggcgctttgagtccccgctgctgtggcagagcgccatcatgatcctgaccatgctgctgatgctgaagctgtgcaccgaggtccgtgtggccaacgagctcaacgccaggcgccgctcctttacagctgcagatagcaaggatgaagaagtcaaggttgcccccaggcggtccttcctggtgctttgaatatgttattccactgccctctggactccattgtttctgatgagaagtcagctgttaatcttattggggtttccttacttcgacccccaccacttctggcagtggagcagcttctcggactacgtgcagtgcgtcctggccttcacgggcgtggcgggctacatcacctacctgtccattgactccgccctgtttgtggagaccctgggcttcctggctgtgctgaccgaagccatgctgggtgtgccccagctttaccgcaaccaccgccaccagtccacggagggcatgagcatcaagatggtgctcatgtggaccagtggtgacgccttcaagacggcctacttcctgctgaagggtgcccctctgcagttctccgtgtgcggcctgctgcaggtgctggtggacctggccatcctggggcaggcctacgccttcgcccgccacccccagaagccggcgccccacgccgtgcaccccactggcaccaaggccctctgacagtggggaggacgaggatgtgggaccgccagccgtgggcactggtgggccctgacctccccgcggggagggtgggtgctgtggcccctgcaggtgtggcagagatggggcacgggcattggggtctccatcagcctctgtggggtgtctcagggtgggcagtgggggtggggctgggacgctgtttgtgctcagcggggacagccagggttgatctggccccgagggttttggatgtttttaggatgacataaaaagcaagtgttttccccatttcctcttatgaaacaccgtctgagcccaaggtacacattgggcggcctgcaggaacctgctccaggtggacacacgggccagcagccgcgaaccttgaagctggggtgaccgcaggagacccttcggtgtttcctgggcctttggagtggctgcgaggcctgaacgccttgtggatccgctgtgtccagcccggctgagcatcgccagggctagctcatgctgctcttgtcagcctctggttctcctcgagtccttggggacgtggcagatgccagcgaccatcagacaacgtggaggccctcatgggcaatggctgagggggccgggctgaggctgtgcacatgcagtctgcacgccactcttgggctctgctggcggagatccccttccttctgggtgcagactgcacctccggatgcagttttgatgtccatcttccaggagagagacggtctcgggtccagggagtggagggggctgcccctgccgtgcaggtcctggccgatggcgccttaccctgctgccctgggcttttggcctgaagcaaattcctgagtggggggtactggggcctgccgcatcctgtcctgtccactgcccacccccgtgtgctggctccctcacttctggctgcagtgggagccgccagtctgacccttgtcaccgcacgctctgcccccaccccgttgcaagaggtcacaccatgtcagcagccttgcactgaccgcagccggcccccaggcctcagagttctggatgcttccgtgcggctccaacaggcatcgtcttcccttccgcaggtggaggggccgcttcccgcaggcatctgagctctgtgccggggccgtggccatgggaagatgttccacgctgcctcctcctcgagttttcctcggaaacactcttgaatgtctgagtgagggtcctgcttagctctttggcctgtgagatgctttgaaaatttttatttttttaagatgaagcaagatgtctgtagcggtaattgcctcacattaaactgtcgccgactgcaggcgcagtgactgctgaatgt

SEQ ID NO: 1896 - DNA, 3609 bp, Homo sapiens
tttttaaaaaatacctttactacccaacatctcagaagaacatacttacaattcacttaaaatagcaaaaataaatattaatactaaaggttaaaagtaaagttcttttttccccacatctaatgcctactccctgtccttacagatgatcaggtttgcagggtctttttatgtctgttctttcagatatattctatgcctatcaaagcatgtatgtatatttttacataaacaagattatccaatatatactatactgtaacttttccactttatctctttctcagacatctttccatatcagctctctgtcatagaatcaattatacagttaaagtgagtttgttatttatgggtattaagtgtttatggtgtttagtttttacatccaatcatcagtgaaagtctgggacaaatacttctgtatttgtgccactatagctttagacagtattcctaagaaaaagataggaccaaagcatatgtacattttaaattttggctgatattacctatataccttcctacaatattgcaccagtgcttcttactggcaacaatgtgtatgagtttctatttccctacactagcaccaatactgagtatcatgagacataaatctattatattcaaaattgtatttagttttaatttgtatttccttaattagaagaaaggttgagcatctttacttctatttgcaatttgtatttcttttattatgagttaaatgtttctatcctttgcccatttcgtggtggcattattcgtattttttgttgttgatttgtgggaactctttcttagagaaacttagtccttcccatcatatgtattgaagggtttttttgtaagtttgtcttgttattttttatgggtttttttaagtatatatagaagttttgtttatttttaatgaaatcaaaactgtctcttctgtaatggctctggtttttttgtgacgcttagaaagtccttctcattaaagatcaccccaagaatctccctcactttgacttagtatttttagcatcatagccttttaatagttatctgcatggattagaacattggtgtttaaagttttttttaaccagaatagtatgaaatacattttatatatcacaatgcagcatacacacatgaaaaaatatattaagaaaatgttatttactcatactacatctgacatgttattttctactgtttcatttaagaaaacagtactaatctgttcattagtttcatagcctactaatagttcagaacccagtttgaaaaacatcggattagaggattccagttttaagttctgaaaaatttctgaatttatgtaaatgtaacttgatgtatcagaaagttatctttaatgagattcctcgagtttctgcttttaaataagtagtgtttcatatttgaaaatttttgaaattcgaggtaggcatgcttaattgtaaacagttttaactctgtttaagttgcttgatgacatgatagtttttttcatcaagattatatacacactacactaaagctgtcaagttagttttcttaagttgcttaatatcaaatgtagactgaacaccgtcttagttgaattttttacttgtgcatgtgcaattggttcttgtggcattatataggtataacttaaatatgaaaaggagtgagatatagacggccctcccaaactcactgtcagaaccaaagatggaattcaggacttcatttcctgaatgttgccttcatttccttatccaaaattagattagttaatatataatcacagaaataagctgaaaattatttttacaaatataaattctgaccaggtgtggtggctcatgcctgtaattccagcactttgggaggccaaggcagaagcttgcttgaacctaggagttcaagaccagcctgggcaacataggtagaccctatctctacacaaattaaaaagttagccaggcgtggtggctcatgcctgcggtcccagatacttgggaggctgaggcaggaggatcatttgaccctaggaggtcaaggctgcattgagctgattatgctgctgcactccagcctgggtgacagagcaagaccctgtctcaaaaaaaataaagtttcaaattcttcacaattatattctgaatcatttatgctaatttttaaaaacactttaatcctcaggaacaggatctggacttggcacatttcttttaaaggtgcttgaagacgaattcccagaagtatacagatttgtgacttccatttatccttctggtgaggatgatgtcataacctcaccttataatagcatcttggcaatgaaggaacttaatgagcatgcagactgtgtattgcccattgacaatcaagtaagaaatgacattggaacttatgaataaatgttatatatattcagtcctgtattatgtatgtgtgtttatatgaaacgttctcttcacttttcagccttcttagagaaaaaatcagtttaaattgtttttctttctctttcctggtagaatatcatctacatccactcttcttaatagcttctctcccaatgtttttccctcaaaagtctttatttgacatcattagcaaaatcgacctcatggtgaattctggaaagttgggtacaactgtgaagccaaagagtctggttacttcaagttctggggctttaaaaaagcagcataagaagccctttgatgcaatgaataacattgtggcaaatttgctcctcaacctaacgaggtaattctatccagggatagtcaaaaaactttattgtgcttttggagatattttgaatttttgtagtagcattttttagttattctaaattgtagaagctgcttctgtttttattttgtcttctatcttttcttggagtgatcacgcagaattttaccttctatgactccaaagcagcatttccccaagtatgttccatggaatatgaacagatatcatatgatgtaaaagattttgtggttgacacacttgtaaaacacgtagacaaaattaaacattttttagctgtagaatgtcttaatcatttaaaccaactaatctgtacctcctcattaactggtccaaaagatttctgtggctttttggtatcagagattgctttgacattattatattctagattatagagtatattaagcagattcttgaggaaattagttgtttctacagttactaattattgacttatatgtgtttaactcaaatataaagtttgttttaaataggatatttttatatgtgtaatgagcaactataatagtatattgattacacttcagataatccagaaagaatgactgtagggccagccatggtggctcatgcctgtaaatctcagcacattaggaggccaaggcaggtagattgcttgagcccaggagctggagatcagcctggggcacatggtaaaatcccatatctacaaaaaatacaaaaattagccaggcaaggtgttgtatgcctactgtagtctcagctgctcaggaggctgagatgggaggcggcggttgcagtgagctgagatcacaccactacactccagcctgggcaaccagagcgagaccctgtctc

SEQ ID NO: 1897 - DNA, 2960 bp, Homo sapiens
tgtggccatgcaccccaaagtgtagcgtgggccctgtgctccagctctgaccaacactaaccccggctggaggcaggagagccaggccaccgaggggtgtgcgggcacatccctctccttagaaaccgggccaggcctaggagtatggaggcctcacatttctctgggggagcaccgacagcctgtctccctgttttccctcacctggttgtcattcagtcatggaaccagggtctactaagcactcgttctgtgcccagctctgggctgagacaaggcagtgcccccaccccgctccccccgggtgaatggaggcattcccagactgccagacctttggtgctaacaccaggacgtcctggacagaccaggaagagctcgtcactgcgttcccagaggggatgctgtgacctcacaggggctgctggcctcagccccctcacccaccaccaggcagcccgtgaatggccagatgccaggggtcactgcctgctccaaacaactgtgagagtcctgtctgctcatcccagggagggataagtctgtacccttggccttaacaaggggcgcccggtggcatctcatgctgtccccagcctgggcagtgacttctgcatggtccaggggtccctgggtactctttagccacctccgtcttcatggccacctggggcttagcactcacatccagccaccaaggagccgctggagctgtgggctggtggccctggttcagaatgtcaggcccggggtgggtcggggtagtccggatgaagcccctccagaggaccgcccccgactaggacagcatctgggccccagagggattcctggaggccccatctctggcgctcctgccgtgccgtgccctgccatgccctgcactgggggatgcaggccagcccttcgcagctgtccatggccatgctcagcccaccctttgtagcttggccaagtctgtcagtgcctgggtcccaggccgccctgtgcgtgcctccgtgtgcttcctgcagctcccagggccctcgtcctgagtggggtggggggctctgcccacacatgcctccagcggccagggagcatgggagcacagcccccaggctgcctgccgttagttgtcaggtgagtccctgcgcaggcctgggttctgacccccacgcagatgacagctacagccacacaatccccatccatggggtctcccagcctgaaaccctgatgtgtcagtcaaaaggatgaccaccaggcttgcagccagcttgggacatgagccgcgctccttcaatgtccttggggagggcccctgggctcacacctttgaccctagccctctgtgtggatgctacccttggaaccttatctcacgcaaacaagtgcagttcctcagatgtcacatttcatgtgccacagccccacacacaagccccagggactcctcccatgggcccctttccatcaggcctctgtgagtctataccccatcagcccctggcccagtgagtctgtctgtccgcccacctgcccaggtggcgcctcatgttggtttcctgctggaaatgcttgggacagggtggaactgggtttcctgggctttggggctggaggtgtctctattgcggtccctggcttcccactgagctgtgggcaaggctgctgcgctgggggatggctggggcacggagcgaggttccctgctaagctgcgcgctttcccccaggtgatccgcaggggctggctgaccatcaacaacatcagcctgatgaaaggcggctccaaggagtactggtttgtgctgactgccgagtcactgtcctggtacaaggatgaggaggagaaagagaagaagtacatgctgcctctggacaacctcaagatccgtgatgtggagaagggcttcatgtccaacaagcacgtcttcgccatcttcaacacggagcagagaaacgtctacaaggacctgcggcagatcgagctggcctgtgactcccaggaagacgtggacagctggaaggcctcgttcctccgagctggcgtctaccccgagaaggaccaggtgaggagccgtcctgcgcagccaggcccagagcccccacctgggagaggaagcagggctggctttccccaggacaggtcattttcaggccatgttagccgggagtctctgaaatcatgtagcagatgcccacttgagcaagcaaaggagaaattgggggtactttgtcatcagggcccagaaagttccctcacggaagccagtgaccggggcacacaggggatggggtcccacttgctttgttctcctctcttttccccttccatcctgaggtagagtgaacatggccacccttggccccaatattaaaatgccttgccgggcacggtgggtggttcgcccctgtaatcccagcactttgggaggctgaggtgggcagatcatttgagctcaggggttcgaaaccagcctggccaacatggtgaaaccccgtctctactaaaactacaaaaattagccaggcatggtggtacgtgcctgtaatcccagttactcaggaggcttaggcaggagatcgcttaaacccgggaggtagaggttgcagtgagctgagatcacgccattgcactccagcctgggcgacagagcaagactccatctcaaaaataaaataaaatgtcccaaggttgggtgtggtggcttacacctgcaatcccaacactttgggaggcaatgtgggcagatcctttgggcccaggagttcgaaaacagcctgggcaatgttgcaaaacccttctctccaaaaaatacaaacatacccaggcatggtggcgcacccctgtaatcccatctactccagggcgctgaggtgggaggatcacttgagctctccctgggaggttgaggctgcggtgaactgtgtttgtgccactgcactgcagcctgggtgacatagcaagactgtgtc

SEQ ID NO: 1898 - DNA, 3638 bp, Homo sapiens
gtgccagtaaggctagggttgtggatttgatccccttgtacaactcgttttcttataaatgttagtgaactcagatgctcgtggtttctgcatggcttttaagattgaaagttttaacactgtaaaagccaaacacaaaagaataaagagtatggcagtgagggtaaagagcagagttgcttttcttcatttcctttcttttctcttttttaaatgatgtttatgtctgcttgtatttgtgaaattgaggtttttcgtcaaatgtatttctgtcttatcacattagattcatttcctgtgttctaaggtttttgtctctgtcctgtaggtttccccttgtctgtctggtgcagttaactttcccaagattgtgcagaatgttcccagctctgggaaatcaacttgttattggggattaggggaacagctccatcatgtcactttcttggaccaggctgttggcaaaactgagtgtcttgcacaagtcccttccgagggctggagagtggctgtgataccgagttcctgcccttccccttggcagtgcgtccgggctgctgcagcctggcactgtgttcaccactgtctctgtttcagcatgtattccactgatgagaacctgatcctttccccactcctgggtaacgtctgcttctccagctcccagtacagcatctgcttcacgctgggctcctttgccaagatctatgccgacacctttggtgacattaattaccaagaatttgctaaaagactctggggtgacatctacttcaaccctaagacgcgaaagttcaccaaaaaggccccaactagcagctcccagagaagtttcgtggagtttatcttggagcctctttataagatcctcgcccaggttgtaggtgacgtggacaccagcctcccacggaccctagacgagcttggcatccacctgacgaaggaggagctgaagctgaacatccgccccttgctcaggctggtctgcaaaaagttctttggcgagttcacaggctttgtggacatgtgtgtgcagcatatcccttctccaaaggtgggcgccaagcccaagattgagcacacctacaccggtggtgtggactccgacctcggcgaggctatgagtgactgtgaccctgatggccccctgatgtgccacactactaagatgtacagcacagatgatggagtccagtttcacgcctttggccgggtgctgagtggcaccattcatgctgggcagcctgtgaaggtactgggggagaactacaccctggaggatgaggaagactcccagatatgcaccgtgggccgcctttggatctctgtggccaggtaccacatcgaggtgaaccgtgttcctgctggcaactgggttctgattgaaggtgttgatcaaccaattgtgaagacagcaaccataaccgaaccccgaggcaatgaggaggctcagattttccgacccttgaagttcaataccacatctgttatcaagattgctgtggagccagtcaacccctcagagctgcccaagatgcttgatggcctgcgcaaggtcaacaagagctatccatccctcaccaccaaggtggaggagtctggcgagcatgtgatcctgggcactggggagctctacctggactgtgtgatgcatgatttgcggaagatgtactcagagatagacatcaaggtggctgacccagttgtcacgttttgtgagacggtggtggaaacatcctccctcaagtgctttgctgaaacgcctaataagaagaacaagatcaccatgattgctgagcctcttgagaagggcctggcagaggacatagagaatgaggtggtccagattacgtggaacaggaagaagctgggagagttcttccagaccaagtacgattgggatctgctggctgcccgttccatctgggcttttggccctgatgcgactggccccaacattctggtggatgatactctgccctctgaggtggacaaggctcttcttggttcagtgaaggacagcatcgttcaaggtttccagtggggaaccagggagggccccctctgtgatgaatgtaagtccaccagcactcccccaccccagtcctcgagggtccttgcagccaggcatatgagtgggatgggctcaccatctttaggattcggcaggagaagcagcttggggtacacaggaccatcccaagtcctgggccagcttcttcccttttccttccttatcctggtggtgtagcctggaaatggaaatttaagtcatttctaaactgtcatttgctcctcatttctgagaagggtttggcgttggacgtatttgagaagagatatcaagaggatgatgagattggaatggtttatagaccctgattgggcttcatggaccaaatgtacaattctggaatttattctacatccacaaaaatgtaaatatgtgcagaagaaggaaataaacttctaggaaagctctaagtctgagcatggcctgaagcaaacactaagaacatatgcttaacttctgacctctgccatgggccttgcttattcagttagaacgcccacctcccatttgatttctgtaccatgtctttcatgactgcaagacagctgcagtgttgcaggagactgctactctgccatggccccatgacaggcccagaacctctccccagtcactccctccacctcctttacagtgattcggaatgtcaagtttaagatcctggatgcggtggttgcccaggagcccctgcaccggggcgggggccagatcatccccacagccaggagagtcgtctactctgccttcctcatggctactcctcgtctgatggagccttactactttgtagaggtccaggcccctgcagattgcgtctctgcagtttataccgtcctggccaggcgcagggggcacgtgactcaggatgcacccatcccaggctcccctctgtacaccatcaaagcttttatcccggccatcgactcttttggctttgagactgatctccggactcacacccagggacaagccttttctctgtctgtcttccaccactggcagattgtgcctggtgatcccctggacaagagcattgtcatccgccccttggagccacagccagctcctcacctggcccgggaattcatgatcaaaacccgccgtaggaagggcctcagtgaagatgtgagcatcagcaaattcttcgatgatcctatgttgctggaacttgccaaacaggatgttgtgctcaattaccccatgtgagtgcgtggactcctgggagctcctgctccctacagtgggctgcaactcctgtacttgaagctgagacctcatatgacgtggccttcgtgttgtcagagagtgtctggaagctgctgttgccatcttgaacaactcaccaacctccaacccagagccccagtgagagaggagcatttggcctcctgcttccttctgtggcctctgccgggctccattcccaaggaaaagagaggagcttgggctcacagaaagagaaggggatgaaaccccaaggggccctatctttgggatttacatggaattttattttctacaagtttgaccttagccatggtttgcaagtgaacagaacattctg

SEQ ID NO: 1899 - DNA, 4401 bp, Homo sapiens
ttaaaaacccgccctgtaatcagtattaccactttggtatatatttttctaaactcttgaatgcatggatatgtgaattagtcaaaactgaatacgctagtcacactttgtatgttctctgaggggctgaatgttttggttgttttccattttttttttattgtggttgtcctttttttcttttagttagaaatatactgtgcccatcttttctaggaaatagaaaacggtcaagttaagtgtatatttttttcaaactaaacctggctccgagctttgcactgggcattggagaggccttcaatggctcttccccggtctggcacttcctcttcttccctgaccctcgagtcatgggcagcagtggaggggcatgaaccctccttctgcagcatctgccccatctcctcctgggccgagtcatgccttgggagagacagcaaaaccctgaacagcagttcaaggtcttctcagccttcgggtgatgcctccagtgccactccctgaacttgatcccactgccagggctgcctgcattcgcccactccctcagcaggggtttttagagcatgagtttgagctaggttttctgccagctgctaaagacccagatgggactcattttgtgccttcaaggcgctcagagttaagaggcagtgagctagagtagaagttaatggtgcagtaagggtaagtgctgtgagctgcagggagaactgtgcctggagtcccaggcgacactcaggtctgctctcacatcgaaagcactgtctatgctcaccagactgtgagccgctgaggccagagccctccattcatctctgcgtccagcacccgacaccaaccctgcccatggatgtttgccggatgagccatccgtttgttttgttttgatttgcacaagtaatccatgctcatagaaactagaaaatagtaaagaaaaagattaaatctcccttaccctgaggcaaccactgttaactgtttttctaggcatgtatgtatacatgcagcccctttattaaaaagtgagttatatatgatacatgttgtcttgttagctgctttcattcagcaggctgttggggccagctttctatgtcagggattatgggcttccgtcatgattttccttttggctacacaatagcccattgtgtggatgtgttggaatttactaccctcaactgttagatgattaaatgtatgattaattcacaccatgccatgtgattatcccatactgtactttaggtatggtaatcttcacctggggatcttctggtcacataaaacagttttttctctgaggaaattagaactttatacttttctttttgtatttttatattttttcttaagaaatgctattaaaaaataagttgtttcctcagactgtttagctgtaattgtgaataatttgccaccctttgtggcagaagatgtttgaaggccacttgaaggaagaactcgtgtcataaaaacaactgtagttattctttactattcaggtgtgtttgtttccacaggcactgggtgcaagttcctgtgaaatatgccacgaggtgttcaaatcaaaaaacgtgcgtgtgctcaaatgtgggcacaagtatcacaaaggggtaagagctctttttggccatccttacagcatgcattgggaccttcaaatattttcaaaataagaaaggaattgttttctagtcatcagtatttattgtgctttcaaactattttctttgcaaacctcccgtgtcagtgttcagtgcctccctgtcctcacaccagctctgcaggaagggcagctctggagaccgtcctttccatcccttgtggggagaggggaacagcagctccagccactcgttagtgctgagattcaaagcagtattagttccttgaaaggtgatttcttacacacttgactaaatggagaaacagtgaaaccatttttttgacttagtgtagtatatgaagtcagtttaacattttagaggagaaaaactaaacctagctgagtcccttctgcctgacccagggacagtcctgctcgtaccgttctgggatctgtgtgtgaactatcatggtgttctaggtaccgtgagcatttgtgtgcacccctgctgctgggttagaacagatcaggtctctgccatggggatttgctaatcccttggaacgggataaatacagcatgctcactgaaaggaattgagaccacttgccaagtctctggtgtggtgtgcctccttgggtacagggtcttatatttgggctagctgactgtccacagcctctgcagtgtgggcagcagcagcaggagtgtggcgtgcaggctggagggctgttccagagccaagggccaaggccaggccaagggatgggctaagaatgagtgattgggtcatagggccgagaatgccagactctggaatttggcgcagctgaagtggaagagccgagcctggaaccggggatcagggcaagaccaccccctgaggccaggttggaggcccagagcgctcaggatctgaccctgaggtgggatcgtttgcggctggggctttgtccacactctggcctgagcgggtgttggtgtccctgagtattgggcagctccaggcccaagagaccaagggcaagtgagccacgcctgccaaggagcccagcagcacaggggagctaagcttcctcatggtcctgaaggcatcttctgattttgttttctccttttcagtgctttaagcagtggcttaaagggcagagcgcttgcccggcctgccagggtcgtgatctcctgacagaagagtcaccttctggaagaggctggcccagtcagaatcaggagctgccttcctgctcttctaggtagtcacacttcactaaagtgtcatccaccagtgtgttgaatccgaagaatgacaattttcaaccactggtgtaaaaaacaaacatttgaagacccttgtgcattgtgtgtcacaaagctaaatacatggaaatcgttaatatcgttgatattaagtaatttccccactctgagtgaatactttgatgattgccaacagtggctaataaaatgacggctaccacactcatgggtcactggggctgcgcagggctctttgaggtgggtggcttcttttggaaagtactatgaacgtctcgaagcagtattctagtgataagaattcttaacatagccaagcgccccacgtttgttccccacgtttgttccccttttctgtttgaaaaacctgttctggtagctccacaagagagatgatactgactttttaaattttttacaagagtctgtattcctgatatgcctatatttttcctcaaagattctgcattttaaggatgggcataagcaaactatattttaataatttatagttaatgttaaaatattggctgatttagaccaaaagattcaaatctcctctttgtgaaatcccatctgcatttgattttttattattttatgttcccccgttagattgttttaagtgtttgcttttcatcttttatagatgtaatctgattttcaaaaatcattaacactttttaattagtatcgactaagactttttccccctggaatcgaggctgtgtgtccgtcatcccagcccccggttggagcctgctctttgaactccgctgcgctcctcagcagcttctgtcctcttctgtgagtcagtcagcgagtgcttgggatccgcatccagccgtgctgagcacacaacaggctgtgtgtggaaatggccaccaccattctccttccccaccccaccacaaaaagagaagctgtgtctttagacaaccctgaggtatctgtgttacaatcgttctgtgtttgatatttgtgtaaagtatgcatgcagtcttgtactgtgacctaagaacaaaactgtaactgcattagaaaccatgaaaaaattagatattgttttgtgacttttagacagtggtaaatatagaaccatgaattctggtcacattccatttctctccaacatgaaggatcaaaaaatgtttttcaatgtgttctttgttccactggaaacttagagtcatgagtttatgagctgatttggtcaccttcctctgcctttgttcactgtgagttctgatgtcttagtgacttagttcttagaagctcacgccttagtttgaaacagattctccacggtggtccccaaaacactgtctgcatatccataagaattgagcgctatgggtgttaacgtgcatgaggatcagtttgcagcagcaagtacaaaaggagaagaggaacatccgttgaatgagtgtgttttgtacataacttcagatacttgtgaacatgccttatatttgtccaacaactgtcagaataaagaacattctaaaatg

SEQ ID NO: 1900 - DNA, 3260 bp, Homo sapiens
gtttcttctcctgaggcccgagacccaccttgtgctctggggaggcgtttgctgcctgtggctttggtacagatcatctccttttgtgtctcccaggacaacgtctgacatgagccgagtgttctgctcacactgtgggaacaagaccctgaagaaagtgtccgtgaccgtcagcgacgacggcaccctgcacatgcacttctcccgcaaccccaaggtgctgaacccccgcggcctccgggtgagtggcgcctctcccagtcccctcccaacaccagagtgaaaaagaacagaaaggacaaaagaaaacctagtctagtcgtttctgcaagatgggcgattgaaagcctgtgacctaggtaccaagacggagtggggagagtgtgtgacagatgccatctcatgagaagcgaccggttattcaggcagtagttgtgaaaggctacagtagcggctcacgaagtgggaactcatttggagtaaggcggaggttagatttgtgcaggagttgaaggatgggcagggtctcgggaagcccatgacgcagagaggaacgggtgtggaaagcacagcacggaagagagggccggacgggctagatgagcagcagctgccgacgcagagaatcgggagggaaggattggaggacgaatgagtggcactggcttctcccagcagtaaaatagccacatgtgcatgagaagaaccttcactttcaattttgaaataattttcaacttatagaaaagttgtaaaaacagtacaaacaattcctggggtttttcttgttgtttgagacagggtctcactctgtcacccaggctggaatgcagtggcgtgatcttggctcactgaaactccacctctggggttcaagcgattctcctgcctcagcctcccaagtagctgggactacaggcacacgccaccatgcttggctaatttatctttagtagagatggggtttcgccatgttggccaggatgttctcaaactcctgacctcaggtgattcgcccacctcagcctcccaaagtgctgggattacaggcgtgagccactgcacccggctaataattcctgtttacccgtcacctggatttcccagggttaatcatgtaccacgtctgctttctctttatacatgtacatatttttttcctgaaccatctgagtagattgtacacataatgcccttttgccttgaaacaaggactttatcttatgtaaccacagtgtaattatcaaaatcaagaaatcagcatcgctgcgataccagtgtgtaatctgcagacccaactccagattttgccagttgttccacaaatttcctttctgacaaaagaaggggattttttgggtccagaatccagtctaggatgaaacgttgcattttgtcatcttgtcttttttcgactggggtcctttcagtcttttgtcgtagatgaccttgacacttttgaagagtatgagtccgttcctttgtagaatgtcctttcccttgcgtgtgtctggtatttcctcgggattggattagattggggctatgcagttttggcaggaacacgccagaggtgatcctgatgtgtccttctcaggacttcgtttcagtgggtaaatgctaattgtctaatttactggtgatactaacttcaatcacttggttcagtggcttctgccaccttaatcccctgtaaagttatttataatacttaatttgtagaaagagactgagactttgtatatattatttctcgttgaacttacctaaagttgcctgaaacagttattatagtgattattgccaaatggtgattttctgtcattccttccatgtttatgacctggtattatactgtaaagaagaactttccttttagtctcatttattgatttctatgagtgtggtcttgtggatttctgtcatagtctacaggttgtgatctatcactgtcattttgagcctcgcgttgtgccatgtgtggccagtggaagcctgtgttcttttgacagatcctggtctgtcaaactttatggcacaacaagaagttcccagagactcagccatctcctgcctgtgccccagaatccgccatttctctcaggagctctggttttttatgcaggatggtttttagaagtaaagatctggggactgggtgtgtctgttgtcctgcagtgtcattgcgtcttggctacaatggacagagctaggaaatacatacatgtgtgtgtaaatacacactggaatgttttgtatttctatttctgtattgtctttagctgaaggtatgtagtcaaaataccgtgttcggtttttcgtgtgtgaattgaggtgggaatcaggtgggaggcggcggcatgtcacacgtagcacatggtaggcagtcaattaccacccgctgtcatctgcctgcaccaggatctgcaaggtcggctgcaccttaccagccatggccttgtgtgactgtggctccccttcttctaatggcccttccttgtcttatttccagtactcgcttcccactcccaaagggggcaaatacgccatcaacccccatctcaccgaggatcagcgcttccctcagctgcgactctcccaaaaggccaggcagaaaaccaacgtgttcgcccctgacttcatcgccggggtgtcaccctttgtcgagaatgacatctccagccgctcagctaccctgcaggtccgggacagcaccttgggagctgggcggagacgcttaaatcccaacgcttccagaaagaagtttgtgaagaaaaggtgaagagcgagttcccgcaggcaaattggatgggcgtctggccgccgtggagttccggtgacccatttccccagccgtgtcgtctccaggaccacccgatggaaataacaggcgggcttcacggtgcggctctgtccgcccatgccccgctgggtctgcagggaactggactgtcccatggcctgtgagcaccggagcgcctggctgcctgccaaggaagtgcaattgcataaaaacagaaagaacaacgccctggagccaatcttcaagaaaggaatttccaaaggataatatttttctaataaatgcggctgcaacctcctgtgcatttaattaaataggccaaatttttgctgcttaggtcatctcaaggctgatacttgagctgtgtgcccagagatcatgcatttagatttatatttttgccagaaaatacaaggttataataaaactaagaactaccatttctttcttttctttt

SEQ ID NO: 1901 - DNA, 3318 bp, Homo sapiens
attaccctggaggctcgtggggactctggcggctctggtccaggcctctgcacagggggcccgtgtcacatcgcccttacacacgaagctcctaaatctcctactgcaatgttagcctgcctgccttcatcccagcccctgtgtggaaagagagacgagttctcccaggcccgggagacgctgggaccgcccagcctcactccttcacctcccagaactggaggtggagacaggaaactatacaagttgatcagcattttgggttgaactcctgggttcttctttgaaggcatgatttgtgtcgtctggtcttcttggctctgggtccagctccatgcctgcccttgttgggtcccatggaaggtctgcagctccctggagcttctctgctcagttgaatagaaaatttaggaaggtggccagaaggagcactgtttaggaacatatggagacaactataaactccctaaataacaaaagacaagtggctttggcctggaagggatttgggtggtggaagatgaacctgagaatttattcccacatctcactgaatgatcaaattgagcgtctgggttgacacggtctaggagtggtggtggacagcaccggtgtctccttcccagaaggaagttagggcagacccacagctcagaacaatagcagaccctgcctggaagcagtgtaccttgggagaagacagccacgcacagagttcactgttgaaggacatggtagttcggcactcctgcctgtccgcctctctgtgcagctcagccatgccatggccacaggagtgccgggctgttgcctgctgacctgggatgggggtgtctggcagcaagggaggccaagggctcccaaggcagtgaagcttctgcacctgaaggcttggggagagaaggcgggcgggggcgaggagaggcctaggaagccatggggggctccgcttgggcagtgtgcggcagggagcctgcccagcctgggcctggcgcaagcatctttggggctgacctgcaacctctcagggccaagggtcccctcgaatgagccaggtgctttgacccaagcccaccccaatacaagctggtcaggaggtggtgccgagccctaaccgagcagccactccctgtacctgctctgtcatctgccaggtgactttgaattcccactacactttgcagacatgatgggtgggactggttttggtgctgaggtcttttgggggtcagtgatctgcctttcgagagctgctgccctacagagtcacaggatgcctttagacctcagcacctggcacatttcaacaagacatgaactgcacggcccctcctggcaggggcatgtggcacgcagcctggcagctgtctctcggcctgggctcggcaggcatagcgggtgtggtcgctcttcctgccgccccagggaggccccgtccaggtcaggatcctcgtggccagccagacatgccacgcctgcagtgcctccctcgctccctcctcagcagcagtggacagggaggccgtgggctcagccagggccatagccaagctgagtgcaggaacagccttttgaaaggcagctgcgcctctgtgccttttccctggcttcatacacagtttctttgtgctctctcttttttttttttttttccccagacatggtctcgctctgtcacccaggctagagtgcagtagcacgatgtcagctcactgtaacctccacctcccaggctcaagtgagcctcccacctcagcctcctgagtagctgggactacaggcatgtgccaccatgcccggctaattttcttttctttttttttttttttttttgtatttttagtagagacggggttttaccatgttggtcaggctggtctcgaactcctgaccttgtgatccacctgcctgggcctcccaaagtgctgagattacaggtgtgagccactgcgccccgccactaattttctttttgtagggacagagttttgccacattgcccgggctggtctgcaactcctgagctcaagcgatccagcccgcctcggcctcccacggtactgggattacaggcgtgagccccaggctggcctctttgcattctttagagtgctgttttccctttgttgctgagttgtgtgacgaccccaaagaggaatcaccccatgacagtcctacttctctcgccctgaggatttccggacagggaggccagcctgcgggtttggcttgtctggggagattggatgtcacaggtgccttgccgtgctccaggccttggatcgagtcctgggctgacattttctattatccatgttcagaaaatggcagttgggccactcccagattgtagcgctgcaacacaattggcaccagtgccctgtgaggtgggcggggccacctgcttgtccccttgtgtgcaggaagccaacggagccacctgcccgaggttagaacacgggaggcagcagggctgggagtgaccttcagatgtcatgtcattgggaccgagcgctttgggctgttgagaggcggcagtgtctcgggtgtggaccacctgctgctggcagcccagacgcacacggtgcctgtcccttggagagccatgtgcctcctgccctcgtggcgtgatggccgtcgtaaaatctccatgcagccctaagctgccacacacgagcaccagccagccactgtggacgtgggatgggcagatagttacagagcccggggtgactctgctgtcctttctctgcaggccaagcggaggctggactgaaatacatttacaaattagaatgtattttgctgtgggaaaatagaccccttgccattgcccctcggtgttgactacagaggtttttgaaaggtggcattgacaggcatccgatccgtgccagggcacagcactgtaggctggatgccgagtgctgttgccgcagatgtactcgggcctaaagtacctcctggctggggcgtgtgtgagctggaaatgcacgcgctctcccactcccaagctcactccacttgcacgccgtgacctggacgtgctgtttctggacaaggggaatggcactcccttctcagcgaccggctactcctgttgggacccagtagctgccagtccgtactggaattgtccccccatgcccagccaagccactggtcctgggcccatagagactctgtctccctttctggagtcagacagtttgacaggggcactcgcccctctgcttcctgccacctggcccggggcgcctcagtcagcccctccagatctgtttctttaactgagagcgggacaccttcccccccccc

SEQ ID NO: 1902 - DNA, 3494 bp, Homo sapiens
gtgctgaccgtggtggctgagaggctacaggaggcactgaggggtgctgggggcttgatgccaccaaggtccccagaccaagtcatcttttttttctcgctcagctttgaagggaagttaaggacaaagaggaagaggctgtatttcattctcccagatggctcctgccagcctccagagaaaaggcagctttcttctttagaaaattggcagcacaaaagaaggaagtcgacttggaaagtccagcgacagacctcgtgcccctgctctgggaggccgcaggtcaatggctccccctggcttcaggggacacagctcaagcctggaaggagcccatggccagcctgaaagccttgctcacacccagcatccgcagctggggcaagagcggctactcccaagacaggaaaagacacacagcctaactttgccactgtgaagggagacttctctctaatgcctaactagacacttatcttccaacctcctcaaaatgccttcaatagaagtcccaggaagacacggagccccagccgcccactgactcctacaggatgcagctgcgccaggcagcccatcccagggggcccaggccaaagaggggccagggtgcttcccctgagaatgaaaagggatgtcgggtagagggggagggtgatgtgggactcgctggtggctgttaaaggagctcgcgtctcggttcctgcaggaaaagtgctttgagcactcgcctggcctggtgaagaaggaaggcagttggcgggcatttttggaagctctcaccccccatgctggtcctggtaccccttctccagggatgcggggcccacattcatcacagtggggttccatagatgatggtcctgtcatatcagggttcccattgaagggggccctttttggcactttcttttattccattagtctgtttgcctggtcacacattttattgctttttcccgcaaaagaatcaatgtgggaatttatttatttatttattgagacggagtctcactctgtcacccaggctggagtgcagtggtgcaatctcagctcactgcaacctccgcctccctggttcaagcaattctcctgcctcagcttcccaagtagctggaattacaggcatctgccaccatgcccggctaattttttgtattttttgtatttttttttttttctgagatggagtctctctgtgttgcctaagctggagtacagtggcgtgatctcagctcattgcaacttctgcctcccaggttcaagcaattcttcctgcctcagcctcccaagtaggtggaattacaggtgcccactaccatgcctggctaatttttgtattttttagtagagacgggatttcaccacattggccagattggtcttgaactcctgacctcatgatccacctaccttggcctcccaaagtgctgggattacaggtgtgagccactgcacctggctgattttttatatttttagtagagacgggtttcaccatgttagccaggatggtcgcaatctcctgacctcgtgatccacccaccttggcctcccaaagtgctgggattacaggtgtgagccactgcgcccagccaggaatttatttttaaattaaatttgatttatttagtttcctaacccttttattgtttttaggcaattttttgaagtataatatgaataagaaaattatggtgaattgttacagcatcgagacctccaagaccaggacatagaacaatcccagcccccagaaacctccaccccataaggctccacaacccctcttctaacacacagattaccttcagctcttcttgaacttcatataagtgtgaaactcacccatgctgttgaacacagcactgtttcattcatgtaagcggccttatagtattccattatgtgaacgcagtttattatccgttctgttaatcacagtagtttttacctgttgtgagtaagggtgtcacaaacagcctcatgtgtactttgtggcagatggaattcttgtacagatgtggaacatacactggatttgaagtgctgggttatagagtatgcacatgctcagctttatcaaacagggcttaacagcttttcagagtggctgtgccaactcacactctccaacagtctatgggagttccagttgccccacacccttgccaccacttgcaattgtcagctgtaaattttagccattttgtcgggtgtatattggtattttattgtgtttttgatactcgttgctcccgcaatcgttgaagttgagcacggttgtatatgcttattggcaatttggatactgtctttgcgttttcaaaaattgggtttttgtcttttattaatttgtagaatttctttattctgaatttgagttcttagttgtgcttgtgtgtgtgcacatagtaaacacacacacaggttaaaataattgggagatcattagaatgagatgaccccagcgccttgggtttcaactcaagcaaaccaaagtccatctcagtgtacatggttatagttcaggtaagcagaaaccaccggctgatctctaacacggggcttttgactggaatgatttctttccctttctttctctttctttctttctctctttctctctttctttctctctttctctcttcctttctttttttctttcttcttttctttcctatctttctgcctttctttccttccttccttccatccttccatctctttctttttcttttctctttcttttctttctctccctctctctttctttcctccctccctttcttccttccttccttctttccttccttcccttcctccttccctccttcccctccctccctaaaattcatagaataaaaaaatgcctgaatagccaaagtaatcctaagcaaaaagaacaaagctggaggaatcacattacctgacttcaaattatcttacaaggctatggtaaccaaaacagcatggtatttaggattgttttcccaattctttgaaaagcgatgttggtatcttcataggaattgcattgaatctgtagattgctttgggtagtgtggtcactttcacaatattgattcttccaatccatgatcatgggatgtatttccgttggtttgtgtcatatacaatttctttcagcagtgtttgctaggtctccttgtagagatatttcacctcttggtcaagttatttctagttattttattttactttttgcagctattgtaaaagagctcgggttcttgatttgattctcagcttggtcattgttggtgtatagcggtgctactgatttgtgtacattgattttgtaacctgagacttcactgaattcatttatcagcaattcattcatttttagaggatacttggtccatgcacatgtcggagattgttgtaatgtttctttcttgcaatgatctcatcacattttaatcacaaagtcaggctagtcttttaaataaagttgcaaagcattaatc

SEQ ID NO: 1903 - DNA, 2968 bp, Homo sapiens
aattataagttcacaagaaattacaataataatatactgggaggaccctagtgtctagtgtccttcagtggtaacatcttgcatagctatagttcagtatcaaaaccaggaaaaatgcattgggaaaactgcagagcttattaagatgtcatcagttttatttgtacgtgtgtgtgtgtgtgtgtgtgtgtgtgtgtgtgtgtgtatgcgtgcctatgcaattttgtcatgtttagctttgtataaccaccactggaactgtttcactaccacatggctcccttgtgctacctctttatagctgcagcttctaatctgttctctgtctctataattttataattcaaaaatgctatgtacatgaatctgtaaccatttggcttggctttctccattcagcatgattcccatgagatccatccaagttgttgagattatcgatagttcattccttgttattgctgcattgtgtcccatggtacaggtgtaccatagtttgtttagcagttcacccactgaagggcatttgagttgtttccagtttttggctattacaaataaagctgttatgaatatttgtgcacacagacatacattgtgtgagcataggttttcatttctctgggataaatgcccaagagtggaattgttgggtcataagttaaatgcatgtttagctttttaagaaactgccaaactattttccagtgtggctgtaccattttatattccgaccagcagtatatgagtaatatcacttctccacagccttgccagcatttgatgttgtttttacgtttcactttagtcatgctgatgggtgtgtagtgatacctcattgtggttttagttgacatttctctaccggctaatgatgtgaaaacatcttttcgtgtacttatttgctatgtgtgttatcttctttggtgaaatgtctgtcttttgccttctcatatagtttggatatttgtcgcctccaaatttcatgttgaaattgaatccctggtattagtagcagggcctggtgggaagtttggatcatggggaggatacctcataaatcatttttatagtggcaagttctcactatattattatcatgagaatataccatcccctcctttctttcttcttctcttaccatgtgatgcctgctcccattgccttctgccatgagtggaagcttcctgaggccctcactggaagcagatgctgataccatacttcttgtacagtctggagaactgccaaagaagccctcgaaaatactgaagttcctgttggctgtcttatggtctacaacaatgaagttgtagggaaggggagaaatgaagttaaccaaaccaaaaatgctactcgacatgcagaaatggtggccatcgatcaggtcctcgattggtgtcgtcaaagtggcaagagtccctctgaagtatttgaacacactgtgttgtatgtcactgtggagccgtgcattatgtgtgcagctgctctccgcctgatgaaaatcccgctggttgtatatggctgtcagaatgaacgatttggtggttgtggctctgttctaaatattgcctctgctgacctaccaaacactgggagaccatttcagtgtatccctggatatcgggctgaggaagcagtggaaatgttaaagaccttctacaaacaagaaaatccaaatgcaccaaaatcgaaagttcggaaaaaggaatgtcagaaatcttgaacatgttctgatgaaagaaccaagtgacccaaagtgacctggacaagattcatagactgaaagctgttgacatcgttgaatcatatgtttatatattgtttttaatctgcaggaaaatggtgtctctcatcatttgctctgttaagggaacaaattagcactttttagaagtctgacaattgtaaacagttattagcttttccagaagctgattcccattttaagatgggggaaaattaaggtttgaggttttagaaattagcaagtagtgcatacccttctagccacaagtgcccagtccaggaaagtgctgacttcttagagaatgtgtggccagacccagggacctggagtgtgtttggactgcagtttgccaccctgagaacaccttctccaggactggcatttcagaatcagattcttcattttttgcagctacgatgttcttccagggcactgggggctgtgacttctctctaaattgtatataagttgtgtatatagagaccataattatatggtccttagaaaagactttgcttttataaagcatttagaaaaaatgcatacttttaaaacaagtgcttgagttgtcacttaaaaattatagcatattgctataataaaaccttatttatgtcttatttgaagatgaatagtcttaaaagataaagacataaatgggacaattgttattgagcaaaaaaccaaattatcccaccctcatggagcttatattctagcaaggggagatggatatgatagattacacagtttattggaggacaataagagttatggcaaaaagcaaaaggaacacagggtaaaggggataggtgccatttggtggtgagaatgctgactgaaaaatagaatggtcaatttaatctgaaacaaatggttatttcttttataatccatataataaatttaaaatctaaaatgtaaaattttgaacacaacactggaaagggtatccacagcaggaagtccccagttcacctccatgactacagggcagctttgcacagccctctgggcgcactgtgtgcctctgcccagaagggggcctcgccgttccaccagaagctcagctccaggccctggaggggctgctgctcctcagttgcatttcttcagtagattcatttccttgatgcaaagcatctgtatttgttggttctgtcatttgagcgatgtctctgacttgtttgttttgaattacattacaggctggaatgt

SEQ ID NO: 1904 - DNA, 3075 bp, Homo sapiens
ttatttccctttttgtgttccttcctttgtgttcagtttgtgttcattaagtaagccattactaaatcatctatttggtaggtacaataaaccccacagggagcagagaccctgtttcaaggatctcaatctacatgaggtgaaaaaaattataattatatagtaattaacacacagtaattaacagtaatgaatacattgcttagcaagtaaatgccacagtaattaatggagaaatggaaagaggtgagcatgtctgctgcaaccttttggagtggctgcaagggtgaggaggataaagcaggtttccctggcagtaggagcaagtggactcagcaagactggatctgcacttgctctttgtgttatcaccacctatgcatgctctaatccggtgcagtctggtatctgcctcctcgaccccactgaaacattctcatcaaggtcactagtgtgtgcagcacattgccattccttctccacagcatttgacacagttgttcactccctcctccatgtgtacgttgggtgctcagacaccataagcttatagctttcttttccctctaatagcaactccctttcaacctctttttctggttttgccttttctttccacctctaaatatcatagggcctcaaaactcaatcctggtacctctcctgtccttcactgcgttctcttcctaggtgaccccatgcagtcttggggctctaaatttgacctctagaatataaattgctcctcaatttcagactcagacttacttgtggacatgcatctccacttaggtgtctaatagacaaataaaactcagtaggtttcatgagtttcaactgaactctcgaacttgcccctctccaaaacagctctacttgtagccttccacattgcagataatgacaccatccagatatgtgccagtaaagctttaacatctgtcagggttgaggagggtagagaagctctagattgtagtgtttgcagatttccttcatgtaaataatgctaatatttatcaaagtcaagctgtcaacctgaggtcattgaaccagagtcgggaagaatgctctggagggcagttgtgccctggctcctgccacacttcagcactatttacccagcggctcagctgacaaaccatagagtcatcatgatttttctcttattcttccctcgctttgatacctttcacaagttcaggaaacttgatgttcaacataatccctaaatcccactatttctctctatccctccagtgcacactgctgtggcctctcaccacactactacaataccttcttatcccagcttcatgtttctaatctagcccccatctatcacatactctctaaccctgtggccagaaaattatgtctgcatgtatatcacatcatgccatgtcgctcctgaaaacctgtcctcaactctcctgagcactcagaagggaccctgaaccagctttagtctgcaagactgcacggctggcctctgtcaccttctcctaacacgggagcccctggggctccctctgctgctgtctcccaaaggcctgtagatgacttccccaacaccagcccaatgctgcttgtttcatttgctcattgtgcatgtactgtctgactgccccatgaggatgtgagctccacaagggcagggaacgttgctctggctgtttactgctgatctccagctcccgacacactgcctgccacagacgatgaataaatgaaagaggtgtcagatctggagtgaaaagaaagtacttttctgacacagaaaagaaggattaggaagataatacactaagagggatttttggtgatggagtgtgtatagaactttcagcactaatggccgcctctattttctcagaatgtatttgatgtaaagaggaggcaggttgtggtgtatccaagttgtctggcttccagctcagtaaagcatggcaggttgtatgtgaatttgagaaatcatgaaataaagtgagacttgctgttttcaacttgaaaagcataacaagctgacactaacgcatgagtaccagggatctgtgaatgtgtgtttagagttgtactgtcttacttggtttccatatgtattcatagggccagaaaataagaggtggttttattgtattatgtgtcctggcctcaatttgaggggtctcagatcgccacctggtatatcatcctgctttatgagataatttcctagaaattgagcatcagagggatatacctgtggggttgacataatacccttacctcacagctcaacctcttcatttggtttccagatgctactatcattcacgatggccatgaggagaagatggaaaatggtcagatcacacctgatggcttcctgtcaaaatctgctccatcagagcttataaatatgacaggagatcttatgccacccaaccaagtggattctctgtctgacgacttcacaagtctcagcaaagatgggctgattcaaaaacctggtagtaacgcatttgtaggaggagccaaaaactgcagtctctccgtagatgaccaaaaagacccagtagcatctactttgggagctatgccaaatacattacaaatcactcctgctatggcacaaggaatcaatgctgatataaaacatcaattaatgaaggaagttcgaaagtttggtcgaaaatatgaaagaattttcattttgcttgaagaagtgcaaggacctctggagatgaagaaacagtttgttgaatttaccatcaaggaagccgcaaggtttaaaagacgagtcctaattcagtaccttgagaagagacattacaaagtgcacttgaggctgcccccaacctctgacatttgttcttgcatgtgatgatagaaagtcttcagatggacttatacattctgtgctttggaagcacaagaagaacaaaatatgtgtatatttcctttaatgtttatacaaaagtttatatggagcagtattgttatgtttgtatgaatttgcaaaaattaaagtgtacaaagagattttgattttgcatatataaaataaatcattttattgattttcacaagttc

SEQ ID NO: 1905 - DNA, 3443 bp, Homo sapiens
atttttccaggctcatggtacagaggttgattacaatacctctgtactgtatcattaggctttgtgaatagcctgatcagtttgccaaggaatggaagtggagatcggaagttttcattaatttacttacttagggctcagacttacactattggttttattacccttgttatattatctttcatatctgtttctaggttgattacacattgaatcaagttgtacattcctaggccctcacagggaaagaaggagacagatctgtgtttgaatgtctgtctctgctacttagctgtataatcttaaggtagataacctaacccctctgaactctagtttccccatctgtatgatggattgataatgcctaccttatcaggtcattgtgaaaatttaagatatgtgaaaatactcaacatgttcttagcacatagattctttcacatttgcttcacttcttatttagtttttgttgtaggttatcctgtgtatttgaccttccaaacaaaggttgcttttgactttatgacttaaggttggaatatctcctactactcccctgtcctccttggaccagaaaaaaaaaaaatcccactgtgatcctagtcatgcgtatgtggcatttggagaatttaagaaggtatagaaattgacagctttggcaatactattgcttatgttacacaagatgtgtaacttatcagtgaggtgaaatggtaaagtaatgcttatccttaaaagctaagacttaagtcatctcagataaagctaatactcccatcttgacctcttttcttcacacaatccttcaacaggacttcattgacttaactagagagaccagaccaaggacaaaagatcgcagtggactgtatgtgattgacctgacaagagctgagggagaaaatagacctattgccactcttgacttaactttagaacctgtcactccttcccagaaggagccaaccagtcttcagacatgtgccagcctctctggcaaagcggtgatggaagggcacgtggacagaagctctcagcctacagcacggagaatcattaacagtgatcctgtagatttggacctagtggaagaaaacacctttgtaggtcccccacccgctacatccatcagtggaggctctgtttatccaacagagcctaattgtagctcagccacattcacaggtaacctcagcttcttggcaagtctacagctgtcttcagatgttagctccctctccccaacaagcaataatagtaggagcagcagcagcagcagcaatcaaaaagcacccttgccatgcccacagcaagatgtatctcgcccaccacaggccttgccgtgccccctgcgacctttgccatgcccaccgagagcctcaccatgtccaccacgagcctcctcatgcccaccacgagccttgtcatgcccatcacaaaccatgcagtgccaactaccagctctaactcacccacctcaagaagtgccatgccctcggcagaatatcccaggcccacctcaagactctctgggcctacctcaagatgtgccagggctgcctcaaagcatattacatccacaagatgtggcatacctgcaagacatgccacggtcaccaggagatgtgccacagtcaccaagtgatgtttcaccgtcaccagatgcaccacagtcaccagggggcatgccacacttaccgggagatgtgttacattcacctggagacatgccacactcatcagggggcgtgacacactcacctagagacatccctcacttaccaggagacaggcctgactttacccagaatgatgtacagaaccgtgacatgcctatggatatctcagctctgtcctctccaagctgcactccagcctggggaacagagcaggattccgtctcaaaaaaaaaaaaaaaaaaaaaaagaaaagaaatccctcctaatttccttctttttaatctctacagaacaagggtcaaaaattagaacccatccctcatcgaagactaagaatggtaacaaataccattgaagagaattttcctctggggactgtgcagtttttgatggactttgtgtcaccccagcattacccaccaagagaaatcgtggctcacatcatccagaaaatcttgttcagtggctctgagactgtggatgtcctaaaggaggcctacatgcttctcatgaaaattcaacagtatgaaccgtaacctctggctgttggcgaatcttctagggatcttggactcagggcatagctttctcttgacaggcttttttaacctaaccgttacagtgggtgacttagcatattagtgttatttgaattgcaaatgataggaaacccagtccaaacagaccttaactactgctaaaagagaatttaatggctcgtgttactagaaaccgaggagtgagatgtgacttgattcagtatacaaaaatggttaccagggttcattctgcagctctacttcggttctgtttggggctgcatgtggtagcctctcagcctcagttctgttttggggccgcatgtggtagcctctcagcctcagttctgttttggggccgcatgtggtagcctctcagcctcagttctgtttggggccgcatgtggtagcctctcagcctcagttctgttttggggctgcatgtggtagcctctcagcctcagttctgttttggggctgcatgtggtagcctctcagcctcaggcttttatgacacttccagtgggaaagagtgtctgcttcctttatagtcacccaagagttctgaaattgagtcttgcaggatttaattggcctaatgagagacatgaccatatctttgagccaatcaccgtgaactgaggggtagaacagcacgattggctaaaaaagccacatacttcattttggggttctggtaggtaaaactagttggttaagagtagtgaagagttggtttcttaagacaaaattatagtactaaagctttccaaaaggggactggatactgggtagcaaaaaacaatgaagttccactactctcagattgacatggtatgataccagaaagtgagcaagagcatggaggataatggaggataggaagaggcttcttccttctatcaccttcagatcctatcccttcttccgctaaattctccataattctaattgatttcacttgactttcaggctacatccagccaatgccaagacagtggagtgggactggaaactgctcacctatgtcatggaggaagaggtaacaacaattataagattatatcttctgtaggggaagttttaactataaagaaaagtgatatcaggtgccgtggctcacacctgtagtcccagcattttgggaggccgaggcgggaggacagtttgagcccgggagttcgaggccagcctgggcaacaaaatgagaccctgtctctac

SEQ ID NO: 1906 - DNA, 3059 bp, Homo sapiens
ttatttaacaaacacatatagagccctcactatgtgccagatattattctaaacactttacaactacggattcatttcattatcattaaaatcctgtaagcgatgagcaccatgatgatccccagtttgcaaataagcacactgctcagagaagtgaagggtcacacggctggtgagtggtggagccaggatttgaatgcaaggaatctgtcaatgtctctgctgtttgtgctgttagagaaaagctccacctgcacagggagaagcctgatgacagggcctggtggtctctgtatccctgggcctggaccttagcagacctcagttagtagtcactgagatgaaatggaatggaagatgagtagtagagtgcctgtcaggcgttgtgatgatgacagggcctgtggacccactgtgtccttgtgcccactgcaggggacccgaagctgccagtactgtaccaagtggagcggacacgaacagggtcgagcttctcggtgcgctctgtgaaggccgtgcaacatgggaagcccatcttcatctgccaggcctccttccagcaggcccagcccagccccatgcagcaccagttctccatgcccactgtgccaccaccagaagagctgcttgactgtgagaccctcattgaccagtatttaagggaccctaacctccaaaagaggtacccattggcgctcaaccgaattgctgctcaggaggtccccattgagatcaagccagtaaacccatcccccctgagccagctgcagagaatggagcccaaacagatgttctgggtgcgagcccggggctatattggtaagagtaccccatggatgggaggaaaccactctccaaggggtctaccactcatttgctgtgtggccttgggcacatgagttcccttctctgggcctgtttccttatctgcatgatggggaagttggcttagcttctcacctgggccctctcagccctttgcatggggagaaggtggagatgactataatcccgacacaaggcctttctgaggaaggcaaaaggcacctcgctggggttgttgtccagctttgctgctaactataaagtatctttgtgcaaattggaagaagacaccccttttggggcctagagtgggagacttgggtggtgaagactgaatttcagtccctgctcacccctgccctccccaagtcgccatctcacttctcccctatcacacacacacactgtaggccaagcgctcttgtgcagcaaccagtctgcacacccatgcacgggagtcccttttccccctacctccgtgcaggtcctgagctggaaagcccaggagcccagggctgatggggacctgttgcaggcgagggcgacatgaagatgcactgctgcgtggccgcctatatctccgactatgccttcttgggcactgcactgctgcctcaccagtggcagcacaaggtgcacttcatggtctcactggaccattccatgtggttccacgcccccttccgagctgaccactggatgctctatgaatgcgagagcccctgggccggtgagtgtggggccgtgtgggacaagggcactgaccttgagtggcaggagcctgctttcttgggtgatgctgatttcccgacttcctgtgtggcgctgcacaggtcacttcctttccttccctcccaggctttggcatcttcatcttcaaaatgagagggtgaggccgggacacctgctctgctctaaatttctagaatgtgctggaaatgtgattcaccttctcccagggacccagttctagtcccaaaaccagttcagattctttgtattacaataggcaaatcatatcttccatctgaacctcagtttcctcatctaaacaaagagggttacattacagcagtggtatccaaacccgcagtccatcagactgccatttggggatgccttttcaaaatagattctgattccaccctcaagattctcactcagtaggtcttggataaggtccaggaaactgtatttttaagttctctaagtgattctgattaacctgattgggatcggggcattcagtggtccctaagggcctgcttggaccttccttgcaggggagagaaacaagactcgttcatcaatgtctagcttcagaaccctgacctcctttccaagggagtacatttcaaatgaagaaaagctttgcttgataaaccaaggacaaaactcaaggattctttatactcagataaggggtattctcaagtaccaatagcatcacaatccaagattgataaccttgaagtgaggacatgggttcagatttggcttcatcatggggccaaattcctgaccctctctggatttcagtcctggtctggaaaactggacaacacataactgcttcatttggctactgtgagaactgagtgagctctgctatgtgtaagggaaaccagcaatcatcctcataaacatcaaacttgggcccaaagccagcaagggagaaagagtctccagatggggagggaagaggccagacctcatggcctcaagtcctctcttctgagtcctttcttccccttggtggtggtagtggggatatttttcatgaattaccacttggaggacctggcttgatttattatacagggagccgatagttttcctaacacaagtggtcagaggtacagcagttctgcttggccgagctgttgaaggagactgttctcagagctcctccctctgtgatctttttgaggaagcgaggagaggtgtgaaagtgcttttaaactgtcaactggggttcctgtgggaggagttacccctcaatgacggtccataataagctcatgaaggggcatttggagcagccacgacactcagtgcacccttgtgtggggcagccctgccctgggccagaccctttgcaagaagtccacttggaggttgggcatggtgatgtgcgcctgtaatcccagctgctcaggaggctgaggcgggaggatcccttgaacccaggcgcttgagaccagcctggcaacttagtgggactctgtttcagg

SEQ ID NO: 1907 - DNA, 3518 bp, Homo sapiens
gtcgtcccgccggcccgagccgtggcgcccagagctgcgagccgctcgcccctccgccgctccggcccgggccgccatgtcgctgtggaagaaaaccgtctaccggagtctgtgcctggccctggccctgctcgtggccgtgacggtgttccaacgcagtctcacccctggtcagtttctgcaggagcctccgccacccaccctggagccacagaaggcccagaagccaaatggacagctggtgaaccccaacaacttctggaagaacccgaaagatgtggctgcgcccacgcccatggcctctcaggggccccaggcctgggacgtgaccaccactaactgctcagccaatatcaacttgacccaccagccctggttccaggtcctggagccgcagttccggcagtttctcttctaccgccactgccgctacttccccatgctgctgaaccacccggagaagtgcaggggcgatgtctacctgctggtggttgtcaagtcggtcatcacgcagcacgaccgccgcgaggccatccgccagacctggggccgcgagcggcagtccgcgggtgggggccgaggcgccgtgcgcaccctcttcctgctgggcacggcctccaagcaggaggagcgcacgcactaccagcagctgctggcctacgaagaccgcctctacggcgacatcctgcagtggggctttctcgacaccttcttcaacctgaccctcaaggagatccacttcctcaagtggctggacatctactgcccccacgtccccttcattttcaaaggcgacgatgacgtcttcgtcaaccccaccaacctgctagaatttctggctgaccggcagccacaggaaaacctgttcgtgggcgatgtcctgcagcacgctcggcccattcgcaggaaagacaacaaatactacatcccgggggccctgtacggcaaggccagctatccgccgtatgcaggcggcggtggcttcctcatggccggcagcctggcccggcgcctgcaccatgcctgcgacaccctggagctctacccgatcgacgacgtctttctgggcatgtgcctggaggtgctgggcgtgcagcccacggcccacgagggcttcaagactttcggcatctcccggaaccgcaacagccgcatgaacaaggagccgtgctttttccgcgccatgctcgtggtgcacaagctgctgccccctgagctgctcgccatgtgggggctggtgcacagcaatctcacctgctcccgcaagctccaggtgctctgaccccagccgggctactaggacaggccagggcacttgctcctgagcccccatggtattggggctggagccacagtgcccaggcctagcctttggtccccaaggggaggtggagggttgaggcctacgtgccactgggtgtggtggggtgcaggtagccagaaagggacctccctgtgtggataattctaggaaactgaggcccaggaacggttggagctgcccagtctggaggccctctctgaggagcgaggcgccaggccctggcagccctcctgacctgggtccgttgctggccccctcagatgtggtgggaggtcctggtgacctctggaggaacgctgtgctcaggtacctgggctaggcctggcctgatgggtctgtggccgcccctcgtcttcacagggaagagtcttctgtgaaatgcctcagtctccccagaggccgggcggccctggcaggagaaactcaaccctgtgcgggctcacaggcaccccccagtccacaccctggtctcctgggagagagggcccagccggctctccgcagccccaggcctgcctggagacgggccgcctctgccacagggcctccactcctggctgtgtcctgtaaggtctggaagggcgaccgctctgactacctcagcgcccctcagaatctccctggggctgcagccctaccccaccccgacacagggcagaagagcagcgctcctggccccccgaagtcccagagctgctgacccccaccccaggcaagtctctcccgcagcccccacacccccaggcctggctccctggctggaaagcagccggtttggccctggaagtggacattcctctattactgtgaagttttatttatgaagaatttggagggagaaggctccaggcttcaggagggggtggtgtcctccctggccctcctcccttccctcccctcattccagctgcctgccctcagcacccccaggcccctcacagcccagccccctccagagccctgccccaccgcaccctgcttctccagggcctagcagaccagcatctgccccggtgaagggatggatcagctgtgggggtgggtgcagaaggttgccacctcctacctcagcgggagtcacctaggaaagatggagggattgacactattttctcaataaaatgggactttttttttttttttttttttttttggtgtgaaacttcctgttcccagctgcatcagagagcctgtctggggccaaggttgccagagatttctgaagacacagcttgttccttgttcttggctggtgggtgcacaaggacttctggaagggatttagacggggctgagtgctaggattaaagtggggatgggagtacggcaacagaaaaacctgggagctagcaatgcacccagcccttgactgtgccctggtggacagccgagctgtggctctagcgtgagccagtgccttcctgtccctgccaagggtgaggccagagttggccccgaggctaatgtttcagtgggtgagattaggtcggccgtacagaggccggtgggctccctgacatcccttccaggcaacctgaaagcactgaaatagcttatggccctgtgccagggaccttggcccaagctgctgacctccagggtggggagggagctacccccaggagaagagtcactcagacagcagtatgagcaagccagccagcagctccgtgcctgcacccagctcaggggaatcccagggggttcagatgcccaggaaggaaaaggggacagcgctactgctatggaatgagaccaccacttctcctgttgtccttcccagcttctccccaacctccccttttccctagtttataagacaggagaaaagggagaaagcaaaaagctggaaagaaacagaagtaagataaatagctagacgaccttggcgccaccacctggccctggtggttaaaatgataataatattaacccctgaccaaaacgactggtgttatctgtaaatcccagacattgtgtgagaaagcaccgtaaaactttttgtcctattagctgatgtgtgtagcccccagtcacgttcctcacgcttacttgatctattatgaccctttcacgtggaccccttagagttgtaagctcttaaaagggctaggaatttctttttcggggagctcggctcttaagacgcgagtctgccgacgctcccggccgaataaaaacctcttccttcttt

SEQ ID NO: 1908 - DNA, 3622 bp, Homo sapiens
ggcatggcggtcctgccaggacatacctgtctgtgggtagctgtttgctgtgaagtccacactgttgtgacaatggcatccttgtccttggttgtggcattgctcactgagctgctgacctggtgggcttgggacatttctcctcagtgctctgtggagccctcctctgcacccctcagctgttctggcatggtggccctgcacacaggggcccaggctgagttggactctgcaacagcacgagtggagctgtgtgtgcctgtggacttgtgccctccctgggagagcgtcccctggccactgtgttaccgcttgctcagaagggcccatcgtgctttgtacgctcacccagcaggagggctggacagccaggagaggcaggggttgccacctgccctcaaggcctcagcccatctttagtgtatctgcaggcatcagagaggtcatttgtcccttaacattaggaccctggtccaggccaggctagaggtatgggtcatgcagtgaccaacacacctggcgtcctagccattcatatttgggagtctccaggagcctagtctcttactgcttggggctgtgaggggattgagcctgtaggtaggcgagatctgtgctctgtgagccttacgccctttgagccatggtcagtctggtaggccctttcctgagaagctctgcccttgtgttcccacagatcctatgaatgcactccagagcctgactggcggacctgctgcgggagccgctggaattggcatgcctcctcggggcccgggacagtctctgggcgggatgggtagccttggtgccatgggacagccaatgtctctctcagggcagccgcctcctgggacctcggggatggcccctcacagcatggctgtcgtgtctacggcaactccacagacccagctgcagctccagcaggtggcgctgcagcagcagcagcaacagcagcagttccagcagcagcagcaggcggcgctacagcagcagcagcagcagcagcaacagcagcagttccaggctcagcagagtgccatgcagcagcagttccaagcagtagtgcagcagcagcagcagctccagcagcagcagcagcagcagcagcatctaattaaattgcatcatcaaaatcagcaacagatacagcagcagcaacagcagctgcagcgaatagcacagctgcagctccaacaacagcaacagcagcagcagcagcagcagcagcagcagcagcagcaggctttgcaggcccagccaccaattcagcagccaccgatgcagcagccacagcctccgccctcccaggctctgccccagcagctgcagcagatgcatcacacacagcaccaccagccgccaccacagccccagcagcctccagttgctcagaaccaaccatcacaactcccgccacagtcgcagacccagcctttggtgtcacaggcgcaagctctccctggacaaatgttgtatacccaaccaccactgaaatttgtccgagctccgatggtggtgcagcagcccccagtgcagccccaggtgcagcagcagcagacagcagtacagacagctcaggctgcccagatggtggctcccggagtccaggtcagccagagcagcctccccatgctgtcctcgccgtcaccgggccagcaggtgcagaccccgcagtcgatgccccctcccccccagccgtccccgcagcccggccagcccagctcacagcccaactccaacgtcagctctggccctgccccatctcccagtagcttcctgcccagcccctcaccgcagccctcccagagcccagtgacggcgcggaccccacagaacttcagtgtcccctcacctggacctttaaacacacctgtgaaccccagctctgtcatgagcccagctggctccagccaggctgaggagcagcagtacctggacaagctgaagcagctgtcgaagtacatcgagcccctgcgccgcatgatcaacaagatcgacaagaacgaagacagaaaaaaggacctgagtaagatgaagagccttctggacattctgacagacccctcgaagcggtgtcccctgaagaccttgcaaaagtgtgagatcgccctggagaaactcaagaatgacatggcggtgcccactcccccaccgcccccagtgccaccgaccaaacagcagtacctatgccagccgctcctggatgccgtcctggccaacatccgctcacctgtcttcaaccattccctgtaccgcacattcgttccagccatgaccgccattcacggcccacccatcacggccccagtggtgtgcacccggaagcgcaggcttgaggatgatgagcggcagagcatccccagtgtgctccagggtgaggtggccaggctggaccccaagttcctggtaaacctggacccttctcactgcagcaacaatggcactgtccacctgatctgcaagctggatgacaaggacctcccaagtgtgccaccactggagctcagtgtgcccgctgactatcctgcccaaagcccgctgtggatagaccggcagtggcagtacgacgccaaccccttcctccagtcggtgcaccgctgcatgacctccaggctgctgcagctcccggacaagcactcggtcaccgccttgctcaacacctgggcccagagcgtccaccaggcctgcctctcagccgcctagccaagactgcagggatggcccgcagcctcatcggggccaaggacacacgcctcctgtcagacacttctaggtgttggcttccttagagagcctggggttaggttagctttcctgcttttatcttctgccttggggacctgccaaacgaaatcccacacctgtacagaactgggataggcgcagtggagcgggttgcttggggggcgttggccgacttcttagagaaggccctccatgtgacttcctcccaggagccagatgcgatcctcaggctgctctcaccgtggcctgtccacggtccaggtccatctcagcagcgtgagggtgcactcagggtgttgttagagcgtctcgtgtgtgctagacgcacccctactcgttcctatagaacacagaggacataggaaacccttaaaacacacatgggattctctggtcacagttttgggttcaggctatgctgctttgggcaggtggagcaccccccgaggaagcctgcaagtccagggcacaggctgccttttggagggagggctggcccataggtgctgctggctccccgccaccagctgggcctcagccctcacggcattcctgctgagcaccgtggggcacccagggagcaggggcgtcagggatcctgctgccggcacccctgtgccgctggcatgagggccgtgtccccactgtgaaggatgaagagcaaggccctcaggacccgtgtcctcagagcaccacacactgagcacccagagacagcgggcctggcagcgggccgggccatgcagggagcgcctccctatgttgcctgccactctgggcaccggccagcaccctctggtgagaagaggtcccccctttttatgtgcactaccccaccatctgtgattataataaatttattattcctgtg

SEQ ID NO: 1909 - DNA, 3504 bp, Homo sapiens
attgtcctatgaccctgccaaatcccctctgcgagaaacacccaagaatgatcaataaaaaaaaaaaagaaaagaaaaaagaaatttcctataaatggagtgataaaaaaaaaaaagtcagaaaatcatgtcttggcctctgaaagatatcaacaaatgatattttccagttgactatgattgttgatttggaggtcaacttcttataacattgagacaatatatcaaggctatgagaattctatctgatacttctgtagtatgatttgctactagaattatgaaaattcattcttcctaataaatagattttaggggaaaatacatgctcctatagctcaggaaattccaaaggattagaagttctatgccagaaaatggtacagaatttcttattatatcccaacatcacagctttagccagcatcttacttaatagggaaatactaaaagcatttttcacttggctcaggaacaacacaaagatgctcaccatctctgctactattcaacattgtctagaggtattagccattgcaattcaacatgataaatcagttcaaagcataagattggtaaagaggaagtaaaattatctctatttgccaacaatgctggaaaaactcaaatcaaaaataaaattaactaaaaaattcagtaaagtgacagcatacaaagctaacatacaaaaatcaataactttcatacaaacaaacaataatcagagggcataatgataaaattcgtttatatagtattgaagaagattgaatacttagaaataaaagtatcaggaaatgtgcaaaacttatatgaggaaattttaaaatactcctgaaagtcacaaagatagacttacataaacgggtagaactcaacattataaagatgttggcttttcttaagttactttataaatttaatgcaatcccaataaaagtaccaataagcttttatatggcattatgtaattgataactaatatttacatagaaaaaaatgcaagaatacccagaaaaataccaaaaaaaaaaaagaataactatggtgaagactagctctgtcagacattaatacaaaatatatccactgaatttctgactgcttaaaacaaataggtcagatgcagtggctgacgcctgtaatcccagcactttgggaggctgaggtgggaggatcacttgaggtcaagaggttgcctgagaccagcccaggcaacaaagccagatcctgtctctacaaaaaattaaaaagttattcaggaatggtggcacatgtcagtagtcctagctacttgggaggcagaggcatgaggattgcttgagcccagaagttcaaagttgcagtgagttaaaatgacgctactgcatttcagcctggccaacagagtaagacttcatgttaaaaaaataaaatccactaggcacagtggcacatacctgtagtcccagcactttgggaggctgaggtgggcagatcacttgaggccaggagttggtgaccagcctgggcaatacagtgaaatactttctctacaaaaagtacaaaaatcagctgagcgtagtggtttctgcctgtggtcccagctactcaggaggctgaagtgggaggatcccttgagcctaggaggcagaggttgcagtgagccaagattacaccactgcactctagcctgggtgacagagggaaaccctgtctcaaaaaaaaaaaaaaatccacagacaataaaataagagaatgatagcttgactatattttttaaattgcatggcaaaaatcaccataaacaaactaaaaagaaaacagaaaacctcttagaactaattgagttcagcaaagttgcagatgaagagtaacataaaaatcactcacatttttatatactaacaatgaacatatggaaaccaaaatgtaaaacacaaaacaatgtacaatcattccaaagaaaataaaacgctcaggtataagcctaacaaaatatgtgtaggatatatatgctgaaaattgaaaattataaagtgctaatgaaagaaaagatttaaataaatggagaggcatattgtgttcctgtatttgaagatgtaacatagcaattttcaattctccctaaattgatctgtaggttttttgttttgttttagagtcagggtctcgctctgtcacccaggctggagtgcagtggtgcaatctcagctcgctgcaacctcggcctcccaggctcaggtgatcctcccacctcagccttccaagtagctgggccacaggcatgcagcacaatgcctggctaatttttgtattttcagtagatacaggattttgccatgttgtccaggctggactcaaactcctgagctcaagtgatccacccactttggcctcccaaagtgctaggattacaggtatgagccatggcgcctggccgagcttggcagttttttataaagctaaacatgcaaccaccatacaaccaaccaattacactcttgggcatttatcccagagaaatgaaaacatattaacaaaaaacccacacatgaatgctcatagcatccttggtcataatagctaaaaactggaaacaaatcagatgtccttcaatgggtgaatggttaacaaattttggtacatctgcaccatggaatactactcagcaataaaaaaggaacaaactactgatacacatgacaacctgaatgaatctccaggggattatgttgagtgaaaaaaaggtaactctacaatattacaaactgtatgattccatttatagtccattctcaaaatgacaaaaatcgtagacgtggagaacagattagtgattgccagaggttaaggagtgggtgtgagtgagagggaagtgatcatggaaatgatcagtatcttgactgtatcaataccaatatcctagttatgatatcataccatagtcttacaagatgttattgttgagggaaacaggtttaagggtaaagagatctgtattagtacttacaactacatgtgaataaaaagacaactgatgaaatgggagaaaatatttacaacagaccaagggctaaagaactcttaaaacttaaggaaaaaaaaacaatgatcatctcaactgatgcagaaaaagtatttgataaactccaaccccctttcatgataaaaaatttttactaattagaaatagaagagagcttcttcaacatgataaaaggcacttattaaaaaaatctcggccgggcgccatggctcacgcctgtaatcccagcactttgggaggctgagtcaggcggatcatgaggtcaggagatcgagaccatcttggctggcacggtgaaaccccgtctctgctaaaaaacacaaacaattagccaggcgtggtggcgggcgcctgtagttccggctacttgggaggctgaggcaggagaatggcgtgaacccgggaggcagagcttgcagtgagccgagatggagccactgcactccagactgggcaacagagcgagactctgtctc

SEQ ID NO: 1910 - DNA, 2848 bp, Homo sapiens
ttgagtttttgtaatatttaattttttttctggttcttgaaaaacctataattttacttatgtcattcccacttcaagttctttttggaacaaaatataaaagtgacttatttgagggtgattcaggaatattaatggtgtcacttagcttgtataggtgtttaacctggaagtcctagttctgtgtaaaagatactccataataagtgtttaaaagcaaaccacttcatgatttcgtatcttttaagttgctcttacagtggcctgataatcaataaaacacagtggggtctcccattctgctttacctggagggagacagcaggtcttgtatacgttttcactgtgcctgaaaagaaagcttaccattgttcaggtataaaggaacagctaataaagctgtgttgcaggtggctttatgacctatgctatctttttcatctttctaagcaacttaatccatattcgagtaggataatgtgtacaggcatagtttgtgggcagttatacttgtgcttgaacacatggatagaaggaccctggaaaggccatgtactgattggaaacttttcttttgacctggtttgagtgttgcctccagtctggtgggttttttgtgcatttttttgttgtttaattccccaaggcatacaacatccaataaagagttgacagcagtttaacgtatctttgtggtgtataagtatgttcttcagtggatatgtcctttctccatatactatgtgtaaatttaattggtaattttgcaggtgatgctttatataattatatctatgtaatatctctaattgcagctgaagcgatttgaggtctatcatagcgttgatactttgagtcatattttttcccctttagattggctgatgttagaaatcagataatatttgctgttcgtcaagaatatgtcgagcttggagatcagctcctcgtgcttcagcctggagacgaaattgccgttatcccccccattagtggaggatagtgcttttgagccatctaggaaagatatggatgaagttgaagagaaatctaaagatgttataaactttactgccgagaaactttcagtagatgaagtctcacagttggtgatttctccgctctgtggtgcaatatccctatttgtagggactacaagaaataactttgaagggaaaaaagtcattagcttagaatatgaagcatatctacccatggcggaaaatgaagtcagaaagatttgtagtgacattaggcagaaatggccagtcaaacacatagcagtgttccatagacttgggtatgatttcctttatcactctaaaagttaagtgtaattgttttccatctttgtactaactctgattcttgaatctttcttagtaattctatattaccatgagaggaatattcatgtattatttttggaggacaatagggatggctgttagtacctttagggactgcctagtgagttttgatattgggagagctcttgttgcctctgttgctgtaacaaactgcagttgtgccaagacttgcaggccctatgacaatctgtgacagattctttttgatataaatgcctcgaaagtcattagagtggtttgcctttttgtacccctaaaaagagaagagttcttggctttaaaaagaagccagtaattgagactgtatctatcatactctgttagttactagtttgttattaataaccagtagttttattaatggttattatcactcctattacttgatatgtattattttaaattttgtattatactcgttaggacataactttgtatttctaggcattacttggcactgtgccttgttgagtcagatgtttgctctatcaatgaaaggattttccttggtgcccatcaggagggtttagtggatagattctaacaaattagctgtagcatcagcctcatctactgcctctgctgaacgctactgcaattaattactcttttctaactgtatgtttacgtaaaatagaactacagtataattctaagactgcatacctggatttttttcatctgtctagcagattctttaacacgtagattcagagatgatggtgatttttttttctcttcatcttgttaaagcttggttccagtgtcagaagcaagcataatcattgctgtgtcctcagcccacagagctgcatctcttgaagctgtgagctatgccattgatactttaaaagccaaggtgcccatatggaaaaaggaaatatacgaagagtcatcaacttggaaaggaaacaaagagtgcttttgggcatccaacagttaatcacttatgtttttagagcatgcaatcttaactttgttaaactattattattgatcacattttgatttttttctctccacatcaggatagtttactgaagcacaatctcttatactagtgggacaaaagggagaaaaaggaagcaagataaatgggtatgtaggatgaagggttatttaaaatggaactaaagatagaaggaggactgtaggaagaaatggaataatttaaatgtgaggaaagatatctgtggtagacatgtccttccatgactaatttctaattgtaactcaacacacattgaggtatgggccctcctcagtgactttaactagctcagaaacgtactcccccaccaaccccacctcaccgccccccatcccggttctgggagagcattgttattaaggatgcatgacaggaatgttggcagaactggaaagtattaaaaaagcattatcagacagtcttgatattatacattttcagaaatatattaaaaataataaactaaaacccatgatttcaaaagttt

SEQ ID NO: 1911 - DNA, 3697 bp, Homo sapiens
gcactggctccgcgtcggccggtcggtttggtcggttgtagtggcctcgccgcccggtccgctgtcgcagcgctcatccgcgccgggagcccttggctgcgtcgcccggcagccgcggctggagtgtagtggcgcaatcttggatcaccacaacctccgtctcccaggttcaagcgattctcccgcctcagcctcctgagtagcgattacagggagcatttcctgaagacgtagtcatgcagcacgtcagcagctcccagagcagccagcgccatgtccagtggcctggggcctgccccggcgcgggcgaggagcagccagcgtgctcccagccgtccctgcccctcacactgccatcccccagccaccaactacagcagctgatggtgagagggggccctgcgggtgggcagaacatgaatgttgacctgcagggcgtgggccctgggctccagggaagcccacaggtcacgctggccccactgccgctccccagccccacctctccaggcttccagttcagcgctcagcctcggcggtttgagcatgggtctccatcatacattcaggtcacgtcccccttgtcccagcaggtccagacccagagtcccacgcagcccagtccggggccggggcaggccttgcagaatgtgcgtgcaggtgcccccggccctgggctgggcctctgcagcagcagccctacaggggacttcgtggatgccagcgtgctggtgaggcagatcagcttgagcccctccagtggtggacaccttgtgtttcaggatgggtcagggctcacccagatcgcccagggagcccaggttcagctccagcacccgggtacgcccatcacagtccgagagcggagaccctcccagccccacacacagtcagggggcaccatccaccacctgggaccccagagccctgcagccgcgggtggggccggcctgcagcccctggccagcccaagccacatcaccacggctaacttgccaccgcagatcagcagcatcatccagggccagctggttcagcagcagcaggtgctgcaggggccgccgctgccccggcccctgggcttcgagaggacgcccggcgtgctgctccccggggctgggggcgcagcggggtttgggatgacgtccccacccccgcccaccagcccttccaggactgccgtgcccccaggcctttccagcctcccactcacgtctgtggggaacacgggaatgaagaaggttcccaagaagttagaggagattcccccagcctctccggagatggcacagatgaggaagcagtgcctggactatcatcaccaggagatgcaggctctgaaggaggtcttcaaggagtatttgattgaactgtttttcttgcaacactttcaagggaacatgatggatttcttagctttcaaggagagactgtatggaccattacaagcatatcttaggcagaatgatttggacattgaagaagaggaagaggagcactttgaagtcattaatgatgaggtaaaggttgtggccagaaagcacgggcagcctgggacttctgttgccatagcaacccagctaccgccgaggacttctgcggcttttccagcccagcagcagccgctccagcaaatacatatggggactccagtacctggagatgtgaattccataaaaatggaagcatctaagaggcagtgaacactggcgcccacaggagaaccaggtgcatcagcgcattgcggagctgaggaaagcaggtctgtggtcccagaggcgtctgctgaagctgcaggaggcccacgacccaagtcccactgggactatctgctggaggagatgcagtggatggccacagactttgcccaggagaggtggaaggtggcctctgtgaagaagatggtcagagctgtggcccggcagctgcaggacaggacgcgcagggaggccggggccaggagggaggagccgagcaggctgaggcagacgtcacctgtactaccagagaaatcgagcgtccctggtctagtactgcgcaggtaaagattccagcatcttggaagcaagtgctccactggaaaataaaagccacgtggtgagtgttttctttgtgatatcagaacttcatgttccgggtgaggggcttcagggtgcccgtgtccttgccggggggctccggtctccagtctcctcagcatttccctctggtctccctccagagaggacagatctactcacgatctttgggaccacccagaaagggtcaatttcaaaatcgaattttctcaggatgacttcaaatcaaaacagaaacgtgtggtcttgcctttggtttttccgcccaaactgccttttggctttgccgtgtggggaccgggcacctcgactgtcctctgtgtcctgtgatggggcaggttacgccatgtctgatcagtaggacagcgtcccttgggttcataccctttatctgcagttctaaaactctgaaagctcagacagcagaaaggttttgcccactcagtgttgctcactcattttgcagcaaacctgacccacaccgaggccaggccagccccgcggtcctggtgggtgagtgtgtctgggtgctattgctgtggaaacgtcggcgtgtttggtcatggctgccagatgccgtccctaacactttcccatgcttatttgacttatgtcattaccttacttctctgaaacagtctgaattccaaaccctgtgtggccctaaggattttggataagggactatgtacctataatataaataagccatattatttacaatcatgagtttctgaatgttcactttttttatttttggagacggagtcttgttctgtcacccaggctttagagtaccacagtgtgatctcggctcaccgcagcctccgcctcctgggttcaagcgattctcctgccttagcctcctcggtagctgggactacgggcatgagccaccagatccaactaattttttgtatttttagtagagacggggtttcaccatgttggccaggctggtcttgagctcctgatctcaggtgatctgcccgtctcaccctcccaaagggctgggattacaggtgtgagccactgtgcccagccagaatattcacttctaaatgtgggtgtgtattcaggtgacttgggattaaaaaaaaaagaaaaaacccttatgggattttatatttagaagttctgttgttgaaatatgaacctgtatctgttgttgcagtggcagaaggctgcagcacaatgaatgattattgtgaaagctggtaattttgtgcccacaaataattgtcaagaactttctaataataaaatacagaaatagattaatagttgctacaaacataaagagagactccatggtagaacactttaggaagcacattttatcttttttgaaccaacatgtatttccaaacatgtaagtaataatatcaagcgtggtgggaagattggattggaggctgattctgatctgtgtgttgggatgaactgtggcattcacagcattgagcaaaatcatcttcaaggacagcgtttaattctgttgttgacaagtcttttaagaaaaagtactagtttgggaatttttcacagatgcaaataagcttgacccctaaatttaaaatattatttaaaaaataaaatgtcagatttattcatctgtc

SEQ ID NO: 1912 - DNA, 3663 bp, Homo sapiens
tagttatgatgcaatacattagatttccacaacttgtgcattttaaaactgtgaggttgtaccctttgaccaaattcccccattttcctccatcccctacccgctagcaaacaccgttctgctttctgtttctatgagttagacttttttagataacatatatgagtaagattaagcagcgtttgtctttctgtgcctgggttatttcacttagcataatgtcctccagtttcatccaagttgttgcaaatggcaggatctccttttttaaagttgagtattattccagtgtgtgcagtgtgtatacacacgtatacacatgtacccatgtatgtatgcacacgtatacacatgtacccaggtatgtatgcacgcgtatacacacgtacccaggtgtgtatgcacgcgtatacacacgtacccaggtgtgtatgcacgcgtatacacacgtacccatgtgtgtatgcacgtgtatacacacgtacccatgtatgtacacgtatgcacatgtgccatgtgtgtatgcacacgtatacgcatgtatgtatagatgtatacatatacacacttatgaatacatgtgtatctacgtgtacacatgcacacatgtatatgcacatgtgtatacaggcatgtgtatatgtgtgcttacctacgaatatacatacatacacatatctgtatgcatatacacacgtacatatcgatatgtatatgtatacatatgtgtccggaattggtgggttcttgatcttgctgtcttcaagaatgaagctgcggaccctcgtggtgagtgttacagctcttaaagatggtgtgtctggagtttgttccttcagatgttcatatgtgtccggagtttcttccttctgctgggttcgtggtctcgctgacttcaggggtgaagctgcagacctttgcagtgagtgttacagctcttaaagacagcacgtccggagttgtttgttccttctggtgagtttatggtcttgctggcttcaggagtgaagcttcagatcttcgcagtgagtgttacagctcataaaggcagcgtggacctaaagagtgaccagcagcaagatttattgcgaagagcgaatgaacatagctttcacagtgtggaaggggaggtaagtggagtgggttgccgctcctggcttggttggcctacttttattcccttatctggccccacccacatcctgctgattggtccattttactgtgagctcattggtccattttatagagagttgattggtccgttttacagagagctgattggtgtgtttacatacctttagctagacacagagtgctgattggtgcgtttacaaacctctagctagacacagagtgctgattggtacatttacaaacctttagctagacacagagtgccgattggtgcatttacaatcttttagctagacacaaaagttgtccaagtccccaccagattaactagacacagagcgctgattggtgcgtttataaacctttagctagacacagagtgctgattggtgcatttacaaacctctagctagacacagagtgctgattggtgtgtttacaatcctttagctagacacaaaagttctccaagtccccacctgacccagaagcccagctggcttcacctctcaatggcactctccgcgggactttgcagcacctagcccgggcactctggcagcccagagggagctcatcccccaatcaagcccagcaggcactgagcccctgaccacccggaacccgcaccggcctgcgaatgccacgcgcagccccagctcccgccggcacctctccctccacacctccccaagagcagagggagctggttacagactcggccagccccagagtggggcccccacagcacagcgacaggctgaagagctcctcaagtgcggccagagcggacgcggaggccgaggaggtgccaagagccagtgagggctgctagcacgttgtcactgctcacatatacacgtgtatacacgtgtatacatatacatatgtatatacttgtatatacatatgtatatacttgtatatgtattcgtgtgtatgtgcatgtgtatgggtgtacagatgtatatagtatgtatatatgcatgcatgtgtacatgtgtacattatatacagtttacatgtgtgtatatatgtgcacatgtattccagtgcgtgtatatatacacataatatatacatatatgtatattcatatgcacgcatatgcatacatgtgtgtgttcatatgcacgcatatgcatacatatgtatattcatatgcacgcgtatgcatacatatgtatattcatatacacgcatatgcatacatatgtatattcatatacacgcatatgcatacatatgtatattcatatgcgcgcatatgcatacatatgtatattcatatacacgcatatgcatgcatatgtatgttcatgtacgcgcatatgcgtgcatatgtatattcatatacacgcatatgcatacatatatgtatattcatatatacatatgtatgcatgtgtgtatgttcatgtatacatgtgtatacatgtgtgtatattcatatatacataggtatgcatatatgtgtatattcatatatgcataggtatacatatgtgtatattcatatatacatatgtatacatatgtacacacatatacatatacatacacacaacttttctttaaccatttgtctattgatgaacacagtttgtttctctatcttggctactgggaataacgcttcaatgaacatggcagtgcagatatatctgagatactgatttcatttcctttggatatatgcacagaagtgggattgctaaatcattcagtagttctatttttagtttttggaggaaactccatactgttttccataatggttgtgccgatttacaattgtacccttttcttcacatcctcaccaacacttaattattttttgattttgtgataatagccatcctagtaggtttgcggtcttatctcattgtggttttgatttgcagttccctgatgactagtgatgttgagcaccttttcatatacctgttggcaatctgtatgtcttctttggaaaaatgtcttttcaggtcctttgctctatttttaatcacgttatgagttgcatgagttccttatgcattttggatattaagcccctatcagatatatggtttgctgtgcaggaattttttagtttgatgtagtgctacttatttgtgtttgactttgttgcctgtgcttttggtgtcatacccccaaaaattattggcaagcccagtgtcaaaaacttttcttctctcttttcttccaggatttttatagtatcaggacttgtatttaagtcttcaatccactttgagttgatttttgtatatggtgtgaaataagagtccattttcatcctatggcaagtaaatatccagttttcacaacaccgtttactgaagagaccatcctttccccaatgtgtgttcttggcacctttgttgaaaatgaatggactaaattcataacttggcctctgggctctctattctgtcccactggtctctgtgtctgtttttatggcagtaccatactgttttgactactatagctttgtaataaaattacagatgccttacc

SEQ ID NO: 1913 - DNA, 2874 bp, Homo sapiens
agaaccttgtttcctctttggtttgatgggggttgagcctgactctgtgctgtggttgtgaggctggaatgcggagaggccagtgaacacactggacatgggcgggcagggaggcatgtcctcgggtcagccgtctgagtcacaggcccagagatgcccagctgtgaccagtgctccgcttgcaggttcattttccagacactgaaagagcagaatggctaaataagactgtaaaacacatgtggcctttcatttgccaatttatagagaagttgtttcgagaaactatagaaccagccgtgcggggagcaaacacccaccttagcacctttagtttcacgaaggtcgacgtgggccagcagcccctcaggatcaatggtgttaaggtatacactgaaaatgtagacaaaaggcaaattattttggaccttcagattagttttgtaggaaattgtgagattgatttggagatcaaacgatatttttgtagagctggtgtgaaaagtatccagattcatggtaccatgcgggtgatcctggaaccgttgattggagatatgcccttagttggagctttgtctatcttcttccttaggaaaccacttttagaaattaactggacaggactgacgaatcttctggatgtccctggattgaatggtttatcagatactatcattttggatataatatcaaactatctggtgcttcccaatcgaatcaccgttccacttgtcagtgaagttcaaatagctcagttgcggtttcctgtaccaaagggtgttctaaggatacattttattgaagctcaggatcttcaggggaaagacacttaccttaaggggcttgtcaagggaaagtcagacccctatggaatcattagagttggcaaccaaatcttccaaagcagagtcatcaaggagaacctcagtccaaagtggaatgaagtctatgaggctttagtgtatgaacatcctggacaagaattagagattgagctctttgatgaagacccagacaaggatgactttttaggaagtcttatgattgacctcattgaagttgaaaaggagcgccttttagatgaatggttcactctggacgaggttcccaaggggaagctacacttgagactggagtggctcacgttaatgccaaatgcgtcaaacctcgacaaggtgctaacagacatcaaagctgacaaagaccaagccaacgatggtctttcctctgcattgctgatcttgtacttggattcagcaaggaaccttccgtcagggaagaaaataagcagcaacccaaatcctgttgtccagatgtcagttgggcacaaggcccaggagagcaagattcgatacaaaaccaatgaacctgtgtgggaggaaaacttcactttcttcattcacaatcccaagcgccaggaccttgaagttgaggtcagagacgagcagcaccagtgttccctggggagcctgaaggtccccctcagccagctgctcaccagtgaggacatgactgtgagccagcgcttccagctcagtaactcgggtccaaacagcaccatcaagatgaagattgccctgcgggtgctccatctcgaaaagcgagaaaggcctccagaccaccaacactcagctcaagtcaaacgtccctctgtgtccaaagaggggaggaaaacatccatcaaatctcatatgtctgggtctccaggccctggtggcagcaacacagctccatccacatctcagtcaaggagccgacccccagcatcgcctcggacatctcgctgcccatcgccacccaggagctgcggcaaaggctgaggcagctggaaaacgggacgaccctgggacagtctccactggggcagatccagctgaccatccggcacagctcgcagagaaacaagcttatcgtggtcgtgcatgcctgcagaaacctcattgccttctctgaagacggctctgacccctatgtccgcatgtatttattaccagacaagaggcggtcaggaaggaggaaaacacacgtgtcaaagaaaacattaaatccagtgtttgatcaaagctttgatttcagtgtttcgttaccagaagtgcagaggagaacgctcgacgttgccgtgaagaacagtggcggcttcctgtccaaagacaaagggctccttggcaaagtattggttgctctggcatctgaagaacttgccaaaggctggacccagtggtatgacctcacggaagatgggacgaggcctcaggcgatgacatagccgcagcaggcaggaggcgtcctcttcagcgtagctctccacctctacccggaacacaccctctcacagacgtaccaatgttatttttataatttcatggatttagttatacataccttaatagttttataaaattgttgacatttcaggcaaatttggccaatattatcattgaattttctgtgttggatttcctctaggatttcgccagttcctacaacgtgcagtagggcggcggtagctcttgtgtctgtggactctgctcagctgtgtccgtaggagtcggatgtgtctgtgctttattatggccttgtttatatatcactgaggtatactatgccatgtaaatagactattttttataatctttacatgctggtttaaattcagaaggaaatagatcaaggaaatatatatattttcttctaaaacttattaaattcgtgtgacaaataatcattttcatcttggtagcaaaaagttctcagtgacctattttgtggtgtttctttttgaaaagaaaagctgaaatattattaaatgctagtatgtttctgcccattatgaaagatgaaataaagtattcaaaatattaacattttcat

SEQ ID NO: 1914 - DNA, 3104 bp, Homo sapiens
gtggctttgcaggttctagacatttcatgtaaatgcagtcatataatatgtggctttttgtgtctggcttttttcatttagcataatgttttcaaggtttatccatgttgtaacatgtattcttttaaaaaaaattttaatgtgtaaaatatacatatcataacatttaccttttaatcattcataagtacacaaatcagtggcatgaggtggtcccttcccaatgttgtgctgtcatcaccactgtctgttttcagaactttgtcatcatcatccccaacagaaaccctgtacccattaaacagtaactcccggccagacgcggtggctcacgcctgtaatcccagtaattccagcactttgggaggccgaggtgggcggatcacaaggtcaggagatcgagcccatcctggccaacacggtgaaaccccgtctctactaaaaatacaaaaaattagccgggcatcgtggcgcacgcctgtagtcccagctactcgggaggctgaggcaggagaattgcttgaacccaagaagtggagattgcagtgagccaagatcacgccactgcactccaacctgggtgacagagtaagactgtccaaaaaaaaaaaaaaaaaaagccccccaaaaaaatcactgactccccatgcccttcctccaagcccctgatatcttctattcaactttctgtctctatacgtttgcctattctaggtacctcacgtaggtgaaatcatacaatatgtgtgtggccttttgtgtctggcttctttcactcagcatgatgttttcaagtttcatccacactgtagcatctatcaatactcaatttctttttatggctacataatattctatctacttattatttttattctatgaacactgattgacagcttcatttctggagggccaccagtgtgctacacactttgcaggtccttcacctatattcttgtatttattccatttatttataaactaatggtccccattgtgcaggtgaggaacctgaaagccagagggaatagtgacttttccaaaggtcacattgctgcttagtggttaaagcagctctagagccctgtgatgtcttgattcccaggtgcctgcagggcttgagagaaatggagacaaagaaggccgtgggcaggaggccaagagaagcccagcaggtgtgaccatcaatgtgggaatgtgatgggggtgggaggaggtgaggtagggcccccaccatttcagcttcttcccctccagccaccttcccatcaccctccccaaccatctccaccccagccagggccaacaccattctgactgttgctttgcctgcctctactttacccctggtctttgactccctgatagaaaaagctgaggcccaaggcctctgggctgactgctcttttggcataagtcctccacacccttcccccacaggtatccccaacagggtgtggagaggccgctcttttaccttgaagttctactttgttctactcttgttcctctgctgagacctggttagccttcctggggcctgactctcccattctccagcaccagccctgacctgacctctcctcctccaaaccctgcatggggccctgcaaccaagcacagctgtgtctggtctttgtccagacatcaaatggtccagggagggggtggcattttggttatttttgcctaagaggctttctataccctgaccaatcccagcctcattcccaatgggttatgagagtggagatagcttcttcttatccatgtttcttacagtgcctcttcccccaccccaacagacacacacacgcacacacacacacacacacacacacacacacacacactccttccttcccacttctcctctccttaggaactggagcccctccctgttctccctgctctacccagcctcctggccgcagtcctcccaccttcgatgagagtcctccaaggaagaaatataacaatttagaatttcagttgaatctccaatagcctggggtacagaggtggcttgaggctgggaggatggtggagaggctgttctgcagaagccagagtccttttgctaccccagggcctcttgctgaaggagcattgattgagaacactggagcctggggctctgggtatcacgatcgtcccctctggaagcccttctagaagtgtccaggtcttctcttcctcttccttgctggggatttgcttgcttgtgccttggagagatggtggaggggtaaggcagttctgtcctttatcagggtttggaaatcccttatgaggtcctggctcaggggcgcgctgggcagcaaggccagctttagcaccttctcctagtagtgaggcagagggtttgggcagggccagctcctggcgaaattattgggaaacgggttgggcatgagctggaggccctggggttcaaacctcccaccagcggatatgtgccggtacctgttgggagaagggtatggagagaacagagagatcaaagaagagatccagggacagtggagagacggggaaggggaagggtgatgccgctgtccacaagctagttagccatcaggcggcagggaatcccttctgtctctccacctaatcggatattgacctgtgccaaatggcctgcaccttatgtgtgtgtgttggtgttaggctggtgaaataatgtcgtgcagctagtaagccttccatccttttgacatactgcatataatattatgatccagatcccaatccagattctaactgtccttcaagtctcaccttttccactaatgcagtgacagtgggaaaatcacagaactcagctcaactggataactgcctcttctcagtaagcctgcggtattgggtcgaacagtaggaaacagacttttgtttcttttaacacagctgaatagtggccagttttctatgactcagcgcactttgcccctggttcggcagatagtcccctgtttgctgttgttggtttatgcaggggctctcagcctggctgcacattacaatcaccctgggagcttttaaacacaacccacccacactgccctcaaggtcagttagttagaatctccagagggaggctc

SEQ ID NO: 1915 - DNA, 3209 bp, Homo sapiens
tgaaaactttcagatgcttcttcattgttttagtcatttaccactttaatgaaattatctggcaactttattgtggtgggtggggatcaatgacggtgtaatgaggcaattagcaaattctgatagttccatctactccatgtgaaagtctcttgatgttttatatggtactcttattaataatcccagagagcaggggttggcaaactatggcccatgggctaaaatggtttttacattttaaaagggttgaaaactttaaaactggaaggatacatgacagagactggatggcctacaatgcctaacatattatctagccctttacagaaaacaactgaccaatccttatgagaccagacttgcaaaaattacagtaacagagtgaaaaaccttcttgaagtgttaggaggaacttgagtcataatttgatgttgaatcagagagaacaactgtttgggcttatttgcctcagagtatttgcccagcctctggtaactatcattctattctctacctccatgagagcaactttcttagctcccacatgtgaatgagaacatgcaatatttgtctttctgtgcctggcttatttcagttaacatcgtgacctccagttccatccatgttgctgcaaatgggattcagaatgtgttgctggacttcaagataggaagaatctttgccttgatggctgatgacagtaaccaccccatctaccatcatctattaaggatttactgtgtggtcactttacagtcatccaagtaaattttcataatcacctgattacatgggtaccgcttttcagaaaaagaaacagatttctggagggattcagaatccatggctggaagaggtagtaaggccattgggagggcatgcctctcctcagcccacccccaccctgtgtgggtctccattctgaaatttccattcagatgacccggtcctaggcagggaccaaaattccttgtcagctgaggaagtcctgaagaaacatcctgaagatgatgactgcactgccatcgtgggcagatgcagcttccatctacctgagggctgaaggggaaaacctttcacacacgtgaggaaggcgcagctctgtggaaaggtcactagaatggcagcggcagcaaatagggctccaatgcacgtttgcagttaactgggtccaaggagagcatggccctccacagcaagtttgctctatagaataaagtcctgagcttgtttttatcacagttagacagagaatggtctcttgtttctcagttatccagggaagaacagtgtatattctctgtagatgagtgttgtctaatgtagtgattaatctctgctagtgttaggaaagctccactactgtgtgtgtgtgtgcgtgcatgcgcgtgcgcatgtgcacatactgcagtcttgactttccaattacaaaatgcctaagtcaggtcacattgtcttcttccagccagtttctaaggcaggcaatggaaacaggagccgatgccaaatggtctagaggcagaagggctgcatgctttgcagggccagccccaaggctgccttccagagctgcactttctctggggacagtaaactctcaccgcagctgccagccccctgtgcttggccatgcccctcacatggacttggaatcagtgtctctcttgctgatgagcacctccaggagcctcagtttcgcctttatgtgcttatattcactgtattcttcagccataggagtgcggtcttccttctggacatttctaatgcaaataaaggaaaaaggggtctgaggatcattttctgtctttgctagatactattcatcgggcaaattatcattgtttagaaactttgcagtttatcaacttgtagaatcagtgttgccgagtggcccttggtctcaagactggggctggatttagacaagtaatgaaaatgtttcacccagaaggcaacatgcaactgagtttttatatagttaatctggcatcctgtatgataagaaggctaagaaatgcagaaattctctctgctaagtatgaattcacattgagctctcatacaccaaaatcttttattcatacttaatgttttctcattcttatatatttcatctcgtgaaattttaaatttttaattagcaactggtccacaacttagttttttttttttttttttttccaaaaacagatagttaatactcctacttatcataaaactgtgttagaattcagcagctggattacataatactattataataagcctttattattgagtaactttacatacataatatttatatgcacaagtatttgagagcttataggtcaagccctgtgctaagtactttgtacccatgatctgatagaacccttataacaccttgatgagatgcagccattttctacacactacacatgatgaaaccagcacaggaaatcagataacttgcctgctcttggccaccacgcggtgcgctgctgctttgtgttttatgggaaattgcacatggcaaacattcaaccataggcttcctgcctttattattaaagggcaaatatgggtaaggaggatagcatggggcttgatttgttcaatgacctaaaaataaactgatcttattcataccctgccttgttctaggaaaggattctagtggcttctcagcagagggcagggcaaggaacaggtgctcaggaattggagcatctggcacgcaggcccccactgcactctgaggggcttcactctcctcagacacgaagtcatggaaccagagcttatctcctaagtccctcatagttctaaacttttttgacaattaagttaacgtcctccattgacattttcttaaaacctgggtggtttgcgtaattctacatgtataagatatctgtgcataatgtgacttagaataatataaaaaaggataagccaaaaaataggcttagatgaaagactggaaagatacacgtcaaaacattaattctgacttgtctttggttattattgttttgggaattactacttaaatttgcttacctatattttctaaatactgtgcaatgggtgggaaatgaaaagcaagtgtttaggtataaaaatatatgagacatatccaaatcagagatcctaaaagtaaattcatacaataattgttaaactaaactgaaatacaatatattttaaatgacaaagtt

SEQ ID NO: 1916 - DNA, 3529 bp, Homo sapiens
ctgactgagagcagggagcagcaggcatggggcatgccgggtgccagttcaaagccctgctgtggaagaattggctctgcagactcaggaacccggtccttttccttgctgaattcttctggccttgtatcctgtttgtaattctgacagttcttcgttttcaagaacctcccagatacagagacatttgttatttgcagccccgagatctacccagctgtggtgttatcccctttgttcaaagccttctttgtaacactggatcaaggtgtaggaacttcagctatgaagggtcaatggagcatcattttcgtttgtctaggttccaaactgcagctgaccccaagaaagtcaacaacctggcctttttaaaagagatacaagacctggcataggaaattcatggaatgatggacaaggcaaaaaacttaaaaagactttgggtagaacgatccaacactccagattcttcttatggttccagttttttttacaatggatctcaataagaccgaggaggtaatattgaaactggaaagcctccatcagcagcctcatatctgggattttctacttttactgccgagactacacacaagccatgatcatgtggaagatggcatggatgttgcagtgaaccttctccagaccattttgaattccttaatatccctagaagatttagattggcttccactcaaccaaactttttcccaggtttctgaacttgtactgaatgtgaccatttcgacactgacatttctgcagcaacatggagtagcagtcaccgagccagtttaccacctgtccatgcagaatatagtgtgggatccacagaaagtccagtatgatctcaaatcccagtttggctttgatgatcttcacacggaacagatcctgaactcttcagctgaactgaaggaggtacacatgcttgactgcttctcacaccgctgggcctttcctggagactggatctagagcatgctgctggggcaggattcccacagacacttccttggagaagatggtgtgttcagtcttgtctagcacatcagaggatgaagctgagaaatggggccacgttggaggctgccaccctaagtggtcagaagccaaaaactatcttgtccatgcagtcagctggctgcgagtctaccaacaggtgtttgttcagtggcaacagggtagcctgcttcagaagacactcacaggcatgggccatagtctggaggctctcaggaatcagtttgaagaagagagcaagccctggaaggtggtggaagctctgcacactgcactgctcctgctgaatgacagcttgtcagcagatggcccaaaagataatcatacatttccaaagatgttctttctggttcctgcccacgtccctgcagtacgggtggctgaggtgtgggagctcttcacccaggctctagcagatagcgtggattttggcaagattacagcatctgtggaaattgcaaagcttgctgcaaaacctgccccagtggccggcactgaagagatttcttcagcttgatggagctctcagaaatgcgatagctcagaatttacattttgtccaagaagtcctcatttgcctggagacatcagctaatgattttaaatggtttgaacttaaccaattgaaactggaaaaggatgtgttcttttgggagctgaaacagatgttggcgaagaatgctgtctgcccgaatggtcgtttctctgagaaggaggtctttttgccgcctggaaactccagcatatggggtggtctccagggactgttgtgctattgtaactcctctgagacgagtgttttaaacaagctacttggttcagtagaggatgctgatcgtattttgcaagaggtcattacttggcacaaaaatatgtcagttttaatacctgaagaatatttggactggcaggaacttgagatgcagctgtcagaagcaagcctttcctgtactcggctcttcctgctgctgggagctgatccctctcctgagaatgatgtcttttctagtgactgtaagcaccagcttgtctccacagtgatatttcatacacttgaaaaaacacaatttttcctggaacaagcatattattggaaagccttcaaaaagtttatcaggaagacttgcgaagtggcccaatatgtaaatatgcaagagagtttccagaacagactattggcttttcctgaggaatctccttgttttgaagaaaacatggattggaaaatgatcagtgataattattttcaatttttgaataacttactcaagtctccaacagcttccatatccagggctttaaatttcacaaagcaccttctaatgatggaaaagaagttgcacacccttgaggatgaacaaatgaactttcttttatcatttgtggaattttttgagaaattattgttgcctaatctttttgactcctccattgttcccagtttccacagcctcccatctctcacagaggatattctgaatataagttctctgtggacaaatcatttaaaaagtttaaagagagacccatctgccactgatgctcagaaactcttggaatttggcaacgaagtgatttggaaaatgcagactctcggaagtcactggataaggaaggaaccaaaaaatcttttgagattcatagaattaatactttttgaaattaatcccaaattactagaattatgggcctatggcatttcaaaaggaaaaagagctaaattggaaaacttctttacacttttaaatttttctgttccagaaaatgagattctgagtacaagttttaacttttcccagttgttccattcagattggcctaaatcaccagctatgaacatagattttgtacgtttaagtgaggctataataactagtctccatgaatttggatttttggagcaggaacagatctcagaagctctgaacacagtctacgctatcaggaatgcatctgatcttttctcagccctttctgaaccacaaaaacaagaagttgataaaattttgactcacatacacctaaatgtcttccaggacaaggattcagctttacttctgcaaatttattcttcattttaccgatatatttatgaattattgaatattcagagtagaggctcttcgttgactttccttacacaaatctcaaaacacattttggatatcataaaacaatttaatttccaaaacatcagtaaagcatttgcatttttatttaagacagcagaggttcttgggggaatttctaatgtatcttactgtcagcaattgctttcaatttttaactttttggagcttcaggcccaatccttcatgtctacagagggccaagaactggaagtgatccacactactttgacaggcctcaaacagctgctcataattgatgaagattttcgtatttctttatttcaatatatgagccaattcttcaacagttcagtagaagacctattggataataaatgcttgatttcggacaataaacacatttcttccgt

SEQ ID NO: 1917 - DNA, 3330 bp, Homo sapiens
ttagaccagcagcaacagcatcaccttggagcttgttagaaatgcagggtagcatgccccaccccagatcttctgaatcagaatttgcatcttaacaaaatccccagagattttgtatgtacattaccttgtcacttttaatgtgcatccatctgtgaaattagccgtagattatgaaaacagagtatgtgagaattgtaatccctctattgtaatctatggctaattcatgaaagtaaatgtgtgataatttaatttttatatattagagcagattcaaagttgagattcatgttttctatcacatctacatacttacatatatacctgtagattgtgtagggaagagggaatttacagctacagagctgtgtctccccagtgaatgtcatctattgtatgtccaatggaggaagtgttgagagcttctgcccaaaataaggataatactaaaggtattggcagattctacaaggctcaatttttaagtctcatgtccttcataaagtatttcccatattaccttaaggctacaatacagtcttcattttcagcatccacagtccatcttgtgtgtggcactcattcagtccaatgttttattttccccgtatccattgcttgtcacctaggacggattctaatttctccagtcaccacaacaccaaacagggccttgcatgggtcagagtgttcaaaataccatttattgacaaatgcatcaaaatcaacaacaaaccagaatatagtcccaaaagagaaatccaccaagtaccataactgaccaaataatgactcaaattaactggaaagaacaaggactggttcataggcaggactttagattttttttgctgtaagtgattttttctctctttttaaaaatgaggttacacaatattaattaataagcaaatcagagtatgctaagcatttaatatgtatgatcttgtttaaaccttttaacagcccaggaaaattggttttattattcctatgttatacatgagacagttaaaattccaagaggttaaataagctgagcaaggtcatatttcataaaatgcaagcattctaaaccctatgtggagaaagaatcttatctatcccaaagtgaattgtctactttgtgtagatctatggcatcagtttaacttatgttgccttcttagccctgtgtaacaggttctattgctagttggtatttgttcacaagataaaaattaattttaatattattttgaagcaaatataattatttaggaaaatctacccaaaatataggcatgcaccaaactccagcacccaataaaaagcagcagtaattgatttccattgtgaatggcctgtattcttctacattggcatggactatccagtttacttctgtttacatctggagtattttcaactttgacctagaaatacactgatcaccatttcactcctcatctttagatttcagttgccaatggcaaccttgaattacaaagttgaacaaaagctgcattttacttgagtggtttgtaattttgaacttgagttcatgttttctaggagttgtttgtctacaggtgtcagtcctgcccttggttgccaaggaacccgaacattctgaatttgctatgcctctgctgggactcagtgggctttatcagtttctgaacagtttttgctttaatttattgggactgggtactcaattcacaggggtaatatgaatttggaaactgcactcattcatgggtttctaattccctttgtggatgtttttcctcaatgtgctccatgaatcatttgcttccttgcctcatctccaaggttgtggattgggttttcctagttcccatttgaagggtgggcacccctggctctattcagggacttcaggttcagcactccaacacccggcatcctgaggcctcctcttccaatctctcctcgccccgcaaaatggagaatcaattctgttaactgtgagttcctttgttatttctgcgacttaaggatttcttttccttatattcaaactcagctgtaaacttaagtgaatatgtatgtactgtttcattttgcctttccctatgtttggaatagaaaaggaaattttcagtcagccatattgactcaaagtcccatggcaatttattctaaggaaacttagtggaaaacaaataaacaaacaaaaactgaaatggttaggatatagcatgtggtcactttccaacaatccttgggtaacatgactaacctcagtctataaatttcttatgatcctgttatttttattcttgaagcaaaattcatgagattattctaaaaataagatgaggccttgcacgtttgctcaggcttaattttgaaaccattcattctatgaatgtatgattttaatgcatttcccattgcttttaatatccacttagctaactgatgatgttgaggttaaaatactatagtccttgcagtaattctcgtaaaattgtcctagtcactgtatcccacattcagagttctacatttttcttttttgtattttatagaaattatattagattttgttttcattttagaatgctatttttatgctaaaaatgaaataatcacattaccataaaagtgagaaatagaaaaaataaagatactcataattctaacacagtttatattttagtgtttcttttcaaagtcgttttgtattctttaaaaaaatggtcatagttattatcacagtatgtatacaactataggtacattttttcacttatcacaaaaatataattatttctccctgttttcaaagccattggtttatattatttgactacctcatagttctttaagtgagagccttatgatttttttacagaaacacttacgttttattcatgtttttgctgtttcttggcttttttgttagttttactattttccctgatctttagcagtaaattccaaaatattctgagcaagataattagagtaccatattattattgctgcctctcaaaggctaggagatatatttttaaagtgttaaaagactataaggaattaaattttaaatatatgcagcatgtattttacatctcagaattgctaagcgattaaatttcaaatgttctcaccacaaaaaatggtaagtatttgaggtgataaatatgttaattggctttatttaattactccatgttgtatttataaatcatggcatcattctgtactacataaatacatacaattttaaattgtcaattttatttatatatatgtgtatgtacacacacacacacacacacacacacacacgcacaacagatgctcccagag

SEQ ID NO: 1918 - DNA, 3164 bp, Homo sapiens
agactgccagcagcactccccacagctgggacaccaagcccttcctcaatgggtgatctgggtggcatatctccatatacatcagtcataggctcagaaagcttgaatgattttcccaacccaaagtcatacagctcgccagggaccaacaccaagactgccatactccagatccacagtgacttcagataagaagcagatggccgatgtgcagtgtgctgcccgtggcagtcacaggtgaggccagggggtatttctgttttctgaagctcagctgtgaagattctcttgtgcttcccacacaggtgtcaaaaggctggaaagcagttggcacgggcggcccaccttggagaaggaacgagagaagaactcagcacccccgcatcgcagggctcagaaggtcatgatccgctccagcagtgacagcagctacatgtctgggtccccagggggaagtcctgggagtggcagtgctgagaagccgtcctctgacgtggacatcagcacacacagccccagcttgcctctggcacgggagccagtggtgctttctatagcatcctccaggctgccccaggagagcccacccctcccagagagccgggacagccacccgccgctgagactgaagaaatcctttgagattttggtgagaaagcctatgtcctccaagcccaagcctccacccagaaaatactttaaaagtgacagtgaccctcagaagagtctggaagagagagagaactcctcatgctcttctgggcacaccccacccacctgtggccaggaagcgagagagctgctgccactgctgctgccacaggaagacacagcagggagaagccctagtgcctctgccggctgcccaggacctggtatcggcccacagaccaagtcctccacagagggcgagccagggtggagaagagccagcccagtgacccaaacatccccgataaaacacccactgcttaagaggcaggctcggatggactatagctttgataccacagccgaagacccttgggttaggatttctgactgcatcaaaaacttatttagccccatcatgagtgagaaccatggccacatgcctctacagcccaatgccagcctgaatgaagaagaagggacacagggccacccagatgggaccccaccaaagctggacaccgccaatggcactcccaaagtttacaagtcagcagacagcagcactgtgaagaaaggtcctcctgtggctcccaagccagcctggtttcgccaaagcttgaaaggtttgaggaatcgtgcttcagacccaagagggctccctgatcctgccttgtccacccagccagcacctgcttccagggagcacctaggatcacacatccgggcctcctcctcctcctccatcaggcagagaatcagctcctttgaaacctttggctcccctcaactgcctgacaaaggagcccagagactgagcctccagccctcctctggggaggcagcaaaacctcttgggaagcatgaggaaggacggttttctggactcttggggcgaggggctgcacccactcttgtgccccagcagcctgagcaagtactgtcctcggggtcccctgcagcctccgaggccagagacccaggtgtgtctgagtcccctcccccagggcggcagcccaatcagaaaactctcccccctggcccggacccgctcctaaggctgctgtcaacacaggctgaggaatctcaaggcccagtgctcaagatgcctagccagcgagcacggagcttccccctgaccaggtcccagtcctgtgagacgaagctacttgacgaaaagaccagcaaactctattctatcagcagccaagtgtcatcggctgtcatgaaatccttgctgtgccttccatcttctatctcctgtgcccagactccctgcatccccaaggaaggggcatctccaacatcatcatccaacgaagactcagctgcaaatggttctgctgaaacatctgccttggacacagggttctcgctcaacctttcagagctgagagaatatacagagggtctcacggaagccaaggaagacgatgatggggaccacagttcccttcagtctggtcagtccgttatctccctgctgagctcagaagaattaaaaaaactcatcgaggaggtgaaggttctggatgaagcaacattaaagcaattagacggcatccatgtcaccatcttacacaaggaggaaggtgctggtcttgggttcagcttggcaggaggagcagatctagaaaacaaggtgattacggttcacagagtgtttccaaatgggctggcctcccaggaaggggctattcagaagggcaatgaggttctttccatcaacggcaagtctctcaaggggaccacgcaccatgatgccttggccatcctccgccaagctcgagagcccaggcaagctgtgattgtcacaaggaagctgactccagaggccatgcccgacctcaactcctccactgactctgcagcctcagcctctgcagccagtgatgtttctgtagaatctacagaggccacagtctgcacggtgacactggagaagatgtcggcagggctgggcttcagcctggaaggagggaagggctccctacacggagacaagcctctcaccattaacaggattttcaaaggagcagcctcagaacaaagtgagacagtccagcctggagatgaaatcttgcagctgggtggcactgccatgcagggcctcacacggtttgaagcctggaacatcatcaaggcactgcctgatggacctgtcacgattgtcatcaggagaaaaagcctccagtccaaggaaaccacagctgctggagactcctaggcaggacatgctgaagccaaagccaataacacacagctaacacacagctcccataaccgctgattctcagggtctctgctgccgccccacccagatgggggaaagcacaggtgggcttcccagtggctgctgcccaggcccagaccttctaggacgccacccagcaaaaggttgttcctaaaataagggcagagtcacacgggggcagctgatacaaattgcagactgtgtaaaaagagagcttaatgataatattgtggtgccacaaataaaatggatttattag

SEQ ID NO: 1919 - DNA, 3892 bp, Homo sapiens
aaataaataatgactggaggagcatgtaggggggtggtgcccagagattgagagaagcatcttggtttagtgaaaacctgtgaaagtcaggaaacctgtttctgcccagctccatcccagttgtggtgtttagtccgtgtcttcatctctgtgacctttcattttcacactggcacacgcctcccaacatccactgttgggcagttgtaaggctcaaatgagccccaaggcctttgaaaagttaaaagtattaaagtgttagatgaacataagaagaaatgattatcctgccttcaaagcgagcctccctgtctgatgcactcactgggccaccttctctgagcacttctgaaaggggcctcatttattcattcatttattccatgctgcacaagtttgttaagcacccacttgtgccaggcatttgctgtacactaaggattcatcagtgaagaggtagacacagcccctgctcttttcaatctcatattcagaggggagacagataataaacaagtaatgagagtgtttgttaataactgtggtgtgatagggtcaggagtgggtagtccaggagggtaccagggaagtggccagggagatggcatttgatggtgacctgagaatgagaagccagccttgggaagagctgttgcaagagcttcaagcagaggacatagcaaactaagtgactccgaggcagggaagatttcagcatgtttgaggaggccagtgaggcagaccccagaaagcacgagggagaatgataggagatgagatgggtagggttagcccatccaggggctgcaagctcaagtaaggagtttgaattttcagtataatggaagccattggagggatttgaacagaggagaggcatgacctgatctatatctggggatgtcagtctggctagtggtgtgtctgtggccatggagtctgggggcaagatagaagggagcaagagtggatgcagggaaaccagagaggagccaggtgtcattgtccaggtgagggaccattggtggcctagattagggtgatggccatggaagaccaagaggtggacacattggagatacactagaggcagaagcaaccaaattaccaatgggttggatttatgtgaagcaaggggaagacgaacattgattcctgggtttgaggctagaacaactggccccgttttctgtgataagagacattggtgggatgaaaagcaaaagtgctgctttgtacctgtttgtttgtacctgctaggttttgctatctattggacccctaggtggaaatgtcacatatacaactgggtgttcaggagagggaccagctggagatagaaatgtgggcagtgttggcctgtgtgggaagcggggctgggtgagatcagcctcctggagagtgcagatggagaagatccagtgatcttcaccacggggaggctggagaggagagagggtggcagaggacactgaaccgggagacaggaggcaggattaaaccaagactgcgtggcaggtgatgtcttgggagccaagagagaaaagggtttcaaggagggaagagtccactgtgtgagatactgctgggtgcgtacgaggcggacagcgaagtgtcccttggatttggtaacgtggaggttgttggcaactttgacaagaggactcccagcaaagtgggttgaagatgggaggtgagaaagagatagtgatggtggacaaatggtctttttgagaagtttcactgagaatgggatggggacgtgctgaaaccgtgggttcaggggagagtttttaaagatgagagagcatgcctgagtgcttgtgggaggcgtggcagatgcctgggagcaaagtcctcgagaagaggcctccttgaggacaggagtcatttgcaattggaatgatgatggagaatgggggtgcagaagcttctgggtttgtgacttggcagtggtgggtgaaggcgttcctggaagggttattagatccagagaagggaggagagctgtgtgggtgagaactgggaaaggaagatttacagacagagaatctgaggactgagagagttggctcatggagcaggaaagcgagtgtaccagggagacggtgagacccacggcccaggcctcttggccttctgcctggctcctgctcggctgtgcagatggctgtgttctcagaggctacatctcatgcctgcgttgtcttcctctccccaggacctttattgggcttgaggtcacttcagggcatgcccagttcctggacctggtttcagaggtggacagagtcatggaggaattcaacctcaccactttctaccaggatccttctttccacctcagcctggcctggtgtgtgggtgatgcacgtctccagctggaggggcagtgcctgcaggaactacaggcaatcgtggatgggtttgaagatgctgaggtgctgctgcgcgtgcacactgagcaagtccgctgcaagtctgggaacaagttcttctcgatgcctttgaagtgagcaccagaggccttcctcctccagggccctctgcagaccaggctgagatggaggaacctgctaaaatcgatggagatgcttctagcctcccagtaggaggccccagccatgccttcaacctggcaggaggtgtagccactcctcatcctccctgagtgctgatattctctctctctctttctcttcctcttctttctctctcttctcctctctttctctcctctgtctctcttcctctcctctcttcctctcttctctcttcctctcctctctctcttcctcttctctctcttcccctcctgtctctcctcccctcctctctctcttcctctcctctctcttcctctcctctctctacccctcctgtctctcctcccctcctctctcttcctctcctctctctcttcctctcctctctcttcccttcctgtctctcttcccctcctctctctcttcctgtcctctatctcttcccctcctctatctcttcctctcctctctctcttcctctcctctctctctcttcctttcttctctctctcctgtctcggctgttgtgggttgcaggttgggtgctgctgttgtggtccttcccagaaactgccagtagagggcagcctgggcatcctaatgcttactctggttgttacacaaagaaaatattggggtcactggcgagcccacccacactcaccagaatctccactgtagtccccctaacaaacagcccttcacttcctcttccacttcagcaatttgtattttgatgccattggcctcagatcagagtgttttaaatcatcacgccctggcttatccctggtcgagccaggacacggggtgcttcagtgggtctgtcaccctctctccttgaagcatgttgcttttatttatttacttttactctcaccctgctcctgtaccagcaggggccacttcaaagccaaggtacagggtgataacttgtggtccagcatcagttttctccacttctttctcccactcacccccagcaaggtgcctggggagacttgagcagatgtttcattttggcctggccagtggctgaaagccaggcctccaatgcactgtgacctctggcttccccagcagctttcccagagaggcagaggggccttccacagcccgggttctcctgctgcctcctgcctgctgcagctgcaggcattctgaggggcaacgtggaggaagggccagggatgcatgggattttaattgtttcatcacaccttccccgtggcaaagaaacagtcagtcctcttcaggtgtcttctggatttctggtgatggacagagaaatctttttacagtttcaaattatgttcaacaaataaaaattgcattttttattttgg

SEQ ID NO: 1920 - DNA, 3465 bp, Homo sapiens
ccggtgcctggggacaacggattcaggcctcccaggcaggaatggaagcccccatgggccgtggccattccccgctggcagagctgtggaggcccccttggctccgtgtgggattagaagtgcctcggcattgcaggcggagctgagttaatgggacatgatttgcacttttctgaagtcaattacaagctcccagaggaaagggcaatgctcaggtggctctgcccttggctctccccttggctgtggtctcgggcggctctaaccttggctctggtctcaggtggctctgcccttggctctgtctcgggcggctccagccttggctctggtttcaggccattctctttgggttccccgatgtgggagcctgggcaagacccgcagtgtgtcgggtgccagcagctgtggggagcccatgagggaacagagctccgtatctccacttgccggctttctgctctttttgttgttgctgtgaggagttccagttagttccaagcatctgccaaaagccgttggcttggttaggttaccaaaaacagtaggattccagccccagcaactggggttcaccctcctcccgtctggccctgcaggctttcaacaccttcattgatgacgtctttgccttcatcatcaccatgcccacgtctcaccggctggcctgcttccgggacgacgtggtgtttctggtctacctgtaccagcggtggtgagtgcagctgcgtatgctcggccgttgctccgtctcagcggcgtggctgctgctgaacggaatgacggctttcaccgcaccctgcgcctgtttatccatttgagggaaaagataatttgcaggtggtggtttttcctgtcttgcctaaacttgggttccagttgcccatgatatgtcctggcaagaaactgttccagctctgtctcctcactgtgctttagaaatgctcgtttctatgtgaattattgatgagccactgaaagcaaatgtctctccttaagcgatttatttacctattcacagtcattgctattgagcagaacagagaccgtagcatggctaatccatacttggcgctagcctcgaagtgtccagccagcagtgtggacctgcagggcacaatgtcactggggagctcactcacctcagcattggccgcaccccttaaaccagccaccagggcctctgaagactgcattgtgtggacctctcagcttggccttcaggttgaaggctgacggctgaggaaaaggctttgtggaattttctaaaggcagaggttcaggccccaccccgggcctcggaattttctaaatgcagaggctcaggccccaccctgggcctcccgcttccctccagggctgacatctgccctctcagtcagcaaaacctccctccagctctgctgtgccagggtaggagccagggatctggggctcccctcgggagggttgcatctggaccactgcaagcactgccctcacctccagtgccggccccagggccttgtccaggggtcgaaggagtgtgtgtcacccccaagacctgctgccaagtgtctcagagcctcctggctgtgtcctttctctggccctcaaggtcccttttcccatctccctcccccgaccaggaggccacctcacacaccacggctgtgacacttccctgtgcccttccctcagggcctggggccatcctactagtgcaggagagggatcctcttcccccaggccgtcctggcgggtcctgcctaggtccggggtgccggcccttggggagcgcagtgctcccgtccccgccctgtctccacactcaacctcgccaggtgttcagagcctctgtcccagccagcatgaggctggcatggttctgcctggtttaactctttgttcgggtgcagttggcacatccacacagtggctcatggccgcccttgcccagctctccaggcctggccgccggctgcccccccccccaccctgttgctgtctcgtgcagcccctgcacgggagctccagcttgtgtcagcgggaagggctatttcaccataagcaacactcacactcacacggggcttggttcctgtcccccgttcaccattctcagatcccccagctggccgcctgccccctgcagagcctgaggttgtccaagccacggagccccggacgctgctgcgcctggtgtggttgtctcaactgtgagcccttcaagtggctcccaagtcctcgcaggtggcccggggcgtgcctgaaactgtgctgtactcaggctctgtgttaatggctccagacctgcaaacggtgtttggccaggatcacagggcccttggtgggcagcaggtctgtttttaagctgaaaccctgtacttctgttcgcggccgtgtagagctgccccttatgccacagcttcctcatccatacgtaggggtgatgttggcaaggcctccggggcgctcaggatcaaaggcggcggcagtgtcctgccaagtgttcacagctgatgagacgtggtccctgaacacagcggttcctgttctgatcactcgagtctccgtgatgccaccgttcccagaaggcagcccgtgcagcctccgggtccccccttcagccatggcagcccgtgcagcctccgggtcgtcccttcggccaagcttccctttccttgagagcagcacgctggcctggccatgcagaacaaaacacaactcagaaatccctcctcagccctcggcagtaaaacttctgaggattcgactttttagttaatttgctcactgtggcagctcactggaaaataaatcgaggatgccaagtcctcctcttagaaaaatagcccctgcagtggggtttgctgatgtgctcatttgtgtcattgcaggctttatcctgtggataaacgcagagtgaacgagtttggggagtcctacgaggagaaggccacgcgggcgccccacacggactgaaggccgcccgggctgccgccagccaagtgcaacttgaattgtcaatgagtatttttggaagcatttggaggaattcctagacattgcgttttctgtgttgccaaaatcccttcggacatttctcagacatctcccaagttcccatcacgtcagatttggagctggtagcgcttacgatgcccccacgtgtgaacatctgtcttggtcacagagctgggtgctgccggtcaccttgagctgtggtggctcccggcacacgagtgtccggggttcggccatgtcctcacgcgggcaggggtgggagccctcacaggcaagggggctgttggatttccatttcaggtggttttctaagtgctccttatgtgaatttcaaacacgtatggaattcattccgcatggactctgggatcaaaggctctttcctcttttgtttgagagttggttgttttaaagcttaatgtatgtttctattttaaaataaatttttctggctgtggc

SEQ ID NO: 1921 - DNA, 3751 bp, Homo sapiens
cccaagctgtctgctctaggatgtcggccaggcattgaggctcagtcctaaggggcagcagccagagcaccttgtccccaggttgtgctgatgcccctgcaggatcaggggcactcactggctgcagtgttgggtggggatgcccagggttgccctcacgtggcgcttctgaaccaatgcttgcataagagttaggttccctcttctgtcccttttagccctgggatccccactcagccctgggatccccctcagccccgggatcccctcctcagccccgggatcccctcctcagccctgggatccccctcagctctgggattccctcctcagccctgggatgcccactcagccctgggatccccctcagccctaggatgtccctcagttctagtatctccttcacctctgggggtctacctccaaagtgtatcaggccaggtgcttggctcacacctgtaatcccagcactttgggaagcaaggcaggaggatcacttgaggtcaggagttcaagaccagcctgggcaacatagggagacccccatttctacaaaaaaattttttaaaaacttggtggggtgcaggcctgtggtcccaactactcgggagactgaggcaggaggattgcttgagctagggagattgagggctgcagtgagccatgatccagccactgcactccagcctgggcgacagagcaagaacctgtctcaaaggaaaaagaaagcccagccccggcttagtcatccgatgccatacgtgggctcgcagtgttgaggaggagtttggctcccctgtgcctctgcagctagagggcagctaaattatcagtcagatcacgcccccatcagagcctcccggggtccctgcacctccagagaaatcccacccactcacccccacagcccacagggctcacgggccccagcctgccaacctacccactgccaggccagcccctcagcaccactctgaccatacaaaggccttctggacgcccaggcccctgtcacctactgcaggacagggtggcacaggcagggctggctgagggtgtggaaatcttgcccccggcccttctcaccagaggctgctcttgctggtcagtcaccaggctcagcctggaggccacagtcccgacgggggtgtagagaaattcccatgcactgcagtgtgtcttggggacctttctcctgtgaagatgcagaatggtgctgactggctctttcccccgcagctctacagtctgctggagaggatcaacccggaccacagcttccctgtcagctcgcactgcctccgagcagccgccttctatgtgcgtgggctcttctccttcttccagggacgctacaacgaggccaagcgatttctgcgggaaactctgaagatgtccaatgctgaggacctgaaccggctcacagcctgctccctcgtgcttctgggccacatcttctatgtgctgggaaaccacagggagagtaacaacatggtggtgcctgccatgcagctcgccagcaagatcccggacatgtcggtacagctgtggtcgtcagcactgctgagagacctgaataaagcctgtgggaacgccatggatgcccatgaagccgcccagatgcaccagaacttctcgcagcagctgctccaggaccacattgaggcctgcagcctccccgaacacaacctcatcacgtggacagacggtccaccccccgtgcagttccaagctcagaatggacccaacaccagcctggccagcctcctgtgaggccttgatggggccatccagctccgcagggcctgcgcgtctccggcttccacccagacggcactcaagcctgcccccgaggcgtgcttccttcctgattgtctctagagcttccaagtcctgggaatgtgcggggccagtccctgccctcccaggaggggtggtagccgttcccacctcgcagcaggacccccagtgcagaggctcacaggtggcacacaggcgctgtctctccagagccatccttcagagtggacctcagtgccagtcctgcctcagcatctgggtcacgtcggccaggagtagggtgcaggcctccagcaggtcctaatcctgtgtgccagggcaggcagtgccccaggggcaccacgcctgactctccatcacccaggccttgatgccgagcgggagtagagtgtttcctctgctcaaggcaatttccagagcccggatgccagtttctggcctgaatttggagggaagaagtaatggccctagtgtgggacgaagcacagatcccagcacttttcccagctttctctccagcatcagtccctgcagcagctggggcctctggtcaggaaccctcagggacccaggaactcagcttccaaacatctgcaccttgaccggactcgccatcccgccgtgggggtgcaggtgattgtaaacacgggtgtgcatgtggatgcacacgggtgtgcggtgaagatctgtggagatggagctgggagctgaggctcctgttgcaccagccaccttcccccatcttgtggctgctgaggggcaggaagcgggggagtgggctcgtctcctaaatttaagatcacctcctcagctagcttagagtgcgtggcacgggccccccgcccccgagatctggagcccagggactttcttcctggcagatctgtggccttccctgctcagcctcttggtccccccactccctccaccgcctcaccttccctgctgggtctctggggcacagtgtgaaacccgcaccctagccaggccccagggagcctccgctgggcccagacagcagcgtttggttttatccacttttcttggataatcaggaggtgccccagtggtcacagtgtggcattccgagttggggcgggtggtcgggtcaagatagcagcagcaggtgtcagggctcaagacaccaccccctccagcttctggggcccaggagcctctccctgctacagggggtgggggtcctgctcagcagggtaggtggtggttttgggtcttgtcaccctcactcagtggaactgcctctgggagctttggcgtctgtgactaaagggacgctggattgctcaggtcagctgctcggggctcccaggctgggtgtgccttagccacaggcagggctgtcaataacccccttcctcactggccaccacctgacatcagcaccagtgacaggctggtcagagggcggggctggtgagggtttgtcctaagaggaccaccgccatctctgggtctccagggggagagcctggccctgtcctttgctacccagggctgcccccaggcccatgaagccaataggagagcgtgtggcactggcccacaaactgtccctgtcctgtcttcctcccgagccatggcctctgctagctccaccttgaaggagccccccacatcctcccctacatcccagagatgccaccacttgtgtctccacaatgtgctcctgcccacccgggttccgcactgtccgacccctgcacaccactcatgtcaccacggcgtgcatcatgttcatccccatctatttatttaagcctttctttgcttgtagggcattttgtatgtagagcagttgaaaacagaacctcagaacttaacatctgtcctgatgttaaagtgcttttcatgaccaccctgttatctatgtatatgtaaagttaaggatgagatcttaagtttacaattaaaaactcagtactcaatattt

SEQ ID NO: 1922 - DNA, 3176 bp, Homo sapiens
gcttccgcccagtccagcccgggccggctgaccgggtccgacacagtctcctggaccaggctccctccatcctcacccctcccccagcttcccgccgccactcaccgaaccggaaccggctgccatgcgaaggggtttccggccgggcgcggaacgcaaaacccgggaaccgccgcgaaccggaaccgccttcacagcaccggaagagtcgctaggaggcagtcatgcttaaagacgagtttcatctgaaatttttcatgtgtgtgattcagtctcgccagttagtcaggactcctcagagaacagctggggaagcttctacttccagcatgctcataccaaagccaccaccaaagacagacatcttgaagagtctagatactatggatgatccagacaccgtgggaagcatacctgttttcaaaactgagtggatcatgacccatgaagagcaccatgcagccaaaaccctggggattggcaaagccattgctgtcttaacctctggtggagatgcccaaggtatgaatgctgctgtcagggctgtggttcgagttggtatcttcaccggtgcccgtgtcttctttgtccatgagggttatcaaggcctggtggatggtggagatcacatcaaggaagccacctgggagagcgtttcgatgatgcttcagctgggaggcacggtgattggaagtgcccggtgcaaggactttcgggaacgagaaggacgactccgagctgcctacaacctggtgaagcgtgggatcaccaatctctgtgtcattgggggtgatggcagcctcactggggctgacaccttccgttctgagtggagtgacttgttgagtgacctccagaaagcaggtaagatcacagatgaggaggctacgaagtccagctacctgaacattgtgggcctggttgggtcaattgacaatgacttctgtggcaccgatatgaccattggcactgactctgccctgcatcggatcatggaaattgtagatgccatcactaccactgcccagagccaccagaggacatttgtgttagaagtaatgggccgccactgtggatacctggcccttgtcacctctctgtcctgtggggccgactgggtttttattcctgaatgtccaccagatgacgactgggaggaacacctttgtcgccgactcagcgagacaaggacccgtggttctcgtctcaacatcatcattgtggctgagggtgcaattgacaagaatggaaaaccaatcacctcagaagacatcaagaatctggtggttaagcgtctgggatatgacacccgggttactgtcttggggcatgtgcagaggggtgggacgccatcagcctttgacagaattctgggcagcaggatgggtgtggaagcagtgatggcacttttggaggggaccccagataccccagcctgtgtagtgagcctctctggtaaccaggctgtgcgcctgcccctcatggaatgtgtccaggtgaccaaagatgtgaccaaggccatggatgagaagaaatttgacgaagccctgaagctgagaggccggagcttcatgaacaactgggaggtgtacaagcttctagctcatgtcagacccccggtatctaagagtggttcgcacacagtggctgtgatgaacgtgggggctccggctgcaggcatgaatgctgctgttcgctccactgtgaggattggccttatccagggcaaccgagtgctcgttgtccatgatggtttcgagggcctggccaaggggcagatagaggaagctggctggagctatgttgggggctggactggccaaggtggctctaaacttgggactaaaaggactctacccaagaagagctttgaacagatcagtgccaatataactaagtttaacattcagggccttgtcatcattgggggctttgaggcttacacagggggcctggaactgatggagggcaggaagcagtttgatgagctctgcatcccatttgtggtcattcctgctacagtctccaacaatgtccctggctcagacttcagcgttggggctgacacagcactcaatactatctgcacaacctgtgaccgcatcaagcagtcagcagctggcaccaagcgtcgggtgtttatcattgagactatgggtggctactgtggctacctggctaccatggctggactggcagctggggccgatgctgcctacatttttgaggagcccttcaccattcgagacctgcaggcaaatgttgaacatctggtgcaaaagatgaaaacaactgtgaaaaggggcttggtgttaaggaatgaaaagtgcaatgagaactataccactgacttcattttcaacctgtactctgaggaggggaagggcatcttcgacagcaggaagaatgtgcttggtcacatgcagcagggtgggagcccaacctcatttgataggaattttgccactaagatgggcgccaaggctatgaactggatgtctgggaaaatcaaagagagttaccgtaatgggcggatctttgccaatactccagattcgggctgtgttctggggatgcgtaagagggctctggtcttccaaccagtggctgagctgaaggaccagacagattttgagcatcgaatccccaaggaacagtggtggctgaaactgaggcccatcctcaaaatcctagccaagtacgagattgacttggacacttcagaccatgcccacctggagcacatcacccggaagcggtccggggaagctgccgtctaaacctctctggagtgaggggaatagattacctgatcatggtcagctcacaccctaataagtccacatcttctcagtgttttagctgtttttttcattaggtttccttttattctgtaccttgcagccatgaccagttctggccaggagctggaggagcaggcagtgggtgggagctccttttaggtagaatttaacatgacttctgccccagctttatctgtcacacaaggctgggcacctctagtgctactgctagatatcacttactcagttagaattttcctaaaaataagctttatttatttctttgtgataacaaagagtcttggttcctctactacttttactacagtgacaaattgtaactacactaataaatgccaactggtcactgtg

SEQ ID NO: 1923 - DNA, 3294 bp, Homo sapiens
agtaatacacggccgtgtcctcagatctcaggctgctcagctccatgtaggctgtgtctgtagatgtgtcctcggtcatggtgactctgccctggaacttctgtgcgtagattgtttcaccatcttcaggatcaaaacctcccatccactcaagcccttttccaggagcctgtcgcacccagtgcatggataattcagtgagggtgtatccggaaaccttgcaggagaccttcactgaggccccaggcttcttcacctcagccccagactgtaccagctggacctgggcgtgggtgcctgtggagaggacagaggagtggatgagacaccacttaactggacccagtcccctcatcagccctggaactcaggattctcttgcctgtagctgctgccaccaagaagaggatcctccaggtgcagtccatggtgaggtgctgcgctctgggggcttctgtaggggagggatgtggctgttgtgtgatggtctctgggcaaggaaagatctgtatttacctcggtagacagcagtgcatttgcatattcatgaggcaggtttttcatagctcaggccacgccaccctgaggaagaagataggtgacatgtggaccacgccacagtgggatgctgagctccctgccctgaactttgtttaatatttgtcctctgacatgcccagaagtccatgaagacagaactcctctcacagaaacccagaatctcacaggacatggtcctcaatgtgattccctgttcatatggctcactgtctacctgaacttttcctgagccttgccctctgcacatctaacttctgggatgagtgtgtctccggacagtaacacccattgaattaataaaaccacccctcaattcctaactagaaatacatttgaaagacctagacatttctccttttaaatccggtttgcattaaattattgggttaggtataggctgcgtatacaataaaatacttacaggcacatcagtacttgctaaattcttatttaaatgttaggtcattattgctttgaaataaggaacattcaattcctgagagaaaaccctgccccagcctcctgtgcacctgccccagggctgggtcctgtgctgggtgctccctgagcgccccctgccgctcagctcctgccctgcagggaagttcctgtctgggaactttttcctcctgtcagagaactttttcctcccagaatgctctttcagtgacagaaattgtttcccccaccacctcttacaatagaaaataggccttagaaaacccaacataatctacagggagacctcagcacggcaagcaaggaatcataaaagccatcagggagcccctgccctggagctccggatccactgatacggtccagacacatggcgagtccaggaactgatgggactttggggaaggctcttttttttaggattctgtggttgaagattttatcgattataactttacccacagaccctatgtctcaaagctcaccaccacacacactcacagtggcatatttgcatagtaactggcctcgaatttgccctccttcttagtgtcttgccagtgaaaagtgcttccaacactgatcctagtcctggttatgtttgttgtggttttgctttttccaaacagctaaagcgagctaggtactaatggagatttggaaagtgccttcatgttctctttgccagttctcacctgcgcaccctgcagatgccccatgagaggtaaatctaatttcagtgagggagaggatgtgaccttgttcctgaagctgttggtctaagaggttttaagtcactttactgtccttgactttttctctcccactgcctttggtttccctaaattctagtccttagatggagtctgtgcctttccacacttttctctttaatccagattaatcatattggtggtgaggtgatgtggtgggtaggggagcagtatatgttctggaaattgaattccaatgatttcttgctattctttctctaggctgtaccatttacaaggagtattcagtggtacagctgattttcctccgtcctccactccccctcctggctgcagcatccacagattattttcttgaatctgaccccagatgttttattaattatactccttttcatgactcaggaaggctaagatgaagctgtctgggatggaaaagaatcccttcccctcacagaataaagatcttgaaaagtattttttccctatagggtctgtctggaggaagttctgggcatacttatcagagtatagttctcctgatgacagagccatgagggaatctgtttggattctcatcttgagaacccagaagtttctggagggaaattccatcagagtggggtgtgcagcccccaggacttcttaccctaccctatccacacttgtcttccaggcatttatggaattgccatataactcttcccaacagcttgtgctttcaacggaagaatcacccagtttataaatttagaaaggagactttatttctcagaaagggttgaagctgcaggatggccatcttaacaggctgggaaggaaagcctcccacagagactgtgagcaggcactttaagagagggaaagatgagaaacaaatttgtgcaaatggattggtcgagtgtacacactcagcaggctatagaaggagctatggatattcacatggagtggaggctctcatgtctaataagcaaacacacatgatacatgcatttcagctttgctttggggtgaggacttaagaactaaatgaattacagttgggtcctgcatatcaaaagggctttgtgcaggggcagaaagacacacagtgcacagcctctggaaattggccaggacaagtccatggtcagtggtctcttcacaggagaaagttactgaaatcagtctcttggccaatcaaagctctctttatggctgtggatcattcttgccaacatttcttatcttttgtcttgctgataatagccattttaagtggtgtgaggtgatatgtcattgtgcttttgattcgaattcctctgacaattagtcatcttgaggacatttttatgctctgtttttcatgcatgtgtcttctgaaaaaaatctattcaggtttttgctctttttatgaggtcatttgatatttgctattgagttgtatggattatttatacattttgatagaacttcttgtcagatatataattgcatgtagttttttgctgggcttgcttttgggattaacttcaaataaatcatttctgaatcaatg

SEQ ID NO: 1924 - DNA, 2452 bp, Homo sapiens
taagtaactctaataaaaaagatcaccagaacacaacagaagtagttgtgttgaaagcttcatttaatttgaacattttaaaattggaatatccttaaaatacagtcaaaaatgaaatggctttttgttgctgtatcttaatatttttaaattcctttttcaaaatttcttagggaaatttagaaacatgtatatgaagtaatttcacttggcagattataaacctcagctaatcttagccagcttttcagcaagagtctggtttatagatgaccataactgaaaaatgttcacttacctatagcaatttgagtttacaacagcagctaagttggtatttacctgggactgatggaaaaattagacttttattttgtagaccaacaattcagaaactgtggtttgttgcttttttcctgtctctcctcttcgttgaacttttatgaaacttcctttcctcaccatgaccagaccattgttgacttttctctctgctgaggcagaaaaatgcttccatagtccatgcagcaatgtttaaaacaagggattcgttcccccctccccttttgtgtaggctggttaataaactctatgtttcatagcattgtcgtgaatattcagagtgctccctgcgaatggttttcctactatctctgttgtgtatcatttctctttatttgattcgtggttctgagtggaccctaccaccgacttcaccaagaccttcatgtaccccacaaccctttcatcttggtcatatctgtttttgtacaacaccctaaaactacatggagtcttttaaacttggtctgttttttcaatccttttcttaacatcgtttaaaatttttttcccagtgccactgctctaaaatctaacaaacaatcatttctttccaaagattaaatccgtttttctgtgctataatttcatgtgaaagaagaactaggttgctttgctcatatgtacagttcttaaaataagttgtaggtaattaatataaaagttgtaggtaattaatgataaaaattggtttcttgtggcttgctgtattcagtccaccacagtatgaacttcgcatgctaaatatagaaagataataagtatctcatgtaatgacaactaactttatattggtctttatataaacttaaatatataaactttatatatttagtctgcatactttggattagtgtgcatatttacttattgtatcataatttccaaaacagaaacaattgatatcttaattagtattctattttattggagtttgcactaggctttttatttcattgtgttacatttaattgaactaaaccgataaatttattgacattaatctgtaattcatcatacatttttcgtgcctgatataattttagtcattccatgtgtttttgtttgatgtattctaattcattccagtcagtccaaatgtactgtcttccataggttatccttcccttcaagtggaactggaaacccccacagggttgcactacacaccacctacccctttccagcaagatgattattttagtgatatctctagcatagaatctccccttagaacccctagtagactgagtgatgggctagtgccttcccaggggaacatagagcattccgcagatggacctccagtcgtaactgcagaagacgcttccttagaagacagcaaactggaagactcagtgcctttaacagaaatgcctgaagcagtggatgtagatgagagccagttggagaatgtatgtctgagttggcagaatgagacatcaagtggaaacctagagtcctgcgctcaagctcgaagagtaactggtgggttactagatcgactggatgacagccctgaccagtgtagagattccattacctcatatctcaaaggagaagctggcaaatttgaagcaaatggaagccatacagaaatcactccagaagcaaagacaaaatcttactttccagaatcccaaaatgatgtaggaaaacagagtaccaaggaaactctgaaaccaaaaatacatggatctggtcatgttgaagaaccagcatcaccactagcagcatatcagaaatctctagaagaaaccagcaagcttataatagaagagactaaaccctgtgtgcctgtcagtatgaaaaagatgagtaggacttctccagcagatggcaagccaaggcttagcctccatgaagaagaggggtccagtgggtctgagcaaaagcagggagaaggttttaaggtgaaaacgaagaaagaaatccggcatgtggaaaagaagagccactcgtaacagcgaacggtcagtcaaggatcataagtttttactgccagtattgagaaattcgtggaagaaatgtcagcaggaagtaaaaattcaccgagaagtgtgtgtgtgttcgctgcttccacacattaatggcatgattttttttatgc

SEQ ID NO: 1925 - DNA, 3357 bp, Homo sapiens
cttgtctggctctcgaatccttgcttaacttgacctctttcatgtctatgcccgcgtccacgtcctctcacattgttaatttctctttttataagagctgttgccaacagattggcctttttcttaagcctttaatttacatttttctttttctttttgagttctcctgctcctgcggctggctggtggggccagacaacggcacgggcgctgcccctatgcactgccttctattttttctatttttttccaattttttttttctttttcctttccttttttacacttttatttttttcttttctttgctcttctcctggcgctggttcccgccccctctttttctagatagagctgggctggggagagggacttaacccttggcgtgcctagcttgttacttttgctctttcccattttgttccttggttacagttaacatataccttggtggccacttttataagttgggtggcattcatgtctgcagcttctgcttgatgttaccctgggcttgcctgacaaatgctgtgttcaccacgtgctgatttttggcagccttagggtcaaatggggtgtaaagccagaatgttttacagagtcttttataaaactaacttgggctctcgttagctctctgaagcacttttgaaattttccttatattaattgttctctttttaccagctctttacccctgtaaaagcgacctctttgtacctctgcaggcgctgaagctgggtcctgattggggtctgcttctgggaaccagccttgagcatgtgcttgagcattcactgcttctgctagtgcatgggcttctagctagcggagagctgcttatgtcattctctggcactctttaatgttaaacaacgttaggaaaagctgcctgcaatttggccatgttagattatgtgtcagaaagatggaatgcatcagatttataagagcttggggcttctccgtgtaggagggtgtgtggtgttttcagtttagtagatgagtggttgaaaagggctggtagaagaaagtccattgccccccctactgggatgtggccctggtcattataatagatgggtcttcgtatctccctgagaggcatttgtacagctcgagcacgaccagatttgggatggcctgcttgactattttgacttccttccttagcctcttgaggctccagtttttccctttgggatgagacttggagcatgctggctcctgaatctggtttctggagagctggagctgttggcctcggtaaaggagggtaggctgggacatatggaaggagaatttttgttccctctggtggctcctataaactagcttcttttgctttttctgggacttttcctttaactctgtgtctgccggcgaagctgtttttatttttatttttggctttttgtaataagccaataaacagggctggatttatgtcggttttgtttatattatatttaaccatgagtcaatttaaaagaatttggtctgggtaccctggctgtcctctgacccctgtcaccaccttaaatatatggctaattgttttttagtttacagttcctttggttggctatttaatactaaaagagggttattttaatttacagagagtttttaacttttggggggttaacttaactttataattttctgtaaaacttttaagtttttaaatatatattttaagggactaggttttgatgagttttttcccattttctcccagttatgatgctgcacatttacttttgtacagttatttttcttctcattttggccgactatatgctgtctcctattacaggagttttcagacgctgcttggctttggagagttttttatttttgttataacttggagttgtagggcagctcctattagtcatatgtagattgttattagtctcagtttgccccacaattttcttggagcatacagtttacgttaagagatttgtgatttcttattttgcgactgatctgagcctaattaggtccctccatttacacacttttatatacttttagttctcatgtttgtacctggggtggcaagccacttttgctacctctagttttgcagttggggtggcgagccacttttgccacctctagttttgtagttggggtggtaagccactctcgtcagttttctagctgacttagtgagctactttcgtgtcctgtgtcagctggggtgtgagtttaatctgaattgagccactcctgttgcccccagcccctctgggtcggactatttggcacaccccgggaggcgattagctttctttctgtccctatgggcgggtcctgccttgggcccccaaaaccttactgtggttcctgaagtgctctgtttctgaaattgtcctgtagttcttttcaggttttgtcgtgctgctgcgtagggggaaccaggtcaggggaaagctgatttcccctccgggctgaagattttctggtggcacctggggtcacaggtttcccctggcccagggctccagaccccagaggcaaaggagacagtaagcctgcagtctctggtcccttcatggcttgccaaaaatgtggtaaactgaggaacggagagaccaatatggagtacaggaggattgttgtttattttagataagaaactatcagtggaggaacagccttggtgttcctagaggagcgaaagagaaaatttaaaatggcagtaaccctgagacaaccacttctggtggttgccactcacctggggatattcaggacattctgaatgtcctggtgtctgaccttaaccgttccaatggggtagcgctccccacactggacaagtggaagaagaccagtgtctccctgtaaaccgtggccttctgtgcaccgagctcagtggctcttccccaccaaaactcctaagagaagtcatctctccccaaaaggatccccatgagatgttctggccctctgctgactgctccctggaatctgcatctcaagcactgagaatgctgtgctctccattggtcaccttcagactccatttccctgctgccaagtcttctcttctgccctgtgtattccatggatgcccctgaggcctgggacctgtgcctggctttgaggagcatctgtggcttggcgatccagctgctggggtgatggtgggcttcccttctctcagcagggctggagttcttgccccagagactggacaagtggctgtttctgtgacatatttatttttactggcgtttcatgttgcttaaaaaaaaaaaagcaaacagaaaaattgtaagtcagtataattgcctatcagttttccttatttcactttttgtaagataaaattaaaactcc

SEQ ID NO: 1926 - DNA, 1990 bp, Homo sapiens
aaaatcagatcctggactaggcaactcacaggctctgctgcacacagccatcatggtcatgagctgagttcccagctcaaggctgtgatgacgggaccctccaggcagccacagctctcatccccagccttagttgggtgtccatctgtgcctacagtctgaatgaagcttttctggtgggtcctatgttggtgacaacatgttgctttgtgatggtgagtgtgttctatctagattgctgtcctgggaagtctaatgaactgaaaccaccctgcatcggctgttaggtaaaggttgcttgtgtggactcaggtttgaagagctgactccccgtgttccttctctccagatgaatatttcagtcaaggctgtgcccctgggtctgacccgagatctaatctctgtgctctgtgtattggcgacgagcagggtgagaataagtgcgtgcccaacagcaatgagagatactacggctacactggggctttccggtgagtctgtgactgagctccatcaggatggggccttacctcatccctcagcatgtcagcattgcagttctaaggagccagatgtgacctgtcacagcagagtgggggtcatcctgtgggtcagctcatgggtggccccagtgagggctgtccccaccacacccaccgccccagagagtggaggctggcaccagggctgtctgacctcagctccgcagtgcttctccctgtggctttgagccaagatcaacagcagtaggcctcaatagcctcgtcctgaaaatcaaatgggtagagtgtggtatcctaagtgcttcctacaattccatttatggggaagaattctctttcccatcgccgccccttttcttctcacctaggtcatgactatggcttaggtttccctttttctctgactttggccttagaaattgcaaagagatggcagaattgcagtgttattctccagtaacgaagtgaaaaataagccaaaaaacaagttttcagaattcataagttataaccacttagtgacttgtaaccacaccccacgttttacagcaccattcatccgggtgttgcttctcaggggcactatttaccagtgtgaagggtgcagagaggatcttcccctgttccttttcctccatttgccaagagtacatttcaccaccagatggcgtcatgtgtctgagggtgtctgaactttttaatataaattcaacagccttgttccagtaatggaatgacagaaaagtagcttttgctatataagtggctcataaaaaaagacccaaaacaaaaaaaaaatgttttgtgaatgtataaaaatatctttaagggactaaggatttgcaaatggaaatgtgattctactcagaaatgctgaacacatgtctcataagagcccgaaagaagcatgtgctcctctttttttttttttcagacctgcagcaaggtattagttcactggaaacacccacattttaatattcctaattatactggaagaaaatcccttgtcttttgtttaaattatatctagaatctagattggggaaatttatagcaaaatcattaaaagctgaaaccagtgtcatacccctttatttctatcatccttataatgctggttcttaatttttaactttctgctgactctgtagtatagaagaagatctagcctctcacactgcccccagcaccttttccaccccacaaccacagacttcaactctcttcagcacccaacacgctaatgtcatattcagtacttatgactgtgtaagcgttattctcatattatatttcccttattgtacaaactttttgtttactctggagttcataaatgtcttttcttatttgcttaattttctgcacttaaaaaaacacaacactatctcatccccaaactgtctgccagtaatgtaaatctcctaacaacatcatacacacacacacacacacacacacacacacacacaacttgcagaacc

SEQ ID NO: 1927 - DNA, 1886 bp, Homo sapiens
aggctcctgggtgagccagccccagcctcgatcgcgggcaggttccagcctgaccacaggactagctgtctcaggggcagggctgcctccccaggccatgagctccacaggcccctgcaggccctgggggcgatctctaaccccatggtggggaggctaaattaatctctgaagcccctccctggtctgaggagcagcacctcaaaggatggggtggggaggagtctgcgcactcacgccgcccaagtcctgcctaagtcagcacccttgatgctcagtgctgcgggcacaagcctaagcctgggagccaggccctgtctgggactcaaggccaaatggctgacttggaggaaggagcatccactgagggcaggaacatttgggagaggcttcctggaggaggtgtgggtggggaaggatagggaggcgtggtgggttgatgggcgggtgtgggcattgctaaaggcaagaggtcctcacccagcaccggacgcacgcatccacccagcccagctcaggggctggtgccggcacgggtttcacctgccggctgcctacgcaaaggcagagaaagcataggaggggaggagggcagggaggcctgggtctccagggagctgaggagggcttctgggggccagaaggaagctacaagcaggtagggttcaaggagcggggcagcagggctggggtgttgtcctccctcccgaggaagcgtggctgtggacagcttggcttttggcgtgcgtgccacaaacattccggccctcgcctcctcctggctctgtgcttggcacccctgccccagatcttcccggctctgtgcttgggcacccctgccccagaaaggcctcccatggcttccgtatcctcacacctgtccaggtcttctcttcccacgagtcttcacatgaagagcctctgcagcccttcccacagcttgcaaggaccaagggaggccagcaggtggacagggggcctcagcctgccctgaagtcccgccagtcagtggttaccctccagggcagtgccgtggtggccaaccggacccaggccttccaggagcaggagcaggggcaggggcaggggcagggagagccctgcatttcctctacgcccaggttccggaaggtggtgagacaggccagcgtgcatgacagtggagaggagggcgaggcctgagccctcacacatgcccacgctcccctgacactgaagaggatccacaactccttggagaaacaccctcacgtctgttgccgcacacattcctctcagctccgccccatacccgtcactacagcctcacctcccacccctgtcactacggcctcacctcccacccctgtcactacagcctcacctcctacagccttaagtcccaggcccatgtctgcctgtccaagggctcaagactttctaactgggatgtggtagagggactgaaggtacctttgggggcaacagcaccctagtttcattctcaactctagccctgcacactcacctgtggcacggaatgaaaacagagcttcccgtgcaaaaagggtcacgcctcccacccccgccccctccctgcacctcctgtcctctcccagttcattcctggaaccagccaggccaggcaaccagtggcccccaaaggcaggcaggatcctcaggccccagccgcgggaggctggaagggctggcagatcgcttccctcatccacctccaccggtccaggtctttgctgctgtccccagacctcctgtgacaccacgccagatcacagggcaccaggccagagatagtcttctttttgtcctttctggcctctggctagtcagtttttcatagccttacagtatctggctttgtactgagaaataaaacacattttcat

SEQ ID NO: 1928 - DNA, 2347 bp, Homo sapiens
atataattcacactttgacaagagaggtgctaggagaatagatgtaggacaatacagtgccagattcaatagaggaaaatggaatttaaagatggaagattcacaaactagaaatccataagttgacattgacttgtgtgggtttcttgccactaataccaagaaaggaaagggatgatcatcagaagccagcatggattcacttatgagcaagtcaaggctgactagtgttatccgttatctatgtacctatacttgagcctgtacatatacctatacctgtatctatacctatggctatgtctatgccacatgtatctccatctaatagtatgtatttgttcacaaatcaccactaaagaacttactcttataaccaaataccacctgctccccaaaaacctatggaaataaaatattttttaagtaaggaattctatagatataatcaatcagaattttagcaataaatgtgatgagatcttccattacatcctctaggaatgtagagatgggaattgtgggctcgagtgcataaaactaggtaaattcataattaattgaatgagctaaaccactgcctctgaaagaaaaatttctctaaaagaccagtgctgattcagattatttttattaaagtattacaaaaaagggaaagaacaaaaaagtaggtataaactcattatgtaatagcttttattaaaatgtggacaggttatttttatttttattttttattttaggtttgaggatacatgtgcaggtttgttatataggtaacctcatgttatgggggtttgttgtacagattattttgtcacccacgtactaagcttagtatccagtaattattgtttctcctcctcccacttctcccaccctctgtcttcaagtaggctccagttgctttctttgtgtccttgagttctcttcatttagctctcacttataagtgagaacacgaggtatttgattttctgttcctgctttagtttataaggataatggcttctagctccatctatgttcccacaaaagacattatcttattcctttttatggctgcacagtattccatggtgtatatgtaccacattttctttatccaatctgtcattgatgggcatttgggttgattccatgtgtttgctattttgaatagtgctggaagttcattgcatacatgtgcctttataatataacaatttatattcctctgggtatgtacctagtaatgggatttctgggttgaatgttatttctgtctgtagatctttgaggaatggccacactgtcttctacaatggttgaactaatttacactcccactaacagtgtataggtgttcccttttctccacaacttcaccagcatctgttatttttttattttttaatattagccattctgactggtgtgagatggcgtttcattgtgggttttgatttgcgtttctctaatgatcattgatgttgagcttcttttcgtatgcttgttggctgcatgtatgtcttctttagaaaggtgtctgttcgacacctctcaaaagaagacatttatgcagccaaaaaacacatgaagaaatgctcagcatcactggccatcagagaaatgcaaatcaaaaccacaatgagatgccatctgacaccagttagaatggcaatcattagaaagtcaggaaacaacaggtgctggagaggatgtggagaaataggaacacttttacactgttgctgggactgtaaactagttcaaccattgtggaagtcagtgtggcaattcctcagggatctagaactagaaataccatttgacccagccatcccattactgggtatatacccaaaggactataaatcatgctgctataaagacacatgcacatgtatgtttattgcggcattattcacaatagcaaagacttggaatccacccaagcgtccaacaatgatagactggattaagaaaatgtgtcacatatacaccatggaatactatgcagccataaaaaatgatgagttcacgtcctttgtggggacatggatgaaactggaaatcatcattctcagtaaactatcgcaagaacaaaaaaccaaacaccacatattctcactcataggtgggaattgaacaatgagaacacatgaacacaggaaggggaacatcacactctagggactgttgtggggtggggggagtggggagggatagcactgggagatatacctaatgctagatgacgagttggtgggtgcagtgcaccagcatggcacatgtatacatatgtaactaacctgcacattgtacacatgtaccctaaaacttaaagtataataataataaattc

SEQ ID NO: 1929 - DNA, 2364 bp, Homo sapiens
cctttcctgttgttgggtgatctcggtcacttcctttacccacccgggcctcagtctctctgctgtcaaatgggccaccctgaagagtacacccatttcccagggtgaaacctcagaggggccgtaagaggtttctgttccagtgaagaatgttaaaatgcttcacaaagatgccctgtgtgctaggaggcggcactgccagttgtgcgggggtgacagatcagagacggtgtctctagaggacctcttagggcaggaaggagtgtctgacgaagctcaaggaaggctgggcaggagcgtgggctttggggctgggatttctgagttctggcctgtccccctgccacctcctgtccaagtggcccaggcacagtctcccacctctgccagggcccctcagggaagctgggcacaccctaacagttctgtgtgccctctctggccgccccccccaccagcaggcagcccaggtcccctgcctctcccagcccgcctgccttgtgcggcttgggaccatttcacaaaatcatttgtatttggcccctatggcaacctcctgaggcaggaatgagggttttgtttgacagagaaggaaactgaggctcttacctggagcccagagcaaggacctggccagggctgccacctccaggtgggggcttttccactgcccctcgctgctgggttcttctggctccttctccaggagatttcctgccatggattcaaaagacaaattttattgttctttccttttaaaatcagggtgtccccatcccagggtttctttctgcctcccaggtgtgtggtggggccttggtccaacagggtgcgacacttgggaatcccatggagcgtggtaaggagagcagtggacaggtatcaaaggcccggattctagtcctccaccagggacactttccctttggtccgttggtgtcctgctggggatggatgctcagtggatggtcagacatttgcaataggtgccgtggggttcattggtatgtgctaagctcagagtaagagcctggcccaaggtcacacgaggcctccacattctttctgttgtccacgtgacctctgtactgggggctgcagagagtgtggatggaaagaactgaagtgggaggcaggatgaaatgactgaatctcctcattacttttggcagttgtttggagtctctggttgtgttgtcttatgtgtcatgtgtagcttcgtggcattgtcaagttgtgcttttttttgttttttgagacagggtctcaccctgtctcccaggctggagtgcagtggtgcgatcttggctcactacaacctctgcctcccaggctcaagcaattctcctgcctcagcctcctgaatagttgggactacaggtgtatgccaccgtgcctggctaatttttgtatttttggtaaatggggttttttgtttgtttttttttctttttctttctttctttttttttttttttttttgagatggagtctcgctctgttgcccaggctggagtgcagtggcgcgatctcggctcactgcaagctccgcctcccaggttcacaccattctcctgtcccagctactcagggggctgagacaggacagtcacttgagcccgggaggtggaggttgcagggagccaagatcataccattgcactccagcctgggtgataagagtgaaactccgtcccctgccgccccgcccccccaccccaacaagaaaaacaagatctgaaatgctccagaatccaaaacattttgagcaccaaaatgatgttcaaaggaagtgttcattggagcagtctaaatttcagatttttggattggggatgctcagctagtatatataatgcaaatattccaaaatcctaaaaaaattcgaagtctgaaacacttctggttccaagcatttcggataaggaatgctctgcctgtgtgtggttgtaggtaagcctcttcacctgtaaaatgggtatgaagagaatacccgctctccttaatgtaataagacccaccaggcaggatattggaagccagaaagtcaggattcttggtccacttgtatgtggtccatgtcaagcgtccttggccactcctgattaaaacccatggaggctttcgccagagggggtgggcctcccttcatgcagtgggcatgttccattgggtttggcatgaattgagcctaggaagggaagtaacatctcctggacgtctgtgtgccaggctgtctgcccagtgtgcctcacagatgaatatactccatccacatactaagcctacagggcaggtgtgttcgttatctcttcccctctaacatggcaactcaaagcaataaacattgattatttcacatgg

SEQ ID NO: 1930 - DNA, 2179 bp, Homo sapiens
tgttttcttacaactaaatgataaaactgaggctgaaacacaggtgttttctgcctggcctttttctagaatgcacctctctctgaagattatagagaactatgaagaaaaggagatcgtgggaaatatatgattgagtcagtatgatttggaggaagctcaagtgcttgctgtggttgcagagaagtgaggggactttacattcctggctggacaggttgaactctgggattggagaggtggtgggggagtggagaggagcagaaggaacagacacagggagagacatttcaaaggattgtcaacagggcatgatgataacacagggagagcaagtccagcctgtctcctggtgctgccccgagttgatgactgcaattaaactgccagactttacagcctgctctgcactgtgtcctcctggcatcttggggactttttcacggttggggccacaggggaggttagaagctgctcactctctccattgccaagcactggccggtcaatggagttggggagaaggaggctaattctcaacagcctgttagtgacagccattctctctccagcttatctaaagaggattttatttcagaagaaggctgagagcttgttagaaaggcaagttcttgggccccaccccacatatactgaatcagagaccctgggagtgggacccagcaatctgtcttaatagaccttctaggagattctggcactaaggaaagagaccacaggtcttgtctatctctgtagttggctgcgtctgggccagagtaactgcttgttgaaatgatcagagatctcaaatgaggtcatgcatgttggggtgtgtgtgtgtgcatgtgtgtgtgttgtgtatctttatgtgtgtatgtgtttggtctagggtccagcacatagtaggtgttcactcttgggggtgggaataatcactctaatgtccgtgtttgaggactgcattgctggtgaccgctgagcctgcagaggaggaagagagcagggcagaagattcaggagggggtgcatggcaacttctgatgtcacagtgccccccttcactcctgacttctggctcatgggtcactttggggcaggggcaagaggatggttagctgcagcaaagagagagccaaagagaagtgggattgagagcacaggggacagctggagacaaaatataaacgccgggcaggggaacagccaagatagtgcaggaaggatggggaatcacagaaacttctcaggtaacagtctgggccagaacactgggtgtccccagagagggaagtcgagggtgaaagtgaaaaggctcacactcaacttccaggagaaggtcaggtccttcatcaaagaataatcctgccattaaagggtccccagagtccccagcattacttcccttaagtggatcccaatcctggtcacccaatcccctcaggactttgtaaaacgtactgatgcccaacccttgccaacaagctcgtcccattcctaggattctgatttactttgtctgcagagggcttgagctcaggtatgtctataatgacagccaggtgattctattgtacacccagggctgaccactctacttaagcaaaacacacacacacaaaatatacccccgttcccccccatcccctgggggtgatgggttggggatgagggtgatgatgttcccacagatgcattacctctccacagagctcaggaccaaaggaatgtttagccagaactggtaaatacctttaaaaaattattaagcacctatagaaacctatagggacaaaggtgactaagaggatttttacaaaacaataataatcaagtcacttatttaaaaataattaatcatgcttgtaatcccaccacttaaggaggctgaggcaggaggattgtttgaggccgagaactcaaggccagcctgggcaacatagcaagaccccgtttctacaaaaataaaaataaaaataaattagctgggcattggtgtgcacctgtagtcccagctactctggaggctgaggcaggagggccccttgagtccaggtgtgtgtctgtattgagtgtgtgtctgtgtgagcccaggagtttgaggctgcagtgagccatgatcgtgccactgcactccagcctgggtgtcagtgagactgtctctataaaagtaaaaatt

SEQ ID NO: 1931 - DNA, 2429 bp, Homo sapiens
gacactgatttgtgtacctcataaatgctgaaggttcattttaaagatctagagatggaaaaaacctaattttagttttttcggttggagggcttctgcctcagcctttgaaacagatatactatttttagctgctatgttttgtgtttggagatctgatttatgtttaatgtcttgtcctcgatgggcttcctggaatattggtgtgtttatttgcatcagatgtgctggaattcatagaaatcttggggttcatatatccagggtcaaatcagtcaacctagaccaatggacagcagaacagatacagcagctggaatccaaaagatcttgaaaccagtcctgaaaggcttgctcctatgcaagaaatcctggtgaattttgagaggaagatagagaaatttctcgaaaatttcaagtggtagtagagtgcatgcaagatatgggaaatactaaagcaagactactctatgaagccaatcttccagagaactttcgaagaccacagacagatcattttcagagcagtggaatttttcatcagagataaatatgaaaagaagaaatactacgataaaaatgccatagctattacaaatatttcctcctctgatgctcctcttcagcctttggtatcctctccttctctgcaagctgctgttgacaaaaataaattggagaaagaaaaggaaaaaaaaaaaggaagagaaaaagagagaaaaggagccagaaaagccggcaaaaccacttacagctgaaaagctgcagaagaaagatcagcaactggagcctaaaaaaagtaccagccctaaaaaagctgcggagcccactgtggatcttttaggacttgatggccctgctgtggcaccagtgaccaacgggaacacaacggtgccacccctgaacgatgatctggacatctttggaccgatgatttctaatcccttacctgcaactgtcatgcccccagctcaggcgacaccctctgcaccagcagctgcaaccctgtctacagtaacatctggggatctagatttattcactgagcaaactacaaaatcagaagaagtggcaaagaaacaactttccaaagactccatcttatctctgtatggcacaggaaccattcaacagcaaagtactcctggtgtatttatgggacccacaaatataccatttacctcacaagcaccagctgcatttcagggctttccatcgatgggcgtgcctgtgcctgcagctcctggccttataggaaatgtgatgggacagagtccaagcatgatggtgggcatgcccatgcccaatgggtttatgggaaatgcacaaactggtgtgatgccacttcctcagaacgttgttggcccccaaggaggaatggtgggacaaatgggtgcaccccagagtaagtttggcctgccgcaagctcagcagccccagtggagcctctcacagatgaatcagcagatggctggcatgagtatcagtagtgcaacccctactgcaggttttggccagccctccagcacaacagcaggatggtctggaagctcatcaggtcagactctcagcacacaactgtggaaatgaaaactgcaatacaagtttcatccagaactaccacctgacattccttgctgaaacgcatctagttcccctgtttattcatatgcatattttttttctttttacccatttgttcatattaagaatgatctgattgaccgtgttggtctgtactgattcaatttgatgtggtgaaaagcaggttgataaatcattttatgtcaagggcagctttgctcatatttcccatgatttcatgtactgcattatttgagaagctgctcaacttgcaaaatcagttttcctctcaataaaattatagctctaatgtttgcatataagggaagtagttatcatgttagtaatacctctaatagtataaaccccaccccaaaattagccagtaatcctgtaggaaggtactgtatgatcaaatgtttaatcatataaatagaatgtaaatgtctcactgagcactgttttctagtgtatcaaaatgctcttatttcatcattcacttcactgtgctgttgttatgatgtgcttaacagggaacgtgattagtgaaaggaagataaacgtggatgttactccaaaacttcgtttaatgaatgcttaaagaattcaaattttatctgcctctcttgtaatttggatctcttcttaatgtacatagtgctaacatgaagacctttttctgcactatatgcaaacagggtaactaactaaaacaaagccactttcaatcttcaatccttgaaggtatatctaggtttatgacagtaattgtgtttacattttatggtgcctagtattgacaaaatgttatttccctacattaaacatgactccatagacctttt

SEQ ID NO: 1932 - DNA, 2142 bp, Homo sapiens
aataagtaaattatatggagagacaaggagaggcgagagcaggtatccggtgaaaaattctgagagtgaagtagcgtggatgagggacaatgaagacagttggtcgctgaagccactgccttcctgagatgacccaggtacagccagtctcacccccagacatccaacctctcacctctgtgatgacccggtgtccaggcacagacacacccagagtcctcctgaccagctcatcagcagctcaccaaggaaaggaaatcaaggtgtactctcttcagactctagatttcccttcctcctccttttattcatgttacataaattcctgtttttatctctgttggatgaaatcagtctattctctggtttcctttgtctacaatttaaagagggagccgactattaacttgatgtctctgagctattgttggccaagctccccttagatgggattaatgaagaagcctccttttccaaggtgatagctcagaagcaacttgaagaatgagtgacaatgagcctaccaagtggaaatgtggggaaagtcagccagagttcatctactgacttcagtctggcagatgagaggcttgggtttacccctccggtgggtaatggagagagatggaatgtgccacacgaagcctcactatgactttctataatgcctggctcctgtgctgaaatgagaacatgcatcctagccggccatggtggctcactcagtaacttgatggattttgtgaagaaaacaggcatttgcgcttcaaagtgggaatgggggaccactcacaacttcctgtacaaacacggtggcatccgggacaagataatgagcagccggaagcacctccacctggtggatgctggtttagccatcaacactcccttcccactcgtgctgcccccgacgcgggaggttcacctcatcctctccttcgacttcagtgccggagatcctttcgagaccatccgggctaccactgactactgccgccgccacaagatcccctttccccaagtagaagaggctgagctggatttgtggtccaaggcccccgccagctgctacatcctgaaaggagaaactggaccagtggtgatgcattttcccctgttcaacatagatgcctgtggaggtgatattgaggcatggagtgacacatacgacacattcaagcttgctgacacctacactctagatgtggtggtgctactcttggcattagccaagaagaatgtcagggaaaacaagaagaagatccttagagagttgatgaacgtggccgggtaggtggggacacagagccaaaccatatctctgtgaaaggaaaatgaaatctcaggaccccaattcactatgccaaaaggaaaaacttaagctgtggctgggcactgtggctcatgtctgtaatcccagcactttgggaagccaagacaggaggatcgcttgagcccaggagttcaagatctgcctgggcaacatagtgagaccaagtctctacaaataattttaaaaattagctgggtgtggtagcacaagcctatagtctcagctactcaggaggctgaggtgggaggattgccggagcccaggagtttgaggctgcagtgagctatgatggtaccaccccactccaggctgggcgacagagcaagaccttgcctctaaaaaaaaaaaaaaaaaaaaaaaaaattaagctgaaagcttaattaagctgagtcatgcaagaaactgtctttccttttgttcctaagccacagataaaaggacacagagccaaaccatatctctgtgaaaggaaaatgaaatctcaggaccccaattcactatgccaaaaggaaaaacttaagctgtggctgggcactgtggctcatgtctgtaatcccagcactttgggaagccaagacaggaggatcgcttgagcccaggagttcaagatctgcctgggcaacatagtgagaccaagtctctacaaataattttaaaaattagctgggtgtggtagcacaagcctatagtctcagctactcaggaggctgaggtgggaggattgccggagcccaggagtttgaggctgcagtgagctatgatggtaccaccccactccaggctgggcgacagagcaagaccttgcctct

SEQ ID NO: 1933 - DNA, 2145 bp, Homo sapiens
ttgtccatctccgctcctgtgatgtgggtcagtcctttgtggtgccgcgtccagggctgcagggccccacgtcagtgagcagtgggtggccggtggagggggtggtggtggccgggctcccttcctgcccatggcacctagaacagcagtgaggtctcagagaagcccccgcctgggctccctgggagctaaccttgcagcctctgggttatctttggcaaaggggtctaaagtcccctatccccagcccctctacttcccctgctgggcagcagtggctgcccagtgagtggtgctatccatggaggggggagggagctgggcagcgctgactaggcggcgggtggggctaagagagtttctgcagggacccagctgcagggtcagcagcctgtgggccctgagtggggtctttgttgtcctcaggtgggctgtgggggaagtagcggagaaatgaagtgacgccaggggccaggcatgggtgttcttttccgtgttgttcacattttctctctttctctctctctccactaatcatgtttctctctctctcctcgttttgttgcatgacttgtgccggttctcgtgattgttccctgctcgtgtctcacagactgtccccatttagcctgagacttttttcctgagtccccagctgggcagatccctcagggctaaacccaaggaaatgcccagcaacccccaacccaccccagccccgcgtgcgcccctccggtgcccgcagctggtgtgaacagtaagtactttggcggtgcctggagaccagggcagaaaagccagctgtgctgactgagggcccagcctcgggttctccttgctccaaagtttaaaaaaaaatgaccctctcgcagatgctcatctcagcccatttcaagcctggaaaccatctctgagacgctgcccatgctgccatttcatcactgcaggcctgtgggtctagtgggggcctgggggccctgggctgggggaggcagggcccccagcctctggaaagcaggtgggaatggaggctcctagccactatctcatccaaaggatggggcaggggcgggggctcacacctttgaccctattcatgggttccccagatttatacagttggcccctcgttggtttctctttcttcaagccacccctctggagttggggagggagaatgccccagtttctgaaagcatcttaaaccatagatagacgaacagcccaggggcctgggccccttcacagagcaagacttaagcttccccacccaatcattagtccctcctcaaaggttagggttgagagaagcagtaggccctaggggtgtcccgggaatcccccaggagggaaaggtgccaggctatcatccctccagggatccctgatggatgttccttgtcccctgcccaaaaccatcccgaactttgggccctttagtgattgtgagagctgggagcccccagggcctgggggcttgtggacagaaccagtgggcgggggcccagcattcagagccagagaagggtctcaggcggcaccatctccacagaggcagaggcagagagaaggcacccccctctgacccacccctccccaggcaagaactgcaggctgtggacacctcccctggcagaggatggccaacagagactcagcaagtcctcactcccctcccagaaggagacgctgcctgggaggacccactgttctccccttgaggaaaatccatgcagggtgctatgggcctcaacccccacatcgtcatccgcgtcctctccatactgtttccctcccctctcccaacaccctcctccctcagcccggagacccttggatggaagactgggccagccagagtgggaggcaggaccagcgtgtctgcgagcacacgtgtgtgcctgcagacatgccccaagaccccagagacgccccggccccagtcacatggtgtcagagttaccttggcaactggcctttttggttcagagtaaattgggaagtgaagcccctgggatttgtcgagaaacgcactgtacgtgaaatgctttgccatcttgtacgaaagactttttttttaagttccaaaattatgatgggatttttttggatttgctttacgaataaatctgattggtccatttc

SEQ ID NO: 1934 - DNA, 1776 bp, Homo sapiens
ggatcccagcggcggtcgtgtagctgagcaggcctggggcttggttctatgtccctgtggctatgtttccagtgtcctctgggtgtttctaagagcaacaagaaacgaataaatctctggtgactttttgaaaaaatagtatctcttgttgcaagaaatggtccatctgtgatttcaagtctctcgcttgagtgaattggatggaagtggtgaatttcagccaaagtggccaaagaaatcctgttcctgtgataatgacgccatcagcctctgcatctctgtcttcccttctgccacatgttgcctgttctccgtgactttggctgtctcttcagtgttggtgggatacgtcagaaagcgatggaagatgtggcactgtgcccagacccagaagctggccatgtggttggcttatccaccagaatggatgctctgggtgctctttaagccagctttgcctagcctggcatgcacaggccccaggttccgacatgttgctctgagtgagcttgtcctgccttgggccaaattctgtcaggccagggccacaaaaggccgagtcccacgggtggtaatcctggctgctttctgcacttccacataaagacctcctgaagatggcctgtggtctacctctttgcaaccaagaagcccacagtgccatatgaaccctcaggcatggactggagcccccgaggaagcacacactctgctcctgagcctgctgctcattttctctgtgtggctccatttgtgtcacagttgttgcacagacttgtgcatgccgggcaaggccaagctggctcaaaaagcaaccggccacctctgcaaggttgtgccaggagccggtggaccagccaccaacctcacttgctgccggtcagcttacatcagttcttctaccctagaggtagggccccagtgccatatgcttttcctcaggcctctgctctatcagtcatcaggcagcaaccactcaggctgtgggaacctggccatccctccttccttgagtagctgaggttgctggcttgtctgcctgctacaggtgcagccttgcagatgtggctagttgctctgagccagcttggccttgcctggcatgcataggtcccaggtactgacactctgcaccgagtcagcttgtcctgccttgggtcaaattctaagtctggccagggccacagaaggcccagtcccctgggtgctagtcttggctgctttctgcacttgaacataaagtcctcctcaagaaagcctgtggtctgcctgttggcgaccaagaaacctggccatctgggcttccttgagtgggtgaggttgctggcttgtccacctgcttaaaggtactatggggatagaacacaaataataataatgcatttttcaaacaaattaattccttgattttcaaacaaattgaagacaaaggaaactcatgattcaaatgaatacatatggctcattttattcaatatttatgcttacagaatatatgtaaataagacattcccatgattaatattagtatttaagactgataaccttttgggtgggcagttaaagcttatcttctactattttctaacttcagaaatgcttttgtttgaaagttgggtgacaaagtttcaaggagattaagtcccaatattcctattttaaatctctcagcttgtgcagcagggcaggtaaacatgaagtttttaaggatagaagggacctgagagatagcagaatatgtctgctacataacaggtactcaggttatgtttgatg

SEQ ID NO: 1935 - DNA, 2828 bp, Homo sapiens
cagtattatgctgtcgccccagttgtcaaactgctgtgcagatggctccagcccagtcaacttcaccttctttttaatttagaagataacaaaattgtaatcacttatcctttccagagccaagggggaaaaggaaggtataatctacaataaaaagcgagcgttctgtgtactgaggccacttggtgataaagagatggagcgctcccctcacagacttcaattaagaacctccctttggacagggaagaaaggtgtcaaagaggaaaagaaaattaaatttgcttccttccaggagtttttcctcattagtgcttgcttgtcggtgttattattttaatcttaccttctatgtggtgaccagctcctccgagcgatgcccaggtcgggcacggcccgggcagggcaggtctgcagcgatgccgtggcagaggtgggcatactccatttgttttggcagctgcagccattgattctgcatatttttcctgacaacagccccggcaggagttcagttaggaatttaaagtgcagttcatggttctgtgccaccgtggcttttattattataatattaaattagaagttgtcctagtgcctggtgtttgctcagagtttccagaagagagggaagggcaaggtttaaatggcatgcaggacaactggaatgcccccatctctctcgctgacacggatccagtcatacctggggctggacgggatttggaggccctggtcatttgcagagtgaatggtgaagggcgcggaaaaggtttgcttggaggaaagaccggttgcagaggcgaggcggagggaggaggggcggaggcagcaggtctttgtttgtggtaggtctctggcttccatcagggaggaggaaagaggctgtgcccttcctggctcttggctgcaccactgaggacgctccgagggacagcgtgctcacccatcctttgcacagtgctggccccaagccccacggccttccagctaggattttctgctgggctcatgcagaggcaggggacaggtgcatggaagagccgccccacccgacacaccattgtttgaaaatcactgttctctttactcacttaaaaaagtgtacagggaacacctgttcctggcataatgctccaacctcgcggaaggggccaggtgcccttcatctggctctggctgcttccgacctgggcccacgtcatcgttcacgtcctctgtgaccaccactggtcacggtgctccctggcccagcctccaacccacccagcaccctggcatctcccaggccagtctgctgcacccagcgagcttccagtcagaagccaggctgaacggccctcctgccccatcagcttcgtgtcttcttttttttaaagaactgaaatagtccccaagaggcctcatggcctgaagactcacaatcatccacctgtaatttatgataaatgtctgggagcatttaccatttgcgtccgtgagtatttatagccctgaatgggcggggggggagggggggtggaggaggccctgcagccaggagctacacacctgtccccactagtgtcccctggttgacagagccccctcagcctccccaaggctgtcactgcggctgtgacagctgaggagtgccgcctttgaaagccagtggacagtcgctccactagggggagaggccctggccctggcgcagaggaggcgttgcgaggcgggacgggggctggaggggctgagcagccttcagggcagggactgggccctgggtcactggagacgttgatattagtccatctgtctgctgccaaattgctccccaccacatgagccccaggggtttatgtcccaggaaggcgagggtgcccatctgagcggaattgggaggggacggcaccagctcatctccctcagggcctttgcctcctggtgctgccctggtggctgctcctgcaccacagcccctgatggctgctgctagtcctgagttgctgggtttacccccagcccacacttcccacctgggcctgagggtgcggccagtgccctagtcctagccactacaggagtcattctgagacctgctggaggccatggggtcttcccaggcccctcaatcagctgcttccagggtcagcagggcagggtgctgccagtaaggtcctcagggagcacagcccggccgcccaggctgggggatactggggcagagcttccaggtctgtggggcctgatctctccccaaggctctccaggccttggtgcgccctccacggtgaccttcagagaggctgcaccccctcagaagaacagtgagaaatctctccatcacacgctccctggtccttatgtccctgaggccacccttccccaccccccagtgcctggagaagcgtgagactctggaggggcgccaggaggccaggggtcctcagggctaggcctggagctcggcccaagagctgcttttgcgaagcctgtcttgaatccggattcaccagagaacaagagcctcccagcctttggcgtttctgggcctgtaaagatgtgtgtacctcccaggccactctgatgcaagggcagggaccatgccaggcctgggttgggaatggctctgtgactccagaagctccgtctaaaactccaaagatgcccaaaaggctgtgctgctatgtggaatgtgtattatttgtgagcacgatgcggcttcttcctcattttgcagagcaacctaagcgggcagatgtacaaaccgtgtgttcgaaacccctgagtccatgtgtgtgaaaatgcaggttttctcttagaaataaagtggtgacttgtgctgt

SEQ ID NO: 1936 - DNA, 2763 bp, Homo sapiens
ccaccctttcttcccttcccatccctcctcttccaaaacccaagtctgacaggctgtgaagcacctctatatacgactgatggagctttaattgttcacccaatctttagaaaagatccttttaattcagcactgtgcccgaagtccaggcacttagctctggatgcccgactgcagaagataccaacagccagtagaaaaactgcaccaatgctgggggtcctattttaattattctagaaaaattcactttttgctcagtgtttggtttcatttggggctgacctcctttcttgcaggccctagattcgtgaaatctatattaatcagcagaataatattagccaattccttacctcgtttttccttcccctcatttggacagctagcctggtttgtactccttatctcagagatgagatgtgataataagaggcagagaaataaaagtatgttcctggcttttggattcagaagttgcccttatgggaaggaaaaaacaaacaaatgtggcatagataaaatatttggaagaaaagataacaagagtagaaaagagtttcttagggggaggaagtgaattcatgggaaggtacagagggcagagatgtttctggatcctgtgtgctacttcaccctgggaaggtgacacaattgcagatgtttttgtgagacttgggagcagaaaagacatgttctttgcatcctcagtgaagccccagaggagaaatgggtgcataatgggtccccactgaagagaacgtaggcagatgtgcaaagtttcccatgccccagtgagaaagaagcatgtctcttcatgcccaagagcacatcagagaaatggagagtgctcctgaatccgaaagggtcacacagacaagagtgaagaatgtctcaataaataccagtgtggaagaatgatcttgaggaccacatccttcactctctctccttcccccctccctttctgcacatcttgcatctcagaagccccctcccggaaactagatacaactccaggggaaggtgaggttgaaatccacaagttcactgagataaagtttctgacaatgcaaagaaagggaggcttgaaatcaaaattagtttctatttcttacataaatgtctggactagaattgtgtccactgctcagatcttacttatattcagggatgacgtatctcatggaagaacagggctcaacgagccacttaaatgtcttcctatcaaatgttaaggttctagaaaccaaatggtgggtatattatccaacatatgccgtgaaagcagagccaatcctgggggaaagcttctctcctaatggtaaggtgtccatatcctctgccccaagaaccaagacaagtgatctgacaagtgtgaagactgcttttcaacatgaaaaagagttttcttaaactcaagcatgatattggctctactttgaatatcagttacgaaaattcataacgagctgaggtatcttcactaacattgcaaattaatttcttgtattcatcacaatgacatttatgtgtatttgaaaagtaatccatatggatgagcatatttttcattcactctacagacggaacatgcacgctggtttgcagatcccttgcagtgactctacagctcccaggaatctgaggttcacaaggtgaaacctaccaggccaaacaatttaaaattggttttgttttgaaaatccagtaagtatgatggcaatgtcttgcagaaattcctcttttagtattccagtctgtgggctctggcagaagtaatagtctgctgcaaacagatcactcttttttgtttgcaaagtcttcgtaccagctgaatcacagcttgcttttcacttttcgtaacaccttgcaacatcgcaaaatatttgctggagtttgtgaagggcggctgcagaattagtaaactgaaaggaggccttcctttactcccacccctgtcagcaccttctgttctagcagaccgaaaggcagcttgagaactctgattgcttctctagattatgacaattcttggcaccatcgcccggggcaagaatggaagcaaaggaaacattatggagttttgcaggtgccagtacataatattgtcactttacaaaattgaatttataaatgacttcatgaaggtgagttgctatggtaaccagccttctcaacttttatatctggaagtaaggatcatatggccccttctgtttgggactatgtattctgggtttaatgaataactacccatcctctaacttctagttaactaggctcatgggatgctagaccaggaagcaacattagcaaccatctcattccacctccttcattcatagatgggaactgagacacagagaagtggcactacacagctaacgtgtgtcagccctgagcctatggtttctcacttagtttttttttttcacaatgagtgatttttgcaagccagtttagttatatattgttatttttaaacattttagattgagagggtccatatgcatatttgttatattgtgtgctgatggggattgggctttatgttagtcagggttctccagaggaatgttttcttgcttagttttctagtgctcttttctttctgccacactgaatttctgaagggacgcacccagcttccacgagtggataagagacatggaaccacagttagacacagggccactgtcacttcttactgagatgttaaaacaagtcctgtccatgtaaaaaaaaaaaaaaaaaaaaaac

SEQ ID NO: 1937 - DNA, 2299 bp, Homo sapiens
ctcttccccagccctccttgtgtgccctcgtgagtggcggtgacaatgctcccggatgtgggccccaaggccagcggccccagagctgcccgcccacccgtccgcctgctattgtctgctcaggcctggcggtgtggcgctgggcttgtggggccctggcgggcaggggactgtgggaacggattagaggtcctgggcttgctttcctcgtcttgcataaactcttgatcaaagacattcctgggatgacagagccctgtgagctgcgaggctggcccagagtgcgggacgcacaccccacgctgcagcccctgcacaggcctgcccttgctggccctcgctggccctggctgcagtgctgactttggggactagccttatggtgggactggtgatagagcgggtgccagcaggcaacacagccttccccaccagattcagaggccaggcccccaatgctgggcagagcgaggctgtgactgcttcctggggtgcttcaaggagggtcacgctgcatgcagggtagccggagggattgccggatgtatgccactgccactggacctggcttctctggactcccatgggcagtgcaccaccctctgcacagccctagccactgttatcccacaagcgcggtccgaagtccacgtgcccactctgcccagcctccttcctctgtcccctcagggcctttcactccttgtgacaactctaggtgctgtctgggctcctggggaacccccgacccttccagccatggaatcagctcccggcatgcgggtcaggctggacccatggctctgcacctcagcccagcagcttggggctgccctgtaggagccgacacgacctcccttccattcggcccccttcctaggacccactgtatgccagggtggggagacggaggcagagagaaatctgggagatttccgtcctggaggggctcagccagagcaggaaggtgcccaggcatgacaatcccagactcccagaaccacctgcctgctgtggggtggggaagccctcagagagcccatccttacagtcagagcagagatgaaggttcctgtggaccgaggcggtgggccaagcgcagaacaggaagctggatgcagtctggtgtgtcaggagctcctgggcaaagacatcgagcttattggggtcaaggctggggagagatggggctgagtcccagggaccttggacggagctgaagggagataggaaggctgggggttgggggcagaggatgaagaatggatgaggactgtctggctgcagggagatgggccaggaggcagggcaggtaggggtggcgggcgtgtgaggacaggcttctgcgaaggggctgcagggagagctgactgcggaaggctttgtctctgaagttcctcaaaggtcagtttttaccatcaccctctgggtagcgcagatactccaacaagggacgaggtctccactgaatcccaggaggggttgcaggcacagaggtgatgtcagtggagtttgagagttgggaacaagggcctagagtggccagacgatgcctttgatatggtttggctgtgtccccacccaaatctcatcttgaattgtagctcccataattcccacgtgttgtgggagggacccggtgggaggtgattgaatcatggggcagtttcccctatactgttcccatggtggtgaacaagtctcagcagatctgatggttttataggggtttcccctttcacttgagtctcattctctcttgcctgctgccatggaagacgggcctttcgccttccgccgtgatggtgaggcctcccagctacgtagaactcgccgcggtgcaaccagaaatgcacagacccagccgcccgccgcccagaccctcagacttgcgcgtcacaggacagactccgctgtgccccgtgcacttgccaccagcctttggcctctcgatacacacaacatccaggacttgtgcccttgccccatcacgacagacaaagcgtccctcaaggcccccgcgtggttcagacagacgccgcagccaggatggttgagcaaacaatgtgaaagagatacacagaagcgatgtgaatatttccaaaccgtgcctggaagtcaacggtagcagcgcaataagaaaatggagctgcggcctgtccccggtgtgggcaccgccccttcccctcgggagcctcctcctcacacctcctcccgcctgtcctccctcacacgtcagcctccacactcttgccacctcccttcaacacttcctaaataaaaattacaagaattacat

SEQ ID NO: 1938 - DNA, 1854 bp, Homo sapiens
acttcaggccactcctgcaccccgggactttcactctgagaaatcctttaccgtggaagcaggttatgctgtacaattggaggcattgtactgatctcttcctaccacactgaatatcacatgatatcctgaaagtgatctagatgaagttgtgccaacaacatcatgacctgctggattccacacttcccagtgcagcagagccctgacctcactctcacatgccttatgtccctggaatcacgtaacagccaccgccaggcagtcatcgcagagaaaacaaggaaaacaccacgtggattccctcgggatgagatcaggtgcacgctgccagctcaatgggtccaccacccaccagagactccagcccagtgtcgcagccggcggggcggcacccactgctctcccactccagacctgatttcacattcacatggagccacggtcaggtggtcttcggtcccataaagcctatgcatgtattttcctcagagagcccacggaggagagagagatggctaaaacaagaagagatcggtggatgactacatctgccggccagaagaccactctgatagctttcatgaggatgactgcgtctcccagccaaaaggccactctgatagcttccatgaggatgactgcatctcctggccaaaagaccactctgatagcttccatgagctctccctggggcatccatggagaagatatttttgagggagaaatccccaatgcttcttgaatcttgcagcccacacagggatttcctacaagcaacccagccttgagctataaagacctgatcactttcctgggtgaagacagcagactgactcagttattctgtggataggtgacttgatcaatgagttggcgagagttctaagatgtgtctttcaggcacatatctcagatttgtaaaattattatttatttatttaattcatttttttttttgagatggagactcactctgtcacccaggctggagtgcagtggcacaatctcggctcactgcaacctccacctcccaggttcaaatgattctcctgcctcagcctcctgagtagccgggattacaggcacctgccaccatgcccagctaatctttgtatttttagtatagacagggtttcaccatattggctgcactggtctccaactcctgacctcaggtgatccacctgcctcagcctcccaaattgctgggattggaggcatgaaccactgtgcctggcctcagatttgtaagataatttaaacaagactcagtgtctctgcatctcacactggttgtatattgcattaaaatggtgataattctcccctaatcaaactgtgcccaatgctggcaaggacactaatgttatgaagacaagaggtagctgaaaaataaagagacaatagccacgagacagacccagaggtcaggcagggcagggttgccgtgaggacatggctcgtcccacaggacctgggaactggtggtcacagcagtgcaaggtcctgttctctcctctgcagggacagacaggccaccagcctgacagagacggcattagtgggcagctgccaggaactagcagggattgcactagactttatagcgccatagttcagaattgctggatttggagacaaaatccaggtttgaattgtgattctatttcttactgctccgtgtcctggggcagccaggtcagctctctgagccctatggtctccatggctgagtgagaatgcccgcctccactcagaaccagccagtgtggtgccagcaacctatctaacacaagcaaagaggatttcttaatgaaaacattttgtcttgcacaaaacaatactcaattt

SEQ ID NO: 1939 - DNA, 2913 bp, Homo sapiens
tttagttatccagtcctgttcagtttgtccttcattactgtctctcaaatttttccacttttttttacatccacgaactttgtctataaataacttcttgctctgggcacttcagcagtttttaaactggttaccctacctccattgcctttcttcaaccagttctacacatcgatatgagggacctttccaaaatgcatactgggccatgtcactccccagtttaaatcctgaaatgatttcttcaactagatttaaaatttacataagatcctgaaatggttcctctatgtgtctagattttaaaatttaaactcactagaatggcacatgagaccatcaatgatttgggtcctgtccgcctctccagcctctcccgatgtgccaggtggttcagctttagtgaacccctgcagtttgcttgccacccggtgctctcttaggcctcttcccaccacccagaatgccatctacctccttccctccactctacctccctgccctcgccccatccccattcctcagctgacatcctgtccatttattaagatagctctggcaatgccatctcaggaaatttccaatccctatggcctgttaggtgctcctcttcttgaggcagcaaaagataccgaccttttttccaggtgtgcttggatttagttgctttgtgactttggcaaggtttctaatctctgatctgttttcttacctgcagaatggaaaaatgatatcttacagggttgttatgaaggtcaaatgagatagtgcatgcaagcatcaagcactgtgctggcacacagtagccttgcttctcttctccagtatgtgctcctactacgctactttatgccagtaagcatctgtttctattttaagtgttagttaactcctctcccacttcagacaggagttcctttagggtgtcttccatctctgcatcctgccaaatacaagtaaagggcacgtatttgaggaggaggaagatgacttttattttggacatgagtttgaggtgcttgtgagaatgtacaagcagagatgtccctttggcagttggaacctgctgggtctggagctcagcagggatgtccagattgaagataggaaaagtttggggagtgagttgggagtgtatcaatggtggttgaaggcatggtttgggtgaggttactgtctgtattcaagttactaagaaaaccgaatctgaggcaaagctagtgttagcactttattggagggtgaagtctcagagcagcgagagtgagggaaaggaggaaaagaaaatcaaaggttggtgttagtgagttggctcctgcctcacaaagacagctagtcacttgcccatgttggatgtctctggatagactacacagaaacaccatgactggctagaacattgtatttggattgatggaggggaaattcacctgttctgcttcctgcccatgctttactgctcaaagtttgccatggagccagtgttagctccccactttcttgctgggatgatatttcttggccactgcgaaagccagatcccatgccttgcggcatggcatttaatctaagtcctgcaatggcaaggggaacagaatgtggtcaccggcctgtgggagttagtcagcacagagcaagcagctggagacgtgggagtcaggtgaggctgagagaatctgaagcagcaagttacctcaggagagtattcagagggaagggaaggtagagccctgggaagccctgagagttaaagagcctgcagcctgaaggggcatccactgcaagcatagggcccctgtagaaagcattgtcacagagccaagggaggagagagattgagcagctcagagggcaatcaagttctgggaagtggccattgtgattcagagatgcctgatgagctggccagggcagtctccatggaatagaggaaacaaactgggttgtggtggcaagaaaggggagacagcagctcatgctcactgtgtgtcctgggtagcatccattcatggggattgtggagaatggatagccaggcagatgaccaggggaatgatttctggaaactggggatgtgatggtgggggagaggcctggcgaggtgctctgtgtaccaaggatggagtatagcatagtaacagccacctttgattcatccaaagccagaaatgccagtgtgacaaaaccaagcagaccggcagttggcaggggcagggtatgaacattctcaactctgttccctaggagcttctctcttttggtgggttttgggcagtttcctagggttaacgttacctgccccagcatggaggcagctttgtgaaataagaatagggcttatattccatctcttccgctattgagctgtctgaacgtggggaaggtgcttaacctttcagcttcagtttctgtatttgtaataggccaatagcaccttcctcaggtgatattcttaggtaatcttcagggagaaaattaaataacatagcatgcttgatacaggtatttaaaaaaggatacctggaagaggctgatactaaacaaatgaaaaggaaacaaaatagaagcacattcccaagatgtacactgtgacacacataaccatcttttgagccccaaaggattggtagccctggccaggcgcggtggctcacgcctgtaatcccagcattttgggaggctgaggtgggcggatcacgaggtcaagagatcgagaccatcctggccaacatggtgaaaccccatctctactaaaatacaaaaattagctgggtgttgtggcgcgtgcctgtagtcccagctactcgggaggctgaggcaggagaatcacttgaaccccaggaggcggaggttgcagtgagctgagatcacgccactgcactccagcctggcgactgagtgagactccgtctc

SEQ ID NO: 1940 - DNA, 2287 bp, Homo sapiens
atttcttggatatctgtcaaaataccacctcaaatgacccactgagtatttcttctgaagtagatgtaatcacttcctctctagcacacactcattcatacattgaaacgcatgtctaaatgtattctgccttcagaccatctagtacctgctggtactctgaacaagtatataaggtagtttttatatcaatgtgtggaacacttgacaagctatactttaatgttaccaaactatatgaaacaaaccatatatggtcacaataccactatctttaatgagcatttgtatattttatatgcaacagtgctcagcttatgtttaccatgtgcaaaatcaactgtctttaatgacttaaaattaacttttgcaaacaattctaaatacaggtggtcttcaagtagtaaaaccacaaaaggcagttttctatctatggtcatcttttctccctttaagttaattttatataaacaagacttcaaaagtaaatcacattttttcaggtgcagacatccttgtgggtgggaaagaatttaaaccttttttatatttattaaaatgttctaagaattttcttaaacattgcacaaagtttaatgctgtagttttatttttgtgaaatgtagatgcgcatacaagagctaagcaaaatagaagagcatcgacataagaaaagttcaggtatctaatattcgtcttaatagtctattaacttgtgaaagctaagttaatggaaatattattccaaatctatgagaacacttggtgtatcagggcaaagctttgtaagatgtttttgtaactaagaccaagattgaagatagagctgctttattttcttggtttaaatcttcctttatttttgtagtgatgagatgctgattgtgtacagaagaatttgagaggggatttttaaaaactgacttaacacacccagaaaggcagctaacagctatatatatatataaatttcagcccaaactcatgtttttaaactccaactcttaaaagacaacaaggtataaactgaaatgaatcaactttccacttagtttccaattttcccctagtccactaattaaacttaggtaattatacttcaggtagggaagtacaatatgtttagtttcaggctgatgtgtgttataaaaaacaacactgaaaaataaaaatgtacttcccttctaaggagcaagcaggtgatggtcattcaaagagatgtcacattgaattatgagagaaacaatttagaggtttttttcctggcttcatgaattgttctatagagtggatgaagtctaaggaaaagtcctcttcatatatttccatttataagcgtcttgtttttgaaagtgatcacagcatgaaaataactgtgctgctttttagtgtctggctgcataatgtacaagtcacaatttgctgtttttttcaggaggagaaagggaacctcctttactattctatatcctaaaatctacttctaatcagctttatactgttgcctgtacagctcagtgaatgtactttcatctttaagagttcagatatatgccagtgaatatttttgctgtagaggagaaagtaaaaactccacagcggggatctttttctttgcttttgaaaccaccattgaatcactatcgttttgcagactttgcacaactgtacaggagagtggcctttctacagcacattttcagtaatcctatatttagtcaaaatggatgagaaatcatgtattaatgtttgtatggaattttgggtccagtgtaatatttttatcatttaaaaagaactctatttgtaaaaacatttatttactgcatggatattgacgcacattaaatttgtgggattttgtatatgtaaaaaaaaaaaaaaaaaaaaaaaacaaaaaacctcttgtcctaaaatgaagtgtgcttgttaacaggtgtttagacttattgatgtttactagaccaaatgtgtatgttcacttaaaaatatatgtacctgatggatgtgtcatgtttacagtggccaggttgtggcctgtaaacagcaagcagttgacgggaagactagctctgttgctactaagcagcttttacttttgtaaagtcagctctgttgttttaaatggtaaaaattaaactaatgaatttgacaagactcgtggctagcctagcatgaaagagaccttttaacactatataatatctgtacattttattgcattcgtttcaaatctaggagagaggcagcactgtaaactgaagtcaaataaattcagctcttaatg

SEQ ID NO: 1941 - DNA, 2094 bp, Homo sapiens
ttaacccagctggaaggagtgtggaggtgggagtggggatctctgccttccacccacctaaggggtactaaatttgaacacagtggctgagtggtccggggacctccaatctgcaccccaaacacccgccctctgaagctgtgctcataacagaccccaaaattcccctggaagcccctccagggttgaattggggcaaatgagtggtgagtcattccttcccttaggcccgggaagtgactcatgcccagccgttgtcctggtccccatccctctgcccgacaccccccttcaggtctccctggattattggggtccccagtattcccagatcggcagggactggacgtcccctcccagcccgccccaggccccacctgccgctcatatcccaacgccctccgttcccctgcccttcccctctgtttccatccaccctcctttctcatggttttctttcttcctcactgtttatctctctgtctctctgttctctctgtcccatctcctcctgtttccccttctgctctttatgggccccttgtttctctctccacctctctctatcaccatgtaatttctgtctctctgtctgtctctatctctccgtgtctctgtctcctctgtcttatatttctctagctgtcttctttctcctctctgtctccctctctctctccagcttgtctcctttctcctctctgtccccgtctctacaaaaatacaaaaaaatcagccgggcttggtggcgggtgcctgtaatcccagatactctggagactgaggcagaggaattgcttgaacccgggaggtggaggttgcagtgagccaggatcgtgccatcgcactccagcctgggcgacagagagagactctgtctcagaaaaaaataaaataaataaataaataaaagaagaagaaatgaagatggcagtaaatgctcaggcacaccggacagcagtcatgtggtttactcccacacacactacactggggagtgggcgccatcatccctattctacagagggaaactgaggcagagaggcccactgtctgggatttgaactggggatgcctggctcctgtctgttttcttagccactccccacacaccccaggtcagaagagcagcagctggagctgagacccccaccaggctcatggcccttccctactcagttcctgaaactccaccctcaagccgagctcgggaggctgaggcggggaggatcgcttgaggccaggagttcaagatcagcctgggcaacagagcaagactctgtctgtaaaataatttttttgaattatttttaggccggccacagtggctcatgcctgtaatcccagcactttgggaggccgaggtgggtggatcacgaggtcaggagatcgagaccatactggctaacacagtgaaaccccatctctactaaaaatacaaaaaattagccgggtgtggtggtggacgcctgtagtcccagttactcgggaggctgaggcaggagaatggcatgaacccaggaagcggagcttgcagtgagctgagatcatgccactgcactccagcctgggtgacagagtgagactccgtttcaaaaaaaaaaattatttttaattttttggcctggcatgataaattattttattttaaaaattttgagtcaggaaatgtggctcacgcctgtaatcccagcactttgggaggccaagacaggcagatcacctgaggtcaggagttcgagaccagcctggccaatatggtgaaaccctgtctctagtaaaaatacaaaaaattagccgggtgtggtggcagactcctgtaatcccagctactcaggaggctgaagcaggagaatcacttgaacccaggaggtagagattgcagtgagccaagatcacagcattgcacttcagcctgggcgacagagcaagactctgtctcaaaaagaaaaaaaaatttagtgcacacctgtggtcccagctacttgggaggctgaggcaggaggatctcttgagcctaggaattggaggctgcagtgagatatgattgcaccactgcactccagcctgggtgaccaagcaggagcctgtgtc

SEQ ID NO: 1942 - DNA, 1995 bp, Homo sapiens
gggaactaagggaagacatgaacaaagtcaggaaaacaatgtatgaataaaattagactatcattaaagagaaattataaaaaggagctgaggccaggtgtgatggctcatgccggtaatcccagcactttgggaggccaaggctcgtggatcatgaggtcaggagttcgagaccagcctggccaacatggtgaaacctcatctctactaaaaatacaagaactagctgggtgtggtggcatgcctgtgttcccagctactcaggagggtaaggcaggagaatcacttgaacccaggaggtggaggttgcagtgcacccagattgcaccactgcactccagcctgggtgacagagcgagactcttagaaaaaaaaggagctgaaatgaaattctagacctgaaagatacagtaactgaaatggaaaatttacatagaggggttcaaaaacagatttgaatgagcagaagaaagaaccagcaaatttgaatatatttctttgtaaaatacccgcggaaccctgttccttcgttttacctcctgcttccttagctcaagccttcctcatcttaggcagcctccaaactattctatcaacctccccttttccctgctctagttttactagagtgatctttaaaaaaaccccaaatctaatattgtcactgtcctttaaaatatccaagggcacccgtgtgtctatagagtgaacttcagtttccttattttagcattcaaggaccttcctattttggctccagcctactacattgctttatttcacaccagccccacattccattcatatactgtaaccacattttcttgggtacaaagtcacttactgaaaaaaagttgagcatatttggaaaccaaaattcattttctgtgaatgggatatcaatatatagcattggtaggcattgaaacagactatagtctatttttaaaatggattagatgataaaaacaacatgtatgtcatcactaatccagtggtcaatattagcataactctgtaagatacaataaatgttgtatctattgtagatacaatgttatgtatctaacataatatctaacatgttagattcataacgttgtatgtaatataatgaaacatgaagtataacctgtcacttgtgaggtatactagtctgatatgtttgacttgaatccactgagtcttcaaatataactttcttgttcaagaaatacaaggcttgcaggaacaagctcaatgacttcatgaggaagcaaccactcagataaaaacattttgcacttcaagtggcctgatttctacagtgaacaagaatcttttaatttttttttatgtgccataattaaaaagtcaagggatgtaaccagatggaatgtatggtcctgaattggataatttgggtatactggttgtagaaaaatataatttggtcaacagaatatttgattgtagttaggtattatgtgagaggaaattttcctgtaacattactgagttaagaaagccaactgtaaaaataactttagatggatagaaaatgtgaatgtgatctaggaattaggtgagaagaaaatgtactgaaataaggtagatatttttaattgaaaaaggagatgactaaagtgatctcattttgaaaaaaaaaatacacacacacagaaggatatactctaaagtattaacattggccctgggaatgccatggtttttttttgtttttcattaaaacatagagacacggtctcactatgttgcccaggagttcgagggtggagtgtgatatgatcgtctgtgaatagccacagcactgcatcctggacaagatagggtctctttaaaaataagacttaactagcactttaataatcattgtttttgttcccaactgcattgtacattcattgaggacagggactttaaacttcattatattgctgttgctgtgtttcacctttgaatgatttttaaataaaaatctcatctttgagtcac

SEQ ID NO: 1943 - DNA, 2254 bp, Homo sapiens
actgaagccacctgccagaacgagaaaagcaatcgtctaacctgagaagccgtagtagttttcacagcttgtaagaaccgcagcccggcgcaagaaacaccacaagcatcctacgaaccccctacatacagaaccatctataagagaaacacactttaaatgtgcaccatcgggaatggaacgaacgggcccgcctcgccagggaacccttattcgcttgaatccggaaatagacaaaatggcaactttttggaatattttgagagctaagatgtgccaatttgcatccccaacaatctctcccgtcctgcaaatcttaattcaaaatcgaacgatagaaaacagggtgatggtggaggatgttctggctaagaaggcgcagaacccgttagaaagaaaccgccggtacccgcagccggaagcgagtggattctgagccggcccggttctctggtgcggaacgcgcggttcgcggcccctacctcgccggctgccggtccctaggcgggcagcgcggctccgaagctccagctgagcggagcagaggtattttcaatccacgcgccccgcccgcagccctgcgcccctagccctgccccgcgcgcggagttccctgggcgcgtaccttccaggtagaacgcccggcagccctcgtccttgagcttcttgagcagcagcccgagcaccgacccgccgcccgtattctcgttccagtcgctgctgctctcgtcgtagagcaccactgtgtcggtgccacagcgccgggtgaagcggtcccggtcctcgccgcgcgtgaagagcgcgcgcaccggcaggttacccttctgcaggcgccgcagcatgatgcccgggatggccacgttgatggccgactcgatgtgcgacgactcgtatagctcctgcggccggcagtccatcagcagcagccgctcgttgcccagctccagctgctcgttgagccacgccaccgtcttgctgatcgccatttccgacgcgaagggcacgggtctgagcgtatctatcatgggggtcgagctgcgggagagggcggggtgcctaccagacgcccctcggggcaggcataggccgagcgcaccgcgcgcgaagctgccgctctcggagcggggtttaattccgcctcgccttacccaagccgaggctagcggttggggcagacgagacagaagtaaagccggaggttctctctgcacccagctgcagccgctggctcttagtgtcaatgaatctctctcaatgaagctgcccagatagtttttgttcctccccagtgaatgaaatccaattaattcggactccgtgctactgagaggggaggaaaaaaagtctagcggcttctaatccctccctccaaggctgcacctcaaatctacccgggcgtctttctccccggattatttaagactcgatttgctatctcttggactcagcctcgcacaccccctgcgcgaggcagctcctcaatggatacaaacagcgagcgtctcaatggatacattctccgggccagccaatgagcgtgctgcggaaggggctgttgccgtggggacgggccggctggaacaggttgtgttgatgaattgttaatgagtttgtcattcacaaaaacggaaaggaatttccgctccggataagccccagtgcaaacaagctgcaacagcgggctcggcgggaggaaggagaaagaaggggaggcggcagcggaggaggagcagggcacataaaccagggcacttcagttgtctcatgtttccttctgttgagagttcacacttcgcgtcggaacttttgcgcaccaatggcgcaattagcatgcacaaaagcccttgttcgcgacgcttgcgttcgcgagctagctttaggaaaacttgtgctgacttttcgttctttgtattcccttcaaactcatttggacccaagttcgccttaaccctcccctcccccaaccccccttctttaggcggtgtgtggcatttgtttgccacttttaaaggcccagctctgtttgctctgatgttcttttagccgaggctgtgttggggctggtgaactgactgggctttagtgaccgatgaggtgttaaatgctaatccaacatatttcgaaacaaaccaggattttgttgaaacattttaaagcaaacaaacaaacgtctggttgtgcagaaaatcagaagaaaaccttttttcttaaaataacattttattttcattaaaacaatgtagagtgcagaaac

SEQ ID NO: 1944 - DNA, 1082 bp, Homo sapiens
acataagatgctcaatagatgttgagttgaagttgaaaatttaaagtactttacaaatgtgggggttatcccaagacgcagcccccaagccagcagagctcctgagacgcctgtggccaggactgaggggagggatgggaaccaggccttttggcaaacaaggcctgagtgttgctcttgacctggccctggtctagggctgtagctagagatggaggccagtccctaccttgaggggccactgtctggtaggccctgctggctccatcgggggggctcagaggataacccctcactggggggtgctcaccattgctgcctgggtcactcacaggaatgttactccagaccaacagcaggtcacctggctggcaccggaagccctaggatctggccacggtggggcagggtaccaccaagatccttcagtctgagctcagcgagtgtcccatctccacacttactgtgcacccggatcacggcctccagagagcggatggcattgaggttgggtttctgtttccagccttcttctgaaaggggatccacctatagaaaacagtacatcagccaccagtctctcagggacccacaggcccagctcactcccaccccaggggccccagccttctagccacaagtacactctacctaggccaggagatgctgcctggacctaacttggaacagaggcttccgcttcgcctaccttgtttcaggcttggccactcccaccctgtcccatcccatctgcctgctccttgggtagtccggagagccgggcttacctgcctgacagaagcatggatgggggagggagacggctcaccctgttacccagaagagcagccacacaggcctcagaggcgtcacagatggctgtgaggtcatggccaccctccaaggccagcaccactgcgcctcctgccaggttcatcagttgctgcgtcatgtatccaaaacctagaggttgggaggggagaaatgggaggggcgggagtggagaggtgaccctgttctctacccctgtggcttccctgcttgcttcctccctaataaagaatgactcacatgtatcaatc

SEQ ID NO: 1945 - DNA, 1352 bp, Homo sapiens
ataggcgggcaccatgggctcctgctccggccgctgcgcgctcgtcgtcctctgcgcttttcagctggtcgccgccctggagaggcaggtgtttgacttcctgggctaccagtgggcgcccatcctggccaactttgtccacatcatcatcgtcatcctgggactcttcggcaccatccagtaccggctgcgctacgtcatggtgtacacgctgtgggcagccgtctgggtcacctggaacgtcttcatcatctgcttctacctggaagtcggtggcctcttacaggacagcgagctactgaccttcagcctctcccggcatcgctcctggtggcgtgagcgctggccaggctgtctgcatgaggaggtgccagcagtgggcctcggggccccccatggccaggccctggtgtcaggtgctggctgtgccctggagcccagctatgtggaggccctacacagtggcctgcagatcctgatcgcgcttctgggctttgtctgtggctgccaggtggtcagcgtgtttacggaggaagaggacagctttgatttcattggtggatttgatccatttcctctctaccatgtcaatgaaaagccatccagtctcttgtccaagcaggtgtacttgcctgcgtaagtgaggaaacagctgatcctgctcctgtggcctccagcctcagcgaccgaccagtgacaatgacaggagctcccaggccttgggacgcgcccccacccagcaccccccaggcggccggcagcacctgccctgggttctaagtactggacaccagccagggcggcagggcagtgccacggctggctgcagcgtcaagagagtttgtaatttcctttctcttaaaaaaaaaaaagaaaagaaaacatacaaaagaaaaggcaaaaccccacatgcccacctcctctggcaacatgggggtcacagctctgcccccaggctgtcgtctcgtcgaggagcccctccctcaggtgcccacctggggctgctggaccctcgggctgcaagcactgctgctgggatgcagcctccccaggaagtcaatgtgaggcccgagacccctcaagcggtgagggcccctgttgaacatggagggttcctaaccccaaactcgtgccagaagaacccccaccccacccaggagctgaggctgatggagccctagggtgggggctgggcttgaccaggaacagcagagccaggccccaaggcatagggcagggcacatggtggtgacgagcaggcagtactcttgtaaagggggctcttgggcaaacagtcccaaaggctcccccaggtatcatcaagttggtaaataaacaggaacatggccctc

SEQ ID NO: 1946 - DNA, 2941 bp, Homo sapiens
gtctctgggcggctgctgccgctgccgctgctgctgctgcgggggtcgggcggcggccaggggatttgggcaggcaccgtggatccccgggaaggggacgagttgacagatgtgcgtgaggaggtctctggtcggcctcaccttttgtacctgctacctggcttcttacctcacgaacaagtatgtgctgtctgtcttgaaatttacctaccctacattattccaagggtggcagacgctcattggtggacttttgcttcatgtgtcctggaaactgggctgggtagagatcaacagcagttcaagatctcatgttcttgtgtggcttcctgcttcagtgctgtttgtgggtataatctatgctgggtccagagcattgtccagactggccattcctgtgtttctcactttgcataatgtagctgaagttatcatctgtgggtaccagaagtgttttcagaaagagaaaacatctcctgcaaagatctgtagtgccctcttcctcctggccgcagcaggatgccttcccttcaatgactcccaggggcttataaaattctacagaagtcccagaaacccagtgcattaagtgacattgaccagcaatacttaaactatatattcagtgtggtgctcctggcatttgcatctcatcccacaggtgatctcttcagcgtcctggacttcccattcctgtacttctacagattccatggtagctgctgtgccagtggatttttgggattctttctcatgttcagtacagtgaagctaaaaaaccttctggccccagggcagtgtgcagcctggattttctttgctaagataatcacagctggcttatcaatattgctgtttgatgcgatcctgaccagtgcaaccacgggatgcctcctgctcggtgcgcttggagaggccttgctggttttctcagagcggaagagctcctgaacaagacggtcaagagaaagactcacaggctgctgcgggagaacagcttgtacacctgtgtacgagcccctggtctcatagctccctgttggatgtgtcagaaagaggaatgcaaggacagtgaggccaggtgggcagtgccatcaccctcacccaagtgaatgtggtggtggctgatgaggccgaggcccttgtgcttcaaggagcaccctttctgggggtctgcaggtcactgcagaggagcggtctgttacatcttcccatttggagaacctctctcaaccgtgctgtagctggttctgcagaaacaggaagtacaggatttcatgggctggctctgctcgcctcgactgagcttcacacctctggatgccacatgctctctcccaaacactgctttcagtgcaaggtagtgggcctaaggggtttggttgtcttttttttttttcatttttaaaattttaaatttttatttattattattttttagagacaaggcctcgctctgtcgcctaggctgaagcacagtggtgcgatcacagctcgctgcagccttgacctcctaggatcaggccatcctcctgcctcagcatccacagtagctgatgtgcaccaccagacccgtctcattttttctatttttattattttagagatggggatctcactgtgttggccgggctggtctcaaactcctgggctcaagcgatcctcccaccttggcctcaaagtattgagattacaggcatgagccactgcacccggcctttctcatttttatttttaaattgacagacgtaacagtgcgcatttatcacgcacaacacaatgctttgggaatggttaaatctagctcacaaatgcattacctcacacggttgtcatttttgtggtgaggcttggttgtatgttttgtttcattcatgtttttacatccttggagtctcctctgggtccgtcctttctttgctgtcatgctggcttgcctaaggcccaccgccacctgcgtacgagcattttaaactctagagtgagtgacagcctttttatggttggtgttactatttatttcctgcctctaaacttctcgtggtccttataaacttgtcaggatgtgtgttgcgttgaattctgcatgtcctttttttgcccaccctcaggttaagctggtactaacttatccccagaggaaacagggtttatgagcactgacagatgtcttccctgggcaaaaaaaaaaaaaatagtatatgtatacacacacacatacacatttatatttatatttcttaaagcttttaatccctttcattccctgatatctcagagatttcaaatcattgaacactgaagtatatttttcaggccagatgaaaaattgtattaaaaccctattcctggtcgggcgcagtggctcacgcctgtaatcccagcactttggggggccgaagtaagcagatcgcctggggtcgggagttcaggacaaacctggccaacatggtgaaaccctgtctctactaaaactacaaaaaaattagcctgatgtggtgttgtgtgcctgtagtcccagctacttgggaggctgaggtaggagaattgcttgaacctgggaggcggaggttgcggtgagccaaaattacgccactgcgctccagcctgggcaacagagcgagacagtctcaaaaacaacaacaacaacaaaaaccctattccttgcctttgtaggagtcaaaataaatgaacttcttttttcttttttttattattatactttaagttctggggtacacgtgcagaatgtgcaggtttgttacataggtatgcacgtgccatggtggtttgctgcacccatcaacctgtcacctacattaggtatttcccctaatgttatccctcccctagccctccatcccctgacaggccctggtgtgtgatgttcccctccctatgtccatgtgttctcattgctccaaaataaatgaatttacac

SEQ ID NO: 1947 - DNA, 3434 bp, Homo sapiens
acgaggcaagctcgcagcttctgagcaacatcctggaggtgctggacaggaaggatgtgggtgccactgcggtgcacattcagcttataatggaacggctgctgagaaggatcaaccggacagtgattgggatgaaccggcagtctccccacatcgggagttttgtggcttgcatgattgccctgctgcagcaaatggacgacagccactatagccactacatcagcactttcaaaaccagacaagacatcatcgacttcctcttggaaacttttatcatgttcaaggacctgattggaaagaatgtctatgccaaagattggatggtgatgaatatgactcaaaacagggtttttctccgtgctataaatcagtttgctgaagttctcacaagattcttcatggatcaggcaagctttgaacttcagctctggaacaattacttccatttggcagttgcatttctcacccatgagtcccttcagcttgaaaccttctcacaagccaagcgcaacaaaattgttaaaaaatatggggacatgagaaaggaaatcggctttagaatccgggacatgtggtataacctgggtccccacaaaatcaaattcatcccatccatggtgggtcccattctggaggtcactctgacccctgaagtagagctccggaaagccacaatccccattttctttgatatgatgcagtgtgagttcaatttcagtggaaatggcaatttccatatgtttgagaatgagctgatcacaaagctggaccaggaggtagaagagggcagaggagacgaacaatacaaggttcttctggaaaaactgctcctagaacattgccggaaacacaaatacctctccagctctggggaggtcttcgccctcctggtcagcagcctcttagagaacctgctggactatagaaccatcatcatgcaagatgagagcaaggagaaccgtatgagctgcactgtgaacgtgctgaacttttataaagaaaagaagagagaggacatatacataagatatctgtacaagcttcgagatttgcaccgagactgtgagaactacacagaagctgcctacacgcttctcttgcacgctgagcttctgcagtggtctgacaagccctgtgtgcctcatttgcttcagagggacagttactatgtttatacccagcaagagcttaaagagaagctgtatcaagaaatcatatcatatttcgacaaaggcaaaatgtgggagaaggccatcaagctgagcaaagagttggctgagacttacgaaagcaaagtatttgactacgagggccttggcaacctcctgaaaaaaagggcctcattttatgagaacatcattaaggcaatgaggcctcagcctgaatactttgctgttggatactatggacagggctttccttctttcctacggaataaaatcttcatctatcggggaaaggagtatgagaggcgagaggacttcagcctgaggttgttaacccagttccccaatgcggagaagatgaccagtaccacgcctcctggggaagacatcaagtcgtcccccaagcagtacatgcagtgcttcactgtaaagccagtgatgagcttgccgcccagctacaaggataaacctgttccagagcagatcttaaactactacagagccaatgaagtgcagcagttcagatactcccggccgttccggaaaggagaaaaggatccagacaatgaatttgctacgatgtggattgaacggaccacgtatacgactgcatatacctttcctgggattctcaagtggtttgaagtcaaacagatttcaacagaagagatcagtcctctggagaatgccatcgaaaccatggagctgaccaacgagaggatcagcaactgtgttcagcagcatgcctgggaccggtccctctctgtgcaccctctctccatgctgctcagtggcatcgtggacccggccgtcatggggggcttctccaactatgaaaaggctttttttacagaaaagtacttgcaggagcatcctgaagaccaggagaaggttgagctgctaaagcgactaatagcattacagatgcccctgctaacagaagggatccgcatccatggggagaaactcacagagcagctgaagccgctgcatgagcggttgtcttcttgcttccgggaactcaaggagaaagtagaaaagcactatggggttataacactgccacccaacttgacggagaggaagcaaagccgcacggggtctattgtgctcccctacatcatgtcttccactctgcggaggttgtccatcacctcagtcacttcctctgtggtttccacctcttcaaactcgtctgacaatgctccttccagaccgggatctgatggctcaatcttggagccacttttggagcgcagggcctcgtcaggtgccagagttgaagatctgtcccttagagaggagaacagcgagaaccggatcagcaagtttaagagaaaagactggagtctgagcaagtcccaggtcattgcagagaaagcaccagaacccgatttgatgagcccaaccagaaaagcacaaaggccaaagagtctccagttgatggataatcggctatcaccatttcacggttcttcacctcctcagtcaacacccttgagcccacctccactcactcccaaagccaccaggaccctaagctccccatcgttgcagacagatggaatcgcggccactcctgtcccacctccacctccccccaaaagcaagccctatgaaggcagccagaggagctccactgagctcgctcccccactgcctgtccgaagagaagccaaagcaccaccccctccacctccaaaggctcggaagtctggcatccctacttccgagcctggatcccagtaaggatcttgccctccctgcaacaccgagtgccttagacagctgctgcctgagaactggcctccagccggtgtcctcattccatggggctccctgctgactgcatttcctgatctgggatgatgtttaccagcccaaaaccagtcatgttcttccaaaagcttctctttgatagaattttgaggccatgccacctcccttccagtccacatggaattccagaatcagtcacagcctctgattttttccaagaagagattgccttcaccattgttaaatgtcagcctgtacggcagagacatggtggtctgcacaagcctggacaagttcttccatattgatggtggagcaacccctgtaatctactccttggaaggattttttgctttgcttatgaaaagctgtgcttgagacttaggtacttttctcacgtggacacactgatcccatcccatattgcatctttgaagagatggatatcaagtacactttggtagctgaaataatcatatctttctg

SEQ ID NO: 1948 - DNA, 3128 bp, Homo sapiens
gattacaggcatgagccactgtccctggcccaatacatattttaaagtaaacattgtattacagaataccacagacagaaaagcacacaatgaattttcatgatgtgactccgtatacccagcaggacgttcccggcccccacgatcacccagcatggcccacctccgtgaccatcccttctccaacaccagactccccaagccctggcacagagatggctgtctggggtggccccgtagggacagtcgctcagtgctgtgtggtgacctgctgtctgcacagaagctggttctgactctcccattgacgggcgtctggtgtttctggtctgggctgtttctccagggctgcccgagtgtctcggtgcccatgggtgtgtgccctgcttgttcctacagggagcaggattgttgggccccaggcatgcgtgcacggggttggcccaacactgagtggcttccagctgtcatcttaagcgttctttttcctcctcagtcctcctggcaggagtcggtgcttcttgctgcgttctttgtgaggatttactgggacctttttaaagtcccgtgggggcccaggaggctctgaacaagctccggggtgtgcttggggtgggtggagggtgtttctggtttctagtttgggaagcgccttcccctagcataagctgcacatgtgagggagatggtgttggccccaaggagtcagatgactccagtgggagaggaggggagggcagagtggagtcaggattggcatgaatcgtgcctcaggcccagccatggcccttctgcaacagagtccacgaatgccagcaccgtgagcacatgcgacaggcaccctggtgcatttaaatcataaattagcccatcataatcgcagagcatgcacctcacaccagcaaggacttcctctgaggcctgctagggaagcgttgagtgccccgcaggaagtcacttttgcggccatttaaagccctgtaggatgtgcaaggcaggtcagtggctttgtgctccagtgatgaaaagcagacaatgaattggccccagatgccctgcccaggggatctggggagggtgggacaggtctcaggcacagccctggggctcccaaactgccttccgtctccacagcctgtacacccaacatgcagtgggggccatcccagaggaggcctggcctgggcctccatgtccaggaacggcctgcgctctagcgctggcatcgggcatgagagggcctcccctaagtcaatcttgagaggtctgcgtgctccctgagaccccctgggggtgctgggacgcttcctggggctgtcaggacggtgtggccgggccacaggctggttacacagtgttacactgccctctcctgggcggctgcctgactccactccctgtgtgcaggcaggaaagagtgttaaaccctccaggctttttggagtgagggaaagaaggcacgcacacacctggccctggctcgccctgggtggcaggtgctggaaggagttgctccccacccgagccctgtaggcacctttgcactttggttccaccttctcttttcctcagtttgagcttcctacaagatccctggctctagcagccccaaagccagtggggttttatttttatttcctgtttctttgtcatgcttcaggagtcagctcccaaaaagcacatcccagtcactagattctgcgttcaaaagaccgtggctgaggacctgtgggatctctgtttgccccgagtctgagaggttctgtttggcacaaatgttttcttctgtgatgtcgctctgttgctcaagcttcattttgtgaaactgtttccgagtttagcaggcggctcgttcacatgtgagctcccgacatcacgggtgacccgcgcaggcagtgccatgctctgttcacgctctgacacctgggagggccgctaccgcctttcagagcgttttctgttcttgccttattcttccaagtgaatttagacagtctaacagattgggacagggcacttttaaacatcccttatgttttagatgtctttaccttcgggtcttattaaaaatctccaatacaggccagtcgcagcggctcacacctgtagtcccagcacattaggaggccaaggtggaaggatcacgtgagctcaggagttcgaaaccagcctgggcaacatagcaaatccccatctctacctaaaataatttttaaaagaccaattctaagccctccataaacttctttatctttctcacagaacgatgccaacgggactgcaaagccgccttttctcaggtaggcgtggcttcctacgtgagcctcagtgtgtgacattgctcttccctgtagtgtcccccggaagggccttcggtgcccagcccagggggtccagcctgagaaaggcctcggcctgtggagccatgggggagtgcagccccctgctcgctttaccaactactttagaccacgctgggagcagggcttccccaccccagagtgacccccatgtcacacacaatgcaggactaaagaggtgtgggtgcccacgtccagaacgcttaaaacctgggatcgttctgcagcaggtggtatggtgtaggaatcatcactgaacaaaactttcacactcagaaaacgctgctgggacctgtacaagctggggaggtggtcagccgcccagtctcacagggcaagaacgggttattagcactgttaaatccagtttccctcgtagagcagaagttctgaaagatttttcttatcccctgcagcggagaaaacccctttgccactgtgaaactccgcccgactgtgacgaatgatcgctcggcacccatcattcgatgagaggacagccaaggactctcccgggcctctccggttctcccttgcggaatgatgggcgcatcctgtctgccacgtgctgacggtcgggaagcttcagtggagaggcctaactctaatgtcgcctgcttaagcaaatcatgcttctctgtttcacgtagttgggttgacaagtttctgcctttaagataaatgagtaatagtctaatgaccagctcagccatttaaaatattttcttcctattctgttcaagaaacagtaaacttggtttcaatctt

SEQ ID NO: 1949 - DNA, 1974 bp, Homo sapiens
aatccaggggaagcgaagttgtcagtatatatgcagatattttccatttaaactatatgtgtatacacacagatgtactcaagtccaatttgtggtgcctgcactcaagagcacaacagccctaaaagcctcaaacagaagaacaccacacacagtatgccggcgctttgcagtttcctctgtagaacaccacacacagtatgccggcgctttgcagtttcctctgtagaacaccacacacagtatgccggcgctttgcagtttcctctgtggaacaccacacacagtatgccggcgctttgcagtttcctctgtggaacaccacacacagtatgccggcgctttgcagtttcctctatggaacaccacacacagtatgccggcgctgtgcagtttcctctatgagactacgctgctttcactgacactaactaagaatgtttctcttcaaggaagaccgtcttggccttctcaggctctcagcagaggatgatgatgataatagcagctgtcattcactttacatggtaaagtgacacagtacacactgttctagatgcttttttttttttttttttttttttttgagatggagtcttgctttgttgcccaggctgaagtgcagtggcacgatcttggctcactgctgcctctgcctcctgggttcaagcaattcttctgcctcagtctcccaagtagctgggactgcagatgtgcaccaacatgtaccacagtgcaaattccaggttgtctctttagtggagacggggtttcgccgtgttggccaggctggtctcgaactcctgatctcaggtggtccacctgcttcagcctcccagggtgctggaattgcaggtgtgagccaccatgccagactgatgctttctatgtgtaaagttagtcttcacagccatctggtgaagactgtagtattatcatcatccccattttgcagatgaggaaactaaggcaggagggcttaaataacttgctcagatttgtaccataataaaaaggcagaactgggacacaaactcatgcgctttgcctcctgagcatgtctttgagccacggagtcagacatatttgcctagcagtactataagaaaagctaggcagagacaggaacaggggagcactggccaccagatccagaaccttaacattcttttcccggtaacaggcttcatccctccacccctcatcttcggggctggcatcgactccacctgcctgttctggagcacgttctgtggggagcaaggcgcctgcgtcctctacgacaatgtggtctaccgatacctgtatgtcagcatcgccatcgcgctcaaatccttcgccttcatcctgtacaccaccacgtggcagtgcctgaggaaaaactataaacgctacatcaaaaaccacgagggcgggctgagcaccagtgagttctttgcctctactctgaccctagacaacctggggagggaccctgtgcccgcaaaccagacacataggacaaagtttatctataacctggaagaccatgagtggtgtgaaaacatggagtccgttttatagtgactaaaggagggctgaactctgtattagtaatccaagggtcatttttttcttaaaaaaagaaaaaaaggttccaaaaaaaaccaaaactcagtacacacacacaggcacagatgcacacacacgcagacagacacaccgactttgtcctttttctcagcatcagagccagacaggattcagaataaggagagaatgacatcgtgcggcagggtcctggaggccacttgcgcggctgggccacagagtctactttgaaggcacctcatggttttcaggatgctgacagctgcaagcaacaggcactgccaaattcagggaacagtggtggccagcttggaggatggacatttctggatacacatacacatacaaaacagaaaacattttttaaaagaagtttcctaaagt

SEQ ID NO: 1950 - DNA, 2039 bp, Homo sapiens
agatgctcaagttgataccaccccacgcacgtgaggctgggaccaggggtggcactgacacggctggggagcccactcccgaggttcgacccggggatgtgcacagccacattccaaaggcgcacgggatgagatcagcctgggtgaccctgggactttgtcctcctcggcaggagccagccctgtgcaccctgtgtgcctgtccatctggaaggcccagcatgagaggcccggccgtcctcctcactgtggctctggccacgctcctggctcccggggccggagcaccggtacaaagtcagggctcccagaacaagctgctcctggtgtccttcgacggcttccgctggaactacgaccaggacgtggacacccccaacctggacgccatggcccgagacggggtgaaggcacgctacatgacccccgcctttgtcaccatgaccagcccctgccacttcaccctggtcaccggcaaatatatcgagaaccacggggtggttcacaacatgtactacaacaccaccagcaaggtgaagctgccctaccacgccacgctgggcatccagaggtggtgggacaacggcagcgtgcccatctggatcacagcccagaggcagggcctgagggctggctccttcttctacccgggcgggaacgtcacctaccaaggggtggctgtgacgcggagccggaaagaaggcatcgcacacaactacaaaaatgagacggagtggagagcgaacatcgacacagtgatggcgtggttcacagaggaggacctggatctggtcacactctacttcggggagccggactccacgggccacaggtacggccccgagtccccggagaggagggagatggtgcggcaggtggaccggaccgtgggctacctccgggagagcatcgcgcgcaaccacctcacagaccgcctcaacctgatcatcacatccgaccacggcatgacgaccgtggacaaacgggctggcgacctggttgaattccacaagttccccaacttcaccttccgggacatcgagtttgagctcctggactacggaccaaacgggatgctgctccctaaagaagggaggctggagaaggtgtacgatgcgctcaaggacgcccaccccaagctccacgtctacaagaaggaggcgttccccgaggccttccactacgccaacaaccccagggtcacacccctgctgatgtacagcgaccttggctacgtcatccatgggagaattaacgtccagttcaacaatggggagcacggctttgacaacaaggacatggacatgaagaccatcttccgcgctgtgggccctagcttcagggcgggcctggaggtggagccctttgagagcgtccacgtgaacgagctcatgtgccggctgctgggcatcgtgcccgaggccaacgatgggcacctagctactctgctgcccatgctgcacacagaatctgctcttccgcctgatggaaggcctactctcctgcccaagggaagatctgctctcccgcccagcagcaggcccctcctcgtgatgggactgctggggaccgtgattcttctgtctgaggtcgcataacgccccatggctcaaggaagccgccgggagctgcccgcaggccctgggccggctgtctcgctgcgatgctctgctggtcgcggacggaccctgcctccccagcttatcccaggccagaggctgcatgccactgtccccggcagcgccaacccctgcttggctgttatggtgctggtaataagcctcgcagcccaggtccagagcccccggcgagccggtcccataaccggccccctgcccctgcccctgctcctgctcctccccttcgggccccctcctcctgcaaaacccgctcccgaagcggcgctgccgtctgcagccacgcgggggcgcgcgggagctctgcgggcgctggaacctgcagacccggcctcggtcagctgggaggggcccgccccggcacaaagcacccatgggaataaaggccaagccgcgacagtc

SEQ ID NO: 1951 - DNA, 2010 bp, Homo sapiens
aggccgaacgttcccgggacttgtaggggtacttgagtgtggtgtccagctgcttgaagctctccttcagtgagtggcactggtagtactccaccaactccaggaggctgtcgaatttcttggcctctgtgatgtggatccagttgtccttctccaccaccttgatgtgcttcacctcatcattgaacttgatgcttattgcaaagcgctcagcctcggcaggccgctccctgatcaggtaggtcccactggcgtgggacttgagcaggttgtccgtctgctgcctctccatgttacctgcaaaccaggggtatgcagtgtagtcgatctcccgggatggcggccggctgatgggcggccttccatccacagggcagggcttcacagatgagctggggaaataccctgacttcctggtttgtaccagacgaccctcccaccacggagactcagggtcgcccctcagcagctcaagcacgtcgcccgtctggaaggtcagcacaggcttcccgggaggggctgggttgccatggtaattctgcacggccaccatcttgggacctggtcccgctccggaggcgtccagatctgcaggagaagtgaacttgcagggaggtatcacttccaggcactccttgtgtgccccgacgccacacttggtacacatgtatccctggtagaaggtgcccctgaggaacattttgcaggctttgcagttggtggtcttgtcaaacgtgtacatctggaaactgtggtggttggcattggctttgtctggcttgatgtttgacatggccatctcaaactgctccatccacttcctcttcatatcttctgttttgcagaaaaactggaagccctgctttccttgaaggtgaattaggtagaagccgtaggaccacttcttgacgtccttgttgttcatggggtcgtcggtcatcttgtggaacagcagctcgatgatctccttgagctcgtagctgtagcccttccgcttgcagacgatgaccaccttgtcaaacaggaacaagtacctgtcctgcttggtgtggttgactatggaccggactttcagttccccgtcaatctttggtcttccaaattcctccagtttcacttgctgggaaggagaggggccgtcagccggggctggagcagccccagttctcctgaccgcacgggcagggcagactgtcgtgcacccaagggaactccccacaggcagcagaggcgggacgaagggaaacagcccctgtggctcccagctggtgctcaggatggacgagggagggtgcagaagaccgggaagggactgggcctggcagcttctctccctttcctggccagccctgccaaggggctcccttcagctctggggacaaagggcgattgacggtgccggttgtgttcacagaggccgccgctgtgtggagccccaagcgggacccggtcggaaaagccagaagcccaagccccacgttcaggagagaacaaacagcgcctatctgctgcagggcgggtggggccggggtcctgccaagggtgaggcttcgactcagacccctgtgtggttcgctgaggttcattttcgttgtctgtctggttttgtctctgtgactcttctgattcagagagagcttctcttgacatgttccctgcgtggctttcaaagtgtccacacagacaggaaaaggtggaggaaaatgcttcaagacacgaacagggccctgcctgggaggtgctcgaggcacaggctcagtgtctccttccaaggtctcagccccagaggctgcaaggacagctttggtgtcacatagtcccagtcaacttgctccaggcctctgatctcagctctcaccaccttccctgtggcaatgggattcagagccaggactgggtacagggcctggctcatggggatgctcgacgcctgctggccatgctgttttattcttgttgttgtcgtttttgagatagtctcactacgtcacccaggctggactccgtctc

SEQ ID NO: 1952 - DNA, 2096 bp, Homo sapiens
agcagccggcctggggacctgggggagacacggaggaccccctggctggagctgacccacagagtagggaatcatggctggagaattggatagcagagtaatgtttgacctctggaaacatcacttacagggcttccggtcaaaattcactaggtaggagggtcatcagctgggaagaaccggcgcctgggaaacctggctggataggtatgggggagccaggccagtcccctagtcccaggtcctcccatggcagtcccccaactctaagcactctcactctcctgctgctcctctgtggacatgctcattctcaatgcaagatcctccgctgcaatgctgagtacgtatcgtccactctgagccttagaggtgggggttcatcaggagcacttcgaggaggaggaggaggaggccggggtggaggggtgggctctggcggcctctgtcgagccctccgctcctatgcgctctgcactcggcgcaccgcccgcacctgccgcggggacctcgccttccattcggcggtacatggcatcgaagacctgatgatccagcacaactgctcccgccagggccctacagcccctcccccgccccggggccccgcccttccaggcgcgggctccggcctccctgccccggacccttgtgactatgaaggccggttttcccggctgcatggtcgtcccccggggttcttgcattgcgcttccttcggggacccccatgtgcgcagcttccaccatcactttcacacatgccgtgtccaaggagcttggcctctactggataatgacttcctctttgtccaagccaccagctcccccatggcgttgggggccaacgctaccgccacccggaagctcaccatcatatttaagaacatgcaggaatgcattgatcagaaggtgtatcaggctgaggtggataatcttcctgtagcctttgaagatggttctatcaatggaggtgaccgacctgggggatccagtttgtcgattcaaactgctaaccctgggaaccatgtggagatccaagctgcctacattggcacaactataatcattcggcagacagctgggcagctctccttctccatcaaggtagcagaggatgtggccatggccttctcagctgaacaggacctgcagctctgtgttggggggtgccctccaagtcagcgactctctcgatcagagcgcaatcgtcggggagctataaccattgatactgccagacggctgtgcaaggaagggcttccagtggaagatgcttacttccattcctgtgtctttgatgttttaatttctggtgatcccaactttaccgtggcagctcaggcagcactggaggatgcccgagccttcctgccagacttagagaagctgcatctcttcccctcagatgctggggttcctctttcctcagcaaccctcttagctccactcctttctgggctctttgttctgtggctttgcattcagtaaggggaccatcagtcccattactagtttggaaatgatttggagatacagattggcatagaagaatgtaaagaatcattaaaggaagcagggcctaggagacacgtgaaacaatgacattatccagagtcagatgaggctgcagtccagggttgaaattatcacagaataaggattctgggcaaggttactgcattccggatctctgtggggctcttcaccaatttttccagcctcatttatagtaaacaaattgttctaatccatttactgcagatttcacccttataagtttagaggtcatgaaggttttaatgatcagtaaagatttaagggttgagatttttaagaggcaagagctgaaagcagaagacatgatcattagccataagaaactcaaaggaggaagacataattagggaaagaagtctatttgatgaatatgtgtgtgtaaggtatgttctgctttcttgattcaaaaatgaagcaggcattgtctagctcttaggtgaagggagtctctgcttttgaagaatggcacaggtaggacagaagtatcatccctaccccctaactaatctgttattaaagctacaaattcttcacacc

SEQ ID NO: 1953 - DNA, 2707 bp, Homo sapiens
gcaattcacgatatgcagtctccgagatgaaaacaaaagtgagaaacaaatacatcagatgatgctatgcagctctgaaggaagaacatgtattgccaggactccaacatttgtgctgtgtttgctgtacaaggaggaaaagtgggaagaaagcatggcataaaaagggggaggagacccagcataagaagcccagctcagcgggccagaggaccctggatccatgagagtaagcatccggcctttgcaaagcaacagataaacttggagatgcccaactccagagcgacaacagagttagcctgggtctgcagctccacctcaagaaaaaagaagtgggcagggtccctgactctttccactgctccactgagccccccaccatccttggtgcactgtgaagattgttcttgcctgcctggctgccattcgggtgacctctacaatctggccccagcagaaagaacttgctagcagcatatcaatagcagagatggaagtctggtcatatggtgcccacatctattgaagtaaacatgctgataccagatatccctggctctctgtcttcaaggcacatggtagaactatacttcctagctttctgtgtggctgggtgggtcacatgacaagttcagacagatgaattatgattagaagcatttaattgttaatacatattctagtgctctttccctctgtcatcacaactgacaatgtttcagacagtgacttctccaacaggctggttccagagtgaaaatagagcccagtagagtctgtagctgatgcaatatggacatgtagggtgagtgagaaaatgcttttgttgggttaagcatctgaggtttgatggtttgttgctactgcagcacaaccttacccatcctaacaaatatgactattattgactaacctgacaacagaagagtctttccacttctgctgtgatgaggaacagagttttttccctgttatatcttaatattagatagcagcagcctctggaaatagttctttctctaccacttcttacccatgtggcataaagccagctactaaacctcttcacttttcagctttcccttttaaaagtgggagtaaataagacctttctcatggagttattgatcaaatgaaataattaaataacgagtatttaaattttaaatttaaatgaaaattcaaatgacataatgcctatgaagtacttatttagtccataatatcctcagtaaatggtagttagccttactaacacaaaggaaatggacaaagccatgccattttccaaagtagtttctaggaccatattatctctaaaaatcccaactttctgctgtaaatttgaactaatccagaacaggctaatccattgcaatggcctattcatccttcttcttagagtttagctatcagtcatcttgttgctgagaacaaagccagcctagttgtttgtaagcaagcctctagagagacagaaactgtcttgtatttctttgaatatcctctactgcctctaacactgtgcctcggctatatttctggatctttatttaattgttttgaatgcttcttatgtttaatttctgccatatccattaggaaaacaacgtaatccttcctccaacaccgatggtataagcctccatgaccgggaaacatttgcccccaagtttaaagaatttagttctgtaaggcttgttgacccatctgacaggaattcccgtaccaagtggtcagtcagtgaagatctctttccactggtaactttatcaagaaagtaagatacaagactgtatgtaaagtatattatcctatgtgaaatcaagggacagaaaataactggaaggaaatattccaaaatgttagcagtagtttctcccggagaatgtgatgtatacatttggatgggtgatatataaagtacttttcatagatctgggcaagagatattttagagggctccacataccacaatcacccacaaataaatgtattaaagagcacacagatgcctttatcactcaggatgtggcactcagagctggcccagcatagtctataacacttaacatcactctcatgaccacactgctcaggtcctagggaagtgtgcctctgtatctcttccctgtatccttaaaagaaaagatgacctaatttgaaagttgataaaaatcagggattatgatgatgttgcttcagaattcttggaggacgtaagagaaaaatagtgctgggttatgagaagaacaaaacttaccaaattcctccctgaagataacataaatgcaatagattcttttacaacaaagtgtcatttctcaataatgccaagaatcctttttcatgcttctcttcttgttcacattcctggttcccatgctactcaattaacataatattcagaaaagttgcagatggtgatttaggaacatgttgtaatattaacatttcatattacccttaaatttgcatgcatgcatcatatgtgtatcatggtaccaattctttatattggtaactaggtggatatagaacatttacaatgtgaatagtgttatctctataaaaacaagatttaattaaaatgttcatatatgaaatgaaattttggcatatattaattataacttggattttaccttttaaagttaatagatcattttgaatattttaaaagactttaataaacatataaaat

SEQ ID NO: 1954 - DNA, 1830 bp, Homo sapiens
gtaattggaatcatccacttccaaggtgtgaagctctttgtggtgggaatataactgcaatgaatggcaccatttattctcctgggtatcctgatgaatatccaaactttcaagattgtttttggcttgtaagagtaccccctgggaatggcatctacatcaattttactgtccttcaaacagaaccaatatatgatttcattactgtatgggatggaccagaccaaaattcacctcagatcggtcagttcagtggcaataccgctttggaatcagtctacagtacttcaaatcagattctaatcaaattccacagtgatttcacaacaagtggcttttttgtgctcagttatcacgcctatcaactaagggtgtgccaacctccaccacctgtgcccaatgctgaaattttgacggaagatgatgaatttgaaataggtgatattattaggtatcagtgtcttccaggatttactttagttggtaatgcaattctgacgtgcagattaggagaacgactgcagatggatggagcacctccagtttgtcaagtgctctgtcctgccaatgaattacggctagattctactggagtcatattgagccctggatatcctgacagttacccaaatcttcaaatgtgtgcatggagcatttcagtggaaaagggttataatatcaccatgtttgtagaattcttccagacagaaaaggaatttgatgttcttcaggtgtatgatggaccaaatattcaaagtccagtgcttatttccctcagtggggattattcatctgcttttaatataacaagcaatggtcatgaagtatttcttcagtggtcagcagatcatggcaataacaaaaaaggcttccggataagatatatagctttctactgtagtacaccagaatccccacctcatggatatattatcagtcagacaggtgggcagcttaacagtgtggtccgttgggcctgtgatcgaggattccgacttgttggaaaaagcagtgctgtgtgcagaaagtcttcctatgggtatcatgcatgggatgcgccagtccctgcctgtcaaggtgaagtatattacgccaaaatgaacaaaaacatgaatgtgagattagcaccatttaacgtttttatttggatcactaacttttctgagaatggaaatattcggaagcatattgtgaactcttttcataaaaacaaggcataacattgcagaatgataaattccaggggaaagaaacatactgttttataattattcattattgttatgcaacttatatgccttgactttttccccttgtatacatactttattcatacatcctccattccagttactttgttttaagacaattattgaaagagaggaagactgagttagtatgaagtctgcagagaggtaatagagaataagaatgggcaagtacactgaagactgagtttcactcttagcatccaaaatttgcactcacagcaacaaatttaagagaaaaatgtaacccaccacctggatattttttttcttcagtggtacagataacacaacagagatatcaaagatatgttttttatttttctttgtattttgtcaaaagtcgaggcactgagcattatatcatgctgcaaaaagaataacaagcttgttaatcaaaaaattgcatgttttagagtttttgattaagacttgtttttatgggaggctgaggccggagaatgacttgaacccgggaggcggaggttgcagtgagctgagattgcaacactgcactccagcttgggcaacaataacgaaactccatctcaaaaaacaaaac

SEQ ID NO: 1955 - DNA, 1940 bp, Homo sapiens
acacgtctgacaaccagaagcccgtgtcccggtgctcgcggcagtgccaggagggccaggtgcgccgggtcaaggggttccactcctgctgctacgactgtgtggactgcgaggcgggcagctaccggcaaaacccagacgacatcgcctgcaccttttgtggccaggatgagtggtccccggagcgaagcacacgctgcttccgccgcaggtctcggttcctggcatggggcgagccggctgtgctgctgctgctcctgctgctgagcctggcgctgggccttgtgctggctgctttggggctgttcgttcaccatcgggacagcccgctggttcaggcctcgggggggcccctggcctgctttggcctggtgtgcctgggcctggtctgcctcagcgtcctcctgttccctggccagcccagccctgcccgatgcctggcccagcagcccttgtcccacctcccgctcacgggctgcctgagcacactcttcctgcaggcggccgagatctttgtggagtcagaactgcctctgagctgggcagaccggctgagtggctgcctgcgggggccctgggcctggctggtggtgctgctggccatgctggtggaggtcgcactgtgcacctggtacctggtggccttcccgccggaggtggtgacggactggcacatgctgcccacggaggcgctggtgcactgccgcacacgctcctgggtcagcttcggcctagcgcacgccaccaatgccacgctggcctttctctgcttcctgggcactttcctggtgcggagccagccgggccgctacaaccgtgcccgtggcctcacctttgccatgctggcctacttcatcacctgggtctcctttgtgcccctcctggccaatgtgcaggtggtcctcaggcccgccgtgcagatgggcgccctcctgctctgtgtcctgggcatcctggctgccttccacctgcccaggtgttacctgctcatgcggcagccagggctcaacacccccgagttcttcctgggagggggccctggggatgcccaaggccagaatgacgggaacacaggaaatcaggggaaacatgagtgacccaaccctgtgatctcagccccggtgaacccagacttagctgcgatcccccccaagccagcaatgacccgtgtctcgctacagagaccctcccgctctaggttctgaccccaggttgtctcctgaccctgaccccacagtaagccctaggcctggagcacgtggacacccctgtgaccatctgggccccagagccaagctgtgtccctgtccctctgtgcccagaccaggcctgcccaggtaacccagacccactgttctggaaagaggcccggagggctcccagggtacccgcaacccacaccgtgagctcaggaaaaggacgcagggaggccccggccagatggctggaagcccaaatcaggccctgccgacctgaccatgtcccaccagggcccccatcctgcaccctgccaggcaccacagcagtgggaggccaggtgggggcacacaggcatatgcccagggcagagcccgccgaggtgggggtggcacccagcttcctactctgccccttgcccagtgggtagacagcatcatgactgtcaccagtaccagggacagagcccaggtggggtgggggcggggtccagcaccacggccagcactgaccaccaggaccccggagccagcaccatggacagaaaactgcccaccaggatctgacgccagcacgccgccaggcccacacggggtctccagtcagagtcccagggtcagctcccagcagggcctaggggaggctggaccagctccctgtgcctcattccaaggcagcccagccggagagaaggggcacaggccacacatctgtcccataaaattaaacgctttttagtgttt

SEQ ID NO: 1956 - DNA, 1958 bp, Homo sapiens
agactttgccactgaaaatctttgctcggaaagtatcaaaaacaaactcagcattactaccataggcaaccttactgaattacaaactgataagcacacagagaaccagagtggatatgaaggtgtcactattgaacctggagctgatcttttgtatgatgtaccttccttacaggctatatactttgaaaatttgcagaactcttcaaatgatttgggtgatcattctatgaaagaaagggattggaagtcatcctctcacaacactgtgaatgaggaactgccccataattgcatagagcaaccccagcaaaatgatgagtcctcttccaaagtcagaactagttcagatatgaacaggagaaaaagtattaaagatcatctaaaaaatgccatgactggaaatgcgaaggcccagacaccaatattttctagaagtaaacagctcaaagacactctcctatctgaggaaattaatgttgctaagaaaacaattgagtcatcatcaaatgaccttggtcctttttattcattacccagcaaagtgagagacctttatgcccaattcaagggaattgaaaaattatatggtaatgctttttgctggaataaaaaaatttttttcctatcattaccataatattagtgcaagtaaatagaagcaaatgctttcatggtccatactgtttctcattttgaaaacaaaagatcagtgatctctcagccccttccattcctacctgtcctgctaccactgaacctctttccttccctcacagtcacacttatcaaaccagttatcctttctgtctgtttccttacctgacataattcctctaattcctcatctataagaaagggataataagttgttagcaagtcagattctggttcaaagacatgccaaactcaatgttggtaatgattttcaataattatattggtagcttctaagtaagaactttagtaaattaccccactctaattctgggttctgtgctctcattctctcacttaagatctgatgactgagacgtctaaacacagtgttacttttaatgtttaccttacctgacttctcaataacttacctgatgctattgactacacccttcttgaaattcttgtttctggatgtccttacaaccactcctgttttttgaccccgattgtctagtagagatcctcagctttcttagttgtatttccttggctggctctgtcttctctaccaaaacctagctgttgtggtatgtctttgacactcacatgtcttgagtgaaagaagtcagttattagtaatactgttgattaaaccaaacatctttccccccacaccagcagccgcagccacctctccccacgggtgcatccctgccaccacccagatgctctgccttgtgctgcctttcccaaagctagacatctttaaagacagctgcaattaagttttaagtcagggatgtccaatcttttggcttccttgggccactttggaaaaagtattgtcttgagccacaataaaatacagtaacacgatagctgatgagccaagaaaaaaaattgcaaaaaaaaaaatctcataatgttttaagaaagtttacaaatttgtgttgggccacattcaaagccattctgggcctcatgagggccgtgggttggacaaacttgttttaagtgcaaagaagcaataatattaagaaggtatcttgtaatgtttttcaaaaatccagggtccttgcatatatttcagatatgtgtcattttagaccaagaagggacagttgctgccatactggagggtcagccccatcaaccttccacttcgtaagttttctggaactcctgttaggatcttatgaatgatatgaaaacttgggttcttgcagagaagacaatcaggttggagaagcagaactacaggaaacaaagtctaataaaagactctacaagaatcc

SEQ ID NO: 1957 - DNA, 3131 bp, Homo sapiens
attaaggagtttattgcctttcacacatgtgagggtcttgggacacagggctgttttgtgaagttctatgtttgtcttggagtttgttgagccctggcatgtagatcacagtagcctgggttcagctgactcagggctccagtctttagcagcggtaacagcagccaaagccagactttatagcaggaggtcattactatctctatcctggacccttcctctttcttcacgagtgtgggcagggaggaaagagcccttgaggaaactagacagtttgtggactttgcctcttgagatagcggtggtgagggtgctgagcggatggtttctttcacttagcagataccaggccttacattggttacatcgtcctattcagtctgttgtgcagagaataaagccgagtaagaccacacaggtttagttcccagatactgcccttattcagaaattctggttttaatttgctgatgcaggtggtgtgtgtgtgtgtgtgtgtgtgtgtgtttctttggcttggtcagcagtcagccaagatctgtgtccttgggttattggctcatggttgcagttccttggaaggagtttattgtagcaggtaaaattacatgagacctaccaaagcttgtgtgtactggagtcctatttcggacactggcccttggggcattgtataaatgaaggttccctgctaaggttcccctctccattctaccaatctgggtaagaattggagcagtattaaggcatggatggggagtgggaggtggcgcttgtcagctgcagtttggaccagcttgttgcaacattgcgcttgccaggttcctgagaaaggcattttgctggctttaggtcgggctgagatgcgcataagcttgcactctcaggaggcagctctctactaaggagtcagtcctaccaagggaagtccagctgttcacactgcctttcttctgggcctgtttggataagggtgtgccaggtatttgaagacccttgcctcgtgcagctatttacactgattgcagtaggaactgtatgccttatttcttttcccgcctgcctgtgatattgtttccagcatgctgagaaaagttgattttatgttgaatgaattcaggtatttgttaccaagttagtccagataagggtttggccttcttttgaacttgctgtttctgtgtagtttctttgtagttcaacattcttgtaattgtgagtggcccagggcacctagtggtttatgctttcaaaagcagttcagaatatttattgaatttcatttctgccttgaggatagctagtgcttacagcctgggaaaggctttttcagcctgtgtgcttccacagatgggagcaccactacagaaagtggtttagaagcgttcaccttggggttttggtatgaggcacattccagggtttttatttatttattgaaaatttttaattttttttttattgtagacacaggggtctcactatgttgcccaggctggtcttgaacttctgtcctcaagtgatcttcccaccttggcctcccaaactgctgggattacaggcatgaaccatcacgcctgaccatgttccagatttgtaacttggtcattttgagttcctcttcactctgactaggaaaagacctggttatttgacctgagggcacagaattttgcttgagtttagggaaggctatttcctcttcagagaaagatacctgctaaagtcgcaggtcctcgagaaacttgctttacgtctctgagccttgttttccttttcaaaaaatctctcatgctttagaaatttctgataagactgtaaactctcctgtccagagtagcttgaagtgtctctgtcactttttttttccttgatgaccttttacatggaattaaaaatagggcagaacatagctccagagggaaaaaaagttggttggggaccagagcctatcaggttgctaatgctgtaaccttaaggaataccctttcctgggctgccttcctttcacctggggaaggatttggctttggggaggtaagagcttgaaacatgggatgagagaggagtcactgctacctctgatttgctcaaagccatgggagttgtttagaattctctacctctactgtcacctaacaggcaggcttcatctgcaggccttccaagtagtggaagttcacaggtagaaaatttaggtccctgaatccgtgggttcgctgtctcagcccattcagaacaattctttaggtactggcctcactggagaaagaagtgatccagaagaacagtctagtgaccaggagatctgagggtagggtgggagtgacgctagagcaccaaggggggctctacagctgtgttctcatggaggacaggcttctgctcattctggttttcccactcttgtggttcccagttgcagttttccagttagttttattacttccttttcttttgatccattccctaaactgccttgagtggaggcatttgtttagtgcttatcgtgtgcatatccttgcctggctagcatacccatgtttctgtgtctctctccgtgtgaggcattgtattgagctatttatacagattgttttatccttaccacaatgctgtgggataggtggtgtccccattttataggtgagaaaacagacctagagaaaacaacttgttcagtgacacttcgtgtatgtcttttcctgaaccctgtgctgaattttccaaggagcctagttactacattgtctaaaactaagaaagagcagacataatgtaggcccttcggcccccttcctttttggttaactgagttatgccaatttcagcagtatgctgactgtacacttcattgtattttagagaaatctgtttcgctgtgaatgcataaaggctaaggagggaggaacaacccttgtttgctgctgcatctcttgggacttgggcaaattcaactttgcacgtggcagatctcttgggaaagccacttgggttttaaagggaaatattttaaaggtaattccaaggttgttaagtaatttttgttcacatggttgagttttcttcactgtgggactgagactgccgcagattacgttactgtcagttcctcactttttccacttggc

SEQ ID NO: 1958 - DNA, 3563 bp, Homo sapiens
gtcagcagtacattagacttaagctttgcattccttgcgtttttttgtttgtttttctcttcctggaaaaaagtttgcttctctcataccatctgacttacttccaggcttttctcccttgtggaacgagtgccgttgagccctgctgcactctcagacgggctcctccgaagtgccgcaggtggtggtaaatcgactctcacccactggggtcgctccttcgtgtctccccccggtcggttcatctgttgctctggctgcaggaggaacgagtgagcttctggtcggcgtctgccatgccgtgtcaccccggcttctggcacctcctgtgcgtgcccaggattgtgaatgtgggccgtgtgtgtgaggccacgggtctccctgcagccactctcctgctggagctctgttactggcacctgtcgctgcctgcaccgaaggctggcagcacctcctggagcttgggacccagagcacagcctcccaccatgagatgtgttgtttttctgtggatcagtcctcctttctttctgagcctggcgtgttttgttctagtttgttaccgtcctaagtgcctgtaggccctgctctccagggacgagactcgggctctacccccaactcagaacccagagcaagagtggtcgggcccgggcccacaacagtgctcagctgtcctgctgcctttgtagttcaagaagtgtccattgatgaggggaatggtcctggctcatgctggagttcctgactcgcatccctgtggagatgaacttcctcgtcagggcggaggcctgccaagcagtccccccaggcttctcttgctcacctttgcccatttttattacgaaagaaaaccagttccttgatagataccaggaccatcagcctcaggcctggaggaggagaggaggatgatttgggttcgggctgtaagaggtgtgccactgagaaggagggatgctgtgagcaggcttaactgagctcatggttcagtgggagttgagtgttctcatcacaggctttggtggaatgtactcttgacatctgtccccaggagcctggtctccagaaacaccagctcaggccctcaaggtctggctctgatggttctgtgggctataggattctgatctgttagcgaggtgtgttcagaagtgtgttgaggacaccagtgcaggagagcaaccagtagaacagaaaggtctggaagcagcattcttggcaaatcttctagattcccaatgcccagacagacctggaggtgctgtgggcttgaacatgtgggtggcctcccctcccaggctgccccgagctgcccaagctttccttgccctggtgctccttcttgcagaggctacacgtgccctctccacctgcccaggcactgagtttctttgttgcgatcaccttgtctgttgtccctctgtcctcaaagatgatcacggaagccttggcccaaggtgggatgcacataagagcccggttcccgcctaccaccgctgtgtccgccatcccgtcaagctccatccctttgggcagacagcccatggcacaggtcagccagagcagcctccccatgctgtcctcgccgtcaccgggccagcaggtgcagaccccgcagtcgatgccccctcccccccagccgtccccgcagcccggccagcccagctcacagcccaactccaacgtcagctctggccctgccccatctcccagtagcttcctgcccagcccctcaccgcagccctcccagagcccagtgacggcgcggaccccacagaacttcagtgtcccctcacctggacctttaaacacacctgtgaaccccagctctgtcatgagcccagctggctccagccaggctgaggagcagcagtacctggacaagctgaagcagctgtcgaagtacatcgagcccctgcgccgcatgatcaacaagatcgacaagaacgaagacagaaaaaaggacctgagtaagatgaagagccttctggacattctgacagacccctcgaagcggtgtcccctgaagaccttgcaaaagtgtgagatcgccctggagaaactcaagaatgacatggcggtgcccactcccccaccgcccccggtgccaccgaccaaacagcagtacctatgccagccgctcctggatgccgtcctggccaacatccgctcacctgtcttcaaccattccctgtaccgcacattcgttccagccatgaccgccattcacggcccacccatcacggccccagtggtgtgcacccggaagcgcaggcttgaggatgatgagcggcagagcatccccagtgtgctccagggtgaggtggccaggctggaccccaagttcctggtaaacctggacccttctcactgcagcaacaatggcactgtccacctgatctgcaagctggatgacaaggacctcccaagtgtgccaccactggagctcagtgtgcccgctgactatcctgcccaaagcccgctgtggatagaccggcagtggcagtacgacgccaaccccttcctccagtcggtgcaccgctgcatgacctccaggctgctgcagctcccggacaagcactcggtcaccgccttgctcaacacctgggcccagagcgtccaccaggcctgcctcacagccgcctagccaagactgcagggatggcccgcagcctcatcggggccaaggacacacgcctcctgtcagacacttctaggtgttggcttccttagagagcctggggttaggttcgctttcctgcttttatcttctgccttggggacctgccaaacgaaatcccacacctgtacagaactgggataggcgcagtggagcgggttgcttggggggcgttggccgacttcttagagaaggccccccatgtgacttcctcccaggagccagatgcgatcctcaggctgctctcaccgtggcctgtccacggtccaggtccatctcagcagcgtgagggtgcactcagggtgttgttagagcgtctcgtgtgtgctagacgcacccctactcgttcctatagaacacagaggacataggaaacccttaaaacacacatgggattctctggtcacagttttgggttcaggctatgctgctttgggcaggtggagcaccccccgaggaagcctgcaagtccagggcacaggctgccttttggagggagggctggcccataggtgctgctggctccccgccaccagctgggcctcagccctcacggcattcctgctgagcaccgtggggcacccagggagcaggggcgtcagggatcctgctgccggcacccctgtgccgctggcatgagggccgtgtccccactgtgaaggatgaagagcaaggccctcaggacccgtgtcctcagagcaccacacactgagcacccagagacagcgggcctggcagcgggccgggccatgcagggagcgcctccctatgttgcctgccactctgggcaccggccagcaccctctggtgagaagaggtcccccctttttatgtgcactaccccaccatctgtgattataataaatttattattcctgtg

SEQ ID NO: 1959 - DNA, 2181 bp, Homo sapiens
taaatttagccaaaagttgagccccctgcttccgcactccgccctcaggcaccggcagagtgtgtgttgctgttggccagagcccagataacatcaagaggtggaaaacaatccccagaaatctgaaaaatgtagaacaaggaaagaaaatgttcaatccatcaaaacaaacagagatacaatctcaccccccttggtttttgtaccactgggtttaggggaaaagaaaacaagagactgaatgagagagatatgcattaaaaacacaaaaagattgaagacaggaacagagtgctcccgcacagggtcacagggcttgagagaccccggaccctcaagtgcaaggccctggtggggcagggcagtgggcaggagggaggccgggttccccagggtccacgccaggtgtccctcagccctggcttccctccctccatgcgttgcgtgctcacctttttctcttcccgaccctggctgtttcgataatcttcaggctttgagagtgaatgcattactcctgtcatttatcccacaaagatgtactgtgctgggcacaggcaggtcctgggcctgcaaagaggaataagatggtccctgatccccaggactcgagattgctgggagggcggcccagatggaggtgggaaagctggaggtggcgtctgggctgccctctgggtctccaagcaggttctggggttgcagggctctgtgagctaggggaaccctgctggcatgctgcttgttaagatcatgcttctggtggcttctgtgtctggttggaatgctggggggtgggcactggggaagcattagagcccacgatttgggcccttcttgttttgatttcgggtagtacacccttaggaaacactttgggagccacaagcaccctacagatgaagtattttattatttttaataactgatcatgaattcagggaccatgaaccatccacctgaagagtcagtattgcagaaagtttgaagcattgaactcacatttcaggagtgctgggtcactgtgatgggctctggggagtgaccggtgagtagcagaggggcacagtgagaggtgacgagttcctgaaggtccctctccccaggggcacttggggcctcttggtgggtgctccagtagggccctggggggacacactgatgtccccttgctggtggggtggaaattgtcccatcagggtgtgcagggcagatgcatccctctcttaataaatggtgatgtggcaaagctccagggtgaggcactgaggggtgctgacttctaggaggatttgtgtttggagagttcagagctaggcctgaaaaaatctgctgtcactccaagacattgcacctatgccaggagttgcggctccctgagagctggtgtctgacccagcaggtcacctaacccccaggggaccacaggtgaggggtgcaggagcagcaggggcccccagctcatggccccactcctggaaatcagtgcatggggtgggggggtggggctgctcttctcttgtgtttatcacatcacagctgcctttaaaatagaggaaaatatctcctccaagcaggaagagtaactttccactgattggccgttctctctgctctctccctttgcacaagctctgcctgtgggtttcaatgagttctctgttcctgaacaaaaatgcagctcagagtgaccttcctttctcttgtagaaagtttcatctttttacacatttatggtacgcagaattctaaagtggcccaaggatttccaccccctgttgtacctgccttggattatttcctcccctgggatgtggcagaccctgtgtgatacatgacatggcagtgaagatttttcacaaatgtaattaaagtcactaatcagctggcttcgagttcaccaagagggcaactatttgggtgctgattgaaatcgcctgagctcttcacatctgatttgaggggtgagagacaggggaaaggagggactcagggtcagagacctgtgctcctgcagcctggaggaagctgcgctgtggcctgtaataaaagaaaaacttcagccaaattaaatttaaaagagtttaattgagcaatgaacaatttgcggatcgggcagcccccagaatcacagcagattcacagactcccgcgcagccacatggtggaagatttatagat

SEQ ID NO: 1960 - DNA, 2287 bp, Homo sapiens
attgtgaactgtgcatgtgagggatgtaggctgtacactatttatgagaatctaatgccttaggatctgtcactgcctctcatcacccccagatgggaacatttagttgcaggaaatcaatcccagtgctctcactgattctacaatatggacatcaagggctccggacattgtgaaagtttccctttaagttacgacgggaatccagaacaacgccgtatggacccctctgcaggtagcatggaaaagctgcagcattgttactgtaagcaaataggtgtgagaccccaagccaggagagacccatgacctcaggtgccatcaggagaacttaaacctgaagaagggatcagctatcccacaacccagtgcccctcccagacagcacaacagaatctaaggggctacaggatgattccaggaacagtgcactacaggaccacgttgcaggaatcgtgccttggattcaccacagttggctgaaactggtagcccaagacaagtggaccagccagaaggacccaggccatccaacccagctgatcctatgatgggaccgaggtgccaatgaagactacaacagccctgctctggtcacttcagaagctgaccagtctacacacggtggaagcttgaggaaacaacagccctgttctagtcaccccagaagctgactcgtctatgtacggccaaagctcgaggcatcatcaggaaagtaaaagtggttagaaatcttacgtctggaaactttccttgtaatattaattgttttactattgtcctgttgctttgctcaacctcctcctctaggaaaggacctcttctctccatgctaggtataaacatgttattcattacttttgctattccctttaaccacgttaaagggagaatccttagaaggatgcccccactgcattgacaatacgtagacaggaagcaccatgactagaaccctgttctaccacttattataggtatgcagggacccattgaggaacttgtacacacaaccagataacctactcaatctgcaacccaggaagtggccagccttatatatgttatgacccaaagtccttacctagaacctagttggaggttcatgtcaggtcaaaagaaataaaaggggaataaccataaagaattaaagataatgaatggccacctgaaagaataatgcaatactatggcccagccacatgggcagatggatcatggagataccgcacccctatttacatgctaaatcacatcatatggttgcaggcagtactggagatcattacgaatgatactgcaagagccttaaatttgctggctcggaaatctacagaaatgagaaatgccgtttatcaaaatagactggctttagactacctcctagcccaagagggaggagtatgtagaaagttcagcctaactaattgctgtctaaaaatcgatgacaatggaaaggtcgtcaaacaaaaagctgcaagaatccaaaaattagcccatattccagtcaagacttagaaaggatggtctccagattccctcttcaggggttagttctcatcccttggagaatttaaaaccttagtaagaatagttctagccatattaggagtctgcctcatactcccttgtctcttacctctccttgtcaaaaacatctaaacggccacagaggctcttgtaaccaggcaaactactacacaactaatgaccctaactaaatatcagcctttgccaaatgaagaaaacttgccttttcatgaaaaattaagtcatagtgatgctattaaacgtcatttataaaaagcgtcaaagggggaaatgaagtagaggttgtaaagaaaactagtccttatcccctctcctcccatagagcaatgatgggaaaaacaatttttcctcctctcctagcttcctcctccccttagtaatccttccttagtgaaactcaaggttacttcacaacaactccagtttctctgttctggataacatgacaaggttacaagacgagcttgagtaagacatgtaccagctgcaaggcctgctttagtttgataaattcatgtttcccttccaatgaagctgcaaggtcagcataacctgtcactgtttgattaactgcctctgttctgcttctgtgagcctgcttacttgcaccacgagctttgcgccactagatggcccatgcatgtataaaagacaagcccttagtccaaggctcagctttttggatgcgaatccattgtgccagggtgcaccttaataaaatcctccagtttcacct

SEQ ID NO: 1961 - DNA, 2534 bp, Homo sapiens
aactgtcagagaatattaggaacacctctatgcacatatactagaagatctagaagaaatggataaattcccaaatgcatacaccctcccaagactgaaccaggaagaaattgaatccctgaacagaccaaccatgagttctgaagttgaggcagtaataaatagcataccaaccaaaaaaggcccaggaccagatggattcacagatgaattctaccagatgtacaaagaggagctggtaccattcattcaaattgaaactattccaaaaatcgaggcagagggactcctccttaactcattctgtgaggtcagcataatcctgataccaaaacctggcagacatacaaaacaaaacaaaacaaaacaaaacaagacaaaaaagaaaacttcagaccaatatccttgatgaacatcaaggcaaaaatcctcaacaaaatattggcaagttgaatccagcagcacatcaaaaagcttatctgccatgatcaagtaggtttcatccccaggatgcaaggttggttcaaaatatgcaaattaataaatgtgattcatcacataaacagaactaaggacaaaaaccacatgattatcttcatagatgcagaaaaggcttttaatagccattcatttaaaaactctcaataaagtaggtattgaaggaacatatctcaaaataataggagccatgtatgacaaacccacagtcaatatcatactgaatgggcaaaagatagaagcattcctcttgaaagccagcacaagacaaggatgccctctatgaccactcctattcaatgtagaatttgaagttctggccagggcaaacaggcaagagaaagaaataaagggcatccaaataggaagagagaaagtcaaactatctctgttttcaaatgatatgatcctatatctggaaaacactagtctcagcccaaaagcttcttaagctgataagcaacttctgcaaagtctcaggatacaaaatcaatgtgcagaaattactagcattcctatacaacaacaacagtcaagctgagagccaaatcacaaatgaactctcattcagaattgccccaaaataataaaatacctaggaagacagctaactaggggggtgaaagatctctacaacgagaactacaaaccactgctcaaagaaattagagatgacaaagaaatggaaagacattccatgcccatggataggaagaatcagtaatgttaaaatggccatatggcacaaagcaatttatagattgaatgctacttctattaaattaccattgacagtcttcacagaaacagagaaaactattttaaaatttatatggaaccaaaaaagagctgaatagccaaggaaaatctgcagcaaaaagaacaaagctggagacaccatgctacctgacttcaaactatactacagggctgcactaaccaaaatagcatggtactgatagaaaaagagacacatagactaatgaaacagaatagaaaaaccagaaataagaccacacacttacaactatctgatcttcaacaaacctgacaaaaacaagcaatggaaaaaaggattccctattcaataaatggtgctggtacaactggctagccatatacagaagatcaaacccgaagagcttccttacaccacatacaaaaattatctcaagatggattaaagacttaactgtacacaccttcctgtggaaagccacaaaatcagcaccaattagcatttaattatcaagaattagaacatttacagactgtgaaaaacatttcatctttacaaattctgcctccctcaggtgattctgagcagctttcgaatggcataactgtgatgcatccacctggtgataatgacacaactatgttagaatttgaatgtcaagatcctgtgcagaaggatgtaaagattaagaatgcagattcatggaaaagtttaggcaaaccagtgaaaccatcaggtatactgaagtcctcaggtgagctcttcaaccaatttagaaaagcagccatagaaaaggaagtaaaagctcagacccaggaactgtacggagacatttggaacaaaagacaaaggaaccaaaagcatctcaagaaaatcagagggatctgggaaattaattgactgtagaatctttttcagataaaatgcaaaacaagtgctatggagaagagcagaaagaacatatgcagtcattggaagctcaagataaatgcaaactctggtttctcaaagaccgtaatttaacacgggagaaagcacaagagtggagaaggagagaagcaatggcaggtaccattggtatgacttcaaagagacattatgacaatgtttgaaaacaactttgattaaaactcagtttttaaattaaccgtcaacttaaaatgaatggtaaaagatcaaaatgcatatggtaaaatgattgctttcagataacaagataccaatcttatattgtagtttgaccactctaaaatgattaaatggttttcacttacaaaaaaaaaaaaaaaaaaaaaag

SEQ ID NO: 1962 - DNA, 1778 bp, Homo sapiens
gtactggcagcgaatcatacatagcttagtttatcagacaagctgcttttcttgagcaaagaaagaactaggagagaaacggggctttggaaccctgatgcggcaatgctgaaagaggagaaatatcccaaggaagggaaaggtgtgttgcagaacgatgaaaaataggcggcttctcacagctgttctcaggggacgagacggggtgggatgcagctccgccggtgcctaacactaagggccctcatcctgccgattcagttgtgtcgggaccgccagtgctgtctcctcgtcagatgctgcttctggtctccccgcagaagatgccactggagttgccttttgaaggatggggacatttgaaggccctggacgctcagctctgaggctggctgggatctcactagcaccccctggtggaggccggagccaggctgacgtgggaaagtggggcacggaagcgctgcggattggaccagtggcagctaggccgaaacgcctgtatttaaagggatagtaactcggactcgttctgcaatatccccacaagggcctgactgagcgagcgagcatggacggccgcggggctttctggacagtggccattcccagagccaggcaggaaggcctcgggaggctggggctcccgttcccggtgaagcggacgccgccagcgccccagaacccaggaggaagcacacaggccccacagagagtggttggcaagagtcactcggggattaggatgccggccaaatcgcggaatttgaggctggaatccaagctcaacaggaaagtagtgaaatacaaatggggaaaacagggctctggagcggggagggagctggtgccggcatttcccaccaacgccggtttaggaagacgggaccgatgccggccgccccctgctggaggggatgtggcatctcacgggctgccagggagcggggttggctactcctgcaaccagcgtgaagagggtctcaggggaggctgtggtgggatcccccacgtgcccttgttcctctcaccgttacctctggatgcctcggggcaaaggccttcttccacctatagacagagtctacgcaggggtcttggaacccgggcacaccagtccccagctaacgaaatccccgagttgggggatttgagagggtcacgtttggcccaagaacccgcagtcctctttggtcttcggccctctatttctaagcgtgggcttctggcacggcggctctgggcacagcccatgctgctttcgggctgggtggtttcaacgacgacaacaattatcacagtgacggtgaccttcaccccaacaggactgctgtgtgtgaagcactcaagagggcccctacaaccaacctgccaggagtcggctcctgaaaacagggtcggaaaaggtcagtgcccatcagaatcgagctgtcggcaaaaagctggagaggttaggagctttgtctatctcaagggcaacaaactgctttgaccctgagggctctgaagacgagtttccctcaccgcagctctcaagacaacagggatcagactcagaaagacactgcctgtataaggctcttgtttgtcttgtttttaattcctgccctctgcctccagatctcagtcctctatctgtgaaacggaattcggccttgcctgtccacgaaatgaagacaaggcatctcgtgtgtgttaagatgaaacaagatcttagcaagagagtaatgatttcttttctaaaacattttttactgtagtaaaatgtactataacgt

SEQ ID NO: 1963 - DNA, 2056 bp, Homo sapiens
ctgcacccagacgccccttacagagtcgcatccctgcggccctcccaacttctccaggcatcccagcatatggcacccacctccacctgggcaccgggcctgggcactggcttcagtcttgggtcctcctcctcccttctccccaccactgatcctcaccaggtcttgtccaggagtggcccgaatggatcccttgaatttggcccacttgtctcctctcctgcttctcctttcctggtccaggcacagatatctctaacaaagattgtgcaactgccttctagaaacggagagttcatccccttgattttacctccttccttccgcctccccaccctcttctgtagccagagtgacctaaaagtgttcttgtggttacattcctgtgctctaaagctttctgtggctccccaaggccctcaaaggaggggacgtgggggataggtcccatgatgtacaagccactgcatgccccactctgaccacaccctgcccatgacgccccaggtgccgtttcatcagggaacgagaccgtgctgtcaacgactaccccagcctctactaccctgagatgtatatcctgaaaggcggctacaaggagttcttccctcagcacccggtagcgtgggtggggaaggccacagtctctgtgtgagggttggcttggccaggctggagccatgggatggggggtgggagggttgggtccctgccaaacttacccattccactgcattgacccctcctgtcctgccctagaacttctgtgaaccccaggactaccggcccatgaaccacgaggccttcaaggatgagctaaagaccttccgcctcaagactcgcagctgggctggggagcggagccggcgggagctctgtagccggctgcaggaccagtgaggggcctgcgccagtcctgctacctcccttgcctttcgaggcctgaagccagctgccctatgggcctgccgggctgagggcctgctggaggcctcaggtgctgtccatgggaaagatggtgtgggtgtcctgcctgtctgccccagcccagattcccctgtgtcatcccatcattttccatatcctggtgccccccacccctggaagagcccagtctgttgagttagttaagttgggttaataccagcttaaaggcagtattttgtgtcctccaggagcttcttgtttccttgttagggttaacccttcatcttcctgtgtcctgaaacgctcctttgtgtgtgtgtcagctgaggctgggggagagccgtggtccctgaggatgggtcagagctaaactccttcctggcctgagagtcagctctctgccctgtgtacttcccgggccagggctgcccctaatctctgtaggaaccgtggtatgtctgccatgttgcccctttctcttttcccctttcctgtcccaccatacgagcacctccagcctgaacagaagctcttactctttcctatttcagtgttacctgtgtgcttggtctgtttgactttacgcccatctcaggacacttccgtagactgtttaggttcccctgtcaaatatcagttacccactcggtcccagttttgttgccccagaaagggatgttattatccttgggggctcccagggcaagggttaaggcctgaatcatgagcctgctggaagcccagcccctactgctgtgaaccctggggcctgactgctcagaacttgctgctgtcttgttgcggatggatggaaggttggatggatgggtggatggccgtggatggccgtggatgcgcagtgccttgcatacccaaaccaggtgggagcgttttgttgagcatgacagcctgcagcaggaatatatgtgtgcctatttgtgtggacaaaaatatttacacttagggtttggagctattcaagaggaaatgtcacagaagcagctaaaccaaggactgagcaccctctggattctgaatctcaagatgggggcagggctgtgcttgaaggccctgctgagtcatctgttagggccttggttcaataaagcactgagcaagttgagaaacc

SEQ ID NO: 1964 - DNA, 2624 bp, Homo sapiens
ataaaagcatgctgcacctttggcacagcgcgacttccctggccctccccctgcggaccagtgaacctcgcccgagggctcaataaagaagatttttgccctctttttctcacctctcagccttattgatccatggtgcccttccattgcctttcattggtgccgaaacccgggaggggacacctcctaagcccccccagaggctcagggggactcccctcctggtcggatcagtcctctccctcagtcaggtcaggcttctcctccacggccatctgtccatttcgtccggttacttgctgccaggtcgcagttgctgcagctactccagtccaattcggccgacgctaggtgagtacccctcctttttccttttgtccgttcctccctggccgagagtcatgcgcacacccagggagagtttccttcttcaagggaaggccagtccgggtcaccaggtgacccaagtttacttccccaggggaagtccaaatcggcactgacgactcagagacgtccatgtctgaagtagccgatctgaggctccaggagccgcgtggtctgagtgaccccagagggatgcttctgctgtccctcagaccgctgccataaggggaagaggatggggtccacccagtccaaaatcacgcaaaacacccccttagggtgcctcctgcgcaacctcccaactttacaactcaatcaagatttaaaatgaaagcgactaattttcttctgcacagttgcctggctgcaatataccttggacaaccaatctcgctggccccccaaaggcacactcgacttcaatatcctaaacgaccttaccaatttttgtcagaggcgaggcaaatagtcaaaaatcaaatttgttcaaaggttctgggacctccgctctcgtcggaccgctgccgccaagtgttttcgctggcacaagtccctgtggctagccttccccttgaagtctggccagcctctcttgccgttaatcctgtccggggcccccatcttagtctctctgccgccatctccttctgcactgccgccatcttactacctgcttcctcaccgccgccatcttacttccttttttctctgctgccattttagttcttctgccaccattccgctgccattttaattcccattagttcccatttgttcttttaaccctgcccagctaactccttggcttccatcttacccgcattcttatttccacctgcccgtagtgccataccagtccactgcatctacaactcctaacacattcgctgcgggcagtgatatccactaatcctggatgaggcagcggagggcccccaaacccctatccaggacttagtaaagctggcgttcaaagtttttaattcctgagaggaggcggctgaggtacaacgacaggcaagcctgaaacaaaaagttcagctccaaacccaagccctggcagctgccctgcaaccggcattccctaagagccccggcaggagaggtagaggtacaatctcccgggccccgtctggcgtctgcttcaagtgaggcaactcaggacactgggccagccggtgccctagccaacagcaaccgtcctgcccgccttgcaactgtttcaagtgtggcaatccaggtcattgggcaaaacagtgcccaaaccccaagccgccaacacacccgtgccctaactgccagcaaatggagcactggaggtcagactgccccagcctcggggcggccgctgtggctccacatggcgacccctccctggatggcgaaggtgccctctagctcctccaactggatgacgactgaagaggcccaggctcgggaacccctctcacccttgccgagcccagggtaatgcttcaggtagcaggtaagtccatttcctttttgctagacacaagggctacctactctgttttgccatcttttagcaggcccagccgcccctcctcaatctctgttataaggattgatggcactccctccacctaccgccagacgccttcactgccctgccgcctagaccactatataactttcttgaacccataatctaccatccttccttctattccttactaaagcaaatacatcgagttatcttcttactttagtaaacactttctcaggttagattaaagcctgccctaccacccataaaacagcagaggtagtagcttcaaccctcattgaacagataatcccgagatttggcctgcttttatctccaaaatagtcaaacaggtgacaaccacacttggcgttaactggaagctacacactccataccatccgcagtcttctggaaaagtggaatgcgccaacggccttgtcaaacaacacctaatcaaattggctctcgagaagcgccaatcgtggagctccctgtgaataacccacctcttggcacgtacctgccctacctcaccctgttaagggagctgctaagagaacacaccgaccacagccttccaaagcccggaccactcagcccagacagtccggccataataaccccaggagatcaggtactagtaaaagacctccaggcaagaggtctctccccccagtggaaaggcccctatacggtaattcttacaacaccgacggcagctaaactt

SEQ ID NO: 1965 - DNA, 2348 bp, Homo sapiens
tttggacacacagacacgcagacacagagacaccggggcccagggccctcctatggaccctgcccgctcccctcccattgtccacggctgtccgcccacccccattctccaagcttcagccccctccttagttcggcatctgcacagcactgaagaacctgggaatcagaccctgagaccctgagcaatcccaggtccagcgccagccctatcatgaccaaggagtatcaagaccttcagcatctggacaatgaggagagtgaccaccatcagctcagaaaaggtgagggccaccttgccctgcctctgcaaggcgagaatttggcggttctccaccccccagccacagctcctactcttgcccgtgagcctggctctctctctgggtctgtctccctcccccaacactgggaaaggtgtcggaactgcctctctcaggagaggggcggagtgtggggttggattccctttattggtgacaggtgcccaaagctttcctgtgcctcctggccctcggaggtggacccgggggtgtgggaacagctggaagctggagagatgaggtcactgtcggcttcctatgacgaagtcacgccccctcttcctttccccttccaacaccacccagggaccccggtcgtgcgagcgtgtgcgtgtgtgtgtcagtgatcagtttggtgaagggggaaaaggtttctgtgaagggtctgaggattctgtgaggggggcgatgaggggtctctgacctgagggagaacgagactcttttgcttcaaaaacaaattccccttgacccatttctttgtcctccgagcagggaattgtttaggctgagcaaggatgaagttcgtgggggatggggtgcagcgcgctttgacggaaggagggtccgcagcggaggagacccggcagggaggcccccccaaccctccagctctcagggcacagggctaacgtgtctcttccccctgctgggtggaagacttgagggcctgaatggtagctattgcaccttctctccctgcacgcagccaaagacaagtggaattcatggacagagaaagaaaccttccttctttccccactttcaggggaagcagcgactccgaggcgcgggccactcaattgcgtttcaaggcgcgggaggagggggtggactgaggttcctggattggctgcagtgacgcagtcatgccattaggtgtcagcaaaagctcagggcctcggtgggatggggcggctcagcgcttagcccccttccccagccctcttttctccccgatttccagttgcctctggccctgcagggtcgcccaccgcccgcatttcttcatgtacatggttcctcctagactactagggccgccttagcttgctacccttttaggaccctggagctgtgccagggtcccctctgtccccgcgctcctgacaccccctcctcttgcagggccacctcctccccagcccctcctgcagcgtctctgctccggacctcgcctcctcctgctctccctgggcctcagcctcctgctgcttgtggttgtctgtgtgatcggatcccaaagtgggtgccccaggggtgggaagggggcaacattggggggtgttgacgggggaccgtggcaagggagtggtgggtgcagtggtggcggacacagcgatcccgttttcttctctctgcacgctgtcctggccagactcccagctgcaggaggagctgcggggcctgagagagacgttcagcaacttcacagcgagcacggaggcccaggtcaaaggcttgagcacccagggaggcaatgtgggaagaaagatgaagtcgctagagtcccagctggagaaacagcagaaggacctgagtgaaggtcagagagggagtgtgtgtgtgtgtgtgtgtgtgtgaaagagagtgagaatgtgtggatgtgtgtgagaaagtgtgagcgtgtgtggatgtgtgtgagaatgagagggagtgtgtgtgtgtgtgagtctgtgtgtgagaatgagggggagtgtgttttgggtgtgtgtatgagagccttgtgtggatgtgagaatgagagggagtgtgtatgtctgtgtgtgtgtgggaatgagagggggtgtgtgtctgagtgtgagaatgagatagagtgtgtgtgagacagtctgtgggaatgagagggagtgtgtgtgagagtgtgagaatgacggagtgtgtctgtgagtgtgataatgaggtgtgtgtgagtctgagtgtaagaatgagatggggtgtgtgtgtctgtgagtgtgagagtgtgagaatgaggggtgtttgtgtctgagtgtgagtctgttttaataaaagatttacattccac

SEQ ID NO: 1966 - DNA, 2139 bp, Homo sapiens
gggagctcttaagaatactaataccggccaggcgcggtggctcacgcctgtaatcccagcactttgggaggctgaggcgggcggatcacaaggtcaggagatcgggaccatcctggctagcatggtgagacaccatctctactaaaaatacaaaaaattagccaggcgtgttggcgggtgcctgtggtcccagctactcgggaggctgaggcaggagaatggtgtgaacccgggaggcagagcttgcagtgagccgagatcgcgccactgcactccagcctgggcaacagagcgagactgtttcaaaaaaaaaaaaaaaaagaaaagaaagaaaaagaagaatactaatgccttggctctatacccagaattttttttttccttttcctttttttttttttttttttttccagagacagggtcttactctgtcacccagaatgaagtgcagtggtgtgatcctggctcactacagtgcagaactcctgggctcaagggatcctctctagtatttgagactatagttgtgtgcccacttccagtgaatttttaaacattttttaaaagtgtttattattattttattatctttatttttgagatttatttttgtaattccaaagcgctgggattatgggtgtaagccaccgcgcccggccacctaggctggtcttgaactcctggcctcctcaagtgatcctcccatcacagcctcctgagtagctgggattggaggcactagccactgccccagctatccccagaaattctaatttagtttggcatcaatatagttttaagagtattccagatgatttataatgtgcagtcaggcatcgtcttaagaaaaagaggcatcatcagacagggtgtatgccaaaaaaaaaaaaaaaaaagaaaagataatcgaataatctgcagagggtggtgtttggagactggcagctgggtcccctctggagtggccctggggagtgacgcacagaggcagcgtcccagagccattttggcccactgcattaatgccctcaccccctcctgcagggttgtgcaatagcaaagcagctgggtgcagaaatctacctggaaggctcagctttcacctcagaaaagagcatccacagcatctttcggacggcatccacgctgtgtctgaacaagcctagcccactgccccagaagagccctgtccgaagcctctccaaacgactgctccacctccccagtcgctctgaactcatctcttctaccttcaagaaggaaaaggccaaaagctgttccattatgtgaagtggaaattggaggggggagacaaccccctacttcctcccttggggtgcagaggcacggggagagggaggatgagacaatttaggacactggacatgagtttttcagatggccacggtgagggcttggaaggagacaggaatggggcgaggaaggagccaggcccggcatgaggacctgacgctgagagagaaccatcataccccaagccaggcactagattttggagggggcgactaccccagtgccccccccgctccagaggaaggaaagctgtgggggacggggggcatgctggcctcatgggcttgggggcctacagcagcctcaccttcagcttcatgcctcttccacacagcgtttccatgcaggtcaggggatgggaggggtccctgagcccttcccttcccctctaaggaggcagcaacggagagtggggaagtggagcggcagctcccttgggggcttagcccaggtgcttcgtaactgcaatcggaagtgcaggagctggtcagagccaatgagaaggaaacctcatctttgcatagcccatgcctcatggagaggtgacatcatacattcacatgcttctcacctaagtccccagggtccaagggagaagccccagacccccttctcttgcagagtgtgggggtggtggtgctgcaggggcagggctgggtgggggtcaccagactttttctgcccttagggtagtacagctggcatttgttttatagactcttgtctttggaattggggggagggggggagtgtttcaatctgttatatgttctgtgtttaatgaagaaaacctatttattaatgaaaaatataatacatataaag

SEQ ID NO: 1967 - DNA, 2386 bp, Homo sapiens
gcggcgcaggggcaagatggctgctgagaagcaggtcccaggcggcggcggcggcggcggcagtggcggcggcggtggcagtggcggcggcggtagcggcggtggacgtggtgccggaggggaagaaaataaagaaaacgaacgcccttcggccggatcgaaggcaaacaaagaatttggggatagcctgagtttggagattcttcagattattaaggaatcccagcagcagcatggtttacggcatggagattttcagaggtacagatacttgcttctggttctgatggatgctgaaagagcctggagctacgccatgcagctgaaacaggaagccaacactgaaccccgaaaacggtttcacttgttatctcgcctacgcaaagccgtgaagcatgcagaggaattggaacgcttgtgtgagagcaatcgcgtggatgccaagaccaaattagaggctcaggcttacacagcttacctctcaggaatgctacgttttgaacatcaagaatggaaagctgccattgaggcttttaacaaatgcaaaactatctatgagaagctagccagtgctttcacagaggagcaggctgtgctgtataaccaacgtgtggaagagatttcacccaacatccgctattgtgcatataatattggggaccagtcagccatcaatgaactcatgcagatgagattgaggtctgggggcactgagggtctcttggctgaaaaattggaggctttgatcactcagactcgagccaaacaggcagctaccatgagtgaagtggagtggagagggagaacggttccagtgaagattgacaaagtgcgcattttcttattaggactggctgataacgaagcagctattgtccaggctgaaagcgaagaaactaaggagcgcctgtttgaatcaatgctcagcgagtgtcgggacgccatccaggtggttcgggaggagctcaagccagatcagaaacagagagattatatccttgaaggagagccagggaaggtgtctaatcttcaatacttgcatagctacctgacttacatcaagctatcaacggcaatcaagcgtaatgagaacatggccaaaggtctgcagagggctctgctgcagcagcagccagaggatgacagcaagcgctcaccccggccccaggacctgatccgactctatgacatcatcttacagaatctggtggaattgctccagcttcctggtttagaggaagacaaagccttccagaaagagataggcctcaagactctggtgttcaaagcttacaggtgttttttcattgctcagtcctatgtgctggtgaagaagtggagcgaagcccttgtcctgtatgacagagtcctgaaatatgcaaatgaagtaaattctgatgctggcgccttcaagaacagcctaaaggacctgcctgatgtgcaagagctcatcactcaagtgcggtcagagaagtgctccctgcaggccgcagccatccttgatgcaaacgacgctcatcaaacagagacctcctcctcccaagtcaaggacaataagcctctggttgaacggtttgagacattctgcctggacccttcccttgtcaccaagcaagccaaccttgtgcacttcccaccaggcttccagcccattccctgcaagcctttgttctttgacctggccctcaaccatgtggctttcccaccccttgaggacgagttggaacagaagaccaagagtggcctcactggatacatcaagggcatctttggattcaggagctaaccaggctcttcctcgggggcgggggagattctgactcttaatctgtattgtgagaaaatcccagcaagttccatgatattaaatccaggtctgcattggcccggggcaagagtttaacatcttcggccctgcattcctacatcttgtgtctgtacacgttcttaagcagcgtgtcaggagagcaccctgttgtcttctggtaaatgtgtgcagggtcatcctgtctcctgtacctcctgggaaaggggccgctgctgtctggtgccctgtgagctgtgattgattgcctttggtcagtaatgcgttcaggagtccacaccaggcacagatggggccttgaaacgctttgtcatgcttcttcagtaccatggatttgaaatgaactcatccttgctgtgagcatccaggagcccttgagaagtttatctatgactatgaaactggcaacgtcaccccagaattacggtcagccttattccccttcacctcccagtgaacgctaagaagtttcagacaagcagagagctctatttttagaagaaatatgttacactcagaaatgatgaaaccaaatcttatattaaaaggcaaagatgacgg

SEQ ID NO: 1968 - DNA, 2690 bp, Homo sapiens
aaataatgatgaagaaaattcttcatgttgaaagacagtgctaccagatggatagctggattttcaggatggaaacagggaattgcgaatagtcttttttagcactggtgaacttgttatcctatcctgctatttatgagcttgtagggaatcaagatcttcctaataaaacagaatattctcttcgtgaagtcccaacatgtgttattggactttataattgatggcttatcagtggagagaaatcatgttcttgttagaataaatcttgttggtgggccattggaacggattttgcctccgaggttactcgaaaagagtgataatccatatccttggccaatgttttcatcatatccattgccaaactgctatctgtcagacattacaagaaatgctggtataaaacaagacaatgatcttgacaagcttttattatgcctcaaaatatctgataaacaaactgaatggatagaaaactgccaaagacaattttgcaaaatgatgaaagccaaacctgatataatcagtggagaggccttaatagaattacttgaaaaatttgtgcttcatctcactgaaagcccatctgaatgctacttcccttcagtggagtatacagctactgatgcaaatgtgaagaatgaaagtctttcatctgtgcagcagcttggcattaaaatgactgtcaggtatggcaaattcctcagtctcttaaaagatggtgcagaaaatgatcttacctgggttttaaagcattgtgagagattcctgaaacagcagcaaacttccataaaatcttctcttctctgcctgcaagggaattatgctggccatgactggtttgtatcttctctgttcatgataatgttgggagacaaagaaaaaacattccaatttcttcatcaattctccaggcttctgacttctgcttttctttggtcgccaaggctacatatttctagttaccttcctaatgacactgtagaatctggcatccatccagtatatttttgcagcacccattatattgaaatgctactgaaggctgagttgcctcttgtgttttcagcttttcacatgtctggttttgcaccatcacagatttgcctgcaatggataacccagtgtttttggaattacttagattggatagaaatctgccattatattgctacttgtgttttccttggtcctgattatcaagtgtatatctgtatagctgtattcaaacatttacagcaagacattctacagcacactcagactcaagatctgcaagttttcctaaaagaagaagcactgcatgggtttcgagtgagtgattattttgaatacatggaaattttggaacaaaactaccgaacagtgctgctgagagacatgcggaacattagactgcagagcacatagatcatgagacacacggtttaaatttaggttttatttatttttaaacacagcaggggggcttgatgtttttctgtgtctgtaacaacatttactttgtgaatatacatattgtaaatactgagaagtataacgatatatttaagtaggtatgagctcaatttgtgaattcatttttgtaaatttgttgttttgtaaggttattatagaatcagatctagcttacttttagttcttattcatgtttaagagttagtcctggccaggcgcggtggctcatgcctgtaatcccagcactttgggagtctgaggtgggcggatcacgaggtcaagagatcgagaccatcctggccaaaatggtgaaacctcgtctctgctaacaatactgaaattagctgggtgcagtgatgcgcctgtagtccctgctacttgggaggctgaggcaggagaatcgcttgaacccgggaggcggaggttgcagtgagccaagattgtgccactgtactccagccaggccacagagtgagactctgtctcaaaaaaaaaaaaaaaaaaaaaaagtcccaacttacatctcctttattcagatgatttaaatattgtttccagtgaatttggaaaggagaagtaatagtgtaaataatattttgactagctgcagaaagcccataagacaaggaaaagacagtatttcttccattctttatgtctgtacatgtaaaggaaaatggataaaactacagctgctgcttttacatgtggaagaacaatgatactatttaccatggcaagtggtaggaaaactgttgtccttggacataattgttttttaggagttgcttttgatacccatatcaatttataattctttgtttgaaatgaagtctttacatggttcattgaagagatagattggttatttcatactgataagcattctactcttatttgttatgcattttccttagtgatatattttacttgtactgaacttgaaaatataaaggagaatacatttctaaattattttaaatggctaacactatgatttgtcttatttaaatagatgtctctgcaccggtaagattaatacaacatgtgaatgtctattttttatatcttaactcacaatgagtatatgaaagataatacacgaatatattacattattcatttttagtcatgagtttatttcaataagtttttctaattgtagatactgttttttattctttccttgtatctaaatataaatcaaccattaaaatcattctaactct

SEQ ID NO: 1969 - DNA, 1603 bp, Homo sapiens
aattcaaccaatatcctaaggctataccatagttaatttcttattcttggacttttggtttgtgtcgaagatggggttttttgtttttgttgttctgaaaaatgctttgaagatatctttgcataaagctgtacttattcttctaaatttttagaagtagagtcaaaaagtataaagaattttaaagtttaatgtcaaattgctttctgaaagtttgtcccgctgtcagttcatactccccactgtcagtacaagtacttttctatttccccattgccccatgtcctcatagagtgggagtaggggaagtacagtgtgcatgtgtgcacatacacatttttaggtgttaccaacttggtagccaattaatatgtgcatcttttttaggtacagtgttgcatccatttcctcctgttggctctgcatttgaaatacagacttccattttgaactataccattttgacaaattcactgacaccaatgagattgtatctaccccatgttagggtttcaggttcactttgtgagtttgtatatagatacctaaaatcaaaccagcttagtcattattctcaccagagcagtcctagacatcacttctagaagttcttgctttctgtgcaaaacatgttctctcctatcaagtcaaaaattttatctcggtttttcccctcctctaaaagtaatttaaaatctggattaagttggaattccctatcagacatttttccgtgtgtccctgaagtgttcctcagttccttgcctgaagtcacctacttttatttatatgtccttttttttctttattcctaaattaagcattttaacttaaaggaacagtgaaaatgttacctgtgtgtccccatgaccttcagttttctaccctgaacagccaaacttcttaaatacaatgtgccctttccctgagctcacagggaactgagacctctcagctgccagcagatcaaatataaacagtcttattgacaggtcttccaggtatcctggtggatggggttggctcacaggcatccgaattttactgctatttttataatcactgaaggctaccttagtgttctgtgccacatcttttccttgcaggtgtactttgatttcatgagtgtaaattataatttcaaattaaatataagtttagggtatactttgattctctgtgagtaattatcttgtttgttaatgtgccagttaataacattaatatctaagacatagttttacagtagaagcatttccacttggaacagcttgagtaggaacatcctgagttaggtacacagtataaataatatctcccaggctgttaattttatcttctagagagattgacctgtcataagacatttctaactattatagaaagaggatacctgataagtagaaacacgtaaaatgtgcttggaagagattgttattgggcaagagcgtagtaaaggaaatacgggaataaaaatatacctggcggggtgcagtgactcacacctacaatcccagcactttgggaggtggaggcggtcagattacttgaagccaggagttcgagaccagcctggccaacatggcgaaaccccatctctact

SEQ ID NO: 1970 - DNA, 2221 bp, Homo sapiens
aagttgataagatgcagagaattgggggaatgtataataaatcaggtttcattgttatattatttaccacatgaatcaccttcctcctaaccattataggagccatgtgttcacatgtcatgtggaccagtatttaactgtggaaaccgcgggtggcatggagaaggaggcagtgtccgtgactgtgctgctctccgcagccccctgcctgctgtcctgtttcctcggctcctcggtgtctggactggcgttctgggtttcccagcagaaaactaaagggccagagaggtgtaaaaacacacaccacttggcaggtaataatttccccgcatgctatctttttagggatcctgaacacacagcctttcccagaagactgctccctccagctactgaggaatgatgacaagaaaaggccgaattgcagtgtctccatcagcagtttgctctccatgggcacacgatgacaaaatatcctgaagcgaaccactagtctgacctcagtagcaggattggaagcttcatgccatgggagctgtcaagaaaggcatcccaaagagaactgaaatttaaaaataataatagaccttcaggaacaggtgattgtccccatatactggggatgaaatacccaatgtaaccaaattccccagtaagatcacttagtttggcaatagtcttttcttttgagcatgttgaagtttatttgctcaatgaaggctgaaattataagtcagtatatatgtattactaagtagaacttgaggtaattatatgttttagtcaaaagcagtttctgtgggcttggtataaaccctactttgtgatttgctaaagcacaggatgttgactcaaaccaaaactagttttgtagttaatatgtgttgtgtttctgtgacttaatagtcaactagaaacgccacctacaacaacccaggtacttaagttttaaaagttttttttaaaacacttgtcaccatattttgaaaaatactaacatttggattactagttataaaagtgtaatttctactgtgtcataatcagccatgcagctggagacttgccctctttgtacagcaaagttgtgaaaaaaagtatttgcactacatttatttaaacattaggaaaaaaagccaacccatgcttttctttgccgagatgtagggctgtattattggctagtgagaagcctgggaacactaggactttgtgtgggctgattgcaggtatcagatccgggattatacaggtactgttggaagtatcttggggattttcctgataagaacagtagtgattgcataaaaaggacaggatgtaaagtgaaatcagtaaaatatcttagtagacagagggtgctgaaattttaacaaatgtgtaaaaagttcttcctatgcattaattttccagatacccttaaaatgtttaaggaatgtaattcaaaatactgtttaaaagagacatgtgaccatcattctcccagcgaatgtgaatcatttagtgtgctactcaaaattaggtgtaaatgtatatgtacactataagaataaaaatcgataccatttctttaaagctttctaaaataaacttaattatttctaatagttacattttaggctctcaaactatttttcttttgaaataactgctttctaccctaagatgttactcattgctgtcttctttttaacaggtgatttgaagatattaaagctagaaattggaactagaaaatcaaaagaattcaaggcatcttaacgtgacagttgaactcatttgattatacttaaaaaagtttattgcagttattgactctcaattttttttttttttttttttgagtgcagtggtgccattgttgctcactgcagcctcaatcttccaggctcaagagatcctcccacctcagcttccagagtagctgggactacaggtgcatgccacaccctgataatttttttttccccaatataaacgaggtcttgctatgtcctccagtctggtcttgaactcaagtgatccacccaccttggcctcccaaagtgctgggattacaggcgtgagccaccaaacccagccaccaattttactttaggtaaacttttattttcaagcttttgttggtgttgcaagtgtaaatctgttttataaaatgttctataaatataaccactattccttgtaagctatttaaaataaattttaaagtctttcaagt

SEQ ID NO: 1971 - DNA, 1924 bp, Homo sapiens
attggagccggcttggctggcgagcccggctgaggagcctcttgggtcgcacttaccgccgcgtccgctcccggtccctggcccctcagcggcatggcgtgcggggcgacgctgaagcggcccatggagttcgaggcggcgctgctgagccccggctccccgaagcggcggcgctgcgcccctctgcccggccccactccgggcctcaggcccccggacgccgagccgccgccgccgtttcagacgcagaccccaccgcagagtctgcagcagcccgccccgcccggcagcgagcggcgccttccaactccggagcaaatttttcagaacataaaacaagaatatagtcgttatcagaggtggagacatttagaagttgttcttaatcagagtgaagcttgtgcttcggaaagtcaacctcactcctcagcactcacagcacctagctctccaggttcctcatggatgaagaaggaccagcccacatttaccctccgacaagttggcataatatgtgagcgcctcttaaaagactatgaagataaaattcgggaggagtatgagcaaatcctcaataccaaactagcagaacaatatgaatcttttgtgaaattcacacatgatcagattatgcgacggtatgggacaaggccaacaagctatgtgtcatgaagctttgtcacatatctgggtaccaggtttgacctcaagagatggctgctgtacacttttgcaactggtttgatgtcacatttcagctccaactttgcatcctgagaacacttaaacgtttctgcaggtccattttatacaacttgaaagaccgtaaaactttctggttgccacaagcatatctttcttttctgctcatccaataaacagctgtgccctactgtgatagattttccaaacaaaaatacctggagcagcagtttagcaaaatatgccttcagtggcattcaacaaatggagtttccccaagcacagttctgtaagaagtgcgtgtgagagtgtgtgtatatgtgtgtatgtgtattttaagttattatttgtattgtgcaaaaattttttttttgatcttggggattctggctgtgaatttggtgcacgacaattatggtaaaaaaacatttgcttggtctaaagaagatcattaatgttttgtgaccatacaagttgtaacagtggattgtttttatgtgtaggtattgttaaatacagggactgtttccaggcacagaatatgaatcgtaagttaggatggacattagatgtgattatgatgataaagcgaaggtctgcggtcctatatctacagacacgtggtgagaaattagaacaaactggagacgggccattgacacatggactctgcctgggcatgttaggttaattctttgactccaagccttaaaatactcacatggagtcagcgctcacctcattcacacaattatcatagagctccctggacactgaacctctaaagggaaaaggtctaccctggagccaggagcatcagggttggcttgggagcatgagaggtgagcccagggctaggcctgggccaggccccggcagcactgctacttgggaggagccacttcacctttgtattagttattaaaaaatataatttgggctgggcgcagtggctcacgcctgtaatcccagcactttgggagtccgaggcatgcggatcacttgaggtcaggagttcgagaccaccctggccaatatggtgaaaccccatctctactaaaaatacaacaaagttagccgggcgtggtggcaggcgtctgtaatcccagctgcttgggaggctgaggcaggagaatcacttgaaccctggaggtggcggttgcagtgagcacagatcatgccactgcactccagcctgggcaacaaaacgagacttcgtctc

SEQ ID NO: 1972 - DNA, 1725 bp, Homo sapiens
agcctgagaggggagagcgagaaagagcgcgagcgagcgaggcctgggccttgcctgagtattctaccttgtaaatactgttatttgtatatactgtaaatgatgacatcggtgggcactaaccgagcccggggaaactgggaacaacctcaaaaccaaaaccagacacagcacaagcagcggccacaggccactgcagaacaaattagacttgcacagatgatttcggaccataatgatgctgactttgaggagaaggtgaaacaattgattgatattacaggcaagaaccaggatgaatgtgtgattgctttgcatgactgcaatggagatgtcaacagagctatcaatgttcttctggaaggaaacccagacacgcattcctgggagatggtcgggaagaagaagggagtctcaggccagaaggatggtggccagacgggggagaggtgccagccgtggacgagagtttcgaggtcaggaaaatggattggatggcaccaagagtggagggccttctggaagaggaacagaaagaggcagaaggggccgtggccgaggcagaggtggctctggtaggcgaggaggaaggttttctgctcaaggaatgggaacctttaacccagctgattatgcagagccagccaatactgatgataactatggcaatagcagtgtctcctccagtctcaatagtggcagtagcctgggcctcagcctaggcagcaactccactgtcacagcctcgactcgaagctcagttgctacgacttcaggaaaagctcctcccaacctccctcctggggtcccgccgttgttgcctaatccgtatattatggctccagggctgttacatgcctacccgccacaagtatatggttatgatgacttgcagatgcttcagacaagatttccattggattactacagcatcccatttcccacacccactactccgctgactgggagggatggtagcctggccagcaacccttattctggtgacctcacaaagttcggccgtggggatgcctcctccccagccccggccacaaccttggcccaaccccaacagaaccagacgcagactcaccataccacgcagcagacattcctgaacccggcgctgcctcctggctacagttacaccagcctgccatactatacaggggtcccgggcctccccagcaccttccagtatgggcctgctgtgttccctgtggctcctacctcttccaagcagcatggtgtgaatgtcagtgtgaatgcatcggccacccctttccaacagccgagtggatatgggtctcatggatacaacactggaagaaaatatccacccccttacaagcatttctggacggctgagagctaatttggcccaaggctgggggctgtgttttgtgtgtgtgtataaatttgcactgaagtcttgtttcagaaaccagaccactgaggagagcctgctgagctgaggccatggcctgcgtggcttggggaaatgagttggtggataccttctgggcttttgaacttgcccctcccccatttccctctcccccatgtgtctgaccctgtcttacccatttcaagttcaagcggtgcagcaccttcgaagcatcaatgcacacacctgctgttgcttttgatttctggaaggcatgtagtttcaacttgtaacaaaaatatttgtagtcttcaataaactgtggtatttctttagct

SEQ ID NO: 1973 - DNA, 2146 bp, Homo sapiens
tgacggcagcctgggcaatatagggagaaccccgtctctttagaaaaaaaacaaaaattagctgggtgtggtggcatgtaccattggtctcagctacgcaggaggctgaggtgggaagatcgcttgggcatgggaggtcgaggctgcagtgagccatgatcactgcactccagcctgggtgacaaagcaaaactctgtctcaaaaaaaaaaaaaaaaaaaagtcactctcattcaaccacttttactgcacactaacattgggtggttggatggaatgggagacagaaagaagcatgtggtctcaggcctcacctgcatctccagcgtatgaaatagaaatccggagatacactggttgacgcgtcacggaggtcagccctgttcccttagtccccagggcaccccacaaatgagagggttctatgagatgtactttgaaaaccactaacttagggcaagaggggccaggaggcatcatctgaaaaagatttggaaaaaggggaaatctgcctgtgccgggttaattctggccctgacccagccttctcctcttgcccctgggatcctccttggagaagcagaggcagcattttttttttaaccatctgtctccaaagtggggtcatcctgatttagggacacaaaattaggtaatgtctgacctttgggcttagcctggaccatatccttttcagcccagtacctgaggcctcaaggaagaactcaactcccagcaccaggtcacaaccaccacctggtgttggaaggggatcaccacactccttggctgtggtgtctgccccaggcagggaaagtaggcagtgggattcaataaatgtatcaagcaacagcgagcaccttcctgctccgtgactgttcttggcccctctagcagccctcagatctttagatcggccctcgcagggtcagcagaacaggcagccgtgaaggtgaggggcatggaggaatctgttgcctggctgaagggccctcagattaactactgtgcccccaatgatctcctaggagctttgcctgacaagggggatctgatgcacgacccagcaatggatgaagagctggaacggctgtaagtgtcaagtgggaggatactgcccccttgtgggggccagacgggtcggacacggctgtgccccatctggggccaacaccacttgtctgtaacatcccacatctgccagggaagggtctgggggccagtggaggcctgaggtgtccctccctctgagtcctttgggggctgcagcccaggggtttaccctagtgttaagagtgggcatggaggccctgctctctgtacaggaggcctctcgctgccctccaggcttcttcccttcttcaggctggcccaggtcccaggcctggtcaactcggtcacagccagtccagaggccagttgcctgccttcccggacccctccccgggttggctctccctggagacctctccatcattcccgaaaagtggatggagagagtgatggctccactgaagagacagacgagtcggagacttgaggagtccaaagggtcctgtccacagcgccctgtacctgctcccacccagcccttggtgtgcccacccagcctcctctccagcaccttgctgtgctgccctctgctgctgacaaggtgaataacagccccaagaccagccagaggggctctgatgatcagcccagccagtggccccggaaggtgaatggcctgctctccctggccctatcagcctgtgaacttcacttaggccccaagctgacagactgtgctgaggccaccttgtcacgccgtagcctgttagtcctcctaacctcttaagagcagtctcttctgagccagcctctgcgggtcccccaataaggttcatctcctcacagcaactccattaagggggagaacccgaatagccacgcagggccttgcaccatcaagggtgacacctgcgacgcaagtaccaggaggacataaccgctgtggcctgttggagaacagccagtagccttggtaatatgaagggtgggccagaagatgatttcacttgcaaaaactgcctcaagtcttgacccctttgtgtctaatagctaaacaaacatgtgaaacgaataaaaagtccctcatgtctggt

SEQ ID NO: 1974 - DNA, 3584 bp, Homo sapiens
cttacagcctctttctgaaaggctgacacttcttgccattttcatatcaacttttctctttagtctgacatggcaatttaatcaatttatgatgctgatgcaagcattagtgctgttcacactggactccctggacatgctgccagcagtgaaggcgacatggctgtatggaatacagataacaagtttactcctggtctgcattcttcagttttttaattccatgattcttggatcactgcttatcagttttaacctttcagtattcattgcaagaaaacttcagaaaaatctgaaaactggaagcttccttaataggcttgggaaacttttgttacatttatttatggttttatgtttgacactttttctcaacaacataattaagaaaattcttaacctgaagtcagatgaacacatatttaaatttctgaaggcaaaatttgggcttggagcaacaagggattttgatgcaaatctctatctgtgtgaagaagcttttggcctcctgccttttaatacatttggaaggctttcagatactctgcttttttatgcttacatattcgttctgtccatcacagtgattgtagcattcgttgttgcctttcataatctcagtgattctacaaatcaacaatccgtgggtaaaatggaaaaaggcacagttgacctgaaaccagaaactgcctacaacttaatacataccattctgtttggattcttggcattgagtacaatgagaatgaagtacctctggacgtcacacatgtgtgtgttcgcatcattcggcctatgtagccctgaaatatgggagttacttctgaagtcagtccatctttataacccaaagaggatatgtataatgcgatattcagtaccgatattaatactgctgtatctatgctataagaaccagaagtcctgacacctgatttcccatcactagcaattttcctgattcacccacccaggagacaagatttgaatgagcagtaaaaatggccaaagatgagatgaccaaaaaaacagtgataggtctcaaacacagccagagatcaatcagttctggccaggaatgatggatgaactctccgagttgagagaattctatgatccagatacagtggagctgatgaactggattaactctaacactccaagaaaggctgtgtttgcgggaagcatgcagttgctggccggagtcaagctgtgcacgggaaggaccctaaccaaccacccgcactatgaagacagcagcctgagagagcggaccagagcggtttatcagatatatgccaagagggcaccagaggaagtgcatgccctcctaaggtccttcggcactgactacgtaatcctggaagacagcatctgctacgagcggaggcaccgccggggctgccgactccgggacctgctggacattgccaacggccacgccggctttcagaggctaagttgcactccagagcagaaaagcagcaagccgcttctcccttctcccttctgaggaaagtgttcttggagctatgccaggtctcagtagagcaaacagattttcaccctttagaggtgtgatgtgtgctgtaattaatggtatgaaagccaatggatatttgtaaacaagttggacaaagtgacaaacctagcctaaatttgaaaaaaaaaaatcttgactgtacagaatttgagattcagatttttgcccgaggagaatcatagttcataactgtcttgagttcagaggtggtatagaccagagacatccatttaaattttgatttgagtgtgactttttcagttatttatttatttatttatttatttttagagacagggtctcactctgtcactcagactggaatgcagtggcgtgatcttggcttactgcagcctcaaccttccaggctcaagtgatcctcccacttcagcctcccaagtagctgggaccacaggcatacatcaccatacccagctaattttgtttattttttgtaaagatggagtctggctatgttgcccggatgagtctcagactcctgatccaagcgatcctcctgcctcagcctcccaaagtgctgggatttcaggcatgagccaccacgcctggcctaaatgtgactttttctgatgagttagagagctttctctgatcactgtagttctctgtatttcatttctatgagagagacagtatagtatgttcctgagagcaagcagacctgagttctagttctggctttcccgttaatgggatcatcgtgtgacgctgcactctccttctcagccttggtctgcacttctgaagggggaaaaggatggccctgatgatctccagatgatggatggcccaggagagaatgatcctgatttgaaacctgcagaccaccctcgcttctgtgaagagatcaaaagaaacctgcctccctacgtggcctacttcaccagagtgttccagaacaaaaccttccacgtttacaagctgtccagaaacaagtagcgcagatttctgcccagtgtctatttttgatacggagaaactgcatcatgatgaaactcaatagatgacgtttcctatgtaagtaggtagcccaaaccttcaagctgtgatatgagtaagttctacagatgtttacacaagtgttgccatctttgaaagcatcttctacaagcagaagtctttttcgttgtgtgtctatctttctcattaatgttctttagcctaaatgttaacaactttctaagagtgacctagaattatgttgttggagagaatgatgtgtgttccatggatacctggataggcacataacatgttggaagatgagcacctgctcaggatttgaaatacgtttaattttcaggtgacttaagacagctatgattgaatcaactagagatgatgatcgacttatttaatatgatttcactggtgaagaccaattggtagctttttaaaaagcactttagtgtcctgttttaccttaaaatgttataatattttccagttgtcatgctgtcaacattaacaaaaaaaatcatgttaaggctttgtatcaaacattttgttacactctgtctgaaatgtaatgtggagtacttcagcagtatgtgtcatgtattgtgtgtgtctgtgtgtgtgcatgtgcacacatgtgttttaatgctgggcacagaaaagtgttacaagttccatatcgtaagtccttaaaggggcagaaatatatgtagccaagtagaatttattacattttagtgttattattttaaaacttactgatactctttaacctctcctgcagtaatagttttgctttatttcttactcatttcaatttattgggtttgcaaaattttgtaaactttttgtgtttttagcctttttttacagcctagaatcttgcaaagtctgaatattttttaaatgttctatcttaactagttcactaatacagtatttttagcagacagcattttcagacagcattttcataccaagttggacttgtggtctccaatcttactgggaaggccctggtagtgtaattcttttccttattaaaaggtaaccaagtgcctct

SEQ ID NO: 1975 - DNA, 2195 bp, Homo sapiens
gcgctgctcttccccgcggagcccgcgcagtccgcgcagccctcatcgcaactgggcccgcgcgcaggccttacataggaagtccttctaaagagctgcctgccagctgcccttccccagatcccgaatatcctcctggccaggtggagcagagaacagttcctcagctggtcatgctgagctcataccctgatggctgctccatgaggtcaagactgggtctcctccctcctcccccttcaccaatgcctggtctcacggggctagttttgacccccacgctatggcatcatcgacctccctcccagctcctggctctcggcctaagaagcctctaggcaagatggctgactggttcaggcagaccctgctgaagaagcccaagaagaggcccaactccccagaaagcacctccagcgatgcttcacagcctacctcacaggacaacccactacccccaagcctcagctcagtcacgtctcccagcctgccacccacacatgcgagtgacagtggcagtagtcgctggagcaaagactatgacgtctgcgtgtgccacagtgaggaagacctggtggccgcccaggacctggtctcctacttggaaggcagcactgccagcctgcgctgcttcctgcaactccgggatgcaaccccaggcggcgctatagtgtccgagctgtgccaggcactgagcagtagtcactgccgggtgctgctcatcacgccgggcttccttcaggacccctggtgcaagtaccagatgctgcaggccctgaccgaggctccaggggccgagggctgcaccatccccctgctgtcgggcctcagcagagctgcctacccacctgagctccgattcatgtactacgtcgatggcaggggccctgatggtggctttcgtcaagtcaaagaagctgtcatgcgttatctgcagacactcagttgacacttgttatatcatgggaccccggaaattggagtgaagctagaaacagaaaacccatgcagggcctcggattcccacaaatgtgacaagaggtatagggagtgagtcgcagcgctttgctcgtgaccctgggatcagagcacccatcaggcttccattactgtgggctccctaagaagaccatggagagcttggggactcccccaggaaggccgtgaagctggggattccccctaggaaagccatgaggaagctggggactccccaagaaggccatgaggaagccagaaattggaggtggtaggaagtggtactgatcaatgatggccagcaggactcatctcctgcctaactggacaggaagcctggcacccacttctgtcttcccctggaactgggcactggcgtacactggtatccctcctaaagaagtgactcacctgactgatcagcaagaagcctagattgcaggcctcaccatggatggtcttcctagttgcctggggaaaccctggaatgggcatcaggagaaagcaacaagaatccagtccttcacactcacactactctgttcctcttcccagagacatcgattcacttcaaagagctgtagggaagatgcagtcagcactgcactgtattttttatttattgcctaggtgccattaaagacacaaacctagaagcctagaggccattctgaatatgggggtggggtggtggagggagcaagtgaagagatgggaatccagggctcagggttcaacgccttcacctgagatcacaagcccatggatgctgtgacatctgggagcttcatcagtggtctggctaaagctgatactttcacagtcaccatcttcacctttggactgggaagaatcaccatttttcttctggcagatgactgtattccttataggacaggcaaggtttcattcatctgttctcagtaagtttgttgttgaactgaaatgaatttcattatttcctccaatgtgtacttttgtgcccccctctcacttctccctatcatgacccctcttttgctgaaaaaaatttttattattttttctatctctagttctagaaagagaaaatttattttttaaattataaactattttgccaggcgccatggctcacacctgtaatctcagcactttgggaggccgaggcaggtggatcacctgaggtcaggagttcaagactagcctggccaacgtggtgaaaccctgtctctact

SEQ ID NO: 1976 - DNA, 2346 bp, Homo sapiens
aaaaaagacagcttttcttcctggagaacagactttttcagcaggattttcctttcagtgaaacataatttgacttgaaaggaacccagggaaaagtgtccaggtgtgagcatgagcgggtagaggtgtgcccttgtttgcttcaggctgtctgcttttcgcccctgactgttttttctgtttctggccatggaggaagagaaagatgacagcccacaggctgacttctgcctgggcaccgccctgcactcttggggactgtggttcacggaggaaggttcaccgtccaccatgctgacggggattgcagttggagccctcctggccctggccttggttggtgtcctcatccttttcatgttcagaaggcttagacaatttcgacaagcacagcccactcctcagtaccggttccggaagagagacaaagtgatgttttacggccggaagatcatgaggaaggtgaccacactccccaacacccttgtggagaacactgccctgccccggcagcgggccaggaagaggaccaaggtgctgtctttggccaagaggattctgcgtttcaagaaggaatacccggccctgcagcccaaggagcccccgccctccctgctggaggccgacctcacggagtttgacgtgaagaattctcacctgccatcggaagttctgtacatgctgaaaaacgttcgggtcctgggccactttgagaagccgctgttcctggagctttgcaaacacatcgtctttgtgcagctgcaggaaggggagcacgtcctccagcccagggagccggaccccagcatctgtgtggtgcaggacgggcggctggaggtctgcatccaggacactgacggcaccgaggtggtggtgaaagaggttctggcgggagacagcgtccacagcctgctcagcatcctggacatcatcaccggccatgctgcaccttacaaaacggtctccgtccgcgcggccatcccgtccaccatcctccggcttccagctgcggcttttcatggagtttttgagaaatatccggaaactctggtgagggtggtgcagatcatcatggtgcggctgcagagggtgacctttctggctctgcacaactacctcggcctgaccacagagctcttcaacgctgagagccaggccatccctctcgtgtctgtagccagtgtggctgccgggaaggccaagaagcaggtgttctatggcgaagaagagcggcttaaaaagccaccgcggctccaggagtcctgtgactcagatcacgggggcggccgcccggcagctgctgggcccctgctgaagaggagccactccgtccccgcgccttccattcgcaaacagatcttggaggagctggagaagcccggggcaggtgaccctgacccttcggccccacaagctcgtgtcctctgtctcttgcctcagtgcctgggtggcttgccgcccacagacaccagcgtctactcctcagcctcatccgactgctgtggctgctccatgcctgtgctgtgcatcatgggccacaagcctcatgtgactgttgacacctaaactcactcatgccagctaaactcattcacgccagttaaactcattcatactagctaaactcatttgtaccagctaaactcactcacaccagttaaactcactcacaccagttaaactcattcgtaccagctaaactcactcatgccagctaaactcactcacgccggctaaactcactcgtaccagctaaactcattcgtaccagctaaactcattcataccagctaaactcactcatgccagctaaactcactcacgccggctaaactcactcataccagctaaactcattcgtaccagctaaactcattcgtaccagctaaactcactcgtaccagctaaactcactcacaccagctaaactcacttgtaccagctaaactcactcatgccagctaaactcactcatgccagctaaattcacgccagctaaactcactcgtacccgctaaactcactcatgccaattaaactcattcgtaccagctaaactcactcatgccagccacacttcaggtgctcactggccgcccatggttagcggccacttccggcccagcatgtgctgctctctgtcttctggtgggcgtgcagtggaggctgcctgtgctctgattctgtcttcttgatgaactgtgaggccgagcaccttggatagccttctttgtcttttgcccattttcctcttagctttcattttcttattattaataggaattctttatatattctctgtatgattcctttgtcaagtatgtatattaaaaatattttctattc

SEQ ID NO: 1977 - DNA, 2038 bp, Homo sapiens
tattttatttgagacagactcttgttctgttgccaggctggagtgcagtggcacgatctcggctcactgcaagctccgccttctgggttcacgccattctcctgcctcagcctctcaagtagctgggactacaggtgcctgccaccacgccaagctaattttttgtatttttagtagagacgaggtttcaccgtgttagccaggatggtctcgatctcctgaccttgtgatccacctgcctcggcctcccaaagtgctgggattacaggtgtgagccaccactcctggccggccaggatggtcttgatctactgacctcgtgatctgcccgccttggcctcccaaagtgctgggattacaggtgtgagccaccgtgcccggccgcctggctgacattttcaaagatggaaagtggatggagaattaagagctgaaattatgtgttcccaaaaggtggggccaaaaggcaagtggaattacctgccagagccccggaggggctcaggaactccaccaggaccatggagggtgaggtgaggcttcggccaacaatggggaccgatggaaagtctatgtaaggatcagtggggtgccgctcccccacatcccacccacaccccacccacatcatgcagccagcagctacacctctgggtggggtggtgtgacgtgaggattatttgaaggataaatggaaccagagaagcttcgggtcttaggcgtactggggaggggtgggtgagaggctagaccaaaaaatggggttaagtgaaagtccatagatactgctggggggcctcccatgaaagaacatgcttgacccccaagaaccttcagagaaacccaccctctgacaggctctgcccatgcccacaaagatctgagctgcttggctggttgtttttgtaacaggcatgctctgttgctattttttaatgacaggaggaacttggtgtacctggcactttgggctgcacagacgcattagcagactcaccttgtcctgtttcatccctcgccctccacaatttcttattttctttctttctctttttattttttgagacagagtttcactcttgttacccaggctggagtgcaatgatgcgatcttggttcaccgaaacctccgcctcccgggttcaagcgattctcctgctgcagcctctcggtagctgggattacaggcatgtgccaccatgcccggctaattgtttttgtatttttagtagagacggggtttctccatgttggtcaggctggtctggaactcctgacctcaggtgatccacctgcctcggcctcccaaagtgccgggattacaggtatgagccactgcgcccagcccacaatatcttattttcatgtttttttgtgtgttttgttttatttttcgagatggagtctctctgttgcccaagctggagtgcaatggcgcgatcttggctcacttcctgggttcaagcgattctcctgccttagcctcccaagtaactgggattgcaggcacccaccatcatgccctgctaaattttgtacttttgtagagatggagtttcaccatgttggtcaggctggtcttgaactgctgacctcaggtgatctgcccaccttggcctcccaaagtgctgggattacaggtgtgagccaccatgcctggactcgttgttgttgttgtttttaattagtgaggagctacaagaacacatttataaaaattaagaggaaacagccccactgcatttgagaaggttaccatttccttcgaagttcctgctgttgccccttcctggtgggggagacactgtcctgtttcagtcattccgttgctttgctttatagttttattaatgtgtttgtgttggctttgcatgttttcaaatatatgaatgaaatcatgcagagtttattcttttacagtttgccttttcacttgattatgttcctgagatgtatccggattattgtgtgtagctgtatggcattccttttccctgctgcctagtgatccattgaaaatacaataattgatttttct

SEQ ID NO: 1978 - DNA, 2330 bp, Homo sapiens
atgaatgaacctactggactccagtgagattagcaaataccttagctatttcattgcaataaaaaccatttttcagtcactcatgtccctctgggttcttcagtgatattatttgatgtatgctttattctgtgccatttattgtactgagtattttgcatgaatgatcttatgtaatcatcagtaatctgttaaatcagtatcattattattcttgtttcattgatattgaaatataaaagtaggttatcataaattaaaaggctacgggtagtgataaaattttattccaggtagtatctccagaatatgaattcttaatcactactcgtgtttattcattccacatgtcactgaatgcctactatgtctagcaaagttctagattctcttgtagttgcattactcagttattggctagataaccctaaacactgcagaaagctgcactctgcccccttgggattgcctggctccataagattattaccgttgctgagtttggggacccacttgagcaaatctagcatacttaaaaggaagtttttattctggagaagttttgttaacaaaacatctattggctgggcagagtggctcataactgtaatctcagcacttcgggatgccaaagtgggcagatcacctgaggtcagaagtttgagaccagcctggccaacgtggtggagccctgtctctactaaaaacacaaaaaaattgggtaggtatggtggtgcacgcctgtggtcccagctattcgggaggctgaggcaggacaatcacttgaaccggggagacagaggttgcagtgagccgagattgtgccactgccctccagcctgggcaacaaagtgagactctatctcaaaacacaaacatacacacatacatacagacccacacacacatacagacacacacacacacgtctatttagcatctgtcccaggcagtgcttctcaatagcatgttaatagatgctaaaggacctttagttaggaggtcaactggtctacctctgtcacttagtagacaagaaggttgccctaaaatatacactaagacagtatgcattacaaaaaagccacaataaggacatagcttaggagaaatgttatgatctctcttcaccagtctccttatatgacactggttcaattcagaagtagaggtgaagatagttaatatcctaggaataaatgttaaatctcccttcccctttcctcacagtattatagtcaattctcataaggaaatggccctaagttacaacattaagcttttctattcacttctaataactgaaattccgcccaactgcctcctcacttgaattccatgtactttttttccaaataaattaaatgactttctctaagtcaaatgctattaaaattcttgttgttcctcaaactctgctttcttgtagtatcaggtttattgtgacttgaatgagacttatttgtaaatggatgtattttccattccatcttgctcttgcatacacacacatacactgaaattcagacttttctgctagctcttagaaaacaaaagcaatgtgtgattcatgtgtcacccactgtgggaagttggatgttgcattgcatttgtctctcagtcttaaaagtcaatatggcaaagtcattagcggcagagcccagaagatatccctgcccatgagctgtggagatctggacaagttactttacccaactccaagactcagtgaatgctcttatccgtaaaatggggacaatgataatatgtcttcctccctttgggtatttgatgattaaatgagaaaacacgtcacacagtcaattcagtgcttcgcgcacaataaaagcttaataaatactagttatgattatgtttagccaacatgtgttggcatctgacactaaataaatacttgtccaatggaaatgaccagaatttagtgcccctaacacttcactgtagtatttgccatatggataagcaatctttattatgctatttggatttagttccaaagctaaccccacctccttatattgaagccagctcctaggccacctggataacttttctggcatttcaatgaacacaccaatacaatacaagcataattagactttctggattttagatctattctcaagtatatattgtatagagaaccaagatgttcaaggactgtagagccagttataggtttggttttaaagcacttcatcttagactcatttcctttctggctgatgttagttaaaataatataagcctgggcttaagattgtatctctgagtgagacaaaataatagatgattctatctccctttag

SEQ ID NO: 1979 - DNA, 1826 bp, Homo sapiens
tgtcactctgacctcagtgtaggcactgcctcctctgggaagtctttgctgacctgaaaggctcagcctcttgtgcttcctaagcttttctcagagcatttagcttcattagtaattaaacttccattagtgaaatgatctgattaatggttgtcactcccagattttaattctaacttttttttttttttttttttttgagacccagtctctttttttttgagacagtctcattctgccgcccagtctggagtgcaacgacgtgatctcggctcacggtgacctccacctcccaggttcaagtgattctcgtgcctcagcctcctgagtagctgggacgacagatgcatgccaccacgcctggcaaatattttgtattttagtagagacgggggtttctgccgtgttggcctggctggtctcaaactcctgagttcgggtgatccgcctgcctcggtctcccggggtgccgggattacaggcgtgagccaccgtgcccggcctctaaacacttgtggccctgtcattcacccagcactcaaaaggtcgtctcacctgcccttttgggagctgggagagacagctcaaattgtcaccgcccccccaccgccccgtgctcctctgacagggctgtgggtggagccagctccagtccccgcgcccagcacagaggcaggcacggtgcacactgcctcaacagctcgaccaggagagtgggcagctgtacatctagggtgcccagctcagtcccaggcctcagcagagcccatcttgcctcactgcacacagcactgagcctgtggctggtgaggagtgaaacctagtgtgggactctagtgcctcccttcaacctgaaacatagccatcagggcttacggtagcaaaggaaggtctttattcaggaggcgggggctctgggctggcagtcggggatgcagggggaccctggcggtaggcacccagcaggatggcattgatgtgctccagggtcaggttgctgaagaccatgttcagatgctgtatcccgtgcaggggcagcaggtgcacaggctgtggctggcggccctgccacaggccacagagctcggtgctgcgggtcgccaccgtgtcatcaccatcctcatagagcacacccacagggtccgtgtaggggaagccgtggtcgtagatgtaggtgcggggcgtgggcaggcccacgccgtaaagacagtatacttccacaccaggtgctgggagtcctgccaggaggtcacgtgactgcagccacatgtaccagccttcctcaaagtgcaggtctgcaaagaagcgttggaagtcacggcctgtgtagttgaagctgggtgtggaaatgaacacgtggtcctcaggccacgccatgcgagagggaaacatccagggggaggtggtggttatgcgctgctcctctttcagcttgatgctggacatgatggggatgccctggttgtcacctgtggatatggagcaaggtgggacagggagccaggcctggctacccctggcccacaacctgctgagtgtaggctcagccagatgctcaatcttgtccctgcccaatctagacacagactctaagccacaggcttgagcaggcctgatattcaatgatgctcagtgtcagcttactcaatgagaagccctgataagacctctgttgggtggagctgtagggcttcaaaaggatggcagggacaggcaccatggctcacccctgtaatcccggcactttgggaggctgaggcaggaggatcacttgaggccaggagtccgtgaccagactgggcaatgcagtgagaccctgtctctac

SEQ ID NO: 1980 - DNA, 2375 bp, Homo sapiens
tgttacgtgttcattttcgactcaaggcgtacacgtgcagatgtgtcacatgttcattttcggctcaaggcgtacacgtgcaggtgtgttacgtgttcattttcggctcaaggcttacacgtgcaggtgtgccacatgttcattttcggttcaaggcgtacacgtgcaggtgtgttacgtgttcattttcggctcaaggcgtacacgtgcaggtgtgccacatgtttattttcggttcaaggcgtacacgtgcaggtgtgttacgtgttcattttcggctcaaggcgtacacgtgcaggtgtgttacgtgttcattttcggttcaaggcgtacacgtgcaggtgtgttacgtgttcattttcggctcaaggcgtacacgtgcaggtgtgtcacatgggtaaatcaagtgtcactggggtttggtgtgcagataattttgttgcccaggtaatcagcacagtacctgatgtttttcagtcttcaccctcctcccattctccaccctctacattttcctttaaaaaaaagttttcctcccagcactttgggaggctgaggcgggcagatcacgaggtcaggagttcgagatcaccctgactaacatggtgaaaccctgtctctactaaaaatacaaaaattagccaggtgtggtggcggacgccttaatcccagctactcaggaggctgaggcaggagaatcgcttgaacccagggagcagaggttgcagtgagccgagatcgcgccattgcactccagcctgggcgacagagcaagactccctctcaaaaaaaaaaaagaaaaaaaaaatttcctggccgggtggggtggctgacacctataatctcagcactttgggagaccgaggcaggcggattacttgagttcaggagtttgagaccagcttggccaatatggggaaaccccatctctactaaaaacacaaaaatgagccggacgtggtggcgtgtgcctggaatcccagctactcaggaggctgaggcaggagaatcacttgaacccaggaggcggaggttgcagcgagccgggatcgcgccactgcactccagcctgggcaacagagcaagactctgtcttaaaaaaaaaaaaagtttccctgattaaaaaatacacatttgaaaaccactggttttgcctttctgtgtgaaggctgactcagaaccgggttttatcatttctttggcagtagcactaatgagtttctgtatttcttgctgagttttttctgtgactgatacattcatttatgagggtggtttaatacatagagggaatttttctctgtgtgaaatgtgttggccagaattgggaccagccattatctcctcagtactaaacctagatttgaacctaaggtatcactcattacttattatttattgaataccttatattcaataatattgtacaatatgaggaaaaaaatgaaatgtcaggacttggggaaagaagatagcttaggaaagggtggggaagagatcattgaaccatagatttgtttctgatatggtcagcagtcaaaaacagaaaagttggctgggtatgatggctcattcctataatctcaggactttgggggaccagggcaggtggattgctctagcccaggaggtcgagaccagcctgggcaacagagagagaccctgtttctgttttttgtagagatggggttcccactgtattgcccaggctggtctcgtactcttggactcaagtgatcttcctgcctcaccctcccaaggtttggggattacaggcgtgagccaccatgcctggcctggtttagcttttaataagtatctgtgctcagtatgggggtctttcacttctaaatcatgtggaaaattgaaattcttttaatgcctgaaaaatggaatctgtggagaaatgcaaaagaaggtgtatcaacagcttaaagaaagacagatggctcatggctattttgctatttttttgtttggttttggtggggggggggtttgagacggggtctcaatgtgtcacccaggctggagtgtagtggcacagtcacagctcactgcggcctctacctcccaggctcaagtgatcctcccgcctcagcctcccattacaggggtgcaacatcatacctgaatagctaatttaaaaaaaaatttgtagaagtgggggtctcactatgttgtccaggctggtcttgaactcctgggctgaagtgatcctcccactgctggggttagaggcatgagccaccgtgcgtagcactcatggctattcttaataaagagaaatatggtttgggaggccgaggcgggcgtatcacgaggtcaggagatcgagaccatcctggctaacacagtgaaaccccatgtctact

SEQ ID NO: 1981 - DNA, 2303 bp, Homo sapiens
acttccctcggtctgggcttctctgaggcggcgagagatggtcaggtctggagctcgaccgggccaggtgttatcttcaggaaggcacactggacctgctaaattaacaaatggaaagaaagcgtaagtacttgaagacgtttacaacttcagatttcaaggaatttttcaggtctttgggctggatgacatgtcgtctaccccagaaaattaggtaggcctctaccatcacaagctctgaggaacaatttttcatgtctacccatgttaatcattttagtatttaacagtctttctgatcttcagaatgtgtttataaattcatcttgtacatggttggacaagctttcttgtctttgctggaaagaaaatgactacttactaatatattttgggaaaaatatttgtaagaatattaataagcttgttttccaggacctatttaagaaaaataccacgttttaatgcagattctggctattccatccattctgattcagaaagtcaggtaagattgaatagatacaatacacactattttaattagttttcaaatagtagctaaaaagtaggaataaaatgcaaagtattaattgctctaaggaagtatgaagtctgttgctttaaaacatcttttctaccaataatagtttgtaaataagcaaattttaaaactacataatttatattttttcctacactaacagtcatatacaaatgtattctaaatgactttatttcttacaggctgaaactgtacacgggcttgatggttgtgcttctttgctgagggacattttgagaaatgaagattcaggttttttttttttaattctttgctgatcaccttatctcaagtcattattttgatgtaacaaatttttgttttattaataggttcagaaacagcatatttagaaaacagatctaattctagacctttagaaagcaaaagatacggatcaaaaaagaaaagacatgaaaaacatactattcctttggtagtccagaaagaaacatcatcttcagataataagaaacagatacctaatgaagcttctgctagaagtgaaagagacacatcagacctagagcaaaactggtcattgcaagatcattatagaatgtattcacccataatataccaagccctctgtgagcacgtgcagactcagatgtcactgatgaatgacttgacttcaaagaacatccctaatggaattcctgctgtaccatgccatgctccctctcattctgaatctcaggcaactcctcattctagttatggcttatgtacctccaccccagtctggtcacttcagcggccaccctgccctccaaaggttcattctgaagttcaaactgatggcaacagtcagtttgcatcacaaggtaaaacagtttctgcaacctgtactgatgttctacggaattcatttaataccagtcctggagttccatgtagcctgcccaaaactgacatatcagctattccaacattgcagcaactgggccttgttaatggaattctgccacaacaaggaattcataaggaaacagacctactaaaatgtattcaaacatatttgtctctttttcgatctcatggaaaagaaccgcatctggacagtcagacacaccgaagccctactcagtcacaaccagctttcttggccactaatgaagaaatatgtgccagagagcaaattagagaggccacaagtgaaagaaaggatttaaacatacatgtgcgagatacaaaaacagtgaaggatgtacagaaggcaaaaaatgtgaacaagacagctgaaaaagttagaattataaaatatttgttgggagagctcaaggccctggtagcagaacaagaggattcagaaattcagaggttgattacagaaatggaggcatgtatatctgtacttccaacagtaagtggaaacacagatattcaagttgagatagcactggccatgcaaccattaagaagtgagaatgctcagttacgaaggcagttgagaattttgaaccagcaactcagagaacaacagaaaactcaaaaaccatctggtgctgtggattgcaaccttgaattgttttctcttcagtcattgaatatgtcactgcaaaatcaattggaggagtcactaaagagccaggaattactgcagagtaaaaatgaagagctgttaaaagtgattgaaaatcagaaagatgaaaacaaaaaaatttagtagtatatttaaagacaaagatcaaactatacttgaaaataaacagcaatatgatattgagataacaag

SEQ ID NO: 1982 - DNA, 2389 bp, Homo sapiens
ccgtgcacaccagtgatggccgccgtccccgtgcaccccagtgatggccgccgtccccgtgcacaccagtgagggccgccgtccccgtgcacaccagtgagggccgccgtccccgtgcaccccagtgagggccgccgtccccgtgcaccccagtgatggccgccgtccccgtgcaccccagtgatggccgccgtccccgtgcaccccagtgatggccgccgtccccgtgcaccccagtgatggccgccgtccccgtgcaccccagtgatggccgccgtccccgtgcaccccagtgatggccgccgtccccgtgcaccccagtgatggccgccgtccccgtgcaccccagtgatggccgccgtccccgtgcaccccagtgatggccgccgtccccgtgcacaccagtgatggccgccgtgcccgtgcaccccagtgatggccgccgtccccgtgcacaccagtgatggcctctgtcccccatgcactcccagacaggcaatgtccctgtgggcctgtcccaggctctgttctcagcaggctgggctcagccctggtgcagggagtgaggaggtgggagtagtagggaccagaaaaagtggcagctgttgacaactctgccatctctttctgaatgtaatgggaggtcctgtcttttcagcttgcaaggaaggagggtccgaggcaactccgctgttgcacatttagggacccctgaacttaaatgacagaatgccctgaccactctggaaggcactgtgttcatgtttgtgtgcttgactcttgatccgtaaaatggctgtttgtgcaggtcattaactgtgagattcagagagtaggtgcacacgtccctgcagagattccagcaggactgaaaaccagtagaaatatatcagcacctggatcttgcctcctgagtcagtaaggatatgccacagtcacgaaggcagtgggatttcgagggagggaagggaaggcggcaggcggggcatgccctccggggtgcccgaacacacctgctgcatccacatgtcttcagagccctctccctgtgggaggcctttttcaggacagccttggtgaactggaaacggaatcccagcccttggtggccctgcagtgacttggacctttccgaggtcaccctgccactgcgtgcccttcagtccctcctggcaggtgggggcacatcccccagccactcccatttcctgacattgtcactttgtataactggaagccttctgtgaaattttagttttcaaagcattatctggtgatgggcaacccagggcagcgaatcattcagaattttcttatctaggctaataaacataataaaatcaataaggactttgaaagtaactccactgggttcaggaaactgagtgtggccgccctgtggggtggtgtttggtgagtgcttcccggaggtgagtagttaattcacaggagtgactaatggcagcgtcccactcactcctccttccggggtcatggtctcaaggggtcactccatgcactggggatgtcagctcattacagaatgatatattcgggaagtgtctcagttctgagtgcctttgagggaatttgcacttccgttcccacacagccttgcattgtgtgtgttagaggctgtgggccttgggcaggaggggtgagtgttggcacatacctcccgtctctcccagccttctctgactctgactttccctcttgaaggctaccggctctctgaccagttccacgacatcctcattcgaaagtttgacaggcagggacgggggcagattgccttcgacgacttcatccagggctgcatcgtcctgcagaggttgacggatatattcagacgttacgacacggatcaggacggctggattcaggtgtcgtacgaacagtacctgtccatggtcttcagtatcgtatgaccctggcctctcgtgaagagcagcacaacatggaaagagccaaaatgtcacagttcctatctgtgagggaatggagcacaggtgcagttagatgctgttcttcctttagattttgtcacgtggggacccagctgtacatatgtggataagctgattaatggttttgcaactgtaatagtagctgtatcgttctaatgcagacattggatttggtgactgtctcattgtgccatgaggtaaatgtaatgtttcaggcattctgcttgcaaaaaaatctatcatgtgcttttctagatgtctctggttctatagtgcaaatgcttttattagccaataggaattttaaaataacatggaacttacacaaaaggcttttcatgtgccttacttttttaaaaaggagtttattgtattcattggaatatgtgacgtaagcaataaagggaatgttagacgtg

SEQ ID NO: 1983 - DNA, 2285 bp, Homo sapiens
aactaggctgcacaggcacgctgggcgcatgtccgcctcgccggggctgccagaatcttggaatcccaatccgtgaggttcctgggtgtgctggcatcaggacagcggtccacgaacgggtaatcctgatgaaaatcaacaaaatacacatgaagagacagcactgagagcgagttactgctcatttgattcatattgccaaactgaactctcttgttttcttgcaagatgaaaggagacaaccatgaatgagccactagactatttagcaaatgcttctgatttccccgattatgcagctgcttttggaaattgcactgatgaaaacatcccactcaagatgcactacctccctgttatttatggcattatcttcctcgtgggatttccaggcaatgcagtagtgatatccacttacattttcaaaatgagaccttggaagagcagcaccatcattatgctgaacctggcctgcacagatctgctgtatctgaccagcctccccttcctgattcactactatgccagtggcgaaaactggatctttggagatttcatgtgtaagtttatccgcttcagcttccatttcaacctgtatagcagcatcctcttcctcacctgtttcagcatcttccgctactgtgtgatcattcacccaatgagctgcttttccattcacaaaactcgatgtgcagttgtagcctgtgctgtggtgtggatcatttcactggtagctgtcattccgatgaccttcttgatcacatcaaccaacaggaccaacagatcagcctgtctcgacctcaccagttcggatgaactcaatactattaagtggtacaacctaattttgactgcaactactttctgcctccccttggtgatagtgacactttgctataccacgattatccacactctgacccatggactgcaaactgacagctgccttaagcagaaagcacgaaggctaaccattctgttactccttgcattttacgtatgttttttacccttccatatcttgagggtcattcggatcgaatctcgcctgctttcaatcagttgttccattgagaatcagatccatgaagcttacatcgtttctagaccattagctgctctgaacacctttggtaacctgttactatatgtggtggtcagcgacaactttcagcaggctgtctgctcaacagtgagatgcaaagtaagcgggaaccttgagcaagcaaagaaaattagttactcaaacaacccttgaaatatttcatttacttaaccaaaaacaaatacttgctgatactttacctagcatcctaagatgttcaggatgtctccctcaatggaactcctggtaaatactgtgtattcaagtaatcatgtgccaaagccagggcagagcttctagttctttgcaatccctttattgagctcctccactggggagatataagaatgggatgcatgtatatcagcaaagtattcagacatagtattacaagctattggaactcagaggcatcttagagaacatctgttcccaccaacttactatatatacacggaaaccaatttcttacccttgccctagattgctcagtaaatttgtgccaagataggagaaaaccaatcttttcactcatcatttcatgcttctctgcactctgggcctatttgtattgaaccattagacaattcaaaccactacttgtatctttcttaatatttattttttacatctcagagctctacaatttgtttccttcaagcttaactttgagattataaaactgggtttagccagttctgtatattacttcaagccagtaagatacccttgaaataatccaaggacgtccatgcaaatagttgaaattagtacctgcaatatatttggagtattatgtctttattgttgttaaaaagtttttattgaatgtatgaaaattatcaaattgtattcatcattattaacatgtcctggggaaggaagggaaactttctaggacagaagtcactttcagatgtcatgtatgtattgggtgttcaatcatatctaacactgttttgatttttgtgggaaaatattccaggaaacgctaattctctttagactccttgttcttttatgactacaatgaacatatgtctatgtgatagctaaagatatttttgaattgtatgtgtgcttaattatcggtaagtataaatatttgagaaaacacatggtctggatatttaaaaccctcataaacatgttggtacagttaataaacttatttataatt

SEQ ID NO: 1984 - DNA, 2612 bp, Homo sapiens
aatagcattttcaattaacagaagtgcaaggagctcctgtcggacctgtgttccatgaggaaggctttcactagcccttcatgataggttcaaacacttgaagacctgaggaatttcagagttgacatttagatattgaggtaacaggacatcttggagttgaaatttccagaatctttgctggaaagtctcataatctcaaaacaaaatcaagcaaatttggagcaaagaaagttgctgaaaatgtcaaggcatgaaatccaaggtaaaaagatggcctatcagaaggtccatgcagatcaaagagctccaggacactcacagtacttagacaatgatgaccttcaagccactgcccttgacttagagtgggacatggagaaggaactagaggagtctggttttgaccaattccagctagacagtgctgagaatcagaacctagggcattcagagactatagacctcaatcttgattccattcaaccagcaacttcacccaaaggaaggttccagagacttcaagaagaatctgactacattacccattatacacgatctgcaccaaagagcaatcgctgcaacttttgccacgtcttaaaaatgctttgcacagccaccattttatttatttttgggattttgataggttattatgtacatacaaattgcccttcagatgctccatcttcaggaacagttgatcctcagttatatcaagagattctcaagacaatccaggcagaagatattaagaagtctttcagaaatttggtacaactatataaaaatgaagatgacacggaaatttcaaagaagattaagactcagtggacctctttgggcctagaagatgtacagtttgtaaattactctgtgctgcttgatctgccaggcccttctcccagcactgtgactctgagcagcagtggtcaatgctttcatcctaatggccagccttgcagtgaagaagccagaaaagatagcagccaagacctgctctattcatatgcagcctattctgccaaaggaactctcaaggctgaagtcatcgatgtgagttatggaatggcagatgatttaaaaaggattaggaaaataaaaaacgtaacaaatcagatcgcactcctgaaattaggaaaattgccactgctttataagctttcctcattggaaaaggctggatttggaggtgttcttctgtatatcgatccttgtgatttgccaaagactgtgaatcctagccatgataccttcatggtgtcactgaatccaggaggagacccttctacgcctggttacccaagtgtcgatgaaagttttagacaaagccgatcaaacctcacctctctattagtgcagcccatctctgcatccctcgttgcaaaactgatctcttcgccaaaagctagaaccaaaaatgaagcgtgtagctctctagagcttccaaataatgaaataagagtcgtcagcatgcaagttcagacagtcacaaaattgaaaacagttactaatgttgttggatttgtaatgggcttgacatctccagaccggtatatcatagttggcagccatcatcacactgcacacagttataatggacaagaatgggccagtagtactgcaataatcacagcgtttatccgtgccttgatgtcaaaagttaagagagggtggagaccagaccgaactattgttttctgttcttggggaggaacagcttttggcaatattggctcatatgaaaggggagaggatttcaagaaggttcttcaaaaaaatgttgtggcttatattagcctccacagtcccataagggggaactctagtctgtatcctgtagcatcaccatctcttcagcaactggtagtagagaaaaataatttcaactgtaccagaagagcccagtgcccagaaaccaatatcagttctatacagatacaaggtgatgctgattatttcatcaaccatcttggagttcccatcgtgcagtttgcttacgaggacatcaaaacattagaggctgaataggccggacgcggtggctcatgcctgtcatctctgccctttgtgaggctgaggcgggaggatctcctgaccttgtgatccacccacctcggcctcccaaagtgctgggattacaggcgtgagccactgcgcccggccacattcagttcttatcaaagaaataacccagacttaatcttgaatgatacgattatgcccaatattaagtaaaaaatataagaaaaggttatcttaaatagatcttaggcaaaataccagctgatgaaggcatctgatgccttcatctgttcagtcatctccaaaaacagtaaaaataaccactttttgttgggcaatatgaaatttttaaaggagtagaataccaaatgatagaaacagactgcctgaattgagaattttgattttttaaagtgtgtttctttctaaattgctgttccttaatttgattaatttaattcatgtattatgattaaatctgaggcagatgagcttacaagtattgaaataattactaattaatcacaaatgtgaagttatgcatgatgtaaaaaatacaaacattctaattaaaggctttgcaacac

SEQ ID NO: 1985 - DNA, 2924 bp, Homo sapiens
caatggcaaaggctccgttctatcatcttttgttctgtttcgggatatggagtgattcctactcttcactgggtttggctcaatggaggaattggtgctcctattgtacaggactttgcaccccgtgtaattgtgatgtatatgattgctcttcttgctttcctattctacatttccaaagtcccagagcggtactttccaggacaactaaactacctcggatcaagccaccaaatatggcatatccttgcagtagtgatgttatattggtggcatcagtcaacagtgtatgtcatgcagtacagacatagcaagccttgtcctgactatgtttcacatttgtgaattaggtatggccacctggtgaattcagttgttaagcaatatataatggggaattgtataccccactatttctaagattcccattagttttccctttttcctttttaatatgagtaatgctttataaaaatgggaaaaaaagtatacttaaggatctgtagtaataactgctttacaaaatccttaaaactactaatttgctgcttgtacagaaagtgaaaattagttggcaatcataagaaacatctgaataacaacgatgaatgggaaactagtgttgaaataggattcattttacttagcaccagcttaatttccttaggaagggctcatctccattagaaatggagtcatcttatgtgcttaattattttcagttaattgtcaagtttaagtgcctaatcaaggcaagtgttgtttcagcctatgcttaatgcaagctaggatagtgattttaaataatcactaaaatcactagatttaaataatcactaaaatgatttgtgagaaactggcacttcagatattatatcctttagctataggttcttctctccctaagaacattagatattttagttttccagaacaaaagctttaaacttctgcagtaagttgagagaagggttgagaagaggaaaagaacttctcattttctatcagataagaatcacattagaaactaagtacaagattagacaacaaattatgtggtcaaataatatagtcattagccacctaaacattttaattccagatattatttaattccatataataactgaattcttgtgagtggattacaggtttttgatcccaaaattccagagctttcaactctctgaatttgtagtcctgaatatcccagtggtgggggttcccagcattgtgggtgctacttgcaaggccatagaatctagatggccctgtcttgaccctgaaatgaaccttaagccttagaacaaagtcatgcagatgccccatttgataataatcttattcacctgtgctctggtcctcggtttctgcatgtgttagcattgcattgataactcagaatcttgataaacacttaatatttgggcctgaagcattaaactttctttttaaaaaatagaactcactgccctatcatacattgtagccctcttattctttggtctttcatatgcattagttaaatcccttaaagtagacattcataaaaacttacattgtttattggagtataaaatattacccaagtttcttcatgagttgacatgagctgttttaaatactggtgtattttcagaacagtaaaattactgaatatcagaaaaaatgttaattgatgatgaagcttattcccaaaatgccttttgtgcatatgatacttggaaagtcactaatgtgcctcagttaatacatcagtaaaatgttgtgtttcttttccagtgtagtgtttttggaatataaattccccatgctagtatagtatctcagcaaagagaatttccccccaggaggctcagtaaaggaataccgtgtcttacccatcgttatgatggaaggctgctttgaaaatggctgttttaccttataaggttaaaattttgatccatatgttaagtgatagaagattttggtgcaacagtagtaggatatatttctcctagaacatcccttgttggcttacatgattttattgccttttaatagatattttgtcattttggccaaacaaaagacactgagtagttacacttaagttaaaaatgaggggaaaatcattattttaggtgtggagccatttttattataaaactttctcaaaataaaaaaacattgaatcatttcaatttttgcagtccctgtattagtatatgaatacatacttgccatttgaattaataacatgaaaagagtatactgtgtttttaaatccgtgtttctttgaatttaaagggtgtacaggtctttctgtagggaaaattattccatgtaaacatttcaactctgtatgaaaatgttaaatattgtaagaaagttatcctctcattttttcactgctatgatatatttattataaaatagggaatgaatgaatgaatatggattgctgttaactagaaacacttctgtatgtcagtcagcatttaatgaccacctactgtgtgcacagcactactggtaaaattttgaagacattgttaacattaaaaaatattttaaagttgtctacaaatctgagccttgtaatgatgtatatttaagttatttttgtttttatagattaaagtaagattatactatccagttttattactaaaaaagactggttttaattttaccaatgtgtgaactataaaagctttttgcctacagattttacattttaaaattatctatggctgttttaaattgtctagcaatttatatggttgtggttaactcatttaagaaacaattatctttctatattaagccattttcaaatagcaagacagtgcttgtctttttttgttattacactaactgcaattcagtaagctgcatgacaaaatatgtattatgtaaataaactgggtttactaaat

SEQ ID NO: 1986 - DNA, 2312 bp, Homo sapiens
tcatagaggtgccgggttcctattggttagttggttgtttttccgtctgagtgaatttttgccagtcttgtgagcagatgtacctgatgtattctcaatgttccaagaggttctggccttcagggtcacaggcagtagggggacagcataaggtctatgtaaaacccttccctctctgaccctctgttttcaaatctgtaaaatgggcaataagactagatgatttgtatatagcccaatgcatctctggaactctgtctaaacaccagccatctacttggaatgggccccaggactgtggtatttgcctgggccaggaaaggataagaaatcctgtcatgtgaagacagcttgagaggcttgagaaaagtggggctggggagaagcaggcttgtcagactccacccctgttgatgatcattcctgggaaggggtttctcgttctatgcaatcctaaaggacgaaactcacccatgggaggccgaattctccttgggatgaagaaatttctctttccctgtcatgagtgtccagccagggagcagggaggcagtgtcagggagggactctcatcctggaggaaatgggattccaagtcaaggatgctgaggctgtcagggagccagagaggggggtccaagtgcgggatgtgggtggctctgtggttcagtggctctgtggtagttcctagcactgcagacttcatgactccccacttaagtccaagtcacattgtctatcccagtgtgtagctctgtcaccctgcttgacacatccagtggcctacagcgactcttctctaaccccaccccctccaagctgggttctttgtggaagaaggacagggagctagagccaagccctaggcttgagagacacctgcatctataatccccgccaaggatgcccactcacctctctcatctgatcctcactctttgtggaagggaaagctcaaagggactctctctctctctctcttttttttttttttgagtagtacccttgccctcttcatggccacttcaaagtgaagccagcaaagtgataatactttatcatttagtattatcataaagtattaatactttgtcataaagtcctccttgagcccagggaccatggaagtcagctagaagagccctgagcaaggagcaaggacttgggcttctccacgctttgctcctggcttgtttgaccttgactcattccccatatgtctttgaggaggctcacaaaatactaaagctgggaggaaacttggagatctataggtcaaacctccccattgggctgatgagaaaatacacgcaggcctagcatggtgcctgccaccatggtgggatccagtatgttttataaatctgaatgagtaaatggctcaccaatttatgcatagccctgcacatgagcagaatgtgacactcaaagcatccatgcagtacgcatgtaaccttgcacaggagtggggctctggtgaccgaaggttgtccaggactcttgcaggagaagcaatggagtcagtgtggtgtggggagacctactttttaacctgggcttagccacctgctctgtgatccagggcttaccttctttgggcctcggcctcctaatctgggtaatggggaggacttcattggcattgttagtcccacaggccaaggataaggttgaaatgagacggcttgtgtgtgaaaagattttggaaattacacagatgtgggcttgttattgggatgaagactgctggaagggactccttgctgtttatctactgctttgagccctcctaagttaacctgtgcctcatttgtaaaaccaccagcatcaggagtaagggggaggccagagggctcagatggacacagaattctagctttacctgcatccgctgattcagttttctgttgggatcagagtgaggatacttccatatgggtgatagcagccatgcccctgggagtcaacttcaaggatctgggacattttggtgtgcccattccttcttttcctgaactcacagtcttggggtgtttctgcacttggctatgtgtgtcttgtctgatgtctgtcttctgtagctttgcctctatcagggctggagtggtgcagcccctggcatctcggacatggttcctgcctcacttgtgggagctggaccagcctgggtttcatctcccacagtaaagctaagtaagccccacagaccttactgctactgctgctgccattaatgctgtgctcactatcttgtccaggattttaaggatgtcagactgctgtagatgactcaataaatgttttgccatttt

SEQ ID NO: 1987 - DNA, 2638 bp, Homo sapiens
ctggaggaggatttgattggaaaaccaacggtgcagctggccgcggtgtccctgaggttgaggggaccgggaataggctggggggaggacgggacgggctgagactggacgggacccccggtctgcagcagcaggtgacagcagcagggacaatgataaggagattggcctgaaggagggaccgtccctcccgcgcgaaaagtcagaaatggccaatgaagcttttgcttataaaaggaatgcgatgttaattctggggcattgatgttttacaatgcctgatcaagataaaaaggtgaagaccacagaaaaatcaactgataaacagcaagaaatcaccatcagggactattcagatcttaaaagacttcggtgccttttgaacgtccaatcaagcaaacaacagcttccagccattaacttcgatagtgcccaaaatagcatgacgaagtctgagcccgccatcagggcgggtggacacagagctcggggtcagtggcatgaatccacagaagctgttgaacttgaaaattttagtataaactacaagaatgagagaaatttcagcaaacatcctcagcgtaaactatttcaggagatctttaccgccttggtgaaaaatagactcataagcagagagtgggttaatcgagccccatctattcattttctgagagtgttaatctgtctgaggctactaatgagggatccatgttatcaggaaatactccatagcttgggtgggattgaaaacctagctcagtatatggagattgtagccaatgagtacctcggctatggagaagagcagcacactgtggacaagctggtcaacatgacatatatttttcaaaaacttgctgcagtcaaagatcaaagagaatgggtcaccacaagtggagcccacaagacattagtaaatttacttggtgcccgagatactaatgttctattgggttcccttctggctctggctagtttagcagaaagtcaagaatgtagggagaagataagtgaactcaacattgtagaaaatctgttgatgattttacatgaatatgacttgctttctaaaagactaacagcggagttgctgcgcctactttgtgcagagccccaggtgaaagagcaggtgaagctctatgaggggataccggtcctcctcagtctgctccactctgaccacttgaagctcctctggagcattgtctggattctggtacaggtttgtgaggaccctgagaccagcgtggaaattcgcatttggggaggcatcaaacagcttcttcatattttacaaggagacagaaattttgtttctgatcactcctccattggaagcctgtccagtgcaaatgctgcaggccgaatccagcagcttcatttatcagaagacttgagccctagggaaatacaagaaaatactttctcacttcaagcagcctgctgtgctgccctcactgagctggtgctcaatgacaccaatgcccaccaggtggttcaggaaaatggtgtatatacaatagcaaaattaattttaccaaataagcaaaagaatgcagcaaaaagtaatctattacagtgttatgctttcagagccttgagatttctcttcagtatggaaagaaacagaccactctttaaaagacttttccccacagacttgtttgagatcttcattgacatagggcattatgtacgtgatatcagtgcttatgaagaattggtatccaagctgaatttattagtggaggatgaactgaagcaaattgctgaaaatattgaaagcattaatcagaacaaagctcctttgaaatatataggcaactatgcaattttggatcatcttggaagtggagcttttggctgtgtttacaaggttagaaagcatagtggtcaaaatcttttagcaatgaaagaggtcaatttacataacccagcatttgggaaggataagaaagatcgagacagcagcgtaaggaatattgtttctgaattaacaataattaaagagcagctttatcatcccaacattgtacgttattacaaaacatttctggaaaatgataggttgtacatagttatggagctgatagaaggagccccgcttggagagcatttcagttctttgaaggaaaaacatcaccattttactgaagaaagactatggaaaatatttatacagctgtgcttagctcttcgatacttacacaaggagaagaggattgtccatagagatctgacaccaaacaacattatgttgggggataaggacaaagtaaccgttactgactttggcctggcaaagcaaaaacaagaaaacagtaaactcacgtctgtggttggaacaatcctgtattcttgtgtgcagcacctctaccttcgctctcctgctcctgctctggccacataaaacgtgctggctcctcctttgccttctgctatcattggaagcttcctgatgcctcccaagaagcaaatgccatcatggttcctgtacagcctgcagaaccgtgagccaattaaacctctcttctttctaaattacctagtctcaggtatttctttgtagtagtgcaagaacggattcatacactctttaaatgtgataaacaaaataaagtacaatccttatttc

SEQ ID NO: 1988 - DNA, 2283 bp, Homo sapiens
tgtgggcacgaagctgctgcaggaggctctcccagtagcccatgtccaggttggggccaccagcgcggattttgccctcgatgccctggaagatgacctgcagctggttgtatgtcttccccttgaacaccgactgcacatcagagctgacggaggcgttgaccccctcgcggcgctcacctgcagcggggtgggggcatgggggggcggttccacatttcctacgtgctcctccaccccatcagggcctcctcccctgccatgggggggtccccctcccctcctcttcccccacaggggtcccatccagtcccgccacctccctggtctcaggttgtccccaccctggccacagcggaggggagggggtgggcggaggttgggagccacgttaagatgcagttgctgaggccttgacctggaggcccaggcccccagcgtgtgggaggccaggactggccctgagaatgcccctccccaggtgagtctgatatgtgggtctgggaaccctagttgtgggcccggcccaccaatctggcccaactctgccctggccttgggcagtccatgagggggttggggggtgtgctcggtagccaggctctctggaattcagatcttctctgccagcctgggctgtgtgactgtgggcaagtggcctgccctttctgggccttagtttccctctgtgaagcctagcaaagaaggccaccctgctggcccctggggaagtcctgggcccgccccaggacaaacggctccccaccgccgccccccatcctacatggagtctgtctggcatctaccactggcccaggggcccgaggctcaagtccctcctcgatagacggggaggctgctgagggcgggagtggggtgctgggaggctggagcctagcctgactccgcgtgctctgccccacaccacgtggcatcccggcggcctcagtgctgctctcaggccacttccacccaccccgctgggtctggcctcacctcacaaccctgccccttgctgcccatgcccaacccctgccacctctgggcctttgcacgcgctgtgcttcctgccagctacccatccttctctgtcccattcgcttcctgaattcctcgcatcctccatgctcagtgagaacatcccttccgccaggaagccctccctgaccatccagcgatggcagcttcccgaggcgggcaatggggctggctgctgctgttccctgtgccatgctgggcccacagggagcttggtgcatagctgctggtgacacactgggcgggggtgaccagtgcaggcaccctgctcgagacctgccttctccagtccccgctggcggacagggggtcaagaggcccacacctacaccacaggggactggatagagtctagacggacccgagtcccctccagccaatcacctgggaccctggaatcggcacccagagctgcagcccctttgctgggcgctaagtggcactggaatccgtggcagccccagccaagcacagcgcggccgtgcccagacaggcggggctaccacgaacactgaaacccaagcagaagagcccagccgcgaggctcccaggaagccaggccaggtgccgccaggtcagcgtctatagaaagccgggtctggacatgctgctgcatgtctggatgcctcccgaatgcccacaagggggcccgggggtctagggggtcccagcagctgctagaggctgggggtgcaggccaagggccctggggctgcgtgggggaaaggccaggccctacacagggtgggaggctaatgaagctgagctgggatgacacccgttgtctactgcacaccctcctgtagggttagaacttcctagaaaaagctaggtgcaccaaaatctcacaagtcaccactaaagaacttattcatgtaaacggccgggcacgatggctcacgcctgtaatcccagcacttttggaggctgaggtgggtggatcacgaggtcaggagatcaagaccatcttggccaacatcgtgaaaccctgtctctactaaaatacaaaaaattagccaggtgtggtggtaggtgcctgtaatcccagctacttgggaggctgaggcaggggaattgcttgaacccaggaggcagaggttgcagtgacctgagaacacaccactgcactccagcctggcaagagagcaagacaccgtctcaaaaaacaaaaaaacttattcatgtaaccaaacaccacctgttccccaataacctacagaaataataaaaaaactttaattttgt

SEQ ID NO: 1989 - DNA, 2048 bp, Homo sapiens
cttctccagctactcgtttgagagccggtggcgttccggaggtttctccctcgttatccccctgcctttcacctgaggagaggctctgactgtctctctctctctctggcgtctgcgcagcggggaagtagtgagaaacaatcagagtacagagtattttaatctttaggggatcaagatgtcagatgcaaacaaagctgccattgcagcagaaagggaagctctgaacttgaagttaccccccattgtccatctcccagaaaacataggcgctgatacaccaacacaaagtaagctgctaaaatacagaagatccaaggagcagcagcagaaaattaatcagttagtaattgatggagccaaaagaaatttagacagaacactgggtaaaagaacacctctattaccaccacctgattatcctcaaactatgaccagtgaaatgaaaaaaaaaggattcaactatatttatatgaagcaatgtgtagaaagtagtcctttagtacctattcagcaggaatggctggatcacatgttaaggctgatacctgagtctttaaaggaagggaaagaaagagaagaacttcttgaaagtctcataaatgaggtgtcaagtgactttgaaaacagcatgaagagatatttggtgcagagcgttcttgtgaaaccaccagttaaatcgcttgaagatgaaggaggtcctttacctgaatctcctgtaggcctagattattctaatccttggcattctagctatgtgcaggcaagaaatcaaatattctctaatttgcacattattcatccaactatgaaaatgttactggaccttggttatacaacatttgctgatacagttttgttggacttcacaggaattagagctaaaggtccaattgactgtgaatcactgaaaactgatctatcaatacaaactagaaacgcagaagagaagataatgaatacatggtatccaaaggttataaatctctttaccaagaaggaggcactagaaggtgttaaacctgaaaaattggatgcattttatagctgtgtttccacacttatgtcaaatcagctaaaggatctattaaggagaactgtagaaggatttgtaaaactctttgacccaaaagatcaacaaaggctgccaatatttaagatagaattgacatttgatgacgacaaaatggaattttatcctacctttcaagatttggaagataatgtcttgagtttggtggaacgaatagccgaagctctgcagaatgtccaaacaatcccctcttggctatcaggaacttcaacaccagtaaatcttgacacagaacttcctgaacacgtgttacactgggctgttgatacactgaaggcagcagtacatcggaacttagaaggtgcaagaaagcattatgagacatatgttgaaaaatataattggctccttgatgggactgcagttgagaatatagagacttttcagacagaagatcatacttttgatgaatatacagaggagctggattgctgggtggtatgggaagtgtatttttaactttttaagaaactgttaagccaggcatggtggcttgcacctgtggtctcagctactcaggaggctgaggtgaaaggattactggagcctgggagttcgagtctgcagtgagttatgatcatgccactgcactccaacttgagtgacagagcaaaactctttgtctcaaaaaacagaagaaacttaaatttctttcaaagttgttataccatttacaatctcaccagcagtgtatgagatttccagttcttccacatccttttcaaccttcgggcttatcagtcttttactttttactattgttttattttttcccactgcactttcacatctagattatcagtctttttaatttcatgtgtatattggtatcccactgtggttttaatttgcatttccctgatgactaatgatgtttagcatcttttaacatgtcatgttccatctgtgtatctttttactaataaaaataaagtgtcttttgtttgtacatttt

SEQ ID NO: 1990 - DNA, 2047 bp, Homo sapiens
acggaccggcgggcggggcgggtaagatggcggccccgcggcgagggagaggatcctccacagtggtatcctgctgcgtgcccctccaggacagcacccagaggcccgaattgctgctgcacagagagcactcggcctcaccccacgttttccctaagttctgtctagtaattccactttggagaggggggtgttccttgacagatttagagagttgatgtaacttcctcggatcagttctgctggctccatcccctacctgctcagccctgcacaaagtggctaagcacgccacactgccggctcccaaggcgatggccacctgcctctgtctcggccgctagtggcaggaagatggaaatccctcactttgtccctagattcattttattttatttttgtttgtttatgtttttttaaggacagagccttcctctcacccaggctggagtgtggcaatcacagctcactgcagcctcagcctcctgaagctctggcatcaggcgggagccactgtgcctggccccatagactcatgttagcataaacaaataggaaatgtacacagctcaggaaatggctactagatacttaagtcccccaaacagaaatatatttcctctgaagaaactgaaaaaagtggccgggcgcagtggctcatgcctgtaatcccaacactctgggaggctgaggtggacagatcacttgacaccaggagtttcagaccagcctggccaacatggtgaaaccctgtccctactaaaaatacaaaaaattagctgggcatggttttgcacgcctgtaatcccagctactcaggaggctgaggcagaagaatcacttgaacccaggaggcggaggttgcagtgagccaagattgtgccactgcacagtgtccagtctgggcaacagagcaagactctatctcaaaaaaaaaaagaaaatgacaaagttattttttctctcttaactcataactggggccaaaggcagggtgacatcactggggatgccagtgtgtggaggctgtcccctgaccagtcctgtccacagtcaggagggcaggggctgcagtgcacagaccgcattgttgtagcatggaggggggtcccacaaaggccttgtcagctcatgggaccacattggcagccagcatagtgacagaagcctcagataggcagtgagccattgccaagactccatggtcccttggtgtctgtggccaccaaacagatgacagaaccagcccctcttgttcagccacctgggaggctgctcccaagcctgttgagcttgaggatccttaaccactcaccagctctcttcagttccccttcaaatgctgttttatctcagcggaacgtactacgccctgtatttcctcgccacgctcctgatgatcacgtataaaagtcaggtgttcagctatccccaccgctacctggtcctcgatcttgctctgctgtttctgatggggattctagaagcagttcggttatacctgggcaccaggggcaacctgacagaggctgagaggccgctggccgccagcctggccctcacggctggcaccgccctcctctctgcccacttcctgctttggcaggccctagtgttgtgggcggactgggccctcagcgccacgctcctggcccttcacggcctggaggccgtcctgcaggtggttgccatcgcggccttcaccagccacacttctcccttcaggggcttcggaggagaggtcagggctaaggccggggatgagactgcaggagagagagcagcggagggccacattcggagcctccgtccactccagttttatcagcttttgccttttgcacggagtgctaaacaaattctagctctgtgtttttttcccattcccagatttactatcagttctccttaaaaagtatctaagctgttacagtagctttcccttcacttgattctattgtgtgttttctatgtttggaataattacacccaaatatctagatattttctcttcaccgcattttgtaaataaagagatgtgtatgcc

SEQ ID NO: 1991 - DNA, 2836 bp, Homo sapiens
tacatctcaccaaccctcacaggctatgaaggacctggaactgtcacaaatgccaggggagggcactgagaccccagagggtccctcccagcatcttcaacaggattttgtgcctgcagacccttctttggggcacacaccaccaaccctgaccaggacccctagaatgcccagcatccctgggagggccctgtggtagtttcagctccctctgggggcccagaatgaacctggcctgtggtgaggatgtaagcaccaatggccaattgggtccaaaggaagacaccggttcaaacactgaaaccaatcagattctcccacggccttcctgctatcagacgacactggtgcaggggtggttgctatgtacagggcagagccacccaatccccacgcaggcgctgtgtcctgccacgctggcctcctcctggccatcacatcaggccaagcaggggagaggaatgggaatgcccacgcacccctatcaactctgcagacacagaaccatgcacagctcttgggaggagtcagatgagctgctcaaagcccaggagggacccgcacagtggtcagcatggcagggacagtgctttagccaaggcagggatggtgggagactcactcgggatcctcaaggaggccgctgcatttccgtgctctttccagataacaaggacgtgtcggtgatgatgagcgagatggacgtgaacgtcatcgcaggcacgctgaagctgtacttccgtgagctgcccgagcccctcttcactgacgagttctaccccaacttcgcagagggcatcggtgagcactggaggccttggcctcatgggagacgtctcctccacgtgcactgctgcccttggaggctgtgaaaagtgaggtgtgggaacccaagctgtgccccctctgccatggtcggcattttaacccaacctcaaaaagcaggggaccagaaccgagcctgtcctggaaggccttgcccatccctagagggctccctgtccctactcctcaaggagaccaagaggctgaaatagtcagcactgctgtgctgtggggtcctaaagtctgctgtcctccttcctgcagaccagggctgaaggagggtgcctgggtgctcttgccatgggtcctggtccagccaagcatggtttcaaacatgacctgacccttagtcaacctggaggctgatgtctagagtgggtgctggtgtgtgcagtacctgtggcctctgcatcacccttagggcaggtctgcctcccgggcccatgcacagaggacctggtctcccagcctgcaggtgcccctgtggtgtccaggacgacgagggggtctctgcgtacttggtggggctgggaccctcccacttcccacctccttgtgttcctcactcccctgtttcattccatgctgagcctcccctgccttgggttcctctggggagggggtggtggcaggagttgtccaagggcagctctgcctatgagcagctgctctagcggctcctcctgctgctgtttgccgggtgctgctgacccctgcgaggtagagaaaaggcgttcaggtggttcacaccccacacaggtgcccctcacagggtcctcaatgggggccagagctgtgagactgaggatgatgacgagcctgggctgtgcagggacacaagccccaggtgctccatgtgaacacctcgggagaggtctctggctcgttgtgaccccaaggagtaacccaccgccttctgcagctctttcagacccggttgcaaaggagagctgcatgctcaacctgctgctgtccctgccggaggccaacctgctcaccttccttttccttctggaccacctgaaaaggtagcccagctctcccatggcagcccagggctccaggtccccaggccgcagagtgcccctctgctcccactagacccccaacaccgaggaccttttctcctgacccttgtctgcagtcactcactgcctttggcgactagtgccactgccacccctgccccagcctctcttctttgccaccctcctctctctgcactgtggccttaaaaaagagctcagagctttggccgtggccagcagtgcacttggacccccctcttccctccgagtcacatcaagtaggagacctccccaccagcccagagctggctccttgtcctgggccactgagacccagaagtaccagggctggagtcagcttgcagcacagccagggtcgaggttactcccttcctgagaactccagcacagcccagcccctctgcctctctcctgggggtggcgttgaaacagcacccgctgctttggtcctctacagggtggcagagaaggaggcagtcaataagatgtccctgcacaacctcgccacggtctttggccccacgctgctccggccctccgagaaggagagcaagctccctgccaaccccagccagcctatcaccatgactgacagctggtccttggaggtcatgtcccaggtatgggaagacaggctccagcccatgcaaccctgacctgacagaggtggcctctgcctgccccacccccagtcctgcccatcttcttacttgcattgtatgtggtgtggccaacattcacagagagggacttgcctaggtctgcatggatgggagtgatagtgggggcccaggccacctcctggtcctgctagtgcactttgctggaagcttaaaactacctcaggtgttcgggtgtggtggctcatgcctgtaatcccagcactttgggaggccaaggcaggataaccaatcccaggtgtttgaaaccagtctgggcaatgtggcaaaccccatctctag

SEQ ID NO: 1992 - DNA, 2454 bp, Homo sapiens
atgggagtgccgtgctgaagatcgcggaggtgtgcattgagacgtacataagcagctgtcaccagcgtagcataaacactgctgtgcgggcaactctcagtcaaatgctgagtgacttgactttacagttacgacagaggcaggagaatacgataattgaaaacccagatgtcccacaggatttcgggaatcaagggtcaacagtagagtccctctgtgatgatgttgtctctgtactcaccgtcctgtgtgagaagctgcaagccgccataaatgacagccagcagctgcagcttctctacctggagtgcatcctgtctgtgctcagcagctcctcctcctccatgcacctgcacaggcgcttcacggacctgatctggaaaaacctctgccctgctctcatcgtgatcttggggaatccaattcatgacaaaaccatcacctctgctcacaccagcagcaccagtaccagcctggagtcggactctgcgtctccgggagtgtctgaccacggccgaggatcaggctgctcctgcactgcgccggccctgagcggacctgtggctcggactatctattacatcgcagccgagctggtccggctggtggggtctgtggactccatgaagcccgtgctccagtccctctaccaccgagtgctgctctaccccccaccccagcaccgggtggaagccatcaaaataatgaaagagatacttgggagcccacagcgtctctgtgacttggcaggacccagctccactgaatcagagtccagaaaaagatcaatttcaaaaagaaagtctcatctggatctcctcaaactcatcatggatggcatgaccgaagcatgcatcaagggtggcatcgaagcttgctatgcagccgtgtcctgtgtctgcaccttgctgggtgccctggatgagctcagccaggggaagggcttgagcgaaggtcaggtgcaactgctgcttctgcgccttgaggagctgaaggatggggctgagtggagccgagattccatggagatcaatgaggctgacttccgctggcagcggcgagtgctgtcctcagaacacacgccgtgggagtcagggaacgagaggagccttgacatcagcatcagtgtcaccacagacacaggccagaccactctcgagggagagttgggtcagactacacccgaggaccattcgggaaaccacaagaacagtctcaagtcgccagccatcccagagggtaaggagacgctgagcaaagtattggaaacagaggcggtagaccagccagatgtcgtgcagagaagccacacggtcccttaccctgacataactaacttcctgtcagtagactgcaggacaaggtcctatggatctaggtatagtgagagcaattttagcgttgatgaccaagacctttctaggacagagtttgattcctgtgatcagtactctatggcagcagaaaaggactcgggcaggtccgacgtgtcagacattgggtcggacaactgttcactagccgatgaagagcagacaccccgggactgcctaggccaccggtccctgcgaactgccgccctgtctctaaaactgctgaagaaccaggaggcggatcagcacagcgccaggctgttcatacagtccctggaaggcctcctccctcggctcctgtctctctccaatgtagaggaggtggacaccgctctgcagaactttgcctctactttctgctcaggcatgatgcactctcctggctttgacgggaatagcagcctcagcttccagatgctgatgaacgcagacagcctctacacagctgcacactgcgccctgctcctcaacctgaagctctcccacggtgactactacaggaagcggccgaccctggcgccaggcgtgatgaaggacttcatgaagcaggtgcagaccagcggcgtgctgatggtcttctctcaggcctggattgaggagctctaccatcaggtgctcgacaggaacatgcttggagaggctggctattggggcagcccagaagataacagccttcccctcatcacaatgctgaccgatattgacggcttagagagcagtgccattggtggccagctgatggcctcggctgctacagagtctcctttcgcccagagcaggagaattgatgactccacagtggcaggcgtggcatttgctcgctatattctggtgggctgctggaagaacttgatcgatactttatcaaccccactgactggtcgaatggcggggagctccaaagagctggccttcattctgggagctgaaggcatcaaagagcagaaccagaaggagcgggacgccatctgcatgagcctcgacgggctgcggaaagccgcacggctgagctgcgctctaggcgttgctgctaactgcgcctcagcccttgcccagatggcagctgcctcctgtgtccaag

SEQ ID NO: 1993 - DNA, 2922 bp, Homo sapiens
gtgtgttgtctagttgttttaagatgaaagttcccagttctcccttgcccggaaagtctctggagcaagcgtggaaggcgagtgaagcggaaggtgagtgaagcgcgcgcagctcccagagggaagcgagaggcgaggatgacggcggcggcggcggcggcgacccgggcgacgcgaccgttcccgaccgacggcgtggcctccaccggcgtcggcagccaggcgcccgcaggtgtggggcgagttcggcctggcccttggggacaacggcatccgactgcactcgcggggagaagggattgatgctctgtctaaactctacaaaagtacagtcctacaacatctgggattttagcagtaatgctaacttctataggttttttttttccttttttattttttttttttattttttgctttcctctaatttttcttctattatataggtattttaaacttttcctttttaaaattctgtacaactattatgattttaagagggggaagagttagaagcatttacagacttttcacaacaatgaccttgcttggtaagtcccatttgttcccctccttgttttctcacacttcacgggtgagttttaagatttgtgttgctttccccaaatatccaccaatttgttcatcttttaacagctccatccagacatagaatacagaaaaccataggaaagtgtcatagacttggatgagggtcatcaaagcgcctctcaaagtatcaaagaactattatcttgctgttttaaaagcattgaagcgttatttttcctttttttgttgttttttttgttttttgttttttttttaattttttattacattttttcatagaatcgctctaagctgtttcaagaacagccatgaggcaggaaggagggggtcctccattccccctctatttgacatagagctacacatctgcaataaaaagtttggtccttaggtccctaaatagctaaaggaatgacagatagagatgctcagtggcggcctctcagccgccccttggggaccaggccccacgcaccacttgccccagcctgcgtcaggcgcccgtgggctggaaaagccccgggatcggtaagcagcgtctcctcccagctcccagcccttcagcctccccgtctgctcgtgatattttgttttaaagttgccttttgtgtgtttttttctcatttttcttcatcttcttcttcatgtcatatatattttcccccaaacacgtgccctctgaactccatagacgctatactttccttgaagaaatgttacagtcacacagacagtgtctggagtcttcagcttgattgatattggctgatatgtcaaaggtgtcatccaacagttctcatttataaatatatatagagagaggtttgttttttaatgtagcccgttcagcatcctgccctaaaatgaagaaaatcagggctgattaagccaagagggaaaacacaaacagcatccaaacaccaataggaacctgcctcaggggctaggatgggagctctaggggatggtgggagggaaggaagagagaccagtatgagaattagtcatgatcatgatacattaaaaagaaatatactcttctattcagagtagaaaccactgggaggtctagtggtgatggttgtagctgaggtttcgttgttgggagaaggttcttgatttgggttactttagcattctggattgggggtagctacatctaaggggagaatttgggactgcgggatatgaattcataattaaacttgtctctgagggatctagcccagatacaatatgtatacagaagcctagcaaacaagataggaaaaatctagcagcccagcccactcctcccagctcaagggaaagaaggaagacacatccgtgactcaaattttgtagaatccttgcccagcttccagccaaccacttctttcccggggtcagtaactatttgcgaggctgtgtatatatatgtatatctggatatatgtgtagaatatattcacctgcacatatgtggatatacatggatatgtgtgtatgtatatgcatatatacacacatacacacacataatacttttctcatacatgccagggaatttagaggaattcagaacttcaagggagtggatgggaaaacctaaaaaaggtcagaagagatttaattatcaaacttaaataaattaactcagacagtgcttgattttgttttgaatggtggctttttggtgttttgttttgctttaaaaaaatcatgatctgactagaatcagaaggcgaatgcttaatcattgtgaattaacaaatgagactcatctccattctagcaagcagcttccacttatacatgggggtgactggttacatcaagaaagttagaactgcaaagcccccacttgaggggacaacgtcatgcgtatatcaatccatgctggcaggtttttcacactgttgattcaacaaacagcaaaccgtacacagcagtctaaacaattacaacaccaaataaaataataataaaattaaaaaacacttgtcaaggaccctttttcagttgtaaacaaaaaggtgcattttgcttttgttagtactgtttcttccaaaccaaccaaaaaaaaccctcccgagcccccagtccccagcctcccctccccacatttaatttagcagaagtggttacaatacaaaccttacaattgttaccgggctctcttgcagaggcctctggctttgtactctagttttttggtttagaatttttttatcattctgttactgtagatattttgtttttgtttttttgtttttgttttttttccctttgaagtgagattgaaaatagcctaactggaaaaagaccagacctaggaaagtgtcaattgaaaaaggcccccaaatttct

SEQ ID NO: 1994 - DNA, 1623 bp, Homo sapiens
agctctgggagacgagcccagcactggaagtcgccggtgtttccactcggtgatcatcactgaacacagagggctcaccatggagtctgggctgagctgggttttcctcgttgctcttttaagaggtgtccagtgtcaattccaacttgtggagtctgggggaggcgtggtccagtctgggaggtccctgagactctcatgtgcggcctatggattcatgttgaggaccaatctcatgtactgggtccgccaggctccaggcaaggggctggagtggctggcagtgtcatcttatgatggacacactgaccactacgcagactccgtgaagggccgattcaccgtctccagagacaactccatgaacaggttgtatctgcaaatgaggaatttgagacctgacgacacggctatgtatcactgtgcgagagtaggttatgatgacaataccgtgagggacttgtattacatggacgtctggggcaaagggaccacggtcaccgtctcctcagcatccccgaccagccccaaggtcttcccgctgagcctctgcagcacccagccagatgggaacgtggtcatcgcctgcctggtccagggcttcttcccccaggagccactcagtgtgacctggagcgaaagcggacagggcgtgaccgccagaaacttcccacccagccaggatgcctccggggacctgtacaccacgagcagccagctgaccctgccggccacacagtgcctagccggcaagtccgtgacatgccacgtgaagcactacacgaatcccagccaggatgtgactgtgccctgcccagttccctcaactccacctaccccatctccctcaactccacctaccccatctccctcatgctgccacccccgactgtcactgcaccgaccggccctcgaggacctgctcttaggttcagaagcgaacctcacgtgcacactgaccggcctgagagatgcctcaggtgtcaccttcacctggacgccctcaagtgggaagagcgctgttcaaggaccacctgaccgtgacctctgtggctgctacagcgtgtccagtgtcctgccgggctgtgccgagccatggaaccatgggaagaccttcacttgcactgctgcctaccccgagtccaagaccccgctaaccgccaccctctcaaaatccggaaacacattccggcccgaggtccacctgctgccgccgccgtcggaggagctggccctgaacgagctggtgacgctgacgtgcctggcacgtggcttcagccccaaggatgtgctggttcgctggctgcaggggtcacaggagctgccccgcgagaagtacctgacttgggcatcccggcaggagcccagccagggcaccaccaccttcgctgtgaccagcatactgcgcgtggcagccgaggactggaagaagggggacaccttctcctgcatggtgggccacgaggccctgccgctggccttcacacagaagaccatcgaccgcttggcgggtaaacccacccatgtcaatgtgtctgttgtcatggcggaggtggacggcacctgctactgagccgcccgcctgtccccacccctgaataaactccatgctcccccaagcag

SEQ ID NO: 1995 - DNA, 2129 bp, Homo sapiens
gtgctttctgagagtcaaggacctcctgctcaagaacatggaacacctgtggttcttcctcctcctcctggtggcacctcccagacgggtcctgtcccaggtgcgcctgaaggagtggggcgcaaaaacgtggaagccctcggagaccctgtctctcgtgtgccgtgtcgatggtgggcccttcaatctttactcctggagctggatccgtcagggttccgggaaaggtctagagtggcttggtgaaatcactcctggtggacccacccactccaatccgtccctcgcgagtcgcgtcgtcctttctgttgacacctccaagaaccacgtctccctcaagttgttgtctttgaccgtcgcggacacggctgtctacttctgtgcggcccgcaatccttcagcgggggccgctgagtactggggcccgggatccccggtcatcgtctcctcagcacccaccaaggctccggatgtgttccccatcatatcagggtgcagacacccaaaggataacagccctgtggtcctggcatgcttgataactgggtaccacccaacgtccgtgactgtcacctggtacatggggacacagagccagccccagagaaccttccctgagatacaaagacgggacagctactacatgacaagcagccagctctccacccccctccagcagtggcgccaaggcgagtacaaatgcgtggtccagcacaccgccagcaagagtaagaaggagatcttccgctggccagagtctccaaaggcacaggcctcctcagtgcccactgcacaaccccaagcagagggcagcctcgccaaggcaaccacagccccagccaccacccgtaacacaggaagagggggagaagagaagaagaaggagaaggagaaagaggaacaagaagagagagagacaaagacaccagagtgtccgagccacacccagcctcttggcgtctacctgctaacccctgcagtgcaggacctgtggctccgggacaaagccaccttcacctgcttcgtggtgggcagtgacctgaaggatgctcacctgacctgggaggtggccgggaaggtccccacagggggcgtggaggaagggctgctggagcggcacagcaacggctcccagagccagcacagccgtctgaccctgcccaggtccttgtggaacgcggggacctccgtcacctgcacactgaaccatcccagcctcccaccccagaggttgatggcgctgagagaacccgctgcgcaggcacccgtcaagctttccctgaacctgctggcctcgtctgaccctcccgaggcggcctcgtggctcctgtgtgaggtgtctggcttctcgccccccaacatcctcctgatgtggctggaggaccagcgtgaggtgaacacttctgggtttgcccccgcacgcccccctccacagcccgggagcaccacgttctgggcctggagtgtgctgcgtgtcccagccccgcccagccctcagccagccacctacacgtgtgtggtcagccacgaggactcccggactctgctcaacgccagccggagcctagaagtcagctacctggccatgacccccctgatccctcagagcaaggatgagaacagcgatgactactcgacctttgatgatgtgggcagcctgtggaccaccctgtccacgtttgtggccctcttcatcctcaccctcctctacagcggcattgtcactttcatcaaggtgaagtagccccagaagagcaggacgccctgtacctgcagagaagggaagcagcctctgtacctcatctgtggctaccagagagcagaaaggacccaccctggactcttctgtgtgcaggaagatgcgccagcccctgcccccggctcccctctgtccgccacagaatccagtcttctagaccagggggacgggcacccatcactccgcaggcgaatcagagcccccctgccccggccctaacccctgtgcctccttcccgtgcttcccccagagccagctacacccctgccccggccctaacccccatgcctccttcctgtgcttcccccagagccagctagtcccacctgcagcccgctggcctccccataaacacgctttggttcatttc

SEQ ID NO: 1996 - DNA, 1624 bp, Homo sapiens
acccaaaaaccacacccctccttgggagagtcccctagatcacagctcctcaccatggactggacctggaccatccttttcttggtggcaggagcaacaggtgtcaagtcccaggctcaactgctgcagtctggacctgaggcagagaggcccggggcctcagtgagggtctcctgcagggcttccggttacgactttagaacttttgctgtcacctgggtgcgacaggcccctggacagggacttgagtggatgggatgggtcaatacagaccaaggcgacacacattatgcgcggagattccagggcagagtctccatgaccacagacacatcgacgtccacagcctacttggagctgaggaggctgacatttgacgacacggccgtctacttctgtgcgagactacttcttcccaatgggcgcaattgggcccaatggaagaactactatgctttcgatgtctggggccatgggaccacggtgaccgtctcctcagcctccaccaagggcccatcggtcttccccctggcaccctcctccaagagcacctctgggggcacagcggccctgggctgcctggtcaaggactacttccccgaaccggtgacggtgtcgtggaactcaggcgccctgaccagcggcgtgcacaccttcccggctgtcctacagtcctcaggactctactccctcagcagcgtggtgaccgtgccctccagcagcttgggcacccagacctacatctgcaacgtgaatcacaagcccagcaacaccaaggtggacaagaaagttgagcccaaatcttgtgacaaaactcacacatgcccaccgtgcccagcacctgaactcctggggggaccgtcagtcttcctcttccccccaaaacccaaggacaccctcatgatctcccggacccctgaggtcacatgcgtggtggtggacgtgagccacgaagaccctgaggtcaagttcaactggtacgtggacggcgtggaggtgcataatgccaagacaaagccgcgggaggagcagtacaacagcacgtaccgtgtggtcagcgtcctcaccgtcctgcaccaggactggctgaatggcaaggagtacaagtgcaaggtctccaacaaagccctcccagcccccatcgagaaaaccatctccaaagccaaagggcagccccgagaaccacaggtgtacaccctgcccccatcccgggatgagctgaccaagaaccaggtcagcctgacctgcctggtcaaaggcttctatcccagcgacatcgccgtggagtgggagagcaatgggcagccggagaacaactacaagaccacgcctcccgtgctggactccgacggctccttcttcctctacagcaagctcaccgtggacaagagcaggtggcagcaggggaacgtcttctcatgctccgtgatgcatgaggctctgcacaaccactacacgcagaagagcctctccctgtctccgggtaaatgagtgcgacggccggcaagcccccgctccccgggctctcgcggtcgcacgaggatgcttggcacgtaccccgtgtacatacttcccgggcgcccagcatggaaataaagcacccagcgctgccctgggcccctgc

SEQ ID NO: 1997 - DNA, 3679 bp, Homo sapiens
aggaagcggcggcggcggccacgatgagtgcgggcgacgcagtgtgcaccggctggctcgttaagtcgccccccgagaggaagctacagcgctacgcctggcgcaagcgctggtttgtcctccggcgaggccgcatgagcggcaaccccgatgtcttggagtactacaggaacaagcactccagcaagcccatccgggtgatagacctcagcgagtgtgcagtgtggaagcatgtgggccccagctttgttcggaaggaatttcagaataatttcgtgttcattgtcaagactacttcccgtacattctacctggtggccaaaactgagcaagaaatgcaggtgtgggtgcacagcatcagtcaggtctgcaaccttggccacctggaggatggtgcagcagattccatggagagcctctcttacacgccctcctccctgcagccatcctctgccagctcccttcttaccgcccatgctgccagctcctctttgccaagagatgacccaaacactaatgccgtagccactgaggaaaccagaagtgagtcagagcttctcttccttccagattatctggttttgtccaactgcgagactggaagactgcaccataccagtctacccaccagatgtgatagctggtcaaactcagaccgttcattggaacaggcttcatttgatgatgtttttgttgactgcctgcagccgctcccctccagtcatttggtccacccctcatgccatggcagtggagctcaggaggtgccatcctcgaggcctcaggctgccctgatctggagtagagaaatcaatgggccacccagggaccacttgtcttcttcaccattgctggaaagttccttaagttccaccattcaggtagataaaaatcaaggttccttaccctgtggagcaaaagaactagacattatgtccaacactccacctccccgcccccctaagccaagccatctgtctgaacggcgccaagaggagtggagtacacacagtggtagcaagaagccagaatgcactctggttccaagaagaatctccctctctggtttagacaacatgagaacctggaaagctgatgtagaaggccaatccttaagacaccgagacaagcggcttagtttgaatttgccatgcaggttctccccgatgtaccccacagcttcagccagtatcgaagacagctatgtgcccatgagcccccaggctggtgcctctggtcttggaccccactgcagccctgatgactacattccaatgaactcaggaagcatctcaagcccgttgcctgagctgcctgcaaacctggaacctcccccagtgaatagagatctcaagcctcagaggaaatcacggccacctcctctggacctgagaaacctctcgatcatccgggaacatgcatctcttaccaggacccgcactgtgccttgcagtcgaaccagctttctctctccagaaagaaatggtattaattctgcaagattttttgctaatcctgtttccagagaagacgaagaaagctacatcgaaatgaaacttctcctttcagaagaacaaagagtagactatgtccaagtggatgagcagaagacacaggctctccagagcacaaaacaggagtggacggatgaaaggcaatccaaagtatgagaggtgcgggcttgtgccatgtgtgaaacagggaagcttggggctcagtttgagttttttcttttttttttttttttgtccactaaaaacacactgatggtcaacacaggtcaaaaccaagagagaatgtgtagttttcaaggtcttggccagaacctttaggaaagaagacctgtttatacattgaaggaagaaaagaaggaagcagttgccttccggagggggctctgagagaatctagcctcccctctgtcctattggagcaaagattggagtgagtgttgccaccaacaggattttatcgtttgactccaatacctgaaattctgacttctctcctgtgcttcaatgagaatgataaattatcctagcaaaggggcctctggagaccatcttgttccagcctctgaagacagttgaggagatcaagcccagcaatggtggcagaatcttactccacagacttcagcagactagtcatttcaatacccaaagaaagacaagtgacaggggcaatggatctcaggctctgagataagtatatcagatgacactggtggctctaaggatattgcaattaagcagctacctgtagccaggtattctgctgctcttggccttttcccacgcatcgtctcgtgtcttctccgaaagaccttggaagataggcctggaagagactgttgatgccactttgaagaaaagaacactgagaactagaggagggaacactttgcccaagattactcacaaagccaagacccagagtccagcttagagaatagagttgttcaggctgccaattgcaagctcattcctctacctcatacttcctctgaggattttgacaaaatggattaattgggtgagccttggagacatgtgggaaacacctgcagacacaaaatgagtagtcatcctgtctccctttcaatagggatctgaacaggtgttttgatacttgaaagatgtgcatgtcaagtgagggtttctttctgcgatgttcaactggaactctcccatcagtagttacaattagaaatacctactgatggttagtctgaaggccattctcatggtcacctatacagtgtgtttccctgtgagctagcagacacaatgaccaggaaaaaacctatgaattccattcttaggtttcccagccaattgctcccttctgctttagaagtgactaggtactgagagtacaaacactcccactttataatgaaggcgtcatgtcaccccttcctttacaggtcctggggtccaggagacccagaatgaaggtgtcagttgggcatgaagtgttatttagtgtccattcttgatccttctgagcacctacagctggaaactaagcagatactggtcctgcattctgactgagattgtgtcttctttatgaggatagatcaaattggcagtcaggcccatgatagtcagtgcagttggggcagttgtagactttgctacaggatttcagggtttccaatcaccccacaggtaagtgaatgccaaagtcttcttttttcagaccatacaagaagtcattttgattttcaaagaagccgttttgattttcaaagaagcaggttctggtgacattattttcttccttggacaaagtggggggaaatttctaagtattttaactgagttcagggtccttagtgagcctggacagagcaaggagagggctccccactccctaagccccacagccagctctgcatcaccacacacagccagagcctgtgaggagctgccttctcccccatgtgacttgcaaagagtctcaggcaagaaaccagggcttcaaactgctagttcccatggagggtagttccctcgtgtggagcacttgtgttaggatcactgattatctgacaaaggctggtgcagaaaaaaaattgtaggcccaagtgtcaagaaccacaccagattggagatagaaaagaatagctgaaattatgtcagtggtgaaatgtcactccattgacccaccg

SEQ ID NO: 1998 - DNA, 1897 bp, Homo sapiens
gtgggcggccccatcgcctagcaaccgggtggcagcgtcccttgagcccaggccacacagctgcacccagccctgcccggctcctcccaggcctgcaggacccctggggccctgtccttattccccagcaccgggacagccaaagctctggtcacaatgaacatcgtcttctccagggacagccaggtgagggtgatggagaataccgtggccaacaccgagaagtactttgggcagttctgctcgctgctggccgcctacacgcgcaagacggcccggctgcgggacaaggcggaccagctggtcaagcagctcatcgactttgccaactccgagaaccccgagctgcgggccaccatgaggggcttcgctgaggacctggccaaagtgcaggattaccggcaggcccaggtcgagaggctggagaccaaggtggtcaaccccctgaagctctacggggcacagatcaagcagacacgggctgagatcaagaaattcaaacatgtccaaaatcatgagatcaaacaactggaaaaactggagaaactgaggcagaagtcaccctcggatcagcaaatgatctcccaggcagagaccagagtgcagagggccgctgtggactccagccgcaccaccctccagctggaggagactgtggatggcttccagaggcagaagctcaaggacctgcagaaatttttttgtgactttgtaactattgagatggttttccatgccaaagcggtggaggtgtattctagcgccttccagaccctggagaagtatgacctggagagggatctactggattttagagccaagatgcaaggagtttatgggcattatgacactcggctgcttgccaacaccagcccccctccatctgttcttcagtctctcgccagccagggaactctgcaggtccagctgagtagggcaaatgaagaccctgaacatcctcatgccaatcatggcaggtttagtctctgtgagtgggtagttaaggggcagccagcccactgtgtgtgtgggcagggtgggcatctcatgcttccaggacattctctctaacgacgtagggtaagtgcaatcccaagccgtttaaaataatcccagactgcctggaggctttgttcttattttctgattcttttttctttgtctttgttggattgtgttaattcaaagaccttgtcttcaagctctgaatttccttcttctacttgttcaattctgttgctgagactttccagagcattttgcatttctgtgagtgtatccaatgtttcctgaagttttgattgtttttctttatgctatctatttcttggtccgagcccactgctcctggcggtgtgaccttgggaaagtctcctagcctctctgtgccttagagtcctcgcctgcagagtggcttagaacagtaacctccgtgtagggctgtgctgagtatcagatgaacagatctatacgaagcacagaaaacccggcctgttgcgcaacaaacacttgagacttgttgctgccattatcattactgatgttgctgtcgttttattattattattatttagagtgctcagagcaccatatggagcccaggaaaagaaggggaggagagtgaggacaactccatggaggaggcccccgtggaggacctcagggcactggggcagggaccccataagagagaactgcccacaacagtcagaagaacttagctggccttggatcctcaggtgggctctgctgtgtgccctcaggcaagccacgtgtcctctgagcctcagtttcctcatctgtacaacagggccaatatcactcacttcacaggttgctctgggggatcgctgtgcctggcatatagtaggtgttcaataaatgccctgtgactctc

SEQ ID NO: 1999 - DNA, 2258 bp, Homo sapiens
ggtcggccctctctctgaactgctgcctgtgtctgcccctccctgcacactgacgacttttgcttagtgtggtagcgtgtcccagtgtgtgctgttctgcctaaccctgtggtctcgtgtcgtttctttttcccttgcagggtctgccctgaagcgtctctgcctaggcaaagaacacagcagtagtaattatccgggttttttcccctttgtcctctctcatcgcatgggctttctcgtggctagcgcacatcagggttcccgcggccgggcgggcgtgggcctgccctgtgcctgccccgcgcctgctccatgcctctcggccgggcactgcttcgcttctgcctggcgggatcgctgtcctcggctcccccgtgtgtctcgtggcgcctagagtttgtgcggtctcgccagttcacatctaacgggcttatccttccccggaacacccgcaaattgccgatcattaattggctccttttccaaaaccgtaggaatgagtatttccttgaagtcctaaagatgagtgcctccccacgaggagagatgccaggactgagtgggtattagtctccttgggccactcacctctctctctctctcatctctctctctcgaaaaaatattttttttcttttctggctgaacttttcatgtaggaatagctccatgtgtgtcaaatctcatcactaatttttaattgtctgtgtctgtgctttttcattgctagccactaaagtccactacattttgggacagcttgtttgaagagatggtcattagattgtttctctatgcagaaaatttttgaattggcttattcaaaattgccaacgagaaattacatgtgttgcctggaaagggtatgatttaaaatttttaaagtctcattttagtcccttaaaaaacactttgaatgaagcagccgagtgctctggtgtgctaatggtcagcagagcggctcccagctccctcctacagcagggcgtttggccgcagcccatggcaggagctggtggggccgcgtcaggcagcccctggcatgcgtaccctttatgaataccttcctcgaatgcgaatgcgctggtcaggacaatttctatgtctggaattccaaacaaccagaccattaaaattcatgggaatgcaagtcaggcagccctggcaggcattttcccgtgggccagggggctgcctgcaggccagcccgccgtgtgtgctgagcgctctgcacacggtactccaccgccccgcgtcctcatgttacggctgaggatgcacaggccagagagagcccgaggaacctgactctaggcaccatgactccgaagcccagtgtgtctggctgtgccaggagtttcctgagctctctcacacgtgagtctggggatgggcagcggtgggcacagagtggatgctgagcagaggctgccggctgctgcagagtcctgtcccctggcctggcttctgaggtgggtgatggccacctggcacagcccatggaaatgccccaccatgtctgaccctgggcagccaggccccttaatccgaccgcctcttgaagcaaggtgctgcctggcccaagtgagaccattgtctcagctgtcacgtaagaatgaatgcggccagcccactgggggcctgggtgcgtgtgtggcgtcaccaatcctggcctgtgtgtgactccccagggtcctccaccagcagcctggccccaggccctgagccaggcccccagcccgccctgcacgtccaggcgcaggtgaacaacagcaacaacaagaagggtaccttcacggacgacctgcacaagctggtggacgagtggacgagcaagacggtgggggccgcgcagctgaagcccacgctcaaccagctgaagcagacccagaagctgcaagacatggaggcccaggcaggctgggctgcccctggcgaggcgcgggctatgaccgcacctcgagcaggagtggggatgccacgtctgcccccagcgcccggccctctgtccaccacggtcattcccggagccgccccgaccctgtccgtgcccacaccagatcctgagagtgagaagcctgactgaccccgcctagacgccaggcccacttcacgccgtctaagtggagaagtgacggaccctcagggccagctgctcctcctgtccagttcacgctgttttgtaaccactttctaagcattttttattcacaattggaaacacaaatgtaatgcaagaataaaaaatattttggggc

SEQ ID NO: 2000 - DNA, 2704 bp, Homo sapiens
aaatagttcatttgttagtgataaatgttaacatagcctagcaaagagagcgtctgtgccctcccaccttagtgcaagaagaggaagcagagttgctgggggctgcctctgggactttgtatgcaggacctggagcacacaggtgcagtgttgtccgcaggtgtggtgttttcctgcccgcaggtgcggtgttgcccacaggtgtcgtgctgtctgcaggtgcggtgttgtcctgcccgcaggtgtggtgtcatccgcaggtatagtgttgtctgcaggtgtggtgttgccctgcctgcaggtgtggtgttggctgcaggtgtgttatccccaggtatggtgttgccctgcctgcaggtgcgggtcacccataggtgcggtgttgcctgcaggggtggtgttgcccgcaggggtggtgttgcccccaggggcggtgttgccctgcctgcaggtgcggtgttgcccgcaggtgtgatattgctctgcctgcaggggtggtgttgcccgcaggtgcagtattgctctgcctcaggggtggtgttgcccgcaggtgtggtattgctctgcctcaggggtggtgttgcccgcaggggtggtgttgcccgcaggtgcagtattgccctgcccacaggtgcggtgttgtccacaggtgcggtgttgtccacaggggtggtgttgcccgcaggggtggtgttgtttgctggagggaggaagagcacaccgggcgtggtggacagaacagcctcgactgtagccggtaacgggataacgaagatgaccgtgaagatgatgacaatgacagctcccatcgagtgctcatgtgccaggcacggggatcggcgctttctgggaatgatcaagttgagtcctctgtgccattggccttttcccctgagggagttgttgcaatgacctgccgggccagcagcgctaattaggagcacacagcgcacttccagagcacctgacctacagctacaaggcttcaaggatgctgcttctgaggagacatcatagaatcgtttggcattcttcctgtagctcagagtcccacgattgtctttgtaaacacgttgcaccaggtcttcttcaggggacaggtcgcaggacagcgtgcatttggcggtctgtgtacacacatcatgtgcctgagggcctgggaatctgctctaacaagactccacagctggcactgtggatctgagtgggctcctgctttgttgagcttagagtcatccacaggcattctccagggcccattagctttctgcagaagccaatggtgaattcagcaaagccacaccctcttcatatccttgattcttaaagtcacaggcccggtatgggtatttcacaaactgcccaggatgtcaatcccatttgaccttaacagaccttggagttgcccaccaggtgcgcccacagactcagaggatctgcgcttcagacagcaaagtcctgacatgtgcagccgtgtggaggatgccgaaggaattggaatcaggcagccacgagtcccctgatgattcatccagcactgcacagaccctggagctgctctgtcaccttgacaacacagcccatggcaacatggcctgtgtcgtgtgggagccaatgggagatgggaagaaaatcatttccttggctgataaccatatcctgctgtgggatttacaggaaagctcgagccaggctgtgctggccagctcagcgtccctggaagggaagggacaactgaagttcacctcaggacggtggagcccacatcataactgcacccaggtggccacagcgaacgacaccaccctccgtggctgggacacccggagcatgagatctactgcatagagaatgcccacggacagctggtgcgggaccttgactttaatcccaataaggagtactacttggccagctgcggagacgactgtaaggtgaagttctgggacacccgaaatgtcaccgaacccgtgaagaccctggaggagcactcccactgggtgtggaacgtccgctacaaccactctcatgaccagctggtcctcacgggcagcagtgacagcagagtcatcctttccaacatggtgtccatctcgtcggagcccttcggccacttggtagacgacgatgacatcagtgaccaggaggaccaccgttctgaagagaagagcaaggagcccctgcaggacaacgtgatcgccacctacgaggagcacgaggacagcgtctatgccgtggactggtcctcggctgacccgtggctgtttgcctccctgagctatgacgggaggctcgtgatcaacagggtgcccagggccctgaagtaccacatcctgctatgactcccgggcctgggttatccaggtcccattgagtggttttcctcttggcagattctcaaacagtcgcagctctttggaggtgactcgtgttccaggtggatccctctctgggagagccgctgttcccttcctgtagcagcagcatttatgaatggggtgaatggggctattgtcgacggcacagctaatgcccgaacccagcccctgtcggcagagacagagccccacattattatgtgaataacaatgttttctgttttaagggtgtcaggagtttcgctttttaaaaaaatgtctgttcctgcagtagtaactcttctttctcttgagagtaaaaaatgaaataaaataaatccacgctg

SEQ ID NO: 2001 - DNA, 2277 bp, Homo sapiens
atactttaggttataacttaatgcaatgtactttatattgctgctcaaattgtcccaggcgcggcccccggaagctctctgggtagatccctgcgcccttggacgcccggtccttcagttttttgagcacctcaagcttctggcctacaaaacgctcccggctcagctggagctttctgcgcccgggtcctagagtcgcccatttctctaaggcgccttggccctatttttagagagcggtatttagaaaccaagattagggtgctaacaatttttttttaaatttttatatttttaagacaggatctcactttgtaacacttccttttagtggaagcgccgacctcctgggagacccacgccccctgccgccttccgtcccgtttctcagaaaaccacccagacaccccgccccaccggccggggcccgccgcgcatgcgcgccgaggcgtgacgtcagaacggcggccaggacgccggacgtgcggcagttgcaggcgagcaggcgaggaatcgccgtggcgtcttggtgttctccacgctggttcgcaggtgaagagatggcgtttgtgaagagtggctggttgctgcgacagagtactattttgaagcgctggaagaagaactggtttgatctgtggtcggatggtcacctgatctattatgatgaccagactcggcagaatatcgaggataaggtccacatgccaatggactgcatcaacatccgcacggggcaggaatgtcgggatactcagcccccggatggaaagtcaaaagactgcatgctccagattgtttgtcgagatgggaaaacaattagtctttgtgcagaaagcacagatgattgcttggcctggaaatttacactccaagattctaggacaaacacagcgtatgtgggctctgcagtcatgaccgatgagacatccgtggtttcctcacctccaccatacacggcctatgctgcaccggcccctgaggtagggagaaccctgagcctccagcaggcttatggctatgggccatacggtggtgcgtacccgccaggaactcaagttgtctacgctgcgaatgggcaggcgtatgccgtgccctaccagtacccatatgcaggactttatggacagcagcctgctaaccaagtcatcattcgagagcgctatcgagacaacggcagcgacctggcactgggcatgctggcaggagcagccacgggcatggccttagggtctctattttgggtcttctaggggcctcaaggtcttgatgtgcatagcttctgataaccctgtgtgcaataatatgatttgcagggcatttctgtttgtgacaaaagtttttaataatagttttaatcattcctttgaaagtagtgatgtcataattgtactaatccacataagtaccacagagaagggtttgaactgtgctattttgttcaaatgttgactctccgggggcactggctcattccaagactgttcttgtgcaactctcagaataccttatttgagcatacctgttttgaaaggcattttctttttagagttaggtgtagtgcttaagggttaatttattttcatgttatgccagtaatatagtgttgtatgcctattgagtgattgtggcaagaaaagctacagcttctttgcgtttaactttttcaaaccacagaccagaactggttgcatgttactttaggagttgtgggttggtaagctcccaggtacttcccgaggctatggtgtgagagcccccgtcctgccctctggggctccacaggcccctggcaaggccgatggctcaggatgatggggcacagcccgcctttgaacaatcatgcttcagaaatctgcctgaccctagctgctgctgctgctcactttattcttgtatggctttggtaggcatacttggagaacatatcccacattaggaattgatttaagcctgagagtttgagggctttaatcctttaaaacttggagaagctggctgggcgcggtggctcacgcctgtaatcccagcactttgagagaccgaggcgggcggatcacgaggtcaggagatcgagaccatcctggctaacacggtgaaaccccatctctactaaaaatacaaaaaattagctgggcgtggtggcaggcgcctgtggtcccagctactcgggaggctgaggcaggagaatagtgtgaacccaggaggcggagcttgcagtgagccaagatagtgccactgcacttcagcctgggtgacagagtgagactctgtctc

SEQ ID NO: 2002 - DNA, 2276 bp, Homo sapiens
ctatagattttatgaatcccatcgttacatatcccacttcagtaggtcttgggtggcccaagactatgtgttaacaagtggttcttatgcaagttgagaaacactggcttatatagaccaaatcttgaaaactgggtatatacattgtccgtaatgagagagtgccacttccttgccaataccctggtattatatggccgattttgtctctttgccaataatttcattataaactgttcagctgtgttgaagcaaaactgtagaaaaagtcctgtcttcatcagattttctgaggttgtaattatactcttgtcataccagtggagacccagtaatcatactgcaacaattgtgtaacacttgcatttcatactcaggcaaaacccagttataaaggtagcttcttcctcatttttggtttttccttcacttttagaaagtacttagccagtagttcttgcattatttgtataagggggatctgtgatggcagcaggattattactgatatataaagtaagttttattctaagatctatgttacaaattttctattgtgggaaagagatgttagaaccagaactttggggatagcaccaaagatactagaaaacagacatttataaggtatcttttttccccctcttttaggacatgaaatctgctgtgatcacgccttgcagtcattttttccatgcaggctgtcttaagaaatggctgtatgtccaggagacctgccctctgtgccactgccatctgaaaaactcctcccagcttccaggattaggaactgagccagttctacagcctcatgctggagctgagcaaaacgtcatgtttcaggaaggtactgaacccccaggccaggagcatactccagggaccaggatacaggaaggttccagggacaataatgagtacattgccagacgaccagataaccaggaaggggcttttgaccccaaagaatatcctcacagtgcgaaagatgaagcacatcctgttgaatcagcctagaggagaagcagcaggaatgatgctttgatactctggaggagaagttaactcaagatggaattcatgttctgatttgaggaatgaaaatgagatgatcaggcaggaaactgacattccaaggatctaatccaggaagtactctcagtggggaccacctgctttcatcccctgacattgtgggagaaattttgcaatgtatgctaatcaaaatgtatttatatgttctctgctgatgttttatagaggtttgtgaagaaaattcaacctcagcaacttcagaaactgcccctgatacgtgtgagagagaaataaaatcagattttgagtgttgaagggactgaggaagtgaggataaagagcatgaggacagcatggaaagaaggaggcagaagtggaactgaactttcactctccatgggacagatcaatctcattatcaagtctgaatagcaaccagccctctcctccaccccgtttctcctcagttaattggagctcagtcaggtgattattgagtcttgtacagcactgaaatgaaatcaaagatgaagaagcattgattgtattcaaagattgaagcacgctcatactttgtatgtgctttagggaaggggtgggtgggcacttgggccttgcgggtgcattcatgtaatctgagactcttgaactttatgacggagtcttcagtattttgatgtatatgaaacttttgttaaatatgttgtatacttcgctggctgtgtgaagtaaactaaaactctgatgaacactttggagtctgctttagtgaaggagaccaaagtgggaagggctttagggcactgatagaggccctgggtgtacttttcaatcctgtgtaatgtttaattcttgcaactgaatcaaaacagtgttaaattatggcaatatttgcactttgggaatgaatacataactgtatgatcacactctgcaaatgccacttttaaagctgttaatagactttgcaccttttctttgacaaggatgtgtcatatttaaatttttacactcatcatggctacaggtagaactggggaggggggaatgtaattttttatgggaattttgatatgaaaagaaactagtcatttatttatacaataggcttggctcaaaaagtgtttttcagacctcggtattcctaatgtgggatgtgactttattttatttttagtagcaaatttggatgtagactgacagacacagctgaatgtcttaataaatttaaatttgaagat

SEQ ID NO: 2003 - DNA, 2076 bp, Homo sapiens
cacactgaggggacagtctggaggcttgcagtgactcagacacagccaattcctcccctaatagcactgaatcacggttccagcggccagtggtcgcccctcgtcaaggtctaaggctgctgcagccccggctcccggaggccgtttccgcgcgcacacgcgcatccatacgtacagacgtgctcgggatgcgggtcccgccggcgggtacctgggcactgcgccccatctggactgaaatggggacaccccttcgggggtcccaggctcctggccgtattgttctccttctcctcgtgataactccgcagtggaggtggattccgtccaagacgcccaacgtggctccgcgtagcaatcagcgctgcaatcctggcggttacctcagcggcggcgtctctctctgcgcctcacactcgcagcccgcggccctccccaacttagggcgtttacaaaagaaactactccagacgcgctgcaaagggaggcgcatgtgcccgaaagctggcgatcagacggggggggcattctgcatgtgtgatgtttctgggggcggtggggagtgtgtgtcggggtcggggggcgggggggagtcaggcagaaagacagggacaacctccgctatgaaggatccgcgagtcctcaaatgtaagctccgtgtgactaacgacctgcactgatttggagagcgggcatgttaaaggtcacggacaattgttgctggcttcagcatgaatgcctaagtgggatgtattcttcagcaatcacgtttaagtctgattcaccgaaaagtattgacgtgcccaccattcatttcagtacactgtgaaaatgcacaaagaaagtatccccaaattcagttaattacaaagccgtaaatgtccttgtatacacatattattacatacatgtaggtaacaacaaagattaaaatttgaagacactttaatagctttttggtaggattttggaatgaatatcagtcctgtaaacctacgttcatctgcattcttgggtctattttaaagtacaaacttgcgctaacaatttccatgtgttgaaaatggacaaggtagatcattgaatggtgatcaagacttccaaacccctccacataaaactgttcatgacttgcttcctttttctagccggtttagggccctgtcttaagtcacccacatgtgatttcactcagggcattgtctgtctacaataatattgtgcttttaaaccatttcctttcttacacgtttatctacagtgcatgcgaaatctgagagcgtaatttgatggatgggcaaagagttaagtcctggtgtctggtgtggcagacctagaaaatggcagctggagggccagcatcattttgttactgacaattgaaacgtgttcacattgattgtacacaagtcactggtggttgttcatttgtcaatgcactattcctagctcactccacacacacaaaaaaggtataaaaatcaaatgtttaatacaagtttccatactattcctgtaaccatatttagcattgccaacatttcaactgttttaatagcttcaaacacttaaagtaaccattagggattaagggcaccgtttgcccctggaatggcccaggagagcttctcctattttgaaaggtttacgtaaattatagtatttggatggagcaaagtcagcagtattaatggttgaatattaatggttgattttggctacttgttttattttagtgatatgtgatattttacacatgtatggggtacgtgtatttgttacaagcgtagaatgtgtaatgatcaagtcggggcacttagggtactcatcagctgggatatttattgtttctatgcgttgggaacatttcaagttctgtcttctatctattttgaaatacacaatccattgttattaactgtagtcactgtagtctgctatcaaatattagaactactccttctatctaactgtatgtttgtacccattcactaacttcattcccccccaccctctatttataattttataacagacaataattttggttaatgaaataaatgggggaaagaaagc

SEQ ID NO: 2004 - DNA, 2525 bp, Homo sapiens
ggcctttttttttttttttttttttttgagatggagtctcactctgtagcccaggctggagtgcagcggcaagatctcagctcactgcaacctccgcctcccgggttcaagtgattctcctgcctcagcctcctgagtagttgggatcaatcacaggcacgtgccaccacgccctgctaatttttgtatttttggtagaaatggggtttcaccattttggccaggctggtctccaacttgtcacctcaggtgatctgtctgcctcagcctcccaaagtgctgggattacaggcgtgagccactgcacccagccatggtgggtgttttgtagggaacaatttcaaaaggacttctggtggcaaccattgagcctctggttgacagatatgggtaaaattattcagaaaacatatctaagacaggatgtggagaatagtactgtcatcagtttataccttaataccacatctaacaatgtttatgatagggttgatcacttccatgaaggcatcacaagccttgctgtgtgaagggcatctgaatacattttaatattttatatctgttcttcacaccttagcccctcactctggagaaaatagtacattttctttcttaaaatatggtacacttaagcctcaaatgtggatcttttctttgaaagtaaaactgaacaggtccttctgcccacctgcagtccccaaggaaagaacacatgttacgttcattgccaataataggtccttcagtacttgttgaatgaagaatacttgtgtttttccactggccaaccaaggtggatcctgaaagtggaacccggagttctctaataactaaattagtgtttttagtagctcattttgaatccctaagctgtgacttcaactctgaaaggctggctaactctgggaggttaccttcacttaattaagtacagcatttcttccaaagcgcatgcagtgctttatgtaaattctctctcctggatttgtgtgacgtagcagggttagaatggtgagacagatgcctggttttggagtcataagactggctttgccacctagcatctgtgtggtcttaggccagccaacttttctttttttttgagatggagtctcactctgttgccagattggagtgcagtggcataatctcggctcactgtgcaacctccgcctactgggttcaagtgattctcctgcctcagcctcccaagtagctgggattacaagcgtgagccaccgcacccggccaaagatacgtttttaataacttgggctctttcaagagaaacagggagcaccatcacctcagaaagcctttaccactcactgctgccccaaaacaagagatgcatatattgttgacaaccagtgcttgaattaattacattttaaaatatcgtcctgagctctgcctgtagctgagaggctgagaagcgtgaaatagccaggattaaatgacctgcaaatctagactggcttcttttggggctggtactgccaggcagacagatccctgttccttgcacccccactgtcctccaccatctctactctggatcaagggtcaaaaaacttttttttgagatggagtcttgcaggctggagtgcagtggcatgatctcggctcactgcagcctccgcctcccggcttcaagcagttcccctgcctcagcctcccgagtagctgcgactacaggtgcacaccaccacgcccggctaattttttgtagtttggtagagacagggtttcaccatgttgttcaggatggtctcgatctcctgacctcgtgatccgcccgccttggcctcccaaagtgctgggatttagaggcgtgagccaccgcctctggccacaaaaacaaacaaacaaacaaacaaacaaacaaacaaaaaacgcttttacttaaaaggccatataggaaatactttaggcttcagggccatccagtctctatgtcaactactcaattctgccttcgaatctgaaagcagccacagataatacaaacacaaattggtctgggctgtgttccaataaaactttatttacaaaaacaaatggccagccccaagggcctggtttgcaactcttgctctggagcagagcagaaggtatactctgaactgcaacaaagtttctgctgcaaaagcagcacctctgctgtccgtcccctcctctctgtccactggctctggacgtccatgtgaacaggcttgccaagaaggacaaagtgggcaggtaaagctggggggggcggccacaatcaagatcccaacacccctatctttaagaggcagtgccaagcgaatcccatttcaggggacccactctacctcgctgcctacgatgaattcccatcttacagcctctcgattactatgcagttaccaagctggctaccaccttactaagattcttgccattttctcattctagtcaaaaaagtaagtcatcggtttagtggagggggcagctaaagcccaagtttgtatttgagaaagatgtacaacaggttcttt

SEQ ID NO: 2005 - DNA, 3574 bp, Homo sapiens
acatctgttttctggctaccgagagggcagccatgaacacccaaaagggttccctcaccataaacgtccacagaggttccctcgccatgagcatccaaaggggttccctcgtcccccgggatatggatagctcgggtagagacatgcagctgcgggtgattccggctgaggtgaagttcctggacacgatggccgggagggtgtaccgcctcccgattactgtgcataatatttgccgctggaaccagaaaatccgatttaaggagcccgtcaagccacagttcaaactgatgttgaccagtctggataaagaacttgcttctggccttcagatgacagctatggtggaatatcatcctgataaagacgaagacacttttgaccggctacttatttcaatagaaaataaaacaacagaaattcctctaattgggttgattccatcctgtcaattggaaattgaatcagtagttaattttggcacactggttgccaatagtaaagtatattctaaagagattactatcactaaccatggcaaagctccaggcatatttaaggcagaataccacggccaattacccatcctcatttttccaactagtggtatcgtggatgctaagtcatcaatggttattaaagtagatttctgtgcagaccagccaagaattgtagatgaagaggcaatagtgattttgcaaggtcaacctgagatgctcttgagtatcaaagctcatatggttgagcagattattgaattattaagcatgagtagtgacagaaggctggaatgcatacactttggtcctgttttcttcggatcatcaaaaattaaacatgcacgtgtatacaataatagcccagagcccataaattgggtggccatcatacaagatgatgccgtgggagaagaattgggtacagatattcaacaaagaacagatattgctttaaataatctcacctacataagaaaaataaagaacatagatactactatcattatctcctgtcttcctaatgaagggactttacaaccttatcaaaagactgtaattacattttgtttcaccccaaagctaatggctgttggtaaaaaggatattggaccttcatacagacaggactatgctctctttttgagatttgagtccgtaggaagtaaagatggatttttgagagatgatgactataaaaccatcaaaagtgaacgatttcagaaagtggaattagcactgacaggcacaggacttcctgttttactacagtttgatccaggaccagttcttaattttaaaccttgtttcatgggtgaacgttcagaaattcagtgcatcataaaaaatcaatgcgaattacttcctgtgacgtaccactttaaaaaaactgcaaattttgaaattgatcctgaaaagggcaagattactggagggggtatggtggatgtgatgtgttcatttgttccacatcaacttggagtcttcaaagtgaagcagatgatagagattattggtttagtggcagaagaagatttgcaatctttgtcggtaaaatctttccatcacgtatatttagctttcaacagcatctgtaaaacttccaccaagaaagttgtgatgaaatttgatcctggtatattgccttcgatccgtaatcccacgggaaagtttgtggtcaaagacttggcaaaacgcaagaattatgcacctgtagcaatgcttcaatcagccatgacacgcactcacaatcatcgctcatgtgaagagccagtgaaggatatgctattagcctttcccaatgaccgagctgcaactatcaggtctaaagaccatcataaacatttcaggccaattttcacaaaagttccaagatttaactatgtgaatcatgattttgcatatactacatttgaaaaacagcaaaagaaattacatgaaaactattatgcaatgtatctcaaatatttaagaagtgtgcgcttgcagaagaaacaagcagagagggagcgcatgtattcatatgatgatacagacataggcttagagccaggatcaggtctaaagtcaccctcactctcagaagcggaaatagaagaggagctgtcttcagcagcaaattcaattagagcgaatcgattgttaaccaccaggggtatagcatctcaggaggaagagtctgtgagaagaaaggttctcaaaggacttaaatcagaaccatccactccacaagaaaaacatgattgcagcttaatgttgacaccaaagcaaattcatcaagtaattgttgggccttctgtccttaactttggtaatatttgtgtgaactctccaaatactcatctacttcatgttattaatatgctacctatgcatgttttgctccagttagatactgatttagaagaacttcagaagaccaaccaattttcatacgtgattctacctacatccagtacttatatttcaatggtatttgattctcccaccattggaaaattttggaagtctttcacctttacagtgaacaatgtacccagtggacacatcctagtggtggcagttgtccagccagtaacacttgagctatcttctaatgagctagtattgagaccacgaggcttcttcatgaaaacatgttttcgggggacagttagattgtataatcgtcagaattgttgtgctcagtttcaatggcaacccgtaaacacaggaagagggatagcattttctatttgtccatctaaaggcactgttgaagcatattcctcactggaatgtgaagtaacttggcagcagggcttcagttctccagaagaaggagaatttattcttcatgtctttcaaggaaacgcgttgaagctaaaatgtgttgcacatgtaattattttccttgaacatggtttttgttttgagggctatgaattggttgggtatacactggtgtatatagttacctatatctagaattaactgtaaaacccaagactttcatgcaacagtactagtttttttgttagagcctctataaatatgtaatatcatcatgggagccattgaaatgaaattattttattaagagacacaaaaagtattttcagagaatatacttgatggattaaaaatgtgagtagagggaaagctgtaatatgcaattttaacctttttctggtacagtccagagggccttaaattcatgactcaatcaccaagcatgattttacatgtgtaccaaatttcccactcaatgttcttagaaatattaaagaagccaaatgctcttttactaaaccccatctatatttctaggacatgatgatactcttacatatttcagctgtggaggagtttttagcctcaagagatgagaaattcatctacttttagtgatggcaagtgacagaactcagtatggtttttcttctaagcctaaaataagctgggtcctactacttttcattatgtgtaaattagttttattttttaaaaactttctattgaagtataacatgcatatgtatatgtatatgtggagaaacatgaagtgattaaataaaatattcatttgtttgtcattc

SEQ ID NO: 2006 - DNA, 4634 bp, Homo sapiens
attgagctgggctgcagaggagtgtgaggtgcagacaccatgaggtacccacagccaggaaaacgaggatggtcggggagacgcgccagcgaagagctgagcccctgcgtgggacccctcagtggttcccagggggcgtgggacttgcgcagtcctttcagagggctgtttaccaacaggaaccgtaacattaaacctgctcagaccccttgactcagcaatttcatgtctgggaatatatcttaggaaaataatcagagatgcctaccaacatatgtgatgatgatgtatgacagaattattatacaaatatatccatagtaacagggggtttgctgaaataaattatcatatattcatataatatgacattatcaggccattaaaaatcacagtttcaaagagtaataaaatgggaacatgctcatagtatagttttttaaaattgcagatggtatatggctaaaaatgtctaataatgcaaagatgtatacagaccttaatcctctagcctcctccctagagatgacctctgttaatttctcaaatatttttctggatactttacacactcacacactttttttgagacagagtttcactcttgtcacccaggctggagtgcaatggtgtgatcttggctcactgcaacctccacctcccgggttcaagagattctcctgcctcagcctcccgagtagctgggattacaggtgcctgccaccttgcctggctaattttttgtatttttagtagagacggggtttcaccacattggtcaggctggtctcaaactcctgacctcaggtgatccgcctgccttggcctcccaaagtgctgggattacaggcgtgagccactgcgcccggccattcatcttaatttttaaaaaatctaaccatgaagccttggttatcttggagagctttcctgattagcacaaaaagaaaaaaaaatccaattctttacagctgcatactattccattatttgtatgtgtcatattttatttaaccatcctgctattagtgaccattgagttggcttcctgtgttttgccgttacatggttgcaacaaacatgtttgcatgtgtctgccctcatgtgcatgatacatgattgatttgatagattttaggaattacatcattcattcatacactcagcaaatatttaatgagtgcctactctctgataggtgctgttggatgtggctaaattttaaagtgtagaatttaaaaggtggctaccaaattccatgtgcaaaatgaccccacgcatgtataaaaacacacacatccacagatttatatgcgggagagaagatgtggtccctggcctctaggctctctcagtctgtggcaagacagacagacatgtgcacgcggcactgtaaggttgagcacagtctaagtactcagcatggtctctggcacatagtaggtgcccaagaaatacatgtcgaatgaattgagggggtaaggccttctagggcaggtggcctctgacctcagccttcagtgttccgtaggtggaattatctgccagagacgtggcaaaagggagaggaaccaagactgaggcacagaggttcaaacgtacccggcacattcagagaatccttttcagaatcacgtccccaagagcttctgtgttctgtacggtgatgttgcagtgctgtttttccgcagtctcgctccatcggcctcaatccgctgtacatcatgctgccctgtaccctgagtgcctcctttgccttcatgttgcctgtggccacccctccaaatgccatcgtgttcacctatgggcacctcaaggttgctgacatggtaacacagctgtttttatttactcccgtcggactataacgctgttgtcataagggatgccccatttatgaatgacagagtttcaaaacgatgtcatgtgacttgggaatgccacggaacatccagacctgtagccattgttgacatttataatgcagcttttcttctttttctgagatgatctcaagcctcacacactgttctttctctgaggtgggttatagactctcccacctggagaagcctgtgcaggcaccaggggagtccttggaaggggtgaaggtggggctgagggactcatatggccaaggatgaacttgacaaattagcaagaaccatgaagataggcagggcaggcttaggcagcagggggatgttaatgacagtcacagagatttgtaggggtgcctgaagaggtagaagcagggagagggagagagagagcactgcctgggagtagatgatgccttggaaacaaatgtagtcagaggaagaactcttcattagctctgtcacctttgctgggagaagggcagctttgcagctctgggctgggaaagaggcaagtgtttgagcccaagaggccagaaatgtacctgggaccaatcgggtgttcgttatctcagagcctctgctgggtatctcagggactccatgagcattttcaaaaaaaaggtgggtcccagaaaccatggactgcaaacttgactccaatccccagtaaaatatctacaacagggtagtgaagcgatggttagtgaccatgagggaagcttgcagagcaggcatcagaaagagcctgaggaggtccacagggaagctggcacgtccttgtaggatagttaaggcactggggtgagcaatgaacctggactcacggaacactgggctctgtgaccgtttccctgaatggcctaagctgttgcctcctgtcacttctctgaggtcattttccaaatgcgcacgggcatagagaacccatccactctgcctacttcccagggatgccttgagcactgaggatacctgggggacatgaagtcgcactgtcctgggggtcgggacaccccagccagggacagagcatggcacagggacatcgaggcccagtgagccgaccctttgtcctcctctctgagagcactagtccccagcaggcctcagggtgctgactctgtctcttttccaggtgaaaacaggagtcataatgaacataattggagtcttctgtgtgtttttggctgtcaacacctggggacgggccatatttgacttggatcatttccctgactgggctaatgtgacacatattgagacttaggaagagccacaagaccacacacacagcccttaccctcctcaggactaccgaaccttctggcacaccttgtacagagttttggggttcacaccccaaaatgacccaacgatgtccacacaccaccaaaacccagccaatgggccacctcttcctccaagcccagatgcagagatggtcatgggcagctggagggtaggctcagaaatgaagggaacccctcagtgggctgctggacccatctttcccaagccttgccattatctctgtgagggaggccaggtagccgagggatcaggatgcaggctgctgtacccgctctgcctcaagcatcccccacacagggctctggttttcactcgcttcgtcctagatagtttaaatgggaatcggatcccctggttgagagctaagacaaccacctaccagtgcccatgtcccttccagctcaccttgagcagcctcagatcatctctgtcactctggaagggacaccccagccagggacggaatgcctggtcttgagcaacctcccactgctggagtgcgagtgggaatcagagcctcctgaagcctctgggaactcctcctgtggccaccaccaaaggatgaggaatctgagttgccaacttcaggacgacacctggcttgccacccacagtgcaccacaggccaacctacgcccttcatcacttggttctgttttaatcgactggccccctgtcccacctctccagtgagcctccttcaactccttggtcccctgttgtctgggtcaacatttgccgagacgccttggctggcaccctctggggtcccccttttctcccaggcaggtcatcttttctgggagatgcttcccctgccatccccaaatagctaggatcacactccaagtatgggcagtgatggcgctctgggggccacagtgggctatctaggccctccctcacctgaggcccagagtggacacagctgttaatttccactggctatgccacttcagagtctttcatgccagcgtttgagctcctctgggtaaaatcttccctttgttgactggccttcacagccatggctggtgacaacagaggatcgttgagattgagcagcgcttggtgatctctcagcaaacaacccctgcccgtgggccaatctacttgaagttactcggacaaagaccccaaagtggggcaacaactccagagaggctgtgggaatcttcagaacccccctgtaagagacagacatgagagacaagcatcttctttcccccgcaagtccattttatttccttcttgtgctgctctggaagagaggcagtagcaaagagatgagctcctggatggcattttccagggcaggagaaagtatgagagcctcaggaaaccccatcaaggaccgagtatgtgtctggttccttgggtgggacgattcctgaccacactgtccagctcttgctctcattaaatgctctgtctcccgcg

SEQ ID NO: 2007 - DNA, 3576 bp, Homo sapiens
ggggaaggggaggaggaagccaccctgtagacttgagactgagtcttaattcaagttcaaactctgttgttaaccaacatccaaagttatgcaatagcttacactgcctctgttaaaaacttgtgaaatatcactcattgataaactattgtaatacttttccttagctcggtttctcaactgaggcactgttgacatttcaggccaggtaaccctctgttttaggggctgtcctgcgcattacaggattttagcagcatgcctggcctctgcccactcagtgccagtaacaccttcctcagcaattcattacgtctgtcagaaatgtctccagacattgccagatgtcccctggaggggcacagttgcctccatttgagaggccctgcttcagaggattcactctgagtgagttcgctaatgcatttgagcaaattggaagttcttccctgggccagaggctcagtagccaaaacagaattacccagagaactaggcctccgtagaacagtcattgcctgaaaggggcaggaggtgactgggcggaatggcacaagtggccccagagcaggtccagccccctcccaccgcagcatccagaaagacccgtgggcattcggtagatgagcccaagatctagaaatggaacattactggagaaaagggcctaggagactagaggtagctctactctcagtgtgagcgtgtgtcagcacaggcgttgtggtgtctgatcacagagtaaaggtatgcttccttaatcttgcattgaaaaccatctccttcgcatacaccatatgcaaaaccaaattcaggtagattaaaaagcgagaaaagtaaacaaaactgcagatgcattcaggataaaagtaagataataattttattgtgttgagttatgaaaagccttccttaaaaagatacagcccagagatgagaaaggaaaaggcacaaaaggcccctgtcatgcgccatggatgaagatacaagttgaatgccagaaagcgaggggcacaatttaaagtgttcatttttagatttagcaagtctactttcacacatgtatcctataaaaatatttgcacatatgcataacggcacatacaaggacataactgcagcaatggcaaggagtgatgaaaaagtaggaacagtggccaaatcgagtgataacagaaaaggaggcagcactgtgaggaaggttgcgcagagtgcaccgctgagcacggcctgcgcctagacccctgtgctgtctgagaccacctctggagtatgcagccatgtgtggatcacaggtgtcaaatagcgaagttactctggaagagttttttttgtttgtttttttggggggtttttttgttttttttttgttttgttttgtttgtgcagacagagtctcgctctgtcgcccacactggagtgcagtcacgtgatgtcggctcactgcaagctcttgcctcccgggttcacgccattcgcctgcctcagcctcccgagtagctgggactacaggcgcccgccaccatgcctgtagtcctaattttttctgttttttagtagagatggggtttcaccgtgttagccaggatggtcccgatcgcctgacctcgtgatccgcctgcctcggcctcccaaaatgctggaattacaggcatgagccatcgctcccgacttaattttgcattcttagtggagacgggggtttcaccatgttggccaggctggtctcgaactcctgacctcaggtgatccactcgcctcagcctcccaaagagctgggattacaggtgtgagtcactgcgctcagcttaattttgtatttttagtagagatggggtttctccgttttggtcaggctggtcttgaactcctgacctcaggtgatccacctgcctcggcctcccaaagtgctgggattacaggcatgagccattgtgcccggccacatttttctttttaaatcatttttattcaggtacaacttatccaaaaatcagcaccactggtttgtttattgcagaaaaatgaaatttagaagtttggtctaaattttctagctcgctaaggaatcttcgaaaattcccaattttcctatttctcactaatgtaggaaatatttaaaagccagcaaagaagaaaacatcttttaaaatctcattatctatacgtaatcactaagaaccttttgcaactttcccttatagttttttaacctgtatatgaggcgttctctgtcctgaagtaatgtcctgcctctggctagctcctgtgacggtagccctcccggggctggccctgggtgaggaggggtggcggcggggaggtgagcccaggaaaggctgccctcgccaaggctcggaaacttcattcgtgcaccgcacgaggcgatggctcagggcaggcttggacaccaatactttgccagctcctgaggcaccggacaggctctggccagagcttaattggttagccctagaacgttccacgttcacgtcagactccatagtagggactttctcctcagagctgggcaggaggagcccactgagggtgtgccatctctgccctccagggaaagcgggaagcaacagggaaacatccatctgctccgccctagagcccctgtcaattttggacccaccgctataggtcttctgccccatactgttagaaaaagatgcaggttacctgggcacgtaaacggttttcaggagtggagtgcctgagatcccagagtccacctttcctttatataacactcgtgtcacaggacagattagatttcttccgtgtttggagaacattagtcctttaaaatatcagcctgtgctgcaaagtggggtggattctctagtctcagtcactgtctcagcagtgctgttgaagccctctcacctgctccttctggacttcctagggctgcagaccacaagactgggaaaccacttggaagaccgagtgaacaaatttttgcggcgccagaatcaccctgaagccggggaggtttttgtccgagtggtggccagctcagacaagacggtggaggtcaagcccgggatgaagtcacggtttgtggattctggggaaatgtctgaatctttcccatatcgaaccaaagctctgtttgcttttgaggaaattgacggcgtggatgtctgcttttttggaatgcacgtccaagaatacggctctgattgcccccctccaaacacgaggtatgtgacagggcacatctgggcctgtcctccaagtgaaggagatgattacatcttccattgccacccacctgatcaaaaaatacccaagccaaaacgactgcaggagtggtacaaaaagatgctggacaaggcgtttgcagagcggatcatccatgactacaaggatattttcaaacaagcaactgaagacaggctcaccagtgccaaggaactgccctattttgaaggtgatttctggcccaatgtgttagaagagagcattaaggaactagaacaagaagaagaggagaggaaaaaggaagagagcactgcagccagtgaaaccactgagggcagtcagggcgacagcaagaatgcc

SEQ ID NO: 2008 - DNA, 4050 bp, Homo sapiens
gaactttatagaaaggctaggcaaaaaatgagacccagagatatggaagaaactggccaaagaggggaaagtgggctatttcttttttttttttcttttttctttctgagacagagtctcaccctgttgcccaggctggagtgcagtgacagcgatcttggctcactgcaagctccgcctcccgggttcacgccattcttctgcctcagcctcctgagcagctgtgactacaggtgcccaccaccatgcctggctaatttttttatatttttattagagacagggtttcaccatgttagccaggatggtctcgatctcctgaccttgtgatccgcccgccttggcctcccaaagtgctgggattacaggccaccgtacccggccaggctatttttttgttttgtttttgtttactactgtattgcttttctctttttcatatttattgagcacctactatatgccagtcactatgctagatgctttagtaacatgaaggtttcaaactaagaaaagctcaacaaagagccctttagaaaggtaacagttttcctgtgtattgggggagtgggtctcataaggttgtatgatgagaagcgcaagtaattgttttgtttttttttgagacaatgtcttgctctgtcgatcaggctggagtgcagtggcgtcatctcagctcgctacaacctccacctcctgggtttaagtgattctctggcctcagcctcctgagtagctgagattacaggcacgcgccaccacgcccggctaatttttgtatttttagtagagacagggtttcactatgttggtcaggctgatcttgaactcccggcctcaggtgatctgcctgccttggcctcccaaactgctgggattacgggcatgagccaccacgcccagcctggctaaggttcattatccccatctttcagatgaggaggcacacaactctccccagatcccacgtcacagagaatgcaggtctgagtctgttccttgagctcagggtcttggcaatggtgatgctttggagctgcagaatcctctgttggggatggggctgccctgtgcattatagtacgtttagcaacatccctagcttccacctactaaatgccactagcactccttcagatgagaccaccaaaaatgtctccagatgttaccacatgtcccctggggggtaaaagtgcccccgttgagagcactggctcttttcttcacagtcctgacctggcggcctgcacaggccacttctccgaagtgtttcaatgcactctctgccctgggtaccttggacacagcaccctggcccagagaggttggctgacttgcctgagacgctgcttcctgggagacgcagtagcatctttcctttctgttctggttatctttcttagttctttaccaccttatattccccatgacaggtgtgtttatgtacacacatctgcctcactccactcagctccctgtcaggtttcctgccagtctgtccctcttccttcaggctcagctacgtcctgcacagacagtaccactgcacatacctgtgtgtgcccagcggtggacccacctccaaaagcagccagtgctgacagcagagagccttccacactcaagtcaggccaagcaggaatcgctacctgcctgtcatgaccacattctcagtgaacattgacaaagcccccttagcagctaattagccctgccgtgcgctagggatgcaatttctcatctggcagtgcgccacactcctgcctccctgcccaaaggacgtagtggctgctgctgatcgtctgcactgctgttccaggggcaggaggtttgctgcaaatcaggtacccccagctcagtgagcagaaccagtccaaggttgagtgaggagaagggcaagaagggcaggcacagccgtgagtatgttctggggctaagtaaccatgaggtcagcccagagaccttgcacagttaggcaggcctggacttctcgcccttccccttgcagcttctgctctcccagctagggactgaggaaagccctgcttctagatgccatgtgctgctgcctggcacgataggtacccatctgtccttggggttcctgagcctggagagcgggctttgtgagcactggtgcctcacctgcctggctcagctctgcagccacaatatatgcttaatacctatttgttaaatgattgaagacttgactgccattcagtacagagaattagccaggtgaataaacaggatgtgtcatagaggttctagaattgatcatgaccctttctgtctcattcctgacttctaataccgtatatgccaaatggggttctgctgtgatttaatttcttaaggactgggtttatcaaaagtccctcctgatctaatcctttcctctaggaaggcttctcctttcttcatctgtcctaagtgcatggtcttcatctcctgggtggtccagactaggtggcactgggcctgcaggcctctagctgctcaaggatggccctgtctgcatgcttcctttcaaaagctagcatagaaaggagggcccaaggtgaggaaatttgtccaaagtcacccaatgagtcgcaggaagggctagaatctggttatctggaccgtcctagagcactttcacagtgacagccggctggaatcaagttttcatttagaaaaatggctagaagttagggcattgcctgcagccactgaaaagcagctttaggagcagatgtccacgtaatagaaggagatgggctagggcctgccacggaagccagcaagcgcgtgggagctgggggaggaaaggagcaaaaggcaagaacaggcagtatgtccgcggtgcccacagtgctgtgggtacaagcaaggggaaaagagcccatggtgtgcagaaaaccatgcgtcatgattcttatttcctgctcgcagctttgactctctgcctcatctcttcctggaagtgtcttggaagttaggcgactgcacagggaaaggttcgctgcagtgcttgcaggcctgcacccatttattcatccggtggatatttgctgggtgcccggcctggggatccatggtgagcgaggaaggcatggtattgaagtggtatgcctgcatgaccttggcgggggcgcatggcatagagaggacaggcttcagaacaggcaggcaagggctgaaatcctatctctgccaccgaacagctaatgaccccagcaagcaatttcacatccccgaactttcctgtttcctcatgtgtcaaatggggatgatctcgagacgactctccagagtaaccacgtgaagcacctagcacaggggctgacgcaaacagctgggcatcggaggagcctccagggttgtgacctccagtggcttattttccttttgggatcttctctcctagatcctcccctttaattccctgtgaaatttaccactttcatattgaatcgttggcacacagggctaactgcttgttcacctgaaggaagctacagagttcaggtttcttttttctttctttctttcttttttgcttttttaagatgatcttgctccgtcacccaggctggagtgcagtggcgtaatcatggcttcctgcagcctcaaactcctgggctcaatgagttccttgagatcttccatcctcagcttcccaagtagctagtagtagtagtggcttgcaccaacgctcctgccctaattttcaatatttttttgtagagataggatctcactgtgttacccaggctggacttgaactcctggcctcaggcgatccttccgccttggcctcccaaagtgttgggattacaggcattagctaccacacctggccaaggcccaggtttcgacagaaagggagagaaaacctgccagagatgccatttcggagccactctgcttggcagggacctgtgttcccctcatgcaggttcatccttagagggctgcggtcttatctggttgtgcaaaagtcccacaacctttctgggttgatagtttgtggtgaaataaacaattttagtttgtttggag

SEQ ID NO: 2009 - DNA, 4907 bp, Homo sapiens
ctttttgagacccttcccttggacagcattggacagggtgaggttctggcccatgggagtccaagcagagaagaaggaactgattctgctgggcaggcccagggcatagggtccccagtgtatgccatgcaggacagcaagggccgcctccatgccctgacctctgttagcagagagcagatagtcggaggtgatgtgcagggctacaggtggatgtttgagacacagcccctagaccagctcggccgaagccccagtaccatcgacgtggtgcggggcatcacccggcaggaagtggtggctggggacgttggcacagctcggtggctttttgagacccagcccctggagatgatccaccaacgggagcagcaggaacgacagaaagaagaagggaagagtcagggagacccccagcctgaggcacccccaaagggcgatgtgcagaccatccggtggttgttcgagacttgcccaatgagtgagttggccgaaaagcaggggtcagaggtcacagatcccacagccaaggctgaggcacagtcctgcacctggatgttcaagccccaacctgtggacaggccagtgggctccagggagcagcacctgcaggttagccaggtcccggctggggaaagacagacagacagacacgtctttgagaccgagcctcttcaggcctcaggccgtccctgtggaagacggcctgtgagatactgcagccgcgtggagatcccttcagggcaggtgtctcgtcagaaagaggtttttcaggccctggaggcaggcaagaaggaagaacaggagccccgggtaatcgctgggtccatccccgcgggttctgtccacaagttcacttggctttttgagaattgtcccatgggctccctggcagctgagagcatccaagggggcaacctcctggaagagcagcccatgagcccctcaggcaacaggatgcaagagagccaggagactgcagctgaggggaccctgcggactctgcatgccacacctggcatcctgcaccatggaggcatcctcatggaggcccgagggccaggggagctctgtcttgccaagtatgtgctctcgggcacagggcaggggcacccttatatacgaaaggaggagctggtgtcaggtgaacttcccaggatcatctgccaagtcctgcgccggccagatgtggaccagcaggggctgctggtgcaggaagacccaactggccagctccaactcaagccgctgaggctgccaactccaggcagcagtgggaatattgaagacatggaccctgagctccagcagctgctggcttgcggtcttgggacctccgtggcaaggactgggctggtgatgcaggagacagagcagggcctggtcgcactgactgcctactctctgcagccccggctaactagcaaggcctctgagaggagcagcgtgcagctgttggccagctgcatagataaaggagacctgagtggcctgcacagtctgcggtgggagcccccggctgacccgagtccagtgccagccagcgagggggcccagagcctgcacccaactgagagcatcatccatgttcccccactggaccccagcatggggatggggcatctgagagcctcaggggccaccccttgccctcctcaggccattggaaaggcagtccctctggctggggaagctgcagcaccagcccaattgcaaaacacagaaaagcaggaagacagtcactctggacagaaagggatggcagtcttgggaaagtcagaaggagccacgactacccctccggggcctggggccccagacctcctggccgccatgcagagtctgcggatggcaacagctgaagcccagagcctgcaccagcaagttctgaacaagcacaagcagggccccaccccaacagccacttccaaccccatccaggacggtcttcggaaagctggggctacccaaagcaacataaggcctgggggtggaagtgatccccggatcccagcagcccccagaaaggtcagtagggaagagcaagcactacccagagggctgcctggggggtgggtgacaattcaggatggcatctacaccgctcatcccgtgaggacctttgacccacctgggggtgtccagctttctcagagggaaccccagtcaaggcacagggagactgccctctcagtccaggctccccgcccactccagggaggcccaggtcagagtactgggccagggcgggaggagcctgggggctgcacacagatggcctgggggccaccagggaaggcgatggcagaagtctgcccagggggcctccaagctgcagagaccaccctgaagactgcccctctaggccgccacattctggcctctgggccccaagctgcaggtgccagcccgcacccccataatgcctttgttcctcctcctcctactctcccagctgctgtgacaggacctgactttccagctggagcccaccgtgctgaggactccatccagcaagcctctgagcccctgaaggacccccttcttcactcccacagcagccctgctggccagagaacccctggagggtcacagacaaagaccccaaaactggaccccaccatgcccccaaagaagaagccgcagctgccccctaaacctgcacacctaacccagagccaccctcctcagaggctgcccaagcccttgcctctatctcccagcttttcctcggaggtggggcaaagagaacaccaacgaggtgagagagatacagccatccctcagccagccaaggttcccactactgtagaccagggccacatacctctggccagatgtcccagtggacatagccagcccagcttacaacatggcctcagcaccacggcccccaggcccaccaagaatcaggctacaggcagcaatgcccagagctctgagccccccaagctcaatgccctcaaccatgatcccacctcaccacagtggggccccggcccctcaggagagcagcccatggaaggttcccaccaaggggcccctgagagccctgacagtctgcaaagaaaccagaaagagctccagggcctcctgaaccaggtgcaagccctggagaaggaggccgcaagcagtgtggacgtgcaggccctgcggaggctctttgaggccgtgccccagctgggaggggctgctcctcaggctcctgctgcccaccaaaagcccgaggcctcagtggagcaggcctttggggagctgacacgggtcagcacggaagttgctcaactgaaggaacagaccttggcaaggctgctggacattgaagaggctgtgcacaaggcactcagctccatgtctagcctccagcctgaggccagtgccagaggccatttccagggacctccaaaagaccacagtgcccacaagatcagtgtcacagtcagcagtagcgccaggcccagtggctcaggccaggaggtcggaggtcaaactgcagtcaagaaccaagccaaggttgaatgccacactgaggcccagagtcaagtcaagatcagaaatcacacagaggccagaggtcacacagcctcaactgccccttccaccaggaggcaggagacatcaagagagtatttgtgccctcctcgggttttaccttccagccgagattctccctcctccccaacatttatctccatccagtcggccacaaggaagcctctagagactcccagctttaagggcaaccctgatgtctcagtgaaaagcacacaactggctcaggacataggccaggccctgctccaccagaaaggtgtccaagacaaaactgggaagaaggacatcacccagtgctctgtgcaacctgaacctgcccctccctcagccagtcccctgcccagagggtggcaaaagagtgttctggagctacagacggggccagggagctcacaacactatggagccatgagaaccgtgactgaacagtatgaggaggtggaccagtttgggaacacagtcctcatgtcttccaccacagtcaccgagcaggcagagccacccaggaacccaggctcccacctcgggctccacgcctcccccttgctgaggcagttcctgcacagcccagctgggttcagcagtgacctgacagaagctgagacggtgcaggtgtcctgcagctactcccagccagctgcccagtgaggcccaccgcctcccaccacacctgccacctgttcctggcctccactgccccaggactgaagtgggtacctgcctcctgtacactggagcaaggaccaagaggaaatggcatcttcagaggattactgtgggccatttccctttcgcagttctttcaataggcccagttcttccaaatggaaaaagaaaggtctggaagaggcccacagagttgcacaggcgtgggggtaggatgggggctcccagctgcttgtggaggatgtaatatatacagacacacacatgtttttcacacaggcctggcccacgcatcgacatgtgtgaatttgcacaccactgcctgaattggagccccccagagtgtccctctacccagagtttttatttctttaattagtctgagtgttcccagccatctgctccttaatccctggagaggaacagagccaactggacacagcgttggtctctgtttggaatcactgtgaggtctccagaaggacctggccgccagccccttcatcaccatctccatcattcagctggtcatctggtggcccaaaggtcacccaaagagtcagcaatcagcatgtccctagaagccaaatgcactgcctttctctgtccccatgactgtcccccactctgcaccccaaatgggaagcatacggtctgaataaatccaagttttattctctactctg

SEQ ID NO: 2010 - DNA, 4964 bp, Homo sapiens
agcgggcgccgctagccagcggaagatggcggagggcggaggccctgagcccggcgagcaggagaggaggtcttccgggccgcggcctccgagcgcgcgggatttgcagttggccttggcagaattgtatgaagatgaagtgaagtgcaaatcttccaagtctaatagacctaaagccacagtcttcaagagcccacggacaccacctcaacggttttactcaagtgaacatgaatacagtggattaaatatagttcgaccttcaactgggaaaattgtgaatgaacttttcaaagaggcaagggaacatggggctgtccctctgaatgaagccacaagagcttcaggtgatgataaatctaagtcatttacaggtggaggatacagattgggtagttctttttgtaagcggtctgaatatatctatggagaaaatcagctgcaagatgttcagattttgcttaaactgtggagcaatggtttcagtttagatgatggagaattgagaccttacaatgaaccaacaaatgctcaatttctggagtctgttaagagaggagagattcccctggagcttcagcgccttgttcatggtggccaagtgaatttggatatggaggatcatcaggatcaagaatacataaaacctagattgaggttcaaggcttttagtggagaagggcaaaaacttggaagccttacacctgaaatagtcagtacaccttcctctccagaagaggaggataaatcaatacttaatgcagttgttcttattgatgattcagtgccaacaacaaaaattcaaatcaggttagcagatgggagtcgtttgatacaaagattcaatagtacacacaggatcctggatgtccggaactttattgtacagtctcgtcctgaatttgcggctcttgactttattcttgtgacttcatttccgaataaagagctaacagatgaaagcctgacactgctagaagcagatattcttaacactgtgttactccagcaactaaaataatattgttcctgtccatgcagtagcatgtgggaatagatgatgtgccgtattaataaggacaatacttcagcattaaaaacagccaaattatttttattatttttacagataaattttggttttattgttattctgtcttccaatctgaatatagacaaatttggattaggaatagaccttgagataagtatgtttgagtttttagttgaaggactggcttatgttgatagtttttggatttctaggcaaatgagttgttacatgcttagtgttaatgtaacaacatttgtttgcagagaaaaatgaacaaaacccctttttgataaatgcatttggtaaaatttgcactaaagtttcttgatgcagcattgaccaacagccattaagaaatcttttgatcaaataagttgaaaatttgtctataatatatactgaaacgtgtcttttgattttgaaattgtttgatcatacaataattatttctcctattaagattttacacatcctttttacttactgatttagatatattactagtatcagaaactacagttttgccttgtattttacagaattatgactgttgtgaacttaaacagaaacacataaaggtcagcaattctttttttttttttttttgatatggagttttgctcttgttgcccaggctggagtgcaatggcataatttctgctcaccgcaacctccgcctcccaggttcaaaagattctcctgccttagcctcccaagtagctgggattacaggcatgcgccaccatgcctggctaatttttgtacttttgctagagacagcgtttctctgtgttgatcaggctggtctcgaactccgaacctcaggtgatccacccacctcagcctcccaaagtgctgggattacaggcatgagccaccacgcccagcctaaaggtcagcagttcttaagaagatatggtaaacagcaacaatattttaaaatcaagtaattacagttcctcccagagcttgcgttgatcacattcatttattcattcaacacatttttctaggaaactcactgtatacactaaacactattctgtgtgctcaacctagaatgtcttctccagaacaagactagtgtagaaatacaggaatgtaaattctgtcagacggactagatctaaagaattaccagcataaatgtttgcatttctgctgaagccagaagcttttccttcttcctagacaccatttcatccttaattattacttctggttagttttccattgccaccataacaagttacaaaatgtggcttaaaatagcacaaatttattatcttcacaattctgtaggttaggagtccaggttaagagtttcgcggtgccaagatcaatttgttggcagggttgcattctgttaggaggctctacaggagaatcatttccttgtcattccaccttctacaggacatcctcattccttggcttgtgacctccttcttccatcttaaaaaccagtgctgtttcatctctatgacccttctgttaccacatctctctgacaccagtgtggagaggttctctgcaggactcatgattaaatgaggcccaccggatatccaatctaggcttatctccttgtcttgaaatccatagtaaccttaattacatctgcaaaatctcttttaccatctaaggttacatacaggtttggagattaggacattaacattttacatggaacattattcttgcctactacagttcccacccaccccccgctccactcctgtgttaaagattcagattcatcacaaataaatttacatcactcataggtgctcaaaagtcacaatccattattacagcatcaactctaaatccaaaatcttatctgagtctcaccaactcaaaagtctcaaatctcacattgaagccatctaaattaagtttgggagaggatctgtgtgtgatttctgggacataattccaactgtgcacttgtgaacctagaaaacaagttatctgttcccaagtatgatggcatgacaggcagacaataatagttacacacgttcctgttcaaaaagcagaaacagatggaaaaaggagccatcagcaccaatcaatttacaaaaccagcgaggcacccttctttaagtttcaaggcctgggagtaatcttcagctcactgctgttctctgggcttgttgactgtctcagagtcatctttactttttcacaaaaggtagcacacgtttgcagctgagtatcaacttatcagtttgttcttcttttatattctctaaagctttctgttaaaaatggtggtgcttctgctgctataacgttgtcaagaaacttgtgggtcttttacatatgtcacagggatgcactcatttagataggaggctcctcacgtatctttcctggaaaatcctgtctctgtttttggctttttctgaaatagctgagaggatctatgattcacacccttaatatcttcaaagagtcttgtgtgtgacctgatattcagaccttttgatgtttctgaagtattagcaaaaggttatacagccatatcttcatcactttctctagagtaaaggctgtcctgacggtgaatcttagttttagtggcttttgccatttgaataggccgcgaatttcccaaatcatcaagtcctggtttctttatatttaacaggtcttccctcaatctacctctttccacattttactataatcagcaagaagacagcaggctgtaccttccacagcttgcttggaaatatcctcagctaaatattgaagtcatcacttaaaagttctgctttacacataacggcaggacacaactcagcttagcttttcgccactatgtaacaaggactcctttcctccacttctccagtaacatattcctcattttttaccaacagtctattcatgatgatttagatattctatggcaatcgaggtattctctattatgctcctttcttcaaggccgccctagcattaacattccatatttctactaacagtctgtttaaggcagtttagcttcttttctggcatgctcctcagaattcttccagcctccacctactgcccaattccagagccacttttctacttttaggtatttgttacagcagcacctcaagtacctagaaaactcttttatgcctgcttctctgccagatgacttgaatatggtactagatttggaattcacctttctccagggtcactgtttatttcaaagaggtgaatttacctgtgctagggttttcacactgggagtgctaccagaactaccacaggatgaaagtggtgagcccaccactgcagagaagttttctcagtgccgtaatatagaggaattctcaaaataagccctactccttttcacttactgaaaacaacttggataatgtgtaacagccagccccatttcaaaaagattaccaggggtaaaacaactttttcatgggtcaaaatcatcttccgaagaaaatgatttcttaaaagaattgaacattgtaaatcaaagggcattgtcctgttttggattaacaaaacaggaaaaataaccaatccttgtaaaattatttgaaattttcttgtttttatcagttgagtgcctatagatgcacatacaaaaacaactgccatttttgtatataatagtcttccaagatagagatttacattaggagagaattaaacatccaggagggatgaacagtatttcatgtgtgctatgtagtgttttgcttcattgagagtcattttcatgaattatttttactactgcagtcatcttaaatttataatcatctcaaaaaagatgtcacaatgaacagacaaccatctgtgaggtcagtcattttgcatgatgtatgtaatcaaaaagtttgaaatgtctgcttactaataaagaatgttttcactg

SEQ ID NO: 2011 - DNA, 3825 bp, Homo sapiens
ctttccttttcgcctctcctcgttctctccctcgcctttcctttcctttctcttcctctcttcctcgctcctcggtctcggcgctctcccagcttttcttctcctggctcctggttccccgctacgccaccagtccactcacctctctccttgccctactccctccgctactccctgacgccccctgcagcccccagcccccctgcaggccccagccccagtaagtttggagaggggaacaaatgctgagcctaggtagggaccaccttggggaggaagccaaaatcacactgctcacccgagagcccctgccccgcgctggcacgcccccgcctggagtgcactcgtggccccgggcgctgtcaggtacccgaattggggctgccaccgtgtcggaggcgaggcgaggaagggagctggaataacaaaggtggcagctgagcatccctggagagggtgggtggtatgaaagcacttccagacctctagggacaccagggagtcatggtcccagcacattgctgtgtgattgagcccctcctcagcctgtgggtggcctaagttcacagggaggtaatggggtagattggatacctctggggtcttggaagaagctatgacttatttactgtctactatgtgatgggaagataagacccagaaaacagaaaggacatgtttaaggccatgcagcaagttagtgcctgacctgaatattgaagtgaggccctactaccatcagccatgggaaccatggctggatgggtcccaagcaatgaagaccttctgggtgtctaggggagaggtttgggccctcctccatgtgcgtgtgtgtgtgcgcgtgcaagtgtgtgtgtctgggaagccagaagattacactcttctttctaggccttctagcccttgctggaaggcctgtagtgagtggatggcctgccttaccctctgcacatcccgccctgtttattgagatttccatccagcctgaactcctgtggggaggtgttatcttctggaccagagccctatctgccatgaagccattgtggtgtcacaggggcttctgagagatcccaggctggagacggaaagcagaagatttgaagtggtgggaggcaggggctggtgtcataacacactttccacccctgggctgggaggggcactccctcctgctgaactctcccaggccagtgacctcatcttgctcctgtgcttgttttccaaagggtgttgtaagttgactgtctgctttcttccacaacactcaaagtgtggcctgtggagcaacagcttcagccacagctgggagctggttagaagtgcaacatctcaggccccaccctagaacattaacatctctggaggtaggacccaggaatctgtttcacaagtcctcttctgatgcttagaaaagtttaaacatcactgctttactctatttctcgacaaaaagatgacattcagtttggctagaattaaaaggggtgggtgtttcctggcaggttttagaaacctatttaaatggttccattgtccattcatccatccatcaacccatccaaccatccagccagccatccaccctcttttcattcaacagacattcagctgcactcgggagttgaaaggggaaggctcgggaccctgggctcctccagcttgccgtgagacaccactgtgtggcagaagaggtggcctctgtcccctttatcctccaagtgtacctgtggtcttcaggccggtcacttgcttgaatctgagtgtgtgtctctgatctataatcctaaaaaagctacctaatgcaggtgtccaagagggaaaggggaaggaattgcatgcacttggtgtctattgtgtgccaggtgtgttcacacgtgttatgaccttccactcttccagctgcccttcatactggatagcattattcttattttacagagaagaatattgaggatcaaagagaccaagactgcaagcgtaaaaactaagattggaaccaaagccagttcttctcgatcccagggtctgcgcccttcttctgttccatgtttcattgttcttggtggacctggggatcaatagctagaagttaaaggacaaactgatttgggaagtgcttccagtgctgtcttgagtgatgtctagagattagcagactggctgtgaagtggtgagctgcccatcactggaaccgtgcaagcagagactggtcatggtgatcacggtgttggtcctgtgtgagtgtgatgtggggaagaattgagaccagatgacctttgagggccttctgctgtctgaggcgggcctgcttgggcctgctcccaggtcagtgccccatggatggagcctctgaagccagctgctcattatctgtggatcctctgcggggacactgccagctcccaaacaggaaacatgtccagaaatctgtaattagagctgggagccacaggcctgagaggtgcctgctgcagcttcaagtgcagacacgccaccctggttaagtccctgggagagaacccagtgagtcaggccctcagatcttctccctgcctgtggcacccccgccccaccccattccccttggaaggaaacctgctttggccaggaacctactgggtgaatgggtttcatatacattctctcctctgttcttccccagaaccgtgggagagaggaaacatctgccatgatgcaggcaaggaatgcaaagctcccagacatcatgtggctcactcaaggtcaccctactatggcccttgcctttctgagtgcctggtttgacctcttgatccctccaggggagaacgtcacagtcaaaggaggggtgcaagaggccagtggcacacagagaggtctgtgtgggcctgagtggctcctgggtcttccctgactgaccataacgcctttcagcctttctgaatctgccatgaagggacgggtccttgcagtgttcctctgccaggctgcctggcaacccatggcaattgtggtggtgttaaaacatggccacaggccaggcacggtggctcatgcctgtaattccagcactttgcatagggtatggcagaagagaccctaagtgagtaaagaccatgcccctgcaaattatactttgtttgctggaacattcactcttggagccctgagccaccatgtaaagaagtaggaagattcactgtcctgaagctgccatgttgtgaggaagcccaagccacatggaggggccatgtctgggtgctccggtcaacagtcccagctgagcttagccatctaacatccccagctattttagtttttcctgaaatcccagaaatcatggaatggagacaaatctctcctgctgtgctctgtctgaactgctgacccacagaatctgggcacataataaaattattttgtgccattaggtatatagttgatttgttatgcagccatagataaccaggacagctatgccagctatgaagtgccatgcagtcatctcgggggtcccactcacaacatctccccatactcctaggaagctggctgggctcaactctaagtgcaaagcattgtgcaaagggaagggcatgaaactggggggccctgcatctcctgggggttagagtactgaacttcctccacccactgccttctcagagatgagcaccctacatctggatctgcctcaggccctcttgtatatgactaagaatattggcttggtgtggtggctcatgcctgtgatcccggtactttgggagactgaggcgggaggatccttgagcccaggagtttgagaccagcctgggcaacacaacaagaccctatctctac

SEQ ID NO: 2012 - DNA, 3483 bp, Homo sapiens
ttgaaaatattttcatgagaatttaaactgacaaaaaatctagaagtttcttcttgcctgagaccccccctcccagaaataatctctgctatcagggtgtgttctttcaagcctatttctatgtatttgctcatatatagaaatatttctagaatgatataggcttctgtgttttattatctaaatcagtcattcttaaccaggggtgattttgtaccccctcctcctaggagatacttggcaatgtctggagatatttttggttgtcacacatagagggggtgctactgccatctagtaggtagagagaccaaggatgttgctaacatcctatagggcacaggacagcccccacaataaagaatcaacgtggcctaaaacatcagtagtgctggctgggctcacgcctgtaatcccagcacttttggaggccaaggtgggcggatcacctgaggtcgggagttcaagaccagcctgtccaacacggagaaaccccatctctactgaaaatacaaaagtagccgggcgtggtggcgcatgtctgtaatcccagctactcaggaggctgaggcaggagaatcacttgaagccgggagggaggtggaggttgcggtgagccgagattgtaccactgcactccagcctgggcaacaagagtgaaactctgtctgaaaaaaaaaaaaaaaaattatcagtagtgctgagaaaccctggtctaagtggtggtgtatggtatacattgttagacaatttcttttatacaatgtttctgggtcagtctatttagatcaactgatcgttttgcttactgccaagttttccatactacgcatagcaggtagtcgagttcaccattccccatttagtggacatctagacggctgctcgtttttatcattgcagcattctttgcacacatccttggatatgagcagacatgaaaatgtttttctagggttgacactgagcagtaaaagtgctgggttgaagggtttccagcttgcatttgtacctggccttctacaggggacagggggctatttagatggtcccctgccaaccccagtggacaaccctagggtggggctggaggtggggctgaggctgagtcttcctccccttcctccctgcccaggggtccacattcagtcgtcccagactgtggagtcgagtggtttgtacaccttgcagagtattctgaaggcacagctggttaaagaagacaaagatgcccagttttactgtgagctcaactaccggctgcccagtgggaaccacatgaaggagtccagggaagtcaccgtccctgttttctacccgacagaaaaagtgtggctggaagtggagcccgtgggaatgctgaaggaaggggaccgcgtggaaatcaggtgtttggctgatggcaaccctccaccacacttcagcatcagcaagcagaaccccagcaccagggaggcagaggaagagacaaccaacgacaacggggtcctggtgctggagcctgcccggaaggaacacagtgggcgctatgaatgtcagggcctggacttggacaccatgatatcgctgctgagtgaaccacaggaactactggtgaactatgtgtctgacgtccgagtgagtcccgcagcccctgagagacaggaaggcagcagcctcaccctgacctgtgaggcagagagtagccaggacctcgagttccagtggctgagagaagagacaggccaggtgctggaaagggggcctgtgcttcagttgcatgacctgaaacgggaggcaggaggcggctatcgctgcgtggcgtctgtgcccagcatacccggcctgaaccgcacacagctggtcaacgtggccatttttggccccccttggatggcattcaaggagaggaaggtgtgggtgaaagagaatatggtgttgaatctgtcttgtgaagcgtcagggcacccccggcccaccatctcctggaacgtcaacggcacggcaagtgaacaagaccaagatccacagcgagtcctgagcaccctgaatgtcctcgtgaccccggagctgttggagacaggtgttgaatgcacggcctccaacgacctgggcaaaaacaccagcatcctcttcctggagctggtcaatttaaccaccctcacaccagactccaacacaaccactggcctcagcacttccactgccagtcctcataccagagccaacagcacctccacaggtaagccaggcctggcaagagaacagggctgtgccagggcatcctttctgccctgtccctccccagagagccctgtccagaaaggtgagtagcagccccatcttgtcggccctggactggctggggcaacgatggtgacgaagtggcctggggcagggagtgacgaggagtgtctttgtggcgcagagagaaagctgccggagccggagagccggggcgtggtcatcgtggctgtgattgtgtgcatcctggtcctggcggtgctgggcgctgtcctctatttcctctataagaagggcaagctgccgtgcaggcgctcagggaagcaggagatcacgctgcccccgtctcgtaagagcgaacttgtagttgaagttaagtcagataagctcccagaagagatgggcctcctgcagggcagcagcggtgacaagagggctccgggagaccagggagagaaatacatcgatctgaggcattagccccgaatcacttcagctcccttccctgcctggaccattcccagctccctgctcactcttctctcagccaaagcctccaaagggactagagagaagcctcctgctcccctcgcctgcacaccccctttcagagggccactgggttaggacctgaggaccccacttggccctgcaaggcccgcttttcagggaccagtccaccaccatctccacgttgagtgaagctcatcccaagcaaggagccccagtctcccgagcgggctggcttccaccatccaggtgcaccactgaagtgaggacacaccggagccaggcgcctgctcatgttgaagtgcgctgttcacacccgctccggagagcaccccagcagcatccagaagcagctgcagtgttgctgccaccaccctcctgtctgcctcttcaaagtctcctgtgacattttttctttggtcagaagccaggaactggtgtcattccttaaaagatacgtgccggggccaggtgtggtggctcacgcctgtaatcccagcactttgggaggccgaggcgggcggatcacaaagtcaggacgagaccatcctggctaacacggtgaaaccctgtctctactaaaaatacaaaaaaaaattagctaggcgtagtggttggcacctatagtcccagctactcggaaggctgaagcaggagaatggtatgaatccaggaggtggagcttgcagtgagccgagaccgtgccactgcactccagcctgggcaacacagcgagactccgtctcgagg

SEQ ID NO: 2013 - DNA, 4717 bp, Homo sapiens
ttacttcaaacgggactcgacccatgaccacacctccaacctctctgcccgagcccttttccggggacccaggccggttggcggggttcctgatgcagatggacagattcatgatcttccaggcctcccgcttcccgggtgaggccgagcgtgtggccttccttgtgtctcgactgactggggaggcggagaagtgggctatcccccacatgcaacctgacagccccttgcgcaacaactatcaggggttcctggcagagttgcggagaacctacaagtctccgctccggcatgcgcggcgcgcccaaatcaggaagacttctgcctctaatagggctgtgcgagagaggcagatgctctgccgccagctggcctctgcgggcacggggccttgcccagtgcatccagcttccaacgggactagtccagcgccagccctgcctgcccgagcacggaatctttaagaatccgccagcacttggtagcgtctgcagccacccaggtagcatacgctctttgctgtgtagaagaaatgcccatacgacagctttgcccctgtttgaagacctcccttcttgcctctccagacgtgttccccgaggagatcttccttccgtccttcctggcgccctggttgcccaccttgccgtgcttcctcttacgtgctagctttgtacctatcgctcactgcatgctcgcctccctcttgctggcatcccggcctgtttcaatgactaccgctctgctacttaggcacagggactccgccgcacgctgacggaccacgagggctgaccccttccagcctgacttggttcatggaggctcctactctgccctctccaagctcccctggcggctccccacctggttgcccagttcctattgatgagctctggacagaaagatgcccgtttggccaggctggtggcttgatgggtgtacctggagagggggtctggcttcctgcccaagatgcctcccagccctgccagggcccggtgcagcgggcagggcctcatctgtgctgtagtggtcgagtggttgctgcaaggagcgtagttctgccatgtctgggggccaggttccactctgcacatgaatatgcagtctgggaggccccactgctctcactgggaaggaccaatgttgcacctctgttaatgcctgacttcagctgctggtgttctgatggagccagaggcttggggaatctggaacttgcctgctaaataaggtcgtggtggactctcagccattgggcaggtctatcaggctgcaggttcctacacacccacgcctgagggtcatagcaggctaagggtggataccagcgactccctttgctgcccaggatctccatgggcagtgccacagcggctgatgctcagtcactcctgcttctaccccctgtcactgatggcgagccttgcccagcttgagacctgttcccatctctattcaggtgccatgtggccttcactgcagccctgcagccacccacgcaccatctgtgggtctccaaaggcaccttgtagcatgtactccccgtgcctgggcaatcagatgggctgcctttgtccaagggaaaacagactcccttcgggaaacatccttaagcacttaaggccggggggggtgtctgcctctggcaacccagccagggtcttggtggcatttgtaaaagcaaagagctgtggactgccgtggtcctagtgtggtgacaatgcagcactggcatgcatgtcctccttctgaaggacctcatccttcctcacagggggatgaccaagaaatcattttgtggctgagtttggccacgccctttggactgtgctgttccgccatatttcaatgccaaatgaaccacattgacatgacctggaccatagggcttcctatcctgggctcagctgcccctgtctgaagggtcttggcttgattgcagaaggacaacctccgcacccacctaaagacatgtatatgtcttgggatcccagagattgggtccttgggcctggcttcttaagagttttgatgatgctgggaaaagtgactgcgattctgaagaaccgctgccttgcaaggtcaaggacattcagtggttgctggggtccgcagactactgccacccactcaccatcaactctgttagcccaattgccctgctgaacaactgcctgaatacaggctttaggttcccctggactccagccaaggctgttcaggtgggaccatggtgctctttaagcgtgatcggagggaagacacacagcagggccaccattccatgaatgggaggtgtacagatcactttctctttgtgctcagttctgttctgtctccagcagctatattggtaagactagtacctgccagggagaggtgcccccaagtgaaggggtacagtggcacctgggaaaaggcacctggaaggtttccatgtggcccagcccagcatggaagcagggtgggaactctgctgtgtcgccagcgctcactctactcgagtggctttttgaaagccctaccatgtctgtgtcaggcctgtgctgcttcacatcctacagctgcctaggaaaggccggccacgctccctgtccacacactccctgtccacacactccctgtccacacactccctgtccacaactgcagccgggccctctgcctatgggcacccaatccaagcagctgctccacctttgtttggcatggtgatttgtattttttctcttggtgcttatgtgtgtgggcttgggacgagtgctggtatgcacttaggaccttcttgatagctccctgcactttggaacacggagcagatgagagagggtcggggcttgccctccaccttggacttggaagaagcccacattggagaggtgaggaccccatggtggctctagtggaagatacgttagtctccagctaaggaggatgaggcgcagccccagagggagacctcagtgataggggatcaggctaagaaagtgggggaagggagatgctttgtacatattttggggttataatttctctaaattttaggagaacgggtattgattgataaaagggacaggcagtagtgttcaacagtgcatgtgaaggaaagttctgttttccatggttttgacattctttggactgtattgtgactgctgtctggtccacatggtacccctttggtaagtaggcttcagtgcataccagggtatcactggagatgggagttagtgaaggggtgactccctggcctagtatagtgtgaccctgggactaacttaatgtcctaaagcattttggtgacttctagggaatagcaaagacctatttcattgtccccaggtaagtatgtgatgagcaatgaggaggagtggaaaacaaaacccagaaagtgcggcaggaccagcctgacgcacacgctcctgttgtcatggcagacagccgccttgggtgggcaccaccctggcagttccagcctgtaggggagtgaagggacatggctgagctgggcatgtgctgaggttgacttagggaacaagccctgggattggacaaaagggcccatgctgcagccactgactgggggcagagctctgggtggaagagggaagagatcctaatggaggcgcctccatctgcaaccacagttgtaaggctcatggcacctctgcttggaaagcactggtttagggacttagagaggtaggcacaaggtgggtctcctgggtaagggaagcaagagcagactgttgggccaacaggagaagctccccagagtaggggagaagattggggtgtagggccttccacgtggaacagacagcccctgtgtctctgtctcttggggacctgagtttgggtggggtggcagttggcacagcgcagatgcggtagagatgggaggaaacccagctcctcacttccgtgtgcctcatgcctttgcatacacaagcaccaaacctactaggtcttctcattacccatgtaaaccacatgttagataaatttttgcaagtagaggaaagaaggaaataaaacatcacattttggtgtctctcaggctttcccccccaactatggtttctttgctttttgttttaacatagttttgttgctgtcttctgtaatgatacagttttgtgcagctgttttcacttagcatatcgtgggcatctccccttatgattactaaatattttattttggagtggctgtgtactctcccattgactagatggaccattgtgccagttgccaatcactaatgctgttactaacttttcagttataaattgatgaatatctttgtgcacaggctgtttcccaatgtcaagttattagggtagactccaggaggtgggattcttcaactaaagaatatgaaaacctttgaggcttttactacatattgacaaaatggtttccggaaatatttgtatccccttacactgccaccagcaaggataaacatgtccatcttgcccgtattgggaattatcatctggctaaatatttgctaatttgataatgaaaaaatagcatcgtgtttcagttggcatttcactgacttctagcacggttgaacatctttcatgtggagcgattgtatttcctcctttgtggattgtcagtgtcctttgctctatcttctggggtcagataaatttgtatgagctcggtatatattaaagatattaacctggtgtgtgtc

SEQ ID NO: 2014 - DNA, 4112 bp, Homo sapiens
attttattgaaggccttttctgcatctattgggataatcatgtagtttttgtcattggttctgtttatgtgatggattacgtttattgatttgcatatgttgaaccagcctagcaccccagggatgaagctgacttgattgtggtggacatgccttttgatgtgctctggattcggtttgccagtatggtattgaggatattcacattgaagttcatcagggatattggcctgaaattttcttttttttgttgtgtctctggaggtttttggtatcaggatgacactggcctcataaaatgagtgatggaggagtccctctttttatattgtttggaatagtttcagaaggaatggtaccagctcctctttgtacctctggtagaatttggctgtgaatccatctggtcctgggctttttttggttgataggctcttaattactgcttcaatttcagaacttgttattggtctattcagggatttgacttctttctggtttagtcttgggagggtgtatgtgtccaggtatttatccatttcttctagattttctagtgtatttgcatagacgtatttatagcattctctgattgtaaactgtatttctttgggatcagtgatgatatcccctttatcattttttattgtgtctatttgattcttctctcttttcttcttcgttagtctggctagtagtctatctattttgtgaatcttttcaaaaaaccagctcctggattcgttgattgtttttggttttccgtgtctttatctcctttggttctactctgatcttagttatttcttgtcttctgctagcttttgaatttgtttgcccttgcttctcttgttcttttcattgtgatggggtattgattttttatctttcctgctttctcctgtgagcgcttagtgctataaatttttctctaaacactactttagctgtgtcctagagattctggtacattgtgtgttctcattggtttcaaagaacttatttatttctgccttaatttcattatttacccagtagtcattcaggagcaggttgttcagttgccatgtagttgggcgattttcagtgagtttcttaatcttaacctctaatttgattgcaccagggtccgggagactgttatgatttctgttcttttgcacttgctgaggagtgttttacttccaattctgtggtcaattttagaataagtgtgatgtggtgctgagaagaatgtatattctgttgatttggggtggagagttctgtagatgtctattaggtctgctttgtccagagctgagttcaagtcctgaatatccttgttaattttctgtctcgttgatctgtctaatattgacagtggggtgttaaagtctcctactattaattgggtgggagtctaagtctctttgtaggtctctaagaacttgcttatgaattgggtgcttctgtatagggtgcctatatatttagggtagttagctcttcttgttgcattgaaccttttaccattatgtaatgcccttctttgtcttttttgatcttggttggtttaaagtctgttttatcagaggctaggattgcaggattgcaacccctgctttttttttttcttggtagatattcctccatttctttattttgagcctatgtgtgtctttgcatgtgagatgggtctcccgaatacagcacaccaatggatcttgactctttattcaatttgccagtctgtgtcttttaacgggggcatttagcctgtttacatttaaggttaatattgttatgtgtgagtttgatcctgtcattatgatgctagctggttattttgcccgttagttgatgcagattcttcataatgtcaatggcctttacaatttggtatgtttttgcagtggctggtactgcttttttcctttttgtatttagtgcttccttcagaagatcttgtaaggcaggactggtggtgacaaaatctttcagcatttgcttttctgtgaaggattttatttctccttcacttatgaagcttagtttggctggctctgaaattctgggttgaaaattcttttctttaagaatgttgtgccaggcaccgtggctcatgtgtgtaatcccagcactttgggaggctgaggctggcagatcacctgaggtcaggagttcaagaccagcctgaccaacatgggaaaactccatctctactaaaaatacaaaattagccagctgtggtggcacatgcctgtaatcccaactacttgggaggctgaggcaggagaatcgcttgaacccaggaggtcaggttgcggtgagccgagatcttgccatcatactccagcctgggcaacaagagtgaaactccatctcacacaaaaaaaagaatgttgaatattggcccgcactctcttctggcttgtagtgtttccgcagagaaatccactgttagtctgatgggcttccctttgtggataacccgacctttctctctggctgcccttaacgtttttttcattcctttcaaccttggtgaatctgatgattacgtgccttggggctgctcttctcgagaagtatctttgtggtggtctctgtctttcctgaacttgaatgttggtctgtcttgctaggttggggaagttctcctggataatatcctgaagagtgttttccaacttggttccattctccccatcattttcaggtacaccagtcaaacataggtttggtcttctcacatagtcccatatttcttggaggctttgttcattccttttcattcatttttctctaatcttgtcttcatgctttatttcattaagttgatcttcaatctctgatatccttttttccacttgatcgatttggctattgatacttgtgtatgcttcacaaagttcttgtgctgtgtttttcagctccatcaggtcattgatgattttctctagactggttattctagttagcaattcttctaaccttctttcaaggttcttagtttccttgcagtgggttagaatgtgctcctttagctcggaggagttacccaccttccgaagcctacttctgtcaattcgtcaaactcattttccatccagttttgtttccttgctggcgaggagttatgatcccttggaggagaagaggtgttctggtttttggaattttcagccttcttgtgctggtttttcctcatctccctggatttatctgcctttggtctttgatgttggtgacctttggatggggtttttgtgtggacatcgtttttgttgatgttgatgctattcctttctgttttttagtttttctcctaacaggcaggcttctctcctgcaggcctgctggagtttgctggaggtccactccagaccctgtttgcctgagtatcactagcagacactgcagaacagcaaagattgctgcctgctccttcctctggaagtttcgtcccagaggggcacccgccagatgctagtggagctctcctgtatgaggtgtctgttggcccctgctgggaggtgtctcccagtcaggaggcacaggggtcagggacccacttgaggaggcagtctgtcccttagcagagtttgagtgctgtgctgggagattcgctgctctcttcagagctggcaggcaggaacatttacgtctgctgaagctgcacccacagccgcctcttccgccaggtcctctgtcccagagaggtgggagttttatctgttagcccctgactggggctgctgcctttctttcagagatgccctgtccagagaggaggaatctagagaggcagtctggctatggcagctttgcagagctgtggtgggctctgcccaattcgaacttcccagaagctttgtttatactgtgaggggaaaaccacctactcaagcctcagtaatggtggacgcttctccccacaccaagcttgagagtcccaggtcgacttcagactgctgtgctggcagcaagaatttcaagccagtggattttagcttgctgggctctgtggcggtgggatccactgatccacttggctccctggcttcagttccctttccaggagagtgaacagttctgtcgctggccttccaggtgtcactggggtatgg

SEQ ID NO: 2015 - DNA, 3408 bp, Homo sapiens
ttcatcctacttttgatccactcattaataacacttggctcagcaggtccagggcacaaaaacggtttcaacaagtagcacgcaaggtcatgattcagggacgattattcaatatgctgagtgctgttcgtgaaatggacaaagagagtatactgagaaagattggccaagcaaaacaatcgatagcacaagaggcgaatttcttcaaattcttcctgaggcggatcagtcaggatgattataccagccggttctctgtgtcgcccaaggaggtgctgcccttcgctttcccagactgcagcccaccccaggactccaacgagttggctcctgatggccttggactggtcccaattaagtcttcagaagttcaaatcaagcagagttattccttcttcaatctgcaggttcctcaactgtacaaaattaagagatatcagccattctctgtccacaagtcttcaacaagttacagacctcaaaagcttgcccgagccctaaagcaaggagctgaggatgaagtcaccaccatcacagcccttccgaaacaggactccacaactcagctctctggcaaaacatcaatcttgagcatgaaaccacctgaggccttagccatgtctctagattatgatcctctgtatgtttttaatcccaacccaggattatttgctgtaatgcatcctctgacctatgcagaaacgttgatagattaccatctatgctctcaccccaagtacaaattcaccaaagagtcccgccacgggtccagcattcctgtcacccaaaagcagtttctccatcacacggacattattcccggaataatgcactggaaaagcttccagtccctggttctctcctccctgccggacccctccaagatggagaccacaaagagctgcgattccttcaattcatttatgcttccgatagacgtccctgccatccttgatgccttaccagaagaggacagactagaaacagtagaacgtgagctctgtgagcagaatgtagaagttatgttgactccagaaatgatcaaagtggaattccctatgttgaactacaaggacatcaggaaggagaaagaagtgaaagatcaagcacaaccagcagagaaggccggagagaagctgctcgaggagatgaggaacctgcggggcaaagcactcaacacatacctgattctagaatgaaagtcaccagtaggttgaaaaggtcgtggccccttggaaagattgtattgactgtgttggggatctggtgccacctggtggatgccacaagaaaggcctctcctgactcccaagttgtaacccgtttccaccaaatcgacttccaaataatatttatcagatcatcatctgtgcttttcttccttgtttcagaccacttttaggtggaaaaggcaaagaaggcttatatgtattttcttccataatgagtccatcagaaaaagttccttcggtgaaatcgttgaccacgtgatgtttggggactccctatgggatcaatcatccgggttccttagagaccatggccataatcaggggctggccaagggaatgagtatccctgggttcaacagctgtttctgaagacctgccagttcccctgtcttgcattaactcgggttatcatgccattctccttctaaggccaaagatacctgtaaccaaagaatcaggatacttcactgcagtcacttcatttttttttcttttggggcagggtcttgctctgtcgcctaggctggagtgcggtggcacggtctcggctcgctgcagcctctgcctcccgggttccagcggttctcctgcctcggcctctcaggtagctgggattacagggacccgccaccacgcccggctaatttttctgtttttagtacagatggggtttcaccatgttggccaggcttgtctcggactcctgacttcaggtgatccaccggcctcattcccaatccatctccattccgccatcttgctgccccatgggtacccacccttcccactgtgggcaaccatctctttagtttctggtttatccttcttgtgggtaatttttaaggcctctcggggtgctgggattgcgggcgtgagccaccatgcctggccaagcagcttcattttagaagtgattattattgctttcctttctagaacttcaggtttgtgaagtattttctcaatgatcctcaaaacattctaagacataaagtagctgttattagtgtgattttatgcagaaactcaggcccagaaagcttcatggacttacccaattagcagaggagccaggtttgggcaggatcttggtttcctgcaaaggtttcgttgcctagccaggcgtggtggtgtgtacctgtagtcccagctacctggggggctggggtgggaggctcacctgagcccaggtagtcaaggctgcagtgagccatgatcctggtacccagtccactcttctctctactacatggtaatcaatgaaaatattacagatttacattttttaactttttatttaaactttcagctttggagtctctaagagtaaagatattatgtgatgatatttgtattttacttaattgcttattctttaaaacatgtaatatagaaaaaaatacaaattagcaaatgtcctttgctctaaagaaatcagctggcaagtttgccccacccagcagcagccatgtcttgctcatttctgtatccccagcatgcagcaagatgtttggcacaatgcaggctctcaataaatgttttttgaggctgggtatggtggctcacgcctgtggtccctgcactttgggaggctgaggcaggtggatcccttgagcccaggagttcggggccaccctgggcaacgtggtgaagacctgcctctacagagagcacaaaagttggccgggcgtggtggcccatgcccagctacttgggaggctgaggtggagggatcgcttgggcctggggggtcgaggctgcagtgggccgacattgtgccaccgcactccagcctgggcggcggagcaagaccctgtctcaattttttaaaaattggctaggtgcagtggctcatgtctgtagtcccagcaccttgggagaccgaggtggacagattgcttgagctcaggcattcaagaccagcctgggcaacatggcaaaaccccatctctacaaaaaatacaaaaaagattagccaggtgtgttggtgcacatctgtggtcccagctactggggagggtaagatggaaggatcgcttgaccccaggaggctgaggctgcagtgagccaagattgtgccactgcactccagcctgggcaacagagcaagaccctgtctcaaaacaatagcaataatgtttgttgaattaaggaatataaaagaaatgtgaaaact

SEQ ID NO: 2016 - DNA, 3949 bp, Homo sapiens
gaagggctgctggagcgcggccagaacggacgccgaggccgaggaggcgccgagagcgagtgagagctgctagccagttgtcacctctcacagagaggtccacatttgctgaaatgtaactcttatctcatgcactgggagtgatgaacttcactaggaaatcatcgttctttctggaattagacgatataagctgcagctcagaatcagagcaggtcaagttgcttcttttcagtgatcataatcaattatccaggaaaagggacagaagaaatcaggaaaaaggagaatagactctttatgcataggagctttaatatatagttgacacttgaacaacatggatctgaactacacaagtccacttattggtggattttcttcagcctctgccacccttgagacaacaagaccaatacctcctctttttccttctcctcagcctactcaacttgaagatggtgagaatgaagacctttatgatcatccacttctacttgttgaatagtaaatatattttttccttatagttttcttaataacactttcttttctcttgattactttattgccagaatacagtacatagtacatataataagcaaagtatgtattagtttactgtttaagtgataggtaaggcttccactcaacagcaggcaacagccaggtgttgtgacacatgcctgtaatcctagcattttgggaggccgaggtggaggatcgcttgagcccaggagttcaagaccagcctaagtaacatagtgagacccccatctccacaaaaaattaaaatacctaatcatggtggtgcatgcctgcaatcccagctactcaggaacctacaataggagccaaaaaggtggaggttacaatgagccattattgcactactgcactgcactcctgcctgggagacagagtgagaccttgtctcaaaacactacaacaaacaacaacaacagcaacaaaaatcagtaggtattaatagttaggttttttgggagtcagaagttatacacagattttgactgtgcaggggatcagcgctcctaacgcctgcattcttcaagggttacctgtattcttgatacaaattctccttcagatttaagtattatagatatttttccagtctatagcttacctattcattttcttaataatgtcttttgattgatttttaatttttaactttggtgaattccagttgtatacttttttttatgattagcatttttgtgtcctatgaaactgttgccttcctcaatgtcactaaattctcttaggttttcttctagcaagtttatgtttcaaattttcacccttaggtctataattcatcccaaatttatttttgtctgtaaagcaatgtcacaattcattttttttctcaatatagttacccagttgtttcaaaactggttattaaagtttttctcttaatcattgaattttcttggcaccaaattattaactcttgacaaaaataattgacccttaagtaagcagacagacaagcagtgcttctattttatagcaatgtaaataatacacaacttacacaaagactttttagaagctaactaacagtggtcctatctaagtacgtacaccagattttttataaccacttttaaaataaaagtatttagattttaacacatagattaggacagagaaagcatatggtggaataaactgtatctttttggccagatggtgctatttctaggtcatcttgataaagagaggaggcaaacatgaaaacttaatgaaaaactatttatgatgctggagagaacatcttggctttgagtcacttttaaatcatagaagaggattattccataaaattatttataatgcctaaaattattctttgcccaaatcataaattttcaggattaccaagaaaccatttagtatgtatagagtgtttcagcaagtgcagagatgcccaggtggttgggattcaatacatcgagctgtcacgctgcacattcttggagtacaaccttaatgggcattttcccacctgtgcgattcctctgttttcaccccactccattcatatttcacaaactactctaattatagtatttattattgacctcaggaaaaagaagtttgaaagggtggaaaaaacatgcattttgtctccatggatagtaaatcactgagctattgttccttgggaatcccaattcatgagaaattacatagacttttgccctaacactaatcagctgcctgatctgtaaatatttcagctccttgcctgtatctatttctccttgcagaaaactgtaatttatctagatttttctaataattcactgacattttactgctagccaatgagtaaatcattgttgcttttggtatcttatgattttgttcttttgtgtcaaagtttagctagtttcatctatcaggttggaataaaaaatgcaaattatgactataccacttatatagttacatgatctactgaccaaagttaatcatcactttaatcttggtaactcattcagagccctaattgtaatagactttgcctgagtcacctagagagtggtctcaataatccccttttatttttcatgtagagaaaagggcacacaaaatgatattatctcgatcacccagcacatgtattaaactataacagactttttaaatcatgtgtgatcttttattttttgactgaaagggactaagtttgctgcccagagaagtctttagggagcaaggaaaggtaagcaaataaacttatctggagtcaaaggtctcaaggaaaatcttgctttctataaaaggcagacaacgtcaagactcatagattttcccagggctaaaaatcagagccaattgcctcccatcttgaaaagactcattcatcatgctggttgaagtatcacagatcttgtcaaaatattcatgactcacatacgacccatccaaaagacaaaagccaacaaaatattttaccaaattctaaaatagtgtttgttttattattctttgttattcttcaacaattattgctacctttactatatgaaatataatagcaattccttgtcttcatggtctttctgttacagacatgttttacactgattataccactttagtgaaattcatcatacatattcctgatccaaattccttttttattaaccatatatgagagaaagtggatattaaaataattttgatggtaaaataagcgaaaaaataaagcaagcatggttaaaatgattaaattgtggaaaagtgacccatgtgtttcagataaactgacgcttgagggtttttgttgttattgttgtttaaattttattttattttaattttaagttccaggatacaagtgcaggatgtgcaggtttcttacataggtaaagatgtgccgaaatggtggtttgctgcacctctcaacctatcacctaggtattaagccctacatgcgttagctccctcccactgcccctgcagcagatcccagtgtttgttgttccctccctgtgtccatgtgttctcattgtccagctcccacttgtaaataagaacctacggtgtttggttttctgttcctgttttagtttgttgaggataatgacttccatgaagcttgagttttcattctacaatttactgaatgacatttgagcagctagctgactttttaatgccttgattttaataattcaatgagttattgggtgagataatttagaacagcatacatgatatcgttattattagtcaataaaatgctatttatcttatttattactcataacaaaaatatgtatatgacccttcgctatgtttgaatatgtgatatattgaattgaattcactgtgaggcttcagtaggtacctataatattcaaatatgttacctgaaagctgtgaaaaatatatttttaaaaattag

SEQ ID NO: 2017 - DNA, 3618 bp, Homo sapiens
gagagtccggggatcccgggggccagtcgcggccgggacatcgggcgctgcggccggggacccgctgctgagatagacagaatatggcagagctttctgagccagagggaccagtagattggaaggaacgatgtgtagctctggagtcccaactcatgaaatttagagttcaagcaagcaagatacgagagcttttagcagagaagatgcaacagcttgagagacaagttattgatgctgaacgtcaagcagaaaaagcttttcaacaggtacaagttatggaagataaattaaaagcagctaatattcaaaccagtgaatcagagacaagattatataataagtgtcaagatctggagtcgctaatacaggaaaaagatgacgtcattcaaaacttggaattgcaacttgaagagcagaaacaaataagaatacaagaagctaaaataatagaagagaaagcagctaagataaaagaatgggtaacagttaagttaaatgagctggaattggagaatcagaatcttcgtttgatcaaccaaaaccaaactgaagagataagaacaatgcagtcaaaactacaagttcaaggaaagaagtcatccactgtctctacactaaagctttcggaaggccagcgcctgagcagtttgacctttgggtgctttttatctcgagcaaggagtcctcctcaagtagtaaaatctgaggaaatgagcaagatatcatcgaaagaacctgagttcactgaaggaaaagacatggaagaaatggaaattccagaaaagtctgttgataaccaagttctagaaaacaacagaggccagagaacattgcatcaaaccccttgtggctcagaacagaatcggaaaacaagaacaagctttgccacagatggtggcatctcccagaattctggggctccagtgagtgactggagctctgatgaggaagacgggagcagaggaagatccaagtccagatgcacatccaccctctccagtcacacatctgaggaaggggtccagtgtagcaggatgggaagtgaaatgtatctgacagcatctgatgacagcagctctatatttgaggaagagacttttggcataaagagaccagaacacaagaagctatattcttggcagcaggaggcacagtggaaagctctaaatagtcctcttggaaagggaaattctgaattaagtaaaaaggaacaagatagttcctcggatgaactgaataaaaaatttcaatcccagagactcgattattcatcttcatcgagtgaagccaacaccccaagccctattttgaccccagctttaatgccaaagcatcctaactcactctctggaaaaggaacacaattagtgccttcatcacacctgccacccccaaagttaaggattcctaatgttttcagtataagtgtagcactagccaaaaggcacttaagccagccacagttaagctctgacaggatgtttggtacaaatagaaacgctataagcatgatacgaccactgagacctcaggaaactgatcttgatctagttgatggagacagtacagaagttttagagaatatggacacgagttgtgatgatggattattttcctatgactccttggactctccaaattcagatgaccaggaacactgtgacccagcaaagaaggtggcatacagcaaacctccaactcctcccctgcaccgttttccttcttgggaaagcagaatttatgctgtagccaaatcaggtattcgaatgtctgaggccttcaacatggagagtgttaataaaaattctgctgcaaccctttcctatactacatcaggactttatacatctctgatatacaagaacatgaccaccccagtgtatacaactttgaggggaaggcgacccaaataagtagcagccctttcctggatgactcatctgggtcagaggaagaagacagctccagatccagctcccggacgtcagagtcagactcacgcagtaggagtgggccaggcagccccagagccatgaaacgaggtgtgtctctctcctctgtggcttctgaaagtgattatgctattcctcctgatgcttactccacagacacggagtactcacagccagagcagaagctcccaaaaacttgctcatcttccagtgataatgggaaaaatgaaccactggaaaaatctggttatttattaaaaatgagtggtaaagtcaagtcttggaagcggcggtggtttgttcttaaaggtggtgaattactttactacaaatctccgagtgatgtaattagaaaaccccagggccatattgaacttagtgcatcctgtagtattttaagaggagataacaaacaaacagttcagttgaccactgaaaaacacacatactatctgactgcagattctcccaatatattggaagagtggattaaagtgttacagaatgttcttcgagtacaagctgccaacccactttccctgcagcctgagggcaaacccaccatgaagggattgctcactaaggtaaaacatggatattccaagagagtctggtgtacactaataggaaagacattatattattttcggagtcaagaagataagtttcctttaggtcagatcaaactctgggaggctaaagtggaagaggttgacagatcttgtgattcagatgaagattatgaagccagtggacgaagtctgttatccacacattatactatcgttatccatcccaaagaccaaggtccaacttacctcctaattggatccaagcatgaaaaggacacttggctttatcatctgactgttgcagctggaagcaacaatgtaaacgttggatctgaatttgaacaactggtttgcaaattgctaaatatagacggggagccttcctctcagatatggagacaccccactttgtgtcacagtaaagaaggaatcatttcccctctgacaactctaccttccgaagccctgcagacagaagctattaaattatttaagacctgccagctttttataaatgctgcagttgactctcctgcaattgattaccacatatctttagcccagagtgctttgcaaatcagcctgacacatcctgagctgcagaatgaaatttgctgtcagcttattaaacagacaagacgaagacagccacagaatcaaccaggaccattgcagggctggcagctcttggcactctgcgttgggctcttccttccccatcatcctttcctgtggctcctcaggcttcacctaaagaggaatgcagattccaggtgtgcagaatactagccagctgaactgtttatgtggcctctgaaagtctacgataaatcataagtatttaacgatctgccaggtacattttcagaagaatgtatgaaacaaatattggtacaggaagcctttggttatcattgatgtggagctaggaaaatatttcctttgttatgttaaatctcttagggaagattgcaataaatacttgaaaaactgacagagaatatttttaagtgaaaagtgcatttgcatttcaagtatgaatgacttagcattagtgggtgttcattcaataaaagcaactattttgtttc

SEQ ID NO: 2018 - DNA, 3451 bp, Homo sapiens
agttgaagtgttcactgataagtatgttaactaatgatcgagacagtaacgaaaaatgctggcactgggattctctcccttcccagacctacctgctggtatttcctgggaccttgaccctgccccaccccctcagccgtgcccatctctgcagactcccagatcacatctgggctgatgggctggcccaggcctgtctatttttcagttcccaattagaagtctagaacctgacaactccaggagttcttgggaggaccagtacaacgttctaaaaagcctgagacgccttacaaaaagcaagtatcatttggagtacaattcctaatctgttcatgtcctgctgaaggagggaaggagggagaggaaggcaggggagttgatgcattcatataacaaacactgctgggtgtctgggtgcccagagcaaagctgggccaggccttcaccagatcaagccccacagaccagctggtgcccatgcgctgctggtggtttggggcctcctgttcctcctctagctgggagtaatcacagttgtctgacctgattccaacttaaggtccccactctcttgccccatcaagaatccctgattatttacttttccctagaaaatctggggaaattcccacattttaattttgcagcagaatcttttgagcagcttttggaaccacagtgtttgccaagataagagtttgagaatccagcagccctgggtgcctggctgaatttggtttcctgcatgtgctgggtgtgggcggggccacgcacaggccctgcatgggaggactcctcaccccaggcctgtggtgctgcagacaaccgtctcctgtctacactgcgacccagccacaagctgtggggtctcagtggcctggggggaagcagctccactctcctgcccttcctggctgcccctttgggttccagccggggtcacgtccagcctccactgggaaaccagtgactgaggcctggacccagaggtggaccaggcatctcctggccacctgtgacctgggaagaagcgagtcagtggcccgttcaacctgctctgcagctgctataaatagcctccctgtttccaagaggaggtaaggaagtgtttatcttctaaaaaccagacgtttcctgatgctctgagcgttactcagtgctacagaggagatgcacacgtccccactatgttctgtcttgagaaggggacaagagaaagaggaaaaggagccactgtactttattttgcacctacagcgtgccttggcactgggctagagaggcaccttcctgcgtgaatcctgtgcggcaggtcttattgccataataagtcacatcaaagacactgctggtcataaaacactgttttacataccatagggaaaaacgctgccaatcttaactaagatgctacaactgtacagttccttccaatcagagatgttcacgtgtgaaaaaaaaactgtgctacttacaatctatgaaagctggtgttatcccacttggcaggtaaggaaactgaggtcctgtgagtgaagtgacctcatgatcacacaacaggagatggcagggctgggattcaaacccgggagtgtctgctgccacatcccacactcccactgcctggctccaagtcccaggaagctcgagactgtgagttttctcccttgaaactcacctggagagagtccgggcacctgtgcctatgtggagggttccagccccagccaggcccctccgctgcccacaccctgggaggagaagcggcctcccttccaggctcatctgctcactgcccgcattctcctggcagagctgaggtctgagagatctggactccaacccaagggccctctcttgttattcaggggtgtccacagttaggaagggacctggggccttgtcccaccaccttcctaggccccgtgatcaccaccccctcaagcggggccccagccccctgagcgccccctcacgtgacccagccctcggctgttccaggctcactgcccatggtgtgctcttctgggccacagcagccagggctccagggcgaggacaggggacacctgaaaacaccccgttgttcatggtcttgtgcccattcattcggagactcctgaaaaactgggctgtttgcaaagcaaatccagctccttgtcctagcaggttctcagaacggggagtcccctgggatggagctgctcccctcacggcagcaccacgtttccagtccctcgatgccactaatcagcatggactgtgttcaggacacagggtgaacttttctctgacccccggtgctggtcctgtgccagcacgtagtagttactcagtagaggtttgctgagtaagccagaaatcagattatgagtgttcaggggtttgataaaacagcaccacataacgcacacaaagatactccagaaacatttgctgagtacctagtacgtgtgaggtgctgtgaggatagagcagagaggactgtgccccagctgtgatgctggcagaggtgacactaagagggaaatgagatatttggggcagaatccactgggctctcttggccatccgctgccttgggtctgttgaggtgggtgcccaaaggctgccttcttgaccagaacctgctgtgcgcttcacagaacctcctcttcattggaaatgctgggcacattgcagtcagtgagctgctgccaaaacggcgttaagtagaacccccagaggccccgccggttggtgatcaccctcaggtcctgccagggagacacagtgaggaggttggctaattgctgctttcaggccctggaaatcagtcgccaaggcccaggagaaccccggtgagtccgtccagttgaggcagaggcaataacctcccattgctcggccctgcgcctgccccagtcctggcagggggcaccggctcaggaacatgcggcctcctggcatttctcggtatttaactgtctcgctgtcttatccgagtccctaatgaaacgacttgtgtgacaatctgtctgtgccttacgaaagtgtctgtgcactttttatcctttttaaaagcaacttttaaaagtggatggggaggggggctagcatgcgtggtagggttctagaaatctgtggtcatcgctgaaatcctttttgcatcatgttttttgatgttggagtgatgaagtgtacatcccccaccccacacaccactacctgtgtacagaccttttaaaacatgtcttctttttctgattcaatactgtgacctctccgatacagtctaatccttggggatctgtaatcaaggttttaaaacctgggaagtgggttgggaagggtttgcactggtcttgagtgttgtgcttttctgtgttgtgtgttttgatttttgtctttttatctgttttatattgacataattttcctgtttaaaaaaatacaactttggcttgtt

SEQ ID NO: 2019 - DNA, 4497 bp, Homo sapiens
agagctgggccctgtgaccgcagaccagagggagaggaggaggctggactgggctgcgagtgtgggagagggtggactcagggccccagcaggttagtgggagatggaacaggcacccagggctgccaagaaccccagcaaagccgggctcccaggtgggtggacaggtcccagagccagtgagggccggctcctcccatgagggtggctgcacaccccctcctgccggggcaggcagtgctggtctgcgcccgctccccagccccccaccggctgtgccagctgggccgcagatggaccacatggggaacagctcccagggggccccctggctcttcctcacctccgcactggcccgaggcgtctcggggatcttcgtgtggactgccctggtgctcacctgccaccagatctatctgcacctgcgctcctacaccgtgcacaggagcaacgttacatcatccgcctgctcctcatcgtgcccatctacgccttcgactcctggctcagcctcctcctcctcggagaccaccagtactacgtctacttcgactctgtgcgggactgctacgaagcctttgtcatttacagcttcctgagcctgtgtttccagtacctgggaggcgagggcgccatcatggctgagattcgtggaaagcccatcaagccactctgcagttctgcctggtgaagcccgtcatggccgtcaccaccatcatcctccaggcatttggcaaataccacgacggggacttcaatgtccgcagcggctacctctatgtgaccctcatctacaacgcctccgtcagcctcgccctctacgccctgttcctcttctacttcaccaccagggagctcctgcggcccttccagcccgtcctcaagttcctcaccatcaaagccgtcatcttcctgtcgttctggcaagggctgctgctggccatcctggagcggtgcggggtcatcccggaggtggagaccagcggcgggaacaagctgggggctggcacgctggccgccggctaccagaacttcatcatctgcgtggagatgctgttcgcctccgtggccctgcgttatgccttcccctgccaggtgtacgcagagaagaaggagaattcaccagcccccccggcacccatgcagagcatctccagcggcatcagggagacagtgagcccccaggacatcgtgcaggacgccatccacaacttctcccccgcctaccagcactacacgcagcaggccacgcacgaggcgcccaggcccggcacccaccccggcggcggcggctccggcgggagcaggaagagccggagcctggagaagcggatgctgatcccctcggaggacctgtaggggggcctgggctgccagtgctgtagggacccaggctgcccaggcctctggggaagaacagggtccccccacccaccaactcctgccaaaggtggggcctctcctgagagcccacctgtgaggccctcggagcccacttcccatcctccctccagccagggggtcagggcacctgatggccctggcaggcacccaggtgggcccgccaccgcaggagagggcacctgagccaatcggaagagcctggggaccccctgggatcacccagccatcagccccaggagccactgtggggcggagagtgagtgtggctgcggggccttggctgcacggaccccatgggagctgcgagtgggtcagactccctggttcaggagacagacagcggacggatcccaggctgggcagctggagggaggggcgccggggcgctgggcagccgggctctgacacagtcagcagctccgggcgccgcaggccggcggggtccacacaggctggccggggctgggcctccttggagcctgctacggccctcgtgggcacgtggagaagggcccacgtgtctccacacgccagccacaggggagccctggccaggcgcccagccaggggagcgtgtgcctgggatgggtcacagaaccagcgggcacctgtgaggctggccagcaccgtggggctgtgggaatcgctcttatttatatttaaacaccttggattttctaccgggtcttggcttctgttcccgcagggcatgagcctgaggagcaggacgcggtgggggtcacaggaggctgctgctcagagtctgcatgcgggaaaggggtcccacctgtctggggtgggcagcctcgtggtccagggcagtgcagggcagagcctgggctgtgcgatcacagccactgcctttctcctgggagcctccacttcctccaaaacgggccttgtgccagccccacccgcggcgagcggacaaggccacgagggcagggccctgagtacctgggcgggggggacactcccagggggcacagagggggctcccacctgggcacctgcctcctgcccttctcttcttcctccacgtgccaggtggggccctgggtttgaggagcctcggacgcgtgccctgcccgcaggaagctggaggcgtgcaagtggcctcggaaatcgcggccgcaagaacagtagccgcccagggactaagggggcttctgggaggacacacggctggcccagggcgaggggtgtcactgcagggcgccccccaggcccagggcccgtcaggggacagtacggtgacccggcctgcaggtggcagtcagttctgtgtgtctggggcccacagcacaggttgggtgggggctggggcaggggcagcagaagtgggcaaggcctggggggctcaggcactgggcgtggagagcagacaggaagctccagtgggcaccaccccgggaccgcggctcccacccgtgctgccccccacccatggccacggtcaccaggaacagcgggacctggggtctccgagggactcagcagggcgggcacagaccagtggagtccgggctagagagggccagctcccagcctcttgcttcctgggctgaggacatggggatccaaggccagtgggtctgcagggcccagcccggctgcctgataagataggccgagctcctccctgcacggctgcaaagacgcccacctgtcttattggatccccacaggaatagacccaccaggcggcccccgtgtctcactctgtcagcaggtccccagggacctgctgccgaggggcagtttctggaggctgggggcactggctgggctctaggcctgctctgcctttgccgtggagaaggccaccccgataggggtcaagttgctcaaatctgcgtttggagggtatgtggccgagggctccctttctggagacccagacaccgcctgggctccgggcggcagaggctgaggtgtcaggggctgagcccctatgtcagcaacacctcaggcctgcactttaggacaggggagaagtcagtttccgccaaatgccccctcagaccagccgaggactgtgccaggaaactgacatgctcagcgctcaagccagctgggacagcgaccgagcccagagagacggagcaagttgcctgaggtcacagagcagggacttggacaccaggcagccggctccacagaggccctctctcctccctgcctcctgaccctcagacgcctccgccccacgggtgaggctgcttctgcttctttccaacacgactcgaaggaaagccctgagggccgagcccgctctgcgtggacggaaggcagcgtggggcggtccaggccggggctcaacctgcctcgagggggagcgtgggcgcatgtgagcgggagggacggagactagcgtggttccagtgtcgtcatcgctgctaaaaaaggggtttcccggtgacaggccccgacagaggagcaggccatgaggcaggcaggagccacgtatctgggcccagcgcacccgccaagctctctagcctctcctggcctcagtatccttctctgggagatggtccagctgaaaatccccagcatccacaagaaagggtggaagccctgggggccctggcctggcccaggtgcaggctgcatggccgggcggggcggtgtctcctttcacagcttccccgtctgtccgcagcctccaggagccccacacagggctggggctctgtgcccccaactcacacccgtcggctcccccaggaggagcaggctgggcccagagccgcagggtgggctgcagggaggtctgacttagctggggaaagtgccatccctgccattgctagtgacaagctcgggctgctgtggccccagcacagattcaacactcactgcgctacgtgccagctgttgcacactcacctccacacccaactcacaggaagcaaggctggggaggagggaactggccccaggccacacagatgctgcgagttgggattatgatcgggtgcagtggctcacacctgtaattccagcacttggggaggccaaggcgagtggattgcttgagcccaggagtctgagaccagcctgggcaacatggtgaaaccccatctctac

SEQ ID NO: 2020 - DNA, 4590 bp, Homo sapiens
accacacccagctaatttttgtatttttagtagagatggggtttcaccatgttggccaggctggtctcaaactcctggcttcaagtgacccgcctgccttggcctcccaaagtgctgggattacaggcgtgagccaccacacccagccccattgtcttttttttaagacactggttctcactctgtcacctaggctggagtgcagtggtgtgatcaaggcttactgcagcctcaacctcttgggctcaagcagtcctcccactttagcctcccatgttgctgggaccacaggtgcatgccaccaagccccactaattaaaacaaatttttttttatagagaataggatgtagctatgttgcccaggctggtcttgaattcctgggctcaagtgatcctcccaccttggcctcccaaagtgctgggattacaggtatgagctactgcacctggtctctgtcttctttttttttttaaggctcttgttagaatgccgtgaacagttgtctccaactattatatgtcattccacgggattggtttcctgctggcattccatggtctccggggtcctctgcagcaccttcctggccttttgtcatgtggatgctgcacagctgactccacctggtcttgttgatggacagtttgtttcatgatttctcttatgaataaaaccttcacaagccatccttctctatgagagtgtttgcttggcacgcattcctgagcactgcccctgagcagaccgcctatgatctctaagcttgggttccgtgttgccaaagcgccttctggtggactcagcccaggaggagcccatgtgccccacgctggccatggctgtggtcatgggctgactgcatgtgtctgactgggccttcgtctgagactgcagtgatttcgctcctcctctcagatccgcaaggatgctctccgggcgctcaactttgcgtacacggtgagcacacagcgatctaccatctttcccctggatggtgtggtgcgcatgctgctgttcagagactgtgaagaggccaccgacttcctcacctgccacggcctcaccgtttccgacggctgtgtggagctgaaccggtctgcattcctggaaccagagggattatccaagaccaggaagtcggtgtttattactaggaagctgacggtgtcagtcggggaaattgtgaacggagggccattgccccccgtccctcgtcatacccctgtgtgcagcttcaactcccagaacaagtacatcggggagagcctggccgcggagctgcccgtcagcacccagagacccggctccgacacagtgggcggagggagaggagaggagtgtggtgtagagccggatgcacccctgtccagtctcccacagtctctaccagcccctgcgccctcaccagtgcctctgcctcctgtcctggcactgaccccgtctgtggcgcccagcctcttccagctgtctgtgcagcctgaaccaccgcctccagagcccgtgcccatgtactctgacgaggacctggcgcaggtggtggacgagctcatccaggaggccctgcagagggactgtgaggaagttggctctgcgggtgctgcctacgcagctgccgccctgggtgtttctaatgctgctatggaggatttgttaacagctgcaaccacgggcattttgaggcacattgcagctgaagaagtgtctaaggaaagagagcgaagggagcaggagaggcagcgggctgaagaggaaaggttgaaacaagagagagagctggtgttaagtgagctgagccagggcctggccgtggagctgatggaacgcgtgatgatggagtttgtgagggaaacctgctcccaggagttgaagaatgcagtagagacagaccagagggtccgtgtggcccgttgctgtgaggatgtctgtgcccacttagtggacttgtttctcgtggaggaaatcttccagactgcaaaggagaccctccaggagcttcagtgcttctgcaagtatctacagcggtggagggaagctgtcacagcccgcaagaaactgaggcgccaaatgcgggctttccctgctgcgccctgctgcgtggacgtgagcgaccggctgagggcgctggcgcccagcgcagagtgccccattgctgaagagaacctggccaggggcctcctggacctgggccatgcagggagattgggcatctcctgcaccaggttaaggcggctcagaaacaagacagctcaccagatgaaggttcagcacttctaccagcagctgctgagtgatgtggcatgggcgtctctggacctgccatccctcgtggctgagcacctccctgggaggcaggagcatgtgttttggaagctggtgctggtgttgccggatgtagaggagcagtccccagagagttgtggcagaattctagcaaattggttaaaagtcaagttcatgggagatgaaggctcagtggatgacacatccagcgatgctggtgggattcagacgctttcgcttttcaactcacttagcagcaaaggggatcagatgatttctgttaacgtgtgtataaaggtggcccatggcgccctcagtgatggtgccattgatgctgtggagacacagaaggacctcctgggagccagtgggctcatgctgctgcttccccccaaaatgaagagtgaggacatggcagaggaggacgtgtactggctgtcggccttgctgcagctcaagcagctcctgcaggctaagcccttccagcctgcgcttcctctggtggttcttgtgcctagcccaggaggggacgccgttgagaaggaagtagaagatggtttgtgaaggaagtctcgtttatgaagcagcattgtttaataaatgggtggaggccctgggtctgaggatggtccagtagtgttggggtcaggaatcactgagacagcaacccctgtggtgactgtccactgcaggactgggtggggtcagcacagtgagatatgttagcaggtgtgctgacagcagaatgcaagtgaccttcatctatgtctgtcttaaaggtctgatgctacaggacttggtttcagctaagctgatttcagattacactgttaccgagatccctgataccattaatgatctacaaggttcaactaaggttttgcaagcagtgcagtggctggtttcccactgcccccattcccttgacctctgctgccagactctcattcagtacgtcgaagacgggattggccatgagtttagtggccgctttttccatgacagaagagagaggcgtctgggcggtcttgcttctcaggagcctggcgccatcattgagctgtttaacagtgtgctgcagttcctggcttctgtggtgtcctctgaacagctgtgtgacctgtcctggcctgtcactgagtttgctgaggcagggggcagccggctgcttcctcacctgcactggaatgccccagagcacctggcctggctgaagcaggctgtgctcgggttccagcttccgcagatggaccttccacccctgggggccccctggctccccgtgtgctccatggttgtccagtacgcctcccagatccccagctcacgccagacacagcctgtcctccagtcccaggtggagaacctgctccacagagcctactgtaggtggaagagcaagagtccctccccagtccatggggcaggcccctcggtcatggagatcccatgggatgatcttatcgccttgtgtatcaaccacaagctgagagactggacgcccccccggcttcctgttacatcagaggcgctgagtgaagatggtcagatatgtgtgtatttttttaaaaacgatttgaaaaaatatgatgttcctttgtcgtgggaacaagccaggttgcagacgcagaaggagctacagctgagagagggacgtttggcaataaagccttttcatccttctgcaaacaattttcccataccattgcttcacatgcaccgtaactggaagaggagcacagagtgtgctcaagaggggaggattcccagcacagaggatctgatgcgaggagcttctgctgaggagctcttggcgcagtgtttgtcgagcagtctgctgctggagaaagaagagaacaagaggtttgaagatcagcttcagcaatggttgtctgaagactcaggagcatttacggatttaacttcccttcccctctatcttcctcagactctagtgtctctttctcacactattgaacctgtgatgaaaacatctgtaactactagcccacagagtgacatgatgagggagcaactgcagctgtcagaggcgacaggaacgtgtctaggcgaacgactaaagcacctggaaaggctgatccggagttcaagggaagaggaagttgcctctgagctccatctctctgcgctgctagacatggtggacatttgagcagcctgacctgtggggagggggtctctcccgaagagtttctgtttttactcaaaataatgttattctcagatgcttgatgcactgttggaaatgtgattaatttaatcatgcagataaaccatttaaatgtc

SEQ ID NO: 2021 - DNA, 4110 bp, Homo sapiens
ataaggctacctggctgggaccacagatggagtctcgctctatcacccaggctggagtgcaatggcgcgatctcggctcaccgcaacctccatctcccaggttaaagcgattctcctgcctcagtctcctgagtagctgtgattacaggcgtgcgccatcacacccagctaatttttgtattttttagtagagatggggtttcaccatgttggcctaactcctgacctcgtgatccgcccatcttggcctccgaaagtactgggattacaggtgtgagccactgcacccggcccaaacatttctttttcttttcttttgagacagagtcttgctctgttgcccgtggctggagtgaaatggtgcgattatagttcactgcagcctcaaactcctggccttaagcgatcctcccatcctggcctcccaaagtgctgggattataggcatgagccgcagcaaccactcctcacatttcttgagcatctgtgatgtatcaagccagatgctgggcactgaggttgcagaaggcattgttcctgtcttctaggagccccaggctagcagggaagacggatgtgtatagagttaaccacaataccaggcctcaacttcccgtctgtaacacaggtggaccatgctagattgtcccagcctgccctgtgcttcattagccggtcaacagatccatctcaaatacctcccatgggtactcactgattgctttaacccaaaccatggcactcttgaagactttccctcaggaagctcaaggactatgcatccttctgggtcagaactggacacacagccaccagtgctggacaatggcggcggctcagggacacactggagccctggcccctgcagagctcccagcatgggtgggaagagagatgcaaaatgaccacacggcgggtgaggaggagctccctcggtgcggctgggatgagccctagacactctcaatcacccccacgatgaccccttcccagaggtcccctcagtcatctgccctgaaccaagctcttcctgatcctagaccctccaccctccctctatcttccagggcttggtgacattccaggcagaaatttctgacccttttactttggtccctccctccccagcccagtctctggtcaaactggattcctggctgttcccagaacgagctgcctttccccaccttgccacctctgcccttgttctctctgcctgaatgtcctccttcactagcctcgctgccttgcacatctctcctgagggctgtcatcccagaatgagctgcatttgtccagcctggcccaccatctaccagaacgtcctccttcagcctgtcccactgccttgcaaaacttttctgggggacctgttcacaatgccttctgtagcatactccaagaatccggcgccccctggagttgtgccacacagcacccctttgcagtcaagctccctcagcaccaccacctccaccctggaagagttccccttccctttgaaatctcatgggactttgcacccactctggctttattggaaggctttgtatgtctccacagggtaaacacccatttactggggtgatgatgtctccaggatctagttcatgtttgtcgttggtgactggccccacccagttctgggcaagcaggctggatcccggcaggaacagagcccaccagcctaaacttccatggaggtggagaggggacaggcttctgtctctttttggctgaaggtgcatcatgtccaaggcccctcttctagccaagcagagaagctgggtgataaggatgggtgagagtgggtgatgtaccccggagtcctggcctcccggctcctcactcccctacgcgtaactttatccggccaatgccgcaaagactgctggtgaggccagatgcatgagtgatcatactcacaacagtcgtgaaactgccagtgatgaaactggtaaggacaagaaatgacaataatcaaggtggggtttctcgtggacgtttccaagacttcattctcaaattctctccctcagggtccccaccctgtcctcccacctaagcctggaatgagggggcactggcctgtggggaccctggtcttcaggctcccaaacctggctgggtctggttgccccctggccttaacctgtgaacatccagctgtccctgggctgtgattcagtgtctgtctcctgggtgacctcagcatgggctttgaggaaggggagagagtagtttcttctgagactggatagtgactcagggacccagggctggggcctcaaaagtgcctttgttggcctgggctcaggaatccagagaaactggtcaggaggaggccccagtgacaaaaacccctccctctgcccccgcccctctgccagagccatataactgctcaacctgtccccgagagagagtgccctggcagctgtcggctggaaggaactggtctgctcacacttgctggcttgcgcatcaggactggctttatctcctgactcacggtgcaaaggtgcactctgcgaacgttaagtccgtccccagcgcttggaatcctacggcccccacagccggatcccctcagccttccaggtcctcaactcccgcggacgctgaacaatggcctccatggggctacaggtaatgggcatcgcgctggccgtcctgggctggctggccgtcatgctgtgctgcgcgctgcccatgtggcgcgtgacggccttcatcggcagcaacattgtcacctcgcagaccatctgggagggcctatggatgaactgcgtggtgcagagcaccggccagatgcagtgcaaggtgtacgactcgctgctggcactgccgcaggacctgcaggcggcccgcgccctcgtcatcatcagcatcatcgtggctgctctgggcgtgctgctgtccgtggtggggggcaagtgtaccaactgcctggaggatgaaagcgccaaggccaagaccatgatcgtggcgggcgtggtgttcctgttggccggccttatggtgatagtgccggtgtcctggacggcccacaacatcatccaagacttctacaatccgctggtggcctccgggcagaagcgggagatgggtgcctcgctctacgtcggctgggccgcctccggcctgctgctccttggcggggggctgctttgctgcaactgtccaccccgcacagacaagccttactccgccaagtattctgctgcccgctctgctgctgccagcaactacgtgtaaggtgccacggctccactctgttcctctctgctttgttcttccctggactgagctcagcgcaggctgtgaccccaggagggccctgccacgggccactggctgctggggactggggactgggcagagactgagccaggcaggaaggcagcagccttcagcctctctggcccactcggacaacttcccaaggccgcctcctgctagcaagaacagagtccaccctcctctggatattggggagggacggaagtgacagggtgtggtggtggagtggggagctggcttctgctggccaggatggcttaaccctgactttgggatctgcctgcatcggtgttggccactgtccccatttacattttccccactctgtctgcctgcatctcctctgttgcgggtaggccttgatatcacctctgggactgtgccttgctcaccgaaacccgcgcccaggagtatggctgaggccttgcccacccacctgcctgggaagtgcagagtggatggacgggtttagaggggaggggcgaaggtgctgtaaacaggtttgggcagtggtgggggagggggccagagaggcggctcaggttgcccagctctgtggcctcaggactctctgcctcacccgcttcagcccagggcccctggagactgatcccctctgagtcctctgccccttccaaggacactaatgagcctgggagggtggcagggaggaggggacagcttcacccttggaagtcctggggtttttcctcttccttctttgtggtttctgttttgtaatttaagaagagctattcatcactgtaattattattattttctacaataaatgggacctgtgcacag

SEQ ID NO: 2022 - DNA, 3937 bp, Homo sapiens
aatgctgagacagactcccagaagatctgagcgagtcgcgtagctgagcccggcaggggctggggtggtgctgctgctatgagctgcaccatcgagaagatcctgacagacgccaagacgctgctggagaggctacgggagcacgatgcggccgccgagtcgctggtggatcagtcggcggcgctgcaccggcgggtagcagctatgcgggaggcggggacagcgcttccggaccaggtcaggcagaggtatcaagaggatgcatccgatatgaaggacatgtccaaatacaaacctcacattctgctgtcccaagagaacacacagattagagacttgcaacaggaaaacagagagctatggatttccttggaggaacaccaggatgctttggaacttatcatgagcaaatatcggaaacagatgttacagttaatggttgctaaaaaagcggtggatgctgaaccagtcctgaaagctcaccagtctcactctgcagaaattgagagtcagattgacagaatctgtgaaatgggagaagtgatgaggaaagcagttcaggtggatgatgaccagttttgtaagattcaggaaaaattagcccaattagagcttgaaaataaggaacttcgagaattattgtccatcagcagtgagtctcttcaagccagaaaggaaaactcaatggacactgcttcccaagccatcaaataactgaactctgaatgatggctggagattgtctatcaaggaaggaagttactgtcttcccattcaagtactgtccattaagtgtcttgcctcagatttgatttaatcttaattaaaggtatcaggtggcaatttagaattccagtcaatattggctgtccacagttctcagatgtgttaatgtgaatactacatgctgaatttcaccattcctttctcaaagagactacttttaattttcatttctgggaccttgatttatataaactatgttttcagttctttgttatttttcacatctctgaaactttgagcattttttataagccagcaatttattttacatagcattgtaaaatacacttctaggaaattttaggaaagatttaactgtttaaatctatttggcataaaccttgattttttttttccatttgacaaaaataatacaattccacagaactagatcagcagattctctgatttgtaatgtcattcacctgtgacattttaagtctctctggtgctaagaattggcactttatagcctggtgcctttacttttaatttgagagaacctactgctagtcccaggaaacacacttggaaataagtcagctattttttttgcccagtgatgctatagttgtcatattgtccaaagttcatattgttcaaagctgaggagcttgtcctgtgtatgtgaatgcacacatgtgcacttagttcaaatactaaaagtagcttttattaaatataatcagccaaaaacacacacaaaataaaaaaaacaaatataagtagtcagtttttcaatgttatcctactagttctacattctattttaatttttatacaatttccattttatagttaagaaccatcacttacttggattggatgtctttcattcctagcactaatagttggctttctttttttttgtttacatagaagcagggtttttttttatcttttttctttttttttgtttaagctatataaaaaggtgaggaagcagttttgttacctaatgaaaattattacactcataatgctgtgtaggcaacattgagattcaaatgcccagtggtcaactgggttcactcatcaactcattcccgtcccagtttactcacatttcaaatttataaatttcttcatgttatactattctatttagatttgcccagaattagttgaaataatgctaaacctgtcaatattttccagtaacattaagcaccatactgcatgggagagacacagtactaaaaagagttgttagtgctttatgtgagtgatatttctttcgtaatgctataaagaactacagttaaaataacagaatattttaaagatgtcctaaaagcatctgatcccagtaataactaatggatgtcatctagagcagtgggtgttaatgaataggtatatgtcatttaagaatttttcaaatttctgtttgatatcctgcatagaatttgacaaaaaaaacacttccaagtgtgagcattttttatttcatttcccaagagtaagtaagtaactattagcccagccatctgcctcgaagtataccttaagtgaccccataaatccattcaagaggcaggtactctataccatttggcagccacggccaaacctaccatggccagatttcagtgaaaatgatgaagtaatcaaatcaaggtataatatggtgtccctttatgtgctttatgttcctttagagctgtttataaagttctttatatctcaagtgttaggataaatcgacatactaacttttccccctgcaaaattaaaagcctgaggtacaagtctaagaagcttttagtgctctacataatataaattctggctggtgttaatgctatgaagataatatgtagttagaaaattgagtcggggaggaatgctcttctttttaagtggattttaaagtttctccttgagtggatgaagaacttgcctggtttgcaaaaatcttagttcaaaattatattttctaacaaaaactgcattttgagaagataagctaattttactcagtagtaagtcaaatgaggaagtgcagagggtttttttacatatatatagcaaccttgtcaagtggtcctcacaagagtcataaatactttgtaattagcacagtatattcagcagtgtataactctacaaatagtaccttatattagtgtagtattatatcaatatcttatgtataattcttatattaataccttatgcataattggattcaaacattgaaggtctattttagtgttcttcaaaatgtgcttccctgacctactgaaatagaaacttggtgatgaagttcaagaatttgtattctaatcatctcaaacaattcctaaagacactgattttaaaatatctagtctaggccccattgtgtaatagttagcactctaaaagatgaaaaagaaaatagtctatgtgccaaccacttcattagtacttatgaatttaaaaatgaaaaagtctggtacaggagacaagtatatatataaaattataatgcagtgtgataaatccattatagtatgtataagatacagaagagggactttaaacttgagaattcaatagagataataaatgggtaggagggaaatagaaaactttggtgccacaaaagcaaagtatgtatggtattgccaataatagctaccatctattgagtgctttactacctgtcaggtactgtattatataaactccattttaactgtacctcattttgcagatactcaggcacaaggaggtggttatttgtccaaactggaaccaagattcaaacccagacagagtcttaagcacatttttaatcactaactaacttgagatgcctaaatgccaaatactgttgggagttcaagtggttcttgattagcaaaatctatttttattagtgcaaaagaaacaccacagcttataaagtattatgaattcaataaatggagtcttaactaatgagatattattttctagaatggtgtagctgagagtatgtgtgattcaactgaaaggaataatgtttaatcagtgactcttactatatacaggaaaaggtgcagttctgtctttcaaatctgcctccttaccatattggcttacatccctcatgctgttttcttgtgtttgctagaaagttgttgccaagccaaatgtcatggccatgttgaaggcaaggaag

SEQ ID NO: 2023 - DNA, 4720 bp, Homo sapiens
ctcatgcttccataatagttctgggataattctaaacacaagccatttttctaaggagagtccacattagagaggtctttgttttgtattcaagatgatcaaaattatgaactgggaagttagtccctggggtgtcctggctggcctttggaaatcttcactacatctttctgggttggaattctcaccacagcctgaacgtggggctgtatctgagctgtctctgagtgctgtccatttgatatatcgagtactgggtgtttaccagggctcttcaagccactgggagaaacagctaaagagtaacctactgatttgagatgtggatttgtgccccatccctttctccttgtttcccacaggagttttatctcaaactcctaagccatttttaaggagatcactggaacaaactccaaacctaccctctaatagtcaagtttacctgaattttttcagttctctcgggagaagactaatcacacattgtagtaccaacttggactcttcatgtgcttttcttaactgattagagttaacacctcagctaaagtgtatagaacatacatggggcttcatcaggcttcagaatcagtttcactagatgtgctatgtaggaggccacggaaaaattactgtagtagtaaaagttatcagttctgatgtaaacaatcattttgtcccatattataaataaattggcctgaaaatatcttttcatatgtgaggaataagtatatgatgcctttctcctttaaagtatgaactgctaaaagacagggataacgtgtattctgtattccagcagccacagtgtgtttctggtctttgtaccaggtgctcaggaagtgttttcactggcttgggttgactacttgccatctgctctctgagcattcatttctgaatgaaaggggagaaagtgaaaggagaggtgggaagaaagaggaagctgcagaaatacgaggaaacagctggaggagggaggtgaagttgaggaggtaaggtcagtaaaacaaaaagctagcagagggcagggtcaggcccttggggtagagggctaattaacttctgtcagctagttgaatagagccttgtgtgctttgttagagaccaaaggtacttcaaaggaaaaaaatctagattcttccctgtgtaccttaataattgttcatcaggtcaaaatctatcctgtcctctaggaattctggtcttccctcaggcctagcagagagctttctgccactactcaggcaaccaagggtgaagtgcttcaagtagtatttgtggacagcagcaggtaagcttgatgtgttattcacagcttaaagagtagatgctgagtacagctgttgtccatgtgtagagcttttaataaccagcgcagcaggccccttcacctgcttttatgcctggaccagatgactgaatgtagaactttaggcactttttttttttttgagacggagtctcggtttgttgcccaggctggagtgcagtggcgcaatctcggctcactgcaagctctgccccccgggttcacgccattctcttgcctcagcctcccaagtagctgggactacagactcccaccaccatgcccggctaatttttatattttttagtagagacagggtttcaccgtgttagccaggatggtctcaatctcctgacctggtgatccacctgccttggcctcccaaagtgctgggattacaggtgtgagccaccagatcggccctttaggcactttctacttctcaaggtcaagaaacatcctttaaaaagttaattcccttttctggagcctaagccagatcttatctaggccttgtgttgccatctgttagcattgatttctggaatggagcagctttctcaaagtttggtcttgctagtcatgaggtcatgtcagtgtcttaggtcactgctgctcaccttccttacccagggagtatactgcataggtttctgaacacctgttttcattattcactgttcctctcactgccaagaatggagggaccctcagttgaagatcaaattgactctgaagaaaaactggagatgtttctcttggagtttggatagagtattcacttgataacatgtttttcccctgccttgctcttcacaagaacatctggccaggcattaacaattagtaaatttttttgcatatgaacagtatttttctggtcatgtagatgggtgcacatgacactaaacagcattgtttagtgttatccctcttaactggtgggttgtatttggggtggaggctgtagccgaggagaagacattcacctctgtactcgagaaactttgtgtaggaatttagtttatttttttatttttttaattttttattttttactacttttactgttagcacaatgctataattgagctaatctttgtagtttggtgcaggaccaccaagtttgtgtgacccattacctactttttccatgctcagccattaccctgtcctggggcatctgagggcagtaaggaacaggtgtccaaaggaggaatgttggtgcctatgagtatgttttccagttgtattgaatttcttacttggtgtatttttgacttgtcttagtttctttccttgtggtctatgctattttacttgcgatttgttggatattctccctgtcattaaagagttgtaaaatggaagttagtttctctatgcaaatgctttaatggatgaagctgataggtttagcattgatttttgctggtgtccttcaacaagcatgaaggtgataaatgtgtttccatggctttagactcatttttgaagtcttggattgtgtgaacattcttagaaacaataaaatgttttaattaaaagccctcgactaccagctgaattcagtgtctactaggaaaatgggtagatttgttacattgtccctttgctctctatgactttgttccagttgtcaaggaacttaaatgggtattcaggaaaaagaattcttgtttccctttcctcaccttgccagttaaataactcctggtgacacttcaggtggtagaattgaaacacaaacctgacttctgaccacatgggtcaaaggcaaaaggcaaatggcttcaaagcccttagtgtgcttatccagttcaggcagtgaggagataacctctgctttcctccctgaggagtttggagtatttaaggggggatggggggggtgtcactttgaaaatatgttgctttttctcctgattgtattgaggctgatatggaagggttatttctttctggccaatactttttggtatttctaaatattgcaatcttgatttttactattaaatttgttaattgtcagttctggcttttttgcataaagagttggtccattaacttgccaatttgaagcttctaactagatattccctactgaaagttttggatttgtttttagtttgtggagcagtcttagctggggacaggtaattgacaacggcagagatactttcttttcctaggattctaagtctgtaatccacatcctcaatgtattcacaggactttaaaattctctccaaatgaggaaggaaatatcctgttgctttctaatgtttactaaaagttgtgtttagaacaacagattttaataggcatcttcctttgttatgtgtcattagccctttgcccgtttaccttagggctctttgaaggagaaatggatgtgagaaaacctgtcacttggcgaaagtaaaagggataattaactggctcagagcttatgtgcagagttccaagccccaaagttaatctagaaccactcgataacaccaataaaaatatttatttcacatctgttatatatctggaaaatgttctaagcatcttacacatatttctcattaaatccacaggtgaccattgtgaggtagatattttgttctaattttccagatgaggaagctgagaccctaaaaggctgaccggttccctgatgtgttacctgcttctgctactgatccaaactgcagaacttctcattcatccccaaggcctccaggcagtatccaatggggaatcagctctaaaaggaaccagaccaacgttttccagccccttcattctggtgactgaggggaggaaagaatgggagggggtattcttgtctagtggatggaaaggaaacacactgtcaaattactatatctccttggttttctattacagtagaattctccagccatatttttattgtctatgggggaagttggagatggtgaccttgattagaagtgtctggagggggataaatggaggggataagattcagttggttttggaaaatgttaaagtcttaaaataatgcgtccatctgaagaattttttctaaaaccagagtttataaaaatatcactgatacagcctgccccctcatttccctgccacaggagatgtcttggactagagacacttgtttaataatagcttgtctctgatattcccagtagcttccctctgtgtgaggaaaggatagaaatgttcaggacatcatcatacaggctcctcatctacaaagttccagtagcagtgacgcctacacggaagacttggaactgcaaacaggctggggtcacctcagtgacatctgacgctgtccaaccagaagttcgatttttgttctgggggtgaaggaggaaacagactgtactaaaggactaaaataatttgtct

SEQ ID NO: 2024 - DNA, 3531 bp, Homo sapiens
agaataaagctttcagcaagtttggatctttttctgccaccttagaaaatggaatctgcctctcgataagttactatggatcaaatggaatggcaccagaagataaggatcctgatttagaaacaatattgaatatcccttcagcactcactccaacagtggttcctgttatagtgaccgttcctcaaagcaaagctaaagggaaaataaaaggcaaagaaaaacccaaagaatcccttaaagaagaagaacacccaaaagaagaagagaaaaaggaagaagaagtagaaccagaacctgttttacaagagactttggatgttcccaccttccagagcctaaatgtgtcttgccccagtgggctcctgttgactttcattggacaagaatctacaggtcaatatgttatagatgaggaacccacctgggacatcatggtccgtcagagctacccccagagggtgaagcactatgagttctataaaacggtgatgccacccgcagagcaggaggcttcaagggttatcaccagtcaaggcactgttgtcaaatatatgttggatggatccacacagattctctttgcagatggtgctgtgagcaggagtcccaattcaggtcttatttgtcctccttctgaaatgccagcaacgcctcacagtggagatttgatggactctatttctcagcagaaatcagaaacgataccatctgagattaccaacacaaagaaaggaaaaagtcacaaaagtcagtcatcaatggcccataagggtgaaatccatgaccctcctccagaggcagttcaaactgtaactcctgtggaggttcacataggcacctggtttacaaccacacctgaaggaaatcggatcggcaccaaaggattagaaagaatagcagacttgaccccattgttatcctttcaggccacagatcctgtcaatggaacggttatgacaactcgagaagacaaagttgtcatagttgaaaggaaagatggtactcggatagtggatcatgctgatggtaccagaatcacaaccttttatcaagtttatgaagatcaaattattctgccagatgatcaagaaacaaccgagggtcctcggactgtcaccaggcaggtgaagtgtatgcgggtagaaagctcacgctatgccactgttatcgccaactgtgaggacagtagctgctgtgccacctttggagatggaacaactattattgcaaagccacagggaacataccaggtgttacctccaaacacaggctctctttatattgacaaggattgttcagctgtgtactgccatgagtcaagcagtaatatatactatccttttcaaaagcgtgagcagctgcgagctggcaggtacatcatgaggcatacttcagaggttatctgtgaggttctggatcctgagggaaacacttttcaggtcatggctgatggtagcatatcaactatattacctgaaaaaaaattggaagacgatttaaatgagaaaactgagggctatgatagtctgtcctctatgcaccttgaaaagaatcatcagcaaatctatggtgaacatgtccccaggttttttgttatgtatgctgatggatcaggaatggaacttcttcgagacagtgacatagaagaatatctatctttggcatataaagaatcaaatactgttgttctccaagagccagtgcaggaacagccaggcaccctaaccatcacagtccttcgccctttccatgaagcatcaccatggcaagtaaaaaaggaagatacaattgtccctcctaatctccggtcaaggtcatgggaaacatttccctcagttgagaaaaaaactccaggacctccgtttggtactcagatttggaaaggcctttgcattgagtccaaacagctagtgagtgccccgggtgccatactcaagagccccagtgtgctacagatgcgccaattcattcagcatgaggtcataaagaatgaggtgaaactgaggctgcaggtttcccttaaggattacataaactatattctaaagaaagaagatgagctgcaggaaatgatggctaaagattccagaactgaggaggagagaggcaatgctgctgatctcctcaagctggttatgtctttccctaaaatggaggaaactacaaaaagtcatgttactgaagttgcagctcacctaactgatttattcaagcagtctttggctacgcctccaaaatgcccaccagacacatttggtaaagatttctttgaaaagacatggagacacacagcatcctcaaaacgctggaaagaaaagatagacaaaacgaggaaggaaattgagacaacacagaattacctaatggatattaagaaccgcataataccacccttttttaaatctgaattgaaccagttatatcagtctcagtataatcacctggacagtctttccaaaaaactgccttcttttacaaagaaaaatgaagatgcaaacgaaacagctgttcaagatacatctgatcttaatctagatttcaagccacataaggtttcagaacagaaatcctcaggtgtgcctagtcttccaaaaccagagatttctgcagataagaaggatttcactgctcagaaccaaactgaaaatttaacaaaatctcctgaagaagcagaatcttatgagcccgtgaaaattccaacccagtccttgctgcaggatgttgcgggacaaacaagaaaagaaaaagtgaagttgcctcattatttgctgagttccaagcctaagtctcaacctcttgcaaaggtgcaagattctgttggaggaaaagtgaacacatcctctgttgcatctgctgccattaataatgcaaagtcatccctttttgggttccatcttctcccatcatcagtcaagtttggagtgcttaaggaaggacatacctatgccacagttgtaaagctcaagaatgttggagtggacttctgcaggtttaaagtaaagcagcccccacccagcacaggactgaaagtgacttacaaacctggacctgtggcagctggtatgcagacagaactgaatatagagttatttgccacagctgttggagaggatggggccaagggatcagcacacatctctcacaatatcgagattatgacagagcatgaggttctgttcctacctgtggaagcaactgttttaacaagcagcaattatgataaacgaccaaaagactttccccagggaaaagaaaatccaatggtccagagaacttctacaatttattcctccacacttggagtcttcatgtctcgtaaagtttctccacattaggtacatttcttctcggtacaactcaatagcctccataatcctctcagcctacagaggatgagaaaggaaagaagtcatcacaacatactccatcatcccaggacactgaaactggaagaactgaccagaaatttgccaaatgaaatagcttcaatctgtttaataaagacgtgcgaatagagtgccaaaaagc

SEQ ID NO: 2025 - DNA, 3361 bp, Homo sapiens
agctctgggagaggagccccagccgtgagattcccaggagtttccacttggtgaccagcactgaacacagaccaccaaccatggagtttgggcttagctgggttttccttgttgctattttaaaaggtgtccaatgtgaggtgcagctggtggagtcggggggagccttggtgcagccagggcggtccctgagactctcctgtaaatcttctggattcacttttggtgattatggtatcagttgggtccgccaggctccaggaaaggggctggagtgggtaggtttcattagaaacaaagcttttggtgggacaacaatatacgccgcgtctgtggaaggcagattctccatctcaagagatgattccaaaggcgtcgcctatctgcaaatgagcagcctgcaaaccgaggacacagccgtatactactgtactagagacatctttgttactgggatctatcattactactttgactactggggccagggaaccctggtcaccgtctcctcaggtgagtcctcacaacctctctcctgctttcagtctgaaggttttcactacatttttgggggcaaatatgtgtgctgggtctcctgccaaaagagccgcggaacagtggggggggctcgggaaaatgtcctgaggcagcggcggccaaacagacgagtgccaagggctccagatgttccttcctcttcagcccaacagcacgggtctgtctgtggccagggccaccctgggcctctggggtcccatgcccaacaacccccgggccctccccgggttcagtctgagagggtcccagggacggagcggggcgccagttcttgcctgaggtcctgacattgttctcacaatgtgacaactgcttcgacccctggggccagggaaccctggtcaccgtctcctcaggtgagtcctcaccaccccctctctgagtccacttagcgagactcagcttgccagggtctcagggtcagagtcttggaggcattttggaggtcaggaaagaaacctggggagagggacccttcgaaagggaacccagcctgtcctccccaagtccggccacagatgtcggcagctggggggctccttcggctggtgtggggtgacctctctccgcttcacctggcgcattctcaggggctgtcgtggtgattgcgtggtgggactctgtcccgctccaaggcacccgctctctgggacgggtgcccccccggggtttttggactcctgggggtgactttacagccgtctgcttgcagttggacttcccaggtcgacagtggtctggcttctgaggggtcaggccagaatatgggacaaaccaggggtcttagtgatggctgaggaatgtgtctcaggagcggtgtctgtaggactgtaagatcgctgcacagcagcgaatcgtggaatatcttctttagaattatgaggtgcgctgtgtgtcaacctgcatcttaaattctttattggctggaaagagaactgtcggagtgggtgattccagccaggagggacgcgtagccccggtcttgatgagagcagggttgggggcaggggtagcccagaaacggtggctgccgtcctgacaggggcttagggaggctccaggacctcagtgccttgaagctggtttccatgagaaaaggattgtttatcttaggaggcatgcttactgttaaaagacaggatatgtttgaagtggcttctgagaaaaatggttaagaaaattatgacttaaaaatgtgagagattttcaagtctattaatttttttaactgtccaagtatttgaaattcttatcatttgattaacacccatgagtgatatgtgtctggaattgaggccaaagcaagctcagctaagaaatactagcacagtgctgtcggccccgatgcgggactgcgttttgaccatcataaatcaagtttatttttttaattaattgagcgaagctggaagcagatgatgaattagagtcaagatggctgcatgggggtctccggcacccacagcaggtggcaggaagcaggtcaccgcgagagtctattttaggaagcaaaaaaacacaattggtaaatttatcacttctggttgtgaagaggtggttttgcccaggcccagatctgaaagtgctctactgagcaaaacaacacctggacaatttgcgtttctaaaataaggcgaggctgaccgaaactgaaaaggctttttttaactatctgaatttcatttccaatcttagcttatcaactgctagtttgtgcaaacagcatatcaacttctaaactgcattcatttttaaagtaagatgtttaagaaattaaacagtcttagggagagtttatgactgtattcaaaaagttttttaaattagcttgttatcccttcatgtgataactaatctcaaatactttttcgatacctcagagcattattttcataatgactgtgttcacaatctttttaggttaactcgttttctctttgtgattaaggagaaacactttgatattctgatagagtggccttcattttagtatttttcaagaccacttttcaactactcactttaggacaagttttaggtaaaatgtgcatcattatcctgaattatttcagttaagcatgttagttggtggcataagagaaaactcaatcagatagtgctgaagacaggactgtggagacaccttagaaggacagattctgttccgaatcaccgatgcggcgtcagcaggactggcctagcggaggctctgggagggtggctgccaggcccggcctgggctttgggtctccccggactacccagagctgggatgcgtggcttctgctgccgggccgactggctgcgcaggccccagcccttgttagtggacttggaggaatgattccatgccaaagctttgcaaggctcgcagtgaccaggcgcccgacatggtgagagacaggcagccgccgctgctgcatttgcttctcttaaaactttgtatttgacgtcttatttccactagaaggggaactggtcttaattgcttgatgaagagcaggagactcatttatgtgagtcttttgagtgaccattgtctgggtcactcccatttaactttccctaaagcccatttgaaggagaggtcgcacgagctgctccacaacctctgaatggggatggcatgggtaatgatgcttgagaacataccaagccccactggcatcgcccttgtctaagtcattgactgtaggtcatcatcgcacccttgaaagtagcccatgccttccaaagcgatttatggtaaatggcagaattttaagtggcaaattcagataaaatgcatttcttggttgtttcc

SEQ ID NO: 2026 - DNA, 3527 bp, Homo sapiens
cttttctctattaggaagtaccaccaagaacagggaaggacaagccagaggctggaggaagatacctgcagaacacagacctgacaaaggatcagtatcaaaacatataagaattttgacaaatgaataaaaagagtacaaataacccaacataaagtcaaaaggcgtgatcaggcatttcacagaagcaaacacctttggtggatgcccatgaggagaggcgcagtcacatcagtgcccaggagatgcaaacccagatcccaggggtgtgcatcccacccgttctgcctgtaggatctgcaaacccggcaaaacctagttctagagagactggattcactgcatgtcttcatcactgctggagggagcgcagactgctatcgcctcttagaaaatgacttagttctcatgtaatttgggcattcacacatcctcatcctagatccagcttttccactcccgcacacgtactggaaaacctgtacaggaacatccactgcagcactgctcataccaaacacaacctacatgttctctgcacagagaggggagaagagccggtcagttcactcagtggactctgtgctcaatagtaggtgtgaataagccgcagccgcccagaccgcatgggccaacctcagtccgagaatgcggagtgaaaacacaggtctaacgatcacacatggcaagataattatcttgcaaagaaaactcacttattgttctgccatacatatatgtaccataaaatcactccccgcaccttccactctgaaaaaacaaaggaattctaggcacaaagttcaggatcatggttaactgaggggagagaacagggagtatgatggcaagatagaaggtatcgttcacatccaagtttataggttgggttcttgatttagtcattattcaaaggctaataactaaataaaaggtagctagcgtgagagtgcaacatgaaccaaagatcatgactggctttgcgcatcgaggggccattaaagagtctacttttcatgttatcacttaaaatcattttgcacccaccagggcatgagcatctcgtgctggcaaacaccacatgaccgtggtgacctcagggccagcccgggggtcatcttgaatctctcctgctgaagagacccaggagggtaacacacgcccctccaatctctgagttctaggaaatgaacacctggtatttaaaggggctgacataatgcaaatcatctgatgaaatgtttgttttagttcacttaaagatcaacacgagagtcttcactctgaatgggccacacctgaattaagagaatccttcactctctgcgtcggatgcacaaaccagtcctcctggtgctcacaggggctagcagcaagtccagaccttgtatggtgagggcggggggggatggtgaacttagggttcagcgaaaccgccacttgcaaacacaccccaccgcaggtgcccttgatgtgtacacacgtccttgagaagctgggggcaaggccttgcgggtgagaccacgctcagcagctcacacctttaccaagtactaggacttctttggggttgggttgaggggtgatcccaatctgagtctatggtatgactcaggggagaacaggtcaccgggtgctaggagagctgtccatagaggacacagccccaaaggattagaaccaggagaaaggtagagtctgactcagggtgaggaacacacatatattggtgctgcccgaaggggaactgcctcgtgagcgtctgggaactcttactgcaggtgctcagcagatgcttggtgccctgcagggacgtgctggcctcgatcctcgcgaggcagagccccggactaggagacagttcaggtcctgcataacctgagtgtccacagggcccagctagtcctcaagctggggctcgcccagtggctgctccctctgcttctcccatcctgactccgcctgctcctctttggagaagtgaggggtgaggggcccagaggcaggggctggggtgggctctgctgcatgtggaggcgaaggaggagaggggaggggaggcagcatcaaagccagtctctctagctcagactctgggtggtttgggtgggtcctgccccctggcctgttcccgtctgtggggtcccactgcttgggtggtgtagcttcaccccatcttcccacaccggggtgcctggtgctcagcctcccctcaggtaggctctgtgcctcctgattcctcaccgtgggtggtccctcctgcctgcagcctctaaggcccctgagagcagtcagtcagtcccaaagtccccaccagcgctgctgactcacttccgatgtccttgctgccgtgttcagggagctggagggccaggctgacccgcttgggggcttcctccatgttctcgagctgcgccgaggctgtgggttctaggagaagccaggcggtgaccacacggcgcagctgctttgcacccgggatggtcctggggccacccttttgagtgcttctatatctcagggagcacggatgtccctggtggggaccaggctccctgcgtggccccagcacctgtcggccccagagctgcctcccctgaagggctggcctcaccctcctgctgaccctctggaggggctcggccttccccttgcagggccccctcagagctgcttcagggacagccaccactgatcatgctgagaggccccatcctcacggctgatgcggttgctttcttcttagggtcaaattctgcattcctctccttccacccctgcttcttggaggctgtggcaccccctgctctttctgagctgccctcagtctgtactgaccttcctcatgccctcgcccccaactgcatcacttcttatgcagggatctcaaccgcaccctcgggcacttcatatccgcttccatagctgcaagtacaacgggcccccctctgtactccagatctcacctgcccaccactgggcatcccgggcagctgcctgccctctcctcagacaccttgctgggggctctctcccctgctcaccgtgcggcagggaccccagggctctggtccctgcttgccactctccttgctgcatttccctccctcctctgcctgaggagtttttgctcagagcgtgttcattaaactggtgactaggctctgttggggagttccatgaggatgaccacctggccttccaggtgagaggcaagggccagagaggtcccctctggggcagggtcgcgcctgcctcactcctgccaacatgtctcagggcttctgtgtcagaatcacaggcagattcccagagcggcactcacccagtaaacccggtgggaagggcccaaggcacctgggcccatcagccttgctgccaccgggaagatcttgccaggacagtggcggaggatttgccggaccacactcggagtggcgggttagaccctcatggcctcctgcccatggtttactaaaacaaagctcagagccctactttggcaaataaagctgctgtaatgtctc

SEQ ID NO: 2027 - DNA, 3677 bp, Homo sapiens
tattcttttgaagagtgcatttcaagctgccaaggtggagagagggattacagaaaggagaacaccttatttcaggaacgtggatggagctggtggccattattcttagtaaactcatgcaggaacaaaaccagatactgcatgttcccacttacaggtgagagctaaatgttgagaacacatggacacacagagaggaacaacagacactggtgcctacttgaggatggaaggtggaaggagggagatgagcagaaaaaataactgttggcttagtacctgagtcacaaaatggaacagctggaactgagtcttcaaaaagctgttcaagagttctgaagaccagctgcttctggatgatggaatgtacagtaagaccagaacgtagatggagctggtggccattattcttagtaaactcatgcaggaacagaaaaccaaatactgcacgttcccacttacagcacaagaaccatcaatcagcacagaagacttctgtgaccccaaactatgtggggatttctccctagcaacaagcaagcaatcagtttggcaacaaacactgactggatgtcttccaattcaattccaacactatctacctggaaatagtgtctgatcccacaggaaacggggtttcaccatattatccaggctggtcttgaactcctgggctgaagaaatccacacacctcgtcctcccaaagtgttgggattacaggcgtgaaccaccacaccccagttcaatccattctacacaaactgtaaggatagtttttctaaaacagtacatggatcaattaaaactgatcagctttacactaaaactgatcagagttctgatcagttcaagaactttgtctgtgtagtcaagtcccaaatcatcattctggcacttaaggaagaatggccacagcctcatctccctattattccctttatgaaagcttatggtatctttggtttagcactgattccacccttccctgccttttatataattggtgtatttatcttttgtctagattgtgagatccttggaaacaggtattatgcatataaactcaataactttatttctttttctgccaagtgaacaaagacctccaaattgtagtcacatgtaatacagaacactggtattggtcatatctccatctctgatccacccttcctcccatgcaagctatagatgcatatcatctattttgaattgcctattgaaatgtccctttgaatatctaataggcatttcaagtttaatatattcagaatagtttttcctccattgtttactacctgccagttgcttaaggccaaaatctatgaatcattcttgattcttctctcattttccatattcaatccatcagaagttttaatggctttatctccaaaatatatcttaacaatggagcaaaatttgagtaccatagaaccagattagggataactgtaggaatgaaggagtgatacacctaggaataggaaagtagtctgaagccagatgataaaggtccttttatgccaaactaagaagttcagatattattgttagaggagagctattgaggtttttgagtagggcacttatatattcattttgtacttcaggaatgaatcagtagaggggataaatgagggtaccctcaaaattgcaagcaatgaagtattagaactgaatttttagggacagcaataccagcctaactggctgcataagagaagactgggtgtttgggagaggcaaaaaataaggccaacagaaaaggtagggtagggacagaatataaagggcttgaaagccaggtaaaagcatataaactgggatgcctgggttctaataactgtttccctacttggagaaactccccttatcttttttaaaccccagtttccttttcctgggatttgcttcagctataaatgttgtaattttctataatgctctgacctgctacagtggctctgaaaccttgactgcacactggaatcacctagagagctttaaaagctactgatggctagatctcactaccaaagattcagatttatctggtcttaggtgcagcctggacactgagatatttaaaagttctccaggtgattctaatgtgcagccaaggttgagatcaactcatgtagaaaatagtgaagcactaagattcttaagcatggtaataatatgttaaaatttagtttagtttttttgttttttttgttttttccaagacggagtcttgctctgtcgcccaggctggagtacaatggcatgatttcaactcactgcaacctccacctcctgggttcaagcgattctcctgcctcagcctcccgagtagctaggattacaggtgcgcaccacaacgtctggccaattttttgtatttttagtagagacagggtttcaccatgttggccagggtggtctataactcctgaccttgtaatctgcctgcctcagcctcccaaagtgctgggattacaggcatgagccaccgcgcctggctgaaaaaaggtattttaagaaagactaacaggaatatacagactagtagggaaagactacagaagatcaactagaattttgcaataatccaggagaaaagtttagtaagggctggattagcatacatgcaatgatgttgtagggaggaagatgaatgcaagaaacatttggagagaaggagcaccaggattcagtaagtgattgaatgttaaatctgagcaaaaggaaaaaaaatatggtcaagtttctagcatagaagaataatagactccttaacaaaattaaagtagttgtgaaacagctggttaatcaatattattgagaatatggaaactaacattaaattctaagtcggggtctaacctacgtgccttacatacattatctcatttaatctttacaaccaccatataaatactactatcattccgattttacagttttagaaactgagtaagagtaattaaattatttgcccaaagttacacagtaaatggtagagaagacatttgacctcaactggtctaactacttttcctcataggaagatgaccagtttacatatggaatctgttgaatttgagcaaacaactcaaaaaagcaaaatggctatagaggccagatgggaacataaatgagtgaatcaagtcagatgcaactgtggagaaatcaaaacatcgagagaaggtagttctacttagttatgcttgaatgttgccctatgagaatttcaggcccagtattgccatattttaagatttttcatgaaaagatggaaatctggatttgtatgcaaaaatttgtgtgaatatcaaattcaagtgtttaaaactactgtggctcaaactatggcttcaagtttgcatctctgagcaaaaggctgttggaaattcagaactggatgtaaagtgagagatctgggctgaaggtaaatgattagggaattcataagcacagagaggatggtagatgcttccaaaacagtatgtgttagaatagtaaccagcacttgacatgattagttaaaataaggcaaaaatatatgagttaacaagttagtcaggacttagagaaaactgataaaactagcagtggaaaactagcagacttaagtgggtatatttaaaattcaattttcaatgaactaaaagctaaattccagacaatg

SEQ ID NO: 2028 - DNA, 4143 bp, Homo sapiens
aaaaatatgtagaagatgaaatggcaaggctccctgatagattgtcagtaacttggcctgaaggagatgaattattgcctaatgagattaggcctgctggaacccctattggtgcgttaagaattgaaatactgaataaaaaaggggaagcaatgcaaaagcttccaggaacaagccatggagggtcaaagaaactcctggttgagctcaaagttattttacattcttcaagtggaaataaagagattatttcgcatattagtcaacatggaggaaaatggccttactggtttaaaaaaatggaaaatattcagaagttggggaattataccttgaaattacaagttgtgttgaatgaaagtaatgcagacacttatgcaggaagaccactaccatctaaagcaattaagttttctgttaaagtggtttatctttacattatgaagaaataaccaaaggaccaaattgtgtaattcgaggtgttacagccaagggccctgtaaactcttgtcaaggcaagaattataatctgaaggttactctgcctggcttaaaagaagactcacagattttgaaaattagattactacctggtcaccctcgtcgactgaaagtgaaacctgattctgaaattttagttatagaaaatggaacagctttcccatttcaggtggaagttttagatgaatcagacaacataacagcacaaccaaaattgattgttcattgtaagttttcaggtgctccaaaccttccagtctatgttgtagattgcagtagttctggaaccagtattttaacaggatctgcaattcaagttcagaatattaaaaaagaccagacgcttaaagcaagaattgaaatacctagttgtaaagatgtggcacctgtggagaagactattaagttgcttcccagtagccatgttgcaagactacaaatattcagtgtagaaggacaaaaggcaattcagatcaaacatcaggatgaggttaattggatagcgggtgatattatgcataatcttatttttcaaatgtatgatgaaggagaaagagaaatcaatataacatcagctttagcagaaaaaattaaagttaattggactcctgagattaacaaagaacacttgctacagggtctgcttcctgatgtgcaagtaccaacatctgtaaaagatatgcgctattgccaggtttcattccaagatgatcatgtgtctttggaaagtgcgtttacagtaagaccacttcctgatgaacctaaacatttaaaatgtgaaatgaaaggaggaaaaacagtacagatgggccaagagcttcaaggagaagtagttataataattacggatcagtacggaaatcagattcaagcattttcaccaagttctttatcttctttgtcaattgctggggttggacttgatagctcaaatttgaaaacaacctttcaggaaaacacacagagtataagtgtaagaggcatcaaatttattccaggtcctcctggaaataaggatctttgttttacttggcgtgagttttctgactttattcgagtgcaactaatttctggacctcctgctaaacttctccttatagactggccagaactaaaggagtccattccagtgattaatggaagagatttacagaaccctattattgttcaactttgtgatcagtgggataatccagcaccggtacaacatgttaaaataagtcttacaaaagctagcaatttaaagctcatgccttcaaaccaacagcataaaacagatgagaaaggcagggctaatttgggagtattcagtgtttttgcccctaggggagagcatactcttcaggttaaagccatctataacaaaagtatcatagaaggacctataattaagttaatgattcttccagacccagaaaaacccgttcgtctcaatgttaaatatgacaaagatgcgtccttcttagcagggggtcttttcactgattttatgattagtgttatttctgaagatgacagtatcattaaaaacattaatccagcacgtatttccatgaaaatgtggaagctgtctaccagtgggaaccgacccccagcaaatgcagaaacatttagttgtaataaaataaaagataatgacaaagaagatggctgcttctatttcagggataaagtaattcctaataaagtggggacatattgtatccagtttggttttatgatggataaaacaaatattctcaacagtgaacaggttatagttgaagtcctgcctaatcaacctgtgaagttagtacctaaaattaaaccacctacaccagctgtttcaaatgttcgctcagttgccagtaggaccttggtcagagatctacatcttagtatcacggatgactacgacaaccatactggaattgatttggttggcactataatagccaccattaaaggctctaatgaggaagatactgataccccactttttattgggaaagttagaacacttgaattccccttcgtgaatggttcggctgaaatcatgagtctggtgctggcagaaagtagtcctggaagggatagtactgaatattttattgtatttgagccccggctaccacttttatcaagaaccttagaaccatatatcctaccgttcatgttttacaatgatgttaagaagcagcaacaaatggcagcacttacaaaagaaaaggaccaattatctcagtctattgttatgtataaaagtttatttgaagccagccaacagcttcttaatgaaatgaaatgtcaagttgaagaagcaagattaaaagaggcccaattgcgaaatgaactaaaaatacataatattgacattcctacaacacaacaggtgccacatattgaagcacttctgaaaagaaagctatcagaacaagaagaactgaagaaaaaacctagaagatcgtgtactcttccaaactatactaaaggcagtggagatgttttgggaaagattgcacatctagcacaaattgaagatgatagagctgcgatggttatttcttggcatctggcaagtgacatggactgtgtagtcaccctaaccactgacgctgcacgtcgtatctatgatgaaacccaaggtcgtcagcaggtgttgccccttgattctatttacaagaagactcttccagattggaaaagatctctacctcatttccgaaatggaaaattgtattttaaacccattggagatccagtctttgctcgagacttgttaacatttccagataatgtagaacattgtgaaacaggttgttaaaattacacactgtcctacactgctgaccagagatggagatcgaattcgaagtaatggaaagtttgggggccttcagaataaagctcctccaatggataaacttcggggaatggtatttggagctccagttccaaaacagtgtctgatcttaggggaacaaatagatcttcttcagcagtatcgttctgctgtgtgcaaactagacagtgtgaataaggatcttaacagtcaattagagtaccttcgcactccggatatgaggaagaaaaagcaagaacttgatgaacatgagaaaaatctcaaactaatagaggaaaaactaggtatgactcccatacgtaagtgtaatgactcattgcgtcattcaccaaaggttgagacgacagattgtccagttcctcctaaaagaatgagacgagaagctacaagacaaaataggattataaccaaaacagatgtatgagaggtgacagagagaagaggccattggtctcagtaagaatgccctgctttctgcatctctgtttcagaagaccaagagggtgacttaccagactgagtatttctggggacaatacaagtacctgggcatgaatttccatttcgattcagatgggactggaaacaaccattcaattttatgaatcttactggacattatggatttactggaattattccagacattatgccctttggttgtcactaccttgcaaatgtgtaagaggaaaatgtgctaatgtggcagtgactgtaaaactggcacatggcatttattaatcctgaagaaaagtacatgtactatttttcagtataaatataatgaacatgtcagaact

SEQ ID NO: 2029 - DNA, 3301 bp, Homo sapiens
atataggaggtggtttgcttttgttgggcagtttatcaccttcatgaccaccacaacacctttgctgttggctccacacccacagtcagttttaacaggagtttcagtgaatcagttagttgtaaccaaaggagttgccggccttcagtttattggattcggtgctgtgtgtctgcctattcctcttgatggggaaactggagcagttccctacagtccagccatttcaggtgcccaattatgtctcctctacctgtgatgttcagagatgagaagagccacttttactttttcactgtaaatttttatttaatgtcagccttgcttgccgaactataaactctgtgaggaggtctgtagtgctcaccattgtttctttagagctgaatacgtagcctgacacacagtaggctttcaataaaaatttaatttaccagaagtggaaaatgagttttatgaagaaaatttcagaaaactgagttcatttttcaacacaagagatgaccaaggggtaatatgttccttcaggttcatgaacagcctgcatgaatatgccaagtagttgttttgtaactgtggaagattggctaagaggagatggatggaaagtaaagtcagaaagaccttattgatttaggccagtgggagaagtgttggagtatctgctctggagaaaatgctcttttccggctagttttgttaattatgtttctgaaaaggggggctagattggatggtctttaccaggtttcttccccttctgattcagggacttcaggaggtttgtggtaacctgagaaagtagcctgaggtattatggtgctggagttctccatagggtgcttagcagaccacctttatctccccatacattgcgtttttccatatgtgagctgagaataagctggttgcctttcagtgatctgaaattatagatgcatttcttggaagctttattttttttaatggctaaaattgagtagtatcgctattgctgtctgtagactaccacttgctattcctgtttagagtttactgggcttggtaagttggaagggtaacaggagcacgtttgtgatttttttttttttttttttgagacggagtctcgctctgtcgcccaggccggactgcggactgcagtggcgcaatctcggctcactgcaagctccgcttcccgggttcacgccattctcctgcctcagcctcccaagtagctgggactacaggcgcccgccaccgcgcccggctaattttttgtatttttagtagagacggggtttcaccttgttagccaggatggtctcgatctcctgacctcatgatccacccgcctcggcctcccaaagtgctgggattacaggcgtgagccaccgcgcccggcccacgtttgtgatttaaacaacaacaacaacaacaacaaccagttaacgtaattgacagcagagaagttccaggcagaacagtggctctttcgtttttcttctacacatggctttttgccatcagcatcagtgaagacttgcggaaggagctaatgctgcttatttgcagttgttgaacctgtttgcctatgggacatacccagattacatagccaacaaggagagcctgccagaactgagcacagctcagcagaacaagctgaagcatcttaccatcgtgagcttggcatcaagaatgaagtgtatcccctactccgtgttgctgaaagacctggagatgcggaatctccgggaactagaagaccttatcattgaggctgtctacactgacatcatccagggcaagctggaccagcgaaaccagctgctggaagtggatttctgcattggccgtgacatccgaaagaaggatatcaataatattgtcaagaccctgcatgaatggtgtgatggctgtgaagcagttctactgggcatcgagcagcaagttctgagagccaaccagtacaaagagaaccacaaccgaactcagcagcaggtagaagcagagattgcttgttttcagagggaaaaacgtgatgtccccctcctgaatcttataacaacagctttcttctggttaccaacatcaagaagacactcaaagccaccgcatcctcctcggctcaggagatggagcagcagctggctgaacgggagtgtccccctcacgctgagcagaggcagcccaccaagaagatgtccaaagtgaaaggtctggtctccagccgccactagggccggctggggcagctggcactcaccaggcctgggtcaggtggggaggggacaccaagggcccatttcctcccctctctacctgcagtgagttccagacctgcccgtcccctcaccagcgcctccccaccctgttggtactgttccagaaaaactgttactccccctcacccactccctccttccccagttgttcccttcagactcaggggctccaccaatgccatcccaaaacagggtcagacactgcccagcttccctccaggaggttcttgtctctgtgtaagggcttgtctccctcccagtttttcttttgctccacgtcattttgtcaggctggttataagccggaggcagctttaaccagcccccagggatgattgtgaaggaggcccctccccttgtgaggagggggcactcctctccagcccctggtaccacagtcctcacgatggtgcagtgatttctagccaggcgtcaagatgcgctgctttccctctcctgcctcatcccttgttggcagctccagttcaggccgtggagggacgtgatgctgggctgtgtttactaaacccacgggttttcagcctcttaagcccagctccgatctccaattagttgagagcgctgggttgactaacctctggtatctgagcacagacagagggtgctgtgggtctgctgggtggcagaaatggttccttccggcttggcgttctctcctggccactcttcctgctgcctctgactactcagccttgttttcggtgtgtaggccccagctgcccactggaactgccggctaatgcttgctctcccaagatctttaactcctcctggctgcacctgggtagggatggtggcatcgatgcccctctgtctgctgaaggacctgttgctgcttctgtcttttcacccctccttggctgatgacccagagccctctgatgatggcattctcctggcaagagaaaaagacttaactagacttctgaacttgaacagtttcaggttatattttaattttttttttttttgtacaggttctgattctaatacatttcaacatgcttttgtcc

SEQ ID NO: 2030 - DNA, 3484 bp, Homo sapiens
attgcaaagccacagggaacataccaggtgttacctccaaacacaggctctctttatattgacaaggattgttcagctgtgtactgccatgagtcaagcagtaatatatactatccttttcaaaagcgtgagcagctgcgagctggcaggtacatcatgaggcatacttcagaggttatctgtgaggttctggatcctgagggaaacacttttcaggtcatggctgatggtagcatatcaactatattacctgaaaaaaaattggaagatgatttaaatgagaaaactgagggctatgatagtctgtcctctatgcaccttgaaaagaatcatcagcaaatctatggtgaacatgtccccaggttttttgttatgtatgctgatggatcaggaatggaacttcttcgagacagtgacatagaagaatatctatctttggcatataaagaatcaaatactgttgttctccaagagccagtgcaggaacagccaggcaccctaaccatcacagtccttcgccctttccatgaagcatcaccatggcaagtaaaaaaggaagatacaattgtccctcctaatctccggtcaaggtcatgggaaacatttccctcagttgagaaaaaaactccaggacctccgtttggtactcagatttggaaaggcctttgcattgagtccaaacagctagtgagtgccccgggtgccatactcaagagccccagtgtgctacagatgcgccaattcattcagcatgaggtcataaagaatgaggtgaaactgaggctgcaggtttcccttaaggattacataaactatattctaaagaaagaagatgagctgcaggaaatgatggttaaagattccagaactgaggaggagagaggcaatgctgctgatctcctcaagctggttatgtctttccctaaaatggaggaaactacaaaaagtcatgttactgaagttgcagctcacctaactgatttattcaagcagtctttggctacgcctccaaaatgcccaccagacacatttggtaaagatttctttgaaaagacatggagacacacagcatcctcaaaacgctggaaagaaaagatagacaaaacgaggaaggaaattgagacaacacagaattacctaatggatattaagaaccgcataataccacccttttttaaatctgaattgaaccagttatatcagtctcagtataatcacctggacagtctttccaaaaaactgccttcttttacaaagaaaaatgaagatgcaaacgaaacagctgttcaagatacatctgatcttaatctagatttcaagccacataaggtttcagaacagaaatcctcaagtgtgcctagtcttccaaaaccagagatttctgcagataagaaggatttcactgctcagaaccaaactgaaaatttaacaaaatctcctgaagaagcagaatcttatgagcccgtgaaaattccaacccagtccttgctgcaggatgttgcgggacaaacaagaaaagaaaaagtgaagttgcctcattatttgctgagttccaagcctaagtctcaacctcttgcaaaggtgcaagattctgttggaggaaaagtgaacacatcctctgttgcatctgctgccattaataatgcaaagtcatccctttttgggttccatcctctcccatcatcagtcaagtttggagtgcttaaggaaggacatacctatgccacagttgtaaagctcaagaatgttggagtggacttctgcaggtttaaagtaaagcagcccccacccagcacaggactgaaagtgacttacaaacctggacctgtggcagctggtatgcagacagaactgaatatagagttatttgccacagctgttggagaggatggggccaagggatcagcacacatctctcacaatatcgagattatgacagagcatgaggttctgttcctacctgtggaagcaaatatcctttaaagttcaacttgagtaatcatatatagtgcagaaattacacgagtgaggaaaacatggaagtcaaaatgcatctctactttattaattctatcttcaaaatcagagttaaatttattaagacaaagagcatcttcattcatctttgaaagcacctagccaaatctaaaaaaatacctgacacatagtatatgtgcagtaacttcagattgaataaatgtaaatgttattggctatctacggaatatcagacagaataataaaacagcaagtatctatcacaaaaaaattataattttatggaaggataggaaataccttattattataaaggttgggtattcactgaattatgcatgcattcctccttatcagtgtcttcagccaaacagatattagatagatatcaagaacctattacctccaaggtactgtataaaatagtttatcatatataaaaatggataattggactctgtcttaaaaggtattatataatttgtagcagaaataaagtcttcacattttatttctattttgtactttctccagtggcatgaattgtgtgctgcttgtgttacagttctctatttatttgatttttgagctggatcttatagaatgtgaaaacttgattgacgggaactttaagtaaaaataatgaacaaaaccatggcaacaggaaagctccaggtgtttgggatgattggcagggagttcaacttgccaaaagcttgagtattaggaatatagtgggaaagtaggttggagtcaagttatgaaagatcttaaatccttggcttgaattttattatttaagcagcagtgaaccactgcagattcctgaccctgtgggtgacatgatcagcatatctttattaagatgaatccagggttattgtgcaggacatgtcaaaggggaacaactggatgtgtaaaagtaccattagaagtctacctgaatgggccatgtgtgaggacaagaactgggagtgggggaacagtcaacataaaagagggacatgaatgaaagacatggtgggggaaggaaactgcaaaatctgaggtagaagccattgatggatggaagaaagaggacatcgagttcaacttcaaagttttgggctgaggtaatgaatcatgtatatgtaatattagatctcaactgagaagtcagaattggagatataataattttaagcatcgtttacacagaggtgatggctgaatgtatgggcaaggaacagaaatctggagtcggtttagggagcaggaggaagaagagccagtggagacaaaagcagcaattagaaaatggtgaaatacttcagaagccttaggaaaaatttcaaggaaaagacggacacaattgacggatgctattgagatgtcaaagaaaattcagatttaaagtgttaaatttggttgggataaaaactaaattgcaaaaggtaaagaatgactgtattaagaaagcagaaacattagttatggatattctttc

SEQ ID NO: 2031 - DNA, 3635 bp, Homo sapiens
ctttttagagaatcttattcccaaatatttgactcctgaggtcattcaggaagaattcagtcacatgcttatatgcagagcaggagcgccagcttctcgacatgctgtgaaggtggtccagaagtgtaaaatacaaaaagtgagattccagggaaagtgcccaccaagatcaaggatatctgtgccaattaaaaggaatgctatattgcatagaaatgaatggagaccaccagctggagcccagaaggccagatctataaaaatgatagaaagacccaaaattgctgctgtctgtggacattatgattattattatgctcaacttgatatgctgaggaggagagcccacaaaccaagttatcaccctattcctcaagaaaatactggagttgaggattacggtcaggaaacgaggcatggtccatccccaagtcaatggcctgctgagtaccttcagagaaaatttgaagctcaacaatataagttgaaagtggagaagcaattgggtcttcgtccatcttctgccgagccaaattacaaccgagacaagagctaagaagtaatggagaagagcctagattccaggagctgccatttaggaaaaacgaaatgaaggaacaggaatattggaagcagttagaggaaatacgccaacagtaccacaatgacatgaaagaaattagaaagaagatggggagagaaccagaggagaactcaaaaataagtcataaaacctatttggtgaagaagagtaacctgcctgtccatcaagatgcatctgagggagaagcacctgtgcagaaggaatttcgctcttgttgcccaggctggagtgcagtggcgcgatcttggctcaccgcaacctccgcctcccaggttcaagcgattctcctgcctcagcctcctgagtagctggaattataggcgcctgccaccgcgcccagctaatttttgtattttagtggagacagggtctcaccatgttggccaggctggtcttgaactcctgacctcgggtgatccacctgcctcagcctcccaaagtgctgggattataggcatgagccaccccgcctgagcgaattattattatctttataattagagtaattctctgtgttttaaattatatttattattagagcttggtccagagtcaactagaaatggaaaatcctcaaggtattataaacttgtcatttaaaggtgccagtaggatcacagtcacattccataaaaacacggctcagatgttacagacatgtttttctctcacattttttaacctggttagagtaaatccagtgccttaaagtttttaataagtcaggtaattaaaaataaaccactggaagcctcaaaaagtttgtatcaggaattgggtgaataaaatcttgtatattttatgcaagaggagtaactttgaaagaaaacacaccaaaatgccaatggtggtaattggtggtatctggattggtgtgagtaggaatgattattgtctctctactttttagattttttataagaaggttacagaacttttactacaaatatgtataataaagtatccgttccttagttctgtcagcactctaatcaatatcttcaaacaaaaaagccatctgaaagacagaaatggtggcacgagactatagttccagctatttaggaggccgaggatcccttgagctcaggagtttgagaccagccttggtaatatagtgagaccccatctctaaaaaaaaagaaaaggcatctgatatttcctgaaggctcctccagagcaatccagcagcagatacctttgcaaacttttgtaaaggaaataattatcacttaatttgtctaatttttggatttaggttttaattatcttttttgaagggaatatgcagctatataataagacactttaaaaaagtctctacttgtagagttatctttccaaaatactgatttgaacattatttctctacacgacaatcaatggcgactgccatttctcttagcatggcatgctagacttttgtgagttgttcctaacagaatgttccagcctcattgctcacatttcccccaaacatacccaaagctctaaatgtctcagattaccttttttttttttaaatgacatattttttatttctttaagtgatttttttcactgtggtaaaatacatataacatcgcctttaccaccctaaccattttttttttttttttttttaattgatcattcttgggtgtttctcgcagaggggtatttggcagggtcataggacaacagtggagggaaggtcagcagacaaacaagtgaacaaaggtctctggttttcctaggcagaggaccctgcggccttccgcagtgtttgtgtccctgggtacttgagattagggagtggtgatgactcttaacgagcatgctgccttcaagcatctgtttaacaaagcacatcttgcaccgcccttaatccatttaaccctgagtggacacagcacatgtttcagagggcacagggttgggggtaaggtcacagatcaacaggatcacaaggcagaagaatttttcttactatagaacaaaatgaaaagtctcccatgtctacctctttctacacagacacggcaaccatccgatttctcaatcttttccccgcctttcccctctttctattccacaaaaccgccattgtcatcatggcccgttctcaatgagctgttgggtacacctcccagacggggtggtggccgggcagaggggcttctcacttcccagtaggggcggccgggcagaggcgcccctcacctcccggacgaggcggctggccgggcggggggctgacccccccccacctccctcccggatggggcggctggccgggcggggggctgacccccccccacctccctcccggacggggcggctggcctggcgggggctgacccccacctccctcctggacggggtggctgccgggcggagacgctcctcacctcccagacggggtggctgccgggcggataggctcctcacttctcagaccgggcggctgccgggcggaggggctcctcacttcttagacggggcggttgccaggcggagggtctcctcgcttctcagatggggcggccgggcagagacgctcctcacctcccagacagggtcgcggccgggtagaggcgctcctcacatcccagacggggcggcggggcaaaggcgctccccacatctcagacgatgggcggccgggcagagacgctcctcacttcctagatgggatggcggcggggcagagacgctcctcactttccagactgggcagccaggcagaggggctcctcacgtcccagacgatgggcggccgggcagagacgctcctcacttcccagacggggtggcggccgggcagaggctgcaatctcggcactttgggaggccaaggcaggcgggtgggaggtggaggttgtagccagccgagatcgcgccactgcgctccagcctgggcaccattgagcactgagtgaaccagactccgtctgcaatcccggcacctcgggaggctgaggctggcggatcactcgctgttaggagctggagaccagcccggccaacacagcgaaaccccgtctccacc

SEQ ID NO: 2032 - DNA, 4050 bp, Homo sapiens
aaatgttattagttgctatgtttgggttgtggggtgataggtgctttctgtttacttctttgtgctttcttctattttctgcaatgaatttctgttttatcattagaaataacagtaggtattttaaattacacaatgaaataaacaacctagggcacactaaatttgtcatggattctgagctccaaggaacaggtcagccttaccaggcccagcctccctcccctgcagctgtggggcataggattctcagcaagtgggtacagatggaaataccagtgcagtggctctattctgatgtggactgaagaggccagatgggaaacatcctattccaacctggactcttcctgcaaggaggatgccaaccaactggaggcccctggagaaaggacaccaggatggagggagtgacactcgaggtcatgggcaggtttattctttaaagtgcagtcatgggggaggtgggaagacacagtcttgatcttcaaatctcaagagttctatcctgggcagagacagcaactttgcttttcatctccacaaaggacagacctaggacaaatgtgagacagattggagctcaggatgatagcaaatcagtgcagtccccagggggaggttgtatggagacaaattatatatttgtttttcaaacctggaaagagacaggagatgaacagagtgttttctttatttatttatgccctacatcttcccccaaaggattttaaattgtttacacggaatagtatgtggatcataatgttaatggaatttaaattggaaatcagggccaaagaaaggagaatgaagccaatgttcttctgtatgagctgctaacgggcttgaatgtgcttaattttgaacctgagcttcctgtcatgctgcgttagaaagaagaattgatttgtgtattcattcaacaatatttattcaagtatttatagagcacatactatgtgccaaacattgttctagatatagagtaaagtgaccaaacacaacgcaccatagcacctcctctccgggagggaatattctagtgagaaaagacaaataatacttgaaactgttgacaaagagagtcaaactctgtaaaatacttgaagagatttattctgagccaaatatgagtgaacaatggcctgtaatacagccctcaggagatcctgaaaacatgtacccaaggtggttgggccacaacttggttttatacattttagggagatgtaaggcatcagtcaatacatgtaagttgtatttggtttggtctggaaaggtgggacaactggaagcaggggctttcaggtcataggcagattcaaagattttctgattgacagttggttgaaagagttaagttattgtctaaagaaaggaatgtctgggttaagataaggggttgtgcagactaaggtcttatcatagagatgaagcctcccggttgtaggcttcagaggataggctgtaaatgtttctatcagacttaaagagtctgttctaacagtaattccaaaaaggaggagggtataatgaagtaggtttgccgcccccttcccatcatggcctgaactagtttttcaggttaactttggaatgcccctgactgagaggagaggtccattcagatggctgggggcttagaattttatttttcatttatgaaacacaaaaagaagccaagaaatgaatgagcttggaaaatattagacagtaataggcactgagtgaagatatcggggggaccaatgtcaccaggaggtgacatttaagctgaggtctgagtgaaaagaaacagactttgagtgacaataattttataacaaacactggaggcagtttttccagggactgtttttggaaccagcctccagagcaaagaatctgccttttaggcgcagttcagcaaaggggtgttgtaaggtcagggcccgtgggccctgcttgtgcaggcttctggtggtcccacgaaattccagaagaaaaaactggagtcctagctgaacaatgtgtgcctcagcaactgtcttcctggagttttccttttctcagctgggcttttgataggagtccagtagcagatacctggagagtttgttgcacgaagaatggctgcccaccattgtcaactttgtctctatccttctctgaatgaagagaactagagcacatctaatgttgtccctactcaactgaccaccttgcattggaggaacttgttttgagttacataattaggctaagagaaacaaacctagaaacctgggttcctcatttgttgcaacattcctcaaggttctctctggcagaagccatacgataaaatatctttaaattgggcaacctggcttttcatcccagccagctgtgtgattttgggttggtgactaatttgtgttttccacattaatacagtgagaaggattatttttgttctgcctatatcctagggacttcatatggaagaagtaaagtgacagctgggaaagggactttaggtgtcaacggcagtatgagaatacaggatttttgtcaatctgctgtgtttccccaggttaggaaaaccctggatgccaccatgcagacattacaggacatgctgactgtggaggactttgatgtctccgatgccttccaacacagtcgatcgacagagtccgtcaagtcggctgcctctgagacctacatgagcaagatcaacattgccaagaggagagccaaccagcaggaaacagaaatgttttattttacagtaagtggcatcctgggcccagaaccacactgtcggccaagccactggcagtgacttttcaggagcaacccaagctactgagaaccagagaaaccacatgggtcaattggatctaagactccatcaccatgcttttaaaattaagttgcctggcttggttttctgaaatgcagaaagtggattcccaatgggtagcattggcattgatcttgggtgatgattattgaaattttcttgctctagaaaaaaaccagagacagttttattcagtggggtgataagaaaatggctgacagagtcaggtacaagtcccaaggaacaaccttgaaattatgtatatagattatcatgttgaattgtcttaaatttaggtgtgagctttggaaaaaatgccctcaaaaatccaagcaaattgctcttgagttgctagcccttcatgtaaaatcccatgttaattatctttcatttggacagggactgggaggagaaaggagacggggactggggctttagttcaacatgtgtttactgaacatagaatattaggtttgtaagggaccttaaatcttccatgggatgcttgagtcagttcagccacatccctgaccaggggccatcctgactctgcctgattgctcccaagattaaaatctccctttttccccagacagcccttttgtttgcattgtgcctggcttttggtattaccatgttttcctttatctttgctatcttcaaaaacctacctcactaggatttcttggttctgttctctggggccacccagagtggaggctaattctacatggcagtgtttcacatggttgcagggagctgggatttcatttctctaggctaaatgtatttgattctttcagtcttgccttataagcttttgttttgagtagcctcagtatcctagtgactctctcctggacatgttccatgtgctgatgcctcttctaaggtgagactccgagcagtggtatgcccaacacagaactgagcaaaattggccgggcaccgtggcttacgcctgtaatccgagcactttgggaggccaaggcaggcagattgcctgagctcaggagttctagaccagcctgggcaacacggtgaaaacccgtctctactaaaatacaaaaaattagctgggtgtggtggcgtgcacctgtagtcccagctacttgggaggctgaggcaggagaattgcttgaacctgggaagtggaggttgcagtgagccaagatcgtgccactgcctccagcctgggtgacagagcgagacttcatctc

SEQ ID NO: 2033 - DNA, 3663 bp, Homo sapiens
gcgtgtggttcttggagaaagttggaggtggtggtgatttcagtcgccttggccgccttgagccggagctgagcggaggcactgggccgagcctgcttcccgggccttcctaccatgccagggctgctccctgcctccgccaccctggcacaccttcacccgcgtaccgcctcctccccgtcgctctgccttttccaaaactcacttgggccctccgtgcgcagggttcttttttggtttttctgtaaaaatcaaaacaaaaaacagagacttttgagaggagcagatgccacctaaagtcccactgcattccctgcaaagcgctcaaatgtggaagccagtcattggcatttttattttttattgattgattgattttttcaccagtggctttttgtaacctctgtgttctgctgtgtttcttgtgtttagtcttcgagtgcttcgactgaccatgatcccctgggccccctccctcctggctgggagaagagacaggacaatggacgggtgtattacgtgaaccataacactcgcacgacccagtgggaggatccccggacccaggggatgatccaggaaccagctctgcccccaggatgggagatgaaatacaccagcgagggggtgcgatactttgtggaccacaatacccgcaccaccacctttaaggatcctcgcccggggtttgagtcggggacgaagcaaggttcccctggtgcttatgaccgcagttttcggtggaagtatcaccagttccgtttcctctgccattcaaatgccctacctagccacgtgaagatcagcgtttccaggcagacgcttttcgaagattccttccaacagatcatgaacatgaaaccctatgacctgcgccgccggctcttcatcatcatgcgtggcgaggagggcctggactatgggggcatcgccagagagtggtttttcctcctgtctcatgaggtgctcaaccctatgtattgtttatttgaatatgccggaaagaacaattactgcctgcagatcaaccccgcctcctccatcaacccggaccacctcacctactttcgctttataggcagattcatcgccatggcgctgtaccatggaaagttcatcgacacgggcttcaccctccctttctacaagcggatgctcaataagagaccaaccctgaaagacctggagtccattgaccctgagttctacaactccattgtctggatcaaagagaacaacctggaagaatgtggcctggagctgtacttcatccaggacatggagatactgggcaaggtgacgacccacgagctgaaggagggcggcgagagcatccgggtcacagaggagaacaaggaagagtacatcatgctgctgactgactggcgtttcacccgaggcgtggaagagcagaccaaagccttcctggatggcttcaacgaggtggccccgctggagtggctgcgctactttgacgagaaagagctggagctgatgctgtgcggcatgcaggagatagacagagcgactggcagaagagcaccatctaccggcactacaccaagaacagcaagcagatccagtggttctggcaggtggtgaaggagatggacaacgagaagaggatccggctgctgcagtttgtcaccggtacctgccgcctgcccgtcgggggatttgccgaactcatcggtagcaacggaccacagaagttttgcattgacaaagttggcaaggaaacctggctgcccagaagccacacctgcttcaaccgtctggatcttccaccctacaagagctacgaacagctgagagagaagctgctgtatgccattgaggagaccgagggctttggacaggagtaaccgaggccgcccctcccacgccccccagcgcacatgtagtcctgagtcctccctgcctgagaggccactggccccgcagcccttgggaggcccccgtggatgtggccctgtgtgggaccacactgtcatctcgctgctggcagaaaagcctgatcccaggaggccctgcagttcccccgacccgcggatggcagtctggaataaagccccctagttgcctttggccccacctttgcaaagttccagagggctgaccctctctgcaaaactctcccctgtcctctagaccccaccctgggtgtatgtgagtgtgcaagggaaggtgttgcatccccaggggctgccgcagaggccggagacctcctggactagttcggcgaggagactggccactgggggtggctgttcgggactgagagcgccaagggtctttgccagcaaaggaggttctgcctgtaattgagcctctctgatgatggagatgaagtgaaggtctgagggagcgggccctggggcgaggccatctctgcctgcctccctagcaggcgccagcggtggaggctgagtcgcaggacacatgccggccagttaattcattctcagccaatgaaggtttgtctaagctgcctgggtatccacgggacaaaaacagcaaactccctcagactttgtccatgtataaacttgaagtggttgtgttgtagggttgcaggttttttgttacgctgctgtcactttctgtccaggagctggcaccccaggtgttctgagaccttgagggacccagacctttgggtccaagagtttcccaaacagccacgcctctcaggaacccacctggcggttccgtgagctcaggcaggcctgacccggcggcacagcctggcagggacctcgtccccaagcctggcagaatgagaggggttgaggtcccgagcgccactcctagccttgccgccttcaatagagaagaaatccctttgctagatagggtcccccaggcagtccccagtggcgggacacaggggtccggctgtggagctcccctgccagcccctggagctccaggagggcctgttggtcccctgttcagaatggagtgcagcccgccagcggaaagtgttcattctgcataggtgtgaggctttatctgcacacaggacatgaaaaccagcagaaaggccctgagctgctgcatagccccatctgatttctgcagctcccgccagcctccaacacggggactctgccgtaactggaatcttcataggtcatattgaaatcttcaaggtgaccatgccccaccggggtgctggggcagtagtcatggcagactcccggcctgggcccccaggattctaggacccccaggcagccccttggactggtcccgggtgccttccaagcacagtctccatgctcccagattctcgaccttcccccggcccgggaggtgcagcctgcgtctgcctctgtcgtgtgtgctgatttgagtggcttagcttgccacagcgcagcctcttctgtccctttcagtcatttgctgtacttccctgtggcacgttaccatggaagccgctccagggtgggtcagggtgcaagctgctggtgaggtttggaagcatcaggctcacgggtgttcatgtgtgttcgtgcgtgtgtgtgcgtacgtgtatataactgaagtgtctgtacggaatgccctttgctagccatgggctggtcaccagattgttttgtaatgcccgccccttgcctcgatattgccagtttcttgtgcaataaacaatcagcagct

SEQ ID NO: 2034 - DNA, 3615 bp, Homo sapiens
aagatggcggcgggggcgaggtgaggtgttggcagtggaaaggggttcgggctcggggggcggggggacgcggtcctagcgccgctcggcttcacgctccgcaagcccccggcagtcggcaggaaccgccgtcaccaccggcacccgcgcggggggtcgtgcctggcagccgcacaccaccggatgcgctggcgcgcggacggtcgttccttggagaagctgcctgtgcatatgggcctggtgatcaccgaggtggagcaggaacccagcttctcggacatcgcgagcctcgtggtgtggtgtatggccgtgggcatctcctacattagcgtctacgaccaccaaggtattttcaaaagaaataattccagattgatggatgaaattttaaaacaacagcaagaacttctgggcctagattgttcaaaatactcaccagaatttgcaaatagtaatgacaaagatgatcaagttttaaattgccatttggcagtgaaggtgctgtctccggaagatggaaaagcagatattgtaagagctgctcaggacttttgccagttagtagcccagaagcaaaagagacccacagatttggatgtagatacgttagccagtttacttagttcaaatggttgtcctgatcctgatttagtattgaagttcggtcctgtggacagcacattaggctttcttccctggcacatcagattgactgagattgtctctttgccttcccacctaaacatcagttatgaggactttttctctgcccttcgtcaatatgcagcctgtgaacagcgtctgggaaagtagtggtcattggttgcataatttgatttgaggcttgtggaggaaaggaaccaagtgactctgatgtttacaaagcacctatgaaaccctgtacacacctagttcataatcctcataatttatcaacaaacacaaaaaagtgtcttacttgagagtgagtgtgtgtgtgtgcgtgtgcacgtgcacacatgtgcacgtttgtatgtatggaaataaacttataaatggggacgtattggagaaggaaatacatagacctacaactttgagcaaatagcagtgatgttttaggaactgaaatgtcacacttaaagtcttcagcccagctacttccctatttttgtggggagaagagggcctgattagaactgttctggttgtgtttggcgggaggggaataatttttgttcagtccttcttagtgaccaaactttaatttttaagaataatatattgacttactgaactgaagcattctgagttgaaaggagctccagaggagtggagttctgtgttgctcacatgttaaaatcttgctcaccttcagagcagagggaatacctatcttcagatatccgtccattttcatctcttaattgtagtcaaaagtatgacttgagagtgttgctctggtattctgggttctgaagtctggtattctggtattctgggttcaaaagtatgacttgagagtgttgctctggtattctgagagttgctctgtattctgggttctgaagattatttgaaaaataactcctactacattgaaatgcagacttaaaaatttaaacattggattaggcagtcaaaaaaaccaagcaagcataaaaggtcaataagttgtaatcttgatagtaaaggtggaaaacttattataaatggaaagaaagttttatttccttttttgtttgatgggcagtatgccatattatacccaaagttcttttaaaaaatatttccatcaaccatttttatttaaaataaacatttgagggaagttaccaaggcagcttttttcctcaaaagtaacctgttcctctttggaatagcacattttaggggcatggttaatacctgagatttttactcagtaaatcctgatggttactgtgtgtaaaatatctttaagtaggattgaaggcctctgtgggggaataaaatattaccaaagtctataaaaataaattttacatgttctcttttatgacagagagcagcactggttctgttatttttaaaatgaataattgatttcttgataggtgtttaatatttcttccctcactgctgattcttagatagaaaccattctttatatttgatagactgctttcagaaaacccttatcaacaagtgtacaatacttatctaaaactatacatttagaatggagcagtttaatactagatctcagaagttttgaaaaatagcaaagaagactggatttggaaagcatggtctacaattggttgttaaattctgaagctatgaagaataaatgtttcaactttggattatgaaaccccatttatgattttttaaatacacttgaaataaaaatgattaaactaaattttggtccagtgacattactttgcactgcataatccattatacgttgtacgacttttttttttgttttaatttattactgagagttttgtgtgaagctacagcatatctaaccagagaatttctgattccttatactgtgattatattatattgaggcatttgtagtgcagctgaagactgaatttatgccttttgtaaacatgataggtataaatgtcttataaacattctggagtatgtatagctttaatgaatgaaatttaatggacctgattaaaatgaagggatttaatcgttgttaaagttaagttagtcaaataaattacctactggaatatagcccaagccagtaaaggtttaatatttgcattttcgtgcttttattttctccttccattcataagtatatacttgaaagtacatctgtagcctatgatttgagtctcttgaagttctaggaagaggcaaactacaaactactaggattctgatttcagatgtagtcattccagaaccttctctttatgagttcacctgctagtacaatctccacaacttgaatggcattggttgttctgtaattcctgccaaaagcatcacaagttgtacatcatcaaggctccctttgcactcccaagaagaactggtaattttaaacaaaagtatgtgtctttatttgtattggaaaatactgtctttaaattgtttcttgttgacactccccacaatggaaaaattaccgaattaaacctgttttatggatggcagcttggagcatagcaagaagttggaggatttgaattccattcccagttctcattgtgttttgtttcttaaaactataataatcggttactgttataaagtttaaaaggtggtcttaatgtgaatagcaaattctggtatatcgtgactaacgcttaagaatgcctgtctttgagaggaaggtgttataatattaatgaacagtgccaaatacactgtgcatatctgcaatttaatctttgaatgtatgttactggattagctccctcctcctgtgtgatggtaccatgcatagagtcaatcaaatccttgtgatgttttgtatggactttgacaatatgtaaataatgtgtaaagccagtttttatgattaaggaatcaaatttattgaattttattattgaaagttgaaacttaacatgtatgaacaaaaaccaataaaagaatatactcttttcattg

SEQ ID NO: 2035 - DNA, 3758 bp, Homo sapiens
ctgttgattggccactgacccgtgctgcaggcacacaaaggaagctgcacccacagcagtctgttgtggatggttgctgagctgcgcattcggcattgggcttgctttgtttcctgccaggcccagcattttcttctaccagatcggcaggcttgtgggcttcttcctaggtccctcccctgcactctgaataggaaagctggaagctgtgctttagagaagctttaagacgccgaaagaaaccagaagagtgagcgccagttgtatgtgcgtggtctccatccgcaaagccggagctgggcgcaacagtgttgacttgtaattgatcaatttagatcgggcgcaggccgggggagggcagtgcttttgatttaggctgggaaaggcctcctagtgactatgttcaatttggaggaattcagatgctcttttgttatacaagtgaagctgtgtaatacaaatgaggagttttacttttcctaaatcttccccttatcattcaagtattgaggagttttacctttcctaaatcttccccttatcattccagtattatcagtgagatctggttgtgatttatgtaaatggtggctaaaaaattcaaactactgagggggagaattctcattttacagcttcacatgctgtgctgaactaaataagtagcgtgggatgttggctttgtgacaggtcttttgtcatttttcagaaagcattttgacttgttgatgtcaatttggaacagctgaaaaaatacaggaaaataagataaatacgtacatgttgagggtggggacaaaatgaaggttctgaaccagctgccggcttacagtagccatataagcaacagcagcaatgcaccaacctggtgagtaataggcctgattcactggagagatactagcacctttaatgagtcagatagatgcacaatgggtgtgggagcagttggacttgtgggcacaaagtctagcaagaagctcagacttgcaaacaactgtaggacgtgcaaagcaagctggcattggagcttgccgggcacagctgctcaggaataggcagctggttttccctttgatccctgagattccaaaggttactttcctctttgttcccttcccagggtcaattagagtagaaactgcagatgcttttcagttgagaattttcctagaattctcaaaaatgtgtatgctggcttaaaatctgccatcaagaattctgttaccttgctttaagcctccagttccttccagatgtatggtggaggaggccagagggcccttgttttggggcttcagaggatggttgttatctggatgagcactgtggaaagactgagagagcaactgagagaaagtgggcccctgaatgaaagtgatttcgcaaattttaggcagatgccaccatcagaaactgatattttctgacgtctttctcaccttcctctagagcattcagtccagaaatgaccagcctgtccaaagggggaaattactgatattgatctgttccttagagcagtgtttcagtcttttttttttttttgagatggaatctcattctgtcacccaggctggagtgcagtggcacgatctcggctcattgcaacctccaccttcctgattcaagtgattctcctgcctcagcctcccaagaagctggaattacaggtgtgcaccaccacacccggctaatttttgaattttttatagagatggggtttcaccatgttgccaggctggtctcaaactcctgacctcaagtgatcctcctgcctcggcctcccaaagcgctaggattacaggcgtgagccaccatggccggccttcagcctttgtgatattaaagcacagcaacacatttcccattacacccctgaacacacacacacagaaaacccaaaagtttcacaaaatgattcttgctcttactactctcagtacactctgtatttaaaaaaaaaaatgctggttgtggcttcctaagtggtgcgtgcagttttcaaatcaatgcccttggcgataaagtgtgccctatactgattatctctggacaaagtctgaatggggcttggctctaatctctagtcctcattggacattttacatacctggcctttgcctccaccctgatgtggagtgatcatgggggtgggaaatatagctggatccgaaagctctgaagtggggatggaggtgtcacagctgaggctaggcccattctgcagggcactcagtgtgtacagttggttttctatcaggggtcaaccggcggggggacttgagaacagatctctgggcacaaagcagggcctttgccctggggcttgctatgtggctcagcctacacggctctctccccgtcagtcctgtccaaagcccaggaaactaatgtaccacccccgaggaagagagcctacctttccatccaaggaagtgttttacctgtggtaagcacgggggacagaattcttgaggaaggagggtgctgcgtcccagtggtggaggaaaagagaggacctggtgtaagcagccatggcatggacctcatccgaggtggcacctggctagggtcctgacctccaatccttccccagtaaccatcactttgagtaaacagtggctccacccccggcatggttctttgcaccaacatttggggaatgcctaccaggggtcacacactgagctggatgctgagtgtagggtgtccacaacatcgtgcctaaaaagtctctgtatggggtataagaaggtgctggggcaatacagatgagatgagaagcatctttcagggaatgggttgatcccaattcaggcttcccagagaaggatgtctgtagacttcatattagcaagggaggaaggtagccaggccacaggactgctggtgtaaagaccagggcatatgaaatggcaagtgtgactgtgctttcagccaataatttggtattgtcaaatgatgggaccaaacagctggagaggcagatcctaaagggtcctgtgggccaggctggacttcatcttgtcactaactaatggagaggctctgaaggagttaaaagagctcagtttgtctcgtggttaaatccaagttttacaaaggtcacgctgactgtaaagtggaaggtgggctggccaggggatcatctagtctgggtgagaagtgatgataacatgaaggggtgaagagagatttagaagaagtgattcacaggattaaacatttaaataatggaagtggagaaaatggggggggcggttccagatttcaggcatagatgaaagaagtgcagttaggcacatgtaaagagaaacaggaacagcaggttttaggggagaagataacagaatgggtgagaaatgacacttgagtaccctagtgtgctaggtaatcatctgtctacttcccttcatttgtcatgtatattcccatttaatttgcataaagacttcgagttaaacggtcttaccccaatttgtcaaatttctgcgcatgatatggtacaagaaaccgtaagtggctaaggcggcattggtgttcaaattgcctgactacaaaggcagtgcttgttggctacattctgttgcttcccagtttagaacatgttacattgaggcgcctgctgcatttccaaataaaaaagtacagaaagaaggtggctgtataaatctggggctcacaaagtaattttgattactgagagtttgctttcaaggagcaaactgtgactccttgattatgaaccttaattt

SEQ ID NO: 2036 - DNA, 3811 bp, Homo sapiens
actggaaaactttgggtgtgagacgggattcaggctgtggctaatgtgctggaagcacgcacagttgtgaccatcaagtatgcaggaagcaatcattctcctggctctcctgggtgccatgtcagggggagaagcactacacctaatcctcttacctgctacaggcaatgtggcagagaattctccacctgggacttcagtgcacaagttttctgtgaagttatcagcatcattgtcacctgtgatcccaggatttccccagatagtcaactcaaatcccctcactgaagcttttagggtgaattggctgtcaggcacctactttgaggttgtcaccactgggatggaacaactagattttgaaacaggaccaaacatatttgatttgcagatttatgtgaaggatgaggttggtgtcacagacctgcaagtcctgactgtccaggtaacagatgtgaacgagccacctcagtttcaaggcaacttggcagaaggtctacacctctacatagtagaaagagcaaaccctggattcatttaccaggttgaggccttcgatccagaagacacaagccgaaacattcccctcagttatttcctgatttctcccccaaagagcttcagaatgtctgctaatggcaccctcttctccacaacagaattggactttgaagcaggacacagaagtttccatctcatcgtggaggtgagggacagtggaggcctcaaagcctccacagagctccaggtgaacatcgtgaacctcaacgacgaagtccctcgctttaccagcccgacacgagtgtacacagtcctggaggaactgagtccaggaaccatcgtggccaatatcacagcggaggatcctgatgatgaaggttttcccagccacctcctctacagcattaccactgttagcaaatatttcatgataaatcagttgactggtacaatccaagtggcccaaaggatagaccgagatgcaggtgaattgagacaaaatcccaccatttccctggaagttctagtgaaggacagaccatatgggggtcaggagaatcgcatccagataaccttcattgtggaagacgtcaacgacaatcctgccacatgccaaaagttcaccttcagcattatggtgccggaaagaacagccaaggggacgttgcttcttgacctaaacaagttctgctttgatgatgacagtgaggcaccaaacaacagattcaacttcaccatgccatctggagtggggagcggcagcagatttttacaggatccagctggctctgggaagattgtgctgattggtgatctagactacgaaaatccaagtaacctagcagccggcaataaatatacggtgataatccaggtgcaggatgtggcccccccttactataaaaataacgtctacgtttatatcctaacaagcccagaaaatgagtttcctctcatttttgataggccatcctatgtatttgatgtgtcagaaagaaggcccgccagaacccgagtgggacaggtgcgagccactgataaagacctcccccagagcagcctcctgtactccatctccactggaggggccagcctccagtatccaaatgtattttggattaatcccaagacaggagaactccagctggtaactaaagtggactgtgaaacaacccccatctatattctcagaatccaggccaccaacaacgaagacacaagctctgtcactgttactgtgaacatccttgaagaaaatgatgaaaagccaatttgtactccaaactcttatttcctggccctcccagtggatctgaaagttggcacaaatattcagaatttcaagctgacatgtaccgaccttgattccagccccagatctttccgttattccattggcccaggtaacgtcaacaatcatttcaccttctctcccaatgctggttccaatgtcacacgcctgctgcttacgtctcgctttgactatgctggtgggtttgataagatctgggactacaagctacttgtctacgtaactgatgacaacttgatgtctgacaggaagaaagcggaggctcttgttgagacaggaacagtgacactgagtattaaagtcattccccacccaaccactatcatcaccacgacccccaggcccagggtcacctatcaggtcctgaggaaaaacgtttactctccatctgcatggtacgtgccgtttgtcatcactttgggctccatattgcttctgggtctcctcgtgtacctggtcgtcctattggccaaagccatccacagacactgcccctgcaagactgggaagaacaaggaacctctgacaaagaaaggagaaacgaagactgcagagagagacgtcgtggtggaaactatccagatgaacactatctttgatggagaagccatagatccagtgaccggggaaacatatgaattcaactcaaaaactggagccagaaagtggaaagatccactaacccaaatgccaaaatggaaagagtccagccaccagggagctgccccacgcagagtcactgctggggaagggatggggtcactgagaagtgccaactgggaagaagatgagctgagtggcaaagcgtgggctgaggatgctggtctgggttccagaaatgagggtggcaagctgggcaacccaaagaacagaaatccagccttcatgaacagggcttaccccaaaccacacccaggaaagtaaacggggtctaaggaggggcctgtcaatcactgagatgctgcctcaccctaaattctatggggatggtgtgggcatggtgtaggggggaaaatgtgggctgaggggattcagacatccagggtcaaacatgggatgtttgacaaatttttaaacaaatagaaaggggtttgatcacatagttgcgtgttctgaaatgatacaggaacattttctatcagatttcagaactacctgtgcttctgataagcaagactgttaactttggggtgtggaattgttgtgtttcttctttgcattgactgctaggaagctctattctgttcaccatagaaagtttgtaggaattcctgacataaatagtgaagactatccttacatctggtttccaccttattttcctgccctcgttttaacatcacccagatttcttcagttataaatatgccatacacctttgtaagtcacctcaaatcttcttcaaaagaagcagaacagtgaaaaaaacagatgagtaagttaagagttggtcatctggaaagaagaaaactcagtaggcaccttcttttgttttttcttgtggtgtccggatcagcatcctgcatgtgagattcatccacgttgtcctgtctagcagtagttcagttctcttcatggttatgtctggtttcattctatgattatatcacaatttatctattctacacttgggtggcagctgcttcagatttttacttttaaaaaatatacttaaaagtgaactacaggcagggcatgatggctcatgcctgtaatgccagcactttgccaaggtgggcagatcacctaaggtcaggagttcaagatcagcctggcctagatggcaaaaccctgtctctactaaaaaatacaaaaattagcttggtgtggtggtgggcacatgtaatcccagctacttgggaggctgaggtagggagaactgcttaaacctgagaggtggaggttacagtgagttgagattgtgccactgcactctagcctgggtgacaaagcaagactccatctcagaaaaaaaaaataaaagtgaattacaacact

SEQ ID NO: 2037 - DNA, 5211 bp, Homo sapiens
ttttagagaattttttggaaattacctttaattttatctaagacttcttatatcttaattttgtgaaaatgtatattgttcataaaaggaaactcttatgttcccttactcctaaatacctaaggagttttcagatccagttaatgggagattgtaatattcaatcgttaaaaagtctgatccatacagtattcatttggttttttaaaaagtttttcaaagtatttgttttgaggaaagaatgcaattggatatttaatgtggtaaaattttgcaaagattatttctttttagttagaagagtgtaattaaaagtattaatttcttaccttccacacgcgtgcacagcggaaattttgtgtttttcctttttcttttagcagtccattttgtttaacacacagatcccaaattttgagaataaatatgtcataaagaaatagggtatcttcaatacctttggtataagggttaatcacagtttatttcccaaagtgacaaactggacacaggttaaataagctgttagagtggtaacattgtaatgcatcagtactttagaatatggtgcaggcattaaaatccctggtttcagagaatcttcagtgacctggtaaatgtttacatgtcaattaaagaagcacatgagactgaatgttgtataatctcattttcagaaaaaagtttgtgcatatagaaatgtgtctaataaacgcaaaaggaaagtacatctgagtactaacaacggatttgagcgggattattgatagattatttttctctttatattctgtattttaaaaggtgtaacagggatccacattttttatgtagtttagagggaaattgttttaatttttgttcatctgcttacctttctaattttgtagtcaggcctttctactttgctgcctctttaaaccaaacgtaataaacttggagctgtcactgtatgccagcatcataaacaccatcattttatgatagggaaaattttttggctcacttgtttagaaaattagtaaaatttattagcattattatttattagatttgtttcttcattttgttagtatgctacaatttagcatctttgaacattatacagaatgttgactttgcttaagggttgtttgaataggcatttcaaagtgcttttgcttttggctgcatggagagtagaatctattgaggtgattgttcttgtgatgtggtgccatgttccaaaattaatatatatgcatggtattaatgaggaatatgtttgcattcatattttagcagatacaatttatcagtgttggtgacaacctctatggttttattttctttataatacagtcttttgcctggatggagtcctcactttaaggttaagagtaactaagccaatgttactccagctacagttccctaaattatactatagctgctgggaacaaagccatgctgatgaatctggacttgtgcatgatttttgtttgcttctcattaacctgcccaccctccactccaaaattatacctcattaacgttctgataacagccaggaagacagcctcacctgaaccctctttgactgaatggatttttcattgtttttcttaaatgcctacgcttcagaggctatcaactgcttaaatgcagccatcgacatttacacagacatggtaagacattgcattgcttgagtggctgtggggtggagtcttgagatggcttagagttctatctttcttttttatgttcccaaactggcattcagataggtaaaatcggtgtgtgactgtttcttgttttttcccctagggaaggtttacaattgcagccaagcaccacattactattgcagagatctatgagactgaacttgtagacattgagaaggctattgcacattatgaacaatctgctgattattacaaaggagaagaatccaacagctcagcaaacaagtgtctgctgaaggtggcagcatatgctgcccagcttgagcagtaccagaaagccattgagatctatgagcaggttggggcaaacacaatggataatcctttgttgaaatacagtgcaaaggattacttcttcaaagctgccctctgccacttcatagtagacgagttgaatgtcaagcttgctcttgagaaatatgaggaaatgtttccagcatttactgattcaagagaatgtaaattattgaaaaaactcctagaagctcatgaagaacagaacagtgaagcttacactgaagcagtgaaggaatttgactcaatatctcgcttggatcagtggctgaccaccatgttgcttcgcatcaaaaagtccatccaaggggatggagaaggagatggagacctaaaatgaaatgtttttgtctttgtggcatgcagctaactcctctttagttttgtcttagggtcaagtgatctttatgggatgcctatttaatggcttaattttgttgcatatgagccagacggcctgtgtattgtttaagctcgccaagtctgtgttgctgtgaaatgaatgaaggagaggctcctgttcatcttgtggtaatgatgggttgtttcatgcttatcagaacccccagcgttttctgagaagtacttcagaatctcattcctcatatttcattggtatttgtggagcctatgtttaatgttgccacgtgtttttatgtcctttttgttggacttgagtactcagcccagttgttctcatggatgctttgcattttctctgtgctttggcatctgaatatgttctttaaatgtgtgtttagtttaggacagttactaggaatgagtttataacttcattagaaatcatttctatttttgttatcctgtgattattttgatggtgctagtgactagtttctttgctttttgtgttgttccgtatgctaacatgtgcatggcaaaaatttagaatagccagggtctgtaggcatcacattgtgaggaagggagctttctggaagtacttgcttcatgtatgatgagtgtcaaagtgaatttgatttgtacttagacacacgcgtttacacacacacacatatcacaagatctgttagaaatggaatttttctctttttctggagatagttttcacttttagttggagtggaaatccctttatatttacattgaagtattttaattggcatagcctgctcattattttcatgtttatacactttcccacgttgaggtggtgtgttctgtgctgtgactatagaaatcttggtcagggctggatagattatctaagtcaagcttgagaatgaatgtatgtaattttcctgtttattgtacatgatgggttaggtggggtgaatgtggtacaggaatgtcctgtatgcccaagtgggcaagaaccccaacttgtttctcaggggacttgattgttctcttagctggtggaatatgttggcttatgtgtttgaactctgtcgtgtttaattggtttatataatatatgtatgctatcttgattcatgaacttgatcctattaatttatatgctgatattgtactttagacatacgcttgtctcctgaatgtcctctgaatatttatagttaaatgatttatatttgaaatgtgttgccagacttaacccagcagacactctgacatcacggagcttcactgatgacaggtaacgaaacttcctatgttatgtcaggtagtagtaagtagtattggaatgatgttttcatttttggtggctctcaactggaattggtagtgtttccaggccaagggtcgactgcaggttgtttgagaaatgatgagtaggtcagtctaggaagaaagagaaagtagcaggaaaggaagtgggaagggccagccaaggacagactgtagaggatccacatcaggtggccacgaggacttgcaggctatagttatggtggtgacatgcatgaggtgggctggtagagcaggaagctctgtgatgtcagagcatctactgggactacaggtgcactgtagtccccactactgggggtggcaatgaagacactctgtctgttgggccctagaatttaatgtggatttcctccttccttccaagttctgagattcttaaatgagagctggctgtcttctagaggtaagacctggaatggagtccagttggtactttttcactccctcttagaatctcttatgaaaaaatgatcagagagaaaagtggggttttgtttccccacctaataatatatcctacaaccagccaaatgcacttttgtgaaaatggggtgtgaggagtggttctgcagcttgagtcctctggttttaagtagtttgtttctacttgtttaaagaatcttctggtctgaccacttaaagtaaaaactacatgatttattttcgggcaattatgtttagctttcatcattatactccaacagacccgtctgaaggggtatttttttttaaaataatgtttgtaacattttgttgtgtcaattagagggtcacttgtttgtattgcaataaacactgggaccagttccggggttaagaattaatttttgtttttaatatttcacatgaaaagaatcaaagtaattgtaatggctagaagagacctgccagaagattaaaaaaaagaatgagagaaaagcccagttagtggtgtgcaaacttacttcctttaaatgtcccatggatgtaggacagtgccatgtttcaagatgcctgtgaactaggtcttcaagatttatagaatgttacttatgaacaaaatataattatttatggtacaattcttgtactttagcaaatctggagttagttcatagtcaaagtcagttaatatttcttagaggaaagttttgctttttgtggcaacatttttatagcttgtgtgagttcttttttatttaatgatttgaaagcagtatttttgcacagtcgtgaccgtgtgtggtggcatcactgtaaccaaagtatatgcaccagcccttgtgcatttattgtttctcctgattttgtggatttaaatgtccaaatgcaaacctttgtgacttcctttggaggacttggcagcacagcatgcccccgtgacctgcctgctgtggtatgagctatgaccaagagcaggcttcctgctccatggagtcctgagttgctctggggcaggggattacgttatgaaaactaaccatgtgtaacaataaatctaccttagcag

SEQ ID NO: 2038 - DNA, 3722 bp, Homo sapiens
agacttgatgttttatatagaaatggacccaccaggtaatactgcagtattattgtagagagttagttaatttcgtggctttttaatttttcgaaagctactgtaaaagatcctttttggatttctgtttttattaatttgtttcattgataaaaattagtttgctcatggcttaaaaattaaacagattgtttgactgtctgtggaagcaagcagctcaggctgtgtgtggtaaatgcttattcttacttgaatggatatgaattgaactccagtttttcactggtgtcttttgttaatcgagatccttccctgggtgagttatgttgtgggatattgtccctgtaattaaaatgatgcatcttttgtgctgcttttctctgttgccagtggatgagaacagtgtagcactttgcagtgataacacttggtactttagaaagcatgtaaaatgtagcagtgattacaactcagttctctaaatgttgagactttgcttgctctctcatattaagatattataatgaaaaaagaagttgactttccattattgttagtctttgtaaaatattcttggtagatacctgaaatcattttttgtataagttaaaatagtaacagtgctttaaaacttatgacagaatttacctaaaaatcctagatttattttgtttcctaagtaagttgttttattccaatgttagctctccccctgcccccatttaaggtattcaggaatactgcagtcttttatttgtcaccaattggtatatatgaatactgatttgacattgaggaagggggatgtcatttttaatcagacctagtatatagagcacaatttatccaacagaatattaacatattaaagagatttagggcacagatgagagtttcttaaagtggcttttggcagaacagtgcctgaaatactaagattagagaaacccaattgctcctcttaaaacatactgctgtagatgagcctttttattactgcaacagagtttgtggaggacagagaccaaatttgtctttcgtaattaaataagaggaaattaaagccaactcatgttattcctgctactcatatgttcatagtttcttactttagatggatttgaccaggcatgaaactttaatataactagaatctagaagtacagaatgtcatgactctggatttactttgaaatttattcacatggccagcccaatttatttgttagtttctaaggctctctctcttttctccttttcagtttcatttctttttgagccatgctctgaaagattttttttaagaaaattatcttccatattgcatggaattgtgaactaatgctatatatttcagttactctaactttttatttttttaaagtaaaagtattcatctaaagaaatttagttctaatgtagttgggattgcgaacaactttttctttttcatctgcagcactgcctcctaaaccaccaaaacctactactgtagccaacaacggtatgaataacaatatgtccttacaagatgctgaatggtactggggagatatctcgagggaagaagtgaatgaaaaacttcgagatacagcagacgggacctttttggtacgagatgcgtctactaaaatgcatggtgattatactcttacactaaggaaagggggaaataacaaattaatcaaaatatttcatcgagatgggaaatatggcttctctgacccattaaccttcagttctgtggttgaattaataaaccactaccggaatgaatctctagctcagtataatcccaaattggatgtgaaattactttatccagtatccaaataccaacaggatcaagttgtcaaagaagataatattgaagctgtagggaaaaaattacatgaatataacactcagtttcaagaaaaaagtcgagaatatgatagattatatgaagaatatacccgcacatcccaggaaatccaaatgaaaaggacagctattgaagcatttaatgaaaccataaaaatatttgaagaacagtgccagacccaagagcggtacagcaaagaatacatagaaaagtttaaacgtgaaggcaatgagaaagaaatacaaaggattatgcataattatgataagttgaagtctcgaatcagtgaaattattgacagtagaagaagattggaagaagacttgaagaagcaggcagctgagtatcgagaaattgacaaacgtatgaacagcattaaaccagaccttatccagctgagaaagacgagagaccaatacttgatgtggttgactcaaaaaggtgttcggcaaaagaagttgaacgagtggttgggcaatgaaaacactgaagaccaatattcactggtggaagatgatgaagatttgccccatcatgatgagaagacatggaatgttggaagcagcaaccgaaacaaagctgaaaacctgttgcgagggaagcgagatggcacttttcttgtccgggagagcagtaaacagggctgctatgcctgctctgtagtggtggacggcgaagtaaagcattgtgtcataaacaaaacagcaactggctatggctttgccgagccctataacttgtacagctctctgaaagaactggtgctacattaccaacacacctcccttgtgcagcacaacgactccctcaatgtcacactagcctacccagtatatgcacagcagaggcgatgaagcgcttactctttgatccttctcctgaagttcagccaccctgaggcctctggaaagcaaagggctcctctccagtctgatctgtgaattgagctgcagaaacgaagccatctttctttggatgggactagagctttctttcacaaaaaagaagtaggggaagacatgcagcctaaggctgtatgatgaccacacgttcctaagctggagtgcttatcccttctttttctttttttctttggtttaatttaaagccacaaccacatacaacacaaagagaaaaagaaatgcaaaaatctctgcgtgcagggacaaagaggcctttaaccatggtgcttgttaatgctttctgaagctttaccagctgaaagttgggactctggagagcggaggagagagaggcagaagaaccctggcctgagaaggtttggtccagcctggtttagcctggatgttgctgtgcacggtggacccagacacatcgcactgtggattatttcattttgtaacaaatgaacgatatgtagcagaaaggcacgtccactcacaagggacgctttgggagaatgtcagttcatgtatgttcagaagaaattctgtcatagaaagtgccagaaagtgtttaacttgtcaaaaaacaaaaacccagcaacagaaaaatggagtttggaaaacaggacttaaaatgacattcagtatataaaatatgtacataatattggatgactaactatcaaatagatggatttgtatcaataccaaatagcttctgttttgttttgctgaaggctaaattcacagcgctatgcaattcttaattttcattaagttgttatttcagttttaaatgtaccttcagaataagcttccccaccccagtttttgttgcttgaaaatattgttgtcccggatttttgttaatattcatttttgttatccttttttaaaagtaaatgtacaggatgccagtaaaaaaaaaaaatggcttcagaattaaaactatg

SEQ ID NO: 2039 - DNA, 4323 bp, Homo sapiens
acagggagtggctcaggtttcttgacacttccctgctgtggcgaaaaggagaaataattaacagctcctggggctctaggatcgctgatcgcgtcgggggcactgcaagcgcccagctgagccatgctctgggaggagacaggcgccgcccctgcgcccgcgcgggcctcggacctcccctacaggatatcctcagaccatctcaaaaaggaggaaaagatgactatgatggctcaccagtacccctcttggatcttcattaatgagaagacattcataaccagggaacaacttaattctttattgaagacctataacattttttatgagaaccagaaaaatctgcatattttatatggagagactgaagatggcaaactaattgttgaaggaatgctggacattttctggggagtaaaacgacctatacagctaaaaatacaagatgagaagccattctcttcttttactagtatgaagtcatcagacgtcttctccagcaaaggaatgacacgctggggggaatttgacgatctctatcgtattagtgagctggacaggacccagattcctatgtctgaaaaaaggaattcccaggaagactatttatcttatcacagcaacaccctgaagccacatgcaaaggatgaaccagactccccagtgctctatagaaccatgagtgaagcagctctggtgagaaaaaggatgaagcctctgatgatggacagaaaagaaagacagaaaaatagagcctctattaatggacacttctataaccatgaaacatcaattttcattccagcctttgaatcagaaactaaggtcagagtaaacagtaacatgagaactgaagaagtaataaagcaacttctccaaaaatttaagattgaaaatagtccccaggattttgctcttcacattatttttgcaacaggagaacaaagacgactaaagaagacagacattccgctactgcagaggctcctacagggaccttctgaaaagaatgctcgcattttcctcatggataaagatgcagaagaaattagcagtgatgtggctcagtacattaactttcacttttctctcttggaatccattcttcaaagattaaatgaagaagagaaaagagagattcaaagaatagtaacaaaattcaataaagaaaaggcgattatactgaaatgtcttcaaaataaactagtaataaaaacagagacaacagtttagcagtacaagcttctattgctaaaacatttcaaaaaactcagagatattactctttgatgaatgcataagttctgtacttgcatttatacgaacatatatgagacttgaatcgtagaaaattgaatgtcaaaaaaagctcatttctttttgaagtgatgaggttaattagggttcacagttggacaaaatgagtttgagtttagtttcagtaactgaaataagcttgaatactgcatatgccaaatagcttttatagtaaaccatgtaatgaactcaaatttaaatggtgtcttcagataagcagtttaaacttcatttagcttggactctcaagagaactgaaacataatcaatggattcagaaatgactcagaaaaaagaagctgccagttcttggaatgaaaaagaaatacagtcttacaccatcaaggaatctacctgatagtgacagtagcttcttgaaaactctggcattttcataaaatctaggactatcttaaatggcctgttgacttctggctatctgtaacatcagagctgtctggcctttggaaaggaaaaattatggactctgttaagaaatcctaattgaaattttctgaacctccccccagcccttttattctctctcttctgctgatgaaagacctttcatcagttcaaagcttttcttaagctcttttttaagttaattgaactttttctttatttatttttcaaaaaaatgtttatatcacatagacatattacatcggctaaagcaagacttggcccacaaatacctatttgttgctgaatgaatacaatggataaagcaaggctgttgtagctgaagttacatagggaatcccaaactctgccctcttagcatcttattctacatgacaactctcaaggtactcacagatctgtttaacccacttgaaaaaaaaacactaaaaatgaagaaatgctataagtataaactatgattttatttataaattctgtattaaaatggaattatatgcaacattctttcattctgtaaactaattccatttgcattcctcataagcattgtagtaaattgatcatattacatgtactaaggaatgagattatatgcagtaaacccaactggaagattaacaatattaaaatatgaaacatttttaagacaaaggcattacttctcagtattaccaaacctaaactggttgaaggtgaaagtgtgctatggccttttcaagcctaagaagtctctcttactgagtaaaccagaggcttgcatcgctattctttcacctgtcaatattaataagaaaatagtctcatctcacttaaatgaggcaaatgtaatagttaaaattcaacatacttataaaaaactagtgtcatgtacctgccatgaacatgacaaaaggttagtcttcaatagactgaaatgtataagagaagaaccaagtcttacatagaaaaaaaaggtagatatgaaaagaaaaatcacagaagagagaatgcaaatggccactaagtatatgaaaaaagtcgtatcttaacagtgaacaactgtgttagtctgtatcaatcagaagacagaaacaaggtagtaatttaaacagggaaagtttaatataaataataattaagctatgataggagaataataataaagatgaaaagagaaggtaccctaaggctgagggaaagaatcctaacaaggaaaggcaggaatgagggtttcagaattcactggagaaggtgtggttgcagcccactggagagaagtttgctggcttgcccaggccagagcaggaccacagatactggacaagctggtacagccaaccccctaggtgtggaccagctgaggcaggtgggcagatatgcagagggacttggggctttgccaaagggtaagcacaaagaaggagtcacgggttctgttcgaggcactgttgggattaggagtcggagggacctactttgcaggaacctagcataactttgtgtgacgagactgcacaagacaaagctcaggcaagtggctcagtagttggccagcccagcagggtcctctgtatgagtgtgcacccagctgaagagaagaaatggagagcagcaattggagcttcaggaccggcttgcactgtggctccaggttataccaccactgcccaaagcaaaagctagagaagcaagtggagaaatgctggagaaagctgcaccctacaggcaaccagcactgcagaaaccactccaggcaaagtagtgaaggaaaaaagcctgctctccagtagcctggcctgtcagcctggaggaatcaggaaagaccccttcctcttgcagtgtgtctccagcgccctctactgacaaagtatgccatcatgcaagctgcaaaggaaacatttcaagagtctatatctattttcacggagcgggcaaccaacagtgaatgtggagctgagagacagtaaaataataactgacatgccaccgaagtacaaagtaaaataaataaataaatacacattttggcctattagcaaagattaagaaatgataacattaaatactcaataaatcaccatgagatggggactcaaacttctggtaaaaatacaaatagatataatttttcttgaaggcaatttagtagtctgtttatcctataattctacttgtaagatcctatcatatgaaaataaccagagatacaaagacattctgcaaagatatgttttatattgttatttattgtgacaaaaggaaataaaaagcctaaatgttcagaaaattattttaaaagatgaaagagggaaataggccatggacggtggctcacgcctgtaatcccagcactttaggaggccaaggtaggtggatcacttgaggttgggatttcgagaccagcctggccaacatggtgaaaccctgcctctactaaaaatacaaaaaatgagccgggtgcaatggcaggcgcctataatgccagctactcgggaggctgaggcaggagaatcgcttgaacccgggaggcggaggttgcatgagccgagatggcgccactgctctccagcctggacgacagagcaagactccgtctct

SEQ ID NO: 2040 - DNA, 3646 bp, Homo sapiens
taggctgtctgactaggggtacaggatctgtgtagtaaacacttggaagactcagtgttcttatcaaggtcagctaatcctgaactttgacccttcccttaggcattgctggatgtcagtaactaagcatgaatttagggtcgtagctgcttttgacccaggttggaggattgccaggggccacctgggaagggctgtggttctcacctgtgctctgagctcctcttgcagagttccaggctggaccctgcccagccatcccccttaccctctgccttcttggtacacagacccccaaatgacaatgcaagtcagagaatggtgtaaaagccgtggagtggagtcaggagctgagttcctgtccccatgggttcttcaagaaaacaggtcattggcctggatgatacctgaggggtctctggccctgactttttctagttgaaagaagagaatgccctcaactgtccagggctctgtgttttccaccagactcattcatccatcaaagaccctccagcccatcttcacagacccctcttttctccttctttcctcctcacttctcctcctcccttttgtttatctgtcctatcctttcctcacttcctgagcagagatttctgtaaaaataaatgcacatggccctggcttgtacagctcacagattagcaggctgggacggccaggaccccagggaccctggtgggaagtatacaaggctggatgggccctggatggacgagggcagggaaagccggccagaagtttcctgaggtgctgacagtgatgagaagcccacagggcagctgcattgctttggccttctccggacccacagccctctctcaggctcccatcagcccaagttagcagctacctctgagctcacccacgggaatcccaccccctcccagagtgacaaattttaagctaagaagagggaaaggacttgggtggagaaaaccaagtgtccagtctgacttgtcacagccaaagcacagcgctgcaggacatggctattccccccgacacagcctctgacccctccacaaggcatgaattgaggtcgggggaggcaggcaagcaggccagaccataggcagctgatgcagggactggagaggcaagaagccgatgctgagctagaagccttctgtggaacaggctggaccccagatggcctgggatgcgggggcctgggttgagcggcgggggccacaggctgctgctgtactgcccattggacacacggttcagggtgcctcaaaagccactaaacacacgcctcaaccttctggttgtctgtggcttaccacttgcctggaaacattcactctaggtcacatgatcttcctcccaacccaccctcttcctcctccttctgggaggtgccaacagagagccccctgggagcctgggctgctggtggaagcctggctggaggggagagtctccctagagtggactgacgcgctgccacctctgcaaagcctcacagcggccgccccttcacagatgcagaactgaggcccagagagccggggactaggaggtatcaagtccaaggtccagccaagatgtcctgcctgcaggctgcctcccagctgcaggcctgcaaggtggggtgctgggggtgtggagggcgaaggtggcacgggtgcaccagcagcccttctgggccaaaatacacctgacctgcctgtacagcaccccaagtccccttgcttaacctgggtcccccttttctctgaaaaatatgagacttgtttggtccttccttcgtttatcctttctttttttcatttatcaaatgcatgttaagctctcgctagtgccacaccctgtgcaagagatggtgaggatgataaaatgatgatatgctatcatgtcatcaaggagcttaagtctaataatactaatactaataataacttactgaatgtttattacatgcccgggattgtgctgcatgtactacctcatttaaatttcaaaacaatcctatgagatggaggaactattcttatccgcatttggcagagaaggaaactggagctctgagaggggatgtgacttgccagggctgcaaagcaggcaggcaggatgagggttctcatcaggcgtctggctcagagcctcttggggagacagacgcacagcacagccctgaggcctcttgccctagcacgttatgcttaatgtatgtcaaaatcaccctctttatcttacagatgagcaaactgaggcctacgcaaagtcacggctagtttgcagttgtgtcagaccccagcgctgtggttctgatgccagcttttacctctggccttcagtttcctcttgcttgcctgaacctaggcagtttccttagatgatccccaagttctgaaattctgattgtatgatgttagcctaagacatgttagggagacagaacagagaggcaggaatggctcagctgaaactagacctggagccctgccacatccacaagcaccccggggaacaatccttgcccagtagggagttaagaatgttgaaatgcggccagatgcatggcttatgcctgtaatcccaacacttgggagaccaaggctggtggattgcttgaggccaggaactcaagaccagcctggccaacatgatgaaaccctgtctctactaaaaacacaaaaattacccaggcgtggtggcatgcacctgtaatcccagctacttgggaggctgaggcaggagaattgcttgaacccaggaggcagaggttgtagtgagccaagatagtgccactgcactccagcctgggcgacacagagagactcagtctcaaaaaaaagaaagtggaaatgttttcttgcttcaaggcacgtgacttttaactcaattgaagaaaagtatgcgtgtattgatagagatggccatcagaggaactgacaggtcttagcagttacagatgagtttcctctagaggtcagggaagagggagaagatacaaagttctttaacttacagtctgaggcaaaggtgaacttaacagggccagcaagatccttacatggtgaggtaagagggcccaaatcagccaagctgccacttctgcagagcccgtgcccttctccacctgtgtcggtggaggctatcagcctcagccccttgtctgagttatcatagcctcgctagcatctgtctcagccccaacccttccaaaagccagggtgacccattcagctactcctttgcgaggaagtgacagcagcctggctgggttgtgggtgggggagtggttgggggtctctgttgccctggaaggaattcctacagtaagcctgagagctcctggccaagtgtggctacagaaaggaacaaaatttggggggctgagggcaagagagggagaggattagggatgctgctcagtttctcttgataaatggatcctgctgcctgaaggatggggagctcccagagttgggtggagccatgaatgggccacccaggacgtgggagtgagtagtaagaaaagggggaaggaggtcaggtgcggtggctcacgcctgtaatcccaacactttgggaggccgaggtgggcgggtcacttgaggtcaggagttcgaaaccagtgtggccaatatgctgaaaccctgtctctatt

SEQ ID NO: 2041 - DNA, 3679 bp, Homo sapiens
attgctgtgtcaagttccagagaaaagcttctgttcgtccaagttactaaccaggctaaaccacatagacgtgaaggaaggggctagaaggaagggagtgccccactgttgatggggtaagaggatcctgtactgagaagttgaccagagagggtctcaccatgcgcacagttccttctgtacctgtgtggaggaaaagtactgagtgaagggcagaaaaagagaaaacagaaatgctctgcccttggagaactgctaacctagggctactgttgattttgactatcttcttagtggccgcttcaagcagtttatgtatggatgaaaaacagattacacagaactactcgaaagtactcgcagaagttaacacttcatggcctgtaaagatggctacaaatgctgtgctttgttgccctcctatcgcattaagaaatttgatcataataacatgggaaataatcctgagaggccagccttcctgcacaaaagcctacaggaaagaaacaaatgagaccaaggaaaccaactgtactgatgagagaataacctgggtctccagacctgatcagaattcggaccttcagattcgtccagtggccatcactcatgacgggtattacagatgcataatggtaacacctgatgggaatttccatcgtggatatcacctccaagtgttagttacacctgaagtgaccctgtttcaaaacaggaatagaactgcagtatgcaaggcagttgcagggaagccagctgcgcagatctcctggatcccagagggcgattgtgccactaagcaagaatactggagcaatggcacagtgactgttaagagtacatgccactgggaggtccacaatgtgtctaccgtgacctgccacgtctcccatttgactggcaacaagagtctgtacatagagctacttcctgttccaggtgccaaaaaatcagcaaaattatatattccatatatcatccttactattattattttgaccatcgtgggattcatttggttgttgaaagtcaatggctgcagaaaatataaattgaataaaacagaatctactccagttgttgaggaggatgaaatgcagccctatgccagctacacagagaagaacaatcctctctatgatactacaaacaaggtgaaggcatctcaggcattacaaagtgaagttgacacagacctccatactttataagttgttggactctagtaccaagaaacaacaacaaacgagatacattataattactgtctgattttcttacagttctagaatgaagacttatattgaaattaggttttccaaggttcttagaagacattttaatggattctcattcatacccttgtataattggaatttttgattcttagctgctaccagctagttctctgaagaactgatgttattacaaagaaaatacatgcccatgaccaaatattcaaattgtgcaggacagtaaataatgaaaaccaaatttcctcaagaaataactgaagaaggagcaagtgtgaacagtttcttgtgtatcctttcagaatattttaatgtacatatgacatgtgtatatgcctatggtatatgtgtcaatttatgtgtccccttacatatacatgcacatatctttgtcaaggcaccagtgggaacaatacactgcattactgttctatacatatgaaaacctaataatataagtcttagagatcattttatatcatgacaagtagagctacctcattctttttaatggttatataaaattccattgtatagttatatcattatttaattaaaaacaaccctaatgatggatatttagattcttttaagttttgtttatttcttttaagttttgtttgtggtataaacaataccacatagaatgtttcttgtgcatatatctctttgtttttgagtatatctgtaggataactttcttgagtggaattgtcaggtcaaagggtttgtgcattttactattgatatatatgttaaattgtgtcaaatatatatgtcaaattccctccaacattgtttaaatgtgcctttccctaaatttctattttaataactgtactattcctgcttctacagttgccactttctctttttaatcaaccagattaaatatgatgtgagattataataagaattatactatttaataaaaatggatttatatttttggtcatgtttgtaagagagtgaatgcacgtgtgagaacattagcttcttctgaactcattatatctccacagaggtgttgatacttgatgcctaacagttttgcagatgtgctacattggaattgtgtatttttatggtgtacattctattgtgatatatttattgaataattaatgtctattgaccatataagtggcgaaaaatgcaccatagaggacatggggtatttatttacaaactatgagctacataataagcaagtggccatgggatggcatgaccctcccctccatatttttgtggagcaaaatattggcaatgtttatgtaaatcattgttaatatcatgaaattatttttaattaaaaacataagtctatttgctccatagcagaaaaaacatgagaagttttttcatcatgatagaaattgaaacaaactatattcattcttcaatcataccatctgagatttttaagacagctcttttgtcttataagtatatttttctccctctagacatttcagttactatggattttgtcctcaaagggacttttagtctattttggatgtaaagctaatctaatgacacttggcacatgatattttgatcaagccattttgacttgaccaaaaagcagtgtccattaggtttctgcatataaatattaccaagcaatgttcacaatagacatcattacactgtccttgaaatttattaattcttcatccaaccctggttgagctgaggctcatagttaggttcaagactatctgtttaaatattactgaaaaacaaagtaagacagtactatgcttacctcttaacttgataatgtcaaaacaggcatgttaaatgacatcatagaaaagacttcaagataatttatagaagttaaattatattgtacagaaaataattgtatgaaaatctctactatggggctggaacatggttgaacattagaatgatataaaaaattatatatattctccaaatccacgctagacctgtcaaattagagaatctagagattagacctggcgtgtcagcaaggtcatccaggaagcagaggctgagacggagttaggtgtgattacttacatagtcgattacattttacaaataacattttatatgtctcatttactgtgctttctccccatcccattttgtatcttttcctttgctttgctagatttgtcaattttctctctctttctctgtctctctctctttcaatatctctaataatttgaaagtaattcatcataactaaatatctattggggttatgcttcacttacaaacttctgaaaacggctttactgagatataattgatatatttaagtgtacagtttgttaaattttgcacatatttaaaatgtggactttggtaaatgttgacatagttttacatctgtgaaaccatcagcataatcaagataataaacttgtccatcacccccc

SEQ ID NO: 2042 - DNA, 3641 bp, Homo sapiens
gtatgcacagtacccaggacaaatctctccacttggaaggagatcccaatccttctgcagccccaacatccacctgcgcacctaggaaaatgcccaaaaggatttcaatatccaaacaactggcttcagtgaaagctctgaggaagtgctcagatctggaaaaagctattgccaccactgctctgattttcagaaattcttctgactctgatggtaaacttgaaaaagctattgccaaagatctgctgcaaacccaatttaggaatttcgcagagccctgtgaagattcaaggagaagttggccatctgcaaagctggaagagtctacccttagtagacactggatctgaagggcaccttggtcttggacttcccagcctccaaaactgtgagatgctgtttgagccattcatctatggtgggctgttatagtagcccaaattgactatgataaggactaaggtacaaaatgagagttggtggagatcctgagaaagtatcaggcctattcagagatgaggaaagcttattccaggtgaaggtagggagtggcacaggtgagaggaatcttgggtgggtgggtgtttatggtaggtctcgactaacgaatgtattcgtataatgaataaggaattgtggaagtaggaggagatgttgtatttattctgtttatttctacagatctctttactcttttctaccctgccttgtttccagaaaggctgacctgcatggactgcatcaacaggcaatcttgtctttggcttctcattgcattaggccaatgaccttgtagatgattagtggtggaggaacatgaacatataatggctagatggacaaaggaaagatgaatgaataaaatcagtggcctctgaatgttactattaggtggcttgaccttgactttctagtacatatttgggtagaatcatttgttcatcctctgtgatacttctccgggttttgtttgtttgtttgtttgttttgagatggattctcgctttgtcgcccaggctggagtgcagtggcaccatcttggctcattgcaacctacacctctcgggtccaagcaattctcctgcctcaacctcccaagtagtggggaccataggtgcacaccaccacacccagcttaatttttgtatctttagtggagatggggtttcaccacattggccaggctgatcttgaactctttacctcaggtgatcaacctgccttggcctcacaaagtgctgggattacaggtgtgagccactacacccagcctctcagattcttatgtagttctatggctaagttttagaagtcccatttcagggggtaattaatagagtcatatttcttccaacaaagttgtaatctctgagctgtttgtgctcttggcacaaaagaggatgcagacaggaggatatagttgaaaaaagaaattatgagaagcattttgcaaagtaaaattaggaggagggaatgatgaagctaaaataaatgtttcctgttgaagtctgctttgtattacaaatcatgaaggggcttgattggatagcctgctggtgacaaatagcctgcaattcatttctcttactgacatttggccaaaatgctgcaagatacacataaatgttacttgacagtgcctttcagcattttgagggaggataaggcagggctctgctcaaagaaatacctgagtttttggaaccaattctactgcacattaccgttaaccctatatgctcctttaccaatcaagggacctacaagatacaagtaacacattcaaacatgctaattgaggagacataacaagagaaccatctacaaagtgctgacagggtttgagagaaccagcaaggtatgatgaagcaccctggacctagtatgaaagcaacacagaagaaaccagaggtgagagaggcagaaagaggggttcatgttgacgctgtacaagcacctggctccagtcttgttggagtgcagcaattcatgaagctagattctccctctacctctcaattatgtaagccagtttgtcatcttttttggcttgagctagttgaagctagtttttatcacttgcaatactgctcatctaggctcccttttccctgagtccatccctacagtgctatcaatcactttgtacagtgccatttattttttgcgggggatgggaatcagactcccccactagactcagagttttcacttttcctctttacctggggcctggtgcaagtttgtaagtgtttaacaaatacggaaagcaagcaatacaagagtcaaggttccaagacaaggtagttcagtattcctagtttcttaataaggtaataaggaagatgatgttgattatgatgaccaccaccactaggtggtagttgtggtaatgataatggtaatgatgacatttaccatttattgaggattgcacctttaagggctttacaaacattttctcattacatcatcagaaccaccacctcaagtagctgtgttagaccatgcttctcatcaggaagcagaggctcagagatttcaggcaactcatccaaagtcacacagctagaagtggcagtcacagaatattcactccaaagtccatgctcttatccatcatgtgaatagcccccaagcctttctttctacttcttcattttcctgaataaaactccctatcctgacatgccattcttgactctgcctttgcttgaactctatcagagcaaggaaatagaactaagcattttcctgtctcacctccttatgccaggcctggcccctgatataccatgtggcttcatgtcaggctgagcacagaagcatcttcacagaatcactttggggcctgagaaatatggtggcacctgaatcatagagttcatacccaaaagtttagaaggaacaaagcctgattcctacttcagaacgtccaagttaattccccaaaatatccaatgcttccttagggcccagaagcaacctaaagcatcatcgaagcatacagctttgaagtcaaatccacctgggtcttaattctgactctttcacaatctgggtgactttcggcaaattgcatcaactggggaatgcctacctcagaaaaatgatgagagaatggagagaattagcactgaccgtagtaaactaatggtatcttgcatatagcaattattccagcagtagtagctatatttattattatcgaaatctcttgtttttcagatgactgaaagccaaaaaagcttccagaggagttacagggaaatgggggaaagataaagaatcccgttactccacacctctactacctattgttccccatacacacatgtatatgtctccatcttttaacaggcatgcatccttctccaggaagtctttggaccctccttcccccagtggtgttaagagttgcctgatttacgtaataaaaatatggaacacccagtgaaattcaaatttaactgggcattttatccacagtcctagttatacgctcctctgcagtgtgtcacaactctcctgtgcagtgtttttctttctgtattataattggcctatgtcaggagctgacacctgtcacatctgagttaacgtgtaactttaagatcctctgatattaaagaattaatgtt

SEQ ID NO: 2043 - DNA, 4069 bp, Homo sapiens
aaaaaggcaagcggctctcacaccctaaggtattacccagcaaaaggcagcctcaggaggcagcccactgaagaccttcaagtccacgaagacaatgtatggattgttcactaaaactgaggaatgattttcaaataatctgtcgccagagggccaatccaggcttcaggctccagtgtgtatggaggagctgccactgcagagacgctggcttagggggctgggggatgcctcctttgaattctgggcccaccactgacaacacttctcttcttggagaaaagatgacgagaaggagaggtcttagaacacatccttatctgaaggacaggatacagtcttgttttaggaaactccagctgctctgtgtcattgaaagggaagaggagagaccagatggtccaagttcgccatggcactgttggtcccctgccaaacccagaggctataaataggatggcagagacagtaacccatcagcacacatgaaaggagaacctgtctccatcaagtcattttttttctatattccctgcaacaatatttcgagttcagaaacctgtcaaagagattagttggaaaaatcccttgcctcagaagaaagggaaatctccagaaacatccagcatcataattcatgcagcctggtgaaaaatgcggatacagaattggaggaaatagcagcatgggcaccaccctgagaatgagcctaggggaaccagagagaaagcctttaccacaccaagccactctgttctcacggttctcaggatattttcttaagttgccacgtccttgcccctgtaactttggagacttgccctttgatctggagagtggcctcctgaggaggacaggatccgcaggtcagaaagaaccaatggcatgcaaataatggcaccaggcatcatggtcacctgccaccacgccctcctgcaaccaggccggcactgaccttgctgtcgtaatcggatgtgttcacacacgtgtggatcacatacaacagtgagtctaccagcccctcgcaggaccgcatttgcttccgagcttcttcccccgcggagctgaggttcctaaaggggtggagacaggaggagctgctgagatgaaccatgcactcatcagccacgtggacttaaccttaaggatctgagagagcgaacaacaggtggcagccacttagaggtcggaggaggcactgggggcttgcatggtaacatcctgaagctcacaatgatggcccgctccccattatccacacatggaagggaacctgcacatttggactgtatctctctcatgacgtgtcactttctaattccctcatataattctttaggggcctattctcctgaggttcttcatatgtaaaagggggaaaataacagtaactacctcacagggttgctgtgaagaagaaacgagttgctacatagaaagcaattagaaaagtgcctccctcccagaaggtggcctgctgtcagtcatggtggtggctactactagacatgcttcacctcccttgttaggccagaagcttcttgcagtcccctgggcctattataatattttgcgtgcagtaagtaggtggtcattaaatgttttttggatgaacagaggaaacatataatttcttgtattataaacatttcaagttaaatatagatatttgcttatgctaaaacttttctgatcttttcaattataaaccacccagaaaacggttttgtgtctaaatttttttatatcaatttgccttcataaattgataccaaataaggatctattttatgtcccattaacaatggttctaggctaactgtaaaattatgcaaattgagaatttgcaaaactgtgactagatgagggggcggtggaatggcggctctcatctgccctgcctctccgcagcactttccttttctccacagcttctgggaccccacctggcttctctctcaccttgctacttctcagactcatctgcccatgggcacctccaggagtgccccaggtcctgtcttgtcttcatctttgcactctccaaggtgccttctgctccttgtctttaatacaacctatggacacagggccataggttggcacacatctgcctttagccctgactgctctctagaattgcggattcttttctccaatgctttcttgacactggcacatagacagctaattagacttctcaaactggacattgtcaaaactctgagctgctcacccttccaagcattcctgtcccttccccccatcaacagcacttctgtgcttgcagctgatccagccaaagatctaggtgtatccttatttcccccctttcctcgctcttaatattcgatctattagcaagccttgtcagctcttcctccacaaaataacccaaatctgcctacctcaccccagcacctggtttaggccactctcactgtttgcctggatctctgcaacagtctgatgttcctgtctctacttctgcctgtactcactcctccacactgcagccagaaatgaggcccactactccactgcttagaacactctgatggtttcccatggcacttggaataaaatgcaaaccccatctgacttacaaaatcctatataatctggtaccactctgccctttgctcagtaggctacggctgcaagctcatttctgctccagaacctttaccttaaccatttccttgactggcctatgactcctgtcttccccaacaccaccctctagtgagtcactccttgtggtatttcagatgtaggcttaaatttaaactccttgagagaccccctgaccaccaaagtaaccattcaataaccctcacatcaccctatttgtttttatggcacctactgttattttcttgtttccttgtttgtctgtcttcctggtagaacgtggttccatcagagcagggatctagtctgttttattcgtcactggtttcacacagagggcattcaccaaatgtttctatccctgacccactgggggagctacagtgagtcctgccccaggctctccctgaagcctagctggctggctgaggagtaatcctagctccctggatgattgctaggccatgagacccaccctgagatgtgggcatctgaattaggaggagctggcctgcattctgggatcctgactcttgttacctccccaccaacactgccccctgaccagggccgatagccacctgtcgcaatgctagaaggctgcagaccagccacacaagctttgctctctttcaggctgcctgtcttggtgatgctagatgttaaacagcactcactgagtgctcatgcgatgacactgtgctaagcaccttccacaagtacctgctgacccctcacagctctgaggtggtattatcatccctattctacagatgaggaaacggaggctcaaacgggtcctggaagccaggtggtctgagaccagagcccactctctctgtccctgtgccactctgccctaaggcttgcttccagttcccagggtactgtaaggctgggaaatagggtcaaaatggagctgatgagtgttaagggcaaataatgaactctactgtgcacactcgaaagaggctttatatatagattttaactgtaaaagataatgactaaaaaagtatttgggctcattttcacttatttatacaacttgaaactgattgtttaaatcacacacctctttaaaagcaaaatggttttaaccatcacattttgaatttaaacaaacagcaggctgcaaacacattagcaatcagaatgcgattaccagaaaaatgctgttaaagtggaaaacactggaattttggcagtaatcttagactgaaagggcctttctgagtaagtcacagaagagtcatttacaagataacttctttaaggccacaagtctgtgctcacgatgtttttctcccagaataacaaagtccagtggcctaaattttgaaataaaaactggaaacttagatagatgttaataaagtaagtcctcctagaatcaatttacctatgacacatatttaatcacagaattaactgg

SEQ ID NO: 2044 - DNA, 1537 bp, Homo sapiens
atgctttctgagagtcatggatctcatgtgcaagaaaatgaagcacctgtggttcttcctcctgctggtggcggctcccggatgggtcctgtcccagttgcagctgcaggagtcgggcccgggcctggtgaagccttcggagaccttgtccctcacctgcagtgtctctggtgcctccatgaccactagtgaatactactgggcctggatacgccaggcccccgggaagggactggaatggattggaaatatcttttatactggcagaactttctacaacccgtccctcaagagtcgactctccctgtccatagacacggcgacgagccagttctccctgagcctgcgctctgtgaccgccgcagacacggctatttacttctgtgcgagacatcttaatactgtcacgatttataggcaaccctttgaccactggggccagggagccttggtcaccgtctcctcagcatccccgaccagccccaaggtcttcccgctgagcctcgacagcaccccccaagatgggaacgtggtcgtcgcatgcctggtccagggcttcttcccccaggagccactcagtgtgacctggagcgaaagcggacagaacgtgaccgccagaaacttcccacctagccaggatgcctccggggacctgtacaccacgagcagccagctgaccctgccggccacacagtgcccagacggcaagtccgtgacatgccacgtgaagcactacacgaatcccagccaggatgtgactgtgccctgcccagttcccccacctcccccatgctgccacccccgactgtcgctgcaccgaccggccctcgaggacctgctcttaggttcagaagcgaacctcacgtgcacactgaccggcctgagagatgcctctggtgccaccttcacctggacgccctcaagtgggaagagcgctgttcaaggaccacctgagcgtgacctctgtggctgctacagcgtgtccagtgtcctgcctggctgtgcccagccatggaaccatggggagaccttcacctgcactgctgcccaccccgagttgaagaccccactaaccgccaacatcacaaaatccggaaacacattccggcccgaggtccacctgctgccgccgccgtcggaggagctggccctgaacgagctggtgacgctgacgtgcctggcacgtggcttcagccccaaggatgtgctggttcgctggctgcaggggtcacaggagctgccccgcgagaagtacctgacttgggcatcccggcaggagcccagccagggcaccaccaccttcgctgtgaccagcatactgcgcgtggcagccgaggactggaagaagggggacaccttctcctgcatggtgggccacgaggccctgccgctggccttcacacagaagaccatcgaccgcttggcgggtaaacccacccatgtcaatgtgtctgttgtcatggcggaggtggacggcacctgctactgagccgcccgcctgtccccacccctgaataaactccatgctcccccaagc

SEQ ID NO: 2045 - DNA, 4845 bp, Homo sapiens
acacaagtaggagcaataacacaaaacccagtagagaaatatacagaagctatcttaaatgaagtgctagtagtcccgaacatcagtgcaagcaacccacaaacttcaaattcagcaccagcactagatgctgcagaaacgggccatacaaatcaggtacaacctgaggacatgctagaaactggatatgtcattacggaccaaactcgggatgaaatgagcattgaaagtttcttaggtagatcaagctgcattgctgagattcataccgatttggaccatactggatacaatgaacctaggaaaaaccactcagaatggaagatcacacttaaagaaatggcccagattaggagaaaatgtgaaatgtttacatatcttagatttgattcagaaataactatagtggtatcagtggctagtaaacaaggagataatgggcatgtggtgatacaatacatgtatgtaccaccgggtgctccaatacccaaaaccagagatgattatacctggcaatctggaactaatgcttcagtcttttggcaacaaggtcaaccatatcctagattcacaatccccttcatgagcattgcatcagcatattatatgttctacgatgggtacgaagatgataatggtaccacctatggggctgctgttactaatgacatgggaacgctttgtgtgcgcatagtgactgagcaacagaagaatgaggttaagataaccagtagagtctatcacaaggctaaacacatcagtgcatggtgtccaagaccaccaagggcggttgcatatcaacacacatatagcccaaattttgtgccaccaacaggagcagtccaaactcacattaaattcagacccaatgttaaagatgtgacatcagtaatgacagcaggtccatcagacttgtatgtacactctagtaatttcatttacagaaacttgcacctgtgtgaaccagaaaacttaaatgattcagtcctaattagttactccagtgatcttgtcatttaccgcacaaatactacaggtgatgacataatcccaacatgtgattgtactctaggtacttactattgcaaacataaggacagatattatcccatcagtgtgacaaaacaccagtggtatgaaatacaagaatcagattattaccctaagcatattcagtacaacatattattgggtgtagggccctgcaaaccaggtgattgtgggggcaagctcctctgcaaacatggtgtaattggtataataactgctggaggtgataaccatgtagcctttatagatcttagagatttccaagttgctgaggaacaaggaataccagaatatattcactcccttggtgaagcttttggctctggatttgtagataacattaaggatcagattcaaactattaatccaattaataaaatatctagtaaaatagttaaatgggtaataagaattatctcagccattaccataataattagaaacaatgctgatccacatacaataatagccacactagctttgttgggttgctcaggttcaccatggagatttatcaaggagaaggtttgtggatggttgcaacttaattacatacataaggaatctgatgggtggataaagaaattcacagagatgtgtaatgctgctagaggtcttgagtggttaggtaataaaatatccaaattcattgattggctcaaatctatgttacctcaagccagattaaaagtggattttatcaaaaaccttaaacaattaccattactagaaaaacaagtagatggattaagacttgcaacacagaaacaacagcaggagtatattgacacccttactctaatgctagattcatcaaataaattcttacccctctatgcgcttgaaaataagcgaatcaaggaattactcaaaagaggccagatgatccttcgcacatctaaaagaactgaaccagttggtgttattttccatggtgaaccaggaacgggaaagtcaattacaacatctatccttgctcgaatgctcacctcagaatcagacatctactcactacctccatcacctaaatattttgatgggtatgaccaacagagtgtagtcatcatggatgatataatgcaaaatcccagtggagaagacatgtctttattctgtcaaatggtgtcatcagtaccattcataccacctatggcagatttaccagacaaagggaaaccattctcatcagactatgtacttgctagcactaatcacactctactccaccctccaacaattacatgcacaacagcaatgaataggagatttttcttagatttagacatcattgttaaagatgattataaattaggtcagggtaaattaaatttgcagtgtgcactcaagccatgtaaggaagggaaaattggcaatgcaaaatgttgccctcttatttgtggaaaagccttacaatttagagatagaagtaatggggaacacttgtcccttgctacaatatataataggattacacaggaaagcaagaacagaaaggaattgacaaactcgctgcaggcaattttccagggaccaattgatattgtaaacaagccaccaccaccagctatagtagatttacttaaatcagttagaagtccagatgtaattagatattgtgaagagaacaaatggataattccagcagattgtagacttgaaagggatctcaattatgctaatgtaataatatctatgattgccaatgtaattagtataatgggtgtgatctacattatatacaaattgttttgttctttgcaaggaccatattcaggagaaccaaaaccagtaacaagaaaaccagaaagaagagtggtcacgcaaggacctcaagaggaatttgggcgaagccttatgaaacataacacatgtgtggtcacaactaacaatggaaaattcactggtttgggtatctatgataatgtaatgataataccaacacacgctgatgcaggtcaggaggtggaagtggatggtattaagaccaaggtcagtgatgcgtatgatctatacaatacacaaggtgttaaattagaaatcacagtacttaaactaaacagaaatgaaaaattcagggacattaggaaatacattccagagagtgaagatgactattcagaatgctgtttggcactagttgcaaaccaggtagagcctacaattttagaagttggtgattgttgttcatatggaaacatcttattaagtggtaatcaaactgctaggatgatcaagtacaattaccccactaaatcgggcttttgtggtggagtcttatataagataggattgatcttgggtatacatgtaggaggtaatggaagagatggtttttccgcaatgttattaagatcttactttaatgaacaacaagggaaaatcgtatcaaaagctgatgtgaaagaacataacctatatagcatacacactcctacgaagacaaaattacaacctagtgtcttccatgatgtgttcccaggcagtaaagagcctgctgtattatccacaagagatccaaggttagaagtagatttagatagttctattttctcaaaatataagggtaatgaggcagttaaaatttcagaaaatatgctggttgctgctgcgcattacacagcccaattaacaacactggatattgatccacaaccaattagcctagaggatagtgtgtatggaattgagggtttggaggcattggacctccacactagtgctggatatccatacacagctcatggaattaagaagaaagatcttataccaaaagacaaaaatttaacaaaacttaaaattgctatggagaaatatgggttagatttaccaatgataacatttcttaaagatgaacttagaaaaccagagaaaatcagtacagggaaaactagaataatagaagctagtagtttaaatgacacagttcagtttagaatggcatttggtaatcttttttctaaattccacaaaaacccaggtattgtcaccggatcagcagtaggatgtgatccagaggtgttttggtcaaaaattccagttatgctggatggagattgccttatggcatttgattattctaactatgatggcagcctgaatccagtgtggtttgagcttctcgagagagttttaaatgatctcggttttcctggaaaattagttaataaattgtgccactctaagcatatttacaaaacaacatactatgaagtagagggtggaatgccatcaggttgtgctggaaccagtatatttaattcaatgattaataatattataatcagaacactagttttagatacttataaatacattaatctagataagcttaaaatacttgcatatggtgatgatgtattgttctcttacccttatgatttggacatggcagaattagctaaagaaggaaacaaatatggtctgacaatcacacctgcagataaatcagacaaatttgaaaaattaaattatgaaaatgcaacctttctcaaacggggcttcaaacaagatgacagatataaattcttaatacatccaatctatccagaaagtgaagtttgggaatccattagatggacgaagagtcccagaaatatgcaggaacatgttctttccctgtgtcacctcatgtggcacaatggtaaagacaaatatgattcattcgtgaacaagattaggagtgttagtgctggtcgcgcactctatattccaccatatgaactcttgttacacgaatggtatgaaaaattttaaacggatatagaaagtataaatgaagtagtttatagtttttat

SEQ ID NO: 2046 - DNA, 3764 bp, Homo sapiens
agagtcagcaggagtgagttcaggaatcctcgggacaaggcactttcctgagcactggaccagcgacctcttggcttccagggaggacacacagccatcatggaacccaaacctcagaagagtccaggtacccgaggggtataatcgcagaagcagaaatctttttattgaaaatgccccacagtttccttcaagctaaccaggatacagaacttggtggtttttgtaaattccagtgtagaagttggcataagtagccaggaaaagatgcaatctgtgcagaagatgtttaaatgccaccctgatgaggtcatgtccatcagaaccactaacagggaatacttcctcattggccacgacagggagaagattaaagactgggtctccttcatgtcatcattccgccaggatataaaagcaacacagcagaacacagaggaggaactctcattgggtaataaaagaaccctcttctactccagccctctccttggcccttccagcacatcagaggctgttggctccagctcaccaagaaatggtctccaagacaagcatttaatggaacaaagttctccaggatttaggcaaactcacctacaagatttatcagaagccactcaagatgtgaaggaagagaatcattatcttactcctcgaagtgttcttttagagttggataatatcattgcttccagtgattctggtgaatccattgaaactgatggtccagaccaggtctctggaagaattgagtgtcattatgagccaatggaatcctattttttcaaagagacatcccatgagtctgtggatagcagcaaagaggaaccccagacccttccagagacccaggatggggacctccacctgcaagaacaaggctcaggaattgattggtgtctttcccctgccgatgtggaagcacagaccacaaatgaccaaaagggtaatatccccgatgaaagccaagtggagaaactgaacgttttcctttctcctcctgatgtcatcaactatcttgctctcacagaagccacaggacggatatgtgtgtctcagtgggaaggccccccacgtttgggatgcatattttgccacggagatcatcttctggcagtgaatgacctgaaaccccagagcctggaggaggtctccctgtttcttacccggtccatccagaaggagaaattaaagcttaccatcggcaggatcccaaattcagagacattccatgccgcatcctgtatgtgtccctcaaaatgccaaagtgctgcaccttctcagctggataagcctagactgaacagagctcccaagaggagtccggccattaaaaagagccagcagaaaggagccagggagtaacgcaccccagacccatggcagcagaaccaggatggagctgggactgtccagctctgccccctgctgctgccatgtgataggagacagtcggcacccccctctgaatttctgtatctgcatcttaacaatggggatgactatcccctctctggttattgtatcagagatgttaagagggtcatgtggcatgattggagaacctgggggaattggaaggccttattatctcagctattgtcccaaacaccacagacacagattgggtcagtccttcatgtaatacatgctgtgttctgtgaggatgtggtccacacaattccttctttgttaagggacatacagttgcaaatactcactgcaagaaggcaagattcccaagagagatgtgatagctgatcaggcttcccagacacctccttcccaaacacctccttcccaacacctccttccccaacacctccttccccaacacctccttccccaacacttccttcccaacacctccttcccaaacccctccttccccaacatccttcccaacacctccttcccaaacacctccttcccaaacacctccttcccaaacacctccttcccaacacctccttccccaacacctccttcccaaacacctctttcccaaacacctccttcccagacacctccttcccaacaccgccttcccaacacctccttcccaaacccctttcccaaacacctccttccccaacacctccttcccaacacctgcttcccccttccccaacacctccttcccaaacatccccttcccaaacacctgcctctcttcaaccccacaggccagagtgctgagacagagtggccttttggattcaataagtatcttgttctcttaaagactcagcaacgattttagaagtcgcagcagttttacatcacatgcagccaagatcagcttgctctgcaagcaataacagaactacttagcacttcaaggttgaaagttcttcactaatggatccattgactaattgatcctggaaggccaaaggaataaaattcttttatataaataggaaaacaaaggcagagagctaaagcactaatcaaatcggggggtgttagagcaaaaacaggcttcagaaagagtattttaccacgcttcacatggaaaaaatcgagccccggagcgacgaaaggcatattttctttgtttctccaagtttcataaccgttcagttgcagaaccaagaatctaaaaccagctctgggaaacaaatgtccagatgccagcctcatagttgaacttggatttgaaaataccttcagcacttagaagagacattcaaatacatttcatttcctgttatccagattgttcggaaagtattaaaaatttttcatttacctgctgatacggtttggatctgtgtccctaacaaatcccatgtcgagctgtggtccccggtgttggagatggagcctggtgggaggcagctggatcgtgaggtcatgggggtggagttctcacgaaggagttagcatcatccccttggcgctattctcgtgagagtaagttctcgtgagatctggttgtttaaaagtgtgcagcacctctccgctcactctcttcctcctgctcctgccgtgtaagatgcctgctccatctgccgcaagtgaaagcttcctgaggtctccccggaagcagatgctgccacgcttcctgtacagcctgcagaactgtggaccaatcaaacctcttttcttataaattacctggtcttggggatttctttatttaatgtgagaacgcatgcccttttggatctactgtttctacttttataaatttatcctgcagaaatacacaaatacacaaagatacatgtaaaaaaagtagtttactgcagtactgtttgtaataataaaaaatcaggctggacgtggtggttcatgcctataattccaaccctttgggaggccgggacaggtggatcacctgaggtctgaagctcgagaacaacctgaccaacatggagaaaccctgtctctactaaaaatacaaaactagctgggcattgtggcacatgcctgcaatcccagctacttgagaggctggggcaggagaatcactagaaccgggaggcggaagttgcagtgagccaagatcatgccattgcactccagcctgggcaacaagagggaaacccagtctcaaaaaaacaaaaaaaaaaaatcatgtgggtattgcttaattctgatttcatatcattgaacactgtagatattaaaatgttcagcaggcacagttctgtaaaattgttcgtgatacattaagaatgaaagaatcaagttgtataataaggataacatcatcccacttttgtacaaataaatgtttggtgtttgtgtgt

SEQ ID NO: 2047 - DNA, 3828 bp, Homo sapiens
aaatagagacagacttctggcaaggtaggattatcagggagaataattaatgaaacctcccatgagttggtggaaggcctatcttctaagcatttcacatgctaagaaggcaggtacttgtattcatttttcaaagagggagaatgagattcagagaagtatagtaacttgcccaaagtcccacagctggcattcagacccaaacttgagcaagtccaaagcctgggttctcccgctacagcgtgggcaaccacagcctgcctttttacacaggctgcgccagaggtacatgctgtgtcccttgagagcactccttttacagacttatttcgtcaaaatggcacagccaggttgcctcggagataggaaaccccacaatggtaggacaaaagaaggtgccgtgggcctaagtaccagcatcaaaacaaacaggccaaccagaagtacaaggttaccttctacagcagaccttgaaataaaaagcttcagaagggcacttctgtccctttccattaggtataaaatttccagccctctgtcgtgttggggttatttggacagtctctcgttttcaggggtaccagtatataaaactccagaacgggcgcagtggctcacgcctataattccagcactttgggaggccaaggcgggcagatcacctgaggccgggagttcgagatcagcgtgaccaacatagagaaaccccatctctactaaaaatacaaaattagctgagcatggtggcacttgcctgtaatcccagctactcgggaggctgaggcaggagaatcgcttgaacctgggaggcagaggttgcagtgagccgagactgcaccattgcgctctagcctgggcaacaagagctaaactccatctcaaaaaacaaaacagacaaaaaacctccaataatacatttatgacacgttttctgaatatttgagaattatttcaaccactcaaaacattttaggccacgggcagtggctcacacctgtaatcccggcactttgagaggctgaagcaggaggatctcatgagtcggggagttcgagaccagcctgggcaacgcagcgagacctcctctctacagagatgaaaaaattatccaggtgtggtggcgtgagcctgtagtcccagttactcaggaggctgaggcaagaggatcccttgagcccaggagttcgaggctgcagtgagctaagatgatgccattgtactccagcctgggagagagtgaggccctatctgtataacaaaacaaaacagaaagacacacattttaatccttctgaactttttgagtagatgatctgcctggagaaataattctcaccaaattgttaaaaggttatgaaagggaatttaactcagttattcttaatcatgatactctttatttttagttccccatttgtattatgttgggattttgatgtaattatcacatcacttgcattgatctttatactctccatgtacttgaaaaagaaatagcaacatatttttaagggctggggcacccagcattcaaatgaaaatccaggatgaaggaagaacaaaagatcatttcattgtccttccaacaccagctcagagtgaaagctggttgagttaaattccttgtgaaatgcattaatgacagtagcagattttactgagcatttactacattcccagcactgtgctaaatgtgtcgcaagcatgctctcacttcattctacaaaatgaattctcattttccagatgaagaaactgaggcatgagacataaagttaggtagtatgtccaaagtcatgtggtctctatgctattgaaccagaatttgaatcctgctggtttcactctccttgccaaccactaccccaagcacatcccgcccctactgtgtctcgtacttgctcttctctctgcctgcagcacctctgtctggttttctccagccagctccttctcactgttcaggtcccaaccaaaaggcacttccttagggaggctttccctgaccatcctacccattgtgtccccagctccaccacacagcctctgtcatagcacccatcactgcacttgagcaccacaggagactatttactcacctgtcctttggctgcctcgcctgctataatatcagagccacaaaaacagggccttgtatctattattcaccactttatccccagggctcaacacagtgcctagtacatagtacatgctcagtaaagttgtgatgattgagggaaccctgcctccactgtatacagtgcagaacaccaagccagggccaggaaaacccctgacggtccctaggtctgagctgggagcaagaggaaagggaatgaacagtaaccctttgatgtattcagtaactgtctaatgagtcccttgtgctaagacttctaggggataccaaaaacatgtccctttctttctaagatttaaagagtatttgaggaggtgaaaccatcatggtaaacattgtcgtacccctcaaaacatgcccaaatgtcaaaatatggtatgcaattcagatgctaaactgataaaagagacagcacttgtattaatagcattgtcaaaatgcactggggataaaatacagaagaagagtccacacactgtttcacgagaaggagtgtatcatgatttgtagtaatcgaagaacatgtttatgggaacagggtgactcagctctcctggggaggatggatgaggagttagcaggaagagagggtaccaagtgaggggaaagcagcagggtgggtctggggcatggacaggaaacagaggctgggaaaagctacatcttttattcatgctttttcacaggagctgaagtgggaatcagtacatcgagaatccacgcccggggaccagtaggacttgagggactgcttactactaagtggctgctgcgagggaaggaccacgtggtctcagatttctcagagcatggaagtttaaaatatcttcatgagaacctccctattcctcagagaaacaccaactgaaaagagccaggaaaacccgggaattttccaaaaggtcttcacgttaaacttgtcttatctcaggagagagcccgctcctgtctcccagttcctggtagggtctgcctgttggaaagtgtacctggatgcttctgggctccgtttggcaatagcaatcttggctgatgtgcacagtctggctcccagctcaccctttttttttaaagtaagaaaatagttgctaccgatagggactttgccaagtccaattatcttctaggattgaaaggtgcattttccccataaaaaaggcgaggaaaacccatggctgctttgtgtcacctcagtgacttacagtcccccttggcatttagttggtactagagccagtcatccttaacaaatcttttcacattttatttctttcacatgcagtcatcttcaaaaaggaaagatttggaattttagaaaaggggcaactcttctttttagcattctcatcagaaagtcacaaaaatcgatggaatcatttccactgggaagattgaccttttgtatttatttgtggggtaaattaataagcattccagatgcttgcagcttcctgcatccaggagatgctgtgttccccgtgatgcagctggaacccaagctgcagcaggagatgcaagtttcaggatgttccccactgagctggaggaatatctacagcagtgatgtttgaaatttttgtatgaattattttgtcgtcctacccttttcctccaaaacaaaaattagaggattattttaatactttggattcttcccccttttttgagaaataaagttttttatg

SEQ ID NO: 2048 - DNA, 3894 bp, Homo sapiens
ctcatcctggctgctctcaccgtggcctgtccagatgcaggagctcctctctgaatctggggctactggcagaaccagtaaacacggagttactcctgtactgagctgagtaaaataatctgactgagaggatgcgctgacctcagtttcgacaactgcgtttggtaccaagccctgcaagggctccacggagcagctttgggggagacctgcctgcaggaacatgtaccccacggagcagctttgggggagacctgcctgcaggaacatgtaccccacggagcagctttgggggagacctgcctgcaggaacatgtaccccacggagcagctttgggggagacctgcctgcaggaacatgtaccccacggagcagctttgggggagacctgcctgcaggaacatgtacctcacggagcagctttgggggagacctgcctgcaggaacatgtaccccacggagcagctttgggggagacctgcctgcaggaacatgtaccccacccgacacgtcctgggagcctcgtctgaggtacaaacaacaggaaagcactgatgcatttttcaaaatccagcaggagggaacggtgggctgtggatgctggctgggaaagctcctcgggcacagccctgtgggcagggaggggaggagggctcagcccccacacaggccgcctggcaccaggagtcacaggcctcagccgtgggatgtccccagagttccaaccgccactcttgcagaagcagcccagcagggtgagggtggggccacatggggctcagctgcaggagggacgccaggtcctgcacttctcacccgcagtgaccttgggcagggcattcattccttgggagaaatttcctcgttggtgaaatgaaatcactgcttggcttcagccacataatgttaggcacgctaactgcagcctaggcaacctcagaccctcaggaaatcaacagaggggtgccagctccctgcacaggtcccggcctaactcgggatgccactcagggccctcgtcttcccatcctgtggctctgtcttcacaaggccccagaggtgctcttgtcccttccctttcagtccctcagccagtgggcagcacacggccacccaaacacaagaggccaggaccatggacagcagggagcacagagcccaggcctccgtgatcctaggaacacgcagcatccgggaacacggaaagtaaagatggagacatggggcgggaggaagctaagcagggacacagtacccccttgcatcacggaaatgcctggccagagcgacctgccgcaagaagccagcccagctgctcctgtccctgaaatgtccggagagagggctagcagggaggctggcgcctgggccaagagaggggctactcagttcttccagaacattccagtgtggcccatggacaccggccttctgatgtccagagaggggctactcagttcctccagaacattccagtgtggcccatggacgccggccttctggggtccattctgtcctgtgtcacttcagttgatgagctgcttgagaccagaactgcccaaatccagaaccgcccactaccttctgtgaggctgtggccagaaagcaagccagacttctgaagctgcctgggcctgtcgggacccaggagaatctggccgtgaaggagaataaaggaggaagccaggcctggcacagggacagggtggggacccagtgagatctccaaggaggaagccagggctcctacactggggctgctgttctcccggaggaactccacccaaggagagtctgggattatcatgagagacaggaccgcatctgtgcacagtgcagtacgtcaggtgctggccaggggccgggggcctcagggaggagagtcacccaccaggccaactaggacagacgaaacgtgagtgcccctacgggagaaagcaaagctgagacagcatcgcgagctgagggagaaactgacagacggcagttcaccaaaacccaaaaactggtcattctctggcttttaacaaaccaaagtatatttctccctctgaaataagaaacacaggacaattattaagttccaaaagtacgtttcattttggaggcatgttgttggtcccctttggaatcatgaacccctgtgagcgaaacacctcccaccattgattctgacagggtacggcgggcagttcccggcccaggtagaggcagacaggtgcagagccacagggccaccactgcagagtctggccttctctccagccccgggtgcacccacggttatcagggacccagcactgcctccctgcacgcacatggctctccaggccaccactgcagagtccggccttctctccagccccgggtgcacccacggtgatcagggacccggtgctgcctccctgcacccacccggctctccacagcagcaaacggggtacattagggtggacgggatgtggggccagggccctgctagggctggggtggactgcggagggccggcaccaagcagttccaggtgtggagggcggccctatgtcagctgttagacacgcaggggaggcacctcagatggctacaggtttgattgtgtccccacaaaaatccatatgttgaagtcctaacccccaacactgccgaagatgaccttatttggaaatagagtcatcaaagacatcattggctacattaagatagggttatactagagtagggggacacctagcttattatgactggtgtccttataaaaagaaggaaactggacacataaagggagaatgccataggaggacggaggcggagatcggggtgaagcttctctaagccacggagagcggcctagaaccgacccttccctcacagccctcagaggacagcctggaaccgacccttccctcacagccctcggaggacggcctggaatccactcttccctcacagccctcggagggcagcctggaaccgacccttccctcacagccctcggagggcggcctggaaccgacccttccctcacagccctcggagtgcgacctggaaccaacccttccctcacagctcttggagggaacccaccctgcccacaccttgacctcggacaggtggcctctagagacctgtgcagtgagttcctgctcccagcctgtggtccttccatgtggaagcaaagcaaactcctccaggcacattcaccgccattggcatgggcctccgacactgaccagggcctcccgtcacctctgcccctgcccaccactccccagcccaggtaccatgctgtaaaaacagcctcaaaaagaacatgaggtccacagctcctccaggagactgggccagccccaagcacatccagagaggtggctcctctgactggaggctcacgccaaagccacacagagacagctgccattctcgctcgctcatgcttcccccgagcctaaaccctgaccagccagctctatacatttacatctttttctggcctcacacactgtctagaatgtccagtcgaatgttgagaagtcgtggtcaaagcagaaagcccagctttatccccagtcttagtgggtacgtgtttgctgtttcacgttaagatactggctggcagtggggcacagtgactcacgcctgtaatcccagcactttgggaggccaaggtgggtggatcacaaggtcaaaggattgagaccgtcctggccaacatggtgaaaccccatctctactaaaaatacagaaattagctgcgtgtggtggcggacacctgtagtcccagctactcgggaggctgagaccggagaatcgcttgaacgtgggagcagaggttgcagtgagccgagatcgcaccattgcactccagcctgggtgacagaacgagactctatctc

SEQ ID NO: 2049 - DNA, 4331 bp, Homo sapiens
aagaattgatctacccacaatgtcaacaagtacccctttgaaaaacgctaccaactaaatgggctttggcaggccttcctgagaatctaaacacaatttttaatgtggttgctctggcagagactgctgtctcatcagcctatttttagactaccaaacaagtatgtttgaattataaatttaacctccacacccatttttctttttttaactttttattatggagacttttcttttttttttgagatggactcttactctgtcgcccaggctggagtgcagtggcaggatctcagctcactgcaacctccacctcccgggttcaaccaatcctccctgcctcagcctcctgagtagctgggattacaggtgcccaccatcacgcccggctgattttgtattttttagtagagatgaggtttcgccatttggccaggctggtcttgaactcctgacctcaggtgatccacccacctcgacctcccaaagtgttgggattgcaggcgtgagccaccatgcctggctgagactttcaaatttatataaaagggagaaattagccacccagcctcaacaggttttatcaattctgtttcattatctccatcaccaccaacacctcttcgtcttctaattgctggagtattttaatgtaaatctcatcctatcctttcaaccaaaatttctgcaatagtgactaatacatgcccttttttttgaaacatcattatacgtaacagttgacagcagctcttaagtgtcatctaatatcctatttcatgtacagatttatcagattgacccagaatgtctttttatagtttttttgctttgttttgttttacagtggtttgttcaaacatggattcagataaggtccacacattttagtctgtaatagtttcttctcaccctctctcacctttgttttccttctatgtcatttatttgttgaagaaactggatcatttttcctgttgtggaattccatattctgggtttggctgattatatgtttctctgtctctcttactttccatgaactggtggttagacataaagactttcagaactgattggtaagatatacatttatttccattggattggaagtcataatatctgattatcccctttttttttttttggtcatgttgagattgattatagtagttcagctgttgtaagtctattccacccataaagttcctcagcaaactttaacctaatggttttaatagtcattgatgatgtttaaatccatttcattaaatgctgcaaaatggtgatattctaattttttaaattctaacttctgcattcgttagctggagttttttctacaaagagggactttgccatatcagctatttgcttcaattgtaatatgtaatgaaaaggcaggattaggtgcttgtttactcatttgcagaataataacattccttgaaagtgaccagtggggttttagggtttttgttttgtttgctttcttttcattttgttttattatgagatcatggtttttgttgtggttgttgttattgttgttgttttgtattggttatattttagtccactcagtccactaatatcacttagtttttattacggaaaatttcaaacactctcaagtagacagagttgcaccatacagtgaaacctcttatgttcattctctaacgtcaacagtgatcttaacattcaaccaatcttatcttcatctatacctgtactccagccccactttcttctgcccttattttagtttgatgcatatccaatcagtgttcaaatttaaaatggtctaaaatattttaaaaatcagattgcttgaatcaaaattcagatctaccacttagtacagtttatattgtgatatgtccttgagtataatctatggacaccccctcaactcttgcaatttatttaagtaagttgaaacatttagtcactagagatttccacgtactagattttgctgatttcatttatttggtatagtttaatgtattttctgtaaattggtagagtcaaaaagaaatagagcgtgggcctagttggaaagacagatttcattcagtactattgcaataggggaaaatagaaccaagttccatttcagaatacaacaaagacacttggggatgaagcagagtgagagggtcaatggatggaaactttctaaaaggagacatcaaaggtagaaggtttctttctgacctgacttaggattcctgctaaaggcaggccaaggtgatcatagatccagagtgggagatagtttaggaggattcttactatatataactgagctaaacagactgatgacggggctcaaggacaaatactagttgattgctcagagcagcctgcttaaaagtatggtcaaggagagaatctttagtgtagaatggtgatcagatttaagtttgttgtcctttggttcttgttttctttctgaaaagcaagacctgcttcaaaggtggtggtgtgctctcttgcactaggaggtatattatgtcttgtattcaggctatttgcatttcagattacacagttttatgtaactgctttaactttgtgtttgtactgaatattagtttcttgatggcagagaacatatttcactttcagaatgtttttctgcttacatggatttattttcaagaaatttcatacaatactttatttagaagaaagcagaattttctgaaatcacagtatgcagaggcatttaccatcaactctgacaaacatccttctggtcccttttctatgcatgtattctgtggaattggatgcaaacacatattaaaaatatatacatttgcctaatggaaccacagcatacagagtattttatagtctgcttttccattcagtgatattccaggaaaatattttcttatcagtgtgtttagatacacatcctttcaataggtcatcatttaaatttctactgtctaacattattttaaaagtaagtttttctctaataatcagcaccacattaaacatactgtgtagctttcactttaaaattatttttatggacatttgatatcattagcttgacattattaataacagttaccttgactttttgatatcatctgtactgtcttggaaagtgaaaatatttgtcaaactgttaaatgataagaaagaataattatacactgccaagcagaatttccttcttttgctccctccccaccttctgctccaatcacataaataagagctgttttttctttgcagtatgcattgcctcaggaacaaaggtggctctgtttaatcgactacgatcccagacagttagtaccagatacttgcatgtagaaggaggtaattttcatgccagttcacagcagtggggagccttttttattcatctcttggatgatgatgaatcagaaggagaagaattcacagtccgagatggctacatccattatggacaaacagtcaaacttgtgtgctcagttactggcatggcactcccaagattgataattaggaaagttgataagcagaccgcattattggatgcagatgatcctgtgtcacaactccataaatgtgcattttaccttaaggatacagaaagaatgtatttgtgcctttctcaagaaagaataattcaatttcaggccactccatgtccaaaagaaccaaataaagagatgataaatgatggcgcttcctggacaatcattagcacagataagttgaatggcggtggggacgtagcaatgcttgaacttacaggacagaatttcactccaaatttacgagtgtggtttggggatgtagaagctgaaactatgtacaggtgtggagagagtatgctctgtgtcgtcccagacatttctgcattccgagaaggttggagatgggtccggcaaccagtccaggttccagtaactttggtccgaaatgatggaatcatttattccaccagccttacctttacctacacaccagaaccagggccgcggccacattgcagtgcagcaggagcaatccttcgagccaattcaagccaggtgccccctaacgaatcaaacacaaacagcgagggaagttacacaaacgccagcacaaattcaaccagtgtcacatcatctacagccacagtggtatcctaactaccgtctttttgctaggacttaaactgacttgagtgtggcaaaaagttaacaaaaaaggagaaaaaatgaacaatcgtttgtggtttcttgggaaaacttttcataccaggtgatactattcaaaaaccccgttgtctccctgcaagtgctgatttgaaatgcagaagccacagt

SEQ ID NO: 2050 - DNA, 2538 bp, Homo sapiens
tttttaggagcacgggtactacttactgtggacgacggttggtcaaggaaggctttctggaggaggtgacagctaggctgggtcttaaggatgaatgggaagagagaggagaacatgtggataaggccaggcaaaagggctgcacagccaagtcacagccaagacgaaatgcagggagagttctggaagctgcgtgtttcatgctgctgggtagtgtggaaggacaggctggagctaggcagctaagcagcttggcaaatggagctactgaggattccaaacaggacctctgcagtcgtctccactgcttatgggttgaaccacgtgaaatagacaatattcggccatttagggccaagacaaatgccagctttgcggggtgcagcctcacagagaggctgcttgggggcctttgcagagggtggatgagcagagggcatcctccggaacctgcttggggacccggctctgaggccatcgggccggtggtgtccagattctcgtgtaggctgggagaaaggggaggttcaagaaacacggaggaagtgaagcgtcagagccggggggacggggtgccgcagaggagaaggagcactgaggctgaggtccaggcttgcagacacgtggaccatgagtattctgccaggtctgtgggtgtctcttctgagctacaccagtttccaggttacctgggaccatggataactctcagatcagcaacttgtcagttgatttccaagctgctgttggctggactcagactcagcagggagcacctgggcgagccctgtgctgcgggctggactccggcccatctcgctgattactcttgcttttgctccccagtgtgtcctcaagaggtcagagcctgcttgttgtttcttcatgaccacgggaggaggggcaccaacatgagggtgctagcatctccccagtggtggcttcccagggctggggaaaccctgggggaggggttgggacagggacctctgtcgcttgctgccactgcctgggtcaactgcctggcagggctggccgctcgtgctcagaaggctgaggccttacctgccttctcctctcacccagcgcccatgtaaggacacatctgagttggcattctgtgtctgctcttgagctactcgcatgataagtctttgttgtcctgtgggatgtcaccggttcatgctgaagagaaattgtaaaggactcctttgcctgctcaggccccatggcctctgtcatgttttgtccccgtccctttgggagcacagcagcagtgggctggctggactgtgcaggcgaggttcaaggatgaggtacagttgtgtgaaaggtgagcctgctggaccggggagctttcctcaaggcctccgcctggctatgatggcgttagggttgaggggaagcttcatccaaaatgcacagtacttggatgtcaagatgatgttgctgctctcaggatgagtcactctccaccactgacttcctttgatgttctgagctcagcctggagtctgacctgggactatagcacttgttctcccaaggtaaggctggcggccaaacccagctgcgcacacctgaacctgctccttggcagagatgaagggcgtcatgtttcgtagccactcaacacccatggacaatttggctccttgtaaagacttagtcatgcctttgaactgacttacttgaaatataattgctcctattttgctccaaagaccagtggcatgatgggttagagttatttgtatttattgagattgttgtaattagcaatctcagggctcagtctaactgcattatccatgctggaaaacttaaaaaaaaaatacagtccttcatcttcagttttccaatggtcgccagttatacacagctaatctttgcagtgaaagttgtctttggagaatgtgctttcttggtcccgggtggtcctggtcttgggctggaatctacgtgagctgctttgaagtaagctgacaatacacaattattaaggctattttgacctgcaagtatggtttcttaaaaaggaacaattaaataccatgtagcagttatttagactttagcattgactaaggaaaggagaaaatggaagaagaaccccctcctgcttagatgcagtcatttttttaaaaagtaatcttttggggaataaacttaaccaaggaggtgagggacttgtaaacaaaatgttaaaactgcactgaagactagaaaatgttgatgaaagctgttaaagaagacacaattagatgatgaaaacacatcccatgttcatggattgaaagacaatattgttaagatgtcaatactatagattctatgcaatccctgtcaaaacccaattttttttcaaacataggaaaatccattctaaaatttacatggactctcaaggaaccctgagtagacaaaacaatcttgtaaaagaacaatgttggagggctcacactttctggtttcaaaactacagtaattaaaaagctacagtaattaaaacagcatgatattgtcacaaagatatag

SEQ ID NO: 2051 - DNA, 1766 bp, Homo sapiens
agctctcagacaggtgtcttagccctggattccaaggcatctcctctcggtgatcagctctgaacacagaggactcaccatggacttggggctatactgggttttccttgtcgctattttagaaggtgtcgagtgtgaagtgcaactggagcagtcggggggaggcctggtaaagcctggagggtccctgagactctcctgtgcagcctctggattctcactcagtccttatgaagtgaactgggtccgccgggctccagggaagggcctagagtggattgcctatattagtagtagtgggagtaaaagatactacggcgattcagtgacgggccgcgtcagcatttcgagagacagcgcccagaactcagtctctctgcaaatgagtggcctgagagtcgaggacacgggtgtttattattgtgcgagagtcgactggaatcacttctactttttcatggatgtctggggcaaagggaccacggtcatcgtctccgcagcttccaccaagggcccatcggtcttccccctggcgccctgctccaggagcacctctgggggcacagcggccctgggctgcctggtcaaggactacttccccgaaccggtgacggtgtcatggaactcaggcgccctgaccagcggcgtgcacaccttcccggctgtcctacagtcctcaggactctactccctcagcagcgtggtgaccgtgccctccagcagcttgggcacccagacctacacctgcaacgtgaatcacaagcccagcaacaccaaggtggacaagagagttgagctcaaaaccccacttggtgacacaactcacacatgcccacggtgcccagagcccaaatcttgtgacacacctcccccgtgcccacggtgcccagagcccaaatcttgtgacacacctcccccatgcccacggtgcccagagcccaaatcttgtgacacacctcccccgtgcccaaggtgcccagcacctgaactcctgggaggaccgtcagtcttcctcttccccccaaaacccaaggatacccttatgatttcccggacccctgaggtcacgtgcgtggtggtggacgtgagccacgaagaccccgaggtccagttcaagtggtacgtggacggcgtggaggtgcataatgccaagacaaagccgcgggaggagcagtacaacagcacgttccgtgtggtcagcgtcctcaccgtcctgcaccaggactggctgaacggcaaggagtacaagtgcaaggtctccaacaaagccctcccagcccccatcgagaaaaccatctccaaaaccaaaggacagccccgagaaccacaggtgtacaccctgcccccatcccgggaggagatgaccaagaaccaggtcatcctgacctgcctggtcaaaggcttctaccccagcgacatcgccgtggagtgggagagcagcgggcagccggagaacaactacaacaccacgcctcccatgctggactccgacggctccttcttcctctacagcaagctcaccgtggacaagagcaggtggcagcaggggaacatcttctcatgctccgtgatgcatgaggctctgcacaaccgcttcacgcagaagagcctctccctgtctccgggtaaatgagtgcgacggccggcaagcccccgctccccgggctctcggggtcgcgcgaggatgcttggcacgtaccccgtgtacatacttcccgggcacccagcatggaaataaagcacccagcgctgccctgggcccctgc

SEQ ID NO: 2052 - DNA, 1727 bp, Homo sapiens
atagggtaggggaggccctgggaaaggcaggacctcgaggcgcggccgcgcgaggtgaccggagtcacagttcccgcaggcggcgacagcagagcgcccactgcctccagcagattaatattaagattggaagtttgtgtcttttgctggatattggaaattgaatgtaatggcaacagaatttataaagagttgctgtggaggatgtttctatggtgagacagaaaaacacaacttttctgtggaaagagattttaaagcagcagtcccaaatagtcaaaatgctactatctctgtacctccattgacttctgtttctgtaaagcctcagcttggctgtactgagggttatttgctttccaaattaccatctgatggcaaagaagtaccatttgtggtgcccaagtttaagttatcttacattcaacccaggacacaagaaactccttcacatctggaagaacttgaaggatctgccagagcatcttttggagatcgaaaggtagaactttccagttcatcccagcacggacctagctatgatgtgtataacccattctatatgtatcagcacatttcacctgatttgagtcgacgctttcctccccgttcagaagtgacgagactgtatggatcggtttgtgatttaaggacgaacaaacttcccggttcccctgggctaagcaaatctatgtttgatcttacaaactcatctcagcgattcatccagagacatgattcattgtccagtgtacccagtagttcttcttcaaggaaaaattctcaggggagtaacagaagcctggatacaattactctatcaggagatgaaagggactttgggagactgaatgtgaaattgttttataattcttcagtagaacagatctggatcacagttttacagtgcagagatttaagttggccctctagttatggagacactcctactgtttctataaaaggaatacttacattgcccaaaccagtgcatttcaaatcttcagccaaggaaggttccaacgtttgccatgcagaactcgaattggggacttgttttcaagcagtaaatagcagaattcagttacaaattcttgaggcacggtaccttccaagctcatcaacacctctgactttgagttttttcgtgaaggtgggaatgtttagctcgggagagttgatttataagaaaaagacacgcttactgaaggcctccaatggaagagtcaagtggggagagactatgatttttccacttatacagagtgaaaaagaaattgtttttctcattaagctttacagtcgaagctctgtaagaagaaaacactttgtgggccagatttggataagtgaagacagtaataacattgaagcagtgaaccagtggaaagagacagtaataaatccagaaaaggttgttatcaggtggcacaaattaaatccatcttgaagacttcacacattaatttggtgaagaacttgacattcttttagaagacttatgatttcaatttgctaccaatgagaagaggcaaatcaacaaatttgtcaatttatgggggctataattatggtatataatgtatctgatagaaaatttgataagaaaatgtaatgaattttatcagatatccaaagtaaaggaaatgttttaaaactgcaacaagagacacagacagtaaaatcaaagtattattaggatgactaaataaattataaagtctgtg

SEQ ID NO: 2053 - DNA, 2079 bp, Homo sapiens
cagtttggcatcactcctcccacaatttaaaaacccaaaaccaacacctcgtgaagctatcacggcccagagcttaaaaacttaaaccaggactaaaggcaccacctgttttcaatgcagcgttgcccacaggaatcactctgacaaccctcacttttctaacagacccctggcgggcagaggactaattctcttttttcacattctttctgtgtttttcacagatgagagagagagcagtcctgaggaggctcaaggcaggcgctgagaggaggcaggtccgcagccagggcccctgcagccacagggttccgtgcacagcatttttttacactcaaaggcttttttatgtctttctcctaaattgtggtaaaatacactaacattcaccttcctagccatatttaggtgcacacaagggcacaggaagtgcatccacactgtgcagctgctgccaccaccaccatctccagaacgttctcatcttcccaaacggaactctgtccccattaaacaccaattccccatccccctggcctaggccctggcatcccccagctacgttctgtctctacgaagtcactgctctagggaccgcatgagtggagccacacaggatttgtccaggtgtctggcccgtgtcactgagcaccatgtcctcaaggtgcatgtgtgctgctttatgcatcagaatttcattcctttctgccgtttgatggctgaataatattccactgcgtcgacagaccacatttcgtttaattaggcatccacccatgaacatctgggctgtttctaactttcggtgattgtggatagtgctgccattggacatgggtggacaggtacctctttaagacccagctttcaattctctggggtctgtacccagacgtggaactgctgggtcacagagtaattccatcttcttttgtgttttgaggaacttcccacagtgcccgcactactgtacattcccaccagcggcgtacaaggctccaacgtcaccacgccctgcagacactctttttcctttttggttatttatgcatacataaataatgatgtatgcattatttatgaatgaatgaatgaacgacagggtctcgctctgttgcccaggctgcagtgcagtggcaagatctcagctcactgcagcctcaaacacctgggctcaagcgatcctcccacctttgcctcccaagtagctgggaccacaggtgtgcaccagcacgtctacctaatttttgtattttttgtagagatggggtctcacaatgttgtgcaggctggtctcaaacacctgggctcaagtgaccctcccacctcggcctcccaaagtgctggaattataggcctaagtcaccaggccaccaggccagtctgtttatttatttatttacagagtctcactctgttgcccaggctgtagtgcagtggcatgatcttggctcactgcaacctccgcctcccaggttcaagtgattctcctgcctcagcctcccaagtagctgggaccacaggcacacaccactacacccagctaatttttgtatttttattagagacagggtttcaccatgttagccaggccagtctcgaactcctggcctcaagtgatctgcctgcctcggcctcccaacatgctggggttacaagcgtgagccactgcacaggctgcttgtttgttttctaacagccatcctggaggggtgaggtggtagctcactgtggttttgattggcacttccctcgtgactttgtccatcttttcaggtgcttattgagcattcctgtattttccctggagaatgtcgtcttttcaacaactttgcacccacccccacctccccgccaccccctctggttgtagagatggggtcttgatgtgtttgcccaggctgttcttttgcccattttttaattgggctgctttcttactgagttatgggagttctttttatattctggatatctatcccttataagtatatgatttgcaaatattttctcttaatttcccatatttctaagagacagtttcattaagtaattaaaacacatacctaaattctgccg

SEQ ID NO: 2054 - DNA, 1913 bp, Homo sapiens
catttgcagatgctcctggcaaagcatgttgttaagcactatggtcagcagatgaaattgtctatgaaacatcaactccccaaaatgaagacattccatgaacctaccacaattttgggtaatagtttacctaaatgcactgaaattaagccagaagttaacacattgactgcagagaataaattgtgggatgatgcaaaaaatggctttgcacggtgtacagctgcggaaatccaaagatttgcattttctgctacagggctgttgtctcatgttgaagagggtttggattccgatgcaactgatagcagctctgatgacgatttggatgaatatacccttagaaaaaatgtggcagtgtaagtgcaaaattattattagactattttctgttccatatatagcagcaattatcttagtttccaggtatgttgacaagaaatagattttctaaaatcttaatgctataatctttttttttttttttaatttttatttttgagacagagtctcgctctgtcgcccaggctggagtgtagtggtgcaatcctggctcactgcaacctccgcctcccgggttcaaacaattttcctgctttagcttcctgagtagctgggattacaggtgtgtgccaccacacccagctaatttttgtatttttcgtagaggcaaggtttcaccatgttggtcaggctggtctcgaactcctgaccttgtgatccacccgcctcggcctcccaaagtgctgggattagaggcgtgagccaccacatccagccaccataatcttttatgttataaaacttttgttgaatttttttaatgttttgtttgttaaattattgtgtgtgagtatatacatactatttaaaaataaatttactcaacttttctatctaggaaaaacccatacaggaataatgaaattattgagctataaataagcatattttctattcttgaataggctgtggacaaggcctaatctttgtttaagtgatctagttaatatgtgtatctaactaaaaaactttagtctgcacatagggagccctcattgtctttgggagtgtatcagttgagagtacatgtaagttgacttactactttttttccttaactctctactcgtactcatagctttcagaactgacctttaacaattcagttagtttttgctagcttagtataactaaaacaaaactataatgtcagctgtaagatatctattgaatgcttattatgtgctagacactaagattcagttgtgagcaacatattcacaacctctgccttttggggcatgtacttgagagagaggtatctcgatattgaataataaaaagcagagaaaaatagtttcagttatcacaccgtgataacactacagaccaactctgtccaatagaaacttctgagatgttggaaatcttttatgtctatgccatctaataggcactagacttatgtggatattaaacacttaagatttggccagtgatactaaggaaatgagattttaattttatttaattgactaaattttagttgaaatggtcagataaagcataatttttaatttagttttcaggggatctattactgtccccaaattgatgtgaattattgtttgtatatatagcattttgggggaaagaagtctgtcacacatggatacatacaggggcacaacactcactggggctttttaaagggtgcagggtgggaggagggagaggatcaggaaaaataactaatgggcactaggcttaaaacctgggtgatgaaataatctgtataacaaacctgcatgacacagatttatctatgtaacaaacctgcacttgtacccctgaacttaaaagttaaaaataaactttttcaaattctcaaaaataaatgagaattacag

SEQ ID NO: 2055 - DNA, 2751 bp, Homo sapiens
actctcaagcgcgccgcgaaaggagggagcagcttccgggacctggcgcggcttttgtgttgggcagcgcgaatgtggcgagctcggtgcgtctccgctgctccttccccttatccctgggaggtccaagtggtcccgcggcagcttctgttgctctgggacctgcaggtcccggaaggtccttagggaggaccccagacaccggagactgggaaatgggactattggcattcagggatgtggctctagaattctctccagaggagtgggaatgcctggacccagctcagcggagtttgtatagggatgtgatgttagagaactacagaaacctgatctcccttggtcttgctatgtctaagccagaactgatcatctgtctggaggcaaggaaagagccctggaacgtgaacacagagaagacagccaaacactcagtagcgacgaggtttcgccatgttggccaggctggtctcaaactccttacctcaggtgatccacctgccttggcctcccaaagtgctgggattacaggcacgggccaccactgccagcctatttgtgtattctgaattatatttaaccattcatttggtgagttttgtcttcttatcttactgaagacattttgccagagcagggcctgcaagtttcattccaaaaagtgatactgagaagatatgaaagatgttgtcttgagaaattacgcttaaggaatgactgggaaattgtggattatccagactcaggtagttctttataacaatgtgagaatgaactaatacagaaaagtggtaccagagagttgggacattgctataaagatacctgaaaatgtggaagtgactttggaactgggtaacaggcagaagttggaagagtttggagggctcagaagaagacaggaagataaggaaaagtttggaacttcctagagacttgttgaatggttgtaaccaaaatgctgatggtgatatggacaatgaagtccaggctgaggagttctcagatggagatgaggaccttattgggagctacagtaaaggtcactcttgctatgctttagcaaagagactagtggcattgtgcccctgctatagggatctgttgaactttgaacttgagagagatgatttagggtatctggcagaaaatatttctaagtagcaaagcattcaagatatggcctggctccttctaacagtgtatgctcatatttctgaggaaagagattatctgaaactggaacttacgtttaaaagggaaatggagtattaaagtttggaaatgtgcagcctggccatgtattagaaaagaaaaaaccattttctggggaggaattcaacctagctgcaaaaatttgtgtaagtaaagaggagccgtatgttaacagccaagacaatgggaaaaatgcccccaagacatttcagagactttcgtggcaacccctctcatcacaggcctggaggcctaggagggaaaaacagttttgtgggtcaggcttagggccctgctattctgtgcagccttgggaccctgttccctgtgctttagctgctccagctccagccatggctaaaaggactccagatatgtttcaggttgctgctccagagggtataagacacaagccttggaggcttccagatggtgttaagcctgcaggtgctcagagggcaagagttgaggcttgggagcctccattctttcagatttctgaggatgtatggaaacaactggatatccaggcagaaatttgcttcaggggcggagcccttgtggagaacctctactagggtactgtggaggggaaatatggggttgaagtccccacaaagagtctccactggggcactgccaagtggagctgtgagaagagggccactgtcctccacaccccagaatggtagctccatcaacagtttgcactgtgtgcttggaaaagccacaggcactcaacaccagcctgtgagagcggccatggggcactaagccctgcagagccgccagaagcagagctgtccaagaccttgggagcctaccccttgcatcagtgtggcctggatgttagacatggaatcaaaggatattattttggagctctaagatttaatgactgccctgctgggtttcggacttgcatggggcctgtaacccctttgttttggccaatgtctcccttttggaacaggaacatttacccaatgcctgtacccttattgtatcctagatgtaactaacttgcttttgattttacaggctcataggcagaagggactgccttatctcagatgaaactttggacttggacttttgagttaatgctgaaatgagttaagactttgggagactgtttggaaagcataattgtgttttgaaatgtgaggacatgatatttgggatgggccaggagtggaatgatatggtttggctctgtgtccccacccaaatttcatgtcaaattgtaatcttcaatgttggaggagggtcctggtgggaaggtaattggatcatgggggcagacttctcctttgctgttctcatgatgagtgagttctcatgatacttgattgtttaaaagtgtatagcatttccccctttgctctctctctcctgccagccatgtgaagatgtgcttgcttcccctttgccttctgccatgattctaagtttcctgaggcctccccagaagcagaagcatgtaaagcccacagaaccgtgagttgattaaatctcttttctttataaatt

SEQ ID NO: 2056 - DNA, 2816 bp, Homo sapiens
atcttggcggcggagcgatgagcgggtctaacccgaaggctgcggccgcggcgtcggcggctgggcccggggggctggtggctggcaaggaggagaagaagaaggcgggcggcggcgtcctgaaccgcctgaaggcgcggcggcaggcgccccaccacgcggccgacgacggcgtcggggcagcggtcacggagcaggagctgctggcgctggacaccatccggcccgagcacgtcctgcgcctcagctgggtcaccgagaattatttatgtaaacccgaagacaacatctacagtattgatttcacccgcttcaaaattcgagatttggagacagggacagtactttttgagattgccaaaccttgcgtttcagaccaggaggaggatgaggaggagggaggtggagacgtggacatcagcgcaggacgttttgtccgctatcagttcacaccggcatttctccgcctccggacagtcggggctacggtggagttcacagtgggagacaaacctgtttcaaacttccggatgatcgaacggcactatttccgggaacacttgctgaaaaactttgactttgattttggcttctgcatccccagcagtaggaacacttgtgaacatatctatgagtttccccagctttcggaggatgtcattcgtctaatgattgaaaatccttacgagacccgctctgacagcttctactttgttgacaacaagctgataatgcacaacaaggctgattatgcctataatggaggccagtaagtgctgcaagagtaggtaggggaggtgctttgccgcggccacaagatcctggcacacggagatgatcgaagctgcagtttgtcaacacacatctggaacctggccccaggaagccaaggctggggtggcagtttcctgcgcgccaaaggagctgccaaacagtgctgtgttttcttccccagtattttttcttccctttttttcctgccccgtaggttgcagaggtactatagtaaagtaaaaggttaggataagggtcctggaatccagataaaaaagtttattttccgtagttctggctgcctgttggttgtcttgacgaccaggcatagctgtgcctggtgagaaggctctggccaggcccatcagcaggtcagcagctcttaaggttcctgggtgctgtgggaagctgaaaggtaggcctcttccaggtagctcctcctctcacctccggcattgccatcagcgcagtctgccctcggtctgtgtgaagtcttaaaccaactggaagacacttgaaagggtggggagggagggaggtgccaagagtggaggcaccaaggaatgggtgatgctgccaagctgaagggtctgctttgtggagaggctgctgctctgtctgacttccagggtctcagccagccctcctgggaatagaccaagttttcagcctggcagtgccttctgttcccattttggaggacagacaagcttgctccacatctcctggctcctcccttctgagtctcatgaaatagaatgagtcagctctgctcatggaacagtagtatctcttgaggccagagcaggtcttgtattttgtttttttatttccagacttctttcggggaggttttataaaatgacagtggtgttcccagcatatgtgatatgtggttagacttctgatagtatcagcttccaggggctaatctggcttatgttgggaggatatgcttacgaatcagcagcagctttctaaaggagagatttgacttttctctgcactgcacagcctggaggattggcttttgatggggatttgcctccgaagctctttgtacatttcttgtttaggagggttttcctatctacctttctactgaagtagtttctggaactttcctggtggatcagagttacgtaatgcagtctgagccttcagactgctagttagaattgttttaggtgttcagaaagggcaaaataggctgatgtggcctgtcagagtgatgtgttctcaaaaaagttcacttgcacatctgtgggctgcttttgtcctcagacccttagtggacagactccacaaaccctctgatgagacgattgatgtggccagggtccagttagcatcagtagaaggatgtcactaggaaaggcccaggtatctggtaagtgactgtgaggtgtcacagtacctgtgacaggagagtgtcctgatgtgcttgggagaaaggccgtatgggggccagggatggaagagacagtgtgtggccacagaaattcctgtccatccaccaccagtgctgctccctgtgtgggctctagggcgagtggccccgaaccttggcccagtgctttgtcccaggccagagtcttggcaatgccacatgctggcagctttctcactgagaaggtcctagcttacccctgtgtgctggccttggattcagccccgagagaggggagagaccattcctcctgtggagtgggttccttatcaccagaccggccactctcagaactggcgtccactgtaaatccaggtgccttacgtgtggctctgtcccttatgctgcaggggaaagctgcattgccattgttcccacctcctcactggcagaaagatgccagggctgttagcactgtctcctcaccttctgtttctcattgtggctcctcaaatgggatttgcatgttcctgtcaagcgtaacaacaatcccttctctctttgacagaggcccaggtgggacagtttctattatttgtataaaatgttattttgccacatgagacagtaataaaagaaagattttcacagt

SEQ ID NO: 2057 - DNA, 1766 bp, Homo sapiens
acttgaggtcggtgtggggaacttgcttttaattctcatttagagaagacagtactgaaatggagaaaagtcacagggaaagtacttttacagattgtagattagtaaagaacccaaagagagcctttcattgagagcagaaaggcgaatggaattcgctgttttctgtctaaggaggaggaggatgggcaggcaggtcagctgcccagtggggcttggtgtgatagtgggagtcacccttcatttgaacctctctgccttgcccagctccagttcagcttcagcgtggtcagagacactatctctatggaaggtcactcctggaagaatacatttacttagctgcttccaccatggaatcctagcttgtgctggagtgtccccttcatcctcctcctgtgctttgagaatccattgttgctggtatgccctgagcagtgcccttgaacttgcccaggtaccccttgacatccacaccacaaatagtctagccttacaaaggtggacaagatgtcttttcaacagtctgtactgccacttccatccatctgaagctttctgttcctgagtctgtcatgacattaatctttcaaaaatctttcacagagatttttagtctctactaaaaattaccaaatgcttctaaatatgaaggagaggttggggacacgcaccctatgtgataccaagttttattgtcaagacagtgtcatggtgcagaggtaggcattctgagcaggggaacaaaataagggcctagaaactcacccgtgcatatgttgacctttgcaaaatgacctggtgacatggcaagtcagtggggacaggaaggaccactccctaagtaatcccagaacaatggctattcatgtgggaaaaaaagaaattttactttctctcaccttacctggtgataagttccaaatatgttaagggctttaatacaaaaagcaaaaattgtcagtgtttggatgaaaaaagccttagggcaggaaagaatctcttgagacataaagtagtaatcataaaggacaagatggttaagtcaattctgttaaaactcaaggcttatattaagcaaacacttgaagtgagaagatgatccacaacttgagaagacatttataatacaaataactgatgaaggattcataatcacaaatatagagaattcctatttaaaaaaatagaaaaatagtgaagactacacaagaggaaatagggcttttaaataaatagatgttctgtagcattggtcagggaaatatgaattaggaccacaatgagattccattttatatccataagatttgcaaaggttgggtctgacagtaccagttgttagatctgtagggacttgtacaacattgtggatgtgtaaacaggcaccactgctttaaaaaacaattttcccttacagacttgaacatttgcagacgttatgatcttgcttccaactcccacctgtatgtccagcaaactcttgcatgtggccactaggaggaatgtgtaagaatgttcatagttacatatttataatagttaataactggaaaaagtgaaatgtatgtctgtctacaggaaaataggtgaataattagatatatatattcattctacgggatattattcagtagtggaaatgagtgaactacagctatacctcacaataagaatgaatctcagaaaatattaaggaaaaaagcaagtttgaagagaccacatggggcgtactatttttattgagcccaaaaacaagcaaaacc

SEQ ID NO: 2058 - DNA, 3359 bp, Homo sapiens
aaatctacctatagtccttgtttctggaggttgttgccatggtgagatttgatttcatgtatgttcttttgtggtctattaacctagccatcatcattgattttattatttttgagtcagagtcgcactctgttgctcaggctggagtgcagtggtgtaatcttggctcgttggaacctccgcctcccaggttcaggtgattcttgtgccttagcctctggagtagctgggattacaggcacgcaccaccatgcctggctacttttgtaattttagtagagacggggtttcgccgtgttggccaggctggtcttgaactctggcctcaagtgatctacctgtctcagcctcccaaagtgctaggattgtaggagtgagccactgtgcctggcctggttttattattactatttttaatatttgttttttcatatgatagagacagtgtcttgttatgttgcccaggctggtcttcaactcctgggctcgagatcctcctgcctcaacctcccagagtgttggtattataggcgggagctaccgtgcttggcccagttttattattttaaaatagtaagttagccattacacttaagatgtgaaaattccaaatatagtgttaaaaaagtacatagaagactgatttttccctttctgaaactgtagagaagcagttttctaggccatgaaaaaacggcaagagccttattaaatatataatttgaagcatttttaaatatagatttgattggagatagaaacttggccaagctgttactactccatcttataggcagaataataatgtgatttctcaaaataaaaatagaaaagcaaaaactgggtcttgctgctagaaaaccagcttcgagattggcttcatgttttcaaaatcctgataaatttaatattgatgtccgcgaagtattcatttgttgaataaattaatttgagcaaaaattatattttagttatatttacatttttaaaataaaatagaaaaatcccttattaccctgcttctccaaatagctctgttaatttgtgcatatttactttaagttttttgtagttgcagtcactaatatccagactgctttgaattctggtttggaaaaagctcagtattgtaaacctttcctcatgtttttgcagggcctctacttttgttgactgtaaatttttcaacagtcatgctgatgtcctaatgacctgcttgtttttggtggatttacttagtgggagcaggagctgaggttatgcgtgtttagtcctccagccttgaaattcttacagcctttcagggactcagtactgatgtgactgaattggacttgaagagtagatttcctttgtgtgaattaggtggaactgtttatgcatgtctgggttgctaaagggaaaggaagtgagttgagaagggaagggagacatacttttgtccaaatttatgccctaacagtctgatttttttttttgaatatagaaatacttgttaaatatcttccatcaacagataaacagatggacaaaaagatttctattttaaaggatcatggctatatagaaaatttgacatttggatgggatggaccatcttggaggctactcacagcccttaagttgttatgtctggaagctgagaaatttacatgctggaaaaaagtacttcttggggaggtaatttcagatacgaatgagaagacaagtttggacatagcccagaaaatatgctattatttcatagaagagactaatgctgtgcttcaaaaggtgtctcatatgaaggatgaaaaagaggccctgataaaccaactaactttggtggaatccttgtggacggaagagctaaagattctcagggcatctgccgagaccctgcacagtttgcaaacagcttttacctgatttcaccgaagcgcatttggtcacctcctctgaaacaaaagttaattttgaagagcatcatcatgggctggggtggtggctgcccccaggacatgcaggatttctgcagggggcagcacaggttctgggattgtgaggctgtgagtgaaggtggacaagctgtctggatggcaggtctaatgctcttccgaataaagtgctgaactgtgaggagagaggcggactgtgaggcagccaggagccagctgcgtccgtgtgtggtctgtcaccacggggcctgcttcttatctgacacagcagctatcagagtctagtggttgtgcttttaagatgctctgataccattgggttaaggggcagattggcggtgggtgtggggcagtgtgaggtagtcctggatccccgccagggtggcccagacgccagcccttccctgtgtggctgcactgaggtgggtgttgaagagccccctaggggacacacagcttccaggaggagggaatgtcctctaagcatgctcctggcctctcaaggtggcgcttgtctaattattcacttgggaagaatgactagctcagccagcggctctttctgctttgttctggcgactttcctgggcaggcctttccacctggggagctggctcatcctgcacagctgggccgtggtgggcctgtctgcttgattctggggttcagtgtaggtcagctgatggcgaaccatggtggtggtttggcttctgttcttattcttgagttttgataccacgcagaccttgggtggggagagcttcctgcacagctctcagcggcctgtggccttggaactgcctgcgtaagtaacggaggggctgctggtcctgttcaggcccgtgctggggacgccgcttagacaatgttgcccagagtcctgtttaccctcccagggttcattcttcccaagaactcaaattcctttctcattggagcctagtgaaaccaaatgaacgggacctgctggcctcaggaggcaggcagagtttaaaataaaactttctcatgatttcttgaacatctttccctgtttgtatatacactttgtgtttatttttcagtagctgcagtatattttttttcaatattcagtataatgcagtgtatttcatcatatgctgtatggagagtgggcagacttctgtggagggcccgatagtaaccatttgaagctttctggacctgtggtcttagtcccagcgattctgcagagcggccatcggcagcatgtcaaccatttgcatggctgggctccagggaaactactgacaacgacaggtggtgggccatagtttcctgacccctgtgctatgccagaatttctttttcctcttccctatgagtggacctaaatatgttaattccttttcacctttcaaaacggacagccccttgaacattaaaaactttgcagaccct

SEQ ID NO: 2059 - DNA, 1692 bp, Homo sapiens
tcaagccagatgtctcactatgagacaactgctcagccagcccagaagtaaaacaatgtgtctgaaatgtgatctccaagagcgactgctctgcccatccctactcgctggcacagctgacggctccttgagaatggatgaccctaaaggagacttcatcacactctaccagatggcttcccagtcatcggcctctcattacaagctccaagtgatcaaggctttaaaatctagcgggctctgcgagtcattgacatatggactcccgttcatcctcagacctacaagctgttggcagctggactgggatgagctggagacaaatcagcaacatttccatgctttgtgtcacagcctgctgaaaagggaatggctgctgttagccaagggggaaccaccgggcccaggacacagccagagaattcctgccagcaccttctatgtgatcatgccgtcacactccctcacactgctggtaaaggcggtggccacgcgggaactgatgctgcccagcaccttccccctgctacctgaggacccacatgatgatagccttaagaatgtggagagcatgctggacagcctggagctggagcccacctacaaccccttgcatgttcaaagccacctgtactcacacctgagcagcatctatgccaagcctcaggggcggctccacccacactgggagagccgagctccgagaaagactgggcagttgcagaccaaccgagctcgagctactgtggcccccctgcctatgactcctgtcccaggcagagcctccaagatgccagcagccagcaaatcttcctcagatgccttcttcctgccttcagagtgggagaaggatccctcaaggccctaagtcaccagcaccagagcccagctgcccagcttaaccatatccatgctcaggttcacataatggctatctgtggtcagacttgctctctatccgcctgagcctctgtgagtgagggctgactgggaaacaacagccttcctgtcctgtttcagtgctgtcccactcctcaagtctggaagcgacacacccgagcctgtcctttctccagcaaggactttcattttctttagaatcatttgctactgtttacacaggtgaagattaaacacccagtaagcttctaccattgttaggagcattcataactcagaatttcttcttgtagctctgtgtaagcaggtggatgaggtcagatcacctttggtaaactggacctcaggaacaaggatgaggttttgaaagctcataaaagacaagtaagattgaaatccaagcctcatttcagagcctgtgcccttcccactacaccaccaggcttcagcctccaaagagacaagtgcttggtacctacatgcaaagtgtgtgtgctggggggtgggagggctgcccagaacaggggagaggatggtgtaaaaaaagacctactcctttcctgttaccctctccccacatgtaccaaccttcctgttgctccctccatccacagaataatagctaccatttataaaatgtttactctgggctgggagcagtggctcacacctgtaatcccaacactttgagaggctgaggtgggatgatcacttgaggccaggagttcgagaccagcctgagcaacactgtgagacccccccgccatctctacataaataataaaaactttt

SEQ ID NO: 2060 - DNA, 2269 bp, Homo sapiens
aggcgcgcgggaacatggggctgtatgctgcagctgcaggcgtgttggccggcgtggagagccgccagggctctatcaaggggttggtgtactccagcaacttccagaacgtgaagcagctgtacgcgctggtgtgcgaaacgcagcgctactccgccgtgctggatgctgtgatcgccagcgccggcctcctccgtgcggagaagaagctgcggccgcacctggccaaggttcatcggggtgtgagccggaatgaggacctgttggaagtgggatccaggcctggtccagcctcccagctgcctcgatttgtgcgtgtgaacactctcaagacctgctccgatgatgtagttgattatttcaagagacaaggtttctcctatcagggtcgggcttccagcctcgatgacttacgagccctcaaggggaagcattttctcctggaccccttgatgccggagctgctggtgtttcccgcccagacagatctgcatgaacacccactgtaccgggccggacacctcattctgcaggacagggccagctgtctcccagccatgctgctggaccccccgccaggctcccatgtcatcgatgcctgtgccgccccaggcaataagaccagtcacttggctgctcttctgaagaaccaagggaagatctttgcctttgacctggatgccaagcggctggcatccatggccacgctgctggcccgggctggcgtctcttgctgtgaactggctgaggaggacttcctggcggtctccccctcggatccacgctaccatgaggtccactacatcctgctggatccttcctgcagtggctcgggtatgccgagcagacagctggaggagcccggggcaggcacacctagcccggtgcgtctgcatgccctggcagggttccagcagcgagccctgtgccacgcactcactttcccttccctgcagcggctcgtctactccacgtgctccctctgccaggaggagaatgaagacgtggtgcgagatgcgctgcagcagaacccgggcgccttcaggctagctcccgccctgcctgcctggccccaccgaggcctgagcacgttcccgggtgccgagcactgcctccgggcctcccctgagaccacactcagcagtggcttcttcgttgctgtaattgaacgggccgaggtgccaaggtgagtgagtgggggcgtgcttgggaggcgcaggatggcaccggcacatctaacatctacacttctctagctcagcctcacaggccaaagcatcagcaccagaacgcacacccagcccagccccaaagagaaagaagagacagcaaagagccgcagccggtgcttgcacaccgccttgcacatagcagaggctccgggctgactccttcctggtgggaaaggaagatgcctgtcctctccgtggaggaccctgggccctcaccgcaggaagcagtttgggttttgaaaggttattgggtcccttccttgggctgtgttcttgctggtgagcaaagtgttgcctgcaaaaataaaatgcagaacgtactctacgatagatcacagttttttattcttaatgtcacaagcaggagaaaaatctcacattcatactaaaagttccaactagactcaacaggaatgaagtctctatttgtaatggaaagtcccagcctcccgctgccgtccagtgcgtgtactgtacacatccacactcacactcactcagggttcccggaccggctgtcctgcctgcggaactgaggtaaactagctcaggtgctgacactaggagggtctaccttacataaggtacaggtagaagcttgattgctaggcccaggcccacccagaccctccaatcctaacgggtatttaggcttgaggttcactccctcctcagctgcacacgcagccaggtattaacgaggatcagagctgttctgaggggtgggaaggagcagccccaccaccactcactcaccctcagtcacatcggggagggggcaccagttacatttacatcacattatttataaaataagaattacatttcatataacatggccagaaggagctctagtcccccaggaaagctgccggggacagcatttgagcctcttctttgcacaggcatgacttaactatacagctaattcctagttaatagcatttatacttaaccacctcaatgaaccaagcttgaaggaatttaaaaggcaatttagcttaaatacaaaaataaatttttgttaaaaaacgttt

SEQ ID NO: 2061 - DNA, 2395 bp, Homo sapiens
aagtcaggacgggagtccggcgggttacagcggaggcctaggtggcagacagggggcccgggccgctgcgtgttgtccacccaagatggagttcctcctggggaacccgttcagcacaccagtggggcagtgcctcgaaaaggcaacagatggctccctgcaaagtgaggattggacgttgaatatggagatctgtgacatcatcaatgagacggaggaagggccaaaggatgccattcgagccctgaagaagcggctcaacgggaaccgaaactacagagaggtgatgctggcattaacagtgctggagacatgtgtgaagaactgtggccaccgcttccacatccttgtggccaaccgagatttcatcgacagtgttctggtcaaaattatatctcccaagaacaaccctcccaccattgtacaggacaaagtgcttgctctgatccaggcatgggctgatgcctttcgaagcagtcctgatctcaccggcgttgtgcacatatatgaggagctgaagaggaagggggttgaatttcccatggcagacttggacgctctgtctcccatacacacaccacagcggagtgtccctgaagtggatccagctgcgaccatgcccaggtcccaatcacagcagaggacaagtgctggttcctattcctcgccgcctcctgctccctactccgcaccgcaggccccagctctgagtgtgactggccccatcacagccaattcagaacagattgccaggctgcggagtgaactggacgtcgttcgaggaaacacaaaagtcatgtctgagatgttaacagaaatggtccctggacaggaggattcatctgatctggagttgctgcaggagctcaacaggacctgtcgggccatgcagcagcgcatcgtggagctcatctcccgcgtgtccaatgaggaggtcaccgaggagctgctgcatgtgaacgatgacctcaacaacgtcttccttcgatacgagaggttcgaacgatacaggtctggccgatccgttcaaaatgccagtaatggagtactgaatgaagtaaccgaagacaacttaatagacctggggccagggtctccagccgtggtgagcccaatggtggggaacacagcgcccccatcttccctctcctcccagcttgcaggcttagacttggggacagagagcgtcagtggcaccctcagttcactccagcaatgtaatccccgtgacggctttgacatgtttgcccagacgagaggaaactccttggctgagcagcgcaagacggtaacctatgaggatcctcaggctgtcggaggacttgcttctgcactagacaatcgaaaacagagttcagaagggatccccgttgcgcagccatctgtcatggacgacattgaggtgtggctcaggaccgacctgaagggtgatgatctggaggagggtgtcacaagtgaagagtttgataaattccttgaagaaagagccaaagctgctgaaatggttcccgacctcccctcgccccccatggaggctcctgccccagcctcaaacccttctggccggaagaagccagagcggtcagaggatgccctcttcgccctgtgagcagctctgtggtttgcctccccagatggcgggtccccgctcgcaccccgtggacaccgggcactggccactcctacatccccagctccacacggcctgcacacctgtgtttccatggaaatgccaccgtgtctgctcccaggcctcccactagtcaggaccagcttcagccacttcttttctctgagtggtgggacaactgcagccagagactctctcccctcccaccatgggcccctctgcccatgtttcctcccaggaagagcgggcagagtggcccagccccaggcagtgcttcctgagcagaccacccggactgtctttcctccacccgcccatggagaaagagcacgcccggccccgccctgtgctcacctctgcctggctcagcgaccttctcaggcattctgccctcctgggcccctctctccctgaaggggctttgtggcatctctggaagagcagggtgtgctgcactcatgggcctggtctcactccttggacttgtcaccttgtgacatttggcttatcagcatttgagaaggctctgctgggtctccatggtgggggtctctcaccttcttgaccctctctccatcattcagctgccagcccaggcttcacacccaagctggctcagcagccgagcctggcaccgagggtccctgcaggctccctgggcagggagagggccaaggacaattgggagggcagcaggcagcccgcagatggtggccatgtggcacgctgctgagacgacactaccaataaaccaaactgccacgc

SEQ ID NO: 2062 - DNA, 2284 bp, Homo sapiens
acggggccgcctggagaggtgctgggagctgggtggagcttagaggaattaaactttggccctgcgcctcgtccagcctaggttccacccttttctgggaacaatgaatctcgctgtgttgtccaggctggagtgcagtggcaccatctcggctcactgcaacctctggctcccaggttcaagcgattctcctgcctcagccccctgagtagctgggattacaggcacgcgccaccactcccaggctccggtagattgcaaatgacctgctttctttctgttcccgggcgtttggacccctgtcttggaccgctgtcggatagtaaatcccaagtaaggtacctgccgtcggcagatttgagctttcttcttggacacctaatacccagagtcctccaggctccggtagattgcaaatgacctgctttctttctgttcccgggcggcatcggacccgtcggagagtaaatcccaagtaaggtacctgccgttggcagatttgagctttcttcttggacacctaatacccacagtcctccaggctccggtagattgcaaatgacctgctttctttctgttcccgggtggcatcgacccgtcggagagtaaatcccaagtaaggtacctgccgttggcagatttgagctttcttcttggacacctaatacccacagtcctccaggtgagtcctaaggatcttaggatacgcgatgggggtcctaaggcagggggggaagaggggatggctgtcacccaacccaaaatgggcggcctttatgttcaggttttgcccaagagtcagcttatttgcttcttgtactatcagggcagttgatgccacggccctcaaacatgaggggccatcctttagaaaccctctctagttgtttagacaactaggccaccggcctcagccagggccccagagtttcggttaaaagtccagctgccatcttttctctatctgacgcattcaatggaaaaggctttgtcagatcgggtagccccagggctggggctgccagaagtttttcctttaactcctgaaagactttttgttcttgggatccccattccaaaggttccgttccccgccccctttgtgacctcatacaaaggcttggctaatactgcaaagtttgggatccagtctacaaaaccacacagctcccaagaattcccttacctgccttctgcccttaggctccggtagattgtaaataacctgctttctttctgttcccgggctgcgttcggacccctgtcggatagtaaatcccaagcaaggtacctgccgtcagcagatttgagctttcttcttggacacctaatacccacagtcctccaggctccggtagattgcaaatgacctgctttctttctgttcccgggctgcgttcggacccctgtgggatagtaactcccaagtaaggtacctgccgtcggcagattggagctttcttcttggagacctaatacccacagtcctccagaaaaacaaacaaagacatggatttactgtgcatattagcagatccatactggaaaatgcatggaggtttcatatacaccacttacagttttcagctcctcagtagtgacaaagccatacccatcattgtcgattcgatcaacaatcttccctagcctctcctcgctctcgtccggggtgagctcgtcgaagttcttggagtccttcttgcccaggaaggcctcgtggtcgtactggaagctctggttgtcctcagggggccgctcgcccagctccgagtcgggccgcaccacgcgctctttgcgcaccgtgggcttggcccgcagaacccgcggcgccagcaccagcgccagcagcagccccagggctaaccccggcggccaccgcgcgccatcgtcccgaggagagggcggccgggagggagacgctgagcgagcgacaacagcggcagctcgggaatgggggctcggagcgcggcggccaagttttatgttatgtatattttacaagtaaaaaaattttttcacctcagcctgaactgaacactagctgacagacgttttgatttctttgaccatcacggaatcgtggccaagcgcggtggctcacatctgtaatcccaacactttgggaggtcaagatgggcggattgcttgggtccaggtgtttgagatcggcctgggcaacatgacaaaaccctgtttctagtaaaaatacaaaaattaaccaggctcaagccatgaccatgcaccattgcactccagcctaggcgacagagcaggaccctgtctc

SEQ ID NO: 2063 - DNA, 3914 bp, Homo sapiens
gaagagaaagaaaggactggctgggttgtaggcagcagggccgagcagctgagggctaagtgcacagcaggccctagcaaatgcttctggaattgaattggtccaaggggagactccagctttagttcaacatgggctgtatccgaatccttctgaaatttgctgggattccatgagggagtcaggtacaccaaaccgctcacctttgctgactgcattagtgatgagttgccgctaggatgggaagaggcatatgacccacaggttggagattacttcatagaccacaacaccaaaaccactcagattgaggatcctcgagtacaatggcggcgggagcaggaacatatgctgaaggattacctggtggtggcccaggaggctctgagtgcacaaaaggagatctaccaggtgaagcagcagcgcctggagcttgcacagcaggagtaccagcaactgcatgccgtctgggagcataagctgggctcccaggtcagcttggtctctggttcatcatccagctccaagtatgaccctgagatcctgaaagctgaaattgccactgcaaaatcccgggtcaacaagctgaagagagagatggttcacctccagcacgagctgcagttcaaagagcgtggctttcagaccctgaagaaaatcgataagaaaatgtctgatgctcagggcagctacaaactggatgaagctcaggctgtcttgagagaaacaaaagccatcaaaaaggctattacctgtggggaaaaggaaaagcaagatctcattaagagccttgccatgttgaaggacggcttccgcactgacagggggtctcactcagacctgtggtccagcagcagctctctggagagttcgagtttcccgctaccgaaacagtacctggatgtgagctcccagacagacatctcaggaagcttcggcatcaacagcaacaatcagttggcagagaaggtcagattgcgccttcgatatgaagaggctaagagaaggatcgccaacctgaagatccagctggccaagcttgacagtgaggcctggcctggggtgctggactcagagagggaccggctgatccttatcaacgagaaggaggagctgctgaaggagatgcgcttcatcagcccccgcaagtggacccagggggaggtggagcagctggagatggcccggaagcggctggaaaaggacctgcaggcagcccgggacacccagagcaaggcgctgacggagaggttaaagttaaacagtaagaggaaccagcttgtgagagaactggaggaagccacccggcaggtggcaactctgcactcccagctgaaaagtctctcaagcagcatgcagtccctgtcctcaggcagcagccccggatccctcacgtccagccggggctccctggttgcatccagcctggactcctccacttcagccagcttcactgacctctactatgacccctttgagcagctggactcagagctgcagagcaaggtggagttcctgctcctggagggggccaccggcttccggccctcaggctgcatcaccaccatccacgaggatgaggtggccaagacccagaaggcagagggaggtggccgcctgcaggctctgcgttccctgtctggcaccccaaagtccatgacctccctatccccacgttcctctctctcctccccctccccaccctgttcccctctcatggctgaccccctcctggctggtgatgccttcctcaactccttggagtttgaagacccggagctgagtgccactctttgtgaactgagccttggtaacagcgcccaggaaagataccggctggaggaaccaggaacggagggcaagcagctgggccaagctgtgagtacggcccaggggtgtggcctgaaagtggcctgtgtctcagccgccgtatcggacgagtcagtggctggagacagtggtgtgtacgaggcttccgtgcagagactgggtgcttcagaagctgctgcatttgacagtgacgaatcggaagcagtgggtgcgacccgaattcagattgccctgaagtatgatgagaagaataagcaatttgcaatattaatcatccagctgagtaacctttctgctctgttgcagcaacaagaccagaaagtgaatatccgcgtggctgtccttccttgctctgaaagcacaacctgcctgttccggacccggcctctggacgcctcagacactctagtgttcaatgaggtgttctgggtatccatgtcctatccagcccttcaccagaagaccttaagagtcgatgtctgtaccaccgacaggagccatctggaagagtgcctgggaggcgcccagatcagcctggcggaggtctgccggtctggggagaggtcgactcgctggtacaaccttctcagctacaaatacttgaagaaacagagcaggatgttttcaccgagaaagcctcacctgatatggatgggtacccagcattaaaggtggacaaagagaccaacacggagaccccggccccatcccccacagtggtgcgacctaaggaccggagagtgggcaccccgtcccaggggccatttcttcgagggagcaccatcatccgctctaagaccttctccccaggaccccagagccagtacgtgtgccggctgaatcggagtgatagtgacagctccactctgtccaaaaagccaccttttgttcgaaactccctggagcgacgcagcgtccggatgaagcggccttcctcggtcaagtcgctgcgctccgagcgtctgatccgtacctcgctggacctggagttagacctgcaggcgacaagaacctggcacagccaattgacccaggagatctcggtgctgaaggagctcaaggagcagctggaacaagccaagagccacggggagaaggagctgccacagtggttgcgtgaggacgagcgtttccgcctgctgctgaggatgctggagaagcggatggaccgagcggagcacaagggtgagcttcagacagacaagatgatgagggcagctgccaaggatgtgcacaggctccgaggccagagctgtaaggaacccccagaagttcagtctttcagggagaagatggcatttttcacccggcctcggatgaatatcccagctctctctgcatgacgtctaatcgccagaaaagtatttcctttgttccactgaccaggctgtgaacattgactgtggctaaagttatttatgtggtgttatatgaaggtactgagtcacaagtcctctagtgctcttgttggtttgaagatgaaccgactttttagtttgggtcctactgttgttattaaaaacagaacaaaaacaaaacacacacacacacaaaaacagaaacaaaaaaaaccagcattaaaataataagattgtatagtttgtatatttaggagtgtatttttgggaaagaaaatttaaatgaactaaagcagtattgagttgctgctcttcttaaaatcgtttagattttttttggtttgtacagctccaccttttagaggtcttactgcaataagaagtaatgcctgggggacggtaatcctaataggacgtcccgcacttgtcacagtacagctaatttttcctagttaacatattttgtacaatattaaaaaaatgcacagaaaccattgggggggattcagaggtgcatccacggatcttcttgagctgtgacgtgtttttatgtggctgcccaacgtggagcgggcagtgtgataggctgggtgggctaagcagcctagtctatgtgggtgacaggccacgctggtctcagatgcccagtgaagccactaacatgagtgaggggagggctgtggggaactccattcagttttatctccatcaataaagtggcctttc

SEQ ID NO: 2064 - DNA, 5245 bp, Homo sapiens
tccctgttgttctaaattcggcattactagtgcatgcgtgcatccggggaaaaggaacaaggtgggagaagagagagaaagcgaatacccgaggccgccagcatcagtgggtgcccgcgctctcctcctcgctctcgtcctctgccctccgccctggctccctgcccgcattccctgggagcgcagccttgccttagcctgggagacagctgtccacagtgacaggcggccattgttctcggccgagccagcaggcttccggccggtggcagctgctgctcctccgctctgcggccccaccaagggggcgccgccaccgcccaggccctccccgcctgatgggtctctgtccgtccacgcgggagacagcgccacctgccggtgagaaggagcgttgctgcgccggcaccagcccagtcctacgctcggggctcctgcaggcctgggaaggagggagggcgcagctagaaggaagtctcgcctgcccttgcttccccgtctgtcagagtgcctcgcatgcaggcctgcctagcggccttgatcatgctctccctgtcacggaagtagaatgtagtcaagtttttggactccaagccattcttacaaaattgcgtcagagtggggattgtattataagaattgccactgaagagcagcgagtggctgaaacctctgtgtggctgccagtcagcccctccccggtgactggatcagcgaagaatccagaagcgaggttgcgaggctgcagcccttggcatggggagtccgtgggctgggcagcactgcctcagccgctggcctttcctgagcagagtctaggctaagcggctgttggaaatagcagtagcacccggggcgagaccgtgagccacagcggcggccggagtctcccccagcccgagctcaggcctgtgctggatgcccaaagcctggcacagagtttctttaaccgcctttgggaagtcgccggccagtggcagaagcaggtgccattggctgcccgggcctcacagcggcagtggctggtctccatccacgccatccggaacactcgccgcaagatggaggaccggcacgtgtccctcccttccttcaaccagctcttcggcttgtctgaccctgtgaaccgcgcctactttgctgtgtttgatggtcacggaggcgtggatgctgcgaggtacgccgctgtccacgtgcacaccaacgctgcccgccagccagagctgcccacagaccctgagggagccctcagagaagccttccggcgcaccgaccagatgtttctcaggaaagccaagcgagagcggctgcagagcggcaccacaggtgtgtgtgcgctcattgcaggagcgaccctgcacgtcgcctggctcggggattcccaggtcattttggtacagcagggacaggtggtgaagctgatggagccacacagaccagaacggcaggatgagaaggcgcgcattgaagcattgggtggctttgtgtctcacatggactgctggagagtcaacgggaccctggccgtctccagagccatcggggatgtcttccagaagccctacgtgtctggggaggccgatgcagcttcccgggcgctgacgggctccgaggactacctgctgcttgcctgtgatggcttctttgacgtcgtaccccaccaggaagttgttggcctggtccagagccacctgaccaggcagcagggcagcgggctccgtgtcgccgaggagctggtggctgcggcccgggagcggggctcccacgacaacatcacggtcatggtggtcttcctcagggacccccaagagctgcgggagggcgggaaccagggagaaggggacccccaggcagaagggaggaggcaggacttgccctccagccttccagaacctgagacccaggctccaccaagaagctaggtggtttccaggcccctgccctccccttcctcccatccttgtccttctctccctcagaagcctcaggacccaacaggtggcaggcagtggacagggtgcccgccccacagtgctttccccagcaccccagagccagtcgggacaccccccgcagcccatcctggtggctgtggaactgcactgggtggcgggcagatggtggaaggcagcttaggagacctcaccaaagagaagatggaccggctcttgctcccagctcctattaggcccggggtgggaccagaggtcataggtgcccaacggcagccaaaccggcgacgcacatgtgtcttttgttggtgtgtttgtttttttccagggaggtctaattccgaagcagtattccaggttttctctttgttttatcagtgccaagatgacctgttgtgtcatataatttaagcagagcttagcatttattttattctttagaaaacttaagtatttacttttttaaagctatttttcaaggaacctttttttgcagtattattgaatttattttctaaatcaggattgaaacaggaacttttccaggtggtgttaataagccattcaagtgccttacacagctttgaagaaactaggactgcagtgggctcggataggcccattgaggtttttagaaaagcaggatttgttttgttagggaggcatgattttggtgagatctttctggaagagttttccgcctctttgtgatgctgaacacccccaaggttctcccctccccccgctgcccaggtgactggcaggagctgcgactgccacgtagtggtgcctgggcccgacagcggggctctgggcatcccgggtgaccttggcccatctgcctgcattcccacccccttgggcctggctggatcccaggcagagggaccttgctgctgtgtgattggaacattcccaaatatcttgtgaatttgtaatcaaattggtctcattgggaaagactcttaattaagaggctcaggcaagcacagaggcagcccgtgggtctctgtctcagtctggaggcagcagggatgctgctgggagtccatggcacaggccacagcccctcaccttgccgcggtggctggcagcacgcctgccttgctctgccccatgccctgaacaggcatgagagctccacgtcccctagtgcaccctgagagggggctcacaagtgaccgatcctgggtgcctcagggagctcactgagggcgtgcaaagttgaaagtggcaaggctgggggagggtgtcgggtagagggaagagggcagggggctaggggaggactcagaggccatctgcagggccaagccacaggaagggctgagctggaggtgggcagggctgctccaggcaggtcagagcagtgcagggggaggagaggagaaagggaggaagctgggctgtgtggtccccatgaaggcattcagagtccacctgcagacagcgagagccccaggaaggtttgcacagctgtgccccaagcaccttggcctcctctcagctcgccgaggaggcacgctagagccgccttcccggtgggagccctctgtcccacagggagcggggagccagctttgctggggccctacctgcatgcccagccttacccctcattctcacagcacagatgaggttgagaccatgcagtcaatgcattgcttaaggtctcttatttacaaaaaaaaaccttaaacatagtcgctgtcattcagacattcagagaatggttggccacaaacaatgaccaagtattgcttggcttaacttgaaggcctgctgtctccttctgggggtcagggacgcagctccaccctcaccactagcccaccctgcccgtgggcataaccttgacgaagagagagaatgattggcatctgcttttctcttttctttgctaataattctgttcctggctgccgagagtgaagtttcaccatgtggaggtttggctcctatcacctggtggtctgattcataccctagcctgaggctccactggaagatctcgcagcctcagtgtatgggaaaccctttccccaggcttgtcccagcactgccgctccccacccctgagccaggatcccagaggatggccatgccccgtgcctggcagaggtctggtgccagcactgggagctgctccgcccttgccttggggccgagggagccctcgtccacccctgcacagcagctgggcacagaggagcgctcttccatcttgaccaggactgcaccaagaagcaccaggtgtcttcagcctccaacctccggggcgaccttctcttccagccacagtcccatgagggcccctagccagggacactggtctgtaaattgtaatcctttctccagcccagctctccacttgttccttgtgtgagctgagcaggcagtgcacctctgagtgtcccttttgtaaggcccaggggttgcactgagtctgcagaggccgcgacctcctagaacgctgtgggtgcaggtgagccggcgtgtcctggggagatgctgccagcacacaggggccctcctgctgccagcaggttggggtggttaagtcttattagtgtctattcttaaaattaagtgggctggagaagaatggagctccacatgccagcaccgtatatggaatacaaaagctggggaagcagggcctgccttacaggtgtggctgactctgagcccaggcctgcaggggtggagggcagtccctcagaatcccagaggcagtcccagcctcagaacccaggataggaaatgggtgtgtttagtggggaaagggacggggtgcagacggcagggccagtatggggccccctccctctcctctcctctcctatggtgagcccagcgtgggcaccgggccgtctcagccatgttcccagggctgggaggacagctctggcccttcttaggcctagcctcgtcccaagctaaatgtaagccagttgggctgtgttaaaggaagcagtgtttttggttcgattctgcctctgtagctcaaggggggcagcccccagagtcctgtgcattctgccaaggctccatagctttgccaaatgcacggagctctgccattccggtgcagtgcaggccttgcgaagggtttatctgcgttcgtctcggtgggcttctcctgcatgggagttgtgttcctgtgcaagggggagctttgctccaggacaggatgactgtcttccctattcttagggacaagtcccaagatgccagaaaggcagtctcccaaggacccaccatgcagaagtgtcaataaaccacaagttctg

SEQ ID NO: 2065 - DNA, 4148 bp, Homo sapiens
aaagatgtcctcccctgatgccacatcctgttccaatgatcacgccttctccagttcccttcacagccaagcttctggagagcagcttctgcacaagctgtcttctattcctctgttcccatccatgttccagtccattccaggctggctcccatcctgattgcctcacagaaactgttctttgcaggtccccagccaagtccttattgccacctccagcagcctctttctgtccccacccccttggacctgtcagcagcattcgaggcaaccgacagcacttgctgagctgctctcctgtcatggctggacacgtggtgctgggcaggcttgcctggtgaggtgtgggcaagctggactccgtcttcttcatccagtgcctctggtcttaggcctgggtgtttgtctcctctctgtgaagctctatgcagaactgtgccaaggcatcgtggacatagccatttccagtgtcttcccacccccagatgtggagcaacctcagacccagccagctgccttcatcaagctgtgacagagggcactccctgctgccttggaaaaagcacggggtcctgctccagggaatggtgaaatgactggattgctctttatccagcccacagcaggggaaagaaaggcaactcgcaaagatgagatggaagaaggcacgtgagcagaggaggcagctcccaaagagagggctgctcagggggcttcccaggtgtagctctcagcagtgctgttgagacttttgaaaacaactttggtacacaaaggcagctttgtgagcagagctccttcccctctccccgggaacggcagggcactgggacctctggtcggtgcctcccacccactgcagccctagtgccttagctccatgcccggctgcagccccactgctctggactatggattggacgtcagagcatattggaggttgcctgtgtgttccccacccatcccttcggtaacactctgccacactaagctctgtacaagcatgcaccaacagtccttagttttgtgctgtgcactggcctctcggcaaaggtggtttccctcatcaccttcctgatggtgtttggtcagtcacctgtcagggtttgtgcgggttgggccccaaaacagcatatgctgctctaagtctgctctctgcatgttttagaaacaaagtggcaagtctgccctgaacctgtaagcatcaaataagcatgagagagaaaaaaacatgatatattgctttacttaataggttgaatatggtaggtctttgaaaatatgatgattcaattttctcaattttctttgctttaaccaaaattctaaatgcagttttgcctagttccctttttttttctttttttacttttttttaaacgtttgtaaaaacctctttgaggatgaggagtcagtaaaattccactccccaagtggccctgccccagacaaaggttgctttccccctttttgttctttttatgccccgaagcactttctgcagtagctagagggacaggtttccttccaggaaggattcgagttcctgtgcctgtgggtattaggagagtatatatcctgcctgaatggggaagtcttctaaaatgggaaagaagtggtttcatctccacacagtgtcttgtaaatctcaacaaatgtgtactgttagaagtggcttccgcttactggattaactaatactttataggcttttcaggaggccacatcactagcagtagggagaacaagatgtcatttgtgttcagtgtaagctgagtaaacaggcccttcctagagtgtcctggaaatcacagcaacccattgaaaactgccctccccaccagaacgtgctacgttctttcttcatgcctatgtgtgctccattcctcatttctacttggctcaagaaaacatttctgcagtcaggtgagacttttacaaaagaggagaaaatcaatgcctccttgaacatgatgagatgtgagaacttacaatgaaaaaggcaataatgatagaaattatttcttaggtacagcaatagttgataggatgtgagggtgttaccttggggtgaagtggagaaggtcccaggtgaattggctctcatggaaatttggaattacgaaataaacgtcctgggggttacccagaatacagatttaaaagtttgcctgtagagcaaaataaaacagtcagttgtagtcattaatccttgaggcccaacgcagccgatgggttggtgtttgggaaattctgagatgggagtgagatctgatcggatcctgggaagatgtatacccagttagaacgtgtagggttctgggtccctggcaagtctaggtgggcgggtgacagggaaagcatgggcatttttgtattgctgtcacatgctaacagaggtttgtaattatcttttggacccaaattatagagacattcacgagttttctagccctcacagtaacagagctaagaattcagatgtcaggaagtctgtgaatcttgatggattttctgagaaacctgactcaatggcatatataagagggaagtaagacttttaagaaaagaaaaagttatgcctcattcctcatgtggcttccaataagtatcttaggaacttatttcctttttaaaaaatattttttaaatttttaaaatttgattttaaatttcaaataaatttaaataaattttaaataaattttaaataaaattttacagagacgtggtctcactatgttgcccaggctggattgcagtggctattcgcagttgtaatcatagcacactgcagcctcgaatttctgggcttgagcagtcctcccgtctcagcctcctgagtagctgagactacaggtgcacaccaccaagcctggctttatgtatttatttctgttcatgcggaatgattggttcagaactgttcctttcccttccatgatgtccttgacacagaaggttatgcctggctcccagtcaggcttcatacttttggtccatgtaagtgctacccgttgctgggggaggagtcatggtttatttggaaatgtcagttgcaatcatggttctgtcatttgactgcacagtatcagaggagcctgttaacctctctgtgccttagtttcttagcccatgaaagagatcattgcctgacccagggactacctcaagggcttttgatgaggacaagtgacagtaggaagatgcaagagcctttagtaccaaggttctcaacactgactacatgctggaatgactgtgaagcttttaaaaaatgttagtgcccactcttcccctgtacccccggacagttaaatcagaacctcagacagcaatatgccttgagatgccttgaaccatgcttgagaaggaaggacaaacacattattatcttggaagaattgcataaggcttatgacttaaaaaaaaaaattctttttggaaacacaagcatttctttaaggatgaccggatgttgccgtatgtatttatggcacaagcaggtgttgtctaagcagtttctctgtttgcttgtcatagcagcatttggaaactcaaacatgctttcatttacataaatagtttatgaagctttgacaacaaatgtaaacagacacgaaattataaatctgctaaatatgtattaagggtattaattattgaaagtccctttccccaaaactcaactcctatggcaattatgaactccattttaccaagaacatttaagtgcctcagcatctgtatgatatagtggagcaggtgctgacataggtaccagctgacatgatgtgtcactagctctgtgggatgattgccacatacatggaacacctgggagtgctggaaatgtactgggatcgaagtgacaaagtgtgttttcattcacagtggaggctacatcaagcaaggggaggtccagccctcttgcaagtgtggtgagaggctctactagcaaagacatgggcaccggagtaggtcccgtgtagcatgcgggtgctgtagagaaaattcagtgacgtacatggctctggttctggacacaaaatctgtactggagaggaaatgactgctgaaataaggcgattgtatgaatatttaaaatgcctggaacactaaagtaaagtaatgatatttcaagtgtt

SEQ ID NO: 2066 - DNA, 2573 bp, Homo sapiens
tctgctgctccgcgtgtggtaggagctaccagtctggggtccgggctgggcgcattcatgatgcctgcctggggtctgagcaagtcctccccacggggtctgagcaagtcctccccacggggtctgagcaaatcctccccacggggtctgagcatgtcctccccacggggtctgagcaaatcctccccacggggtctgagcaagtcctccccatggggcctgagcaaatcctccccacggggtctgagcatgtcctccccacggggtctgagcaaatcctccccacggggtctgagcaaatcctccccatggggtctgagcaaatccttcctatgccgtctgagcaagtcctccccatgggttctgagcatgtcctccccacagggtctgagcaagtcctccccacggggtctgagcaagtcctccccacggggtctgagcatgtcctccccacggggtctgagcaagtcctcctccccacggggtctgatcatgtcctccccacggggtctgagcatgtcctctccacggggtctgagcaagtcctccccatggggtctgagcatgtcctccccacggggtctgagcaagtcctccccacggggtctatgtcctccccacggggtctgagcatgtcctccccatgggttctgagcaagtcctccccatggggtctgagcaagtcctccccacggggtctgagcaaatcctccccatggggtctgagcaaatccttcctatgccgtctgagcacatcctccccaagctgtgaccgagtgtccctcctgcaggtggaggatgttgctaggatgcaccttgaaggcaccccagcctcgccggagcgccccctcctcgtagcctggggtgtggctgggtggtctggggtcctgggtgccttgtgatgctggccccagggtccactcagcaccgtcctggtgtcgtcatcagctggaggcttcccggggcctgtgctgggggtggagagcagggagaggcagcagggttctcctcagggtggggtcgctgggaagcaccatcccacctgtcagactggccttgactgtagacaccccaggtgacctggaaggacagacggaccccaggtgatgagaaaggaccagagtctgacctctcacccctcctaagctctgaactcccgttggcttgcctgacctccaagtcctcctggggctgaaccctctacagatgcccctcctgggccctggggtgggcccggtttagctctccattgtggctgaagcccccggggcttcagtgctggcttgaagagggggtggggctccccaggcctggggattggcagttttttcctcccctcttcccaaactttcagactggaccacttaagaataatgaggtccaggtggttccgcttgagcctggatcctcactggctgtgggactgagcttcccctgccggtcccacctcccaccgggagcagctaatgacagccagaggctggaaggtgaagctccccttggctgtcaggcgggccgcagggcaggggctgggcaggccaagggcgccactctcctgcccaggccagggcacccgatcactgcaccacaccccttgtggccgtctgtccagccagggccctgctgcaggtgcttcccgtgggactgtagggagaacaatcaagacttctgcctccttggtcgagcagggctgcctccccatctcatctactggcaaggaggctgggcaccttcagggagcttcagtttgggaagagggaggaggtctgaggtggatggtggcgatggctgcgcagcagtgagaatggactgagtgccactgatgtgtgtgctccatggctccgtggctccgtggctccgtggctcagtggctcaatggctataatggctagttttgttacatattttcaccataataaaacaaaacatgtccaaggtgctacaaggagggaggagcccctggagcacccgcctgccatctcccatctgccaggcagcatccctccactggctctctgggaggggttcgaggcctccagcctccctgtggcccccatctgcctccaggagatttgttccctctctcctgccccgaaaccctcgaggcagccctgctcttggtcactgcagaggaagtggcccaggcttggcccaggccagctgtggcctccggaggcaagatgtggggactcacagtgttcgaaggccacacccccccgagcacatgggctccagtgcctctgaggcaaagagcaggcagcaccgtgcgcacagcagtgggagacacagcacagccaccagggcagcccccaggcagacggcgggcctagagagggcgggatgacacaagaaaggttctcctttggagacggcgaggtcaggcaggtgggagagggttcacggtgcttgaggtgcagagagaggatggtggaatggaaaacgtagggtgacttgtcggggacaggcccagggccacaactcgggcaggcctattgcccgagttttgggtcccatcctggcaggcaggggagagaattctgaattttttaatgaaacggatagttgagggctgg

SEQ ID NO: 2067 - DNA, 2563 bp, Homo sapiens
gtgaaatgttaggctttgttgatgaatgtcatgaagagaatatgtacctttctgttgccttcacactctacctctggccctctgtgctgttcaaatgcccatcttcctgctacctcctctaccttgaaacattgcagggcttggagggagcttgttctaaagtctaagaagagctagatgatttgtaaaactttcttcagaccagctgccactgacagcctgcccggagccggacatggggcaggatcgtgccgggattgctgtgactggatggtggaaaattttgcagaaacatctgttctgtttggagggtccaaatagttttaaaaacatgtgcttagccaaagctcatatttcacaaaacctttgcaaatatctagaagcttttcttcttttctatgtggacgtggaagcaaaggagaggaaaatgtggccacatgtatgttttcaacttcttatttccaagtatttggctttttcagggatgagaaccaatcagatcactttcgtgaggtatgcagtgcctctagactgttctctctcttttggatagatacatgaagtcttgaagaaagaaaaatttctgtaaacacaatgggagagattacagtaatgctatcaagctgtagttttaattgcttgaaaataaacgaagaaaaaggttcacagctgtttgagagtgaggaccaatcaagggcagagcaacaaaaaagctcccctttcctgggatgactgccaggactcagctctccacatctgaagacgttttacaaagtgcagtgtgccgtgagcagggagagaaaggcatccagagaaggcgcgggaggacttgagtgaggagccaggtcctggcttcatcccagtctgtgggcctcaaggtcaggggagtaacgagctcatggccgacagaccgggatgacagggacttcttaggggacaagtatgagtttgttcaaacttgggggcatgagtttttgagaacacggctcaacactcagcatggtgaatgctgcagacctagcatggagccgtacctggcacctccaggagaaaaaagcgccccaaactctaaagctaaaggcctctgcacatgattgcctgtgaaccagagggttggagattagttttctccccccttaggtcattatgtatgttccaagttgggcatggagagcagctcttctgccctttgaacctggtacagacccaggaaacctgggcctctccctcggtacctctcattacaggtgcatggctcaggctcatggaacaaatcagctgacttttcctttgtttcttaatgctagggagcaggcagggagctaaaggctgaaggaagttgaggcagttgtccttaagactatctttagtgaagtgaaaggtgcagaatctgccatttgtcatgtcaccttagaacaaggcaaaatccccagggtacagacatccaattgatgtaccatacttgatctccaggttaaaatataatacagctatgatgcatgagtctcattgtgaaaacagctgattggtgaggaaggtcagttctcactaaattggagagatgaggccgtgagatcaagaggaagcagcgctgagctgggagtccagatagctggctctgctctctgctctgccaccagctgtggtgctggttaagttactgggctcttccatcccctctctgccttgtcagtaggcagattggatgatgtgtaagttcctcctgtgctgaagatccttgaactgaggacctgatttccagagcccagggaacatcttagaaatggagtaaattacatgagattttcccaggggaggccttgatcacattttgtacaacattcagtcatgtatggttgctatgataccaggcagcattttgaaaccatacacagggatgagtctttcagtcagtggcctaaaccatctccctttgctgcagagccagcttttctgcaattccaggggaaagtatgggcaattgttaataccccaaagattttatatgattttaaaacaaagtggccaacagtgtcaacattgtttaccagtgactcgtgtcttttttttcctttgtcctcctccttttttaaaaaataacatttccttggcctgttaatttctctgttctatgttgcttgtatggaaaagtatctcaaaacctataatgtaaacctctcaatttgctttacttttcctgctcttgagattttcatgtggccctgattaaaattttaatttgtcagtagagtcaaatcttattagtgccattccagcaattgggcactgggatcatttgcaaggtcttcagggaagtttgcctttgcacagtttaggaaagattctgttaattaggtgaatggtataattgatacgacaagaggattgtttaacttaagggaagcaatttattatgcatgcatgagaagcttctaggtatttactgaccaattgcatgcccattacatatcctttttgtattttagagataataatcatcttatattgtttacctcctagcccagtttttggcacacttgaaagtactacaaattgtctttat

SEQ ID NO: 2068 - DNA, 3219 bp, Homo sapiens
catcagtaaaggcacggaggtgggaaactatgtagtgtgcaaaggaaaagtcagatgatggtgatgataatggagagactgacagcagcagacatctttttgagcacttagtgtgttccaggtgtgtgtaccaagcactatcctggctgaatctcatcagattggatggcaggaagtaaaacttcagagtccatgtttccaatgccgcagctaccctgtctctcatgaatgaggagctggaggagcttggattcgttgcagttttttttttttttttcttttttttttcaggacggagtctcgctctgtcgcccaggctggagtgcaatggtgcgatctcggctcactgaaacctccacctcctgggttcatgcgattctcatgcctcagcctcccaagtagctgggatcacaggtgcccaccaccacgcccggctaatttttgtatttttagtagagacggggtttcaccatattggccaggctggtctcgaactcctgacctcaggtgatccacccacctcggcctaccaaagtgctgggattacaggcgtgagccaccatgcccagccagattctttgcagtttaacacgtttccagagagtgtgttctaggtcaggccctggtgctggaagcagggacccatgagggccaaggcctggtccttgccctcaaaggctgacccagttatagtccagggtggtgaggggccagctggggctgctcatagcctctggcagccaaagtggggtattgaggggctggggaggaagcgttgtggtgggggggcctgcagtcctaggcagggtagtatgaggcccagcttcattgctcagtagtcacatcatctcaggcaagccacttggcctctctgagcctcagttgcctctgctcagaagtaacaacctgaacttggactatcagggaagcccagggcccacagcttggtcctaggaagggcttagcaaacgggggtggttgtccttcttggaagccacatttgtttgcctggtgagtggtggagggcactgctaggcctgctagggctgacacggccagagtcagatgacctcatctcacatccagcaggtgaaatgcagtctttgatcccttgaaacccaccctctaggaccaaggtcactgcagtattggataggacctcagggagttagcagggggctcatggttaagagtgtgaactacggcttagacctacagggttccctgcccagctcctccacaaaccagctgtgcaaccctagacaagtgagttaatgtccctgggcctcagtttcttcttagtaaaatgtgtgtagccatagagggctgttatgaggattcagtcaaatgacacatgatgtcttgggcacacctggcgtggattatggcgcctgtaggagcaggagggcttcctggaggagggggctagttgaacagagtctagaaagtatagattgggaagagcactctgggaggcaggatcaccatgtgcaaaggctcagagaatgccacccactacctcctggaaatcaaggggattctgtgtgtccaagggcattggtggtctctaggcccccgacctgtgtctgggaggtgtcaaggggaagccagatccgaggcccacacttgcatgttttcaggtgaggtccagagatatatccagagaggagtggaagggctcggagacctacagccccaatactgcatatggtaaggccccagctctgagcccacctgcaggagcttcagcccttgggcccagcctccacatgaccctcccatatcccagccatggcattctggctgggaagccttctcttctgcccctgcctagagggttggggagcacatgggcccctagagagggagggacacctcgctggtacagggatgtgagtgcagaccctgccatcccatcctacaggtgtggacttcctggtgcccgtgatgggctatatctgccgcatctgccacaagttctatcacagcaactcaggggcacagctctcccactgcaagtccctgggccactttgagaacctgcaggtgagccggacatcctgccctgtcctcccctggccacagacttagtcttaatccaagctgattcgggtggctagtggccactccctcttgtgcagggcctcaatccccaggcaccacccctgcaccaacagggagagaattagagctggggtggggttgggcccttattgttcaaggggatgctgagtgccaggctgttagctccagagacggcccagagaggccgagtgcatcacgcagggtcacagagcacactaatactgtctcagccagagctggggaagtagctgctggccaggagcataccatgtagggaggagaccctgaccttacctgcaccttctgtatccagaaatacaaggcggccaagaaccccagccccaccacccgacctgtgagccgccggtgcgcaatcaacgcccggaacgctttgacagccctgttcacctccagcggccgcccaccctcccagcccaacacccaggacaaaacacccagcaaggtgacggctcgaccctcccggcccccactacctcggcgctcaacccgcctcaaaacctgatagagggacctccctgtccctggcctgcctgggtccagatctgctaatgctttttaggagtctgcctggaaactttgacatggttcatgtttttactcaaaatccaataaaacaaggtagtttggctgtgcagttcccaccagtacttctgtctgggtggataggggaaggggggcaccccagccaactctcagccagcacccagcctctctgggccatgtggtggcagaaacagaaggccagacaggctccctgggaaccagggactctggatcatgaggcacttcacctgtctgaacttgggtttccctcttttaaaaaaatttttaggcggggcgtggtggctcacacctgtaatcccagcactttgggaggctgagacgggtggatcacctgaggtcaggagttcaaaaccggcctggccaacatggcaaaaccgtctccactaagaaatacaaaaattggctgggtgttgtggcgggcgcctgtgatcccagctactcgggaggctgaggcagggagggttgcttgagcccgggaggtggaggttgcagtgagccgagatcgtgcctgtgcactccagcttgggcgaaggagtgagactccatctc

SEQ ID NO: 2069 - DNA, 3341 bp, Homo sapiens
gaacgaaaaccaccacagcgtcagaaaggagcgggtgaggggcgcggcggttgccagggcatcttcttagcgtcgggcagggctgatgagtcaactagtgacagtggcgaggaagtgggggcgctgagcaagcgagaggaaggctgaagggagctaggaaaagggcgctgatctctgcagcctgggagggcttttgtctcccggaggaaggccagaagagatggggtcccgagggcagggctcacacagcaagaaaacgaggagcatgcctgtcattttgagcccacagagaacggggagcggagccactggaggaccggctgctcgggcttattcggtagccgaggcggttaaacagttcagggctggaccagccgggactggagcagggtgcagtctccagggttgctgggcagcaccgagaccctttgagcaccgaacgaataaactacgggagctttccacacttgcacattgttcccgcgagttgcagacgcaggttcctgatgctagcgctcattccttggcagtcaccctcagtgaactacacagttgccgtgaccttcaggatgaatgcttggattccaggtgcaagtaggtactggaggggagcttcctcccctccagtcactgaaggtccctcagaaactcaggaaagatgatgaaagagcctagaaaattatttctactcctgaccacccagtctgtttctgtgaccctttgtagctgcgaacagtgttcagtaagtcataagatctggctttaatacccaggctctgccacttgctagtggtgtgagtcatgggcaagtcacttaaactctctgaacctgttttctccttttttaaaactgaggtaatacctcccagggttgtagtgaatgcacgttgtaaatgacgagctacattcctcatcctttaccactagctggattccccacaccttgcataatgtctggaacattctggtgctcagaaatattctcttgtatgaatgaaggacagttgtgcacttacttcctaaagtttcattaactgacagaggaatgtctcgtttgttctttcaggtttgctgagggccccagaaggctccttccaccgtatcatagtctaataaataattttgtcaagccagagaagctaacaaaggtagagacaaggcttaaagaaaagatagtggcggaaatgacggatctgaacaagcatataaaacaagctcaaacccagcggaaacagctactggaggaatccagggagctacaccgagaaaagttacttgtccaggctgaaaacagattctttctggaatacctgactaacaaaactgaagagtacacagagcaacctgagaaggtatggaacagctatttacaaaaaagtggagagattgaacgaagaagacaagaatcagcctccagatatgcagaacaaatttcagtgcttaaaacagcgctcttgcaaaaggaaaatatccaatccagtttgaagcggaagttgcaggcaatgagggacattgctatattaaaggaaaagcaggagaaagaaatacagacattacaggaggagacaaagaaagtccaagctgagacagcttcaaagacacgggaagtacaggcccagctcctccaggagaaaagattactggagaaacaactgagcgagccagacaggaggctactgggaaagagaaaaagaagagagcttaatatgaaggcccaggccttgaagttggcagcaaagcggtttatttttgaatactcctgtggcatcaacagagagaaccagcagttcaagaaggaattactgcagctaattgagcaagcccagaaactaacggctactcaaagccacttagaaaacaggaagcagcagctgcagcaggaacagtggtatctggagtccttaatccaggcgaggcagagactgcaaggaagtcataatcagtgcctaaatagacaggatgttccaaagaccacacccagtcttccccaaggcaccaaatcaaggattaatccaaagtaacttctaaaataacactgattaaataagaactggagcaagtactcttaagtgctacattaacctggttagaaaggctgttggattccagattgctattgtaaaatctccatcatgatgtgttggagtgaaggattagatggttttatccaacagtcctactagatatttggtaaccagcttcccttaactagctttttctttaaatactcgttaataagctattccacaaacctccagttaacctaacacatgaccctaacctagccatttaccatacatcaaactagctaaaggaaaccaacctaaggaagtgaaaacagttgtgatttatttcatctagctaaattgtatttctttatagagaaagtacctttaaggatagcattccaaatagactttgaatagcgttctgccagtttatcctcattccttttgaccaacttagcagacaaaagcagtttttacaagctctttgtgagtttgtgccagtgaccaggtagctccttctagttttctcatgagtgaaaaagcattctgataacagcaagtccagtaagtgctaggcagagtgacctttcatctgatgctaagcccctacaagtttgagaaggtaagaaaagatgaaggagacatatattaggtcagctcttacttttgaaaatgttttatttgaagaaacacctgtagcattgaggtgactgaatgcctccacttatttcaggaaaacgtatccaaaaaaagttgaaatatttggacaactttttttttaagtgccatcgatttccctagcagcattctaaaagatagcaagtaaaatgatgtttgttatcctaaatgctttagttttaggtcatttattaattttcttacaggtgcactttctagtacatgaagtatcctttgtaattaatgtgtgccatatgtttattcccatttagtataactataaattatattttaaattatatatttttaggatagttatatttttttttgggttctacgacattgaagttggactagtgatttatttgaatgctgaatcctagtataggggaatataatcttatattttaacaggggtcctctatgggaaaataggatgaactttgtttcccagaaattgttaagtgatgaaaaacttcaaaataattttcctgcattttctgctttatttacatgtaaagtgaattccctgaaaattggatttaaaaagcattctccttcaatgtgcctttaccttggagctttaacaacttttctgttaaatatgtagttttttattaaacaatgttattaaataaaaacatttatccactg

SEQ ID NO: 2070 - DNA, 2517 bp, Homo sapiens
aaaagacccatgagacctctcctcgtctgtgcacagactggtggccgactctggagcccaggctgttgcttcctggtctggtgatgaatcctccatagtctggaaaggggtctccagtcacctctcatgaggagacgcgtcccactgcctcattgaggtggcctcagggtgaagaatcaggacccacctggtgcaacgaataaacccagactctcagcatcgcgaggagaaaaagtcttgcaacaccgtggcgaccaagtaactctgtgcacatactaaggtctcaaaacacaggcacggcccctggagttcccagtacatcaacatcagcctggggatcatgtcctcatcaaaagctggaaagaggagaaactcgaaccagcctgggaaggaccttacctggtgctcctaacactgaaaccacagtccagatagcagaaaaaggatggacccatcacaccccagtcaagaaagcatcaccacctccggagtcatgggccgttatcccaggggaaaaccctaccaaactaacgctaagaaaagtttaactctccttcatctattctattactccttcttctttcctcgttctatggctgaccacctcattattaatgtaaccaggtcaagctcaccccaaactattaccttcgatgcatgtcttgtcataccctgtggagatctccaaagtcaaaagcaactctcagactcagagaagtatctctgcccctttaagataaaaggctccccctatcaagacccttgttccttaacgaatgcaggaaaacaggtctgccatagctggaatgatgttgtgtggacaactgaatatcaaggctggacctcgtcaaccggtggttgtatgtccttaaaaccatacattcacttcactaaagaaagtaccccccataattgccagtataaccaatgtaatccagtgcaaatttctattctcattccaacttctactgaccctaaacctactttaagttgcttatatggcatgggagccgaaatagcaggggcacatcttattggatattttgagatatgttttattactccttcacctcctacattccttctacattatcccccaatgttctgttcttcctccacccaaagataaaaccaaaatagatattgtagaagtaaatgacctaaaacaaactttagcaattgaaacaggatatcaagatgcaaatgcctggatggaatggattaaatattccgtccacactttaaacaaaagcaattgttatgcttgtgcgcacagcaggccagaggcccagattgtcccctttccactcagatggtcctcccgtcgaccaagcatgggctgtatggtagctctcttccaggattctacagcttggggcaatatatcatgccaagctctctctctgctctatcctgaagttcaacaccctgcgggtcagcccccgagggccatccagcttccgtctcccaatgtcagtttcatctcatgtctctcatgacaagggaaaacttggcattccgtggaagcttaatgggatgtagtgagcttaagcccttccaagagcttacccatcagtctgctgttagtcattctcgagcggatgtagcggatgtatggtggtattgtggtggacccttactggacactctgccaagtaactggagtggtacttgcactcttgtccaattcgctatcccttttgcccttgcatttcttcaaccagaaaaagaaaagccacaacaccgtaaaataagagaagccccttatgggtcttttgactctcaagtttatttagacgcaactggagtcccacagggagtaccacacaaattcaaagctcaagaccagatagctgcaggatttgaatcaatattttggtgggtaactatcagtaaaaacatagattggataaattacatctattataaccagcagcggtttattaactacactagagatgctgtcaaaggaatagctgaacagttagggcctactagccagatggcttgggaaaacagaatggccctagacatgatattagccaaaaaaggtggagtttgtgttatgatcaaaactcaatgttgtaccttcatcccaaacaatactgcccctagtgggagcataacaagggccttacaaggccttactgctttatccaatgaattagctaaaaattctggagtcaatgaccctttttcaggatggctagaaaggtggtttggtaaatggaaaggaatcatagcctcaattcttacttctcttgcagccgtaataggtgtagtcattctttttgggtgttgtgtcacaccatgtatccgtgggctagtacagaggcttatagaaacagtacttactaaaacctcccttagctctcctccaccttattcagataagcttttcctcttagaggatcaagtcgaacagcaaagccaagacttgttaaaaaggtttgaagaggaaggaccataacaattgaaagggggaaattataagatacagtaaattcctcttcaaag

SEQ ID NO: 2071 - DNA, 2564 bp, Homo sapiens
gcgatgcccaaatccaagcgcgacaagaaaggtgggcgaagggggagtcgggaccctggggggagctccgtgggctggctacccagcctgcggtgagggcttcggggcggcgggggcgcagattggaacgccaggacatcctcgaggtgttccgctgcctcgctgcgagctggaatgggggcttcggggctgtaaaaccgccagaggtggctgacgcccggtcgggtctggggagcggagactcgttttgcctagtttcaggtgctcttgcaaggccaactgggtcgggaggcagctcctgaacaccgcccccggctatgcctgctgccgtttcggcccacttttcccaacttcggccctttctcatcttcctgcgctcccgccaccctggctgcctttcccttctttcagcacaggtttgttcccgtgtctggcgttgtgtgtctgcggttgtttctgcctggcatgcttacatcttcgtatggtttgcgccttcttagttgtcagttaataggatccctctgagacggggtctcgctctgttgcccaggctggagtgcagtggcgcgatcgtaacactgcaggccggatgcggtggctcacgcctgtaatcccagcactctgggaggccgaggcgggcgaatcatctgaggtcgggagttcccgaccagcctggccaatatggtgaaaccccttttctactaaaaatactaaaaattagatgggcgtggtggcaggtgcctgtggtcccggctacttgggagactgaggcgggagaatcgcttgaatccgggaggcggaggttgcaatgagccgagatcgctccactgtactgcagcctgggcacgacagagcgagactccgtctcaaaaataaataaataaaataagtcactgcagccttgacctccttggcttaagcgatcctcccacctcaacctcccgagtggctgggactgcaggcgcacgccaccacgcccagctaggttttttttgtttattttttatagagaagactcagtgtgttgccaggctggtctcgaacacctgggctccaaccaccctccctgagtgctgggattacaggcgtgagccactacacccgacttgcgcacctcttaagagaccgtttttgaccacctttgctgtggtggcctctctcttaacccggctccctggaatattcaaaaatatttaggggtctggcactttctaggcgttagaggatacagcagtcacaaggaaagcctatttcttatcgagcctaacgttttaggagaaacatattccgcaaaatgctaaaaatcagattgaaaatggggtgaagagatgttgatattttgtatagtgtggtcgggaaaggtctcactgatgaagtgacaaatgagcagaaaataaagaaaggaagcgagcaacctgtggaattgagcagctgtggaattatctgggagaatgctgttccaagtagagggaacctgaagtgaaaaggctctgaaatgggagcagatatgacgtgtttgggacaagaggccagtgaggctggagcagaaggagccaaatagagtttggggagggagttaggcagagagggcaggacttcctcggccttggcaaggcattggctttcctgcccaggtgaagtgagtagcagaggacccatgtgatttacctttacttatgaagggtcactctggttgccttggtgagaatagttggggaagacagggcagagggcaggaatggaagcagtgagaccagcattaatccaagacagggtgatgctggcttgagccaaaggtataacagtggaaatgatgggaagtggcccgctatatttcgtttgccctcctctgctccacttaccattgactgatgtcattgtctttgtctgtgtggtacctagttaagaggggctgagtgcgggcaggttaaagaagagaggcctgggtccctttgtgaaggcgcccggggctttgcagttggagttctgttaagtgtttctggaacgatttgattctgtggaggggcctgggtcaggtctggcaaatgccaaactctgtgggtagagggcaaattgggccccagccatttttacagtagaggtacatgttcctccccagagaggtgttgctgcgtctttgggtccaaattgcaatactggggtgcagatacataccaggagattcagtccccagcctcatggttgcacagcataggccagctagagtggcctctgcatcatggtcaagagcagcaaggggccaggcgtggtggctcgcgcctatgattccaacactttgggagactgaggtaggcagatctcttgagcccaggagttcgagaccaacctgggcagcatggcaaaagccatctctgcaaaaaatacaaaactcacctgggcatggtggtgcatttctgtggtcccagccaaaattagcaggccatggtggtgtgtgcctgtagtcctgtgtgggaggattgcctgagcctaggagctcaaagttgcagtgagcccagatcgtgccattgcagtccagcctgggtgacagagtgagaccccatgtc

SEQ ID NO: 2072 - DNA, 2495 bp, Homo sapiens
gttgagctcctgcagccgccgccgctgcagtggtcgtccctgccctccccggccccggggtgcaccccgcaaggctcccgctggtgtccctggagcatgggaggctgctgagcgtgagtggcggtgtctggcaggagctgcgtggcagggagggcgtccatggctgcagccaacaagggtaagtgccttcctggcgtggtaggacttgcacaagctcttccggtgggccctggtaggagggccattgctgcaggcaacaagcccagagtccggagtatccgctttgcggcaggccacgatgcagaaggatcccacagccacgtccactttgatgagaagctgcatgactcggtggtcatggtcacccaggagagtgacagcagctttctggtcaaggttggcttcctgaagatcctgcacaggtatgagattaccttcactctgcccccagtgcacaggctgagcaaggatgtccgcgaggcacctgtccccagcctgcacctcaagctcctcagcgtggtgcccgtccctgaaggtgcgtcccctcctccagcagggcctggatgggtgtgggagtgagaacatggggtgctcccttacttccaactagggtggatgggcagctcagcaagtcggggatgtggcacctctttgtgagcttgcactgtggcagcatggcaggtcccacactccaggccttgctccctgtcctgaacagaagtccatgagctcatacttccctgtacctgcccatggtgtgatggttacctccgtggggcagtaaccaagatgggagctgctgaggaactggtttgaagcctccagccttccctcctgcctccctaaccctctagaaaaacctgctggagctacacacaccgtgtggataactcctagcacccaccagtcccagaccttgggtttcaggctgctgctcctatcaggctcacttcaggccctgccccatgccccactcccagcctggcagaggctagggtgtcagtttcgtggagctccagcttcagtttcatgtccccgtcaccagcctcctcatgaccttgcccttcaatggattgacacccctcaggcctttacctcttgccatcggatctgctcaaagcctaccctgccctgcccccctcactcctcatcaccgcctctccctgccttccttttgggagaaaacagccagaccttcttttggaagcctgaatcggaccctacttcattcactcttggagccacattggggtggcccacaggctggaggcatgtccagctcactgaagaatgggtttttgagacctgtgcacccctgctagggggaatgggtctctgggctccagaagggccatccctgcccctttcttgggggggcttagcatgcagtccccccatggtggtgggtaggggcccgtgagtgccaggggcaggatcggggaggctgggggaggtgctgaccaattgcccctgtccccgggcaggttatagtgtcaagtgtgagtactcggcgcacaaagagggcgtcctcaaagaggagatactgctagcctgcgaaggtggcactggcacctgtgtgcgcgtgacggtgcaggcccgcgtcatgggtgggagcgtgaggctcctggttggaggagggatgcacaagctcgactgcgagggtttctgtcctcctcagggaaccaaggctgaacaagggatccttgcccggctcaggggttctcaacctccttggcaggtccctacctccagctgatccctgagggaaggggaggggtccccttagtgggccgcatgggtggggccgggggccagcatggcactgacttgcaccctgccttgcagaccggcaccacggcacgcccatgctgctggatggtgtcaagtgtgtgggcgccgagctggaatacgactcagagcacagcgactggcacggctttgactgaggcccgaggccccgcctgccccgggcccctcagccttaaaccccgccttgtccccccgacatgctgcgtgatggtgtggcttcctcgcccctctctggggtgggtgtgggggtggagtggccttgcccacgcctctcacctctgccttcatttgtgctgccaccctgcccctccctcgtcctcctctcccgcttcctcctctctgtgtgcctcagtctcctgccggaagaaatgggttgagcccgaaaggaggctgtctgaggaagggagagggagggcctggggtgggtcccccactccccaccccaagccacaggggctcccaccagggtctgggagaggacggagctggctctgtggcgtcgtggccccattactgctgccttgcttcagccacctctcctgcccctccctagtccccactgctgtccaccatgagtaggagggaggtgcagtccccagcccccacccctcaggtctgtgttacttggtttttaagcgactggttgggatagaaccctaaagaaataaacttccagtggataccgg

SEQ ID NO: 2073 - DNA, 2624 bp, Homo sapiens
gtttgttttttaaacttcgggggtgtggtcgcggcgcctcccctctcggcggctggcagtccttgcctctgccccgccttccagatgctttggagtcatgagccgggagggcgcgggggcagctttggtagccgaggtgatcaaagatcgcctttgttttgccattctctacagcagaccaaagagtgcatcaaatgtacattatttcagcatagataatgaacttgaatatgagaacttctacgcagattttggaccactcaatctggcaatggtttacagatattgttgcaagatcaataagaaattaaagtccattacaatgttaaggaagaaaattgttcattttactggctctgatcagagaaaacaagcaaatgctgccttccttgttggatgctacatggttatatatttggggagaaccccagaagaagcatatagaatattaatctttggagagacatcctatattcctttcagagatgctgcctatggaagttgcaatttctacattacacttcttgactgttttcatgcagtaaagaaggcaatgcagtatggcttccttaatttcaactcatttaaccttgatgaatatgaacactatgaaaaagcagaaaatggagatttaaattggataataccagaccgatttattgccttctgtggacctcattcaagagccagacttgaaagtggttaccaccaacattctcctgagacttatattcaatattttaagaatcacaatgttactaccattattcgtctgaataaaaggatgtatgatgccaaacgctttacggatgctggcttcgatcaccatgatcttttctttgcggatggcagcacccctactgatgccattgtcaaagaattcctagatatctgtgaaaatgctgagggtgccattgcagtacattgcaaagctggccttggtcgcacgggcactctgatagcctgctacatcatgaagcattacaggatgacagcagccgagaccattgcgtgggtcaggatctgcagacctggctcggtgattgggcctcagcagcagtttttggtgatgaagcaaaccaacctctggctggaaggggactattttcgtcagaagttaaaggggcaggagaatggacaacacagagcagccttctccaaacttctctctggcgttgatgacatttccataaatggggtcgagaatcaagatcagcaagaacccgaaccgtacagtgatgatgacgaaatcaatggagtgacacaaggtgatagacttcgggccttgaaaagcagaagacaatccaaaacaaacgctattcctctcacagtaattcttcaatccagtgttcagagctgtaaaacatctgaacctaacatttctggcagtgcaggcattactaaaagaaccaccagatctgcttcaaggaaaagcagtgttaaaagtctctccatttcaaggactaaaacagtcttgcgttaagtaaaaacctgtgaccagagctgaaggaagactctaggactgaaaactgcaacagaaattagcacaatttgaaaacaaaacaaaattgcaaaagccttagttgctttttccacctaagaagttgatcaatggagaaaatgtccactggagtttgaataatgaactttgagtttgggtgcaagcaaatgactcagagaagggtccagctctcaagctgaatgacaaacatgctgttgtaaatttagtctcaggtgtaaatacccaagccctctggtacccagggagctggctggtctgtggtgcatgtgtgtccctgtgatggcaatcattgtagttgctggccttcagaagaattgaggatctgatggaggttttttatgtatttattttctgttcaccttgtgaccctgtgtcaaaatttataaagatacaaaaggcattactgaaatggtactttctgtaatttgatactatttggcttaatcatcttcacttgactatttgtaatactgttgtaatgttaactctgttaagtacccaagctgcttgtcttccaccaaagagtgctttattaacaagaatctgtgaaaatcacatttaaacactgttgcatgttgtaagaccaggtggtaccttagtaacctaaaacttgcaagagaatattaatggtagctttagaagactcaggaggagaaactgacttcagagttggaagatgttgcaagtcgttcctttttctgtccttcagggactgaagaactgggaggctgcccattgtttggttgccagtcatacaaattaaaatcatatttccttccatgaatggaagaaacacactattggtttttccccttggaaacagcaatcccaaataatgtcggcttacaaaaaaaaaaagttaccacttttttagagtccttccctgtaacattggattttttttttcccttatgagatccacctaaggccattgacgtggcctgcgatctcagtgacaatgatctgcttctggatctcactgttgcctttggttagggaacacaactagtaactctgcagagtgccttctcccgcagccctactggaacacagcagagtctgtgccatgaagcagttacagaaacagaattgatgtgctgct

SEQ ID NO: 2074 - DNA, 2380 bp, Homo sapiens
cagccctccccgcggccggctcggctccttggcgctgcctggggtcctttccgcccggtccccgcttgccagcccccgctgctctgtgccctgtccggccaggcctggagccgacaccaccgccatcatgccggccgtgtccaagggcgatgggatgcgggggctcgcggtgttcatctccgacatccggaactgtaagagcaaagaggcggaaattaagagaatcaacaaggaactggccaacatccgctccaagttcaaaggagacaaagccttggatggctacagtaagaaaaaatatgtgtgtaaactgcttttcatcttcctgcttggccatgacattgactttgggcacatggaggctgtgaatctgttgagttccaataaatacacagagaagcaaataggttacctgttcatttctgtgctggtgaactcgaactcggagctgatccgcctcatcaacaacgccatcaagaatgacctggccagccgcaaccccaccttcatgtgcctagccctgcactgcatcgccaacgtgggcagccgggagatgggcgaggcctttgccgctgacatcccccgcatcctggtggccggggacagcatggacagtgtcaagcagagtgcggccctgtgcctccttcgactgtacaaggcctcgcctgacctggtgcccatgggcgagtggacggcgcgtgtggtacacctgctcaatgaccagcacatgggtgtggtcacggccgccgtcagcctcatcacctgtctctgcaagaagaacccagatgacttcaagacgtgcgtctctctggctgtgtcgcgcctgagccggatcgtctcctctgcctccaccgacctccaggactacacctactacttcgtcccagcaccctggctctcggtgaagctcctgcggctgctgcagtgctacctgaattaccatagccctgtcaggggttttcacatctggtgggaaccttcccctactgctcacagtcacaatagccagtgtgtatgaaactcctgtagtgagccaggcactgggcagggggcacctgcacctgccgaacagagctggcaaggaggaacagccagtgtgatatgcacacagggaaactgaggcttggaggtgagacatcaccattctaggcagtaagtggcagttggcccccagactctctgctctaaacccctccctctgccactgagctcccccgagcttctgtcgccttggctgactgacctcatggagcagtttcttcggaccctgtgctgaggggcttggcacacagtaggtgctaatgcaccagttccctccgttcagccagcatgtccagcacctgccaggggccagggctgatgtacaccaccaaatctctgggtgtgcatgcctgtctgtgtgcatgcctgcatgcgtgcatgcgttcgcctgtgtgtgtcgatacctgcccgtgtgcatgcatgtctgcgtgcatcccctgtgtgtggatgtgtcattgtgtgtgcatctgtatgtatgcgtgtctgtgtctatatgtggcagtgttcatggtatctctgtgtccctctatgtgtgtacatgtgtatgtatcagtgtgtgcatctacatgtgtacctgtgcatgcaagtggatgtgtacatgagtgtagatacctgtgtgcatgcctgtgtgtgcgtgtctcaatgcttgccagcatctacgtgtgtccatgcatgtccctctgcacatggtgtgtgtgtacacactctgagtatacgatatggaggtgacaccagaggcccatcgtgtgtgaagccagtgatgaattctgttgtgtggccctggggacatgtcttccttctctgggcctctttttcgtcctgtcaagaagggcttaagtcatgctctaagcccatgaccaccccagaaggcccagctggtaactctggggtacacccattgcaggcacctcacccactccaaccctcggtggtgtaggaaccggagacacagccttgtcctgaggctgggcctgaggacacaccaaccctgtgtcacctccttttcagcaaatggtggtgggctattgccaatttgtttgcaagtcatttttttgtcatatgcattatgaaaagtttcccagcatccagataagtacagagatttcattacttggacttcacattttgccatgtatgcatgctcttgtttattttcttctgaaatatttaaaagtaaattacagacatcatgatgttttgcctttaaatatgttgttctgggccaggcagtggctcacgcctgtaatcccagcaatctgggaggccgaggtagaaggatcacttgagctcaggaattcgagaccagtctggccaacatggcaaaaccccatctctacag

SEQ ID NO: 2075 - DNA, 2658 bp, Homo sapiens
tttcaaattttgaacaggagcatgctgaagagtgtgttgtttaatttctatgtatttgtacattttttttctctatcttatactgccgagaccagctcagtcggggagaccctaacccaacggtgctagaggaattaaagacacacacacacagaaatatagaggtgtgaagtgggaaatcagaaaaggtttggagctgagagccccgaacagagacttacccacatatttattaacagcaagccagtcattagcattgtttctataaaagattaactaaaagtatcccttatgggaaatggagggatgggccaaaataaagggatgggttgggctagttatctgcagcaggagcatgtccttaaggcacagatggctcctgctattgtttatggtttaagaatgcctttaagtggtcttccaccctgggtgggccaggtattccttgccctcattccggtaaaccgacagccttccagcatgggtgttatggccatcatgaacatgtcacagtgctgcagagatttagtttatggccagttttggggccagtttatggccagattttggggggcctgttcccaacatgtctctcttctttgatttgcaaatcaataaaggcaaaggcagctttgtcacggtgagctacttctcgcaggagtcaggatccacatctgcagactatcagcacagattaaaagcacaatcatctttgaaatcacagaacttccaagtgtttttatccattttaatgggttactagctgctaatctgtctgcagctccattaagcactcaagttcttggcattaacatcaggtgtgcttgggatgctttaaatattttaattttgcaatatccaaaaacaactttgtagagtgtctttctagatgcttttttattctttcccaaattttgatcttattaagaactattaatagtgtccacaaatccttgtgtttagctcctacagcagaccttatcatttgaggttgaggtgccactatactgccatggttccagatgatagaactcttgccatacttcttatcatttctatcatctgaccattttgttcagatcagctgaacacagtgtggctgtggcacacagactgagaggtgcaatttaagctaaacatccccttaggagaccagctaataatgattccatgggaatcattgtgcagcacctctgcctgttctgcaatgcaatctttctaaagaagtacattcattttttctggccaggtactattttgtttacaaataggtttttgagggcggtatgcctcaattataggagcagatttattatggtaaatactgagataagaaagcatgtgtaactgtgtcatagagtgattacatccaggcattattaccagccaagatagataaatatgcccaataagtataattgttctctgtgtcagcccttgttgaaggaatactcatggcaatggtgataactgctatcatagctaccattaaattgctcattgtgactggttgtcccactttcttcaggttttcttccgccatctgtgacagcttcttgatctgtcccaaggtgggtggctgtgttcaacgtgtgttgcttgtgacgcttggggttgtcctcagcatcaatcttgacatggctgcaacgagggggtcctcgggatcctcccagaatctcttcctcagcatctggctcatgataaagtttcaggtatcttgatggtatccaaatcagctgttgattttggcctggaggaacacaagcataatctctaccccaagttattttacccatttgccaactttttgttattggatctctccaccaaatcagttgttctgcttctctctttgcagctggtttctgtacatgctgttcagctgctgataacatctggcctttgggcaggctcaaaaaatttaaagttaataatgctagattcaggagcatctgtggggttacatattgtctatttccccccgtctccttctgcaactgctgttttagggagagattcattctttccactatggcttgtccttgagaattgtatgggataccggtaatgtgtttaataacacagagaaaaatgtagctagagcttggctagtatagcctggggcattatctgttttaatagaagctggaatgcccaccaccacaaaacactgcaaaaggtgatgtttaactaacacaggcagaagactctcctgattggcatgtagcccagacaaagtaagaaaaggtgtccacacatacatgtatataagctagtctcccaaatgagggaacatgtgtgacatccatttgccaaatagagttaggttccaatcctcgaggattaacccctcctgtaaaagatgaggaatgtaccatttggcaagttgggcattgctggataatagctttagcttctttccaggtaatgctgtatctgcatttgagactagaggcattaacatgggttaaattgtgaaagtgtctagcattagatattgcgttagcaactaggcaatcggccatttgattcccttcagtcaaaggtcctggaagaggtgtatgagcgagccctaatgtgagtgatgtaaaaaggatgcattgtactcctaactgctatttgcaattgggtaaataaagtgatcagttgttcatctgt

SEQ ID NO: 2076 - DNA, 2239 bp, Homo sapiens
gactggggctgcgcggacaccagcgccccagagcccgcgaggagcctggggcccccgggctggagtaagagccgagcaccggcgcagcctgcgggactggcgctcaccgggcctctcaatccccagaccttgccactgcagttggagctggaggaggaagaggaggaagctggggatcgaaaagagggaggggatgaacagcaggaggcgccccccggcgaagagctggagcccaggacccgcgtgggggccgccgacggactggtcctggacgtgctgggtcagcggcgcccgtccctcgccaagagacaagtcttctgctccgtgtactgcgtggagagcgacctgcccgaggcccccgcctcggagcagctctcgccgcccgcgtcgccacctggggctccgccagtgttgaaccctcccagcacccgctcttccttccccagcccccgactgtccctcccaacggattccctctcccccgacggcggcagcatcgagctggagttctacctggcgcccgagccgttctccatgcccagcctgttgggagctccaccctactctggcctgggcggtgtaggggatccctatgcgcccctcatggtgctgatgtgccgggtgtgcctggaagacaagcccatcaagcccctgccttgctgcaagaaggccgtgtgcgaggagtgcctcaaagtctacctgagcgcccaggtacaacttggccaagtagaaatcaaatgccccatcacagagtgttttgaattcttggaagaaacaactgttgtctataacttaacgcatgaagactccatcaagtataagtacttcttggaacttggccgtattgattccagcaccaagccatgtcctcagtgcaagcactttacaaccttcaagaaaaaaggacatattcccaccccttccagatcagaaagcaaatacaaaatccagtgccctacctgccaattcgtctggtgttttaagtgccactctccttggcatgaaggtgttaactgcaaggagtacaaaaaaggagacaaattgttgcgtcactgggccagcgaaattgagcatgggcagaggaatgcccagaagtgtccaaagtgcaagatccacatccagcgaactgaaggatgtgaccatatgacctgctcacaatgtaacactaatttttgttaccgatgtggtgagagataccgccagctccgattctttggagaccacacatcaaacctcagtatatttggatgcaaatatcgctacctcccagagagacctcatttaaggagattagtgcgagggtcagtctgtgctggaaaattattcattgcacctctaattatggttttgggattggcactaggggccatagcggttgtaatcggtttatttgtatttcctatctattgcctttgtaaaaaacagagaaaacgatcacggacaggtatgcactggtaacatgcagatgatttcatccagctaagctggttggagtaggagcgataccaaagggtacacccatctgtgagtcacatcttgaaaaacactgagaggaaccttctaccatctcatctcccagtgattctccgtgggccacaatgcctctagctatggtgcactcccaacatggtatcctgtcctttccctaaacaaattgctgctgcttttaaaaaatggtcactttcataaactataaacatctatatcataactctgacctttgtggttcttggaagaagatattttaagaaccagttatcctaagaattctgagcacgcctcttctgagaattgcttggactgtctttgaactctgcacctccttccaggccatcttgtgagacttggtgttaatagctgaagtcctatctgtaccaacaagcaaggccacttttcagaagataagagttcactgaatgcacctattataatctgtggccccagcagtataattcttttatctttcaaatgttataattgcaaaaaatctcaatgtccaaaagggaatgagtgaaactaaattaatgagaagaatattaagttactgaagtgtatatgcataggggcgtgaatgtgtgtgtatataaatatgtattaaaactaggcccagtaaccttgtacttacccagttccatgccgctacactatttttccacattttcatagacctattgaaagatgatggctcctttgtggacataatttagcaatgtattaaattaaagtcaatgtagacaac

SEQ ID NO: 2077 - DNA, 1670 bp, Homo sapiens
ggtgcacccagggagctggggccccccagaagcagccacagtgcagacgagggcttgagaggcaggcgtcagggcacaggagtcatccagacagcgtgggccactcactggcttccctgccacacagccaagggtttctcccccagtcttgggtctggctcagttgccccatcaggccctttgctggcttcccccttggcctatggtgggggcagactccttagctcatggtcaaggccctcccagcccagcttctgctgcctccccacacgctccctcccagccaccccgagctccttgcagacagcaatagtgacaggcgatggggcagggtggagagggcccggccggagcaacccacaggcactgtgtcctcctggcctccctaggaccgagacaacagccccagctcctgtgctggcctcttcatcgcctcacacatcggcttcgactggcccggagtctgggtccacctggacattgctgcaccggtgcatgctgtgagtgtctcccctccccactggccctggctgctcccgcccgcttgtccaaacagcgcccctctggctctggagctgctggcagagctcatcagaaacttctgtctgtgacccagcttccagcccgctgtccccaccacccccaggtctcatcctccctgggaacagagtggctgctgtgtgcgacccttccccagccagcctgtcctccataggggatcctgggccctgtctcacccatccccaccctgaggagctcccggggtgaaggcagagcacacagggccttgccccctgcctacgcctggcctgccagccctgaacgtgtccagccagcagcatggagggctctgggctccggctggtgctcaggatctccttcctgagaaggggactgtggggcacgtggaggggacccaggaggtgaggggtccccaggaacccctcctgtgctgcagccccacgcccagagtctgtgtcctgccctttgcttgcagggtgagcgagccacaggcttcggtgtggccctcctgctggcgctcttcggccgtgcctctgaggaccctctgctgaacctggtgtccccactgggctgtgaggtggatgtcgaggagggggacgtggggagggactccaagagacgcaggcttgtgtgagcctcctgcctcggccctgacaaacggggatcttttacctcactttgcactgattaattttaagcaattgaaagattgcccttcatatgggttttggtttgtctttctggtcgtcagcgtggtggtggaaacagctgaagttttaggagacagcttagggtttggtgcgggccacggggaggggaccgggaagcgctggggcttgtttctgtttgttacttacaggactgagacatcttctgtaaactgctacccctggggccttctgcaccccggggtgaggcctcctgcctgcctggtgccctgtcccagccccaggtcccgtgcagggcacctgcgtggctgacagccaggctcttactccagccggggctgccagcgcatccagccagcccagccctgtgaaagatggagctgacttgctgcaggggacctgatttatagggcaagagaagtcacactctggcctctcagaattcacttgaggttcaattaaatacagtcacaccgcccc

SEQ ID NO: 2078 - DNA, 2899 bp, Homo sapiens
ataaaccccactcgggagatggagctgcacctgctatttcttaaaatgacaccaccaacaaccaaacctgtcatgacagacagcaaatgtttacacgtatatttctcctgagtgaacctgatgttttacaataggtaataataaaaacagtctgtgcagatgcactggcactgacggccaggatggcggaaatggccatcccctctgaggaccttgtaggcggtgagggacccatgctgggccagaaggaagacaaacatggtaattgcagctgttcttggggtagggcggggagcccagaaggtctgatctggcctctgctttttggcccaagactccatcagggaaatctatctagggctctccccttgtcctttcaaagggatactgccccttcctcgtcttgcagaggaaaccctggctaggaactgagctagtttatggagtctggaattcctggagagcttgggttcaccttctcacccctgtaatccaggctgctcctgctggaaaagtagaaacagaatccaaaaaaggtctggactcacccggtggttcccagccagggtttctgctgcaaggtgaggaaacatccatggcttgtacagatgtgagtctttgatgaagcccccaggcaggcaccaaggtgatgggactcagggccttggcttttagatacatcccagtccctgactgacatctgaccatgagggctggatgggtgggaacaaggaggagtagatggcaaaagtacctgagcccacttcccagccacagggtgaccctggcactgtaaaaaccctttgtcagtcatgccagaaggttctagaactgcccacctcttccatttcagtcctgctgaaaccccttagcctatttccgactcctctgtccatgctctgagttcagctgggcagtgtgtgggctatcacccctttcatttagacctacctagctggcccccatctgcagagccttccttagcaccattaggccttctacttgtgtccatttgaagcaggaggggctggatttggaaaagtctttgaagtgagagcaccacgcttgtcttcgttagaaactcttaactgcagaaaaaagttccagatggcaagggagcccttaagtggagattaggttgcattagactccaaaaccagaaaggaaaaagggtgatgggagtggagacgtgattggattcaggcccagaacctgtgaccatgctctgagctcagacttggggagggaggggtgtggctcccaccccttccagttaagacctgcctagcagagccccagtctccagccccttccctagcaccagagtctggtcaaaatgccacagaaaatgagctgctctgccagcaagctgtggagctgcctcctctccaggcctggcatcccttggtcagcccctcctgggagggcacagccgtattacagtgccagtgtgcctggccatcagcatcttcacccttcccagtctgtgtggggaggctgtaaaccccgtggattcagctccgtgtggagtttctgtgctatggtgggactgctcattttgccccatcatccctttggcctcccacacacctgccccttcccagggatcacgtgtgtctccagcctttcacctttctattgcaatggtggcctttgtccaggcaagagcaggcctgatggatgtactggtgagccccacagttggatgtcagctcagccgtccaactgggaggaacattaggctcagttcctccctgacccctgacaccaggccgcagtgggcatgcacaggcccacagaaagtcagtctgggttttgcttttctcgtgagcatcacagttaaagaagcgctcattgagcaactacagtgcacttggtcttctgcaagtgctgggcacctagagataggaacagtcatggtccctgctcttaaggaactgatgacctggtggggccctgttgttttcaaggaacccagaagccactgggccccaaaggtggaactgaaggactgggggcagctggctctcagcctgccacctctgcactgcctgcctttaaagaaccccaccccaccccatgatggccccctctgttccccttgtatttcagtgactgtgaattgaggttaggaaggcacacctgcccttctgtgtgctctctccacacgaaggatgacagatactgtgaattcagccctcacggccaactgtgaaggggatggagaaggctgggagggctcggggagagctcttaggggctgcggaagtccccacgggggtctgagggtggagcccaagctttggccctccaggcatccccagtttccagcctcacctctgaagccctgctgcctttaaccaccagagccgcagccccctgggtttctgtctaactcgaagtcttgaatcctagctagtttggggttgtgagcagtgtgtagcaaagttgatctctccatgtcaccaaatcaaaacaccctctgtcatcctacggcatttcctcttgaggtcacagagaggaatggcaagccctggaaacctgtgttattctgtgttgatttggtgtggggggagggtggagacgtaaatgtgaagccagttggagtttgtgctatgcagcagtgttagccaggatctcatcagcgtgcaaacctagcatcttctgtggccacaagccacacacttgctttttttgaatgtgatgtaaaatttgtacagtaaagtttttatattttctatcaactacatttgtcttccagacatgctattaatttaaattaaaatggttagtattaacaaacatgctgtatcgggtttttttgccactggcaagaacatgccctctgtgctaagccaggcctgggtgtctggagtttgtgaataaagttataccaagg

SEQ ID NO: 2079 - DNA, 1866 bp, Homo sapiens
ccccgtcccgtcccgtcctgtgcggccccgtcccgccgcccgcccgccagccatgagctccacgcagttcaacaagggcccctcgtacgggctgtcggccgaggtcaagaaccggctcctgtccaaatatgacccccagaaggaggcagagctccgcacctggatcgagggactcaccggcctctccatcggccccgacttccagaagggcctgaaggatggaactatcttatgcacactcatgaacaagctacagccgggctccgtccccaagatcaaccgctccatgcagaactggcaccagctagaaaacctgtccaacttcatcaaggccatggtcagctacggcatgaaccctgtggacctgttcgaggccaacgacctgtttgagagtgggaacatgacgcaggtgcaggtgtctcttctcgccctggcggggaagatgggcaccaacaaatgcgccagccagtcaggcatgactgcctacggcacgagaaggcatctctatgaccccaagaaccatatcctgccccccatggaccactcgaccatcagcctccagatgggcacgaacaagtgcgccagccaggtgggcatgacggctcccgggacccggcggcacatctatgataccaagctgggaaccgacaagtgtgacaactcctccatgtccctgcagatgggctacacgcagggcgccaaccagagcggccaggtcttcggcctgggccggcagatatatgaccccaagtactgcccgcaaggcacagtggccgatggggctccctcgggcaccggcgactgcccggacccgggggaggtccctgaatatcccccttactaccaggaggaggccggctactgaggctcccagcacgctctctccccacatcgtctccccatctgggtttttgggtttttctgtgttttcatctttttttttttttttcttgacccgttcagtgctgccagtcaaccaagggtctgtgagtgtcagcgtgggatcaggcagcagagcttttttcccctttgccttgatccttcgcaaggctgagccactgggctgtgggggaaggggtcaaggccatatcccaatacgtgtagggcgagggtccctgctggcacattcaggctgtgctgggaagaagagacctgggcttggaaggaaccggtccccgacggtttctggttgcctcgcctcttcccccttttgtcagctgagcagtttgtggtttctatgcccgcaagtttcaagaagtattcacaaaagaaaaatacattttttcccccaggggtggggcaaggacagtggagagagtgctaggaaatgagtcccctgggaaaggggaccgggccgtgatgttaaatatctccggctcccaagtgactggatttgcctaggaccttcagatcaacagacttcagaccctcagacctgccccggggccaggtggagaaagtgagggccgtacaaggaagtgaaattctgagttgttggggctaagcctgaccccctctccatgctccccgccccaactcactctggcctcagtagatttttttttcagttgtggttgttgcccaggctggagtgcagtggcgccatcttggctcactgcacctccaccttccgggctcaagcgattctccagcctcagcctcctgagtagctaggactgcaggtgctccaccacgcccggctaatttttgtatttttagtagagatggggtttccccatgttggccaggctggtctcgaactcctggcctcaggtgtgatccgcccgcctccgcctccccaagcgctgagattacaggtgtgaaccaccgtactcaagcctgggtgacagagcaagaccctgtctc

SEQ ID NO: 2080 - DNA, 2368 bp, Homo sapiens
taacagatgttacctcaggacctgaagtagaggtgttatatgaatcaaatttactaacagatgaaattcatttggaaagtgggaatgtaactgttaatcaagaaaataacagtctgacatcaatgggaaatgtggtcacttgtgaattgtctgtggagaaagtttgtgatgaggatggtgaggcaaaagagctggattatcaagccacacttttggaggatcaagctccagcacatttccacagaaacttcccagagcaggtcttccaggatctccagaggaagtccccagagtcagagattctgagtctgcacctgctggttgaagaactgagacttaatccagatggagtggaaactgtgaatgatacaaagcctgagctgaatgtggcatcatcagagggaggggagatggaaaggagagattcagattcattcctaaatatttttccagagaaacaagttaccaaggctggtaatactgaaccagttttagaggaatggatacccgtcctccagagaccttcccggactgctgcagtacccactgtcaaagatgccctagatgctgcactgcccagcccagaggagggtacctcaattgctgcagtgcctgccccagagggaactgctgtagttgctgctttagtgccctttccacatgaggacatcctagttgcttcaatagtctccttagaggaggaggatgtcacagctgctgcagtatcagccccagagagggctactgtcccagctgttacagtatctgtccctgaagggactgctgcagttgctgcagtgtcctccccagaggagactgctccagctgttgcagcagccatcacacaggagggtatgtcagctgtcgcagggttctccccagagtgggctgctttagctattacagtacccatcacagaggaggatggtacaccagaagggcctgtcaccccagctaccacagtgcatgctccagaggagcctgatactgcagctgtcagagtgtccaccccagaggagcccgcctccccagctgctgcagtgcccaccccagaggagcccacctccccagctgctgcagtgcccaccccagaggagcccacctccccagctgctgcagtgccccccccagaggagcccacctccccagctgctgcagtgcccaccccagaggagcccacctccccagctgctgcagtgcccaccccagaggagcccacctccccagctgctgcagtgcccaccccagaggagcccacctccccagctgctgcagtgcccaccccagaggagcccgcctccccagctgctgcagtgcccaccccagagatacagtgtgggtggtgggggtggtaggaaatgcaggttgaagggaattctctggggctttggggaatttagtgcgtgggtgagccaagaaaatactaattaataatagtaagttgttagtgttggttaagttgttgcttggaagtgagaagttgcttagaaactttccaaagtgcttagaactttaagtgcaaacagacaaactaacaaacaaaaattgttttgctttgctacaaggtggggaagactgaagaagtgttaactgaaaacaggtgacacagagtcaccagttttccgagaaccaaagggaggggtgtgtgatgccatctcacaggcaggggaaatgtctttaccagcttcctcctggtggccaagacagcctgtttcagagggttgttttgtttggggtgtgggtgttatcaagtgaattagtcacttgaaagatgggcgtcagacttgcatacgcagcagatcagtatccttcgctgccccttagcaacttaggtggttgatttgaaactgtgaaggtgtgattttttcaggagctggaagtcttagaaaagccttgtaaatgcctatattgtgggcttttaacgtatttaagggaccacttaagacgagattagatgggctcttctggatttgttcctcatttgtcacaggtgtcttgtgattgaaaatcatgagcgaagtgaaattttaaaaatcatggttatttttatcgttgggatctttctgtcttctgggttccattttttaaatgtttaaaaatatgttgacatggtagttcagttcttaaccaatgacttggggatgatgcaaacaattactgtcgttgggatttagagtgtattagtcacgcatgtatggggaagtagtctcgggtatgctgttgtgaaattgaaactgtaaaagtagatggttgaaagtactggtatgttgctctgtatggtaagaactaattctgttacgtcatgtacataattactaatcacttttcttcccctttacagcccaaataaagtttgagttctaaactc

SEQ ID NO: 2081 - DNA, 2295 bp, Homo sapiens
agtggggggcggggcctcgttgccagctccagaccggcgctatgggcactccttttgtcaaatgagagacgcagcagggcggcccctgagccgcggtttagccaatggagaaggcgagatgggcgggctgggagtgcccggcggcgggtcctcagcttcgagccgaggtgcagtgagctggtggggggaccgcgaggcgagcgcgggagcctgggcggcgagccgggtgtgagctgcctgaaaatgcactcggatgccgccgctgtcaattttcagctgaactctcatctctcaacactggcaaatattcataagatctaccacacccttaataagctggaagtctgcggtcttgcagttcttcagactgctttaataaagtgatgccaccaaggaaaaagagaagacctgcctctggagatgatttatctgccaagaaaagtagacatgatagcatgtatagaaaatatgattcgactagaataaagactgaagaagaagccttttcaagtaaaaggtgcttggaatggttctatgaatatgcaggaactgatgatgttgtaggccctgaaggcatggagaaattttgtgaagacattggtgttgaaccagaaaacgtgagtcaaacttactgagttgggtgaatcagttggttgtttttcatacttaaatctttgttctttagcaaataaataaataattaaaaagtagtggtatgttagtttttatgaagcagtctaagaaataagttctaattctagtttgacttataagcagattctccattcttgtaagtgatatggtgtaactacagttattttttctctcatttaatttcttgtatgtaaaaggtacagtaagccagatgcttacaaaatggtgtggccacatgtgcctacaatgacggatcaactggaggccacattgtacgctgtgtaccttcgtgcccctcagtagttgttttagcctaatgtagagtcaatctaggacttataattattcatcatgattttgagtagattgtaatcatcaagaatttttcatagatcgtttacttccaattgaatttagctcagaagtgattgcttttttttttttttgagatggagtctcgcactgtcgccaggctggagtgcaatggtatgatgtcggctcactgcaacctctgcctcccgggttgaagcgatttcccctgcctcagcctcctgagtagctgggactacaggtagttatgcttgtcctagcttggaaattggatgcacaaaacatgggttattttaccctacaggagtggttaaaaggaatgacttctctccaatgtgatacaacagaaaaactcagaaatactttggattacttaagatcattcttaaatgattctacaaactttaaacttatttacagatatgcgtttgactttgcacggcaatcaaaatacaaagttattaataaagaccagtggtgcaatgtcctagagtttagcagaacaattaatcttgacctcagcaactatgatgaagatggagcatggccagttttgttggacgagtttgtggagtggtataaagacaaacagatgtcctaggactttatgcatagcagcgagagagtcactgttaccacagttttgtcacccattagccataaattgctgtttgtatcaaagcgcatgctgcttctcttgcactgtttccctttcgcagggacgtgttggtgtttgctattgaattggccagctctgcttgctgtgtggcattgttctcttggaaggctgctttgcagtttgtatttacactacagattggtgaatttgccaacgtcctcactgtgattatgtgtatattgctgtttaaattttgtatatgtgtataaaaggaaaaaggttcacctagagattatttctgaaaaatgtattgtaaaaataattttgtggcatttctagtccctttttttgaatgaaccaattatactttatttggtctcctatgtagcatttcagaaaacaagagaaaactgttaccatgaacaaacattgccagaattaaccttactgtttaagaggccagcttctggaaggaggtaggagtcataactttttagaggcatatgccaaatatcatttggtatacttaacaatattagtgttttaaaatgatgagttataattatttgaacatatagatatgtaacatgccacaaatcatttctaccatgcaaggtgtataagttgtttattttttagtgttaaaactataatagcttgaatataggtaccaatgaacaaattcaaattgc

SEQ ID NO: 2082 - DNA, 3038 bp, Homo sapiens
ttcgagtacgtgcctgaccccacctttgagaacttcacaggtggcgtcaagaagcaggtcaacaagctcatccacgcccggggcaccaatctgaacaaggcgatgacgctgcaggaggccgaggccttcgtgggtgccgagcgctgcaccatgaagacgctgacggagaccgacctgtactgtgagcccccggaggtgcagcccccgcccaagcggcggcagaaacgagacaccacacacaacctgcccgagttcattgtgcgtgagcggggactggcggggggtgcccccacgggaccgcgctgaacccggccccccacacaggtgaagttcggctctcgcgagtgggtgctgggccgcgtggagtacgacacacgggtgagcgacgtgccgctcagcctcatcttgccgctggtcatcgtgcccatggtggtcgtcatcgcggtgtctgtctactgctactggaggaagagccagcaggccgaacgagagtatgagaagatcaagtcccagctggagggcctggaggagagcgtgcgggaccgctgcaagaaggaattcacagacctgatgatcgagatggaggaccagaccaacgacgtgcacgaggccggcatccccgtgctggactacaagacctacaccgaccgcgtcttcttcctgccctccaaggacggcgacaaggacgtgatgatcaccggcaagctggacatccctgagccgcggcggccggtggtggagcaggccctctaccagttctccaacctgctgaacagcaagtctttcctcatcaatttcatccacaccctggagaaccagcgggagttctcggcccgcgccaaggtctacttcgcgtccctgctgacggtggcgctgcacgggaaactggagtactacacggacatcatgcacacgctcttcctggagctcctggagcagtacgtggtggccaagaaccccaagctgatgctgcgcaggtctgagactgtggtggagaggatgctgtccaactggatgtccatctgcctgtaccagtacctcaaggacagtgccggggagcccctgtacaagctcttcaaggccatcaaacatcaggtggaaaagggcccggtggatgcggtacagaagaaggccaagtacactctcaacgacacggggctgctgggggatgatgtggagtacgcacccctgacggtgagcgtgatcgtgcaggacgagggagtggacgccatcccggtgaaggtcctcaactgtgacaccatctcccaggtcaaggagaagatcattgaccaggtgtaccgtgggcagccctgctcctgctggcccaggccagacagcgtggtcctggagtggcgtccgggctccacagcgcagatcctgtcggacctggacctgacgtcacagcgggagggccggtggaagcgcgtcaacacccttattcactacaatgtccgggatggagccaccctcatcctgtccaaggtgggggtctcccagcagccggaggacagccagcaggacctgcctggggagcgccatgccctcctggaggaggagaaccgggtgtggcacctggtgcggccgaccgacgaggtggacgagggcaagtccaagagaggcagcgtgaaagagaaggagcggacgaaggccatcaccgagatctacctgacgcggctgctctcagtcaagggcacactgcagcagtttgtggacaacttcttccagagcgtgctggcgcctgggcacgcggtgccacctgcagtcaagtacttcttcgacttcctggacgagcaggcagagaagcacaacatccaggatgaagacaccatccacatctggaagacgaacagcttaccgctccggttctgggtgaacatcctcaagaacccccacttcatctttgacgtgcatgtccacgaggtggtggacgcctcgctgtcagtcatcgcgcagaccttcatggatgcctgcacgcgcacggagcataagctgagccgcgattctcccagcaacaagctgctgtacgccaaggagatctccacctacaagaagatggtggaggattactacaaggggatccggcagatggtgcaggtcagcgaccaggacatgaacacacacctggcagagatttcccgggcgcacacggactccttgaacaccctcgtggcactccaccagctctaccaatacacgcagaagtactatgacgagatcatcaatgccttggaggaggatcctgccgcccagaagatgcagctggccttccgcctgcagcagattgccgctgcactggagaacaaggtcactgacctctgacctacaatctccagtgctgccttgggacataggtacctgaggtacctgagagcccctcaggggaggaggccgagtggctgtggctgaggcccccaccctcccctggaacgcgccccaagccggagtgggtgcagccggaacccgcccagcgtctagactgtagcatcttcctctgagcaataccgccgggcaccgcaccagcaccagccccagccccagctccctccggccgcagaaccagcatcgggtgttcactgtcgagtctcgagtgatttgaaaatgtgccttacgctgccacgctgggggcagctggcctccgcctccgcccacgcaccagcagccgcctccatgccctaggttgggcccctgggggatctgagggcctgtggcccccagggcaagttcccagatcctatgtctgtctgtccaccacgagatgggaggaggagaaaaagcggtacgatgccttcctgacctcaccggcctccccaagggtgccggcactctgggtggactcacggctgctgggccccacgtcaaaggtcaagtgagacgtaggtcaagtcctacgtcggggcccagacatcctggggtcctggtctgtcagacaggctgccctagagccccacccagtccggggggactgggagcagttccaagaccaccccacccctttttgtaaatcttgttcattgtaaatcaaatacagcgtctttttc

SEQ ID NO: 2083 - DNA, 1418 bp, Homo sapiens
ttattattaaaaacaataatcattattattttttccattgtaataacatgtaaaaaaacatatttcccatatgctcagtggagaaaatttggaaataaggaaagtagcaagaagaagtggggggaaagaggcacccataattctattacccagagtcaaaaacatcttttaacactttttctgtgcattaaaaacaaaaaaagaaaattatacctccatcatttctggtgtgacctgcattgtgacagcacaatgttggccagttatggtgcagaaaacagtgctacccctgggagcctggagtgtggtgggagatagctccaatagtggcaggtgctgtgcaggaagaggctcgtgtgaaagtactggagggctgccatggggcacggtgatggggacatggggccatgccgtctgcacaaggccaagtggaagagcagatttttcacggtaaatgtaggcagaccctttttttttcctggttgtctaacctattattgtagaagtgctcatatacattcttttccatctgtgctttggcaggatgacatcattgatgatgttgacagctttcttgctgcagcagagaccctgaaggaaagaggtgcatataagatctttgtgatggcaactcatggcttgttgtcttctgacgccccccggcggattgaagagtctgccattgatgaggtggtggtcaccaatacaattccacatgaagtccagaagctccagtgccccaagattaaaactgtggatatcagcatgatcctttcagaggcgatccgtcggatccacaatggggagtccatgtcctaccttttcagaaacataggcttagatgactgagttttccttcaggaaaactcccgagggccaaactggaaacataagattgactgctcggtgggatggatttcacaggaaccgtcatgcttgttcctccctctcccctgtaacctcacttcttattgactcctaagaagatagaccaactttttatgtcggtttgggtgtttgtgagtttggggagcaatttttataaaagaaaaactttattctcctcttttgaaaaggtaagacctcgttttagttttaactgtttaaaaaataacacttggaataagatttgtaagctcacaaagccttcttccaaagttgcttgagccaagtgcttaaaaagttaataaaataaaatgatctgtatgatacctgcaattgaaaagccgaaaagattatactgtcaagtccagtaaatgacatttttagagatgcttttgtagacaagcatatggaatatgtgattgtatttattttctgcaactaaaaaaggaataaaaacttgtgtttgtgtgtttttctaaaactttgtgttttggcaatcgttttgtaactaaaataaaatgaaagctaaatct

SEQ ID NO: 2084 - DNA, 2612 bp, Homo sapiens
gtctttcctttctcctcccggtggcttccctgttcctgtccctggctttcctggttttttggatccccatcctggctctggggggaaggaggatgggtctggagcacctgtgagacccgagcctgggcccaccacagcagaggatgcagcctcccaaccccaagagtcccagattggagtccctgagagaagctggggtaggtgaagtgggctctcagtctgggtgttatcttgggaggagcgtgggtctctgggacacactggtaagatgtgctccacttgaccctcatcataaccaagggtctgttggtgggcttttgcctttggtggccccagggcccctgccttctggctactgccatccgtgggggatgagtgacgtcaaacttccccttctccgggctgttggctagagtgggggcagtgggaaaaacacatctatcaggcagtcccacccctgcacaaaggagcagagactgtgcctcagccccacatccctgcctggtgggtaccacatcacagacagacacgttcttagctggctgtgtgcagtcactgccaccttgggctcctgggaggcaccaaaggcccattgtgggcccctgaaatgacgcacccaccacagtcagctgccatcatgcaaggcaccgaatctgctgtcctggtgggatgggatctcacttctgcctttcctgttcagcctccccgggctccatgcgctctgtggaggccatggcaggatatgttgtgggcagctggatttccggccctctctggtagagtcagaggggttgcctttgaccagcaggaaagggattcgaaggcggacgcgagtgggccctgcccaactcagactgaggaggaagtttctgcagcgccggaaggagaagcaatgaatagccactgtctagaccctcccctatgactccatccccaaggtgctccagacaggcctgagattcccctcttccttcctagccacaccacccctggtgtgagccaggcaggcagcccagccctctccagccccggctcctggtggcaggaggtgccttcctggctgtagcaggaagagtctccaggttatatggccgtgaccctgtgccaggactcggggtaggggtacactctgttctgacccccccaggaagtgagttccaaaggagtcgggcctttggaggagaacttggtggctgtgcttttgacctggcattgcaggagcataagccctggtcaacttgagcgaaaaagccggacccactgtcaccatctcacaggctgtgtcgcatgctctggcggtgagggcctgtttcccagccctccctagcaggagactgctcagggcagagctcctgagatactatgggttcctttggggtggaagagcctgtggccaggtcagtgaggagaacagagtgggagcatgagggtgggctggagaggagctgtttgtcccgcctcccgaccccgaggagggcatagtccacaggctattttagggagcaagaactggccagtcagaatgtgcctgcgcctctccccaagacaacagcaccatcaaaggggaacatctttgtcttgggggagccatgtggaattgtacctagaacagattgtgaacaggggtgcctgtcaatttacatttatcaggactcgtttcttttccctcccagacttgccctgcaaatctcatggtggggtggggatcaaggagaagagggcttatcttgactttcatgatcttagtgttaatgacagttacccaggatggaggtttttagcccctttcttggccctagacccaatgaccccttccatgatatttttcaaagtccagtgaagcagtggagagaggagtgagggggaggagaagagagagacgggactctgttggcagacgccctgctgtcttccaagaccctatataggcttctgtggagttcttgcagctgaaagctgagtcctttgcctggggcaggggtggtgtggattcttggccatcacactcctggaaccctgaatcttactgttccacagtcacagaccagccaggctcaggacctcagagctgcttgtgggcccatggaaggtcatacttgcttcccgtcggcgctgggcctgctgtcattttgcagcttctgccctgcaaatttagagttttagagtttagttttagagttttaagtctctaaaaccctcacagttaattttttctcttcctttaatgacacccaaaagggcacccagcattatgcctcgggtgtttgacccggctggatatgggatggagagcgtttggtgggtcctgggaggagctcaggccaggtcaggatttaccattgttattgatgctacagataacagccttgccctgaaggctttcacagagtttatctcctttcttgttactctgatagggctgggattgtccaccacctgctcaatgagggctaacattgagtacccagcgagagtgctgtattaaatcttatcttggccaggcactatggctcatgcttgtaattccagcattttgggaagctgaggtgggaggcttacatgacctcagtttaagaccagcctgggcaacatagtgggaccctgcctctacc

SEQ ID NO: 2085 - DNA, 1894 bp, Homo sapiens
ttttttctgggcttctgtctggttctctctccagaaggttctgccggttcccccagctctgggtacccggctctgcatcgcgtcgccatgatgggccatcgtccagtgctcgtgctcagccagaacacaaagcgtgaatccggaagaaaagttcaatctggaaacatcaatgctgccaagactattgcagatatcatccgaacatgtttgggacccaagtccatgatgaagatgcttttggacccaatgggaggcattgtgatgaccaatgatggcaatgccattcttcgagagattcaagtccagcatccagcggccaagtccatgatcgaaattagccggacccaggatgaagaggttggagatgggaccacaacagtggtgatcagtgcttaccgcaaggcattggatgatatgatcagcaccctaaagaaaataagtatcccagtcgacatcagtgacagtgatatgatgctgaacatcatcaacagctctattactaccaaagccatcagtcggtggtcatctttggcttgcaacattgccctggatgctgtcaagatggtacagtttgaggagaatggtcggaaagagattgacataaaaaaatatgcaagagtggaaaagatacctggaggcatcattgaagactcctgtgtcttgcgtggagtcatgattaacaaggatgtgacccatccacgtatgcggcgccatatcaagaaccctcgcattgtgctgctggattcttctctggaatacaagaaaggagaaagccagactgacattgagattacacgagaggaggacttcacccgaattctccagatggaggaagagtacatccagcagctctgtgaggacattatccaactgaagcccgatgtggtcatcactgaaaagggcatctcagatttagctcagcactaccttatgcgggccaatatcacagccatccgcagagtccggaagacagacaataatcgcattgctagagcctgtggggcccggatagtcagccgaccagaggaactgagagaagatgatgttggaacaggagcaggcctgttggaaatcaagaaaattggagatgaatactttactttcatcactgactgcaaagaccccaaggcctgcaccattctcctccggggggctagcaaagagattctctcggaagtagaacgcaacctccaggatgccatgcaagtgtgtcgcaatgttctcctggaccctcagctggtgccagggggtggggcctccgagatggctgtggcccatgccttgacagaaaaatccaaggccatgactggtgtggaacaatggccatacagggctgttgcccaggccctagaggtcattcctcgtaccctgatccagaactgtggggccagcaccatccgtctacttacctcccttcgggccaagcacacccaggagaactgtgagacctggggtgtaaatggtgagacgggtactttggtggacatgaaggaactgggcatatgggagccattggctgtgaagctgcagacttataagacagcagtggagacggcagttctgctactgcgaattgatgacatcgtttcaggccacaaaaagaaaggcgatgaccagagccggcaaggcggggctcctgatgctggccaggagtgagtgctaggcaaggctacttcaatgcacagaaccagcagagtctccccttttcctgagccagagtgccaggaacactgtggacgtctttgttcagaagggatcaggttggggggcagcccccagtccctttctgtcccagctcagttttccaaaagacactgacatgtaattcttctctattgtaaggtttccatttagtttgcttccgatgattaaatctaagtcatttgagaaagtt

SEQ ID NO: 2086 - DNA, 1963 bp, Homo sapiens
gagcgacgcgtacgtctacctgcctgccttacagggcacctaggagggaccccttcctggcccatccgcgccgcgcaggcgcacgcccacgcaggcgcacgcccacgcagcgcctagacgcccgagccgagcgtcccgtctcctagtaaccagccgctagcccccttttccacgactcatttcttaatctctgcctgaggctgccgcacctggatggaacgcgcatgcgcaaggctgtctctcgcagccccgccttccctcagcttgaaacacctgctgcttcgcggcggtggctttgtgccacttttcccagggcttgggcatcattctggacccatgttcggtgaaccggttactctcagagctgctttcgggcgcagctcctgctgcagccagggcccgttttaagagaggcttccaggtccagccctcccgctgcagcctgcagggagcgagccggcctgtcccgatgacatagacactaggtttttacagcaattctctgatgaccttgatatggtagaacgctgtgtatttcaagagtaagctctcgtttgaggagactaacaattcctgttttcgccagatttcttcttgaatggcaacctaaatgccagtccaaagaggcccccaatagacttgttcacccttcatgtcctcaactctggggaagttaagtaatcaagttgaagaaacacttccactacttaaaaagcctctaaagagagcaatcactacacttatggctgggattttgcgcttagtagttcaatggcccccaggcagactacagaccgtgacaaaaggtgtggagtctcttatttgtacagattggattcgtcacaaattcaccagatcaagaattccagaaaaagcgtttcaggcctcacctgaagatcatgaaaaatacggtggggatccacagaaccctcataaactgcatattgttaccagaataaaaagtacaagaagacgtccatattgggaaaaagatataataaagatgcttggattagaaaaagcacatacccctcaagttcacaagaatatcccttcagtgaatgcaaaattgaaagtagttaagcatttgataagaatcaagcccttgaagttgccacaaggacttccaacagaggagaacatgtctaacacgtgcctcaaaagcactggggagttagtagtgcagtggcatctgaaacctgtggagcagaaagcacatgagtcctaatgccccagcagcttccgattggaaaatgcaaattgtttttatttaaagatgacggagtcttgctctgtcacccaggatggagtgtaatgccacggtttcagcttactgcaatctctctgcctcctggcttcaagcatttctcctgcctcagcctcccgagtagctgggaccacagaaaccacaacaaaggtgcttgcccatggctcctcgcttccctctgcctcatgactgatgccaattattccccttgtggccccctgtggtgtgacatgtactccctctccggggatccgaaatgaaaccaatttctacaacataggaatgatttcggcatgtctaggagagtcagagaaaagacgggagggaaatgggggagaaagaaaaacgtgagagaaccttctacttcctgaaaggcaccatgactctggaatgttacctgtaattaagaatgtcagaagaaccgagcctccattctaaagtttctgtggtgaagtcatctgtatttcctaggaaacttgaagaggaacagactgaaacttgacaaaactcggaagagacttacaagaatcagaagtgcacacatggtgccatatttggaagtcatgaagaaaaactgaacagcattaccgaggaaaaacttcttactcctaaatatgcaacgctgtcagtaagaagcacattaaggctaagggttactaataatatttaaataaatgtggccattatgcttctagg

SEQ ID NO: 2087 - DNA, 2700 bp, Homo sapiens
agagcgctgccgccgccgctttcgcccgggagccgggggccgggcgccatcatgctgagccggctcggggcgctgctgcaggaagccgtgggggcgcgcgagcccagcattgacctgctgcaggccttcgtggagcactggaagggcatcacgcactactacatcgagagcacaggtgcggcctggccctccccagcccagggaccctggagggagcggggaggaaggagtgtgcagagtgtcaccattcaggtgtcctgggaaaggtaacctgcccagtcgttcagaattggagccgagttcacggagacagagaaccagacagacagaagacccagagccctgggccactccactcctgatgatttagccgccggtcccactctgaccttttggaaagaggctgtgtgaggaaggagtagcctggttggggtctcactggcctgactctgcaaggaagaggtggctgcacttcccccagcttccagctccagaccttcaggccccaggtgcttgtgcctaggatttaatgatcaaaagaaaagaatttaataaattcccctttcccctgagccagcttaggggcaatgtccttgtagagatctggggtaggaggagaacgaaaaccaaggtgggtaacatgcctgggtccctctctccaagctgacaccccaaagagccaaagccttggcacctggtcccatcaggaccgctcactgaggggatggcatctgagtggctgctctgcagtcatgaggctgccatgggtggatacggactggttgccaggtaaccatatcctgcatccctcacttttcccttcctggagttcatactggggcttgatcccagcccacacctttcctacaggctttctttccagcccgggccagcccaggaaattcagaaatctgtgggaccctctgagggttctgctagaccaggtttctcaatcttggcacagttggcattggacctggagccttccctgcgcggggctgtcctgggcggtgtgggatgtgcagcagtaattctggcctctacccactaggtgccagtagcacaccccacccccgaattgggacaaccaggaaggtctccagactttgcctcatgttccctgggggggaaaagcgcacccctggttctgaaccatctcttcaggttaaagatctcttgaaggagagcctcagtccaccagctcagtaagatcagatcagaactggctgaaattcacctggggcttcccccatccagccctttcatttccagaatggtccctagaccagaagggttggaagtgcgtggggcaggccgccctactcaagctcctgttccttaaaggaaagctagggggtgctccaagtctagccctgaagcaccagaactttctttaaaacacacactgagactctgactgcaaaagcccccactaagtagcttccccgtcagggcgttggtacagggagcaggactgggtcagacctgaaggtggtggcacagatgtttttttctgctttgtgaaaaacagaggcttgccttctctgagtgtcagtgggggaggccccaggaggttctctctcaggcagctgctggaattacagcttctaagttatgtgacaagagccctgagcccacagtgtccactcaggcccagagctgacagcagccttctgtgggcccaggaccatgtgtccctgtctctgtacccatcctagggtttgaaggaaaccgatgctgctgccccctgataaagggctgggcatgcatgcgttctcagaggactgtgtcctgagcctggaaggacttttgtcttcttaaatattgaagcattcactgtaaacttccatttcccagttgccagcagctgtcttcccccacctctcccagacaggacctcccctttctgggctttggcaggagagggtgaagttttcaagccggggtgcccctctttaccctactcacccttgtttcccaaacatcattagatgaaagcacccccgccaagaagacagacattccctggcggctgaagcagatgctggatatcctggtgtatgaagagcagcagcaggcggccgcgggtgaggcagggccctgcctggagtacctgctgcagcacaagatcctggagactctctgcacgctgggcaaggccgaggtgggaggccctctgcgcgctgggccaggccgaggtgggaggcctctgcgcgcttggccaggccgaggtgggaggcctctgtgcgctgggccaggccgaggtgggagaccctctgagtgctgggccaggctgaggtgggcggtgggcagtgggcagcctggggctccctggattccaggcctttctgcctatgctcttcccagtcctgacactgaaagtggcagttcgggcgagaggagcaaacaggacgggcactgtggctgtctcacttagaacactccaccatcccagcgctcctgttcccagttcactccacaaagatgggcctgccatgtgccaggctctgctctagatgctggggacacagcagggattcatactgacaagagccaggcatggtgatgcgtgcctgtagccccagctacgtgggaggccgaggtgggtggattgcttgagcccaggagatggaggctgcagtgaactgttatcgtgagaccgcactcctgcctaggaggcagagcaagacactgtctctt

SEQ ID NO: 2088 - DNA, 2780 bp, Homo sapiens
actactccctctgcagtctcgcctgccgacttccttctgcgcgcctcgtaaaaccggggaagttcaatcattccgcagcgagccgcggcggccgcactgggcatgctcagtctccgggctccgctcggcaggcgagaggcgtcctccggctctgggctccggtcggtgggtgcctcggctcggctttccccggcgctggctgggctcagcggcccctgagcccaagcgacacacgccccgcggtccccgatccggcccctgggagagccgcgccgttctggaacccgggagcccccaacttcgcgccaagttcggagccgccttctgagggagacatgaaaaagatgagcaggaatgttttgctacaaatggaggaggaggaggacgacgacgatggggatatcggaagaatttaatggaaaacctgactccctcttttttaatgatggccagcgaagaattgactttgttctagtatatgaggatgaaagcagaaaagagaccaataaaaagggtacaaatgaaaaacaaaggaggaaaagacaagcatacgaatctaaccttatctgtcatggcctgcagttagaagcaacaagatcagtattggatgacaagcttgtatttgtaaaagtacacgcaccatgggaggtgttatgtacgtatgctgagataatgcacatcaaattgcctctgaaacccaatgatctgaaaaaccggtcctcagcctttggtacactcaactggtttaccaaagtcctcagtgtagacgaaagcatcatcaagccagagcaagagtttttcactgccccatttgagaagaaccggatgaatgatttttacatagttgatagagatgctttcttcaatccagccaccagaagccgcattgtttacttcatcctctctcgggtcaagtatcaagtgataaacaatgttagcaagtttgggatcaacagacttgtaaactctgggatctacaaggcagctttcccactccatgattgcaaattccgccgtcagtcagaggatcccagctgccctaatgaacggtgccttctgtacagagaatgggctcatcctcgaagcatatacaaaaagcagcccttggatcttatcaggaaatactatggagagaagattggaatctactttgcttggctgggctattacactcagatgcttctcctggccgcagttgtaggagtggcttgctttctctatggatatcttaaccaagataactgtacatggagcaaagaagtttgtcatcctgatattggtggcaagatcataatgtgtcctcagtgtgataggctttgtccattctggaaactcaatattacttgcgagtcctcaaagaaattgtgcatcttcgacagttttggaaccctggtctttgcagtatttatgggagtatgggatccatagaaagcaacttctcattccttcaagtttgatcatgagactacagcagttcagtcacatcttcagactccatttctagttcttcttgctctttctaccacatctgcagtgacttcctccactgaagtcttgaacttctcaaagtcatccatgaggttaccttgtttttggagttttggaagcgacgccaggcagaacttgagtatgaatgggatactgttgagttacagcaggaagaacaagcccgaccagaatacgaagcacgatgtactcacgtagtgataaatgagattactcaggaagaagaacgcattccctttactgcctggggaaaatgtatacggataaccctctgtgccagtgctgtctttttctggatcctattgatcatcgcttcagttattgggatcattgtctataggctctcggtgttcattgtattttctgcaaaacttcccaagaacattaatggaacagacccaatccagaaatacctgactccacagacagccacgtccatcacggcctccatcatcagctttataattatcatgattctgaacaccatatatgaaaaagtggcaattatgattactaacttcgaactcccaaggacccagactgattatgagaacagcctcaccatgaagatgttcttattccagtttgtcaactactactcttcatgcttctacatagcattctttaagggcaaatttgtaggctatccaggagacccagtttattggttgggaaaatacagaaatgaagagtgtgacccaggtggctgtcttcttgaactgacaactcagctgacaataatcatgggaggaaaagcaatctggaataacatacaagaagtattattgccctggatcatgaatctaattgggcgatttcacagagtttctggatcagaaaagataaccccacgatgggaacaggactaccatctgcagcctatgggcaaactgggattattttatgaatatcttgaaatgattattcagtttgggttcgtcaccttatttgtggcctcttttccactggcccctctgttggctctcgtgaacaatatattggaaataagagtggacgcatggaaactgaccacccagtttagacgcctggtaccagagaaagcccaagacattggagcatggcagcccatcatgcaaggaatagcaattctggctgtggtgaccaatgccatgatcatagctttcacgtcggacatgatcccccgcctagtgtactactggtccttctccgtccctccctacggggaccacacttcctacaccatggaagggtacatcaacaacactctctccatcttcaaagtcgcagacttc

SEQ ID NO: 2089 - DNA, 2348 bp, Homo sapiens
agagctgggagtgacactgacaagcaatcggccgcgtccagagcagcaggcggcatccggggggagcggggccggctggggggccccaggagggcttcctggaaccccagctccatggccgcctgcaccctgacacaggccagataagagtcccggctgcattatcagagcccggcagggcaccggcctccctgcaccagaaggaagactcggggcgcagcaggtcctcaaggcgatcttcccagagagcgggaccagcggctggtggccagtgtggatggaatttgcagagccctagctcgagtccgggagtcccgggccagatgggagcagacgcttgctggcggcaatagggaaagtgaggcagctgcaaggagggcggcgggactgcactcgagtgtccagacctgctcgatggtgagtgtgaagtgactgctccccatgtgtgccgtgacgccgccttgtgtggacagacttctggagctgggggtgacaggaggaggcagccgttcctcacaggccacctggagctcccaaggccggaggagggaacctgggttgaggctgagatgggatggcggtatcgtgctgtgtggccttaggcaagttatttgccctctgcaggcctccatttgtccgtttctaaaacagtggttgaactaggtgatctttaagagattctcatgatgacagctattccttgtgtatctgctatacgccaggcactgtgtaggcatttttgaagcgtcggctcgggaaatcccggtaagccccctgcagggtaagtattattggtgtccccattgtaccctgaggaaacagcagctgggcgaagtgaagtgacttgctgaggtcacacagccggtcagtggcagaaacgaaaaaagacctaggtttttccgacttgctttggctaaactctcctgtacacccccagtattctgtattctgtgctccatggttctgcaattatcccaagcagcaggggtgaaggagaaggaggtatggatggagcattacctgcaggaaggaggcagaggtgggacagaaggagtgacaggctgacactggcaagcagccttttactctctaaaggatgtgtcagcccagggtggaggctggctgccctgggatggggcaggggctccaggcttgaacgaagagtgcccagtgcaatttcctagatttgctgccttgtcgtaggaggctcctgggggcatgagagaagagggttaatatgtcagaggtggagagagctgggggcagggaaactggcatatgcctcaactaggttttgttccaattttattttgcctttgcagaaaatctgtttcgaatcactctgggcccgtgcagtgtttttggatgaaacagaattgtgaaacgcatacagcgctttccacatgcctcccctggggggaatcacatattaatattatcgtaagctatttgcatatatatccctgcagctgtggctggcagcagccaagagataagagacagataaagtcagctcgtgtctccctggcacggaaagggagggtgcaggttacactcaagggccaggaaacacacagcaggtggggaatccctggggttccaggcatcgggccagagtgaaaggtcccagcacccagatgtggccttttcttttttcttcccttggaaaattccatcccaaagcagctctgtactgatccaggcctcctttcctttcagggactggctgtgaaccccccaccacccaccttggggacaagtcagccctgagttgtggtctcagatctgggagcaacttgtccagaagcccccccagtcccaggtaaactgggacaattggtcaccctacccagttccaccctggattttctctgtgaccttgagcaagtcacttcccttctctcagcttcctcgtctttaaaacaaagggactatttcaggaaacctctaaaatctctccgcaaccctgagattccatgagtctggttgaagagcgcttaagttccgaactgagaacttaagcgtctgagagtaagatgtctgagagtaagatcaagtttggagtgaggctgggcgcggtggctcacgcctgtaatctcagcactttgagaggccaaggcaggcggatcacctgaagtcaggtgtttgagactagcctggccaacatggtgaaacctcatctctattaaaaatacaaaaattagctggccgtggtggtgcgtgcctatagtcccagctacttgggaggctgaggcaggagaatcacttgaactggggagggagaggtgcagtgagctgagatcgtgccactgcactccagcctggccaacagaacgagacttcgtctc

SEQ ID NO: 2090 - DNA, 2548 bp, Homo sapiens
gggaatagcctcatgtggctagtggctcattggacattgtagttgtagacgtttgagactgttggttttaagttggacttaatcactttcctacccaaattctaccactcctttaagaactcctttagaactcttttagttcacataatacgccatattttttttactgtgcctgtagttcttcaaggagtggtacaatttgggtaggaaaaccaggcaggaattccagggtagtgttcaatattgacattagtaatagtctatcaataataaaatagacatctcaatcgctatacaaaatctcagaaatgtaaagctcttacagagcatgcttgtgcttgtgtaacagctggtgtaatgcctgcattttcagtaccatgtagccgcactgttaatagttttctatcactttttagttactcatgtctcattaatgatagtgccattaattgtgatgagtgttttcgattcatgtggtcaataaaaagagactacacaagctggaactttgttgccattagtcaagctagtgagatagtatatctatctatctccccagaagaaagtaagataattgatggggtgtggattcagaagagggattacttttctttgagcctcagacttctagacagtatacttcagtcagtaatggaccacatatagaacagtgtttccttagtagaccatatttttactgtaccttttctatatttagatacacaaatattgtgttacaattgtctgcagtattcagcacagtaacatgctgtgtaggtttgggacaaaataggctctaccatctgggtttgtgtaaatacaagctgattttcacacaagattccctaactatgcatttcttagaacgtatccccattgataagtgatacgtgactaatttacgtgaaatttatacattctttatctttcctgtttttggtttattgatggtgaggaaaattactcgtttcagctttttcatttttttactccccaaatgattttcacctttttcttaaaatgtacaataaatgcactgaaaactttgatcactgtcactacagttgtacttaagtgtttttcttcggtttttgcttgcacagttttcatgtcattgaaggaaaaatttataaatgcttgaggagaatgagatacatcttgtataggggaaagtacaaaaggtatggtggcaagagagaaatccttaaaggggcactataatatgtaagtgttaacctaattgccagctttctctatgccatcctggacacagcgatcatattttgtttcaaataatttataaacattcattaaaacttgagtcatttgtgataaaatggtgtgtgtaaaagtaatgaaactaaaattggtgtggggtgttaaaagttgtaaaattttcttcatctaaatcataaaaagatacacattctagaggaattatctgccaaaaaaataacaattatcaaagatatttaaatgtatgggatgtacttaaaatcacttattccccatttcatgtttactaataaacatataaactaaagtgggtcaactaaatagggaagatacagcaggcaagacaaataggctgggcttttatttttatctgcttgggctttaagctttccttcattcaagtgacagattctgcctttgacgggatgcttaaaatcactatattagatctaagatcatttctaaaacctgtttttttaatgaacctaaagacttttcacagcagatgagtacataaaaatgttactggaataaggaataccattaaagctctaatatccaatgtcaagttttatattaaaatctttcccaagttatctctgccagggcattttgttgatgtcttagtgcaagattaccaaaaacttagtcaaattgaacaggatattcattttcttctccaactaccaaaacacagtcttcattataaggtgattggggtgcggttgaaaaaactgtggtgaaacgagaatcagaatgttttttgtacaggaaccaaatgattgctcccaaaactgtcaaaattaccgtgctagcaatcaccaatgctgatattaaaatgtggttatctgaaaaggaaaagacaaaagagtatttgggaaattagggtacacaagttgcaagtatattttgatgagcacaactgtagttttgtgtaaacatttctctgtgttgagaatttcccacactgatgagaaaaccaaaaatttcgcatttgttactaacaagatttatatttcttagcctgaagaatagtactcaaattttctaggaagttgtgcacttctccactctactgaagaccccatagtggaaatcacgcaagtatataccatgctccagtttgtcttccttcgctttactttctgatctaagactacaaattcagacctactgttccctttaggaattctagtatttagataatgtgttacattattgaggtttaatggttcacctggctttggggatttaagatttgtttaactgaaaaaaacaccaagacctgcagtaaagtacctggttttgtgtg

SEQ ID NO: 2091 - DNA, 2631 bp, Homo sapiens
tagctgggtgtggtggcacacgcctgtagtttcagctactcgggaggctgaggcgggagaatcgcttgaactcgggaggcagaggttgcagtgagccaagatcgcgccattgcactccagcctgggcaacgagagtgaaactccttctcagtcttggttacctctggggcttgacgggccctgtcctgccccacctctctctacagcctctggccatttattttagctgcccctccccacacaccagcctctccaggcccctgcatcacagtcatctttctaaagcacagtacagctcagcctgttgaagaacctgccttggctcctcgttgcccagaaattcaatgtggacatccttggtaggcattcagggtcccttctggtctggcccaccctgccttccacgcccatctcccgccagttctactctcagcaactccattgcctctcagctcccaccaggcctcatgttccacatccctggccttgctcaagttattctccttgttttgagcgctcgtcctccccacttttccacctggcaaaatcctcctcattcttagggacccagttagttcctccatgaagacttccccggcaaactgtgtccccccaccccaggcttctgtcataaaccacttgtcattaatcacttaacagttatcacattttgtcacagccagccagttcctgttcagtgagtagaggaaagaaaacatggactttgttaccagattatatgatggaatctcagcttggctactcaccggctgtgcgaccctgggcaagttacttaacctctgagctttggttttctcatctgctaaatggggataatgctcatatttaacccggattcctcaccaggcctgcaaagccttgcctgcctcctgtctcctgttgctctccacatctcacccacatcaacgtccctgcccctccttgaacattctcagtcctttcttgcgtccctgcctttgcacctgcccttctctacctggaatgtttccttctcattccattctccacctcatttccaatgtcacctcctcagagaggccctctgcaaccaccttctctaaatcccccgcctggttttgcttcatcttactttctgtttattttcttctagggcttatcccaacctgaaatttccctactttctggcttgcttgtcagctccgtgagtgtggggctcttttctctgggaactcagaagatgaacagacttgatacgtgttagtcctggcctctcctcttcctccaagccacacctgctcatctgtgagccccttcagggcagggcatcatgtcctcctcatttttgctttcttgaccctgagcagtatgcctggtccatagtgaacccttagcctgtatttgctgcctgcctgcctgtcattgtcttccccaaccttttcccttagcagcccttggtgatctcctgatggtttctaacacatgctgcaggttacatgtggagctgagcctgatatctcccagagtgggaatgtccaggggtggcctcatgtttctgccacttactttgctttccagcccaggacaggattttgagtggagagtttggggtatattactggctgtagcattagggaccttggccacgccctttgcattaccctgcgtggtaggacaatacctagaatggtctggtcaaacccgagagacttacagaaggtcaagaggacacagtgatgctcataggcccctctcagtggggagattgggctgtgacttgttcaggcggagtggggtccacacagtctgatgaagcttcatttggttcagaggaaaattgctctctgaacacagaccatccctttttttttttttttttttttttttgagatggagttttgctcttgttgcccaggttggagtgcagtggcatgatctcggctcaccacaacctctgcctcctgggttcaagtgattctcctgcctcggcctcccgagtagctgggattacaggcatgcgccaccatggctggctaattttttgtaattttagtagagacggggtttctccgtgttggtcaggctggtcttgaactcctgatctcaggtgacccaccctccttggcctcccaaagtgctggggttataggtgtgagccactgcgcccggactccatcccttcttaagctgacccaggggtctggtaattgagtgagtgtgatggctcaatgttacccacctcctctggcatcaggatgtagggaccagtccgttggtatgcagaggttgtggtacccagcctggcatcagcgatgctgggaagagggaatgctgttgcctgtctgctgctgtgggaatgacagagagggctggaaggagtggcctggcagggatggaccccagggcccgtgccttccttgtgctcactgagcaaatgaagcaggattcactccctgctgggagagggagattagggttagggagcacagtgttgtgctctcagatttgaggatttatcaataaaaattcaaaaagtcattttgggaactggcataaaggttcgtggcatcttattttgtcgagtaaggacacaggataggtaaaaaattagtttcctactattgtatcctaaaaaatgaatattttaatacc

SEQ ID NO: 2092 - DNA, 1803 bp, Homo sapiens
cgggcaacgtggagagatgtaggaagtgaacctgaagcctgacacactcaaggtctcggaaccgaaaataataggaattgttcttatttttccagtggaatcaagcacagagatgggcacgcctctttacagaaccaaagattcagaactgtgccttaccctttgcttatgaggcggaggaggaggaagagaaagaaccaccgcaaagagagatggcaacaaaggacaaaatgcttggaggagcaacagacaccctgagaccatgaagacaggacgaagtcacacactaagatctgaggcccagggtcaccacaaacccgggagacatgaggccaggcctgagaggcacaggcaggctgaggaatggacagaagagcaacagagaagcctggaggatgaaagccaactctgcaaagagcttccaagagtcttcctgccacagaaattccacttggccacagaaatggccctggccctgggccaggagagaggtggcgacgagctgctcatggcaatgactttcagtcagcatgtcttacctgtgcttccaagggtggagatgccactttgagtaggtcactgggtcaggcaggtcacaaaccaagctcctcctacacagtgagttcacggagacagagagaaggaagggaaggaggttctcagctctactgattccttaggtcaaggagggacagggtccctgtacttggggaccctccagtctgatgggaagatacaaggcaaccctcttagagccgtagaatgaatgccacctatagttcctcccttcaggaaggaaatccagtctgatggaagagacacggcccctgttgtatcattcttgccttcttacccatgtcacacaagggagtgaaggaggtggcaggcccagggataggtccatttctgtggtgaatggaggctttcagaggacattcccacagccctgctgtcaagggccccttccccttcctccctccccggcacgatgccttacccactggaatgaatcctgagctctgagcctattcctaacacatgaatgctgacccctttgtcacgtcccgctttccctccaactctgttttttgttctttttcccacccagactcgccctcccccacttgccatttcccaagctcatcccggggagaccagactcaatggcccactggtgatcttgttttacatgagacatttccaaaaaagaccaaaaaatcctttccaggaaaatgccatttttaaaattcagctccagacactgcggcaacattaggaaaacaaaggacttggcagaaaggttttctgcgtggggactttctctcgaaaataccttctccaaattgcctccagtggggatgactccaagggtcagttctggagcacccaggcaattgcagacagagtgacttcgggtttgtacactgtcccaggtctttccttacctgatatcaccctgggatcttccaggcttaaacaaggagccccttccaagggtccccaaaggaagcagctgtctctgagggtcaagaaataatgctgcttccttcctccagaggggactcctcaacccctctcttgccaccatcactaagccaggggcccaggttaggaggtggagggacatagtgtgcttagtagagagcttgtcttctcttatcatccaagtgagaggaatacacagcttcccctggggcatacatagtggtgttccccttttttgcatgtatcaggtataattaatcaggttgacatcacatatgtaataataatggccattatttattaaacacttccaatgtg

SEQ ID NO: 2093 - DNA, 2361 bp, Homo sapiens
ctcaggcctggaccatcactgttgcccatcccatgccatcaacaggtttgccccatcccttcggctccctaccagggcattcagttgtgttgagcagcagagtgtctccaagtccccactggttgagctgcatccgggtcccatcccacagggaccccctggccgctgcagatgcatgctgatcctgcagctcctcgagggtgtcatcgctttcccccttcccagacccagcacaccctgcctgcatggcgctgcgctgcaccttcactctggtcacgggtctggcagtcagctcaccaattcctcctgcttccctgggacttgccggcttttagcactgcaattcactcagcaaactgggactgttggtcaccctacctggcagccagtgataaggtgagggccactcctgggagggaggacacctgtggggaaaattcttgtgttatttatttctccttcgggatagggtgcctgcagcgcttcatgggagggggtgggctgatgctgcgggctcagaagtttcaagggcatctggggagaccagatattcagagaccttctagatgtgcctgttccatgtatcagggacgcaggttttcccaacagggctggtgtcattggcatgacagacctgccttggctgagcgttcacctgtctttggagttcagccaccttagcaagtcctgggtttgttcttcagactttgctgctcgcccattgcctggatcgggggctactttgtaaaccaccaggaagactccagtgtttctggttaatttttagatgtttgttaattgctcttggtctctcattaatcccctgtgggtcatccaggaaacatactcaccactgtctgttctctgagttttcatttccaggcatccgccctgcctggatctcctcacctgccaggaacttcctctccacaagccggccatcccagcaaaagttctaacaccaaaggtctggcaactagcctgccatcttgtgcctggagccgcctgcgtgccacctactcccgaagatgggaaccttgttgccagttgggcagatgcggggcaatcctgtaccaagaccccattttaccacctgctttctcagaccactctggaacccactgtctcagattgtgtcctccaggaagcagaccatgagagggagttggcagggccaaagatttactggggctaactaacactcaggaaagggataggaaggaaacagggctggagagcaggttgagcccgacctgacagtctcgagcagcccaacagggaggtgtggagcaagggttgcccactagaggggcctgcattgggtacgggtgatggggtccacatggtacctggcatatagcaggctgtgcaatccatattaactgactggataaattaatgcccagaaaaggtgccctggagaatgggtgtgtgctgaacacaatagggaagggcccagcatctgccttggcataggcagaactgtgctgttccctgcaacaggccacctgagagctgctttgatcttgtgtgtacattagatgactgccaggggcatgaaggggatgtgcttccagggcatttgctggcagggcgtctcgtgatctcttggtattggtgtgagcacagcctggcaggagagggcagatctccatgcaaagtatgtcagaaagcagatggaagccaggccccctcctgaaagaggctccttgaaggctcctgggaccacattatcattctcttcactcgagagatgaggacactgaaattcagagaggggaagtgatttgcctcagcttgtactggtttcactttgtcactcaggctggagtgcagtgatgtgatcatggctttctgcagccttgacttccgggctcaagtgatcctcccacctccgcctccttagtagctaggaccacaggcatgcaccagcacacccagcaaattaaaaaaaaattttttttaaagatgagatctcactatgttgcccaggctggtctgaaattcctgtcctcaagcaatcctcctgccttggcctcccaaagtgctgagattacaggcatgagctaccatgcctggcctaaaacatttttaatggaagtataatttgcaaacagaaaacatgcccaaatattaagtgaatgcactgatgaacattcacaacttaacaagatagccagcacttaaatcacaaaatagaacaccgctaggacctctttgtaataccctccaagtcactacttctgcccaaaggtaatcgctattttgcaacattttttattactttatataaatgagatcgtacactgcgtaatcttattactgtctggatttttatattaaatattgcttgtgagattc

SEQ ID NO: 2094 - DNA, 2751 bp, Homo sapiens
aaacagcagagcctgccatccccaacagatcaccagttgtccctgacatcgtgccctaccttgtctccctttgtggtctcctaaatgcccatctcgttggccttggttcggctagtggtatggaggggggctgcctagcactgacctgagagtgtgtgtgacccactgacccaatggtgagaactgactgcccacctctccaactgattgttcaaagggtagaggagacaaagtgcagatctcaccctttcttggtattttcccttctacccttttggaagatagagtggctatttgaagttaaaggaaagggaaggggcacagaaacagtattacttggtgtgtttgtgtagtgggttttcttggggagggagaggagagttaagtactttaaaggatagaaagaaaataatgagacaagagagtttaggtgtgcttgggaactgtcttaggtaatgatcctggaagaggccagcttgtactggaacccagatatgcttaggagtcaaccttgacattgaagtcatttgcatttctttcctactggctaccagagcctctcagtcatcatactgagacttcagaaggccaaaattccctagatgttttcctctgtcccactaagagctagtttatggatatgatcatatcaggaagagactgagcctctcacaaagggtgacatgaaaggtgtaaagggatcagggcttcagttattctatatttcccaatctttgtgggaatctgttcctcaccatatcatcccacgcctttccatgggataatagggacctaacaaagcatgatatccttatttctcaccactaggacatcaaaggccagttctggaatgatgacgactcggagggagataatgaatcagaggaatttctctatggcgttcaggggagctgtgcagctgacctgtatcgacacccacagcttgatgcagacattgaagccgtgaaggagatctacagtgagaactctgtatccatcagagaatatggaactatcgatgacgtggacatcgacctccacatcaacatcagcttcctcgatgaggaagtctctacagcctggaaggtcctccggacagaacctattgtgttgaggctgcgattttctctctcccagtacctagatggaccagaaccatccattgaggttttccagccatcaaataaggaaggatttgggctgggtcttcagttgaaaaagatcctgggtatgtttacatcccaacaatggaaacatctgagcaatgatttcttgaagacccagcaggagaagaggcacagttggttcaaggcaagtggtaccatcaagaagttccgagctggcctcagcatcttttcacccatccccaagtctcccagtttccctatcatacaggactccatgctgaaaggcaaactaggtgtaccagagcttcgggttgggcgcctcatgaaccgttccatctcctgtaccatgaagaaccccaaagtggaagtgtttggctaccctcccagcccccaggtcagtggtcactgcaagaacattcccactctggagtatggattcctcgttcagatcatgaagtatgcagaacagaggattccaacattgaatgagtactgtgtggtgtgtgatgagcagcatgtcttccaaaatggatctatgctgaagccagctgtctgtactcgtgaactatgcgttttctccttctacacactgggcgtcatgtctggagctgcagaggaggtggccactggagcagaggtggtggatctgctggtggccatgtgtagggcagctttagagtcccctagaaggagcatcatctttgagccttatccctctgtggtggaccccactgatcccaagactctggcctttaaccctaagaagaagaattatgagcggcttcagaaagctctggatagtgtgatgtctattcgggagatgacccagggctcatatttggaaatcaagaaacagatggacaagttggatcccctggcccatcctctcctgcagtggatcatctctagcaacaggtcacacattgtcaaactacctctcagcaggtgggtcccacattgagaactggcattcgatcctgcgcaatgggctggtcaatgcatcctacaccaaactgcaggaatgggaaaaggacagcacaggatgccctccaaggatgagctggtccagagatacaacaggatgaataccatcccccagacccgatccattcagtcacggttcctgcagagtcggaatctaaactgtatagcactttgtgaagtgattacatctaaggacctccagaagcatgggaacatctgggtgtgccctgtgtccgaccatgtctgcacaagattcttctttgtatatgaggatggtcaggtgggcgatgccaacattaatactcaggaccccaagatacagaaggaaatcatgcgtgtgatcggaactcaggtttacacaaactgagggggccccagccctcgtaccacccctgttaccccaggatccatctgccctcataaaagtgttcaggtacagcagctgaggctgccctgaggaatcaaggggccattaccaaggggcaggaaaaggatatgtaagaggtggccttcatggtagagcttgacccaagaactactccacattcggatggcccagactgactccatcccctgactttccctttgacttcaccctgtttgtaaataaaacaataaaacggaaggtgctgtggactgg

SEQ ID NO: 2095 - DNA, 3490 bp, Homo sapiens
catgctcatagaaactagaaaatagtaaagaaaaagattaaatctcccttaccctgaggcaaccactgttaactgtttttctaggcatgtatgtatacatgcagcccctttattaaaaagtgagttatatatgatacatgttgtcttgttagctgctttcattcagcaggctgttggggccagctttctatgtcagggattatgggcttccgtcatgattttccttttggctacacaatagcccattgtgtggatgtgttggaatttactaccctcaactgttagatgattaaatgtatgattaattcacaccatgccatgtgattatcccatactgtactttaggtatggtaatcttcacctggggatcttctggtcacataaaacagttttttctctgaggaaattagaactttatacttttctttttgtatttttatattttttcttaagaaatgctattaaaaaataagttgtttcctcagactgtttagctgtaattgtgaataatttgccaccctttgtggcagaagatgtttgaaggccacttgaaggaagaactcgtgtcataaaaacaactgtagttattctttactattcaggtgtgtttgtttccacaggcactgggtgcaagttcctgtgaaatatgccacgaggtgttcaaatcaaaaaacgtgcgtgtgctcaaatgtgggcacaagtatcacaaaggggtaagagctctttttggccatccttacagcatgcattgggaccttcaaatatttccaaaataagaaaggaattgttttctagtcatcagtatttattgtgctttcaaactattttctttgcaaacctcccgtgtcagtgttcagtgcctccctgtcctcacaccagctctgcaggaagggcagctctggagaccgtcctttccatcccttgtggggagaggggaacagcagctccactcgttagtgctgagattcaaagcagtattagttccttgaaaggtgatttcttacacacttgactaaatggagaaacagtgaaaccatttttttgacttagtgtagtatatgaagtcagtttaacattttagaggagaaaaactaaacctagctgagtcccttctgcctgacccagggacagtcctgctcgtaccgttctgggatctgtgtgtgaactatcatggtgttctaggtaccgtgagcatttgtgtgcacccctgctgctgggttagaacagatcaggtctctgccatggggatttgctaatcccttggaacgggataaatacagcatgctcactgaaaggaattgagaccacttgccaagtctctggtgtggtgtgcctccttgggtacagggtcttatatttgggctagctgactgtccacagcctctgcagtgtgggcagcagcagcaggagtgtggcgtgcaggctggagggctgttccagagccaagggccaaggccaggccaagggatgggctaagaatgagtgattgggtcatagggccgagaatgccagactctggaatttggcgcagctgaagtggaagagccgagcctggaaccggggatcagggcaagaccaccccctgaggccaggttggaggcccagagcgctcaggatctgaccctgaggtgggatcgtttgcggctggggctttgtccacactctggcctgagcgggtgttggtgtccctgagtattgggcagctccaggcccaagagaccaagggcaagtgagccacgcctgccaaggagcccagcagcacaggggagctaagcttcctcatggtcctgaaggcatcttctgattttgttttctccttttcagtgctttaagcagtggcttaaagggcagagcgcttgcccggcctgccagggtcgtgatctcctgacagaagagtcaccttctggaagaggctggcccagtcagaatcaggagctgccttcctgctcttctaggtagccacacttcactaaagtgtcatccaccagtgtgttgaatccgaagaatgacaattttctaccactggtgtaaaaaacaaacatttgaagacccttgtgcattgtgtgtcacaaagctaaatacatggaaatcgttaatatcgttgatattaagtaatttccccactctgagtgaatactttgatgattgccaacagtggctaataaaatgacggctgccacactcatgggtcactggggctgcgcagggctctttgaggtgggtggcttcttttggaaagtactatgaacgtctcgaagcagtattctagtgataagaattcttaacatagccaagcgccccacgtttgttccccacgtttgttccccttttctgtttgaaaaacctgttctggtagctccacaagagagatgatactgactttttaaattttttacaagagtctgtattcctgatatgcctatatttttcctcaaagattctgcattttaaggatgggcataagcaaactatattttaataatttatagttaatgttaaaatattggctgatttagaccaaaagattcaaatctcctctttgtgaaatcccatctgcatttgattttttattattttatgttcccccgttagattgttttaagtgtttgcttttcatcttttatagatgtaatctgattttcaaaaatcattaacactttttaattagtatcgactaagactttttccccctggaatcgaggctgtgtgtccgtcatcccagcccccggttggagcctgctctttgaactccgctgcgctcctcagcagcttctgtcctcttctgtgagtcagtcagcgagtgcttgggatccgcatccagccgtgctgagcacacaacaggctgtgtgtggaaatggccaccaccattctccttccccaccccaccacaaaaagagaagctgtgtctttagacaaccctgaggtatctgtgttacaatcgttctgtgtttgatatttgtgtaaagtatgcatgcagtcttgtactgtgacctaagaacaaaactgtaactgcattagaaaccatgaaaaaattagatattgttttgtgacttttagacagtggtaaatatagaaccatgaattctggtcacattccatttctctccaacatgaaggatcaaaaaatgtttttcaatgtgttctttgttccactggaaacttagagtcatgagtttatgagctgatttggtcaccttcctctgcctttgttcactgtgagttctgatgtcttagtgacttagttcttagaagctcacgccttagtttgaaacagattctccacggtggtccccaaaacactgtctgcatatccataagaattgagcgctatgggtgttaacgtgcatgaggatcagtttgcagcagcaagtacaaaaggagaagaggaacatccgttgaatgagtgtgttttgtacataacttcagatacttgtgaacatgccttatatttgtccaacaactgtcagaataaagaacattctaaaatgag

SEQ ID NO: 2096 - DNA, 2400 bp, Homo sapiens
attcattcatttactgccaaatttcttgatgaactgctattgacagatgattaaaattcaatcccagaaatattctgggcctttgaaaggtgtgtcctactggcctgaagaaggggctgtgaccagatggtggttctgcactcgtaggtagggtgtggtccttgtttgcagtgaatctctgggagcgtggcagtttcttccgtgtgtcacgttctccctgtgtctgcatccagagtggccgcagtccccaggggatgaagggtgcacctatttctttaaatttccatggagggtcgaaactgctccttgagattttaaaatacgcttcatggtccccacggtgtcaggtagctagtttatgggtcccatcctggttgtgataactcaggctgagctggatgataaacgaaagtgggacagagctgcaggataaatattgctacagggcatctccagcggcacaaatcacagggaaaatatctcccaggcttttcatttctcctcttcctccctggccctctggtagcagccagcaaagcaggatccatccgtcacccttcccccgcccccaccccagcctcagctctcagcgcactgctggggagcgagggatgcagattggtcctggtgcaggcggccctctctgtcttgcggccctctgcctccccgcccagctctggaggcagccccggggagccggcatggtcagggtcatgctgttttcagttgtggacgagtgcttagctttgcagacctgattctttatctctaaaacgagagagattaataactggtggttcttagtctggcgcgagcgggtgctcgtgtcactcaccgggggaacttaaacgccgcttgctgagtcccaccctagcgcatagaatcataaccgcgggggtctggtctggggtgttttcactgacgtttggttggccctgccagcggtgctcacgaggcccactcctggccaagagccactcctggtacaagtgaggactgagatgggcgatggggtgggcggtgcgatgggccagttcgttgaccagctcttgtactagatccatcagcaatgtcgcttagcgaggctttcttcagctttggaggcatgctggcttcgtaatcagcgtcaccctgtaggtgttgattgagcctgcagggaataccaagcacgtaggcatggaaaggtaactaaccgcacgcggcaggcgagtctattaaacagagaggctggtcccagcgcaggttgttaccaccgctgggccctcccaccacctgaccttgaagcgcactcagaggtttctctcactccacgcccgggttctgctgactgtgcctctgccttgtctctggatgccactttcccagttcaggtgctcaaggcgtcttacctgaacattaccacagcttcctgacaagtctctccaagctgtcctttgctgtcctgcaaagtggctgtgcccactgacctggtcggctgtgcctggttggctgtgcctggcatgtggagggtgctcactgtgcccgggtggatgagttcagtggttccctgtcttcccgaggaaagcccagagtctgtgtggctgcagccctgcccgtggccctcacgagctgtatgaccacccgctagactcttcttgtgctttcttgattctgccacgtccttgccgtccgctgggtctcgcctgtgctatttgctctccctgcaatgccctttctcttccctctgccaggcagactgtactcacccgctgggcgtagcacaggtactcccatgggacacctcctcatctatgcccatactggcattgtagcacttaccacatgcttgtgctgttgaaagagtttgtttttgtgtatttttttatttttagagatgagggccaggctggagtgcggttgcatgatcatggctcactgtagccttgacctcctaggctcaagtgatcctccaacctcagccttccaagtacttagaactacaggtggacaccaccatgcctggctaatttttaagtttttgtagagatgggggtcttgctatattgcccctggtcttgacctcctggtctcaagtgatcctgttcctcggcctcccaagttgctgggggattacaggtgttagccactgtgcctggctctgccgtttgtttaaagatctctctctctcctttctgtcttcctccctccctccctcctcctccttaaattataagctgcttgaaaacaggaaccagctgagttgagcccatctaccaagtgaaatgcccagcagatctctgcctgataaatgtttgttgaatgactacagcgtggtgttaaggatgtggaccaggaagggatgtttgtatttgttgtgttctgaccttgctagatgaccctgaataaattcatttatcctcc

SEQ ID NO: 2097 - DNA, 3019 bp, Homo sapiens
caggagctgcctcactgtgtcccactgaccccaggttctgcagaagggcctcactgggtgcccttagggatggaaagggttgaaaggctgtactccaaagcagagtcttgcttttctctcccgtattttgggggttcagctgggattagaaaaaaatgtctttccaccaaattaaagaaagctttgaaaaccactggcctagagaatacctaactgactggaggatgggagggtggagctcaatttccagtctataggctgatactaaagatattcacaattcatggatattgtggccttcactgatatggtgaccttccacaagtcacctcaaacctctgggccagtttaaaaaaaatggtgaaatgagtcctgcccttacctgcctaccggggctggccgaaggatggttatacgtaaaaggacttgaaatgtggtttcgacaaggactttttgttgctatcctgaggaaagatggatgggtcactcctccagggaatatgagaggtagtataaatgaacagttgcagagagcaatgcccatttcacggatgggcacactcttggcatcaactctcttggtccaatggcaaccctatatattgcacacgggacactttctgtggggactctgagatgcagagggaccagataacaagcaggaaaggtagggcctggtgtgagggcacgagactcaccgacatccctgatgacaagcctgtaggtccctcgggctctctccccccagcatcgcacagtggagaaggtccagtcattgaagccgttgggatccctgaggaaagaacacagcagaaacaggtggaaggcgtgggccagagagctgaccttcccccagcaacactttcttactgtagtagccgtggaaacaacctgggagggtgccacgagggcttctcaggtgcccctttcccctggggtctcatggaaggaggaaattgtgttaacgtggtgtggtggaaaaagcaagcatggagcgcgcacaggcttggagtcccacggatctaggtttattcttgttctcttgggcacttactagctccatgacttgttttctttttctttcttttttttttttggagacagggtctcactctgttatccaagctggagtgcagtggcatgatcacagctcactgcagccttgacttcctgggttcaagtgatcctcccacctcagtctcctgagtagctgggactacaggcatgtaccaccatgctcagctaatctttaaattttttgtagagacagggtctcactttgttgcccaggctggtcttgaactcctgagttcaagtgattctcctgccttgacctcccaaagtgctgggattacaggtgtgagccaccacacccagccagtttcctcatttgtaaaaggaggttacaaagtctaatctagggggttcttagaaggattagagaacatgtatgtgaggtgcagggcctagcgcttgaagaaggtatgtgacgaaaggcttccagccgccagggatagccagtgccacagtagtttaggacagtgccaggatccacttcttccatttcttttccctggaaaggcccttgctgaaaaggttgctcaggcctcgggcgggtgtacatacgagtccatgctgcggggggcgccgatgagggacatcatgccactggggcagaacagcttcagctccaagctgccgcgccgtgggtgagtgatggagactgtcactgccacatgctccagggtcttcagccctgacatctccaggtccatcctgctgactgtagaaagtcaggctgggcagctgggaaaccagcccacaaacacgccttcacttcacccccacgtacacaaagacacacgctcactgaagccacatacaaacatctacggcaaccctaactgggacctcgcctatactagtaaatggaatggagctgctgctctcaagtttacaacgtagcttcgagtgcagttgggaagacgacacatacccaagacacaatataagaatccagcagagcaacttcaatcattcattcatccaaaacattatttactgggtacctcctccatttcaggcactgtactagatgctgggaatataaagataagatgggcgtggtccctgcctcctacctgcaagtggaaaatgatatggtatgggaaatatacataattgataagggaagagaaataagtcagatgggtttaggcacacagcagtgagacacactgaaggaaatgaatacagatcggtagacagggttggtagagggcattctaggcagtggaaaaggcatgaacaaggacgaaatgcacacatctcactgaagatgatgcacagttaatttttaaaaaatgctggtggataaatttcaagcaaattatgtgagtgaaaaaagcaatctcaaaagaagcatatagccaggtgtggtggtgtgcacctgtggtcccactaccggggagggtgaggtgggaggatcgcttgagcctgggaggtggagattgcagtgagccatgctcatgctaccacactccagcctgggcaacagaacaagaccctgtctcaaagaaaaaaaaaagaaaaaggatgcgtagcacacaattccatttaggtgatgttaattgaagtacctgcagtgatacataacagataaatgggtgccaggggccagggacaggggaggggatgggtgtggccagaaaggggtaacacaaaggagtcttgtgataatggaattgttctggatcttggttgtggtggtagttatgcaaggctacatgtgatacaattgcatacagctacacacgcgcatacacaaatattgacagcatgtgtatctggtgaactccaaataagctctatggattgtaccaatgtcaatttcttggttttgatattatactttaattgtgtgaaacattaagattgggagaagggtgcacgggacttctcttgtacatttctttgaaacctcctgtaaatctacaattattaaaacaaaaacaaaaac

SEQ ID NO: 2098 - DNA, 3217 bp, Homo sapiens
actggccgcgcgtcgcacgcgtcgcgcatgtgcgcctccacgtcgcgccgcagcagcacctggccgcaacccgcgtggcgacagcgcgcgggcgcgaagtcgcagcgctcgaggtgctccggcagctgctgcagcttgaccgcccggccgcagccgcgcgtcgcgtacgcgcacttgatgtccagcttgaggataaggcgcttgagcggcaggacgtggttgagctctttggccgacaggcgaccgcggcagcgcgccgggcagctgccctcctgcaccacccagggcagcacgcagccggcgcagaagacgtggccgcacggcgtggtcagcgggtcctccaggaccttgtggcacagcgcgcacttcaggtccgggtccacgtcgccgtcgaagcggtccagctcgaagcccatggtggcggccaggccccggggtcgccgccgggcggccgggcgccccctccctccccacgaggcggcccagacaggccggctacgccgcccgcgcgctcgctggctctccccggactgagcctaattgatccagacttcctcggaaaatgcccgaggaacaggactcctccggccgtatttgcgcgagcgcgagcgcacatacatcgtgccttggatgcctcccgccagccccccgaaaaagggaggaggctggaaggcagaagcgcgtgggaggacactgaggctcgccagaagggacgggccagcccaggacgccagcctgaatcttctcgggaaactcctttctgttctcttacagtctacgctataggagacaaaacgccagccgagaaaagctcgctgagtttggagctgaggctactgctttctcccaagggttctcttcgagccccttcccgaacggatcaaaacttttttactcccttctccctcccccttcctctagtggctgattgcagaggactaaaaatatcttggggcccgctatctcagcacttacggtctttatttatttacttcattccagggaaagttacagagcctgcgggaagctccggctgcaacttcagttctgaccagaggttctgtgaaccttcaggatttagcaggtttccaggaccggtgggtgaatctacccggggaagttttggtggacaagagctgctcgccagctgtcggagtgggagaggccagcgtgctggctccatccacttcacctaacacctctgaagtgtctgccctgcagtgtggcaagcgtggtgctgagcgcttctaaatccgtcgctttaaagatcattagtacaatgttgtgagagggttagctccatttgaaaattattttcccgtgattacaaaagaagcgatgctgactgcagaagttagaactgggagaagactcatcacccccatgatcatgtcaacaactgccctccttcagttttggtttgttttgtgtgtacactctgtcatctttccattgaggaaactcaggctagaagaaggataaaaacaaaacagaaaacaaaacaaaacaaaagtgccctgtagggtcctgtaggtcagtgtttctcacattttaatgtggttgcggttctgatacagtgggtctggggcgggttctgagaatctccatactgaaagcacttccaagtgatgccaatgctgctagtccatgctggtccttggattcccacttgattggaaaaccctggcgatccatagatctggacattcattccctgcagtacagcaaacctggctgggtaggattcagcaacagtcctgagcaatggaggaatatttttggaattccaaactgggtgtaaagttcatagcatcatccattgattttattttattttatttttacctcccaaggctatagacattcctaagaaacacgcagtcagcttttggtgagagtggaatcaagctatggaattctcatttggaatctgcttccagtttctgaacagtgaagcgggagagttctgaacagtaaagcaggagctctgtattcagcgagactctggggcctggaaagtgggattacagcatccattttgtctaattgctttccttctttcttttatgtggctgctaaagccccatgaccttcactatttaactgcttcatcagagtgaaagaattgccttgatgttcataaggattacttgtttcacactgacctttaaaaagttgtcactcactagatttttcagtgcatggttgaggtcactggacagtgttctttaatcagttttggtggcatttgttgcctatttgaggtggagactctcttttaattgctttaatcaattaatgcattgctttgataggattctgcatggggtggaatattattggcctttgttcagataagcttgtgccagggaatcctccatcagtatattcattaaactgctcatgggctctcagataatgggtaggaaacaaattctttcaccaaaggtgtgtgggcttgtcagtttcacagaatgagctagtgtcaacagggtgataatcttcaaaccaaactggttttgagaaacagagaagttctgtcctacaccataaatgtaaattagtgcttacttggggtgtacacttttttggagatgttctaccacccctcgggtggtctcccagatggcagattgagaggttgttgctgaaatgctacagctgaggccacagagaagccatagcctactgtggattggcctctttaggcaaaaggaaagtctgtgccactcctcaatggttaattttagtatcaaaattcttggaggttagaaaaaaaatcctacaatgtcagagctggcaagactattatttcagtcaccaaacttaacaggagaaacgagagccaaaaatattaggaaaaaggagttgagggcagagttactcaaccttggtactactgacattttcattcaaataattatttgttgtggtgtgtgtgggggtggggggttggttatcgtctgcattgcaggatatttaggagcatctctggccactatccaatagacatagtaacaaccccttgttgtgacaaccaggttgagaaccacagttttaaggaagctttctgctcattactgaagtcaggcaatgctgtcagcccacattttctgctggctgtggaaccacctggtgaatgctgcacagtgagagagggatgttattataaatcgaaaactcaaggcaccataccaataaacatgaataaaaactg

SEQ ID NO: 2099 - DNA, 2523 bp, Homo sapiens
aatgtggaatgcactgggcaaatggtcactgacacagagtgcagatgcctgcttctgggactcaatgcactgcaccctggtcatctgcggactcagcctgagcctccagagggcctaggagcagtaagggagtgagtgggcaactcagcgcatgaaggaggccgccctcatctgcctggcaccctctgtacccccgatcttgacggtgaagtcctgggacaccatgcagttgcgggctgctagatctcggtgcacaaacttgttggcagcaagctacatcgagaaccagcagcatctgcagcatctggagctccgtgatctgaggggcctgggggagctgagaaacctcaccatcgtgaagagtggtctccgtttcgtggcgccagatgccttccatttcactcctcggctcagtcgcctgaatctctccttcaacgctctggagtctctctcctggaaaactgtgcagggcctctccttacaggaactggtcctgtcggggaaccctctgcactgttcttgtgccctgcgctggctacagcgctgggaggaggagggactgggcggagtgcctgaacagaagctgcagtgtcatgggcaagggcccctggcccacatgcccaatgccagctgtggtgtgcccacgctgaaggtccaggtgcccaatgcctcggtggatgtgggggacgacgtgctgctgcggtgccaggtggaggggcggggcctggagcaggccggctggatcctcacagagctggagcagtcagccacggtgatgtcccggccagtgtgcagctgcacacggcggtggagatgcaccactggtgcatccccttctctgtggatgggcagccggcaccgtctctgcgctggctcttcaatggctccgtgctcaatgagaccagcttcatcttcactgagttcctggagccggcagccaatgagaccgtgcggcacgggtgtctgcgcctcaaccagcccacccacgtcaacaacggcaactacacgctgctggctgccaaccccttcggccaggcctccgcctccatcatggctgccttcatggacaaccctttcgagttcaaccccgaggaccccatccctgacactaacagcacatctggagacccggtggagaagaaggacgaaacaccttttggggtctcggtggctgtgggcctggccgtctttgcctgcctcttcctttctacgctgctccttgtgctcaacaaatgtggacggagaaacaagtttgggatcaaccgcccggctgtgctggctccagaggatgggctggccatgtccctgcatttcatgacattgggtggcagctccctgtcccccaccgagggcaaaggctctgggctccaaggccacatcatcgagaacccacaatacttcagtgatgcctgtgttcaccacatcaagcgccgggacatcgtgctcaagtgggggctgggggagggcgcctttgggaaggtcttccttgctgagtgccacaacctcctgcctgagcaggacaagatgctggtggctgtcaaggcactgaaggaggcgtccgagagtgctcggcaggacttccagcgtgaggctgagctgctcaccatgctgcagcaccagcacatcgtgcgcttcttcggcgtctgcaccgagggccgccccctgctcatggtctttgagtatatgcggcacggggacctcaaccgcttcctccgatcccatggacctgatgccaagctgctggctggtggagaggatgtggctccaggccccctgggtctggggcagctgctggctgtggctagccaggtcgctgcggggatggtgtacctggcgggtctgcattttgtgcaccgggacctggccacacgcaactgtctagtgggccagggactggtggtcaagattggtgattttggcatgagcagggatatctacagcaccgactattaccgtgtgggaggccgcaccatgctgcccattcgctggatgccgcccgagagcatcctgtaccgtaagttcaccaccgagagcgacgtgtggagcttcggcgtggtgctctgggagatcttcacctacggcaagcagccctggtaccagctctccaacacggaggcaatcgactgcatcacgcagggacgtgagttggagcggccacgtgcctgcccaccagaggtctacgccatcatgcggggctgctggcagcgggagccccagcaacgccacagcatcaaggatgtgcacgcccggctgcaagccctggcccaggcacctcctgtctacctggatgtcctgggctagggggccggcccaggggctgggagtggttagccggaatactggggcctgccctcagcatcccccatagctcccagcagccccagggtgatctcaaagtatctaattcaccctcagcatgtgggaagggacaggtgggggctgggagtagaggatgttcctgcttctctaggcaaggtcccgtcatagcaattatatttattatcccttaaaaaaaaaaaaaat

SEQ ID NO: 2100 - DNA, 2816 bp, Homo sapiens
attggggacaatcctgcggggaggtgctgaggagggcagctacgacaactggccccacaccaggaaaagctgggggccgctgagcccaggccaccaacgggagctgtggacccagcctgacccctggaccgaggtgctttcagggcacaagggggatgcgggagcctgtggctgctgttgcttctgctctcagttcataaacgcacgctgtgcacatcccctgtgcttggcaaggggcctggatagaagggccagtgaggagatgcccatcctccaggcactgtgcctcctcccaaaggtcagcaccccgagcatcactgtgccctccccacaaaggtcagcagccctgagcatcactgtgccctcccctcaaaggtcagcggccccgagcatcactgtgccctccccacaaaggtcagcaccccgagcatcactgtgccctccccacaaaggtcagcaccccgagcatcactgtgccctccctcccaaaggtcagcacccggagcatcactgtgccctccccacaaaggtcagcaccccgagcatcactgtgccctccccacaaaggtcaccacagatgtccctgagctctgcagcacgtgggtccaatacagatgtggcaggtttgtctgttggggagtggcctggctggcagctgtggggagaaggccaggacggggcacagcagaggcctcacctgcccagcgggggctctggggctggggtggctcctcagagattgcccaagtccagagcttgcatcctatgcagccgtcacggggcacagggcccctgggttactggcaggtccgtcagccatagccactgccccatccagggcctgctggatttgcagaggccagacttgggaactgactgggggaggaccaggcccctctgcacccctcaggatttatgtgggggccggcctctgccgtccacctggggcgtgacaatgcatttgattcactgtctctctgtgtcactgtctctatgtctgtctttatctcactgtgtctaggtttctgtctctcccactgtctcccttgctcagctgggtgggaaagggacattctggaaggttccacatggtcttccctacaggtcaggacaactgggctattccagtgacgtattggggatctgggaaatgacctctgggagttccgtgagctccgtctggaaggtccccattcatttcccgttccctgctctgctctatgggggcgcggcggggctgcagttccctgatgctggcgtctgctctgtccccagcccactgccctgaccgtttggaccgacccttcctccccagcgccccttgggagggccagggggacccttgcccaaggcttctgtgcatttagggttctttcttcccctctcctgtctggattctgcatctggaacctgccccaggggggaggctgcgtgggatgctgggtttgctgggcagctgcctgtggccccagcctccgtcttgactgccttagtggggtgggtggagctgctgcccacctctcctgcccccggggcttgggtgctaccggctttcactcccacctctgtggggcaggccccggtacaccactcagtctgctgctcagccccacaacggccctgccttccttctgacagtcaggcccccttctgccatcaggggcccggctctgtgatggtgtctggccgccagccctgcccacgccgcccggccaccccagcttccagggaggctgctgctgcccactcttcccagtggccagtgcagggtctcctgggcccccgggagcaggtcagccggcagtgtccagccttacaccacgcctaccagcacggtcacttctcagggcctttggtccccggcgtgggctgagctgggctctcgctctcctgcgtcactggcattgcttatgtgctgtgcctgtctcccttgacggctctcagccctgcaggaccatggacgtcccttccctctctcagcaggaaaatctccatgatgccagcaggcgtgtccacagaggaaggggcgaagaaaatgtcgaatggacaggcgacctgcatcctgcccagctcggaagaggaggacgtcctgagattcgccacagcctggaggcgattgcgctcgtgacaaaagccagacacagaaagacaaataccacgttctaatttgtgcatgggagctaaaataaacccaggtgctccctgctggaaagccacacgcggcagaggagagctggcaggaggaaaagcgggttcgagtcagcagcctttggagacggcagactgagagtgtcacagagaccatctcaagtctgcacgaattccaggctcttttatgttaagggcagggggacggggagggggttgggatcaagaggtgacaggtgaccgcacacatgtgggtgccagcgagggtccgaggaggctggcgatgccttcgtccttggtcaggtcacgagcacctgtgaatccacagcagaacagctgttcacagcttcccctttcatcccggagtgagtttcaaaacctgcaccacgactgcctctgtgtattttctccgtcctctagaagatcctaggctccgtgcaggaatgggtgaaggccccttacacaaaaacaaagtcaggtcctgagttcttttgctgtttctttgctttctcctgcaaagtcactcgaaaggtgactggcggaggtgaggctgcgataattagcttgattgtggtgacccttccacaaagcacgtgtatgtcggcatattcactgggtcatgcacctcgaatacatatttttacttgtcaaatacatgataataaagg

SEQ ID NO: 2101 - DNA, 3232 bp, Homo sapiens
cattttagatgcctcctggcctccccttcccaggagcacagctatgaccttaggtactccttccgaaaagaacttgtttaactaaaggtaagtgtacctcatcctcaccatggcctccttccactggggaagcagatagcgcagaaaaaagaacacacccattccccacataccttcacactcgtcacatacctgctacgtgagatgtgcaaagctgaattcagggaatgctcagtagttacataacagtgccactaaaggcaattgttttcagtgatttccatcgagctgggttctgcaaagatccacagcactttccggttgcatgctgggcacttttggaagctgcagtcaattctggaggccaccagggcaccattagcacatagcagcaattattgactaaatggtgctctggttccatgccttccaagggggcccgcttagaggcagggtggagttgcttagggccttttttttttttttttttttgtagatggagttttgctcttgttgcccaagctggagtgcaatggtgcgatcttcgcttactgcaacctctgcttcctgggttcaagtgattcccctgcctcagcctcccgagtagcagggattacaggtgcgtgctaccatgccaggctaattttttgtatctttagtagagacaggagtttcaccatgttggccaggctagtcttaaactcctgacctcatgatctgcctggcttgacctcccaaagtgttgggattacaggcatgagccgttgcacctggccagggtgtgtcttattgaaattgaacaaaatacctaatttctagagcgtataagagaagtttaaaatgctttatggatgtgttgttttgacagcaaaatatctactcagaatcctatagctatttcaaaatccaagtaacttagaaaaaaaggaaaaagaaaacctatatagtcaaatcttttggtgattttgtattcaatgactgaaacttcccagtgattattgggctttttagctggaattgaacttgaatcggggcagagcagcacaatgcttcagaacttcagcgactctgagccctggttctgcaatgacctgccaagtagctttagtctacttgactgctctgaaccttaattttctcacctgtatgggaatcatagactctactttatgaggctgacgtaagcattacatgaaattttgtatacttatacataatgtgcttagcaccgaatacttggtgacagcagatgcccaatgagagttatcacagatattatttcagaatcgtggagagtcagaagccaccaaattcttgatttctgtcaataaactgatattcatattctgttgattttttttgatgcatttgtaaaatagggaaacaagagctgtatgacttctagctatgtctggtcatgaaatagcaaccaggaataaggccacatgatgtttctgatgaacacttccccctgccctttttttttttttttcagatggagcctcgctctgtcacccaggctggagtgcagtggcacaatctcgggtcactgcaacctccgccccccagcttcaagcgattctcctgtctcagcctcccgagtagctaggattacaggtgcacgccaccaggcctggctaatttttatatttttagtagagatgggattttgccttgttggccaggctggtctcaaactcctgacctcaggtgacccatccaccttggcctcccaaagtgctgggactacaggtgtgagccaccatgcctggtcccccacttgttgattttgcagaaaagatagctgtgttacaacctgtcctaaggtcaggtatgaatacttgtgcttctttcttggctccccaagccagagggcattcctatgcccaggtgagagagcacggagtgttactttggcagcacagtcagttaccagaggtaggaaaagcaaaggccaggcaggacatgaggggcccttgcactggctggttctccctgccttcaccaccctccaggtgaatgactgggtgaataatgattgactgaggaggtaatgaataatttatggacactgctggacctcagtctcctcatctgaaagatgagtggttgaagaagtttaatggttttcaaatgctttttttttcagtcttcaaataagtgtttacgtagaagcaccatatctgaaacaggtgacagtggaccagtctgaatgaaatgagggttggcaagcctgagctccaaaaccttctgattgcccaagccctccttgtcttgcttggattatctccacacaaatggagaaactggacaaggtggtcatggaggtccctgaaagctcaaagactttctcattccaggattccccatgttcatatgccagcatggcatgggggtgctctgtagtcaagcagggtcctttggggggcttagggatggagccaggaaatggctctgggactcagcgggtgtccagagtctcatcagcagggtttctttactttcactgagtggctggtgcctgcacactgagttttgcaggcttactctcacagagtgagcttcctgcaggccccccactgcaacccctttccttcctggagctgtgtgctgactggtgcgtgagcaccccaggccctctccccatgctgctgatggtcagctttctctgcacgctcgtggttgccacagtcaacgctgataaaattgctgatgcagattgcctgcccagctgcgagtgctggcacgggaccagcagcccagacggtcactggaagtggttgggctgattattggcatcatctccattgtcctactcggttcttaaaggcatatggacttgcctcactcctacagcaaatgacggcatgggcaaagaggggcaacagacccaccctgaagacactcctcatctggttgacttggcagggttaagggaaaaagatgtgatgactaggagctgagagcttagtggttctgccagagctgcagagtctttgttggcctcagggtgggacctctcacatctctgtcagcttttcacagacaccaacctgttatgattcatttcacctgtcctgagcactagcaagaaaaattcgctgtagcttgtgatgtattattctggatttctcaactcattcatttgttcattcattcactataccattactgtctattataaggggggcacaatggtaggtgctgggaataaaaacgatgtttaacgttt

SEQ ID NO: 2102 - DNA, 2352 bp, Homo sapiens
agttgttacttaggtgcgctagcctgcggagcccgtccgtgctgttctgcggcaaggcctttcccagtgtccccacgcggaaggcaactgcctgagaggcgcggcgtcgcaccgcccagagctgaggaagccggcgccagttcgcggggctccgggccgccactcagagctatgagctacggccgcccccctcccgatgtggagggtatgacctccctcaaggtggacaacctgacctaccgcacctcgcccgacacgctgaggcgcgtcttcgagaagtacgggcgcgtcggcgacgtgtacatcccgcgggatcgctacaccaaggagtcccgcggcttcgccttcgttcgcggtccaggtcccggtctcggtccaggagtcctcccccagtgtccaagagggaatccaaatccaggtcgcgatcgaagagtccccccaagtctcctgaagaggaaggagcggtgtcctcttaagaaaatggtaatgtctgggaatccgagacacataaccctaattcataaatgggatttggggtaggtctttttgagtcgtgttaatgtaagaatgactcctatcattaggagtgctgctcggaggttactcacctttgggagtaatactgaagagaggggtctgcagaaaggatgtgtatgaagcttagataataatggctgtttcgtaaactgtttgagacctattaatgaaaatgactatttcttgctgtttttatccaacgtctgcattttccccctttaaagctgcggtctcctgtttgataaaagaatattggccagtattgcagattttaactgatttggctgatcctccagggaccagtttctgtgggcgtgtattggagcaggtttgtctttaactcttaaattgtttggtcctattttttaaaaaggaaagggccctaagtagctcagatattaaagtagtattctcaattaccaaatgtttcatttgaaacaatttatcttaatgaaatatagaccaattctctgatctcgagttgtttttgtttggatacagcccttttttttttctttttttttcttccccttacctttcttcaccttggttatttggccaggaatacgtaaattcaaacttgtacatgctgatggtagcctttgtgaaattttcctaattgggccttttaaaaacatggctgggtggaacatttctgtaccctactggtttgaccagagccttagtaagtacgtgcctgaaactgaaaccatgtgcactttaatggaaggtaagctgaacttctttcttttcaaacctagatgtatcggcaagcagtgtaaacggaggacttggggaaaaaggaccacatagtccatcgaagaagagtccttggaacaagcaactggctattgaaaaggttattttgtaacatttgtctaactttttacttgtttaagctttgcctcagttggcaaacttcattttatgtgccattttgttgctgttattcaaatttcttgtaatttagtgaggtgaacgacttcagatttcattattggatttggatatttgaggtaaaatttcattttgttatatagtgctgactttttttgtttgaaattaaacagattggtaacctaatttgtggcctcctgacttttaaggaaaacgtgtgcagccattacacacagcctaaagctgtcaagagattgactcggcattgccttcattccttaaaattaaaaacctacaaaagttggtgtaaatttgtatatgttatttaccttcagatctaaatggtaatctgaacccaaatttgtataaagacttttcaggtgaaaagacttgattttttgaaaggattgtttatcaaacacaattctaatctcttctcttatgtatttttgtgcactaggcgcagttgtgtagcagttgagtaatgctggttagctgttaaggtggcgtgttgcagtgcagagtgcttggctgtttcctgttttctcccgattgctcctgtgtaaagatgccttgtcgtgcagaaacaaatggctgtccagtttattaaaatgcctgacaactgcacttccagtcacccgggccttgcatataaataacggagcatacagtgagcacatctagctgatgataaatacacctttttttccctcttccccctaaaaatggtaaatctgatcatatctacatgtatgaacttaacatggaaaatgttaaggaagcaaatggttgtaactttgtaagtacttataacatgatgtatctttttgcttatgaatattctgtattataaccattgtttctgtagtttaattaaaacattttcttggtgttagcttttctcagaaaaaaaaaaag

SEQ ID NO: 2103 - DNA, 1907 bp, Homo sapiens
cctttccttctccctccccttttcccttccttcgtcccttccttccttcctttcgccgggcgcgatggagccggggcgccggggggccgcggcgctgctagcgctgctgtgcgtggcctgcgcgctgcgcgccgggcgcgcccaatacgaacgctacagcttccgcagcttcccacgggacgagctgatgccgctcgagtcggcctaccggcacgcgctggacaagtacagcggcgagcactgggccgagagcgtgggctacctggagatcagcctgcggctgcaccgcttgctgcgcctcttcgggggcctgctacgccgcgcgcactgcctcaagcgctgcaagcagggcctgccagccttccgccagtcccagcccagccgcgaggtgctggcggacttccagcgccgcgagccctacaagttcctgcagttcgcttacttcaaggcaaataatctccccaaagccatcgccgctgctcacacctttctactgaagcatcctgatgacgaaatgatgaagaggaacatggcatattataagagcctgcctggtgccgaggactacattaaagacctggaaaccaagtcatatgaaagcctgttcatccgagcagtgcgggcatacaacggtgagaactggagaacatccatcacagacatggagctggcccttcccgacttcttcaaagccttttacgagtgtctcgcagcctgcgagggttccagggagatcaaggacttcaaggatttctacctttccatagcagatcattatgtagaagttctggaatgcaaaatacagtgtgaagagaacctcaccccagttataggaggctatccggttgagaaatttgtggctaccatgtatcattacttgcagtttgcctattataagttgaacgacctgaagaatgcagccccctgtgcagtcagctatctgctctttgatcagaatgacaaggtcatgcagcagaacctggtgtattaccagtaccacagggacacttggggcctctcggatgagcacttccagcccagacctgaagcagttcagttctttaatgtgaccacactccagaaggagctgtatgactttgctaaggaaaatataatggatgatgatgagggagaagttgtggaatatgtggatgacctcttggaactggaggagaccagctagcccacagcaaccaaagagacttcctcttggcgttcaggaaacacagattctttgtccttttcccaacagcccaggctgttgatacctcagagccttctctttactctccaaagtgaaagggaagcccccgtctctctaactgcatgtcatcaggggtgagcctgcctttcctatcttcacacctgccacctcatgttcacacctatctttctcacctttttttgagatggagtctcgctctcttgcccaggctggagtgcaatggcacgttctcagctcactgcaacctccgcctcttgggttcaagcaattctgctgcatcagcctcccgagtacctgggattacaggcatgtgccaccacgcccggctaattttgtatttttagtagagacggggttttgccatgttggccaggctggtctcgaactcttgacttcagatgatccatctgccttggcctcccacagtgctgggattacaggcgtgagccaccatgcccggcctctttctcacctttacacctgtcttcttatcctcacatctgttttcacaccttcatccctgtcttcctcatgttcacacttgtcttccccatgttcatagctgcctttcttaccattttggtttgaagggcagtcttctctggcttgtttttttgtttttcccagaaaatcagtattattttttaaataagaaaaacattcctagaagatgataattgtg

SEQ ID NO: 2104 - DNA, 3044 bp, Homo sapiens
caccaccatgcctggctacgtttttgttcttttagaggcagggactcgttatgttgtccaggctggtctcgaacttctgagctcaggtggtccttccgcctcagcctcccaagtagctgggattacaggcacgcaccaccacgcccagctaaaagtatttttaatgcaaaatattcaatccttgcctcagagattctgattcagttgatctcaaggccaggaatcttttttcacaagcaacccagaggattctaaagatagtatatgaatcataaagccctgacatctagggatatagttggaataattatgttagaggaaaccctcatctggctttgggaaacatgattgatttgcacagcaacctttttaatactcttaactttactttttcacatctttggggtgagatgatctctaatcttcagccattttttggatggagggctgtcttgcctcagccatttagacttctttttggtctaggataatcacatatgcctgaccacacattcctgtctgaccttttaatttacagtttttaataatgtcactgaaatgagacccatgttataagagttaagtccttagtaaatctgacctactttggtatgagagtgtttatacaaatatgttttagttattttctagtggactctgctggccaggtggtggcaaaccaggaaggcgtgttccgaagcaattgcatggattgtctagatagaaccaatgtgatccagagtttgttagctcgtcgttcacttcaggcccaacttcagagactaggagttttgcatgtgggacaaaagcttgaagaacaagatgaatttgagaagattttcaaaaatgcctgggctgacaacgcaaatgcttgtgccaagcaatatgcgggaactggtgccttgaagactgactttaccagaactggaaagagaactcatttgggacttataatggatggctggaactcaatgatacgatattataagaacaacttttccgatggatttagacaagattccatagacttatttcttggaaactattcagtggatgaattagaatctcatagtcctttaagtgttccaagggactggaaattcctggctttgcctattatcatggttgttgccttttcaatgtgcattatctgtttgcttatggctggtgacacttggacagaaacactggcctatgtgctcttctggggagttgcaagcattggaacattttttatcattctttacaatggcaaagattttgtcgatgctcccagactggtccagaaagaaaagatagactgaatttgtatttgtggaaagcggcttggcttggaagattccattgtgcagaactggagtctttactgacccgctttccacatcagcccaaggtctttttaatgcctttatccaaaagcacatcttgtgctccatgcaggatgatgacagaattgatctgatgttactgccttgatggtctctttactattgggacagttagatttataatttgaagctattctgtaattaaaatataacctgaattcagcttgcagaatggaagctgaatctgttcattgtattctattgattgtcaatttaattagctgttgcagaataagtaatatattttaaaaacctagctcctttcattatttaaaacagcaaaattatttttgtagctcagtttcattattgtcattgtagaagcggtcactattagcaggcatacttttccacacatctttggacttttcttaaaagttcagtaataagctaactgtgtttataaaatgtaagtctcttacagacatcaagtagtttgatgagacagtctgtgacttcatgataggaaagaggaggatgaggtctggggttctttaaagtctctggtgggctgcctcatgactttaatcagcttgaactgccagtgcaccagcagtttaggtgtgatgagagaattcagatatactttatctttttaaaaaagtgtaaataaaatcaaagaatgtaaagtctatctcttacgctagaggtccaaagctgcctctgttttaaagattatcccaatgtggaagatgcccatgactggtcagctacttcctcctatacattttggtttctttgagggtcactcattgagacacgcaggcctctgagagggtcttgttctagatttcatattgcacttggagggtaacagctgctttttcacgcatggtactcttgatgtttttcactctgtcaaggattttgttggctatcaatgaatgtgtctaaaacttagtgcttccaggtagttatagtactccaaatcaaggaccaacttaaacgttaatttttgtgcaaaaacaaacctgaaaaatatgcttcggaaactgtgcatagttctaattgtaagtcagattgtatattcaaattgtaattaagagatttaaatattagaacggtatgtaaggtagtataattaccactattttaaaacaattcagttaaacactgctgcaatatttcagtgttgtgcttgaaaatatgtacagtttttttccaatattaataccttatgttgtccttaaatatttctaaaagcgcctttatttcagcattacttttttttcatcactatcttttataaaacattaatataagtcgttacttttagaaactaaaggaaataatagctggaaaaccctctgtagtttaaaatcagtcattaaactcacaatagggtaagtaaatatagccacctgttaacatgtaaataagcataatttgttccaaagatggaatattgaaacttagttcatgtctgctgtaaaatattatttaaatgctgctgggcatttcacttaaagaacttaatgtcaacagctacaacaaagaccaaatctgaactgctaatgtggctgctttgtagggaatggactaatatcagtgtgttagatcttaaggtatcagtatttcagaatcctgcgacgattttatttctaaattcatgtactgtatgtccataagtgaaaataaaatgtcatattcttttct

SEQ ID NO: 2105 - DNA, 2507 bp, Homo sapiens
gcatgtccagagggttgagccctactcagcctcatctgggtactgactgggggccaggactcaggtccagccagtttcacagcagagcctgtgctcttggccatgatgataatggcactttcccacccagtccttttttttttcaaatttatttattttgagtgctgcattctctaccttttatagttaagaatgttttcaaggtctggtgggaggttttcgtgttttgcatccatgaatgcagtcagtgtttgcctgtaaatagggagggtcagttctcttgggctcctctgctgtgcacctcattgcccatagaatgctactctcggatcttgcactagagcactggatgatgaagtgaagccttgcagagacctgtgagtctgggggaggaaaccaagactccagggtggagtgattggctgtatgtttcacctgcagccacgcgaggcccagaagtcttccagtgctttggaggttcacaagaaatatggtgactcaactggaaccacattagaggaggcccagaagattaacaatggctcaagccaggcggatggcactctcaaaccagtggatgaaaaagaggaggcagtggccgccgaggtcggctggatgacctccgtgaaggactgggcgggggtgatgatatccgcccagacactgactggcagagtcctggttgtcttagtctttgctctcagcatcggtgcacttgtaatatacttcatagattcatcaaagtgagtattcaaatatactttcttgccctcgtttcataaacaatcatgagcctttacattgatccatttatttaccttgacaccaacctttgcaagaccttctgagtgcagaagattttggaggaagctagtgctgtactgtactgattttctaaatgggaaagaaagttctcagaaggaaggctattttgagtctgctggcataggagggtgaggtatatgaggtcaagtcttcttgctgggtattacttatttttaaagagctgtttcctaatgatgtatttgcactgaagatgtcaagtagttaagatgacttgatgggaatttgcaacttctgggagggtgacagtttcccacagatgagggtctgagccattcttgctatggttgtaggatccttttctcaattgggtttccaatgctttgatcttactggaggtcagattagaaagcatgatgctatcctttcacctgccaatcgggtattcagctgaagcattgcacgctggtgcttcttgacttgtgaaggtaaggagatggatggaggagttcatcatgacccccagaggtggaggccctggccatttgaggacttctagagtggacactcatgcagactccttgggtgccagccgaatggactggtgctccagagtgagcctgggtgacagatgataaagaccttgcagaaggatgaagagggcacagactagaactgcaatgttgcagccagttctgccctgattcctgcaggtgccaaccctgaggaaataatttgttccaactatactattgcaaatcatgaagttgatggcatctgggaaacaagctggagtctaactcattttctgttgtggcgtgaacttggcaactctggtgacaatggccttgagcttgttgcctttattgtccactgtgtgagtgttttcaactttaaactctatccctggcatggttggctactagactttgatactaggaaacctgcttggtgtgcctgttggctcagactctggtgtgcctgaattctgagcttagtgctcctttcctgtggcttgggatggtggtaatttcatgcacagctaaactcagaatttctcagagccatctggtcaccggccaaggattttgtgcatttgggtggagaggccaaaatgtcagtcagggaaaacaaagcaaatatctcctttaataacctgtctctgggaatcagccaagtttaagcctatcagaggtccttcagcccaccccacatgcgaggctgggctgccctcacccatctcagatggagagtcctttaaacgctgtcaggagacaagattccacatgctccctccatcagctctcccgagccaagaaagagaagagcttgtttaagtttggaagactcccattggcatgtcattgaaggtaagcccccttttaaatatttactgttaatgattctggatcctatttgtattgaactgaagatcctctaaagcccctggtcttatttctccaatctctctccaggggtgttcttacatgtcgtggggtgcagaccctgccaacttccatgctgagactcaggaaagaggtttgggcttgaagcttgtatgtcccagagaaagaaaaccctaatgtggaggtgagtgtgttgatgggttagaagtccagatgcctcagccagcaccttccttcccttttcgtttttttattttttttatttttttaaccttttgtccctctgtatttctcagaaataaaatgctctttagatgg

SEQ ID NO: 2106 - DNA, 2230 bp, Homo sapiens
ggtcctttttacctaatatctagatttcttgataaatgcagatctacccttatagacactgaaaaaaatttaaaaatatttttctgattataatatctgctcattgtagaaatttagaaagtataaaaaagcataaataaaatttaaatcacctgtaatttatcagccagagataatcactgttaacttactaatgtacattttttatgcatattcatattactagttgtgattatactgtttatacagtattatgtcttatccttttcaacatcatattatgggcattttccatgttaagcatttaactttgccttttttaatgcacttttttcttctcttttctttttttgagtcagagtcttactttgtcatccaggctttcccaggctcaggtgatcctcccacctcaggctcccaaatagctgggaccactggctaattttttatagagatgggggtctcgctgtgttgctggggctggtcccggactcatgggctcaagcccttcaccctcctcagcctcccaaagtgctaggattacaggtgtgagccaccacacccagcctttaatgcacattttaaaaacttgaatttgtccataaagtgtatagaaaagatgctggagcactattcatcaagcactttattatttgcacacttttttttttcagctctctgatgtaaaggatggagtaaatcaagcagcacctgcatttggatttggcagcagtcaagcagcaacatttatgtcgccaggtaagtgataaagtaatgcaggacttcactgatttagaaaaattagattttataggtttcaaattacaagcctgaatcgccattttaaattaccttcgtaaattctacaaccttccatcatagagcctcaaagcatttgactcattagacatttgtgaaagggaggccagattgggcatgttctttgaaagacacttaagctttagaagtacattttaggaatgagttttcaggagtttcgtagaagtacatagctatgatagcagcacctttgagaactttcttgtcactgtgtataacagcatagcattgtcctcaggtagcagctctggtgaggtaagtagaaaccaaagtgaaagtctattccctagtccctgtggtttctccttgggtgaaggtcgatcaaggtgaaaatgggattgttagcagaaaagacaggcagcaggctttagtgggtagttctagcctctcatttttactttcctcatcttgtccgtccagtaagcttctcaacactgaaacatgacataaataagaaaaaaagatagggggaggaaataattgtgacatttttctgaccgtaatagatttttgttgttttttttgttgttgttgttgtttgtaggctttccagtcaataacagcagcagtgataatgctcagaactttagttttaaaacaaactctggatttgctgctgcctcttctggaagccctgctggttttgggagttccccagcatttggagctgcagcctctaccagttcaggtatctctacttctgctccagcttttggatttgggaagcctgaagtcacatcggctgcatcattttcattcaaaagccctgcagcttccagttttggatcacctggattttcaggacttccagcttccttggcaacaggtcctgtcagagctccagtggccccagcctttggaggtggcagttctgtggctggttttggtagtccgggctcacattctcacactgctttttctaagccatccagtgacacttttggaaatagcagcatatccacttctctgtcagcctcaagcagcatcattgcaacagataatgtgttattcacacccagagatagactaacagtagaagaactggaacaatttcaatccaagaaatttactctgggaaaaattccattaaagcctccacctctggaacttctaaatgtttaaaagggcaattttaaatacaaaaaagaatgatgtttaaaattgctttgagtgattcatacagagatgtatatatgcatacatgtatatattcataaggaatataagcttccatcaatagtgattttaaatttgatttttttcttaactctaaatatttaagtaaaaagtaacaacaactctgcaagcaagggaatttttttgtactgtaattttgaatggaactgaaaaattatgcacgaataaagtacttttctcaagcctaaaaaat

SEQ ID NO: 2107 - DNA, 2128 bp, Homo sapiens
gagttcagggactatgcatacaacctggagaagaagtcggtgctggacaaggacagactgaggaaagagatcatccagcgcgtgaacctcgtggccaatgagttccacaaggtgaccacgaaccggatgtgggagacaaccaagcgggccatcaaagagaacaacggcattaccctgcagatggccagggtctcccagcaaggcatgaagctgctgcaggagaatgagcagctcaagggaagacagaacaatctgtgcaaacagctggagctgctggagaacacccagaaggtcatggccaggcacaaaagaggccaccagaagatcatcctcatgctgactaagaagtgccaggagcagcagcaggacaccaaggaggccgaggagctgcgcctcctgctgagccagttggagcagaaatccctgcagctgcaggtggataaccaggcactgaagtgcgtatggcccacggaggggcgggcggcgggtgcaggctggggccaagctctggcccagctctttccgatcccacgacccaggccagtgacttcccctctctagaggagcctgccagacaggctgaggcttggggcgggatgggggcccctgtgggcttggagagaaatggcagggcccctggccccaggtggccccagtcctggggaagggggaaggctgttgactcatcccagttggggtccaggagccagagagaccagctgagcctgcagctggagcagcagcaggtggatttgcagcggctacagcaggaactggctaatgagcagaaggttcgggccagcctggaggcggctctggtccaggccacctccttcctacagaacattctgcaggcgagcagaagggagagagggagggcgcaaggggagggggagtgagcgcaagatggaagctgcttgcagagaaggggctacctcaggatcagaggcccctcttttccctgagagactcctggaaagtctgtccttcgctgattctggccttcaaagatccctccaaggtcttaaaggagctggattccttctctgaggctctgaaaggtcttgggcctcagtcttcccgactgaagaatgggtatcccaccacagacagggaaaacttcgtggaaatgggcactgaggttggaatttcctggacgagggtgggtactggggccactgtgggcctgctgccaccccaccctcaccaacagatgcaccgcgatgaagaggacagtgacgttgacgtgacgttccagccatggcacaaggagatgctgcagcaactgctggtcatgctcagctccactgtggccacgagacctcagaaggctgcgtgtccccaccaggagtcacagtcccatggcccacccaaggagagcgtcccgtgggccccaacgcagaggagcggaaacgcagagcaacgctgcagtggggaaggggcgcgaagaaggggcccagaaacccgacccctgagaactccagaaggctgggcaggcagggcgccctagtgcaggaacggagcttcaagaagtttggagcccgtcgagcactgaactcaccagttaagaaaacagagcagcaatttgggggcactcggctcccgggacataatggccgaactgaagctagggaccgggagcccctacgtcgccgccccacgccactcaccatccaccgcttccccgggggcgaggctccaaaacacatcggctcatggctctactcagccgctgtcccgcgcccaaaaagccgcccggcctcatgctgcccccattcactccgacaccgccccctgacgtcatcaccccgcagcagccaatcgtgttgccaactgtttggcgtccaccgccaacgtccaatccgggccgggctacgtggccgccatgcttctgaggggcggaagcggcgaggcggtggccgagtccgggaacccaggcgccttcagtagcgcggcgtcacagtgtcccttcgggacttgtgtgggacgctcggagctcttgcttgaccttcggttgggaggccttgttatgccccccgctatggccctgacttgcggcgaaaatctggcaagtcctttccccgctgtaggcctcaacctctccagctaataaaagttttctacctcc

SEQ ID NO: 2108 - DNA, 2072 bp, Homo sapiens
aacccttcacatcagtcaggtgacttgctggactggtagagcctctgccatcagcctctgatgcaaaaccttttctcaggtgtctgtgcggtccatggagacccgagttcccaggtttgggagggatgccactttccttaggaagaacagcaatgtatgtcgtccttcccatccatgcagatgggacagggctctcaggaaatctgccattagcatcgccctagaagatgcacaggcagaggcagctgctgggcacaggcacttggggaagacaggagccatgacgccacgccacctgttggtacccaaaggaagtggctcttttggctgcttggcaccattcttatgacccttccattttgtttctagtctcagaaggggtggagaaagtcatccttcctaaatggtgttgactctcagacatctgaccgtgccaggagaatggctgtgcaaggcggcagcccaggcccgggcaggtggcggccaggagttgggaccacagagggcactagcaagagcagcagctgctccgagatgctttggcacaagtcaggatacgtattttgtagttttctcttgttttttatttttctgaggtggagtctcactctgtcgcccgggctggagtgcagtggtgcaatctcggctcactgcaagctccgcctcccgggttcaagcgattatcgtgtctcggcctccagagtggctgggatcgcaggtgcgcgccaccacgcccagctgatttttgtatttttagtagagatggggtttcgccatgtttggtcttgaactcttggcctcgggtgatctgcccccctcggcctcccagagtgcagggattacaggcgtgagccaccgcaccccatctcccggccttttctcttgtttcattttggtaaactaaattagtttaatacctctaccccatcggtggttggaattccccacctcaatcattttgggggctctctgcctcctttgaataggacagatctccaggggtttacccaggctccgaagagccactccaggcagccggctgtttggggaggtgcaccctggtcttctagtctgcggattccctgcatcgctcccctggtactgctctcaagctcaagggtcacctcagccagatgtgccctaggctggcagaggtccttcccctaaatgcagctgggcaggatgccaccctttctacaataagttcggtcccagggattcccccaacacacacacacatacattctctcttactcacatcctcacacacactcacacaccccaccacactcacacactttcaaaatccaccgactctcacgctcacactcgccagccctttcccttgctctgtcacttccctccaagtccccgccccacacagcctcctgcagtcccagcccccttggtgccagccatctctggtgccagccatctcccccaaatatccacccttctgggctcctttctgcccagagggacctgaagtttccctaggaagcacttgctaaaggcctccagtccccaactcctggggaagaaggatccaggcctctgccgcacaaagcctccactgttctcttggggctggcaccccttcctgtggccctgtggcaccaaacaaattgattcgtccagcgaatatttcttatttactctgttccacatggtggtgagtgaatcaaccctggactctccccacaaaggacttaagaacacgcaggtcatgaacaaatgaacacttttgcataatttttatgaccaacggtgaccaggccaagagcaggatgaggtgatggagaataccttggcctggggcatcggaggaaactcttgcgaggatgtgctacctccgttgaaagtgggaagatgagagaccggctgtaagaggagcaagggaaggaggttctggaatgagagaacagcacgaacaaaatgcccgagacaggagcgagcttggcaccttcaagaaaataaagaggagaatcactgaacctggcacgtggaggttgcaatgagctgagatcgcgccactgcactccagcctgcgagacagagcgagactccatctc

SEQ ID NO: 2109 - DNA, 2280 bp, Homo sapiens
tgactgtttgtgaaataaattggcaacagtgtctttgctctcatggtgtctgcttacctgtgcagccatttttccagagtgtggggagcagtggacttgaggaaggagtctaccagccctttccagactccccctcaaccccaaccccaggaagccgtaagatgatcgcttgcagggccctcaccgtcctcacctggactcatgtgcgaatagatgagggacatgtgcctgccatgtttgcccagagctcggtgttcagggaactgattacaggggtggcaaaagccacaggggccacacatttgctgagctgcttccaggtgcgaacggcgcttgtttgggcatcagaaacagcacggtggatactcggagtcctgtcctttgaaaggagtttgatttatcatcaggagaaatttgttgcttttgcatccagcatccagccacgtatccactcatctgttttatggggaaatcagggctgcgggagcacccaggagagctgccgacccagacatttcctgggaaatgcgttgctgagatggaggcctgcagcctgcccaggccctgaggggagtggttcagtggagcagagctgggggctgggggctgggagatatgggaccagttgcttcttgagggggctcaggggcagagcaggagggttgggaaggggccgggtgggagccatagacatgaggacctcatcctccagcagcgctgagctctgagtaggccggggtgtttgcttgttgctgtccccgtggtactggggagaggctaggcacagagaccctccgagtaggtcacatgctgggggaatctgggcctatggctatgcagctggagaggaagggatagtgtggggagcttggacttggccgtttgggacagggggatgggagaggcagaggtcctgcctcaggcctccataggagtgacatttgctggtgtcagaagcttggcaagaggggaggatgatcagaccctgcatggacagttcgaattggagctctctgcagagtccaggaagagagctctggatgggagggaagccatggggtggaaaagatagcttccaatggaaggcagtgaaaactcgccataagtgaaggagaagaaggaggccaaggagagggggcaggaatggcagccggcagccaggcggtcagtggagcaggtgctcaggaggcccacaggagagcttcgtggaaggagtggacagtgtctgaggcaaggggcaaaaggcatctgctggagctggtgaccccagcttggtgccccccaaagccagagtacgaggctgagaggatgcaggtgtcctcctaggaggtttgagtcagaaggcacgaggcagaagcagtgggggaggactccctcagtagagcgaggaggaggcccctcatccaagaggaggttggagcacaggggggtctaggtttgcagtttcgggaccggtagctgaggggtcccagggcctttcttctgtgaaggagaatgtgtccaccgtggggagggggtcgggagagagagatacttcagagtggacagggctgagaaagctttatgggccgcgaaaggcagagtagttgttggtggatgagggtggctgtggcaggtggcgtttcaggtgagacagctcggggcccagaaagacactgggaggaggagagctctgctctccagagaaacaggagcagagaggaaaacagagccgcagcgagcggcttgtggtctggggatgaagcccaggttgacagcatcctctgcttcgctggtggaggtgggggcgtcattctcacacctgtgctgggtcctgtccctgccagccaagggagaccaggaccctgccactgttgcgctcaggatagtccagaactgtcagatcttttctgttgaagtttaatttctaatacacttgtatttaaaatcaggttgcagattttaaagatgcccttgccagagtatatggagtgatacccaaaatccagtgccttccaccaagccaggatgaggaagtacagacaattggtcagatagaactgtgcctcactaagcaagaccagcagctgcaaaactgcaccgagccgggggagcagccgtcccccaagcaggaagtctggctggcaaatggggccgccgagagccggggtctgagagtctgtgaagatggcccagtcttctatcccccacctaaaaagaccaagcattgatgcccaagttttggaaatattctgttttaaaaagcaagagaaattcacaaactgcagctttctaaaaaac

SEQ ID NO: 2110 - DNA, 2138 bp, Homo sapiens
agggggccgtgccaggcccgaagccgaggcggggccgggatgcggcgctgaggcccagcatggccggcccgggccccaccttcccgctgcaccggctcgtctgggcgaaccggcatcgcgaactggaggccgcactgcacagccaccagcacgacattgaacaggaggacccccgcgggcggaccccactggagctggctgtgtctctgggaaacctggagtctgtgagagtgctccttcgacacaatgccaacgtgggcaaagagaaccgccagggctgggcaggtactgcagaggacaaggggctccccctgaggctggcaggcggggggcagtgagcagccaggcctggggtcatctggagggctcccctcagcagcctggtgcccgcagtcctgcaggaggcagtcagcactggagaccccgagatggtgcagctggtgctccagtatcgggactaccagagggccacgcagaggctggcgggcattccggaactgctcaacaaacttcgccaggcccccgatttctacgttgagatgaagtgggagttcaccagctgggtgccccttgtgtctaagatgtgcccaagcgatgtgtaccgcgtgtggaagcggggtgagagcctgcgagtagacaccagtctcctgggcttcgagcacatgacctggcagcggggccggaggagcttcatcttcaagggccaggaggcaagagccctggtgatggaagtggaccatgaccggcaggtggtgcatgtggagacactggggctcactctgcaggagcccgaaacactgctggccgccatgcggcccagcgaggagcatgtggccagtcgcctcacctctcctatcgtctccacccacctggacactcgtaatgtggcctttgagaggaacaaatgtggtatctggggctggcggtctgagaagatggaaactgttagcggctacgaggccaaggtgtacagtgccaccaacgtggagctggtgacacgcacacgcacggagcacctctctgatcaggacaagtcgaggagcaaagcggggaagactccattccagtccttcctggggatggcgcagcagcattcctcccacaccggggcccccgtgcagcaggcagccagccccaccaaccccacagccatctcccctgaggagtacttcgaccccaacttcagcctggagtcacggaacattggccgccccatcgagatgtccagcaaagtacagaggttcaaggcaacactgtggctgagtgaagagcacccgctctccctgggtgaccaggtgacccccatcatcgacctaatggccatcagcaacgctcactttgccaagctgcgcgacttcatcactctgcgccttccacctggcttccccgtcaaaattgagattccccttttccacgtgctcaatgcccgcatcaccttcagcaacctgtgtggctgtgatgagcccctgagctccgtgtgggtgccggcccccagctctgctgtcgccgcatcagggaactctttcccgtgcgaggtggaccccaccgtgtttgaagtgcccaacgggtacagcgtgctgggcatggagcgcaacgagcccctccgggacgaggacgatgacctcctgcagttcgccatccagcagagcctgcttgaagcgggcactgaggcggagcaggtgaccgtctgggaagccctgaccaacacccggcccggtgcccgccctcctccccaggccacggtttatgaggaacagcttcagctggagcgggccctccaggaaagcctgcagctgtccacagagcccaggggcccaggatcccctcccaggacacccccagcccccggtccacccagctttgaagagcagctgcgcctggccctggagttgtcttcacgggagcaggaggagcgggagcggcgcgggcagcaggaggaggagtacttacagcggatcctgcagctgtcactcactgagcactgagccatagccccgggagggctggccaggccactccctgcccgcttttgtaatttatttatttataaactctctgctgctgagcttggggcctggagccccaggaatgagcaggcaggggagactgagatggaaataaagagactgtcgcagcag

SEQ ID NO: 2111 - DNA, 2160 bp, Homo sapiens
ggatcgctaaaggtcagaaccagctaagaatgaaaatgagtaccatttatacttactgtcagctgaacacttgcattatttttacctttatggtgtatcttacagaaattagtttttaggtcgtggtttcatacatagcagagcagctccctccctgccatctattcaaagtcagccctggacacagggtttgtccaccccctcgcgcatgcctggcgtctccgttgccatccgtctctcttacttcctccctctcaaactccctcccaacacccctgggggcctccttccctggtccacgcttgcccaccctctccgggatcccagagcaagtggcgggtatctcgtcgaaaagcgcccgtctccatccgatgcctttccaagctggcggtgctcaggggcatggtgccatgctgggggtggccgaggttgcaggggtgcccatgcttggtgtcccacctctctagttctagtctcctcccccaaccctactaggggcttgtccctggtctgggacaggcttggaaagtgtggcgcgagtatggctgaggcgtggttgtttgagggtgtgaccctgcaatccctgtcccagggatgggggtggccgtgtggcccaggggtggccgaaagtggcactggggtccagccctctcccactctgtggtggagtggggcagtcactgcccttgagcccttttaaaaaaaaaagaaattagtttttagtgataggagagacaatctttttgccaatgaggtagttgagataaattgagataactcagatataggtactatattttcctgggtattatcaaatttgatctttttttatctatcaaattggattcatatgaatcaatttattcaaataagtggttacattaagtttttttttttgttttcagtactttatcctgtgtcttgctctcatgggtaatccttaacgtagtcacctaagttttagttcccattcttttccatcctcctccttttttccatccctgtactctccagacttccctctggatcaactatgcaatttctgtatgttaatgtaacaacatatactccttctgcaaatattaatagatgtatgtcatagtgttctaaatttgttatctttacccctgggggcaagaattcgttttctttttaactggcaagtcatactttggtactataggaagccctcaagcctctgtgaccagaggttagcatagggaaattgagacattttaaaacgtttttcatattaaggtatgaagaaaactgaccttcattgtactttggtagtagaccgcttcctaattcattcctttaggtccaagtagccttctctgaaattaaaaacaaaacaaaacatattgaaaaagattgtagggtgaagttatatgccatcaaaatgatgatgacatacaggtatttttgtgtatctctgtcttttttgacaaccaatcaaattgaattttttttttttttgccagttaaatagaaactggtggccaggtgtaatggcttatgcctgtaaatcccagcactttggcaggggccaagaaggatggattgcttagcttaagagttcaagaccagcctgtgcaacatggtgagaccctgtctctacaaaaaatacaaaaattagctaggtgcggtggcgtaagcctgtagtcccagccactccagaggctgaagtgaaaggatttcttaagccccagaggtcaagactgcagtgagccatgttcctgctattgcactccagcctaggtaacaaagcaagaccgtttctcaaaaaatatataagtaaataaatagaaactatcaaattattttcaaggataaggaaggactaatcagtagtttagtcagaggcctagatcaaaacataacatgtatttttaaattaatctctttaaatgcatggttaagttacctgtatatgtgctcagtaaaatcggtcatttgtggggaaaaaaatggctatttggttttctatgcataaaattaagatagaagtctttttcctcctaacagccttcatcatagtggatttaaaaaaaccagtgtcacttaggctgtgtcttatttgtttctaaaacaatggaacaagtcagatgtttgtggaatacattttatatttgcaaataaagtaaaaattttttcttg

SEQ ID NO: 2112 - DNA, 2439 bp, Homo sapiens
gatgctgcctgatggccgagagaagacatgccaggcttctctgccagaatgagttgttgagggtgggatgaaggtggtcaaggagatgggctctttatttttaaaacaacaaacaaggcaaccgggaccaccaacatcagtcaccctcactccccaccactgcctctattccttaaggacttcttcccaggccggcggcggcggcggcggcggcggcggcagcttgcgatcatcaggattggaagtgagagcgagtgcccgggccaacctcagcgtctctcagggacagcgcaggtgggcgcagccttggaaggtcagcgaggccagagctcagagttccacgggggcccggagagtgtgcgtgtgtgagtgagaatgcgaaaacgcgcgcgcgccgggcagaggggcgctcggcgagagggtaggcgcggtgacaggggtaccccagcagccgaggagagacagcccaccccaccctttaagctaaagagctggaggggtgatggaggctgcaagacggagaaacttgatgcaaaacagacaggctcccccctccaagacgtgccgccacgctctcagacacgctccctcgcctccctgattacccaccatcaaccaccccaccctgcaaaattcccccaccgagccctaggatcccaggcgggtaattacctctcccggaggcggagtggggggcggcagcagcagcagacacttttagcctgactttcctgcgttcgcttgcgagcgtgtgagcgtgtgcgcgcccaggaggagctgtaacctgctatttatagaccgaagcctcagtacccggggctgagaacccggaggaaactagcaggcggcggcgacggcgcagggcgccggccgcggcttcgcgaggctccagcagctcccccagcctctggcttcggccgcgctccctgctcgctcctcgcctaccagccccgcgcgcgccccagagaagttgtcaccagcgcggctggctctccggctgctcacacgccccctggcacaattgctactttcttccaccccaacccccaccctccccgctcctcttcctcctcctctgctctctccaagcggtctcctcccaatgtcaccagcgaccgagtagaggcggccgtggcagcgacagtcgcgcaactggcgctgctcgcttcccgctactgatagagcggagatggtggcccggctgcccaccccgaaattaccacgctggctccgtgtgctcacaccccgtaccccgacccctttctgcggcccctctgcccgctgggtcgcccacccagactgggctgtgggatcaccgctaccgcgacgaggggggacccgaggccgccacgctgctgcgggggcaggagaaaccacagagaaagaacccgcgggaggaagaaagcgccccagaccccggcctatggcagcgcagtccctagaccgagggtttttggaaggggcttgggatccctgctgtcactgcctgcgtctaggcatccattcacgcctgctggaccccagtctgcagccgcgctgggacccctgtctcttgcccctcctcccccttgccccgggcagaggtcgggctgaggagaccagcttagagcagccctcggccacccaccgccagttcccacgtcgcggcgggtgactgaggccgagatgctcccaactagcgtatgacatgcctttgatatcccgggtgcgtggggacaaatccgccctgtgttggggtatcaggaaaacggggtatgtaagcaagcagtctggacggagactaaaactcccccacttcctagcccctaacaagcccacaggggaaagcacgcaccctggttattccgggctgtgtagggtgtggggcaaatgactctccccatctgcgctttacaggtgccacctggcggctctttcggaaaggttttgatggagccgttcaaaggtaaaggtgcccagagccagcccatcaagacaccccagcccttctccctgagggcgctttaaaatcacattttaagtaaagcagtgtacgaatgcttgtacacaagtgttacatttgccatgcaaaaagactggaatctcaaagtcaggacagtgaaatcaatttgggttaagtcggggcttaacagtttcacaaaccaggaggctgtatgtacccccagctgtcacccctgctgtcactgcccgcatctaagcatcctttcactcctcaaacctttgaccaccacattataagccttgccaatgaggacagggactttgggtttgttttgttttgttttgttttgttttgttttgttttgtttggtggggggggttgtttgttcgtttcatttatttttttcatcactctgctcccagagcttgggacaatacctaatattctgtagtttcaataaatgtttatagaatcaaataataaacactataggccag

SEQ ID NO: 2113 - DNA, 2067 bp, Homo sapiens
ctttaaggaaatctttagccatagaagtgtcactttttttttctgcaaaagaattccaagatgaacgggttgaatgaatcatgccagccagggtcacatcctgtcctcagggggcccagtgctcaatagtagattctgcgggagtggagaagcgtcagtggcagctccgctcacttggtgagtgagggatttggctgtgatgagcctcagctccgagctctcaaatgtcctccagccagcatctgcctgcttcccacaaaaggatagaagagaggcaaagtgcgtgtttcataaaacctgcctgcacttttataacccatcaaagaggccatttttaaacacaggtacaatttaaacatgatctttctttgcaaataaatatgttttgtttcatcctgtgttctgcttttctaagcatgacatacttgtgcccattggagaagacacctgtctcttctttctcacaccagtggtgcctcattgagtgtttccgggttcattttccgggagcactgggcctgacactttcacactcttctgactttcgccttgttgcaactgatggagcatgtgtgcttcctctgaggccagcctacaggaggcagctgtttcgcaggtggtgaattcgactttactgtggcattgtgaagagcagggtgcacaggagatgattttttctccatggctttgtaagaaacagccaggaaagttctcagatactttccatgccctttctttgagttgaaactttctatttcccttcagtcagagctctttactatagtagttacaaaaccagtgctttccatggctggccagaaccacagctgctattccttttagaagccatactgctgggtttggcctacttttttcaccgtttctatggaaataaacctcacattgatggaaatagaatgcgtgtttcagaatcatcattcaatatctgaaatgatttgattgtaaattatctcatggtccctgtttgcaaaccaccctcttaagagagaacattgttttggacctaaagcttgaagaacggtttatgtatttttctccttaagtagcattgcattgagtgttaggttcttttccctttttttcattcttggtcttcccaaagcttcttcccacatttcgtttgtgtctgtttccaccattcatagaaaccttggaaccactctcacagcaatgctaggatgtttcatggacctgttaagcattttgatgatacaagacatcctatcaatgccagtcttattttcgctaggactctgcttccacagtaagctcctaaggtgctcacccaacccaggagaaaacaaaattcattaccaaatacaacaggttcagccttcttggtcttccctcagaagccaccgtgtagcaccctggaatgatgcctctttatgccaaggcccaccctttggaattgggagggttttgggtagaatcctgcacttacagaggcccttggggtcattgagaagtggaggaggttggacacagaaggggaggctaaacacaaggtggggaagaaaaaatgtaaccattggcagccagactgaagctagccctttaaaatacggggttggggggttaacatccgctctttggaatgtgctcagtgactgctgcagagttcctgggccaccctaatgtttaccaggtgggcgttgtttatatggttcttattgttatgacaactagaaatcccacagtagaccagacagtgctccctaccatttcccatttataggattgaaatcaagatgtaaggagagctggccgggcgcagggctcacgcctgtaatcccagcactttgggaggctgaggtgggtggatcgcctgaggtcaggagtttgagaccagcctgaccaatatggtgaaaccctgtctctgctgaaaatacttaaattagccgggcatggtggcaggcacctgtagtcccagctactcgggagacagagacagaagaaatgcttgaacccaggaggtggaggttccagtgagccgagatcacgccaccgcactctctaacctgggcgacagagcgagactatctc

SEQ ID NO: 2114 - DNA, 2676 bp, Homo sapiens
caagcttataacaccctttgatatatccttgcaggatgactgggtttgtgaactcttaagtttttgtctgtttttgctgctacttgaatgttctttatttctagctcaggcttagaatttggactgaaagaagtcctcctgcgttcatgggctcatgtgttctcagtctgccagggaacttccatggagcctggtttgtgctcctccctgagggaagcagggcaggatagggcttcaagtgcaagccaaggacttgataagcctgaaatgagctgggctcctgcctttcaccagctgcacgaccttgggcaagcaggttaatctttttcaacctctggaaattgggagtaataagagaacaaatctgaggattaaatgagatgcttggcacataataagtgttacatattatatttatctgctatcatatcattatattgttatttctattcatattatttgctatttctaatagacactaaaatgttgcaacacactgaactcagggtttcttcaccctggcaccattttggtcggacaattttgtcttgcagggggctgtcctgtgcattatagaatgtttagcagcatccgtggcctctacccactagatgccagtagcacctctcccttgagttgtgacaatcaaaaacatctccattcattgccaaatcccactccccccgccacagacacagttccctggttgagacccattggtttaaataagtgtgtgttttctaagatgaactggaactgcatctacttggaatggtttggaatttctcaagatattttgctcgagtgtgatacagaatttagaatttttttttaatctctttctgtgttgctatacgcagccttaaaacgttcttgagttaattagatgagccaaagagatggtgtctgtgggtcgcatgaagtggctggtgcagcctcccctggtgctgatggcgggctctctttggcagcgtactgtaagaactctgtggacggcctctggtactgcttcgatgacagcgatgtgcagcagctgtcagaagatgaggtctgcacgcagacagcatacatcctcttctaccagaggcggacagccatcccgtcatggtcagccaacagctcggtggcaggctccacaagttcttccctgtgtgaacactgggtgagccggctcccgggcagcaagccagccagcgtgacctctgcagcttcctccagacgcacctccctggcgtcgctctctgagtccgtggagatgactggagaaaggagtgaagatgatggaggcttttcaacccgaccatttgtgagaagtgtccagcgtcagagtttgtcatccagatcttctgtcaccagccccttggccgtcaatgaaaattgcatgagaccttcatggtccctgtctgctaagctgcagatgcgctccaattctccatcccgattttcaggggattcgccaattcacagctctgcttccaccttggagaagattggggaggcagcagatgacaaggtctccatctcttgctttggtagcttgcggaacctttctagcagttaccaggaaccaagcgacagtcatagtcgccgtgagcacaaggctgtgggccgggcccctctggctgtcatggaaggcgtgttcaaagacgaatcggacacccgcagattgaactccagtgtcgtagatacacagagcaaacattcagcacaaggggaccgcctgcccccgctctctggtccatttgataacaataatcagatcgcttatgtggatcagagcgactccgtagacagctctccagtcaaagaggtgaaagcccccagccacccaggctcactcgcaaagaaaccagagagcacaactaagagatcccccagttccaaaggcacttctgagccagagaaaagcttgcggaaggggagaccagccttggcaagccaggagtcatccctttcaagtacatccccttcttctcctcttcctgtaaaagtctctctaaagccctcccgctcccgcagcaaagcagattcttcttccaggggcagtggacggcattcatcccctgcccctgcccaaacccaattcccctcgggtgagccaggcccgagcaggggagggcaggggggccgggaagcacgtgcggagctcctccatggccagcctgcgctcccccagcacaagcatcaagtctggtttgaagagggacagcaagtctgaggacaaggggctgtccttcttcaaatcagccttgagacagaaggaaacccggcgctcgacggatcttggcaagacagccttgctctctaaaaaggctggtgggagctctgttaagtctgtctgtaagaacaccggggacgacgaggcagagagaggccaccagcctccagcttcccagcagccaaatgcaaatacaacgggaaaagagcagcttgtcaccaaggaccctgcttctgccaaacattccctgctgtccgctcgcaaatccaagtcttcccaactagactctggagttccctcgtctccgggtggcaggcagtctgcagagaaatcctcaaaaaagttatcttctagcatgcaaacctctgcacggccttctcaaaaacctcagtgatatttctgcaatcgaagtgttttatctgtaaagatgtttatttatttagaacccctgccctccc

SEQ ID NO: 2115 - DNA, 2805 bp, Homo sapiens
tgtttatggagtgcagaactttacttcctatggaagatgcaggctcatctctgcctctctgcaaattggaccagaacatacactctggcttacctcacccctaaaatttccattgttctgggtgatgcttctctgctgttacccttatttaccacctcacaccagatcagctcagaagtttatctaatttccttccacaatgagcttgtcatcacaagtgccaccacaggaatagctgtcattgttattgcctcctcaactttccacaacccatctctggaactgactcataaaatagaaaccactgctcaaactctaacagggttacagcaacaggtttattatcttatgactgtagttctccagaaattgtagaggtcttgacacactgactgcagctcaggaataaattcaccttatgctaggagaaaaatgctgtttctgggttaacagattaaggcaagtccagaaccatgtgagagattttatacaccaggcctcttcccttcagaaacatgccacttaggtctagttctcctggggtgccacctggtcccagacctcatgacatctcattttgttgggatccctggcctttgtcttcctttttctcctttttgggccttgctcactaaatctactaaccagatttgttccttctcacctagaaactctcagagttcaaatggtcctctaacaggaatattaacctacttttttccctgctggaaaactgtgtccctacacattttctctggagactgcaagtcaaacctgagagaacatggaggatatctttccctgacaaaggacaaaacaatgagacactgatgagttctttatctcatgtcagcaggaagcagttacggaagacccacagtgcccctaaactcaaagatttttagggtctcaatctgttgaggggagaatgttagagtaggcagttagacatgagcagaaaaaaaaagcccctgagggaggaaaatctcatgctccaaagacaacccgaaacatgtatgctaaattgagcagagaggacgggaaatacctgtgaagaaagaataccctgaaacaccccttaagacacccagtaattgctcatactgtggttaaactgtcagaatatagctagtacatgctgacatgtatacatctttgcatacacagatacctgaaaatgggattgctggattgtatgataatttcatttttcttttttttttgagacaagatctgtttttgtcacccaggctggggtgcggtggtgcaataatggctcactgcagccttgacatcctgggctcgagcaatcctcccatctcggccagccaagtagctgggactacaggtacatgtcactacacctggctaatttttgtattttttgtagaggtggggtctccctatttttcccaggctggactcaaacttctgagctcagacaattctctcacctcagcctcccaaagtgttggaattataggcatgatccaccacacccagccatatttgatttttaatatcttgggaaacctctatcctaattttcttggaggctgcattattctcttctaccaacagtgcatgggggttccaaatgctctgcatccttgacaacattgattccttttgtgtgtcgaatagtggccatgctaatgggtgagaggtaagagctcactgggattttgctttgcatttctcccaaaaaaataattttgatgatcctttcaaatgcctcttggccatttgcatagcctttttaaagaaatgtctttggagaccttggttcattttattaaaaatcaagatattcactattggttgttgtgttttagaagtcatttatacataagggatgttaattcctgtcgaatagattacttgcaatttcttccccatctcctggttggcatttgtactccactaagcgtttcccttgatatgcagaaggttttgaaagtttgatatagtaccattttttattcttttcttgttacttctgcttttaatgtaatactcaaaaaatttgtgaaaattaatgttattatgctcctccctatttttctgaacgttgaagagatatatgtctcacatttaggtatttggtctgtgtaaaatattttctttgcatgctatcaaagggaaaggtccaagttcattatcttctatttaggtgtagaattttttgacaccatttgttggagaatctgaccttttcttcactgtttggtcatgataacctagtaaaaaattatttgataatattcccaaaagtttatttcttggttctctgttctgttccatcaaccatttgtttgtctttatgccaatatcacaatggttttatttttgtagctttggaatcagttttgacatcatgaggtgtggtacctctaactttgtttttttctaaagctgtgttggctattcatggtcccttgtgattacatatgaattttaggattttatcaaatatctctgtaagagaagtaacattggaattttaataaggctgacatggaatttgtgcatcactgagtagtattgacagcttaacaatactaagtctcctgactgagaaatgtatgtgtatgtttatgtctgtgtttgtgaatgtttggaattgcatcagagatcatgtaaggtgaagagaaagagtacaaagtgtttctatggcctgtctctggactcctgcacattccgaaccatggaaggtaggcaaaccacatgttctccagctgttttatctttttagatgtatcattgtcaagttggtatggcaataaaaatgtctttcaaaagttg

SEQ ID NO: 2116 - DNA, 2180 bp, Homo sapiens
gctctacctcctagcgccggtgcgcggccgaggccgcactacctgtctgcgggaaagcgggatccaccccaggacgtcgggtcgctgccgacataatgtcaagtggaaactatcagcagtcagaggctcttagcaaacccactttcagtgaggaacaagcctctgcgttagtggagtcagtgtttgggttgaaagtttccaaggtccggccacttcctagctatgatgaccaaaactttcatgtctacgtttcaaaaaccaaagatggcccaactgaatatgtcctcaaaataagcaacaccaaggctagcaaaaatccagacctgattgaagtgcagaatcacatcatcatgtttctgaaagccgctggatttccaacagcctctgtgtgtcacactaaaggagacaacacagcttctctcgtgtctgtagatagtggctctgaaatcaaaagctacttggtgaggctgctgacttacctcccaggaagacccatcgctgagcttcccgtcagcccccagctattgtatgaaattggaaaactagctgccaaattggataagacactgcaggagggtaagccccgcgttacacccctattggccaaaaactgaagaccaggccgggcgcagtagcttacgcctataatcccagcactttgggaggccgaggcaggtggatcacctgaagtcaggagttagagaccagctggccaacatggtgaaaccccatctactaaaaatacaaaaattagccagagattccatcacccaaagttaagtagtcttcatcgggagaacttcatctggaatctgaaaaatgttcctcttctggagaaatacctgtatgccctgggccagaatcgaaaccgagagattgttgagcatgtcattcatctgttcaaggaggaagtaatgaccaaattaagtcattttcgagaatgtgagtattctcccaattaagtatttttcttgatatttaaactgtccaatttcatatcatcagaaaagtatggaggtacaatttagctttatcaaatcttaaaattttgccatatttgctcctattgctttttaaataataatatttttactttcctcaaaattgctacatttgaagcctcctctaaactttacatgagtctacctctcttcttcccattaaatttgcacattacatatgtatgatttataaattatttatagtagggtttgtgtttttcaaactttatatcaatggtatcacactgtgtattattattctgcaacctgccttttctattcagcatgttttgcagattgatccatatgaatatttgtagttttaatttagtttattagttttaactgctaaatagtattccatagtatgaatataccataatttatttgcatgtactataattttttggtccattctcttgttaatggaattttaggttgcttcccatttctttgctacataaattatgctgcaatgaaccctctagtacaggagtccccaaaccccaggaactgggccacacagcaggaggtgagcagagggaaagcaagcattgctgcctgagctctgcctcctgtcgaatcagcagcagcatttgattctcataggagcacaaaccctactgtgaactgcgcatgcaagggatctaagtgagaatctaatgcctgatgatctgagatgaaacagttttatcccaaaaccatccttccgctgtctcctgtccatggaaaaattgtcttccatgaaaccagtccctgatgccaaaaaggttgggaactactgctctagtatatatctatctccctgtgtacacagacaggtgtttctctaggctatatttctagatataaccagccttttcatccagcattaagtactggtcaaaggcaaggaactggctgggtgtggtggctcccgcctgtgatcccagcactttgggaggccgaggtgggtggatcgcttggggtcaggagtttgagactggcctggccaacgtggtggagccctgtttctagtagaaatgcagagactggctgggcatggtgacgcatgcctgtaatctcagctactcagaggctgaggcggaggaattgcttgggccctggaggtggaggttgcagtgggcctgggttgtgccactgcactccagcctgggcaacagagcgaaatccgtctcc

SEQ ID NO: 2117 - DNA, 2342 bp, Homo sapiens
ttgtatttaatgcctctacacttgaagcatttaaagatatcccttacaatcacctcatttcttttggtttcaattactcctccttgatgcttttcagacctcttcaatctgaaaatctcttttgatggaagatggaaacaaaatctattattatgctaccaagctcaaattgatgacttcctttctatctttgctaaaaataaatgtgaccctgtttaatatcctttgcatttctgcaacctctgttctttctgattttagccttcatgaccattttcctaggtctaggacatttgtatatttgtctgagtatggacccttctttggtgcttttaaccattccttccataaatatatgttgtatccatcaagcactgttctaggcactaaggatacagtggtgaatgaaataggcttattccttgctttatgtcctactatctggtataaatctttgtttattggatttatctccttacctttttcctatctaatgacaattttatttcaatgttgagtttttaatctttgatcatcatttagctcttttgaaatgtcttttcaattcgatccctggtttcttagaataattattaatcctcccactgacattccttgaaatcagccatttgaatatccatgttaatatctatattttctcccctatcatttttctcccataatgtttccataattttgtaaaactaaagacagcaatatgggaccaagaggctttgtcataattcatgcatatgttgggctttaagtctcagattatttatttttcacttcttcattattccattattatcatgtaaggatttttttcattgatttattaaatcaccaagatattttggccacaagaggtttattaggaatatactaaaaaacttgactgagaagacttttctgcatgtgatcatactttttattacaaatttaacattttgtctgtattctaggaatagtcctgcactagtctatgccatccttgttatatggacttggagcatgctgcagtttccacttgacctggcagtacagaacgttgtgtgccctgtgtctgtgacagagaggggattccccagcctgttcttttgccagtacagtgccgatctgtggaacatcggaatcagcgtcttcatacaagatggccccttccttgtcgtgcgtctcatactgatgacctatttcaaagtgatcaatcagatgctggtgttctttgccgcgaagaacttcctcgtggtggtgttgcaactctaccgcttggtggtgctggcattggcagtccgtgcttcgttgagaagtcagtcagaaggcctgaaaggagaacatggttgccgggcacagacctctgagagtgggccctctcagcgggactggcagaacgagtctaaggagggcctggctattcctttgcggggctccccagtcacctccgacgactcccaccacaccccttagttattgattgacagtggtctgcggctagaacctgactccctggttcttcttacagggaggatcctttttctcctccaaccttggcgtataataattttcaaaagaacaacataaaaaggtgatcttaaaccaaagctgaggaattttcttttttcaactgaatagaaggaactttgattagtgactattgctacaacttctgtgtgatggtatcagatgttatagttgttcaacgactaagtgatttgtttgtcttgaactgtttgaaaagctatggaagaggttacagtgacatgccctcgaaagatttggtgcagaccaactgtcgcggctgttacctggaaatagagaagctttgaactttgcctccattgtcagactatttcgtctgatcttttctgcaatgttcctctgacatcaaaaaatgtacattcagtgaatgcagaacaaatgaagggaaaagtgcctttaaaattacctcactgtgggctggaagaagcgaaaatctctgcccagcttccgtatcatagagagccctattcatcgctgcccaggccttcccaggaaaatcattttttctgggctgatgttgtattctgccatggcgcatatgttcttacagaaattttattgcttttgtcttgggtgctacaaaattcacagcaagccattttggttacatatctactggttgcaaggcaggaaatattggtgaaatgctagcaaagtcacaatttctactctgaacatgatctgcagtgttcatcagtatttttctgaaccctgctttaccattttctatattgccaagttgaatcatgtgggctgatgcagggaagctctgaagcagtgaataaaggtgtttcgggccctgt

SEQ ID NO: 2118 - DNA, 2438 bp, Homo sapiens
gcgggtggatgaacgcggccctctgtaatggcggagcgtggcggggacgggggcgagagtgaacgattcaacccgggggagctcaggatggcccaacagcaggccttgaggttccgaggtccggctcccccaccaaatgcagtgatgcgaggcccaccacctctgatgcgacctcctccaccttttggtatgatgcgaggccctcctccaccaccacggccgccctttggacgtcctccttttatcctaatatgccgccaatacctccagagaccacctttcatgcctcctcccatgagttccatgcctcctcctccgggtatgatgtttccaccaggaatgcctcctgtgactgctcctggtactccagcactacctcctacggaggagatatgggttgaaaataaaactccagatgggaaggtttattattataatgctcggacacgtgaatctgcatggaccaagccagatggagttaaggttattcagcaatcagaactgacacctatgcttgcagcccaggcacaggttcaggctcaggcccaggcgcaggctcaggcccaggcgcaggctcaggcccaggcacaagctcaggcccaggctcaggctcaggcccaggcccaggcccaggcccaggcccaggcccaagcccaagcccaggcccaggctcaggctcaggcacaagctcaggcccaggcccaggctcaggtccaggcccaggtccaggcacaagtgcaagcacaagcagttggagcttccacccctacgaccagtagcccagcacctgcagtatccacttcaacatcatcatccaccccttcctctaccacttctaccacaacaactgctacttcagttgcgcagacagtatcaacacccacaacacaagatcagaccccaagttctgctgtttcagttgccacgcctacagttagtgtttcaactcctgctcctacagccacacctgtgcaaaccgttccccagccgcaccctcagacgttacctcctgctgttcctcattcagtacctcagccaacaacagcaatacctgcttttccaccagtaatggtacctccgtttcgtgttccccttcctggcatgccaattccacttccaggtgtattgccaggaatggcccctcctatcgtacccatgatacatccccaggttgctattgcagcttcacctgctaccttagctggagcaacagcagtttctgaatggactgaatataaaacagcagatgggaagacatattattataataatagaacattagaatcaacctggaaaaaaccccaagaactaaaggaaaaagaaaagttagaagagaagattaaagagccaattaaagaaccctctgaagagcctataaaggagataaaggaggagcccaaagaagaggagatgactgaagaagaaaaggctgcccagaaggcaaagccagttgctactgctcctattcctggtactccatggtgtgtcgtttggactggtgatgagcgggtcttcttttataatcccaccactcgtctttctatgtgggaccgacctgatgatctgattggcagggcagatgttgacaaaattattcaggagccccctcataaaaaaggaatggaggaattgaagaaactaaggcacccaactccgacaatgctgtcgatccaaaagtggcaattctctatgagtgcaattaaagaggaacaagaattaatggaagaaattaatgaagatgagcctgttaaagcaaaaaaacggaagagagacgataataaagacattgactcagagaaagaagctgccatggaagctgaaattaaagctgcccgagaaagggccattgtccctctggaggctcgaatgaagcagttcaaggacatgctgctagagagaggggtgtctgctttttcaacgtgggagaaggagttgcacaagatagtttttgatccccggtacttacttctcaatcctaaagagagaaaacaggtgtttgatcagtatgtaaagaccagggcagaggaagaacgcagggaaaagaaaaataaaataatgcaagccaaggaagatttcaaaaaaatgatggaagaagcaaaatttaatccaagagcaacttttagtgaatttgcagccaagcatgctaaagattcaagattcaaagcaattgaaaagatgaaagaccgagaagccttgtttaatgagtttgtggccgctgctaggaagaaagagaaagaagattcgaagaccagaggtgagaagattaaatcggatttctttgaactattatctaatcatcacttggacagtcagtctcgatggagcaaagtaaaagacaaagtagaaagtgatccacgttacaaaacagtagatagttcatcaatgagagaagaccttttcaaacagtacattgaaaaaatagccaagaatttagactc

SEQ ID NO: 2119 - DNA, 2218 bp, Homo sapiens
aggcggcggcgcagagcttggggcttccttggtcgcacccaccacctgcctgcccactggtcagccttcagggaccctgagcaccgcctggtctctttcctgtggccagcccagaactgaagcgctgcggcatggcgcgcgcctgcctccaggccgtcaagtacctcatgttcgccttcaacctgctcttctggttcttcctgctgctgctgctggtgttcctgctggaggccaccatcgccatcctcttcttcgcctacacggacaaggtacggctgccttggccgcaggcccaactgcagggctgggggctccatcctcactcccagggagcactgtgggcccggtgtggacagagtggccctgcatgtgccctcacgggcggccaggacagcgggtgtggatttaccaggcctggaggggcagcgccagcgaccctgggaggctgcgctgtggctctatagcgactggggcacaagggcactgctaccccacccggagggtgcgccccaggttgtcccccgccctctgacgcagcgtcctgagccgtctgctcccagcgccccatccgggccgcgcaccgtggggttctgctctgtagagcggcctcttcttggtcactcactcatatattcagccatttgtttatattgggatgaagtcctggctattgaggttgcactccgagctagaacacaacactactttgttttgtgaatcacactgtccgtccttggccctggggagcttctgccgtctgctgctgggtcccctgacgtgcccccatcaacagacttttcattttggggcacgtcctgacttcctggcactgcagggcgctccaggctccttcattccctgccctggcccaggaatcagccccttctccagggtgctctgggtcctcactgaatattggggaccgaggccagggtgctgggtgggctcagcgctcatagcccctggctttcagctcacagagcatggctgcacgtgtcccgatacgtggaggcacctatgtccctgtcctctgtccccccaggacccatggtcctcccccagcctggggaggaagcccagaggtgggggccctgggcctcagggctgctgggaggacatggggccggtgtgtctgcagcttggtgggctaggaggcgcgggggacacaagaccaggcgcaggaggggcccagcttaggggccggcgaaggggtctggatgagggaggcggggtacagtgggaggggccctgctgaccccccccacacccccagattgacaggtatgcccagcaagacctgaagaaaggcttgcacctgtacggcacgcagggcaacgtgggcctcaccaacgcctggagcatcatccagaccgacgtgaggcgtgggcaggtgggcggggtcggcgggtgccccctcccctcctgcctcagcccgacctgagcttgccccccagttccgctgctgtggcgtctccaactacactgactggttcgaggtgtacaacgccacgcgggtacctgactcctgctgcttggagttcagtgagagctgtgggctgcacgcccccggcacctggtggaaggcgtcgtgctacgagacggtgaaggtgtggcttcaggagaacctgctggctgtgggcatctttgggctgtgcacggcgctggtgcagatcctgggcctgaccttcgccatgaccatgtactgccaagtggtcaaggcagacacctactgcgcgtaggccgcccaccgcccgcttctctgcgcgtaggccgcccacggggagatggccgcacccacagctgcctttcccaccaccagcctcggtgctctgccccatgctgggaggagggagggagggacaggtgcctggagcccccggaaccctgtttctggaaggccctagctcaggtggcttcagggcctccggaccccccctgggaggggtggccacgtgctggctgcggaacccagggcaggggtgggaggggcctccagcactttttatatttacgtattctccaaagcagggttcacacgggagccagcctgtggcccccagcctcctggaaaacaggttggcgctggaggagccgggtcttggcatcctggaggtggccccactggtcctggtgctccaggcggggccgtggacccctcacctacattccatagtgggcccgtggggctcctggtgcatcttaataaagtgtgagcagc

SEQ ID NO: 2120 - DNA, 2440 bp, Homo sapiens
gtttataagagggcatgttaaagacaggagggttggccaggcatggtggctcacacctgtaatcccagcactttgggaggccaaggcaggcggatcacctgaggtcgggagttcgagaccagcctgaccaacatggagaaaccccgtctctactaaaaatacaaaacaaaattggccgggcgtggtggcgggcgcctgtggtcccagctactcgggaggctgaggcaggagaatggcatgaacccgggaggcggagcttgcagcgggccgagatcgcaccactgcactccagccagggtgacagcgagactccgtctcaaaaaacaacaacaaaaaaaaaaccaaaaaaaaaaaaaccctagctatataccctcacaccctacaaaacaaaacaaaacaaaattggccaggcgtggtggcgcatgcctgtaatcccagctatttgggaggctgaggcaggagaatcacttgaacctggggggcggaggtcgtgcggtgaggcaggagcatgccattgcattccagcctgggtagtaagagcgaaactccttctcaaaaacaaaaacaaaaaaaaacccaaaaaaagacaggagggtcataaggggagggttgactgtgtgtccctccaggttgtgcagaggggattagaagtaagtaggttagaggggaggtggagggagtgtgctggggtgtgagcttttatgatgctgaaaggatcatgatatgctaaggacaggatagtgttgggttgtacacacaggtgtaggcaatcctggtggctagtatgtaaaagtgaatgtcctgactcccttagagggtacctgcagagtgcccttggagggactagtgctggagaaattaataggagaggggacgggcatccattaaccttttcttgcctgcagcctgtagggtccagcgtcaaagcgaatcatggggtccagggctgagctgtgcactctcttaggcggattctccttcctcctgctactgataccaggcgagggggccaagggtggatccctcagagagaggtgacaacagagggggtagggcccggggtgagctcttctcaggagccttctgctgggggtggggcttcacaggaggcaaaacataactgtaagtttagaatgggggtgagaggctgtcatctggagggagagcggggggcctcagtagcctcttgagggaagtgggactcctggctccccagggcctggcctactcaatctctcccacctcatcctctggcatggacgcagtcagggagtctgctccaagcagacactggtggtcccgctccactacaacgagtcctacagccaaccagtgtacaagccctacctgaccttgtgcgctgggaggcgcatctgcagcacttacaggaccatgtaccgcgttatgtggcgggaggtgaggcgggaggttcagcagacccatgcagtgtgctgccagggctggaagaagcggcacccgggggcgctcacctgtgaagccatctgcgccaagccttgcctgaacggaggcgtctgcgttaggcctgaccagtgcgagtgcgcccccggctggggagggaagcactgtcatgtggacgtggatgaatgtaggaccagcatcaccctctgctcgcaccattgttttaatacggcaggcagcttcacctgcggctgcccccatgacctagtgctaggcgtggacgggcgcacctgcatggaggggtccccagagcccccaaccagtgccagcatactcagcgtggccgttcgggaggcggaaaaagatgagcgcgctctgaagcaggagattcacgagctgcgagggcgcctggagcggctggagcaggtgagccaagcctgctgggtggggcgaggccagacgtcactgtcaataccctgaggcatctcttcctttctagtgggccggtcaggctggggcctgggtcagagcggtgctgcccgtgccgcctgaagagctgcagccagaacaggtggctgagctgtggggccggggtgaccggatcgaatctctcagcgaccaggtgctgctgctggaggagaggctaggtgcctgctcctgtgaggacaacagcctgggcctcggcgtcaatcatcgataagaagcctctacagcacccctgccccctaatttatacagaaaccggacccactaatcctctgggattggccgactgtgagctgcagataaggctatcagccaccaaagagcaatgaacaatggaaacttcagagagctgaagaaagggggaggcctgtgttcttggcctgcccctgagtcttctggctgggggcaggttgcctgggcaagaactgcttcttcaattccttaacaaatgcaaccaccaacacccagatctctctctctctttattttcagtttttttgctgttatccagataattaataaaaaccaaccacgc

SEQ ID NO: 2121 - DNA, 2308 bp, Homo sapiens
atttggaatgagggtgtgagcaactgcaaattcccatctcccttctcattccagcctcattgtaacacacattctacgcctagcctggctttcttgctctccctcatcttattgtttcagcggaggccaaatctgaagtcctttccagggagtggctctgttcatcttattcgccagccaaagtaggaacagcgtaagaggagagagacacattcagcagccaaaggactcggtggaaagagcagaacaccatagacaatatgtcgctcttgggacccaaggtgctgctgtttcttgctgcattcatcatcacctctgactggatacccctgggggtcaatagtcaacgaggagacgatgtgactcaagcgactccagaaacattcacagaagatcctaatctggtgaatgatcccgctacagatgaaacagagtgctgggatgagaaatttacctgcacaaggctctactctgtgcatcggccggttaaacaatgcattcatcagttatgcttcaccagtttacgacgtatgtacatcgtcaacaaggagatctgctctcgtcttgtctgtaaggaacacgaagctatgaaagatgagctttgccgtcagatggctggtctgccccctaggagactccgtcgctccaattacttccgacttcctccctgtgaaaatgtggatttgcagagacccaatggtctgtgatcattgaaaaagaggaaagaagaaaaaatgtatgggtgagaggaaggaggatctccttcttctccaaccattgacagctaacccttagacagtatttcttaaaccaatccttttgcaatgtccagcttttacccctactctctactttttcacccaaactgataacatttatctcattttctagcacttaaaatacaaagtctatattattgcataattttgctgcttctcaatatcatagacacagtgaatagatgatgactatatggcttatatacaaacattctatgtacaatttcaagggagactaaactttaggctaataatctttactattgaatctgtctgatatagatcttagggttgaagaagctatctttgtctatttgggctaaccatagaatttcatttattttcctcacaatattttcctagaccaactccccatcattcacgtgttcctctttactcttactttaactattttgctggcttgcccgaaaatttgcctggcaagtcttccttataagacacatcatggtaagttttgtagtcctgtaagattctgcaacacagtcaagaattatacaatcctactagcaatatataaggacccaaaatgtcttctgctaagctcagaggctggggctaaagcatgaggactatgccagctatagaacttggactcataattcgctatccaatttttcatgcagttgtctagtcgggaagtaaggttggaaactaagtctcatttactgattcgtttatgggtagtaccgggatgaacccaccaccacaaagcaaattagacaacttaatgtgaaatcataccattggttgacgtttccttgagttgctacttcgttcatcttcacaacttaacaagtgcacggtcgaattattgtgcaagtggcttttggatatcctgattggggcctaagaagggcattcagacttgaattttaataggcagacagaaagtttgcctaatagttaatacgaaagagtgaaagaaacacaatattcagacaacccacattcttatcctggctctagcagtaaccacgtagccttggataagccattttccttcattaggtcctggtttaatttcctcatctttaaaatgagaaggttaaatttatcttagtactgctgggcgcagtggctcatgcctgtaatctgagcactttgggaggctgaggcgggtggatcacttgaggtcagaaatttgagacgagcctggccaacatggtgaagccccatctctactaaaaatacaaaaattagctgggcgtggtggcacgtgcctgtaatcccagctactcgggaggctgaggcaggagaatcaattgaacctgggaggcagaggttgcagtgagccgagatggcgccattgcactccagcctgggtgacaaaagcaaaagtccatcttaagaaatatatatatatattatatatattcttagttctaagatttcctttaattctatgattctctggatttaaatgcattattcatatttcttgaagcttagatacagtctaattcatagcaaccatatctgctttatcctaggtgagggtagcagtccac

SEQ ID NO: 2122 - DNA, 3265 bp, Homo sapiens
tcaggcaggtatgcatgggaggtggggatcggaacggggtgtttcgactgcaaccgcctggagacctggccggtaccattctccatagtgcagatggggaaacagggttggagagagggggcctcatctgggtcgttaacaatgcggtgcgtagctgtgagggagtttacacttctgacttcgggccttggctcctgggacggcgcactggtgcaagagccgcttctggagtctggtggactcgggttcgtgtcttgcctgggacagtcttttttttcttttttttgagacggagtctctctctggcacccaggctggagtgcagtggcatgaccgcggctcgctgcaacttccgcctgcttgaactgggttcaagcagttctcctgcctcagcctcccaagtagctgggactacaggtgcgcgtcagtatgcccggccaattttttgtatttttagtagagacagggtttcaccatgctggccaggctggtctcgaactcctgacctcgtgatccgcccacctcggcctcccagagtgctgggattacaggcgtgagccaccgtgcccagcttgcctgggacagtttctacctgagtgacgctgggcaagtcgcttcccttctctgaccctacttgtatctgaagatgtggcacttagcaggtgcttaataaacgctagtttggacttttatctggaagcaaaggggaccgctgattttaaaccttcagttaaacttgcttgtgacctctttaaatatacaattgtaaattttttagttggtggtttacgctgatgtcctggattataggttaaattaggaggaaattttcagcatgtacatccatgacagtacacacacaatgtcagattcaaagctcccaattaaaggcaatcatctgcctcttgtaacatcagttaagatcatgtaacatctggtccctgctgtgtgttgagctgcctcccaggccttggatattcatagactaatgcattgcttgccatgggtttggtgtgattttcccccatcttatggattaagaaagtgaaaatcagaaataatgacttgctcaagatcacacacgctaggttagacacagatctgtcctgtccccacatatgtgccctaacctaccaccaacccgtttattagcagagactgagctatgggctcagcccactccagctaaaaatgtgaagaaaacgtaagtggccaagacaagaatgatcaaataggtgggtaaggctctaaatggagtcaagggggtgtcagagcaagagcacaactattctcaggcaatgtattggtagaagggggggtgtcatacaaggctcacctgctttcctggttcctctcactcccagggtggcaaccaactatatctgaggaccagagccattttggggcaccagagcttgtgacctctccatctccacccagctgggtccaggggccactctcagcactcacctcagcagctgacatcataaagcagacttgggaacctggaagcactctggagaacctttccctgagacatggagctttggggccgaatgctgtgggccctcctgtctggcccagggaggaggggaagtacccggggctgggccttcagctcatggcaaccccaaccacctctggctgggttatccagtgccatagaactggtcagccactggactggggtctttgagaagaggggtatccctgaggcccgggaatccagtgagtacatcgtggctcatgtccttggagccaaaacagttaagtttagtgttgtcaagaggacaggaagagggaggagggaggacttggggaagggatatccaggttttctgttcactaagagtgcttagctgagactgatgggatttttctgaaggaacgtcttagcgcctggcacacactgtaacagtttgttggatgaatgaatatatctctgcctaagtgttctgggatagacacctggaagcctggtgttagctgtgtaaccttaggcaggatgctgccccctctgggcccagatgatgagagggttgggcctccagaccagtgctgggcaggcattatccacataagacacctgggttgggggccttgggcccagtgagccagccacttacattctctgtggggacagtttcagagcctgaggccggcactttggacccagcccttgacctctcagcaactacagtgtatccgggagctgagtagccgtcgattgcagaggaactggttgagtgggtgctggaagaggtggcccagaggtcccatgctgtgggatccccaggcagccccctcattctggaggtgggctgcggatcaggagccatctccctcagcctgctgagccagctcccccagagccgagtcattgctgtggataagcgggaagctgctatctctctgacccatgagaatgctcagagctatgaagaccccgcggccctggatggtggggaggagggcatggacatcattacccacattctggccttggcaccccggctcctgaaagactctgggtatgaatgggatgggtctcctaggtctgtccccagcaggctcctctgctcctaatgtgtactgggcaggccctggcagaggtcagcacaggaccctcacctcgccagcccaagcagcccagaagggcaggcgccagacctgtcctgctgagcccacccatttctcccccatgtagtagtatcttcttagaagtggacccaaggcacccggagcttgtcagcagctggcttcagagccggcctgacctgtaccttaatcttgtggctgtgcgcagggacttctgtgggaggtaagatcctagccccctttagccctgtagcatgctggtctttccactggggccatcctcagccctggctgtcaggagagtgtgctgttcccacttcctgttcattccctgaggcccaggtggtaaccagcccctgtccctgtctcctcaggccccggttcctgcatatccggaggtctgggccatagcatggctgccctgtggatgccttgtcagtgccgccagcctgaccagaggggaggtggatggcactttccagagcccaggttcttatggcatttcccagggttctgtgatttccccatgctctgcatttctaggatatttctaggacacctggattggctccatcacatcagagtggctgagggcagttgctctgtgttggtgaaattgctgtgggggtatcgggggatatggccagtaaagtattgagagactaac

SEQ ID NO: 2123 - DNA, 2848 bp, Homo sapiens
ttctcctcctcagagcgagagtcccaggaggtggctgctgtgtctagctgggctgagatccacacagcagcccgactgctgcgggtaccaccagagtgcctggagggggctgtcaccaggagggtcacggagacgccctatggccaggtctcgcgatccctgcctgtggaaagtgccgttgatgccaggtggccctagagacgggtgagagtcagagcagggcccgaggcacggctctatgtggctcacccacccgccatgcctacagggacgccctggccaaggcactgtattcccgcctcttccaccggcttctgaggagaaccaatgcacggctggcaccaccaggggagggaggcagcattggcaccgtcactgtcgtggatgcctacggctttgaggtcaccccttggggtggggcccaggaaagggggcacccatataattccgatggatttctgggacccccacagctccagctctccctgggggcactcgcgaggtgcttgtctgtctggcagggcgctttcagggctccttctgcatctgctgggctgagcctgctggggtggggtgcagggatggagaggtaaaggagtggggctgcctctgaggatttagaatctctcaaggactagggctgtctgcgcgccttggagttctcgcttccactcacctccagaggacgatgcccctcaccccacacccacgttcatccaagcatggtctctgctcccttttctggtcctgggctgggcagcctgggccgggagtgctcctggcttctctgggatggctggagcccaccacaagccccagccctggcccgtgctgtcctcctgctgggaggagttgcttagtgcagcagacagagcagaggctctgagtggtcctgccactcactagctgtgtggccttgggcaagtggatgaacctttctgaggtccagcgttcccgtctgtaaaacagaattcccagcaggacctaccttgtgagtttcagaggcttaacggagatagtccatgagagagctgtgtgctccagggcagccgttctgtcccactctggccggtcctgcctttggcatggcctgtcctccgtggccttgtagagacgcaggagtctcaaaggcagtggaagacagaggccccagggtgggcccgcctgtagccccacttcccccacgtcaggaggaaagggaagagggagagtcccccagtctctctcagttggcagaggctctgcacccctttacagaggatcctgccgcctcaggacagccaggagggggctggagggagaggaggtggcccctgccctcagtccctggacgggcactattcatggccccctgttctgtcccacaatccagtgtgtccttgtgaccgtgccccccctgaggctggtggtgatggtggcctgtgtgtgcatccaagctcctgtgtgtgtttttcaaggggcacaaagctgcaagaagcttcctaagagagtgctgagggagcacttcctataggaggaaggctggaaggcttcctggaggcagcagcctggagccctgtgcatgaggatgcgggactctgatagccaacctgctatttagtagggaaagtcgccttccaagccacaggatggccgtgacaagaggcccaaaggctcgcaggagtgctgcagcagagggcaggggtgtgggcagctagagggacctgtggctgggcagggctgaggtagcccgtgtgctgtgccggatcctttagacttgaccctgttggctacacagcatcagccctgggtattactcatccctgcgccctggccagaatgaaggaagcctctggggtggggggagggcacagccccatgtgcccacctcactgccacatgcccccaggccctgcgggtgaatggcctggagcaactgtgcaacaacctcgccagcgagcgcctacagctcttctccagccagatgctgctggcccaggaggaggaggagtgtcggcgggagttgctgtcctgggtgcctgtccctcagcctccgagggagtcctgcctagacctcctggtagatcagccccacagcctcctgagtatcctggacgcccagacatggctgtcccaggccacggaccacaccttcctccagaggagccactatcaccatggtgaccaccccagctatgccaagccccggctgcccctgcccgtgttcaccgtgcgacattatgcagggactgtcacctaccaggtacctggcctcagggacagaccagggtgaatcagcgagggcagtgtcccctcccaagctgagtcacccgacagcggagaggagtgggtgtggggaggccccttgcaaggcttggacacctgtccctacctgagccatgggccctgcccagttctgagcacggtttactgagttctaggtgacaattatggggtcagggagtggaagccttgggaccctccagacaagtgggcagagcacaagcatgggacctgatgaccttggcagtttactttgccttctgagcctccatttcctcacctgtaaaatgggtatggagacctaagctctggcgttgctgtgagggtgagatgtagtaacgtggagatggcctggcaggtgcctggcacatagtaggtgctcactgaatggacttcccttcccccttccgagttctatgcctaccaagaagctgcacgcgtgcctaccccaggaggagaggaactgggggtgggggagcgggggctggaataaagggaagggcagtagggagaatcagttctccctggaggagatggcacactttgcttggagaagaaaaactacaaactacccaggagttgcccc

SEQ ID NO: 2124 - DNA, 2858 bp, Homo sapiens
agccacgtggcctcgttcctgttccccttccctaccctgcaggactcgcctccacacttgtgatgtctcctgaagataactccggttggaagtttcttctacctgaaatgaaaccataacccctgcagcatccacttggggtgccagagtcccacctccagcacagtcttcattactggccatggcagggaggagtacagaatgggcaggcccaggacagctggcccatcagaccattagaaacagcgagtccggagttccaggggcttgtccacggccacacagcagcccgtggccccaggaagccaaagctcccagccagtcatccagtggtggggggtttagttccagggggccagaggtcctctgcggaagagagtgcaaggcagtatccgcggcaggcccagagaggccaggacaggtcagaaaggcctacccctctttcgcttggtaccctctcctctttgcgagggatgcaaaggttatttatacctcgggtctgcaggctgcgggtggggcaggcaccccgcctggggcgggttgcgggcgcaggggcaggaatgggcttacctgcttcccgccaccggggctgggcggggcgctgcggggaggaggagccgggcacaacctgtggacggccgcggccggcggacacacagcagcgggggcccggccgggggtcgcccgggggcccggaagccggggaagagcgaggaaaccaacttggagagaggagtgacctgggggccgggggcggagtcgtgagcgggggaggagagagccggccgccagcaagagccgcgcggcggcccaggaagcgagagcgccgcccacccatccggggcaagagccgcgccgcaggagaggcaggctggaccgggggctccccgggcccgcgacccccgccgtgaccccgcagcccccagctcgcccccaagatgatgaagaggcagctgcaccgcatgcggcagctggcccagacgggcagcttgggacgcaccccggagaccgctgagttcctgggtgaggacctgctgcaggtagaacagcggctggagccggccaagcgggcagcccacaacatccacaagcggctgcaggcctgactgcagggccagagcggggcagacatggacaagcgggtgaagaagcttcccctcatggctctgtccaccacgatggctgagagcttcaaggagctggaccctgattccagcatggggaaggccttggagatgagctgtgccatccagaatcagctggcccgcatcctggccgagtttgagatgaccctggagagggacgtcctgcagccactcagcaggctgagtgaggaggagctgccagccatcctcaaacacaagaaaagcctccagaagctcgtgtccgactggaacacactcaagagcaggctcagtcaggcaaccaagaattcaggcagcagtcaaggcctaggaggcagcccgggtagtcacagccatacgaccatggccaacaaggtggagacgctgaaggaggaggaggaggagctgaagaggaaagtggagcaatgcagggacgagtacttggctgacctgtaccactttgttaccaaggaggactcctatgccaactacttcattcgtctcctggagattcaggccgattaccatcgcaggtcactgagctcgctggacacagccctggctgagctgagggagaaccacggccaagcagaccactccccttcgatgacagccacccacttccccagggtgtatggggtgtcgctggcaacccacctgcaagagctgggccgggagattgccctgcccatcgaggcctgcgtcatgatgctgctttctgagggcatgaaggaagagggtctcttccgtctggctgctggggcctcggtgctgaagcgtctcaagcagacaatggcctcggacccccacagcctggaggagttctgctccgacccgcacgctgtggcaggtgccctcaagtcctatctgcgggagctgccagagcctctgatgaccttcgacctctatgatgactggatgagggcagccagcctgaaggagccaggggcccggctgcaggccctccaagaggtgtgcagccgcctaccccccgagaacctcagcaacctcaggtacctgatgaagttcctggcacggctggccgaggagcaggaggtgaacaagatgacacccagcaacatcgccatagtcctgggacccaacttgctgtggccacctgagaaagaaggcacagagccagccagagagttggggtcacaaaccctttgctgagcagatgcatctctttgtcccagggaccaggcccagctggatgcagcctccgtgtcttccatccaggtggtgggcgtcgtcgaggcgctgatccagagcgcagacaccctcttccctggagacatcaacttcaacgtgtcaggcctcttctcagctgttaccctccaggacacagtcagtgacaggctggcctctgaggaacttccgtccactgccgtgcccaccccagccaccaccccggctccggctccggctccagctccagctccggccccagccttggcttcagcagctaccaaggaaaggacagagtctgaggtgcctcccagaccagcctcccccaaggtcaccaggagccccccggagacacctgccccagtggaggacatggctcggaggaccaagcgcccggcgccagcccggcccaccatgccgcccccccaggtcctaggggagccaccggaaggaaggagaggtttgcctgctcctacgggactgattcttctcttgtcgacatgttttttgtaaggctggtaaataaattattttggacaaaactgg

SEQ ID NO: 2125 - DNA, 2469 bp, Homo sapiens
actattaaagcctctccggtatctgacacaagtcagaatttccactgttccagctgagcttttatgaggagcagacttgagagaaactgccaagattttctggagtacacagggcacacggccagctgaacacccgcttcccccactcgctgctgctgggaagagagcaatggactccgaataccttccagccgaaagtcgtcctcctcttcctcgctgagcgtgtctctcaacacgtcgcccacgagctcctagaagaagacagagcagaggcattgagcaggggttgggggagcccagtgctgggacgttaaaagcagtgccatgaggaccctgggctgattcttctgattggaattcaggtcaactgaggcagatcctattgcacctgaaaagttaagtgccaaggtgggtccctcctgcccttaacataaacccacacgcatcagcacaacattcaggccaccacaggctatggctccactgggtcttccatcatgcctcccacatttcaccaacacacatgccttccggaaaccagcctgattccttgcacacaccctgcctgttccccaccagtgagttaaggatatctgggatctcatcccaaccaacctgaccaggagatgtcaagttagcgaggggagtgttgctggtccacaggctgggaaatttctaggatgtcaacaaaggccccatctgtctgacccaccctagcaggataactccaaatatggaagaagctagaccataccttgtcaaactgtcttctgtatttattggtattctgccagaagagttctatgatcaaagaagattcttttaaacaaagttaaacaagatctcttacagcaggacttatcaggacttttcctatggttctaaacactgaatctccaagtgctggcatattttgcattctccaaacttatttagaccatggagcttcgtttttcaaaagtatcacatgatacgcgtgtcccaagaaacccactttaggaaatactcctgttatgggaggacagacaagggtttgggggatgatgatgctatggtagcggttctcaaaacacaaaatgacaagcaataaaaaagcccaaactcagcagctgtcaccaacttctctttgtgaaaataaaagagaaaaaaaacaaaaacaaaaacaaaacccaaccctctccttaggggaaaaaaaattctacacctcagatgatgcttaaaaaaaaaccagtcctcttcttgatgaacaaaagaaaaaacacggctttgtattgctgatctcatcaactggacacagctggaggtaagcctcttgcttttttttgttttttgttttaaagacaaacagctaacattttgtggctgttctctttcttctttcaaatctttctagggcattacacactctttcttaaaagctgttaaaatgtggccattcagactccggtgtcccatttacttcaaaaccaggctactttattcctcgagtcaggatggcttcctctcctcctccaccaattattataatcatcgaacatatcctgggcttgtaaactggctgtttgtgttaacagagcccgagttgacaggggagctgggagacgatgacaggaaagggatgcacacaggtggcatcattagatggctgggacgccccagcagccaattgaagcccatctttcatgcagaagagagacgggtgccaccgccccctgaaaggctggtaggcagagcttccccgagggaacaggcaacagtcttcaagagaatctgcgcacctcttcatgctgaggtcttctgcagagcggggctctgcgcctgccaccctgactgcactgcagccgggtgacagcatcaatgagacgtctgagtactcgtgtctttttactggcacacttggaagagtttaaagactccagacatcgccaccaacaaggcagccgtgtgggaccctatgacaatgaccgcatgtgctcaaggcaccccagtcaccacctaatgacagcttcagcactccctgctcggagaaccaagctctctgacacactcagaaagcagagttctggcaagttctggcataggcctctcaccactcaacagtaccctgctctggagaacactggaaagctccccggagccatggttcatggacgcactgtactgtgccaatgctcaactttgcaaaaattcatctccccagccaggcgcagtggctcacgcctgtaatcctagcacttccggaggccgaggcaggtggatcacgaggtcaggcaacctggccaacataatgaaaccccatctctgctaaaaatacaaaaaattagccaggcgtagtggcaggtgactgtaatcccaactacttggggggctgaggcagaagaatcgcttgaaactgggaggtggaggctgtggtgagctgagattgcgccactgcactccagcccaggtgacagtgtgagactctgtctc

SEQ ID NO: 2126 - DNA, 2369 bp, Homo sapiens
cgtgctggcccttcggcctccctgcgaagctggcagattgacctggcccgctgcctcctcgaccatagcttttgggcagctcccgctgtgtgcaaagcctgagcacctgaggtcctgctgaggcttgaattctagatcaatttgcttctcaggaaatgaggcactcactcctaggctttggcaatggccagtgtcgctggtcccctctggagccccaggcccttctctctcgtgctgagggtggtcaccgaccacaggtgcatgtgacacaaacagcaaaaccatgccgcgtcccaccgctcatccgtgaggttgtgtctcgtgtgcggggccagcccctggcccactggggaatctcccattgatgtaggtgtgttcgttgcatgtgcagactccgggaaacagcgctggctgtcccagggccgcctcctctgggaactgatccctggggagcaccctttccaccctcatttgtttcttcctttttttttttttttttttctgagacagagtctcactctgtctcccaggctggagtgcagtggcacgatatcagctcactgcaacctccgcctgccgggctcaaacaattctcctgcctcagccttccgagtagctgggactacaggagcacaccaccatgtccagctaatttttgtatttttagtagagacggggtttcactatgttggccaggctggtctccaactcctgacctcgggtgatccgcctgcctcggtctcccaaagcgctgggattatcggtgtgagccgccaagcccggcctttcatttgtttcttggagctccgttctggtctttgtgggtcccagtacctgctgcgtgtgccgtcatctgagaactcaagccctgcctgcagctcacgccaggcagttccctgtatccctcccctcttaggggcacactggaagggctgactccatgtgagctcttacagttgaactggaagagcagggatcccaccggcctctctcccctggtgtagacccacactccttactgcatagatttatcttcagattcaacaagttttttaaagcctacattgaatgtatttaaatatctgagaattatgttaaaaccgtcactattttttctagtttgactttttaaatgacagagaagagcatgagcctgggaggacatcccaacacccggatcccttcggggacattggaaagttttgttggggtctcacgctggcggcgtggtggctgctgactggcgggtgtgtggtgcacttgctgtggctctgaagttccagaacctgttgtcaggaagaagcactggtttcttcttaatggtctccaacatcttttccagggatacttcaggccagggaagattttgtaccatattccgctccccattgccttaagaagccacctcaagtccttctcgatggccaacggcctgaatgccaggatgatgcacggcggttcctactccctcaccaccagctccacccacaaaaggagcagcctccgcaaagtgaagctcgtccgccccccccagagcccccccaaaaactgcaccagaaacagctgcaaaatttcttaaggaaggcactgaaagaaacacggcggaatctctccaggagaagctcggcgttacccccggcagctggtggatgcatctcagatcccggttcctctcggcgaatgctgcttgcgaatgtgtgcgacgccttccgtgtgatggaaacacactaccccgtcggacttcgaatttctacgtggatgtgcatgaagctcttgttttcgatgtgtgtttgtaaagggaaaattagtactctgctcgactcttggtaacatgaaattctgaatgttactttatcatgattgcactgcaactttttccttaaaataactgcttttgtaagaacggtgatattggagtgattagtataaattcaatggaatttgagaagcaatggcagcgggataatttagagtcactgatattacgagaggggtctttttgtaaacctccttttcaatgtcaaagcaccaatttataaaacgctgcagatgtagaggttatgtgcaactgatctgtccagtttgtgtatgaaatggatttgataaagtttttgctagttatttactacattttgggattaataagtgatttatatgcatatttttctgtaaatctacagttttttgtacaagatattctacaagttatgaagctaagggaagaaaatgccaaagatacctctagttatgttgaacacagccagcacagtttcgacaggtcaaggaagagctgtttcagtaaagaatgaagtgaaaacacttatttaggaaaatgtttctcaacaataaaatgtatagttgtttctctc

SEQ ID NO: 2127 - DNA, 2448 bp, Homo sapiens
aaatcccagagactcgattattcatcttcatcgagtgaagccaacaccccaagccctattttgaccccagctttaatgccaaagcatcctaactcactctctggaaaaggaacacaattagtgccttcatcacacctgccacccccaaagttaaggattcctaatgttttcagtataagtgtagcactagccaaaaggcacttaagccagccacagttaagctctgacaggatgtttggtacaaatagaaacgctataagcatgatacgaccactgagacctcaggaaactgatcttgatctagttgatggagacagtacagaagttttagagaatatggacacgagttgtgatgatggattattttcctatgactccttggactctccaaattcagatgaccaggaacactgtgactcagcaaagaaggtggcatacagcaaacctccaactcctcccctgcaccgttttccttcttgggaaagcagaatttatgctgtagccaaatcaggtattcgaatgtctgaggccttcaacatggagagtgttaataaaaattctgctgcaaccctttcctatactacatcaggactttatacatctctgatatacaagaacatgaccaccccagtgtatacaactttgaaggggaaggcgacccaaataagtagcagccctttcctggatgactcatctgggtcagaggaagaagacagctccagatccagctcccggacgtcagagtcagactcacgcagtaggagtgggccaggcagccccagagccatgaaacgaggtgtgtctctctcctctgtggcttctgaaagtgattatgctattcctcctgatgcttactccacagacacggagtactcacagccagagcagaagctcccaaaaacttgctcatcttccagtgataatgggaaaaatgaaccactggaaaaatctggttatttattaaaaatgagtggtaaagtcaagtcttggaagcgacggtggtttgttcttaaaggtggtgaattactttactacaaatctccgagtgatgtaattagaaaaccccagggccatattgaacttagtgcatcctgtagtattttaagaggagataacaaacaaacagttcaggtacttaactttttttttttttttttttttttgtatcatgccagactcaattctcaattatccaacctaatggaaaggagataggataattcagtgtttctttattcactttggggggttagtttgatgccttggaagtatgtgaaactccacgaatttttggttaaaactataatgtaagttaggtgtgtgttgagtaactcccaccacactttacctttcttcctttatactcttctttcctcatatttaatctcctaggtattttcagctgtccaactgtgaagctattttaaggaagggttatctggtaaatgaattctcaataagatgttagttatataatgtactgtgaaattcaggaatgtttgtattttaatatagaatctgaaaatgacagttcttatatgaacttcagatgccataacaccaaagtgggaaatatattggtgagcagagggagtgtgctgccaagcaagtcacactgtaggggcagctgctgcccattttactcacacataaggccagtcttgccagaaatctgttaaatttaaaacacaggctgttgagatattctagtatatgtaatttaaagtcagacactttatttctgaaatgtcttcaataaccattattttcttatattgctcctttggagggtggaggacaactttgccagaaaggtacattatcaatgtttccagtgatttgtacctgaaaacctctcaaaaatttagaaaggagaatcaaggaaagctttgtctttgggcatggcagttaagaatcatttgtaagtttctgaaatttggaaaatttgcagtgtggctaatttgagactggaacattctgagttcataatatctaatcacatgttcgttccaataatttatcttcttatatgcaagatcttcttattttatttatagttgattttgtcatttgtattaagaaacctcttctttagttgctaaaactatgctattttattatagtctttaatcattctgctcctcatttcaataagtaggaacctggccgggcgcggtggctcacgcctgtaatctcagcacttcaggaggctgaggcaggcggatcatgaggtcaggagatcgagaccatcctggctaacacggtgaaaccccgtctctactaaaaattcaaaaaaaattatccgggcatggtggcaggtgcctgtaagtcccagctgctcgggaggccgaggcaggagaatggtgtgaacccaggaggcggagcttgcagtgagccaagatggcgccactgcactccagcctgggcgacagaaagagactctgtctc

SEQ ID NO: 2128 - DNA, 5634 bp, Homo sapiens
atgccaatatctgatcctttcagtaactgggatccagccagaggtaaagattcctagaaaaattgtctctgtctagaccaagcccattcaacccacagcccaccggccaggatggctttgaatgtgacccaacacaaattcataaaccttaaaacatgagattttgtttctgtgatttttttttagctcatcagctatcattagtgttaatatattttatgtgtgacccaagacaattcttcttccaacgtggcccagggaagccaaaagagtggacacccctgctctagaccatcatcagtccttcctggccagcgtcaggtgtgcagagtaaaggtttgtaagcttctcatcaagcgtcaaagaaactagttttcttcaaatttccatgaaataaaataaatgtcttgggttttaaaaattgtacaattgggaacatctttgaatgttttttttttaagagacggcgtctcgttcttgtcacccagactggggtgcactggtgtaatcattgctcactggagcctcaggcaatcctcctgcctctgcctcccacgtagctgggactgcgggtgtgcaccagcctgcccagctgatttttaaaacattttttggagatggggtcttgctgtgttgcacaggctgttcttgagctcctggcctcgggtgatcctcctgcctttgcctcccaaagccctgggattacgggcctgagccactgtgcctggccaggacttttctttttaactgtgtgtgtgtcaggttgtcttgaacaccatggcgactccctcagactttttcatgtcttattccttggtaagaaggagctttctagctctgagactaggcaattaggatggttctctgaggcattctctgtacacagagtgtcagtcaggtgccatatgtagagagtcgttgaataattcagccggctaatgtccaagacgtcagtacttcgctcctttcttcccgttttgtgagacggtcccggtggactgtgtaaccactatccaacttcgcttccaggttttatttgcaccaaagtatggagcactttccccccttgcctgcattctgatgtatttgttttcattttgttttagagagctttgcttcccaaatttctccttcgaggacatctcaactcaacaaactgtgtcatcacgcagccactaacgggagagctggtggtggagagctcggaagccgccatcagaagcgtggagctgcagctggtgcgcgtggagacgtgcgggtgtgcagaaggctatgcccgcgacgccacggagattcagaacattcagatcgccgacggggatgtgtgcaggggcctctctgtccccatctacatggtcttccctaggctgttcacctgccctacactggagaccaccaacttcaaagtgggtaagtggcactcgcctccagccctcatgggcccatgggaagggccgctcagcgccagggcctgctgtgggtcacagagctcagaacctgccgcccttcggtccctcagtgccagggcctgccacaggccatacagctcagagcctgctgcccttcggctgctcaacaaaaccttgttaaggagctgctgtgccgcacaggggacacacccacaggcagtcctggtgcttgtgggacttccactgtcacatggggaaacacacagacccacatcagtgtagacatgggcaggtgacgctgagctctgtgtagacatgggcaggtgacgctgagctccgtgtagacatgggcaggtgacgctgagctctgtgtagacatgggcaggtgacgctgagctccgtgaagaaaactcccgtgaacgagcaccacaggagtggggggtggtgtggatactgagaaagtggctctgtgtgaaggtccaggacccgtgaaaaccccagagtgagcgctcagcagcaggaaggccttgagccccgcggcctagatgcctctagtgagtttccatgaacctgtgtgttcatattttaaccatgggatctgaatcaggtcacagacacccttttatattctgcctttttcccttaacattgtatcatgaacatttccatgtttttaactcttcctataaatattgtaatgggacctccatcttaataagaatcatgttaattgggagatcactccacactacgaagaagtagaacagagagacccagtaggaagggaccgagccttctcagtagcaggggactgtgattcagagaggctcggggacctctaggttggaagtcaggagtgagcactgcatccacatcaagagcagcacctctgtgtgttcccctccaattccgtgcgagtgacctcaaatgcacggtcaggcccgagactggaactcactcggactctaagcagcgcctgggtatcatggcggctccagtgcagctgttttcctgctgtaaaggaaagcccccgccagctccctatcttgcctgctgggcatccctctctgtccactccagccacaccctccacccttctggggggcacaacaagaggggtggagaacccattgaagggagtggtggcaggaagtgcccagaggactctaatgtagtgacaataaagtgaggaaggacaggccggccactgctggtggccgactcttcttgtggctgatgtttgggcggaggtggacactcccacacggggatgttgtcctgcagaccccagccacaggtgggcactgactccaaggccccttccaccgctgagctgccacagtgtggggctcagcacagggtgccctctgcccacacggtgcccttcccacccctcctcacactggggaaggagatggtgcttgtttgtcgtcaggtgcttcctcttcacacacatcccttttgttaggatcaacaaggctcacccatatcagctgaagagtcggtggagaaggaatcctgtttgctgaaaggtgatggatgaatagtatccaatggagcaacaatgaaattgttgcttctgaagactgtttctcacctggggattggggacatgggcccagacagctatgcgctggttcacagtctgctatttcattaagaaccgtaggaaatgtaaaaataaggcaaaggaatacaaatgaattgaaagggttctagaatatcctttttaggaaagcaaagggacagggaaagtgtagttggtgaagcctgatcactcatgttccaagatgagaggacaaaaattcacttagagaaagttgacagaggtagtcagacatcagcatagtcatctccactggtttggctgaaaggtcagggtggcgctgaggggacagcaatgaaacccacccgcaccgggtgctccttcgccgttagagcttcctgcgactgcagtggtggcggcgtgtggtttcgctgcttggtaacagtgagcacaaacccaccctctcttctcttctcagaatttgaggttaacatcgtggtgctgcttcaccctgaccacctcatcacggagaacttcccgctgaagctctgcaggatatagcccggaggagggaagcatagagaacgggagtggccatctggaaatccagctggttatccaaatcctaaggggagctacagccagcggcatatacttgtttttgtgattattctgtatcagaaatgaaacagaccctcaaattaactttccttcctcatttcttgaggcttctgcttccaacaggcacctctaatcagaccttttctttgaaattcaacaagatttcttaatgctatttgccaagaccatttcacagaaaacattgactgtggctcttgccttatctgttcctttttaggtacagtaaaacaattgtgacagcagtttgagcttgctggagagtggcatcatggggacaaaaggaaacctctgacttgctaatggatgtagccagggactccccatagcaaagggtctgtggccagttgacatccaggatggctgcaagcgcacttgatggtcaggaagtttgcagatactcgccaaggcagagcgcaaagtgctagccactggaaatgcatgacttccctccacccctactctattctgtagttttttggttttgtttctgagacggagtctcagtctgtcacccaggctggagtgatctcagctcactgcaacctccacctcccaggttcaagcgactctcctgcctcagcctcccgagtagttgggattacaggtgactgccaccgtgcccggctaatgtttgtatttttagtagagacggggcttcaccatcttggccaggctggtcttgaactcctgacctcgtgacccacccgccttggcctcccaaagtgctgggattacaggtgtgagccaccacacccagcctctgtagttctttttacaacatttttcattataactttaaattttttaagcaactggaaaagtgttccttgctctcttggggggatttggctggtgccgaagtgtttctgaagtctcaagaactgccataaaatctcacgctgccatttccctgaacagatacatacatagagagagacagttttccaaactgtgtcacgcaggctgagtgcactggcaggatcacagctcacggcagcctcaacctccctggctcaagcgatccctcccctcagcctcctgagtagctgagactacaggtgagtgccaccacactcagctaatttttaaattttttgtagacagggtctccctatgttgcccaggctggtcttgaactcctagactcaagtgatcctcctgtcttggcctcccaaagtgctgagattacaggtgtgagccactgtgcccagcagtttcccagaatatatttaaatgcaaagttacatgaggggaaaacatgtatgtttgctcctgttgttactgggtaggttctgaacagcagaaacccatgtgcagggtgggctggtgaaggcccctctccgcaaggtggtagcaggaaaaggtccttgacttgatgaatttggtctgcctctgagccactggaggaagctgttttgagccagggttttttggcctaaagccagcatttcctcagtctccctttgtggttcgaaggatatggactattgcaatacatttcttccttcaaatcctgccactgttttgttggcccacaactaataggacctcaaaataagccatgctgctttgcacacacactagccttcttttgtacttttcttctggatgggcttggccaaaacaggctcaggccaaagacctcccaagctgtatgtacttccagtatcctgaaacagtgtttggtgacataatgccaagggtaaacaagcctgatttaggcactgctttatccaggggcttcacccatgaaattaataaaacttatctgagtcacttgaaacttggttcccagaaaacacatttctggtttataatctccttttatgctcacctgacattaattatctatccttgatgatgtgtttaaactgagtagcagaaaacagaggccacactttctgggaaattttaaaggaagaaaccatttttaatgagatgaaaatatttaacgaatttaaaaagctaatgacaattttgagaaaaggtttgggatgtatattgctatgtaatttaataaactgattttatggatat

SEQ ID NO: 2129 - DNA, 4163 bp, Homo sapiens
cacttgtgctgagctactggctgatccccaaggacatccttctggcctctccttcacacctgggtcccctagccctgcatggagtctcgctctatcacccaggctggagtgcaatggcgcgatcttggctcaccgcaacctccatctcccaggttaaagcgattctcctgcctcagtctcctgagtagctgtgattacaggcgtgcgccatcacacccagctaatttttgtattttttagtagagatggggtttcaccatgttggcctaactcctgacctcgtgatctgcccatcttggcctccgaaagtactgggattacaggtgtgagccactgcacccggcccaaacatttctttttcttttcttttgagacagagtcttgctctgttgcccgtggctggagtgaaatggtgcgattatagttcactgcagcctcaaactcctggccttaagcgatcctcccatcctggcctcccaaagtgctgggattataggcatgagccgcagcaaccactcctcacatttcttgagcatctgtgatgtatcaagccagatgctgggcactgaggttgcagaaggcattgttcctgtcttctaggagccccaggctagcagggaagacggatgtgtatagagttaaccacaataccaggcctcaacttcccgtctgtaacacaggtggaccatgctagattgtcccagcctgccctgtgcttcattagccggtcaacagatccatctcaaatacctcccatgggtactcactgattgctttaacccaaaccatggcactcttgaagactttccctcaggaagctcaaggactatgcatccttctgggtcagaactggacacacagccaccagtgctggacaatggcggcggctcagggacacactggagccctggcccctgcagagctcccagcatggttgggaagagagatgcaaaatgaccacacggcgggtgaggaggagctccctcggtgcggctgggatgagccctagacactctcaatcacccccacgatgaccccttcccagaggtcccctcagtcatctgccctgaaccaagctcttcctgatcctagaccctccaccctccctctatcttccagggcttggtgacattccaggcagaaatttctgacccttttactttggtccctccctccccagcccagtctctggtcaaactggattcctggctgttcccagaacgagctgcctttccccaccttgccacctctgcccttgttctctctgcctgaatgtcctccttcactagcctcgctgccttgcacatctctcctgagggctgtcatcccagaatgagctgcatttgtccagcctggcccaccgtctaccagaacgtcctccttcagcctgtcccactgccttgcaaaacttttctgggggacctgttcacgatgccttctgtagcatactccaagaatccggcgccccctggagttgtgccacacagcacccctttgcagtcaagctccctcagcaccaccacctccaccctggaagagttccccttccctttgaaatctcatgggactttgcacccactctggctttattggaaggctttgtatgtctccacagggtaaacacccatttactggggtgatgatgtctccaggatctagttcatgtttgtcgttggtgactggccccacccagttctgggcaagcaggctggatcccggcaggaacagagcccaccagcctaaacttccatggaggtggagaggggacaggcttctgtctctttttggctgaaggtgcatcatgtccaaggcccctcttctagccaagcagagaagctgggtgataaggatgggtgagagtgggtgatgtaccccggagtcctggcctcccggctcctcactcccctacacgtaactttatccggccaatgccgcaaagactgctggtgaggccagatgcatgagtgatcatactcacaacagtcgtgaaactgccagtgatgaaactggtaaggacaagaaatgacaataatcaaggtggggtttctcgtggacgtttccaagacttcattctcaaattctctccctcagggtccccaccctgtcctcccacctaagcctggaatgagggggcactggcctgtggggaccctggtcttcaggctcccaaacctggctgggtctggttgccccctggccttaacctgtgaacatccagctgtccctgggctgtgattcagtgtctgtctcccgggtgacctcagcatgggctttgaggaaggggagagagtagtttcttctgagactggatagtgactcagggacccggggctggggcctcaaaagtgcctttgttggcctgggctcaggaatccagagaaactggtcaggaggaggccccagtgacaaaaacccctccctctgcccccgcccctctgccagagccatataactgctcaacctgtccccgagagagagtgccctggcagctgtcggctggaaggaactggtctgctcacacttgctggcttgcgcatcaggactggctttatctcctgactcacggtgcaaaggtgcactctgcgaacgttaagtccgtccccagcgcttggaatcctacggcccccacagccggatcccctcagccttccaggtcctcaactcccgtggacgctgaacaatggcctccatggggctacaggtaatgggcatcgcgctggccgtcctgggctggctggccgtcatgctgtgctgcgcgctgcccatgtggcgcgtgacggccttcatcggcagcaacattgtcacctcgcagaccatctgggagggcctatggatgaactgcgtggtgcagagcaccggccagatgcagtgcaaggtgtacgactcgctgctggcactgccgcaggacctgcaggcggcccgcgccctcgtcatcatcagcatcatcgtggctgctctgggcgtgctgctgtccgtggtggggggcaagtgtaccaactgcctggaggatgaaagcgccaaggccaagaccatgatcgtggcgggcgtggtgttcctgttggccggccttatggtgatagtgccggtgtcctggacggcccacaacatcatccaagacttctacaatccgctggtggcctccgggcagaagcgggagatgggtgcctcgctctacgtcggctgggccgcctccggcctgctgctccttggcggggggctgctttgctgcaacagtccaccccgcacagacaagccttactccgccaagtattctgctgcccgctctgctgctgccagcaactacgtgtaaggtgccacggctccactctgttcctctctgctttgttcttccctggactgagctcagcgcaggctgtgaccccaggagggccctgccacgggccactggctgctggggactggggactgggcagagactgagccaggcaggaaggcagcagccttcagcctctctggcccactcggacaacttcccaaggccgcctcctgctagcaagaacagagtccaccctcctctggatattggggagggacggaagtgacagggtgtggtggtggagtggggagctggcttctgctggccaggatagcttaaccctgactttgggatctgcctgcatcggcgttggccactgtccccatttacattttccccactctgtctgcctgcatctcctctgttccgggtaggccttgatatcacctctgggactgtgccttgctcaccgaaacccgcgcccaggagtatggctgaggccttgcccacccacctgcctgggaagtgcagagtggatggacgggtttagaggggaggggcgaaggtgctgtaaacaggtttgggcagtggtgggggagggggccagagaggcggctcaggttgcccagctctgtggcctcaggactctctgcctcacccgcttcagcccagggcccctggagactgatcccctctgagtcctctgccccttccaaggacactaatgagcctgggagggtggcagggaggaggggacagcttcacccttggaagtcctggggtttttcctcttccttctttgtggtttctgttttgtaatttaagaagagctattcatcactgtaattattattattttctacaataaatgggacctgtgcacagg

SEQ ID NO: 2130 - DNA, 3835 bp, Homo sapiens
tgagagcatcaaattttaggcagctgggtcaggcatgatggctcatgcctataatcccggtgctttgggaggccaaggtgggaggtttgcttcagccaggagtttggagctgcagtgagccatggttacgccactgcaatcatgagcaagaccctgtgtctaaaaaaattgaggcagctaacatgtgttaggcattatgccagacattgtcagatcataattaagagcccttaagaaattgacatagggagatgacacatagatgaataaatagtggtaagcctagcagtagaaaagtattggggtaaaaggacagtgtagagcagatggtggtgattagctcagtctggtggcaggccatgttagaggatataaaagagattgctaagcaaatgggattggaaggagtagcacatgaaaagctcaaaggctgtaggtggaggctgagtttattgggacatggtaaattgtgggaagggcttagttgtttgaactggacactcgggggagaggtgtgcttcatggggtctgtgaagtggtgttgagcaggatgagccttgtgtacaataaggccttctctgtttttagcaggcgaagtggtcagcatcgggcagttagcctcactggcacaacgtccagtggctaatgcagggggaagcaaacctctcaccttccaaatccagggcaacaagctgtctttgactggtgcccaggtgcgccagcttgctgtggggcagccccgcccgctgcaaagtaggtaaaacccaccccctgtcctgcctttttcctcctcttccctgtctctttgtttttgtgacttttttgaatgtcagcctttatgtttcttacccaagcttttggtgggtggggccaacgggcatggttggagggatcttggataaagatagggaagaggtcattctagagaatgtattccctctctgttcttttcttctcttcttgccttgcctctgccctcctcaggctgatagctgcttctctctctctttctctcttcccttaacccagggaatgtggtgcacctcgtgtcagcaggggggcagcaccatctcatcagccagcctgcccatgtggccctcatccaggccgtggccccgacccctggccctacccctgtctctgtgctgccttcttcgacccccagcaccacccctgcccctactggcctcagccttccgcttgctgctaaccagggtgaggctcctggccttcctacttagcccttgctggccttggtccttccaggcatgcgctgggctactgtctgtccagccttccctcagtgttgttttcccttgcgaatatctatgatacctgtctgccaccttctcctgcccctggacttcttccattctttgggtcttttgtttcttttctaccttcctctcagtgtagcttcctcttgcagtgccaccaaccatggtgaataatacaggcgtggtgaagattgtagtgagacaagcccctcgggatggactgactcctgttcctccattggccccagcaccccggcctccgagctctgggcttccagctgtgttgaatccacgccccacgttaacccctggccggctacccacacctactctgggtactgctcgagcccccatgcccacacccactctggtgaggcctcttctcaagctggtccacagtccttcacctgaagtcagtggtgagtccaggtggctgaggccagaaatccttgccaggaatggagacgagatggggtcgcctcaaggtttcttagttttagtacaggttttttcatatcagcgtactgccttgatttgtagtgggccccagaactgggctgcctgagccctgacctaatttcaagatctatttgctggaatcttggaggggaagaaaatctaaagttgtcagattacttggatgtttgacttcatgttgtgggagtgaatgccttctgggaaatgggaagcttgggggtatgggaaagatgggacagggagtagaaaggctcaggaaaagaattctggggctaactcatcctctctctccacagcttcagcccccggagctgcccccttgaccatctcttctcctctccacgtgccatcctcactccctgggccagcctcttctccaatgccaattcccaactcctctccccttgctagtcctgtgtcctctacagtctcagttccattgtcatcttcactccccatctctgtccccaccacacttcctgccccagcctcggctccactcaccatccccatctcagcccccttgactgtttctgcttcgggcccagctctgttgaccagtgtgactccaccattggcacctgttgtcccagcggctcctggacctccctccttggcaccatctggtgcttccccgtcagcatcagccttgactctaggtttggccacagctccatccctgtcttcatctcagacacctggtcaccctctgttgttggctcccacctcttcacatgttccagggttgaactcaaccgtggccccagcatgctcacctgtcctggtgccagcttcggctctggccagtccttttccgtcagcaccaaatccagctccagctcaggcttcccttctggctccagcatcttctgcatctcaggctctagccacccctctggctcctatggcggctccacagacagcaattctggctccttctccagctcctcctctggctcctcttccggtcctggcaccatcgccaggtgctgctcctgtcctggcttcatcacagactccggttccagttatggctccatcgtctactccaggaacctctttagcctcagcttcaccggtaccagctccaacccctgtgttggctccatcatcaactcaaactatgctaccagccccggttccgtcacctctcccgagcccggcttctacgcagacactggccctagccccagctttagcacccactcttggaggctcatctccatctcagacactctctttgggaacggggaacccccagggaccctttccaactcagacattgtcattaactccagcatcatccctggtaccaactccagcccagacactgtctttggcaccaggaccaccactgggtccaactcagacgctgtctctggctccagcaccccctctggctccagcttctccagtgggcccagccccagctcacacgctgactttggctccagcatcgtcatctgcttcactcctggccccagcttcagtgcagacactgaccttgagccctgccccagttcctaccctgggcccggccgcagctcagaccttggcgctggccccagcctccacacagtccccagcttcccaggcatcttcccttgtggtttcggcatctggtgccgctcccttgcctgtcaccatggtatcccggctgcctgtttccaagtatgagcctgacacactgacattgcgctctggtccccccagccctccctccactgctacctcgtttggtggcccccggcctcgacgccagccccccccaccacctcgttcccctttttatctggtaagttttacttcctcaagagggaacaggaagttgagtttctttggagtgttggtagggtggatggaacagtgatgtcacatttaacctggtgaattacaaagcttaatgttatggaccaagtacttgagtgacatttggacaagtcccttctcttccctgggcgtgtacctcatgatccgcctgcctcagcctcctgaagtgttaggattacaggggtgagccaccacgcccggcctcttttcccgttttttaacccgcacggtaataaatgggcagtaaaagg

SEQ ID NO: 2131 - DNA, 3973 bp, Homo sapiens
cttcctggcggcgggcgcaggcgtttcctcggcgtggggcggaagcacgatctccggcagcggcctgggaactcttagctgagcaggcgagagcatcatggataccgacttatatgatgagtttgggaattatattggaccagagcttgattctgatgaagatgatgatgaattgggtagagagaccaaagatcttgatgagatggatgatgatgacgacgacgatgacgtaggagatcatgacgatgaccaccctgggatggaggtggtgctgcatgaggtgtatggtcctgaggtggagaccatagttcaagaggaagacactcagcctctcacagaacccattattaagccagtgaaaaccaagaaattcactctgatggagcagacattacctgttacggtgtatgagatggatttcttggcggatctgatggataactcagagctcatcagaaatgtgaccctttgtggacatctccaccatggcaagacatgttttgtggattgtttaattgaacagactcacccggaaatcagaaagcgctatgaccaagatctgtgctatactgacatcctcttcacagagcaagagagaggtgtaggcatcaaaagcactcctgtgacagtggtcttgccagacaccaaaggaaaatcttatctcttcaatatcatggacactccaggacatgtgaatttctctgatgaggtcacagctggcttgcgcatctcagatggagtggtccttttcattgatgctgctgagggggtgatgctgaacacagagcggctgatcaagcatgcggtgcaggagaggctggcagtcactgtgtgcatcaacaagattgaccggctgatcctggagctgaagctgcctccaactgatgcttattacaagctgcgccacattgtggatgaggtcaatggattaataagcatgtattccactgatgagaacctgatcctttccccactcctgggtaacgtctgcttctccagctcccagtacagcatctgcttcacgctgggctcctttgccaagatctatgccgacacctttggtgacattaattaccaagaatttgctaaaagactctggggtgacatctacttcaaccctaagacgcgaaagttcaccaaaaaggccccaactagcagctcccagagaagtttcgtggagtttatcttggagcctctttataagatcctcgcccaggttgtaggtgacgtggacaccagcctcccacggaccctagacgagcttggcatccacctgacgaaggaggagctgaagctgaacatccgccccttgctcaggctggtctgcaaaaagttctttggcgagttcacaggctttgtggacatgtgtgtgcagcatatcccttctccaaaggtgggcgccaagcccaagattgagcacacctacaccggtggtgtggactccgacctcggcgaggctatgagtgactgtgaccctgatggccccctgatgtgccacactactaagatgtacagcacagatgatggagtccagtttcacgcctttggccgggtgctgagtggcaccattcatgctgggcagcctgtgaaggtactgggggagaactacaccctggaggatgaggaagactcccagatatgcaccgtgggccgcctttggatctctgtggccaggtaccacatcgaggtgaaccgtgttcctgctggcaactgggttctgattgaaggtgttgatcaaccaattgtgaagacagcaaccataaccgaaccccgaggcaatgaggaggctcagattttccgacccttgaagttcaataccacatctgttatcaagattgctgtggagccagtcaacccctcagagctgcccaagatgcttgatggcctgcgcaaggtcaacaagagctatccatccctcaccaccaaggtggaggagtctggcgagcatgtgatcctgggcactggggagctctacctggactgtgtgatgcatgatttgcggaagatgtactcagagatagacatcaaggtggctgacccagttgtcacgttttgtgagacggtggtggaaacatcctccctcaagtgctttgctgaaacgcctaataagaagaacaagatcaccatgattgctgagcctcttgagaagggcctggcagaggacatagagaatgaggtggtccagattacgtggaacaggaagaagctgggagagttcttccagaccaagtacgattgggatctgctggctgcccgttccatctgggcttttggccctgatgcgactggccccaacattctggtggatgatactctgccctctgaggtggacaaggctcttcttggttcagtgaaggacagcatcgttcaaggtttccagtggggaaccagggagggccccctctgtgatgaattgattcggaatgtcaagtttaagatcctggatgcggtggttgcccaggagcccctgcaccggggcgggggccagatcatccccacagccaggagagtcgtctactctgccttcctcatggctactcctcgtctgatggagccttactactttgtagaggtccaggcccctgcagattgcgtctctgcagtttataccgtcctggccaggcgcagggggcacgtgactcaggatgcacccatcccaggctcccctctgtacaccatcaaagcttttatcccggccatcgactcttttggctttgagactgatctccggactcacacccagggacaagccttttctctgtctgtcttccaccactggcagattgtgcctggtgatcccctggacaagagcattgtcatccgccccttggagccacagccagctcctcacctggcccgggaattcatgatcaaaacccgccgtaggaagggcctcagtgaagatgtgagcatcagcaaattcttcgatgatcctatgttgctggaacttgccaaacaggatgttgtgctcaattaccccatgtgagtgcgtggactcctgggagctcctgctccctacagtgggctgcaactcctgtacttgaagctgagacctcatatgacgtggccttcgtgttgtcagagagtgtctggaagctgctgttgccatcttgaacaactcaccaacctccaacccagagccccagtgagagaggagcatttggcctcctgcttccttctgtggcctctgccgggctccattcccaaggaaaagagaggagcttgggctcacagaaagagaaggggatgaaaccccaaggggccctatctttgggatttacatggaattttattttctacaagtttgaccttagccatggtttgcaagtgaacagaacattctgacctctgtcttgctctgctcctttcatcctcgtctcccctgccccgtctggtgcttacattctgaatatatgtcatctcccaagaggcttcactgcctctgcttccagctgcagcctccttcctgcctgggtccccagggaagccgcctgccttttaattcagtgttcccatgagcgccaaggccccattattgcccccttgctcccactccatgctgcttctgggtgggacctaagatggcttgggagttgttgggttcctgcgatcagaagtctaccccaccacctcctcaggaaactgctgcctcccctaagaatcttccttgccctggagtagggggccagagcactttgatttccagccatttactccaagtcctctccccagctaccaccagtcccttactctgttctcccccagtgaaaaagagtctgttgattttcctcaaaactgctttattaggaatgtaccagggattgagttaggggagttggacagccccggctcctataggagtcctacttctctccagcatcctgtgccatcctcttgacgtaatcgttgtacattgtgtacacagcacctgtgtgagagaaaagaaataatgccccttggcatcaaacccttc

SEQ ID NO: 2132 - DNA, 5573 bp, Homo sapiens
agggcggaagcgctatccgagcaggatgcggttcgtggttgccttggtcctcctgaacgtcgcagcggcgggagccgtgccgctcttggccaccgaaagcgtcaagcaagaagaagctggagtacggccttctgcaggaaacgtctccacccaccccagcttgagccaacggcctggaggctctaccaagtcgcatccggagccgcagactccaaaagacagccctagcaagtcaggttcggaggcgcagaccacaaaagatgtccctaataagtcgggtgcggacggccagaccccaaaagacggctccagcaagtcgggtgcggaggatcagaccccaaaagacgtccctaacaagtcgggtgcggagaagcagactccaaaagacggctctaacaagtccggtgcagaggagcagggcccaatagacgggcccagcaagtcgggtgcggaggagcagacctcaaaagacagccctaacaaggaggaagttaagtcttcagagcctactgaggatgtggagcccaaagaggctgaagatgatgatacaggacccgaggagggctcaccgcccaaagaagagaaagaaaagatgtccggttctgcctccagtgagaaccgtgaagggacactttcggattccacgggtagcgagaaggatgacctttatccgaacggttctggaaatggcagcgcggagagcagccacttctttgcatatctggtgactgcagccattcttgtggctgtcctctatatcgctcatcacaacaagcggaagatcattgcttttgtcctggaaggaaaaagatctaaagtcacccggcggccaaaggccagtgactaccaacgtttggaccagaagtcctaacagaatggtatattcctctggaaaaagatgaacgtcaccaatggattgtgctgctctcgtttcagctttgatttttttgtccttgagaaccttgtcctccctgctgatttgtttctaaatcaaaagaaatgaagaaaaaagtactgtgacctgagagacaccctcctctagaatttagtggcgggtctgggctggcagaggtagggggctgctttgggctttgcacctgcactttggtgacattgttcttctgtgttccctttatttatgctggtggcttccatccgttcctcctctgagggtgagtggaggggtatatggaaacacggctatgaccaaagggagatcccagcctgggcaggctgcgctgctgaccaccctccctggggcccgggctctgtaggaaagttggtccttgactgtggcattgcactctgcactgtttctctctgcagacctaggggaaaactgcaggtggaagtgcttttctactaaggcctcttactttgggggggatgtgccctacagaagacatagaagatggggaaatgccaatgggcaaagagctactttgaatacataattctcttcaaagacttcagcagcaaaccaaaacagcaggttaaaaaaaaagatgcttttttgggtgcaagtctaacctgtctagcatgagatcttcttgattttctgattattttatgtagcttgagacaaagtgaatcaacttccacttagttgtaccgagcataaaacagaacttgggcttcctggcagtgaggccactgtcccatcacagatttttaaaataaatatgatttgaagtagtgtgatctttcacacaatcatactcagtaggaactttttgaaatagggcaagtttatgtttcatgcgagaaaacatgaaggagggttttggttttggtctgcagtttttccaaagggcttttatgagatacatttcccacaaagtccattttgcctttgttgcctaaaacagacaaaatagacttagatttattaatagaaactatactctctgccaattttacctcagtgtatttaatggtcctttaatctgatataagatgccaagggtatttgataaaaattcttcttccatgccatgtcaggagttaatacaaatgaagaaattccgtgggttcccctgggataagtgagggtagtgtcttggacaacactattgtttgaaggtttatcttttctaatcatgctctaccgcattgtagagagcctaaagagagttgtttctgagctgatctcagggaaatacaaataacttgggagatgagggaaataagatgaattctgtgctgtcaaggcagtaagtctgaagaaaggaccatgcttcttatattatcttccaccttgcttaaaacagcccatagctttgagttgacattttcattcttggcggatagcctactttatgaaggtaaggaatgaactcctacccttcttgggtcattctctgtactgatgcgttagtcttataatactttgcaccaacctgaggaatcttctaggcttctctagcatcccctaagactgtggctatttcacgtctctctccctgcctgccttccttttcccttcctttcccctcctcatgttttctggttgtgcccatctgtaccagctcctttccatccaccttgtatgcacccagatttttctgttcccatctgtcctatttgttattcatcccgctgctcaacttctccagtatgttgcttcccttaagttgccattcattctcttcatgacttttactaactcacttcggtctctgtctgtcaactaaacttttctaaaggttaccagttatccaatcaccaaatccatggctttttctcaaagcttagtcttgtccttggcagaactggacactattgaccatccaaatggaaattcccctttcttggtgtctctgacaaatggtcctttgccttatcttgtgctggtggtgaagaggccctcaaagccaggcctctctattcctttgactgtctcctcagccattaacccattcttcatcctcggagtgagtgattcccaagtctttgtcttggcttaatccctaaagaacccagttctgctggtatcgaatagttcagcttggttgtcattgaaaggaatttctctcttctgtccatcagcctgtccctcccaactgtctaggacagtcttcggtcacctaaattcctaactgcagacttttgccctttttctctctcatcaccaaagtcccatccatttttttttaataaaagatcctcagctacagtctttccattttccttgcttctcttattgcacacccccagcccattttgcttctctcttggattttgttttttcagatccacatttattgggtttcctgtccagcttcttggaaaggagctcactcttggaaagactgatctttccaaaatattttccctggtctgaagctttggtgtgaacttctcaaggcttagagaatccagttacagaccttttggggttcaggatgctatagattgacaccctcctgcctgtttttctctgcatcccaacctggccaaggcccctcctgtggggtgcccatctgtgcctttattccggctgtgccctcgactttccagcttcccatgtttctttggttaggtttctctcccttccttctttctccttccccaatccgcctgtttcgtcagggcccagtttgtttcctcatacaccttcctcactaccccaccccacatggttgactctttccctcagctccaccagctcttcatcatgccactcatttcagaacttgagcaaaacagggcagtcaggatctgatgtctttctggtctccctaagaaaactaagctcttgagggacagcccttggcaatgctttcctatctgctgatcatggtgaccttccttaggacttccagagttcagttccttctggcagagaggttttctttctccatgccatatggatgtgactcaaatgaggggtcccacagcttttcctggctaccacttgctgtgaccttatacatgttggggtttgctcttaaagaggagagcaggaagaaaggttggtttcagaaaccaagagggtcggcagtggacgcgtacattttgtcacggagtccacagagctgagcttttgagcagactctgagaagtatcattgcttgtgttgaaagaatacaacaggatttaagtttctctttagaaattgcactgaagaaaggccgggcgcggtggctccccctgtaatcccagcgctttgggaggccgaggcggggggatcacgaggtcaagagatcgagaccatcctggccaacatggtgaaaccccgtctctaataaaaatacaaaaattagccgggcatggtgacgtgcacctgtagtcccagctactagataggctgaggcaggagaattgcttgaatccgggaggcggaggttgcagtgagccgagatcgtgccactgaactccaacctgccaatagagcgagactccgtctcaaaaaaaaaaaaaaaaaaagaaagaaatagcattgaaggaaataccgcacatcagaggaaagcttattttctgcatggtgtcttttcaaagatagaatatttgaagcatgttttctagcgattgtgtggatgagggtgagctggctgaggcatcgctcaagctggggggtggtgtgtaagaagcacgtggagccacaagaggcacctcctatagtcagctaagggcttccctttctgcgcccagcttttgggtgaagggtgatttctattagacacatctgtgcttcagtcatagatgttaatagaggaagcagttttcctgctgcagattcctgaatagagttgctgaaagagtctacttctggactcaggggaagttgaaggccagtctgtgtagaaaggctgaggcaacggggaaagacctgacagctagttacatacgctctgacatagtactcccatgatggcttccagtgacacatgtgctgatagaattctaaacctctggaatttccctgctggcgacttctatggccgttgactgtacagggtaacctgatgccagatgctatgggcgtgatgagaactagagcattgcagcatggaggaaactgtgaggcaccagatcctgtgcttctgcaggccattttctgaaaacccctgttaggaaggttggatttggcgtgacttgcttgagcaagagtcctggggagagattttgaggtttaatttaacggtatatccagagctaacagtgactcaactcgtctagttctgcaagtcagatgtacacttagagtctctctgtgaagggtttgggtctgagctgtatagtatgtcaaactgccagtaagccagcccctcaccctctgatagatattcctttaatgcaccagacttcatgtttgataaatgattaatggttgaaattgtttctcttcttttgtgttttcccagttaatagatggtcactgtttccacaatgttttatactttcagctttttgtaacttaactataattacttaattttatttttttaaagcttgttgtggtctaatgagaagtatttttcagtgcataatgtttttctgagcttctgtaaatgccatcccaatgtggtttggttttgttgaacagaaaccaaaataaatttcaaaatgtt

SEQ ID NO: 2133 - DNA, 5524 bp, Homo sapiens
cttggaggtccccagagagcagggagacaaatgaacccagaacacaaatggcaaagaagaaaaatgagagaatttgtaaaagacagcattcgaacatgccgaacaagagcagggtactggtgttcaaacacctgtatctcccccgtgtaacccgtcaactaatatctttccatatttgctccagatttgtctttagaaataaaacccacgttctgaagtcctgtttgtatgtggccccagtcctgttgcctccgcctcctgtcctgaagtcgatttctgcccttctcatctatggttagttttgttttgtatgttggcatgttttcttaactttacagaaatggtatcatactgtacatatttgataattttttaaaatattgcattctggaggcatgtataaatgtagctccagttcatttattttatttattttttgagatggagttttgctcttgtcacccaggctagagtgcaatggcgtgatgctggctcactgcaacctctgcctcctgggttcaagcaattctcctgtctcaatttcctgagtagctgggattacagttgcccgccaccatgcctggctagttttgtattttagtagagacggggtttcaccacgttagccaggctggtctcaaactcctgactgcaggtgatccacgcaccttggcctccaaaagtgctgggattacaggcgtgagccaccgtgcccagcccagttattttaactattgtatagtgttccattgtatgagttctactgtttatatgctattgatcgacctgtaggggttttgcagtgtttctgtattacagctgtgctgcagtgagcatcccatcacattgtgtggatttgaggaagtattggaattcccccaattgactggacattcccaattaccctccaagtatgtgtctgtttatccttccatccgcaatctgagagttccccaactctataatacttggtgtcatcagacttttcatcttgtctgattggatgggtgtcatttcctttaggttttataattatcttttcatatgtgtattggctgtacaaggttccttctctgttcattattattaatttttttagacagagtctcgcgctgtcgcccaggctggagtgcagcagcgtgatcttggctcactgcaagctccgcctcccgggttcatgccattctcctgcctcagcctcctgagtagctgggattacaggtgcctgccatcacgcccggctagtttttttgtattttgagtagagatggggtttcaccgtgttagccaggagggtctcgatctcctgacctcgtgatccacccgcctcggcctcccaaagtgctgggattacaggtgtgagtcactgcgcccagcccaagtttccttctctgttacttgttcatatcctctgcccatttttcacttggattttttgtcttacggatatttaagcctcttaaaatatatattctggagagatgctaatctttgattaattatatgcattgcaaatgtctggtacattgtggcttgcctctcttccctgcctttaggagtgttttgctggacccaagtaatttttaaatgttaatgttattaaatctatcagttttttgcttgtatggcttatgccattgaatcttgttttaagagatccttccctaccctcaaggttttctaaatttttattttcataacaagatttttagttcatctgaaatgtatttttatgattgtatttagtagggacctaattttgtttttctttgtaaccaggtgtcccagcactgtttactgaacagtctctcctttctcgctggtctgtagaactctcctgacatataccaagtttccataagtgggtggatgggttcctgagctctctactgttaatagaacttgctctctcgcaggccaatgcctcaccaggtgattgaagcagagaaacttaggtggtgaaaggagaagatggggcctgtcctgagagtttctgttcctgagatgctagaggcagaggtttccagaaccacaagacagacccaagagggctgtgttggcaaaacaaatggcagagtggagctggccagaggcatctgtgcgtggcgactccaagagagcacccgactccagatggcgacactgcaggatggagcggggcatgcctgcagacaggtgtcagagacggggtcttgctgtattgcccaggctagatttgaactcctggcctgaagtaatcctcccaccttggcctcccaaagttctgggactacagaccattcgtatatatcttctttggagaaatgtgtggtgcaatcttggttcactgcaacttccgcctcctgagttccagcaattctccagtctcggcctctcgagtagctgggattacaggcatgtgccaccatgcctggccatcttcgctcttgagcacctgtgtcatgatggcgtctcactcttgttgcccaggctggagtgcaatggtgcgatttggctcactgtggcctctgcctcccgggttcaagcgattctcctgcctcagcctcccataccagttcaactttttcagattccacgtgagggagtgacggggcaaatctgcgtgctgctggtggcggtgcctcccagggctgctcggcggggacgccgagggctgcacccgagctccatcccgtgttggctgcgcgccctccaaaaccccggctgtcagcgactgcgggcacctgcacgccgacgagaccggcgggcggacagcgactccgccctgaaggatggctgccatattgggagacaccatcatggtggctaaaggccttgtcaagctgacccaggcggccgtggaaacccacctgcagcacttgggcatcggaggggagctgatcatggcagccagggccctgcagtccacggctgtggagcagattggcatgttcttggggaaggtgcagggtcaggataaacatgaagaatattttgctgagaacttcggcggcccagaaggggagttccacttctcagtcccgcatgcagccggagcctccacagacttctcttcagcctccgctcccgaccagtcagcgcccccatccctgggtcatgcccacagcgagggcccagctcctgcctacgtggccagtggaccctttagagaagccgggttccccggccaggcctcctcccctctgggcagggccaacgggaggctctttgcagaccccagagactcattctctgctatgggctttcagcgaaggttcttccaccaggaccaatcccctgttgggggcctcacagccgaggacattgagaaggcccggcaggctaaggctcgccccgagaacaagcagcacaaacagacgctcagcgagcatgcccgggagcggaaggtgcctgtgacgaggattggccggctggccaacttcggaggtctggccgtgggcctgggcttcggggcactggcagaggtcgccaagaagagcctgcgctccgaggacccctcagggaagaaggccgtgctgggttccagtcctttcctgtccgaggccaatgcagagcggatcgtgcgcacgctctgcaaggtgcgtggtgcggcactcaagctgggccagatgctgagcatccaggatgatgcctttatcaacccccacctggctaagatcttcgagcgggtgcggcagagcgcggacttcatgccactgaagcagatgatgaaaactctcaacaacgacctgggccccaactggcgggacaagttggaatacttcgaggagcggcccttcgccgccgcatccattgggcaggtgcacttggcccgaatgaagggcggccgcgaggtggccatgaagatccagtaccctggcgtggcccagagcatcaacagtgatgtcaacaacctcatggccgtgttgaacatgagcaacatgcttccagaaggcctgttccccgagcacctgatcgacgtgctgaggcgggagctggccctggagtgtgactaccagcgagaggccgcctgtgcccgcaagttcagggacctgctgaagggccaccccttcttctatgtgcctgagattgtggatgagctctgcagcccacatgtgctgaccacagagctggtgtctggcttccccctggaccaggccgaagggctcagccaggagattcggaacgagatctgctacaacatcctggttctgtgcctgagggagctgtttgagttccacttcatgcaaacagaccccaactggtccaacttcttctatgacccccagcagcacaaggtggctcttttggattttggggcaacgcgggaatatgacagatccttcaccgacctctacattcagatcatcagggctgctgccgacagggacagggagactgtgcgggcgaaatccatagagatgaagttcctcaccggctacgaggtcaaggtcatggaagacgcccacttggatgccatcctcatcctgggggaggccttcgcctccgatgagccttttgattttggcactcagagcaccaccgagaagatccacaacctgattcccgtcatgctgaggcaccgtctcgtccccccacccgaggagacctactccctgcacaggaagatggggggctccttcctcatctgctccaagctgaaggcccgcttcccctgcaaggccatgttcgaggaggcctacagcaactactgcaagaggcaggcccagcagtagggctgcgggccacgcccaggccggctccgcgggaactctctccctcagacaggccaaaaaccagtagcgaggtcgtggtgatgctctttttaactcctttgcccaataaggggggtggctgcctggagccccgtagccagcgctttccacggtttctgttgctaaatggttgtagggtgagaagtgcaagaatgaagatgaagccccactgctcggtcagtctgcctccgtgtgtcctctgaaataagcagatgaagatgaaagggcaactttgttttcttctttttcctgatgtgaatgttaagcagaagggagagagtccttactcccttccaatctctgttcagtgcaaaacccagaaacatgaacagatacgattgtgggatttttatcatctgtgtagtaggtgtgtgtatgtgtttctagagtgagatttgtgttttctgcccttttcctctccagccgatgggctggagctgggagaggtgctgagctaacagtgccaacaagtgctccttaagcctgcgaggcccaggcctgtggggctggttctcacctttgacagctgaatgttcctaaagaactgctgccccacagtgagggtgggagcagcggaacagggaatgccagacacaggctcgctgctgctggaaggcggggtgggacttccttcctctgtccggagaggcacaggtgtcaccagttccagccaaaggctcctcacaggcgctgtgaatttttgtacaagtcttgtaattatcgaatcaacaacttgtttcaatttaataaaaatgctcatgggaagtgct

SEQ ID NO: 2134 - DNA, 3990 bp, Homo sapiens
agagcgcagcggcgagcgtgactccgccatcaggtccccggctccctccccggacctagcccactccgctgcgccagcgccgcgggcagagctgacctcagacccgagcttcctgaccgctgtgctgtgcgcgctgggcggcttctcgctgctgctgggcctcgcttcccgggagcagcgactgcagcgctggacgcgtcccctgtccggcttggtatgggtcgcgctgctagcgctaggccacgccttcctgttcaccgggggcgtggtgagcgcctgggaccagccccacttgggccttcggcttcccgcgccccgcccccaggtgtcctattttctcttcgtcatcttcacggcgtatgccatgctgcccttgggcatgcgggacgccgccgtcgcgggcctcgcctcctcactctcgcatctgctggtcctcgggctgtatcttgggccacagccggactcacggcctgcactgctgccgcagttggcagcaaacgcagtgctgttcctgtgcgggaacgtggcaggagtgtaccacaaggcgctgatggagcgcgccctgcgggccacgttccgggaggcactcagctccctgcactcacgccggcggctggacaccgagaagaagcaccaggaacaccttctcttgtccatccttcctgcctacctggcccgagagatgaaggcagagatcatggcacggctgcaggcaggacaggggtcacggccagagagcactaacaatttccacagcctctatgtcaagaggcaccagggagtcagcgtgctgtatgctgacatcgtgggcttcacgcggctggccagcgagtgttcccctaaggagctggtgctcatgctcaatgagctctttggcaagttcgaccagattgccaaggaaactgcgggcagccactggcgtggacatcaacatgcgtgtgggcgtgcactcaggcagcgtactgtgtggagtcatcgggctgcagaagtggcagtacgacgtttggtcacatgatgtcacactggctaaccacatggaggcaggcggtgtaccagggcgagtgcacatcacaggggctaccctggccctgctggcaggggcttatgctgtggaggacgcaggcatggagcatcgggacccctaccttcgggagctaggggagcctacctatctggtcatcgatccacgggcagaggaggaggatgagaagggcactgcaggaggcttgctgtcctcgcttgagggcctcaagatgcgtccatcactgctgatgacccgttacctggagtcctggggcgcagccaagccttttgcccacctgagccacggagacagccctgtgtccacctccacccctctcccggagaagaccctggcttccttcagcacccagtggagcctggatcggagccgtaccccccggggactagatgatgaactggacaccggggatgccaagttcttccaggtcattgagcagctcaactcgcagaaacagtggaagcagtcgaaggacttcaacccactgacactgtacttcagagagaaggagatggagaaagagtaccgactctctgcaatccccgccttcaaatactatgaagcctgcaccttcctggtttttctctccaacttcatcatccagatgctagtgacaaacaggcccccagctctggccatcacgtatagcatcaccttcctcctcttcctcctcatcctttttgtctgcttctcagaggacctgatgaggtgtgtcctgaaaggccccaagatgctgcactggctgcctgcactgtctggcctggtggccacacgaccaggactgagaatagccttgggcaccgccaccatcctccttgtctttgccatggccattaccagcctgttcttcttcccaacatcatcagactgccctttccaagctcccaatgtgtcctccatgatttccaacctctcctgggagctccctgggtctctgcctctcatcagtgtcccagtgagtgttcccacatgcccttaatctccttctgcacacccttcctcagcccaagcccacagccccctgagtggaggaacgctccattctgtggattagaacagacataagtcacacccagtgtgtatcagtgtgtatgatgccccctgtctcccagataggacctgggcctgggagggacaggaagggagccctcaggtgtcccccctctgcctatgggacatgcccactcctgacccctgcctggccccacagtactccatgcactgctgcacgctgggcttcctctcctgctccctctttctgcacatgagcttcgagctgaagctgctgctgctcctgctgtggctggcggcatcctgctccctcttcctgcactcccatgcctggctgtcggaatgcctcatcgtccgcctctatctgggccccttggactccaggtgtgcacagctgctggacagaggtgccgggccccctgggatggggtgagatgggatacagcagagctgtcctggcctcaccgacctgaatcacccacagggcaaagtgggagggaagcggaggcctacatgggggcagggagaaggccaggaagggggaaagcaaggggtcaccctgatccatggccccttcaggcccggagtgctgaaggagcccaaactgatgggtgctatctccttcttcatcttcttcttcaccctccttgtcctggctcgccaggtaagtcacccagctcagccccaccagggcccacctatgagtggcccccatatctgtgacttgatctttctaatctccagggttgaatgcccattggaagcttctaagcgagccttcctgcttcctttcttctccttcactccctgcccctcctttctcccacacccctatctgggaaagcccatgctttagaaaaagtctgctgccaattctctatccctagtctgaatctaatttcaaggatagtctctctccaaggatacttacaccttaagctctacttctaaactgggggtggggtgggggtggtttcaggcatcatggagttggggctgaacactcaggagctgggcttcccctgctctgtgtctccccatggccccgggtgaccctccccagaatgagtactactgccgcctggacttcctgtggaagaagaagctgaggcaggagagggaggaggcagagacgatggagaacctgactcggctgctcttggagaacgtgctccctgcacacgtggccccccagttcattggccagaaccggcgcaacgaggatctctaccaccagtcctatgaatgcgtttgtgtcctcttcgcctcagtcccagacttcaaggagttctactctgaatccaacatcaatcatgagggcctagagtgtctgaggctgctcaatgagataattgctgattttgatgagctgctctccaagcccaagttcagtggggtggagaagatcaagaccatcggcagcacctacatggcagccacaggcttaaatgccacctctggacaggatgcacaacaggatgctgaacggagctgcagccaccttggcactatggtggaatttgccgtggccctggggtctaagctggacgtcatcaacaagcattcattcaacaacttccgcctgcgagtggggttgaaccatggacccgtagtagctggagttattggggcccagaagccgcaatatgacatttggggcaacacagtgaacgtggccagccgcatggagagtacaggagtccttggcaaaatccaagtgactgaggagacagcatgggccctacagtccctgggctacacctgctacagccggggtgtcatcaaggtgaaaggcaaagggcagctctgcacctacttcctgaacacagacttgacacgaactggacctccttcagctaccctaggctgagattgcactcgccttctaagaacctcaataaagagactctggggtgtctggagcccattgatgtctg

SEQ ID NO: 2135 - DNA, 3405 bp, Homo sapiens
tacttctctcagaaaacttggaaaacactgaaaagcagaaggaaggagaaaacctcacattcccttagccctaccccaagacagtatcttcttctccatgttgttttacacagctgaaatcatgtagcatatacagaggcacgtcataaattcacagatggaaaataatatgaacagagagatttgacagtatatgatacctaccactgagtggtttaattgtttttccaattaaaaaataaatctcatctctcagatcattgaatctgagtttctaagatgaacaaaatcatcactcagattcttcggggaggcatttggccattctaccgtgtcatgcatctctgcttttgcagaggaggaaggagagacttttgtttagtaatttctccatattggggtcctgctgtgaaaaagtttagctgttcttagcaagcactggaccagaacagcctcagcgattatttaagtgattgtcagacattcatctgattgaggtgagaaggatattgccagagaaatatcttaacctcttgtaacttcttcaagctccttagagctgggtctttctttccccaggactcttctcaggggagctcccggagtgcactcaggagctgatgattgacgtcaccaagagctactaccagaagtttttgcccctgacgcaagtctagcatctctgcctcatgtcttgaatctgcttgagctctaagatgaacctggggacaaagtgagccagtcagcacctacaaagagcttttgtgtctttgacatctaccaccctcctccttttaaaaaatttctttagaatttctcaatcttcaaggctctaagtgcttaagaattcactaacagacagaccatctggaggagctgtcttcaaatgctgtgcttacaccttatctatgaacagtcactttgtaccattatctgtggaacacagaatcatctgttcccaacactccagccccttggtcctgtggatggctggatcccgcctgaaacggacctgcagagcagcagcacccttccggtgtggaggctatgtagctggtgcgctgctcacggccattcactgcccatgctgagcgcctctcacacaggtaatgcccagcttttctgctgctaacacatttggccagttgttgcagttgctcaccatcttgggaaaggtgtttgtgacttttcagagcccagattcctgttgtctattaaaacttgaagggaggggtgaatagtgtttctctcttcttcccaaaatgaccttagctgtcctaggatagttagtaaaagactttttagcattttgacctagggcctttggctttcactaaaagtggggacctcagtatcccagattgtaattttgccaagtgttagatttgagtctctcatgtggatgcattagtcaggcggttactccttgcttcaaggtacttaccttatttcattgaagacaccgcatttgtgaactcttgcttcctggcctagaaccattcagcctaccctgtatttgccataaactccacaattcacaccaaaatgtctgtacttagagctaattcgcatatatacaggaagggctcttagaatcagtttgtgggcacagagcctcaggagtaaatgaagttactagggctgttcttaccatctccttctggccaaatagcacaacatttcctcgttctgctctgacctcttagcttagaaggaagattcagaagtgagggcctaagaaggttgtccttgcctaatgctctgatctgtaagtgaatagggcagaacagttcagccttgaggttagaatttagcaggagctatcctgacttaatatccagttgtggggtttgcaaaacaaaacagctgtatgtaatcatcgccactagttccatctagaactcctttctagtttgttatttttaaaatgtttatacataaaaccaccaaaatacatagcttcgacaagatggaagtttatttctctctcccataacagtgcagtgatagtcagctggtccaggccaggcaaggggctggtccatgatgtcatcaggcacccaggttcctactgtcttgccatgtggccacagttagcaacaaaggaggctgtaaatttagtttctacttgggcagccaaaactctgaggaaggagattctgctagtaaaaaggagtgggggaagaatggccattgggagacaacaagcagactcaaccaggcctctttgttggcttcctttcctcctgctgcacatgagccttcgccgtgcatttggagccatgacagctgatagctccagacctgcatcctcctagcttgggggccctgaatgaaaggtttcttcccttccagttcgaatttggaaactcccaaagttctcaatggtttgttgtgagttccatgtcctcttggatcagtcactgtggccatgcatgtttggccacatgattaatccagtctgggtcatgaccttttcttcatccaaaacaaggtggtgggaagacaaaaacaatagctactacaaacaataggagtttataattatgtgctgatgtattcgaagatgtgttgacagtcgtgagtgtgtatcctaggaaaggcgagctggactctgtctccatggtggctctcaccccagggacctaggaacagcctgtcaccacacaattacttttataaccctggagatgaaaatctccttgtcttcaaaatacttccagaagaacaaccagatgggaaggaccttggttgggactctttccagttcacttggggcagagggaatttaatggctcacgtagctgaaaaggatgggctagactgggcttcaggctgcatcccaggactccaaacagggatctgtctctttggctctcagctctgctttcatttgagttggctttattcttgggcttcacagtgtggccccacagcaccagttattgataaaaagagctcccctttgctgacagaactgctggatttggttctcattggtccagacgaggaaggtatccagcctcaagtcatcattgtggccaggaagatggaatacaccaaatggacaggcctggcatgtacccacagagactgagagttggtgctggtggttgtggtggcagatgatattacctgaagaagggacgaatgggtgctgggcaggacaaagcatcagctgtccagttcaggcctctcctctttccctggtgtcttcattttcctccgtctccctgctgtcccttaccctctgcccaatctctcattactcctggtcttgggagttgccttctgaggatactccactgggggtacctgagcctggattagagggcagggggaggatattgcctagccaaagtgggtgttcaataaagaaccatttggagatggtcttctgtctgg

SEQ ID NO: 2136 - DNA, 3626 bp, Homo sapiens
gtcctgatagaagcagtaaatagtaacttggttatgttttggttgtgaaggcccaagacttactttactgtgtgttgattgggcacagtggctcccagcacgttgagagggcaaggcaggaggttcacttgaggccaggagtttgagagcagcctgggcaacctagcgagaccctgtctctaccaaaaagcaaaaacaaattacaaatctttgtattagaagcagaaaaacacaggggacatggagaactcatcaccaaccctgccccaccccccattcctctcccctcccacatatacttctcactgcctgtccttggccttgaggttggtcctagggctggactgcccacacggtgactctcttttgtcctttttcagctttaaccggatcgacattccaccatatgagtcctatgagaagctctacgagaagctgctgacagccgtggaggagacctgcgggtttgctgtggagtgaaaagcaaccaaaggcaacagagtctagctcatggccaccagaccaaaagcatccagcttctgtgcacctcctgcaaagctggcagaggccctggaattccagatcacctgaggggaaagggttgtctctctcctttctgttgggggagggggatgggggacttttgttggtggctcccacccatatatccctcctttaccatagtactcccacccacttccatcacccatccaataaaatgcagccaggtttagcctttggctttggtcacacaggatattctgctgtggttgcaacccatgtggtgataaggctcacagccctgagctctttacgggagcatcaactcacagttaggggactgggcgtggctgattgagggtttggaactggtggctatgccagctattccatctcaaaacagccttgaggccccttttcaatttgagcagctgctagatatcttatcagagctcagattccagatttcacatcccagcagccggttctgggtagcagatcaatttccaactggaaaataactatataatgtatgcttattggaattctgccacagcaggaagcttgagtcaaaatgtgtttcccctttgaaaggagaaggaattggagcagcttttcctggaggcccaggatatttcttttctgggtatcttggctgaaaattttgttttacatagagaaaaacgatcttttaagggtcccttttgctgcattatctgtccagtttgacttttttttcagtgaaaacaccatgtcatggagtgtaggaaagagcagaccaaaatcagccctagagccaaccagtcagtcccaaagctgtgacctctgtgccactgttgtccatagaagagcgtcgactgtgtcacttaaaatattagtaaaccatgatgcagcaactgctaagagctaaactaacaaaattgtgtcatcatagctgctggcttggtgtgaactcgcttaaaagcaatggtgaaaggataacctcgatgatgtaaatccacccaaagatactgttctacaaaaagtatggtgtggacgcaaacctgtgacagcagagggggacgacttcacactcactgcctcatgtggcccctttcccagtggcagctggtgacactaacgattgctactcggttcacttgcccagatgtcttcatatgatgagcaaggccagaagcaaggctagattcgaagtttctgacaccatttccagtttgcacaaaagtcagtattttatcttaaagtggcttgatttccaatagctgaacttgggcagaaaacagcaggccaatgttcctatgtggtttctttgttgttgtttttgtttggggtgggggcaagtacagggtaattcatgagcaagacatttcactgctgtcgaagtctctgggatcccgctgtgggtctgagatggcctgggaaggaccttgtggacaatggttttatctgttctttttgtcactgttaatttctgggctgctgaggttctagaatagaagggctgccaaatgaggtttgctgcaggaggaaagtttaatcccccattccaaaagtccaggccaaatggtgggcttagcctctttgaaaagttctgccttgcccccacaggtgggcacatcctgtgtctcattcaccatgatgcttcctgagagtgttctagaagcccgttccccagtggctgtatccagcctttccttgcatcatcttcctcttgaaggtgaggaagtgaaaactacagacctcccccggacagcccactctctatcacgagcctaacccgcgggaggcggaagagacatccattcgagaactgaagcggcctccgggatgaggtcagaggccccacctgattttcctggtggtggtatccaaaatcttcagtaactaggaaggaaaccagggtctcatggtttaaaagactttgaagcaggaatgttgcatttgacgcctttaaaactacctttttgctgttgggaggagtcgggggcgagccttagcagctgcaccgccatccccatgctggttggtgctgccctgcctctcgtgccgggtgttgcttcagcccagagccagagggctgggtcccgggtcccccacaggtgaccccggtggacacacgcgttcccatcctggcctccgtctctgcttttccacttctacctgcgtgtgggtttgccgccttgtcatcggttgtgtgagtgtcgcagacctttccagagctccggttcactctttccaaacaggcctccctgtcggtggcactgcactcctagaaccttcagtttctacgatggtttgtttggtccttttgaaccaccccaaagaactcaacatggcaaagcaaatggtaaaagcttcccgactgttctactttgggtccgcgcgaagcccactcacgtgtgatctgtgttgcccctctcggtggtcccaggcgatccagccatgccccctgcccctctgcccagatgcttcaggggcccggcttttcaggcttgccctcaccagcggccgtcagtcgacactcagggatgtagctaacaccactccgccagtgctttcagtaggaagagctgaggctgcctgggaggcccggggcgaccggaaaagggctctctcaagttctgaaaagagaatctgccaccagatcgaatttcgacccctgagcttgttcggacgtatggtccaaattcagattaaggtggtcacccaacccgagatgtcaggaaaggccttctgcagagaaaatgtccccccacccgccatctgcagccaggtgtgtgccacacggcagccttcccgaaacatagtatggattttaaaaatgtgtttatttttgtttctcaaccactttataacgtattttttaatttattttgtaatgtcttgttttgaagtattgctgctatccttgttatccttcccactgtttttatcactgatttattttgtgaaagttgtacactaatgttctatgtcaaaatcaaaagtatttaatgaaatactagttctatttaatgtggttatggaaccagctggaaacacaaaacaaacagtgattgtacagcaggctgggcccaggaggtcaggttcattttgttacatatgcaataaactcacgactttac

SEQ ID NO: 2137 - DNA, 4799 bp, Homo sapiens
aagttcaagatgccatcctttgggatgttgtccccaggcaagtccatcgaggtctcggtggatgtgtctgcgccgaagatggaggccgacatgagcattccctccatgcagggggacctcaagaccactgacctccgcattcaggccccttccgccgacctggaggtccaggctggccaggtggacttgaaacttccagaaggccacctgcccgaggtagccggcctcaaagggcacctgcccaaggtggagatgcccagtttcaagatgcccaaagtggacctcaagggcccccaggtggacgccaagggccccaagctggacctgaaaggcccaaaggcagaggtgatggcccccgacgtggaggtgtctctgcccagcgtggagacggatgtctaggccccaggatccatgctggatggtgcgcggcttgagggggacctgtccctggcccacgaggatgtagctgggaaagacagtaagtttcaaggaccaaaactgagcacgtctggttttgaatggtcgtcaaagaaagtttccatgtcttcctctgaaatcgaaggaaatgttacattccatgagaagacttccgcatttcccattgtggaatctgttgttcatgaaggtgatcttcatgatccatctcgcgatggtaacttggggcttgctgttggagaagttggaatggattcgaagtttaagaaactgcattttaaagtgcccaaagtttcattttcttctaccaaaactcctaaagatagtttagtcccaggtgcaaagtctagcataggtctttccacgattcctttatcatcttcagaatgctcaagttttgaattacaacaggtttcggcttgttcagagccatccatgcagatgcctaaggtgggttttgctgggtttccatcatcccggcttgatctcactggtcctcactttgaatcttctattctctctccctgtgaggatgttacacttacaaaataccaggtgactgttcccagagctgccttggcccctgagcttgctctggaaattccttctgggtctcaggctgatattcctcttcccaagacagagtgctccactgacctgcagcctccagagggagttccaacatctcaagctgagagtcactctggcccactgaattccatgattcctgtttctcttggtcaggtgtcttttcctaaattctataaaccaaagtttgtgttttcagtcccccaaatggcagttcctgagggagacctacatgcagcagtgggtgccccagtcatgtctcctcttagccctggagaaagagtgcagtgccccttgccaagcacccagctgccatccccaggcacctgtgtgtcccagggcccagaagagcttgtggcctccttgcagacatcagtagtggcccctggagaagccccttctgaagatgctgaccacgaagggaaagggagtcccttgaaaatgcctaagattaagcttccatcatttaggtggtccccgaagaaggaaacagggccaaaggtggacccagaatgcagcgtggaggactcaaaactcagcctggttttagacaaggatgaagtggccccgcagtctgccatccacatggatctgcctcctgagagggatggagagaaggggaggagcacaaagcctggctttgccatgccaaaacttgcacttcccaaaatgaaggcttctaagagtggggtcagcctgccacagagaggcgtggatccttccctttctagtgccacagcagggggtagctttcaagacacagaaaaggccagcagtgacggtggtaggggaggacttggtgcaacagcaagtgccacaggaagtgagggtgtgaacctccaccggccacaggtccacattcccagtttgggctttgccaaacctgatctcagatcctccaaggccaaggtggaggtgagccagcctgaagctgacctgcctcttcccaaacatgatctgtctaccgaaggtgacagcagaggatgtgggctcgaggatgtcccagtgagccagccttgtggggaggggatagcccccacacctgaagatcccctccagccatcctgtagaaaaccagatgctgaagtcctcacagtggaaagcccagaggaggaagccatgaccaaggactcgcaggaaagctggtttaaaatgcccaagttccgcatgcccagccttaggcgctctttcagggacagaggcggggctggaaagctggaagtggctcagacacaggcaccggcagcaacagggggtgaagcagcagctaaagtcaaagagttccttgtttctgggtcaaacgtggaggcagctatgtccctacagctcccagaggcagatgcagaagtgacagcttctgagagcaaatcatccacagatattctaaggtgtgatcttgacagcacaggcttgaagctgcacctttccactgctgggatgactggggatgagctttccacttctgaggtcaggatccatccatccaaaggacctctcccttttcagatgcctggcatgaggcttccagaaacccaggttcttccaggagaaatagatgagactcctctttccaagccaggacatgaccttgccagcatggaggataaaacagagaaatggtcttcccagcctgaaggtccacttaaattgaaagcttcaagtactgatatgccatcccagatttctgtggttaatgtggatcaactgtgggaagattctgtcctaactgtcaaattccccaaattaatggtaccaaggttctccttcgctgcccccagctcagaggatgatgtgttcatccccactgtgagggaagtgcagtgtccagaggccaatattgatacagccctttgtaaggaaagtccggggctctggggagccagcatcctgaaggcaggtgctggggtccctggggagcagcctgtggaccttaacctgcctttggaagctcccccaatttcaaaggtcagagtgcatattcagggtgctcaggttgaaagtcaagaggtcactatacacagcatagtgacaccagagtttgtagatctctcagtacccaggactttttccactcagattgtgcgggaatcagagatccccacgtcagagattcaaacaccttcgtacggattttccttattaaaagtgaaaatcccagagccccacacgcaggctagagtgtacacaacaatgactcaacactctaggactcaggagggcacagaagaggctcccatacaagccaccccaggagtagactccatttctggagatctccagcctgacactggagaaccatttgagatgatctcttccagcgtcaatgtactgggacagcaaacactcacatttgaagttccttctggccaccagcttgcagacagctgttcagatgaggagccagcagaaattcttgagtttccccctgatgatagccaagaggcaaccacaccactggcagatgaaggcagggctccaaaagacaaaccagaaagtaaaaaatctggtctgctctggttttggcttccaaacattgggttttcctcttctgttgatgagacaggtgttgattccaaaaatgacgtccagagatctgctcccattcaaacacagcctgaggcacgaccagaggcagaactgcctaaaaaacaggagaaggcaggctggttccgatttcccaaattagggttctcctcatctcctaccaagaaaagcaaaagcaccgaagatggggcggagctggaagaacaaaaacttcaagaagaaacaatcacgttttttgatgcccgagaaagtttctcccctgaagagaaggaagagggtgaactgatcgggcctgtgggcactgggctggactccagagtgatggtgacatccgcggcaagaacagagttaatcctgcccgagcaggacagaaaagctgacgatgaaagcaaagggtcaggcctgggaccaaatgaaggctgagaggtatggctcatcggtacaagagagatgcaaaaaactaagttggaaagtaaaggctacacacacatatggagcaccccatcccacagcacattacatccacctcacttcacagaacggagaacagagcagaaatgaccagaacacctttgtcaccatcacacagccctcctaaaatggaaccaaagcttcccagctccctcaaagctttggatgcaaagaaggcaccctgacttccacaagacaccagaattcacacggtactcagaggcactgctggggaagtttgttggtctttattagataaatttccagagacctgtccataatacccaacagaacatgactgtttctttgaggaaagggttataatgtctgtggtgtacaagtcgtttttggtataacttctttcctgctgctgctgcttcccggcaaacatagttttcctatttcaggcagagtgcggtatattccaggaaacactgtttcctactcacttagcttacttctttgttgaatgcctcactaatggcaagtttcaagatgttttgggtgacaatgcacacatgctgggcaaaagggtgatggccagtggctggcagctgggccagcagaagctaggacatctgtgagttgtcattctcatctatccatgtccactggcctgccagcatccgccagtgccttgccagtgtgcacggtcccacactgtggcccctgagtcccctaatgtacacgctgcagccagaatgcagatggagctggcttggctgttccctggatgggcaataaagaaagtgctgcatccc

SEQ ID NO: 2138 - DNA, 4382 bp, Homo sapiens
actttcccggagtgcaccccgcggccgccagccggggcgatggcggggctctggctggggctcgtgtggcagaagctgctgctgtggggcgcggcgagtgccctttccctggccggcgccagtctggtcctgagcctgctgcagagggtggcgagctacgcgctgctgatgaagccggacgggcgagaattttttcagcagatcattgagtacacagaggaataccgccacatgccgctgctgaagctctgggtcgggccagtgcccatggtggccctttataatgcagaaaatgtggaggtaattttaactagttcaaagcaaattgacaaatcctctatgtacaagtttttagaaccatggcttggcctaggacttcttacaagtactggaaacaaatggcgctccaggagaaagatgttaacacccactttccattttaccattctggaagatttcttagatatcatgaatgaacaagcaaatatattggttaagaaacttgaaaaacacattaaccaagaagcatttaactgctttttttacatcactctttgtgccttagatatcatctgtgaaacagctatggggaagaatattggtgctcaaagtaatgatgattccgagtatgtccgtgcagtttatagaatgagtgagatgatatttcgaagaataaagatgccctggctttggcttgatctctggtaccttatgtttaaagaaggatgggaacacaaaaagagccttaagatcctacatacttttaccaacagtgtcatcgcggaacgggccaatgaaatgaacgccaatgaagactgtagaggtgatggcaggggctctgccccctccaaaaataaacgcagggcctttcttgacttgcttttaagtgtgactgatgacgaagggaacaggctaagtcatgaagatattcgagaagaagttgacaccttcatgtttgaggggcacgatacaactgcagctgcaataaactggtccttatacctgttgggttctaacccagaagtccagaaaaaagtggatcatgaattggatgacgtgtttgggaagtctgaccgtcccgctacagtagaagacctgaagaaacttcggtatctggaatgtgttattaaggagacccttcgcctttttccttctgttcctttatttgcccgtagtgttagtgaagattgtgaagtggcaggttacagagttctaaaaggcactgaagccgtcatcattccctatgcattgcacagagatccgagatacttccccaaccccgaggagttccagcctgagcggttcttccccgagaatgcacaagggcgccatccatatgcctacgtgcccttctctgctggccccaggaactgtataggtcaaaagtttgctgtgatggaagaaaagaccattctttcgtgcatcctgaggcacttttggatagaatccaaccagaaaagagaagagcttggtctagaaggacagttgattcttcgtccaagtaatggcatctggatcaagttgaagaggagaaatgcagatgaacgctaactatattattgggttgtgcctttatcatgagaaaggtctttattttaagagatccttgtcatttacaatttacagatcatgagttcaatatgcttgaatcccctagacctaatttttccttgatcccactgatcttgacatcaagtctaacaaagaaaaagttttgagttttgtattttcttttttcttttttctttatttttttttttttgaaaccgtgtctcactctgtcgcccaggctggaggagtgcagtggtgtgatctcagctcactgcaacctccacctcccaggttcaagcaattcttctgcctcagcctcccaagtagctgggattacaggtgcctgccaccatgcctggctaatgtctttgtatttttagtagaaacagggtgtcaccatgttggccagactggtctcaaactcctgacctcaagtgatccacctgcctcagcctcccaaagtgctgggattatagtcgtgagccaccacgcctggccagagttttttatttttatcaccaccatagatgttacagttggctgtggtcacaaaagtagttaattgtgtcagcacccaaataaacatctaacaggtttctcaacagaggaatccacagtccaattccacttcaattgatagacccaaaaaatataatttaatcaaagttctagagtttttgtttgtttgtttgagatggagtcttgctctgtcgcccaggctggaatgcagtggtgacatcttggctcactgcaacctccacctcccaggttcaagtgattctcctgcctcagcctcctgagtagctgggactacaggcgcctgccaccacgcccagctaatttttgtatttttagtagagatggggtttcaccatgttggccaggatggtcttgatctcttgacctcgtgatctgcctgcctcggcctcccaaagtgctggcattacaggcatgagccaccatgcctggcccaaagttctagaattttttaaaggtattcatggtgactcaggaatacacacatacacacacacacacacacacacacacacacacacacacacacatacacacacacatataatttgaaagaggtgagtatgtactctgacttcagctctcaggttttaaaaattatattagtgggaccagttatgacaagaataatcattatagtacttttcagattttataacctggagcagattattttaagttgattagtaggttctgttacagtttttcttttgatcgtgcacttatagtcttcatttaattcctcatagaatcccagtcacctttatatatcatattattggaagagattcatcttcataatctccagttttttcacagtgcctcacagagttaatcatgccttttggagctagaaggactttagaacttatctagttatgctcctttatattataagtaagggaatagaatcaataagacagtttctgcccaaagtcatgttaccagttggtgacagagctggaaatacgtagagatctatacccttaaatctctccactcacatgctgatatactttctactacaatatgctatagctttatggaactcagggtgatgatcagacgtgtcattagaacatgagtcctctgcttctgattcaggcatacttttgggattcttccatctttaaaggaaaaaggaagccattcatctatatttagtaacccagtaatatctcacttagtttagggttagatctttagttaattcaaccttatagatcatacttatgaaggtgataactgacacgtgttccctgaattttaatttgataggcaatacatctacccactccattattttttaaaacttcatttaatagtttaaacaagattggttttgttttcaatttttattcactcttcatagaatcacaattacctttatatatcatatgttattggaagagattcctcagtaatctccaatctctcatagtgcctcacagggttggtcaatggcttttggaactggaaggaccttagaacttatctgttatgctcctgatagccaatagcagatagaagcttgcaatcaagagggtaggacatgtgttcttcaatggatatcaaaggaagaggttgcaaaccaaagccatttggcaagccctgtagcctgggccatttaagacaggggcggtctcagccaaattgcacccatttaactatcccaaagagccacagtgcctacaacccaggccctaagttgatgaagaaaaagtcaaggaaggaggtgatacaattggaaatattcccatcaaatggttaatcttatttagaaaatgggcatattagaaaaagtccttccaagatgattttggataataaaagttgtatttgtggaaattggtattatctctgttttatgcacttacatttatcccttacattttgtttttagtgaccctacatgacattaaatttaaagtaaaacattgtttaatgttaccttttggcttgagaatgtctttcagctccagaattattgttactcatattttaatcagtaagtcatttaagctatgacagagtaggaattgagaaattatttcatatgctacagtattgaaatgtggatgctgccttgttttataagaagatgatcaaggtttgtgtgcccattacctttcctctgcctgaaagacgtgtctcaagaaaaataaattctattttagatgcaggtactgcattttattctaagaattgatatcaattcaaaacatagaaaactgtaaaagataaatcaggagatggctgattcataatgggtaataaaataaatagcactttcg

SEQ ID NO: 2139 - DNA, 3505 bp, Homo sapiens
agcaggaggtttgctcctcagcccactcgctgcatccagatcagctcacccctcacccttccctgcccaccaggactctgatagcccctggcagccacagcccattttgccaagatgtctagagtagccaaatatcgccggcaggtgagtgaagaccccgacatcgacagcctgctggagaccctgtctcccgaggagatggaggagctggagaaggagctggacgtggtggacccagacgggagtgttcccgtggggctgcggcagagaaaccagacggagaaacagtccacgggtgtgtacaaccgggaggccatgctcaacttctgtgaaaaggagaccaagaaggaagaggagaagaaagggagtgacaggaacacaggcttgagcagggacaaggataaaaagagagaggagatgaaggaggtggccaagaaagaggatgatgagaaggtaaaaggggagcgtaggaacacagacaccagaaaagagggtgagaagatgaaaagagcaggtgggaacacagacatgaaaaaggaggatgagaaggtaaaaagaggaactgggaacacagacaccaaaaaggacgatgaaaaagtcaagaagaatgaacccttacatgaaaaggaagccaaggatgacagcaagaccaaaacacccgagagacagatgcccagtggccccaccaagccctctgaaggaccggccaaggtggaggaggaggcagctcccagcatatttgatgagcctctggagagagtgaagaacaatgaccccgagatgactgaggtgaacgtcaacaactcagactgcatcacaaatgagatcttggtccggtttactgaggctctggagttcaacactgtggttaagctgttcgccttggccaacacgcgagccgatgaccacgtggcctttgccattgccatcatgctcaaggccaacaagaccatcaccagcctcaacctggactccaaccacatcacaggcaaaggcatcctggccatcttccgggccctcctccagaacaacacgctgaccgagctccgcttccacaaccagcgacacatctgtggaggcaagacggagatggagatcgccaagctgctgaaggagaatactaccctgctcaagctgggctaccattttgagctggccgggccccgaatgactgtcaccaatctgctcagccgcaacatggacaagcagagacaaaagcggctgcaggagcaaaggcaggcacaggaagccaagggagagaagaaggatctgctggaggtacccaaggccggggccgtggctaagggctccccaaaaccttcacctcaaccatctccaaagccctctccaaagaactcacccaaaaaagggggtgctccagctgccccaccaccccctccccctcccttggctccaccccttatcatggagaacctgaagaattcactctcaccagctacccagaggaagatgggagacaaagtcctccctgcccaggagaagaactcccgtgaccagctattggctgccatccgctccagcaacctcaagcagctcaagaaggtggaagtgcccaaactgcttcagtaggaccaggctgccaggcaccatctgccaatgccatgactgctcaggcctcacctcccagggctacacagaccctgcccaccccatccctggctgacctgctgtggatgtccctattctgccatgggagagtccaggcctgggtcacgctcaaggaaggatgccttatctcttctcactttccttttcttgtctctgaggctctccaaattttgctttagtacatggagctcaggtttctggacaagaagagtccttttagcacatcactgagaagatggcactgtccagggcccatgtagctggcaagctgcaaaaggcctgtgatccaggaaagatgtcccacagggaccacatccaccccagccccactgccctccagggccaggattcaggcctctgaggagcccacggggcaaagctgctgggccagtggcactctgtgtgggaaaatggcagaaagatggagaggcatgggggcccaaaggggagcgtggggaggggcttaggataccccaaagtccaggctaattagaggatgtggcaggggcagtggcctggatgcacagtgcctgatgggagtaggctccagacaggaggagtgggacagacagcagctggacttgaaggtttgatgccaaagcagacattttcctcacacccacctgctgctgtatgaatagctgtgtatctgtttttccataagattttgataatatatacaaacctttagctgtgaatggctgtgccccacctgttgtcctgaactgtgagtcctgatcctaaccctgggctccctggaggactctagaagctcaggttccctgccacactatttgagttggccaagaaataaattcacatcctcagaaagtgcagcatggaggaaaatctgaactctaagcagaagactctccactgacctggttgtccaggtctagaaggccaggcctctactaggtctgctcctgaaccagtcctgctgcctggagtcagtagccagagttgttctcaggggtgctggggcagagtggagcccagggtgctgggatggctatattaggcatgttcagggatgctcattccatgactctgcctaaccatgggctcagggccaggtcctcacagcagtcacaggcccaggaaggcggcaggcagagaagtggagtgactatttggagaatagcacccatatctgtgtgccctagggctcagaggggcctcatcttccccagccctccccacctgctcaccaattccacttcctgccccaactgcaggaatgctgacaatgctgccatgcccaccatcgggtgtaggtgaaaggcatctttctgaatttcattctcttgaaggtgctgccaccccttggcactgtggaactgccaccttgggtctgtgtcacttgtaggtttctctgcctccaggttgcctcaacagcaggaggcacagcagtttcaccatctttgaggtgagggtggggtgccccagctaggaagcaagatcgctgtgctaggtctgaccaaaaccagagggcagtctagtcctgggggtaaagccctcagatcccagggtacactcttctccattccctccacccacttgcctgtcaccccagtcacctaagcaatcactgggcccagaggagaggagacagacacacactggctcctggacctaaagggtatgagctggagctaaggccagctagagcttccactgtcagccctcactgtcagtcccactgcacccccctgtgcctgctgggcactgggcactagctagatgctttaggttgcttcagctgatccttcaactctgtgaggtggataccaatattctattttgcagatagaatttggcccagagaggttaactaatatatccatgatcacacagctaataaaagtcagagctc

SEQ ID NO: 2140 - DNA, 3507 bp, Homo sapiens
actcacctggcggctgccacgcgcccccgcccaggatccgaggcctggggcatctgaatgaggaccctccacccacatttccacttgggagcgagctccagtcggggaaagggcctgcagcccgcctcgtccccaccctgggaccccgcgccccccagtcccccactcccgcgccgaaggcagggccgcgccctgagccgggaagtcgaggggatggaagggaaaggagccaccggtgagggtcccccgggttctgagcctcccgcgtcgggatccgtggggcgcacagagcgccacctccggccgaggcgcagctcagagcgcgatgcgggggaggaacgcgcgcggaggccgaggtctgagcgtggctagacggctcccacgccgagaaagggcgggtgcgcctgggctggatggatttcgcctccctagaccaggagggattggaccctgactacaggtccaggtgctcgtcagtgccctgccagggggtctacgcgtcctggtaccgggtccagcggggtggcgtgctgtgcagaccccgaggctagacggcctaggcccctggagcccaggagacgcttccttgggtgagcagcggagaatcccgcccggcccagccgtcacccccaaccctgtcgattaaacccctgcccccgtcgcggtcgccctccctccagacaaaggccgttaaggcgcagccccgcgggcggtctttcatccccagctaggccagctctagcatttcaaaggccgaatccggagagcgcttcgggggctctccccttcccccaaatatttggggagcgacgcctctccctccgctcccagtgggtcgcgtctacacgcgcccttccacacacctgcaggcccccctccccacgtctctcccttccgttggccgcagccccacaccacgacccccgcggtcaagcatgccctctgggtggtcaggaccaagcgggaccgggacagaaccaggggagccttggaaacgtggaggagccccttaaagccaggccttgtccctccagggggaactttcggcttgggaggggacacccactgcatggcttctggaaagagccggactcgcagggccaggacgcaggccggaccccggcctcattcttcggccagttatcccggagtggcgcgcatcctgtcttcctgggcctcggactgctcgcgcgcagagggggcccgaggacacctctgtggggttagaggactcggtaagacggtgtggaaggcaaggaggaaggtcgcgttgtattggggatggggtacccgtccctcccagcttgagggatcctgggggtcctcgccgcctctgagggcctagatggctgcttccctcggctcccctgcccggcctggagctacgggtgcgcccagctagagtttagggccacctggggacgtgcaaggggcgctggagcgaggcgggggctggggcggggcgtgggtgcttcacccgcgggggacgcagagcttaggcgaaagcggtgcaggcatctctctaatcgccggccgctattaaaaataaaaccgcgacccgtcgccatggcgaccacaacaacagcggccgcgcgagggaggcgaaaacttgtgcagccgcgcgacagccgccttctggggagactcggggcacgacgcacccggcgtgggactgggacccccctgcccggccccgccacattctccgccggatccccggaagacacaaggagacgtggacccccacaggcttttttggggggattgggcgttgaaaccgcagggctgacttaaccaagaggtcaccgacttggataaaaaacccacgcccgcgcggacccccctccccggccttcgtttccattcaaactcccagcgtcctcattgcagcccctggggagggggacggagggacgaggtgggtttcaggtgctcggcccaggaggggacggtgcgacccgggccccgccggcgggttttgcgcgcggaggctgcggcacctgccccgcccgccctgccgcgatccttgcagacgggggcggtcacatgcttctttctggccaggaatcgagtttcacttccagccgctattagtcggttcacacagttcactgcaaacatttgataatgaggctaaatatactcccgcgtcggaggaggcgtgggcgtccccgcccaggcccgggagacagaggcgcggaccccgggacagagcctggctttgtgcgggaggcagacgcgccccgcgcgccgcccccgaaacattcgcaccccatgctgaggcgcgcgtctgggagtccgtgggcgccccgaggtgagcccggggcccctggcggaagcagcggggagctcccggcgggtgcggggaggtgctggtgggaagcaaggtgcacctggcggcctgggatgtccggtcgcccccggagccggtgcatccggcctctcccggcgcgccccgacgtgcccgcgggctcataattaccgtgagtcaggtgccccaaataggccgagcgaggggggccgtcgcgcagcaggggcgggtggccggacgtctgcccgggactggttgcctcccgcccctccccaagaccctggcacccagggagggcgggaaaggccttggccattcctctgggtaggggactggagaggggaagaaactttcgccgagtccagcgctgccccctcatacccatccccacccaggctgcgtgtccggggcccctccggggcttggcaccagcaggcacgcagcgatcgccgtcgttgttatttagtagtagtagtaacggctgacatttacagcgacgtcgatggcgccaggtgccaagctctttccttgtataatttcatggacactcacgcatcaactctaagcgaagacttggagcggggctcagcaccccaggggtacctctgcaagctcgaaatgaagttgaaaatagcacaggagcccactatcactgtgtgaacattttgtgaatgaagacatgtatgaaaggatgtttggaggcttcaagaaacgaaagccgagagtctagctagaccagagccatccagcccaggagcgatggccacgtgtggccgctggacacgagagaagtggccagtccaaactgtgcagtgcggggcagtggaagccgttggagggcctcaggcaggaacacaaggtgtcgtggcagaaaggaagaaggggccgggcacggtggcccacacccgtcatcccagcactttgggagggaggccaaggcaggaggatcgcttcaatccaggagttcaagatcagcctgggcaacacagcaagaccccgtctctactaaaaccctaaaacttagccaggcttggtggcatgtgcctaaggtcccaggtcctcgggagactaaggcaggaggattgcttaagcccaagagtttgaggctgcagtgaactattatcacaccactgcactcagcctgggtgacagagtgactctgtctcaaaactaaataaataaacaataattgtgtt

SEQ ID NO: 2141 - DNA, 4002 bp, Homo sapiens
aagaggagctggtgagaagacagcgaaatggcgcctccggcccccggcccggcctccggcggctccggggaggtagacgagctgttcgacgtaaagaacgccttctacatcggcagctaccagcagtgcataaacgaggcgcagcgggtgaagctgtcaagcccagagagagacgtggagagggacgtcttcctgtatagagcgtacctggcgcagaggaagttcggtgtggtcctggatgagatcaagccctcctcggcccctgagctccaggccgtgcgcatgtttgctgactacctcgcccacgagagtcggagcacagccatgacagtgcagatcctgctgaagctggaccgcctggacctcgcccggaaggagctgaagagaatgcaggacctggacgaggatgccaccctcacccagctcgccactgcctgggtcagcctggccacgggtggtgagaagctgcaggatgcctactacatcttccaggagatggctgacaagtgctcgcccaccctgctgctgctcaatgggcaggcggcctgccacatggcccagggccgctgggaggccgctgagggcctgctgcaggaggcgctagacaaggatagtggctacccggagacgctggtcaacctcatcgtcctgtcccagcacctgggcaagccccctgaggtgacaaaccgatacctgtcccagctgaaggatgcccacaggtcccatcccttcatcaaggagtaccaggccaaggagaacgactttgacaggctggtgctacagtacgctcccagcgcctgaggctggcccagagctgtcaggaccatgaagccaggacagaggccaggagccagccctgcagccctccccacccggcatccacctgcatcccctctggttgggagcaggggagtgggcttgtttacccagcagctgctgtgccctggctctctggcaggtactatgcagacatcagacagactgtcccagccagcgaccaagagatgaactctgtcctggctgaactgtcctgggtaaggcctccctctgcttcttgggttgggcataggcctcctgccacaacggtccttcccccttcacactgcccctttgcagggaagcccttgggaacctcagcagccctgtgagctggttggggcaggaaacataaatgcagaatgttccaactgccactgaaagaccagggctcccaccatctcatcacagagcaagcaggggtcttgtcctggcagctgccatgtaccctgattcagccaggctcttgcaaggtagctgggattcagccccaggcctgcctgggtctgcctgcatgcgtcttcccactgctgtgcttcccttggtggcacaggtgtccccttcacctctcccattcctgaaaccgccctaaaatgtaactccagggagtttatgaacaatgtttctgaaatgttgatgatgacaaccacaacactaatagcagatataattttggggtgttgtgtgtgaagcccttcatggggtgctttgattgtcttatttgatcctcacaagaactccacaagctaggtgacaccaattccatcgtccaggtgaggaagttgaggctcagagatgtccccatggaggggcctgagagtgacctcaggaaatacttgagttaggccagagcagaatcatgctgggctgtcagcctgcaagtggcatctgtgccacttggctctggagtcatctgggtggcagagggtctgggctagaacctcaagggggtgagagaggcagggcttcagtggaaaccccagaccttgctgaagcaggtagacctgggctgtcttcctaccaaggaggcccccttgctctaccctgttctgtccccatctggcacacctggcctggggtccctgggccatggaggggactctgcttcccactgtagtgcccatcccattctctacctctcaggtccccttctcccccagcccttccctggggtcctgggctgcctcctgtggctctctgcacccctcgtctctctcacctttcatttggcctcttccctagaactactccggagacctcggggcgcgagtggccctgcatgaactctacaagtacatcaacaagtactatgaccaggtgggcaggccctggaccccgactgggaggctgacccaaggcctcccaggagacttaaggggctctgaccctgtgactcacgttgggggctttggtcttccccagggacagagtagtggggggccgggccccttggtggcttgagaagtgttttccaggcgggcttcctggcattggctgtgctctcacctgtcccactgctccccattccagctccccagcaggacggcgaggcacagtgctggtggttgtgggggccaaggggtctaccagggcctggagatggtgtgcatttgctgagttggcagcatgttgggcacggccaacatgcaagtgcaggcctggcttggctgcatgagctgcgaagaggagagtccaggcacagggccaggggtgtgagggtacactggagctggtgaagctttttggaggatccctgggctgtgcctgaagagctgagcacctgccagtcaacctgctggatgcctggtggaatagtccacttagatgtttgtgtggcaccagtgacatggctattgctgctcagagatgaggaacctgtctcatggcccacagccttcctcggcatggtgtgggccatggcacggggcttgggggaggcagggtgtgatgcaggcatgtccccttgtggagacatagtgggcagtagctgttttcccaagtgctgctgccctccggttcctaccggttcccttggtggcagccccaaattcgtggttcgtgtttgatcagtgtctgttttcccaccacgtgtctggtcattcttgggtctctgccccttgtctggcaccgggcagacaggaacttgggaaatactgttggctggcgggtgggttagccaggatggctgcagcagggcttctgaggagctcgctactgagtcaggtccttcatttcctaccttattcatcctggaaccccgcggtgactttgatgttattacccctcccgccagcgaggccctgaggtcccagaaagtacgtgaagtgaccggctgggtttcttggcctcctaccccactcatgccacagcgtcttaggagggctgttgaattttgcagcaaacacgttggccaaagaagtctcccctgatggcattggtctctgtttcagatcatcactgccctggaggaggatggcacggcccagaagatgcagctgggctatcggctccagcagattgcagctgctgtggaaaacaaggtcacagatctataggaacccaggagccacggcctgctgttgcttcagcctggcctgggcagccctggaagctcggaggagaggccaccttcttaggtgcctgtagtgactgacaagcagagttagtggaaggtgactcccagtctcctggtggctctggcctcggccctgctggatccacctcctagacccggggcctcaaggctcatggggtagtacccagcctgctccccgagtccagcgaccctgtgacaccggtctgcagggagttggggactaagggcttccagagagtggctggaagagactccaggcccctggggagactgtactgttcctgaacactggccttggccacactgggattcggagaggaaggaggagagccccatgcttcctgtctgcctcctccaccatccctgacctcagttgagctgcctctggccttgttgctgctgccacatcctaggtctaagagttgaacgcctctcctaggccactacaaactgacccctcagcagggctggctgccacagggctgccctgcctcataggtagccatggtgagggctatctgctgcaggggggtcttggggagagtggtgactccattgacccagcttttcattaaaggataacacactgc

SEQ ID NO: 2142 - DNA, 4313 bp, Homo sapiens
ggtaaagaagttgtcttatatacatagaaatggtataataagctactttaaacaaccctggatatgtttcttttcccttcctgtcactgtcctctttcttcccttttcccttttgattaagaagttccatcagaaaagtcataaaatctaactcctgtttattctcgagctatcagctaaaatgtcactttctcaggaaatcctgcctgacccccctttcccctttgttctggcacccattcccctggcctttaaatgctttcatagcagtgtgtacctatctatcattttttacagtttgtaattacggcttttttttttttttttttttgagatggagtctcgctttgtcgcccaggctggagtgcgtggtgcgatcttggcttactgcaacctctgcctcccgggttcaagcaattttcctgcctcggcccccccaagtagctgggactacaggtgcgcaccaccacgcctggctaatttttgtatttttggtggaggcggagtttcatcatgttggccaggctggtctcaaactcctgacctcaggtgacccacctgccttggcctcccaaagtgctgggattacaggcgtgagccaccgtgcccggcttcctgtaattatgtattaaaatgtataattacttgattaatagctatcttcccaactagaccaaaaactccatagaatgtatggaattttcctccatcatccttgtagtccaagcataatatttattaaatgagtaaatgagtgaattaactagccattttgattaattttctctttttagtgcagttttggtttaggactgtaaggagtcatactggccatattcagaatgtcacattagtgttttaagtccattctgtatttttttcaatgagtttcagcaaaatctgagagtgtcttaagtgaaattggttatatctagggtggaggtattatatttggaaagacttgtaacagtagaaagctttttatttaaatctttgagttttaaaatatttttattatgaagttatttatgattttataggtaatatttttaatgagaccttgaaaaatttatagagtgcagtttattacagaatctgagttgcctaatagtttttaatagtttttgagtatcagtattttgattaattttaagttagggatcatttcctctaattctttgaacataattatttgttggttgatttttttttttaatgtaacagtgtttttgagatgtaatttatgtaccatacggttcttctactttagggtattagattcatggattttttgtacattcacagatgtgaccgtcattgcagtcaattttagaacattttcataatctcaaaaggaaaactgtagcctttggctattatccacttattcttccatccctgagcaaccactaaactacttttggtgtgtatagatttgcctatttaagacattttctataaatggaatcatataatttatggccttttgtgattggcttccatttaggatgttgttttcaaagtttatattgtatcatgtatcagtactacatccttcttattgctggtaagtattctgttgtatcgatataccacattatgtttagccgtttattagtacagtggtccccaacctttttggcaccaaggactgactttgtgcaaggcagtttttccatggatggggtgtgatgggggaggatggtttcagaatgaaattgttccatttcagatcatcaggcattagattcttataaggaacaaaaccaaaacagcaacaacaacagtgattctcataaggagcacccaacctagatcccttgcatgtgcagttcatagtaggttggtgctcctatgagagtctaatgcctatgctgatctgacaggaggcagagctcaggcagtaatgcttgctaacccaccgccactcacctcctgctgtgcatctcagttccttacaggaaccagtactggtctgtggcctgggggtttgggatccctgcattagttgatagacatttggattatatccacttattggctattatgaataatgctgctataataaacattcatacaagttttttgtggacatggtttcatttcttgggtatatgtccagcagtggaatttctgggtcatttgctaactatgatttcgttattggagaaactgccagattttttgttgattttttttttttttctgttattatgtagtgtcaagaaaccgtttaatgcatatgaattgaagccctgtaaggaaagtgatcatttgggattagatcgcaaattgcttgacttcaaatgtattactttgagaattttctgtgacagtttagctagtcctttatcttccttatttttcttgagaatacatgaattagctccctgccttcatatttgaagatacatacctatcagtgtacagacatgtacacacataggtacacatataatactttgctaagcagtttgtgctggggacaatagttgaaactcggtgttttttcctaaaatttatatcgtttgtttatatatgaaatatcaaatgggagatatttttggaagcagtgaaacttgtttatgaattctttccttacacaaaagaagacaggttttttaaaaacaaattaatctttttctctttgtttctttcagcattgatgactgggaagtgagagacatagatttttgaaaagctgaaaataacttctagtttaacaaaatagtttcttccagagcttagaatttcagatgattggaaaattcatacatctaggtctgaaagtttaagtctttcgcatctatggagatctctattttctacaacctaaaatgctatgatgggtgacaggttaaagacaaacctttttaaaaaatgtatatttttattgctatatagtggtattatggcttttgaaattcctatttttaccataaacagattattaggtgcttactgattccagataatagcctaatctattagaaggtagaagagagaatctctggtgatacactgtccatacatggttcaataggaggtagcaaaggctaagtatgagtaagtgacaaaagcagtaaatgctgcagaactgaaattcagagaattgcgcttccactgttgggtaaggcttaaggggagactttgaaagaggaagatgagctatgccttcctttgggtactgatttaatttcttttgccatttttttgcatttcttgaatgtaggaatttatccttacccatgtgcatattcatcagctccaatttaggagattgactagtgtagcacgtcataaccagaaagatacttggaggtagacttttccctaaagtttatacaagacacttaatgggctgggtccttgatcatgtacttctttcttagactttgtgtatatgaagtggtgttcttatccttatttctttccacattcaccctttttaatgcttttagtaagtcttttcagtttttgttaagatttattttatagttacactattgtatttattgaaggtagcttggctgatactgttccaaagtcacttgccactttcctctctgcataattaacatttattctcctcattatttgtcaatgaattcccttctgtttatttatagtttctttatgattctgcatatcagaagataacaagcacttatcacaaatgcatttaggggatgtactactctgtaaaaaatttaaatatattgaaaatagaactctttgaattttattttactcttttgaggaaatgaagatatcttgattttttttatggtattctaacctgcttttccggggcatacagggcagcacttatttttatataaatctgagaatgtgtgaattgcaaattaatcttctggcagatatctaatgctgttgatagagatgtgttgccctaagatttattggatttaatgagacagtcttttgatatatccttgaattatgatgggatattgggttgccacatgtaagttttagaatattttttaatgatatagagaaaatgcttcagatacaatggcatgtaaaagagaaaacagcaaaaaaaccctgattttaaaacggtttgattcaatttatattttaaaaacacagacacatgatttgtatgcctgtgtatatagaaaagattgcaaggatatttaccaaaatattaagtgattatctctgggttgtagtaattggggtgatttttattttttaagtgccttttctttgggtattgcctgaaatgttaaatattatctcattttagcaaataataaatactacttttaactaagaaaaaatag

SEQ ID NO: 2143 - DNA, 3614 bp, Homo sapiens
gtgaccacccactatggcttcctagtgtcagggccagctgtgtagtggctcggtgtgatttgttagctctttgaggcagggtaccctcctcaggatttcgatatgcaaaaaatcaaatctctcatgacccgacagggtctgaaaagccctcaagaaagcctcagtgatcttggtgccatagagagtctccgggtccctggaaagttagagccctaacgtgatgttaactttggaagaattcagggaacttcgagaacagccaagtgaccctcaagctgaacaagagcttattaatagtattgaacaagtatatttttctgtggattcatttgatattgttaaatatgagctggagaagcttccacctgttctcaatttgcaagaattagaggcgtatagagacaaattgaaacaacatcaagctgcagtatctaaaaaagtggcagatttaatccttgaaaaacagcctgcttatgtaaaggaacttgaaagagttacctcattgcagacaggtcttcaattagctgctgttatctgtacaaatgggagaagacacttgaatattgcaaaggaaggttttactcaagctagtttaggccttcttgcaaatcaaaggaaacgtcagttgctgattggacttctgaaatctctgagaactataaaaacattgcaaagaacagatgtacggttaagtgaaatgctggaggaggaagattatccaggagctattcagttgtgccttgaatgtcaaaaagctgccagcacttttaaacattacagttgtataagtgaactgaattcaaagctgcaagatactttggaacagattgaggaacagctggacgtagctctttccaaaatctgcaagaattttgacattaaccattataccaaggttcaacaagcttatcgacttcttggaaaaacacagacagcaatggatcaacttcatatgcacttcacccaagccattcacaacaccgtgtttcaagttgttcttggttatgtggaactatgtgcaggaaacacagacacaaaattccaaaagctgcaatataaggatctctgtacacatgttacaccagacagctatattccatgccttgcagacctgtgcaaagcactatgggaagttatgctcagctattataggactatggaatggcatgaaaagcatgacaatgaggatactgcttcagcttctgaagggagtaatatgataggtactgaagaaactaattttgatcgtggctacataaaaaagaaattagaacatggacttacacgaatatggcaggatgttcagctaaaagtaaaaacctacttgcttggaactgatttgtctatattcaaatatgatgatttcatctttgttttggatataatcagcaggttgatgcaagttggagaagaattttgtggtagcaagtctgaagttttacaggaatctattagaaaacaaagtgtcaattatttcaagaattaccatagaacacggctcgatgaactgagaatgttcttagagaatgagacttgggaactttgtcctgttaagtcaaatttcagcatcttgcaacttcatgaatttaaattcatggaacagtctcgctccccatcagtttcacctagtaaacagccagtctcaacttcttcaaaaacagtgaccttgtttgagcagtactgtagtggtgggaatccatttgaaattcaggccaaccacaaagatgaagaaacagaagatgtcttagcttctaatgggtatgaatctgatgaacaagaaaagagtgcctatcaagagtatgacagtgacagtgatgttcctgaggaactcaaacgagactatgtggatgagcagacaggagatggtcctgtgaaaagtgtttctcgggaaactctaaaaagcaggaagaaatcagattacagtctaaataaagtgaatgcacctatcttaacaaatacaacattgaacgtcataagacttgttggaaaatatatgcagatgatgaacattcttaagccaattgcctttgatgttattcatttcatgtctcaactatttgattattacttgtatgcaatatataccttttttggtcggaatgattcattggaatcaactggactcggccttagtagtagtagactaagaacaactctaaacagaatacaagaaagccttattgatctagaagtttcagctgatcctactgccacactcacagcagcagaagaaagaaaggagaaggtgccaagtccacacctcagtcacctagtggttttgacatctggggatacgctgtatgggttggcagaaagagtggtagccacggaatccttggtattcttggctgaacagtttgagttccttcagccacatctggatgctgtgatgcctgcagtcaaaaagccctttcttcagcagttctattctcagacagtctcaaccgccagtgaactacggaaaccaatttactggattgtagctggtaaagcccttgattatgaacagatgctgcttctcatggctaatgtgaaatgggatgtaaaagaaattatgtcacagcacaacatatatgtagatgcactattaaaggaatttgagcagtttaacaggaggctaaatgaagtttctaagagagttcgcatacccttgcctgtgtctaatatactttgggaacattgtatacgattggctaatcgaactattgtagaaggatatgccaatgtcaagaaatgcagtaatgagggtcgtgccctgatgcaattggattttcaacagtttttaatgaaacttgaaaaactaacagatattagacccattcctgataaagaatttgtagaaacttatattaaagcttattacctaactgagaatgacatggaacggtggatcaaagagcacagggaatattcaacgaagcagctgaccaatctggtgaatgtttgcctgggatcccatatcaataagaaagcaagacaaaaacttctagcagctatagatgatatagacagacctaaaagataatgaacacagctctctttcctcaatggcattgatcctcactcaacatatatgacctgaaagccagtttttttatgcacttctgacaactatctgctaagaaaactttgtgcatgtttttttgactggaaagtggaaaatattgaaatgtgtgtggtgttctcatgacttttatatgctgtggtctcttcaacttttggtctcatttgttgtaatctgaaatgatgttgccgccttgtcataacaatggttatgtgactacagttatacattttacagaagaatgtaccataagtatataattagaagaacagtggcttaatatatgtatgggaagtttatggaaaatgaagttggcacttttctaccctctgagcttggttcttaataagcataatgtgagggtgaatatgtagtatctcctaattatgagcactgcatgagaattaaaaaacacatgtaagtaaaatggttgaaaaatcagtatgttctctgtttttaaaatgtcaaagtttatgtcagggttaatttagttataacaaagtgatcataatggtgaaatttaataaatatactctagtatgatcagcct

SEQ ID NO: 2144 - DNA, 4469 bp, Homo sapiens
tccttcctcctggctctgtgcgtgtccaggtctcggtattctgctctcttgctgctgcttgacccctgtggtcagccagtgtgagatctgctccaggcctcatctgtcggtccccaaccccctttccgagcctgtctgctcagcattgtgaagtctctcacccgaggccctgtccacaggcagaacgtggacattcagcccagctccacctgcccgggttctctctgcgctgccacctgtgcacaccatggaggccgtacgaaccctgggcagctctgtcccgctgctaagtgtcgggccactaagaaaccctgaattcttggttggtctgctgttgctaagccacatccccccctaccctggcatgtgtcgcttcttgttagacctaagcacaggtccttgtgttcaatcccagttcatccttgtggatccacattttcatcctagaatccactttcaccattcccaatcactgtcgtctatcatgagaaggtctggcatgcaagccttttgtgtctttataccagctactgctctaactttaatggaaagggctggctggggaggataaggcccagcgtccctctggctgacactgctgtcaccattggtccctgtggggtgatttcaaccagctccttgctggctgtcctggaacttagcccacatactccaccaccttgtcctcgggggtattggaagatacttttcctgggggaacctgaggaagttctgtttagttcacaaatattttctgtcccaggttccgcaccaaagctggggggccagacatactgcctggtgtgcatggtcttacgggagcacctggacagaccgatgcacttgctgaatcttggtgggttaggggagcaggagtgaaaagcggtggtggtggggcggtggccagtgaaaggcttcagagagagatctgaacagggcttgaaggaacaaggggagtttgccaggcagacagcgtgggggtgggggtgaaggagagagtgaggctgtgcacagggcagatcgggctggggtgggatgtgtgccgttccacacttaggcatatttcctccatttcctctctgtcccgatttgtaggtcatcactgaggccaactcgagctggctttggctcaagcaaaatgcttccagttaattgccgtgtattgaagtgtcctggatggctccaggcacacccgcggctcagtggacatgatgggaagggctctggggacgttaacgggagaatcgaggtccctcctgcaaccctctgtcctccacaggatgcccggtgtttgtcttaacagatttgagagatggggacagaccaactcaacagttgagcttttgtcctttgtaccctcactgatccaaacagccacgaccaagggccactacacacacccttggagctgcgctcactctgtggattggctgtgtttagcaacaggactccagtattgaagtgggaggtggcagactgggtcaggaagggcaccaggacagagcctgaagggtgctggggagggccccaggggtggtgcccggtactgaagctggtctccacatactgacacccctcctccccgcagaaccggccctccgtgatcacctgtgcctcggctggcgcccgcaactgcaacctctcgcactgccccatcgcgcacagcggctgtgccgcgcccgggcctgccagctaccggaggccaccgagcgctgccaccacctgtgaccccgtggtggaggagcatttccgcaggagcctgggcaagaattacaaggagcccgagccggcacccaactccgtgtccatcacgggctccgtggacgaccactttgccaaagctctgggtgacacgtggctccagatcaaagcggccaaggacggagcatccagcagccctgagtccgcctctcgcaggggccagcccgccagcccctctgcccacatggtcagccacagtcactccccctctgtggtctcctgaagggagcgcctcctccaacaacacgtggatctgcatggtttgcctgagctttgaacagtcagtacttaaaaaaaaaaaatcatgggggtggggtggggggaagggaagggatggtttatttgcaaaaaccatgttgttgggatttgtgttctgtttttgtacttgcttggtatccgtacaagggggccctcaaacatgatagcaggaactacgcgtggaacatctgtctaatgtagcatccttacttcctgcctcagttaccaaagaaacctctgatgcaggtctgctgccccgacggggccaggactccacagcgctttctcagtcacaagccatgatgaattggtgactcagacgctttgtgctttttcctttgcttcttgagaccggggtgtgtgtggctcagcttccacggcgtgtttggttcggtccatgtgtgtgcgtgtgtatacttgaagagaactgtcgtgtctgatttgcactattggaggaggactaaagttgcctgacaactttatgtgttatgccagaactctgagggcaaactgctgaaaaacaaagggtttaaggatgacatttctgaccatttgtgtgtttgttgttgttactgtttttgttttttttaatgtagacaatacagctttggaaggggaagtctcatacaggttataggtctttctctctctagatttcaggtgcttgcaactggactgcagactctaccaatcacgggcattttatcttctctgaacactgcagtttgttagactagagctgaggttggaggattccatagtgctttaaacgtgatgcatgttttaatggagaaaaaatagctggtttctattaattatatagacagtaaacaaaaaccttaatacttactatcttcttttcagaattagtttatttttgtcagttacagtcctagatatacttactgctggtacagttgtactctaagattggtatttgatattcactttactcacaagtagtgcgggaggccagctcctggcaggccctcgcgatgagcagtgggtcagctgcggtgtgggatgctggagtttggctgcaggctgacatcatttatttttgcatccctgtctgctttgttacaagctcccaggggaggtggggtttgtgtcttccaacttccctacatgcagaaactgctccctttgaactctcttggctgaacagcagattactgacagacaatctgtgatatggtgttttatacgcttcctcgtacgctggggccaaggcagtatacattcctctgactttatactgttattactgcatttattatttgctatattaatagctactaactagaaattagatgaagcaagcatgacagacacagctgtggaggtcacagctgctcctttttggtcaatgagcgtttctatcccctccccctggggtgtgctgtgtcccacctggcccaccagaggctcacgacgatggcacctgaccaggtgacgtgggcgtggtcacctcacctgcaaggctttgtggactctgcacaccgtatgacccccggttttacagtttttagctgttgaattttggaaattggcactgggtgaaaaggtcggaggactggctcttgtagtcacagagtggctgcaggcctttgaaaagtggaggaaagaaaagcccttctccttgccccgcacacatttcactcccactgtactgggcttccaagctttggcattcaggcccctatattttctgtaggaaaaatcgttgagaacacttttctatatgggtgattttgagaccatcgttacgctgtgcgcaaagaatgtacagagaaatttgtaggtattttttgaagaacattaatttgttaatgatatgtagctatttaatttttccctttcctattgtaatcattcattttttttgttgttcggaaaaaaaaagttgatcttttttttgtcgtagatttgtctgtaaaagtgcaggaacagttattctatgagaacactgcatctgcattcatagccacgagtttgttattgctacaggctactgagcgtcgtaacaggaaaaccacccacagctgaccggctcggtggaggacactcctgggacaggtctctttgtcagtgaacaagggcgtcactctgggaggggtcggcggtgctggcggccgggtccctggtgcactgacctatctgggataggcagtaccctggaggggggcctggggcagaggaggcagcagaaaaccaaacatttcactgagaaagccccctccctgctctaagaaggggctccgtgaagttcttcccagagccgcgctgcctgcagtgcgctctgaccttctcttcatgtgtgtaaatctgtaatataccattctctgtggcctgtttttcctggaagaagaaaaaaaaaaggtttggcaggccatctttttttgtacttaaaagtagccttaagaacaataataaagtgctcttaaacc

SEQ ID NO: 2145 - DNA, 3955 bp, Homo sapiens
gtggccagggagccgcaggcaagggactaaggggaggggggctcagtgccagctgcttaaaaatgcccctgtggcagcgaggggcaccagaggctgggtctaattagttgagaagcagtgacacccccaaccactccccaaacaggctggctcccgtctccaggccccaaggagccacacctggaccagaccccaggaaagccaaagatggagactatggtacactcttcacagccaagggcaggggacagaggagaggcggtgcccaggcaggatgcaactatctccaagagatagttagaggatggcagcctatcttgagttctggctgctctgcccaggagatccctttgaatggccagagatggtctccaatgctgttggcctcctgcagaagaaagagcccaaggctgggaatggaaacccttggttctattcctggctgtgccctaactcttcatatgaccttcaacgcgaccttgaacatgcagcttcctctggcctcagtgtgtccagcgagaggctagacccggccaggcctggtggctcactcctgtaatcccagcactttgggaggccaaggcaggcggatcatgaggcaagggcgctagctggtgggagccaccccgccatgctgatgtcagagaagcaagaactctggagaagcagcctcctgggaccagaggagggccagcagcaggcagcccggagacagaactaatgtgtctgggggtgagaggacgggtgtgactgctgaaacttcatttcttggtgattccacatcactcctttctgatccctgagcctgtgccacgccctgtgtgatgtgccggggacaccaggctcacccacgcctctccaagcctcccaacagaagacagaggtcccccacagccagagacatttcctgaagacatggggaacacagaggcagaaacagcccatccacccaggagctgtcccccacactgccgggagccggcacccagagccgccaggtaaaactgaggccacctggttcaacatcacctttcacagaaggggaagcagccacagaaagaagggcctcgttaagaagtggaacctgggacccccaagcggtgtctctcatcctgactggggatccagagtaggagggagcctttggtggggtaagtggaatggggcgggggggtgggggtggccatagacccctcttctcagtaaggccctcatgtgaaggaggcaggggttgggacaagtgctaagtatgcaagactcaagggaagagctgctggagccaggagaagcacctccctcccggcccctctgcccctcctcatagcccagctgcactgactcctcctccaggaagccttctcagcttccccaggggtgggaacctttttgtcctccaggtgtgcttggctgtcctttcttgggctctctctctctctctctcctcatcccacttgagtctgccccctattcaccttgtgaggggaattttccttctactcaatctgaccgaggtcctccaggtcaaggacagcgaggctctcagtcccacttccccttggcacatagaagaggcagtgcgctgaagggacaggtgaaatgattagaccctgcccccgaaccaaggcctggccaattggacagggcatgagacattcagcgtagaggttaaaacgagggccctgggttaggaaccccagctcagttctcagctctgtacccttggaaaattcccttcccatggagctttgtggatgcacaaggacttgcacaaagaaaacattcaatatccaggactataaaattccacaaatgatcgtgcttattacattcattatcacaatgattattccagacacaaaggaacagaacgaggcaccaacagcaaggggcaagcagattcaagggccacagaggagatggaggcaaacaccttcccctggtcagaggctgtgcctcagcccttctccctgcatcagtttctccttcagaagcatgggactacctcccatctagttctcgtttctaaacctaggggagatgctatctttgctgcaataatcttagcctacatcttggaatggaaatggccttggtggaaatggtcttcaactcctctggtccaagctcaggccctgtgaccctggaacaatccccttcctggtcctccatgtaggagcaataacattcccttgccagcggcaccagccattctgatgattaaatggtatcggactctgttttcccaactcagtcattcagatgccccctattttatttcttccatgtctgcaaatgattataatatttttaaatgtaggatgagtcctttttattacacatagaaatagctactgtaaatagcaaactctaacactgtgcctaattaggaaataaaggtaaccataaatacagtaaaaatgaaacaatgttattatggtttaacctgatagtgtggcttgcaaggccctgggcctgaagcctgggcaataagtgagagttagaaaggtgtcaaagacatgatagcagcaaactgaggctttgtaccccacggtaaataggactgaaagcaaattcacagggagcaactgatccattccacaacagaatgctccctgtcaattcgctttccattctgttgtgtcctgtctcccagcagagactacaaactccccaaaaccacttacccaccagctgcacgtgagaagccaaaggtagtttatgtgaaagggctttggaaataatcacgcaccaagtgaaggcagaggacacaccttgtcagcttagttctcagcagcaaatcatctcttttccaggataaccctccctgattcttattgaaatctctttgctgaccacactaagctcttctctctcaggggcagtgggagccgtggagagtggaatagaccagctgtctgtgacctgcgagggagtccaatgtcggaatcactccccagccaaatgcacggttttaaaaaatctatttatttatttatgtagagaccaggctatgagactggctaatttttcgtatttttggatagagacaggttttcatcgtgttgcccaggctggtcttgaactcctgggctcaagcgatccgcctaccttggcctcccaaagggttgggattacaggtgtaagccactgctcccagctacttgggaggctggggcatgagaattgctttaacccggaaggtggagtttgcagtgagccgagatcgtgtcactgcactccagcctgggcgacagagggagactctgtctcaaaaaaaaaaaaaaaagtcaaggagggtttcccagagtggccacttgattagagacctagcacaggaggaagagatgggcagggagagtgacggggagcagcacagtccctgggagcccgaagtgggtgggcacagggctccctaggagaatggaaggacatctatgagctgtagcccaagaggaagaggtcactggggctagatgcggcagaccctcgcaggctttgggaagggcttcagaattcagcctgagggcaatggggagcccttttgggatattaaacttgagtaagatatgagcatatttgcatcttgaaaaatcattatgggaagatggctgggaagagaggaggagtggcagaagaaagataggttggagacaattgattgctcgatgatataaaatgttaagtaccacgaatgatgctgttaggctggaatgcgccaagcataaaggtggggcatggcatcaaaaggtaggtcaacatattaaataattccatgtattgaaatatccagaaaatatacagacagatctatagagatagaaactggtctgcccaggactaggggttgtctaaggataaggagcttcttttttggatggtgaaataacctaaaatatattgtgccattgtttgcacaactttgtgaatatattaaaaacctgttaattgtactcac

SEQ ID NO: 2146 - DNA, 3743 bp, Homo sapiens
atatatccatctctgctgaaacagcaaagatccagttgggtatggtcttcgtacttttctcagtattttgaagtaagattcattgtggccacatacaacacgagtctccttttaaaaacacgaagtggatggtccatacgtgattgctggaaatctgtctatggtagtggttcctataatggaaaatttgctaaaaattaactgtaatgggttgcgaacccccccaccccatgttagggcatacgaaggcattttttttttaaggcaaaaaaaagaacattgtagacggccgtctgatttttttttccccctttttctttttcagagggcacatctgctcgataacacagagaggctggaaaggtcatctcggagactagaggctggataccaaatagcagtggaaaccggtaagaattctgagagtgagcaaattgtcttgcttatgcacagcagtcttcacaacacatgacatttcagggaaacttcaaaggagtagcagagacagcagcccgagatgtggtttacatattggggagacaattgggagcttatttgcgcttatcttttttcaagttaaaaggcatgacatctactgaaaacagttcctgaggtttaaaagtatacatctgaaaagagatggaatactttgtctaaattctacatttgtcttaatatgcagttacatgttgtcagtttacccacccgcaatgattgctagcacatggcgcaatctccagtttgctcctttacgttttattcacatatgtaaaaattaacattttaatcaatctaaatcatgtgaactagggacaaagaaataacaatacccactttactttgcatatttgtcctggtgttggaaatgattcctaataatcctgtttaaaaaaaaaaaatcatgaatagagcctataatcagatacgaaaattatgaaaaagtcatagcaaggagtaaggctaatgttcatgataatcttattagcattagttaatgctcttcaaacttttggtttgaattaataccagttattaatttcagaaaacataatcttagtatgacttctaaaatcagtctacttaaaatgaacatgcttttttgttataaatgtttcatgcaatgactgtttgtctccagagtaaataaatatccattaacaccttagtagtcatcagtttcttactgttactctacgctttttattttgttttgtcaagcatagattgtaaataatctattttgtgtattttggatagctcttgcccaatgtgtaaaccacaaaaatatgtaatcaacaatgtttttatcaatttttaaagatttagagtcatagaaatgtttattttgtaagaacaggtatgatgaaaatgattccaaataatttcttttatgaatggccagtgtttttcttgtcctgtgttcatggctgccctatattggttggttaatgtgatgaattctaggcaaccaaacaggaagaatacaaacaactttggcattatattaatagtgaaaaaactaaagaaaaccacaaaccttcccaggtttaatagttatggacagcccttcatcctgaggtaattgatagattggctttctgcccggattggaataaaagccagcttttgtgtgttctttttgtttgggagctcatctttagaggtgactgttcttgggaagaatgtgaataatggaaagagccttgaacatgaagtcagaggaccaggcttgggttctagctcttgtttgtgtgaccttgaggagatcacgtaacctcgctgagcctcagtttcttcttcaataacatggaaataatattgcctatctccaaacattcttaagaaaaaatggtacatgtaaaaatgttttatataccaaaaaacacatatacaaatataaatattattattattgtgtggtcattgacgatctacaggcatttatctttatctcctagaagataacttttattatgattgaaatttataaatagtaaaggaatagaaaacaaaatgtgttactttgacaatccttggggaacatagcactgtgtctatggaatatgaccataatcacagggaccttccttgacaaaacatccattggtcagcctctttccacatggggctggttcagactcagggggtcttctcgtcgtgacactgatcacaaggcttgctttggttgattgggctacatacttgtgtgtcttttttttctttcactaaactattcatatagctccctcccaaagctgaaagaagatcgcagataccaaaagactgtgttttgatcaaggttatttgcttgaatgggatttgatagttattatttttggtgtgtgctaaaacataacatccacatcaaactatcaacataaccaacatggaaatgtcaacttaagagtgtcctgtcagcctacctcagtccctttggactttttagtaaaatattatggtattgagtatgaagtgttataaaattagatgttgacttgtcacataaggcttgggaacttcttgcagaatacaagaccaagtctgggaggatggataagaatgggctttgtggaagtaaagacagatgtggctcagcctgtacatggacgggagtcatcattgctaatttacttttgtggatgaatttgaaagtggagtgggaaatgagaaggcagggacaaagcatttttcctgctcttgctacttactgaagtaatgtggaaggaatacactggggtgggcaccatattgcttcgtatttcctgcttccctactggtcctcagcctagtcatggcttgtcaatccatagctctgtgttctgactgtgatgtaaatttaggatacttaccatttgttaaagtatcagaacagcatctttggaaaggaaaaactttcagcacttattgatgtcttctttttaaagactatggaatgcaaggaggaagagaggtggaagaactagtataacttttgaaacagcacaaaacagggaaatggcttccaggtattggtctgagagccagttctagaccacaacagttttcaccagtgcactgcaaaatgagaagagaagtagaacatagtgactttctcataaaacatattttattaattcacaaggctacagttatttctaagatgatgtttttcctatttgggggtgtaaaggaaagttgtaatgtgattgaaatagtaggtagaagttatttttttttctttacttagaagaataacaaaattggcatccctattttaggcccttcaaattttttttcaaattttacttgaccacaaaattaggaactatagcctgatatactgaattggagagagagaaaaaccacatcatctgtccatgtcattaatcagctgtgtgactttgagaaatcatttaacctctctgcatgtgttcttatatttgcaaaatggaaactgtcaaccagattctatgtatcccttaaggtttttatgaagtaaaataaggtcatatatatttaagggcttagaaactaaagagagctctgttaaaatcatcatttttataaactaccatcagcaaaagtggttaactttgagaatcattggcaaagatttcaacaaaaatctgtaaacttttctattcattaacttgatgaatgtaattggcaaatactataaaagaaagttaatgtagaaaatagaatggagtagagtagaatagaatgcacattatagggtcttcttaataaataatgaaatccat

SEQ ID NO: 2147 - DNA, 4075 bp, Homo sapiens
ctactttctgcctcttcaggtgtgcatcagggatctggtatcaaggaatttagaacttgaaaagaagtgttatggtccagttccctcactttcagatatggaagaagggaacacatccacggtcacacagcaggttagaggcagaaccaggaccaagcctaggtctctgcatctcagcccagggcttcttgttacattcctgcaggaagggctttctaagtcagcaggggcccagcgtcagggacctacttacccttgcagagacactgagaggacaaaaactaagccccaagggggccaacagccccagacttcacatggcctagggttgttttctatatatcttggcagatttatcaagagtacctttttccgggagctgaggaaagaaaaaaaatatgccccattcctatcattaggggattcatattctagaggaacatagaagtctcacatgtatggagagagcatagagcagcttgctaggggctcaggtacacaccctgtgtgagggagagctctggagcaggaggagatgcggagtcgtctcctggatgcagagcaaggattttcctagagaggtggagtccagatagtccaaggagcagaggagtggaggccaggctttgctagggctaggagaagagagagaccccctccaggcttgcggggaatcctgaaaaaatggtccacacagacaaagagggttaggaggttgtgaggcaggggctgattttgtaagaccttgaactctgctctgaaggaccagatcatggagctagtggggtgccgtgcctcactttctcaagggagtggtttcatgaaagctgggcttttgggagagaagtctggtggcattttaggagcgctaggggtcaggaggcctaaccagggacttactgcagtgactcagttatggaatgaggaggccctggtcacagggagtagcagtggggtattttgagcttctatagtgcttgtttgcaaaacatgataaatttaggttaatctccaagctttaacataggaagtataacttcagtgttttttttcttgccatatctaggtggagtccgcaaagaaattgtgaggctcaggtgtctgttttattttataaagcattttgaaacttttgagaaccaacaaaaagagaatgcaaataccaagtgttatttctttctacttccaaatctcaagccctaaattgaataccatttaattcactgttgccaatatggcactctgcgttccttttttgatagaaagttttgccttttgagcatttgaagccctagctttgtgatatagctgaacagggtgggcaggctggtggggacaaggaagaacacgaggacgagagtagctgcccggctccagcagcacccatgccctcggcacgcacagacttaacggtattgtcttctctttatctccttaggaatacaaacagaagcttgcacgagtaacccaggtccgcaaggaactgaaatcccatattcagagcttgccagacctctcactgctgcccaacgtcacagggggcttagcccccctgccctctgctggggacctgttttcaactgactaggatgggtgtcatgtcccagatttctgtttgtaccagcagaaagaagagggcaagtcatggttggaaataaccttctagcccctggttctatcccttcttccgcccagccccccagcctcaagaaagaacctcagactctgattctcctcttcagcctctcatcttgagcacagttcagaacagtggcgactggaatctggtttatattcatatttgcaaagactacagactttttctcccacttcatattttcatgcccccctgttggttttccattcttaactgtctccttatacctaagaagttatgaaaatcatgtgtacttctggaagctttcgaaagaatcttgtccctcatgacagcattttatcatgaaagcagcttctcctttctgggctgggcttgttcaagttcggtgtgggcttccactaaggcacttgtcctggagacgttggctttcccagctgcatctgccccaaaaggttgtaggcacagctgtcgtagcgttgccataaagagtttgccaaatctctgatcctccctttccattgcttctcctagtgatgcacgaagattaggtgcatttattttgtaaacagattggagaatctagcaataagattcaaagctaatctggagcataaaggcacagttcagagacagaataacagggatcacaagcatgaattaaaaggaatttatttgcttcaagttcctagatacaaccttcccatgctgcacttctccactgtcggagcacgttccgaaaaacagaatgccttgatccctggtgggtgcgaaggcagttgttagggatggcaggcattggtgggctccaaaagatgaaggccccacacacaggtgtgctgcatttgggatctgtgtgggtgtttcttggaccctttcttctgggagtagggtacacactaacgtttaatccgctgtctgggtgcatgtccacagtacggtggctaaactcgaacatcactgcaaataggacgctgagcaggtccgtctgtcatgtcacgccactgcacaggtccttgtccccacacgacggggagtacttgcgtcagatgttattgaatagctcgtctcgggcaggggaagcggggagttggggatattaattgggggttttaattctattatcatgtcagctgacattatgactatataatgtagttagagacaatttttatcttgcttatagtaaaggttcagcctgccaattgtaaatcattctaatttggcaggcttatttttgacattggaaagggcagaaagcgatttgccccagtagtgtaataggagttatagaccagaggctgaaacccaaactatataaaaaggaattcagtggagggggctttgtaatctccattaatttgtgttgctacttccaggatcaccaaaaattacatgtaattttacatgttaaacacattgaaacataacctatgtttataaagcataacgggcttcccttccagaagctctcctgcttgtcatgaagtgagaacaatgaaaagtcatagcagatactcagtttaactctgtgtagaacctagtagtgtttgagctgttattcagatttgaattcagactgtgtgttgtttgcttatggacactgcctgtcgttctgtcactgttaaattaatgagtctataaggtttttcttccagaggccataggtgacatcactaaaattgcaagataaattgtaatctttgctgctgctgcactccccaacctctcccccaccccccgtggtgtgctgctttctagatgagcgtgttttggagcaggcccatctgggacactctatgctttcaccaaggaagtgcgatctgagcagccacaatccagccaaaagaggatcgtagatatttgctctgatcaactagatgaaaatatagcagaatggatttagcccactgctctgttttatccaactgagtctctgaccagcaattggtgcataattattacagcaaaagttaagaaatgaaactgtagcaattatgtaaatgaatgtgttggcctcttaatacctgttactagtggacttcctgtgaggaagttagttttttgttttgatgaaatgctttcgttttttaaatcttaattctgctgtccacatcctcccaaagtgtgcttacttcatttgtttaatttaaatgaactttcctccttgtatgtatgaggtgacttggtgggtggggtgggtggtttttgtttttgtgttttttctttcttagggcatctgtaggcctcaaaggacctttcctttaggtcatattcctcagaaagtcttcaatcttcccttgtttttgtttgtttgtttttcttaaagaatattttcaaagcttaaatttgtatattaatttaggactatttagaagtataggctgtcgttggcggcagcagtatattctgaaatgtctcatagatatatatttttgaataaagatggtgttgttgaac

SEQ ID NO: 2148 - DNA, 3688 bp, Homo sapiens
cttgatgcagagacatggcttgcccagggtgactcctgggctggggccgccaggggagctggctctctccgccccgactaccagcagctttcggcctggagaggctgggcccctgggagcggctctttcctccaggctgggcacaggcctaggtgcggggtccagggcctgagagcccaggacggagccagggcctctcctttttctctggttgtggatctgggagccaaacagctcccccctcgacctcccgaatcccctggcagcttcccagtcacggcaggttccgctgccagagccatttataactcccattccaggctctgctcggcagtgaagctccctggagagctgggggaggggcaccccactgctgggagctgtggcttggggtatgaggccctgacctgagccccctgaggaggcagggacaggcagacgggcctagctggaatgggggcttggggccttatttgggccatctccctaagcaatccccttccttcctgggtgaccttagctgtgggtctgggatctgtcccttgggtggtgaaaatgtgaaagctggggactggtgagagggggacccggaagtcaggagcttgggttccctgcctctgcagggaactcccagagccgagtcccccatgagcaggcaggagaaggacgcagagctggatcggaggatagttgccctgcgcaagaagaaccaggccttgctccgcaggtaccaggagatccaggaggaccgtcggcaggcagagcagggggggatggctgtgaccacaccagcactcctccagcctgatggcctcaccgttaccatcagccaggttcccggtgtaagcctcaccctgggagacagggctcgtagcaaggaggtggaggcccagaccatgtcggggaaagacagctgcctctgttcccctctcctactaactattctggggtgcacctgccagctcccaacctcctgcagtcggaccactgctgtccccaccaaagagccacagctgaaagcccccctacccccagtagatgcatcttcatacccttttccagtccacagccctgcgcctatgccacaaagcacaggccactcctaaacctcaagccccaggggctaaaaccctgcaggaagtgggggacagagaagttggggctgaatgccaggagcagtgtctgagggacagagacccattgtttgagtgctctgggtttcccagctcagagatgacgggccactgtggcatcttgggccgctgggtggccctgggccctggataacctcatgccattggcatgtgaacaccctgtgggagtcagctcttctgtggggaatgcagggagggctggggttggaacccaggcctggggaaccaccgagaggacccagcacccaggtcctgcccagcactgcccatgtggcctgagggtctttgttctgcaggaaaagcgggtggttagcaggaactgggcaaggggtacctgtggacccagagtgaccaacgagatgcttgaggatgaggatgctgaggaccacgggggtactttctgcttaggggagctggtggagctggctgtgaccatggagaacaaagcagagggcaaacggattgtaagtgaaaagcctaccagagcaaggaaccaaggcatagaggggtcacctggagggcgtgtgacccgaagcccccccacgcaggtggccatcagctcagattctgcacggaagggttcttgggagccctggagccggccggtgggggagcccccggaggcgggctgggactatgcccagtggaagcaggagcgggagcagatcgacctagcccgcctcgcccggcacagagacgcacagggtgactggcgccgcccgtgggacctggacaaggccaagtccacgctacaggactgcagccagctgaggggagaaggcccggccagggcaggcagcagaaggggtgagcccacacctacctcatccctcccctccttggctttgttcatctttcacccccttgtcctctcttttctctgtctcttagtctcttattttcagagctgaaaggaagcgttggagaacatcttccttcctctccctcactatcagaggagggcaccaagacctcccatcctcccctctgagcccacagctcttgtccaggttctgagcagaaggccccagaaggaggctcagtggaagccggcccggggtctctttgaggtccctaatgggtgaaagtcctggtggtccttccccagacctactgtagaaacagctctgtggagttctggtccccttgttttatatataaagaagctgtggcctgagagttggggccagacacctagccatggagtggcaaagctagcacaggaccctattctcctgacccccaggcgagggcgcttttggggaggcaaaacccacgactggccccgaggactgacagcttcctgaggctggaagaactggtgttcctgttttggatcctttgtcaccccacctttccccacttcttttgtcccccgcaggtcccaggagccaccagaaactacagcccccaccattgctccctgatggaaaaggtgagttggggaggaggaggggccaggtctcgtcagctaaagatggagccggctgctatgggcctcttctctccttggccgaccatctcttgcaggtcggggcgggcaagccagcagaccctcggtggcaccagccacaggcagcaaagcccggggcaaggagaggctgactggcagggcccgaaggtaacaggtggcaggagagctcttcttcaagataaggaagtggtagttatggtggtaacccccggctatcagtccggatggttgccacccctcctgctgtaggatggaagcagccatggagtgggagggaggcgcaataagacacccctccacagagcttggcatcatgggaagctggttctacctcttcctggctcctttgtttaaaggcctggctggtagccttccttttgggtgtctttctcttctccaaccaacagaaaagactgctcttcaaaggtggagggtcttcatgaaacacagctgccaggagcccaggcacagggctgggggcctggaaaaaggagggcacacaggaggagggaggagctggtagggagatgctggctttacctaaggtctcgaaacaaggagggcagaataggcagaggcctctccgttccaggcccatttttgacagatggcgggacggaaatgcaatagaccagcctgcaagaaagacatgtgttttgatgacaggcagtgtggccgggtggaacaagcacaggccttggaatccaatggactgaatcagaaccctaggcctgccatctgtcagccgggtgacctgggtcaattttagcctctaaaagcctcagtctccttatctgcaaaatgaggcttgtgatacctgttttgaagggttgctgagaaaattaaagataagggtatccaaaatagtctacggccataccaccctgaacgtgcctaatctcgtaagctaagcagggtcaggcctggttagtacctggatggggagagtatggaaaacatacctgcccgcagttggagttggactgtcttaacagtagcgtggcacacagaaggcactcagtaaatacttgttgaataaatgaagtagcgatttggtgtg

SEQ ID NO: 2149 - DNA, 4792 bp, Homo sapiens
gtaaaggcgcgcgggaacatggggctgtacgctgcggtggcaggcgtgctggccggcgtggagagccgccagggctctatcaaggggctggtgtactccagcaacttccaggtagcgggcccgggcgccacaagtaggggtggggggtgaggaacccggggtggggtgggacgggcccggatggggtcgggaggtggggcccggcgaggagggccgggggagcccccgacccagcttgtctccctcggccacacagaacgtgaagcagctgtacgcgctggtgtgcgaaacgcagcgctactccgccgtgctggatgccgtgatctccagcgccggcctcctcagtgcgaagaagctgcagccgcacctggccaagggtaggggcggggcggggaagtgaaccccgacggtcagcgctttgtcatctggtttcagccccgctgccgtgcacggcgggactggagcaagtcgctcacctgaaatgagtatgagcagaccttccctgggttacgaattgagatgggatgaaaatgctttaacttcgagtgttttgaaggattaaataaccgaagtacaaagtagtagtagcggagacagtaaggaagtcgggcgtggcggcgcgcacctgtggtcccagctactcggaaggctgaggggggaggatcacttgagcccaggagttcgaagctgcagtgagctgttatgtggccactgcacttcagcctgggcgacagatctagaccccattctaaaaaaaaacaaaaaccccaaacccacacccacgaaagggtaatgttggcaagaagttgggtgcagaggtctactggtgaacatctgtggggaaagggtctaaggctgggaagcgagacgccaggttccgatcctgttgtgtagttaatttctggtgtggtcttgagtaaggtaccccacctttatctgtaaccatctagtcaggtgatctctttagccattccagtgcccgggctctattagagttagttctaaggcattcatacttcttgcttagggcgtttctgtctttgatccctcatccccaggtgctagtgtatgagttgttgggaaagggctttcgagggggtgggggccaatggaaggctctgttgggacggcaccaggcgaggtgttgagttggctcggctcaaggttcttcggggtgtgagctggcatgaggacctgttggaagtgggatccaggcctggtccagcctcccagctgcctcgatttgtgcgtgtgaacactctcaagacctgctccgtttatgtagttatttcaagagacaaggtttctcctatcagggtcgggcttccaggctggatggagtgccctggcgcgatctcggctcaccgcaacctctgcctcctgggttcaagcgattctcctgcttcagccttctgagcagctgggattatgaaggggtggcctgcccctccacatctgtgggatatctcatcaggtgggacaagagactgagaaaagaaataagacacagagacaaagtatagagaaacaacagtgggcccaggagactggcacttagcataccaaggacctgcaccagcactggtctccgagttccctcagtttttattgattattattttcattatctcagcacaaggaatgcggtaggagagcagggtgataataaggagaaggtcagcaaaaaaacatgtgagcaaaggaatctgtgtcataattaagttcaaagggaggtactatgcctggatgtgcacgtaggccagatttatgtttccctccgcccaaacatctgtggagtaaagcataacaaggcagcattgctgccaacatgtctcgcctcccgccatagggtggtttttctcctatctcagaattgaacaaatgtacaatcgggttttataccgagacattcagttcccaggggcaggcaggagacagtgcccttcctctatctcaactgcaaggctttcctcttttactaatccacctcagcacagaccctttacgggtgtcgggctggggcacagcctctcatcccatgaggctatatttcagactatcacatggggagaaccttggacaatacctggctttccagggcagaggtccctgcagcttttcacagtacattgtgcctctggtttattgagactagagaacggcgaagacttttaccaagcatactgcttgtaaacgttttattaacaaggcatgtcctgcacagccctagatcctttaaaccttgattccatacaacacatgtttttgtgagctcaaatttggggcaaagtcacaaattaacagcatctcagccaaccaattgttcaaggtacaggtcaaaatggaatttcttatgtcttccctttctacacagacacagtaacagtctgatctctctttcttttccctacaggattgcaggcatgcagcaccatgcctggctaattttgtatttttagtagagacgggatttctccatgttggccaggctggtctcaaactcctgacctcaggtgatctgcccaccttggcctcccaaaatgctgggattacaggcatgaaccaccgcgcccggccatgctaagtcctttcttggctccattgtactgtccctcctgcttcctctccaggtccatctgccacagtgctacgtgcaccagcgtgccagcaacagtggctggtctctgccccgtgcctcctccactgggctcacacctgtcttattttgtcctttggtggctctgagaagcagcctctgcccctctccctttcccttactctttgtaagatcctcttccttctgccctaccatgttgcttggacaccagggtggaatagcagagaacggctgcttgtgtttgaattccagctctgccacttcgatagatttctgaactgagacatgtgactctctaggcctatttctgcatgggtcggagagtgggcgggactgctttactgagttatagtgaatgtagttttaacctaagcgcctcacatgactaactcctcatccatcaagaatgagctcagctctcacttccccactcctcacccccctgtaaagtaacctttctccaaggttatgcttcaacaggaatagctaacatttattaaattgtggcacgtaagtatcttggatatattggctcattgaatcctcacacctactattttacagagatgccagtggggcttgagattgaatcacttgcccaggctcccactgctggtaaacagtagagggggctcctgacccatcagtctggcttgacaacccattccctcaactgcggatcccggattcccttatcaccctgttgatttctccatagctgtggtaacatttgttgcatgaatggaccgttgaaatagggcctggcagggagaaattcaggaaatgaatgaatggttcttccctggcagccttgatgacttacaagccctcaaggggaagcattttctcctggactccttgatgccggagctgctggtgtttcccgcccagacagatctgcatgaacacccactgtaccgggccggacacctcattctgcaggacagggccagctgtctcccagccatgctgctggacccccgccaggctcccatgtcatcgatgcctgtgccgccccaggcaataagaccagtcacttggctgctcttctgaagaaccaagggaagatctttgcctttgacctggatgccaagcggctggcatccatggccacgctgctggcctgggttggcgtctcctgctgtgagctggctgaggaggacttcctggcggtctcccccttagatccgcgctatcgtgaggtccactatgtcctgctggatccttcctgcagtggctcgggtgagatggtgagaaggcgtggctgagggactcggaggtccacagcagcttagacctggagtcatctgttttggtcttagttctgacactttaatgggcttgggaccctggagcaaaagttctcctctgtgaggcaaggatttcaggagcgaggatttcaggactgaggcagcctgtgaagctgtgtaaccgagacacgcttttccttaggtatgccgagcagacagctggaggatcccggggcagggacacctagcccggtgcgtctgcatgccctggcagggttccagcagcgagccctgtgccacgcgctcactttcccttccctgcagcggctcgtctactccatgtgctccctctgccaggaggagaatgaagacatggtaccagatgcgctgcagcagaacccgggcgccttcaggctagctcccgccctgcctgcccggccccaccgaggcctgagcacgttcccgggtgccgagcactgcctccgggcttcccccaagaccacgcttagcggtggcttcttcgttgctgtaattgaacgggtcgagatgccgacgtgagtgagtgggggcatgcttgggaggcgcaggatggtactggcacatctaacatctacacttctctagctcagcctcacaggccaaagcatcagcaccagaacgcacacccagcccagccccaaagagaaagaagagacagcaaagagccgcagccggtgcttgcacaccgccttgcacatagcagaggctccaggctgactccttcctggtgggaaaggaagatgcctgtcctctccgtggaggaccctgggccctcaccgcaggcagcagtttgcattttgaaaggttattgggtcccttcctcgggctgtgttcttgctggtgagcaaaagtgttgcctgcagaaataaaatgcagaacgtattct

SEQ ID NO: 2150 - DNA, 5115 bp, Homo sapiens
atgcaattctgccctctggccaccgccagggaagaaaggttgtctccgtctgctgcatcgcctttgcccagcaatgaagcccccaagacagcggcagccggttgcctgaaccttcctatccttgggggcacccagtgcaggtggatgacccgactcaacctccgccagggcaccctcggggcaggacgggtagcaaggaggggacagagatcggccccaggagaccacggaagatcgcgctcctggggccaacttcagcagcgagaggcggcctttgcccaccgcctcatcccaccacgccgcggtcctccaagaaccttcccagcggttctctcctcctctcaggagtagaggccctctgagaccgacggggagggacggctcgggccggtcatccgaggggccgcacggattccctcctccgcccagctccaccccctcgaggggcggcggtccgggagtggcgacccggctcccccatggcgcgcgccgtcggggcccctggccaggctccgagcggggttggcggggaggggaggcgggagcgagggcgggcggtgggaggtgggggcgggaaggtccgaaggcggcggcctgaggctgcaccgggcacgggtcggccgcaatccagcctgggcggagccggagttgcgagccgctgcctagaggccgaggagctcacagctatgggctggaggccccggagagctcgggggaccccgttgctgctgctgctactactgctgctgctctggccagtgccaggcgccggggtgcttcaaggacatatccctgggcagccagtcaccccgcactgggtcctggatggacaaccctggcgcaccgtcagcctggaggagccggtctcgaagccagacatggggctggtggccctggaggctgaaggccaggagctcctgcttgagctggagaagaaccacaggctgctggccccaggatacatagaaacccactacggcccagatgggcagccagtggtgctggcccccaaccacacggtgagatgcttccatgggctctgggatgcaccgccagaggtacccccccaccattcctacccctactcctccttgcattcctaaggggcggttggagccagcccctaccacaccctccctcttgcccctcttgctccagccctggctgagatttggggctggccccttcctccctaggatcattgccactaccaagggcgagtaaggggcttccccgactcctgggtagtcctctgcacctgctctgggatgaggtgagctctgggagaggaggctgggcctgggatggggaaagagctccctcacacccgctcctacccctctgcaccctagtggcctgatcaccctcagcaggaatgccagctattatctgcgtccctggccaccccggggctccaaggacttctcaacccacgagatctttcggatggagcagctgctcacctggaaaggaacctgtggccacagggatcctgggaacaaagcgggcatgaccagccttcctggtggtccccagagcagggtcaggggcatcgatcggatgggagtgggaatgctgtatctatagccctccaaatcagaagagacgggaattcacaggcctcgagtcccagtatttttattgaagtctgaagaaacaagttccagaaaacatgttaaacttccttctgggagctgggattggtggtcagggctcaagcccagcagcttccactcagggtccccatttgcacctccgcagggcaggcgagaagcgcgcaggacccggaagtacctggaactgtacattgtggcagaccacaccctgttcttgactcggcaccgaaacttgaaccacaccaaacagcgtctcctggaagtcgccaactacgtggaccagcttctcaggactctggacattcaggtggcgctgaccggcctggaggtgtggaccgagcgggaccgcagccgcgtcacgcaggacgccaacgccacgctctgggccttcctgcagtggcgccggggactgtgggcgcagcggccccacgactccgcgcagctgctcacgtgggtgcctctgacccggacgcgggtcccgggtggggcggcctcacctcccggccccgcctggtcacgccgcgctccgcccccaggggccgcgccttccagggcgccacagtgggcctggcgcccgtcgagggcatgtgccgcgccgagagctcgggaggcgtgagcacggtgagccccgcgggcgggggcgagggagagacaggaggctctacggccgcagtgaccgccctcccacggccccccaggaccactcggagctccccatcggcgccgcagccaccatggcccatgagatcggccacagcctcggcctcagccacgaccccgacggctgctgcgtggaggctgcggccgagtccggaggctgcgtcatggctgcggccaccgggtacgcgggtggggggtcggggctgcggcggggcggctagtcctggggacttcctccgctgcgtttctttggtcgtccctcagtttcctcttctgtaaaatggggataatgatcatagtgtccgcttcagggtggtttatgaggcttaaagggaagaagctcaggcaaagtggattctcaacggtatgaagattattttccgagtaacctggcgaggttactcctacaccgggaggagcaccgtcgggtcgcgattccaccttgggtcccgggctgctcactattggggccgcatcgtcccctgtcccgcttgttgtgtgactttgcgcgggttacttcccctctctgggctctgcgcgtctggcggctgtagccaagcccaggggtggggatcagagaagcgcgggggttggaggactgtccctccatgcccaatgccctccccgtgccggtaggcacccgtttccgcgcgtgttcagcgcctgcagccgccgccagctgcgcgccttcttccgcaaggggggcggcgcttgcctctccaatgccccggaccccggactcccggtgccgccggcgctctgcgggaacggcttcgtggaagcgggcgaggagtgtgactgcggccctggccaggagtgccgcgacctctgctgctttgctcacaactgctcgctgcgcccgggggcccagtgcgcccacggggactgctgcgtgcgctgcctgctgaagccggctggagcgctgtgccgccaggccatgggtgactgtgacctccctgagttttgcacgggcacctcctcccactgtcccccagacgtttacctactggacggctcaccctgtgccaggggcagtggctactgctgggatggcgcatgtcccacgctggagcagcagtgccagcagctctgggggcctggctcccacccagctcccgaggcctgtttccaggtggtgaactctgcgggagatgctcatggaaactgcggccaggacagcgagggccacttcctgccctgtgcagggagatggccaggaagtgacttgtcggggagccttggcactccccagtgcccagctggacctgcttggcctgggcctggtagagccaggcacccagtgtggacctagaatggtgtgccagagcaggcgctgcaggaagaatgccttccaggagcttcagcgctgcctgactgcctgccacagccacggggtttgcaatagcaaccataactgccactgtgctccaggctgggctccacccttctgtgacaagccaggctttggtggcagcatggacagtggccctgtgcaggctgaaaaccatgacaccttcctgctggccatgctcctcagcgtcctgctgcctctgctcccaggcgccggcctggcctggtgttgctaccgactcccaggagcccatctgcagcgatgcagctggggctgcagaagggaccctgcgtgcagtggccccaaagatggcccacacagggaccaccccctgggcggcgttcaccccacggagttgggccccacagccactggacagtcctggcccctggaccctgagaactctcatgagcccagcagccaccctgagaagcctctgccagcagtctcgcctgacccccaagatcaagtccagatgccaagatcctgcctctggtgagaggtagctcctaaaatgaacagatttaaagacaggtggccactgacagccactccaggaacttgaactgcaggggcagagccagtgaatcaccggacctccagcacctgcaggcagcttggaagtttcttccccgagtggagctccgacccacccactccaggaacccagagccacattagaagttcctgagggctggagaacactgctgggcacactctccagctcaataaaccatcagtcccagaagcaaaggtcacacagcccctgacctccctcaccagtggaggctgggtagtgctggccatcccaaaagggctctgtcctgggagtctggtgtgtctcctacatgcaatttccacggacccagctctgtggagggcatgactgctggccagaagctagtggtcctggggccctatggttcgactgagtccacactcccctgcagcctggctggcctctgcaaacaaacataattttggggaccttccttcctgtttcttcccaccctgtcttctcccctaggtggttcctgagcccccacccccaatcccagtgctacacctgaggttctggagctcagaatctgacagcctctcccccattctgtgtgtgtcggggggacagagggaaccatttaagaaaagataccaaagtagaagtcaaaagaaagacatgttggctataggcgtggtggctcatgcctataatcccagcactttgggaagccggggtaggaggatcaccagaggccaggaggtccacaccagcctgggcaacacagcaagacaccgcatctacagaaaaattttaaaattagctgggcgtggtggtgtgtacctgtaggcctagctgctcaggaggctgaagcaggaggatcacttgagcctgagttcaacactgcagtgagctatggtggcaccactgcactccagcctgggtgacagagcaagaccctgtctctaaaataaattttaaaaagacat

SEQ ID NO: 2151 - DNA, 3932 bp, Homo sapiens
tatcatttttcctctgcctgaagggcttcctttaacatttcttaagttagggggcgtggtggcttaagcctgtaatctcagtactctcagtactttgggagaaggctgaggtggtaggattgctagattccaggaatttgagaccagcctgggcaacatagtgagaccccatttctacaaaatattaaaaaaacatttcttgtattgtgggtctgctggttttgaatttgttctgcttgagtagtcttaaaaattatttatttggccttcatttttgaaagatcttagccaggtttaggattctaggttgacaatcttttttctttcaacacttttttttttcttctttgagatggagtcttgctatgtcgcccaggctggagtgtagtggtgtgatcttggctcactgtaacctccacctcctgggttcaagcgattctcctgtttcagcctcccgagtagctgagattgcatgtgcataccatcacacccagctaatttttatatttttagtagggatggggttttgccatgttggccaggctggtctcgagctcctggcttcaagtgatccgcctgccttggcctcccagcttgttgggattacatgtgtgagtgaccgcatcagccttctttcagtacttttaagatgttgctccagtgtcttctttcttgcattgtttctagtgagaaaactgctgtcattcttacctttgttcctgtgtacataatgtgtcatttttatttggctgtttttaagattttatcactagttctaacaatttgactacaatgtgccttggtgtagtttctgaatgtttctttgcttggggttttttaagcatcttagatctgggttttcagtttttattaatttggggaaaattttgtcatgatttctgcagatattttctctgttcccttctctttcctttgggaactcaaattattcctctattaatgaaataataaatgaaaaaataaatgaagagctcactgatgctcttcatttttaaagaaattcttctctctttgtatttcactttagaaaatttctattgctatatgttcaagtttactattattttcttctgtaatttctgatctaacagtaatcccatacaatataattctcctttctagaagtttgatttcgggtcttttaaatctattctttctctcttaactttttgaacatgtggaatgcagttataacaatattttatttttatgttattttattttattttatgacggagtcttgccctgttgcctaggctggagtgcagtggcgtgatctcggcttactgcaacctctgccacccaggttccagcaattcttgtgccgcagcctcccaagtagctgggactacaggcgtgcgccaccccacccagctaatttttttgtatttttagtagagacagggttttaccatgttgaccaggctgttcttgaactcctaacctcaggtgatctgcctgcctcggcctcccaaagtgctgggattacaggcatgagtcaccacacctggctataacaacattttaatgtattgtctgctaactctaacatctgtgccatttctgggttgactgccattagttgattcattttcctcattatggattgtattttcctactcttttgcacgcctggtaatttttttttcttttcctttctttttttgagagaggttctcactgtgttgcccaggctggtcttgaacttctgggctcaagcaatcatcctgcctcagcttcccaaagtgctgggattacaggtgtgagccatcaggcctgtccagtgcctggtaattttttattgaatgctaggctttgtgaaatttaccttgttgggtccaagatatttttgtattcctgtacattttcttcagctcattcgggaatatagttatatggagatagtttgatcctttcaggtcttgttttggggttcttgaggcaggactgaagcagtcctccccattgtgaggcacaagtacctgtgtactctacccaccaccctgtgaatcaggaggtttttccggctggctagtgggagttacactattcccagttctgagtgagcagcagttgctgttatgaatccttttgggtgcttctttccctgtccttggtaggcatgtgctgcttagtactcccctgcatacttgaggaccttctgtaggtctcgagttctctctctgctcttttctccagtactctatcctgtgaactctagctgccttgatctccctggactttcagtttcatcctcccaactcacggagtcctcagggctctccatgagtctcccctctgttctgtggcctgcaaactctcaggtgtggtatgctggggcagttgaagggctcatcacatttgtttcctgtctcgcaggaatcactgtgctttgttgccccatgtgtagtgtcttgaaaaccactgtttcatatattttgcccattttttttggttgtttcaggcaggagggtgtatctggttcctcttgctccttgtcaggaagcagaagtctcaagctttgcatattcagggaagaaaaataaagaagggtactgtggacagagtatagtgaggagggcttgggtaagggaccaggctatgaaccctttaggtcatggtaaggagtttggattttattcagataatgatcagaagcctcagagggttttgagcaaaggtctgacaggacccgacatccgttttaaggtattttctctggctcctgtgtggacaatagattgtcacctcttccagcgggagaggtggagatgatgggcatagtctggggtgatagtggtagatttgctcttgttcctagtgtaatccttgaaattagtggtgaaactggctgtggatggctcttgcgttggaaggcctggaagtgtgaattacatacatgagaactccaggcatgacattcttcgggtgggaactgttgtcgcctgctctatcttgccagcttctctgtaccaaagttcttttggaaactttgagcctctctgaccttttgacccttatgtgcatgtgggagtcctggtctgtgatcccttgacttgattcagggggccccttagctccatctgtgttccctggagtcagcactgtgccacccccccgcccaattcttttctgtcatgggcagaactgcagaggctgcatccttggggagctcagaagctctccaaggcgctgagtggaggtgccacctgtatcttttgtttccgcttctggagacccttttgtcccttgctttttgggcctgatcccattgtccttcgcagaagcgagacacctcagctcttcactgtgttgccagagaagagaacagccactgttggaggggccatgatgggatcaacccacatttatgacatgtccacggttatgagccggaagggcccggctcctgagctgcaaggtgtggaagtggcgctggcgcctgaagagttggagctggatcctatggccatgacccagaagtatgaggagcatgtgcgggagcagcaggctcaagtagagaaggaggacttcagtgacatggtggctgagcacgctgccaaacagaaggtaggcgcttccaggggcgctgggctgggtgagagccagggaccctggcctgccgttttcagtggcatggtgccctctagtggtgagagtgagggtggcctctgcttgctgctctgtgcttccttagatttggaagtcttagaaatcctccagtgggctgccctctttaaggacgatgagggggaggaactcagccaagtctgagagggagctcgaagagaattcagattcagcgcctttcccacagacttctatgtctatgtcaggctgcccacccttgttttgggggtccgggggtggttcaacctgtcttaacctgtgtctctttctccctatacagc

SEQ ID NO: 2152 - DNA, 3753 bp, Homo sapiens
ggccagctgtggtggtgtgcacccgtggtcccggttactcaggaggctgagggggagggaccgcttgagcctggaaggtaggggctgcagtgagctgtgacggtgccatagcccttcggcccaggtgacagagtgagacattgtcttaaattaaaaaaaaaaaaaaaaagagagagcaagaagggaggttggaccctaggcaggaaggcaggaagagactggaaactaaggaaaggagttgcagaggctggggagaggggtgggggttgaggccaaggcctttggatacttttcctgcccctgtggctcctcatgccaactgagcatttgggacacatgccccttccctacctgggagctgcagaaaggcaggggatgctgtggcccctcagcagaagtggggatggagtctttgggtggtccttcagccatctagcagagttctgtgggcaagcgctagccctgaggcagggagcagtaacctactggctgtggcagcagaggcttgagtacaacccagggagagacgaaggaaggggctagtagctcagggaaagcacagcaccccaactagcccttttggggttctcctgatcctagaaggaaggaactggggactcccaagcctcctgggtttgggctttgcattatgatgtgtcgggggccttgaggagattctcccttgacaagcagagaaaagacctgcagctcctcactgtagggccaggcctggcccttcactgggtcccagagcccaactaggcccaggctacagtcataggcgagggggtcgacaggcctccgacccttacctgggctggttgcacaggtgatcttggcattgtcgagccacctgggggctgtagaatcagagaagcagaagctgcgggcgcaggtgcggcgtctggtgcaggagaaccagtggctgcgtgaggagctggcggggacacagcagaagctgcagcgcagtgagcaggccgtggcccagctcgaggaggagaagcagcacttgctgttcatgagccagatccgcaagttggatgaagacgcctcccctaacgaggagaagggggacgtccccaaagacacactggatgacctgttccccaatgaggatgagcagagcccagcccctagcccaggaggaggggatgtgtctggtcagcatgggggctacgagatcccggcccggctccgcatcctgcacaacctggtgatccaatacgcctcacagggccgctacgaggtagctgtgccactctgcaagcaggcactcgaagacctggagaagacgtcaggccacgaccaccctgacgttgccaccatgctgaacatcctggcactggtctatcgggatcagaacaagtacaaggaggctgcccacctgctcaatgatgctctggccatccgggagaaaacactgggcaaggaccacccagccgtggctgcgacactaaacaacctggcagtcctgtatggcaagaggggcaagtacaaggaggctgagccattgtgcaagcgggcactggagatccgggagaaggtcctgggcaagtttcacccagatgtggccaagcagctcagcaacctggccctgctgtgccagaaccagggcaaagctgaggaggtggaatattactatcggcgggcactggagatctatgctacacgcctcgggcccgatgaccccaatgtggccaagaccaagaacaacctggcttcctgctacctgaagcagggcaagtaccaggatgcggagaccttgtacaaggagatcctcacccgcgctcatgagaaagagtttggctctgtcaatggggacaacaagcccatctggatgcacgcagaggagcgggaggaaagcaaggataagcgccgggacagcgccccctatggggaatacggcagctggtacaaggcctgtaaagtagacagccccatagtcaacaccaccctgcgcagcttgggggccctataccggcgccagggcaagctggaagccgcgcacacactagaggactgtgccagccgtaccgcaagcagggtttggaccccgcaagccagaccaaggtggtagaactgctgaaagatggcagtggcaggcggggagaccgccgcagcagccgagacatggctgggggtgccgggcctcggtctgagtctgacctcgaggacgtgggacctacagctgagtggaatggggatggcagtggctccttgaggcgcagcggttcctttgggaaactccgggatgccctgaggcgcagcagtgagatgctggtaaagaagctgcaggggggcaccccccaggagccccctaaccccaggatgaagcgggccagttccctcaacttcctcaacaagagcgtggaagagccgacccaggtaggggcaggcgggtgtctgggcactgggcagctgcggccggggctgcatgcgtgctgccaagcttccctccagcatgcctcttcatccagcaacagttcctggctctgtctcaggcctactttgggctggacaacggggagacacgaggggaacccagcctctcctgggggtggacgtgtaaacggccagtgctaacaccgtcactgtggagatggacgggagtgtcagggcaccagggtgtggccttgggtcagaactgccattgcctctgcccagctcagggattccggctgcctctgccaggtcagaccccttcaggccagggaggcacagactggcagcagcacagggctgagccacctgccccctctgcccacagcctggaggcacaggtctctctgacagccgcactctcagctccagctccatggacctctcccgacgaagctccctggtgggctaatgctgaaggggcagccagtcaccagagcgcccacctggcacacccccctcaccccagccctgcgcatgggcctgctgcttgtcccgcctgtctctcccacagcccctgtcttttctgttcaatctcagggtaaccttctcccttgtcatctcagcctgagccctggaggctgggcctgcccactccagctccatcccttatttattccttccagcagggccctcttccctaggttcgggccagcaggaggtgccggctggagtctccaccatagactcagtggcctggcctccccagaccccagagccaagaacactaagcactcgccggcccttcggcaccctcgccctccctcccgactcaacccggccgttgcttctgtatatagagaaataagttattggccgcgcgcctcccttcagtccacggtactacccgggcctcccctcgtccctcttctagtggtaccgcccaggccttaatcacccccattccgtgcggtggtatctcccaggctctacattctcgggagcggcgcctcccaagggggtcctgggaccttctcgcgctcctcctggcctctgagggatgcgtcctacccgcgccatcgccccgtggcccaggacggggacctccccttagtccgtcctcccaccgccgggccctgccccgcatcccggccttatgcactgcccctcccacccggccccgcccaggcacggccgaccccgccccgggcaccgcccaccgagccatcctgcctcgcctccccccacgcctgcagcttctcgcgaggggcggcgacggtcccctggtggcaggaggggctccccctgttgcgggtgaggcggctgctctctattttcagatgttgctgtagaaataaagacggtttaaatctg

SEQ ID NO: 2153 - DNA, 3776 bp, Homo sapiens
agtttttctggagaaagtattctttctcctgttgatttgatgaagcatgcttcttcttcacaggtttcatggggaagggtatcgggaaggctatgaagaaggcagtagtttgggtgtgatggagggaaggcagcatggcacgctgcatggagccaaaatcgggtctgaggtaagtgggaacccccatctggagatgaagcctcttcatttacaatttataatttatttcgatattcagtgtgatggagtaagaattgtcaggccttttaaaatcacagtgccggatgggcgcggtgactcacacctgtaatcccagcactttgggagtctgaggtgggtggatcgccttgaggtcaggagttggagaccagcctgaccaacatggtgaaaccctgtctctactaaaaatactgaattagctgggcatggtggtgcatgcctgtaatcccagccacttgggaggctgaggtatgagactcgcttgaacctgggaggcagaggttgtggtaagccgggaccgtgccattgcactgcagcctgggcgacaggatgaaactccatctccaaaaaataaacaaaaaaaatcacagtgcctttgcatgggagttaatggactagatggactgttgctggagaaatattcttagtacagaaccaagagtgcattttgctgtaggtagatacaattaaattatgcatgctggataaaagaaaacaagtccctggtctccttagtttacttgggagtgtcatggtgctggctcatgtactaagccaaagaatgggtgccctctgtcatgtgaacatattccatttatgtttacgttgaaatttcattaactttatgatttttttttttctcttcttgccctttgtcctagattggcccttacagataagtggcccttagtggcaaagtctgagttgaggcagttatgactatattggatgttcgatgctgtgaaacagatcaccacaaaattcatgggcttaacacagcaaatatggatgatctcacatgtttctgagggttgggaactcaggagcagctttgctgggtggtcctggctcagggtgtcagccagagccgtgtcacctgaaggcttgactgggcttggaggatctgcctccaaggtggtgctgtcacctgactgtgggcatggacgtctccatggggctgcttgtgtgtcctcgtgacattcaagagcgagtggtccaagagagctggtgaggcaagtgacactggcttttattcctagactcaggagctttgtgctgttcctccacattctgttggttacgaaagccaccctggtggagtgtcgagggacctgcacagggcatgggtaccaggagatgaggactggggcatctgggaggctggctgccccaccgatgacctaatttcctaatttccattgcctaatgctcaacaggtgcttccagaacaatagtgtgagaagcaccgctgccttctgcccccaccttttgttttgagatcttggtaatgaaagtgtagctagttgcttattaatttcactcttaaatatttttcacattcacagatcgggtgctaccaaggttttgcttttgcatggaaatgtctactgcacagttgcaccactgagaaggacagcagaaagatgaaggtcttagaatcattgattggaatgatccagaaattcccttatgatgaccctacttacgataaactccatgaagacttagacaagatcagaggaaaatttaaacagttttgttcgttactcaatgttcagccagactttaaaattagtgcagaaggttccggactttcattttgaggaggatggatgaacagagaccgaacgtcgaggaacagatgtgtgtgtgacgtgtttagaaatgcggtgaagggccagacggtgctgggaaggcagttgttcattgggagggtgagggttccggttcggccgtgggagggcttccttccctggggttttctgcctgtgtcaccttggtgcccgtcttggggcctcgccacacatgccctttgttgggctgaagccgtccctggcagagccctcgtgcattgacttgacagcctctccggcagcacaggcctagctggttctgggttggagttggctctggatagggtcagtcaccaggcctggactgaaggcagttatttttattattattattatttgcaatgagagagatggttggccccgaatgaggctcatgggaggtttggacgggtgctgtgccgcatgtcgaggccgattgtgtgccaggcggtgcgggacgtgcctcccgtgtgttatttaatcccttcaggagcccacaagatgggtgttattctcattttacagaggagggaggggagacgcgaagggattgcctggtctaagggcacccagcagcagagctaggacttccgccctaaggctgtgcctcactgccaccaggcacagccgcctccggaatgcacaggcgagtccctgccctccctcccaggccgcacaggtcctgccaagcctcacggagcacgggggagtctgtggtggccagtttacctgggcatctggctgagaggaagaaaggccaacctgatcctgaggggacccagacatatcctttgcactgtccctagaggggcgatgagctttgcagcattaaaaaatggtgaaggggggaaatattttgaaccaaagaccaaatgttaggccgccgttatatttgcagaagctttgagaaccatgcgtatagcctcctgcattctcccctctcctaggagctcttttgtctctgtccttacgaggcgtcatacagaggcagtggggtgggcacagatgagcagagtggatggttcggtgggtccccacgaggcgagtggtggtcatatgtgatggcacgtgttcacacaccctcctgtgtacccccccagggtcaccgaagtccctacacgctggctctccacacccctcctgttccagaaagcatgtccgaaagcagtccaggagattattaaggggtcgccatgaatccactttggttttaaaaccattcccgaatgtcctagtggattgtgttgtgctgcctaagctgccggctgcaggagccagagaagtgacccccgcgggagcagcggcaggtggatctccacggtggctcgctttgtttttgttttgttttttcttttaagacggagtctcactctgtcgccgagtttggagtgtattggcgcgatctcggctcactgtaacctccgcctcctgaattcaagtgattctcctgcctcagcctccctagtagctgggattataggcgccccccaccacgcccaagtaacttttgtatttttagtagagatggggttttgccttgttggccaggctggtcttgaactcccagcctgaaatgatccacccacgtccacctaccaaagtgctggaattgcaggcatgagccaccactcccggcctgctttttgtttttgaagacaggacttaggtctcctcctcccgaactctaaacctgcgtgtgtggctgtgcaccgctcgtttgtagcgtcacctcaggtctggggaagtctgtgctggcatctcctcattgtgccttcatcagagctggtgccttcgggccagaaagactctcgttctttctagatggtgggatcaggggcctttgctgtgtttcccttggtggatttttgtgttttgtaagttgtctattttgataatgtattatttttataactgtaaaaaaagtaaatagcatattttaaagtg

SEQ ID NO: 2154 - DNA, 4073 bp, Homo sapiens
gtcatgccttcccaccccacaggctctgcagacccagccagcggggctgaccacttgtgcctgggaagccagtttcctttccttccttggaccactggcatgcctgtgccttgcacggccagggactcgcagctgttccagttgcagactttctgacttgcgttttcagccgagaatgcaggctgataaatgcaggacaagtagtagaagtgtcaaaaaggaactggtgattgagtcccccctgcaatacaaggatgcagctcagggcgaagtggaagcagagagcccgggccctgtgccggcaaagccaaagctaattgagccactcgactatgaaaatgtcatcgtccagaagaagactcagatcctgaacgactgtttacgggagatgctgctcttcccttacgatgactttcagacggccatcctgagacgacagggtcgatacatatgctcaacagtgcctgcgaaggcggaagaggaagcacagagcttgtttgttacagagtgcatcaaaacctataactctgactggcatcttgtgaactataaatatgaagattactcaggagagtttcgacagcttccgaacaaagtggtcaagttggataaacttccagttcatgtctatgaagttgacgaggaggtcgacaaagatgaggatgctgcctcccttggtccccagaagggtgggatcaccaagcatggctggctgtacaaaggcaacatgaacagtgccatcagcgtgaccatgaggtcatttaagagacgatttttccacctgattcaacttggcgatggatcctataatttgaatttttataaagatgaaaagatctccaaagaaccaaaaggatcaatatttctggattcctgtatgggtgtcgttcagaacaacaaagtcaggcgttttgcttttgagctcaagatgcaggacaaaagtagttatctcttggcagcagacagtgaagtggaaatggaagaatggatcacaattctaaataagatcctccagctcaactttgaagctgcaatgcaagaaaagcgaaatggcgaccctcacgaagatgatgaacaaagcaaattggaaggttctggttccggtttagatagctacctgccggaacttgccaagagtgcaagagaagcagaaatcaaactgaaaagtgaaagcagagtcaaacttttttatttggacccagatgcccagaagcttgacttctcatcagctgagccagaagtgaagtcatttgaagagaagtttggaaaaaggatccttgtcaagtgcaatgatttatctttcaatttgcaatgctgtgttgccgaaaatgaagaaggacccactacaaatgttgaacctttctttgttactctatccctgtttgacataaaatacaaccggaagatttctgccgatttccacgtagacctgaaccacttctcagtgaggcaaatgctcgccaccacgtccccggcgctgatgaatggcagtgggcagagcccatctgtcctcaagggcatccttcatgaagccgccatgcagtatccgaagcagggaatattttcagtcacttgtcctcatccagatatatttcttgtggccagaattgaaaaagtccttcaggggagcatcacacattgcgctgagccatatatgaaaagttcagactcttctaaggtggcccagaaggtgctgaagaatgccaagcaggcatgccaaagactaggacagtatagaatgccatttgcttgggcagcaaggacattgtttaaggatgcatctggaaatcttgacaaaaatgccagattttctgccatctacaggcaagacagcaataagctatccaatgatgacatgctcaagttacttgcagactttcggaaacctgagaagatggctaagctcccagtgattttaggcaatctagacattacaattgataatgtttcctcagacttccctaattatgttaattcatcatacattcccacaaaacaatttgaaacctgcagtaaaactcccatcacgtttgaagtggaggaatttgtgccctgcataccaaaacacactcagccttacaccatctacaccaatcacctttacgtttatcctaagtacttgaaatacgacagtcagaagtcttttgccaaggctagaaatattgcgatttgcattgaattcaaagattcagatgaggaagactctcagccccttaagtgcatttatggcagacctggtgggccagttttcacaagaagcgcctttgctgcagttttacaccatcaccaaaacccagaattttatgatgagattaaaatagagttgcccactcagctgcatgaaaagcaccacctgttgctcacattcttccatgtcagctgtgacaactcaagtaaaggaagcacgaagaagagggatgtcgttgaaacccaagttggctactcctggcttcccctcctgaaagacggaagggtggtgacaagcgagcagcacatcccggtctcggcgaaccttccttcgggctatcttggctaccaggagcttgggatgggcaggcattatggtccggaaattaaatgggtagatggaggcaagccactgctgaaaatttccactcatctggtttctacagtgtatactcaggatcagcatttacataattttttccagtactgtcagaaaaccgaatctggagcccaagccttaggaaacgagcttgtaaagtaccttaagagtctgcatgcgatggaaggccacgtgatgatcgccttcttgcccactatcctaaaccagctgttccgagtcctcaccagagccacacaggaagaagtcgcggttaacgtgactcgggtcattattcatgtggttgcccagtgccatgaggaaggattggagagccacttgaggtcatatgttaagtacgcgtataaggctgagccatatgttgcctctgaatacaagacagtgcatgaagaactgaccaaatccatgaccacgattctcaagccttctgccgatttcctcaccagcaacaaactactgaagtactcatggtttttctttgatgtactgatcaaatctatggctcagcatttgatagagaactccaaagttaagttgctgcgaaaccagagatttcctgcatcctatcatcatgcagtggaaaccgttgtaaatatgctgatgccacacatcactcagaagtttcgagataatccagaggcatctaagaacgcgaatcatagccttgctgtcttcatcaagagatgtttcaccttcatggacaggggctttgtcttcaagcagatcaacaactacattagctgttttgctcctggagacccaaagaccctctttgaatacaagtttgaatttctccgtgtagtgtgcaaccatgaacattatattccgttgaacttaccaatgccatttggaaaaggcaggattcaaagataccaagacctccagcttgactactcattaacagatgagttctgcagaaaccacttcttggtgggactgttactgagggaggtggggacagccctccaggagttccgggaggtccgtctgatcgccatcagtgtgctcaagaacctgctgataaagcattcttttgatgacagatatgcttcaaggagccatcaggcaaggatagccaccctctacctgcctctgtttggtctgctgattgaaaacgtccagcggatcaatgtgagggatgtgtcacccttccctgtgaacgcgggcatgactgtgaaggatgaatccctggctctaccagctgtgaatccgctggtgacgccgcagaagggaagcaccctggacaacagcctgcacaaggacctgctgggcgccatctccggcattggtaacgctccatgctcttgtgggcttctctccaccatcactctgaaagtgtcttggagccaatagttggtgaacgtgtcacacttgtgtggtaggaccttgaagtctaagttgctttcctgagtattcttttcctgcttgtgatagtcaacaactgaaacccctcagccatgccctgaaataaaggtcccggatgcctgag

SEQ ID NO: 2155 - DNA, 5297 bp, Homo sapiens
ataggattgtcttgactatatgggctatttttggttccatatgaaatttaaagtagttttctccaattctgtgaagaaagtcagtggtagcttgatgggaatagcattgaatctataaattactttgggcagtatggccatttcatgataattgattcttcctatccatgagcatggaatgtttttccatttgtttgtgtcctcttatttccttgagcagtggtttgtagttctccttgaagaggtcttttacatcccttgtaaattgtattcctaggtattttattctttttgtagcagttgtgaatgggagttcactcatgatttggctctctgtttgtctattattggtatataggaatgttgtgatttttacaaatcagttttgtatcctgagactgctgaagttgcatatcagcttaaggagattttgggctgagacgattgggttttctaaatatacaatcatgtcatctgcaaacagagacaatttgacttcctgtcttcctatttgaataccctttctttctttctcttgcctaattgccttggccagaatttccaatactatttttatttttttgagatggagtcttgctttgtcacctaggttggagtgcagtggcgtgatcttggctcactgcaacctccatctcctgggttcatgcaattctcctgcctcagcctcccgagtagctgggattacaggcatgtgccaccacgcctggctaagttttgtatttttggtagagacagggtttcaccatattggtcaggctggtcttgaactcctgacctcaagtgatccacccacctcagcctcccaaagtgctgggattacaggcatgagccaccacacccggctttccaatactattttgagtaggagtggtgagagagggcatccttgtcttgtcccagttttcaaagggaatgcttccagcttttgcccattcagtataatattggctgtgtttgtcataaatagctcttattattttgagatacattccatcagtacctagttgattgagagtttttagcatgaaggggtgttgaattttattgaaggccctttctgcatctattgagataatcatgtggtttttgtcatcggttctgtttatgtaattgattacatttattgattggcgtatgttgaactagtgtttcatgctagggatgaagctgagttgatcatggcggataagctttttgatgcgctgctggattcatttggtttgccagtattttattgaggattttcacatcgatgttcatcggggatattggcctgaaattttttcttttgttgtgtctctgccaggctttgttatcaggatgatgctggcctcataaaatgagttagggaggagtccctctttttctattatttggaatagtttcagaaggcatggtaccagctcgctcccctttgtaccgttagtagaatttggctgtgaatccatctggtcctggctttttttggttggtaggctattaattactgcctcaatttcagaacttgttactggtctattcaggggttcaacttcttcctggttaagtcttgggagggtgtatgtgtccaggaatttatccatttcttctggattttctagtttatttgcgtagagttgtttatcgtattctctgatggtagtttgttgctgtgggatcagtgttgatatcccctttatcatttttcattgtgtctatttgattcttctctcttttcttctttggtagtgttgctagtggtctatctattttgttgatcttttcaaaaaacctcctcctggatttgttgatttttttttttttttttttgaaagggtctttcgtgtctctatttcctccagttctgctctgatcttagttatttcttgtcttctgctagcttttgaatttgtttgcacctgcttctctagttcttttaattgtgatgataaggtgtcaattttaggtcttttctgctttcttttgtgggcatttagtggtatagatttccctccaaagactgctttggctgtgtaccagagattctagtaggttgtgtctttgttctcattggtttcaaagaacttatttatttctaccttaatttcgttatttacccagtagtcattcaggagcaagttgttcagtttccatgtagttgtgcagttttgagtttcttaatcctgagtcctaatctgattgcactgttgtctgagagactgttataattttctttcttctgcatttgctgaagtgtgttttacttccagttatgtggtcaactttagattaagtgcgatgtggtgccgagaataatgtatgttctattgatttggggtggagagttctgtcgatgtctattacgtctgcttggtccagaggtgagttcaagtcctgaatatccttgttaattttctgtctcattgatctaatattgacagtggggtgttaaagtctcccattattattgtgtgagagtctaagtctctttgtgggtccctaaaaacttgctttatgaatctgggtgctcctgtattgggtgcatatatatttaggatagttatctcttcttgttgcattcatccctttaccattaggtaatgccccctcccccacctttttttttttgagacggagtcttgctctcttgcccaggctggagtgtagtggcacaatctcagctcactggaagctctgcctcctgggttcacgccattctcctgcctcagcctcctgagtagctgggactacaggcgcccgccaccacgcccggctaattttttgtatttttagtagagacggggtttcaccatgttaaccacggatggtcttgatctcctgacctcgtgatctgtccacctcggcctctcaaagtgctgggagttacaggtgtgagccactgcacctgaccccttctgttttttatctttgttggtttaaagtctgttttatcagagactaggattgcaactgctgctttttttttttgctttccatttgcttggtaaatattcctccctccctttattttgagcctgtgtttgtctttgcacatgagatgggtctcctcaatatagcacactgatgggtcttgactctaattttccagtctgtgtcttttaattggggcatttagccgttttacatttaagattaatattgttacatgtaaatttgatactgtcattatgatgctagctggttattttgcccattagttggtgcagtttcttcatagtgttgatggtctttacagtttggtatgtttttgcagagggtggtaccggtttttctttttcatatgtccatccttcaagagctcttctaaggcaggcctggtggtgacaatctctcagcatttgcttgtttgtaaaggattttatttttccttcgcttatgaagcttggtttggctggatatgaaattctgggttgaaaattattttctttaagaatgttgaatattggcccccactttcttctggcttgtagggtttctgcagagagatctgctgttagtctgatgggcttccctttgtgggtaacctgacctttctctctggctgccctgaacattttctgttaggcattttttagatctgttttttttttctttagacggagtcttgctctgtcacccaggctggagtgcagtggcgcaatctcagctcactgcagcctctgccccctgggttccagcgattttcctgccttagcctcctgggtggctgggactacaggtacatgccaccacgccctgctaatttttgtatttttagtagagatggggtcttgccatgttggccaggctggtctcgaactcctgaccttgggtgatatgcccgccttggcctccaaagtgctgggattacaggcgtgagctaccacgcctggcttagatctgtgtgttattgttagtggttcctggagcatttttagtttcctttagtggtgttatgtttgcctgatccttcataagtcatgaagccttgttttgatgtccttgcatctgaaggagtaaatacctctttcagtcattatagactagtttggggaggtaaatatcttctgttggattctgggctgatgagatttccactgagattgtaataaagtgtttcagatccaggtcacataagtcctactgggtctgcagtgaaattcatgcttgggagacctgttatctgggcatcagacagttgtggattctatctattttctgagaagactgaactttcttcaagatgttgatcaatatgactggcactgaggaaaaaagcttccagttatatctgcagattaaggtgctgatacaaatcaatgtgagcaggtgtggctcccgctgtgtcgctcttgcgaggtatttggaaatgctctaacctagtcattggacaggttcctaaatgagcagtactgacccttgatcacagctaagagggtgtggaactgattcatagggctgcttcaggatacacagctgagaccaaagtcttcaggtctgtttttgggttcatggcatttctccctccagatttctgggttggcaggacttctttcagactctaggtgacagagaccagagcttggttataggactgcttcacgattcacagtgggaataaagtcagcatgcctacaggggcacatacaggtgtgtcttttggcaggtcccaggttaggaaaaaattcttccggactttggttgcatggacttggaatcaggttatagtgccacgtcaagatccaccataaataaatattggcaagtctacatccaggggcacagatggatgtttctctctgtgggtgtctgggcaggatttcttccacaccatgactgatatgtgcaaagggtggattttgggctaattcagagatcacagatagaaccaacttctaaaggcctttcacctgaggcataggtgtcttggtttaggtgtcttcacagatggtgctagtagcaggaacaaaaccaaatggtctacagctaagtctacaatgaaaattggacacattttattctgtagctgggactgtgatgggcaagcatgccactcaagcaagggcatgtcttttcaatacagccctcctcagtcttgggttcacaacccttgacatggattccaaagctcccataaagttccttttttcaggacataactgctgcttttttataactgtagaagttgtgggtagagaacctcctgccatcttactgtgttttcagtttctgatacattctatgtcaaatttatctgatttcaaattcaaaatttctgaaataaaatgctcacattt

SEQ ID NO: 2156 - DNA, 3761 bp, Homo sapiens
caggacacctgactgatagtgaatgtaatcagaaacacacatccaagaaagggtcactgatagagcgcaagaggagctctggtcgggttaggaggaaaggcgatgagccccaggcctcgggataccacagtgaaggagaaacactgaaagagaagcaggctcctagaaatgcctccaaaccatccagcagcaccaacaggctgagagattttaaagagacagtcagcaatatgatccataacagaccatccctggcttctcagaccaatgtaggctctcactgcaggggcagaggaggagaccagcctgacaaaaaacctcctaggaccctgcctttacactctcgtgactgggaaatagagagtaccagcagtgagtcaaaatccagttcttccagcaagtatcgtcccacatggagacccaaacgagaatctctgaatattgacagtatctttagtaaggacaaaaggaagcactgtggctatacccagcttagccccttttctgaggattcagctaaagaatttataccagatgaaccaagcaagccaccttcttacgacattaaatttggtggaccaagcccccagtacaagcgctggggcccagcacggccaggctctcaccttttagagcagcacccccgactaatccagcgaatggaatctggctatgaaagcagtgagaggaacagcagcagccctgtcagcctggatgcagccctgcctgagagctcaaatgtctacagggatccaagtgctaagagatcagctgggttggttccttcctggcgtcatatcccaaagtcgcacagcagtagcatcctggaggtagactccacagcatccatgggtggctggacaaagagtcagcctttctctggtgaggagatatcttctaaaagtgaactggatgaattgcaggaagaggtggccaggagggcgcaggaacaggaacttcgaagaaaacgggagaaggagttagaggcagcgaaagggtttaaccctcatcctagccgcttcatggacttggatgaactgcagaatcaggtgaacagcctatcccgctccaagtattgttaagccaagaggcccaactggaatccggcatggatacagagtttggggccagttctttcttccattcacctgcttcctgccatgagtcacactcatcactatctccagagtcatctgccccacagcacagctcccccagtagatctgccttgaagcttctgacttcggttgaagtagacaacattgaaccctctgcattccacaggcaaggtttacctaaagcaccagggtggactgagaagaattctcatcatagttgggagccattggatgccccagagggtaagctgcaaggctctaggtgtgacaacagcagttgcagcaagctccctccacaagaaggaagaggcattgctcaagaacagctgttccaagaaaagaaggatcctgctaacccctccccggtgatgcctggaatagccacctctgagaggggtgatgaacacagcctaggctgtagtccttcaaattcatcagctcagcccagccttcccctgtatagaacctgccaccccataatgcctgttgcttcttcatttgtgcttcactgtcctgatcctgtgcagaaaactaaccaatgcctccaaggccaaagcctcaaaacttcattgactttaaaagtggacagaggcagtgaggagacctataggccagagtttcccagcacaaaggggcttgtccgttctctggctgagcagttccagaggatgcagggtgtctccatgagggatagtacaggtttcaaggatagaagtttgtcaggtagtctaaggaagaactcttccccttctgattctaagcctcctttctcacagggtcaagagaaaggccactggccatgggcaaagcaacaatcctctctggagggtggggatagaccactttcctgggaagagtccactgaacattcttctcttgccttaaactctgggctgcctaatggtgaaacttctagcggaggacagcccaggttggcagagccagacatataccaagagaagctgtcccaagtgagagatgttaggtctaaggatctgggcagcagtactgacttggggacttccttgcctttggattcctgggtgaatatcacaaggttctgtgattctcagcttaagcatggggcacctaggccaggaatgaagtcctcccctcatgattcccatacgtgtgtaacctatccagagagaaatcacatccttttgcatccacattggaaccaagacacagagcaggagacctcagaattggagtctctgtatcaggccagtcttcaggcttctcaagctggctgttctggatgggggcagcaggataccgcctggcacccacttagccaaacaggctctgcagatggcatggggaggaggttgcactcagcccatgatcctggtctctcaaagacttcaacagcagaaatggagcatggtctccatgaagccagaacagtgcgtacttctcaggctacaccttgccgaggcctcagcagggagtgtggggaggatgagcagtacagtgcagagaatttacgtcgcatctcacgcagtctcagtggcaccgttgtcccagagagggaggaagctccggtttcttcccacagttttgattcatcaaacgtgaggaagcctttggaaaccgggcaccgttgttccagctcctcttccctccctgtcatccatgacccttctgtgtttctcctcggtccccaactctaccttccccaaccacagttcctgtccccagatgtcctgatgcccaccatggcaggggagcccaatagactcccaggaacttcaaggagtgtccagcagtttctggctatgtgtgacaggggtgaaacttcccaaggggccaagtacacaggaaggactttgaactaccagagcctcccccatcgctccagaacagacaactcctgggcaccctggtcagagaccaaccagcatattgggaccagattcctgactactccagggtgcaatcctcaactaacctacactgccacactaccagaaagaagcaagggccttcaggttcctcacactcagtcctggagtgatcttttccattcaccctcccaccctcccattgttcatcctgtgtacccaccatctagcagtcttcatgtacccctgaggtcagcttggaattcagatcctgttccagggtcccgaacccctggtcctcgaagagtagatatgcccccagatgatgactggaggcaaagcagttatgcctcccactctggacacaggagaacagtgggagaggggtttctgtttgttctatcagatgctcccagaagagagcagatcagggctagagtcctgcagcacagtcaatggtaaaggttattcctttcctttcctggagctacacctttctttgtaaaactgtactgtgggccgggcgcggtggctcacacctgtaatcccagcactttgggaggctgaggcgggtggatcacgaggtcaggagattgagaccatcctggccaacatggtgaaaccccgtctctaccaaaatacaaaaaattagccaggcgtgacggtgcgtgcctgtagtcccaactactcggaaggctgaggcaggagaattgcttgaacccgggaggcagaggttgcagtgagccgagatcgcaccactgcactccagcttggcaatagagtgagactccatctc

SEQ ID NO: 2157 - DNA, 4877 bp, Homo sapiens
agctatgggctggaggccccggagagctcgggggaccccgttgctgctgctgctactactgctgctgctctggccagtgccaggcgccggggtgcttcaaggacatatccctgggcagccagtcaccccgcactgggtcctggatggacaaccctggcgcaccgtcagcctggaggagccggtctcgaagccagacatggggctggtggtcctggaggctgaaggccaggagctcctgcttgagctggagaagaaccatggcctgatcaccctcagcaggaatgccagctattatctgcgtccctggccaccccggggctccaaggacttctcaacccacgagatctttcggatggagcagctgctcacctggaaaggaacctgtggccacagggatcctgggaacaaagcgggcatgaccagccttcctggtggtccccagagcagggtcaggggcatcgatcggatgggagtgggaatgctgtatctatagccctccaaatcagaagagacaggaattcacaggcctcgagtcccagtatttttattgaagtctgaagaaacaagttccagaaaacatgttaaacttccttctgggagctgggattggtggtcagggctcaagcccagcagcttccactcagggtccccatttgcacctccgcagggcaggcgagaagcgcgcaggacccggaagtacctggaactgtacattgtggcagaccacaccctgttcttgactcggcaccgaaacttgaaccacaccaaacagcgtctcctggaagtcgccaactacgtggaccaggttgggggcggcggggagagagcggtgatgggggtggcggcggcaggacaggcaggtgctggtggggtttggggaagaggaagggcgccccacgaaggaccaccggcgcgatggggcgccctgtcccggcttcagccccgcctcgccctcagcttctcaggactctggacattcaggtggcgctgaccggcctggaggtgtggaccgagcgggaccgcagccgcgtcacgcaggacgccaacgccacgctctgggccttcctgcagtggcgccggggactgtgggcgcagcggccccacgactccgcgcagctgctcacgtgggtgcctctgacccggacgcgggtcccgggtggggcggcctcacctcccggccccgcctggtcacgccgcgctccgcccccaggggccgcgccttccagggcgccacagtgggcctggcgcccgtcgagggcatgtgccgcgccgagagctcgggaggcgtgagcacggtgagccccgcgggcgggggcgagggagagacaggaggctctacggccgcagtgaccgccctcccacggccccccaggaccactcggagctccccatcggcgccgcagccaccatggcccatgagatcggccacagcctcggcctcagccacgaccccgacggctgctgcgtggaggctgcggccgagtccggaggctgcgtcatggctgcggccaccgggtacgcgggtggggggtcggggctgcggcggggcggctagtcctggggacttcctccgctgcgtttctttggtcgtccctcagtttcctcttctgtaaaatggggataatgatcatagtgtccgcttcagggtggtttatgaggcttaaagggaagaagctcaggcaaagtggattctcaacggtatgaagattattttccgagtaacctggcgaggttactcctacaccgggaggagcaccgtcgggtcgcgattccaccttgggtcccgggctgctcactattggggccgcatcgtcccctgtcccgcttgttgtgtgactttgcgcgggttacttcccctctctgggctctgcgcgtctggcggctgtagccaagcccaggggtggggatcagagaagcgcgggggttggaggactgtccctccatgcccaatgccctccccgtgccggtaggcacccgtttccgcgcgtgttcagcgcctgcagccgccgccagctgcgcgccttcttccgcaaggggggcggcgcttgcctctccaatgccccggaccccggactcccggtgccgccggcgctctgcgggaacggcttcgtggaagcgggcgaggagtgtgactgcggccctggccaggttaagtcggctcgcccggcccccacttgccctctccgctcaggtctggggcgctgcgccctcacctgggcccttcttgcctttctggtcccaggagtgccgcgacctctgctgctttgctcacaactgctcgctgcgcccgggggcccagtgcgcccacggggactgctgcgtgcgctgcctggtgagggcatggaaggttcagggtgagggtttcgtggagcttgggagccggcctgttggccttagttaattggtgccctcaggttcccccgttgggtgctgggcttgggtaggcctggctcccccagctccgagccgcgctctcggcatggacctctcactgcacgtggcctctctctgccttccccaccacccgtcacctgcgcagctgaagccggctggagcgctgtgccgccaggccatgggtgactgtgacctccctgagttttgcacgggcacctcctcccactgtcccccagacgtttacctactggacggctcaccctgtgccaggggcagtggctactgctgggatggcgcatgtcccacgctggagcagcagtgccagcagctctgggggcctggtgagaggacacgagcacccttgcaccctgccccccatcctctggtggggccagttttctactgtggggaagatgggcaggggaaactgaggcccgctgagcgcagcccctctccgagctgcccccagcctggcccatgcttcctcaggctcccacccagctcccgaggcctgtttccaggtggtgaactctgcgggagatgctcatggaaactgcggccaggacagcgagggccacttcctgccctgtgcagggagggatgccctgtgtgggaagctgcagtgccagggtggaaagcccagcctgctcgcaccgcacatggtgccagtggactctaccgttcacctagatggccaggaagtgacttgtcggggagccttggcactccccagtgcccagctggacctgcttggcctgggcctggtagagccaggcacccagtgtggacctagaatggtgagctctgcccacccgacccctccttgccgtttgaatcccgcaggccagtgtccccctcactgcctggtgcactgcccgtaggtgtgccagagcaggcgctgcaggaagaatgccttccaggagcttcagcgctgcctgactgcctgccacagccacggggtgagagcccgaggagtgggggtgaccttggggttcctaatcctacgtgaccctcctcttctcttctctgcaggtttgcaatagcaaccataactgccactgtgctccaggctgggctccacccttctgtgacaagccaggctttggtggcagcatggacagtggccctgtgcaggctgaaaaccatgacaccttcctgctggccatgctcctcagcgtcctgctgcctctgctcccaggcgccggcctggcctggtgttgctaccgactcccaggagcccatctgcagcgatgcagctggggctgcagaagggaccctgcgtgcagtggccccaaagatggcccacacagggaccaccccctgggcggcgttcaccccacggagttgggccccacagccactggacagtcctggcccctggaccctgagaactctcatgagcccagcagccaccctgagaagcctctgccagcagtctcgcctgacccccaagcagatcaagtccagatgccaagatcctgcctctggtgagaggtagctcctaaaatgaacagatttaaagacaggtggccactgacagccactccaggaacttgaactgcaggggcagagccagtgaatcaccggacctccagcacctgcaggcagcttggaagtttcttccccgagtggagcttcgacccacccactccaggaacccagagccacattagaagttcctgagggctggagaacactgctgggcacactctccagctcaataaaccatcagtcccagaagcaaaggtcacacagcccctgacctccctcaccagtggaggctgggtagtgctggccatcccaaaagggctctgtcctgggagtctggtgtgtctcctacatgcaatttccacggacccagctctgtggagggcatgactgctggccagaagctagtggtcctggggccctatggttcgactgagtccacactcccctgcagcctggctggcctctgcaaacaaacataattttggggaccttccttcctgtttcttcccaccctgtcttctcccctaggtggttcctgggcccccacccccaatcccagtgctacacctgaggttctggagctcagaatctgacagcctctcccccattctgtgtgtgtcggggggacagagggaaccatttaagaaaagataccaaagtagaagtcaaaagaaagacatgttggctataggcgtggtggctcatgcctataatcccagcactttgggaagccggggtaggaggatcaccagaggccaggaggtccacaccagcctgggcaacacagcaagacaccgcatctacagaaaaattttaaaattagctgggcgtggtggtgtgtacctgtaggcctagctgctcaggaggctgaagcaggaggatcacttgagcctgagttcaacactgcagtgagctatggtggcaccactgcactccagcctgggtgacagagcaagaccctgtctctaaaataaattttaaaaagacatatt

SEQ ID NO: 2158 - DNA, 3668 bp, Homo sapiens
gcagagctccacgtctagatgttctgctaaggtccacctgtcatggggtcccttcccagtgtcccgagggttcatctgacacgtcagagccaggcagggccctgcctcaggccccctaccgcctccccacacagctgtgccctggagggaagggctctgccccgctgcgtccttccccacaggccctgagccctctcattgcccgcccgacagccctgtgtgtccgtgctggaggttgcgggtaatgcctgcgtcctctcccctgggcccccctgtctccctggggggaccagcagtctccaagaagacttggcatgtggaaggcacctttggcctttgtgtgtggcgggccggcgagcaggccctgtgcagggtgttgtcagcagaagtagggattgccctgggcctggtgagggttggggaagcactctcgggtctgacagtgtcccttcaccctccctcccctcctccctgaatgaggtagggcaccaggcagctccttgagggctcaggcactgttggaaggggagtgggctggggagcggggcgtctgcagcttctgtgtttgtgtcgagtgctgctcgctgttgagaatgtgaacgggtcagagctctgtgttgatgtgcagtgagcactgatggagcacacagaacctggacgcagaaccaggcttccaaagggacagagaaacagtcaattaacactgggaaagggaagatgggcaaaagggaacaagtgggcaggcgttcgggagcctgggctgaggccgccatgctgtgcttccttttgcaggttgaggcctctggtgtctacgcagccagcaaagaaggtggccacgggagaggtgtgttgtcccacgcagccagggcagggagaccttgggaggcagcccacttcttcctgggcccagatgcttggtctgtgaccacagggagagcaggcctgacagaggcgcctgcccctgctgccccatacttgcctggcatggccagagaatcgaggcccgagggtgggagctcccggttgctggagcaggagcgggcaggaagtggggaccgttgtgtgcctgctgctcagcgctcgggccaaggctgagcagccttgctgtgggcctggtgcctgcagggagcctgtatgtaggaagcaggcactgccaggtcacagggcccagccctccagggctcaggggtctttcacctggactgtcacttgttggggactggtctggcccaggaaacgagggtgaaggtgctggcaggtggcgggggctggggcaggggccggagcagagcctctgtctgtgttctgggggtcagggcaggccaagcccccgggggctgaggccacattgtcctcggccgaggcctatggtctggaaaggtgttctgcatgctccccgagcactggggtggggcccagtaggatacaggagcaggggctggcagaggcctgagggtgggatcttgatgctgacacagctcatggcacagcccccaggaggccagaaggggccagtgggcctgggagccctggccaaccccgggagccactggtgtggcgggagtggctgagcatcctgggccagccctggtgggtctgaggggtctgttgagatacacagggctcccagctctgtgtgtgtcagagccccacttcgttccaggctttgctcccaagctctcccaccctcggagctgagcctgccaggccccaggcggtgctggtggagagcgggcccgtgtcataccacgccgacgaggaggctgacgaggaggagcctgacgaggaggacggggagccctgcgtcagtgccctgcagatgatgggcagcaacggtgggtggggcccgacaacagggaggggttcaagggaaataaaggcatcagctactgcccctcatgatccctgaacttgggcctgttagcttcaaactaaatttctgtttctccctggaaagaaatttgaactaagacattttgtaaattggtcatgtcgattgtgaggttggaggcagccagggtcagagaggctagggacggtgaggtacccaccacgagggccgcccagccagcagcacgaggttcccggatctgcacaccaccacggacctgcacacccagggagggaggctgagggagcccacactgctctcaggtgccctcgacgaggagcaaggccctgctctgggtgcatgccagtcccgggaggtggagaggagcccaagatggctcctggcggggcgcggggggctggggctggggctggagcctgagtcttctaggggggcaccaggaacagggcgggttggggggtctgggctcctgggtcccacagagaccctgggcttcatgactgtgctcttctgcagactatggctgtgatggcgatgaggacgacggctactgaagtgtggcctccaggcaggtgatgtcctggcagggggcctcgcgggtctcctcagcatcagacgggcttccaggaccgcagcaggcaggccccagcgccgagactcctggtgacaggtggcacctgtcccacagccctcgtcccatgtggaacttaccattgggattgtgtttctattcagcaagggaaaccggaccaagcgtctgcatgtgtgtgatcagatgtgggccgggtgtgtgcagggctgggtcccgctgcctgccgtcgactcatccaaggaccctccaaggctggcagtgtggtgttgctactattaaggaaacaggcttggggcagccccactgctggtccaagtgtgtggagggctgagtgtgctggccctgtgactcaggaccagctctggagtctccagcccaccctccgcaccgtcccctcctgagcagcactcggcgccagcagcctctgccagagtggaagccagagccctgcaggtgtccggcgcagccgtgggagctgaggatctggcacttgagaggcagcagctccttgaaggtcctctgcctccagctgtggccctgcatccagatacctgcctcgtccgaggcagacacccccacccctgcctcctccagacccccctccccgctgcctgcaccgcctggagcagcatgggggtcagacccctgctccagggccacttgagttgtgggcccaggagccctgcggctgccggcaggtgaactgagtgcccgacagctgagaccggcgcccacccgtcctgagcatagctctgtaggcagtgcgggcatagcctgcatagtgtcctggcgctgggagttgcccgtggacagagccagagggcagtggcgctccctgtcagagctggatcaggccccccatcgaggagggagggcagacggaggcccgagagcctccccaggcctcttcgtgggaaggccccagtaccactcgtaggaggtctcagctctggcatggctgccccggatgtggccgagggggcttcaccctgtgtccttaggagggggtggccttgaggcagagccgtgcctcactgacccccaggggcctcatcctccccatggaatgggctgtatgtcctgccccaacttggcccgcagcaggccagacccccctacccccgcccagagctcagtagccagcctggttcctgccagggcttctcgagggcttgggggaagaatagatttagtaaagcaggaagatctgttgttacttaacag

SEQ ID NO: 2159 - DNA, 3874 bp, Homo sapiens
tttctcaagatggatgtctcctggcctgccttggtccctcaaagtgaaaaccggccattcccgccgggcctttggccgactcacccatggtgcgtggaccgtgggcgtccttgctctagcccatgcctactcctcctcttggtccctgtccctctgtgaggcatcgagttcctgaagacagcccatgagatgtggaaccctcccactcacccccacacttatctaccacccacccgaccaggccccctgtgccctacagctgagagaggacccagcagaagggagggcggctcactagcacacccctgcatggactgggtgccctgttctccatgtgaggcctaatgggaaggagttcattgccatgctttggcaaccagtacgtggctcctgcttgtcatggcagccagagggaaactgaggcacagaacctgctagaatctgggaaagttgaaaatactcccaggaaccttttctcctaacctaaccactgggcatttttgaggacgattcaacagtagaagggagggaccttgaggaaggtgcctgtcacatcatgatgcagacagataagggactcagagacggctgaggatgacatcagcgatgtgcagggaacccagcgcctggagcttcgggatgacggggccttcagcacccccacggggggttctgacaccctggtgggcacctccctggacacacccccgacctccgtgacaggcacctcagaggagcaagtgagctggtggggcagcgggcagacggtcctggagcaggaagcgggcagtgggggtggcacccgccgcctcccgggcagcccaaggcaagcacaggcaaccggggccgggccacggcacctgggggtggagccgctggtgcgggcatctcgagctaatctggtgggcgcaagctgggggtcagaggatagcctttccgtggccagtgacctgtacggcagcgcattcagcctgtacagaggacgggcgctctctatccacgtcagcgtccctcagagcgggttgcgcagggaggagcccgaccttcagcctcaactggccagcgaagccccacgccgccctgcccagccgcctccttccaaatccgcgctgctccccccaccgtcccctcgggtcgggaagcggtccccgccgggacccccggcccagcccgcggccacccccacgtcgccccaccgtcgcactcaggagcctgtgctgcccgaggacaccaccaccgaagagaagcgagggaagaagtccaagtcgtccgggccctccctggcgggcaccgcggaatcccgaccccagacgccactgagcgaggcctcaggccgcctgtcggcgttgggccgatcgcctaggctggtgcgcgccggctcccgcatcctggacaagctgcagttcttcgaggagcgacggcgcagcctggagcgcagcgactcgccgccggcgcccctgcggccctgggtgcccctgcgcaaggcccgctctctggagcagcccaagtcggagcgcggcgcaccgtggggcacccccggggcctcgcaggaagaactgcgggcgccaggcagcgtggccgagcggcgccgcctgttccagcagaaagcggcctcgctggacgagcgcacgcgtcagcgcagcccggcctcagacctcgagctgcgcttcgcccaggagctgggccgcatccgccgctccacgtcgcgggaggagctggtgcgctcgcacgagtccctgcgcgccacgctgcagcgtgccccatcccctcgagagcccggcgagcccccgctcttctctcggccctccacccccaagacatcgcgggccgtgagccccgccgccgcccagccgccctctccgagcagcgcggagaagccgggggacgagcctgggaggcccaggagccgcgggccggcgggcaggacagagccgggggaaggcccgcagcaggaggttaggcgtcgggaccaattcccgctgacccggagcagagccatccaggagtgcaggagccctgtgccgccccccgccgccgatcccccagaggccaggacgaaagcaccccccggtcggaagcgggagcccccggcgcaggccgtgcgcttcctgccctgggccacgccgggcctggagggcgctgctgtaccccagaccttggagaagaacagggcggggcctgaggcagagaagaggcttcgcagagggccggaggaggacggtccctgggggccctgggaccgccgaggggcccgcagccagggcaaaggtcgccgggcccggcccacctcccctgagctcgagtcttcggatgactcctacgtgtccgctggagaagagcccctagaggcccctgtgtttgagatccccctgcagaatgtggtggtggcaccaggggcagatgtgctgctcaagtgtatcatcactgccaaccccccgccccaagtgtcctggcacaaggatgggtcagcgctgcgcagcgagggccgcctcctcctccgggctgagggtgagcggcacaccctgctgctcagggaggccagggcagcagatgccgggagctatatggccaccgccaccaacgagctgggccaggccacctgtgccgcctcactgaccgtgagacccggtgggtctacatcccctttcagcagccccatcacctccgacgaggaatacctgagccccccagaggagttcccagagcctggggagacctggccgcgaacccccaccatgaagcccagtcccagccagaaccgccgttcttctgacactggctccaaggcaccccccaccttcaaggtctcacttatggaccagtcagtaagagaaggccaagatgtcatcatgagcatccgcgtgcagggggagcccaagcctgtggtctcctggctgagaaaccgccagcccgtgcgcccagaccagcggcgctttgcggaggaggctgagggtgggctgtgccggctgcggatcctggctgcagagcgtggcgatgctggtttctacacttgcaaagcggtcaatgagtatggtgctcggcagtgcgaggcccgcttggaggtccgaggcgagtgagctcagggggccacctgtgctccccccgctaccctccgagccgcgcccctgtctcaggcacctctcggacctcgctgtgtttcactgcctcctgcccacagacccaggcctgccggcccggacccgtcccagcctcccctccccaccccatgcagcccccagggggatagcccatgggcccctgtggacactccctccccaagtggacacatggctgtgcaggccaggaggcccacagatggactgagtgctgggaaggggcggctgtgaggggtatcaaccccccgagtctctccctgaaggggagcaccgggcgagtgcatgtgctactgctgctacaggcctgtctatctgtttgtctgtctgtgtgtctgtgacagtcagggaaggatgcctcggagctgaggtggggtgagacagagtgggagagattacggcatggcatggaggggcccaaggagcaggggctgttgacaaaggccttaccaggaagggttaggacactgaccattctagaaatgggtttcgaatggcacaacactttctatttcacaaaagaccaaaagccagaggccccaggctctgtgctgatgaacagcctggctgagccctggccctggcaggtttagggcccatttggggccccctccttctctgtcagggctggggtgctctgtctgggaatgagggagttaaccaagtttggtgcaggagcaggggcagggggccactgtagtgagcgtggagaaatttggaaacacctatttcttaactcaaataaagtccagtttgtacct

SEQ ID NO: 2160 - DNA, 3896 bp, Homo sapiens
tattttttgttttatttaatttcattttataagagcagtgaattaagtacacattatggaaagtttgcaaagggtacttcctgtcaccctttttttgcacggtcctaacactgtgtacttggtacccttttcacccaacaaatgatctcaagggattgctttccctggggctacaaaggcactgtgagtgtgtgggagatgttcttgttttttttttttttttttggggcggagtctcgctctgtcacccagactggagtgcagtgagtggtgagatctcggctcactgcagcctcctcctcccgcgttcaagctattgtcctgcctcagccttccgggtggctgggattgcaggcgcccgccaccacacccagctagttatttgtatttttgacagagatggggtttcaccgtgttggccgggatggtctcgagctcctgacctcgtgatccgcctgcctcggccatccacagtgctgggattacaggcatgcgccgcggcgcccggcctcctacagtgctgggattacaggctgagcccccacgcccagcttcccatagtgctgggattacaggcgtgagcccccgtgcctggcctcccacagtgctgggattccagcacccgacctcccacagtgctgggatgacaggccgagcccccgtgcccagcctcctacctgtggtggtttccagccctgaggttgaggacaaacctctcgtgtttaacttgggaggagatgtgtacgttccttttcttttttggactctgagtatgaggcaggctgttctgaggtccccgtggggtgagcctgtctgtcctccctcagagcccaccgttcctatcatcatctagcacctgtccggttccccacgtgagccttgggcaggacgctgcagtgttgatggtttgggttacgtggcgtttacctgggcgccgtccttgctgaaaaaggaaacgtccacactgaatgtttctggggcgcgtggtgtgtgtcaggcgcccaccctgtcccactctccccaagggacagtagtacggcacactggggccaccagccagctcaactcatcctcctgtgtcacgcacccccgagggcgcaggaggcctgaggagtggctactggagccgtgtgttaggcagaggcttctgaccatgtctgagctctttacccccaatctcgcagccggcggattcccatggccggtgcagcctgttgccagccagcctttgagacccagagctccagggcttgtcagaggcagcatggggctccagtggtcccgagtctcatttccctgcctgctctttaggcctttggcacccatggtcacttcactggttttccatttggcttctcacctgggaaatacaaaaatagcccctcctgaagataaaatcgttcagaaacagagcaataattctgactcattaacttctacctactcaaaaaagtctgccatgatgatggaccgaagtgaggctttttaacccacaagtaacctttttatttttttgagacagtcttgctctgtctgtcacccaggctggagtgcagtggcatgatcttggctcactgcagcctcgacttcctgggctcaagtgatccacctcagcctcccatgtggctggaaccgcaggcgcgtgccaccatgcctggctatttttttgttgagctgggctctcgctttgttgcccaggctggtcttgaactcctcggctcaagcaatccttcccactcagcctcccgtagtgtcgagaatataggcgtgggctactacacctgcttcagccgcttctataaaaccgctgacctgtgtgtggaggacaggccaggtgtgtgctcactgcgctgcgaagatgttttgtcacgtgactttccctgggtttccatttctttttttctgctttcctcaaaaactaatagaagaccggctgcggtggctcaggcctctagtcccagcactttgggaggctgcagatggcggatcacgaggccgggagttcgagaccagcctggccggcatgatgaagccctgtctctaccgaaaatgcagaaattagctgggtgtgatggtgggtgcctgtggtctcagctactcgggaggctgaggcaggagaattgtttggaccccggaggcggaggttgcagtgagccgggatcgtgccattgcactccagcctgggcaacggggcgagattccgtctcaaaaacaaacactattagaaaatgctctggaggtggcggggagttgttgatttgtgaggacagattgaaagcaactcccagggtggccttgtccacctccccatcgagaatatggctgccggcctctttgaagattgtggtctggcataaggagaggtgcaggcgcctggttctgagcaccttggaatttccagccgcacagcatctggtgccctcccctccaccctcacaaggagctgccatcctgtttggattttctgtttgtggaccagaaacaaacgtttttccaaaggattagcaaataggttgatttcctgtgtaacgctgctctggggcctcttcctcatcctggcagaaggagcctggagcccatgaggcagccagcactgtgcccttgctcagtcgtgctgtcccctccctctccctcagtctcttctccatgcccaagtcagtttccagccgctggtcttcatggcattcccagcacagctggacaccaagaggcaaaacccaaggcctggcttggccgtgttaacgattgtacagacatttttttaaataactttgtgtaatacttttctagaatagtaagttcttgttgaactgtcacagatgagcttctaggaacacaccgggtgtggttacttccactgggtgtgtccatggtcgtggtctgtgcctttgtaaacaaacagaacacttgaaccaccttccgaattgggtcatctgcttctttacattgatacttagagatttgcagctctctaactttcaaggaaacttcccctactgaaaggcataaaaaggttaaaaaagaaaatccgagagtcccaattccctgtataacagcattaaaataatctgcctgcctggaaagatgagaacactgttgcacaacccaaaatgtgtttttaatttgtgaaaaattaccatggtgagtcagacagtcattttaaacagctgaacagagactatcatcagcaaatagagctcagctttgtagctgcctttaaaatccttgtcccaaatccggtgagctctgcttgctgccgccgcgctcctgggtgatcactcagacgggtcagtgggaataacgggccaacaagacagctttttacatgtgtccaaaggatggcctttcgaaggcctggaagtatttcactgttggaagaagtaaacaagaatgacattccagatggaaatagaattctctctcttgcctttgaccaacatggtactaaggggtttcttctttcccaatgtatgtacgtgccctgctgggggccttactttatagaatgagagcatccgagcttccctaatgaatctggctagttctgtgtctggctgaggatacaggagtgggacatccactctcggatccctcagagcacagaaaccttcagctttgctgtctctgaagtatttcctccagtttccctgcgggcccctatgtttgagtttgatggctgctggatcctcactcaacgaaaactcggttggaaactgttccgcctggcagtccttttttgttgttttccatctcatttcccttccatctgaaagtggcattcagctgacttgctcatttagactgttcacggagtctgaatctgccaacgtggtgttggaggctccaccttgaaaagggccacagtcagggcaactttccccatacaggaaaacttg

SEQ ID NO: 2161 - DNA, 3464 bp, Homo sapiens
ctatatttacaaaccaaacaatgcttttgaaaaccttgatcacaaaaagcactcaaacttcatatcctgtagaagacacaccgttaatgacatagactccatgagcctaacaactgatgatctattaagactcccagcagatggatcattttcttatacttatgttggaccgagtcaccgaacgagcaagaaaaacaagaaatgccgtggaagactgggttcattggacattgagaagaatccacattttcaaggaccctacacttccatgggcaaggataactttgttactcctgttatacgctcaaatataaatggaaagcaatgtggtaggctgaaaaacccaaaacttatgaataggactaataattgcatttctgaatcatctttgtcttttcccaagaaatcgtctttcaaggacagttcagaacacagtcttgaaaagaattacccaagatggctcactagccagaaatctgaccttaatgtttcagggataactagtatacctgatttcaaatacccagtctggctgcacaatcaagacttgctacctgatgcaaatagtcaaagggtttatcagatatttaaagatgatcagtgttcccctagacatagtcatcaggcacaaggaacttctcggcttatcaataaattagattgttttgaatatgcttttgaaccctcaaacttttcaaattccttgagtgatgataaagaattagttaatgaatacaaatgtgattttgaacatagccagtgtcaatgtgagaatccacttctcccaggacaatccacaaagccattcagtggtgacaaaattgaattgcttatcttgaaggccaagagaaatctagagcagtgtactgaagaattaccaaagtccatgaaaaaggatgacagtccttgctcattagataaacttgaagcagacagatcatgggaaaatattcctgttactttcaaatctcctgttcccgttaactctgatgatagtcctcaacaaacttcaagggcaaagagtgctaaaggggttcttgaagactttctaaataatgataatcagagctgtactctctctggaggcaaacatcatggtcctgttgaagccctgaaacaaatgttatttaaccttcaagcagtacaagaacgttttaatcaaaataagaccacagatccaaaagaagagattaaacaagtttcagaagatgatttctctaaattacagttgaaggaaagtatgattcctattactaggtcacttcagaaggctttgcaccatttatctcgcctgagagacctggttgatgatacgaatggagaacggtcaccgaaaatgtgaagaggaaaatgaaactgtcaccacaatgaatagtcaccacagaacaaataggcattttttctattacttaaactgacaaagtaaatataagccatacattattttgtggttggttcaaggattatatatttctaaaacactaaacttgaaaatacccataggttttggaacctatttttattttgtgccaacatactagaatgtgaactgcaaggacccacaatatatcctgaagtcttactttcgccttctggccagcaaatgtctaatatttaaagatggatgacttctgttcttgaagcttacctggatttaaccttcttcagcatcctcaacattttattacctggttcaggatcattaagaaacttactggtttttatccaaaatcttttacgttaaatagacttttttaaagatatagttagcatcacttttaaacagcttaaaggaatatcaaaattgttattgtgtatctcatctataaggaagtctgttactttgaaattttcataaatttaatatttaagatacattgtatttgaaaattgcattaatagtggggtgatactgtgttaaaaggaatgttgtgttgtgacattcaagagaacctcctcatttaattagtactttgattctgtgtaagataatcttggtagtgcttgacagtttccaaacctttttttggagagatatttaagaatttaatattttgatattagattgtttcccagattttaattttggggttggctcaaactagtgaaaactatgactcaatggccaattgctttatcaaatttgataactaaaacttaaaatgaatatggaaaatcagaaagcaactctattttagagctattttgtaagagttgtgctttctttaacaccatctgtagtcttaagtttgtctctagctagaactgaacaaagctctataatttttaccaagcacttattattaatacttcttataagtagtaagcatctttactaacacaactgagaattaagtcataaaacataactaatacagcacattactgcctgacaaaattaaagagtactgtgtgtatgtataactactacaggttaacacttcacccaaatgatagcgtttttcctcagtagattattgtcaaataggaatttctaagcacattgagtcaaagcattttttccaagttaataaagtgttatttactatctttgttagaggtgacatgtcaaacactacagtgagctctgtggggttttttttttttttttttgcccgtgagttttttaccatgctgctctgaccagtttgagtggcaattaccaatagatttgttttctttattctatggagatgtttttaccactgacactgttttctgattatagtctgcttcatagaaaatagcctgcataatcaaacaaggagttactttgaaattaaagtatgcctggctattaaaaatgcagattttaggtgggtaaacatcaggtaggtctgggtgggtcatgttctaggcctagaaaaatacactattagacaagttctaaagaaggcaaggagataaaggcatcaggtggtaacttctaattgaatattatatgttgatcatacataatatatactatgcctggaaattatgactgaaaagcacctattcggttagtgctcctattcatgagaacatatctccaatactaaatgagataagcctgttctaaaatcttatagccagtattttaagaaacttgattatacttaccaaaggaacattgtttgttttctcttgttttaaatatggagaggtttaatcctttacataacaaaggaattaattttagcaaaatgattcattccaaccttcttataagaaatatctaggagagtcaagtaagaaaaataacgaatctaagtgataaacattcaagaaattctctaaataagagatttatttataattttaatatctcagggttctttttaggtttccaggggaaaagagcaggataacagtgtggagactgctaagttgagaatttaaaacaaatgagaacataagatttttaaaattgcattgtgaatgtaaaatttttatcaatcctttgctctcttttagacatattg

SEQ ID NO: 2162 - DNA, 3865 bp, Homo sapiens
taggaaccgttcttcaccctcctagaagtcattgtgttattggaaaagtttcttaacttctcacaatgtcagttttatgcatatgtaaaatgggaataatcataatgcctgtctcttaaagatggaatgagggctaacacgcatggaaagctcatggcacagagcctgccatataacaggcattccacaactgtgaagccagcatgaatgcctcacttaatagaggagaaaactgaggcccggagagatgaagattcttggcccaagttcaaaagcatcaggctgcatctctgtctaccaccctgcaaccagacttgtcctcttgtatttaaaaaaacaataaaatataataaagttgaggagaaaccatcggatttaaaaatgaatgtcctaagtctaaaagtcaagatctgtatcttgagacacaagaaatttcctgttaatgatgaacgtacatcattagagtttcttatctttcaaattctagagatttatatggggattctttgaattacatacaaatatttttaacctttataagatttatatcaagtggtatattaataccatctgtggccagtacaaattccaccctacaccccggaattccatgtattatgaattaagtattctgtctattccatttgggtctataagcattcttatcatgtctatttgtttaaggacctcttttaagaaacggctcatttaatattttgtgtttgaaccatcttgaaggcaaatattacagtcattttccttttacatagaaaaaatacatatcatgaaaataaaataatacaaaataacattcatgggttccgagggcatatctcccaggatgtgaagtactgcctcactctggtagtatggtcagctggaggtaactaggaaacaagctaacaaaacaaaaggctgaacaatcaataaattaaacaacaaaccttcgctttgagattactaggtgatatagaacaggaaggcatgtggctgtcctgacaaccagcatctattcctccctggctggagttgaggtgatgggagggaaattgagtgacagcagaaagaatctctgtaagcagagctctcagagtgacacctttggggacccaaggccagccggggttaagattagtgtgaatcctctgaaatgtctgcttggtgttggccacacccttccagggcccctggcctgccctgccctggcatggccagttatgtctggaattcagggctgtcatcccctccccaagctctcttgtggggtccctggtgtggcttttcctcccacagtccctcgtttgcctttattatcagtagctgctccccacagtggtggcatcatgagtgctggagagctttctctgcctcagcactcttggcctcgcctctgggcgtcctctgagattgctgtcaccaccaggccggctatggactctctataagatggtggggcctctgggtgggagtcatttccatcctggaattccaggcccgtctctgtatatagaggtggaggaatgccagaggcctctctctctgcaggacagctctgcttttccacctcaaggctctcttcataagctggagggtaaaagtctggcctaggggacaaaacagcataaacatgcgtgcgttatttaggcattaatgccaaagaggcagacggctgcctctctcagctcaaattgtgcgaagctaaactgttaagaaacatggatttttgaaacagatgtacttcttcctggcatcaccagttttttaaaaatgtgctgctcttccaaaagaacctttttatcagccacaggatgcctgcctctagtcacatttttttcccagtgggttatgccaagctattccttctctattgctcattcactcatgaaaacagggccattcagtgtgagatccttgtcaacattagaggaggtgggggctttggatagggaacttctctctaccgagtacttagtccatccacatccttgctccctttctcgcatggcatcatcccctcaattgcactcactttctctgatcatcacagccaacaaaataatgaatgaaaaccaactctgtgctgatccctgaactataccagatgccatgtctctatcctaacaccctttcgagactcagtagctagtttcaaagaaaatatacaaacatattcatttctcaaatgatatcaactgacaactttacacagatttcagttgtagccctttctatgccagtaggctaaagcagccattcattcgggggctgatgtactcattggtcatcttgcctggcatttctaattgctaaatcctcctggcttctccatcatgaatgaatttgggggaaggggagaggggaggaagagagaccggtgagcttggctgagttgtgtatttatagagtgatccttccagtgcctacagggagtgtttatggtgtgtaaccacaacagaacagggactgccatttgtagccacaactccattccaaatgttaccaggcccaaagccagtagctgaagaagctgtctactataaggcataaatctcagccttcgctcagaatagccaaggctgagtcacggggcacatgtgtaaaggcattttacacagaaaggtgagatgttccctggagtgatgtgaaaggttccaggatgactgctgcctgccccaaatcccagctacctctcccaaccccaccctccttcaactgccatccatattcccagtcccctgaattccatcatcggagacccatttgctttgatatctcaacctgggtatccattttgagtgcaaatgctttggagaaatgtgacttcccaggctgacttgccagccattctgcgtgggataagcatcttattacatgcagcgagaagaggcagtaaaatgggggtgttacgatgtccataatttactttcaaacatttcagtatactgtaatattatgcagtgttagtcaatttaagctatatcctaaaggcaatcagttacatttatcagaaattcacactctagaggtagtcctctaacatttatacaaaaagaaatcatcactctagaggcatcttctacaatcacttcatttctcttaatttttaatcaaacccagaaactctgctggttagtataacattggaaataagttttggttttcataattattatcttattaattagcataaaggatgccaaaagtggatgctcatgggtaagattacttatattcaagatacatggagtagctaaaatattttagatactttctactcttgcacgaagagggcaaaataattatagtcttgtagcctgtatcttgagaatgatgcctagggtgttatccctaaatggtcctgtggctagccaagaattaggaggtttcttgttgcctgatactgactataagattaactgaatcttttttttcttgtggtaaaatatatatgacataaaatttactgtttttaagtgtatagctcagtggcactaaatacactcatattgctctacaaccatcaccttaaaactctctactcattaaacaataggtccccagtctctccttccaccagcccctgggaccactgttctactttctgtgtctgtgaatttgactacgctaagtactcatgtaagtggaattatacaatatttgccctttgtaactgacttgtttcacttagcataatgttttcaacttcatccaagtggtggcatgtgccaggatttccttcctttttaaggctaatattccattgcatgtatataccacattttgtttatctactcacctgttgatggacatttgggctattatgaataaatgttgctacaagcattggtgtacaaacatccatttg

SEQ ID NO: 2163 - DNA, 4615 bp, Homo sapiens
atgcgcagccaggccccagcctgttggccagggcgggatcaaccacaggaaggaaccagctgcagctgggcgtgggtgccttccccgtggaaagccgctggcagggagtctacagccccttccgggactttgtgtgtgctggctgccccagggacctgcaggaggccctgctgggcttcgacgtgcagagctccagggagctgcgtaggtctcaggattacctgtcctgcgagaggtgaggccggctgtgtgagcatgcacaggttagggtgggccggggagggcttcctggggggagggggctgggccgaggtgtgggtgagggatgctgtgtgtggtgcccaggacccaccctgaggacagtgtgggcagtatggaagacatcctggaggagctgctgcagcaccgggagcccaaggccctgcagctgtacctcaggaaggctctgagcaactcactgcaccccctgggaaagctgctccggacactgatgctgaccttccaggctacctacgcaggtgtcggggccaacaagcacctgcaggagctggcccaggaggaggtgaagcagcatgcccaggaactctgggctgcctacaggctgagcttggccctggactcggaacacacctgcagtcccaggctgggctgtgaccccatgaaacactgcaaatagaagccttagatgctatagttccttctgctgctggattctcaggctaacatcctggagctccaaccttctaacttctgtggtttgagaggatgaaccctgcaggccatgtccacagttctgagaggccacctgcttttgcctttgttgactggtggtagaactccagttctgtggcaaggggcagccacaccatttctctctcattgactcacaggggtctgctgcgagttgccttagagcgcaagggccaggccctggaggaggatgaagacacagagacaaggtgactggcgcaggtctccttggggcctgccgtgtccagggaggcctcatgcgtctgctcctaggacctcccttggggaaagaggtgcttctggggaagtgctgggcattcactctattgaccaaacattgtgcattgatcgtttgtggattagaatgacccatgacctctgttctgtgaggaaccagggagggggcactgctacaatgcattgaatgcatctttgttctaaatgtatgatcccaatctcatctttcgcatgcagaaggtgagtagctccccgaggcaccctcctctccctgcacacagatggggaaaccgagggctggtagggatgagcctgaggttatacaggagttaggtgggcatgaaatttgtttcccccagtccctggagcaaaccttacaatttgcctttagattctagacctgaaagtgttcctgatcagagaggccttcctgtcactgccttgcaggaggcaagggaaatggggttagacattagggaggactccccgcccggagtcctagcacagcaaaccaggaggtggaactgaatcagcctggaatggctgctgagagctcggctgcaagttgctggtccatctggggccctggttttgctttcagtcaaatggggatccaactcctgccccacctgccatcttggttgtcaaagtcaaaggagggaatgaagttatgaattgaattgggcaaatgatgactgagaacaggcttggaaaaggttttctggggaggaggaggctggaggccaggacactgtttgttgtggaactaggagctctttgagacgagactccaagtagtaatcccagaccccaccttgctcatcccaacctgttccggtctccccatcagggacctccaggtgcatggattggtgctgcccctcatgctgcccagcttctactcagagctcttcacgctctacctgctgcttcatgagcgggaggacagcttctacagccagggcattgccaacttgagcctctttcctgatacccaactgctcgagttcctggatgtgcagaagcacttgtggcccctcaaggacctcacgctgacgagcaatcagaggtactccctggtcagggacaagtgtttcctgtcagccaccgagtgcctgcagaagatcatgaccacggtggacccacgggagaagctggaggtgctggagaggacatacggggaaattgagggcaccgtgtcgagggtattgggccgggagtacaagctgcccatggacgacctgctgccacttctcatctacgtggtgtcgcgcgcccgatggggaagccaaggcccagaaaagggagggtcccagccagggtgctggggtgctagaggtagagtgaggaccacaccccaggtgtccagccatccaggccagcgctccttccccagctgcctgtccgcgacaggcctcttctccttgtctccctcgctctcttggtggggcggtgttctccagaattcagcacctgggagccgagatccacctgatccgtgacatgatggaccccaaccacacaggaggcctgtatgacttcctgctcacagccctggagtcctgttacgagcacatccagaaagaagacatgaggctgcaccgcttacctggccactggcactccagggagctctggtagcctggcctttcctggacagactgaagagctgagcagggcactgccagcctgtccctcattacccaaggcaaggggcaggacaggccctcagaagcagctcttggaggagatgagcattttgttttgcacaggaagatgctgctgctgccctgactgggatgagggtgaggggtgacgggtgtggccctggatgtggtggttttcccttggccactagcccatcttcaatgaccccttaatctgcagcagctcacaggctgggggtgaggagtccctggcttctcttagcctgagcctttctcccaagttccagagcctctccgggcctcagtgctgccatctgtacaatggtggagtgagtacgctgtaaaggaccttccattcattttgctgaattccagagtccttttggaaaactgactttagtctgctgggctgtattgacctctggcaggctcgaagcctcactgggtatgcagtcaacaggatgggcctggagatccgtgaactgcaggccacgtacccatgacgtaaacggcggcactggagcaagctggggcggggggtgggtaaaccctcactgccagcaggccccaagtggcttgtaaatcattctcctgtgatgtctgtgggcctgcgtggggacaacaggggcacatgacatctgcctgggccctgaccaataaaccctcagacccaggacccaggaccctgctgtagttggggagcaggagtacctttgggaggggaggactttatttaaacagtggttctagtgtgggaccaagagaggcaggagctgggtcttggggcagctttattcctgttgggcctcagtttctcttccccacacagtttatcttccgtcacattgtgccgggtgacgtgcacggtctccctctgccctagccggagatgcatgatgacaggcagtgtgatgtgttctgaaagtgtccagggcaaagcgtagggagagggtggatttgtgcagggtgcagctctggagaagaagctggatcactcttggtcccattccctaggccctgagcaagtcaggctcctggctctgggtgtggctcccccaaacgaagtactgacttcagcctgtgaggggagggttgagggaggctctggaaagcccagccacacctgagtccctggcagtagccttggggcagagggcacccgcagagtcccagagatgatgtgggcagtgggcagagagagccttggcgcctctgtttgccaccacttccccaggaaggagggacagcatttctctggctggttccactaaatgtgccagcccaaatgcagggcatgggctctggttctgccaggagcctgtgacacccccaggaagggggtggaactgaggaagagcgaggatatgcaggcactcatgcttaccgggactggggcagctcactaggattctatcctttccaatcggcatcagccagctcttgtcccctgataagtgaggacagcctgaccctggcctcaaatgcagccatccctgagttcatgcgatgctgacgggaccccagcacacttccctgcctcctttgagatctgcgagcccttgctgcagttcagattcaacaaggccctctgcccaccctctcactaggcctcacccaacaccagtggaactggagcctctggctgggcacagtggctcactttgggaggctgaggcaggaaggctgctggaaactgagagttcaagaccagcctgggcaacatagtgagaccctgtctctacaaatacaaaataaaataattagctgggtgtgttggtgtgtgcctgtggtcccagctactcgggaggctgaggtgggaagatccctgagcctggagggtcgaggttgcagtgagcggagatcgcacctctgcactcaatcctgggtgacaaaatgaaaccctgcctcaaaaataaaaataaaaataaaaataaaataaataaaaaagagcatctggacag

SEQ ID NO: 2164 - DNA, 3798 bp, Homo sapiens
ggccttttttttttttttttttttttttgagagggagccttgctctgttgtccaggctggagtgcagtggcataatctcagctcactgcaacccctatctcccaggttcaagcctcagccttctgcatagctgggactacaggcatgcaccaccacacccagctggtttttgtgttttttagtagagacagagtttcactatatgttggccaggctggtctcgaactcctgacctcagctgatccacctgcctcggcctcccagagtgctgggattacagacgtaagccaccatgcccggctggaatcattcatttcttttcaagtgggtatcttatggtattttagggcatggctgggagcagttttgttttctcttctcaagactgagtgtttgcaggatgtcatagagttcatgtctgcagctcacagtgtcattgcctgtgtccccagctccacgtactggcaggtgtgctgcaagctgggtaggtgccctgtgtccctgggataccttaaccgacactcctggccctcctctgcaagctgtgccctgatcctccctgcagggactggggattgggtctgctcacctagaagccaggatacctggctgagggcacttctctccctcttctctttgaacagagtggccacaaactcaaaggtgcgggagcaagtgcggctggagctgagcttcgtcaactcagacctgcagatgctcaaggaagagctggaggggctgaacatctcggtgggcgtctatcagaacacagaggaggcatttacgattcccctgattcctcttggcctgaaggaaacgaaagacgtcgactttgcagtcgtcctcaaggattttatcctggaacattacagtgaagatggctatttatatgaagatgaaattgcagatcttatggatctgagacaagtatgactctctcaccggggttccggtcagccagcagaacctgctgctggagaaggccagtgtcctgttcaacactggggccctctacacccagattgggacccggtgcgatcggcagacgcaggctgggctggagagtgccatagatgcctttcagagagccgcaggggttttaaattacctgaaagacacatttacccatactccaagttacgacatgagccctgccatgctcagcgtgctcgtcaaaatgatgcttgcacaagcccaagaaagcgtgtttgagaaaatcagccttcctgggatccggaatgaattcttcatgctggtgaaggtggctcaggaggctgctaaggtgggagaggtctaccaacagctacacgcagccatgagccaggcgccggtgaaagagaacatcccctactcctgggccagcttagcctgcgtgaaggcccaccactacgcggccctggcccactacttcactgccatcctcctcatcgaccaccaggtgaagccaggcacggatctggaccaccaggagaagtgcctgtcccagctctacgaccacatgccagaggggctgacacccttggccacactgaagaatgatcagcagcgccgacagctggggaagtcccacttgcgcagagccatggctcatcacgaggagtcggtgcgggaggccagcctctgcaagaagctgcggagcattgaggtgctacagaaggtgctgtgtgccgcacaggaacgctcccggctcacgtacgcccagcaccaggaggaggatgacctgctgaacctgatcgacgcccccagtgttgttgctaaaactgagcaagaggttgacattatattgccccagttctccaagctgacagtcacggacttcttccagaagctgggccccttatctgtgttttcggctaacaagcggtggacgcctcctcgaagcatccgcttcactgcagaagaaggggacttggggttcaccttgagagggaacgcccccgttcaggttcacttcctggatccttactgctctgcctcggtggcaggagcccgggaaggagattatattgtctccattcagcttgtggattgtaagtggctgacgctgagtgaggttatgaagctgctgaagagctttggcgaggacgagatcgagatgaaagtcgtgagcctcctggactccacatcatccatgcataataagagtgccacatactccgtgggaatgcagaaaacgtactccatgatctgcttagccattgatgatgacgacaaaactgataaaaccaagaaaatctccaagaagctttccttcctgagttggggcaccaacaagaacagacagaagtcagccagcaccttgtgcctcccatcggtcggggctgcacggcctcaggtcaagaagaagctgccctcccctttcagccttctcaactcagacagttcttggtactaatgtgaggaaacaaacatgttcaggccccgaacatttccggtgctgactcggccttaaacgtttgtgccataatggaaaatatctatctatctgttgtcaaatcctgtttttctcatagtgtaaactcacatttgatgtgtttttatgaaggaaagtaaccaagaaacctctaggaattagtgaaaaaagaacttttttgaggtgtgttactatactgctgtaagttatttattatataaagtattgtaaatagaatagtgttgaagatatgaaatatggctatttttaatggtgacaattatgacttttagtcactattaaattggggttacctatatcagtacaatttgtagttgtttccaggtttggctaataatcattccttaacctagaattcagatgatcctggaattaaggcaggtcagaggactgtaatgatagaattaaattagtgtcactaaaaactgtcccaaagtgctgcttcctaataggaattcattaacctaaaacaagatgttactattatatcgatagactatgaatgctatttctagaaaaagtctagtgccaaatttgtcttattaaataaaaacaatgtaggagcagcttttcttctagtttgatgtcatttaagaattactaacacagtggcagtgttagatgaagatgctgtctacaaggtagataatatactgtttgatactcaaaacatttttcattttgtttaaagtagaagttacataattctatattttaagtcttgggtaaaaaagtagttttacattttataaagtaaagatgtaaatgattcaggtttaaagctctatttgacttcctttttttgtttgagatagcgtcttgctgtgttgcccaggctggagtgcagtggtgtgatctcagctcagtgcaacctccgccccctgggatcaagcgattctcctacctcagcctcccaaatagctgggactacaaggtgccctccagcatgcctggctgatttttgtatttttagttgaggtgaggtttcaccatgttggccaggcgggtttcgaaatcctgacctcaaatgatccacccacctcagcctcccaaagtgctgggattacaggcatgagccaccacaaccgtcccactattttactttttaaaatgacattcctactgattgatttttatcttgctataagttcgatgacaccgtgaatctaataaggttcactgttgacacagtacaagttacatagctaaaatacatagcattgaagactaattttaaggattgacaagagtttattttctattgtgcaatatcttaaaggaagcaaccacctttgggaaagtgtatctgctgctcctagggccatgcttgtatacatatttaaataaacatattcatttacccg

SEQ ID NO: 2165 - DNA, 3465 bp, Homo sapiens
tatagagacggggtctcactatgttgctcaggctggtctcaaactcctgggctcaagcaatcctcctgcctcagcctcccaaagtgctgggattacaggcgcgagccactacacccaactacttgtatttatttactgctcctccctgcctcctacaaacagaccccaggtctgttttcttaaatgctaaactacatgaatccttaaaatgctaaactgctaaggtcctccagcctcagtgttcttttcagaaacatggggctaagaaccacacttcagtgggtagctttgttcctgccatcttctttctcatccccatatcactgtgcggcttttgctctgcaacgacccttggtcttacctctgcccagcaggtgataagatctgggaacagagaggaaacagaggggaaacagagaggggaggtcatctccccgggctcacacagccagtgagtggccagacagggcctgaggcaagtctcccaatctgagcacttactggcagaggtgattcttcatctgtgcaacgggtacagcatcacgagcctcgtggagggaaatgaccttatgtccatgagaggcattcttcagtgagtgtggaccatattgttggactctaagatctggattattagtccagatgcctgcacagtacatatcagctgtgtgacctaggacaacgttatttcacctgctggagactcagttttctcatctgtaagttgggtggtaatacacgtacaagccttttagggttgtcatgtaggtgaagtaggagcccgccgtgggaagtgcagtgcctggtgcagcaagcagatgtcggctctgatcctccccaggatgaagggcccgcggctcacacaccctgagtcccgagcgcaccaggctcttccgggacactcgctcagctcatcctcccacagccttaggagtgcctgtgccacgcagatccaaacatcgaggacctgggaggtggagtggctcacgcggggtcacccattagaagaggcaaaggcaggattagaaccaaggcccgtgggagtccaagtgcgtcctctacccgctgctcagtgtccactctccagctcctcgctgggaaccctggagccacagtggggagttcagggatccgcccagccattcccccgctgtgtgaccccaagcacattccttcccctctctgtgcctcttggagttgcaagagagttgggaggggtgattctgcatcatgagcaccctcctttctccccttctgcagagaagagcgttcctctttgcatcctctatgagaaataccgtgactgccttacggagtccaacctcatcaaggtgcgggccctcctcgtggagccagttatcaacagctacctgctggctgagagggacctctacctggagaatccagaaatcaagatccggatccttggggagcccaagcagaaacgcaagctggtggctgaggtgtccctgcagaacccgctccctgtggccctggaaggctgcaccttcactgtggagggggccggcctgactgaggagcagaagacggtggagatcccagaccccgtggaggcaggggaggaagttaaggtgagaatggacctgctgccgctccacatgggcctccacaagctggtggtgaacttcgagagcgacaagctgaaggctgtgaagggcttccggaatgtcatcattggccccgcctaagggacccctgctcccagcctgctgagagcccccaccttgatcccaatccttatcccaagctagtgagcaaaatatgccccttcttgggccccagaccccagggcagggtgggcagcctatgggggctctcggaaatggaatgtgcccctggcccatctcagcctcctgagcctgtgggtccccactcaccccctttgctgtgaggaatgctctgtgccagaaacagtgggagccctgaccttggctgaccgtgggctggggtgagagaggaaagacctacattccctctcctgcccagatgccctttggaaagccattgaccacccaccatattgtttgatctacttcatagctccttggagcaggcaaaaaagggacagcatgccccttggctggatcagggaatccagctccctagactgcatcccgtacctcttcccatgactgcacccagctccaggggcccttgggacagccagagctgggtggggacagtgataggcccaaggtcccctccacatcccagcagcccaagcttaatagccctccccctcaacctcaccattgtgaagcacctactatgtgctgggtgcctcccacacttgctggggctcacggggcctccaacccatttaatcaccatgggaaactgttgtgggcgctgcttccaggataaggagactgaggcttagagagaggaggcagccccctccacaccagtggcctcgtggttattagcaaggctgggtaatgtgaaggcccaagagcagagtctgggcctctgactctgagtccactgctccatttataaccccagcctgacctgagactgtcggagaggctgtctggggcctttatcaaaaaaagactcagccaagacaaggaggtagagaggggactgggggactgggagtcagagccctggctgggttcaggtcccacgtctggccaggcactgccttctcctctctgggcctttgtttccttgttggtcagaggagtgattgaaccagctcatctccaaggatcctctccactccatgtttgcaatgcttttatatggcccagccttgtaaataaccacaaggtccactccctgctccacgaagccttaagccataggcccaggatatttctgagagtgaaaccatgactgtgaccaccttctgtccccagccctgtcctggttccttcctatgcccaggtaccacccttcagaccccagttctaggggagaagagccctggacacccctgctctacccatgagcctgcccgctgcaatgcctagacttcccaacagccttagctgccagtgctggtcactaaccaacaaggttggcaccccagctaccccttctttgcagggctaaggcccccaaacatagcccctgccccggaggaagcttggggaacccatgagttgtcagctttgactttatctcctgctctttctacatgactgggcctcccttgggctggaagaattggggattctctattggaggtgagatcacagcctccagggccccccaaatcccagggaaggacttggagagaatcatgctgttgcatttagaactttctgctttgcacaggaaagagtcacacaattaatcaacatgtatattttctctatacatagagctctatttctctacggttttataaaagccttgggttccaaccaggcagtagatgtgcttctgaaccgcaaggagcaaacactgaaataaaatagtttatttttcacactc

SEQ ID NO: 2166 - DNA, 4899 bp, Homo sapiens
atgtcagcgttggctgtttccatggcgatggtcagagggtccctgccttcagagtctcgagcccccagatcagctccccgtttcaggaacaggcaggcgagcctggagagaagagccagggtcagccggccgcccaacttctcccagccttcctccccatgccatcatccctaccccgtgtggccaagaatggttgcgtggtgcagcgggccccggcccgcactgtccgcttggttcacgttcgccccgttctggaggagaaactcacaggccagaagagaattctgcatggagaagtcgagaaggggggttgagggtggcatccctagtggtggatttcaagatgtcttagggtggcgccagttcagagaatgggagggtggagtgtggtaatcaggagtgtggaaggggttacagctaactgtaaccaagctaggcttggctctagctctttgcatgtattcatatataaatccatagtacaagcttttgaggtatgttactattttacagatgaggctgagaggttaataacttgttaaaagtctcctgtaggccgggcacagtggctcacgccagtaatcccagcactttgggaggccgaggcgggtggatcacagggtcaggagatccagaccatcctggctagcacggtggagccctatctctactaacaatacaagaaattagccgggcatgctggctggcgcctgtggtcccagctactcgggcagctgaggcaggagaatggtgtgaacccgggaggcggagcttgcagtgagccgagatcgcaccattgcactccggcctgggggacggagcgagactgtctcaaaaaaaaaaaaaaagtctcctgtaagaggtgagagcctgggttcaaactcaggttctctgcctccaaatcacacactcttagcaaccagtctctattgttgatctctccctatgggtggaagccctagggaacaggtggtggggaaaggaggtaagggcagggcccagagtcaggagtaggtgtcagagccctagggtggggtggagaggtcagcagggctcttacagcagctgtggcctggatcagcggtgtggcattatcttggcccccattgacccagttgacatcagctccatgggcaagggcatcagccatggtgggaagagatggaggatgcccagacgctcgaaacagtagggccccagggtgcaggcttcccaggtcctcagaggggggctctgttcgggggatttggttctgttagggggaagcagctccgagtctgggaagaaaaccctcagcagtgtcccaatgctataatgggacaggtctcttctaaatgatggggagcttgggactgtggagggaatagagtgatgcaagtgtgggtatgtgtaagtatgcgtatgcatgtgtacgagtccctagggtgtgggggagagacggcatcatcacctcatctggtccaaccacacttggcctcagctctcaacccctgacgctccagccaaacccaccccctctctctctccttttcttgtgctgttggcaccccttaccctccctgcccacgcccagccccacattccttctcattcttaatgtcacactccaccgtaacccctgaaacggcagtccggtccctccgacattgtccagcggaaggcctgggcttcacactctgtgcctcccggcgctacctggcacgatgccgagcacacagcagatgctcaatgaatgcccgaccaaccctatacctggcttggatctcaagctccctggccggggcctgatggaaggctttgggggcacaggaggctgcccccttgggcgcccccggccacctcttcgccctcgaatctcaggcagcttggtcaggaacttcttctccacgtatttagcgtgaatccaggcctccttctcctgcctgtgggaggggagaagcacgcagtcttccctcttctgctccaggggtcccccattcccctgggaggctaaaccccaagctcaccgggagcagctgggccctggtttcttcactgccatggcctccacgcgggcctcatagatctggttgatgatgacatttcccagctcacacatgagcttcaggaggcccaggcagaggcagagacagggaaggtgggggtgagtgactcctcagggatcacgcccctgcaccgccatgtccttgccccaccccaagttcttgcccccaatcttcacaatacgctaagttaccttcactagttctggctcccatgagtcaagggtcagagaccggactttggagaagtgaacaccaaggctcctggagggccagagggggagggtcaggccctgtgcaggggggcagtggcctggggagctgctgctgctcctgaagacactgggaggcaaggctggcatgggggcccgtgcagaggtgctggcccaggaggcagggcagctgcggccatgtaaccgccatgtagccttgacctggccctggcaggactctgcctcgtcaccattccttcttccttaggtttcatttcaaggccctcatcactccagccacctcccttctctagtgacacttgtgacactttggcctggacaacctctcccatgtcacctcccttccaccacactgaggtggggggcgagggccttagatacttgctaaggcctcatgaccgtttctctgcctagtcttcactggctcccccaccctcagcagccttgaccccacacttcttccaaccaagccaacaaattctgggtatcccccaattctggccagactaggacacagaggggctaggcccgcctgggtccaactggcaccccagaggcttgggcccaggcctggtacccagtgacaaagccagaagctaagagaggaagccaggacagggaaggaagaggggccggtgtgatgcgctctgtattggagccgcactgtggcccgaaggagtggggctcccgcatgggccttgtggagtaacctgtggatgccggaacactgaatgcagagggtgacaccaaggttgatgctggcccactccggggctggctcccggcagtcgcagcactgggcattgccatccacactctggacctgggccaccacgtgcccgactcccccaggctcccttcccctggccattccaccagagcccagggtggcagcagagcctatggccaggtgtcctgagccctgggggagagaggggaagaaagggtggccaaggggcctagggtaaagggtgccccatctccacaggcagcctggctccgcacccccaggttaaggtacctggcctggaccccgggggctgtcatcaaggcgagcctgactgaaggcagaagcaatgctgctctgcacagcactgacccacagctgcaggaggcgctctgagtcagcctggaggaggcaggacctaggtaggagggtgagggagatggcagaggggtctgaggcctgggaagcaaagtggcagcatgggcagactgacattcagccagtattcaaccagttccagttgcattgaaagacttctgtaccagttggtaatattctcctaaatatcccccatcaccctgtaccctcttccacaatggccccccagtccagccgccaaagaattaaattaaagtctggagctgcatggggggcttccattgtggtgggccctgcctttcagattggcagttgtttagatatattagagtatcacccctggggattgcactcacttgctggtggacaccacctcaaagcagaaccgcctttctgagtcagggcagagtttcactgtgcagagacgaaggtcatccaccaccacagtcacagggtcctggcaggataaggtgataaggggccagatgtccagctgcaggcaagagctgagtctccctggggcccaggcatccaggacccaggtccactcaccttgtacttcttctggtaaaccagttggttgctctgaatggtgaaccagcgtctgtaagagaaggaaatcattacagacataggcagctttaggatgagggacggaagagaggctgtgctttttgcccatgaggatcttactgagaggacagacacctgggctgactgttccacgagacattccagagaagggtggacaattgtgcagattggaacatctaaaggatgctattcctatcttggacaacccagatttcatatagttatgaagacaactttccagcagatggcagtaaaattctttttctaataaaatgtctattgctacaatttaaaaaatactatttaggctgggctcacacctgtaatcccagcactttgggaggctgatgggggtggtggatcgcccgaggtcaggagtttgagaccaccctgaccaatatggtgaaactccgtctctactaaaaatacaaaaattagccaggcgtggtggcaggcggctataatcccacctacttgggaggctgaggcgggagaatcgcttgaacccaggaagctgaggttgcagtgagctgggatcgcaccactgtgctgcagcctgcgcaacatagcgaggctccatcaaaaaagaaaaaaaaaagaaaaagaaaaaaagaaaagaaagaatcttgggggccaggtacagtggctcacgcctgtagtcccagcaagttgggaggccgaggcgggtggattgcttgatgtcaggagtttgcaaccagcctgggcaacatggtgaaaccctgtttctaccaaaaatacaaaaattagccgagcgtgatggcacgcgcctgtggtcccagctgtttaggatgctgaggagggaggatcacttgaactcaggggatagaggttgcagtgagccgagactgcgccactgcactgcaggctgggcaacagagtgacaccccatctcaaaaaaaaacag

SEQ ID NO: 2167 - DNA, 3579 bp, Homo sapiens
aaacatggtgaaacccctctctactaaaaatacaaaaaaattagccgggcttggtggcgggcccctgtagtcccagctactcgggaggctgaggcaggagaatggcgtgaacccaggaggcggagcttgcagtgagctgagatcgcgccactgcactccaggctgggcaacagagtgagactccatcttaaaaaaaaaaaaaaaaaaaagactaggacttatggagactgggggaagggcatccagattgtggggtgaggggagcaagcactcagagaccagaagactctgcctaaatgagaagtacagggctactttaggaaggaaggatctgcatggggaggaggcatcgctgaaggggcagtgctcaggcagggagcatggagacacagctcctgcagactcccagagagcgagaaggcctgacagtgcgcgcccttctgcaagcaggatcctcaggcttggaaggagcaaggggtcggggggccagggaataaccctcccggtagtgtttgcattttaaagggcacttaattagcacaaattaatgagcagagcatccagggcagactctccatttcccgttgcccctgaccccgcttctgcagggcacccctttgcctgccctgcaccttctccacctcctcctcctgcccatccacagctgccccctcgccgcccgctgccttatcgtccagcaacccccggggtgtctctgcccaccagtggtgttggggagggtgccccccagactgtgaggcagacagaaaggaagaggatgccgtaaaaaccctgggggtgcttgggccctccatggccacttcctgtccccacagcccctcaactccaggggactggttatcttttccgggcagagtgaagacatggtccatagcagctggcccgggcaccggaaggcactgggggttaaggggaagctgagggcctaggtgtggggaggtggctgttctaacccctccccagctacgggcgaatcttgcccccacagaatcagacgcgtggagtgcaggggtggtgagaggactctctcaaggccaggaagttccaggctttgctaccctggggctgtacactatggtcctggctggggtctccaagctggggtagaggctccagtgtttggttaaaggcccagcaagaggccctttgtgtcctggggtgtgggaggcaatggacagcagaaaatatgttcccatccttggttcccccgaacgaccccatatcttgcttctcttccgggcccctcactttatccgctccaaagcccccttgcacagcccagcagggggtcctgggcctcgtctgccaagcctgctgcatgcctgggagaggggtcagctcttgggactctggaatcttgagaaggctgatccctggtggccaatgcagaccactgtaccttctctactcccctgaggccagggagaagcctgtggggctcgggcctcagcctcgggaccaaagtgagacttggggaaggagctcattccggagcagactgtgagagagccctgggcagctcaaatgtagagacagctcccgggcctcttccgctctgagctgttccgggaggaaaggccaaccttacagtgccagggctggaggctggaccctccccagaaacttccagacaaggatgggtgtggagtgtggagggagaggaccctttccaggatgagaaggggacatctagcctggggatcccttcactggcatctcctgaccggctccccatgtggcaaggagcatccacccttgcagataagctgtggcccatgggcctgggcctgagcatacggcagagccagccctgggggggaaactgcaggcccttgggctctccggtgaggtccctctgtggactgtccctctggagtcctcaggagctggggagggtcagtggagaggggctgcagggttggggagggcaggccaggctgcagctggcctggctgatcaccctctcctcacttccagggtctcagagggccaaggcagcaacaggtaagcacccagggccctggggtgggagggacaggagccggctggactgagccagggacactcatggccagagggaatttggaacgcacaggacactggggaattccagaggaggggaaagtgggggctgtgtggaactggagcccagaaaggagaggaggaggaaggtccacacaagagcaggacgggcagcacagagccttgaggcgcggtgcaggatgagggcggcagggtctgaggatcaccctgaaccgtgactggccccctctgggtggctcccttgcagagggcttgacacctgttctatccttccaggcacctgtttgggtcaggccctgggacaagacccttccctgggttatctcagtgcctccgtggcccccaagaggcaggtgttaggttgcctttctcggcgaggagagtgagactttggggggcagctggggagggtctgcctgtatcccagactgccccgaagcccaggcctccgacttccccaaggtcttcgggcaggtcaggggcaggagggccgaggactggagtgtgaggctgagagctgggcctcggccatggaaccagccccagtgagcgcccccacccgctccccatgctcccccagcctgtggtcgccccaggatgctgaaccgaatggtgggcgggcaggacacgcaggagggcgagtggccctggcaagtcagcatccagcgcaacggaagccacttctgcgggggcggcctcatcgcggagcagtgggtcctgacggctgcgcactgcttccgcaagtgagtccgcccgcccctgcccccgcccatagcgctgacagcgccccgcgcgcgaccggttcagcaccgtggacagcgcccgccgcgccaaatcctgcgggtgacctccctgggggctcctggtccagcccctcccacccagatgcttcccttaggtccaactccagggctaacttccagttgcaaccgctgctcccgcccgcgggaggtgcctcgcaccgccccccgaccccctccatcccctccacccactcacccactccctgtgggtccctgcagaagcggcccggcaggctctgcccaccggcccctcctggcctttccccatcccgcacacacctcagctccaggacactcttcccgggaggaactctgctcacaaagcccaaggaccagacagaacggcccttcctcccctcacccacctgaaccaccccagaaagccctgagcagaggccaggccacccagccctctgccatgtatgaaccacctggtcccacaccttccgggtgtcccaggccccctcacctcacacctcaacaccgcagctctaattattttaaaccccacatctttttcttttttttcttcttgatctttaaaagaatatcatgacaaaaaaaaccccacatcttaaattcagatactcacggccaggcacggtggctcacacccgtaatcccagcactttgggaggccaaggcgggcagatcagttgagcccaggagttcaagaccagcccgggcaacacagcaagaccctgtctctact

SEQ ID NO: 2168 - DNA, 3369 bp, Homo sapiens
tgtgagatgtttatgatgccctcaccatggtggttttccttccagcccccatttccgtgactgtttccctgaagtgcttgcattatacccttgtgcaatactctttttggttttttttttgagatggagtctcactctgtcacccaggctagagtgcagtgacgcgatctcagctcactgcaacctccacctcccaggttgaagctattcttatgcctcagcctcctgagtagctgggattacaggtgcctgccactatgcccagctaaaggttttttgttcttgtttttgttttctttgagatggagtctcactctgtcgcccaggctggagtgcggtggcatgatctctgctcactgcaacctccacctcccgggttcaagcaattctgcctcggcctcccaagtaactgggactacaggcacgtgccaccatgcccagctaattttttttttttttttttttttgagatggagtctcgctctgtcacccaggctggagtgcagtggcgcaatctcggctcactgcaagctctgcctcccaggttcacaccattctcctgcctcagccttccatgtagctgggactacaggctcccatcaccacgcctggctaattttttgtatttttagtagagacggggtttcaccgtgttagccaggatggtctcgatctcctgaccttgcgatccgcccgactcagcctcccaaagtgctgggattacaggcgtgagccactgcgcctggccagccggctaatttttgtatttagtagagacaaggttttaccatgttggccaggctggtcttgaactcctaacctcaagtgatttgcccacctcagcctcccaaagtgctgggattccaggcatgacctgctgttcctagttgccttgtgcaatactcttgtggcatgtttgctacacctcctgaactttgatttgtttgccttttaccagctattatgactcaaaattgtcccctagaacatggaataatggcagaaagaaagtgtgtggttgaataaacacacagattggcatccaccgttgaaacaggaaaacatcttatgttatgctgctgctgttgtgagggctgatgggccttgaaatgtatttcctgcactatgtgtgtgtgagtgtgtgtgattatactttttggcctcacagccccatcatccctttctaataacgtcacgtcgataaggggcttaggattgcatctggcctgtgtaagccctctgagttctgcggttcttagagttcccttttcagcactatagctctgccttgttcccttgttcctccttctggcgccccgtgctgtgccccctgcaggagtccaagctgtccccatgctgcgttctggtccggccgcccctcccgtggtgtggccctggccgacccccctcctgcgccccgcttttctcgcagaagctgctctttgccggctcccgctctcagctggtgcagctgcccgtggccgactgcatgaagtatcgctcctgtgcagactgtgtcctcgcccgggacccctattgcgcctggagcgtcaacaccagccgctgtgtggccgtgggtggccactctggatctctactgatccagcatgtgatgacctcggacacttcaggcatctgcaacctccgtggcagtaagaaagtcaggcccactcccaaaaacatcacggtggtggcgggcacagacctggtgctgccctgccacctctcctccaacttggcccatgcccgctggacctttgggggccgggacctgcctgcggaacagcccgggtccttcctctacgatgcccggctccaggccctggttgtgatggctgcccagccccgccatgccggggcctaccactgcttttcagaggagcagggggcgcggctggctgctgaaggctaccttgtggctgtcgtggcaggcccgtcggtgaccttggaggcccgggcccccctggaaaacctggggctggtgtggctggcggtggtggccctgggggctgtgtgcctggtgctgctgctgctggtgctgtcattgcgccggcgactgcgggaagagctggagaaaggggccaaggctactgagaggaccttggtgtaccccctggagctgcccaaggagcccaccagtccccccttccggccctgtcctgaaccagatgagaaactttgggatcctgtcggttactactattcagatggctcccttaagatagtacctgggcatgcccggtgccagcccggtggggggcccccttcgccacctccaggcatcccaggccagcctctgccttctccaactcggcttcacctggggggtgggcggaactcaaatgccaatggttacgtgcgcttacaactaggaggggaggaccggggagggctcgggcaccccctgcctgagctcgcggatgaactgagacgcaaactgcagcaacgccagccactgcccgactccaaccccgaggagtcatcagtatgaggggaacccccaccgcgtcggcgggaagcgtgggaggtgtagctcctacttttgcacaggcaccagctacctcagggacatggcacgggcacctgctctgtctgggacagatactgcccagcacccacccggccatgaggacctgctctgctcagcacgggcactgccacttggtgtggctcaccagggcaccagcctcgcagaaggcatcttcctcctctctgtgaatcacagacacgcgggaccccagccgccaaaacttttcaaggcagaagtttcaagatgtgtgtttgtctgtatttgcacatgtgtttgtgtgtgtgtgtatgtgtgtgtgcacgcgcgtgcgcgcttgtggcatagccttcctgtttctgtcaagtcttcccttggcctgggtcctcctggtgagtcattggagctatgaaggggaaggggtcgtatcactttgtctctcctacccccactgccccgagtgtcgggcagcgatgtacatatggaggtggggtggacagggtgctgtgccccttcagagggagtgcagggcttggggtgggcctagtcctgctcctagggctgtgaatgttttcagggtggggggagggagatggagcctcctgtgtgtttggggggaagggtgggtggggcctcccacttggccccggggttcagtggtattttatacttgccttcttcctgtacagggctgggaaaggctgtgtgaggggagagaagggagagggtgggcctgctgtggacaatggcatactctcttccagccctaggaggagggctcctaacagtgtaacttattgtgtccccgcgtatttatttgttgtaaatatttgagtatttttatattgacaaataaaatggag

SEQ ID NO: 2169 - DNA, 5147 bp, Homo sapiens
agccaccgcggcgacttggcggcgggtgtcatgcgtctggagcttcacattctctgccccccacccaccgcgccggcgctcccttgtcacgcctcgggaagcgcgcacctgccaagcaggcaagaaagaaccctcaagtggattgcctctggcagttggagccacaccggtgttctcagaatacaccctgtcctttccaatttccttcatatgcggtaaccaccaacagtcttggagtaacaagtcttaaattctgattctcagtctgctaaagatgaataatctgatatcatgtgaaatgaggaaataagaagctttctgctgacttcattttgacccagggtccaaaaggtgatgtaatcctgtggcaagaagattcaaaactgtggactatcttgcaaaaaatacaagaagatattgaaagttttcatgagtgcctaccacctaatctcaaacactatcattcatatgtgcctcattgagcaaatctttaatgaggatctatatgccagcaatatcttttgcttgggagcagaaacagaaagtacatgatggacttcattgaaggatggagatttggaagacatgaatggatgaagaaccaagtgcgtgagggcacctatcaggattattgctgaaatccttatggagttaactggctgagaggaaggcaagcaagcgaggactgatgggcccttggcactgtgagaacagtggaggaggagggagcagggttcataaggaggagcacaaacagaaagttcagtggccccaataaaaataacaccagaatcttccagatactttctccataaggcgaaaagaacaggtttctcttattgcctggatccaagagcatctcctgggttcttcctgttagaatactgaatgtccatggagagtttaacataaggaagaagaggcctgtctcccagctgaaactggtgcagcagatcatgcaaagtaaaacctcagcagctgtgatgaagtagagcagagggcctgggtgtctgtcagctccaagcggaagatttccccagctttctaggtaactgtgcttccactgagcaagccagacacagacttgaatgtcatcacaatctgtgcctgtgacatctttccccaagaatagcacaaattgaacttttacattcttcataatatggaaggaaaggtattgactgagccacttctttatgcctcaagacatctcatatgtatttatatggatacatacatgaatgtatatattctgtcataataacatattctatttttcttattatagcacagtgttaggataggctacataggctgcattaaaccctcaaatagaagtttatattatgcatcagaagccagtgcagggactctcctcagcacaacatctctaagtggtgacttggaggttcaggctcctttcatcttaaaatgccatcatcttcagcatttggcctcaacagttgccagagagggagaagagagtatgtataagaccacactgcaggatctgtgttaggtctgcaagcactgctgtcacctctgccaaatcccgttagccagaacccaatcatatggccccatcctaactgcaagggaagcctgggaaaggtcttcttgtatgccaggaaaagaaaatgaaatcgacaagtatctagccagtctttgctacaagtttctacatgttggaattattatctatatttttcttctgatcatgcttagcatttgatactatgtagactgccttgttgagtcctgctgtattttgtgacatccacatgcagcatcccattcctcacaacaggactaggagtggtcagaagttttatcacccactttatggacggaaaccctgagacccagagcagttacatggcttgtccaaagttacatagtactgttaacttaaaaacacaatttataaatttagacaaagaaagaggagactttatttcttataaagggttatagccttcaaagtggctatctcacaggctgggaagctcagccttcagcagaagcccagagacaagcattttgaaggcagaggggttgggatggagctttatgctgaacaggttgactaaatatacatattcaacaggttacaggaggagctatgaatattcatgagggtggtcctgacacatgcgtattgaacaaacatacatgtaacacatgacccatgttcactttgggatggagacttaacatttcaatgtattacagttaggccctacacatcaaaaggtcatttcaggacacaaaagctcacaagtacacaatctctgtaaactagtcagaaccagtccatggttggtggtcttatcaggaaaaagttactaaaattagtctctcatccaatgaaagctgtagttatggctggtggaacaggggttcagttgggcagagtctatgagcaggatgatttgcaattgtttaaatattgcttatcttgaggccagtgcttgtttagctgctggagaaaaagaaaatccttgtggcagttagagcatagtttcttccttaggtgtaggagtacatgacttcccctcacctggcatggccttaggtcctgtttataattcggtatcttattgccacaaagaatctgttctgtgagtcatgtgatctctattggaacattaatgctgctcagttgttgtgtctaaaccataaaagagaaggggagtataattaggcatgtctgacctctcatcatagctgggaactaagtctttaaatttttttctggggtcctcttggccacaagggggtccatttagtcagtgggggccttgggatttatttttagtttacattgctaagtgacagagctttgcttctttcactctgaggttagtggtctctctgctgtgccacattgtcttccccagaagctcaaactggatgcccagccctcagtgtacaaactcaagtatgcaagaaatacatctttattcttttatgaatatacctaatttatatgttggaaggtgtcagcaatgaatttgatcactttggtatttctctacctttaaagatatgtttacatttggggtgggatgaaggtttggtggaggggaaggtggtcaggttgggccaaggtattgggaaatccatttgttcctcatgtcagctgtttgaggaggcaccaacccagatgtccacagttccttctggccttcctttaccgatactgatgcacctgtgcctccttcctgtgtgcatggcccatttgtgcccagcatctccctgctattttggggccactccagggtctgggaagttctgtaggcttataacatacagtcattcttctccccagcttgctgcctccctgagacacagaggtagagaagtaggaaaggacctaccgtacccaggcctttgccctctcacttttcatccatccttcttcccaccagtggagggatgtgtttctagtcttccagggaagctcctctctcctcaaaccattttcttccaaatactttggctttattccaaatcctctctagtcctctgagatttttttataacacaaaacacaacttacagaagttgtgttgttgttttgctgtttatcttgtcacattatttctctaccttgaggcaacaggacaagggcctgctgtccagcgcacggaggcagggaggaaggggtaggggaatactaagaaaaaaaaatttctcgatcacatgtgtaccacatttaactttatcaggtccttgtgaggtgagtatctgtgtgtcattgttctgaaactaacagtgaggggacaaagcattgataggagttcttacaatatatttgggaactcgcaggtgagggcctctcctgcctgattggtctttcaatgtaccatcccaacccacccacctcaatccccatggcttgatcctgctgtctcggtgatcaagctttcagttaagaattgggtgataatgagctagttaatccaatttaaaaaaaaagaattaggatctgggctcagaagccccacagctgtgaaagcctggccgtagattactagtcttctagatgtagaaaagatttttcctttctctggctatttaagtctttatcagtcaccctgcctcagttatcaacacacaccctagagtaaatctgttccctgggggtggaaatagaaggggcatgtcattgtacatccacactgatgaaaggaaaggaaacattaagatggcttaagtggaaaggtcacatacggcttgtactagagagacaccatgctaaagcaaaacatcgtttaaaaaaattctgacttatcatgtgctcagaaatgctcaaatgggtacaaccatcaccaagggtgggatgggagggcagggaaaaaaaatatgaagcatcaaaaaaaattctgatttgtatttgtgaaattcaatagtaaccctattcattaactggattttaaaatcatttcaaagcacattcggctttcaaaagatgtttgtttaaataatacagttggcttttggtcaaaaaatgaagtttcggtaatgcatagtaacaactgtagtgtaattactggccacaaaataccaggtgccagaccaacccttttcgaaccatttaagagaaccaagccaagcaaaaatgcccagcctagccttacccagaagttcaaaagctcagcctttgtcaccaggaaaaaattaattcaaagagcaaagccattattcggcacaaccaggtattctgttgtaaacatcttttgttaatacatgttgaaagctgaactttctcacgtttgagtgaaagagggctgcttaaagagagtttaaaccaagccaggttcaaggtttttttcttttctttctttttagatttctgacttcatatctgtgggatccacacaatggggaggtactggccttggaatccatggttccccagctatcattttactttagaattacagtgttctctgttagtgtcaagggaatgaacctgacgagaaaagaccaaacataggactgttacagggaagaaaaatatgaaaagacctaaagatgcacgtcctcattatatgtaaggaatctatttcctagaatcctataaaaagctcaagtgaatttgcttcagttaataaatgtgatttaattataatgataatgcc

SEQ ID NO: 2170 - DNA, 4631 bp, Homo sapiens
agttttcctttcgttctgcggccgctgcagccagccccgcggctccctcagacccgcgggcgcagccgccgggggtgaggcgcttggggaccgcgggccgagcggcggggatccccgagcaccatgctggacccgtcttccagcgaagaggagtcggacgaggggctggaagaggaaagccgcgatgtgctggtggcagccggcagctcgcagcgagctcctccagccccgactcgggaagggcagctggacgatgagcaggagcggaggatccgcctgcagctctacgtcttcgtcgtgaggtgcatcgcgtaccccttcaacgccaagcagcccaccgacatggcccggaggcagcagaagcttaacaaacaacagttgcagttactgaaagaacggttccaggccttcctcaatggggaaacccaaattgtagctgacgaagcattttgcaacgcagttcggagttattatgaggtttttctaaagagtgaccgagtggccagaatggtacagagtggagggtgttctgctaatgacttcagagaagtatttaagaaaaacatagaaaaacgtgtgcggagtttgccagaaatagatggcttgagcaaagagacagtgttgagctcatggatagccaaatatgatgccatttacagaggtgaagaggacttgtgcaaacagccaaatagaatggccctaagtgcagtgtctgaacttattctgagcaaggaacaactctatgaaatgtttcagcagattctgggtattaaaaaactagaacaccagctcctttataatgcatgtcagctggataacgcagatgaacaagcagcccagatcagaagggaacttgatggccggctgcaattggcagataaaatggcaaaggaaagaaaattccccaaatttatagcaaaagatatggagaatatgtatatagaagagttgcggtcttcagtgaatttgctaatggccaatttggaaagtcttccagtttcgaaaggtggtccggaatttaaattacaaaaattaaaacgttcacagaactctgcatttttggacataggagatgagaatgagattcagctgtcaaagtccgacgtggtactgtcattcaccttagagattgtcataatggaagtgcaaggcctgaagtcagttgctcccaatcgaattgtttactgtacaatggaagtggaaggagaaaaacttcagacagaccaggccgaagcctcaaggccacaatgggggactcaaggagatttcaccaccacccatcctcggcctgtggtcaaagtgaaactcttcacagaaagcactggagttctggccctggaagataaagaactgggaagggtgatattatacccaacttctaatagctccaaatcagctgaattacaccgaatggtagttccaaaaaatagccaggattctgacttaaaaatcaaactggcagtgcgaatggataaaccagcacatatgaagcatagtggatatctgtatgcccttggacagaaggtttggaaaagatggaaaaaacgttactttgttctagttcaggttagccaatatacctttgctatgtgcagttatagagaaaagaagtctgaaccacaagaattaatgcagcttgaaggctatactgtggattataccgatccccacccaggccttcagggtggttgtatgttctttaatgctgttaaagaaggagatactgtaatctttgccagtgatgatgaacaggacagaatattatgggttcaagccatgtatagggccacaggtcaatcatataaaccagttcctgcaattcaaacccagaaactgaatcctaaaggaggaactctccatgcagatgctcagctttatgcagatcgttttcagaaacatggtatggatgagtttatttctgcaaacccctgcaagcttgatcatgccttcctttttagaatactccagaggcagactttggatcacagactgaatgattcctattcttgcttgggatggtttagccctggccaagtctttgtgttagatgagtactgtgcccgttatggtgtgagaggctgtcacagacatctctgctaccttgcagaactgatggaacattcagaaaatggtgctgtcattgaccctaccctgctccattacagctttgcattctgtgcctctcatgtgcacggcaacaggcctgatggaattgggactgtttcagtggaagaaaaagaaagatttgaggagataaaagagagactctcttcccttttagaaaatcagataagccatttcagatactgttttccctttggacgacctgaaggtgctctaaaagctacactttcattacttgaaagggttttaatgaaagatattgccactcccataccagcagaagaggtgaagaaagtggtcagaaaatgtctcgagaaagctgccttgatcaattacactagactcacagaatatgccaaaatagaagagaccatgaaccaggcatctcctgctagaaagctggaagagattcttcatctggcagagctctgcatagaagtcttacagcagaatgaagagcatcatgcagaggcatttgcctggtggcctgatttattggctgaacatgcagagaaattttgggctttatttacagtggatatggacactgcactagaggctcaaccgcaagactcctgggatagttttcctcttttccaactgcttaataatttcctccgaaatgacacacttttgtgtaatggaaaatttcacaaacacttgcaagaaatctttgtacccttggttgtccgctatgtggatctcatggagtcttccatcgcccagtcaattcacagaggttttgagcaggagacatggcagcctgtcaacaatggctcagcaacatcagaagaccttttttggaagcttgatgcactgcaaatgtttgtctttgatctgcactggccagaacaggaatttgcccaccacttagagcaaagacttaaactaatggccagtgatatgctagaggcctgtgtcaaaagaacaagaactgcatttgaactcaagctacaaaaggcaagcaaaacaactgacttgcgcattccagcttccgtttgcactatgtttaatgtattagtcgatgccaaaaagcaaagcaccaaactctgtgccctggatggaggacaagagtttggtagtcaatggcaacagtaccattcaaaaatagatgatctgatcgacaacagtgtaaaagaaatcattttactgttagtttcaaagtttgtttcagtgttggaaggcgtgttgtctaagctgtcaaggtatgatgaaggcactttcttttcatccattctgtcattcactgtgaaagcagctgtaaaatatgttgatgttccaaaaccaggaatggatctggcagacacctatattatgtttgttcggcaaaaccaagatattcttcgagaaaaggtcaatgaggaaatgtatatagaaaagttatttgatcaatggtacagcagttccatgaaagtcatttgcgtgtggttgactgatagattagacctccaactccatatttaccagctgaagacgctcatcaagattgtgaagaaaacctacagggactttcgattgcagggtgtgttggaaggaacactgaacagtaagacttatgatactgtgcacagacgtttaacagtagaggaggccacagcctctgtttcagaaggaggaggacttcagggcattactatgaaagacagtgacgaagaagaagaaggctgatatcacacagctttgcagaaggaaggaagaccttgatcgacattgttttttatttttttaaccttgtccttgtaattacattcattgtttgttttggccaaataaaaatgcttgtatttctttaaaaagtaagcctgaatgtagagtaaaaggggaaatgccaagattttggggtttttttgtttcctttttttgtttgtttgtttgtttgtttttttggagaagagcatcctcttttgtgtagtttgacctaaaaatgaaccttggctctgcttgtgatcagaacatgaacttttttttttaaagaagatttgagcatttttctgtaatcacatcaaaatgatgttttctgtgtaaagcgagatacatatttctcataatgcagcattgtgagaagtcagttcggaccactgcaccaacactgtcgtatccttgttaaaatggtgtgtaccttacaaattataatttatgttccaggttcgttttgtacttaatttgctattattgtgatgtgtataaaatctttaatcttggttcttagtactttgaattggtctacaggtatattcctgggatgaaaggattgccaaacccaaatatagactagattatccaatgggtttgtgtctttgttccattctcaacatttcttctttcaactataagtaatccccaggtgtggggtagcaagtgtgcttccgtcaagataccatattctcctgctccagtataacagcttgcaggcaataaaaatctatttgctcataactacttctgtatttattagacttatatagagcaaatgcagtaaaagaggtttgcagtgtttcaaacatccc

SEQ ID NO: 2171 - DNA, 3898 bp, Homo sapiens
tagccgttgcttctgggtccgccgattacaggatgtatgtgtcttcaaactgccggatttaggttgtgttctctccccttcctcctcatctgccccctttttgccaccgtttccactgtctgctgccacagtctcggtctgtcagccctagaacctggactgagtgctgtaccttctctcagtcccttttagatccccagaggtctttctgaattggacaaaacctacagaccccactccccagaggagtgcttatggaccccactgtttacatgtcagaaggaggggttggactccctgaaagcccagccacagacctgagacaaagagcctctgtccagatgcctccccacggagggagtttggagtcccatccagaccgtgagccccttgagaggagcccagccccggcgcttcttggtagcaccctcttctcaggcgaacatggcctgggtgaccatggagacccccacggtgaccaggaactttcagatgcccaggctgaagctcagagcccatgccctgtggcctgtccaagctccctgcctttccctctccccaacccaggcctccctccccacaacacccctgtcctcctgagatgtgctaaaatggtgttcttaaaaaataccccctgagagctcatttctgtctgctagaaaatgcctcccactcatgcttttctctctcctccaaataacttgtcaaaaaaaagcctttcccaaatttaaaatcttgcaagagatagtacaacaaaggtagcccagttcttcctcagtgccatcctggtgtgttcaggttttttggcaaaacctttgaggagctggtgggtggcaggactaggttaaagggactgagcagagggctcccgactgctgagctacgaggaagagggggcagtggagagcacactgagggctcagtgttgatgacatccagcctcctcgtgccagaggtccaggtcctcctggtgcaggagcagaagctgctcaggatcctgcagagatggtggcagagcccaggtagaacctggcaccctgttgcctccaagaccacctcagatgctggtttggccgcctcccatgcctccttcccctttgccagcagctcagtccttcaagagcagggccttggcaggtctgtcttaaaacaccgtgggagtctggccatcatcctggcctagcactgctgtgccctgtccctggggttgtgggaagctggtagcatcctggcagcccgaggagagaagggctcccccagaagcatgtgcccagcaagtcacagtctgcagagtcagccctctcaccagatttcctggggctcagggattccgtccccttcttcccagccccttgagagtgtgtggcagcgctggcagctctgagcgcctattgatctctctgctggcagccaggtgcgcctgcgtccgcctcctctcctcagcttctgctgaaacgacttcactttctcatgtctcctcccacctccctttctctccagaggccattaactgtttgatgcgagcaatcgagatctacacagacatgggccgattcacgattgcggccaagcaccacatctccattgctgagatctatgagacagagttggtggacatcgagaaggtgagtggcagcagggccctgcatgggctggcagccaggaccagtgctgctctctcttcttcccaccaggggagtcctctggtgtctgagtgccgagaagggggcatggggcgccggcagagcttggagaatggggtctggctgtgtcccaggcaggcagggcggagggtgtggaagcttcacggaggcctcctctcccttccctgccctaccctggaacccatcccccgtgtctccccaggccattgcccactacgagcagtctgcagactactacaaaggcgaggagtccaacaggtagcccccttcctgcctgccccagccccgcagggaccgccaccacttcccctcactactcctccccacacagctcagccaacaagtgtctgctgaaggtggctggttacgctgcgctgctggagcagtatcagaaggccattgacatctacgaacaggtggggacaggtggggatggcggcttccaccctgccccctctcagggcctgtgcctcctcctaagccccggcaccttgttctggaaccacccctcccccggctcaccctctgcctctcccccgacatcccttgccatgtcatccccccaccctgtcttcagcctggctgaatgttctccacctacgactccgtgccgtgccagcaccgtctctctccctggctgtgcccctcccacacccctcgcagagcttcctggaggggcccagagtgaggctggctaaagaacccagagggagggaatgggaagaagtgccaagaggcccagggtggccgtgggcaccccaccccatggcccgatggtcctcatccacagtgggagggagggagtgtcacatggggtccccccagcgtgcacggagccctgggtgatggccgagaaaaaggcaggcagctggccccctgggagagaggggcgggcgccgcctctcatgttcccaccgcctgccgccgctctgcccaccgccatgccagcctcccgttggtcctgacagccaggctgcctccttcccactgtctcaggctctcagaaggcccacgaacacctggctacagcctccacccccacccagccaccatcacaccctgatcttggtcgctcacgcactggccgctgacctctccaagctggtccctggctccctgcccttggggtcctgggttaacagggcctcacctcgggacatgaaccagctcccagctggccccccagtgcctggcagtggctctggccctctggctgcttgccctgagctcaccagtgccacttctccatggctacaggtggggaccaatgccatggacagccccctcctcaagtacagcgccaaagactacttcttcaaggcggccctctgccacttctgcatcgacatgctcaacgccaagctggctgtccaaaagtatgaggagctgttcccagctttctctgattcccgggaatgcaagttgatgaaaaaattgctagaggcccacgaggagcagaatgtggacagctacaccgagtcggtgaaggaatacgactccatctcccggctggaccagtggctcaccaccatgctgctgcgcatcaagaagaccatccagggcgatgaggaggacctgcgctaagccccacccagccccccagtgcccgtcttcctgtcccatttgctcagagagaggtggggccgagacttgctggagagcttccctcctttcccatctggggagtgccgcgggccacagtgggcaggtggcaccgggggtcagcatgcaggggcgccagaggcccaggctgctggccggacagtcaccctctgttctcgctacatcccttgccccctgtccatttatttaagcccccataggtgcccttcacccccaaaaccagctgtacagaatctttgatacagacctatttgctaggggtgctgccggggatttggggtcagcatctggccccctatctcctgaccagctgagtcatgaggccggtttctctctctctcccacttttgtcccccagccaagctctaaagcacatgtagccgctgagacctgctgtttctgctgggggcaggctcctcttcccccagccccgggagcctcccccagcttcctgcagccccgacctctcaggttagaccctgggccctggagcttaggggattctccccaccccagccccacacctgctccttccctaatgctttgaggttttcttggttggaagctgcagctggcccaagaaggaaaataaaaaacaacacttttgcatg

SEQ ID NO: 2172 - DNA, 4176 bp, Homo sapiens
attttacgtcgtgcctttttcccctacaggttaagattctgtgtcaccagttgctggtccaggtttgtgacctgctcaggctaaaggactgccacctctttggactcagtgttatacaaaataatgaacatgtgtatatggagttgtcacaaaagctttacaaatattgtccaaaagaatggaagaaagaggccagcaagggtatcgaccaatttgggcctcctatgatcatccacttccgtgtgcagtactatgtggaaaatggcagattgatcagtgacagagcagcaagatactattattactggcacctgagaaaacaagttcttcattctcagtgtgtgctccgagaggaggcctacttcctgctggcagcctttgccctgcaggctgatcttgtgaacttcaaaaggaataagcactatggaaaatacttcgagccagaggcttacttcccatcttgggttgtttccaagagggggaaggactacatcctgaagcacattccaaacatgcacaaagatcagtttgcactaacagcttccgaagctcatcttaaatatatcaaagaggctgtccgactggatgacgtcgctgttcattactacagattgtataaggataaaagggaaattgaagcatcgctgactcttggattgaccatgaggggaatacagatttttcagaatttagatgaagagaaacaattactttatgatttcccctggacaaatgttggaaaattggtgtttgtgggtaagaaatttgagattttgccagatggcttgccttcagcccggaagctcatatactacacggggtgccccatgcgctccagacacctcctgcaacttctgagcaacagccaccgcctctatatgaatctgcagcctgtcctgcgccatatccggaagctggaggaaaacgaagagaagaagcagtaccgggaatcttacatcagtgacaacctggacctcgacatggaccagctggaaaaacggtcgcgggccagcgggagcagtgcgggcagcatgaaacacaagcgcctgtcccgtcattccaccgccagccacagcagttcccacacctcgggcattgaggcagacaccaagccccgggacacagggccagaagacagctactccagcagtgccatccaccgcaagctgaaaacctgcagctcaatgaccagtcatggcagctcccacacctcaggggtggagagtggcggcaaagaccggctggaagaggacttacaggacgatgaaatagagatgttggttgatgacccccgggatctggagcagatgaatgaagagtctctggaagtcagcccagacatgtgcatctacatcacagaggacatgctcatgtcgcggaagctgaatggacactctgggttgattgtgaaagaaattgggtcttccacctcgagctcttcagaaacagttgttaagcttcgtggccagagtactgattctcttccacagactatatgtcggaaaccaaagacctccactgatcgacacagcttgagcctcgatgacatcagactttaccagaaagacttcctgcgcattgcaggtctgtgtcaggacactgctcagagttacacctttggatgtggccatgaactggatgaggaaggcctctattgcaacagttgcttggcccagcagtgcatcaacatccaagatgcttttccagtcaaaagaaccagcaaatacttttctctggatctcactcatgatgaagttccagagtttgttgtgtaaagtccgtctgtgtgcagctgtacaggcagcttactgtttgctagaggatgcgaaagtcataagttctttacatattacttgtgccatatcttcttcaccctaaacatagctctttctttataatatttgtgatgatggaaacaaaagccttggaacaattgcactttaagtattacacagaagtaaaagaactacagaaaatgtacagcaagacaagtgcccggaagttcactgatccttcagaaggaaatgcgctttactgattgcaaagccttcagaatattggagtgtggtgtgtttgctcatctgatgctttttagttcagttacatgtaacatcacatttttttatcacgtgaaagatgttagatttgtttgcttataaattttttaccactcccacataaaatgctcatagtttgggagaggaaagagggaagattctctcttcttttaacagagagatgattgctctgtatacccattgcttcctccctgaggctgtcccaaagtgaacactgatggagtggtcaaaatcataaggttgtagcaagccaaagatacgtatgtgacagaagcacataagcaataagcagaaaaccagaagtgcatgctgtgatgcctgtgactccttcatcccgctcagtgccatgtcctcttttgtgatcttccagaaagctccaggattcatttgagttccacatccaagtaacagatgaattatattcatgttgtaatgcattttgtggagtttacaaaaccagtgtctgttaaaactttggaaaatgtcttagaaaacgttggtgcttggtgatgctttatttgtttaattatcaagaacaaattatggcaatgctagtttctgcttaaccaaaatactctgtgtatatattatacatatataaatacatgggattgtgtatgtctatatgtgtttaaagcttactatgtcttcattttggcttccatgactatcttttatacatggaattccttaagattgagaatatgtcactgagtgaatgatacctgcagacagtcagttgatatatgtagagttcagaatgactgttttctcatgtgcctttggccatgattctcaacactgattgtataacagaattttggggggagcttttaaaaaataatgactgagtctcccaccagaccgattacatcattctcttgtggcgggacccaagtagaattgccttttcttttaaagttctccagatggagctaatatgcaacaaagttgaaaaccactgatcctgggggtgtcttgttaattttgaagtaaaagtgtacagaagacgtagtgtatgagaaagggccatttttaagacagttacctgttgtgctgctgttacaatatataatgaaaccaagtcaggggagtgaatttatcaatcttttgatgtaaagtaaaaacgtagttcacacttcaggagagaacttcatagcacaatgtctttctataagatatttttaatgatttagtattttacaacatttgtttaccatattttgatataccatttttttctatctgcccagttttattaaaaaaactatatattattttctaaagaaacaatcatatttttatacaaaattatgttttcaggtaacgaaatagatgtagggtacagtggaacataagcagtgttacccctggctgggagtcagtattatacaacaaatggtgagctggaacatgccctgtctgtgctgtccctcctgtgctgggtcgcggatgtgtaggcaacattgccttatcacgctaggttcacctgacactttaaaaggaaaaaaagttccatagagttctgtggtcacaaaattgttttgcttttatcaaatactttaatagaaccaaagttgcagatattggaatgtatggaagtatctcagtctctgcataagaggattaaagtatgaaaggatcatttaatgactgttttacttataagtcattaagtaatccaccatttcttatggatgatgcttaagcctggtgaggtttgtactctaaggagcccagatcataatgcagtgcatttccttagcccttagagtttcttgcaaacatttaaaaaaagacatatttaagaaagaaagataaagaaaaaacatatttaattactgtaaacaggtactgctttatgtttattttctctctacttcaaccaaaatcagatctttgaggttttgctgacattgttggtggttttgcacatgttctttctaattggatttatgaatagttctatgggttttcaaagatgaatcatgctaagaacacttctgctttttgatccactgtttgcagcagaattatatatatgtataggaaaaatccactttgaataatccatgttttgtatttggaaattgttttt

SEQ ID NO: 2173 - DNA, 4133 bp, Homo sapiens
agatgaatctatgaaggggagtttattaggagaattgactctcgatcacaaggtgaggtcccacaatagctgaggagcaaggaagccagtccaagtcccagaacctcggcaagtctgctctttccaacttctgcctgctttattctggctgtgatggcagctgaagagatggtgcctacccagattaagggcgggtcggcctcccccagcccactgactcaagtgttcatctcctttggcaacaccctcacagacacacccaggatcaatactttgcatccttcaattaaattgacactcagtattaaccttgacagcgcccaaggaggggagggccagacccagcgcacagttccagtttctgccacggaaacactgaccatgtgttgctcttaaggtcggagctccagggcggcgtttccccgggtttctgcgtttataagtgatgttagtatctggtttgcgtgtgcacaggtgacatctcaaaaggatatggtggctgttttctgtcttcatataagttagaagcttgctttctctctctctggaaaacttgagtaatgtggaatgatctattccctgaaggtttgagtattcacctaagaattgcctttgctgagcacatgaggtgtgctgtgtgcttttcctaatttattattatgaatctgccttagtgttgtgtgcctgaggatttttctgtgtttctgggaaccattttggtaactgagagttttctagaaagccacctgtttggtccctgttttctcgtggattcgcacagagtaaaagacagtgctcttaccattatttccatttccttgttctgcctgtagctatctctacttttacatttctgtttatgcttcctttttctggattagtttatacactgttttttgtctttttctttgtgagacaggatcttgctctgtctgccaggctggagtgcagtggcacaggtatgattcactgcagaactcctgggctcaagagattcacctgccttagcctctcatgtagctggggaccacagtgcttacggccacacctggtgcttacggccacacctggctaattttcttttcttttttaatggagacagggtctcactttgttgcccggtctggtcttgaactcctgaaattcagcgatcctcccacctcggcctcccaaagggctgagattacaggtgtgagccaccatgcccagccactgtatttcctttttaatagtgtcttttactgatttgttttctacatattctggaatacttttaattgcatttttatgtttaattttttcagttgctcctaacttttagaaatcggtaggattttgtatcctaattacattttaataattctgaaaatgtcaagttactttctaatcatcaggaaagtcagtgggtagcaaagaatatcccaagatttctctgttatcttcctctgagacattgagtaaagtcccatgccagcctcaggaggccttgcagtgcggaggatcagcacacggtctgggcgttggacagcctgggtgttgaccacagtgttctgtgttagctgtgtgacctcagaaaattgtctcatctttccaagcccgacgacttcatctagaaagcgaagctagcgacagcatctgcatcccaggctgtcgcgagggtcaggcgagctgtgcttgtaagcgcttgccacggccgccggcacacgttaatcttgatcggtcttgatgatgggctgtaatcatcttcagttcagtgtctcacacggtcctgttagacaggagatgcaggcgttcgagctgagggccgcgtcacggagcccatgctgccttcggtttctttttagtccgcaagtgggaaatcgatagtagtggacttcaaacggcttcggactgtgcagacgacgggcagcgatggacagatgccattcagtgtgtggtgtgtgtgcacgcctgtgttttctcttgtttcattctgttttttcttcctcctcgtatggtatttcttttgtgggataacagcaacagttgtgaagggcctgagatgttatcctgtttccaagctgtggagttagctgccactttcatggatgctggcaaaaaatgtaagattcctacgttagagaggaaggctatttattacacagcaacagcagtacagccagagtggcattcttcccaccagccacggggccctgattcctcagggtcttcaccgagggcctcatgaggcctgcagtgggctgtgtggctggagaggaatcctgaacttagaacacccaaatccttgctactgggaggcgagcctgcctgccctttgccccagagggatgcagtttagcttacaaggctgtcctctaaacaggcatccttgtgtaaatgctttgaacaaagccttgtcactgtctgtgcttggaagacatgcagaaacatgacacccatggagaaccatctccccaccagtcatctgagaagttagcaggcttgttttaatgctggacagatgcttggcgtggacagtctaagagttaactaggctgctcagtatgatagtgatgggtgccccagccctcctcatggaggtgagccgcgcgcattcagcttgtttctcatcgagacagaggacagcattctgttaagtttctgctgctgccatgataacagagctcgctgtcacattctggctcccgcaggctgtgccccggacacaaagcaactctgtctttaccctcgtgagcgcggcttgggccataataggacttttctttcatttgtatctatttcttattgtaagccttagatcatttattcccttccttacacttctagaggtgaaagaaaacccaagtctgcctttgtaaaaccaagctgtggcctcaggagtcagggctggggcactcagccttccaccccccaggcctcctctgccacaggcctgctgcatccggctgcatttcagtcgggcagccggtgggtttcctgacatgcgtgataagagtgggtttgagtttggtttggcttgttttttacagttgaattctatattatttggtcaaaatattactttgcaatttgcaaatgtggtggcacctaccattttactagccacaagtaactcataagttgacgtaggacctgctcatattataccaatattttaagtattttatgtttcatcttattagttattcattttattttatctaatgctctgccagaattcattccaaaaggtaaaaattactaaactataagactcttaaataaggcgtgtatattagcaacttagtttctgacatatagaacattaacattccactgtatcttaaatgtcttttgcctttttattaaaaaatgattaaatggttactgaagttttcctctgcctgacatataaatgtcttcatattctaacatgatattagggaactaaatatatgagtatagacttaatatttcttttgtcaactaaactgactaaattttgtcaaagcagattggagacataaaaactagagtggctttaatgtgcgagcctgaatgcaaaacgcagctcaccgcctctacctggagatcaggaaccccgggccacacagggccatacgctgggtctctgtgggatccaaagcccctgtgggttgtgttgggggacagcagctcctgggctttccccgctaactgccaccgttgcttgtgttacagcgcgttccttcacctcgggcagaataactttgcagaagcccacaggttcttcacagagatcttaaggatggatccaagaaacgcagtggccaacaacaacgctgccgtgtgtctgctctacctgggcaagctcaaggactccctgcggcagctggaggccatggtccagcaggaccccaggcactacctgcacgagagcgtgctcttcaacctgaccaccatgtacgagctggagtcctcacggagcatgcagaagaaacaggccctgctggaggctgtcgccggcaaggagggggacagcttcaacacacagtgcctcaagctggcctagctgcctccaacacactacgtcagaaggacccgggtctttgaaactgtgtcttgaagctaatgtattaatgtgacatggaggaactcaataaaactcctgcttc

SEQ ID NO: 2174 - DNA, 3747 bp, Homo sapiens
agaaaccgataagacactctcatgctgaggtgaaagtcagtaggagctcaaaatagctccataatcctgcaagtactaggcgtggatatctggataatgaaggagtgtgaattaagaaggagtaccaggctccaaggggtggcaggggacaaggttgggtcagccacacgccccctgtccttcagcagaacatccaggggcagagcagccacctggcactgtctaagccccctcctaaggctcagccccaatagggcccaactgaccctggaagttatccaaaaaagcctgtctattttgcaagcccccagtttgagggctcttgtcccttgtccaaacgagttatgaggccctgtgcaactgcactgccgaacaggcaggcagctggccagttagcaaatgcttatggagtgtgcattttgtgccctgcactattctaggcaggggattgaacagcagtcagagctggcatggtccttgccctcatggacttatactctgttcataacctgtcactaccttctgaacttctcttgtggtgatgaagtgagagcccctgctcagcctcagatggagcaagctacacctgcaccttcccagagtggttttttcttcgtccttgggttgtggaagcagagcatcacacagaggggaaaggaagggctgccctactcacatactcagggaacttcctctctaggatgttcacccctcgctctttgtccagcctgtgtgcctggagtctgccaaccctgccagtgatcctgagggctggggtctcctgggctctgggaatctcccggccacttctctcccaggcttttgccatggctgggatccaactgagtcactcattatggcagggaggggaaaagtcaaaggggaacatctggagctcaggcaaagcaatttgatcccactgcaacagagggcctggagggaggctttcagatggggtgcaagaacagcacatctgggaaaggggtccagcttgggcaaggggacccgcttcctcctcctcccatcccagggctgtaggtgaccttgcctgcatccctgcccctccctgggcctcagttttccaccagtacaatgaaggggaggagaatgttcctatcagttcaaacattgtgtgatttctttggtgagctgggtggggctgcgaggtctagaggttaagaagacaactggagtcacattgttccctggagatcctttgtggatctttagggacaagtagttgggggctctgggaaacaaagaaaaaaattatacacatgctctggagtctaaggccagcagggagaatagggagggaggacagtgggagagacatccaaagggcctccctctcagacattacaggatacacaagcaaagctctatgaagatggttagagctcccgttgaccctcactgccaatcccagtccctttccacattcctccccagaaggcagcactgtcaccagattggtgtgtcatttttagaccctttactaggcatttatagatgtataaatgtgtgtccatagacaatatacagtgctgtgtcatgctagattttgatctacccatagcagaagtgctgaattttgattttaagtttctgtgtccccagttctcagccaattaggaaacaatcaaatacaccaaacagacctttgtttttgagaccctgaaaccttagagctggaagggccgttagtaattatggccatctcctcctctttgctggaaggagaaactgaggttccgaatggtgcactgctgttctctgagtctcagagcagtcagtggcagagctaggggtagacctgggattctggctttttgtcctgctttaaatatcctttcctccatgctctggggcaggctaactccccggttgcctcccaaggctgggtgtggagcttttccatgcctcaggccctcccctgcctccttccctgcaggtacctctcccacaccgagctggctccactgcgtgctcccctcatccccatggagcattgcaccacccgctttttcgagacctgtgacctggacaatgacaagtacatcgccctggatgagtgggccggctgcttcggcatcaagcagagtgagtgtctgaacaaagaagcaaggggcatgggcagaaacactgctcccagggtgctgggttgtcatccccccactctccgctctcttggtctgtctgttgtctgtcctctctgcctgtctctgctctctctgcctatttgactcctgtctcttgggcgtcttcctgatccttctctgtccatccaactgtccctctctctttcccttcctcaagcgttagcactcacccgtgctaaacactattttgggaactggcaggcacacagagaggaaacaggaagtgtaacttggcagcgtgtgtaagagacagggacaggccagagacagagagagcgagattcctccgtcactgacttcctgggtgaccttgcatggccacctagacccctgcccctggggatgggtgggagtccactgactccttgggaagtgcgttatcatcgacacagccttatttttaaccgtgctcttttcttgctttgcagaggatatcgacaaggatcttgtgatctaaatccactctttccacagtaccggattctctctttaaccctccccttcgtgtttcccccaatgtttaaaatgtttggatggtttgttgttctgccttgagacaaggtgctaacatagatttaagtgaatacattaacggtgctaaaaatgaaaattctaacccaagacatgacattcttagctgtaacttaactattaaggccttttccacactcattaatagtcccatttttctcttgccatttgtagctttgcccattgtcttattggcacatggatggacacggatctgctgggctctgccttaaacacacattgcagcttcaacttttctctttagtgttctgtttgaaactaatacttaccgagtcagactttgtgttcatttcatttcagggtcttggctgcctgtgggcttccccaggtggcctggaggtgggcaaagggaagtaacagacacacgatgttgtcaaggatggttttgggactagaggctcagtggtgggagagatccctgcagaacccaccaaccagaacgtggtttgcctgaggctgtaactgagagaaagattctggggctgtgttatgaaaatatagacattctcacataagcccagttcatcaccatttcctcctttacctttcagtgcagtttcttttcacattaggctgttggttcaaacttttgggagcacggactgtcagttctctgggaagtggtcagcgcatcctgcagggcttctcctcctctgtcttttggagaaccagggctcttctcaggggctctagggactgccaggctgtttcagccaggaaggccaaaatcaagagtgagatgtagaaagttgtaaaatagaaaaagtggagttggtgaatcggttgttctttcctcacatttggatgattgtcataaggtttttagcatgttcctccttttcttcaccctccccttttttcttctattaatcaagagaaacttcaaagttaatgggatggtcggatctcacaggccgagaactcgttcacctccaagcatttcatgaaaaagctgcttcttattaatcatacaaactctcaccatgatgtgaagagtttcacaaatccttcaaaataaaaagtaatgacttag

SEQ ID NO: 2175 - DNA, 4388 bp, Homo sapiens
tctttcagggatggaatcaaatggtaattaaaagcaaatgattgccaaggtcgttagagatgccagagcctcaggatcagactcgtaagcaaatggaattggtctttctccaaaatcctgcactgatttaaccacaggatcgtaaatcaaaggggctgtctgaaaaccagacagccttccccaggctgtgcatctgaaatactcgatcccagcacatgtacagcaggggagctacacacgggagggagaaaagcaccgggctttgggagtacctgagaactgcagaaaaagagcatgctgtgctttctctctcaaattctttaggagccgctaggctggagccagcatatgtttttgaggtagcttgcctctcagaggctttttagaggatgtgtgacctgtgcagcttcctgatgtcagtgacaccatggggatgttgagtcaggtggtcttggagcctggacttttcagcctagctgcaggagccagcatggagggacgtctcctgagcatgtgcttggtgtggctcctgggtgggtgggcggctgcgtctctggggtatagaaggagccaggtgcttgtggaagaattccataccacttttctttctgctagtgtggattagcagaggtgatgggagatggacgaggtggtggacaaccagaagttcaagaagtcatgacctaagacggtttcaagaactagtcttacaggaaggagaaccctagaagaaaactgtgactgctccctggagccaggtgtttcctataaggcagcaaatgttgcacaattctatgaaaaaacagagctggcaattgggataggttgagggggtcttgaccctgaaggggttgcttttgtggaccttttatctgggccgaggtgtgcagtgtcacaatcactgggctacaaggctgctgatagacacttctattgcagaaacagctcattatatttcttgactccagagtatttcagcagataaacaggcatgcaaggttgctttatttaaggagttaggggaccaggaaatatttgttgtcagggacaatgcaagtggtaaatattttatcccttaaaaggcaagaaagctcagaggacatgaggaaaccctgcaaaagcaggaaattggccatttaaaaagtacgcatgaggtccctactccagggagtgtttgctgagccccaggggagaaaggaagaggatgggccagccaggagtgcccagtggatttacagcagatttaataagtctactttaattatttaaatgaatcaaaatgcataggagtggaagaaagaaacaagtaaaaagaaataaaaattcttttcggaaaccattcttaaagtcttttctcttaaagaaccatcttcttagggtcctttttctccagttgctgggtgaggcaaaatggtcttttttattattctaatgttaactaaaacaaaaaaaggcctttgtgagctcacttctcagattctaagctgccttggaagtccatttccagaaggctaatgttgctcttaaggacctaccagctgcccctgctgaactccagggtgcagaagtgtttggttgagttttgctcccctctgcttcatagccaactacagactcaggaattagcagcctggtttctccttttctccctcatcctcctggcccaggcccctccctggacagtggtaacaggcccgaggtggctgtgcagcctccctgaggctctctgagtacccctggcaccacagaggtgcctgcatcctggcagggatgacgcagctgcacggggtctgtacactgaggggctgccctcacctgtggagagtgggtgctgggcagcaggtgcctcagtccatccaggctgccatagcaaagcagcatggactggggacagccactcacttctcacagttctggacgttggagagccaagatcaaggcaccagcatggtgggaggctggaatcctggtcagggctctctcccaggttgcagactgctgacctccctctgtatcctcatgtggcagcaagacagctggagaactctcaggcctcttttataagggcactaatccccttcttaagggctgtaccctcatgacctagtcaccccccacaggccccacctcctaatttcctcacattcgtggtaaggattttaacatggattttgaggcgacacaaacattcagtgtgttggatagacagcaagcctgcctgggcagtctgtacctaaagccacagctcttcacccacttccttctgaaagtggcatcatcatgctccctttagatgatcaaaatgagccccaattcacaagctcctagaatcccagataggaaaagcaccccgagttccctcccacaaggcaggtgggcgcccatcatttgtgatgaatgctagctactccatttaattctttacatgtccaatgccagctttctctccgtttgcctgttagccgagaaccctgtgcaactctctcctggatgtcatgggaaatatgacaaagagagaacacttggtcttggcctcaaaggactcgtaatacagaagacccgagaaggatgtacctgcagggttatctacagcagaaatttaatcaaatacttggcacatcgcagttacaaagaaagttttcaacgtgggccattggccactgcaggtttctttgttagaaacatttgtgtgttttttatccgagggaacaaaaccctaggaaaggaagtttccatcatctactcccatttttcctccttcttgaacaaaacttttagctcaaggaacactgcttttgaaggcttgtgtttcatgcagcctgcttccttagttgatctgttcacaagatcacatcaagtaatttcttccattctgggaagatggcgaaaacaaacagatactgtcagcagatgttgatgaaccacctttccagaaataaacagtggcagggaacagagaaagcctggagaatccccatcagtcatcagccggagaagaccttttcctgggctggagtccttgctggggaaacgtctgttctctgcagcctgaggcagctctggccaggaggcagcactcagcaagtcctaagaccaaattaccatcctggctccactttgggtttgtaaagtcatctgactttttctctccaggtgccttagttgcctcgtctgtaaaatgtacccatggtctcctgggaggttgtaaagtctaaggagatgctgtacttgagcctccgagactcgaatatcctgtaaatgcaagctgtagctatttaacttgttacctggagctaagcaggaatcagagagcagagtaggcagaaccccactctttgcctagaacattgctcatttataaagtataagtttctttctcatttttagaacaagtttaattttttttccagagattatttgcatgggatcctttttctcccttcccctttctgatgaaagctttttatagtgtgtgtaaagaatagcaacaaggaaacactttctggttcctctgctttaaccttcaaatcttctgggtacagaagctctggctttaaatagccctttctaagattcggggaaaggggatgccgtggaagccaagttggtgagcctgggagaggacacttctcaaatgagagtcatgtcttggaacatggatccccaaaaaagagggaataattttacggagcaaatgatactccacagtaccaatcactcatcatgtttaaaaactgcatatctaattctctttccatgtatccatcttggaagaatactgtttccgaaaaacatctcagaaaagagaaactttagaatgaatacaatatacaggctttaatttctgcttctctgtagttgtgcctgtaggtctctaatttttattcaggccaaagattatgagaattaacataaatgatatttttaaaatttgttacaatacagaggtgtctccttattcaacggtagctaaaattgtcccctcgttgacagtatccacagaggccagaaacaactctgcttgttatgataactttggcttcttcatgactgctaaagagttgtcccagcacttggggaggctgaggcaggcagattgccctgagctcagaagtttgagaccagcctgggcaacatggtgaaaccccgtctctacaaaaaatacaaaaaaaaaatttatccagtcatggtggtgcacacctgtagtcccagctacttgggaggctgaggtgggaggattgcttgagcctgggaggtggaggttgcagtgatctgagatcacatcactgcactccaacctgggcaacccccagactttctctttcccacctccaacagtgagaccctgtctcaaaaaaagaaaaaaaaaaggtaactagtcaacaacc

SEQ ID NO: 2176 - DNA, 3732 bp, Homo sapiens
atgatgcttttgcagttgctgctttcaaacattattcaatgtataagtccagggctcctttgaacatcaaaacgtttgagatagaggtgggaacaatcctcagaaatagattaaaagacagaactgaattgtatgtgttttttagtaaaggagctaaatgccatactttttttttttttttttttttttaagagaaagagtctcgctctgtcgcccaagctggagtgcagtggtgtgatctaggctcactgcaaccttcacctccctggttcaagcgattcttgtgcctcagcctccccagtagctgggactacaggcgtgtggcatgatgcccggctattttttttgtatttttagtagagatggagtttcaccacgttggccaggcttgtctcaaactcctgacctcatgtgatttgcccgcctcagcctcccaaaaggctgggattacaggcatgagccaccatgcctggcgccatactttctttaaatataaaagatggagctggcattggaaaaataagcatgagtttgaaatgcacaaaacagtgtgcctttgcaacctcaacataaacactggttgtttttcactggtttttctggattctatattttagaaataaatatgaagcaaaagttcccctagaaacatcccatggtcactacacatgacctaatggagaattccccctaaaatgtatatataggcatatgtcacccagggaagcaaacaacaaaaaacattctctccttttcttttatcttttacctccaccacacacacacacacacacacacatacacacacacacacacacacatacacacacacacgcgagttcttcaggtgaaaattttggactgggaggcagagtgccctgtgaggctgctgacctggaaaatcttttcctttgtggagaggccctttggccccagtaaaagggctgcacagacctcacttctatctgtgaaggtgaaattctccctctgtggaggtagtatgtggagttcatagaccagtggtcttcatactatatgtattctatggaaaaatggtgagatcactgatgccttccatggcctctccaaggctgggtataagagagaacctggtgaaggaaggagatggaagaacttccattttcctaagctctgacatgggtgaccttggatatttctgccataccaggaagtcacaatctttacaaagctggctcctggggctacctgctccactggctttatgactagagattcagtgactaggctctgtatccactgggttttctggagaaagacattatttgatataattattaaaatcaaacatgtctacccactgccagacagtcaaggctgatgcagtctgggctaatcaattgagctggccatctcccatcccttcatcacaggcaccctctctccattccctgagggcccacagctctagaggtgaaattgcctcggttctcagaggatctccccggagggtctatcttccctcctctcccctcggtttctaatgcttgtgtcactctcagcaccgcgtggtaactgctattgttgccagctttcctgcttataagttttttgttaaacctgctggtgatagctgagataccccaggataataagtcataaaagtccaagctaatcgtttactggctgctaagaaacctcttctcccaagtgacaattgtgttcacttgttcatgcacttatgtatccattaaacaaacaactgtggagccactgcaaagctccaggtgatgggcttggccaatgaaataatgcaaaacaaaggaggccaaaaggatgaaccttaaggattctgtcaaccttattgtcttacctgggtgaataactcatgggatggagtgggagattctaggccactaagctgctatactttatcttagccaaaaggcccagattgcttctggcaggtggtaatatggccacctcttctatcatcatgccttggatcccactgagtggtttgtctaaggcctctctgccttgagctacaggtaaaagctttagcagtcattgtttcattccacagataccctaggtcaaagcaagctctcaagattcaggagaaagtggagaggtgcttaccttcaggagaagagctacagtactggggatcttggaggcattttgtcttcaaagatgtgttcctggagagctgcagaaagggttagagttattcctgggacacctgcatggtgtccaagactctgggccctgtggtcactgggagctgtggaggaagagtcggccgattccctttgcagcttctctggatggaatgacacttcctttttttttttttttttttacagagtctagctctgtcaccaggctagagtgcaatggtgcaatctcagctcactgcaacctccaccccccgggttcaagcgattctcctccctcagcctcccaagtagctgggactacaggtgcgcgccaccacactcagctaatttttgtatttttagtagtgacggggtttcaccacgttagccaggatggacttgatctcttgaccttgtgatctgccctcctcggcctcccaaagtgctgggattacaggcatgagccactgcacctggacacttccaaatttagacaaacatgcctgcaggccccttgaagtaggaggaccgatagagttgctccagctcagtctccctgaatggtttcacgaaggcctgccttgggtgtgagagccaggaaatggcacttgcattgggccaaactgtcactgacacataatttagtgcttttttattcttcagttagatgtacaggtccataaaagcagacatgaaacaaaagaagggctgtggcatgaatcccttaaaaataaagaagtctgttcaaatgtggggttaatgaaaaatcacactcaatattgtaccaatctttctgtttttttcaacagagaatactggaatctcacaacaataccttagttgacccttgtccggaaaactcaaatatatgtgaggtgtgcaacaaatggggacggctgttctgctgcgacacttgtccaagatcctttcatgagcactgccacatcccatccgtggaagctaacaagaacccgtggagttgcatcttctgcaggataaagactattcaggaaagatgcccagaaagccaatcaggtcatcaggaatctgaagtcctgatgaggcagatgctgcctgaggagcagttgaaatgtgaattcctcctcttgaaggtctactgtgattcgaaaagctgctttttcgcctcagaaccgtattataacagagaggggtctcagggcccacagaagcccatgtggttaaacaaagtcaagacaagtttgaatgagcagacgtacacccgagtagaagggtttgtgcaggacatgcgtctcatctttcataaccacaaggaattttacagggaagataaattcaccagactgggaattcaagtacaggacatctttgagaagaatttcagaaacatttttgcaattcaggaaacaagcaagaacattataatgtttatttagccattcttatctcctcccttcagatcctctggcagctagctacgcaatgtgcctgtggtcccactaatctgtgactgctcctgtggaaactccacatcacaatcctccaaaatttatcattgccattttaaaaccgtcttttcagctttcaataaaattcaacaccccttcatgtt

SEQ ID NO: 2177 - DNA, 4325 bp, Homo sapiens
gcttagattttttcctacctatttatagttttccaatttcattttctgtttgtttctgatgtaaaattgtgtttttgtttcattaccttgtatctaacacacttactcaacatattaattaattctcataatctttccataagttccttgtggttttctataaacacaatcatgccatctttgaacaaaatgagtttatgtctcattttctaatattttaattttacatatgatgtgaggttatgatcaaagtttcctttcagaattcaagttttcaactgttccagtgcaacttattaaaaagattattcattccccactgaatttccttgggacctttgttcaaaatccattgaccatatgtacctgggtttacttctgaactcctgtcctgctctggggacctctgtgtccaggccaccctccaatgccatggggacctctgtgtccaggccaccctccaatgccatggggacctctgtgtccaggccaccctccaatgccaggctgccccaatgacggtggtcatagttggtccatctgagctacactggatctgcttaaactgttcatttcttttattctaaggagattctgctgatatcttccttcctcctgggtatctgattataatcaattaagtgtcaaccattttagtagaaaaatcgaagaggtaatttttcttactaaagtgagataagaagaaagaaagaagtaacatttgctctgtagggcatctgcacattctactaaaactttggggtaatcttggcccagttccagagactgagttggcttatggggagctgtgttcacggggcggaccagcctggggtcatgtggatctgggctcggccccaagcccctcaccaatgctcagcctctgcggctctaccgttgggaaacagccccaggggaggcttgtccctgagtgagcactccccaccggggccctgttctacagcatattctgactcagcagccccttccttactatcagccctctcgcatcttcaaggatgttttcttacatctttttccagactttcggttgttttctgttggagggtggtatggggttacttggtagagcaacactcaaagccttcctttttaaacgagtacagacaggtagcagtcaagataaaaaccaaaataaagaaatcaaaaaagcccagaggaaacaaataatcagagaatacggataatttccaaaaaatataatgactaccctccaagagatgatgggactatgcattcatggaacaagaacagattgctgagaataattatccaagtattaagtgtgggagcttgataaggcttggctccgtgtccgcacaaaatctcctgttgactcttagtccccagcgttggaggtggggcctggcgggaggtgcttggatctcagggtggattctcatgaatgagctagcaccatcccttggcactgtcctcgagacagtgagtgcgttctcatgagatctggtcatttaaaagtgtgtggcagctcccacctcgctcttgctcctgctctgaccctgtgagacgcctgttcctgctttgccttccaccatgattggaagcttcccgaggcctccccagaagcagaagctgccatgcttcctgtgaagtctgcaaaactgtgagccaactaaacctcttttctctataaattacccagtctggggtatttctttatagcaatgtgagactggattcatacagagctcttcctgagagaaaaaagaatgcgaaacacagtgagtgatcaaaggatcaggcaggaagttctaacatttgagaagggcctgggaaggcggaggtggcagacagcatgggagacagtcagcaagagggcggaagacacgtcccaggccccggcaacggagggtcccagcgtgagaggactcccaaggctggagctgggtgagaggggaagagaacccgttgaggcatcctggtgactccttaggggaggggaccctgtgcacttccagagagagagaggggatttcccagccctcacacatctgagggcctggggcgagggggtgctgccgcagtggcaccgttcccctcagactcgctcatcaggacttcagcactgcccgtccatggggacgtctgcactcacagtgtcctcggcactgccctccgtggggacgtctgcacacacactgtcctcggcactgcccgtccatggggacgtctgcactcacagaatgtcctcggcactgccctccgtaaatggggacgtctgcactcacagtgtcctcggcactgccctccgtggggacgtctgcacacacactgtcctcggcactgccctccgtggggacgtctgcactcacagtgtcctcggcactgccctccgtaaatggggacgtctgcactcacagaatgtcctcggcactgccctccgtggggacgtctgcactcacagtgtcctcggcactgccctccgtggggacgtctgcactcacagtgtcctcggcactgccctccgtggggacgtctgcactcacagtgtcctcggcactgccctccgtggggacgtctgcactcacagaatgtcctcagcactgccctccatggggacgtctgcactcacagtgtcctcggcactgccctccgtggggacgtctgcactcacagaatgtcctcggcactgccctccgtggggacgtctgcactcacagtgtcctcggcactgccctccgggacgtctgcacacagtgtctttggcccagctcgggttaggagcactcgctctggaggcctgactgtgcttttgtaaattttcacaaacagtcgctcaataggttttattttttgcttccaatgattcaatgaccaattctgctaaatttcacacagccgaaacacttgagaaaattggtagtaaagaacatttggaatccctgaggattttcagagttgagcgtgtgtggtggttagctgtattcctccactgggctgggccacggtgcccgggtctgatgggacattactctagaggcctctggaaggcgttggatgggtgggctgtgaggaaagaagatgagcctgcatagcgtgggtgggtctcctccgatccgttgaaggcctgactagaacagagataacaccctgcaccaggaaggaactctgcgtccgacggcttcagactagactggcagtgctggctcttccccgggtctccagccgagggtccaccctgcagaccttggacctgccggcttccacggtcacacaagccaattccctaaagataaatctctctctgtgtctccctctttaacaaaaggccacctttaacctttaacaaaaggcgacctgctgagaagtccttgtgctctgtgctttgaactggacatcaacaaacaacatggcacttagtgtttttaaactgaccaagggacaagcctggagcagcctcttccggggcctcgattaaccaggaggaggtggctgctgtgccccaacccaggtgacagattcgggtgccggcacctcccctgagtctcagagtccagggagtcacaattctacagggacaacagaaacacacaaaagtgggcataaaataatcatcgatagaaggtttgtcactttgatgtctctgtgaactgatttaatgtggtatagaaagatggtcccgttactttagaggtggttagatatctctgtataatgcctgtatataataactcttacgtgatatagaaagatggtcccattactttaggggtagttagatatctctgtataacacctatatataataactcctatatgatacagaaaaatgttctcattactttagaggtagttagatatctccatataatgcctgtatataataactcttatgtgatatagaaagatggtctcattactttgggagtagttataaatctccctacaatgcctgtatataatactcatatgtgatataaaatgatggtcccattactttaggggtacttggaaatctctgtataatgccgacatataattctcatgtgtgatgtagaaagatggtcccgttactttaggggtagttacagatctctgtagagctcctgtgtgtaatacccatatactatgcctctgttgattcagatagatcaattacttcatagagtgaatctgcgtgtctatttttaggtggatgagttgctatgttttaccattactattcttgctacattagttcagcttctacaggtaaccaaatgattttcattatcgtatatttataatgtctcatccagttattttctggaatgagagtacaaataaatgtatttctcaagctg

SEQ ID NO: 2178 - DNA, 4065 bp, Homo sapiens
aagctttggagaatgccatctggcagaggccttggcttcagcagagacctgcagccaacctctggtcacccagcagggagaaaaccagggaaagaaagactccttccttgcccttgtcctaccctcctacttttaagggtaccttttatgaccacacgcaaactaaagctagaggacaaggggcctgttgatgcagtccatagaggccagattttgggacacagagcagagtggagaagagggcacaggggacctggagggcagcactacagcctaggatggtggccgtctgtgacaggtgaacacagggccagtttcataaatgaaacacagaggatacctcagttttcatcaagtggctgggagcatagcaacgaaggacacagggagctggactgcctggcctgaagactgccctgccatttctaccttggtgactttggtgaagttccttaacccttctgtgccttggtttccttatctgtgaaacaggcatgataatctctactcataggattgtgaggatagaattaattgtagcacttgaacaaggtctgactgaattaacaccatccttatgacactccaggtacaaagcaggtaggaagaagcaatgtgcacttaggtacttacacgctaagcgggagacagacacaccagccctcacgacacaaggttaggtgagctggcaactgaggagaaagacttggccgaaggaggggttgatcctgcacctcagtgggtcaggtagggttttgcagaggaggagccttgagcaaggacttgcagaatgagttgatttccagatgtgcccagtacacatcaattaacagttctggaactttaaggaaggaaggaagtccagttgggtattaaaaagactggtagatttgtggattgtcagaggacaagaaagaaccctggaaattagggcacaactaagcagtgcaacaagaatccagtaggtggcataaatacgccattcatttggagttccatttgtcgtttttttgttttggtttttgggtttttttttgttttggatttggtgaatttctttttttcttcttcccttccttaagctgcccatttcaccaacactgttgttagcagttttatatgatctttatttaatgcaattagatttgcctttagatcaaagcaaactatttacaattgatataataactaagcacctctccagaaagaaggttgactgctttgcaagtatgagcccattgtcttagtccatgtgtgctgctgtaacgaaatatcacagactgggtaatttacagccatgagccactatgcccgaggtgctaaggccacctcttcacctctttttttttttttttttgtgatggagtttcactcttgttcctcaagccagagtgcaatggggcaatctcggctcactgcaacctctgcctcccaggttcaagtgattctccagcctcagcctcccgagtagctgagattacaggcatgtgccaccatgcctggctaatttttttgtatgtttagtagaaatggggtttcaccatgttagccaggctggtctcgaactcctgtcctcagataatccgccggcctcggcctcccaaagtgctgggattacaagtgtgagccaccgtgcccggcctaaggccacctcttaatacatcatattggtgattaagtttgaacacatgaattttgcaggacattcagaccatagtaccatatttaaagaaagactgattcacgttgaggtgaaccatctaaacccaattttcgttatattgttttctagaaagtagattaaaaattaaaatactcccaagcttgtcatggtggcttacacttgtaatcccagctacttgggaggctgaggtaggagaacagattgagcccaggaggtggatgttgcagcgagccaagatcaccccactacactccagcctaggcaacagagcgagatgctgtcaaaaaaaaaaagaaaagaaaaaggaagggagggagggaaataatattatagaaagcatataaaaatattaagaaagagaaaaaaacaatcttaactcaggtatctttgtagaaaatgctagcgatatgaggtattgccttcctttttctttttttaagaaaattaaatcacttattgattacacatgataatagatgatacaagcttcattccaatctataattttatctggtagcattattcaatttagatacattgcataggatgtgctaacaaccatttttataaccacatgattttgcttgatcccttttaatggtgcacttcaggtcacaacagtaactatcagatccactacaccaagatttctgaagacaatggcatctccacccaagcgcgttgtaaataaattccgaatagaacctgtcatcaccctgaaggaattctaacttcacactgttggggaaatttaccaagatggcttaagaatagactaactttacacagcacatttttcaaaaagacatttattcagcatcatcatcagagtattacatttagcaatcaacagcatgggtgcaaaaaaaaaaaaaaactacattaaaaccctttgttggaatgctcttcactttccacagagcagaaactaaaattacctgttatacagttagtcagaaatacagtccttgagtgttttgcccatacacatgagcatttgtctaaaacatgtcttatttggagcagctgttgcctttcttttcctttgcatattttctttttcttttctttttttttttttttttttgtttgttttgagattttgtcttgatttgttgcccaggctggagtgcagtggcgtgatctcggctcactgcaacctctgcctcccaggttcaagcaattgtcctgcctcagcctcccgagtagctgggattacaggtgcctgccaccatgcccagctaattttttgtgttttagtagagacagggtttcaccatgttggcaggctggtctccaactcctgacctcaagtgatccacttgcctcggcctcccaaagtgctgggattacaggcgtaagccaccgcacccggccacatattttcatttattcatggaacagatagtaactgaccaaatgttattcttggatatggggatctaatagcaaacaattggcaaagctcctgttgtcataaagtaaacaagaaaatgaatgaataagctgaaataaggataatttcacattcaccggagaagaaaattgaacaaggtgataaggaggcttgtgttctcttctttagatcgggctttcggggaaagcctcatgagggcatgatgttgagccacacttgacttgaattgctaggaaggatgtagcatgtgaagagagggagaagggcattccaggcagagggaagagctgtgcagagatcccagggtgcaaacaagctgggtgtgtatgaggcaccaaaagaggtcctgagtagctggagcacagcaagagaccaggagagaggaaggagatgtggtcagagagctggacagagggctgaatcacgcaggcctggacaaaggtgtgggaatttattataactgttaatcattgtatatgagtttgtaagaacacatttatccttctgcctttttctctttgacattattaatacactttctccatgtcattacatagagctcaaagccatcatttaaaatcaatacatacaattccatcaagtggataataatttacttaaccattttccccgtgaaaagcatgtcctcttaacaaatatccctgagtgtcaatatgtaggccaggcacagtggctcacgcctgtaattccagcactttgggaggctgaggcaggcggatcatctgaggtcaggagttcaagaccagcctggccaacctggtgaaaccccatctctactaaaaatacaaaaaaaatagccaggcgtggtggcggttgcctgtagtcccagctactcagggggttgaggcataagaatctcttgaacctgggaggtggagattgcagtgagccgagatcacaccactgcacttccagccttggtgacagagcgaggctccgtctc

SEQ ID NO: 2179 - DNA, 3581 bp, Homo sapiens
aagatggcggcgagggggacggtgaaggttgcctcccgcccgtccgggctctgatcctccgtctccccgtcccccggcggccggcccatggcctggcggaggcccgaaccatggacctccgcaccgccgtgtacaacgccgcccgtgatggcaagctgcagctgctccagaagctgctcagcggccggagccgggaggaactggacgagctgacgggcgaggtggccggcgggggaacgccgctactcatcgccgcccgctacggccacctggtcggcgagcaccaggccgacctggaggtggccaaccggcacggccacacgtgccacatgatctcgtgctacaagggccaccgtgagatcgcccgctacctgctggagcagggcgcccaggtgaaccggcgcagcgccaagggcaacacggccctgcatgactgcgccgagtccggcagcctggagatcctgcagctgctgctggggtgcaaggcccgcatggaacgtgacggctacggcatgaccccgctgctcgcggccagcgtgacgggccacaccaacatcgtggagtacctcatccaggagcagcccggccaggagcaggtcgcagggggagaggctcagcctgggctgccccaagaagacccctccaccagccaggggtgtgcgcagcctcagggggctccgtgctgcagctcctccccagaggaaccactgaacggggaatcttacgaaagctgctgtcccaccagccgggaagctgccgtggaagccttggaattgccgggagctacgtatgtggataagaaacgagatctgcttggggcccttaaacactggaggcgggccatggagctgcgtcaccaggggggcgagtacctgcccaaaccggagcccccacagctggtcctggcctatgactattccagggaggtcaacaccaccgaggagctggaggcgctgatcaccgacccggatgagatgcgcatgcaggccctgttgatccgggagcgcatcctcggtccctcgcacccggacacttcctattacatccgttacaggggtgccgtgtacgccgactcgggcaatttcgagcgctgcatccgcttgtggaagtacgccctggacatgcaacagagcaacctggagcctctgagccccatgaccgccagcagcttcctctccttcgcggaactcttctcctacgtgcttcaggaccgggccgccaaaggcagcctgggcacccagatcggctttgcagacctcatgggggttctcaccaaaggggtccgggaagtggaacgggccctgcagctgcccagggagcccggagactcagcccagttcaccaaggcgctggccatcatcctccacctgctctacctgctggagaaagtggagtgcacccccagccaggagcacctgaagcaccagaccgtctaccgcctgctcaagtgcgcgcccaggggcaagaacggcttcacccctctgcacatggctgtggacaaggacaccacaaacgtgggccgctatcccgtgggcagattcccctccctgcacgtggtcaaagtgctgctcgactgcggggccgacccggacagcagggattttgacaacaacaccccgctacacatagcagcccagaacaactgcccggccatcatgaatgccctgatcgaagcaggggcccacatggacgccaccaatgccttcaagaagacggcctacgagctgctggacgagaagctgctggccaggggtaccatgcagcccttcaactacgtgaccctgcagtgccttgcggcccgggccctggataagaacaagatcccttacaagggcttcatcccggaagatctggaggcgttcatcgaactgcactgacctgcccagaacgcctgcaccctcacctctcccctctcctgctgagatgggggaaatccggctgcggcatagcagatgctcgttcttgcctccttcaggcaccaatcaggagaagggttctgcctcccatcccctctacctgcagacagggtcggaggtgttagcgagcctttggtgctagaagcctgcggggtcatgtgctaagaggacagtctttctccgggagcccgctcactcattctgagttaggaaaagacacaagaccttccccacatcctgtctgcctgggttagggaggcctttgccttgttacctagaggcggagggactgaagccattgcgttccttccctgctagaaacacaggaagaagttgaggacggtctgccttccctcgtccctttacctggccagataactccagccgctgaatacagtgttaggactgggggctcctgagatgagagtttgagattcagggaatgagaccacctctcatttcttccagcatgatcgcgccctgctcccgtgccaccgtagtccctggcagacaggcagggctctgcccagggcagcctgccacttgcatagctttcggttggtttggtgttctgtttatttaataagtgggcaggttgcaagcgttgcacagaaattctgagattttactgcctttttttttttttaagaaagttgtttgttggactccataagtgaatttcaagcagtgaggattttgtggtgcctgagatggccgagggcacagggagtgagctgtatgtgtgaggaatttggtgagcgagataaaagtccacggtgtcaacccctaaaacatgggtgaccgtacatttttatacatctccactctacggccttttacaggctttccgattttacaggcctttccaagtttccattctccttagagagagaactgtgcttccaaacagaaatcaggagtgaccacaaagcctgaaaacactttgccacccagcaaagaactggcacaattggtttgggcctgcattgccatagtgcccgagttaaaactgcaggccactctgccttgcaaacctcacgtggcctctgatttcattgtgggtgcatccacaggtggcccgagctgttctttcagctgctccaaggattgagacccaagtcatcatgaaaaaggcccaagtacagtcttaatgcgataaatccactagctaagacgtcgagtgccaagaccagccttccagccgaggtttggacaaagtctcaggttcccgtgactcagggtaaggtgctggggctgccagaggacctgccccagcaagatttttgtcaagagcgagactccatcagcccaggcagacgggagcaggttcttggccagcgtagacagcagcaaacagcagcagggaagccattctcactgcatcctccctgcagtagccacggccaggcccttaggaggagcagtgaccgggggtgtccagaaatatcctgtccctggatggaaactaggtctcgtttggattttttttttttttttttttgccgtgttaggaaattatttattaatttacaagacaggttttaactcagccgaggtgggaaatggtgtccctgtccctcccaaagcacagagcacagaaatgaggccgtttacatggcgagtctccgtgctggtgtttaagtcattaaaaagatactcaaaggg

SEQ ID NO: 2180 - DNA, 3807 bp, Homo sapiens
tttattcatttacccactcagtcatccgtccatcctcattcatttatccatccatctccattcatttactcatccacccactcattcattctttcatccacccactcatccatccactcattcatttgttcattcatccatctctatccactcatccattcattcattcccattcactcattcatccactgattcattcattcattcatctggttattcacccatccactcacttatccatccatgcatctgtctgctcactcatccatcctactcactaatctatccaccgattcactcatccatccattcattcattcatctgtgcatttatccatacatgcatctatccatccatctatccatctatcaatccatctgttcagtcattcatccattcactcatccatccatccacccactcattcatgcatccatctgcccatccactcatttattcacccatccattctttcacgcactcatccactgtccatctgtcatccatccatgtgtttggtgacggctcatgaggcctctgggggacagtcagcaccaggctcggtgctgggcaggtagatgttgtctttttcctcttgaagcttcagagaccctcgtagtgtgccggtcaatgcttgccttttctttttctttttccacaggattatttttacccaagatacttaggtaagtctcaattacttctctactctggttgtcgtagaggcatagttgggggtgcgtgtttcatgttggaggaatctcctcaccacgtaactcttggaaggaagattcttaatcacatggtgcacgtggaactgtccggaacatgcaggtcagaaacacaagtttctctctttattttataccacagctttattccgtgttagtggaacctcaggtgaatgctgttatctgcaaaccccttctctgagttgatgccaggctcagctccttgtcaggacgtgtaattgattttgtcctccggttttctgacctcagcactaatcacttctgaagtcattgaggaccccaaaggggtccatgttcatgtgggctgtattgactgatatttaccgtattcttaattaaaaccgaaaacactgaatagtgtttctgtttaatttgaagaacgggaatgccagacgttatctcagccatcagagcagctggtgcatgtggggcggcctctggagacccccactgtacacttgggaagggaggacagcaagaaagtgaaacccagagaccccgggtcagcccgtttaactgacaccatcttagagctctttgagagcatttcacttagaaggagagaaatgtattccagggtcttctttttaatgttgcaaagtgcattttagtaaatgtcctcttaaagggtccttccctgggtccatatctggaacaaacacagtgggtctggcactggcccagaaagcccaggcaccagcgaggactgagttctgaagcagggggtggccagcggtccacagcacacctgcaggaggccttccgctgttcatccgtgccgttctgcgcctggataagcaacagtaacccactgaagggccaggtcgagaggccccgcaccgttctgcacaacctcacgcttcgggttatccctggatgtgcatgtgccaggcctcgcctccccccgccgccctagcgggatgtctgctgtcaagctgtgttcagccagccagagagcatggaggggctttctccaaagcagagtggctttccaactgcatcaacaagtatgggtctccgtacaccaaaaactcaggcttcgccacctgcgtgcaaaacctgcctgaccagtgcacgcccaacccctgcgataggaaggggacccaagcctgccaggacctcatgggcaacttcttctgcctgtgtaaagctggctgggggggccggctctgcgacaaagatgtcaacgaatgcagccaggagaacgggggctgcctccagatctgccacaacaagccgggtagcttccactgttcctgccacagcggcttcgagctctcctctgatggcaggacctgccaagacatagacgagtgcgcagactcggaggcctgcggggaggcgcgctgcaagaacctgcccggctcctactcctgcctctgtgacgagggctttgcgtacagctcccaggagaaggcttgccgagatgtggacgagtgtctgcagggccgctgtgagcaggtctgcgtgaactccccagggagctacacctgccactgtgacgggcgtgggggcctcaagctgtcccaggacatggacacctgtgaggacatcttgccgtgcgtgcccttcagcgtggccaagagtgtgaagtccttgtacctgggccggatgttcagtgggacccccgtgatccgactgcgcttcaagaggctgcagcccaccaggctggtagctgagtttgacttccggacctttgaccccgagggcatcctcctctttgccggaggccaccaggacagcacctggatcgtgctggccctgagagccggccggctggagctgcagctgcgctacaacggtgtcggccgtgtcaccagcagcggcccggtcatcaaccatggcatgtggcagacaatctctgttgaggagctggcgcggaatctggtcatcaaggtcaacagggatgctgtcatgaaaatcgcggtggccggggacttgttccaaccggagcgaggactgtatcatctgaacctgaccgtgggaggtattcccttccatgagaaggacctcgtgcagcctataaaccctcgtctggatggctgtatgaggagctggaactggctgaacggagaagacaccaccatccaggaaacggtgaaagtgaacacgaggatgcagtgcttctcggtgacggagagaggctctttctaccccgggagcggcttcgccttctacagcctggactacatgcggacccctctggacgtcgggactgaatcaacctgggaagtagaagtcgtggctcacatccgcccggccgcagacacaggcgtgctgtttgcgctctgggcccccgacctccgtgccgtgcctctctctgtggcactggtagactatcactccacgaagaaactcaagaagcagctggtggtcctggccgtggagcatacggccttggccctaatggagatcaaggtctgcgacggccaagagcacgtggtcaccgtctcgctgagggacggtgaggccaccctggaggtggacggcaccaggggccagagcgaggtgagcgccgcgcagctgcaggagaggctggccgtgctcgagaggcacctgcggagccccgtgctcacctttgccggcggcctgccagatgtgccggtgacttcagcgccagtcaccgcgttctaccgcggctgcatgacactggaggtcaaccggaggctgctggacctggacgaggcggcgtacaagcacagcgacatcacggcccactcctgcccccccgtggagcccgccgcagcctaggcccccacgggacgcggcaggcttctcagtctctgtccgagacagccgggaggagcctgggggctcctcaccacgtggggccatgctgagagctgggctttcctctgtgaccatcccggcctgtaacatatctgtaaatagtgagatggacttggggcctctgacgccgcgcactcagccgtgggcccgggcgcggggaggccggcgcagcgcagagcgggctcgaagaaaataattctctattatttttattaccaagcgcttctttctgactctaaaatatggaaaataaaatatttacag

SEQ ID NO: 2181 - DNA, 3428 bp, Homo sapiens
gtcattacggcgacacgtggatccaagatggcgacggcgatggattggttgccgtggtctttactgcttttctccctgatgtgtgaaacgagcgccttctatgtgcctggggtcgcgcctatcaacttccaccagaacgatcccgtagaaatcaaggctgtgaagctcaccagctctcgaacccagctaccttatgaatactattcactgcccttctgccagcccagcaagataacctacaaggcagagaatctgggagaggtgctgagagaggaccaggagcacacgtaccgtgtcgtccgcttcgaggtgattccccagagcatcaggctggaggacctcaaagcagatgagaagagttcgtgcactctgcctgagggtaccaactcctcgccccaagaaattgaccccaccaaggagaatcagctgtacttcacctactctgtccactgggaggaaagtgatatcaaatgggcctctcgctgggacacttacctgaccatgagtgacgtccagatccactggttttctatcattaactccgttgttgtggtcttcttcctgtcaggtatcctgagcatgattatcattcggaccctccggaaggacattgccaactacaacaaggaggatgacattgaagacaccatggaggagtctgggtggaagttggtgcacggcgacgtcttcaggcccccccagtaccccatgatcctcagctccctgctgggctcaggcattcagctgttctgtatgatcctcatcgtcatctttgtagccatgcttgggatgctgtcgccctccagccggggagctctcatgaccacagcctgcttcctcttcatgttcatgggggtgtttggcggattttctgctggccgtctgtaccgcactttaaaaggccatcggtggaagaaaagagccttctgtacggcaactctgtaccctggtgtggtttttggcatctgcttcgtattgaattgcttcatttggggaaagcactcatcaggagcggtgccctttcccaccatggtggctctgctgtgcatgtggttcgggatctccctgcccctcgtctacttgggctactacttcggcttccgaaagcagccatatgacaaccctgtgcgcaccaaccagattccccggcagatccccgagcagcggtggtacatgaaccgatttgtgggcatcctcatggctgggatcttgcccttcggcgccatgttcatcgagctcttcttcatcttcagtgctatctgggagaatcagttctattacctctttggcttcctgttccttgttttcatcatcctggtggtatcctgttcacaaatcagcatcgtcatggtgtacttccagctgtgtgcagaggattaccgctggtggtggagaaatttcctagtctccgggggctctgcattctacgtcctggtttatgccatcttttatttcgttaacaagctggacatcgtggagttcatcccctctctcctctactttggctacacggccctcatggtcttgtccttctggctgctaacgggtaccatcggcttctatgcagcctacatgtttgttcgcaagatctatgctgctgtgaagatagactgattggagtggaccacggccaagcttgctccgtcctcggacaggaagccaccctgcgtgggggactgcaggcacgcaaaataaaataactcctgctcgtttggaatgtaactcctggcacagtgttcctggatcctggggctgcgtggggggcgggagggcctgtagataatcttgcgtttttcgtcatcttattccagttctgtgggggatgagtttttttgtgggttgctttttcttcagtgctaagaaagttccctccaacaggaactctctgacctgtttattcaggtgtatttctggtttggatttttttttccttctttgttttaacaaatggatccaggatggataaatccaccgagataagggttttggtcactgtctccacctcagttcctcagggctgttggccaccctatgactaactggaagaggacacgccagagcttcagtgaggtttccgagcctctccctgcccatcctcaccactgaggccacgacaaagcacagctccagctcggacagcaccctcagtgccagccagcctctgccagacctctctttccctcttctccccagcctcctccagggctgcccaaggcagggtttccagccaggcctcggggtcatcttttcaccaggagcaaacccaagtcttagttgctacaagaaaatcccctggaagtactgggggccaggttccccagacagcaggaattgcccctgttcagagcagccggagtttgctggaccacaaggaagaagagaagagacttgcagtgaactgtttttgtgccaagaaaccctggacctggggccaagtatttcccaagccaagcatccacttgtctgtgtctgggaagggatggccaaggccgctagggtccttacccctcaggatcactccccagccctttcctcaggaggtaccgctctccaaggtgtgctagcagtgggccctgcccaacttcaggcagaacagggaggcccagagattacagatcccctcctgtaagtggccaggcattctctccctgccctctctggcctctggggtcatactcacttctttagccagccccatcccctccaccccacacctgagttcttgcctcctccttttggggacacccaaaacactgcttgtgagaaggaagatggaaggtaagttctgtcgttctttccccaatccccaggaatggacaagaagccaacttagaaagaagggtctcacgtggctggcctggctcctccgtagacccctgttcttttcaacctctgcccacccgtgcatgtcatcacaaacatttgctcttaagttacaagagaccacatccacccagggattagggttcaagtagcagctgctaacccttgcaccagcccttgtgggactcccaacacaagacaaagctcaggatgctggtgatgctaggaagatgtccctcccctcactgccccacattctcccagtggctctaccagcctcacccatcaaaccagtgaatttctcaatcttgcctcacagtgactgcagcgccaagcggcatccaccaagcatcaagttggagaaaagggaacccaagcagtagagagcgatattggagtcttttgttcattcaaatcttggatttttttttttccctaaaagattctctttttagggggaatgggaaacggacacctcataaagggttcaaagatcatcaatttttctgactttttaaatcattatcattattatttttaattaaaaaaatgcctgtatgcctttttttggtcggattgtaaataaatataccattgtcctactg

SEQ ID NO: 2182 - DNA, 3847 bp, Homo sapiens
tttagcccatccttgctcagcatttctcgccctgacagctccccataatttccatcacgaaagcgttgcattgtgtagtgtgtctcctgggtgacttggccgacttaatttctgccaggtgatcttgggtcactgtatactgctggccaggaggcacacagaacagaggcaatgccaggactttttaacctcatcttttctcctgcgtctaagtcaaccacagagctggtgtcgggcacctcagccctgggaaaatggggtcctggacttggaaggagctggggcaggctgaggtctgcctcagccttgggatctctgtctcctcccagttcagagggctgtgtacaaggacctggtgctcttgctccagaaagactcactgctcacagctgcccagctgaaagccaaggtgagggaagcttggtggccatgtcagtggtgggtgggcacagaccctggcctggcagggttctcctccctggcatgggtctgaccagtagggtggggggggtgggtagggggagctgagctttgaacaggaccagctggtggctgggggccagctgggcgagctgcacaacgggacacagtatcgtgaggtccgccagttctgctcgggctctggccaccaccttgtgcgcttctacttcctcactcgtgtttactccgagtaccttgaggatgttctggaagagctgacatatggacctgccccggacctggtgatcatcaactcctgcctctgggatctctccagatatggtcgctgctcaatggagagctaccgggagaacctggagcgggtgtttgtgcgcatggaccaagtattgccagactcctgcctgctggtgtggaacatggcgatgcccctcggggaacgtatcactgggggtttcctcctgccagaggcaagtgactgaggcccatcaggacaagagatgggatagcagactggtagataggacaccctgctttcagaccctgctgcgttctgtggctcttagaggctgcactttctcacttagctccagcccctggcaggctccctgcggcgggatgtggttgaagggaacttctacagtgctacgctggccggggaccactgctttgatgtcctagacctccactttcacttccggcatgcagtacagcaccgtcatcgggatggtgtccactgggaccagcatgcacaccgccacctctcacacctgcttctgacccatgtggctgacgcctggggcgtggagctgcccaagcgtggctatccccctggtgagccctaccataagtgggggggtagtgatgcactggggccctcagaggacagggctcagaaacagaatgggacacagccactcaagggaagtagaggtcccttgaaggactcctgtggcttctgcatgcaccttcctcaacccctgaggagggttagatcatcggagcaatattcttgtccaagttccagttttctacagtctggctgtgtagtcatttctgtgtgcttgaaggagcttgtacaagtattgaccacataaggcagcatgttgcaagggtcctacccaacagattaacaggaaagaaatggggcatgggtgtgaggagtggaaagacagggaggaagggccatccaggcagtgtggcagaagcaaagaagcccacagctggggggtgggggtacagtcaactggcagggtgtggaacagggatgttgcatcgggaaggccagccttatggacttgggctcaatggacagtgttccataggcttcttagttcagcctcagagtcccactgtgactggtgcagcttggtgtagctctcctcgggccccatctctgggcctttggtggaggcttctgagggccccactcccccttgttttgaggcactgctccccatcacatctcaactgtaacactctgctgcagaacctctgtttccatgtcaacaccctagtccctgcatgcacacaaagagggcaccatggctgattgtctccatggctgcttctcccctgcatcgtgtccttaaagggcaagtttcctgctgcacttgttgacgactcacccctttcagccccagtgtctagcacaatttccctgtacacagtatcaacagaattgtatttgttgaatgggaggcacgagtcatgttagaaggccgattatggcagcacaagaggatgtgggggcacagagagtccaggaatatcatagagacagacctgtaacacttggtagccaggagttggagcatcagggaggtgaatacagattttggttaaacatccccattttcttgtttagatgtaataattgatccccagcaaatgatgggatgccctgaaggttgtaaggctagttttgatggcttaggcctttgaaatccaatttggagctacagaagttagggccatgaaaagggagagttgatttggggtggaaggatgagttggtgagtttggtcacagcagattgatttgaggttctttggaaatacagagtagatttgcagtcattggtacccagcagagagattaaaactgagggcacagtggcagctgtgagggagacagaacgatgctcatgctttggattggcaggaaagaggggctatggcggaaacaaaaggagatgagggcaggggcacttttaggaaggactgaggctgctggcagtgtcacatgactgttgagaagaagggaatttgttagcaagtggttacatttagtaggaaaagtgttgagggcatgggtttggattaaaggagggagtgagcaattgaggaggaagtggaaattgggcaaaacattccttttggaagtttggatggtaaaaggaagttgttggggaagggaataacaggatctttatgtttggcttatttactggtctatggggaggaggtgggcgaggaaaaagctagatacaagacctgggcaaacaaagaaggctctggagggaagtgtaggttagaacaaaggtaagtctgagaggtaagagagaaggaacacactttgggcttggcctgaaatgagagggaatgaggaaaactgggtagagggcaaggatgctccagcctggtggctctgctctccaagaggaaggaatagagctttagaagtgtggatggccagagttcagggcagcctggctcccaagcctacctaaaacaaccatcccattcctagacccgtggattgaggactgggcagagatgaatcatccattccagggaagccataggcagaccccagacttcggggagcacctggccttgctcccacccccaccttcttctttgcctcctcccatgccttttccctacccgcttcctcagccctcgccacctcccctcttcccacccctgccccaggataccccttttttcccaggccagcccttcccaccccatgaattcttcaactataatccagtggaggacttctcgatgccaccccacttaggatgtggccctggagtgaactttgtgcctggccctctgccacctccaatccctggccctaatccccatggtcagcactggggcccagtggtccaccgggggatgccacgctatgttcctaacagcccctaccatgtgcggagaatgggggggccctgcaggcagcggctcagacactcagagagactgatccacacatacaaactggacagacggcctcctgcccattcggggacatggcctgggtagactggatcttgggctgggactggatgtgccaatggcccttcagggcctgcctggcacctcaggtactgggctagggtgtctgctatgcctggtattgttcttgtccattgctgtcaccaataaaggcatggaag

SEQ ID NO: 2183 - DNA, 3554 bp, Homo sapiens
gtacacagaagtcaagaattgaggtttgggaacctctgcctagatttcagaagatgtatggaaacacctggatgcccaggcaaaagtttgctgcaggggtgggaccctcatggagaacctctgctagggcagtgcagaaaggaaatgtggggttggagtagagtccctactggggcaccgcctagtggagctgtgagaagaggggcaccatcctctagaccgcagaatggcagatccactaacagcttgcactgtgcacctggaaaagctgcagacactcaacgccagtccgtgaaagcagccagaaaggaggctgcaccctgcaaagccacgggggtggagctgcccaagactgtgggaacccacctcttgcatcagcatgactcagatatgcgggacatggagtcaaaggagatcattttggaactttaataagatttgactgccctgctggattttgaacttgcctggggcctgtagcccctttgttttggctaatttcttccatgtggaacagctgtatttacccaatgcctgtacccccactgtatctaggaagtaactaacttgcttttgattttacaggctcgtaggtggaagggacttgtctcagatgagacattggactgtggacttttgggttaatactgaaatgagttaagactttgggggactgttgggaaggcatgattggttttgaaatgtgagaacatgagatttgggagggaccaggggtggaatgatatggtttagctgtgcccgcacccaaatctcaacttgaattgtatctcccagtattcccatgtgttgtgggagggacccagtgggaggtaattgaatcatggggccagtctttcccgagctattctcgtgatagtgaataagtctcacaagatctgatgggtttatcaggggcttcagcttttgcttcctcctcattctctcttgccgccgccatgcaagaagtgccttttgccttccaccatgattgttagaccttccacagccacgtggaattcccccaccatgccgtggcccctgctgctgctgctggccgtgagtggggcccagacaacccggccatgcttccccgggtgccaatgcgaggtggagaccttcggccttttcgacagcttcagcctgactcgggtggattgtagcggcctgggcccccacatcatgccggtgcccatccctctggacacagcccacttggacctgtcctccaaccggctggagatggtgaatgagtcggtgttggcggggccgggctacacgacgttggctggcctggatctcagccacaacctgctcaccagcatctcacccactgccttctcccgccttcgctacctggagtcgcttgacctcagccacaatggcctgacagccctgccagccgagagcttcaccagctcacccctgagcgacgtgaaccttagccacaaccagctccgggaggtctcagtgtctgccttcacgacgcacagtcagggccgggcactacacgtggacctctcccacaacctcattcaccgcctcgtgccccaccccacgagggccggcctgcctgcgcccaccattcagagcctgaacctggcctggaaccggctccatgccgtgcccaacctccgagacttgcccctgcgctacctgagcctggatgggaaccctctagctgtcattggtccgggtgccttcgcggggctgggaggccttacacacctgtctctggccagcctgcagaggctccctgagctggcgcccagtggcttccgtgagctaccgggcctgcaggtcctggacctgtcgggcaaccccaagcttaactgggcaggagctgaggtgttttcaggcctgagctccctgcaggagctggacctttcgggcaccaacctggtgcccctgcctgaggcgctgctcctccacctcccggcactgcagagcgtcagcgtgggccaggatgtgcggtgccggcgcctggtgcgggagggcacctacccccggaggcctggctccagccccaaggtggccctgcactgcgtagacacccgggaatctgctgccaggggccccaccatcttgtgacaaatggtgtggcccagggccacataacagactgccgtcctgggctgcctcaggtcccgagtaacttatgttcaatgtgccaacaccagtggggagcccgcaggcctatgtggcagcgtcaccacaggagttgtgggcctaggagaggctttggacctgggagccacacctaggagcaaagtctcacccctttgtctacgttgcttccccaaaccatgagcagagggatttcgatgccaaaccagactcgggtcccctcctgcttcccttccccacttatcccccaagtgccttccctcatgcctgggccggcctgacccgcaatgggcagagggtgggtgggaccccctgctgcagggcagagttcaggtccactgggctgagtgtccccttgggcccatggcccagtcactcaggggcgagtttcttttctaacatagccctttctttgccatgaggccatgaggcccgcttcatccttttctatttccctagaaccttaatggtagaaggaattgcaaagaatcaagtccacccttctcatgtgacagatggggaaactgaggccttgagaaggaaaaaggctaatctaagttcctgcgggcagtggcatgactggagcacagcctcctgcctcccagcccggacccaatgcactttcttgtctcctctaataagccccaccctccccgcctgggctccccttgctgcccttgcctgttccccattagcacaggagtagcagcagcaggacaggcaagagcctcacaagtgggactctgggcctctgaccagctgtgcggcatgggctaagtcactctgcccttcggagcctctggaagcttagggcacattggttccagcctagccagtttctcaccctgggttggggtcccccagcatccagactggaaacctacccattttcccctgagcatcctctagatgctgccccaaggagttgctgcagttctggagcctcatctggctgggatctccaaggggcctcctggattcagtccccactggccctgagcacgacagcccttcttaccctcccaggaatgccgtgaaaggagacaaggtctgcccgacccatgtctatgctctacccccagggtagcatctcagcttccgaaccctgggctgtttccttagtcttcattttataaaagttgttgcctttttaacggagtgtcactttcaaccggcctcccctacccctgctggccggggatggagacatgtcatttgtaaaagcagaaaaaggttgcatttgttcacttttgtaatattgtcctgggcctgtgttggggtgttgggggaagctgggcatcagtggccacatgggcatcaggggctggccccacagagaccccacagggcagtgagctctgtcttcccccacctgcctagcccatcatctatctaaccggtccttgatttaataaacactataaaaagtt

SEQ ID NO: 2184 - DNA, 3617 bp, Homo sapiens
ttgctctgtgtttgtgtgtgcatgtctgcgtgttgctctgtgtttgtgtgtgcatgtccgcgtgttgctctgtgtgtgtgcatgtccacgtgttgctctgtgtttgtgtgtgcatgtccgcgtgttgctctgtgtgtgtgcatgtccgcgtgttgctgtttgtgtgtgcatgtctgcgtgttgctctgtgtgtgtgtgcatgtccgcgtgttgctctgtgtgtgtgtgtgtgcatgtctgcatgttgctctgtgtgtgtgtgcatgtttgtgtgttgctctgtgtttgtgtgtgcatgtctgcgtgttgctctgtgtgtgtgtgcatgtccacgtgttgctctgtgtgtgtgcatgtcctcatgttgctctgtgtgtgtgtgcatgtccgcatgttgctctgtgtgtgtgcatgtccgcgtgttgcttgtgtttgtgtgtgcgtgtccgtgtgtcgctcgtctgtgtgtgaacatgtgtgcttgtcctgtatctgtgtttatctgtatacttccatgtctgtgtgacagagtccttgtgtctgtgtgtctacatgtctgcgcgtgtccctgtgtctttgtgtatatatatccatgcctgtgtgcctgtgttcctgcgtgtgcttgtgtgtgcacgtgtgcatttgtgtgtttgtcagagtatgtgtgcatgtgtgtgtctgtcagcgtatccatgtgtgcatgtgtgtgtctgtcagcggatccgtgtgtgcatgtgtgtgtctgtcagcttaaccatgtgtgcatgtgtttgtcagtgtatccgtgtgtgcatctgtgtatctgtccatgtatccgcgtgtgcctgtgtgtacctttgtgtgagcatcaagggacctcccaggcctggtgctcaccgtccgccccaacgcaccctgcattgcagcgactccagctcggacacagacagcttctacggcgcagttgagcggcctgtggatatcagcctttccccctaccccacggacaatgaagactatgagcacgacgatgaggatgactcctacctggagcctgactccccggagcccggaaggcttgaggatgccctgatgcacccaccggcttacccaccacccccagtgcccacgcccaggaagccagccttctctgacatgccccgggcccactcctttacctccaagggccccggtcccctactgccacccccgccccctaagcacggcctcccagatgttggcctggcggctgaggactccaagagggacccactgtgcccgaggcgggctgagccttgccccagggtacctgctaccccccgaaggatgagcgatccccctctgagcaccatgcccaccgcacccggcctccggaaacccccttgcttccgggagagtgccagccccagcccggagccctggacccctggccacggggcctgctccacttccagtgctgccatcatggccactgccacctccagaaactgtgacaaactcaagtccttccacctgtccccccgaggaccacccacatctgagcccccacctgtgccagccaacaagcccaagttcctgaagatagctgaagaggaccccccaagggaggcagccatgcccggactctttgtgccccccgtgtctccccggcctcctgcgctgaagctgccagtgcctgaggccatggcgcggcccgcagtcctgcccaggccagagaagccgcagctcccgcacctccagcgatcaccccccgatgggcagagtttcaggagcttctcctttgaaaagccccggcaaccctcacaggctgacactggcggggacgactcggacgaggactatgagaaggtgccactgcccaactcggtcttcgtcaacaccacggagtcctgcgaagtggaaaggtcagcacaaagccctgtgtgtgctgggtcctccgccatgcccggcttcctgcttctgtgtccctctcactagcttccgtgttggggagttgctggcacaagttcatggccctgcgtgcagcagaaaccagaggagtggacctccctgctctgtcccatgcccagctggcaccctggctggccagggctctgctgggctgcttctgtcagcctcacggcagcccgacgtgctcagctcctgagacctacaacagcgagaggacagaaagccaggcttgggagcggggcgggaaggtccgtgtgaaagctgcccgaggaggactcacccgctaatatgactgtcttattttaggttgttcaaggctacaagcccccggggagagccccaggatggactctactgcatccggaactcctctaccaagtcggggaaggtcctggttgtgtgggacgaaacctctaacaaagtgaggaactatcgcatttttgagaaggtgagagggctctgagtgggacggggaccctggccgcatggcctggcaaggggcagggcagaatctccctgatgaggcataggcagcgggtagactgagactggcacctccaggataccgccctccccttcccctccaccatcgctcaccccccacccctcctgctcagcctccctcctctcgtggcctacctttgtcctccactgaccctagtggggatgggcggtcagccatagaccctgggttgcttgtcttgtctttttctttttgcggggacaggggtctcactgtctttctcaggctggtttcaaattctggggctcaagcaatcctcccacctcggcctcccacagtgctgggattacaggcgtgggccaccgtgcctggcctaggttcatttcctgaccttgtctgaagtgctctgggtgcaggctcctggacatggaggacggaggggaagtgaggtgggaacatggagagcacaggcctgatgcggaggccaccttgggggcaccaccgacagccaggggccagcctggtgatgccgctgttgatgctgctgccttgttttacagacggggagactgaggcctagagccgcagagtggcctggccctgctgacgctcccccttctcttcccccacaggactctaagttctacctggagggcgaggtcctgtttgtgagtgtgggcagcatggtggagcactaccacacccacgtgctgcccagccaccagagcctgctgctgcggcacccctacggctacactgggcctaggtgatggcagtccatgtggctgccaggccaaggcagtcacaggggccctgaccccaggccacacagacggacatgggcccacatgggagggtgagcaggagcaaggctgtgcttgcctagggcctctgtgatggacatctcgtaggacccagccagtctcatccagcaggttgggttctagggctgaaccaggcgccaggctccagaggacgaagggactctgttgccccacactaacttgccctgtcccaatcccagaaacccaggaccaagctgtgcctgggctccaaggacaggaacactggtccccccatcacactcacccctaagtgggctgggagccaggcagggccagggcagctgggtgggggccggggctggccctgggacccccaggaacgctaagacacaggctccagtaggggctgttgcctccaataaagcagcagtgagctttgc

SEQ ID NO: 2185 - DNA, 3536 bp, Homo sapiens
tagaacttctaaactggattctcgaattacttcttagacatagtgcaaacccactgttagacctcttggttctgacagagtcacaggcacgagaagaaacagatgatatccggactgctgtcaggcaacaacttcagaaagaactgattgctctttttgataccttgctgctcaatttcatggaagttactgacaggaaatgctcggaacttctttacgtttttcaaacgcagctggctctgaaactgctccagtgtctgaaagtgacggatgcgcctcatttctatggcctgccgtcccttgagcggaccttacgagggatggctaacctcactgcgtttccgggatggagctcacactctcctctcacaaagcctctagatatctgtgtgaagtacttgtcaggtctccttgaggtcattacttctttttatgtggagcgtggaggaaatgctatgtccttcatgggaaaaggtgttacaaagagcacaattctttgcttgcttcacttatcccatgagatgatggcccaggctgggagcttggagtggatgtcactttggttcttgcctttgggtagtcatagtgaagaacatattcctactcaacaaggattggcttggttgattccattatgggttgatcgggacccagaggtgagattcacttcactgggattaggatcagcactgaccacccttgaaacgggctgtgtggccttagcaaacagttgtcagaacatttccggtgggctctggggaactgtggtgaacattcttctggaccagtcagaatgtagtatggtgcgccgggaggcggcatttattcttcagaatctccttgtaattccaatgcctacagaaattataaaggattatacttggcagggtccctgtgttcatgatgaggactctggcctatcgctcattggaaaacctgcccttcaggctcttttatatcactgccatttttatgaacatttgaatcagatggtaaagcattgttacctaggacggtgtatgtttgatttgaatttttctgcttttgatagaaattcagaaagcaatgatttaaatggtttagatgactcattcaagttttggagggctccatctaggacaagtcaggatcgagatccaagttctctctccacctcagaaacaacggtggcaccttcattggggagtactgaatttcagccacttgtgcagtcaacaacacttctacctgaagcctcccatgaccagtttgtggctcaaggtcaccaggaaggtacatcaccacggccacctcatgattcatctctttctgctcccctgcccaaactgtgtgtttttgttactccatctcttctttcagcaatgtgcagcctcttggacaacctcttgacgattgctcccagagacactgcaaaggcttttcgacaagctcatctcatagaacttctctgtagcattgcagatgctaccctcatacagacatgtgtccaggaactcagagccctgctgccttcatcacctccagctgaacacactcaggctcaggtttcctttctcctggaatacctatcctctttgtccaggcttctgcagtcatgtttattggtggagcctgaccttgtgattcaggatgagcttgtgaaacctcttatcaccaatatcattggaattctcaccatatgtaccaaagatgtattagataaagagttaatatcagctttttatcacacatggacacatttatttaatcttctggccatgctcctgaggaaagctggtgccatcacactcccgtctgttaccgtggccctggccaagcactggacagcggcgattgatatgttctgcacatgtgcaggcttgtctgccacgtgtcctgccctgtatactgccagcttgcaattcctttctgttctcttgaccgaagaagcaaaagggcatctccaggctaagagcaaaacacatttatgctgtagtccaacagtggcttcacttcttgatgactctcaggaaaatcagaaatctctagaacaacttagtgatgtaatccttcagtgctatgaagggaaatcctccaaagatatcctgaaaagagtagctgcaaatgcattgatgtcactgctggctgtcagtagaagagcacagaaacatgctttgaaagccaatcttatagacaattgcatggagcagatgaaacacataaatgcacaactgaacctagattctctgaggcctgggaaagcagcattgaaaaaaaaggaggatggtgttattaaagagttaagcattgccatgcagctcctaagaaactgtctttatcaaaatgaggaatgtaaagaagcagctcttgaagctcaccttgtccctgtcttgcactctctctggccttggattttgatggatgattcattgatgcaaatttctctgcagctcctttgtgtctatactgcaaattttccaaatggttgcagttctctttgttggtcaagttgtggacaacaccctgttcaagctacacatagaggagccgtgagcaactctctgatgctgtgtatcctaaagttggcttcccagatgccactggagaacaccacggttcagcagatggtttttatgcttctttcaaacctggccttgtcgcatgactgtaaaggagtaattcagaagagtaacttcttacagaacttcctctctctagcattgccaaaaggaggaaataaacatctaagtaatctgactattctttggttgaagttactcctgaatatatcatctggagaagatgggcaacaaatgattctgaggcttgatggctgtctagacttactaacagagatgagcaaatacaagcacaagagcagccctttattgcctcttcttatctttcataatgtttgcttcagtcctgcaaataaacccaagatcctggctaatgaaaaagtcattactgtgcttgctgcctgtctggaaagtgagaatcaaaatgctcagaggattggagcagctgccctttgggctctgatttacaattatcagaaggcaaaaacagctttgaaaagcccatcagtaaaaagaagagtggatgaagcatactccttagcaaagaaaactttcccaaactcagaagcaaaccctctaaatgcctattatttgaaatgtcttgaaaacctcgtgcagctccttaattcttcctgagtgccatgggatgctacaccttgaagctgacagtcatcaacaggggagctaaagttgaagccagctgtgtgtagcagctgttacctgaagacgtgctacctctctacaaagtgttgatccccttctttcccatgagagagagaactggtgatactccaacaccgtccagttgtggcagctctccagaagtaatagcagctgacaactttctgtgccttttcctttctgttgaaaaggcatagaaagttctgggaacataaacatttttacccttttctatgccatttattttgtaaaaatcctatttaacagttatttaataaaacaatatttttagaaact

SEQ ID NO: 2186 - DNA, 3552 bp, Homo sapiens
gaggaggtgtttgcccaggtgcggcgcacccaggcaggcgagctctccacccaggtgggttcttttgtgtggagtcacatcctgcagctgctggagacgcacgaccccctgaaacgggccctccgggacaccctccccgaggacatcctcagccaggagttccacccagaaatgtggaaacactcgtcctattctgatgtcaccttccgatcagcttgggctccggctggaaaatgctgaggaaattgctcacaggctgtttggcaggaagtcattctggggtcaggaagacgggagagagcctgagccagaggaacccccagggccagaaccagggcctgcaccacagccagccagccccgagtgtccaggagacagagacagaaggatgagatacctacagcagaaggtgacccggaggcgtggggcccggcaggctctgcgatgcgagctgagcgtgaagttgctggggcaggagctgagctttgtgaactgcggggccacggggagtcacgtgaaccactggccccttaacttggccgagctcgccatcaagctcatgaaggggcaggaggtgcagatgaaccggaggctgagcctggccgcacaggaactggtctttcccaccgtgtctggccttcctgcccggctgaccctaaatgcctcggctgccatcagcatccgggtccgaggaaccactgacttccagcagcgctcggatttctctgtgaatggttatgtcaagcccagtgccctgctccagatctcagctcagatgggcacagcgggcatcctggggcaggccgggctgaggtgggtgaccagcgtccgcagcgccgccagcctggatggcgggatccaggtgcagaagggccgggtccttaaggtgcatctgaacacgcctgaggaggccgtggagctgctcagcttcagctctcagctgtacctcatcaccagggatggcgtgaggagcctcagacatgtccctggcccttctgaggtccagtcctgtactggtgaggaagtgtcctacacctggggctggcgactgtgcactggagtgacctggccggtgcctggccagccctacctgctctcattgcctgtgttcgcggccgtgacgctgcagaaacgggacccggggctccgacagtacctgctggaagctgcctataccctgcagccccagaagggcagctggttcccccaagaagccacagcccacgtcttcatgggcacgcccgggtcagaagtgctgagggacgtcggggtggacatgagctacagcttgccccagaacaagttccggctcaagcttctccatcccaagaagaaaatcgagctggacggaaagatggaggctcttgggagtgcccacacgggtcacttggagctggtgctggatgacagggacgtctactacatcaagcttggcagctgggcgccgtggctcgcgcctgtggtcccggcacttggggaggccaaggaggatggatcacttgaggccgggagttcgggaccggcctggccaacatgggctggagtgacctgcagccagccatgggtggcgaggccgagcggttccaggcgcagctggaggtgaaactggtgacggggggcagccccgtcgtcttcaccgggaacctcacacggcaggtgggcagcaagctggccttctccgcatcgctgagccatctgctgagtgaccaggccaacgtgacagcactgctggagaggaaggaggagaatggacggagggtggccgccctgggtgccgagctgtttgtgccagggctggtggggcttcgtgcccttggcctgctgcagcaacagggccagctctggaccaactccctgaggatccagtacagcctcctgggtcaggcaaagcaggcggcacacgagtgcagcaccagccagaagctgcgggcagacagtggctcagacggtgcctacaggctggagctgcgccacgagctccactgcacacagatcctagccttcagccacaaggtccagctctggcatgaggaggactcgggccacctgcactcacagctggaggtgagctacgggaagcagtgggacaagaacagcaacaagaggcatctccgtgtcagccagaccttcaagaatgactcggggcccgccctgagcaatcacttcatggagtttgtgctgcaggtgcctgagaggcaggtggattgccgcgtgcagctttaccacttgagcctccgcctgccctatgtggagagcagcagtcacctgaaggtgcagtacaatgggcggccgctgtttgtggcaggcgggcagtggaaggacacatctcgggccaccctgtggaagtgggaaggagtcttgaacctggatagtccatggctgatggtctctgcagctcacaggctatactggccacaccgagctgtgttccaggctgtcctggagctaacgctgggcaaggcctggaccctaaaggacctggtggtcagcgtgggctgcaggagtcagggccccaacagggaaggcaagatccaggtttacaccgcagctaccacctacctccgggtttccacagtgacagtcttggcacagagcctcttccacagctggagcgaactcgagtcagcctggaacacagcagtgcagggcgagatccatgctgagaacagccgggaccgtaagatcctgaactgctggttgaaaggcccccagcaggagctgaacctaacagcggcctacaggcacctggagtggccccggaagacccaggtgtcgctcacggctgtgtggattggtgcccagggccagcctcggggcctgcagttggaaggagagctggaggagctgaggcaagacaggacattgtaccggaaacggggggccttgctccttaggcacccgttgcacctgcccatcccgcagagcctcctcctgcaggagaccttcacggctgataggcgacaccagcgctattccctggagactagggttgtcctgaatggccgagaggaaaccctgcagaccatggtcctgggctgccaggccggacacccctacgtctgtgcaggtctgatgcatccatacgatggcaaagtcatccccaggaacacagaggggtgcctggttacttggaatcagcacacgagtctcgctctgttgtctgggctggagtctggagtgcagtgacttgatctcggctcgccgcagcctccacgtcccaggctgggcgagatggctcacgcctgtaatactagcactttgggaggctgaggcgggcggatcatttgaggtcgggagttcgggacgggcctgaccggcatggtgaaacccccatctctactaaatacaaaaaaaattaaccgggcatggtggcgggctcctgtgatcccagttgctcgggaggctgaggcaggagagtcgcttgagcctgggaggtggaggttgcggtgggccgaggtcacgccactgcactccggcccgggcgacagagcgaggctgtctctaaaataaaataaaatataaaatagaataaaataagctgtttaatgacat

SEQ ID NO: 2187 - DNA, 3486 bp, Homo sapiens
ttctagagatgtggtgtgttcctttcattctgtcacagcggacatgtgcaaggaaggctttcagcaagtcacactgaaacatgcaaaccagggggccaggtgtccaggggacacattgtaaaggagcttctgcataaggcgcacagaatgggcttcaccccacctccttctcccacgcgcctcctggctgcccctcagggtggtcacattggcccatccagagtccttgtgcatctcctcctcccactcctgaactgggctccccgatgcaggctccaatccctcccccagagcccttctgtgcttcttctggtcctccctgttggtccaccttctccaggaagctctcccaggccaggccagtgaaactcagcttcctacctcagagctctctggcacccccagcccacacagcccatcaggcacttgccctccgccctcagcctgcttcacacagagtggggcccttccttcctcagccaggacagggcacatcgtctgtcatctcccacacaccaagcacagctaggatagcaggtgcacacatagggttgcataccggaccctggctcctcctgctcccaggctgggctggcaggcaggggccaggctgggcatggggtggcagcagcctttgggctgggcttacagtgagcaccgtgtggggcttcagagaagactgctccagccccggcctcccaggagtctgagcatcctccgtggcctttgcaggagacggggctcaaggtgaaccagccagcgtcctttgccgtgcagctgaacggtgcccggggcgtgattgatgcccgggtgcacacaccctcgggggctgtggaggagtgctacgtctctgagctggacagtggtgagctggccctgcccctgccaactcccttccgggctggggccttctggggaggggaaggatggaggctaagccaccaaccctttatccacagacaagcacaccatccgcttcatcccccacgagaatggcgtccactccatcgatgtcaagttcaacggtgcccacatccctggaagtcccttcaagatccgcgttggggagcagagccaggctggggacccaggcttggtgtcagcctacggtcctgggctcgagggaggcactaccggtgagtgcctggagctggggaacagggtgacttctgggggtgcttggccactagtctggtgctgctttgctccagaggtaggggccctgcttcctaagccaggagtccccacagaggctgtccagggagctggggcccagtccctcttgggccacaagcccttcctgccctcagccttgctacctctggcccccaggtgtgtcatcagagttcatcgtgaacaccctgaatgccggctcgggggccttgtctgtcaccattgatggcccctccaaggtgcagctggactgtcgggagtgtcctgagggccatgtggtcacttatactcccatggcccctggcaactacctcattgccatcaagtacggtggcccccagcacatcgtgggcagccccttcaaggccaaggtcactggtgagtgccagtttgggggaggtccacccagcctgcagcccagcccagcctggagggctccggtggccacgcacatctaggccatagtctgcccccagacatcatggtcagtttaccagggctagaggtgggcctggctctacacagtacacgttctgtggagtcgggcatgatcacgtaaaaatgccattcttcctctccatcgtggcccctcactccttcagctctggcctgcgctggctcctcaggctctagcaccactttcttccctcctggcttcccatattcctccgctccaagaagacacagtcggtattgagcaagcttcccctcttgaggctgtctgtaggatgagttgggtgggtgttcctttgtaaagtggctcttaccctgtgagttagcctgagttcccagacaaagcctgcaaggatgagggacgcagcatctgaggccccagccctagggtggagcaccagttggagctggcagctcagggccctggctgggaatgaggctgtgctcctagagtggcccttggaggaatttgagggggagcctcaaatgcaggcagtgagtcccacagggtggcagtgctggccgagggtcccctgcctggggaagaacaggaagcccttctgactaggtttgtgccccctccacccacccctcaggtccgaggctgtccggaggccacagccttcacgaaacatccacggttctggtggagactgtgaccaagtcctcctcaagccggggctccagctacagctccatccccaagttctcctcagatgccagcaaggtggtgactcggggccctgggctgtcccaggccttcgtgggccagaagaactccttcaccgtggactgcagcaaagcaggcaggtggcggggggagggcgtctcccggggtgtgagcaagaagccgtcagggagcagggtgtgggtcacagtaggggactccctggtgtgagcctgtccctctgcctccctctccaggcaccaacatgatgatggtgggcgtgcacggccccaagaccccctgtgaggaggtgtacgtgaagcacatggggaaccgggtgtacaatgtcacctacactgtcaaggagaaaggggactacatcctcattgtcaagtggggtgacgaaagtgtccctggaagccccttcaaagtcaaggtcccttgaatcccaaaagtgcctccccagcctcagcccccacctccagccacacacacattacacacacacacacacacacacaaatgtgccacacccagacacgcacagaatcagacactacaaacacctgccttgggggtgaagtgaaggcccagcctccccaccccaccgcgccccaggggttggaggaccttgtctgtgtcaggacagtgtccctccctgggaatgtgacatgagggccgactggggccaggctcaggggcagaggctgggacacaaggggctggcgagggctgcgaggccagggaagccctgagtttctggcggggctgagcagtgggggagcattgtgttgtgggtgtctgtgtgtgaggtcaccctcaaactgcaccgccggccagataccctcctgaccccgaggacttggtctggtctctctggtggctacaaccccagagttttaaggacttggaaaggaaagcacaatcagagaagaaaacagcccccgaaccagcaggagtggcctggcacatggaccggcctgagcgatgtgcactccacccaagccaggctcccagggggcctgatttctctctcactgtctctttttttaaaatggttgcacggctctgccccatggggggccttttttacacactgcgaggcccagctttctaggggacttttgcacatgtcatgcagctcagctgggagctgcttaggtggaaaactccaaataaagtgcggctgtcgc

SEQ ID NO: 2188 - DNA, 5524 bp, Homo sapiens
atgatctctaagcatccatccagctgatcggctctagttctatggtcctgttggcttctaggattccttgttgttgtagtcaattgggggaagaaggtgcagagggagtgcacagagttaacatcctatcagcccaagcttcacctcggcacccgagtctcaggcagtctccctggcttctacataggcagtgcttcttcctcattgtgtggggctttgattttgtaattccaagagcctggggctcctggcaaggaaaatggttttcaaataatggtttcgagaaacaaagctggggaagaggcaatgtaagctcaggctctggcaggcaggcagagatcctgggaaggctgggtgctgactgcacatggagcaatgggaggggatgctggtgagaggagacgggggcacttaagctccggccccagctctgctctcagtgcccggctctgtggtcttgggctggccccctcccttctctgggccatagttttcccatctgtatagcaaggccattggacaaaatggtccctctgcagatgtggcttctgagttgtttgtgcctgagggacagccagtgttgggaagttcccccaggaggtccctgagccgagtctgaactttgaccacaagcttggagtccaagcagatgaagtcctgtaggagcttttggaggttgagcctgagtgagggagagtagctgaaggttctgtgactgaaggcttggccagaggggtgccccgagccctccagatgaacttggctgcaaccagcctctggtggggaaaggactgatctctggattcaaccacacaggaatgtgggacatggaagtaggtaagggatggaaaagatggcagagggcttcgcgggatgaagcagtggggccaggggacttagaggaatgcaggaggcttgtgatgggaggcagggctgggtagaggcaggggcttaggattggaacttgaagatgtacagacagcatggagtcgggctcctctgaaaacactctggccacatccggagcccagaacagaacagtcctctagcaccggcctctgtcttgtaccctccaccttcccgcttcttgtcacacaagacccaaggccatcatggttcagaaggaggctctgaattcaactgcctgggtccaattctggcttgtttacttactggacaagtgaccctgggcaagttgcttgctgtttgagcctcagcttcctcctctgtaaaatgggtacaattctgagcttgcatggttgtcatgaggagtgagggatgtaggcacatagagcaggatgaatggggctgatgttacatcgcagtcagagcccacacctcctgcgggcaagataccctgagctatgttgagggagaagtgggaatgaaacccggccagggaatgcccagagttgctgaagagctctggaacaggctctggaaagaggcaggaggaatcaaaagtcagaggctgtgggacacaggaaagtgatcagcttgagatgcctgaaggactgggggggatctcctttcctgcctttctagggcattgtgtgggcaatgtatctgaaccactgtgcactcacccactgacgggggaccccaagtgaggcctaggaatctgcattacaagcaccccatgaattcccatgcatgtggaagtttgcgaaatgccaggctgtagggcggcctaggactctcacaaactgccgaggcaacggaatccacagagagaaagcactgctttaggttatttagcgagctgatggcagaggtggaacagaacctgcctctctgcccagccagggattccataaggtggtgcaaatcaggagaaataggtgacactatttgtggagttcttatgaggtccaggcactacctcagatcttcacatgaactaattcatttaatcctcacaagagccagtgaggaaggggcaattattatccccactccacagatgaggtacctgaggcaaagagagtttaggtggcttgcctgaggtcacacagctcatgagttgttaagttgtgtgtgccagctgcccctggggctgctaactcccccaggagtctcccacctcctgccctgcctcttagctacctcaaaacttcctggagaccctccaacagacctcatggaagggggcagaatatgtatgggagacttctgggagtcagacactgtgctgaacagcttgcattatcatttaatcctcccaggattcctgtgaggcaggaatcagcatcattccatcaccctcactttctagagaaggaaaccgctgcagattacccaatgtcacgcaattaaaaagtggtgaaggggatttgaacctagtctatgcatctgcagaacgcacactcttgggctgcccaccccgacacctctgagggcagtgatgaagaatcccacctcacagaggagacggaggccaggagtgaggccctgccggagcctgagcccaagccttctagctctgaggccactgctctcccttcaaccctgttgctgccccgcaacagaaagtttgtcattggtccctcacagccacaccacagccctttgggcaaaatcagccccttcccagcctggccagttctgggggaaaatgacacctgacacctgacacctatccatttttttttttttttttgaaatgaggtctccctctgtcaaccaggctggagtgcagtgactcttctcaattgactgcaacctctgcttcccaggctcaagtgatccttccacctcagcctcccaagtagctgggattacagatgtgtgccacatctggctaattttttgtgtttttttgtagagacagggtttcgccatgttatccaggctggcctcaaactcctgggctcaagtgatcccccagcctcagcctcccaaagtgctaggattacaggcatgggccactgcactcagccaacacctatccttgaggaatagaaagatccaggctccacaccacgcaccatcactgactcaagtggctgttctgattcccagctgagcctgaggggttcggggaggtaatctctgaggtcctcactgctgggccgtgcctgggcatggcctcttcctgcaattttccaactaaactctccgggggggctcagcgccatggggtggttcgaagaaccatgatgaaggctggttcgaattgtgatgaccatttttgtccacatctcctaggacccataagccagagtttctctggagcttatagctagaaggggttctgggtcctggagtgcaggcctgtcaactttacaggagagcactagattgctttctgaagtggctgaaccaggttatgcttccatcagctgtgtatgagcatccccatcttcttgaccacacttgaagccatcagtttccttgaagcatatgggttgcacacttcattttgcatgtatcaaatttatataataaaaaatgtaaggaagccatggaaataaaaacataggtgtgccttctgtaggctgctacgctcctgtgcacgagggcgtctagaactttgccctccatgcacaagttgcagagcaccctcatcaggacatttacgaaggccctggggtgggatgggcactgcctatgtggccctcccccagcccagcagtatgcagtggcccgggtccaatcaaaggtcgcctgggagggtgagttgcaagaatctggggaaaagagcccaaggtggctgccgcctgctaacagcttgtctagacaggccccatggggcttcaccgcacattgcgagagctctggccagccccctgcccacttgcaaaagaggctgttggcagcaacacttcaccactagaaacctttactccaattcgaaacatgccttaacgcacagtgtgaattacccactctcgtggcccacagaggttgactcattcaggcccccttttgttcagatgaggaaactgaggctgactccgaagcctgggggctttcagatgtggagtgggtccctgtgcccaggtgatgaggggaccaggcgggtctggagcagggctggagtggggctcagatgtagtaggctggcagttaaaggtgccagatgtgagccaggctgctgggtttgaatcctggagctgcctcatagcagcagtaggactttgggtaacttacataggtgctgtatgcctcagtgacctcatctgtaatatagagatgataagagtacctgtctcattggtctactgagttgtccggattaactcattaaatgagttaaaactcatgaagcccttggaactgtgactgacacatagtaagtactcaataaaaaataactgctaagaccagccacagtggctcacacctgtaatctgagcattctgggaggccaaggcggaagaatcccttgagcccagtatttcaagaccagcctaaaggtcaacataggcagactctgtctctactatacatttttagattaaatttttataataataataaccactaaaatgtgattactaaagacagcttcttcacagtacaaagagatgctcttctgagtaccaactctttggaggataaactgcccttataccttcaaaaataacacttgccatatatcaagtcctttcaagtacctggagatttacccagcactctgagataaataccattatccctctgggcacacagaggctcagagaggtttagtcatttgcccaaagtcacacagcctgtacgaggccaggctgggactcaaactcagttctgactgattctaaaatcatgtgtttaactgctgcactctaggaccacccgcaatggatctgtgaaccagaaccagctctggttctgacctgcctagtagggcctttggcatttgggggaggaggccattggaagtccgaagcccccttccagattaggcatgattgcagtaagagaagagacagaccctttggccccccacccctgctcaggctcaaaaatgcagaccctgccgaaacagtccttctcacccagaagcaccccatagggtgggctgagtaaccttgggggcctcgtcagtcttgggctgccccatgccctgcacagcccgcctgaggtttgaggaaggggcagttggctaggcccagactggagaaagccaccccaccatggctcttctgcaagaacccccggccagccacaagcctaagccccctccttaaaagctcctcctctgaccttagctgtgcatcaagggagaaaagaaagctccaggccgggtgcggtggctcacacctgcaatcccagcactttgggagaccaaggctggcagatcattaggtcaggagttcgagaccagcctggccagcaaggtgaaaccccatctctactaaaattacaaaaaattagtcaggcatggtgacacgtgcctgtagtcccagctactctggaggctgaggcaggagaattgcttgaacccaggaggcgaaggttgcagtaaaccaagatcacgccactacactccagcctgggcgacagagcaagactctgtctc

SEQ ID NO: 2189 - protein, 239 aa, Homo sapiens
MHTHTHTHTTPKMADLLGSILSSMEKPPSLGDQETRRKAREQAARLKKLQEQEKQQKVEFRKRMEKEVSDFIQDSGQIKKKFQPMNKIERSILHDVVEVAGLTSFSFGEDDDCRYVMIFKKEFAPSDEELDSYRRGEEWDPQKAEEKRKLKELAQRQEEEAAQQGPVVVSPASDYKDKYSHLIGKGAAKDAAHMLQANKTYGCVPVANKRDTRSIEEAMNEIRAKKRLRQSGEELPPTS

SEQ ID NO: 2190 - protein, 213 aa, Homo sapiens
MAAAAAAGEARRVLVYGGRGALGSRCVQAFRARNWVTAEVGKLLGEEKVDAILCVAGGWAGGNAKSKSLFKNCDLMWKQSIWTSTISSHLATKHLKEGGLLTLAGAKAALDGTPGMIGYGMAKGAVHQLCQSLAGKNSGMPPGAAAIAVLPVTLDTPMNRKSMPEADFSSWTPLEFLVETFHDWITGKNRPSSGSLIQVVTTEGRTELTPAYF

SEQ ID NO: 2191 - protein, 244 aa, Homo sapiens
MEQLKSFQIIAHLKRLQEEINEVKTWSNRITEKQDILNNSLTTLSQDITKVDQSTTSMAKDVGLKITSVKTDIRRISGLVTDVISLTDSVQELENKIEKVEKNTVKNIGDLLSSSIDRTATLRKTASENSQRINSVKKTLTELKSDFDKHTDRFLSLEGDRAKVLKTVTFANDLKPKVYNLKKDFSRLEPLVNDLTLRIGRLVTDLLQREKEIAFLSEKISNLTIVQAEIKDIKDEIAHISDMN

SEQ ID NO: 2192 - protein, 108 aa, Homo sapiens
MQSKAPLMPAALRPSMSPAQQSSYYKRHRAEHIASDPEESPPSQLGTIVKEMCWRKSPSVSCLSIKLHSVWVCILPILAVLGLRILGSSRVSIPYHAHLGNRGTGQYR

SEQ ID NO: 2193 - protein, 475 aa, Homo sapiens [sequence omitted]

SEQ ID NO: 2194 - protein, 133 aa, Homo sapiens [sequence omitted]

SEQ ID NO: 2195 - protein, 124 aa, Homo sapiens
MLPSKAFEFATVKSMHGIFGCGLALPPVFTAELLYLTRACASDEQPFITALRPPPRPPPSALQFISRLVPIATCGLGGPPDILSFGSPVTPELLPFWGAHICDTLVCPVHFLHLEFLSCSHISI

SEQ ID NO: 2196 - protein, 139 aa, Homo sapiens [sequence omitted]

SEQ ID NO: 2197 - protein, 157 aa, Homo sapiens [sequence omitted]

SEQ ID NO: 2198 - protein, 392 aa, Homo sapiens
MLAPCFLYSLQNWDIIFNAQYPELPPDFIFGEDAEFLPDPSALQNLASWNPSNPECLLLVVKELVQQYHQFQCSRLRESSRLMFEYQTLLEEPQYGENMEIYAGKKNNWNLASWNPSNPECLLLVVKELVQQYHQFQCSRLRESSRLMFEYQTLLEEPQYGENMEIYAGKKNNWTGEFSARFLLKLPVDFSNIPTYLLKDVNEDPGEDVALLSVSFEDTEATQVYPKLYLSPRIEHALGGSSALHIPAFPGGGCLIDYVPQVCHLLTNKVQYVIQGYHKRREYIAAFLSHFGTGVVEYDAEGFTKLTLLLMWKDFCFLVHIDLPLFFPRDQPTLTFQSVYHFTNSGQLYSQAQKNYPYSPRWDGNEMAKRAKAYFKTFVPQFQEAAFANGKL

SEQ ID NO: 2199 - protein, 114 aa, Homo sapiens
MQTSFAAKEPGQARLLPGLARNRLRRHFPLSLPGPERSPPLPSRPLSGSLQVSIQKRLRAAQRWRPGGAEARGQMTRLGGKGGQQFPPGQKIISKDILALTALSVARKLSSVNC

SEQ ID NO: 2200 - protein, 123 aa, Homo sapiens
MGLPRPKRLKKKEFSLEEIYTNKNYKSPPANRCLETIFEEPKERNGTLISISQQKRKRVLEFQDFTVPRKRRARGKVKVAGSFTRAQKAAVQSRELDALLIQKLMELETFFAKEEEQEQSSGC

SEQ ID NO: 2201 - protein, 364 aa, Homo sapiens
MCFRVKFYPADPAALKEEITRYLVFLQIKRDLYHGRLLCKTSDAALLAAYILQAEIGDYDSGKHPEGYSSKFQFFPKHSEKLERKIAEIHKTELSGQTPATSELNFLRKAQTLETYGVDPHPCKDVSGNAAFLAFTPFGFVVLQGNKRVHFIKWNEVTKLKFEGKTFYLYEKKIILTYFAPTPEACKHLWKCGIENQAFYKLEKSSQVRTVSSSNLFFKGSRFRYSGRVAKEVMESSAKIKREPPEIHRAGMVPSRSCPSITHGPRLSSVPRTRRRAVHISIMEGLESLRDSAHSTPVRSTSHGDTFLPHVRSSRTDSNERVAVIADEAYSPADSVLPTPVAEHSLELMLLSRQINGATCSIEE

SEQ ID NO: 2202 - protein, 446 aa, Homo sapiens
MDSSAVVKGTNSHVPDCHTKGSSFLGKELSLDEAFPDQQNGSATNAWDQSSCSSPKWECTELIHDIPLPEHRSNTMFISETEREIMTLGQENQTSSVSDDRVKLSVSGADTSVSSVDGPVSQKAVQNENSYQMEEDGSLKQSILSSELLDHPYCKSPLEAPLVCSGLKLENQVGGGKNSQKASPVDDEQLSVCLSGFLDEVMKKYGSLVPLSEKEVLGRLKDVFNEDFSNRKPFINREITNYRARHQKCNFRIFYNKHMLDMDDLATLDGQNWLNDQVINMYGELIMDAVPDKVHFFNSFFHRQLVTKGYNGVKRWTKKVDLFKKSLLLIPIHLEVHWSLITVTLSNRIISFYDSQGIHFKFCVENIRKYLLTEAREKNRPEFLQGWQTAVTKCIPQQKNDSDCGVFVLQYCKCLALEQPFQFSQEDMPRVRKRIYKELCECRLMD

SEQ ID NO: 2203 - protein, 157 aa, Homo sapiens
MVIFRWWKISLRSEYRSTKPGEAKETHEDFLENSHLQGQTALIFGARILDYVINLCKGKFDFLERLSDDLLLTIISYLDLEDIARLCQTSHRFAKLCMSDKLWEQIVQSTCDTITPDVRALAEDTGWRQLFFTNKLQLQRQLRKRKQKYGNLREKQP

SEQ ID NO: 2204 - protein, 430 aa, Homo sapiens
MAEPQAESEPLLGGARGGGGDWPAGLTTYRSIRVGPGAAARWDLCIDQAVVFIEDAIQGYLFGWAHFQKNLWLLGYLVVLVVSLVDWTVSLSLVCHEPLRIRRLLRPFFLLQNSSMMKKTLKCIRWSLPEMASVGLLLAIHLCLFTMFGMLLFAGGKQDDGQDRERLTYFQNLPESLTSLLVLLTTANNPDVMIPAYSKNRAYAIFFIVFTVIGSLFLMNLLTAIIYSQFRGYLMKSLQTSLFRRRLGTRAAFEVLSSMVGEGGAFPQAVGVKPQNLLQVLQKVQLDSSHKQAMMEKVRSYGSVLLSAEEFQKLFNELDRSVVKEHPPRPEYQSPFLQSAQFLFGHYYFDYLGNLIALANLVSICVFLVLDADVLPAERDDFILGILNCVFIVYYLLEMLLKVFALGLRGYLSYPSNVFDGLLTVVLLVK

SEQ ID NO: 2205 - protein, 129 aa, Homo sapiens [sequence omitted]

SEQ ID NO: 2206 - protein, 102 aa, Homo sapiens [sequence omitted]

SEQ ID NO: 2207 - protein, 555 aa, Homo sapiens
MIVTGGLAWWNDFMVLACYNINDRQEELRVYLRTSNLDNAFAHVTKAQAETLLLSVFQDMVIVFRADCSICLYSIERKSDGPNTTAGIQVLQEVSMSRYIPHPFLVVSVTLTSVSTENGITLKMPQQARGAESIMLNLAGQLIMMQRDRSGPQIREKDSNPNNQRKLLPFCPPVVLAQSVENVWTTCRANKQKRHLLEALWLSCGGAGMKVWLPLFPRDHRKPHSFLSQRIMLPFHINIYPLAVLFEDALVLGAVNDTLLYDSLYTRNNAREQLEVLFPFCVVERTSQIYLHHILRQLLVRNLGEQALLLAQSCATLPYFPHVLELMLHEVLEEEATSREPIPDPLLPTVAKFITEFPLFLQTVVHCARKTEYALWNYLFAAVGNPKDLFEECLMAQDLDTAASYLIILQNMEVPAISRQHATLLFNTALEQGKWDLCRHMIRFLKAIGSGESETPPSTPTAQEPSSSGGFEFFRNRSISLSQSAENVPASKFSLQKTLSMPSGPSGKRWSKDSDCAENMYIDMMLWRHARRLLEDVRLKDLGCFAAQLGFELIS

SEQ ID NO: 2208 - protein, 1235 aa, Homo sapiens
MDHTASQNAQDLIGIPHLGVSGSSTKWHSELSPTEGPHSAGSSTPGFLSPMAELSHPSPPPPALGSLLQLPDGSPSWSMLEVASGPASTQQIKAGVPGRVHNGVSLPTFKNTETATHEAEPPLFQTAESGAIEMTSRKLASATANDSANPLHLSAAPENSRGPALSAEHTSSLVPSLHITTLGQEQAILSGAVPASPSTGTADFPSILTFLQPTENHASPSPVPEMPTLPAEGSDGSPPATRDLLLSSKVPNLLSTSWTFPRWKKDSVTAILGKNEEANVTIPLQAFPRKEVLSLHTVNGFVSDFSTGSVSSPIITAPRTNPLPSGPPLPSILSIQATQTVFPSLGFSSTKPEAYAAAVDHSGLPASASKQVRASPSSMDVYDSLTIGDMKKPATTDVFWSSLSAETGSLSTESIISGLQQQTNYDLNGHTISTTSWETHLAPTAPPNGLTSAADAIKSQDFKDTAGHSVTAEGFSIQDLVLGTSIEQPVQQSDMTMVGSHIDLWPTSNNNHSRDFQTAEVAYYSPTTRHSVSHPQLQLPNQPAHPLLLTSPGPTSTGSLQEMLSDGTDTGSEISSDINSSPERNASTPFQNILGYHSAAESSISTSVFPRTSSRVLRASQHPKKWTGAATNAADTVSSKVQPTAAAAVTLFLRKSSPPALSAALVAKGTSSSPLAVASGPAKSSSMTTLAKNVTNKAASGPKRTPGAVHTAFPFTPTYMYARTGHTTSTHTAMQGNMDTASGLLSTTYLPRKPQAMHTGLPNPTNLEMPRASTPRPLTVTAALTSITASVKATRLPPLRAENTDAVLPAASAAVVTTGKMASNLECQMSSKLLVKTVLFLTQRRVQISESLKFSIAKGLTQALRKAFHQNDVSAHVDILEYSHNVTVGYYATKGKLVYLPAVVIEMLGVYGVSNVTADLKQHTPHLQSVAVLASPWNPQPAGYFQLKTVLQFVSQADNIQSCKFAQTMEQRLQKAFQDAERKVLNTKSNLTIQIVSTSNASQAVTLVYVVGNQSTFLNGTVASSLLSQLSAELVGFYLTYPPLTIAEPLEYPNLDISETTRDYWVITVLQGVDNSLVGLHNQSFARVMEQRLAQLFMMSQQQGRRFKRATTLGSYTVQMVKMQRVPGPKDPAELTYYTLYNGKPLLGTAAAKILSTIDSQRMALTLHHVVLLQADPVVKNPPNNLWIIAAVLAPIAVVTVIIIIITAVLCRKNKNDFKPDTMINLPQRAKQVAQ

SEQ ID NO: 2209 - protein, 155 aa, Homo sapiens [sequence omitted]

SEQ ID NO: 2210 - protein, 104 aa, Homo sapiens
MTDLWTRGFPASPLIPADLWASFHGYRRKSKVSLQAAVPLGSQLCPSFSSPQGGCPIPEPPWAPASAGPYVCGLGFCPPVLVLICSLWFCSFFHPPTHLGPSSH

SEQ ID NO: 2211 - protein, 104 aa, Homo sapiens [sequence omitted]

SEQ ID NO: 2212 - protein, 120 aa, Homo sapiens
MRRAGSTRCSLAPGRKAEEPGNHVPSWKEALRTLLPRNPEQRLAGLQEQSRVRAVSWQRIKYPGHIEETCEDSNGEQFESEKPVLEARKFKIKVLASSVSAEDLISLLSRWHLVALPSRE

SEQ ID NO: 2213 - protein, 106 aa, Homo sapiens
MSHHARLSLLNFRTITVYFYFLNYHIVKLALWLCSFMCFDVCIDGCHNQEREHSPKPRDVHGAILHSMFLGSHSAPSPKHGAPACRCHRRQHHGLLNTVRHSSSKG

SEQ ID NO: 2214 - protein, 108 aa, Homo sapiens [sequence omitted]

SEQ ID NO: 2215 - protein, 109 aa, Homo sapiens [sequence omitted]

SEQ ID NO: 2216 - protein, 101 aa, Homo sapiens [sequence omitted]

SEQ ID NO: 2217 - protein, 809 aa, Homo sapiens
MLYPALAKESGYIAPQGACNKMATIDENGNQNGSGRPGFAFCQPLEHDLLSPVEKKPEATAKYVPSKVHFCSVPENEEDASLKRHLTPPQGNSPHSNERKSTHSNKPSSHPHSLKCPQAQAWQAGEDKRSSRLSEPWEGDFQEDHNANLWRRLEREGLGQSLSGNFGKTKSAFSSLQNIPESLRRHSSLELGRGTQEGYPGGRPTCAVNTKAEDPGRKAAPDLGSHLDRQVSYPRPEGRTGASASFNSTDPSPEEPPAPSHPHTSSLGRRGPGPGSASALQGFQYGKPHCSVLEKVSKFEQREQGSQRPSVGGSGFGHNYRPHRTVSTSSTSGNDFEETKAHIRFSESAEPLGNGEQHFKNGELKLEEASRQPCGQQLSGGASDSGRGPQRPDARLLRSQSTFQLSSEPEREPEWRDRPGSPESPLLDAPFSRAYRNSIKDAQSRVLGATSFRRRDLELGAPVASRSWRPRPSSAHVGLRSPEASASASPHTPREWHSVTPAEGDLARPVPPAARRGARRRLTPEQKKRSYSEPEKMNEVGIVEEAEPAPLGPQRNGMRFPESSVADRRRLFERDGKACSTLSLSGPELKQFQQSALADYIQRKTGKRPTSAAGCSLQEPGPLRERAQSAYLQPGPAALEGSGLASASSLSSLREPSLQPRREATLLPATVAETQQAPRDRSSSFAGGRRLGERRRGDLLSGANGGTRGTQRGDETPREPSSWGARAGKSMSAEDLLERSDVLAGPVHVRSRSSPATADKRQVRATSKSWPRTVPSSLEALVGLPNPPHSHPLSQFSFPCDYRKVAFVF

SEQ ID NO: 2218 - protein, 138 aa, Homo sapiens [sequence omitted]

SEQ ID NO: 2219 - protein, 179 aa, Homo sapiens [sequence omitted]

SEQ ID NO: 2220 - protein, 181 aa, Homo sapiens
MQRTGFQKPQKLEEPHRHALCPPTVSGASSNPCSETYHGKFANSEVEVKSIVDFVKDHGNIKAFISIHSYSQLLMYPYGYKTEPVPDQDELDLLSKAAVTALASLYGTKFNYGSIIKAIYQASGSTIDWTYSQGIKYSFTFELRDTGRYGFLLPASQIIPTAKETWLALLTIMEHTLNHPY

SEQ ID NO: 2221 - protein, 223 aa, Homo sapiens [sequence omitted]

SEQ ID NO: 2222 - protein, 107 aa, Homo sapiens [sequence omitted]

SEQ ID NO: 2223 - protein, 127 aa, Homo sapiens
MRGHADSVTGLSLSSEGSYLLSNAMDNTVRVWDVRPFAPKERCVKIFQGNVHNFEKNLLRCSWSPDGSKIAAGSADRFVYVWDTTSRRILYKLPGHAGSINEVAFHPDEPIIISASSDKRLYMGEIQ

SEQ ID NO: 2224 - protein, 114 aa, Homo sapiens
MRAFLPSARHSGFLTCTLTARQNLGVHKKDLRWDMEEQGPLLVCPPSPHLHSSPNLPLQSREKTSENIRSDSTEAQTGQQECAGHWEMWSRSSHSPYRPPTNYRNAKSAQPLPT

SEQ ID NO: 2225 - protein, 226 aa, Homo sapiens
MYCCRVTSQSLQLPYGPSVMVGFSPLQKHGLVIIPDGTPNGDVSHEPVAGAITVVSQEAAQVLESAGEGPLDVRLRKLAGEKEELLSQIRKLKLQLEEERQKCSRNDGTVGDLAGLQNGSDLQFIEMQRDANRQISEYKFKLSKAEQDITTLEQSISRLEGQVLRYKTAAENAEKVEDELKAEKRKLQRELRTALDKIEEMEMTNSHLAKRLEKMKANRTALLAQQ

SEQ ID NO: 2226 - protein, 462 aa, Homo sapiens
MFISDAFGEGELTPIAVDTTSQRNASPNSEPCSSDSVSEPECTTDSSSSKEHTSSSAIPGGVDIMVSEDMKLTDSELGKLANNIQELLYSASDICHDRAVKFLMSRAKDGFLEKLNSMEFITLSRLMETFILDTEQICGRKSTSLLGALQSQAIKFVNRFHEERKTKLSLLLDNERWKQADVPAEFQDLVDSLSDGKIALPEKKSGATEERKPAEVLIVEGQQYAVVGTVLLLIRIILEYCQCVDNIPSVTTDMLTRLSDLLKYFNSRSCQLVLGAGALQVVGLKTITTKNLALSSRCLQLIVHYIPVIRAHFEARLPPKQYSMLRHFDHITKDYHDHIAEISAKLVAIMDSLFDKLLSKYEVKAPVPSACFRNICKQMTKMHEAIFDLLPEEQTQMLFLRINASYKLHLKKQLSHLNVINDGGPQNGLVTADVAFYTGNLQALKGLKDLDLNMAEIWEQKR

SEQ ID NO: 2227 - protein, 234 aa, Homo sapiens
MRAPLCLLLLVAHAVDMLALNRRKKQVGTGLGGNCTGCIICSEENGCSTCQQRLFLFIRREGIRQYGKCLHDCPPGYFGIRGQEVNRCKKCGATCESCFSQDFCIRCKRQFYLYKGKCLPTCPPGTLAHQNTRECQGECELGPWGGWSPCTHNGKTCGSAWGLESRVREAGRAGHEEAATCQVLSESRKCPIQRPCPGERSPGQKKGRKDRRPRKDRKLDRRLDVRPRQPGLQP

SEQ ID NO: 2228 - protein, 436 aa, Homo sapiens
MLWNFKPHARAYRYVGHKDVVTSVQFSPHGNLLASASRDRTVRLWIPDKRGKFSEFKAHTAPVRSVDFSADGQFLATASEDKSIKVWSMYRQRFLYSLYRHTHWVRCAKFSPDGRLIVSCSEDKTIKIWDTTNKQCVNNFSDSVGFANFVDFNPSGTCIASAGSDQTVKVWDVRVNKLLQHYQVHSGGVNCISFHPSGNYLITASSDGTLKILDLLEGRLIYTLQGHTGPAFTVSFSKGGELFASGGADTQVLLWRTNFDELHCKGLTKRNLKRLHFDSPPHLLDIYPRTPHPHEEKVETVEINPKLEVIDLQISTPPVMDILSFDSTTTTETSGRTLPDKGEEACGYFLNPSLMSPECLPTTTKKKTEDMSDLPCESQRSIPLAVTDALEHIMEQLNVLTQTVSILEQRLTLTEDKLKDCLENQQKLFSAVQQKS

SEQ ID NO: 2229 - protein, 162 aa, Homo sapiens
MNSRTASARGWFSSRPPTSESDLEPATDGPASETTTLSPEATTFNDTRIPDAAGGTAGVGTMLLSFGIITVIGLAVALVLYIRKKKRLEKLRHQLMPMYNFDPTEEQDELEQELLEHGRDAASVQAATSVQAMQGKTTLPSQGPLQRPSRLVFTDVANAIHV

SEQ ID NO: 2230 - protein, 842 aa, Homo sapiens
MERYKALEQLLTELDDFLKILDQENLSSTALVKKSCLAELLRLYTKSSSSDEEYIYMNKVTINKQQNAESQGKAPEEQGLLPNGEPSQHSSAPQKSLPDLPPPKMIPERKQLAIPKTESPEGYYEEAEPYDTSLNGHSGGFLPTGVPRWVQVPERVIYATITLEDGEAVSSSYESYDEEDGSKGKSAPYQWPSPEAGIELMRDARICAFLWRKKWLGQWAKQLCVIKDNRLLCYKSSKDHSPQLDVNLLGSSVIHKEKQVRKKEHKLKITPMNADVIVLGLQSKDQAEQWLRVIQEVSGLPSEGASEGNQYTPDAQRFNCQKPDIAEKYLSASEYGSSVDGHPEVPETKDVKKKCSAGLKLSNLMNLGRKKSTSLEPVERSLETSSYLNVLVNSQWKSRWCSVRDNHLHFYQDRNRSKVAQQPLSLVGCEVVPDPSPDHLYSFRILHKGEELAKLEAKSSEEMGHWLGLLLSESGSKTDPEEFTYDYVDADRVSCIVSAAKNSLLLMQRKFSEPNTYIDGLPSQDRQEELYDDVDLSELTAAVEPTEEATPVADDPNERESDRVYLDLTPVKSFLHGPSSAQAQASSPTLSCLDNATEALPADSGPGPTPDEPCIKCPENLGEQQLESLEPEDPSLRITTVKIQTEQQRISFPPSCPDAVVATPPGASPPVKDRLRVTSAEIKLGKNRTEAEVKRYTEEKERLEKKKEEIRGHLAQLRKEKRELKETLLKCTDKEVLASLEQKLKEIDEECRGEESRRVDLELSIMEVKDNLKKAEAGPVTLGTTVDTTHLENPKAVTPASAPDCTPVNSATTLKNRPLSVVVTGKGTVLQKAKEWEKKGAS

SEQ ID NO: 2231 - protein, 141 aa, Homo sapiens
MISAHCSNLHFLGSSESPTLASQVGEITGTHHHTRLIFVFLVETGFHHVGHAGLELLTSSDPPTLASRSAGITGMSHRARPHGISRGEQVTLGLPLELLECVSWPLCGSPLRKAQIVSTPPSPLAALRVPVGAEGWGGTEQ

SEQ ID NO: 2232 - protein, 1139 aa, Homo sapiens
MMMGTRTRRAARLTMMGTRTLRAARLMMMGTRTRRAARLTMMGTRTLRAARLMMMGTRTHRTAWLMIMGTRTLRTARLMMRGTRTLRAARLMIMGTRTRRAARLTMMGTRTHRTARLTMMGTRTHRTARLTMMGTRTHRAARLTMMGTRTLRAAWLMVMGTRTRRAARLMIMGTRTLRAARLMIMGTRTHRTARLMMRGTRTLRSARLMMRGTRTLRAARVMIMGTRTRRAARLMIMGTRTLRAAQLMMMGTRTHRAARLMMMGTRTHRTARLMMMGTRTLRAARLMMMGTRTLRAARLMIMGTRTHRTARLMMRGTRTLRTARLMMRGTRTLRAARLTIMGTRTHRAARLTIMGTRTHRTARLTMMGTRTLRAARLTMMGTRTLRAARLMIMGTRTHRAARLMMMGTRTLRAARLMMMGTRTLRAARLMMMGTRTLRAARLMMMGTRTLRAARLMMMGTRTHRAARLMRGTRTHRTARLMMRGTRTLRAARLTMMGTRTHRAARLTMMGTRTHRAARLTMMGTRTLRAARLTMMGTRTHRTARLTMMGTRTLRAARLMMMGTRTLRAARLMMMGTRTHRAAWLMMMGTRTLRAARLTMMGTRTLRAARLMMMGSRTLRAAQLMMMGTRTHRTAWLMIMGTRTLRTARLMMRGTRTLRAARLMIMGTRTRRAARLMIMGTRTLRAARLTIMGTRTHRAARLMMMGTRTLRAARLTIMGTRTHRTARLTMMGTRTLRAARLMMMGTRTLRAARLMMMGTRTHRAARLMMMGTRTLRAARLMMMGTRTLRAARLMMMGTRTLRAARLMMMGTRTHRTARLMMRGTRTLRTARLMMRGTRTRRAARLTIMGTRTRRTARLTMMGTRTHRTARLTMMGTRTLRAARLTMMGTRTHRTARLTMMGTRTLRAARLMMMGTRTLRAARLMMMGTRTHRAARLMMMGTRTLRAARLMMMGTRTRRAARLMMMGSRTLRAARLMMMGTRTHRTARLTMMGTRTHRTARLTMMGTRTLRAARLTMMGTRTHRAARLTMMGTRTHRAARLTMMGTRTLRAARLTMMGTRTHRTARLTMMGTRTLRAARLMMMGTRTDRTARLTMMGTRTLRAARLMMMGTRTLRTARLMIMGTRTLRAARSTVAETRPGA

SEQ ID NO: 2233 - protein, 194 aa, Homo sapiens [sequence omitted]

SEQ ID NO: 2234 - protein, 369 aa, Homo sapiens [sequence omitted]

SEQ ID NO: 2235 - protein, 304 aa, Homo sapiens
MAEFLDDQETRLCDNCKKEIPVFNFTIHEIHCQRNIGMCPTCKEPFPKSDMETHMAAEHCQVTCKCNKKLEKRLLKKHEETECPLRLAVCQHCDLELSILKLKEHEDYCGARTELCGNCGRNVLVKDLKTHPEVCGREGEEKRNEVAIPPNAYDESWGQDGIWIASQLLRQIEALDPPMRLPRRPLRAFESDVFHNRTTNQRNITAQVSIQNNLFEEQERQERNRGQQPPKEGGEESANLDFMLALSLQNEGQASSVAEQDFWRAVCEADQSHGGPRSLSDIRVQLTRSCCLVNFVRSSTQRNC

SEQ ID NO: 2236 - protein, 216 aa, Homo sapiens [sequence omitted]

SEQ ID NO: 2237 - protein, 477 aa, Homo sapiens
MSVSNLSWLKKKSQSVDINAPGFNPLAGAGKQTPQASKPPAPKTPIIEEEQNNAANTQKHPSRRSELKRFYTIDTGQKKTLDKKDGRRMSFQKPKGTIEYTVESRDSLNSIALKFDTTPNELVQLNKLFSRAVVTGQVLYVPDPEYVSSVESSPSLSPVSPLSPTSSEAEFDKTTNPDVHPTEATPSSTFTGIRPARVVSSTSEEEEAFTEKFLKINCKYITSGKGTVSGVLLVTPNNIMFDPHKNDPLVQENGCEEYGIMCPMEEVMSAAMYKEILDSKIKESLPIDIDQLSGRDFCHSKKMTGSNTEEIDSRIRDAGNDSASTAPRSTEESLSEDVFTESELSPIREELVSSDELRQDKSSGASSESVQTVNQAEVESLTVKSESTGTPGHLRSDTEHSTNEVGTLCHKTDLNNLEMAIKEDQIADNFQGISGPKEDSTSIKGNSDQDSFLHENSLHQEESQKENMPCGETAEFK

SEQ ID NO: 2238 - protein, 151 aa, Homo sapiens
MGRQSPADGWALWAATLCEQGVGPIHFKDQSPALGECSWPRLGITFRGPSDSGGACCGLPPASGVAEQTPGPGPVPFSPPGQTQTQTLGGWNGGQGSMGDVGMKVGAGGAGGPGTWMGVDRPFSLEARSAALAGSEAPGTTSFPDFPVWSV

SEQ ID NO: 2239 - protein, 456 aa, Homo sapiens [sequence omitted]

SEQ ID NO: 2240 - protein, 102 aa, Homo sapiens
MVMVGATSLGAYGGERRSWVPSAHHLGEGLVPDPTSGFVCQPGAFFSPYLLDYFITLFLPEMHLLLDWSRSKPCSFTEALPVGISCRIPPSRDQSVLWLFHK

SEQ ID NO: 2241 - protein, 136 aa, Homo sapiens [sequence omitted]

SEQ ID NO: 2242 - protein, 148 aa, Homo sapiens [sequence omitted]

SEQ ID NO: 2243 - protein, 539 aa, Homo sapiens
MRISFKAGVYVPHPTGHVTFITLWWNEKKGIWDMINSGNAIVCLRQQRDSGSRGRPRASVTSPDCRVTVAYPGGATRPAGKMTSPSELLQTSARSGSWRAGGGWETSRAHGTDRRQKPGGVRWAPDPCPPSSRAAPGGPAPSVNAAGRPIRAGRGAAQPISGQSSRALPRSRALPRSRELPARCRRDWERAPQRTLARGSAQSVCEDPARRPPGDPMASEGLAGALASVLAGQGSSVHSCDSAPAGEPPAPVRLRKNVCYVVLAVFLSEQDEVLLIQEAKRECRGSWYLPAGRMEPGETIVEALQREVKEEAGLHCEPETLLSVEERGPSWVRFVFLARPTGGILKTSKEADAESLQAAWYPRTSLPTPLRAHDILHLVELAAQYRQQARHPLILPQELPCDLVCQRLVATFTSAQTVWVLVGTVGMPHLPVTACGLDPVEQRGGMKMAVLRLLQECLTLHHLVVEIKGLLGLQHLGRDHSDGICLNVLVTVAFRSPGIQDEPPKVRGENFSWWKVMEEDLQSQLLQRLQGSSVVPVNR

SEQ ID NO: 2244 - protein, 434 aa, Homo sapiens
MEAGAGAGAGAAGWSCPGPGPTVTTLGSYEASEGCERKKGQRWGSLERRGMQAMEGEVLLPALYEEEEEEEEEEEEVEEEEEQVQKGGSVGSLSVNKHRGLSLTETELEELRAQVLQLVAELEETRELAGQHEDDSLELQGLLEDERLASAQQAEVFTKQIQQLQGELRSLREEISLLEHEKESELKEIEQELHLAQAEIQSLRQAAEDSATEHESDIASLQEDLCRMQNELEDMERIRGDYEMEIASLRAEMEMKSSEPSEELQELRERYHFLNEEYRALQESNSSLTGQLADLESERTQRATERWLQSQTLSMTSAESQTSEMDFLEPDPEMQLLRQQLRDAEEQMHGMKNKCQELCCELEELQHHRQVSEEEQRRLQRELKCAQNEVLRFQTSHSVTQSSPTPNPPIFSLPLVGLVVISALLWCWWAETSS

SEQ ID NO: 2245 - protein, 361 aa, Homo sapiens
MSTAREQPIFSTRAHVFQIDPATKRNWIPAGKHALTVSYFYDATRNVYRIISIGGAKAIINSTVTPNMTFTKTSQKFGQWADSRANTVYGLGFASEQHLTQFAEKFQEVKEAARLAREKSQDGGELTSPALGLASHQVPPSPLVSANGPGEEKLFRSQSADAPGPTERERLKKMLSEGSVGEVQWEAEFFALQDSNNKLAGALREANAAAAQWRQQLEAQRAEAERLRQRVAELEAQAASEVTPTGEKEGLGQGQSLEQLEALVQTKDQEIQTLKSQTGGPREALEAAEREETQQKVQDLETRNAELEHQLRAMERSLEEARAERERARAEVGRAAQLLDVRLFELSELREGLARLAEAAP

SEQ ID NO: 2246 - protein, 170 aa, Homo sapiens
MAGTLLSPPSGVPLERLIRVATERGYTAQGEMFSVADMGRLAQEVLGCQAKLLSGGLGGPNRDLVLQHLVTGHPLLIPYDEDFNHEPCQRKGHKAHWAGSCWVFGLCPVSATLRTLSCRACSTQCWARPANHHPCQRRAPRELSTCCPSRARVGTISCGTTTRSGRATCS

SEQ ID NO: 2247 - protein, 317 aa, Homo sapiens
MRKTSNSCIMENGHQPGTGPGDGPPEIAQNFSAPDPPRPRPVSLSLRLPHQPVTAITRVSDRFSGETSAAALSPMSAATLGGLNPSPSEVITPWTPSPSEKNSSFTWSVPSSGYGAVTASKHSNSPPLVTPPQSPVSPQPPAITQVHRQGERRRELVRSQTLPRTSEAQARKALFEKWEQETAAGKGKGEARARLKRSQSFGVASASSIKQILLEWCRSKTLGYQHVDLQNFSSSWSDGMAFCALVHSFFPDAFDYNSLSPTQRQKNFELAFTMAENLANCERLIEVEDMMVMGRKPDPMCVFTYVQSLYNHLRRFE

SEQ ID NO: 2248 - protein, 562 aa, Homo sapiens
MGKDQELLEAARTGNVALVEKLLSGRKGGILGGGSGPLPLSNLLSIWRGPNVNCTDSSGYTALHHAALNGHKDIVLKLLQYEASTNVADNKGYFPIHLAAWKGDVEIVKILIHHGPSHSRVNEQNNENETALHCAAQYGHSEVVAVLLEELTDPTIRNSKLETPLDLAALYGRLRVVKMIISAHPNLMSCNTRKHTPLHLAARNGHKAVVQVLLEAGMDVSCQTEKGSALHEAALFGKVDVVRVLLETEYLEGVGRSTVPEEPVQEDATQETHISSPVESPSQKTKSETVTGELSKLLDEIKLCQEKDYSFEDLCHTISDHYLDNLSKISEEELGKNGSQSVRTSSTINLSPGEVEEEDDDENTCGPSGLWEALTPCNGCRNLGFPTLAQESYPKKRNYTMEIVPSASLDTFPSENENFLCDLMDTAVTKKPCSLEIARAPSPRTDNASEVAVTTPGTSNHRNSSTGPTPDCSPPSPDTALKNIVKVIRPQPKQRTSIVSSLDFHRMNHNQEYFETNTSTGCTSFTASPPASPPTSSVGTTEVKNEGTNHTDDLSRQDDNDP

SEQ ID NO: 2249 - protein, 150 aa, Homo sapiens [sequence omitted]

SEQ ID NO: 2250 - protein, 142 aa, Homo sapiens
MAGRGRALFPAGALVLGQVSALAVGSNSPSGQSRDGATLQNAHPQVESWVPRAQTHPAPPQTWAPFFTMHSSEQPCRQTWRASVLSSCEGLCLGPWRHCGAGTGRAPANIKGVVSMSMQGCLIAVSEFPTGSCRALWEHTLF

SEQ ID NO: 2251 - protein, 119 aa, Homo sapiens
MDACTRTEHKLSRDSPSNKLLYAKEISTYKKMVEDYYKGIRQMVQVSDQDMNTHLAEISRAHTDSLNTLVALHQLYQYTQKYYDEIINALEEDPAAQKMQLAFRLQQIAAALENKVTDL

SEQ ID NO: 2252 - protein, 100 aa, Homo sapiens
MRRARPKGDPLHIPSHASAHCSPGPSVPPLAGAVSLAWELMAPFCVPTGSFRARLRPHHYRHPGGTDFLLCGRLPPAVPEQEPQWLLRPWGHRRVLPSGY

SEQ ID NO: 2253 - protein, 114 aa, Homo sapiens [sequence omitted]

SEQ ID NO: 2254 - protein, 161 aa, Homo sapiens
MVLVLVLVVMCWHVRFLFSFPLLSASTFCSLRLPTEYERNGRYEGSSRNVSAEQKDENKEAKPRSLRFTWSMKTTSSMDPGDMMREIRKVLDANNCDYEQRERFLLFCVHGDGHAENLVQWEMEVCKLPRLSLNGVRFKRISGTSIAFKNIASKIANELKL

SEQ ID NO: 2255 - protein, 117 aa, Homo sapiens
MYKVEYLFTSQCIRNLFTQAIILKTALQVVCETFPEFISTSALSVASSIPELKKRPLPTASNPAFLVILLFFFNFKFWDTCAEHAGLLHRYTCAYVYLCNMVVTVNMVVYCIYQPVI

SEQ ID NO: 2256 - protein, 121 aa, Homo sapiens [sequence omitted]

SEQ ID NO: 2257 - protein, 193 aa, Homo sapiens
MPQAELGIQVCTCRLRGSVSRCCSHREFRRQPSPCAAGIGLLHLGSTASRQVKPPRLPPPPWGRSGEKLPFTPFPGCSLSRWHASPQTQVAFGPRWVSLLPLPHTPSGHWDPCPSDVLGSRSGASHCGKRPGAWPERQPRAGPSPESWSRAREAPIPPRPAALSAVSSICSSFHPLVGPPSPFPLPLVPSAGR

SEQ ID NO: 2258 - protein, 105 aa, Homo sapiens
MVFGFPFLSYFTENNGLQLHPSCCKRHHFVPFYGCVVFHGVYTSRFLYLLIGRWALKLAPCICNCELCCCKRVCMCLFHIVTSFPLTRLQIILRGYSYQNRVALV

SEQ ID NO: 2259 - protein, 171 aa, Homo sapiens [sequence omitted]

SEQ ID NO: 2260 - protein, 111 aa, Homo sapiens [sequence omitted]

SEQ ID NO: 2261 - protein, 109 aa, Homo sapiens [sequence omitted]

SEQ ID NO: 2262 - protein, 143 aa, Homo sapiens [sequence omitted]

SEQ ID NO: 2263 - protein, 197 aa, Homo sapiens
MALNNFLFAQCACYFLAFLFSFVVVVPLSENGHDFRGRCLLFTEGMWLSANLTVQERERFTVQEWGPPAACRFSLLASLLSLLLAAAHAWRTLFFLCKGHEGSFFSAFLNLLVSAFVVFLVFIASTIVSVGFTMWCDTITEKGTVPHSCEELQDIDLELGVDNSAFYDQFAIAQVGGSGQEGRLAMLGGGHLLLDIC

SEQ ID NO: 2264 - protein, 108 aa, Homo sapiens [sequence omitted]

SEQ ID NO: 2265 - protein, 100 aa, Homo sapiens
MNNSSLLRPSPKAQGPLVSAVCTSSVRRQDSRSMKRAGQKTPTLAGRHVPLKIKKEAIWEQCSSYVRPGHFLFTGDYKTFVLSSLDVDAILGLSPPAPRH

SEQ ID NO: 2266 - protein, 169 aa, Homo sapiens [sequence omitted]

SEQ ID NO: 2267 - protein, 482 aa, Homo sapiens
MATGGGIRAMTSLYGQLAGLKELGLLDCVSYITGASGSTWALANLYEDPEWSQKDLAGPTELLKTQVTKNELGVLAPSQLQRYRQELAERARLGYPSCFTNLWAPINEALLHDEPHDHKLSDQREALSHGQNPLPIYCALNTKGQSLTTFEFGEWCEFSPYEVGFPKYGAFIPSELFGSEFFMGQLMKRLPESRICFLEGIWSNLYAANLQDSLYWASEPSQFWDRWVRNQANLDKEQVPLLKIEEPPSTAGRIAEFFTDLLTWRPLAQATHNFLRGLHFHKDYFQHPHFSTWKATTLDGLPNQLTPSEPHLCLLDVGYLINTSCLPLLQPTRDVDLILSLDYNLHGAFQQLQLLGRFCQEQGIPFPPISPSPEEQLQPRECHTFSDPTCPGAPAVLHLPLVSDSFREYSAPGVRRTPEEAAAGEVNLSSSDSPYHYTKVTYSQEDVDKLLHLTHYNVCNNQEQLLEALRQAVQRRRQRRPH

SEQ ID NO: 2268 - protein, 520 aa, Homo sapiens
MNYKQKDLDNFTSKGKHLLSELKKIHSSDFSLVKTDMESTVDKWLDVSEKLEENMDRLRVSLSIWDDVLSTRDEIEGWSNNCVPQMAENISNLDNHLRAEELLKEFESEVKNKALRLEELHSKVNDLKELTKNLETPPDLQFIEADLMQKLEHAKEITEVAKGTLKDFTAQSTQVEKFINDITTWFTKVEESLMNCAQNETCEALKKVKDIQKELQSQQSNISSTQENLNSLCRKYHPAELESLGRAMTGLIKKHEAVSQLCSKTQASLQESLEKHFSESMQEFQEWFLGAKAAAKESSDRTGDSKVLEAKLHDLQNILDSVSDGQSKLDAVTQEGQTLYAHLSKQIVSSIQEQITKANEEFQAFLKQCLKDKQALQDCASELGSFEDQHRKLNLWIHEMEERFNTENLGESKQHIPEKKNEVHKVEMFLGELLAARESLDELSQRGQLLSEEGHGAGQEGRLCSQLLTSHQNLLRMTKEKLRSCQVALQEHEALEEALQSMWFWVKAIQDRLACAVFTP

SEQ ID NO: 2269 - protein, 109 aa, Homo sapiens [sequence omitted]

SEQ ID NO: 2270 - protein, 103 aa, Homo sapiens [sequence omitted]

SEQ ID NO: 2271 - protein, 103 aa, Homo sapiens
MRQSLVLSPKLECSGTISGHCNHRLPCSNNSPASAPRVAGITSVCHHAQLIFVFLVETGFYHVGQAGLELLTSSDLPSSASQSAGITGVSHHTWPKLVYIRTR

SEQ ID NO: 2272 - protein, 152 aa, Homo sapiens [sequence omitted]
